(19) United States
(12) Patent Application Publication
(10) Pub. No.: US 2010/0081129 A1
(43) Pub. Date: Apr. 1, 2010

(54) Genemap of the human genes associated with crohn's disease

(76) Inventors: Abdelmajid Belouchi, Ville St-Laurent (CA); John Verner Raelson, Hudson (CA); Walter Edward Bradley, Montreal (CA); Bruno Paquin, Chateauguay (CA); Hélene Fournier, Montreal (CA); Quynh Nguyen-Huu, Longveuil (CA); Pascal Croteau, Laval (CA); Réne Allard, Montreal (CA); Sophie Debrus, Montreal (CA); Valerie Serre, Kirkland (CA); Paul Van Eerdewegh, Carlisle, MA (US); Randall David Little, Laval (CA); Jonathan Segal, Efrat (IL); Tim Keith, Bedford, MA (US)

Correspondence Address: DOWELL & DOWELL P.C., 103 Oronoco St., Suite 220, Alexandria, VA, 22314, US

(21) Appl. No.: 11/919,503

(22) PCT Filed: May 1, 2006
(86) PCT No.: PCT/CA2006/000703

§ 371 Date: Sep. 24, 2009

Related U.S. Application Data
(60) Provisional application No. 60/675,841, filed on Apr. 29, 2005.

(51) Int. Cl. C12Q 1/68

(52) U.S. Cl. 435/6

(57) ABSTRACT

The present invention relates to the selection of a set of polymorphism markers for use in genome wide association studies based on linkage disequilibrium mapping. In particular, the invention relates to the fields of pharmacogenomics, diagnostics, patient therapy and the use of genetic haplotype information to predict an individual's susceptibility to Crohn's disease and/or their response to a particular drug or drugs.

### CROSS REFERENCE TO RELATED APPLICATIONS

[0001] This application is entitled to priority pursuant to 35 U.S.C. §119(e) to U.S. provisional patent application No. 60/675,841, which was filed on Apr. 29, 2005, which is incorporated herein in its entirety.

### FIELD OF THE INVENTION

[0002] The invention relates to the field of genomics and genetics, including genome analysis and the study of DNA variations. In particular, the invention relates to the fields of pharmacogenomics, diagnostics, patient therapy and the use of genetic haplotype information to predict an individual's susceptibility to Crohn's disease and/or their response to a particular drug or drugs, so that drugs tailored to genetic differences of population groups may be developed and/or administered to the appropriate population.

[0003] The invention also relates to a GeneMap for Crohn's disease, which links variations in DNA (including both genic and non-genic regions) to an individual's susceptibility to Crohn's disease and/or response to a particular drug or drugs. The invention further relates to the genes disclosed in the GeneMap (see Tables 8, 9, and 19-24), which is related to methods and reagents for detection of an individual's increased or decreased risk for Crohn's disease by identifying at least one polymorphism in one or a combination of the genes from the GeneMap. Also related are the candidate regions identified in Table 1, which are associated with Crohn's disease. In addition, the invention further relates to nucleotide sequences of those genes including genomic DNA sequences, cDNA sequences, single nucleotide polymorphisms (SNPs), other types of polymorphisms (insertions, deletions, microsatellites), alleles and haplotypes (see Sequence Listing and Tables 2-7, 11-18).

[0004] The invention further relates to isolated nucleic acids comprising these nucleotide sequences and isolated polypeptides or peptides encoded thereby. Also related are expression vectors and host cells comprising the disclosed nucleic acids or fragments thereof, as well as antibodies that bind to the encoded polypeptides or peptides.

[0005] The present invention further relates to ligands that modulate the activity of the disclosed genes or gene products. In addition, the invention relates to diagnostics and therapeutics for Crohn's disease, utilizing the disclosed nucleic acids, polymorphisms, chromosomal regions, gene maps, polypeptides or peptides, antibodies and/or ligands and small molecules that activate or repress relevant signaling events.

### BACKGROUND OF THE INVENTION

[0006] Crohn's disease is an Inflammatory Bowel Disease (IBD) in which inflammation extends beyond the inner gut lining and penetrates deeper layers of the intestinal wall of any part of the digestive system (esophagus, stomach, small intestine, large intestine, and/or anus). Crohn's disease is a chronic, lifelong disease which can cause painful, often life altering symptoms including diarrhea, cramping and rectal bleeding. Crohn's disease occurs most frequently in the industrialized world and the typical age of onset falls into two distinct ranges, 15 to 30 years of age and 60 to 80 years of age. The highest mortality is during the first years of disease, and in cases where the disease symptoms are long lasting, an increased risk of colon cancer is observed. Crohn's disease presently accounts for approximately two thirds of IBD-related physician visits and hospitalizations, and 50 to 80% of Crohn's disease patients eventually require surgical treatment. Development of Crohn's disease is influenced by environmental and host specific factors, together with “exogenous biological factors” such as constituents of the intestinal flora (the naturally occurring bacteria found in the intestine). It is believed that in genetically predisposed individuals, exogenous factors such as infectious agents, and host-specific characteristics such as intestinal barrier function and/or blood supply, combine with specific environmental factors to cause a chronic state of improperly regulated immune system function. In this hypothetical model, microorganisms trigger an immune response in the intestine, and in susceptible individuals, this immune response is not turned off when the microorganism is cleared from the body. The chronically “turned on” immune response causes damage to the intestine resulting in the symptoms of Crohn's disease.

[0007] Current treatments for Crohn's disease are primarily aimed at reducing symptoms by, suppressing inflammation and do not address the root cause of the disease. Despite a preponderance of evidence showing inheritance of a risk for Crohn's disease through epidemiological studies and genome wide linkage analyses, the genes affecting Crohn's disease have yet to be discovered (Hugot J P, and Thomas G., 1998). There is a need in the art for identifying specific genes related to Crohn's disease to enable the development of therapeutics that address the causes of the disease rather than relieving its symptoms. The failure in past studies to identify causative genes in complex diseases, such as Crohn's disease, has been due to the lack of appropriate methods to detect a sufficient number of variations in genomic DNA samples (markers), the insufficient quantity of necessary markers available, and the number of needed individuals to enable such a study. The present invention addresses these issues.

[0008] The DNA sequences between two human genomes are 99.9% identical. The variations in DNA sequence between individuals can be, as an example, deletions of small or large stretches of DNA, insertions of stretches of DNA, variations in the number of repetitive DNA elements, and changes in single base positions in the genome called “single nucleotide polymorphisms” (SNPs). Human DNA sequence variation accounts for a large fraction of observed differences between individuals, including susceptibility to disease.

[0009] Many common diseases, like Crohn's disease, are complex genetic traits and are believed to involve several disease-genes rather than single genes, as is observed for rare diseases. This makes detection of any particular gene substantially more difficult than in a rare disease, where a single gene mutation that segregates according to a Mendelian inheritance pattern is the causative mutation. Any one of the multiple interacting gene mutations involved in the etiology of a complex disease will impart a lower relative risk for the disease than will the single gene mutation involved in a simple genetic disease. Low relative risk alleles are more difficult to detect and, as a result, the success of positional cloning using linkage mapping that was achieved for simple genetic disease genes has not been repeated for complex diseases.

[0010] Several approaches have been proposed to discover and characterize multiple genes in complex genetic traits. These gene discovery methods can be subdivided into hypothesis-free disorder association studies and hypothesis-driven candidate gene or region studies. The candidate gene approach relies on the analysis of a gene in patients who have a disorder in which the gene is thought to play a role. This approach is limited in utility because it only provides for the investigation of genes with known functions. Although variant sequences of candidate genes may be identified using this approach, it is inherently limited by the fact that variant sequences in other genes that contribute to the phenotype will be necessarily missed when the technique is employed. Genome-wide scans (GWS) have been shown to be efficient in identifying Crohn's disease susceptibility genes (NOD2/CARD15 and OCTN). In contrast to the candidate gene approach, a GWS searches throughout the genome without any a priori hypothesis and consequently can identify genes that are not obvious candidates for the disease as well as genes that are relevant candidates for the disease it can also identify chromosomal regions that are structurally important where mutations can influence gene function of specific genes.

[0011] Family-based linkage mapping methods were initially used for disorder locus identification. This technique locates genes based on the relatively limited number of genetic recombination events within the families used in the study, and results in large chromosomal regions containing hundreds of genes, any one of which could be the disorder-causing gene. Population-based, or linkage disequilibrium (LD) mapping is based on the premise that regions adjacent to a gene of interest are co-transmitted through the generations along with the gene. As a result, LD extends over shorter genetic regions than does linkage (Hewett et al., 2002), and can facilitate detection of genes with lower relative risk than family linkage mapping approaches. LD-based mapping also defines much smaller candidate regions which may contain only a few genes, making the identification of the actual disorder gene much easier.

[0012] It has been estimated that a GWS that uses a general population and case/control association (LD) analysis would require approximately 700,000 SNP markers (Carlson et al., 2003). The cost of a GWS at this marker density for a sufficient sample size for statistical power is economically prohibitive. The use of a special founder population (genetic isolate), such as the French Canadian population of Quebec, is one solution to the problem with LD analysis. The French Canadian population in Quebec (Quebec Founder Population—QFP) provides one of the best resources in the world for gene discovery based on its high levels of genetic sharing and genetic homogeneity. By combining DNA collected from the QFP, high throughput genotyping capabilities and proprietary algorithms for genetic analysis, a comprehensive genome-wide association study was facilitated. The present invention relates specifically to a set of Crohn's disease-causing genes (GeneMap) and targets which present attractive points of therapeutic intervention.

[0013] In view of the foregoing, identifying susceptibility genes associated with Crohn's disease and their respective biochemical pathways will facilitate the identification of diagnostic markers as well as novel targets for improved therapeutics. It will also improve the quality of life for those afflicted by this disease and will reduce the economic costs of these afflictions at the individual and societal level. The identification of those genetic markers would provide the basis for novel genetic tests and eliminate or reduce the therapeutic methods currently used. The identification of those genetic markers will also provide the development of effective therapeutic intervention for the battery of laboratory, radiological, and endoscopic evaluations typically required to diagnose Crohn's disease. The present invention satisfies this need and provides related advantages as well.

### BRIEF DESCRIPTION OF THE DRAWINGS

[0014] FIGS. 1 to 8: Graphical representation of networks 1 to 23. Lists of directly interacting genes, as described in the text, were imported in the IPA software from Ingenuity Systems Inc. to generate networks of interacting genes (see Table 19 for the list of genes imported). These networks are based on functional relationships between gene products using known interactions in the literature. For each network, some nodes were manually extended to include good candidate genes that could play a role in the biochemical pathways of Crohn's disease. See Table 20 for a summary of the networks generated.

[0015] FIGS. 9-16: Graphical representation of networks 1b to 17b. Lists of directly and indirectly interacting genes, as described in the text, were imported in the IPA software from Ingenuity Systems Inc. to generate networks of interacting genes (see Table 19 for the list of genes imported). These networks are based on functional relationships between gene products using known interactions and relationships in the literature. For each network, some nodes were manually extended to include good candidate genes that could play a role in the biochemical pathways of Crohn's disease. See Table 21 for a summary of the networks generated.

[0016] FIGS. 17-19: Graphical representation of networks 1-12, based on a subset of the candidate genes identified. A list of 61 genes, as described in the text, was imported in the IPA software from Ingenuity Systems Inc. to generate networks of directly interacting genes (see Table 22 for the list of genes imported). These networks are based on functional relationships between gene products using known interactions and relationships in the literature. For each network, some nodes were manually extended to include good candidate genes that could play a role in the biochemical pathways of Crohn's disease. See Table 23 for a summary of the networks generated.

[0017] FIGS. 20-23: Graphical representation of networks 1-4, based on a subset of the candidate genes identified. A list of 61 genes, as described in the text, was imported in the IPA software from Ingenuity Systems Inc. to generate networks of direct and indirect gene interactions (see Table 22 for the list of genes imported). These networks are based on functional relationships between gene products using known interactions and relationships in the literature. For each network, some nodes were manually extended to include good candidate genes that could play a role in the biochemical pathways of Crohn's disease. See Table 24 for a summary of the networks generated.

### DESCRIPTION OF THE FILES CONTAINED ON THE CD-R

[0018] The CD-R contains an electronic copy of the sequence listing and Tables 1-24 related thereto.

### DEFINITIONS

[0019] Throughout the description of the present invention, several terms are used that are specific to the science of this field. For the sake of clarity and to avoid any misunderstanding, these definitions are provided to aid in the understanding of the specification and claims:

[0020] Allele: One of a pair, or series, of forms of a gene or non-genic region that occur at a given locus in a chromosome. Alleles are symbolized with the same basic symbol (e.g., B for dominant and b for recessive; B1, B2, Bn for n additive alleles at a locus). In a normal diploid cell there are two alleles of any one gene (one from each parent), which occupy the same relative position (locus) on homologous chromosomes. Within a population there may be more than two alleles of a gene. See multiple alleles. SNPs also have alleles, i.e., the two (or more) nucleotides that characterize the SNP.

[0021] Amplification of nucleic acids: refers to methods such as polymerase chain reaction (PCR), ligation amplification (or ligase chain reaction, LCR) and amplification methods based on the use of Q-beta replicase. These methods are well known in the art and are described, for example, in U.S. Pat. Nos. 4,683,195 and 4,683,202. Reagents and hardware for conducting PCR are commercially available. Primers useful for amplifying sequences from the disorder region are preferably complementary to, and preferably hybridize specifically to, sequences in the disorder region or in regions that flank a target region therein. Genes from Tables 8, 9, 19, 20, 21, 22, 23 or 24 generated by amplification may be sequenced directly. Alternatively, the amplified sequence(s) may be cloned prior to sequence analysis.

[0022] Antigenic component: is a moiety that binds to its specific antibody with sufficiently high affinity to form a detectable antigen-antibody complex.

[0023] Antibodies: refer to polyclonal and/or monoclonal antibodies and fragments thereof, and immunologic binding equivalents thereof, that can bind to proteins and fragments thereof or to nucleic acid sequences from the disorder region, particularly from the disorder gene products or a portion thereof. The term antibody is used both to refer to a homogeneous molecular entity, or a mixture such as a serum product made up of a plurality of different molecular entities. Proteins may be prepared synthetically in a protein synthesizer and coupled to a carrier molecule and injected over several months into rabbits. Rabbit sera are tested for immunoreactivity to the protein or fragment. Monoclonal antibodies may be made by injecting mice with the proteins, or fragments thereof. Monoclonal antibodies can be screened by ELISA and tested for specific immunoreactivity with protein or fragments thereof (Harlow et al. 1988, Antibodies: A Laboratory Manual, Cold Spring Harbor Laboratory, Cold Spring Harbor, N.Y.). These antibodies will be useful in developing assays as well as therapeutics.

[0024] Associated allele: refers to an allele at a polymorphic locus that is associated with a particular phenotype of interest, e.g., a predisposition to a disorder or a particular drug response.

[0025] cDNA: refers to complementary or copy DNA produced from an RNA template by the action of RNA-dependent DNA polymerase (reverse transcriptase). Thus, a cDNA clone means a duplex DNA sequence complementary to an RNA molecule of interest, included in a cloning vector or PCR amplified. This term includes genes from which the intervening sequences have been removed.

[0026] cDNA library: refers to a collection of recombinant DNA molecules containing cDNA inserts that together comprise essentially all of the expressed genes of an organism or tissue. A cDNA library can be prepared by methods known to one skilled in the art (see, e.g., Cowell and Austin, 1997, “DNA Library Protocols,” Methods in Molecular Biology). Generally, RNA is first isolated from the cells of the desired organism, and the RNA is used to prepare cDNA molecules.

[0027] Cloning: refers to the use of recombinant DNA techniques to insert a particular gene or other DNA sequence into a vector molecule. In order to successfully clone a desired gene, it is necessary to use methods for generating DNA fragments, for joining the fragments to vector molecules, for introducing the composite DNA molecule into a host cell in which it can replicate, and for selecting the clone having the target gene from amongst the recipient host cells.

[0028] Cloning vector: refers to a plasmid or phage DNA or other DNA molecule that is able to replicate in a host cell. The cloning vector is typically characterized by one or more endonuclease recognition sites at which such DNA sequences may be cleaved in a determinable fashion without loss of an essential biological function of the DNA, and which may contain a selectable marker suitable for use in the identification of cells containing the vector.

[0029] Coding sequence or a protein-coding sequence: is a polynucleotide sequence capable of being transcribed into mRNA and/or capable of being translated into a polypeptide or peptide. The boundaries of the coding sequence are typically determined by a translation start codon at the 5′-terminus and a translation stop codon at the 3′-terminus.

[0030] Complement of a nucleic acid sequence: refers to the antisense sequence that participates in Watson-Crick base-pairing with the original sequence.

[0031] Disorder region: refers to the portions of the human chromosomes displayed in Table 1 bounded by the markers from Tables 2, 3, 4, 5, 6, 7 or 10.

[0032] Disorder-associated nucleic acid or polypeptide sequence: refers to a nucleic acid sequence that maps to region of Table 1 or the polypeptides encoded therein (Tables 8, 9, 19, 20, 21, 22, 23 or 24, nucleic acids, and polypeptides). For nucleic acids, this encompasses sequences that are identical or complementary to the gene sequences from Tables 8, 9, 19, 20, 21, 22, 23 or 24, as well as sequence-conservative, function-conservative, and non-conservative variants thereof. For polypeptides, this encompasses sequences that are identical to the polypeptide, as well as function-conservative and non-conservative variants thereof. Included are the alleles of naturally-occurring polymorphisms causative of Crohn's disease such as, but not limited to, alleles that cause altered expression of genes of Tables 8, 9, 19, 20, 21, 22, 23 or 24 and alleles that cause altered protein levels or stability (e.g., decreased levels, increased levels, expression in an inappropriate tissue type, increased stability, and decreased stability).

[0033] Expression vector: refers to a vehicle or plasmid that is capable of expressing a gene that has been cloned into it, after transformation or integration in a host cell. The cloned gene is usually placed under the control of (i.e., operably linked to) a regulatory sequence.

[0034] Function-conservative variants: are those in which a change in one or more nucleotides in a given codon position results in a polypeptide sequence in which a given amino acid residue in the polypeptide has been replaced by a conservative amino acid substitution. Function-conservative variants also include analogs of a given polypeptide and any polypeptides that have the ability to elicit antibodies specific to a designated polypeptide.

[0035] Founder population: Also called a population isolate, this is a large number of people who have mostly descended, in genetic isolation from other populations, from a much smaller number of people who lived many generations ago.

[0036] Gene: Refers to a DNA sequence that encodes through its template or messenger RNA a sequence of amino acids characteristic of a specific peptide, polypeptide, or protein. The term “gene” also refers to a DNA sequence that encodes an RNA product. The term gene as used herein with reference to genomic DNA includes intervening, non-coding regions, as well as regulatory regions, and can include 5′ and 3′ ends. A gene sequence is wild-type if such sequence is usually found in individuals unaffected by the disorder or condition of interest. However, environmental factors and other genes can also play an important role in the ultimate determination of the disorder. In the context of complex disorders involving multiple genes (oligogenic disorder), the wild type, or normal sequence can also be associated with a measurable risk or susceptibility, receiving its reference status based on its frequency in the general population.

[0037] GeneMaps: are defined as groups of gene(s) that are directly or indirectly involved in at least one phenotype of a disorder (some non-limiting example, of GeneMaps comprises networks displayed in FIGS. 1 to 23 herein). As such, GeneMaps enable the development of synergistic diagnostic products, creating “theranostics”.

[0038] Genotype: Set of alleles at a specified locus or loci.

[0039] Haplotype: The allelic pattern of a group of (usually contiguous) DNA markers or other polymorphic loci along an individual chromosome or double helical DNA segment. Haplotypes identify individual chromosomes or chromosome segments. The presence of shared haplotype patterns among a group of individuals implies that the locus defined by the haplotype has been inherited, identical by descent (IBD), from a common ancestor. Detection of identical by descent haplotypes is the basis of linkage disequilibrium (LD) mapping. Haplotypes are broken down through the generations by recombination and mutation. In some instances, a specific allele or haplotype may be associated with susceptibility to a disorder or condition of interest, e.g., Crohn's disease. In other instances, an allele or haplotype may be associated with a decrease in susceptibility to a disorder or condition of interest, i.e., a protective sequence.

[0040] Host: includes prokaryotes and eukaryotes. The term includes an organism or cell that is the recipient of an expression vector (e.g., autonomously replicating or integrating vector).

[0041] Hybridizable: nucleic acids are hybridizable to each other when at least one strand of the nucleic acid can anneal to another nucleic acid strand under defined stringency conditions. In some embodiments, hybridization requires that the two nucleic acids contain at least 10 substantially complementary nucleotides; depending on the stringency of hybridization, however, mismatches may be tolerated. The appropriate stringency for hybridizing nucleic acids depends on the length of the nucleic acids and the degree of complementarity, and can be determined in accordance with the methods described herein.

[0042] Identity by descent (IBD): Identity among DNA sequences for different individuals that is due to the fact that they have all been inherited from a common ancestor. LD mapping identifies IBD haplotypes as the likely location of disorder genes shared by a group of patients.

[0043] Identity: as known in the art, is a relationship between two or more polypeptide sequences or two or more polynucleotide sequences, as determined by comparing the sequences. In the art, identity also means the degree of sequence relatedness between polypeptide or polynucleotide sequences, as the case may be, as determined by the match between strings of such sequences. Identity and similarity can be readily calculated by known methods, including but not limited to those described in A. M. Lesk (ed), 1988, Computational Molecular Biology, Oxford University Press, NY; D. W. Smith (ed), 1993, Biocomputing. Informatics and Genome Projects, Academic Press, NY; A. M. Griffin and H. G. Griffin, H. G (eds), 1994, ComputerAnalysis of Sequence Data, Part 1, Humana Press, NJ; G. von Heinje, 1987, Sequence Analysis in Molecular Biology, Academic Press; and M. Gribskov and J. Devereux (eds), 1991, Sequence Analysis Primer, M Stockton Press, NY; H. Carillo and D. Lipman, 1988, SIAM J. Applied Math., 48:1073.

[0044] Immunogenic component: is a moiety that is capable of eliciting a humoral and/or cellular immune response in a host animal.

[0045] Isolated nucleic acids: are nucleic acids separated away from other components (e.g., DNA, RNA, and protein) with which they are associated (e.g., as obtained from cells, chemical synthesis systems, or phage or nucleic acid libraries). Isolated nucleic acids are at least 60% free, preferably 75% free, and most preferably 90% free from other associated components. In accordance with the present invention, isolated nucleic acids can be obtained by methods described herein, or other established methods, including isolation from natural sources (e.g., cells, tissues, or organs), chemical synthesis, recombinant methods, combinations of recombinant and chemical methods, and library screening methods.

[0046] Isolated polypeptides or peptides: are those that are separated from other components (e.g., DNA, RNA, and other polypeptides or peptides) with which they are associated (e.g., as obtained from cells, translation systems, or chemical synthesis systems). In a preferred embodiment, isolated polypeptides or peptides are at least 10% pure; more preferably, 80% or 90% pure. Isolated polypeptides and peptides include those obtained by methods described herein, or other established methods, including isolation from natural sources (e.g., cells, tissues, or organs), chemical synthesis, recombinant methods, or combinations of recombinant and chemical methods. Proteins or polypeptides referred to herein as recombinant are proteins or polypeptides produced by the expression of recombinant nucleic acids. A portion as used herein with regard to a protein or polypeptide, refers to fragments of that protein or polypeptide. The fragments can range in size from 5 amino acid residues to all but one residue of the entire protein sequence. Thus, a portion or fragment can be at least 5, 5-50, 50-100, 100-200, 200-400, 400-800, or more consecutive amino acid residues of a protein or polypeptide.

[0047] Linkage disequilibrium (LD): the situation in which the alleles for two or more loci do not occur together in individuals sampled from a population at frequencies predicted by the product of their individual allele frequencies. In other words, markers that are in LD do not follow Mendel's second law of independent random segregation. LD can be caused by any of several demographic or population artifacts as well as by the presence of genetic linkage between markers. However, when these artifacts are controlled and eliminated as sources of LD, then LD results directly from the fact that the loci involved are located close to each other on the same chromosome so that specific combinations of alleles for different markers (haplotypes) are inherited together. Markers that are in high LD can be assumed to be located near each other and a marker or haplotype that is in high LD with a genetic trait can be assumed to be located near the gene that affects that trait. The physical proximity of markers can be measured in family studies where it is called linkage or in population studies where it is called linkage disequilibrium.

[0048] LD mapping: population based gene mapping, which locates disorder genes by identifying regions of the genome where haplotypes or marker variation patterns are shared statistically more frequently among disorder patients compared to healthy controls. This method is based upon the assumption that many of the patients will have inherited an allele associated with the disorder from a common ancestor (IBD), and that this allele will be in LD with the disorder gene.

[0049] Locus: a specific position along a chromosome or DNA sequence. Depending upon context, a locus could be a gene, a marker, a chromosomal band or a specific sequence of one or more nucleotides.

[0050] Minor allele frequency (MAF): the population frequency of one of the alleles for a given polymorphism, which is equal or less than 50%. The sum of the MAF and the Major allele frequency equals one.

[0051] Markers: an identifiable DNA sequence that is variable (polymorphic) for different individuals within a population. These sequences facilitate the study of inheritance of a trait or a gene. Such markers are used in mapping the order of genes along chromosomes and in following the inheritance of particular genes; genes closely linked to the marker or in LD with the marker will generally be inherited with it. Two types of markers are commonly used in genetic analysis, microsatellites and SNPs.

[0052] Microsatellite: DNA of eukaryotic cells comprising a repetitive, short sequence of DNA that is present as tandem repeats and in highly variable copy number, flanked by sequences unique to that locus.

[0053] Mutant sequence: if it differs from one or more wild-type sequences. For example, a nucleic acid from a gene listed in Tables 8, 9, 19, 20, 21, 22, 23 or 24 containing a particular allele of a single nucleotide polymorphism may be a mutant sequence. In some cases, the individual carrying this allele has increased susceptibility toward the disorder or condition of interest. In other cases, the mutant sequence might also refer to an allele that decreases the susceptibility toward a disorder or condition of interest and thus acts in a protective manner. The term mutation may also be used to describe a specific allele of a polymorphic locus.

[0054] Non-conservative variants: are those in which a change in one or more nucleotides in a given codon position results in a polypeptide sequence in which a given amino acid residue in a polypeptide has been replaced by a non-conservative amino acid substitution. Non-conservative variants also include polypeptides comprising non-conservative amino acid substitutions.

[0055] Nucleic acid or polynucleotide: purine- and pyrimidine-containing polymers of any length, either polyribonucleotides or polydeoxyribonucleotide or mixed polyribo polydeoxyribonucleotides. This includes single-and double-stranded molecules, i.e., DNA-DNA, DNA-RNA and RNA-RNA hybrids, as well as protein nucleic acids (PNA) formed by conjugating bases to an amino acid backbone. This also includes nucleic acids containing modified bases.

[0056] Nucleotide: a nucleotide, the unit of a DNA molecule, is composed of a base, a 2′-deoxyribose and phosphate ester(s) attached at the 5′ carbon of the deoxyribose. For its incorporation in DNA, the nucleotide needs to possess three phosphate esters but it is converted into a monoester in the process.

[0057] Operably linked: means that the promoter controls the initiation of expression of the gene. A promoter is operably linked to a sequence of proximal DNA if upon introduction into a host cell the promoter determines the transcription of the proximal DNA sequence(s) into one or more species of RNA. A promoter is operably linked to a DNA sequence if the promoter is capable of initiating transcription of that DNA sequence.

[0058] Ortholog: denotes a gene or polypeptide obtained from one species that has homology to an analogous gene or polypeptide from a different species.

[0059] Paralog: denotes a gene or polypeptide obtained from a given species that has homology to a distinct gene or polypeptide from that same species.

[0060] Phenotype: any visible, detectable or otherwise measurable property of an organism such as symptoms of, or susceptibility to, a disorder.

[0061] Polymorphism: occurrence of two or more alternative genomic sequences or alleles between or among different genomes or individuals at a single locus. A polymorphic site thus refers specifically to the locus at which the variation occurs. In some cases, an individual carrying a particular allele of a polymorphism has an increased or decreased susceptibility toward a disorder or condition of interest.

[0062] Portion and fragment: are synonymous. A portion as used with regard to a nucleic acid or polynucleotide refers to fragments of that nucleic acid or polynucleotide. The fragments can range in size from 8 nucleotides to all but one nucleotide of the entire gene sequence. Preferably, the fragments are at least about 8 to about 10 nucleotides in length; at least about 12 nucleotides in length; at least about 15 to about 20 nucleotides in length; at least about 25 nucleotides in length; or at least about 35 to about 55 nucleotides in length.

[0063] Probe or primer: refers to a nucleic acid or oligonucleotide that forms a hybrid structure with a sequence in a target region of a nucleic acid due to complementarity of the probe or primer sequence to at least one portion of the target region sequence.

[0064] Protein and polypeptide: are synonymous. Peptides are defined as fragments or portions of polypeptides, preferably fragments or portions having at least one functional activity (e.g., proteolysis, adhesion, fusion, antigenic, or intracellular activity) as the complete polypeptide sequence.

[0065] Recombinant nucleic acids: nucleic acids which have been produced by recombinant DNA methodology, including those nucleic acids that are generated by procedures which rely upon a method of artificial replication, such as the polymerase chain reaction (PCR) and/or cloning into a vector using restriction enzymes. Portions of recombinant nucleic acids which code for polypeptides can be identified and isolated by, for example, the method of M. Jasin et al., U.S. Pat. No. 4,952,501.

[0066] Regulatory sequence: refers to a nucleic acid sequence that controls or regulates expression of structural genes when operably linked to those genes. These include, for example, the lac systems, the trp system, major operator and promoter regions of the phage lambda, the control region of fd coat protein and other sequences known to control the expression of genes in prokaryotic or eukaryotic cells. Regulatory sequences will vary depending on whether the vector is designed to express the operably linked gene in a prokaryotic or eukaryotic host, and may contain transcriptional elements such as enhancer elements, termination sequences, tissue-specificity elements and/or translational initiation and termination sites.

[0067] Sample: as used herein refers to a biological sample, such as, for example, tissue or fluid isolated from an individual or animal (including, without limitation, plasma, serum, cerebrospinal fluid, lymph, tears, nails, hair, saliva, milk, pus, and tissue exudates and secretions) or from in vitro cell culture-constituents, as well as samples obtained from, for example, a laboratory procedure.

[0068] Single nucleotide polymorphism (SNP): variation of a single nucleotide. This includes the replacement of one nucleotide by another and deletion or insertion of a single nucleotide. Typically, SNPs are biallelic markers although tri- and tetra-allelic markers also exist. For example, SNP A\C may comprise allele C or allele A (Tables 2, 3, 4, 5, 6, 7 or 10). Thus, a nucleic acid molecule comprising SNP A\C may include a C or A at the polymorphic position. For clarity purposes, an ambiguity code is used in Tables 2, 3, 4, 5, 6, 7 or 10 and the sequence listing, to represent the variations. For a combination of SNPs, the term “haplotype” is used, e.g. the genotype of the SNPs in a single DNA strand that are linked to one another. In certain embodiments, the term “haplotype” is used to describe a combination of SNP alleles, e.g., the alleles of the SNPs found together on a single DNA molecule. In specific embodiments, the SNPs in a haplotype are in linkage disequilibrium with one another.

[0069] Sequence-conservative: variants are those in which a change of one or more nucleotides in a given codon position results in no alteration in the amino acid encoded at that position (i.e., silent mutation).

[0070] Substantially homologous: a nucleic acid or fragment thereof is substantially homologous to another if, when optimally aligned (with appropriate nucleotide insertions and/or deletions) with the other nucleic acid (or its complementary strand), there is nucleotide sequence identity in at least 60% of the nucleotide bases, usually at least 70%, more usually at least 80%, preferably at least 90%, and more preferably at least 95-98% of the nucleotide bases. Alternatively, substantial homology exists when a nucleic acid or fragment thereof will hybridize, under selective hybridization conditions, to another nucleic acid (or a complementary strand thereof). Selectivity of hybridization exists when hybridization which is substantially more selective than total lack of specificity occurs. Typically, selective hybridization will occur when there is at least about 55% sequence identity over a stretch of at least about nine or more nucleotides, preferably at least about 65%, more preferably at least about 75%, and most preferably at least about 90% (M. Kanehisa, 1984, NucL Acids Res. 11:203-213). The length of homology comparison, as described, may be over longer stretches, and in certain embodiments will often be over a stretch of at least 14 nucleotides, usually at least 20 nucleotides, more usually at least 24 nucleotides, typically at least 28 nucleotides, more typically at least 32 nucleotides, and preferably at least 36 or more nucleotides.

[0071] Wild-type gene from Tables 8, 9, 19, 20, 21, 22, 23 or 24: refers to the reference sequence. The wild-type gene sequences from Tables 8, 9, 19, 20, 21, 22, 23 or 24 used to identify the variants (polymorphisms, alleles, and haplotypes) described in detail herein.

[0072] Technical and scientific terms used herein have the meanings commonly understood by one of ordinary skill in the art to which the present invention pertains, unless otherwise defined. Reference is made herein to various methodologies known to those of skill in the art. Publications and other materials setting forth such known methodologies to which reference is made are incorporated herein by reference in their entireties as though set forth in full. Standard reference works setting forth the general principles of recombinant DNA technology include J. Sambrook et al., 1989, Molecular Cloning: A Laboratory Manual, 2d Ed., Cold Spring Harbor Laboratory Press, Cold Spring Harbor, N.Y.; P. B. Kaufman et al., (eds), 1995, Handbook of Molecular and Cellular Methods in Biology and Medicine, CRC Press, Boca Raton; M. J. McPherson (ed), 1991, Directed Mutagenesis: A Practical Approach, IRL Press, Oxford; J. Jones, 1992, Amino Acid and Peptide Synthesis, Oxford Science Publications, Oxford; B. M. Austen and O. M. R. Westwood, 1991, Protein Targeting and Secretion, IRL Press, Oxford; D. N Glover (ed), 1985, DNA Cloning, Volumes I and 11; M. J. Gait (ed), 1984, Oligonucleotide Synthesis; B. D. Hames and S. J. Higgins (eds), 1984, Nucleic Acid Hybridization; Quirke and Taylor (eds), 1991, PCR-A Practical Approach; Harries and Higgins (eds), 1984, Transcription and Translation; R. I. Freshney (ed), 1986, Animal Cell Culture; Immobilized Cells and Enzymes, 1986, IRL Press; Perbal, 1984, A Practical Guide to Molecular Cloning, J. H. Miller and M. P. Calos (eds), 1987, Gene Transfer Vectors for Mammalian Cells, Cold Spring Harbor Laboratory Press; M. J. Bishop (ed), 1998, Guide to Human Genome Computing, 2d Ed., Academic Press, San Diego, Calif.; L. F. Peruski and A. H. Peruski, 1997, The Internet and the New Biology. Tools for Genomic and Molecular Research, American Society for Microbiology, Washington, D.C. Standard reference works setting forth the general principles of immunology include S. Sell, 1996, Immunology, Immunopathology & Immunity, 5th Ed., Appleton & Lange, Publ., Stamford, Conn.; D. Male et al., 1996, Advanced Immunology, 3d Ed., Times Mirror Int'l Publishers Ltd., Publ., London; D. P. Stites and A. L Terr, 1991, Basic and Clinical Immunology, 7th Ed., Appleton & Lange, Publ., Norwalk, Conn.; and A. K. Abbas et al., 1991, Cellular and Molecular Immunology, W. B. Saunders Co., Publ., Philadelphia, Pa. Any suitable materials and/or methods known to those of skill can be utilized in carrying out the present invention; however, preferred materials and/or methods are described. Materials, reagents, and the like to which reference is made in the following description and examples are generally obtainable from commercial sources, and specific vendors are cited herein.

### DETAILED DESCRIPTION OF THE INVENTION

[0073] General Description of Crohn's Disease

[0074] Inflammatory Bowel Disease (IBD) is characterized by excessive and chronic inflammation at various sites in the gastro-intestinal tract. IBD describes two clinical conditions called Crohn's disease (CD) and ulcerative colitis (UC). CD and UC share many clinical and pathological characteristics but they also have some markedly different features. There is strong scientific support suggesting that the main pathological processes in these two diseases are distinct. This patent application will focus primarily on Crohn's disease.

[0075] The United Kingdom, northern Europe, and North America have been reported to have the highest incidence rates and prevalence for CD. In North America, prevalence for CD ranges between 0.03% and 0.2%. However, reports of increasing incidence and prevalence from other areas of the world have been published over the past 30 years (reviewed in Loftus 2004). CD may occur in people of all ages, but it is most commonly diagnosed in late adolescence and early adulthood (reviewed in Andres and Friedman 1999). Any part of the gastrointestinal tract can be affected in CD, from the mouth to the anus, and patches of inflammation occur, interspersed with healthy tissue.

[0076] Most CD patients experience characteristic periods of remission and flare-ups of the disease, often-requiring long-term medication, and/or hospitalization and surgery. The symptoms and complications of Crohn's disease differ, depending on what part of the intestinal tract is inflamed. The severity of the disease does not correlate directly with the extent of bowel involvement. It is the disease pattern that is most important in determining the disease course and the nature of the associated complications. Thus, CD can be subdivided into 3 types: predominantly inflammatory CD, non-perforating CD (presence of strictures), or perforating CD (presence of fistulas and/or abscesses) (reviewed in Andres and Friedman 1999).

[0077] CD symptoms include chronic diarrhea, abdominal pain, cramping, anorexia, and weight loss. Systemic features include fatigue, tachycardia and pyrexia. Chronic or acute blood loss in the bowel may result in anemia and even shock. The most common complication of CD is the presence of strictures (obstruction) of the intestine due to swelling and the formation of scar tissue. Another complication involves sores or ulcers within the intestinal tract. Sometimes these deep ulcers turn into tracts called fistulas that connect different parts of the intestine. These fistulas often become infected and occasionally form an abscess. Extra-intestinal inflammatory manifestations can occur in joints, eyes, skin, mouth, and liver in patients with either forms of IBD (reviewed in Andres and Friedman 1999). CD patients also carry several risk factors for the development of osteoporosis such as calcium and vitamin D deficiency, and corticosteroid use (Tremaine 2003). Patients with CD are also at increased risk of cancer of both the small and the large intestine (reviewed in Andres and Friedman 1999). CD is associated with an increased mortality rate relative to the general population and independent of whether the small intestine, large intestine, or both are affected. The excess of mortality is most notable in the first few years after diagnosis and is most often attributable to complications of CD, including colorectal cancer as well as other gastrointestinal complications (reviewed in Andres and Friedman 1999). CD is a lifelong disease that causes symptoms that may interfere with social activities, interpersonal relationships, and employment. Impairment relates to disease severity, pattern and side-effects of medication, the possibility of surgery, but also to age, other demographic factors and co-morbid medical conditions, including depression and anxiety (Irvine 2004).

[0078] There is no single definitive test for the diagnosis of CD. To determine the diagnosis, physicians evaluate a combination of information from the history and physical examination of a patient and from results of endoscopic, radiologic and histologic (blood and tissue) tests. Endoscopy with biopsy is the cornerstone for diagnosing and evaluating disease activity in CD. Radiology tests are used together with endoscopy to help evaluate the small bowel and look at the entire abdomen for infections, strictures, obstructions, and fistulas. Because CD often mimics other conditions and symptoms may vary widely, it may take some time to confirm the diagnosis.

[0079] Because there is no cure for CD, the goal of medical treatment is to suppress the inflammatory response and alleviate the symptoms by decreasing the frequency of disease flare-ups and maintaining remissions. Non-surgical treatment for active disease involves the use of anti-inflammatory (aminosalicylates and corticosteroids), antimicrobial (antibiotics), and immunomodulatory agents to control symptoms and reduce disease activity. The biologic therapies are targeted towards specific disease mechanisms and have the potential to provide more effective and safe treatments for human diseases. Infliximab (Remicade®) is a chimeric monoclonal antibody against TNFalpha, and the first biologic therapy that was approved for CD. Several novel genetically engineered drugs targeting specific sites in the inflammatory cascade are likely to have an impact in the near future. Among them, anti-inflammatory cytokines (recombinant IL-10 and IL-11), antibodies (humanized IgG4, anti-TNFalpha, anti-alpha4-integrin) and antisense therapies (ICAM-1) are currently being evaluated in CD treatment (Sandborn and Faubion 2004).

[0080] The frequency of indications for surgery parallels the frequency of local intestinal complications of the disease. Surgery is never curative for CD because the disease frequently recurs at or near the site of surgery; its overall goal is to conserve bowel and return the individual to the best possible quality of life. Up to 74% of all patients eventually require surgical intervention for their disease (Farmer 1985), and nearly 30% of patients require surgery within the first year of diagnosis (Podolsky 1991).

[0081] Although the etiology of CD is poorly understood, studies indicate that CD pathogenesis is the result of the complex interaction between environmental factors (i.e. gut micro-flora), genetic susceptibility, and the immune system. It has been proposed that IBD results from a dys-regulated mucosal immune response to the intestinal micro-flora in genetically susceptible individuals. The inappropriate activation of the mucosal immune system observed in CD has been linked to a loss of tolerance to gut commensals. It also appears that the loss of mucosal integrity leading to translocation of bacteria in the bowel wall is a crucial step for the propagation of the inflammatory process. However, it is not known whether barrier function is first compromised by intrinsic defects in epithelial integrity, by infection with enteric pathogens, or by loss of commensal-dependent signals necessary to maintain the physical integrity of the epithelium and hypo-responsiveness of the mucosal immune system (reviewed in Bouma and Strober 2003).

[0082] Familial aggregation, twin studies and consistent ethnic differences in disease frequency have strongly supported the important role of genetic factors in the cause of CD (reviewed in Andres and Friedman 1999). However, the incomplete concordance for CD within monozygotic twins, the phenotypic variations and the observed familial pattern of non-Mendelian inheritance suggest that CD has a complex genetic basis with many contributing genes. These facts also underline the presence and importance of environmental factors in the pathogenesis of this disease, such as gut micro-flora as mentioned above, and cigarette smoking which is the best known environmental factor for CD (reviewed in Andres and Friedman 1999). In addition, disease heterogeneity in the phenotype (location, age of onset, number and types of surgery, behavior, extra-intestinal manifestations, response to class of medications) can reflect extensive genetic heterogeneity.

[0083] Previously Identified Genes and Loci

[0084] Genetic studies have previously indicated the presence of several loci predisposing to Inflammatory Bowel Diseases. Nine IBD loci have been identified: IBD1 (CARD15/NOD2, Caspase recruitment domain family, member 15 (NOD2 protein)), IBD2 (Inflammatory bowel disease-2), IBD3 (Inflammatory bowel disease-3), IBD4 (Inflammatory bowel disease-4), IBD5 (Inflammatory bowel disease-5), IBD6 (Inflammatory bowel disease-6), IBD7 (Inflammatory bowel disease-7), IBD8 (Inflammatory bowel disease-8), and IBD9 (Inflammatory bowel disease 9).

[0085] Several loci have been identified and replicated to date; they are located on chromosomes 16q12, 12q13.2-q24.1, 6p21, 14q11-q12, 5q31-q33, 19p13, 1p36, 16p, and 3p26 respectively (Wild and Rioux 2004; Duerr et al., 2002). Results from linkage studies have suggested that CD and UC share some loci but do not share others, such as locus 16q12 which is unique to CD (The IBD International Genetics Consortium 2001). Most of the genes determining susceptibility in each of these chromosomal regions remain to be identified. The most widely replicated loci are on chromosomes 16 (caused by mutations in the NOD2/CARD15 gene), 12, 6, 14 and 5 (OCTN2 genes at IBD5 locus), which predispose to early-onset Crohn's disease. Thus, there is a continuing need in the medical arts for genetic markers of Crohn's disease and guidance for the use of such markers.

[0086] Several years ago, two different groups reported the association of CARD15 (NOD2) variants with CD (Hugot 2001; Ogura 2001). CARD15 is located at the IBD1 locus. The gene codes for an intracellular receptor involved in the innate immune detection of bacterial products. This detection induces the activation of the NF-kB pathway which is of particular importance in immune and inflammatory responses (Philpott and Viala 2004). Three major mutations represent 82% of the total CARD15 mutations: R702W, G908R, and 1007fsinsC. However they do not explain over 20% of the genetic predisposition to the disease, and altogether, they are carried by 30-50% of CD patients and 15-20% of healthy controls in Caucasian populations. These values are much lower in Japanese or Africans (reviewed in Girardin 2003).

[0087] Recently, the OCTN1 and OCTN2 genes at IBD5 locus have been associated with CD (Peltekova 2004). Variants in these genes are in strong linkage disequilibrium and create a two-allele risk haplotype enriched in patients with CD. Both proteins are trans-membrane sodium-dependent carnitine transporters and sodium-independent organic cation transporters. The variants may cause disease by impairing OCTN activity or expression, reducing carnitine transport in a cell-type and disease-specific manner (Peltekova 2004). The IBD5 locus contains multiple candidate genes including the genes for organic cation transporters (OCTN2/SLC22A4 and SLC22A5), the gene for a LIN4-domain-containing protein (RILIPDLIM3), the gene for the oc2 subunit of proline hydroxylase (P4HA2) and a gene of unknown function (NCBI UniGene identifier Hs.70932). Because of extensive linkage disequilibrium (LD) in this region, it has not been possible to further refine the SNP map and unambiguously identify a single susceptibility gene. With respect to OCTN2, the basal transcription is downregulated by the C allele of G-207C, and this allele disrupts the ability of SLC22A5 to be upregulated in response to heat shock or arachidonic acid as a result of impaired HSF I binding and subsequent transcriptional activation.

[0088] The mechanism by which these organic cation transporters contribute to the pathology of Crohn's disease may relate to the in vivo metabolic importance of carnitine. Carnitine facilitates transport of long chain fatty acids across the mitochondrial inner membrane for subsequent P-oxidation, and is also important in the maintenance of cellular CoenzymeA levels. Carnitine uptake into lymphocytes, along with a corresponding decrease in plasma levels, is a physiological response to inflammation. Symptoms of the related condition Ulcerative Colitis may be due to an energy deficiency in colonic epithelium secondary to poor mitochondrial function due to decreased long-chain fatty acid transport to the mitochondria (Roediger W E 1980). The haplotype of mutations in Crohn's disease patients provided previously might affect cellular metabolic energy levels in inflamed tissue by combining impaired OCTN1 transporter function with downregulation and inability to respond to heat or inflammatory stress by the OCTN2 gene. Heat shock proteins and arachidonic acids are involved in response to a variety of cellular stresses, including sepsis, metabolic stress and ischaemia. The heat shock response modulates inflammation through modulation of NF-kB activation. OCTN2 is a heat stress inducible protein. Thus, the OCTN2 gene is normally upregulated in response to inflammation through binding of HSF I protein to its promoter. This in turn mobilizes carnitine and bolsters metabolism in the inflamed tissue. Impaired OCTN1 carnitine transporter activity and lowered OCTN2 expression level results in reduced metabolism and either triggers or worsens cellular stress in areas of inflammation. The two OCTN transporters may therefore function in the inflammatory pathology of Crohn's disease. Additionally, OCTN1 is a polyspecific cation transporter, and might have a role in the uptake of drugs used to treat CD from the gut. As described above, OCTN2 is a transporter protein with the ability to transport carnitine in a sodium dependent manner. Missense mutations and nonsense mutations in the organic cation transporter OCTN2 had previously been identified in patients with primary Systemic Carnitine Deficiency (SCD), an autosomal recessive disorder characterized by progressive cardiomyopathy, skeletal myopathy, hypoglycemia and hyperammonemia.

[0089] Genes encoding proteins involved in the immune system, epithelial functions, and host response to micro-organisms represent good potential candidates for CD and have been examined in numerous case-control studies. However, many of the published associations of genetic variants with CD have not been replicated in follow-up studies.

[0090] The genetic variants that have been identified so far in CD explain only a fraction of the genetic predisposition to this disorder. It is clear that multiple components contribute to disease risk, each component having a modest effect on disease susceptibility. Thus the development of GeneMaps for CD may lead to a better understanding of pathogenesis and to the identification of new pathways involved in the disease, ultimately leading to better treatments for the patients. GeneMaps may also lead to molecular diagnostic tools that will identify subjects at risk for CD or for serious complications of the disease.

[0091] Genome Wide Association Study to Construct a GeneMap for Crohn's Disease

[0092] The present invention is based on the discovery of genes associated with Crohn's disease. In the preferred embodiment, disease-associated loci (candidate regions; Table 1) are identified by the statistically significant differences in allele or haplotype frequencies between the cases and the controls. For the purpose of the present invention, 31 candidate regions (Table 1) are identified, including two previously known regions. CARD15 (NOD2) (Hugot et al. 2001 Nature 411:599 and Ogura et al. 2001 Nature 411:603.) and OCTN (Peltekova et al. 2004 Nature Genetics 36:471) have been previously reported to be associated with Crohn's disease.

[0093] The invention provides a method for the discovery of genes associated with Crohn's disease and the construction of a GeneMap for Crohn's disease in a human population, comprising the following steps (see Example section herein):

[0094] Step 1: Recruit Patients (Cases) and Controls

[0095] In the preferred embodiment, 500 patients diagnosed for Crohn's disease along with two family members are recruited from the Quebec Founder Population (QFP). The preferred trios recruited are parent-parent-child (PPC) trios. Trios can also be recruited as parent-child-child (PCC) trios. In another preferred embodiment, more or less than 500 trios are recruited. In another embodiment, independent case and control samples are recruited.

[0096] In another embodiment, the present invention is performed as a whole or partially with DNA samples from individuals of another founder population than the Quebec population or from the general population.

[0097] In another embodiment, the present invention is performed as a whole or partially with DNA samples from individuals of another population such as a German population.

[0098] Step 2: DNA Extraction and Quantitation

[0099] Any sample comprising cells or nucleic acids from patients or controls may be used. Preferred samples are those easily obtained from the patient or control. Such samples include, but are not limited to blood, peripheral lymphocytes, buccal swabs, epithelial cell swabs, nails, hair, bronchoalveolar lavage fluid, sputum, or other body fluid or tissue obtained from an individual.

[0100] In one embodiment, DNA is extracted from such samples in the quantity and quality necessary to perform the invention using conventional DNA extraction and quantitation techniques. The present invention is not linked to any DNA extraction or quantitation platform in particular.

[0101] Step 3: Genotype the Recruited Individuals

[0102] In one embodiment, assay-specific and/or locus-specific and/or allele-specific oligonucleotides for every SNP marker of the present invention (Tables 2, 3, 4, 5, 6, 7 and 10) are organized onto one or more arrays. The genotype at each SNP locus is revealed by hybridizing short PCR fragments comprising each SNP locus onto these arrays. The arrays permit a high-throughput genome wide association study using DNA samples from individuals of the Quebec founder population. Such assay-specific and/or locus-specific and/or allele-specific oligonucleotides necessary for scoring each SNP of the present invention are preferably organized onto a solid support. Such supports can be arrayed on wafers, glass slides, beads or any other type of solid support.

[0103] In another embodiment, the assay-specific and/or locus-specific and/or allele-specific oligonucleotides are not organized onto a solid support but are still used as a whole, in panels or one by one. The present invention is therefore not linked to any genotyping platform in particular.

[0104] In another embodiment, one or more portions of the SNP maps (publicly available maps, proprietary maps from Perlegen Sciences, Inc. (Mountain View, Calif., USA), and our own proprietary QLDM map) are used to screen the whole genome, a subset of chromosomes, a chromosome, a subset of genomic regions or a single genomic region.

[0105] The 1,500 individuals composing the 500 trios are preferably individually genotyped with at least 80,000 markers, generating at least a few million genotypes; more preferably, at least a hundred million.

[0106] Step 4: Exclude the Markers that did not Pass the Quality Control of the Assay.

[0107] Preferably, the quality controls consist of, but are not limited to, the following criteria: eliminate SNPs that had a high rate of Mendelian errors (cut-off at 1% Mendelian error rate), that deviate from the Hardy-Weinberg equilibrium, that are non-polymorphic in the Quebec founder population or have too many missing data (cut-off at 1% missing values or higher), or simply because they are non-polymorphic in the Quebec founder population (cut-off at 1%≦10% minor allele frequency (MAF)).

[0108] Step 5: Perform the Genetic Analysis on the Results Obtained Using Haplotype Information as well as Single-Marker Association.

[0109] In the preferred embodiment, genetic analysis is performed on all the genotypes from step 3.

[0110] In another embodiment, genetic analysis is performed on a total of 248,535 SNPs.

[0111] In one embodiment, the genetic analysis consists of, but is not limited to features corresponding to Phase information and haplotype structures. Phase information and haplotype structures are preferably deduced from trio genotypes using Phasefinder. Since chromosomal assignment (phase) cannot be estimated when all trio members are heterozygous, an Expectation-Maximization (EM) algorithm may be used to resolve chromosomal assignment ambiguities after Phasefinder.

[0112] In yet another embodiment, the PL-EM algorithm (Partition-Ligation EM; Niu et al., Am. J. Hum. Genet. 70:157 (2002)) can be used to estimate haplotypes from the “genotype” data as a measured estimate of the reference allele frequency of a SNP in 15-marker windows that advance in increments of one marker across the data set. The results from such algorithms are converted into 15-marker haplotype files. Subsequently, the individual 15-marker block files are assembled into one continuous block of haplotypes for the entire chromosome. These extended haplotypes can then be used for further analysis. Such haplotype assembly algorithms take the consensus estimate of the allele call at each marker over all separate estimations (most markers are estimated 15 different times as the 15 marker blocks pass over their position).

[0113] In the preferred embodiment, the haplotypes for both the controls and the patients are derived in this manner. The preferred control of a trio structure is the spouse if the patient is one of the parents or the non-transmitted chromosomes (chromosomes found in parents but not in affected child) if the patient is the child.

[0114] In another embodiment, the haplotype frequencies among patients are compared to those among the controls using LDSTATS, a program that assesses the association of haplotypes with the disease. Such program defines haplotypes using multi-marker windows that advance across the marker map in one-marker increments. Such windows can be 1, 3, 5, 7 or 9 markers wide, and all these window sizes are tested concurrently. Larger multi-marker haplotype windows can also be used. At each position the frequency of haplotypes in cases is compared to the frequency of haplotypes in controls. Such allele frequency differences for single marker windows can be tested using Pearson's Chi-square with any degree of freedom. Multi-allelic haplotype association can be tested using Smith's normalization of the square root of Pearson's Chi-square. Such significance of association can be reported in two ways:

[0115] The significance of association within any one haplotype window is plotted against the marker that is central to that window.

[0116] P-values of association for each specific marker are calculated as a pooled P-value across all haplotype windows in which they occur. The pooled P-value is calculated using an expected value and variance calculated using a permutation test that considers covariance between individual windows. Such pooled P-values can yield narrower regions of gene location than the window data (see example 3 for details on analysis methods, such as LDSTATS v2.0 and v4.0).

[0117] In another embodiment, conditional haplotype analyses can be performed on subsets of the original set of cases and controls using the program LDSTATS. The selection of a subset of cases and their matched controls can be based on the carrier status of cases at a gene or locus of interest (see conditional analysis section in example 3 herein). Various conditional haplotypes can be derived, such as protective haplotypes and risk haplotypes.

[0118] Step 6: Fine Mapping

[0119] In this step, the candidate regions that were identified by step 4 are further mapped for the purpose of refinement and validation.

[0120] In the preferred embodiment, this fine mapping is performed with a density of genetic markers higher than in the genome wide scan (step 3) using any genotyping platform available in the art. Such fine mapping can be, but is not limited to, typing the allele via an allele-specific elongation assay that is then ligated to a locus-specific oligonucleotide. Such assays can be performed directly on the genomic DNA at a highly multiplex level and the products can be amplified using universal oligonucleotides. For each candidate region, the density of genetic markers can be, but is not limited to, a set of SNP markers with an average inter-marker distance of 1-4 Kb distributed over about 400 Kb to 1 Mb, roughly centered at the highest point of the GWS association. The preferred samples are those obtained from Crohn's disease PPC trios including the ones used for the GWS. Other preferred samples are trios or case control samples from another population, such as a German population.

[0121] In the preferred embodiment, the genetic analysis of the results obtained using haplotype information as well as single-marker association (as performed as in step 5, described herein) is performed as described herein (step 5 and Example section). The candidate regions that are validated and confirmed after this analysis proceed to a gene mining step described in Example 5, herein, to characterize their marker and genetic content.

[0122] Step 7: SNP and DNA Polymorphism Discovery

[0123] In the preferred embodiment, all the candidate genes and regions identified in step 6 are sequenced for polymorphism identification.

[0124] In another embodiment, the entire region, including all introns, is sequenced to identify all polymorphisms.

[0125] In yet another embodiment, the candidate genes are prioritized for sequencing, and only functional gene elements (promoters, conserved noncoding sequences, exons and splice sites) are sequenced.

[0126] In yet another embodiment, previously identified polymorphisms in the candidate regions can also be used. For example, SNPs from dbSNP, Perlegen Sciences, Inc., or others can also be used rather than resequencing the candidate regions to identify polymorphisms.

[0127] The discovery of SNPs and DNA polymorphisms generally comprises a step consisting of determining the major haplotypes in the region to be sequenced. The preferred samples are selected according to which haplotypes contribute to the association signal observed in the region to be sequenced. The purpose is to select a set of samples that covers all the major haplotypes in the given region. Each major haplotype is preferably analyzed in at least a few individuals.

[0128] Any analytical procedure may be used to detect the presence or absence of variant nucleotides at one or more polymorphic positions of the invention. In general, the detection of allelic variation requires a mutation discrimination technique, optionally an amplification reaction and optionally a signal generation system. Any means of mutation detection or discrimination may be used. For instance, DNA sequencing, scanning methods, hybridization, extension based methods, incorporation based methods, restriction enzyme-based methods and ligation-based methods may be used in the methods of the invention.

[0129] Sequencing methods include, but are not limited to, direct sequencing, and sequencing by hybridization. Scanning methods include, but are not limited to, protein truncation test (PTT), single-strand conformation polymorphism analysis (SSCP), denaturing gradient gel electrophoresis (DGGE), temperature gradient gel electrophoresis (TGGE), cleavage, heteroduplex analysis, chemical mismatch cleavage (CMC), and enzymatic mismatch cleavage. Hybridization-based methods of detection include, but are not limited to, solid phase hybridization such as dot blots, multiple allele specific diagnostic assay (MASDA), reverse dot blots, and oligonucleotide arrays (DNA Chips). Solution phase hybridization amplification methods may also be used, such as Taqman. Extension based methods include, but are not limited to, amplification refraction mutation systems (ARMS), amplification refractory mutation systems (ALEX), and competitive oligonucleotide priming systems (COPS). Incorporation based methods include, but are not limited to, mini-sequencing and arrayed primer extension (APEX). Restriction enzyme-based detection systems include, but are not limited to, restriction site generating PCR. Lastly, ligation based detection methods include, but are not limited to, oligonucleotide ligation assays (OLA). Signal generation or detection systems that may be used in the methods of the invention include, but are not limited to, fluorescence methods such as fluorescence resonance energy transfer (FRET), fluorescence quenching, fluorescence polarization as well as other chemiluminescence, electrochemiluminescence, Raman, radioactivity, colometric methods, hybridization protection assays and mass spectrometry methods. Further amplification methods include, but are not limited to self sustained replication (SSR), nucleic acid sequence based amplification (NASBA), ligase chain reaction (LCR), strand displacement amplification (SDA) and branched DNA (B-DNA).

[0130] Step 8: Ultrafine Mapping

[0131] This step further maps the candidate regions and genes confirmed in the previous step to identify and validate the responsible polymorphisms associated with Crohn's disease in the human population.

[0132] In a preferred embodiment, the discovered SNPs and polymorphisms of step 7 are ultrafine mapped at a higher density of markers than the fine mapping described herein using the same technology described in step 6.

[0133] Step 9: GeneMap Construction

[0134] The confirmed variations in DNA (including both genic and non-genic regions) are used to build a GeneMap for Crohn's disease. The gene content of this GeneMap is described in more detail below. Such GeneMap can be used for other methods of the invention comprising the diagnostic methods described herein, the susceptibility to Crohn's disease, the response to a particular drug, the efficacy of a particular drug, the screening methods described herein and the treatment methods described herein.

[0135] As is evident to one of ordinary skill in the art, all of the above steps or the steps do not need to be performed, or performed in a given order to practice or use the SNPs, genomic regions, genes, proteins, etc. in the methods of the invention.

[0136] Genes from the GeneMap

[0137] In one embodiment the GeneMap consists of genes and targets, in a variety of combinations, identified from the candidate regions listed in Table 1. In another embodiment, all genes from Tables 8, 9, 19, 20, 21, 22, 23 or 24 are present in the GeneMap. In another preferred embodiment, the GeneMap consists of a selection of genes from Tables 8, 9, 19, 20, 21, 22, 23 or 24. The genes of the invention (Tables 8, 9, 19, 20, 21, 22, 23 or 24) are arranged by candidate regions and by their chromosomal location. Such order is for the purpose of clarity and does not reflect any other criteria of selection in the association of the genes with Crohn's disease.

[0138] In another embodiment, the GeneMap consists of the non-limiting examples displayed in networks from FIGS. 1 to 24. Genes represented in these networks were selected as described below:

[0139] In the preferred embodiment, genes identified in the WGAS and subsequent fine mapping studies for Crohn's disease (CD) are evaluated using the Ingenuity Pathway Analysis application (IPA, Ingenuity systems) in order to identify direct biological interactions between these genes, and also to identify molecular regulators acting on those genes (indirect interactions) that could be also involved in CD. The purpose of this effort is to decipher the molecules involved in contributing to CD. These gene interaction networks are very valuable tools in the sense that they facilitate extension of the map of gene products that could represent potential drug targets for CD.

[0140] From the genetic analyses, 31 candidate regions were considered for the development of potential protein interaction networks involved in CD. These regions and their coordinates are presented in Table 1 of this patent application. Out of 31 regions, 4 regions were not included in this analysis because they did not contain any annotated genes. Tables 8 and 19 list the annotated genes present in the remaining 27 regions, and that were used for IPA analysis.

[0141] A total of 295 annotated genes were identified in the 27 fine-mapped regions (Tables 8 and 19), and were imported in the IPA software. In the preferred embodiment, the analysis can be performed by looking for direct interactions only. From this analysis 285 genes were mapped to the Ingenuity database and assigned to 23 networks as defined by IPA. These networks are based on functional relationships between gene products using known interactions in the literature. For each network, some nodes were manually extended to include good candidate genes that could play a role in the biochemical pathways of CD. Table 20 contains information about the gene content of each network, as well as the top functions assigned to those biochemical pathways.

[0142] In another embodiment, the analysis can be performed by looking for direct and indirect interactions. From this analysis 270 genes were mapped to the Ingenuity database and assigned to 17 genetic networks as defined by IPA. Table 21 contains information about the gene content of each network, as well as the top functions assigned to those biochemical pathways.

[0143] In yet another embodiment, a subset of the genes (61) mapping to the candidate regions can be used as input to the Ingenuity Pathway Analysis System (Table 22). These genes are selected according to criteria that included their relevance to the pathophysiology of the disease and location with respect to the statistical evidence. Tables 22 and 23 contain information about the gene content of each network, as well as the top functions assigned to those biochemical pathways.

### Results from Analyses Incorporating Direct Interactions for 295 Annotated Genes

[0144] Network 1 Direct Only

[0145] Network 1 contains 51 nodes (35 original and 16 manual additions) with 18 genes from the fine mapped regions (FIG. 1). A short description of these 18 genes follows. By virtue of their role in immune response and/or inflammation (CD5 and CD6, GNAI2), barrier integrity, protection, and function (CLTC, GPX1), gastrointestinal physiology (OPRK1), biochemical pathways involved in the disease pathogenesis (DCP1A, GRK5, KSR1, RGS20), some of these genes are very good candidates for a role in the pathophysiology of CD. GNAI2, GPX1, and KSR1 have even been linked to the onset of colitis in mouse models (see below).

[0146] The expression of 8 genes from this network has been shown to vary in some studies of gene expression profiling for CD. For example, in sigmoid colon tissue from Crohn's patients compared to control tissue, ADORA3 was downregulated, and CLTC was upregulated (Costello et al 2005). In the study by Langmann et al 2004, GRK5 and GNAI3 were shown to be upregulated in colons of Crohn's patients compared to control specimens; KCTD3 was upregulated in ileum, and CTBP2, GNB1, ENTH were downregulated in ileum.

[0147] BSN: This gene encodes Bassoon, a novel zinc-finger CAG/glutamine-repeat protein which localizes at the active zone of presynaptic nerve terminals. Both the presynaptic terminal and the postsynaptic compartment of neuronal synapses comprise a highly specialized cytoskeleton underlying the synaptic membranes. The presynaptic nerve terminal is the principal site of regulated neurotransmitter release. The active zone is the region of the presynaptic plasmalemma where synaptic vesicles dock, fuse, and release neurotransmitters. Tom Dieck et al. (1998) suggested that Bassoon may be involved in cytomatrix organization at the site of neurotransmitter release.

[0148] CD5 and CD6: lymphocyte antigen CD5, a human T-cell surface glycoprotein, is implicated in the proliferative response of activated T cells and in T-cell helper function. Its expression increases coordinately with that of cell surface CD3. Although expressed on lymphoid-committed progenitors, its expression is lost following natural killer (NK) cell differentiation. In contrast to its being a pan-T-cell marker, CD5 is only expressed on some B cells. It has been shown that CD5 up-regulation in B cells plays a role in tolerance to autoantigens. By setting the threshold level for activation signals, CD5 prevents B cells from activation-induced cell death and maintains tolerance in anergic B cells in vivo. The reason for keeping potentially autoreactive cells alive is that these cells are also necessary for an effective immune response to some pathogens. This supported the role of CD5 as a negative regulator of BCR signaling, which was later demonstrated by the generation of CD5-null mice. In these animals, peritoneal B cells, which are poorly responsive to BCR stimulation, restored their capacity to fully proliferate to anti-IgM (Gary-Gouy et al., 2002). Interestingly, Neil et al (1992) have reported a decrease in CD5+ B cells in peripheral blood of patients with CD. Finally, CD6 is a monomeric membrane glycoprotein that is involved in T cell activation.

[0149] CLTC: This gene encodes clathrin, heavy polypeptide (Hc). Clathrin is a major protein component of the cytoplasmic face of intracellular organelles, called coated vesicles and coated pits. These specialized organelles are involved in the intracellular trafficking of receptors and endocytosis of a variety of macromolecules. The basic subunit of the clathrin coat is composed of three heavy chains and three light chains. Recently, a potential role of endocytosis of junctional proteins in barrier disruption of intestinal epithelium has been reported (Ivanov et al 2004). This is important since barrier disruption in intestinal epithelium is one of the key features of CD. Finally, as previously mentioned, expression of CLTC is upregulated in sigmoid colon tissue from Crohn's patients compared to control tissue (Costello et al 2005).

[0150] DCP1A: DCP1 decapping enzyme homolog A. This gene encodes a decapping enzyme. Decapping is a key step in general and regulated mRNA decay. This protein and another decapping enzyme form a decapping complex, which interacts with the nonsense-mediated decay factor hUpf1 and may be recruited to mRNAs containing premature termination codons. This protein also participates in the TGF-beta signaling pathway (Bai et al 2002) which has been involved in CD (Monteleone et al 2001; Neurath et al 2002).

[0151] DDB1: damage-specific DNA binding protein 1, 127 kDa. This gene encodes the large subunit of DNA damage-binding protein which is a heterodimer composed of a large and a small subunit. This protein functions in nucleotide-excision repair. Its defective activity causes the repair defect in patients with xeroderma pigmentosum complementation group E (XPE).

[0152] GNAI2: guanine nucleotide binding protein (G protein), alpha inhibiting activity polypeptide 2. This protein plays a role in immune response; targeted deletion of this gene in mice induces lethal colitis closely resembling ulcerative colitis (Dalwadi et al 2004; Bjursten et at 2005; Wu et al 2005). In order to evaluate the possible involvement of this gene in IBD pathogenesis, Zhang et at (2000) looked at GNAI2 codon 179 sequences in 28 familial IBD patients, and 7 patients with colon cancer/dysplasia, from 12 multiplex IBD families. They could not find evidence of any mutation in the codon 179 of the GNAI2 gene.

[0153] GNAT1: guanine nucleotide binding protein (G protein), alpha transducing activity polypeptide 1. Transducin is a 3-subunit guanine nucleotide-binding protein which stimulates the coupling of rhodopsin and cGMP-phoshodiesterase during visual impulses. This gene encodes the alpha subunit in rods. Mutation of GNAT1 is a rare cause of specific congenital visual defect such as night blindness (Dryja et al 1996).

[0154] GPX1: The gene glutathione peroxidase 1 encodes a member of the glutathione peroxidase family. Glutathione peroxidase functions in the detoxification of hydrogen peroxide, and is one of the most important antioxidant enzymes in humans. GPX1 and GPX2 are the major enzymes that reduce hydroperoxides in intestinal epithelium. Esworthy et al (2001) have shown that mice with combined disruption of Gpx1 and Gpx2 genes have colitis, and their results suggest that GPX activity is essential for the prevention of the inflammatory response in intestinal mucosa.

[0155] GRK5: This gene encodes a member of the guanine nucleotide-binding protein (G protein)-coupled receptor kinase subfamily of the Ser/Thr protein kinase family. GRK5, or G protein-coupled receptor kinase 5, specifically phosphorylates the activated forms of G protein-coupled receptors. G protein-coupled receptor kinases (GRKs) play an important role in phosphorylating and regulating the activity of a variety of G protein-coupled receptors. Fan and Malik (2003) noted that desensitization of G protein-coupled receptors regulates the number of polymorphonuclear leukocytes (PMNs), as well as their motility and ability to stop upon contact with pathogens or target cells, and this desensitization is mediated by GRKs. They showed that the chemokine macrophage inflammatory protein-2 (MIP2) induces GRK2 and GRK5 expression in PMNs through PI3KG signaling. Also they showed that LPS-activated TLR4 signaling regulates PMN migration by modulating the expression of chemokine receptors in a GRK2- and GRK5-dependent manner. Also, members of the GRK family have been involved in the pathogenesis of inflammation (Johnson et al 2002; Lombardi et al 1999). In addition, since the autonomic nervous system can influence the immune response, it is interesting to note that GRK5 knockout in mouse results in cholinergic supersensitivity and impaired muscarinic receptor desensitization (Gainetdinov et al 1999). Thus it is likely that some kind of disregulation of GRK5 could impact the immune response. As previously mentioned, expression of GRK5 was shown to be upregulated in colons of Crohn's patients compared to control specimens (Langmann et al 2004).

[0156] KSR1: Kinase suppressor of Ras-1 (KSR1) (formerly KSR) is a recently identified member of the EGFR-Ras-Raf-1-MAPK signaling pathway. There is a general agreement that KSR1 functions to coordinate signaling of the Ras GTPase to its downstream effector, c-Raf-1. KSR1 interacts with several proteins that possess kinase activity, including c-Raf-1, MEK1, MAPK, C-TAK1 and with protein phosphatase 2A (PP2A). TNF plays a pathogenic role in inflammatory bowel diseases (IBDs), which are characterized by altered cytokine production and increased intestinal epithelial cell apoptosis. KSR1 protects intestinal epithelium from TNF-alpha-induced apoptosis, abrogating inflammatory bowel disease (IBD). KSR1 has an essential protective role in the intestinal epithelial cell during inflammation through activation of cell survival pathways (Yan et al 2004).

[0157] LSM8: LSM8 homolog, U6 small nuclear RNA associated. Sm-like proteins contain the Sm sequence motif, which consists of 2 regions separated by a linker of variable length that folds as a loop. The Sm-like proteins are thought to be important for pre-mRNA splicing.

[0158] OPRK1: opioid receptor, kappa 1. This gene is a member of the G protein-coupled receptor (GPCR) family. This kappa receptor, as well as the mu and delta members, has been shown to interact with the chemokine receptor CCR5 on the membrane of human or monkey lymphocytes (Suzuki et al 2002). This interaction could modulate receptor function. In addition, OPRK1 is localized to the enteric nervous system, and expression levels of the protein have been shown to be significantly increased during chronic intestinal inflammation in mice (Pol et al 2003). Recent evidence has also revealed the association of OPRK1 with the sodium-hydrogen exchanger regulatory factor SLC9A3R1 (also called NHERF). SLC9A3R1 is characterized by two tandem PDZ domains and a potential phosphorylation site. The protein binds the cytoskeleton proteins ezrin, radixin, moesin, and merlin. SLC9A3R1 has been implicated in diverse aspects of epithelial membrane biology and immune synapse formation in T cells. It has also been hypothesized that defective regulation of SLC9A3R1 could be involved in psoriasis (Helms et al 2003), another inflammatory disease which can share, to some extent, some common genetic control with CD.

[0159] RAD50: RAD50 homolog (S. cerevisiae). This gene encodes a protein highly similar to Saccharomyces cerevisiae Rad50, which is involved in DNA double-strand break repair. This protein, cooperating with its partners MRE11 and NBS1, is important for DNA double-strand break repair, cell cycle checkpoint activation, telomere maintenance, and meiotic recombination. Knockout studies of the mouse homolog suggest this gene is essential for cell growth and viability (Bender et al 2002).

[0160] RAPGEF6: RAPGEF6 is Rap guanine nucleotide exchange factor (GEF) 6. Activation of Ras-like GTPases is mediated by guanine nucleotide exchange factors (GEFs), which induce the dissociation of GDP to allow binding of the more abundant GTP.

[0161] RGS20: regulator of G-protein signaling 20. RGS proteins are regulatory and structural components of G protein-coupled receptor complexes. They are GTPase-activating proteins for Gi and Gq class G-alpha proteins. They accelerate transit through the cycle of GTP binding and hydrolysis and thereby accelerate signaling kinetics and termination. The regulation of expression of RGS proteins could be one mechanism by which TLR signaling could modify GPCR signaling in dendritic cells (DCs). It has been reported that engagement of TLR3 or TLR4 on monocyte-derived DCs induces RGS16 and RGS20, markedly increases RGS1 expression, and potently down-regulates RGS18 and RGS14 without modifying other RGS proteins (Shi et al 2004a). TLR signaling has been involved in CD pathogenesis (Cobrin and Abreu 2005), making RGS20 a good candidate to play a role in CD (Ouburg et al 2005).

[0162] SEPT8: Septin 8. SEPT8 is a member of the highly conserved septin family. Septins are GTPases that assemble as filamentous scaffolds. They are essential for active membrane movement such as cytokinesis and vesicle trafficking. SEPT8 may play a role in platelet granular secretion (Blaser et al 2004).

[0163] STARD3: START domain containing 3. This gene encodes a protein which participates in intracellular cholesterol trafficking (Zhang et al 2002).

[0164] Network 2 Direct Only

[0165] Network 2 contains 44 nodes (35 original and 9 manual additions) with 15 genes from the fine mapped regions (FIG. 2). A short description of these 15 genes follows. From their role in immune response and/or inflammation (IL12RB2, LGALS9, MS4A1, ZNFN1A3), barrier integrity, protection, and function (GLRX, LAMB2), some of these genes are very good candidates for a role in CD (see below). The expression of 7 genes from this network has been shown to vary in some studies of gene expression profiling. In the study by Langmann et al 2004, FYN, POSTN and SMARCA4 have been shown to be upregulated in colons of Crohn's patients compared to control specimens; TKT and LAMB2 were downregulated in colon; MS4A1 and LGALS9 were downregulated in both colon and ileum.

[0166] ADCY7: adenylate cyclase 7. The product of this gene is a member of the adenylyl cyclase class-4/guanylyl cyclase enzyme family that is characterized by the presence of twelve membrane-spanning domains in its sequences. ADCY7 is the major form of adenylyl cyclase in human platelets (Hellevuo et al 1993).

[0167] DAG1: The gene DAG1 (dystrophin-associated glycoprotein 1), encodes the 43-kD transmembrane and 156-kD extracellular dystrophin associated glycoprotein. Dystroglycan is a laminin binding component of the dystrophin-glycoprotein complex which provides a link between the subsarcolemmal cytoskeleton and the extracellular matrix. Dystroglycan has been suggested to play an important role in basement membrane assembly by binding soluble laminin and organizing it on the cell surface (Henry and Campbell, 1998). Striated muscle-specific disruption of the dystroglycan (DAG1) gene results in loss of the dystrophin-glycoprotein complex in differentiated muscle and a remarkably mild muscular dystrophy with hypertrophy and without tissue fibrosis (Crohn R D et al., 2002).

[0168] ELL2: elongation factor, RNA polymerase II, 2. This gene encodes a novel ELL-related RNA polymerase II elongation factor. ELL2 shows 49% identity and 66% similarity to ELL. Mechanistic studies indicated that ELL2 and ELL possess similar transcriptional activities. ELL is the second elongation factor to be implicated in oncogenesis, thus ELL2 could be involved in the control of cell growth.

[0169] GLRX: human glutaredoxin (thioltransferase), is known for its unique properties of specific and efficient catalysis of deglutathionylation of protein-S-S-glutathione-mixed disulfides (protein-SSG). These catalytic properties of glutaredoxin highlight its prominent role in homeostasis of protein sulfhydryl groups both in a protective mode under overt oxidative stress associated with aging and various disease states including cardiovascular and neurodegenerative diseases, diabetes, AIDS, cancer, as well as in a regulatory mode whereby reversible glutathionylation represents a mechanism of redox-activated signal transduction. These physiological roles are supported further by the documentation that glutaredoxin accounts for essentially all of the cellular protein-SSG deglutathionylase activity in mammalian cells and its inactivation by cadmium is correlated with inhibition of intracellular deglutathionylase activity. Glutaredoxins (Grx) are thiol-disulfide oxidoreductases with antioxidant capacity and catalytic functions closely associated with glutathione, an antioxidant abundantly present in human lung. Since the discovery that glucose deprivation-induced oxidative stress causes cytotoxicity in MCF-7/ADR cells, several studies have focused on determining the role of signal transduction pathways in the biological response. Several researchers had previously demonstrated that reactive oxygen species (ROS) could act as intracellular second messengers for inducing apoptosis. During glucose deprivation, supplementation of intracellular reduced thiol pools with N-acetyl-L-cysteine (NAC) was found to suppress metabolic oxidative stress-induced cellular responses including cytotoxicity, cytoskeletal reorganization, and stress-activated protein kinase (SAPK) activation. These results coupled with results using dominant negative c-Jun N-terminal kinase (JNK1) suggested that glucose deprivation-induced SAPK activation was in part responsible for cytotoxicity. Recent studies have also shown that pro-apoptotic signaling originating from the mitochondria is mediated by the JNK pathway possibly through Bid cleavage, cytochrome c release, and/or mitochondrial membrane depolarization. Redox-sensing molecules such as thioredoxin (TRX) and glutaredoxin (GRX) bind to apoptosis signal-regulating kinase 1 (ASK1) and suppress its activation. Glucose deprivation disrupts the interaction between TRX/GRX and ASK1 and subsequently activates the ASK1-stress-activated protein kinase/extracellular-signal-regulated kinase kinase-c-Jun N-terminal kinase 1 (JNK1) signal-transduction pathway. Thus, by its protective role against oxidative stress, GLRX may play an important role in protecting the integrity of intestinal epithelium.

[0170] IL12RB2: is interleukin 12 receptor beta 2 and is involved in auto immune and chronic inflammatory diseases (see US 20040009479A1 for details). The protein encoded by this gene is a type I transmembrane protein identified as a subunit of the interleukin 12 receptor complex. The biological functions of human IL-12 are mediated by the heterodimeric IL-12R composed of two subunits, the β1 and the β2 chains. Interleukin-12 (IL-12) is a proinflammatory cytokine that induces the production of interferon-gamma (IFN-g), favors the differentiation of T helper 1 (TH1) cells and forms a link between innate resistance and adaptive immunity. IL-12 has a direct role in the predisposition to human CD (Xwiers A et al, 2004). Both IL-12 and IL-23 are members of the IL-12 family of cytokines sharing a common p40 subunit. p40 forms heterodimers with p35 in IL-12 and p19 in IL-23. IL-12 and IL-23 bind to IL-12Rb1/IL-12Rb2 and IL-12Rb1/IL-23R, respectively. Engagement of IL-23 with its receptor activates a similar spectrum of Janus kinase (JAK)/signal transducer and activator of transcription (STAT) molecules as IL-12 but in contrast to IL-12, the most prominent STATs induced by IL-23 are STATS/STAT4 heterodimers rather than STAT4 homodimers (Trinchieri et al, 2003). The coexpression of this gene and IL12RB1 was shown to lead to the formation of high-affinity IL12 binding sites and reconstitution of IL12 dependent signaling. The expression of this gene is up-regulated by interferon gamma in Th1 cells, and plays a role in Th1 cell differentiation. The up-regulation of this gene is found to be associated with a number of infectious diseases, such as Crohn's disease and leprosy, which is thought to contribute to the inflammatory response and host defense.

[0171] ITIH3: inter-alpha (globulin) inhibitor H3. This gene encodes a member of the inter-alpha-trypsin inhibitors family of structurally related plasma serine protease inhibitors involved in extracellular matrix stabilization. Paris et al (2002) have shown inhibition of tumor growth and metastatic spreading by overexpression of inter-alpha-trypsin inhibitor family chains (ITI-L, -HI and -H3 chains). Thus they conclude that ITIH3 could have antitumoral or antimetastatic properties.

[0172] ITIH4: inter-alpha (globulin) inhibitor H4 (plasma Kallikrein-sensitive glycoprotein). A study reported that genetic variation at ITIH4 locus was likely one of the determinants of hypercholesterolemia (Fujita et al 2004).

[0173] LAMB2: laminin, beta 2 (laminin S). This gene encodes the beta chain isoform laminin, beta 2. The beta 2 chain contains the 7 structural domains typical of beta chains of laminin, including the short alpha region. Laminins form a family of extracellular matrix glycoproteins which, quantitatively, are the major noncollagenous constituent present in basement membranes. Laminins are composed of 3 non identical chains: laminin alpha, beta and gamma. They have been implicated in a wide variety of biological processes including cell adhesion, differentiation, migration and signaling . . . . Differential distribution of the various laminins have been observed during intestinal development and in the adult intestine, and important alterations in the pattern of laminin expression have been reported in various intestinal pathologies, such as tufting enteropathy, Crohn's disease and ulcerative colitis, and colorectal cancer (Teller and Beaulieu 2001). As mentioned previously, LAMB2 expression was downregulated in colon (Langmann et al 2004).

[0174] LGALS9: This gene encodes galectin 9 which is an S-type lectin. This galectin is strongly overexpressed in Hodgkin's disease tissue and may participate in the interaction between the H&RS cells with their surrounding cells and might thus play a role in the pathogenesis of this disease and/or its consistently associated immunodeficiency. The protein has N- and C-terminal carbohydrate-binding domains connected by a link peptide. Two isoforms (long and short) exist. The galectins are a family of beta-galactoside-binding proteins implicated in modulating cell-cell and cell-matrix interactions. Galectin-9 (Gal-9)/ecalectin was first cloned as a T cell-derived eosinophil chemoattractant (Matsumoto et al 1998). Also, galectin-9 is able to induce apoptosis of not only T cell lines but also of other types of cell lines, in a dose- and time-dependent manner, through the calcium-calpain-caspase-1 pathway. This suggests that galectin 9 may play a role in immunomodulation of T cell-mediated immune responses (Kashio et al 1998). As mentioned previously, LGALS9 was downregulated in both colon and ileum (Langmann et al 2004).

[0175] MARLIN1: now called JAKMIP1. MARLIN1 is a novel RNA-binding protein which associates with GABA receptors. GABA(B) receptors are heterodimeric G protein-coupled receptors that mediate slow synaptic inhibition in the central nervous system. Jamip1 (Jak and microtubule interacting protein), an alias of MARLIN1, was identified for its ability to bind to the FERM (band 4.1 ezrin/radixin/moesin) homology domain of Tyk2, a member of the Janus kinase (Jak) family of non-receptor tyrosine kinases that are central elements of cytokine signaling cascades. The restricted expression of Jamip1 and its ability to associate to and modify microtubule polymers suggest a specialized function of these proteins in dynamic processes, e.g. cell polarization, segregation of signaling complexes, and vesicle traffic, some of which may involve Jak tyrosine kinases (Steindler at al., 2004).

[0176] MS4A1: membrane-spanning 4-domains, subfamily A, member 1. This gene encodes a member of a gene family which is characterized by common structural features and similar intron/exon splice boundaries and display unique expression patterns among hematopoietic cells and nonlymphoid tissues. MS4A1 is a B-lymphocyte surface molecule which plays a role in the development and differentiation of B-cells into plasma cells. Also, it is functionally coupled to MHC Class II molecules (Leveille et al 1999).

[0177] RGS10: RGS10 encodes for the regulator of G-protein signaling 10. RGS family members are regulatory molecules that act as GTPase activating proteins for G alpha subunits of heterotrimeric G proteins. They drive G proteins into their inactive GDP-bound forms. RGS10 is a selective activator of G alpha i GTPase activity (Hunt et al 1996).

[0178] SEMA3F: sema domain, immunoglobulin domain (Ig), short basic domain, secreted, (semaphorin). SEMA3F is a secreted member of the semaphorin III family. This molecule could play a role in cell motility and adhesion, and can be a potent metastasis inhibitor (Bielenberg et al 2004).

[0179] TKT: transketolase. This gene encodes a thiamine-dependent enzyme that links the pentose phosphate pathway with the glycolytic pathway. Transketolase activity was found, among other tissues, in the epithelium of small intestine (Boren et al 2006). As mentioned previously, TKT expression was downregulated in colon (Langmann et al 2004).

[0180] ZNFN1A3: This gene (also known as Aiolos) encodes a member of the Ikaros family of zinc-finger proteins. Three members of this protein family (Ikaros, Aiolos and Helios) are hematopoetic-specific transcription factors involved in the regulation of lymphocyte development. This gene product is a transcription factor that is important in the regulation of B lymphocyte proliferation and differentiation. Both Ikaros and Aiolos can participate in chromatin remodeling. Regulation of gene expression in B lymphocytes by Aiolos is complex as it appears to require the sequential formation of Ikaros homodimers, Ikaros/Aiolos heterodimers, and Aiolos homodimers. Aiolos transcription factor controls cell death in T cells by regulating Bcl-2 expression and its cellular localization (Romero et al 1999). Also, the association of Aiolos and Bcl-xL has been shown to be involved in the control of apoptosis (Rebollo et al 2001). These findings suggest that ZNFN1A3 may play a role during the immune response events in CD.

[0181] Network 3 Direct Only

[0182] Network 3 contains 42 nodes (35 original and 7 manual additions) with 14 genes from the fine mapped regions (FIG. 3). A short description of these 14 genes follows. From their role in immune response and/or inflammation (CARD15, ERBB2, IL13, IL23R, PPP2R2C), gastrointestinal physiology (THRA), and biochemical pathways involved in the disease pathogenesis (GRB7, HINT1), some of these genes are very good candidates to play a role in CD (see below).

[0183] The expression of 9 genes of this network has been shown to vary in some studies of gene expression profiling for CD. In sigmoid colon tissue from Crohn's patients compared to control tissue, RELA was upregulated (Costello et al 2005). In the study by Langmann et al 2004, CCR7 has been shown to be downregulated in ilea of Crohn's patients compared to control specimens; GLI2, CCNG1, APPBP2 were upregulated in colon; PTCH was upregulated in both colon and ileum; IL2RG was downregulated in both colon and ileum. Contradictory results have been found for PPP2CA: it has been shown to be downregulated in colon in the study of Costello et al 2005, and upregulated in colon and ileum in the study of Langmann et al 2004.

[0184] APPBP2: This gene encodes the amyloid beta precursor protein (cytoplasmic tail) binding protein 2. The protein encoded by this gene interacts with microtubules and is functionally associated with beta-amyloid precursor protein transport and/or processing. The beta-amyloid precursor protein is a cell surface protein with signal-transducing properties, and it is thought to play a role in the pathogenesis of Alzheimer's disease. This gene has been found to be highly expressed in breast cancer. Multiple polyadenylation sites have been found for this gene. As already discussed above, APPBP2 expression was upregulated in colon (Langmann et al 2004).

[0185] CACYBP: The calcyclin binding protein encoded by this gene may be involved in calcium-dependent ubiquitination and subsequent proteosomal degradation of target proteins. It is a component of ubiquitin E3 complexes (Santelli E et al. 2005) that targets beta-catenin for destruction in response to p53 activation. This pathway links genotoxic injury to the destruction of beta-catenin and contributes to the reducing activity of Tcf/LEF transcription factors and to cell cycle arrest (Fukushima et al. 2006). Calcyclin binding protein may also play a role in gastric cancer drug resistance (Hu W et al. 2002; Shi Y et al. 2004b).

[0186] CARD15: CARD 15 (caspase recruitment domain family, member 15) is a member of a superfamily of genes, the nucleotide binding site-leucine-rich repeat (LRR) proteins, which are involved in intracellular recognition of microbes and their products. The protein is primarily expressed in peripheral blood leukocytes and plays a role in the immune response to intracellular bacterial lipopolysaccharides (LPS) by recognizing the muramyl dipeptide (MDP) derived from them and activating the NFKB protein. Since the first reports on the association of mutations in this gene with Crohn's disease (Hugot et al 2001; Ogura et al 2001), numerous laboratories have replicated these findings. CARD15/NOD-induced signal transduction is usually followed by nuclear factor (NF) kB activation; CARD15 induces NF-kappa-B via RICK (CARDIAK, RIP2) and IKK-gamma. Ogura et al. (2001) obtained cDNAs encoding NOD2 and showed that expression of NOD2 or NOD2B resulted in NFKB activation, and mutants lacking the LRRs had enhanced NFKB activation. The authors determined that both intact CARD domains are necessary and sufficient for IKK-gamma and RICK -dependent NFKB activation.

[0187] ERBB2: ERBB2 (NEU, HER2, V-erb-b2 erythroblastic leukemia viral oncogene homolog 2) forms a complex with the IL6 receptor (IL6R) in an IL6-dependent manner (Qiu et al., 1998). This association is important because the inhibition of ERBB2 activity resulted in abrogation of IL6-induced MAPK activation. Thus, ERBB2 is a critical component of IL6 signaling through the MAP kinase pathway. These findings showed how a cytokine receptor can diversify its signaling pathways by engaging with a growth factor receptor kinase. It is important to mention that in IBD, IL6 is produced by activated monocytes, macrophages and epithelial cells (Kusugami et al 1995). Fukushige et al. (1986) also observed amplification and elevated expression of ERBB2 in a gastric cancer cell line. Recently, in a gastric tumor, the Cancer Genome Project and Collaborative Group (2004) identified a 2326G-A transition in the ERBB2 gene that caused a gly776-to-ser (G776S) substitution.

[0188] GLI2: GLI-Kruppel family member GLI2. This gene encodes a protein which belongs to the C2H2-type zinc finger protein subclass of the Gli family. There are three known human GLI proteins: GLI-1, GLI-2, and GLI-3. The GLI genes are the main transcriptional mediators of the Hedgehog pathway in vertebrates. GLI1 and GLI2 are primarily transcriptional activators of Hedgehog target genes, while GLI3 is primarily a transcriptional repressor of Hedgehog targets. Shh (Sonic hedgehog) regulates gastric epithelial cell differentiation. Sonic hedgehog (SHH), Desert hedgehog (DHH) and Indian hedgehog (IHH) bind to Patched family receptors (PTCH1 and PTCH2) to transduce signals to GLI1, GLI2 and GLI3. GLI family transcription factors then activate transcription of Hedgehog target genes, such as FOXE1 and FOXM1 encoding. Forkhead-box transcription factors. The Hedgehog signaling pathway plays a pivotal role in a variety of human tumors, such as gastric cancer, pancreatic cancer, colorectal cancer, breast cancer, prostate cancer, basal cell carcinoma and brain tumors. Transgenic mice overexpressing the transcription factor GLI2 in cutaneous keratinocytes develop multiple skin tumors that are grossly indistinguishable from human basal cell carcinomas (BCCs). These tumors express the same protein markers as human BCCs and exhibit strikingly elevated levels of Ptch1 and Gli1, a hallmark of human BCCs but not squamous tumors. Gli2 is thus a potent oncogene in skin and suggests a pivotal role for this transcription factor in the development of BCC, the most common cancer in humans. GLI-2 also modulates retroviral gene expression. GLI-2/THP either activates or suppresses gene expression, depending on the promoter, but the same domain (first zinc finger) mediates both effects (Smith et al. 2001). One isoform of human GLI-2 appears to be identical to a factor previously called Tax helper protein (THP), thus named due to its ability to interact with a TG-rich element in the human T-Iymphotropic virus type 1 (HTLV-1) enhancer thought to mediate transcriptional stimulation by the Tax protein of HTLV-1. GLI-2/THP has been shown to interact with a DNA promoter element in HTLV-1 that is similar to the peri-ets (pets) site of the HIV-2 enhancer, the latter being an enhancer element that is induced following T-cell and monocytic activation. GLI-2/THP is a Tat cofactor which markedly activates HIV transcription (Browning C M et al., 2001). Loss-of-function mutations in the human GLI2 gene are associated with pituitary anomalies and holoprosencephaly-like features (Roessler et al. 2003). Also Kimmel et al (2000) showed that Gli2 and Gli3 play an important role in the normal development of murine hindgut. As mentioned previously, GLI2 expression was upregulated in colon (Langmann et al 2004).

[0189] GRB7: GRB7 is homologous to ras-GAP (ras-GTPase-activating protein). The product of this gene belongs to a small family of adapter proteins that are known to interact with a number of receptor tyrosine kinases and signaling molecules. This gene defines the GRB7 family, whose members include the mouse gene Grb10 and the human gene GRB14. Tanaka et al. (1998) found that the wild type GRB7 protein, but not the GRB7V isoform, was rapidly tyrosyl phosphorylated in response to EGF stimulation in esophageal carcinoma cells. Analysis of human esophageal tumor tissues and regional lymph nodes with metastases revealed that GRB7V was expressed in 40% of GRB7-positive esophageal carcinomas. GRB7V expression was enhanced after metastatic spread to lymph nodes as compared to the original tumor tissues. Transfection of an antisense GRB7 RNA expression construct lowered endogenous GRB7 protein levels and suppressed the invasive phenotype exhibited by esophageal carcinoma cells. These findings suggested that GRB7 isoforms are involved in cell invasion and metastatic progression of human esophageal carcinomas. Grb7 protein has been identified as a substrate of the epidermal growth factor receptor (EGFR) and related ERBB2 receptor-linked tyrosine kinase activity (Tanaka et al 1997). GRB7 interacts also with ephrin receptors. The protein plays a role in the integrin signaling pathway and cell migration by binding with focal adhesion kinase (FAK).

[0190] HINT1: This gene encodes a histidine triad nucleotide binding protein 1. It is a protein kinase C inhibitor and is a member of the HIT family of proteins. Because PKC signaling is involved in some inflammatory pathways, this protein could play a role in CD pathogenesis.

[0191] IL13: IL13 is a major stimulator of inflammation and tissue remodeling at sites of Th2 inflammation (Chen et al., 2005). In Th2 cells, production of the cytokines IL-4, IL-5, and IL-13 is controlled by cooperation between two families of transcription factors, the GATA and NFAT families (Monticelli et al., 2004). The calcium-regulated transcription factor NFAT consists of four family members, three of which (NFAT1 (p, c2), NFAT2 (c, c1), NFAT4 (x, c3)) are expressed in both cell types. Targeted disruption of the genes encoding individual NFAT family members suggests that there are cell type- and gene-specific differences in their ability to regulate gene transcription in activated cells. The GATA family of transcription factors is also essential for IL-4, IL-5, and IL-13 by Th2 cells, as shown by increased and decreased expression of these cytokines in transgenic mice overexpressing wild-type GATA3 and a dominant-negative version of GATA3 respectively.

[0192] IL23R: IL23R is a receptor for the heterodimeric cytokine interleukin 23. IL23 is a key cytokine controlling inflammation in peripheral tissue. The IL23R protein pairs with the receptor molecule IL12RB1/IL12Rbeta1, and both are required for IL23A signaling. The IL23 receptor (IL23R) comprises a novel receptor subunit (IL23R, that binds p19, and ILI2RP1, that binds p40 (Parham, et al., 2002). These two receptor subunits form the functional signaling complex and are expressed on CD4 and CD45Rb memory T cells as well as interferon gamma (IFNgamma) activated bone marrow macrophages (Parham, et al., supra). Recently, Mannon et al. (2004) reported that treatment with a monoclonal antibody against interleukin-12 may induce clinical responses and remissions in patients with Crohn's disease. The treatment resulted in decreases in Th1-mediated inflammatory cytokines at the site of the disease. Also, Becker et al. (2003) have shown that IL-23 is involved in the predisposition of the terminal ileum to develop chronic inflammatory responses and thus may provide a molecular explanation for the preferential clinical manifestation of Crohn's disease in this part of the gut.

[0193] MAC30: now called TMEM97. Meningioma-associated protein, MAC30, is a protein with unknown function and cellular localization that is differentially expressed in certain malignancies (Kayed et at 2004). Kayed et al showed that MAC30 mRNA levels were significantly increased in breast and colon cancer, but significantly decreased in pancreatic and renal cancer. Interestingly, TGF-beta down-regulated MAC30 mRNA levels in certain pancreatic cancer cells. MAC30 protein was localized in normal colon, gastric and esophageal tissues, especially in the mucosal cells.

[0194] P4HA2: procollagen-proline, 2-oxoglutarate 4-dioxygenase (proline 4-hydroxylase), alpha polypeptide II. This gene encodes a component of prolyl 4-hydroxylase, a key enzyme in collagen synthesis composed of two identical alpha subunits and two beta subunits. The encoded protein is one of several different types of alpha subunits and provides the major part of the catalytic site of the active enzyme. In collagen and related proteins, prolyl 4-hydroxylase catalyzes the formation of 4-hydroxyproline that is essential to the proper three-dimensional folding of newly synthesized procollagen chains.

[0195] PPP2R2C: The product of the gene is the regulatory subunit B of the protein phosphatase 2A (PP2A) which is one of the four major serine/threonine protein phosphatases regulating cell growth and division. The B-subunit is involved in enzyme activity and substrate specificity. The formation of IKK.PP2A complexes is required for the proper induction of IkappaB kinase (Kray et al. 2005) which inactivates NF-kappaB. Inappropriate activation of NFKB has been associated with a number of inflammatory diseases while persistent inhibition of NFKB leads to inappropriate immune cell development or delayed cell growth. PP2A plays another role in the resolution of inflammation by inducing neutrophil apoptosis (Alvarado-Kristensson et al. 2005).

[0196] THRA: The protein encoded by this gene is one of several thyroid hormone receptors. The triiodothyronine (T3) which links to THRA is a critical regulator of intestinal epithelial development and homeostasis by inducing activation of the enterocyte differentiation marker, intestinal alkaline phosphatase (Malo et al. 2004).

[0197] THRAP4: The thyroid hormone receptor-associated proteins (TRAPs) form a complex with the thyroid hormone receptor (TR). The human thyroid hormone receptor-associated protein (TRAP)-mediator is a coactivator for a broad range of nuclear hormone receptors as well as other classes of transcriptional activators.

[0198] Network 4 Direct Only

[0199] Network 4 contains 44 nodes (35 original and 9 manual additions) with 13 genes from the fine mapped regions (FIG. 4). A short description of these 13 genes follows. From their role in immune response and/or inflammation (CSF2, GPR44, IL3, IL5, MS4A2, MST1, MST1R), barrier integrity, protection, and function (HYAL2), gastrointestinal physiology (HTR1A), biochemical pathways involved in the disease pathogenesis (PDLIM4), some of these genes are very good candidates to play a role in CD (see below). The expression of 13 genes of this network has been shown to vary in some studies of gene expression profiling for CD. In sigmoid colon tissue from Crohn's patients compared to control tissue, XBP1 was upregulated (Costello et al 2005). In the study by Langmann et al 2004, CLU and MHC2TA have been shown to be downregulated in ilea of Crohn's patients compared to control specimens; KRT8, HYAL2, and MST1R were downregulated in colon; ELK3 was upregulated in both colon and ileum; MST1 and TGFBI were upregulated in ileum; FOS, ETS1 and CREBBP were upregulated in colon. Contradictory results have been found for PSMD3: it has been shown to be upregulated in colon in the study of Costello et al 2005, and downregulated in colon in the study of Langmann et al 2004.

[0200] CSF2: CSF2 belongs to the GM-CSF family and is a cytokine that stimulates the growth and differentiation of hematopoietic precursor cells from various lineages, including granulocytes, macrophages, eosinophils and erythrocytes. The active form of the protein is found extracellularly as a homodimer. Agnholt et al (2001) described an increase in GM-CSF production in CD, and highlighted this molecule as a possible target for infliximab treatment.

[0201] GPR44 (CRTH2): G Protein-coupled receptors (GPCRs), such as GPR44, are integral membrane proteins containing 7 putative transmembrane domains (TMs). These proteins mediate signals to the interior of the cell via activation of heterotrimeric G proteins that in turn activate various effector proteins, ultimately resulting in a physiologic response. CRTH2 is intriguing in that it is selectively expressed in Th2 cells, T cytotoxic type 2 cells, eosinophils, and basophils. Furthermore, CRTH2 can mediate intracellular Ca2+mobilization in response to a factor(s) released from activated mast cells, suggesting that CRTH2 may be closely involved in mast cell-mediated allergic inflammation (Hirai et al., 2002).

[0202] HTR1A: HTR1A is a serotonin receptor (5-hydroxytryptamine (serotonin) receptor 1A) which belongs to the family of GPCRs. Serotonin systems appear to play a key role in the pathogenesis of major depression and the therapeutic mechanisms of antidepressants. In the intestine, regulated release of serotonin from enterochromaffin cells activates neural reflexes that are involved in gut motility, secretion, vascular perfusion and sensation. A study reported that intestinal cellular structures responsible for the synthesis and storage of dopamine, norepinephrine, and serotonin may be affected by the inflammatory process in both CD and ulcerative colitis (Magro et al 2002). Also, it has been suggested that altered 5-HT signaling could be a contributing factor in altered gut function and sensitivity in inflammatory bowel disease (Linden et al 2005).

[0203] HYAL2: hyaluronoglucosaminidase 2. Hyaluronidase degrades hyaluronan, one of the major glycosaminoglycans of the extracellular matrix. Hyaluronan may play a role in cell proliferation, migration and differentiation. Elevated levels of hyaluronan are associated with numerous inflammatory diseases including inflammatory bowel disease. Recently, it as been shown that in human jejunum-derived mesenchymal cells, treatment with IL-1beta induced about a 30-fold increase in the levels of hyaluronan in the culture medium (Ducale et al 2005). As mentioned above, HYAL2 expression was downregulated in colon (Langmann et al 2004).

[0204] IL3: The IL3 gene encodes interleukin 3 which is a potent growth promoting cytokine. This cytokine is capable of supporting the proliferation of a broad range of hematopoietic cell types. It is involved in a variety of cell activities such as cell growth, differentiation and apoptosis. Ligumsky et al (1997) investigated the expression pattern of IL-3 in intestinal mast cells derived from steroid-treated IBD patients. Their results supported the idea that the down-regulation of IL-3 in mast cells derived from steroid-treated IBD patients occurs in vivo and could be an important mechanism for immunomodulation in IBD. Also, IL3 and GM-CSF have been shown to potentiate interferon-gamma-mediated endothelin production by human monocytes (Salh et al 1998).

[0205] IL5: IL5, interleukin 5, is also known as B cell differentiation factor I; T-cell replacing factor; and eosinophil differentiation factor. Intestinal parasitic diseases are commonly accompanied with diarrhoeal symptoms and allergic reactions. Eosinophilia occurs as a result of IL-5 synthesized from Th2 cells during allergic reactions. Eosinophilia is caused by the effect of IL-5 synthesized from Th2 cells. IL-5 is the most important cytokine in the transformation and development of eosinophils, and acts as an “eosinophil activator”. One of the significant causes of the increase in the amount of eosinophils in blood is parasitic diseases. Toxiallergic effects of certain parasites on the host's organism lead to an increase especially in eosinophil numbers. It is suggested therefore that the function of IL-5 and eosinophils is to protect against repeated exposure to gastrointestinal parasites (Ustun et al., 2004). On the other hand the eosinophilia observed may represent an immunopathological rather than a protective response and may merely be a consequence of the generalized inflammation induced by the Th2 response following infection with parasites. Approximately 25% of patients with IBD had a history of infectious enteritis. Microbial agents including parasites could increase the number of mast cells within the colonic muscle wall, release pro-inflammatory substances, and increase the number of inflammatory cells that might cause IBD.

[0206] MS4A2: MS4A2 gene encodes for the membrane-spanning 4-domains, subfamily A, member 2 (Fc fragment of IgE, high affinity I, receptor for; beta polypeptide. The high affinity IgE receptor is responsible for initiating the allergic response. Binding of allergen to receptor-bound IgE leads to cell activation and the release of mediators (such as histamine) responsible for the manifestations of allergy. The receptor is a tetrameric complex composed of an alpha chain, a beta chain, and 2 disulfide-linked gamma chains. It is found on the surface of mast cells and basophils. The alpha and beta subunits have not been detected in other hematopoietic cells, although the gamma chains are found in macrophages, natural killer (NK) cells, and T cells where they associate with the low affinity receptor for IgG or with the T-cell antigen receptor. Mast cells (MCs) express the high-affinity immunoglobin E (IgE) receptor (FcRI) on their surface, and they can be activated to secrete a variety of biologically active mediators by cross-linking of receptor-bound IgE. The release of mediators from MCs is responsible for the IgE-dependent allergic reactions clinically recognized as anaphylactic reactions, acute asthma, and allergic rhinitis. Sandford et al. (1993) demonstrated that the gene is located on 11q13. Furthermore, they demonstrated that the FCER1B gene is linked to clinical atopy. In their linkage study of atopy, Sandford et al. (1993) used only maternally derived alleles; paternally derived alleles failed to show linkage. The known roles of the high-affinity IgE receptor in antigen-induced mast-cell degranulation and in the release of cytokines that enhance IgE production, taken with the location in the same region, 11q13, made the FCER1B gene a candidate for the chromosome 11 atopy locus. Most MS4A genes encode proteins with at least 4 potential transmembrane domains and N- and C-terminal cytoplasmic domains encoded by distinct exons. The exception is MS4A6E, which encodes a protein with only 2 transmembrane domains and no C-terminal cytoplasmic domain. Northern blot analysis revealed weak expression of MS4A4 in mouse colon and intestine but detected no expression in human tissues (Ishibashi et al. (2001).

[0207] MST1: Macrophage stimulating 1 (hepatocyte growth factor-like, HGFL, MSP), is an inflammatory cytokine able to activate macrophages and to interact with other inflammatory cytokines. MST1 has been proposed to participate in a wide spectrum of biological processes such as inflammation, tissue remodeling/wound healing, hematopoiesis, and bone formation. Both HGFL1/1 and HGFL2/2 mice demonstrate similar clinical (e.g. diarrhea, weight loss) and histologic involvement of the gastrointestinal tract after an administration of dextran sulfate sodium, suggesting that MST1 may aid in the local response to injury. Based on mRNA expression of stk in the colon, and on the ability of MST1 to stimulate proliferation of colonic epithelial cells in culture, an important role of MST1 in the gastrointestinal mucosa response to infectious or other inflammatory processes (e.g. chronic toxic injury) is suggested. As mentioned above, MST1 expression was upregulated in ileum (Langmann et al 2004).

[0208] MST1R: Macrophage stimulating 1 receptor (c-met-related tyrosine kinase, RON) gene, encodes a protein tyrosine kinase receptor comprised of an extra-cellular domain that contains the ligand binding pocket and an intracellular region where the kinase domain is located. It controls cell survival and motility programs related to invasive growth (Angeloni D. et al., 2003). A recent report indicates that the epithelial-cell transforming activity of JSRV Env depends on activation of the cell-surface receptor tyrosine kinase Mst1r (called RON for the human and Stk for the rodent orthologs). MST1 is a ligand of the Met-related MST1-Receptor (MST1R, RON). Although MST1-deficient mice are viable, MST1R is essential in mice before gastrulation for implantation, and is a known oncogene in man. The human receptor tyrosine kinases MET and MST1R (and their respective orthologs in other species) form a unique, two-member gene family that encodes proteins with identical modular structure that may perform similar functions. The expression of MST1R in human tissues and cell lines was examined and MST1R was found to be expressed in colon, skin, lung and bone marrow, and in granulocytes and adherent monocytes (WO1997US0005216). As mentioned above, MST1R expression was downregulated in colon (Langmann et al 2004).

[0209] PDLIM4: This gene encodes the LIM domain protein RIL. This small adaptor protein consists of two segments, the C-terminal LIM and the N-terminal PDZ domain, which mediate multiple protein-protein interactions. The RIL LIM domain can interact with PDZ domains in the protein tyrosine phosphatase PTP-BL and with the PDZ domain of RIL itself. It has also been shown to interact with TRIP6 (Cuppen 2000). TRIP6 is also a RIPK2-associated common signaling component of multiple NF-kappaB activation pathways as shown by Li et al (2005). As highlighted in network 3, RIPK2 interacts with CARD15 (Abbott et al 2004). Thus this gene could be involved in the signaling pathways of CD pathogenesis.

[0210] PSMD3: proteasome (prosome, macropain) 26S subunit, non-ATPase, 3. Proteasomes are distributed throughout eukaryotic cells at a high concentration and cleave peptides in an ATP/ubiquitin-dependent process in a non-lysosomal pathway.

[0211] SEMA3B: sema domain, immunoglobulin domain (Ig), short basic domain, secreted, (semaphorin) 3B. This family member is important in axonal guidance and has been shown to act as a tumor suppressor by inducing apoptosis and inhibiting cellular proliferation. Semaphorins have important roles in a variety of tissues. A common theme in the mechanisms of semaphorin function is that they alter the cytoskeleton and the organization of actin filaments and the microtubule network.

[0212] TCEA1: transcription elongation factor A (SII), 1. Transcription elongation factors help RNA polymerase II to transcribe past blockages due to specific DNA sequences, DNA-binding proteins, and transcription-arresting drugs.

[0213] Network 5 Direct Only

[0214] The network 5 contains 40 nodes (35 original and 5 manual additions) with 12 genes from the fine mapped regions (FIG. 5). A short description of these 12 genes follows. From their role in immune response and/or inflammation (NOS2A, PRKCD), barrier integrity, protection, and function (CFTR, KIAA0992, SALL1), some of these genes are very good candidates to play a role in CD (see below).

[0215] The expression of 17 genes of this network has been shown to vary in some studies of gene expression profiling for CD. In sigmoid colon tissue from Crohn's patients compared to control tissue, NOS2A was upregulated and FUBP1 downregulated (Costello et al 2005). In the study by Langmann et al 2004, RAC2 has been shown to be downregulated in ilea of Crohn's patients compared to control specimens; PRKCD and POLD4 were downregulated in colon; WASL, ELKS, WWOX, and FNBP1L, were upregulated in both colon and ileum; CAV1, PRIM2A and POLD2 were up regulated in ileum; CFTR, PODXL, STAT1, TRIO, and CDC42 were upregulated in colon.

[0216] CFTR: cystic fibrosis transmembrane conductance regulator, ATP-binding cassette (sub-family C (MRP), member 7). This gene encodes a member of the ATP-binding cassette (ABC) transporter family, which transports various molecules across cellular membranes. As a member of the MRP subfamily, the CFTR protein functions as a chloride channel localized primarily at the apical or luminal surfaces of epithelial cells that line the airway, gut and exocrine glands, controls the regulation of other transport pathways and is involved in multi-drug resistance. Mutations in this gene are associated with the autosomal recessive disorders cystic fibrosis and congenital bilateral aplasia of the vas deferens and result in both impaired Cl(−) secretion and enhanced Na(+) absorption in the colon of cystic fibrosis (CF) patients. Intestinal inflammation modulates the expression of CFTR and may contribute to diarrhea in ulcerative colitis both by increasing transepithelial Cl− secretion and by inhibiting the epithelial NaCl absorption (Lohi et al. 2002). As previously mentioned, CFTR expression was upregulated in colon (Langmann et al 2004).

[0217] FNBP1L: formin binding protein 1-like. FNBP1L protein, through its binding affinities to both CDC42 and N-WASP, which induce actin polymerization, is involved in a pathway that links cell surface signals to the actin cytoskeleton. As mentioned above, FNBP1L expression was upregulated in both colon and ileum (Langmann et al 2004).

[0218] KIAA0992: now called PALLD for Palladin. It is a component of actin-containing microfilaments that control cell shape, adhesion, and contraction. Palladin interacts with ezrin, which is essential for epithelial organization and villus morphogenesis in the developing intestine, suggesting an involvement in CD. Palladin is a novel component of stress fiber dense regions and colocalizes and coimmunoprecipitates with alpha-actinin, a dense region component. Palladin expression is up-regulated in differentiating dendritic cells (DCs), and coincides with major cytoskeletal and morphological alterations. In immature DCs, palladin is localized in actin-containing podosomes and in mature DCs along actin filaments. The regulated expression and localization suggest a role for palladin in the assembly of the DC cytoskeleton (Mykkanen, et al., 2001).

[0219] NEUROD2: neurogenic differentiation 2. NEUROD2 is a calcium-regulated transcription factor (basic helix-loop-helix (bHLH)) that plays a critical role in regulating synaptic maturation, the patterning of thalamocortical connections, and is essential for amygdala development (Ince-Dunn et al 2006; Lin et al 2005). NEUROD2 also interacts with PKN1, a protein kinase C that mediates the Rho-dependent signaling pathway.

[0220] NOS2A: This gene encodes a nitric oxide synthase which is expressed in liver and is inducible by a combination of lipopolysaccharides and certain cytokines. Nitric oxide (NO) is a biological signaling and effector molecule and is especially important during inflammation. In macrophages, NO mediates tumoricidal and bactericidal actions, as indicated by the fact that inhibitors of NO synthase (NOS) block these effects. Neuronal NOS and macrophage NOS are distinct isoforms. Both the neuronal and the macrophage forms are unusual among oxidative enzymes in requiring several electron donors: FAD, FMN, NADPH, and tetrahydrobiopterin. NOS2A expression and nitric oxide (NO) synthesis are increased in epithelial cells and in tissue macrophages of the inflamed mucosa from patients with inflammatory bowel disease (IBD), and it has also been shown that NOS2A is increased in circulating monocytes from patients with active IBD and this increased expression correlates with disease activity (Dijkstra et al 2002). As already mentioned, NOS2A expression was upregulated in sigmoid colon tissue from Crohn's patients compared to control tissue (Costello et al 2005).

[0221] POLDIP2: This gene encodes the polymerase (DNA-directed), delta interacting protein 2. This protein interacts with the DNA polymerase delta p50 subunit. The encoded protein also interacts with proliferating cell nuclear antigen (PCNA).

[0222] PPM1D: The protein encoded by this gene is a member of the PP2C family of Ser/Thr protein phosphatases (WIP1). PP2C family members are known to be negative regulators of cell stress response pathways. Expression of PPM1D is induced in response to IR in a p53-dependent manner. Wip1 has potential as a drug target, since the work of Bulavin et al. (2004) indicates that inhibition of Wip1 phosphatase can suppress the proliferation of certain types of cancer. Phosphatases are, in principal, susceptible to targeting by drugs, as potent inhibitors of other phosphatases have been developed. The side effects of inhibition of Wip1 might be acceptable, as Wip1-null mice developed normally, even though defects in immune function have been noted (Choi et al., 2002).

[0223] PRKCD: The gene PRKCD encodes for the protein kinase C delta protein. Protein kinase C (PKC) is a family of serine- and threonine-specific protein kinases that can be activated by calcium and the second messenger diacylglycerol. Once activated, PKC phosphorylates a range of cellular proteins. PKC family members phosphorylate a wide variety of protein targets and are known to be involved in diverse cellular signaling pathways. PKC family members also serve as major receptors for phorbol esters, a class of tumor promoters. Each member of the PKC family has a specific expression profile and is believed to play distinct roles in cells. The delta polypeptide appears to be the major isoform expressed in mouse hematopoietic cells. Studies both in human and mice demonstrate that PRKCD is involved in B cell signaling and in the regulation of growth, apoptosis, and differentiation of a variety of cell types. Mischak et al. (1991) isolated and characterized the gene encoding the delta polypeptide. PRKCD is involved in B cell signaling and in the regulation of growth, apoptosis, and differentiation of a variety of cell types. PRKCD is most abundant in B and T lymphocytes of lymphoid organs, cerebrum, and the intestine of normal mice. By generating mice with a disruption in the PRKCD gene, Miyamoto et al. (2002) observed that the mice are viable up to 1 year but prone to autoimmune disease, with enlarged lymph nodes and spleens containing numerous germinal centers. PRKCD-deficient B cells also mounted a stronger proliferative response than those from wildtype mice. The importance of PKC-delta in B-cell tolerance is further underscored by the appearance of autoreactive anti-DNA and anti-nuclear antibodies in the serum of PKC-delta-deficient mice. As deficiency of PKC-delta does not affect BCR-mediated B-cell activation in vitro and in vivo, PKC-delta may have a selective and essential role of PKC-delta in tolerogenic, but not immunogenic, B-cell responses. As previously mentioned, PRKCD expression was downregulated in colon (Langmann et al 2004).

[0224] RB1CC1: RB1-inducible coiled-coil 1, or focal adhesion kinase (FAK) family interacting protein. RB1CC1 protein binds to the kinase domain of FAK and inhibits its kinase activity and associated cellular functions. It also acts as a putative transcription factor that regulates retinoblastoma 1 (RB1) expression, which is linked to the terminal differentiation of many tissues and cells (Kontani et al 2003). RB1CC1 inhibits G1-S phase progression, proliferation, and clonogenic survival in human breast cancer cells (Melkoumian et al 2005). By interacting with the TSC1-TSC2 complex, RB1CC1 also has a cellular function in the regulation of cell size (Gan et al 2005). RB1CC1 is abundantly expressed in human musculoskeletal cells and is expression is a prerequisite for myogenic differentiation.

[0225] RPS6KB1: This gene encodes a member of the RSK (ribosomal S6 kinase) family of serine/threonine kinases. This kinase contains 2 non-identical kinase catalytic domains and phosphorylates several residues of the S6 ribosomal protein. The kinase activity of this protein leads to an increase in protein synthesis and cell proliferation. Amplification of the region of DNA encoding this gene and overexpression of this kinase are seen in some breast cancer cell lines.

[0226] SALL1: sal-like 1 (Drosophila). The Spalt (sal) gene family plays an important role in regulating developmental processes of many organisms. SALL1 is a zinc-finger nuclear factor that acts as a strong transcriptional repressor in mammalian cells. Mutations in the SALL1 gene cause an autosomal dominantly inherited disorder (Townes-Brocks syndrome) characterized by typical malformations of the thumbs, the ears, and the anus, and also commonly affect the kidneys development and other organ systems. SALL1 seems to be involved in the regulation of higher order chromatin structures which indicates that the protein might be a component of a distinct heterochromatin-dependent silencing process (Netzer et at 2001). SALL1 also seems to activate canonical Wnt signaling (Sato et al 2004). Interestingly, Wnt signaling seems to have an essential role in the maintenance of adult small intestine and colon proliferation. Hence, potential clinical applications in mucosal repair for inflammatory bowel diseases have been suggested (Hoffman et al 2004).

[0227] WWOX: This WW domain containing oxidoreductase (WWOX), contains 2 WW domains coupled to a region with high homology to the short-chain dehydrogenase/reductase (SRD) family of enzymes. WW domain-containing proteins are found in all eukaryotes and play an important role in the regulation of a wide variety of cellular functions such as protein degradation, transcription, and RNA splicing. The encoded protein is more than 90% identical to the mouse Wox1 protein, which is an essential mediator of tumor necrosis factor-alpha-induced apoptosis, suggesting a similar, important role in apoptosis for the human protein (Chang et at 2001). In addition, there is evidence that this gene behaves as a suppressor of tumor growth.

[0228] Network 6 Direct Only

[0229] Network 6 contains 44 nodes (35 original and 9 manual additions) with 12 genes from the fine mapped regions (FIG. 6). A short description of these 12 genes follows. From their role in immune response and/or inflammation (CAPZD, CSF3, IL4, NLK), biochemical pathways involved in the disease pathogenesis (RHOA), some of these genes are very good candidates to play a role in CD (see below).

[0230] The expression of 10 genes of this network has been shown to vary in some studies of gene expression profiling for CD. In sigmoid colon tissue from Crohn's patients compared to control tissue, NLK was upregulated and DVL2, ROCK1, CSDE1 were downregulated (Costello et at 2005). In the study by Langmann et at 2004, PPP1R1B has been shown to be downregulated in ileum of Crohn's patient compared to control specimens; ACTN4 was downregulated in both colon and ileum; TPM1, NLK, CTNNB1, HSPA1A, and CEBPB were upregulated in colon.

[0231] CAPZB: capping protein (actin filament) muscle Z-line, beta, or F-actin capping protein beta subunit. As a member of the F-actin capping protein family, CAPZB regulates actin filament assembly and organization by capping the barbed end of growing actin filaments. CAPZB is important in T cell signaling (Hutchings et al 2003).

[0232] CSF3: CSF3 colony stimulating factor 3 (granulocyte) is a hematopoietic cytokine that is important for allergic inflammation. Delineating the biology of these cytokines is enabling the development of new strategies for diagnosing and treating diseases and modulating immune responses. The protein encoded by this gene is a cytokine that controls the production, differentiation, and function of granulocytes. The active protein is found extracellularly. Three transcript variants encoding three different isoforms have been found for this gene. Granulocyte colony-stimulating factor (or colony stimulating factor-3) specifically stimulates the proliferation and differentiation of the progenitor cells for granulocytes (Metcalf, 1985). Harada et al. (2005) suggested that CSF3 promotes survival of cardiac myocytes and prevents left ventricular remodeling after myocardial infarction through functional communication between cardiomyocytes and noncardiomyoctes. Disseminated colon cancer exhibits severe peripheral blood eosinophilia and elevated serum levels of interleukin-2, interleukin-3, interleukin-5, and GM-CSF.

[0233] IL4: IL4, interleukin 4, is also known as B cell stimulatory factor 1 (BSF1) and lymphocyte stimulatory factor 1. The IL-4 receptor is expressed ubiquitously on monocytes and macrophages, and as with other class I cytokine receptors (hematopoietin receptor family), the IL-4 receptor lacks intrinsic kinase activity and requires receptor-associated kinases for initiation of intracellular signaling. Binding of IL-4 to its receptor leads to JAK1 and JAK3 activation. IL-4 is a potent anti-inflammatory cytokine and leads to an “alternative activation phenotype” in macrophages. This IL-4-dependent macrophage activation results in an absence of nitric oxide production, generation of IL-10 and IL-1 receptor antagonist, and suppressive activity directed toward T cells (Hartman et al., 2004). This gene has been associated with CD but not ulcerative colitis in 2 studies out of 2 (Aithal 2001; Klein 2001).

[0234] KIF3A: kinesin family member 3A. The KIF3A/KIF3B heterodimer functions as a new microtubule-based anterograde translocator for membranous organelles who plays an important role not only in interphase but also in mitosis. The MAP kinase kinase kinases MLK2 and MLK3 interact with members of the KIF3 family of kinesin superfamily motor proteins and with KAP3A, the putative targeting component of KIF3 motor complexes, suggesting a potential link between stress activation and motor protein function (Nagata et al. 1998). This protein interacts with PPP1R15A, one of a subset of proteins induced after DNA damage or cell growth arrest (Hasegawa et al., 2000).

[0235] NLK: This gene encodes the Nemo like kinase. Recent searches revealed that nemo-like kinase (NLK) was a negative regulator of the wingless type (wnt) signal cascade in Xenopus and Caenorhabditis elegans. NLK phosphorylates T-cell factor (TCF)/lymphoid enhancer-binding factor (LEF) and interferes with binding of the beta-catenin-TCF/LEF complex to its TCF target site. Interestingly, NLK has recently been shown to interact with STAT3 (Kojima et al 2005), and STAT3 has been involved in the pathogenesis of CD. In colon tissue from Crohn's patients compared to control tissue, NLK expression was upregulated (Langmann et al 2004; Costello et at 2005).

[0236] PAI-RBP1: now called SERBP1. This gene encodes a SERPINE1 mRNA binding protein 1. Interestingly, the 4G/4G genotype of the 4G/5G polymorphism of the type-1 plasminogen activator inhibitor (PAI-1 or SERPIN1) gene is a determinant of penetrating behaviour in patients with Crohn's disease (Sans et al 2003).

[0237] PPP1R1B: protein phosphatase 1, regulatory (inhibitor) subunit 1B (dopamine and cAMP regulated phosphoprotein, DARPP-32). Glutamatergic receptor stimulation elevates intracellular calcium, which leads to activation of calcineurin and dephosphorylation of phospho-DARPP32, thereby reducing the phosphatase-1 inhibitory activity of DARPP32. The expression of DARPP32 is associated with a potent antiapoptotic advantage for gastric cancer cells through a p53-independent mechanism that involves preservation of mitochondrial potential and increased Bcl2 levels (Belkhiri, 2005). In the study by Langmann et al 2004, PPP1R1B expression was downregulated in ilea of Crohn's patients compared to control specimens.

[0238] PRDX3: peroxiredoxin 3. This gene encodes a protein with antioxidant function and is localized in the mitochondrion. Wonsey et al (2002) have shown that PRDX3 is required for Myc-mediated proliferation, transformation, and apoptosis after glucose withdrawal, and that this protein is required to maintain normal mitochondrial function.

[0239] RHOA: RhoA is a member of the Rho subfamily of small GTPases and has been shown to be involved in a diverse set of signaling pathways including the ultimate regulation of the dynamic organization of the cytoskeleton. Increased activation of RhoA was found in inflamed intestinal mucosa of patients with Crohn's disease and in rats with 2,4,6-trinitrobenzene sulfonic acid-induced colitis. In vitro, activation of RhoA alone was sufficient to induce tumor necrosis factor production. Rho kinase inhibition prevents nuclear factor kappa B activation and I-kappa B phosphorylation and degradation. Rho kinase activates I-kappa B kinase and, thus, nuclear factor kappa B, suggesting a key role of Rho kinase in inflammatory responses and intestinal inflammation. Specific inhibition of Rho kinase may be a promising approach for the treatment of patients with Crohn's disease (Segain et al., 2003).

[0240] SERPINC1: serine (or cysteine) proteinase inhibitor, clade C (antithrombin), member 1, is the most important serine protease inhibitor in plasma that regulates the blood coagulation cascade. SERPINC1 inhibits thrombin as well as factors IXa, Xa and XIa. Mutations in SERPINC1 were previously shown to be associated with thrombosis and such mutations are exacerbated by infection. Thrombin-antithrombin III complexes are increased in inflammatory bowel diseases and suggest that thrombin generation might be an early event in their pathogenesis (Chamouard et al 1995).

[0241] TSN: The translin gene encodes a DNA-binding protein which specifically recognizes conserved target sequences at the breakpoint junction of chromosomal translocations. In their study, Aoki et al (1995) showed that nuclear localization of TSN is limited to lymphoid cell lines, and they hypothesized that nuclear transport of this protein is regulated in a physiologically significant way such that active nuclear transport is associated with the lymphoid specific process known as Ig/TCR gene rearrangement.

[0242] VTN: This gene encodes vitronectin which is a cell adhesion and spreading factor found in serum and tissues. Vitronectin interacts with glycosaminoglycans and proteoglycans. It is recognized by certain members of the integrin family and serves as a cell-to-substrate adhesion molecule. It is a secreted protein and exists in either a single chain form or a clipped, two chain form held together by a disulfide bond. It has been implicated as a participant in diverse biological processes, including cell attachment and spreading, complement activation, and regulation of hemostasis.

[0243] Network 7 Direct Only

[0244] Network 7 contains 35 original nodes with 10 genes from the fine mapped regions (FIG. 7). A short description of these 10 genes follows. From their role in immune response and/or inflammation (IRF1, MS4A3, TAF4B, USP4), barrier integrity, protection, and function (BRD7, HSPA4), gastrointestinal physiology (PNMT), some of these genes are very good candidates to play a role in CD (see below). The expression of 9 genes of this network has been shown to vary in some studies of gene expression profiling for CD. In sigmoid colon tissue from Crohn's patients compared to control tissue, TAF4 was upregulated (Costello et al 2005). In the study by Langmann et al 2004, OAS1 was shown to be downregulated in ileum of Crohn's patient compared to control specimens; DRAP1 was downregulated in colon; EREG and MLL were upregulated in both colon and ileum; VCAM1, CREG1, TAF7, and DR1 were upregulated in colon.

[0245] BRD7: bromodomain containing 7. The bromodomain is a 110 amino acid evolutionally conserved domain and is found in proteins strongly implicated in signal-dependent transcriptional regulation. BRD7 has been shown to inhibit cell growth and cell cycle progression, and may present a new associated tumor suppressor gene (Zhou et at 2004). BRD7 has also been shown to play a regulatory role in Wnt signaling (Kim et al 2003). As mentioned in the description of the SALL1 gene, the Wnt signaling pathway has an essential role in the maintenance of adult small intestine and colon proliferation (Hoffman et at 2004).

[0246] DR1: down-regulator of transcription 1, TBP-binding (negative cofactor 2). This gene encodes a TBP- (TATA box-binding protein) associated phosphoprotein that represses both basal and activated levels of transcription. In vivo phosphorylation of the protein affects its interaction with TBP (Inostroza et at 1992). As mentioned above, expression of DR1 was upregulated in colon (Langmann et al 2004).

[0247] HSPA4: heat shock 70 kDa protein 4. Heat shock proteins (HSP) are evolutionarily conserved stress proteins which protect cell against stress and injury. The Hsp70 family plays important roles in intracellular trafficking and conformation of proteins by acting as a molecular chaperon. Some reports have suggested the protective role of inducible Hsp70 in intestinal cells: these proteins could help in maintenance of intestinal epithelial cell structure and function, and in reducing or alleviating mucosal injury, thereby promoting tissue healing and repair during intestinal inflammation. Indeed, a study reported that heat shock treatment of mice prevents high production of interleukin-6 and nitric oxide and reduces severe damage and apoptosis of the enterocytes in the bowel. However, mice deficient in the inducible hsp70-1 gene were no longer protected by the heat shock treatment (Van Molle et al 2002). Also, two studies looked for genetic associations between inducible Hsp70-2 gene variant, another member of the family, and CD. They showed that allele A of the Hsp70-2 gene was associated with a less severe form of CD (Esaki et al 1999; Klausz et al 2005). Recently, a downregulation of heat shock 70-kDa protein 4 was reported after MDP (the bacterial proteoglycan fragment muramyl dipeptide, a ligand for NOD2) stimulation of NOD2-overexpressing human cultured cells (Weichart et al 2006).

[0248] IRF1: IRF1 encodes interferon regulatory factor 1, a member of the interferon regulatory transcription factor (IRF) family. IRF1 serves as an activator of interferons alpha and beta transcription. Further, IRF1 has been shown to play a role in regulating apoptosis and tumor-suppression. An increased expression of IRF1 in lamina propria mononuclear cells from patients with Crohn's disease has been described and may be relevant to the pathogenesis of CD (Clavell et al 2000). Interestingly, an IRF1 binding motif is present in the promoter of the CARD4/NOD1 gene, and this binding site has been shown to be essential for the increase in gene and protein expression induced by IFN gamma (Hisamatsu et al 2003).

[0249] MI-ER1: now called MIER1. This gene is a mesoderm induction early response 1 homolog and has a transcription regulatory activity. This gene encodes a protein that functions as transcriptional repressor by recruitment of histone deacetylase 1 (Ding et al 2003).

[0250] MS4A3: membrane-spanning 4-domains, subfamily A, member 3 (hematopoietic cell-specific). This gene encodes a member of a gene family which is characterized by common structural features and similar intron/exon splice boundaries and displays unique expression patterns among hematopoietic cells and nonlymphoid tissues. MS4A3 likely plays a role in signal transduction and may function as a subunit associated with receptor complexes. MS4A3 expression is tightly regulated during the differentiation of hematopoietic stem cells, and this protein functions as a hematopoietic cell cycle regulator (Donato et al 2002).

[0251] PNMT: phenylethanolamine N-methyltransferase. This enzyme catalyzes the synthesis of epinephrine from norepinephrine, the last step of catecholamine biosynthesis. The role of sympathetic regulation of gastrointestinal physiology is known. Recently, a role for the sympathetic microenvironment in regulation of colonic macrophage TNF and IL-6 secretion has been described (Straub et al 2005).

[0252] RASSF1: Ras association (RaIGDS/AF-6) domain family 1. This gene encodes a protein similar to the RAS effector proteins. Loss or altered expression of this gene has been associated with the pathogenesis of a variety of cancers, which suggests the tumor suppressor function of this gene (Shivakumar et al 2002).

[0253] TAF4B: This gene encodes a TAF4b RNA polymerase II, TATA box binding protein (TBP)-associated factor, 105 kDa. TATA-binding protein associated factors (TAFs) participate, with TATA binding protein, in the formation of the TFIID protein complex, which is involved in the initiation of gene transcription by RNA polymerase II. Interestingly, Yamit-Hezi et al (1998) have shown that TAFII105 mediates activation of anti-apoptotic genes by NF-kappaB. In addition, it has been shown that TAF(II)105 has a pro-survival role in B and T lymphocytes, where the native protein is expressed. In addition, TAF(II)105 is important for T cell maturation and for production of certain antibody isotypes (Silkov et al 2002). For these reasons, the TAF4B gene is a good candidate gene to play a role in CD.

[0254] USP4: This gene encodes an ubiquitin specific peptidase 4 which has been shown to specifically interact with the retinoblastoma protein (DeSalle et al 2001). Recently, USP4 has been found to be an interaction partner for the carboxyl-terminal tail of the GPCR adenosine A2A receptor (ADORA2A). The binding of USP4 to ADORA2A allows for its accumulation as a deubiquinated protein. This relaxes ER quality control and enhances cell surface expression of functionally active receptors, which are otherwise predominantly intracellular (Milojevic et al 2006). This is particularly interesting because activation of ADORA2A by the selective A2A agonist ATL-146e has been reported to reduce intestinal inflammation in animal models of inflammatory bowel disease (Odashima et at 2005).

[0255] Networks 8 to 23 Direct Only

[0256] Networks 8 to 23 contain 44 original nodes with 16 genes from the fine mapped regions (FIG. 8). From their role in immune response and/or inflammation (TRIP), biochemical pathways involved in the disease pathogenesis (C1orf33, GDF9), some of these genes are very good candidates to play a role in CD (see below). The expression of 6 genes from these networks has been shown to vary in some studies of gene expression profiling for CD. In sigmoid colon tissue from Crohn's patients compared to control tissue, GCSH and NEDD9 were downregulated (Costello et al 2005). In the study by Langmann et at 2004, LYPLA1, MYCN, and ESRRBL1 have been shown to be upregulated in ilea of Crohn's patients compared to control specimens; GLDC was upregulated in colon.

[0257] AMT: This gene encodes an aminomethyltransferase (also called glycine cleavage system protein T), which is an important enzyme in glycine metabolism. Missense mutations in the T-protein gene have been associated with nonketotic hyperglycinemia (Nanao et al 1994; Kure et al 1998).

[0258] BCAR3: breast cancer anti-estrogen resistance 3. BCAR3 was identified in the search for genes involved in the development of estrogen resistance. The gene encodes a component of intracellular signal transduction that causes estrogen-independent proliferation in human breast cancer cells. AND-34, a novel GDP exchange factor, is a murine homolog of human BCAR3. AND-34 is expressed constitutively at significant levels in murine splenic B cells, but not in murine splenic T cells or thymocytes, and AND-34 has also been shown to be regulated by inflammatory cytokines IL1 and TNF (Cai et al 1999; Cai et at 2003).

[0259] C1orf33: This gene encodes a protein sharing a low level of sequence similarity with ribosomal protein P0. The exact function of the encoded protein is currently unknown. However, E2F4 has been shown to bind the endogenous promoter of C1orf33 (Ren et at 2002). E2F-4 is a transcription factor involved in the transition of the cell from the resting state (G0/G1) to the proliferative stage (S). A study reported that the nucleocytoplasmic shuttling of E2F4 was involved in the regulation of human intestinal epithelial cell proliferation and differentiation (Deschenes et at 2004). In addition, E2F4 was expressed in colorectal adenocarcinoma (Mady et at 2002). Also, activation of human PPARG protein decreases expression of human C1orf33 mRNA (Sarraf et at 1998). Since PPARG has been identified as a susceptibility gene in both the SAMP/Yit mouse and in human Crohn's disease (Sugawara et at 2005), C1orf33 is a good candidate to play a role in CD pathogenesis, even if its exact role is not yet known.

[0260] CLASP1: CLASP1 is a nonmotor microtubule-associated protein and is involved in the regulation of microtubule dynamics at the kinetochore and throughout the spindle. CLASP1 interacts with MAPRE1 microtubule-associated protein, RP/EB family, member 1, and with MAPRE3. MAPRE1 and 3 are members of the RP/EB family of genes. MAPRE1 can bind the APC protein which is often mutated in familial and sporadic forms of colorectal cancer. MAPRE1 protein localizes to microtubules, especially the growing ends, in interphase cells. During mitosis, the protein is associated with centrosomes and spindle microtubules. The protein also associates with components of the dynactin complex and the intermediate chain of cytoplasmic dynein. Because of these associations, it is thought that this protein is involved in the regulation of microtubule structures and chromosome stability. MAPRE3 localizes to the cytoplasmic microtubule network.

[0261] GDF9: growth differentiation factor 9. GDF9 is a member of the transforming growth factor-beta superfamily, is expressed in oocytes and is thought to be required for ovarian folliculogenesis (Aaltonen et al 1999). Bone morphogenetic protein receptor type II is a receptor for GDF9 (Vitt et al 2002). Interestingly, BMPR II is expressed in colonic epithelial cell lines. In vitro, BMP2 inhibits colonic epithelial cell growth by promoting apoptosis and differentiation and inhibiting proliferation. Among others, BMP2 and BMPRII are expressed predominantly in mature colonocytes at the epithelial surface in normal adult human and mouse colon. BMP2 expression is lost in the microadenomas of familial adenomatous polyposis patients. These results suggest that BMP2 acts as a tumor suppressor promoting apoptosis in mature colonic epithelial cells (Hardwick et al 2004).

[0262] GPR7: now called NPBWR1. GPR7 is an orphan G protein-coupled receptor, presenting high similarities with opioid and somatostatin receptors. The human 7-transmembrane receptor GPR7 can be activated by the recently discovered neuropeptides NPB and NPW. GPCRs are in general excellent drug targets. Data indicate that NPB and NPW signaling via the GPR7 receptor plays a biologically important role in regulating food intake, energy expenditure, and body weight (Ishii et al, 2003). G Protein Receptors 7 and 8 are expressed in human adrenocortical cells, and their endogenous ligands, neuropeptides B and W, enhance cortisol secretion by activating adenylate cyclase- and phospholipase C-dependent signaling cascades (Mazzocchi G. et al, 2005). This receptor is highly expressed in the nervous system, with suggested roles in neuroendocrine events and pain signaling. There is a relationship between the pathogenesis of inflammatory/immune-mediated neuropathies, GPR7 receptor expression, and pain transmission (Zaratin PF et al, 2005).

[0263] IFT20: This gene encodes an intraflagellar transport 20 homolog. Intraflagellar transport is very important in assembling and maintaining many cilia/flagella, and is involved in many processes such as the motile cilia that drive the swimming of cells, the generation of left-right asymmetry in vertebrate embryos, and the detection of some sensory stimuli (Yin et al 2003).

[0264] INSL5: insulin-like 5. INSL5 is a peptide that belongs to the relaxin/insulin family. INSL5 is a high affinity specific agonist for GPCR142 (GPR100, Liu et al 2005).

[0265] LYPLA1: lysophospholipase I. Lysophospholipases are enzymes that act on biological membranes to regulate the multifunctional lysophospholipids. The protein encoded by this gene hydrolyzes lysophosphatidylcholine in both monomeric and micellar forms. As already mentioned, LYPLA1 expression has been shown to be upregulated in ileum of Crohn's patient compared to control specimens (Langmann et al 2004).

[0266] MGC5508: now called TMEM109. The function of this protein is unknown.

[0267] PAX7: paired box gene 7. This gene is a member of the paired box (PAX) family of transcription factors. These genes play critical roles during fetal development and cancer growth. The specific function of PAX7 is unknown.

[0268] TAS1R2: taste receptor, type 1, member 2. Mouse T1 r2 and T1 r3 combine to function as a receptor recognizing sweet-tasting molecules as diverse as sucrose, saccharin, dulcin, and acesulfame-K.

[0269] TCAP: titin-cap (telethonin). Sarcomere assembly is regulated by the muscle protein titin. This gene encodes a protein found in striated and cardiac muscle that binds to the titin Z1-Z2 domains and is a substrate of titin kinase, interactions thought to be critical to sarcomere assembly. Mutations in this gene are associated with limb-girdle muscular dystrophy type 2G (Moreira et al 2000).

[0270] TRIP: The TRIP gene, now called TRAIP, and also known as TRAF interacting protein, encodes a protein that contains an N-terminal RING finger motif and a putative coiled-coil domain. Tumor necrosis factor (TNF) receptor associated factors (TRAFs) were first identified as two intracellular proteins, TRAF1 and TRAF2. Many of the biological effect of TRAF signaling are mediated by the activation of kinases such as the IkB kinase (IKK) and mitogen-activated protein (MAP) kinases, which in turn modulate the transcriptional activities of the NF-kB and AP-1 families respectively. Thus this gene could be involved in the inflammatory processes seen in CD.

[0271] UBE1L: this gene encodes an ubiquitin-activating enzyme E1-like. This gene encodes a member of the E1 ubiquitin-activating enzyme family. The encoded enzyme is a retinoid target that triggers promyelocytic leukemia (PML)/retinoic acid receptor alpha (RARalpha) degradation and apoptosis in acute promyelocytic leukemia.The modification of proteins with ubiquitin is an important cellular mechanism for targeting abnormal or short-lived proteins for degradation.

[0272] MKI67IP: MKI67 (FHA domain) interacting nucleolar phosphoprotein. MKI67IP is a nucleolar protein interacting with the FHA domain of pKi-67, a large nuclear protein associated with the cell-cycle.

### Results from Analyses Incorporating both Direct and Indirect Interactions for 295 Annotated Genes

[0273] Network 1b Direct and Indirect

[0274] The network 1b contains 35 original nodes with 32 genes from the fine mapped regions (FIG. 9). The expression of 4 genes of this network has been shown to vary in some studies of gene expression profiling for CD. In sigmoid colon tissue from Crohn's patients compared to control tissue, NOS2A and SYNGR2 were upregulated (Costello et at 2005). In the study by Langmann et al 2004, PRKCD has been shown to be downregulated in colons of Crohn's patients compared to control specimens; MS4A1 was downregulated in both colon and ileum.

[0275] For genes CD5, CD6, CSF2, CSF3, DAG1, ERBB2, GNAI2, GPR44, GPX1, GRB7, IL3, IL4, IL5, IL12RB2, IL13, IRF1, KIF3A, KSR1, MKI67IP, MS4A1, MS4A2, NOS2A, PRKCD, RHOA, RPS6KB1, SERPINC1, VTN, ZNFN1A3: please refer to descriptions included in the networks from direct analysis only.

[0276] MS4A4A: membrane-spanning 4-domains, subfamily A, member 4. This gene encodes a member of the membrane-spanning 4A gene family. Members of this nascent protein family are characterized by common structural features and similar intron/exon splice boundaries and display unique expression patterns among hematopoietic cells and nonlymphoid tissues.

[0277] TIAL1: TIA1 cytotoxic granule-associated RNA binding protein-like 1. The protein encoded by this gene is a member of a family of RNA-binding proteins, has three RNA recognition motifs (RRMs), and binds adenine and uridine-rich elements in mRNA and pre-mRNAs of a wide range of genes. It regulates various activities including translational control, splicing and apoptosis. TIAR displays a high affinity binding to the human NOS2A 3′-UTR sequence, and seems to be involved in the post-transcriptional regulation of human iNOS expression (Fechir et al 2005). As described in network 5 direct only, NOS2A expression and nitric oxide (NO) synthesis are increased in epithelial cells and in tissue macrophages of the inflamed mucosa from patients with inflammatory bowel disease (IBD), and NOS2A is increased in circulating monocytes from patients with active IBD and this increased expression correlates with disease activity (Dijkstra et al 2002).

[0278] In addition, TIAR isoform plays a major role in the post-transcriptional silencing for human matrix metalloproteinases-13 (MMP13). MMP13 shows a wide substrate specificity, and its expression is limited to pathological situations such as chronic inflammation and cancer (Yu et al 2003).

[0279] WFS1: Wolfram syndrome 1 (woiframin). WFS1 is a transmembrane protein. Mutations in this gene are associated with Wolfram syndrome (Strom et at 1998). Wolfram syndrome is an autosomal recessive syndrome characterized by insulin-dependent diabetes mellitus and bilateral progressive optic atrophy, usually presenting in childhood or early adult life. Diverse neurologic symptoms, including a predisposition to psychiatric illness, may also be associated with this disorder. Mutations in this gene can also cause autosomal dominant deafness 6 (DFNA6) (Bespalova et al 2001).

[0280] Network 2b Direct and Indirect

[0281] The network 2b contains 35 original nodes with 15 genes from the fine mapped regions (FIG. 10). The expression of 6 genes of this network has been shown to vary in some studies of gene expression profiling for CD. In sigmoid colon tissue from Crohn's patients compared to control tissue, CLTC was upregulated (Costello et al 2005). In the study by Langmann et al 2004, ENTH has been shown to be downregulated in ilea of Crohn's patients compared to control specimens; RB1 was upregulated in both colon and ileum; KCTD3 was upregulated in ileum; GRK5 was upregulated in colon. Contradictory results have been found for PPP2CA: it has been shown to be downregulated in colon in the study of Costello et al 2005, and upregulated in colon and ileum in the study of Langmann et al 2004.

[0282] For genes BSN, CLTC, DCP1A, GRK5, LSM8, MI-ER1, OPRK1, PNMT, PPP2R2C, RAPGEF6, SEMA3F, SEPT8, STARD3, USP4: please refer to descriptions included in the networks from direct analysis only.

[0283] QP-C: now called UQCRQ. ubiquinol-cytochrome c reductase, complex III subunit VII, 9.5 kDa. This gene encodes a ubiquinone-binding protein. This protein is a small core-associated protein and a subunit of ubiquinol-cytochrome c reductase complex III, which is part of the mitochondrial respiratory chain.

[0284] Network 3b Direct and Indirect

[0285] Network 3b contains 35 original nodes with 14 genes from the fine mapped regions (FIG. 11). The expression of 12 genes of this network has been shown to vary in some studies of gene expression profiling for CD. In sigmoid colon tissue from Crohn's patients compared to control tissue, ALOX5AP was upregulated (Costello et al 2005). In the study by Langmann et al 2004, PC4 and NR3C1 have been shown to be downregulated in ilea of Crohn's patients compared to control specimens; MST1 was upregulated in ileum; APPBP2 was upregulated in colon; THRAP4, BAG1, RANBP9, MST1R, and HYAL2 were downregulated in colon; HSPA1B was upregulated in both colon and ileum. Contradictory results have been found for SNCA: it has been shown to be downregulated in colon in the study of Costello et al 2005, and upregulated in colon and ileum in the study of Langmann et al 2004.

[0286] For the 14 genes from fine mapped regions in this network: please refer to descriptions included in the networks from direct analysis only.

[0287] Network 4b Direct and Indirect

[0288] Network 4b contains 35 original nodes with 14 genes from the fine mapped regions (FIG. 12). The expression of 11 genes of this network has been shown to vary in some studies of gene expression profiling for CD. In sigmoid colon tissue from Crohn's patients compared to control tissue, GCSH was upregulated (Costello et al 2005). In the study by Langmann et al 2004, CCL18, PLEK, PPP1 R1 B have been shown to be downregulated in ileum of Crohn's patient compared to control specimens; LYPLA1 was upregulated in ileum; GLI2, GLDC, and PDE4B were upregulated in colon; CDC42 was downregulated in colon; WWOX and FNBP1L were upregulated in both colon and ileum; LGALS9 was downregulated in both colon and ileum.

[0289] For the 14 genes from fine mapped regions in this network: please refer to descriptions included in the networks from direct analysis only.

[0290] Network 5b Direct and Indirect

[0291] Network 5b contains 35 original nodes with 12 genes from the fine mapped regions (FIG. 13). The expression of 12 genes of this network has been shown to vary in some studies of gene expression profiling for CD. In sigmoid colon tissue from Crohn's patients compared to control tissue, NLK and PSMD3 were upregulated (Costello et al 2005). In the study by Langmann et al 2004, DRAP1, SNRP70, LAMB2, and PSMD3 were downregulated in colon; GBP2 was upregulated in both colon and ileum; DR1, LMNB1, ARG1, NLK and MITF were upregulated in colon.

[0292] For genes CAPZB, DR1, HINT1, IL23R, LAMB2, NLK, PRDX3, PSMD3, TAF4B, TRIP: please refer to descriptions included in the networks from direct analysis only.

[0293] CACNA2D2: calcium channel, voltage-dependent, alpha 2/delta subunit 2. This gene encodes a member of the alpha-2/delta subunit family, a protein in the voltage-dependent calcium channel complex. Calcium channels mediate the influx of calcium ions into the cell upon membrane polarization and consist of a complex of alpha-1, alpha-2/delta, beta, and gamma subunits in a 1:1:1:1 ratio. A mutation in Cacna2d2, the gene encoding the alpha 2 delta-2 voltage-dependent calcium channel accessory subunit, has been found to underlie the ducky phenotype in mouse (a model for absence epilepsy), which is characterized by spike-wave seizures and cerebellar ataxia (Brodbeck et al 2002).

[0294] RBM5: RNA binding motif protein 5. RBM5 is a known modulator of apoptosis (in T cells and other types of cells), an RNA binding protein, and a putative tumor suppressor.

[0295] Network 6b Direct and Indirect

[0296] Network 6b contains 35 original nodes with 12 genes from the fine mapped regions (FIG. 14). The expression of 8 genes of this network has been shown to vary in some studies of gene expression profiling for CD. In the study by Langmann et al 2004, HGF and PAM3C have been shown to be upregulated in ilea of Crohn's patients compared to control specimens; TAGLN2 was downregulated in ileum; PCNA and ERCC5 were upregulated in colon; E4F1 and TKT were downregulated in colon; PTGS2 was upregulated in both colon and ileum.

[0297] For genes GDF9, MAC30, PAX7, POLDIP2, PPM1D, RAD50, RASSF1, RB1CC1, SALL1, TKT, UBE1L: please refer to descriptions included in the networks from direct analysis only.

[0298] USP19: ubiquitin specific peptidase 19. This gene encodes a deubiquitinating enzyme widely expressed in various tissues including skeletal muscle. Expression of this enzyme was increased in rat skeletal muscle during catabolic states (Combaret et al 2005).

[0299] Network 7b Direct and Indirect

[0300] Network 7 contains 35 original nodes with 12 genes from the fine mapped regions (FIG. 15). The expression of 5 genes of this network has been shown to vary in some studies of gene expression profiling for CD. In sigmoid colon tissue from Crohn's patients compared to control tissue, CHUK was upregulated (Costello et al 2005). In the study by Langmann et al 2004, CCR7 and IDI1 have been shown to be downregulated in ileum of Crohn's patient compared to control specimens; GLI2, CCNG1, ACTN1 and CFTR were upregulated in colon.

[0301] For genes C1orf33, CACYBP, CFTR, ELL2, GNAT1, ITIH3, ITIH4, KIAA0992, PDLIM4, RGS10, SEMA3B: please refer to descriptions included in the networks from direct analysis only.

[0302] TNFAIP1: TNFAIP1 is a novel tumor necrosis factor-alpha-induced endothelial primary response gene (Wolf et al., 1992). The response of endothelial cells to the cytokine tumor necrosis factor-alpha (TNF) is complex, involving the induction and suppression of multiple genes and gene products. TNF-alpha is an important cytokine mediator of immune regulation and inflammation, and can cause either beneficial or detrimental properties, through its proinflammatory and proapoptotic effects in various cell types.

[0303] Networks 8b to 17b Direct and Indirect

[0304] Networks 8b to 17b contain 26 original nodes with 10 genes from the fine mapped regions (FIG. 16). The expression of 5 genes of these networks has been shown to vary in some studies of gene expression profiling for CD. In sigmoid colon tissue from Crohn's patients compared to control tissue, CYLD was downregulated (Costello et al 2005). In the study by Langmann et al 2004, MYCN and ESRRBL1 have been shown to be upregulated in ileum of Crohn's patient compared to control specimens; IFRD2 was downregulated in ileum; MAP2K7 was downregulated in colon.

[0305] For genes BRD7, GPR7, IFT20, INSL5, MARLIN1, MGC5508, NEUROD2, TAS1 R2: please refer to descriptions included in the networks from direct analysis only.

[0306] CYLD: this gene encodes an antioncogene that may be involved in ubiquitin-dependent protein catabolism. Kolvalenko et al. (2003) have shown that CYLD negatively regulates NF-kappaB signaling by deubiquitination. They showed that CYLD interacts with NEMO, the regulatory subunit of IKK, and that it also interacts directly with tumour-necrosis factor receptor (TNFR)-associated factor 2 (TRAF2), an adaptor molecule involved in signaling by members of the family of TNF/nerve growth factor receptors. CYLD has also been shown to negatively regulate the c-Jun NH(2)-terminal kinase (JNK). The JNK-inhibitory function of CYLD appears to be specific for immune receptors because the CYLD knockdown has no significant effect on stress-induced JNK activation. Also, CYLD negatively regulates the activation of MAP2K7 (or MKK7), an upstream kinase known to mediate JNK activation by immune stimuli (Reiley et al 2004).

[0307] IFRD2: interferon-related developmental regulator 2. The function of this protein is unknown.

### Results from Analysis Incorporating both Direct and Indirect Interactions for 61 Annotated Genes

[0308] Sixty-one of the 295 genes were selected for analysis using the Ingenuity System based on their location with respect to the statistical evidence as well as potential involvement in the pathophysiology of Crohn's disease. FIGS. 17-23 contain network diagrams similar to those describe above, but are based on this subset of genes that are most likely to represent the susceptibility disease genes. Please refer to the gene descriptions above for information on these networks. FIG. 24 contains a description of the symbols used in the network diagrams.

[0309] Nucleic Acid Sequences

[0310] The nucleic acid sequences of the present invention may be derived from a variety of sources including DNA, cDNA, synthetic DNA, synthetic RNA, derivatives, mimetics or combinations thereof. Such sequences may comprise genomic DNA, which may or may not include naturally occurring introns, genic regions, nongenic regions, and regulatory regions. Moreover, such genomic DNA may be obtained in association with promoter regions or poly (A) sequences. The sequences, genomic DNA, or cDNA may be obtained in any of several ways. Genomic DNA can be extracted and purified from suitable cells by means well known in the art. Alternatively, mRNA can be isolated from a cell and used to produce cDNA by reverse transcription or other means. The nucleic acids described herein are used in certain embodiments of the methods of the present invention for production of RNA, proteins or polypeptides, through incorporation into cells, tissues, or organisms. In one embodiment, DNA containing all or part of the coding sequence for the genes described in Tables 8, 9, 19, 20, 21, 22, 23 or 24, or the SNP markers described in Tables 2, 3, 4, 5, 6, 7 or 10, is incorporated into a vector for expression of the encoded polypeptide in suitable host cells. The invention also comprises the use of the nucleotide sequence of the nucleic acids of this invention to identify DNA probes for the genes described in Tables 8, 9, 19, 20, 21, 22, 23 or 24 or the SNP markers described in Tables 2, 3, 4, 5, 6, 7 or 10, PCR primers to amplify the genes described in Tables 8, 9, 19, 20, 21, 22, 23 or 24 or the SNP markers described in Tables 2, 3, 4, 5, 6, 7 or 10, nucleotide polymorphisms in the genes described in Tables 8, 9, 19, 20, 21, 22, 23 or 24, and regulatory elements of the genes described in Tables 8, 9, 19, 20, 21, 22, 23 or 24. The nucleic acids of the present invention find use as primers and templates for the recombinant production of Crohn's disease-associated peptides or polypeptides, for chromosome and gene mapping, to provide antisense sequences, for tissue distribution studies, to locate and obtain full length genes, to identify and obtain homologous sequences (wild-type and mutants), and in diagnostic applications.

[0311] Antisense Oligonucleotides

[0312] In a particular embodiment of the invention, an antisense nucleic acid or oligonucleotide is wholly or partially complementary to, and can hybridize with, a target nucleic acid (either DNA or RNA) having the sequence of SEQ ID NO:1, NO:3 or any SEQ ID from any Tables of the invention. For example, an antisense nucleic acid or oligonucleotide comprising 16 nucleotides can be sufficient to inhibit expression of at least one gene from Tables 8, 9, 19, 20, 21, 22, 23 or 24. Alternatively, an antisense nucleic acid or oligonucleotide can be complementary to 5′ or 3′ untranslated regions, or can overlap the translation initiation codon (5′ untranslated and translated regions) of at least one gene from Tables 8, 9, 19, 20, 21, 22, 23 or 24, or its functional equivalent. In another embodiment, the antisense nucleic acid is wholly or partially complementary to, and can hybridize with, a target nucleic acid that encodes a polypeptide from a gene described in Tables 8, 9, 19, 20, 21, 22, 23 or 24.

[0313] In addition, oligonucleotides can be constructed which will bind to duplex nucleic acid (i.e., DNA:DNA or DNA:RNA), to form a stable triple helix containing or triplex nucleic acid. Such triplex oligonucleotides can inhibit transcription and/or expression of a gene from Tables 8, 9, 19, 20, 21, 22, 23 or 24, or its functional equivalent (M. D. Frank-Kamenetskii et al., 1995). Triplex oligonucleotides are constructed using the basepairing rules of triple helix formation and the nucleotide sequence of the genes described in Tables 8, 9, 19, 20, 21, 22, 23 or 24.

[0314] The present invention encompasses methods of using oligonucleotides in antisense inhibition of the function of the genes from Tables 8, 9, 19, 20, 21, 22, 23 or 24. In the context of this invention, the term “oligonucleotide” refers to naturally-occurring species or synthetic species formed from naturally-occurring subunits or their close homologs. The term may also refer to moieties that function similarly to oligonucleotides, but have non-naturally-occurring portions. Thus, oligonucleotides may have altered sugar moieties or inter-sugar linkages. Exemplary among these are phosphorothioate and other sulfur containing species which are known in the art. In preferred embodiments, at least one of the phosphodiester bonds of the oligonucleotide has been substituted with a structure that functions to enhance the ability of the compositions to penetrate into the region of cells where the RNA whose activity is to be modulated is located. It is preferred that such substitutions comprise phosphorothioate bonds, methyl phosphonate bonds, or short chain alkyl or cycloalkyl structures. In accordance with other preferred embodiments, the phosphodiester bonds are substituted with structures which are, at once, substantially non-ionic and non-chiral, or with structures which are chiral and enantiomerically specific. Persons of ordinary skill in the art will be able to select other linkages for use in the practice of the invention. Oligonucleotides may also include species that include at least some modified base forms. Thus, purines and pyrimidines other than those normally found in nature may be so employed. Similarly, modifications on the furanosyl portions of the nucleotide subunits may also be effected, as long as the essential tenets of this invention are adhered to. Examples of such modifications are 2′-O-alkyl- and 2′-halogen-substituted nucleotides. Some non-limiting examples of modifications at the 2′ position of sugar moieties which are useful in the present invention include OH, SH, SCH3, F, OCH3, OCN, O(CH2), NH2 and O(CH2)n CH3, where n is from 1 to about 10. Such oligonucleotides are functionally interchangeable with natural oligonucleotides or synthesized oligonucleotides, which have one or more differences from the natural structure. All such analogs are comprehended by this invention so long as they function effectively to hybridize with at least one gene from Tables 8, 9, 19, 20, 21, 22, 23 or 24 DNA or RNA to inhibit the function thereof.

[0315] The oligonucleotides in accordance with this invention preferably comprise from about 3 to about 50 subunits. It is more preferred that such oligonucleotides and analogs comprise from about 8 to about 25 subunits and still more preferred to have from about 12 to about 20 subunits. As defined herein, a “subunit” is a base and sugar combination suitably bound to adjacent subunits through phosphodiester or other bonds. Antisense nucleic acids or oligonuicleotides can be produced by standard techniques (see, e.g., Shewmaker et al., U.S. Pat. No. 6,107,065). The oligonucleotides used in accordance with this invention may be conveniently and routinely made through the well-known technique of solid phase synthesis. Any other means for such synthesis may also be employed; however, the actual synthesis of the oligonucleotides is well within the abilities of the practitioner. It is also well known to prepare other oligonucleotides such as phosphorothioates and alkylated derivatives.

[0316] The oligonucleotides of this invention are designed to be hybridizable with RNA (e.g., mRNA) or DNA from genes described in Tables 8, 9, 19, 20, 21, 22, 23 or 24. For example, an oligonucleotide (e.g., DNA oligonucleotide) that hybridizes to mRNA from a gene described in Tables 8, 9, 19, 20, 21, 22, 23 or 24 can be used to target the mRNA for RnaseH digestion. Alternatively an oligonucleotide that can hybridize to the translation initiation site of the mRNA of a gene described in Tables 8, 9, 19, 20, 21, 22, 23 or 24 can be used to prevent translation of the mRNA. In another approach, oligonucleotides that bind to the double-stranded DNA of a gene from Tables 8, 9, 19, 20, 21, 22, 23 or 24 can be administered. Such oligonucleotides can form a triplex construct and inhibit the transcription of the DNA encoding polypeptides of the genes described in Tables 8, 9, 19, 20, 21, 22, 23 or 24. Triple helix pairing prevents the double helix from opening sufficiently to allow the binding of polymerases, transcription factors, or regulatory molecules. Recent therapeutic advances using triplex DNA have been described (see, e.g., J. E. Gee et al., 1994, Molecular and Immunologic Approaches, Futura Publishing Co., Mt. Kisco, N.Y.).

[0317] As non-limiting examples, antisense oligonucleotides may be targeted to hybridize to the following regions: mRNA cap region; translation initiation site; translational termination site; transcription initiation site; transcription termination site; polyadenylation signal; 3′ untranslated region; 5′ untranslated region; 5′ coding region; mid coding region; and 3′ coding region. Preferably, the complementary oligonucleotide is designed to hybridize to the most unique 5′ sequence of a gene described in Tables 8, 9, 19, 20, 21, 22, 23 or 24, including any of about 15-35 nucleotides spanning the 5′ coding sequence. In accordance with the present invention, the antisense oligonucleotide can be synthesized, formulated as a pharmaceutical composition, and administered to a subject. The synthesis and utilization of antisense and triplex oligonucleotides have been previously described (e.g., Simon et al., 1999; Barre et al., 2000; Elez et al., 2000; Sauter et al., 2000).

[0318] Alternatively, expression vectors derived from retroviruses, adenovirus, herpes or vaccinia viruses or from various bacterial plasmids may be used for delivery of nucleotide sequences to the targeted organ, tissue or cell population. Methods which are well known to those skilled in the art can be used to construct recombinant vectors which will express nucleic acid sequence that is complementary to the nucleic acid sequence encoding a polypeptide from the genes described in Tables 8, 9, 19, 20, 21, 22, 23 or 24. These techniques are described both in Sambrook et al., 1989 and in Ausubel et al., 1992. For example, expression of at least one gene from Tables 8, 9, 19, 20, 21, 22, 23 or 24 can be inhibited by transforming a cell or tissue with an expression vector that expresses high levels of untranslatable sense or antisense sequences. Even in the absence of integration into the DNA, such vectors may continue to transcribe RNA molecules until they are disabled by endogenous nucleases. Transient expression may last for a month or more with a nonreplicating vector, and even longer if appropriate replication elements are included in the vector system. Various assays may be used to test the ability of gene-specific antisense oligonucleotides to inhibit the expression of at least one gene from Tables 8, 9, 19, 20, 21, 22, 23 or 24. For example, mRNA levels of the genes described in Tables 8, 9, 19, 20, 21, 22, 23 or 24 can be assessed by Northern blot analysis (Sambrook et al., 1989; Ausubel et al., 1992; J. C. Alwine et al. 1977; I. M. Bird, 1998), quantitative or semi-quantitative RT-PCR analysis (see, e.g., W. M. Freeman et al., 1999; Ren et al., 1998; J. M. Cale et al., 1998), or in situ hybridization (reviewed by A. K. Raap, 1998). Alternatively, antisense oligonucleotides may be assessed by measuring levels of the polypeptide from the genes described in Tables 8, 9, 19, 20, 21, 22, 23 or 24, e.g., by western blot analysis, indirect immunofluorescence and immunoprecipitation techniques (see, e.g., J. M. Walker, 1998, Protein Protocols on CD-ROM, Humana Press, Totowa, N.J.). Any other means for such detection may also be employed, and is well within the abilities of the practitioner.

[0319] Mapping Technologies

[0320] The present invention includes various methods which employ mapping technologies to map SNPs and polymorphisms. For purpose of clarity, this section comprises, but is not limited to, the description of mapping technologies that can be utilized to achieve the embodiments described herein. Mapping technologies may be based on amplification methods, restriction enzyme cleavage methods, hybridization methods, sequencing methods, and cleavage methods using agents.

[0321] Amplification methods include: self sustained sequence replication (Guatelli et al., 1990), transcriptional amplification system (Kwoh et al., 1989), Q-Beta Replicase (Lizardi et al., 1988), isothermal amplification (e.g. Dean et al., 2002; and Hefner et al., 2001), or any other nucleic acid amplification method, followed by the detection of the amplified molecules using techniques well known to those of ordinary skill in the art. These detection schemes are especially useful for the detection of nucleic acid molecules if such molecules are present in very low number.

[0322] Restriction enzyme cleavage methods include: isolating sample and control DNA, amplification (optional), digestion with one or more restriction endonucleases, determination of fragment length sizes by gel electrophoresis and comparing samples and controls. Differences in fragment length sizes between sample and control DNA indicates mutations in the sample DNA. Moreover, sequence specific ribozymes (see, e.g., U.S. Pat. No. 5,498,531) or DNAzyme (e.g. U.S. Pat. No. 5,807,718) can be used to score for the presence of specific mutations by development or loss of a ribozyme or DNAzyme cleavage site.

[0323] Hybridization methods include any measurement of the hybridization or gene expression levels, of sample nucleic acids to probes corresponding to about 2, 3, 4, 5, 6, 7, 8, 9, 10, 15, 20, 25, 30, 50, 75, 100, 200, 500, 1000 or more genes, or ranges of these numbers, such as about 2-10, about 10-20, about 20-50, about 50-100, about 100-200, about 200-500 or about 500-1000 genes of Table 2, 3, 4, 5, 6, 7, 8, 9, 10, 11, 12, 13, 14, 15, 16, 17 or 18.

[0324] SNPs and SNP maps of the invention can be identified or generated by hybridizing sample nucleic acids, e.g., DNA or RNA, to high density arrays or bead arrays containing oligonucleotide probes corresponding to the polymorphisms of Tables 2, 3, 4, 5, 6, 7 or 10 (see the Affymetrix arrays and Illumina bead sets at www.affymetrix.com and www.illumina.com and see Cronin et al., 1996; or Kozel et al., 1996).

[0325] Methods of forming high density arrays of oligonucleotides with a minimal number of synthetic steps are known. The oligonucleotide analogue array can be synthesized on a single or on multiple solid substrates by a variety of methods, including, but not limited to, light-directed chemical coupling, and mechanically directed coupling (see Pirrung, U.S. Pat. No. 5,143,854).

[0326] In brief, the light-directed combinatorial synthesis of oligonucleotide arrays on a glass surface proceeds using automated phosphoramidite chemistry and chip masking techniques. In one specific implementation, a glass surface is derivatized with a silane reagent containing a functional group, e.g., a hydroxyl or amine group blocked by a photolabile protecting group. Photolysis through a photolithogaphic mask is used selectively to expose functional groups which are then ready to react with incoming 5′ photoprotected nucleoside phosphoramidites. The phosphoramidites react only with those sites which are illuminated (and thus exposed by removal of the photolabile blocking group). Thus, the phosphoramidites only add to those areas selectively exposed from the preceding step. These steps are repeated until the desired array of sequences have been synthesized on the solid surface. Combinatorial synthesis of different oligonucleotide analogues at different locations on the array is determined by the pattern of illumination during synthesis and the order of addition of coupling reagents.

[0327] In addition to the foregoing, additional methods which can be used to generate an array of oligonucleotides on a single substrate are described in PCT Publication Nos. WO 93/09668 and WO 01/23614. High density nucleic acid arrays can also be fabricated by depositing pre-made or natural nucleic acids in predetermined positions. Synthesized or natural nucleic acids are deposited on specific locations of a substrate by light directed targeting and oligonucleotide directed targeting. Another embodiment uses a dispenser that moves from region to region to deposit nucleic acids in specific spots.

[0328] Nucleic acid hybridization simply involves contacting a probe and target nucleic acid under conditions where the probe and its complementary target can form stable hybrid duplexes through complementary base pairing. See WO 99/32660. The nucleic acids that do not form hybrid duplexes are then washed away leaving the hybridized nucleic acids to be detected, typically through detection of an attached detectable label. It is generally recognized that nucleic acids are denatured by increasing the temperature or decreasing the salt concentration of the buffer containing the nucleic acids. Under low stringency conditions (e.g., low temperature and/or high salt) hybrid duplexes (e.g., DNA:DNA, RNA:RNA, or RNA:DNA) will form even where the annealed sequences are not perfectly complementary. Thus, specificity of hybridization is reduced at lower stringency. Conversely, at higher stringency (e.g., higher temperature or lower salt) successful hybridization tolerates fewer mismatches. One of skill in the art will appreciate that hybridization conditions may be selected to provide any degree of stringency.

[0329] In a preferred embodiment, hybridization is performed at low stringency, in this case in 6× SSPET at 37° C. (0.005% Triton X-100), to ensure hybridization and then subsequent washes are performed at higher stringency (e.g., 1× SSPET at 37° C.) to eliminate mismatched hybrid duplexes. Successive washes may be performed at increasingly higher stringency (e.g., down to as low as 0.25× SSPET at 37° C. to 50° C.) until a desired level of hybridization specificity is obtained. Stringency can also be increased by addition of agents such as formamide. Hybridization specificity may be evaluated by comparison of hybridization to the test probes with hybridization to the various controls that can be present (e.g., expression level control, normalization control, mismatch controls, etc.).

[0330] In general, there is a tradeoff between hybridization specificity (stringency) and signal intensity. Thus, in a preferred embodiment, the wash is performed at the highest stringency that produces consistent results and that provides a signal intensity greater than approximately 10% of the background intensity. Thus, in a preferred embodiment, the hybridized array may be washed at successively higher stringency solutions and read between each wash. Analysis of the data sets thus produced will reveal a wash stringency above which the hybridization pattern is not appreciably altered and which provides adequate signal for the particular oligonucleotide probes of interest.

[0331] Probes based on the sequences of the genes described above may be prepared by any commonly available method. Oligonucleotide probes for screening or assaying a tissue or cell sample are preferably of sufficient length to specifically hybridize only to appropriate, complementary genes or transcripts. Typically the oligonucleotide probes will be at least about 10, 12, 14, 16, 18, 20 or 25 nucleotides in length. In some cases, longer probes of at least 30, 40, or 50 nucleotides will be desirable.

[0332] As used herein, oligonucleotide sequences that are complementary to one or more of the genes or gene fragments described in Table 2 refer to oligonucleotides that are capable of hybridizing under stringent conditions to at least part of the nucleotide sequences of said genes. Such hybridizable oligonucleotides will typically exhibit at least about 75% sequence identity at the nucleotide level to said genes, preferably about 80% or 85% sequence identity or more preferably about 90% or 95% or more sequence identity to said genes (see GeneChip® Expression Analysis Manual, Affymetrix, Rev. 3, which is herein incorporated by reference in its entirety).

[0333] The phrase “hybridizing specifically to” or “specifically hybridizes” refers to the binding, duplexing, or hybridizing of a molecule substantially to or only to a particular nucleotide sequence or sequences under stringent conditions when that sequence is present in a complex mixture (e.g., total cellular) DNA or RNA.

[0334] As used herein a “probe” is defined as a nucleic acid, capable of binding to a target nucleic acid of complementary sequence through one or more types of chemical bonds, usually through complementary base pairing, usually through hydrogen bond formation. As used herein, a probe may include natural (i.e., A, G, U, C, or T) or modified bases (7-deazaguanosine, inosine, etc.). In addition, the bases in probes may be joined by a linkage other than a phosphodiester bond, so long as it does not interfere with hybridization. Thus, probes may be peptide nucleic acids in which the constituent bases are joined by peptide bonds rather than phosphodiester linkages.

[0335] A variety of sequencing reactions known in the art can be used to directly sequence nucleic acids for the presence or the absence of one or more polymorphisms of Tables 2, 3, 4, 5, 6, 7 or 10. Examples of sequencing reactions include those based on techniques developed by Maxam and Gilbert (1977) or Sanger (1977). It is also contemplated that any of a variety of automated sequencing procedures can be utilized, including sequencing by mass spectrometry (see, e.g. PCT International Publication No. WO 94/16101; Cohen et al., 1996; and Griffin et al., 1993), real-time pyrophosphate sequencing method (Ronaghi et al.,1998; and Permutt et al., 2001) and sequencing by hybridization (see e.g. Drmanac et al., 2002).

[0336] Other methods of detecting polymorphisms include methods in which protection from cleavage agents is used to detect mismatched bases in RNA/RNA, DNA/DNA or RNA/DNA heteroduplexes (Myers et al., 1985). In general, the technique of “mismatch cleavage” starts by providing heteroduplexes formed by hybridizing (labeled) RNA or DNA containing a wild-type sequence with potentially mutant RNA or DNA obtained from a sample. The double-stranded duplexes are treated with an agent who cleaves single-stranded regions of the duplex such as which will exist due to basepair mismatches between the control and sample strands. For instance, RNA/DNA duplexes can be treated with RNase and DNA/DNA hybrids treated with S1 nuclease to enzymatically digest the mismatched regions. In other embodiments, either DNA/DNA or RNA/DNA duplexes can be treated with hydroxylamine or osmium tetroxide and with piperidine in order to digest mismatched regions. After digestion of the mismatched regions, the resulting material is then separated by size on denaturing polyacrylamide gels to determine the site of a mutation or SNP (see, for example, Cotton et al., 1988; and Saleeba et al., 1992). In a preferred embodiment, the control DNA or RNA can be labeled for detection.

[0337] In still another embodiment, the mismatch cleavage reaction employs one or more proteins that recognize mismatched base pairs in double-stranded DNA (so called “DNA mismatch repair” enzymes) in defined systems for detecting and mapping polymorphisms. For example, the mutY enzyme of E. coli cleaves A at G/A mismatches (Hsu et al., 1994). Other examples include, but are not limited to, the MutHLS enzyme complex of E. coli (Smith and Modrich Proc. 1996) and Cel 1 from the celery (Kulinski et al., 2000) both cleave the DNA at various mismatches. According to an exemplary embodiment, a probe based on a polymorphic site corresponding to a polymorphism of Tables 2, 3, 4, 5, 6, 7 or 10 is hybridized to a cDNA or other DNA product from a test cell or cells. The duplex is treated with a DNA mismatch repair enzyme, and the cleavage products, if any, can be detected from electrophoresis protocols or the like. See, for example, U.S. Pat. No. 5,459,039. Alternatively, the screen can be performed in vivo following the insertion of the heteroduplexes in an appropriate vector. The whole procedure is known to those ordinary skilled in the art and is referred to as mismatch repair detection (see e.g. Fakhrai-Rad et al., 2004).

[0338] In other embodiments, alterations in electrophoretic mobility can be used to identify polymorphisms in a sample. For example, single strand conformation polymorphism (SSCP) analysis can be used to detect differences in electrophoretic mobility between mutant and wild type nucleic acids (Orita et al., 1989; Cotton et al., 1993; and Hayashi 1992). Single-stranded DNA fragments of case and control nucleic acids will be denatured and allowed to renature. The secondary structure of single-stranded nucleic acids varies according to sequence. The resulting alteration in electrophoretic mobility enables the detection of even a single base change. The DNA fragments may be labeled or detected with labeled probes. The sensitivity of the assay may be enhanced by using RNA (rather than DNA), in which the secondary structure is more sensitive to a change in sequence. In a preferred embodiment, the method utilizes heteroduplex analysis to separate double stranded heteroduplex molecules on the basis of changes in electrophoretic mobility (Kee et al., 1991).

[0339] In yet another embodiment, the movement of mutant or wild-type fragments in a polyacrylamide gel containing a gradient of denaturant is assayed using denaturing gradient gel electrophoresis (DGGE) (Myers et al., 1985). When DGGE is used as the method of analysis, DNA will be modified to insure that it does not completely denature, for example by adding a GC clamp of approximately 40 by of high-melting GC-rich DNA by PCR. In a further embodiment, a temperature gradient is used in place of a denaturing gradient to identify differences in the mobility of control and sample DNA (Rosenbaum et al., 1987). In another embodiment, the mutant fragment is detected using denaturing HPLC (see e.g. Hoogendoorn et al., 2000).

[0340] Examples of other techniques for detecting polymorphisms include, but are not limited to, selective oligonucleotide hybridization, selective amplification, selective primer extension, selective ligation, single-base extension, selective termination of extension or invasive cleavage assay. For example, oligonucleotide primers may be prepared in which the polymorphism is placed centrally and then hybridized to target DNA under conditions which permit hybridization only if a perfect match is found (Saiki et al., 1986; Saiki et al., 1989). Such oligonucleotides are hybridized to PCR amplified target DNA or a number of different mutations when the oligonucleotides are attached to the hybridizing membrane and hybridized with labeled target DNA. Alternatively, the amplification, the allele-specific hybridization and the detection can be done in a single assay following the principle of the 5′ nuclease assay (e.g. see Livak et al., 1995). For example, the associated allele, a particular allele of a polymorphic locus, or the like is amplified by PCR in the presence of both allele-specific oligonucleotides, each specific for one or the other allele. Each probe has a different fluorescent dye at the 5′ end and a quencher at the 3′ end. During PCR, if one or the other or both allele-specific oligonucleotides are hybridized to the template, the Taq polymerase via its 5′ exonuclease activity will release the corresponding dyes. The latter will thus reveal the genotype of the amplified product.

[0341] Hybridization assays may also be carried out with a temperature gradient following the principle of dynamic allele-specific hybridization or like e.g. Jobs et al., (2003); and Bourgeois and Labuda, (2004). For example, the hybridization is done using one of the two allele-specific oligonucleotides labeled with a fluorescent dye, and an intercalating quencher under a gradually increasing temperature. At low temperature, the probe is hybridized to both the mismatched and full-matched template. The probe melts at a lower temperature when hybridized to the template with a mismatch. The release of the probe is captured by an emission of the fluorescent dye, away from the quencher. The probe melts at a higher temperature when hybridized to the template with no mismatch. The temperature-dependent fluorescence signals therefore indicate the absence or presence of an associated allele, a particular allele of a polymorphic locus, or the like (e.g. Jobs et al., 2003). Alternatively, the hybridization is done under a gradually decreasing temperature. In this case, both allele-specific oligonucleotides are hybridized to the template competitively. At high temperature none of the two probes are hybridized. Once the optimal temperature of the full-matched probe is reached, it hybridizes and leaves no target for the mismatched probe (e.g. Bourgeois and Labuda, 2004). In the latter case, if the allele-specific probes are differently labeled, then they are hybridized to a single PCR-amplified target. If the probes are labeled with the same dye, then the probe cocktail is hybridized twice to identical templates with only one labeled probe, different in the two cocktails, in the presence of the unlabeled competitive probe.

[0342] Alternatively, allele specific amplification technology that depends on selective PCR amplification may be used in conjunction with the present invention. Oligonucleotides used as primers for specific amplification may carry the associated allele, a particular allele of a polymorphic locus, or the like, also referred to as “mutation” of interest in the center of the molecule, so that amplification depends on differential hybridization (Gibbs et al., 1989) or at the extreme 3′ end of one primer where, under appropriate conditions, mismatch can prevent, or reduce polymerase extension (Prossner, 1993). In addition it may be desirable to introduce a novel restriction site in the region of the mutation to create cleavage-based detection (Gasparini et al., 1992). It is anticipated that in certain embodiments, amplification may also be performed using Taq ligase for amplification (Barany, 1991). In such cases, ligation will occur only if there is a perfect match at the 3′ end of the 5′ sequence making it possible to detect the presence of a known associated allele, a particular allele of a polymorphic locus, or the like at a specific site by looking for the presence or absence of amplification. The products of such an oligonucleotide ligation assay can also be detected by means of gel electrophoresis. Furthermore, the oligonucleotides may contain universal tags used in PCR amplification and zip code tags that are different for each allele. The zip code tags are used to isolate a specific, labeled oligonucleotide that may contain a mobility modifier (e.g. Grossman et al., 1994).

[0343] In yet another alternative, allele-specific elongation followed by ligation will form a template for PCR amplification. In such cases, elongation will occur only if there is a perfect match at the 3′ end of the allele-specific oligonucleotide using a DNA polymerase. This reaction is performed directly on the genomic DNA and the extension/ligation products are amplified by PCR. To this end, the oligonucleotides contain universal tags allowing amplification at a high multiplex level and a zip code for SNP identification. The PCR tags are designed in such a way that the two alleles of a SNP are amplified by different forward primers, each having a different dye. The zip code tags are the same for both alleles of a given SNPs and they are used for hybridization of the PCR-amplified products to oligonucleotides bound to a solid support, chip, bead array or like. For an example of the procedure, see Fan et al. (Cold Spring Harbor Symposia on Quantitative Biology, Vol. LXVIII, pp. 69-78 2003).

[0344] Another alternative includes the single-base extension/ligation assay using a molecular inversion probe, consisting of a single, long oligonucleotide (see e.g. Hardenbol et al., 2003). In such an embodiment, the oligonucleotide hybridizes on both side of the SNP locus directly on the genomic DNA, leaving a one-base gap at the SNP locus. The gap-filling, one-base extension/ligation is performed in four tubes, each having a different dNTP. Following this reaction, the oligonucleotide is circularized whereas unreactive, linear oligonucleotides are degraded using an exonuclease such as exonuclease I of E. coli. The circular oligonucleotides are then linearized and the products are amplified and labeled using universal tags on the oligonucleotides. The original oligonucleotide also contains a SNP-specific zip code allowing hybridization to oligonucleotides bound to a solid support, chip, and bead array or like. This reaction can be performed at a high multiplexed level.

[0345] In another alternative, the associated allele, a particular allele of a polymorphic locus, or the like is scored by single-base extension (see e.g. U.S. Pat. No. 5,888,819). The template is first amplified by PCR. The extension oligonucleotide is then hybridized next to the SNP locus and the extension reaction is performed using a thermostable polymerase such as ThermoSequenase (GE Healthcare) in the presence of labeled ddNTPs. This reaction can therefore be cycled several times. The identity of the labeled ddNTP incorporated will reveal the genotype at the SNP locus. The labeled products can be detected by means of gel electrophoresis, fluorescence polarization (e.g. Chen et al., 1999) or by hybridization to oligonucleotides bound to a solid support, chip, and bead array or like. In the latter case, the extension oligonucleotide will contain a SNP-specific zip code tag.

[0346] In yet another alternative, a SNP is scored by selective termination of extension. The template is first amplified by PCR and the extension oligonucleotide hybridizes in the vicinity of the SNP locus, close to but not necessarily adjacent to it. The extension reaction is carried out using a thermostable polymerase such as ThermoSequenase (GE Healthcare) in the presence of a mix of dNTPs and at least one ddNTP. The latter has to terminate the extension at one of the allele of the interrogated SNP, but not both such that the two alleles will generate extension products of different sizes. The extension product can then be detected by means of gel electrophoresis, in which case the extension products need to be labeled, or by mass spectrometry (see e.g. Storm et al., 2003).

[0347] In another alternative, SNPs are detected using an invasive cleavage assay (see U.S. Pat. No. 6,090,543). There are five oligonucleotides per SNP to interrogate but these are used in a two step-reaction. During the primary reaction, three of the designed oligonucleotides are first hybridized directly to the genomic DNA. One of them is locus-specific and hybridizes up to the SNP locus (the pairing of the 3′ base at the SNP locus is not necessary). There are two allele-specific oligonucleotides that hybridize in tandem to the locus-specific probe but also contain a 5′ flap that is specific for each allele of the SNP. Depending upon hybridization of the allele-specific oligonucleotides at the base of the SNP locus, this creates a structure that is recognized by a cleavase enzyme (U.S. Pat. No. 6,090,606) and the allele-specific flap is released. During the secondary reaction, the flap fragments hybridize to a specific cassette to recreate the same structure as above except that the cleavage will release a small DNA fragment labeled with a fluorescent dye that can be detected using regular fluorescence detector. In the cassette, the emission of the dye is inhibited by a quencher.

[0348] Methods to Identify Agents that Modulate the Expression of a Nucleic Acid Encoding a Gene Involved in Crohn's Disease.

[0349] The present invention provides methods for identifying agents that modulate the expression of a nucleic acid encoding a gene from Tables 8, 9, 19, 20, 21, 22, 23 or 24. Such methods may utilize any available means of monitoring for changes in the expression level of the nucleic acids of the invention. As used herein, an agent is said to modulate the expression of a nucleic acid of the invention if it is capable of up- or down-regulating expression of the nucleic acid in a cell. Such cells can be obtained from any parts of the body such as the GI track, colon, esophagus, stomach, rectum, jujenum, ileum, mucosa, submucosa, cecum, rectum, scalp, blood, dermis, epidermis, skin cells, cutaneous surfaces, intertrigious areas, genitalia, vessels and endothelium. Some non-limiting examples of cells that can be used are: muscle cells, nervous cells, blood and vessels cells, dermis, epidermis and other skin cells, T cell, mast cell, CD4+ lymphocyte, monocyte, macrophage, synovial cell, glial cell, villous intestinal cell, neutrophilic granulocyte, eosinophilic granulocyte, keratinocyte, lamina propria lymphocyte, intraepithelial lymphocyte, epithelial cells and lymphocytes.

[0350] In one assay format, the expression of a nucleic acid encoding a gene of the invention (see Tables 8, 9, 19, 20, 21, 22, 23 or 24) in a cell or tissue sample is monitored directly by hybridization to the nucleic acids of the invention. Cell lines or tissues are exposed to the agent to be tested under appropriate conditions and time and total RNA or mRNA is isolated by standard procedures such as those disclosed in Sambrook et al., (1989) Molecular Cloning: A Laboratory Manual, Cold Spring Harbor Laboratory Press).

[0351] Probes to detect differences in RNA expression levels between cells exposed to the agent and control cells may be prepared as described above. Hybridization conditions are modified using known methods, such as those described by Sambrook et al., and Ausubel et al., as required for each probe. Hybridization of total cellular RNA or RNA enriched for polyA RNA can be accomplished in any available format. For instance, total cellular RNA or RNA enriched for polyA RNA can be affixed to a solid support and the solid support exposed to at least one probe comprising at least one, or part of one of the sequences of the invention under conditions in which the probe will specifically hybridize. Alternatively, nucleic acid fragments comprising at least one, or part of one of the sequences of the invention can be affixed to a solid support, such as a silicon chip or a porous glass wafer. The chip or wafer can then be exposed to total cellular RNA or polyA RNA from a sample under conditions in which the affixed sequences will specifically hybridize to the RNA. By examining for the ability of a given probe to specifically hybridize to an RNA sample from an untreated cell population and from a cell population exposed to the agent, agents which up or down regulate expression are identified.

[0352] Methods to Identify Agents that Modulate the Activity of a Protein Encoded by a Gene Involved in Crohn's Disease.

[0353] The present invention provides methods for identifying agents that modulate at least one activity of the proteins described in Tables 8, 9, 19, 20, 21, 22, 23 or 24. Such methods may utilize any means of monitoring or detecting the desired activity. As used herein, an agent is said to modulate the expression of a protein of the invention if it is capable of up- or down-regulating expression of the protein in a cell. Such cells can be obtained from any parts of the body such as the GI track, colon, esophagus, stomach, rectum, jujenum, ileum, mucosa, submucosa, cecum, rectum, scalp, blood, dermis, epidermis, skin cells, cutaneous surfaces, intertrigious areas, genitalia, vessels and endothelium. Some non-limiting examples of cells that can be used are: muscle cells, nervous cells, blood and vessels cells, dermis, epidermis and other skin cells, T cell, mast cell, CD4+ lymphocyte, monocyte, macrophage, synovial cell, glial cell, villous intestinal cell, neutrophilic granulocyte, eosinophilic granulocyte, keratinocyte, lamina propria lymphocyte, intraepithelial lymphocyte, epithelial cells and lymphocytes.

[0354] In one format, the specific activity of a protein of the invention, normalized to a standard unit, may be assayed in a cell population that has been exposed to the agent to be tested and compared to an unexposed control cell population may be assayed. Cell lines or populations are exposed to the agent to be tested under appropriate conditions and times. Cellular lysates may be prepared from the exposed cell line or population and a control, unexposed cell line or population. The cellular lysates are then analyzed with the probe.

[0355] Antibody probes can be prepared by immunizing suitable mammalian hosts utilizing appropriate immunization protocols using the proteins of the invention or antigen-containing fragments thereof. To enhance immunogenicity, these proteins or fragments can be conjugated to suitable carriers. Methods for preparing immunogenic conjugates with carriers such as BSA, KLH or other carrier proteins are well known in the art. In some circumstances, direct conjugation using, for example, carbodiimide reagents may be effective; in other instances linking reagents such as those supplied by Pierce Chemical Co. (Rockford, Ill.) may be desirable to provide accessibility to the hapten. The hapten peptides can be extended at either the amino or carboxy terminus with a cysteine residue or interspersed with cysteine residues, for example, to facilitate linking to a carrier. Administration of the immunogens is conducted generally by injection over a suitable time period and with use of suitable adjuvants, as is generally understood in the art. During the immunization schedule, titers of antibodies are taken to determine adequacy of antibody formation. While the polyclonal antisera produced in this way may be satisfactory for some applications, for pharmaceutical compositions, use of monoclonal preparations is preferred. Immortalized cell lines which secrete the desired monoclonal antibodies may be prepared using standard methods, see e.g., Kohler & Milstein (1992) or modifications which affect immortalization of lymphocytes or spleen cells, as is generally known. The immortalized cell lines secreting the desired antibodies can be screened by immunoassay in which the antigen is the peptide hapten, polypeptide or protein. When the appropriate immortalized cell culture secreting the desired antibody is identified, the cells can be cultured either in vitro or by production in ascites fluid. The desired monoclonal antibodies may be recovered from the culture supernatant or from the ascites supernatant. Fragments of the monoclonal antibodies or the polyclonal antisera which contain the immunologically significant portion(s) can be used as antagonists, as well as the intact antibodies. Use of immunologically reactive fragments, such as Fab or Fab' fragments, is often preferable, especially in a therapeutic context, as these fragments are generally less immunogenic than the whole immunoglobulin. The antibodies or fragments may also be produced, using current technology, by recombinant means. Antibody regions that bind specifically to the desired regions of the protein can also be produced in the context of chimeras derived from multiple species. Antibody regions that bind specifically to the desired regions of the protein can also be produced in the context of chimeras from multiple species, for instance, humanized antibodies. The antibody can therefore be a humanized antibody or a human antibody, as described in U.S. Pat. No. 5,585,089 or Riechmann et al. (1988).

[0356] Agents that are assayed in the above method can be randomly selected or rationally selected or designed. As used herein, an agent is said to be randomly selected when the agent is chosen randomly without considering the specific sequences involved in the association of the protein of the invention alone or with its associated substrates, binding partners, etc. An example of randomly selected agents is the use of a chemical library or a peptide combinatorial library, or a growth broth of an organism. As used herein, an agent is said to be rationally selected or designed when the agent is chosen on a non-random basis which takes into account the sequence of the target site or its conformation in connection with the agent's action. Agents can be rationally selected or rationally designed by utilizing the peptide sequences that make up these sites. For example, a rationally selected peptide agent can be a peptide whose amino acid sequence is identical to or a derivative of any functional consensus site. The agents of the present invention can be, as examples, oligonucleotides, antisense polynucleotides, interfering RNA, peptides, peptide mimetics, antibodies, antibody fragments, small molecules, vitamin derivatives, as well as carbohydrates. Peptide agents of the invention can be prepared using standard solid phase (or solution phase) peptide synthesis methods, as is known in the art.

[0357] In addition, the DNA encoding these peptides may be synthesized using commercially available oligonucleotide synthesis instrumentation and produced recombinantly using standard recombinant production systems. The production using solid phase peptide synthesis is necessitated if non-gene-encoded amino acids are to be included.

[0358] Another class of agents of the present invention includes antibodies or fragments thereof that bind to a protein encoded by a gene in Tables 8, 9, 19, 20, 21, 22, 23 or 24. Antibody agents can be obtained by immunization of suitable mammalian subjects with peptides, containing as antigenic regions, those portions of the protein intended to be targeted by the antibodies (see section above of antibodies as probes for standard antibody preparation methodologies).

[0359] In yet another class of agents, the present invention includes peptide mimetics that mimic the three-dimensional structure of the protein encoded by a gene from Tables 8, 9, 19, 20, 21, 22, 23 or 24. Such peptide mimetics may have significant advantages over naturally occurring peptides, including, for example: more economical production, greater chemical stability, enhanced pharmacological properties (half-life, absorption, potency, efficacy, etc.), altered specificity (e.g., a broad-spectrum of biological activities), reduced antigenicity and others. In one form, mimetics are peptide-containing molecules that mimic elements of protein secondary structure. The underlying rationale behind the use of peptide mimetics is that the peptide backbone of proteins exists chiefly to orient amino acid side chains in such a way as to facilitate molecular interactions, such as those of antibody and antigen. A peptide mimetic is expected to permit molecular interactions similar to the natural molecule. In another form, peptide analogs are commonly used in the pharmaceutical industry as non-peptide drugs with properties analogous to those of the template peptide. These types of non-peptide compounds are also referred to as peptide mimetics or peptidomimetics (Fauchere, 1986; Veber & Freidinger, 1985; Evans et al., 1987) which are usually developed with the aid of computerized molecular modeling. Peptide mimetics that are structurally similar to therapeutically useful peptides may be used to produce an equivalent therapeutic or prophylactic effect. Generally, peptide mimetics are structurally similar to a paradigm polypeptide (i.e., a polypeptide that has a biochemical property or pharmacological activity), but have one or more peptide linkages optionally replaced by a linkage using methods known in the art. Labeling of peptide mimetics usually involves covalent attachment of one or more labels, directly or through a spacer (e.g., an amide group), to non-interfering position(s) on the peptide mimetic that are predicted by quantitative structure-activity data and molecular modeling. Such non-interfering positions generally are positions that do not form direct contacts with the macromolecule(s) to which the peptide mimetic binds to produce the therapeutic effect. Derivitization (e.g., labeling) of peptide mimetics should not substantially interfere with the desired biological or pharmacological activity of the peptide mimetic. The use of peptide mimetics can be enhanced through the use of combinatorial chemistry to create drug libraries. The design of peptide mimetics can be aided by identifying amino acid mutations that increase or decrease binding of the protein to its binding partners. Approaches that can be used include the yeast two hybrid method (see Chien et al., 1991) and the phage display method. The two hybrid method detects protein-protein interactions in yeast (Fields et al., 1989). The phage display method detects the interaction between an immobilized protein and a protein that is expressed on the surface of phages such as lambda and M13 (Amberg et al., 1993; Hogrefe et al., 1993). These methods allow positive and negative selection for protein-protein interactions and the identification of the sequences that determine these interactions.

[0360] Method to Diagnose Crohn's Disease

[0361] The present invention also relates to methods for diagnosing inflammatory bowel disease or a related disease, preferably Crohn's disease (CD), a disposition to such disease, predisposition to such a disease and/or disease progression. In some methods, the steps comprise contacting a target sample with (a) nucleic acid molecule(s) or fragments thereof and comparing the concentration of individual mRNA(s) with the concentration of the corresponding mRNA(s) from at least one healthy donor. An aberrant (increased or decreased) mRNA level of at least one gene from Tables 8, 9, 19, 20, 21, 22, 23 or 24, at least 5 or 10 genes from Tables 8, 9, 19, 20, 21, 22, 23 or 24, at least 50 genes from Tables 8, 9, 19, 20, 21, 22, 23 or 24, at least 100 genes from Tables 8, 9, 19, 20, 21, 22, 23 or 24 or at least 200 genes from Tables 8, 9, 19, 20, 21, 22, 23 or 24 determined in the sample in comparison to the control sample is an indication of Crohn's disease or a related disease or a disposition to such kinds of diseases. For diagnosis, samples are, preferably, obtained from inflamed colon tissue. Samples can also be obtained from any parts of the body such as the GI track, colon, esophagus, stomach, rectum, jujenum, ileum, mucosa, submucosa, cecum, rectum, scalp, blood, dermis, epidermis, skin cells, cutaneous surfaces, intertrigious areas, genitalia, vessels and endothelium. Some non-limiting examples of cells that can be used are: muscle cells, nervous cells, blood and vessels cells, dermis, epidermis and other skin cells, T cell, mast cell, CD4+ lymphocyte, monocyte, macrophage, synovial cell, glial cell, villous intestinal cell, neutrophilic granulocyte, eosinophilic granulocyte, keratinocyte, lamina propria lymphocyte, intraepithelial lymphocyte, epithelial cells and lymphocytes.

[0362] For analysis of gene expression, total RNA is obtained from cells according to standard procedures and, preferably, reverse-transcribed. Preferably, a DNAse treatment (in order to get rid of contaminating genomic DNA) is performed. Some non-limiting examples of cells that can be used are: muscle cells, nervous cells, blood and vessels cells, dermis, epidermis and other skin cells, T cell, mast cell, CD4+ lymphocyte, monocyte, macrophage, synovial cell, glial cell, villous intestinal cell, neutrophilic granulocyte, eosinophilic granulocyte, keratinocyte, lamina propria lymphocyte, intraepithelial lymphocyte, epithelial cells and lymphocytes.

[0363] The nucleic acid molecule or fragment is typically a nucleic acid probe for hybridization or a primer for PCR. The person skilled in the art is in a position to design suitable nucleic acids probes based on the information provided in the Tables of the present invention. The target cellular component, i.e. mRNA, e.g., in colon tissue, may be detected directly in situ, e.g. by in situ hybridization or it may be isolated from other cell components by common methods known to those skilled in the art before contacting with a probe. Detection methods include Northern blot analysis, RNase protection, in situ methods, e.g. in situ hybridization, in vitro amplification methods (PCR, LCR, QRNA replicase or RNA-transcription/amplification (TAS, 3SR), reverse dot blot disclosed in EP-B10237362) and other detection assays that are known to those skilled in the art. Products obtained by in vitro amplification can be detected according to established methods, e.g. by separating the products on agarose or polyacrylamide gels and by subsequent staining with ethidium bromide. Alternatively, the amplified products can be detected by using labeled primers for amplification or labeled dNTPs. Preferably, detection is based on a microarray.

[0364] The probes (or primers) (or, alternatively, the reverse-transcribed sample mRNAs) can be detectably labeled, for example, with a radioisotope, a bioluminescent compound, a chemiluminescent compound, a fluorescent compound, a metal chelate, or an enzyme.

[0365] The present invention also relates to the use of the nucleic acid molecules or fragments described above for the preparation of a diagnostic composition for the diagnosis of Crohn's disease or a disposition to such a disease.

[0366] The present invention also relates to the use of the nucleic acid molecules of the present invention for the isolation or development of a compound which is useful for therapy of Crohn's disease. For example, the nucleic acid molecules of the invention and the data obtained using said nucleic acid molecules for diagnosis of Crohn's disease might allow for the identification of further genes which are specifically dysregulated, and thus may be considered as potential targets for therapeutic interventions.

[0367] The invention further provides prognostic assays that can be used to identify subjects having or at risk of developing Crohn's disease. In such method, a test sample is obtained from a subject and the amount and/or concentration of the nucleic acid described in Tables 8, 9, 19, 20, 21, 22, 23 or 24 is determined; wherein the presence of an associated allele, a particular allele of a polymorphic locus, or the likes in the nucleic acids sequences of this invention (see SEQ ID from Tables 2,-10 and 12-18) can be diagnostic for a subject having or at risk of developing Crohn's. As used herein, a “test sample” refers to a biological sample obtained from a subject of interest. For example, a test sample can be a biological fluid, a cell sample, or tissue. A biological fluid can be, but is not limited to saliva, serum, mucus, urine, stools, spermatozoids, vaginal secretions, lymph, amiotic liquid, pleural liquid and tears. Cells can be, but are not limited to: muscle cells, nervous cells, blood and vessels cells, dermis, epidermis and other skin cells, T cell, mast cell, CD4+ lymphocyte, monocyte, macrophage, synovial cell, glial cell, villous intestinal cell, neutrophilic granulocyte, eosinophilic granulocyte, keranocyte, lamina propria lymphocyte, intraepithelial lymphocyte, epithelial cells and lymphocytes.

[0368] Furthermore, the prognostic assays described herein can be used to determine whether a subject can be administered an agent (e.g., an agonist, antagonist, peptidomimetic, polypeptide, nucleic acid such as antisense DNA or interfering RNA (RNAi), small molecule or other drug candidate) to treat Crohn's disease. Specifically, these assays can be used to predict whether an individual will have an efficacious response or will experience adverse events in response to such an agent. For example, such methods can be used to determine whether a subject can be effectively treated with an agent that modulates the expression and/or activity of a gene from Tables 8, 9, 19, 20, 21, 22, 23 or 24 or the nucleic acids described herein. In another example, an association study may be performed to identify polymorphisms from Tables 2, 3, 4, 5, 6, 7 or 10 that are associated with a given response to the agent, e.g., an efficacious response or the likelihood of one or more adverse events. Thus, one embodiment of the present invention provides methods for determining whether a subject can be effectively treated with an agent for a disease associated with aberrant expression or activity of a gene from Tables 8, 9, 19, 20, 21, 22, 23 or 24 in which a test sample is obtained and nucleic acids or polypeptides from Tables 8, 9, 19, 20, 21, 22, 23 or 24 are detected (e.g., wherein the presence of a particular level of expression of a gene from Tables 8, 9, 19, 20, 21, 22, 23 or 24 or a particular allelic variant of such gene, such as polymorphisms from Tables 2, 3, 4, 5, 6, 7 or 10 is diagnostic for a subject that can be administered an agent to treat a disorder such as Crohn's disease). In one embodiment, the method includes obtaining a sample from a subject suspected of having Crohn's disease or an affected individual and exposing such sample to an agent. The expression and/or activity of the nucleic acids and/or genes of the invention are monitored before and after treatment with such agent to assess the effect of such agent. After analysis of the expression values, one skilled in the art can determine whether such agent can effectively treat such subject. In another embodiment, the method includes obtaining a sample from a subject having or susceptible to developing Crohn's disease and determining the allelic constitution of polymorphisms from Tables 2, 3, 4, 5, 6, 7 or 10 that are associated with a particular response to an agent. After analysis of the allelic constitution of the individual at the associated polymorphisms, one skilled in the art can determine whether such agent can effectively treat such subject.

[0369] The methods of the invention can also be used to detect genetic alterations in a gene from Tables 8, 9, 19, 20, 21, 22, 23 or 24, thereby determining if a subject with the lesioned gene is at risk for a disease associated with Crohn's disease. In preferred embodiments, the methods include detecting, in a sample of cells from the subject, the presence or absence of a genetic alteration characterized by at least one alteration linked to or affecting the integrity of a gene from Tables 8, 9, 19, 20, 21, 22, 23 or 24 encoding a polypeptide or the misexpression of such gene. For example, such genetic alterations can be detected by ascertaining the existence of at least one of: (1) a deletion of one or more nucleotides from a gene from Tables 8, 9, 19, 20, 21, 22, 23 or 24; (2) an addition of one or more nucleotides to a gene from Tables 8, 9, 19, 20, 21, 22, 23 or 24; (3) a substitution of one or more nucleotides of a gene from Tables 8, 9, 19, 20, 21, 22, 23 or 24; (4) a chromosomal rearrangement of a gene from Tables 8, 9, 19, 20, 21, 22, 23 or 24; (5) an alteration in the level of a messenger RNA transcript of a gene from Tables 8, 9, 19, 20, 21, 22, 23 or 24; (6) aberrant modification of a gene from Tables 8, 9, 19, 20, 21, 22, 23 or 24, such as of the methylation pattern of the genomic DNA, (7) the presence of a non-wild type splicing pattern of a messenger RNA transcript of a gene from Tables 8, 9, 19, 20, 21, 22, 23 or 24; (8) inappropriate post-translational modification of a polypeptide encoded by a gene from Tables 8, 9, 19, 20, 21, 22, 23 or 24; and (9) alternative promoter use.

[0370] As described herein, there are a large number of assay techniques known in the art which can be used for detecting alterations in a gene from Tables 8, 9, 19, 20, 21, 22, 23 or 24. A preferred biological sample is a peripheral blood sample obtained by conventional means from a subject. Another preferred biological sample is a buccal swab. Other biological samples can be, but are not limited to, urine, stools, spermatozoids, vaginal secretions, lymph, amiotic liquid, pleural liquid and tears.

[0371] In certain embodiments, detection of the alteration involves the use of a probe/primer in a polymerase chain reaction (PCR) (see, e.g., U.S. Pat. Nos. 4,683,195 and 4,683,202), such as anchor PCR or RACE PCR, or alternatively, in a ligation chain reaction (LCR) (see, e.g., Landegran et al., 1988; and Nakazawa et al., 1994), the latter of which can be particularly useful for detecting point mutations in a gene from Tables 8, 9, 19, 20, 21, 22, 23 or 24 (see Abavaya et al., 1995). This method can include the steps of collecting a sample of cells from a patient, isolating nucleic acid (e.g., genomic DNA, mRNA, or both) from the cells of the sample, contacting the nucleic acid sample with one or more primers which specifically hybridize to a gene from Tables 8, 9, 19, 20, 21, 22, 23 or 24 under conditions such that hybridization and amplification of the nucleic acid from Tables 8, 9, 19, 20, 21, 22, 23 or 24 (if present) occurs, and detecting the presence or absence of an amplification product, or detecting the size of the amplification product and comparing the length to a control sample. PCR and/or LCR may be desirable to use as a preliminary amplification step in conjunction with some of the techniques used for detecting a mutation, an associated allele, a particular allele of a polymorphic locus, or the like described herein.

[0372] Alternative amplification methods include: self sustained sequence replication (Guatelli et al., 1990), transcriptional amplification system (Kwoh et al., 1989), Q-Beta Replicase (Lizardi et al., 1988), isothermal amplification (e.g. Dean et al., 2002); and Hafner et al., 2001), or any other nucleic acid amplification method, followed by the detection of the amplified molecules using techniques well known to those of ordinary skill in the art. These detection schemes are especially useful for the detection of nucleic acid molecules if such molecules are present in very low number.

[0373] In an alternative embodiment, alterations in a gene from Tables 8, 9, 19, 20, 21, 22, 23 or 24, from a sample cell can be identified by identifying changes in a restriction enzyme cleavage pattern. For example, sample and control DNA is isolated, amplified (optionally), digested with one or more restriction endonucleases, and fragment length sizes are determined by gel electrophoresis and compared. Differences in fragment length sizes between sample and control DNA indicate a mutation(s), an associated allele, a particular allele of a polymorphic locus, or the like in the sample DNA. Moreover, sequence specific ribozymes (see, e.g., U.S. Pat. No. 5,498,531 or DNAzyme e.g. U.S. Pat. No. 5,807,718) can be used to score for the presence of specific associated allele, a particular allele of a polymorphic locus, or the likes by development or loss of a ribozyme or DNAzyme cleavage site.

[0374] The present invention also relates to further methods for diagnosing Crohn's disease or a related disorder, preferably IBD, a disposition to such disorder, predisposition to such a disorder and/or disorder progression. In some methods, the steps comprise contacting a target sample with (a) nucleic molecule(s) or fragments thereof and determining the presence or absence of a particular allele of a polymorphism that confers a disorder-related phenotype (e.g., predisposition to such a disorder and/or disorder progression). The presence of at least one allele from Tables 2, 3, 4, 5, 6, 7 or 10 that is associated with Crohn's disease (“associated allele”), at least 5 or 10 associated alleles from Table Tables 2, 3, 4, 5, 6, 7 or 10, at least 50 associated alleles from Table Tables 2, 3, 4, 5, 6, 7 or 10 at least 100 associated alleles from Table Tables 2, 3, 4, 5, 6, 7 or 10, or at least 200 associated alleles from Table Tables 2, 3, 4, 5, 6, 7 or 10 determined in the sample is an indication of Crohn's disease or a related disorder, a disposition or predisposition to such kinds of disorders, or a prognosis for such disorder progression. Samples may be obtained from any parts of the body such as the GI track, colon, esophagus, stomach, rectum, jujenum, ileum, mucosa, submucosa, cecum, rectum, scalp, blood, dermis, epidermis, skin cells, cutaneous surfaces, intertrigious areas, genitalia, vessels and endothelium. Some non-limiting examples of cells that can be used are: muscle cells, nervous cells, blood and vessels cells, dermis, epidermis and other skin cells, T cell, mast cell, CD4+ lymphocyte, monocyte, macrophage, synovial cell, glial cell, villous intestinal cell, neutrophilic granulocyte, eosinophilic granulocyte, keratinocyte, lamina propria lymphocyte, intraepithelial lymphocyte, epithelial cells and lymphocytes.

[0375] In other embodiments, alterations in a gene from Tables 8, 9, 19, 20, 21, 22, 23 or 24 can be identified by hybridizing sample and control nucleic acids, e.g., DNA or RNA, to high density arrays or bead arrays containing tens to thousands of oligonucleotide probes (Cronin et al., 1996; Kozal et al., 1996). For example, alterations in a gene from Tables 8, 9, 19, 20, 21, 22, 23 or 24 can be identified in two dimensional arrays containing light-generated DNA probes as described in Cronin et al., (1996). Briefly, a first hybridization array of probes can be used to scan through long stretches of DNA in a sample and control to identify base changes between the sequences by making linear arrays of sequential overlapping probes. This step allows the identification of point mutations, associated alleles, particular alleles of a polymorphic locus, or the like. This step is followed by a second hybridization array that allows the characterization of specific mutations by using smaller, specialized probe arrays complementary to all variants, mutations, alleles detected. Each mutation array is composed of parallel probe sets, one complementary to the wild-type gene and the other complementary to the mutant gene.

[0376] In yet another embodiment, any of a variety of sequencing reactions known in the art can be used to directly sequence a gene from Tables 8, 9, 19, 20, 21, 22, 23 or 24 and detect an associated allele, a particular allele of a polymorphic locus, or the like by comparing the sequence of the sample gene from Tables 8, 9, 19, 20, 21, 22, 23 or 24 with the corresponding wild-type (control) sequence. Examples of sequencing reactions include those based on techniques developed by Maxam and Gilbert (1977) or Sanger (1977). It is also contemplated that any of a variety of automated sequencing procedures can be utilized when performing the diagnostic assays (Bio/Techniques 19:448, 1995) including sequencing by mass spectrometry (see, e.g. PCT International Publication No. WO 94/16101; Cohen et al., 1996; and Griffin et al. 1993), real-time pyrophosphate sequencing method (Ronaghi et al., 1998; and Permutt et al., 2001) and sequencing by hybridization (see e.g. Drmanac et al., 2002).

[0377] Other methods of detecting an associated allele, a particular allele of a polymorphic locus, or the likes in a gene from Tables 8, 9, 19, 20, 21, 22, 23 or 24 include methods in which protection from cleavage agents is used to detect mismatched bases in RNA/RNA, DNA/DNA or RNA/DNA heteroduplexes (Myers et al., 1985). In general, the technique of “mismatch cleavage” starts by providing heteroduplexes formed by hybridizing (labeled) RNA or DNA containing the wild-type gene sequence from Tables 8, 9, 19, 20, 21, 22, 23 or 24 with potentially mutant RNA or DNA obtained from a tissue sample. The double-stranded duplexes are treated with an agent that cleaves single-stranded regions of the duplex such as which will exist due to basepair mismatches between the control and sample strands. For instance, RNA/DNA duplexes can be treated with RNase and DNA/DNA hybrids treated with S1 nuclease to enzymatically digest the mismatched regions. In other embodiments, either DNA/DNA or RNA/DNA duplexes can be treated with hydroxylamine or osmium tetroxide and with piperidine in order to digest mismatched regions. After digestion of the mismatched regions, the resulting material is then separated by size on denaturing polyacrylamide gels to determine the site of an associated allele, a particular allele of a polymorphic locus, or the like (see, for example, Cotton et al., 1988; Saleeba et al., 1992). In a preferred embodiment, the control DNA or RNA can be labeled for detection, as described herein.

[0378] In still another embodiment, the mismatch cleavage reaction employs one or more proteins that recognize mismatched base pairs in double-stranded DNA (so called “DNA mismatch repair” enzymes) in defined systems for detecting and mapping point an associated allele, a particular allele of a polymorphic locus, or the likes in a gene from Tables 8, 9, 19, 20, 21, 22, 23 or 24 cDNAs obtained from samples of cells. For example, the mutY enzyme of E. coli cleaves A at G/A mismatches (Hsu et al., 1994). Other examples include, but are not limited to, the MutHLS enzyme complex of E. coli (Smith and Modrich., 1996) and Cel 1 from the celery (Kulinski et al., 2000) both cleave the DNA at various mismatches. According to an exemplary embodiment, a probe based on a gene sequence from Tables 8, 9, 19, 20, 21, 22, 23 or 24 is hybridized to a cDNA or other DNA product from a test cell or cells. The duplex is treated with a DNA mismatch repair enzyme, and the cleavage products, if any, can be detected using electrophoresis protocols or the like. See, for example, U.S. Pat. No. 5,459,039. Alternatively, the screen can be performed in vivo following the insertion of the heteroduplexes in an appropriate vector. The whole procedure is known to those ordinary skilled in the art and is referred to as mismatch repair detection (see e.g. Fakhrai-Rad et al., 2004).

[0379] In other embodiments, alterations in electrophoretic mobility can be used to identify an associated allele, a particular allele of a polymorphic locus, or the likes in genes from Tables 8, 9, 19, 20, 21, 22, 23 or 24. For example, single strand conformation polymorphism (SSCP) analysis can be used to detect differences in electrophoretic mobility between mutant and wild type nucleic acids (Orita et al., 1993; see also Cotton, 1993; and Hayashi et al., 1992). Single-stranded DNA fragments of sample and control nucleic acids from Tables 8, 9, 19, 20, 21, 22, 23 or 24 will be denatured and allowed to renature. The secondary structure of single-stranded nucleic acids varies according to sequence; the resulting alteration in electrophoretic mobility enables the detection of even a single base change. The DNA fragments may be labeled or detected with labeled probes. The sensitivity of the assay may be enhanced by using RNA (rather than DNA), in which the secondary structure is more sensitive to a change in sequence. In a preferred embodiment, the method utilizes heteroduplex analysis to separate double stranded heteroduplex molecules on the basis of changes in electrophoretic mobility (Kee et al., 1991).

[0380] In yet another embodiment, the movement of mutant or wild-type fragments in a polyacrylamide gel containing a gradient of denaturant is assayed using denaturing gradient gel electrophoresis (DGGE) (Myers et al., 1985). When DGGE is used as the method of analysis, DNA will be modified to insure that it does not completely denature, for example by adding a GC clamp of approximately 40 by of high-melting GC-rich DNA by PCR. In a further embodiment, a temperature gradient is used in place of a denaturing gradient to identify differences in the mobility of control and sample DNA (Rosenbaum et al., 1987). In another embodiment, the mutant fragment is detected using denaturing HPLC (see e.g. Hoogendoorn et al., 2000).

[0381] Examples of other techniques for detecting point mutations, an associated allele, a particular allele of a polymorphic locus, or the like include, but are not limited to, selective oligonucleotide hybridization, selective amplification, selective primer extension, selective ligation, single-base extension, selective termination of extension or invasive cleavage assay. For example, oligonucleotide primers may be prepared in which the known associated allele, particular allele of a polymorphic locus, or the like is placed centrally and then hybridized to target DNA under conditions which permit hybridization only if a perfect match is found (Saiki et al., 1986; Saiki et al., 1989). Such allele specific oligonucleotides are hybridized to PCR amplified target DNA of a number of different associated alleles, a particular allele of a polymorphic locus, or the likes where the oligonucleotides are attached to the hybridizing membrane and hybridized with labeled target DNA. Alternatively, the amplification, the allele-specific hybridization and the detection can be done in a single assay following the principle of the 5′ nuclease assay (e.g. see Livak et al., 1995). For example, the associated allele, a particular allele of a polymorphic locus, or the like locus is amplified by PCR in the presence of both allele-specific oligonucleotides, each specific for one or the other allele. Each probe has a different fluorescent dye at the 5′ end and a quencher at the 3′ end. During PCR, if one or the other or both allele-specific oligonucleotides are hybridized to the template, the Taq polymerase via its 5′ exonuclease activity will release the corresponding dyes. The latter will thus reveal the genotype of the amplified product.

[0382] The hybridization may also be carried out with a temperature gradient following the principle of dynamic allele-specific hybridization or like (e.g. Jobs et al., 2003; and Bourgeois and Labuda, 2004). For example, the hybridization is done using one of the two allele-specific oligonucleotides labeled with a fluorescent dye, an intercalating quencher under a gradually increasing temperature. At low temperature, the probe is hybridized to both the mismatched and full-matched template. The probe melts at a lower temperature when hybridized to the template with a mismatch. The release of the probe is captured by an emission of the fluorescent dye, away from the quencher. The probe melts at a higher temperature when hybridized to the template with no mismatch. The temperature-dependent fluorescence signals therefore indicate the absence or presence of the associated allele, particular allele of a polymorphic locus, or the like (e.g. Jobs et al. supra). Alternatively, the hybridization is done under a gradually decreasing temperature. In this case, both allele-specific oligonucleotides are hybridized to the template competitively. At high temperature none of the two probes is hybridized. Once the optimal temperature of the full-matched probe is reached, it hybridizes and leaves no target for the mismatched probe. In the latter case, if the allele-specific probes are differently labeled, then they are hybridized to a single PCR-amplified target. If the probes are labeled with the same dye, then the probe cocktail is hybridized twice to identical templates with only one labeled probe, different in the two cocktails, in the presence of the unlabeled competitive probe.

[0383] Alternatively, allele specific amplification technology that depends on selective PCR amplification may be used in conjunction with the present invention. Oligonucleotides used as primers for specific amplification may carry the associated allele, particular allele of a polymorphic locus, or the like of interest in the center of the molecule, so that amplification depends on differential hybridization (Gibbs et al., 1989) or at the extreme 3′ end of one primer where, under appropriate conditions, mismatch can prevent, or reduce polymerase extension (Prossner, 1993). In addition it may be desirable to introduce a novel restriction site in the region of the associated allele, particular allele of a polymorphic locus, or the like to create cleavage-based detection (Gasparini et al., 1992). It is anticipated that in certain embodiments amplification may also be performed using Taq ligase for amplification (Barany, 1991). In such cases, ligation will occur only if there is a perfect match at the 3′ end of the 5′ sequence making it possible to detect the presence of a known associated allele, a particular allele of a polymorphic locus, or the like at a specific site by looking for the presence or absence of amplification. The products of such an oligonucleotide ligation assay can also be detected by means of gel electrophoresis. Furthermore, the oligonucleotides may contain universal tags used in PCR amplification and zip code tags that are different for each allele. The zip code tags are used to isolate a specific, labeled oligonucleotide that may contain a mobility modifier (e.g. Grossman et al., 1994).

[0384] In yet another alternative, allele-specific elongation followed by ligation will form a template for PCR amplification. In such cases, elongation will occur only if there is a perfect match at the 3′ end of the allele-specific oligonucleotide using a DNA polymerase. This reaction is performed directly on the genomic DNA and the extension/ligation products are amplified by PCR. To this end, the oligonucleotides contain universal tags allowing amplification at a high multiplex level and a zip code for SNP identification. The PCR tags are designed in such a way that the two alleles of a SNP are amplified by different forward primers, each having a different dye. The zip code tags are the same for both alleles of a given SNP and they are used for hybridization of the PCR-amplified products to oligonucleotides bound to a solid support, chip, bead array or like. For an example of the procedure, see Fan et al. (Cold Spring Harbor Symposia on Quantitative Biology, Vol. LXVIII, pp. 69-78, 2003).

[0385] Another alternative includes the single-base extension/ligation assay using a molecular inversion probe, consisting of a single, long oligonucleotide (see e.g. Hardenbol et al., 2003). In such an embodiment, the oligonucleotide hybridizes on both sides of the SNP locus directly on the genomic DNA, leaving a one-base gap at the SNP locus. The gap-filling, one-base extension/ligation is performed in four tubes, each having a different dNTP. Following this reaction, the oligonucleotide is circularized whereas unreactive, linear oligonucleotides are degraded using an exonuclease such as exonuclease I of E. coli. The circular oligonucleotides are then linearized and the products are amplified and labeled using universal tags on the oligonucleotides. The original oligonucleotide also contains a SNP-specific zip code allowing hybridization to oligonucleotides bound to a solid support, chip, bead array or the like. This reaction can be performed at a highly multiplexed level.

[0386] In another alternative, the associated allele, particular allele of a polymorphic locus, or the like is scored by single-base extension (see e.g. U.S. Pat. No. 5,888,819). The template is first amplified by PCR. The extension oligonucleotide is then hybridized next to the SNP locus and the extension reaction is performed using a thermostable polymerase such as ThermoSequenase (GE Healthcare) in the presence of labeled ddNTPs. This reaction can therefore be cycled several times. The identity of the labeled ddNTP incorporated will reveal the genotype at the SNP locus. The labeled products can be detected by means of gel electrophoresis, fluorescence polarization (e.g. Chen et al., 1999) or by hybridization to oligonucleotides bound to a solid support, chip, bead array or the like. In the latter case, the extension oligonucleotide will contain a SNP-specific zip code tag.

[0387] In yet another alternative, the variant is scored by selective termination of extension. The template is first amplified by PCR and the extension oligonucleotide hybridizes in vicinity to the SNP locus, close to but not necessarily adjacent to it. The extension reaction is carried out using a thermostable polymerase such as ThermoSequenase (GE Healthcare) in the presence of a mix of dNTPs and at least one ddNTP. The latter has to terminate the extension at one of the alleles of the interrogated SNP, but not both such that the two alleles will generate extension products of different sizes. The extension product can then be detected by means of gel electrophoresis, in which case the extension products need to be labeled, or by mass spectrometry (see e.g. Storm et al., 2003).

[0388] In another alternative, the associated allele, particular allele of a polymorphic locus, or the like is detected using an invasive cleavage assay (see U.S. Pat. No. 6,090,543). There are five oligonucleotides per SNP to interrogate but these are used in a two step-reaction. During the primary reaction, three of the designed oligonucleotides are first hybridized directly to the genomic DNA. One of them is locus-specific and hybridizes up to the SNP locus (the pairing of the 3′ base at the SNP locus is not necessary). There are two allele-specific oligonucleotides that hybridize in tandem to the locus-specific probe but also contain a 5′ flap that is specific for each allele of the SNP. Depending upon hybridization of the allele-specific oligonucleotides at the base of the SNP locus, this creates a structure that is recognized by a cleavase enzyme (U.S. Pat. No. 6,090,606) and the allele-specific flap is released. During the secondary reaction, the flap fragments hybridize to a specific cassette to recreate the same structure as above except that the cleavage will release a small DNA fragment labeled with a fluorescent dye that can be detected using regular fluorescence detector. In the cassette, the emission of the dye is inhibited by a quencher.

[0389] Other types of markers can also be used for diagnostic purposes. For example, microsatellites can also be useful to detect the genetic predisposition of an individual to a given disorder. Microsatellites consist of short sequence motifs of one or a few nucleotides repeated in tandem. The most common motifs are polynucleotide runs, dinucleotide repeats (particularly the CA repeats) and trinucleotide repeats. However, other types of repeats can also be used. The microsatellites are very useful for genetic mapping because they are highly polymorphic in their length. Microsatellite markers can be typed by various means, including but not limited to DNA fragment sizing, oligonucleotide ligation assay and mass spectrometry. For example, the locus of the microsatellite is amplified by PCR and the size of the PCR fragment will be directly correlated to the length of the microsatellite repeat. The size of the PCR fragment can be detected by regular means of gel electrophoresis. The fragment can be labeled internally during PCR or by using end-labeled oligonucleotides in the PCR reaction (e.g. Mansfield et al., 1996). Alternatively, the size of the PCR fragment is determined by mass spectrometry. In such a case, however, the flanking sequences need to be eliminated. This can be achieved by ribozyme cleavage of an RNA transcript of the microsatellite repeat (Krebs et al., 2001). For example, the microsatellite locus is amplified using oligonucleotides that include a T7 promoter on one end and a ribozyme motif on the other end. Transcription of the amplified fragments will yield an RNA substrate for the ribozyme, releasing small RNA fragments that contain the repeated region. The size of the latter is determined by mass spectrometry. Alternatively, the flanking sequences are specifically degraded. This is achieved by replacing the dTTP in the PCR reaction by dUTP. The dUTP nucleosides are then removed by uracyl DNA glycosylases and the resulting abasic sites are cleaved by either abasic endonucleases such as human AP endonuclease or chemical agents such as piperidine. Bases can also be modified post-PCR by chemical agents such as dimethyl sulfate and then cleaved by other chemical agents such as piperidine (see e.g. Maxam and Gilbert, 1977; U.S. Pat. No. 5,869,242; and U.S. Patent pending Ser. No. 60/335,068).

[0390] In another alternative, an oligonucleotide ligation assay can be performed. The microsatellite locus is first amplified by PCR. Then, different oligonucleotides can be submitted to ligation at the center of the repeat with a set of oligonucleotides covering all the possible lengths of the marker at a given locus (Zirvi et al., 1999). Another example of design of an oligonucleotide assay comprises the ligation of three oligonucleotides; a 5′ oligonucleotide hybridizing to the 5′ flanking sequence, a repeat oligonucleotide of the length of the shortest allele of the marker hybridizing to the repeated region and a set of 3′ oligonucleotides covering all the existing alleles hybridizing to the 3′ flanking sequence and a portion of the repeated region for all the alleles longer than the shortest one. For the shortest allele, the 3′ oligonucleotide exclusively hybridizes to the 3′ flanking sequence (U.S. Pat. No. 6,479,244).

[0391] The methods described herein may be performed, for example, by utilizing pre-packaged diagnostic kits comprising at least one probe nucleic acid selected from the SEQ ID of Tables 2, 3, 4, 5, 6, 7 or 10, or antibody reagent described herein, which may be conveniently used, for example, in a clinical setting to diagnose patient exhibiting symptoms or a family history of a disorder or disorder involving abnormal activity of genes from Tables 8, 9, 19, 20, 21, 22, 23 or 24.

[0392] Method to Treat an Animal Suspected of Having Crohn's Disease

[0393] The present invention provides methods of treating a disease associated with Crohn's disease by expressing in vivo the nucleic acids of at least one gene from Tables 8, 9, 19, 20, 21, 22, 23 or 24. These nucleic acids can be inserted into any of a number of well-known vectors for the transfection of target cells and organisms as described below. The nucleic acids are transfected into cells, ex vivo or in vivo, through the interaction of the vector and the target cell. The nucleic acids encoding a gene from Tables 8, 9, 19, 20, 21, 22, 23 or 24, under the control of a promoter, then express the encoded protein, thereby mitigating the effects of absent, partial inactivation, or abnormal expression of a gene from Tables 8, 9, 19, 20, 21, 22, 23 or 24.

[0394] Such gene therapy procedures have been used to correct acquired and inherited genetic defects, cancer, and viral infection in a number of contexts. The ability to express artificial genes in humans facilitates the prevention and/or cure of many important human disorders, including many disorders which are not amenable to treatment by other therapies (for a review of gene therapy procedures, see Anderson, 1992; Nabel & Feigner, 1993; Mitani & Caskey, 1993; Mulligan, 1993; Dillon, 1993; Miller, 1992; Van Brunt, 1998; Vigne, 1995; Kremer & Perricaudet 1995; Doerfler & Bohm 1995; and Yu et al., 1994).

[0395] Delivery of the gene or genetic material into the cell is the first critical step in gene therapy treatment of a disorder. A large number of delivery methods are well known to those of skill in the art. Preferably, the nucleic acids are administered for in vivo or ex vivo gene therapy uses. Non-viral vector delivery systems include DNA plasmids, naked nucleic acid, and nucleic acid complexed with a delivery vehicle such as a liposome. Viral vector delivery systems include DNA and RNA viruses, which have either episomal or integrated genomes after delivery to the cell. For a review of gene therapy procedures, see the references included in the above section.

[0396] The use of RNA or DNA based viral systems for the delivery of nucleic acids take advantage of highly evolved processes for targeting a virus to specific cells in the body and trafficking the viral payload to the nucleus. Viral vectors can be administered directly to patients (in vivo) or they can be used to treat cells in vitro and the modified cells are administered to patients (ex vivo). Conventional viral based systems for the delivery of nucleic acids could include retroviral, lentivirus, adenoviral, adeno-associated and herpes simplex virus vectors for gene transfer. Viral vectors are currently the most efficient and versatile method of gene transfer in target cells and tissues. Integration in the host genome is possible with the retrovirus, lentivirus, and adeno-associated virus gene transfer methods, often resulting in long term expression of the inserted transgene. Additionally, high transduction efficiencies have been observed in many different cell types and target tissues.

[0397] The tropism of a retrovirus can be altered by incorporating foreign envelope proteins, expanding the potential target population of target cells. Lentiviral vectors are retroviral vectors that are able to transduce or infect non-dividing cells and typically produce high viral titers. Selection of a retroviral gene transfer system would therefore depend on the target tissue. Retroviral vectors are comprised of cis-acting long terminal repeats with packaging capacity for up to 6-10 kb of foreign sequence. The minimum cis-acting LTRs are sufficient for replication and packaging of the vectors, which are then used to integrate the therapeutic gene into the target cell to provide permanent transgene expression. Widely used retroviral vectors include those based upon murine leukemia virus (MuLV), gibbon ape leukemia virus (GaLV), Simian Immuno deficiency virus (SIV), human immuno deficiency virus (HIV), and combinations thereof (see, e.g., Buchscher et al., 1992; Johann et al., 1992; Sommerfelt et al., 1990; Wilson et al., 1989; Miller et al., 1999; and PCT/US94/05700).

[0398] In applications where transient expression of the nucleic acid is preferred, adenoviral based systems are typically used. Adenoviral based vectors are capable of very high transduction efficiency in many cell types and do not require cell division. With such vectors, high titer and levels of expression have been obtained. This vector can be produced in large quantities in a relatively simple system. Adeno-associated virus (“AAV”) vectors are also used to transduce cells with target nucleic acids, e.g., in the in vitro production of nucleic acids and peptides, and for in vivo and ex vivo gene therapy procedures (see, e.g., West et al., 1987; U.S. Pat. No. 4,797,368; WO 93/24641; Kotin, 1994; Muzyczka, 1994). Construction of recombinant AAV vectors is described in a number of publications, including U.S. Pat. No. 5,173,414; Tratschin et al., 1985; Tratschin, et al., 1984; Hermonat & Muzyczka, 1984; and Samulski et al., 1989.

[0399] In particular, numerous viral vector approaches are currently available for gene transfer in clinical trials, with retroviral vectors by far the most frequently used system. All of these viral vectors utilize approaches that involve complementation of defective vectors by genes inserted into helper cell lines to generate the transducing agent. pLASN and MFG-S are examples are retroviral vectors that have been used in clinical trials (Dunbar et al., 1995; Kohn et al., 1995; Malech et al., 1997). PA317/pLASN was the first therapeutic vector used in a gene therapy trial (Blaese et al., 1995). Transduction efficiencies of 50% or greater have been observed for MFG-S packaged vectors (Ellem at al., 1997; and Dranoff et al., 1997).

[0400] Recombinant adeno-associated virus vectors (rAAV) are a promising alternative gene delivery systems based on the defective and nonpathogenic parvovirus adeno-associated type 2 virus. All vectors are derived from a plasmid that retains only the AAV 145 by inverted terminal repeats flanking the transgene expression cassette. Efficient gene transfer and stable transgene delivery due to integration into the genomes of the transduced cell are key features for this vector system (Wagner et al., 1998, Kearns et al., 1996).

[0401] Replication-deficient recombinant adenoviral vectors (Ad) are predominantly used in transient expression gene therapy; because they can be produced at high titer and they readily infect a number of different cell types. Most adenovirus vectors are engineered such that a transgene replaces the Ad E1a, E1b, and E3 genes; subsequently the replication defector vector is propagated in human 293 cells that supply the deleted gene function in trans. Ad vectors can transduce multiple types of tissues in vivo, including nondividing, differentiated cells such as those found in the liver, kidney and muscle tissues. Conventional Ad vectors have a large carrying capacity. An example of the use of an Ad vector in a clinical trial involved polynucleotide therapy for antitumor immunization with intramuscular injection (Sterman et al., 1998). Additional examples of the use of adenovirus vectors for gene transfer in clinical trials include Rosenecker et al., 1996; Sterman et al., 1998; Welsh et al., 1995; Alvarez et al., 1997; Topf et al., 1998.

[0402] Packaging cells are used to form virus particles that are capable of infecting a host cell. Such cells include 293 cells, which package adenovirus, and ψ2 cells or PA317 cells, which package retrovirus. Viral vectors used in gene therapy are usually generated by a producer cell line that packages a nucleic acid vector into a viral particle. The vectors typically contain the minimal viral sequences required for packaging and subsequent integration into a host, other viral sequences being replaced by an expression cassette for the protein to be expressed. The missing viral functions are supplied in trans by the packaging cell line. For example, AAV vectors used in gene therapy typically only possess ITR sequences from the AAV genome which are required for packaging and integration into the host genome. Viral DNA is packaged in a cell line, which contains a helper plasmid encoding the other AAV genes, namely rep and cap, but lacking ITR sequences. The cell line is also infected with adenovirus as a helper. The helper virus promotes replication of the AAV vector and expression of AAV genes from the helper plasmid. The helper plasmid is not packaged in significant amounts due to a lack of ITR sequences. Contamination with adenovirus can be reduced by, e.g., heat treatment to which adenovirus is more sensitive than AAV.

[0403] In many gene therapy applications, it is desirable that the gene therapy vector be delivered with a high degree of specificity to a particular tissue type. A viral vector is typically modified to have specificity for a given cell type by expressing a ligand as a fusion protein with a viral coat protein on the viruses outer surface. The ligand is chosen to have affinity for a receptor known to be present on the cell type of interest. For example, Han et al., 1995, reported that Moloney murine leukemia virus can be modified to express human heregulin fused to gp70, and the recombinant virus infects certain human breast cancer cells expressing human epidermal growth factor receptor. This principle can be extended to other pairs of viruses expressing a ligand fusion protein and target cells expressing a receptor. For example, filamentous phage can be engineered to display antibody fragments (e.g., Fab or Fv) having specific binding affinity for virtually any chosen cellular receptor. Although the above description applies primarily to viral vectors, the same principles can be applied to nonviral vectors. Such vectors can be engineered to contain specific uptake sequences thought to favor uptake by specific target cells.

[0404] Gene therapy vectors can be delivered in vivo by administration to an individual patient, typically by systemic administration (e.g., intravenous, intraperitoneal, intramuscular, subdermal, or intracranial infusion) or topical application. Alternatively, vectors can be delivered to cells ex vivo, such as cells explanted from an individual patient (e.g., lymphocytes, bone marrow aspirates, and tissue biopsy) or universal donor hematopoietic stem cells, followed by reimplantation of the cells into a patient, usually after selection for cells which have incorporated the vector.

[0405] Ex vivo cell transfection for diagnostics, research, or for gene therapy (e.g., via re-infusion of the transfected cells into the host organism) is well known to those of skill in the art. In a preferred embodiment, cells are isolated from the subject organism, transfected with a nucleic acid (gene or cDNA), and re-infused back into the subject organism (e.g., patient). Various cell types suitable for ex vivo transfection are well known to those of skill in the art (see, e.g., Freshney et al., 1994; and the references cited therein for a discussion of how to isolate and culture cells from patients).

[0406] In one embodiment, stem cells are used in ex vivo procedures for cell transfection and gene therapy. The advantage to using stem cells is that they can be differentiated into other cell types in vitro, or can be introduced into a mammal (such as the donor of the cells) where they will engraft in the bone marrow. Methods for differentiating CD34+ cells in vitro into clinically important immune cell types using cytokines such a GM-CSF, IFN-γ and TNF-α are known (see Inaba et al., 1992).

[0407] Stem cells are isolated for transduction and differentiation using known methods. For example, stem cells are isolated from bone marrow cells by panning the bone marrow cells with antibodies which bind unwanted cells, such as CD4+ and CD8+ (T cells), CD45+ (panB cells), GR-1 (granulocytes), and lad (differentiated antigen presenting cells).

[0408] Vectors (e.g., retroviruses, adenoviruses, liposomes, etc.) containing therapeutic nucleic acids can be also administered directly to the organism for transduction of cells in vivo. Alternatively, naked DNA can be administered.

[0409] Administration is by any of the routes normally used for introducing a molecule into ultimate contact with blood or tissue cells, as described above. The nucleic acids from Tables 8, 9, 19, 20, 21, 22, 23 or 24 are administered in any suitable manner, preferably with the pharmaceutically acceptable carriers described above. Suitable methods of administering such nucleic acids are available and well known to those of skill in the art, and, although more than one route can be used to administer a particular composition, a particular route can often provide a more immediate and more effective reaction than another route (see Samulski et al., 1989). The present invention is not limited to any method of administering such nucleic acids, but preferentially uses the methods described herein.

[0410] The present invention further provides other methods of treating Crohn's disease such as administering to an individual having Crohn's disease an effective amount of an agent that regulates the expression, activity or physical state of at least one gene from Tables 8, 9, 19, 20, 21, 22, 23 or 24. An “effective amount” of an agent is an amount that modulates a level of expression or activity of a gene from Tables 8, 9, 19, 20, 21, 22, 23 or 24, in a cell in the individual at least about 10%, at least about 20%, at least about 30%, at least about 40%, at least about 50%, at least about 60%, at least about 70%, at least about 80% or more, compared to a level of the respective gene from Tables 8, 9, 19, 20, 21, 22, 23 or 24 in a cell in the individual in the absence of the compound. The preventive or therapeutic agents of the present invention may be administered, either orally or parenterally, systemically or locally. For example, intravenous injection such as drip infusion, intramuscular injection, intraperitoneal injection, subcutaneous injection, suppositories, intestinal lavage, oral enteric coated tablets, and the like can be selected, and the method of administration may be chosen, as appropriate, depending on the age and the conditions of the patient. The effective dosage is chosen from the range of 0.01 mg to 100 mg per kg of body weight per administration. Alternatively, the dosage in the range of 1 to 1000 mg, preferably 5 to 50 mg per patient may be chosen. The therapeutic efficacy of the treatment may be monitored by observing various parts of the GI tract, by endoscopy, barium, colonoscopy, or any other monitoring methods known in the art. Other ways of monitoring efficacy can be, but are not limited to monitoring inflammatory conditions involving the upper gastrointestinal tract such as monitoring the amelioration on the esophageal discomfort, decrease in pain, improved swallowing, reduced chest pain, decreased heartburn, decreased regurgitation of solids or liquids after swallowing or eating, decrease in vomiting, or improvement in weight gain or improvement in vitality.

[0411] The present invention further provides a method of treating an individual clinically diagnosed with Crohns' disease. The methods generally comprises analyzing a biological sample that includes a cell, in some cases, a GI track cell, from an individual clinically diagnosed with Crohn's disease for the presence of modified levels of expression of at least 1 gene, at least 10 genes, at least 50 genes, at least 100 genes, or at least 200 genes from Tables 8, 9, 19, 20, 21, 22, 23 or 24. A treatment plan that is most effective for individuals clinically diagnosed as having a condition associated with Crohn's disease is then selected on the basis of the detected expression of such genes in a cell. Treatment may include administering a composition that includes an agent that modulates the expression or activity of a protein from Tables 8, 9, 19, 20, 21, 22, 23 or 24 in the cell. Information obtained as described in the methods above can also be used to predict the response of the individual to a particular agent. Thus, the invention further provides a method for predicting a patient's likelihood to respond to a drug treatment for a condition associated with Crohn's disease, comprising determining whether modified levels of a gene from Tables 8, 9, 19, 20, 21, 22, 23 or 24 is present in a cell, wherein the presence of protein is predictive of the patient's likelihood to respond to a drug treatment for the condition. Examples of the prevention or improvement of symptoms accompanied by Crohn's disease that can monitored for effectiveness include prevention or improvement of diarrhea, prevention or improvement of weight loss, inhibition of bowel tissue edema, inhibition of cell infiltration, inhibition of surviving period shortening, and the like, and as a result, a preventing or improving agent for diarrhea, a preventing or improving agent for weight loss, an inhibitor for bowel tissues edema, an inhibitor for cell infiltration, an inhibitor for surviving period shortening, and the like can be identified.

[0412] The invention also provides a method of predicting a response to therapy in a subject having Crohn's disease by determining the presence or absence in the subject of one or more markers associated with Crohn's disease described in Tables 2, 3, 4, 5, 6, 7 or 10, diagnosing the subject in which the one or more markers are present as having Crohn's disease, and predicting a response to a therapy based on the diagnosis e.g., response to therapy may include an efficacious response and/or one or more adverse events. The invention also provides a method of optimizing therapy in a subject having Crohn's disease by determining the presence or absence in the subject of one or more markers associated with a clinical subtype of Crohn's disease, diagnosing the subject in which the one or more markers are present as having a particular clinical subtype of Crohn's disease, and treating the subject having a particular clinical subtype of Crohn's disease based on the diagnosis. As an example, treatment for the fibrostenotic subtype of Crohn's disease currently includes surgical removal of the affected, strictured part of the bowel.

[0413] Thus, while there are a number of treatments for Crohn's disease currently available, they all are accompanied by various side effects, high costs, and long complicated treatment protocols, which are often not available and effective in a large number of individuals. Accordingly, there remains a need in the art for more effective and otherwise improved methods for treating and preventing Crohn's disease. Thus, there is a continuing need in the medical arts for genetic markers of Crohn's disease and guidance for the use of such markers. The present invention fulfills this need and provides further related advantages.

### EXAMPLES

### Example 1

### Identification of Cases and Controls

[0414] All individuals were sampled from the Quebec founder population (QFP). Membership in the founder population was defined as having four grandparents with French Canadian family names who were born in the Province of Quebec, Canada or in adjacent areas of the Provinces of New Brunswick and Ontario or in New England or New York State. The Quebec founder population has two distinct advantages over general populations for LD mapping. Because it is relatively young (about 12 to 15 generations from the mid 17th century to the present) and because it has a limited but sufficient number of founders (approximately 2600 effective founders, Charbonneau et al. 1987), the Quebec population is characterized both by extended LD and by decreased genetic heterogeneity. The increased extent of LD allows the detection of disease associated genes using a reasonable marker density, while still allowing the increased meiotic resolution of population-based mapping. The number of founders is small enough to result in increased LD and reduced allelic heterogeneity, yet large enough to insure that all of the major disease genes involved in general populations are present in Quebec. Reduced allelic heterogeneity will act to increase relative risk imparted by the remaining alleles and so increase the power of case/control studies to detect genes and gene alleles involved in complex disorders within the Quebec population. The specific combination of age in generations, optimal number of founders and large present population size makes the QFP optimal for LD-based gene mapping.

[0415] Patient inclusion criteria for the study include diagnosis for Crohn's disease by any one of the following: a colonoscopy, a radiological examination with barium, an abdominal surgical operation or a biopsy or a surgical specimen. The colonoscopy diagnosis consists of observing linear, deep or serpentigenous ulcers, pseudopolyps, or skip areas. The barium radiological examination consists of the detection of strictures, ulcerations and string signs by observing the barium enema and the small bowel followed through an NMRI series.

[0416] Patients that were diagnosed with ulcerative colitis, infectious colitis or other intestinal diseases were excluded from the study. All human sampling was subject to ethical review procedures.

[0417] All enrolled QFP subjects (patients and controls) provided a 30 ml blood sample (3 barcoded tubes of 10 ml). Samples were processed immediately upon arrival at Genizon's laboratory. All samples were scanned and logged into a LabVantage Laboratory Information Management System (LIMS), which served as a hub between the clinical data management system and the genetic analysis system. Following centrifugation, the buffy coat containing the white blood cells was isolated from each tube. Genomic DNA was extracted from the buffy coat from one of the tubes, and stored at 4° C. until required for genotyping. DNA extraction was performed with a commercial kit using a guanidine hydrochloride based method (FlexiGene, Qiagen) according to the manufacturer's instructions. The extraction method yielded high molecular weight DNA, and the quality of every DNA sample was verified by agarose gel electrophoresis. Genomic DNA appeared on the gel as a large band of very high molecular weight. The remaining two buffy coats were stored at −80° C. as backups.

[0418] The QFP samples were collected as family trios consisting of Crohn's disease subjects and two first degree relatives. Of the 500 trios, 477 were Parent, Parent, Child (PPC) trios; the remainders were Parent, Child, Child (PCC) trios. Only the PPC trios were used for the analysis reported here because they produced equal numbers of more accurately estimated case and control haplotypes than the PCC trios. 382 trios were used in the genome wide scan and 477 trios were used in the fine mapping component of the study. One member of each trio was affected with Crohn's disease. For the 382 trios used in the genome wide scan, these included 189 daughters, 90 sons, 54 mothers and 49 fathers. When a child was the affected member of the trio, the two non-transmitted parental chromosomes (one from each parent) were used as controls, when one of the parents was affected, that person's spouse provided the control chromosomes. The recruitment of trios allowed a more precise determination of long extended haplotypes.

[0419] In addition, samples from a European general population (German samples) were also recruited with similar exclusion and inclusion criteria described above for the QFP samples. Two sets of samples were collected: trios (PPC) and unrelated single samples (cases and controls). All individuals recruited were required to have parents of Caucasian origin born in Germany. Five hundred trios (2 parents and one child) and 750 cases and 750 controls were genotyped as described in the Fine Mapping example below (Example 4).

### Example 2

### Genome Wide Association

[0420] Genotyping was performed using Perlegen's ultra-high-throughput platform. Marker loci were amplified by PCR and hybridized to wafers containing arrays of oligonucleotides. Allele discrimination was performed through allele-specific hybridization. In total, 248,535 SNPs, distributed as evenly as possible throughout the genome, were genotyped on the 382 QFP trios for a total of 372,802,500 genotypes. These markers were mostly selected from various databases including the ˜1.6 million SNP database of Perlegen Life Sciences (Patil, 2001); several thousand were obtained from the HapMap consortium database and/or dbSNP at NCBI. The SNPs were chosen to maximize uniformity of genetic coverage and to cover a distribution of allele frequencies. All SNPs that did not pass the quality controls for the assay, that is, that had a minor allele frequency of less than 1%, a Mendelian error rate within trios greater than 1%, that deviated significantly from the Hardy-Weinberg equilibrium, or that had excessive missing data (cut-off at 5% missing values or higher) were removed from the analysis. Genetic analysis was performed on a total of 165,785 SNPs (158,775 autosomal, 6869 X chromosome and 141 Y chromosome). The average gap size was approximately 17 kb. Of the 165,785 markers, ˜140,000 had a minor allele frequency (MAF) greater than 10% for the QFP.

[0421] The genotyping information was entered into a Unified Genotype Database (a proprietary database under development) from which it was accessed using custom-built programs for export to the genetic analysis pipeline. Analyses of these genotypes were performed with the statistical tools described in Example 3. The GWS permitted the identification of 31 candidate chromosomal regions linked to Crohn's disease (Table 1). These regions were further analyzed by the Fine Mapping approach described in Example 4.

### Example 3

### Genetic Analysis

[0422] 1. Dataset Quality Assessment

[0423] Prior to performing any analysis, the dataset from the GWS was verified for completeness of the trios. The program GGFileMod removed any trios with abnormal family structure or missing individuals (e.g. trios without a proband, duos, singletons, etc.), and calculated the total number of complete trios in the dataset. The trios were also tested to make sure that no subjects within the cohort were related more closely than second cousins (6 meiotic steps).

[0424] Subsequently, the program DataCheck2.1 was used to calculate the following statistics per marker and per family:
[0425] Minor allele frequency (MAF) for each marker; Missing values for each marker and family; Hardy Weinberg Equilibrium for each marker; and Mendelian segregation error rate.

[0426] The following acceptance criteria were applied for internal analysis purposes:
[0427] MAF>1%;
[0428] Missing values <1%;
[0429] Observed non-Mendelian segregation <0.33%;
[0430] Non significant deviation in allele frequencies from Hardy Weinberg equilibrium.

[0431] Markers or families not meeting these criteria were removed from the dataset in the following step. Analyses of variance were performed using the algorithm GenAnova, to assess whether families or markers have a greater effect on missing values and/or non-Mendelian segregation. This was used to determine the smallest number of data points to remove from the dataset in order to meet the requirements for missing values and non-Mendelian segregation. The families and/or markers were removed from the dataset using the program DataPull, which generates an output file that is used for subsequent analysis of the genotype data.

[0432] 2. Phase Determination

[0433] The program PhaseFinderSNP2.0 was used to determine phase from trio data on a marker-by-marker, trio-by-trio basis. The output file contains haplotype data for all trio members, with ambiguities present when all trio members are heterozygous or where data is missing. The program FileWriterTemp was then used to determine case and control haplotypes and to prepare the data in the proper input format for the next stage of analysis, using the expectation maximization algorithm, PL-EM, to call phase on the remaining ambiguities. This stage consists of several modules for resolution of the remaining phase ambiguities. PLEMInOut1 was first used to recode the haplotypes for input into the PL-EM algorithm in 15-marker blocks for the genome wide scan data and for 11 marker blocks for fine and ultra-fine mapping data sets. The haplotype information was encoded as genotypes, allowing for the entry of known phase into the algorithm; this method limits the possible number of estimated haplotypes conditioned on already known phase assignments. The PL-EM algorithm was used to estimate haplotypes from the “pseudo-genotype” data in 11 or 15-marker windows, advancing in increments of one marker across the chromosome. The results were then converted into multiple haplotype files using the program PLEMInOut2. Subsequently PLEMBlockGroup was used to convert the individual 11 or 15-marker block files into one continuous block of haplotypes for the entire chromosome, and to generate files for further analysis by LDSTATS and SINGLETYPE. PLEMBlockGroup takes the consensus estimation of the allele call at each marker over all separate estimations (most markers are estimated 11-15 different times as the 11 or 15 marker blocks pass over their position).

[0434] 3. Haplotype Association Analysis

[0435] Haplotype association analysis was performed using the program LDSTATS. LDSTATS tests for association of haplotypes with the disease phenotype. The algorithms LDSTATS (v2.0) and LDSTATS (v4.0) define haplotypes using multi-marker windows that advance across the marker map in one-marker increments. Windows can contain any odd number of markers specified as a parameter of the algorithm. Other marker windows can also be used. At each position the frequency of haplotypes in cases and controls was calculated and a chi-square statistic was calculated from case control frequency tables. For LDSTATS v2.0, the significance of the chi-square for single marker and 3-marker windows was calculated as Pearson's chi-square with degrees of freedom. Larger windows of multi-allelic haplotype association were tested using Smith's normalization of the square root of Pearson's Chi-square. In addition, LDSTATS v2.0 calculates Chi-square values for the transmission disequilibrium test (TDT) for single markers in situations where the trios consisted of parents and an affected child.

[0436] LDSTATS v4.0 calculates significance of chi-square values using a permutation test in which case-control status is randomly permuted until 350 permuted chi-square values are observed that are greater than or equal to chi-square value of the actual data. The P value is then calculated as 350/the number of permutations required.

[0437] Table 2 lists the results for association analysis using LDSTATs (v2.0 and v4.0) for the 31 regions described above based on the genome wide scan genotype data for 382 QFP trios. For each region that was associated with Crohn disease in the genome wide scan, we report in Table 13 the allele frequencies and the relative risk (RR) for the haplotypes contributing to the best signal at each SNP in the region. The best signal at a given location was determined by comparing the significance (p-value) of the association with Crohn disease for window sizes of 1, 3, 5, 7, and 9 SNPs, and selecting the most significant window. For a given window size at a given location, the association with Crohn disease was evaluated by comparing the overall distribution of haplotypes in the cases with the overall distribution of haplotypes in the controls. Haplotypes with a relative risk greater than one increase the risk of developing Crohn disease while haplotypes with a relative risk less than one are protective and decrease the risk.

[0438] 4. Conditional Haplotype Analyses

[0439] Conditional haplotype analyses were performed on subsets of the original set of 382 cases and 382 controls using the program LDSTATS (v2.0). The selection of a subset of cases and their matched controls was based on the carrier status of cases at a gene or locus of interest. We selected the gene NOD2 (alias CARD15) on chromosome 16 and the gene IL23R on chromosome 1 based on our association findings using LDSTAT (v2.0) in our fine mapping of these two loci with 477 trios (see below). The most significant association signal in NOD2 was obtained with a haplotype window of size 7 containing SNPs corresponding to SEQ IDs 13789, 13796, 13799, 13800, 13802, 13804 and 13805 (see Table below for conversion to the specific DNA alleles used). A reduced haplotype diversity was observed and we selected two sets of risk haplotypes for conditional analyses. The first set consisted of haplotypes 2121222 and 1121211 and the second set contained the above two haplotypes and haplotype 2121211. Using the first set, we partitioned the cases into two groups; the first group consisting of those cases that were carrier of a risk haplotype and the second group consisting of the remaining cases, the non carriers. The resulting sample sizes were respectively 125 and 227. LDSTAT (v2.0) was run in each group and regions showing association with Crohn disease are reported in Table 11. Four regions (C02, M02, N01 and S03) were associated with Crohn disease in the group of non carriers (not_NOD2_caserisk_{—}2hap), indicating the existence of risk factors acting independently of NOD2. We repeated the process of partitioning the cases into two groups using the second set containing three risk haplotypes. The resulting sample sizes were 200 and 152 for the two groups of cases. One region (S03) was associated with Crohn disease in the group of non carriers (not_NOD2_caserisk_{—}3hap) indicating the presence of risk factors acting independently of NOD2 (Table 11).

[0440] A second conditional analysis was performed using the gene IL23R on chromosome 1. The most significant association in IL23R was obtained with a haplotype window of size 9 containing SNPs corresponding to SEQ IDs 5382, 5387, 5390, 5393, 5396, 5397, 5401, 5404 and 5406 (see Table below for conversion to the specific DNA alleles used). A reduced haplotype diversity was observed and we selected one set of protective haplotypes and a risk haplotype for conditional analyses. The protective set consisted of haplotypes 212111122 and 212111121 and the risk haplotype was 221211121. In addition, due to dominance effects involving the risk haplotype, we also considered the risk haplotype 221211121 while excluding heterozygotes involving haplotypes 122122212, 222122211 and 212111122 (the “exclusion” set) and the risk haplotype. Using the first set of protective haplotypes, we partitioned the cases into two groups; the first group consisting of those cases that were carrier of a protective haplotype and the second group consisting of the remaining cases, the non carriers. The resulting sample sizes were respectively 204 and 162. LDSTATS (v2.0) was run in each group and regions showing association with Crohn disease are reported in Table 11. One region (S02) was associated with Crohn disease in the group of carriers (has_IL23R_caseprotective_{—}2hap), indicating the existence of risk factors acting independently of IL23R. Four regions (C02, C03, M02, T04) were associated with Crohn disease in the group of non carriers (not_IL23R_caseprotective_{—}2hap), indicating the presence of an epistatic interaction between risk factors in those regions and risk factors in IL23R (Table 11). We repeated the process of partitioning the cases into two groups using the risk haplotype in IL23R. The resulting sample sizes were 205 and 161 for the group of carriers and non carriers respectively. Four regions (C02, N01, S02, V04) were associated with Crohn disease in the group of non carriers (not_IL23R_caserisk) indicating the presence of risk factors acting independently of IL23R (Table 11). In a similar fashion, we partitioned the cases into two groups using the risk haplotype and the exclusion set. The carriers were cases with the risk haplotype but without one of the haplotypes in the exclusion set. The non carriers were the remaining set of cases. The sample sizes for the two groups were 184 and 182 respectively. One region (S02) was associated with Crohn disease in the group of carriers (has_IL23R_caserisk_not3) indicating the presence of an epistatic interaction between risk factors in that region and risk factors in IL23R (Table 11). Four regions (T04, V03, X01, X03) were associated with Crohn disease in the group of non carriers (not_IL23R_caserisk_not3) indicating the presence of risk factors acting independently of IL23R (Table 11).

[0441] For each region that was associated with Crohn disease in the conditional analyses, we report in Table 12 the allele frequencies and the relative risk (RR) for the haplotypes contributing to the best signal at each SNP in the region. The best signal at a given location was determined by comparing the significance (p-value) of the association with Crohn disease for window sizes of 1, 3, 5, 7, and 9 SNPs, and selecting the most significant window. For a given window size at a given location, the association with Crohn disease was evaluated by comparing the overall distribution of haplotypes in the cases with the overall distribution of haplotypes in the controls. Haplotypes with a relative risk greater than one increase the risk of developing Crohn disease while haplotypes with a relative risk less than one are protective and decrease the risk.

DNA alleles used in haplotypes (NOD2/CARD15)

| | SeqID | | | | | | |
|---|---|---|---|---|---|---|---|
| | 13789 | 13796 | 13799 | 13800 | 13802 | 13804 | 13805 |
| | Position | | | | | | |
| | 49303427 | 49305205 | 49308676 | 49308899 | 49310925 | 49314041 | 49314275 |
| | Allele | | | | | | |
| RISK | T/C | T/C | T/G | A/G | A/G | G/C | T/C |
| 2121222 | C | T | G | A | G | C | C |
| 1121211 | T | T | G | A | G | G | T |
| 2121211 | C | T | G | A | G | G | T |

DNA alleles used in haplotypes (IL23R)

| | SeqID | | | | | | | | |
|---|---|---|---|---|---|---|---|---|---|
| | 5382 | 5387 | 5390 | 5393 | 5396 | 5397 | 5401 | 5404 | 5406 |
| | Position | | | | | | | | |
| | 67381537 | 67382937 | 67384786 | 67387749 | 67388943 | 67390943 | 67392949 | 67395507 | 67397137 |
| | Alleles | | | | | | | | |
| | T\|G | A\|G | A\|G | T\|G | T\|C | A\|C | T\|C | T\|C | T\|C |
| RISK | | | | | | | | | |
| 221211121 | G | G | A | G | T | A | T | C | T |
| Heterozygotes | | | | | | | | | |
| (risk carrier) | | | | | | | | | |
| 122122212 | T | G | G | T | C | C | C | T | C |
| 222122211 | G | G | G | T | C | C | C | T | T |
| 212111122 | G | A | G | T | T | A | T | C | C |
| PROTECTIVE | | | | | | | | | |
| 212111122 | G | A | G | T | T | A | T | C | C |
| 212111121 | G | A | G | T | T | A | T | C | T |

[0442] 5. Singletype Analysis

[0443] The SINGLETYPE algorithm assesses the significance of case-control association for single markers using the genotype data from the laboratory as input in contrast to LDSTATS single marker window analyses, in which case-control alleles for single markers from estimated haplotypes in file, hapatctr.txt, as input. SINGLETYPE calculates P values for association for both alleles, 1 and 2, as well as for genotypes, 11, 12, and 22, and plots these as −log₁₀ P values for significance of association against marker position.

### Example 4

### Fine Mapping

[0444] Thirty one of the top regions identified as being associated with Crohn's disease by the GWS were further analyzed by fine mapping using a denser set of markers, in order to validate and/or refine the signal. The fine mapping was carried out using the Illumina BeadStation 500GX SNP genotyping platform. Alleles were genotyped using an allele-specific elongation assay that was ligated to a locus-specific oligonucleotide. The assay was performed directly on genomic DNA at a highly multiplex level and the products were amplified using universal oligonucleotides. For each candidate region, a set of SNP markers was selected with an average inter-marker distance of 1-4 Kb distributed over about 400 Kb to 1 Mb and were roughly centered at the highest point of the GWS curves. The cohort used for the fine mapping consisted of 477 Crohn's disease trios (including the 382 used for the GWS). The algorithms used for genetic analyses were the same as used in the GWS and are described in Example 3. Table 3 lists the fine mapping SNPs for the 31 confirmed regions and their respective p values using 477 trios and two analysis methods: LDSTATS (v2.0) and LDSTATS (v4.0). For each region that was associated with Crohn disease in the fine mapping analyses, we report in Table 14a and 14b the allele frequencies and the relative risk (RR) for the haplotypes contributing to the best signal at each SNP in the region. The best signal at a given location was determined by comparing the significance (p-value) of the association with Crohn disease for multiple window sizes, and selecting the most significant window. For a given window size at a given location, the association with Crohn disease was evaluated by comparing the overall distribution of haplotypes in the cases with the overall distribution of haplotypes in the controls. Haplotypes with a relative risk greater than one increase the risk of developing Crohn disease while haplotypes with a relative risk less than one are protective and decrease the risk.

[0445] Eighteen of the 31 regions fine mapped in the QFP samples were also fine mapped using samples from a European general population (both PPC trios and case control German samples collected as described in Example 1). Many of those were confirmed in both the QFP and General population (see Tables 4 and 5 for the genetic analysis results, using both LDSTATs V2 and V4 methods of analysis).

### Example 5

### Gene Identification and Characterization

[0446] A series of gene characterization was performed for each candidate region described in Table 1. Any gene or EST mapping to the interval based on public map data or proprietary map data was considered as a candidate Crohn's disease gene. The approach used to identify all genes located in the critical regions is described below.

[0447] Public Gene Mining

[0448] Once regions were identified using the analyses described above, a series of public data mining efforts were undertaken, with the aim of identifying all genes located within the critical intervals as well as their respective structural elements (i.e., promoters and other regulatory elements, UTRs, exons and splice sites). The initial analysis relied on annotation information stored in public databases (e.g. NCBI, UCSC Genome Bioinformatics, Entrez Human Genome Browser, OMIM—see below for database URL information). Table 8 lists the genes that have been mapped to the 31 candidate regions.

Database URLs

| Name | URL |
|---|---|
| Biocarta | http://www.biocarta.com/ |
| BioCyc | http://www.biocyc.org/ |
| Biomolecular Interaction | http://bind.ca/ |
| Network Database (BIND) | |
| Database of Interacting Proteins | http://dip.doe-mbi.ucla.edu/ |
| Gene Expression Omnibus | http://www.ncbi.nlm.nih.gov/geo/ |
| Human Genome Browser | http://www.ensembl.org/Homo_sapiens/ |
| Interdom | http://interdom.lit.org.sg/help/term.php |
| Kyoto Encyclopedia of Genes | http://www.genome.jp/kegg/ |
| and Genomes (KEGG) | |
| Molecular Interactions Database | http://mint.bio.uniroma2.it/mint/ |
| (MINT) | |
| National Center for | http://www.ncbi.nlm.nih.gov/ |
| Biotechnology Information | |
| (NCBI) | |
| Online Mendelian Inheritance in | http://www.ncbi.nlm.nih.gov/entrez/query.fcgi?db=OMIM |
| Man (OMIM) | |
| OmniViz | http://www.omniviz.com/applications/omni_viz.htm |
| Pathway Enterprise | http://www.omniviz.com/applications/pathways.htm |
| Reactome | http://www.reactome.org/ |
| Transpath | http://www.biobase.de/pages/products/transpath.html |
| UCSC Genome Bioinformatics | http://genome.ucsc.edu/index.html?org=Human |
| UniGene | http://www.ncbi.nlm.nih.gov/entrez/query.fcgi?db=unigene |

[0449] For some genes the available public annotation was extensive, whereas for others very little was known about a gene's function. Customized analysis was therefore performed to characterize genes that corresponded to this latter class.

[0450] Importantly, the presence of rare splice variants and artifactual ESTs was carefully evaluated. Subsequent cluster analysis of novel ESTs provided an indication of additional gene content in some cases. The resulting clusters were graphically displayed against the genomic sequence, providing indications of separate clusters that may contribute to the same gene, thereby facilitating development of confirmatory experiments in the laboratory. While much of this information was available in the public domain, the customized analysis performed revealed additional information not immediately apparent from the public genome browsers.

[0451] A unique consensus sequence was constructed for each splice variant and a trained reviewer assessed each alignment. This assessment included examination of all putative splice junctions for consensus splice donor/acceptor sequences, putative start codons, consensus Kozak sequences and upstream in-frame stops, and the location of polyadenylation signals. In addition, conserved noncoding sequences (CNSs) that could potentially be involved in regulatory functions were included as important information for each gene. The genomic reference and exon sequences were then archived for future reference. A master assembly that included all splice variants, exons and the genomic structure was used in subsequent analyses (i.e., analysis of polymorphisms). Table 9 lists gene clusters based on the publicly available EST and cDNA clustering algorithm, ECGene.

[0452] An important component of these efforts was the ability to visualize and store the results of the data mining efforts. A customized version of the highly versatile genome browser GBrowse (http://www.gmod.org/) was implemented in order to permit the visualization of several types of information against the corresponding genomic sequence. In addition, the results of the statistical analyses were plotted against the genomic interval, thereby greatly facilitating focused analysis of gene content.

[0453] Computational Analysis of Genes and GeneMaps

[0454] In order to assist in the prioritization of candidate genes for which minimal annotation existed, a series of computational analyses were performed that included basic BLAST searches and alignments to identify related genes. In some cases this provided an indication of potential function. In addition, protein domains and motifs were identified that further assisted in the understanding of potential function, as well as predicted cellular localization.

[0455] A comprehensive review of the public literature was also performed in order to facilitate identification of information regarding the potential role of candidate genes in the pathophysiology of Crohn's disease. In addition to the standard review of the literature, public resources (Medline and other online databases) were also mined for information regarding the involvement of candidate genes in specific signaling pathways. The Ingenuity Pathway Analysis System was also used to generate protein interaction networks (see above). A variety of pathway and yeast two hybrid databases were mined for information regarding protein-protein interactions. These included BIND, MINT, DIP, Interdom, and Reactome, among others. By identifying homologues of genes in the Crohn's candidate regions and exploring whether interacting proteins had been identified already, knowledge regarding the GeneMaps for Crohn's disease was advanced. The pathway information gained from the use of these resources was also integrated with the literature review efforts, as described above.

[0456] Genes identified in the WGAS and subsequent fine-mapping studies for Crohn's disease (CD) were evaluated using the Ingenuity Pathway Analysis application (IPA, Ingenuity systems) in order to identify direct biological interactions between these genes, and also to identify molecular regulators acting on those genes (indirect interactions) that could be also involved in CD. The purpose of this effort was to decipher the molecules involved in contributing to CD. These gene interaction networks are very valuable tools in the sense that they facilitate extension of the map of gene products that could represent potential drug targets for CD.

[0457] From the genetic analyses, 31 candidate regions were considered for the development of potential protein interaction networks involved in CD. These regions and their coordinates are presented in Table 1. Out of 31 regions, 4 regions were not included in this analysis because they did not contain any annotated genes. Tables 8 and 19 list the annotated genes present in the remaining 27 regions, and that were used for IPA analysis.

[0458] A total of 295 annotated genes were identified in the 27 fine-mapped regions (Tables 8 and 19), and were imported in the IPA software. In a first step, the analysis was performed by looking for direct interactions only. From this analysis 285 genes were mapped to the Ingenuity database and assigned to 23 networks as defined by IPA. These networks are based on functional relationships between gene products using known interactions in the literature. For each network, some nodes were manually extended to include good candidate genes that could play a role in the biochemical pathways of CD. Table 20 contains information about the gene content of each network, as well as the top functions assigned to those biochemical pathways.

[0459] In a second step, the analysis was performed by looking for direct and indirect interactions. From this analysis 270 genes were mapped to the Ingenuity database and assigned to 17 genetic networks as defined by IPA. Table 21 contains information about the gene content of each network, as well as the top functions assigned to those biochemical pathways.

[0460] In a third step, a subset of the genes (61) mapping to the candidate regions was used as input to the Ingenuity Pathway Analysis System (Table 22). These genes were selected according to criteria that included their relevance to the pathophysiology of the disease and location with respect to the statistical evidence. Tables 23 and 24 list the networks derived from direct interaction only as well as direct and indirect interaction conditions.

[0461] Expression Studies

[0462] In order to determine the expression patterns for genes, relevant information was first extracted from public databases. The UniGene database, for example, contains information regarding the tissue source for ESTs and cDNAs contributing to individual clusters. This information was extracted and summarized to provide an indication in which tissues the gene was expressed. Particular emphasis was placed on annotating the tissue source for bona fide ESTs, since many ESTs mapped to Unigene clusters are artifactual. In addition, SAGE and microarray data, also curated at NCBI (Gene Expression Omnibus), provided information on expression profiles for individual genes. Particular emphasis was placed on identifying genes that were expressed in tissues known to be involved in the pathophysiology of Crohn's disease, e.g. intestinal and immune system tissues.

[0463] Polymorphism Analysis

[0464] Polymorphisms identified in candidate genes, including those from the public domain as well as those identified by sequencing candidate genes and regions, are evaluated for potential function. Initially, polymorphisms are examined for potential impact upon encoded proteins. If the protein is a member of a gene family with reported 3-dimensional structural information, this information is used to predict the location of the polymorphism with respect to protein structure. This information provided insight into the potential role of polymorphisms in altering protein or ligand interactions, as well as suitability as a drug target. In a second phase of analysis we evaluated the potential role of polymorphisms in other biological phenomena, including regulation of transcription, splicing and mRNA stability, etc. There are many examples of the functional involvement of naturally occurring polymorphisms in these processes. As part of this analysis, polymorphisms located in promoter or other regulatory elements, canonical splice sites, exonic and intronic splice enhancers and repressors, conserved noncoding sequences and UTRs are localized.

### Example 6

### SNP and Polymorphism Discovery (SNPD)

[0465] Three candidate regions were selected for sequencing in order to identify all polymorphisms. In cases where the critical interval, identified by fine mapping, was relatively small (˜50 kb), the entire region, including all introns, was sequenced to identify polymorphisms. In situations where the region is large (>50 kb), candidate genes are prioritized for sequencing, and/or only functional gene elements (promoters, exons and splice sites) are sequenced.

[0466] The samples sequenced are selected according to which haplotypes contribute to the association signal observed in the region. The purpose is to select a set of samples that covered all the major haplotypes in the given region. Each major haplotype must be present in a few copies. The first step therefore consisted of determining the major haplotypes in the region to be sequenced.

[0467] Once a region was defined with the two boundary markers, all the markers used in fine mapping that are located within the region are used to determine the major haplotypes. Long haplotypes covering the whole region are thus inferred using the middle marker as an anchor. The results included two series of haplotype themes that define the major haplotypes, comparing the cases and the controls. This exercise was repeated using an anchor in the peripheral regions to ensure that major haplotype subsets that are not anchored at the original middle marker are not missed.

[0468] Once the major haplotypes were determined as described above, appropriate genomic DNA samples were selected such that each major haplotype and haplotype subset were represented in at least two to four copies.

[0469] The sequencing protocol included the following steps, once a region was delimited:

[0470] 1. Primer Design

[0471] The design of the primers was performed using a proprietary primer design tool. A primer quality control step was included in the primer design process. Primers that successfully passed the control quality process were synthesized by Integrated DNA Technologies (IDT). The sense and anti-sense oligos were separated such that the sense oligos were placed on one plate in the same position as their anti-sense counterparts on another plate. Two additional plates were created from each storage plate, one for use in PCR and the other for sequencing. For PCR, the sense and anti-sense oligos of the same pair were combined in the same well to achieve a final concentration of 1.5 μM for each oligonucleotide.

[0472] 2. PCR Optimization

[0473] PCR conditions were optimized by testing a variety of conditions that included varying salt concentrations and temperatures, as well as including various additives. PCR products were checked for robust amplification and minimal background by agarose gel electrophoresis.

[0474] 3. PCR on Selected Samples

[0475] PCR products used for sequencing were amplified using the conditions chosen during optimization. The PCR products were purified free of salts, dNTPs and unincorporated primers by use of a MultiScreen PCR384 filter plate manufactured by Millipore. Following PCR, the amplicons were quantified by use of a lambda/Hind III standard curve. This was done to ensure that the quantity of PCR product required for sequencing had been generated. The raw data was measured against the standard curve data in Excel by use of a macro.

[0476] 4. Sequencing

[0477] Sequencing of PCR products was performed by DNA Landmarks using ABI 3730 capillary sequencing instruments.

[0478] 5. Sequence Analysis

[0479] The ABI Prism SeqScape software (Applied Biosystems) was used for SNP identification. The chromatogram trace files were imported into a SeqScape sequencing project and the base calling was automatically performed. Sequences are then aligned and compared to each other using the SeqScape program. The base calling was checked manually, base by base; editing was performed if needed. The SNPs and polymorphisms discovered in this example are listed in Table 10.

### Example 7

### Ultra Fine Mapping (UFM)

[0480] Once polymorphisms were identified by sequencing efforts as described in Example 6, additional genotyping of all newly found polymorphisms was performed on the samples used in the fine mapping studies. Various types of genotyping assays may need to be utilized based on the type of polymorphism identified (i.e., SNP, indel, microsatellite). The assay type can be, but is not restricted to, Sentrix Assay Matrix on Illumina BeadStations, microsatellite on MegaBACE, SNP on ABI or Orchid. The frequencies of genotypes and haplotypes in cases and controls were analyzed in a similar manner as the GWS and fine mapping data. By examining all SNPs in a region, polymorphisms are identified that increase an individual's susceptibility to Crohn's disease. The goal of ultra-fine mapping was to identify the polymorphism that is most associated with disease phenotype as part of the search for the actual DNA polymorphism that confers susceptibility to disease. This statistical identification may need to be corroborated by functional studies. Table 6 lists the results for ultrafine mapping of 3 regions in the QFP. For each region that was associated with Crohn disease in the ultrafine mapping analyses in the QFP, we report in Table 17a and 17b the allele frequencies and the relative risk (RR) for the haplotypes contributing to the best signal at each SNP in the region. The best signal at a given location was determined by comparing the significance (p-value) of the association with Crohn disease for multiple window sizes, and selecting the most significant window. For a given window size at a given location, the association with Crohn disease was evaluated by comparing the overall distribution of haplotypes in the cases with the overall distribution of haplotypes in the controls. Haplotypes with a relative risk greater than one increase the risk of developing Crohn disease while haplotypes with a relative risk less than one are protective and decrease the risk.

### Example 8

### Confirmation of Candidate Regions and Genes in a General Population

[0481] The confirmation of any putative associations described in Examples 4 and 7 was performed in an independent North-European patient sample (see Examples 1 and 3 for description of analysis and samples used). These DNA samples consist of two cohorts. The first cohort consists of 500 PPC trios (500 patients with Crohn's disease). The second cohort consists of 750 patients having Crohn's disease and 750 controls. Haplotype information surrounding association signals are derived by exploration of the Falk-Rubinstein-Trios of North European descent. The fine mapping results for replication of 18 candidate regions in the North-European trios and case/controls are listed in Tables 4 and 5. For each region that was associated with Crohn disease in the fine mapping analyses of the North-European trios and case.controls, we report in Tables 15a and 15b and 16a and 16b the allele frequencies and the relative risk (RR) for the haplotypes contributing to the best signal at each SNP in the region, for both cohorts. The best signal at a given location was determined by comparing the significance (p-value) of the association with Crohn disease for multiple window sizes, and selecting the most significant window. For a given window size at a given location, the association with Crohn disease was evaluated by comparing the overall distribution of haplotypes in the cases with the overall distribution of haplotypes in the controls. Haplotypes with a relative risk greater than one increase the risk of developing Crohn disease while haplotypes with a relative risk less than one are protective and decrease the risk.

[0482] The ultrafine mapping results for replication of three candidate regions in the North-European trios are listed in Table 7. For each region that was associated with Crohn disease in the ultrafine mapping analyses of the North-European trios, we report in Tables 18a and 18b the allele frequencies and the relative risk (RR) for the haplotypes contributing to the best signal at each SNP in the region. The best signal at a given location was determined by comparing the significance (p-value) of the association with Crohn disease for multiple window sizes, and selecting the most significant window. For a given window size at a given location, the association with Crohn disease was evaluated by comparing the overall distribution of haplotypes in the cases with the overall distribution of haplotypes in the controls. Haplotypes with a relative risk greater than one increase the risk of developing Crohn disease while haplotypes with a relative risk less than one are protective and decrease the risk.

[0483] All publications, patents and patent applications mentioned in the specification and reference list are herein incorporated by reference in their entirety for all purposes. Various modifications and variations of the described method and system of the invention will be apparent to those skilled in the art without departing from the scope and spirit of the invention. Although the invention has been described in connection with specific preferred embodiments, it should be understood that the invention as claimed should not be unduly limited to such specific embodiments. Indeed, various modifications of the described modes for carrying out the invention that are obvious to those skilled in molecular biology, genetics, or related fields are intended to be within the scope of the following claims.

[0484] The practice of the present invention will employ, unless otherwise indicated, conventional techniques of cell biology, cell culture, molecular biology, transgenic biology, microbiology, recombinant DNA, and immunology, which are within the skill of the art. Such techniques are explained fully in the literature. See, for example, Molecular Cloning A Laboratory Manual, 2nd Ed., ed. by Sambrook, Fritsch and Maniatis (Cold Spring Harbor Laboratory Press: 1989); DNA Cloning, Volumes I and H (D. N. Glover ed., 4); Oligonucleotide Synthesis (M. J. Gait ed., 1984); Mullis et al. U.S. Pat. No. 4,683,195; Nucleic Acid Hybridization (B. D. Hames & S. J. Higgins eds. 1984); Transcription And Translation (B. D. Haines & S. J. Higgins eds. 1984); Culture Of Animal Cells (R. 1. Freshney, Alan R. Liss, Inc., 1987); Immobilized Cells And Enzymes (IRL Press, 1986); B. Perbal, A Practical Guide To Molecular Cloning (1984); the treatise, Methods In Enzymology (Academic Press, Inc., N.Y.); Gene Transfer Vectors For Mammalian Cells (J. H. Miller and M. P. Calos eds., 1987, Cold Spring Harbor Laboratory); Methods In Enzymology, Vols. 154 and 155 (Wu et al. eds.), Immunochemical Methods In Cell And Molecular Biology (Mayer and Walker, eds., Academic Press, London, 1987); Handbook Of Experimental Immunology, Volumes I-IV (D. M. Weir and C. C. Blackwell, eds., 1986); Manipulating the Mouse Embryo, (Cold Spring Harbor Laboratory Press, Cold Spring Harbor, N.Y., 1986).

### REFERENCES

[0485] Aaltonen, J., M. P. Laitinen, et al. (1999). “Human growth differentiation factor 9 (GDF-9) and its novel homolog GDF-9B are expressed in oocytes during early folliculogenesis.” J Clin Endocrinol Metab. 84(8): 2744-50.

[0486] Abbott, D. W., A. Wilkins, et al. (2004). “The Crohn's Disease Protein, NOD2, Requires RIP2 in Order to Induce Ubiquitinylation of a Novel Site on NEMO.” Curr Biol 14(24): 2217-27.

[0487] Adcock, I. M., M. J. Peters, et al. (1993). “Transcription factor interactions in human lung.” Biochem Soc Trans 21(Pt 3)(3): 277S.

[0488] Agnholt et al (2004). Increased production of granulocyte-macrophage colony-stimulating factor in Crohn's disease—a possible target for infliximab treatment. Eur J Gastroenterol Hepatol. 16(7):649-55.

[0489] Aithal, G. P., C. P. Day, et al. (2001). “Association of single nucleotide polymorphisms in the interleukin-4 gene and interleukin-4 receptor gene with Crohn's disease in a British population.” Genes Immun 2(1): 44-7.

[0490] Alvarado-Kristensson, M. and T. Andersson (2005). “Protein phosphatase 2A regulates apoptosis in neutrophils by dephosphorylating both p38 MAPK and its substrate caspase 3.” J Biol Chem. 280(7): 6238-44.

[0491] Alwine, J. C., D. J. Kemp, et al. (1977). “Method for detection of specific RNAs in agarose gels by transfer to diazobenzyloxymethyl-paper and hybridization with DNA probes.” Proc Natl Acad Sci USA 74(12): 5350-4.

[0492] Anderson, W. F. (1992). “Human gene therapy.” Science 256(5058): 808-13.

[0493] Andres, P. G. and L. S. Friedman (1999). “Epidemiology and the natural course of inflammatory bowel disease.” Gastroenterol Clin North Am 28(2): 255-81, vii.

[0494] Angeloni, D., F. M. Duh, et al. (2003). “C to A single nucleotide polymorphism in intron 18 of the human MST1R (RON) gene that maps at 3p21.3.” Mol Cell Probes. 17(2-3): 55-7.

[0495] Aoki et al (1995). A novel gene, Translin, encodes a recombination hotspot binding protein associated with chromosomal translocations. Nat Genet. 10(2):167-74.

[0496] Bai, R. Y., C. Koester, et al. (2002). “SMIF, a Smad4-interacting protein that functions as a co-activator in TGFbeta signaling.” Nat Cell Biol. 4(3): 181-90.

[0497] Barany, F. (1991). “Genetic disease detection and DNA amplification using cloned thermostable ligase.” Proc Natl Acad Sci USA 88(1): 189-93.

[0498] Barre, F. X., S. Ait-Si-Ali, et al. (2000). “Unambiguous demonstration of triple-helix-directed gene modification.” Proc Natl Acad Sci USA 97(7): 3084-8.

[0499] Becker, C., S. Wirtz, et al. (2003). “Constitutive p40 promoter activation and IL-23 production in the terminal ileum mediated by dendritic cells.” J Clin Invest 112(5): 693-706.

[0500] Bednarek, A. K., C. L. Keck-Waggoner, et al. (2001). “WWOX, the FRA16D gene, behaves as a suppressor of tumor growth.” Cancer Res 61(22): 8068-73.

[0501] Behl, C. (1997). “Amyloid beta-protein toxicity and oxidative stress in Alzheimer's disease.” Cell Tissue Res 290(3): 471-80.

[0502] Belkhiri, A., A. Zaika, et al. (2005). “Darpp-32: a novel antiapoptotic gene in upper gastrointestinal carcinomas.” Cancer Res. 65(15): 6583-92.

[0503] Bender, C. F., M. L. Sikes, et al. (2002). “Cancer predisposition and hematopoietic failure in Rad50(S/S) mice.” Genes Dev. 16(17): 2237-51.

[0504] Bespalova, I. N., G. Van Camp, et al. (2001). “Mutations in the Wolfram syndrome 1 gene (WFS1) are a common cause of low frequency sensorineural hearing loss.” Hum Mol Genet 10(22): 2501-8.

[0505] Bielenberg, D. R., Y. Hida, et al. (2004). “Semaphorin 3F, a chemorepulsant for endothelial cells, induces a poorly vascularized, encapsulated, nonmetastatic tumor phenotype.” J Clin Invest. 114(9): 1260-71.

[0506] Bjursten, M., P. W. Bland, et al. (2005). “Long-term treatment with anti-alpha 4 integrin antibodies aggravates colitis in G alpha i2-deficient mice.” Eur J Immunol. 35(8): 2274-83.

[0507] Blanchard, C., S. Durual, et al. (2004). “IL-4 and IL-13 up-regulate intestinal trefoil factor expression: requirement for STAT6 and de novo protein synthesis.” J Immunol 172(6): 3775-83.

[0508] Blaser, S., J. Horn, et al. (2004). “The novel human platelet septin SEPT8 is an interaction partner of SEPT4.” Thromb Haemost. 91(5): 959-66.

[0509] Bloch, K. D., J. R. Wolfram, et al. (1995). “Three members of the nitric oxide synthase II gene family (NOS2A, NOS2B, and NOS2C) colocalize to human chromosome 17.” Genomics 27(3): 526-30.

[0510] Boengler, K., F. Pipp, et al. (2003). “The ankyrin repeat containing SOCS box protein 5: a novel protein associated with arteriogenesis.” Biochem Biophys Res Commun 302(1): 17-22.

[0511] Boren, J., A. Ramos-Montoya, et al. (2006). “In situ localization of transketolase activity in epithelial cells of different rat tissues and subcellularly in liver parenchymal cells.” J Histochem Cytochem. 54(2): 191-9.

[0512] Bouma, G. and W. Strober (2003). “The immunological and genetic basis of inflammatory bowel disease.” Nat Rev Immunol 3(7): 521-33.

[0513] Bourgeois, S. and D. Labuda (2004). “Dynamic allele-specific oligonucleotide hybridization on solid support.” Anal Biochem 324(2): 309-11.

[0514] Brightbill, H. D., D. H. Libraty, et al. (1999). “Host defense mechanisms triggered by microbial lipoproteins through toll-like receptors.” Science 285(5428): 732-6.

[0515] Brodbeck, J., A. Davies, et al. (2002). “The ducky mutation in Cacna2d2 results in altered Purkinje cell morphology and is associated with the expression of a truncated alpha 2 delta-2 protein with abnormal function.” J Biol Chem. 277(10): 7684-93.

[0516] Brown, J. L., L. Stowers, et al. (1996). “Human Ste20 homologue hPAK1 links GTPases to the JNK MAP kinase pathway.” Curr Biol 6(5): 598-605.

[0517] Browning, C. M., M. J. Smith, et al. (2001). “Human GLI-2 is a tat activation response element-independent Tat cofactor.” J Virol 75(5): 2314-23.

[0518] Bulavin, D. V., C. Phillips, et al. (2004). “Inactivation of the Wip1 phosphatase inhibits mammary tumorigenesis through p38 MAPK-mediated activation of the p16(Ink4a)-p19(Arf) pathway.” Nat Genet 36(4): 343-50.

[0519] Cai, D., L. K. Clayton, et al. (1999). “AND-34, a novel p130Cas-binding thymic stromal cell protein regulated by adhesion and inflammatory cytokines.” J Immunol. 163(4): 2104-12.

[0520] Cai, D., K. N. Felekkis, et al. (2003). “The GDP exchange factor AND-34 is expressed in B cells, associates with HEF1, and activates Cdc42.” J Immunol. 170(2): 969-78.

[0521] Cale, J. M., C. E. Shaw, et al. (1998). “Optimization of a reverse transcription-polymerase chain reaction (RT-PCR) mass assay for low-abundance mRNA.” Methods Mol Biol 105: 351-71.

[0522] Chamouard, P., L. Grunebaum, et al. (1995). “Prothrombin fragment 1+2 and thrombin-antithrombin III complex as markers of activation of blood coagulation in inflammatory bowel diseases.” Eur J Gastroenterol Hepatol. 7(12): 1183-8.

[0523] Chang, N. S., N. Pratt, et al. (2001). “Hyaluronidase induction of a WW domain-containing oxidoreductase that enhances tumor necrosis factor cytotoxicity.” J Biol Chem 276(5): 3361-70.

[0524] Chavany, C., C. Vicario-Abejon, et al. (1998). “Transgenic mice for interleukin 3 develop motor neuron degeneration associated with autoimmune reaction against spinal cord motor neurons.” Proc Natl Acad Sci USA 95(19): 11354-9.

[0525] Chen, X., L. Levine, et al. (1999). “Fluorescence polarization in homogeneous nucleic acid analysis.” Genome Res 9(5): 492-8.

[0526] Chen, S., X. Yin, et al. (2003). “The C-terminal kinase domain of the p34cdc2-related PITSLRE protein kinase (p110C) associates with p21-activated kinase 1 and inhibits its activity during anoikis.” J Biol Chem 278(22): 20029-36. Epub 2003 Mar. 6.

[0527] Chen, Q., L. Rabach, et al. (2005). “IL-11 receptor alpha in the pathogenesis of IL-13-induced inflammation and remodeling.” J Immunol 174(4): 2305-13.

[0528] Chien, C. T., P. L. Bartel, et al. (1991). “The two-hybrid system: a method to identify and clone genes for proteins that interact with a protein of interest.” Proc Natl Acad Sci USA 88(21): 9578-82.

[0529] Choi, J., B. Nannenga, et al. (2002). “Mice deficient for the wild-type p53-induced phosphatase gene (Wip1) exhibit defects in reproductive organs, immune function, and cell cycle control.” Mol Cell Biol 22(4): 1094-105.

[0530] Clavell, M., H. Correa-Gracian, et al. (2000). “Detection of interferon regulatory factor-1 in lamina propria mononuclear cells in Crohn's disease.” J Pediatr Gastroenterol Nutr. 30(1): 43-7.

[0531] Cobrin, G. M. and M. T. Abreu (2005). “Defects in mucosal immunity leading to Crohn's disease.” Immunol Rev. 206: 277-95.

[0532] Cohen, A. S., D. L. Smisek, et al. (1996). “Emerging technologies for sequencing antisense oligonucleotides: capillary electrophoresis and mass spectrometry.” Adv Chromatogr 36: 127-62.

[0533] Cohn, R. D., M. D. Henry, et al. (2002). “Disruption of DAG1 in differentiated skeletal muscle reveals a role for dystroglycan in muscle regeneration.” Cell 110(5): 639-48.

[0534] Combaret, L., O. A. Adegoke, et al. (2005). “USP19 is a ubiquitin-specific protease regulated in rat skeletal muscle during catabolic states.” Am J Physiol Endocrinol Metab. 288(4): E693-700.

[0535] Costello et al (2005). Dissection of the inflammatory bowel disease transcriptome using genome-wide cDNA microarrays. PLoS Med. August; 2(8):e199.

[0536] Cotton, R. G., N. R. Rodrigues, et al. (1988). “Reactivity of cytosine and thymine in single-base-pair mismatches with hydroxylamine and osmium tetroxide and its application to the study of mutations.” Proc Natl Acad Sci USA 85(12): 4397-401.

[0537] Couve, A., S. Restituito, et al. (2004). “Marlin-1, a novel RNA-binding protein associates with GABA receptors.” J Biol Chem 279(14): 13934-43. Epub 2004 Jan. 12.

[0538] Couzens, M., M. Liu, at al. (2000). “Peptide YY-2 (PYY2) and pancreatic polypeptide-2 (PPY2): species-specific evolution of novel members of the neuropeptide Y gene family.” Genomics 64(3): 318-23.

[0539] Cronin, M. T., R. V. Fucini, et al. (1996). “Cystic fibrosis mutation detection by hybridization to light-generated DNA probe arrays.” Hum Mutat 7(3): 244-55.

[0540] Croucher, P. J., S. Mascheretti, et al. (2003). “Lack of association between the C3435T MDR1 gene polymorphism and inflammatory bowel disease in two independent Northern European populations.” Gastroenterology 125(6): 1919-20; author reply 1920-1.

[0541] Cuppen, E., M. van Ham, et al. (2000). “The zyxin-related protein TRIP6 interacts with PDZ motifs in the adaptor protein RIL and the protein tyrosine phosphatase PTP-BL.” Eur J Cell Biol. 79(4): 283-93.

[0542] Dalwadi, H., B. Wei, et al. (2003). “B cell developmental requirement for the G alpha i2 gene.” J Immunol. 170(4): 1707-15.

[0543] Dean, F. B., S. Hosono, et al. (2002). “Comprehensive human genome amplification using multiple displacement amplification.” Proc Natl Acad Sci USA 99(8): 5261-6.

[0544] del Peso, L., R. Hernandez-Alcoceba, et al. (1997). “Rho proteins induce metastatic properties in vivo.” Oncogene 15(25): 3047-57.

[0545] Dentelli, P., A. Rosso, et al. (2004). “IL-3 affects endothelial cell-mediated smooth muscle cell recruitment by increasing TGF beta activity: potential role in tumor vessel stabilization.” Oncogene 23(9): 1681-92.

[0546] DeSalle, L. M., E. Latres, et al. (2001). “The de-ubiquitinating enzyme Unp interacts with the retinoblastoma protein.” Oncogene. 20(39): 5538-42.

[0547] Deschenes, C., L. Alvarez, et al. (2004). “The nucleocytoplasmic shuttling of E2F4 is involved in the regulation of human intestinal epithelial cell proliferation and differentiation.” J Cell Physiol. 199(2): 262-73.

[0548] Diefenbach, A., H. Schindler, et al. (1999). “Requirement for type 2 NO synthase for IL-12 signaling in innate immunity.” Science 284(5416): 951-5.

[0549] Dijkstra, G., A. J. Zandvoort, et al. (2002). “Increased expression of inducible nitric oxide synthase in circulating monocytes from patients with active inflammatory bowel disease.” Scand J Gastroenterol. 37(5): 546-54.

[0550] Dillon, N. (1993). “Regulating gene expression in gene therapy.” Trends Biotechnol 11(5): 167-73.

[0551] Ding, Z., L. L. Gillespie, et al. (2003). “Human MI-ER1 alpha and beta function as transcriptional repressors by recruitment of histone deacetylase 1 to their conserved ELM2 domain.” Mol Cell Biol. 23(1): 250-8.

[0552] Donato, J. L., J. Ko, et al. (2002). “Human HTm4 is a hematopoietic cell cycle regulator.” J Clin Invest. 109(1): 51-8.

[0553] Donovan, F. M., C. J. Pike, et al. (1997). “Thrombin induces apoptosis in cultured neurons and astrocytes via a pathway requiring tyrosine kinase and RhoA activities.” J Neurosci 17(14): 5316-26.

[0554] Dranoff, G., R. Soiffer, et al. (1997). “A phase I study of vaccination with autologous, irradiated melanoma cells engineered to secrete human granulocyte-macrophage colony stimulating factor.” Hum Gene Ther 8(1): 111-23.

[0555] Drmanac, R., S. Drmanac, et al. (2002). “Sequencing by hybridization (SBH): advantages, achievements, and opportunities.” Adv Biochem Eng Biotechnol 77: 75-101.

[0556] Dryja, T. P., L. B. Hahn, et al. (1996). “Missense mutation in the gene encoding the alpha subunit of rod transducin in the Nougaret form of congenital stationary night blindness.” Nat Genet. 13(3): 358-60.

[0557] Ducale, A. E., S. I. Ward, et al. (2005). “Regulation of hyaluronan synthase-2 expression in human intestinal mesenchymal cells: mechanisms of interleukin-1beta-mediated induction.” Am J Physiol Gastrointest Liver Physiol. 289(3): G462-70.

[0558] Duerr, R. H. (2002). “The genetics of inflammatory bowel disease.” Gastroenterol Clin North Am 31(1): 63-76.

[0559] Dunbar, C. E., M. Cottler-Fox, et al. (1995). “Retrovirally marked CD34-enriched peripheral blood and bone marrow cells contribute to long-term engraftment after autologous transplantation.” Blood 85(11): 3048-57.

[0560] Dusetti, N. J., Y. Jiang, et al. (2002). “Cloning and expression of the rat vacuole membrane protein 1 (VMP1), a new gene activated in pancreas with acute pancreatitis, which promotes vacuole formation.” Biochem Biophys Res Commun 290(2): 641-9.

[0561] Elez, R., A. Piiper, et al. (2000). “Polo-like kinase1, a new target for antisense tumor therapy.” Biochem Biophys Res Commun 269(2): 352-6.

[0562] Ellem, K. A., M. G. O'Rourke, et al. (1997). “A case report: immune responses and clinical course of the first human use of granulocyte/macrophage-colony-stimulating-factor-transduced autologous melanoma cells for immunotherapy.” Cancer Immunol Immunother 44(1): 10-20.

[0563] Esaki, M., M. Furuse, et al. (1999). “Polymorphism of heat-shock protein gene HSP70-2 in Crohn disease: possible genetic marker for two forms of Crohn disease.” Scand J Gastroenterol 34(7): 703-7.

[0564] Esworthy R. S., R. Aranda, et. (2001). “Mice with combined disruption of Gpx1 and Gpx2 genes have colitis.” Am J Physiol Gastrointest Liver Physiol. 281(3):G848-55. PMID: 11518697.

[0565] Evans, B. E., K. E. Rittle, et al. (1987). “Design of nonpeptidal ligands for a peptide receptor: cholecystokinin antagonists.” J Med Chem 30(7): 1229-39.

[0566] Fackler, O. T. and B. M. Peterlin (2000). “Endocytic entry of HIV-1.” Curr Biol 10(16): 1005-8.

[0567] Fakhrai-Rad, H., J. Zheng, et al. (2004). “SNP discovery in pooled samples with mismatch repair detection.” Genome Res 14(7): 1404-12.

[0568] Fan, J. and A. B. Malik (2003). “Toll-like receptor-4 (TLR4) signaling augments chemokine-induced neutrophil migration by modulating cell surface expression of chemokine receptors.” Nat Med 9(3): 315-21.

[0569] Farmer, R. G., G. Whelan, et al. (1985). “Long-term follow-up of patients with Crohn's disease. Relationship between the clinical pattern and prognosis.” Gastroenterology 88(6): 1818-25.

[0570] Fechir, M., K. Linker, et al. (2005). “The RNA binding protein TIAR is involved in the regulation of human iNOS expression.” Cell Mol Biol (Noisy-le-grand). 51(3): 299-305.

[0571] Fidder, H. H., S. Olschwang, et al. (2003). “Association between mutations in the CARD15 (NOD2) gene and Crohn's disease in Israeli Jewish patients.” Am J Med Genet 121A(3): 240-4.

[0572] Fields, S. and O. Song (1989). “A novel genetic system to detect protein-protein interactions.” Nature 340(6230): 245-6.

[0573] Frank-Kamenetskii, M. D. and S. M. Mirkin (1995). “Triplex DNA structures.” Annu Rev Biochem 64: 65-95.

[0574] Freeman, W. M., S. J. Walker, et al. (1999). “Quantitative RT-PCR: pitfalls and potential.” Biotechniques 26(1): 112-22, 124-5.

[0575] Frolova, E. I., G. M. Dolganov, et al. (1991). “Linkage mapping of the human CSF2 and IL3 genes.” Proc Natl Acad Sci USA 88(11): 4821-4.

[0576] Fujita, Y., Y. Ezura, et al. (2004). “Hypercholesterolemia associated with splice-junction variation of inter-alpha-trypsin inhibitor heavy chain 4 (ITIH4) gene.” J Hum Genet 49(1): 24-8.

[0577] Fukushige, S., K. Matsubara, et al. (1986). “Localization of a novel v-erbB-related gene, c-erbB-2, on human chromosome 17 and its amplification in a gastric cancer cell line.” Mol Cell Biol 6(3): 955-8.

[0578] Fukushima, T., J. M. Zapata, et al. (2006). “Critical function for SIP, a ubiquitin E3 ligase component of the beta-catenin degradation pathway, for thymocyte development and G1 checkpoint.” Immunity. 24(1): 29-39.

[0579] Gainetdinov, R. R., L. M. Bohn, et al. (1999). “Muscarinic supersensitivity and impaired receptor desensitization in G protein-coupled receptor kinase 5-deficient mice.” Neuron. 24(4): 1029-36.

[0580] Gan, B., Z. K. Melkoumian, et al. (2005). “Identification of FIP200 interaction with the TSC1-TSC2 complex and its role in regulation of cell size control.” J Cell Biol. 170(3): 379-89.

[0581] Gary-Gouy, H., J. Harriague, et al. (2002). “CD5-negative regulation of B cell receptor signaling pathways originates from tyrosine residue Y429 outside an immunoreceptor tyrosine-based inhibitory motif.” J Immunol. 168(1): 232-9.

[0582] Gasparini, P., A. Bonizzato, et al. (1992). “Restriction site generating-polymerase chain reaction (RG-PCR) for the probeless detection of hidden genetic variation: application to the study of some common cystic fibrosis mutations.” Mol Cell Probes 6(1): 1-7.

[0583] Geyer, M., H. Yu, et al. (2002). “Subunit H of the V-ATPase binds to the medium chain of adaptor protein complex 2 and connects Nef to the endocytic machinery.” J Biol Chem 277(32): 28521-9. Epub 2002 May 24.

[0584] Giachino, D., M. M. van Duist, et al. (2004). “Analysis of the CARD15 variants R702W, G908R and L1007fs in Italian IBD patients.” Eur J Hum Genet 12(3): 206-12.

[0585] Gibbs, R. A., P. N. Nguyen, et al. (1989). “Detection of single DNA base differences by competitive oligonucleotide priming.” Nucleic Acids Res 17(7): 2437-48.

[0586] Girardin, S. E., I. G. Boneca, et al. (2003). “Nod2 is a general sensor of peptidoglycan through muramyl dipeptide (MDP) detection.” J Biol Chem 278(11): 8869-72.

[0587] Girardin, S. E., J. P. Hugot, et al. (2003). “Lessons from Nod2 studies: towards a link between Crohn's disease and bacterial sensing.” Trends Immunol 24(12): 652-8.

[0588] Griffin, H. G. and A. M. Griffin (1993). “DNA sequencing. Recent innovations and future trends.” Appl Biochem Biotechnol 38(1-2): 147-59.

[0589] Grossman, P. D., W. Bloch, et al. (1994). “High-density multiplex detection of nucleic acid sequences: oligonucleotide ligation assay and sequence-coded separation.” Nucleic Acids Res 22(21): 4527-34.

[0590] Guatelli, J. C., K. M. Whitfield, et al. (1990). “Isothermal, in vitro amplification of nucleic acids by a multienzyme reaction modeled after retroviral replication.” Proc Natl Acad Sci USA 87(5): 1874-8.

[0591] Guatelli, J. C., K. M. Whitfield, et al. (1990). “Isothermal, in vitro amplification of nucleic acids by a multienzyme reaction modeled after retroviral replication.” Proc Natl Acad Sci USA 87(19): 7797.

[0592] Hafner, G. J., I. C. Yang, et al. (2001). “Isothermal amplification and multimerization of DNA by Bst DNA polymerase.” Biotechniques 30(4): 852-6, 858, 860 passim.

[0593] Hampe, J., J. Grebe, et al. (2002). “Association of NOD2 (CARD 15) genotype with clinical course of Crohn's disease: a cohort study.” Lancet 359(9318): 1661-5.

[0594] Harada, M., Y. Qin, et al. (2005). “G-CSF prevents cardiac remodeling after myocardial infarction by activating the Jak-Stat pathway in cardiomyocytes.” Nat Med. 11(3): 305-11.

[0595] Hardenbol, P., J. Baner, et al. (2003). “Multiplexed genotyping with sequence-tagged molecular inversion probes.” Nat Biotechnol 21(6): 673-8. Epub 2003 May 5.

[0596] Hardwick, J. C., G. R. Van Den Brink, et al. (2004). “Bone morphogenetic protein 2 is expressed by, and acts upon, mature epithelial cells in the colon.” Gastroenterology. 126(1): 111-21.

[0597] Hartman, M. E., J. C. O'Connor, et al. (2004). “Insulin receptor substrate-2-dependent interleukin-4 signaling in macrophages is impaired in two models of type 2 diabetes mellitus.” J Biol Chem 279(27): 28045-50.

[0598] Hasegawa, T., A. Yagi, et al. (2000). “Interaction between GADD34 and kinesin superfamily, KIF3A.” Biochem Biophys Res Commun. 267(2): 593-6.

[0599] Hayashi, K. (1992). “PCR-SSCP: a method for detection of mutations.” Genet Anal Tech Appl 9(3): 73-9.

[0600] Heintz, K., K. Palme, et al. (1992). “The Ncypt1 gene from Neurospora crassa is located on chromosome 2: molecular cloning and structural analysis.” Mol Gen Genet 235(2-3): 413-21.

[0601] Hellevuo, K., M. Yoshimura, et al. (1993). “A novel adenylyl cyclase sequence cloned from the human erythroleukemia cell line.” Biochem Biophys Res Commun. 192(1): 311-8.

[0602] Helms, C., L. Cao, et al. (2003). “A putative RUNX1 binding site variant between SLC9A3R1 and NAT9 is associated with susceptibility to psoriasis.” Nat Genet 35(4): 349-56.

[0603] Henry, M. D. and K. P. Campbell (1998). “A role for dystroglycan in basement membrane assembly.” Cell. 95(6): 859-70.

[0604] Hermonat, P. L. and N. Muzyczka (1984). “Use of adeno-associated virus as a mammalian DNA cloning vector: transduction of neomycin resistance into mammalian tissue culture cells.” Proc Natl Acad Sci USA 81(20): 6466-70.

[0605] Hirai, H., K. Tanaka, et al. (2002). “Cutting edge: agonistic effect of indomethacin on a prostaglandin D2 receptor, CRTH2.” J Immunol. 168(3): 981-5.

[0606] Hisamatsu, T., M. Suzuki, et al. (2003). “Interferon-gamma augments CARD4/NOD1 gene and protein expression through interferon regulatory factor-1 in intestinal epithelial cells.” J Biol Chem. 278(35): 32962-8.

[0607] Hobbs, M. R., V. Udhayakumar, et al. (2002). “A new NOS2 promoter polymorphism associated with increased nitric oxide production and protection from severe malaria in Tanzanian and Kenyan children.” Lancet 360(9344): 1468-75.

[0608] Hoffman, J., F. Kuhnert, et al. (2004). “Wnts as essential growth factors for the adult small intestine and colon.” Cell Cycle. 3(5): 554-7.

[0609] Hogrefe, H. H., R. L. Mullinax, et al. (1993). “A bacteriophage lambda vector for the cloning and expression of immunoglobulin Fab fragments on the surface of filamentous phage.” Gene 128(1): 119-26.

[0610] Hoogendoorn, B., N. Norton, et al. (2000). “Cheap, accurate and rapid allele frequency estimation of single nucleotide polymorphisms by primer extension and DHPLC in DNA pools.” Hum Genet 107(5): 488-93.

[0611] Hsu, I. C., Q. Yang, et al. (1994). “Detection of DNA point mutations with DNA mismatch repair enzymes.” Carcinogenesis 15(8): 1657-62.

[0612] Hu, W., F. Yin, et al. (2002). “[Effect of human calcyclin binding protein encoding gene on development of multiple drug resistance in gastric cancer].” Zhonghua Zhong Liu Za Zhi. 24(5): 426-9.

[0613] Hugot, J. P., M. Chamaillard, et al. (2001). “Association of NOD2 leucine-rich repeat variants with susceptibility to Crohn's disease.” Nature 411(6837): 599-603.

[0614] Hugot, J. P. and G. Thomas (1998). “Genome-wide scanning in inflammatory bowel diseases.” Dig Dis 16(6): 364-9.

[0615] Hunt, T. W., T. A. Fields, et al. (1996). “RGS10 is a selective activator of G alpha i GTPase activity.” Nature. 383(6596): 175-7.

[0616] Hutchings, N. J., N. Clarkson, et al. (2003). “Linking the T cell surface protein CD2 to the actin-capping protein CAPZ via CMS and CIN85.” J Biol Chem. 278(25): 22396-403.

[0617] Ince-Dunn, G., B. J. Hall, et al. (2006). “Regulation of thalamocortical patterning and synaptic maturation by NeuroD2.” Neuron. 49(5): 683-95.

[0618] Inostroza, J. A., F. H. Mermelstein, et al. (1992). “Dr1, a TATA-binding protein-associated phosphoprotein and inhibitor of class II gene transcription.” Cell. 70(3): 477-89.

[0619] Irvine, E. J. (2004). “Patients' fears and unmet needs in inflammatory bowel disease.” Aliment Pharmacol Ther 20 Suppl 4: 54-9.

[0620] Ishibashi, K., M. Suzuki, et al. (2001). “Identification of a new multigene four-transmembrane family (MS4A) related to CD20, HTm4 and beta subunit of the high-affinity IgE receptor.” Gene 264(1): 87-93.

[0621] Ishigaki, S., J. Niwa, et al. (2000). “Two novel genes, human neugrin and mouse m-neugrin, are upregulated with neuronal differentiation in neuroblastoma cells.” Biochem Biophys Res Commun 279(2): 526-33.

[0622] Ishii, M., H. Fei, et al. (2003). “Targeted disruption of GPR7, the endogenous receptor for neuropeptides B and W, leads to metabolic defects and adult-onset obesity.” Proc Natl Acad Sci USA 100(18): 10540-5. Epub 2003 Aug. 18.

[0623] Ishitani, T., S. Kishida, et al. (2003). “The TAK1-NLK mitogen-activated protein kinase cascade functions in the Wnt-5a/Ca(2+) pathway to antagonize Wnt/beta-catenin signaling.” Mol Cell Biol 23(1): 131-9.

[0624] Itoh et al (2001). “Decreased Bax expression by mucosal T cells favours resistance to apoptosis in Crohn's disease.” Gut. 49(1):35-41.

[0625] Ivanov, A. I., A. Nusrat, et al. (2004). “The epithelium in inflammatory bowel disease: potential role of endocytosis of junctional proteins in barrier disruption.” Novartis Found Symp 263: 115-24.

[0626] Jan, Y., M. Matter, et al. (2004). “A mitochondrial protein, Bit1, mediates apoptosis regulated by integrins and Groucho/TLE corepressors.” Cell 116(5): 751-62.

[0627] Jandrig et al (2004). ST18 is a breast cancer tumor suppressor gene at human chromosome 8q11.2. Oncogene. 23(57):9295-302.

[0628] Jiang, P. H., Y. Motoo, et al. (2004). “Expression of vacuole membrane protein 1 (VMP1) in spontaneous chronic pancreatitis in the WBN/Kob rat.” Pancreas 29(3): 225-30.

[0629] Jobs, M., W. M. Howell, et al. (2003). “DASH-2: flexible, low-cost, and high-throughput SNP genotyping by dynamic allele-specific hybridization on membrane arrays.” Genome Res 13(5): 916-24.

[0630] Johann, S. V., J. J. Gibbons, et al. (1992). “GLVR1, a receptor for gibbon ape leukemia virus, is homologous to a phosphate permease of Neurospora crassa and is expressed at high levels in the brain and thymus.” J Virol 66(3): 1635-40.

[0631] Johannesen, J., A. Pie, et al. (2001). “Linkage of the human inducible nitric oxide synthase gene to type 1 diabetes.” J Clin Endocrinol Metab 86(6): 2792-6.

[0632] Johnson, E. N. and K. M. Druey (2002). “Heterotrimeric G protein signaling: role in asthma and allergic inflammation.” J Allergy Clin Immunol. 109(4): 592-602.

[0633] Kaarniranta, K., T. Ryhanen, et al. (2005). “Geldanamycin activates Hsp70 response and attenuates okadaic acid-induced cytotoxicity in human retinal pigment epithelial cells.” Brain Res Mol Brain Res. 137(1-2): 126-31.

[0634] Kajita, M., Y. Ezura, et al. (2003). “Association of the −381T/C promoter variation of the brain natriuretic peptide gene with low bone-mineral density and rapid postmenopausal bone loss.” J Hum Genet 48(2): 77-81.

[0635] Kaltschmidt, C., B. Kaltschmidt, et al. (1994). “Constitutive NF-kappa B activity in neurons.” Mol Cell Biol 14(6): 3981-92.

[0636] Kanazawa, N., M. Kurosaki, et al. (2004). “Regulation of hepatitis C virus replication by interferon regulatory factor 1.” J Virol 78(18): 9713-20.

[0637] Kanehisa, M. (1984). “Use of statistical criteria for screening potential homologies in nucleic acid sequences.” Nucleic Acids Res 12(1 Pt 1): 203-13.

[0638] Kanei-Ishii, C., J. Ninomiya-Tsuji, et al. (2004). “Wnt-1 signal induces phosphorylation and degradation of c-Myb protein via TAK1, HIPK2, and NLK.” Genes Dev 18(7): 816-29.

[0639] Karason, A., J. E. Gudjonsson, et al. (2003). “A susceptibility gene for psoriatic arthritis maps to chromosome 16q: evidence for imprinting.” Am J Hum Genet 72(1): 125-31.

[0640] Kato, A., Y. Nagata, et al. (2004). “Delta-tubulin is a component of intercellular bridges and both the early and mature perinuclear rings during spermatogenesis.” Dev Biol 269(1): 196-205.

[0641] Kashio, N., W. Matsumoto, et al. (1998). “The second domain of the CD45 protein tyrosine phosphatase is critical for interleukin-2 secretion and substrate recruitment of TCR-zeta in vivo.” J Biol Chem. 273(50): 33856-63.

[0642] Kashio et al (2003). Galectin-9 induces apoptosis through the calcium-calpain-caspase-1 pathway. J Immunol.;170(7):3631-6.

[0643] Kayed et al (2004). Expression analysis of MAC30 in human pancreatic cancer and tumors of the gastrointestinal tract. Histol Histopathol. 19(4):1021-31.

[0644] Kim, S., J. Lee, et al. (2003). “BP75, bromodomain-containing M(r) 75,000 protein, binds disheveled-1 and enhances Wnt signaling by inactivating glycogen synthase kinase-3 beta.” Cancer Res. 63(16): 4792-5.

[0645] Kimmel, S. G., R. Mo, et al. (2000). “New mouse models of congenital anorectal malformations.” J Pediatr Surg. 35(2): 227-30; discussion 230-1.

[0646] Klausz, G., T. Molnar, et al. (2005). “Polymorphism of the heat-shock protein gene Hsp70-2, but not polymorphisms of the IL-10 and CD14 genes, is associated with the outcome of Crohn's disease.” Scand J Gastroenterol. 40(10): 1197-204.

[0647] Klein, B. K., J. J. Shieh, et al. (2001). “Receptor binding kinetics of human IL-3 variants with altered proliferative activity.” Biochem Biophys Res Commun 288(5): 1244-9.

[0648] Klein, W., A. Tromm, et al. (2001). “Interleukin-4 and interleukin-4 receptor gene polymorphisms in inflammatory bowel diseases.” Genes Immun 2(5): 287-9.

[0649] Kobayashi, K. S., M. Chamaillard, et al. (2005). “Nod2-dependent regulation of innate and adaptive immunity in the intestinal tract.” Science 307(5710): 731-4.

[0650] Koh, K. P., Y. Wang, et al. (2004). “T cell-mediated vascular dysfunction of human allografts results from IFN-gamma dysregulation of NO synthase.” J Clin Invest 114(6): 846-56.

[0651] Kohler, G. and C. Milstein (1992). “Continuous cultures of fused cells secreting antibody of predefined specificity. 1975.” Biotechnology 24: 524-6.

[0652] Kohn, D. B., K. I. Weinberg, et al. (1995). “Engraftment of gene-modified umbilical cord blood cells in neonates with adenosine deaminase deficiency.” Nat Med 1(10): 1017-23.

[0653] Kojima et al (2005). STAT3 regulates Nemo-like kinase by mediating its interaction with IL-6-stimulated TGFbeta-activated kinase 1 for STAT3 Ser-727 phosphorylation. Proc Natl Acad Sci USA. 102(12):4524-9.

[0654] Kolesnick, R. and H. R. Xing (2004). “Inflammatory bowel disease reveals the kinase activity of KSR1.” J Clin Invest 114(9): 1233-7.

[0655] Kolodziejski, P. J., A. Musial, et al. (2002). “Ubiquitination of inducible nitric oxide synthase is required for its degradation.” Proc Natl Acad Sci USA 99(19): 12315-20.

[0656] Kong et al (2005). ELL-associated factors 1 and 2 are positive regulators of RNA polymerase II elongation factor ELL. Proc Natl Acad Sci USA. 102(29):10094-8.

[0657] Kontani, K., T. Chano, et al. (2003). “RB1CC1 suppresses cell cycle progression through RB1 expression in human neoplastic cells.” Int J Mol Med. 12(5): 767-9.

[0658] Kopp, E. and S. Ghosh (1994). “Inhibition of NF-kappa B by sodium salicylate and aspirin.” Science 265(5174): 956-9.

[0659] Kotin, R. M. (1994). “Prospects for the use of adeno-associated virus as a vector for human gene therapy.” Hum Gene Ther 5(7): 793-801.

[0660] Kovalenko et al (2003). “The tumour suppressor CYLD negatively regulates NF-kappaB signaling by deubiquitination.” Nature. 424(6950):801-5.

[0661] Kozal, M. J., N. Shah, et al. (1996). “Extensive polymorphisms observed in HIV-1 clade B protease gene using high-density oligonucleotide arrays.” Nat Med 2(7): 753-9.

[0662] Kray, A. E., R. S. Carter, et al. (2005). “Positive regulation of IkappaB kinase signaling by protein serine/threonine phosphatase 2A.” J Biol Chem. 280(43): 35974-82.

[0663] Krebs, S., D. Seichter, et al. (2001). “Genotyping of dinucleotide tandem repeats by MALDI mass spectrometry of ribozyme-cleaved RNA transcripts.” Nat Biotechnol 19(9): 877-80.

[0664] Kremer, E. J. and M. Perricaudet (1995). “Adenovirus and adeno-associated virus mediated gene transfer.” Br Med Bull 51(1): 31-44.

[0665] Kulinski, J., D. Besack, et al. (2000). “CEL I enzymatic mutation detection assay.” Biotechniques 29(1): 44-6, 48.

[0666] Kunapuli, P. and J. L. Benovic (1993). “Cloning and expression of GRK5: a member of the G protein-coupled receptor kinase family.” Proc Natl Acad Sci USA 90(12): 5588-92.

[0667] Kure et al (1998). “A missense mutation (His42Arg) in the T-protein gene from a large Israeli-Arab kindred with nonketotic hyperglycinemia.” Hum Genet. 102(4):430-4.

[0668] Kure, S., T. Shinka, et al. (1998). “A one-base deletion (183delC) and a missense mutation (D276H) in the T-protein gene from a Japanese family with nonketotic hyperglycinemia.” J Hum Genet 43(2): 135-7.

[0669] Kuroki, T., F. Trapasso, et al. (2002). “Genetic alterations of the tumor suppressor gene WWOX in esophageal squamous cell carcinoma.” Cancer Res 62(8): 2258-60.

[0670] Kusugami, K., A. Fukatsu, et al. (1995). “Elevation of interleukin-6 in inflammatory bowel disease is macrophage- and epithelial cell-dependent.” Dig Dis Sci. 40(5): 949-59.

[0671] Kwoh, D. Y., G. R. Davis, et al. (1989). “Transcription-based amplification system and detection of amplified human immunodeficiency virus type 1 with a bead-based sandwich hybridization format.” Proc Natl Acad Sci USA 86(4): 1173-7.

[0672] Langmann et al. (2004). “Loss of detoxification in inflammatory bowel disease: dysregulation of pregnane X receptor target genes.” Gastroenterology. 127(1):26-40.

[0673] Larkin, D., D. Murphy, et al. (2004). “ICln, a novel integrin alphallbbeta3-associated protein, functionally regulates platelet activation.” J Biol Chem 279(26): 27286-93.

[0674] Lesage, S., H. Zouali, et al. (2002). “CARD15/NOD2 mutational analysis and genotype-phenotype correlation in 612 patients with inflammatory bowel disease.” Am J Hum Genet 70(4): 845-57.

[0675] Leveille, C., A. L.-D. R, et al. (1999). “CD20 is physically and functionally coupled to MHC class II and CD40 on human B cell lines.” Eur J Immunol. 29(1): 65-74.

[0676] Li, J., Y. Yang, et al. (2002). “Oncogenic properties of PPM1D located within a breast cancer amplification epicenter at 17q23.” Nat Genet 31(2): 133-4.

[0677] Li, Z., X. Dong, et al. (2005). “Regulation of PTEN by Rho small GTPases.” Nat Cell Biol 7(4): 399-404. Epub 2005 Mar. 27.

[0678] Ligumsky et al (1997). Analysis of cytokine profile in human colonic mucosal Fc epsilonRI-positive cells by single cell PCR: inhibition of IL-3 expression in steroid-treated IBD patients. FEBS Lett. 413(3):436-40.

[0679] Lin, Y., A. Khokhlatchev, et al. (2002). “Death-associated protein 4 binds MST1 and augments MST1-induced apoptosis.” J Biol Chem 277(50): 47991-8001.

[0680] Lin, C. H., S. Hansen, et al. (2005). “The dosage of the neuroD2 transcription factor regulates amygdala development and emotional learning.” Proc Natl Acad Sci USA. 102(41): 14877-82.

[0681] Linden, D. R., K. F. Foley, et al. (2005). “Serotonin transporter function and expression are reduced in mice with TNBS-induced colitis.” Neurogastroenterol Motil. 17(4): 565-74.

[0682] Linstedt et al (1993). Giantin, a novel conserved Golgi membrane protein containing a cytoplasmic domain of at least 350 kDa. Mol Biol Cell. 4(7):679-93.

[0683] Liu, J., X. Guan, et al. (2004). “Synergistic activation of interleukin-12 p35 gene transcription by interferon regulatory factor-1 and interferon consensus sequence-binding protein.” J Biol Chem 279(53): 55609-17.

[0684] Liu, C., C. Kuei, et al. (2005). “INSL5 is a high affinity specific agonist for GPCR142 (GPR100).” J Biol Chem. 280(1): 292-300.

[0685] Livak, K. J., J. Marmaro, et al. (1995). “Towards fully automated genome-wide polymorphism screening.” Nat Genet 9(4): 341-2.

[0686] Lizardi, P. M., X. Huang, et al. (1998). “Mutation detection and single-molecule counting using isothermal rolling-circle amplification.” Nat Genet 19(3): 225-32.

[0687] Loftus, E. V., Jr. (2004). “Clinical epidemiology of inflammatory bowel disease: Incidence, prevalence, and environmental influences.” Gastroenterology 126(6): 1504-17.

[0688] Lohi, H., S. Makela, et al. (2002). “Upregulation of CFTR expression but not SLC26A3 and SLC9A3 in ulcerative colitis.” Am J Physiol Gastrointest Liver Physiol. 283(3): G567-75.

[0689] Lombardi, M. S., A. Kavelaars, et al. (1999). “Decreased expression and activity of G-protein-coupled receptor kinases in peripheral blood mononuclear cells of patients with rheumatoid arthritis.” Faseb J. 13(6): 715-25.

[0690] Lowenstein, C. J., C. S. Glatt, et al. (1992). “Cloned and expressed macrophage nitric oxide synthase contrasts with the brain enzyme.” Proc Natl Acad Sci USA 89(15): 6711-5.

[0691] Machida et al (2005). Association of polymorphic alleles of CTLA4 with inflammatory bowel disease in the Japanese. World J Gastroenterol. 11(27):4188-93.

[0692] Mady et al (2002). Expression of E2F-4 gene in colorectal adenocarcinoma and corresponding covering mucosa: an immunohistochemistry, image analysis, and immunoblot study. Appl Immunohistochem Mol Morphol. 10(3):225-30.

[0693] Magro, F., M. A. Vieira-Coelho, et al. (2002). “Impaired synthesis or cellular storage of norepinephrine, dopamine, and 5-hydroxytryptamine in human inflammatory bowel disease.” Dig Dis Sci. 47(1): 216-24.

[0694] Malech, H. L., P. B. Maples, et al. (1997). “Prolonged production of NADPH oxidase-corrected granulocytes after gene therapy of chronic granulomatous disease.” Proc Natl Acad Sci USA 94(22): 12133-8.

[0695] Malo, M. S., W. Zhang, et al. (2004). “Thyroid hormone positively regulates the enterocyte differentiation marker intestinal alkaline phosphatase gene via an atypical response element.” Mol Endocrinol. 18(8): 1941-62.

[0696] Mannon, P. J., I. J. Fuss, et al. (2004). “Anti-interleukin-12 antibody for active Crohn's disease.” N Engl J Med 351(20): 2069-79.

[0697] Mansfield, E. S., M. Vainer, et al. (1996). “Sensitivity, reproducibility, and accuracy in short tandem repeat genotyping using capillary array electrophoresis.” Genome Res 6(9): 893-903.

[0698] Matsumoto et al (1998). Human ecalectin, a variant of human galectin-9, is a novel eosinophil chemoattractant produced by T lymphocytes. J Biol Chem. 273(27):16976-84.

[0699] Maxam, A. M. and W. Gilbert (1977). “A new method for sequencing DNA.” Proc Natl Acad Sci USA 74(2): 560-4.

[0700] Mazzocchi, G., P. Rebuffat, et al. (2005). “G Protein Receptors (GPR) 7 and 8 are Expressed in Human Adrenocortical Cells, and their Endogenous Ligands Neuropeptides B and W Enhance Cortisol Secretion by Activating Adenylate Cyclase- and Phospholipase C-dependent Signaling Cascades.” J Clin Endocrinol Metab 29: 29.

[0701] Mazzocco, M., M. Maffei, et al. (2002). “The identification of a novel human homologue of the SH3 binding glutamic acid-rich (SH3BGR) gene establishes a new family of highly conserved small proteins related to Thioredoxin Superfamily.” Gene 291(1-2): 233-9.

[0702] Mecklenbrauker, I., S. L. Kalled, et al. (2004). “Regulation of B-cell survival by BAFF-dependent PKCdelta-mediated nuclear signaling.” Nature 431(7007): 456-61.

[0703] Meili, R., A. T. Sasaki, et al. (2005). “Rho Rocks PTEN.” Nat Cell Biol 7(4): 334-335.

[0704] Melkoumian, Z. K., X. Peng, et al. (2005). “Mechanism of cell cycle regulation by FIP200 in human breast cancer cells.” Cancer Res. 65(15): 6676-84.

[0705] Metcalf, D. (1985). “The granulocyte-macrophage colony stimulating factors.” Cell 43(1): 5-6.

[0706] Miller, A. D. (1992). “Human gene therapy comes of age.” Nature 357(6378): 455-60.

[0707] Miller, A. D., J. V. Garcia, et al. (1991). “Construction and properties of retrovirus packaging cells based on gibbon ape leukemia virus.” J Virol 65(5): 2220-4.

[0708] Milojevic, T., V. Reiterer, et al. (2006). “The ubiquitin-specific protease Usp4 regulates the cell surface level of the A2A receptor.” Mol Pharmacol. 69(4): 1083-94.

[0709] Mischak, H., A. Bodenteich, et al. (1991). “Mouse protein kinase C-delta, the major isoform expressed in mouse hemopoietic cells: sequence of the cDNA, expression patterns, and characterization of the protein.” Biochemistry 30(32): 7925-31.

[0710] Mitani, K. and C. T. Caskey (1993). “Delivering therapeutic genes—matching approach and application.” Trends Biotechnol 11(5): 162-6.

[0711] Miyamoto, A., K. Nakayama, et al. (2002). “Increased proliferation of B cells and auto-immunity in mice lacking protein kinase Cdelta.” Nature 416(6883): 865-9.

[0712] Monteleone, G., A. Kumberova, et al. (2001). “Blocking Smad7 restores TGF-beta1 signaling in chronic inflammatory bowel disease.” J Clin Invest. 108(4): 601-9.

[0713] Monticelli, S., D. C. Solymar, et al. (2004). “Role of NFAT proteins in IL13 gene transcription in mast cells.” J Biol Chem 279(35): 36210-8.

[0714] Moreira, E. S., T. J. Wiltshire, et al. (2000). “Limb-girdle muscular dystrophy type 2G is caused by mutations in the gene encoding the sarcomeric protein telethonin.” Nat Genet. 24(2): 163-6.

[0715] Mosialos, G. (1997). “The role of Rel/NF-kappa B proteins in viral oncogenesis and the regulation of viral transcription.” Semin Cancer Biol 8(2): 121-9.

[0716] Muzyczka, N. (1994). “Adeno-associated virus (AAV) vectors: will they work?” J Clin Invest 94(4): 1351.

[0717] Myers, R. M., Z. Larin, et al. (1985). “Detection of single base substitutions by ribonuclease cleavage at mismatches in RNA:DNA duplexes.” Science 230(4731): 1242-6.

[0718] Myers, R. M., N. Lumelsky, et al. (1985). “Detection of single base substitutions in total genomic DNA.” Nature 313(6002): 495-8.

[0719] Mykkanen, O. M., M. Gronholm, et al. (2001). “Characterization of human palladin, a microfilament-associated protein.” Mol Biol Cell 12(10): 3060-73.

[0720] Nagashima et al (2003). “A novel PHD-finger motif protein, p47ING3, modulates p53-mediated transcription, cell cycle control, and apoptosis.” Oncogene. 22(3):343-50.

[0721] Nabel, G. J. and P. L. Feigner (1993). “Direct gene transfer for immunotherapy and immunization.” Trends Biotechnol 11(5): 211-5.

[0722] Nagata, K., A. Puls, et al. (1998). “The MAP kinase kinase kinase MLK2 co-localizes with activated JNK along microtubules and associates with kinesin superfamily motor KIF3.” Embo J. 17(1): 149-58.

[0723] Nagley, P. and Y. H. Wei (1998). “Ageing and mammalian mitochondrial genetics.” Trends Genet 14(12): 513-7.

[0724] Nanao et al (1994). “Identification of the mutations in the T-protein gene causing typical and atypical nonketotic hyperglycinemia.” Hum Genet. 93(6):655-8.

[0725] Nanao, K., G. Takada, et al. (1994). “Structure and chromosomal localization of the aminomethyltransferase gene (AMT).” Genomics. 19(1): 27-30.

[0726] Napolitano, M., F. Miceli, et al. (2000). “Expression and relationship between endothelin-1 messenger ribonucleic acid (mRNA) and inducible/endothelial nitric oxide synthase mRNA isoforms from normal and preeclamptic placentas.” J Clin Endocrinol Metab 85(6): 2318-23.

[0727] Nathan, C. and M. U. Shiloh (2000). “Reactive oxygen and nitrogen intermediates in the relationship between mammalian hosts and microbial pathogens.” Proc Natl Acad Sci USA 97(16): 8841-8.

[0728] Neil, G. A., R. W. Summers, et al. (1992). “CD5+ B cells are decreased in peripheral blood of patients with Crohn's disease.” Dig Dis Sci. 37(9): 1390-5.

[0729] Netzer, C., L. Rieger, et al. (2001). “SALL1, the gene mutated in Townes-Brocks syndrome, encodes a transcriptional repressor which interacts with TRF1/PIN2 and localizes to pericentromeric heterochromatin.” Hum Mol Genet. 10(26): 3017-24.

[0730] Neurath, M. F., B. Weigmann, et al. (2002). “The transcription factor T-bet regulates mucosal T cell activation in experimental colitis and Crohn's disease.” J Exp Med. 195(9): 1129-43.

[0731] Newman, B., X. Gu, et al. (2005). “A risk haplotype in the Solute Carrier Family 22A4/22A5 gene cluster influences phenotypic expression of Crohn's disease.” Gastroenterology 128(2): 260-9.

[0732] Ngsee, J. K., L. A. Elferink, et al. (1991). “A family of ras-like GTP-binding proteins expressed in electromotor neurons.” J Biol Chem 266(4): 2675-80.

[0733] Niu, T., Z. S. Qin, et al. (2002). “Bayesian haplotype inference for multiple linked single-nucleotide polymorphisms.” Am J Hum Genet 70(1): 157-69.

[0734] Odashima, M., G. Bamias, et al. (2005). “Activation of A2A adenosine receptor attenuates intestinal inflammation in animal models of inflammatory bowel disease.” Gastroenterology. 129(1): 26-33.

[0735] Ogura, Y., D. K. Bonen, et al. (2001). “A frameshift mutation in NOD2 associated with susceptibility to Crohn's disease.” Nature 411(6837): 603-6.

[0736] Ogura, Y., N. Inohara, et al. (2001). “Nod2, a Nod1/Apaf-1 family member that is restricted to monocytes and activates NF-kappaB.” J Biol Chem 276(7): 4812-8. Epub 2000 Nov. 21.

[0737] Oppmann, B., R. Lesley, et al. (2000). “Novel p19 protein engages IL-12p40 to form a cytokine, IL-23, with biological activities similar as well as distinct from IL-12.” Immunity 13(5): 715-25.

[0738] Orita, M., H. Iwahana, et al. (1989). “Detection of polymorphisms of human DNA by gel electrophoresis as single-strand conformation polymorphisms.” Proc Natl Acad Sci USA 86(8): 2766-70.

[0739] Ouburg, S., R. Mallant-Hent, et al. (2005). “The toll-like receptor 4 (TLR4) Asp299Gly polymorphism is associated with colonic localisation of Crohn's disease without a major role for the Saccharomyces cerevisiae mannan-LBP-CD14-TLR4 pathway.” Gut 54(3): 439-40.

[0740] Pahl, H. L., B. Krauss, et al. (1996). “The immunosuppressive fungal metabolite gliotoxin specifically inhibits transcription factor NF-kappaB.” J Exp Med 183(4): 1829-40.

[0741] Parham, C., M. Chirica, et al. (2002). “A receptor for the heterodimeric cytokine IL-23 is composed of IL-12Rbeta1 and a novel cytokine receptor subunit, IL-23R.” J Immunol 168(11): 5699-708.

[0742] Paris, S., R. Sesboue, et al. (2002). “Inhibition of tumor growth and metastatic spreading by overexpression of inter-alpha-trypsin inhibitor family chains.” Int J Cancer. 97(5): 615-20.

[0743] Peltekova, V. D., R. F. Wintle, et al. (2004). “Functional variants of OCTN cation transporter genes are associated with Crohn disease.” Nat Genet 36(5): 471-5. Epub 2004 Apr. 11.

[0744] Pfeffer, S. R. (2005). “Structural clues to Rab GTPase functional diversity.” J Biol Chem 3: 3.

[0745] Pirone, D. M., S. Fukuhara, et al. (2000). “SPECs, small binding proteins for Cdc42.” J Biol Chem 275(30): 22650-6.

[0746] Podolsky, D. K. (1991). “Inflammatory bowel disease (1).” N Engl J Med 325(13): 928-37.

[0747] Podolsky, D. K. (1991). “Inflammatory bowel disease (2).” N Engl J Med 325(14): 1008-16.

[0748] Pol, O., J. R. Palacio, et al. (2003). “The expression of delta- and kappa-opioid receptor is enhanced during intestinal inflammation in mice.” J Pharmacol Exp Ther. 306(2): 455-62.

[0749] Praskova, M., A. Khoklatchev, et al. (2004). “Regulation of the MST1 kinase by autophosphorylation, by the growth inhibitory proteins, RASSF1 and NORE1, and by Ras.” Biochem J 381(Pt 2): 453-62.

[0750] Qiu, Y., L. Ravi, et al. (1998). “Requirement of ErbB2 for signaling by interleukin-6 in prostate carcinoma cells.” Nature 393(6680): 83-5.

[0751] Raap, A. K. (1998). “Advances in fluorescence in situ hybridization.” Mutat Res 400(1-2): 287-98.

[0752] Rebollo et al (2001). “The association of Aiolos transcription factor and Bcl-xL is involved in the control of apoptosis.” J Immunol. 167(11):6366-73.

[0753] Reiley et al (2004). “Negative regulation of JNK signaling by the tumor suppressor CYLD.” J Biol Chem. 279(53):55161-7.

[0754] Remick, D. G. (1995). “Applied molecular biology of sepsis.” J Crit Care 10(4): 198-212.

[0755] Ren et al (2002). “E2F integrates cell cycle progression with DNA repair, replication, and G(2)/M checkpoints.” Genes Dev. 16(2):245-56.

[0756] Ren, L. Q., N. Gourmala, et al. (1998). “Lipopolysaccharide-induced expression of IP-10 mRNA in rat brain and in cultured rat astrocytes and microglia.” Brain Res Mol Brain Res 59(2): 256-63.

[0757] Reuter, U., A. Chiarugi, et al. (2002). “Nuclear factor-kappaB as a molecular target for migraine therapy.” Ann Neurol 51(4): 507-16.

[0758] Ridley, A. J. (1997). “The GTP-binding protein Rho.” Int J Biochem Cell Biol 29(11): 1225-9.

[0759] Roediger, W. E. (1980). “The colonic epithelium in ulcerative colitis: an energy-deficiency disease?” Lancet 2(8197): 712-5.

[0760] Roessler, E., Y. Z. Du, et al. (2003). “Loss-of-function mutations in the human GLI2 gene are associated with pituitary anomalies and holoprosencephaly-like features.” Proc Natl Acad Sci USA 100(23): 13424-9.

[0761] Romero et al (1999). “Aiolos transcription factor controls cell death in T cells by regulating Bcl-2 expression and its cellular localization.” EMBO J. 18(12):3419-30.

[0762] Ronaghi, M., M. Uhlen, et al. (1998). “A sequencing method based on real-time pyrophosphate.” Science 281(5375): 363, 365.

[0763] Rosenecker, J., K. H. Harms, et al. (1996). “Adenovirus infection in cystic fibrosis patients: implications for the use of adenoviral vectors for gene transfer.” Infection 24(1): 5-8.

[0764] Sahl et al (1998). “Granulocyte-macrophage colony-stimulating factor and interleukin-3 potentiate interferon-gamma-mediated endothelin production by human monocytes: role of protein kinase C. Immunology.” 95(3):473-9.

[0765] Saiki, R. K., T. L. Bugawan, et al. (1986). “Analysis of enzymatically amplified beta-globin and HLA-DQ alpha DNA with allele-specific oligonucleotide probes.” Nature 324(6093): 163-6.

[0766] Saiki, R. K., P. S. Walsh, et al. (1989). “Genetic analysis of amplified DNA with immobilized sequence-specific oligonucleotide probes.” Proc Natl Acad Sci USA 86(16): 6230-4.

[0767] Saleeba, J. A. and R. G. Cotton (1993). “Chemical cleavage of mismatch to detect mutations.” Methods Enzymol 217: 286-95.

[0768] Samulski, R. J., L. S. Chang, et al. (1989). “Helper-free stocks of recombinant adeno-associated viruses: normal integration does not require viral gene expression.” J Virol 63(9): 3822-8.

[0769] Sandborn, W. J. and W. A. Faubion (2004). “Biologics in inflammatory bowel disease: how much progress have we made?” Gut 53(9): 1366-73.

[0770] Sanders, L. C., F. Matsumura, et al. (1999). “Inhibition of myosin light chain kinase by p21-activated kinase.” Science 283(5410): 2083-5.

[0771] Sandford, A. J., T. Shirakawa, et al. (1993). “Localisation of atopy and beta subunit of high-affinity IgE receptor (Fc epsilon RI) on chromosome 11q.” Lancet 341(8841): 332-4.

[0772] Sanger, F., S. Nicklen, et al. (1977). “DNA sequencing with chain-terminating inhibitors.” Proc Natl Acad Sci USA 74(12): 5463-7.

[0773] Sans, M., D. Tassies, et al. (2003). “The 4G/4G genotype of the 4G/5G polymorphism of the type-1 plasminogen activator inhibitor (PAI-1) gene is a determinant of penetrating behaviour in patients with Crohn's disease.” Aliment Pharmacol Ther 17(8): 1039-47.

[0774] Santelli, E., M. Leone, et al. (2005). “Structural analysis of Siah1-Siah-interacting protein interactions and insights into the assembly of an E3 ligase multiprotein complex.” J Biol Chem. 280(40): 34278-87.

[0775] Sarraf et al (1998). “Differentiation and reversal of malignant changes in colon cancer through PPARgamma.” Nat Med 4(9):1046-52.

[0776] Sato, A., S. Kishida, et al. (2004). “Sall1, a causative gene for Townes-Brocks syndrome, enhances the canonical Wnt signaling by localizing to heterochromatin.” Biochem Biophys Res Commun. 319(1): 103-13.

[0777] Satoh, A. K., F. Tokunaga, et al. (1997). “Rab proteins of Drosophila melanogaster: novel members of the Rab-protein family.” FEBS Lett 404(1): 65-9.

[0778] Sauter, E. R., M. Herlyn, et al. (2000). “Prolonged response to antisense cyclin D1 in a human squamous cancer xenograft model.” Clin Cancer Res 6(2): 654-60.

[0779] Schaffer, C. J. and L. B. Nanney (1996). “Cell biology of wound healing.” Int Rev Cytol 169: 151-81.

[0780] Schreck, R., P. Rieber, et al. (1991). “Reactive oxygen intermediates as apparently widely used messengers in the activation of the NF-kappa B transcription factor and HIV-1.” Embo J 10(8): 2247-58.

[0781] Segain, J. P., D. Raingeard de la Bletiere, et al. (2003). “Rho kinase blockade prevents inflammation via nuclear factor kappa B inhibition: evidence in Crohn's disease and experimental colitis.” Gastroenterology 124(5): 1180-7.

[0782] Sells, M. A., U. G. Knaus, et al. (1997). “Human p21-activated kinase (Pak1) regulates actin organization in mammalian cells.” Curr Biol 7(3): 202-10.

[0783] Shekarabi, M., S. W. Moore, et al. (2005). “Deleted in colorectal cancer binding netrin-1 mediates cell substrate adhesion and recruits Cdc42, Rac1, Pak1, and N-WASP into an intracellular signaling complex that promotes growth cone expansion.” J Neurosci 25(12): 3132-41.

[0784] Shi, G. X., K. Harrison, et al. (2004). “Toll-like receptor signaling alters the expression of regulator of G protein signaling proteins in dendritic cells: implications for G protein-coupled receptor signaling.” J Immunol. 172(9): 5175-84.

[0785] Shi, Y., W. Hu, et al. (2004). “Regulation of drug sensitivity of gastric cancer cells by human calcyclin-binding protein (CacyBP).” Gastric Cancer 7(3): 160-6.

[0786] Silkov et al (2002). “Enhanced apoptosis of B and T lymphocytes in TAFII105 dominant-negative transgenic mice is linked to nuclear factor-kappa B.” J Biol Chem. 277(20):17821-9.

[0787] Shivakumar, L., J. Minna, et al. (2002). “The RASSF1A tumor suppressor blocks cell cycle progression and inhibits cyclin D1 accumulation.” Mol Cell Biol. 22(12): 4309-18.

[0788] Simon, H., I. Fortsch, et al. (1999). “Triple helix formation inhibits DNA gyrase activity.” Antisense Nucleic Acid Drug Dev 9(6): 527-31.

[0789] Smith, C. A., T. Farrah, et al. (1994). “The TNF receptor superfamily of cellular and viral proteins: activation, costimulation, and death.” Cell 76(6): 959-62.

[0790] Smith, J. and P. Modrich (1996). “Mutation detection with MutH, MutL, and MutS mismatch repair proteins.” Proc Natl Acad Sci USA 93(9): 4374-9.

[0791] Smith, M. J., S. D. Gitlin, et al. (2001). “GLI-2 modulates retroviral gene expression.” J Virol 75(5): 2301-13.

[0792] Sommerfelt, M. A. and R. A. Weiss (1990). “Receptor interference groups of 20 retroviruses plating on human cells.” Virology 176(1): 58-69.

[0793] Steindler, C., Z. Li, et al. (2004). “Jamip1 (marlin-1) defines a family of proteins interacting with janus kinases and microtubules.” J Biol Chem 279(41): 43168-77.

[0794] Steinhauer, D. A., S. A. Wharton, et al. (1991). “Amantadine selection of a mutant influenza virus containing an acid-stable hemagglutinin glycoprotein: evidence for virus-specific regulation of the pH of glycoprotein transport vesicles.” Proc Natl Acad Sci USA 88(24): 11525-9.

[0795] Sterman, D. H., J. Treat, et al. (1998). “Adenovirus-mediated herpes simplex virus thymidine kinase/ganciclovir gene therapy in patients with localized malignancy: results of a phase I clinical trial in malignant mesothelioma.” Hum Gene Ther 9(7): 1083-92.

[0796] Stevens, T. H. and M. Forgac (1997). “Structure, function and regulation of the vacuolar (H+)-ATPase.” Annu Rev Cell Dev Biol 13: 779-808.

[0797] Stohr, H., N. Mohr, et al. (2002). “Cloning and characterization of WDR17, a novel WD repeat-containing gene on chromosome 4q34.” Biochim Biophys Acta 1579(1): 18-25.

[0798] Storm, N., B. Darnhofer-Patel, et al. (2003). “MALDI-TOF mass spectrometry-based SNP genotyping.” Methods Mol Biol 212: 241-62.

[0799] Straub, R. H., K. Stebner, et al. (2005). “Key role of the sympathetic microenvironment for the interplay of tumour necrosis factor and interleukin 6 in normal but not in inflamed mouse colon mucosa.” Gut. 54(8): 1098-106.

[0800] Strom, T. M., K. Hortnagel, et al. (1998). “Diabetes insipidus, diabetes mellitus, optic atrophy and deafness (DIDMOAD) caused by mutations in a novel gene (wolframin) coding for a predicted transmembrane protein.” Hum Mol Genet. 7(13): 2021-8.

[0801] Sugawara et al (2005). “Linkage to peroxisome proliferator-activated receptor-gamma in SAMP1/YitFc mice and in human Crohn's disease.” Gastroenterology. 128(2):351-60.

[0802] Sugimura, K., K. D. Taylor, et al. (2003). “A novel NOD2/CARD15 haplotype conferring risk for Crohn disease in Ashkenazi Jews.” Am J Hum Genet 72(3): 509-18.

[0803] Suzuki, S., L. F. Chuang, et al. (2002). “Interactions of opioid and chemokine receptors: oligomerization of mu, kappa, and delta with CCR5 on immune cells.” Exp Cell Res. 280(2): 192-200.

[0804] Tanaka, S., M. Mori, et al. (1997). “Coexpression of Grb7 with epidermal growth factor receptor or Her2/erbB2 in human advanced esophageal carcinoma.” Cancer Res. 57(1): 28-31.

[0805] Tanaka, S., M. Mori, et al. (1998). “A novel variant of human Grb7 is associated with invasive esophageal carcinoma.” J Clin Invest 102(4): 821-7.

[0806] Teller, I. C. and J. F. Beaulieu (2001). “Interactions between laminin and epithelial cells in intestinal health and disease.” Expert Rev Mol Med. 2001: 1-18.

[0807] Tratschin, J. D., M. H. West, et al. (1984). “A human parvovirus, adeno-associated virus, as a eucaryotic vector: transient expression and encapsidation of the procaryotic gene for chloramphenicol acetyltransferase.” Mol Cell Biol 4(10): 2072-81.

[0808] Tremaine, W. J. (2003). Clinical features and complications of Crohn's disease. Inflammatory bowel disease, from bench to bedside. S. R. Targan, F. Shanahan and L. C. Karp. Dordrecht, Kluwer Acad. Pub.: 291-304.

[0809] Trinchieri, G., S. Pflanz, et al. (2003). “The IL-12 family of heterodimeric cytokines: new players in the regulation of T cell responses.” Immunity 19(5): 641-4.

[0810] Ustun, S., N. Turgay, et al. (2004). “Interleukin (IL) 5 levels and eosinophilia in patients with intestinal parasitic diseases.” World J Gastroenterol 10(24): 3643-6.

[0811] Van Molle, W., B. Wielockx, et al. (2002). “HSP70 protects against TNF-induced lethal inflammatory shock.” Immunity. 16(5): 685-95.

[0812] Vermeire, S., G. Wild, et al. (2002). “CARD15 Genetic Variation in a Quebec Population: Prevalence, Genotype-Phenotype Relationship, and Haplotype Structure.” Am J Hum Genet 71(1): 74-83.

[0813] Vitt, U. A., S. Mazerbourg, et al. (2002). “Bone morphogenetic protein receptor type II is a receptor for growth differentiation factor-9.” Biol Reprod. 67(2): 473-80.

[0814] Vojtek, A. B. and C. J. Der (1998). “Increasing complexity of the Ras signaling pathway.” J Biol Chem 273(32): 19925-8.

[0815] Wang, P., P. Wu, et al. (1995). “Interleukin (IL)-10 inhibits nuclear factor kappa B (NF kappa B) activation in human monocytes. IL-10 and IL-4 suppress cytokine synthesis by different mechanisms.” J Biol Chem 270(16): 9558-63.

[0816] Warabi, K., M. D. Richardson, et al. (2002). “Human substance P receptor undergoes agonist-dependent phosphorylation by G protein-coupled receptor kinase 5 in vitro.” FEBS Lett 521(1-3): 140-4.

[0817] Weichart, D., J. Gobom, et al. (2006). “Analysis of NOD2-mediated proteome response to muramyl dipeptide in HEK293 cells.” J Biol Chem. 281(4): 2380-9.

[0818] West, M. H., J. P. Trempe, et al. (1987). “Gene expression in adeno-associated virus vectors: the effects of chimeric mRNA structure, helper virus, and adenovirus VA1 RNA.” Virology 160(1): 38-47.

[0819] Wild, G. E. and J. D. Rioux (2004). “Genome scan analyses and positional cloning strategy in IBD: successes and limitations.” Best Pract Res Clin Gastroenterol 18(3): 541-553.

[0820] Wilson, C., M. S. Reitz, et al. (1989). “Formation of infectious hybrid virions with gibbon ape leukemia virus and human T-cell leukemia virus retroviral envelope glycoproteins and the gag and pol proteins of Moloney murine leukemia virus.” J Virol 63(5): 2374-8.

[0821] Wolf, F. W., R. M. Marks, et al. (1992). “Characterization of a novel tumor necrosis factor-alpha-induced endothelial primary response gene.” J Biol Chem 267(2): 1317-26.

[0822] Wonsey, D. R., K. I. Zeller, et al. (2002). “The c-Myc target gene PRDX3 is required for mitochondrial homeostasis and neoplastic transformation.” Proc Natl Acad Sci USA. 99(10): 6649-54.

[0823] Wu, J. Y., Y. Jin, et al. (2005). “Impaired TGF-beta responses in peripheral T cells of G alpha i2−/− mice.” J Immunol. 174(10): 6122-8.

[0824] Yamada, R., T. Tanaka, et al. (2001). “Association between a single-nucleotide polymorphism in the promoter of the human interleukin-3 gene and rheumatoid arthritis in Japanese patients, and maximum-likelihood estimation of combinatorial effect that two genetic loci have on susceptibility to the disease.” Am J Hum Genet 68(3): 674-85.

[0825] Yamamoto, S., G. Yang, et al. (2003). “Activation of Mst1 causes dilated cardiomyopathy by stimulating apoptosis without compensatory ventricular myocyte hypertrophy.” J Clin Invest 111(10): 1463-74.

[0826] Yamazaki, K., M. Takazoe, et al. (2002). “Absence of mutation in the NOD2/CARD15 gene among 483 Japanese patients with Crohn's disease.” J Hum Genet 47(9): 469-72.

[0827] Yamit-Hezi, A. and R. Dikstein (1998). “TAFII105 mediates activation of anti-apoptotic genes by NF-kappaB.” Embo J. 17(17): 5161-9.

[0828] Yan, F., S. K. John, et al. (2004). “Kinase suppressor of Ras-1 protects intestinal epithelium from cytokine-mediated apoptosis during inflammation.” J Clin Invest 114(9): 1272-80.

[0829] Yin et al (2003). “Cloning and characterization of the human IFT20 gene.” Mol Biol Rep. 30(4):255-60.

[0830] Yu, M., E. Poeschla, et al. (1994). “Progress towards gene therapy for HIV infection.” Gene Ther 1(1): 13-26.

[0831] Yu, Q., S. J. Cok, et al. (2003). “Translational repression of human matrix metalloproteinases-13 by an alternatively spliced form of T-cell-restricted intracellular antigen-related protein (TIAR).” J Biol Chem. 278(3): 1579-84.

[0832] Zaratin, P. F., A. Quattrini, et al. (2005). “Schwann cell overexpression of the GPR7 receptor in inflammatory and painful neuropathies.” Mol Cell Neurosci 28(1): 55-63.

[0833] Zhang, W. J., W. A. Koltun, et al. (2000). “Absence of GNAI2 codon 179 oncogene mutations in inflammatory bowel disease.” Inflamm Bowel Dis. 6(2): 103-6.

[0834] Zhang, M., P. Liu, et al. (2002). “MLN64 mediates mobilization of lysosomal cholesterol to steroidogenic mitochondria.” J Biol Chem. 277(36): 33300-10.

[0835] Zhang, S. X., E. G. Gras, et al. (2005). “Identification of direct serum response factor gene targets during DMSO induced P19 cardiac cell differentiation.” J Biol Chem 28: 28.

[0836] Zhang, Z., A. Andoh, et al. (2005). “Interleukin-1beta and tumor necrosis factor-alpha upregulate interleukin-23 subunit p19 gene expression in human colonic subepithelial myofibroblasts.” Int J Mol Med 15(1): 79-83.

[0837] Zhou, J., J. Ma, et al. (2004). “BRD7, a novel bromodomain gene, inhibits G1-S progression by transcriptionally regulating some important molecules involved in ras/MEK/ERK and Rb/E2F pathways.” J Cell Physiol. 200(1): 89-98.

[0838] Books:

[0839] Abbas A K, Litchman A H. Cellular and Molecular Immunology. Philadelphia: Saunders; 1994. 417 p.

[0840] Austen B M and Westwood O M R. Protein Targeting and Secretion. Oxford: IRL Press; 1991. 85 p.

[0841] Bishop M J, editor. Guide to Human Genome Computing, 2d ed. San Diego: Academic Press; 1998. 306 p.

[0842] Cowell I G, Austin C A, editors. DNA Library Protocols. Methods in Molecular Biology. Vol. 69 Totowa, N. J.: Humana Press; 1997. 321p.

[0843] Freshney R I, editor. Animal Cell Culture: A Practical Approach. Oxford: IRL Press; 1986.

[0844] Freshney R I. Culture Of Animal Cells: A Manual of Basic Technique. New York: A R Liss; 1987. 397 p.

[0845] Glover D M, editor. DNA Cloning: A Pratical Approach. Vols 1 & 2. Oxford; Washington: IRL Press; 1985.

[0846] Gribskov M, Devereux J, editors. Sequence Analysis Primer. Oxford University Press; 1994. 296 p.

[0847] Griffin A M, Griffin H G, editors. ComputerAnalysis of Sequence Data, Part 1. Totowa, N. J. Humana Press; 1994. 392 p.

[0848] Hames B D, Higgins S J, editors. Nucleic Acid Hybridization: A Practical Approach. Oxford: IRL Press; 1985. 245 p.

[0849] Hames B D, Higgins S J, editors. Transcription and Translation: A Practical Approach. Oxford: IRL Press; 1984. 328 p.

[0850] Harlow Ed, Lane D. Antibodies: A Laboratory Manual. New York: Cold Spring Harbor Laboratory; 1988. 726 p.

[0851] Heinje G. von. Sequence Analysis in Molecular Biology. San Diego: Academic Press; 1987. 188 p.

[0852] Hogan B, Costantini F, Lacy E, editors. Manipulating the Mouse Embryo: A Laboratory Manual. New York: Cold Spring Harbor Laboratory Press; 1986. 332 p.

[0853] Huber B E, Carr B I. Molecular and Immunologic Approaches. Mt. Kisco, N.Y.: Futura Publishing Co; 1994.

[0854] Jones J. Amino Acid and Peptide Synthesis. Oxford; New York: Oxford Science Publications; 1992. 86 p.

[0855] Kaufman P B, William W, Donghern K, editors. Handbook of Molecular and Cellular Methods in Biology and Medicine. Boca Raton: CRC Press; 1995. 484 p.

[0856] Lesk A M, editor. Computational Molecular Biology: sources and methods for sequence analysis. New York: Oxford University Press; 1988. 254p.

[0857] Male D, Cooke A, Owen M, Trowsdale J, Champion B, editors. Advanced Immunology. 3rd ed. London; Baltimore: Mosby; 1996. 273 p.

[0858] McPherson M J, editor. Directed Mutagenesis: A Practical Approach. New York: IRL Press; 1991. 257 p.

[0859] McPherson M J, Quirke P, Taylor J R, editors. PCR: A Practical Approach. Oxford; New York: IRL Press; 1991. 253 p.

[0860] Miller J H, Calos M P, editors. Gene Transfer Vectors for Mammalian Cells. New York: Cold Spring Harbor Laboratory Press; 1987. 169 p.

[0861] Miller J H, Calos M P, editors. Gene Transfer Vectors For Mammalian Cells. New York: Cold Spring Harbor Laboratory; 1987. 169p.

[0862] Pawlowitzki I H, Edwards J H, Thompson E A, editors. Genetic Mapping of Disease Genes. Academic Press London; 1997. 288 p.

[0863] Perbal B V. A Practical Guide to Molecular Cloning. 1st ed. New York: Wiley Interscience Publication; 1984. 554 p.

[0864] Perbal B V. A Practical Guide To Molecular Cloning. New York: Wiley; 1984. 554 p.

[0865] Peruski L F, Peruski A H. The Internet and the New Biology. Tools for Genomic and Molecular Research. Washington, D.C.: American Society for Microbiology Press; 1997.

[0866] Sambrook J. Molecular Cloning: A Laboratory Manual. 2nd ed. 3 vols. New York: Cold Spring Harbor Laboratory Press; 1989.

[0867] Sell S. Immunology, Immunopathology & Immunity. 5th ed. Stamford, Conn.: Appleton & Lange; 1996. 1014 p.

[0868] Smith D W, editor. Biocomputing. Informatics and Genome Projects, New York: Academic Press; 1993. 336p.

[0869] Stites D P, Terr A T, editors. Basic and Clinical Immunology. 7th ed. Norwalk, Conn.: Appleton & Lange; 1991. 870 p.

[0870] Walker J M. Protein Protocols on CD-ROM, Humana Press, Totowa, N.J.

[0871] Weir D M, Herzenberg L A, Blackwell C, editors. Handbook Of Experimental Immunology. 4 vols. Oxford: Blackwell; 1986.

[0872] Woodward J. Immobilized Cells And Enzymes: A Practical Approach. Oxford: IRL Press; 1986.

[0873] Wu R, Grossman L, editors. Methods in Enzymology: Rexcombinant DNA Part E. Vol. 154. Amsterdam: Elsevier Science; 1987. 576 p.

[0874] Wu R, Grossman L, editors. Methods in Enzymology: Rexcombinant DNA Part F. Vol. 155. Amsterdam: Elsevier Science; 1987. 628 p.

[0875] Patents

[0876] U.S. Pat. No. 4,683,202.

[0877] U.S. Pat. No. 4,952,501.

[0878] WO03042661A2

[0879] US 20040009479A1

[0880] U.S. Pat. No. 5,315,000

[0881] WO1997US0005216

[0882] U.S. Pat. No. 5,498,531

[0883] U.S. Pat. No. 5,807,718

[0884] U.S. Pat. No. 5,888,819

[0885] U.S. Pat. No. 6,090,543

[0886] U.S. Pat. No. 6,090,606

[0887] U.S. Pat. No. 5,585,089

[0888] U.S. Pat. No. 4,683,195

[0889] U.S. Pat. No. 4,683,202

[0890] U.S. Pat. No. 5,459,039.

[0891] U.S. Pat. No. 6,090,543).

[0892] U.S. Pat. No. 6,090,606

[0893] U.S. Pat. No. 5,869,242

[0894] U.S. 60/335,068

[0895] U.S. Pat. No. 6,479,244

[0896] PCT/US94/05700

[0897] U.S. Pat. No. 4,797,368

[0898] WO 93/24641

[0899] U.S. Pat. No. 5,173,414

Lengthy table referenced here
US20100081129A1-20100401-T00001
Please refer to the end of the specification for access instructions.

Lengthy table referenced here
US20100081129A1-20100401-T00002
Please refer to the end of the specification for access instructions.

Lengthy table referenced here
US20100081129A1-20100401-T00003
Please refer to the end of the specification for access instructions.

Lengthy table referenced here
US20100081129A1-20100401-T00004
Please refer to the end of the specification for access instructions.

Lengthy table referenced here
US20100081129A1-20100401-T00005
Please refer to the end of the specification for access instructions.

Lengthy table referenced here
US20100081129A1-20100401-T00006
Please refer to the end of the specification for access instructions.

Lengthy table referenced here
US20100081129A1-20100401-T00007
Please refer to the end of the specification for access instructions.

Lengthy table referenced here
US20100081129A1-20100401-T00008
Please refer to the end of the specification for access instructions.

LENGTHY TABLES
The patent application contains a lengthy table section. A copy of the table is available in electronic form from the USPTO web site (http://seqdata.uspto.gov/?pageRequest=docDetail&DocID=US20100081129A1). An electronic copy of the table will also be available from the USPTO upon request and payment of the fee set forth in 37 CFR 1.19(b)(3).

The application's sequence listing, which the Patent Office published only in electronic form, follows.

SEQUENCE LISTING (15887 sequences)

SEQ ID NO: 1 - DNA, 2272 bp, Homosapiens
gaaagctggtgtggagggagaagcgagtgtggtccggagaaagaaggcgtggagaagagggagggagcgagagcgagagaataaatatataaataaatacgagaacgaaatccactccgcagtctccgggctcggaaactttggccccgagcgccagagcgccagagcgcgagagcgcggcgctcgccactctgaggctggcggcctcgattccggccgcgttcccccggcccccctccgtccgcggggcctggtctccgggttctgccaggcgcatcagcccgcacaacttctggccgaggccagccggcagaggcggacttggggttggagtgtttgtttgtttgaacttcctcgtcgtcgccaccttccctccccccaacctccaccccacctcacccccctccccagcttctggacgcgtttgactgcagccaggggtggggggtgggggtagggagtgtgtgtggaggggagggagaagaggttaaaaaaaagaagacgaagaagacggaaagaaagagatcgcagcaggggtgaagggagcggacgggaagcgatttttgccgactttggattcgtccccggcgtgcgcaagaatggcggcccttcccggcacggtaccgagaatgatgcggccggctccggggcagaactacccccgcacgggattccctttggaagtgtccaccccgcttggccaaggccgggtcaatcagctgggaggggtcttcatcaatgggcgacccctgcctaaccacatccgccacaagatagtggagatggcccaccatggcatccggccctgtgtcatctcccgacagctgcgtgtctcccacggctgcgtctccaagattctttgccgctaccaggagaccgggtccatccggcctggggccatcggcggcagcaagcccagacaggtggcgactccggatgtagagaaaaagattgaggagtacaagagggaaaacccaggcatgttcagctgggagatccgggacaggctgctgaaggatgggcactgtgaccgaagcactgtgccctcaggtttagtgagttcgattagccgcgtgctcagaatcaagttcgggaagaaagaggaggaggatgaagcggacaagaaggaggacgacggcgaaaagaaggccaaacacagcatcgacggcatcctgggcgacaaagggaaccggctggacgagggctcggatgtggagtcggaacctgacctcccactgaagcgcaagcagcgacgcagtcggaccacattcacggccgagcagctggaggagctggagaaggcctttgagaggacccactacccagacatatacacccgcgaggagctggcgcagaggaccaagctgacagaggcgcgtgtgcaggtctggttcagtaaccgccgcgcccgttggcgtaagcaggcaggagccaaccagctggcggcgttcaaccaccttctgccaggaggcttcccacccaccggcatgcccacgctgcccccctaccagctgccggactccacctaccccaccaccaccatctcccaagatgggggcagcactgtgcaccggcctcagcccctgccaccgtccaccatgcaccagggcgggctggctgcagcggctgcagccgccgacaccagctctgcctacggagcccgccacagcttctccagctactctgacagcttcatgaatccggcggcgccctccaaccacatgaacccggtcagcaacggcctgtctcctcaggtgatgagcatcttgggcaaccccagtgcggtgcccccgcagccacaggctgacttctccatctccccgctgcatggcggcctggactcggccacctccatctcagccagctgcagccagcgggccgactccatcaagccaggggacagcctgcccacctcccaggcctactgcccacccacctacagcaccaccggctacagcgtggaccccgtggccggctatcagtacggccagtacggccagagtgagtgcctggtgccctgggcgtcccccgtccccattccttctcccacccccagggcctcctgcttgtttatggagagctacaaggtggtgtcagggtggggaatgtccatttcacagatggaaaaattgaagtccagccagatggaacagttcacctaaaatgacactgagttgggcaaaacccaggacatctcctggctaagcctctgcttccgtactatggctccaacagaaataaaatacacagcacaaatatcaaaaaaaaaaaa

SEQ ID NO: 2 - protein, 520 aa, Homosapiens
MAALPGTVPRMMRPAPGQNYPRTGFPLEVSTPLGQGRVNQLGGVFINGRPLPNHIRHKIVEMAHHGIRPCVISRQLRVSHGCVSKILCRYQETGSIRPGAIGGSKPRQVATPDVEKKIEEYKRENPGMFSWEIRDRLLKDGHCDRSTVPSGLVSSISRVLRIKFGKKEEEDEADKKEDDGEKKAKHSIDGILGDKGNRLDEGSDVESEPDLPLKRKQRRSRTTFTAEQLEELEKAFERTHYPDIYTREELAQRTKLTEARVQVWFSNRRARWRKQAGANQLAAFNHLLPGGFPPTGMPTLPPYQLPDSTYPTTTISQDGGSTVHRPQPLPPSTMHQGGLAAAAAAADTSSAYGARHSFSSYSDSFMNPAAPSNHMNPVSNGLSPQVMSILGNPSAVPPQPQADFSISPLHGGLDSATSISASCSQRADSIKPGDSLPTSQAYCPPTYSTTGYSVDPVAGYQYGQYGQSECLVPWASPVPIPSPTPRASCLFMESYKVVSGWGMSISQMEKLKSSQMEQFT

SEQ ID NO: 3 - DNA, 2255 bp, Homosapiens
gaaagctggtgtggagggagaagcgagtgtggtccggagaaagaaggcgtggagaagagggagggagcgagagcgagagaataaatatataaataaatacgagaacgaaatccactccgcagtctccgggctcggaaactttggccccgagcgccagagcgccagagcgcgagagcgcggcgctcgccactctgaggctggcggcctcgattccggccgcgttcccccggcccccctccgtccgcggggcctggtctccgggttctgccaggcgcatcagcccgcacaacttctggccgaggccagccggcagaggcggacttggggttggagtgtttgtttgtttgaacttcctcgtcgtcgccaccttccctccccccaacctccaccccacctcacccccctccccagcttctggacgcgtttgactgcagccaggggtggggggtgggggtagggagtgtgtgtggaggggagggagaagaggttaaaaaaaagaagacgaagaagacggaaagaaagagatcgcagcaggggtgaagggagcggacgggaagcgatttttgccgactttggattcgtccccggcgtgcgcaagaatggcggcccttcccggcacggtaccgagaatgatgcggccggctccggggcagaactacccccgcacgggattccctttggaagtgtccaccccgcttggccaaggccgggtcaatcagctgggaggggtcttcatcaatgggcgacccctgcctaaccacatccgccacaagatagtggagatggcccaccatggcatccggccctgtgtcatctcccgacagctgcgtgtctcccacggctgcgtctccaagattctttgccgctaccaggagaccgggtccatccggcctggggccatcggcggcagcaagcccagacaggtggcgactccggatgtagagaaaaagattgaggagtacaagagggaaaacccaggcatgttcagctgggagatccgggacaggctgctgaaggatgggcactgtgaccgaagcactgtgccctcagtgagttcgattagccgcgtgctcagaatcaagttcgggaagaaagaggaggaggatgaagcggacaagaaggaggacgacggcgaaaagaaggccaaacacagcatcgacggcatcctgggcgacaaagggaaccggctggacgagggctcggatgtggagtcggaacctgacctcccactgaagcgcaagcagcgacgcagtcggaccacattcacggccgagcagctggaggagctggagaaggcctttgagaggacccactacccagacatatacacccgcgaggagctggcgcagaggaccaagctgacagaggcgcgtgtgcaggtctggttcagtaaccgccgcgcccgttggcgtaagcaggcaggagccaaccagctggcggcgttcaaccaccttctgccaggaggcttcccacccaccggcatgcccacgctgcccccctaccagctgccggactccacctaccccaccaccaccatctcccaagatgggggcagcactgtgcaccggcctcagcccctgccaccgtccaccatgcaccagggcgggctggctgcagcggctgcagccgccgacaccagctctgcctacggagcccgccacagcttctccagctactctgacagcttcatgaatccggcggcgccctccaaccacatgaacccggtcagcaacggcctgtctcctcaggtgatgagcatcttgggcaaccccagtgcggtgcccccgcagccacaggctgacttctccatctccccgctgcatggcggcctggactcggccacctccatctcagccagctgcagccagcgggccgactccatcaagccaggggacagcctgcccacctcccaggcctactgcccacccacctacagcaccaccggctacagcgtggaccccgtggccggctatcagtacggccagtacggccagagtgagtgcctggtgccctgggcgtcccccgtccccattccttctcccacccccagggcctcctgcttgtttatggagagctacaaggtggtgtcagggtggggaatgtccatttcacagatggaaaaattgaagtccagccagatggaacagttcacctaaaatgacactgagttgggcaaaacccaggacatctcctggctaagcctctgcttccgtactatggctccaacagaaataaaatacacagcacaaatatca

SEQ ID NO: 4 - protein, 518 aa, Homosapiens
MAALPGTVPRMMRPAPGQNYPRTGFPLEVSTPLGQGRVNQLGGVFINGRPLPNHIRHKIVEMAHHGIRPCVISRQLRVSHGCVSKILCRYQETGSIRPGAIGGSKPRQVATPDVEKKIEEYKRENPGMFSWEIRDRLLKDGHCDRSTVPSVSSISRVLRIKFGKKEEEDEADKKEDDGEKKAKHSIDGILGDKGNRLDEGSDVESEPDLPLKRKQRRSRTTFTAEQLEELEKAFERTHYPDIYTREELAQRTKLTEARVQVWFSNRRARWRKQAGANQLAAFNHLLPGGFPPTGMPTLPPYQLPDSTYPTTTISQDGGSTVHRPQPLPPSTMHQGGLAAAAAAADTSSAYGARHSFSSYSDSFMNPAAPSNHMNPVSNGLSPQVMSILGNPSAVPPQPQADFSISPLHGGLDSATSISASCSQRADSIKPGDSLPTSQAYCPPTYSTTGYSVDPVAGYQYGQYGQSECLVPWASPVPIPSPTPRASCLFMESYKVVSGWGMSISQMEKLKSSQMEQFT

SEQ ID NO: 5 - DNA, 2521 bp, Homosapiens
catggggcccagggcaaagaccatctgctccctgttcttcctcctatgggtcctggctgagccggctgagaactcggacttctacctgcctggggattacctcctgggtggcctcttctccctccatgccaacatgaagggcattgttcaccttaacttcctgcaggtgcccatgtgcaaggagtatgaagtgaaggtgataggctacaacctcatgcaggccatgcgcttcgcggtggaggagatcaacaatgacagcagcctgctgcctggtgtgctgctgggctatgagatcgtggatgtgtgctacatctccaacaatgtccagccggtgctctacttcctggcacacgaggacaacctccttcccatccaagaggactacagtaactacatttcccgtgtggtggctgtcattggccctgacaactccgagtctgtcatgactgtggccaacttcctctccctatttctccttccacagatcacctacagcgccatcagcgatgagctgcgagacaaggtgcgcttcccggctttgctgcgtaccacacccagcgccgaccaccacgtcgaggccatggtgcagctgatgctgcacttccgctggaactggatcattgtgctggtgagcagcgacacctatggccgcgacaatggccagctgcttggcgagcgcgtggcccggcgcgacatctgcatcgccttccaggagacgctgcccacactgcagcccaaccagaacatgacgtcagaggagcgccagcgcctggtgaccattgtggacaagctgcagcagagcacagcgcgcgtcgtggtcgtgttctcgcccgacctgaccctgtaccacttcttcaatgaggtgctgcgccagaacttcacgggcgccgtgtggatcgcctccgagtcctgggccatcgacccggtcctgcacaacctcacggagctgggccacttgggcaccttcctgggcatcaccatccagagcgtgcccatcccgggcttcagtgagttccgcgagtggggcccacaggctgggccgccacccctcagcaggaccagccagagctatacctgcaaccaggagtgcgacaactgcctgaacgccaccttgtccttcaacaccattctcaggctctctggggagcgtgtcgtctacagcgtgtactctgcggtctatgctgtggcccatgccctgcacagcctcctcggctgtgacaaaagcacctgcaccaagagggtggtctacccctggcagctgcttgaggagatctggaaggtcaacttcactctcctggaccaccaaatcttcttcgacccgcaaggggacgtggctctgcacttggagattgtccagtggcaatgggaccggagccagaatcccttccagagcgtcgcctcctactaccccctgcagcgacagctgaagaacatccaagacatctcctggcacaccgtcaacaacacgatccctatgtccatgtgttccaagaggtgccagtcagggcaaaagaagaagcctgtgggcatccacgtctgctgcttcgagtgcatcgactgccttcccggcaccttcctcaaccacactgaagatgaatatgaatgccaggcctgcccgaataacgagtggtcctaccagagtgagacctcctgcttcaagcggcagctggtcttcctggaatggcatgaggcacccaccatcgctgtggccctgctggccgccctgggcttcctcagcaccctggccatcctggtgatattctggaggcacttccagacacccatagttcgctcggctgggggccccatgtgcttcctgatgctgacactgctgctggtggcatacatggtggtcccggtgtacgtggggccgcccaaggtctccacctgcctctgccgccaggccctctttcccctctgcttcacaatttgcatctcctgtatcgccgtgcgttctttccagatcgtctgcgccttcaagatggccagccgcttcccacgcgcctacagctactgggtccgctaccaggggccctacgtctctatggcatttatcacggtactcaaaatggtcattgtggtaattggcatgctggccacgggcctcagtcccaccacccgtactgaccccgatgaccccaagatcacaattgtctcctgtaaccccaactaccgcaacagcctgctgttcaacaccagcctggacctgctgctctcagtggtgggtttcagcttcgcctacatgggcaaagagctgcccaccaactacaacgaggccaagttcatcaccctcagcatgaccttctatttcacctcatccgtctccctctgcaccttcatgtctgcctacagcggggtgctggtcaccatcgtggacctcttggtcactgtgctcaacctcctggccatcagcctgggctacttcggccccaagtgctacatgatcctcttctacccggagcgcaacacgcccgcctacttcaacagcatgatccagggctacaccatgaggagggactag

SEQ ID NO: 6 - protein, 839 aa, Homosapiens
MGPRAKTICSLFFLLWVLAEPAENSDFYLPGDYLLGGLFSLHANMKGIVHLNFLQVPMCKEYEVKVIGYNLMQAMRFAVEEINNDSSLLPGVLLGYEIVDVCYISNNVQPVLYFLAHEDNLLPIQEDYSNYISRVVAVIGPDNSESVMTVANFLSLFLLPQITYSAISDELRDKVRFPALLRTTPSADHHVEAMVQLMLHFRWNWIIVLVSSDTYGRDNGQLLGERVARRDICIAFQETLPTLQPNQNMTSEERQRLVTIVDKLQQSTARVVVVFSPDLTLYHFFNEVLRQNFTGAVWIASESWAIDPVLHNLTELGHLGTFLGITIQSVPIPGFSEFREWGPQAGPPPLSRTSQSYTCNQECDNCLNATLSFNTILRLSGERVVYSVYSAVYAVAHALHSLLGCDKSTCTKRVVYPWQLLEEIWKVNFTLLDHQIFFDPQGDVALHLEIVQWQWDRSQNPFQSVASYYPLQRQLKNIQDISWHTVNNTIPMSMCSKRCQSGQKKKPVGIHVCCFECIDCLPGTFLNHTEDEYECQACPNNEWSYQSETSCFKRQLVFLEWHEAPTIAVALLAALGFLSTLAILVIFWRHFQTPIVRSAGGPMCFLMLTLLLVAYMVVPVYVGPPKVSTCLCRQALFPLCFTICISCIAVRSFQIVCAFKMASRFPRAYSYWVRYQGPYVSMAFITVLKMVIVVIGMLATGLSPTTRTDPDDPKITIVSCNPNYRNSLLFNTSLDLLLSVVGFSFAYMGKELPTNYNEAKFITLSMTFYFTSSVSLCTFMSAYSGVLVTIVDLLVTVLNLLAISLGYFGPKCYMILFYPERNTPAYFNSMIQGYTMRRD

SEQ ID NO: 7 - DNA, 3160 bp, Homosapiens
attctcgccgcgcccgggcggacgatccagcgaacagccccgcttctaacccgagatgctgctgccggcgcccgcgctccgccgcgccctgctgtcccgcccctggaccggggccggcctgcggtggaagcacacctcctccctgaaggtggccaacgagcccgtcttagccttcacgcagggcagccctgagcgagatgccctgcaaaaggccttgaaggacctgaagggccggatggaagccatcccatgcgtggtgggggatgaggaggtgtggacgtcggacgtgcagtaccaagtgtcgccttttaaccatggacataaggtggccaagttctgttatgcagacaagagcctgctcaacaaagccattgaggctgccctggctgcccggaaagagtgggacctgaagcctattgcagaccgggcccagatcttcctgaaggcggcagacatgctgagtgggccgcgcagggctgagatcctcgccaagaccatggtgggacagggtaagaccgtgatccaagcggagattgacgctgcagcggaactcatcgacttcttccggttcaatgccaagtatgcggtggagctggaggggcagcagcccatcagcgtgcccccgagcaccaacagcacggtgtaccggggtctggagggcttcgtggcggccatctcgccctttaacttcactgcaatcggcggcaacctggcgggggcaccggccctgatgggcaacgtggtcctatggaagcccagtgacactgccatgctggccagctatgctgtctaccgcatccttcgggaggctggcctgccccccaacatcatccagtttgtgccagctgatgggcccctatttggggacactgtcaccagctcagagcacctctgtggcatcaacttcacaggcagtgtgcccaccttcaaacacctgtggaagcaggtggcccagaacctggaccggttccacaccttcccacgcctggctggagagtgcggcggaaagaacttccacttcgtgcaccgctcggccgacgtggagagcgtggtgagcgggaccctccgctcagccttcgagtacggtggccagaagtgttccgcctgctcgcgtctctacgtgccgcactcgctgtggccgcagatcaaagggcggctgctggaggagcacagtcggatcaaagtgggcgaccctgcagaggattttgggaccttcttctctgcagtgattgatgccaagtcctttgcccgtatcaagaagtggctggagcacgcgcgctcctcgcccagcctcaccatcctggctgggggcaagtgtgatgactccgtgggctactttgtggagccctgcatcgtggagagcaaggaccctcaggagcccatcatgaaggaggagatcttcgggcctgtactgtctgtgtacgtctacccggacgacaagtacaaggagacgctgcagctggttgacagcaccaccagctatggcctcacgggggcagtgttctcccaggataaggacgtcgtgcaggaggccacaaaggtgctgaggaatgctgccggcaacttctacatcaacgacaagtccactggctcgatagtgggccagcagccctttgggggggcccgagcctctggaaccaatgacaagccagggggcccacactacatcctgcgctggacgtcgccgcaggtcatcaaggagacacataagcccctgggggactggagctacgcgtacatgcagtgagcccctctcgggctccaccgtccagctgtctgtccgtccaggtggccgacctcactgcacagaccccactccagcccctccaccccttcttcatgcacagctgcctttctataatccgggcttgactcccttcttaccactgtattctggcctctcccatgcctcaggctctggtttgagatcgtgctggggaggaacatggccactaccccttatcccatcggccatgtgggaggtatgaccctggtgcctggcaggttctccctctgccctccactgggcccagtggctcagggacctggggaaaggagatggagcagctcttgggatcctttggggaaaaggaggccattctgggccccttggcaaacctcaccactcacagaggctcctggccttgatccctgcccctccaggtgtccagggtaaagtgtaactcagactgacctgtggggcacagggggcaccagctggccttgccctctctggtctgggctgtctaccttcctcactgtatctttgcccagacccacctgggccagtaggcccctgtccccagccacacaccttagatgctggcatgccttactccaggtgcctgtgtttggccgaggcctgtgtgattcccggtctgcaccacatggcggggttggggggccgctggaggccacctgccaaggcgtgggatgggatggtcctgccggtttaggccgtgattctggaaaaccttggatgggccttcgtcctatgtcagccttccctttgatcctcaggccctacctgtagagacctccactcctagagccagtctcagggtctgggatttccctgcaggagctcagccaccactgtgccatggtgacacaggccaaggcagacattggccctcccttctcccagcccccagaggcctggccttgggttcgtcagcatgggccgaggacgttgcctgtagaatcctcctctgcctgggagtggctctgtgtggaccagtccctcactggcccattctttttttgacgcagccaatctgtgaccacgattcctcccacagatgcctcctgcttggattctgagtggtcagagatctgtaaagcatgactttcaaggatggttcttaggggactgtgaaagtgttgggtcttcctccaggatgcctgcatgggaccccacccggagctggtgtggccattccccaagtgccactggcccatggatgggggtgggtgctggtgccagctgggctgggtgtgggttctgtgtccttccaggatatgtgtcatttcccatgaggggccggggcaggtggctgggtgggggcacaggctggagtattcttagttctactggttctacactgtgaggtggcaatgggatttgctcagatgccacccaataaaatgcctgttactt

SEQ ID NO: 8 - protein, 563 aa, Homosapiens
MLLPAPALRRALLSRPWTGAGLRWKHTSSLKVANEPVLAFTQGSPERDALQKALKDLKGRMEAIPCVVGDEEVWTSDVQYQVSPFNHGHKVAKFCYADKSLLNKAIEAALAARKEWDLKPIADRAQIFLKAADMLSGPRRAEILAKTMVGQGKTVIQAEIDAAAELIDFFRFNAKYAVELEGQQPISVPPSTNSTVYRGLEGFVAAISPFNFTAIGGNLAGAPALMGNVVLWKPSDTAMLASYAVYRILREAGLPPNIIQFVPADGPLFGDTVTSSEHLCGINFTGSVPTFKHLWKQVAQNLDRFHTFPRLAGECGGKNFHFVHRSADVESVVSGTLRSAFEYGGQKCSACSRLYVPHSLWPQIKGRLLEEHSRIKVGDPAEDFGTFFSAVIDAKSFARIKKWLEHARSSPSLTILAGGKCDDSVGYFVEPCIVESKDPQEPIMKEEIFGPVLSVYVYPDDKYKETLQLVDSTTSYGLTGAVFSQDKDVVQEATKVLRNAAGNFYINDKSTGSIVGQQPFGGARASGTNDKPGGPHYILRWTSPQVIKETHKPLGDWSYAYMQ

SEQ ID NO: 9 - DNA, 2147 bp, Homosapiens
attctcgccgcgcccgggcggacgatccagcgaacagccccgcttctaacccgagatgctgctgccggcgcccgcgctccgccgcgccctgctgtcccgcccctggaccggggccggcctgcggtggaagcacacctcctccctgaaggtggccaacgagcccgtcttagccttcacgcagggcagccctgagcgagatgccctgcaaaaggccttgaaggacctgaagggccggatggaagccatcccatgcgtggtgggggatgaggaggtgtggacgtcggacgtgcagtaccaagtgtcgccttttaaccatggacataaggtggccaagttctgttatgcagacaagagcctgctcaacaaagccattgaggctgccctggctgcccggaaagagtgggacctgaagcctattgcagaccgggcccagatcttcctgaaggcggcagacatgctgagtgggccgcgcagggctgagatcctcgccaagaccatggtgggacagggtaagaccgtgatccaagcggagattgacgctgcagcggaactcatcgacttcttccggttcaatgccaagtatgcggtggagctggaggggcagcagcccatcagcgtgcccccgagcaccaacagcacggtgtaccggggtctggagggcttcgtggcggccatctcgccctttaacttcactgcaatcggcggcaacctggcgggggcaccggccctgatgggcaacgtggtcctatggaagcccagtgacactgccatgctggccagctatgctgtctaccgcatccttcgggaggctggcctgccccccaacatcatccagtttgtgccagctgatgggcccctatttggggacactgtcaccagctcagagcacctctgtggcatcaacttcacaggcagtgtgcccaccttcaaacacctgtggaagcaggtggcccagaacctggaccggttccacaccttcccacgcctggctggagagtgcggcggaaagaacttccacttcgtgcaccgctcggccgacgtggagagcgtggtgagcgggaccctccgctcagccttcgagtacggtggccagaagtgttccgcctgctcgcgtctctacgtgccgcactcgctgtggccgcagatcaaagggcggctgctggaggagcacagtcggatcaaagtgggcgaccctgcagaggattttgggaccttcttctctgcagtgattgatgccaagtcctttgcccgtatcaagaagtggctggagcacgcgcgctcctcgcccagcctcaccatcctggctgggggcaagtgtgatgactccgtgggctactttgtggagccctgcatcgtggagagcaaggaccctcaggagcccatcatgaaggaggagatcttcgggcctgtactgtctgtgtacgtctacccggacgacaagtacaaggagacgctgcagctggttgacagcaccaccagctatggcctcacgggggcagtgttctcccaggataaggacgtcgtgcaggaggccacaaaggtgctgaggaatgctgccggcaacttctacatcaacgacaagtccactggctcgatagtgggccagcagccctttgggggggcccgagcctctggaaccaatgacaagccagggggcccacactacatcctgcgctggacgtcgccgcaggtcatcaaggagacacataagcccctgggggactggagctacgcgtacatgcagtgagcccctctcgggctccaccgtccagctgtctgtccgtccagatgcctcctgcttggattctgagtggtcagagatctgtaaagcatgactttcaaggatggttcttaggggactgtgaaagtgttgggtcttcctccaggatgcctgcatgggaccccacccggagctggtgtggccattccccaagtgccactggcccatggatgggggtgggtgctggtgccagctgggctgggtgtgggttctgtgtccttccaggatatgtgtcatttcccatgaggggccggggcaggtggctgggtgggggcacaggctggagtattcttagttctactggttctacactgtgaggtggcaatgggatttgctcagatgccacccaataaaatgcctgttactt

SEQ ID NO: 10 - protein, 563 aa, Homosapiens; identical to SEQ ID NO: 8

SEQ ID NO: 11 - DNA, 8192 bp, Homosapiens
gaagatggcgacgagcggcggcgaagaggcggcggcagcggctccggcgccggggaccccggcaacgggggcggacacgaccccgggctgggaggtggctgtgcggcccctgctgtccgcgtcctactccgccttcgagatgaaggagttgccgcagctggtggcctcagtcatcgagagtgaatcagaaatcctgcaccatgagaagcagtacgagccattctactcatcttttgttgcactttccacacactatattacaacagtttgcagtctcattccccggaaccaacttcagtcagtggcagcagcctgtaaagttctaattgagttttctctcctgcgtctggagaatccagatgaggcttgtgctgtgtcccagaaacacttgattctcctaatcaagggcctgtgcactggctgtagccgactagatagaactgaaattatcacatttacagcaatgatgaaatccgccaagctgccccaaacagtgaagacactttcagacgtggaagatcagaaagagctggcctcaccagtaagccctgagttgaggcaaaaggaggtacagatgaattttttgaaccagctgacctcagtttttaaccctagaactgtagcatcacaacctatcagtacacagactctggtggaaggagaaaatgatgagcagtcatctacagatcaagcctcagctatcaaaaccaagaatgtgttcatagctcagaacgtggctagtcttcaagagcttggtggctcggagaagctactgcgtgtatgtttgaacctgccatatttcctacgctatatcaatcggttccaagatgcagttttagctaattccttcttcataatgcctgcaacagtagcagatgccactgctgttcgtaatggctttcattcattggtgattgatgtaactatggcattggataccctttctctacctgtgttggaacctctcaatccttctcgtctacaagatgtgacagtcctcagcctaagttgtctgtatgcaggtgtgagtgtggcaacgtgcatggccatcctccatgtgggtagtgcccagcaagtgcggacagggtccacgagctccaaagaagatgactatgaaagtgacgcagctacaattgtccagaaatgtctcgaaatctatgacatgattggacaagcaatcagcagttctcgccgggctggtggtgagcactatcagaatttccaattgctgggtgcttggtgcttgttaaacagccttttcctcatactgaacctcagtcctactgcgttggctgataaggggaaagagaaggacccactggctgccctccgagtcagagacatcctttctcgtactaaagagggagtgggctcccctaaactggggcctggaaaagggcatcagggatttggggtactctcagtaatattggcaaaccatgccatcaaactgctaacgtctctctttcaagacctacaagtggaggcccttcacaagggttgggagacagatggcccccctgcagccttgagcattatggcccagagcacctccatacagaggattcaacggctgattgactctgtcccactgatgaacctgctcttgacgttactttcaacttcctacagaaaggcatgtgtcctgcagcggcagaggaagggctccatgagcagcgatgccagcgcctccaccgactccaatacttactatgaggacgatttcagtagcacggaggaggacagcagccaagacgatgacagtgagcctattttggggcaatggtttgaggagactatttctcccagtaaagagaaagcagcacctccgcctcctcccccacctcctccactggaaagctctcctcgggttaaaagccccagtaagcaggcccctggtgagaagggcaacattctggcgagtcgcaaagatcctgagttgttcttaggtctggcttccaacattttgaacttcatcacctcttccatgctgaactctcggaacaattttatccgaaactatctgagtgtatctctttcagaacaccatatggccaccctagccagtatcatcaaggaggtggacaaagatggactcaagggttcatcagatgaagagtttgctgcagctctctatcacttcaaccactcactggtaacctctgaccttcagtcacctaacctgcagaacacactgttgcagcagctaggagtggctcctttttctgagggcccttggcccttgtacattcaccctcaaagcctctctgtgctttcacgcctcctgctcatctggcaacataaagccagtgctcaaggtgaccctgacgtcccagaatgccttaaagtttgggacaggtttttgtctacaatgaagcagaatgccctgcaaggtgtggtgcccagtgagacagaggatctgaatgtagaacacctgcagatgctcctcctcattttccacaatttcaccgagacaggccggcgggccatattgtcgctttttgtccagatcatccaggagttgagcgtcaacatggatgctcagatgcgcttcgtgccgcttatcttggctcgcctccttctcatctttgattatctgcttcatcagtactccaaagcccctgtgtatctatttgagcaggtacagcataacctgctaagtcctccctttgggtgggcaagtggatcccaggacagcaacagccgccgggcaaccactcctctctatcatggattcaaagaagtagaagaaaactggtctaagcatttctcatcagatgctgtcccacaccccagattctactgtgtcctgtccccagaagcctcagaggatgatttgaaccgacttgattctgtggcatgtgacgtccttttctccaagcttgtcaagtatgatgagctttatgctgcactgacagccctgcttgcagctgggtcccagcttgatacagttaggagaaaggaaaacaagaatgtaacagccttggaggcctgtgcccttcaatattacttcttgatactgtggaggatcctaggaattttaccaccatcaaagacttacattaaccagctatccatgaactcacctgagatgagcgaatgtgacatcttgcacactctgcgatggtcttctcggctccggatcagctcctatgtcaactggataaaggatcaccttatcaaacagggaatgaaggctgagcatgctagctcgcttctagaactggcatccaccactaagtgtagctcagtgaaatatgatgttgaaatagtagaggaatacttcgctcgacagatctcatccttctgtagtatcgactgtaccaccatcttgcagctgcatgaaattcccagtctgcagtccatctacacccttgatgccgcgatctcaaaggtccaggtctctttggatgagcatttttctaagatggctgctgagactgatcctcataagtcgtctgagattaccaagaacctacttccagccacgctgcaactcattgacacctatgcatcgttcaccagagcctatttgctgcaaaactttaatgaagagggaacaactgagaaaccttccaaggagaaactgcaaggctttgctgctgttttggctattggctctagcaggtgcaaggcaaatactctgggtccgacactggttcagaatttgccatcgtcagtgcagactgtgtgtgagtcctggaacaacatcaataccaatgaatttcccaatattggatcctggcgcaatgcctttgccaatgacaccatcccttcagagagttatattagtgcagtgcaggctgcacacctggggactctctgtagccaaagtctgcccctggctgcttccctgaagcataccctcctctcactggtcaggttgactggagatcttattgtttggtcagatgagatgaacccaccacaggtaattcggacactgctacctcttcttttggaatcaagcactgagagtgttgccgagatcagtagcaactccctggaacgcatcttgggccctgctgagtctgatgagttcttggctcgtgtttatgagaagctgatcactggttgttacaacattctggccaatcatgcagatcctaacagtggactggatgaatccatcctggaggaatgtctccagtacttggaaaagcagctggaaagtagccaggctcgtaaagctatggaggagtttttctctgacagtggagaacttgtacagatcatgatggcaacagccaatgagaacctctctgctaaattctgtaaccgagttttgaaattcttcaccaaactcttccagctgactgagaagagccctaacccgagcctgttgcatctctgtggctccctggcacaactggcctgtgtggaacctgtgcgcctgcaggcctggctcacccgcatgactacatcgcccccaaaagattctgatcagctggatgtaattcaggagaaccggcagctgctgcagttactgaccacatacattgttcgggaaaacagccaagttggggaaggtgtgtgtgctgttcttctgggcaccctgactcccatggcaacagagatgctggccaacggtgatgggactggcttccctgaacttatggttgtgatggccactctggccagtgcaggtcaaggtgctggtcaccttcagcttcataatgctgctgtggattggctgagcagatgcaagaaatacctgtcacagaagaatgtagttgaaaaactgaatgccaatgtaatgcatggaaagcatgtgatgatcttggagtgcacatgccatatcatgtcttacttggctgatgtcacgaatgccctgagccagagtaatggtcaaggcccaagtcatctctcagtggatggggaagagcgggccattgaagtagactcagactgggtggaggagttggcggtggaagaggaagattcccaggctgaggattcagatgaagattctctttgcaataaactctgcacttttacgatcacacagaaagaattcatgaaccagcattggtaccactgtcacacctgtaaaatggtggatggcgtgggtgtctgcacagtgtgtgctaaggtgtgccacaaggatcatgagatttcctatgccaagtatggatccttcttctgtgactgtggagccaaggaagatggcagctgtttggctctggtgaagagaactcctagcagtggcatgagctctaccatgaaggagtcggcatttcagagtgaacccaggatttcagagagtctagtgcgtcatgccagcacctcctcgccagctgacaaagccaaggttaccatcagtgatggaaaggttgctgacgaagagaagcccaagaagagcagcctctgccgcacagtagagggctgccgggaggaattacagaaccaggccaatttctccttcgctcctctcgtgttagacatgcttaatttccttatggatgccattcagaccaacttccagcaagcttcagccgtcgggagcagcagccgtgctcagcaagccctcagtgagctacacactgtggagaaggcagtggagatgacagaccagctgatggttcccaccttagggtcccaggaaggtgcctttgagaatgtgcggatgaattacagtggagaccagggccagaccatccggcagctgatcagtgctcatgtgctcaggcgggtggctatgtgtgtgctctcctctccccatgggcgccgccaacatttggctgtcagccatgagaagggcaagatcaccgttctgcagctctctgcactcctgaagcaagcagattccagcaaaaggaagttaactctgacccgcttggcttctgccccagttccttttactgtgttgagcctcacaggaaatccctgcaaggaagactacttggcggtttgtgggctaaaggactgtcatgtgctcacctttagtagctcaggctctgtttcggatcacttggttttgcaccctcagttggcaacggggaacttcatcatcaaagccgtgtggttacctggttcacagaccgagttagcaattgtcaccgcagactttgttaagatttatgacctgtgtgttgatgccttgagtccaaccttctattttctcctgccaagctcaaagataagagatgttaccttccttttcaatgaggagggaaagaacatcattgttataatgtcttcggctgggtacatctatactcagcttatggaagaggccagcagtgcccagcagggacccttctatgtcactaatgtgttggaaatcaatcatgaggacctgaaggacagtaacagccaggtggcgggcggtggtgtgtccgtgtactactcccacgtgttgcagatgttgttcttcagctattgtcaaggcaaatcattcgcagccaccatcagcaggacaaccctggaggtgttgcaactcttccccatcaacatcaaaagttccaatggtggcagtaagacttctcctgctctttgccagtggtctgaggtgatgaaccaccctggcttggtgtgctgtgtccagcaaactacaggggtgccgctggtagttatggtgaaaccagacacttttcttatccaggagattaagactcttcctgctaaagcgaagatccaagacatggttgctattaggcacacggcctgcaatgagcagcagcggacaacaatgattctgctgtgtgaggatggcagcctgcgcatttacatggccaacgtggagaacacctcctactggctgcagccatccctgcagcccagcagtgtcatcagcatcatgaagcctgttcgaaagcgcaaaacagctacaatcacaacccgcacgtctagccaggtgactttccccattgacttttttgaacacaaccagcagctgacagatgtggagtttggtggtaacgacctcctacaggtctataatgcacaacagataaaacaccggctgaattccactggcatgtatgtggccaacaccaagcccggaggcttcaccattgagattagtaacaacaatagcactatggtgatgacaggcatgcggatccagattgggactcaagcaatagaacgggccccgtcatatatcgagatcttcggcagaactatgcagctcaacctgagtcgctcacgctggtttgacttccccttcaccagagaagaagccctgcaggctgataagaagctgaacctcttcattggggcctcggtggatccagcaggtgtcaccatgatagatgctgtaaaaatttatggcaagactaaggagcagtttggctggcctgatgagcccccagaagaattcccttctgcctctgtcagcaacatctgcccttcaaatctgaaccagagcaacggcactggagatagcgactcagctgcccccactacgaccagtggaactgtcctggagaggctggttgtgagttctttagaagccctggaaagctgctttgccgttggcccaatcatcgagaaggagagaaacaagaatgctgctcaggagctggccactttgctgttgtccctgccagcacctgccagtgtccagcagcagtccaagagccttctggccagcctgcacaccagccgctcggcctaccacagccacaaggatcaggccttgctgagcaaagctgtgcagtgtctcaacacatctagcaaagagggcaaggatttggaccctgaggtgttccagaggctagtgatcacagctcgctccattgccatcatgcgccccaacaaccttgtccactttacggagtcaaagctgccccagatggaaacagaaggaatggatgaagggaaggaaccgcagaagcagttggaaggagattgctgtagtttcatcacccagcttgtgaaccacttctggaaactccatgcatccaaacccaagaatgccttcttggcacctgcctgccttccaggactaactcatattgaagctactgtcaatgctctggtggacatcatccatggctactgtacctgtgagctggattgtattaacacagcatccaagatctacatgcagatgctcttgtgtcctgatcctgctgtgagcttctcttgtaaacaagctctaattcgagtcctaaggcccaggaacaaacggagacatgtgactttaccctcttcccctcgaagcaacactccaatgggagacaagg

SEQ ID NO: 12 - protein, 5183 aa, Homosapiens
MATSGGEEAAAAAPAPGTPATGADTTPGWEVAVRPLLSASYSAFEMKELPQLVASVIESESEILHHEKQYEPFYSSFVALSTHYITTVCSLIPRNQLQSVAAACKVLIEFSLLRLENPDEACAVSQKHLILLIKGLCTGCSRLDRTEIITFTAMMKSAKLPQTVKTLSDVEDQKELASPVSPELRQKEVQMNFLNQLTSVFNPRTVASQPISTQTLVEGENDEQSSTDQASAIKTKNVFIAQNVASLQELGGSEKLLRVCLNLPYFLRYINRFQDAVLANSFFIMPATVADATAVRNGFHSLVIDVTMALDTLSLPVLEPLNPSRLQDVTVLSLSCLYAGVSVATCMAILHVGSAQQVRTGSTSSKEDDYESDAATIVQKCLEIYDMIGQAISSSRRAGGEHYQNFQLLGAWCLLNSLFLILNLSPTALADKGKEKDPLAALRVRDILSRTKEGVGSPKLGPGKGHQGFGVLSVILANHAIKLLTSLFQDLQVEALHKGWETDGPPAALSIMAQSTSIQRIQRLIDSVPLMNLLLTLLSTSYRKACVLQRQRKGSMSSDASASTDSNTYYEDDFSSTEEDSSQDDDSEPILGQWFEETISPSKEKAAPPPPPPPPPLESSPRVKSPSKQAPGEKGNILASRKDPELFLGLASNILNFITSSMLNSRNNFIRNYLSVSLSEHHMATLASIIKEVDKDGLKGSSDEEFAAALYHFNHSLVTSDLQSPNLQNTLLQQLGVAPFSEGPWPLYIHPQSLSVLSRLLLIWQHKASAQGDPDVPECLKVWDRFLSTMKQNALQGVVPSETEDLNVEHLQMLLLIFHNFTETGRRAILSLFVQIIQELSVNMDAQMRFVPLILARLLLIFDYLLHQYSKAPVYLFEQVQHNLLSPPFGWASGSQDSNSRRATTPLYHGFKEVEENWSKHFSSDAVPHPRFYCVLSPEASEDDLNRLDSVACDVLFSKLVKYDELYAALTALLAAGSQLDTVRRKENKNVTALEACALQYYFLILWRILGILPPSKTYINQLSMNSPEMSECDILHTLRWSSRLRISSYVNWIKDHLIKQGMKAEHASSLLELASTTKCSSVKYDVEIVEEYFARQISSFCSIDCTTILQLHEIPSLQSIYTLDAAISKVQVSLDEHFSKMAAETDPHKSSEITKNLLPATLQLIDTYASFTRAYLLQNFNEEGTTEKPSKEKLQGFAAVLAIGSSRCKANTLGPTLVQNLPSSVQTVCESWNNINTNEFPNIGSWRNAFANDTIPSESYISAVQAAHLGTLCSQSLPLAASLKHTLLSLVRLTGDLIVWSDEMNPPQVIRTLLPLLLESSTESVAEISSNSLERILGPAESDEFLARVYEKLITGCYNILANHADPNSGLDESILEECLQYLEKQLESSQARKAMEEFFSDSGELVQIMMATANENLSAKFCNRVLKFFTKLFQLTEKSPNPSLLHLCGSLAQLACVEPVRLQAWLTRMTTSPPKDSDQLDVIQENRQLLQLLTTYIVRENSQVGEGVCAVLLGTLTPMATEMLANGDGTGFPELMVVMATLASAGQGAGHLQLHNAAVDWLSRCKKYLSQKNVVEKLNANVMHGKHVMILECTCHIMSYLADVTNALSQSNGQGPSHLSVDGEERAIEVDSDWVEELAVEEEDSQAEDSDEDSLCNKLCTFTITQKEFMNQHWYHCHTCKMVDGVGVCTVCAKVCHKDHEISYAKYGSFFCDCGAKEDGSCLALVKRTPSSGMSSTMKESAFQSEPRISESLVRHASTSSPADKAKVTISDGKVADEEKPKKSSLCRTVEGCREELQNQANFSFAPLVLDMLNFLMDAIQTNFQQASAVGSSSRAQQALSELHTVEKAVEMTDQLMVPTLGSQEGAFENVRMNYSGDQGQTIRQLISAHVLRRVAMCVLSSPHGRRQHLAVSHEKGKITVLQLSALLKQADSSKRKLTLTRLASAPVPFTVLSLTGNPCKEDYLAVCGLKDCHVLTFSSSGSVSDHLVLHPQLATGNFIIKAVWLPGSQTELAIVTADFVKIYDLCVDALSPTFYFLLPSSKIRDVTFLFNEEGKNIIVIMSSAGYIYTQLMEEASSAQQGPFYVTNVLEINHEDLKDSNSQVAGGGVSVYYSHVLQMLFFSYCQGKSFAATISRTTLEVLQLFPINIKSSNGGSKTSPALCQWSEVMNHPGLVCCVQQTTGVPLVVMVKPDTFLIQEIKTLPAKAKIQDMVAIRHTACNEQQRTTMILLCEDGSLRIYMANVENTSYWLQPSLQPSSVISIMKPVRKRKTATITTRTSSQVTFPIDFFEHNQQLTDVEFGGNDLLQVYNAQQIKHRLNSTGMYVANTKPGGFTIEISNNNSTMVMTGMRIQIGTQAIERAPSYIEIFGRTMQLNLSRSRWFDFPFTREEALQADKKLNLFIGASVDPAGVTMIDAVKIYGKTKEQFGWPDEPPEEFPSASVSNICPSNLNQSNGTGDSDSAAPTTTSGTVLERLVVSSLEALESCFAVGPIIEKERNKNAAQELATLLLSLPAPASVQQQSKSLLASLHTSRSAYHSHKDQALLSKAVQCLNTSSKEGKDLDPEVFQRLVITARSIAIMRPNNLVHFTESKLPQMETEGMDEGKEPQKQLEGDCCSFITQLVNHFWKLHASKPKNAFLAPACLPGLTHIEATVNALVDIIHGYCTCELDCINTASKIYMQMLLCPDPAVSFSCKQALIRVLRPRNKRRHVTLPSSPRSNTPMGDKDDDDDDDADEKMQSSGIPNGGHIRQESQEQSEVDHGDFEMVSESMVLETAENVNNGNPSPLEALLAGAEGFPPMLDIPPDADDETMVELAIALSLQQDQQGSSSSALGLQSLGLSGQAPSSSSLDAGTLSDTTASAPASDDEGSTAATDGSTLRTSPADHGGSVGSESGGSAVDSVAGEHSVSGRSSAYGDATAEGHPAGPGSVSSSTGAISTTTGHQEGDGSEGEGEGETEGDVHTSNRLHMVRLMLLERLLQTLPQLRNVGGVRAIPYMQVILMLTTDLDGEDEKDKGALDNLLSQLIAELGMDKKDVSKKNERSALNEVHLVVMRLLSVFMSRTKSGSKSSICESSSLISSATAAALLSSGAVDYCLHVLKSLLEYWKSQQNDEEPVATSQLLKPHTTSSPPDMSPFFLRQYVKGHAADVFEAYTQLLTEMVLRLPYQIKKITDTNSRIPPPVFDHSWFYFLSEYLMIQQTPFVRRQVRKLLLFICGSKEKYRQLRDLHTLDSHVRGIKKLLEEQGIFLRASVVTASSGSALQYDTLISLMEHLKACAEIAAQRTINWQKFCIKDDSVLYFLLQVSFLVDEGVSPVLLQLLSCALCGSKVLAALAASSGSSSASSSSAPVAASSGQATTQSKSSTKKSKKEEKEKEKDGETSGSQEDQLCTALVNQLNKFADKETLIQFLRCFLLESNSSSVRWQAHCLTLHIYRNSSKSQQELLLDLMWSIWPELPAYGRKAAQFVDLLGYFSLKTPQTEKKLKEYSQKAVEILRTQNHILTNHPNSNIYNTLSGLVEFDGYYLESDPCLVCNNPEVPFCYIKLSSIKVDTRYTTTQQVVKLIGSHTISKVTVKIGDLKRTKMVRTINLYYNNRTVQAIVELKNKPARWHKAKKVQLTPGQTEVKIDLPLPIVASNLMIEFADFYENYQASTETLQCPRCSASVPANPGVCGNCGENVYQCHKCRSINYDEKDPFLCNACGFCKYARFDFMLYAKPCCAVDPIENEEDRKKAVSNINTLLDKADRVYHQLMGHRPQLENLLCKVNEAAPEKPQDDSGTAGGISSTSASVNRYILQLAQEYCGDCKNSFDELSKIIQKVFASRKELLEYDLQQREAATKSSRTSVQPTFTASQYRALSVLGCGHTSSTKCYGCASAVTEHCITLLRALATNPALRHILVSQGLIRELFDYNLRRGAAAMREEVRQLMCLLTRDNPEATQQMNDLIIGKVSTALKGHWANPDLASSLQYEMLLLTDSISKEDSCWELRLRCALSLFLMAVNIKTPVVVENITLMCLRILQKLIKPPAPTSKKNKDVPVEALTTVKPYCNEIHAQAQLWLKRDPKASYDAWKKCLPIRGIDGNGKAPSKSELRHLYLTEKYVWRWKQFLSRRGKRTSPLDLKLGHNNWLRQVLFTPATQAARQAACTIVEALATIPSRKQQVLDLLTSYLDELSIAGECAAEYLALYQKLITSAHWKVYLAARGVLPYVGNLITKEIARLLALEEATLSTDLQQGYALKSLTGLLSSFVEVESIKRHFKSRLVGTVLNGYLCLRKLVVQRTKLIDETQDMLLEMLEDMTTGTESETKAFMAVCIETAKRYNLDDYRTPVFIFERLCSIIYPEENEVTEFFVTLEKDPQQEDFLQGRMPGNPYSSNEPGIGPLMRDIKNKICQDCDLVALLEDDSGMELLVNNKIISLDLPVAEVYKKVWCTTNEGEPMRIVYRMRGLLGDATEEFIESLDSTTDEEEDEEEVYKMAGVMAQCGGLECMLNRLAGIRDFKQGRHLLTVLLKLFSYCVKVKVNRQQLVKLEMNTLNVMLGTLNLALVAEQESKDSGGAAVAEQVLSIMEIILDESNAEPLSEDKGNLLLTGDKDQLVMLLDQINSTFVRSNPSVLQGLLRIIPYLSFGEVEKMQILVERFKPYCNFDKYDEDHSGDDKVFLDCFCKIAAGIKNNSNGHQLKDLILQKGITQNALDYMKKHIPSAKNLDADIWKKFLSRPALPFILRLLRGLAIQHPGTQVLIGTDSIPNLHKLEQVSSDEGIGTLAENLLEALREHPDVNKKIDAARRETRAEKKRMAMAMRQKALGTLGMTTNEKGQVVTKTALLKQMEELIEEPGLTCCICREGYKFQPTKVLGIYTFTKRVALEEMENKPRKQQGYSTVSHFNIVHYDCHLAAVRLARGREEWESAALQNANTKCNGLLPVWGPHVPESAFATCLARHNTYLQECTGQREPTYQLNIHDIKLLFLRFAMEQSFSADTGGGGRESNIHLIPYIIHTVLYVLNTTRATSREEKNLQGFLEQPKEKWVESAFEVDGPYYFTVLALHILPPEQWRATRVEILRRLLVTSQARAVAPGGATRLTDKAVKDYSAYRSSLLFWALVDLIYNMFKKVPTSNTEGGWSCSLAEYIRHNDMPIYEAADKALKTFQEEFMPVETFSEFLDVAGLLSEITDPESFLKDLLNSVP

SEQ ID NO: 13 - DNA, 4253 bp, Homosapiens
ggtgcatgccgggacggcggtgggtggtgcatgcgctcgcatcatggcggctgagtgggcttctcgtttctggctttgggctacgctgctgattcctgcggccgcggtctacgaagaccaagtgggcaagtttgattggagacagcaatatgttgggaaggtcaagtttgcctccttggaattttcccctggatccaagaagttggttgtagccacagagaagaatgtgattgcagcattaaattcccgaactggggagatcttgtggcgccatgttgacaagggcacggcagaaggggctgtggatgccatgctgctgcacggacaggatgtgatcactgtgtccaatggaggccgaatcatgcgttcctgggagactaacatcgggggcctgaactgggagataaccctggacagtggcagtttccaggcacttgggctggttggcctgcaggagtctgtaaggtacatcgcagtcctgaagaagactacacttgccctccatcacctctccagtgggcacctcaagtgggtggaacatctcccagaaagtgacagcatccactaccagatggtgtattcttacggctctggggtggtgtgggccctcggagttgttcccttcagccatgtgaacattgtcaagtttaatgtggaagatggagagattgttcagcaggttagggtttcaactccgtggctgcagcacctgtctggagcctgtggtgtggtggatgaggctgtcctggtgtgtcctgacccgagctcacgttccctccaaactttggctctggagacggaatgggagttgagacagatcccactgcagtctctcgacttagaatttggaagtggattccaaccccgggtcctgcctacccagcccaacccagtggacgcttcccgggcccagttcttcctgcacttgtccccaagccactatgctctgctgcagtaccattatggaacgctgagtttgcttaaaaacttcccacagactgccctagtgagctttgccaccactggggagaagacggtggctgcagtcatggcctgtcggaatgaagtgcagaaaagtagcagttctgaagatgggtcaatggggagcttttcggagaagtctagttcaaaggactctctggcttgcttcaatcagacctacaccattaacctatacctcgtggagacaggtcggcggctgctggacaccacgataacatttagcctggaacagagcggcactcggcctgagcggctgtatatccaggtgttcttgaagaaggatgactcagtgggctaccgggctttggtgcagacagaggatcatctgctacttttcctgcagcagttggcagggaaggtggtgctgtggagccgtgaggagtccctggcagaagtggtgtgcctagagatggtggacctccccctgactggggcacaggccgagctggaaggagaatttggcaaaaaggcagatggcttgctggggatgttcctgaaacgcctctcgtctcagcttatcctgctgcaagcatggacttcccacctctggaaaatgttttatgatgctcggaagccccggagtcagattaagaatgagatcaacattgacaccctggccagagatgaattcaacctccagaagatgatggtgatggtaacagcctcaggcaagctttttggcattgagagcagctctggcaccatcctgtggaaacagtatctacccaatgtcaagccagactcctcctttaaactgatggtccagagaactactgctcatttcccccatcccccacagtgcaccctgctggtgaaggacaaggagtcgggaatgagttctctgtatgtcttcaatcccatttttgggaagtggagtcaggtagctcccccagtgctgaagcgccccatcttgcagtccttgcttctcccagtcatggatcaagactacgccaaggtgttgctgttgatagatgatgaatacaaggtcacagcttttccagccactcggaatgtcttgcgacagctacatgagcttgccccttccatcttcttctatttggtggatgcagagcagggacggctgtgtggatatcggcttcgaaaggatctcaccactgagctgagttgggagctgaccattcccccagaagtacagcggatcgtcaaggtgaaggggaaacgcagcagtgagcacgttcattcccagggccgtgtgatgggggaccgcagtgtgctctacaagagcctgaaccccaacctgctggccgtggtgacagagagcacagacgcgcaccatgagcgcacctttattggcatcttcctcattgatggcgtcactgggcgtatcattcactcctctgtgcagaagaaagccaaaggccctgtccatatcgtgcattcagagaactgggtggtgtaccagtactggaacaccaaggctcggcgcaacgagtttaccgtactggagctctatgagggcactgagcaatacaacgccaccgccttcagctccctggaccgcccccagctgccccaggtcctccagcagtcctatatcttcccgtcctccatcagtgccatggaggccaccatcaccgaacggggcatcaccagccgacacctgctgattggactaccttctggagcaattctttcccttcctaaggctttgctggatccccgccgccccgagatcccaacagaacaaagcagagaggagaacttaatcccgtattctccagatgtacagatacacgcagagcgattcatcaactataaccagacagtttctcgaatgcgaggtatctacacagctccctcgggtctggagtccacttgtttggttgtggcctatggtttggacatttaccaaactcgagtctacccatccaagcagtttgacgttctgaaggatgactatgactacgtgttaatcagcagcgtcctctttggcctggtttttgccaccatgatcactaagagactggcacaggtgaagctcctgaatcgggcctggcgataaagaacaaagactgtgcctaaaagtggagagccaggggagtgtgggtcagataagcagctacagctgcagtttggtggattggtggagtatgtgtgtgtgtcagtgctcagctaagaactgtagggaagatggatgaccttcacgcagaactccttttgggatatacatgatgcagaaaggatcctacatggagagagacagaactctctcagctgacactctcagagattcctgatgggctttctcttgaagtccaaaggcgtctgcattgtttcctttctttgcccatccatgaatgttctgttttgttttttttaataagaattccggctgatttttgtgaggcctgtttaaattgactttactttgccttttgtgtttctcaattttatctagaaatctttctgactttttccatctcttgcttcaaagtaagaggggaactctccttgccgactccaccttataggtacatttggtgttttgcactgggaagaaataggatccatccttagctgaggcttgaggactgatccagcctctcatggcttccctccaaagtaacttagggttgagggatctatatgtgatgtcaaaacttactttaaacctctagtttcgtgctgtcatttattaggctgggccaccaaatctttgtttcaatttatcagaagccaagtgcatactagcgtcttgtttgttgcccattgcctatacttttcacctgagatgtgtgagttggggccttttaaaaactactgaattgtctgagccttgaagacatttccagggagaagagataatctctcatttcacccacaggctggtctaatcataacctagttaaagatgtccttgtttaagaaccccattatttatttttagtttttaatataaattaacatgtgggtcattatatttctccttaaatgaggaaattttaaattttattgatctaacctttgaagctttaaaaaaggagaaagagggtaggggtgggaaactggcatactgtgtgtatagcactgccgattggctaggccactgtgtctctgctacaaattaaagaaatcctaaaagttttccttggtcatagagttggggaatgacagaatttttctttgttgtgaaatgtatgtacagagtagaccatctctagccctgtggtgaaagaggtacactcgaatgtttgcataaagcaagtgacaaatgaaaaaaaaaaaaaaaa

SEQ ID NO: 14 - protein, 993 aa, Homosapiens
MAAEWASRFWLWATLLIPAAAVYEDQVGKFDWRQQYVGKVKFASLEFSPGSKKLVVATEKNVIAALNSRTGEILWRHVDKGTAEGAVDAMLLHGQDVITVSNGGRIMRSWETNIGGLNWEITLDSGSFQALGLVGLQESVRYIAVLKKTTLALHHLSSGHLKWVEHLPESDSIHYQMVYSYGSGVVWALGVVPFSHVNIVKFNVEDGEIVQQVRVSTPWLQHLSGACGVVDEAVLVCPDPSSRSLQTLALETEWELRQIPLQSLDLEFGSGFQPRVLPTQPNPVDASRAQFFLHLSPSHYALLQYHYGTLSLLKNFPQTALVSFATTGEKTVAAVMACRNEVQKSSSSEDGSMGSFSEKSSSKDSLACFNQTYTINLYLVETGRRLLDTTITFSLEQSGTRPERLYIQVFLKKDDSVGYRALVQTEDHLLLFLQQLAGKVVLWSREESLAEVVCLEMVDLPLTGAQAELEGEFGKKADGLLGMFLKRLSSQLILLQAWTSHLWKMFYDARKPRSQIKNEINIDTLARDEFNLQKMMVMVTASGKLFGIESSSGTILWKQYLPNVKPDSSFKLMVQRTTAHFPHPPQCTLLVKDKESGMSSLYVFNPIFGKWSQVAPPVLKRPILQSLLLPVMDQDYAKVLLLIDDEYKVTAFPATRNVLRQLHELAPSIFFYLVDAEQGRLCGYRLRKDLTTELSWELTIPPEVQRIVKVKGKRSSEHVHSQGRVMGDRSVLYKSLNPNLLAVVTESTDAHHERTFIGIFLIDGVTGRIIHSSVQKKAKGPVHIVHSENWVVYQYWNTKARRNEFTVLELYEGTEQYNATAFSSLDRPQLPQVLQQSYIFPSSISAMEATITERGITSRHLLIGLPSGAILSLPKALLDPRRPEIPTEQSREENLIPYSPDVQIHAERFINYNQTVSRMRGIYTAPSGLESTCLVVAYGLDIYQTRVYPSKQFDVLKDDYDYVLISSVLFGLVFATMITKRLAQVKLLNRAWR

SEQ ID NO: 15 - DNA, 1185 bp, Homosapiens
accgtcttccgccgcacgtggattcagcgcgatgcccaaatccaagcgcgacaagaaagtctccttaaccaaaactgccaagaaaggcttggaattgaaacaaaacctgatagaagagcttcggaaatgtgtggacacctacaagtaccttttcatcttctctgtggccaacatgaggaacagcaagctgaaggacatccggaacgcctggaagcacagccggatgttctttggcaaaaacaaggtgatgatggtggccttgggtcggagcccatctgatgaatacaaagacaacctgcaccaggtcagcaaaaggttgaggggtgaggtgggtctcctgttcaccaaccgcacaaaggaagaggtgaatgagtggttcacgaaatacacagaaatggactacgcccgagctggtaacaaagcagctttcactgtgagcctggatccagggcccctggagcagttcccccactccatggagccacagctcaggcagctgggcctgcccaccgccctcaagagaggtgtggtgactctgctgtctgactacgaggtgtgcaaggagggcgatgtgctgaccccagagcaggctcgcgtcctgaagctttttgggtatgagatggctgaattcaaggtgaccatcaaatacatgtgggattcacagtcgggaaggttccagcagatgggagacgacttgccagagagcgcatctgagtccacagaagagtcagactcagaagatgatgactgaaagggactcgggactgaaggtctcctggaagcttctgggtctcactggaccatcaggactgctgccgcccctctggagagagcagctttttatttgtctgtagacagggaacatgatgggcactgacctcctgtaaagaataaaactgtgggccgggcgcggtggctcacgcctggaatcccagcactttgggaagccgaggtgggcagatcataaggtcaggagattaagaccatcctggctaacacggtgaaaccccgtctctactaaaaatagaaaaaaaaactagttgggcatagtggcatgtgcctgtagtcccagctactcaggaggctgaggcaggagaatcacttgaacccgggaggtggaggttgccgtgagttgagattggaccactgctctccagcctgggcaacagagtaaaactctgtccc

SEQ ID NO: 16 - protein, 239 aa, Homosapiens
MPKSKRDKKVSLTKTAKKGLELKQNLIEELRKCVDTYKYLFIFSVANMRNSKLKDIRNAWKHSRMFFGKNKVMMVALGRSPSDEYKDNLHQVSKRLRGEVGLLFTNRTKEEVNEWFTKYTEMDYARAGNKAAFTVSLDPGPLEQFPHSMEPQLRQLGLPTALKRGVVTLLSDYEVCKEGDVLTPEQARVLKLFGYEMAEFKVTIKYMWDSQSGRFQQMGDDLPESASESTEESDSEDDD

SEQ ID NO: 17 - DNA, 2001 bp, Homosapiens
cggccttcctgtacagcgacggccagtccgagaccatccttggcggcctggggctccgaatgggcagcagcgactgcagagtgaaaattgctaccaaggccaatccatggattgggaactccctgaagcctgacagtgtccgatcccagctggagacgtcactgaagcggctgcagtgtccctgagtggacctcttctatctacatgcacctgaccacagcgccccggtggaagagacactgcgtgcctgccaccagctgcaccaggagggcaagttcgtggagcttggcctctccaactatgccgcctgggaagtggccgagatctgtaccctctgcaagagcaacggctggatcctgcccactgtgtaccagcttctggaaggagcaccacttcgagggcattgccctggtggagaaggccctgcaggccgcgtatggcgccagcgctcccagcatgacctcggccgccctccggtggatgtaccaccactcacagctgcagggtgcccacggggacgcggtcatcctgggcatgtccagcctggagcagctggagcagaacttggcagcggcagaggaagggcccctggagccggctgtcgtggacgcctttaatcaagcctggcatttgtttgcccacgaatgtcccaactacttcatctaagctcattgtggctcaggctgcccaaggcttttctgtcaactcttttgctctctcccgctttgtctaatttagaactgcctcactaaattcttagggatggaagtatttggaaaaaaacctaacagtagagtcaccacctaaggaagaataaaatctcccagggtgctgtgtgttagtctgtttgcgttgctataaaagaatacctgagactgggtcatgtataaagaaaagaggtttctttggctcacagttctgcagtctgtacaagagggtgtggtgccggcatctgctcttggtgagggcctcaggaagcttagaatcatggcagaaggggaaacggagccagcgtgtcacatggtgagagagggagcaagagacagacaggggaggaaattcacacactgatggtggggatgtaaaatggtacaaccagtttggaaaacagtttggcagtttctcaaaggattaaacataaaattaccataggattcagcagttccacttgtgggtatgtagccaagagaaatgaaaacatatctccccacaaaaaaacttgggtatgagatttcacattatcattgctcataatagccaataagtaaaaacaacccaaatgtccaagaatgaataaatggataaacaaaatatggtatatttatacaacagactattattcggccattaaaaaaaaaaagagtggctgacacctgtaatctcagcactttgagaggccaaggcagtaggactgattgaagacaggagttccagaccagtctgggaaacaaagcgagaccctgtctccactaaacataaaaacaaaattactggggccccatggcacacacctgtagtcccagctgctcgggaagctgagatgggcggattgcttgagcccaggtattcaagtctggagtgagctatgactgtgccactgcactccagcctgggcgacagagcaaaccctgtttccaaacaaacaaacaaacaaacaaatacacagacagaagtagttaaacatctacaaggtaagtgcatcttgaagacgtgttaagttaaagaagccaattacaaaaggtttcacgttgtatgatttcgtttatatgaaatgtccagaataggcaaatctgtttgagagagagaaagtagatgagtacttgcctaggactgggaggaggattgcgaggaaatggagattcactgctaatgagtacagggtttcttttgggggcgcttatgaagatgctctgaaattgattgtgatggttgtacaactctgaatacatgaaacagcattaaacatcactttaagtaagtcaaaaaaaaaaaaaaaaaaaa

SEQ ID NO: 18 - protein, 153 aa, Homosapiens
MHLTTAPRWKRHCVPATSCTRRASSWSLASPTMPPGKWPRSVPSARATAGSCPLCTSFWKEHHFEGIALVEKALQAAYGASAPSMTSAALRWMYHHSQLQGAHGDAVILGMSSLEQLEQNLAAAEEGPLEPAVVDAFNQAWHLFAHECPNYFI

SEQ ID NO: 19 - DNA, 1301 bp, Homosapiens
gccgcccgctccgagcctggtgcttccgaccgctgcgcgcggctcctgggctgtcacagtctcccgttgccgccgtcatgtcccggcagctgtcgcgggcccggccagccacggtgctgggcgccatggagatggggcgccgcatggacgcgcccaccagcgccgcagtcacgcgcgccttcctggagcgcggccacaccgagatagacacggccttcgtgtacagcgagggccagtccgagaccatccttggcggcctggggctccggctgggcggcagcgactgcagagtgaaaattgataccaaggccattccactgtttgggaactccctgaagcctgacagtctccggttccagctggagacgtcactgaagcggctgcagtgtccccgagtggacctcttctacctgcatatgccagaccacagcaccccggtggaagagacactgcgtgcctgccaccagctgcaccaggagggcaagttcgtggagcttggcctctccaactatgcagcctgggaagtggccgagatctgtaccctctgcaagagcaacggctggatcctgcccactgtgtaccagggcatgtacaatgccatcacccggcaggtggaaacggagctcttcccctgcctcaggcactttggactgaggttctatgccttcaaccctctggctgggggcctgctgaccggcaagtacaagtatgaggacaagaatgggaaacagcccgtgggccgcttctttgggaatacctgggcagagatgtacaggaatcgctactggaaggagcaccactttgagggcattgccctggtggagaaggccctgcaggccgcgtatggcgccagcgcccccagcatgacctcggccaccctccggtggatgtaccaccactcacagctgcagggtgcccacggggacgcggtcatcctgggcatgtccagcctggagcagctggagcagaacttggcagcggcagaggaagggcccctggagccggctgtcgtggacgcctttaatcaagcctggcatttggttactcacgaatgtcccaactacttccgctaggcccatcgtttctcaggctgcccaaggctcttctgtaacatcttttgttactcacattttctttaatttagaactgcctcagtaaattcttagggatggaagtatttggacaaaaacctaatagaagagtcaccaccaaatgaagaataaaactcccagggtgctgtgaaaaaaaaaaaaaaaaaaaaaaaaaaaaaaaaaaaaaaaaaaaaaaaaaaaaaaaaaaaa

SEQ ID NO: 20 - protein, 331 aa, Homosapiens
MSRQLSRARPATVLGAMEMGRRMDAPTSAAVTRAFLERGHTEIDTAFVYSEGQSETILGGLGLRLGGSDCRVKIDTKAIPLFGNSLKPDSLRFQLETSLKRLQCPRVDLFYLHMPDHSTPVEETLRACHQLHQEGKFVELGLSNYAAWEVAEICTLCKSNGWILPTVYQGMYNAITRQVETELFPCLRHFGLRFYAFNPLAGGLLTGKYKYEDKNGKQPVGRFFGNTWAEMYRNRYWKEHHFEGIALVEKALQAAYGASAPSMTSATLRWMYHHSQLQGAHGDAVILGMSSLEQLEQNLAAAEEGPLEPAVVDAFNQAWHLVTHECPNYFR

SEQ ID NO: 21 - DNA, 1377 bp, Homosapiens
ccaacgcgcaggcgccgctgctatgctgagtgccgcgtctcgcgtagtctcccgcgccgccgtccactgcgcgcttcgctctccgccgcccgaggcccgcgcgctcgccatgtcccggccaccgccaccgcgggtcgcctcggtgctgggcaccatggagatggggcgccgcatggacgcgcccgccagcgccgcggccgtgcgcgcctttctggagcgcggccacaccgaactggacacggccttcatgtacagcgacggccagtccgagaccatcctgggcggcctggggctcgggctgggcggtggcgactgcagagtgaaaattgccaccaaggccaacccttgggatggaaaatcactaaagcctgacagtgtccggtcccagctggagacgtcattgaagaggctgcagtgtccccaagtggacctcttctacctacacgcacctgaccacggcaccccggtggaagagacgctgcatgcctgccagcggctgcaccaggagggcaagttcgtggagcttggcctctccaactatgctagctgggaagtggccgagatctgtaccctctgcaagagcaatggctggatcctgcccactgtgtaccagggcatgtacaacgccaccacccggcaggtggaaacggagctcttcccctgcctcaggcactttggactgaggttctatgcctacaaccctctggctgggggcctgctgactggcaagtacaagtatgaggacaaggacgggaaacagcctgtgggccgcttctttgggaatagctgggctgagacctacaggaatcgcttctggaaggagcaccacttcgaggccattgcgttggtggagaaggccctgcaggccgcatatggcgccagcgcccccagtgtgacctcggctgccctccggtggatgtaccaccactcacagctgcagggtgcccacggggacgcggtcatcctgggcatgtccagcctggagcagctggagcagaacttggcagcaacagaggaagggcccctggagccggctgtcgtggatgcctttaatcaagcctggcatttggttgctcacgaatgtcccaactacttccgctaggcccatcatggctcaggctgcccaaggcttttctgtcacctcttttgttctctcacactgaccagtcttggccttaagctgacttagaagggtttttctgaattgtctagatccatgcattatttttctagcttcctgccttgctccctattcactttacactgtgaaaggtggggggtgagtcccacttgagcgcttcctgttgaataaagcaggcacttgacctggctgtagcctaggtcttgagtgaaccccaaaaaaaaaaaaaaaaaaaa

SEQ ID NO: 22 - protein, 359 aa, Homosapiens
MLSAASRVVSRAAVHCALRSPPPEARALAMSRPPPPRVASVLGTMEMGRRMDAPASAAAVRAFLERGHTELDTAFMYSDGQSETILGGLGLGLGGGDCRVKIATKANPWDGKSLKPDSVRSQLETSLKRLQCPQVDLFYLHAPDHGTPVEETLHACQRLHQEGKFVELGLSNYASWEVAEICTLCKSNGWILPTVYQGMYNATTRQVETELFPCLRHFGLRFYAYNPLAGGLLTGKYKYEDKDGKQPVGRFFGNSWAETYRNRFWKEHHFEAIALVEKALQAAYGASAPSVTSAALRWMYHHSQLQGAHGDAVILGMSSLEQLEQNLAATEEGPLEPAVVDAFNQAWHLVAHECPNYFR

SEQ ID NO: 23 - DNA, 2662 bp, Homosapiens
agaagctgggccctggcggcggatctggacgtggcggcccgcgccgggctgagtcaccaggagggagctgtggccgaggacgccgaggcctggagtgggtggtagccccgagctgggacgctcctccctccacaatctccccaggtctgcagggaccgagggcctacactgcctcctcccacgccgtgcttaggaacccttgctggcctcagaacaccagcgccctccctccggtgcagccctgcctggccgggggcccctcctccacagccatggtctggaagaaactgggctcccgcaacttctccagctgccccagtggctccatccagtggatatgggatgtgttagggtgaatgtgcccaggacggctgggacgaggccagcgtgggcctgggcttgatctccattctctgctttgctgcatctaccttcccccagttcatcaaagcctacaagacgggcaacatggaccaggcgctgtccctgtggttcctcctgggctggattggcggagactcctgcaacctcatcggctccttccttgctgaccagctgcccctgcagacctacacggctgtgtattatgtcttggcagacctggtgatgctgacgctgtacttttactacaagttcaggacacgcccctctctgttgtctgcccccatcaactccgtgctgttgttcctcatggggatggcgtgcgccacaccgctgctgagtgctgctgggcccgtggctgcccctagggaagccttccgggggcgggcgctcctgtccgtggagtcgggcagcaagcccttcacccggcaggaagtcattggcttcgtcatcggctccatctccagcgtgttgtacctgctttcccggctgcctcagatccgcaccaacttcctccggaagtccacccaggggatctcctactctctgttcgcgctggtgatgctggggaacacgctgtatgggctgagcgtgctgctcaaaaaccccgaggagggccagagcgagggcagctacctgctgcaccacctgccctggcttgtgggcagcctgggcgtgctgctgctcgacaccatcatctccatccagttcctggtgtacaggcgcagcaccgccgcctcggagcttgagcccctcctccccagctgaccagaaccaggctgagcgcaggaggacaggcaccaccggatgccacaccaggcaggaggaggtgtggacagtgatggtacggcggccctgcatcagcctgcgggtggcctctggatcctccgtggaccgaaccgtccccccaggaacacaccttcaggtagaccccgaagcctcaaggccggggctggagcggagaccccagggcctctcaggagacagtgaggctgcccctcctaccacctacctcattctgcctactcaccccaggggccacagccacagcctgctggtctcgaactccttacctcaggtgatctgcttgcctcagcctctcaaagtgctgggattacaggtgtgccaccgcgcccggccaagatgggagtatttttatgaccattttacagatgggagaacagtctcagcacaattgagcagcttgcccagctaggagcagcagcaacacgagaccctccagctttgggagccaccccacacctggccaacgctggcggcccgtgtccccttcctccatccttgctgggggcccatggcttgtggcagttcagcttcaccctcaggagtggcccgaaccctgctggacccaggctcccttctcaccatcctgaatagcgactttgctgagcctctggccctgccgagatttcaggataagttacccccaggcccgaagccccagcttgccctggcctgtgcctgcctcaggtgccagctagatgtctcgctccacctgggtctgggacctggctccacaccagttacctgggaccagtaggtgcccttccagcctgaagatctgggggcacagtatagccacatgagccccaagtgtggtcctgaactggggccgggtggggaagagtgagatgggataacatagcccctgcttggaggcccttctctgatggggtgacataatcccttcctcctgggaaacaccagcttttggggtgatagcactttcaggcaggagctatggttccttcctcaggaggcctccaatctgatggggaagacatggcccctccccctggggagtgccctgtgtgatggaggcgatacagcccctaccttcagagagcacctggcctgcagctcatccaaacctgagtctcctctcccttggaggcctcattccagcgccccaaggaggattcaaactgttggggctggaagaacttggtggcctgggtccctggagccctgttgaaggagctggtgacattctgatgctggaggcaggtgacggggagcacagactttgtgtcctgcacactgagctccaagtgtgccccagccactgagccttgtgacttgagcagatgtccgaagccgtttcttcatcccatgagaccagtaatactgtctgcctcagaacatagccgtgatcaagatgagcacggaggctcgtgtcccagcacctggcacacagtaagtgcctggtaaataaacaatggctatatttgcttgtcaaaaaaaaaaaaaaaaaaaaaaa

SEQ ID NO: 24 - protein, 226 aa, Homosapiens
MDQALSLWFLLGWIGGDSCNLIGSFLADQLPLQTYTAVYYVLADLVMLTLYFYYKFRTRPSLLSAPINSVLLFLMGMACATPLLSAAGPVAAPREAFRGRALLSVESGSKPFTRQEVIGFVIGSISSVLYLLSRLPQIRTNFLRKSTQGISYSLFALVMLGNTLYGLSVLLKNPEEGQSEGSYLLHHLPWLVGSLGVLLLDTIISIQFLVYRRSTAASELEPLLPS

SEQ ID NO: 25 - DNA, 1647 bp, Homosapiens
cctgctgcgggggggagagccactgacgccgggaccgggaccgccgccgccgccgccaccatgagtgatcagcagctggactgtgccttggacctaatgaggcgcctgcctccccagcaaatcgagaaaaacctcagcgacctgatcgacctggtccccagtctatgtgaggatctcctgtcttctgttgaccagccactgaaaattgccagagacaaggtggtgggaaaggattaccttttgtgtgactacaacagagatggggactcctataggtcaccatggagtaacaagtatgaccctcccttggaggatggggccatgccgtcagctcggctgagaaagctggaggtggaagccaacaatgcctttgaccagtatcgagacctgtattttgaaggtggcgtctcatctgtctacctctgggatctggatcatggctttgctggagtgatcctcataaagaaggctggagatggatcaaagaagatcaaaggctgctgggattccatccacgtggtagaagtgcaggagaaatccagcggtcgcaccgcccattacaagttgacctccacggtgatgctgtggctgcagaccaacaaatctggctctggcaccatgaacctcggaggcagccttaccagacagatggagaaggatgaaactgtgagtgactgctccccacacatagccaacatcgggcgcctggtagaggacatggaaaataaaatcagaagtacgctgaacgagatctactttggaaaaacaaaggatatcgtcaatgggctgaggtctgtgcagacttttgcagacaaatcaaaacaagaagctctgaagaatgacctggtggaggctttgaagagaaagcagcaatgctaaacctctgtttcatgctaaccagacacgccgtgcactcgttagattcctttcttagaaaactcgttttctgctcccttccctcgtcccttccctccccgacaggtcacataacagctgcatcattgaccgcacagcgccatctctccctgagaataaagccgatagccaccctcctccggctccgagcctgcttctgccacacctcgctctcagttctctccacatttccatagagaccgtgtggtttttgttcacccgggccccccgtcttcctccctgtccccccatttataggcataaaatccactgtctgccagcctcccttccctcccacctttttggtacattggtgtaaaaaatgtaaaacaaaaaaattttatgaactaactgtggtgtgtgaaagagagaagaaaaactggaaatcttattccgtgtgtgtttgggagttgcttggggttgggggtcgtggggacaggggacagctctgggagcagaggtggccctcggtgccgtcctgcgcagactctcccgtcccacggaggccgcggggtgggggctggggggggtgccgccgaccgttccgctcttccggccaggtgcttttctgtcaatttctatggaatgcaaaaggaggtttttgttttattttgtttttttgtaaagcttaagaaaaaaatctacatcttatacttgagcctccatacttaaaaaaagaaaagaaaagaaatcaataaaaagaaactggggcgcaaaaaaaaaaaaaaaaaa

SEQ ID NO: 26 - protein, 272 aa, Homosapiens
MSDQQLDCALDLMRRLPPQQIEKNLSDLIDLVPSLCEDLLSSVDQPLKIARDKVVGKDYLLCDYNRDGDSYRSPWSNKYDPPLEDGAMPSARLRKLEVEANNAFDQYRDLYFEGGVSSVYLWDLDHGFAGVILIKKAGDGSKKIKGCWDSIHVVEVQEKSSGRTAHYKLTSTVMLWLQTNKSGSGTMNLGGSLTRQMEKDETVSDCSPHIANIGRLVEDMENKIRSTLNEIYFGKTKDIVNGLRSVQTFADKSKQEALKNDLVEALKRKQQC

SEQ ID NO: 27 - DNA, 2002 bp, Homosapiens
agagtccagggagagtgcgcgggcggccgccggctgaatgaagcctgggacgcgggagccgcgccgcgcgcagtgtctgcagtgccggaggtctgggaggctccgggcgaagcctccctgctgcaggttatgatgatgtcagacaatgctaaaggcagagcagctcattcatggaagaaaagagggagtatttcttctctaagtaatcatgaattttggcgaaaggaaattcatgggcgcatcaaagattctatgagtactgtgtcttatatggaagaacccagtcagcgtgatgatatctctcgccttacagttcagatggaaaacacctatcagttgggtcctcccaaacattttcctgtggtcaccgtcaatcatattttgaaagatgtagtaaccagctatctacaagtagaagaatatgaaccagagctctgtagacagatgactaaaaccatttctgaggttattaaagcccaggtcaaggacttgatgattccacggtataaactaattgtgattgttcacattggacaactgaacaggcagagcataattattggaagcagatgcctctgggatcctaaaagtgataccttttcatcttatgttttcagaaattcttctctcttcgctcttgcaaatgtctatgcagtttaccttgagtgattgaaaataagaaatctagctcttacttttgaaaattctgaggcaggctgtatgtctgtacacaaaagttttactgccaaaaactttgagaaagaaacaacactgatatttcaaacaactggaagcttttgaattttttcatattctagtaaagatttggggaggggagggtagccacagaaagaatcttgtttatctaaagcaggaacttgatcttggttttgctggattgctttccatagacatagattcttattaaatatttgttttggtactaattattttaattattctttaattagagtgttacaatttcctgcattgttttttaataaaaagaagctttagaaaaactatggctatataccctgaccaataaatgatagtagaatattcaacatggtatacacaaatgataaataatgtgcctcagtgctgcatataaaagaatactggttttcattttgtacttaataaattgagcagcattcattaagtgcaattattgttacatgtacctgacagttgaaactgctgaggtagaattaatggcttcataacaattatcgtggtcccacgggctgcaagctaaaactagaagctcttgtggcttgcctgcactttacacaattgtgggagaaccgaaagttggctcttcagtaatggaaactataaagtgaataaaggctttttgggacactgaagtagacattgtgatattaaatatacatgatgcttaatactaaatgtgtctgtaacacataaaatcatttattggaaagagacattgcttttaaatatcctaggctaacaaactttttcacaaaatatatggctggcaccttaacaaataaagcatgtgtagttaccattttactcctatgaatttaatactaaagtgacccagtgaggtttttgaatagacgggtgctaaaatttacagggctgaaatagcttattattctgctggttaatgtatcttacgccacggatcatttatttttatgaagctttcaagtctttgtgtgcaagtaaaatgatgttgtggcgttgttcttggatggtaagtggactgcctagaggacatttgttaaaggtcaaagactaattgtacacatatggagaaaattagcaatgctgtagtcttaaggaaaaaatgatttatcattcatatcaaaaagagtttagcaaatggaaaaccagttaatgctttaattttaaaatgttttggtgtcttacttttccctaaaaatgacatgtagtaaaaaatggatacttttaaaatcccttcccttctgctattttctggcttttaaagtgattattcaaaatg

SEQ ID NO: 28 - protein, 179 aa, Homosapiens
MMMSDNAKGRAAHSWKKRGSISSLSNHEFWRKEIHGRIKDSMSTVSYMEEPSQRDDISRLTVQMENTYQLGPPKHFPVVTVNHILKDVVTSYLQVEEYEPELCRQMTKTISEVIKAQVKDLMIPRYKLIVIVHIGQLNRQSIIIGSRCLWDPKSDTFSSYVFRNSSLFALANVYAVYLE

SEQ ID NO: 29 - DNA, 715 bp, Homosapiens
ttaccatatcagattcacattcagtcctcagcaaaatgaagggctccattttcactctgtttttattctctgtcctatttgccatctcagaagtgcggagcaaggagtctgtgagactctgtgggctagaatacatacggacagtcatctatatctgtgctagctccaggtggagaaggcatcaggaggggatccctcaagctcagcaagctgagacaggaaactccttccagctcccacataaacgtgagttttctgaggaaaatccagcgcaaaaccttccgaaggtggatgcctcaggggaagaccgtctttggggtggacagatgcccactgaagagctttggaagtcaaagaagcattcagtgatgtcaagacaagatttacaaactttgtgttgcactgatggctgttccatgactgatttgagtgctctttgctaagacaagagcaaatacccaatgggtggcagagctttatcacatgtttaattacagtgttttactgcctggtagaacactaatattgtgttattaaaatgatggcttttgggtaggcaaaacttcttttctaaaaggtatagctgagcggttgaaaccacagtgatctctattttctccctttgccaaggttaatgaactgttcttttcaaattctactaatgctttgaaatttcaaatgctgcgcaaaattgcaataaaaatgctataaacca

SEQ ID NO: 30 - protein, 135 aa, Homosapiens
MKGSIFTLFLFSVLFAISEVRSKESVRLCGLEYIRTVIYICASSRWRRHQEGIPQAQQAETGNSFQLPHKREFSEENPAQNLPKVDASGEDRLWGGQMPTEELWKSKKHSVMSRQDLQTLCCTDGCSMTDLSALC

SEQ ID NO: 31 - DNA, 3871 bp, Homosapiens
ctcgtgccgccagccaaccgcgcggccgcttgttgagccagggctccaccgtcgccatgacgcccggcaaacattccggagcctcggcccgagccgctaacgcaggagcttgggggtacagggacttcagaggcggccaaaaaaaggggtggtggaccactccccagctggtcgccaccatgccagtctctccggcaggcagtcacaagcagcagaacttcgggttgaacaatgccacacaaccaaagaagtctattagcttttttgctacaatgaaagcaacttcagtgaaaggatatactggtgcaaatcaaagcagaatggctgtgtccaaaaccgtgcttattccacctgaactgaaaactgtagaaaaaccaaatcccaatataaagacaacacaggtatttgacataaatggaactgatgttactccccgacctctttaccatccagatccacttactggtacagcaaaaccaagtaaactcttgacatcacaagaaggatcacttggatcagaatttatatcttcctatagcctttatcagaatacaataaatcctagtacgttagggcagtttacaaggtcagttttaggaagcagtacagtttctaagtcaagtgtatcagcaagtgaatcaatagcagaagacctggaagaaccatcctataaacgggaaagattgactagtttcacagatttgcaagttataagggcagcacctgaaaaaattgtaacaaaagaagacctggagaagaatatagagataatactcacagagacagaaacactgagattttttgacttgcccacagtcatggtctctgtagaatctgaagaagctgagaaagtaactcagagaaacaagaattatgaagtcctttgtagaaacagattaggcaatgacctatatgttgaaaggatgatgcagactttcaatggagcaccaaagaataaagatgttcaatgtgataaaatcataatggaagataaaggcataatgtccactgcctgggatttgtatgattcttacaatgctatggaacttgtatctttatcagtaaaacaatctgtggttgagtcaagtagtaaagcaaatgtacttcctaaagatcaggaccaaagattgccagggagcactacagaaaaaaatagtgaaactagttctctaatggacatagaaaatgtaattctggcaaaaatccatgaagatgaggaagaccactcagatgcaatattaaaatctgacaaatttcatcaggacttattttttatggaacgggttctgatggaaaatatatttcagcccaaacttgcagcttatcgtcagcttcctgttttaaaagaacctgaacctgaagagcctgaagatgttttagaaagtgcaaaacatgaagaggtagaggaagaatctaagaaggaggaggaagaagaaatacatgcagaagaatcaacaatacccgccaacttggaacgactttggtctttttcctgtgacttaaccaaaggcctcaatgtgagcagccttgcctggaataaaacaaatccagatcttttggctgttggctatgggcactttggatttaaagagcaaaaaagaggactggcttgctgctggtcaataaagaatcccatgtggccagaacgtatttatcagagtccatatggagttactgctgtggatttttcaattggagcacctaaccttttagccgttggctatcacaatggcacaattgcaatttacaatgtacggagcaacagtaatgttccagttctggatagtagtgaatcacctcaaaaacatttgggacctgtatggcaactacagtggatagaacaagatcgaggaacaacaggagatggcaaaagagaaatactagtttctatatcagcagatggaagaatctccaaatgggttatacgaaaaggactagactgttatgatttgatgcgattaaagagaactacagctgccagtaacaaaaaaggaggggaaaaggaaaagaaagatgaagctttgatatctcgacaggctcctggaatgtgttttgcttttcatcccaaggacacaaatatctatttggctggcactgaagaaggtcatattcacaaatgttcttgttcatataatgaacaatacttagatacctacagaggacataagggtccagtgtataaagtgacatggaatccattttgtcatgatgtatttttaagctgttctgcagattggggtgttattatatggcaacaggagaatgtcaagccatctttgagtttttatccagctacttctgttgtttacgacgttgcctggtctccaaaatcatcctatatatttgcagctgcaaatgagaacagggtggagatttgggaccttcatatcagcactttggaccctctgattgtgaatactgctaaccctggaatcaagttcacaaccattctctttgccaaacaaacagattgccttctggtaggagacagtgatggacaggtttctgtgtatgaactgagaaatatgcctactgttttggaaactggccggggagatataatggatactttgcttggatccaagtcaaaccaatcagcataattcatcattcctaatatttttcttgtagttgttttaaaaaaggaattaacatccaatattctgtattacatactgtacaccagattttgatttcagaaaacaatatttgatgtataacttccacttaatttaaatttaataaacttttatttcagagatatttgattagtttacaatctaagagttattcttaagagtttcagtggaattttcttaatttttctaaagatattcctactctcttgatcatattctaagtacatatgagtacatgtacattcttatacaatgtctaaatgggttagaaaattattatacctatagaagcgaaacttggaaattaatagaatcacttaaaccaaaatctttataagacacaattctattgattttaaagcttctgctttccaggctctgttttccagagtttataattacgtagtttttagtagatgaaaataatggattcttgtacctaacattttatcctcttagatctaagagccgaagctatagaactttgttagactatttggcaagcaaaatatatgacagtaaatatcagaattttatggtttgaccagcgcttatcacattcccaattcagtgagaaaaattcatctgggacacaacagggtactcttctctgtttgcccagaatcagctctggattttaagcccagacttcagtggacccagatagaaaatataaagtctctgatctataggccacatcaggatgttattttatgaagagttctagagcaaggttgcggaaatcggggtggagatggggagcagtgactcctccaaatattcattgctaacaggccattctatgcagtttgttttaacaaatcctgggttaaactgaggccacaggacatgatgggctgttctataaagcattctaagtggagaggagacgatagggcatatgaaattcactaaactctctggaaaaaaaatatgtatatattaaaaaccaagactggaatcagtgcaacagtgggaactaccttttacaagtatccattgcttcataaactccatttgtttggaccaatcccttaaacaaaagcaaggcaaattttacatggatttagagcctaggtcaggttattaggattataaattttccactggtatgtcattgtgattatctttgtttttgtctttctgaaagattggattttctataacaccttgtgtaagaaaataaaaaacttgatctaactgaaaaaaaaaaaaaaaaaaaaaaaaaaaaa

SEQ ID NO: 32 - protein, 848 aa, Homosapiens
MTPGKHSGASARAANAGAWGYRDFRGGQKKGWWTTPQLVATMPVSPAGSHKQQNFGLNNATQPKKSISFFATMKATSVKGYTGANQSRMAVSKTVLIPPELKTVEKPNPNIKTTQVFDINGTDVTPRPLYHPDPLTGTAKPSKLLTSQEGSLGSEFISSYSLYQNTINPSTLGQFTRSVLGSSTVSKSSVSASESIAEDLEEPSYKRERLTSFTDLQVIRAAPEKIVTKEDLEKNIEIILTETETLRFFDLPTVMVSVESEEAEKVTQRNKNYEVLCRNRLGNDLYVERMMQTFNGAPKNKDVQCDKIIMEDKGIMSTAWDLYDSYNAMELVSLSVKQSVVESSSKANVLPKDQDQRLPGSTTEKNSETSSLMDIENVILAKIHEDEEDHSDAILKSDKFHQDLFFMERVLMENIFQPKLAAYRQLPVLKEPEPEEPEDVLESAKHEEVEEESKKEEEEEIHAEESTIPANLERLWSFSCDLTKGLNVSSLAWNKTNPDLLAVGYGHFGFKEQKRGLACCWSIKNPMWPERIYQSPYGVTAVDFSIGAPNLLAVGYHNGTIAIYNVRSNSNVPVLDSSESPQKHLGPVWQLQWIEQDRGTTGDGKREILVSISADGRISKWVIRKGLDCYDLMRLKRTTAASNKKGGEKEKKDEALISRQAPGMCFAFHPKDTNIYLAGTEEGHIHKCSCSYNEQYLDTYRGHKGPVYKVTWNPFCHDVFLSCSADWGVIIWQQENVKPSLSFYPATSVVYDVAWSPKSSYIFAAANENRVEIWDLHISTLDPLIVNTANPGIKFTTILFAKQTDCLLVGDSDGQVSVYELRNMPTVLETGRGDIMDTLLGSKSNQSA

SEQ ID NO: 33 - DNA, 1795 bp, Homosapiens
ctcgtgccgccagccaaccgcgcggccgcttgttgagccagggctccaccgtcgccatgacgcccggcaaacattccggagcctcggcccgagccgctaacgcaggagcttgggggtacagggacttcagaggcggccaaaaaaaggggtggtggaccactccccagctggtcgccaccatgccagtctctccggcaggcagtcacaagcagcagaacttcgggttgaacaatgccacacaaccaaagaagtctattagcttttttgctacaatgaaagcaacttcagtgaaaggatatactggtgcaaatcaaagcagaatggctgtgtccaaaaccgtgcttattccacctgaactgaaaactgtagaaaaaccaaatcccaatataaagacaacacaggtatttgacataaatggaactgatgttactccccgacctctttaccatccagatccacttactggtacagcaaaaccaagtaaactcttgacatcacaagaaggatcacttggatcagaatttatatcttcctatagcctttatcagaatacaataaatcctagtacgttagggcagtttacaaggtcagttttaggaagcagtacagtttctaagtcaagtgtatcagcaagtgaatcaatagcagaagacctggaagaaccatcctataaacgggaaagattgactagtttcacagatttgcaagttataagggcagcacctgaaaaaattgtaacaaaagaagacctggagaagaatatagagataatactcacagagacagaaacactgagattttttgacttgcccacagtcatggtctctgtagaatctgaagaagctgagaaagtaactcagagaaacaagaattatgaagtcctttgtagaaacagattaggcaatgacctatatgttgaaaggatgatgcagactttcaatggagcaccaaagaataaagatgttcaatgtgataaaatcataatggaagataaaggcataatgtccactgcctgggatttgtatgattcttacaatgctatggaacttgtatctttatcagtaaaacaatctgtggttgagtcaagtagtaaagcaaatgtacttcctaaagatcaggaccaaagattgccagggagcactacagaaaaaaatagtgaaactagttctctaatggacatagaaaatgtaattctggcaaaaatccatgaagatgaggaagaccactcagatgcaatattaaaatctgacaaatttcatcaggacttattttttatggaacgggttctgatggaaaatatatttcagcccaaacttgcagcttatcgtcagcttcctgttttaaaagaacctgaacctgaagagcctgaagatgttttagaaagtgcaaaacatgaagaggtagaggaagaatctaagaaggaggaggaagaagaaatacatgcagaagaatcaacaatacccgccaacttggaacgactttggtctttttcctgtgacttaaccaaaggcctcaatgtgagcagccttgcctggaataaaacaaatccagatcttttggctgttggctatgggcactttggatttaaagagcaaaaaagaggactggcttgctgctggtcaataaagaatcccatggtaacccaaacaagaataagaagcatttttatctggctgttgacaaaattctcataaaatatataattacatgtaataattaaataaagtctagaaaattttatcaaaaaaaaaaaaaaaaaaaaaaaaaaaaaaaaaaaaaaaaaaaaaaaaaaaaa

SEQ ID NO: 34 - protein, 545 aa, Homosapiens
MTPGKHSGASARAANAGAWGYRDFRGGQKKGWWTTPQLVATMPVSPAGSHKQQNFGLNNATQPKKSISFFATMKATSVKGYTGANQSRMAVSKTVLIPPELKTVEKPNPNIKTTQVFDINGTDVTPRPLYHPDPLTGTAKPSKLLTSQEGSLGSEFISSYSLYQNTINPSTLGQFTRSVLGSSTVSKSSVSASESIAEDLEEPSYKRERLTSFTDLQVIRAAPEKIVTKEDLEKNIEIILTETETLRFFDLPTVMVSVESEEAEKVTQRNKNYEVLCRNRLGNDLYVERMMQTFNGAPKNKDVQCDKIIMEDKGIMSTAWDLYDSYNAMELVSLSVKQSVVESSSKANVLPKDQDQRLPGSTTEKNSETSSLMDIENVILAKIHEDEEDHSDAILKSDKFHQDLFFMERVLMENIFQPKLAAYRQLPVLKEPEPEEPEDVLESAKHEEVEEESKKEEEEEIHAEESTIPANLERLWSFSCDLTKGLNVSSLAWNKTNPDLLAVGYGHFGFKEQKRGLACCWSIKNPMVTQTRIRSIFIWLLTKFS

SEQ ID NO: 35 - DNA, 4972 bp, Homosapiens
ctggaagaaggaggcgggcggcccgggcctcaggcccctcccaggctctgagtctcccggctgcaggcggattggatggggcttcttcaggcggtggcggcagcagcgaaggtggcggcggcagcagcggcagcggctatggtgtggtcgctcgattctcccagtgcctggctgagtttcggacgtggttaagaaccaactggttgaggttcaatgcagacaagacggatgtgatgctgaaaatgtgcatcagatgtttatgtttaattggtttacagactgtctgtggactcttttcctgtcaaattacccagccatctgttgaatcttcaagtccaggaggttcagcaacatcagatgaccatgaatttgatccatcagctgacatgctggttcatgattttgatgatgaacgaacattagaagaggaagaaatgatggaaggagaaacaaacttcagctctgaaatagaagatcttgcaagggaaggcgacatgccaattcatgaacttctcagcctttatggttatggtagtactgttcgactacctgaagaagatgaggaagaggaagaagaggaagaagaaggtgaagatgatgaagatgctgataatgatgacaacagtggctgtagtggggaaaataaagaggagaatataaaggattcatcaggtcaggaggatgaaactcagtcttccaatgatgatccatcacaatctgttgcttctcaagatgcccaggaaataatccgcccacgtcgatgtaaatattttgatacaaatagtgaagtagaagaagaatctgaagaagatgaagattatattccatcagaagactggaaaaaggagattatggtgggctccatgtttcaagcagaaattccagttggcatttgtagatacaaagaaaatgaaaaagtatatgaaaatgatgatcagctcctgtgggaccctgagtacttaccagaagataaagtgattatatttcttaaagatgcatctagaagaacaggtgatgagaagggtgtagaagcaattcctgaaggatctcacataaaagacaatgaacaggctttatatgaattggttaaatgcaattttgatacagaagaagcattgagaagattaagatttaatgtaaaagcagctagagaggaattatctgtttggacagaggaagagtgtagaaattttgaacaagggctgaaggcctatggaaaggattttcatttgattcaggctaataaagtccgaacaaggtcagttggtgaatgtgtagcattctattacatgtggaaaaaatctgaacgttatgatttctttgctcagcaaacacgatttggaaagaagaaatataatcttcatcctggtgtaacggattacatggatcgtcttctagacgaaagtgaaagtgctgcatctagtcgagcaccatcccctcccccaactgcatcaaacagtagtaacagccagtctgagaaagaagatggcactgtaagcactgctaatcaaaatggagtgtcatctaatggaccaggtgaaatattaaacaaagaggaagtaaaagttgaagggttacacattaatggaccaacaggtggaaataagaaaccacttcatgcagatatggatactaatggttatgaaacagataaccttaccactgacccaaaacttgcccatatgactgcaagaaatgaaaatgattttgatgaaaaaagtgagagacctgccaaaaggcgaagggtaaacagcaatggaaaagaaagtccaggttcttctgaatttttccaagaagcagtctcacatgggaaatttgaagaacttgaaaacacagatgactaaattttagacctattttactttctttggagtaaattctggtgtgactaaaattttcagggttgatgggttaccttaaaaagttgatttccttgaagcagtttgaaaatttgaattgagtcttaactttaggaaatgaggtttcataattctgccttttgcagattttttttactttaaagctgtcagactcttttaagggtattttaaaaattagtaaatttgaatgaactaaagatatatctctaccttctcatttgaatatctttagttcattcagatttactaattttggtaaatctgaatgaactaaagatgtatctgtaccttctcatttgatgtattaatcataaaatttcactacaaggtaatttttgcttagtttgatggatgaatgggaaactcaagtccaaatttctgcttaataccaatttctctgagtttcttgaaatgtctttaaaacagacatttttctcaccaaacagtttgagtatctttattaaggaaacccttacgaatcctgaaaattatgctagcatgatttttttatatatagaagtttaaaaataaaccaggtcaggtttgtatatgtaaaattgttgacatcaatgatgtctttccatattcttatctgggcttaagaaatacattctgtatttttccagattctttgtagcctttgaaagatttttacagtacatatgtcttgactgagctgtcctttcttaatacaaaagcgtgtataattttcttaacttgtacagttggtaaacttttatgagaggaattgttattctgagtctgtcagctttcattttattttgctaaggtttttctaatgaatttttaagtgtttgtgtagtaattaagtcatatttcttatccaggtggttaaagcattcataaaggattataaaatttttttttttttttttttaaatttctacttaagggcaagtaatttgagaattctgaaattaagcatgatgcttagattgcagtttgttttgcatttgctctaattttcaaaattatttttgaagcaagacaaaagtttaatgtcagcttaagtgcttaaatatatcatgctgaccagaatcctgttatttttatatgcatcataaaatttcccatttctgcattaaataaacagaggaggggggtcaagtgatacttagatattggcacacacaaggaacaactgttggcaggcagtatcgattttatgaagagaaagtgaagtttgaaaacttttcaaacttttctagttacaatccaatttttcagatttgataatgcttttccaaagtgaaaataagatacacaataatcattgctttttgtgattacagataggattatccatctgcatagccttgtaaaagtgccattttatttttagtgctaaattcttgttaaataatgtagttttatatagctgatagaccaacctatatccaaacttttataaaatattaattattcttgtttttctcacacaggcatactccaaatgcttcttccagttcatttttcagccatcagttcaagagccaatgcctttttaaaataaagcttctgtggtcttgtttttaatggctcaactgtctgatgtaattgagtgaaggtttgcactgagaaattagcattcaggccttacccccatgaagtattactgttaacatatgttcggactgcttcccttcaccaatgtgaacaactttttttcccaaacagtattaaaagccactttgcaacacttgacttcatcttaatgtacattcactgttgttacatacatatctaagtaaatcaaagttttgggtggaagtgttgagaagtatgagttttttgttgtttttgttttacttaaaacttttaatttatccagaatggcagtagctttagcaagcagatggtcacaatctgttttctaaatcattttttattaaatgaatccaaagtatcctagctctttgtcaaagatggtctgtagaaatgtttttaaagattagggatgctgtactttttgaattgttgcagtgttggagatgccattttcacctttttaaaaagatgcattttatttgcaggtttgtgaagttcttgcaaactcttactacagaaatgttttaaatacattctcaggcatgtttgcaaaaatatggcacatgtatacattttaggaaatgttacttttgttaatctttaaaaaatacacctaatgaaagacattccactattatgcgtaatgctcagctttttgtaaagaaatatttaattgtattttgtgtttatacaggtatttcacacaataatttgttcttaatgcagccactataacttgataagtcattgcactatttaaaaagttttagtaatatcatgaatttaatttgcttaagatttagtacatttcagaacttttgaacttttgacaaattgcattgggaaaagaagtctgttaatagtgatttagtctccccgcctcattcccacccccaacaaagcactatcattttcatttggaatgggtatttttctgtttcatgatgtattttcaaatagagttcaggatctgcaattcagttcaacacaagtttgttgagctttaaaatgtatttgaagtaatatttaaataggcatttaaaatttcaaattagatgttaaatttatgcatagtaattttgcactgtaaaataattcccttctcccattccttgtctgccattctgaatatgcttattaaaatatttttttaaacatatttgcctacataatactgtgtgaatattttcattagattaattcactaagattttattagagattgtttgaatgatgcatgttattgacaaggcaaatatatatatatacacagtctgtttcttctattcctagacatattgcactactttttcagtggttcttggtcccctttaccacatcttgggtgatgtatttttgtcttcttcccctttgccacaagagatcctttcagtccctagacctccattcactctgtttctcttctgctggattatataatttaaaaataatgtgttcccgtattttgtagtggagttcatatcacattatgttttgcaaaataaaacttgttttgtcacaat

SEQ ID NO: 36 - protein, 536 aa, Homosapiens
MLKMCIRCLCLIGLQTVCGLFSCQITQPSVESSSPGGSATSDDHEFDPSADMLVHDFDDERTLEEEEMMEGETNFSSEIEDLAREGDMPIHELLSLYGYGSTVRLPEEDEEEEEEEEEGEDDEDADNDDNSGCSGENKEENIKDSSGQEDETQSSNDDPSQSVASQDAQEIIRPRRCKYFDTNSEVEEESEEDEDYIPSEDWKKEIMVGSMFQAEIPVGICRYKENEKVYENDDQLLWDPEYLPEDKVIIFLKDASRRTGDEKGVEAIPEGSHIKDNEQALYELVKCNFDTEEALRRLRFNVKAAREELSVWTEEECRNFEQGLKAYGKDFHLIQANKVRTRSVGECVAFYYMWKKSERYDFFAQQTRFGKKKYNLHPGVTDYMDRLLDESESAASSRAPSPPPTASNSSNSQSEKEDGTVSTANQNGVSSNGPGEILNKEEVKVEGLHINGPTGGNKKPLHADMDTNGYETDNLTTDPKLAHMTARNENDFDEKSERPAKRRRVNSNGKESPGSSEFFQEAVSHGKFEELENTDD

SEQ ID NO: 37 - DNA, 1272 bp, Homosapiens
cccgccgccaggccaccgctgctgcggcagccatggcggaagttcatagacgtcagcatgctcgggttaaaggagaagcccccgcgaaatcctccacactccgagatgaggaggagctggggatggcgtcggccgaaacgctgaccgtgtttctgaagctgctggccgccggcttttacggcgtgagctccttcctgatcgtggtggtgaataagagcgtgctcaccaattacagatttccctcctcactatgtgttggacttggccagatggtggccacagtggcagttctctgggtgggaaaggcgctcagagtagtcaagtttcctgaccttgacagaaatgtacctcgaaagacgtttccactacctctactatattttgggaaccaaatcacgggactgttcagcacaaagaaactgaacttgccaatgtttacagttctgagaaggttctccatcctgtttacaatgtttgctgaaggagttttactcaagaagactttttcttggggtattaaaatgactgtatttgcaatgattattggagcctttgtagctgccagctctgacttggcatttgatctggaaggatatgcttttattctgataaacgatgtcctaacagcagcaaatggtgcatacgtaaaacaaaaattagattcaaaagagctgggaaaatatggactgctctattacaatgcactgttcatgattctgcccaccctggccattgcgtatttcacaggagatgcacaaaaggctgtggagtttgaaggctgggctgacaccctctttcttctgcagttcaccctctcctgtgtgatggggtttatcttaatgtacgccacagtactctgcacgcagtataattctgctcttacaactacaatagttggctgtattaagaatatattaataacttatattggaatggtctttggtggagattatattttcacgtggacaaacttcattggtttaaatatcagcattgctgggagcctggtatattcctatatcactttcactgaagagcagctgagcaaacagtcagaggctaataacaagctggacattaaggggaaaggagcagtgtgaccagaggattgcttcatctgatacgtaggcctaagtttttaatcaactcagaacactggcagttcctacagagacactgaggtgtcttgattatggaggaaataaccattcctttgcacttgtacaatctgaggattgattgctgccttttaaaattttatgaagagagaaa

SEQ ID NO: 38 - protein, 355 aa, Homosapiens
MAEVHRRQHARVKGEAPAKSSTLRDEEELGMASAETLTVFLKLLAAGFYGVSSFLIVVVNKSVLTNYRFPSSLCVGLGQMVATVAVLWVGKALRVVKFPDLDRNVPRKTFPLPLLYFGNQITGLFSTKKLNLPMFTVLRRFSILFTMFAEGVLLKKTFSWGIKMTVFAMIIGAFVAASSDLAFDLEGYAFILINDVLTAANGAYVKQKLDSKELGKYGLLYYNALFMILPTLAIAYFTGDAQKAVEFEGWADTLFLLQFTLSCVMGFILMYATVLCTQYNSALTTTIVGCIKNILITYIGMVFGGDYIFTWTNFIGLNISIAGSLVYSYITFTEEQLSKQSEANNKLDIKGKGAV

SEQ ID NO: 39 - DNA, 2143 bp, Homosapiens
gagacagggtttcagtatgttggccaggctggtcttgaactcctgacctcaagtgatctgcccgcctcggcctcccaaagtgctgggattacaggaatttagtgattgacaatggcagaaaaaatcctagagaagttggatgtccttgataagcaagcagagataatcttggccagaagaacaaagataaacaggcttcagagtgaaggaagaaaaacaactatggctatacccctgacatttgattttcagttggaatttgaagaagctcttgctacatccgcgtctaaggcaatatcaaagatcaaagaagacaagtcatgcagcattacaaaatcaaaaatgcatgtctctttcaaatgtgagcctgaacctagaaagagtaattttgaaaagtcaaatttaagaccattctttattcaaacaaatgtaaaaaataaagaaagtgagtcaacagctcaaattgaaaaaaaacctaggaaaccattggattctgttggtctcttagaaggtgatagaaataaaagaaaaaaatctccacagatgaacgattttaatataaaagaaaacaaatcggtcagaaattatcaattaagtaagtataggtcagtaagaaagaaaagcttgctcccgttgtgctttgaggatgaattgaaaaatccacatgccaagatagtcaacgttagtccaacaaagacagtaacttctcacatggaacaaaaggacacaaatcccataattttccatgacacagaatatgtacgaatgttacttttgacaaaaaatagattttcttctcatcctttggaaaatgaaaacatttacccacataaaagaacaaatttcattttagaaagaaattgtgaaatcctcaaatctataattggcaatcaatctatttctcttttcaaaccccaaaaaactatgcctacagtacagagaaaagatatacagatccctatgtcttttaaagcgggccacacaactgtagatgataaactaaagaagaaaactaataagcagacactagaaaacagatcttggaatacactctataatttctcacagaatttttctagcctaacaaaacaatttgtgggttaccttgataaagctgttattcatgaaatgagtgcccaaactggaaaatttgaaagaatgttttctgcaggaaaaccaacgagcatacccacatccagtgccttacctgtcaaatgttactcaaagccttttaaatatatatatgaactaaataatgtaacgccactggataatttgttaaacttatcaaatgaaattttaaatgcctcataaaatattatgtatgcagcaatatttgagtaacaagaagcaaatatccaagttccaaaattataaaagaaattcttatccaaatagtaatgttctaattgatcatataagaaagcaaagcatagacattagaattataagtcagcagtggtctgttcaagaacaatcaacatttttagaaaatagtaggacaaaattaggaaataattatcaccaagaggatctagttcatgactttctattatctcaattagattgctcaatcatcagccttcctatactaaactctgattcaggaccaagaaaggcatagtctgactctggaaatgcgctgttggaagccaaataacatcaatactcttgttctataattgaatatcaaataagacaaattaccattaatttaatgactgtggagttaattgtataccagcatttcagcaaatcatcatcaatagtattacattagcaatttatgcaattaaaagggctttgtaaaactttgaatagattttattgtcattagtagctgttggaacttcattattatataatgtttttgcaaactttaacttttttctaaattgttaaataaaagaataactatccttaatctaaataattttggtagcaaatcctataaggtattaaacattttaaggtatattattacattgctattttactgtttctcattaacccaaacagtttaaaggcagaattccacttagaaacaagttgcattttgaaagtttatttgtaatccatttgtttggaattcagaaatgtatttcacataaaaataatcttggaagtaataaattccaaaatt

SEQ ID NO: 40 - protein, 400 aa, Homosapiens
MAEKILEKLDVLDKQAEIILARRTKINRLQSEGRKTTMAIPLTFDFQLEFEEALATSASKAISKIKEDKSCSITKSKMHVSFKCEPEPRKSNFEKSNLRPFFIQTNVKNKESESTAQIEKKPRKPLDSVGLLEGDRNKRKKSPQMNDFNIKENKSVRNYQLSKYRSVRKKSLLPLCFEDELKNPHAKIVNVSPTKTVTSHMEQKDTNPIIFHDTEYVRMLLLTKNRFSSHPLENENIYPHKRTNFILERNCEILKSIIGNQSISLFKPQKTMPTVQRKDIQIPMSFKAGHTTVDDKLKKKTNKQTLENRSWNTLYNFSQNFSSLTKQFVGYLDKAVIHEMSAQTGKFERMFSAGKPTSIPTSSALPVKCYSKPFKYIYELNNVTPLDNLLNLSNEILNAS

SEQ ID NO: 41 - DNA, 2826 bp, Homosapiens
acaagggtggcagcctggctctgaagtggaattatgtgcttcaaacaggttgaaagagggaaacagtcttttcctgcttccagacatgaatcaggtcactattcaatgggatgcagtaatagccctttacatactcttcagctggtgtcatggaggaattacaaatataaactgctctggccacatctgggtagaaccagccacaatttttaagatgggtatgaatatctctatatattgccaagcagcaattaagaactgccaaccaaggaaacttcatttttataaaaatggcatcaaagaaagatttcaaatcacaaggattaataaaacaacagctcggctttggtataaaaactttctggaaccacatgcttctatgtactgcactgctgaatgtcccaaacattttcaagagacactgatatgtggaaaagacatttcttctggatatccgccagatattcctgatgaagtaacctgtgtcatttatgaatattcaggcaacatgacttgcacctggaatgctgggaagctcacctacatagacacaaaatacgtggtacatgtgaagagtttagagacagaagaagagcaacagtatctcacctcaagctatattaacatctccactgattcattacaaggtggcaagaagtacttggtttgggtccaagcagcaaacgcactaggcatggaagagtcaaaacaactgcaaattcacctggatgatatagtgataccttctgcagccgtcatttccagggctgagactataaatgctacagtgcccaagaccataatttattgggatagtcaaacaacaattgaaaaggtttcctgtgaaatgagatacaaggctacaacaaaccaaacttggaatgttaaagaatttgacaccaattttacatatgtgcaacagtcagaattctacttggagccaaacattaagtacgtatttcaagtgagatgtcaagaaacaggcaaaaggtactggcagccttggagttcactgttttttcataaaacacctgaaacagttccccaggtcacatcaaaagcattccaacatgacacatggaattctgggctaacagttgcttccatctctacagggcaccttacttctgacaacagaggagacattggacttttattgggaatgatcgtctttgctgttatgttgtcaattctttctttgattgggatatttaacagatcattccgaactgggattaaaagaaggatcttattgttaataccaaagtggctttatgaagatattcctaatatgaaaaacagcaatgttgtgaaaatgctacaggaaaatagtgaacttatgaataataattccagtgagcaggtcctatatgttgatcccatgattacagagataaaagaaatcttcatcccagaacacaagcctacagactacaagaaggagaatacaggacccctggagacaagagactacccgcaaaactcgctattcgacaatactacagttgtatatattcctgatctcaacactggatataaaccccaaatttcaaattttctgcctgagggaagccatctcagcaataataatgaaattacttccttaacacttaaaccaccagttgattccttagactcaggaaataatcccaggttacaaaagcatcctaattttgctttttctgtttcaagtgtgaattcactaagcaacacaatatttcttggagaattaagcctcatattaaatcaaggagaatgcagttctcctgacatacaaaactcagtagaggaggaaaccaccatgcttttggaaaatgattcacccagtgaaactattccagaacagaccctgcttcctgatgaatttgtctcctgtttggggatcgtgaatgaggagttgccatctattaatacttattttccacaaaatattttggaaagccacttcaataggatttcactcttggaaaagtagagctgtgtggtcaaaatcaatatgagaaagctgccttgcaatctgaacttgggttttccctgcaatagaaattgaattctgcctctttttgaaaaaaatgtattcacatacaaatcttcacatggacacatgttttcatttcccttggataaatacctaggtaggggattgctgggccatatgataagcatatgtttcagttctaccaatcttgtttccagagtagtgacatttctgtgctcctaccatcaccatgtaagaattcccgggagctccatgcctttttaattttagccattcttctgcctcatttcttaaaattagagaattaaggtcccgaaggtggaacatgcttcatggtcacacatacaggcacaaaaacagcattatgtggacgcctcatgtattttttatagagtcaactatttcctctttattttccctcattgaaagatgcaaaacagctctctattgtgtacagaaagggtaaataatgcaaaatacctggtagtaaaataaatgctgaaaattttcctttaaaatagaatcattaggccaggcgtggtggctcatgcttgtaatcccagcactttggtaggctgaggtaggtggatcacctgaggtcaggagttcgagtccagcctggccaatatgctgaaaccctgtctctactaaaattacaaaaattagccggccatggtggcaggtgcttgtaatcccagctacttgggaggctgaggcaggagaatcacttgaaccaggaaggcagaggttgcactgagctgagattgtgccactgcactccagcctgggcaacaagagcaaaactctgtctggaaaaaaaaaaaaaa

SEQ ID NO: 42 - protein, 629 aa, Homosapiens
MNQVTIQWDAVIALYILFSWCHGGITNINCSGHIWVEPATIFKMGMNISIYCQAAIKNCQPRKLHFYKNGIKERFQITRINKTTARLWYKNFLEPHASMYCTAECPKHFQETLICGKDISSGYPPDIPDEVTCVIYEYSGNMTCTWNAGKLTYIDTKYVVHVKSLETEEEQQYLTSSYINISTDSLQGGKKYLVWVQAANALGMEESKQLQIHLDDIVIPSAAVISRAETINATVPKTIIYWDSQTTIEKVSCEMRYKATTNQTWNVKEFDTNFTYVQQSEFYLEPNIKYVFQVRCQETGKRYWQPWSSLFFHKTPETVPQVTSKAFQHDTWNSGLTVASISTGHLTSDNRGDIGLLLGMIVFAVMLSILSLIGIFNRSFRTGIKRRILLLIPKWLYEDIPNMKNSNVVKMLQENSELMNNNSSEQVLYVDPMITEIKEIFIPEHKPTDYKKENTGPLETRDYPQNSLFDNTTVVYIPDLNTGYKPQISNFLPEGSHLSNNNEITSLTLKPPVDSLDSGNNPRLQKHPNFAFSVSSVNSLSNTIFLGELSLILNQGECSSPDIQNSVEEETTMLLENDSPSETIPEQTLLPDEFVSCLGIVNEELPSINTYFPQNILESHFNRISLLEK

SEQ ID NO: 43 - DNA, 4040 bp, Homosapiens
tgcagagcacagagaaaggacatctgcgaggaaagttccctgatggctgtcaacaaagtgccacgtctctatggctgtgaacgctgagcacacgattttatcgcgcctatcatatcttggtgcataaacgcacctcacctcggtcaacccttgctccgtcttatgagacaggctttattatccgcattttatatgaggggaaactgacggtggagagagaattatcttgctcaaggcgacacagcagagcccacaggtggcagaatcccacccgagcccgcttcgacccgcggggtggaaaccacgggcgcccgcccggctgcgcttccagagctgaactgagaagcgagtcctctccgccctgcggccaccgcccagccccgacccccgccccggcccgatcctcactcgccgccagctccccgcgcccaccccggagttggtggcgcagaggcgggaggcggaggcgggagggcgggcgctggcaccgggaacgcccgagcgccggcagagagcgcggagagcgcgacacgtgcggcccagagcaccggggccacccggtccccgcaggcccgggaccgcgcccgctggcaggcgacacgtggaagaatacggagttctataccagagttgattgttgatggcacatacttttagaggatgctcattggcatttatgtttataatcacgtggctgttgattaaagcaaaaatagatgcgtgcaagagaggcgatgtgactgtgaagccttcccatgtaattttacttggatccactgtcaatattacatgctctttgaagcccagacaaggctgctttcactattccagacgtaacaagttaatcctgtacaagtttgacagaagaatcaattttcaccatggccactccctcaattctcaagtcacaggtcttccccttggtacaaccttgtttgtctgcaaactggcctgtatcaatagtgatgaaattcaaatatgtggagcagagatcttcgttggtgttgctccagaacagcctcaaaatttatcctgcatacagaagggagaacaggggactgtggcctgcacctgggaaagaggacgagacacccacttatacactgagtatactctacagctaagtggaccaaaaaatttaacctggcagaagcaatgtaaagacatttattgtgactatttggactttggaatcaacctcacccctgaatcacctgaatccaatttcacagccaaggttactgctgtcaatagtcttggaagctcctcttcacttccatccacattcacattcttggacatagtgaggcctcttcctccgtgggacattagaatcaaatttcaaaaggcttctgtgagcagatgtaccctttattggagagatgagggactggtactgcttaatcgactcagatatcggcccagtaacagcaggctctggaatatggttaatgttacaaaggccaaaggaagacatgatttgctggatctgaaaccatttacagaatatgaatttcagatttcctctaagctacatctttataagggaagttggagtgattggagtgaatcattgagagcacaaacaccagaagaagagcctactgggatgttagatgtctggtacatgaaacggcacattgactacagtagacaacagatttctcttttctggaagaatctgagtgtctcagaggcaagaggaaaaattctccactatcaggtgaccttgcaggagctgacaggagggaaagccatgacacagaacatcacaggacacacctcctggaccacagtcattcctagaaccggaaattgggctgtggctgtgtctgcagcaaattcaaaaggcagttctctgcccactcgtattaacataatgaacctgtgtgaggcagggttgctggctcctcgccaggtctctgcaaactcagagggcatggacaacattctggtgacttggcagcctcccaggaaagatccctctgctgttcaggagtacgtggtggaatggagagagctccatccagggggtgacacacaggtccctctaaactggctacggagtcgaccctacaatgtgtctgctctgatttcagagaacataaaatcctacatctgttatgaaatccgtgtgtatgcactctcaggggatcaaggaggatgcagctccatcctgggtaactctaagcacaaagcaccactgagtggcccccacattaatgccatcacagaggaaaaggggagcattttaatttcatggaacagcattccagtccaggagcaaatgggctgcctcctccattataggatatactggaaggaacgggactccaactcccagcctcagctctgtgaaattccctacagagtctcccaaaattcacatccaataaacagcctgcagccccgagtgacatatgtcctgtggatgacagctctgacagctgctggtgaaagttcccacggaaatgagagggaattttgtctgcaaggtaaagccaattggatggcgtttgtggcaccaagcatttgcattgctatcatcatggtgggcattttctcaacgcattacttccagcaaaaggtgtttgttctcctagcagccctcagacctcagtggtgtagcagagaaattccagatccagcaaatagcacttgcgctaagaaatatcccattgcagaggagaagacacagctgcccttggacaggctcctgatagactggcccacgcctgaagatcctgaaccgctggtcatcagtgaagtccttcatcaagtgaccccagttttcagacatcccccctgctccaactggccacaaagggaaaaaggaatccaaggtcatcaggcctctgagaaagacatgatgcacagtgcctcaagcccaccacctccaagagctctccaagctgagagcagacaactggtggatctgtacaaggtgctggagagcaggggctccgacccaaagcccgaaaacccagcctgtccctggacggtgctcccagcaggtgaccttcccacccatgatggctacttaccctccaacatagatgacctcccctcacatgaggcacctctcgctgactctctggaagaactggagcctcagcacatctccctttctgttttcccctcaagttctcttcacccactcaccttctcctgtggtgataagctgactctggatcagttaaagatgaggtgtgactccctcatgctctgagtggtgaggcttcaagccttaaagtcagtgtgccctcaaccagcacagcctgccccaattcccccagcccctgctccagcagctgtcatctctgggtgccaccatcggtctggctgcagctagaggacaggcaagccagctctgggggagtcttaggaactgggagttggtcttcactcagatgcctcatcttgcctttcccagggccttaaaattacatccttcactgtgtggacctagagactccaacttgaattcctagtaactttcttggtatgctggccagaaagggaaatgaggaggagagtagaaaccacagctcttagtagtaatggcatacagtctagaggaccattcatgcaatgactatttctaaagcacctgctacacagcaggctgtacacagcagatcagtactgttcaacagaacttcctgagatgatggaaatgttctacctctgcactcactgtccagtacattagacactaggcacattggctgttaatcacttggaatgtgtttagcttgactgaggaattaaattttgattgtaaatttaaatcgccacacatggctagtggctactgtattggagtgcacagctctagatggctcctagattattgagagccttcaaaacaaatcaacctagttctatagatgaagacataaaagacactggtaaacaccaaggtaaaagggcccccaaggtggtcatgactggtctcatttgcagaagtctaagaatgtacctttttctggccgggcgtggtagctcatgcctgtaatcccagcactttgggaggctga

SEQ ID NO: 44 - protein, 862 aa, Homosapiens
MAHTFRGCSLAFMFIITWLLIKAKIDACKRGDVTVKPSHVILLGSTVNITCSLKPRQGCFHYSRRNKLILYKFDRRINFHHGHSLNSQVTGLPLGTTLFVCKLACINSDEIQICGAEIFVGVAPEQPQNLSCIQKGEQGTVACTWERGRDTHLYTEYTLQLSGPKNLTWQKQCKDIYCDYLDFGINLTPESPESNFTAKVTAVNSLGSSSSLPSTFTFLDIVRPLPPWDIRIKFQKASVSRCTLYWRDEGLVLLNRLRYRPSNSRLWNMVNVTKAKGRHDLLDLKPFTEYEFQISSKLHLYKGSWSDWSESLRAQTPEEEPTGMLDVWYMKRHIDYSRQQISLFWKNLSVSEARGKILHYQVTLQELTGGKAMTQNITGHTSWTTVIPRTGNWAVAVSAANSKGSSLPTRINIMNLCEAGLLAPRQVSANSEGMDNILVTWQPPRKDPSAVQEYVVEWRELHPGGDTQVPLNWLRSRPYNVSALISENIKSYICYEIRVYALSGDQGGCSSILGNSKHKAPLSGPHINAITEEKGSILISWNSIPVQEQMGCLLHYRIYWKERDSNSQPQLCEIPYRVSQNSHPINSLQPRVTYVLWMTALTAAGESSHGNEREFCLQGKANWMAFVAPSICIAIIMVGIFSTHYFQQKVFVLLAALRPQWCSREIPDPANSTCAKKYPIAEEKTQLPLDRLLIDWPTPEDPEPLVISEVLHQVTPVFRHPPCSNWPQREKGIQGHQASEKDMMHSASSPPPPRALQAESRQLVDLYKVLESRGSDPKPENPACPWTVLPAGDLPTHDGYLPSNIDDLPSHEAPLADSLEELEPQHISLSVFPSSSLHPLTFSCGDKLTLDQLKMRCDSLML

SEQ ID NO: 45 - DNA, 6764 bp, Homosapiens
cggatgtgtgcctggcgccggaagagaagacggcccccctctctcggcccggccatcttgtgggaagagctgaagcaggcgctcttggctcggcgcggcccgctgcaatccgtggaggaacgcgccgccgagccaccatcatgcctgggcacttacaggaaggcttcggctgcgtggtcaccaaccgattcgaccagttatttgacgacgaatcggaccccttcgaggtgctgaaggcagcagagaacaagaaaaaagaagccggcgggggcggcgttgggggccctggggccaagagcgcagctcaggccgcggcccagaccaactccaacgcggcaggcaaacagctgcgcaaggagtcccagaaagaccgcaagaacccgctgccccccagcgttggcgtggttgacaagaaagaggagacgcagccgcccgtggcgcttaagaaagaaggaataagacgagttggaagaagacctgatcaacaacttcagggtgaagggaaaataattgatagaagaccagaaaggcgaccacctcgtgaacgaagattcgaaaagccacttgaagaaaagggtgaaggaggcgaattttcagttgatagaccgattattgaccgacctattcgaggtcgtggtggtcttggaagaggtcgagggggccgtggacgtggaatgggccgaggagatggatttgattctcgtggcaaacgtgaatttgataggcatagtggaagtgatagatcttctttttcacattacagtggcctgaagcacgaggacaaacgtggaggtagcggatctcacaactggggaactgtcaaagacgaattaacagagtcccccaaatacattcagaaacaaatatcttataattacagtgacttggatcaatcaaatgtgactgaggaaacacctgaaggtgaagaacatcatccagtggcagacactgaaaataaggagaatgaagttgaagaggtaaaagaggagggtccaaaagagatgactttggatgagtggaaggctattcaaaataaggaccgggcaaaagtagaatttaatatccgaaaaccaaatgaaggtgctgatgggcagtggaagaagggatttgttcttcataaatcaaagagtgaagaggctcatgctgaagattcggttatggaccatcatttccggaagccagcaaatgatataacgtctcagctggagatcaattttggagaccttggccgcccaggacgtggcggcaggggaggacgaggtggacgtgggcgtggtgggcgcccaaaccgtggcagcaggaccgacaagtcaagtgcttctgctcctgatgtggatgacccagaggcattcccagctctggcttaactggatgccataagacaaccctggttcctttgtgaacccttctgttcaaagcttttgcatgcttaaggattccaaacgactaagaaattaaaaaaaaaaagactgtcattcataccattcacacctaaagactgaattttatctgttttaaaaatgaacttctcccgctacacagaagtaacaaatatggtagtcagttttgtatttagaaatgtattggtagcagggatgttttcataattttcagagattatgcattcttcatgaatacttttgtattgctgcttgcaaatatgcatttccaaacttgaaatataggtgtgaacagtgtgtaccagtttaaagctttcacttcatttgtgttttttaattaaggatttagaagttcccccaattacaaactggttttaaatattggacatactggttttaatacctgctttgcatattcacacatggtcaactgggacatgttaaactttgatttgtcaaattttatgctgtgtggaatactaactatatgtattttaacttagttttaatattttcatttttggggaaaaatcttttttcacttctcatgatagctgttatatatatatgctaaatctttatatacagaaatatcagtacttgaacaaattcaaagcacatttggtttattaacccttgctccttgcatggctcattaggttcaaattataactgatttacattttcagctatatttactttttaaatgcttgagtttcccattttaaaatctaaactagacatcttaattggtgaaagttgtttaaactacttattgttggtaggcacatcgtgtcaagtgaagtagttttataggtatgggttttttctcccccttcaccagggtgggtggaataagttgatttggccaatgtgtaatatttaaactgttctgtaaaataagtgtctggccatttggtatgatttctgtgtgtgaaaggtcccaaaatcaaaatggtacatccataatcagccaccatttaacccttccttgttctaaaacaaaaaccaaagggcgctggttggtagggtgaggtgggggagtattttaatttttggaatttgggaagcagacagctttactttgtaaggttggaacagcagcactatacatgaaatataaaccaaaaacctttactgtttctaaatttcctagattgctattatttggttgtaagttgagtattccacagaaagtggtaattatctcttctctcttcctccattagaaaattaggtaaataatggattcctataatgggagcatcaccacttattaaaacacacatagaatgatgaattaaaaaagttttctaggattgtcttttattctgccacatttattgataaacagtgaaggaatttttaaaaaatttttaagaattgtttgtcacgtcatttttagaaatgttctacctgtatatggtaatgtccagttttaaaaatattggacatcttcaatcttaaacatttctatttagctgattggttctcacatatacttctaaaagaaacttttatgttataagagttactttttggataagatttattaatctcagttacctactattctgacattttaggaaggaggtaattgtttttaatgatggataaacttgtgctggtgttttggatcttatgatgctgagcatgttctgcactggtgctaatgtctaatataattttatatttacacacatacgtgctacccagagattaatttagtccatatgaactattgacccattgttcattgagacagcaacatacgcactcctaaatcagtgtgtttagacttttcaagtatctaactcatttccaaacatgtaccatgttttataaacctcttgatttccagcaacatactatagaaaacacctgctactcaaaacacaacttctcagtgtcatccattgctgtcgtgagagacaacatagcaatatctggtatgttgcaagctttcaagatagcctgaacttaaaaagttggtgcattagttgtatctgatggatataaatttgcctcctagttcactttgtgtcaagagctaaaactgtgaacctaactttctcttattggtgggtaataactgaaaataaagatttattttcatgctcacttcttaaaagtcataaaaacaatcaaataggatcatgtttattgtcatgtgtttcctggtttctgacctgtgtgcacacccctgtgtgtttataatttttaaattgaattttatatggggtttttatttgctaaaaaccaggctgttgaatcacatttgggaagggtacttatcttaatgactaatgacttaattgggaaagttgaattcttgtaaaatacaaaatccaaggacttcttggatttaatctgattgtcacttcttagcagatcacttttttgataatgaaagttaagcatactgaatgctacttttgattgacaaactggctataatagtctaggggaaaaatccctaaacagataaagattcctaaagtaatggtggcagctgatgtttcagtgaacttttatcttgatgcgtttaaatggaagtaatgccagacctgagatttttaaggcatttttacagcttgtattgaaatgattggagacatggtttctttattagctattttgagacctgtggagttaagcaagacttttaaaaattggcaccatatacatctagttagttcctttactcttatttttttaaataaaagtagtacacatcatttccagggttgtaaatatatttggggcttgtttttggtatggatttaaaaggaggatattaagtattcattctaattttgttatttttctagttgccagagatggttgcactgaaatagaacagggagttgcatacaaagcctaaatgtgtattggatttcgaaaatactaggttggtgcaattggttttgtaccaacctaacatgtctttaggaaagtaccatcatgtggaaggaaacaacaggtgttaaaaggttcaaaggaatgagaaataggaagttactagaacctaactgatgttgaccttagaggtaagattattcaggtatattagtggacctccagtccaatggtatagcaaattccagggatctcaggtgcatgcaattttactttctaaagtaaacacttagaaaatagattataacccagacgttttggattatactgagacaaatatgtaaataagttttagcaagtctgaacatgtaccagcgagatcttcaggttaactaagaaaagcccagaaacttcattatttactgtgctttgtatggcataactggtaacaaggcagtaaaatgatacatatttgaactggaccatagtaattaaatgatttatcaatatcatttgcaagataattgtcaggttgagttaatagtaagtggcagcttcccagaaatttgggttatttggcctaagctgtgccctgggattacctcttcatcttccttgacttttaagttcaaatttggaggttatgtgaagtgattgaaataaatctttcaggctgaggaagtcggtaatttcaagaatatagtgaaaacaaggttgtaatctaaacatgagaagcttaagtttaggaaatggttagaatataaattgctaaagccatcatgattttggccacagatgaaaatatgaacactggaaatgagcgccatttaaatgagatgctgtatgtaagccaggggtcagcaaagttcagcctgtgacctggtgtgtgtgggggtgtgtgtgtgtgtgtgtgtgtgtgtgtgtgtgtccgtgtccctgagttaagaatggtttttaggcttgtataggattaaaaaaaaaaaaaacccacagaaaaatgtaggcagcccagcataagataccgcctttcacagaaatgtttgctgaccccggaactgtcactctcgggttacaagagtttgtttctttgaaacagtctggctctgtcacccaggctggagtgcagtggcatgatctcaggtcactgcagcctccacctcccgggttcaagcaattctgcctcagcctcctgagtagctgggattacaggtgtgcaccaccacagacagctaattttacaggtgtacaccaccacacccaagaatcacttgaacccgggaggtgggggttgcagtgagccaagatcatagcactgtactccagtctgggtgacacactgtctgaaaaataaaagtttagttctaggtacaaattaagtggtctacccaacaggaagctgtgaaattagaagtaattttaaagcatactttacacctctatataatcaaagtaagggcaagataaaacttgttagtaaaacatgttttattattttttagataggtagcctgcaacataaaatatattttgaaagctgttaaggggtgtataatctgttaaaaaataccatgattagtatttcacatttagtgactcagatccctttgtgtaagtcctttgcgttgtgcaaagaggtttttctatgagatgagaattatgaacacttcatataggtaaattccataggttgagctggggcagaaattaatggctcctggagattgcatctttttttttttttttttgagcttagaattcccatttggacagaatttagcttttgtgctgttgattacttctgtactaaactggtagccaattgttcacttctaaatggaagggaaaaagttacccacacaagttagaaaatgatttaccgaattatttttttgagttagtatgtatatactgttttaaatcagtaatgtttgttccttttgctgcccatttgggagtatgtggcaattcctagtgctcttgtatgacattactcttcttgagacttgtatatgcaagaaagtatatataaaagatgcctggtggtaactttgtatctgagttctgattcattatggacttttagaaatctatttagataattggttcatactaggtgctcaattactctgaccttgtgtggcttaatccttaaatagttgctttaggtgttactgggtggaagcatggaaagtgaagggctaatattaaggatttttatgtattactgagtagggaaagtgggaagtagcttatctttggacagttgtattactttgcactaatcaccttgtttgcagttgtagctgattcagttctagattttaggaccaaaaagatctctaatttaaagaaacagtttttatatacctagaatgaagattctgtttaaagcggttttggttaacttggttcttgacatttgcctaaaattttgttggattgggactaaaatgttctattagccaatgaataacgtccaagtaaatttttgttttattttgggaa

SEQ ID NO: 46 - protein, 408 aa, Homosapiens
MPGHLQEGFGCVVTNRFDQLFDDESDPFEVLKAAENKKKEAGGGGVGGPGAKSAAQAAAQTNSNAAGKQLRKESQKDRKNPLPPSVGVVDKKEETQPPVALKKEGIRRVGRRPDQQLQGEGKIIDRRPERRPPRERRFEKPLEEKGEGGEFSVDRPIIDRPIRGRGGLGRGRGGRGRGMGRGDGFDSRGKREFDRHSGSDRSSFSHYSGLKHEDKRGGSGSHNWGTVKDELTESPKYIQKQISYNYSDLDQSNVTEETPEGEEHHPVADTENKENEVEEVKEEGPKEMTLDEWKAIQNKDRAKVEFNIRKPNEGADGQWKKGFVLHKSKSEEAHAEDSVMDHHFRKPANDITSQLEINFGDLGRPGRGGRGGRGGRGRGGRPNRGSRTDKSSASAPDVDDPEAFPALA

SEQ ID NO: 47 - DNA, 6746 bp, Homosapiens
cggatgtgtgcctggcgccggaagagaagacggcccccctctctcggcccggccatcttgtgggaagagctgaagcaggcgctcttggctcggcgcggcccgctgcaatccgtggaggaacgcgccgccgagccaccatcatgcctgggcacttacaggaaggcttcggctgcgtggtcaccaaccgattcgaccagttatttgacgacgaatcggaccccttcgaggtgctgaaggcagcagagaacaagaaaaaagaagccggcgggggcggcgttgggggccctggggccaagagcgcagctcaggccgcggcccagaccaactccaacgcggcaggcaaacagctgcgcaaggagtcccagaaagaccgcaagaacccgctgccccccagcgttggcgtggttgacaagaaagaggagacgcagccgcccgtggcgcttaagaaagaaggaataagacgagttggaagaagacctgatcaacaacttcagggtgaagggaaaataattgatagaagaccagaaaggcgaccacctcgtgaacgaagattcgaaaagccacttgaagaaaagggtgaaggaggcgaattttcagttgatagaccgattattgaccgacctattcgaggtcgtggtggtcttggaagaggtcgagggggccgtggacgtggaatgggccgaggagatggatttgattctcgtggcaaacgtgaatttgataggcatagtggaagtgatagatctggcctgaagcacgaggacaaacgtggaggtagcggatctcacaactggggaactgtcaaagacgaattaacagagtcccccaaatacattcagaaacaaatatcttataattacagtgacttggatcaatcaaatgtgactgaggaaacacctgaaggtgaagaacatcatccagtggcagacactgaaaataaggagaatgaagttgaagaggtaaaagaggagggtccaaaagagatgactttggatgagtggaaggctattcaaaataaggaccgggcaaaagtagaatttaatatccgaaaaccaaatgaaggtgctgatgggcagtggaagaagggatttgttcttcataaatcaaagagtgaagaggctcatgctgaagattcggttatggaccatcatttccggaagccagcaaatgatataacgtctcagctggagatcaattttggagaccttggccgcccaggacgtggcggcaggggaggacgaggtggacgtgggcgtggtgggcgcccaaaccgtggcagcaggaccgacaagtcaagtgcttctgctcctgatgtggatgacccagaggcattcccagctctggcttaactggatgccataagacaaccctggttcctttgtgaacccttctgttcaaagcttttgcatgcttaaggattccaaacgactaagaaattaaaaaaaaaaagactgtcattcataccattcacacctaaagactgaattttatctgttttaaaaatgaacttctcccgctacacagaagtaacaaatatggtagtcagttttgtatttagaaatgtattggtagcagggatgttttcataattttcagagattatgcattcttcatgaatacttttgtattgctgcttgcaaatatgcatttccaaacttgaaatataggtgtgaacagtgtgtaccagtttaaagctttcacttcatttgtgttttttaattaaggatttagaagttcccccaattacaaactggttttaaatattggacatactggttttaatacctgctttgcatattcacacatggtcaactgggacatgttaaactttgatttgtcaaattttatgctgtgtggaatactaactatatgtattttaacttagttttaatattttcatttttggggaaaaatcttttttcacttctcatgatagctgttatatatatatgctaaatctttatatacagaaatatcagtacttgaacaaattcaaagcacatttggtttattaacccttgctccttgcatggctcattaggttcaaattataactgatttacattttcagctatatttactttttaaatgcttgagtttcccattttaaaatctaaactagacatcttaattggtgaaagttgtttaaactacttattgttggtaggcacatcgtgtcaagtgaagtagttttataggtatgggttttttctcccccttcaccagggtgggtggaataagttgatttggccaatgtgtaatatttaaactgttctgtaaaataagtgtctggccatttggtatgatttctgtgtgtgaaaggtcccaaaatcaaaatggtacatccataatcagccaccatttaacccttccttgttctaaaacaaaaaccaaagggcgctggttggtagggtgaggtgggggagtattttaatttttggaatttgggaagcagacagctttactttgtaaggttggaacagcagcactatacatgaaatataaaccaaaaacctttactgtttctaaatttcctagattgctattatttggttgtaagttgagtattccacagaaagtggtaattatctcttctctcttcctccattagaaaattaggtaaataatggattcctataatgggagcatcaccacttattaaaacacacatagaatgatgaattaaaaaagttttctaggattgtcttttattctgccacatttattgataaacagtgaaggaatttttaaaaaatttttaagaattgtttgtcacgtcatttttagaaatgttctacctgtatatggtaatgtccagttttaaaaatattggacatcttcaatcttaaacatttctatttagctgattggttctcacatatacttctaaaagaaacttttatgttataagagttactttttggataagatttattaatctcagttacctactattctgacattttaggaaggaggtaattgtttttaatgatggataaacttgtgctggtgttttggatcttatgatgctgagcatgttctgcactggtgctaatgtctaatataattttatatttacacacatacgtgctacccagagattaatttagtccatatgaactattgacccattgttcattgagacagcaacatacgcactcctaaatcagtgtgtttagacttttcaagtatctaactcatttccaaacatgtaccatgttttataaacctcttgatttccagcaacatactatagaaaacacctgctactcaaaacacaacttctcagtgtcatccattgctgtcgtgagagacaacatagcaatatctggtatgttgcaagctttcaagatagcctgaacttaaaaagttggtgcattagttgtatctgatggatataaatttgcctcctagttcactttgtgtcaagagctaaaactgtgaacctaactttctcttattggtgggtaataactgaaaataaagatttattttcatgctcacttcttaaaagtcataaaaacaatcaaataggatcatgtttattgtcatgtgtttcctggtttctgacctgtgtgcacacccctgtgtgtttataatttttaaattgaattttatatggggtttttatttgctaaaaaccaggctgttgaatcacatttgggaagggtacttatcttaatgactaatgacttaattgggaaagttgaattcttgtaaaatacaaaatccaaggacttcttggatttaatctgattgtcacttcttagcagatcacttttttgataatgaaagttaagcatactgaatgctacttttgattgacaaactggctataatagtctaggggaaaaatccctaaacagataaagattcctaaagtaatggtggcagctgatgtttcagtgaacttttatcttgatgcgtttaaatggaagtaatgccagacctgagatttttaaggcatttttacagcttgtattgaaatgattggagacatggtttctttattagctattttgagacctgtggagttaagcaagacttttaaaaattggcaccatatacatctagttagttcctttactcttatttttttaaataaaagtagtacacatcatttccagggttgtaaatatatttggggcttgtttttggtatggatttaaaaggaggatattaagtattcattctaattttgttatttttctagttgccagagatggttgcactgaaatagaacagggagttgcatacaaagcctaaatgtgtattggatttcgaaaatactaggttggtgcaattggttttgtaccaacctaacatgtctttaggaaagtaccatcatgtggaaggaaacaacaggtgttaaaaggttcaaaggaatgagaaataggaagttactagaacctaactgatgttgaccttagaggtaagattattcaggtatattagtggacctccagtccaatggtatagcaaattccagggatctcaggtgcatgcaattttactttctaaagtaaacacttagaaaatagattataacccagacgttttggattatactgagacaaatatgtaaataagttttagcaagtctgaacatgtaccagcgagatcttcaggttaactaagaaaagcccagaaacttcattatttactgtgctttgtatggcataactggtaacaaggcagtaaaatgatacatatttgaactggaccatagtaattaaatgatttatcaatatcatttgcaagataattgtcaggttgagttaatagtaagtggcagcttcccagaaatttgggttatttggcctaagctgtgccctgggattacctcttcatcttccttgacttttaagttcaaatttggaggttatgtgaagtgattgaaataaatctttcaggctgaggaagtcggtaatttcaagaatatagtgaaaacaaggttgtaatctaaacatgagaagcttaagtttaggaaatggttagaatataaattgctaaagccatcatgattttggccacagatgaaaatatgaacactggaaatgagcgccatttaaatgagatgctgtatgtaagccaggggtcagcaaagttcagcctgtgacctggtgtgtgtgggggtgtgtgtgtgtgtgtgtgtgtgtgtgtgtgtgtccgtgtccctgagttaagaatggtttttaggcttgtataggattaaaaaaaaaaaaaacccacagaaaaatgtaggcagcccagcataagataccgcctttcacagaaatgtttgctgaccccggaactgtcactctcgggttacaagagtttgtttctttgaaacagtctggctctgtcacccaggctggagtgcagtggcatgatctcaggtcactgcagcctccacctcccgggttcaagcaattctgcctcagcctcctgagtagctgggattacaggtgtgcaccaccacagacagctaattttacaggtgtacaccaccacacccaagaatcacttgaacccgggaggtgggggttgcagtgagccaagatcatagcactgtactccagtctgggtgacacactgtctgaaaaataaaagtttagttctaggtacaaattaagtggtctacccaacaggaagctgtgaaattagaagtaattttaaagcatactttacacctctatataatcaaagtaagggcaagataaaacttgttagtaaaacatgttttattattttttagataggtagcctgcaacataaaatatattttgaaagctgttaaggggtgtataatctgttaaaaaataccatgattagtatttcacatttagtgactcagatccctttgtgtaagtcctttgcgttgtgcaaagaggtttttctatgagatgagaattatgaacacttcatataggtaaattccataggttgagctggggcagaaattaatggctcctggagattgcatctttttttttttttttttgagcttagaattcccatttggacagaatttagcttttgtgctgttgattacttctgtactaaactggtagccaattgttcacttctaaatggaagggaaaaagttacccacacaagttagaaaatgatttaccgaattatttttttgagttagtatgtatatactgttttaaatcagtaatgtttgttccttttgctgcccatttgggagtatgtggcaattcctagtgctcttgtatgacattactcttcttgagacttgtatatgcaagaaagtatatataaaagatgcctggtggtaactttgtatctgagttctgattcattatggacttttagaaatctatttagataattggttcatactaggtgctcaattactctgaccttgtgtggcttaatccttaaatagttgctttaggtgttactgggtggaagcatggaaagtgaagggctaatattaaggatttttatgtattactgagtagggaaagtgggaagtagcttatctttggacagttgtattactttgcactaatcaccttgtttgcagttgtagctgattcagttctagattttaggaccaaaaagatctctaatttaaagaaacagtttttatatacctagaatgaagattctgtttaaagcggttttggttaacttggttcttgacatttgcctaaaattttgttggattgggactaaaatgttctattagccaatgaataacgtccaagtaaatttttgttttattttgggaa

SEQ ID NO: 48 - protein, 402 aa, Homosapiens
MPGHLQEGFGCVVTNRFDQLFDDESDPFEVLKAAENKKKEAGGGGVGGPGAKSAAQAAAQTNSNAAGKQLRKESQKDRKNPLPPSVGVVDKKEETQPPVALKKEGIRRVGRRPDQQLQGEGKIIDRRPERRPPRERRFEKPLEEKGEGGEFSVDRPIIDRPIRGRGGLGRGRGGRGRGMGRGDGFDSRGKREFDRHSGSDRSGLKHEDKRGGSGSHNWGTVKDELTESPKYIQKQISYNYSDLDQSNVTEETPEGEEHHPVADTENKENEVEEVKEEGPKEMTLDEWKAIQNKDRAKVEFNIRKPNEGADGQWKKGFVLHKSKSEEAHAEDSVMDHHFRKPANDITSQLEINFGDLGRPGRGGRGGRGGRGRGGRPNRGSRTDKSSASAPDVDDPEAFPALA

SEQ ID NO: 49 - DNA, 6719 bp, Homosapiens
cggatgtgtgcctggcgccggaagagaagacggcccccctctctcggcccggccatcttgtgggaagagctgaagcaggcgctcttggctcggcgcggcccgctgcaatccgtggaggaacgcgccgccgagccaccatcatgcctgggcacttacaggaaggcttcggctgcgtggtcaccaaccgattcgaccagttatttgacgacgaatcggaccccttcgaggtgctgaaggcagcagagaacaagaaaaaagaagccggcgggggcggcgttgggggccctggggccaagagcgcagctcaggccgcggcccagaccaactccaacgcggcaggcaaacagctgcgcaaggagtcccagaaagaccgcaagaacccgctgccccccagcgttggcgtggttgacaagaaagaggagacgcagccgcccgtggcgcttaagaaagaaggaataagacgagttggaagaagacctgatcaacaacttcagggtgaagggaaaataattgatagaagaccagaaaggcgaccacctcgtgaacgaagattcgaaaagccacttgaagaaaagggtgaaggaggcgaattttcagttgatagaccgattattgaccgacctattcgaggtcgtggtggtcttggaagaggtcgagggggccgtggacgtggaatgggccgaggagatggatttgattctcgtggcaaacgtgaatttgataggcatagtggaagtgatagatcttctttttcacattacagtggcctgaagcacgaggacaaacgtggaggtagcggatctcacaactggggaactgtcaaagacgaattaactgacttggatcaatcaaatgtgactgaggaaacacctgaaggtgaagaacatcatccagtggcagacactgaaaataaggagaatgaagttgaagaggtaaaagaggagggtccaaaagagatgactttggatgagtggaaggctattcaaaataaggaccgggcaaaagtagaatttaatatccgaaaaccaaatgaaggtgctgatgggcagtggaagaagggatttgttcttcataaatcaaagagtgaagaggctcatgctgaagattcggttatggaccatcatttccggaagccagcaaatgatataacgtctcagctggagatcaattttggagaccttggccgcccaggacgtggcggcaggggaggacgaggtggacgtgggcgtggtgggcgcccaaaccgtggcagcaggaccgacaagtcaagtgcttctgctcctgatgtggatgacccagaggcattcccagctctggcttaactggatgccataagacaaccctggttcctttgtgaacccttctgttcaaagcttttgcatgcttaaggattccaaacgactaagaaattaaaaaaaaaaagactgtcattcataccattcacacctaaagactgaattttatctgttttaaaaatgaacttctcccgctacacagaagtaacaaatatggtagtcagttttgtatttagaaatgtattggtagcagggatgttttcataattttcagagattatgcattcttcatgaatacttttgtattgctgcttgcaaatatgcatttccaaacttgaaatataggtgtgaacagtgtgtaccagtttaaagctttcacttcatttgtgttttttaattaaggatttagaagttcccccaattacaaactggttttaaatattggacatactggttttaatacctgctttgcatattcacacatggtcaactgggacatgttaaactttgatttgtcaaattttatgctgtgtggaatactaactatatgtattttaacttagttttaatattttcatttttggggaaaaatcttttttcacttctcatgatagctgttatatatatatgctaaatctttatatacagaaatatcagtacttgaacaaattcaaagcacatttggtttattaacccttgctccttgcatggctcattaggttcaaattataactgatttacattttcagctatatttactttttaaatgcttgagtttcccattttaaaatctaaactagacatcttaattggtgaaagttgtttaaactacttattgttggtaggcacatcgtgtcaagtgaagtagttttataggtatgggttttttctcccccttcaccagggtgggtggaataagttgatttggccaatgtgtaatatttaaactgttctgtaaaataagtgtctggccatttggtatgatttctgtgtgtgaaaggtcccaaaatcaaaatggtacatccataatcagccaccatttaacccttccttgttctaaaacaaaaaccaaagggcgctggttggtagggtgaggtgggggagtattttaatttttggaatttgggaagcagacagctttactttgtaaggttggaacagcagcactatacatgaaatataaaccaaaaacctttactgtttctaaatttcctagattgctattatttggttgtaagttgagtattccacagaaagtggtaattatctcttctctcttcctccattagaaaattaggtaaataatggattcctataatgggagcatcaccacttattaaaacacacatagaatgatgaattaaaaaagttttctaggattgtcttttattctgccacatttattgataaacagtgaaggaatttttaaaaaatttttaagaattgtttgtcacgtcatttttagaaatgttctacctgtatatggtaatgtccagttttaaaaatattggacatcttcaatcttaaacatttctatttagctgattggttctcacatatacttctaaaagaaacttttatgttataagagttactttttggataagatttattaatctcagttacctactattctgacattttaggaaggaggtaattgtttttaatgatggataaacttgtgctggtgttttggatcttatgatgctgagcatgttctgcactggtgctaatgtctaatataattttatatttacacacatacgtgctacccagagattaatttagtccatatgaactattgacccattgttcattgagacagcaacatacgcactcctaaatcagtgtgtttagacttttcaagtatctaactcatttccaaacatgtaccatgttttataaacctcttgatttccagcaacatactatagaaaacacctgctactcaaaacacaacttctcagtgtcatccattgctgtcgtgagagacaacatagcaatatctggtatgttgcaagctttcaagatagcctgaacttaaaaagttggtgcattagttgtatctgatggatataaatttgcctcctagttcactttgtgtcaagagctaaaactgtgaacctaactttctcttattggtgggtaataactgaaaataaagatttattttcatgctcacttcttaaaagtcataaaaacaatcaaataggatcatgtttattgtcatgtgtttcctggtttctgacctgtgtgcacacccctgtgtgtttataatttttaaattgaattttatatggggtttttatttgctaaaaaccaggctgttgaatcacatttgggaagggtacttatcttaatgactaatgacttaattgggaaagttgaattcttgtaaaatacaaaatccaaggacttcttggatttaatctgattgtcacttcttagcagatcacttttttgataatgaaagttaagcatactgaatgctacttttgattgacaaactggctataatagtctaggggaaaaatccctaaacagataaagattcctaaagtaatggtggcagctgatgtttcagtgaacttttatcttgatgcgtttaaatggaagtaatgccagacctgagatttttaaggcatttttacagcttgtattgaaatgattggagacatggtttctttattagctattttgagacctgtggagttaagcaagacttttaaaaattggcaccatatacatctagttagttcctttactcttatttttttaaataaaagtagtacacatcatttccagggttgtaaatatatttggggcttgtttttggtatggatttaaaaggaggatattaagtattcattctaattttgttatttttctagttgccagagatggttgcactgaaatagaacagggagttgcatacaaagcctaaatgtgtattggatttcgaaaatactaggttggtgcaattggttttgtaccaacctaacatgtctttaggaaagtaccatcatgtggaaggaaacaacaggtgttaaaaggttcaaaggaatgagaaataggaagttactagaacctaactgatgttgaccttagaggtaagattattcaggtatattagtggacctccagtccaatggtatagcaaattccagggatctcaggtgcatgcaattttactttctaaagtaaacacttagaaaatagattataacccagacgttttggattatactgagacaaatatgtaaataagttttagcaagtctgaacatgtaccagcgagatcttcaggttaactaagaaaagcccagaaacttcattatttactgtgctttgtatggcataactggtaacaaggcagtaaaatgatacatatttgaactggaccatagtaattaaatgatttatcaatatcatttgcaagataattgtcaggttgagttaatagtaagtggcagcttcccagaaatttgggttatttggcctaagctgtgccctgggattacctcttcatcttccttgacttttaagttcaaatttggaggttatgtgaagtgattgaaataaatctttcaggctgaggaagtcggtaatttcaagaatatagtgaaaacaaggttgtaatctaaacatgagaagcttaagtttaggaaatggttagaatataaattgctaaagccatcatgattttggccacagatgaaaatatgaacactggaaatgagcgccatttaaatgagatgctgtatgtaagccaggggtcagcaaagttcagcctgtgacctggtgtgtgtgggggtgtgtgtgtgtgtgtgtgtgtgtgtgtgtgtgtccgtgtccctgagttaagaatggtttttaggcttgtataggattaaaaaaaaaaaaaacccacagaaaaatgtaggcagcccagcataagataccgcctttcacagaaatgtttgctgaccccggaactgtcactctcgggttacaagagtttgtttctttgaaacagtctggctctgtcacccaggctggagtgcagtggcatgatctcaggtcactgcagcctccacctcccgggttcaagcaattctgcctcagcctcctgagtagctgggattacaggtgtgcaccaccacagacagctaattttacaggtgtacaccaccacacccaagaatcacttgaacccgggaggtgggggttgcagtgagccaagatcatagcactgtactccagtctgggtgacacactgtctgaaaaataaaagtttagttctaggtacaaattaagtggtctacccaacaggaagctgtgaaattagaagtaattttaaagcatactttacacctctatataatcaaagtaagggcaagataaaacttgttagtaaaacatgttttattattttttagataggtagcctgcaacataaaatatattttgaaagctgttaaggggtgtataatctgttaaaaaataccatgattagtatttcacatttagtgactcagatccctttgtgtaagtcctttgcgttgtgcaaagaggtttttctatgagatgagaattatgaacacttcatataggtaaattccataggttgagctggggcagaaattaatggctcctggagattgcatctttttttttttttttttgagcttagaattcccatttggacagaatttagcttttgtgctgttgattacttctgtactaaactggtagccaattgttcacttctaaatggaagggaaaaagttacccacacaagttagaaaatgatttaccgaattatttttttgagttagtatgtatatactgttttaaatcagtaatgtttgttccttttgctgcccatttgggagtatgtggcaattcctagtgctcttgtatgacattactcttcttgagacttgtatatgcaagaaagtatatataaaagatgcctggtggtaactttgtatctgagttctgattcattatggacttttagaaatctatttagataattggttcatactaggtgctcaattactctgaccttgtgtggcttaatccttaaatagttgctttaggtgttactgggtggaagcatggaaagtgaagggctaatattaaggatttttatgtattactgagtagggaaagtgggaagtagcttatctttggacagttgtattactttgcactaatcaccttgtttgcagttgtagctgattcagttctagattttaggaccaaaaagatctctaatttaaagaaacagtttttatatacctagaatgaagattctgtttaaagcggttttggttaacttggttcttgacatttgcctaaaattttgttggattgggactaaaatgttctattagccaatgaataacgtccaagtaaatttttgttttattttgggaa

SEQ ID NO: 50 - protein, 393 aa, Homosapiens
MPGHLQEGFGCVVTNRFDQLFDDESDPFEVLKAAENKKKEAGGGGVGGPGAKSAAQAAAQTNSNAAGKQLRKESQKDRKNPLPPSVGVVDKKEETQPPVALKKEGIRRVGRRPDQQLQGEGKIIDRRPERRPPRERRFEKPLEEKGEGGEFSVDRPIIDRPIRGRGGLGRGRGGRGRGMGRGDGFDSRGKREFDRHSGSDRSSFSHYSGLKHEDKRGGSGSHNWGTVKDELTDLDQSNVTEETPEGEEHHPVADTENKENEVEEVKEEGPKEMTLDEWKAIQNKDRAKVEFNIRKPNEGADGQWKKGFVLHKSKSEEAHAEDSVMDHHFRKPANDITSQLEINFGDLGRPGRGGRGGRGGRGRGGRPNRGSRTDKSSASAPDVDDPEAFPALA

SEQ ID NO: 51 - DNA, 6701 bp, Homosapiens
cggatgtgtgcctggcgccggaagagaagacggcccccctctctcggcccggccatcttgtgggaagagctgaagcaggcgctcttggctcggcgcggcccgctgcaatccgtggaggaacgcgccgccgagccaccatcatgcctgggcacttacaggaaggcttcggctgcgtggtcaccaaccgattcgaccagttatttgacgacgaatcggaccccttcgaggtgctgaaggcagcagagaacaagaaaaaagaagccggcgggggcggcgttgggggccctggggccaagagcgcagctcaggccgcggcccagaccaactccaacgcggcaggcaaacagctgcgcaaggagtcccagaaagaccgcaagaacccgctgccccccagcgttggcgtggttgacaagaaagaggagacgcagccgcccgtggcgcttaagaaagaaggaataagacgagttggaagaagacctgatcaacaacttcagggtgaagggaaaataattgatagaagaccagaaaggcgaccacctcgtgaacgaagattcgaaaagccacttgaagaaaagggtgaaggaggcgaattttcagttgatagaccgattattgaccgacctattcgaggtcgtggtggtcttggaagaggtcgagggggccgtggacgtggaatgggccgaggagatggatttgattctcgtggcaaacgtgaatttgataggcatagtggaagtgatagatctggcctgaagcacgaggacaaacgtggaggtagcggatctcacaactggggaactgtcaaagacgaattaactgacttggatcaatcaaatgtgactgaggaaacacctgaaggtgaagaacatcatccagtggcagacactgaaaataaggagaatgaagttgaagaggtaaaagaggagggtccaaaagagatgactttggatgagtggaaggctattcaaaataaggaccgggcaaaagtagaatttaatatccgaaaaccaaatgaaggtgctgatgggcagtggaagaagggatttgttcttcataaatcaaagagtgaagaggctcatgctgaagattcggttatggaccatcatttccggaagccagcaaatgatataacgtctcagctggagatcaattttggagaccttggccgcccaggacgtggcggcaggggaggacgaggtggacgtgggcgtggtgggcgcccaaaccgtggcagcaggaccgacaagtcaagtgcttctgctcctgatgtggatgacccagaggcattcccagctctggcttaactggatgccataagacaaccctggttcctttgtgaacccttctgttcaaagcttttgcatgcttaaggattccaaacgactaagaaattaaaaaaaaaaagactgtcattcataccattcacacctaaagactgaattttatctgttttaaaaatgaacttctcccgctacacagaagtaacaaatatggtagtcagttttgtatttagaaatgtattggtagcagggatgttttcataattttcagagattatgcattcttcatgaatacttttgtattgctgcttgcaaatatgcatttccaaacttgaaatataggtgtgaacagtgtgtaccagtttaaagctttcacttcatttgtgttttttaattaaggatttagaagttcccccaattacaaactggttttaaatattggacatactggttttaatacctgctttgcatattcacacatggtcaactgggacatgttaaactttgatttgtcaaattttatgctgtgtggaatactaactatatgtattttaacttagttttaatattttcatttttggggaaaaatcttttttcacttctcatgatagctgttatatatatatgctaaatctttatatacagaaatatcagtacttgaacaaattcaaagcacatttggtttattaacccttgctccttgcatggctcattaggttcaaattataactgatttacattttcagctatatttactttttaaatgcttgagtttcccattttaaaatctaaactagacatcttaattggtgaaagttgtttaaactacttattgttggtaggcacatcgtgtcaagtgaagtagttttataggtatgggttttttctcccccttcaccagggtgggtggaataagttgatttggccaatgtgtaatatttaaactgttctgtaaaataagtgtctggccatttggtatgatttctgtgtgtgaaaggtcccaaaatcaaaatggtacatccataatcagccaccatttaacccttccttgttctaaaacaaaaaccaaagggcgctggttggtagggtgaggtgggggagtattttaatttttggaatttgggaagcagacagctttactttgtaaggttggaacagcagcactatacatgaaatataaaccaaaaacctttactgtttctaaatttcctagattgctattatttggttgtaagttgagtattccacagaaagtggtaattatctcttctctcttcctccattagaaaattaggtaaataatggattcctataatgggagcatcaccacttattaaaacacacatagaatgatgaattaaaaaagttttctaggattgtcttttattctgccacatttattgataaacagtgaaggaatttttaaaaaatttttaagaattgtttgtcacgtcatttttagaaatgttctacctgtatatggtaatgtccagttttaaaaatattggacatcttcaatcttaaacatttctatttagctgattggttctcacatatacttctaaaagaaacttttatgttataagagttactttttggataagatttattaatctcagttacctactattctgacattttaggaaggaggtaattgtttttaatgatggataaacttgtgctggtgttttggatcttatgatgctgagcatgttctgcactggtgctaatgtctaatataattttatatttacacacatacgtgctacccagagattaatttagtccatatgaactattgacccattgttcattgagacagcaacatacgcactcctaaatcagtgtgtttagacttttcaagtatctaactcatttccaaacatgtaccatgttttataaacctcttgatttccagcaacatactatagaaaacacctgctactcaaaacacaacttctcagtgtcatccattgctgtcgtgagagacaacatagcaatatctggtatgttgcaagctttcaagatagcctgaacttaaaaagttggtgcattagttgtatctgatggatataaatttgcctcctagttcactttgtgtcaagagctaaaactgtgaacctaactttctcttattggtgggtaataactgaaaataaagatttattttcatgctcacttcttaaaagtcataaaaacaatcaaataggatcatgtttattgtcatgtgtttcctggtttctgacctgtgtgcacacccctgtgtgtttataatttttaaattgaattttatatggggtttttatttgctaaaaaccaggctgttgaatcacatttgggaagggtacttatcttaatgactaatgacttaattgggaaagttgaattcttgtaaaatacaaaatccaaggacttcttggatttaatctgattgtcacttcttagcagatcacttttttgataatgaaagttaagcatactgaatgctacttttgattgacaaactggctataatagtctaggggaaaaatccctaaacagataaagattcctaaagtaatggtggcagctgatgtttcagtgaacttttatcttgatgcgtttaaatggaagtaatgccagacctgagatttttaaggcatttttacagcttgtattgaaatgattggagacatggtttctttattagctattttgagacctgtggagttaagcaagacttttaaaaattggcaccatatacatctagttagttcctttactcttatttttttaaataaaagtagtacacatcatttccagggttgtaaatatatttggggcttgtttttggtatggatttaaaaggaggatattaagtattcattctaattttgttatttttctagttgccagagatggttgcactgaaatagaacagggagttgcatacaaagcctaaatgtgtattggatttcgaaaatactaggttggtgcaattggttttgtaccaacctaacatgtctttaggaaagtaccatcatgtggaaggaaacaacaggtgttaaaaggttcaaaggaatgagaaataggaagttactagaacctaactgatgttgaccttagaggtaagattattcaggtatattagtggacctccagtccaatggtatagcaaattccagggatctcaggtgcatgcaattttactttctaaagtaaacacttagaaaatagattataacccagacgttttggattatactgagacaaatatgtaaataagttttagcaagtctgaacatgtaccagcgagatcttcaggttaactaagaaaagcccagaaacttcattatttactgtgctttgtatggcataactggtaacaaggcagtaaaatgatacatatttgaactggaccatagtaattaaatgatttatcaatatcatttgcaagataattgtcaggttgagttaatagtaagtggcagcttcccagaaatttgggttatttggcctaagctgtgccctgggattacctcttcatcttccttgacttttaagttcaaatttggaggttatgtgaagtgattgaaataaatctttcaggctgaggaagtcggtaatttcaagaatatagtgaaaacaaggttgtaatctaaacatgagaagcttaagtttaggaaatggttagaatataaattgctaaagccatcatgattttggccacagatgaaaatatgaacactggaaatgagcgccatttaaatgagatgctgtatgtaagccaggggtcagcaaagttcagcctgtgacctggtgtgtgtgggggtgtgtgtgtgtgtgtgtgtgtgtgtgtgtgtgtccgtgtccctgagttaagaatggtttttaggcttgtataggattaaaaaaaaaaaaaacccacagaaaaatgtaggcagcccagcataagataccgcctttcacagaaatgtttgctgaccccggaactgtcactctcgggttacaagagtttgtttctttgaaacagtctggctctgtcacccaggctggagtgcagtggcatgatctcaggtcactgcagcctccacctcccgggttcaagcaattctgcctcagcctcctgagtagctgggattacaggtgtgcaccaccacagacagctaattttacaggtgtacaccaccacacccaagaatcacttgaacccgggaggtgggggttgcagtgagccaagatcatagcactgtactccagtctgggtgacacactgtctgaaaaataaaagtttagttctaggtacaaattaagtggtctacccaacaggaagctgtgaaattagaagtaattttaaagcatactttacacctctatataatcaaagtaagggcaagataaaacttgttagtaaaacatgttttattattttttagataggtagcctgcaacataaaatatattttgaaagctgttaaggggtgtataatctgttaaaaaataccatgattagtatttcacatttagtgactcagatccctttgtgtaagtcctttgcgttgtgcaaagaggtttttctatgagatgagaattatgaacacttcatataggtaaattccataggttgagctggggcagaaattaatggctcctggagattgcatctttttttttttttttttgagcttagaattcccatttggacagaatttagcttttgtgctgttgattacttctgtactaaactggtagccaattgttcacttctaaatggaagggaaaaagttacccacacaagttagaaaatgatttaccgaattatttttttgagttagtatgtatatactgttttaaatcagtaatgtttgttccttttgctgcccatttgggagtatgtggcaattcctagtgctcttgtatgacattactcttcttgagacttgtatatgcaagaaagtatatataaaagatgcctggtggtaactttgtatctgagttctgattcattatggacttttagaaatctatttagataattggttcatactaggtgctcaattactctgaccttgtgtggcttaatccttaaatagttgctttaggtgttactgggtggaagcatggaaagtgaagggctaatattaaggatttttatgtattactgagtagggaaagtgggaagtagcttatctttggacagttgtattactttgcactaatcaccttgtttgcagttgtagctgattcagttctagattttaggaccaaaaagatctctaatttaaagaaacagtttttatatacctagaatgaagattctgtttaaagcggttttggttaacttggttcttgacatttgcctaaaattttgttggattgggactaaaatgttctattagccaatgaataacgtccaagtaaatttttgttttattttgggaa

SEQ ID NO: 52 - protein, 387 aa, Homosapiens
MPGHLQEGFGCVVTNRFDQLFDDESDPFEVLKAAENKKKEAGGGGVGGPGAKSAAQAAAQTNSNAAGKQLRKESQKDRKNPLPPSVGVVDKKEETQPPVALKKEGIRRVGRRPDQQLQGEGKIIDRRPERRPPRERRFEKPLEEKGEGGEFSVDRPIIDRPIRGRGGLGRGRGGRGRGMGRGDGFDSRGKREFDRHSGSDRSGLKHEDKRGGSGSHNWGTVKDELTDLDQSNVTEETPEGEEHHPVADTENKENEVEEVKEEGPKEMTLDEWKAIQNKDRAKVEFNIRKPNEGADGQWKKGFVLHKSKSEEAHAEDSVMDHHFRKPANDITSQLEINFGDLGRPGRGGRGGRGGRGRGGRPNRGSRTDKSSASAPDVDDPEAFPALA

SEQ ID NO: 53 - DNA, 671 bp, Homosapiens
agcgcggcggggcgatgtgtgattaccatggcgaggagtctctgtccgggggcctggctaaggaaaccctattacctccaggctcgcttctcatatgtgcggatgaaatatcttttcttttcctggttagtggtttttgttggaagctggattatatatgtgcagtattctacctatacagaattatgcagaggaaaggactgtaagaaaataatatgtgacaagtacaagactggagttattgatgggcctgcatgtaacagcctttgtgttacagaaactctttactttggaaaatgtttatccaccaagcccaacaatcagatgtatttagggatttgggataatctaccaggtgttgtgaaatgtcaaatggaacaagcgcttcatcttgattttggaactgaattggaaccaagaaaagaaatagtgctatttgataagccaactagaggaactactgtacaaaaatttaaagaaatggtctatagtctctttaaggaccagcaccggtaattgtgccaaacttttgcgaagcactgctccagacagcaatcagtgatgccaaacgtcggtttgttcggaacacgctatgtcccacttcgaaaacctagcctcaaataacaactacgtacctctcgaaaaaaaaaaaaaaaaaaaaaaaaaaaaaa

SEQ ID NO: 54 - protein, 162 aa, Homosapiens
MARSLCPGAWLRKPYYLQARFSYVRMKYLFFSWLVVFVGSWIIYVQYSTYTELCRGKDCKKIICDKYKTGVIDGPACNSLCVTETLYFGKCLSTKPNNQMYLGIWDNLPGVVKCQMEQALHLDFGTELEPRKEIVLFDKPTRGTTVQKFKEMVYSLFKDQHR

SEQ ID NO: 55 - DNA, 2648 bp, Homosapiens
caccgcgggaaaccaaaatggcgaggggctgtattgaagtgggctgtgtttgaggccggtgtaagaacgctcattctacccccaacccttgtctccaaggacctcggtttgtgcgtgcatatgtgccgggtacccggtggggcgggtgcccagtaagtgctcggactcgcaggggaagcgcccacggggacggattggttgttttttcctgtatgaagcggttggcaccactgaagtgaccgaatgagagactctacaggggcaggtaattcactggtccacaagcggtctcctttacgtcgaaaccaaaagaccccaacatccttgaccaagctgtctttacaggatggacataaagccaaaaagccagcatgtaaatttgaagagggtcaggatgtcctagctagatggtcagatggcttgttttatcttggcactatcaaaaagataaacatattgaaacagagctgcttcatcatatttgaagacagttctaaatcctgggttctctggaaggacattcaaacaggagccactggaagtggggaaatggtctgtacaatatgtcaagaagagtattcagaagctcccaatgaaatggttatatgtgacaagtgtggccaaggatatcatcagttgtgtcacacacctcatattgattccagtgtgattgattcagatgaaaaatggctctgtcggcagtgtgtttttgcaacaacaacaaagaggggtggtgcacttaagaaaggaccaaatgccaaagcattgcaagtcatgaagcagacattaccctatagtgtggcagaccttgaatgggatgcaggtcataaaaccaatgtccagcagtgttactgctattgtggaggccctggagactggtatttgaagatgctacagtgctgcaaatgtaagcagtggtttcatgaggcttgtgtgcaatgccttcaaaagccaatgctatttggagacagattttatacgtttatatgctctgtctgcagttctggaccagaatacctcaaacgtctaccattacagtgggtagatatagcacacctatgcctttacaacctaagtgttattcataagaagaaatactttgattctgaacttgagcttatgacatacattaatgaaaactgggatagattgcaccctggagagctggcagacacaccgaaatctgaaagatatgagcatgttctggaggcattaaatgattacaagaccatgtttatgtctgggaaagaaataaagaagaagaagcatttgtttgggttgcgaattcgtgttcctcctgtgccaccaaatgtggctttcaaagcagagaaagaacctgaaggaacatctcatgaatttaaaattaaaggcagaaaggcatccaaacctatatctgattcaagggaagtaagcaatggcatagaaaaaaaaggaaagaaaaaatctgtaggtcgtccacctggcccatatacaagaaaaatgattcaaaaaactgctgagccacttttggataaggaatcaatttcagagaatcctactttggatttaccttgttctatagggagaactgagggaactgcacattcatccaatacctcagatgtggatttcacgggtgcttccagtgcaaaagaaactacctcgtctagcatttccaggcattatggattatctgactccagaaaaagaacgcgtacaggaagatcttggcctgctgcaataccacatttgaggagaagaagaggtcgtcttccaagaagagcactccagactcagaactcagaaattgtaaaagatgatgaaggcaaagaagattatcagtttgatgaactcaacacagagattctgaataacttagcagatcaggagttacaactcaatcatctaaagaactccattaccagttattttggtgctgcaggtagaatagcatgtggcgaaaaataccgagttttggcacgtcgggtgacacttgatggaaaggtgcagtatcttgtggaatgggaaggagcaactgcatcctgactgtaggactgaacattatgttcactgcactctgattttctgtaggtacagttcaaagccctaaagggagtctggcttttactatctttcttaaaaaaaaaaaaaaagagtcaaaaaaattcaaaaaaggggatgatactagccttaacatgtacctgtcaatgttatggatattgtcataaaaaggtatcttttaaaaatcagaacagagacttaattttttaaatcttaagatttgtagaatgtttctaggataggatattaaaaatgattgaaacccatgcatggtgttagacaatttttctaattattccattgagtcagttttttgtgattagtgattatcagagcaaacatcatgtagatagcacaagtatttggagaaacgttgtttgttttgattagtgattatcagagcaaacatcatgtagatagcacaagtatttggagaaacgttgtttgttttgttaccaaaatgttggaaaaatttatttcaataccttttagatttcataaagtgcagtgtatataatgcctactgaaagactgtaaaatattgaaattttctttcaagcaaagtgtaaaaaaatatattgagcctgtaaattgcaaaaaaaaaaaaa

SEQ ID NO: 56 - protein, 593 aa, Homosapiens
MRDSTGAGNSLVHKRSPLRRNQKTPTSLTKLSLQDGHKAKKPACKFEEGQDVLARWSDGLFYLGTIKKINILKQSCFIIFEDSSKSWVLWKDIQTGATGSGEMVCTICQEEYSEAPNEMVICDKCGQGYHQLCHTPHIDSSVIDSDEKWLCRQCVFATTTKRGGALKKGPNAKALQVMKQTLPYSVADLEWDAGHKTNVQQCYCYCGGPGDWYLKMLQCCKCKQWFHEACVQCLQKPMLFGDRFYTFICSVCSSGPEYLKRLPLQWVDIAHLCLYNLSVIHKKKYFDSELELMTYINENWDRLHPGELADTPKSERYEHVLEALNDYKTMFMSGKEIKKKKHLFGLRIRVPPVPPNVAFKAEKEPEGTSHEFKIKGRKASKPISDSREVSNGIEKKGKKKSVGRPPGPYTRKMIQKTAEPLLDKESISENPTLDLPCSIGRTEGTAHSSNTSDVDFTGASSAKETTSSSISRHYGLSDSRKRTRTGRSWPAAIPHLRRRRGRLPRRALQTQNSEIVKDDEGKEDYQFDELNTEILNNLADQELQLNHLKNSITSYFGAAGRIACGEKYRVLARRVTLDGKVQYLVEWEGATAS

SEQ ID NO: 57 - DNA, 3969 bp, Homosapiens
actgccccgccccggcgcagactgcgtgaggcgccgccggaggcgcggggcttgccggggatcgtggtcggcgagcgcgcccgagcccactagcggagcccgcccgggactacatttcccacaattaccgccatgatgcccattggtgggggaagccatgggaaccggaggccgtcagggggagaggcgggcggcgctcacgcctggcctgagggggccgagactgaggcggttgcggaataggactgctagccccgcccagagtccctaccctttggagaactgcgcttctctttcggagggagtgttcgccgccgccgcggccgccacctggagtttcttcagactccagatttccctgtcaaccacgaggagtccagagaggaaacgcggagcggagacaacagtacctgacgcctctttcagcccgggatcgccccagcagggatgggcgacaagatctggctgcccttccccgtgctccttctggccgctctgcctccggtgctgctgcctggggcggccggcttcacaccttccctcgatagcgacttcacctttacccttcccgccggccagaaggagtgcttctaccagcccatgcccctgaaggcctcgctggagatcgagtaccaagttttagatggagcaggattagatattgatttccatcttgcctctccagaaggcaaaaccttagtttttgaacaaagaaaatcagatggagttcacactgtagagactgaagttggtgattacatgttctgctttgacaatacattcagcaccatttctgagaaggtgattttctttgaattaatcctggataatatgggagaacaggcacaagaacaagaagattggaagaaatatattactggcacagatatattggatatgaaactggaagacatcctggaatccatcaacagcatcaagtccagactaagcaaaagtgggcacatacaaattctgcttagagcatttgaagctcgtgatcgaaacatacaagaaagcaactttgatagagtcaatttctggtctatggttaatttagtggtcatggtggtggtgtcagccattcaagtttatatgctgaagagtctgtttgaagataagaggaaaagtagaacttaaaactccaaactagagtacataacattgaaaaatgaggcataaaaatgcaataaactgttacagtcaagaccattaatggtcttctccaaaatattttgagatataaaagtagggaacaggtataattttaatgtgaaaattaagtcttcactttctgtgcaagtaatcctgctgatccagttgtacttaagtgtgtaacaggaatattttgcagaatataggtttaactgaatgaagccatattaataactgcattttcctaactttgaaaaattttgcaaatgtcttaggtgatttaaataaatgagtattgggcctaattgcaacaccagtctgtttttaacaggttctattacccagaacttttttgtaaatgcggcagttacaaattaactgtggaagttttcagttttaagttataaatcacctgagaattacctaatgatggattgaataaatctttagactacaaaagcccaacttttctctatttacatatgcatctctcctataatgtaaatagaataatagctttgaaatacaattaggtttttgagatttttataaccaaatacatttcagtgtaacatattagcagaaagcattagtctttgtactttgcttacattcccaaaagctgacattttcacgattcttaaaaacacaaagttacacttactaaaattaggacatgttttctctttgaaatgaagaatatagtttaaaagcttcctcctccatagggacacattttctctaacccttaactaaagtgtaggattttaaaattaaatgtgaggtaaaataagtttatttttaatagtatctgtcaagttaatatctgtcaacagttaataatcatgttatgttaatttttacatgattgctgacttggataattcattattaccagcagttatgaaggaaatattgctaaaatgatctgggcctaccataaataaatatctccttttctgagctctaagaattatcagaaacaggaaagaatttagaaaaacttgagaaaacctaatccaaaataaaattcacttaagtagaactataaataaatatctagaatctgactggctcatcatgacatcctactcataacataaatcaaaggagatgattaatttccagttagctggaagaaactttggctgtaggtttttattttctacaagaattctggtttgaattatttttgtaagcaggtacattttataaaatgtaagccctactgtaaggtttagcactgggtgtacatatttattaaaaatttttattataacaacttttattaaaatggcctttctgaacactttatttattgatgttgaagtaaggattagaaacatagactcccaagttttaaacacctaaatgtgaataacccatatatacaacaaagtttctgccatctagctttttgaagtctatgggggtcttactcaagtactagtaatttaacttcatcatgaatgaactataatttttaagttatgcccatttataacgttgtttatgactacattgtgagttagaaacaaacttaaaatttggggtatagaacccctcaacaggttagtaatgctggaattcttgatgagcaataatgataaccagagagtgatttcatttacactcatagtagtataaaaagagatacatttccctcttaggcccctgggagaagagcagcttagatttccctactggcaaggtttttaaaaatgaggtaaatgccgtatatgatcaattaccttaattggccaagaaaatgcttcaggtgtctaggggtatcctctgcaacacttgcagaacaaaggtcaataagatccttgcctatgaatacccctcccttttgcgctgttaaatttgcaatgagaagcaaatttacagtaccataactaataaagcagggtacagatataaactactgcatcttttctataaaactgtgattaagaattctacctctcctgtatggctgttactgtactgtactctctgactccttacctaacaatgaatttgttacataatcttctacatgtatgatttgtgccactgatcttaaacctatgattcagtaacttcttaccatataaaaacgataattgctttatttggaaaagaatttaggaatactaaggacaattatttttatagacaaagtaaaaagacagatatttaagaggcataaccaaaaaagcaaaacttgtaaacagagtaaaaatctttaatatttctaaagacatactgtttatctgcttcatatgctttttttaatttcactattccatttctaaattaaagttatgctaaattgagtaagctgtttatcacttaacagctcattttgtctttttaaatatacaaattttaaaaatactacaatatttaactaaggcccaaccgatttccataatgtagcagttaccgtgttcacctcacactaaggcctagagtttgctctgatatgcatttggatgattaatgttatgctgttctttcatgtgaatgtcaagacatggagggtgtttgtaattttatggtaaaattaatccttcttacacataatggtgtcttaaaattgacaaaaaatgagcacttacagttgtatgtctactcaaatgaaaattctttatctgaaattttaaaagacattgattccgcatgtaaggatttttcatctgaagtacaataatgcacaatcagtgttgctcaaactgctttatacttataaacagccatcttaaataagcaacgtattgtgagtactgatatgtatataataaaaattatcaaagaaaaaaaaaaaaaaga

SEQ ID NO: 58 - protein, 229 aa, Homosapiens
MGDKIWLPFPVLLLAALPPVLLPGAAGFTPSLDSDFTFTLPAGQKECFYQPMPLKASLEIEYQVLDGAGLDIDFHLASPEGKTLVFEQRKSDGVHTVETEVGDYMFCFDNTFSTISEKVIFFELILDNMGEQAQEQEDWKKYITGTDILDMKLEDILESINSIKSRLSKSGHIQILLRAFEARDRNIQESNFDRVNFWSMVNLVVMVVVSAIQVYMLKSLFEDKRKSRT

SEQ ID NO: 59 - DNA, 4658 bp, Homosapiens
gcggccgcggcggcggcgaacactccctccgaaagagaagcgcagttctccaaagggtagggactctgggcggggctagcagtcctattccgcaaccgcctcagtctcggccccctcaggccaggcgtgagcgccgcccgcctctccccctgacggcctccggttcccatggcttcccccaccaatgggcatcatggcggtaattgtgggaaatgtagtcccgggcgggctccgctagtgggctcgggcgcgctcgccgaccacgatccccggcaagccccgcgccttcggcggcgcctcacgcagtctgcgccggggcggggcagtgaccgggtaggcgcgtcccaacggctcccgcggcggttcgaattctgtgctgccggggttcgctggttctccgagttgtgtccgaggcttccacgcgcaggggcccgggaaagggtcagaggcttcctaacgcagactcgagtgcgaagcgcgcagtcgccgggtgggtctctccccagcgacgatttgggtgaaatggaatctagttcatcagactactataataaagacaatgaagaggaaagtttgcttgcaaatgttgcttccttaagacatgaactgaagataacagaatggagtttgcagagtttaggggaagagttatccagtgttagtccaagtgaaaattctgattatgcccctaatccttcaaggtctgaaaagctaattttggatgttcagcctagccaccctggacttttgaattattcaccttatgaaaacgtctgtaaaatatctggtagcagcactgattttcaaaaaaagccaagagataagatgttttcatcttctgcccctgtggatcaggagattaaaagccttcgagagaaactaaataaacttaggcaacagaatgcttgtttggtcacacagaatcattccttaatgactaaatttgaatctattcactttgaattaacacagtcaagagcaaaagtttctatgcttgagtctgctcaacagcaggcagccagtgtcccaatcttagaagaacagattataaatttggaagcagaggtttcagctcaagataaagttttgagagaggcagaaaataagctggaacagagccagaaaatggtaattgaaaaggaacagagtttgcaggagtccaaagaggaatgtataaaattaaaggtggacttacttgaacaaaccaaacaaggaaaaagagctgaacgacaaaggaatgaagcactatataatgccgaagagctgagtaaagctttccaacaatataaaaaaaaagtggctgaaaaactggaaaaggttcaagctgaagaagaaatattagagagaaatctaactaactgtgaaaaagaaaataaaaggctacaagaaaggtgtggtctatataaaagtgaacttgaaattctgaaagagaaattaaggcagttaaaagaagaaaataacaacggaaaagaaaaattaaggatcatggcagtgaaaaattcagaagtcatggcacaactaactgaatctagacaaagtattttgaagctagagagtgagttagagaacaaagacgaaatacttagagacaaattttctttaatgaatgaaaaccgagaattaaaggtccgtgttgcagcacagaatgagcgactagatttatgtcaacaagaaattgaaagttcaagggtagaactaagaagtttggaaaagattatatcccagttgccattaaaaagagaattatttggctttaaatcatatctttctaaataccagatgagtagcttctcaaacaaggaagaccgttgcattggctgctgtgaggcaaataaattggtgatttcggaattgagaattaagcttgcaataaaagaggcagaaattcaaaagcttcatgcaaacctgactgcaaatcagttatctcagagtcttattacttgtaatgacagccaagaaagtagcaaattaagtagtttagaaacagaacctgtaaagctaggtggtcatcaagtagcagaaagcgtaaaagatcaaaatcaacatactatgaacaagcaatatgaaaaagagaggcaaagacttgttactggaatagaagaactacgtactaagctgatacaaatagaagctgaaaattctgatttgaaggttaacatggctcacagaactagtcagtttcagctgattcaagaggagctgctagagaaagcttcaaactccagcaaactggaaagtgaaatgacaaagaaatgttctcaacttttaactcttgagaaacagctggaagaaaagatagttgcttattcctctattgctgcaaaaaatgcagaactagaacaggagcttatggaaaagaatgaaaagataaggagtctagaaaccaatattaatacagagcatgagaaaatttgtttagcctttgaaaaagcaaagaaaattcacttggaacagcataaagaaatggaaaagcagattgaaagacttgaagctcaactagagaaaaaggaccaacaatttaaagaacaagaaaagactatgtccatgttgcaacaagatataatatgcaaacaacatcatcttgaatcactagatagactcttgacggaaagcaaaggggaaatgaaaaaggaaaatatgaagaaagatgaagctttaaaagcattacagaaccaagtatctgaagaaacaatcaaggttaggcaactagattcagcattggaaatttgtaaggaagaacttgtcttgcatttgaatcaattggaaggaaataaggaaaagtttgaaaaacagttaaagaagaaatctgaagaggtatattgtttacagaaagagctaaagataaaaaatcacagtcttcaagagacttctgagcaaaacgttattctacagcatactcttcagcaacagcagcaaatgttacaacaagagacaattagaaatggagagctagaagatactcaaactaaacttgaaaaacaggtgtcaaaactggaacaagaacttcaaaaacaaagggaaagttcagctgaaaagttgagaaaaatggaggagaaatgtgaatcagctgcacatgaagcagatttgaaaaggcaaaaagtgattgagcttactggcactgccaggcaagtaaagattgagatggatcagtacaaagaagagctgtctaaaatggaaaaggaaataatgcacctaaaacgagatggagaaaataaagcaatgcacctctctcaattagatatgatcttagatcagacaaagacagagctagaaaagaaaacaaatgctgtaaaggagttagaaaagttacagcacagtactgaaactgaactaacagaagccttgcaaaaacgggaagtacttgagactgaactacaaaatgctcatggagaattaaaaagtactttaagacaactccaggaattgagagatgtactacagaaggctcaattatcattagaggaaaaatacactactataaaggatctcacagctgaacttagagaatgcaagatggagattgaagacaaaaagcaggagctccttgaaatggatcaggcacttaaagagagaaattgggaactaaagcaaagagcagctcaggttacacatttggatatgactattcgtgagcacagaggagaaatggaacaaaaaataattaaattagaaggtactctggagaaatcagaattggaacttaaagaatgtaacaaacagatagaaagtctgaatgacaaattacaaaatgctaaagaacagcttcgagaaaaagagtttataatgctacaaaatgaacaggagataagtcaactgaaaaaagaaattgaaagaacacaacaaaggatgaaagaaatggagagtgttatgaaagagcaagaacagtacattgccactcagtacaaggaggccatagatttggggcaagaattgaggctgacccgggagcaggtgcagaactctcatacagaattggcagaggctcgtcatcagcaagtccaagcacagagagaaatagaaaggctctctagtgaactggaggatatgaagcaactctctaaagagaaagatgctcatggaaaccatttagctgaagaactgggggcttctaaagtacgtgaagctcatttagaagcaagaatgcaagcagaaatcaagaaattgtcagcagaagtagaatctctcaaagaagcttatcatatggagatgatttcacatcaagagaaccatgcaaagtggaagatttctgctgactctcaaaagtcttctgttcagcaactaaacgaacagttagagaaggcaaaattggaattagaagaagctcaggatactgtaagcaatttgcatcaacaagtccaagataggaatgaagtaattgaagctgcaaatgaagcattacttactaaaggagaaaatgtgtaattcaaagaagatactgatgtgttgaaaaaatggaatttttggtactgtgctgtttacttattatatgtagctcatacttcatagaagctgttattttgcttttgaataaattttatatttcaatattttaaaagaaagcccttctaaaacttaattatatttttaaagaaaatttattattttatttattgttttttggcttaaacttgctgctttcttttgctttttatataaaa

SEQ ID NO: 60 - protein, 1417 aa, Homosapiens
MASPTNGHHGGNCGKCSPGRAPLVGSGALADHDPRQAPRLRRRLTQSAPGRGSDRVGASQRLPRRFEFCAAGVRWFSELCPRLPRAGARERVRGFLTQTRVRSAQSPGGSLPSDDLGEMESSSSDYYNKDNEEESLLANVASLRHELKITEWSLQSLGEELSSVSPSENSDYAPNPSRSEKLILDVQPSHPGLLNYSPYENVCKISGSSTDFQKKPRDKMFSSSAPVDQEIKSLREKLNKLRQQNACLVTQNHSLMTKFESIHFELTQSRAKVSMLESAQQQAASVPILEEQIINLEAEVSAQDKVLREAENKLEQSQKMVIEKEQSLQESKEECIKLKVDLLEQTKQGKRAERQRNEALYNAEELSKAFQQYKKKVAEKLEKVQAEEEILERNLTNCEKENKRLQERCGLYKSELEILKEKLRQLKEENNNGKEKLRIMAVKNSEVMAQLTESRQSILKLESELENKDEILRDKFSLMNENRELKVRVAAQNERLDLCQQEIESSRVELRSLEKIISQLPLKRELFGFKSYLSKYQMSSFSNKEDRCIGCCEANKLVISELRIKLAIKEAEIQKLHANLTANQLSQSLITCNDSQESSKLSSLETEPVKLGGHQVAESVKDQNQHTMNKQYEKERQRLVTGIEELRTKLIQIEAENSDLKVNMAHRTSQFQLIQEELLEKASNSSKLESEMTKKCSQLLTLEKQLEEKIVAYSSIAAKNAELEQELMEKNEKIRSLETNINTEHEKICLAFEKAKKIHLEQHKEMEKQIERLEAQLEKKDQQFKEQEKTMSMLQQDIICKQHHLESLDRLLTESKGEMKKENMKKDEALKALQNQVSEETIKVRQLDSALEICKEELVLHLNQLEGNKEKFEKQLKKKSEEVYCLQKELKIKNHSLQETSEQNVILQHTLQQQQQMLQQETIRNGELEDTQTKLEKQVSKLEQELQKQRESSAEKLRKMEEKCESAAHEADLKRQKVIELTGTARQVKIEMDQYKEELSKMEKEIMHLKRDGENKAMHLSQLDMILDQTKTELEKKTNAVKELEKLQHSTETELTEALQKREVLETELQNAHGELKSTLRQLQELRDVLQKAQLSLEEKYTTIKDLTAELRECKMEIEDKKQELLEMDQALKERNWELKQRAAQVTHLDMTIREHRGEMEQKIIKLEGTLEKSELELKECNKQIESLNDKLQNAKEQLREKEFIMLQNEQEISQLKKEIERTQQRMKEMESVMKEQEQYIATQYKEAIDLGQELRLTREQVQNSHTELAEARHQQVQAQREIERLSSELEDMKQLSKEKDAHGNHLAEELGASKVREAHLEARMQAEIKKLSAEVESLKEAYHMEMISHQENHAKWKISADSQKSSVQQLNEQLEKAKLELEEAQDTVSNLHQQVQDRNEVIEAANEALLTKGENV

SEQ ID NO: 61 - DNA, 3222 bp, Homosapiens
gagcggcttcctgcaaaccttccctggcatctggagggaccaccgttgccgcgtcttcggcttccacgatctgcgttcgggctacgcggccacggcggcagccactgcgactcccactgtgcctggctctgtccatattagttcccaggcggccgtcgccgttccagcagcggcagcggcagcggcagcggcggacatgttgtgaggcggcggcgcgggtgtctgaaggatggtttggccgaggcggcggcaacggctgctggcggcggcggcagcggcagcggggcctcgggctctatagagccgagcccgctgggtacccgcccggtaccgcggcgaggccagtgcccctggatcttgcctctgctccgacgccgttggggaccagttaggcgacagcgcccgcccctctgaggagacacgaaggtggttccccagccgctcaaatttccggaccaccgcgctttcccctcctcagcctgggctgtgctctctctagaatcctcgggcccccactttcttcccaaactcatcctaaatctctcacacacgcgagtgttcccagccctcaagccagctgctcctccgttcattttctgcaccctcttcgcaaagcaccccccgggatcactctccgagggcgactttttgagaaatctcggtggagtagtggaccagagctggggagtttttaaaagccggggcgcgagaaacaggaaggtactatggcttcctcgtctggcaacgatgatgatctcactatccccagagctgctatcaataaaatgatcaaagagactcttcctaatgtccgggtggccaacgatgctcgagagctggtggtgaactgctgcactgaattcattcaccttatatcttctgaagccaatgagatttgtaacaaatcggaaaagaagaccatctcaccagagcatgtcatacaagcactagaaagtttgggatttggctcttacatcagtgaagtaaaagaagtcttgcaagagtgtaaaacagtagcattaaaaagaagaaaggccagttctcgtttggaaaaccttggcattcctgaagaagagttattgagacagcaacaagaattatttgcaaaagctagacagcaacaagcagaattggcccaacaggaatggcttcaaatgcagcaagctgcccaacaagcccagcttgctgctgcctcagccagtgcatctaatcaggcgggatcttctcaggatgaagaagatgatgatgatatctgaaattcaccagctgagtttctatttcttctataaatgtttttccctgcacaacaaaaacagtgaaagaaatgcttatctgtaattttgtatgcatcttggtggacttgtcattggtattctagggatgtctgctattaagtttcatctattgtgtgctatacatgtaaaaactgtctctttgaactattgaaaatttaaggttcagtataatatcaattttgaatttttaatggtgtttatgaaattttagatagcagcgagtccttcgtttgatcaataaacagtgttacagataacttcaagtttataaaaatacagtgaaatttctacaaagctctaaatctgcatttgcatttcctctgcccttttaactaaactaaaacttgtgaattttaaattattaaggggggggtgctgtgtgaatcagtagacattggattgggttggtgaaagagttcagttctgtagtatctgaatttgtcttttaaaatgagtacatatataggcaataaatatatatgctcagatcaatatacttgtttagaaaaacttcaagacattcaaaaactaggaaggagtatgtttaatagtatttgtataaatttggtggttatgtttttttattttgtttctgttttgtgtagaggtaaaaactatagttttattacagcataattcattttgagctccactatgacatttcaaagactgcccagtttggaagtctgtcatgatttttactctttcactccaattcagtaattgttgatagtattacttacctagtccatccatactcatattattcaaatatataggtggtacttttgaaacaattacattggttctcttggtttaactgaggtttatgaatattcaaacctttgctgggggaaagaaatgaaagttaatgagcatgcttgctatgagagagggatttttaatttaacttgtagttatagtttacttattgtttttagaattacttttacattttcccaactagatggcctagagtccaacattaccttttgagatgacattattgtctccataattgagtgatagctttaaaaaaaagattagttttgcttaagaagttatgttacaactgatcagccctatatgaattaactgatcagccctatatgaaacataagttgtgttataacttatcagccgtatatggaacataaatagtttctacctgcttgttagagaagctttaatttggttctaataaatacagtatggtagtgtttataggaatccaggatgttgaagaaatggcataatgtctatattttggaaacagaaaggaaaagtcacttaagatagtattaagtaattaaattcctatgtcagttgccaaatcttttaaacttatgtattcaccaagcccaaaaatagattgtggctcccaggattccaattttaattggagagctaagtaagtaaagttttataactgttaggtttcttaatgatcatattttgcagttttagtaaaagggaaatattgttatacatttattaaatatacttcccccatgaagtgaaaaggttaattttgctgaatgttttaagttgaagttacttcatggatgtcatacccatgaagtgcatttggatgagatagaagaaattgttttttaaaaagtttaagtaccaaaggtagtctagtctagaacgataagttaatacgtgttggcttttctaatttgtactgtaacatccttatactttctattttaagtatatctgtttcttaagtaaacaacttagatattttccacacctttttttttttttctgatgcagagttcaggttaatattttactgcatctgataatgtattatacgtttgaagcctagtgacttttcattttgacattcttgtgatttcatatgctgtattcttcaagcaataaaattgtgatgtgttttataaaaaaaaaaaaaaaa

SEQ ID NO: 62 - protein, 176 aa, Homosapiens
MASSSGNDDDLTIPRAAINKMIKETLPNVRVANDARELVVNCCTEFIHLISSEANEICNKSEKKTISPEHVIQALESLGFGSYISEVKEVLQECKTVALKRRKASSRLENLGIPEEELLRQQQELFAKARQQQAELAQQEWLQMQQAAQQAQLAAASASASNQAGSSQDEEDDDDI

SEQ ID NO: 63 - DNA, 5220 bp, Homosapiens
atgagctggggcacggagctgtgggatcagttcgacagcttagacaagcatacacaatggggaattgacttcttggaaagatatgccaaatttgttaaagagaggatagaaattgaacagaactatgcgaaacaattgagaaatctggttaagaagtactgccccaaacgttcatccaaagatgaagagccacggtttacctcgtgtgtagccttttttaatatccttaatgagttaaatgactatgcaggacagcgagaagttgtagcagaagaaatggcgcacagagtgtatggtgaattaatgagatatgctcatgatctgaaaactgaaagaaaaatgcatctgcaagaaggacgaaaagctcaacaatatcttgacatgtgctggaaacagatggataatagtaaaaagaagtttgaaagagaatgtagagaggcagaaaaggcacaacagagttatgaaagattggataatgatactaatgcaaccaaggcagatgttgaaaaggccaaacagcagttgaatctgcgtacgcatatggccgatgaaaataaaaatgaatatgctgcacaattacaaaactttaatggagaacaacataaacatttttatgtagtgattcctcagatttacaagcaactacaagaaatggacgaacgaaggactattaaactcagtgagtgttacagaggatttgctgactcagaacgcaaagttattcccatcatttcaaaatgtttggaaggaatgattcttgcagcaaaatcagttgatgaaagaagagactctcaaatggtggtagactccttcaaatctggttttgaacctccaggagactttccatttgaagattacagtcaacatatatatagaaccatttctgatgggactatcagtgcatccaaacaggagagtgggaagatggatgccaaaaccacagtaggaaaggccaagggcaaattgtggctctttggaaagaagccaaagggcccagcactagaagatttcagtcatctgccaccagaacagagacgtaaaaaactacagcagcgcattgatgaacttaacagagaactacagaaagaatcagaccaaaaagatgcactcaacaaaatgaaagatgtatatgagaagaatccacaaatgggggatccagggagtttgcagcctaaattagcagagaccatgaataacattgaccgcctacgaatggaaatccataagaatgaggcttggctctctgaagtcgaaggcaaaacaggtgggagaggagacagaagacatagcagtgacataaatcatcttgtaacacagggacgagaaagtcctgagggaagttacactgatgatgcaaaccaggaagtccgtgggccaccccagcagcatggtcaccacaatgagtttgatgatgaatttgaggatgatgatcccttgcctgctattggacactgcaaagctatctacccttttgatggacataatgaaggtactctagcaatgaaagaaggtgaagttctctacattatagaggaggacaaaggtgacggatggacaagagctcggagacagaacggtgaagaaggctacgttcccacgtcatacatagatgtaactctagagaaaaacagtaaaggtgcagtaacttatatctaaactaaccaggcacctttgtgccatgtgtgacataggaagagtaacataaaatgaaaacacattcaacaggttgaaaaaaataaggaaacttaaagggcatccaagattaattgttcactatgtgagctgagtgtaggcttgatcttgtgaatattaccacaagaaacattttgtggcactttactgtttgagtaacgttggtgtgaagcttaattgatgccttttgctttatgtcccgcttaagtctgtgtgaaggatttgtgtttttctgccttacaaatagaatttgatttattgggcaggaattcatggatagtaatgctctctgccccctttacttcagaaaacacagtgactttagtgaatttgaatagtgaaactgctctgaaatgctatggaaagccgactccccaaagagtggtttcttctagaagtttgaatttgtagctacagtttccaagaagaaaaatagtagttggataatttagtaaaataataacatcattttcattttcttacctattcttaactttggtttcctaaaggaagaaaatgagcaggtagcacataatctatttaagtagatttaaagagagtttcaaaataaatctcctggtctagctcttaggtgaataaaatagattttgtttgagacctcaaaatattttgaggttagctggtaattttcaataatttacaagcttccttccaaactaatctcatacttttgtatgtttcatcttgaaaatatcttttgggaaataccactttagtgattatttagcatttagcagttacacataggaaaatacacagttacatagaaaaatacacatttgaagatagaggaaaccttgaatggaggggaagtgttgacaaattttaatttttaaaggagaaactttttgactatctgggttagaggaagatatgtgtaccgcctttagggcattttgttatttccgctgaatcattagttattaggatagataaatttttccaattagtttcagcaagcgttgttggaaacactgtgcagtcaaggattgtgcagtgctggttgtgtgaccacaccctgagtcagtggtgtggggaagtaaagtgtgaagaagcagtaagattggtttttaattttgcccatgttttaaattttcctggtgttttcggtagctgactataaaatgatagagacatttgggacaggcactttaaactgaacaccccttttggttttaccaaaggtcttcagtaattgttcttttctttttcctcctggactgcaggttcctgaagagggtttctgaggaaatgggcaagatgttgaaggaggttacatgcagctgcttttgggggagggtattagagttgtcaggctcaaagagagtgagagaagcaagttgcatgagtgcatgcagacatgattttttttttactaacttcattagcatttccatacattgtttttaaaaatcataataccaacccttaagttcctagttcacagttattcccacaaaagaaaaagccaacaatagtgtaccatttttctatttattttattgctgtctaatcaataaagaatgcagagctgtcaaaaaatgtgtcttacattagctgtcccaacaggattgtcttccctcccagctctgttttaattggcttttagacccactatctgtcagatccttgccatctgtcagtgtctgcctgcgccacctccgtgcttgcttaacatcctgttgcatgtctagcgtgattgagctagatttttcaggcatgtctttagattcccttgttcttgtcaaagccttgttttgttttacatttgtagtgcaaatcactttgtcaaacatctccagcactaatgtttccatcttagtatttgtgcacactgctataacttccccactgcaaacattccagttttggcattacgaagaagtagctgtgaacctgaagtatttatgataagaaaaagaaaacatctctgctgtagcctacagcccagttgaaagaactctttgaaacgtgatacatcttcagcacctcagtctgggaagaatctagtcagcactgaaatcctggcataataaacacagaagatattcaccacctcaagacaaaggactattgtcaaaagtcagctgcttccattcaaatgctgccttaaacttgagtgcctaaatctgttgattgccaacactaccactacagtatcccacaaagggctttatgtgtcagctcagtgcgacctgctttaactctgcagcaccgctgcagctgccgatgtagcctcggtaggtggctattagagctctaccatatacagtggtgcatcttcaaatttatgcatcaaactaaagacatgtccaagtccattttaatttcctcagtggttttatgagaagttttatgggcctcccccaattgtctttttattttgggttatgacgatcatgtttgataattacaatgatagtctctttccacgtgatgcttttgtttgaacctgataaaatttagtgaaactttgtaatgatctatgtgcacttttacttgtaaaatggaatttctgtatgtttatacttgtaaatatgattgttgttagtgctcctgttgctcatggtgtcctgcctcgcatttgtgattctgttaatgacatgtatcttaactaatttcttagtggtgttgtaatagggagatggggcaggtggggggttatttgtaccactgaatcttcattaatttggttctttactgttttgaggggagaaagaacgtgaaatggtttgtgtattattgaattttaagcaatattttagaagctgtgtgactgctttaataactttttcccagtgttatttgaatcatactacccgttatactaaagctgaatgacaattgtgtgaaagttactgccttcataagatcaagtcaccactgttacacagctgacatatagtgtattacctttgcagctagtaaactataaagtttagatattgaatctcgttacagggttatttatataatgtgacattattcagtactgacagactacatgaagtagttttaaaatctagtgctatttttattttaaaggttagcaatgaggaggaaatgtgatctggctgtgtttgtcttctgtacaaagcctgaagtgcttatggttttttggctaacagccacagagggcaaagtttaagactttcttgtaaggactaactgttcttttcaagctactgtttgtttttctaaaagcaggatttgcttccgtaggaggcaagttccttgatgtggaatagtgcaacctgtatatgggttattataataggaaagacatttgtacttgcacagtttaaatcattcttaaattttgaacatgtgaattgtcccaaaaaatctttaattttttggtaatttttactctttttgtgcacatgttgatttcttaatggtaaatccttcatttaaagatagtgttctctgttgagaatatttacatggaataaaacaatcttttcatggcctgttaaaaaaaaaaaaaaaaaaaaaaaaaaaaaa

SEQ ID NO: 64 - protein, 551 aa, Homosapiens
MSWGTELWDQFDSLDKHTQWGIDFLERYAKFVKERIEIEQNYAKQLRNLVKKYCPKRSSKDEEPRFTSCVAFFNILNELNDYAGQREVVAEEMAHRVYGELMRYAHDLKTERKMHLQEGRKAQQYLDMCWKQMDNSKKKFERECREAEKAQQSYERLDNDTNATKADVEKAKQQLNLRTHMADENKNEYAAQLQNFNGEQHKHFYVVIPQIYKQLQEMDERRTIKLSECYRGFADSERKVIPIISKCLEGMILAAKSVDERRDSQMVVDSFKSGFEPPGDFPFEDYSQHIYRTISDGTISASKQESGKMDAKTTVGKAKGKLWLFGKKPKGPALEDFSHLPPEQRRKKLQQRIDELNRELQKESDQKDALNKMKDVYEKNPQMGDPGSLQPKLAETMNNIDRLRMEIHKNEAWLSEVEGKTGGRGDRRHSSDINHLVTQGRESPEGSYTDDANQEVRGPPQQHGHHNEFDDEFEDDDPLPAIGHCKAIYPFDGHNEGTLAMKEGEVLYIIEEDKGDGWTRARRQNGEEGYVPTSYIDVTLEKNSKGAVTYI

SEQ ID NO: 65 - DNA, 3917 bp, Homosapiens
atgagctggggcacggagctgtgggatcagttcgacagcttagacaagcatacacaatggggaattgacttcttggaaagatatgccaaatttgttaaagagaggatagaaattgaacagaactatgcgaaacaattgagaaatctggttaagaagtactgccccaaacgttcatccaaagatgaagagccacggtttacctcgtgtgtagccttttttaatatccttaatgagttaaatgactatgcaggacagcgagaagttgtagcagaagaaatggcgcacagagtgtatggtgaattaatgagatatgctcatgatctgaaaactgaaagaaaaatgcatctgcaagaaggacgaaaagctcaacaatatcttgacatgtgctggaaacagatggataatagtaaaaagaagtttgaaagagaatgtagagaggcagaaaaggcacaacagagttatgaaagattggataatgatactaatgcaaccaaggcagatgttgaaaaggccaaacagcagttgaatctgcgtacgcatatggccgatgaaaataaaaatgaatatgctgcacaattacaaaactttaatggagaacaacataaacatttttatgtagtgattcctcagatttacaagcaactacaagaaatggacgaacgaaggactattaaactcagtgagtgttacagaggatttgctgactcagaacgcaaagttattcccatcatttcaaaatgtttggaaggaatgattcttgcagcaaaatcagttgatgaaagaagagactctcaaatggtggtagactccttcaaatctggttttgaacctccaggagactttccatttgaagattacagtcaacatatatatagaaccatttctgatgggactatcagtgcatccaaacaggagagtgggaagatggatgccaaaaccacagtaggaaaggccaagggcaaattgtggctctttggaaagaagccaaagggcccagcactagaagatttcagtcatctgccaccagaacagagacgtaaaaaactacagcagcgcattgatgaacttaacagagaactacagaaagaatcagaccaaaaagatgcactcaacaaaatgaaagatgtatatgagaagaatccacaaatgggggatccagggagtttgcagcctaaattagcagagaccatgaataacattgaccgcctacgaatggaaatccataagaatgaggcttggctctctgaagtcgaaggcaaaacaggtgggagaggagacagaagacatagcagtgacataaatcatcttgtaacacagggacgagaaagtcctgagggaagttacactgatgatgcaaaccaggaagtccgtgggccaccccagcagcatggtcaccacaatgagtttgatgatgaatttgaggatgatgatcccttgcctgctattggacactgcaaagctatctacccttttgatggacataatgaaggtactctagcaatgaaagaaggtgaagttctctacattatagaggaggacaaaggtgacggatggacaagagctcggagacagaacggtgaagaaggctacgttcccacgtcatacatagatgtaactctagagaaaaacagtaaaggttcctgaagagggtttctgaggaaatgggcaagatgttgaaggaggttacatgcagctgcttttgggggagggtattagagttgtcaggctcaaagagagtgagagaagcaagttgcatgagtgcatgcagacatgattttttttttactaacttcattagcatttccatacattgtttttaaaaatcataataccaacccttaagttcctagttcacagttattcccacaaaagaaaaagccaacaatagtgtaccatttttctatttattttattgctgtctaatcaataaagaatgcagagctgtcaaaaaatgtgtcttacattagctgtcccaacaggattgtcttccctcccagctctgttttaattggcttttagacccactatctgtcagatccttgccatctgtcagtgtctgcctgcgccacctccgtgcttgcttaacatcctgttgcatgtctagcgtgattgagctagatttttcaggcatgtctttagattcccttgttcttgtcaaagccttgttttgttttacatttgtagtgcaaatcactttgtcaaacatctccagcactaatgtttccatcttagtatttgtgcacactgctataacttccccactgcaaacattccagttttggcattacgaagaagtagctgtgaacctgaagtatttatgataagaaaaagaaaacatctctgctgtagcctacagcccagttgaaagaactctttgaaacgtgatacatcttcagcacctcagtctgggaagaatctagtcagcactgaaatcctggcataataaacacagaagatattcaccacctcaagacaaaggactattgtcaaaagtcagctgcttccattcaaatgctgccttaaacttgagtgcctaaatctgttgattgccaacactaccactacagtatcccacaaagggctttatgtgtcagctcagtgcgacctgctttaactctgcagcaccgctgcagctgccgatgtagcctcggtaggtggctattagagctctaccatatacagtggtgcatcttcaaatttatgcatcaaactaaagacatgtccaagtccattttaatttcctcagtggttttatgagaagttttatgggcctcccccaattgtctttttattttgggttatgacgatcatgtttgataattacaatgatagtctctttccacgtgatgcttttgtttgaacctgataaaatttagtgaaactttgtaatgatctatgtgcacttttacttgtaaaatggaatttctgtatgtttatacttgtaaatatgattgttgttagtgctcctgttgctcatggtgtcctgcctcgcatttgtgattctgttaatgacatgtatcttaactaatttcttagtggtgttgtaatagggagatggggcaggtggggggttatttgtaccactgaatcttcattaatttggttctttactgttttgaggggagaaagaacgtgaaatggtttgtgtattattgaattttaagcaatattttagaagctgtgtgactgctttaataactttttcccagtgttatttgaatcatactacccgttatactaaagctgaatgacaattgtgtgaaagttactgccttcataagatcaagtcaccactgttacacagctgacatatagtgtattacctttgcagctagtaaactataaagtttagatattgaatctcgttacagggttatttatataatgtgacattattcagtactgacagactacatgaagtagttttaaaatctagtgctatttttattttaaaggttagcaatgaggaggaaatgtgatctggctgtgtttgtcttctgtacaaagcctgaagtgcttatggttttttggctaacagccacagagggcaaagtttaagactttcttgtaaggactaactgttcttttcaagctactgtttgtttttctaaaagcaggatttgcttccgtaggaggcaagttccttgatgtggaatagtgcaacctgtatatgggttattataataggaaagacatttgtacttgcacagtttaaatcattcttaaattttgaacatgtgaattgtcccaaaaaatctttaattttttggtaatttttactctttttgtgcacatgttgatttcttaatggtaaatccttcatttaaagatagtgttctctgttgagaatatttacatggaataaaacaatcttttcatggcctgttaaaaaaaaaaaaaaaaaaaaaaaaaaaaaa

SEQ ID NO: 66 - protein, 547 aa, Homosapiens
MSWGTELWDQFDSLDKHTQWGIDFLERYAKFVKERIEIEQNYAKQLRNLVKKYCPKRSSKDEEPRFTSCVAFFNILNELNDYAGQREVVAEEMAHRVYGELMRYAHDLKTERKMHLQEGRKAQQYLDMCWKQMDNSKKKFERECREAEKAQQSYERLDNDTNATKADVEKAKQQLNLRTHMADENKNEYAAQLQNFNGEQHKHFYVVIPQIYKQLQEMDERRTIKLSECYRGFADSERKVIPIISKCLEGMILAAKSVDERRDSQMVVDSFKSGFEPPGDFPFEDYSQHIYRTISDGTISASKQESGKMDAKTTVGKAKGKLWLFGKKPKGPALEDFSHLPPEQRRKKLQQRIDELNRELQKESDQKDALNKMKDVYEKNPQMGDPGSLQPKLAETMNNIDRLRMEIHKNEAWLSEVEGKTGGRGDRRHSSDINHLVTQGRESPEGSYTDDANQEVRGPPQQHGHHNEFDDEFEDDDPLPAIGHCKAIYPFDGHNEGTLAMKEGEVLYIIEEDKGDGWTRARRQNGEEGYVPTSYIDVTLEKNSKGS

SEQ ID NO: 67 - DNA, 3184 bp, Homosapiens
gcctgctgctggccgggcgggggacggggccgggaccggagccggagctgcggggcgcaccggctagacgcgcgcgggattctcggcgggcacgccccgcggaccatgagcgtccccagctccgggagcagccgcggcgcgggcggtgcgaggccggccgcgcggcgcctttgagccccagccggaggtccagagatcctgagagcccgagcgcccagcgccgcgccgggagagttgagaattatggctgcaggaaaatttgcaagccttcccagaaacatgccggtgaatcaccagttccccctggcctcatccatggaccttctgagcagcaggtcccctctcgctgagcatcgcccagatgcctatcaagatgtgtctatacatggcacccttccacggaagaaaaaaggtcctcctcccataaggtcctgtgatgacttcagtcacatgggcaccctcccccactccaaatccccacggcagaactcgcctgtgacccaggatggcatccaggagagcccatggcaggaccggcacggcgaaaccttcaccttcagggatccacatcttctggacccaactgtggaatatgtgaagttctccaaggagaggcacatcatggacaggacccccgagaaactgaagaaggagctggaggaggagctgctcctgagcagcgaggacctgcgcagccatgcctggtaccacggccgcatcccccgacaggtgtctgaaaaccttgtgcagcgagatggtgacttcctagttcgtgactctctgtccagccctgggaactttgtcctgacctgtcagtggaagaacctcgctcagcacttcaaaatcaaccggacagttctgcgactcagcgaggcctacagccgcgtgcagtaccagttcgagatggagagcttcgactccatccccggcctggtgcgctgctacgtgggcaaccgccggcccatctcccagcagagtggcgccatcatcttccagcccatcaacaggacggtgcctctgcggtgcctggaggagcattatggcacctccccaggccaggcccgggagggcagcctcaccaagggaaggccggatgtggccaagaggctgagcctcaccatgggtggcgtccaggcccgagagcagaatttgcccaggggaaacctcctcagaaacaaagaaaagagtggtagccagcccgcctgcctggatcacatgcaggacagaagagccttgtccctcaaagcccaccagtcagagagctacctgccgattggctgcaagctgccacctcagtcctcgggtgtggacacaagcccctgcccaaactcacctgtgttcaggacgggaagcgagcctgccctgagcccagcagtggttcggagggtctcctcagacgccagggctggggaggcgctgaggggatcagacagtcaactgtgccctaagcccccgcctaagccctgcaaggtgccgttcctcaaggttccctcgtctccctctgcctggctcaactcagaggccaactactgtgaactgaacccagcgtttgccacaggctgcggcaggggagcaaagctaccctcatgtgcccagggaagccacacagaactgctcacagccaagcagaatgaggcgccaggtccccggaactctggcgtcaactacttgatccttgatgatgatgacagggaaagaccttgggaacctgcggcagctcagatggagaaggggcagtgggacaagggcgagtttgtgacgcccctcctggagactgtctcctccttcaggcccaacgagtttgagtcaaagttccttccccctgagaataagcccctggaaacagcaatgttgaaacgtgcaaaagaactgttcaccaacaacgaccccaaggtcatcgcccagcacgtactgagcatggactgcagggttgctaggatacttggagtctctgaagagatgaggaggaacatgggggtgagctcaggcctggaactcattaccttgcctcacggacaccagctgcgcctggacataattgaaagacacaacacaatggccatcggcattgcagtggacattctgggatgcacgggcactttggaggaccgagcggccactctgagtaagatcatccaggtggcggtggaactgaaggattccatgggggacctctattccttctcagctctcatgaaagccctggaaatgccacagatcacaaggttagaaaagacgtggactgctctgcggcaccagtacacccaaactgccattctctatgagaaacagctgaagcccttcagcaaactcctgcatgaaggcagagagtccacatgtgttcccccaaacaatgtatcagtcccactgctgatgccgcttgtgacgttaatggagcgccaggctgtgacttttgaaggaaccgacatgtgggaaaaaaacgaccagagctgtgaaatcatgctgaaccatttggcaacagcgcgattcatggccgaggctgcagacagctaccggatgaatgctgagaggatcctggcaggttttcaaccagatgaagaaatgaatgaaatctgcaagactgaatttcaaatgcgattgctatggggcagcaaaggtgcacaagtcaatcagacagagagatatgagaaattcaaccagattttaactgccctctcgcgtaaattggaacctcctcctgtaaagcaggcagagctttgataactctccagagaacctttagaatatcttttcaagtttccccagcttcatctttgggaaagcttactgtttttgataaagtaataatgtgcaaatctgacaatatacaagcttttagtatccacaggatattaaacgtgtaaattgcacagagcacacttatttatgaattgtctaaagttactactgattttaaaatgaataatttattattaaggtaactactgctaatgttgatcagcaaatttaagagaagacctagctatgttggctggttgctttctattatcatggtatttgaccattttagttttaattccatgtcagataagtgtaaatagaagagtttaaaagcatgaaacatttcagaaggtatcagttatatgatattctttaaacaaatatgaaaaatgtaaatactcatgaatgaaaatacatctttttgtgaaaaaaaaaaaaaaaa

SEQ ID NO: 68 - protein, 825 aa, Homosapiens
MAAGKFASLPRNMPVNHQFPLASSMDLLSSRSPLAEHRPDAYQDVSIHGTLPRKKKGPPPIRSCDDFSHMGTLPHSKSPRQNSPVTQDGIQESPWQDRHGETFTFRDPHLLDPTVEYVKFSKERHIMDRTPEKLKKELEEELLLSSEDLRSHAWYHGRIPRQVSENLVQRDGDFLVRDSLSSPGNFVLTCQWKNLAQHFKINRTVLRLSEAYSRVQYQFEMESFDSIPGLVRCYVGNRRPISQQSGAIIFQPINRTVPLRCLEEHYGTSPGQAREGSLTKGRPDVAKRLSLTMGGVQAREQNLPRGNLLRNKEKSGSQPACLDHMQDRRALSLKAHQSESYLPIGCKLPPQSSGVDTSPCPNSPVFRTGSEPALSPAVVRRVSSDARAGEALRGSDSQLCPKPPPKPCKVPFLKVPSSPSAWLNSEANYCELNPAFATGCGRGAKLPSCAQGSHTELLTAKQNEAPGPRNSGVNYLILDDDDRERPWEPAAAQMEKGQWDKGEFVTPLLETVSSFRPNEFESKFLPPENKPLETAMLKRAKELFTNNDPKVIAQHVLSMDCRVARILGVSEEMRRNMGVSSGLELITLPHGHQLRLDIIERHNTMAIGIAVDILGCTGTLEDRAATLSKIIQVAVELKDSMGDLYSFSALMKALEMPQITRLEKTWTALRHQYTQTAILYEKQLKPFSKLLHEGRESTCVPPNNVSVPLLMPLVTLMERQAVTFEGTDMWEKNDQSCEIMLNHLATARFMAEAADSYRMNAERILAGFQPDEEMNEICKTEFQMRLLWGSKGAQVNQTERYEKFNQILTALSRKLEPPPVKQAEL

SEQ ID NO: 69 - DNA, 3505 bp, Homosapiens
atgggccggtgaagggaaaggaaatagctctacgagcggcatcctgcctgcgttagcggcggtggaggaggaggcagagaggagtggagggcggagtagacggaggaggctgctgcagagaagaaagtgtcagagccggttcggctttagagtgtggtgaagggtacttttcatggtgcatggaaggaaagccaatgcgcaggtgtaccaacattcgaccaggagagactggaatggatgtaacaagccgctgcacccttggagaccccaacaaactgccagaaggggttccccaacctgcccgcatgccctatatctcagacaagcaccctcgacaaaccttggaagtgattaaccttctgagaaagcaccgggagctatgtgatgtggtgctagttgtgggcgccaagaagatatatgcccatcgagtcattttgtcagcctgtagtccctacttccgagctatgtttacaggagaattggcagagagccgtcagacagaagtagtgatccgagacattgacgagagggctatggaattactgattgactttgcgtatacctcccagataacagtagaagagggcaatgttcagactcttctgccagctgcttgcctcctccagctggcagaaatacaggaagcctgctgtgaattcttaaagagacaattagatccttctaactgcctgggcattcgggcttttgctgacacacattcatgtcgtgagttgctaaggatagcagacaagttcacccaacataactttcaagaggtaatggagagtgaagagttcatgttgcttccagccaatcaactcattgatataatatccagtgatgagctaaacgttcgcagtgaagaacaagtgttcaatgcagtgatggcctgggtcaaatacagtattcaggaaagacgtcctcaattaccccaggtgctgcagcatgttcgtttgcctttgcttagtcccaagttcctggtcggcacagtaggctctgatcccctcatcaaaagtgatgaagaatgcagagacttggtagatgaggctaaaaactacctcctattgccgcaagaacgaccactaatgcaaggaccaaggacgagaccacggaaacctatccgatgtggggaagtactctttgcagttggtggttggtgcagtggagatgccatttccagtgttgaacgatatgatccacagaccaatgaatggagaatggtggcttcaatgagcaaaaggagatgcggagttggggtcagtgttcttgatgatctgttatatgcagtaggaggccatgatggatcctcttatctcaatagtgttgaaaggtatgaccccaaaacaaaccagtggagcagtgatgtggcccctacaagcacctgcaggacaagtgttggtgtagcagtacttggaggctttctttatgctgtgggtggccaggatggtgtgtcttgcctcaacattgttgagaggtatgatccgaaggagaacaagtggactcgggtagcttctatgagtaccagaagactaggtgtggctgtggctgtgttaggagggttcttatatgctgtaggtggctctgacgggacatctcctctcaacacagtggaacgttacaatcctcaggaaaacagatggcacactatagcccctatggggacccggaggaaacacctaggctgtgcagtatatcaggacatgatctatgctgtaggaggtagagatgacactacagagctgagcagtgctgagagatacaaccccagaaccaaccagtggtctccagtggtggccatgacatcacgccgtagtggagttggcctggcagtggtcaatggacagctcatggcagtaggaggttttgatggcacaacatacttgaagaccatagaagtttttgatcctgatgccaatacatggaggttatatggcgggatgaattaccgtcggctagggggtggcgtaggagttattaaaatgacacattgtgaatcccatatttggtgaacacagagaagacagtcttgtatatattcctctgtattctggggagctttgaccttggagctttgtacagcttgagaaaacattagaacaaattttattatttgccggtgcctcaacaaatggaaatacaatccaatgaaagtacttcacctgcaagatgcacaataattttcaactctgtgcagaagaatatttatttttggttttaatttatcatggttttttgttgttttcgttttgaacttatccttcctcccacaaaaaaagaaaagaagaaaaaattccaagcagcaaaacttactttgtttgtaaggtattcatttaggtttgaaaatactatttaataagggcagaagggctatatatgatttggctattatttctagacactccatccacatgattccactaacaaggattaccaggaataaaggtaggtatgcaaaatgtattagctacccattattctcgcactaaccaccagaagacttgaaaatcttaaaaaaaaaaaacaaaaaaacaagaaaaggcaacatctcattttaaatagtacaattcagaagggatactaaatcaataaaaaccaggactcagacactacagttttcatcagtgtaattttatgtcttgtttctttctatatgaacttgtttatttagtctttttttcataatattctcatagagtttctgctagatctagagctctgctcagtgcctcttataaaaacaatatataagtctcatatgctgtcttgagaatccaagagaatcacatgcagctctgcaacagtttttgctcaaaaatgttactgactaaagcaactgtccttcctgtttccttattgctaccaaggaccagcagggagaaatgtcttctcccagcagtgaattctgttatgcaatttattcttgatgctcaggcctggttaagctgaggcttacctttaataacagcctccaagggaatgaattattcagttaatgtaatagcacacattaaagagtgtaaaatcaattgaggcattttattaatatcttggttcttttatacaaacaatgtatcattatcttcattctataaggtcattgttactacttctctcaaattgcactttctggtaaaaagttaaaaatttttaaggaaaaaataatttcaatggttaaagttttttttcctcattgtattcatagacaaatttttttcaatatattttgcaagaaaaatctttgaataagactaactgcatttaaaaggaataacctccttctccctttccccaactacaaaaatgtttggcaactttgtgtttacatttaaagatcatttgcacctttttcaaggaaaaaaagtattgagtaaacaattgtttacatatatcatttatgcttttttctagcatgtataacttttttaaataaaggtagtatttaccattaaaaaaattttagctaaaaaaaaaaaaaaaaaaaaaaaaaaaaaaaaaaaaaaaaaaa

SEQ ID NO: 70 - protein, 609 aa, Homosapiens
MEGKPMRRCTNIRPGETGMDVTSRCTLGDPNKLPEGVPQPARMPYISDKHPRQTLEVINLLRKHRELCDVVLVVGAKKIYAHRVILSACSPYFRAMFTGELAESRQTEVVIRDIDERAMELLIDFAYTSQITVEEGNVQTLLPAACLLQLAEIQEACCEFLKRQLDPSNCLGIRAFADTHSCRELLRIADKFTQHNFQEVMESEEFMLLPANQLIDIISSDELNVRSEEQVFNAVMAWVKYSIQERRPQLPQVLQHVRLPLLSPKFLVGTVGSDPLIKSDEECRDLVDEAKNYLLLPQERPLMQGPRTRPRKPIRCGEVLFAVGGWCSGDAISSVERYDPQTNEWRMVASMSKRRCGVGVSVLDDLLYAVGGHDGSSYLNSVERYDPKTNQWSSDVAPTSTCRTSVGVAVLGGFLYAVGGQDGVSCLNIVERYDPKENKWTRVASMSTRRLGVAVAVLGGFLYAVGGSDGTSPLNTVERYNPQENRWHTIAPMGTRRKHLGCAVYQDMIYAVGGRDDTTELSSAERYNPRTNQWSPVVAMTSRRSGVGLAVVNGQLMAVGGFDGTTYLKTIEVFDPDANTWRLYGGMNYRRLGGGVGVIKMTHCESHIW

SEQ ID NO: 71 - DNA, 1910 bp, Homosapiens
gtctctgacaggctcagctggagagggacgggttgggacgcactgtccttttgcccttccccctccgcgagcagaagctgactccgcaggagcgagggtcgcagagctgggtgagcggaaatgtccctcccagagtgaagtcgcagggcccgccccgcgtctgagggagcggaggtcttcctgggggatttcagtctccacatagttttggagccggacttttgaagaatgattcgtgaatccggaatgggtgacagcgtcatcacggcattttattgacagaccatggattcttacagtgcaccagagtcaactcctagtgcatcctcaagacctgaagattactttataggtgccactcctctgcagaaacgattagaatcggtcaggaagcagagttcatttatcctgactccacctcgaaggaaaattccccagtgttcgcagttgcaggaagatgttgaccctcaaaaggttgcattccttctgcataaacagtggactttatatagtttaactcccttatataaattctcctatagtaatctcaaagagtattctagacttctcaatgcttttattgttgctgaaaagcaaaaaggacttgctgtggaagtgggagaagacttcaacatcaaagtgattttttctactctcctaggaatgaaaggaacacaaagggacccggaagcatttcttgtccagattgtgtcaaaatctcaattgccatctgagaatagagaaggtaaagtgctgtggactggctggttctgctgtgtatttggagacagtcttctggagactgtttcagaagatttcacctgtctgcccttattccttgcaaatggagcagagtctaacacagcaataattggaacttggtttcagaaaacctttgactgttatttcagtcctttagcaatcaatgcatttaatctttcctggatggctgccatgtggactgcatgcaaaatggaccattatgtggctactactgaatttctttggtctgtaccctgtagccctcaaagtctggacatttctttcgcaatacatccagaggatgcaaaagctctatgggacagtgtccacaaaacacctggggaggttacccaggaagaagttgacctattcatggattgcctttattcacatttccatagacatttcaaaattcatttatcagccacaagattagttcgtgtttcaacatctgtagcttcagcacatactgatggaaaaataaagattctgtgtcataaataccttattggagtgttagcatatttgacagaactggcaatttttcaaattgagtgaagccttatgtggactataagttatagattatatactcttattgataacttgcctaattgctatgctgaaagagactgcaggagaaataggcatctatctctgcatctgttttccccaccatgcctttggagttgccaagatggaagccaagaaggatctagaagaacaaagaatatggtagtagatgagccacagccaggtgcccatgtactaatcatgataacctgacatgccattctcaaaatgctgagttgttaatttcttgtcatctttaaatatatatatataggctgggcttggtggctcacacctgtaattccagcactttgggaggctgaggtgggtggatcatttgaggccaggaattcaagaccagcctggccaacatggtgaaaccccttctctactgaaaatacaataattagctgggcgtggtggcacatgcctgtgatcccagctactggggaggctgaggcaggagaatcgttttaacccagaagacaggctgcagtgagccaagactgcaccactgcactccagcctgggcaacaaagtgagactctgcctcaaaaaataaaaaaaaaaaaaaa

SEQ ID NO: 72 - protein, 344 aa, Homosapiens
MDSYSAPESTPSASSRPEDYFIGATPLQKRLESVRKQSSFILTPPRRKIPQCSQLQEDVDPQKVAFLLHKQWTLYSLTPLYKFSYSNLKEYSRLLNAFIVAEKQKGLAVEVGEDFNIKVIFSTLLGMKGTQRDPEAFLVQIVSKSQLPSENREGKVLWTGWFCCVFGDSLLETVSEDFTCLPLFLANGAESNTAIIGTWFQKTFDCYFSPLAINAFNLSWMAAMWTACKMDHYVATTEFLWSVPCSPQSLDISFAIHPEDAKALWDSVHKTPGEVTQEEVDLFMDCLYSHFHRHFKIHLSATRLVRVSTSVASAHTDGKIKILCHKYLIGVLAYLTELAIFQIE

SEQ ID NO: 73 - DNA, 3187 bp, Homosapiens
ggttctggccgcgggagcctctcgagaagcgtggaaagaggagaagggcgtataccttgtgaccgcctctggttgtcttgggctcgcgcctggcgccgctacgtggagtcgctctctcgtcgtcacttttggctgccgacttgttgagtagaagtgcagactgatgctttaagactcagggagaggtctttcccttatctccaccccagcaagcaccccagagaccttggagatttgtcttgtttctagacacgtgtactccaatgttgtgcggaggaggccttaaatattcgagaagagagtgggaactcctggaattttaagggatttctgtgtatttccaaaactgacttttaactaccggcagcgtgggatttcgtgattgtttttcgccatcgtgtggctccaacatgtacttcccttcttggttaagtcagctgtacaggggtttatccagacccatcagaaggaccacccaaccgatctggggttctctctacagaagtctgttgcagagttcacagaggagaattccagaattcagtagctttgttgtccggaccaacacatgtggagagttgcgttcgtctcacttaggccaagaagtcaccttgtgtggatggattcagtaccgaaggcaaaacacattcttggtcctaagagatttcgatgggcttgttcaagttatcattccccaggatgagtcggcagcctctgtgaagaagattttatgtgaagcccctgtggaatctgtggtgcaagtgtctggtacagtcatttcccgtcctgcaggacaagagaatccaaaaatgccaacaggtgagattgaaatcaaagttaaaacagctgagcttctgaatgcctgcaagaagctgccctttgaaattaagaacttcgtgaagaaaacagaggctcttcggttgcagtatcgctacttagacttgcgtagtttccaaatgcagtataacctgcgactgaggtcccagatggtcatgaaaatgcgggaatatctctgtaatctgcatgggtttgtggatatagaaacccccacattgtttaagaggaccccagggggtgccaaagagtttttagtaccatccagggaacctggaaagttttattctctccctcagagtcctcaacagtttaagcaacttctgatggttggcggtttagacagatattttcaggttgcccgatgttatcgagatgaaggttcaagaccagacagacagcctgagtttactcagattgacatagagatgtcatttgtagaccagactgggatccagagtttaattgagggtttgctccagtattcctggcccaatgacaaagatcctgtggttgttccttttcctactatgacttttgctgaggtgctggccacctatggaactgataaacctgacactcgctttggaatgaagattatagatatcagtgatgtgtttagaaacacagagattggatttcttcaagatgcacttagtaagccccatggaactgtgaaagccatatgtatccctgaaggagcaaaatacttaaaaaggaaagacattgaatccattagaaactttgcagctgaccattttaatcaggaaatcttacctgtattccttaacgccaatagaaactggaattctccagttgctaatttcataatggagtcacaaagactggaattaatcagactaatggagacccaagaggaagatgtggtcctactaactgctggagagcacaataaagcatgctctttgttaggaaaattacgactggaatgtgctgaccttctagaaacaagaggagtggtgctccgtgaccccactctgttctctttcctttgggtggtagatttcccactcttcctgcccaaggaggaaaatcccagagagctggaatcggcccaccacccatttactgctccccaccccagtgacatacatctcctgtacactgagcccaaaaaggcccgtagccaacactatgacttggttttaaatggcaatgaaataggaggtggttcaattcgaattcacaatgcagagctgcagcgttatatcctggcaaccttactaaaggaggatgtgaaaatgctctcccatctgctccaggctttagattatggggcaccccctcatggaggaattgccttagggttagacagactgatatgccttgtcactggatctccaagcatcagagatgtcatagccttcccaaagtccttccggggacatgacctcatgagcaataccccagattctgtccctcctgaggaactgaagccctatcatatccgagtctccaagccaacagactccaaagcagaaagagctcattgaatcatgcataccatgcagaaagttgagcttttaggttttgtcctctttgcttccccaaggctaaagtcagatctagagttctgccacaggtctaacaatcaagtctttagatggaaggaatccaggcaacattcttcaccacaacgaagaaacagataaaagatacccaattttgacttgatttcatgcatcatttggattttttttggttaggactttttttgaagttcctttttacttaggtgtgaaagatggttctttgttgaaataatatagtggtttagtgttttcaaatcatgtttctcatacccagatagtagattattcacttaggacagaggtaatcaaattatgtgtgaaatgtaggaaaatgcttgcccctgtaaactagtgagttgatggagcatttgcttcatcatcctcatcaagagaatcatataaattaagctttataatgacatttcaaccatcaacataatatagtgaggagtagcataatattttttaataatgcagaaaacatcactgaaatgagagtcacaaatttttcttcagtgtttcagcctgagtaagttacataaacctcgcttagcctcccttcctgctaatgtgtaaaatacatacttgccctggctacctcaccgggctgttattgctggaatcagaggagataacatatatggaagataaagtgaataaaagtactttgaaaaactataaagcattccacaaatatgagatgatggtattatccatccataaataggtagatatatctctattttatagtttcagattaaacaaaactgatatcaatagtaaaagtcattttacttatc

SEQ ID NO: 74 - protein, 645 aa, Homosapiens
MYFPSWLSQLYRGLSRPIRRTTQPIWGSLYRSLLQSSQRRIPEFSSFVVRTNTCGELRSSHLGQEVTLCGWIQYRRQNTFLVLRDFDGLVQVIIPQDESAASVKKILCEAPVESVVQVSGTVISRPAGQENPKMPTGEIEIKVKTAELLNACKKLPFEIKNFVKKTEALRLQYRYLDLRSFQMQYNLRLRSQMVMKMREYLCNLHGFVDIETPTLFKRTPGGAKEFLVPSREPGKFYSLPQSPQQFKQLLMVGGLDRYFQVARCYRDEGSRPDRQPEFTQIDIEMSFVDQTGIQSLIEGLLQYSWPNDKDPVVVPFPTMTFAEVLATYGTDKPDTRFGMKIIDISDVFRNTEIGFLQDALSKPHGTVKAICIPEGAKYLKRKDIESIRNFAADHFNQEILPVFLNANRNWNSPVANFIMESQRLELIRLMETQEEDVVLLTAGEHNKACSLLGKLRLECADLLETRGVVLRDPTLFSFLWVVDFPLFLPKEENPRELESAHHPFTAPHPSDIHLLYTEPKKARSQHYDLVLNGNEIGGGSIRIHNAELQRYILATLLKEDVKMLSHLLQALDYGAPPHGGIALGLDRLICLVTGSPSIRDVIAFPKSFRGHDLMSNTPDSVPPEELKPYHIRVSKPTDSKAERAH

SEQ ID NO: 75 - DNA, 77 bp, Homosapiens
aaccaatgatgtaatgattctgccaaatgaaatataatgatatcactgtaaaaccgttccattttgattctgaggtt

SEQ ID NO: 76 - DNA, 1347 bp, Homosapiens
ccacccccggagctctcacccctccagtgccgacggtagcgaaagactttcctccaggggcttcctcactggggaattgccggaaagagcaaacaaaaaaggcgctggtgtaggctccaaaataaacacatctgaattcatgatggcatcgacagaggctcttattggattaaaagtttcaaaacaaacaataacgctttggaaaaagggttgaatgcaccctcaggcacgaccatggagaaaggtgggaacatacaattggagattcctgacttcagcaactctgtcctgagccatctaaaccagttgcgcatgcagggccgtctctgtgatattgtggtcaatgtgcaaggacaagcttttcgggctcacaaagtggtgctggctgccagctccccctatttccgggatcacatgtccttgaatgagatgagtacagtctccatttcagtcatcaagaaccctactgtttttgaacagctcctttctttctgttacacagggcggatatgcctgcaactggcagatatcatcagctacctaacagctgccagttttctgcaaatgcagcatattatagacaaatgtacacagatcctggagggcattcatttcaaaattaatgtggctgaggttgaagcagaattaagtcaaacaaggacaaagcatcaagagagacctccagagtctcacagggttacaccaaatctcaaccgctcccttagcccacgacataataccccaaagggaaaccggcgaggtcaggttagtgctgtgctggatatcagagagctaagtcctcctgaggagtccaccagccctcagatcattgaaccaagttctgatgtagagagccgggagcccattcttcggatcaaccgagcaggacagtggtatgtggagacaggagtggcggaccgtgggggtcggagtgatgatgaagttagagttcttggagcagtacacatcaaaactgaaaatctggaggagtggcttgggcctgagaatcagccttctggagaagatgggagtagtgcagaggaagtaacagccatggtgattgataccacaggccatggttctgtaggacaggaaaattatactttagggtcttcaggagccaaggtggctcggccaacaagcagtgaagttgacagatttagcccctccggcagtgttgttcccttgacagagagacacagagccagaagtgagtctcctgggagaatggatgagcctaagcaacccagctcccaggtatggagttgtggatttagaactgctttggtggttggaggaattgctactgtgtatgaatagaaaataatgaaaaaaaaaaaaaaaaaa

SEQ ID NO: 77 - protein, 361 aa, Homosapiens
MEKGGNIQLEIPDFSNSVLSHLNQLRMQGRLCDIVVNVQGQAFRAHKVVLAASSPYFRDHMSLNEMSTVSISVIKNPTVFEQLLSFCYTGRICLQLADIISYLTAASFLQMQHIIDKCTQILEGIHFKINVAEVEAELSQTRTKHQERPPESHRVTPNLNRSLSPRHNTPKGNRRGQVSAVLDIRELSPPEESTSPQIIEPSSDVESREPILRINRAGQWYVETGVADRGGRSDDEVRVLGAVHIKTENLEEWLGPENQPSGEDGSSAEEVTAMVIDTTGHGSVGQENYTLGSSGAKVARPTSSEVDRFSPSGSVVPLTERHRARSESPGRMDEPKQPSSQVWSCGFRTALVVGGIATVYE

SEQ ID NO: 78 - DNA, 1559 bp, Homosapiens
aaagaaccagttttcaggcggattgcctcagatcacactatctccacttgcccagccctgtggaagattagcggccatgtattccaatgtgataggaactgtaacctctggaaaaaggaaggtttatcttttgtccttgctgctcattggcttctgggactgcgtgacctgtcacgggagccctgtggacatctgcacagccaagccgcgggacattcccatgaatcccatgtgcatttaccgctccccggagaagaaggcaactgaggatgagggctcagaacagaagatcccggaggccaccaaccggcgtgtctgggaactgtccaaggccaattcccgctttgctaccactttctatcagcacctggcagattccaagaatgacaatgataacattttcctgtcacccctgagtatctccacggcttttgctatgaccaagctgggtgcctgtaatgacaccctccagcaactgatggaggtatttaagtttgacaccatatctgagaaaacatctgatcagatccacttcttctttgccaaactgaactgccgactctatcgaaaagccaacaaatcctccaagttagtatcagccaatcgcctttttggagacaaatcccttaccttcaatgagacctaccaggacatcagtgagttggtatatggagccaagctccagcccctggacttcaaggaaaatgcagagcaatccagagcggccatcaacaaatgggtgtccaataagaccgaaggccgaatcaccgatgtcattccctcggaagccatcaatgagctcactgttctggtgctggttaacaccatttacttcaagggcctgtggaagtcaaagttcagccctgagaacacaaggaaggaactgttctacaaggctgatggagagtcgtgttcagcatctatgatgtaccaggaaggcaagttccgttatcggcgcgtggctgaaggcacccaggtgcttgagttgcccttcaaaggtgatgacatcaccatggtcctcatcttgcccaagcctgagaagagcctggccaaggtagagaaggaactcaccccagaggtgctgcaagagtggctggatgaattggaggagatgatgctggtggtccacatgccccgcttccgcattgaggacggcttcagtttgaaggagcagctgcaagacatgggccttgtcgatctgttcagccctgaaaagtccaaactcccaggtattgttgcagaaggccgagatgacctctatgtctcagatgcattccataaggcatttcttgaggtaaatgaagaaggcagtgaagcagctgcaagtaccgctgttgtgattgctggccgttcgctaaaccccaacagggtgactttcaaggccaacaggcctttcctggtttttataagagaagttcctctgaacactattatcttcatgggcagagtagccaacccttgtgttaagtaaaatgttcttattctttgcacctcttcctatttttggtttgtgaacagaagtaaaaataaatacaaactacttccatctcacattaaaa

SEQ ID NO: 79 - protein, 464 aa, Homosapiens
MYSNVIGTVTSGKRKVYLLSLLLIGFWDCVTCHGSPVDICTAKPRDIPMNPMCIYRSPEKKATEDEGSEQKIPEATNRRVWELSKANSRFATTFYQHLADSKNDNDNIFLSPLSISTAFAMTKLGACNDTLQQLMEVFKFDTISEKTSDQIHFFFAKLNCRLYRKANKSSKLVSANRLFGDKSLTFNETYQDISELVYGAKLQPLDFKENAEQSRAAINKWVSNKTEGRITDVIPSEAINELTVLVLVNTIYFKGLWKSKFSPENTRKELFYKADGESCSASMMYQEGKFRYRRVAEGTQVLELPFKGDDITMVLILPKPEKSLAKVEKELTPEVLQEWLDELEEMMLVVHMPRFRIEDGFSLKEQLQDMGLVDLFSPEKSKLPGIVAEGRDDLYVSDAFHKAFLEVNEEGSEAAASTAVVIAGRSLNPNRVTFKANRPFLVFIREVPLNTIIFMGRVANPCVK

SEQ ID NO: 80 - DNA, 5431 bp, Homosapiens
ctttttttcaaagattttgattccagtggaatctttgctttagatttgtgtgtgtgtttgtgttcgtgaattgtaactccagaagcaatgcctgtacaagctccacaatggacggatttcctctcctgcccaatttgcactcagactttcgacgaaacaattcgaaagcccatcagtttgggttgtggccatactgtctgcaagatgtgcctgaataaactccaccgcaaggcttgcccatttgaccagaccactatcaatacagacattgagctcctccctgtgaactcagcattgctgcagctcgtgggtgctcaggtccctgagcagcagcctattactttgtgtagtggggttgaagacacaaagcattatgaggaagccaagaaatgtgtagaagaattagcattgtacttaaaaccgctcagcagtgctagaggagtgggtctgaacagcactactcagagtgttctgagtcgcccaatgcagaggaagcttgtgactctagtccactgtcaactagtagaagaagaaggcaggattcgtgccatgagggcagctcgatctttaggtgaacgaacagttacagagctcattctccagcaccagaatcctcagcaactctcttccaatctttgggcagcagtaagggctaggggatgccagttccttggaccagcaatgcaggaggaagctttaaagttggttctgctggccttagaagatggttctgctttgtcaagaaaagtattggttctgtttgtggtgcaaagattggagccacggtttcctcaagcctctaaaactagcattgggcatgttgttcagctcctttatagagcctcctgtttcaaggtcaccaaacgtgatgaagactcttctttgatgcagctgaaagaagaatttagaacctatgaagctctgcggcgagaacatgactcccagatagtgcagattgctatggaagcaggcttacgaattgcaccggaccagtggtcctctttgctttatggagaccagtctcacaaatctcatatgcagtccattattgacaagttgcagactccagcctcttttgcacagagtgttcaggaactaacaattgctctccagcgaactggagacccagcaaacttgaaccgactaagaccccatttggagctgttagcaaacattgaccctagtccagatgctcctcctcctacttgggaacagctggaaaatgggctggttgctgtgcgtacagtggtacatgggctggttgattatatccagaaccacagcaaaaaaggagcagatcagcagcagcctccacagcatagcaaatacaaaacatacatgtgtcgagatatgaagcagagaggaggatgccctcgtggggccagctgtacatttgcacactcacaggaggaactggaaaaatttcgtaaaatgaataagcgcctggttccgagaagacccttgagtgcctctttgggtcaacttaatgaggtgggcctgccttcagcagctatccttccagatgaaggtgcagtggatctccctagcagaaaacctcctgctctgccaaatggaattgtatcaacagggaatacagtaacacagcttattccgcgagggacagaccccagctatgattctagtctgaaaccaggaaaaatagatcatctgagcagtagtgctcctggatcccctcctgacctgctagaatctgttcctaagagtatttctgccttacctgtgaatccacattctatacctccaagggggccagcagatctgcctccaatgcctgttaccaaaccacttcagatggtacctcgaggttctcagttatatccagcacaacagacggatgtttattatcaggatcctcgaggagcagctccgccatttgaaccagcaccttatcagcagggtatgtattatactccaccaccacaatgtgtgtcccgctttgtccgacctccaccatctgctcctgaacctgctcctccctacttggatcattatccaccctacctccaagaacgtgttgtaaactctcagtatggcacacagccacagcagtacccacctatatacccatctcactatgatggccgtcgagtgtaccctgctccgtcttacacaagagaagagatattccgagaaagccctatacccattgagattccacctgcagcagtaccatcgtatgtaccagaatccagagaaagataccaacagatcgagagttactatccagtggctcctcatccaactcagatcagaccttcgtacctcagagaacctccttatagccggcttcctcctcctccccagcctcatcctagtctagatgaactacatcgccgacgaaaggaaataatggcccagctagaggaaagaaaggttatctctccacctccttttgcaccttcaccaaccttgcctcctacctttcatccggaagaatttttggatgaagacttgaaggtagctgggaaatacaaaggaaatgattatagccaatactctccctggtcatgtgacaccatcggctcctacattggaaccaaagatgcaaaacccaaagatgttgtggcagcagggagtgtggaaatgatgaatgtggagagtaaaggaatgagggaccagcgattagatcttcagagaagagcagcagaaaccagtgatgatgacctcatcccatttggagaccgaccaacagtgtctcggtttggtgccatctcacgaacttccaaaactatatatcagggtgctggtccaatgcaggctatggcacctcagggagctcctacaaaatctattaacatttcagattatagtccatatggaacccacggtggctggggagcttctccatattcacctcatcaaaacataccttctcagggacacttcagtgagagggagagaatatctatgtcagaagtggccagtcatggaaaaccccttccatctgctgagagagaacagctacgactagaattgcagcaattgaaccatcagattagccagcagacccagctacgtggactagaggctgttagtaacaggctggtgttgcagagggaggcaaacaccctggcaggccagtcacagcccccaccaccgccacctccaaaatggcctgggatgatctcaagtgagcagttgagcttggaactgcaccaggtggaaagggaaatcgggaagagaacacgggaactgagtatggaaaaccagtgttctctggacatgaaaagcaaactgaatacaagtaaacaagcagaaaatggacaaccagaaccacaaaacaaggttccggctgaggaccttacattgacattcagtgatgtaccaaatggatcagccttgacacaagagaatatcagcctcctatcaaacaagaccagctctctgaacctgtcagaggaccctgagggaggaggggataataatgactcccagagatcaggagttactcccagttctgctccttaaaatatgaggagtcctacttttatcttctgctcctaatcagtttgtcgggcataggggtaggagaacgcataacttctaaactttttctcttaagagcggtcagagaaatccaggaaattcaccagaggcaatgtgcacaaacaccactactaaaaacaaaccctgcacatagttcacattaatgcatttttttaatttaaagaaaaagaaaattagcagtatctgcaagcaattcagattaaatttgtttttgttctgtgaatgaactttattttaataactttggacgccttggatccagggctttaaaaaaaaaagatattatatatacactctgtttgattaattgtatgatcttaatgaagtaggttttcttgtattttggtattacatacccagtgtataatttgtataattcctcacccccaatccttatcaattctcaccaccccataaacttaaaacagaccaaaaatgtcagctttcagagaattctgtggtgcttgagaaacagacagtactagactgagttattagaaaatgtgcagcaaaccaacttttcccagagctgttatttggaattctttatccctttctagatcactagcttcattggatacgtatatttttcttgacattgaagctttttgtttgtttgggagggttttatttcttgtttttattttcaacttttcaaatagaattaccaattttgaagtcctcattttcatattaaggatcatttgcattctcttaatataatcagaaagctgattcagtgtttaattagatttaaatgttgatcaagaattaactgtaacttactagcactgaaaatacatgtttggtgtttcgcctgcgttcagctcatggttggaaatttgaagcagtgcttttcaaattaaacttttgctgacatcataggatgctaaaaaacaaggacaatcaactatgttttaaaactgcaacatttgatttgaacttaaaatgaatagagccacattattttaatggatgttttgttttacttgtgaactgattgagtcttaaggatagtttatgaattgatcacttgttgctcagaatcattagtataagtaggtaggaaatagtttgaagtcatttttcatagacttaactgtccaatgttgcaaatgtttcttcatgaaaatattgaaaagagtaaggttttttttttttttaattctgctgcacatattctgatgccatgtgtctgtgcttaattaactaagaccctataaaacgtgtttagtggggactgtttgatatagttgccctctccattcctctatttgcctgatttttttcagtttccctttctgtattttactactaaattagaaagcactggttatgtaataagttactacattgctttggttgagtaaaaacaagagtttatatttttcttgtttcttattttcttaacccttaactcctgctgaggtcataacaacctcagtctaagctctgtgtccatcatactgttaacttaaacaaatgggtggtgggggtgggaagggtaatacagtcctgccattgcctaccagtaggagagtccaaacagaacactcttttgagtagcaattatttaatttgcccagtcaaggcaccgtgtttatatactatttcacattgaatttgattatgccctacagacctggctggtcaaggatttgatatacacatattggcttgggattcgagctttcttttttatttaaataaaaatttatatatatattatatatatacatatatacatagctatatctgtatatatattgggtatgttttaaggattttttcgcatgagcgcagctgttgcgataaattgaccgattgggaggtggtagaagcactgaatgaaggtgaggctttttttttttccagttttcttatacatttgtcttcttttttt

SEQ ID NO: 81 - protein, 1133 aa, Homosapiens
MPVQAPQWTDFLSCPICTQTFDETIRKPISLGCGHTVCKMCLNKLHRKACPFDQTTINTDIELLPVNSALLQLVGAQVPEQQPITLCSGVEDTKHYEEAKKCVEELALYLKPLSSARGVGLNSTTQSVLSRPMQRKLVTLVHCQLVEEEGRIRAMRAARSLGERTVTELILQHQNPQQLSSNLWAAVRARGCQFLGPAMQEEALKLVLLALEDGSALSRKVLVLFVVQRLEPRFPQASKTSIGHVVQLLYRASCFKVTKRDEDSSLMQLKEEFRTYEALRREHDSQIVQIAMEAGLRIAPDQWSSLLYGDQSHKSHMQSIIDKLQTPASFAQSVQELTIALQRTGDPANLNRLRPHLELLANIDPSPDAPPPTWEQLENGLVAVRTVVHGLVDYIQNHSKKGADQQQPPQHSKYKTYMCRDMKQRGGCPRGASCTFAHSQEELEKFRKMNKRLVPRRPLSASLGQLNEVGLPSAAILPDEGAVDLPSRKPPALPNGIVSTGNTVTQLIPRGTDPSYDSSLKPGKIDHLSSSAPGSPPDLLESVPKSISALPVNPHSIPPRGPADLPPMPVTKPLQMVPRGSQLYPAQQTDVYYQDPRGAAPPFEPAPYQQGMYYTPPPQCVSRFVRPPPSAPEPAPPYLDHYPPYLQERVVNSQYGTQPQQYPPIYPSHYDGRRVYPAPSYTREEIFRESPIPIEIPPAAVPSYVPESRERYQQIESYYPVAPHPTQIRPSYLREPPYSRLPPPPQPHPSLDELHRRRKEIMAQLEERKVISPPPFAPSPTLPPTFHPEEFLDEDLKVAGKYKGNDYSQYSPWSCDTIGSYIGTKDAKPKDVVAAGSVEMMNVESKGMRDQRLDLQRRAAETSDDDLIPFGDRPTVSRFGAISRTSKTIYQGAGPMQAMAPQGAPTKSINISDYSPYGTHGGWGASPYSPHQNIPSQGHFSERERISMSEVASHGKPLPSAEREQLRLELQQLNHQISQQTQLRGLEAVSNRLVLQREANTLAGQSQPPPPPPPKWPGMISSEQLSLELHQVEREIGKRTRELSMENQCSLDMKSKLNTSKQAENGQPEPQNKVPAEDLTLTFSDVPNGSALTQENISLLSNKTSSLNLSEDPEGGGDNNDSQRSGVTPSSAP

SEQ ID NO: 82 - DNA, 6253 bp, Homosapiens
atgaattgtctgaagggacctcccattccccaaaaccaaaacggcaccttttccacaagggacaagaaacttttaaagagtcgcaaggttagatttcaggagcccttctatgggccatatcttttcctgtcgtccccaaatagctcttattgttcacacagcccaggagagacgttttggagtagcgtgtccgggccttttgggctgtttcacagccttaggaggctgaactcccagaggggtgacgaggacaaagctgatgagatccagaacctggataatatggaagaagaaaaatgggtctccggggcgggccggagcctgaggaagaggaaggggacgaggacaacgagcgactgggcggcggaggacgaggaggaggaagaggaggccgagcaacaagatggcccctgctgcaggagcagcctcagcagcagcaggtgggaggccggaggcggtgctggcggtggcggcggcagccgtggcccggcggcctgggacagaatcagagtcaacggtggcctcggcggcggcggcggctgccgcggcggtggcgacggccgcggggactcggagctgagaggagctgctgctcggaccagcgcggtgagcgagcggcgggcggcgacttggggagcggggctgccgcggccggggcctcagtcgggaacaataggcagctgtggtcgggaagggtttgtcctcgcccgccctctgctcctccgcggcagcggcagcccggccggccccaggctcctcagggcccccgccggctgttctggggcttgtcagtggccggcgtcctttaggcctcaggcctctgcatgccgcctgtagggcctgtcggggtaggtaggccgagaggaggacgaagggaggctcggacgagagggagggggcgaaagggctacctggctcctgtggtactcccagggcctgggccaggcggggaatgcgcacgggaactgctttttggacccctagtctgtgggggtgggggagggcgaaggcgtctgtaaacaggcgccgcctcggcctcccagcacctcagggctgcttcctcccccagcccctgaagcgctccccttctttggccaagtggatttcacggtgtctgtttccctgaagtccctggagatctagcctggtagtcttctccctgctggcgatgggaaaattgtgtgtgtgcaggtgtctttaaaaaaaaaaaacaaaaaacttaaatgcaacaaaaacatataaaatgtggttatcggtaaaggatggagtggtaagggatgcgcctctctaaacatctctaagtatcagttctataaacatcagttatgcccgcatcccaggtgagagtggattgaaacaagggctcttttggaacagtaataacacaactcttgacataccagaatagcctatgaaactggaaacaaacactggcaacgcggagacaaactgtaatgtttaaagaggacttttattccagctaggcgttttgaattactaacatgcagtataagaagcaacattaactagcataaagtggacctcaggaagcacttcgaaaggagacaggtggttcatctccggccatagagcttcttgtgccttgtctcgtgtttcagtaatttttcctgaaattgttcaagaccagtcttttctctgagtttgaaatttgatttcgtttttgttttgttttgcgacggagtcttgctctgtcacccaggctggattgcagtggcacaatctcggctcactacagcctccacctcccggattcaagcgattctcctgcctcaccatccggagtagctgggattacaggcgcccgccaccatgcccggctgatttttgtatttttagtagagacggggtttcaccatgttggccaggctggtctggaactcctgacctcaagtcatctgccctcctccgcctcccaaagtgcttggattacaggcgtgagccacctcgctcagccttaaacttaatttttcaaggcttctaccacattttcttacaagtgagggaaaaggtagatttatttctaaagtactttctacctaggtatgcagaaatttatattaaaatcgcttggatacatccaaggagattgcttttcacttgttaacattcaactgcaaggcctaagggttataggttgtgttcttttcagcactgacctgtgctgaaaagatgccagttaatatctttcacctcttctaagggtaaatttctaagtagaattggtccaagtctgttctaattaaaaacattataagcagcactagtctagttcttagttcttccacaacaattgacactgaatagattagcaattgaataaacataaaggttgaattttcttgtttaggatttgaagtatagtgaatgaatatcaatactgaccttcattttatgcttagcataaataatgttggagatgttttgattttttgaatgatggagaaataacaactttctatggctcctgatgttgtgacttttttgcagatatttcagaaaggacaccgtttttcaggtgctcaaatctgtgattttttttttttttctgtgctaattttgttaggtcagcacagattccaagtaaagtctgtgttataatgatacttaaatttatgtatggccctaaacctattagaacaattgtagtaatttataggttgtaagttttaagtggttcatgtgctgtgttatgaaaacaatctcaccgtgttatgtcaagggcagatttacctcatatttaatatcattttcctgaaaataaatatttttaagtggtaaggttttgtatttcagattggttattgacccagcaatttatgggcttagtctgggtccgtatttctgttcaataggaaaaaaatttagggaattgtttttatttattttgtgtcaaaacagttttaagttttgacacaaactcaactgtcccttcttcagtatcaatacttattacttaagttcacattttctcaggtaataaaaatttacttctaagaagttttggaaccagagcttaagaattagatttatattttcttggtaatattaaaagttaatatatgcttgatttatttgaagaaataaaaaagggtaatttgtacacaacgcctttcagaacatatttgttgaatgaataaaaatatttaagcttcctcattatgctgcagtattagttctgttgtcctcattttttcatatgaagaatgtgaagctaagagtagctatgtaaccagcaaaaagatcacataattaataggtaaaagagcttactcagactcagatcttgtgacacaaattagattctttgccactaccacatgtgtcacagttaaactttgaagcatcttctgtgttgacagattcctttttttgcctgtgaacttaccctattatcattatttgtatcctgtcagatatctacttgtaagaccaagaaagtatttgttcatgtgaatcacaaaagaaacacttaaatttttgtttttagcatatctgaatgctataaaatataaaaactcatactgtttacataggacagatttatcatactgctgtaattgttttcatggttaatttgttacataggcaattactaaattgtgcctttgaaatactttataaatttttttaaataattaaagatattcaatgatgttaaagttgggtcagctaatatttgaagttcttaatttataattttttttctttaagccatagataatttagaattctgcagtatttttcatctccagatcttagggcttgaaatggattctgatgggtctaatcagtccactcttgcatatatcttgaaaatggtcagcatccaacaaagtgaagaataaactgataaatgatccctgtttggtgaacacctcagatcaggatgttccttggcagggtattctgacctggtttagctttggccccgtctgtgctcagggttcaggtattctgcaggattgggttcagagggattaaaattctcagattggcctgtatcaaaacagtcacagattttggtcagccttttcccagaaccgtctccaagattttttcttttgtgtaattctggaatctaggctggatttggactagctttagaggttatgataaaagattaattttgtcaggcatttatacaaaggaggttttcttactacagagtttcttaaggtagattccttctatttttgaagtgtgacatttaccaatctgaagtaatgttgccctacatcccccagacacttaactttagcatatttatttctgtccatttttggtcaggattgtgcctgtttacttatataatattcttgtttactttttgtttattagatacttcttattagtttatattgttttcctgattgaggcttggggaaagaattttcctcaaatttaaagtcaccttacttatttgcagatgtatgtcagagcaatattcttttgacagttatcaagcattttagcaatgctgtatgtatatattatgaatgaatgacagagtcactcatggtctgtcacccaggctggagtgcagtggcattatcatagctcacttcagcctcaaactccttggtttaagtgttattcccgccttacctggctactttttttaatttttattatttttatagagatagcattttgctgtgttgcccagggtggtctcaaactcctgggagcaaggtgatcctcccacttctgcctcccaaagtgctgagattacaggcataacaatgttttaaactgacactggtataccttcactgattattactgtgcacatgtggtaataatttaacttataagtgcattttatctaaaaaatttccaagatctaaatagcatttgaacatggtagcagtttttttttttttttttttttttttttgagcaagaaaagagttctaaaggggtcagttttatctacagattaacataattttttttattgaggttaagtcacataacattaaccattttaaagtaaacagtttaggtggcactttatacattcacaatgttgttcaaccaccagctctaattccagaatgtgttcattaccccaaaaggaaacactgtacccattaagcagttactctgtattcccctcttccctaatccctagcaaacgccattctgctttctgtctctaatttgagccaacatcgaggaagagtactctgtacaattgaaattgcagaaaaaactttgggatgtgattgttaggaataaaaaaccacctaattctttgcatgcttctctaagtacagtagacatgctgccagggactctttatggaagaaaagttgagactcatagaagtttgcagttttgttttgatcaccccagagggttttgctcaaactcttagactcatttgtatttcttcattgggttataagaactaaaatttaatgttctatacaaatgtgaacaactaatacttggtctcctatctagaacttgtttgccttttaggttttcttaatgtatagaagaaactaggaatattcacaaaggatttatttgaagttacactgggaaacgatttttagaatttgaagctctttgatccctgtgaatctaactttatgactattttattcagctaatctttgagaatatttagagttttgatttgcgtggcactctgcttttaatcccttgttgaataagtgttagaaaccttgatcttggccctatacctgatcacctctaaaaacatgaacagtgttacaaaggcagttgtttagtaagcttttttggattgttttaattggctgactgagggagacaaaattagtttttttttttctttctagaataaagggtaataaacttggactttagagttactgctaagattgacatttccatttggggctttagaaatatattgttatcttaaattcaaaatggtactttatctaattgaattgaaatcttaaaatttatgagaaacaaaagtcactttatgttcttagtaaatatttctaatggggttataggagatctaagtacaaaaaaaatttaaaattttgttattaatctcccctccttaaggaaaattttattaatatacataattataatttagttataagaacaacttaagttgagtacagtggctcaagcctgtaatcctagcactttaggaggccaaggcaggaggatctcatgaagccaggagttccagaccagcctgggcaatagagtgaaaccc

SEQ ID NO: 83 - protein, 278 aa, Homosapiens
MNCLKGPPIPQNQNGTFSTRDKKLLKSRKVRFQEPFYGPYLFLSSPNSSYCSHSPGETFWSSVSGPFGLFHSLRRLNSQRGDEDKADEIQNLDNMEEEKWVSGAGRSLRKRKGTRTTSDWAAEDEEEEEEAEQQDGPCCRSSLSSSRWEAGGGAGGGGGSRGPAAWDRIRVNGGLGGGGGCRGGGDGRGDSELRGAAARTSAVSERRAATWGAGLPRPGPQSGTIGSCGREGFVLARPLLLRGSGSPAGPRLLRAPAGCSGACQWPASFRPQASACRL

SEQ ID NO: 84 - DNA, 787 bp, Homosapiens
ggaagctctgagtcactgaatagcaaagaaaaatatgaaagcaagaggaattgctttcacatctagaaaatgttgcaagataatctgaaatcttctggtgctggtgaatgcatgaagaggttcacagtatcttttaaagtacttctgaaaagataaggagtttaaaaggtgggtgtgtacactggcactgagctgcagtaggatttttccttggatagtctggtctggagctgggacagcagctgctgctgtggaaaggccagctggcaagatgatggaagaaatctccattatggtagcctatgacgcccatgttttcagccagctgcacgatgaagacttcctcactagtctggtggccatcagcaagcccaggtctatggtaccaaccaagaagctgaagaaatatgagaaagaatatcagacaatgcgagagagtcagctgcaacaggaagacccaatggatagatacaagtttgtatatttgtaggtaactccagctgttgcatttatactgggaatcttcataagaagctgagagaaagagaggggaaaaagaaagtggctttctactttcaaaaatgaaacaaaaaggaaaaatggcaaagtactgttttagctgtgcatgtcatatccacaaagacttttagcaggtgaactgttccaagactgacacaaggatgtttcaaacttgcctctgtctgtagaaaatgttaaaaataccaactcacttggaaggaaaaataaaaatcacaaaggtatattgagcacagtaaaaaaaaaaaaa

SEQ ID NO: 85 - protein, 72 aa, Homosapiens
MMEEISIMVAYDAHVFSQLHDEDFLTSLVAISKPRSMVPTKKLKKYEKEYQTMRESQLQQEDPMDRYKFVYL

SEQ ID NO: 86 - DNA, 2940 bp, Homosapiens
gcggcccttctcccctcccctctcagttccctccgccctcctcgggctccagcggtggcggagcgaacgggaccggcccggcttcagagcgcgaggtggagggtggaacgcgggcgcctgaaggagttgttgtctcggcagcgcccgcggagacgtgaagaggtggttgtgggaagagaagtttgcagaactgaaatggaggtcagagcttcattacagaaggttagtggatcatctgattctgtggctacaatgaacagtgaagaatttgttttggttcctcagtatgcagatgataattctacaaaacatgaagaaaaacctcaactgaagatagtttctaatggtgatgaacaattggaaaaagccatggaagagattttgagagattccgagaaaaggccaagcagtcttcttgttgattgtcaaagttccagtgagatttcagaccattcgtttggagatattccagccagccaaacaaataagccatctcttcagttaattttggatccgtctaacacagaaatttctacacccagaccatcttctccaggtggactacctgaagaagatagtgttttatttaataaactgacctacttaggatgtatgaaggtttcttccccacgtaatgaagtagaggctttacgggcaatggcaaccatgaaatcttccagtcaatacccctttcctgttaccctgtatgtaccaaatgttccagaaggttctgtgagaattatagaccaatccagcaatgtggagatagcatcttttccaatctataaggtgttattctgtgcacgtggacatgacggaacaacagagagcaattgctttgcatttacagagagttcccatggttcggaagaatttcagatacatgttttctcctgtgaaattaaagaggcagtaagcagaattttgtacagtttctgtacagcattcaaacgttcttccagacaagtgtctgatgttaaagactcagttattcctacccccgacagtgatgtgtttaccttcagtgtctccttggaggtaaaagaagacgatggaaaaggaaactttagccctgtgcctaaggatagagataaattttatttcaaattaaagcaaggaatagagaagaaggttgtgattacagtgcagcaactttctaacaaagaattagctattgaaagatgttttggaatgttattaagcccaggtcgaaacgtgaagaacagtgacatgcatttactggatatggaatccatgggaaagagctatgatgggagagcttatgtcatcactggcatgtggaaccccaatgcaccagtatttctggcacttaacgaggaaaccccaaaagataagcaagtatacatgactgtggcagtggatatggtagtcacagaggtggtggagcctgttcgctttctcctggagacagtagtccgtgtgtaccctgcaaatgagcgattttggtatttcagcagaaagactttcacagagactttcttcatgagattgaaacagtctgagggaaaaggccataccaatgctggagatgcaatatatgaggtggtgagtctacagcgagagtctgacaaggaggaaccagtcactcctactagtggagggggtccaatgtcaccccaggatgatgaagcagaagaggagagtgataatgaactctcaagtggaacaggtgatgtgtctaaggattgtcctgagaagatcctgtattcttggggagagttgctaggaaaatggcacagtaaccttggtgcacgaccgaaagggctgtctactctggtgaagagtggtgtccctgaagcattgagggcagaggtatggcagttattggcaggctgccatgacaaccaggcaatgctggatagataccgaattcttatcacaaaggactcagcccaggagagtgttattactcgagatattcatcgtacatttcccgcacatgattactttaaagatactggaggagatggtcaagaatcgctctataagatctgcaaggcctactctgtgtatgatgaagacattgggtactgtcaagggcagtcttttcttgctgctgtattactgctgcatatgccagaggaacaagcattctgtgttttggtgaaaatcatgtacgactatggtttgagagacctctacagaaacaacttcgaagatcttcattgcaaattctaccagttggagagactaatgcaggaacagctaccggacctgcatagccatttttctgatctgaacctggaagctcatatgtatgcatcccagtggtttctcactctttttactgccaagttcccactctgcatggtgttccacatcattgacttactgctttgtgagggtttgaacataatctttcatgtagctttggctctcctaaagacctcaaaggaagaccttctgcaggctgattttgaaggtgctttaaagttctttagagttcagcttccaaagagatacagggcagaggaaaatgcaagaagactgatggagcaggcttgcaatattaaagtaccaaccaagaagctgaagaaatatgagaaagaatatcagacaatgcgagagagtcagctgcaacaggaagacccaatggatagatacaagtttgtatatttgtaggtaactccagctgttgcatttatactgggaatcttcataagaagctgagagaaagagaggggaaaaagaaagtggctttctactttcaaaaatgaaacaaaaaggaaaaatggcaaagtactgttttagctgtgcatgtcatatccacaaagacttttagcaggtgaactgttccaagactgacacaaggatgtttcaaacttgcctctgtctgtagaaaatgttaaaaataccaactcacttggaaggaaaaataaaaatcacaaaggtatattgagcacagtaaaaaaaaaaaaa

SEQ ID NO: 87 - protein, 815 aa, Homosapiens
MEVRASLQKVSGSSDSVATMNSEEFVLVPQYADDNSTKHEEKPQLKIVSNGDEQLEKAMEEILRDSEKRPSSLLVDCQSSSEISDHSFGDIPASQTNKPSLQLILDPSNTEISTPRPSSPGGLPEEDSVLFNKLTYLGCMKVSSPRNEVEALRAMATMKSSSQYPFPVTLYVPNVPEGSVRIIDQSSNVEIASFPIYKVLFCARGHDGTTESNCFAFTESSHGSEEFQIHVFSCEIKEAVSRILYSFCTAFKRSSRQVSDVKDSVIPTPDSDVFTFSVSLEVKEDDGKGNFSPVPKDRDKFYFKLKQGIEKKVVITVQQLSNKELAIERCFGMLLSPGRNVKNSDMHLLDMESMGKSYDGRAYVITGMWNPNAPVFLALNEETPKDKQVYMTVAVDMVVTEVVEPVRFLLETVVRVYPANERFWYFSRKTFTETFFMRLKQSEGKGHTNAGDAIYEVVSLQRESDKEEPVTPTSGGGPMSPQDDEAEEESDNELSSGTGDVSKDCPEKILYSWGELLGKWHSNLGARPKGLSTLVKSGVPEALRAEVWQLLAGCHDNQAMLDRYRILITKDSAQESVITRDIHRTFPAHDYFKDTGGDGQESLYKICKAYSVYDEDIGYCQGQSFLAAVLLLHMPEEQAFCVLVKIMYDYGLRDLYRNNFEDLHCKFYQLERLMQEQLPDLHSHFSDLNLEAHMYASQWFLTLFTAKFPLCMVFHIIDLLLCEGLNIIFHVALALLKTSKEDLLQADFEGALKFFRVQLPKRYRAEENARRLMEQACNIKVPTKKLKKYEKEYQTMRESQLQQEDPMDRYKFVYL

SEQ ID NO: 88 - DNA, 1474 bp, Homosapiens
ttgtagccaagtctgcaggtatctttaaatttccaagccatgaatgaatccaggtggactgaatggaggatcctgaacatgagcagtggcgttgtgaatgtgtccgagcgtcactcctgcccacttggatttggccactacagtgtggtggatgtctgcatcttcgagacagtggttattgtgttgctgacatttctgatcattgctgggaatctaacagttatctttgtctttcattgtgctccactgttacatcattatactaccagctatttcattcagacgatggcatatgctgatcttttcgttggagttagctgcttggttcctactctgtcacttctccactactccacaggtgtccacgagtcattgacttgccaggtttttggatatatcatctcagttctaaaaagtgtttctatggcatgtcttgcttgcatcagtgtggatcgttatcttgcaataaccaagcctctttcctacaatcaactggtcaccccttgtcgcttgagaatttgcattattttgatctggatctactcctgcctaattttcttgccttccttttttggctgggggaaacctggttaccatggtgacatttttgaatggtgtgccacgtcttggctcaccagtgcctattttactggctttattgtttgtttactttatgctcctgctgcctttgttgtctgcttcacttacttccacattttcaaaatttgccgtcagcacaccaaagagataaatgaccgaagagcccgattccctagtcatgaggtagattcttccagagagactggacacagccctgaccgtcgctacaccatggttttgtttaggataaccagtgtattttatatgctgtggctcccctatataatttactttcttctagaaagctcccgggtcttggacaatccaactctgtccttcttaacaacctggcttgcaataagtaatagtttttgtaactgtgtaatatacagcctctccaacagcgttttccggctaggcctccgaagactgtctgagacaatgtgcacatcctgtatgtgtgtgaaggatcaggaagcacaagaacccaaacctaggaaacgggctaattcttgctccatttgaagagagctacatagtaaatcaaatgtaatctgacagtggttttggatcatattctagattcatctggaaatttgccatcagagaaatatttacttgaatagttgactgtaaaatgaagtatgagactaaaggtttctctctttttttttctttttcatggaagaaactaaagggaaggatgtatagagggttagctcatgaaataattatagcatgtgagtattagtgtgcagtaataggaaaaattaagcactgagatgaaaaagaatatctcaaatcttctgcaggacatgagcaagccccttggctcagcatttcttgtctttctgtctggctgtaccctgcctct

SEQ ID NO: 89 - protein, 361 aa, Homosapiens
MNESRWTEWRILNMSSGVVNVSERHSCPLGFGHYSVVDVCIFETVVIVLLTFLIIAGNLTVIFVFHCAPLLHHYTTSYFIQTMAYADLFVGVSCLVPTLSLLHYSTGVHESLTCQVFGYIISVLKSVSMACLACISVDRYLAITKPLSYNQLVTPCRLRICIILIWIYSCLIFLPSFFGWGKPGYHGDIFEWCATSWLTSAYFTGFIVCLLYAPAAFVVCFTYFHIFKICRQHTKEINDRRARFPSHEVDSSRETGHSPDRRYTMVLFRITSVFYMLWLPYIIYFLLESSRVLDNPTLSFLTTWLAISNSFCNCVIYSLSNSVFRLGLRRLSETMCTSCMCVKDQEAQEPKPRKRANSCSI

SEQ ID NO: 90 - DNA, 2875 bp, Homosapiens
agaccgcggtgacgtctccaccgcgccaaactcactgaaaatcaaaccgctaccattaggagccctccacgcttaacatatccgttctttctcgtttgaaagtaaccaggctgctcctccccatttttcgccttcttctcgcggaggctgagagactaaccttacacaacatggcggcctggtgtgtctggtgtcctagagcggacgaaagcaggtgactctctagtcaacttccgacttggactccgaagatcgctacagaaagatctagaagaggtaaaggtgttgctggaaaaggctactaggaaaagagtacgtgatgcccttacagctgaaaaatccaagattgagacagaaatcaagaacaagatgcaacagaaatcacagaagaaagcagaacttcttgataatgaaaaaccagctgctgtggttgctcccattacaacgggctatacggtgaaaatcagtaattatggatgggatcagtcagataagtttgtgaaaatctacattaccttaactggagttcatcaagttcccactgagaatgtgcaggtgcatttcacagagaggtcatttgatcttttggtaaagaatctaaatgggaagagttactccatgattgtgaacaatctcttgaaacccatctctgtggaaggcagttcaaaaaaagtcaagactgatacagttcttatattgtgtagaaagaaagtggaaaacacaaggtgggattacctgacccaggttgaaaaggagtgcaaagaaaaagagaagccctcctatgacactgaaacagatcctagtgagggattgatgaatgttctaaagaaaatttatgaagatggagacgatgatatgaagcgaaccattaataaagcctgggtggaatcaagagagaagcaagccaaaggagacacggaattttgagactttaaagtcgttttgggaactgtgatgtgatgtggaaatactgatgtttccagtaagggaatattggtgagctgcatatataaatttgacagatagctatttacatagccttctaagtaaaggcaatgaattctccatttcctactggaggatttatttaaataaaatatgcttattaaacactcctgcaaagatggttttattagtaccctggtcattttgttcaaggaagggttatattgcattctcacgtgaaatataaaaagcaagtcttgcccaataaaaacgctacattgtgtgtattttttgttcagctaagaattggaaaagtatttgcttgccttttaagttactgacatcagcttccaccagtgtaaaaattgagtaaaacctgaagttttgcataaaatgcaaatcggtgcctgtgcttgaaggttgctgtagagcatctgaccccttattaccaccttaagcaatgtatatgccatgcattaccatgcactaattcaatcacaggtgtttctatctagatttaaatatatttgtcaatgaatgtggaatagaaaatctaaacatgacaataatagacatatctttgtatggtaccagttagttttgccgtggatcagatggtttataaaagtaataaccataaagcaaaaaataatttgaaagcccgtctattcctatgctcaataaagttaagtttttcttcattagaacagttttatgatttatttgtctaggagtatgtcagaaaaatcaggcttttagtaggaattactcctattccccctgaagtcaggaccagtgcctgtgatctccattactttattttcctggaggtattagccaacacagttagatcagagaaagcaattgaagccaggcatgaaggctggcgcccgtaatcccagctactaaggctggaggatcacttcagcccaggagtttaaggctgcagtgagctatgatgatgccactgtactgcagcttgggtaacagattgagaacctgtctcattaaaaaaaaaaaaaaaaaaaaagccgttagacacacaggaaaaatccagaagggtaaactaaactaaagctacaattaatatgggaatttggaagaagtggtaggatttaaaatacagaaacagtttatgtataggatagctataagtaaatactgaaacacattatgcctctgtaattggggttgacacatgaacagaatagcagacacaatgcatatgaaagttacagaatatggtaaaagtggggtaaagatgggtttttaatgatactaagataactgaaaataggcatatagatatattccaagccgcctgacgatctaattgtaaaaagtaaagcatacaaatactagaagaaaatggaggaaaacgacattatatgtgacttaaaacctagaagaaataaataaaactattgatcaattttaactacataaaaatgtttataggacaagaaaaaccccaccataacccaaggcaaacaatgtattgacaggattccaataattaagaatacttcatacaaaaagaaatgtaaatgacctttaacatgtaaagatgctcaccttgttcagaagagaataaaccagtgtttttacctttcacttgaaaaagaagtataaaaacaactgtattgagttgaggctgtggagaaataaggacacatatatgggaatggaatgcaaaagttaaactttggttaacaagaatatttgggcaggtgcagtggctcacacctgtaatcccaacaccttgggaggccaaggtgggcggatcacttgaggtcaggagttcaagaccatctggccaacatggtgaaaccctgtctctactgaaaataaaaaaaactagctgggcatggtggcagatgcctgtaactccagctactcgggagactgaaggacaagaatcacttgaacc

SEQ ID NO: 91 - protein, 185 aa, Homosapiens
MQQKSQKKAELLDNEKPAAVVAPITTGYTVKISNYGWDQSDKFVKIYITLTGVHQVPTENVQVHFTERSFDLLVKNLNGKSYSMIVNNLLKPISVEGSSKKVKTDTVLILCRKKVENTRWDYLTQVEKECKEKEKPSYDTETDPSEGLMNVLKKIYEDGDDDMKRTINKAWVESREKQAKGDTEF

SEQ ID NO: 92 - DNA, 3060 bp, Homosapiens
gcggtcaaattataatacataaaagttgtcagggcggagagcaagacattactcttctcggattgccggttcgctcgcgagacttgagcgttgctaggagattcggcaggcgggcggagccagactcggcggggcggggaggggtggggctaggctcggcgaggcgaggaagggtgggtggagccaggcttggcgggctgtgcgtgctcgcggtgggcggtggcggcggctgcctcgcgaaggttcgagatccgtcgcgtgcgggaggcgggccgcgatcttgcgcagggtcggtgtgggcgcaggctgcagcgccgcgactcgtgcgggtaggcgtctgcgctcggtttgagggctcggcgcggggtttcctgttcctccttctgcgcggctgcagctcgggacttcggcctgacccagcccccatggcttcagaagagctacagaaagatctagaagaggtaaaggtgttgctggaaaaggctactaggaaaagagtacgtgatgcccttacagctgaaaaatccaagattgagacagaaatcaagaacaagatgcaacagaaatcacagaagaaagcagaacttcttgataatgaaaaaccagctgctgtggttgctcccattacaacgggctatacggtgaaaatcagtaattatggatgggatcagtcagataagtttgtgaaaatctacattaccttaactggagttcatcaagttcccactgagaatgtgcaggtgcatttcacagagaggtcatttgatcttttggtaaagaatctaaatgggaagagttactccatgattgtgaacaatctcttgaaacccatctctgtggaaggcagttcaaaaaaagtcaagactgatacagttcttatattgtgtagaaagaaagtggaaaacacaaggtgggattacctgacccaggttgaaaaggagtgcaaagaaaaagagaagccctcctatgacactgaaacagatcctagtgagggattgatgaatgttctaaagaaaatttatgaagatggagacgatgatatgaagcgaaccattaataaagcctgggtggaatcaagagagaagcaagccaaaggagacacggaattttgagactttaaagtcgttttgggaactgtgatgtgatgtggaaatactgatgtttccagtaagggaatattggtgagctgcatatataaatttgacagatagctatttacatagccttctaagtaaaggcaatgaattctccatttcctactggaggatttatttaaataaaatatgcttattaaacactcctgcaaagatggttttattagtaccctggtcattttgttcaaggaagggttatattgcattctcacgtgaaatataaaaagcaagtcttgcccaataaaaacgctacattgtgtgtattttttgttcagctaagaattggaaaagtatttgcttgccttttaagttactgacatcagcttccaccagtgtaaaaattgagtaaaacctgaagttttgcataaaatgcaaatcggtgcctgtgcttgaaggttgctgtagagcatctgaccccttattaccaccttaagcaatgtatatgccatgcattaccatgcactaattcaatcacaggtgtttctatctagatttaaatatatttgtcaatgaatgtggaatagaaaatctaaacatgacaataatagacatatctttgtatggtaccagttagttttgccgtggatcagatggtttataaaagtaataaccataaagcaaaaaataatttgaaagcccgtctattcctatgctcaataaagttaagtttttcttcattagaacagttttatgatttatttgtctaggagtatgtcagaaaaatcaggcttttagtaggaattactcctattccccctgaagtcaggaccagtgcctgtgatctccattactttattttcctggaggtattagccaacacagttagatcagagaaagcaattgaagccaggcatgaaggctggcgcccgtaatcccagctactaaggctggaggatcacttcagcccaggagtttaaggctgcagtgagctatgatgatgccactgtactgcagcttgggtaacagattgagaacctgtctcattaaaaaaaaaaaaaaaaaaaaagccgttagacacacaggaaaaatccagaagggtaaactaaactaaagctacaattaatatgggaatttggaagaagtggtaggatttaaaatacagaaacagtttatgtataggatagctataagtaaatactgaaacacattatgcctctgtaattggggttgacacatgaacagaatagcagacacaatgcatatgaaagttacagaatatggtaaaagtggggtaaagatgggtttttaatgatactaagataactgaaaataggcatatagatatattccaagccgcctgacgatctaattgtaaaaagtaaagcatacaaatactagaagaaaatggaggaaaacgacattatatgtgacttaaaacctagaagaaataaataaaactattgatcaattttaactacataaaaatgtttataggacaagaaaaaccccaccataacccaaggcaaacaatgtattgacaggattccaataattaagaatacttcatacaaaaagaaatgtaaatgacctttaacatgtaaagatgctcaccttgttcagaagagaataaaccagtgtttttacctttcacttgaaaaagaagtataaaaacaactgtattgagttgaggctgtggagaaataaggacacatatatgggaatggaatgcaaaagttaaactttggttaacaagaatatttgggcaggtgcagtggctcacacctgtaatcccaacaccttgggaggccaaggtgggcggatcacttgaggtcaggagttcaagaccatctggccaacatggtgaaaccctgtctctactgaaaataaaaaaaactagctgggcatggtggcagatgcctgtaactccagctactcgggagactgaaggacaagaatcacttgaacc

SEQ ID NO: 93 - protein, 228 aa, Homosapiens
MASEELQKDLEEVKVLLEKATRKRVRDALTAEKSKIETEIKNKMQQKSQKKAELLDNEKPAAVVAPITTGYTVKISNYGWDQSDKFVKIYITLTGVHQVPTENVQVHFTERSFDLLVKNLNGKSYSMIVNNLLKPISVEGSSKKVKTDTVLILCRKKVENTRWDYLTQVEKECKEKEKPSYDTETDPSEGLMNVLKKIYEDGDDDMKRTINKAWVESREKQAKGDTEF

SEQ ID NO: 94 - DNA, 1081 bp, Homosapiens
agtttgtagcggacaacatggcggccttcatgctgggctcgctgctgcggacgttcaagcagatggttccttcatcagcttcaggccaagttcgaagtcactatgtagactggagaatgtggcgcgatgtgaagagacgaaaaatggcctatgaatacgcagatgagaggctacgtattaattcactcaggaagaataccattttgccaaaaattcttcaggatgtggctgatgaagaaattgctgccctcccccgggatagctgtcctgttagaatcagaaatcggtgtgttatgacgtcccgtccgcgtggtgtgaagcggcgctggaggcttagtcgtatagtcttccgtcacttagctgaccatgggcaactttctgggatccagcgagcgacatggtaaatgagctccagaacctattgagcttgcagggaagccaagcttgcagttccagcaagcaaagattttttttaatagaccaaaccctaatctctacaggggcccagtacagttgtttggcctacctgatgctatctctaaactacttttaaaatgaagacatttgggtgtttcatgtcagtgaattatcttttctcttggacttaacaaacatactgttcccatacatagtacaaagagtagcataataaatattttctgtgaatgttttttataccctccttttaagtttaatcttttagtaacatataggggtttttgtattaagagcattatttcataaaatgctatcttatacataatccaactaattgacatgtagctcatgtatggcagtttgtaatcctggactagctttgctgacctgcagagctccccttaactattattgttagataaacagattggatagcaaggctgctgttctggattatctaatgctccacttcttcttgtgatggctgaacaaaagaaccactaagtgttttcttgtccatccttaagggactttaaaacaaattatgcctctttaagtccttgaaagtctccatctaaagaggaaaagtttgttggaacagtatatattccctatttttatgtttatttaatccataacagaa

SEQ ID NO: 95 - protein, 128 aa, Homosapiens
MAAFMLGSLLRTFKQMVPSSASGQVRSHYVDWRMWRDVKRRKMAYEYADERLRINSLRKNTILPKILQDVADEEIAALPRDSCPVRIRNRCVMTSRPRGVKRRWRLSRIVFRHLADHGQLSGIQRATW

SEQ ID NO: 96 - DNA, 5008 bp, Homosapiens
aagtaccaaggtctgcggcaggaggagaccggctcacaggagcagcagcattggaagaggcacccagcagcctcccaggcatcctggagggtctgctccctgtctttccaaggatgagtctccaggagatgttccgcttccctatggggctcctgcttggctctgtgctcctggtggcttcggccccagccactctggagcctcccggctgcagcaacaaggagcaacaggtcactgtcagccacacctacaagatcgatgtgcccaagtctgccttggttcaggttgacgctgaccctcagcccctcagtgacgatggggcttcgctcttggccctgggggaggccagggaggaacagaacatcatcttcaggcacaacatccgccttcagacgccacagaaggactgcgagttggcaggcagtgtccaggacctcctggcccgggtgaagaagctggaggaagagatggtggagatgaaggaacagtgtagtgcccagcgctgctgccagggagtcactgatctaagccgccactgcagcggccacgggaccttctccctggagacctgcagctgccactgcgaagagggcagggagggccccgcctgcgagcggctggcctgccccggggcgtgcagcggccacgggcgttgcgtggacgggcgctgcctgtgccatgagccctacgtgggtgccgactgcggctacccggcctgccctgagaactgcagcggacacggcgagtgcgtgcgcggcgtgtgccagtgccacgaagacttcatgtcggaggactgcagcgagaagcgctgtcccggcgactgcagcggccacggcttctgtgacacgggcgagtgctactgcgaggagggcttcacaggcctggactgtgcccaggtggtcaccccacagggcctgcagctgctcaagaacacggaggattctctgctggtgagctgggagccctccagccaggtggatcactacctcctcagctactaccccctggggaaggagctctctgggaagcagatccaagtgcccaaggagcagcacagctatgagattcttggtttgctgcctggaaccaagtacatagtcaccctgcgtaacgtcaagaatgaagtttctagcagcccacagcatctacttgccaccacagaccttgctgtgcttggcactgcctgggtgacagatgagactgagaactcccttgacgtggagtgggaaaacccctcaactgaggtggactactacaagctgcgatatggccccatgacaggacaggaggtagctgaggtcactgtgcccaagagcagtgaccccaagagccgatatgacatcactggtctgcacccggggactgagtataagatcacggtggtgcccatgagaggagagctggagggcaagccgatcctcctgaatggcaggacagaaattgacagtccaaccaatgttgtcactgatcgagtgactgaagacacagcaactgtctcctgggacccagtgcaggctgtcatagacaagtatgtagtgcgctacacttctgctgatggggacaccaaggaaatggcagtgcacaaggatgagagcagcactgtcctgacgggcctgaagccaggagaggcatacaaggtctacgtgtgggctgaaaggggcaaccaggggagcaagaaagctgacaccaatgccctcacagaaattgacagcccagcaaacctggtgactgaccgggtgactgagaataccgccaccatctcctgggacccggtacaggccaccattgacaagtacgtggtgcgctacacctctgctgacgaccaagagaccagagaggttctggtggggaaggagcagagcagcactgtcctgacaggcctgaggccaggtgtggagtacacagtgcatgtctgggcccagaagggggaccgagagagcaagaaggctgacaccaacgccccgacagatattgacagccccaaaaacctggtgactgaccgggtgacagagaatatggccacggtctcctgggacccggtgcaggccgccattgacaagtacgtggtgcgctacacctctgctggtggagagaccagggaggttccggtggggaaggagcagagcagcacagtcctgacaggcctgagaccgggtatggagtacatggtgcacgtgtgggcccagaagggggaccaggagagcaagaaggccgacaccaaggcccagacagacattgacagcccccaaaacctggtgaccgaccgggtgacagagaatatggccactgtctcctgggacccggtgcgggccaccattgacaggtatgtggtgcgctacacctctgccaaggacggagagaccagggaggttccggtggggaaggagcagagtagcactgtcctgacgggcctgaggccgggtgtggagtacacggtgcacgtgtgggcccagaagggggcccaggagagcaagaaggctgacaccaaggcccagacagacattgacagcccccaaaacctggtcactgactgggtgacagagaatacagccactgtctcctgggacccggtgcaggccaccattgacaggtatgtggtgcactacacgtctgccaacggagagaccagggaggttccagtggggaaggagcagagcagcactgtcctgacgggcctgaggccgggcatggagtacacggtgcacgtgtgggcccagaaggggaaccaggagagcaagaaggctgacaccaaggcccagacagaaattgacggccccaaaaacctagtgactgactgggtgacggagaatatggccactgtctcctgggacccggttcaggccaccattgacaagtacatggtgcgctacacctctgctgacggagagaccagggaggttccggtggggaaggagcacagcagcactgtcctgacgggcctgagaccaggcatggagtacatggtgcacgtgtgggcccagaagggggcccaggagagcaagaaggctgacaccaaggcccagacagaactcgaccctcccagaaaccttcgtccatctgctgtaacgcagtctggtggcatattgacctggacgcccccctctgctcagatccacggctacattctgacttaccagttcccagatggcacagttaaggagatgcagctgggacgggaagaccagaggtttgcgttgcaaggccttgagcaaggcgccacctaccctgtctcccttgttgcctttaagggtggtcgccggagcagaaatgtatccaccaccctctccacagttggtgcccgtttcccacacccttcggactgcagtcaggttcagcagaacagcaatgccgccagtggtctgtacaccatctacctgcatggcgatgccagccggcccctgcaggtgtactgtgacatggaaacggacggaggtggctggattgtcttccagaggcggaacactgggcagctggatttcttcaagcgatggaggagctatgtggaaggctttggggaccccatgaaggagttctggcttggacttgacaagctacacaacctcaccaccggcactccagcgcggtatgaggtgagagtggatttacagactgccaatgaatctgcctatgctatatatgatttcttccaagtggcctccagcaaggagcggtataagctgacagttgggaaatacagaggcacggcaggggatgctcttacttaccacaatggatggaagtttacaacttttgacagagacaatgatatcgcactcagcaactgtgccctgacacatcatggtggctggtggtataagaactgccacttggccaaccctaatggcagatatggggagaccaagcacagtgagggggtgaactgggagccttggaaaggacatgaattctccattccttacgtggagttgaaaatccgccctcatggctacagcagggagcctgtcctgggcagaaagaagcggacgctgagaggaaggctgcgaacgttctgatggcccgtgtgagcagtcctcgcaggagacaccaccagctgtggcagcttggggcggggtgggtagtggtcactgcggtctgggagtgctcagatagcccgcagaacaaatcatgtcaccaagcttcaagccatggaggttccttccctctcacctgcatttttgcccgtctttatgagggtcttgaaaatcaaaatagtagttgcacagtatgtgtaggaaagacagtactggaacggcaaggtttctcagcttatcttcagcaacatatatactggattagggcaagagaaggaatcacccagcacttcaccagttggaaatctctggaaatttacatctatgtatttaaagttctgctaatgcaaatcttttctctggaaagaagcacagaggaggagttctgatgacccaggggttagggctgagacaaccggacgtttgtcacctcctttcccattgggtttttaggaaaacagtgtgaacctcccccttttaatttctggtgttatgaggaagaataaaggggataaaaggggctaagatggactcatgtttagctaagttctgacttgtatccagcatgctggagaccaaagctgccgccttactgctatttttaagtgccctcttttcagtcatttgcataattgcgtccatagagctgcatatgttgtgaataaattctcactcatttcaactttgaataatttgactgtcttgataattggttcctcccaaagactcttctgcaactcccattcatgcccaccaggcctcagactccctcttttccccgccctgcactattggagccctgggttttgtgggagtgctcagcaccgtgagtcttactgtttgatcggacagttagcaagatcagatcctttttgcttattttctatcactttggagggttttctgtagcaaaatcagtgaccaatgaagtaacttaaattcctattgaagaaaaaaaataataaaccacttgattt

SEQ ID NO: 97 - protein, 1299 aa, Homosapiens
MSLQEMFRFPMGLLLGSVLLVASAPATLEPPGCSNKEQQVTVSHTYKIDVPKSALVQVDADPQPLSDDGASLLALGEAREEQNIIFRHNIRLQTPQKDCELAGSVQDLLARVKKLEEEMVEMKEQCSAQRCCQGVTDLSRHCSGHGTFSLETCSCHCEEGREGPACERLACPGACSGHGRCVDGRCLCHEPYVGADCGYPACPENCSGHGECVRGVCQCHEDFMSEDCSEKRCPGDCSGHGFCDTGECYCEEGFTGLDCAQVVTPQGLQLLKNTEDSLLVSWEPSSQVDHYLLSYYPLGKELSGKQIQVPKEQHSYEILGLLPGTKYIVTLRNVKNEVSSSPQHLLATTDLAVLGTAWVTDETENSLDVEWENPSTEVDYYKLRYGPMTGQEVAEVTVPKSSDPKSRYDITGLHPGTEYKITVVPMRGELEGKPILLNGRTEIDSPTNVVTDRVTEDTATVSWDPVQAVIDKYVVRYTSADGDTKEMAVHKDESSTVLTGLKPGEAYKVYVWAERGNQGSKKADTNALTEIDSPANLVTDRVTENTATISWDPVQATIDKYVVRYTSADDQETREVLVGKEQSSTVLTGLRPGVEYTVHVWAQKGDRESKKADTNAPTDIDSPKNLVTDRVTENMATVSWDPVQAAIDKYVVRYTSAGGETREVPVGKEQSSTVLTGLRPGMEYMVHVWAQKGDQESKKADTKAQTDIDSPQNLVTDRVTENMATVSWDPVRATIDRYVVRYTSAKDGETREVPVGKEQSSTVLTGLRPGVEYTVHVWAQKGAQESKKADTKAQTDIDSPQNLVTDWVTENTATVSWDPVQATIDRYVVHYTSANGETREVPVGKEQSSTVLTGLRPGMEYTVHVWAQKGNQESKKADTKAQTEIDGPKNLVTDWVTENMATVSWDPVQATIDKYMVRYTSADGETREVPVGKEHSSTVLTGLRPGMEYMVHVWAQKGAQESKKADTKAQTELDPPRNLRPSAVTQSGGILTWTPPSAQIHGYILTYQFPDGTVKEMQLGREDQRFALQGLEQGATYPVSLVAFKGGRRSRNVSTTLSTVGARFPHPSDCSQVQQNSNAASGLYTIYLHGDASRPLQVYCDMETDGGGWIVFQRRNTGQLDFFKRWRSYVEGFGDPMKEFWLGLDKLHNLTTGTPARYEVRVDLQTANESAYAIYDFFQVASSKERYKLTVGKYRGTAGDALTYHNGWKFTTFDRDNDIALSNCALTHHGGWWYKNCHLANPNGRYGETKHSEGVNWEPWKGHEFSIPYVELKIRPHGYSREPVLGRKKRTLRGRLRTF

SEQ ID NO: 98 - DNA, 4564 bp, Homosapiens
ccggggccctacacgccagacctggctcggggtgggagtgcagaggcaaccaaaaaggaacccacacctccctccagggcccggggcgctgtcagacggggcagcaaccaggagattccctgggcctgcaggaagcccttccgcggaccgaaagattgttccccattttggagatgaagaaactgagactcaaagcagctgagtgaccttcccaaggacacacactgaactgggcggtgatcaggatctgaatgcacagggcgggtgttcagcgattgtttactacgttgaacgtgacctccaggaaagcagttctggccgagatcccctgacaacgcaaagcaagaagtaacgtggaaggaggctccccaagctggctggccattttgctgctgtgtgtggaggtgctgccagtggcatgcccaaacccaaagctggaagaggaataaattacaagtggtcaaggttgcatccttttgagcccaggacctgcttgtaagccgagagggttctctggccctaatctagccaagcaccatggagagaatcagtgccttcttcagctctatctgggacaccatcttgaccaaacaccaagaaggcatctacaacaccatctgcctgggagtcctcctgggcctgccactcttggtgatcatcacactcctcttcatctgttgccattgctgctggagcccaccaggcaagaggggccagcagccagagaagaacaagaagaagaagaagaagaagaagaagaaggatgaagaagacctctggatctctgctcaacccaagcttctccagatggagaagagaccatcactgcctgtttagttaggcaggaagcagaggtgtttcctttctggggctaagcctccttctgaccacacacagacatttcaggaacccctgaaataatgcactatgtccatgtccacagagtaactactcaaccaaggaacaaacctcagactaagtgtcccagtggagggcagtcccagggaccacgtggacaattcttggatactgtcttggcagctatgtgtccaatagcaatgctccttactgcagacccaggcatgcctcccacctgtctctggcataccccacatgcaaagcacaaagaacatttatccatacatctcaatatggttcccaagtgtgtgcacatgcacgtaacacacacacacacaaattcaggtagcaggtacgtgggcaagtatattctgctcatcaaatggtcattggctatgtactttgtgcagggaagtacattatctacagtcacaaaaatgtctcatgggaaagccttgccagattcagacacatatatacaatttcctaaccagcaaggcccccatacaccatctattccataaaccactcaggttacagatgcatgctttcctatttctaactctacacataaacttttactggaagtactcataattggacattccagcaacctgctacagtccccacccttgtgtgtcttgatacagacacaccaagtttctgtgcctctgacccctcacctgtgccaagatgtttaaagtgtgatggttcaaaattcattgaaagctcttttcttgtaactcatgacaaagtccgtcctcattgccactgagaggtgtttaatgtgatccaagacctctctgtgaaacattacccccgcaaaccactcagcaaagtgcctttctccaagcaagaacaaagagctcttggtggtgactgctagaaaattatggaagcccactcatttatgtcagtggactgcaactgtgtacctgtgcaatgtttacagatggaaagggtgaggagatgctacacctgagctaggtatctcctatataaccaaagtttccagcagggaaggaactagacaatcatcagtgcagtctcacagaaggcaacactggaagtgatgtcataaggttgtgatgtgtgcacggtatggcacaggtgggatgcagaggtaacagagtttaaatgaaagtaggatgaagctataaagaggtttatttatatttatattgaagctcaggcaagtgccttgcacacagtaggtacttataactaactgtggttactgttggatatgtgatgttgttaagggtaagcttgtaatacctcaccagttctccccgagtgatcttctcttctaagtgagcccactaattgctgcaatggatgaaattgggtgtttaatgctggagagcacatgtaggtgacacatgtgccttgaggtatgtgaggacatgtaaattagatccacagtgagctgaggagggctttccccgccagagtgaggttgggaagcagagttaatccacttataggatgaactgcttggtatttttattgtattgtgactgtattacaaagatggacaattcactccttgggagcaagttatgctctagaagtttatttacaaatatgctgggcagctctcttgaaatattttcccaaggaagctattctacacagtggcaaaattgctatctaattaataatgtagctaaactatgatatttatagtagcaaaaaactaaattctataagattgcattaaaggaaagatatattctatttgctcacttgggctgcttggtactcacctgccctccaggtgtactttaggcctgtggagggtgggcatttagtggtgacccttgcaccagggttttctaacagatgaccctgtgaatcataatttaaacctgcatatattttatagccagtcacatttgccctctcaccctatatggccataaactgcctaagcactcaggcctcccactcatcaacccctttgaccagagaaagaagcactctggttctctatccccttgtcacatagagagtttgtcatggggcctctggctgtgcccttcacataacagaatgacttgccatctgcctgcaccaaacccagggatgtggaagacatctccccacaactgccactgctcaccaggacaagctgcccttcctgtctccacctctcagtccccctagaatggatggctggggagaggtggaggctgacagctgagacgtagtgtcagatatgatctaggagggcggatcaccgggatccgggaccatacaagtaacatggtttccatggcaactgcttgctcctttgaattaagacagcagtcagttgtcattgccatgacaaggcctctatctccaggcacaatgtccctgctgtctcctaatccaatggacttgctctcaccccagggatgaaacacccagaaactcacttctcagtcacttccacagccgatgactcagaagagccaaacccagaatggggcctctcttttccccatcacagactcccctgacaacctttcctggcgtaactagaggagtcccagtgcaggataggccctaaacgttttgttaaataaacaggtgcatgaaaggagcctaaggccattgttgatatccactctcttctttccacttccttctcatctttttctccatgttttatgcttctctgattccctcttctgcctgcaccagaccagccccagccctttattcctctccattttcactccttccagcctctgtccctgaactgccactggcaacccatgggacctcaggaccagagactgcttgactcatctggggagggtaagttcacgggggacaaaaaaatgattcctaaagaagaggcttcctagaccagcacaggctcgagaaagacatcccctaggcctggacttctgagcagctttagccaggctccggacggcagccagaggaggcctttccccattgctcctttccccattgctcaatggattccatgtttctttttcttggggggagcagggagggagaaaggtagaaaaatggcagccacctttccaagaaaaatataaagggtccaagctgtatagtatttgtcagtatttttttctgtaaaattcaaacacacacaaaagaaaaatttatttaaataaaatactttgaaaatgaaaagtcttgatgtagtcagatggttactctcttaacattaggtattacccccactcagacatcactcagaaatgatcaatgcagggactctttctgtgacacaaatgtcccagccctccctggtcaccgccttcgccatggtagagtcataggtctgaggatgaggaatgtggctgtctcacccttgcttgcaaaacagatggccttggagaccagactccctcaaaggtgccagctacaggaaaaatatactgatgttccttggcaacacttacagaactttccatcaatgaggtccatcaatggcttcttaaaggaaaaggggggaaatagcaaaaacctaaggaagaatggacctttgagttaaatccagtgtttgttgggaaaggagggatcaaaaacctctatagtagccactagggcaaaaactgtgtgtatgtgtgtgtgtaagtgtgtgtacactgttcaatatggttcaatatggtaccaatagccacatgtgactatttaaattcattgcaatgaaataaaattaaaggtatactagctc

SEQ ID NO: 99 - protein, 153 aa, Homosapiens
MHYVHVHRVTTQPRNKPQTKCPSGGQSQGPRGQFLDTVLAAMCPIAMLLTADPGMPPTCLWHTPHAKHKEHLSIHLNMVPKCVHMHVTHTHTNSGSRYVGKYILLIKWSLAMYFVQGSTLSTVTKMSHGKALPDSDTYIQFPNQQGPHTPSIP

SEQ ID NO: 100 - DNA, 6549 bp, Homosapiens
agtgaagttcgtggactcctacaataatgctataaatgcatagaagaaaagacacaggactgtgaaagaaagtgatgatgcgatgtctaaaacgttcaaggcaccgcatctgtgatcaagaatacatgtgctgctttaccgacacatcaaagagcaaggattgccacccaggacgatgagcggctgagatggagacgtctgcctcagccactgcctccgagaagcaagaagccaaaagtgggatcctggaggccgctggcttccccgacccgggtaaaaaggcctctcctttggtggtggctgcagcggcagcagcagcggtagctgcccaaggagtgccgcagcatctcttgccaccattccatgcgcccctaccgattgacatgcgacaccaggaaggaaggtaccattacgagcctcattctgtccacggtgtgcacgggccccctgccctcagcggcagccctgtcatctctgacatctccttgatccggctttccccgcacccggctggccctggggagtcccccttcaacgccccccacccgtacgtgaacccccacatggagcactacctccgttctgtgcacagcagccccacgctctccatgatctctgcagccaggggcctcagccccgctgatgtggcccaggagcaccttaaggagaggggactgtttggccttcctgctccaggcaccaccccctcagactattaccaccagatgaccctcgtggcaggccaccccgcgccctacggggacctgctgatgcagagcgggggcgctgccagcgcaccccatctccacgactacctcaaccccgtggacgtgtcccgtttctccagcccgcgggtgacgccccgcctgagccgcaagcgggcgctgtccatctccccactctcagacgccagcctggacctgcagcggatgatccgcacctcacccaactcgctagtggcctacatcaacaactcccgaagcagctcggcggccagcggttcctacgggcatctgtcagcgggtgccctcagcccagccttcaccttcccccaccccatcaaccccgtggcctaccagcagattctgagccagcagaggggtctggggtcagcctttggacacacaccacccctgatccagccctcacccaccttcctggcccagcagcccatggccctcacctccatcaatgccacgcccacccagctcagcagcagcagcaactgtctgagtgacaccaaccagaacaagcagagcagtgagtcggccgtcagcagcaccgtcaaccctgtcgccattcacaagcgcagcaaggtcaagaccgagcctgagggcctgcggccggcctcccctctggcgctgacgcagggccaggtgtctggacacggctcatgtgggtgtgcccttcccctctcccaggagcagctggctgacctcaaggaagatctggacagggatgactgtaagcaggaggctgaggtggtcatctatgagaccaactgccactgggaagactgcaccaaggagtacgacacccaggagcagctggtgcatcacatcaacaacgagcacatccacggggagaagaaggagtttgtgtgccgctggcaggcctgcacgcgggagcagaagcccttcaaggcgcagtacatgctggtggtgcacatgcggcgacacacgggcgagaagccccacaagtgcacgttcgagggctgctcgaaggcctactcccgcctggagaacctgaagacacacctgcggtcccacaccggggagaagccatatgtgtgtgagcacgagggctgcaacaaagccttctccaacgcctcggaccgcgccaagcaccagaatcgcacccactccaacgagaaaccctacatctgcaagatcccaggctgcaccaagagatacacagaccccagctctctccggaagcatgtgaaaacggtccacggcccagatgcccacgtcaccaagaagcagcgcaatgacgtgcacctccgcacaccgctgctcaaagagaatggggacagtgaggccggcacggagcctggcggcccagagagcaccgaggccagcagcaccagccaggccgtggaggactgcctgcacgtcagagccatcaagaccgagagctccgggctgtgtcagtccagccccggggcccagtcgtcctgcagcagcgagccctctcctctgggcagtgcccccaacaatgacagtggcgtggagatgccggggacggggcccgggagcctgggagacctgacggcactggatgacacacccccaggggccgacacctcagccctggctgccccctccgctggtggcctccagctgcgcaaacacatgaccaccatgcaccggttcgagcagctcaagaaggagaagctcaagtcactcaaggattcctgctcatgggccgggccgactccacacacgcggaacaccaagctgcctcccctcccgggaagtggctccatcctggaaaacttcagtggcagtgggggcggcgggcccgcggggctgctgccgaacccgcggctgtcggagctgtccgcgagcgaggtgaccatgctgagccagctgcaggagcgccgcgacagctccaccagcacggtcagctcggcctacaccgtgagccgccgctcctccggcatctccccctacttctccagccgccgctccagcgaggcctcgcccctgggcgccggccgcccgcacaacgcgagctccgctgactcctacgaccccatctccacggacgcgtcgcggcgctcgagcgaggccagccagtgcagcggcggctccgggctgctcaacctcacgccggcgcagcagtacagcctgcgggccaagtacgcggcagccactggcggccccccgcccactccgctgccgggcctggagcgcatgagcctgcggaccaggctggcgctgctggacgcgcccgagcgcacgctgcccgccggctgcccacgcccactggggccgcggcgtggcagcgacgggccgacctatggccacggccacgcgggggctgcgcccgccttcccccacgaggctccaggcggcggagccaggcgggccagcgaccctgtgcggcggcccgatgccctgtccctgccgcgggtgcagcgcttccacagcacccacaacgtgaaccccggcccgctgccgccctgtgccgacaggcgaggcctccgcctgcagagccacccgagcaccgacggcggcctggcccgcggcgcctactcgccccggccgcctagcatcagcgagaacgtggcgatggaggccgtggcggcaggagtggacggcgcggggcccgaggccgacctggggctgccggaggacgacctggtgcttccagacgacgtggtgcagtacatcaaggcgcacgccagtggcgctctggacgagggcaccgggcaggtgtatcccacggaaagcactggcttctctgacaaccccagactacccagcccggggctgcacggccagcgcaggatggtggctgcggactccaacgtgggcccctccgcccctatgctgggaggatgccagttaggctttggggcgccctccagcctgaacaaaaataacatgcctgtgcagtggaatgaggtgagctccggcaccgtagacgccctggccagccaggtgaagcctccaccctttcctcagggcaacctggcggtggtgcagcagaagcctgcctttggccagtacccgggctacagtccgcaaggcctacaggctagccctgggggcctggacagcacgcagccacacctgcagccccgcagcggagccccctcccagggcatccccagggtaaactacatgcagcagctgcgacagccagtggcaggcagccagtgtcctggcatgactaccactatgagcccccatgcctgctatggccaagtccacccccagctgagccccagcaccatcagtggggccctcaaccagttcccccaatcctgcagcaacatgccagccaagccagggcatctggggcaccctcagcagacagaagtggcacctgaccccaccacgatgggcaatcgccacagggaacttggggtccccgattcagccctggctggagtgccaccacctcacccagtccagagctacccacagcagagccatcacctggcagcctccatgagccaggagggctaccaccaggtccccagccttctgcctgcccgccagcctggcttcatggagccccaaacaggcccgatgggggtggctacagcaggctttggcctagtgcagccccggcctcccctcgagcccagccccactggccgccaccgtggggtacgtgctgtgcagcagcagctggcctacgccagggccacaggccatgccatggctgccatgccgtccagtcaggaaacagcagaggctgtgcccaagggagcgatgggcaacatggggtcggtgcctccccagccgcctccgcaggacgcaggtggggccccggaccacagcatgctctactactacggccagatccacatgtacgaacaggatggaggcctggagaacctcgggagctgccaggtcatgcggtcccagccaccacagccacaggcctgtcaggacagcatccagccccagcccttgccctcaccaggggtcaaccaggtgtccagcactgtggactcccagctcctggaggccccccagattgacttcgatgccatcatggatgatggcgatcactcgagtttgttctcgggtgctctgagccccagcctcctccacagcctctcccagaactcctcccgcctcaccaccccccgaaactccttgaccctgccctccatccccgcaggcatcagcaacatggctgtcggggacatgagctccatgctcaccagcctcgccgaggagagcaagttcctgaacatgatgacctagaggcccgagcgcctggtgctgagtgcacccggaggggtcatcgctgcccagagcctggggattccagctgtcttgtctttttccaaaaaagtgttaaataggcttgaggggttgttgcgcaatggccgcttcagatgacagatgttgtaagagaaggtttatgggcatcctctctggtcttttggattattcctcagaacaatgaaaaaagtctccataggacaggaaggaatgcaaaactcatttacacagtgctttccagcctttggtgcttacaggaccgcgctgttccggcttcttcacggctgacattcggctaacgagggattactttggccaaaacctttcaaaggatatgcagaaagatggtagggagcatttgggtttgaatctgaatgctatactggatactctgctccggaaagatgagctttttattctactacttggaaggaaaaggaattcctggtccacctgaattcctctatgaagcctaactcttgaggtctctaacataccttgtcatagaggaaaagcacagattatacctggatgattcaggagcacattctgattccaggtttggtagagctggctcttctactccgtaaagccgagtctgggactggcagcccatccaagtgtatatgaatgaataaagcatccaagtatatatgaatgaataaagtatgtaagtatcaccagaaaaaggaaagaaaaaatgtactccttggggcaagcccagaagctgccctggcctctccagaccgtgtttacagtgtttgcatgtagaatgtagcccttcctgaaaagaagacttgtttctaaatacctcggggctgctggagccgctgtgggttagggatggactgaggcctcgaggagtgagggtgcacccggggcccagcctcaggctgccctagggatctctcagtaggaagaggaagttgcgtgtttacccaatcctgtttctccaatgcaacgtccacccactttaccaccaaaaactccagggcctgacggcagcccggtcccccagcactcaccagcagcccagtgttctccaccaagccacagtgtgcatgcctggtatcctccggattcccttccttctgcccgctgagtcactgggcagagaatgatgacatgtgtaggtggtgtggttgggggtggaaaggggaaggggttgatcctcaggactctgagggagcatcgttgaattttcctgttcagtgtgaccaagacccacctggaaatggaatttggaactggcttcaggagacatcattcctgaacacactgtagggtgaattggtgcatcttccccaccatacacacacacacacacacacacacacacacacacacacacacaccccaaaccttttcatggggaatgtgtggcaaccttgccaaacagcaccactcagagtgtgactctgactgtgaccttggccttaatgaggaacttcttaggagagtttgaggacaaggccaacatcgtcatctgggctcgctgcgtcccagcacatcaaactctgtccagagacaaggccaactgcaaatgaaagccagggaacattgctaagggtctgtggct

SEQ ID NO: 101 - protein, 1586 aa, Homosapiens
METSASATASEKQEAKSGILEAAGFPDPGKKASPLVVAAAAAAAVAAQGVPQHLLPPFHAPLPIDMRHQEGRYHYEPHSVHGVHGPPALSGSPVISDISLIRLSPHPAGPGESPFNAPHPYVNPHMEHYLRSVHSSPTLSMISAARGLSPADVAQEHLKERGLFGLPAPGTTPSDYYHQMTLVAGHPAPYGDLLMQSGGAASAPHLHDYLNPVDVSRFSSPRVTPRLSRKRALSISPLSDASLDLQRMIRTSPNSLVAYINNSRSSSAASGSYGHLSAGALSPAFTFPHPINPVAYQQILSQQRGLGSAFGHTPPLIQPSPTFLAQQPMALTSINATPTQLSSSSNCLSDTNQNKQSSESAVSSTVNPVAIHKRSKVKTEPEGLRPASPLALTQGQVSGHGSCGCALPLSQEQLADLKEDLDRDDCKQEAEVVIYETNCHWEDCTKEYDTQEQLVHHINNEHIHGEKKEFVCRWQACTREQKPFKAQYMLVVHMRRHTGEKPHKCTFEGCSKAYSRLENLKTHLRSHTGEKPYVCEHEGCNKAFSNASDRAKHQNRTHSNEKPYICKIPGCTKRYTDPSSLRKHVKTVHGPDAHVTKKQRNDVHLRTPLLKENGDSEAGTEPGGPESTEASSTSQAVEDCLHVRAIKTESSGLCQSSPGAQSSCSSEPSPLGSAPNNDSGVEMPGTGPGSLGDLTALDDTPPGADTSALAAPSAGGLQLRKHMTTMHRFEQLKKEKLKSLKDSCSWAGPTPHTRNTKLPPLPGSGSILENFSGSGGGGPAGLLPNPRLSELSASEVTMLSQLQERRDSSTSTVSSAYTVSRRSSGISPYFSSRRSSEASPLGAGRPHNASSADSYDPISTDASRRSSEASQCSGGSGLLNLTPAQQYSLRAKYAAATGGPPPTPLPGLERMSLRTRLALLDAPERTLPAGCPRPLGPRRGSDGPTYGHGHAGAAPAFPHEAPGGGARRASDPVRRPDALSLPRVQRFHSTHNVNPGPLPPCADRRGLRLQSHPSTDGGLARGAYSPRPPSISENVAMEAVAAGVDGAGPEADLGLPEDDLVLPDDVVQYIKAHASGALDEGTGQVYPTESTGFSDNPRLPSPGLHGQRRMVAADSNVGPSAPMLGGCQLGFGAPSSLNKNNMPVQWNEVSSGTVDALASQVKPPPFPQGNLAVVQQKPAFGQYPGYSPQGLQASPGGLDSTQPHLQPRSGAPSQGIPRVNYMQQLRQPVAGSQCPGMTTTMSPHACYGQVHPQLSPSTISGALNQFPQSCSNMPAKPGHLGHPQQTEVAPDPTTMGNRHRELGVPDSALAGVPPPHPVQSYPQQSHHLAASMSQEGYHQVPSLLPARQPGFMEPQTGPMGVATAGFGLVQPRPPLEPSPTGRHRGVRAVQQQLAYARATGHAMAAMPSSQETAEAVPKGAMGNMGSVPPQPPPQDAGGAPDHSMLYYYGQIHMYEQDGGLENLGSCQVMRSQPPQPQACQDSIQPQPLPSPGVNQVSSTVDSQLLEAPQIDFDAIMDDGDHSSLFSGALSPSLLHSLSQNSSRLTTPRNSLTLPSIPAGISNMAVGDMSSMLTSLAEESKFLNMMT

SEQ ID NO: 102 - DNA, 4909 bp, Homosapiens
ttcggagcgcgaagccgccgctgggacctcggcgcgccccgcgtctgcgcttgctgccgcgccccggtcggcgcgctgggagttccagccatgctcttctggcacacgcagcccgagcactacaaccagcacaactccggcagctacctgcgtgatgtgctcgctctgcccatcttcaagcaggaggaaccccagctgtcccccgagaacgaggcccgcctgccacccctgcaatatgtgttgtgtgctgccacgtccccagccgtgaagctgcatgaagagacgctgacctacctcaaccaaggtcagtcttatgaaatccgactactggagaatcggaagctgggagactttcaagatctgaacacaaaatatgtcaagagcatcatccgtgtggtcttccatgaccgccggctgcagtatacggagcaccagcagctggagggctggcggtggagtcggccaggggaccggatcctggacatcgatattccactgtctgttggtatcttggaccccagggccagcccgacccagctgaatgcagtcgagtttttgtgggaccctgcgaagagagcttctgcattcattcaggtacactgcatcagcacagaattcacccccaggaagcacgggggcgagaagggagtgccctttcgagtccagattgacacgtttaagcagaacgagaatggggagtacacggagcacctgcactcagccagctgccagatcaaggtgttcaagccgaagggagccgatcggaaacagaagactgaccgggagaagatggagaaaagaactgcccaagagaaggagaaataccagccgtcctatgaaaccaccatcctcacagagtgctctccatggcccgacgtggcctaccaggtgaacagcgccccgtccccaagctacaatggttctccaaacagctttggcctcggcgaaggcaacgcctctccgacccacccggtggaggccctgcccgtgggcagtgaccacctgctcccatcagcttcgatccaggatgcccagcagtggcttcaccgcaacaggttctcgcagttctgccggctctttgccagcttctcaggtgctgacttgctgaagatgtcccgagatgatttggtccagatctgtggtcccgcagatgggatccggctcttcaacgccatcaaaggccggaatgtgaggccaaagatgaccatttatgtctgtcaggagctggagcagaatcgagtgcccctgcagcagaagcgggacggcagtggagacagcaacctgtctgtgtaccacgccatcttcctggaagagctgaccaccttggagctgattgagaagattgccaacctgtacagcatctccccccagcacatccaccgagtctaccggcagggccccacgggcatccatgtggtggtgagcaacgagatggtgcagaacttccaagatgaatcctgttttgtcctcagcacaattaaagctgagagcaatgatggctaccacatcatcctgaaatgtggactctgagcagcagtggacctcatacctgtctccagctcccagccctgtggatccccgtggatgtagacattgccccactgtaagctgtggcctcaccaggcaagctgaggccaggagggaccctgcccagtctgtgaaagctacagagcaccaaccagcagaagcctgtggacaccaagtacggtgtacagaaagccagtggctcctttctcccttcctcttggcctccagattttgaatggttccttgttcttttctattggtccaaccctgacgttctaaaagggcaaacagtggagacgtctgctctgaaatccctcatcccttagttggaagctgattgggtatcttggtgctgcctgtattggtcccttctgaccactctcctgcctccagagaaagctctgcttcaccctgaaagctggtacctttacctcctcctctgggagttggctgcatggccagcactgccgacttgatgggagcagtttgccctcattctcctgtttcaggtttgcttcccttctcagtgaccctggtgagcatccgcctttcctgttcttggatgaattgatgggagtggggctattctgtgccttctacctctttcttctctacgttgtttctaaggatctgctgctgcggaacccaaagatgtgctcctgtctctgcactggcgcattggcatggtagatgccacaatgtatgtgcacggcctttctcagagacattagttctgaggccctttgtggggaggttagggggatggtaatagaaaaagactattttatttcctggcaatcacgggtaaggaggattaggaatgagtattccattcctaggtgtcatcagatgaccttgaccaccacaataccaggccctcttggatggacttatagaaagttagagaagaccttgttgaaccgctgctaaacttgccacaggagcgatgtgttttctctgagtgcccctcacttacatgtttatctttgtttgtagaggctatgtttaggatattttgcctgcatcagaatgggtgcatcatctttcttaatggcctatcgggaaatttgagtgtcagtaactgtggtagactcagaaattcgtctttgtcttgcctctggttcctgggatccagtgatctctactggcccagggcttcagctcttggttaatttaggttcatggggaaccctctgaccacctgaatgggatgtcatagcttctaaatggagcttctgtggaatgaagtgctagactgaaggactaccagaataaaacagggtctacaatggggagaacttgttttatagatgaggaaaccaaggctcagaggggcaaagtcacctgcatggtagcacatagtgatagggtagcgatataaatttatcatataaaccaggacatctcggaataaaaggggctctgttagtcattatgttgggtaatagccatggcattcctacagaacagagtgaggacaggctcctgattcctcttccttctttagagagaagcggggagtgggttaactaacagctttattgagatgtcattcacatgccattcagtttacccattgctagtgtccaattgtattcacagaaccaccatcaattcacagaattacagtcaacgttggtacattttcatcacccccagtaaaaccccgtacccttggtctgtcactcctgctttcctaactcctgcagtccaaggcagccatgaatctactttctatgtaagattaacctactctggacatttcatatatctggaatcatgtgatatctcttttgtgactggcttcttccactgaatgttttctagggccgtccaagttgaggatgtatcagtacttcattcttttgtattgctgaataatacttcattgtatagatagaccacatttgtttattgattcatcagttgatggacatttgtgtgtttttactttttggctactctgaatgatgctgctatgaacatatttctacaagattttgtgtggacatatgttttcatttcttttagcaatatacataggagtggaattgctaggtcttacagtaactccgtgttttaactttttgagaaactgccagactgttttctatagcagctgtaccattttacattcccaccagcaatgtatccaggtttcaatttgtctacatcctcatcaacacttgctattatctgtctttttgcttttagcatcctaatgagtatgaaatgctatcttgtggttttgatttgcattcccctgatggcaactgatgctgagtgtcttttcctgtgcttacgggccatgcgtatttctttggagaaaggtctatccaggtcctttgcctatttttaattgagttgtcttttttttttaagttttctgttttcctaaccactagactaccagggatgagccttctttttattattgagttgggtgagctatttgtatattctagacgccagtcttttatcaggtatatgactggtaaaaatgttctccccttctgtggattgttttcagtttcttgttggtgtcctttgagacacaaaactttttaactttgatgatttccaagatacgtattttttttctattgtcacttgtgcttttggtgccatatctagaaaaccattgcctaatccaaggtcaagaagattaatgcctgtgttttcttctaagaacttgtatagttttagttctcacaatggtctttgatccatttcgagtatatttttatatatgatgtgatgtaggggtccagcttcattcttttgcttgtggatctccacttgtcccactgctgattattgagaaaaatatcctttctccacggaattgtcttggcatccttgctaaaggcctctgcttcttactggatcttctttcctgggacatggtgtcgttgggaagcttacctttttttttttttacttagtctgtgtttggttccaccagttttatgctgcctttctactctgttcttgctgtctccctctttacctgagtcaacggtactgagtcctatctctctctgatgttccccagtcttccttggtgcatgttctagctccacacactagtccttggaggaaggttgagaccaatgatttcctgttatgagtcatgaggaaactgaatcacctagaagtggaataatgtgctcagggtcaccatagcccattagtggaaggaccaggactagacctttagtcttctgaggtccagccccttaggctgtctgtcatcactgtacccaagtgatgtcactaccaaggccaaatgatggtgggctaaattttaattctcaaaagtgtaggaggctaatattgtcttctaagttccaaaagaagatgtaataaaagtctgttacct

SEQ ID NO: 103 - protein, 479 aa, Homosapiens
MLFWHTQPEHYNQHNSGSYLRDVLALPIFKQEEPQLSPENEARLPPLQYVLCAATSPAVKLHEETLTYLNQGQSYEIRLLENRKLGDFQDLNTKYVKSIIRVVFHDRRLQYTEHQQLEGWRWSRPGDRILDIDIPLSVGILDPRASPTQLNAVEFLWDPAKRASAFIQVHCISTEFTPRKHGGEKGVPFRVQIDTFKQNENGEYTEHLHSASCQIKVFKPKGADRKQKTDREKMEKRTAQEKEKYQPSYETTILTECSPWPDVAYQVNSAPSPSYNGSPNSFGLGEGNASPTHPVEALPVGSDHLLPSASIQDAQQWLHRNRFSQFCRLFASFSGADLLKMSRDDLVQICGPADGIRLFNAIKGRNVRPKMTIYVCQELEQNRVPLQQKRDGSGDSNLSVYHAIFLEELTTLELIEKIANLYSISPQHIHRVYRQGPTGIHVVVSNEMVQNFQDESCFVLSTIKAESNDGYHIILKCGL

SEQ ID NO: 104 - DNA, 8089 bp, Homosapiens
tttttttttttttaatccccgcaccaagcgcttaacctcattggggtggaggagaaggcggcggctctctggtccgcagcggcaacagtaacgaaaaacagggctaatggactgctgaattatgaagtatttcagacccagtagtagaacatcactctgccactcactcctttatctcctactagttatttaaattggacttttaatatcctaccagctgctcttcagacacacatggtgcattgttgccattccccagattgcatctttgaaacacaggctcttagtaaccttcagcgaacaaagaggcaacctcccagatacgtctgctgggagggagtcatcgtgactgccctctagcttttgctggatctggatttgaattccactatggagcctcgcatggagtcctgcctggcgcaggtgttgcagaaggatgtggggaaacgattgcaggttggccaagaactgatagactatttctcagacaaacagaagtctgctgaccttgagcatgaccagaccatgttagataaacttgtggatggacttgctacctcttgggtgaactctagcaattacaaggtggttctgctgggcatggacatcctgtccgccctggtgacccggctgcaggatcggttcaaggcgcagatcggcacagtgctgccaagtctaatagacagactaggagatgctaaagactctgtgagggagcaggaccaaactctgctgctaaagatcatggatcaagctgctaatccccagtacgtatgggacagaatgcttggaggcttcaaacacaagaatttccgtactcgagaaggcatctgtctctgccttatagcaacactcaatgcctctggagcacagactttaacactaagcaagattgtgccacatatatgcaacttacttggagatccaaacagccaggttcgagatgcagcaataaacagcttagtggaaatttacagacatgtaggagaacgtgtgagggcagatctcagtaaaaaaggattgccacagtcccggttgaatgtaatttttacaaaatttgatgaagtccagaaatctggaaacatgatacaatctgcaaatgataaaaatttcgacgatgaagattctgtggatggtaacagaccttcctctgctagttctacatcatccaaggctccaccaagttctcggagaaacgttggaatgggaaccacccgccggcttggttcatccacccttggatccaagtcttcagctgcaaaagaaggagctggtgctgttgatgaagaggattttattaaagcatttgatgatgtacctgtagtacagatttattccagccgagaccttgaggaatccataaacaaaattagggaaatattatctgatgacaagcatgattgggagcagagagtaaatgctctaaaaaagattagatctttacttttggctggtgctgctgagtatgataacttctttcaacatttgcgtcttttggatggagcctttaaactctctgctaaggacctgcggtctcaggtagtgcgggaggcttgtatcacgttggggcatctgtcatcagttctggggaataagtttgaccatggagctgaagccattatgccaactatctttaatttaattccaaacagtgccaaaattatggccacatctggtgttgtagctgttaggttaattattcggcacacacacatccctaggttaatacctgtcataacaagcaactgtacctctaagtctgtcgcagttagaaggcgctgttttgaatttttagatttgcttttacaagaatggcagacacattcactagaacgacacatatcagtattagctgaaacaataaagaagggaatacatgatgctgattccgaagcaagaatagaagccagaaaatgttactggggtttccacagtcacttcagcagagaagcagagcacttgtaccacaccttggagtcctcctaccagaaagccctgcagtcccacctgaagaactcagacagcatagtgtctctgcctcagtcagaccgctcatcttccagctctcaagagagtctaaatcgtccgctgtctgccaaaagaagtcctactggaagtaccacatctagagcttctacagttagtaccaaatctgtgtcaacgactgggtccctccagcgatctcgaagtgatattgatgtgaacgcagcagccagtgccaaatccaaagtctcctcatcttcgggcacgacgcctttcagctctgcagcagctttgcctccagggtcatacgcatccttaggtcggatccgcacaagacggcaaagctctgggagtgccaccaacgtcgcctctacacctgataaccggggccgcagtcgcgctaaagtggtttcacagtcccagcgatccagatctgctaatcctgctggtgctggcagccggtcaagttccccaggaaaattgttgggaagtggttatggtggacttactgggggctcctcacgaggcccacctgtgacaccgtcttcagaaaagcgaagcaagattcccaggagccagggatgtagccgggaaacaagtccaaaccgaataggattagcacggagcagccgtatccctcgacccagcatgagtcaggggtgcagccgcgataccagccgtgagagcagccgagatacaagccctgctcggggctttcctccacttgatcggtttgggcttggccagccaggaagaatacctggttctgtgaatgccatgagagttctgagcacaagtacagatcttgaagctgctgttgctgatgctttgaagaagcctgtgaggaggagatatgagccgtatgggatgtattctgacgatgatgccaacagtgatgcctcaagtgtttgctctgagcgctcatatggctccaggaatggtggcattccccattatctgcggcagactgaggatgtagcagaagttctcaaccactgtgctagttcaaactggtcagaaaggaaagaagggcttctgggcctgcagaacttactgaagagccaaagaacactgagtcgagttgaactgaaaaggttgtgtgagatcttcactcggatgtttgctgaccctcatagcaagagagttttcagtatgtttttggagactcttgtggattttataataattcataaggatgatttacaagactggctttttgttcttctcacacaattacttaagaaaatgggagcagatttacttggatctgtgcaagcaaaagttcaaaaggctctagatgtcacaagggactcctttccatttgatcaacaatttaacattttgatgagatttattgtggatcaaactcaaactccaaacctcaaggtcaaagttgcaatcctgaaatacattgagtctctggccagacagatggatccaacagattttgtaaactctagtgagacaaggcttgctgtttctagaatcataacctggacaacagaaccaaagagttcagacgtgagaaaggcagcacagattgtgctaatctctctgtttgaattgaatactcctgaatttaccatgttacttggtgccttgccaaaaacattccaggatggtgccaccaaactcctgcacaaccacctcaagaattccagtaacaccagtgtgggctctccaagcaatacgattggccggacgccctcccgacacaccagcagcaggaccagccccctgacctcacccaccaactgttcccatgggggtctgtctccaagtcggttatggggttggagtgccgacgggttagcgaagcacccacctcccttttctcagcctaactccatccccaccgctccctcccacaaggctctcaggcgctcttactctcccagcatgctggactatgatacagagaacctgaactctgaagaaatctatagttctctacgtggagttacagaagccattgaaaagtttagttttcgaagccaagaagatctgaatgagccaattaaacgagatggcaaaaaggagtgtgatattgtgtcccgcgatgggggcgctgcctcccctgccactgagggccgggggggtagtgaagtagaaggaggccggacagctctggataacaagacctcactactcaacacccagcctccgcgcgccttcccggggccgcgggcgcgagactacaacccgtacccctactcagatgccatcaacacctacgacaagaccgccctgaaagaggctgtgttcgatgacgacatggagcagcttcgagacgtgcccatcgaccattctgacctggtggctgaccttctgaaagagctgtccaaccacaatgagcgagtggaggaacggaagggagccctgctggagctgctcaagatcacgcgggaagacagccttggtgtctgggaggagcacttcaagaccattctgctcctgctgctggagacccttggagacaaagaccattcaattcgagcactggcgttaagagttttgagggaaattctgagaaatcaaccagcaagatttaaaaactacgccgagctgacgattatgaagactctggaagcccacaaagactcccataaggaggtggtgagagcggctgaggaggctgcgtccacactggccagttccatccacccggagcagtgcatcaaggtgctctgccccatcatccagacggccgactaccccatcaaccttgctgccatcaagatgcagaccaaagtcgtcgagaggatcgcaaaggagtcattgctgcagctccttgtcgacatcatcccaggcttgctgcagggttatgacaacaccgaaagtagtgtgcgtaaggccagcgtgttttgcttagtggcaatttattccgtaatcggagaagacctgaaacctcaccttgcacagctcacagggagcaagatgaagctactaaacttatacataaagagggcccagaccaccaacagcaacagcagctcctcctccgatgtctccacgcacagctaatggcagtacctgtctcttgtgtagacctagaagcaatcggtggtgcctctcagagacctttccccacccccttcatcggctgcccagtcagtacaaggaggcccacaaatatttattacaatcagtattttggtcccttccagcttttctgtagaatcttactggtattgaatgtaaaggaagcaaggcctgtattgcagtcttcatacaaaacaaaaggaataagaacagaaaagagccatactgaaacatgtcttgtacagcctgctgagatggcgaaaccctgtgtgtggggtgcagtttttaaaaatcagagcgctctagccactacttggtagaaagtagcattttttttttcagttaataacatatttgggggtggggtggggtgttactttgtgttcttcctccttagcctattttcttgtgcgtatggtctgtgtggggcccctttcacagctgacaccacgaaaggtgatatatctttaagttgtgttctgagacctactaaaaatgggaatcaagtcttggcaagaacagtctgaagatggccttttaacaaacgctgggaattttgcttgtcatatccagactggaggccgactgccctggctttcagcgtagaattgggagtgcaccctgacagtctccttccagctctccctaatcgactccaccgacaaggtccctaccccagagcttccatgcaaaggaattcttcaagtttaaatctggacacaaaaataagataaatgtatggcatcatttagggatgcctgagatggcagttcatgaagcacagaagataaagaagaagtctttcatctttactgctgagatccttgggaacactgttgtcatgggggctctgccaagaccctcatctctgggctacacggtgattcagattgagcaccaacttgtttcctcccctcaaagttctgcctaagccgttcagttctaacatggtctcagttaatctggtaaatggcatctttaccatcttagttctgacttctcagtttaatgtgggattaagagccaagaaaagcctagagagactggatatcacaattttttttaattttataaactgaagtagttccttgaatgtctgttgatgaaatagtcactgtttaaggaaaaaagtaattatgaggtgtagcagattgcagaaaaacaggattagaaacacacttaaaaagaacacacatttagagtctctcttcctcctcagcgaaccactaggcccccttttttaaaaacacctttagagcctaattactccaataaaagtaactagaggtttggagtctggttaaataaattctgagtaaaattcttaagccaaatggaaattcttaatgcaatcatgaggacttctattgtctcttactgttgtattagatcctataaattgaactgatttttccataaggaaaatgcttcttttgagattaattctaataacgtatttgctattgcagtgcagagcccactgcaactgctaggactgaaagcagaggctgggtgccagagcacgtgattcttaacatcatttccacagacccctctgccctgaccctctgcattggatgcaggaagctgggaaagactgatgttgatttggaaacatgggctgaaaatgaaggccccatagtgcataggaacagtaaagccagggtgctgacgtgtgtgtgtgtgtgtgtgtgtgtgtgtgtgtgtgtgtggtgttgtgtgtgtttgtgcgtgcaccctacacatgtgtggtacctcactgctgctgtttagggaacttgagggacgcgtttcaaggggttgggtattactgacgagctttggctcaaaatatagcaggaccaggtcttttgttgataagtactgtttgtttattaatatgtcattaatggtatttcttttttacactctacaagtgaattagggagtctcttgttgacccctttgttgcaggaatgtgcgtcgggctaggttatccatgagtttctttattcctaatgcagttagaaagacctttctccttgagctctttgactcccagaaggtaccccagtccccagtgtacttagaaaggatctcgaacattgctggacgtcctcatagtactcacaaagggctagccttgaatgtcactcgcccagtcttcagtctcctgacttagagatacaatcacgtcacaggtctcttggcctcaatctgaaaactgctgccgccgcgccgaggagactcgcatgccgccaccacctcactgggagggcgccgagcccaccgtcgccccctagaccctgacagctgcagctgccttgccttgccgccgcctccctgcagggcccctgttccaatgaaaaacagaacacaaaagagcagagcacctaagcctgtctctgcctccctgtctaccggactggccagggcccaagacccccgctgctccactgcggggctgggcgggctgactccctgcttcctccaagctgctgcctcccctgcagccagggtctgggcagggtgcagccggtcctcggggcacgcagcttccttcaagtacactgtgtgtgcttcccggacctgcggcgatgccacgggcctgccttttctatgcgcctcactagcttaccaccctgtgcaggtaatgcaactgactttgtctcatcagtctttttctttccctgccaccctttatttatcaagcgtaatgttacactttaaaggacagcaaataagaactttgtagaatcccaccaggactttgctaacaataatgtttggaaataaagaagtgctctgaaaaaatatcagccaccaaaatagttatgttggcactgtgttcacacgcatggtccccacacccccaggttgggtgggtttttttgttttttgggtttttttggggggggggctttttcatgttacatccatatctgtatttatatcttatttgtttcactttcaagtgtatcatggcaaatgtacagatttttttgttaataatgtgctaggatttgctaaaaaagaaaaaaaaaaaacccttttgagtttgccctagaataaatgagacttaatt

SEQ ID NO: 105 - protein, 1538 aa, Homosapiens
MEPRMESCLAQVLQKDVGKRLQVGQELIDYFSDKQKSADLEHDQTMLDKLVDGLATSWVNSSNYKVVLLGMDILSALVTRLQDRFKAQIGTVLPSLIDRLGDAKDSVREQDQTLLLKIMDQAANPQYVWDRMLGGFKHKNFRTREGICLCLIATLNASGAQTLTLSKIVPHICNLLGDPNSQVRDAAINSLVEIYRHVGERVRADLSKKGLPQSRLNVIFTKFDEVQKSGNMIQSANDKNFDDEDSVDGNRPSSASSTSSKAPPSSRRNVGMGTTRRLGSSTLGSKSSAAKEGAGAVDEEDFIKAFDDVPVVQIYSSRDLEESINKIREILSDDKHDWEQRVNALKKIRSLLLAGAAEYDNFFQHLRLLDGAFKLSAKDLRSQVVREACITLGHLSSVLGNKFDHGAEAIMPTIFNLIPNSAKIMATSGVVAVRLIIRHTHIPRLIPVITSNCTSKSVAVRRRCFEFLDLLLQEWQTHSLERHISVLAETIKKGIHDADSEARIEARKCYWGFHSHFSREAEHLYHTLESSYQKALQSHLKNSDSIVSLPQSDRSSSSSQESLNRPLSAKRSPTGSTTSRASTVSTKSVSTTGSLQRSRSDIDVNAAASAKSKVSSSSGTTPFSSAAALPPGSYASLGRIRTRRQSSGSATNVASTPDNRGRSRAKVVSQSQRSRSANPAGAGSRSSSPGKLLGSGYGGLTGGSSRGPPVTPSSEKRSKIPRSQGCSRETSPNRIGLARSSRIPRPSMSQGCSRDTSRESSRDTSPARGFPPLDRFGLGQPGRIPGSVNAMRVLSTSTDLEAAVADALKKPVRRRYEPYGMYSDDDANSDASSVCSERSYGSRNGGIPHYLRQTEDVAEVLNHCASSNWSERKEGLLGLQNLLKSQRTLSRVELKRLCEIFTRMFADPHSKRVFSMFLETLVDFIIIHKDDLQDWLFVLLTQLLKKMGADLLGSVQAKVQKALDVTRDSFPFDQQFNILMRFIVDQTQTPNLKVKVAILKYIESLARQMDPTDFVNSSETRLAVSRIITWTTEPKSSDVRKAAQIVLISLFELNTPEFTMLLGALPKTFQDGATKLLHNHLKNSSNTSVGSPSNTIGRTPSRHTSSRTSPLTSPTNCSHGGLSPSRLWGWSADGLAKHPPPFSQPNSIPTAPSHKALRRSYSPSMLDYDTENLNSEEIYSSLRGVTEAIEKFSFRSQEDLNEPIKRDGKKECDIVSRDGGAASPATEGRGGSEVEGGRTALDNKTSLLNTQPPRAFPGPRARDYNPYPYSDAINTYDKTALKEAVFDDDMEQLRDVPIDHSDLVADLLKELSNHNERVEERKGALLELLKITREDSLGVWEEHFKTILLLLLETLGDKDHSIRALALRVLREILRNQPARFKNYAELTIMKTLEAHKDSHKEVVRAAEEAASTLASSIHPEQCIKVLCPIIQTADYPINLAAIKMQTKVVERIAKESLLQLLVDIIPGLLQGYDNTESSVRKASVFCLVAIYSVIGEDLKPHLAQLTGSKMKLLNLYIKRAQTTNSNSSSSSDVSTHS

SEQ ID NO: 106 - DNA, 1140 bp, Homosapiens
atgggcaggaaccagcagacgacaccgaaaagcagaaatagcaaggtgaggaaaaagccagtgcgctgtgtcccggaagtcgggggagaaagtgatcagctgggccccatgttgctagacatgttaagatgcagtccgaaaatggacaattggattgagcaatctggggctggtacaaaggatgaattgcacattgttgaagtagaggcaatgaattacaaaggcagtccaattaaagtaacactggcaactttgaaaatgtctgtacagccaaaggattcccttggaggctttgaaatcacaccaccagtggtcttacggttgaagtgtggttcagggccagtgcatattagtggacagcacttagtagctgtggaggaagatgcagagtcagaagatgaagaggaggaggatgtgaaactcttaagtgtatctggaaagcggtcggcccgtggaggtggtagcaagattccacagaaaaaagtgtttggaagccttcaaacagtttccaaaagtctcagcaagctgagagcaggggctctcagaagcccacgggggatgtttggcacctgttttgctgcctctcttttcctggttaaacgttacccacagctgcctgctaaatggaaaaatgaccaacacatcaccaggcagatgctactgtgtcaggaagtgagggctttctctgatgatataatgaccttcattcagccaccagatcctttaagcagtttgatgctgacttttggatgctgccagctttgtagaagccttttgctgtgggaggcacttgccaagccttgctgcgacagaggagtatcctttgtcatgctgacattggtgcctctcaccttccctcaggcctgcctctctcccctagtgagcctcggcctagactgcccacttccactggagatgttcatcatcaagtcatttacagatcaaaaccacagttcttacctgcagtgccggaaggagggtaagaaacagaatctgggtgtgccctccccagctctgtcatccctaggaatattctcccaggttgtgacagagcccggaaaaaagccatttgcgatgacctcactgtacccgacttctaccagagtccctggcctttttctggcccttggtgatccctga

SEQ ID NO: 107 - protein, 379 aa, Homosapiens
MGRNQQTTPKSRNSKVRKKPVRCVPEVGGESDQLGPMLLDMLRCSPKMDNWIEQSGAGTKDELHIVEVEAMNYKGSPIKVTLATLKMSVQPKDSLGGFEITPPVVLRLKCGSGPVHISGQHLVAVEEDAESEDEEEEDVKLLSVSGKRSARGGGSKIPQKKVFGSLQTVSKSLSKLRAGALRSPRGMFGTCFAASLFLVKRYPQLPAKWKNDQHITRQMLLCQEVRAFSDDIMTFIQPPDPLSSLMLTFGCCQLCRSLLLWEALAKPCCDRGVSFVMLTLVPLTFPQACLSPLVSLGLDCPLPLEMFIIKSFTDQNHSSYLQCRKEGKKQNLGVPSPALSSLGIFSQVVTEPGKKPFAMTSLYPTSTRVPGLFLALGDP

SEQ ID NO: 108 - DNA, 1686 bp, Homosapiens
gtttgcgggagcgccgcgtggttagcgtcggcggcttttggcatggcgactttttctggcccggctgggccaatcctgtcgcttaatccgcaggaagatgtcgagtttcaaaaggaggtggcgcaggttcgcaagcgcataacccagcgaaaaaaacaagaacaacttactcctggagtagtctatgtgcgccacctacctaacctacttgacgaaacccagatcttttcatatttctcccagtttggcactgtgacacggttcaggctgtccagaagtaaaaggactggaaatagcaaaggctatgcatttgtggagtttgagtctgaggatgttgccaaaatagttgctgaaacaatgaacaactacctgtttggtgaaagactcttggagtgtcattttatgccacctgaaaaagtacataaagaactctttaaagactggaatattccatttaagcagccatcatatcaatcagtgaaacggtataatcggaatcggacactaacacaaaagctacggatggaggagcgatttaaaaagaaagaaagattactcaggaagaaattagctaaaaaaggaattgactatgattttccttctttgattttacagaaaacggaaagtatttcaaaaactaatcgtcagacgtctacaaaaggccaggttttacgtaagaagaagaaaaaagtttcaggtactcttgacactcctgagaagactgtggatagccagggccccacaccagtttgtacaccaacatttttggagaggcgaaaatctcaagtggctgaactgaatgatgatgataaagatgatgaaatagttttcaaacagcccatatcctgtgtaaaagaagaaatacaagagactcaaacacctacacattcacggaaaaaaagacgaagaagcagcaatcagtgattttcaatgtattatatttcttttgaaaaatataatatttttatgagagtggactttgtatttcactaggtacaatggaatacaacctttgacaagattttcagaggaaaaatacactgtttggtcaagttaaggaaagcagtgtgtaattttggattgcctgcccttggctgaaatacaggggtgcataccatcttgcagtggcttggctgacattgcctctttgtcctggcctctagttttcttttgatatttcatagctctccttagtttactctgcctggatagaaagttgaccactaactgcaggtttaagtactaaactgcagccttttctgtcgccagcaattaaagaccaccaatcttgtttgtccatctacatggtttgtcggggacatttaactcatggaggtgctttagatttcaacatcagatggttgaagctggaagtttaattatatgtagagtgagaaggcagttccagttttagcacagatttgtttatgtgttcagattttaatagagattcaaaaatgactcatttttaccaataatgttaaattagttttggttgtgctagcatgaattaataaccaccattttataccagtatcatcagtgaagaattgtatttcaagattcaaacaataaccagcaattaaacttttttctacaatgtatttgtttgcgagtaggacttgggagtcattggaaaaaaaaaataataaattttccccttcattaacaaaaaaaaaaaaaaaa

SEQ ID NO: 109 - protein, 293 aa, Homosapiens
MATFSGPAGPILSLNPQEDVEFQKEVAQVRKRITQRKKQEQLTPGVVYVRHLPNLLDETQIFSYFSQFGTVTRFRLSRSKRTGNSKGYAFVEFESEDVAKIVAETMNNYLFGERLLECHFMPPEKVHKELFKDWNIPFKQPSYQSVKRYNRNRTLTQKLRMEERFKKKERLLRKKLAKKGIDYDFPSLILQKTESISKTNRQTSTKGQVLRKKKKKVSGTLDTPEKTVDSQGPTPVCTPTFLERRKSQVAELNDDDKDDEIVFKQPISCVKEEIQETQTPTHSRKKRRRSSNQ

SEQ ID NO: 110 - DNA, 3408 bp, Homosapiens
cctttggacgcgcgcctcggttccgaacgcagcggacggcgcctcaggcagcgcggcggacagcccgtcctccggcgcgccgcgagcctcggaggaccctagcgacggtcgtggcgtaagaccggggggacgcggcggtagcggcggccgttgcgattgattgcgctggttgcctgcggcgtccacttccttggccgcccttgctacactggctgattgttgtgcagccggcgccatgtctgtgagcgagatcttcgtggagctgcagggctttttggctgccgagcaggacatccgagaggaaatcagaaaagttgtacagagtttagaacaaacagctcgagagattttaactctactgcaaggggtccatcagggtgctgggtttcaggacattccaaagaggtgtttgaaagctcgagaacattttggtacagtaaaaacacatctaacatctttgaagaccaaatttcctgctgaacagtattacagatttcatgagcactggaggtttgtgttgcagcgcttggtcttcttggcagcatttgttgtgtatttggaaacagaaacactagtgactcgagaagcagttacagaaattcttggcattgagccagatcgggagaaaggatttcatctggatgtagaagattatctctcaggagttctaattcttgccagtgaactgtcgaggctgtctgtcaacagcgtgactgctggagactactcccgacccctccacatctccaccttcatcaatgagctggattccggttttcgccttctcaacctgaaaaatgactccctgaggaagcgctacgacggattgaaatatgacgtgaagaaagtagaggaagtggtctatgatctctccatccggggctttaataaggagacggcagcagcttgtgttgaaaaataggaggctctccttgctcctggccttgctgacctcagcggttgccaggaaggggtgagcacagagtgcctcttacggtagttaggatgctcagttgctaaacactgcgctttattttcttaaccagttgtggtgtgagtatcagaattgaaacacttttttgggggtaaaaaatatagcctttacatggacagaattttttttgttgtttcagtgaatatgcctgtaattcagtgtatttcagttccgtcagaaagtgtaaatgttagtttcttggtaaagtccttttcttgcttaccttgactgttgatgtactgattgagaagttcattgtctcgtttgtgattcttccagatgtgatgcttgatattttctatatgcgagttagccatccacacccaggcatagcctggatacagtataaaaatagataattaaaaagatggttgccaagcaaggaaaacttattttatattttcccttccttattttaagcattgtgagtaaatcagatgttgaattcttttgccaagggaattatagctgcaggttctctctcactgccatcaaactgtaaaagattaaactgcgaagtcaagctcaacagattattttggaaagtttttgtattaagggatttagtaacatcattttgttttccaccaggcagggagtagggcttagtgttttaaaacacctctgctttctgatgttgccttaatattctgctattgcagcaattaaaaattgtcttcatgtacatttggaactaacacgtgatgtgatatattcctaaactatgaaacctttttcctagtagtcagctagatcatttgttctgggagtataaagccacccacgtaagttaataagcaaaatcctgactattatgttgttagagaaaaatgctttgctttgtctggaagaaagataaaatagtgaattataaataagtcaggccgggcgtggtggctcacacctgtaatcccagcacactgggaggccgaggcagggggactgcttgagctcaggagttcgagaccagcctgggcaacaaagtgagactccatctctatataaaaacaaaaaccacgaaagcacacacaaaataaatcagtgggatttggtaatgtgttttagagtaagaaatttcaggttgttggtgactatcccaacagtcatgttttaaatgtacagtttggggcaagtcatgtaaatactgttggtggtcttccccacacgccccaattttcaggtagtactaagagtatgtgccaggaaactcttgctattgaattgagatgattaaaatggtgacttaatccgtagttattttgcacccactgaaaggaaagtgctttccagaataatatgaagtatctaaaagtgtcaccttttcttgcctgatcaacaatttgggcttcctgtttgtacaaggggccatttggcatacctttcacagcttttatcaggccaagttaaaggctgactacattttttcatcatgaggaaagcagttgaaatgaggcatgagttactgtgcattgggattttagaacaattttcttgtgacagctctttttgtgaagttaggttcttaaaagtgcccatgatggtcacttaaaatgtgcagtaatagcactgccaggatcaagcatgaaaggcttttaaattagatcatcccacagacaatacgtttgataatagttttttcttttaacctctttaagtattgattctgcttgagaatattgaagtacttgccagaagttgtggatttcagttttaacaaatgctattaaagtggagaagcacactctggtcttggaattccatttgaggatttagaagtgtcatgtttataactattcagttgtgtttgttgctggcttgttgtaaagcaataaaatttttttggtctttttgtaagtgagtgtgctgctgtaagaaatctcccatgtgcataacaaattctgaatattttttgaggctaaagaagaccggggtgacaagcagatactgctgtgtaatggttacactaaccaaaagacaccagccactcagagttctatactgtaaagcgcagataacatttgtgtgttataccttgattggggaattaaaagtcatttaactgaagatgttgagaaacctgggctctggttttagtataccggaattacttttttccaattttagaaaatcaagcaggttagagaaaatagagatgaattaggggacactgtcttatggattcatttataagaagagaaccagccatatacacttggggagatttgccacatcttaaacttgaataatagtatgagtaatgcttaagggagtttaatagagaaggaaagctttggcagtgttttgagaacttaagtggctaaagagatgagacaaacatgcaggtcgctactggcatagtttcataattgtgtactcggaaattaaagtttgcttgtttcttggtctggattaaa

SEQ ID NO: 111 - protein, 228 aa, Homosapiens
MSVSEIFVELQGFLAAEQDIREEIRKVVQSLEQTAREILTLLQGVHQGAGFQDIPKRCLKAREHFGTVKTHLTSLKTKFPAEQYYRFHEHWRFVLQRLVFLAAFVVYLETETLVTREAVTEILGIEPDREKGFHLDVEDYLSGVLILASELSRLSVNSVTAGDYSRPLHISTFINELDSGFRLLNLKNDSLRKRYDGLKYDVKKVEEVVYDLSIRGFNKETAAACVEK

SEQ ID NO: 112 - DNA, 4401 bp, Homosapiens
gggctggctgcggcggtctcgctcggctgtccgttccttgctggagaatttggccacaaagagctgccaagatagctgggccaggaagaaagcgccgcagccctgacccagacgctgttgccgaccccggggcactctggctgtcgaccaagcggctcaagatgtctggcggggccagtgccacaggcccaaggagagggcccccaggactggaggacaccactagtaagaagaagcagaaggatcgagcaaaccaggagagcaaggatggagatcctaggaaagagacagggtctcgatatgttgcccaggctggtcttgaacctctggcctcaggtgatccttctgcctcagcctcccatgcagctgggatcacaggctcacgccaccgtacccggctgttctttccttcatcgtcagggtcagcatccactcctcaagaggagcagaccaaagagggagcttgtgaagaccctcatgatctcttggctactcccactccagagttgttgctcgattggaggcagagtgcagaagaggtgattgtcaagcttcgtgtgggagtaggtcccctgcagctggaggatgtagatgctgctttcacagatacagactgtgtggtgcggtttgcaggtggtcagcagtggggtggtgtcttctatgctgagataaaaagctcttgtgctaaagtgcaaacccgcaagggcagtctcctgcacctgacactgcccaaaaaggtgcctatgctcacgtggccctccctcctggttgaggctgatgaacagctttgcataccaccgctgaactcccaaacctgcctcctgggctcagaggagaatttagcccctttggcaggagagaaagcagtgcctcccgggaatgacccagtctctccagccatggtccggagcagaaaccctgggaaagatgactgtgccaaggaggagatggcagtggcagcagatgctgcaaccttggtggatgagcccgagtcgatggtgaacctggcgtttgtcaagaatgactcgtatgagaagggcccggattcagtggtggtgcacgtgtacgtgaaggagatctgcagggacacctcaagagtacttttccgtgagcaggacttcacgctcatcttccagaccagggatggaaacttcctgaggctgcacccgggctgtgggccccacaccaccttccgttggcaggtgaagctcaggaatctgattgagccagagcagtgcaccttctgtttcacggcttctcgcatcgacatctgccttcgtaagaggcagagtcagcgctgggggggcctggaggccccggctgcacgagtgggtggtgcaaaggttgccgtgccgacaggtccaacccctctggattcaaccccaccaggaggtgctccccaccccctgacaggccaggaggaggcccgggctgtggagaaggataaatccaaggcacgatctgaggacacagggctagacagtgtggcaacccgcacacccatggagcatgtaaccccaaagccagagacacacctggcctcgcccaagcctacatgcatggtgcctcccatgccccacagcccagttagtggagacagcgtggaggaggaggaagaggaagagaagaaggtgtgtctgccaggcttcactggccttgtcaatttaggcaacacctgcttcatgaacagcgtcattcagtctctgtccaacactcgggaactccgggacttcttccatgaccgctcctttgaggctgagatcaactacaacaacccactagggactggtgggcgtctggccattggctttgccgtgctgcttcgggcgctgtggaagggcacccaccatgccttccagccttccaagttgaaggccattgtggcgagtaaggccagccagttcacaggctatgcacagcatgatgcccaggagttcatggctttcctgctggatgggctgcacgaggacctgaatcgcattcagaacaagccctacacagagaccgtggattcagatgggcggcccgatgaggtggtagctgaggaagcatggcagcggcacaagatgaggaatgactctttcatcgtggacctatttcaggggcagtacaagtcgaagctggtgtgccctgtgtgtgccaaggtctccatcacttttgacccgtttctttatctgccggtgcccttgccacaaaagcaaaaggttctccctgtcttttattttgcccgagagccccacagcaagcccatcaagttcctggtgagcgtcagcaaggagaactccactgcgagcgaagtattggactccctctctcagagtgttcatgtgaagcctgagaacctgcgtttggcggaggtaattaagaatcgttttcatcgtgtgttcctaccctcccactcactggacactgtgtccccatctgatacgctcctctgctttgagctgctatcctcagagttggctaaggagcgggtagtggtgctagaggtgcaacagcgcccccaggtgcccagcgtccccatctccaagtgtgcagcctgccagcggaagcaacagtcggaggatgaaaagctgaagcgctgtacccggtgctaccgtgtgggctactgcaaccagctctgccagaaaacccactggcctgaccacaagggcctctgccgacctgagaacattggctaccccttcctggtcagtgtacctgcctcacgcctcacttatgcccgcctcgctcagttgctagagggctatgcccggtactctgtgagtgtattccagccaccctttcagccaggccgcatggccttggagtctcagagccctggctgcaccacactgctctccacaggttccctggaggctggggacagcgagagagaccccattcagccacctgagctccagctggtgacccctatggctgagggggacacagggcttccccgggtgtgggcagcccctgaccggggtcctgtgcccagcaccagtggaatttcttctgagatgctggccagtgggcccattgaggttggctccttgccagctggcgagagggtgtcccgacccgaagctgctgtgcctgggtaccagcatccaagtgaagctatgaatgcccacacaccccagttcttcatctataaaattgattcatccaaccgagagcagcggctagaggacaaaggagacaccccactggagctgggtgacgactgtagcctggctctcgtctggcggaacaatgagcgcttgcaggagtttgtgttggtagcctccaaggagctggaatgtgctgaggatccaggctctgccggtgaggctgcccgggccggccacttcaccctggaccagtgcctcaacctcttcacacggcctgaggtgctggcacccgaggaggcctggtactgcccacagtgcaaacagcaccgtgaggcctccaagcagctgttgctatggcgcctgccaaatgttctcatcgtgcagctcaagcgcttctcctttcgtagttttatctggcgtgacaagatcaatgacttggtggagttccctgttaggaacctggacctgagcaagttctgcattggtcagaaagaggagcagctgcccagctacgatctatatgctgtcatcaaccactatggaggcatgattggtggccactacactgcctgtgcacgcctgcccaatgatcgtagcagtcagcgcagtgacgtgggctggcgcttgtttgatgacagcacagtgacaacggtagacgagagccaggttgtgacgcgttatgcctatgtactcttctaccgccggcggaactctcctgtggagaggccccccagggcaggtcactctgagcaccacccagacctaggccctgcagctgaggctgctgccagccaggcttcccggatttggcaggagctggaggctgaggaggagccggtgcctgaggggtctgggcccctgggtccctgggggccccaagactgggtgggccccctaccacgtggccctaccacaccagatgagggctgcctccggtactttgtcctgggcaccgtggcggctttggtggccctcgtgctcaacgtgttctatcctctggtatcccagagtcgctggagatgagctcgcctgcaggcagctgctgtgagctggcctacctgcctgccccaggccatgcctgcctttgttgtggggaacacctctgggctttgggcctcagcttatgcatctggtgggagagggtggggaggttgtggcccctgcaggggcagagtatcctagggtgtgtatccatctggctgtctgtccattcatcctgctgctctgacccttggcctcaggcttggccctgcccaagctacttcctgtacttaaaagtgttaataaaaccagactattcaggccc

SEQ ID NO: 113 - protein, 1318 aa, Homosapiens
MSGGASATGPRRGPPGLEDTTSKKKQKDRANQESKDGDPRKETGSRYVAQAGLEPLASGDPSASASHAAGITGSRHRTRLFFPSSSGSASTPQEEQTKEGACEDPHDLLATPTPELLLDWRQSAEEVIVKLRVGVGPLQLEDVDAAFTDTDCVVRFAGGQQWGGVFYAEIKSSCAKVQTRKGSLLHLTLPKKVPMLTWPSLLVEADEQLCIPPLNSQTCLLGSEENLAPLAGEKAVPPGNDPVSPAMVRSRNPGKDDCAKEEMAVAADAATLVDEPESMVNLAFVKNDSYEKGPDSVVVHVYVKEICRDTSRVLFREQDFTLIFQTRDGNFLRLHPGCGPHTTFRWQVKLRNLIEPEQCTFCFTASRIDICLRKRQSQRWGGLEAPAARVGGAKVAVPTGPTPLDSTPPGGAPHPLTGQEEARAVEKDKSKARSEDTGLDSVATRTPMEHVTPKPETHLASPKPTCMVPPMPHSPVSGDSVEEEEEEEKKVCLPGFTGLVNLGNTCFMNSVIQSLSNTRELRDFFHDRSFEAEINYNNPLGTGGRLAIGFAVLLRALWKGTHHAFQPSKLKAIVASKASQFTGYAQHDAQEFMAFLLDGLHEDLNRIQNKPYTETVDSDGRPDEVVAEEAWQRHKMRNDSFIVDLFQGQYKSKLVCPVCAKVSITFDPFLYLPVPLPQKQKVLPVFYFAREPHSKPIKFLVSVSKENSTASEVLDSLSQSVHVKPENLRLAEVIKNRFHRVFLPSHSLDTVSPSDTLLCFELLSSELAKERVVVLEVQQRPQVPSVPISKCAACQRKQQSEDEKLKRCTRCYRVGYCNQLCQKTHWPDHKGLCRPENIGYPFLVSVPASRLTYARLAQLLEGYARYSVSVFQPPFQPGRMALESQSPGCTTLLSTGSLEAGDSERDPIQPPELQLVTPMAEGDTGLPRVWAAPDRGPVPSTSGISSEMLASGPIEVGSLPAGERVSRPEAAVPGYQHPSEAMNAHTPQFFIYKIDSSNREQRLEDKGDTPLELGDDCSLALVWRNNERLQEFVLVASKELECAEDPGSAGEAARAGHFTLDQCLNLFTRPEVLAPEEAWYCPQCKQHREASKQLLLWRLPNVLIVQLKRFSFRSFIWRDKINDLVEFPVRNLDLSKFCIGQKEEQLPSYDLYAVINHYGGMIGGHYTACARLPNDRSSQRSDVGWRLFDDSTVTTVDESQVVTRYAYVLFYRRRNSPVERPPRAGHSEHHPDLGPAAEAAASQASRIWQELEAEEEPVPEGSGPLGPWGPQDWVGPLPRGPTTPDEGCLRYFVLGTVAALVALVLNVFYPLVSQSRWR

SEQ ID NO: 114 - DNA, 5815 bp, Homosapiens
gaaggcagtttccggagggaaggggtagggttggggtgggggcgctctccgcccggtgttgcgctccttcccagaatccgctccggcctttccttcctgccgcgattcccaactttgctcaaagtcgctggactctaagctgtcggagggaccgctggacagacctgggaactgacagagggcctggagggaaacaggccaaagacccacaggcagagttgacacggaaccccaaagcaaggaggagggctcgggccgagaccgttcacctccccttatccctgttcccctcttcaggatggagctgacctcaagggaaagagggaggggacagcctctgccctgggaacttcgactgggcctactgctaagcgtgctggctgccacactggcacaggcccctgccccggatgtgcctggctgttccaggggaagctgctaccccgccacgggcgacctgctggtgggccgagctgacagactgactgcctcatccacttgtggcctgaatggcccccagccctactgcatcgtcagtcacctgcaggacgaaaagaagtgcttcctttgtgactcccggcgccccttctctgctagagacaacccacacagccatcgcatccagaatgtagtcaccagctttgcaccacagcggcgggcagcctggtggcagtcagagaatggtatccctgcggtcaccatccagctggacctggaggctgagtttcatttcacacacctcattatgaccttcaagacatttcgccctgctgccatgctggtggaacgctcagcagactttggccgaacctggcatgtgtaccgatatttctcctatgactgtggggctgacttcccaggagtcccactagcacccccacggcactgggatgatgtagtctgtgagtcccgctactcagagattgagccatccactgaaggcgaggtcatctatcgtgtgctggaccctgccatccctatcccagacccctacagctcacggattcagaacctgttgaagatcaccaacctacgggtgaacctgactcgtctacacacgttgggagacaacctactcgacccacggagggagatccgagagaagtactactatgccctctatgagctggttgtacgtggcaactgcttctgctacggacacgcctcagagtgtgcacccgccccaggggcaccagcccatgctgagggcatggtgcacggagcttgcatctgcaaacacaacacacgtggcctcaactgcgagcagtgtcaggatttctatcgtgacctgccctggcgtccggctgaggacggccatagtcatgcctgtaggaagtgtgagtgccatgggcacacccacagctgccacttcgacatggccgtatacctggcatctggcaatgtgagtggaggtgtgtgtgatggatgtcagcataacacagctgggcgccactgtgagctctgtcggcccttcttctaccgtgacccaaccaaggacctgcgggatccggctgtgtgccgctcctgtgattgtgaccccatgggttctcaagacggtggtcgctgtgattcccatgatgaccctgcactgggactggtctccggccagtgtcgctgcaaagaacatgtggtgggcactcgctgccagcaatgccgtgatggcttctttgggctcagcatcagtgaccgtctgggctgccggcgatgtcaatgtaatgcacggggcacagtgcctgggagcactccttgtgaccccaacagtggatcctgttactgcaaacgtctagtgactggacgtggatgtgaccgctgcctgcctggccactggggcctgagccacgacctgctcggctgccgcccctgtgactgcgacgtgggtggtgctttggatccccagtgtgatgagggcacaggtcaatgccactgccgccagcacatggttgggcgacgctgtgagcaggtgcaacctggctacttccggcccttcctggaccacctaatttgggaggctgaggacacccgagggcaggtgctcgatgtggtggagcgcctggtgacccccggggaaactccatcctggactggctcaggcttcgtgcggctacaggaaggtcagaccctggagttcctggtggcctctgtgccgaaggctatggactatgacctgctgctgcgcttagagccccaggtccctgagcaatgggcagagttggaactgattgtgcagcgtccagggcctgtgcctgcccacagcctgtgtgggcatttggtgcccaaggatgatcgcatccaagggactctgcaaccacatgccaggtacttgatatttcctaatcctgtctgccttgagcctggtatctcctacaagctgcatctgaagctggtacggacagggggaagtgcccagcctgagactccctactctggacctggcctgctcattgactcgctggtgctgctgccccgtgtcctggtgctagagatgtttagtgggggtgatgctgctgccctggagcgccaggccacctttgaacgctaccaatgccatgaggagggtctggtgcccagcaagacttctccctctgaggcctgcgcacccctcctcatcagcctgtccaccctcatctacaatggtgccctgccatgtcagtgcaaccctcaaggttcactgagttctgagtgcaaccctcatggtggtcagtgcctgtgcaagcctggagtggttgggcgccgctgtgacctctgtgcccctggctactatggctttggccccacaggctgtcaagcctgccagtgcagccacgagggggcactcagcagtctctgtgaaaagaccagtgggcaatgtctctgtcgaactggtgcctttgggcttcgctgtgaccgctgccagcgtggccagtggggattccctagctgccggccatgtgtctgcaatgggcatgcagatgagtgcaacacccacacaggcgcttgcctgggctgccgtgatcacacagggggtgagcactgtgaaaggtgcattgctggtttccacggggacccacggctgccatatgggggccagtgccggccctgtccctgtcctgaaggccctgggagccaacggcactttgctacttcttgccaccaggatgaatattcccagcagattgtgtgccactgccgggcaggctatacggggctgcgatgtgaagcttgtgcccctgggcactttggggacccatcaaggccaggtggccggtgccaactgtgtgagtgcagtgggaacattgacccaatggatcctgatgcctgtgacccccacacgggccaatgcctgcgctgtttacaccacacagagggtccacactgtgcccactgcaagcctggcttccatgggcaggctgcccgacagagctgtcaccgctgcacatgcaacctgctgggcacaaatccgcagcagtgcccatctcctgaccagtgccactgtgatccaagcagtgggcagtgcccatgcctccccaatgtccagggccctagctgtgaccgctgtgcccccaacttctggaacctcaccagtggccatggttgccagccttgtgcctgccacccaagccgggccagaggccccacctgcaacgagttcacagggcagtgccactgccgtgccggctttggagggcggacttgttctgagtgccaagagctccactggggagaccctgggttgcagtgccatgcctgtgattgtgactctcgtggaatagatacacctcagtgtcaccgcttcacaggtcactgcagctgccgcccaggggtgtctggtgtgcgctgtgaccagtgtgcccgtgcgttctcaggaatctttcctgcctgccatccctgccatgcatgcttcggggattgggaccgagtggtgcaggacttggcagcccgtacacagcgcctagagcagcgggcgcaggagttgcaacagacgggtgtgctgggtgcctttgagagcagcttctggcacatgcaggagaagctgggcattgtgcagggcatcgtaggtgcccgcaacacctcagccgcctccactgcacagcttgtggaggccacagaggagctgcggcgtgaaattggggaggccactgagcacctgactcagctcgaggcagacctgacagatgtgcaagatgagaacttcaatgccaaccatgcactaagtggtctggagcgagataggcttgcacttaatctcacactgcggcagctcgaccagcatcttgacttgctcaaacattcaaacttcctgggtgcctatgacagcatccggcatgcccatagccagtctgcagaggcagaacgtcgtgccaatacctcagccctggcagtacctagccctgtgagcaactcggcaagtgctcggcatcggacagaggcactgatggatgctcagaaggaggacttcaacagcaaacacatggccaaccagcgggcacttggcaagctctctgcccatacccacaccctgagcctgacagacataaatgagctggtgtgtggggcaccaggggatgcaccctgtgctacaagcccttgtgggggtgccggctgtcgagatgaggatgggcagccgcgctgtgggggcctcagctgcaatggggcagcggctacagcagacctagcactgggccgggcccggcacacacaggcagagctgcagcgggcactggcagaaggtggtagcatcctcagcagagtggctgagactcgtcggcaggcaagcgaggcacagcagcgggcccaggcagccctggacaaggctaatgcttccaggggacaggtggaacaggccaaccaggaacttcaagaacttatccagagtgtgaaggacttcctcaaccaggagggggctgatcctgatagcattgaaatggtggccacacgggtgctagagctctccatcccagcttcagctgagcagatccagcacctggcgggcgcgattgcagagcgagtccggagcctggcagatgtggatgcgatcctggcacgtactgtaggagatgtgcgtcgtgccgagcagctactgcaggatgcacggcgggcaaggagctgggctgaggatgagaaacagaaggcagagacagtacaggcagcactggaggaggcccagcgggcacagggtattgcccagggtgccatccggggggcagtggctgacacacgggacacagagcagaccctgtaccaggtacaggagaggatggcaggtgcagagcgggcactgagctctgcaggtgaaagggctcggcagttggatgctctcctggaggctctgaaattgaaacgggcaggaaatagtctggcagcctctacagcagaagaaacggcaggcagtgcccagggtcgtgcccaggaggctgagcagctgctacgcggtcctctgggtgatcagtaccagacggtgaaggccctagctgagcgcaaggcccaaggtgtgctggctgcacaggcaagggcagaacaactgcgggatgaggctcgggacctgttgcaagccgctcaggacaagctgcagcggctacaggaattggaaggcacctatgaggaaaatgagcgggcactggagagtaaggcagcccagttggacgggttggaggccaggatgcgcagcgtgcttcaagccatcaacttgcaggtgcagatctacaacacctgccagtgacccctgcccaaggcctaccccagttcctagcactgccccacatgcatgtctgcctatgcactgaagagctcttggcccggcagggcccccaataaaccagtgtgaacccccaaaaaaaaa

SEQ ID NO: 115 - protein, 1798 aa, Homosapiens
MELTSRERGRGQPLPWELRLGLLLSVLAATLAQAPAPDVPGCSRGSCYPATGDLLVGRADRLTASSTCGLNGPQPYCIVSHLQDEKKCFLCDSRRPFSARDNPHSHRIQNVVTSFAPQRRAAWWQSENGIPAVTIQLDLEAEFHFTHLIMTFKTFRPAAMLVERSADFGRTWHVYRYFSYDCGADFPGVPLAPPRHWDDVVCESRYSEIEPSTEGEVIYRVLDPAIPIPDPYSSRIQNLLKITNLRVNLTRLHTLGDNLLDPRREIREKYYYALYELVVRGNCFCYGHASECAPAPGAPAHAEGMVHGACICKHNTRGLNCEQCQDFYRDLPWRPAEDGHSHACRKCECHGHTHSCHFDMAVYLASGNVSGGVCDGCQHNTAGRHCELCRPFFYRDPTKDLRDPAVCRSCDCDPMGSQDGGRCDSHDDPALGLVSGQCRCKEHVVGTRCQQCRDGFFGLSISDRLGCRRCQCNARGTVPGSTPCDPNSGSCYCKRLVTGRGCDRCLPGHWGLSHDLLGCRPCDCDVGGALDPQCDEGTGQCHCRQHMVGRRCEQVQPGYFRPFLDHLIWEAEDTRGQVLDVVERLVTPGETPSWTGSGFVRLQEGQTLEFLVASVPKAMDYDLLLRLEPQVPEQWAELELIVQRPGPVPAHSLCGHLVPKDDRIQGTLQPHARYLIFPNPVCLEPGISYKLHLKLVRTGGSAQPETPYSGPGLLIDSLVLLPRVLVLEMFSGGDAAALERQATFERYQCHEEGLVPSKTSPSEACAPLLISLSTLIYNGALPCQCNPQGSLSSECNPHGGQCLCKPGVVGRRCDLCAPGYYGFGPTGCQACQCSHEGALSSLCEKTSGQCLCRTGAFGLRCDRCQRGQWGFPSCRPCVCNGHADECNTHTGACLGCRDHTGGEHCERCIAGFHGDPRLPYGGQCRPCPCPEGPGSQRHFATSCHQDEYSQQIVCHCRAGYTGLRCEACAPGHFGDPSRPGGRCQLCECSGNIDPMDPDACDPHTGQCLRCLHHTEGPHCAHCKPGFHGQAARQSCHRCTCNLLGTNPQQCPSPDQCHCDPSSGQCPCLPNVQGPSCDRCAPNFWNLTSGHGCQPCACHPSRARGPTCNEFTGQCHCRAGFGGRTCSECQELHWGDPGLQCHACDCDSRGIDTPQCHRFTGHCSCRPGVSGVRCDQCARAFSGIFPACHPCHACFGDWDRVVQDLAARTQRLEQRAQELQQTGVLGAFESSFWHMQEKLGIVQGIVGARNTSAASTAQLVEATEELRREIGEATEHLTQLEADLTDVQDENFNANHALSGLERDRLALNLTLRQLDQHLDLLKHSNFLGAYDSIRHAHSQSAEAERRANTSALAVPSPVSNSASARHRTEALMDAQKEDFNSKHMANQRALGKLSAHTHTLSLTDINELVCGAPGDAPCATSPCGGAGCRDEDGQPRCGGLSCNGAAATADLALGRARHTQAELQRALAEGGSILSRVAETRRQASEAQQRAQAALDKANASRGQVEQANQELQELIQSVKDFLNQEGADPDSIEMVATRVLELSIPASAEQIQHLAGAIAERVRSLADVDAILARTVGDVRRAEQLLQDARRARSWAEDEKQKAETVQAALEEAQRAQGIAQGAIRGAVADTRDTEQTLYQVQERMAGAERALSSAGERARQLDALLEALKLKRAGNSLAASTAEETAGSAQGRAQEAEQLLRGPLGDQYQTVKALAERKAQGVLAAQARAEQLRDEARDLLQAAQDKLQRLQELEGTYEENERALESKAAQLDGLEARMRSVLQAINLQVQIYNTCQ

SEQ ID NO: 116 - DNA, 1820 bp, Homosapiens
gttggagcagcggaggcggcgcagaggcgcgtcttgggtccccgcggcggcgccggtgccaagcgctggtttgcggatacccaggcagatctgcagtgcctaatgccatgagtgtggtggttcagcatgtggaggaaaaagctgtgcactcctggtcgcgcatctccacggcagggaagaaggccctggaagaggcactgcttgtctttaacccaatgagccaggatctcagtgccacagaggcccagcttgtggccttcctgcagggcctgcgagatgatggcttccaacctaccatcctgcgcagtggtgatgtctatggctatagttcatgcacagctaatcccccaagccagacgaaactgcaagctcgtgcccctaacccaactgccacatcacctccagccagtgctccccgaactgccatgcggttgcctgcaggtcgggccacactgcttcccatgccgctatctggcagactggccaaagcatccacaccagcccttgccaagcatgctaccaccaacctgctgctgagctctctgaagcaatcaagtgccagccatgcccggggtgcagcagtgggcttccccacccacctttatccaggtgtctaccctgccatgcggctctctgttgtccttgaggccctggttccacttaagactcccatgccctgcttgggtgccaagcacaaggcacagtcactgcagctctcacttgcagactctcctctgaaactgcggaaaagttcagggaagggtccggggaaccctcggcccaaagctcccagaaaaaccacaagcaagggccccaagtgtctgactcgcaaaggccctggggctggaccccgacgaggctctgggcaccagagcaaaaccaacagagccactgggtcccccagtgtccggcgaatgaaagggggctctgccctgggcaccaaaacagcccaggccaaggtagctcgaacactggccaaagctgctcgtgcccaagccaaggtggctcgaacacaggccaaggctgctaaggcccgggccaaggccaaggcagcactggtcaaggctaaggccaaagctaaggcagcacaggtcaaggccaaggccaaagtcatggcagcacgggccaaggccaaggctaaagccaaggcagtacgggccaaggccaaggtggctcggacccagcccaggggcagaggcaggccaaagggatctgctaaggccagaactacaaggaagggccagaaaaaccgccctgagactgttgggcagaagaggaaaagggctgaggaggcaaaagatcttcctcccaagaagagaacacggcttgggccccgatctcctaaggcatggctagggcctggaacagcaaagctgctgaagttccgtgccataaaggtagataggcggtcctcggatgatgaggtgcggcagcgggctcagcggatcctccgcgtgaacctgtcacctgtaatacggctccagccattgctgccatattcagcagtctgattccttcacacggcaatgtttggggaaactaagcccagctgtctgtgtggctagtggcacagtgtgctatgtccgtggactccacaatcttgaggactcccggtgcctctctagggccctggtgaccaccagcctcctttcagaaaccagagtgggtggggtacggtggggtgggtgggcgggaggggtgttttcatggcgcgatgcactgtgacttgttattcaagttgtatgtctactgttccatctatcacgttttatacctttccaaaaaaaaaaaaaaaaaaaaaaaaaaaaaaaaaaaaaaaa

SEQ ID NO: 117 - protein, 467 aa, Homosapiens
MSVVVQHVEEKAVHSWSRISTAGKKALEEALLVFNPMSQDLSATEAQLVAFLQGLRDDGFQPTILRSGDVYGYSSCTANPPSQTKLQARAPNPTATSPPASAPRTAMRLPAGRATLLPMPLSGRLAKASTPALAKHATTNLLLSSLKQSSASHARGAAVGFPTHLYPGVYPAMRLSVVLEALVPLKTPMPCLGAKHKAQSLQLSLADSPLKLRKSSGKGPGNPRPKAPRKTTSKGPKCLTRKGPGAGPRRGSGHQSKTNRATGSPSVRRMKGGSALGTKTAQAKVARTLAKAARAQAKVARTQAKAAKARAKAKAALVKAKAKAKAAQVKAKAKVMAARAKAKAKAKAVRAKAKVARTQPRGRGRPKGSAKARTTRKGQKNRPETVGQKRKRAEEAKDLPPKKRTRLGPRSPKAWLGPGTAKLLKFRAIKVDRRSSDDEVRQRAQRILRVNLSPVIRLQPLLPYSAV

SEQ ID NO: 118 - DNA, 1993 bp, Homosapiens
cggaggcggaacggcggaccccgtaccctggcagcatcggagcaccggcgggtgaaggcaaggtccctggactggtcatatacctcttgtggccctggcagaatcaagatgaggccctgtcatgcctccccagtgaggcctacagtctgagcagacagcatggcctgccactggcagtgaacaccatgtctgcaggaggtggccgggcctttgcttggcaagtgttcccccccatgcccacttgccgggtctatggcacagtggcacaccaagatgggcacctgctggtgttggggggttgtggccgggctggactgcccctggacactgctgagacactggacatggcctcgcacacatggctggcactggcacccctgcccactgcccgggctggtgcagctgcggtagttctgggcaagcaggtgctagtggtgggtggtgtggatgaggtccagagcccggtagctgctgtagaggccttcctgatggatgagggccgctgggagcgtcgggccaccctccctcaagcagccatgggggttgcaactgtggagagagatggtatggtgtatgctctggggggaatgggccctgacacggccccccaggcccaggtacgtgtgtatgagccccgtcgggactgctggctttcgctaccctccatgcccacaccctgctatggggcctccaccttcctgcacgggaacaagatctatgtcctggggggccgccagggcaagctcccggtgactgcttttgaagcctttgatctggaggcccgtacatggacccggcatccaagcctacccagccgtcgggcctttgctggctgcgccatggctgaaggcagcgtctttagcctgggtggcctgcagcagcctgggccccacaacttctactctcgcccacactttgtcaacactgtggagatgtttgacctggagcatgggtcctggaccaaattgccccgcagcctgcgcatgagggataagagggcagactttgtggttgggtcccttgggggccacattgtggccattgggggccttggaaaccagccatgtcctttgggctctgtggagagctttagccttgcacggcggcgctgggaggcattgcctgccatgcccactgcccgctgctcctgctctagtctgcaggctgggccccggctgtttgttattgggggtgtggcccagggccccagtcaagccgtggaggcactgtgtctgcgtgatggggtctgaaggcttggtgggagctgtccactggagcagctcattgccagaggcagctatttctatggctccttttgctgctgaggacactcactgtggctctgtgggatgagagaggcatgggggtgagcacttgaaacactgccttggggccttgggttaggggagcctttgtctttagtgcaggacacacatatgcttacacctacctttatcaccattcgttcatgaatcatgcctagctccatccttgccctgggacctactaggccttccatccaactgggaaatggggagaagcaaagctggcctcatgctcttcagggtcagttcctatctggagttgaccaggcctaccccagttgccattcctgaaaaatctcagctgccaggctgcctttagggtccctgtagacccaggagagttgagagggtgggggacacagagagaatagagaggatgtgggaactgccagagggccggagcgcaggagttcaagtggaggaatgctggctttgagccctctacactgctggttgtatgaccttggacaagtcacttcacctctctgtgcctcagcatcctcatctataaatggggatctctgaaaccttcctaccctacctacctcacagggctgttgtgaggacccagggagtttggatgtggaagtaaaagtgctgctaaaacctaaaaaaaaaaaaaaaaaaaaaaaaaaaaaaaaaaaaaaaaaaaaaaaaaaaaaaaaaaa

SEQ ID NO: 119 - protein, 354 aa, Homosapiens
MSAGGGRAFAWQVFPPMPTCRVYGTVAHQDGHLLVLGGCGRAGLPLDTAETLDMASHTWLALAPLPTARAGAAAVVLGKQVLVVGGVDEVQSPVAAVEAFLMDEGRWERRATLPQAAMGVATVERDGMVYALGGMGPDTAPQAQVRVYEPRRDCWLSLPSMPTPCYGASTFLHGNKIYVLGGRQGKLPVTAFEAFDLEARTWTRHPSLPSRRAFAGCAMAEGSVFSLGGLQQPGPHNFYSRPHFVNTVEMFDLEHGSWTKLPRSLRMRDKRADFVVGSLGGHIVAIGGLGNQPCPLGSVESFSLARRRWEALPAMPTARCSCSSLQAGPRLFVIGGVAQGPSQAVEALCLRDGV

SEQ ID NO: 120 - DNA, 2628 bp, Homosapiens
gcttttccttcatctccaaagtcctctaaactgacagggtctcattctgtcgcccaggctggagtgtagtgacgcgatctcggctcactgcaacctctacctcccaggttcaaacgatcctcccgcctcagcctccgagtagctgggaccacaggggcccggttcgatgtccccatctgcccacggcgcctctcgtgccagctgctccgcctgtcctgcccttgctcagaccacccaagtatcatctgtgctctggcccctggccaccagttccaccccacatgctgtcctcacaggtggcgccttgccattcctggggaccagggcctccttgttctggtcatacacagtggagtgtaggtcgagcgacaagtataactataagaaatgaattttaatgtctggaatatcaaagagatgctcagtattccttcaggctctgggaacaagaagtcatccaactggaataataatcaaaatgattattccagtctcagtgattcccagttcctctttggatctcagttctgtccagaaaattcagaaaccctatcagcacccttggactttggtgcccacttgagacattcaaaacagtcacaacagaactatctggagggtgaacctagcattttcacaaagtaccagacaaagccccagctgttcggaggagatataaaagatggaggtttatttcctcctcctttgtcagttggaaaatcaaaaggcctcttggaacagtttgaggagaaaaagaaaagggcaaaagacaaatgtgacagtgagactctatacaactttgtttctaatgttagagaaagcattctcaggttgcagacgtctgtggaaaagtctgaggaccatctcagttcaagaagccaatctattttggattctttggagactgtggccaagacattacaagagactatacaggcccagaatgacctggtgtttgaggcagtccaggacaaaggcaacatggagcaggccatccttgagatgaagaaaagatttgaagctagacaaggagagtttatagaaatgaagtccaacctgaagcaccttgaagttttagttgctcagcagagtcaggaattccagcagctgtgtgagcagctaggccagctgaatgtgcccagtgtcctagcagagctgaagagattgatctcagtgcctccagtgaaagacagtgcttctcagacgtcgccacctttggcccagagcctcaatctcaccaggcaggaaaaatacacctctgagaaaccagttttatggcaggcccaggccctccctgctgcatggaatcctggtatgggctccctacagcctggagaatttgatgtctggggtgaaggagcaaagaatgatgatctccaagaagaggctgcactgccagcatttgggtcccatgaaagaaataggcatgtaaaggacaaggtggtgcagactaactgcaagaactgggctgttactaaaacaggtgccaagaaccatggttccagcgtcccaggccataagattcccagtgacagggacctggtttcccaaggagcctcacagctcacatcattggagataaacttttcaaccagcattaagaatgcctgccaaaaatatcaagcccaaagtatgtttttgtgtgacccacgtgaacatttggtgattaaacagaaagatgggactgtagaaatgcgggggaaagacaagaagcagcagcccaggaaggcccacagggcccacagaggcaggctcatagccagcaagcaaaaacaaatcccaatccagacctgtaaattcaattccaaatatcagagtcctcagcctgcaatttctgtccctcaaagccccttcctggggcagcaggaaccccgtgctcagcctctgcatctgcagtgtcccaggagccccagaaaaccagtctgccctattctgggaggaacagtcatgcccaataagacagtaagggcagtgcagggaagactcttgcagctcagcaggtgctcttcccaagacaactggctactttccagcagttcccagggggaccaccagatgagctggttcagtgacctcaatctcggatgttcagagacccctctatgcaaggaggcaggaaagaatttgctctatgacctgggttttgatagcagtgatgatgatggcttctgaccagtccacagttgatttattggtctcagctagaaagagaaattgcaggacatttgggctggccaacagcagaaagtccctgaagcctgccaagtacccagggtcagaggccctgctgaggtggggcaatgagcacgagggcagggaaggtccagcattctgggtaccaggtgctgcccctgacaaggattaagtgcatccttatttattggaatgaaatgtgaaaatggtgctgatgaaaactgaggcagcagcctggttgtggggcatctggagcagggtgcctgtactttggcgaaaggcaggcaggcctccttatggaatactgtgtagcagaagggctctcataaaactgttgcggtggcagcatgactccaaacaacatttttgggtctttaaaatattccctacacatgaccaatacattttcaggcctcaggaaaaaaaaaaaaaaaa

SEQ ID NO: 121 - protein, 584 aa, Homosapiens
MLSIPSGSGNKKSSNWNNNQNDYSSLSDSQFLFGSQFCPENSETLSAPLDFGAHLRHSKQSQQNYLEGEPSIFTKYQTKPQLFGGDIKDGGLFPPPLSVGKSKGLLEQFEEKKKRAKDKCDSETLYNFVSNVRESILRLQTSVEKSEDHLSSRSQSILDSLETVAKTLQETIQAQNDLVFEAVQDKGNMEQAILEMKKRFEARQGEFIEMKSNLKHLEVLVAQQSQEFQQLCEQLGQLNVPSVLAELKRLISVPPVKDSASQTSPPLAQSLNLTRQEKYTSEKPVLWQAQALPAAWNPGMGSLQPGEFDVWGEGAKNDDLQEEAALPAFGSHERNRHVKDKVVQTNCKNWAVTKTGAKNHGSSVPGHKIPSDRDLVSQGASQLTSLEINFSTSIKNACQKYQAQSMFLCDPREHLVIKQKDGTVEMRGKDKKQQPRKAHRAHRGRLIASKQKQIPIQTCKFNSKYQSPQPAISVPQSPFLGQQEPRAQPLHLQCPRSPRKPVCPILGGTVMPNKTVRAVQGRLLQLSRCSSQDNWLLSSSSQGDHQMSWFSDLNLGCSETPLCKEAGKNLLYDLGFDSSDDDGF

SEQ ID NO: 122 - DNA, 3346 bp, Homosapiens
gagagccgagaaccgcctactccaggaggaaagcccgagggttgtgggtcctgctatagccagggccaagctccaggaaatcgtggccattcaggggtagtttgcagcctcatttgtaacattattgtgttgtcctgtgcatttccaatgcattacataaagacatggtcgcttttaggagaaatgtctgaaaaactaagaagatgcagaaaggaactgactgcagccattgaccgggcctttgaaggagttagttattcccaggagtgcacaggccagcagaggctggaactgagcgccgcgccgctctccttctcgctgcccgtgcacaggctcctctgcagaagacatcctctggcagcctgctcttctgctgctccttttgctgctgtcccatgtgctcctgagaatgagaaccctgcctttgcaacaaaccatgccccggtaaatgcaaaaccacatgctctgtgccccgagagaaaacctctaaccagcaaggaaaatgtattgatgcattcctccattttggcacctgaaagagagtcttggagaactgcaggagagggggaaaactggagaaaagaaaatttaaggaaagatatggagagagatttgaaggctgactcaaacatgccactcaacaattctagccaagaggtcacaaaggatctgcttgatatgattgaccatacaagcatccgaactattgaagaattggctggaaaaatagaatttgaaaacgaattgaaccacatgtgtggtcattgccaagattcacccttcaaagaggaagcctgggccctgctcatggacaagagccctcagaaggccacagatgctgaccctggcagcctcaaacaggcttttgatgatcataatattgttgagactgttctggacttggaagaggactacaatgtgatgacgtcttttaaataccaaattgagtaaggacagttatctaagctttgattccttacagcaggaggctgcccttgagcctgagcagaagcagctacaatggccgtcaggggccacatttctcaaaaggttggcagaacctgaattaccagaccctttttaaatcccagttgtgtccctttttaagctgtgagaccagttttttgaattccattgctttgaaatgtttcctattactgattttttttttttaactttccttgacatcttgaatgtgtttttttgattgatgttcaatatacccagtacccatggtaggtgtgggtcatgggcctctgctgtgtctcttagtgttcttttccacgggcccctaaaaaagtacaggagtggccaggcacagtggctcacgtctgtaatcccagcactttgggaggccaaggcgagtggatcacttgaggttaggagtttgagaccagcctggccaacatggcgaaaccccatctccactaaaaatacaaaaattagccaggagtggtggtgtgcacctgtagtcccagctactttggaggctgaggtaggagaattgcttgaacctggaggcggaggttgcaatgagccgagatggcaccgctcccctccatcctgagtgacagagcaagactctgtctcaaaaaaataataatttagctggtcatggtggttcgtgcctgtagttccagctacttgggtagggactgaggcgaaaggatcacttgaggccaggaggcagaggttgcagtgagctgagatcacgccactgcactccagcatgagtgacagagtgagaccctgtctcaaaaaaaaaaagaaaaaaaaagggaagaaaggaaactgaatctcagggaagtgcccacctcctgagctaataagaggaaggaatatgggggtgaggcagagctggcaaaaggctgttttttgttttgattgtttttaaagaccaagtgaagtatagtataagaagtggggaaggagtggaacaaggagttagatctgtaactgtgagtagtcaattgagataactcaatacctttggacctgattgtttttaaagactgagggtagtataagaagaggggaaggagtagaacaaggagttagatctgaaactgtgagtagtcgattgagataactcactacctttggaccagccagggctgtttataagtgctaaagcccgaacaaaccaaagagttggggagaaaggcctaactaacagctgagtgattgtctaacagactgtcttttaggccagtgactctggcatagggcaggctgcatagccagcaacatcccttaccacaggtctagtgattcctctgggctcaaatgtggaggctacacacccactccttagcagaggttggcctggcacctgctggtgccccaagaactatggcatggttagaccctggccacttgattgcatgtgcctccccagtgggcgtgccctggttcccaaccagttgtggccactgccactgccctgcctggggcaggagttgaggttaaggctaactacaggctccttccaggccacctaccactcagaccctgcaggaggtagcacaaagcattcacagcctgtggagtcagaggccaatttcttctccctgagcaagaagaatggaagcaaatgaaaagtgctcacagtatgctcaactgcccctgctcaggtgaagaatagcctgtctggatggagagatgtcaggctacttgatactcagaaaaacaggtctcaaaacagtgccttccaaataatacatgtggatgtggacactcttctatagacgaggtggagcttaattcctgtccttacccccatattcccacctcattaccaccctttgaaggtgaactagacttaatgatacttcccacgactaaagtagggaaagggaaaagtcacaaacttatagtggggaagcctggcagacacctaaccaagtgatgtcatgtatatgtcatgagaggggtgcatcacttccctggtattcctaccaaaaacccaaattcccagtgtatgatcttgagacaaatgttagacaaatccagacgtggggtacattctacaagatacctggccagaactcaagactgttgagatggccgggtgcagtggctcatgcctataatccccgacactttgggaggctgaggcgggcagatcacttgaggtcagaagttcgagaccagcctggcaaacatggtgaaaccccatctctgctaaaaatacaaaaattagccaggcatcatggcatgtgcctttagtcatagctacacaggaggctgaggcaggagaattgcttgaacccaggaggtggaggttgcagtgagccaagatcgcatcactgcactccagcctgggcaacaagcaagactccacctc

SEQ ID NO: 123 - protein, 267 aa, Homosapiens
MHYIKTWSLLGEMSEKLRRCRKELTAAIDRAFEGVSYSQECTGQQRLELSAAPLSFSLPVHRLLCRRHPLAACSSAAPFAAVPCAPENENPAFATNHAPVNAKPHALCPERKPLTSKENVLMHSSILAPERESWRTAGEGENWRKENLRKDMERDLKADSNMPLNNSSQEVTKDLLDMIDHTSIRTIEELAGKIEFENELNHMCGHCQDSPFKEEAWALLMDKSPQKATDADPGSLKQAFDDHNIVETVLDLEEDYNVMTSFKYQIE

SEQ ID NO: 124 - DNA, 3696 bp, Homosapiens
atagcacgccgcgcgcggggcggatgtccgggccggctgggccggggccgcggaggagatggcggaaggtggaggctgccgtgagcgaccggatgcggagactcagaagtccgagcttggacccttaatgaggaccacactccaacgcggggcgcagtggtatcttattgacagccggtggttcaagcagtggaagaagtatgtgggctttgacagctgggacatgtacaatgtgggtgaacataacctatttcctggcccaatagacaactctgggctattttcagatcctgagagtcagaccttgaaagaacacttaattgatgaattggactatgtattggtccctaccgaggcgtggaataaactactaaactggtacggctgtgtagaaggccagcaacccatcgtcagaaaagttgtggagcatggcctgtttgtcaagcactgcaaagtcgaggtgtatttgctggaactgaagctctgtgagaacagtgaccccaccaatgtgctgagttgccatttcagcaaggcagacaccattgcaaccatcgagaaagagatgcggaagctattcaacatccctgcggagcgtgaaacacggctctggaacaaatacatgagcaacacctacgagcagttgagcaagctagacaacactgtccaggatgctgggctataccagggtcaggtgctagtaattgagcctcaaaatgaagatggcacatggcccaggcagaccttgcagtcaaaatcaagcactgcgcctagcagaaattttactacctctccaaaatcatcagcaagtccctattcctcagtgtctgcctctctcattgcaaatggtgatagcactagcacctgtgggatgcacagttccggtgtcagcaggggtggatctggcttttctgcttcgtataattgtcaggagccaccatcctctcatatacaacctgggctctgtggacttggaaacctgggaaacacctgcttcatgaactccgctttgcagtgtttgagcaacactgcaccactgactgactactttctcaaagatgagtatgaagccgaaatcaacagagacaaccctctggggatgaaaggggaaattgcagaagcctatgctgaactcattaagcagatgtggtctggaagggacgcccatgtggcacctcgcatgttcaaaactcaagtaggacgttttgctcctcaattttctggctaccagcaacaagattctcaggagctgctggcctttcttctagatggattgcatgaagatctgaaccgggtaaagaaaaagccctacttggagctgaaggatgccaatgggcggccagatgcggtggtggcaaaggaagcctgggagaatcacaggttgaggaatgattctgtgattgtggatactttccatggcctcttcaaatctactttggtttgcccagaatgtgctaaggtttctgtgacctttgacccattttgctatctaacgctgccactgcccttgaagaaagatcgagttatggaggttttcctggttcctgctgaccctcactgcagacctactcagtaccgtgtgactgtgccgctgatgggggctgtgtccgacctgtgcgaggctctctccaggctgtctggcattgctgcagaaaatatggtggtcgcagatgtgtataatcaccgattccacaaaattttccaaatggatgaaggtttaaaccacatcatgcctcgggatgacattttcgtgtacgaggtctgcagcacttccgtggatggctcggaatgtgtcacgcttccagtctacttcagggagaggaagtccaggccatcaagcacttcctccgcatcagcgctatatgggcagccactattgctttctgtccccaagcacaagttaacccttgagtctttgtaccaggctgtttgtgatcgtatcagccgctatgtgaaacagcctttacctgatgagtttggcagctcacccttggagccaggggcctgcaatggctccaggaacagctgtgaaggagaagatgaggaagaaatggagcatcaggaagaaggcaaagagcagctttcagaaacagaaggcagtggggaagatgagccaggaaatgaccccagtgagaccacccaaaagaagatcaaaggccagccctgcccaaaaaggctttttaccttcagtcttgtgaactcctatggaacagctgacataaattcacttgcagctgatggaaaactacttaaactcaactctcgatctacactggccatggattgggacagtgaaactcggagactttactatgatgagcaagaatctgaggcctacgagaagcatgtgagcatgttgcagcctcagaagaagaagaagaccacagtggccctgagagactgcatcgagctcttcaccaccatggagacccttggggagcatgacccctggtactgtcccaactgtaagaagcatcaacaggccacaaaaaagtttgacctatggtccttgcccaagatcctggtggtccacctcaaacgtttctcctacaacagatactggagggataagctcgacacagtcgtagaattcccaatcagagggctgaacatgtccgagtttgtctgtaacctgtcagcaaggccttatgtgtacgacctcattgccgtgtccaatcattatggagccatgggggttggccactacactgcatatgcgaagaacaaactgaatggtaaatggtattactttgatgatagcaacgtgtccctggcctctgaggatcagatagtgactaaagcagcttatgtgctattttaccaacgtcgagatgatgaattttataagacaccttcacttagcagttctggttcctctgatggagggacacgaccaagcagctctcagcagggctttggggatgatgaggcttgcagcatggacaccaactaatgctgactccacgatcctgccaccctgtagcgccagtgtaatcccccaggagaacatctttgacactctgcagactgctagtgttctgtctaaaaaccagacaaggaaatacccttcttttatgagcagaaggaaacaaaaaaaaaaaagaagaccgtttacctagaagaagctatgtcaagaggctgaattatttttatttttaaacaggtggtgagaaatttctgtgaaacctgtgaagctgaaaagggggtgggatgggggtactcaatggagtatgtctgatggatcccgaagaatggagaggaacacaggcgctgagtatggagcagcctggagacccaccccacctgcagggctgccctgagcgcctggatttctggttctgatgccaatactagtcaccccaagtagtctgctcacagtaacccaaacctcaagtaaactcccctttccctcgctatgtgcactgatatgggtttataattttctgaaagttacccactgaagcccatttctccgttgagtcatcttgtaatttccagctttctccccgctaaggaagatatctagtgttggggatcctggcccctcaacctcctgtggaacccagcagttctgttatatcccctgctaccctagatgaattaagacggttaaatactgtgtggaacttttattagataacacactttttattagataacgcttaaaggaagtcagtacataaaaaaaaaaaaaaaaaa

SEQ ID NO: 125 - protein, 963 aa, Homosapiens
MAEGGGCRERPDAETQKSELGPLMRTTLQRGAQWYLIDSRWFKQWKKYVGFDSWDMYNVGEHNLFPGPIDNSGLFSDPESQTLKEHLIDELDYVLVPTEAWNKLLNWYGCVEGQQPIVRKVVEHGLFVKHCKVEVYLLELKLCENSDPTNVLSCHFSKADTIATIEKEMRKLFNIPAERETRLWNKYMSNTYEQLSKLDNTVQDAGLYQGQVLVIEPQNEDGTWPRQTLQSKSSTAPSRNFTTSPKSSASPYSSVSASLIANGDSTSTCGMHSSGVSRGGSGFSASYNCQEPPSSHIQPGLCGLGNLGNTCFMNSALQCLSNTAPLTDYFLKDEYEAEINRDNPLGMKGEIAEAYAELIKQMWSGRDAHVAPRMFKTQVGRFAPQFSGYQQQDSQELLAFLLDGLHEDLNRVKKKPYLELKDANGRPDAVVAKEAWENHRLRNDSVIVDTFHGLFKSTLVCPECAKVSVTFDPFCYLTLPLPLKKDRVMEVFLVPADPHCRPTQYRVTVPLMGAVSDLCEALSRLSGIAAENMVVADVYNHRFHKIFQMDEGLNHIMPRDDIFVYEVCSTSVDGSECVTLPVYFRERKSRPSSTSSASALYGQPLLLSVPKHKLTLESLYQAVCDRISRYVKQPLPDEFGSSPLEPGACNGSRNSCEGEDEEEMEHQEEGKEQLSETEGSGEDEPGNDPSETTQKKIKGQPCPKRLFTFSLVNSYGTADINSLAADGKLLKLNSRSTLAMDWDSETRRLYYDEQESEAYEKHVSMLQPQKKKKTTVALRDCIELFTTMETLGEHDPWYCPNCKKHQQATKKFDLWSLPKILVVHLKRFSYNRYWRDKLDTVVEFPIRGLNMSEFVCNLSARPYVYDLIAVSNHYGAMGVGHYTAYAKNKLNGKWYYFDDSNVSLASEDQIVTKAAYVLFYQRRDDEFYKTPSLSSSGSSDGGTRPSSSQQGFGDDEACSMDTN

SEQ ID NO: 126 - DNA, 3555 bp, Homosapiens
atagcacgccgcgcgcggggcggatgtccgggccggctgggccggggccgcggaggagatggcggaaggtggaggctgccgtgagcgaccggatgcggagactcagaagtccgagcttggacccttaatgaggaccacactccaacgcggggcgcagtggtatcttattgacagccggtggttcaagcagtggaagaagtatgtgggctttgacagctgggacatgtacaatgtgggtgaacataacctatttcctggcccaatagacaactctgggctattttcagatcctgagagtcagaccttgaaagaacacttaattgatgaattggactatgtattggtccctaccgaggcgtggaataaactactaaactggtacggctgtgtagaaggccagcaacccatcgtcagaaaagttgtggagcatggcctgtttgtcaagcactgcaaagtcgaggtgtatttgctggaactgaagctctgtgagaacagtgaccccaccaatgtgctgagttgccatttcagcaaggcagacaccattgcaaccatcgagaaagagatgcggaagctattcaacatccctgcggagcgtgaaacacggctctggaacaaatacatgagcaacacctacgagcagttgagcaagctagacaacactgtccaggatgctgggctataccagggtcaggtgctagtaattgagcctcaaaatgaagatggcacatggcccaggcagaccttgcagtcaaatggatctggcttttctgcttcgtataattgtcaggagccaccatcctctcatatacaacctgggctctgtggacttggaaacctgggaaacacctgcttcatgaactccgctttgcagtgtttgagcaacactgcaccactgactgactactttctcaaagatgagtatgaagccgaaatcaacagagacaaccctctggggatgaaaggggaaattgcagaagcctatgctgaactcattaagcagatgtggtctggaagggacgcccatgtggcacctcgcatgttcaaaactcaagtaggacgttttgctcctcaattttctggctaccagcaacaagattctcaggagctgctggcctttcttctagatggattgcatgaagatctgaaccgggtaaagaaaaagccctacttggagctgaaggatgccaatgggcggccagatgcggtggtggcaaaggaagcctgggagaatcacaggttgaggaatgattctgtgattgtggatactttccatggcctcttcaaatctactttggtttgcccagaatgtgctaaggtttctgtgacctttgacccattttgctatctaacgctgccactgcccttgaagaaagatcgagttatggaggttttcctggttcctgctgaccctcactgcagacctactcagtaccgtgtgactgtgccgctgatgggggctgtgtccgacctgtgcgaggctctctccaggctgtctggcattgctgcagaaaatatggtggtcgcagatgtgtataatcaccgattccacaaaattttccaaatggatgaaggtttaaaccacatcatgcctcgggatgacattttcgtgtacgaggtctgcagcacttccgtggatggctcggaatgtgtcacgcttccagtctacttcagggagaggaagtccaggccatcaagcacttcctccgcatcagcgctatatgggcagccactattgctttctgtccccaagcacaagttaacccttgagtctttgtaccaggctgtttgtgatcgtatcagccgctatgtgaaacagcctttacctgatgagtttggcagctcacccttggagccaggggcctgcaatggctccaggaacagctgtgaaggagaagatgaggaagaaatggagcatcaggaagaaggcaaagagcagctttcagaaacagaaggcagtggggaagatgagccaggaaatgaccccagtgagaccacccaaaagaagatcaaaggccagccctgcccaaaaaggctttttaccttcagtcttgtgaactcctatggaacagctgacataaattcacttgcagctgatggaaaactacttaaactcaactctcgatctacactggccatggattgggacagtgaaactcggagactttactatgatgagcaagaatctgaggcctacgagaagcatgtgagcatgttgcagcctcagaagaagaagaagaccacagtggccctgagagactgcatcgagctcttcaccaccatggagacccttggggagcatgacccctggtactgtcccaactgtaagaagcatcaacaggccacaaaaaagtttgacctatggtccttgcccaagatcctggtggtccacctcaaacgtttctcctacaacagatactggagggataagctcgacacagtcgtagaattcccaatcagagggctgaacatgtccgagtttgtctgtaacctgtcagcaaggccttatgtgtacgacctcattgccgtgtccaatcattatggagccatgggggttggccactacactgcatatgcgaagaacaaactgaatggtaaatggtattactttgatgatagcaacgtgtccctggcctctgaggatcagatagtgactaaagcagcttatgtgctattttaccaacgtcgagatgatgaattttataagacaccttcacttagcagttctggttcctctgatggagggacacgaccaagcagctctcagcagggctttggggatgatgaggcttgcagcatggacaccaactaatgctgactccacgatcctgccaccctgtagcgccagtgtaatcccccaggagaacatctttgacactctgcagactgctagtgttctgtctaaaaaccagacaaggaaatacccttcttttatgagcagaaggaaacaaaaaaaaaaaagaagaccgtttacctagaagaagctatgtcaagaggctgaattatttttatttttaaacaggtggtgagaaatttctgtgaaacctgtgaagctgaaaagggggtgggatgggggtactcaatggagtatgtctgatggatcccgaagaatggagaggaacacaggcgctgagtatggagcagcctggagacccaccccacctgcagggctgccctgagcgcctggatttctggttctgatgccaatactagtcaccccaagtagtctgctcacagtaacccaaacctcaagtaaactcccctttccctcgctatgtgcactgatatgggtttataattttctgaaagttacccactgaagcccatttctccgttgagtcatcttgtaatttccagctttctccccgctaaggaagatatctagtgttggggatcctggcccctcaacctcctgtggaacccagcagttctgttatatcccctgctaccctagatgaattaagacggttaaatactgtgtggaacttttattagataacacactttttattagataacgcttaaaggaagtcagtacataaaaaaaaaaaaaaaaaa

SEQ ID NO: 127 - protein, 916 aa, Homosapiens
MAEGGGCRERPDAETQKSELGPLMRTTLQRGAQWYLIDSRWFKQWKKYVGFDSWDMYNVGEHNLFPGPIDNSGLFSDPESQTLKEHLIDELDYVLVPTEAWNKLLNWYGCVEGQQPIVRKVVEHGLFVKHCKVEVYLLELKLCENSDPTNVLSCHFSKADTIATIEKEMRKLFNIPAERETRLWNKYMSNTYEQLSKLDNTVQDAGLYQGQVLVIEPQNEDGTWPRQTLQSNGSGFSASYNCQEPPSSHIQPGLCGLGNLGNTCFMNSALQCLSNTAPLTDYFLKDEYEAEINRDNPLGMKGEIAEAYAELIKQMWSGRDAHVAPRMFKTQVGRFAPQFSGYQQQDSQELLAFLLDGLHEDLNRVKKKPYLELKDANGRPDAVVAKEAWENHRLRNDSVIVDTFHGLFKSTLVCPECAKVSVTFDPFCYLTLPLPLKKDRVMEVFLVPADPHCRPTQYRVTVPLMGAVSDLCEALSRLSGIAAENMVVADVYNHRFHKIFQMDEGLNHIMPRDDIFVYEVCSTSVDGSECVTLPVYFRERKSRPSSTSSASALYGQPLLLSVPKHKLTLESLYQAVCDRISRYVKQPLPDEFGSSPLEPGACNGSRNSCEGEDEEEMEHQEEGKEQLSETEGSGEDEPGNDPSETTQKKIKGQPCPKRLFTFSLVNSYGTADINSLAADGKLLKLNSRSTLAMDWDSETRRLYYDEQESEAYEKHVSMLQPQKKKKTTVALRDCIELFTTMETLGEHDPWYCPNCKKHQQATKKFDLWSLPKILVVHLKRFSYNRYWRDKLDTVVEFPIRGLNMSEFVCNLSARPYVYDLIAVSNHYGAMGVGHYTAYAKNKLNGKWYYFDDSNVSLASEDQIVTKAAYVLFYQRRDDEFYKTPSLSSSGSSDGGTRPSSSQQGFGDDEACSMDTN

SEQ ID NO: 128 - DNA, 921 bp, Homosapiens
cagttaaaaggaggcgcctgctggcctccccttacagtgcttgttcggggcgctccgctggcttcttggacaattgcgccatgtgtgctgctcggctagcggcggcggcggcggcggcccagtcggtgtatgccttctcggcgcgcccgctggccggcggggagcctgtgagcctgggctccctgcggggcaaggtactacttatcgagaatgtggcgtccctctgaggcaccacggtccgggactacacccagatgaacgagctgcagcggcgcctcggaccccggggcctggtggtgctcggcttcccgtgcaaccagtttgggcatcaggagaacgccaagaacgaagagattctgaattccctcaagtacgtccggcctggtggtgggttcgagcccaacttcatgctcttcgagaagtgcgaggtgaacggtgcgggggcgcaccctctcttcgccttcctgcgggaggccctgccagctcccagcgacgacgccaccgcgcttatgaccgaccccaagctcatcacctggtctccggtgtgtcgcaacgatgttgcctggaactttgagaagttcctggtgggccctgacggtgtgcccctacgcaggtacagccgccgcttccagaccattgacatcgagcctgacatcgaagccctgctgtctcaagggcccagctgtgcctagggcgcccctcctaccccggctgcttggcagttgcagtgctgctgtctcgggggggttttcatctatgagggtgtttcctctaaacctacgagggaggaacacctgatcttacagaaaataccacctcgagatgggtgctggtcctgttgatcccagtctctgccagaccaaggcgagtttccccactaataaagtgccgggtgtcagcagaaaaaaaaaaaaaaaaaaa

SEQ ID NO: 129 - protein, 202 aa, Homosapiens
MCAARLAAAAAAAQSVYAFSARPLAGGEPVSLGSLRGKVLLIENVASLGTTVRDYTQMNELQRRLGPRGLVVLGFPCNQFGHQENAKNEEILNSLKYVRPGGGFEPNFMLFEKCEVNGAGAHPLFAFLREALPAPSDDATALMTDPKLITWSPVCRNDVAWNFEKFLVGPDGVPLRRYSRRFQTIDIEPDIEALLSQGPSCA

SEQ ID NO: 130 - DNA, 1200 bp, Homosapiens
cagttaaaaggaggcgcctgctggcctccccttacagtgcttgttcggggcgctccgctggcttcttggacaattgcgccatgtgtgctgctcggctagcggcggcggcggcggcggcccagtcggtgtatgccttctcggcgcgcccgctggccggcggggagcctgtgagcctgggctccctgcggggcaaggtactacttatcgagaatgtggcgtccctctgaggcaccacggtccgggactacacccagatgaacgagctgcagcggcgcctcggaccccggggcctggtggtgctcggcttcccgtgcaaccagtttgggcatcaggtgcgccgggcggagcggggcggggcgggggcggacgtgcagtagtggctgggggcgccggcggtgtgctggtgggtgccgtcggctccatgcgcggagagtctggctactctctcgtttcctttctgttgctcgtagctgctgaaattcctctccgcccttgggattgcgcatggagggcaaaatcccggtgactcatagaaaatctcccttgtttgtggttagaacgtttctctcctcctcttgaccccgggttctagctgcccttctctcctgtaggagaacgccaagaacgaagagattctgaattccctcaagtacgtccggcctggtggtgggttcgagcccaacttcatgctcttcgagaagtgcgaggtgaacggtgcgggggcgcaccctctcttcgccttcctgcgggaggccctgccagctcccagcgacgacgccaccgcgcttatgaccgaccccaagctcatcacctggtctccggtgtgtcgcaacgatgttgcctggaactttgagaagttcctggtgggccctgacggtgtgcccctacgcaggtacagccgccgcttccagaccattgacatcgagcctgacatcgaagccctgctgtctcaagggcccagctgtgcctagggcgcccctcctaccccggctgcttggcagttgcagtgctgctgtctcgggggggttttcatctatgagggtgtttcctctaaacctacgagggaggaacacctgatcttacagaaaataccacctcgagatgggtgctggtcctgttgatcccagtctctgccagaccaaggcgagtttccccactaataaagtgccgggtgtcagcagaaaaaaaaaaaaaaaaaaa

SEQ ID NO: 131 - protein, 97 aa, Homosapiens
MCAARLAAAAAAAQSVYAFSARPLAGGEPVSLGSLRGKVLLIENVASLGTTVRDYTQMNELQRRLGPRGLVVLGFPCNQFGHQVRRAERGGAGADVQ

SEQ ID NO: 132 - DNA, 1926 bp, Homosapiens
gtggatgagctgtgagtgcgcgcgcgtgcgcggggccgcgacctgtgccggctcgagcccgctgggcactcggaggcgcgcacgtcgttccccgccctcccgccgccgcccgccctcgctctctcgcgctaccctcccgccgcccgcggtcctccgtcggttctctcgttagtccacggtctggtcttcagctacccgccttcgtctccgagtttgcgactcgcggaccggcgtccccggcgcgaagaggctggactcggattcgttgcctgagcaatggctgccatccggaagaaactggtgattgttggtgatggagcctgtggaaagacatgcttgctcatagtcttcagcaaggaccagttcccagaggtgtatgtgcccacagtgtttgagaactatgtggcagatatcgaggtggatggaaagcaggtagagttggctttgtgggacacagctgggcaggaagattatgatcgcctgaggcccctctcctacccagataccgatgttatactgatgtgtttttccatcgacagccctgatagtttagaaaacatcccagaaaagtggaccccagaagtcaagcatttctgtcccaacgtgcccatcatcctggttgggaataagaaggatcttcggaatgatgagcacacaaggcgggagctagccaagatgaagcaggagccggtgaaacctgaagaaggcagagatatggcaaacaggattggcgcttttgggtacatggagtgttcagcaaagaccaaagatggagtgagagaggtttttgaaatggctacgagagctgctctgcaagctagacgtgggaagaaaaaatctgggtgccttgtcttgtgaaaccttgctgcaagcacagcccttatgcggttaattttgaagtgctgtttattaatcttagtgtatgattactggcctttttcatttatctataatttacctaagattacaaatcagaagtcatcttgctaccagtatttagaagccaactatgattattaacgatgtccaacccgtctggcccaccagggtccttttgacactgctctaacagccctcctctgcactcccacctgacacaccaggcgctaattcaaggaatttcttaacttcttgcttctttctagaaagagaaacagttggtaacttttgtgaattaggctgtaactactttataactaacatgtcctgcctattatctgtcagctgcaaggtactctggtgagtcaccacttcagggctttactccgtaacagattttgttggcatagctctggggtgggcagttttttgaaaatgggctcaaccagaaaagcccaagttcatgcagctgtggcagagttacagttctgtggtttcatgttagttaccttatagttactgtgtaattagtgccacttaatgtatgttaccaaaaataaatatatctaccccagactagatgtagtattttttgtataattggatttcctaatactgtcatcctcaaagaaagtgtattggttttttaaaaaagaaagtgtatttggaaataaagtcagatggaaaattcattttttaaattcccgttttgtcactttttctgataaaagatggccatattaccccttttcggccccatgtatctcagtaccccatggagctgggctaagtaaataggaattggtttcacgcctgaggcaattagacactttggaagatggcataacctgtctcacctggacttaagcatctggctctaattcacagtgctcttttctcctcactgtatccaggttccctcccagaggagccaccagttctcatgggtggcactcagtctctcttctctccagctgactaaactttttttctgtaccagttaatttttccaactactaatagaataaaggcagttttctaaaaaaa

SEQ ID NO: 133 - protein, 193 aa, Homosapiens
MAAIRKKLVIVGDGACGKTCLLIVFSKDQFPEVYVPTVFENYVADIEVDGKQVELALWDTAGQEDYDRLRPLSYPDTDVILMCFSIDSPDSLENIPEKWTPEVKHFCPNVPIILVGNKKDLRNDEHTRRELAKMKQEPVKPEEGRDMANRIGAFGYMECSAKTKDGVREVFEMATRAALQARRGKKKSGCLVL

SEQ ID NO: 134 - DNA, 2146 bp, Homosapiens
tactcccggagtcactcatcccttaagcaagcagggtggggttaggtgcgcgtgcgcggttttaatactcctccccgaactgccaactcttcacgcacgcgaagtaggccccaccctggctgggtttacgcgtgcgcactaacgggcctggtcccggaagaccacacgcgtgcgtggtggggactacggtgacagtaccccgggtggggcgagggccagtcatggcggagtcctggtctgggcaggccttgcaggctctgccggccacggtgctgggcgcgctgggcagcgagttcttgcgggagtgggaggcgcaggacatgcgcgtgaccctcttcaagctgctgctgctgtggttggtgttaagtctcctgggcatccagctggcgtgggggttctacgggaatacagtgaccgggttgtatcaccgtccaggtctgggtggtcagaatggatccacgcctgatggctccacgcatttcccttcgtgggaaatggcagcaaacgaacctctcaaaacccacagagaataagggaaggcagcagagggtctccaagggcatcactgggtctgctggcttctacactgggttctgctactccccagacctcagggacaactgccgggggttcagggttggtagcagggagtacccagtgcctacagggctgggcctcttctgcctcttaagcctgctccctcacccaggcactgggcaagtgaagagtttgcctgtactcttatctgggtgccttaaggagagagattgtgttcttcctctctcaggggtgataactcaggaagcctctgggttgggaagaccatcagttcttttgtcttaggtttcttttcctgtccctcttccatccccaagatgtgaccccataaaaatttttcctgagttggccaggcatggtggctcacgcctgtaatcccaacactttgggaggctgaggcaggcagatcacgaggtcaggagttcgagaccagcctgaccaacatggtgaaaaccccatctctactaaaaatacaaaaattagccgggtgtggtggcacacaccagtaatcccagctactcgggaggctgaagcaggagatttgcttgaacctgggaggcagaggttgcagtgagccaagattgcgccgttgtactccagcctgggcaacagagcaagacccatctcaaaaaaaaaatttttttcctgagaggaagcctgaggttgaccagctctggggtttgtaaggcaggtctgttttctcctaggccctgagttttctgaatctctggttttgctttgttggcaaggagccagggaatcctgacctgagccagaccttaagctctatggttatttagctggccattcaggtataaggcagggtggtgtacctgctggcactatccagatggaggcaccaaacacccacatacctggcccaaccagacttctcccgtgagccaggcaaaggaaattgtcatctgccaactgtcctactcatattcctctcagtccttcttgggggtaagctgattacctgaaggacagctgaacccctggggtagcctcctatccaccactgcttaagtgcctatgggaatgtgggtctgcaccttgtcccctcataggatggtaccaagcatttagtgcacagtggccccatcatagcctgcagcctcatcatttcccatctggacctggtacaaatgcacgtcacaggctcagctcctccccactagcatcttctctaccttcaagaaccaggcagccctgccatgtcacaataggccaggggagtttccaaagatgtgggtggcaaatgcccctatagaaacaccagtacctgaaagcactgtagccctggacctgcctccttccctcggggccatacttctgtttccatctgctgggccaccagccactttagtgacccctgcctacttccttcctgttggatatcatacttccatctggctgcctttgcttaagccatctttgtggtagaggggccctggaattgcagctgtactgaggatgatgttattcacagcccctggcccacccactaatactactgcacagagtcaggatctcacatttcaccccaggctcaactgaggatgtggcttattaaacacggaagtgc

SEQ ID NO: 135 - protein, 103 aa, Homosapiens
MAESWSGQALQALPATVLGALGSEFLREWEAQDMRVTLFKLLLLWLVLSLLGIQLAWGFYGNTVTGLYHRPGLGGQNGSTPDGSTHFPSWEMAANEPLKTHRE

SEQ ID NO: 136 - DNA, 2117 bp, Homosapiens
tgcccacgcccccttcagatcctttgctccggagagagacctgtccgagcagaggcctggactacatctcccggcgtgcctggcagtgtggtggcctctgtgcgccgtctgcactcgttgcaggcgacgatgcagagggctgtaagtgtggtggcccgtctgggctttcgcctgcaggcattccccccggccttgtgtcgtccacttagttgcgcacaggaggtgctccgcaggacaccgctctatgacttccacctggcccacggcgggaaaatggtggcgtttgcgggttggagtctgccagtgcagtaccgggacagtcacactgactcgcacctgcacacacgccagcactgctcgctctttgacgtgtctcatatgctgcagaccaagatacttggtagtgaccgggtgaagctgatggagagtctagtggttggagacattgcagagctaagaccaaaccaggggacactgtcgctgtttaccaacgaggctggaggcatcttagatgacttgattgtaaccaatacttctgagggccacctgtatgtggtgtccaacgctggctgctgggagaaagatttggccctcatgcaggacaaggtcagggagcttcagaaccagggcagagatgtgggcctggaggtgttggataatgccctgctagctctgcaaggccccactgcagcccaggtactacaggccggcgtggcagatgacctgaggaaactgcccttcatgaccagtgctgtgatggaggtgtttggcgtgtctggctgccgcgtgacccgctgtggctacacaggagaggatggtgtggagatctcggtgccggtagcgggggcagttcacctggcaacagctattctgaaaaacccagaggtgaagctggcagggctggcagccagggacagcctgcgcctggaggcaggcctctgcctgtatgggaatgacattgatgaacacactacacctgtggagggcagcctcagttggacactggggaagcgccgccgagctgctatggacttccctggagccaaggtcattgttccccagctgaagggcagggtgcagcggaggcgtgtggggttgatgtgtgagggggcccccatgcgggcacacagtcccatcctgaacatggagggtaccaagattggtactgtgactagtggctgcccctccccctctctgaagaagaatgtggcgatgggttatgtgccctgcgagtacagtcgtccagggacaatgctgctggtagaggtgcggcggaagcagcagatggctgtagtcagcaagatgccctttgtgcccacaaactactataccctcaagtgaagctggctcagggtggggctgtcccttccaggagttttgcccctacaaggggttagtcaagaagctgaggcagaactcactgggggtgggcagttaaggtggaggctgattctaattgtctggttgaggggccacaccacctattccccccacctaactcatgccattccagcttccttcaggaccctgcttctgagtgacggaccagctcacacaatgtcttgtttcagtccatgatcccactgacctactcttgcctgctggagggtaatgagaagctttggttctgccatctctcccactctgccaggtgctggctgtggagcaaaggctcacctttgtggagaggataaaacctgcccaacctacctcaccatggtttttcacattgcaaagggtaataacatgggcagtgcggacttaggctaccccctccagtttgctttccgtaaatgcaaattgtccttactgcaagtcaggaatgattgctgactcacagtagggctgctatgcctgtgtgtaaacttggggatggctgagggaacatagactcactcttccacattcccaagttggtctagtgtgctgcccagtagcaaaccatggcagactcaccacctattctgagttccagggctgctgtagggcagggtgggcttcctcccagacttgccttaccctgggctgatctttgcccctggtatgcattaatggactccactgaatcctgaaaaaaaaattaaacttccttcttacttgccaaaaaaaaaaaaaaa

SEQ ID NO: 137 - protein, 403 aa, Homosapiens
MQRAVSVVARLGFRLQAFPPALCRPLSCAQEVLRRTPLYDFHLAHGGKMVAFAGWSLPVQYRDSHTDSHLHTRQHCSLFDVSHMLQTKILGSDRVKLMESLVVGDIAELRPNQGTLSLFTNEAGGILDDLIVTNTSEGHLYVVSNAGCWEKDLALMQDKVRELQNQGRDVGLEVLDNALLALQGPTAAQVLQAGVADDLRKLPFMTSAVMEVFGVSGCRVTRCGYTGEDGVEISVPVAGAVHLATAILKNPEVKLAGLAARDSLRLEAGLCLYGNDIDEHTTPVEGSLSWTLGKRRRAAMDFPGAKVIVPQLKGRVQRRRVGLMCEGAPMRAHSPILNMEGTKIGTVTSGCPSPSLKKNVAMGYVPCEYSRPGTMLLVEVRRKQQMAVVSKMPFVPTNYYTLK

SEQ ID NO: 138 - DNA, 2019 bp, Homosapiens
ggtcgggggcctagagcggcggttgcacttagttgcggctgctgtcaccatgtcccgcgttttggtgccttgccatgtgaaaggctccgtagccctccaggtgggcgacgtgcggacctcccaaggccggcctggcgtgctggtcatcgatgtcaccttccccagcgtcgctcccttcgagttgcaggaaatcacgtttaagaattactacacagcttttttgagcatccgtgtccgtcagtacacctcagcacacacacctgccaagtgggtgacctgcctgcgggactactgcctaatgcctgacccacacagtgaggagggagcccaggagtatgtatcgctgttcaagcatcagatgctgtgtgacatggctagaatatcggagctacgcctgattctgcggcagccatcaccactgtggctgtctttcacagtggaggagctgcagatctatcagcagggaccaaagagcccctccgtgacctttcccaagtggctctcccacccagtgccctgtgagcaacctgcactcctccgtgagggtctcccagaccccagcagggtatcctccgaggtgcagcagatgtgggcactgacagagatgatccgggccagtcacacctccgcaaggatcggccgctttgatgtggatggctgttatgacctgaacttgctctcctacacttgaatggttgctcctagccaagatgttggcctttctgtgcccacccagacttggtttgggccaccagaggctgaagtgtatttcctgtgcattccaagtgttgcctgcatgcctgttctgtctgggccacattcacagattcaggattctcaggggcttaccgtgttacttcagcatgagctcctggcatgggggtgctctgtcttcgcctggctgcaactcaattcttccttctacccaaaaacactccagtcagttgtacttactgagaatccctgagtgccctctgccccttctggcaacatgcacattcctgtcttctgcctgctccctcatgtcagtgcagttgggctgggctgacctactaaaacctgctccatgtatggacctggaaggccattgctgccatggcacttgggacacttgaggaagaaacagaaaccttatttcttcctgtgtgtcccctagtggttttctttccatttgtgttatgccacagagagaaatttcctgtctgaactcttctgctgcctgcctaggaaggaaacctgaagatttgggcagcctgagtctcttggtttctgagctggctcctgaatatatgttcaagtgggtgtgcccatagggcctgggcacgtgtctctagcaaaaccagggcctgagcataagaactgggattgcaggcgtgagccaccgcgcccggcctgcccctttccaagagatatgctcagcataatgagagatcaaccgtggtggggagtgggtccaagtaagggttctcattgttgccttttaagaggcctaagtcctgcattaactcagtccaaccattaagtgatgcaggctgctcttccctcatgtgagaaaaacctgtttccctctggttcttcctggctttgcacctggtggctattacaaagcagtactgcagtatgtcttggacctggaaagttggacatgtgtgtggctcaacagttttctcgggggagttcagtgaccttttggtggccaccctctgttctcacctgtgagttcttgcaggtggcgacttcatctgcaaggtcacttacatagccccactcagctgcttcggaaagcgtgacgaagcagtagtcctcagtgtgtgtgtaagtgaagaggaccttgtggtagcagggaccatgcttcattcgtggctgtgtccccatctgagggcctggtatgcaataagatcaataaatacttgtggaatgcaaaaaaaaaaaaaaaaaaaaaaaaaaaaaaaaaaaaaaaaaaaaaaaaaaaaaaaaaaaaaaaaaaaaaaaaaaaaaaaaaaaaaaaaaaaaaaaaaa

SEQ ID NO: 139 - protein, 213 aa, Homosapiens
MSRVLVPCHVKGSVALQVGDVRTSQGRPGVLVIDVTFPSVAPFELQEITFKNYYTAFLSIRVRQYTSAHTPAKWVTCLRDYCLMPDPHSEEGAQEYVSLFKHQMLCDMARISELRLILRQPSPLWLSFTVEELQIYQQGPKSPSVTFPKWLSHPVPCEQPALLREGLPDPSRVSSEVQQMWALTEMIRASHTSARIGRFDVDGCYDLNLLSYT

SEQ ID NO: 140 - DNA, 5493 bp, Homosapiens
gggccagtcggcgccgcgcggagctggccgctggattggctgcaacactcgcgtgtcaggcggttgctaggctccggccgcgcgccccgcccttgcgctcagcgccctctcaccgcccggtacgtgctcgcgcgaaggctgcggcgcggcgctcgcgcctcttaggcttggcggtggcggcggcggcagcttcgcgccgaatccccggggagcggcggtggcggcgtcctggggccaggaggagcgaacacctgccgcggtcctcccgccggcgctgggctctgtgtgctccgggatggagcaggtgtgcagagggtgagaacccagctctgggaccaagtcacttgcttccttacttagcaagactatcgacttgagcaaacttggacctgggatgaggatgtctgtgggcctctcgctgctgctgcccctctgggggaggacctttctcctcctgctctctgtggttatggctcagtcccactggcccagtgaaccctcagaggctgtcagggactgggaaaaccagcttgaggcatccatgcactcagtgctctcagacctccacgaggctgttcccacagtggttggcattcctgatggcacggctgtcgtcgggcgctcatttcgagtgaccattccaacagatttgattgcctccagtggagatatcatcaaggtatcagcggcagggaaggaggctttgccatcttggctgcactgggactcacagagccacaccctggagggcctcccccttgacactgataagggtgtgcattacatttcagtgagcgctacacggctgggggccaacgggagccacatcccccagacctccagtgtgttctccatcgaggtctaccctgaagaccacagtgatctgcagtcggtgaggacagcctccccagaccctggtgaggtggtatcatctgcctgtgctgcggatgaacctgtgactgttttgacggtgattttggatgccgacctcaccaagatgaccccaaagcaaaggattgacctcctgcacaggatgcggagcttctcagaagtagagcttcacaacatgaaattagtgccggtggtgaataacagactatttgacatgtcggccttcatggctggcccgggaaatccaaaaaaggtggtggagaatggggcccttctctcctggaagctgggctgctccctgaaccagaacagtgtgcctgacattcatggtgtagaggcccctgccagggagggcgcaatgtctgctcagcttggctaccctgtggtgggttggcacatcgccaataagaagccccctcttcccaaacgcgtccggaggcagatccatgctacacccacacctgtcactgccattgggcccccaaccacggctatccaggagcccccatccaggatcgtgccaacccccacatctccagccattgctcctccaacagagaccatggctcctccagtcagggatcctgttcctgggaaacccacggtcaccatccggactcgaggcgccattattcaaaccccaaccctaggccccatccagcctactcgggtgtcagaagctggcaccacagttcctggccagattcgcccaacgatgaccattcctggctatgtggagcctactgcagttgctacccctcccacaaccaccaccaagaagccacgagtatccacaccaaaaccagcaacgccttcaactgactccaccaccaccacgactcgcaggccaaccaagaaaccacggacaccccggccagtgccccgggtcaccaccaaagtttccatcaccagattggaaactgcctcaccgcctactcgtattcgcaccaccaccagtggagtgccccgtggcggagaacccaaccagcgcccagagctcaagaaccatattgacagggtagatgcctgggttggcacctactttgaggtgaagatcccgtcagacactttctatgaccatgaggacaccaccactgacaagctgaagctgaccctgaaactgcgggagcagcagctggtgggcgagaagtcctgggtacagttcaacagcaacagccagctcatgtatggccttcccgacagcagccacgtgggcaaacacgagtatttcatgcatgccacagacaaggggggcctgtcggctgtggatgccttcgagatccacgtccacaggcgcccccaaggggatagggctcctgcaaggttcaaggccaagtttgtgggtgacccggcactggtgttgaatgacatccacaagaagattgccttggtaaagaaactggccttcgcctttggagaccgaaactgtagcaccatcaccctgcagaatatcacccggggctccatcgtggtggaatggaccaacaacacactgcccttggagccctgccccaaggagcagatcgctgggctgagccgccggatcgctgaggatgatggaaaacctcggcctgccttctccaacgccctagagcctgactttaaggccacaagcatcactgtgacgggctctggcagttgtcggcacctacagtttatccctgtggtaccacccaggagagtgccctcagaggcgccgcccacagaagtgcctgacagggaccctgagaagagcagtgaggatgatgtctacctgcacacagtcattccggccgtggtggtcgcagccatcctgctcattgctggcatcattgccatgatctgctaccgcaagaagcggaagggcaagcttacccttgaggaccaggccaccttcatcaagaagggggtgcctatcatctttgcagacgaactggacgactccaagcccccaccctcctccagcatgccactcattctgcaggaggagaaggctcccctaccccctcctgagtaccccaaccagagtgtgcccgagaccactcctctgaaccaggacaccatgggagagtacacgcccctgcgggatgaggatcccaatgcgcctccctaccagcccccaccgcccttcacagtacccatggagggcaagggctcccgtcccaagaacatgaccccataccggtcacctcctccctatgtcccaccttaacccgcaagcgcctgggtggaggcagggtagggcagggccctggagacgacatggtgttgtctgtggagaccggtggcctgcagaccattgcccaccgggagccgacacctgacctagcacacactgacacaggggcctggacaagcccgccctctctggtcctcccaaaccccaaagcagctggagagactttggggacttttttatttttattttttgcctaacagcttttggtttgttcatagagaactcttcgcttcatttttgatggctggctctgaaagcaccatgtggagtggaggtggagggaccgaggaaccatgaatgaactcgcaggcagtgccgggcggccccctggctctctgcgttttgcctttaacactaactgtactgttttttctattcacgtgtgtctagctgcaggatgtaacatggaaaacagtaactaaagattaaattcaaaggactttcagaagttaaggttaagtttttacgtttaatctgctgtttacctaaacttgtatgtataatttttgggtgggtatggggaattgctttgctaaaaataagctcccagggtgtttcaaacttagagaagaccaagggacagtattttttatcaaaggaatactattttttcacactacgtcaacttggttgctctgataccccagagcctgattgggggcctcccggccctggctcacgccaagtccctggtgctgggtttgctctcccgctgttgccaggggctggaagctggaggggtctcttgggccatggacatccccacttccagcccatgtacactagtggcccacgaccaaggggtcttcatttccatgaaaaagggactccaagaggcagtggtggctgtggcccccaactttggtgctccagggtgggccaactgcttgtgggggcacctgggaggtcaaaggtctccaccacatcaacctattttgttttaccctttttctgtgcattgtttttttttttcctcctaaaaggaatatcacggttttttgaaacactcagtgggggacattttggtgaagatgcaatatttttatgtcatgtgatgctctttcctcacttgaccttggccgctttgtcctaacagtccacagtcctgccccgacccaccccatcccttttctctggcactccagtccagcttgggcctgaactactggaaaaggtctggcggctggggaggagtgccagcaatagttcataataaaaatctgttagctctcaaagctaattttttactaaagtttttatacagcctcaaattgttttattaaaaaaaagatttaaaatggtgatgcttacagcagtttgtacgagctcttaagtgttgattccatggaactgacggctttgcttgttttgattcttttccccctacttttcctaatggtttaaattctggaattacactggggttcttttgccttttttagcagaacatccgtccgtccatctgcatctctgtcccatgactcaggggcgcccactctgcttcgattctcctcctgtggaagaaaccattttgagcatgacttttcttgatgtctgaagcgttattttgggtactttttagggaggaatgcctttcgcaataatgtatccattcccctgattgagggtgggtgggtggacccaggctccctttgcacacagagcagctacttctaagccatatcgactgttttgcagaggatttgtgtgtcctccctcaggaggggaggcctggtaggagggggggagagttctctgtcctactgctctcaagagggcatttccccttgcgccttctcccacagggcccagcccctctcccctgcccaagtccccagggggtactctggagtgagcagtccccctgtgggggagcctgtaaatgcgggctcagtggaccactggtgactgggctcatgcctccaagtcagagtttcccctggtgccccagagacaggagcacaagtgggatctgacctggtgagattatttctgatgacctcatcaaaaaataaacaattcccaatgttccaggtgagggctttgaaaggccttccaaacagctccgtcgcccctagcaactccaccattgggcactgccatgcagagacgtggctggcccagaatggcctgttgccatagcaactggaggcgatggggcagtgaacagaataacaacagcaacaatgcctttgcaggcagcctgctcccctgagcgctgggctggtgatggccgttggactctgtgagatggagagccaatctcacattcaagtgttcaccaaccactgatgtgtttttatttccttctatatgattttaagatgtgttttctgcattctgtaaagaaacatatcaaactaaataaaagcagtgtctttatt

SEQ ID NO: 141 - protein, 895 aa, Homosapiens
MRMSVGLSLLLPLWGRTFLLLLSVVMAQSHWPSEPSEAVRDWENQLEASMHSVLSDLHEAVPTVVGIPDGTAVVGRSFRVTIPTDLIASSGDIIKVSAAGKEALPSWLHWDSQSHTLEGLPLDTDKGVHYISVSATRLGANGSHIPQTSSVFSIEVYPEDHSDLQSVRTASPDPGEVVSSACAADEPVTVLTVILDADLTKMTPKQRIDLLHRMRSFSEVELHNMKLVPVVNNRLFDMSAFMAGPGNPKKVVENGALLSWKLGCSLNQNSVPDIHGVEAPAREGAMSAQLGYPVVGWHIANKKPPLPKRVRRQIHATPTPVTAIGPPTTAIQEPPSRIVPTPTSPAIAPPTETMAPPVRDPVPGKPTVTIRTRGAIIQTPTLGPIQPTRVSEAGTTVPGQIRPTMTIPGYVEPTAVATPPTTTTKKPRVSTPKPATPSTDSTTTTTRRPTKKPRTPRPVPRVTTKVSITRLETASPPTRIRTTTSGVPRGGEPNQRPELKNHIDRVDAWVGTYFEVKIPSDTFYDHEDTTTDKLKLTLKLREQQLVGEKSWVQFNSNSQLMYGLPDSSHVGKHEYFMHATDKGGLSAVDAFEIHVHRRPQGDRAPARFKAKFVGDPALVLNDIHKKIALVKKLAFAFGDRNCSTITLQNITRGSIVVEWTNNTLPLEPCPKEQIAGLSRRIAEDDGKPRPAFSNALEPDFKATSITVTGSGSCRHLQFIPVVPPRRVPSEAPPTEVPDRDPEKSSEDDVYLHTVIPAVVVAAILLIAGIIAMICYRKKRKGKLTLEDQATFIKKGVPIIFADELDDSKPPPSSSMPLILQEEKAPLPPPEYPNQSVPETTPLNQDTMGEYTPLRDEDPNAPPYQPPPPFTVPMEGKGSRPKNMTPYRSPPPYVPP

SEQ ID NO: 142 - DNA, 8192 bp, Homosapiens
agagccgagctgggagatggcggcggcagcggcggcgccgagagtgtgagcaccgcccgggagccgccggcccgggcgcagcgcgaccccgaccccgcccgcccgcctgcccgccatgggcaacgaggtcagcctggagggcggcgctggcgacgggccgctgccgcccggcggcgccggccccggcccgggccccggccccggccccggcgcaggaaagccgccttcagcaccggccggtggcggacagctccccgcggcgggagcagcgcggtcgaccgcggtaccaccggtccctggccccggccccggccccggtcccggccctggcccgggcagcacttcccggagactggaccccaaggaacccctgggtaaccagagagcagcttccccaactccgaagcaggcttctgctaccactcctggccatgagagcccccgagagacaagggcacagggaccagcaggccaggaggctgatggtccccgcaggacgctgcaggtagacagcaggacacagagatcagggcggtccccctcagtgtcaccggacagaggcagcacccccacatcaccctactccgtccctcagatcgccccccttcccagcagcacgctgtgtcccatatgcaagacttcggacctcacgtcgacccccagccagccaaacttcaacacctgcacccagtgtcacaacaaggtctgcaaccagtgtgggttcaaccccaaccctcatctcacccaggtgaaggagtggctctgtctgaactgtcagatgcagagggctctgggaatggacatgaccactgcacctcgctccaagagccagcagcagctgcactccccagccctgtctcctgcccactccccggccaaacagcccctggggaagccagaccaagagagatctcggggcccaggaggaccacagcctgggtcccgccaggctgagacagccagggccacctcagtgccggggcctgcccaagcagctgcccctccagaggtggggagggtgtctcctcagccccctcaacccaccaagccttccacagctgagcccaggccacctgcaggagaggccccggccaaaagtgccaccgcagtgcccgctgggcttggtgccactgagcagacccaggagggcctcactggtaagctcttcggccttggcgcgtcactgctaacccaggcgagcaccctcatgtctgtgcagcccgaggctgacacccagggccagcctgcccccagcaaggggacacctaagatcgtcttcaatgatgccagcaaggaggctggcccaaaacccttgggctcagggcccgggcctgggccagcacctggagccaaaactgagcctggggctagaatgggtcctggatctggacctggagccctgccgaaaactgggggaacaaccagtccaaagcatggcagagcagaacatcaggcagcatcgaaggctgctgccaagccaaagaccatgccgaaggaaagggccatctgcccactgtgccaagccgagctcaacgtgggcagcaagagcccagccaactataacacatgcaccacctgcaggctccaggtgtgcaacctgtgtggcttcaacccaacaccccacctggtggagaaaacagagtggctctgtctgaactgccaaaccaagcggctactggagggcagcctaggagagccgacccccctgccgccgcccacctcacagcagccccctgtaggggcccctcaccgtgcatctggaacatcccctctgaagcagaaagggccacaggggctgggccagccttcaggccccctgcctgccaaggccagccctctatccaccaaggccagccctctgcccagcaaggccagcccccaggccaagcccctcagggcttctgaacccagcaagaccccaagcagtgtccaggaaaagaagacccgagtccccactaaagctgagcccatgccgaagccacctccagagactaccccaacccctgcgactcctaaagtaaagagtggggtgaggagggctgaacctgccacccctgtcgtcaaggctgttccagaagcccccaagggtggggaggcggaggacctggtgggcaagccttactctcaggatgcgtctcggagcccacagagcctcagtgacacaggctattcctctgacggcatctctagctcccagagtgagatcacaggagtcgtgcagcaggaggtggaacagctggacagtgcaggggtgacagggccacatccacccagcccctccgagatccacaaggtggggagcagcatgcggcctttgctgcaggcccagggcctggccccaagtgagcggagcaagccactctccagcggtactggcgaggagcagaagcagcggccccactccttgtccatcacgcctgaggcctttgactctgatgaggagctggaggatatcctggaggaagacgaagactctgctgagtggaggcgccggagagagcagcaggacactgccgagtcctcagacgactttggcagccaattgaggcacgactatgtggaggacagcagtgagggtggcctgtcccctcttccaccccagcccccagcccgggcagcagaactgactgatgaggatttcatgcgacggcagattctcgagatgagcgccgaggaagacaacctggaggaggatgacactgccacctccgggcgtggcctggccaaacatggcacccagaaaggtggccccagacccaggcctgagcctagccaagaaccagcagcactgcccaagaggcgcctgccccacaatgccaccacgggctatgaggagctgctccctgagggaggctcagcagaggctaccgatggcagtgggaccctgcagggtgggctccgtcgcttcaagaccattgagctcaacagcacgggaagttatggtcatgagttggacctgggccaaggcccagaccccagtctggaccgggagcctgagctggagatggagagcctaacgggctcccctgaggaccgctcccgtggtgagcactcctctacattgcctgcctccacacccagctacacctcgggcacctctcccacctctctgtcctccctagaggaggacagtgacagcagccccagccgcaggcagcgtctagaagaagcaaagcagcagcgcaaggcccggcaccgctcccacgggcccctgctacccaccatcgaggactcctcagaggaggaggagctgcgggaggaagaggagctgcttcgtgagcaagagaagatgcgggaggtggagcagcagcgcatccgcagcacagcccgcaagacccggcgggacaaggaagaactgcgggcccagcggaggcgagagcgctccaagacaccacccagtaacttgtcacccatcgaggatgcctccccgacggaggagctgaggcaggcggccgagatggaggagctacaccgctcctcctgctctgagtactcaccctcaccctcccttgactctgaggctgaggccttggatggtggccctagccggctttacaagtcaggcagtgagtacaacctgcccaccttcatgtccctctactcaccaaccgagacaccctccggcagctccaccactcccagttccggacggccgctcaagagcgctgaggaggcttatgaggagatgatgcgcaaagctgagctgctccagaggcagcaaggccaggcagcaggggcccggggaccccatggcggcccctctcagcccacaggcccccggggcctgggctccttcgaatatcaagacactacagaccgtgagtatggccaggctgctcagcctgccgcagagggcacgccagccagcctgggagcagccgtgtacgaagaaatccttcagacatcacagagcatagtccgcatgcggcaggcctcctcacgagacctggcttttgctgaggacaaaaagaaggagaagcagtttctaaatgctgagagtgcatacatggacccaatgaagcaaaatggtggcccccttacccctggtaccagtcccacccagctcgctgcccctgtgtccttctctacccccacctcctcagacagcagcgggggccgagttattcccgatgtccgtgtcactcagcattttgcaaaggagactcaggaccccctcaagctgcacagctctcctgcctcccccagctcagcctccaaggagataggcatgcccttttcccagggccctgggaccccagccaccacagctgtggctccttgtccagctgggctgccacgaggatatatgactccagcctccccagcaggctccgagcgtagtccttcaccatcttccacagcccacagctatggacacagcccaaccactgcaaactatgggtcccaaactgaggatctaccccaggcccccagtggccttgctgcagctggacgagctgctagagagaagcccttgagtgcgagtgacggtgagggtggcactcctcagccttcccgggcatattcctactttgcaagctccagcccacctctctccccgtcttccccctcagagagtcccacattctcccctggcaagatgggcccaagggccacagcagagttctctacacagacgccaagtccagcccctgcctcagacatgccacggagccctggtgcccccactccatcacctatggtagcccagggtacacaaacaccacatcgacccagcacgcctcgcctggtgtggcaggagtcctctcaagaggctccctttatggtcatcacgctggcatctgacgcctccagccagaccaggatggtacatgccagtgcctccacctccccgctctgctcacctactgaaacccagcccaccacccatggctacagccagacaacacctccgagtgtgtctcagctgcccccagagccacctgggccacctggctttccacgggtgcccagtgctggtgcagatgggcccctggcactatatggctggggtgccctccctgctgagaacatctccctgtgccggatctcctctgtccctgggacgtctagggttgagccaggccccaggacccctggcactgcagtggtagacctccgtacagctgtcaagcccactcccatcatcctcactgaccagggcatggacctcacctctcttgctgtggaagcgaggaagtatggtcttgccctggatccaatcccaggacggcagtcgaccgccgtgcagcccttggttatcaacctcaatgcccaggagcataccttccttgctactgccaccaccgtgagcatcaccatggcctcgtctgtgttcatggctcaacaaaagcagcctgtggtctatggagacccctaccagagccgccttgactttggccagggtgggggtagccctgtgtgcctggcccaggtcaaacaagtagagcaggctgtccagacagccccataccgaagtgggccccggggaagacccagggaggccaagtttgccagatataacctacccaaccaagtagctcctctggccagaagagacgttttgatcactcagatgggcaccgcccagagcattggcctcaagccaggcccagtgccagagccaggtgccgagccccaccgggccacccctgcagagctgcggtcacatgctctgccaggtgccaggaagccacacacagtggtggtgcagatgggagagggcacagcaggcactgtgaccacactgctcccagaggagcctgcgggtgccctggaccttaccgggatgaggcctgagagccagctggcatgctgtgacatggtctacaagctcccctttggcagcagctgcactggcaccttccacccggcccccagtgtgcctgagaagagcatggcagatgctgccccacctggccaaagcagcagccccttctatggtccccgggaccctgagcctcctgagcccccaacctaccgggcacagggggtggtggggcctgggccccatgaggagcagaggccctacccacaaggcctgcctggtaggctgtactcctccatgtctgacaccaatttggctgaggctggcctcaactaccatgcccagaggatcgggcagctcttccagggtcctggacgagactcggctatggacctcagctcactgaagcactcctacagcctgggctttgcggatggacgctacctagggcagggcttgcagtatggctcagtcacggacctgcgtcatcctacagaccttttggctcacccgcttcccatgcggcgctatagctcagtgtcgaacatctactcagaccacaggtacggcccacggggagatgcagttggcttccaggaggccagcctggcccagtacagtgccaccacagcccgtgaaatcagtcgcatgtgcgctgccctcaactccatggaccagtatggtgggcggcatggcagtggtggtggtggccctgaccttgtgcagtaccagccccagcacgggcccgggctcagtgctccacagagtctggttcccctcagacctggactccttggtaaccccacctttccagagggccacccaagtcctgggaacttggcccagtatgggcctgcagcaggccaaggaacagcagtcagacagctgctgccgtccacagccactgtacgtgcagctgatggcatgatctactcgactatcaataccccaattgctgcaacactgcccatcaccacccagcctgcctcagtcctgcggcccatggtgcgtggtggcatgtacaggccttacgcatctggtggaatcacagccgtgccactcaccagtctgacacgtgtgcccatgattgccccccgggtacctcttggacccacagggctgtaccgctatcctgcaccaagtagatttcccattgcttccagtgttccacctgcagaagggcctgtctatctggggaaacctgctgctgccaaggcccctggggctgggggcccttcaaggccagagatgccagtaggggctgcacgggaagagcctcttcccacaaccacccctgctgccatcaaggaggctgcaggagccccagctcctgccccactagctggccagaagccaccagcagatgctgctcctgggggtggcagtggggccctcagccggccagggttcgagaaagaggaagcatcacaggaggagaggcagcggaagcaacaggagcagctgctccagctagagcgggagcgggtggagttggagaagctgcgacaacttcggctgcaagaggagctagagcgggaacgtgtggagctgcagaggcaccgtgaggaggagcagctgctggtgcagcgggagttgcaggagctgcagaccatcaagcaccatgtgctgcagcagcagcaagaggaacgccaggctcaatttgcactgcagcgggaacagctagcgcagcagcgtctgcagctggagcagatccagcagctgcagcagcagctgcagcagcagctagaggagcagaagcagcggcagaaggctccctttcctgcagcctgtgaggcacctggccgagggcctcccctagcggctgctgagttggcccagaatggccagtattggcccccccttacacatgcagccttcattgccatggcagggcctgaaggacttgggcagcctcgtgagcctgtgctgcaccggggtctccccagctctgcctcagacatgtcactgcaaacggaggagcagtgggaggccagccgtagtggcatcaagaagcggcactccatgccacgcctgcgggatgcctgtgagctagagtctgggactgagccctgtgtggtcaggaggattgccgacagcagcgtgcagacagacgatgaggatggggagagccgctacctcttgagtcggcgacgccgggcacggcggagtgctgactgcagtgtgcagacggacgacgaagacagtgctgagtgggagcagccagtgcgccgccgcaggtctcgtcttccccgccactcagactcaggctctgacagcaagcacgatgccactgcctcatcatccagtgctgctgccactgtgagggccatgagcagcgtgggcatccagaccatcagtgactgctccgtgcagacggagcctgaccagctgcccagggtctctccagccatccacatcacagctg

SEQ ID NO: 143 - protein, 3926 aa, Homosapiens
MGNEVSLEGGAGDGPLPPGGAGPGPGPGPGPGAGKPPSAPAGGGQLPAAGAARSTAVPPVPGPGPGPGPGPGPGSTSRRLDPKEPLGNQRAASPTPKQASATTPGHESPRETRAQGPAGQEADGPRRTLQVDSRTQRSGRSPSVSPDRGSTPTSPYSVPQIAPLPSSTLCPICKTSDLTSTPSQPNFNTCTQCHNKVCNQCGFNPNPHLTQVKEWLCLNCQMQRALGMDMTTAPRSKSQQQLHSPALSPAHSPAKQPLGKPDQERSRGPGGPQPGSRQAETARATSVPGPAQAAAPPEVGRVSPQPPQPTKPSTAEPRPPAGEAPAKSATAVPAGLGATEQTQEGLTGKLFGLGASLLTQASTLMSVQPEADTQGQPAPSKGTPKIVFNDASKEAGPKPLGSGPGPGPAPGAKTEPGARMGPGSGPGALPKTGGTTSPKHGRAEHQAASKAAAKPKTMPKERAICPLCQAELNVGSKSPANYNTCTTCRLQVCNLCGFNPTPHLVEKTEWLCLNCQTKRLLEGSLGEPTPLPPPTSQQPPVGAPHRASGTSPLKQKGPQGLGQPSGPLPAKASPLSTKASPLPSKASPQAKPLRASEPSKTPSSVQEKKTRVPTKAEPMPKPPPETTPTPATPKVKSGVRRAEPATPVVKAVPEAPKGGEAEDLVGKPYSQDASRSPQSLSDTGYSSDGISSSQSEITGVVQQEVEQLDSAGVTGPHPPSPSEIHKVGSSMRPLLQAQGLAPSERSKPLSSGTGEEQKQRPHSLSITPEAFDSDEELEDILEEDEDSAEWRRRREQQDTAESSDDFGSQLRHDYVEDSSEGGLSPLPPQPPARAAELTDEDFMRRQILEMSAEEDNLEEDDTATSGRGLAKHGTQKGGPRPRPEPSQEPAALPKRRLPHNATTGYEELLPEGGSAEATDGSGTLQGGLRRFKTIELNSTGSYGHELDLGQGPDPSLDREPELEMESLTGSPEDRSRGEHSSTLPASTPSYTSGTSPTSLSSLEEDSDSSPSRRQRLEEAKQQRKARHRSHGPLLPTIEDSSEEEELREEEELLREQEKMREVEQQRIRSTARKTRRDKEELRAQRRRERSKTPPSNLSPIEDASPTEELRQAAEMEELHRSSCSEYSPSPSLDSEAEALDGGPSRLYKSGSEYNLPTFMSLYSPTETPSGSSTTPSSGRPLKSAEEAYEEMMRKAELLQRQQGQAAGARGPHGGPSQPTGPRGLGSFEYQDTTDREYGQAAQPAAEGTPASLGAAVYEEILQTSQSIVRMRQASSRDLAFAEDKKKEKQFLNAESAYMDPMKQNGGPLTPGTSPTQLAAPVSFSTPTSSDSSGGRVIPDVRVTQHFAKETQDPLKLHSSPASPSSASKEIGMPFSQGPGTPATTAVAPCPAGLPRGYMTPASPAGSERSPSPSSTAHSYGHSPTTANYGSQTEDLPQAPSGLAAAGRAAREKPLSASDGEGGTPQPSRAYSYFASSSPPLSPSSPSESPTFSPGKMGPRATAEFSTQTPSPAPASDMPRSPGAPTPSPMVAQGTQTPHRPSTPRLVWQESSQEAPFMVITLASDASSQTRMVHASASTSPLCSPTETQPTTHGYSQTTPPSVSQLPPEPPGPPGFPRVPSAGADGPLALYGWGALPAENISLCRISSVPGTSRVEPGPRTPGTAVVDLRTAVKPTPIILTDQGMDLTSLAVEARKYGLALDPIPGRQSTAVQPLVINLNAQEHTFLATATTVSITMASSVFMAQQKQPVVYGDPYQSRLDFGQGGGSPVCLAQVKQVEQAVQTAPYRSGPRGRPREAKFARYNLPNQVAPLARRDVLITQMGTAQSIGLKPGPVPEPGAEPHRATPAELRSHALPGARKPHTVVVQMGEGTAGTVTTLLPEEPAGALDLTGMRPESQLACCDMVYKLPFGSSCTGTFHPAPSVPEKSMADAAPPGQSSSPFYGPRDPEPPEPPTYRAQGVVGPGPHEEQRPYPQGLPGRLYSSMSDTNLAEAGLNYHAQRIGQLFQGPGRDSAMDLSSLKHSYSLGFADGRYLGQGLQYGSVTDLRHPTDLLAHPLPMRRYSSVSNIYSDHRYGPRGDAVGFQEASLAQYSATTAREISRMCAALNSMDQYGGRHGSGGGGPDLVQYQPQHGPGLSAPQSLVPLRPGLLGNPTFPEGHPSPGNLAQYGPAAGQGTAVRQLLPSTATVRAADGMIYSTINTPIAATLPITTQPASVLRPMVRGGMYRPYASGGITAVPLTSLTRVPMIAPRVPLGPTGLYRYPAPSRFPIASSVPPAEGPVYLGKPAAAKAPGAGGPSRPEMPVGAAREEPLPTTTPAAIKEAAGAPAPAPLAGQKPPADAAPGGGSGALSRPGFEKEEASQEERQRKQQEQLLQLERERVELEKLRQLRLQEELERERVELQRHREEEQLLVQRELQELQTIKHHVLQQQQEERQAQFALQREQLAQQRLQLEQIQQLQQQLQQQLEEQKQRQKAPFPAACEAPGRGPPLAAAELAQNGQYWPPLTHAAFIAMAGPEGLGQPREPVLHRGLPSSASDMSLQTEEQWEASRSGIKKRHSMPRLRDACELESGTEPCVVRRIADSSVQTDDEDGESRYLLSRRRRARRSADCSVQTDDEDSAEWEQPVRRRRSRLPRHSDSGSDSKHDATASSSSAAATVRAMSSVGIQTISDCSVQTEPDQLPRVSPAIHITAATDPKVEIVRYISAPEKTGRGESLACQTEPDGQAQGVAGPQLVGPTAISPYLPGIQIVTPGPLGRFEKKKPDPLEIGYQAHLPPESLSQLVSRQPPKSPQVLYSPVSPLSPHRLLDTSFASSERLNKAHVSPQKHFTADSALRQQTLPRPMKTLQRSLSDPKPLSPTAEESAKERFSLYQHQGGLGSQVSALPPNSLVRKVKRTLPSPPPEEAHLPLAGQASPQLYAASLLQRGLTGPTTVPATKASLLRELDRDLRLVEHESTKLRKKQAELDEEEKEIDAKLKYLELGITQRKESLAKDRGGRDYPPLRGLGEHRDYLSDSELNQLRLQGCTTPAGQFVDFPATAAAPATPSGPTAFQQPRFQPPAPQYSAGSGGPTQNGFPAHQAPTYPGPSTYPAPAFPPGASYPAEPGLPNQQAFRPTGHYAGQTPMPTTQSTLFPVPADSRAPLQKPRQTSLADLEQKVPTNYEVIASPVVPMSSAPSETSYSGPAVSSGYEQGKVPEVPRAGDRGSVSQSPAPTYPSDSHYTSLEQNVPRNYVMIDDISELTKDSTSTAPDSQRLEPLGPGSSGRPGKEPGEPGVLDGPTLPCCYARGEEESEEDSYDPRGKGGHLRSMESNGRPASTHYYGDSDYRHGARVEKYGPGPMGPKHPSKSLAPAAISSKRSKHRKQGMEQKISKFSPIEEAKDVESDLASYPPPAVSSSLVSRGRKFQDEITYGLKKNVYEQQKYYGMSSRDAVEDDRIYGGSSRSRAPSAYSGEKLSSHDFSGWGKGYEREREAVERLQKAGPKPSSLSMAHSRVRPPMRSQASEEESPVSPLGRPRPAGGPLPPGGDTCPQFCSSHSMPDVQEHVKDGPRAHAYKREEGYILDDSHCVVSDSEAYHLGQEETDWFDKPRDARSDRFRHHGGHAVSSSSQKRGPARHSYHDYDEPPEEGLWPHDEGGPGRHASAKEHRHGDHGRHSGRHTGEEPGRRAAKPHARDLGRHEARPHSQPSSAPAMPKKGQPGYPSSAEYSQPSRASSAYHHASDSKKGSRQAHSGPAALQSKAEPQAQPQLQGRQAAPGPQQSQSPSSRQIPSGAASRQPQTQQQQQGLGLQPPQQALTQARLQQQSQPTTRGSAPAASQPAGKPQPGPSTATGPQPAGPPRAEQTNGSKGTAKAPQQGRAPQAQPTPGPGPAGVKAGARPGGTPGAPAGQPGADGESVFSKILPGGAAEQAGKLTEAVSAFGKKFSSLW

SEQ ID NO: 144 - DNA, 2775 bp, Homosapiens
ctcaaccccttctctcgtaggcccttctaccctccccgaagccgggctcccgggttccgcttccacagggccgccccctctcctccgagatccaacgcctcgcccctcggtaagaggcccaggactcagcccacggccccgccccccacttggctagtccgcccctggcgagacccctgctctcacccacccaggacttctcgctcccaggccgggtcctctcaccgtcaaggcccgccccctgccaacggtcctcacccattagccgaaggccccgcccctcacagattgccgcagggcaggggcggagacagcccgggccgtcccaggctccgcccccggaagcctcacttccgggcgcgagcacgccccgcctcgccccggcggcagagaggagactatggaacgtcaggtgctgctgagcgagcccgaggaggcggcggctctgtatcggggccttagccgccagcccgcgctgagcgccgcctgcctgggcccggaggtcaccacgcagtacggcggccaataccggacggtgcacactgagtggacccagagggacctggaacgcatggagaacattcgattctgccgccaatacctggtgttccatgacggggactcagtggtgtttgcaggacctgcaggcaacagtgtggagacccggggggaactgctgagcagagagtctccttcaggcaccatgaaagctgtgctgcgcaaggctggaggcacgggccctggggaagagaagcagttcctggaggtctgggagaagaaccggaagctcaagagcttcaacctgtcagcgctggagaaacatgggcctgtttatgaggatgactgctttggctgcctgtcctggtcgcactcggagacacacttgttgtatgtggcagagaagaagcgccccaaggccgagtccttctttcagaccaaagccttggacgtcagtgccagcgatgatgagatagccaggctgaagaagccagaccaagccatcaagggggatcagtttgtgttttatgaagactggggagaaaacatggtttccaaaagcatccctgtgctctgcgtgctggatgtcgagagtggcaacatctctgtgcttgagggggtccctgagaatgtgtcccctggacaggcattttgggcccctggagatgctggtgtggtgtttgtgggctggtggcatgagcccttccggttgggcatccgcttttgcaccaatcgcaggtcagccctgtattatgtggacctcatcggggggaagtgtgagctcctctcggatgactccctggctgtctcttctccccggctgagcccagaccaatgtcgcattgtctacctgcagtacccatctctgatcccccatcaccaatgcagccagctgtgcctgtatgactggtataccaaggttacctcagtggtggtagatgttgtgcctcggcagctgggagagaacttctctgggatctactgcagccttctgcctttgggatgctggtcagctgacagccagagagtggtctttgactcggctcagcgcagccggcaggacctgtttgctgtggacacccaagtgggcactgtgacctccctcacagctggagggtcaggtgggagctggaagttgctcacaattgaccaggacctcatggtggcacagttttccacacccagcctacctccaaccctgaaagttgggttcctgccttctgcagggaaggagcagtcagtgttgtgggtgtccctggaggaggccgagcccattcccgacatccactggggcatccgggtgctacagccacccccagagcaagagaatgtgcagtatgctggccttgactttgaagcaatcctgctgcagcctggcagccctccagataagacccaagtgcccatggtggtcatgccccacggggggccccattcatcctttgtcactgcctggatgctgttcccagccatgctttgcaagatgggctttgcggtactactagtgaactatcgtggctccacgggctttggccaggacagcatcctctccctcccaggcaatgtgggccaccaggatgtgaaggatgtccagtttgcagtggaacaggtgctccaggaggaacactttgatgcaagccatgtggcccttatgggtggttcccatggtggcttcatttcctgccacttgattggtcagtacccagagacctacagggcctgcgtggcccggaaccccgtgatcaacatcgcctccatgttgggctccactgacatccctgactggtgcgtggtggaggctggctttcctttcagcagtgactgcctgccagacctcagcgtgtgggctgagatgctggacaaatcgcccatcagatacatccctcaggtgaagacaccactgttactgatgttgggccaggaggaccggcgtgtgcccttcaagcagggcatggagtattaccgtgccctcaagacccggaatgtgcctgttcggctcctgctctatcccaaaagcacccacgcattatcagaggtggaggtggagtcagacagcttcatgaatgctgtgctctggctacgcacacacttgggcagctgaagccctgccattctgcatgagctgatcagcctgtgccacacttcgctcttgaggagctcaacggtctggcagggcagcaggaggctttctgggctctggactccacggatgcgtgggcagaggaatgtgggctatgtagtcataataaattaggacacaaaaaaaaaaaaaaaaaa

SEQ ID NO: 145 - protein, 732 aa, Homosapiens
MERQVLLSEPEEAAALYRGLSRQPALSAACLGPEVTTQYGGQYRTVHTEWTQRDLERMENIRFCRQYLVFHDGDSVVFAGPAGNSVETRGELLSRESPSGTMKAVLRKAGGTGPGEEKQFLEVWEKNRKLKSFNLSALEKHGPVYEDDCFGCLSWSHSETHLLYVAEKKRPKAESFFQTKALDVSASDDEIARLKKPDQAIKGDQFVFYEDWGENMVSKSIPVLCVLDVESGNISVLEGVPENVSPGQAFWAPGDAGVVFVGWWHEPFRLGIRFCTNRRSALYYVDLIGGKCELLSDDSLAVSSPRLSPDQCRIVYLQYPSLIPHHQCSQLCLYDWYTKVTSVVVDVVPRQLGENFSGIYCSLLPLGCWSADSQRVVFDSAQRSRQDLFAVDTQVGTVTSLTAGGSGGSWKLLTIDQDLMVAQFSTPSLPPTLKVGFLPSAGKEQSVLWVSLEEAEPIPDIHWGIRVLQPPPEQENVQYAGLDFEAILLQPGSPPDKTQVPMVVMPHGGPHSSFVTAWMLFPAMLCKMGFAVLLVNYRGSTGFGQDSILSLPGNVGHQDVKDVQFAVEQVLQEEHFDASHVALMGGSHGGFISCHLIGQYPETYRACVARNPVINIASMLGSTDIPDWCVVEAGFPFSSDCLPDLSVWAEMLDKSPIRYIPQVKTPLLLMLGQEDRRVPFKQGMEYYRALKTRNVPVRLLLYPKSTHALSEVEVESDSFMNAVLWLRTHLGS

SEQ ID NO: 146 - DNA, 2280 bp, Homosapiens
tccagccagaaggatggggtggctcccactcctgctgcttctgactcaatgcttaggggtccctgggcagcgctcgccattgaatgacttccaagtgctccggggcacagagctacagcacctgctacatgcggtggtgcccgggccttggcaggaggatgtggcagatgctgaagagtgtgctggtcgctgtgggcccttaatggactgccgggccttccactacaacgtgagcagccatggttgccaactgctgccatggactcaacactcgccccacacgaggctgcggcgttctgggcgctgtgacctcttccagaagaaagactacgtacggacctgcatcatgaacaatggggttgggtaccggggcaccatggccacgaccgtgggtggcctgccctgccaggcttggagccacaagttcccgaatgatcacaagtacacgcccactctccggaatggcctggaagagaacttctgccgtaaccctgatggcgaccccggaggtccttggtgctacacaacagaccctgctgtgcgcttccagagctgcggcatcaaatcctgccgggaggccgcgtgtgtctggtgcaatggcgaggaataccgcggcgcggtagaccgcacggagtcagggcgcgagtgccagcgctgggatcttcagcacccgcaccagcaccccttcgagccgggcaagttcctcgaccaaggtctggacgacaactattgccggaatcctgacggctccgagcggccatggtgctacactacggatccgcagatcgagcgagagttctgtgacctcccccgctgcgggtccgaggcacagccccgccaagaggccacaactgtcagctgcttccgcgggaagggtgagggctaccggggcacagccaataccaccactgcgggcgtaccttgccagcgttgggacgcgcaaatccctcatcagcaccgatttacgccagaaaaatacgcgtgcaaagaccttcgggagaacttctgccggaaccccgacggctcagaggcgccctggtgcttcacactgcggcccggcatgcgcgcggccttttgctaccagatccggcgttgtacagacgacgtgcggccccaggactgctaccacggcgcaggggagcagtaccgcggcacggtcagcaagacccgcaagggtgtccagtgccagcgctggtccgctgagacgccgcacaagccgcagttcacgtttacctccgaaccgcatgcacaactggaggagaacttctgccggaacccagatggggatagccatgggccctggtgctacacgatggacccaaggaccccattcgactactgtgccctgcgacgctgcgctgatgaccagccgccatcaatcctggaccccccagaccaggtgcagtttgagaagtgtggcaagagggtggatcggctggatcagcggcgttccaagctgcgcgtggttgggggccatccgggcaactcaccctggacagtcagcttgcggaatcggcagggccagcatttctgcggggggtctctagtgaaggagcagtggatactgactgcccggcagtgcttctcctcctgccatatgcctctcacgggctatgaggtatggttgggcaccctgttccagaacccacagcatggagagccaagcctacagcgggtcccagtagccaagatggtgtgtgggccctcaggctcccagcttgtcctgctcaagctggagagatctgtgaccctgaaccagcgtgtggccctgatctgcctgccccctgaatggtatgtggtgcctccagggaccaagtgtgagattgcaggctggggtgagaccaaaggtacgggtaatgacacagtcctaaatgtggccttgctgaatgtcatctctaaccaggagtgtaacatcaagcaccgaggacgtgtgcgggagagtgagatgtgcactgagggactgttggcccctgtgggggcctgtgagggtgactacgggggcccacttgcctgctttacccacaactgctgggtcctggaaggaattataatccccaaccgagtatgcgcaaggtcccgctggccagctgtcttcacgcgtgtctctgtgtttgtggactggattcacaaggtcatgagactgggttaggcccagccttgatgccatatgccttggggaggacaaaacttcttgtcagacataaagccatgtttcctctttaaaaaaaaaaaaaaaaaaaaaaaaaaaaaaaataaaaaaaaaaaaaaaaaaaaaaaaaa

SEQ ID NO: 147 - protein, 711 aa, Homosapiens
MGWLPLLLLLTQCLGVPGQRSPLNDFQVLRGTELQHLLHAVVPGPWQEDVADAEECAGRCGPLMDCRAFHYNVSSHGCQLLPWTQHSPHTRLRRSGRCDLFQKKDYVRTCIMNNGVGYRGTMATTVGGLPCQAWSHKFPNDHKYTPTLRNGLEENFCRNPDGDPGGPWCYTTDPAVRFQSCGIKSCREAACVWCNGEEYRGAVDRTESGRECQRWDLQHPHQHPFEPGKFLDQGLDDNYCRNPDGSERPWCYTTDPQIEREFCDLPRCGSEAQPRQEATTVSCFRGKGEGYRGTANTTTAGVPCQRWDAQIPHQHRFTPEKYACKDLRENFCRNPDGSEAPWCFTLRPGMRAAFCYQIRRCTDDVRPQDCYHGAGEQYRGTVSKTRKGVQCQRWSAETPHKPQFTFTSEPHAQLEENFCRNPDGDSHGPWCYTMDPRTPFDYCALRRCADDQPPSILDPPDQVQFEKCGKRVDRLDQRRSKLRVVGGHPGNSPWTVSLRNRQGQHFCGGSLVKEQWILTARQCFSSCHMPLTGYEVWLGTLFQNPQHGEPSLQRVPVAKMVCGPSGSQLVLLKLERSVTLNQRVALICLPPEWYVVPPGTKCEIAGWGETKGTGNDTVLNVALLNVISNQECNIKHRGRVRESEMCTEGLLAPVGACEGDYGGPLACFTHNCWVLEGIIIPNRVCARSRWPAVFTRVSVFVDWIHKVMRLG

SEQ ID NO: 148 - DNA, 4272 bp, Homosapiens
aagaggttgggcggatgttgtgagccgggtcgctgcggccgaggctccggcccccaggaccactggctgcccatgagagatgaaggatggcatccaagggggccggcatgtctttctcccgcaagagctataggctgacctcagatgctgagaaatccagggtcacaggcattgtgcaggagaagctgctgaatgactacctgaaccgcatcttttcctcttctgaacatgcacccccagcagccaccagcaggaaacccctgaacttccagaacctgccagaacatttggaccagttgctacaggtggacaatgaggaggaggaaagccagggacaggttgaagggcggcttggcccatccactgtggtcctggaccacacaggcggctttgaggggcttctcctggtggatgatgacctgctgggggtgattggacacagcaactttggcaccatccgctctaccacatgcgtgtacaaagggaaatggctctacgaggtcctcatctcctcccaggggctcatgcagatcggctggtgcaccatcagctgccgcttcaaccaggaggagggggttggagatacacacaactcctatgcctatgatggcaaccgcgtgcgcaagtggaatgtgaccacaacgaattatggcaaggcgtgggcagcgggggacatcgtgagctgcctgattgacctggatgatggcactctgtccttctgcctgaacggtgtatcactgggcactgcctttgagaacctgtccaggggcctgggtatggcctacttcccagccatcagcctctctttcaaggagtccgtggccttcaactttggcagccgtcctctgcgctacccagtggcaggctaccggcccctgcaggacccaccgagtgctgacctggtgcgggcacagaggttgctgggctgcttccgggcagtgctgagtgtggagctggaccctgtggaggggcggctgttggacaaggagagctccaagtggcggttgcggggccagcccaccgtcctcctcacactggcccacatcttccatcactttgcaccgcttctgcgcaaggtgtatctggtggaggctgtgctcatgagcttcttgctgggcatcgtggagaagggcacacccacacaggcacagtccgtggtgcaccaggtcctggacctcttgtggctcttcatggaggactacgaggtacaagattgcctcaagcagttgatgatgtctctgcttcggctgtaccgattctcacccattgtcccagacctgggcctacagatccattacctgcggctcactatcgccatcctgaggcatgagaagtcccgcaagtttctgcttagcaatgtcctcttcgacgtgctccgctccgtcgtcttcttttacatcaagagccccctgcgtgtggaggaggccggcctgcaggagctcattcccaccacctggtggccccactgctccagtagggagggcaaagagagcacggagatgaaggaggagaccgcagaggagcggctgcggcggcgagcctacgaacggggctgtcagcggctcaggaagcgcatcgaagtggtggaagaactacaggtccagatcctgaagctgctgctggacaataaagatgacaatgggggtgaagcttctaggtatatcttcctgaccaagtttcgcaagtttctgcaggagaacgccagtggccgggggaacatgcccatgctctgcccccctgagtacatggtctgcttcttacaccggctgatctctgccctgcgctactattgggatgaatacaaggcttccaatcctcatgcttccttcagtgaggaggcctacatcccgccccaggtcttctataatggcaaggtggactactttgacctgcagcgcctggggggcctcctctcgcacctgcggaagaccctcaaagatgaccttgcttccaaagccaacattgtgatcgacccactggagctccagtcaaccgccatggatgacctagatgaggatgaggagccagccccagctatggcccagcgccccatgcaggccctggctgttggggggccactgcccctgccccggcccggctggctcagttctccaactttgggccgagccaaccgcttcctcagcacagcggctgtgagcctcatgaccccacggcggcctctgagcacctcggagaaagtgaaggtccgcacgctgagcgtggagcagaggacccgtgaggacattgaaggcagccactggaatgagggcttgctgctggggcggccccccgaggagcctgagcagcccctcaccgagaactcgctgctggaagtcctggatggggcggtcatgatgtacaacctcagcgtacaccagcagctgggcaagatggtgggtgtctccgatgatgtcaatgaatacgctatggctctgagggacacagaggacaagctccgccggtgccccaagaggaggaaggacatccttgcagagttgaccaagagccagaaggttttctcagaaaagctggaccacctgagccgccgtcttgcctgggtccatgccactgtctactcccaggagaagatgctggacatctactggctgctgcgcgtctgcctgcggaccattgagcacggtgatcgcacagggtctctctttgccttcatgcccgagttctacctgagcgtggccatcaacagctacagtgctctcaagaattactttggtcccgtgcacagcatggaggagctcccaggctatgaagagaccctgacccgcctggctgccattctcgccaaacactttgccgacgcacgcattgtgggcactgacatccgagactcactgatgcaggccctggccagctacgtgtgctacccacactccctgcgggctgtggagcgaatccccgaggagcagcgtatcgccatggtgaggaacctcctggcgccctatgagcagcggccctgggcccagaccaactggatcctggtgcggctctggaggggctgtggcttcgggtaccgctatacacggctgccacatctgctgaaaaccaaacttgaggacgccaatttgcccagcctccagaagccctgcccttccaccctgctgcagcagcacatggcggacctcctacagcagggtcctgatgtggcacccagcttcctcaacagcgtcctcaatcagctcaactgggccttctctgaattcattggcatgatccaagagatccagcaggctgctgagcgcctggagcggaactttgtggacagccggcagctcaaggtatgtgccacctgctttgacctctcggtcagcctgctgcgtgtcttggagatgactatcacactggtgcctgagatattccttgactggacccggcctacctctgagatgctgctgcggcgtcttgcacagctgctaaaccaggtgctgaaccgggtgacagctgagaggaacctgtttgatcgtgtggtcaccctacggctgcctggcctagagagcgtggaccactatcccattctggtggcagtgacgggcatcctggtgcagctcctggtgcgtggcccagcctcagagagagagcaagccacatcagtgctcctggcagatccctgcttccagctacgctcaatatgctatctcctgggacagccagagcccccagcacctggcactgctctgccagcccctgaccggaagcgcttctccctgcagagctatgcggattatatcagtgccgatgagctggcccaagtggaacagatgctggcgcacctgacctctgcatctgcccaggcagcagctgcctccctgcccaccagtgaggaggacctctgccccatctgctatgcccaccccatctctgctgtgttccagccctgtggccacaagtcctgcaaagcctgtatcaaccagcacctgatgaacaacaaggactgcttcttctgcaaaaccaccatcgtgtctgtagaggactgggagaagggagccaatacgagtactacctcctcagctgcctagccctcacagcctgtgccatcctggaacctccacctttgaacccagagccaggctgggccctatttatgagctccctttgcccttctcctgtatcccacaccaccacatccaacctccttgcctgcctgtatcctcattggtgggagcccagccatggccctaattgtgcctgagcttgactttcagtcagggccacagtgagcattaaattattattccatacaaaaaaaaaaaaaaaaaa

SEQ ID NO: 149 - protein, 1314 aa, Homosapiens
MASKGAGMSFSRKSYRLTSDAEKSRVTGIVQEKLLNDYLNRIFSSSEHAPPAATSRKPLNFQNLPEHLDQLLQVDNEEEESQGQVEGRLGPSTVVLDHTGGFEGLLLVDDDLLGVIGHSNFGTIRSTTCVYKGKWLYEVLISSQGLMQIGWCTISCRFNQEEGVGDTHNSYAYDGNRVRKWNVTTTNYGKAWAAGDIVSCLIDLDDGTLSFCLNGVSLGTAFENLSRGLGMAYFPAISLSFKESVAFNFGSRPLRYPVAGYRPLQDPPSADLVRAQRLLGCFRAVLSVELDPVEGRLLDKESSKWRLRGQPTVLLTLAHIFHHFAPLLRKVYLVEAVLMSFLLGIVEKGTPTQAQSVVHQVLDLLWLFMEDYEVQDCLKQLMMSLLRLYRFSPIVPDLGLQIHYLRLTIAILRHEKSRKFLLSNVLFDVLRSVVFFYIKSPLRVEEAGLQELIPTTWWPHCSSREGKESTEMKEETAEERLRRRAYERGCQRLRKRIEVVEELQVQILKLLLDNKDDNGGEASRYIFLTKFRKFLQENASGRGNMPMLCPPEYMVCFLHRLISALRYYWDEYKASNPHASFSEEAYIPPQVFYNGKVDYFDLQRLGGLLSHLRKTLKDDLASKANIVIDPLELQSTAMDDLDEDEEPAPAMAQRPMQALAVGGPLPLPRPGWLSSPTLGRANRFLSTAAVSLMTPRRPLSTSEKVKVRTLSVEQRTREDIEGSHWNEGLLLGRPPEEPEQPLTENSLLEVLDGAVMMYNLSVHQQLGKMVGVSDDVNEYAMALRDTEDKLRRCPKRRKDILAELTKSQKVFSEKLDHLSRRLAWVHATVYSQEKMLDIYWLLRVCLRTIEHGDRTGSLFAFMPEFYLSVAINSYSALKNYFGPVHSMEELPGYEETLTRLAAILAKHFADARIVGTDIRDSLMQALASYVCYPHSLRAVERIPEEQRIAMVRNLLAPYEQRPWAQTNWILVRLWRGCGFGYRYTRLPHLLKTKLEDANLPSLQKPCPSTLLQQHMADLLQQGPDVAPSFLNSVLNQLNWAFSEFIGMIQEIQQAAERLERNFVDSRQLKVCATCFDLSVSLLRVLEMTITLVPEIFLDWTRPTSEMLLRRLAQLLNQVLNRVTAERNLFDRVVTLRLPGLESVDHYPILVAVTGILVQLLVRGPASEREQATSVLLADPCFQLRSICYLLGQPEPPAPGTALPAPDRKRFSLQSYADYISADELAQVEQMLAHLTSASAQAAAASLPTSEEDLCPICYAHPISAVFQPCGHKSCKACINQHLMNNKDCFFCKTTIVSVEDWEKGANTSTTSSAA

SEQ ID NO: 150 - DNA, 2159 bp, Homosapiens
cgcttggagagggctagcgaagccgaagggagcgcggctaagagtgccgcaccgcctcacaacctgggaaccggagagtaggggccgtcggctggcaagaacccgccgtgcctcctcggcaagggccatccggtgccacccatgtcgcactagagcagaagagggtgagtcctggaactgcaacctgcacagagctgctctgtactgtccctggtggtcgccgccatgacctggttggtgctgctggggacactgctctgcatgctgcgcgttgggttaggcaccccggactccgagggtttcccgccccgtgcgctccacaactgcccctacaaatgtatctgcgctgccgacctgctaagctgcactggcctagggctgcaggacgtgccagccgagttacctgccgctactgcggacctcgacctgagccacaacgcgctccagcgcctgcgccccggctggttggcgcccctcttccagctgcgcgccctgcacctagaccacaacgaactagatgcgctgggtcgcggcgtcttcgtcaacgccagcggcctgaggctgctcgatctatcatctaacacgttgcgggcgcttggccgccacgacctcgacgggctgggggcgctggagaagctgcttctgttcaataaccgcttggtgcacttggacgagcatgccttccacggcctgcgcgcgctcagccatctctacctgggctgcaacgaactcgcctcgttctccttcgaccacctgcacggtctgagcgccacccacctgcttactctggacctctcctccaaccggctgggacacatctccgtacctgagctggccgcgctgccggccttcctcaagaacggcctctacttgcacaacaaccctttgccttgcgactgccgcctctaccacctgctacagcgctggcaccagcggggcctgagcgccgtgcgcgactttgcgcgcgagtacgtatgcttggccttcaaggtacccgcgtcccgcgtgcgcttcttccagcacagccgcgtctttgagaactgctcgtcggccccagctcttggcctagagcggccggaagagcacctgtacgcgctggtgggtcggtccctgaggctttactgcaacaccagcgtcccggccatgcgcattgcctgggtttcgccgcagcaggagcttctcagggcgccaggatcccgcgatggcagcatcgcggtgctggccgacggcagcttggccataggcaacgtacaggagcagcatgcgggactcttcgtgtgcctggccactgggccccgcctgcaccacaaccagacgcacgagtacaacgtgagcgtgcactttccgcgcccagagcccgaggctttcaacacaggcttcaccacactgctgggctgtgccgtgggccttgtgctcgtgctgctctacctgttcgccccaccctgccgctgctgccgccgtgcctgccgctgccgccgctggccccaaacacccagcccgctccaagagctgagcgcacagtcctcagtactcagcaccacaccgccagacgcacccagccgcaaggccagcgtccacaagcacgtagtctttctggagccaggccggaggggcctcaatggccgcgtgcagctggcagtagctgaggaattcgatctctacaaccctggaggcctgcagctgaaggctggctctgagtccgccagctccataggctccgagggtcccatgacaacctagactgcccagggctcccccacccaggcccccaccctcttgctgctcgccctgctccctgcttcggtccagagaactggcagatactggtgggaagcactgtgcctggccccccagcttcctgtatgggcctcgaaacacaatgggccttctcgctcactggtagagacaggggttgtggtccccaacctgccttctgctctgcccctgcacaggacccaaaggccccaggccctgcaaggtgtgctagttcctgctttcccgcggacttcctagtgcccaaatgccctgtgaggctgagagacccaggcccctgtggctttcaacacagcacagctgtggaagtggctgtgttcttctacagcctgtggaagaacccctgtagcagagcctcccgtccaccctcaggggctgaggcagct

SEQ ID NO: 151 - protein, 504 aa, Homosapiens
MTWLVLLGTLLCMLRVGLGTPDSEGFPPRALHNCPYKCICAADLLSCTGLGLQDVPAELPAATADLDLSHNALQRLRPGWLAPLFQLRALHLDHNELDALGRGVFVNASGLRLLDLSSNTLRALGRHDLDGLGALEKLLLFNNRLVHLDEHAFHGLRALSHLYLGCNELASFSFDHLHGLSATHLLTLDLSSNRLGHISVPELAALPAFLKNGLYLHNNPLPCDCRLYHLLQRWHQRGLSAVRDFAREYVCLAFKVPASRVRFFQHSRVFENCSSAPALGLERPEEHLYALVGRSLRLYCNTSVPAMRIAWVSPQQELLRAPGSRDGSIAVLADGSLAIGNVQEQHAGLFVCLATGPRLHHNQTHEYNVSVHFPRPEPEAFNTGFTTLLGCAVGLVLVLLYLFAPPCRCCRRACRCRRWPQTPSPLQELSAQSSVLSTTPPDAPSRKASVHKHVVFLEPGRRGLNGRVQLAVAEEFDLYNPGGLQLKAGSESASSIGSEGPMTT

SEQ ID NO: 152 - DNA, 1664 bp, Homosapiens
gagttcggggccagcagccgtctacccggtgtcgcgttctgtgttgtggcggccctggatccggcgtcagggcgaccgggcggacgaggtggagccagagtctgtcaggcgggttggtgaagggcgcggggccgggcacggcgttgggagtgcgcggcagggaccggccaggcgggctgcaggcacctcagagcccgggacaccccctcaacgtccgcaggcgcgatgaaggcactgatcttagtggggggctatgggacgcggctacggccgctgacgctgagcaccccgaagccactggtggacttctgcaataagcccatcttgctgcaccaagtggaggcgctagccgcggcaggcgtggaccacgtgatcctggccgtgagctacatgtcgcaggtgctggagaaggaaatgaaggcacaggagcagaggctgggaatccgaatctccatgtcccatgaagaggagcctttggggacagctgggcccctggcgctggcccgtgacctactctctgagactgcagaccctttcttcgtcctcaacagtgacgtgatctgcgatttccccttccaagccatggtgcagttccaccggcaccatggccaggagggctccatcctggtgaccaaggtggaggaaccctccaagtacggtgtggtggtgtgtgaggctgacacaggccgcattcaccggttcgtggagaagccacaggtgtttgtgtccaataagatcaacgcaggcatgtacatcctgagccctgcagtgctgcggcgcatccagctgcagcctacgtccattgagaaggaggtcttccccattatggccaaggaggggcagctatatgccatggagttacagggcttctggatggacattgggcagcccaaggacttcctcactggcatgtgcctcttcctgcagtcactgaggcagaagcagcctgagcggctgtgctcaggccctggcattgtgggcaacgtgctggtggacccaagtgcccgcatcggccagaactgcagcattggccccaatgtgagcctgggacctggcgtggtggtcgaagatggtgtgtgtatccggcggtgcacggtgctgcgggatgcccggatccgttcccattcctggcttgagtcctgcattgtgggctggcgctgccgcgtgggtcagtgggtaagcctgtgggctgggctgggtggggagaggggcggggagtgtgcctgcctccctgacaaggcctatcctctcctggaggtacgcatggagaacgtgacagtgctgggtgaggacgtcatagttaatgatgagctctacctcaacggagccagcgtgctgccccacaagtctattggcgagtcagtgccagagcctcgtatcatcatgtgaggggatgcagtggggctggccgagccccggttttcccatcagcaaggggagtgctggcctgacacatcagaagaccctggacttgtcattatttgtctggggggcactgggtgaagctgaagctgttggacacctgccttctcatgtggacatcatctggcaggatccctgctgggcacaccccacaaaccccactccctcaagaagggccagggccagggctgtatggaataataatttaatgctcactgtgaaaaaaaaaaaaaaaaaaaaaa

SEQ ID NO: 153 - protein, 387 aa, Homosapiens
MKALILVGGYGTRLRPLTLSTPKPLVDFCNKPILLHQVEALAAAGVDHVILAVSYMSQVLEKEMKAQEQRLGIRISMSHEEEPLGTAGPLALARDLLSETADPFFVLNSDVICDFPFQAMVQFHRHHGQEGSILVTKVEEPSKYGVVVCEADTGRIHRFVEKPQVFVSNKINAGMYILSPAVLRRIQLQPTSIEKEVFPIMAKEGQLYAMELQGFWMDIGQPKDFLTGMCLFLQSLRQKQPERLCSGPGIVGNVLVDPSARIGQNCSIGPNVSLGPGVVVEDGVCIRRCTVLRDARIRSHSWLESCIVGWRCRVGQWVSLWAGLGGERGGECACLPDKAYPLLEVRMENVTVLGEDVIVNDELYLNGASVLPHKSIGESVPEPRIIM

SEQ ID NO: 154 - DNA, 1583 bp, Homosapiens
gagttcggggccagcagccgtctacccggtgtcgcgttctgtgttgtggcggccctggatccggcgtcagggcgaccgggcggacgaggtggagccagagtctgtcaggcgggttggtgaagggcgcggggccgggcacggcgttgggagtgcgcggcagggaccggccaggcgggctgcaggcacctcagagcccgggacaccccctcaacgtccgcaggcgcgatgaaggcactgatcttagtggggggctatgggacgcggctacggccgctgacgctgagcaccccgaagccactggtggacttctgcaataagcccatcttgctgcaccaagtggaggcgctagccgcggcaggcgtggaccacgtgatcctggccgtgagctacatgtcgcaggtgctggagaaggaaatgaaggcacaggagcagaggctgggaatccgaatctccatgtcccatgaagaggagcctttggggacagctgggcccctggcgctggcccgtgacctactctctgagactgcagaccctttcttcgtcctcaacagtgacgtgatctgcgatttccccttccaagccatggtgcagttccaccggcaccatggccaggagggctccatcctggtgaccaaggtggaggaaccctccaagtacggtgtggtggtgtgtgaggctgacacaggccgcattcaccggttcgtggagaagccacaggtgtttgtgtccaataagatcaacgcaggcatgtacatcctgagccctgcagtgctgcggcgcatccagctgcagcctacgtccattgagaaggaggtcttccccattatggccaaggaggggcagctatatgccatggagttacagggcttctggatggacattgggcagcccaaggacttcctcactggcatgtgcctcttcctgcagtcactgaggcagaagcagcctgagcggctgtgctcaggccctggcattgtgggcaacgtgctggtggacccaagtgcccgcatcggccagaactgcagcattggccccaatgtgagcctgggacctggcgtggtggtcgaagatggtgtgtgtatccggcggtgcacggtgctgcgggatgcccggatccgttcccattcctggcttgagtcctgcattgtgggctggcgctgccgcgtgggtcagtgggtacgcatggagaacgtgacagtgctgggtgaggacgtcatagttaatgatgagctctacctcaacggagccagcgtgctgccccacaagtctattggcgagtcagtgccagagcctcgtatcatcatgtgaggggatgcagtggggctggccgagccccggttttcccatcagcaaggggagtgctggcctgacacatcagaagaccctggacttgtcattatttgtctggggggcactgggtgaagctgaagctgttggacacctgccttctcatgtggacatcatctggcaggatccctgctgggcacaccccacaaaccccactccctcaagaagggccagggccagggctgtatggaataataatttaatgctcactgtgaaaaaaaaaaaaaaaaaaaaaa

SEQ ID NO: 155 - protein, 360 aa, Homosapiens
MKALILVGGYGTRLRPLTLSTPKPLVDFCNKPILLHQVEALAAAGVDHVILAVSYMSQVLEKEMKAQEQRLGIRISMSHEEEPLGTAGPLALARDLLSETADPFFVLNSDVICDFPFQAMVQFHRHHGQEGSILVTKVEEPSKYGVVVCEADTGRIHRFVEKPQVFVSNKINAGMYILSPAVLRRIQLQPTSIEKEVFPIMAKEGQLYAMELQGFWMDIGQPKDFLTGMCLFLQSLRQKQPERLCSGPGIVGNVLVDPSARIGQNCSIGPNVSLGPGVVVEDGVCIRRCTVLRDARIRSHSWLESCIVGWRCRVGQWVRMENVTVLGEDVIVNDELYLNGASVLPHKSIGESVPEPRIIM

SEQ ID NO: 156 - DNA, 4117 bp, Homosapiens
ccgccatcttgttgttgatccgtacccagtgggcagcgccgggagctggaccaagcggccggtgagaggccgctgtagcggtgctcagccacctgtgctgcctgccagggggcgggccgaaacctggaggcccggggggcccagctcccgtagggagccgtgggcgctcggtgcccgggccgggcaggcgtggtatctgtctgttttgagggggacagtgatggttacatcaacttagtggcctatccttatgtggaaagtgagactgtggaacaggatgacacaacagaacgggagcaacctcggcgcaaacactcccgccggagcctgcaccggtcaggcagtggcagtgaccacaaggaggagaaagccagcctgtcccttgagacctctgagagctcacaggaggcaaagagtccgaaggtggagctgcacagccactcagaggtccctttccagatgctagatggcaacagtggcttgagttctgagaagatcagccacaacccctggagcctgcgttgtcacaagcagcagctgagccgcatgcgctccgagtccaaggaccgaaagctctacaagttcctcctgcttgagaacgtggtgcaccacttcaagtacccctgcgtgttggacctgaagatgggcacgcggcagcatggcgatgacgcgtcagctgagaaggcagcccggcagatgcggaaatgcgagcagagcacatcagccacgctgggcgtcagggtctgcggcatgcaggtgtaccagctggacacagggcattacctctgcaggaacaagtactatggccgtgggctctccattgaaggcttccgcaatgccctctatcaatatctgcacaatggcctggacctgcgacgtgacctgtttgagcctatcctgagcaaactgcggggcctgaaagctgtgctggagcggcaggcctcttaccgcttctactccagttccctgcttgtcatctatgatggcaaggagtgccgggctgagtcctgcctggaccgccggtctgagatgcgtctcaagcacctggacatggtgctccctgaggtggcgtcatcctgtggccccagcaccagccccagcaacaccagccccgaggcgggtccctcctctcagcccaaggtggatgtccgcatgattgactttgcacacagcacattcaagggcttccgggatgaccccaccgtgcatgatgggccagacagaggctacgtgtttggcctggagaacctcatcagcatcatggaacagatgcgggacgagaaccagtaggccctgttctgggcccccagaaccccttcctctccactgcaggcagggaccattgttctgaacttgccgtgaggacacacagacttgcttttaaagggttatatttctctttggtgtaaactaaaagaaatgtttttagctgtagcctggaatccatatatataaagtgaaggagggcagaccacacgccctctcagccaggctcctcagctttgtggctctgactggtgtgtccaggctgccttaggaaggaagaggtgcccctggtgggcttggcagcagggacagggtgcccttggacattggtttctcttgtctagatctttgagatctgtggctgcagggccctgctgattgtaaggtaaagccctgggctggtgcagggcccctccacgcccactcttcccttgttccccagaagtagagggctctgggtgcccatttcttgggggctttccagtcttatgctgtgggtgtcagctagctctttaataggtgccctcagggcaccacagggctgactgcacaaagctggacccatccttcggtctgaccttagcatggggctagattaatgaagctgggctgaggccaacttatggcagagggcggcgcctgggttccccaggcacctgttggcacgtgacaggttggcacctgtcctattcctgaaacagcctctctcaccaagttcccttgcctaagaaggccactccctcccaccccactgaagtgggggatagtcggtgtcctagcaggcctcagggcctctggtggctctggcccagacagtatttgcagttcttgtgctatgggtgggagtcttcttcctcaagtttcggcagctgtgctgctgctggatgggctgctcctcccagggctcaagggctgtggtccgctcagggtctcatttccccaggccaagttcaaggcagcagccctttgtgaggcgctcttggccctgggcctggagggagaactttaagcttttttgctcacagggacgtggtatgggccctgggtgcaggtgcccacattctgctaatgagagctttgtctgatcagtcctgggtccatcagtttgtccatgtgtccggctgccagcccgtcccttgggatccttcccctggggtgtagccttgttcattagtatatactcattccttcatgctttcctcagcagaacacttccacttctgaggtgagcttttgccccatgcccttcctccacaggtgttgcctttttataaagacctgatagcagaataaattggtgtttccctgttgacccagcaccatttctgtgggcctagaatatggccctcaacccttagagtggggcagtgagggcttgaggagtgacccttcctttctcatggttttagtcattttggctgccagcccttaatggcacagatctgctgcttctaacagatggccaggaggtgacaccgatttcagccattgccaaggttagcaccctctcctttgagcctagggccacactgttcattgtcactttaggcaagtgcctgtttggctttaaaggtaagcctgccagctgtgagaagccttggtaactgatggactcatttcctggtccttaaagatgcagcctcttaagggctccttgatggatgccatctctcctagcccccagccctggtgccactggtgggcaggttcccattctttggggctgggagggacagcttgcctgtttctggtcacaaattacagtcttctctcctgtaccattctgtggcttcagccatgggggcagtagcccttcattagtgtagatagtcattccctggtagggtggagggtaagacatagggtctggaactgtttgggaccttttggggatgtcctgtgcctcccagattcctcgattctgggaggagaggctgccgcattctgctgctcctcacagcgagcaaagctgcacccacttacattcagtattttcctggcactacaaagagtgggaaggcctgggatttgctgctgctcccttagagcagggcccctcttttcagcactttggacacctggagacccagccctgttatttaatggtagtgggcaagtgtgtgtgcatactgtctgccactgctttctccctgccccatgccagagagccctgtccctgccaggcccagccttcttagccccaacttgggaacaaagtgcaacatgggatcatgggttggggtgctcaggtgagccctctctatagtgcttccctgggccaagctgacaccagcccctgagggtggggtgggacgggtggtgcttaaaagaggaaggggaccagtgtagcaacttgccagggaccccacccctccctctctgggcctgtgcagtgagcatggggattcccatcaaggggcctggcacctgtgctagttacgtagccgctgctcacgcgctcactcctgaccacatgcacgttccctagatgcagactgctttgaactttaaagctgtacaatttggttatgtttgtgctgacttaaaatatattttaatgaggaaaaaataatggagaaccctgggaaggacctggttcttttgcttctcggggaactgtaagccctcgcgttctgggaatcgctctctgctgctctttcctggaagctaagcctgtctccaccgcccgaggcctgcgccggtggctcccgccgcagttgcgtttgctttggaccttgcgtgcgggggagggggtgctcggtccgagcccgctcctttctgtacacctagcgctgcccgccccgcttgtgtctgaggtcgtgtatgtcaaaaataaagccgctagaaacgg

SEQ ID NO: 157 - protein, 276 aa, Homosapiens
MLDGNSGLSSEKISHNPWSLRCHKQQLSRMRSESKDRKLYKFLLLENVVHHFKYPCVLDLKMGTRQHGDDASAEKAARQMRKCEQSTSATLGVRVCGMQVYQLDTGHYLCRNKYYGRGLSIEGFRNALYQYLHNGLDLRRDLFEPILSKLRGLKAVLERQASYRFYSSSLLVIYDGKECRAESCLDRRSEMRLKHLDMVLPEVASSCGPSTSPSNTSPEAGPSSQPKVDVRMIDFAHSTFKGFRDDPTVHDGPDRGYVFGLENLISIMEQMRDENQ

SEQ ID NO: 158 - DNA, 4468 bp, Homosapiens
ccgccatcttgttgttgatccgtacccagtgggcagcgccgggagctggaccaagcggccggtgagaggccgctgtagcggtgctcagccacctgtgctgcctgccagggggcgggccgaaacctggaggcccggggggcccagctcccgtagggagccgtgggcgctcggtgcccgggccgggcaggacagaataataagctgaatagaatctgaccattggctttcacctggccaggaccttctatgtagctctccttttgtggcccatgtgctgcatcctctgccctcagtgtgcaactggcccccaacgcaatgtgtgtttgtcaaaccatggaagtggggcagtatggcaagaatgcaagtcgggctggagaccggggagtcctcctggagcccttcatccaccaagtaggcggacacagcagcatgatgcgttacgacgatcacactgtgtgcaagcccctcatctcccgggaacagcgcttttacgagtccctccctcccgaaatgaaggagttcacccctgaatacaaaggcgtggtatctgtctgttttgagggggacagtgatggttacatcaacttagtggcctatccttatgtggaaagtgagactgtggaacaggatgacacaacagaacgggagcaacctcggcgcaaacactcccgccggagcctgcaccggtcaggcagtggcagtgaccacaaggaggagaaagccagcctgtcccttgagacctctgagagctcacaggaggcaaagagtccgaaggtggagctgcacagccactcagaggtccctttccagatgctagatggcaacagtggcttgagttctgagaagatcagccacaacccctggagcctgcgttgtcacaagcagcagctgagccgcatgcgctccgagtccaaggaccgaaagctctacaagttcctcctgcttgagaacgtggtgcaccacttcaagtacccctgcgtgttggacctgaagatgggcacgcggcagcatggcgatgacgcgtcagctgagaaggcagcccggcagatgcggaaatgcgagcagagcacatcagccacgctgggcgtcagggtctgcggcatgcaggtgtaccagctggacacagggcattacctctgcaggaacaagtactatggccgtgggctctccattgaaggcttccgcaatgccctctatcaatatctgcacaatggcctggacctgcgacgtgacctgtttgagcctatcctgagcaaactgcggggcctgaaagctgtgctggagcggcaggcctcttaccgcttctactccagttccctgcttgtcatctatgatggcaaggagtgccgggctgagtcctgcctggaccgccggtctgagatgcgtctcaagcacctggacatggtgctccctgaggtggcgtcatcctgtggccccagcaccagccccagcaacaccagccccgaggcgggtccctcctctcagcccaaggtggatgtccgcatgattgactttgcacacagcacattcaagggcttccgggatgaccccaccgtgcatgatgggccagacagaggctacgtgtttggcctggagaacctcatcagcatcatggaacagatgcgggacgagaaccagtaggccctgttctgggcccccagaaccccttcctctccactgcaggcagggaccattgttctgaacttgccgtgaggacacacagacttgcttttaaagggttatatttctctttggtgtaaactaaaagaaatgtttttagctgtagcctggaatccatatatataaagtgaaggagggcagaccacacgccctctcagccaggctcctcagctttgtggctctgactggtgtgtccaggctgccttaggaaggaagaggtgcccctggtgggcttggcagcagggacagggtgcccttggacattggtttctcttgtctagatctttgagatctgtggctgcagggccctgctgattgtaaggtaaagccctgggctggtgcagggcccctccacgcccactcttcccttgttccccagaagtagagggctctgggtgcccatttcttgggggctttccagtcttatgctgtgggtgtcagctagctctttaataggtgccctcagggcaccacagggctgactgcacaaagctggacccatccttcggtctgaccttagcatggggctagattaatgaagctgggctgaggccaacttatggcagagggcggcgcctgggttccccaggcacctgttggcacgtgacaggttggcacctgtcctattcctgaaacagcctctctcaccaagttcccttgcctaagaaggccactccctcccaccccactgaagtgggggatagtcggtgtcctagcaggcctcagggcctctggtggctctggcccagacagtatttgcagttcttgtgctatgggtgggagtcttcttcctcaagtttcggcagctgtgctgctgctggatgggctgctcctcccagggctcaagggctgtggtccgctcagggtctcatttccccaggccaagttcaaggcagcagccctttgtgaggcgctcttggccctgggcctggagggagaactttaagcttttttgctcacagggacgtggtatgggccctgggtgcaggtgcccacattctgctaatgagagctttgtctgatcagtcctgggtccatcagtttgtccatgtgtccggctgccagcccgtcccttgggatccttcccctggggtgtagccttgttcattagtatatactcattccttcatgctttcctcagcagaacacttccacttctgaggtgagcttttgccccatgcccttcctccacaggtgttgcctttttataaagacctgatagcagaataaattggtgtttccctgttgacccagcaccatttctgtgggcctagaatatggccctcaacccttagagtggggcagtgagggcttgaggagtgacccttcctttctcatggttttagtcattttggctgccagcccttaatggcacagatctgctgcttctaacagatggccaggaggtgacaccgatttcagccattgccaaggttagcaccctctcctttgagcctagggccacactgttcattgtcactttaggcaagtgcctgtttggctttaaaggtaagcctgccagctgtgagaagccttggtaactgatggactcatttcctggtccttaaagatgcagcctcttaagggctccttgatggatgccatctctcctagcccccagccctggtgccactggtgggcaggttcccattctttggggctgggagggacagcttgcctgtttctggtcacaaattacagtcttctctcctgtaccattctgtggcttcagccatgggggcagtagcccttcattagtgtagatagtcattccctggtagggtggagggtaagacatagggtctggaactgtttgggaccttttggggatgtcctgtgcctcccagattcctcgattctgggaggagaggctgccgcattctgctgctcctcacagcgagcaaagctgcacccacttacattcagtattttcctggcactacaaagagtgggaaggcctgggatttgctgctgctcccttagagcagggcccctcttttcagcactttggacacctggagacccagccctgttatttaatggtagtgggcaagtgtgtgtgcatactgtctgccactgctttctccctgccccatgccagagagccctgtccctgccaggcccagccttcttagccccaacttgggaacaaagtgcaacatgggatcatgggttggggtgctcaggtgagccctctctatagtgcttccctgggccaagctgacaccagcccctgagggtggggtgggacgggtggtgcttaaaagaggaaggggaccagtgtagcaacttgccagggaccccacccctccctctctgggcctgtgcagtgagcatggggattcccatcaaggggcctggcacctgtgctagttacgtagccgctgctcacgcgctcactcctgaccacatgcacgttccctagatgcagactgctttgaactttaaagctgtacaatttggttatgtttgtgctgacttaaaatatattttaatgaggaaaaaataatggagaaccctgggaaggacctggttcttttgcttctcggggaactgtaagccctcgcgttctgggaatcgctctctgctgctctttcctggaagctaagcctgtctccaccgcccgaggcctgcgccggtggctcccgccgcagttgcgtttgctttggaccttgcgtgcgggggagggggtgctcggtccgagcccgctcctttctgtacacctagcgctgcccgccccgcttgtgtctgaggtcgtgtatgtcaaaaataaagccgctagaaacgg

SEQ ID NO: 159 - protein, 441 aa, Homosapiens
MCVCQTMEVGQYGKNASRAGDRGVLLEPFIHQVGGHSSMMRYDDHTVCKPLISREQRFYESLPPEMKEFTPEYKGVVSVCFEGDSDGYINLVAYPYVESETVEQDDTTEREQPRRKHSRRSLHRSGSGSDHKEEKASLSLETSESSQEAKSPKVELHSHSEVPFQMLDGNSGLSSEKISHNPWSLRCHKQQLSRMRSESKDRKLYKFLLLENVVHHFKYPCVLDLKMGTRQHGDDASAEKAARQMRKCEQSTSATLGVRVCGMQVYQLDTGHYLCRNKYYGRGLSIEGFRNALYQYLHNGLDLRRDLFEPILSKLRGLKAVLERQASYRFYSSSLLVIYDGKECRAESCLDRRSEMRLKHLDMVLPEVASSCGPSTSPSNTSPEAGPSSQPKVDVRMIDFAHSTFKGFRDDPTVHDGPDRGYVFGLENLISIMEQMRDENQ

SEQ ID NO: 160 - DNA, 1188 bp, Homosapiens
gctgtctgtgtcttcaggtcatcatggtgctgctcaggctcctcgtgttcctctttgctccggtggtctctgacctctgcagcctgccctgctttataaatgtctctgagagccagggccctggcacagtccttcagtttttatccttcaactgctcctcctacacgcccacacccaccctggagttgctcaatgtccagccacccaccaccttcttcaacccacccagcttggccaggtggcaagggacctatgtgggcaagttgaccttgagcagctctgctcagttggatgccctgatggtgaaccactacaaggtgcagctgaagttcacatgtggcaaccatgtgatggagggctcactctctgtggatgtgcagcgggaccttagccatatccagtgtgctggtcaatttgccagcccaggtgaggccaggggcagccggcagggtgggggcaggcatggcctgagcagatcctccctgacctccactctggccagctggggaaatgattcaggtgccagagacagtcacacctggggctcggctgtacactctgctcctcccaggcctagaactccacggagcgcaggtaagcccagaacatgggacggtgggtgacaggatgggggtggggggatggagagaataaattaacccccacctggccaggcacagcctgaagaggaaccttgcagcagaggcatagatgagcctctacatgatgtatgttcttggagagagctgctgagggctgctcactccccagtgaccatggctgttcccacagggacatctcaggggctgagttcttttttttttttttttttgagacggagtcttgctctgtcgtccaggctggagtgcagtggcgcggtctcggctcactgcaggctccacctcccgggttcgtgccattctcctgcctcagcctcccgagtggctgggactgcaggcgcccgccaccgcgcccggctaatttttttgtattttgtagtggagacggggtttcgccgtgttggccaggatggtctcgatctcctgacctcgtgatctccccacctcggcctcccaaagtgctgggattgcaggcgtgagccaccgctcccagccaggggctgagttctttcaagatctgctatgtgttctcagttctttatgacaattctgtatcatttctgtaatc

SEQ ID NO: 161 - protein, 199 aa, Homosapiens
MVLLRLLVFLFAPVVSDLCSLPCFINVSESQGPGTVLQFLSFNCSSYTPTPTLELLNVQPPTTFFNPPSLARWQGTYVGKLTLSSSAQLDALMVNHYKVQLKFTCGNHVMEGSLSVDVQRDLSHIQCAGQFASPGEARGSRQGGGRHGLSRSSLTSTLASWGNDSGARDSHTWGSAVHSAPPRPRTPRSAGKPRTWDGG

SEQ ID NO: 162 - DNA, 1058 bp, Homosapiens
gggagctacggagagcgaggagtcgcgcaggcaggcggaggctgagggcgccgctggccggccctcccagccctctccgcgcggctccgccggggttccaagaggagctagtaggttcggtgggggccctggcatggacatgcacagcgctcggcttgacagcttccttagccagctccgctgggaactgttgtgtggtcgggacacaggctcaccctcaatgcctggtcccctgcagccaacctcccaaactggcccagatgtgcagcccagccaccagcttagggcctcgggtgccttggaagaggactcagtctgctgtgtggaggaggaggaagaggaggaggaggaagcagtggtgacagaagacagggatgcagccttgggaggccccagggagcatgccctggactgggactctggcttctcggaggtgtcaggcagcacatggcgagaggaagaactgcctgtatcccagcgcccagcaccctcagcacagccccttcgtaggcagtgcctctcagtcagtggcctccccatgcccagcagggcccctgtagccagtgtaccacctgtccaccatccacggcccaagtccaccccagacgcctgcctggagcactggcagggactggaagcagaggactggacagcagccctactgaacaggggtcgcagtcgccagcccctggtactaggggacaattgctttgctgacttggtgcacaactggatggagctgcctgagacagggagtgaagggggtgacggaggtgggcaccgtgcccgtgctcggccccctcagttcctgcttggcctctctgagcagcttcggcgccggctggccagggctcggcggacagctatggcaggaaagcggctgtcatgcccacctcgcccagaacctgaactgcctgcggatgtctcacgctttgcagctctcatgagctgtcgtagccgccagcccatcatctgcaatgatgtcagctacctctgaccctgccctccagcctgggacaataaaagccttttttctagacaaaaaaaaaaaaaaaaaa

SEQ ID NO: 163 - protein, 287 aa, Homosapiens
MDMHSARLDSFLSQLRWELLCGRDTGSPSMPGPLQPTSQTGPDVQPSHQLRASGALEEDSVCCVEEEEEEEEEAVVTEDRDAALGGPREHALDWDSGFSEVSGSTWREEELPVSQRPAPSAQPLRRQCLSVSGLPMPSRAPVASVPPVHHPRPKSTPDACLEHWQGLEAEDWTAALLNRGRSRQPLVLGDNCFADLVHNWMELPETGSEGGDGGGHRARARPPQFLLGLSEQLRRRLARARRTAMAGKRLSCPPRPEPELPADVSRFAALMSCRSRQPIICNDVSYL

SEQ ID NO: 164 - DNA, 3330 bp, Homosapiens
cttttcttttctccaggaagagagctgtgaccagcagcgtcccttattcgcttggccttggttcctgtttgcactggctacagcagggcactggcccctactgtcaccgccacctacacaaagaccctatctctgagcgctgcagcctactgttcagccccaggtttgaggatggatgccctggacgcttcgaagctactggatgaggagctgtattcaagacagctgtatgtgctgggctcacctgccatgcagaggattcagggagccagggtcctggtgtcaggcctgcagggcctgggggccgaggtggccaagaacttggttctgatgggtgtgggcagcctcactctgcatgatccccaccccacctgctggtccgacctggctgcccagtttctcctctcagagcaggacttggaaaggagcagagccgaggcctctcaagagctcttggctcagctcaacagagctgtccaggtcgtcgtgcacacgggtgacatcactgaggacctgctgttggacttccaggtggtggtgctgactgctgcaaagctggaggagcagctgaaggtgggcaccttgtgtcataagcatggagtttgctttctggcggctgacacccggggcctcgtggggcagttgttctgtgactttggtgaggacttcactgtgcaggaccccacagaggcagaacccctgacagctgccatccagcacatctcccagggctcccctggcattctcactctgaggaaaggggccaatacccactacttccgtgatggagacttggtgactttctcgggaattgagggaatggttgagctcaacgactgtgatccccggtctatccacgtgcgggaggatgggtccctggagattggagacacaacaactttctctcggtacttgcgtggtggggctatcactgaagtcaagagacccaagactgtgagacataagtccctggacacagccctgctccagccccatgtggtggcccagagctcccaggaagttcaccatgcccactgcctgcatcaggccttctgtgcactgcacaagttccagcacctccatggccggccaccccagccctgggatcctgttgatgcagagactgtggtgggcctggcccgggacctggaaccactgaagcggacagaggaagagccactggaagagccactggatgaggccctagtgcggacagtcgccctaagcagtgcaggtgtcttgagccctatggtggccatgctgggtgcagtagctgcccaggaagtgctgaaggcaatctccaggaagttcatgcctctggaccagtggctttactttgatgccctcgattgtcttccggaagatggggagctccttcccagtcctgaggactgtgccctgagaggcagccgctatgatgggcaaattgcagtgtttggggctggttttcaggagaaactgagacgccagcactacctcctggtgggcgctggtgccattggttgtgagctgctcaaagtctttgccctagtgggactgggggccgggaacagcgggggcttgactgttgttgacatggaccacatagagcgctccaatctcagccgtcagttcctcttcaggtcccaggacgttggtagacccaaggcagaggtggctgcagcagctgcccggggcctgaacccagacttacaggtgatcccgctcacctacccactggatcccaccacagagcacatctatggggataactttttctcccgtgtggatggtgtggctgctgccctggacagtttccaggcccggcgctatgtggctgctcgttgcacccactatctgaagccactgctggaggcaggcacatcgggcacctggggcagtgctacagtattcatgccacatgtgactgaggcctacagagcccctgcctcagctgcagcttctgaggatgccccctaccctgtctgtaccgtgcggtacttccctagcacagccgagcacaccctgcagtgggcccggcatgagtttgaagaactcttccgactgtctgcagagaccatcaaccaccaccaacaggcacacacttccctggcagacatggatgagccacagacactcaccttactgaagccagtgcttggggtcctgagagtgcgtccacagaactggcaagactgtgtggcgtgggctcttggccactggaaactctgctttcattatggcatcaaacagctgctgaggcacttcccacctaataaagtgcttgaggatggaactcccttctggtcaggtcccaaacagtgtccccagcccttggagtttgacaccaaccaagacacacacctcctctacgtactggcagctgccaacctgtatgcccagatgcatgggctgcctggctcacaggactggactgcactcagggagctgctgaagctgctgccacagcctgacccccaacagatggcccccatctttgctagtaatctagagctggcttcggcttctgctgagtttggccctgagcagcagaaggaactgaacaaagccctggaagtctggagtgtgggccctcccctgaagcctctgatgtttgagaaggatgatgacagcaacttccatgtggactttgtggtagcggcagctagcctgagatgtcagaactacgggattccaccggtcaaccgtgcccagagcaagcgaattgtgggccagattatcccagccattgccaccactacagcagctgtggcaggcctgttgggcctggagctgtataaggtggtgagtgggccacggcctcgtagtgcctttcgccacagctacctacatctggctgaaaactacctcatccgctatatgccttttgccccagccatccagacgttccatcacctgaagtggacctcttgggaccgtctgaaggtaccagctgggcagcctgagaggaccctggagtcgctgctggctcatcttcaggagcagcacgggttgagggtgaggatcctgctgcacggctcagccctgctctatgcggccggatggtcacctgaaaagcaggcccagcacctgcccctcagggtgacagaactggttcagcagctgacaggccaggcacctgctcctgggcagcgggtgttggtgctagagctgagctgtgagggtgacgacgaggacactgccttcccacctctgcactatgagctgtgacaaggcagccaccctgtcacctagctcaatggagccccggatcccaagccctgcattgtaagcccacagtaggcactcaataaatgcttgttaaaggaaggcaaaaaaaaaaaaaaaaaa

SEQ ID NO: 165 - protein, 1012 aa, Homosapiens
MDALDASKLLDEELYSRQLYVLGSPAMQRIQGARVLVSGLQGLGAEVAKNLVLMGVGSLTLHDPHPTCWSDLAAQFLLSEQDLERSRAEASQELLAQLNRAVQVVVHTGDITEDLLLDFQVVVLTAAKLEEQLKVGTLCHKHGVCFLAADTRGLVGQLFCDFGEDFTVQDPTEAEPLTAAIQHISQGSPGILTLRKGANTHYFRDGDLVTFSGIEGMVELNDCDPRSIHVREDGSLEIGDTTTFSRYLRGGAITEVKRPKTVRHKSLDTALLQPHVVAQSSQEVHHAHCLHQAFCALHKFQHLHGRPPQPWDPVDAETVVGLARDLEPLKRTEEEPLEEPLDEALVRTVALSSAGVLSPMVAMLGAVAAQEVLKAISRKFMPLDQWLYFDALDCLPEDGELLPSPEDCALRGSRYDGQIAVFGAGFQEKLRRQHYLLVGAGAIGCELLKVFALVGLGAGNSGGLTVVDMDHIERSNLSRQFLFRSQDVGRPKAEVAAAAARGLNPDLQVIPLTYPLDPTTEHIYGDNFFSRVDGVAAALDSFQARRYVAARCTHYLKPLLEAGTSGTWGSATVFMPHVTEAYRAPASAAASEDAPYPVCTVRYFPSTAEHTLQWARHEFEELFRLSAETINHHQQAHTSLADMDEPQTLTLLKPVLGVLRVRPQNWQDCVAWALGHWKLCFHYGIKQLLRHFPPNKVLEDGTPFWSGPKQCPQPLEFDTNQDTHLLYVLAAANLYAQMHGLPGSQDWTALRELLKLLPQPDPQQMAPIFASNLELASASAEFGPEQQKELNKALEVWSVGPPLKPLMFEKDDDSNFHVDFVVAAASLRCQNYGIPPVNRAQSKRIVGQIIPAIATTTAAVAGLLGLELYKVVSGPRPRSAFRHSYLHLAENYLIRYMPFAPAIQTFHHLKWTSWDRLKVPAGQPERTLESLLAHLQEQHGLRVRILLHGSALLYAAGWSPEKQAQHLPLRVTELVQQLTGQAPAPGQRVLVLELSCEGDDEDTAFPPLHYEL

SEQ ID NO: 166 - DNA, 2042 bp, Homosapiens
gtgctgcggagccaaatttgaagcaagcggaggcgcgggggcgcgtctacgaagccggacctgtagcagtttctttggctgcctgggccccttgagtccagccatcatgcctatccgtgctctgtgcactatctgctccgacttcttcgatcactcccgcgacgtggccgccatccactgcggccacaccttccacttgcagtgcctaattcagtggtttgagacagcaccaagtcggacctgcccacagtgccgaatccaggttggcaaaagaaccattatcaataagctcttctttgatcttgcccaggaggaggagaatgtcttggatgcagaattcttaaagaatgaactggacaatgtcagagcccagctttcccagaaagacaaggagaaacgagacagccaggtcatcatcgacactctgcgggatacgctggaagaacgcaatgctactgtggtatctctgcagcaggccttgggcaaggccgagatgctgtgctccacactgaaaaagcagatgaagtacttagagcagcagcaggatgagaccaaacaagcacaagaggaggcccgccggctcaggagcaagatgaagaccatggagcagattgagcttctactccagagccagcgccctgaggtggaggagatgatccgagacatgggtgtgggacagtcagcggtggaacagctggctgtgtactgtgtgtctctcaagaaagagtacgagaatctaaaagaggcacggaaggcctcaggggaggtggctgacaagctgaggaaggatttgttttcctccagaagcaagttgcagacagtctactctgaattggatcaggccaagttagaactgaagtcagcccagaaggacttacagagtgctgacaaggaaatcatgagcctgaaaaagaagctaacgatgctgcaggaaaccttgaacctgccaccagtggccagtgagactgtcgaccgcctggttttagagagcccagcccctgtggaggtgaatctgaagctccgccggccatccttccgtgatgatattgatctcaatgctacctttgatgtggatactcccccagcccggccctccagctcccagcatggttactacgaaaaactttgcctagagaagtcacactccccaattcaggatgtccccaagaagatatgcaaaggccccaggaaggagtcccagctctcactgggtggccagagctgtgcaggagagccagatgaggaactggttggtgccttccctatttttgtccggaatgccatcctaggccagaaacagcccaagaggcccaggtcagagtcctcttgcagcaaagatgtggtaaggacaggcttcgatgggctcggtggccggacaaaattcatccagcctactgacacagtcatgatccgcccattgcctgttaagcccaagaccaaggttaagcagagggtgagggtgaagacagtgccttctctcttccaggccaagctggacaccttcctgtggtcgtgagaacagtgagtctgaccaatggccagacacatgcctgcaacttgtaggtcaaggactgtccaggcaggggttttgtggacagagccccactttcgggaccagcctgaggtgtaagggcagacaaacaggtgagggtgagtgtggcacccagagactgctcttcctgccctcaccctgccccactcctacgactgggagctgacatgaccagcccactgatcctgtcagcaggtcctgctcctgttgccaggctcctgtttatagccatgatcagatgtggtcagactctttctgggcctggagaccacggtcacttgttgactgtctctgtggaccagagtgcttgaggcatctcaggcagcctcagcccaagcttctacctgcctttgacttgcttctaggcatagcctgggccaagcagggtggggaatggaggatagcatgggatgtatggagaggatggaagattttcatgtaaaataaaattaaaaaaaaaaaacaatctcttaaaaaaaaaaaaaaaaaa

SEQ ID NO: 167 - protein, 469 aa, Homosapiens
MPIRALCTICSDFFDHSRDVAAIHCGHTFHLQCLIQWFETAPSRTCPQCRIQVGKRTIINKLFFDLAQEEENVLDAEFLKNELDNVRAQLSQKDKEKRDSQVIIDTLRDTLEERNATVVSLQQALGKAEMLCSTLKKQMKYLEQQQDETKQAQEEARRLRSKMKTMEQIELLLQSQRPEVEEMIRDMGVGQSAVEQLAVYCVSLKKEYENLKEARKASGEVADKLRKDLFSSRSKLQTVYSELDQAKLELKSAQKDLQSADKEIMSLKKKLTMLQETLNLPPVASETVDRLVLESPAPVEVNLKLRRPSFRDDIDLNATFDVDTPPARPSSSQHGYYEKLCLEKSHSPIQDVPKKICKGPRKESQLSLGGQSCAGEPDEELVGAFPIFVRNAILGQKQPKRPRSESSCSKDVVRTGFDGLGGRTKFIQPTDTVMIRPLPVKPKTKVKQRVRVKTVPSLFQAKLDTFLWS

SEQ ID NO: 168 - DNA, 3028 bp, Homosapiens
gtgcgaatccggtgccggcaagcggctggcgatgctggaggttcgctagccgaagcggctgcatctggcgccgcgtctgccccgcgtgctcggagcggattctgcccgccgtccccggagccctcggcgccccgctgagcccgcgatcacttcctccctgtgaccaaccggcgctgcaggttagagcctggcaatgccgtttgggtgtgtgactctgggcgacaagaagaactataaccagccatcggaggtgactgacagatatgatttgggacaggtcatcaagactgaggagttttgtgaaatcttccgggccaaggacaagacgacaggcaagctgcacacctgcaagaagttccagaagcgggacggccgcaaggtgcggaaagctgccaagaacgagataggcatcctcaagatggtgaagcatcccaacatcctacagctggtggatgtgtttgtgacccgcaaggagtactttatcttcctggagctggccacggggagggaggtgtttgactggatcctggaccagggctactactcggagcgagacacaagcaacgtggtacggcaagtcctggaggccgtggcctatttgcactcactcaagatcgtgcacaggaatctcaagctggagaacctggtttactacaaccggctgaagaactcgaagattgtcatcagtgacttccatctggctaagctagaaaatggcctcatcaaggagccctgtgggacccccgagtatctggccccagaggtggtaggccggcagcggtatggacgccctgtggactgctgggccattggagtcatcatgtacatcctgctttcaggcaatccacctttctatgaggaggtggaagaagatgattatgagaaccatgataagaatctcttccgcaagatcctggctggtgactatgagtttgactctccatattgggatgatatttcgcaggcagccaaagacctggtcacaaggctgatggaggtggagcaagaccagcggatcactgcagaagaggccatctcccatgagtggatttctggcaatgctgcttctgataagaacatcaaggatggtgtctgtgcccagattgaaaagaactttgccagggccaagtggaagaaggctgtccgagtgaccaccctcatgaaacggctccgggcaccagagcagtccagcacggctgcagcccagtcggcctcagccacagacactgccacccccggggctgcaggtggggccacagctgcagctgcgagtggagctacctcagcccctgagggtgatgctgctcgtgctgcaaagagtgataatgtggcccccgcagaccgtagtgccaccccagccacagatggaagtgccaccccagccactgatggcagtgtcaccccagccaccgatggaagcatcactccagccactgatgggagtgtcaccccagccactgacaggagcgctactccagccactgatgggagagccacaccagccacagaagagagcactgtgcccaccacccaaagcagtgccatgctggccaccaaggcagctgccacccctgagccggctatggcccagccggacagcacagccccagagggcgccacaggccaggctccaccctctagtaaaggggaagaggctgctggttatgcccaggagtctcaaagggaggaggccagctgagtaggcagcctggtgagggggggcaggggatgggcaggagggtgggagagtggatgaggggcttctcactgtacatagagtcactggcatgatgccctcgctcccccatgcccccacatcccagtggggcataactaggggtcacgggagagcagtctcgtctcctgtgtgtatgtgtgtgagtggtgggcaggccagtggcagggccggccccagcccctgcatggattccttgtggcttttctgtcttttgctagcttcaccagtttctgttccttgtgggatgctgctctagggatactcagggggctcctgctctccttccccttcccttcttgcctcaccattcccctaggcaggccctgcaggtcccacactctcccaggccctaaacttgggcggccttgccctgagagctggtcctccagcgaggccctgtcagcggtcttaggctcctgcacatgaaggtgtgtgcctgtggtgtgtgggctgctctaggagcagatacaggctggtatagaggatgcagaaaggtagggcagtatgtttaagtccagacttggcacatggctagggatactgctcactagctgtggaggtcctcaggagtggagagaatgagtaggagggcagaagcttccatttttgtccttcctaagaccctgttatttgtgttatttcctgcctttccgagtcctgcagtgggctgccctgtaccctgaacctcatgagcctctaagggaaaggaggaacaattaggacgtggcaatgagacctggcagggcagagtacaagcccagcacccagtgtcccagccttactgggtccttaccctgggccaaacagggagggctgatacctccttgctcttcctagatgcccacctcctacaatctcagcccacaagtcctctccaccctagggggcttgctgcatggcaataactcataatctgatttggaggtttgccctttacaggggcagattttctgctcagttcaacaatgaaatgaagaggaactccctctttctacagctcacttctatcagaggcccaggtgcctcagagccacattgagttgctttttctgggatgaggaagtagggttaaactccccagtttcctgagggaggctcctgacaggtgccctttgtcagaccctaccacagcctggataggcagccacattggtcctcgcccttgctcggcactccgtggtggtcctgcccttctccctgcatgcctgtgggtctgctctggtgtgtgaaggtcggtgggttaactgtgtgcctactgaacctggcaaataaacatcaccctgcaaagcc

SEQ ID NO: 169 - protein, 501 aa, Homosapiens
MPFGCVTLGDKKNYNQPSEVTDRYDLGQVIKTEEFCEIFRAKDKTTGKLHTCKKFQKRDGRKVRKAAKNEIGILKMVKHPNILQLVDVFVTRKEYFIFLELATGREVFDWILDQGYYSERDTSNVVRQVLEAVAYLHSLKIVHRNLKLENLVYYNRLKNSKIVISDFHLAKLENGLIKEPCGTPEYLAPEVVGRQRYGRPVDCWAIGVIMYILLSGNPPFYEEVEEDDYENHDKNLFRKILAGDYEFDSPYWDDISQAAKDLVTRLMEVEQDQRITAEEAISHEWISGNAASDKNIKDGVCAQIEKNFARAKWKKAVRVTTLMKRLRAPEQSSTAAAQSASATDTATPGAAGGATAAAASGATSAPEGDAARAAKSDNVAPADRSATPATDGSATPATDGSVTPATDGSITPATDGSVTPATDRSATPATDGRATPATEESTVPTTQSSAMLATKAAATPEPAMAQPDSTAPEGATGQAPPSSKGEEAAGYAQESQREEAS

SEQ ID NO: 170 - DNA, 4541 bp, Homosapiens
ggatcctctagggtcccagctcgcctcgatggagctcctcccgccgctgcctcagtccttcctgttgctgctgctgttgcctgccaagcccgcggcgggcgaggactggcagtgcccgcgcaccccctacgcggcctctcgcgactttgacgtgaagtacgtggtgcccagcttctccgccggaggcctggtacaggccatggtgacctacgagggcgacagaaatgagagtgctgtgtttgtagccatacgcaatcgcctgcatgtgcttgggcctgacctgaagtctgtccagagcctggccacgggccctgctggagaccctggctgccagacgtgtgcagcctgtggcccaggaccccacggccctcccggtgacacagacacaaaggtgctggtgctggatcccgcgctgcctgcgctggtcagttgtggctccagcctgcagggccgctgcttcctgcatgacctagagccccaagggacagccgtgcatctggcagcgccagcctgcctcttctcagcccaccataaccggcccgatgactgccccgactgtgtggccagcccattgggcacccgtgtaactgtggttgagcaaggccaggcctcctatttctacgtggcatcctcactggacgcagccgtggctggcagcttcagcccacgctcagtgtctatcaggcgtctcaaggctgacgcctcgggattcgcaccgggctttgtggcgttgtcagtgctgcccaagcatcttgtctcctacagtattgaatacgtgcacagcttccacacgggagccttcgtatacttcctgactgtacagccggccagcgtgacagatgatcctagtgccctgcacacacgcctggcacggcttagcgccactgagccagagttgggtgactatcgggagctggtcctcgactgcagatttgctccaaaacgcaggcgccggggggccccagaaggcggacagccctaccctgtgctgcaggtggcccactccgctccagtgggtgcccaacttgccactgagctgagcatcgccgagggccaggaagtactatttggggtctttgtgactggcaaggatggtggtcctggcgtgggccccaactctgtcgtctgtgccttccccattgacctgctggacacactaattgatgagggtgtggagcgctgttgtgaatccccagtccatccaggcctccggcgaggcctcgacttcttccagtcgcccagtttttgccccaacccgcctggcctggaagccctcagccccaacaccagctgccgccacttccctctgctggtcagtagcagcttctcacgtgtggacctattcaatgggctgttgggaccagtacaggtcactgcattgtatgtgacacgccttgacaacgtcacagtggcacacatgggcacaatggatgggcgtatcctgcaggtggagctggtcaggtcactaaactacttgctgtatgtgtccaacttctcactgggtgacagtgggcagcccgtgcagcgggatgtcagtcgtcttggggaccacctactctttgcctctggggaccaggttttccaggtacctatccgaggccctggctgccgccacttcctgacctgtgggcgttgcctaagggcatggcatttcatgggctgtggctggtgtgggaacatgtgcggccagcagaaggagtgtcctggctcctggcaacaggaccactgcccacctaagcttactgagttccacccccacagtggacctctaaggggcagtacaaggctgaccctgtgtggctccaacttctaccttcacccttctggtctggtgcctgagggaacccatcaggtcactgtgggccaaagtccctgccggccactgcccaaggacagctcaaaactcagaccagtgccccggaaagactttgtagaggagtttgagtgtgaactggagcccttgggcacccaggcagtggggcctaccaacgtcagcctcaccgtgactaacatgccaccgggcaagcacttccgggtagacggcacctccgtgctgagaggcttctctttcatggagccagtgctgatagcagtgcaacccctctttggcccacgggcaggaggcacctgtctcactcttgaaggccagagtctgtctgtaggcaccagccgggctgtgctggtcaatgggactgagtgtctgctagcacgggtcagtgaggggcagcttttatgtgccacaccccctggggccacggtggccagtgtcccccttagcctgcaggtggggggtgcccaggtacctggttcctggaccttccagtacagagaagaccctgtcgtgctaagcatcagccccaactgtggctacatcaactcccacatcaccatctgtggccagcatctaacttcagcatggcacttagtgctgtcattccatgacgggcttagggcagtggaaagcaggtgtgagaggcagcttccagagcagcagctgtgccgccttcctgaatatgtggtccgagacccccagggatgggtggcagggaatctgagtgcccgaggggatggagctgctggctttacactgcctggctttcgcttcctacccccaccccatccacccagtgccaacctagttccactgaagcctgaggagcatgccattaagtttgagtatattgggctgggcgctgtggctgactgtgtgggtatcaacgtgaccgtgggtggtgagagctgccagcacgagttccggggggacatggttgtctgccccctgcccccatccctgcagcttggccaggatggtgccccattgcaggtctgcgtagatggtgaatgtcatatcctgggtagagtggtgcggccagggccagatggggtcccacagagcacgctccttggtatcctgctgcctttgctgctgcttgtggctgcactggcgactgcactggtcttcagctactggtggcggaggaagcagctagttcttcctcccaacctgaatgacctggcatccctggaccagactgctggagccacacccctgcctattctgtactcgggctctgactacagaagtggccttgcactccctgccattgatggtctggattccaccacttgtgtccatggagcatccttctccgatagtgaagatgaatcctgtgtgccactgctgcggaaagagtccatccagctaagggacctggactctgcgctcttggctgaggtcaaggatgtgctgattccccatgagcgggtggtcacccacagtgaccgagtcattggcaaaggccactttggagttgtctaccacggagaatacatagaccaggcccagaatcgaatccaatgtgccatcaagtcactaagtcgcatcacagagatgcagcaggtggaggccttcctgcgagaggggctgctcatgcgtggcctgaaccacccgaatgtgctggctctcattggtatcatgttgccacctgagggcctgccccatgtgctgctgccctatatgtgccacggtgacctgctccagttcatccgctcacctcagcggaaccccaccgtgaaggacctcatcagctttggcctgcaggtagcccgcggcatggagtacctggcagagcagaagtttgtgcacagggacctggctgcgcggaactgcatgctggacgagtcattcacagtcaaggtggctgactttggtttggcccgcgacatcctggacagggagtactatagtgttcaacagcatcgccacgctcgcctacctgtgaagtggatggcgctggagagcctgcagacctatagatttaccaccaagtctgatgtgtggtcatttggtgtgctgctgtgggaactgctgacacggggtgccccaccataccgccacattgacccttttgaccttacccacttcctggcccagggtcggcgcctgccccagcctgagtattgccctgattctctgtaccaagtgatgcagcaatgctgggaggcagacccagcagtgcgacccaccttcagagtactagtgggggaggtggagcagatagtgtctgcactgcttggggaccattatgtgcagctgccagcaacctacatgaacttgggccccagcacctcgcatgagatgaatgtgcgtccagaacagccgcagttctcacccatgccagggaatgtacgccggccccggccactctcagagcctcctcggcccacttgacttagttcttgggctggacctgcttagctgccttgagctaaccccaaggctgcctctgggccatgccaggccagagcagtggccctccaccttgttcctgccctttaactttcagaggcaataggtaaatgggcccattaggtccctcactccacagagtgagccagtgagggcagtcctgcaacatgtatttatggagtgcctgctgtggaccctgtcttctgggcacagtggactcagcagtgaccacaccaacactgacccttgaaccaataaaggaacaaatgactattaaagcacaaaaaaaaaa

SEQ ID NO: 171 - protein, 1400 aa, Homosapiens
MELLPPLPQSFLLLLLLPAKPAAGEDWQCPRTPYAASRDFDVKYVVPSFSAGGLVQAMVTYEGDRNESAVFVAIRNRLHVLGPDLKSVQSLATGPAGDPGCQTCAACGPGPHGPPGDTDTKVLVLDPALPALVSCGSSLQGRCFLHDLEPQGTAVHLAAPACLFSAHHNRPDDCPDCVASPLGTRVTVVEQGQASYFYVASSLDAAVAGSFSPRSVSIRRLKADASGFAPGFVALSVLPKHLVSYSIEYVHSFHTGAFVYFLTVQPASVTDDPSALHTRLARLSATEPELGDYRELVLDCRFAPKRRRRGAPEGGQPYPVLQVAHSAPVGAQLATELSIAEGQEVLFGVFVTGKDGGPGVGPNSVVCAFPIDLLDTLIDEGVERCCESPVHPGLRRGLDFFQSPSFCPNPPGLEALSPNTSCRHFPLLVSSSFSRVDLFNGLLGPVQVTALYVTRLDNVTVAHMGTMDGRILQVELVRSLNYLLYVSNFSLGDSGQPVQRDVSRLGDHLLFASGDQVFQVPIRGPGCRHFLTCGRCLRAWHFMGCGWCGNMCGQQKECPGSWQQDHCPPKLTEFHPHSGPLRGSTRLTLCGSNFYLHPSGLVPEGTHQVTVGQSPCRPLPKDSSKLRPVPRKDFVEEFECELEPLGTQAVGPTNVSLTVTNMPPGKHFRVDGTSVLRGFSFMEPVLIAVQPLFGPRAGGTCLTLEGQSLSVGTSRAVLVNGTECLLARVSEGQLLCATPPGATVASVPLSLQVGGAQVPGSWTFQYREDPVVLSISPNCGYINSHITICGQHLTSAWHLVLSFHDGLRAVESRCERQLPEQQLCRLPEYVVRDPQGWVAGNLSARGDGAAGFTLPGFRFLPPPHPPSANLVPLKPEEHAIKFEYIGLGAVADCVGINVTVGGESCQHEFRGDMVVCPLPPSLQLGQDGAPLQVCVDGECHILGRVVRPGPDGVPQSTLLGILLPLLLLVAALATALVFSYWWRRKQLVLPPNLNDLASLDQTAGATPLPILYSGSDYRSGLALPAIDGLDSTTCVHGASFSDSEDESCVPLLRKESIQLRDLDSALLAEVKDVLIPHERVVTHSDRVIGKGHFGVVYHGEYIDQAQNRIQCAIKSLSRITEMQQVEAFLREGLLMRGLNHPNVLALIGIMLPPEGLPHVLLPYMCHGDLLQFIRSPQRNPTVKDLISFGLQVARGMEYLAEQKFVHRDLAARNCMLDESFTVKVADFGLARDILDREYYSVQQHRHARLPVKWMALESLQTYRFTTKSDVWSFGVLLWELLTRGAPPYRHIDPFDLTHFLAQGRRLPQPEYCPDSLYQVMQQCWEADPAVRPTFRVLVGEVEQIVSALLGDHYVQLPATYMNLGPSTSHEMNVRPEQPQFSPMPGNVRRPRPLSEPPRPT

SEQ ID NO: 172 - DNA, 2054 bp, Homosapiens
gccggcgaaagctatcttcctgcaccggcggccgggtgagggcggtgggagggagcggtgcctgcgctgtggccatgtctgtgtacgcagggggccggggccccgcgaagctgtgccctcaggccggccccggccggacacccttacccctccatgggtccggcagagggcagtgaccggcaccttctgtgcgtcctggactcctctgagaaacaggagagctcaaaggatggctactgacatgcagaggaagagaagcagcgaatgccttgatggcacattgactccttctgatggacagagtatggagagagctgagagccccacaccaggaatggcccagggaatggagccaggtgcgggccaggagggtgccatgttcgtccatgcccgttcctacgaggacctgactgagtcagaggatggggcagcttctggggacagccacaaggagggtaccaggggtcccccgccgctgcctacagacatgcgccagatcagccaggactttagcgagctaagcacccagctgacgggtgtggcccgggacctgcaggaggagatgctgccaggaagctctgaggattggctggaacccccaggggcagttgggcgaccagccacagagccccccagggagggcacaaccgagggggatgaggaggatgccacggaggcatggcgcctgcaccagaagcatgtctttgtgctgagtgaggcagggaagcctgtgtactcccgctatgggtctgaggaggcactttccagcactatgggtgttatggtggccctggtgtccttcctggaggcagacaagaacgccatccgctccatccatgcagatggctacaaggtagtattcgtgcgccggagcccgctggtgctagtggcggtggctcgtacgcggcagtcggcacaagagctggcgcaggagctgctctacatctactaccagatcctaagccttcttaccggtgcgcagctgagccacatcttccagcagaagcagaactatgatttgcggcgcctactctcgggctcagagcgcatcaccgacaacctgctgcagctcatggcacgagaccccagcttcctgatgggggcggcacggtgcctgcccctggcggcggccgtgcgcgacactgtgagcgccagcctgcagcaggcgcgtgcgcgcagcctggtcttctccatcctgctggcccgcaaccagctcgtggcactcgtgcgccgaaaggaccaatttctgcaccccatcgacctgcacctgctcttcaacctcattagttcctcctcgtcctttcgcgagggcgaggcctggacgcccgtgtgcctgcccaaattcaacgcagccggcttcttccacgcacacatctcttacctagagcctgacactgacctctgcctgctgcttgtctccactgaccgtgaggacttctttgcagtctctgactgccgccgccgcttccaggagcgccttcgcaagcgcggagcccacctggccctgcgagaggcactgcgcacaccctactacagcgttgcccaagtgggcatccctgacctgcgtcacttcctctataagtcaaagagctcgggactcttcaccagccctgagattgaggccccatacaccagtgaagaggagcaggagcggctgctgggcctctaccagtacttgcacagtcgtgcccacaatgcctctcgcccactcaagaccatttactacacgggccccaacgagaacctcctggcctgggtgacaggcgcctttgagctctacatgtgttacagccccctggggaccaaggcgtcagccgtcagtgccatccataagctgatgcgctggatccgcaaagaggaagaccgcctcttcattctcacgcccctcacctattgatgggaatgtgtgcgggctcagccttcctggacacactaggtgtgggaagccataggagcctccagatgggggctggcctctcttgcccagccagcgggcagggactgtgggttggtgaatgcattaaagtgctttggggaaaaaaaaaaaaaaaaaa

SEQ ID NO: 173 - protein, 555 aa, Homosapiens
MATDMQRKRSSECLDGTLTPSDGQSMERAESPTPGMAQGMEPGAGQEGAMFVHARSYEDLTESEDGAASGDSHKEGTRGPPPLPTDMRQISQDFSELSTQLTGVARDLQEEMLPGSSEDWLEPPGAVGRPATEPPREGTTEGDEEDATEAWRLHQKHVFVLSEAGKPVYSRYGSEEALSSTMGVMVALVSFLEADKNAIRSIHADGYKVVFVRRSPLVLVAVARTRQSAQELAQELLYIYYQILSLLTGAQLSHIFQQKQNYDLRRLLSGSERITDNLLQLMARDPSFLMGAARCLPLAAAVRDTVSASLQQARARSLVFSILLARNQLVALVRRKDQFLHPIDLHLLFNLISSSSSFREGEAWTPVCLPKFNAAGFFHAHISYLEPDTDLCLLLVSTDREDFFAVSDCRRRFQERLRKRGAHLALREALRTPYYSVAQVGIPDLRHFLYKSKSSGLFTSPEIEAPYTSEEEQERLLGLYQYLHSRAHNASRPLKTIYYTGPNENLLAWVTGAFELYMCYSPLGTKASAVSAIHKLMRWIRKEEDRLFILTPLTY

SEQ ID NO: 174 - DNA, 3639 bp, Homosapiens
gcggcgctgggtcggtggcggaggctgaggagaaggaggagcgggccgtggaggcttcgccgcctaggtactgctataaccagaatttggtagaaaaaggatttacttgttggggccctcttgataaaaagagatgtggggggattctcgacctgctaacagaactggaccttttcgtgggagccaagaagaaaggtttgctcccgggtggaacagggattatcctcctcctccccttaagagtcatgctcaagagagacactctggcaactttcctggcagagattcacttccctttgatttccaggggcattcggggcctccttttgcaaatgtagaggagcattctttcagctatggagctagagacggaccgcatggtgactatcgaggaggggagggacctggacatgatttcagggggggagatttttcgtcttctgatttccagagcagagattcatcacagttggacttcaggggtagggacatacattctggggattttcgggatagagaaggaccacctatggactataggggtggagatggtacttctatggattatagaggtagggaggcacctcatatgaactacagagacagggatgctcacgctgttgacttcagaggtagggatgctcctccatctgacttcaggggccggggcacttatgatttagattttagaggccgggatggatcccatgcagattttaggggaagggatttatcagatttggattttagggccagagaacagtcccgttctgattttaggaatagagatgtatctgatttggactttagagacaaagacggaacacaagtagactttagaggccgaggttcaggtactactgatctagactttagggacagggatacgccacattcagatttcagaggtagacaccgatctaggactgatcaggattttaggggcagagagatgggatcttgtatggaatttaaagatagggagatgccccctgtggatccaaatattttggattacattcagccctctacacaagatagagaacattctggtatgaatgtgaacaggagagaagaatccacacatgaccatacgatagaaaggcctgcttttggcattcagaagggagaatttgagcattcagaaacaagagaaggagaaacacaaggtgtagcctttgaacatgagtctccagcagactttcagaacagccaaagtccagttcaagaccaagataagtcacagctttctggacgtgaagagcagagttcagatgctggtctgtttaaagaagaaggcggtctggactttcttgggcggcaagacaccgattacagaagcatggagtaccgtgatgtggatcataggctgccaggaagccagatgtttggctatggccagagcaagtcttttccagagggcaaaactgcccgagatgcccaacgggaccttcaggatcaagattataggaccggcccaagtgaggagaaacccagcaggcttattcgattaagtggggtacctgaagatgccacaaaagaagagattcttaatgcttttcggactcctgatggcatgcctgtaaagaacttgcagttgaaggagtataacacaggttacgactatggctatgtctgcgtggagttttcactcttggaagatgccatcggatgcatggaggccaaccagggaactctaatgatccaggacaaagaagttaccctggagtatgtatcaagcctggatttttggtactgcaaacgatgtaaggcaaacattggtgggcaccgatcttcctgttcattctgcaagaacccaagagaagtgacagaggccaagcaagaattaataacctaccctcagcctcagaaaacatccataccagcaccattggaaaaacagcccaaccagcccctaagaccagctgataaggaacctgaacccaggaagagggaagaaggccaagagtcacgcttaggacatcaaaagagagaagcagaaaggtatctgcctccttctcgaagggaagggccaactttccgaagagaccgagagagggagtcatggtctggagagacacgccaggatggagagagcaaaactatcatgctaaagcgtatctatcgttccacaccacctgaggtgatagtggaagtgctggagccctatgtccgccttactactgccaacgtccgtatcatcaagaacagaacaggccctatggggcatacctatggctttattgacctcgactcccatgcggaagctcttcgtgtggtgaagatcttacagaaccttgatccgccatttagcattgatgggaagatggtagctgtaaacctggccactggaaaacgaagaaatgattctggggaccattctgaccacatgcattactatcagggtaaaaaatatttccgagataggaggggaggtggcagaaattcagactggtcttcagatacaaatcgacaaggacaacagtcatcatctgactgctacatatatgattctgctactggctactattatgaccccttggcaggaacttattatgaccccaatacccagcaagaagtctatgtgccccaggatcctggattacctgaggaagaagagatcaaggaaaaaaaacccaccagtcaaggaaagtcaagtagcaagaaggaaatgtctaaaagagatggcaaggagaaaaaagacagaggagtgacgaggtttcaggaaaatgccagtgaagggaaggcccctgcagaagacgtctttaagaagcccctgcctcctactgtgaagaaggaagagagtccccctccacctaaagtggtaaacccactgatcggcctcttgggtgaatatggaggagacagtgactatgaggaggaagaagaggaggaacagacccctcccccacagccccgcacagcacagccccagaagcgagaggagcaaaccaagaaggagaatgaagaagacaaactcactgactggaataaactggcttgtctgctttgcagaaggcagtttcccaataaagaagttctgatcaaacaccagcagctgtcagacctgcacaagcaaaacctggaaatccaccggaagataaaacagtctgagcaggagctagcctatctggaaaggagagaacgagagggaaagtttaaaggaagaggaaatgatcgcagggaaaagctccagtcttttgactctccagaaaggaaacggattaagtactccagggaaactgacagtgatcgtaaacttgttgataaagaagatatcgacactagcagcaaaggaggctgtgtccaacaggctactggctggaggaaagggacaggcctgggatatggccatcctggattggcttcatcagaggaggctgaaggccggatgaggggccccagtgttggagcctcaggaagaaccagcaaaagacagtccaacgagacttatcgagatgctgttcgaagagtcatgtttgctcgatataaagaactcgattaagaaaggagacaagttccatgggatacaacctccctcttgttttgtttgtctctccttttcttttgttactgttcttgctgctagaacttttttaaataaactttttttcaatgtgaaaaaaaaaaaaaaaaaaa

SEQ ID NO: 175 - protein, 1123 aa, Homosapiens
MWGDSRPANRTGPFRGSQEERFAPGWNRDYPPPPLKSHAQERHSGNFPGRDSLPFDFQGHSGPPFANVEEHSFSYGARDGPHGDYRGGEGPGHDFRGGDFSSSDFQSRDSSQLDFRGRDIHSGDFRDREGPPMDYRGGDGTSMDYRGREAPHMNYRDRDAHAVDFRGRDAPPSDFRGRGTYDLDFRGRDGSHADFRGRDLSDLDFRAREQSRSDFRNRDVSDLDFRDKDGTQVDFRGRGSGTTDLDFRDRDTPHSDFRGRHRSRTDQDFRGREMGSCMEFKDREMPPVDPNILDYIQPSTQDREHSGMNVNRREESTHDHTIERPAFGIQKGEFEHSETREGETQGVAFEHESPADFQNSQSPVQDQDKSQLSGREEQSSDAGLFKEEGGLDFLGRQDTDYRSMEYRDVDHRLPGSQMFGYGQSKSFPEGKTARDAQRDLQDQDYRTGPSEEKPSRLIRLSGVPEDATKEEILNAFRTPDGMPVKNLQLKEYNTGYDYGYVCVEFSLLEDAIGCMEANQGTLMIQDKEVTLEYVSSLDFWYCKRCKANIGGHRSSCSFCKNPREVTEAKQELITYPQPQKTSIPAPLEKQPNQPLRPADKEPEPRKREEGQESRLGHQKREAERYLPPSRREGPTFRRDRERESWSGETRQDGESKTIMLKRIYRSTPPEVIVEVLEPYVRLTTANVRIIKNRTGPMGHTYGFIDLDSHAEALRVVKILQNLDPPFSIDGKMVAVNLATGKRRNDSGDHSDHMHYYQGKKYFRDRRGGGRNSDWSSDTNRQGQQSSSDCYIYDSATGYYYDPLAGTYYDPNTQQEVYVPQDPGLPEEEEIKEKKPTSQGKSSSKKEMSKRDGKEKKDRGVTRFQENASEGKAPAEDVFKKPLPPTVKKEESPPPPKVVNPLIGLLGEYGGDSDYEEEEEEEQTPPPQPRTAQPQKREEQTKKENEEDKLTDWNKLACLLCRRQFPNKEVLIKHQQLSDLHKQNLEIHRKIKQSEQELAYLERREREGKFKGRGNDRREKLQSFDSPERKRIKYSRETDSDRKLVDKEDIDTSSKGGCVQQATGWRKGTGLGYGHPGLASSEEAEGRMRGPSVGASGRTSKRQSNETYRDAVRRVMFARYKELD

SEQ ID NO: 176 - DNA, 3135 bp, Homosapiens
ggccgtcggcggaggcgccattttgtgtagccgccgaaccttgttggaggttctggggcgcagaaccgctactgctgcttcggtctctccttgggaaaaaataaaatttgaaccttttggagctgtgtgctaaatcttcagtgggacaatgggttcagacaaaagagtgagtagaacagagcgtagtggaagatacggttccatcatagacagggatgaccgtgatgagcgtgaatcccgaagcaggcggagggactcagattacaaaagatctagtgatgatcggaggggtgatagatatgatgactaccgagactatgacagtccagagagagagcgtgaaagaaggaacagtgaccgatccgaagatggctaccattcagatggtgactatggtgagcacgactataggcatgacatcagtgacgagagggagagcaagaccatcatgctgcgcggccttcccatcaccatcacagagagcgatattcgagaaatgatggagtccttcgaaggccctcagcctgcggatgtgaggctgatgaagaggaaaacaggtgtaagccgtggtttcgccttcgtggagttttatcacttgcaagatgctaccagctggatggaagccaatcagaaaaagttggtgattcaaggaaagcacattgcaatgcattatagcaatcccagacctaagtttgaagattggctttgtaacaagtgctgccttaacaatttcaggaaaagactaaaatgcttccgatgtggagcagacaagtttgactctgaacaggaagtgcctcctggaaccacagagtcggttcagtctgtggattactactgtgatacgatcattcttcggaacatagctccgcacactgtggtggattccatcatgacagcactgtctccttacgcgtctttagctgtcaataacatccgcctcataaaagacaaacagacccagcagaacagaggcttcgcatttgtgcagctgtcctctgcaatggatgcttctcagctgcttcagatattacagagtctccatcctcctttgaaaattgatggcaaaactattggggttgattttgcaaaaagtgccagaaaagacttggtcctctcagatggtaaccgcgtcagcgccttctctgtagctagtacggctattgctgctgctcagtggtcatccacccagtctcaaagtggtgaaggaggcagtgttgactacagttatctgcaaccaggtcaagatggctatgcccaatatgctcagtattcacaggattatcagcagttttatcaacaacaagctggaggattggaatctgatgcatcatctgcatcaggcacagcagtgaccaccacctcagcggctgtagtgtcccagagtcctcagctgtataatcaaacctccaatccacctggctctccgactgaggaagcacagcctagcactagcacaagtacacaggccccagccgcttcccctactggtgtagttcctggtaccaaatatgcagtacctgacacgtccacttaccagtatgatgaatcttcaggatattactatgatccgacaacagggctctattatgaccccaactcgcaatactactataattccttgacccagcagtacctttactgggatggggaaaaagagacctacgtgccagctgcagagtctagctcccaccagcagtcgggcctgcctcctgcaaaagaggggaaagagaagaaggagaaacccaagagcaaaacagcccagcagattgccaaagacatggaacgctgggctaagagtttgaataagcagaaagaaaactttaaaaatagctttcagcctgtcaattccttgagggaagaagaaaggagagaatctgctgcagcagacgctggctttgctctctttgagaagaagggagccttagctgaaaggcagcagctcatcccagaattggtgcgaaatggagatgaggagaatcccctcaaaaggggtctggttgctgcttacagtggtgacagtgacaatgaggaggagctggtggagagacttgagagtgaggaagagaagctagctgactggaagaagatggcctgtctgctctgccggcgccagttcccgaacaaagatgccctagtcaggcaccagcaactctcagaccttcacaagcaaaacatggacatctaccgacgatccaggctgagcgagcaggagctggaagccttggagctaagggagagagagatgaaataccgagaccgagctgcagaaagacgggagaagtacggcattccagaacctccagagcccaagcgcaagaagcagtttgatgccggcactgtgaattacgagcaacccaccaaagatggcattgaccacagtaacattggcaacaagatgctgcaggccatgggctggcgggaaggctctggcttgggacgaaagtgtcaaggcattacggctcccattgaggctcaagttcggctaaagggagctggcctaggagccaaaggcagcgcatatggtttgtcgggcgccgattcctacaaagatgctgtccggaaagccatgtttgcccggttcactgagatggagtgagagagagagagagagagagatgacaaggagcacaagaagtggtccatctcccgaattcgctgttaccgcctgtctctttaagggcatgccttgtgctgttaatagatcttagggtgaaccacttcattctgcagggttctccctcccaccttaaagaagttccccttatgtgggttgcctggtgaatggccttccttcccgccagagggcttgtgaacagaccggagaggacagtggattgtttatactccagtgtacatagtgtaatgtagcgtgtttacatgtgtagcctatgttgtggtccatcagcccctcacattcctaggggtttgagatgctgtaggtggtatgtgacaccaaagccacctctgtcatttgttgtgatgtcttttcttggcaaaagccttgtgtatatttgtatattacacatttgtacagaattttggaagattttcagtctagttgccaaatctggctcctttacaaaagaaataccttgagaaaaaaaaaaaaaaaaaaaaaaaaaaaaaaaaaaaaaa

SEQ ID NO: 177 - protein, 815 aa, Homosapiens
MGSDKRVSRTERSGRYGSIIDRDDRDERESRSRRRDSDYKRSSDDRRGDRYDDYRDYDSPERERERRNSDRSEDGYHSDGDYGEHDYRHDISDERESKTIMLRGLPITITESDIREMMESFEGPQPADVRLMKRKTGVSRGFAFVEFYHLQDATSWMEANQKKLVIQGKHIAMHYSNPRPKFEDWLCNKCCLNNFRKRLKCFRCGADKFDSEQEVPPGTTESVQSVDYYCDTIILRNIAPHTVVDSIMTALSPYASLAVNNIRLIKDKQTQQNRGFAFVQLSSAMDASQLLQILQSLHPPLKIDGKTIGVDFAKSARKDLVLSDGNRVSAFSVASTAIAAAQWSSTQSQSGEGGSVDYSYLQPGQDGYAQYAQYSQDYQQFYQQQAGGLESDASSASGTAVTTTSAAVVSQSPQLYNQTSNPPGSPTEEAQPSTSTSTQAPAASPTGVVPGTKYAVPDTSTYQYDESSGYYYDPTTGLYYDPNSQYYYNSLTQQYLYWDGEKETYVPAAESSSHQQSGLPPAKEGKEKKEKPKSKTAQQIAKDMERWAKSLNKQKENFKNSFQPVNSLREEERRESAAADAGFALFEKKGALAERQQLIPELVRNGDEENPLKRGLVAAYSGDSDNEEELVERLESEEEKLADWKKMACLLCRRQFPNKDALVRHQQLSDLHKQNMDIYRRSRLSEQELEALELREREMKYRDRAAERREKYGIPEPPEPKRKKQFDAGTVNYEQPTKDGIDHSNIGNKMLQAMGWREGSGLGRKCQGITAPIEAQVRLKGAGLGAKGSAYGLSGADSYKDAVRKAMFARFTEME

SEQ ID NO: 178 - DNA, 3540 bp, Homosapiens
ccgcggcgccgatcccggctgaggcgcagcggcgagaggtcgcgggcagggccatggccccggggggccgctagcgcggaccggcccaacgggagccgctccgtgccgccgccgccgcccgggcgcccaggccccgccgctgcggaagaggtttctagagagtggagcctgcttcctgggccctaggcccctcccacaatgcttgtcgccggtcttcttctctgggcttccctactgaccggggcctggccatccttccccacccaggaccacctcccggccacgccccgggtccggctctcattcaaagagctgaaggccacaggcaccgcccacttcttcaacttcctgctcaacacaaccgactaccgaatcttgctcaaggacgaggaccacgaccgcatgtacgtgggcagcaaggactacgtgctgtccctggacctgcacgacatcaaccgcgagcccctcattatacactgggcagcctccccacagcgcatcgaggaatgcgtgctctcaggcaaggatgtcaacggcgagtgtgggaacttcgtcaggctcatccagccctggaaccgaacacacctgtatgtgtgcgggacaggtgcctacaaccccatgtgcacctatgtgaaccgcggacgccgcgcccaggccacaccatggacccagactcaggcggtcagaggccgcggcagcagagccacggatggtgccctccgcccgatgcccacagccccacgccaggattacatcttctacctggagcctgagcgactcgagtcagggaagggcaagtgtccgtacgatcccaagctggacacagcatcggccctcatcaatgaggagctctatgctggtgtgtacatcgattttatgggcactgatgcagccatcttccgcacacttggaaagcagacagccatgcgcacggatcagtacaactcccggtggctgaacgacccgtcgttcatccatgctgagctcattcctgacagtgcggagcgcaatgatgataagctttacttcttcttccgtgagcggtcggcagaggcgccgcagagccccgcggtgtacgcccgcatcgggcgcatttgcctgaacgatgacggtggtcactgttgcctggtcaacaagtggagcacattcctgaaggcgcggctcgtctgctctgtcccgggcgaggatggcattgagactcactttgatgagctccaggacgtgtttgtccagcagacccaggacgtgaggaaccctgtcatttacgctgtctttacctcctctggctccgtgttccgaggctctgccgtgtgtgtctactccatggctgatattcgcatggtcttcaacgggccctttgcccacaaagaggggcccaactaccagtggatgcccttctcagggaagatgccctacccacggccgggcacgtgccctggtggaaccttcacgccatctatgaagtccaccaaggattatcctgatgaggtgatcaacttcatgcgcagccacccactcatgtaccaggccgtgtaccctctgcagcggcggcccctggtagtccgcacaggtgctccctaccgccttaccactattgccgtggaccaggtggatgcagccgacgggcgctatgaggtgcttttcctgggcacagaccgcgggacagtgcagaaggtcattgtgctgcccaaggatgaccaggagatggaggagctcatgctggaggaggtggaggtcttcaaggatccagcacccgtcaagaccatgaccatctcttctaagaggcaacaactctacgtggcgtcagccgtgggtgtcacacacctgagcctgcaccgctgccaggcgtatggggctgcctgtgctgactgctgccttgcccgggacccttactgtgcctgggatggccaggcctgctcccgctatacagcatcctccaagaggcggagccgccggcaggacgtccggcacggaaaccccatcaggcagtgccgtgggttcaactccaatgccaacaagaatgccgtggagtctgtgcagtatggcgtggccggcagcgcagccttccttgagtgccagccccgctcgccccaagccactgttaagtggctgttccagcgagatcctggtgaccggcgccgagagattcgtgcagaggaccgcttcctgcgcacagagcagggcttgttgctccgtgcactgcagctcagcgatcgtggcctctactcctgcacagccactgagaacaactttaagcacgtcgtcacacgagtgcagctgcatgtactgggccgggacgccgtccatgctgccctcttcccaccactgtccatgagcgccccgccacccccaggcgcaggccccccaacgcctccttaccaggagttagcccagctgctggcccagccagaagtgggcctcatccaccagtactgccagggttactggcgccatgtgccccccagccccagggaggctccaggggcaccccggtctcctgagccccaggaccagaaaaagccccggaaccgccggcaccaccctccggacacatgaggccagctgcctgtgcctgccatgggccagcctagcccttgtcccttttaatataaaagatatatatatatatatatatatatatataaaatatctatattctatacacaccctgcccctgcaaagacagtatttattggtgggttgaatatagcctgcctcagtggcagcatcctccaaaacttagacccatgctggtcagagacggcagaaaacagagcctgcctaaccaggcccagccagttggtggggccaggccaggaccacacagtccccagactcagctggaagtctacctgctggacagcctccgccaagatctacaggacaaagggagggagcaagccctactcggatggggcacggactgtccaccttttctgatgtgtgttgtcagcctgtgctgtggcatagacatggatgcgaggaccactttggagactggggtggcctcaagagcacacagagaagggaagaaggggccatcacaggatgccagcccctgcctgggttgggggcactcagccacgaccagccccttcctgggtatttattctctatttattggggataggagaagaggcatcctgcctgggtgggacagccccttcagccccttctcccctccccgcctggccagggcagggccaccccactctacctccttagctttccctgtgccactttgactcagaggctgggagcatagcagaggggccaggcccaggcagagctgacgggaggccccagctctgaggggagggggtccgtggtagaggcctggggccggtagaggctccccagggctcccttatgtccaccacttcaggggatgggtgtggatgtaattagctctggggggcagttgggtagatgggtgggggctcctggtggccttctgctgcccaggccacagccgcctttgggttccatcttgctaataaacactggctctgggactagaaaaaaaaaaaaaaaaaaaaa

SEQ ID NO: 179 - protein, 785 aa, Homosapiens
MLVAGLLLWASLLTGAWPSFPTQDHLPATPRVRLSFKELKATGTAHFFNFLLNTTDYRILLKDEDHDRMYVGSKDYVLSLDLHDINREPLIIHWAASPQRIEECVLSGKDVNGECGNFVRLIQPWNRTHLYVCGTGAYNPMCTYVNRGRRAQATPWTQTQAVRGRGSRATDGALRPMPTAPRQDYIFYLEPERLESGKGKCPYDPKLDTASALINEELYAGVYIDFMGTDAAIFRTLGKQTAMRTDQYNSRWLNDPSFIHAELIPDSAERNDDKLYFFFRERSAEAPQSPAVYARIGRICLNDDGGHCCLVNKWSTFLKARLVCSVPGEDGIETHFDELQDVFVQQTQDVRNPVIYAVFTSSGSVFRGSAVCVYSMADIRMVFNGPFAHKEGPNYQWMPFSGKMPYPRPGTCPGGTFTPSMKSTKDYPDEVINFMRSHPLMYQAVYPLQRRPLVVRTGAPYRLTTIAVDQVDAADGRYEVLFLGTDRGTVQKVIVLPKDDQEMEELMLEEVEVFKDPAPVKTMTISSKRQQLYVASAVGVTHLSLHRCQAYGAACADCCLARDPYCAWDGQACSRYTASSKRRSRRQDVRHGNPIRQCRGFNSNANKNAVESVQYGVAGSAAFLECQPRSPQATVKWLFQRDPGDRRREIRAEDRFLRTEQGLLLRALQLSDRGLYSCTATENNFKHVVTRVQLHVLGRDAVHAALFPPLSMSAPPPPGAGPPTPPYQELAQLLAQPEVGLIHQYCQGYWRHVPPSPREAPGAPRSPEPQDQKKPRNRRHHPPDT

SEQ ID NO: 180 - DNA, 1284 bp, Homosapiens
agttgattgcaggtcctcctggggccagaagggtgcctgggaggccaggttctggggatcccctccatccagaagaaccacctgctcactctgtcccttcgcctgctgctgggaccatgggggctggggccagtgctgaggagaagcactccagggagctggaaaagaagctgaaagaggacgctgagaaggatgctcgaaccgtgaagctgctgcttctgggtgccggtgagtccgggaagagcaccatcgtcaagcagatgaagattatccaccaggacgggtactcgctggaagagtgcctcgagtttatcgccatcatctacggcaacacgttgcagtccatcctggccatcgtacgcgccatgaccacactcaacatccagtacggagactctgcacgccaggacgacgcccggaagctgatgcacatggcagacactatcgaggagggcacgatgcccaaggagatgtcggacatcatccagcggctgtggaaggactccggtatccaggcctgttttgagcgcgcctcggagtaccagctcaacgactcggcgggctactacctctccgacctggagcgcctggtaaccccgggctacgtgcccaccgagcaggacgtgctgcgctcgcgagtcaagaccactggcatcatcgagacgcagttctccttcaaggatctcaacttccggatgttcgatgtgggcgggcagcgctcggagcgcaagaagtggatccactgcttcgagggcgtgacctgcatcatcttcatcgcggcgctgagcgcctacgacatggtgctagtggaggacgacgaagtgaaccgcatgcacgagagcctgcacctgttcaacagcatctgcaaccaccgctacttcgccacgacgtccatcgtgctcttccttaacaagaaggacgtcttcttcgagaagatcaagaaggcgcacctcagcatctgtttcccggactacgatggacccaacacctacgaggacgccggcaactacatcaaggtgcagttcctcgagctcaacatgcggcgcgacgtgaaggagatctattcccacatgacgtgcgccaccgacacgcagaacgtcaaatttgtcttcgacgctgtcaccgacatcatcatcaaggagaacctcaaagactgtggcctcttctgagccagggcctgtgctgcagtcggggacaaggagcttccgtctggcaaggccggggcacaatttgcactcccctcagctagacgcacagactcagcaataaacctttgcatcaggc

SEQ ID NO: 181 - protein, 350 aa, Homosapiens
MGAGASAEEKHSRELEKKLKEDAEKDARTVKLLLLGAGESGKSTIVKQMKIIHQDGYSLEECLEFIAIIYGNTLQSILAIVRAMTTLNIQYGDSARQDDARKLMHMADTIEEGTMPKEMSDIIQRLWKDSGIQACFERASEYQLNDSAGYYLSDLERLVTPGYVPTEQDVLRSRVKTTGIIETQFSFKDLNFRMFDVGGQRSERKKWIHCFEGVTCIIFIAALSAYDMVLVEDDEVNRMHESLHLFNSICNHRYFATTSIVLFLNKKDVFFEKIKKAHLSICFPDYDGPNTYEDAGNYIKVQFLELNMRRDVKEIYSHMTCATDTQNVKFVFDAVTDIIIKENLKDCGLF

SEQ ID NO: 182 - DNA, 2419 bp, Homosapiens
agttgattgcaggtcctcctggggccagaagggtgcctgggaggccaggttctggggatcccctccatccagaagaaccacctgctcactctgtcccttcgcctgctgctgggaccatgggggctggggccagtgctgaggagaagcactccagggagctggaaaagaagctgaaagaggacgctgagaaggatgctcgaaccgtgaagctgctgcttctgggtgccggtgagtccgggaagagcaccatcgtcaagcagatgaagattatccaccaggacgggtactcgctggaagagtgcctcgagtttatcgccatcatctacggcaacacgttgcagtccatcctggccatcgtacgcgccatgaccacactcaacatccagtacggagactctgcacgccaggacgacgcccggaagctgatgcacatggcagacactatcgaggagggcacgatgcccaaggagatgtcggacatcatccagcggctgtggaaggactccggtatccaggcctgttttgagcgcgcctcggagtaccagctcaacgactcggcgggctactacctctccgacctggagcgcctggtaaccccgggctacgtgcccaccgagcaggacgtgctgcgctcgcgagtcaagaccactggcatcatcgagacgcagttctccttcaaggatctcaacttccggatgttcgatgtgggcgggcagcgctcggagcgcaagaagtggatccactgcttcgagggcgtgacctgcatcatcttcatcgcggcgctgagcgcctacgacatggtgctagtggaggacgacgaagtgaaccgcatgcacgagagcctgcacctgttcaacagcatctgcaaccaccgctacttcgccacgacgtccatcgtgctcttccttaacaagaaggacgtcttcttcgagaagatcaagaaggcgcacctcagcatctgtttcccggactacgatggacccaacacctacgaggacgccggcaactacatcaaggtgcagttcctcgagctcaacatgcggcgcgacgtgaaggagatctattcccacatgacgtgcgccaccgacacgcagaacgtcaaatttgtcttcgacgctgtcaccgacatcatcatcaaggagaacctcaaagactgtggcctcttctgaggtgcctgaattcatgcgtgtcagtcaccctgagacctggtagccctagctgccttgcagccccaaaccccaggaccctatcagccccctgggactccctggccccaacctgccacctcaccaaagctctgagccctgctagccttgaggcgcggaccctcccccatacctcccacagtatcccagcgcctcatgcccccaaccccaagccctgcccttcaccgcccggctgcactggcctctaggactcacagcagccagccccagctaggaacgggcaggacttggggcagctgaagctcacggtgactcagcagtgcccaactgaccaatctcccgcagctctcctgcccctgggggcccacgactcacctggtgggcctgggctcagcaaacagccctccctcccagtatttcatcaaggacagggaatatccctcccacacacaggccagctgctcaccctgccacctccatgtgacaagtttgacacctgtctacccagagccagtgactgtccctcccagcagcctccaaagggtccaaagtccaagctagctctggcctgtgtggcccccacataaataaattagtggggagggggcagacctgggggcccttgggtgccagagtgagacacagcaggacccttccccaaatactaggctcagagcaacctccagccttctccagcaggatctgctccctgtgtccttggacagcagatccacacaccacttccccacccacacacagtaccctgggctggttggacaacaggatggtgtgttaaggggttaagggagggtactgttgacaccagctatggccaatagctgggctgtcctgaggggtggctggggacagagtccagctcccttggatcagcccagaggattcaggataggacaaaggccctggctgtgcccaaaagggtctacctcaggtggggttacaagcaaacctgggtgaccctcttgtccctaccagcagcttctcttgccccttccattcagggttccctggcaggggaagctgagagccatggctgaactatcagggacaaaggcccatgtccccacatccctgctccctccttcctcatccagcaccaaatctttgcttatgtccacaggccagggcctgtgctgcagtcggggacaaggagcttccgtctggcaaggccggggcacaatttgcactcccctcagctagacgcacagactcagcaataaacctttgcatcaggc

SEQ ID NO: 183 - protein, 350 aa, Homosapiens; identical to SEQ ID NO: 181

SEQ ID NO: 184 - DNA, 2559 bp, Homosapiens
cagccgagttcagccgggagcagagcgaaccgcaccggcccgagcggagcgccgcacgttcccaaccgcgaggccagacatctgactgttggtgtgagaccagtgctcctggtggtgtgccctgagccatggaggcgcctttgcagacagagatggtggagctggtgcccaatggcaaacactcagaggggctgctcccggtcatcacccccatggcaggcaaccagagggtcgaggaccctgcacggagctgtatggagggcaagagcttcctacagaaaagtcccagcaaggagccacacttcactgacttcgaggggaagacatcattcgggatgtcagtgttcaacctcagcaatgccatcatgggcagcggcatcctgggactcgcctatgccatggccaatacgggcattatccttttcctgttcctgttgacagctgtcgccttgctctccagctactccatccacctgctactcaagtcctcaggggtcgtgggcatccgtgcctatgagcagctgggctaccgtgcctttgggaccccaggaaagctggcagcagccctggccatcacgctccagaacatcggagccatgtccagctacctgtacatcatcaagtctgagctgccacttgtcatacagaccttcctgaacctggaggagaaaacctcggactggtacatgaacgggaactacctggtaatccttgtctctgtcaccatcattctgcccctggcactgatgcggcagcttggctacctgggctactccagcggcttctctcttagctgcatggtgttcttcctaattgcagtcatctacaaaaagttccacgtgccctgcccactgccccccaacttcaacaacaccacaggcaacttcagccacgtggagatcgtgaaggagaaggtgcagctgcaggtcgagcctgaggcttcagccttctgcactcccagctacttcacgctcaactcacagacagcatacaccatccccatcatggccttcgccttcgtctgccaccccgaggtgctgcccatctatactgagctcaaggacccctccaagaagaagatgcagcacatctccaacctgtccatcgctgtcatgtacatcatgtacttcctggctgccctcttcggctacctcaccttctacaacggggtggagtcggagctgctgcacacctacagcaaggtggacccgtttgacgtcctgatcctgtgtgtgcgcgtggccgtgctgacagcagtcacgctcacagtgcccatcgttctgttcccggtgcgccgcgccatccagcagatgctgtttccaaaccaggagttcagctggctgcggcatgtgcttattgccgttggcctgctcacttgtatcaacctgctggtcatctttgcccccaacatcctgggcatctttggggtcatcggtgccacatctgccccattcctcatcttcatcttccctgccatcttctacttccgaatcatgcccacggagaaggagcctgcaagatccacccccaaaatcctggccctgtgttttgctatgcttggcttcttgctgatgaccatgagcttgagcttcatcatcattgactgggcctcagggaccagccggcatggaggaaaccactagggtgaccctcatcctgttctgtctactcaccctagcagccctgcccagactcttcagcccctgctcccatccagtggccagtcgggggaggagaaagacgcgattaacactgtggcattcagccaggccccatgtcctctctgtggaaggtttttgttcaagagccaggaccaaggcccttgggccactaccctgctaggctctggagctgtagaggcttcctgaactgggagcagggtagggctgtcgccttagatcccgcccaagcccctcattccctccttgcacagatgcatacactggggcccagcagctgcctcctgaggtgacacagcctgtaggaacatacacagctgggatcagcctgcagccatcccccgaccctgctgctaggccacggtctgcgccctggggcctcatctcccccagcccacttgttttccccccttttattccctaggcccttttcagactcctgggcccttggatactcttctcccatctcccttcacaggatgacaccctcccataccccatagctggggccagcaggttctgctgagggtggggctggtgtagggacccccaagagacccctgtcctgtcccttcaccagtcctggggaggctgggactccccctgccacaagcctgggccacagctcacattccactgctgggagaagaaacaggccgaggcccagagtggcctgcccccgggagccaaagaccccagtggccacactgggatagggtggggaggctggcagccctcttttataaatattatacataaaaaaaaaaaaaaaaaaaaaaaaaaaaaaaaaaaaaaaaaaaaaaaaaaaaaaaaaaaaaaaaaaaaaaaaaaaaaaaaaaaaaaaaaaaaaaaaaaaaaaaaaaaaaaaaaaaaaaaaaaa

SEQ ID NO: 185 - protein, 504 aa, Homosapiens
MEAPLQTEMVELVPNGKHSEGLLPVITPMAGNQRVEDPARSCMEGKSFLQKSPSKEPHFTDFEGKTSFGMSVFNLSNAIMGSGILGLAYAMANTGIILFLFLLTAVALLSSYSIHLLLKSSGVVGIRAYEQLGYRAFGTPGKLAAALAITLQNIGAMSSYLYIIKSELPLVIQTFLNLEEKTSDWYMNGNYLVILVSVTIILPLALMRQLGYLGYSSGFSLSCMVFFLIAVIYKKFHVPCPLPPNFNNTTGNFSHVEIVKEKVQLQVEPEASAFCTPSYFTLNSQTAYTIPIMAFAFVCHPEVLPIYTELKDPSKKKMQHISNLSIAVMYIMYFLAALFGYLTFYNGVESELLHTYSKVDPFDVLILCVRVAVLTAVTLTVPIVLFPVRRAIQQMLFPNQEFSWLRHVLIAVGLLTCINLLVIFAPNILGIFGVIGATSAPFLIFIFPAIFYFRIMPTEKEPARSTPKILALCFAMLGFLLMTMSLSFIIIDWASGTSRHGGNH

SEQ ID NO: 186 - DNA, 2200 bp, Homosapiens
actgccgacccgagtgcttcccgcagagggctggtggtgggagcggagtgggtcgggcggggccgagccgggccgtgggccgtgtgggggccgggcggcggccgggccggcggacggcgggatgggctgcaccgtgagcgccgaggacaaggcggcggccgagcgctctaagatgatcgacaagaacctgcgggaggacggagagaaggcggcgcgggaggtgaagttgctgctgttgggtgctggggagtcagggaagagcaccatcgtcaagcagatgaagatcatccacgaggatggctactccgaggaggaatgccggcagtaccgggcggttgtctacagcaacaccatccagtccatcatggccattgtcaaagccatgggcaacctgcagatcgactttgccgacccctccagagcggacgacgccaggcagctatttgcactgtcctgcaccgccgaggagcaaggcgtgctccctgatgacctgtccggcgtcatccggaggctctgggctgaccatggtgtgcaggcctgctttggccgctcaagggaataccagctcaacgactcagctgcctactacctgaacgacctggagcgtattgcacagagtgactacatccccacacagcaagatgtgctacggacccgcgtaaagaccacggggatcgtggagacacacttcaccttcaaggacctacacttcaagatgtttgatgtgggtggtcagcggtctgagcggaagaagtggatccactgctttgagggcgtcacagccatcatcttctgcgtagccttgagcgcctatgacttggtgctagctgaggacgaggagatgaaccgcatgcatgagagcatgaagctattcgatagcatctgcaacaacaagtggttcacagacacgtccatcatcctcttcctcaacaagaaggacctgtttgaggagaagatcacacacagtcccctgaccatctgcttccctgagtacacaggggccaacaaatatgatgaggcagccagctacatccagagtaagtttgaggacctgaataagcgcaaagacaccaaggagatctacacgcacttcacgtgcgccaccgacaccaagaacgtgcagttcgtgtttgacgccgtcaccgatgtcatcatcaagaacaacctgaaggactgcggcctcttctgaggggcagcggggcctggcgggatgggccaccgccgactttgtaccccccaacccctgaggaagatgggggcaagaagatcacgctccccgcctgttcccccgccgcttttctcctctttcctctctttgttctcagctccccctgtcccctcagctccagacgtaggggaggggttgccacaggcctccctgtttgaagcctgcccttgtctgagatgctggtaatggccatggtacccccttctgggcatctgttctggtttttaaccattgtcttgttctgtgatgaggggaggggggcacatgctgagtctcccaaggctgcgtctggaggggcccctgcttctccagcctggacccccagctttgcccaacaccagcccctgccccagcccaagtccaaatgtttacagggagcctcctgcccagtcccccaaccccagccgctcggaggccccaaaggaaaaagcacaagaagcgtgagacgccaccattcctggaaaccacagtccacctgctcattctcgtagctttttaaaaaaatgaaagtaaaggaaaaaaaaaaaactgcaaatctagaaaactttttagagaaaaactatttaaaactgtcagatcctgaccagcaagcccccccccagccccccttccaagtgactccgtgccttgagtgtgtctgcgtgtttacacccgtccctctgctggccgcccccgtgcgagcggcacccctgccctgccctccacagaattgggttccaagggctgttccagacaactgccaacgtcactgagggccctgccccagcggccctggccccaggctctattaacctaaaatgtagctccctagcgctaacctaggaaccgccgctgcctgctggggggccacgcccctcatgcccttgtcccaggcccggggccttcagcgttgaacacttccttgcttttttcacatgttttatggaattgttcacctggtttgaaataataaaatgtagaaagaaaaaaaat

SEQ ID NO: 187 - protein, 355 aa, Homosapiens
MGCTVSAEDKAAAERSKMIDKNLREDGEKAAREVKLLLLGAGESGKSTIVKQMKIIHEDGYSEEECRQYRAVVYSNTIQSIMAIVKAMGNLQIDFADPSRADDARQLFALSCTAEEQGVLPDDLSGVIRRLWADHGVQACFGRSREYQLNDSAAYYLNDLERIAQSDYIPTQQDVLRTRVKTTGIVETHFTFKDLHFKMFDVGGQRSERKKWIHCFEGVTAIIFCVALSAYDLVLAEDEEMNRMHESMKLFDSICNNKWFTDTSIILFLNKKDLFEEKITHSPLTICFPEYTGANKYDEAASYIQSKFEDLNKRKDTKEIYTHFTCATDTKNVQFVFDAVTDVIIKNNLKDCGLF

SEQ ID NO: 188 - DNA, 2986 bp, Homosapiens
gggcgggggctgcttcttaaaggagccgtcagagggtccccagcggccccagggtgggaaggggccagagtggagagatgctgctgcggaagtcctcggtggagtgtgagaaggcagccagtgttggcctggaagacctctagaacctgagaagaggcagcgatcctggggcagagtccagggcagctcaaggctcctccacacacacacccgctgaaccctgagcaccctgagctgctgagatggggcgggccggggctgccgccgtgatcccgggcctggccctgctctgggcagtggggctggggagtgccgcccccagccccccacgccttcggctctccttccaagagctccaggcctggcatggtctccagactttcagcctggagcgaacctgctgctaccaggccttgctggtggatgaggagcgtggacgcctgtttgtgggtgccgagaaccatgtggcctccctcaacctggacaacatcagcaagcgggccaagaagctggcctggccggcccctgtggaatggcgagaggagtgcaactgggcagggaaggacattggtactgagtgcatgaacttcgtgaagttgctgcatgcctacaaccgcacccatttgctggcctgtggcacgggagccttccacccaacctgtgcctttgtggaagtgggccaccgggcagaggagcccgtcctccggctggacccaggaaggatagaggatggcaaggggaagagtccttatgaccccaggcatcgggctgcctccgtgctggtgggggaggagctatactcaggggtggcagcagacctcatgggacgagactttaccatctttcgcagcctagggcaacgtccaagtctccgaacagagccacacgactcccgctggctcaatgagcccaagtttgtcaaggtattttggatcccggagagcgagaacccagacgacgacaaaatctacttcttctttcgtgagacggcggtagaggcggcgccggcactgggacgcctgtccgtgtcccgcgttggccagatctgccggaacgacgtgggcggccagcgcagcctggtcaacaagtggacgacgttcctgaaggcgcggctggtgtgctcggtgcccggcgtcgagggcgacacccacttcgatcagctccaggatgtgtttctgttgtcctcgcgggaccaccggaccccgctgctctatgccgtcttctccacgtccagcatcttccagggctctgcggtgtgcgtgtacagcatgaacgacgtgcgccgggccttcttgggaccctttgcacacaaggaggggcccatgcaccagtgggtgtcataccagggtcgcgtcccctacccgcggccaggcatgtgccccagcaagacctttggcaccttcagttccaccaaggacttcccagacgatgtcatccagtttgcgcggaaccaccccctcatgtacaactctgtcctgcccactggggggcgccctcttttcctacaagttggagccaattacaccttcactcaaattgccgcggaccgggttgcagccgctgacggacactatgacgtcctcttcattggcacagacgttggcacggtgctgaaggtgatctcggtccccaagggcagtaggcccagcgcagaggggctgctcctggaggagctgcacgtgtttgaggactcggccgctgtcaccagcatgcaaatttcttccaagaggcaccagctgtacgtagcctcgcggagcgcggtggcccagatcgcgttgcaccgctgcgctgcccacggccgcgtctgcaccgaatgctgtctggcgcgtgacccctactgcgcctgggacggggtcgcgtgcacgcgcttccagcccagtgccaagaggcggttccggcggcaagacgtaaggaatggcgaccccagcacgttgtgctccggagactcgtctcgtcccgcgctgctggaacacaaggtgttcggcgtggagggcagcagcgcctttctggagtgtgagccccgctcgctgcaggcgcgcgtggagtggactttccagcgcgcaggggtgacagcccacacccaggtgctggcagaggagcgcaccgagcgcaccgcccggggactactgctgcgcaggctgcggcgccgggactcgggcgtgtacttgtgcgccgccgtcgagcagggctttacgcaaccgctgcgtcgcctgtcgctgcacgtgttgagtgctacgcaggccgaacgactggcgcgggccgaggaggctgcgcccgccgcgccgccgggccccaaactctggtaccgggactttctgcagctggtggagccgggcggaggtggcagcgcgaactccctgcgcatgtgccgcccgcagcctgcgctgcagtcactgcccctggagtcgcggagaaagggccgtaaccggaggacccacgcccctgagcctcgcgctgagcgggggccgcgcagcgcaacgcactggtgaccagactgtccccacgccgggaaccaagcaggagacgacaggcgagagaggagccagacagaccctgaaaagaaggacgggttggggccgggcacattgggggtcaccggccgatggagacaccaaccgacaggccctggctgagggcagctgcgcgggcttatttattaacaggataacccttgaatgtagcagccccgggagggcggcacaggtcgggcgcaggattcagccggagggaagggacggggaagccgagctccagagcaacgaccagggccgaggaggtgcctggagtgcccaccctgggagacagaccccacctccttgggtagtgagcagtgagcagaaagctgtgaacaggctgggctgctggaggtggggcgaggcaggccgactgtactaaagtaacgcaataaacgcattatcagccaaaaaaaaaaaaaaaaaaaaaaaaaaaaaaaaaaaaaaaaaaaaaaaaaaaaaaaaaaaaaaaa

SEQ ID NO: 189 - protein, 748 aa, Homosapiens
MGRAGAAAVIPGLALLWAVGLGSAAPSPPRLRLSFQELQAWHGLQTFSLERTCCYQALLVDEERGRLFVGAENHVASLNLDNISKRAKKLAWPAPVEWREECNWAGKDIGTECMNFVKLLHAYNRTHLLACGTGAFHPTCAFVEVGHRAEEPVLRLDPGRIEDGKGKSPYDPRHRAASVLVGEELYSGVAADLMGRDFTIFRSLGQRPSLRTEPHDSRWLNEPKFVKVFWIPESENPDDDKIYFFFRETAVEAAPALGRLSVSRVGQICRNDVGGQRSLVNKWTTFLKARLVCSVPGVEGDTHFDQLQDVFLLSSRDHRTPLLYAVFSTSSIFQGSAVCVYSMNDVRRAFLGPFAHKEGPMHQWVSYQGRVPYPRPGMCPSKTFGTFSSTKDFPDDVIQFARNHPLMYNSVLPTGGRPLFLQVGANYTFTQIAADRVAAADGHYDVLFIGTDVGTVLKVISVPKGSRPSAEGLLLEELHVFEDSAAVTSMQISSKRHQLYVASRSAVAQIALHRCAAHGRVCTECCLARDPYCAWDGVACTRFQPSAKRRFRRQDVRNGDPSTLCSGDSSRPALLEHKVFGVEGSSAFLECEPRSLQARVEWTFQRAGVTAHTQVLAEERTERTARGLLLRRLRRRDSGVYLCAAVEQGFTQPLRRLSLHVLSATQAERLARAEEAAPAAPPGPKLWYRDFLQLVEPGGGGSANSLRMCRPQPALQSLPLESRRKGRNRRTHAPEPRAERGPRSATHW

SEQ ID NO: 190 - DNA, 2989 bp, Homosapiens
gggcgggggctgcttcttaaaggagccgtcagagggtccccagcggccccagggtgggaaggggccagagtggagagatgctgctgcggaagtcctcggtggagtgtgagaaggcagccagtgttggcctggaagacctctagaacctgagaagaggcagcgatcctggggcagagtccagggcagctcaaggctcctccacacacacacccgctgaaccctgagcaccctgagctgctgagatggggcgggccggggctgccgccgtgatcccgggcctggccctgctctgggcagtggggctggggagtgccgcccccagccccccacgccttcggctctccttccaagagctccaggcctggcatggtctccagactttcagcctggagcgaacctgctgctaccaggccttgctggtggatgaggagcgtggacgcctgtttgtgggtgccgagaaccatgtggcctccctcaacctggacaacatcagcaagcgggccaagaagctggcctggccggcccctgtggaatggcgagaggagtgcaactgggcagggaaggacattggtactgagtgcatgaacttcgtgaagttgctgcatgcctacaaccgcacccatttgctggcctgtggcacgggagccttccacccaacctgtgcctttgtggaagtgggccaccgggcagaggagcccgtcctccggctggacccaggaaggatagaggatggcaaggggaagagtccttatgaccccaggcatcgggctgcctccgtgctggtgggggaggagctatactcaggggtggcagcagacctcatgggacgagactttaccatctttcgcagcctagggcaacgtccaagtctccgaacagagccacacgactcccgctggctcaatgagcccaagtttgtcaaggtattttggatcccggagagcgagaacccagacgacgacaaaatctacttcttctttcgtgagacggcggtagaggcggcgccggcactgggacgcctgtccgtgtcccgcgttggccagatctgccggaacgacgtgggcggccagcgcagcctggtcaacaagtggacgacgttcctgaaggcgcggctggtgtgctcggtgcccggcgtcgagggcgacacccacttcgatcagctccaggatgtgtttctgttgtcctcgcgggaccaccggaccccgctgctctatgccgtcttctccacgtccagcagcatcttccagggctctgcggtgtgcgtgtacagcatgaacgacgtgcgccgggccttcttgggaccctttgcacacaaggaggggcccatgcaccagtgggtgtcataccagggtcgcgtcccctacccgcggccaggcatgtgccccagcaagacctttggcaccttcagttccaccaaggacttcccagacgatgtcatccagtttgcgcggaaccaccccctcatgtacaactctgtcctgcccactggggggcgccctcttttcctacaagttggagccaattacaccttcactcaaattgccgcggaccgggttgcagccgctgacggacactatgacgtcctcttcattggcacagacgttggcacggtgctgaaggtgatctcggtccccaagggcagtaggcccagcgcagaggggctgctcctggaggagctgcacgtgtttgaggactcggccgctgtcaccagcatgcaaatttcttccaagaggcaccagctgtacgtagcctcgcggagcgcggtggcccagatcgcgttgcaccgctgcgctgcccacggccgcgtctgcaccgaatgctgtctggcgcgtgacccctactgcgcctgggacggggtcgcgtgcacgcgcttccagcccagtgccaagaggcggttccggcggcaagacgtaaggaatggcgaccccagcacgttgtgctccggagactcgtctcgtcccgcgctgctggaacacaaggtgttcggcgtggagggcagcagcgcctttctggagtgtgagccccgctcgctgcaggcgcgcgtggagtggactttccagcgcgcaggggtgacagcccacacccaggtgctggcagaggagcgcaccgagcgcaccgcccggggactactgctgcgcaggctgcggcgccgggactcgggcgtgtacttgtgcgccgccgtcgagcagggctttacgcaaccgctgcgtcgcctgtcgctgcacgtgttgagtgctacgcaggccgaacgactggcgcgggccgaggaggctgcgcccgccgcgccgccgggccccaaactctggtaccgggactttctgcagctggtggagccgggcggaggtggcagcgcgaactccctgcgcatgtgccgcccgcagcctgcgctgcagtcactgcccctggagtcgcggagaaagggccgtaaccggaggacccacgcccctgagcctcgcgctgagcgggggccgcgcagcgcaacgcactggtgaccagactgtccccacgccgggaaccaagcaggagacgacaggcgagagaggagccagacagaccctgaaaagaaggacgggttggggccgggcacattgggggtcaccggccgatggagacaccaaccgacaggccctggctgagggcagctgcgcgggcttatttattaacaggataacccttgaatgtagcagccccgggagggcggcacaggtcgggcgcaggattcagccggagggaagggacggggaagccgagctccagagcaacgaccagggccgaggaggtgcctggagtgcccaccctgggagacagaccccacctccttgggtagtgagcagtgagcagaaagctgtgaacaggctgggctgctggaggtggggcgaggcaggccgactgtactaaagtaacgcaataaacgcattatcagccaaaaaaaaaaaaaaaaaaaaaaaaaaaaaaaaaaaaaaaaaaaaaaaaaaaaaaaaaaaaaaaa

SEQ ID NO: 191 - protein, 749 aa, Homosapiens
MGRAGAAAVIPGLALLWAVGLGSAAPSPPRLRLSFQELQAWHGLQTFSLERTCCYQALLVDEERGRLFVGAENHVASLNLDNISKRAKKLAWPAPVEWREECNWAGKDIGTECMNFVKLLHAYNRTHLLACGTGAFHPTCAFVEVGHRAEEPVLRLDPGRIEDGKGKSPYDPRHRAASVLVGEELYSGVAADLMGRDFTIFRSLGQRPSLRTEPHDSRWLNEPKFVKVFWIPESENPDDDKIYFFFRETAVEAAPALGRLSVSRVGQICRNDVGGQRSLVNKWTTFLKARLVCSVPGVEGDTHFDQLQDVFLLSSRDHRTPLLYAVFSTSSSIFQGSAVCVYSMNDVRRAFLGPFAHKEGPMHQWVSYQGRVPYPRPGMCPSKTFGTFSSTKDFPDDVIQFARNHPLMYNSVLPTGGRPLFLQVGANYTFTQIAADRVAAADGHYDVLFIGTDVGTVLKVISVPKGSRPSAEGLLLEELHVFEDSAAVTSMQISSKRHQLYVASRSAVAQIALHRCAAHGRVCTECCLARDPYCAWDGVACTRFQPSAKRRFRRQDVRNGDPSTLCSGDSSRPALLEHKVFGVEGSSAFLECEPRSLQARVEWTFQRAGVTAHTQVLAEERTERTARGLLLRRLRRRDSGVYLCAAVEQGFTQPLRRLSLHVLSATQAERLARAEEAAPAAPPGPKLWYRDFLQLVEPGGGGSANSLRMCRPQPALQSLPLESRRKGRNRRTHAPEPRAERGPRSATHW

SEQ ID NO: 192 - DNA, 1526 bp, Homosapiens
gctgcatttgtccagtcctgctactggatgccatcattggcccccgactgcccactgcttgccatgcctgaggagacccaagaagactccgtggcgccaatgatgcccagccagaggagcagggggccattggcccccaaccacgtgcatgaggtatgcctgcaccaggtggagtccatcagcgacctacatagtggagcaggcacactgcgcccctatctaactgaagaggcacgaccgtgggatgagctgctgggcgttttgccgccgtcactgtgtgcccaggctggctgcagccctgtgtacagacgaggagggttcctgctgctgctcgcgctgctggtgctcacttgcctagtgctcgcactcctggctgtctacctgagcgtgctgcagagtgaatccctgcgcatcctggcacacacgctccgcacgcaggaggagacactactcaaactccgcttggccagcctcagccagcttcggaggctcaactccagtgaggcccaagcacccagctgagatgccatttggatctggggcctgggggtgtgtgttggggggggaataaagtggctatgggcaggtctctccttccctactgctggctgccacatctacactatttccttggtgagatttttgtacaagaacctgttgttaacttaatggctgcctccctctcctgatctcttcaagccaggcctagccaagcctctggtgccaaagcctcgctttgggtggcccaaggtcaggggaaggggcaccagcctcctggctcctcctgtggcctgtcaacactctctggccaccccagatggcaggttctgaagtctagaaatagctgcccccatagcaatcacccaaactctgccagggctcccagtgagggtccagcctcagctcttaaagacaggctgggctctgagtagggggagaggcaccacctggggaagactgccttggagggcaaaggtgacatcgtggaagaccagttgggcccaagcctgggatagtagatggggagggagaacagaaaaatacccaggggttaagaccacagaaggctgaccgttctgtttaattatctgtaataatccttaaaaatcagcacacaaatccattccaggtagctttgccaccccacctgctgtggtggcatttgtccagatgccaccacccccctaagagtgggtcatcctgggggagcaaggcctgagaaaggaaaggaagggaaaggccccctagtgcctgccccacagccctgaggaaggcacatatttagcctggcctgagacaggacaggaaggggccacagggctgagtgcagggacaaaggggtcagggtcccaagtgtccgggcccccagctacccaccccatgtctgtttttggttttgtcattaaaaaaaataaagtgacaaatactggtggaaaaaaaaaaaaaaaaaaaaaaaaaaaaaaaaaaaaaaaaaaaaaaaaaaaaaaaaaaaaaaaaaaaaaaaaaaaaaaaaaaaaaaaaaaaaa

SEQ ID NO: 193 - protein, 164 aa, Homosapiens
MPSLAPDCPLLAMPEETQEDSVAPMMPSQRSRGPLAPNHVHEVCLHQVESISDLHSGAGTLRPYLTEEARPWDELLGVLPPSLCAQAGCSPVYRRGGFLLLLALLVLTCLVLALLAVYLSVLQSESLRILAHTLRTQEETLLKLRLASLSQLRRLNSSEAQAPS

SEQ ID NO: 194 - DNA, 2045 bp, Homosapiens
cgtggatgtgggcctgaatcggatggcctggaactcgccttcccggcgacctgtttggcagggcggggcgcctcgcgaagatggtggcgcgcgtggcgtgtggctcccgtcgtctggccaagtctcagcgcagcgcaccggccggcgtctcgttggcctggagcccacacccaccgggtccctgaccccgcgccccccgcgcccggttcccggcatgcctcgcgcccgtaagggcaacacgctccggaagggtggtcagcgccgtggaggaggtgcccggagcagtgcccaagctgactcgggttccagtgacgatgaggcagccagtgaggcccgcagcaccgccagtgaatgccccagccttctcagcaccactgcagaggacagccttgggggggatgtcgtggatgagcagggccagcaggaagaccttgaggaaaagctgaaggagtatgtggactgtctcacagacaagagtgccaagacccggcagggtgctcttgagagcctgcgcctggccctagcgtcccgcctactccccgacttcttgctggagcgccgcctcacgctagccgatgccctggaaaagtgcctcaagaaagggaagggcgaggaacaagccctggctgctgctgtgctaggcctgctctgcgtgcagctgggccctggacctaagggtgaggagctgtttcacagcctgcagcctctgctggtctctgtgctcagtgacagcacagctagccctgctgcccggctccactgtgcttctgcccttggcctgggctgctacgtggctgccgctgacatccaggacctggtctcttgccttgcctgcttagaaagtgttttcagccggttctatggcttggggggcagctccacaagtcctgtggttcctgccagcctgcacggcctgctctctgctgccctgcaggcctgggcattgctgctcaccatctgccctagcacccaaatcagccacatccttgacaggcagctgccccggctgccccagctcttgtccagtgaaagtgtgaacctgcggatcgctgccggtgaaaccattgcactgctctttgagcttgcccgggaccttgaggaggagtttgtttacgaggacatggaggccctctgcagtgtcctgcgcactctggccactgacagtaacaagtaccgtgccaaggctgatcgtcggcgccagcgctctactttccgcgccgtgctgcactccgtggagggcggtgaatgcgaagaagagatagtgcgcttcggctttgaggtgctctacatggacagctgggctcggcaccggatctacgctgccttcaaggaagtgctgggttcgggcatgcaccaccacctccagaacaatgagctactccgtgacatctttggcctgggccctgtgctgttgctggatgccactgccctgaaggcctgcaaggttccacgctttgagaagcacctgtacaatgctgctgccttcaaagcccggaccaaggctcgaagccgtgtgcgggacaagcgggcagacatcctgtgaagcaggacctgctgaagaggagactttctatgcccttggtccgtatttttaacagaagacagtgcaacaactggtctccaccagtatttgtcactttattttttttaatgacaaaaccaaaaacagacatggggtgggtagctgggggcccggacacttgggaccctgacccctttgtccctgcactcagccctgtggccccttcctgtcctgtctcaggccaggctaaatatgtgccttcctcagggctgtggggcaggcactagggggcctttcccttcctttcctttctcaggccttgctcccccaggatgacccactcttaggggggtggtggcatctggacaaatgccaccacagcaggtggggtggcaaagctacctggaatggatttgtgtgctgatttttaaggattattacagataattaaacagaacggtcagccttctgtggtcttaacccctgggtatttttctgttctccctccccatctactatccca

SEQ ID NO: 195 - protein, 442 aa, Homosapiens
MPRARKGNTLRKGGQRRGGGARSSAQADSGSSDDEAASEARSTASECPSLLSTTAEDSLGGDVVDEQGQQEDLEEKLKEYVDCLTDKSAKTRQGALESLRLALASRLLPDFLLERRLTLADALEKCLKKGKGEEQALAAAVLGLLCVQLGPGPKGEELFHSLQPLLVSVLSDSTASPAARLHCASALGLGCYVAAADIQDLVSCLACLESVFSRFYGLGGSSTSPVVPASLHGLLSAALQAWALLLTICPSTQISHILDRQLPRLPQLLSSESVNLRIAAGETIALLFELARDLEEEFVYEDMEALCSVLRTLATDSNKYRAKADRRRQRSTFRAVLHSVEGGECEEEIVRFGFEVLYMDSWARHRIYAAFKEVLGSGMHHHLQNNELLRDIFGLGPVLLLDATALKACKVPRFEKHLYNAAAFKARTKARSRVRDKRADIL

SEQ ID NO: 196 - DNA, 1942 bp, Homosapiens
agccagggtagagactgagtcggcgcctggcgggtgttgtgacgcgcaaaccaggggcgggttctaagcggcgacgcgcgggtgctgggaggccttagaacgccgtggcgtgccgcaggacgcgacggctgcagaacatccgccgcaccgctgggggccaacgttgtcggaccgaggagtccgaggtggcgactgagtgagatacccagctgtgcggagctaggacgcggaacatcccagaggccagcatcaacatgtttccatccttggggaatgaccacgcaactgggcccagccctggtgctgggggtggccctgtgcctgggttgtggccagcccctaccacaggtccctgaacgccccttctctgtgctgtggaatgtaccctcagcacactgtgaggcccgctttggtgtgcacctgccactcaatgctctgggcatcatagccaaccgtggccagcattttcacggtcagaacatgaccattttctacaagaaccaactcggcctctatccctactttggacccaggggcacagctcacaatgggggcatcccccaggctttgccccttgaccgccacctggcactggctgcctaccagatccaccacagcctgagacctggctttgctggcccagcagtgctggattgggaggagtggtgtccactctgggctgggaactggggccgccgccgagcttatcaggcagcctcttgggcttgggcacagcaggtattccctgacctggaccctcaggagcagctctacaaggcctatactggctttgagcaggcggcccgtgcactgatggaggatacgctgcgggtggcccaggcactacggccccatggactctggggcttctatcactacccagcctgtggcaatggctggcatagtatggcttccaactataccggccgctgccatgcagccacccttgcccgcaacactcaactgcattggctctgggccgcctccagtgccctcttccccagcatctacctcccacccaggctgccacctgcccaccaccaggcctttgtccgacatcgcctggaggaggccttccgtgtggcccttgttgggcaccgacatcccctgcctgtcctggcctatgtccgcctcacacaccggagatctgggaggttcctgtcccaggatgaccttgtgcagtccattggtgtgagtgcagcactaggggcagccggcgtggtgctctggggggacctgagcctctccagctctgaggaggagtgctggcatctccatgactacctggtggacaccttgggcccctatgtgatcaatgtgaccagggcagcgatggcctgcagtcaccagcggtgccatggccacgggcgctgtgcccggcgagatccaggacagatggaagcctttctacacctgtggccagacggcagccttggagattggaagtccttcagctgccactgttactggggctgggctggccccacctgccaggagcccaggcctgggcctaaagaagcagtataaagccagggcccctgccactgcctcttcttttccctgctgccacttttccagtcctggaactactctgtcccactcttgctctattcagtttacagtcaaccctcccaagcacacaccccgcttcccttggaatccctgaggggtagaaggggccagaaaaaacgcttataaaaccagaggccctctgagatcatgtgagtcctccatggcaaggaagcagttccagggagagtcaggttccagctagttagggctgccagcctagggctttgtgcctacacctcactaagcccatggagaggtcacagatgggccgtgcacgggcagatgggccccaaaaaatcttggcgaaggtcggtaaagtgctaagctgttgtctgcactctttcatcataaagtcacttttttccactgc

SEQ ID NO: 197 - protein, 417 aa, Homosapiens
MTTQLGPALVLGVALCLGCGQPLPQVPERPFSVLWNVPSAHCEARFGVHLPLNALGIIANRGQHFHGQNMTIFYKNQLGLYPYFGPRGTAHNGGIPQALPLDRHLALAAYQIHHSLRPGFAGPAVLDWEEWCPLWAGNWGRRRAYQAASWAWAQQVFPDLDPQEQLYKAYTGFEQAARALMEDTLRVAQALRPHGLWGFYHYPACGNGWHSMASNYTGRCHAATLARNTQLHWLWAASSALFPSIYLPPRLPPAHHQAFVRHRLEEAFRVALVGHRHPLPVLAYVRLTHRRSGRFLSQDDLVQSIGVSAALGAAGVVLWGDLSLSSSEEECWHLHDYLVDTLGPYVINVTRAAMACSHQRCHGHGRCARRDPGQMEAFLHLWPDGSLGDWKSFSCHCYWGWAGPTCQEPRPGPKEAV

SEQ ID NO: 198 - DNA, 1218 bp, Homosapiens
ggcgactgagtgagatacccagctgtgcggagctaggacgcggaacatcccagaggccagcatcaacatgcaagagctgactctgagccctggcccagccaagctgacccctacactagaccctacacaccggatggagctgatcctgagtaccagcccagctgagctgactctggatcctgcgtgccagccaaagctgcccctggattccacatgccaaccagagatgaccttcaatcctggtccaactgagcttaccctggatcctgaacaccagccagaggagaccccagctcctagcctggctgagttgaccctggagcctgtgcaccgccgacccgagctcctggatgcttgtgctgacctcatcaatgatcagtggccccgcagccgcacctcccgcctgcactccctgggccagtcctcagatgccttccccctctgcctgatgctgctaagcccccaccccacacttgaagcagcacccgttgtggtgggccatgcccgcctgtcacgggtgctgaaccagccccagagcctcttagtggagacagtggtggtggcccgggccctgaggggccgtggctttggccgccgcctcatggagggcctggaggtctttgctcgggcccggggcttccgcaagctgcatctcaccacccatgaccaggtgcacttctatacccacctgggctaccagctgggtgagcctgtgcagggcctggtcttcaccagcagacggctgcctgccaccctgcttaatgccttccccacagccccctctccccggccacccaggaaggccccaaacctgactgcccaagctgccccaaggggtcccaagggacctccattgccaccaccccctcccctacctgagtgcctgaccatctcacccccagttccatcagggcccccttcaaaaagcctgctggagacacaatatcaaaatgtgagggggcgccccatattctggatggaaaaagacatctgaggccatccagggcaaggaactgtctttctggttcaatagactgccccgacagtctacaagcctcagcccactgaccatacctcagcccctagcccctggggggcagctttaacctgggcatgtttcctgggtaccagtggggccaggaggtggctctggctcagagccgtcagtgtggctgaataaaggctctcttgggtaaaaaaaaaaaaaaaaaaaaaaaa

SEQ ID NO: 199 - protein, 308 aa, Homosapiens
MQELTLSPGPAKLTPTLDPTHRMELILSTSPAELTLDPACQPKLPLDSTCQPEMTFNPGPTELTLDPEHQPEETPAPSLAELTLEPVHRRPELLDACADLINDQWPRSRTSRLHSLGQSSDAFPLCLMLLSPHPTLEAAPVVVGHARLSRVLNQPQSLLVETVVVARALRGRGFGRRLMEGLEVFARARGFRKLHLTTHDQVHFYTHLGYQLGEPVQGLVFTSRRLPATLLNAFPTAPSPRPPRKAPNLTAQAAPRGPKGPPLPPPPPLPECLTISPPVPSGPPSKSLLETQYQNVRGRPIFWMEKDI

SEQ ID NO: 200 - DNA, 2518 bp, Homosapiens
cttcctccaggagtctctggtgcagctggggtggaatctggccaggccctgcttaggcccccatcctggggtcaggaaatttggaggataaggcccttcagccccaaggtcagcagggacgagcgggcagactggcgggtgtacaggagggctgggttgacctgtccttggtcactgaggccattggatcttcctccagtggctgccaggatttctggtggaagagacaggaaggcctcccccccttggtcgggtcagcctgggggctgagggcctggctgtcagccactcttcccagaacatatgtcatggcctcagtggctcatggggaagcaggggtgggcgagcttaggctagagcaagtcctgtgggagatggcagaggcctggtctgagaggcaactcggatgtgccctccagtggccatgctcccctccatgcgtctcccctgccctcctggagccctgcaggtcaatgtttaacagaaaccagagcagcggtggattaatgcgcaagggctcagccccccagccctgagcagtgggggaatcggagactttgcaacctgttctcagctctgcctcccctggccaggttgtcctcgaccagtcccgtgccatggcagcccacctgcttcccatctgcgccctcttcctgaccttactcgatatggcccaaggctttaggggccccttgctacccaaccggcccttcaccaccgtctggaatgcaaacacccagtggtgcctggagaggcacggtgtggacgtggatgtcagtgtcttcgatgtggtagccaacccagggcagaccttccgcggccctgacatgacaattttctatagctcccagctgggcacctacccctactacacgcccactggggagcctgtgtttggtggtctgccccagaatgccagcctgattgcccacctggcccgcacattccaggacatcctggctgccatacctgctcctgacttctcagggctggcagtcatcgactgggaggcatggcgcccacgctgggccttcaactgggacaccaaggacatttaccggcagcgctcacgggcactggtacaggcacagcaccctgattggccagctcctcaggtggaggcagtagcccaggaccagttccagggagctgcacgggcctggatggcaggcaccctccagctggggcgggcactgcgtcctcgcggcctctggggcttctatggcttccctgactgctacaactatgactttctaagccccaactacaccggccagtgcccatcaggcatccgtgcccaaaatgaccagctagggtggctgtggggccagagccgtgccctctatcccagcatctacatgcccgcagtgctggagggcacagggaagtcacagatgtatgtgcaacaccgtgtggccgaggcattccgtgtggctgtggctgctggtgaccccaatctgccggtgctgccctatgtccagatcttctatgacacgacaaaccactttctgcccctggatgagctggagcacagcctgggggagagtgcggcccagggggcagctggagtggtgctctgggtgagctgggaaaatacaagaaccaaggaatcatgtcaggccatcaaggagtatatggacactacactggggcccttcatcctgaacgtgaccagtggggcccttctctgcagtcaagccctgtgctccggccatggccgctgtgtccgccgcaccagccaccccaaagccctcctcctccttaaccctgccagtttctccatccagctcacgcctggtggtgggcccctgagcctgcggggtgccctctcacttgaagatcaggcacagatggctgtggagttcaaatgtcgatgctaccctggctggcaggcaccgtggtgtgagcggaagagcatgtggtgattggccacacactgagttgcacatattgagaacctaatgcactctgggtctggccagggcttcctcaaatacatgcacagtcatacaagtcatggtcacagtaaagagtacactcagccactgtcacaggcatattccctgcacacacatgcatacttacagactggaatagtggcataaggagttagaaccacagcagacaccattcattccatgtccatatgcatctacttggcaaggtcatagacaattcctccagagacactgagccagtctttgaactgcagcaatcacaaaggctgacattcactgagtgcctactctttgccaatccccgtgctaagcgttttatgtggacttattcattcctcacaatgaggctatgaggaaactgagtcactcacattgagagtaagcacgttgcccaaggttgcacagcaagaaaagggagaagttgagattcaaacccaggctgtctagctccgggggtacagcccttgcactcctactgagtttgtggtaaccagccctgcacgacccctgaatctgctgagaggcaccagtccagcaaataaagcagtcatgatttactt

SEQ ID NO: 201 - protein, 435 aa, Homosapiens
MAAHLLPICALFLTLLDMAQGFRGPLLPNRPFTTVWNANTQWCLERHGVDVDVSVFDVVANPGQTFRGPDMTIFYSSQLGTYPYYTPTGEPVFGGLPQNASLIAHLARTFQDILAAIPAPDFSGLAVIDWEAWRPRWAFNWDTKDIYRQRSRALVQAQHPDWPAPQVEAVAQDQFQGAARAWMAGTLQLGRALRPRGLWGFYGFPDCYNYDFLSPNYTGQCPSGIRAQNDQLGWLWGQSRALYPSIYMPAVLEGTGKSQMYVQHRVAEAFRVAVAAGDPNLPVLPYVQIFYDTTNHFLPLDELEHSLGESAAQGAAGVVLWVSWENTRTKESCQAIKEYMDTTLGPFILNVTSGALLCSQALCSGHGRCVRRTSHPKALLLLNPASFSIQLTPGGGPLSLRGALSLEDQAQMAVEFKCRCYPGWQAPWCERKSMW

SEQ ID NO: 202 - DNA, 2075 bp, Homosapiens
cttcctccaggagtctctggtgcagctggggtggaatctggccaggccctgcttaggcccccatcctggggtcaggaaatttggaggataaggcccttcagccccaaggttgtcctcgaccagtcccgtgccatggcagcccacctgcttcccatctgcgccctcttcctgaccttactcgatatggcccaaggctttaggggccccttgctacccaaccggcccttcaccaccgtctggaatgcaaacacccagtggtgcctggagaggcacggtgtggacgtggatgtcagtgtcttcgatgtggtagccaacccagggcagaccttccgcggccctgacatgacaattttctatagctcccagctgggcacctacccctactacacgcccactggggagcctgtgtttggtggtctgccccagaatgccagcctgattgcccacctggcccgcacattccaggacatcctggctgccatacctgctcctgacttctcagggctggcagtcatcgactgggaggcatggcgcccacgctgggccttcaactgggacaccaaggacatttaccggcagcgctcacgggcactggtacaggcacagcaccctgattggccagctcctcaggtggaggcagtagcccaggaccagttccagggagctgcacgggcctggatggcaggcaccctccagctggggcgggcactgcgtcctcgcggcctctggggcttctatggcttccctgactgctacaactatgactttctaagccccaactacaccggccagtgcccatcaggcatccgtgcccaaaatgaccagctagggtggctgtggggccagagccgtgccctctatcccagcatctacatgcccgcagtgctggagggcacagggaagtcacagatgtatgtgcaacaccgtgtggccgaggcattccgtgtggctgtggctgctggtgaccccaatctgccggtgctgccctatgtccagatcttctatgacacgacaaaccactttctgcccctggatgagctggagcacagcctgggggagagtgcggcccagggggcagctggagtggtgctctgggtgagctgggaaaatacaagaaccaaggaatcatgtcaggccatcaaggagtatatggacactacactggggcccttcatcctgaacgtgaccagtggggcccttctctgcagtcaagccctgtgctccggccatggccgctgtgtccgccgcaccagccaccccaaagccctcctcctccttaaccctgccagtttctccatccagctcacgcctggtggtgggcccctgagcctgcggggtgccctctcacttgaagatcaggcacagatggctgtggagttcaaatgtcgatgctaccctggctggcaggcaccgtggtgtgagcggaagagcatgtggtgattggccacacactgagttgcacatattgagaacctaatgcactctgggtctggccagggcttcctcaaatacatgcacagtcatacaagtcatggtcacagtaaagagtacactcagccactgtcacaggcatattccctgcacacacatgcatacttacagactggaatagtggcataaggagttagaaccacagcagacaccattcattccatgtccatatgcatctacttggcaaggtcatagacaattcctccagagacactgagccagtctttgaactgcagcaatcacaaaggctgacattcactgagtgcctactctttgccaatccccgtgctaagcgttttatgtggacttattcattcctcacaatgaggctatgaggaaactgagtcactcacattgagagtaagcacgttgcccaaggttgcacagcaagaaaagggagaagttgagattcaaacccaggctgtctagctccgggggtacagcccttgcactcctactgagtttgtggtaaccagccctgcacgacccctgaatctgctgagaggcaccagtccagcaaataaagcagtcatgatttacttaaaaaaaaaaaaaaaaaaaaaaaaaaaaaaaaaaaaaaaaaa

SEQ ID NO: 203 - protein, 435 aa, Homosapiens; identical to SEQ ID NO: 201

SEQ ID NO: 204 - DNA, 2370 bp, Homosapiens
agatgtggggagcgcctctgccctgtcgccccgtccgggatgtgaggagcgtctctccctggccgccccgtctgagaagtgaggagcccctccgcccagcagccgccctgtctgagaagctagtcttgaattcctgacctcaggtgatcctcccgcgttggcctcccaaagtgctgggattacaggcatgagccaccactcctggccccagaaagtgacattctttacttaccacaggaggaaaagatccacgaaagtaaagtgcctagggcccatcaatgtcagatgcagccacgtggacaaagaacactccctgagcacaagacacgaaagaacccggtctccagtgtcacaaacaggcctgcccagcagggtctgcccctgcccacctcctccagcctaggttgtcctcgaccagtcccgtgccatggcagcccacctgcttcccatctgcgccctcttcctgaccttactcgatatggcccaaggctttaggggccccttgctacccaaccggcccttcaccaccgtctggaatgcaaacacccagtggtgcctggagaggcacggtgtggacgtggatgtcagtgtcttcgatgtggtagccaacccagggcagaccttccgcggccctgacatgacaattttctatagctcccagctgggcacctacccctactacacgcccactggggagcctgtgtttggtggtctgccccagaatgccagcctgattgcccacctggcccgcacattccaggacatcctggctgccatacctgctcctgacttctcagggctggcagtcatcgactgggaggcatggcgcccacgctgggccttcaactgggacaccaaggacatttaccggcagcgctcacgggcactggtacaggcacagcaccctgattggccagctcctcaggtggaggcagtagcccaggaccagttccagggagctgcacgggcctggatggcaggcaccctccagctggggcgggcactgcgtcctcgcggcctctggggcttctatggcttccctgactgctacaactatgactttctaagccccaactacaccggccagtgcccatcaggcatccgtgcccaaaatgaccagctagggtggctgtggggccagagccgtgccctctatcccagcatctacatgcccgcagtgctggagggcacagggaagtcacagatgtatgtgcaacaccgtgtggccgaggcattccgtgtggctgtggctgctggtgaccccaatctgccggtgctgccctatgtccagatcttctatgacacgacaaaccactttctgcccctggatgagctggagcacagcctgggggagagtgcggcccagggggcagctggagtggtgctctgggtgagctgggaaaatacaagaaccaaggaatcatgtcaggccatcaaggagtatatggacactacactggggcccttcatcctgaacgtgaccagtggggcccttctctgcagtcaagccctgtgctccggccatggccgctgtgtccgccgcaccagccaccccaaagccctcctcctccttaaccctgccagtttctccatccagctcacgcctggtggtgggcccctgagcctgcggggtgccctctcacttgaagatcaggcacagatggctgtggagttcaaatgtcgatgctaccctggctggcaggcaccgtggtgtgagcggaagagcatgtggtgattggccacacactgagttgcacatattgagaacctaatgcactctgggtctggccagggcttcctcaaatacatgcacagtcatacaagtcatggtcacagtaaagagtacactcagccactgtcacaggcatattccctgcacacacatgcatacttacagactggaatagtggcataaggagttagaaccacagcagacaccattcattccatgtccatatgcatctacttggcaaggtcatagacaattcctccagagacactgagccagtctttgaactgcagcaatcacaaaggctgacattcactgagtgcctactctttgccaatccccgtgctaagcgttttatgtggacttattcattcctcacaatgaggctatgaggaaactgagtcactcacattgagagtaagcacgttgcccaaggttgcacagcaagaaaagggagaagttgagattcaaacccaggctgtctagctccgggggtacagcccttgcactcctactgagtttgtggtaaccagccctgcacgacccctgaatctgctgagaggcaccagtccagcaaataaagcagtcatgatttacttaaaaaaaaaaaaaaaaaaaaaaaaaaaaaaaaaaaaaaaaaa

SEQ ID NO: 205 - protein, 435 aa, Homosapiens; identical to SEQ ID NO: 201

SEQ ID NO: 206 - DNA, 1985 bp, Homosapiens
cttcctccaggagtctctggtgcagctggggtggaatctggccaggccctgcttaggcccccatcctggggtcaggaaatttggaggataaggcccttcagccccaaggttgtcctcgaccagtcccgtgccatggcagcccacctgcttcccatctgcgccctcttcctgaccttactcgatatggcccaaggctttaggggccccttgctacccaaccggcccttcaccaccgtctggaatgcaaacacccagtggtgcctggagaggcacggtgtggacgtggatgtcagtgtcttcgatgtggtagccaacccagggcagaccttccgcggccctgacatgacaattttctatagctcccagctgggcacctacccctactacacgcccactggggagcctgtgtttggtggtctgccccagaatgccagcctgattgcccacctggcccgcacattccaggacatcctggctgccatacctgctcctgacttctcagggctggcagtcatcgactgggaggcatggcgcccacgctgggccttcaactgggacaccaaggacatttaccggcagcgctcacgggcactggtacaggcacagcaccctgattggccagctcctcaggtggaggcagtagcccaggaccagttccagggagctgcacgggcctggatggcaggcaccctccagctggggcgggcactgcgtcctcgcggcctctggggcttctatggcttccctgactgctacaactatgactttctaagccccaactacaccggccagtgcccatcaggcatccgtgcccaaaatgaccagctagggtggctgtggggccagagccgtgccctctatcccagcatctacatgcccgcagtgctggagggcacagggaagtcacagatgtatgtgcaacaccgtgtggccgaggcattccgtgtggctgtggctgctggtgaccccaatctgccggtgctgccctatgtccagatcttctatgacacgacaaaccactttctgcccctggaatcatgtcaggccatcaaggagtatatggacactacactggggcccttcatcctgaacgtgaccagtggggcccttctctgcagtcaagccctgtgctccggccatggccgctgtgtccgccgcaccagccaccccaaagccctcctcctccttaaccctgccagtttctccatccagctcacgcctggtggtgggcccctgagcctgcggggtgccctctcacttgaagatcaggcacagatggctgtggagttcaaatgtcgatgctaccctggctggcaggcaccgtggtgtgagcggaagagcatgtggtgattggccacacactgagttgcacatattgagaacctaatgcactctgggtctggccagggcttcctcaaatacatgcacagtcatacaagtcatggtcacagtaaagagtacactcagccactgtcacaggcatattccctgcacacacatgcatacttacagactggaatagtggcataaggagttagaaccacagcagacaccattcattccatgtccatatgcatctacttggcaaggtcatagacaattcctccagagacactgagccagtctttgaactgcagcaatcacaaaggctgacattcactgagtgcctactctttgccaatccccgtgctaagcgttttatgtggacttattcattcctcacaatgaggctatgaggaaactgagtcactcacattgagagtaagcacgttgcccaaggttgcacagcaagaaaagggagaagttgagattcaaacccaggctgtctagctccgggggtacagcccttgcactcctactgagtttgtggtaaccagccctgcacgacccctgaatctgctgagaggcaccagtccagcaaataaagcagtcatgatttacttaaaaaaaaaaaaaaaaaaaaaaaaaaaaaaaaaaaaaaaaaa

SEQ ID NO: 207 - protein, 405 aa, Homosapiens
MAAHLLPICALFLTLLDMAQGFRGPLLPNRPFTTVWNANTQWCLERHGVDVDVSVFDVVANPGQTFRGPDMTIFYSSQLGTYPYYTPTGEPVFGGLPQNASLIAHLARTFQDILAAIPAPDFSGLAVIDWEAWRPRWAFNWDTKDIYRQRSRALVQAQHPDWPAPQVEAVAQDQFQGAARAWMAGTLQLGRALRPRGLWGFYGFPDCYNYDFLSPNYTGQCPSGIRAQNDQLGWLWGQSRALYPSIYMPAVLEGTGKSQMYVQHRVAEAFRVAVAAGDPNLPVLPYVQIFYDTTNHFLPLESCQAIKEYMDTTLGPFILNVTSGALLCSQALCSGHGRCVRRTSHPKALLLLNPASFSIQLTPGGGPLSLRGALSLEDQAQMAVEFKCRCYPGWQAPWCERKSMW

SEQ ID NO: 208 - DNA, 1718 bp, Homosapiens
cttcctccaggagtctctggtgcagctggggtggaatctggccaggccctgcttaggcccccatcctggggtcaggaaatttggaggataaggcccttcagccccaaggacatcctggctgccatacctgctcctgacttctcagggctggcagtcatcgactgggaggcatggcgcccacgctgggccttcaactgggacaccaaggacatttaccggcagcgctcacgggcactggtacaggcacagcaccctgattggccagctcctcaggtggaggcagtagcccaggaccagttccagggagctgcacgggcctggatggcaggcaccctccagctggggcgggcactgcgtcctcgcggcctctggggcttctatggcttccctgactgctacaactatgactttctaagccccaactacaccggccagtgcccatcaggcatccgtgcccaaaatgaccagctagggtggctgtggggccagagccgtgccctctatcccagcatctacatgcccgcagtgctggagggcacagggaagtcacagatgtatgtgcaacaccgtgtggccgaggcattccgtgtggctgtggctgctggtgaccccaatctgccggtgctgccctatgtccagatcttctatgacacgacaaaccactttctgcccctggatgagctggagcacagcctgggggagagtgcggcccagggggcagctggagtggtgctctgggtgagctgggaaaatacaagaaccaaggaatcatgtcaggccatcaaggagtatatggacactacactggggcccttcatcctgaacgtgaccagtggggcccttctctgcagtcaagccctgtgctccggccatggccgctgtgtccgccgcaccagccaccccaaagccctcctcctccttaaccctgccagtttctccatccagctcacgcctggtggtgggcccctgagcctgcggggtgccctctcacttgaagatcaggcacagatggctgtggagttcaaatgtcgatgctaccctggctggcaggcaccgtggtgtgagcggaagagcatgtggtgattggccacacactgagttgcacatattgagaacctaatgcactctgggtctggccagggcttcctcaaatacatgcacagtcatacaagtcatggtcacagtaaagagtacactcagccactgtcacaggcatattccctgcacacacatgcatacttacagactggaatagtggcataaggagttagaaccacagcagacaccattcattccatgtccatatgcatctacttggcaaggtcatagacaattcctccagagacactgagccagtctttgaactgcagcaatcacaaaggctgacattcactgagtgcctactctttgccaatccccgtgctaagcgttttatgtggacttattcattcctcacaatgaggctatgaggaaactgagtcactcacattgagagtaagcacgttgcccaaggttgcacagcaagaaaagggagaagttgagattcaaacccaggctgtctagctccgggggtacagcccttgcactcctactgagtttgtggtaaccagccctgcacgacccctgaatctgctgagaggcaccagtccagcaaataaagcagtcatgatttacttaaaaaaaaaaaaaaaaaaaaaaaaaaaaaaaaaaaaaaaaaa

SEQ ID NO: 209 - protein, 253 aa, Homosapiens
MAGTLQLGRALRPRGLWGFYGFPDCYNYDFLSPNYTGQCPSGIRAQNDQLGWLWGQSRALYPSIYMPAVLEGTGKSQMYVQHRVAEAFRVAVAAGDPNLPVLPYVQIFYDTTNHFLPLDELEHSLGESAAQGAAGVVLWVSWENTRTKESCQAIKEYMDTTLGPFILNVTSGALLCSQALCSGHGRCVRRTSHPKALLLLNPASFSIQLTPGGGPLSLRGALSLEDQAQMAVEFKCRCYPGWQAPWCERKSMW

SEQ ID NO: 210 - DNA, 1738 bp, Homosapiens
cttcctccaggagtctctggtgcagctggggtggaatctggccaggccctgcttaggcccccatcctggggtcaggaaatttggaggataaggcccttcagccccaaggttgtcctcgaccagtcccgtgccatggcagcccacctgcttcccatctgcgccctcttcctgaccttactcgatatggcccaaggctttaggggccccttgctacccaaccggcccttcaccaccgtctggaatgcaaacacccagtggtgcctggagaggcacggtgtggacgtggatgtcagtgtcttcgatgtggtagccaacccagggcagaccttccgcggccctgacatgacaattttctatagctcccagctgggcacctacccctactacacgcccactggggagcctgtgtttggtggtctgccccagaatgccagcctgattgcccacctggcccgcacattccaggacatcctggctgccatacctgctcctgacttctcagggctggcagtcatcgactgggaggcatggcgcccacgctgggccttcaactgggacaccaaggacatttaccggcagcgctcacgggcactggtacaggcacagcaccctgattggccagctcctcaggtggaggcagtagcccaggaccagttccagggagctgcacgggcctggatggcaggcaccctccagctggggcgggcactgcgtcctcgcggcctctggggcttctatggcttccctgactgctctgggtgagctgggaaaatacaagaaccaaggaatcatgtcaggccatcaaggagtatatggacactacactggggcccttcatcctgaacgtgaccagtggggcccttctctgcagtcaagccctgtgctccggccatggccgctgtgtccgccgcaccagccaccccaaagccctcctcctccttaaccctgccagtttctccatccagctcacgcctggtggtgggcccctgagcctgcggggtgccctctcacttgaagatcaggcacagatggctgtggagttcaaatgtcgatgctaccctggctggcaggcaccgtggtgtgagcggaagagcatgtggtgattggccacacactgagttgcacatattgagaacctaatgcactctgggtctggccagggcttcctcaaatacatgcacagtcatacaagtcatggtcacagtaaagagtacactcagccactgtcacaggcatattccctgcacacacatgcatacttacagactggaatagtggcataaggagttagaaccacagcagacaccattcattccatgtccatatgcatctacttggcaaggtcatagacaattcctccagagacactgagccagtctttgaactgcagcaatcacaaaggctgacattcactgagtgcctactctttgccaatccccgtgctaagcgttttatgtggacttattcattcctcacaatgaggctatgaggaaactgagtcactcacattgagagtaagcacgttgcccaaggttgcacagcaagaaaagggagaagttgagattcaaacccaggctgtctagctccgggggtacagcccttgcactcctactgagtttgtggtaaccagccctgcacgacccctgaatctgctgagaggcaccagtccagcaaataaagcagtcatgatttacttaaaaaaaaaaaaaaaaaaaaaaaaaaaaaaaaaaaaaaaaaa

SEQ ID NO: 211 - protein, 209 aa, Homosapiens
MAAHLLPICALFLTLLDMAQGFRGPLLPNRPFTTVWNANTQWCLERHGVDVDVSVFDVVANPGQTFRGPDMTIFYSSQLGTYPYYTPTGEPVFGGLPQNASLIAHLARTFQDILAAIPAPDFSGLAVIDWEAWRPRWAFNWDTKDIYRQRSRALVQAQHPDWPAPQVEAVAQDQFQGAARAWMAGTLQLGRALRPRGLWGFYGFPDCSG

SEQ ID NO: 212 - DNA, 1300 bp, Homosapiens
cttcctccaggagtctctggtgcagctggggtggaatctggccaggccctgcttaggcccccatcctggggtcaggaaatttggaggataaggcccttcagccccaagtgctggagggcacagggaagtcacagatgtatgtgcaacaccgtgtggccgaggcattccgtgtggctgtggctgctggtgaccccaatctgccggtgctgccctatgtccagatcttctatgacacgacaaaccactttctgcccctggatgagctggagcacagcctgggggagagtgcggcccagggggcagctggagtggtgctctgggtgagctgggaaaatacaagaaccaaggaatcatgtcaggccatcaaggagtatatggacactacactggggcccttcatcctgaacgtgaccagtggggcccttctctgcagtcaagccctgtgctccggccatggccgctgtgtccgccgcaccagccaccccaaagccctcctcctccttaaccctgccagtttctccatccagctcacgcctggtggtgggcccctgagcctgcggggtgccctctcacttgaagatcaggcacagatggctgtggagttcaaatgtcgatgctaccctggctggcaggcaccgtggtgtgagcggaagagcatgtggtgattggccacacactgagttgcacatattgagaacctaatgcactctgggtctggccagggcttcctcaaatacatgcacagtcatacaagtcatggtcacagtaaagagtacactcagccactgtcacaggcatattccctgcacacacatgcatacttacagactggaatagtggcataaggagttagaaccacagcagacaccattcattccatgtccatatgcatctacttggcaaggtcatagacaattcctccagagacactgagccagtctttgaactgcagcaatcacaaaggctgacattcactgagtgcctactctttgccaatccccgtgctaagcgttttatgtggacttattcattcctcacaatgaggctatgaggaaactgagtcactcacattgagagtaagcacgttgcccaaggttgcacagcaagaaaagggagaagttgagattcaaacccaggctgtctagctccgggggtacagcccttgcactcctactgagtttgtggtaaccagccctgcacgacccctgaatctgctgagaggcaccagtccagcaaataaagcagtcatgatttacttaaaaaaaaaaaaaaaaaaaaaaaaaaaaaaaaaaaaaaaaaa

SEQ ID NO: 213 - protein, 176 aa, Homosapiens
MYVQHRVAEAFRVAVAAGDPNLPVLPYVQIFYDTTNHFLPLDELEHSLGESAAQGAAGVVLWVSWENTRTKESCQAIKEYMDTTLGPFILNVTSGALLCSQALCSGHGRCVRRTSHPKALLLLNPASFSIQLTPGGGPLSLRGALSLEDQAQMAVEFKCRCYPGWQAPWCERKSMW

SEQ ID NO: 214 - DNA, 1151 bp, Homosapiens
cttcctccaggagtctctggtgcagctggggtggaatctggccaggccctgcttaggcccccatcctggggtcaggaaatttggaggataaggcccttcagccccaaggatgagctggagcacagcctgggggagagtgcggcccagggggcagctggagtggtgctctgggtgagctgggaaaatacaagaaccaaggaatcatgtcaggccatcaaggagtatatggacactacactggggcccttcatcctgaacgtgaccagtggggcccttctctgcagtcaagccctgtgctccggccatggccgctgtgtccgccgcaccagccaccccaaagccctcctcctccttaaccctgccagtttctccatccagctcacgcctggtggtgggcccctgagcctgcggggtgccctctcacttgaagatcaggcacagatggctgtggagttcaaatgtcgatgctaccctggctggcaggcaccgtggtgtgagcggaagagcatgtggtgattggccacacactgagttgcacatattgagaacctaatgcactctgggtctggccagggcttcctcaaatacatgcacagtcatacaagtcatggtcacagtaaagagtacactcagccactgtcacaggcatattccctgcacacacatgcatacttacagactggaatagtggcataaggagttagaaccacagcagacaccattcattccatgtccatatgcatctacttggcaaggtcatagacaattcctccagagacactgagccagtctttgaactgcagcaatcacaaaggctgacattcactgagtgcctactctttgccaatccccgtgctaagcgttttatgtggacttattcattcctcacaatgaggctatgaggaaactgagtcactcacattgagagtaagcacgttgcccaaggttgcacagcaagaaaagggagaagttgagattcaaacccaggctgtctagctccgggggtacagcccttgcactcctactgagtttgtggtaaccagccctgcacgacccctgaatctgctgagaggcaccagtccagcaaataaagcagtcatgatttacttaaaaaaaaaaaaaaaaaaaaaaaaaaaaaaaaaaaaaaaaaa

SEQ ID NO: 215 - protein, 96 aa, Homosapiens
MDTTLGPFILNVTSGALLCSQALCSGHGRCVRRTSHPKALLLLNPASFSIQLTPGGGPLSLRGALSLEDQAQMAVEFKCRCYPGWQAPWCERKSMW

SEQ ID NO: 216 - DNA, 1848 bp, Homosapiens
ggctcaccccaggtaaggagggaggccaccgacctactgggccgacggactcccacacagttcctgagctggtgccaggcaggtgacacctcctgcagcccccagcatgcgggcaggcccaggccccaccgttacattggccctggtgctggcggtgtcatgggccatggagctcaagcccacagcaccacccatcttcactggccggccctttgtggtagcgtgggacgtgcccacacaggactgtggcccacgcctcaaggtgccactggacctgaatgcctttgatgtgcaggcctcacctaatgagggttttgtgaaccagaatattaccatcttctaccgcgaccgtctaggcctgtatccacgcttcgattctgccggaaggtctgtgcatggtggtgtgccacagaatgtcagcctttgggcacaccggaagatgctgcagaaacgtgtggagcactacattcggacacaggagtctgcggggctggcggtcatcgactgggaggactggcgacctgtgtgggtgcgcaactggcaggacaaagatgtgtatcgccggttatcacgccagctagtggccagtcgtcaccctgactggcctccagaccgcatagtcaaacaggcacaatatgagtttgagttcgcagcacagcagttcatgctggagacactgcgttatgtcaaggcagtgcggccccggcacctctggggcttctacctctttcctgactgctacaatcatgattatgtgcagaactgggagagctacacaggccgctgccctgatgttgaggtggcccgcaatgaccagctggcctggctgtgggctgagagcacggccctcttcccgtctgtctacctggacgagacacttgcttcctcccgccatggccgcaactttgtgagcttccgtgttcaggaggcccttcgtgtggctcgcacccaccatgccaaccatgcactcccagtctacgtcttcacacgacccacctacagccgcaggctcacggggcttagtgagatggacctcatctctaccattggcgagagtgcggccctgggcgcagctggtgtcatcctctggggtgacgcggggtacaccacaagcacggagacctgccagtacctcaaagattacctgacacggctgctggtcccctacgtggtcaatgtgtcctgggccacccaatattgcagccgggcccagtgccatggccatgggcgctgtgtgcgccgcaaccccagtgccagtaccttcctgcatctcagcaccaacagtttccgcctagtgcctggccatgcacctggtgaaccccagctgcgacctgtgggggagctcagttgggccgacattgaccacctgcagacacacttccgctgccagtgctacttgggctggagtggtgagcaatgccagtgggaccataggcaggcagctggaggtgccagcgaggcctgggctgggtcccacctcaccagtctgctggctctggcagccctggcctttacctggaccttgtaggggtctcctgcctagctgcctagcaagctggcctctaccacaagggctctcttaggcatgtaggaccctgcagggggtggacaaactggagtctggagtgggcagagcccccaggaagcccaggagggcatccataccagctcgcacccccctgttctaagggggaggggaagtccctgggaggccccttctctccctgccagaggggaaggagggtacagctgggctggggaggacctgaccctactcccttgccctagatagtttattattattattattttggggtctcttttgtaaattaaacataaaacaattgc

SEQ ID NO: 217 - protein, 473 aa, Homosapiens
MRAGPGPTVTLALVLAVSWAMELKPTAPPIFTGRPFVVAWDVPTQDCGPRLKVPLDLNAFDVQASPNEGFVNQNITIFYRDRLGLYPRFDSAGRSVHGGVPQNVSLWAHRKMLQKRVEHYIRTQESAGLAVIDWEDWRPVWVRNWQDKDVYRRLSRQLVASRHPDWPPDRIVKQAQYEFEFAAQQFMLETLRYVKAVRPRHLWGFYLFPDCYNHDYVQNWESYTGRCPDVEVARNDQLAWLWAESTALFPSVYLDETLASSRHGRNFVSFRVQEALRVARTHHANHALPVYVFTRPTYSRRLTGLSEMDLISTIGESAALGAAGVILWGDAGYTTSTETCQYLKDYLTRLLVPYVVNVSWATQYCSRAQCHGHGRCVRRNPSASTFLHLSTNSFRLVPGHAPGEPQLRPVGELSWADIDHLQTHFRCQCYLGWSGEQCQWDHRQAAGGASEAWAGSHLTSLLALAALAFTWTL

SEQ ID NO: 218 - DNA, 1909 bp, Homosapiens
aggcgctgagccgggccgcgcctgggcgaacggccggagcgggctgggctgggcccgggatggcggtggccctggcgccggtcccggtggcgccccgcgcgagttcctgagctggtgccaggcaggtgacacctcctgcagcccccagcatgcgggcaggcccaggccccaccgttacattggccctggtgctggcggtgtcatgggccatggagctcaagcccacagcaccacccatcttcactggccggccctttgtggtagcgtgggacgtgcccacacaggactgtggcccacgcctcaaggtgccactggacctgaatgcctttgatgtgcaggcctcacctaatgagggttttgtgaaccagaatattaccatcttctaccgcgaccgtctaggcctgtatccacgcttcgattctgccggaaggtctgtgcatggtggtgtgccacagaatgtcagcctttgggcacaccggaagatgctgcagaaacgtgtggagcactacattcggacacaggagtctgcggggctggcggtcatcgactgggaggactggcgacctgtgtgggtgcgcaactggcaggacaaagatgtgtatcgccggttatcacgccagctagtggccagtcgtcaccctgactggcctccagaccgcatagtcaaacaggcacaatatgagtttgagttcgcagcacagcagttcatgctggagacactgcgttatgtcaaggcagtgcggccccggcacctctggggcttctacctctttcctgactgctacaatcatgattatgtgcagaactgggagagctacacaggccgctgccctgatgttgaggtggcccgcaatgaccagctggcctggctgtgggctgagagcacggccctcttcccgtctgtctacctggacgagacacttgcttcctcccgccatggccgcaactttgtgagcttccgtgttcaggaggcccttcgtgtggctcgcacccaccatgccaaccatgcactcccagtctacgtcttcacacgacccacctacagccgcaggctcacggggcttagtgagatggacctcatctctaccattggcgagagtgcggccctgggcgcagctggtgtcatcctctggggtgacgcggggtacaccacaagcacggagacctgccagtacctcaaagattacctgacacggctgctggtcccctacgtggtcaatgtgtcctgggccacccaatattgcagccgggcccagtgccatggccatgggcgctgtgtgcgccgcaaccccagtgccagtaccttcctgcatctcagcaccaacagtttccgcctagtgcctggccatgcacctggtgaaccccagctgcgacctgtgggggagctcagttgggccgacattgaccacctgcagacacacttccgctgccagtgctacttgggctggagtggtgagcaatgccagtgggaccataggcaggcagctggaggtgccagcgaggcctgggctgggtcccacctcaccagtctgctggctctggcagccctggcctttacctggaccttgtaggggtctcctgcctagctgcctagcaagctggcctctaccacaagggctctcttaggcatgtaggaccctgcagggggtggacaaactggagtctggagtgggcagagcccccaggaagcccaggagggcatccataccagctcgcacccccctgttctaagggggaggggaagtccctgggaggccccttctctccctgccagaggggaaggagggtacagctgggctggggaggacctgaccctactcccttgccctagatagtttattattattattattttggggtctcttttgtaaattaaacataaaacaattgcaaaaaaaaaaaaaaaaaa

SEQ ID NO: 219 - protein, 473 aa, Homosapiens; identical to SEQ ID NO: 217

SEQ ID NO: 220 - DNA, 1691 bp, Homosapiens
tgcggccgcgtttccgtggagacagccgagcctgcggaaggcggcggcggcggcacctgcgatcagcggctggggcaggttatggtagtgcggactgcggtgtgagcagagcggccacggggcccgccatgcgccggcggccctgacatgggcgccagcgggtccaaagctcggggcctgtggcccttcgcctcggcggccggaggcggcggctcagaggcagcaggagctgagcaagctttggtgcggcctcggggccgagctgtgccccccttcgtattcacgcgccgcggctctatgttctatgatgaggatggggatctggctcacgagttctatgaggagacaatcgtcaccaagaacgggcagaagcgggccaagctgaggcgagtgcataagaatctgattcctcagggcatcgtgaagctggatcacccccgcatccacgtggatttccctgtgatcctctatgaggtgtgaccctgggaggtggcagacagaagcaccccctgccccggcaagaaactcccaggctcaatcaaggtgtggcttccattgaggagcccaggctggggccacaaccctgaataaactctgttggcccataaccttcagctgtgagcgggtcggtcccacagtattggttgggtgttggtttgtgtgtggacaagaggtggttggtgggtggtgaaggctaatggcagagttagcaccccactctcccaagccacccctgcaagcagcatagcagggcatataccagtcaggaatgcccgttacctggttccttgcctggtctgctttcttccaagtttgcctggggcctagccctgctagaggctacagcactttacaagcaaggtatgctttcttccagcccctaggctgtgggcactgtatacaagtaggaacttcctttccttcacttcccttttaacccctagtcagagcatttcagccgtttgctacctcgattcctcctgtgttggacagaggctgggggcagtgccagcctgattcttccgacctacctgccatttgttcccgccttcagatggatggacagtttgctggctattgataggagtggggactgggtgggggcttctccctctacccagggctgggctgatccccctactgcaactaactgttgccccccaaccccgaacccccagttgaggagttgagagagtgcaggctggggtcaggacaggctgcggatgcttgtgcctatggggagttactccaacccacctattctgtctaatctccatggctttgcaccaaatcctccacccctccaattgggaggggactgttcaccaccttgtggtaagggacaacaccctaaggctggtgccagtagttatgagtagcctaccaccccctcccttacagtaacccccaccccttcaggatcagtcaagggaaagcactagaacccctgggtagggaaagaaaggagggaaaaaccataaaaggaatacttataatgtgaaggtttgtaaatagtccatgatgatgtcgtggcagagtctgatttctatatagaggtgactttttttttaagtactgtgcaagctctgtgcttctataatgtgggaaatggcttggggaggatggcccctagcttaggaagactgttgtgttatttgttcaatttcaataaaatgatttgtagatcctgc

SEQ ID NO: 221 - protein, 110 aa, Homosapiens
MGASGSKARGLWPFASAAGGGGSEAAGAEQALVRPRGRAVPPFVFTRRGSMFYDEDGDLAHEFYEETIVTKNGQKRAKLRRVHKNLIPQGIVKLDHPRIHVDFPVILYEV

SEQ ID NO: 222 - DNA, 1968 bp, Homosapiens
tctcctcagctccttcccgccgcccagtctggatcctgggggaggcgctgaagtcggggcccgccctgtggccccgcccggcccgcgcttgctagcgcccaaagccagcgaagcacgggcccaaccgggccatgtcgggggagcctgagctcattgagctgcgggagctggcacccgctgggcgcgctgggaagggccgcacccggctggagcgtgccaacgcgctgcgcatcgcgcggggcaccgcgtgcaaccccacacggcagctggtccctggccgtggccaccgcttccagcccgcggggcccgccacgcacacgtggtgcgacctctgtggcgacttcatctggggcgtcgtgcgcaaaggcctgcagtgcgcgcattgcaagttcacctgccactaccgctgccgcgcgctcgtctgcctggactgttgcgggccccgggacctgggctgggaacccgcggtggagcgggacacgaacgtggacgagcctgtggagtgggagacacctgacctttctcaagctgagattgagcagaagatcaaggagtacaatgcccagatcaacagcaacctcttcatgagcttgaacaaggacggttcttacacaggcttcatcaaggttcagctgaagctggtgcgccctgtctctgtgccctccagcaagaagccaccctccttgcaggatgcccggcggggcccaggacggggcacaagtgtcaggcgccgcacttccttttacctgcccaaggatgctgtcaagcacctgcatgtgctgtcacgcacaagggcacgtgaagtcattgaggccctgctgcgaaagttcttggtggtggatgacccccgcaagtttgcactctttgagcgcgctgagcgtcacggccaagtgtacttgcggaagctgttggatgatgagcagcccctgcggctgcggctcctggcagggcccagtgacaaggccctgagctttgtcctgaaggaaaatgactctggggaggtgaactgggacgccttcagcatgcctgaactacataacttcctacgtatcctgcagcgggaggaggaggagcacctccgccagatcctgcagaagtactcctattgccgccagaagatccaagaggccctgcacgcctgcccccttgggtgacctcttgtacccccaggtggaaggcagacagcaggcagcgccaagtgcgtgccgtgtgagtgtgacagggccagtggggcctgtggaatgagtgtgcatggaggccctcctgtgctgggggaatgagcccagagaacagcgaagtagcttgctccctgtgtccacctgtgggtgtagccaggtatggctctgcacccctctgccctcattactgggccttagtgggccagggctgccctgagaagctgctccaggcctgcagcaggagtggtgcagacagaagtctcctcaatttttgtctcagaagtgaaaatcttggagaccctgcaaacagaacagggtcatgtttgcaggggtgacggccctcatctatgaggaaaggttttggatcttgaatgtggtctcaggatatccttatcagagctaagggtgggtgctcagaataaggcaggcattgaggaagagtcttggtttctctctacagtgccaactcctcacacaccctgaggtcagggagtgctggctcacagtacagcatgtgccttaatgcttcatatgaggaggatgtccctgggccagggtctgtgtgaatgtgggcactggcccaggttcataccttatttgctaatcaaagccagggtctctccctcaggtgttttttatgaagtgcgtgaatgtatgtaatgtgtggtggcctcagctgaatgcctcctgtggggaaaggggttggggtgacagtcatcatcagggcctggggcctgagagaattggctcaataaagatttcaagatcctcaaaaaaaaaaaaaaaaaaa

SEQ ID NO: 223 - protein, 340 aa, Homosapiens
MSGEPELIELRELAPAGRAGKGRTRLERANALRIARGTACNPTRQLVPGRGHRFQPAGPATHTWCDLCGDFIWGVVRKGLQCAHCKFTCHYRCRALVCLDCCGPRDLGWEPAVERDTNVDEPVEWETPDLSQAEIEQKIKEYNAQINSNLFMSLNKDGSYTGFIKVQLKLVRPVSVPSSKKPPSLQDARRGPGRGTSVRRRTSFYLPKDAVKHLHVLSRTRAREVIEALLRKFLVVDDPRKFALFERAERHGQVYLRKLLDDEQPLRLRLLAGPSDKALSFVLKENDSGEVNWDAFSMPELHNFLRILQREEEEHLRQILQKYSYCRQKIQEALHACPLG

SEQ ID NO: 224 - DNA, 1674 bp, Homosapiens
actgttgagcaggcctctctgcctgtggccttccggccggtttccagacgcccaggtggccaacattagagtccgcgtagcagtgtgagattgcaagttcacctgccactaccgctgccgcgcgctcgtctgcctggactgttgcgggccccgggacctgggctgggaacccgcggtggagcgggacacgaacgtggacgagcctgtggagtgggagacacctgacctttctcaagctgagattgagcagaagatcaaggagtacaatgcccagatcaacagcaacctcttcatgagcttgaacaaggacggttcttacacaggcttcatcaaggttcagctgaagctggtgcgccctgtctctgtgccctccagcaagaagccaccctccttgcaggatgcccggcggggcccaggacggggcacaagtgtcaggcgccgcacttccttttacctgcccaaggatgctgtcaagcacctgcatgtgctgtcacgcacaagggcacgtgaagtcattgaggccctgctgcgaaagttcttggtggtggatgacccccgcaagtttgcactctttgagcgcgctgagcgtcacggccaagtgtacttgcggaagctgttggatgatgagcagcccctgcggctgcggctcctggcagggcccagtgacaaggccctgagctttgtcctgaaggaaaatgactctggggaggtgaactgggacgccttcagcatgcctgaactacataacttcctacgtatcctgcagcgggaggaggaggagcacctccgccagatcctgcagaagtactcctattgccgccagaagatccaagaggccctgcacgcctgcccccttgggtgacctcttgtacccccaggtggaaggcagacagcaggcagcgccaagtgcgtgccgtgtgagtgtgacagggccagtggggcctgtggaatgagtgtgcatggaggccctcctgtgctgggggaatgagcccagagaacagcgaagtagcttgctccctgtgtccacctgtgggtgtagccaggtatggctctgcacccctctgccctcattactgggccttagtgggccagggctgccctgagaagctgctccaggcctgcagcaggagtggtgcagacagaagtctcctcaatttttgtctcagaagtgaaaatcttggagaccctgcaaacagaacagggtcatgtttgcaggggtgacggccctcatctatgaggaaaggttttggatcttgaatgtggtctcaggatatccttatcagagctaagggtgggtgctcagaataaggcaggcattgaggaagagtcttggtttctctctacagtgccaactcctcacacaccctgaggtcagggagtgctggctcacagtacagcatgtgccttaatgcttcatatgaggaggatgtccctgggccagggtctgtgtgaatgtgggcactggcccaggttcataccttatttgctaatcaaagccagggtctctccctcaggtgttttttatgaagtgcgtgaatgtatgtaatgtgtggtggcctcagctgaatgcctcctgtggggaaaggggttggggtgacagtcatcatcagggcctggggcctgagagaattggctcaataaagatttcaagatcctcaaaaaaaaaaaaaaaaa

SEQ ID NO: 225 - protein, 189 aa, Homosapiens
MSLNKDGSYTGFIKVQLKLVRPVSVPSSKKPPSLQDARRGPGRGTSVRRRTSFYLPKDAVKHLHVLSRTRAREVIEALLRKFLVVDDPRKFALFERAERHGQVYLRKLLDDEQPLRLRLLAGPSDKALSFVLKENDSGEVNWDAFSMPELHNFLRILQREEEEHLRQILQKYSYCRQKIQEALHACPLG

SEQ ID NO: 226 - DNA, 1825 bp, Homosapiens
gcgatctacgtttcttaacggttgcggcgcggctctggcccgggcgcacgcgcacactgacacgcgtacacgcacgcacgcgaccggggcggtggttggcggctacggacgcgcaggactgggggacgggcgggtacggctatgggcgaggcggaggcgccttctttcgaaatgacctggagcagcacgacgagcagtggctactgcagccaagaggactcggactcggagctcgagcagtacttcaccgcgcgaacctcgctagctcgcaggccgcgccgggaccaggacgagcctgtggagtgggagacacctgacctttctcaagctgagattgagcagaagatcaaggagtacaatgcccagatcaacagcaacctcttcatgagcttgaacaaggacggttcttacacaggcttcatcaaggttcagctgaagctggtgcgccctgtctctgtgccctccagcaagaagccaccctccttgcaggatgcccggcggggcccaggacggggcacaagtgtcaggcgccgcacttccttttacctgcccaaggatgctgtcaagcacctgcatgtgctgtcacgcacaagggcacgtgaagtcattgaggccctgctgcgaaagttcttggtggtggatgacccccgcaagtttgcactctttgagcgcgctgagcgtcacggccaagtgtacttgcggaagctgttggatgatgagcagcccctgcggctgcggctcctggcagggcccagtgacaaggccctgagctttgtcctgaaggaaaatgactctggggaggtgaactgggacgccttcagcatgcctgaactacataacttcctacgtatcctgcagcgggaggaggaggagcacctccgccagatcctgcagaagtactcctattgccgccagaagatccaagaggccctgcacgcctgcccccttgggtgacctcttgtacccccaggtggaaggcagacagcaggcagcgccaagtgcgtgccgtgtgagtgtgacagggccagtggggcctgtggaatgagtgtgcatggaggccctcctgtgctgggggaatgagcccagagaacagcgaagtagcttgctccctgtgtccacctgtgggtgtagccaggtatggctctgcacccctctgccctcattactgggccttagtgggccagggctgccctgagaagctgctccaggcctgcagcaggagtggtgcagacagaagtctcctcaatttttgtctcagaagtgaaaatcttggagaccctgcaaacagaacagggtcatgtttgcaggggtgacggccctcatctatgaggaaaggttttggatcttgaatgtggtctcaggatatccttatcagagctaagggtgggtgctcagaataaggcaggcattgaggaagagtcttggtttctctctacagtgccaactcctcacacaccctgaggtcagggagtgctggctcacagtacagcatgtgccttaatgcttcatatgaggaggatgtccctgggccagggtctgtgtgaatgtgggcactggcccaggttcataccttatttgctaatcaaagccagggtctctccctcaggtgttttttatgaagtgcgtgaatgtatgtaatgtgtggtggcctcagctgaatgcctcctgtggggaaaggggttggggtgacagtcatcatcagggcctggggcctgagagaattggctcaataaagatttcaagatcctcaaaaaaaaaaaaaaaaaaaaaaaaaaaaaaaaaaaaaaaaaaaaaaaaaaaaaaaaaaaaaaaaaaaaaaaaaaaa

SEQ ID NO: 227 - protein, 270 aa, Homosapiens
MGEAEAPSFEMTWSSTTSSGYCSQEDSDSELEQYFTARTSLARRPRRDQDEPVEWETPDLSQAEIEQKIKEYNAQINSNLFMSLNKDGSYTGFIKVQLKLVRPVSVPSSKKPPSLQDARRGPGRGTSVRRRTSFYLPKDAVKHLHVLSRTRAREVIEALLRKFLVVDDPRKFALFERAERHGQVYLRKLLDDEQPLRLRLLAGPSDKALSFVLKENDSGEVNWDAFSMPELHNFLRILQREEEEHLRQILQKYSYCRQKIQEALHACPLG

SEQ ID NO: 228 - DNA, 1979 bp, Homosapiens
tctcctcagctccttcccgccgcccagtctggatcctgggggaggcgctgaagtcggggcccgccctgtggccccgcccggcccgcgcttgctagcgcccaaagccagcgaagcacgggcccaaccgggccatgtcgggggagcctgagctcattgagctgcgggagctggcacccgctgggcgcgctgggaagggccgcacccggctggagcgtgccaacgcgctgcgcatcgcgcggggcaccgcgtgcaaccccacacggcagctggtccctggccgtggccaccgcttccagcccgcggggcccgccacgcacacgtggtgcgacctctgtggcgacttcatctggggcgtcgtgcgcaaaggcctgcagtgcgcgcgcctctctgcagattgcaagttcacctgccactaccgctgccgcgcgctcgtctgcctggactgttgcgggccccgggacctgggctgggaacccgcggtggagcgggacacgaacgtggacgagcctgtggagtgggagacacctgacctttctcaagctgagattgagcagaagatcaaggagtacaatgcccagatcaacagcaacctcttcatgagcttgaacaaggacggttcttacacaggcttcatcaaggttcagctgaagctggtgcgccctgtctctgtgccctccagcaagaagccaccctccttgcaggatgcccggcggggcccaggacggggcacaagtgtcaggcgccgcacttccttttacctgcccaaggatgctgtcaagcacctgcatgtgctgtcacgcacaagggcacgtgaagtcattgaggccctgctgcgaaagttcttggtggtggatgacccccgcaagtttgcactctttgagcgcgctgagcgtcacggccaagtgtacttgcggaagctgttggatgatgagcagcccctgcggctgcggctcctggcagggcccagtgacaaggccctgagctttgtcctgaaggaaaatgactctggggaggtgaactgggacgccttcagcatgcctgaactacataacttcctacgtatcctgcagcgggaggaggaggagcacctccgccagatcctgcagaagtactcctattgccgccagaagatccaagaggccctgcacgcctgcccccttgggtgacctcttgtacccccaggtggaaggcagacagcaggcagcgccaagtgcgtgccgtgtgagtgtgacagggccagtggggcctgtggaatgagtgtgcatggaggccctcctgtgctgggggaatgagcccagagaacagcgaagtagcttgctccctgtgtccacctgtgggtgtagccaggtatggctctgcacccctctgccctcattactgggccttagtgggccagggctgccctgagaagctgctccaggcctgcagcaggagtggtgcagacagaagtctcctcaatttttgtctcagaagtgaaaatcttggagaccctgcaaacagaacagggtcatgtttgcaggggtgacggccctcatctatgaggaaaggttttggatcttgaatgtggtctcaggatatccttatcagagctaagggtgggtgctcagaataaggcaggcattgaggaagagtcttggtttctctctacagtgccaactcctcacacaccctgaggtcagggagtgctggctcacagtacagcatgtgccttaatgcttcatatgaggaggatgtccctgggccagggtctgtgtgaatgtgggcactggcccaggttcataccttatttgctaatcaaagccagggtctctccctcaggtgttttttatgaagtgcgtgaatgtatgtaatgtgtggtggcctcagctgaatgcctcctgtggggaaaggggttggggtgacagtcatcatcagggcctggggcctgagagaattggctcaataaagatttcaagatcctcaaaaaaaaaaaaaaaaaa

SEQ ID NO: 229 - protein, 344 aa, Homosapiens
MSGEPELIELRELAPAGRAGKGRTRLERANALRIARGTACNPTRQLVPGRGHRFQPAGPATHTWCDLCGDFIWGVVRKGLQCARLSADCKFTCHYRCRALVCLDCCGPRDLGWEPAVERDTNVDEPVEWETPDLSQAEIEQKIKEYNAQINSNLFMSLNKDGSYTGFIKVQLKLVRPVSVPSSKKPPSLQDARRGPGRGTSVRRRTSFYLPKDAVKHLHVLSRTRAREVIEALLRKFLVVDDPRKFALFERAERHGQVYLRKLLDDEQPLRLRLLAGPSDKALSFVLKENDSGEVNWDAFSMPELHNFLRILQREEEEHLRQILQKYSYCRQKIQEALHACPLG

SEQ ID NO: 230 - DNA, 1979 bp, Homosapiens
tctcctcagctccttcccgccgcccagtctggatcctgggggaggcgctgaagtcggggcccgccctgtggccccgcccggcccgcgcttgctagcgcccaaagccagcgaagcacgggcccaaccgggccatgtcgggggagcctgagctcattgagctgcgggagctggcacccgctgggcgcgctgggaagggccgcacccggctggagcgtgccaacgcgctgcgcatcgcgcggggcaccgcgtgcaaccccacacggcagctggtccctggccgtggccaccgcttccagcccgcggggcccgccacgcacacgtggtgcgacctctgtggcgacttcatctggggcgtcgtgcgcaaaggcctgcagtgcgcgcattgcaagttcacctgccactaccgctgccgcgcgctcgtctgcctggactgttgcgggccccgggacctgggctgggaacccgcggtggagcgggacacgaacgtgcccatcttgcaggacgagcctgtggagtgggagacacctgacctttctcaagctgagattgagcagaagatcaaggagtacaatgcccagatcaacagcaacctcttcatgagcttgaacaaggacggttcttacacaggcttcatcaaggttcagctgaagctggtgcgccctgtctctgtgccctccagcaagaagccaccctccttgcaggatgcccggcggggcccaggacggggcacaagtgtcaggcgccgcacttccttttacctgcccaaggatgctgtcaagcacctgcatgtgctgtcacgcacaagggcacgtgaagtcattgaggccctgctgcgaaagttcttggtggtggatgacccccgcaagtttgcactctttgagcgcgctgagcgtcacggccaagtgtacttgcggaagctgttggatgatgagcagcccctgcggctgcggctcctggcagggcccagtgacaaggccctgagctttgtcctgaaggaaaatgactctggggaggtgaactgggacgccttcagcatgcctgaactacataacttcctacgtatcctgcagcgggaggaggaggagcacctccgccagatcctgcagaagtactcctattgccgccagaagatccaagaggccctgcacgcctgcccccttgggtgacctcttgtacccccaggtggaaggcagacagcaggcagcgccaagtgcgtgccgtgtgagtgtgacagggccagtggggcctgtggaatgagtgtgcatggaggccctcctgtgctgggggaatgagcccagagaacagcgaagtagcttgctccctgtgtccacctgtgggtgtagccaggtatggctctgcacccctctgccctcattactgggccttagtgggccagggctgccctgagaagctgctccaggcctgcagcaggagtggtgcagacagaagtctcctcaatttttgtctcagaagtgaaaatcttggagaccctgcaaacagaacagggtcatgtttgcaggggtgacggccctcatctatgaggaaaggttttggatcttgaatgtggtctcaggatatccttatcagagctaagggtgggtgctcagaataaggcaggcattgaggaagagtcttggtttctctctacagtgccaactcctcacacaccctgaggtcagggagtgctggctcacagtacagcatgtgccttaatgcttcatatgaggaggatgtccctgggccagggtctgtgtgaatgtgggcactggcccaggttcataccttatttgctaatcaaagccagggtctctccctcaggtgttttttatgaagtgcgtgaatgtatgtaatgtgtggtggcctcagctgaatgcctcctgtggggaaaggggttggggtgacagtcatcatcagggcctggggcctgagagaattggctcaataaagatttcaagatcctcaaaaaaaaaaaaaaaaaa

SEQ ID NO: 231 - protein, 344 aa, Homosapiens
MSGEPELIELRELAPAGRAGKGRTRLERANALRIARGTACNPTRQLVPGRGHRFQPAGPATHTWCDLCGDFIWGVVRKGLQCAHCKFTCHYRCRALVCLDCCGPRDLGWEPAVERDTNVPILQDEPVEWETPDLSQAEIEQKIKEYNAQINSNLFMSLNKDGSYTGFIKVQLKLVRPVSVPSSKKPPSLQDARRGPGRGTSVRRRTSFYLPKDAVKHLHVLSRTRAREVIEALLRKFLVVDDPRKFALFERAERHGQVYLRKLLDDEQPLRLRLLAGPSDKALSFVLKENDSGEVNWDAFSMPELHNFLRILQREEEEHLRQILQKYSYCRQKIQEALHACPLG

SEQ ID NO: 232 - DNA, 1876 bp, Homosapiens
tctcctcagctccttcccgccgcccagtctggatcctgggggaggcgctgaagtcggggcccgccctgtggccccgcccggcccgcgcttgctagcgcccaaagccagcgaagcacgggcccaaccgggccatgtcgggggagcctgagctcattgagctgcgggagctggcacccgctgggcgcgctgggaagggccgcacccggctggagcgtgccaacgcgctgcgcatcgcgcggggcaccgcgtgcaaccccacacggcagctggtccctggccgtggccaccgcttccagcccgcggggcccgccacgcacacgtggtgcgacctctgtggcgacttcatctggggcgtcgtgcgcaaaggcctgcagtgcgcgcgacgagcctgtggagtgggagacacctgacctttctcaagctgagattgagcagaagatcaaggagtacaatgcccagatcaacagcaacctcttcatgagcttgaacaaggacggttcttacacaggcttcatcaaggttcagctgaagctggtgcgccctgtctctgtgccctccagcaagaagccaccctccttgcaggatgcccggcggggcccaggacggggcacaagtgtcaggcgccgcacttccttttacctgcccaaggatgctgtcaagcacctgcatgtgctgtcacgcacaagggcacgtgaagtcattgaggccctgctgcgaaagttcttggtggtggatgacccccgcaagtttgcactctttgagcgcgctgagcgtcacggccaagtgtacttgcggaagctgttggatgatgagcagcccctgcggctgcggctcctggcagggcccagtgacaaggccctgagctttgtcctgaaggaaaatgactctggggaggtgaactgggacgccttcagcatgcctgaactacataacttcctacgtatcctgcagcgggaggaggaggagcacctccgccagatcctgcagaagtactcctattgccgccagaagatccaagaggccctgcacgcctgcccccttgggtgacctcttgtacccccaggtggaaggcagacagcaggcagcgccaagtgcgtgccgtgtgagtgtgacagggccagtggggcctgtggaatgagtgtgcatggaggccctcctgtgctgggggaatgagcccagagaacagcgaagtagcttgctccctgtgtccacctgtgggtgtagccaggtatggctctgcacccctctgccctcattactgggccttagtgggccagggctgccctgagaagctgctccaggcctgcagcaggagtggtgcagacagaagtctcctcaatttttgtctcagaagtgaaaatcttggagaccctgcaaacagaacagggtcatgtttgcaggggtgacggccctcatctatgaggaaaggttttggatcttgaatgtggtctcaggatatccttatcagagctaagggtgggtgctcagaataaggcaggcattgaggaagagtcttggtttctctctacagtgccaactcctcacacaccctgaggtcagggagtgctggctcacagtacagcatgtgccttaatgcttcatatgaggaggatgtccctgggccagggtctgtgtgaatgtgggcactggcccaggttcataccttatttgctaatcaaagccagggtctctccctcaggtgttttttatgaagtgcgtgaatgtatgtaatgtgtggtggcctcagctgaatgcctcctgtggggaaaggggttggggtgacagtcatcatcagggcctggggcctgagagaattggctcaataaagatttcaagatcctcaaaaaaaaaaaaaaaaaaaaaaaaaaaaaaaaaa

SEQ ID NO: 233 - protein, 92 aa, Homosapiens
MSGEPELIELRELAPAGRAGKGRTRLERANALRIARGTACNPTRQLVPGRGHRFQPAGPATHTWCDLCGDFIWGVVRKGLQCARRACGVGDT

SEQ ID NO: 234 - DNA, 1749 bp, Homosapiens
tctcctcagctccttcccgccgcccagtctggatcctgggggaggcgctgaagtcggggcccgccctgtggccccgcccggcccgcgcttgctagcgcccaaagccagcgaagcacgggcccaaccgggccatgtcgggggagcctgagctcattgagctgcgggagctggcacccgctgggcgcgctgggaagggccgcacccggctggagcgtgccaacgcgctgcgcatcgcgcggggcaccgcgtgcaaccccacacggcagctggtccctggccgtggccaccgcttccagcccgcggggcccgccacgcacacgtggtgcgacctctgtggcgacttcatctggggcgtcgtgcgcaaaggcctgcagtgcgcgcaacaaggacggttcttacacaggcttcatcaaggttcagctgaagctggtgcgccctgtctctgtgccctccagcaagaagccaccctccttgcaggatgcccggcggggcccaggacggggcacaagtgtcaggcgccgcacttccttttacctgcccaaggatgctgtcaagcacctgcatgtgctgtcacgcacaagggcacgtgaagtcattgaggccctgctgcgaaagttcttggtggtggatgacccccgcaagtttgcactctttgagcgcgctgagcgtcacggccaagtgtacttgcggaagctgttggatgatgagcagcccctgcggctgcggctcctggcagggcccagtgacaaggccctgagctttgtcctgaaggaaaatgactctggggaggtgaactgggacgccttcagcatgcctgaactacataacttcctacgtatcctgcagcgggaggaggaggagcacctccgccagatcctgcagaagtactcctattgccgccagaagatccaagaggccctgcacgcctgcccccttgggtgacctcttgtacccccaggtggaaggcagacagcaggcagcgccaagtgcgtgccgtgtgagtgtgacagggccagtggggcctgtggaatgagtgtgcatggaggccctcctgtgctgggggaatgagcccagagaacagcgaagtagcttgctccctgtgtccacctgtgggtgtagccaggtatggctctgcacccctctgccctcattactgggccttagtgggccagggctgccctgagaagctgctccaggcctgcagcaggagtggtgcagacagaagtctcctcaatttttgtctcagaagtgaaaatcttggagaccctgcaaacagaacagggtcatgtttgcaggggtgacggccctcatctatgaggaaaggttttggatcttgaatgtggtctcaggatatccttatcagagctaagggtgggtgctcagaataaggcaggcattgaggaagagtcttggtttctctctacagtgccaactcctcacacaccctgaggtcagggagtgctggctcacagtacagcatgtgccttaatgcttcatatgaggaggatgtccctgggccagggtctgtgtgaatgtgggcactggcccaggttcataccttatttgctaatcaaagccagggtctctccctcaggtgttttttatgaagtgcgtgaatgtatgtaatgtgtggtggcctcagctgaatgcctcctgtggggaaaggggttggggtgacagtcatcatcagggcctggggcctgagagaattggctcaataaagatttcaagatcctcaaaaaaaaaaaa

SEQ ID NO: 235 - protein, 152 aa, Homosapiens
MSGEPELIELRELAPAGRAGKGRTRLERANALRIARGTACNPTRQLVPGRGHRFQPAGPATHTWCDLCGDFIWGVVRKGLQCAQQGRFLHRLHQGSAEAGAPCLCALQQEATLLAGCPAGPRTGHKCQAPHFLLPAQGCCQAPACAVTHKGT

SEQ ID NO: 236 - DNA, 1780 bp, Homosapiens
ttccatggctgcgagaactgacgctccccaaccgtcccgcaactgtcctgtcccagactttggcaccgtcggggtccgtcgtccccgaatgtgacagcatccccaccccggctgctgcccaggatccgccggaccccggcctcgatatgggagacctggaactgctgctgcccggggaagctgaagtgctggtgcggggtctgcgcagcttcccgctacgcgagatgggctccgaagggtggaaccagcagcatgagaacctggagaagctgaacatgcaagccatcctcgatgccacagtcagccagggcgagcccattcaggagctgctggtcacccatgggaaggtcccaacactggtggaggagctgatcgcagtggagatgtggaagcagaaggtgttccctgtgttctgcagggtggaggacttcaagccccagaacaccttccccatctacatggtggtgcaccacgaggcctccatcatcaacctcttggagacagtgttcttccacaaggaggtgtgtgagtcagcagaagacactgtcttggacttggtagactattgccaccgcaaactgaccctgctggtggcccagagtggctgtggtggcccccctgagggggagggatcccaggacagcaaccccatgcaggagctgcagaagcaggcagagctgatggaatttgagattgcactgaaggccctctcagtactacgctacatcacagactgtgtggacagcctctctctcagcaccttgagccgtatgcttagcacacacaacctgccctgcctcctggtggaactgctggagcatagtccctggagccggcgggaaggaggcaagctgcagcagttcgagggcagccgttggcatactgtggccccctcagagcagcaaaagctgagcaagttggacgggcaagtgtggatcgccctgtacaacctgctgctaagccctgaggctcaggcgcgctactgcctcacaagttttgccaagggacggctactcaagcttcgggccttcctcacagacacactgctggaccagctgcccaacctggcccacttgcagagtttcctggcccatctgaccctaactgaaacccagcctcctaagaaggacctggtgttggaacagatcccagaaatctgggagcggctggagcgagaaaacagaggcaagtggcaggcaattgccaagcaccagctccagcatgtgttcagcccctcagagcaggacctgcggctgcaggcgcgaaggtgggctgagacctacaggctggatgtgctagaggcagtggctccagagcggccccgctgtgcttactgcagtgcagaggcttctaagcgctgctcacgatgccagaatgagtggtattgctgcagggagtgccaagtcaagcactgggaaaagcatggaaagacttgtgtcctggcagcccagggtgacagagccaaatgagggctgcagttgctgagggccgaccacccatgccaagggaatccacccagaatgcacccctgaacctcaagatcacggtccagcctctgccggagccccagtctccgcagtggagagcagagcgggcggtaaagctgctgaccgatctccctcctcctcaccccaagtgaaggctcgagacttcctgccccacccagtgggtaggccaagtgtgttgcttcagcaaaccggaccaggagggccagggccggatgtggggaccctcttcctctagcacagtaaagctggcctccagaaacacgggaaaaaaa

SEQ ID NO: 237 - protein, 440 aa, Homosapiens
MGDLELLLPGEAEVLVRGLRSFPLREMGSEGWNQQHENLEKLNMQAILDATVSQGEPIQELLVTHGKVPTLVEELIAVEMWKQKVFPVFCRVEDFKPQNTFPIYMVVHHEASIINLLETVFFHKEVCESAEDTVLDLVDYCHRKLTLLVAQSGCGGPPEGEGSQDSNPMQELQKQAELMEFEIALKALSVLRYITDCVDSLSLSTLSRMLSTHNLPCLLVELLEHSPWSRREGGKLQQFEGSRWHTVAPSEQQKLSKLDGQVWIALYNLLLSPEAQARYCLTSFAKGRLLKLRAFLTDTLLDQLPNLAHLQSFLAHLTLTETQPPKKDLVLEQIPEIWERLERENRGKWQAIAKHQLQHVFSPSEQDLRLQARRWAETYRLDVLEAVAPERPRCAYCSAEASKRCSRCQNEWYCCRECQVKHWEKHGKTCVLAAQGDRAK

SEQ ID NO: 238 - DNA, 1672 bp, Homosapiens
agcgtgaatcccttagcgcaccgcctccccaagtgctgccagcatgctgcccctccacgctagggacttgcctgcctctgccgcagcgcagatctgatgcggtggtttcctccaaagaaagcgggatactccgggccctgccgcgcgcaccgccgctccgtcacggagccgctttacttccgggtgcgacgtctacccacccaggacttcctgggacgagccgtcccccgccccagccacgcctctgagtcgcgctgcgcaggcgccattgggcagagggattggcaagcttgcgtgccccagcgacacaggcctcgaggctgtctctgacaagtgttcacaggaggtggggacgcctctgcgcgaggaacgaggagctacgggcctgggcccggttattgccatgggcagcggctgccgcatcgaatgcatattcttcagcgagttccaccccacgctgggacccaagatcacctatcaggtccctgaagacttcatctcccgagagctgtttgacacagtccaagtgtacatcatcaccaagccagagctgcagaacaagcttatcactgtcacagctatggaaaagaagctgatcggctgtcctgtgtgcatcgaacacaagaagtacagccgcaatgctctcctcttcaacctgggcttcgtgtgtgatgcccaggccaagacctgcgccctcgagcccattgttaaaaagctggctggctatctgaccacactagagctagagagcagcttcgtgtccatggaggagagcaagcagaagttggtgcccatcatgaccatcttgctggaggagctaaatgcctcaggccggtgcactctgcccattgatgagtccaacaccatccacttgaaggtgattgagcagcggccagaccctccggtggcccaggagtatgatgtacctgtctttaccaaagacaaggaggatttcttcaactcacagtgggacctcactacacaacaaatcctgccctacattgatgggttccgccacatccagaagatttcagcagaggcagatgtggagctcaacctggtgcgcattgctatccagaacctgctgtactacggcgttgtgacactggtgtccatcctccagtactccaatgtatactgcccaacgcccaaggtccaggacctggtagatgacaagtccctgcaagaggcatgtctatcctacgtgaccaagcaagggcacaagagggccagtctccgggatgtgttccagctatactgcagcctgagccctggcactaccgtgcgagacctcattggccgccacccccagcagctgcagcatgttgatgaacggaagctgatccagttcgggcttatgaagaacctcatcaggcgactacagaagtatcctgtgcgggtgactcgggaagagcagagccaccctgcccggctttatacaggctgccacagctatgacgagatctgctgcaagacaggcatgagctaccatgagctggatgagcggcttgaaaatgaccccaacatcatcatctgctggaagtgaggctggtagtgactggatggacacattgctgtgggtagtccctcctactaggaggcttgtcatactgtctagaggttgactcttagttctgtaaataaagacatccatttcaaacagcaaaaaaaa

SEQ ID NO: 239 - protein, 380 aa, Homosapiens
MGSGCRIECIFFSEFHPTLGPKITYQVPEDFISRELFDTVQVYIITKPELQNKLITVTAMEKKLIGCPVCIEHKKYSRNALLFNLGFVCDAQAKTCALEPIVKKLAGYLTTLELESSFVSMEESKQKLVPIMTILLEELNASGRCTLPIDESNTIHLKVIEQRPDPPVAQEYDVPVFTKDKEDFFNSQWDLTTQQILPYIDGFRHIQKISAEADVELNLVRIAIQNLLYYGVVTLVSILQYSNVYCPTPKVQDLVDDKSLQEACLSYVTKQGHKRASLRDVFQLYCSLSPGTTVRDLIGRHPQQLQHVDERKLIQFGLMKNLIRRLQKYPVRVTREEQSHPARLYTGCHSYDEICCKTGMSYHELDERLENDPNIIICWK

SEQ ID NO: 240 - DNA, 1243 bp, Homosapiens
gtcgcacccggaagtaaagcggctccgtgacggagcggcggtgcgcgcggcagggcccggagtatcccgctttctttggaggaaaccaccgcatcagatctgcgctgcggcagaggcagccttttctccagtgaggagtgaacagtgggcacctgagatcctggcccacgctactatgctttcaggctacaaccactagcacggctgacgatggccctttctgcggagaccgagtcacacatctaccgagctctgcgtactgcttctggcgctgccgcccaccttgtggccctgggctttaccatctttgtggctgtgcttgccaggcctggctccagcctgttctcctggcacccggtgcttatgtctttggctttctccttcctgatgaccgaggcactactggtgttttctcctgagagttcgctgctgcactccctctcacggaaaggccgagcacgctgccactgggtgctgcagctgctggccctgctgtgtgcactgctgggcctcggccttgtcatcctccacaaagagcagcttggcaaagcccacctggttacgcggcatgggcaggcagggctgctggctgtgctgtgggcagggctgcagtgctcaggtggggtggggctgctctaccccaagctgctgccccgatggcccctggcgaagctcaagctataccatgctacttctgggctggtgggctacctgctgggtagtgccagcctcttgctgggcatgtgctcactctggttcactgcctctgtcactggtgcagcctggtacctggctgtattatgccctgtcctcaccagcttggtcattatgaaccaggtgagcaatgcctacctataccgcaagaggatccaaccatgagctcttcccagcctaggggaagcctggatttgcccctccatgtaggagctgggcctagggacctgttgaactctctcagctgagtcaggggacacctcaggcactgggacagttgggcatttggaggcccgtgtgtgaattcctgctcctcatgctggagtgcctcccatttccttcccctttctctgtcatcccagaggaacataggcatcatgtgtctggatgaagctggggctgcaagactgcctctcctgcaaggcagctcatacttgtactgtatgttcagaaattttaggagagaaaaaagtaaaaaatttgtaaaaaaaaaaaaaaaaaaaaaaaaaaaaaaaaaaaaaaaaaaaaa

SEQ ID NO: 241 - protein, 222 aa, Homosapiens
MALSAETESHIYRALRTASGAAAHLVALGFTIFVAVLARPGSSLFSWHPVLMSLAFSFLMTEALLVFSPESSLLHSLSRKGRARCHWVLQLLALLCALLGLGLVILHKEQLGKAHLVTRHGQAGLLAVLWAGLQCSGGVGLLYPKLLPRWPLAKLKLYHATSGLVGYLLGSASLLLGMCSLWFTASVTGAAWYLAVLCPVLTSLVIMNQVSNAYLYRKRIQP

SEQ ID NO: 242 - DNA, 2178 bp, Homosapiens
ggccccccgagagaagaggtacggtcgaagccaggagccaggccgagcgggagctgaccaggcttgactcgggtacagaacgaggcaccagtccccttgcgaaccgaagggcctcgcagtggatggaggaggcccagccctgaggtcaacgccaaccaggctagcctggcacggggcctacagggtgggtaggcgggcgtgccgcagccgtccagggccttccctcaggtcccgggcgaggggcctacgctgcggcccggcaacaaggcccgactcggcccctcgggaccagagccccacccgatcggaagcggatcctttaccagggccataggccagtgactaggccgggcctgggcctcccatcggggccggactaggacgaggccccggggaggcccctggcctaccagacccttttctcaggccgacagccgccaggaagatgcaacgtgccctgccaggcgcccgccagcacttgggggccattctggccagcgccagcgtggtggtgaaggctctgtgtgcggcggtactattcctctacctgctctccttcgccgtggacacaggctgcctggcggtcaccccgggctacctctttcctcccaacttctggatctggaccctggccacccatgggctgatggagcagcatgtgtgggacgtggccatcagcctgacaacggtggtggtggccgggcgtttgctggagcccctctggggggccttggagctgctcatcttcttctcagtggtgaatgtgtctgtagggctgctgggggccttcgcctacctcctcacctacatggcttccttcaacctggtctacctgttcactgtccgtatccacggcgccttgggcttcctaggtggcgtcctggtggcactcaagcaaaccatgggggactgtgtggtcctgcgagtgccccaggtgcgcgtcagtgtgatgcccatgctgctgctggcgctgctgctcctgctgcggctcgccacgctgctccagagcccggcgctggcttcctatggcttcgggctgctctccagttgggtatatcttcgcttctaccagcgccatagccggggccgaggggacatggctgaccactttgctttcgccactttcttccctgagatcctgcagcctgtggtgggtttgctggcgaacttggtgcacagcctcctggtgaaggtaaagatatgccagaagacggtgaagcgctacgatgtgggtgccccatcctccatcaccatcagcctgccaggcacagaccctcaagacgccgagcggagaaggcaactggccctgaaggcactcaatgagcggctgaagagagtggaagaccagtccatctggcccagcatggatgatgatgaagaggagtctggggccaaggtggacagccccctgccctcagacaaagctcccacacccccagggaagggggctgccccagaatccagtctaatcaccttcgaggcagctcccccgacgctgtaactccagaccaccttgagtgtggcacctcccctcccaagccccccttgacatcctctcagctactccagggcacctgactgctctgaggagagggaagaaggcctgctggggctttccatggccttctgctgtttctcgccaacactacccaggactcttgctacctggttccaactccagacaaccactatgccaggcccggagcctctgaggcatcggccagtccaggccctcatctgaggtaagaatgtacatcagctggcagccccaagcaagtggctgcagggacactgatgccacagctcctgggccggccctcacatctgaaactggttgccgagagccctgagccaaggcaaggatttgccaaaaatgttctgggggcccagcaaatgcaggagccgacctggggctgcacatccctgcccatccccagaaagactgttcctgtcaggatttgtttccctctgctgtggcggtgactgcttctggaccagaacagctccagctcccaggtattttctacaggaccacttgagtgggcagccaagcccaggctcgcagtatcaataaagcagttctctgaggaatgacaaaaaaaaaaaaaaaaaaaaaaaaaaaaaaaaaaaaaaaaaaaaaaaaaaaaaaaaaaaaaaaaaaaaaaaaaaaaaaaaaaa

SEQ ID NO: 243 - protein, 351 aa, Homosapiens
MQRALPGARQHLGAILASASVVVKALCAAVLFLYLLSFAVDTGCLAVTPGYLFPPNFWIWTLATHGLMEQHVWDVAISLTTVVVAGRLLEPLWGALELLIFFSVVNVSVGLLGAFAYLLTYMASFNLVYLFTVRIHGALGFLGGVLVALKQTMGDCVVLRVPQVRVSVMPMLLLALLLLLRLATLLQSPALASYGFGLLSSWVYLRFYQRHSRGRGDMADHFAFATFFPEILQPVVGLLANLVHSLLVKVKICQKTVKRYDVGAPSSITISLPGTDPQDAERRRQLALKALNERLKRVEDQSIWPSMDDDEEESGAKVDSPLPSDKAPTPPGKGAAPESSLITFEAAPPTL

SEQ ID NO: 244 - DNA, 5343 bp, Homosapiens
gccccccctccccgcggcgccgcatcttgaatggaaacatggcggtgccggctcggacctgcggcgcctctcggcccggcccagcgcggactgcgcgcccctggcccggctgcggcccccaccctggccccggcacccggcgcccgacgtccgggcccccgcgcccgctgtggctgctgctgccgcttctaccgctgctcgccgcccccggcgcctctgcctacagcttcccccagcagcacacgatgcagcactgggcccggcgtctggagcaggaggtcgacggcgtgatgcggatttttggaggcgtccagcagctccgtgagatttacaaggacaaccggaacctgttcgaggtacaggagaatgagcctcagaagttggtggagaaggtggcaggggacattgagagccttctggacaggaaggtgcaggccctgaagagactggctgatgctgcagagaacttccagaaagcacaccgctggcaggacaacatcaaggaggaagacatcgtgtactatgacgccaaggctgacgctgagctggacgaccctgagagtgaggatgtggaaagggggtctaaggccagcaccctaaggctggacttcatcgaggacccaaacttcaagaacaaggtcaactattcatacgcggctgtacagatccctacggacatctacaaaggctccactgtcatcctcaatgagctcaactggacagaggccctggagaatgtgttcatggaaaaccgcagacaagaccccacactgctgtggcaggtcttcggcagcgccacaggagtcactcgctactacccggccaccccgtggcgagcccccaagaagatcgacctgtacgatgtccgaaggagaccctggtatatccagggggcctcgtcacccaaagacatggtcatcatcgtggatgtgagtggcagtgtgagcggcctgaccctgaagctgatgaagacatctgtctgcgagatgctggacacgctgtctgatgatgactatgtgaatgtggcctcgttcaacgagaaggcacagcctgtgtcatgcttcacacacctggtgcaggccaatgtgcgcaacaagaaggtgttcaaggaagctgtgcagggcatggtggccaagggcaccacaggctacaaggccggctttgagtatgcctttgaccagctgcagaactccaacatcactcgggccaactgcaacaagatgatcatgatgttcacggatggtggtgaggaccgcgtgcaggacgtctttgagaagtacaattggccaaaccggacggtgcgcgtgtttactttctccgtggggcagcataactatgacgtcacaccgctgcagtggatggcctgtgccaacaaaggctactattttgagatcccttccatcggagccatccgcatcaacacacaggaatatctagatgtgttgggcaggcccatggtgctggcaggcaaggaggccaagcaggtgcagtggaccaacgtgtatgaggatgcactgggactggggttggtggtaacagggaccctccctgttttcaacctgacacaggatggccctggggaaaagaagaaccagctgatcctgggcgtgatgggcattgacgtggctctgaatgacatcaagaggctgacccccaactacacgcttggagccaacggctatgtgtttgccattgacctgaacggctacgtgttgctgcaccccaatctcaagccccagaccaccaacttccgggagcctgtgactctggacttcctggatgcggagctagaggatgagaacaaggaagagatccgtcggagcatgattgatggcaacaagggccacaagcagatcagaacgttggtcaagtccctggatgagaggtacatagatgaggtgacacggaactacacctgggtgcctataaggagcactaactacagcctggggctggtgctcccaccctacagcaccttctacctccaagccaatctcagtgaccagatcctgcaggtcaagtattttgagttcctgctccccagcagctttgagtctgaaggacacgttttcattgctcccagagagtactgcaaggacctgaatgcctcagacaacaacaccgagttcctgaaaaactttattgagctcatggagaaagtgactccagactccaagcagtgcaacaacttccttctgcacaacctgatcttggacacgggcatcacgcagcagctggtagagcgtgtgtggagggaccaggatctcaacacgtacagcctactggccgtgttcgctgccacagacggtggcatcacccgagtcttccccaacaaggcagctgaggactggacagagaaccctgagcccttcaatgccagcttctaccgccgcagcctggataaccacggttatgtcttcaagcccccacaccaggatgccctgttaaggccgctggagctggagaatgacactgtgggcatcctcgtcagcacagctgtggagctcagcctaggcaggcgcacactgaggccagcagtggtgggcgtcaagctggacctagaggcttgggctgagaagttcaaggtgctagccagcaaccgtacccaccaagaccagcctcagaagtgcggccccaacagccactgtgagatggactgcgaggttaacaatgaggacttactctgtgtcctcattgatgatggaggattcctggtgctgtcaaaccagaaccatcagtgggaccaggtgggcaggttcttcagtgaggtggatgccaacctgatgctggcactctacaataactccttctacacccgcaaggagtcctatgactatcaggcagcctgtgcccctcagccccctggcaacctgggtgctgcaccccggggtgtctttgtgcccaccgttgcagatttccttaacctggcctggtggacctctgctgccgcctggtccctgttccagcagcttctctacggcctcatctaccacagctggttccaagcagaccccgcggaggccgaggggagccccgagacgcgcgagagcagctgcgtcatgaaacagacccagtactacttcggctcggtaaacgcctcctacaacgccatcatcgactgcggaaactgctccaggctgttccacgcgcagagactgaccaacaccaatcttctctttgtggtggccgagaagccgctgtgcagccagtgcgaggctggccggctgctgcagaaggagacgcactgcccagcggacggcccggagcagtgtgagctagtgcagagaccgcgataccggagaggcccgcacatctgcttcgactacaacgcgacagaagatacctcagactgtggccgcggggcctccttcccgccgtcgctgggcgtcctggtctccctgcaactgctgctcctcctgggcctgccgccccggccgcagcctcaagtcctcgtccacgcctctcgccgcctctgagcaccctgccccaccccacctccactcccacctcacccggcctcttcgcctttcccaccctcctgccccacactccccgccttagagcctcgtccctccctcactgaaggacctgagctggccaggccctgagagtctggtctgcgccttgggatggggagtcccaaagcgggacgccgcaggtgtttggcacccaaatcacatctcacctccgaactgttcaagtgtccccagacccttcttgcctgctgggctccccccagtgggatgggacagggaggccacacgcactggtgccaaaaccaggcctctgctgccgcccttcctggaggctgcctatgttgggggggaccctgcctcagctgacccggcctctctgccccacccaagcccaaacttggtttctgtgagaatagtggaggaaggtgagatggccagtttgaagcctgtgcctcccagcttaaatcctagcaggagagaggctctggggcagcccccatgggctcctgcccctttcaggcctacagccacatccccaagcccaccaggtgtcaggatagtcacagtgataccagttcagacactaccccatatacacctggaacattgaggatggaaactggactcacattcgacataccccactgggcacacgcacaaacacacacactatggggtggggtgggtgtaggggcttacaaagccttacacagggcgaggggttggtgggagggttggcacctgcacactccatctcctgctcaccacctgcctctaatctgagctgcagcctggctggtcctcccatttctaaagctgaatgtcaaacagtgccaaatgctggggcagggggtgaagaaccctctgtcccacccctagccaccagtgtcctccaagtgccccctcacctctccaggtgctcattgtaaccatttctcactagtgtcaggcccccagtgggaccacatgccactgcctgcacctttcggcagaggaacccccaccagacatcaccctttgccttagcaggggtgactttgtctctcctggctgggccatccttccgccaatctggcccttacacactcaggcctgtgcccactccctatctccttcccacccctacacacacactccctgcttgcaggaggccaaactgtccctcccttgctgaacacacacacacacacacacacacaggtggggactgggcacagctcttcacaccattcattctggtcatttcccccaaaggcatcccagcctgggggccagtggggaactgagggcaaggggatatagtgatggggctcagatggactgggaggagggggagggtgatgcattaattaatggcttcgttaattaatgtcatgttgcttgtcgctttctcagtgtgtgtgtgtggtccatgcccactgctggtgccagggtgggtgtccatgtgcacccggcctggatgccagctgtgtccttcgggggcgtgcgtgtaactgtagtgtagtcaggtgctcaatggagaatataaacatatacagaaaaatatatattttaagtttaaaaaacagaaaaacagacaaaacaatccccatcaggtagctgtctaacccccagctgggtctaatccttctcattacccacccgacctggctgcccctcaccttgggctgggggactggggggccatttccttttctctgccctttttttgttgttctattttgtacagacaagttggaaaaacaacagcgacaaaaaagtcaagaaactttgtaaaatatcgtgtgtgtgattccttgtaaaatattttcaaatggtttattacagaagatcagttattaaataatgttcatattttcacttcaaa

SEQ ID NO: 245 - protein, 1145 aa, Homosapiens
MAVPARTCGASRPGPARTARPWPGCGPHPGPGTRRPTSGPPRPLWLLLPLLPLLAAPGASAYSFPQQHTMQHWARRLEQEVDGVMRIFGGVQQLREIYKDNRNLFEVQENEPQKLVEKVAGDIESLLDRKVQALKRLADAAENFQKAHRWQDNIKEEDIVYYDAKADAELDDPESEDVERGSKASTLRLDFIEDPNFKNKVNYSYAAVQIPTDIYKGSTVILNELNWTEALENVFMENRRQDPTLLWQVFGSATGVTRYYPATPWRAPKKIDLYDVRRRPWYIQGASSPKDMVIIVDVSGSVSGLTLKLMKTSVCEMLDTLSDDDYVNVASFNEKAQPVSCFTHLVQANVRNKKVFKEAVQGMVAKGTTGYKAGFEYAFDQLQNSNITRANCNKMIMMFTDGGEDRVQDVFEKYNWPNRTVRVFTFSVGQHNYDVTPLQWMACANKGYYFEIPSIGAIRINTQEYLDVLGRPMVLAGKEAKQVQWTNVYEDALGLGLVVTGTLPVFNLTQDGPGEKKNQLILGVMGIDVALNDIKRLTPNYTLGANGYVFAIDLNGYVLLHPNLKPQTTNFREPVTLDFLDAELEDENKEEIRRSMIDGNKGHKQIRTLVKSLDERYIDEVTRNYTWVPIRSTNYSLGLVLPPYSTFYLQANLSDQILQVKYFEFLLPSSFESEGHVFIAPREYCKDLNASDNNTEFLKNFIELMEKVTPDSKQCNNFLLHNLILDTGITQQLVERVWRDQDLNTYSLLAVFAATDGGITRVFPNKAAEDWTENPEPFNASFYRRSLDNHGYVFKPPHQDALLRPLELENDTVGILVSTAVELSLGRRTLRPAVVGVKLDLEAWAEKFKVLASNRTHQDQPQKCGPNSHCEMDCEVNNEDLLCVLIDDGGFLVLSNQNHQWDQVGRFFSEVDANLMLALYNNSFYTRKESYDYQAACAPQPPGNLGAAPRGVFVPTVADFLNLAWWTSAAAWSLFQQLLYGLIYHSWFQADPAEAEGSPETRESSCVMKQTQYYFGSVNASYNAIIDCGNCSRLFHAQRLTNTNLLFVVAEKPLCSQCEAGRLLQKETHCPADGPEQCELVQRPRYRRGPHICFDYNATEDTSDCGRGASFPPSLGVLVSLQLLLLLGLPPRPQPQVLVHASRRL

SEQ ID NO: 246 - DNA, 5337 bp, Homosapiens
gccccccctccccgcggcgccgcatcttgaatggaaacatggcggtgccggctcggacctgcggcgcctctcggcccggcccagcgcggactgcgcgcccctggcccggctgcggcccccaccctggccccggcacccggcgcccgacgtccgggcccccgcgcccgctgtggctgctgctgccgcttctaccgctgctcgccgcccccggcgcctctgcctacagcttcccccagcagcacacgatgcagcactgggcccggcgtctggagcaggaggtcgacggcgtgatgcggatttttggaggcgtccagcagctccgtgagatttacaaggacaaccggaacctgttcgaggtacaggagaatgagcctcagaagttggtggagaaggtggcaggggacattgagagccttctggacaggaaggtgcaggccctgaagagactggctgatgctgcagagaacttccagaaagcacaccgctggcaggacaacatcaaggaggaagacatcgtgtactatgacgccaaggctgacgctgagctggacgaccctgagagtgaggatgtggaaagggggtctaaggccagcaccctaaggctggacttcatcgaggacccaaacttcaagaacaaggtcaactattcatacgcggctgtacagatccctacggacatctacaaaggctccactgtcatcctcaatgagctcaactggacagaggccctggagaatgtgttcatggaaaaccgcagacaagaccccacactgctgtggcaggtcttcggcagcgccacaggagtcactcgctactacccggccaccccgtggcgagcccccaagaagatcgacctgtacgatgtccgaaggagaccctggtatatccagggggcctcgtcacccaaagacatggtcatcatcgtggatgtgagtggcagtgtgagcggcctgaccctgaagctgatgaagacatctgtctgcgagatgctggacacgctgtctgatgatgactatgtgaatgtggcctcgttcaacgagaaggcacagcctgtgtcatgcttcacacacctggtgcaggccaatgtgcgcaacaagaaggtgttcaaggaagctgtgcagggcatggtggccaagggcaccacaggctacaaggccggctttgagtatgcctttgaccagctgcagaactccaacatcactcgggccaactgcaacaagatgatcatgatgttcacggatggtggtgaggaccgcgtgcaggacgtctttgagaagtacaattggccaaaccggacggtgcgcgtgtttactttctccgtggggcagcataactatgacgtcacaccgctgcagtggatggcctgtgccaacaaaggctactattttgagatcccttccatcggagccatccgcatcaacacacaggaatatctagatgtgttgggcaggcccatggtgctggcaggcaaggaggccaagcaggtgcagtggaccaacgtgtatgaggatgcactgggactggggttggtggtaacagggaccctccctgttttcaacctgacacaggatggccctggggaaaagaagaaccagctgatcctgggcgtgatgggcattgacgtggctctgaatgacatcaagaggctgacccccaactacacgcttggagccaacggctatgtgtttgccattgacctgaacggctacgtgttgctgcaccccaatctcaagccccagaccaccaacttccgggagcctgtgactctggacttcctggatgcggagctagaggatgagaacaaggaagagatccgtcggagcatgattgatggcaacaagggccacaagcagatcagaacgttggtcaagtccctggatgagaggtacatagatgaggtgacacggaactacacctgggtgcctataaggagcactaactacagcctggggctggtgctcccaccctacagcaccttctacctccaagccaatctcagtgaccagatcctgcaggtcaagtattttgagttcctgctccccagcagctttgagtctgaaggacacgttttcattgctcccagagagtactgcaaggacctgaatgcctcagacaacaacaccgagttcctgaaaaactttattgagctcatggagaaagtgactccagactccaagcagtgcaacaacttccttctgcacaacctgatcttggacacgggcatcacgcagcagctggtagagcgtgtgtggagggaccaggatctcaacacgtacagcctactggccgtgttcgctgccacagacggtggcatcacccgagtcttccccaacaaggcagctgaggactggacagagaaccctgagcccttcaatgccagcttctaccgccgcagcctggataaccacggttatgtcttcaagcccccacaccaggatgccctgttaaggccgctggagctggagaatgacactgtgggcatcctcgtcagcacagctgtggagctcagcctaggcaggcgcacactgaggccagcagtggtgggcgtcaagctggacctagaggcttgggctgagaagttcaaggtgctagccagcaaccgtacccaccaagaccagcctcagaagtgcggccccaacagccactgtgagatggactgcgaggttaacaatgaggacttactctgtgtcctcattgatgatggaggattcctggtgctgtcaaaccagaaccatcagtgggaccaggtgggcaggttcttcagtgaggtggatgccaacctgatgctggcactctacaataactccttctacacccgcaaggagtcctatgactatcaggcagcctgtgcccctcagccccctggcaacctgggtgctgcaccccggggtgtctttgtgcccaccgttgcagatttccttaacctggcctggtggacctctgctgccgcctggtccctgttccagcagcttctctacggcctcatctaccacagctggttccaagcagaccccgcggaggccgaggggagccccgagacgcgcgagagcagctgcgtcatgaaacagacccagtactacttcggctcggtaaacgcctcctacaacgccatcatcgactgcggaaactgctccaggctgttccacgcgcagagactgaccaacaccaatcttctctttgtggtggccgagaagccgctgtgcagccagtgcgaggctggccggctgctgcagaaggagacgcactcggacggcccggagcagtgtgagctagtgcagagaccgcgataccggagaggcccgcacatctgcttcgactacaacgcgacagaagatacctcagactgtggccgcggggcctccttcccgccgtcgctgggcgtcctggtctccctgcaactgctgctcctcctgggcctgccgccccggccgcagcctcaagtcctcgtccacgcctctcgccgcctctgagcaccctgccccaccccacctccactcccacctcacccggcctcttcgcctttcccaccctcctgccccacactccccgccttagagcctcgtccctccctcactgaaggacctgagctggccaggccctgagagtctggtctgcgccttgggatggggagtcccaaagcgggacgccgcaggtgtttggcacccaaatcacatctcacctccgaactgttcaagtgtccccagacccttcttgcctgctgggctccccccagtgggatgggacagggaggccacacgcactggtgccaaaaccaggcctctgctgccgcccttcctggaggctgcctatgttgggggggaccctgcctcagctgacccggcctctctgccccacccaagcccaaacttggtttctgtgagaatagtggaggaaggtgagatggccagtttgaagcctgtgcctcccagcttaaatcctagcaggagagaggctctggggcagcccccatgggctcctgcccctttcaggcctacagccacatccccaagcccaccaggtgtcaggatagtcacagtgataccagttcagacactaccccatatacacctggaacattgaggatggaaactggactcacattcgacataccccactgggcacacgcacaaacacacacactatggggtggggtgggtgtaggggcttacaaagccttacacagggcgaggggttggtgggagggttggcacctgcacactccatctcctgctcaccacctgcctctaatctgagctgcagcctggctggtcctcccatttctaaagctgaatgtcaaacagtgccaaatgctggggcagggggtgaagaaccctctgtcccacccctagccaccagtgtcctccaagtgccccctcacctctccaggtgctcattgtaaccatttctcactagtgtcaggcccccagtgggaccacatgccactgcctgcacctttcggcagaggaacccccaccagacatcaccctttgccttagcaggggtgactttgtctctcctggctgggccatccttccgccaatctggcccttacacactcaggcctgtgcccactccctatctccttcccacccctacacacacactccctgcttgcaggaggccaaactgtccctcccttgctgaacacacacacacacacacacacacaggtggggactgggcacagctcttcacaccattcattctggtcatttcccccaaaggcatcccagcctgggggccagtggggaactgagggcaaggggatatagtgatggggctcagatggactgggaggagggggagggtgatgcattaattaatggcttcgttaattaatgtcatgttgcttgtcgctttctcagtgtgtgtgtgtggtccatgcccactgctggtgccagggtgggtgtccatgtgcacccggcctggatgccagctgtgtccttcgggggcgtgcgtgtaactgtagtgtagtcaggtgctcaatggagaatataaacatatacagaaaaatatatattttaagtttaaaaaacagaaaaacagacaaaacaatccccatcaggtagctgtctaacccccagctgggtctaatccttctcattacccacccgacctggctgcccctcaccttgggctgggggactggggggccatttccttttctctgccctttttttgttgttctattttgtacagacaagttggaaaaacaacagcgacaaaaaagtcaagaaactttgtaaaatatcgtgtgtgtgattccttgtaaaatattttcaaatggtttattacagaagatcagttattaaataatgttcatattttcacttcaaa

SEQ ID NO: 247 - protein, 1143 aa, Homosapiens
MAVPARTCGASRPGPARTARPWPGCGPHPGPGTRRPTSGPPRPLWLLLPLLPLLAAPGASAYSFPQQHTMQHWARRLEQEVDGVMRIFGGVQQLREIYKDNRNLFEVQENEPQKLVEKVAGDIESLLDRKVQALKRLADAAENFQKAHRWQDNIKEEDIVYYDAKADAELDDPESEDVERGSKASTLRLDFIEDPNFKNKVNYSYAAVQIPTDIYKGSTVILNELNWTEALENVFMENRRQDPTLLWQVFGSATGVTRYYPATPWRAPKKIDLYDVRRRPWYIQGASSPKDMVIIVDVSGSVSGLTLKLMKTSVCEMLDTLSDDDYVNVASFNEKAQPVSCFTHLVQANVRNKKVFKEAVQGMVAKGTTGYKAGFEYAFDQLQNSNITRANCNKMIMMFTDGGEDRVQDVFEKYNWPNRTVRVFTFSVGQHNYDVTPLQWMACANKGYYFEIPSIGAIRINTQEYLDVLGRPMVLAGKEAKQVQWTNVYEDALGLGLVVTGTLPVFNLTQDGPGEKKNQLILGVMGIDVALNDIKRLTPNYTLGANGYVFAIDLNGYVLLHPNLKPQTTNFREPVTLDFLDAELEDENKEEIRRSMIDGNKGHKQIRTLVKSLDERYIDEVTRNYTWVPIRSTNYSLGLVLPPYSTFYLQANLSDQILQVKYFEFLLPSSFESEGHVFIAPREYCKDLNASDNNTEFLKNFIELMEKVTPDSKQCNNFLLHNLILDTGITQQLVERVWRDQDLNTYSLLAVFAATDGGITRVFPNKAAEDWTENPEPFNASFYRRSLDNHGYVFKPPHQDALLRPLELENDTVGILVSTAVELSLGRRTLRPAVVGVKLDLEAWAEKFKVLASNRTHQDQPQKCGPNSHCEMDCEVNNEDLLCVLIDDGGFLVLSNQNHQWDQVGRFFSEVDANLMLALYNNSFYTRKESYDYQAACAPQPPGNLGAAPRGVFVPTVADFLNLAWWTSAAAWSLFQQLLYGLIYHSWFQADPAEAEGSPETRESSCVMKQTQYYFGSVNASYNAIIDCGNCSRLFHAQRLTNTNLLFVVAEKPLCSQCEAGRLLQKETHSDGPEQCELVQRPRYRRGPHICFDYNATEDTSDCGRGASFPPSLGVLVSLQLLLLLGLPPRPQPQVLVHASRRL

SEQ ID NO: 248 - DNA, 2809 bp, Homosapiens
tcagcgatggcatttgcatggtggccctgtctcatcttggctctgctctccagcttggcagcctctggcttcccgagaagcccctttcggctgcttgggaaacggagcctcccggaaggggtggccaatggcatcgaggtctacagtaccaaaatcaactccaaggtgacctcccgttttgctcacaatgttgtcaccatgagagccgtcaaccgtgcagacacggccaaggaggtttcctttgatgtggagctgcccaagacggccttcatcaccaacttcaccttgaccatcgacggtgttacctaccctgggaatgtcaaggagaaggaagttgccaagaagcagtatgaaaaggctgtgtcccagggcaagacggccggcttggtcaaggcctctgggaggaagttggagaagttcacagtctcggtcaacgtggctgcaggcagcaaagtcaccttcgagctaacctacgaggagctgctgaagaggcacaagggcaagtacgagatgtacctcaaggtccagcctaagcaactggtcaaacactttgagatcgaggtagacatcttcgagcctcagggaatcagcatgctggatgctgaggcctctttcatcaccaacgacctcctgggaagcgccctcaccaagtccttctcagggaaaaagggccatgtgtccttcaagcccagcttagaccaacagcgttcatgcccaacctgtacagactccctcctcaatggagatttcactatcacctatgacgtgaacagagaatctcctggcaacgtgcagatagtcaatggctacttcgtgcacttctttgcacctcaaggccttccagtggtgcctaagaacgtggcctttgtgattgacatcagcggctccatggctggtcggaaattagagcagacaaaggaggcccttctcagaatcctggaagatatgaaagaggaagactatctgaatttcatcctgttcagtggagatgtgtccacatggaaagagcacttagtccaggccacgcccgagaacctccaggaggccaggacgtttgtgaagagcatggaggataaaggaatgaccaacatcaatgacgggctgctgaggggcatcagtatgctgaacaaggcccgagaggagcacagaatcccagagaggagcacctccattgtcatcatgctgactgatggggatgccaatgttggtgagagcagacccgaaaaaatccaagagaatgtgcggaatgccatcgggggcaagttccccttgtataacctgggctttggcaacaatctgaattataacttcctggagaacatggccctggagaaccatgggtttgcccggcgcatttatgaggactctgatgccgatttgcagttgcagggcttctatgaggaggtggccaacccactgctgacgggtgtggagatggagtaccccgagaacgctatcctggacctcacccagaacacttaccagcacttctacgatggctctgagatcgtggtggccgggcgcctggtggacgaggacatgaacagctttaaggcagatgtgaagggccatggggccaccaacgacctgaccttcacagaggaggtggacatgaaggagatggagaaggccctgcaggagcgggactacatcttcgggaattacattgagcggctctgggcctacctcaccattgagcagctgctggagaagcgcaagaacgcccatggcgaggagaaggagaacctcacggcccgggccctggacctgtccctcaagtatcactttgtgactccactgacctcaatggtggtgaccaagcctgaggacaacgaggatgagagggccattgccgacaagcctggggaagatgcagaagccacaccggtgagccccgccatgtcctacctgaccagctaccagcctcctcaaaacccctactactatgtggacggggatccccacttcatcatccaaattccggagaaagacgatgccctctgcttcaacatcgatgaagccccaggcacagtgctgcgccttattcaggatgcagtcacaggcctcacagttaatgggcagatcactggcgacaagagaggcagccctgactccaagaccagaaagacttactttggaaaactgggcatcgccaatgctcagatggacttccaggtggaggtgacaacggagaagatcaccctgtggaacagggccgtgccgagcactttcagctggctggacacagtcacagtcacgcaggatgggctgtccatgatgatcaacaggaagaacatggtggtctcctttggagatggggttaccttcgtggtcgtcctacaccaggtgtggaagaaacatcctgtccaccgtgactttctaggcttctacgtggtggacagtcaccggatgtcagcacagacgcatgggctgctggggcaattcttccaaccctttgactttaaagtgtctgacatccggccaggctctgaccccacaaagccagatgccacattggtggtgaagaaccatcagctgattgtcaccaggggctcccagaaagactacagaaaggatgccagcatcggcacgaaggttgtctgctggttcgtccacaacaacggagaagggctgattgatggtgtccacactgactacattgtccccaacctgttttgagtagacacaccagctcctgttgggatggatggcccggattttatggcatctggaacatgggcacagagaggggcctgtgggaggggctgggaaaataaagtccaaggtcgagaccagaaaaaaaaaaaaa

SEQ ID NO: 249 - protein, 890 aa, Homosapiens
MAFAWWPCLILALLSSLAASGFPRSPFRLLGKRSLPEGVANGIEVYSTKINSKVTSRFAHNVVTMRAVNRADTAKEVSFDVELPKTAFITNFTLTIDGVTYPGNVKEKEVAKKQYEKAVSQGKTAGLVKASGRKLEKFTVSVNVAAGSKVTFELTYEELLKRHKGKYEMYLKVQPKQLVKHFEIEVDIFEPQGISMLDAEASFITNDLLGSALTKSFSGKKGHVSFKPSLDQQRSCPTCTDSLLNGDFTITYDVNRESPGNVQIVNGYFVHFFAPQGLPVVPKNVAFVIDISGSMAGRKLEQTKEALLRILEDMKEEDYLNFILFSGDVSTWKEHLVQATPENLQEARTFVKSMEDKGMTNINDGLLRGISMLNKAREEHRIPERSTSIVIMLTDGDANVGESRPEKIQENVRNAIGGKFPLYNLGFGNNLNYNFLENMALENHGFARRIYEDSDADLQLQGFYEEVANPLLTGVEMEYPENAILDLTQNTYQHFYDGSEIVVAGRLVDEDMNSFKADVKGHGATNDLTFTEEVDMKEMEKALQERDYIFGNYIERLWAYLTIEQLLEKRKNAHGEEKENLTARALDLSLKYHFVTPLTSMVVTKPEDNEDERAIADKPGEDAEATPVSPAMSYLTSYQPPQNPYYYVDGDPHFIIQIPEKDDALCFNIDEAPGTVLRLIQDAVTGLTVNGQITGDKRGSPDSKTRKTYFGKLGIANAQMDFQVEVTTEKITLWNRAVPSTFSWLDTVTVTQDGLSMMINRKNMVVSFGDGVTFVVVLHQVWKKHPVHRDFLGFYVVDSHRMSAQTHGLLGQFFQPFDFKVSDIRPGSDPTKPDATLVVKNHQLIVTRGSQKDYRKDASIGTKVVCWFVHNNGEGLIDGVHTDYIVPNLF

SEQ ID NO: 250 - DNA, 3260 bp, Homosapiens
gagttcagaagcctcctggcagacactggagccacgatgaagcccccaaggcctgtccgtacctgcagcaaagttctcgtcctgctttcactgctggccatccaccagactactactgccgaaaagaatggcatcgacatctacagcctcaccgtggactccagggtctcatcccgatttgcccacacggtcgtcaccagccgagtggtcaatagggccaatactgtgcaggaggccaccttccagatggagctgcccaagaaagccttcatcaccaacttctccatgatcatcgatggcatgacctacccagggatcatcaaggagaaggctgaagcccaggcacagtacagcgcagcagtggccaagggaaagagcgctggcctcgtcaaggccaccgggagaaacatggagcagttccaggtgtcggtcagtgtggctcccaatgccaagatcacctttgagctggtctatgaggagctgctcaagcggcgtttgggggtgtacgagctgctgctgaaagtgcggccccagcagctggtcaagcacctgcagatggacattcacatcttcgagccccagggcatcagctttctggagacagagagcaccttcatgaccaaccagctggtagacgccctcaccacctggcagaataagaccaaggctcacatccggttcaagccaacactttcccagcagcaaaagtccccagagcagcaagaaacagtcctggacggcaacctcattatccgctatgatgtggaccgggccatctccgggggctccattcagatcgagaacggctactttgtacactactttgcccccgagggcctaaccacaatgcccaagaatgtggtctttgtcattgacaagagcggctccatgagtggcaggaaaatccagcagacccgggaagccctaatcaagatcctggatgacctcagccccagagaccagttcaacctcatcgtcttcagtacagaagcaactcagtggaggccatcactggtgccagcctcagccgagaacgtgaacaaggccaggagctttgctgcgggcatccaggccctgggagggaccaacatcaatgatgcaatgctgatggctgtgcagttgctggacagcagcaaccaggaggagcggctgcccgaagggagtgtctcactcatcatcctgctcaccgatggcgaccccactgtgggggagactaaccccaggagcatccagaataacgtgcgggaagctgtaagtggccggtacagcctcttctgcctgggcttcggtttcgacgtcagctatgccttcctggagaagctggcactggacaatggcggcctggcccggcgcatccatgaggactcagactctgccctgcagctccaggacttctaccaggaagtggccaacccactgctgacagcagtgaccttcgagtacccaagcaatgccgtggaggaggtcactcagaacaacttccggctcctcttcaagggctcagagatggtggtggctgggaagctccaggaccgggggcctgatgtgctcacagccacagtcagtgggaagctgcctacacagaacatcactttccaaacggagtccagtgtggcagagcaggaggcggagttccagagccccaagtatatcttccacaacttcatggagaggctctgggcatacctgactatccagcagctgctggagcaaactgtctccgcatccgatgctgatcagcaggccctccggaaccaagcgctgaatttatcacttgcctacagctttgtcacgcctctcacatctatggtagtcaccaaacccgatgaccaagagcagtctcaagttgctgagaagcccatggaaggcgaaagtagaaacaggaatgtccactcaggttccactttcttcaaatattatctccagggagcaaaaataccaaaaccagaggcttccttttctccaagaagaggatggaatagacaagctggagctgctggctcccggatgaatttcagacctggggttctcagctccaggcaacttggactcccaggacctcctgatgttcctgaccatgctgcttaccaccccttccgccgtctggccatcttgcctgcttcagcaccaccagccacctcaaatcctgatccagctgtgtctcgtgtcatgaatatgaaaatcgaagaaacaaccatgacaacccaaaccccagcccccatacaggctccctctgccatcctgccactgcctgggcagagtgtggagcggctctgtgtggaccccagacaccgccaggggccagtgaacctgctctcagaccctgagcaaggggttgaggtgactggccagtatgagagggagaaggctgggttctcatggatcgaagtgaccttcaagaaccccctggtatgggttcacgcatcccctgaacacgtggtggtgactcggaaccgaagaagctctgcgtacaagtggaaggagacgctattctcagtgatgcccggcctgaagatgaccatggacaagacgggtctcctgctgctcagtgacccagacaaagtgaccatcggcctgttgttctgggatggccgtggggaggggctccggctccttctgcgtgacactgaccgcttctccagccacgttggagggacccttggccagttttaccaggaggtgctctggggatctccagcagcatcagatgacggcagacgcacgctgagggttcagggcaatgaccactctgccaccagagagcgcaggctggattaccaggaggggcccccgggagtggagatttcctgctggtctgtggagctgtagttctgatggaaggagctgtgcccaccctgtacacttggcttccccctgcaactgcagggccgcttctggggcctggaccaccatggggaggaagagtcccactcattacaaataaagaaaggtggtgtgagcctgggaagtgggtgtctccagttccatgtggccaaatcctagggcctcaacctcgcatcctgaaccttagcatcgtggaacacagaagcttccactgtcagctctcaagagcccatggccaggaaggcccatgctgagctttcagtccagccccttcattttacaaacaaggaaactgagctcgaaccacccatttgagatgtcactgtggcccccagctagaggcccagggctgggagcattctccaggagcagaggttcagtctgcttcatggtctcttggaccagttttgactaca

SEQ ID NO: 251 - protein, 930 aa, Homosapiens
MKPPRPVRTCSKVLVLLSLLAIHQTTTAEKNGIDIYSLTVDSRVSSRFAHTVVTSRVVNRANTVQEATFQMELPKKAFITNFSMIIDGMTYPGIIKEKAEAQAQYSAAVAKGKSAGLVKATGRNMEQFQVSVSVAPNAKITFELVYEELLKRRLGVYELLLKVRPQQLVKHLQMDIHIFEPQGISFLETESTFMTNQLVDALTTWQNKTKAHIRFKPTLSQQQKSPEQQETVLDGNLIIRYDVDRAISGGSIQIENGYFVHYFAPEGLTTMPKNVVFVIDKSGSMSGRKIQQTREALIKILDDLSPRDQFNLIVFSTEATQWRPSLVPASAENVNKARSFAAGIQALGGTNINDAMLMAVQLLDSSNQEERLPEGSVSLIILLTDGDPTVGETNPRSIQNNVREAVSGRYSLFCLGFGFDVSYAFLEKLALDNGGLARRIHEDSDSALQLQDFYQEVANPLLTAVTFEYPSNAVEEVTQNNFRLLFKGSEMVVAGKLQDRGPDVLTATVSGKLPTQNITFQTESSVAEQEAEFQSPKYIFHNFMERLWAYLTIQQLLEQTVSASDADQQALRNQALNLSLAYSFVTPLTSMVVTKPDDQEQSQVAEKPMEGESRNRNVHSGSTFFKYYLQGAKIPKPEASFSPRRGWNRQAGAAGSRMNFRPGVLSSRQLGLPGPPDVPDHAAYHPFRRLAILPASAPPATSNPDPAVSRVMNMKIEETTMTTQTPAPIQAPSAILPLPGQSVERLCVDPRHRQGPVNLLSDPEQGVEVTGQYEREKAGFSWIEVTFKNPLVWVHASPEHVVVTRNRRSSAYKWKETLFSVMPGLKMTMDKTGLLLLSDPDKVTIGLLFWDGRGEGLRLLLRDTDRFSSHVGGTLGQFYQEVLWGSPAASDDGRRTLRVQGNDHSATRERRLDYQEGPPGVEISCWSVEL

SEQ ID NO: 252 - DNA, 566 bp, Homosapiens
caagcaagcaggctatataagtttcagaaggctgggctccactcagatcttttccagcagctgctgccgtgccagagaggcgccttcagagacccagcgcttacacaatacccaccatgtcccaggctggtgctcaggaagcccctatcaagaagaagcgcccccctgtgaaggaggaggacctgaagggggcccgaggaaacctgaccaagaaccaggaaatcaagtccaagacctaccaggtcatgcgagagtgtgagcaagctggctcggccgccccgtcggtgttcagccgcacccgcacaggtaccgagactgtctttgagaagcccaaagccggacccaccaagagtgtcttcggctgagaagtgtgcgccactccccttgctgcccgaatgctcggaaacaggagccttacccaggaactcttttttatgccagaacgcttcctctcccctgctgtctctggggctgccaccctcccccacagtccaggcccttcagccaagggctctgcaccagcaccttggaagcaccaataaagaggatgcccacgtggccccagc

SEQ ID NO: 253 - protein, 82 aa, Homosapiens
MSQAGAQEAPIKKKRPPVKEEDLKGARGNLTKNQEIKSKTYQVMRECEQAGSAAPSVFSRTRTGTETVFEKPKAGPTKSVFG

SEQ ID NO: 254 - DNA, 1614 bp, Homosapiens
tgcgggtttggcggcgctgcgccggcaggcagcgaggccgggcgggccctgggccctcgcgcccctcccgcgaggcctgtcatgcagggccccgccgggaacgcgagccggggactgccaggcgggccgccctccacagtcgcgtccggggcgggccgctgcgagagcggcgcgctcatgcacagcttcggcatcttcctgcaggggctgctcggcgtcgtggccttcagcacgttaatgctcaaacgcttcagagaaccaaagcatgaaagacgtccgtggaggatatggtttttagacacttccaaacaagccataggaatgctgttcatccactttgcaaatgtatacctagcagatctcactgaagaggacccttgttcactgtacctcatcaacttcctcctggacgccactgtgggcatgctgctcatctacgtgggggtgcgcgccgtcagcgtcctggtagagtggcagcagtgggagtccctgcgcttcggcgaatatggagaccctctgcagtgtggagcctgggtcgggcagtgcgctctttacatcgtgatcatgatttttgaaaagtctgtcgtcttcatcgtcctcctaatacttcagtggaaaaaggtggccctgttgaatcccattgaaaacccagacttgaagctggccatcgtcatgctgatcgtccccttctttgtcaacgctttgatgttttgggtagtggacaatttcctcatgagaaaggggaagacgaaagctaagctagaagaaaggggagccaaccaggactcgaggaatgggagcaaggtccgctaccggagggccgcatcccacgaggagtctgagtctgagatcctgatctcagcggatgatgagatggaggagtccgacgtggaggaggacctccgcagactgacccccctcaagcctgtgaagaaaaagaagcaccgctttgggctacccgtatgacacattcccatgctgggggtgacgggagggccccgccagccgctggtgtgcagaggtcatcccacagcatcgttccttaccctctctctgcccttcctttctacctctgctcctcttgctgtctctgcccgctctcgcctgcccccagactactgtgacttaaaaagagggaagaggagccagcgcccgagggggccactggcggctggaggtccccattcagttgcactacaaacactgaccaaatatgcaaggaaggagctgtgtttgtttgttgtcgtcccagacagtgttgtgagggacctgaggccctgccccgtgtccgaccaccgagtggcaaggtggaaggaagcacaggcacacagaccgtgggtgggtctcctcaccgtggctgtgggcagtgcgaacacgtaacaccctcgggctaaaagtgactcgttgaccaagttggaaccggaatgctttcttactcaaaatggcttttgtaactattgatttctgaagctggttttatgagttgtgacagtgttaccaggttgggggtatgtgtttatttcctacaaagtacttacgggactaatgggcaaaacagagatttttaagtcttccgtaaaaaaaaaaaaaaaaaaaaaaaaaaaaaaaaaaaaa

SEQ ID NO: 255 - protein, 294 aa, Homosapiens
MQGPAGNASRGLPGGPPSTVASGAGRCESGALMHSFGIFLQGLLGVVAFSTLMLKRFREPKHERRPWRIWFLDTSKQAIGMLFIHFANVYLADLTEEDPCSLYLINFLLDATVGMLLIYVGVRAVSVLVEWQQWESLRFGEYGDPLQCGAWVGQCALYIVIMIFEKSVVFIVLLILQWKKVALLNPIENPDLKLAIVMLIVPFFVNALMFWVVDNFLMRKGKTKAKLEERGANQDSRNGSKVRYRRAASHEESESEILISADDEMEESDVEEDLRRLTPLKPVKKKKHRFGLPV

SEQ ID NO: 256 - DNA, 3631 bp, Homosapiens
cgcggagcgccgccgccgcctccgccggagcgcgggtggaggggggcggggagagctgccggccgccccgctccgccgaacccagcaggaaggagggcgcgagcgggcgagcgcgggcagcacgggaggaaaaagcttccgcgcgggggagcgaaaagacggaaagaaagaaagaaaacgagcgcgagagggggaaaagcgagcgatcgagcgagcgcgcgcgcgaaaactccgggcaggaaggtggacttttaaatattctccactgaagcaaatgctgcaacaatttgcatttccttcaccaatgtcgtcttgtgccttttcttgttcctactgtaaaggagatgggttagatgttcactttcatttggacccgtggatacccattgaacagatgcttgaaacctgcaagtaatcttcagatcctagcagaaccataggcctttcctttgttttgggaggatatagcctgcctatatgctgtggaaatgaacggggagcagcagcttgatgcagatgccggctctggtatggaagaggtagaattaagctgggaagattatctagaagaaacagggtccacagcagttccctatgggtcttttaaacatgtggacacacgtttgcaaaatggatttgctcctgggatgaagctggaggtggctgtgagaacagatcctgagacctactgggttgccaccgttatcactacctgtgagcagttgctccttctccgctatgatggctatggggaggatcggagagcagatttctggtgtgacatcaggaaggctgatctctaccccattgggtggtgtgagcagaataagaagacccttgaagccccagaaggcatcagagataaagtatctgactgggatgagtttctgcggcagaccctgataggagcatgtagtcctcctgttccgctgctagagggcctccgtaatgggaggaatcctttagatctcattgctccaggatccagactagaatgtcaagctttccaggactctttaagcacttggattgttactgtagtagaaaacattggaggaaggctgaagctacgttatgaaggacttgaaagttctgacaattatgaacattggttgtattacttggatccatttcttcatcacgttggttgggctgctcaacagggatatgagcttcagcccccttcagccattagacatctaaaaaatgaagctgagtggcaagagattttggccaaagtgaaagaggaagaggaagagccattaccatcttacttatttaaggacaaacaagttattggcattcatacattctctgtaaacatgaaattggaagctgtagacccctggtctccttttgggatctctcctgctacagttgttaaggtttttgatgagaagtactttctggtggaaatggatgacttgcgtcctgagaaccacgcacggcgatcctttgtgtgccacgccgacagtcctggcatcttccctgtgcagtggagtctgaagaatggcctacacatcagcccccctccaggctacccaagccaggactttgactgggctgactacctcaaacagtgtggtgctgaagctgctccccagaggtgcttccctccgttaatttctgaacatgaatttaaggagaacatgaagctcgaggcggtgaaccccattctccctgaagaagtgtgtgttgctaccatcactgcagtgagaggctcctacctgtggctccagctggagggttctaagaagcctatacctgaatgtattgtgagtgtggaatccatggatatatttcctttgggctggtgtgaaaccaacggccaccccctcagcactcctcgccgagcacgagtatataaacagaggaaaattgcagtggttcagccagaaaaacaagtaccatcctcgaggactgtccacgagggcctgaggaatcaggagctgaactccacagagtcagttatgattaatggaaaatattgctgtccaaagatatacttcaaccaccgttgcttctcagggccatatcttaacaaaggaagaattgctgagctgcctcaatgtgtaggacctgggaactgtgttctggtccttagagaggtcctcactttacttatcaatgcagcctacaaacccagccgtgtccttcgggagctccagctggacaaagactctgtgtggcacggatgtggggaagtcctaaaagccaaatataaaggaaagagttatcgggctactgttgagatagtgaaaacagcagatcgggtgactgaattctgccggcaaacctgtatcaaactggaatgctgtcctaacctcttcggtccacggatggttctggataagtgttctgagaactgttctgtacttacaaagaccaaatacacacactattacggaaagaagaaaaataaaagaattgggaggccacctggtgggcatagtaacttagcttgtgccctgaaaaaagccagtaagaggagaaagaggcggaaaaatgtttttgttcataagaagaaacgctcctctgcatctgttgataataccccagcgggctctccccagggaagtgggggtgaagatgaggatgacccagatgaaggggatgatgattccctaagtgaaggcagtacatccgagcagcaggatgagctacaggaagaatcagaaatgtcagaaaaaaagtcatgctcctcttctcccacccaaagtgagatatccacatcgctgcctccagatagacaaaggagaaaaagggagcttcgcaccttttcattttctgacgatgaaaataaacctccttcaccaaaggaaataaggatcgaagttgctgaaaggcttcacctggacagtaaccccttgaagtggagtgtggcagacgttgtgcggttcatcagatccactgactgtgctccattagcaagaatattcctagaccaggaaattgatgggcaggccctgttgctccttacccttcccactgttcaagaatgcatggacttaaaattgggccctgccatcaaactttgccatcacatagagaggatcaagtttgctttttatgagcagtttgccaactgagaaggacaaccaaagtgagctggatctttgaagcacaaatgcagcaaatccttcaccctgctttataagtggagctggaatagtcctggggctctggggcctgcaggtatcagcttgctctctttgcactttcggggaaggaggactcacagtgaggaagcaaaaactgtgcacagaagtggatcacctgctggtggaaatgtggacatctcttgttcagcagatggcagtttttaaaaaataaaggttgtgaggaaaagacttatataagaagaaaagcatttccagtggtgtggcctgaaaacaaagaataacctaggctgctggaaagcacccttttggttgttttcattctgttccctcccattgtagattgaactttgttctctgctttctttttcttggaaagagaggacttagctttaagtcagcactgatttgggactgttcctaaggcatatcagtgcttcattgtcattgtgtttttaaactttttaaaattaaaacagttcattttggggatgaaaaaaaaaaaaaaaaaa

SEQ ID NO: 257 - protein, 866 aa, Homosapiens
MNGEQQLDADAGSGMEEVELSWEDYLEETGSTAVPYGSFKHVDTRLQNGFAPGMKLEVAVRTDPETYWVATVITTCEQLLLLRYDGYGEDRRADFWCDIRKADLYPIGWCEQNKKTLEAPEGIRDKVSDWDEFLRQTLIGACSPPVPLLEGLRNGRNPLDLIAPGSRLECQAFQDSLSTWIVTVVENIGGRLKLRYEGLESSDNYEHWLYYLDPFLHHVGWAAQQGYELQPPSAIRHLKNEAEWQEILAKVKEEEEEPLPSYLFKDKQVIGIHTFSVNMKLEAVDPWSPFGISPATVVKVFDEKYFLVEMDDLRPENHARRSFVCHADSPGIFPVQWSLKNGLHISPPPGYPSQDFDWADYLKQCGAEAAPQRCFPPLISEHEFKENMKLEAVNPILPEEVCVATITAVRGSYLWLQLEGSKKPIPECIVSVESMDIFPLGWCETNGHPLSTPRRARVYKQRKIAVVQPEKQVPSSRTVHEGLRNQELNSTESVMINGKYCCPKIYFNHRCFSGPYLNKGRIAELPQCVGPGNCVLVLREVLTLLINAAYKPSRVLRELQLDKDSVWHGCGEVLKAKYKGKSYRATVEIVKTADRVTEFCRQTCIKLECCPNLFGPRMVLDKCSENCSVLTKTKYTHYYGKKKNKRIGRPPGGHSNLACALKKASKRRKRRKNVFVHKKKRSSASVDNTPAGSPQGSGGEDEDDPDEGDDDSLSEGSTSEQQDELQEESEMSEKKSCSSSPTQSEISTSLPPDRQRRKRELRTFSFSDDENKPPSPKEIRIEVAERLHLDSNPLKWSVADVVRFIRSTDCAPLARIFLDQEIDGQALLLLTLPTVQECMDLKLGPAIKLCHHIERIKFAFYEQFAN

SEQ ID NO: 258 - DNA, 3712 bp, Homosapiens
ggcccgggcggtcgctgcgcggtggcggagcgtctagtggccgccgcaaccggtggctccgggccgccgttgtgaagtgagcgggcctctcccgcgccgcggcccgccgggcaccgccgctggaccccgcgccgacccggcagcgccccgacctgccgctcgggaggtccgcgaccgtttcgatttctgttcctaaagtccgattttggacgctgaaaaggaggctgtggaggggcgagcggcgtcctgggaagcaaggcctgctctgtgcggagcagaaacgccttgtgcgaacagaaataaattcccgcggaaaggatgaaggtggacttttaaatattctccactgaagcaaatgctgcaacaatttgcatttccttcaccaatgtcgtcttgtgccttttcttgttcctactgtaaaggagatgggttagatgttcactttcatttggacccgtggatacccattgaacagatgcttgaaacctgcaagtaatcttcagatcctagcagaaccataggcctttcctttgttttgggaggatatagcctgcctatatgctgtggaaatgaacggggagcagcagcttgatgcagatgccggctctggtatggaagaggtagaattaagctgggaagattatctagaagaaacagggtccacagcagttccctatgggtcttttaaacatgtggacacacgtttgcaaaatggatttgctcctgggatgaagctggaggtggctgtgagaacagatcctgagacctactgggttgccaccgttatcactacctgtgagcagttgctccttctccgctatgatggctatggggaggatcggagagcagatttctggtgtgacatcaggaaggctgatctctaccccattgggtggtgtgagcagaataagaagacccttgaagccccagaaggcatcagagataaagtatctgactgggatgagtttctgcggcagaccctgataggagcatgtagtcctcctgttccgctgctagagggcctccgtaatgggaggaatcctttagatctcattgctccaggatccagactagaatgtcaagctttccaggactctttaagcacttggattgttactgtagtagaaaacattggaggaaggctgaagctacgttatgaaggacttgaaagttctgacaattatgaacattggttgtattacttggatccatttcttcatcacgttggttgggctgctcaacagggatatgagcttcagcccccttcagccattagacatctaaaaaatgaagctgagtggcaagagattttggccaaagtgaaagaggaagaggaagagccattaccatcttacttatttaaggacaaacaagttattggcattcatacattctctgtaaacatgaaattggaagctgtagacccctggtctccttttgggatctctcctgctacagttgttaaggtttttgatgagaagtactttctggtggaaatggatgacttgcgtcctgagaaccacgcacggcgatcctttgtgtgccacgccgacagtcctggcatcttccctgtgcagtggagtctgaagaatggcctacacatcagcccccctccaggctacccaagccaggactttgactgggctgactacctcaaacagtgtggtgctgaagctgctccccagaggtgcttccctccgttaatttctgaacatgaatttaaggagaacatgaagctcgaggcggtgaaccccattctccctgaagaagtgtgtgttgctaccatcactgcagtgagaggctcctacctgtggctccagctggagggttctaagaagcctatacctgaatgtattgtgagtgtggaatccatggatatatttcctttgggctggtgtgaaaccaacggccaccccctcagcactcctcgccgagcacgagtatataaacagaggaaaattgcagtggttcagccagaaaaacaagtaccatcctcgaggactgtccacgagggcctgaggaatcaggagctgaactccacagagtcagttatgattaatggaaaatattgctgtccaaagatatacttcaaccaccgttgcttctcagggccatatcttaacaaaggaagaattgctgagctgcctcaatgtgtaggacctgggaactgtgttctggtccttagagaggtcctcactttacttatcaatgcagcctacaaacccagccgtgtccttcgggagctccagctggacaaagactctgtgtggcacggatgtggggaagtcctaaaagccaaatataaaggaaagagttatcgggctactgttgagatagtgaaaacagcagatcgggtgactgaattctgccggcaaacctgtatcaaactggaatgctgtcctaacctcttcggtccacggatggttctggataagtgttctgagaactgttctgtacttacaaagaccaaatacacacactattacggaaagaagaaaaataaaagaattgggaggccacctggtgggcatagtaacttagcttgtgccctgaaaaaagccagtaagaggagaaagaggcggaaaaatgtttttgttcataagaagaaacgctcctctgcatctgttgataataccccagcgggctctccccagggaagtgggggtgaagatgaggatgacccagatgaaggggatgatgattccctaagtgaaggcagtacatccgagcagcaggatgagctacaggaagaatcagaaatgtcagaaaaaaagtcatgctcctcttctcccacccaaagtgagatatccacatcgctgcctccagatagacaaaggagaaaaagggagcttcgcaccttttcattttctgacgatgaaaataaacctccttcaccaaaggaaataaggatcgaagttgctgaaaggcttcacctggacagtaaccccttgaagtggagtgtggcagacgttgtgcggttcatcagatccactgactgtgctccattagcaagaatattcctagaccaggaaattgatgggcaggccctgttgctccttacccttcccactgttcaagaatgcatggacttaaaattgggccctgccatcaaactttgccatcacatagagaggatcaagtttgctttttatgagcagtttgccaactgagaaggacaaccaaagtgagctggatctttgaagcacaaatgcagcaaatccttcaccctgctttataagtggagctggaatagtcctggggctctggggcctgcaggtatcagcttgctctctttgcactttcggggaaggaggactcacagtgaggaagcaaaaactgtgcacagaagtggatcacctgctggtggaaatgtggacatctcttgttcagcagatggcagtttttaaaaaataaaggttgtgaggaaaagacttatataagaagaaaagcatttccagtggtgtggcctgaaaacaaagaataacctaggctgctggaaagcacccttttggttgttttcattctgttccctcccattgtagattgaactttgttctctgctttctttttcttggaaagagaggacttagctttaagtcagcactgatttgggactgttcctaaggcatatcagtgcttcattgtcattgtgtttttaaactttttaaaattaaaacagttcattttggggatgaaaaaaaaaaaaaaaaaa

SEQ ID NO: 259 - protein, 866 aa, Homosapiens; identical to SEQ ID NO: 257

SEQ ID NO: 260 - DNA, 3512 bp, Homosapiens
cgcggagcgccgccgccgcctccgccggagcgcgggtggaggggggcggggagagctgccggccgccccgctccgccgaacccagcaggaaggagggcgcgagcgggcgagcgcgggcagcacgggaggaaaaagcttccgcgcgggggagcgaaaagacggaaagaaagaaagaaaacgagcgcgagagggggaaaagcgagcgatcgagcgagcgcgcgcgcgaaaactccgggcagcactttcatttggacccgtggatacccattgaacagatgcttgaaacctgcaagtaatcttcagatcctagcagaaccataggcctttcctttgttttgggaggatatagcctgcctatatgctgtggaaatgaacggggagcagcagcttgatgcagatgccggctctggtatggaagaggtagaattaagctgggaagattatctagaagaaacagggtccacagcagttccctatgggtcttttaaacatgtggacacacgtttgcaaaatggatttgctcctgggatgaagctggaggtggctgtgagaacagatcctgagacctactgggttgccaccgttatcactacctgtgagcagttgctccttctccgctatgatggctatggggaggatcggagagcagatttctggtgtgacatcaggaaggctgatctctaccccattgggtggtgtgagcagaataagaagacccttgaagccccagaaggcatcagagataaagtatctgactgggatgagtttctgcggcagaccctgataggagcatgtagtcctcctgttccgctgctagagggcctccgtaatgggaggaatcctttagatctcattgctccaggatccagactagaatgtcaagctttccaggactctttaagcacttggattgttactgtagtagaaaacattggaggaaggctgaagctacgttatgaaggacttgaaagttctgacaattatgaacattggttgtattacttggatccatttcttcatcacgttggttgggctgctcaacagggatatgagcttcagcccccttcagccattagacatctaaaaaatgaagctgagtggcaagagattttggccaaagtgaaagaggaagaggaagagccattaccatcttacttatttaaggacaaacaagttattggcattcatacattctctgtaaacatgaaattggaagctgtagacccctggtctccttttgggatctctcctgctacagttgttaaggtttttgatgagaagtactttctggtggaaatggatgacttgcgtcctgagaaccacgcacggcgatcctttgtgtgccacgccgacagtcctggcatcttccctgtgcagtggagtctgaagaatggcctacacatcagcccccctccaggctacccaagccaggactttgactgggctgactacctcaaacagtgtggtgctgaagctgctccccagaggtgcttccctccgttaatttctgaacatgaatttaaggagaacatgaagctcgaggcggtgaaccccattctccctgaagaagtgtgtgttgctaccatcactgcagtgagaggctcctacctgtggctccagctggagggttctaagaagcctatacctgaatgtattgtgagtgtggaatccatggatatatttcctttgggctggtgtgaaaccaacggccaccccctcagcactcctcgccgagcacgagtatataaacagaggaaaattgcagtggttcagccagaaaaacaagtaccatcctcgaggactgtccacgagggcctgaggaatcaggagctgaactccacagagtcagttatgattaatggaaaatattgctgtccaaagatatacttcaaccaccgttgcttctcagggccatatcttaacaaaggaagaattgctgagctgcctcaatgtgtaggacctgggaactgtgttctggtccttagagaggtcctcactttacttatcaatgcagcctacaaacccagccgtgtccttcgggagctccagctggacaaagactctgtgtggcacggatgtggggaagtcctaaaagccaaatataaaggaaagagttatcgggctactgttgagatagtgaaaacagcagatcgggtgactgaattctgccggcaaacctgtatcaaactggaatgctgtcctaacctcttcggtccacggatggttctggataagtgttctgagaactgttctgtacttacaaagaccaaatacacacactattacggaaagaagaaaaataaaagaattgggaggccacctggtgggcatagtaacttagcttgtgccctgaaaaaagccagtaagaggagaaagaggcggaaaaatgtttttgttcataagaagaaacgctcctctgcatctgttgataataccccagcgggctctccccagggaagtgggggtgaagatgaggatgacccagatgaaggggatgatgattccctaagtgaaggcagtacatccgagcagcaggatgagctacaggaagaatcagaaatgtcagaaaaaaagtcatgctcctcttctcccacccaaagtgagatatccacatcgctgcctccagatagacaaaggagaaaaagggagcttcgcaccttttcattttctgacgatgaaaataaacctccttcaccaaaggaaataaggatcgaagttgctgaaaggcttcacctggacagtaaccccttgaagtggagtgtggcagacgttgtgcggttcatcagatccactgactgtgctccattagcaagaatattcctagaccaggaaattgatgggcaggccctgttgctccttacccttcccactgttcaagaatgcatggacttaaaattgggccctgccatcaaactttgccatcacatagagaggatcaagtttgctttttatgagcagtttgccaactgagaaggacaaccaaagtgagctggatctttgaagcacaaatgcagcaaatccttcaccctgctttataagtggagctggaatagtcctggggctctggggcctgcaggtatcagcttgctctctttgcactttcggggaaggaggactcacagtgaggaagcaaaaactgtgcacagaagtggatcacctgctggtggaaatgtggacatctcttgttcagcagatggcagtttttaaaaaataaaggttgtgaggaaaagacttatataagaagaaaagcatttccagtggtgtggcctgaaaacaaagaataacctaggctgctggaaagcacccttttggttgttttcattctgttccctcccattgtagattgaactttgttctctgctttctttttcttggaaagagaggacttagctttaagtcagcactgatttgggactgttcctaaggcatatcagtgcttcattgtcattgtgtttttaaactttttaaaattaaaacagttcattttggggatgaaaaaaaaaaaaaaaaaa

SEQ ID NO: 261 - protein, 866 aa, Homosapiens; identical to SEQ ID NO: 257

SEQ ID NO: 262 - DNA, 2045 bp, Homosapiens
atggcacggacgcagggcgcatgcgcccgcgcccccccacccccagctccgcggtcctccaggcagcctgcgcccctcgcgccgcgcccgtggagctcccgggcccggctgccccgctcccgccccagcgccatccctcctggctggggccgcgcgggaggcaaggactccgcgggctggtgtgccgggggtccggcgccgcgggccacccacgcccccagccagcaactcggcgcggacggccccgaggccgtggcgcaggacacgcggcggcgcctcgggcccccgacggcgctgtggccccgagcggaacggcccggaagaggagacgcgtccccgggaacccagtgcccgccctggcccagccccgatccagcctgcgcctcacctcgggttgtagacagagcggcggggatcccagaggggttcgcgggtcggacctggagtaccggcccggcgaagcgcgccgctgtcgcccgcacgtgactggctcggacaagatggcatgagcggagaagcggccggatcccagatgcgcgcgtgccgccgccgcgggcactgcgcccgtttgcctgcccctcgtcggggatcgggcgctccctctgagacctgaaagggcacccaagtgccccctgtctgcgaagtccggcgcgggcccttcggcgcccccgatgtctctaggcttccgcaggaggcgccctgtaaatcttgagtcttcctgcagcgagggggcacaggacagctgcgaattgggacgaacgagcccagagccccgggaaggatcagaacctcgaaggcggcttcaagtcggccccgcagcccgaggtgaccgtgggcggttacgttgcccgagctcgccccctcctcctgagcgcaggtgcccgtgggacatacacccgcccacctgctccggaaagttccctccagaagggagttcccgcgccaccgagacccgggagctcccgatcagactcccaggccgtgaaaggcgttatcggacagggcccagaggcgcccccacagcaagaagaaagtctggggttctcaccgtgtgccaggtgcgagctcaagccacctccctcaaccgctctgagaaatatcccacttcacaaacttgctcaaagtcacgctgctggctggatttgaatccagattttttttagcaccactgaaaaaacaatatgacaaccggagaaagaaaaatctaaaaagaatacagtaatccatattgttacaaagaaatgcaacttttcacgacatgaaacatatatatactgtgtatagttgcaaccacactttttttgttactactttcactaccatttttatttgttcacgattcatttttaaggtgtgcaggtgtccttaactattcactcagccccctaatgtttttggttctttacggttgtttgctaacgtatccttgaattctgcacttgggacaaatacctgggagtggaaaggctcccaggtagaaggctatgaatggccaagtggtcttggcttacagcgtcatatttttcccaagagctgccccaattattctaccgcctccaaggaacaagtgtaaggagtttaacacacttataaacattgagtgccatttcccccctactttaatagtctattgctagttcaaggttacttagcatttcttaggtgacacaacattcaaaaatgaatgtttttccatgcatttactatatgcattccctctcctgtgaataatctattcatatccatcttctggggacttgaacctcttctaactttgaacaagcatttttttatgttacagatattacttctttgtcgtcattgatgcaaatattttctagcctgttgttctttcttgttttattctaatgttcagtgtgtcattctaatgttttaattgcttcagtgctgacaaagtgagctttctgctgcccatctgatagtcttttttctgctagttttgtacaatttcatttcatatttcattctctgatgactatcccgattttattttggcttatttatttggagtaaaatatggacat

SEQ ID NO: 263 - protein, 161 aa, Homosapiens
MARTQGACARAPPPPAPRSSRQPAPLAPRPWSSRARLPRSRPSAIPPGWGRAGGKDSAGWCAGGPAPRATHAPSQQLGADGPEAVAQDTRRRLGPPTALWPRAERPGRGDASPGTQCPPWPSPDPACASPRVVDRAAGIPEGFAGRTWSTGPAKRAAVART

SEQ ID NO: 264 - DNA, 2045 bp, Homosapiens
atggcacggacgcagggcgcatgcgcccgcgcccccccacccccagctccgcggtcctcccggcagcctgcgcccctcgcgccgcgcccgtggagctcccgggcccggctgccccgctcccgccccagcgccatccctcctggctggggccgcgcgggaggcaaggactccgcgggctggtgtgccgggggtccggcgccgcgggccacccacgcccccagccagcaactcggcgcggacggccccgaggccgtggcgcaggacacgcggcggcgcctcgggcccccgacggcgctgtggccccgagcggaacggcccggaagaggagacgcgtccccgggaacccagtgcccgccctggcccagccccgatccagcctgcgcctcacctcgggttgtagacagagcggcggggatcccagaggggttcgcgggtcggacctggagtaccggcccggcgaagcgcgcggctgtcgcccgcacgtgactggctcggacaagatggcatgagcggagaagcggccggatcccagatgcgcgcgtgccgccgccgcgggcactgcgcccgtttgcctgcccctcgtcggggatcgggcgctccctctgagacctgaaagggcacccaagtgccccctgtctgcgaagtccggcgcgggcccttcggcgcccccgatgtctctaggcttccgcaggaggcgccctgtaaatcttgagtcttcctgcagcgagggggcacaggacagctgcgaattgggacgaacgagcccagagccccgggaaggatcagaacctcgaaggcggcttcaagtcggccccgcagcccgaggtgaccgtgggcggttacgttgcccgagctcgccccctcctcctgagcgcaggtgcccgtgggacatacacccgcccacctgctccggaaagttccctccagaagggagttcccgcgccaccgagacccgggagctcccgatcagactcccaggccgtgaaaggcgttatcggacagggcccagaggcgcccccacagcaagaagaaagtctggggttctcaccgtgtgccaggtgcgagctcaagccacctccctcaaccgctctgagaaatatcccacttcacaaacttgctcaaagtcacgctgctggctggatttgaatccagattttttttagcaccactgaaaaaacaatatgacaaccggagaaagaaaaatctaaaaagaatacagtaatccatattgttacaaagaaatgcaacttttcacgacatgaaacatatatatactgtgtatagttgcaaccacactttttttgttactactttcactaccatttttatttgttcacgattcatttttaaggtgtgcaggtgtccttaactattcactcagccccctaatgtttttggttctttacggttgtttgctaacgtatccttgaattctgcacttgggacaaatacctgggagtggaaaggctcccaggtagaaggctatgaatggccaagtggtcttggcttacagcgtcatatttttcccaagagctgccccaattattctaccgcctccaaggaacaagtgtaaggagtttaacacacttataaacattgagtgccatttcccccctactttaatagtctattgctagttcaaggttacttagcatttcttaggtgacacaacattcaaaaatgaatgtttttccatgcatttactatatgcattccctctcctgtgaataatctattcatatccatcttctggggacttgaacctcttctaactttgaacaagcatttttttatgttacagatattacttctttgtcgtcattgatgcaaatattttctagcctgttgttctttcttgttttattctaatgttcagtgtgtcattctaatgttttaattgcttcagtgctgacaaagtgagctttctgctgcccatctgatagtcttttttctgctagttttgtacaatttcatttcatatttcattctctgatgactatcccgattttattttggcttatttatttggagtaaaatatggacat

SEQ ID NO: 265 - protein, 161 aa, Homosapiens; identical to SEQ ID NO: 263

SEQ ID NO: 266 - DNA, 2810 bp, Homosapiens
cggagtggcggcggcatttcctggtgtctgagcctggcgcggaggctatgggcagccaggaggtgctgggccacgcggcccggctggcctcctccggtctcctcctgcaggtgttgtttcggttgatcacctttgtcttgaatgcatttattcttcgcttcctgtcaaaggaaatcgttggcgtagtaaatgtaagactaacgctgctttactcaaccaccctcttcctggccagagaggccttccgcagagcatgtctcagtgggggcacccagcgagactggagccagaccctcaacctgctgtggctaacagtccccctgggtgtgttttggtccttattcctgggctggatctggttgcagctgcttgaagtgcctgatcctaatgttgtccctcactatgcaactggagtggtgctgtttggtctctcggcagtggtggagcttctaggagagcccttttgggtcttggcacaagcacatatgtttgtgaagctcaaggtgattgcagagagcctgtcggtaattcttaagagcgttctgacagcttttctcgtgctgtggttgcctcactggggattgtacattttctctttggcccagcttttctataccacagttctggtgctctgctatgttatttatttcacaaagttactgggttccccagaatcaaccaagcttcaaactcttcctgtctccagaataacagatctgttacccaatattacaagaaatggagcgtttataaactggaaagaggctaaactgacttggagttttttcaaacagtctttcttgaaacagattttgacagaaggcgagcgatatgtgatgacatttttgaatgtattgaactttggtgatcagggtgtgtatgatatagtgaataatcttggctcccttgtggccagattaattttccagccaatagaggaaagtttttatatattttttgctaaggtgctggagaggggaaaggatgccacacttcagaagcaggaggacgttgctgtggctgctgcagtcttggagtccctgctcaagctggccctgctggccggcctgaccatcactgtttttggctttgcctattctcagctggctctggatatctacggagggaccatgcttagctcaggatccggtcctgttttgctgcgttcctactgtctctatgttctcctgcttgccatcaatggagtgacagagtgtttcacatttgctgccatgagcaaagaggaggtcgacaggtacaattttgtgatgctggccctgtcctcctcattcctggtgttatcctatctcttgacccgttggtgtggcagcgtgggcttcatcttggccaactgctttaacatgggcattcggatcacgcagagcctttgcttcatccaccgctactaccgaaggagcccccacaggcccctggctggcctgcacctatcgccagtcctgctcgggacatttgccctcagtggtggggttactgctgtttcggaggtattcctctgctgtgagcagggctggccagccagactggcacacattgctgtgggggccttctgtctgggagcaactctcgggacagcattcctcacagagaccaagctgatccatttcctcaggactcagttaggtgtgcccagacgcactgacaaaatgacatgacttcagggaagcctggacacccgaggcacctggaccagctatgggtagttctgtgggtggaacacattctgtgtaagagccccactgagggctctgcagcggagtgacagcaaccccagagatgaggcaccagagagtgccactgcatgagacacctgtgaccattcgaagtctgaaatgcggggggggagtttcatttttaagtgaagaccaaaagccctttaaaaataatagttttttatcattttatagtaatcagcattttctcttttactaatatactcattccttttgcgtatgattggcctttggagctacatgctccaacaaactatatcttaattgttaactgttaataattatctggcccagaaaaagagatgcagtgattttacccttcacaggaatattgaacttcttctgtaaaagagagagagaaacctctctctttcatgcaccacatggaaacagagtgtggccctgaagttgtggctttctttgtgtcaaaactgtggtctgagtttttagagaaggaaaaatgctactcagtgagaaatccaagaaatgaaaccaggaaggttttcagatcacatttcccagagtgagttcgggagaatcttggctgtcgtgatcacactgttccccgccgccccaggtcagcacatacttgacccagagtgggctctcaggatttgttgattgaagggtgggtgaaagctggctggagactcctggcctggccacctgcaagaggcggactttgaagaaaactgtgatccagttgagccactttgtccctgaggggaatgctgctttgcagctttctgtaacttctcacatgggaattgcactggtgacagataaggtttaacagatgtacttttttatcctcagaataagacaaggcaaactctatatggctagtattactgagtcaggtccctcccgttgacccattaattccagcattgatcaatacaaccaaattccagccccaggacaagagtggcaggcatgggggcctggtactccaggctacagtgtgagcccaggtgttctgcaccttgcagcctgcacactgcaggtgaaatcatgagcagtgttttggaaaaaaaaaaaaaaaaaaaaaaaaaaaaa

SEQ ID NO: 267 - protein, 541 aa, Homosapiens
MGSQEVLGHAARLASSGLLLQVLFRLITFVLNAFILRFLSKEIVGVVNVRLTLLYSTTLFLAREAFRRACLSGGTQRDWSQTLNLLWLTVPLGVFWSLFLGWIWLQLLEVPDPNVVPHYATGVVLFGLSAVVELLGEPFWVLAQAHMFVKLKVIAESLSVILKSVLTAFLVLWLPHWGLYIFSLAQLFYTTVLVLCYVIYFTKLLGSPESTKLQTLPVSRITDLLPNITRNGAFINWKEAKLTWSFFKQSFLKQILTEGERYVMTFLNVLNFGDQGVYDIVNNLGSLVARLIFQPIEESFYIFFAKVLERGKDATLQKQEDVAVAAAVLESLLKLALLAGLTITVFGFAYSQLALDIYGGTMLSSGSGPVLLRSYCLYVLLLAINGVTECFTFAAMSKEEVDRYNFVMLALSSSFLVLSYLLTRWCGSVGFILANCFNMGIRITQSLCFIHRYYRRSPHRPLAGLHLSPVLLGTFALSGGVTAVSEVFLCCEQGWPARLAHIAVGAFCLGATLGTAFLTETKLIHFLRTQLGVPRRTDKMT

SEQ ID NO: 268 - DNA, 2850 bp, Homosapiens
tcgcacttccgtgtgccgcggcgccggagcccgaggcggctgtagcccacatctcccgagcgacccccggcgcccgcccgccgcgcggaggcccgggccacacctcactggccgcttggcccatcccagtcagcgccgcgccgaaccccgtccgcgcgcgccggggagcggcgcccccgccgctgccgccgcgacccttggcgcctgcccctgcaacgggaggtctgcagggaactggccaggcaagggggcaggcccgtttctcctggtggttggtgcgttgtagcagcagcgggagccaggactaaggacaagcaggagctgggagccccagccccactgcaggccccaccatggcgccgttcctgcgcatcgccttcaactcctatgagctgggctccctgcaggccgaggacgaggcgaaccagcccttctgtgccgtgaagatgaaggaggcgctcagcacagagcgtgggaaaacactggtgcagaagaagccgaccatgtatcctgagtggaagtcgacgttcgatgcccacatctatgaggggcgcgtcatccagattgtgctaatgcgggcagcagaggagccagtgtctgaggtgaccgtgggtgtgtcggtgctggccgagcgctgcaagaagaacaatggcaaggctgagttctggctggacctgcagcctcaggccaaggtgttgatgtctgttcagtatttcctggaggacgtggattgcaaacagtctatgcgcagtgaggacgaggccaagttcccaacgatgaaccgccgcggagccatcaaacaggccaaaatccactacatcaagaaccatgagtttatcgccaccttctttgggcaacccaccttctgttctgtgtgcaaagactttgtctggggcctcaacaagcaaggctacaaatgcaggcaatgtaacgctgccatccacaagaaatgcatcgacaagatcatcggcagatgcactggcaccgcggccaacagccgggacactatattccagaaagaacgcttcaacatcgacatgccgcaccgcttcaaggttcacaactacatgagccccaccttctgtgaccactgcggcagcctgctctggggactggtgaagcagggattaaagtgtgaagactgcggcatgaatgtgcaccataaatgccgggagaaggtggccaacctctgcggcatcaaccagaagcttttggctgaggccttgaaccaagtcacccagagagcctcccggagatcagactcagcctcctcagagcctgttgggatatatcagggtttcgagaagaagaccggagttgctggggaggacatgcaagacaacagtgggacctacggcaagatctgggagggcagcagcaagtgcaacatcaacaacttcatcttccacaaggtcctgggcaaaggcagcttcgggaaggtgctgcttggagagctgaagggcagaggagagtactttgccatcaaggccctcaagaaggatgtggtcctgatcgacgacgacgtggagtgcaccatggttgagaagcgggtgctgacacttgccgcagagaatccctttctcacccacctcatctgcaccttccagaccaaggaccacctgttctttgtgatggagttcctcaacgggggggacctgatgtaccacatccaggacaaaggccgctttgaactctaccgtgccacgttttatgccgctgagataatgtgtggactgcagtttctacacagcaagggcatcatttacagggacctcaaactggacaatgtgctgctggaccgggatggccacatcaagattgccgactttgggatgtgcaaagagaacatattcggggagagccgggccagcaccttctgcggcacccctgactatatcgcccctgagatcctacagggcctgaagtacacattctctgtggactggtggtctttcggggtccttctgtacgagatgctcattggccagtcccccttccatggtgatgatgaggatgaactcttcgagtccatccgtgtggacacgccacattatccccgctggatcaccaaggagtccaaggacatcctggagaagctctttgaaagggaaccaaccaagaggctgggagtgaccggaaacatcaaaatccaccccttcttcaagaccataaactggactctgctggaaaagcggaggttggagccacctttcaggcccaaagtgaagtcacccagagactacagtaactttgaccaggagttcctgaacgagaaggcgcgcctctcctacagcgacaagaacctcatcgactccatggaccagtctgcattcgctggcttctcctttgtgaaccccaaattcgagcacctcctggaagattgaggttcctggacagatcaggctagccctgccctccacccacacctgcccgctccccacgataagcaccagtgggactgtggtgacttctgctgctggccccgcccctgcccccagagcgtccttggctgccgtctggccgggctctcatggtacttcctctgtgaactgtgtgtgaatctgcttttcctctgccttcggagggaaattgtaaatcctgtgtttcattacttgaatgtagttatctattgaaaatatatattatatacatagacatatatatatatataataggctgtatatattgctcagtagagaaaaaccatgggggactggtgatatgttgatctttttcaaaaaaatatatatatgacaaaaaaaaaaaaaaaggagcacaagctgtttgaaccaccaggtttatttgtgtgtctaaataaacaccaaatagtaccaaaaaaaaaaaaaaaaa

SEQ ID NO: 269 - protein, 676 aa, Homosapiens
MAPFLRIAFNSYELGSLQAEDEANQPFCAVKMKEALSTERGKTLVQKKPTMYPEWKSTFDAHIYEGRVIQIVLMRAAEEPVSEVTVGVSVLAERCKKNNGKAEFWLDLQPQAKVLMSVQYFLEDVDCKQSMRSEDEAKFPTMNRRGAIKQAKIHYIKNHEFIATFFGQPTFCSVCKDFVWGLNKQGYKCRQCNAAIHKKCIDKIIGRCTGTAANSRDTIFQKERFNIDMPHRFKVHNYMSPTFCDHCGSLLWGLVKQGLKCEDCGMNVHHKCREKVANLCGINQKLLAEALNQVTQRASRRSDSASSEPVGIYQGFEKKTGVAGEDMQDNSGTYGKIWEGSSKCNINNFIFHKVLGKGSFGKVLLGELKGRGEYFAIKALKKDVVLIDDDVECTMVEKRVLTLAAENPFLTHLICTFQTKDHLFFVMEFLNGGDLMYHIQDKGRFELYRATFYAAEIMCGLQFLHSKGIIYRDLKLDNVLLDRDGHIKIADFGMCKENIFGESRASTFCGTPDYIAPEILQGLKYTFSVDWWSFGVLLYEMLIGQSPFHGDDEDELFESIRVDTPHYPRWITKESKDILEKLFEREPTKRLGVTGNIKIHPFFKTINWTLLEKRRLEPPFRPKVKSPRDYSNFDQEFLNEKARLSYSDKNLIDSMDQSAFAGFSFVNPKFEHLLED

SEQ ID NO: 270 - DNA, 2738 bp, Homosapiens
tcgcacttccgtgtgccgcggcgccggagcccgaggcggctgtagcccacatctcccgagcgacccccggcgcccgcccgccgcgcggaggcccgggccacacctcactggccgcttggcccatcccagtcagcgccgcgccgaaccccgtccgcgcgcgccggggagcggcgcccccgccgctgccgccgcgacccttggcgcctgcccctgcaacgggagccccactgcaggccccaccatggcgccgttcctgcgcatcgccttcaactcctatgagctgggctccctgcaggccgaggacgaggcgaaccagcccttctgtgccgtgaagatgaaggaggcgctcagcacagagcgtgggaaaacactggtgcagaagaagccgaccatgtatcctgagtggaagtcgacgttcgatgcccacatctatgaggggcgcgtcatccagattgtgctaatgcgggcagcagaggagccagtgtctgaggtgaccgtgggtgtgtcggtgctggccgagcgctgcaagaagaacaatggcaaggctgagttctggctggacctgcagcctcaggccaaggtgttgatgtctgttcagtatttcctggaggacgtggattgcaaacagtctatgcgcagtgaggacgaggccaagttcccaacgatgaaccgccgcggagccatcaaacaggccaaaatccactacatcaagaaccatgagtttatcgccaccttctttgggcaacccaccttctgttctgtgtgcaaagactttgtctggggcctcaacaagcaaggctacaaatgcaggcaatgtaacgctgccatccacaagaaatgcatcgacaagatcatcggcagatgcactggcaccgcggccaacagccgggacactatattccagaaagaacgcttcaacatcgacatgccgcaccgcttcaaggttcacaactacatgagccccaccttctgtgaccactgcggcagcctgctctggggactggtgaagcagggattaaagtgtgaagactgcggcatgaatgtgcaccataaatgccgggagaaggtggccaacctctgcggcatcaaccagaagcttttggctgaggccttgaaccaagtcacccagagagcctcccggagatcagactcagcctcctcagagcctgttgggatatatcagggtttcgagaagaagaccggagttgctggggaggacatgcaagacaacagtgggacctacggcaagatctgggagggcagcagcaagtgcaacatcaacaacttcatcttccacaaggtcctgggcaaaggcagcttcgggaaggtgctgcttggagagctgaagggcagaggagagtactttgccatcaaggccctcaagaaggatgtggtcctgatcgacgacgacgtggagtgcaccatggttgagaagcgggtgctgacacttgccgcagagaatccctttctcacccacctcatctgcaccttccagaccaaggaccacctgttctttgtgatggagttcctcaacgggggggacctgatgtaccacatccaggacaaaggccgctttgaactctaccgtgccacgttttatgccgctgagataatgtgtggactgcagtttctacacagcaagggcatcatttacagggacctcaaactggacaatgtgctgctggaccgggatggccacatcaagattgccgactttgggatgtgcaaagagaacatattcggggagagccgggccagcaccttctgcggcacccctgactatatcgcccctgagatcctacagggcctgaagtacacattctctgtggactggtggtctttcggggtccttctgtacgagatgctcattggccagtcccccttccatggtgatgatgaggatgaactcttcgagtccatccgtgtggacacgccacattatccccgctggatcaccaaggagtccaaggacatcctggagaagctctttgaaagggaaccaaccaagaggctgggagtgaccggaaacatcaaaatccaccccttcttcaagaccataaactggactctgctggaaaagcggaggttggagccacctttcaggcccaaagtgaagtcacccagagactacagtaactttgaccaggagttcctgaacgagaaggcgcgcctctcctacagcgacaagaacctcatcgactccatggaccagtctgcattcgctggcttctcctttgtgaaccccaaattcgagcacctcctggaagattgaggttcctggacagatcaggctagccctgccctccacccacacctgcccgctccccacgataagcaccagtgggactgtggtgacttctgctgctggccccgcccctgcccccagagcgtccttggctgccgtctggccgggctctcatggtacttcctctgtgaactgtgtgtgaatctgcttttcctctgccttcggagggaaattgtaaatcctgtgtttcattacttgaatgtagttatctattgaaaatatatattatatacatagacatatatatatatataataggctgtatatattgctcagtagagaaaaaccatgggggactggtgatatgttgatctttttcaaaaaaatatatatatgacaaaaaaaaaaaaaaaggagcacaagctgtttgaaccaccaggtttatttgtgtgtctaaataaacaccaaatagtaccaaaaaaaaaaaaaaaaa

SEQ ID NO: 271 - protein, 676 aa, Homosapiens; identical to SEQ ID NO: 269

SEQ ID NO: 272 - DNA, 2038 bp, Homosapiens
atggagagctaccacaagcctgaccagcagaagctgcaggccttgaaggacacggccaaccgcctacgtatcagctccatccaggccaccactgcggcgggctctggccaccccacgtcatgctgcagcgccgcagagatcatggctgtcctctttttccacaccatgcgctacaagtcccaggacccccggaatccgcacaatgaccgctttgtgctctccaagggccatgcagctcccatcctctacgcggtctgggctgaagctggtttcctggccgaggcggagctgctgaacctgaggaagatcagctccgacttggacgggcacccggtcccgaaacaagctttcaccgacgtggccactggctccctgggccagggcctcggggccgcttgtgggatggcctacaccggcaaatacttcgacaaggccagctaccgagtctattgcttgctgggagacggggagctgtcagagggctctgtatgggaggccatggccttcgccagcatctataagctggacaacctcgtggccattctagacatcaatcgcctgggccagagtgacccggcccctctgcagcaccagatggacatctaccagaagcggtgcgaggccttcggttggcatgccatcatcgtggatggacacagcgtggaggagctgtgcaaggcctttggccaggccaagcaccagccaacagccatcattgccaagaccttcaagggccgagggatcacgggggtagaagataaggagtcttggcatgggaagcccctccccaaaaacatggctgagcagatcatccaggagatctacagccagatccagagcaaaaagaagatcctggcaacccctccacaggaggacgcaccctcagtggacattgccaacatccgcatgcccagcctgcccagctacaaagttggggacaagatagccacccgcaaggcctacgggcaggcactggccaagctgggccatgccagtgaccgcatcatcgccctggatggggacaccaaaaattccaccttctcggagatcttcaaaaaggagcacccggaccgcttcatcgagtgctacattgctgagcagaacatggtgagcatcgcggtgggctgtgccacccgcaacaggacggtgcccttctgcagcacttttgcagccttcttcacgcgggcctttgaccagattcgcatggccgccatctccgagagcaacattaacctctgcggctcccactgcggcgtttccatcggggaagacgggccctcccagatggccctagaagatctggctatgtttcggtcagtccccacatcaactgtcttttacccaagtgatggcgttgctacagagaaggcagtggaactagccgccaatacaaagggtatctgcttcatccggaccagccgcccagaaaatgccatcatctataacaacaatgaggacttccaggtcggacaagccaaggtggtcctgaagagcaaggatgaccaggtgaccgttatcggggctggggtgaccctgcacgaggccttggccgctgccgaactgctgaagaaagaaaagatcaacatccgcgtgctggaccccttcaccatcaagcccctggacagaaaactcattctcgacagcgctcgtgccaccaagggcaggatcctcaccgtggaggaccattattatgaaggtggcattggtgaggctgtgtccagtgcagtagtgggcgagcctggcatcactgtcacccacctggcagttaaccgggtaccaagaagtgggaagccggctgagctgctgaagatgtttggtatcgacagggatgccattgcacaagctgtgaggggcctcatcaccaaggcctagggcgggtatgaagtgtggggcgggggtctatacattcctgagattctgggaaaggtgctcaaagatgtactgagaggaggggtaaatatatgttttgagaaaaatgaaaaaaaaaaaaaaaaaaaaaaaaaaaaaaaaaaaaaaaaaaaaaaaaaaaaaaaaaaaa

SEQ ID NO: 273 - protein, 623 aa, Homosapiens
MESYHKPDQQKLQALKDTANRLRISSIQATTAAGSGHPTSCCSAAEIMAVLFFHTMRYKSQDPRNPHNDRFVLSKGHAAPILYAVWAEAGFLAEAELLNLRKISSDLDGHPVPKQAFTDVATGSLGQGLGAACGMAYTGKYFDKASYRVYCLLGDGELSEGSVWEAMAFASIYKLDNLVAILDINRLGQSDPAPLQHQMDIYQKRCEAFGWHAIIVDGHSVEELCKAFGQAKHQPTAIIAKTFKGRGITGVEDKESWHGKPLPKNMAEQIIQEIYSQIQSKKKILATPPQEDAPSVDIANIRMPSLPSYKVGDKIATRKAYGQALAKLGHASDRIIALDGDTKNSTFSEIFKKEHPDRFIECYIAEQNMVSIAVGCATRNRTVPFCSTFAAFFTRAFDQIRMAAISESNINLCGSHCGVSIGEDGPSQMALEDLAMFRSVPTSTVFYPSDGVATEKAVELAANTKGICFIRTSRPENAIIYNNNEDFQVGQAKVVLKSKDDQVTVIGAGVTLHEALAAAELLKKEKINIRVLDPFTIKPLDRKLILDSARATKGRILTVEDHYYEGGIGEAVSSAVVGEPGITVTHLAVNRVPRSGKPAELLKMFGIDRDAIAQAVRGLITKA

SEQ ID NO: 274 - DNA, 2054 bp, Homosapiens
tttgcctcgatggcactttcctgtccgcgactccgcccccaccagaggggctaggctctgggattcaagatggaggcgctgagtcgagctgggcaggagatgagcctagcggccctgaagcaacacgacccctatatcaccagcatcgcagacctcacgggccaggtcgctctgtacaccttctgccccaaggccaaccagtgggagaagactgatatagaagggaccttattcgtatatcgaaggtcagcttccccttaccatggttttaccattgtgaatcgactaaatatgcacaatctagttgaaccagtgaataaagatttggaatttcagctccatgaaccatttcttctgtatagaaatgcaagcttgtcgatatatagtatctggttttatgacaagaatgactgtcaccgcatagcaaaactcatggctgatgtggtagaagaggagacacggcgatcccagcaagctgctcgggacaaacagagtcccagccaggccaatggctgcagcgaccacaggcccatcgacatcctggagatgctgagcagagccaaggatgagtatgagaggaatcagatgggtgactcaaatatctccagccctgggttacagccaagcactcagctctccaatctgggaagcaccgagactctagaagaaatgccctccgggtcacaggataagtctgctccatctggacacaagcatctgacggtagaagagttatttggaacctctttgccaaaggaacaaccagcagttgtgggtctggattcagaagaaatggagaggttgccaggagatgcctcccagaaagagcccaattcattcctaccatttccctttgagcagttaggaggagcccctcaatcagaaaccctgggtgtcccttctgctgcccaccattcagtccagcctgaaatcaccaccccggtgctaatcactccagcctccatcacacagtccaatgaaaagcatgctccaacctacacaatcccgttgagccctgttctcagtcccactctgccagctgaagctcctactgcacaggttccccccagcttacctcgaaacagcaccatgatgcaggcagtgaagaccacgcctagacagaggtctccactcctgaaccagccagtccctgagctaagccatgccagtctgattgccaaccagagccccttcagggccccattgaacgtgacgaacacagctggcacatccctcccaagcgttgatcttctccagaaactcaggttgaccccacagcatgaccaaatacagacacaaccacttgggaaaggtgcaatggtagccagcttttctccggcagctggtcagctagccacacctgagagcttcatagagcctccctctaagacagcagcagcaagagtggcggcctcagcctccctgagcaacatggtgcttgctccccttcagtctatgcagcagaaccaggatcctgaagtatttgtgcagcctaaggtgttatccagtgccatccaggttgcaggcgccccactggttactgcaacgaccactgcagtgtcttcagtcctgctggccccaagtgttttccagcagacagttacaagatcttcggaccttgagaggaaagccagctccccttctcctctaactattggaacgccagaaagtcagagaaagccttccattattctcagcaagtctcagctccaggatacattaatacatctaataaagaatgattccagcttcctcagtacacttcatgaagtctacttgcaggttctgaccaagaacaaagacaaccacaacctatgactggagcagaataagtctaaaggcagagccccagcctcagagacaaataggcttcatcatggaaacttctgagcagaacattgagtttgagaatcctgaaattgagcctatgagaaagagactcatttcttaagaatgttttccaagtgacattctcagtgataatggaggtttcactgtgaagcatcaccagcagatccttgttttgacaaaaaaaaaaaaaaaaaaaaaaaaaa

SEQ ID NO: 275 - protein, 582 aa, Homosapiens
MEALSRAGQEMSLAALKQHDPYITSIADLTGQVALYTFCPKANQWEKTDIEGTLFVYRRSASPYHGFTIVNRLNMHNLVEPVNKDLEFQLHEPFLLYRNASLSIYSIWFYDKNDCHRIAKLMADVVEEETRRSQQAARDKQSPSQANGCSDHRPIDILEMLSRAKDEYERNQMGDSNISSPGLQPSTQLSNLGSTETLEEMPSGSQDKSAPSGHKHLTVEELFGTSLPKEQPAVVGLDSEEMERLPGDASQKEPNSFLPFPFEQLGGAPQSETLGVPSAAHHSVQPEITTPVLITPASITQSNEKHAPTYTIPLSPVLSPTLPAEAPTAQVPPSLPRNSTMMQAVKTTPRQRSPLLNQPVPELSHASLIANQSPFRAPLNVTNTAGTSLPSVDLLQKLRLTPQHDQIQTQPLGKGAMVASFSPAAGQLATPESFIEPPSKTAAARVAASASLSNMVLAPLQSMQQNQDPEVFVQPKVLSSAIQVAGAPLVTATTTAVSSVLLAPSVFQQTVTRSSDLERKASSPSPLTIGTPESQRKPSIILSKSQLQDTLIHLIKNDSSFLSTLHEVYLQVLTKNKDNHNL

SEQ ID NO: 276 - DNA, 3639 bp, Homosapiens
taaagggtgttaacataatcccccaatcccatacaattcaatttcagaaaagtatttagggactgtgctaaaatagcatctccaagcttgctatggcaagatgatgctcaggttttccatgtgcaggggaaatgatgaaggttttgcaatggaacaaatatggttgctgctgcttctaacaattagagtgcttccggggtctgctcagttcaacggctacaactgtgatgccaacctccacagtagatttcctgctgaaagagacatcagtgtctattgtggagtgcaggctattacgatgaagattaatttttgcacggtacttttctcgggttattcggaaacagatctggcactgaatggaaggcatggggactcccactgcagagggttcatcaataacaacacctttccagcagtggtcatttttatcatcaatctcagcaccttggagggctgtggaaacaacctggtggtatccacaattcctggagtcagtgcttatggaaatgcaacttcagtgcaagtaggaaatatttcaggatatattgatactccagacccaccaacaatcatcagctatctacctgggcttctttacaaatttagttgtagttatccattggaatacctggttaataatacccagcttgcttcgtcctcagcggctatttctgtgagagagaacaatggcacatttgtcagcactttgaacctgctcctttataacgattcaacctacaaccagcagttaattatccccagtataggattacctttgaaaaccaaagtatttgcagctgtccaagccactaatttggatggcagatggaatgttttaatggattattgctatactaccccatcaggaaacccaaatgatgacattcgatatgatcttttccttagctgtgacaaggaccctcagaccaccgtcattgagaatggccgaagccagcggggccggttttcttttgaagtgttccgatttgtgaaacacaagaatcagaaaatgtccactgtcttcttgcactgcgttaccaagctctgcagagcagatgactgccccttccttatgccgatttgcagccacagagaaaggagagatgctgggaggaggacgacttggagcccccagagctcttctggcagcgcggtgctctctgctggtcccatcattactcggagtgatgagactccaaccaacaattcgcaacttggttctccaagtatgcctcccttccagctgaacgccatcaccagcgcactgatatcaggaatggtcattctgggagttacgagcttttctcttcttctgtgctcactggcccttctgcacaggaagggacccacaagtttagtgttgaatggcataagaaacccagtctttgactgactataacagattcctgctctctggagaaggcttcactgactaaactatgtgtgactgcagtcagtgttccgtctgaatttcatgtcagtccacattcaatatttgtaggtttgataaatttcacagtatagcttgtcagcataatgatagtgaaagaagtttattatattgctattgtcacttatgtacgtggcgagccgtatttttatgccaccagtgaatatattgacaataagtgaaaaatattcaggacttagggcttacaggatcagtaatatttcattttatttcagttttcttttgattgttggttaaaagataaaaggtgggagtagacaaaaaatgaaatgtgttgcatttcccccttaagcattaatggcatttagatttgcacacgtggtcctagaataaatgttgctttttgttttaatccggatattcccagcttcaggatgtgttttaataggactggccaatttggatacctgagatttaactactcattctatgacctcctgtgtttttggccgattttcatgtctgaccatattcattttaaaagaaactcttgggacatatctcttaacctggggcacccttttgtgtagaagatagtgaaaatagttgttagcttccaaggctactgctaagtggccctagatcattattcattagaataggaatggctgcgatcagttttcttcttctggttcaggtgagaacaccagcacatgttaactctcctcccaggtaaacagttcagctgctgttgcagctgtgcttccagcagtgaggtaactatgcaaagattatttttaattcaagaatcatcacatgtgaaaacaagctgtagttgtgaaaagagttcctagaagggtttttaacaatttagattccctttttcctaaaacaaaaaggaaacttaggttaagtgtagtttgcagaacattgttggaatctacataaaaagatattccttcccccatattttcgatgccaggcaataatcaggagagggtttctttttaaggtatcttcttgtaggtgtcataattgccatgaataaacaatattttcctctaacagtaaactgcaagaagcttctgatcctttatcagttttgcaaaaaagcaagctttaagcagcccatgttcttacaaaaaaaatcaacattctctttgtttaagctacctatgcactgaacaaacaaaacaatttaatagccaacaccaaaacccagcatgtgaagttactagaattgccatgttaactataagcaattgctgtaatcactaatttctattcaacatttgtgacccattagtccggacttaatttactatactgcatgcaaatcatcaagcaattgcttcaaaggaaatgtctacaatgtgagttaataattaaatcaatcctcaagttgaaaaacactttttctccaatttgcctgaatatttcaggaggaagtgtttatattataataattagctatataattgcatcaactttttatttcaaggtatagttgccaagtaaagtgggatctggaaagtctctggataatttctttacaaaaaaagtttaaatcacataaaaagccaatctactcttccctgtgttactttaaaataactttgaagtgactattctgagctttatctgtgttaacatgattaactgaccatactactaatgtgaccctgtatatacatggatagtattgaaatatgctggtaaatctatttcagatactttaagtgaattgccattgattctacgattaagttctgtgaataggacattatatcatttaagctgttttgtcaatttgatttttatgcttttggaacggctgctgtttcagctgttggccttttcaattctatactccattttatagaattgaataatggacacatgtcacttgggaagcaacgtaagtatcacattattttttgccaccctttcatcataaatggaagaatcagagttataatgagataaaccaggtctgttttttacaactttgttcttataaatctgcagttatatggagtatttagttatactgaattttacagttattatagtgtgaaaaaccttacaaaatatgtgcaaatgtttcttcagttttaatacctcaaactgttttttgcacttcaggggtaaggtctgatgacatgtaaaagatgatcgtttaataaaataattgtttaaaatgttaaaaaaaaaaaaaaaaaaaa

SEQ ID NO: 277 - protein, 431 aa, Homosapiens
MMLRFSMCRGNDEGFAMEQIWLLLLLTIRVLPGSAQFNGYNCDANLHSRFPAERDISVYCGVQAITMKINFCTVLFSGYSETDLALNGRHGDSHCRGFINNNTFPAVVIFIINLSTLEGCGNNLVVSTIPGVSAYGNATSVQVGNISGYIDTPDPPTIISYLPGLLYKFSCSYPLEYLVNNTQLASSSAAISVRENNGTFVSTLNLLLYNDSTYNQQLIIPSIGLPLKTKVFAAVQATNLDGRWNVLMDYCYTTPSGNPNDDIRYDLFLSCDKDPQTTVIENGRSQRGRFSFEVFRFVKHKNQKMSTVFLHCVTKLCRADDCPFLMPICSHRERRDAGRRTTWSPQSSSGSAVLSAGPIITRSDETPTNNSQLGSPSMPPFQLNAITSALISGMVILGVTSFSLLLCSLALLHRKGPTSLVLNGIRNPVFD

SEQ ID NO: 278 - DNA, 3178 bp, Homosapiens
gtgaaagaagcacatttggagaaagaggagaagaggcccaggtgttctgtggctcaggggcaagctctgagctccctgagcaatggccccatgctccgggactcagaggccgaggttactgaggaggatcccaggctgcgggcccagcagctccatcaccgggtgctgaccctgcagtgccagctcagggaccagggcgctgcccaccaggcgtctctggacgaggccacccgcctccaggaggagctccaggccaagcttgaagaacttcagaaaaagcaacatgaagcaaagttggcagtgactcccctgaaggccaagatagcttccctcgtccggaagtgccgggagaggaaccgcctgatcacccacctgctgcaggagctgcacagacatgggctggggaacctcctgctctccgagctggcgcagaacatgctcaacgacgtggcactggctgagtacacggccaccttcctggctccgggagtcccagagacaagccaccacctggacgtcaagtctgagatgacggcagctttaagagctcagacatacctcttgaatcctgaaatggacagtgtcctccaaagctcattgtcttcagagtcctggcctattcccgagccggagtggccagcacagacagcccaactggattctctgaagctccctctgtccttggtgtccacgcttgatcctggaacgtgcctggcagcggtcactgtggaaccaggtctccccgcacaacgtctgcaagaaaaaggcggaatgccctgtcctgccctccaagtcgataacgtcccagcaccctctgagctcctgagcccagcaaggatcctggcttttcaccaagagcttagacaaagcatttgcagcaattcccaggtccataaatcaccgctggagttagaaatgtaatagggccactcattctccggagccatttcatagactccataaatatttgaagcagaaccttcagagagtgctttaagaaattggtagcaatcagagccctcatttagtggcaagtggttttgccttcggctttgggattttgtgttcattgtcagagcttgagagaaacgctggcctgtgcctggcaaattctgaggagtttggctttggcaatgtcaaggcagcataggaaatatttactgtaccaaaacctattgaatgattggtccagaggttctcaactgggcacagttttagccccccagggaaaatctggccatgtctggagacatttttggttgtcacagctgggacactgctactggcatctggtgggtagaggccagggatgctatgaaatgtcctacaatacccaggccagcctcctacagcaaagaattacagcccgagggtcgccagtgctgaggtcgagagtccaggacggatctcatagctcccaacaagatcagccatggagaattgttttgttttgttttttctctgcccccggggtccttcccatgttttaaaagattttttgtctactaagtgaaacgcctaagtcaccatatattttacatttaaaaacattaaaactaaccagaactttctaatcagtccatccactccaaaaacgtctgttgatatccactggatgccaggcaatgtggcatgaaggagaagagacaagtcaatgttgatcctggcgctggggacctcacaggacaatgggagagatactcctgtgagtaaatcagcacgcacgcaagtgtcacatgtgccctgagcaacgggatgaaggtaagggtccgttctacttggcttgggacaactggaagtcagccacaaaggaatggctgggcagtgtccggtgggtgaggtgggaagggtgctgctgtacgagggaacgcatgtgcaaaggccctgaggcataaaactgaactgtggatgtgcccctggaggggaagtgggcaaagcatgctcttgtcaagccagctgcaagcagtcactgcatcgttcccatccagcaccccttccttccaccgagaacagagactcgtgccccgaatcaggtgggcgacccaggagaagagcacttctatcctgagggcagccccccaaaaagagagtctagggagcttggacgacacacaccagaccctgacccaggctcacccaccagagatgtcacctctctctttgggaaggggctgaggaggggcttaagggaaaggccaaagccgctacctgtccaattctgtcctctcctggaagtgactgtcccttcacggaaggacaaacaaggacaaggacaaggaactgacggctccccaggaagtgtcaaagtgtatagatttattttaacgtagtttagctttttgtttgaaatgaaaattacacagagttcccgtagactcttccccgggcttcccttgatgttaacatctcatgtgacttatgttgtacaattatagaaactagtgggttttatttcgaggaaaattggggagccattgagacgtaagaaaggcagcctcagcacattgagttccaccctttaaattcgtttatggggttttctgatgggttagcacattcatccatgtattcctggattgatttacccacagatctgtctatttatttatttattcaatatgcatttagtgactgctgtgcgagtgtctggctggatgctgctggggaagaagtgaagatgatgctgtccacctaggttttcagggacccccctggagaccctgtggccccgttaccacccctcaagaatccccagattggaaaccactgcggtgatccctttgttggttcaaccaccccagggcttccctataatttccaagcaggaagtgacctgcagcactggtttggtgatccgccttctgcctccctctgtattttgggacaacgtcattagctttgagcatcaggaacatgacagagagaggacagaaacccggtgcagccgaggacagccagctgagcccttgctgagccagcgagatgcagcgtggtgccaccacatctggtctccaggagtcccaggagctcagacgtccgtcgtcttgtgacttcatgctcccctctgccgcgctcacgtgctgggcctgggcagaaaggcaacccaggaaatccattaaagcaagccaagacgacctttgcagcgtaacccaacgattccctaataaatcatgtttcc

SEQ ID NO: 279 - protein, 276 aa, Homosapiens
MLRDSEAEVTEEDPRLRAQQLHHRVLTLQCQLRDQGAAHQASLDEATRLQEELQAKLEELQKKQHEAKLAVTPLKAKIASLVRKCRERNRLITHLLQELHRHGLGNLLLSELAQNMLNDVALAEYTATFLAPGVPETSHHLDVKSEMTAALRAQTYLLNPEMDSVLQSSLSSESWPIPEPEWPAQTAQLDSLKLPLSLVSTLDPGTCLAAVTVEPGLPAQRLQEKGGMPCPALQVDNVPAPSELLSPARILAFHQELRQSICSNSQVHKSPLELEM

SEQ ID NO: 280 - DNA, 2551 bp, Homosapiens
agctgcagccacccgcgtgcggcacgcgccggccgcctgcccggatcgcggccaccagtgccgcggcctctcgactcccgccccgccgagccgcgcgcgcgactgccatcctcctcaattgctttttacgattttttttgtgcatgcattcattttctgttccgttttgtcctttttaaggcggtggcggcggcgacagcggcgtaagctcgcagcggggagggggcggccggaggatgcggcgcggggctgcgctcgctacgtccgctgctgctgcccggctcgggcctgagcgccgagcaggatcccaagtgatggtggtttcctcggagggcgagctgagtcctgcgcgactggttagcacggtggagctggtagccacgcctgctggctggcgtgcgtgaacaggtgtggaccgcaggatctcagcactctgacccaaggggaagcatgtcgaagaaaggccggagcaagggcgagaagcccgagatggagacggacgcggtgcagatggccaacgaggagctgcgggccaagctgaccagcattcagatcgagttccagcaggaaaaaagcaaggtgggcaaactgcgcgagcggctgcaggaggcgaagctggagcgcgagcaggagcagcgacggcacacggcctacatttcggagctcaaggccaagctgcatgaggagaagaccaaggagctgcaggcgctgcgcgaggggctcatccggcagcacgagcaggaggcggcgcgcaccgccaagatcaaggagggcgagctgcagcggctgcaggccacgctgaacgtgctgcgcgacggcgcggccgacaaggtcaagacggcgctgctgaccgaggcgcgcgaggaggcgcgcagggccttcgatggagagcgcctgcggctgcagcaggagatcctggagctcaaggcagcgcgcaagcaggcagaggaggcgctcagtaactgcatgcaggctgacaagaccaaggcagccgacctgcgtgccgcctaccaggcgcaccaagacgaggtgcaccgcatcaagcgcgagtgcgagcgcgacatccgcaggctgatggatgagatcaaagggaaagaccgtgtgattctggccttggagaaggaacttggcgtgcaggctgggcagacccagaagctgcttctgcagaaagaggctttggatgagcagctggttcaggtcaaggaggccgagcggcaccacagtagtccaaagagagagctcccgcccgggatcggggacatggtggagctcatgggcgtccaggatcaacatatggacgagcgagatgtgaggcgatttcaactaaaaattgctgaactgaattcagtgatacggaagctggaagacagaaatacgctgttggcagatgagaggaatgaactgctgaaacgctcacgagagaccgaggttcagctgaagcccctggtggagaagaacaagcggatgaacaagaagaatgaggatctgttgcagagtatccagaggatggaggagaaaatcaagaacctcacgcgggaaaacgtggaaatgaaagaaaagctgtcagcgcaggcgtctctgaagcggcatacctccttgaatgacctcagcctgacgagggatgagcaggagatcgagttcctgaggctgcaggtgctggagcagcagcacgtcattgacgacctctcactggagagagaacggctgttgcgctccaaaaggcatcgagggaaaagtctgaaaccgcccaagaagcatgttgtggagacattttttggatttgatgaggagtctgtggactcagaaacgttgtccgaaacatcctacaacacagacaggacagacaggaccccagccacgcccgaagaagacttggacgatgccacagcccgagaggaggctgacctgcgcttctgccagctgacccgggagtaccaggccctgcaacgcgcctacgccctgctccaggagcaggtgggaggcacgctggacgctgagagggaggcccggactcgggagcagctacaagctgatctgctgaggtgtcaggccaaaatcgaagatttggagaagttactggttgagaagggacaggattccaagtgggttgaagagaagcagctgctcatcagaacaaaccaagacttgctggaaaagatttacagactggaaatggaagagaaccagctgaagaatgaaatgcaagacgccaaggatcagaacgagctgttagaattcagagtgctagaactcgaagtaagagactctatctgttgtaaactctcaaacggagcagacattctctttgaacccaaactgaaattcatgtaaagctctcagatgttttcaagcatgtgtaaaggggacatgttatagtttctttctttctttctttctttttttttttaaatctgtatgttcagaataatttcactgccttaatgtgttctggagagcgtgctcacccaagtctatggacatgtaccagagctaatatatttattgcctatggcttgttttgcacttaataaaataatttgtttttgcaaaa

SEQ ID NO: 281 - protein, 626 aa, Homosapiens
MSKKGRSKGEKPEMETDAVQMANEELRAKLTSIQIEFQQEKSKVGKLRERLQEAKLEREQEQRRHTAYISELKAKLHEEKTKELQALREGLIRQHEQEAARTAKIKEGELQRLQATLNVLRDGAADKVKTALLTEAREEARRAFDGERLRLQQEILELKAARKQAEEALSNCMQADKTKAADLRAAYQAHQDEVHRIKRECERDIRRLMDEIKGKDRVILALEKELGVQAGQTQKLLLQKEALDEQLVQVKEAERHHSSPKRELPPGIGDMVELMGVQDQHMDERDVRRFQLKIAELNSVIRKLEDRNTLLADERNELLKRSRETEVQLKPLVEKNKRMNKKNEDLLQSIQRMEEKIKNLTRENVEMKEKLSAQASLKRHTSLNDLSLTRDEQEIEFLRLQVLEQQHVIDDLSLERERLLRSKRHRGKSLKPPKKHVVETFFGFDEESVDSETLSETSYNTDRTDRTPATPEEDLDDATAREEADLRFCQLTREYQALQRAYALLQEQVGGTLDAEREARTREQLQADLLRCQAKIEDLEKLLVEKGQDSKWVEEKQLLIRTNQDLLEKIYRLEMEENQLKNEMQDAKDQNELLEFRVLELEVRDSICCKLSNGADILFEPKLKFM

SEQ ID NO: 282 - DNA, 2750 bp, Homosapiens
atggcagtcgcgcgcgcggctcggcggggcgggagtcgagaggccgcggcactggtggccgcgatccgggcaggcggccggcgcgtgccgcacgcgggtggctgcagctccctcgtcaggcaggagggcgcggcgcccgccccgccccgcccccgcccccgccccgggcagatgccgggagctctcctgccgccgtgggagggggagctgagctgccggagcgtgcgcactgggccagcgggcggccggggcagggctggggtcccggcgctgagcgcccccagccgcgccgggcagcctggcgcctcgctgagtcggagcaacccccggcaggagctttcaggctctggtcaagcctcgggacccgggaagctatccctgccctcgggggctcgagcctggagtggggcttgcagaaaaggaaagggggctggcctaaaggcaagaagagaaaccccccgagggaccttgctgttccgtgttcctacgacagggtacatgatattcctgaatgagcagagaagtcagctgagggccacacaccccgatctgcctttcacagaaatcatgaagatgctggctgttcagtgggcccagctgtctcaggataaaaagggggagatgaactcaatgacctctactgcgggacctccaggcagctcttcagctccctgtgcaacaagaaggaacctgctgcaaaggcagcacctgcagcgcctctcaggtaaccagcctgggccaggcggctcagccgcaaacgctggccttgactccacctgcgccagaggtcaccaacaggcggcccacgtgacacctcttgttattaaaatgcaattttaagacagactctagtcaagcccacttaccaccaggtgggtgtttaggacagggtaggtcttccactatatctgttttcctcttagttcgccaggcccgcctgctctgggccacgcaggacacggacgtcagcttctcctggagcgctcgctcactttattccatctctacgagctcctcaagtatcccagagcatccccaggcctgtggccacctcgggtctggatgccgcattctctgacctgtggcacattctgggtgcccatgattatgatgaggttctgtgcccatgtggcctcagggctcttgagaccacccttcaaccaggtctttgctcacctgtctcctgcccagggacgccacccaggtcaccggtgcaaacctccagcccctgcccgtttctctccatgagtgcattgccacctcgcagcctcttccacttgctcattcctggtgttattgcctgtctcccactggaagagaaggccctcaagttcagcaactgttttgcctgttttgttcactgtggtgaaccccgggcctagaaccacgcctggcactcccagtaggtgctcaataagtatccaatgagtggacaaatgaatggatgtgttcaacaaatgaccctagagcgtgtattccttccagggacagagcgaggtactggggacacaggaaggacgaggcagagctccgcgctgacgaaaccaagggccaagcgtgcgagtgaatacgaacatcctggcgttaaaacgtcttgcattctagtgaaatgagacccattggacacagagaagccccaccacaattgcatctgtgtaaaatcgagagaaagatcgtgaaaacagccatggcaggggaatttaaaaaagatcctgccacgtactcatagcacctggagcctctggaggaagaggagggacaaatgaggtcaagtcagaggaggaagctgagggccccgagtcccttctgctcagatgtccgcatccagagaggagttctgcttctctcaacctgtgtttcttgcaagagtttatctataaattgctgaaaaatgggtaatcaagttcagcaactccctggcatctgtgatgacctatggtttgtaatcctagtcagaatcacctacatagaggatataatattaatcagaacaaaacagaaaagtcgctagaggaataacaatagtaaaatttacaatcagatgaagaataaagttttcaatgaggcacagttctaagcacttcatacaaataacctgtcttaattctcataaaagtactgcaaggcaggtgataatatcatctccttctaaagataaaatgcagcacagagaggttaagtaacttgtccaatgttgaacagctagtgagtggtcaatctgagatttaaatccaggctgtctgggtccaagaactctgttcttcactacttctcaacaacatcaactatgtaaaatgacacacatacataaacccacatcaatggtaatggtggtaatctctggccggcaagatgaaagaagatgttatgcaattcttcagtcctttctgtgtctgccacattttccccaatggatagatgtcacttaaattatcagaggaagaaacaaactctattaaaaggaatttcaagggccgggcaagatggatcacacctgtaatcccagcactttgggaggccgaggtgggcggatcacctgaggtcagcagttcgagaccagcctggccaacatggcgaaaccctgtctctactaaacatacaaaaaaattagccgggcgtggtggcacatgcctgtaatcccaactacttgggaggctgaggcaggagaatcacttgaatctgggaggtggaggttgcagtgagccaagatcgcaccactgcactcaagcctgggcgacagagcaaggctt

SEQ ID NO: 283 - protein, 279 aa, Homosapiens
MAVARAARRGGSREAAALVAAIRAGGRRVPHAGGCSSLVRQEGAAPAPPRPRPRPGQMPGALLPPWEGELSCRSVRTGPAGGRGRAGVPALSAPSRAGQPGASLSRSNPRQELSGSGQASGPGKLSLPSGARAWSGACRKGKGAGLKARRETPRGTLLFRVPTTGYMIFLNEQRSQLRATHPDLPFTEIMKMLAVQWAQLSQDKKGEMNSMTSTAGPPGSSSAPCATRRNLLQRQHLQRLSGNQPGPGGSAANAGLDSTCARGHQQAAHVTPLVIKMQF

SEQ ID NO: 284 - DNA, 3640 bp, Homosapiens
gtgcagaaggccgcgctagccggctcttcagcagcgagtgcagattgctcccccgcggccgcagatctcccgtttgcgccgcgttcagctgctcccgaacaacttttctgccggcccagaggccccagggcgtcgcagcgccgcgtgcggcccactcacgggccggcaggatggactccaacactgctccgctgggcccctcctgcccacagcccccgccagcaccgcagccccaggcgcgttcccgactcaatgccacagcctcgttggagcaggagaggagcgaaaggccccgagcacccggaccccaggctggccctggccctggtgttagagacgcagcggcccccgctgaaccccaggcccagcataccaggagccgggaaagagcagacggcaccgggcctacaaagggagacatggaaatcccctttgaagaagtcctggagagggccaaggccggggaccccaaggcacagactgaggtggggaagcactacctgcagttggccggcgacacggatgaagaactcaacagctgcaccgctgtggactggctggtcctcgccgcgaagcagggccgtcgcgaggctgtgaagctgcttcgccggtgcttggcggacagaagaggcatcacgtccgagaacgaacgggaggtgaggcagctctcctccgagaccgacctggagagggccgtgcgcaaggcagccctggtcatgtactggaagctcaaccccaagaagaagaagcaggtggccgtggcggagctgctggagaatgtcggccaggtcaacgagcacgatggaggggcgcagccaggccccgtgcccaagtccctgcagaagcagaggcggatgctggagcgcctggtcagcagcgagtccaagaactacatcgcgctggatgactttgtggagatcactaagaagtacgccaagggcgtcatccccagcagcctgttcctgcaggacgacgaagatgatgacgagctggcggggaagagccctgaggacctgccactgcgtctgaaggtggtcaagtaccccctgcacgccatcatggagatcaaggagtacctgattgacatggcctccagggcaggcatgcactggctgtccaccatcatccccacgcaccacatcaacgcgctcatcttcttcttcatcatcagcaacctcaccatcgacttcttcgccttcttcatcccgctggtcatcttctacctgtccttcatctccatggtgatctgcaccctcaaggtgttccaggacagcaaggcctgggagaacttccgcaccctcaccgacctgctgctgcgcttcgagcccaacctggatgtggagcaggccgaggttaacttcggctggaaccacctggagccctatgcccatttcctgctctctgtcttcttcgtcatcttctccttccccatcgccagcaaggactgcatcccctgctcggagctggctgtcatcaccggcttctttaccgtgaccagctacctgagcctgagcacccatgcagagccctacacgcgcagggccctggccaccgaggtcaccgccggcctgctatcgctgctgccctccatgcccttgaattggccctacctgaaggtccttggccagaccttcatcaccgtgcctgtcggccacctggtcgtcctcaatgtcagcgtcccgtgcctgctctatgtctacctgctctatctcttcttccgcatggcacagctgaggaatttcaagggcacctactgctaccttgtgccctacctggtgtgcttcatgtggtgtgagctctccgtggtcatcctgctggagtccaccggcctggggctgctccgcgcctccatcggctacttcctcttcctctttgccctccccatcctggtggccggcctggccctggtgggcgtgctgcagttcgcccggtggttcacgtctctggagctcaccaagatcgcagtcaccgtggcggtctgtagtgtgcccctgctgttgcgctggtggaccaaggccagcttctctgtggtggggatggtgaagtccctgacgcggagctccatggtcaagctcatcctggtgtggctcacggccatcgtgctgttctgctggttctatgtgtaccgctcagagggcatgaaggtctacaactccacactgacctggcagcagtatggtgcgctgtgcgggccacgcgcctggaaggagaccaacatggcgcgcacccagatcctctgcagccacctggagggccacagggtcacgtggaccggccgcttcaagtacgtccgcgtgactgacatcgacaacagcgccgagtctgccatcaacatgctcccgttcttcatcggcgactggatgcgctgcctctacggcgaggcctaccctgcctgcagccctggcaacacctccacggccgaggaggagctctgtcgccttaagctgctggccaagcacccctgccacatcaagaagttcgaccgctacaagtttgagattaccgtgggcatgccattcagcagcggcgctgacggctcgcgcagccgcgaggaggacgacgtcaccaaggacatcgtgctgcgggccagcagcgagttcaagagcgtgctgctcagcctgcgccagggcagcctcatcgagttcagcaccatcctggagggccgcctgggcagcaagtggcctgtcttcgagctcaaggccatcagctgcctcaactgcatggcccagctctcacccaccaggcggcacgtgaagatcgagcacgactggcgcagcaccgtgcatggcgccgtgaagttcgccttcgacttctttttcttcccattcctgtcggcggcctgaggatggtccgccacgaggagcttccagtgcatgttgccatgaggcctttccccagtgtggccccagcccgacaggcatgcaccagtgccgcctgtgcccacgtgtgcagactgtggctgcagagaccttgcgaccatgtgtagattgcgtggaccccgacaaagggaaggctgctgtgtagctctgtccactctgaataccaagtgtgttgggaattgcatgccatctccaccctgagcctgacctttctgagtgacatgggtgtgccaggctagactaggaggttccggtgtctggaaaagcactttacagatgagattccctctcctcccccaccttcaagcaccctgttccctctttctttcttttgtgttggatttgtttaaaaaccaaataagcatctgtgtaacctccacagtagcatttcttatttgtttggtcactgctacaccttagcagctcttcccctttcctgggggatgtgcacggcagcttgagcctgtcacgtggtcaaggcccggccccatcagaggctgggggaggcggcacattggcagtgtgtcacactgagctgggcaccacaggctgcctcatgaccctcctgtccagcaggtagtgggtgaatgtgtgaaggtcttgcctgaatccatcaggacttgggaaacagagaaccctgtgggggcggctgtgggggaggtccctgccagtgtttagaagagcctgactgtgttcagtgccttggagcagaaagccagggtcctgagtggctgaaataaaagcctctggtggaacctgca

SEQ ID NO: 285 - protein, 890 aa, Homosapiens
MDSNTAPLGPSCPQPPPAPQPQARSRLNATASLEQERSERPRAPGPQAGPGPGVRDAAAPAEPQAQHTRSRERADGTGPTKGDMEIPFEEVLERAKAGDPKAQTEVGKHYLQLAGDTDEELNSCTAVDWLVLAAKQGRREAVKLLRRCLADRRGITSENEREVRQLSSETDLERAVRKAALVMYWKLNPKKKKQVAVAELLENVGQVNEHDGGAQPGPVPKSLQKQRRMLERLVSSESKNYIALDDFVEITKKYAKGVIPSSLFLQDDEDDDELAGKSPEDLPLRLKVVKYPLHAIMEIKEYLIDMASRAGMHWLSTIIPTHHINALIFFFIISNLTIDFFAFFIPLVIFYLSFISMVICTLKVFQDSKAWENFRTLTDLLLRFEPNLDVEQAEVNFGWNHLEPYAHFLLSVFFVIFSFPIASKDCIPCSELAVITGFFTVTSYLSLSTHAEPYTRRALATEVTAGLLSLLPSMPLNWPYLKVLGQTFITVPVGHLVVLNVSVPCLLYVYLLYLFFRMAQLRNFKGTYCYLVPYLVCFMWCELSVVILLESTGLGLLRASIGYFLFLFALPILVAGLALVGVLQFARWFTSLELTKIAVTVAVCSVPLLLRWWTKASFSVVGMVKSLTRSSMVKLILVWLTAIVLFCWFYVYRSEGMKVYNSTLTWQQYGALCGPRAWKETNMARTQILCSHLEGHRVTWTGRFKYVRVTDIDNSAESAINMLPFFIGDWMRCLYGEAYPACSPGNTSTAEEELCRLKLLAKHPCHIKKFDRYKFEITVGMPFSSGADGSRSREEDDVTKDIVLRASSEFKSVLLSLRQGSLIEFSTILEGRLGSKWPVFELKAISCLNCMAQLSPTRRHVKIEHDWRSTVHGAVKFAFDFFFFPFLSAA

SEQ ID NO: 286 - DNA, 4117 bp, Homosapiens
attgcatcggtgtgtggcggcggggcatgcccagagcaccgggcacggccttcaatgggcgaggacacggacacgcggaaaattaaccacagcttcctgcgggaccacagctatgtgactgaagctgacatcatctctaccgttgagttcaaccacacgggagagctgctggccacaggtgacaagggcggccgggtcgtcatcttccagcgggaaccagagagtaaaaatgcgccccacagccagggcgaatacgacgtgtacagcactttccagagccacgagccggagtttgactatctcaagagcctggagatagaggagaagatcaacaagatcaagtggctcccacagcagaacgccgcccactcactcctgtccaccaacgataaaactatcaaattatggaagattaccgaacgagataaaaggcccgaaggatacaacctgaaggatgaagaggggaaacttaaggacctgtccacggtgacgtcactgcaggtgccagtgctgaagcccatggatctgatggtggaggtgagccctcggaggatctttgccaatggccacacctaccacatcaactccatctccgtcaacagtgactgcgagacctacatgtcggcggatgacctgcgcatcaacctctggcacctggccatcaccgacaggagcttcaacatcgtggacatcaagccggccaacatggaggaccttacggaggtgatcacagcatctgagttccatccgcaccactgcaacctcttcgtctacagcagcagcaagggctccctgcggctctgcgacatgcgggcagctgccctgtgtgacaagcattccaagctctttgaagagcctgaggaccccagtaaccgctcattcttctcggaaatcatctcctccgtgtccgacgtgaagttcagccacagcggccgctacatgctcacccgggactaccttacagtcaaggtctgggacctgaacatggaggcaagacccatagagacctaccaggtccatgactaccttcggagcaagctctgttccctgtacgagaacgactgcattttcgacaagtttgaatgtgcctggaacgggagcgacagcgtcatcatgaccggggcctacaacaacttcttccgcatgttcgatcggaacaccaagcgggacgtgaccctggaggcctcgagggaaagcagcaagccccgggctgtgctcaagccacggcgcgtgtgcgtggggggcaagcgccggcgtgatgacatcagtgtggacagcttggacttcaccaagaagatcctgcacacggcctggcacccggctgagaacatcattgccatcgccgccaccaacaacctgtacatcttccaggacaaggtaaactctgacatgcactaggtatgtgcagttcccggcccctgccacccagcctcatgcaagtcatccccgacatgaccttcacgaccgcaatgcaaggaggggaagaaagtcacagcactgatgaggacagctgcagaggtggcagtgtgtggacacaggaagtttgggccccctccctgccccagctttcctaggccagaattgtgtttggcagtaattgtctgtttaaaaaaataaaaaggaaaggaagcgttcaccgccacaaatcataaaatggacatgactgtggagtcttacagttcagggttctttcattcacgtcccttcctgtctcggtctgcggtctttaccacatcaataggactttttatgcgtccgggttaatttttcactccagtgcgtcctgttgcagggaccggagctgatgggagctgcttctcccccatgcctcactggtcccagatcagggctccagggacagatgatgagtctcaaacgagccagccaggggttcttttggttataaatggggcaattcgccctgtctcagagctgatgacctcaccgttgttttttggatggtgaattcatgctgagaatttgcagatgcaagctcctctcctaggtcttctgaatgtcttgaaacatcccaggtcccaggtctggtgcggtttcccgagaggagcggagtggggtttgtcttctgtgtgcctgtgtcctcatctgattcacctgccatttgctgagcctctgctgtgtaccaggcgtggtgctcagccctagaggcagttgacttaccctctgcagccctccctgccgcctcacccttcagcattcactgggcaccttcccggagcggacactgactcccatgcacgattttttggaatcttcctcctgactgtgaggtgggtgttcattcatttcctccataaacaccaacttctcgaagcgtgccaggctctgggctggatgctggggataagcgggaacccttaggatcccctctgtccacgagaagaagctgaggctctgagcggatgcacaggtcacccatggcaggtgccgtgcagtggtgtcaggaacccgtccgggtcttcacacaaggttctctccagtccatctcgtgggcggctcatgttagagcgacattcaaatggaaggtttggaaaggaatgcctctgtcttgtgaagtaggacaagggtccaggagaactgagacgcaggatggaagacagagaagaccccccggagctcctcgctctgcttggtggcttcaggagtgtggccctccccaggactccacttcatcctgggcttgcaccctccttgagccaatgcactgaactgcctttgaaaggaaattgcatgttctgaccattttaggatacctttactttaaggaccacacagtcccagaggacacatccctcgggaactctgcccctctgacaatgagggccacagagaaggtggtgtttccatggtagatgctcctgttctggtgataccaaacctgcccacccctctgagtcgtctttgctcatggacttgcagcagagccacgtagtttggcattttgattcagaaagtggggagcagagacccagccaaatccaaactttttttttggttttgttttgttttgttttttacaagatataacataacccaggaaacagacccagctgaggttattctcagtggattacagtatacttttgtgtgtgtaaaagcacaaagtgcatgtgtactcacttctggccatataacatttacacagggaaatggatcattgatttttttttaatcaacgtgaatgaagaatgtttgtttatatatcactataaaatccagttgacctggacagtattatatgtacatatctattctaattaaatttaacaatcaaaggattggattacttttttcccccttgtaaagaggttcgagaatgtggtcaattgtatagatagcgtgttaaagccaaaacccagctctgagggccttacccattacttggatatttgctacgatccatctccctttgtgagtcaaatgttaagagaagaaacttgtatttgcagctagaggttactgtcacatcatagatttaacatttaccatcttcaaagtacaaatcttacatgtccttcaaaaggaggtcttaatacagttcctagttccttacttctgttttaaactttgggtaccaaaccaaaaagaagaaaaaagaaaggaaaagatcttctttgaagaaaagtatgtctctggatccctggaaaataatgatgtccaaagcaaattgtgaagatcaaatgtgtgttaagaaaaggtgtcgaggggagggacaaaaccagaaacggtggaaggaccagtgtaatagtcacagacttgcatcctggctctgcttacatttcctggtactctcgaatgtacgggcgttcacatagtcattgtgaagttgttggggtttttttggttttgtttttaatttagctcttctctgaggacgaagctgttggtggtggtggtggtgggggtggtggtgtgggatacatggtggtcaagttgtcagccctgatcagtttggactctgtaactcataggtgcattctttttttctttggtgtctcacaaattacccaattgttgaataaaactataaatatgttaataccagctttttccaataaaataacaaatgttacatcaaaaacgaaaaaaaaaaaaaaaa

SEQ ID NO: 287 - protein, 447 aa, Homosapiens
MGEDTDTRKINHSFLRDHSYVTEADIISTVEFNHTGELLATGDKGGRVVIFQREPESKNAPHSQGEYDVYSTFQSHEPEFDYLKSLEIEEKINKIKWLPQQNAAHSLLSTNDKTIKLWKITERDKRPEGYNLKDEEGKLKDLSTVTSLQVPVLKPMDLMVEVSPRRIFANGHTYHINSISVNSDCETYMSADDLRINLWHLAITDRSFNIVDIKPANMEDLTEVITASEFHPHHCNLFVYSSSKGSLRLCDMRAAALCDKHSKLFEEPEDPSNRSFFSEIISSVSDVKFSHSGRYMLTRDYLTVKVWDLNMEARPIETYQVHDYLRSKLCSLYENDCIFDKFECAWNGSDSVIMTGAYNNFFRMFDRNTKRDVTLEASRESSKPRAVLKPRRVCVGGKRRRDDISVDSLDFTKKILHTAWHPAENIIAIAATNNLYIFQDKVNSDMH

SEQ ID NO: 288 - DNA, 4087 bp, Homosapiens
acatgcaaaaagtggggcctggagatggggctgtcttttttctccaaacacttgcccatccaggaaggccagccctgggcattgaagactccagctgacatcatctctaccgttgagttcaaccacacgggagagctgctggccacaggtgacaagggcggccgggtcgtcatcttccagcgggaaccagagagtaaaaatgcgccccacagccagggcgaatacgacgtgtacagcactttccagagccacgagccggagtttgactatctcaagagcctggagatagaggagaagatcaacaagatcaagtggctcccacagcagaacgccgcccactcactcctgtccaccaacgataaaactatcaaattatggaagattaccgaacgagataaaaggcccgaaggatacaacctgaaggatgaagaggggaaacttaaggacctgtccacggtgacgtcactgcaggtgccagtgctgaagcccatggatctgatggtggaggtgagccctcggaggatctttgccaatggccacacctaccacatcaactccatctccgtcaacagtgactgcgagacctacatgtcggcggatgacctgcgcatcaacctctggcacctggccatcaccgacaggagcttcaacatcgtggacatcaagccggccaacatggaggaccttacggaggtgatcacagcatctgagttccatccgcaccactgcaacctcttcgtctacagcagcagcaagggctccctgcggctctgcgacatgcgggcagctgccctgtgtgacaagcattccaagctctttgaagagcctgaggaccccagtaaccgctcattcttctcggaaatcatctcctccgtgtccgacgtgaagttcagccacagcggccgctacatgctcacccgggactaccttacagtcaaggtctgggacctgaacatggaggcaagacccatagagacctaccaggtccatgactaccttcggagcaagctctgttccctgtacgagaacgactgcattttcgacaagtttgaatgtgcctggaacgggagcgacagcgtcatcatgaccggggcctacaacaacttcttccgcatgttcgatcggaacaccaagcgggacgtgaccctggaggcctcgagggaaagcagcaagccccgggctgtgctcaagccacggcgcgtgtgcgtggggggcaagcgccggcgtgatgacatcagtgtggacagcttggacttcaccaagaagatcctgcacacggcctggcacccggctgagaacatcattgccatcgccgccaccaacaacctgtacatcttccaggacaaggtaaactctgacatgcactaggtatgtgcagttcccggcccctgccacccagcctcatgcaagtcatccccgacatgaccttcacgaccgcaatgcaaggaggggaagaaagtcacagcactgatgaggacagctgcagaggtggcagtgtgtggacacaggaagtttgggccccctccctgccccagctttcctaggccagaattgtgtttggcagtaattgtctgtttaaaaaaataaaaaggaaaggaagcgttcaccgccacaaatcataaaatggacatgactgtggagtcttacagttcagggttctttcattcacgtcccttcctgtctcggtctgcggtctttaccacatcaataggactttttatgcgtccgggttaatttttcactccagtgcgtcctgttgcagggaccggagctgatgggagctgcttctcccccatgcctcactggtcccagatcagggctccagggacagatgatgagtctcaaacgagccagccaggggttcttttggttataaatggggcaattcgccctgtctcagagctgatgacctcaccgttgttttttggatggtgaattcatgctgagaatttgcagatgcaagctcctctcctaggtcttctgaatgtcttgaaacatcccaggtcccaggtctggtgcggtttcccgagaggagcggagtggggtttgtcttctgtgtgcctgtgtcctcatctgattcacctgccatttgctgagcctctgctgtgtaccaggcgtggtgctcagccctagaggcagttgacttaccctctgcagccctccctgccgcctcacccttcagcattcactgggcaccttcccggagcggacactgactcccatgcacgattttttggaatcttcctcctgactgtgaggtgggtgttcattcatttcctccataaacaccaacttctcgaagcgtgccaggctctgggctggatgctggggataagcgggaacccttaggatcccctctgtccacgagaagaagctgaggctctgagcggatgcacaggtcacccatggcaggtgccgtgcagtggtgtcaggaacccgtccgggtcttcacacaaggttctctccagtccatctcgtgggcggctcatgttagagcgacattcaaatggaaggtttggaaaggaatgcctctgtcttgtgaagtaggacaagggtccaggagaactgagacgcaggatggaagacagagaagaccccccggagctcctcgctctgcttggtggcttcaggagtgtggccctccccaggactccacttcatcctgggcttgcaccctccttgagccaatgcactgaactgcctttgaaaggaaattgcatgttctgaccattttaggatacctttactttaaggaccacacagtcccagaggacacatccctcgggaactctgcccctctgacaatgagggccacagagaaggtggtgtttccatggtagatgctcctgttctggtgataccaaacctgcccacccctctgagtcgtctttgctcatggacttgcagcagagccacgtagtttggcattttgattcagaaagtggggagcagagacccagccaaatccaaactttttttttggttttgttttgttttgttttttacaagatataacataacccaggaaacagacccagctgaggttattctcagtggattacagtatacttttgtgtgtgtaaaagcacaaagtgcatgtgtactcacttctggccatataacatttacacagggaaatggatcattgatttttttttaatcaacgtgaatgaagaatgtttgtttatatatcactataaaatccagttgacctggacagtattatatgtacatatctattctaattaaatttaacaatcaaaggattggattacttttttcccccttgtaaagaggttcgagaatgtggtcaattgtatagatagcgtgttaaagccaaaacccagctctgagggccttacccattacttggatatttgctacgatccatctccctttgtgagtcaaatgttaagagaagaaacttgtatttgcagctagaggttactgtcacatcatagatttaacatttaccatcttcaaagtacaaatcttacatgtccttcaaaaggaggtcttaatacagttcctagttccttacttctgttttaaactttgggtaccaaaccaaaaagaagaaaaaagaaaggaaaagatcttctttgaagaaaagtatgtctctggatccctggaaaataatgatgtccaaagcaaattgtgaagatcaaatgtgtgttaagaaaaggtgtcgaggggagggacaaaaccagaaacggtggaaggaccagtgtaatagtcacagacttgcatcctggctctgcttacatttcctggtactctcgaatgtacgggcgttcacatagtcattgtgaagttgttggggtttttttggttttgtttttaatttagctcttctctgaggacgaagctgttggtggtggtggtggtgggggtggtggtgtgggatacatggtggtcaagttgtcagccctgatcagtttggactctgtaactcataggtgcattctttttttctttggtgtctcacaaattacccaattgttgaataaaactataaatatgttaataccagctttttccaataaaataacaaatgttacatcaaaaacgaaaaaaaaaaaaaaaa

SEQ ID NO: 289 - protein, 447 aa, Homosapiens
MGLSFFSKHLPIQEGQPWALKTPADIISTVEFNHTGELLATGDKGGRVVIFQREPESKNAPHSQGEYDVYSTFQSHEPEFDYLKSLEIEEKINKIKWLPQQNAAHSLLSTNDKTIKLWKITERDKRPEGYNLKDEEGKLKDLSTVTSLQVPVLKPMDLMVEVSPRRIFANGHTYHINSISVNSDCETYMSADDLRINLWHLAITDRSFNIVDIKPANMEDLTEVITASEFHPHHCNLFVYSSSKGSLRLCDMRAAALCDKHSKLFEEPEDPSNRSFFSEIISSVSDVKFSHSGRYMLTRDYLTVKVWDLNMEARPIETYQVHDYLRSKLCSLYENDCIFDKFECAWNGSDSVIMTGAYNNFFRMFDRNTKRDVTLEASRESSKPRAVLKPRRVCVGGKRRRDDISVDSLDFTKKILHTAWHPAENIIAIAATNNLYIFQDKVNSDMH

SEQ ID NO: 290 - DNA, 6031 bp, Homosapiens
gctgggtcctaggccaggtctggggtaacctggaacttccacctgggctctgcgctaggtctctgtttcactccctccccgcggggcgcgcagctcgcgggtctttggacaccaccggtcctgagtccgcggactgccattttcattaagaactgccacttagaggtaccaaaataaagggtatttgctacctttaatacttgccagttcaggttggaggcacaggcagcagcaagaatggaaagaaatgttcttacaacattttcacaggaaatgtcccagttaattttgaatgaaatgccaaaagctgaatattccagtttattcaatgattttgttgaatctgaattttttttgattgatggggattcattacttatcacatgtatctgtgagatatcatttaagcctgggcagaacctccatttcttctatctggttgaacgctatcttgtggatcttattagcaaaggaggacaattcaccatagttttcttcaaggatgccgagtatgcgtatttcaacttccctgaacttctttctttgagaactgctttaattcttcatcttcagaagaataccaccattgatgttcgaacaacattttcgagatgcttatcaaaagagtggggaagtttcttggaagagagttacccatatttcctgatagttgcagacgaaggcctgaacgatctacaaacacagcttttcaactttttaatcattcattcttgggcaaggaaggtcaacgttgtactttcctcagggcaagaatctgatgttctttgcctttatgcataccttcttccaagcatgtacagacaccagattttttcctggaagaataagcagaacattaaagatgcttatacaaccctgcttaaccagttggaaagatttaagctttcagcattagcacctctttttggaagtttaaaatggaataatattacggaagaggcacacaagactgtatctctgcttacacaagtctggccagaaggatctgacattcggcgtgtcttttgtgttacttcatgctcattatctttgagaatgtaccatcgctttttaggaaacagagagccctcctctggtcaggaaactgagatccaacaggtgaacagtaattgcttaaccctgcaggagatggaagatttgtgtaaactgcattgtctcactgtggtttttctactccatctgcctctttctcaaagagcttgtgctagagtcatcacttcacattgggctgaggacatgaagcctttattacaaatgaaaaagtggtgtgaatatttcatcttaagaaatatacatacttttgaattttggaatctgaatttaattcacctttctgacttaaatgatgagcttttgttgaagaatattgctttttactatgaaaatgaaaatgtaaaaggcctacatttgaatttgggagataccattatgaaagattatgaatatctctggaataccgtatcaaagttggtcagagactttgaggttggacagccatttcctctgagaacaacaaaagtttgttttcttggaaagaaaccatcaccaatcaaagacagctccaatgaaatggtgcccaatttgggttttattccaacgtcatcttttgtggttgataaatttgctggagatattttgaaagatttgccttttctaaagagtgatgatcctattgttacttcactggttaaacaaaaggaatttgatgaacttgtgcactggcattctcataaacccctgagtgatgattatgacaggtccaggtgtcagtttgatgaaaaatctagagaccctcgtgttcttagatctgtgcaaaagtatcatgttttccaacggttttatgggaattcattagaaacagtctcttcgaaaatcatcgtgactcaaactattaagtcaaagaaggattttagtgggcccaagagcaaaaaggcacacgagaccaaggctgaaataattgctagagagaataagaaaaggttatttgccagggaagaacaaaaggaagagcaaaagtggaatgctttgtcattttctattgaagagcaattgaaagaaaatttacactctggaataaagagcctggaagattttttgaaatcctgtaaaagtagctgtgtgaaacttcaggttgaaatggtggggttaactgcttgcttgaaagcctggaaagaacattgccgaagtgaagaaggtaaaaccacgaaagatttaagtatagctgttcaggtgatgaaaaggatccactccttgatggaaaaatactcagaacttttacaagaagatgatcggcaactcatagccagatgccttaagtatttaggatttgatgagttggcaagttctttacatccagcccaggatgcagaaaatgatgtaaaagtgaagaaaaggaataaatattcaattggcattgggccagctcggttccaactgcaatacatgggccattatttgatacgagatgagagaaaagacccagatcccagggtccaggattttattcccgacacatggcagcgagagctccttgatgttgtggataagaatgagtcagcagtgattgttgccccaacgtcctcaggcaaaacatatgcctcctactactgtatggagaaagtgctgaaggagagcgacgacggggtggtcgtgtacgttgcacccacaaaggcccttgttaatcaagtggcagcaactgttcagaatcgttttacgaaaaatctgccaagtggtgaagttctctgtggtgttttcaccagggagtatcgtcatgatgccttaaactgtcaggtacttattacagtgcctgcctgctttgaaattctgctgcttgctcctcatcgccaaaactgggtgaaaaagatcagatatgttatatttgatgaggttcattgtcttggtggagaaattggagcagaaatctgggaacatctccttgtcatgatccgatgtccctttttggctctttcagctaccataagtaatcctgaacatctcaccgagtggctacaatcggtaaaatggtactggaaacaagaagacaaaataattgaaaataataccgcttctaaaagacatgtgggtcgtcaggccggctttcccaaagactacttgcaagtaaaacaatcgtataaagttagacttgtgctctatggagagaggtataatgatctagagaagcatgtatgttcaataaaacatggtgacattcattttgatcattttcacccatgtgctgcactaacaacagatcatattgaaaggtatggattccctcctgatcttaccctttcacctcgagaaagcatccagctgtatgatgccatgtttcaaatttggaaaagttggcctcgggcccaggaactgtgcccagaaaacttcattcattttaacaataaattagtcattaaaaagatggatgctaggaaatatgaagagagtctaaaggcagaattaacaagttggattaaaaatggcaacgtagagcaggccagaatggtacttcagaatcttagtcctgaagcagatttgagtccagaaaacatgatcaccatgtttccacttctagttgaaaaactaaggaaaatggagaagttacctgcactattttttttattcaagttaggagctgtagaaaacgcagctgaaagtgtgagcactttcctaaagaaaaagcaggagacaaaaaggcctcccaaagctgataaagaagcccatgtcatggctaacaaacttcgaaaagttaaaaaatccatagagaaacaaaagatcatagatgaaaagagccagaaaaaaaccagaaatgtggatcaaagcctaatacatgaagctgaacatgataatctagtgaagtgtctagagaagaacctggaaatcccacaggactgcacatatgctgatcaaaaagcagtggacactgagactttgcagaaggtatttggtcgagtaaaatttgaaagaaaaggtgaagaattgaaagccttggcagaaaggggtattggatatcatcacagtgctatgagtttcaaagaaaaacaattagttgaaatcctctttagaaaaggatatcttagggtggtgacagctactggaacacttgctttaggtgtcaacatgccttgtaaatctgtggtttttgctcaaaactcagtctatctggatgcgttgaattatagacagatgtctggccgtgctggaagaagaggtcaagacctgatgggagatgtatatttctttgatattccattccccaaaataggaaaactcataaaatccaatgttcctgagctgagaggacacttccctctcagcataaccctggtcctgcgactcatgctgctggcttccaagggagatgacccagaggataccaaggcaaaggtgctatcagtgctaaagcattcattgctgtccttcaagcaacccagagtcatggacatgttaaaactttacttcctgttttctttgcagttcctggtgaaagagggctatttagatcaagaaggtaatcctatggggtttgctggacttgtatcacatttgcattatcatgaaccttctaatcttgtttttgtcagttttcttgtaaatggactcttccatgatctctgtcagccaaccaggaaaggctcaaaacatttttctcaagacgttatggaaaagctagtattagtattggcacatctctttggaagaagatattttccaccaaagttccaagatgcacacttcgagttttatcaatcaaaggtgttccttgatgatctccctgaggattttagtgatgctttagatgaatataacatgaaaattatggaggactttaccactttcctacgaattgtttccaaactggctgatatgaatcaggaatatcaactcccattgtcaaaaatcaaattcacaggtaaagaatgtgaagactctcaactcgtatctcatttgatgagctgcaaggaaggaagagtagcaatttcaccatttgtttgtctgtctgggaactttgatgatgatttgcttcgactagaaactccaaaccatgttactctaggcacaatcggtgtcaatcgctctcaggctccagtgctgttgtcacagaaatttgataaccgaggaaggaaaatgtcgcttaatgcctatgcactggatttctacaaacatggttccttgataggattagtccaggataacaggatgaatgaaggagatgcttattatttgttgaaggattttgcactcaccattaaatctatcagtgtttccttgcgtgagctatgtgaaaatgaagacgacaacgttgtcttagcctttgaacaactgagtacaactttttgggaaaagttaaacaaagtctaaaaacaaagtctatgcaaaccacttaaaaataattccatagtagtttttcaggtcacgtttttgattcttatgcttcttgccagaaatacattatgataaagtggaaatacattacgatgaagtggaaagagcaaacactttggaatcaaacagagttgcaatcaaacctgcaatgttctgtcatgaatactcacaaattatttagtatacctgaatcttggtttctttttataactgagtaataatggttacatctcaggtagtttgaggattgactaaaaaaatgcgagaatgttgtatgtgactgaataacaatttttactctgcgaagccaaagtaaatataatattatcagtaactttatccccagtgtcagtatttataaaatgtttattaaggctagaaaaaatgaatacaatatcctgaaggtgaaatatattctcttcaattagcataaatatgatttacataagttagctatacagctattgagatagtactttctagtaaacttaaactactttttaaacatacattttgtgatgatttaacaaaaatatagagaatgatttgctttattgtaattgtatataagtgactggaaaagcacaaagaaataaagtgggttcgatctgttaaataaaaaaaaaaaaaa

SEQ ID NO: 291 - protein, 1712 aa, Homosapiens
MERNVLTTFSQEMSQLILNEMPKAEYSSLFNDFVESEFFLIDGDSLLITCICEISFKPGQNLHFFYLVERYLVDLISKGGQFTIVFFKDAEYAYFNFPELLSLRTALILHLQKNTTIDVRTTFSRCLSKEWGSFLEESYPYFLIVADEGLNDLQTQLFNFLIIHSWARKVNVVLSSGQESDVLCLYAYLLPSMYRHQIFSWKNKQNIKDAYTTLLNQLERFKLSALAPLFGSLKWNNITEEAHKTVSLLTQVWPEGSDIRRVFCVTSCSLSLRMYHRFLGNREPSSGQETEIQQVNSNCLTLQEMEDLCKLHCLTVVFLLHLPLSQRACARVITSHWAEDMKPLLQMKKWCEYFILRNIHTFEFWNLNLIHLSDLNDELLLKNIAFYYENENVKGLHLNLGDTIMKDYEYLWNTVSKLVRDFEVGQPFPLRTTKVCFLGKKPSPIKDSSNEMVPNLGFIPTSSFVVDKFAGDILKDLPFLKSDDPIVTSLVKQKEFDELVHWHSHKPLSDDYDRSRCQFDEKSRDPRVLRSVQKYHVFQRFYGNSLETVSSKIIVTQTIKSKKDFSGPKSKKAHETKAEIIARENKKRLFAREEQKEEQKWNALSFSIEEQLKENLHSGIKSLEDFLKSCKSSCVKLQVEMVGLTACLKAWKEHCRSEEGKTTKDLSIAVQVMKRIHSLMEKYSELLQEDDRQLIARCLKYLGFDELASSLHPAQDAENDVKVKKRNKYSIGIGPARFQLQYMGHYLIRDERKDPDPRVQDFIPDTWQRELLDVVDKNESAVIVAPTSSGKTYASYYCMEKVLKESDDGVVVYVAPTKALVNQVAATVQNRFTKNLPSGEVLCGVFTREYRHDALNCQVLITVPACFEILLLAPHRQNWVKKIRYVIFDEVHCLGGEIGAEIWEHLLVMIRCPFLALSATISNPEHLTEWLQSVKWYWKQEDKIIENNTASKRHVGRQAGFPKDYLQVKQSYKVRLVLYGERYNDLEKHVCSIKHGDIHFDHFHPCAALTTDHIERYGFPPDLTLSPRESIQLYDAMFQIWKSWPRAQELCPENFIHFNNKLVIKKMDARKYEESLKAELTSWIKNGNVEQARMVLQNLSPEADLSPENMITMFPLLVEKLRKMEKLPALFFLFKLGAVENAAESVSTFLKKKQETKRPPKADKEAHVMANKLRKVKKSIEKQKIIDEKSQKKTRNVDQSLIHEAEHDNLVKCLEKNLEIPQDCTYADQKAVDTETLQKVFGRVKFERKGEELKALAERGIGYHHSAMSFKEKQLVEILFRKGYLRVVTATGTLALGVNMPCKSVVFAQNSVYLDALNYRQMSGRAGRRGQDLMGDVYFFDIPFPKIGKLIKSNVPELRGHFPLSITLVLRLMLLASKGDDPEDTKAKVLSVLKHSLLSFKQPRVMDMLKLYFLFSLQFLVKEGYLDQEGNPMGFAGLVSHLHYHEPSNLVFVSFLVNGLFHDLCQPTRKGSKHFSQDVMEKLVLVLAHLFGRRYFPPKFQDAHFEFYQSKVFLDDLPEDFSDALDEYNMKIMEDFTTFLRIVSKLADMNQEYQLPLSKIKFTGKECEDSQLVSHLMSCKEGRVAISPFVCLSGNFDDDLLRLETPNHVTLGTIGVNRSQAPVLLSQKFDNRGRKMSLNAYALDFYKHGSLIGLVQDNRMNEGDAYYLLKDFALTIKSISVSLRELCENEDDNVVLAFEQLSTTFWEKLNKV

SEQ ID NO: 292 - DNA, 4556 bp, Homosapiens
cccagtccgacgccaggctctgcgctcggtctcctctgctccacctcctccccgcggggcgtgcagctccgaagctctttggacctagcaggttcggcggccgggaggtgccattcacatcaaatgtagccattttagaggtgtcaaaataaatcagccatatttaataaattccagctctactcttctaccctgtagcccaagaagcagcaacgatggggtcaaaggatcatgcagtatttttcagggaaatgacacagttaattttgaatgaaatgccaaaagctgggtattccagcatattaaatgattttgtggaatctaatttttttgtgattgatggagattccttgcttgtcacatgcctgggtgtaaaatcattcaagtggggacagaatctccactttttctatctggttgaatgctatcttgtggatcttctgagtaacggaggacaattcaccatagttttctttaaggatgctgaatatgcatattttgattttcctgaacttctttcattgaggaccgctttaattctccaccttcaacacaatactaacattgatgtgcaaacggagttttctggatgcttatcacaagattggaagttattcttggaacagcattacccgtattttctgatagtttcagaggaaggcctgagtgatttacaaacgtacctttttaacttcctaatcatacattcctggggaatgaaagtcaatgttgtgctttcatcagggcatgaatctgatactctcagattttatgcatatactatggaaagcacagacagaaaccaaactttttccaaggagaatgaaacagtgattcagagtgcatataaaagcctcatacaacacttggaagaaataagggttttagtattagcaactcattttgaacatttgaaatggaatgatatgatggaagaggcgtatcagactctatttctgcttcagcacctatggtcagaaggatcggacatccagcgtgttctctgtgtcacttcatgttcactatccttgagaatgtaccatcgtgtcttagtgcacagtaattgcctatccctgcaggaggtggaagatttctgcagactgcgttgcctctgtgtggcttttcaactccacttacccctttctcagagagcttgttctcgagtcatcacatgctcttggattaggaacagtgattctttcttaaaaatgaacaagtggtgtgaatatttcattttaagcaacttaaacgtttttggatgctggaatctgaatttaaatcatgtttctgacttgtatgatgagcaattgttaaagaatatagccttctactatgaatttgaaagtactcaagaaccacatttgaatttgggagattccattaggagggattatgaagacctgtggaatgttgtgtcacacctggttaaagaatttaacgttggaaagtcttttcctctgagaacaacaagaagacattttcttagacaagagaaatcggtcattcaagaaatctccttggaaaagatgcctagtgtgggctttattccaatgacatctgctgtaattgatgagtttgttggagatatgatgaaggatttgcctattctaaagagtgatgatccggttgttccttcactgtttaaacaaaagacatctgatgaacttttgcactggcatgctcaaagactccttagtgacgactatgacaggatcaaatgtcatgttgatgaacaatctagagatcctcatgttcttgatttcctgaaaaagattcaggattatcagcaattttatgggaaatcgttagaatcaatctctacgaaagtcattgtgactcaaactactcggccaaaggaggattccagtggtgccagtggtgaaatattacagaataccaaaccccaccaaattaccaaaaagagtaagaaaaagtcatttctcaaagaagatcagaacaaagctcagcaaaacgatgatctgctgttttctattgaagaggagatgaagaacaatttacattctggaataaggaaattggaagattatttgacatcatgtgcaagtaattcagtgaaatttggagttgaaatgttaggattaattgcctgctttaaagcatggaaaaaacattgccgaggtgaaggcaaaatttcgaaagatttaagtatagctgttcaaatgatgaaaaggattcattcactcctggagagatacccagaaattttggaagcagaacatcatcaatatatagctaaatgccttaaatatttaggctttaatgatctggcaaactctttggatccaactctgataggagatgacaaaaataagaagaaatattcgattgacattggaccagctcggtttcaactgcaatacatgggccattacttgataagagatgaaagaaaagatcgggatcccagggtccaggattttattcccaacgcatggcagcaggaactcctggatgtggtagataagaatgagtcagcagtgattgttgccccaacgtcctcaggcaaaacctatgcttcctactactgcatggagaaagtgctgagggagagcgatgtcggggtggttgtgtacgttgcacccgcaaagtcccttgttggtcaagtggctgcaactgttgagaatcgttttactaaaacgttgcctgccggcagaactctatgcggtgcttttacaagagattattgtcacaatgtactaaactgtcaggtacttattacagtgccggaatgttttgaaatcctgttgcttgctcctcatcgccaaaaatgggtggaaaggatcagatatgttatatttgatgaggtccattatcttggcagagaagttggagcaaaattttgggagctcctccttgtcattattcgatgtccctttttggttctttcagctaccataaataacccaaatcttctcaccaagtggctgcaatcagtaaaacagtactggaaacaggcagacaagattatggaagagaaatgtatttctgaaaaacaggctgacaaatgtctcaactttctccaagaccattcatataaaaatcaatcatatgaagttagacttgtgctctatggagagagatacaatgatttagagaagcatatatgttcagtaaaacatgatgatgtttattttgatcattttcatccctgtgctgcgctaacgacagatattattgaaaagtatggattcccacctgatcttaccctcacccctcaagaaagcatccagctttatgataccatggctcaagtctgggaaacttggcccagggctcaggaattgtgtccagaggaattcattctttttaagaataagatagtcattaagaagttggatgctagaaaatatgaagaaaacttaaaggcagaattgacaaattggattaaaaatggccaagtgaagaaggtcaaaagagtactgaagaaccttagtccggattcattgtctagttcaaaagatatggtgaaaatgtttcctcttcttgttgaaaagttaagacaaatggataagttgcctgcaatattttttttgtttaagaatgatgatgtgggaaaaagagctggaagtgtgtgcacttttctggagaagacagagacaaaaagccatccccacactgaatgtcatagttatgtctttgcaatagatgaagtacttgaaaaagtgaggaagacacagaaaaggattagcactaaaaaaaacccaaagaaggctgaaaaactggaaagaaaaaaagtgtatagagctgaatatattaatttcctggagaatctgaagattctggaaatttctgaggactgcacgtatgctgatgtcaaagccctacacactgaaattaccaggaataaagactcaactttggagagggtattaccgcgagtgcgatttacaagacacggcaaagaactgaaggctttagcacaaagggggattggatatcatcacagcagcatgtattttaaagaaaaagagtttgttgagatactctttgtaaaagggcttattagggtagtgacagctactgaaacacttgccttagggatccacatgccatgcaaatctgttgtttttgcccaagactcagtctatctggatgctttaaattacagacagatcatgtgaactctcctagactggaatatgaagactgtgattttacagagaaaaggagtttatctccatttcatgaccttttaggatgttgctgtttcaactttaaaagccatattttccttttctcaagtatagctatagaccatatcaccttttaccatgttctgttatgaaaaacaggaagtccctgagctggaatttttcagtctttctctttttcatgtagagagcaaagtttctcttaagggacttttgtttccttcagaattatggtctccttttttctcttccttgccaaaatcactagtttggaagaaatccaacatcatttatttactatggaccacaatgagagtggaactactttgttatcctgccctgatgacttagcattatctcctaggacagaataaaatatacttt

SEQ ID NO: 293 - protein, 1308 aa, Homosapiens
MGSKDHAVFFREMTQLILNEMPKAGYSSILNDFVESNFFVIDGDSLLVTCLGVKSFKWGQNLHFFYLVECYLVDLLSNGGQFTIVFFKDAEYAYFDFPELLSLRTALILHLQHNTNIDVQTEFSGCLSQDWKLFLEQHYPYFLIVSEEGLSDLQTYLFNFLIIHSWGMKVNVVLSSGHESDTLRFYAYTMESTDRNQTFSKENETVIQSAYKSLIQHLEEIRVLVLATHFEHLKWNDMMEEAYQTLFLLQHLWSEGSDIQRVLCVTSCSLSLRMYHRVLVHSNCLSLQEVEDFCRLRCLCVAFQLHLPLSQRACSRVITCSWIRNSDSFLKMNKWCEYFILSNLNVFGCWNLNLNHVSDLYDEQLLKNIAFYYEFESTQEPHLNLGDSIRRDYEDLWNVVSHLVKEFNVGKSFPLRTTRRHFLRQEKSVIQEISLEKMPSVGFIPMTSAVIDEFVGDMMKDLPILKSDDPVVPSLFKQKTSDELLHWHAQRLLSDDYDRIKCHVDEQSRDPHVLDFLKKIQDYQQFYGKSLESISTKVIVTQTTRPKEDSSGASGEILQNTKPHQITKKSKKKSFLKEDQNKAQQNDDLLFSIEEEMKNNLHSGIRKLEDYLTSCASNSVKFGVEMLGLIACFKAWKKHCRGEGKISKDLSIAVQMMKRIHSLLERYPEILEAEHHQYIAKCLKYLGFNDLANSLDPTLIGDDKNKKKYSIDIGPARFQLQYMGHYLIRDERKDRDPRVQDFIPNAWQQELLDVVDKNESAVIVAPTSSGKTYASYYCMEKVLRESDVGVVVYVAPAKSLVGQVAATVENRFTKTLPAGRTLCGAFTRDYCHNVLNCQVLITVPECFEILLLAPHRQKWVERIRYVIFDEVHYLGREVGAKFWELLLVIIRCPFLVLSATINNPNLLTKWLQSVKQYWKQADKIMEEKCISEKQADKCLNFLQDHSYKNQSYEVRLVLYGERYNDLEKHICSVKHDDVYFDHFHPCAALTTDIIEKYGFPPDLTLTPQESIQLYDTMAQVWETWPRAQELCPEEFILFKNKIVIKKLDARKYEENLKAELTNWIKNGQVKKVKRVLKNLSPDSLSSSKDMVKMFPLLVEKLRQMDKLPAIFFLFKNDDVGKRAGSVCTFLEKTETKSHPHTECHSYVFAIDEVLEKVRKTQKRISTKKNPKKAEKLERKKVYRAEYINFLENLKILEISEDCTYADVKALHTEITRNKDSTLERVLPRVRFTRHGKELKALAQRGIGYHHSSMYFKEKEFVEILFVKGLIRVVTATETLALGIHMPCKSVVFAQDSVYLDALNYRQIM

SEQ ID NO: 294 - DNA, 3280 bp, Homosapiens
gctttcatcagggcatgaatctgatactctcagattttatgcatatactatggaaagcacagacagaaaccaaactttttccaaggagaatgaaacagtgattcagagtgcatataaaagcctcatacaacacttggaagaaataagggttttagtattagcaactcattttgaacatttgaaatggaatgatatgatggaagaggcgtatcagactctatttctgcttcagcacctatggtcagaaggatcggacatccagcgtgttctctgtgtcacttcatgttcactatccttgagaatgtaccatcgtgtcttagtgcacagtaattgcctatccctgcaggaggtggaagatttctgcagactgcgttgcctctgtgtggcttttcaactccacttacccctttctcagagagcttgttctcgagtcatcacatgctcttggattaggaacagtgattctttcttaaaaatgaacaagtggtgtgaatatttcattttaagcaacttaaacgtttttggatgctggaatctgaatttaaatcatgtttctgacttgtatgatgagcaattgttaaagaatatagccttctactatgaatttgaaagtactcaagaaccacatttgaatttgggagattccattaggagggattatgaagacctgtggaatgttgtgtcacacctggttaaagaatttaacgttggaaagtcttttcctctgagaacaacaagaagacattttcttagacaagagaaatcggtcattcaagaaatctccttggaaaagatgcctagtgtgggctttattccaatgacatctgctgtaattgatgagtttgttggagatatgatgaaggatttgcctattctaaagagtgatgatccggttgttccttcactgtttaaacaaaagacatctgatgaacttttgcactggcatgctcaaagactccttagtgacgactatgacaggatcaaatgtcatgttgatgaacaatctagagatcctcatgttcttgatttcctgaaaaagattcaggattatcagcaattttatgggaaatcgttagaatcaatctctacgaaagtcattgtgactcaaactactcggccaaaggaggattccagtggtgccagtggtgaaatattacagaataccaaaccccaccaaattaccaaaaagagtaagaaaaagtcatttctcaaagaagatcagaacaaagctcagcaaaacgatgatctgctgttttctattgaagaggagatgaagaacaatttacattctggaataaggaaattggaagattatttgacatcatgtgcaagtaattcagtgaaatttggagttgaaatgttaggattaattgcctgctttaaagcatggaaaaaacattgccgaggtgaaggcaaaatttcgaaagatttaagtatagctgttcaaatgatgaaaaggattcattcactcctggagagatacccagaaattttggaagcagaacatcatcaatatatagctaaatgccttaaatatttaggctttaatgatctggcaaactctttggatccaactctgataggagatgacaaaaataagaagaaatattcgattgacattggaccagctcggtttcaactgcaatacatgggccattacttgataagagatgaaagaaaagatcgggatcccagggtccaggattttattcccaacgcatggcagcaggaactcctggatgtggtagataagaatgagtcagcagtgattgttgccccaacgtcctcaggcaaaacctatgcttcctactactgcatggagaaagtgctgagggagagcgatgtcggggtggttgtgtacgttgcacccgcaaagtcccttgttggtcaagtggctgcaactgttgagaatcgttttactaaaacgttgcctgccggcagaactctatgcggtgcttttacaagagattattgtcacaatgtactaaactgtcaggtccattatcttggcagagaagttggagcaaaattttgggagctcctccttgtcattattcgatgtccctttttggttctttcagctaccataaataacccaaatcttctcaccaagtggctgcaatcagtaaaacagtactggaaacaggcagacaagattatggaagagaaatgtatttctgaaaaacaggctgacaaatgtctcaactttctccaagaccattcatataaaaatcaatcatatgaagttagacttgtgctctatggagagagatacaatgatttagagaagcatatatgttcagtaaaacatgatgatgtttattttgatcattttcatccctgtgctgcgctaacgacagatattattgaaaagtatggattcccacctgatcttaccctcacccctcaagaaagcatccagctttatgataccatggctcaagtctgggaaacttggcccagggctcaggaattgtgtccagaggaattcattctttttaagaataagatagtcattaagaagttggatgctagaaaatatgaagaaaacttaaaggcagaattgacaaattggattaaaaatggccaagtgaagaaggtcaaaagagtactgaagaaccttagtccggattcattgtctagttcaaaagatatggtgaaaatgtttcctcttcttgttgaaaagttaagacaaatggataagttgcctgcaatattttttttgtttaagaatgatgatgtgggaaaaagagctggaagtgtgtgcacttttctggagaagacagagacaaaaagccatccccacactgaatgtcatagttatgtctttgcaatagatgaagtacttgaaaaagtgaggaagacacagaaaaggatcactaaaaaaaacccaaagaaggctgaaaaactggaaagaaaaaaagtgtatagagctgaatatattaatttcctggagaatctgaagattctggaaatttctgaggactgcacgtatgctgatgtcaaagccctacacactgaaattaccaggaataaagactcagtacgtcagagaattattaatataatacgttacagttgtgacattttatcatagtgatcgtttaatatctttgaacactgaaatgacttgtgtaatacctttgaaatatgattatctctgtgtgtgattttgtttgttttgcaatgattatcccaatttaatgtgctaaagttctataagtgactcttccttgctcagtgtgaatgtcagcctcttattttatttcactctattatc

SEQ ID NO: 295 - protein, 1015 aa, Homosapiens
MESTDRNQTFSKENETVIQSAYKSLIQHLEEIRVLVLATHFEHLKWNDMMEEAYQTLFLLQHLWSEGSDIQRVLCVTSCSLSLRMYHRVLVHSNCLSLQEVEDFCRLRCLCVAFQLHLPLSQRACSRVITCSWIRNSDSFLKMNKWCEYFILSNLNVFGCWNLNLNHVSDLYDEQLLKNIAFYYEFESTQEPHLNLGDSIRRDYEDLWNVVSHLVKEFNVGKSFPLRTTRRHFLRQEKSVIQEISLEKMPSVGFIPMTSAVIDEFVGDMMKDLPILKSDDPVVPSLFKQKTSDELLHWHAQRLLSDDYDRIKCHVDEQSRDPHVLDFLKKIQDYQQFYGKSLESISTKVIVTQTTRPKEDSSGASGEILQNTKPHQITKKSKKKSFLKEDQNKAQQNDDLLFSIEEEMKNNLHSGIRKLEDYLTSCASNSVKFGVEMLGLIACFKAWKKHCRGEGKISKDLSIAVQMMKRIHSLLERYPEILEAEHHQYIAKCLKYLGFNDLANSLDPTLIGDDKNKKKYSIDIGPARFQLQYMGHYLIRDERKDRDPRVQDFIPNAWQQELLDVVDKNESAVIVAPTSSGKTYASYYCMEKVLRESDVGVVVYVAPAKSLVGQVAATVENRFTKTLPAGRTLCGAFTRDYCHNVLNCQVHYLGREVGAKFWELLLVIIRCPFLVLSATINNPNLLTKWLQSVKQYWKQADKIMEEKCISEKQADKCLNFLQDHSYKNQSYEVRLVLYGERYNDLEKHICSVKHDDVYFDHFHPCAALTTDIIEKYGFPPDLTLTPQESIQLYDTMAQVWETWPRAQELCPEEFILFKNKIVIKKLDARKYEENLKAELTNWIKNGQVKKVKRVLKNLSPDSLSSSKDMVKMFPLLVEKLRQMDKLPAIFFLFKNDDVGKRAGSVCTFLEKTETKSHPHTECHSYVFAIDEVLEKVRKTQKRITKKNPKKAEKLERKKVYRAEYINFLENLKILEISEDCTYADVKALHTEITRNKDSVRQRIINIIRYSCDILS

SEQ ID NO: 296 - DNA, 5913 bp, Homosapiens
gctttcatcagggcatgaatctgatactctcagattttatgcatatactatggaaagcacagacagaaaccaaactttttccaaggagaatgaaacagtgattcagagtgcatataaaagcctcatacaacacttggaagaaataagggttttagtattagcaactcattttgaacatttgaaatggaatgatatgatggaagaggcgtatcagactctatttctgcttcagcacctatggtcagaaggatcggacatccagcgtgttctctgtgtcacttcatgttcactatccttgagaatgtaccatcgtgtcttagtgcacagtaattgcctatccctgcaggaggtggaagatttctgcagactgcgttgcctctgtgtggcttttcaactccacttacccctttctcagagagcttgttctcgagtcatcacatgctcttggattaggaacagtgattctttcttaaaaatgaacaagtggtgtgaatatttcattttaagcaacttaaacgtttttggatgctggaatctgaatttaaatcatgtttctgacttgtatgatgagcaattgttaaagaatatagccttctactatgaatttgaaagtactcaagaaccacatttgaatttgggagattccattaggagggattatgaagacctgtggaatgttgtgtcacacctggttaaagaatttaacgttggaaagtcttttcctctgagaacaacaagaagacattttcttagacaagagaaatcggtcattcaagaaatctccttggaaaagatgcctagtgtgggctttattccaatgacatctgctgtaattgatgagtttgttggagatatgatgaaggatttgcctattctaaagagtgatgatccggttgttccttcactgtttaaacaaaagacatctgatgaacttttgcactggcatgctcaaagactccttagtgacgactatgacaggatcaaatgtcatgttgatgaacaatctagagatcctcatgttcttgatttcctgaaaaagattcaggattatcagcaattttatgggaaatcgttagaatcaatctctacgaaagtcattgtgactcaaactactcggccaaaggaggattccagtggtgccagtggtgaaatattacagaataccaaaccccaccaaattaccaaaaagagtaagaaaaagtcatttctcaaagaagatcagaacaaagctcagcaaaacgatgatctgctgttttctattgaagaggagatgaagaacaatttacattctggaataaggaaattggaagattatttgacatcatgtgcaagtaattcagtgaaatttggagttgaaatgttaggattaattgcctgctttaaagcatggaaaaaacattgccgaggtgaaggcaaaatttcgaaagatttaagtatagctgttcaaatgatgaaaaggattcattcactcctggagagatacccagaaattttggaagcagaacatcatcaatatatagctaaatgccttaaatatttaggctttaatgatctggcaaactctttggatccaactctgataggagatgacaaaaataagaagaaatattcgattgacattggaccagctcggtttcaactgcaatacatgggccattacttgataagagatgaaagaaaagatcgggatcccagggtccaggattttattcccaacgcatggcagcaggaactcctggatgtggtagataagaatgagtcagcagtgattgttgccccaacgtcctcaggcaaaacctatgcttcctactactgcatggagaaagtgctgagggagagcgatgtcggggtggttgtgtacgttgcacccgcaaagtcccttgttggtcaagtggctgcaactgttgagaatcgttttactaaaacgttgcctgccggcagaactctatgcggtgcttttacaagagattattgtcacaatgtactaaactgtcaggtccattatcttggcagagaagttggagcaaaattttgggagctcctccttgtcattattcgatgtccctttttggttctttcagctaccataaataacccaaatcttctcaccaagtggctgcaatcagtaaaacagtactggaaacaggcagacaagattatggaagagaaatgtatttctgaaaaacaggctgacaaatgtctcaactttctccaagaccattcatataaaaatcaatcatatgaagttagacttgtgctctatggagagagatacaatgatttagagaagcatatatgttcagtaaaacatgatgatgtttattttgatcattttcatccctgtgctgcgctaacgacagatattattgaaaagtatggattcccacctgatcttaccctcacccctcaagaaagcatccagctttatgataccatggctcaagtctgggaaacttggcccagggctcaggaattgtgtccagaggaattcattctttttaagaataagatagtcattaagaagttggatgctagaaaatatgaagaaaacttaaaggcagaattgacaaattggattaaaaatggccaagtgaagaaggtcaaaagagtactgaagaaccttagtccggattcattgtctagttcaaaagatatggtgaaaatgtttcctcttcttgttgaaaagttaagacaaatggataagttgcctgcaatattttttttgtttaagaatgatgatgtgggaaaaagagctggaagtgtgtgcacttttctggagaagacagagacaaaaagccatccccacactgaatgtcatagttatgtctttgcaatagatgaagtacttgaaaaagtgaggaagacacagaaaaggatcactaaaaaaaacccaaagaaggctgaaaaactggaaagaaaaaaagtgtatagagctgaatatattaatttcctggagaatctgaagattctggaaatttctgaggactgcacgtatgctgatgtcaaagccctacacactgaaattaccaggaataaagactcaactttggagagggtattaccgcgagtgcgatttacaagacacggcaaagaactgaaggctttagcacaaagggggattggatatcatcacagcagcatgtattttaaagaaaaagagtttgttgagatactctttgtaaaagggcttattagggtagtgacagctactgaaacacttgccttagggatccacatgccatgcaaatctgttgtttttgcccaagactcagtctatctggatgctttaaattacagacagatgtctggtcgtgctggaagaagaggtcaagacctgcttggaaatgtgtatttctttgatatcccattgcccaaaataaaaagactccttgcatccagtgttcctgagctgagaggacagttccctctcagcataaccctggtcctgcgactcatgctgctggcttccaagggagatgacccagaggatgccaaggcaaaggtgttgtcagtgctaaagcattcattgctgtcttttaagagacgaagagccatggagactttgaaactttactttttgttttccttgcagctccttatcaaagaggactatttaaataaaaagggtaatccaaagaaatttgcaggacttgcatcatatttgcatggtcatgaaccttcaaatcttgtttttgtaaattttctcaagagaggccttttccataatctctgtaagccagcctggaaaggctcacaacaattttcccaagatgtgatggaaaagctcgtgttagtattggcaaatttgtttggaagaaaatatattccagcaaaattccaaaatgctaatttaagtttttctcagtcaaaggtgatccttgccgaactcccggaggattttaaagctgctttatatgagtataacctggcagtaatgaaggattttgcctccttcctgctgattgcttccaagtcggtgaacatgaaaaaagagcatcaactccctttgtcaagaatcaaattcacaggtaaagaatgtgaagactcccaactcgtgtctcacttgatgagctgcaagaaaggaagagtagccatttcaccatttgtttgtctttcggggaacacagataatgatttgcttcgaccagagactatcaaccaggtcatcctgcgcacagtcggtgttagtggcactcaggctcctctgctgtggccatggaaattagataaccgaggaaggagaatgccactaaatgcatatgtgctcaatttctataaacacaactgcttgacaagattagaccaaaaaaatgggatgcgtatgggacagcttttaaagtgtttgaaagattttgcattcaacattcaggctatcagtgactccttgagtgaactatgtgaaaataagcgtgacaatgtagtcctggcatttaaacaattgagtcaaaccttttatgagaaacttcaagaaatgcaaattcaaatgagtcaaaatcatttagaataacaccatggaaaactttcaagtctgattatgtggtatttatccctttgcaaggagagatataattaagcttacacaatgaaatggaaaaaatgtttgtcttggagtcaaacagaattaaactcagatatcagctctgctattttctaactgaatgactttaagttatgtaatatatctgagctttaacttcatttttggcaaaaccggagtaaaaatgaatacctctagttgttttgaggattaaatgagataatgtaagaaaagtgattgggattgggtggtgacttaatgaacggtagtggtttttttagtagttaatgtatagcaaaattagtttcacattgtcaagttttcaatacatccccaagttaattgaattttaaattaatgatcaataaatcacaaaggacccaaatcaattctgaacaacaatttagttatgtaagaagacttctgagattacaagaaactcactgctgtggactggatgtttgtgccctcccctccaaaatttttatattgaaattctaaccctcaatgtgatggtattaggagatgataggtcatgagggtggagctccttggatgtaattagtgcctttaacagagagacaagagagcttgttctccaatctctgctcactaccactggatgatacaatgggaagatggccatctgcagaccaagaagcaagccctcaacagaactgaatctacttacaccatgatcttgaactttccagcctccaggattgtgagaaatacatgtttgttgtttagccatctagtctgtggttttctgttgaagcagtctgaattgactaaaacagtcacttggagtagttataaaccactttcctgttgaaagcagaacatgctgattcaactgttttgttcaatagcaatgatagattttgtttaagtcccctacactttcttatttctaaatgatcaagagtacacttcctggcagtgattaaggagtgtgtatctaacagaaaaaatatatataccctgtgaacccgaatatggaattcagattgtttctgccctcagtatcatacttaaaaaacaagcatacaaacaaacataagggaacaaacagcaaccataacaaaaacaaacctttaaaggtgcgtttttgctgtgataaatgaatacggtactctgaaggagaaaaaagtttctcaaatgagcttaaactgcaagtgatttaaaaattagagaatataattcttaaagctattgaaagtttcaaccagaaaacctcaagtgaattttgtatgtaaatgaaatcttgaatgtaagttctgtgattctttaagcaaacaattagctgaaaacttggtattgttgtagtttatgtagtaagtgacttggcacccatcagaaaataaagggcatta

SEQ ID NO: 297 - protein, 1485 aa, Homosapiens
MESTDRNQTFSKENETVIQSAYKSLIQHLEEIRVLVLATHFEHLKWNDMMEEAYQTLFLLQHLWSEGSDIQRVLCVTSCSLSLRMYHRVLVHSNCLSLQEVEDFCRLRCLCVAFQLHLPLSQRACSRVITCSWIRNSDSFLKMNKWCEYFILSNLNVFGCWNLNLNHVSDLYDEQLLKNIAFYYEFESTQEPHLNLGDSIRRDYEDLWNVVSHLVKEFNVGKSFPLRTTRRHFLRQEKSVIQEISLEKMPSVGFIPMTSAVIDEFVGDMMKDLPILKSDDPVVPSLFKQKTSDELLHWHAQRLLSDDYDRIKCHVDEQSRDPHVLDFLKKIQDYQQFYGKSLESISTKVIVTQTTRPKEDSSGASGEILQNTKPHQITKKSKKKSFLKEDQNKAQQNDDLLFSIEEEMKNNLHSGIRKLEDYLTSCASNSVKFGVEMLGLIACFKAWKKHCRGEGKISKDLSIAVQMMKRIHSLLERYPEILEAEHHQYIAKCLKYLGFNDLANSLDPTLIGDDKNKKKYSIDIGPARFQLQYMGHYLIRDERKDRDPRVQDFIPNAWQQELLDVVDKNESAVIVAPTSSGKTYASYYCMEKVLRESDVGVVVYVAPAKSLVGQVAATVENRFTKTLPAGRTLCGAFTRDYCHNVLNCQVHYLGREVGAKFWELLLVIIRCPFLVLSATINNPNLLTKWLQSVKQYWKQADKIMEEKCISEKQADKCLNFLQDHSYKNQSYEVRLVLYGERYNDLEKHICSVKHDDVYFDHFHPCAALTTDIIEKYGFPPDLTLTPQESIQLYDTMAQVWETWPRAQELCPEEFILFKNKIVIKKLDARKYEENLKAELTNWIKNGQVKKVKRVLKNLSPDSLSSSKDMVKMFPLLVEKLRQMDKLPAIFFLFKNDDVGKRAGSVCTFLEKTETKSHPHTECHSYVFAIDEVLEKVRKTQKRITKKNPKKAEKLERKKVYRAEYINFLENLKILEISEDCTYADVKALHTEITRNKDSTLERVLPRVRFTRHGKELKALAQRGIGYHHSSMYFKEKEFVEILFVKGLIRVVTATETLALGIHMPCKSVVFAQDSVYLDALNYRQMSGRAGRRGQDLLGNVYFFDIPLPKIKRLLASSVPELRGQFPLSITLVLRLMLLASKGDDPEDAKAKVLSVLKHSLLSFKRRRAMETLKLYFLFSLQLLIKEDYLNKKGNPKKFAGLASYLHGHEPSNLVFVNFLKRGLFHNLCKPAWKGSQQFSQDVMEKLVLVLANLFGRKYIPAKFQNANLSFSQSKVILAELPEDFKAALYEYNLAVMKDFASFLLIASKSVNMKKEHQLPLSRIKFTGKECEDSQLVSHLMSCKKGRVAISPFVCLSGNTDNDLLRPETINQVILRTVGVSGTQAPLLWPWKLDNRGRRMPLNAYVLNFYKHNCLTRLDQKNGMRMGQLLKCLKDFAFNIQAISDSLSELCENKRDNVVLAFKQLSQTFYEKLQEMQIQMSQNHLE

SEQ ID NO: 298 - DNA, 3497 bp, Homosapiens
ctttaggatccaaactttccctcatcttcctgtcttcttctgagccctccacaaaattccaacctctgtccactatgcagttccaaaatcgcttccacattttcagatatctttatagcagtgccccactcctcagtatcaacttcctgtattagttcattctcacgctgctatacagagacacttgagactgggtaatttataaagaaaagacattttattggcttatggttctgcaggctgtacaggaagcataagtagcttctgcttctgggtaggcctcaggaaactttcaatcatgtcagaaagtgaagcagaagtaggccgtgtgttacatgcatggctggagcaggaggaagagaggtagaggggaggtgctacacacttttaaacaaccagatctcatgataactcactatcatgagaacagcaccagaggggaaattcacctccatgatccaatcacctccaatcaggccccacctccaacactggggattacaatttgacatgaaatttgggtgatgacacagatccaaatatttccattctgttgactgcaatctacctaattccattaggtttaatgggataactcaagattcagaacaatataattactctatttacctttagaatggcctaagacaactaatcttgtaagccggattggctttcatacttcattttttcaggccactattggtcaccactgtttcagggatttagcagattatttgccagtctgggttatgtataacagttctgctttatatgatgtatttaattcaaggaagcatgtgccatgtgaagatacaatcaaagagataatatgaaatcaaatgaaatttactttcacgtaagatctggtaaccttatctatatagtatgtatgtgtactatttattacatatcagtatttacaaatactgtttaaaactagataaattaaagtactcttcttttataggtgttgtcagtgctaaagcattcattgctgtcttttaagagacgaagagccatggagactttgaaactttactttttgttttccttgcagctccttatcaaagaggactatttaaataaaaagggtaatccaaagaaatttgcaggacttgcatcatatttgcatggtcatgaaccttcaaatcttgtttttgtaaattttctcaagagaggccttttccataatctctgtaagccagcctggaaaggctcacaacaattttcccaagatgtgatggaaaagctcgtgttagtattggcaaatttgtttggaagaaaatatattccagcaaaattccaaaatgctaatttaagtttttctcagtcaaagacacaacaacaaaataataacaagcaaacagaacccaagaaaatgtgcattagaacctgggaatgtagaagaagcttgtttctatccagtaaccctagtgaatagagaacaaaaaggtgatccttgccgaactcccggaggattttaaagctgctttatatgagtataacctggcagtaatgaaggattttgcctccttcctgctgattgcttccaagtcggtgaacatgaaaaaagagcatcaactccctttgtcaagaatcaaattcacaggtaaagaatgtgaagactcccaactcgtgtctcacttgatgagctgcaagaaaggaagagtagccatttcaccatttgtttgtctttcggggaacacagataatgatttgcttcgaccagagactatcaaccaggtcatcctgcgcacagtcggtgttagtggcactcaggctcctctgctgtggccatggaaattagataaccgaggaaggagaatgccactaaatgcatatgtgctcaatttctataaacacaactgcttgacaagattagaccaaaaaaatgggatgcgtatgggacagcttttaaagtgtttgaaagattttgcattcaacattcaggctatcagtgactccttgagtgaactatgtgaaaataagcgtgacaatgtagtcctggcatttaaacaattgagtcaaaccttttatgagaaacttcaagaaatgcaaattcaaatgagtcaaaatcatttagaataacaccatggaaaactttcaagtctgattatgtggtatttatccctttgcaaggagagatataattaagcttacacaatgaaatggaaaaaatgtttgtcttggagtcaaacagaattaaactcagatatcagctctgctattttctaactgaatgactttaagttatgtaatatatctgagctttaacttcatttttggcaaaaccggagtaaaaatgaatacctctagttgttttgaggattaaatgagataatgtaagaaaagtgattgggattgggtggtgacttaatgaacggtagtggtttttttagtagttaatgtatagcaaaattagtttcacattgtcaagttttcaatacatccccaagttaattgaattttaaattaatgatcaataaatcacaaaggacccaaatcaattctgaacaacaatttagttatgtaagaagacttctgagattacaagaaactcactgctgtggactggatgtttgtgccctcccctccaaaatttttatattgaaattctaaccctcaatgtgatggtattaggagatgataggtcatgagggtggagctccttggatgtaattagtgcctttaacagagagacaagagagcttgttctccaatctctgctcactaccactggatgatacaatgggaagatggccatctgcagaccaagaagcaagccctcaacagaactgaatctacttacaccatgatcttgaactttccagcctccaggattgtgagaaatacatgtttgttgtttagccatctagtctgtggttttctgttgaagcagtctgaattgactaaaacagtcacttggagtagttataaaccactttcctgttgaaagcagaacatgctgattcaactgttttgttcaatagcaatgatagattttgtttaagtcccctacactttcttatttctaaatgatcaagagtacacttcctggcagtgattaaggagtgtgtatctaacagaaaaaatatatataccctgtgaacccgaatatggaattcagattgtttctgccctcagtatcatacttaaaaaacaagcatacaaacaaacataagggaacaaacagcaaccataacaaaaacaaacctttaaaggtgcgtttttgctgtgataaatgaatacggtactctgaaggagaaaaaagtttctcaaatgagcttaaactgcaagtgatttaaaaattagagaatataattcttaaagctattgaaagtttcaaccagaaaacctcaagtgaattttgtatgtaaatgaaatcttgaatgtaagttctgtgattctttaagcaaacaattagctgaaaacttggtattgttgtagtttatgtagtaagtgacttggcacccatcagaaaataaagggcatta

SEQ ID NO: 299 - protein, 190 aa, Homosapiens
MKDFASFLLIASKSVNMKKEHQLPLSRIKFTGKECEDSQLVSHLMSCKKGRVAISPFVCLSGNTDNDLLRPETINQVILRTVGVSGTQAPLLWPWKLDNRGRRMPLNAYVLNFYKHNCLTRLDQKNGMRMGQLLKCLKDFAFNIQAISDSLSELCENKRDNVVLAFKQLSQTFYEKLQEMQIQMSQNHLE

SEQ ID NO: 300 - DNA, 2640 bp, Homosapiens
tccccgcggggcgtgcagctccgaagctctttggacctagcaggttcggcggccgggtttgctaaagctgccataacaaaatattatagagtggtggcttaaacaacagaaatttatttctcactattctggaggctgtgaagtacaagatcaagattctggctgattgagtttctggtgagaggtgccattcacatcaaatgtagccattttagaggtgtcaaaataaatcagccatatttaataaattccagctctactcttctaccctgtagcccaagaagcagcaacgatggggtcaaaggatcatgcagtatttttcagggaaatgacacagttaattttgaatgaaatgccaaaagctgggtattccagcatattaaatgattttgtggaatctaatttttttgtgattgatggagattccttgcttgtcacatgcctgggtgtaaaatcattcaagtggggacagaatctccactttttctatctggttgaatgctatcttgtggatcttctgagtaacggaggacaattcaccatagttttctttaagatggagtttcgctctttttgcacaggctgaagtgcaatgccgtgatctcggctcactgcaacctccacctcctaggttcaagtgattctactctctcagcctcccaagtagctgggattacaggcgcgtgccaccatgctcagctaatttttgtatttttagtagagacagggtttcatcatattggtcaggctggtgtcgaacacctgacctgaggcaatccacccgccttggtctcccaaagttctagaacttttaataaatagaattttacagtatgaactctttgtataaacctttcattcaacataatatttttgagaggcatccattttgttgtgtgcagtggtattttgttccttttatcacttttgagtaaggttttattgtagaaatgtgccacggtttgtttacccattttcttgttgagtggacactttcctgttgagcaatctctttcaatatcttgcctagatgaataaagctactatgtgcattcacatgcaagtcttcgtgtggacgtaagtttttattttccttgtgcatgtatctgtggttgaaatatatgttttataaaactgccaaagcttttcctaaggtagttgtgcccctttacactcactccagcaatgaataacagttctggtgccctgtgtagttgcaaacatttgtatttggtcagtccagccattctggtggatgtgtagtgttatgtccctgtgttttaattggtatttatcaaatggctaatgatgttgcctactttttcaagtgcttattgttcatttgtatactatgacttgtgaagcatctgctcgtatcttttgaccattttaaattgggttctttatctttttaatattgagttgtagtagttcttgatatattctgtatacaacctcttgtcatgtatattattgcaaatatattttcccagtctgtggcttgtcacttcattttgagacagagtctcgctctgtcacgtaggctggagtgcagtggcgcaatcttggctcactgcaacctctgcctcccgggttcatgccattctcctgcctcagcctcctaagtacttggaactacaggcatgcactaccatgcccggctaatttttttgtatttttagtagacatggggtttcatcgtgttagcaggatggtctcaatctccggacctcgtgatctacccgcctctgcctcccaaagtgctgggattacaggcatcagccaccgtgcccggctgccacttcgttttcttagtactatctttggatgaccagatattttaattttggtgaaatctaacttattattctttaatggttattgtgcctgtatcctgataagaatcattgcctatctcttagtcacaaagatattttcctatatttattaataattctagaagtatgtagtttcagcttttgcattttggtctatgatatttcttgaattaatttttgtgtgtttgtggtgtgaatgggggattgaggttgatttgttccagcatccattgttgagaacatttttcttccaccagtggattgctttggtttcttcatcaaaaaatcaaatgattatatatgtgtaggtccatttctgggctttctactatgttccatcaaaggatttaacaaattaccagtaccacaatgtcctgatttgtgtaattttatagtaaatcttgaagcccactttgttcttctttgtttaactttggctattctaggttctctgcatttccacacgaattttagaatcagcttgccaatttctatttaaaaagaacgatgggattttaatgatattcattaaatttgtagaccaatatagtctttcagttagtgaacacaatatgtatctctgttttttaagatctctaatttgttttatcagttttgtagtcttcagtgtggaggcgttgcacatcttttgctaaatctatttcaagatatttcatgttttgatcttaccgtaaattgaatttttaaaaataattttttagtttttgctgcttgtatatagaagtagaattgatttttgtttgttaactggtatcctgcaatcttattaaaacaacttatt

SEQ ID NO: 301 - protein, 97 aa, Homosapiens
MGSKDHAVFFREMTQLILNEMPKAGYSSILNDFVESNFFVIDGDSLLVTCLGVKSFKWGQNLHFFYLVECYLVDLLSNGGQFTIVFFKMEFRSFCTG

SEQ ID NO: 302 - DNA, 935 bp, Homosapiens
tcctccccgcggggcgtgcagctccgaagctctttggacctagcaggttcggcggccgggaggtgccattcacatcaaatgtagccattttagaggtgtcaaaataaatcagccatatttaataaattccagctctactcttctaccctgtagcccaagaagcagcaacgatggggtcaaaggatcatgcagtatttttcagggaaatgacacagttaattttgaatgaaatgccaaaagctgggtattccagcatattaaatgattttgtggaatctaatttttttgtgattgatggagattccttgcttgtcacatgcctgggtgtaaaatcattcaagtggggacagaatctccactttttctatctggttgaatgctatcttgtggatcttctgagtaacggaggacaattcaccatagttttctttaagatggagtttcgctctttttgcacaggctgaagtgcaatgccgtgatctcggctcactgcaacctccacctcctaggttcaagtgattctactctctcagcctcccaagtagctgggattacaggcgcgtgccaccatgctcagctaatttttgtatttttagtagagacagggtttcatcatattggtcaggctggtgtcgaacacctgacctgaggcaatccacccgccttggtctcccaaagttctagaacttttaataaatagaattttacagtatgaactctttgtataaacctttcattcaacataatatttttgagaggcatccattttgttgtgtgcagtggtattttgttccttttatcacttttgagtaaggttttattgtagaaatgtgccacggtttgtttacccattttcttgttgagtggacactttcctgttgagcaatctctttcaatatcttgcctagatgaataaagctactatgtgcattcac

SEQ ID NO: 303 - protein, 97 aa, Homosapiens; identical to SEQ ID NO: 301

SEQ ID NO: 304 - DNA, 5773 bp, Homosapiens
gtgaccacggaccaggcagtctctaatgaataggcaaggccacaacctccattctcccagaaaagaagaaatgctcatctgaaattcatcacctctctggagtcttcaaactgaccaagcattgaaaagaacacagtttcagaaaacagtttccagtgcctctggccttcctactgaaagcagacacagagtgcatgaagaccgttcaaatatgtcagggacctcctcccatgagtccttctatgactccctctcagacatgcaggaagaaagcaagaatactgacttcttcccgggcctttctgctttcctcagccaggaagagataaacaagagtcttgacctggcccggagagccatagccgactccgaaacagaagattttgactcggaaaaggagatctcgcagattttcagtacttctcctgcaagcctctgtgaacatccttcccataaggagaccaaattgggtgaacacgcctcgaggagacctcaggataacaggtcaacacctgtccagcctctggcagagaaacaaactaagagtatctcttcacctgtttcaaagaggaaacctgccatgtcacccctgctcaccaggcccagctacatccggagcctccgaaaggctgaaaagcgtggtgcaaaaactcccagcacaaacgtaaagcccaaaacgccacatcaaagaaagggtggcccccagagccagctgtgtgacaaggcagctaatttaattgaggagctaacatccatatttaaagccgcaaagccaagaaacagaagcccaaatggggagtcctcgtcaccagacagtgggtacctgtctcctaaaaatcagccgtcagccctgctgagtgcctcagccagccagagccctatggaagaccaaggggagatggaaagagaggtcaagtcccctggggccaggcattgctaccaggacaaccaggacttggcagtgccacacaaccgcaagtctcacccacagccccacagcgccctccacttcccagctgcacctcgattcatccaaaagctgaggagccaagaagtagcagaagggagccgagtttatctggagtgtagagtcactggaaaccccactcctcgagtcagatggttctgtgaagggaaagaactgcacaacactcctgatattcaaatccactgtgagggaggggacctccataccctgatcatagcagaggcctttgaggacgacacaggtcgctacacctgtttggctacgaatcccagcggctcagacacaacatctgctgaggtgttcattgaaggtgccagttcaacagattctgacagtgaaagtttagctttcaaatcaagagctggagctatgccacaagctcaaaagaaaacaacttctgtttccttgacaataggatcatcatctccaaagacaggggtgaccacagctgtgattcaaccactgtctgtccctgtgcaacaggttcacagtccaacttcatatctctgccgacctgatggaaccactactgcctactttcctcctgtttttacaaaggaactgcaaaacacagccgtggcggaaggccaggtggtggttctggagtgccgggtccgtggggcaccccctctgcaggtccagtggtttcggcaagggagtgaaatccaagactctccagatttccgaattctacagaaaaaacctagatctacagctgaacctgaggagatttgcaccctagttatcgctgagactttccctgaagatgcagggatctttacatgttcagcaagaaatgattatggatcagcaaccagcactgcccagctggttgtcacctcagccaacactgaaaactgtagttacgagtcaatgggagaatccaacaatgaccacttccaacactttccacctccccctccaatcttggagacaagttccttggagttggcttcaaagaaaccatctgagatccagcaggtgaacaaccctgagttaggcctgagcagggcagcccttcaaatgcaattcaatgctgctgagagggaaacgagcggagtccatcccagccgtggagtaaatggactgattaacggcaaagctaacagtaataaatctcttccaacaccagctgtcctgctttcacccactaaggagccaccacctctgcttgccaaaccaaaactaggatttccaaagaaggccagtagaactgctagaatagcctccgatgaggaaattcaaggcacaaaggatgctgttattcaagacctggaacgaaaacttcgcttcaaggaggacctcctgaacaatggccagccgaggttaacatacgaagaaagaatggctcgtcgactgctaggtgctgacagtgcaactgtctttaatattcaggagccagaagaggaaacagctaatcaggaatacaaagtctccagctgtgaacagagactcatcagtgaaatagagtacaggctagaaaggtctcctgtggatgaatcaggtgatgaagttcagtatggagatgtgcctgtggaaaatggaatggcaccattctttgagatgaagctgaaacattacaagatctttgagggaatgccagtaactttcacatgtagagtggctggaaatccaaagccaaagatctattggtttaaagatgggaagcagatctctccaaagagtgatcactacaccattcaaagagatctcgatgggacctgctccctccataccacagcctccaccctagatgatgatgggaattatacaattatggctgcaaaccctcagggccgcatcagttgtactggacggctaatggtacaggctgtcaaccaaagaggtcgaagtccccggtctccctcaggccatcctcatgtcagaaggcctcgttctagatcaagggacagtggagacgaaaatgaaccaattcaggagcgattcttcagacctcacttcttgcaggctcctggagatctgactgttcaagaaggaaaactctgcagaatggactgcaaagtcagtgggttaccaaccccagatctaagctggcaactagatggaaagcccgtacgccctgacagtgctcacaagatgctggtgcgtgagaacggggtgcactctctgatcatagagccagtcacgtcacgtgatgccggcatctacacatgtatagctaccaaccgagcaggacagaactcattcagcctggagcttgtggttgctgctaaagaagcacacaaaccccctgtgtttattgagaagctccaaaacacaggagttgctgatgggtacccagtgcggctggaatgtcgtgtattgggagtgccaccacctcagatattttggaagaaagaaaatgaatcactcactcacagcactgaccgagtgagcatgcaccaggacaaccacggctacatctgcctgctcattcagggagccacaaaagaagatgctgggtggtatactgtgtcagccaagaatgaagcagggattgtgtcctgtactgccaggctggacgtttacatttctcgacattaatagtgaaccacaccaggagaacaaatacccaacccagtggcatcagcagtcacagagcaccaagccaaaaaaagtacggccctcagccagtcgctatgcagcactttcggaccagggactagacatcaaagcagcgttccaacctgaggccaacccatctcacctgacactgaatactgccttggtagaaagtgaggacctgtaatccagcattcttgttaaagctgaaacactgaaacagccattgccttgaccaacatattcctttgtcacattatgtaaaaggcagaaacatacctttgactataagaaattaaaaaaaaacaccaaaataatatttttcttacttgatataccaaacttagtttaagtagataatgctaatacaaatatacacattgcacagaaaatacacatttactgtccaatttaaaactttggaattgctgtgattaaagtgatcaaaatgccaaaatactaaaggaaatcaattgttcacaggtaactacaatttgtattatctacaagtgcctttaaacacaagatataggtgctgtgtagcctgatagtgtgaaatgtttaatgagggagttgtaccacaaacagtactacaatgattctgaagcacagtgtattcagacagatacagtgaaccaagtgcaatatgtaaggatgaaagaagaagagatgacaaagaartccaagtaaatgccttgtctttgcaaatgtttttatattaaatcataaggaaggaactacttgccttaaatgttaatatcaaaagagttttctaacaaggttaataccttagttcttaacattttttttctttatgtgtagtgttttcatgctaccttggtaggaaacttatttacaaaccatattaaaaggctaatttaaatataaataatataaagtgctctgaataaagcagaaatatattacagttcattccacagaaagcatccaaaccacccaaatgaccaaggcatatatagtatttggaggaatcaggggtttggaaggagtagggaggagaatgaaggaaartgcaaccagcatgattatagtgtgttcatttagataaaagtagaaggcacaggagaggtagcaaaggccaggcttttctttggttttcttcaaacataggtgaaaaaaacactgccattcacaagtcaaggaacccagggccagctggaagtgtggagcacacatgctgtggagcacacatgctgtggagattgcagtgtgtctgaggtttgtgtagtagtggaagattttaggtatgtagagcaagttgaaaatggattgagactgcatggtggcataaatgagaaattgcctgtagcatctagtctacttgaaggaagtggagacataaggagagacaaaaacaggtttgtgccataaagtattttttcaaagacaccaagatgtggtaaatgaaaattattagttcacttccctgctgccatgaaactttgccttaagaaggtgctggattccaaggtttgtaaaggcatctcggtaaagactgctttttgaatgcatatgattttgcatcagctagactgagttgattctgaccagacttgatggttttaagtcggaaccgataaattttaaaaaggagaaaaaataatttgacctagtagtataaaacatgaggctttaatggtactttgctatgaaaagaaaacactgtattccttatgcaaaacacatgtatctttcattatttataagtggcctctcttagctcagttactcaattcatacgtaatattttttaaaataattttatatctgtgtaccaccccatatatttcatattactgtttcacatgtacagctttctacttctttgtaagaacaccaaccaaccaaggtttaagtgattaataggcttgagcaccgggtggcagatgttctatgcagtgtggttcaagtttctttgaccgcacttatatgcattgctagtatggaatttaagataccatacacagtctctcatggacctatctctattgtagaattatgacttatgtcttacttggcaaatttttctgaatgtgacctttttttgctgatttgctgggtttgggattaactagcattattttgccacctttatattgtatttataaaaaaaagtactatcaatcaatcatactactttggattgttgtgctggtgtaatgtggatttaacatcaataaatatttgacaaataaaaaaaaa

SEQ ID NO: 305 - protein, 1106 aa, Homosapiens
MSGTSSHESFYDSLSDMQEESKNTDFFPGLSAFLSQEEINKSLDLARRAIADSETEDFDSEKEISQIFSTSPASLCEHPSHKETKLGEHASRRPQDNRSTPVQPLAEKQTKSISSPVSKRKPAMSPLLTRPSYIRSLRKAEKRGAKTPSTNVKPKTPHQRKGGPQSQLCDKAANLIEELTSIFKAAKPRNRSPNGESSSPDSGYLSPKNQPSALLSASASQSPMEDQGEMEREVKSPGARHCYQDNQDLAVPHNRKSHPQPHSALHFPAAPRFIQKLRSQEVAEGSRVYLECRVTGNPTPRVRWFCEGKELHNTPDIQIHCEGGDLHTLIIAEAFEDDTGRYTCLATNPSGSDTTSAEVFIEGASSTDSDSESLAFKSRAGAMPQAQKKTTSVSLTIGSSSPKTGVTTAVIQPLSVPVQQVHSPTSYLCRPDGTTTAYFPPVFTKELQNTAVAEGQVVVLECRVRGAPPLQVQWFRQGSEIQDSPDFRILQKKPRSTAEPEEICTLVIAETFPEDAGIFTCSARNDYGSATSTAQLVVTSANTENCSYESMGESNNDHFQHFPPPPPILETSSLELASKKPSEIQQVNNPELGLSRAALQMQFNAAERETSGVHPSRGVNGLINGKANSNKSLPTPAVLLSPTKEPPPLLAKPKLGFPKKASRTARIASDEEIQGTKDAVIQDLERKLRFKEDLLNNGQPRLTYEERMARRLLGADSATVFNIQEPEEETANQEYKVSSCEQRLISEIEYRLERSPVDESGDEVQYGDVPVENGMAPFFEMKLKHYKIFEGMPVTFTCRVAGNPKPKIYWFKDGKQISPKSDHYTIQRDLDGTCSLHTTASTLDDDGNYTIMAANPQGRISCTGRLMVQAVNQRGRSPRSPSGHPHVRRPRSRSRDSGDENEPIQERFFRPHFLQAPGDLTVQEGKLCRMDCKVSGLPTPDLSWQLDGKPVRPDSAHKMLVRENGVHSLIIEPVTSRDAGIYTCIATNRAGQNSFSLELVVAAKEAHKPPVFIEKLQNTGVADGYPVRLECRVLGVPPPQIFWKKENESLTHSTDRVSMHQDNHGYICLLIQGATKEDAGWYTVSAKNEAGIVSCTARLDVYISRH

SEQ ID NO: 306 - DNA, 3021 bp, Homosapiens
aagagggaggggtctgtgcgcccgcagagtcgccaggcgccctgcgagttgtctccgctgggaggggcgaggctgtcacttgccagggcgcgaggagcctcagcgcggcttggagaacttggccccgcgcagcgtctggtcactcgctctcctctggggactgcagagaagcaggacctcgggccatggattctactgaagaaaggtagccatggaagagaatatggaagagggacagacacaaaaagggtgttttgaatgctgtatcaaatgcctggggggcattccctatgcctctctgattgccaccatcctgctctatgcgggtgttgccctgttctgtggctgcggtcatgaagcgctttctggaactgtcaacattctgcaaacctactttgagatggcaagaactgctggagacacactggatgtttttaccatgattgacatctttaagtatgtgatctacggcatcgcagctgcgttctttgtgtatggcattttgctgatggtggaaggtttcttcacaactggggccatcaaagatctctatggggatttcaaaatcaccacttgtggcagatgtgtgagcgcttggttcattatgctgacatatcttttcatgttggcctggctgggagtcacggctttcacctcactgccagtttacatgtacttcaatctgtggaccatctgccggaacaccacattagtggagggagcaaatctctgcttggaccttcgtcagtttggaattgtgacaattggagaggaaaagaaaatttgtactgtctctgagaatttcttgaggatgtgcgaatctactgagctgaacatgaccttccacttgtttattgtggcacttgctggagctggggcagcagtcattgctatggttcactaccttatggttctgtctgccaactgggcctatgtgaaagacgcctgccggatgcagaagtatgaagacatcaagtcgaaggaagagcaagagcttcatgacatccactctactcgctccaaagagcggctcaatgcatacacataaatgcatcttcctgttctttctaccatttgaatgcattggtgtttaactaagggccatccaaccatccaacctttaaaaaacaaaacgaaagtgcttctcatcaatgatatgtaaggtgacttatgaatcacctgagtacaattctttgttgtttagcacttaaatttcccaatttattaaattgatgtaaatcagatcttttctacaagctcctatccagccttttttttgaaatttctcaaactcatttactagttctgtaaaatcaaagatactaacattgtcaaatgcaaagatttgtttgatttttaaccacttcccatgtgttatacataacaccttttgcattatttcttatgttttgaaaagaaaatagctttttatactttttagttttgatttcggtaactagtttaactacaggtaaccttcaaagggaccattgtacattatgaacaatagatagagattacatcttgatgactcttgaaatatggaaattttgtctgaagatcagtggccatattactgtaggccctggttcatgttttcatcaatctaaggtgcaatttctaaatttgtaagagtaggtttaaaaaaaaaagtgcttcttatctttgttaacattgtacttttccttgatgttcttaaaaggtatttccctcagattactcatgtttatgttgtgagcatgtagaaacagtaatgctaatgcatggctagttgcctttttaagattgtgacaccaggcttaccttttaaagtttagtatatagagacaattttaatggaaataactactgtagactattgaagaatgatctctttgtgatttaagaagtggctggattggaacttttaatatgctaatgtggaaaattaattacctttatgaaggtggtttattacaaataagcacactaacccctcggaagttgttttacctactttaaaagttttaatggattgcacctctgtaaactattcctaaaatgtgtatgatatatttgaaaaggcttccattaatataatagctttgcttgcagccttccaatctatgttggtttacctgtagtgttttataaagtgtggtcagaggcccctatagaatgtattgtttgaaagtgtagtgatatatttgtgtttttatttcaagtaagtcattttaaccgaatgttcattcatattcatttataaaaagtacctgtatcaaaggaattttaacaaagagcaatcagtattattggaccaaatttggtgtttgttttcaccttgacgctcttcttttcattatttctaatgctacaagaatgctgtaaagtgtcttctaaaatgatgtagcctgacaagacatttttttcagtgtataaaactaggtagtattgtgcactgatttgaccattgtgaaatcctttctcagtgtaactgcatttctaataaaaatttattgagtgaaacaatctttgtacaatgactagtcatgcatcatcagtaattttacaagttcttgtagtaggtagggggtactactagggatatctgtggcatgattatgcattccgtagtattatttaattaatttggggttcattttgcttccttttctttatgcttagattatcttactggttcaacatttttctgatatatgcagtattacagatattcagcaaaagtattaatgggcttctttaaattctatattatagtatttcagttccgtgtcttaacagtttgtgataatttctaaaactgtcttttcaacttatgtaatgatgttgacacttttggcttttatttctggtattagagtttgtattttcacagagtgctttgtagcaggcattacaattaatctgttttgtacataaatgtgccaacagcttgatggtggcgtttttgaaatgtagaacagagtgcttgcaaaatgtaataaatacacttgtgtactttgtgtacttattattaaaaaa

SEQ ID NO: 307 - protein, 278 aa, Homosapiens
MEENMEEGQTQKGCFECCIKCLGGIPYASLIATILLYAGVALFCGCGHEALSGTVNILQTYFEMARTAGDTLDVFTMIDIFKYVIYGIAAAFFVYGILLMVEGFFTTGAIKDLYGDFKITTCGRCVSAWFIMLTYLFMLAWLGVTAFTSLPVYMYFNLWTICRNTTLVEGANLCLDLRQFGIVTIGEEKKICTVSENFLRMCESTELNMTFHLFIVALAGAGAAVIAMVHYLMVLSANWAYVKDACRMQKYEDIKSKEEQELHDIHSTRSKERLNAYT

SEQ ID NO: 308 - DNA, 3614 bp, Homosapiens
atctctcaggcttagagctttatactcactcctttgacagccacgcttctatttctttttaaatctcaaaggtgtgggattacaagtcctgtcttagtaataaacttttgcagataaaccctgagatggtataactgcatcctttcttggcaccttaaatcaaattaactaaatacttagtgaggagagaaaaggaaaacacagtttttttgcaacgtatctgactgggtgagaagccactgctgcagcataaagaaccgacgggaatctgggctttcccactctggaatgaaggggggaattacgggttggtggtcggcttcatgttaggaggacacccctccatctgttcacagctcagcctgtttccaatttaaagcccagatttcaatacaaacctcaatttcttttccccattttaaatgcaaagcaagacttgtgaatcatagtgtctctgctcctgggattcagaccaaatttccccccaaaattctcaggctatttgtttgaatacctgcttacagtggtacacaatgggcagctttgagaagaaaaattgataatcttcacggaagagtaatttgaatgaaattacacttgacagcctgtctccaagcaaacaagaggaacgagggagcctgagctaagctctgaggacttgcccaagccactgctgttggagcttcccaggaaaaaaaaaaaaaaaaaaaaaaaaaaaaaaaaaaaaaaaacaccagtttttccaacatctaattgagcttttgattaattccgtgtaccagattctactgaagaaaggtagccatggaagagaatatggaagagggacagacacaaaaagggtgttttgaatgctgtatcaaatgcctggggggcattccctatgcctctctgattgccaccatcctgctctatgcgggtgttgccctgttctgtggctgcggtcatgaagcgctttctggaactgtcaacattctgcaaacctactttgagatggcaagaactgctggagacacactggatgtttttaccatgattgacatctttaagtatgtgatctacggcatcgcagctgcgttctttgtgtatggcattttgctgatggtggaaggtttcttcacaactggggccatcaaagatctctatggggatttcaaaatcaccacttgtggcagatgtgtgagcgcttggttcattatgctgacatatcttttcatgttggcctggctgggagtcacggctttcacctcactgccagtttacatgtacttcaatctgtggaccatctgccggaacaccacattagtggagggagcaaatctctgcttggaccttcgtcagtttggaattgtgacaattggagaggaaaagaaaatttgtactgtctctgagaatttcttgaggatgtgcgaatctactgagctgaacatgaccttccacttgtttattgtggcacttgctggagctggggcagcagtcattgctatggttcactaccttatggttctgtctgccaactgggcctatgtgaaagacgcctgccggatgcagaagtatgaagacatcaagtcgaaggaagagcaagagcttcatgacatccactctactcgctccaaagagcggctcaatgcatacacataaatgcatcttcctgttctttctaccatttgaatgcattggtgtttaactaagggccatccaaccatccaacctttaaaaaacaaaacgaaagtgcttctcatcaatgatatgtaaggtgacttatgaatcacctgagtacaattctttgttgtttagcacttaaatttcccaatttattaaattgatgtaaatcagatcttttctacaagctcctatccagccttttttttgaaatttctcaaactcatttactagttctgtaaaatcaaagatactaacattgtcaaatgcaaagatttgtttgatttttaaccacttcccatgtgttatacataacaccttttgcattatttcttatgttttgaaaagaaaatagctttttatactttttagttttgatttcggtaactagtttaactacaggtaaccttcaaagggaccattgtacattatgaacaatagatagagattacatcttgatgactcttgaaatatggaaattttgtctgaagatcagtggccatattactgtaggccctggttcatgttttcatcaatctaaggtgcaatttctaaatttgtaagagtaggtttaaaaaaaaaagtgcttcttatctttgttaacattgtacttttccttgatgttcttaaaaggtatttccctcagattactcatgtttatgttgtgagcatgtagaaacagtaatgctaatgcatggctagttgcctttttaagattgtgacaccaggcttaccttttaaagtttagtatatagagacaattttaatggaaataactactgtagactattgaagaatgatctctttgtgatttaagaagtggctggattggaacttttaatatgctaatgtggaaaattaattacctttatgaaggtggtttattacaaataagcacactaacccctcggaagttgttttacctactttaaaagttttaatggattgcacctctgtaaactattcctaaaatgtgtatgatatatttgaaaaggcttccattaatataatagctttgcttgcagccttccaatctatgttggtttacctgtagtgttttataaagtgtggtcagaggcccctatagaatgtattgtttgaaagtgtagtgatatatttgtgtttttatttcaagtaagtcattttaaccgaatgttcattcatattcatttataaaaagtacctgtatcaaaggaattttaacaaagagcaatcagtattattggaccaaatttggtgtttgttttcaccttgacgctcttcttttcattatttctaatgctacaagaatgctgtaaagtgtcttctaaaatgatgtagcctgacaagacatttttttcagtgtataaaactaggtagtattgtgcactgatttgaccattgtgaaatcctttctcagtgtaactgcatttctaataaaaatttattgagtgaaacaatctttgtacaatgactagtcatgcatcatcagtaattttacaagttcttgtagtaggtagggggtactactagggatatctgtggcatgattatgcattccgtagtattatttaattaatttggggttcattttgcttccttttctttatgcttagattatcttactggttcaacatttttctgatatatgcagtattacagatattcagcaaaagtattaatgggcttctttaaattctatattatagtatttcagttccgtgtcttaacagtttgtgataatttctaaaactgtcttttcaacttatgtaatgatgttgacacttttggcttttatttctggtattagagtttgtattttcacagagtgctttgtagcaggcattacaattaatctgttttgtacataaatgtgccaacagcttgatggtggcgtttttgaaatgtagaacagagtgcttgcaaaatgtaataaatacacttgtgtactttgtgtacttattattaaaaaa

SEQ ID NO: 309 - protein, 278 aa, Homosapiens; identical to SEQ ID NO: 307

SEQ ID NO: 310 - DNA, 2962 bp, Homosapiens
aagagggaggggtctgtgcgcccgcagagtcgccaggcgccctgcgagttgtctccgctgggaggggcgaggctgtcacttgccagggcgcgaggagcctcagcgcggcttggagaacttggccccgcgcagcgtctggtcactcgctctcctctggggactgcagagaagcaggacctcgggccatggggtgttttgaatgctgtatcaaatgcctggggggcattccctatgcctctctgattgccaccatcctgctctatgcgggtgttgccctgttctgtggctgcggtcatgaagcgctttctggaactgtcaacattctgcaaacctactttgagatggcaagaactgctggagacacactggatgtttttaccatgattgacatctttaagtatgtgatctacggcatcgcagctgcgttctttgtgtatggcattttgctgatggtggaaggtttcttcacaactggggccatcaaagatctctatggggatttcaaaatcaccacttgtggcagatgtgtgagcgcttggttcattatgctgacatatcttttcatgttggcctggctgggagtcacggctttcacctcactgccagtttacatgtacttcaatctgtggaccatctgccggaacaccacattagtggagggagcaaatctctgcttggaccttcgtcagtttggaattgtgacaattggagaggaaaagaaaatttgtactgtctctgagaatttcttgaggatgtgcgaatctactgagctgaacatgaccttccacttgtttattgtggcacttgctggagctggggcagcagtcattgctatggttcactaccttatggttctgtctgccaactgggcctatgtgaaagacgcctgccggatgcagaagtatgaagacatcaagtcgaaggaagagcaagagcttcatgacatccactctactcgctccaaagagcggctcaatgcatacacataaatgcatcttcctgttctttctaccatttgaatgcattggtgtttaactaagggccatccaaccatccaacctttaaaaaacaaaacgaaagtgcttctcatcaatgatatgtaaggtgacttatgaatcacctgagtacaattctttgttgtttagcacttaaatttcccaatttattaaattgatgtaaatcagatcttttctacaagctcctatccagccttttttttgaaatttctcaaactcatttactagttctgtaaaatcaaagatactaacattgtcaaatgcaaagatttgtttgatttttaaccacttcccatgtgttatacataacaccttttgcattatttcttatgttttgaaaagaaaatagctttttatactttttagttttgatttcggtaactagtttaactacaggtaaccttcaaagggaccattgtacattatgaacaatagatagagattacatcttgatgactcttgaaatatggaaattttgtctgaagatcagtggccatattactgtaggccctggttcatgttttcatcaatctaaggtgcaatttctaaatttgtaagagtaggtttaaaaaaaaaagtgcttcttatctttgttaacattgtacttttccttgatgttcttaaaaggtatttccctcagattactcatgtttatgttgtgagcatgtagaaacagtaatgctaatgcatggctagttgcctttttaagattgtgacaccaggcttaccttttaaagtttagtatatagagacaattttaatggaaataactactgtagactattgaagaatgatctctttgtgatttaagaagtggctggattggaacttttaatatgctaatgtggaaaattaattacctttatgaaggtggtttattacaaataagcacactaacccctcggaagttgttttacctactttaaaagttttaatggattgcacctctgtaaactattcctaaaatgtgtatgatatatttgaaaaggcttccattaatataatagctttgcttgcagccttccaatctatgttggtttacctgtagtgttttataaagtgtggtcagaggcccctatagaatgtattgtttgaaagtgtagtgatatatttgtgtttttatttcaagtaagtcattttaaccgaatgttcattcatattcatttataaaaagtacctgtatcaaaggaattttaacaaagagcaatcagtattattggaccaaatttggtgtttgttttcaccttgacgctcttcttttcattatttctaatgctacaagaatgctgtaaagtgtcttctaaaatgatgtagcctgacaagacatttttttcagtgtataaaactaggtagtattgtgcactgatttgaccattgtgaaatcctttctcagtgtaactgcatttctaataaaaatttattgagtgaaacaatctttgtacaatgactagtcatgcatcatcagtaattttacaagttcttgtagtaggtagggggtactactagggatatctgtggcatgattatgcattccgtagtattatttaattaatttggggttcattttgcttccttttctttatgcttagattatcttactggttcaacatttttctgatatatgcagtattacagatattcagcaaaagtattaatgggcttctttaaattctatattatagtatttcagttccgtgtcttaacagtttgtgataatttctaaaactgtcttttcaacttatgtaatgatgttgacacttttggcttttatttctggtattagagtttgtattttcacagagtgctttgtagcaggcattacaattaatctgttttgtacataaatgtgccaacagcttgatggtggcgtttttgaaatgtagaacagagtgcttgcaaaatgtaataaatacacttgtgtactttgtgtacttattattaaaaaa

SEQ ID NO: 311 - protein, 267 aa, Homosapiens
MGCFECCIKCLGGIPYASLIATILLYAGVALFCGCGHEALSGTVNILQTYFEMARTAGDTLDVFTMIDIFKYVIYGIAAAFFVYGILLMVEGFFTTGAIKDLYGDFKITTCGRCVSAWFIMLTYLFMLAWLGVTAFTSLPVYMYFNLWTICRNTTLVEGANLCLDLRQFGIVTIGEEKKICTVSENFLRMCESTELNMTFHLFIVALAGAGAAVIAMVHYLMVLSANWAYVKDACRMQKYEDIKSKEEQELHDIHSTRSKERLNAYT

SEQ ID NO: 312 - DNA, 7378 bp, Homosapiens
gcggggagggtccgcgcgttggtggtgctcgcctcgcagctgcgcccgccggcttcagcaccttccgctgtccgccgctgcagccgcctcctcctccaggtgctgactattctgatgccgagtttccaattgccttgattaaagtagaaacattctatggcttggatgacttacatttcaaattggtttgagcaagatgattggtatgaaggactacaaagagcaaacatgtcccaggtaaggcaagtgggattgctggctgctggatgtcagccatggaacaaggatgtatgtgctgccagtggagacaggtttgcatattgtgcgaccctggctatctatatttatcagttggatcaccgttataatgaattcaaacttcacgcaattatgtctgaacataaaaaaacaatcacagcaatttcttggtgtccacataatcctgatctgtttgcaagtggcagtactgataatttagtgatcatttggaatgttgcagaacaaaaagtcattgctaaactcgacagtacaaaagggatccctgcttctcttagttggtgctggaatgcagaggatgtggtggcatttgtttcccacagaggcccactgttcatttggaccatctcaggaccagatagtggagtgattgtacacaaagatgctcatagcttcttgtctgatatctgtatgttcagatggcatacacaccaaaaggggaaagttgtgtttggtcatattgatggaagtctatcaatttttcatccaggtaataaaaatcagaaacatgttttgagaccagaatctcttgaagggacagatgaagaggatccagttacggccttggaatgggacccactatctactgattatcttctagtggttaatttgcattatggaattcgcctggtagattctgaatcactttcttgcataacaacatttaatcttcccagtgcagcagcttctgtacagtgcttagcctgggttcccagtgctcctgggatgtttataactggagattctcaagtgggtgttttacgcatttggaatgtttcaagaacaacacctattgataatcttaaattaaagaaaacaggatttcactgcttacatgtacttaattctcctccaagaaaaaagttttcagtccaatctccaaccaaaaatcattatacatcctcaacaagcgaagcagttccacccccaactttaacacagaatcaagcattttctcttcctcctggtcatgcagtgtgttgtttcttggatggtggagttggactttatgatatgggagctaagaagtgggattttcttagagacttgggacatgtggaaactatctttgactgcaaattcaaacctgacgatcctaatcttttagcaacagcttcatttgatggcactataaaagtctgggatataaacacattaacagcagtgtacacatccccgggtaatgaaggtgttatttattccctttcttgggctccaggtggtttaaattgtattgctgggggaacttcccgaaatggtgcttttatttggaatgttcaaaagggcaaaattatacaacgatttaatgagcatggaacaaatggaatattctgcattgcctggagtcataaagattctaaaagaatagcaacctgcagcagtgatggtttctgtattattcgaacaattgatggtaaagtgctacacaaatataaacatccagctgcagtgtttggttgtgattggagccaaaacaataaagacatgatagccactggctgtgaagacacaaatgttcgtgtttattatgtagccaccagctcagatcaaccattgaaagtatttagtgggcatacagcaaaagtgtttcatgttaaatggtctcctctgagagagggaattctttgcagtggttctgatgatggtaccgttcgaatctgggattatactcaggatgcttgcatcaatattcttaatggacacactgcacctgtgagaggattaatgtggaatactgagattccatatctgctcatatctggcagctgggactatactataaaagtatgggacactcgagaaggaacttgtgtggatactgtgtatgatcacggtgcagatgtatatggtttaacctgccatcccagtcgccccttcactatggcctcttgctcccgtgactctacagtgagactctggtcattaacagccttagtcactcctgtacaaataaatattctggcagacagatcttgggaagaaattattgggaacactgattatgctatagaaccaggcactcctcctctactgtgtggtaaagtgtcaagagatattagacaggaaatagaaaaactaactgctaattctcaagtgaaaaaactaagatggttctcagaatgtttatctcctccaggtggcagtgacaatttatggaacttggttgctgtgataaaaggacaggatgatagcttacttcctcagaactactgcaaaggaataatgcacttgaaacatctgattaaatttagaacatctgaagctcaagaactaacaacagtcaagatgtctaaatttggtggtggtattggtgtacctgctaaagaggaaagactgaaggaagctgctgaaatccacttgagattaggacaaattcagagatactgtgaacttatggttgaacttggagagtgggacaaagccctgtcaattgcaccaggagtctctgtgaaatactggaagaagttaatgcagaggagagctgaccaattaatccaggaagataaggatgatgtcattccatactgcatagccattggtgatgtgaaaaagctagtccattttttcatgtcaagaggtcagcttaaagaagctctgcttgttgcacaggctgcttgtgaaggaaatatgcagcccttacatgtttccgtgcctaaaggagcttcatattctgatgatatctacaaggaagactttaatgaactcctgcacaaagtcagtaaagaactggcagaatggtattttcaagatggtcgagcagtactagccgcatgttgccatcttgccatagataatattgagcttgctatggcatacctgattcgcggaaatgaactggagttggcagtctgtgtgggcacagtactaggagagtctgcagcaccagcaacccactatgccttagaattactggcgagaaagtgcatgatgatttcagtatgctttccatgtgttggatacagtgtccccttttgttacgttaacaggaatttggcagctgatcttcttctgatgattcctgataatgaactacatttaataaaactctgtgctttctacccaggatgtactgaagagataaatgaccttcatgataagtgtaagctacccacagtggaagaatgtatgcagttagctgagacagcccgtgcagatgacaatatatttgaaactgtaaaatattacttgttaagtcaagaacctgaaaaagcccttcctattggtattagctttgttaaagaatacatcagtagctcagactggactttggataccatataccctgttcttgacctactgagctatattcgtactgaaaaattactcttgcatacgtgtactgaagctcgaaatgagttgctgatattatgtggttacattggtgcattactggctatcagaagacagtaccaaagcattgttccagcactttatgagtacacaagtcagctattaaaacgtcgggaggtgtcagtacctttaaaaattgaatatctttctgaggaattggatgcatggagagcttgcacacagtccaccaacagatcattagaagactctccgtatacacccccttctgattcacaaagaatgatttatgcaactttattaaagagactaaaagaagagtcactgaaaggaattattggaccagattatgtgactggatcaaatcttccaagtcattctgatattcacatttcttgtcttacgggattaaaaatccagggccctgtgtttttccttgaagacgggaaatctgctatctccttgaatgatgctttgatgtgggcaaaggtgaatccattctcacctttagggactggaatacgactcaatccattctgatagaagatttttgtccatgcttgatttttttttttaaagaaaaactttcatgggttagcattaccttaatctttgttgctcaagtgccagaggttgggagaaggattgcaggttgggagaggtgggaaatagcagtgaattttagtcattaacttcaaaatatatatatatatataatttaaaggaaaaataggtgcctcctttataaacagtaatagctacgtttgggaaggaggaaacatttaaattataaaggactgaataatctaaaaagcatataaaagtttcacacagcataaaagataccaaaatatcatatggttgaaatattgaaacatattaaattgtgcaacacctagaatagtgctagacatacagtaagtacttaatggatatttgaatgattgaatatcttgaaatgttgaaatgtaaggtgtgcacagtgatcttcaacttaacaaacacttacgttctcctttataaaatgcatagtaaaccactaacgttagctgttttaataaaagttttcagttataagtttagtaaatattaataaatggatacacattcaaaatacttttaaaaaaaagaaaatgttaccagtttttttatctgaagtttaactgtcccattgtaaaggtgtaagttatataggcttgaaaaaaattggcgggtaaaaatcacaaaatgcagtcgaatatatatatgaaaacttgcattaggtgataaagtgactattttaagagattcagcatgcatggatattagttttgattaatgtgtacaataatttacacagtatactctagtcaatttatgttaactttatttaaaacacaatttatttggccgggcacggtggctcacacctgtaatctcagcactttggcaggccaaggcaggtggatcacctgaggtcaggagttcatgaccagcctggccagcatggtaaaaccctgtctccactaaaaatacaaaaattagccaggcatggtggcgggcacctgtaatcccagttacttgggaagctgaggcaggagaatcccttgaacctgggaggcagaggttccagtgagccaagatcgcaccactgcactccagcctgggcaacaaagagcgaaactctgtctcaaaaaacaaaccaacaaaaaccacaattgatttgatgaaaattagttttaagtaaatgtttgtaaatagatattggttgaatttttggatatattatgttgatttaacttttaaaatgttgtttaaaagtgtgaagctatgaaaagcctgataatgtgactacagatatttcagttggactagaattctgactttgaaacttattaaattaatgcatactggaagtactttgatactcaagttgtttcacaagatttataatatagatggttttgtttgactaaagaataatctcatataactagaatacttgtggcttttattatctttaaacttgttgcatttaaaatatttttaaaaccttcttaacaaaacttcttaaaactggaaaaaatatatattatgtatctatgtatcatatttatcacatgaccacttttgattccttaaaaagacattacaggcttaaattccattttattaaaaaaaaaaaattgcctgtaatcccagcacttcaggaggccgagatgggcagatcttgaggtcggtagatggagaccatcctggccaacatggtgaaaccctgtctctactaaaaatacaaaaattagctgggtgtggtggtgtgtacctgtagtcccagctacccaggaagctaaggcaggagaatcgcttgaatccaggaggcggaggttgcagtgagctgagatcgcactactgcactccagcctgggcgacagagcaagaccaccatctccaaaaattatatatataaaaataattaatattatagaagagaatatacacaactcagagatgcaatggataatataaaaagagtacctgagatgtatttttttaaactcttagagatatctgtaactcaaatttttcttaggtgaggaggattattaactggcacatatgtactaaaaacccctcacttaaaaatggcagtctcaatcctactgtcattctttttattttaaaataaataaataagcctatctttttgtgcttacatacttaaaaggatatcattaagtatataaacaatcattacttctgtatttttaatgaatgcaggaaaataatatttttatgtataaaagatgaagaaaaaattttgcaagtctttaagcacataaatacaacagaatagccacccaatttctgtctgaaatctaaattggatggatttgaccatcattctattatctttgatttctacaatgtctatatcttattacctataactattaatttttcatagaattataaatgtcatttgactatgtcaatctgtatatattgtaccttaatatgaaaaacaaattttttaattcataaaagtatttttattagatttcatatgcatgaaacccaagcaaattatatgaatttattttactatttgaaaatgttcatattaccaataatgtggacaaattactttgcaggtttaaatatgcctctgtaaaggaagagtctcattagacaatgatttttaaagcattggaaaaatattttgcctgtaaaagttagtaactaggtggttcacaaaattacaacatcaaaatagttacatcttgtgaaaatatatgatttttatgtcaatcaagacaaatgaaatatatatgtatgtgtatatatatacatgtatgtatgaaatatatatatgtgcgtgtgtgtgtgtatatatatatatatatatatatatttctatgaaattgtccagatgtgttcaggaacatgattgcattagagcaatgactgtattttgttgtccttataacatttatattatttcagttttaagtcaaaaggtattctgaatataataaaagcctcacaaattatttgtaaaatttagtagttcatatttagtatatcagtaatatagaagacatctttatagtcaactcttaattaatgcttattgtaccaaatctttgagatatttgtacataaatgaaatatgtactttcatgctaaaattatatatcatgactgtgctataatttggcatgtcattatctagatttatatgtatgtacgtatttcaggtccttgaaattttaataaatattacagttaaatcctgaaaaaaaaaaaaaaaaaa

SEQ ID NO: 313 - protein, 1322 aa, Homosapiens
MAWMTYISNWFEQDDWYEGLQRANMSQVRQVGLLAAGCQPWNKDVCAASGDRFAYCATLAIYIYQLDHRYNEFKLHAIMSEHKKTITAISWCPHNPDLFASGSTDNLVIIWNVAEQKVIAKLDSTKGIPASLSWCWNAEDVVAFVSHRGPLFIWTISGPDSGVIVHKDAHSFLSDICMFRWHTHQKGKVVFGHIDGSLSIFHPGNKNQKHVLRPESLEGTDEEDPVTALEWDPLSTDYLLVVNLHYGIRLVDSESLSCITTFNLPSAAASVQCLAWVPSAPGMFITGDSQVGVLRIWNVSRTTPIDNLKLKKTGFHCLHVLNSPPRKKFSVQSPTKNHYTSSTSEAVPPPTLTQNQAFSLPPGHAVCCFLDGGVGLYDMGAKKWDFLRDLGHVETIFDCKFKPDDPNLLATASFDGTIKVWDINTLTAVYTSPGNEGVIYSLSWAPGGLNCIAGGTSRNGAFIWNVQKGKIIQRFNEHGTNGIFCIAWSHKDSKRIATCSSDGFCIIRTIDGKVLHKYKHPAAVFGCDWSQNNKDMIATGCEDTNVRVYYVATSSDQPLKVFSGHTAKVFHVKWSPLREGILCSGSDDGTVRIWDYTQDACINILNGHTAPVRGLMWNTEIPYLLISGSWDYTIKVWDTREGTCVDTVYDHGADVYGLTCHPSRPFTMASCSRDSTVRLWSLTALVTPVQINILADRSWEEIIGNTDYAIEPGTPPLLCGKVSRDIRQEIEKLTANSQVKKLRWFSECLSPPGGSDNLWNLVAVIKGQDDSLLPQNYCKGIMHLKHLIKFRTSEAQELTTVKMSKFGGGIGVPAKEERLKEAAEIHLRLGQIQRYCELMVELGEWDKALSIAPGVSVKYWKKLMQRRADQLIQEDKDDVIPYCIAIGDVKKLVHFFMSRGQLKEALLVAQAACEGNMQPLHVSVPKGASYSDDIYKEDFNELLHKVSKELAEWYFQDGRAVLAACCHLAIDNIELAMAYLIRGNELELAVCVGTVLGESAAPATHYALELLARKCMMISVCFPCVGYSVPFCYVNRNLAADLLLMIPDNELHLIKLCAFYPGCTEEINDLHDKCKLPTVEECMQLAETARADDNIFETVKYYLLSQEPEKALPIGISFVKEYISSSDWTLDTIYPVLDLLSYIRTEKLLLHTCTEARNELLILCGYIGALLAIRRQYQSIVPALYEYTSQLLKRREVSVPLKIEYLSEELDAWRACTQSTNRSLEDSPYTPPSDSQRMIYATLLKRLKEESLKGIIGPDYVTGSNLPSHSDIHISCLTGLKIQGPVFFLEDGKSAISLNDALMWAKVNPFSPLGTGIRLNPF

SEQ ID NO: 314 - DNA, 7255 bp, Homosapiens
gcggggagggtccgcgcgttggtggtgctcgcctcgcagctgcgcccgccggcttcagcaccttccgctgtccgccgctgcagccgcctcctcctccaggcaaacatgtcccaggtaaggcaagtgggattgctggctgctggatgtcagccatggaacaaggatgtatgtgctgccagtggagacaggtttgcatattgtgcgaccctggctatctatatttatcagttggatcaccgttataatgaattcaaacttcacgcaattatgtctgaacataaaaaaacaatcacagcaatttcttggtgtccacataatcctgatctgtttgcaagtggcagtactgataatttagtgatcatttggaatgttgcagaacaaaaagtcattgctaaactcgacagtacaaaagggatccctgcttctcttagttggtgctggaatgcagaggatgtggtggcatttgtttcccacagaggcccactgttcatttggaccatctcaggaccagatagtggagtgattgtacacaaagatgctcatagcttcttgtctgatatctgtatgttcagatggcatacacaccaaaaggggaaagttgtgtttggtcatattgatggaagtctatcaatttttcatccaggtaataaaaatcagaaacatgttttgagaccagaatctcttgaagggacagatgaagaggatccagttacggccttggaatgggacccactatctactgattatcttctagtggttaatttgcattatggaattcgcctggtagattctgaatcactttcttgcataacaacatttaatcttcccagtgcagcagcttctgtacagtgcttagcctgggttcccagtgctcctgggatgtttataactggagattctcaagtgggtgttttacgcatttggaatgtttcaagaacaacacctattgataatcttaaattaaagaaaacaggatttcactgcttacatgtacttaattctcctccaagaaaaaagttttcagtccaatctccaaccaaaaatcattatacatcctcaacaagcgaagcagttccacccccaactttaacacagaatcaagcattttctcttcctcctggtcatgcagtgtgttgtttcttggatggtggagttggactttatgatatgggagctaagaagtgggattttcttagagacttgggacatgtggaaactatctttgactgcaaattcaaacctgacgatcctaatcttttagcaacagcttcatttgatggcactataaaagtctgggatataaacacattaacagcagtgtacacatccccgggtaatgaaggtgttatttattccctttcttgggctccaggtggtttaaattgtattgctgggggaacttcccgaaatggtgcttttatttggaatgttcaaaagggcaaaattatacaacgatttaatgagcatggaacaaatggaatattctgcattgcctggagtcataaagattctaaaagaatagcaacctgcagcagtgatggtttctgtattattcgaacaattgatggtaaagtgctacacaaatataaacatccagctgcagtgtttggttgtgattggagccaaaacaataaagacatgatagccactggctgtgaagacacaaatgttcgtgtttattatgtagccaccagctcagatcaaccattgaaagtatttagtgggcatacagcaaaagtgtttcatgttaaatggtctcctctgagagagggaattctttgcagtggttctgatgatggtaccgttcgaatctgggattatactcaggatgcttgcatcaatattcttaatggacacactgcacctgtgagaggattaatgtggaatactgagattccatatctgctcatatctggcagctgggactatactataaaagtatgggacactcgagaaggaacttgtgtggatactgtgtatgatcacggtgcagatgtatatggtttaacctgccatcccagtcgccccttcactatggcctcttgctcccgtgactctacagtgagactctggtcattaacagccttagtcactcctgtacaaataaatattctggcagacagatcttgggaagaaattattgggaacactgattatgctatagaaccaggcactcctcctctactgtgtggtaaagtgtcaagagatattagacaggaaatagaaaaactaactgctaattctcaagtgaaaaaactaagatggttctcagaatgtttatctcctccaggtggcagtgacaatttatggaacttggttgctgtgataaaaggacaggatgatagcttacttcctcagaactactgcaaaggaataatgcacttgaaacatctgattaaatttagaacatctgaagctcaagaactaacaacagtcaagatgtctaaatttggtggtggtattggtgtacctgctaaagaggaaagactgaaggaagctgctgaaatccacttgagattaggacaaattcagagatactgtgaacttatggttgaacttggagagtgggacaaagccctgtcaattgcaccaggagtctctgtgaaatactggaagaagttaatgcagaggagagctgaccaattaatccaggaagataaggatgatgtcattccatactgcatagccattggtgatgtgaaaaagctagtccattttttcatgtcaagaggtcagcttaaagaagctctgcttgttgcacaggctgcttgtgaaggaaatatgcagcccttacatgtttccgtgcctaaaggagcttcatattctgatgatatctacaaggaagactttaatgaactcctgcacaaagtcagtaaagaactggcagaatggtattttcaagatggtcgagcagtactagccgcatgttgccatcttgccatagataatattgagcttgctatggcatacctgattcgcggaaatgaactggagttggcagtctgtgtgggcacagtactaggagagtctgcagcaccagcaacccactatgccttagaattactggcgagaaagtgcatgatgatttcagtatgctttccatgtgttggatacagtgtccccttttgttacgttaacaggaatttggcagctgatcttcttctgatgattcctgataatgaactacatttaataaaactctgtgctttctacccaggatgtactgaagagataaatgaccttcatgataagtgtaagctacccacagtggaagaatgtatgcagttagctgagacagcccgtgcagatgacaatatatttgaaactgtaaaatattacttgttaagtcaagaacctgaaaaagcccttcctattggtattagctttgttaaagaatacatcagtagctcagactggactttggataccatataccctgttcttgacctactgagctatattcgtactgaaaaattactcttgcatacgtgtactgaagctcgaaatgagttgctgatattatgtggttacattggtgcattactggctatcagaagacagtaccaaagcattgttccagcactttatgagtacacaagtcagctattaaaacgtcgggaggtgtcagtacctttaaaaattgaatatctttctgaggaattggatgcatggagagcttgcacacagtccaccaacagatcattagaagactctccgtatacacccccttctgattcacaaagaatgatttatgcaactttattaaagagactaaaagaagagtcactgaaaggaattattggaccagattatgtgactggatcaaatcttccaagtcattctgatattcacatttcttgtcttacgggattaaaaatccagggccctgtgtttttccttgaagacgggaaatctgctatctccttgaatgatgctttgatgtgggcaaaggtgaatccattctcacctttagggactggaatacgactcaatccattctgatagaagatttttgtccatgcttgatttttttttttaaagaaaaactttcatgggttagcattaccttaatctttgttgctcaagtgccagaggttgggagaaggattgcaggttgggagaggtgggaaatagcagtgaattttagtcattaacttcaaaatatatatatatatataatttaaaggaaaaataggtgcctcctttataaacagtaatagctacgtttgggaaggaggaaacatttaaattataaaggactgaataatctaaaaagcatataaaagtttcacacagcataaaagataccaaaatatcatatggttgaaatattgaaacatattaaattgtgcaacacctagaatagtgctagacatacagtaagtacttaatggatatttgaatgattgaatatcttgaaatgttgaaatgtaaggtgtgcacagtgatcttcaacttaacaaacacttacgttctcctttataaaatgcatagtaaaccactaacgttagctgttttaataaaagttttcagttataagtttagtaaatattaataaatggatacacattcaaaatacttttaaaaaaaagaaaatgttaccagtttttttatctgaagtttaactgtcccattgtaaaggtgtaagttatataggcttgaaaaaaattggcgggtaaaaatcacaaaatgcagtcgaatatatatatgaaaacttgcattaggtgataaagtgactattttaagagattcagcatgcatggatattagttttgattaatgtgtacaataatttacacagtatactctagtcaatttatgttaactttatttaaaacacaatttatttggccgggcacggtggctcacacctgtaatctcagcactttggcaggccaaggcaggtggatcacctgaggtcaggagttcatgaccagcctggccagcatggtaaaaccctgtctccactaaaaatacaaaaattagccaggcatggtggcgggcacctgtaatcccagttacttgggaagctgaggcaggagaatcccttgaacctgggaggcagaggttccagtgagccaagatcgcaccactgcactccagcctgggcaacaaagagcgaaactctgtctcaaaaaacaaaccaacaaaaaccacaattgatttgatgaaaattagttttaagtaaatgtttgtaaatagatattggttgaatttttggatatattatgttgatttaacttttaaaatgttgtttaaaagtgtgaagctatgaaaagcctgataatgtgactacagatatttcagttggactagaattctgactttgaaacttattaaattaatgcatactggaagtactttgatactcaagttgtttcacaagatttataatatagatggttttgtttgactaaagaataatctcatataactagaatacttgtggcttttattatctttaaacttgttgcatttaaaatatttttaaaaccttcttaacaaaacttcttaaaactggaaaaaatatatattatgtatctatgtatcatatttatcacatgaccacttttgattccttaaaaagacattacaggcttaaattccattttattaaaaaaaaaaaattgcctgtaatcccagcacttcaggaggccgagatgggcagatcttgaggtcggtagatggagaccatcctggccaacatggtgaaaccctgtctctactaaaaatacaaaaattagctgggtgtggtggtgtgtacctgtagtcccagctacccaggaagctaaggcaggagaatcgcttgaatccaggaggcggaggttgcagtgagctgagatcgcactactgcactccagcctgggcgacagagcaagaccaccatctccaaaaattatatatataaaaataattaatattatagaagagaatatacacaactcagagatgcaatggataatataaaaagagtacctgagatgtatttttttaaactcttagagatatctgtaactcaaatttttcttaggtgaggaggattattaactggcacatatgtactaaaaacccctcacttaaaaatggcagtctcaatcctactgtcattctttttattttaaaataaataaataagcctatctttttgtgcttacatacttaaaaggatatcattaagtatataaacaatcattacttctgtatttttaatgaatgcaggaaaataatatttttatgtataaaagatgaagaaaaaattttgcaagtctttaagcacataaatacaacagaatagccacccaatttctgtctgaaatctaaattggatggatttgaccatcattctattatctttgatttctacaatgtctatatcttattacctataactattaatttttcatagaattataaatgtcatttgactatgtcaatctgtatatattgtaccttaatatgaaaaacaaattttttaattcataaaagtatttttattagatttcatatgcatgaaacccaagcaaattatatgaatttattttactatttgaaaatgttcatattaccaataatgtggacaaattactttgcaggtttaaatatgcctctgtaaaggaagagtctcattagacaatgatttttaaagcattggaaaaatattttgcctgtaaaagttagtaactaggtggttcacaaaattacaacatcaaaatagttacatcttgtgaaaatatatgatttttatgtcaatcaagacaaatgaaatatatatgtatgtgtatatatatacatgtatgtatgaaatatatatatgtgcgtgtgtgtgtgtatatatatatatatatatatatatttctatgaaattgtccagatgtgttcaggaacatgattgcattagagcaatgactgtattttgttgtccttataacatttatattatttcagttttaagtcaaaaggtattctgaatataataaaagcctcacaaattatttgtaaaatttagtagttcatatttagtatatcagtaatatagaagacatctttatagtcaactcttaattaatgcttattgtaccaaatctttgagatatttgtacataaatgaaatatgtactttcatgctaaaattatatatcatgactgtgctataatttggcatgtcattatctagatttatatgtatgtacgtatttcaggtccttgaaattttaataaatattacagttaaatcctgaaaaaaaaaaaaaaaaaa

SEQ ID NO: 315 - protein, 1298 aa, Homosapiens
MSQVRQVGLLAAGCQPWNKDVCAASGDRFAYCATLAIYIYQLDHRYNEFKLHAIMSEHKKTITAISWCPHNPDLFASGSTDNLVIIWNVAEQKVIAKLDSTKGIPASLSWCWNAEDVVAFVSHRGPLFIWTISGPDSGVIVHKDAHSFLSDICMFRWHTHQKGKVVFGHIDGSLSIFHPGNKNQKHVLRPESLEGTDEEDPVTALEWDPLSTDYLLVVNLHYGIRLVDSESLSCITTFNLPSAAASVQCLAWVPSAPGMFITGDSQVGVLRIWNVSRTTPIDNLKLKKTGFHCLHVLNSPPRKKFSVQSPTKNHYTSSTSEAVPPPTLTQNQAFSLPPGHAVCCFLDGGVGLYDMGAKKWDFLRDLGHVETIFDCKFKPDDPNLLATASFDGTIKVWDINTLTAVYTSPGNEGVIYSLSWAPGGLNCIAGGTSRNGAFIWNVQKGKIIQRFNEHGTNGIFCIAWSHKDSKRIATCSSDGFCIIRTIDGKVLHKYKHPAAVFGCDWSQNNKDMIATGCEDTNVRVYYVATSSDQPLKVFSGHTAKVFHVKWSPLREGILCSGSDDGTVRIWDYTQDACINILNGHTAPVRGLMWNTEIPYLLISGSWDYTIKVWDTREGTCVDTVYDHGADVYGLTCHPSRPFTMASCSRDSTVRLWSLTALVTPVQINILADRSWEEIIGNTDYAIEPGTPPLLCGKVSRDIRQEIEKLTANSQVKKLRWFSECLSPPGGSDNLWNLVAVIKGQDDSLLPQNYCKGIMHLKHLIKFRTSEAQELTTVKMSKFGGGIGVPAKEERLKEAAEIHLRLGQIQRYCELMVELGEWDKALSIAPGVSVKYWKKLMQRRADQLIQEDKDDVIPYCIAIGDVKKLVHFFMSRGQLKEALLVAQAACEGNMQPLHVSVPKGASYSDDIYKEDFNELLHKVSKELAEWYFQDGRAVLAACCHLAIDNIELAMAYLIRGNELELAVCVGTVLGESAAPATHYALELLARKCMMISVCFPCVGYSVPFCYVNRNLAADLLLMIPDNELHLIKLCAFYPGCTEEINDLHDKCKLPTVEECMQLAETARADDNIFETVKYYLLSQEPEKALPIGISFVKEYISSSDWTLDTIYPVLDLLSYIRTEKLLLHTCTEARNELLILCGYIGALLAIRRQYQSIVPALYEYTSQLLKRREVSVPLKIEYLSEELDAWRACTQSTNRSLEDSPYTPPSDSQRMIYATLLKRLKEESLKGIIGPDYVTGSNLPSHSDIHISCLTGLKIQGPVFFLEDGKSAISLNDALMWAKVNPFSPLGTGIRLNPF

SEQ ID NO: 316 - DNA, 1233 bp, Homosapiens
gcgctgaggtctcgccccataagactccgccccgccccacgaggccgcgccgccagcaataaggcccagccccgccttctgctgttgccgcagcaacccagaaagcgtcatggctgccgccggccaggaaaaagggtatttgacacagactgcggcagccctagacaagtcaccgtcactttcgccacagctagcagctcccatccgagggaggcctaagaagtgtctggtctatccgcatgcgccgaagagctcccgcttgtctcgttccgttctgcgttggcttcagggtctggatctcagcttcttccccaggaacatcaacagagatttttcaaatggcttcctaattgcagaaatattctgtatatattacccctgggaacttgaattatcatcctttgaaaacgggacctctttaaaagtcaagttggataactgggcacagttggagaagttcctggcaagaaaaaaatttaaattacctaaagaactaatccatggaacaattcattgtaaagctggagtgcctgaaatattgatagaagaggtttacactttattaacacatcgagaaattaaaagtatccaggatgactttgtgaatttcacggactatagctaccagatgcgtttacccctggtttccaggtctacagtttcgaagtctattaaagataacattaggttatcagaattactaagcaatcccaacatgctgaccaatgaacttaaagcggagttcctcatccttttacatatgttgcaaagaaaattaggcagaaaattgaatccagaatggtttgatgtgaaaccaacagtgggagaagttactctcaatcaccttcctgcccaagcctctgggcgcagatataatttaaaagttaaaagaggaagagttgtccctgttttaccaaatataggtagtggtggcagttcacatagagaaatacatgtgaagcaagctggacaacattcttattactctgctatgaaacctatcagaaacatggacaagaaaccttgaaaagcacctgtcaaatggctttgaagaagtgatgccaccatctctagccataataaagaaacagaatcacctagtattggatgtatttcaataataaatagagtggtgtcttttccataattgtgttaaagaacatttcttttccattcaatttgtttattaaactcctatgccaggcattgttgaaaatacaaaattaaataaat

SEQ ID NO: 317 - protein, 305 aa, Homosapiens
MAAAGQEKGYLTQTAAALDKSPSLSPQLAAPIRGRPKKCLVYPHAPKSSRLSRSVLRWLQGLDLSFFPRNINRDFSNGFLIAEIFCIYYPWELELSSFENGTSLKVKLDNWAQLEKFLARKKFKLPKELIHGTIHCKAGVPEILIEEVYTLLTHREIKSIQDDFVNFTDYSYQMRLPLVSRSTVSKSIKDNIRLSELLSNPNMLTNELKAEFLILLHMLQRKLGRKLNPEWFDVKPTVGEVTLNHLPAQASGRRYNLKVKRGRVVPVLPNIGSGGSSHREIHVKQAGQHSYYSAMKPIRNMDKKP

SEQ ID NO: 318 - DNA, 2929 bp, Homosapiens
agattcttctgcagcaatgtcggtgttagaagaaaatcggccgtttgctcaacaattatccaatgtctactttacaatactttcgctgttctgttttaagctttttgtgaaaatcagccttgccatcctcagtcatttctacatagtgaaaggcaaccgcaaggaagcggcaaggatagcagctgaattttatggagtaacccaaggacaaggttcctgggcagatcgatcaccactacatgaagcagcaagtcaaggtcgccttcttgctctgagaacattattatcacagggttataatgtaaatgcagtaaccttagaccatgtcaccccattgcacgaagcctgccttggagatcacgtggcatgtgccagaactctgctggaagcaggagctaatgtaaatgcaatcacgatagatggcgtgactccgttattcaacgcatgctcccaaggcagtccaagctgtgcagagctgcttctggagtatggtgccaaagcccagctggagtcatgtcttccatccccaacgcatgaggccgccagtaaaggtcaccatgaatgtcttgacatcctgatatcctggggcatagatgttgaccaagaaattcctcatttgggaactcctctctatgtagcttgtatgtcacagcaattccattgcatctggaagcttctttatgctggtgctgacgtacagaaaggcaaatattgggatactccattacatgctgctgctcaacaatccagcacagaaattgtaaacttactgctagaatttggagcagatatcaatgccaaaaatacagagcttctgcgacctatagatgtagctacgtctagcagtatggtggaaaggatattgcttcaacatgaagctaccccaagctctctttaccaactttgccgactctgtatccgaagctacataggaaaaccaagattgcaccttatcccacaactccagctgccaacgttactgaagaatttcttacagtatcgataaaacagtaaagtaattctaaataccttgaaaatcaaaatttctatttcttttgcttaaggaatagttcatataaaaatatgctaaagataggataaaagtgagtgtgagatcacccagggaagcagtaaaatatcaattttcattttaagtgtattagtactattgttttatcatttatgctgtctttggattatagcatatttataatatctattttttgttatttcaatataccctcttgtttattcaggaaaaaataataaagtcactatcttatgttttcttttggattggaaagaaataaagctcctagtaaagttattcatattatatttaaaaaggtctatgttcttcaactaatgggttaactttttaattttggctattgtaattggctaacttgttactgatattgacataaaatatgaatatggcttagcaaagagcaactaatatgttttctgaaaccaggatgatgctcattcaggaaatccactatgttgaatgtccactggtcattagaatgaacacttcataaagataaattgcccccctctcccccacttacccctggcaaaggactcacaagtcacttctcttctccatagtacatggacttgttacagaaaagtgataggatgaaaggtcaatactgccctctcaccctgagatatttagaacattacacaccttctaaggctatgttaagactgcctccttctcaggagtagcccctgatgatctcttatcaaggcggttatatgcatattactccagccttcttccatttcagaaattgtcaatagctagtgatacttggacttaagaaaatgaactatatatctaattaacaaacaggccctggatcatattccggggatcatcacatcagtccaaggatataaaaaaatggaagattaaaaactcaaattgtggagtttttaaagagtgggtgccacttaacacattggagaccttaaaaaatgtatatagagaacttaatcgcactgtttctaattctttttacacaaaacaagggcttagagtatactgtatttgcaagtaatagcaagagagtattgtataaaagaagatattactaagctagtcctctgcaagggtaaatactatgtttattctcttcagctttaactatacttgagtgcaataaaaaacttaataaaattttatgcctgttttgtaattcagggcctattatgattttagaaataagataatcaacgtacaactctttgtaaaacaaaagcaactttgggtgagttttatagatttattaaattttgataaagtaaatattttgaccactattttcaacaacccagggcttattttcttctgacttcttggctaacttccagactatgggaaaataaattatgattgtatgtgacccccagatcactaagcttgcattttggcagaaagaaaaaaaatcagttgtgatttaaaacgtttgttgagattttcaaacatagaaataaagctgtagcatattcactaaacaatgttttatatgaggatagggacctttaaatatgtgttttatagaatatctcacacatttgtaatggataacgtgcattaaaatggagttcttattatagaataacctggttaaacagatattaaagctgcttttgggtaaaacaggtttccaccagtattttccctgagctagaggagaagtcttagattttaagagtaatacaacccatctatcttattagtcttgtgccaataagagaagtaaatatcaaacattaaaatggtcactttacaatttcagtatgtctgtaccttgtatcttagcttgagtatgattgtcttatcaaagtagtgttctaactttaatgtattgtatgtttgttattatattaaagtgtgattattattcattggaat

SEQ ID NO: 319 - protein, 329 aa, Homosapiens
MSVLEENRPFAQQLSNVYFTILSLFCFKLFVKISLAILSHFYIVKGNRKEAARIAAEFYGVTQGQGSWADRSPLHEAASQGRLLALRTLLSQGYNVNAVTLDHVTPLHEACLGDHVACARTLLEAGANVNAITIDGVTPLFNACSQGSPSCAELLLEYGAKAQLESCLPSPTHEAASKGHHECLDILISWGIDVDQEIPHLGTPLYVACMSQQFHCIWKLLYAGADVQKGKYWDTPLHAAAQQSSTEIVNLLLEFGADINAKNTELLRPIDVATSSSMVERILLQHEATPSSLYQLCRLCIRSYIGKPRLHLIPQLQLPTLLKNFLQYR

SEQ ID NO: 320 - DNA, 1269 bp, Homosapiens
atggatgtgctcagccctggtcagggcaacaacaccacatcaccaccggctccctttgagaccggcggcaacactactggtatctccgacgtgaccgtcagctaccaagtgatcacctctctgctgctgggcacgctcatcttctgcgcggtgctgggcaatgcgtgcgtggtggctgccatcgccttggagcgctccctgcagaacgtggccaattatcttattggctctttggcggtcaccgacctcatggtgtcggtgttggtgctgcccatggccgcgctgtatcaggtgctcaacaagtggacactgggccaggtaacctgcgacctgttcatcgccctcgacgtgctgtgctgcacctcatccatcttgcacctgtgcgccatcgcgctggacaggtactgggccatcacggaccccatcgactacgtgaacaagaggacgccccggcgcgccgctgcgctcatctcgctcacttggcttattggcttcctcatctctatcccgcccatgctgggctggcgcaccccggaagaccgctcggaccccgacgcatgcaccattagcaaggatcatggctacactatctattccacctttggagctttctacatcccgctgctgctcatgctggttctctatgggcgcatattccgagctgcgcgcttccgcatccgcaagacggtcaaaaaggtggagaagaccggagcggacacccgccatggagcatctcccgccccgcagcccaagaagagtgtgaatggagagtcggggagcaggaactggaggctgggcgtggagagcaaggctgggggtgctctgtgcgccaatggcgcggtgaggcaaggtgacgatggcgccgccctggaggtgatcgaggtgcaccgagtgggcaactccaaagagcacttgcctctgcccagcgaggctggtcctaccccttgtgcccccgcctctttcgagaggaaaaatgagcgcaacgccgaggcgaagcgcaagatggccctggcccgagagaggaagacagtgaagacgctgggcatcatcatgggcaccttcatcctctgctggctgcccttcttcatcgtggctcttgttctgcccttctgcgagagcagctgccacatgcccaccctgttgggcgccataatcaattggctgggctactccaactctctgcttaaccccgtcatttacgcatacttcaacaaggactttcaaaacgcgtttaagaagatcattaagtgtaagttctgccgccagtga

SEQ ID NO: 321 - protein, 422 aa, Homosapiens
MDVLSPGQGNNTTSPPAPFETGGNTTGISDVTVSYQVITSLLLGTLIFCAVLGNACVVAAIALERSLQNVANYLIGSLAVTDLMVSVLVLPMAALYQVLNKWTLGQVTCDLFIALDVLCCTSSILHLCAIALDRYWAITDPIDYVNKRTPRRAAALISLTWLIGFLISIPPMLGWRTPEDRSDPDACTISKDHGYTIYSTFGAFYIPLLLMLVLYGRIFRAARFRIRKTVKKVEKTGADTRHGASPAPQPKKSVNGESGSRNWRLGVESKAGGALCANGAVRQGDDGAALEVIEVHRVGNSKEHLPLPSEAGPTPCAPASFERKNERNAEAKRKMALARERKTVKTLGIIMGTFILCWLPFFIVALVLPFCESSCHMPTLLGAIINWLGYSNSLLNPVIYAYFNKDFQNAFKKIIKCKFCRQ

SEQ ID NO: 322 - DNA, 1727 bp, Homosapiens
aaccggcatcgccgccgccggagccgcagcgagtcctcagagcctggctgctggcggccgggagcgccgggacggggcgcgaagccggaggctccgggacgtggatacagatgaaaagaagcaaggaattgataactaaaaatcatagtcaagaggaaacaagtattcttcgttgttggaaatgtagaaaatgtatagcaagctctggttgttttatggagtatcttgagaatcaagtgattaaggataaagatgattcagttgatgctcaaaatatttgtcatgtgtggcacatgaatgtagaagcccttccagaatggataagctgcctaatccaaaaagcccagtggacagttggaaaactgaattgtcctttctgtggggcccgtttagggggctttaattttgtcagcactccaaaatgttcctgtggccagcttgcagctgtacatctctccaagagccggactgattatcagccaacacaggcaggcagactaatgagaccatcagtgaaatacttgtcacatcctagagttcagtcaggttgtgacaaggaagctctgctgacaggtggtggctctgaaaacagaaatcacaggcttttaaacatggcccgaaataataatgaccctggaagattaacagaagcactctgcctggaggtgcgaccaacatattttgagatgaagaacgaaaaactgctgtccaaagcatcagaaccaaaataccagctttttgttccccagcttgtgactggcagatgcgctacaagagcttttcatagaaaatcacatagtttggatctgaacatcagtgagaaactgactttattacccactttatatgaaatacatagtaagactactgcctattccagactaaatgaaacacagcctattgacctttcaggcttgcctttacaatctagtaaaaatagctattcctttcagaatccatccagttttgatcctagtatgctgctgcaaagattttcagtggccccccatgagacccagacacaaagaggaggagaatttcagtgtggtctagaagctgcttcagtgtattctgaccatactaatactaacaatctgactttcctgatggacctgccctcagctggcaggagcatgccggaggcctcagaccaggaagagcacctctcccctctggacttcctgcactcagccaatttttcattgggcagcattaatcagaggcttaataagagagaaaggagcaaattgaagaatctaagaaggaaacaacgaaggcgtgaaagatggctacagaagcagggtaaatactcaggagtgggattgctggatcatatggtaagtatatatttacttatatgagaaattgtcaaattgttttccagaatggctgtaccattttgcattccaagcagcaaagacttccattttctgtgcgtccttgaaagcaagcactggtattctcagtgttttaaaattttagtcattcaaatacatagacagttgtatcacatcatgactttaatttgcttttccttaaggatgctgaacatatgtgcttattttacatttgtatatattctttagttaagtgtcttcaaatcttttgggctggtgtggcagcttatgtctgtaatcccagcacttttgagaggccaaggcaggaggattgcttgagttcaggagttcaagaccggcctgggcagcatggcgaagccttatctctac

SEQ ID NO: 323 - protein, 416 aa, Homosapiens
MKRSKELITKNHSQEETSILRCWKCRKCIASSGCFMEYLENQVIKDKDDSVDAQNICHVWHMNVEALPEWISCLIQKAQWTVGKLNCPFCGARLGGFNFVSTPKCSCGQLAAVHLSKSRTDYQPTQAGRLMRPSVKYLSHPRVQSGCDKEALLTGGGSENRNHRLLNMARNNNDPGRLTEALCLEVRPTYFEMKNEKLLSKASEPKYQLFVPQLVTGRCATRAFHRKSHSLDLNISEKLTLLPTLYEIHSKTTAYSRLNETQPIDLSGLPLQSSKNSYSFQNPSSFDPSMLLQRFSVAPHETQTQRGGEFQCGLEAASVYSDHTNTNNLTFLMDLPSAGRSMPEASDQEEHLSPLDFLHSANFSLGSINQRLNKRERSKLKNLRRKQRRRERWLQKQGKYSGVGLLDHMVSIYLLI

SEQ ID NO: 324 - DNA, 3821 bp, Homosapiens
atgagttctgcaccgaatgggcgcaaaaagcgccccagccggtccacccgctcctcgatcttccagatcagcaagcccccgctgcagagcggagattgggagcgcaggggcagcggctccgagagcgcccacaaaacccaacgagccctggacgactgcaagatgcttgtccaagagttcaacacacaagtggccctgtaccgagagctggtcatttctattggggatgtctcggtcagctgcccctcactccgggcggaaatgcacaagacaagaaccaaaggctgtgaaatggcccgtcaggcacaccaaaaattggctgccatctcaggcccggaagatggtgagatccatccagaaatctgtcggctttacatccagctgcagtgctgcttagaaatgtataccacagagatgctaaaatccatatgtctgctggggtctcttcagtttcatcgaaaaggaaaggaacctggcgggggaaccaagagtttggattgcaaaattgaggagagtgctgaaacacctgccctagaagactcctcatcatcccccgtagatagtcagcaacattcctggcaggtttccacagacattgagaacactgaaagagacatgagagaaatgaaaaaccttttaagcaaactcagggaaactatgcctttaccattgaaaaatcaagatgacagcagccttctgaatctaactccctaccccctggtgagaagacggaagagaaggttctttgggctgtgttgtctcatctcaagctaggtggctcctcctggaaacccactgagaacatctgaaaaaaaatcacaaaacccgaggacctccagacagctgaaccacacagttattggtttttgactatgttttctatgcttccttattacttttatctgcctccccctgcccttttaaatgattttacacttgaaagcagctgccgtcaagaaaaaaaagaacagattcaaaaaccaggctgtttttaaaagggaattttaaagctgacattgtgcatgtctgctccaaaccacgccatgacagatgcaagaattatgatttttaaattatttaaaggttttttaaatgtattatacagaggaaaaatatttcacatataatagtatatctatagctcttgctgatctcatgttaaaatttatcgtatatgaaagaagtctttaaacatagaaatctatttaaaactgaaaaactgtgttcaaaaatccaatctatcaatatcattagaaataatattataagcaaacatataccacctcacctattgctttctctgcactcatttacatttagtcttccattctgtcagaatctaagagcttcaacataaaagtatcttaatttataaagcaacaaaaaccacatatgaaaagtactaaaattttgtaaatacacaataatcctaataccttcgtacaaatgcatatgggcaactaatttctttttgatccaatgatgtctttttcagcttcttggagaatgaagtaatccagttaggaaatggtgtagtaacatatacaattgccctcaaatgtaaaatcaaatattattacattttgttctaattgaaatctgaagcatggtgtctgcacatcagcatagtgttaaatcttatagggcatgctggaattagctcagattataaaaatatttaacattttacattgttaataaagttttttagttaagctaagcttgtctcattttagatgactatgcagataagatttttccaacgtgtacttggtgtcttgtcttatgcttagactcttgaaagcaggacacattaagcaatactatattttagaaaggaggaagccacatgctttgtttttctgctcacagctttgttgtgatcttccttcactaaacttgtaacatggtacaaattttgttataccgtctcctgttcttcctttggcccatttcccagacagaatttcccatgggttgagagatcaagtctttgcactttttttcttgttttccatagtctgaaaaaccttcaagtcagacaggaggcaccagtgtccagtacaatagaaggatgagctagatgccgataagtggtttatccaagacacatctttagtcccaaccctgttctttaccaatacttatgtgcacaggcatttatatgtataccaatatttttacctaaaaactaaatatattaaggccttttgctttagtgaagatgaactactgtaataattattgtattaggttgaattatatgaaatttcctatatgtgactgttttgacctacaaaatggcaatttcttatagttcaccctaatatccaatgtggaaattatacttggaattgtcttctagctcttttgattgaaagtgaaagaattaaagggttggaagagaacgttatacaggtctctatttagatcataccagctggtttttggccttattctttgaatctagagttgtgttccaaggaaccagtaattaatgcatggttataggtatacctggcttcaaaaaaaagaagtagccgtggaaagctatatgagaaaatcacaattttctgaatcaaatatttgtaaaacaatttggctatttaaagactcttagggtaaatactccctggaaaagcaagcaatccagacttatctggtctgcaaaccttgatttcagcttaatatcctttcctgaatctaattcattttcacccactaaggtcatttcatttaagatccattgtttttgaaattttgaagtagcccagtttggcagctctcagcacctgcctctgccctctcctatacttcaactatattgaactctagcttcaatctagttcctactaatccatgcaaaagttattaactgataagcccaatcttgttcagcacgttcttctaaatgcctgacctaaataacttctgcttggttaacttgtgttcattctcaccttagcctcagtgtgaaagtaacacttaccttctgtgcaattgtcctttgtacaactgaagactgttaataaattcaggtctcacctccatgtctgaaaaggctatagtagctattcatggagatgggaatttgtctaattacctagccagagtttgcatatttaaggtaatatattcagctaccgtatcttttattcatagtgcctgttttccagcctttgatcagttttgtagttcccgtggataaactccaagatctaaagatcctctttcagtagcatatactaaaattaagtttagtgctcaaaaccctggtaacctacactggcccaaggttacagtaggtaattcaccgtctcacattagacaggccaatgcatcccttaggagctgccccactctcctctcacctaccaaaggattttctcaggtgtggttccaagcgataaagttctactgtctcggcttcctgctggtaattcgctttcagattagcaataacactgagctgatctctagggttaagaagagaacattgaactcattttgtcgcatgtacccacaggcttgaaacagaaaatgatgtaaacttttgtggcatacattcacccattttcccaccatatctttactatcctgtgttgatttttttttcaaattacaaagacaatacatgttctttgtgggaaatctgaaaaatactaccaaatagaaaataaaaatcacctgaattccaccacgaccacattgtttaaaaccacatttctgggttttaaatcagtcagtggctgggcccaaaggcacttttgggtaagataagtgaagaaatgcccacaaggccaaggtgtcacttaaaaaaa

SEQ ID NO: 325 - protein, 257 aa, Homosapiens
MSSAPNGRKKRPSRSTRSSIFQISKPPLQSGDWERRGSGSESAHKTQRALDDCKMLVQEFNTQVALYRELVISIGDVSVSCPSLRAEMHKTRTKGCEMARQAHQKLAAISGPEDGEIHPEICRLYIQLQCCLEMYTTEMLKSICLLGSLQFHRKGKEPGGGTKSLDCKIEESAETPALEDSSSSPVDSQQHSWQVSTDIENTERDMREMKNLLSKLRETMPLPLKNQDDSSLLNLTPYPLVRRRKRRFFGLCCLISS

SEQ ID NO: 326 - DNA, 2337 bp, Homosapiens
atgctagacagctgcaagctgaaaagtgcctgcaatttgccatttatttgtaataagaaaataataaacactgctggaaccagtaatgcagaagtccccttggctgatcccggaatgtaccagctggacattacattaagaaggggtcaaagtttagctgctcgagatcgaggagggacgagtgatccatatgtgaagtttaaaatcggaggaaaagaagtttttagaagtaagataatacacaagaacctcaaccctgtgtgggaagaaaaagcttgtattctggttgatcatcttagggagccattgtatataaaggtatttgactatgattttggactacaggatgactttatgggctcagcctttctggatctgacacaattggagttaaacaggcccacagatgtgacccttactctgaaagatcctcattatcctgaccatgatcttggaatcattttgctctcagtcatccttacccctaaagaaggagagtccagggatgtgacaatgctaatgaggaagagttggaaaagatcaagtaaggaactttcagaaaatgaagtggttggatcttatttctctgtgaagtctctcttttggaggacgtgcggcaggccagctcttcctgtcctgggcttctgcagagcagagcttcagaatccttattgcaaaaatgtacaatttcagacccaaagtttacgcctatcagacctacacagaaaatcgcatctttggagaggaatagtcagcatcaccttgattgaagggagagacctcaaggccatggattccaacgggttgagcgatccctacgtgaagttccggcttgggcatcagaagtacaagagcaagattatgccaaaaacgttgaatcctcagtggagggaacaatttgattttcacctttatgaagaaagaggaggagtcattgatatcactgcatgggacaaagatgctgggaaaagggatgatttcattggcaggtgccaggtcgacctgtcagccctcagtagggaacagacgcacaagctggagttgcagctggaagagggtgagggacacctggtgctgctggtcactctgacagcatcagccacagtcagcatctctgacctgtctgtcaactccctggaggaccagaaggaacgagaggagatattaaagagatatagcccattgaggatatttcacaacctgaaagatgtgggatttctccaggtgaaagtcatcagagcggaagggttaatggctgccgacgtcactggaaaaagtgacccattttgtgtggtagaactgaacaacgatagactgctaacacatactgtctacaaaaatctcaatcctgagtggaataaagtcttcacgttcaacattaaagatatccattcagttcttgaagtgacagtttatgatgaagatcgggatcgaagtgctgactttctgggcaaagttgctataccattgctgtctattcaaaatggtgaacagaaagcctacgtcttgaaaaacaagcagctgacagggccaacaaagggggtcatctatcttgaaatagatgtgatttttaatgctgtgaaagccagcttacgaacattaatacccaaagaacagaagtacattgaagaggaaaacagactctctaaacagctgctactaagaaactttatcagaatgaaacgttgtgtcatggtgctggtaaatgctgcatactacgttaatagttgctttgattgggattcacccccaaggagtctcgctgcttttgtgctctttctctttgttgtctggaactttgagctctacatgataccactggttttgttgttactattgacatggaactacttcttgataatatcagggaaagataacaggcaacgtgatacagtagtggaggacatgctagaggacgaggaagaagaagatgacaaagatgacaaggacagtgaaaaaaagggatttataaataaaatctatgccatccaggaggtatgtgtcagtgtccagaacatcctagatgaagtggcttcctttggcgaaaggattaagaatactttcaactggactgtcccattcttaagctggctggccattgtagccctctgtgtgttcacagccatcctgtactgcattccgctgagatacattgtccttgtctggggcatcaataaatttacaaaaaagcttcggagtccatatgcaattgataacaatgaactacttgacttcctttccagagtcccttcagatgtacaagtggtgcaataccaagaactgaaaccagatccttctcatagcccatataaaagaaagaaaaacaatcttggctag

SEQ ID NO: 327 - protein, 778 aa, Homosapiens
MLDSCKLKSACNLPFICNKKIINTAGTSNAEVPLADPGMYQLDITLRRGQSLAARDRGGTSDPYVKFKIGGKEVFRSKIIHKNLNPVWEEKACILVDHLREPLYIKVFDYDFGLQDDFMGSAFLDLTQLELNRPTDVTLTLKDPHYPDHDLGIILLSVILTPKEGESRDVTMLMRKSWKRSSKELSENEVVGSYFSVKSLFWRTCGRPALPVLGFCRAELQNPYCKNVQFQTQSLRLSDLHRKSHLWRGIVSITLIEGRDLKAMDSNGLSDPYVKFRLGHQKYKSKIMPKTLNPQWREQFDFHLYEERGGVIDITAWDKDAGKRDDFIGRCQVDLSALSREQTHKLELQLEEGEGHLVLLVTLTASATVSISDLSVNSLEDQKEREEILKRYSPLRIFHNLKDVGFLQVKVIRAEGLMAADVTGKSDPFCVVELNNDRLLTHTVYKNLNPEWNKVFTFNIKDIHSVLEVTVYDEDRDRSADFLGKVAIPLLSIQNGEQKAYVLKNKQLTGPTKGVIYLEIDVIFNAVKASLRTLIPKEQKYIEEENRLSKQLLLRNFIRMKRCVMVLVNAAYYVNSCFDWDSPPRSLAAFVLFLFVVWNFELYMIPLVLLLLLTWNYFLIISGKDNRQRDTVVEDMLEDEEEEDDKDDKDSEKKGFINKIYAIQEVCVSVQNILDEVASFGERIKNTFNWTVPFLSWLAIVALCVFTAILYCIPLRYIVLVWGINKFTKKLRSPYAIDNNELLDFLSRVPSDVQVVQYQELKPDPSHSPYKRKKNNLG

SEQ ID NO: 328 - DNA, 3000 bp, Homosapiens
atggagccccgggctgccgcggcgggcgagccagagccgccggcggcgtcctcctccttccaggcccggctctggaagaacctgcagctgggggtgggcaggagcaagggcggcgggggcgggcgcgctgggggtccagagcgccgcactgcggacaccccgtcgccctccccgccacccccggtgggcacagggaatgcaccggccagggggagtggtgcaggcagcaggtggagcggcttcaagaagcggaagcaagtgctggaccgagtcttctcctcctcgcagcccaacctgtgctgctcgtcgccggagcccctggagcccggcggcgccggcagagccgagcaggggtccacgctacgccgccggatccgcgagcatttgctccccgccgtaaaggggcccgcggcggcctcgggagcagcgggagggacgcctcctggcggacgctcccccgactcagctccttcctcttcctccgcctcatcctccctgtcctcctcgccccagcctcccccgaggggggaccgcgcccgagatgagggtgcacggcgtcagggccccggggcgcacttgtgccgccagaagagctcctctctgccgggcaccgcctgcctggagcagctgctggagccgccggctcctcccgcagagccggcgcggagtcccgcggagtctcgggccccggagacgggcgaggagcacggcagcagccagaaaataataaacactgctggaaccagtaatgcagaagtccccttggctgatcccggaatgtaccagctggacattacattaagaaggggtcaaagtttagctgctcgagatcgaggagggacgagtgatccatatgtgaagtttaaaatcggaggaaaagaagtttttagaagtaagataatacacaagaacctcaaccctgtgtgggaagaaaaagcttgtattctggttgatcatcttagggagccattgtatataaaggtatttgactatgattttggactacaggatgactttatgggctcagcctttctggatctgacacaattggagttaaacaggcccacagatgtgacccttactctgaaagatcctcattatcctgaccatgatcttggaatcattttgctctcagtcatccttacccctaaagaaggagagtccagggatgtgacaatgctaatgaggaagagttggaaaagatcaagtaaggaactttcagaaaatgaagtggttggatcttatttctctgtgaagtctctcttttggaggacgtgcggcaggccagctcttcctgtcctgggcttctgcagagcagagcttcagaatccttattgcaaaaatgtacaatttcagacccaaagtttacgcctatcagacctacacagaaaatcgcatctttggagaggaatagtcagcatcaccttgattgaagggagagacctcaaggccatggattccaacgggttgagcgatccctacgtgaagttccggcttgggcatcagaagtacaagagcaagattatgccaaaaacgttgaatcctcagtggagggaacaatttgattttcacctttatgaagaaagaggaggagtcattgatatcactgcatgggacaaagatgctgggaaaagggatgatttcattggcaggtgccaggtcgacctgtcagccctcagtagggaacagacgcacaagctggagttgcagctggaagagggtgagggacacctggtgctgctggtcactctgacagcatcagccacagtcagcatctctgacctgtctgtcaactccctggaggaccagaaggaacgagaggagatattaaagagatatagcccattgaggatatttcacaacctgaaagatgtgggatttctccaggtgaaagtcatcagagcggaagggttaatggctgccgacgtcactggaaaaagtgacccattttgtgtggtagaactgaacaacgatagactgctaacacatactgtctacaaaaatctcaatcctgagtggaataaagtcttcacgttcaacattaaagatatccattcagttcttgaagtgacagtttatgatgaagatcgggatcgaagtgctgactttctgggcaaagttgctataccattgctgtctattcaaaatggtgaacagaaagcctacgtcttgaaaaacaagcagctgacagggccaacaaagggggtcatctatcttgaaatagatgtgatttttaatgctgtgaaagccagcttacgaacattaatacccaaagaacagaagtacattgaagaggaaaacagactctctaaacagctgctactaagaaactttatcagaatgaaacgttgtgtcatggtgctggtaaatgctgcatactacgttaatagttgctttgattgggattcacccccaaggagtctcgctgcttttgtgctctttctctttgttgtctggaactttgagctctacatgataccactggttttgttgttactattgacatggaactacttcttgataatatcagggaaagataacaggcaacgtgatacagtagtggaggacatgctagaggacgaggaagaagaagatgacaaagatgacaaggacagtgaaaaaaagggatttataaataaaatctatgccatccaggaggtatgtgtcagtgtccagaacatcctagatgaagtggcttcctttggcgaaaggattaagaatactttcaactggactgtcccattcttaagctggctggccattgtagccctctgtgtgttcacagccatcctgtactgcattccgctgagatacattgtccttgtctggggcatcaataaatttacaaaaaagcttcggagtccatatgcaattgataacaatgaactacttgacttcctttccagagtcccttcagatgtacaagtggtgcaataccaagaactgaaaccagatccttctcatagcccatataaaagaaagaaaaacaatcttggctag

SEQ ID NO: 329 - protein, 999 aa, Homosapiens
MEPRAAAAGEPEPPAASSSFQARLWKNLQLGVGRSKGGGGGRAGGPERRTADTPSPSPPPPVGTGNAPARGSGAGSRWSGFKKRKQVLDRVFSSSQPNLCCSSPEPLEPGGAGRAEQGSTLRRRIREHLLPAVKGPAAASGAAGGTPPGGRSPDSAPSSSSASSSLSSSPQPPPRGDRARDEGARRQGPGAHLCRQKSSSLPGTACLEQLLEPPAPPAEPARSPAESRAPETGEEHGSSQKIINTAGTSNAEVPLADPGMYQLDITLRRGQSLAARDRGGTSDPYVKFKIGGKEVFRSKIIHKNLNPVWEEKACILVDHLREPLYIKVFDYDFGLQDDFMGSAFLDLTQLELNRPTDVTLTLKDPHYPDHDLGIILLSVILTPKEGESRDVTMLMRKSWKRSSKELSENEVVGSYFSVKSLFWRTCGRPALPVLGFCRAELQNPYCKNVQFQTQSLRLSDLHRKSHLWRGIVSITLIEGRDLKAMDSNGLSDPYVKFRLGHQKYKSKIMPKTLNPQWREQFDFHLYEERGGVIDITAWDKDAGKRDDFIGRCQVDLSALSREQTHKLELQLEEGEGHLVLLVTLTASATVSISDLSVNSLEDQKEREEILKRYSPLRIFHNLKDVGFLQVKVIRAEGLMAADVTGKSDPFCVVELNNDRLLTHTVYKNLNPEWNKVFTFNIKDIHSVLEVTVYDEDRDRSADFLGKVAIPLLSIQNGEQKAYVLKNKQLTGPTKGVIYLEIDVIFNAVKASLRTLIPKEQKYIEEENRLSKQLLLRNFIRMKRCVMVLVNAAYYVNSCFDWDSPPRSLAAFVLFLFVVWNFELYMIPLVLLLLLTWNYFLIISGKDNRQRDTVVEDMLEDEEEEDDKDDKDSEKKGFINKIYAIQEVCVSVQNILDEVASFGERIKNTFNWTVPFLSWLAIVALCVFTAILYCIPLRYIVLVWGINKFTKKLRSPYAIDNNELLDFLSRVPSDVQVVQYQELKPDPSHSPYKRKKNNLG

SEQ ID NO: 330 - DNA, 1645 bp, Homosapiens
gtcacccttgggaagaggccccagaaacaggaagaccttagttaggatgcaattacaattccttggtacattggcttcctcagaaaaaagaaaaaaatcacagagattgtttttcaaaaatatcaaatctacaaaaaataaagctggaaaagcaagcatcatgagttcagatacaaatgtaaacaaaagtgcctctccaactgcgactgcagaggaacagccagttgaacctgatggcccccttcctggctcagacaataaccaagaaaagaaagtaagattatctccagccaaaatgtcaaccaagaattctacagatctagttgaatatgttgacaagagtcatgcttttctccccatcattccaaacacccagagaggtcagctagaagacagactgaacaaccaggcgcgtaccatagctttccttcttgaacaagccttccgcatcaaggaggacatctctgcttgcctgcaggggacccatggctttcgaaaagaggaatcgctcgccaggaagttactggaaagccacatccagaccatcaccagcatcgtcaaaaaactcagccaaaatattgagattttagaagaccaaataagagctcgagatcaggcggccacaggaactaactttgcagtacacgagataaacatcaaacacctacaaggagttggagatcttcgaggaagagtagccagatgtgattcaagcattgtgaagctttctggagacattcacttattcaggcaagagcaccggcaaattgagaaagccattcaagaattcgtgcccgccctggaaactctttccaagaacttggacatgaaggtgatgcagctcttaggaaagattgaaactgccagttctgagcaaacctcgaatttaaagatggtccagggggattatcgccacgaaatgaaccttttggaattcaaatttcattcactttcaagtaatctgtacgaagaagttgagaataataaaaaatggacagaaaaccaatttctcaaatatagaaaagaccacctgggccatataaatgaatgtctgaaggtcctacaggagaaactggaaaagtctgaaaataaaatggaagaaaaactgctgcagctttcaagcaaagtagagaatttcattaacacacagaaacaggaaacacaactaagtaaagtaaagcatatggaaaataaattgtccaaaaagatggaacaaatggaaaagcagatctggggtgaattagagacaatgcagaatgaatatcaatcaggatttaaatcaattcatgactctctcagctccctccaacaaatacagaaaacaaagatggatttagagaaatataaagtacagaaagacctaaagaaattacagcgcaagatagtggaactccaggaagtataaaccttttcagtcatcttctttttcatcagccaatggagtgatttgttggaaaaagttctgaagaagaaagttactatctctgggatgtttactgcttctaatgtctccttttaaggagacgaatgtaccagaaaaataataaagcaaagaagcttaaaaaaaaaaaaaaaaaaaaaaaaaaaaaaaaaaaaaaaaaaaaaaaaaaaaaaaaaaaaaaaaaaaaaaaaaaaaaaaaaaaaa

SEQ ID NO: 331 - protein, 414 aa, Homosapiens
MSSDTNVNKSASPTATAEEQPVEPDGPLPGSDNNQEKKVRLSPAKMSTKNSTDLVEYVDKSHAFLPIIPNTQRGQLEDRLNNQARTIAFLLEQAFRIKEDISACLQGTHGFRKEESLARKLLESHIQTITSIVKKLSQNIEILEDQIRARDQAATGTNFAVHEINIKHLQGVGDLRGRVARCDSSIVKLSGDIHLFRQEHRQIEKAIQEFVPALETLSKNLDMKVMQLLGKIETASSEQTSNLKMVQGDYRHEMNLLEFKFHSLSSNLYEEVENNKKWTENQFLKYRKDHLGHINECLKVLQEKLEKSENKMEEKLLQLSSKVENFINTQKQETQLSKVKHMENKLSKKMEQMEKQIWGELETMQNEYQSGFKSIHDSLSSLQQIQKTKMDLEKYKVQKDLKKLQRKIVELQEV

SEQ ID NO: 332 - DNA, 5167 bp, Homosapiens
cattgcagcctcggcgtttgtagaagaggagcatctgctccagatggaaaatgggtaaggaacaatcaaattcaattcgggaagaatatagaggtggtaataattggtaaaagtctgcagggttttttttaaccaaaggaaactggtttgagaaaattgtgaaatcagcattgaaatttgttacctactccaatcaagatttgcaaactacaaaaaaatcattctgaagctttcacctataaatatataccaagataatttcagataagaatgtccagcaaggaagtgaagactgctctaaaaagtgctagagatgcaatcagaaacaaagaatacaaagaagctttgaaacactgtaagacagtgttaaagcaagagaaaaataactataatgcctgggtttttattggcgttgctgcagctgaactagaacaacctgatcaggcccagagtgcctataaaaaagctgctgaattagagccagaccaattactagcttggcaggggttagcaaacttgtatgagaaatataatcacataaatgctaaggatgacttgcctggtgtttaccaaaagctcctggatctttatgagagtgttgacaagcagaagtggtgtgatgtctgcaagaaacttgtggatctatattaccaagaaaagaaacacctagaggtggctcgaacatggcacaagttgataaaaacacggcaggaacaaggtgcagaaaatgaagagcttcatcaactatggagaaaattgactcagttcctggctgaaagtacagaggaccagaataatgaaactcagcaattgctttttactgcttttgagaatgcactgggattatcagataagattcctagtgaagatcaccaagtactttataggcatttcattcagagtttatccaaatttcctcatgagtctgctagattgaagaaggcctgtgaaggaatgataaacatctatcctactgtacagtatccattagaagtgctttgtttgcatttaattgaatcaggaaatcttactgatgaggggcagcagtattgttgtagattagtggaaatggattcaaaaagtggtccaggcctcattggcttaggcattaaagcattacaagacaaaaagtatgaagatgctgttaggaacctaacagaagggttaaaggaaagccctgtctgcacaagtggatggtatcatctggcagaagcccaagtcaaaatgcatagacctaaagaagctgttctttcatgcagtcaagctctgaagatcgtagataatcttggtgcgtctggtaacagtctttatcagaggaatctttgtcttcatttgaaagcagaggctttgattaaactctcagattatgactcttcagaggaagcaattcgtacgcttgatcagatttctgatgcagataatatcccaggacttttggttctcaaaagcttggcctatcggaacaaaggttcatttgatgaagctgcaaagattatggaagaccttctctcttcttaccctgacctagctgaagttcatgcccttgaggctttgattcatttcaccaaaaaggactatctacaagcagaaaaatgttttcagagagctcttgagaaagataccgaagttgcagaatatcattaccaacttggattaacatactggttcatgggtgaagagacaagaaaagataaaacaaaggctcttacccactttctgaaggctgcaagactggatacatatatgggcaaagttttctgctatttaggtcattattatagagacgtagtgggagataaaaacagagctcgtggatgttataggaaagcctttgaattagatgacactgatgctgaatctggagctgcagcagttgacctaagtgtggagcttgaagatatggaaatggctttagctatcctaacaacagtaactcaaaaggcaagtgctggaacggcaaaatgggcctggcttaggcgaggactatactatttgaaagctggtcagcattctcaagcagtggctgatttacaggcagcattaagagcagacccaaaggacttcaattgttgggaatcgttaggagaagcatacttaagcagaggaggctacacaacagccttgaagtccttcacaaaagccagtgagctgaacccagaatccatatacagtgtgtttaaggttgcagcaatacagcaaatcctaggcaaatataaggaggctgtagctcaataccagatgatcattaaaaagaaagaagattatgtgcctgctttaaaaggtttgggtgaatgccatcttatgatggcaaaagcagctctagttgattatcttgatggaaaagccgtagactacatagaaaaagcactggaatattttacttgtgctctacagcatcgagctgatgtgtcctgcctctggaagctagctggggatgcttgtacctgtctgtatgctgtcgcaccatctaaagtgaatgttcatgttttaggagtccttctaggtcagaaagaaggaaaacaagtattaaagaaaaatgagctcctccaccttggaggaaggtgttatggtcgtgcattaaaactgatgtctacatctaatacatggtgtgaccttggaattaattattatcgccaagcacaacatctagcagaaacaggcagcaacatgaatgatcttaaggagttgctggagaaatctttacattgtctgaaaaaagcagtgagactcgacagtaataatcacttatactggaatgctcttggtgtggttgcatgttacagtggtattggaaattatgcccttgctcagcactgtttcatcaaatcaatccagtcagaacaaattaatgctgttgcatggaccaacttgggagtgttatacctcacaaatgaaaacattgagcaagctcatgaggctttcaaaatggctcaatcccttgatccatcttatttaatgtgctggattggacaagctcttattgctgaggcagttggaagttatgacaccatggatctcttcaggcacactacagaactaaatatgcatactgaaggagcattaggttatgcgtattgggtctgcacaacattgcaagataaaagcaacagagaaacagagctgtaccagtacaacatcctccagatgaatgctattccagcagcacaagttattttgaataaatatgtagaaagaattcagaattatgccccagctttcacaatgttgggttacttaaacgaacatctacaactgaaaaaggaagcagcaaatgcataccaaagggcaattttgttgttacagactgcagaagaccaagatacttacaatgttgcaataagaaattacggcagattgttatgttccactggtgaatatgataaagctatccaggcttttaagtcaacaccccttgaagtgttagaagacatcataggttttgcattggctttattcatgaaggggctttataaagagagcagcaaagcctatgagagagccttgtctattgttgaatcggagcaagacaaagcccatatcttgacagctctggcaataactgaatataaacaaggaaaaacggatgtagccaagacattgctatttaaatgctctatcttaaaggaaccaaccacagaaagccttcaagccctgtgtgctctagggttggcaatgcaggatgctacactgtcaaaagcagcacttaatgagttactgaagcacatcaaacacaaagacagtaattatcagaggtgccttcttacatcagcgatttatgcactccaaggccgcagtgtggctgtgcaaaaacaaatatctaaagctgttcacagcaaccctggtgaccctgctctttggtctctgttgtctcgagttgttgcacagtatgctcaacgaaatgcaaagggaggtgttgtagcaggaaatgtggctcatattctggactcaaatcatggaaagaaggcattactgtacactgcggtaaatcagttggctatgggaagcagttcagcagaagatgaaaaaaatactgcactaaagaccattcagaaggcagctctcctttctccaggtgatcctgctatctgggctgggctaatggcagcctgtcacgctgatgataaactggccttagtgaacaacactcagccaaagaggatagatttatacttggcactgttatctgctgtttctgcttcaattaaagacgaaaaattctttgaaaattacaaccagtcccttgaaaagtggtctctctcacaagctgtcactggtctaatagacacaggaagaatatctgaagctgaaactctctgcacaaagaatttaaaaagtaaccctgatcagccagccgttatcttacttttgagacaagttcagtgtaaaccactcctggagtcacaaaagccactcccagatgctgtacttgaagaactacaaaaaacagtcatgtccaactcaacctctgttccagcttggcagtggctggcacatgtgtatcaatcccaaggaatgatgagagctgcagagatgtgttacagaaagagtctacaattggcatcccaacggggcagttggagtgggaagctctcaagtctgttgagactagcactacttgcattaaaagtctgtatggctaacatttccaatgatcactggccatctttggttcaagaggctacaactgaggccttgaagctttgcttttgtccactggctgttcttttacaagctttgttacaattcaaacgcaaaatgggggcaagagagacacggcgtcttttggaaagagtggtatatcagcctgggtatcccaaatctattgcatcaactgcacgttggtacctactgagacacttatatgccaaagatgactatgagcttattgacgtgctggtaaacaatgccaaaactcatggagatacaagagcattggaactgaatcagagattgtcctcacaataacattggattattttatagtaaggaagcaaagaaaaagctgtaagaatgaagcaatgaatcaagacttctacccaaagcaacatttttttaaactatatttattccttttctaaaggaatctagagaagttgaagtttttaagttaggaatgcaattttctgttaactccaaacctgattttaatctgaaaaaaaaaaaaaaa

SEQ ID NO: 333 - protein, 1564 aa, Homosapiens
MSSKEVKTALKSARDAIRNKEYKEALKHCKTVLKQEKNNYNAWVFIGVAAAELEQPDQAQSAYKKAAELEPDQLLAWQGLANLYEKYNHINAKDDLPGVYQKLLDLYESVDKQKWCDVCKKLVDLYYQEKKHLEVARTWHKLIKTRQEQGAENEELHQLWRKLTQFLAESTEDQNNETQQLLFTAFENALGLSDKIPSEDHQVLYRHFIQSLSKFPHESARLKKACEGMINIYPTVQYPLEVLCLHLIESGNLTDEGQQYCCRLVEMDSKSGPGLIGLGIKALQDKKYEDAVRNLTEGLKESPVCTSGWYHLAEAQVKMHRPKEAVLSCSQALKIVDNLGASGNSLYQRNLCLHLKAEALIKLSDYDSSEEAIRTLDQISDADNIPGLLVLKSLAYRNKGSFDEAAKIMEDLLSSYPDLAEVHALEALIHFTKKDYLQAEKCFQRALEKDTEVAEYHYQLGLTYWFMGEETRKDKTKALTHFLKAARLDTYMGKVFCYLGHYYRDVVGDKNRARGCYRKAFELDDTDAESGAAAVDLSVELEDMEMALAILTTVTQKASAGTAKWAWLRRGLYYLKAGQHSQAVADLQAALRADPKDFNCWESLGEAYLSRGGYTTALKSFTKASELNPESIYSVFKVAAIQQILGKYKEAVAQYQMIIKKKEDYVPALKGLGECHLMMAKAALVDYLDGKAVDYIEKALEYFTCALQHRADVSCLWKLAGDACTCLYAVAPSKVNVHVLGVLLGQKEGKQVLKKNELLHLGGRCYGRALKLMSTSNTWCDLGINYYRQAQHLAETGSNMNDLKELLEKSLHCLKKAVRLDSNNHLYWNALGVVACYSGIGNYALAQHCFIKSIQSEQINAVAWTNLGVLYLTNENIEQAHEAFKMAQSLDPSYLMCWIGQALIAEAVGSYDTMDLFRHTTELNMHTEGALGYAYWVCTTLQDKSNRETELYQYNILQMNAIPAAQVILNKYVERIQNYAPAFTMLGYLNEHLQLKKEAANAYQRAILLLQTAEDQDTYNVAIRNYGRLLCSTGEYDKAIQAFKSTPLEVLEDIIGFALALFMKGLYKESSKAYERALSIVESEQDKAHILTALAITEYKQGKTDVAKTLLFKCSILKEPTTESLQALCALGLAMQDATLSKAALNELLKHIKHKDSNYQRCLLTSAIYALQGRSVAVQKQISKAVHSNPGDPALWSLLSRVVAQYAQRNAKGGVVAGNVAHILDSNHGKKALLYTAVNQLAMGSSSAEDEKNTALKTIQKAALLSPGDPAIWAGLMAACHADDKLALVNNTQPKRIDLYLALLSAVSASIKDEKFFENYNQSLEKWSLSQAVTGLIDTGRISEAETLCTKNLKSNPDQPAVILLLRQVQCKPLLESQKPLPDAVLEELQKTVMSNSTSVPAWQWLAHVYQSQGMMRAAEMCYRKSLQLASQRGSWSGKLSSLLRLALLALKVCMANISNDHWPSLVQEATTEALKLCFCPLAVLLQALLQFKRKMGARETRRLLERVVYQPGYPKSIASTARWYLLRHLYAKDDYELIDVLVNNAKTHGDTRALELNQRLSSQ

SEQ ID NO: 334 - DNA, 2476 bp, Homosapiens
aagcaaccaaactgcaagctttgggagttgttcgctgtccctgccctgctctgctagggagagaacgccagagggaggcggctggcccggcggcaggctctcagaaccgctaccggcgatgctactgctgtgggtgtcggtggtcgcagccttggcgctggcggtactggcccccggagcaggggagcagaggcggagagcagccaaagcgcccaatgtggtgctggtcgtgagcgactccttcgatggaaggttaacatttcatccaggaagtcaggtagtgaaacttccttttatcaactttatgaagacacgtgggacttcctttctgaatgcctacacaaactctccaatttgttgcccatcacgcgcagcaatgtggagtggcctcttcactcacttaacagaatcttggaataattttaagggtctagatccaaattatacaacatggatggatgtcatggagaggcatggctaccgaacacagaaatttgggaaactggactatacttcaggacatcactccattagtaatcgtgtggaagcgtggacaagagatgttgctttcttactcagacaagaaggcaggcccatggttaatcttatccgtaacaggactaaagtcagagtgatggaaagggattggcagaatacagacaaagcagtaaactggttaagaaaggaagcaattaattacactgaaccatttgttatttacttgggattaaatttaccacacccttacccttcaccatcttctggagaaaattttggatcttcaacatttcacacatctctttattggcttgaaaaagtgtctcatgatgccatcaaaatcccaaagtggtcacctttgtcagaaatgcaccctgtagattattactcttcttatacaaaaaactgcactggaagatttacaaaaaaagaaattaagaatattagagcattttattatgctatgtgtgctgagacagatgccatgcttggtgaaattattttggcccttcatcaattagatcttcttcagaaaactattgtcatatactcctcagaccatggagagctggccatggaacatcgacagttttataaaatgagcatgtacgaggctagtgcacatgttccgcttttgatgatgggaccaggaattaaagccggcctacaagtatcaaatgtggtttctcttgtggatatttaccctaccatgcttgatattgctggaattcctctgcctcagaacctgagtggatactctttgttgccgttatcatcagaaacatttaagaatgaacataaagtcaaaaacctgcatccaccctggattctgagtgaattccatggatgtaatgtgaatgcctccacctacatgcttcgaactaaccactggaaatatatagcctattcggatggtgcatcaatattgcctcaactctttgatctttcctcggatccagatgaattaacaaatgttgctgtaaaatttccagaaattacttattctttggatcagaagcttcattccattataaactaccctaaagtttctgcttctgtccaccagtataataaagagcagtttatcaagtggaaacaaagtataggacagaattattcaaacgttatagcaaatcttaggtggcaccaagactggcagaaggaaccaaggaagtatgaaaatgcaattgatcagtggcttaaaacccatatgaatccaagagcagtttgaacaaaaagtttaaaaatagtgttctagagatacatataaatatattacaagatcataattatgtattttaaatgaaacagttttaataattaccaagttttggccgggcacagtggctcacacctgtaatcccaggactttgggaggctgaggaaagcagatcacaaggtcaagagattgagaccatcctggccaacatggtgaaaccctgtctctactaaaaatacaaaaattagctgggcgcggtggtgcacacctatagtctcagctactcagaggctgaggcaggaggatcgcttgaacccgggaggcagcagttgcagtgagctgagattgcgccactgtactccagcctggcaacagagtgagactgtgtcgcaaaaaaataaaaataaaataataataattaccaatttttcattattttgtaagaatgtagtgtattttaagataaaatgccaatgattataaaatcacatattttcaaaaatggttattatttaggcctttgtacaatttctaacaatttagtggaagtatcaaaaggattgaagcaaatactgtaacagttatgttcctttaaataatagagaatataaaatattgtaataatatgtatcataaaatagttgtatgtgagcatttgatggtgaaaaaaaaaaaaaaaaaaaaaaaaaaaaaaaaaaaaaaaaaaaaaaaaaaaaaaaaaaaaaaaaaaaaaaaaaaaaaaaaaaaaaaaaaaaaaaa

SEQ ID NO: 335 - protein, 536 aa, Homosapiens
MLLLWVSVVAALALAVLAPGAGEQRRRAAKAPNVVLVVSDSFDGRLTFHPGSQVVKLPFINFMKTRGTSFLNAYTNSPICCPSRAAMWSGLFTHLTESWNNFKGLDPNYTTWMDVMERHGYRTQKFGKLDYTSGHHSISNRVEAWTRDVAFLLRQEGRPMVNLIRNRTKVRVMERDWQNTDKAVNWLRKEAINYTEPFVIYLGLNLPHPYPSPSSGENFGSSTFHTSLYWLEKVSHDAIKIPKWSPLSEMHPVDYYSSYTKNCTGRFTKKEIKNIRAFYYAMCAETDAMLGEIILALHQLDLLQKTIVIYSSDHGELAMEHRQFYKMSMYEASAHVPLLMMGPGIKAGLQVSNVVSLVDIYPTMLDIAGIPLPQNLSGYSLLPLSSETFKNEHKVKNLHPPWILSEFHGCNVNASTYMLRTNHWKYIAYSDGASILPQLFDLSSDPDELTNVAVKFPEITYSLDQKLHSIINYPKVSASVHQYNKEQFIKWKQSIGQNYSNVIANLRWHQDWQKEPRKYENAIDQWLKTHMNPRAV

SEQ ID NO: 336 - DNA, 1305 bp, Homosapiens
atggaggatctctttagcccctcaattctgccgccggcgcccaacatttccgtgcccatcttgctgggctggggtctcaacctgaccttggggcaaggagcccctgcctctgggccgcccagccgccgcgtccgcctggtgttcctgggggtcatcctggtggtggcggtggcaggcaacaccacagtgctgtgccgcctgtgcggcggcggcgggccctgggcgggccccaagcgtcgcaagatggacttcctgctggtgcagctggccctggcggacctgtacgcgtgcgggggcacggcgctgtcacagctggcctgggaactgctgggcgagccccgcgcggccacgggggacctggcgtgccgcttcctgcagctgctgcaggcatccgggcggggcgcctcggcccacctcgtggtgctcatcgccctcgagcgccggcgcgcggtgcgtcttccgcacggccggccgctgcccgcgcgtgccctcgccgccctgggctggctgctggcactgctgctggcgctgcccccggccttcgtggtgcgcggggactccccctcgccgctgccgccgccgccgccgccaacgtccctgcagccaggcgcgcccccggccgcccgcgcctggccgggggagcgtcgctgccacgggatcttcgcgcccctgccgcgctggcacctgcaggtctacgcgttctacgaggccgtcgcgggcttcgtcgcgcctgttacggtcctgggcgtcgcttgcggccacctactctccgtctggtggcggcaccggccgcaggcccccgcggctgcagcgccctggtcggcgagcccaggtcgagcccctgcgcccagcgcgctgccccgcgccaaggtgcagagcctgaagatgagcctgctgctggcgctgctgttcgtgggctgcgagctgccctactttgccgcccggctggcggccgcgtggtcgtccgggcccgcgggagactgggagggagagggcctgtcggcggcgctgcgcgtggtggcgatggccaacagcgctctcaatcccttcgtctacctcttcttccaggcgggcgactgccggctccggcgacagctgcggaagcggctgggctctctgtgctgcgcgccgcagggaggcgcggaggacgaggaggggccccggggccaccaggcgctctaccgccaacgctggccccaccctcattatcaccatgctcggcgggaaccgctggacgagggcggcttgcgcccaccccctccgcgccccagacccctgccttgctcctgcgaaagtgccttctag

SEQ ID NO: 337 - protein, 434 aa, Homosapiens
MEDLFSPSILPPAPNISVPILLGWGLNLTLGQGAPASGPPSRRVRLVFLGVILVVAVAGNTTVLCRLCGGGGPWAGPKRRKMDFLLVQLALADLYACGGTALSQLAWELLGEPRAATGDLACRFLQLLQASGRGASAHLVVLIALERRRAVRLPHGRPLPARALAALGWLLALLLALPPAFVVRGDSPSPLPPPPPPTSLQPGAPPAARAWPGERRCHGIFAPLPRWHLQVYAFYEAVAGFVAPVTVLGVACGHLLSVWWRHRPQAPAAAAPWSASPGRAPAPSALPRAKVQSLKMSLLLALLFVGCELPYFAARLAAAWSSGPAGDWEGEGLSAALRVVAMANSALNPFVYLFFQAGDCRLRRQLRKRLGSLCCAPQGGAEDEEGPRGHQALYRQRWPHPHYHHARREPLDEGGLRPPPPRPRPLPCSCESAF

SEQ ID NO: 338 - DNA, 2711 bp, Homosapiens
gggggcgtggactcctcattccggctgtggccgcgccgctgcggggcctgaggccctcttgggttttggttcagcgttagttaacggttaacccgccaaggcgggcttccgcccaggcacaggagactcaccgagcttgttcaccttgaaacttgggccacacctgagacctgccacctaaggggggtacgcgggtcgtttttaacaagctttcatggcatttgtgccatgaaagctctaaagtatagaagctgctccagggcttccgcagccccggctgtcctggagatactcgcctcctggagtctgtgtcgagaatttgcagcacctggacagccacgtgcagtctcagaactgcaggcggtctttaccgaaatgttaaacacaacttgaagttaggcaggataactgccagagctggatggaccttagaggtgccagctaacgcgctgtgagcgttttctgcggttaggcctgctctaaacatttgacatgtgttaaagcatttatgtgctttacccacacccctatgtggcgggcccttcttaaagtaaaagaaactgcagcacagcgaagttaagcaacttgccccaaatcacgcagagctgggatgcaaacccaggtctagctcactcgtgatcacaattcaacatcatacgatggtgctgatttccagagcagctctgtgactttatataaaattattgggcaagcgttcaattgtaaacattcgtgaacatagctgttgcacattagcgttccttttttttttaattcaggaccatctttggtgacaaatataaatatcaatactatatatatcaccaatatacatatttgctttgctaaaaggtttctgtgtcttcaggatagtttacttgcaagcctcatgtttttataaaaacgtgggtgctacctgaataaaactaatgcctacccgttggcggttttgtgaagactaatgaactattatattcaaagggtccaagcagtaggcatttactaaaggacagctagttttatctgttattattctgccattcagagagataccaaaactactctctaaggcatttctcttccctgcatgtaaaagcaagggtgtcatacttgagataagcattctgataatgtgtaggcaaagtttccacacttggtaaaagcatcttagtcatggttcaagacgagtgacaagttaccacctatttgcaattcaaggagaatataagacagagaagaaagctgtgaatgaatttcatttgattagcaatagattggacactctactgatcttgcctctctacaacctctcttccacctgacctctaaatgttgaagtgtttcaggaattgtcttagaccttcttccttatctacacttcctctccaacatgaatcttgatggctctgcacaagatcctgaaaagagggaatattcttctgtgtgtgtgggcagagaagatgacattaaaaaatctgaaagaatgacagctgttgtccatgatagagaagtggtcattttctaccacaagggagaatatcatgctatggatattcgctgttaccactcaggaggacctttacatttgggagatatagaggattttgatggacgaccgtgtatagtttgcccctggcataaatacaaaattactttggcaacaggagaaggtctgtaccagtctataaaccctaaagatccatcagcaaaacccaagtggtgctccaaaggaataaagcaaaggattcacacagtgacagtagacaacggaaatatttatgtgactctttctaatgaaccttttaagtgtgactctgatttttatgccactggagacttcaaagtaattaagagttcttcctgataaaaaatatatagaaatgaaaaatgttgtgtatgcttgaaaacatttttagaataactctgcttcagttttaaaggtgatgaaatttttcaacataggcacaactgtttaaaattcacatacatttgagaggtttaagagcacacatacttagtatgatgtaaggattatcatcaggatcaatagaatacattttatcgaatcttctggattaattagaaacctgaaggttataggtttgggatgttctgtttaagaaggataaaaataaatttggagtaaacaaataataggtaaaaattaaggattagtaagaaaaaattttttaatttaaaaaatttaatttttaaaataggaaaaaatccctgtttgatgtagcagacttaattctggaaaagttttagtatatacaaagtaaacagactatataatgaacttccatcactcagctttaacagttatcagcattcttccattcttgttttatttatacctctgtggatttgctacctctcctatttgattgttatttttacatttttaggaaagtttaaatacattgaaatgttcacctctgaactgtgcaaccttcctaaataacagactttttatacttaaaaaatgcatccaaaaatgagataggtttacctgctgaacttgaaaataagaaacttaaccactgttaagtgatctgtgatcaaggcagatcttgaagtaaggaagccagacacagctgctgcccagccatgagagatgtaaagtctcctattcagtgagccaatgttctttgaatgcctatatgaaattttcaaataaagatttttaaaaacgaaaaaaaaaaaaaaaa

SEQ ID NO: 339 - protein, 157 aa, Homosapiens
MNLDGSAQDPEKREYSSVCVGREDDIKKSERMTAVVHDREVVIFYHKGEYHAMDIRCYHSGGPLHLGDIEDFDGRPCIVCPWHKYKITLATGEGLYQSINPKDPSAKPKWCSKGIKQRIHTVTVDNGNIYVTLSNEPFKCDSDFYATGDFKVIKSSS

SEQ ID NO: 340 - DNA, 1644 bp, Homosapiens
agtaacaaagaattccagcagtgagctgtgagttctgtccttgctggctttcccaagtggaaggctaccctcatctttcactaatggcagactaggacaagcattacccaggcctgcaagcttgttaaggactaggaacccaagcaagaactcaccatgccaatcaaacctgttgggtggatatgtgggcaggtgttgaagaacttttctggaagaatcgaggggatccagaaagcaatcatggaccttgtagatgagtttaaagatgaatttcccaccatcctaagattatcacagtctaatcagaaaagagaacctgcgcagaaaacatccaaaatcaggatggctattgctttagctaagattaatcgagcaacattaattcgtggattaaacagcatatccagatcctccaaatcagtggccaaacttctgcatcctcagcttgcatgcagacttttagagctaagggacatatctggtcgtctgctgagggaagttaatgcgccgaggcaacccctatataacattcaggtcagaaagggttctttgtttgaaatcatctcctttccagcaaagactgctttaactagcataatatatgcttcatatgcagcactaatttatttggcagtctgtgttaatgctgtgctgaagaaggtaaagaacatcttccaggaagaagaatccataaggcaaaacagagaggagagtgaaaattgtagaaaagccttttctgagcctgtgctttcggagcctatgtttgctgaaggtgaaatcaaagcaaaaccttataggtcattgccggagaagccagacatttcagattaccccaagcttcttgctaataagcagagtaataacatccaagttttacattctgtgtttgaccaatcagctgaaatgaatgagcaaatctgaatacaggcattcaaagaacattggctcactgaataggagactttacatctctcatggctgggcagcagctgtgtctggcttccttacttcaagatctgccttgatcacagatcacttaacagtggttaagtttcttattttcaagttcagcaggggcaaactatacacggtcgtccatcaaaatcctggggaagagaataactcatttaatattctgacatgtcaaatgttcttgatagactctgaagagtctgctgcagaagaaccaggttaaaaaaacagtaggtctaaggggttggggtgacaagattctgcatgtctaagaagctcccatgtgacaccaaagttgctggtctatggacaacagtttgaggagcaaggtcttcaagctctcattatggactgaaactggagaaaattctatggaactattatcagctcacacatataaaaactggtcactgagatgacagctgagctgaaatgcccaaaatgcaaatgaactagacatgccaacagcttggggaagagaattccatactgaaagaagagcaaatacaaaagcctgaaggaaagaaaagtcttggtgaatgtgttccagaagactggaacataatatgcaagattggtaaacaggcaggagccaggttgtgcagtgctgtgtatggattttactctaagagcaaaggaaagccactgaagagtaaaaaaaaaaaaaaaaaa

SEQ ID NO: 341 - protein, 254 aa, Homosapiens
MPIKPVGWICGQVLKNFSGRIEGIQKAIMDLVDEFKDEFPTILRLSQSNQKREPAQKTSKIRMAIALAKINRATLIRGLNSISRSSKSVAKLLHPQLACRLLELRDISGRLLREVNAPRQPLYNIQVRKGSLFEIISFPAKTALTSIIYASYAALIYLAVCVNAVLKKVKNIFQEEESIRQNREESENCRKAFSEPVLSEPMFAEGEIKAKPYRSLPEKPDISDYPKLLANKQSNNIQVLHSVFDQSAEMNEQI

SEQ ID NO: 342 - DNA, 1194 bp, Homosapiens
agtaacaaagaattccagcagtgagctgtgagttctgtccttgctggctttcccaagtggaaggctaccctcatctttcactaatggcagactaggacaagcattacccaggcctgcaagcttgttaaggactaggaacccaagcaagaactcaccatgccaatcaaacctgttgggtggatatgtgggcaggtgttgaagaacttttctggaagaatcgaggggatccagaaagcaatcatggaccttgtagatgagtttaaagatgaatttcccaccatcctaagattatcacagtctaatcagaaaagagaacctgcgcagaaaacatccaaaatcaggatggctattgctttagctaagattaatcgagcaacattaattcgtggattaaacagcatatccagatcctccaaatcagtggccaaacttctgcatcctcagcttgcatgcagacttttagagctaagggacatatctggtcgtctgctgagggaagttaatgcgccgaggcaacccctatataacattcaggtcagaaagggttctttgtttgaaatcatctcctttccagcaaagactgctttaactagcataatatatgcttcatatgcagcactaatttatttggcagtctgtgttaatgctgtgctgaagaaggtaaagaacatcttccaggaagaagaatccataaggcaaaacagagaggagagtgaaaattgtagaaaagccttttctgagcctgtgctttcggagcctatgtttgctgaaggtgaaatcaaagcaaaaccttataggtcattgccggagaagccagacatttcagattaccccaagcttcttgctaataagcagagtaataacatccaagttttacattctgtgtttgaccaatcagctgaaatgaatgagcaaatctgaatacaggtatcactgaacagaacttaagagttatctatttaatggcacatttcatctgacaaaactcagagtctagtttacatattctgaattgctctgctttcttaaaaaaaagagaagggggctactattaaaatgtcattttctagtatttacatgatagagtaaataaaatgaatattgatgtggaataaaaaaaaaaaaaaaaaaaaaaaaaaaaaaaaaaaaaaaaaaaaaaaaaaaaaaaaaaaaaaaaaaaaaaaaaaaaaaaaa

SEQ ID NO: 343 - protein, 254 aa, Homosapiens; identical to SEQ ID NO: 341

SEQ ID NO: 344 - DNA, 4122 bp, Homosapiens
aggaggcgacagctgccagccgaggaggcgcggcggagaggggactgcggtcagctgcgtccacttggggctgtgcggcggtcccgcgcccggcgatgttcccgggcactccctgagtagcggcagcttatcccccgcccgctagcccgccctggtccccggctcgctcgctggctggcgcggccccggccccgctctgcgtcggccccgccgcggtggaggcgcgcgagggggacgcggccggggatgagcggattgcgggtgaactcgccgccggggccccgcgaagccgtgagccgctgcttttctccgagtcgccgccctgcccttggatttgagatcatgtccatccacatcgtggcgctggggaacgagggggacacattccaccaggacaaccagccgtcggggcttatccgcacttacctggggagaagccctctggtctccggggacgagagcagcttgttgctgaacgcggccagcacggtcgcgcgtccggtgttcaccgagtatcaggccagtgcgtttgggaatgtcaagctggtggtccacgactgtcccgtctgggacatatttgacagtgattggtacacttctcgaaatctaattgggggcgctgacatcattgtgatcaaatacaacgttaatgacaagttttcattccatgaagtaaaggataattatattccagtgataaaaagagcattaaattcagttccagtaattattgctgctgttggtaccagacaaaatgaagagttaccttgtacatgcccactatgtacctcagacagagggagctgtgttagtacaactgaagggatccaacttgcaaaagaactaggagcaacctatcttgaactccacagccttgatgacttctacataggaaagtattttggaggagtgttggagtattttatgattcaagccttaaatcagaagacaagtgaaaaaatgaagaaaagaaaaatgagcaactcctttcatggaattagaccacctcaacttgaacaaccagaaaaaatgcctgtcttaaaggctgaagcgtcacattataactctgacttaaataacttgctgttctgctgccagtgtgtggacgtggtattttataaccccgatttaaagaaagttgtagaggcccacaagatcgttctctgcgctgtaagccatgttttcatgctgcttttcaatgtgaagagtcccactgacattcaggattccagtatcatccgaactacccaggatctttttgctataaacagagatactgcatttccaggtgctagccatgaatcttcaggcaacccaccattacgagtcattgttaaagacgccctcttctgttcttgtttatcagacatccttcgcttcatttattcaggtgcttttcagtgggaagaattggaagaagatatcaggaagaagttgaaagattctggggatgtttcaaatgtaatcgagaaagttaaatgcattttaaaaacaccaggaaagattaattgcctaaggaattgcaaaacctatcaagccagaaaacctttgtggttttataacacttccctcaagtttttccttaataagccgatgcttgccgatgttgtcttcgaaattcaaggtacgacagtgccagcccacagggccatcctggtggcccgttgtgaagtgatggcagccatgtttaatggtaattacatggaagcaaagagtgtcctgattcccgtttatggtgtttccaaagagactttcttgtcatttttagaatacctgtacacagactcctgctgcccagctggcatattccaggccatgtgtctcctgatctgtgccgagatgtaccaagtgtccagactgcagcacatctgtgagctgttcatcattacccagctgcagagcatgccaagcagggaactggcatccatgaaccttgatatagttgacctgcttaaaaaggccaagtttcaccactctgattgcctttcaacctggctacttcatttcattgctactaactacctcatcttcagtcaaaagcctgaatttcaggatctttcagtggaagaacgcagttttgttgaaaagcacagatggccgtcgaatatgtacttgaagcagcttgcggaatacaggaagtatattcactcccggaaatgtcgttgcttagtaatgtaacctggagcttttatacactacatttcttttttattattatgaagaatgggatacctccaggttccagtaaaattcttctgaccgaaaccaatgtgggtgttagaaaaattaccatatagcttaatatgtttattagttctctttggaaaaaaactaccactgtggtcttaaaagggaacaaaatataccataggctaaaactaaggctttcactctagaatgcaaagctgttttgcagctgttttcccttaaagatgtcctgttgctttagtgatatttagacccctctcagttaagaaatgcttagattaaaaaaaaaaaattacgtaggattaatacagaaatttaatcatgtctgattaattgctctattaaaataaggggcatttaaagacccagcataaccatttgtataatgagaaatctaggggaaaaccaatcagtccaacatgagattttaggaatagaaatttgccggccatttggaaagtgaaatgccacttagttctcaattgatgacagtgtttgaatcatcataaaaaaaatacctgcttttcatctggacaacccaattgagccactttatctccttttggcaatctgagtaggcggggaacctaggcagggctggctttcttagcgtgtaacttgtgtagcagcacagggcccacacttagaaggaccccacacttggttcaaggctctgctatagcggaaattcttaataatgtttgaagaagggccccatgatttcattttgtgctgagccctcaaaattatgtctgtttcgtggtgggaaatatcctatgttttcttgctcaaacacctttctctctgaaagcagaaaaaggcactgatataaagggaagagaaggaggctcaccggagggaagagaacatagtgaagattcccgcctttggggaggtctggaccacccagggcctccactgccaccttggctggcaagggagaaatgtgttgtgttgtcttagctttaaaacagtcacagttcttgctctatcatagatgaacaaatactttcttgatcattctgtaagaccaggaggttggtaagagtgactaaccagcctaactttaatacacatgtataaagatgttcacagagaaagatgctctgtagagaatttgctaccgaagttggctcaagaatttgtttttagtgttatttaccaagattaggacgtcagtggcttaaattctttgaattcttttcaaggactgcaagattatttgataaagagtagcatgaatcttgtgctctaatattacacagtaagttcaaagaaaggatgtaagtcaaagacttgttacatagagggaaaatggactgggatagaggacagactgatagtttctttctttcatatcacatgtatagagaaataattatatcagaaactcacaaacctagacatggaaaaacagattactgtctattgtcagcatcattttcatctgtaagtcactactggaatatatttttcttttaatttccagtgactttagaatacacacagtttttccgacttttcaaaaatttgattaaatggttttatagtataatattgggaccccataccgttagcccttgtatgtataccaacactgccaaagtaaaacattaggtcaggcatggtggctcaggcctgtaatcccagcattttgggaggctgaggcaagtggataacttgaggtcatgagttcgaaaccagcctggccaaaacagtgaaaccccgtctctactaaaaatacaaaattagccagatgtggtggcgcacacctgtaatcccagctactcaggaagctgaggcaggaaaatcgcttgaacctgggaggtggaagttgcagtgagccgagatcgcaccactgcactccagcctgggtgacaagagcgaaactccatcacaaaaaaaaaaaaaaaa

SEQ ID NO: 345 - protein, 611 aa, Homosapiens
MSIHIVALGNEGDTFHQDNQPSGLIRTYLGRSPLVSGDESSLLLNAASTVARPVFTEYQASAFGNVKLVVHDCPVWDIFDSDWYTSRNLIGGADIIVIKYNVNDKFSFHEVKDNYIPVIKRALNSVPVIIAAVGTRQNEELPCTCPLCTSDRGSCVSTTEGIQLAKELGATYLELHSLDDFYIGKYFGGVLEYFMIQALNQKTSEKMKKRKMSNSFHGIRPPQLEQPEKMPVLKAEASHYNSDLNNLLFCCQCVDVVFYNPDLKKVVEAHKIVLCAVSHVFMLLFNVKSPTDIQDSSIIRTTQDLFAINRDTAFPGASHESSGNPPLRVIVKDALFCSCLSDILRFIYSGAFQWEELEEDIRKKLKDSGDVSNVIEKVKCILKTPGKINCLRNCKTYQARKPLWFYNTSLKFFLNKPMLADVVFEIQGTTVPAHRAILVARCEVMAAMFNGNYMEAKSVLIPVYGVSKETFLSFLEYLYTDSCCPAGIFQAMCLLICAEMYQVSRLQHICELFIITQLQSMPSRELASMNLDIVDLLKKAKFHHSDCLSTWLLHFIATNYLIFSQKPEFQDLSVEERSFVEKHRWPSNMYLKQLAEYRKYIHSRKCRCLVM

SEQ ID NO: 346 - DNA, 1328 bp, Homosapiens
ccgcagcccatcggcatggctcaagagtttgtgaactgcaaaatccagcctgggaaggtggttgtgttcatcaagcccacctgcccgtactgcaggagggcccaagagatcctcagtcaattgcccatcaaacaagggcttctggaatttgtcgatatcacagccaccaaccacactaacgagattcaagattatttgcaacagctcacgggagcaagaacggtgcctcgagtctttattggtaaagattgtataggcggatgcagtgatctagtctctttgcaacagagtggggaactgctgacgcggctaaagcagattggagctctgcagtaaccacagaacaggccccatgctgacgtccctcctcaagagctggatggcattgcaaatgatgacagcacttctggtggatgaatttgggggcacaaacagcttttttcctcttttggctcagtatttaaaagtggaccaacttgctcttaatcacagggcaagaaggttgaccgggccatcttggttttcttctggatgagctctttggttttcagaagactgtgacaagttctggcccaggattcgctcactgaccctcaattgtcctctttggcatgcgtttcttactgttctccatgtgtcggcatgtctctacctctaagccagtgtttttcaactatgtttatccagactccttctccacaatgatgaatccacagttggttatctgctactgcccattagctaaaatcattttgctgcttgactttatggagtttgtattatgaaatcagtggtattttgaatgtgttctttctaactacatgcatctctccactcaactccaccccatcccatcccaccttgaaaatcgctgctctgaaccagtgttctccaccttgtcctccacacatctcataggaaatgttcaacaattctgtgaaaggtcacaggacccaattggagaaatcatatgaaaagcatagttggtcttggtgtcatatggatcagaggcacaagtgcagaggctgtggtcatgcggaacactctgttatttaagatggctatccagataatcctgaacactgtgtatttattttatttagactaccagcaaagattaaagcatgaaatgtaaaacatctgataaaacttacagccccctacaccaagagtgtatctgtgaaagagctcctacactttgaaaacttaagaatcccttatcatgaagtttgcctgttctagaattgtaagattgttaatttccttcaatctctagtgacaacacttaatttcttttctaataaaaaaaacctatagatgattcagtg

SEQ ID NO: 347 - protein, 106 aa, Homosapiens
MAQEFVNCKIQPGKVVVFIKPTCPYCRRAQEILSQLPIKQGLLEFVDITATNHTNEIQDYLQQLTGARTVPRVFIGKDCIGGCSDLVSLQQSGELLTRLKQIGALQ

SEQ ID NO: 348 - DNA, 1799 bp, Homosapiens
agaccacgaacccaccagaaggaagaaactccgaacacatctgaacatcagaaggaacaaactctggacacactgcctttaagaactgtaatactcaccgtgagggcccgcggcttcattcttgaagtcagtgagaccaagaacccaccaattccagacacagtgggatcacagagagagccaacagtccaggccatgacaagctggcacccagctctgcttcacatttgtccaactggcgtggctgtagctccttcctgcaaggcaatgctgaagaagctatggaagcaagaaggaagcatggattctaaaaactgacaacaaaccacttacccctattgctcttcttcctaaagctaaaggatcaaactgcatcacggaagctgcacacgatgacaccctgtctggaaagtttttgccagagggcaaaagactgcaagcagaatatccctttgccatttctcattcaggactggccgttgtctgaaagcaaacctcaaggacaggacttctggactccgcagccacttcaggctgctgctccatcgcatgaattccagcaggtggcgctgcaccccgcgcggacccggcttgcctctcggccccagggaggtcggttgatgagcagtcgggaagtgggtctgcgcgcaccccgctgcagctgtggcaaacgcaaacgatgacacacaggcttgacgagggcctttgtcagaagcaatggggatctggcgtcaccgcacaatggaaaacaaagtgcttctgcctggctggccagaatgcacgtttgctcactattgatgctggggcatttacaggcagaatgagttcatgtgaaatttcaggatctgccatgactcagattcactttctgtaaaccagagtcaacattacatttccctttactctgggccattccttgaatttttaggtcaccagttgtttttgtactaactgaagggatttgagtatttcacaagcaccttatttttattagcatttttagggcattaccaatttgggacggatctgtagtgtgagagattgttgtcactcttagctccaaacataggttgactttatatattatttacatgttcagaattatactgtgtagaaattcaaatgaaacttgcaaaatacttttctggcaggaagccctggagaggatcgttcatggaaacaaggatgacgactggggtaagaaatgcaggtgactcgtgagtggtcagggagtggaagagaagacggctggaaggttttagcattcagaaaaaaaatggagacaactagagttgatctgaagattatggcagaattcaatattgggggaaagaaacaagatgggggttagaaattagaaacagcagagctccacaggttggaaaggttggaaaggatttgagcaagagaacaagaaggagcctgctaatagcaccctgggtttacatcaagagaagcacctggagagaattaactcgggaggaggtgggggcatgggaaaccttttcatctccaagagcgggcaggaacagcagctggcctgaacttgaaggtacaccaggtagcttgcgtgggccaggagaaggtgattctcttctatgcctctctccaacgccctgcttctgatgctgctcctctacctgtattgaggggaagatacatccctaagaagttccctgaaccccattctttgttgtggctaactggtccccttggaatttttctactaattttcaattccccctctcacctggtgaaatcttgaatcttactgttcaataaaagttcttctaccgaaa

SEQ ID NO: 349 - protein, 96 aa, Homosapiens
MTPCLESFCQRAKDCKQNIPLPFLIQDWPLSESKPQGQDFWTPQPLQAAAPSHEFQQVALHPARTRLASRPQGGRLMSSREVGLRAPRCSCGKRKR

SEQ ID NO: 350 - DNA, 3767 bp, Homosapiens
gataagttggcgcgtcacctagacgtcagcctcttacctctcggacgtcccgtcccaggagcaaaactctagtgactttgggcccgcccccgtgagagtggagggcggccgatgagggcggttctgaagggaacaagaccaatgagacgagcccggggcggggcgcggggccggagggtggggcgggtggcggcggtggcagtccgaggtctggctccgcgcagtatatgacagtacgtcagcagcgggatggccctagcagtggcggcggctgcagaagcccaagcagccgcggccgcagtggaggctagagccggagcggcggcggcggcggcaccccggggagtttaagatggcggcgggggggacagggggcctgcgggaggagcagcgctatgggctgtcgtgcggacggctggggcaggacaacatcaccgtactgcatgtgaagctcaccgagacggcgatccgggcgctcgagacttaccagagccacaagaatttaattccttttcgaccttcaatccagttccaaggactccacgggcttgtcaaaattcccaaaaatgatcccctcaatgaagttcataactttaacttttatttgtcaaatgtgggcaaagacaaccctcagggcagctttgactgcatccagcaaacattctccagctctggagcctcccagctcaattgcctgggatttatacaagataaaattacagtgtgtgcaacaaacgactcgtatcagatgacacgagaaagaatgacccaggcagaggaggaatcccgcaaccgaagcacaaaagttatcaaacccggtggaccatatgtagggaaaagagtgcaaattcggaaagcacctcaagctgtttcagatacagttcctgagaggaaaaggtcaacccccatgaaccctgcaaatacaattcgaaagacacatagcagcagcaccatctctcagaggccatacagggacagggtgattcacttactggccctgaaggcctacaagaaaccggagctacttgctagactccagaaagatggtgtcaatcaaaaagacaagaactccctgggagcaattctgcaacaggtagccaatctgaattctaaggacctctcatataccttaaaggattatgtttttaaagagcttcaaagagactggcctggatacagtgaaatagacagacggtcattggagtcagtgctctctagaaaactaaatccgtctcagaatgctacaggcaccagccgttcagaatctcctgtatgttctagtagagatgctgtatcttctcctcagaaacggcttttggattcagagtttattgatcctttaatgaataaaaaagcccgaatatctcacctgacgaacagagtaccaccaacactaaatggtcatttgaatcccaccagtgaaaaatcggctgcaggcctcccactgccccctgcggctgctgccatccccacccctccaccgctgccttcaacctatctgcccatctcacatcctcctcagattgtaaattctaactccaactcccctagcactccagaaggccgggggactcaagacctacctgttgacagttttagtcaaaacgatagtatctatgaggaccagcaagacaaatatacctctaggacttctctggaaaccttaccccctggttccgttctactaaagtgtccaaagcctatggaagaaaaccattcaatgtctcacaaaaagtccaaaaagaagtctaaaaaacataaggaaaaggaccaaataaaaaagcacgacattgagactattgaggaaaaggaggaagatcttaagagagaagaggaaattgccaagctaaataactccagtccaaattccagtggaggagttaaagaggattgcactgcctccatggaaccttcagcaattgaactcccagattatttgataaaatatatcgctatcgtctcctatgagcaacgccagaattataaggatgacttcaatgcagagtatgatgagtacagagctttgcatgccaggatggagactgtagctagaagatttatcaaactagatgcacaaagaaagcgcctttctccaggctcaaaagagtatcagaatgttcatgaagaagtcttacaagaatatcagaagataaagcagtctagtcccaattaccatgaagaaaaatacagatgtgaatatcttcataacaagctggctcacatcaaaaggctaataggtgaatttgaccaacagcaagcagagtcatggtcctagaactctgcttggaccagaagatgtgaataaacttaagcttatttatttaaaattccaaatgagttgctctagattctaaaaaggtgaaactttggctgttgaaagtttcagtattagtaaacttgagttactttttcttttccattttactttgcttccctgcatttcgaagctgctctttctggtcctccccaccaccccacccccaagacttgtgtttgttaatagaaataatttttttaggtattggggatccattgtctatatttcaaatcagttttttttcctcaaaaacttgtgtttgttattagaaatgattttttagatattggggatccagtgtccacacttaaaagttgtatgtgtttaaaaaacaacaacagtaatgtgcaaggtgaaatgcttttggataaacgtaagcctattttctgacgtttcttaatgcaaactctttgccttaaatggtagaatatttagaaatttgcacaaaattaaaaaaataaacattgtcttggagggttaaaaaatagaaaggtgtatgtgtatagattcacatacacatatgtatatacaggctgacttgatctagaacattaaatccgccctgcaagttaaccccccattgcaatggttgccttaaggtgtttgctagttgtgtacatagtgtggttaatcattagctacactgcttcccacttgattagagcaatgggaagcatactgtggcctaccagcatctggaagtgtgtgctcgatctgtatgtgtgcagaggtggtgtggatgtgagcgtgcatgaaggaaaaaaagctgctactcctagtaggccaaacgctcaggttaaacaactgacgagtgttactgtagggtgtttttttgtttttttgttttttttcttctatcaaattgctacttttgttgtggaagacaaaagcatttccatttcaacgagtttgtcagctttattaatgttgggcaaaaattgatatgtcatgaaaatgaaacagatctatagttttgggacaaaattataaaatgaaatgtgtaggtaacctatttatatactgctataaagtattttttgaagagagatatgcaaagaagctattacctacataagaggtatatttaaagattttttttttttcatcctggtgccaggaatataaaaaagagtggatatatttaaccataacatactgtgattcatcaaacagcacaaactttcatttcatggagtttatctgttgacattgatttaaactgtcacttgttttatcatgtgggaacataagttatgtggtcaaaaatataaggattttgaattaatgttgattcaagttgtattgtcttattgtattgtcttttcaaagtgctgccagttgaaaagggaagcattatgtttacaaatctgttttgaaatgtttgccaaaattttggtagtgtctttaataaagatgtttgtctccagcatccagaaaaaaaaaaaaaaaa

SEQ ID NO: 351 - protein, 640 aa, Homosapiens
MAAGGTGGLREEQRYGLSCGRLGQDNITVLHVKLTETAIRALETYQSHKNLIPFRPSIQFQGLHGLVKIPKNDPLNEVHNFNFYLSNVGKDNPQGSFDCIQQTFSSSGASQLNCLGFIQDKITVCATNDSYQMTRERMTQAEEESRNRSTKVIKPGGPYVGKRVQIRKAPQAVSDTVPERKRSTPMNPANTIRKTHSSSTISQRPYRDRVIHLLALKAYKKPELLARLQKDGVNQKDKNSLGAILQQVANLNSKDLSYTLKDYVFKELQRDWPGYSEIDRRSLESVLSRKLNPSQNATGTSRSESPVCSSRDAVSSPQKRLLDSEFIDPLMNKKARISHLTNRVPPTLNGHLNPTSEKSAAGLPLPPAAAAIPTPPPLPSTYLPISHPPQIVNSNSNSPSTPEGRGTQDLPVDSFSQNDSIYEDQQDKYTSRTSLETLPPGSVLLKCPKPMEENHSMSHKKSKKKSKKHKEKDQIKKHDIETIEEKEEDLKREEEIAKLNNSSPNSSGGVKEDCTASMEPSAIELPDYLIKYIAIVSYEQRQNYKDDFNAEYDEYRALHARMETVARRFIKLDAQRKRLSPGSKEYQNVHEEVLQEYQKIKQSSPNYHEEKYRCEYLHNKLAHIKRLIGEFDQQQAESWS

SEQ ID NO: 352 - DNA, 823 bp, Homosapiens
atggagatacagcgtgtggggctggagccaggaatatcagagttttgccagaaacccttgagtctggagtggtacggctggagtccagattgcagtctgtggaggagtggacaggagaccaagaaattctcgagttctcttcagagaccaactggggatcaacaattcaatttaattctgacacccaaggaagaagagagtgcacctgatgtagtagccactgtaagaactgtgttggagaatgatccgattggccagtgcaagagggattgcagagaagaagaaaccacaagcagaaaaaccagatgaggaaattaagctaaatattaactatctcaagaatattcccagaagtgactgctaaatttaaatccctgctcacaatgaaatactgtacagcaggggttctcaaactttttggtcttaggacccttacagccttaaaaattattgagaactccaaagaactttcaattatgtgggtcataactactgatacttactgtattataacttgaaactgaaaaaatttttaaatatttataaacatttaaaaataataaacccattgtaagctaatgtaaatagcatgtttttattaaaaatcactttgttttccaaagcaaaaaatgtagtgagaagagaggccttcttttacattttaatatctggcttatgagaaaatagctgagtttctcatttctgcttctccatttaatctgttggtgtatattttatttaaagtacagttaacccttgaagaacgtgggtctgaactgtgcaggtccacttatacatggatttttttctaataaaagttgca

SEQ ID NO: 353 - protein, 102 aa, Homosapiens
MEIQRVGLEPGISEFCQKPLSLEWYGWSPDCSLWRSGQETKKFSSSLQRPTGDQQFNLILTPKEEESAPDVVATVRTVLENDPIGQCKRDCREEETTSRKTR

SEQ ID NO: 354 - DNA, 3523 bp, Homosapiens
atggctgtgcgctctcgccgcccgtggatgagcgtggcattagggctggtgctgggcttcaccgccgcgtcctggctcatcgcccccagggtggcggagctgagcgagaggaagagacgtggctccagcctctgctcctactacggtcgctctgctgctggcccccgcgccggcgctcagcagccgctcccccagccccagtcccgaccacggcaggagcagtcgccgccccccgcgcgccaggatctccaggggccaccgctgcccgaggcagcacccgggatcaccagttttcgaagcagcccctggcagcagccacctccgctgcagcagcggcggcgaggacgcgagcctgagggcgcgacggggcttcccggtgctccagcggccgagggggagcccgaggaggaggacgggggcgcggctgggcagcggagagacggccggccggggagtagccacaacggcagcggggacgggggcgctgccgccccgagcgcccgaccccgggacttcctgtacgtgggggtgatgaccgcgcagaagtacctgggcagccgcgcgctggccgcgcagcggacctgggcgcgtttcatcccgggccgcgtggagttcttttccagccagcagccccccaacgccggccagcccccgccacccctgcctgtcatcgcgctaccgggtgtggacgactcctatcctccccagaaaaagtccttcatgatgatcaagtacatgcacgaccactacctggacaagtatgagtggttcatgcgcgccgacgacgatgtctacatcaaaggtgataaattagaagagtttcttagatcgctaaacagcagtaagcctctctacctgggacagactggcctggggaatattgaagagcttggaaagctgggactggagcctggggaaaacttctgtatgggaggacctggcatgatctttagccgagaagttctcaggaggatggtgccacatattggtgaatgccttagagaaatgtacacgactcatgaggatgtggaagtaggaagatgcgttcgccgttttggtgggactcagtgtgtctggtcttacgagatgcaacaactgttccatgaaaattatgaacacaatcggaagggttacatccaagaccttcacaatagcaaaatccatgcagccataacacttcatcccaacaaaaggcctgcataccaatacaggctgcataattacatgctcagccgcaaaatttctgaacttcgctaccgcaccatccagctccacagggaaagtgccctgatgagcaagctcagtaacacagaagtgagcaaagaggaccagcagctgggagtgataccttctttcaaccacttccagcctcgggagagaaatgaagtgatagaatgggagttcctgacagggaagcttctatactcagcagctgagaaccagccccctcgacagagcctcagtagcattttaagaacagcactggatgataccgtcctacaggtgatggagatgatcaatgagaatgccaagagcagaggacggctcattgacttcaaggaaattcagtatggctaccgcagagttaaccccatgcacggggtggagtacattttggatttactccttttatacaaaagacacaagggaaggaaactgactgtgccagtgagacgtcatgcctatcttcagcagttgttcagcaagcctttcttcagagagaccgaagagctagatgtcaacagtcttgtggagagtattaacagtgaaactcagtcattctcctttatatctaattctttaaagatattatcttcttttcaaggtgccaaagaaatgggagggcacaatgaaaagaaagtacacattctcgttcctctcatcggaaggtatgacattttcttgagattcatggagaactttgaaaacatgtgtcttatcccaaagcagaatgtaaagttggtcattatccttttcagtagggattctggccaagactccagcaagcatattgagctgataaaagggtaccagaacaagtaccccaaagcagaaatgaccctgatcccaatgaagggagagttttccagaggtcttggtcttgaaatggcttctgcccagtttgacaatgacactttgctgctattttgtgatgttgacttgatcttcagagaagattttctccaacgatgtagagacaatacaattcagggacaacaggtgtactatcccatcatctttagccagtatgacccaaaggtaacaaacgggggaaatcctcccactgatgattacttcatattctcaaaaaagactggattttggagagactatggatatggcatcacctgtatttacaaaagtgatcttctaggtgcaggtggatttgatacctcaatacaaggctggggactagaagatgtagatctctacaataaagtcattctatctggcttaaggccattcagaagccaagaagtaggagtggtgcatattttccatccagttcattgtgatcctaacttggaccctaagcagtataagatgtgcttaggatccaaggcaagtactttcgcctcaaccatgcaactggctgaactctggcttgaaaaacatttaggtgtcaggtacaatcgaactctctcctgacagtccaggcaacacattttgccttttttaaggggagtttacctcattgttggttgttgttatttttattgtattattgttattttattattattattgttataattttattttgttgtcctggtcttaaactactcttggttgtcttcctaagggtgtttgttgacctcaagcaagaagagtctgcagttcactgatgtttcagatttctactgaagtcaatatgttattacttttatataactttatttgagattgagttaaatcatagcaatcaaatgacttttgaaacgcattcatcacaagagacagcttagaagaatgttctcttggggcttaaagatgcaatatcgacttttatttggtttctcaaattcaatgtgatacaaatatttactggtgaaaggtaccacaaaagtgctttatgcttcctatggggaagggactctgtaacataaacttgagttttgtaatttatacaaggacttaaatatataaacaataattttcttcatctttagaatttttaaagtaaatgaatacctatgattgtatgtttattttttaaaaaaagttttaaaaattgaggagttttgttccacaagcaaccggtactggctaccctggtcttatgacaattatgagctcctcacaactgtctgctataaatgcgaatgaactttattttctcaaggaaatatgatttaattaaatattcatgtacattttagaagctttatgaaacaatgtccttcatttgctggcaagaagataaaatatgacagaacctgtttatttaaaataaaacacaggtatagcagtattctttttcaaaaacactgaaaaaaaaaaaaaaaaaaaaaaaaaaaaaaaa

SEQ ID NO: 355 - protein, 882 aa, Homosapiens
MAVRSRRPWMSVALGLVLGFTAASWLIAPRVAELSERKRRGSSLCSYYGRSAAGPRAGAQQPLPQPQSRPRQEQSPPPARQDLQGPPLPEAAPGITSFRSSPWQQPPPLQQRRRGREPEGATGLPGAPAAEGEPEEEDGGAAGQRRDGRPGSSHNGSGDGGAAAPSARPRDFLYVGVMTAQKYLGSRALAAQRTWARFIPGRVEFFSSQQPPNAGQPPPPLPVIALPGVDDSYPPQKKSFMMIKYMHDHYLDKYEWFMRADDDVYIKGDKLEEFLRSLNSSKPLYLGQTGLGNIEELGKLGLEPGENFCMGGPGMIFSREVLRRMVPHIGECLREMYTTHEDVEVGRCVRRFGGTQCVWSYEMQQLFHENYEHNRKGYIQDLHNSKIHAAITLHPNKRPAYQYRLHNYMLSRKISELRYRTIQLHRESALMSKLSNTEVSKEDQQLGVIPSFNHFQPRERNEVIEWEFLTGKLLYSAAENQPPRQSLSSILRTALDDTVLQVMEMINENAKSRGRLIDFKEIQYGYRRVNPMHGVEYILDLLLLYKRHKGRKLTVPVRRHAYLQQLFSKPFFRETEELDVNSLVESINSETQSFSFISNSLKILSSFQGAKEMGGHNEKKVHILVPLIGRYDIFLRFMENFENMCLIPKQNVKLVIILFSRDSGQDSSKHIELIKGYQNKYPKAEMTLIPMKGEFSRGLGLEMASAQFDNDTLLLFCDVDLIFREDFLQRCRDNTIQGQQVYYPIIFSQYDPKVTNGGNPPTDDYFIFSKKTGFWRDYGYGITCIYKSDLLGAGGFDTSIQGWGLEDVDLYNKVILSGLRPFRSQEVGVVHIFHPVHCDPNLDPKQYKMCLGSKASTFASTMQLAELWLEKHLGVRYNRTLS

SEQ ID NO: 356 - DNA, 675 bp, Homosapiens
gcacgcgcaagattaggtggggcgccagagccggggcacctgcgcaggcttggctgcgccctctcgcgccgcacgctctgcgggttcctcccttcttccgagcctctcctctggccgccgcgcgggagagaggccgagatggcagatgagattgccaaggctcaggtcgctcggcctggtggcgacacgatctttgggaagatcatccgcaaggaaataccagccaaaatcatttttgaggatgaccggtgccttgctttccatgacatttcccctcaagcaccaacacattttctggtgatacccaagaaacatatatcccagatttctgtggcagaagatgatgatgaaagtcttcttggacacttaatgattgttggcaagaaatgtgctgctgatctgggcctgaataagggttatcgaatggtggtgaatgaaggttcagatggtggacagtctgtctatcacgttcatctccatgttcttggaggtcggcaaatgcattggcctcctggttaagcacgttttggggataattttctcttctttaggcaatgattaagttaggcaatttccagtatgttaagtaacacacttatttttgcctgtgtatggagagattcaagaaataattttaaaaccgcatacataataaaagacattgttgcatggctt

SEQ ID NO: 357 - protein, 126 aa, Homosapiens
MADEIAKAQVARPGGDTIFGKIIRKEIPAKIIFEDDRCLAFHDISPQAPTHFLVIPKKHISQISVAEDDDESLLGHLMIVGKKCAADLGLNKGYRMVVNEGSDGGQSVYHVHLHVLGGRQMHWPPG

SEQ ID NO: 358 - DNA, 2104 bp, Homosapiens
gactgctctggaggtagcggccgcggtgaggagagccatgggacgggcagtcaaggttttacagctctttaaaacactgcacaggaccagacaacaagtttttaaaaatgatgccagagcattagaagcagccagaataaagataaatgaagaattcaaaaataataaaagtgaaacttcttctaagaaaatagaagagctaatgaaaataggttctgatattgaattattactcagaacatctgttatacaaggtattcacacagaccacaatacactgaaactggtccctaggaaagaccttcttgtagaaaatgtgccatattgtgatgcaccaactcagaagcaatgagttttctagaatacaacaagtctttgtactttttaactttaaaatctacaactctggcaaaagtcctggaaatgcagacattttccctgaactggcatattgaaaatgaatgaattacagaatagcttcatatttaaatttcatgttaaaaggtcattactgagaactaaagaacataattaagtatttctaaaggaaattagataagaaaacatttcattttcattgaaaatcaaatttcataaagcaaagtaaatgcttagggagatatattcaatctttgaccttgatgagtatttgatcttaccatagctatttgagaatgtggtgcttttacaaattggtgagttttcctgccatgtgaaatgcaattattacatttaaattgttagattaaaatgatatttagtcctgaaaaatattaaattggtcaaaaaaatcacagtgtatgccagctctctacagaaagtggcctttgttttctaaagcactgggattatttctgtagctaatatataattgtacagtttctttttagagatagagagtatctctgtgttcttatgaagacattttttatcagctttctgaaaatagatgaataaaatattatagtcacctagggtcactatggaataaagaaatcctagtttaaagaggaaatagtggcccttgatcaaactatttaatatggccttagtagaattagctgtatttagacaaagttagactttagtgtgaaatgtaatcggtggctacattctcatcgttttaattaatgaaacttaaatggcttctcttcttccacatgtcctgtccttgacaagatgggcagtatgacaaaaggtcctggcattctaccatctaacactaggaactgtaaaatactgtttaatattcttcttgtttctcttttatctgtgtatctttgccattctattttctcagtgaatagtatgttttctcccattcactgataaattctctcatttgatgatgatacagggtttttaatttttgcaagattctcaatgcaagcattgttatgtatctagaaattatacctagagaaaaatgaaagtcgtttcaaatttgaaatttgcccttttaagagaatgctgaatgtcatcgcagtatataatcactatataaatgtgctgacttacagttattttagtgtctatatgacatattttgaggaaagttggctgacgttatttaaatttaatatatattctatattttagtgttattgaatattttatcactgagcttttttctttaacctgaattccctgctccatttttcattcatattaatttaaataactccagatttctttcttatagtcattattagtagcagatgagattaataattcacatgtttattaaagatagtggcttagaaattttaagatatattgatataggcccgggcgctgtggctcacacctgtagtcccgcactttgggaggctgaggcgggcagatcacaaggtcgggagttcgagaccagcctggccaatgtggtgagaccccatctctgctaaggacacaaaaattagccaggtgtggtggcgggcgcctgtagtcccagctactcgggaggctgaggcaggaaaatcacttgaacccgggaggtggaggttgcagtgaactgagattgtgccactgcactccagcctgggggacagagtgagactctgtctcaaaaaaaaaaaagaaaaaaaaaggaaaaaaaaaaaaaaaa

SEQ ID NO: 359 - protein, 104 aa, Homosapiens
MGRAVKVLQLFKTLHRTRQQVFKNDARALEAARIKINEEFKNNKSETSSKKIEELMKIGSDIELLLRTSVIQGIHTDHNTLKLVPRKDLLVENVPYCDAPTQKQ

SEQ ID NO: 360 - DNA, 3498 bp, Homosapiens
gctccgcccaacccgcgcgcgagcctgggcggggagggggagccaggaagctgcgagcgcgctggggagcgcagctgcaggcgttggggcggcaggagccgcggagccggcgctgagaggggctgcggccggagcgggcggctgagacaaaggcgacgactatctgttatagtccctgggtcaagacaacaatttttataccttcgtcgtggttcagaaaggagtctctgtagaaccagaagcaaagaaaggaaacaatccaaatttttctttattaaatcgactgtgtaagatacttgacttccaggaacaaaaacacggtgaaataataaaatttcatcttggcatcactggacatcatcgtattgaggagcgtatttttggaacttcccgagttgagatttggaaccttcattggtgctcatttactgtggactgtaagcatgagtgaattctggttgtgtttcaactgctgtattgcagaacagcctcagcctaaaaggcgacggcggattgacagaagtatgattggagagcccacaaactttgtgcatacagctcatgttggatcaggagacctgttcagtggaatgaattcagttagctccattcagaaccaaatgcagtccaagggaggttatggaggtggaatgcctgccaatgtccagatgcagctcgtggatacgaaggcgggatagccctggtcctttctccaaagtgtgatggcaccttgtccaccctgtcgtgattattccagtgagatgttactgttctgctctgaagaagatactgtcagacgaatcctgcatttccttcagctggcatgcatgcctttggactcatggacagagttctttggattgtcactgaattttcaatgtttaatcagtatggatctgatcttcgcatgatcttttttgtgaatgctaacaccattttgcagttttttttttctattttaaacatttttcttttcactgccgaccccctgccttacgattttattggaaagcaaggacctgctattatttgttaatttgccatcatttatgtatattttggaaggtatgagacccacaagcacaatgatcatttttatttgtttgtttgtttgaaacttcagcagaatagatatctgcatgctttatgaagttgttgcttcggtaagagcccatgggatgccagaaattaacatttctttgctgccatgggctgatgatgctgctattagataaagtttagctgtggcaccaagtcacatcattttcatagaaaaagattacttgtagcttattttagaagtatgaccttttggtctgtttgattgattgattagaattgcaataaaagaaaagcttgcattcataaggcattcattctgttgtaaatgttcaatatatttattttgagagcaaggacctgtggttgtaaacaggtgtggttacaggtgtggttatgtatctgagtgttgcggtcatactctcctccagtccaatcctgagcatcttcatcttattaattagctgttcgtttctttgtgcactcattcttttatttttacttctttttaatgttatggtatccagttgtttccagtagcagtttcttgaacttctggcctgtactactaactgcagacctccagagtcactggcctttctgtgctctacatattattttaggggccacatcagttgccaagagcaacatacataccgacctggctgaattattgccagtgaaaacaacctgtacgaagcctttgctcaggttctaaaatatgtttgtccttgcacgaattttgtatatttcaaatatttctgtaaaggtttcttcttttctgttagagtgtggtgttaagccagagtcagtggtttgtgttctcattaaaatgtttgtttaaatcctatgtccaattcaagcctatctaactacatttggtaggattaacatttcatataacaaatggggcttaattaaaaactttaacttggaataaaggaacagggatcactttatcttctgccttcatttaccttagtccaagattcttgcaaaacaggcaactgaacaaacattaggtttatgtaggtaaaatgtgaaagcatttctcctccactttttaaaatttaatttacccagtacagcggggcaccagattacttgatctttgtattttgcagttttgagcctttgtgtcaatcccaagcacagagaggatctgccaaggaaaaacatttgcatcttcggagtagacattttgcagtttgtttaataacaacttctaaagtaagttgaattcatccattgtcactgattcaccaagtggatgttgcattgtggaatttgcctgagtactgttgtcattctgctcagccaggcacggtcagtttcttggccagggacattgctatgtgctgtgtgcaagctctttagaagagagattggattttcttggcattatcagcactcatgctatttagtctacttctattttgactgactctttaaattagtacaatttttctacttgtcatataactcctggaacaatagtacgggaagccgtgatccttttccctgactcatgattttagtctttttccaaatcgctgttttttttttttttttttttttttttgctgctccaacgaccagcatgtgttggagcagatctccatggtaagccaaaagtggacttgtcagcctataactactctgcagctgccactaactctacaggcacagtaactacactttatacaggagcacatgccaaagtgcctgggaggtgccaataaaatcaagaaataagaaaactacaaaaaaagatacggtattaaccttggacataattttttttagggaggcagctttcccacttttataaagggggttgtaaatctcaagaggtcatttgttccccatagcagcatatctcatttttaaattgaagcgaattaaataggattttactactcaacattcattatactgttaatctttgctgaaatatatgctaacaaatgttaagcaagggaaactgaagacttagtcatgtggattgttagcagtgatctgcattctgtaaaagaggtactttcccatgatgtaggcatgaagtggtgccagtaagcgtagagcggaaatgttgactttagttaacattgggtttagcatttccagtgcagcattatcagtgggcctttaaaaatacttcgtaagtacattagctttcactttgttgttaaattatagcagactcattatagagaacaagtttgccttgattttgtttaaaatgacttctgctaagcacccagaagataaaattgacatatttttataatataagcatactttttttgtacattgtgttcattcttgaataaaatgagttctgtgttggcttgtagatactaaaaagaaagtattgattttgattcaataaatgttttctttcaatcctggttggcctttcctttaaaaaaaaaaaaa

SEQ ID NO: 361 - protein, 84 aa, Homosapiens
MSEFWLCFNCCIAEQPQPKRRRRIDRSMIGEPTNFVHTAHVGSGDLFSGMNSVSSIQNQMQSKGGYGGGMPANVQMQLVDTKAG

SEQ ID NO: 362 - DNA, 3667 bp, Homosapiens
gctccgcccaacccgcgcgcgagcctgggcggggagggggagccaggaagctgcgagcgcgctggggagcgcagctgcaggcgttggggcggcaggagccgcggagccggcgctgagaggggctgcggccggagcgggcggctgagacaaaggcgacgatagggccagatttgagtgtgtgaatttttgagtgaaacctggaacccaaatgagaagaaatctgcaaggaataactactgacagtgaatctgcggtcatctgtatgcataatatggaatgttcttaacccagaagtagctgaatgtgttactccattgctgaggagtgactatctgttatagtccctgggtcaagacaacaatttttataccttcgtcgtggttcagaaaggagtctctgtagaaccagaagcaaagaaaggaaacaatccaaatttttctttattaaatcgactgtgtaagatacttgacttccaggaacaaaaacacggtgaaataataaaatttcatcttggcatcactggacatcatcgtattgaggagcgtatttttggaacttcccgagttgagatttggaaccttcattggtgctcatttactgtggactgtaagcatgagtgaattctggttgtgtttcaactgctgtattgcagaacagcctcagcctaaaaggcgacggcggattgacagaagtatgattggagagcccacaaactttgtgcatacagctcatgttggatcaggagacctgttcagtggaatgaattcagttagctccattcagaaccaaatgcagtccaagggaggttatggaggtggaatgcctgccaatgtccagatgcagctcgtggatacgaaggcgggatagccctggtcctttctccaaagtgtgatggcaccttgtccaccctgtcgtgattattccagtgagatgttactgttctgctctgaagaagatactgtcagacgaatcctgcatttccttcagctggcatgcatgcctttggactcatggacagagttctttggattgtcactgaattttcaatgtttaatcagtatggatctgatcttcgcatgatcttttttgtgaatgctaacaccattttgcagttttttttttctattttaaacatttttcttttcactgccgaccccctgccttacgattttattggaaagcaaggacctgctattatttgttaatttgccatcatttatgtatattttggaaggtatgagacccacaagcacaatgatcatttttatttgtttgtttgtttgaaacttcagcagaatagatatctgcatgctttatgaagttgttgcttcggtaagagcccatgggatgccagaaattaacatttctttgctgccatgggctgatgatgctgctattagataaagtttagctgtggcaccaagtcacatcattttcatagaaaaagattacttgtagcttattttagaagtatgaccttttggtctgtttgattgattgattagaattgcaataaaagaaaagcttgcattcataaggcattcattctgttgtaaatgttcaatatatttattttgagagcaaggacctgtggttgtaaacaggtgtggttacaggtgtggttatgtatctgagtgttgcggtcatactctcctccagtccaatcctgagcatcttcatcttattaattagctgttcgtttctttgtgcactcattcttttatttttacttctttttaatgttatggtatccagttgtttccagtagcagtttcttgaacttctggcctgtactactaactgcagacctccagagtcactggcctttctgtgctctacatattattttaggggccacatcagttgccaagagcaacatacataccgacctggctgaattattgccagtgaaaacaacctgtacgaagcctttgctcaggttctaaaatatgtttgtccttgcacgaattttgtatatttcaaatatttctgtaaaggtttcttcttttctgttagagtgtggtgttaagccagagtcagtggtttgtgttctcattaaaatgtttgtttaaatcctatgtccaattcaagcctatctaactacatttggtaggattaacatttcatataacaaatggggcttaattaaaaactttaacttggaataaaggaacagggatcactttatcttctgccttcatttaccttagtccaagattcttgcaaaacaggcaactgaacaaacattaggtttatgtaggtaaaatgtgaaagcatttctcctccactttttaaaatttaatttacccagtacagcggggcaccagattacttgatctttgtattttgcagttttgagcctttgtgtcaatcccaagcacagagaggatctgccaaggaaaaacatttgcatcttcggagtagacattttgcagtttgtttaataacaacttctaaagtaagttgaattcatccattgtcactgattcaccaagtggatgttgcattgtggaatttgcctgagtactgttgtcattctgctcagccaggcacggtcagtttcttggccagggacattgctatgtgctgtgtgcaagctctttagaagagagattggattttcttggcattatcagcactcatgctatttagtctacttctattttgactgactctttaaattagtacaatttttctacttgtcatataactcctggaacaatagtacgggaagccgtgatccttttccctgactcatgattttagtctttttccaaatcgctgttttttttttttttttttttttttttgctgctccaacgaccagcatgtgttggagcagatctccatggtaagccaaaagtggacttgtcagcctataactactctgcagctgccactaactctacaggcacagtaactacactttatacaggagcacatgccaaagtgcctgggaggtgccaataaaatcaagaaataagaaaactacaaaaaaagatacggtattaaccttggacataattttttttagggaggcagctttcccacttttataaagggggttgtaaatctcaagaggtcatttgttccccatagcagcatatctcatttttaaattgaagcgaattaaataggattttactactcaacattcattatactgttaatctttgctgaaatatatgctaacaaatgttaagcaagggaaactgaagacttagtcatgtggattgttagcagtgatctgcattctgtaaaagaggtactttcccatgatgtaggcatgaagtggtgccagtaagcgtagagcggaaatgttgactttagttaacattgggtttagcatttccagtgcagcattatcagtgggcctttaaaaatacttcgtaagtacattagctttcactttgttgttaaattatagcagactcattatagagaacaagtttgccttgattttgtttaaaatgacttctgctaagcacccagaagataaaattgacatatttttataatataagcatactttttttgtacattgtgttcattcttgaataaaatgagttctgtgttggcttgtagatactaaaaagaaagtattgattttgattcaataaatgttttctttcaatcctggttggcctttcctttaaaaaaaaaaaaa

SEQ ID NO: 363 - protein, 84 aa, Homosapiens; identical to SEQ ID NO: 361

SEQ ID NO: 364 - DNA, 6390 bp, Homosapiens
cccgcgcagacttgtctccggccagtcgcgcgtgggtagaggccttaggcgggcgttgcgaagggttgtttgctagagttcggaccttgttacggcgcgaagttccctccttggggcgggggaaaggtaccgcacccgctacctagtgtgaatgaactgtggcgtgggctgctaagggcaggctgcggagtacccgggccgtggccatgaactcacccgtggaccctggcgctaggcaggcgttgaggaagaagccacccgagcggactcccgaggacttaaatactatttattcttatcttcatggaatggaaatattatcaaatctcagggaacatcagcttagattaatgtctgcaagagcacgctatgagagatacagtggcaatcaggttctcttttgttcagaaacgattgccagatgttggtatatcctactttctggatctgtgcttgtgaaaggctccatggtcttgcctccttgcagttttggtaagcagtttggaggaaaaagaggatgtgattgtcttgtattagagccttcagaaatgattgtggtagagaatgccaaagataatgaagatagtattctacaaagagaaattcctgccagacaatcccgaagaagatttcggaaaattaactataaaggagagcgccaaaccattactgatgatgtggaggttaacagctatctttctcttccagctgatcttaccaagatgcatctcacagaaaaccctcatccacaggtgactcatgtgtcttctagtcagtctggttgtagcattgccagtgactctggaagcagcagtttatctgatatctatcaggctacggagagtgaggtaggagatgtagatttgacacgtcttccagaaggacctgttgattctgaggatgacgaagaggaagatgaagagattgatcgaacagatccattgcaggggcgagatcttgttcgagaatgtcttgaaaaagaacctgcagacaaaactgatgatgacattgaacaattgctggagtttatgcaccagctccctgcatttgcaaacatgaccatgtctgtaaggagagaactctgctcagtgatgatttttgaagtggtagagcaggctggagctattattcttgaagatgggcaagagcttgactcatggtatgttattttaaacggcactgtggaaatcagtcatccagatggaaaagttgaaaatttgtttatgggaaatagttttggaattactcccactctggataagcagtacatgcatggaattgtcaggactaaagtagatgattgtcagtttgtctgcatagcccagcaagattattggagaattttaaaccatgtggaaaaaaatacccataaagttgaggaagagggagaaattgttatggtacatgagcatcgggaactagaccggagtggaaccaggaaaggacacattgtgatcaaggcaacacctgagcgtctcataatgcatttaatagaagaacattccatcgtggatccaacttatatagaagattttctattaacttacaggacatttcttgaaagtcctttggatgttgggatcaaactattggaatggtttaagatcgacagcttaagagataaggtgacacggattgtattattatgggtaaataatcattttaatgattttgaaggtgaccctgctatgactcgatttctagaggaatttgaaaaaaatctggaagatacaaagatgaatggtcatctccggttattgaatattgcctgtgctgcaaaggctaagtggagacaggttgtgctgcaaaaggcttcccgcgagtcccctctacaattcagccttaatggagggagtgagaagggatttggtatttttgttgaaggagtagaacctggtagcaaagctgctgattcaggactgaaacgtggtgatcagattatggaagtaaatggacaaaactttgagaatattacatttatgaaagccgttgaaattttgaggaataatactcatcttgcacttactgtgaagaccaacatttttgtgttcaaagagttactttttaggactgaacaagagaaatctggtgttcctcatattcccaaaattgctgaaaaaaaaagtaatcgccattctatccagcatgtgccaggagatattgaacagacatcacaggagaaaggaagtaagaaagttaaagcaaatactgtttcaggtggaagaaacaaaatcaggaagattttggataaaacacgatttagtatcttgcctccaaagctatttagtgatggaggcctaagccaatcacaagatgacagcattgtgggaacaaggcactgtaggcatagtctggctataatgcccatccctggaacactctcatccagcagccctgatctcctgcagcctaccaccagtatgttggatttttccaatccttcagatatccctgatcaagttataagagttttcaaagtggatcagcaaagttgctacattatcatcagtaaagacaccacagctaaagaagtagtttttcatgctgttcatgaatttggtttgaccggtgcatccgacacatattctctctgtgaagtttctgttactcctgagggtgtcataaaacagagaagacttccagatcagttctccaaattagctgatagaattcaactcaatggaaggtattacttaaaaaataacatggaaacagaaaccttatgttcagatgaagatgctcaagaactagttaaggaaagccagctatccatgctgcagctcagtaccattgaggtggccacccagctgtcaatgagggactttgatttgtttcgtaatattgaaccgactgagtacatcgatgacctttttaagttaaattccaaaacaggaaatactcatttgaagaggtttgaggacattgtaaaccaagagacattctgggttgcctcagaaattttaactgaagcaaatcagctcaaacgaatgaagattattaagcattttattaaaattgcacttcattgtcgagaatgtaagaacttcaattccatgtttgcaataataagtggcttgaacctggcatctgtagcaagactcagaggaacttgggaaaagttaccaagcaaatacgagaaacatcttcaagatctacaagacatttttgatccatctagaaacatggcaaagtatagaaatattcttagtagtcaaagtatgcagcctccaattattccactcttccctgttgtcaagaaagatatgacatttctacatgaaggaaatgactccaaagtagatggtttagtaaactttgagaagttaagaatgatttccaaggaaatccgccaagttgttcgaatgacttctgctaacatggacccagctatgatgtttcgacagaggtcactgagtcaaggaagcacaaattcaaacatgctggatgttcagggaggtgctcacaaaaaaagggcacgccgcagctctctgcttaatgccaagaagctatatgaggatgcccaaatggcaaggaaggtgaagcagtatctttccagtctcgatgtagagacagatgaggagaagttccagatgatgtcattacagtgggagcctgcatatggtaccttgaccaagaatttaagtgagaaaagatcagccaaatcatctgaaatgtctccagtgcctatgaggtcagctggccaaacaactaaagcccacttgcatcaaccccacagagtaagccaggtgcttcaggtgccagctgttaatttgcaccccatcaggaagaagggacaaacaaaagaccctgcactgaatacaagtttacctcagaaagttttaggaacaactgaagaaataagtggtaagaagcatacagaagacactatttctgtggcgtcatctttacattctagtcctcctgcatctcctcaaggctcccctcacaaaggttacacacttattccatcagctaaatctgacaacttgtctgactccagccatagtgagatttcttcacggtccagcatcgtgagcaattgttctgttgactccatgtctgcagctctacaggatgaacggtgttcctctcaggccctggcagtccctgaatccactggggcattggaaaagacagagcacgcttcagggataggagatcatagtcaacatggccctgggtggacactcttgaagccatctctaatcaagtgtttagctgtctcatcgtctgtgagcaatgaagagatttctcaagagcatatcattatagaagcagctgacagtggtcgtggaagttggacttcgtgttcaagcagctcccatgacaacttccaaagccttccaaacccaaaaagctgggattttttgaactcttacagacatacccatttggatgaccccattgctgaagttgaacccactgactctgagccctattcctgttctaaaagctgctctagaacttgtgggcagtgtaaaggaagcctagagagaaagagttggacctcctccagttctctgtctgacacgtatgaaccaaactatgggacagttaaacggagagtattggagagcaccccagctgagtcatctgaaggcttggaccccaaggatgccactgacccagtttataaaactgtcacttcaagtacagaaaagggcttgattgtgtactgtgtcacctcacccaagaaggacgataggtatagggagccacctcccactcctccaggatatttggggatttctttagcggacctaaaggaaggaccccacacacacctaaaacctccagattatagtgtggcagtgcagaggtcaaagatgatgcataacagcctctctagactgccaccagcttctctcagtagcaacctcgtggcctgtgttccatcgaagattgtaactcagcctcagaggcataatttgcagccattccatcctaaactaggagatgtgactgatgcagatagcgaagcagatgaaaatgaacaagtttcagcagtctagcctttggatgacctatttgaaaaccactgaaagtcgtggaggaatgggcaagaaccacctcatgattctgcaggccattgctaacgaacagctcattgctacaaccagtccagaggttttattccctctactccgagcaatgaaatagacctgagttatgcttcctttcatttaatttctgcagataaatagtttcctgagcaatggatgctatgcctggataccagtctccactttgcacgccggaactgccttgggaccacagttacagaaaaaatgtaaactcagagtgatccttgtgtatattgctatagatttttctttaacaagctattttaaagataatggcattattatttccaagccatagcttgggctgaaggacaaattgaaattgtctgccaataccaaggatattcttgtatatttgaaaaataacttattatttgaattgttgtggttttgtttgtatttgagagctcttgttagctgatattcatgtttgaggtcataaaattgtctctggtctgaccaaacagaagtcatctttacagaggtgatatgcttgatctacacagagatgtgacttgatctgtagcaccaatacaatgtaggtctcagtttgagagaaataggaagccctttgcagttgaggtgttaggaacctgctggtcatggtgtggaaggccaaatgaagctgccacagggtttcttgtcagtcctttgggaaatgggagggagtagtttggggaggagggtgggaaccctaatttccacagaatgaaattttgatgttaaatgacatgtatacaaattcttccttaagtgaaagttatgctgcatcgaattgtaactgaaagtatagatccaacaaatagagactgggttctagagagttctggtctatagaaacccaaaactaaaatctctcataactcaagtatggaatactttttttaaagaaattcttatcatgggtgttgtaataatgaagacgaatttgactttatgcagtgttctgcagcatgcctcccccacatctcatagcaccaggttgtgtctgacctgacataccctgcagctctcagctggctgcagtaacattttgtgggagaaagaggagctggagttacagaaatgattgtctcttggttctcagtttttagcccttgagaggacatacttttccagcctcatgggtatggcactcttaattaaaatttcagtggctgtttactggatgaggcagatttttcacatttttgccaattaaatatattttatatatagtaaggttaattttttcagtttttttaatgtaaaagcaagtgaaattttaataaacttctgtaatttcccaaaaaaaaaaaaaaaaaaa

SEQ ID NO: 365 - protein, 1601 aa, Homosapiens
MNSPVDPGARQALRKKPPERTPEDLNTIYSYLHGMEILSNLREHQLRLMSARARYERYSGNQVLFCSETIARCWYILLSGSVLVKGSMVLPPCSFGKQFGGKRGCDCLVLEPSEMIVVENAKDNEDSILQREIPARQSRRRFRKINYKGERQTITDDVEVNSYLSLPADLTKMHLTENPHPQVTHVSSSQSGCSIASDSGSSSLSDIYQATESEVGDVDLTRLPEGPVDSEDDEEEDEEIDRTDPLQGRDLVRECLEKEPADKTDDDIEQLLEFMHQLPAFANMTMSVRRELCSVMIFEVVEQAGAIILEDGQELDSWYVILNGTVEISHPDGKVENLFMGNSFGITPTLDKQYMHGIVRTKVDDCQFVCIAQQDYWRILNHVEKNTHKVEEEGEIVMVHEHRELDRSGTRKGHIVIKATPERLIMHLIEEHSIVDPTYIEDFLLTYRTFLESPLDVGIKLLEWFKIDSLRDKVTRIVLLWVNNHFNDFEGDPAMTRFLEEFEKNLEDTKMNGHLRLLNIACAAKAKWRQVVLQKASRESPLQFSLNGGSEKGFGIFVEGVEPGSKAADSGLKRGDQIMEVNGQNFENITFMKAVEILRNNTHLALTVKTNIFVFKELLFRTEQEKSGVPHIPKIAEKKSNRHSIQHVPGDIEQTSQEKGSKKVKANTVSGGRNKIRKILDKTRFSILPPKLFSDGGLSQSQDDSIVGTRHCRHSLAIMPIPGTLSSSSPDLLQPTTSMLDFSNPSDIPDQVIRVFKVDQQSCYIIISKDTTAKEVVFHAVHEFGLTGASDTYSLCEVSVTPEGVIKQRRLPDQFSKLADRIQLNGRYYLKNNMETETLCSDEDAQELVKESQLSMLQLSTIEVATQLSMRDFDLFRNIEPTEYIDDLFKLNSKTGNTHLKRFEDIVNQETFWVASEILTEANQLKRMKIIKHFIKIALHCRECKNFNSMFAIISGLNLASVARLRGTWEKLPSKYEKHLQDLQDIFDPSRNMAKYRNILSSQSMQPPIIPLFPVVKKDMTFLHEGNDSKVDGLVNFEKLRMISKEIRQVVRMTSANMDPAMMFRQRSLSQGSTNSNMLDVQGGAHKKRARRSSLLNAKKLYEDAQMARKVKQYLSSLDVETDEEKFQMMSLQWEPAYGTLTKNLSEKRSAKSSEMSPVPMRSAGQTTKAHLHQPHRVSQVLQVPAVNLHPIRKKGQTKDPALNTSLPQKVLGTTEEISGKKHTEDTISVASSLHSSPPASPQGSPHKGYTLIPSAKSDNLSDSSHSEISSRSSIVSNCSVDSMSAALQDERCSSQALAVPESTGALEKTEHASGIGDHSQHGPGWTLLKPSLIKCLAVSSSVSNEEISQEHIIIEAADSGRGSWTSCSSSSHDNFQSLPNPKSWDFLNSYRHTHLDDPIAEVEPTDSEPYSCSKSCSRTCGQCKGSLERKSWTSSSSLSDTYEPNYGTVKRRVLESTPAESSEGLDPKDATDPVYKTVTSSTEKGLIVYCVTSPKKDDRYREPPPTPPGYLGISLADLKEGPHTHLKPPDYSVAVQRSKMMHNSLSRLPPASLSSNLVACVPSKIVTQPQRHNLQPFHPKLGDVTDADSEADENEQVSAV

SEQ ID NO: 366 - DNA, 675 bp, Homosapiens
atggtgcaaactaattgcgttgtctctttgttagccctcgcttaggagttacaggagagaaaagcctgcaagaaaataggtctagtgaagacacccaggatgagaagattgcatcgttgcgtgaatcagttactgatgacctccaggttgatagtagttcatcaaatagtgaactagtatcaggattaagtttgcaccatggtatggccagttctcttctgagctattcagtcacagactcttatgcagaatacaagagttttgaagagagctttccatcacctgaactgttcagaaaatcagattatttagactgggagtgtcccaacttggaagaacacatgcagtggaagaattctactcttctggataccagtaaagcagtagcgatagagaaggcaccacagttttcaaatgtctcagcaattttcagtacctcttcagaagactatcagaaatgccatagaaaaacagtgatgacagtagcagatcaaaatgtttctccaaaagcaaagtgtgcttcaaattcagaatcagataatgcagcttgtgagattttacttgctgagaaaacttgcccttcaacccctgaaaaaacaaagaaaaaagcaagtattgaagcagaataactacataaatcataatacatttcattaataaagaatatacttttaa

SEQ ID NO: 367 - protein, 141 aa, Homosapiens
MASSLLSYSVTDSYAEYKSFEESFPSPELFRKSDYLDWECPNLEEHMQWKNSTLLDTSKAVAIEKAPQFSNVSAIFSTSSEDYQKCHRKTVMTVADQNVSPKAKCASNSESDNAACEILLAEKTCPSTPEKTKKKASIEAE

SEQ ID NO: 368 - DNA, 3047 bp, Homosapiens
cggcggcggcggcgcggctactgctggggctgctgggctgcggggctgcggggctgcgggtcggggaggccgggccgggccgggccgggccccgctgaccgccatgctgaccttcttcctcgtgtcggggggctccctctggctattcgtagagtttgtcctctcacttctggagaagatgcagacacaggagatcctgaggatactgcgactgcctgagctaggtgacttgggacagtttttccgcagcctctcggccaccaccctcgtgagtatgggtgccctggctgccatccttgcctactggttcactcaccggccaaaggccttgcagccgccatgcaacctcctgatgcagtcagaagaagtagaggacagtggcggggcacggcgatctgtgattgggtctggccctcagctacttacccactactatgatgatgcccggaccatgtaccaggtgttccgccgtgggcttagcatctcagggaatgggccctgtcttggtttcaggaagcctaagcagccttaccagtggctgtcctaccaggaggtggccgacagggctgaatttctggggtccggacttctccagcacaattgtaaagcatgcactgatcagtttattggtgtttttgcacaaaatcggccagagtggatcattgtggagctggcctgctacacatattccatggtggtggtcccgctctatgacaccctgggccctggggctatccgctacatcatcaatacagcggacatcagcaccgtgattgtggacaaacctcagaaggctgtgcttctgctagagcatgtggagaggaaggagactccaggcctcaagctgatcatcctcatggacccattcgaagaagccctgaaagagagagggcagaagtgcggggtggtcattaagtccatgcaggccgtggaggactgtggccaagagaatcaccaggctcctgtgcccccgcagcctgatgacctctccattgtgtgtttcacaagcggcacgacagggaacccaaaaggtgcgatgctcacccatgggaacgtggtggctgatttctcaggctttctgaaagtgacagagaaagtgatctttccgagacaggacgatgtgctcatctccttcctgcctctggctcacatgtttgagagagtaatccagtctgtcgtctattgccacggagggcgtgttggcttcttccagggagatatccgccttctctcagatgacatgaaggctctatgccccaccatcttccctgtggtcccacgactgctgaaccggatgtacgacaagatcttcagccaggcaaacacaccattaaagcgctggctcctggagtttgcagcaaagcgtaagcaagccgaggtccggagtggaatcatcaggaatgatagtatctgggatgaactcttctttaataagattcaggccagtcttggtgggtgtgtgcggatgattgttactggagcagccccagcatcaccaacagttctgggatttctccgggcagctctagggtgccaggtttatgaaggttatggccaaactgagtgcacagctggatgtaccttcaccactcctggcgactggacctcagggcacgtaggggcgccacttccctgcaatcatatcaagctcgttgatgttgaggaactgaactactgggcctgcaaaggagagggagagatatgtgtgagaggaccaaatgtgttcaaaggctacttgaaagatccagacaggacgaaggaggccctggacagcgatggctggcttcacactggagacatcggaaaatggctgccggcaggaactcttaaaattattgatcggaaaaagcatatatttaaacttgctcagggagaatatgttgcacccgagaagattgagaacatctacatccggagccaacctgtggcgcaaatctatgtccatggggacagcttaaaggcctttttggtaggcattgttgtgcctgaccctgaagttatgccctcctgggcccagaagagaggaattgaaggaacatatgcagatctctgcacaaataaggatctgaagaaagccattttggaagatatggtgaggttaggaaaagaaagtggactccattcttttgagcaggttaaagccattcacatccattctgacatgttctcagttcaaaatggcttgctgacaccaacactaaaagctaagagacctgagctgagagagtacttcaaaaaacaaatagaagagctttactcaatctccatgtgaagttcaaggaaagttcttctcagtgtaatgaactgtctagcaatattatagttattcttgaaagtaatgagtcaaaatgacacagctgaaaatgaataagcatctgattttatgactgagccttttcctgtcccaagaggtctttaacaatattttctctatcatcaatgagtatattttatttttattataaaaatgatattgtggtggactgctaaaaatatcacaaatggcaatgtaaaaatcaagacattttctcaagaactgtgtaccactaaaagtaatatattgtcaatgttcacagaactattaaacataaaggaaaaacataagtgatatattctacttaattatttgtgaatcagtaaccagatgcagcaaatatctaggcaatgtggactacctcattcagtaactgattgtcaaaatcacaattaaatcagacttcaaaaattaaagctaggtgtatagaatcatgctaaaagaaaacatgataactcatagtctacgtaacttcagagtctttaaacatgacaatccacattgtcatatgtgaaaattttctctctgatttttactttcattcatgaaaaatgaaaattcagaaattctttttttcctttttgttttgagacggggtctgctctgtcacctaggctggagtgcagtggcttaatcatggctcattgcagtctccatctcctgggctcgagtgatcctcctgtctcacctcccaagtagctgagactacagtacaggcacatgccaccacacc

SEQ ID NO: 369 - protein, 722 aa, Homosapiens
MLTFFLVSGGSLWLFVEFVLSLLEKMQTQEILRILRLPELGDLGQFFRSLSATTLVSMGALAAILAYWFTHRPKALQPPCNLLMQSEEVEDSGGARRSVIGSGPQLLTHYYDDARTMYQVFRRGLSISGNGPCLGFRKPKQPYQWLSYQEVADRAEFLGSGLLQHNCKACTDQFIGVFAQNRPEWIIVELACYTYSMVVVPLYDTLGPGAIRYIINTADISTVIVDKPQKAVLLLEHVERKETPGLKLIILMDPFEEALKERGQKCGVVIKSMQAVEDCGQENHQAPVPPQPDDLSIVCFTSGTTGNPKGAMLTHGNVVADFSGFLKVTEKVIFPRQDDVLISFLPLAHMFERVIQSVVYCHGGRVGFFQGDIRLLSDDMKALCPTIFPVVPRLLNRMYDKIFSQANTPLKRWLLEFAAKRKQAEVRSGIIRNDSIWDELFFNKIQASLGGCVRMIVTGAAPASPTVLGFLRAALGCQVYEGYGQTECTAGCTFTTPGDWTSGHVGAPLPCNHIKLVDVEELNYWACKGEGEICVRGPNVFKGYLKDPDRTKEALDSDGWLHTGDIGKWLPAGTLKIIDRKKHIFKLAQGEYVAPEKIENIYIRSQPVAQIYVHGDSLKAFLVGIVVPDPEVMPSWAQKRGIEGTYADLCTNKDLKKAILEDMVRLGKESGLHSFEQVKAIHIHSDMFSVQNGLLTPTLKAKRPELREYFKKQIEELYSISM

SEQ ID NO: 370 - DNA, 3047 bp, Homosapiens
cggcggcggcggcgcggctactgctggggctgctgggctgcggggctgcggggctgcgggtcggggaggccgggccgggccgggccgggccccgctgaccgccatgctgaccttcttcctcgtgtcggggggctccctctggctattcgtagagtttgtcctctcacttctggagaagatgcagacacaggagatcctgaggatactgcgactgcctgagctaggtgacttgggacagtttttccgcagcctctcggccaccaccctcgtgagtatgggtgccctggctgccatccttgcctactggttcactcaccggccaaaggccttgcagccgccatgcaacctcctgatgcagtcagaagaagtagaggacagtggcggggcacggcgatctgtgattgggtctggccctcagctacttacccactactatgatgatgcccggaccatgtaccaggtgttccgccgtgggcttagcatctcagggaatgggccctgtcttggtttcaggaagcctaagcagccttaccagtggctgtcctaccaggaggtggccgacagggctgaatttctggggtccggacttctccagcacaattgtaaagcatgcactgatcagtttattggtgtttttgcacaaaatcggccagagtggatcattgtggagctggcctgctacacatattccatggtggtggtcccgctctatgacaccctgggccctggggctatccgctacatcatcaatacagcggacatcagcaccgtgattgtggacaaacctcagaaggctgtgcttctgctagagcatgtggagaggaaggagactccaggcctcaagctgatcatcctcatggacccattcgaagaagccctgaaagagagagggcagaagtgcggggtggtcattaagtccatgcaggccgtggaggactgtggccaagagaatcaccaggctcctgtgcccccgcagcctgatgacctctccattgtgtgtttcacaagcggcacgacagggaacccaaaaggtgcgatgctcacccatgggaacgtggtggctgatttctcaggctttctgaaagtgacagagagtcagtgggctcccacttgtgcggatgtgcacatttcctatttgcctttagcacacatgtttgagcgaatggtgcagtctgtcgtctattgccacggagggcgtgttggcttcttccagggagatatccgccttctctcagatgacatgaaggctctatgccccaccatcttccctgtggtcccacgactgctgaaccggatgtacgacaagatcttcagccaggcaaacacaccattaaagcgctggctcctggagtttgcagcaaagcgtaagcaagccgaggtccggagtggaatcatcaggaatgatagtatctgggatgaactcttctttaataagattcaggccagtcttggtgggtgtgtgcggatgattgttactggagcagccccagcatcaccaacagttctgggatttctccgggcagctctagggtgccaggtttatgaaggttatggccaaactgagtgcacagctggatgtaccttcaccactcctggcgactggacctcagggcacgtaggggcgccacttccctgcaatcatatcaagctcgttgatgttgaggaactgaactactgggcctgcaaaggagagggagagatatgtgtgagaggaccaaatgtgttcaaaggctacttgaaagatccagacaggacgaaggaggccctggacagcgatggctggcttcacactggagacatcggaaaatggctgccggcaggaactcttaaaattattgatcggaaaaagcatatatttaaacttgctcagggagaatatgttgcacccgagaagattgagaacatctacatccggagccaacctgtggcgcaaatctatgtccatggggacagcttaaaggcctttttggtaggcattgttgtgcctgaccctgaagttatgccctcctgggcccagaagagaggaattgaaggaacatatgcagatctctgcacaaataaggatctgaagaaagccattttggaagatatggtgaggttaggaaaagaaagtggactccattcttttgagcaggttaaagccattcacatccattctgacatgttctcagttcaaaatggcttgctgacaccaacactaaaagctaagagacctgagctgagagagtacttcaaaaaacaaatagaagagctttactcaatctccatgtgaagttcaaggaaagttcttctcagtgtaatgaactgtctagcaatattatagttattcttgaaagtaatgagtcaaaatgacacagctgaaaatgaataagcatctgattttatgactgagccttttcctgtcccaagaggtctttaacaatattttctctatcatcaatgagtatattttatttttattataaaaatgatattgtggtggactgctaaaaatatcacaaatggcaatgtaaaaatcaagacattttctcaagaactgtgtaccactaaaagtaatatattgtcaatgttcacagaactattaaacataaaggaaaaacataagtgatatattctacttaattatttgtgaatcagtaaccagatgcagcaaatatctaggcaatgtggactacctcattcagtaactgattgtcaaaatcacaattaaatcagacttcaaaaattaaagctaggtgtatagaatcatgctaaaagaaaacatgataactcatagtctacgtaacttcagagtctttaaacatgacaatccacattgtcatatgtgaaaattttctctctgatttttactttcattcatgaaaaatgaaaattcagaaattctttttttcctttttgttttgagacggggtctgctctgtcacctaggctggagtgcagtggcttaatcatggctcattgcagtctccatctcctgggctcgagtgatcctcctgtctcacctcccaagtagctgagactacagtacaggcacatgccaccacacc

SEQ ID NO: 371 - protein, 722 aa, Homosapiens
MLTFFLVSGGSLWLFVEFVLSLLEKMQTQEILRILRLPELGDLGQFFRSLSATTLVSMGALAAILAYWFTHRPKALQPPCNLLMQSEEVEDSGGARRSVIGSGPQLLTHYYDDARTMYQVFRRGLSISGNGPCLGFRKPKQPYQWLSYQEVADRAEFLGSGLLQHNCKACTDQFIGVFAQNRPEWIIVELACYTYSMVVVPLYDTLGPGAIRYIINTADISTVIVDKPQKAVLLLEHVERKETPGLKLIILMDPFEEALKERGQKCGVVIKSMQAVEDCGQENHQAPVPPQPDDLSIVCFTSGTTGNPKGAMLTHGNVVADFSGFLKVTESQWAPTCADVHISYLPLAHMFERMVQSVVYCHGGRVGFFQGDIRLLSDDMKALCPTIFPVVPRLLNRMYDKIFSQANTPLKRWLLEFAAKRKQAEVRSGIIRNDSIWDELFFNKIQASLGGCVRMIVTGAAPASPTVLGFLRAALGCQVYEGYGQTECTAGCTFTTPGDWTSGHVGAPLPCNHIKLVDVEELNYWACKGEGEICVRGPNVFKGYLKDPDRTKEALDSDGWLHTGDIGKWLPAGTLKIIDRKKHIFKLAQGEYVAPEKIENIYIRSQPVAQIYVHGDSLKAFLVGIVVPDPEVMPSWAQKRGIEGTYADLCTNKDLKKAILEDMVRLGKESGLHSFEQVKAIHIHSDMFSVQNGLLTPTLKAKRPELREYFKKQIEELYSISM

SEQ ID NO: 372 - DNA, 924 bp, Homosapiens
cagagccccacgaaggaccagaacaagacagagtgcctcctgccgatccaaacatgagccgcctgcccgtcctgctcctgctccaactcctggtccgccccggactccaagctcccatgacccagacaacgcccttgaagacaagctgggttaactgctctaacatgatcgatgaaattataacacacttaaagcagccacctttgcctttgctggacttcaacaacctcaatggggaagaccaagacattctgatggaaaataaccttcgaaggccaaacctggaggcattcaacagggctgtcaagagtttacagaacgcatcagcaattgagagcattcttaaaaatctcctgccatgtctgcccctggccacggccgcacccacgcgacatccaatccatatcaaggacggtgactggaatgaattccggaggaaactgacgttctatctgaaaacccttgagaatgcgcaggctcaacagacgactttgagcctcgcgatcttttgagtccaacgtccagctcgttctctgggccttctcaccacagagcctcgggacatcaaaaacagcagaacttctgaaacctctgggtcatctctcacacattccaggaccagaagcatttcaccttttcctgcggcatcagatgaattgttaattatctaatttctgaaatgtgcagctcccatttggccttgtgcggttgtgttctcatttttatcccattgagactatttatttatgtatgtatgtatttatttatttattgcctggagtgtgaactgtatttattttagcagaggagccatgtcctgctgcttctgcaaaaaactcagagtggggtggggagcatgttcatttgtacctcgagttttaaactggttcctagggatgtgtgagaataaactagactctgaac

SEQ ID NO: 373 - protein, 152 aa, Homosapiens
MSRLPVLLLLQLLVRPGLQAPMTQTTPLKTSWVNCSNMIDEIITHLKQPPLPLLDFNNLNGEDQDILMENNLRRPNLEAFNRAVKSLQNASAIESILKNLLPCLPLATAAPTRHPIHIKDGDWNEFRRKLTFYLKTLENAQAQQTTLSLAIF

SEQ ID NO: 374 - DNA, 781 bp, Homosapiens
acacagagagaaaggctaaagttctctggaggatgtggctgcagagcctgctgctcttgggcactgtggcctgcagcatctctgcacccgcccgctcgcccagccccagcacgcagccctgggagcatgtgaatgccatccaggaggcccggcgtctcctgaacctgagtagagacactgctgctgagatgaatgaaacagtagaagtcatctcagaaatgtttgacctccaggagccgacctgcctacagacccgcctggagctgtacaagcagggcctgcggggcagcctcaccaagctcaagggccccttgaccatgatggccagccactacaagcagcactgccctccaaccccggaaacttcctgtgcaacccagattatcacctttgaaagtttcaaagagaacctgaaggactttctgcttgtcatcccctttgactgctgggagccagtccaggagtgagaccggccagatgaggctggccaagccggggagctgctctctcatgaaacaagagctagaaactcaggatggtcatcttggagggaccaaggggtgggccacagccatggtgggagtggcctggacctgccctgggccacactgaccctgatacaggcatggcagaagaatgggaatattttatactgacagaaatcagtaatatttatatatttatatttttaaaatatttatttatttatttatttaagttcatattccatatttattcaagatgttttaccgtaataattattattaaaaatatgcttcta

SEQ ID NO: 375 - protein, 144 aa, Homosapiens
MWLQSLLLLGTVACSISAPARSPSPSTQPWEHVNAIQEARRLLNLSRDTAAEMNETVEVISEMFDLQEPTCLQTRLELYKQGLRGSLTKLKGPLTMMASHYKQHCPPTPETSCATQIITFESFKENLKDFLLVIPFDCWEPVQE

SEQ ID NO: 376 - DNA, 2582 bp, Homosapiens
agcgttgtttttccttggcagctgcggagacccgtgataattcgttaactaattcaacaaacgggacccttctgtgtgccagaaaccgcaagcagttgctaacccagtgggacaggcggattggaagagcgggaaggtcctggcccagagcagtgtggtgagcgctgtgctggaagggaatgcgggcagtgggtacttggtagagcactgactgcctccggccagaggacttcccggaggaggtgacccatgagctggagtggtcagaggaaggctggcaaaagggcatcgtggacagaggaacagcctatgtgagtgggagcagagaccttggccaatgccattccttatggccttgtagtggaagcaaggtgatggggaaggaacactgtaggggatagctgtccacggacgctgtctacaagaccctggagtgagataacgtgcctggtactgtgccctgcatgtgtaagatgcccagttgaccttcgcagcaggagcctggatcagggcacttcctgcctcaggtattgctggacagcccagacacttccctctgtgaccatgaaactctgggtgtctgcattgctgatggcctggtttggtgtcctgagctgtgtgcaggccgaattcttcacctctattgggcacatgactgacctgatttatgcagagaaagagctggtgcagtctctgaaagagtacatccttgtggaggaagccaagctttccaagattaagagctgggccaacaaaatggaagccttgactagcaagtcagctgctgatgctgagggctacctggctcaccctgtgaatgcctacaaactggtgaagcggctaaacacagactggcctgcgctggaggaccttgtcctgcaggactcagctgcaggttttatcgccaacctctctgtgcagcggcagttcttccccactgatgaggacgagataggagctgccaaagccctgatgagacttcaggacacatacaggctggacccaggcacaatttccagaggggaacttccaggaaccaagtaccaggcaatgctgagtgtggatgactgctttgggatgggccgctcggcctacaatgaaggggactattatcatacggtgttgtggatggagcaggtgctaaagcagcttgatgccggggaggaggccaccacaaccaagtcacaggtgctggactacctcagctatgctgtcttccagttgggtgatctgcaccgtgccctggagctcacccgccgcctgctctcccttgacccaagccacgaacgagctggagggaatctgcggtactttgagcagttattggaggaagagagagaaaaaacgttaacaaatcagacagaagctgagctagcaaccccagaaggcatctatgagaggcctgtggactacctgcctgagagggatgtttacgagagcctctgtcgtggggagggtgtcaaactgacaccccgtagacagaagaggcttttctgtaggtaccaccatggcaacagggccccacagctgctcattgcccccttcaaagaggaggacgagtgggacagcccgcacatcgtcaggtactacgatgtcatgtctgatgaggaaatcgagaggatcaaggagatcgcaaaacctaaacttgcacgagccaccgttcgtgatcccaagacaggagtcctcactgtcgccagctaccgggtttccaaaagctcctggctagaggaagatgatgaccctgttgtggcccgagtaaatcgtcggatgcagcatatcacagggttaacagtaaagactgcagaattgttacaggttgcaaattatggagtgggaggacagtatgaaccgcacttcgacttctctaggcgaccttttgacagcggcctcaaaacagaggggaataggttagcgacgtttcttaactacatgagtgatgtagaagctggtggtgccaccgtcttccctgatctgggggctgcaatttggcctaagaagggtacagctgtgttctggtacaacctcttgcggagcggggaaggtgactaccgaacaagacatgctgcctgccctgtgcttgtgggctgcaagtgggtctccaataagtggttccatgaacgaggacaggagttcttgagaccttgtggatcaacagaagttgactgacatccttttctgtccttccccttcctggtccttcagcccatgtcaacgtgacagacacctttgtatgttcctttgtatgttcctatcaggctgatttttggagaaatgaatgtttgtctggagcagagggagaccatactagggcgactcctgtgtgactgaagtcccagcccttccattcagcctgtgccatccctggccccaaggctaggatcaaagtggctgcagcagagttagctgtctagcgcctagcaaggtgcctttgtacctcaggtgttttaggtgtgagatgtttcagtgaaccaaagttctgataccttgtttacatgtttgtttttatggcatttctatctattgtggctttaccaaaaaataaaatgtccctaccagaagccttaaaaaaaaaaaaaaaaaaa

SEQ ID NO: 377 - protein, 533 aa, Homosapiens
MKLWVSALLMAWFGVLSCVQAEFFTSIGHMTDLIYAEKELVQSLKEYILVEEAKLSKIKSWANKMEALTSKSAADAEGYLAHPVNAYKLVKRLNTDWPALEDLVLQDSAAGFIANLSVQRQFFPTDEDEIGAAKALMRLQDTYRLDPGTISRGELPGTKYQAMLSVDDCFGMGRSAYNEGDYYHTVLWMEQVLKQLDAGEEATTTKSQVLDYLSYAVFQLGDLHRALELTRRLLSLDPSHERAGGNLRYFEQLLEEEREKTLTNQTEAELATPEGIYERPVDYLPERDVYESLCRGEGVKLTPRRQKRLFCRYHHGNRAPQLLIAPFKEEDEWDSPHIVRYYDVMSDEEIERIKEIAKPKLARATVRDPKTGVLTVASYRVSKSSWLEEDDDPVVARVNRRMQHITGLTVKTAELLQVANYGVGGQYEPHFDFSRRPFDSGLKTEGNRLATFLNYMSDVEAGGATVFPDLGAAIWPKKGTAVFWYNLLRSGEGDYRTRHAACPVLVGCKWVSNKWFHERGQEFLRPCGSTEVD

SEQ ID NO: 378 - DNA, 2110 bp, Homosapiens
aagggaggaggcgccgagctgaccgggcgacgccgcgggaggttctggaaacgccgggagctgcgagtgtccagacacttccctctgtgaccatgaaactctgggtgtctgcattgctgatggcctggtttggtgtcctgagctgtgtgcaggccgaattcttcacctctattgggcacatgactgacctgatttatgcagagaaagagctggtgcagtctctgaaagagtacatccttgtggaggaagccaagctttccaagattaagagctgggccaacaaaatggaagccttgactagcaagtcagctgctgatgctgagggctacctggctcaccctgtgaatgcctacaaactggtgaagcggctaaacacagactggcctgcgctggaggaccttgtcctgcaggactcagctgcaggttttatcgccaacctctctgtgcagcggcagttcttccccactgatgaggacgagataggagctgccaaagccctgatgagacttcaggacacatacaggctggacccaggcacaatttccagaggggaacttccaggaaccaagtaccaggcaatgctgagtgtggatgactgctttgggatgggccgctcggcctacaatgaaggggactattatcatacggtgttgtggatggagcaggtgctaaagcagcttgatgccggggaggaggccaccacaaccaagtcacaggtgctggactacctcagctatgctgtcttccagttgggtgatctgcaccgtgccctggagctcacccgccgcctgctctcccttgacccaagccacgaacgagctggagggaatctgcggtactttgagcagttattggaggaagagagagaaaaaacgttaacaaatcagacagaagctgagctagcaaccccagaaggcatctatgagaggcctgtggactacctgcctgagagggatgtttacgagagcctctgtcgtggggagggtgtcaaactgacaccccgtagacagaagaggcttttctgtaggtaccaccatggcaacagggccccacagctgctcattgcccccttcaaagaggaggacgagtgggacagcccgcacatcgtcaggtactacgatgtcatgtctgatgaggaaatcgagaggatcaaggagatcgcaaaacctaaacttgcacgagccaccgttcgtgatcccaagacaggagtcctcactgtcgccagctaccgggtttccaaaagctcctggctagaggaagatgatgaccctgttgtggcccgagtaaatcgtcggatgcagcatatcacagggttaacagtaaagactgcagaattgttacaggttgcaaattatggagtgggaggacagtatgaaccgcacttcgacttctctaggcgaccttttgacagcggcctcaaaacagaggggaataggttagcgacgtttcttaactacatgagtgatgtagaagctggtggtgccaccgtcttccctgatctgggggctgcaatttggcctaagaagggtacagctgtgttctggtacaacctcttgcggagcggggaaggtgactaccgaacaagacatgctgcctgccctgtgcttgtgggctgcaagtgggtctccaataagtggttccatgaacgaggacaggagttcttgagaccttgtggatcaacagaagttgactgacatccttttctgtccttccccttcctggtccttcagcccatgtcaacgtgacagacacctttgtatgttcctttgtatgttcctatcaggctgatttttggagaaatgaatgtttgtctggagcagagggagaccatactagggcgactcctgtgtgactgaagtcccagcccttccattcagcctgtgccatccctggccccaaggctaggatcaaagtggctgcagcagagttagctgtctagcgcctagcaaggtgcctttgtacctcaggtgttttaggtgtgagatgtttcagtgaaccaaagttctgataccttgtttacatgtttgtttttatggcatttctatctattgtggctttaccaaaaaataaaatgtccctaccagaagccttaaaaaaaaaaaaaaaaaaa

SEQ ID NO: 379 - protein, 533 aa, Homosapiens; identical to SEQ ID NO: 377

SEQ ID NO: 380 - DNA, 2588 bp, Homosapiens
agcgttgtttttccttggcagctgcggagacccgtgataattcgttaactaattcaacaaacgggacccttctgtgtgccagaaaccgcaagcagttgctaacccagtgggacaggcggattggaagagcgggaaggtcctggcccagagcagtgtggtgagcgctgtgctggaagggaatgcgggcagtgggtacttggtagagcactgactgcctccggccagaggacttcccggaggaggtgacccatgagctggagtggtcagaggaaggctggcaaaagggcatcgtggacagaggaacagcctatgtgagtgggagcagagaccttggccaatgccattccttatggccttgtagtggaagcaaggtgatggggaaggaacactgtaggggatagctgtccacggacgctgtctacaagaccctggagtgagataacgtgcctggtactgtgccctgcatgtgtaagatgcccagttgaccttcgcagcaggagcctggatcagggcacttcctgcctcaggtattgctggacagcccagacacttccctctgtgaccatgaaactctgggtgtctgcattgctgatggcctggtttggtgtcctgagctgtgtgcaggccgaattcttcacctctattgggcacatgactgacctgatttatgcagagaaagagctggtgcagtctctgaaagagtacatccttgtggaggaagccaagctttccaagattaagagctgggccaacaaaatggaagccttgactagcaagtcagctgctgatgctgagggctacctggctcaccctgtgaatgcctacaaactggtgaagcggctaaacacagactggcctgcgctggaggaccttgtcctgcaggactcagctgcaggttttatcgccaacctctctgtgcagcggcagttcttccccactgatgaggacgagataggagctgccaaagccctgatgagacttcaggacacatacaggctggacccaggcacaatttccagaggggaacttccaggaaccaagtaccaggcaatgctgagtgtggatgactgctttgggatgggccgctcggcctacaatgaaggggactattatcatacggtgttgtggatggagcaggtgctaaagcagcttgatgccggggaggaggccaccacaaccaagtcacaggtgctggactacctcagctatgctgtcttccagttgggtgatctgcaccgtgccctggagctcacccgccgcctgctctcccttgacccaagccacgaacgagctggagggaatctgcggtactttgagcagttattggaggaagagagagaaaaaacgttaacaaatcagacagaagctgagctagcaaccccagaaggcatctatgagaggcctgtggactacctgcctgagagggatgtttacgagagcctctgtcgtggggagggtgtcaaactgacaccccgtagacagaagaggcttttctgtaggtaccaccatggcaacagggccccacagctgctcattgcccccttcaaagaggaggacgagtgggacagcccgcacatcgtcaggtactacgatgtcatgtctgatgaggaaatcgagaggatcaaggagatcgcaaaacctaaacttgcacgagccaccgttcgtgatcccaagacaggagtcctcactgtcgccagctaccgggtttccaaaagctcctggctagaggaagatgatgaccctgttgtggcccgagtaaatcgtcggatgcagcatatcacagggttaacagtaaagactgcagaattgttacaggttgcaaattatggagtgggaggacagtatgaaccgcacttcgacttctctaggaatgatgagcgagatactttcaagcatttagggacggggaatcgtgtggctactttcttaaactacatgagtgatgtagaagctggtggtgccaccgtcttccctgatctgggggctgcaatttggcctaagaagggtacagctgtgttctggtacaacctcttgcggagcggggaaggtgactaccgaacaagacatgctgcctgccctgtgcttgtgggctgcaagtgggtctccaataagtggttccatgaacgaggacaggagttcttgagaccttgtggatcaacagaagttgactgacatccttttctgtccttccccttcctggtccttcagcccatgtcaacgtgacagacacctttgtatgttcctttgtatgttcctatcaggctgatttttggagaaatgaatgtttgtctggagcagagggagaccatactagggcgactcctgtgtgactgaagtcccagcccttccattcagcctgtgccatccctggccccaaggctaggatcaaagtggctgcagcagagttagctgtctagcgcctagcaaggtgcctttgtacctcaggtgttttaggtgtgagatgtttcagtgaaccaaagttctgataccttgtttacatgtttgtttttatggcatttctatctattgtggctttaccaaaaaataaaatgtccctaccagaagccttaaaaaaaaaaaaaaaaaaa

SEQ ID NO: 381 - protein, 535 aa, Homosapiens
MKLWVSALLMAWFGVLSCVQAEFFTSIGHMTDLIYAEKELVQSLKEYILVEEAKLSKIKSWANKMEALTSKSAADAEGYLAHPVNAYKLVKRLNTDWPALEDLVLQDSAAGFIANLSVQRQFFPTDEDEIGAAKALMRLQDTYRLDPGTISRGELPGTKYQAMLSVDDCFGMGRSAYNEGDYYHTVLWMEQVLKQLDAGEEATTTKSQVLDYLSYAVFQLGDLHRALELTRRLLSLDPSHERAGGNLRYFEQLLEEEREKTLTNQTEAELATPEGIYERPVDYLPERDVYESLCRGEGVKLTPRRQKRLFCRYHHGNRAPQLLIAPFKEEDEWDSPHIVRYYDVMSDEEIERIKEIAKPKLARATVRDPKTGVLTVASYRVSKSSWLEEDDDPVVARVNRRMQHITGLTVKTAELLQVANYGVGGQYEPHFDFSRNDERDTFKHLGTGNRVATFLNYMSDVEAGGATVFPDLGAAIWPKKGTAVFWYNLLRSGEGDYRTRHAACPVLVGCKWVSNKWFHERGQEFLRPCGSTEVD

SEQ ID NO: 382 - DNA, 2256 bp, Homosapiens
tcagagtccggctcaggctccggctgcggctccagcccgcgatgccccattccgtgaccctgcgcgggccttcgccctggggcttccgcctggtgggcggccgggacttcagcgcgcccctcaccatctcacgggtccatgctggcagcaaggctgcattggctgccctgtgcccaggagacctgatccaggccatcaatggtgagagcacagagctcatgacacacctggaggcacagaaccgcatcaagggctgccacgatcacctcacactgtctgtgagcaggcctgagggcaggagctggcccagtgcccctgatgacagcaaggctcaggcacacaggatccacatcgatcctgagatccaggacggcagcccaacaaccagcaggcggccctcaggcaccgggactgggccagaagatggcagaccaagcctgggatctccatatggacaaccccctcgctttccagtccctcacaatggcagcagcgaggccaccctgccagcccagatgagcaccctgcatgtgtctccaccccccagcgctgacccagccagaggcctcccgcggagccgggactgcagagtcgacctgggctccgaggtgtacaggatgctgcgggagccagccgagcccgtggccgcggagcccaagcagtcaggctccttccgctacttgcagggcatgctagaggccggcgagggcggggattggcccgggcctggcggcccccggaacctcaagcccacggccagcaagctgggcgctccgctgagcggcctgcaggggctgcccgagtgcacgcgctgcggccacggcatcgtgggcaccatcgtcaaggcacgggacaagctctaccatcccgagtgcttcatgtgcagtgactgcggcctgaacctcaagcagcgtggttacttctttctggacgagcggctctactgtgagagccacgccaaggcgcgcgtgaagccgcccgagggctacgacgtggtggcggtgtaccccaatgccaaggtggaactcgtctgagctgggaccctgctcccacgcctgcttcttaaggtccctgctcggccggtgtaaatatgtttcaccctgtccctctaataaagctcctctgctccaccttgaacctgtcacctggcctgccaccctcctgcgcaggccatgcatggctcccgagtacagtagtatctgcttaggtgccaggcatgtcctaggctctgggtgcagtagtgagcaggacgggtaccatgctgccctgaaggggccacagcctgggtggaaggcagacctgaatcacaacgggccagctctagtaatacgaaggtgaggtctgggatgctgcgtgcggcgcgacgacaggaggtatgacctgggtggggtcagggaaagtcttagctgagaactaagagatgagggaggcacaaactctgcacgggggaactgtgtgtgcaaaggtgagctgggggcgagaaaggcctctgtggccgtcatcggcactagcgggttgggggtggtggtggggtgctggcagcctcaggagcgatcgctcccctggagagggtgattgagtgtggagatcaccggggccgccgcgggccgtctgcacttctgttccaggtttttctggcattttctgttccaggtttcttccacccacgagcactttattctcctccgagacccccttttcttccccttcctctctcccaccagggggcgcgcttaaatttccagacagagaccagaaggaaggtttagaaagaaaagaacacttgcccagggcagctttgccctccaagaggctccctcctgtctctaagtcaattccacccctcctcgaagtcccggcttccacccctctcctcagagtcccggcgtttacctcgtggtgtgtttgccttgggcctttcatgccccggctgcacacatcgtctgtgaattgtggctgttcactcccgaggatgtgtcctagactccgggtcgcgtggatctaccctctagtttacttgctcgggagaagaaactgactcgttttatttagtgcctatttagcgagcccagagtaacgtacatttgtgctgttttcaattttgtgctatcgcaaatcacaaaaaaactgttatcaattcacattcatcatcagcacgagacccatttccttgtgctcctgccagctcaggatattatgtttcttttttcatttttgccagtctgttaagtaaaatgtcatatgcgtttgttttaa

SEQ ID NO: 383 - protein, 330 aa, Homosapiens
MPHSVTLRGPSPWGFRLVGGRDFSAPLTISRVHAGSKAALAALCPGDLIQAINGESTELMTHLEAQNRIKGCHDHLTLSVSRPEGRSWPSAPDDSKAQAHRIHIDPEIQDGSPTTSRRPSGTGTGPEDGRPSLGSPYGQPPRFPVPHNGSSEATLPAQMSTLHVSPPPSADPARGLPRSRDCRVDLGSEVYRMLREPAEPVAAEPKQSGSFRYLQGMLEAGEGGDWPGPGGPRNLKPTASKLGAPLSGLQGLPECTRCGHGIVGTIVKARDKLYHPECFMCSDCGLNLKQRGYFFLDERLYCESHAKARVKPPEGYDVVAVYPNAKVELV

SEQ ID NO: 384 - DNA, 2214 bp, Homosapiens
cctgtttcccaggaacggtccccggcttcgcgccccaatttctaacagcctgcctgtcccccgggaacgttctaacatccttggggagcgccccagctacaagacactgtcctgagaacgctgtcatcacccgtagttgcaagtttcggagcggcagtgggaagcatgcgggactacgacgaggtgatcgccttcctgggcgagtgggggcccttccagcgcctcatcttcttcctgctcagcgccagcatcatccccaatggcttcaatggtatgtcagtcgtgttcctggcggggaccccggagcaccgctgtcgagtgccggacgccgcgaacctgagcagcgcctggcgcaacaacagtgtcccgctgcggctgcgggacggccgcgaggtgccccacagctgcagccgctaccggctcgccaccatcgccaacttctcggcgctcgggctggagccggggcgcgacgtggacctggggcagctggagcaggagagctgcctggatggctgggagttcagccaggacgtctacctgtccaccgtcgtgaccgagtggaatctggtgtgtgaggacaactggaaggtgcccctcaccacctccctgttcttcgtaggcgtgctcctcggctccttcgtgtccgggcagctgtcagacaggtttggcaggaagaacgttctcttcgcaaccatggctgtacagactggcttcagcttcctgcagattttctccatcagctgggagatgttcactgtgttatttgtcatcgtgggcatgggccagatctccaactatgtggtagccttcatactaggaacagaaattcttggcaagtcagttcgtattatattctctacattaggagtgtgcacattttttgcagttggctatatgctgctgccactgtttgcttacttcatcagagactggcggatgctgctgctggcgctgacggtgccgggagtgctgtgtgtcccgctgtggtggttcattcctgaatctccccgatggctgatatcccagagaagatttagagaggctgaagatatcatccaaaaagctgcaaaaatgaacaacatagctgtaccagcagtgatatttgattctgtggaggagctaaatcccctgaagcagcagaaagctttcattctggacctgttcaggactcggaatattgccataatgaccattatgtctttgctgctatggatgctgacctcagtgggttactttgctctgtctctggatgctcctaatttacatggagatgcctacctgaactgtttcctctctgccttgattgaaattccagcttacattacagcctggctgctattgcgaaccctgcccaggcgttatatcatagctgcagtactgttctggggaggaggtgtgcttctcttcattcaactggtacctgtggattattacttcttatccattggtctggtcatgctgggaaaatttgggatcacctctgctttctccatgctgtatgtcttcactgctgagctctacccaaccctggtcaggaacatggcggtgggggtcacatccacggcctccagagtgggcagcatcattgccccctactttgtttacctcggtgcttacaacagaatgctgccctacatcgtcatgggtagtctgactgtcctgattggaatcctcaccctttttttccctgaaagtttgggaatgactcttccagaaaccttagagcagatgcagaaagtgaaatggttcagatctgggaaaaaaacaagagactcaatggagacagaagaaaatcccaaggttctaataactgcattctgaaaaaatatctaccccatttggtgaagtgaaaaacagaaaaataagaccctgtggagaaattcgttgttcccactgaaatggactgactgtaacgattgacaccaaaatgaaccttgctatcaagaaatgctcgtcatacagtaaactctggatgattcttccagataatgtccttgctttacaaaccaaccatttctagagagtctccttactcattaattcaatgaaatggattggtaagatgtcttgaaaacatgttagtcaaggactggtaaaatacatataaagattaacactcatttccaatcatacaaatactatccaaataaaaataacatcattgtattaacgcaaatattaggtgacaacaaaaaaaaaaaaaaaaaaaaaaaa

SEQ ID NO: 385 - protein, 551 aa, Homosapiens
MRDYDEVIAFLGEWGPFQRLIFFLLSASIIPNGFNGMSVVFLAGTPEHRCRVPDAANLSSAWRNNSVPLRLRDGREVPHSCSRYRLATIANFSALGLEPGRDVDLGQLEQESCLDGWEFSQDVYLSTVVTEWNLVCEDNWKVPLTTSLFFVGVLLGSFVSGQLSDRFGRKNVLFATMAVQTGFSFLQIFSISWEMFTVLFVIVGMGQISNYVVAFILGTEILGKSVRIIFSTLGVCTFFAVGYMLLPLFAYFIRDWRMLLLALTVPGVLCVPLWWFIPESPRWLISQRRFREAEDIIQKAAKMNNIAVPAVIFDSVEELNPLKQQKAFILDLFRTRNIAIMTIMSLLLWMLTSVGYFALSLDAPNLHGDAYLNCFLSALIEIPAYITAWLLLRTLPRRYIIAAVLFWGGGVLLFIQLVPVDYYFLSIGLVMLGKFGITSAFSMLYVFTAELYPTLVRNMAVGVTSTASRVGSIIAPYFVYLGAYNRMLPYIVMGSLTVLIGILTLFFPESLGMTLPETLEQMQKVKWFRSGKKTRDSMETEENPKVLITAF

SEQ ID NO: 386 - DNA, 3252 bp, Homosapiens
gcggcccaggcccgcaaccttccctggtcgtgcgccctatgtaaggccagccgcggcaggaccaaggcggcggtgtcagctcgcgagcctaccctccgcggacggtcttgggtcgcctgctgcctggcttgcctggtcggcggcgggtgccccgcgcgcacgcgcaaagcccgccgcgttccccgaccccaggccgcgctctgtgggcctctgagggcggcatgcgggactacgacgaggtgaccgccttcctgggcgagtgggggcccttccagcgcctcatcttcttcctgctcagcgccagcatcatccccaatggcttcaccggcctgtcctccgtgttcctgatagcgaccccggagcaccgctgccgggtgccggacgccgcgaacctgagcagcgcctggcgcaaccacactgtcccactgcggctgcgggacggccgcgaggtgccccacagctgccgccgctaccggctcgccaccatcgccaacttctcggcgcttgggctggagccggggcgcgacgtggacctggggcagctggagcaggagagctgtctggatggctgggagttcagtcaggacgtctacctgtccaccattgtgaccgagtggaacctggtgtgtgaggacgactggaaggccccactcacaatctccttgttcttcgtgggtgtgctgttgggctccttcatttcagggcagctgtcagacaggtttggccggaagaatgtgctgttcgtgaccatgggcatgcagacaggcttcagcttcctgcagatcttctcgaagaattttgagatgtttgtcgtgctgtttgtccttgtaggcatgggccagatctccaactatgtggcagcatttgtcctggggacagaaattcttggcaagtcagttcgtataatattctctacgttaggagtgtgcatattttatgcatttggctacatggtgctgccactgtttgcttacttcatccgagactggcggatgctgctggtggcgctgacgatgccgggggtgctatgcgtggcactctggtggttcatccctgagtccccccgatggctcatctctcagggacgatttgaagaggcagaggtgatcatccgcaaggctgccaaagccaatgggattgttgtgccttccactatctttgacccgagtgagttacaagacctaagttccaagaagcagcagtcccacaacattctggatctgcttcgaacctggaatatccggatggtcaccatcatgtccataatgctgtggatgaccatatcagtgggctattttgggctttcgcttgatactcctaacttgcatggggacatctttgtgaactgcttcctttcagcgatggttgaagtcccagcatatgtgttggcctggctgctgctgcaatatttgccccggcgctattccatggccactgccctcttcctgggtggcagtgtccttctcttcatgcagctggtacccccagacttgtattatttggctacagtcctggtgatggtgggcaagtttggagtcacggctgccttttccatggtctacgtgtacacagccgagctgtatcccacagtggtgagaaacatgggtgtgggagtcagctccacagcatcccgcctgggcagcatcctgtctccctacttcgtttaccttggtgcctacgaccgcttcctgccctacattctcatgggaagtctgaccatcctgacagccatcctcaccttgtttctcccagagagcttcggtaccccactcccagacaccattgaccagatgctaagagtcaaaggaatgaaacacagaaaaactccaagtcacacaaggatgttaaaagatggtcaagaaaggcccacaatccttaaaagcacagccttctaacatcgcttccagtaagggagaaactgaagaggaaagactgtcttgccagaaatggccagcttgtgcagactccgagtccttcagtgacaaaggcctttgctgtttgtcctcttgacctgtgtctgacttgctcctggatgggcacccacactcagaggctacatatggccctagagcaccaccttcctctagggacactggggctacctacagacaacttcatctaagtcctaactattacaatgatggactcagcacctccaaagcagttaatttttcactagaaccagtgagatctggaggaatgtgagaagcatatgctaaatgtacattttaattttagactacttgaaaaggcccctaataaggctagaggtctaagtcccccacccctttccccactcccctctagtggtgaactttagaggaaaaggaagtaattgcacaaggagtttgattcttaccttttctcagttacagaggacattaactggatcattgcttccccagggcaggagagcgcagagctagggaaagtgaaaggtaatgaagatggagcagaatgagcagatgcagatcaccagcaaagtgcactgatgtgtgagctcttaagaccactcagcatgacgactgagtagacttgtttacatctgatcaaagcactgggcttgtccaggctcataataaatgctccattgaatctactattcttgttttccactgctgtggaaacctccttgctactatagcgtcttatgtatggtttaaaggaaatttatcaggtgagagagatgagcaacgttgtcttttctctcaaagctgtaatgtgggttttgttttattgtttatttgtttgttgttgtatccttttctccttgttatttgcccttcagaatgcacttgggaaaggctggttccttagcctcctggtttgtgtctttttttttttttttttaaacacagaatcactctggcaattgtctgcagctgccactggtgcaaggccttaccagccctagcctctagcacttctctaagtgccaaaaacagtgtcattgtgtgtgttcctttcttgatacttagtcatgggaggatattacaaaaaagaaatttaaattgtgttcatagtctttcagagtagctcactttagtcctgtaactttattgggtgatattttgtgttcagtgtaattgtcttctctttgctgattatgttaccatggtactcctaaagcatatgcctcacctggttaaaaaagaacaaacatgtttttgtgaaagctactgaagtgccttgggaaatgagaaagttttaataagtaaaatgattttttaaatatcaaaaaaaaaaaaaaaa

SEQ ID NO: 387 - protein, 557 aa, Homosapiens
MRDYDEVTAFLGEWGPFQRLIFFLLSASIIPNGFTGLSSVFLIATPEHRCRVPDAANLSSAWRNHTVPLRLRDGREVPHSCRRYRLATIANFSALGLEPGRDVDLGQLEQESCLDGWEFSQDVYLSTIVTEWNLVCEDDWKAPLTISLFFVGVLLGSFISGQLSDRFGRKNVLFVTMGMQTGFSFLQIFSKNFEMFVVLFVLVGMGQISNYVAAFVLGTEILGKSVRIIFSTLGVCIFYAFGYMVLPLFAYFIRDWRMLLVALTMPGVLCVALWWFIPESPRWLISQGRFEEAEVIIRKAAKANGIVVPSTIFDPSELQDLSSKKQQSHNILDLLRTWNIRMVTIMSIMLWMTISVGYFGLSLDTPNLHGDIFVNCFLSAMVEVPAYVLAWLLLQYLPRRYSMATALFLGGSVLLFMQLVPPDLYYLATVLVMVGKFGVTAAFSMVYVYTAELYPTVVRNMGVGVSSTASRLGSILSPYFVYLGAYDRFLPYILMGSLTILTAILTLFLPESFGTPLPDTIDQMLRVKGMKHRKTPSHTRMLKDGQERPTILKSTAF

SEQ ID NO: 388 - DNA, 2025 bp, Homosapiens
agaatgcagcggccgccagcctggagcgcgggccctggggccgcaacccgcgccgggcgaggtggcagcacaccctgggccccccactccccgccgcaagtcctgaggatggccagcagagaaacaagaaaatggactccctggctgctggagagttgaatgccagccaccagccatgggtgccagagtttgtagcctattggaggaaaacacaccaagggaatcttcaaactcttcttctccactggctcctgctgtgctcctgtctccatcacctgtataatgcttcctgccatcctaccttccccgtggagtacagccatgctgtctgctgcttacagccaagattctggaaagaaatgtctcctttttcctcgtcatcaaccactcatttattcagcaagtgtttcttttacacttgcctgtgctgggcatggcagcaatgcagcagtgaacaaaaccaccagccctgctctcatgcagcttataatcaagtagagagacagacataaatgattaatagatgctcctgtaatggcggttgtgaggtgtgctgccacagcccagccacacacgccagttcccttctctgcacatgtacatgtctgctcatccttcccacctgaactcatgtgccacctcacttatgccccttcccaatgccgcacccacacaacagggtgtccctctgtgcccacagcagcccttgggtataactgttccccacagaggctgaaccccaagggcagagtccaggccacactcaccacggagacccctgcctggcacagagcccagcccagcagagatgctcagaagatgaatgaaagtccctgctgagattgatccaatctgtttgtgaacatctctggggtccaagaattcacggctttctttttctttagagagccttttgtttctttttgccattatatactatatttgggttagggcacaacaatgtgaatatacttaatactgaactctacacttgaaaatggttaagatggtaaagttttaagttatatgtattttgccacaattttttaaaatgcagagcataggtacaaagaaggaaaaaaagggggcaaggtccattttattgagaaataaagaacaaagggttcaattcagagaggattggattttaaaacgtaatttagattagggaaatgcaaatgaaaaccataataagtaagataccacttcacatctgttaggatggctattttaaaacaacaaaaacaacctgaaaataagtgttggcaaggatgtgaagaaatagatacccttgtgcattgctattgggaacgtaaaatcatgcagcctttgttgaaaacaatgtggtggttcctcaaaaacttagttatcatatgatcccgcagttccacttctaggaatatacccaaaagaattgaaagcagggactcaaagtgatatttgtacaccagtgtttgtagcagtattattcacaatagccaaaaggtggaaacaacccagatgtccatgacaagaggagtggataaacaaaatatggtgaatatgtacaatggaacataattcagctttaaaaaggaatgaaattctggtacatgttataacatagatgaaccttaaaaacattatgctaagtgaaataagccagacacagaaggaaaaataccagatgatcccacttatatgaggtacctagaatagtgaaattcatagagacagaaagtagaaggatggttgccaggggctggaaggaggaagaacagggagatactgcttagtggatgcagagtttatgttgagggtgatgaaaaagttctggagatggatggtggtgatggctgcacaacagtgagaatgtacttcatactatggaactctgcacttaaaaatggttaaaatggatgtagacattttatgtctattttgccataacaagaaagtaatttgggtgtattttagagattttagaaaatactgtaagcacaagaggaaaaaaattaaaatcattcgcaatcaccaggtagagac

SEQ ID NO: 389 - protein, 126 aa, Homosapiens
MDSLAAGELNASHQPWVPEFVAYWRKTHQGNLQTLLLHWLLLCSCLHHLYNASCHPTFPVEYSHAVCCLQPRFWKEMSPFSSSSTTHLFSKCFFYTCLCWAWQQCSSEQNHQPCSHAAYNQVERQT

SEQ ID NO: 390 - DNA, 2035 bp, Homosapiens
cgagccccgccgaaccgaggccacccggagccgtgcccagtccacgccggccgtgcccggcggccttaagaaccaggcaacctctgccttcttccctcttccactcggagtcgcgctccgcgcgccctcactgcagcccctgcgtcgccgggaccctcgcgcgcgaccagccgaatcgctcctgcagcagagccaacatgcccatcactcggatgcgcatgagaccctggctagagatgcagattaattccaaccaaatcccggggctcatctggattaataaagaggagatgatcttccagatcccatggaagcatgctgccaagcatggctgggacatcaacaaggatgcctgtttgttccggagctgggccattcacacaggccgatacaaagcaggggaaaaggagccagatcccaagacgtggaaggccaactttcgctgtgccatgaactccctgccagatatcgaggaggtgaaagaccagagcaggaacaagggcagctcagctgtgcgagtgtaccggatgcttccacctctcaccaagaaccagagaaaagaaagaaagtcgaagtccagccgagatgctaagagcaaggccaagaggaagtcatgtggggattccagccctgataccttctctgatggactcagcagctccactctgcctgatgaccacagcagctacacagttccaggctacatgcaggacttggaggtggagcaggccctgactccagcactgtcgccatgtgctgtcagcagcactctccccgactggcacatcccagtggaagttgtgccggacagcaccagtgatctgtacaacttccaggtgtcacccatgccctccacctctgaagctacaacagatgaggatgaggaagggaaattacctgaggacatcatgaagctcttggagcagtcggagtggcagccaacaaacgtggatgggaaggggtacctactcaatgaacctggagtccagcccacctctgtctatggagactttagctgtaaggaggagccagaaattgacagcccagggggggatattgggctgagtctacagcgtgtcttcacagatctgaagaacatggatgccacctggctggacagcctgctgaccccagtccggttgccctccatccaggccattccctgtgcaccgtagcagggcccctgggcccctcttattcctctaggcaagcaggacctggcatcatggtggatatggtgcagagaagctggacttctgtgggcccctcaacagccaagtgtgaccccactgccaagtggggatgggcctccctccttgggtcattgacctctcagggcctggcaggccagtgtctgggtttttcttgtggtgtaaagctggccctgcctcctgggaagatgaggttctgagaccagtgtatcaggtcagggacttggacaggagtcagtgtctggctttttcctctgagcccagctgcctggagagggtctcgctgtcactggctggctcctaggggaacagaccagtgaccccagaaaagcataacaccaatcccagggctggctctgcactaagcgaaaattgcactaaatgaatctcgttccaaagaactaccccttttcagctgagccctggggactgttccaaagccagtgaatgtgaaggaaactcccctccttcggggcaatgctccctcagcctcagaggagctctaccctgctccctgctttggctgaggggcttgggaaaaaaacttggcactttttcgtgtggatcttgccacatttctgatcagaggtgtacactaacatttcccccgagctcttggcctttgcatttatttatacagtgccttgctcggggcccaccaccccctcaagccccagcagccctcaacaggcccagggagggaagtgtgagcgccttggtatgacttaaaattggaaatgtcatctaaccattaagtcatgtgtgaacacataaggacgtgtgtaaatatgtacatttgtctttttataaaaagtaaaattgtt

SEQ ID NO: 391 - protein, 325 aa, Homosapiens
MPITRMRMRPWLEMQINSNQIPGLIWINKEEMIFQIPWKHAAKHGWDINKDACLFRSWAIHTGRYKAGEKEPDPKTWKANFRCAMNSLPDIEEVKDQSRNKGSSAVRVYRMLPPLTKNQRKERKSKSSRDAKSKAKRKSCGDSSPDTFSDGLSSSTLPDDHSSYTVPGYMQDLEVEQALTPALSPCAVSSTLPDWHIPVEVVPDSTSDLYNFQVSPMPSTSEATTDEDEEGKLPEDIMKLLEQSEWQPTNVDGKGYLLNEPGVQPTSVYGDFSCKEEPEIDSPGGDIGLSLQRVFTDLKNMDATWLDSLLTPVRLPSIQAIPCAP

SEQ ID NO: 392 - DNA, 816 bp, Homosapiens
atgcactttctttgccaaaggcaaacgcagaacgtttcagagccatgaggatgcttctgcatttgagtttgctagctcttggagctgcctacgtgtatgccatccccacagaaattcccacaagtgcattggtgaaagagaccttggcactgctttctactcatcgaactctgctgatagccaatgagactctgaggattcctgttcctgtacataaaaatcaccaactgtgcactgaagaaatctttcagggaataggcacactggagagtcaaactgtgcaagggggtactgtggaaagactattcaaaaacttgtccttaataaagaaatacattgacggccaaaaaaaaaagtgtggagaagaaagacggagagtaaaccaattcctagactacctgcaagagtttcttggtgtaatgaacaccgagtggataatagaaagttgagactaaactggtttgttgcagccaaagattttggaggagaaggacattttactgcagtgagaatgagggccaagaaagagtcaggccttaattttcagtataatttaacttcagagggaaagtaaatatttcaggcatactgacactttgccagaaagcataaaattcttaaaatatatttcagatatcagaatcattgaagtattttcctccaggcaaaattgatatacttttttcttatttaacttaacattctgtaaaatgtctgttaacttaatagtatttatgaaatggttaagaatttggtaaattagtatttatttaatgttatgttgtgttctaataaaacaaaaatagacaactgttc

SEQ ID NO: 393 - protein, 134 aa, Homosapiens
MRMLLHLSLLALGAAYVYAIPTEIPTSALVKETLALLSTHRTLLIANETLRIPVPVHKNHQLCTEEIFQGIGTLESQTVQGGTVERLFKNLSLIKKYIDGQKKKCGEERRRVNQFLDYLQEFLGVMNTEWIIES

SEQ ID NO: 394 - DNA, 5891 bp, Homosapiens
ccaggagagcggcgtggacgcgtgcgggcctagaggcccacgtgatccgcagggcggccgaggcaggaagctgtgagtgcgcggttgcggggtcgcattgtggctacggctttgcgtccccggcgggcagccccaggctggtccccgcctccgctctccccaccggcggggaaagcagctggtgtgggaggaaaggctccatcccccgccccctctctcccgctgttggctggcaggatcttttggcagtcctgtggcctcgctccccgcccggatcctcctgaccctgagattcgcgggtctcacgtcccgtgcacgccttgcttcggcctcagttaagcctttgtggactccaggtccctggtgagattagaaacgtttgcaaacatgtcccggatcgaaaagatgagcattctgggcgtgcggagttttggaatagaggacaaagataagcaaattatcactttcttcagcccccttacaattttggttggacccaatggggcgggaaagacgaccatcattgaatgtctaaaatatatttgtactggagatttccctcctggaaccaaaggaaatacatttgtacacgatcccaaggttgctcaagaaacagatgtgagagcccagattcgtctgcaatttcgtgatgtcaatggagaacttatagctgtgcaaagatctatggtgtgtactcagaaaagcaaaaagacagaatttaaaactctggaaggagtcattactagaacaaagcatggtgaaaaggtcagtctgagctctaagtgtgcagaaattgaccgagaaatgatcagttctcttggggtttccaaggctgtgctaaataatgtcattttctgtcatcaagaagattctaattggcctttaagtgaaggaaaggctttgaagcaaaagtttgatgagattttttcagcaacaagatacattaaagccttagaaacacttcggcaggtacgtcagacacaaggtcagaaagtaaaagaatatcaaatggaactaaaatatctgaagcaatataaggaaaaagcttgtgagattcgtgatcagattacaagtaaggaagcccagttaacatcttcaaaggaaattgtcaaatcctatgagaatgaacttgatccattgaagaatcgtctaaaagaaattgaacataatctctctaaaataatgaaacttgacaatgaaattaaagccttggatagccgaaagaagcaaatggagaaagataatagtgaactggaagagaaaatggaaaaggtttttcaagggactgatgagcaactaaatgacttatatcacaatcaccagagaacagtaagggagaaagaaaggaaattggtagactgtcatcgtgaactggaaaaactaaataaagaatctaggcttctcaatcaggaaaaatcagaactgcttgttgaacagggtcgtctacagctgcaagcagatcgccatcaagaacatatccgagctagagattcattaattcagtctttggcaacacagctagaattggatggctttgagcgtggaccattcagtgaaagacagattaaaaattttcacaaacttgtgagagagagacaagaaggggaagcaaaaactgccaaccaactgatgaatgactttgcagaaaaagagactctgaaacaaaaacagatagatgagataagagataagaaaactggactgggaagaataattgagttaaaatcagaaatcctaagtaagaagcagaatgagctgaaaaatgtgaagtatgaattacagcagttggaaggatcttcagacaggattcttgaactggaccaggagctcataaaagctgaacgtgagttaagcaaggctgagaaaaacagcaatgtagaaaccttaaaaatggaagtaataagtctccaaaatgaaaaagcagacttagacaggaccctgcgtaaacttgaccaggagatggagcagttaaaccatcatacaacaacacgtacccaaatggagatgctgaccaaagacaaagctgacaaagatgaacaaatcagaaaaataaaatctaggcacagtgatgaattaacctcactgttgggatattttcccaacaaaaaacagcttgaagactggctacatagtaaatcaaaagaaattaatcagaccagggacagacttgccaaattgaacaaggaactagcttcatctgagcagaataaaaatcatataaataatgaactaaaaagaaaggaagagcagttgtccagttacgaagacaagctgtttgatgtttgtggtagccaggattttgaaagtgatttagacaggcttaaagaggaaattgaaaaatcatcaaaacagcgagccatgctggctggagccacagcagtttactcccagttcattactcagctaacagacgaaaaccagtcatgttgccccgtttgtcagagagtttttcagacagaggctgagttacaagaagtcatcagtgatttgcagtctaaactgcgacttgctccagataaactcaagtcaacagaatcagagctaaaaaaaaaggaaaagcggcgtgatgaaatgctgggacttgtgcccatgaggcaaagcataattgatttgaaggagaaggaaataccagaattaagaaacaaactgcagaatgtcaatagagacatacagcgcctaaagaacgacatagaagaacaagaaacactcttgggtacaataatgcctgaagaagaaagtgccaaagtatgcctgacagatgttacaattatggagaggttccagatggaacttaaagatgttgaaagaaaaattgcacaacaagcagctaagctacaaggaatagacttagatcgaactgtccaacaagtcaaccaggagaaacaagagaaacagcacaagttagacacagtttctagtaagattgaattgaatcgtaagcttatacaggaccagcaggaacagattcaacatctaaaaagtacaacaaatgagctaaaatctgagaaacttcagatatccactaatttgcaacgtcgtcagcaactggaggagcagactgtggaattatccactgaagttcagtctttgtacagagagataaaggatgctaaagagcaggtaagccctttggaaacaacattggaaaagttccagcaagaaaaagaagaattaatcaacaaaaaaaatacaagcaacaaaatagcacaggataaactgaatgatattaaagagaaggttaaaaatattcatggctatatgaaagacattgagaattatattcaagatgggaaagacgactataagaagcaaaaagaaactgaacttaataaagtaatagctcaactaagtgaatgcgagaaacacaaagaaaagataaatgaagatatgagactcatgagacaagatattgatacacagaagatacaagaaaggtggctacaagataaccttactttaagaaaaagaaatgaggaactaaaagaagttgaagaagaaagaaaacaacatttgaaggaaatgggtcaaatgcaggttttgcaaatgaaaagtgaacatcagaagttggaagagaacatagacaatataaaaagaaatcataatttggcattagggcgacagaaaggttatgaagaagaaattattcattttaagaaagaacttcgagaaccacaatttcgggatgctgaggaaaagtatagagaaatgatgattgttatgaggacaacagaacttgtgaacaaggatctggatatttattataagactcttgaccaagcaataatgaaatttcacagtatgaaaatggaagaaatcaataaaattatacgtgacctgtggcgaagtacctatcgtggacaagatattgaatacatagaaatacggtctgatgccgatgaaaatgtatcagcttctgataaaaggcggaattataactaccgagtggtgatgctgaagggagacacagccttggatatgcgaggacgatgcagtgctggacaaaaggtattagcctcactcatcattcgcctggccctggctgaaacgttctgcctcaactgtggcatcattgccttggatgagccaacaacaaatcttgaccgagaaaacattgaatctcttgcacatgctctggttgagataataaaaagtcgctcacagcagcgtaacttccagcttctggtaatcactcatgatgaagattttgtggagcttttaggacgttctgaatatgtggagaaattctacaggattaaaaagaacatcgatcagtgctcagagattgtgaaatgcagtgttagctccctgggattcaatgttcattaaaaatatccaagatttaaatgccatagaaatgtaggtcctcagaaagtgtataataagaaacttatttctcatatcaacttagtcaataagaaaatatattctttcaaaggaacattgtgtctaggattttggatgttgagaggttctaaaatcatgaaacttgtttcactgaaaattggacagattgcctgtttctgatttgctgctcttcatcccattccaggcagcctctgtcaggccttcagggttcagcagtacagccgagactcgactctgtgcctccctccccagtgcaaatgcatgcttcttctcaaagcactgttgagaaggagataattactgccttgaaaatttatggttttggtatttttttaaatcatagttaaatgttacctctgaatttacttccttgcatgtggtttgaaaaactgagtattaatatctgaggatgaccagaaatggtgagatgtatgtttggctctgcttttaactttataaatccagtgacctctctctctgggacttggtttccccaactaaaatttgaagtagttgaatggggtctcaaagtttgacaggaaccttaagtaatcatctaagtcagtacccaccaccttcttctcctacatatcccttccagatggtcatccagactcagagctctctctacagagaggaaattctccactgtgcacacccacctttggaaagctctgaccacttgaggcctgatctgcccatcgtgaagaagcctgtaacactcctctgcgtctatcctgtgtagcatactggcttcaccatcaatcctgattcctctctaagtgggcattgccatgtggaaggcaagccaggctcactcacagagtcaaggcctgctccctgtagggtccaaccagacctggaagaacaggcctctccatttgctcttcagatgccacttctaagaaaagcctaatcacagtttttcctggaattgccagctgacatcttgaatccttccattccacacagaatgcaaccaagtcacacgcttttgaattatgctttgtagagttttgtcattcagagtcagccaggaccataccgggtcttgattcagtcacatggcatggttttgtgccatctgtagctataatgagcatgtttgcctagacagcttttctcaactgggtccagaagagaattaagccctaaggtcctaaggcatctatctgtgctaggttaaatggttggcccccaaagatagacaggtcctgatttctagaacccgtgactgttactttatacagcaaaggaaactttgcagatgtgattaaagctaaggaccttaagacagagtatcctgggggtggtggtggggtgggggggggtcctaaatgtaatcacgagtaagattaagagcaaatcaattctagtcatatattaaacatccacaataaccaagatatttttatcccaagaatgcaagatttcagaaaatgaaaaatctgttgataaatccatcactataataaaaccgaaggtgaaaaaaattctgaaaaaaaaaaaaaaaaaaaaaaaaaaaa

SEQ ID NO: 395 - protein, 1312 aa, Homosapiens
MSRIEKMSILGVRSFGIEDKDKQIITFFSPLTILVGPNGAGKTTIIECLKYICTGDFPPGTKGNTFVHDPKVAQETDVRAQIRLQFRDVNGELIAVQRSMVCTQKSKKTEFKTLEGVITRTKHGEKVSLSSKCAEIDREMISSLGVSKAVLNNVIFCHQEDSNWPLSEGKALKQKFDEIFSATRYIKALETLRQVRQTQGQKVKEYQMELKYLKQYKEKACEIRDQITSKEAQLTSSKEIVKSYENELDPLKNRLKEIEHNLSKIMKLDNEIKALDSRKKQMEKDNSELEEKMEKVFQGTDEQLNDLYHNHQRTVREKERKLVDCHRELEKLNKESRLLNQEKSELLVEQGRLQLQADRHQEHIRARDSLIQSLATQLELDGFERGPFSERQIKNFHKLVRERQEGEAKTANQLMNDFAEKETLKQKQIDEIRDKKTGLGRIIELKSEILSKKQNELKNVKYELQQLEGSSDRILELDQELIKAERELSKAEKNSNVETLKMEVISLQNEKADLDRTLRKLDQEMEQLNHHTTTRTQMEMLTKDKADKDEQIRKIKSRHSDELTSLLGYFPNKKQLEDWLHSKSKEINQTRDRLAKLNKELASSEQNKNHINNELKRKEEQLSSYEDKLFDVCGSQDFESDLDRLKEEIEKSSKQRAMLAGATAVYSQFITQLTDENQSCCPVCQRVFQTEAELQEVISDLQSKLRLAPDKLKSTESELKKKEKRRDEMLGLVPMRQSIIDLKEKEIPELRNKLQNVNRDIQRLKNDIEEQETLLGTIMPEEESAKVCLTDVTIMERFQMELKDVERKIAQQAAKLQGIDLDRTVQQVNQEKQEKQHKLDTVSSKIELNRKLIQDQQEQIQHLKSTTNELKSEKLQISTNLQRRQQLEEQTVELSTEVQSLYREIKDAKEQVSPLETTLEKFQQEKEELINKKNTSNKIAQDKLNDIKEKVKNIHGYMKDIENYIQDGKDDYKKQKETELNKVIAQLSECEKHKEKINEDMRLMRQDIDTQKIQERWLQDNLTLRKRNEELKEVEEERKQHLKEMGQMQVLQMKSEHQKLEENIDNIKRNHNLALGRQKGYEEEIIHFKKELREPQFRDAEEKYREMMIVMRTTELVNKDLDIYYKTLDQAIMKFHSMKMEEINKIIRDLWRSTYRGQDIEYIEIRSDADENVSASDKRRNYNYRVVMLKGDTALDMRGRCSAGQKVLASLIIRLALAETFCLNCGIIALDEPTTNLDRENIESLAHALVEIIKSRSQQRNFQLLVITHDEDFVELLGRSEYVEKFYRIKKNIDQCSEIVKCSVSSLGFNVH

SEQ ID NO: 396 - DNA, 5826 bp, Homosapiens
ccaggagagcggcgtggacgcgtgcgggcctagaggcccacgtgatccgcagggcggccgaggcaggaagctgtgagtgcgcggttgcggggtcgcattgtggctacggctttgcgtccccggcgggcagccccaggctggtccccgcctccgctctccccaccggcggggaaagcagctggtgtgggaggaaaggctccatcccccgccccctctctcccgctgttggctggcaggatcttttggcagtcctgtggcctcgctccccgcccggatcctcctgaccctgagattcgcgggtctcacgtcccgtgcacgccttgcttcggcctcagttaagcctttgtggactccaggtccctggtgagattagaaacgtttgcaaacatgtcccggatcgaaaagatgagcattctgggcgtgcggagttttggaatagaggacaaagataagcaaattatcactttcttcagcccccttacaattttggttggacccaatggggcgggaaagacgaccatcattgaatgtctaaaatatatttgtactggagatttccctcctggaaccaaaggaaatacatttgtacacgatcccaaggttgctcaagaaacagatgtgagagcccagattcgtctgcaatttcgtgatgtcaatggagaacttatagctgtgcaaagatctatggcatggtgaaaaggtcagtctgagctctaagtgtgcagaaattgaccgagaaatgatcagttctcttggggtttccaaggctgtgctaaataatgtcattttctgtcatcaagaagattctaattggcctttaagtgaaggaaaggctttgaagcaaaagtttgatgagattttttcagcaacaagatacattaaagccttagaaacacttcggcaggtacgtcagacacaaggtcagaaagtaaaagaatatcaaatggaactaaaatatctgaagcaatataaggaaaaagcttgtgagattcgtgatcagattacaagtaaggaagcccagttaacatcttcaaaggaaattgtcaaatcctatgagaatgaacttgatccattgaagaatcgtctaaaagaaattgaacataatctctctaaaataatgaaacttgacaatgaaattaaagccttggatagccgaaagaagcaaatggagaaagataatagtgaactggaagagaaaatggaaaaggtttttcaagggactgatgagcaactaaatgacttatatcacaatcaccagagaacagtaagggagaaagaaaggaaattggtagactgtcatcgtgaactggaaaaactaaataaagaatctaggcttctcaatcaggaaaaatcagaactgcttgttgaacagggtcgtctacagctgcaagcagatcgccatcaagaacatatccgagctagagattcattaattcagtctttggcaacacagctagaattggatggctttgagcgtggaccattcagtgaaagacagattaaaaattttcacaaacttgtgagagagagacaagaaggggaagcaaaaactgccaaccaactgatgaatgactttgcagaaaaagagactctgaaacaaaaacagatagatgagataagagataagaaaactggactgggaagaataattgagttaaaatcagaaatcctaagtaagaagcagaatgagctgaaaaatgtgaagtatgaattacagcagttggaaggatcttcagacaggattcttgaactggaccaggagctcataaaagctgaacgtgagttaagcaaggctgagaaaaacagcaatgtagaaaccttaaaaatggaagtaataagtctccaaaatgaaaaagcagacttagacaggaccctgcgtaaacttgaccaggagatggagcagttaaaccatcatacaacaacacgtacccaaatggagatgctgaccaaagacaaagctgacaaagatgaacaaatcagaaaaataaaatctaggcacagtgatgaattaacctcactgttgggatattttcccaacaaaaaacagcttgaagactggctacatagtaaatcaaaagaaattaatcagaccagggacagacttgccaaattgaacaaggaactagcttcatctgagcagaataaaaatcatataaataatgaactaaaaagaaaggaagagcagttgtccagttacgaagacaagctgtttgatgtttgtggtagccaggattttgaaagtgatttagacaggcttaaagaggaaattgaaaaatcatcaaaacagcgagccatgctggctggagccacagcagtttactcccagttcattactcagctaacagacgaaaaccagtcatgttgccccgtttgtcagagagtttttcagacagaggctgagttacaagaagtcatcagtgatttgcagtctaaactgcgacttgctccagataaactcaagtcaacagaatcagagctaaaaaaaaaggaaaagcggcgtgatgaaatgctgggacttgtgcccatgaggcaaagcataattgatttgaaggagaaggaaataccagaattaagaaacaaactgcagaatgtcaatagagacatacagcgcctaaagaacgacatagaagaacaagaaacactcttgggtacaataatgcctgaagaagaaagtgccaaagtatgcctgacagatgttacaattatggagaggttccagatggaacttaaagatgttgaaagaaaaattgcacaacaagcagctaagctacaaggaatagacttagatcgaactgtccaacaagtcaaccaggagaaacaagagaaacagcacaagttagacacagtttctagtaagattgaattgaatcgtaagcttatacaggaccagcaggaacagattcaacatctaaaaagtacaacaaatgagctaaaatctgagaaacttcagatatccactaatttgcaacgtcgtcagcaactggaggagcagactgtggaattatccactgaagttcagtctttgtacagagagataaaggatgctaaagagcaggtaagccctttggaaacaacattggaaaagttccagcaagaaaaagaagaattaatcaacaaaaaaaatacaagcaacaaaatagcacaggataaactgaatgatattaaagagaaggttaaaaatattcatggctatatgaaagacattgagaattatattcaagatgggaaagacgactataagaagcaaaaagaaactgaacttaataaagtaatagctcaactaagtgaatgcgagaaacacaaagaaaagataaatgaagatatgagactcatgagacaagatattgatacacagaagatacaagaaaggtggctacaagataaccttactttaagaaaaagaaatgaggaactaaaagaagttgaagaagaaagaaaacaacatttgaaggaaatgggtcaaatgcaggttttgcaaatgaaaagtgaacatcagaagttggaagagaacatagacaatataaaaagaaatcataatttggcattagggcgacagaaaggttatgaagaagaaattattcattttaagaaagaacttcgagaaccacaatttcgggatgctgaggaaaagtatagagaaatgatgattgttatgaggacaacagaacttgtgaacaaggatctggatatttattataagactcttgaccaagcaataatgaaatttcacagtatgaaaatggaagaaatcaataaaattatacgtgacctgtggcgaagtacctatcgtggacaagatattgaatacatagaaatacggtctgatgccgatgaaaatgtatcagcttctgataaaaggcggaattataactaccgagtggtgatgctgaagggagacacagccttggatatgcgaggacgatgcagtgctggacaaaaggtattagcctcactcatcattcgcctggccctggctgaaacgttctgcctcaactgtggcatcattgccttggatgagccaacaacaaatcttgaccgagaaaacattgaatctcttgcacatgctctggttgagataataaaaagtcgctcacagcagcgtaacttccagcttctggtaatcactcatgatgaagattttgtggagcttttaggacgttctgaatatgtggagaaattctacaggattaaaaagaacatcgatcagtgctcagagattgtgaaatgcagtgttagctccctgggattcaatgttcattaaaaatatccaagatttaaatgccatagaaatgtaggtcctcagaaagtgtataataagaaacttatttctcatatcaacttagtcaataagaaaatatattctttcaaaggaacattgtgtctaggattttggatgttgagaggttctaaaatcatgaaacttgtttcactgaaaattggacagattgcctgtttctgatttgctgctcttcatcccattccaggcagcctctgtcaggccttcagggttcagcagtacagccgagactcgactctgtgcctccctccccagtgcaaatgcatgcttcttctcaaagcactgttgagaaggagataattactgccttgaaaatttatggttttggtatttttttaaatcatagttaaatgttacctctgaatttacttccttgcatgtggtttgaaaaactgagtattaatatctgaggatgaccagaaatggtgagatgtatgtttggctctgcttttaactttataaatccagtgacctctctctctgggacttggtttccccaactaaaatttgaagtagttgaatggggtctcaaagtttgacaggaaccttaagtaatcatctaagtcagtacccaccaccttcttctcctacatatcccttccagatggtcatccagactcagagctctctctacagagaggaaattctccactgtgcacacccacctttggaaagctctgaccacttgaggcctgatctgcccatcgtgaagaagcctgtaacactcctctgcgtctatcctgtgtagcatactggcttcaccatcaatcctgattcctctctaagtgggcattgccatgtggaaggcaagccaggctcactcacagagtcaaggcctgctccctgtagggtccaaccagacctggaagaacaggcctctccatttgctcttcagatgccacttctaagaaaagcctaatcacagtttttcctggaattgccagctgacatcttgaatccttccattccacacagaatgcaaccaagtcacacgcttttgaattatgctttgtagagttttgtcattcagagtcagccaggaccataccgggtcttgattcagtcacatggcatggttttgtgccatctgtagctataatgagcatgtttgcctagacagcttttctcaactgggtccagaagagaattaagccctaaggtcctaaggcatctatctgtgctaggttaaatggttggcccccaaagatagacaggtcctgatttctagaacccgtgactgttactttatacagcaaaggaaactttgcagatgtgattaaagctaaggaccttaagacagagtatcctgggggtggtggtggggtgggggggggtcctaaatgtaatcacgagtaagattaagagcaaatcaattctagtcatatattaaacatccacaataaccaagatatttttatcccaagaatgcaagatttcagaaaatgaaaaatctgttgataaatccatcactataataaaaccgaaggtgaaaaaaattctgaaaaaaaaaaaaaaaaaaaaaaaaaaaa

SEQ ID NO: 397 - protein, 1173 aa, Homosapiens
MISSLGVSKAVLNNVIFCHQEDSNWPLSEGKALKQKFDEIFSATRYIKALETLRQVRQTQGQKVKEYQMELKYLKQYKEKACEIRDQITSKEAQLTSSKEIVKSYENELDPLKNRLKEIEHNLSKIMKLDNEIKALDSRKKQMEKDNSELEEKMEKVFQGTDEQLNDLYHNHQRTVREKERKLVDCHRELEKLNKESRLLNQEKSELLVEQGRLQLQADRHQEHIRARDSLIQSLATQLELDGFERGPFSERQIKNFHKLVRERQEGEAKTANQLMNDFAEKETLKQKQIDEIRDKKTGLGRIIELKSEILSKKQNELKNVKYELQQLEGSSDRILELDQELIKAERELSKAEKNSNVETLKMEVISLQNEKADLDRTLRKLDQEMEQLNHHTTTRTQMEMLTKDKADKDEQIRKIKSRHSDELTSLLGYFPNKKQLEDWLHSKSKEINQTRDRLAKLNKELASSEQNKNHINNELKRKEEQLSSYEDKLFDVCGSQDFESDLDRLKEEIEKSSKQRAMLAGATAVYSQFITQLTDENQSCCPVCQRVFQTEAELQEVISDLQSKLRLAPDKLKSTESELKKKEKRRDEMLGLVPMRQSIIDLKEKEIPELRNKLQNVNRDIQRLKNDIEEQETLLGTIMPEEESAKVCLTDVTIMERFQMELKDVERKIAQQAAKLQGIDLDRTVQQVNQEKQEKQHKLDTVSSKIELNRKLIQDQQEQIQHLKSTTNELKSEKLQISTNLQRRQQLEEQTVELSTEVQSLYREIKDAKEQVSPLETTLEKFQQEKEELINKKNTSNKIAQDKLNDIKEKVKNIHGYMKDIENYIQDGKDDYKKQKETELNKVIAQLSECEKHKEKINEDMRLMRQDIDTQKIQERWLQDNLTLRKRNEELKEVEEERKQHLKEMGQMQVLQMKSEHQKLEENIDNIKRNHNLALGRQKGYEEEIIHFKKELREPQFRDAEEKYREMMIVMRTTELVNKDLDIYYKTLDQAIMKFHSMKMEEINKIIRDLWRSTYRGQDIEYIEIRSDADENVSASDKRRNYNYRVVMLKGDTALDMRGRCSAGQKVLASLIIRLALAETFCLNCGIIALDEPTTNLDRENIESLAHALVEIIKSRSQQRNFQLLVITHDEDFVELLGRSEYVEKFYRIKKNIDQCSEIVKCSVSSLGFNVH

SEQ ID NO: 398 - DNA, 1282 bp, Homosapiens
aagccacccagcctatgcatccgctcctcaatcctctcctgttggcactgggcctcatggcgcttttgttgaccacggtcattgctctcacttgccttggcggctttgcctccccaggccctgtgcctccctctacagccctcagggagctcattgaggagctggtcaacatcacccagaaccagaaggctccgctctgcaatggcagcatggtatggagcatcaacctgacagctggcatgtactgtgcagccctggaatccctgatcaacgtgtcaggctgcagtgccatcgagaagacccagaggatgctgagcggattctgcccgcacaaggtctcagctgggcagttttccagcttgcatgtccgagacaccaaaatcgaggtggcccagtttgtaaaggacctgctcttacatttaaagaaactttttcgcgagggacagttcaactgaaacttcgaaagcatcattatttgcagagacaggacctgactattgaagttgcagattcatttttctttctgatgtcaaaaatgtcttgggtaggcgggaaggagggttagggaggggtaaaattccttagcttagacctcagcctgtgctgcccgtcttcagcctagccgacctcagccttccccttgcccagggctcagcctggtgggcctcctctgtccagggccctgagctcggtggacccagggatgacatgtccctacacccctcccctgccctagagcacactgtagcattacagtgggtgccccccttgccagacatgtggtgggacagggacccacttcacacacaggcaactgaggcagacagcagctcaggcacacttcttcttggtcttatttattattgtgtgttatttaaatgagtgtgtttgtcaccgttggggattggggaagactgtggctgctagcacttggagccaagggttcagagactcagggccccagcactaaagcagtggacaccaggagtccctggtaataagtactgtgtacagaattctgctacctcactggggtcctggggcctcggagcctcatccgaggcagggtcaggagaggggcagaacagccgctcctgtctgccagccagcagccagctctcagccaacgagtaatttattgtttttccttgtatttaaatattaaatatgttagcaaagagttaatatatagaagggtaccttgaacactgggggaggggacattgaacaagttgtttcattgactatcaaactgaagccagaaataaagttggtgacagat

SEQ ID NO: 399 - protein, 146 aa, Homosapiens
MHPLLNPLLLALGLMALLLTTVIALTCLGGFASPGPVPPSTALRELIEELVNITQNQKAPLCNGSMVWSINLTAGMYCAALESLINVSGCSAIEKTQRMLSGFCPHKVSAGQFSSLHVRDTKIEVAQFVKDLLLHLKKLFREGQFN

SEQ ID NO: 400 - DNA, 921 bp, Homosapiens
ttctatgcaaagcaaaaagccagcagcagccccaagctgataagattaatctaaagagcaaattatggtgtaatttcctatgctgaaactttgtagttaattttttaaaaaggtttcattttcctattggtctgatttcacaggaacattttacctgtttgtgaggcattttttctcctggaagagaggtgctgattggccccaagtgactgacaatctggtgtaacgaaaatttccaatgtaaactcattttccctcggtttcagcaattttaaatctatatatagagatatctttgtcagcattgcatcgttagcttctcctgataaactaattgcctcacattgtcactgcaaatcgacacctattaatgggtctcacctcccaactgcttccccctctgttcttcctgctagcatgtgccggcaactttgtccacggacacaagtgcgatatcaccttacaggagatcatcaaaactttgaacagcctcacagagcagaagactctgtgcaccgagttgaccgtaacagacatctttgctgcctccaagaacacaactgagaaggaaaccttctgcagggctgcgactgtgctccggcagttctacagccaccatgagaaggacactcgctgcctgggtgcgactgcacagcagttccacaggcacaagcagctgatccgattcctgaaacggctcgacaggaacctctggggcctggcgggcttgaattcctgtcctgtgaaggaagccaaccagagtacgttggaaaacttcttggaaaggctaaagacgatcatgagagagaaatattcaaagtgttcgagctgaatattttaatttatgagtttttgatagctttattttttaagtatttatatatttataactcatcataaaataaagtatatatagaatct

SEQ ID NO: 401 - protein, 153 aa, Homosapiens [sequence omitted]

SEQ ID NO: 402 - DNA, 873 bp, Homosapiens
ttctatgcaaagcaaaaagccagcagcagccccaagctgataagattaatctaaagagcaaattatggtgtaatttcctatgctgaaactttgtagttaattttttaaaaaggtttcattttcctattggtctgatttcacaggaacattttacctgtttgtgaggcattttttctcctggaagagaggtgctgattggccccaagtgactgacaatctggtgtaacgaaaatttccaatgtaaactcattttccctcggtttcagcaattttaaatctatatatagagatatctttgtcagcattgcatcgttagcttctcctgataaactaattgcctcacattgtcactgcaaatcgacacctattaatgggtctcacctcccaactgcttccccctctgttcttcctgctagcatgtgccggcaactttgtccacggacacaagtgcgatatcaccttacaggagatcatcaaaactttgaacagcctcacagagcagaagaacacaactgagaaggaaaccttctgcagggctgcgactgtgctccggcagttctacagccaccatgagaaggacactcgctgcctgggtgcgactgcacagcagttccacaggcacaagcagctgatccgattcctgaaacggctcgacaggaacctctggggcctggcgggcttgaattcctgtcctgtgaaggaagccaaccagagtacgttggaaaacttcttggaaaggctaaagacgatcatgagagagaaatattcaaagtgttcgagctgaatattttaatttatgagtttttgatagctttattttttaagtatttatatatttataactcatcataaaataaagtatatatagaatct

SEQ ID NO: 403 - protein, 137 aa, Homosapiens
MGLTSQLLPPLFFLLACAGNFVHGHKCDITLQEIIKTLNSLTEQKNTTEKETFCRAATVLRQFYSHHEKDTRCLGATAQQFHRHKQLIRFLKRLDRNLWGLAGLNSCPVKEANQSTLENFLERLKTIMREKYSKCSS

SEQ ID NO: 404 - DNA, 6257 bp, Homosapiens
gcggctgcgcactgggcgctctcgcccgagaagccgcagtctcgagagcgtcaacgaggtgtttcggtagtctctggccatcctttctgcgcacccggtgtcgctgggctgcaccccgggcggggacgtccgccgggcacgggagggggccaagatgccgatcaataaatcagagaagccagaaagctgcgataatgtgaaggttgttgttaggtgccggcccctcaatgagagagagaaatcaatgtgctacaaacaggctgtcagtgtggatgagatgaggggaactatcactgtacataagactgattcttccaatgaacctccaaagacatttacttttgatactgtttttggaccagagagtaaacaacttgatgtttataacttaactgcaagacctattattgattctgtacttgaaggctacaatgggactatttttgcatatggacaaaccggaacaggcaaaacttttaccatggaaggtgttcgagctattcctgaacttagaggaataattcccaattcatttgctcacatatttggtcatattgcaaaagcggagggtgatacaagatttttggttcgagtgtcttatttggaaatatataatgaagaagttcgtgaccttttgggcaaggatcagacacaaaggttagaggttaaagaaagacctgatgtgggagtttatatcaaagatttatcagcttatgtggtaaataatgctgatgatatggatagaattatgacgctaggccacaaaaatcgttctgttggtgcaactaatatgaacgaacatagttcccgttcccatgccatctttacaattactatagaatgcagtgaaaaaggcattgatggtaacatgcatgtcaggatggggaagctccatcttgtagatcttgctggttcagaaagacaggcaaaaactggagctactggacagcgcctaaaggaagctacaaaaatcaatctttcactttccacccttggtaatgtaatttctgccttggttgatggaaaaagcactcatgtgccttatcgtaactctaaactgactcgtcttcttcaggattccttaggaggaaattcaaaaaccatgatgtgtgcaaatattgggccagcagattacaattatgatgaaactatcagtacattacggtatgccaatcgtgctaagaatattaaaaataaagctagaattaatgaagatccaaaggatgctttgctgcgtcagttccagaaagaaatagaagaactgaaaaagaagcttgaagaaggagaagaaatatcaggctctgatatcagtgggtcagaggaagatgatgatgaagagggtgaggttggagaagatggagagaaaaggaaaaaaagaaggggaaaaaagaaagtctccccagacaagatgattgaaatgcaagcaaaaattgatgaggagagaaaagcacttgaaacaaagctcgacatggaagaagaagaaagaaacaaggctagagctgaattagagaaacgggaaaaagatcttcttaaagcccaacaagagcatcagtctttgctggaaaaattatctgccctggaaaagaaggtaattgttggtggggttgacttgttggccaaagctgaggaacaagagaaacttcttgaagaatctaacatggaactggaagaaaggaggaaaagagcagagcaacttcgcagagaacttgaggaaaaagagcaagaacgcttggatattgaagaaaaatataccagtttgcaagaggaagcacagggaaagaccaagaagttaaagaaagtttggactatgctgatggctgcaaagtcagagatggctgatctccaacaagaacatcagagggaaattgaaggcctactggagaacattcggcaacttagccgggagcttcgacttcagatgcttattattgataactttatacctcgggattatcaggaaatgattgaaaactatgtccattggaatgaagacataggagaatggcagctaaaatgtgttgcttatacaggaaataacatgaggaagcaaaccccagtacctgataaaaaggagaaagatccctttgaggtggacctttctcacgtgtatcttgcctatactgaggagagtctgcgtcagtctttgatgaaactagaaagaccacgaacttcaaaggggaaagcaaggccaaagacagggagaagaaagcgttctgcaaagcctgaaactgtaattgactctttactgcagtaaatgttacagacttaaagtcacaataaaaattagtgatattctcatgcctggacaaaatctttaattaaaacagtgaagacttctctataatttcaattaatggaagttgtagatcaatgaataagactggaaataataatttgcttaagaacttttagtctacatatattaatataacattaaaattgtacaactggtgattgttcaaattgttgtactactactcttcaattgtactgtgcagggaagttgggggaacagttcatactatagagagttacagtttagatgtatgtgtaaatcgattagctatttatccaactactgtatatttaggtaactagaatttcaaaatagaaaaaaaaaaactgtgtcctgttttgcacatagaaagaagcagatcagattgtcctatgttgcgctgttatatatgaatgtttggactgtacatctaaagaatgattccgtcctaacacccacccagcctgtttgaacacattctaattgtctaacatttgttgcattttaagtatgagatgactgatcttatgaatgttttgtagaaaatgttataatttaacagtctttgcgagtatacatgttttttaacaagttgaaaatgtttcatctgaacctttcctaacttttttttgccagtttgagttcaaatcaaatacaccttaagttctggtttcatgttctcttgaaacattgaattgtacgtaaatataaaggatctactgttgcggaaaattaagaagctaaatactgctcagttatctttgcctgcgtgtatatttttaaaaattcactctgaagtgttatggatgcttttctttgagttctaaattttggtgggaattactttatgtctcccagttaagaagagtctccattttccagaaaatacagctaagcaagaaaaatatcttttaaatactttgcctttaaaacacttttttattttgtttttctattttaaaaataaaatattattttctgaatttcttctattgggtaatccagttagaccatattcctctacaaataaaaactatgttgatttcatagtaaagtaagttgtaatagagataattatttttttctgttgttagctgcttatgaaacttttattgtatttttttaaagttatgctactcctggccgggcatggtggctcacgcctgtaatcccagcactttgggaggccgaggcacgtggatcacttgatgtcaggagttcgagaccagcctggctaacatggtgaaaccctgtctccagtacaaatacaataattagctgggtgtggtggcgcacacctgtaatcccagctacttgggaggctgaggcaggagaatcacttgaacctgggaggcggaggttgcagtgagctgagatggcatcactgcactccagcctgggtgacagggtgacactccacctcaaaaaataaaaataaaataaaaataaagttatgctactcctaaaccacttaatatatgttttgtggttttcaaaattatgtaatcagccctgaaacacattggttgaaaatattttgagactttataagttagtatttattaaattaatattattttaataagttttgttaaatcctagtttaaatgacaaagctgtgtatagagtaggggtgagtgaaggtggagtactcttgaggtggcgataaaaatgtacccataaatttaaagtccattctgtaattggaatactgaatgtcctgtgtgtggtgaacattttctaggtgattagaattgcatttcactggctgcatttgtttgtggtatgtaagatagctagaaatttattacttaactctgtggggcattgtttagatactgtgaagagttgaggtaaatatgtgtcttgtaaaagctttgtgtgatcagaatattttggtaattataaaatgtttttgatgatacacatttaactctgttagtaattactctaaagaaatcttaattttaccagtttaaaaaaaacgcttctttttaaaagttcatgtttctaacctttaacaattcagttaataggaaaggagtaacttttaaatcaagctttaaaacatggaaatttaagccagtatgttagatattttttctatcccaccctaccatgataataaaaataaatctataaaaagtcaaaataaaaagccgatctataaaaagtcaattgagaagttctaaaagcaggctactatagcaggggtgtttgttttttgtttggagacggagtctggctctattacctaggctggagtgcagtgggacaatctcggctcactgtaacctctgtctcttcagcctcctgagttgctggaactacagctgtatgccatcatgctcggctaatttttgtatttttttgtagagatggggttttgccatgttgcccgggcctgtcttgaactcctagagcttaagtgatccacccgcctcaggctcccgaagtgctgggattacaggcatgattataggcctgagccaccacaccccgcctactatagcagttttttaaaaaaagcattatgttaaaactgattataccagatggacattaaatatccatctcagaaataccaaaatttgatacataagcctggcctgaatatcttttttttttttttgagacggagtcttactctgtcgcccaggctggagtgcagtggcgcgatctcggctcactgcaacctctgcctcctgggttcaagggattctcctgcctcagcctcttgagtagctgggattacaggtttgcgccaccacacccagctaatttttgtattttttttttagtagagaccgggtttcaccatgttggccaggctggtctcacctgactttgtgatccgcccgcctcagcctcccaaagtgctgggattacaggtgtgagccaccacgcctggcctcaagcctggtctgaatatctatatgcaaatatgggacactgacttcagagctattcatttagctccagtcatagcaattctgtagtttcctcacatttactgtgtctttgtccacaaatgaaatatgttgtaaggtcagtgttaatttcgtgagacgatatagatgaacacacttgctcattttttgaaataaatatgcagatttaaaatgagtggcacatatatataaataggttattgaatgggtattctcttttccctttaatttaaaaagtgatatttatttattaaaaggagcattggtagaattattggtttatagtatcttctttaataatccttacaattacatatactaataggatgttaaaattatcatcgtgtttcctatttgtgtttagattcttataaagcatgagatgagtaatcaagggaagggtcgcatctccatgtttgccccatgaatagaatccatttgacaagccatttcatttcctttctggagaaagggagttgttttttttttctttttacagcaaaaatttaaggttttattgggggagggggtggtgctacttcctctgtaacatgtttttaaaactatgattatggtttttggttgttttttgttttgtttgtttccttttagtctgtttttaatatccttccccttaactcttaaggaaagtcttctttcctacagggctgtgaattaaggaatgggtagcgtttacatttaagtacaccaatgtctgcccaatttcctaatgtatacatttgttttattttaaattattttttgttcttaaaaatactagaagaaaacatagatgtttctagtgcctttgaacttatactgtagtctgactaatttaatgaataacttcagtagcattactataatactgtatgctggccaaaattacaaattacagtttgttgcatcagtttcaaaagccatgctttcattgtattttatgtataaattgtatttgttcaagttgtatatattggtattgtatgtatacatgcagcatggttaaataagaataaaaatcttttacctaa

SEQ ID NO: 405 - protein, 699 aa, Homosapiens
MPINKSEKPESCDNVKVVVRCRPLNEREKSMCYKQAVSVDEMRGTITVHKTDSSNEPPKTFTFDTVFGPESKQLDVYNLTARPIIDSVLEGYNGTIFAYGQTGTGKTFTMEGVRAIPELRGIIPNSFAHIFGHIAKAEGDTRFLVRVSYLEIYNEEVRDLLGKDQTQRLEVKERPDVGVYIKDLSAYVVNNADDMDRIMTLGHKNRSVGATNMNEHSSRSHAIFTITIECSEKGIDGNMHVRMGKLHLVDLAGSERQAKTGATGQRLKEATKINLSLSTLGNVISALVDGKSTHVPYRNSKLTRLLQDSLGGNSKTMMCANIGPADYNYDETISTLRYANRAKNIKNKARINEDPKDALLRQFQKEIEELKKKLEEGEEISGSDISGSEEDDDEEGEVGEDGEKRKKRRGKKKVSPDKMIEMQAKIDEERKALETKLDMEEEERNKARAELEKREKDLLKAQQEHQSLLEKLSALEKKVIVGGVDLLAKAEEQEKLLEESNMELEERRKRAEQLRRELEEKEQERLDIEEKYTSLQEEAQGKTKKLKKVWTMLMAAKSEMADLQQEHQREIEGLLENIRQLSRELRLQMLIIDNFIPRDYQEMIENYVHWNEDIGEWQLKCVAYTGNNMRKQTPVPDKKEKDPFEVDLSHVYLAYTEESLRQSLMKLERPRTSKGKARPKTGRRKRSAKPETVIDSLLQ

SEQ ID NO: 406 - DNA, 3947 bp, Homosapiens
ccgcagccgcccgggcggagcgcgtcccgcagccggctggtccctgtcgctgcccctgcgctcgtcccagcccacccgcccggtgcggagctcgccatggcggccaccgacctggagcgcttctcgaatgcagagccagagccccggagcctctccctgggcggccatgtgggtttcgacagcctccccgaccagctggtcagcaagtcggtcactcagggcttcagcttcaacatcctctgtgtgggggagaccggcattggcaaatccacactgatgaacacactcttcaacacgaccttcgagactgaggaagccagtcaccatgaggcatgcgtgcgcctgcggccccagacctatgacctccaggagagcaacgtgcagctcaagctgaccattgtggatgccgtgggctttggggatcagatcaataaggatgagaggcccatagttgactacatcgatgcgcagtttgaaaattatctgcaggaggagctgaagatccgccgctcgctcttcgactaccatgacacaaggatccacgtttgcctctacttcatcacgcccacagggcactccctgaagtctctagatctagtgaccatgaagaaactagacagcaaggtgaacattattcccatcatcgccaaggctgacaccatctccaagagcgagctccacaagttcaagatcaagatcatgggcgagttggtcagcaatggggtccagatctaccagttccccacggatgatgaggctgttgcagagattaacgcagtcatgaatgcacatctgccctttgccgtggtgggcagcaccgaggaggtgaaggtggggaacaagctggtccgagcacggcagtacccctggggagtggtgcaggtggagaatgagaatcactgcgacttcgtgaagctgcgggagatgttgatccgggtgaacatggaagacctccgcgagcagacccacagccggcactacgagctctaccggcgctgcaagttggaggagatgggctttcaggacagcgatggtgacagccagcccttcagcctacaagagacatacgaggccaagaggaaggagttcctaagtgagctgcagaggaaggaggaagagatgaggcagatgtttgtcaacaaagtgaaggagacagagctggagctgaaggagaaggaaagggagctccatgagaagtttgagcacctgaagcgggtccaccaggaggagaagcgcaaggtggaggaaaagcgccgggaactggaggaggagaccaacgccttcaatcgccggaaggctgcggtggaggccctgcagtcgcaggccttgcacgccacctcgcagcagcccctgaggaaggacaaggacaagaagaaagccagtggctggtcttccatttacagtgtcactattccctgacggagctgttatgtgccgctctagcgaaggccccagccgggatgctaggcctaattgttcagcgtggagatggcaactcacgtggtgccctaggtgcagctgcgtggtctggtatacatgctgcaaaattcacccagttcccctcattttaatttttctaacctacagcttaattttaataactttaaaacacttctaaatatttattttggcaccagcgtcaagacaaataatatcctctcccattattttcataagtaacacagattccctgatttttaaaaactaaaaatacagctaaacctttcttatgtataaagtatgcctatcatatacagggagaggtgggtaataaacttcctgtaatgacagtgtttggcatttctttatggatggaattggaacatgaacaagaccatgtccagcgtttttactgtgaatgtaaatggaacagcagcccaaagctgttgtctgtgccccagaggtgctacctgtagacagggaccaactccatgtgtgtgtgttaagtgtttgactccaattaagactcccaagcaaatcctgcatattccaaatgtaaagagtactcagtgggaaaaaggttgttacctcaaagtcattgcttctttcctggctgggtcacagggtgaagagatgaaggtgtctgatgtatatagacaattagggaaaaatgagcggcaaaggagctttccccttcagctgcactctaaaggggaacattttaaggaagtactagcagctttgactcttctatgctcctgttggtttacaagccaccaagaatgtcagtgttgagaatacggcctggtaaaatgggagatgtaaaatgactaaatgaaaggaagggtagttttaatgttgaagcaccgtgctgggcactggagctacccagaggaatgcacaacgctcccctcaaggagctcacagtctagcctactccctggctggaagcctcaggaagacgtgctaatttattgtggaattggtagtttgcttttcatgcccctgtcttccttctcatgaccatttccccctttctgtctggcttgcattattgatttccaggaccaagtcctggcttcctcctgccttcctgagatgatgttctgctcagggagaagtggaggggtgagctgtgtgtgtccaccgaggcacggccaggaagaggcagcctttacctgtgaggggctccatgctccagcagcagagcaggttctagtgacaattcaactttttatgctatgaccaggggtggatctaaattttatggggctgaaagcttgaattatttagaaagacttctttaagaaaaacaatgttaatataaaattaggtacagggtcttggaaggggccctgaagattaagcttccttagcgtcacaataagtccgtatctggttgcaattgaaaactgatgcttcagtgagggtatctaaaaaggtaaactggcatatccagggcaaatgtgggctgccaatggctcatctctagggtaattttatgtctgaaagtgtatgcagttgggtcagagcatgacctttaagatagcctctctcagctaacatatttatgaagatgaggcctggtgacccagcaggttcattggatacataagaaatgagaattcctggttcatgggccaacctaggactctggagtatgcagacttggccattcgtccattgtggcctgcgggtcgcaccccaggcatactgaaaggccatactcgtggctggctgcctgcgggcctaagccttcccaggatcttcaggacacttgacagacttgtgttttctggtctgagctgcctccacaggtccctccagcaagcctcactgcacctctcccctgctgtttgtgtttggaattttgtcttctttagctgagaccaaattaaaccttggtgcataaagtgagcttaaaacttgccactgtttagtaagttagcccccatagaatgtgaccctgtctgcagagtctcatttacccctctttttctcattgtcatttgttggctttattagggctgtcttacaggatcatgttggcatttactatcatgtctttatcataaaccatgtttgtttgaggtagaagaatcaccatataattcgttgcccaaattgggactattgagagagaaaggggatgctattaattacaccagatcaaaaggcataaaccagacctgtcccaggccgatgtggaaatatgttctttctagttgtgggtaccctgatctaggtggtttgtaattgtgcattactgactgcatatgtttgtgtatgtgtaaatgtgggctccctgttaagtggggctcatggatacgaggcctgaggaagtgtggcttgctagtctgttacgttaacatgcttttctaaaattgcttcacgtgttaattcatttactcctgcattcattgactgtttttgttcttttccattcactttgtacttatttttttcattaaattttgcatttattttgaaaaaaatacagatctaag

SEQ ID NO: 407 - protein, 440 aa, Homosapiens
MAATDLERFSNAEPEPRSLSLGGHVGFDSLPDQLVSKSVTQGFSFNILCVGETGIGKSTLMNTLFNTTFETEEASHHEACVRLRPQTYDLQESNVQLKLTIVDAVGFGDQINKDERPIVDYIDAQFENYLQEELKIRRSLFDYHDTRIHVCLYFITPTGHSLKSLDLVTMKKLDSKVNIIPIIAKADTISKSELHKFKIKIMGELVSNGVQIYQFPTDDEAVAEINAVMNAHLPFAVVGSTEEVKVGNKLVRARQYPWGVVQVENENHCDFVKLREMLIRVNMEDLREQTHSRHYELYRRCKLEEMGFQDSDGDSQPFSLQETYEAKRKEFLSELQRKEEEMRQMFVNKVKETELELKEKERELHEKFEHLKRVHQEEKRKVEEKRRELEEETNAFNRRKAAVEALQSQALHATSQQPLRKDKDKKKASGWSSIYSVTIP

SEQ ID NO: 408 - DNA, 1920 bp, Homosapiens
cgcagccgcccgggcggagcgcgtcccgcagccggctggtccctgtcgctgcccctgcgctcgtcccagcccacccgcccggtgcggagctcgccatggcggccaccgacctggagcgcttctcgaatgcagagccagagccccggagcctctccctgggcggccatgtgggtttcgacagcctccccgaccagctggtcagcaagtcggtcactcagggcttcagcttcaacatcctctgtgtgggggagaccggcattggcaaatccacactgatgaacacactcttcaacacgaccttcgagactgaggaagccagtcaccatgaggcatgcgtgcgcctgcggccccagacctatgacctccaggagagcaacgtgcagctcaagctgaccattgtggatgccgtgggctttggggatcagatcaataaggatgagaggcccatagttgactacatcgatgcgcagtttgaaaattatctgcaggaggagctgaagatccgccgctcgctcttcgactaccatgacacaaggatccacgtttgcctctacttcatcacgcccacagggcactccctgaagtctctagatctagtgaccatgaagaaactagacagcaaggtgaacattattcccatcatcgccaaggctgacaccatctccaagagcgagctccacaagttcaagatcaagatcatgggcgagttggtcagcaatggggtccagatctaccagttccccacggatgatgaggctgttgcagagattaacgcagtcatgaatgcacatctgccctttgccgtggtgggcagcaccgaggaggtgaaggtggggaacaagctggtccgagcacggcagtacccctggggagtggtgcaggtggagaatgagaatcactgcgacttcgtgaagctgcgggagatgttgatccgggtgaacatggaagacctccgcgagcagacccacagccggcactacgagctctaccggcgctgcaagttggaggagatgggctttcaggacagcgatggtgacagccagcccttcagcctacaagagacatacgaggccaagaggaaggagttcctaagtgagctgcagaggaaggaggaagagatgaggcagatgtttgtcaacaaagtgaaggagacagagctggagctgaaggagaaggaaagggagctccatgagaagtttgagcacctgaagcgggtccaccaggaggagaagcgcaaggtggaggaaaagcgccgggaactggaggaggagaccaacgccttcaatcgccggaaggctgcggtggaggccctgcagtcgcaggccttgcacgccacctcgcagcagcccctgaggaaggacaaggacaagaagaaaggtttgagttggatcagctctcagaatccagctcacatccatagccacctggttaagcagcagatgtcttccagcagttcccctaaagcctgggatgcctaaactggtatgggccctcaggatgtccttctgcctcatgcactgtggtcccacttacactggaaggaaggaggcagagggcactcaacggccaccactggaagctgtgagcagcatggcctcagcatctccatctgtaaaatgggttctggactagaggagagttcttgatatgacctaggagatagtgttccaaatgtatctgactctcgcaaggctaaatgcatggtagctcaaaataagactcatacaggatcggaagcaattaaagtgtaattttaacgaaagcaccaacaagcaaaagtgtgtcaagaaaaaatacagatgtatactaactctataatatagacaattatagtatatctggcccttgaccactttgcacctagtaaatctttcccctcccaccccatggcttagcacatttacacaaacacaccaaaaa

SEQ ID NO: 409 - protein, 460 aa, Homosapiens
MAATDLERFSNAEPEPRSLSLGGHVGFDSLPDQLVSKSVTQGFSFNILCVGETGIGKSTLMNTLFNTTFETEEASHHEACVRLRPQTYDLQESNVQLKLTIVDAVGFGDQINKDERPIVDYIDAQFENYLQEELKIRRSLFDYHDTRIHVCLYFITPTGHSLKSLDLVTMKKLDSKVNIIPIIAKADTISKSELHKFKIKIMGELVSNGVQIYQFPTDDEAVAEINAVMNAHLPFAVVGSTEEVKVGNKLVRARQYPWGVVQVENENHCDFVKLREMLIRVNMEDLREQTHSRHYELYRRCKLEEMGFQDSDGDSQPFSLQETYEAKRKEFLSELQRKEEEMRQMFVNKVKETELELKEKERELHEKFEHLKRVHQEEKRKVEEKRRELEEETNAFNRRKAAVEALQSQALHATSQQPLRKDKDKKKGLSWISSQNPAHIHSHLVKQQMSSSSSPKAWDA

SEQ ID NO: 410 - DNA, 500 bp, Homosapiens
cgcccgggcggagcgcgtcccgcagccggctggtccctgtcgctgcccctgcgctcgtcccagcccacccgcccggtgcggagctcgccatggcggccaccgacctggagcgcttctcgaatgcagagccagagccccggagcctctccctgggcggccatgtgggtttcgacagcctccccgaccagctggtcagcaagtcggtcactcagggcttcagcttcaacatcctctgtgtgggggagaccggcattggcaaatccacactgatgaacacactcttcaacacgaccttcgagactgaggaagccagtcaccatgaggcatgcgtgcgcctgcggccccagacctatgacctccaggagagcaacgtgcagctcaagctgaccattgtggatgccgtgggctttggggatcagatcaataaggatgagaggcaagaggcgggaagggcggccccacccagcctcctcccaccccacctacattggcccctataa

SEQ ID NO: 411 - protein, 136 aa, Homosapiens [sequence omitted]

SEQ ID NO: 412 - DNA, 3192 bp, Homosapiens
acccgccccgggagccaggaacccagggccccaccatggcgctggccgccgccgccgccgctgcggctgccggggtgagccaggcggcggtgctgggcttcctgcaggagcacggcgggaaggtgcgcaactccgagctgctgagccgcttcaagccgctgctcgatgccggcgacccgcggggccgcgccgcccgcagggaccgcttcaagcagttcgtcaacaacgtggcggtggtgaaggagctcgacggcgtcaagttcgtggtgctgaggaagaagccccggcccccggagcccgagcccgcacccttcggccccccgggggcagcggcccagccgtcgaaacccacttcgacggtcttgccgcggagcgcctctgccccgggggctaaacccttggtcgcggccagtggagccgccaggggacctgggtctgccaacagagccacaggacaccccgggggggccggcctccgagcccgctcagccgcccggggagcggtccgccgacccaccgcttccagcccttgagctagcccaggccaccgagagaccctccgcagacgcggccccaccgcctagggccccttctgaggcggcatcgccctgctctgatccgccagacgcggagcccgggcccggggcagcgaaagggccgccgcagcagaagccctgtatgctgccggtgcgctgcgtcccggcccccgccacgctccgcctccgggcggaggagcccggcctgcgccggcagctgtcggaggagccgagcccgcggagctcccctctgctgctgaggcggctctcggtggaagagtccggtctgggcctcggcctgggcccgggccgctccccgcacctgaggcgcctgtcgcgcgccggcccgcgtctgctgagccctgacgccgaggagttgcccgccgcgccgccgccgtccgcggtgcccctggagccgtccgagcacgagtggctcgtgcggactgccgggggccgctggacccaccagctgcacgggctgctgctgcgcgaccgcggcttggcggccaagcgcgacttcatgtctggcttcacggccctgcattgggccgccaagagcggcgacggcgagatggcgctgcagctggtggaggtcgcgcggcgcagtggcgcaccagtcgacgtgaacgcacgctcccacggcggctacacgccgctgcacctggctgcactgcacggccacgaggacgctgccgtgctgctggtggtgcgtctgggtgcccaggtgcacgtgcgtgatcacagcgggcgtcgcgcctaccagtacctgcggcccggctcctcgtacgcgctgcgccgccttcttggcgatccaggcctgcgaggcaccacggagccagatgcgaccggtggtggaagtggcagtcttgctgccaggcgccccgtacaggtggccgccaccatcctcagttccaccaccagtgcatttctgggcgtcctggctgacgacctcatgctccaggacctggcccgaggcttgaagaagtcgagctccttcagcaagttcttgagcgcctcgcccatggctccacgtaaaaagacaaagatccgcggtggtctgccagccttctcagaaatctctcgtcgacctactccggggcctttagctggtctagtgcccagtttgcctccaacaacctgaaggtccctggggctaccacctggttgatctatcgtggcctgctcgtcgcagtccaaacccgcccaagactgcagcccaatcaacgcctggagcctcattctgtttccagctttgtccagggcagcctgttttacccagatgggcctgcacctccagcttctttctgaagcatgacccatctccagagatgggatttgagaaatcagtgagagcttcctataaagaactccaggagacaggcctgaactctagagggaacttgaaatccagggtcaaaggttaaggggcagcagctggtctggcccctgaaagccttcacctgatgcctctgcagctacacaatcccaagacagagctagagcaagggtctctttaaatgttgaaagatgttaggttgtcagctttaagatatgtggtggttttgtaatttgatgcttttattctgtttttaaattgaaatgaggtaatgcaactttcgtaataaccttttggaattatatttttccacttttaggcaaagtgcttagacattttcaattttttttttgctaaatactttggaattctatttaaaaaatagatgatcaagatctaaaggaaattaatcccaaccaacaaacttaaaagtttatctacctcgttttaggcaatcaagattctggagagtcttgaacacagaataacgattgtgaccattatgaatgtaactaatttcagttgtactgtgaatgctaaatatttgcaaacaagtacatcttgaaagtaaaggtgacttagagaaaagagacattttgacagatacttttaatttgtggttgtctccatcatgaaatagaaacgtgtttggcacttgtgggtggctattttgatttggcatgactacttaattttttaaaaaaattgtggtttgtgaattgcacctttgtgccatgtttctgaatctggttttcaaatccagtggagcctttcagtgaaataggtgactattaaaaaagtaatagtattacagaaaaatgagcgattaaatagtaatggatacaattaaggagcaactattttatatgactgttctgtacaaacaaaaagtatgtaatacccattttaaaaaaccatttgaaagtagacaacttattccaaaatagcaaatgcagaatctctgctcagtgagcttggatgagtggcttaacttctctgggcctttgttcctatctgtaaatgagaaagtttgtagatattgccaagatttcccaggctcaatacagtgtaattattttatgttttaaagatatgaaatctgtttactcaaccaattttttaaatgtcatattgtgataatgctctgcttttgcaaattgtgtttgcatgtcattagttatatcaaatagttttgtggcatggggtagtggagcttccctccccacccccatatgtatcagtgaagcctttgaaattacttaaggcagtctttcatggaatgttttgattgagcaatgaaataaacagtcctccattttg

SEQ ID NO: 413 - protein, 332 aa, Homosapiens
MLPVRCVPAPATLRLRAEEPGLRRQLSEEPSPRSSPLLLRRLSVEESGLGLGLGPGRSPHLRRLSRAGPRLLSPDAEELPAAPPPSAVPLEPSEHEWLVRTAGGRWTHQLHGLLLRDRGLAAKRDFMSGFTALHWAAKSGDGEMALQLVEVARRSGAPVDVNARSHGGYTPLHLAALHGHEDAAVLLVVRLGAQVHVRDHSGRRAYQYLRPGSSYALRRLLGDPGLRGTTEPDATGGGSGSLAARRPVQVAATILSSTTSAFLGVLADDLMLQDLARGLKKSSSFSKFLSASPMAPRKKTKIRGGLPAFSEISRRPTPGPLAGLVPSLPPTT

SEQ ID NO: 414 - DNA, 3190 bp, Homosapiens
agcgcttgtgacggtgtgaccagggaggggaagtgtaagtgtctggccgtccgtggtggcggggccagcaggctgtcccagccctcacccggagctcctcacccggcaccacatctgtgttttcccaggacccacgcagccacccagcctcagcactcatctgcgcagccatggaggccctgggacctgggggcgaccgcgcctccccggcctcgtccactagcagcctggacctgtggcatctgtccatgcgcgcggactcggcctacagctctttctccgcagcctccggcggccccgagccgcgcacgcagtcgccggggacagacctccttccttacctagactgggactacgtgcgtgtggtttggggcggcccgggccccgccccgcccgacgctgccctttgcacatccccgcggccccggcccgcggttgcagcccgcagtgggccgcagccaacagaggtcccggggaccccgggaccactgaacaggcaggccaccccgctgctgtacgcgctggcggccgaggcggaggccgcggcgcaggctgtcgagccgcccagcccgccggcctcgagggccgcctaccgccagcggcttcagggcgcgcagcggcgagtgctccgggagacgtcgttccagcgcaaggagctccgcatgagcctgcccgcccgtctgcggcccactgtcccagcgcggcccccggcgactcacccgcgctccgcctcgctcagccacccgggcggggagggggagccggcgcgctcccgggctcccgcgccaggaactgccggccggggtcccctcgccaaccagcagcggaagtggtgcttctcagagccaggaaagctggatcgtgtgggtcggggcggtgggccggcgcgggaatgcctgggtgaggcctgctccagctctggcctccctgggcccgagcccttggagttccagcatccggcgctggctaagtttgaagatcacgaggtcggatggctgcccgagacgcaaccccaaggctccatgaacctggactccgggtccttgaagctcggtgatgccttcaggcccgccagtcggagtcggagcgcttcaggcgaagtcttgggttcctggggaggatcaggagggaccatacccattgtccaggctgttccccaaggagcagaaacccccagaccattgtttcagaccaaactttccaggttcttgcctcagaaagaggctgcggtgatgtatcctgcagagttaccccagagcagccctgctgacagtgaacagagggtctcagagacctgcattgtgcctgcctggctcccctcccttcctgatgaagtgttcctagaagaggccccactggtcagaatgagatcaccaccagacccccatgcctcccaggggcccccagccagtgtccatgcctctgaccagccgtatggaactggcttaggccaaagaactggccaggttacagtccccacggagtacccgctccatgagtgtccaggaactgcaggggcagatgactgctggcagggggtgaatggttctgtaggtatttccaggcccacaagccacacccccactgggactgcaaatgataacatcccaactattgaccccactggactgaccaccaatccccccacagctgcagagagtgacctcctcaaacctgtcccagctgatgccttgggactttcaggcaatgatactccaggtccctctcacaatactgccctagccaggggcactggccagcctggttccaggcccacatggcctagtcagtgcctcgaggagctggttcaggagctggccagattagatccctctctatgtgaccctcttgcttcccagcccagcccagagccacccctgggcctgctggatggactgattcctttagcagaggtccgggctgcaatgcggcctgcctgtggggaggctggagaggaggctgccagtacttttgagccagggtcctatcagttcagcttcacccagctcctgccggctcctcgggaggagacaaggcttgaaaaccctgccacccaccctgtgcttgaccagccatgtgggcaggggctccctgcaccaaacaacagcatccagggcaagaaagtggagctggccgcccgcctccaaaagatgcttcaggaccttcacacggagcaggagcggctgcagggggaggcacaagcatgggccaggcgccaagcggctctggaggctgcagtgcgccaggcctgtgcccctcaggagctggagcggttcagccggttcatggccgacctagagcgcgtgcttggccttctgctgctgctgggcagtcgcctggcgcgcgtgcgccgcgccctggcccgggcggcctcagacagcgaccctgatgagcagcgactccggctcctgcagcggcaggaggaggacgccaaggagctgaaggagcacgtagcgcggcgcgagcgggccgtgcgggaggtgctggtgcgagcactaccggtggaggagctgcgcgtctattgcgccctgctggcgggcaaggccgccgtcctggcccagcagcgcaacctggacgagcgcatccgcctccttcaggaccaactggacgccatcagggacgaccttggccatcatgccccgtctcccagcccggcgcggcccccagggacctgtcctccagttcagccgcccttccctcttctccttacatagttataggtggagagggtggggtgcaccgcccctatctctcacccacgtaagtggggtgatgctgatttagtctctgcttttcccttgagggattggggaggacccagtccaggcctttctaagatactcctccagccgggcgcggtggctcacgcctgtaatcccagcactttgggaggccgaggcgggcggatcacaaggtcaggagatcgagaccatcctggctaacacggtgaaaccccgtctctactaaaaatataaaaaattagccgggcgtggtggcgggtgcctgtattgccagctactcggaaggctgaggcaggagaatggcgtgaacctgggaggtggagcttgcagtgagcggacatcgcgccactgcactccagcctgggcgacagagcaagactccgtctcaaaaaaaaaaaaaaaaaaaaaaaaaaaaaagatacttctccaaagtgttctcatgtggcctc

SEQ ID NO: 415 - protein, 847 aa, Homosapiens
MEALGPGGDRASPASSTSSLDLWHLSMRADSAYSSFSAASGGPEPRTQSPGTDLLPYLDWDYVRVVWGGPGPAPPDAALCTSPRPRPAVAARSGPQPTEVPGTPGPLNRQATPLLYALAAEAEAAAQAVEPPSPPASRAAYRQRLQGAQRRVLRETSFQRKELRMSLPARLRPTVPARPPATHPRSASLSHPGGEGEPARSRAPAPGTAGRGPLANQQRKWCFSEPGKLDRVGRGGGPARECLGEACSSSGLPGPEPLEFQHPALAKFEDHEVGWLPETQPQGSMNLDSGSLKLGDAFRPASRSRSASGEVLGSWGGSGGTIPIVQAVPQGAETPRPLFQTKLSRFLPQKEAAVMYPAELPQSSPADSEQRVSETCIVPAWLPSLPDEVFLEEAPLVRMRSPPDPHASQGPPASVHASDQPYGTGLGQRTGQVTVPTEYPLHECPGTAGADDCWQGVNGSVGISRPTSHTPTGTANDNIPTIDPTGLTTNPPTAAESDLLKPVPADALGLSGNDTPGPSHNTALARGTGQPGSRPTWPSQCLEELVQELARLDPSLCDPLASQPSPEPPLGLLDGLIPLAEVRAAMRPACGEAGEEAASTFEPGSYQFSFTQLLPAPREETRLENPATHPVLDQPCGQGLPAPNNSIQGKKVELAARLQKMLQDLHTEQERLQGEAQAWARRQAALEAAVRQACAPQELERFSRFMADLERVLGLLLLLGSRLARVRRALARAASDSDPDEQRLRLLQRQEEDAKELKEHVARRERAVREVLVRALPVEELRVYCALLAGKAAVLAQQRNLDERIRLLQDQLDAIRDDLGHHAPSPSPARPPGTCPPVQPPFPLLLT

SEQ ID NO: 416 - DNA, 1365 bp, Homosapiens
atggcacgtcccaacaaattcctcctttggttttgctgctttgcctggctgtgttttcctattagccttggttctcaggcttctgggggagaagctcagattgctgctagtgctgagttggaatctggggctatgccttggtccttgctgcagcatatagatgagagagacagagctggcctccttcccgcgcttttcaaagttctatctgttgggcgaggtgggtcacctaggctgcagccagactccagagctttgcactacatgaagaagctctataagacatatgctaccaaggaagggattcctaaatccaatagaagtcacctctacaacactgttcggctcttcaccccctgtacccggcacaagcaggctcctggagaccaggtaacaggaatccttccatcagtggaactgctatttaacctggatcgcattactaccgttgaacacttactcaagtcagtcttgctgtacaatatcaacaactcagtttctttttcctctgctgtcaaatgtgtgtgcaatctaatgataaaggagccaaagtcttctagcaggactctcggcagagctccatactcatttacctttaactcacagtttgaatttggaaagaaacacaaatggattcagattgatgtgaccagcctccttcaacctttagtggcctccaacaagagaagtattcacatgtctataaattttacttgcatgaaagaccagctggagcatccttcagcacagaatggtttgtttaacatgactctggtgtccccctcactgatcttatatttgaatgacacaagtgctcaggcttatcacagctggtattcccttcactataaaaggaggccttcccagggtcctgaccaggagagaagtctgtctgcctatcctgtgggagaagaggctgctgaggatgggagatcttcccatcaccgtcaccgcagaggtcaggaaactgtcagttctgaattgaagaagcccttgggcccagcttccttcaatctgagtgaatacttcagacaatttcttcttccccaaaatgagtgtgagctccatgactttagacttagctttagtcagctgaagtgggacaactggattgtggctccgcacaggtacaaccctcgatactgtaaaggggactgtccaagggcagttggacatcggtatggctctccagttcacaccatggtacagaacatcatctatgagaagctggactcctcagtgccaagaccgtcatgtgtacctgccaaatacagccccttgagtgttttgaccattgagcccgatggctcaattgcctataaagagtacgaagatatgatagctacaaagtgcacctgtcgttaa

SEQ ID NO: 417 - protein, 454 aa, Homosapiens
MARPNKFLLWFCCFAWLCFPISLGSQASGGEAQIAASAELESGAMPWSLLQHIDERDRAGLLPALFKVLSVGRGGSPRLQPDSRALHYMKKLYKTYATKEGIPKSNRSHLYNTVRLFTPCTRHKQAPGDQVTGILPSVELLFNLDRITTVEHLLKSVLLYNINNSVSFSSAVKCVCNLMIKEPKSSSRTLGRAPYSFTFNSQFEFGKKHKWIQIDVTSLLQPLVASNKRSIHMSINFTCMKDQLEHPSAQNGLFNMTLVSPSLILYLNDTSAQAYHSWYSLHYKRRPSQGPDQERSLSAYPVGEEAAEDGRSSHHRHRRGQETVSSELKKPLGPASFNLSEYFRQFLLPQNECELHDFRLSFSQLKWDNWIVAPHRYNPRYCKGDCPRAVGHRYGSPVHTMVQNIIYEKLDSSVPRPSCVPAKYSPLSVLTIEPDGSIAYKEYEDMIATKCTCR

SEQ ID NO: 418 - DNA, 731 bp, Homosapiens
cttgccggaaatgacgaacgagtcaaccggatcggtgactgtggagggcgagctgagccctggccgccgccacaatgggccgcgagtttgggaatctgacgcggatgcggcatgtgatcagctacagcttgtcaccgttcgagcagcgcgcctatccgcacgtcttcactaaaggaatccccaatgttctgcgccgcattcgggagtctttctttcgcgtggtgccgcagtttgtagtgttttatcttatctacacatgggggactgaagagttcgagagatccaagaggaagaatccagctgcctatgaaaatgacaaatgagcaacgcatccggatgacggttccctgtctctgaaagacctttctctggaagaggagtctgcattgtagtgtctcaaagacacaataaacttcctatggtctgcactgttgtgatattacatttttgtgagtagaatcctgtgtgaccactaatattcaagttcatgaagcgcccctcctcagcatgagtcttgaagttttgcctggtctcgggttttggtgaaagagcagggctccccctttgttccattatctacaagaaagtagctgcaggtactcctgcatctaaccatttgtgggtgacatgggctatggcgagtgctggttcttggccctctgctcccatagcaacaataaagtctactaactatattgtaattagtatgtgtcagggacgcttttattttt

SEQ ID NO: 419 - protein, 82 aa, Homosapiens
MGREFGNLTRMRHVISYSLSPFEQRAYPHVFTKGIPNVLRRIRESFFRVVPQFVVFYLIYTWGTEEFERSKRKNPAAYENDK

SEQ ID NO: 420 - DNA, 1856 bp, Homosapiens
aggactagaatcaggacagtcagatctgtggtcacatcctgcccaattccagctctgaggtccatcaaaccatctgcttctcccttggcaagaagctccctctgtctgactggcagcagggtcagtggccatccttttctaccttcagctgttgcgcatctcctccacgttttcctggagtaaaggaacaagcaggttcttatccaaatacccaacctgtgaagatgagacggcccttgggaagaggtattagccaagttttcagtatgatgcccggcagaaagaatttgttgtctttgtcttaagcttattatcctcccaggtcataggaagatctaaagtccaatcaatctccttactcagaattcacagctttcccctcaaacttaaaatgcccatgtcatttcacgagtacccataactacccatcgtttagatacatgtcctcccttggactagaaatctgcagcagttcctacttaaactgatggatgctttgggctttggaggtatctcatccctatgcctgttgccctgaagctgccggaaggaaaggccccactcaactactgggaagaaagcccataattcaaggcttttaatacagtcactacacaagctctccctctgatttaggagatcttgttacctcctcatctacatgtgcttaaaaacaaaaagaaacctataattattcaattcacctgtggtccaaataagtctcacatccagccattcccctgagagggcaggaggccagactttgaactttccacagctgggtcttcattttactagtgagataaagaggtgcagattagggtgacagtccatctaagcaagtggacgatctggggaactgtaggccttgctgaagcatcctcccacagaaaggagataagggccttatccaattggctgtacacaatagatcagtgcttctttcctagacaaggctgaaaggggccaacattatttctgaagacttcattattggaattctatgggagtgatctcactgagctattttggaatagaaatgtggctagttgcctgacctccctcaatggtttcacgtggctttcaaagggaaggaagggcagtgctgacttttggtaaaatgggcgaaagggtccatgccagcaacacaatcactcaaagtccagatgagggatcagtaaatacaacgtgcctgaaaggtggcccttgagcacattcctccggtagacattaacttattaaattgattctgattacaaatataaactttgcccccatctcacccagtaacaatgcaagagttgatgtcagtctataaaaggaagtaggaactgtccctggctttcaggctccaacatcctccccctgtcaagatgtggcacctcaaactttgtgcagtcctcatgatcttcctgttgctgttgggccagatagatggctccccaataccagaagtgagttcggcaaagagaaggccacggagaatgaccccattttggagaggggtttccctcaggcctattggagcctcctgccgggatgattctgagtgtatcacaaggctatgcagaaaaagacgctgttccttaagtgtggcccaggaatgatgtacataccagggaaagaaaggacagcagtcacctccgacaatgctccgttctatggaatattgattaactgcattttggctggagacacccaagtgaagcaatcttgtatttttaatatttaaaggcagatgtacgctttaaattggtctccatttcttcttagaatgttgatatatggataagcataactaaacttgtcaatttagagtttatttttctatggatactattaaatgtctcaaattg

SEQ ID NO: 421 - protein, 77 aa, Homosapiens
MWHLKLCAVLMIFLLLLGQIDGSPIPEVSSAKRRPRRMTPFWRGVSLRPIGASCRDDSECITRLCRKRRCSLSVAQE

SEQ ID NO: 422 - DNA, 8192 bp, Homosapiens
agtccagctgccgtcgccgccgccagcggacggggcggggatcctggtgccaggtcttcgttaacccgcccccgccgcctcagtcagctgtcccagcccgggcccgaccgtcatggagcggtgcggggcctacgcctgttccgtgtgaggcgcatcgctgccgccgccgccgacgccgccttcgtttgtcgaggcctccggaacccccgccgcctcccggagcccctcgcccttggcagcctgtcaccgccccctgggcgggctcgaatgcgcgtccggtgaaggtgcaggcccggcgccgccactgccgcagccaggagatggttcgggcctagcggagccgggactggagcaacatgaaccgtgaagaccggaatgtgctgcgtatgaaagaacgggaaaggcggaatcaggaaattcagcagggcgaagacgccttcccacctagctctcctctctttgcagagccatacaaagttactagcaaagaagataagttatcaagtcgtattcagagtatgcttggaaactacgatgaaatgaaggatttcataggagacagatctataccaaagcttgttgcaattcccaagcctacagtaccaccatcagcagatgaaaaatctaacccaaatttctttgaacagagacatggaggctctcatcagagtagcaaatggactccagtaggacccgcacccagcacttctcagtctcagaaacggtcctcaggcttacagagtggacatagtagccagcggaccagcgcaggtagcagtagtggcactaacagtagtggtcagaggcacgaccgtgagtcatataacaatagtgggagcagtagccggaaaaaaggccagcatggatcagaacactccaaatcacgttcttccagccctggaaaaccccaggctgtttcttcattaaactctagtcattccaggtctcatgggaatgatcaccatagcaaggaacatcaacgctccaaatcacctcgggaccctgatgcaaactgggattctccttcccgtgtacctttttcaagtgggcagcactcaactcaatctttcccaccctcattgatgtcaaagtccaattcaatgttacagaaacccactgcctatgtgcggcccatggacggacaggagtccatggaaccaaagctgtcctctgagcactacagcagccaatcccatggcaacagcatgactgagctgaagcccagcagcaaagcacatctcaccaagctgaaaataccttcccaaccactggatgcatcagcttctggtgatgtgagctgtgtggatgaaatcctaaaagagatgacgcattcatggcctccccctctaacggctattcatacaccatgcaaaacagaaccttccaaatttccttttccaactaaggagtctcagcagtccaattttggcactggagaacaaaaaagatataatccttctaaaacttcaaatgggcaccagtctaaatctatgttaaaagatgacttaaaactaagcagcagtgaagacagtgatggggaacaggattgtgataagacaatgccgaggagtacaccaggaagtaactctgaaccttcacaccataatagtgaaggagcagataactccagggatgattctagtagccacagtggatctgaaagcagctctggatctgactcagagagtgaaagtagttccagtgacagtgaggcaaatgagccatcccagagtgcatctcccgagcctgaacccccgccaacaaacaaatggcaacttgataattggctgaataaagtgaacccacataaagtgtcacccgcctcttcagtggacagtaacatcccatcatctcaaggctacaaaaaggaaggccgagagcagggcactgggaatagctacactgatacaagtggacctaaagaaacgagttccgctactccgggacgagactccaaaaccatccaaaagggatcagaaagtgggcgtgggaggcagaaatctcctgcacagagtgacagcacaacacagagaagaactgtaggcaaaaaacaacccaaaaaggctgagaaggcagctgctgaagagcctcgtggaggcctgaagatagaaagtgaaacccctgtagacttggctagcagcatgccctccagcagacacaaagcagccaccaaaggctcaaggaaacccaatataaagaaggagtctaagtcttcccctcgacctacagcagagaaaaagaaatataagtcaacaagtaaatcttcccagaaatcaagggaaatcatagaaacagatacctcatcctcagattcagatgaaagtgagagccttcctccttcctcacaaactcctaagtaccccgagagcaataggactcctgttaaaccctcctcagtggaggaagaagatagcttttttcggcaacgaatgttctctcctatggaagagaaggaacttctttcacccctcagtgagcctgatgacaggtacccacttattgtgaagattgacctgaatcttttgactagaataccaggaaagccttacaaagaaacagagccgcccaagggggaaaagaaaaatgtgccagaaaagcacacgagagaggctcagaaacaagcctcagaaaaagtttccaacaaaggcaagaggaagcataagaatgaagatgataaccgagccagtgagagcaagaaacccaaaacggaggacaagaattcagcaggccataagccatccagcaacagagagtcatctaagcagagtgctgcaaaagaaaaggatttgttgccttctcccgctgggcctgttccttcaaaagatccaaaaacagagcatggctctcggaagaggactattagtcagtcttcttccttaaagtcaagcagtaacagcaacaaggagacgagtggcagcagcaaaaacagttcctccacatcaaagcagaagaagaccgaagggaagacttccagtagctccaaggaggttaaggaaaaggctccaagtagctcctctaactgtcctccatctgcaccaactcttgattcttctaagcctcggagaacaaagcttgtctttgatgacagaaattattcagcagaccattatttacaagaagcaaaaaagctaaagcacaatgcagatgcattgtctgataggtttgagaaagctgtatactatcttgatgctgtggtatctttcattgaatgtgggaatgcattagagaagaatgctcaggaatccaaatccccattccctatgtattcagagacggtggatctcatcaaatacactatgaagctaaagaattacttggcaccagatgctacagctgcagataaacgactcacagtactttgcctgcgatgcgagtctttgctgtacctgaggctgttcaaactgaagaaggaaaatgctctgaagtactcaaagacactgacagagcacctgaagaattcttataataattctcaagcaccatcgcctggcttgggaagcaaagctgtggggatgccttcccctgtttctccaaagctgtcaccaggcaattcaggaaattattcatctggggccagtagtgcttctgcaagtggttcttcagtgaccattccacagaagatccaccagatggcagccagctatgttcaggtcacatccaacttcctctatgccaccgaaatttgggaccaagctgaacagctttccaaagagcaaaaagaattctttgctgaactggataaagtaatgggccctctcatctttaatgcaagcatcatgacagatctagttcgttatacccggcagggactgcactggcttcgccaggatgccaagttgatatcttgaactgaacacattctcgttgcctctgattttctccacaacactgtgtcacatcacgaaggaaaactgccataacataccacctagtcgacactaagaatgaggaatagttttctcctcgttggttcatgtgttgttgtttttgataatccaaagcgatcatgtcagttggccctttaatatttccaatgtgaaagattatttaaatgcttttaaatctgcagcacattgataagatggtttccgtgagctatgataagattgaaattccagttgcaattcataactaatgaattgaaattttatttattttaatttttttaagttcccagattggggctagtttaagacttagttatttctgcctataaatttactctgttgaatatttagcataaatttaatgtagacatttttatttatataccttgggagctttattacctaatatctttttgtggtagctgttctaagagtaagaattggttcgtctaaaataaggacatattctttctacacctgctacctgacctgatatttgaaatcttaactccaattttattattgtggaatttacagttagtattaaggatattcttctacacatgaaaaaatcacttaaatatgagaaaatggcattctacatgtatgtactatgaaatgtgtctgatttggtatgcattatttcaaaaactgtgaatgtgtgttaataacactacagcaatcacacagtgactatagcttgcatttaatgcattacaaaagagggaggacaaactttctagaagaagcatttcatgttgaagggtttcataaaaggacaatcctgaacgttacggattttattaaaaccatatgttattttttgttgctaatcatttgacacttaatcgaaacagaataagttactgtggaaaaaaggatgatccaactcctgaggattgccgcctgtgtgtctttaattgattatctttgatagttagagttatttttcagatttttccccctcatactggattgtgatgctctgatatgagcatgcaatgactgatacagaaataggctggagcttcggtgtgtgcttttgctatacagcttacagttctaatgcctgatgtagagatgatgaatttctcctttttaaacctatcttctgtttactccttttgcattatgaaggccctcttcaatgatgtatgtttctgatggaatcagaaaatttcacactagaaaagtgtacctaacttgattcagtgtgagctcttgggacagggagtggagccaggggtagagcttaaagaagctggctctgtaagagttgtatatcaaagtaccttttgctacaaggtgcatatagaagtctaagataagaaatgtaccctctatactttatttttcatgcccctatcatgtttggtgtgccttaaatcttacctttaaatgaagactctatggattgtttacaaatgaagttttacactaggaccagatcgtccatacatgattggtcttctacaataataatgttcaattctttcattttaaatctttctttagggtcatataaagattagttctttcagaaaagctattgctttggtacatgacttagtctaaccagttgggtaatgctgctttgaaaaatagtttgtccctctccccattccaaaaatgaatccattcagtcagaaaaaaagattatcctactatttgtagatgattgctaaggcttgaaataggaaaggggaaagaagggatagaaaagtttcaagtccagtagtgcagtgaatcctttgtgtttgagacttttttacacttatttctgaagttagtgaactttcattgtccctgtggcctcatatttatagagcttcttaactgttttgtacctcagattgtttttagatgtcattgaagattgagatgtacaaattatgttgaatttaacctgtttctcttggagaaattgcctctgatatctttctaacttaatcttagtgtgttctaggaacagttttccataagaggacaacttctcaatgatcatgatagttatttagtaagaaataatggttgttaatcaaatacatgttatgtcttgtccttctctgatttttctgacttggattccttaatttgcagtgatgtcttagaaatggaaaaagtatcctctgggctttcagactttcagcaacaacagccagtgggatacctctgagttcttgtgttctagtctcttgtatgtcctgaaaggcagcaggagcatttttggggtcacactgatattttgttaaagcagagtttcctgcatggtttatggtgctgctctaatattttctctttaaaactgtgtcaatttttggagaatgaatttttcaaccttttcattgtggaggatttttcccacaaggtagtaatgggcaatggatcaaaatcctatcataaatgattgaattttcaatgtcatagtgtgtggaaatactactccctttcctccatgtctatcttcttagatgttctgtctttgtcatcatctgctccagcacatactttggactcctttacaggtgaccttcccccctccctcctcaataggtgtcctcagtgttttctaagcatttaaaactgaatttgacaagtggctaaaaacttagtctgagacttgtacttagtatatggttaattatagaaacaacaactattttaaacagttactctgttgactgctctttatgactacacttgtatgccaggaggcagcagcctatacaccattagactctttacaagcaaccaacgaaccaattgcagtggttgcagttgtcacagtagtcttgcctgggccagactgggctgggctgtgggaagcattccccttcaggggagtttccacagctcagcccaggctccagtctggctagagagcatccagcccattccttgcctcagtgccacctttttctgggcaagtagccaagaagtgactttatatgcagtgagtacttcagataaacttacagctacagctgccgaagagtggagaaggttgaccaccatttatttaattctctagtgtaaaaacaattgagagcagtgtgcgtgagcccacagacacctgtgtttctgggagctctggcagtggcggattcataggcacttgggctgcactttgaatgacacacttggctttattagattcactagtttttaaaaaattgttgttcgtttcttttcattaaaggtttaatcagacagatcagacagcataattttgtatttaatgacagaaacgttggtacatttcttcatgaatgagcttgcattctgaagcaagagcctacaaaaggcacttgttataaatgaaagttctggctctagaggccagtactctggagtttcagagcagccagtgattgttccagtcagtgatgcctagttatatagaggaggagtacactgtgcactcttctaggtgtaagggtatgcaactttggatcttaaaattctgtacacatacacactttatatatatgtatgtatgtatgaaaacatgaaattagtttgtcaaatatgtgtgtgtttagtattttagcttagtgcaactatttccacattatttattaaattgatctaagacactttcttgttgacaccttgaatattaatgttcaagggtgcaatgtgtattcctttagattgttaaagcttaattactatgatttgtagtaaattaacttttaaaatgtatttgagcccttctgtagtgtcgtagggctcttacagggtgggaaagattttaattttccagttgctaattgaacagtatggcctcattatatattttgatttataggagtttgtgtctgggtcccaggaacatctactggggatgactgttaggcagcttgtgatgatgttttttaaaaaacctaagtaacttggggagacagagcatttcaaacccatatagacacctatcatacctgtatatcccctaatacatggaacataaatttcatttcagctttatgcattaatgtattgaagaggcaggctttttttccagtaataatactgtacatctaaggttgctattcagtaaaactaatagaagagataattattgaataccttggaatatgtagtgagaagaggccaaatttttcatgtttgtgagcatgtctttcagatactcgctaatggagaaattcactttagacctctagaccccaaaaccaagttagcaagtgacaaaaagtaaattattaatagtctgtaaagtggatgctggtcttacaaagctcctattcacatgaaccctatggttaattagaaagaacttgctgt

SEQ ID NO: 423 - protein, 1163 aa, Homosapiens
MNREDRNVLRMKERERRNQEIQQGEDAFPPSSPLFAEPYKVTSKEDKLSSRIQSMLGNYDEMKDFIGDRSIPKLVAIPKPTVPPSADEKSNPNFFEQRHGGSHQSSKWTPVGPAPSTSQSQKRSSGLQSGHSSQRTSAGSSSGTNSSGQRHDRESYNNSGSSSRKKGQHGSEHSKSRSSSPGKPQAVSSLNSSHSRSHGNDHHSKEHQRSKSPRDPDANWDSPSRVPFSSGQHSTQSFPPSLMSKSNSMLQKPTAYVRPMDGQESMEPKLSSEHYSSQSHGNSMTELKPSSKAHLTKLKIPSQPLDASASGDVSCVDEILKEMTHSWPPPLTAIHTPCKTEPSKFPFPTKESQQSNFGTGEQKRYNPSKTSNGHQSKSMLKDDLKLSSSEDSDGEQDCDKTMPRSTPGSNSEPSHHNSEGADNSRDDSSSHSGSESSSGSDSESESSSSDSEANEPSQSASPEPEPPPTNKWQLDNWLNKVNPHKVSPASSVDSNIPSSQGYKKEGREQGTGNSYTDTSGPKETSSATPGRDSKTIQKGSESGRGRQKSPAQSDSTTQRRTVGKKQPKKAEKAAAEEPRGGLKIESETPVDLASSMPSSRHKAATKGSRKPNIKKESKSSPRPTAEKKKYKSTSKSSQKSREIIETDTSSSDSDESESLPPSSQTPKYPESNRTPVKPSSVEEEDSFFRQRMFSPMEEKELLSPLSEPDDRYPLIVKIDLNLLTRIPGKPYKETEPPKGEKKNVPEKHTREAQKQASEKVSNKGKRKHKNEDDNRASESKKPKTEDKNSAGHKPSSNRESSKQSAAKEKDLLPSPAGPVPSKDPKTEHGSRKRTISQSSSLKSSSNSNKETSGSSKNSSSTSKQKKTEGKTSSSSKEVKEKAPSSSSNCPPSAPTLDSSKPRRTKLVFDDRNYSADHYLQEAKKLKHNADALSDRFEKAVYYLDAVVSFIECGNALEKNAQESKSPFPMYSETVDLIKYTMKLKNYLAPDATAADKRLTVLCLRCESLLYLRLFKLKKENALKYSKTLTEHLKNSYNNSQAPSPGLGSKAVGMPSPVSPKLSPGNSGNYSSGASSASASGSSVTIPQKIHQMAASYVQVTSNFLYATEIWDQAEQLSKEQKEFFAELDKVMGPLIFNASIMTDLVRYTRQGLHWLRQDAKLIS

SEQ ID NO: 424 - DNA, 2136 bp, Homosapiens
accgcgctaagatggcgactcccatgcatcggctaatagcccggagacaagctgaagcgaataagcaacatgtaagatgtcagaaatgcttggaatttggacattggacttatgaatgcacaggaaaaagaaaatacctacataggccctcaaggacagcagaactaaagaaagctttaaaagaaaaagaaaacagattattattgcaacaaagcattggagaaaccaatgtagaaagaaaggccaagaaaaaaaggtctaagagtgtaaccagttccagtagcagtagcagtgacagttctgccagtgattcttcatcagagagtgaagaaacatctacctcttcctcctcagaggacagtgacactgatgaaagctcctctagttcctcatcctcagcctcctccacaacctcttcctcctcctctgattcagactcagattccagctcttccagtagcagtagcaccagcacagatagcagctctgacgatgaaccaccaaagaagaagaaaaagaaatagagttgctccattcatattggactgatggactgaaaacattgatgtgattcttgaaagggaatttagaatatgttaaggccaagtaggttaactggtgaacatttctagaattcaaaagtttctaaatgttttacattgtaagagcatagagaatattaataatggcttatagagagagacttttatttgaagggtgaatcttgttttttttatctttaaaatatatctctagaacttaaagctgaaatctgcaaatctgtttgtgtgatgaaactatcttttctctctgtgaaataaatgccatactttgttatatatgttagtggtatgtatcagacatattttcaggatggtgcgtcaggatatctggcagtggatttctaatgcttttggctgtatgttatgtaagatttaatatgttgttactgtaagcttaggagttttcctactattaataaatgtgctctatttttacatttatgttcagaaagttatctgactttttgtcctaagtggtatgttcaaggagcctattaatatatttatagtttttgaatgctgtaagtttcaaattgctgtgttacgtcattcattttcttctggttccttaagtttttcaagttatccttttctgaggaaaattattctagaggaacctaaaaagggacaaaaaaattgaaacttcttaggagtctaatcttggtgccttctgttaaaagtcagtgtatcagaaaagaaagcagccatgtaagaggctaacttaaatagaagtgctagaaatatctttgtgtattaacatgcaataaaaggtaccattcaaagcagggggaaaggtaggaagaagaggtaatttttactgaaaattagggcaatgttggtcgccttttattaaaagctttttttaagctttcataaagattgctttttgctatttttgaaaatatggtattatagtttgtatggtaactggtcatatatgacagtctactgcatatatatgaatgactaggattaatctggtgtgtttacataggatatacatagttgaaatctagcatgaaaggttaaaaaggagatactgcacaatatttcttaaaagtaaaatgctgttattgtgatgagtctttggtttaacatcacagtattctgtgatgtctttttaactttttggaaagaggtatcatttgtagaaaaaatttgatttgggttaaatataggtttttaaaactataaatgttgtcttttttatatttttatgaaaaagcagtagaaaattacttttgaagaaaacaggctatttaaatattgaaatatatgtatgttgtgagtttaaggagcctgtaattgtcagttttacaaaaccatctgtgttcaatggttgtaaataaattctcaaaacatcatttcaaaggctgcctacagaatattatcacttgacagatagagttaataaattaccaatcaggcacattttataatgtttgtctctgtaaaggtaatattagcagttaaagaacacggatgagaaaagaatgtgttacataggttgcatcacttgcagttaaataaaactcacaatttgtgctcacaagcttaaaaaaaaaaaaaaaaa

SEQ ID NO: 425 - protein, 170 aa, Homosapiens
MATPMHRLIARRQAEANKQHVRCQKCLEFGHWTYECTGKRKYLHRPSRTAELKKALKEKENRLLLQQSIGETNVERKAKKKRSKSVTSSSSSSSDSSASDSSSESEETSTSSSSEDSDTDESSSSSSSSASSTTSSSSSDSDSDSSSSSSSSTSTDSSSDDEPPKKKKKK

SEQ ID NO: 426 - DNA, 3385 bp, Homosapiens
gctctggtgctgcggctccgctctcgtcgcaacgagatctttcgagatcttctccgcccccgctaccggcgcctcctctgcggccactgagccggagccggcctgagcagcgctctcggttgcagtacccactggaaggacttaggcgctcgcgtggacaccgcaagcccctcagtagcctcggcccaagaggcctgctttccactcgctagccccgccgggggtccgtgtcctgtctcggtggccggacccgggcccgagcccgagcagtagccggcgccatgtcggtggtgggcatagacctgggcttccagagctgctacgtcgctgtggcccgcgccggcggcatcgagactatcgctaatgagtatagcgaccgctgcacgccggcttgcatttcttttggtcctaagaatcgttcaattggagcagcagctaaaagccaggtaatttctaatgcaaagaacacagtccaaggatttaaaagattccatggccgagcattctctgatccatttgtggaggcagaaaaatctaaccttgcatatgatattgtgcagttgcctacaggattaacaggtataaaggtgacatatatggaggaagagcgaaattttaccactgagcaagtgactgccatgcttttgtccaaactgaaggagacagccgaaagtgttcttaagaagcctgtagttgactgtgttgtttcggttccttgtttctatactgatgcagaaagacgatcagtgatggatgcaacacagattgctggtcttaattgcttgcgattaatgaatgaaaccactgcagttgctcttgcatatggaatctataagcaggatcttcctgccttagaagagaaaccaagaaatgtagtttttgtagacatgggccactctgcttatcaagtttctgtatgtgcatttaatagaggaaaactgaaagttctggccactgcatttgacacgacattgggaggtagaaaatttgatgaagtgttagtaaatcacttctgtgaagaatttgggaagaaatacaagctagacattaagtccaaaatccgtgcattattacgactctctcaggagtgtgagaaactcaagaaattgatgagtgcaaatgcttcagatctccctttgagcattgaatgttttatgaatgatgttgatgtatctggaactatgaatagaggcaaatttctggagatgtgcaatgatctcttagctagagtggagccaccacttcgtagtgttttggaacaaaccaagttaaagaaagaagatatttatgcagtggagatagttggtggtgctacacgaatccctgcggtaaaagagaagatcagcaaatttttcggtaaagaacttagtacaacattaaatgctgatgaagctgtcactcgaggctgtgcattgcagtgtgccatcttatcgcctgctttcaaagtcagagaattttctatcactgatgtagtaccatatccaatatctctgagatggaattctccagctgaagaagggtcaagtgactgtgaagtcttttccaaaaatcatgctgctcctttctctaaagttcttacattttatagaaaggaacctttcactcttgaggcctactacagctctcctcaggatttgccctatccagatcctgctatagctcagttttcagttcagaaagtcactcctcagtctgatggctccagttcaaaagtgaaagtcaaagttcgagtaaatgtccatggcattttcagtgtgtccagtgcatctttagtggaggttcacaagtctgaggaaaatgaggagccaatggaaacagatcagaatgcaaaggaggaagagaagatgcaagtggaccaggaggaaccacatgttgaagagcaacagcagcagacaccagcagaaaataaggcagagtctgaagaaatggagacctctcaagctggatccaaggataaaaagatggaccaaccaccccaagccaagaaggcaaaagtgaagaccagtactgtggacctgccaatcgagaatcagctattatggcagatagacagagagatgctcaacttgtacattgaaaatgagggtaagatgatcatgcaggataaactggagaaggagcggaatgatgctaagaacgcagtggaggaatatgtgtatgaaatgagagacaagcttagtggtgaatatgagaagtttgtgagtgaagatgatcgtaacagttttactttgaaactggaagatactgaaaattggttgtatgaggatggagaagaccagccaaagcaagtttatgttgataagttggctgaattaaaaaatctaggtcaacctattaagatacgtttccaggaatctgaagaacgaccaaaattatttgaagaactagggaaacagatccaacagtatatgaaaataatcagctctttcaaaaacaaggaggaccagtatgatcatttggatgctgctgacatgacaaaggtagaaaaaagcacaaatgaagcaatggagtggatgaataacaagctaaatctgcagaacaagcagagtttgaccatggatccagttgtcaagtcaaaagagattgaagctaaaattaaggagctgacaagtacttgtagccctataatttcaaagcccaaacccaaagtggaacctccaaaagaggaacaaaaaaatgcagagcagaatggaccagtggatggacaaggagacaacccaggcccccaggctgctgagcagggtacagacacagctgtgccttcggattcagacaagaagcttcctgaaatggacattgattgattccaacacttgtttctattaaaacagactattataaagctttaagttgtcaactttgttctaaatatcaactagcgcaagtgaatactgaagatttcttagtcagtttttaggggattttcggggaggggaaataggtaatgtatggagcattttcacttctaaatagttagatacagaaattaagtgcattgtatctttttcataatggtactatttagaagcccagttagtcttactgagcttatgcttcactcctttatgtttaaccatgtgtctacaagaataagtttgttttggaaagttgagctatagctacagctctagctatccagcagacttttcattatgacttacatggcaggagctctaattatgctttaaaaatctgttgtggagattgctttaaatgctccctgcctggtgtggggatggggtccccctctttgtgagggctggagcatggcacggcatggattaacacggcagaggaacaaaggtgtgctctgagcttcttcatatttcaccttcaccctcacctgtgttctcttccctctctcccaataaaagggctcccatta

SEQ ID NO: 427 - protein, 840 aa, Homosapiens
MSVVGIDLGFQSCYVAVARAGGIETIANEYSDRCTPACISFGPKNRSIGAAAKSQVISNAKNTVQGFKRFHGRAFSDPFVEAEKSNLAYDIVQLPTGLTGIKVTYMEEERNFTTEQVTAMLLSKLKETAESVLKKPVVDCVVSVPCFYTDAERRSVMDATQIAGLNCLRLMNETTAVALAYGIYKQDLPALEEKPRNVVFVDMGHSAYQVSVCAFNRGKLKVLATAFDTTLGGRKFDEVLVNHFCEEFGKKYKLDIKSKIRALLRLSQECEKLKKLMSANASDLPLSIECFMNDVDVSGTMNRGKFLEMCNDLLARVEPPLRSVLEQTKLKKEDIYAVEIVGGATRIPAVKEKISKFFGKELSTTLNADEAVTRGCALQCAILSPAFKVREFSITDVVPYPISLRWNSPAEEGSSDCEVFSKNHAAPFSKVLTFYRKEPFTLEAYYSSPQDLPYPDPAIAQFSVQKVTPQSDGSSSKVKVKVRVNVHGIFSVSSASLVEVHKSEENEEPMETDQNAKEEEKMQVDQEEPHVEEQQQQTPAENKAESEEMETSQAGSKDKKMDQPPQAKKAKVKTSTVDLPIENQLLWQIDREMLNLYIENEGKMIMQDKLEKERNDAKNAVEEYVYEMRDKLSGEYEKFVSEDDRNSFTLKLEDTENWLYEDGEDQPKQVYVDKLAELKNLGQPIKIRFQESEERPKLFEELGKQIQQYMKIISSFKNKEDQYDHLDAADMTKVEKSTNEAMEWMNNKLNLQNKQSLTMDPVVKSKEIEAKIKELTSTCSPIISKPKPKVEPPKEEQKNAEQNGPVDGQGDNPGPQAAEQGTDTAVPSDSDKKLPEMDID

SEQ ID NO: 428 - DNA, 1309 bp, Homosapiens
gctctggtgctgcggctccgctctcgtcgcaacgagatctttcgagatcttctccgcccccgctaccggcgcctcctctgcggccactgagccggagccggcctgagcagcgctctcggttgcagtacccactggaaggacttaggcgctcgcgtggacaccgcaagcccctcagtagcctcggcccaagaggcctgctttccactcgctagccccgccgggggtccgtgtcctgtctcggtggccggacccgggcccgagcccgagcagtagccggcgccatgtcggtggtgggcatagacctgggcttccagagctgctacgtcgctgtggcccgcgccggcggcatcgagactatcgctaatgagtatagcgaccgctgcacgccggcttgcatttcttttggtcctaagaatcgttcaattggagcagcagctaaaagccaggtaatttctaatgcaaagaacacagtccaaggatttaaaagattccatggccgagcattctctgatccatttgtggaggcagaaaaatctaaccttgcatatgatattgtgcagttgcctacaggattaacaggtataaaggtgacatatatggaggaagagcagaatggaccagtggatggacaaggagacaacccaggcccccaggctgctgagcagggtacagacacagctgtgccttcggattcagacaagaagcttcctgaaatggacattgattgattccaacacttgtttctattaaaacagactattataaagctttaagttgtcaactttgttctaaatatcaactagcgcaagtgaatactgaagatttcttagtcagtttttaggggattttcggggaggggaaataggtaatgtatggagcattttcacttctaaatagttagatacagaaattaagtgcattgtatctttttcataatggtactatttagaagcccagttagtcttactgagcttatgcttcactcctttatgtttaaccatgtgtctacaagaataagtttgttttggaaagttgagctatagctacagctctagctatccagcagacttttcattatgacttacatggcaggagctctaattatgctttaaaaatctgttgtggagattgctttaaatgctccctgcctggtgtggggatggggtccccctctttgtgagggctggagcatggcacggcatggattaacacggcagaggaacaaaggtgtgctctgagcttcttcatatttcaccttcaccctcacctgtgttctcttccctctctcccaataaaagggctcccatta

SEQ ID NO: 429 - protein, 148 aa, Homosapiens
MSVVGIDLGFQSCYVAVARAGGIETIANEYSDRCTPACISFGPKNRSIGAAAKSQVISNAKNTVQGFKRFHGRAFSDPFVEAEKSNLAYDIVQLPTGLTGIKVTYMEEEQNGPVDGQGDNPGPQAAEQGTDTAVPSDSDKKLPEMDID

SEQ ID NO: 430 - DNA, 4676 bp, Homosapiens
ccgggcggcgctgggcttttatctgcggacccgccgggagggagccagatcccagcgatcttccccgacggcagcgctttacccagaggctgccggcggctcgtagctgggttcagctctgcgtccacgccagcccggagcccggggggcaaggggtctgtcccgggcgcagcgagaggatggtcatccgcgtgttcatcgcctcttcctcgggcttcgtggcgataaagaagaagcagcaagatgtggttagatttctggaagccaacaagatagagtttgaggaggtggatatcacaatgtcagaagaacagaggcaatggatgtacaaaaacgtccccccggaaaagaaacccactcagggcaaccccctgccacctcagatatttaatggcgaccgatactgtggagattatgacagtttttttgaatccaaggaaagcaacacagtcttttcatttttaggcctgaaaccacggttggcatcaaaggcagaaccttagagaagaagagtggaagatgacggagatgcattttgaagcacccctggtactcagcacacacatgcttacctaatgcatcactgtgacaaaagccacacgcattatcagtaactttgcttgccacggaaaaggtgtttttgaaagatgtggctataatgagaattgcatgattgctttaaaccaaatcaggtggtggattttttttttcttattctatttgcctgcagttgcctcactcacctggaaataccgtcacctgttacaggtgtactttcttaatgactgaaagataagtgggtagcaccgtcagagagaaaatgttggatctgccctaggttatagtagatgccggaattgcgtaaacccacttctctttaagctgcctggattgcacctttgaaatatgtctgccaagttgttagaatctttgaatcagaaggaaaaaaagcagcgctggttgacaaagggtgttgaagatttttgctgcagaatcagttacaaacatcacagttcccatgctttgtaataacacctggtgaaaaagttagatattctagacttgttttagtaatggaaactcttacctccacatattatcttacagatgtttccagaaatccctgttgtaacatcaagtgatcagaactaagttactgggatgacaataattgctatttgaaatatatgcttctttatttcttgcaaggggcaagtttcacccaaatgcctgagactgcttgaaagatatattttaagtggtgcactaattagtgaatatataggaaaattatctgacgagtatctgaaggcattttcagctctagcaatttatttataatatataagttcatatattttttaatccagctcccctaacagacagctgctgcttctattttgtgaagggactatattttttgagaaaggaaaatctcagttagatatattttgtgaacccttgattagacatattaaaatataccaatgttgtagtaaaatttaatttttccttttgttacttttcatttgcctctaattttgcttgctcatatttctggccaatgtacagcctcatatttttcagagtaatacagatacttgttctcattccgtatatgagcacaagtaaggtttcagagcaacacacatgagaaagagagtaacccggaattgtacttgtcaagcaaaatctatactcctattggagtggatgctgatgaacatcgaacatatctacttcattagagcagaggctatttttctgcattcttgtccctataacagggatgcttaattttttttttaacttagagttttaaattgccaaacatgggaacagccttgaataggataaattttcagagggctgcctaaaatattttatttctagcatcctgattctggacttttcattataattctgagcaggaaatttataagaaattgaaagagcagaagaattacagccctgtcacatgtgcccagcactccgccccatgccttgctaaatgtagactaaagaacttgttgaatgctaaggctgaaatcccaacctgagatttgtagtccaggattacaaccagaaggaaagtatgacagatttctacttaactagaatggacacatgatccacaattttctcttcaggggaagctgttgtcaaattatggatattactggttagttgtcattaagtaagatccaggtcaaattccatttgacaaatcccagggactatccaggaatttttttttaactggatattgtgtttgagtatgtgagtcttctgataaaactcagaatttctttttaagcagttgtaaaaattgtcatgttgtaattcattactcagctaacatttagtctactcttgctagtgagtgccaagaaccaacttggtaaggttgaggctttgcaagttaactgctggggttataggatcaataccatacttgctagacaaagctacccagatttgtcttatattataatttttgagttaaccgtagtatacctattatgattatagtaaacagactagtgggtagtaatgctaaattaccatcacagttatgtgccatctccccaccccatttttttttttttttttttgatcagcaaagaaatacaggagaccagtctcgagtggtgctgtacttgttatgagtggggcagcagcacagtgtgtggcatttacatggtacccaggctccacagagtaccaagatgttgccctctgggaccacacttagctcagagaatatggggtccttacttgtattctgttatcagctgattttgaaacatataataatgattttcttgttcccttctttaactagctgcctttagattttgataatcacagtcttaaaatactaggaaagaagtggatgggaattgtaggcatagatttcatatcaagggcatttcaagacagaatttttatttcctgtagtaggcttgctggagcaaaggaaatgtgctgctaaaaatcaacttatgccattttaaaattagataaaatatggagtgccatcctgctaggtgagtacagaccagaagaaaatttagttgggaaaatacttgtttttccaaattccggtgttttattacaatcaaagaagaggaaagcaaggtattttttcacctcagattctaatatattctagatttgtttctgttttatagatttaattcaatacctccacatagatgtttttatattacatgaatttaataataaactaaacttttttttgtctcccgttattgaaaagtaccaaagcttctttctgttgtgtttgattttactataggggttttgctttttctagagatacttttcatttaacagcttttgttaagtgtcaggctgcactttgctccatataattattgttttcagatttcaacttgtatgtgtttgtctcttaaagcattggtgaaatcacatattttatattcagcataaaggagaataaattccagaaaacacatattctgaaaatggagtgtttgttccctgccatttttcacacctctcttaattttagttctgtttagttgagaggctgtgattttactcttgcctgtgaacctcatgcatgaaagcagcacattaaattgtaaaaatacaaacagatcgtgtgatcattcaaggagccagacatgaggtcctgcacgagggtgttgggaggacaccacagattcatctcagacagtgatcaggactgaggatggagttaaatcactcagcccctgggtggggtggggtggttcaaatggatgactgatctcctgagtacactgaagccacaggctggtggccatgttctctgaattgggtgcagaagacaagggcagagtggctgcggcccctattacctttgtagcagccacatcagaaagcagaagaaaacagtatttctgaaggcattgtttgaggttgatctcagcactgaacgatttcaagccctacgcaccagaacagaaggagggtggaggaagtgatcagagggaacgagctgtaggtttgcagaaatgtgtgaaaccaaaatgatcactgcctacttgtgattcaaatcttcagagttttcctagttcttctagaaatacatgtcaggtttgtttgttcatcctttctgtcagcatggatcaagcccctaaaatgtggtaagtgttgtcagagcagggcaatatctctactctcaagtatgaggggaatagaaacaaagcagcagttttagccagggttcaatgatagagtggaggtaaattaagagcctccaggctgtgattcaccatttgagacattatacataatttgtttttgttataagccatttgaatttttaaaaaatttcatacatgcaatggaatatagatatgtatatacacatataatatatatgctaaagtataaagagtaataataatgacaataaacaaacccctgtgtgcctaccacccaccttattgcctttcctttgaggtaccgtgtgcggtttcctgaacctatctctatccctgtctgatagagggaacccctgtactgaactttgtgttgaccatagccttcttgtctttcatcactttatctccatgtatgtatccttaaagaataataaatggaattaaactcaaaaaaaaaaaaaaaaaaaaaaaaaaaaa

SEQ ID NO: 431 - protein, 107 aa, Homosapiens
MVIRVFIASSSGFVAIKKKQQDVVRFLEANKIEFEEVDITMSEEQRQWMYKNVPPEKKPTQGNPLPPQIFNGDRYCGDYDSFFESKESNTVFSFLGLKPRLASKAEP

SEQ ID NO: 432 - DNA, 6132 bp, Homosapiens
aattggaagcaaatgacatcacagcaggtcagagaaaaagggttgagcggcaggcacccagagtagtaggtctttggcattaggagcttgagcccagacggccctagcagggaccccagcgcccgagagaccatgcagaggtcgcctctggaaaaggccagcgttgtctccaaactttttttcagctggaccagaccaattttgaggaaaggatacagacagcgcctggaattgtcagacatataccaaatcccttctgttgattctgctgacaatctatctgaaaaattggaaagagaatgggatagagagctggcttcaaagaaaaatcctaaactcattaatgcccttcggcgatgttttttctggagatttatgttctatggaatctttttatatttaggggaagtcaccaaagcagtacagcctctcttactgggaagaatcatagcttcctatgacccggataacaaggaggaacgctctatcgcgatttatctaggcataggcttatgccttctctttattgtgaggacactgctcctacacccagccatttttggccttcatcacattggaatgcagatgagaatagctatgtttagtttgatttataagaagactttaaagctgtcaagccgtgttctagataaaataagtattggacaacttgttagtctcctttccaacaacctgaacaaatttgatgaaggacttgcattggcacatttcgtgtggatcgctcctttgcaagtggcactcctcatggggctaatctgggagttgttacaggcgtctgccttctgtggacttggtttcctgatagtccttgccctttttcaggctgggctagggagaatgatgatgaagtacagagatcagagagctgggaagatcagtgaaagacttgtgattacctcagaaatgattgaaaatatccaatctgttaaggcatactgctgggaagaagcaatggaaaaaatgattgaaaacttaagacaaacagaactgaaactgactcggaaggcagcctatgtgagatacttcaatagctcagccttcttcttctcagggttctttgtggtgtttttatctgtgcttccctatgcactaatcaaaggaatcatcctccggaaaatattcaccaccatctcattctgcattgttctgcgcatggcggtcactcggcaatttccctgggctgtacaaacatggtatgactctcttggagcaataaacaaaatacaggatttcttacaaaagcaagaatataagacattggaatataacttaacgactacagaagtagtgatggagaatgtaacagccttctgggaggagggatttggggaattatttgagaaagcaaaacaaaacaataacaatagaaaaacttctaatggtgatgacagcctcttcttcagtaatttctcacttcttggtactcctgtcctgaaagatattaatttcaagatagaaagaggacagttgttggcggttgctggatccactggagcaggcaagacttcacttctaatggtgattatgggagaactggagccttcagagggtaaaattaagcacagtggaagaatttcattctgttctcagttttcctggattatgcctggcaccattaaagaaaatatcatctttggtgtttcctatgatgaatatagatacagaagcgtcatcaaagcatgccaactagaagaggacatctccaagtttgcagagaaagacaatatagttcttggagaaggtggaatcacactgagtggaggtcaacgagcaagaatttctttagcaagagcagtatacaaagatgctgatttgtatttattagactctccttttggatacctagatgttttaacagaaaaagaaatatttgaaagctgtgtctgtaaactgatggctaacaaaactaggattttggtcacttctaaaatggaacatttaaagaaagctgacaaaatattaattttgcatgaaggtagcagctatttttatgggacattttcagaactccaaaatctacagccagactttagctcaaaactcatgggatgtgattctttcgaccaatttagtgcagaaagaagaaattcaatcctaactgagaccttacaccgtttctcattagaaggagatgctcctgtctcctggacagaaacaaaaaaacaatcttttaaacagactggagagtttggggaaaaaaggaagaattctattctcaatccaatcaactctatacgaaaattttccattgtgcaaaagactcccttacaaatgaatggcatcgaagaggattctgatgagcctttagagagaaggctgtccttagtaccagattctgagcagggagaggcgatactgcctcgcatcagcgtgatcagcactggccccacgcttcaggcacgaaggaggcagtctgtcctgaacctgatgacacactcagttaaccaaggtcagaacattcaccgaaagacaacagcatccacacgaaaagtgtcactggcccctcaggcaaacttgactgaactggatatatattcaagaaggttatctcaagaaactggcttggaaataagtgaagaaattaacgaagaagacttaaaggagtgcttttttgatgatatggagagcataccagcagtgactacatggaacacataccttcgatatattactgtccacaagagcttaatttttgtgctaatttggtgcttagtaatttttctggcagaggtggctgcttctttggttgtgctgtggctccttggaaacactcctcttcaagacaaagggaatagtactcatagtagaaataacagctatgcagtgattatcaccagcaccagttcgtattatgtgttttacatttacgtgggagtagccgacactttgcttgctatgggattcttcagaggtctaccactggtgcatactctaatcacagtgtcgaaaattttacaccacaaaatgttacattctgttcttcaagcacctatgtcaaccctcaacacgttgaaagcaggtgggattcttaatagattctccaaagatatagcaattttggatgaccttctgcctcttaccatatttgacttcatccagttgttattaattgtgattggagctatagcagttgtcgcagttttacaaccctacatctttgttgcaacagtgccagtgatagtggcttttattatgttgagagcatatttcctccaaacctcacagcaactcaaacaactggaatctgaaggcaggagtccaattttcactcatcttgttacaagcttaaaaggactatggacacttcgtgccttcggacggcagccttactttgaaactctgttccacaaagctctgaatttacatactgccaactggttcttgtacctgtcaacactgcgctggttccaaatgagaatagaaatgatttttgtcatcttcttcattgctgttaccttcatttccattttaacaacaggagaaggagaaggaagagttggtattatcctgactttagccatgaatatcatgagtacattgcagtgggctgtaaactccagcatagatgtggatagcttgatgcgatctgtgagccgagtctttaagttcattgacatgccaacagaaggtaaacctaccaagtcaaccaaaccatacaagaatggccaactctcgaaagttatgattattgagaattcacacgtgaagaaagatgacatctggccctcagggggccaaatgactgtcaaagatctcacagcaaaatacacagaaggtggaaatgccatattagagaacatttccttctcaataagtcctggccagagggtgggcctcttgggaagaactggatcagggaagagtactttgttatcagcttttttgagactactgaacactgaaggagaaatccagatcgatggtgtgtcttgggattcaataactttgcaacagtggaggaaagcctttggagtgataccacagaaagtatttattttttctggaacatttagaaaaaacttggatccctatgaacagtggagtgatcaagaaatatggaaagttgcagatgaggttgggctcagatctgtgatagaacagtttcctgggaagcttgactttgtccttgtggatgggggctgtgtcctaagccatggccacaagcagttgatgtgcttggctagatctgttctcagtaaggcgaagatcttgctgcttgatgaacccagtgctcatttggatccagtaacataccaaataattagaagaactctaaaacaagcatttgctgattgcacagtaattctctgtgaacacaggatagaagcaatgctggaatgccaacaatttttggtcatagaagagaacaaagtgcggcagtacgattccatccagaaactgctgaacgagaggagcctcttccggcaagccatcagcccctccgacagggtgaagctctttccccaccggaactcaagcaagtgcaagtctaagccccagattgctgctctgaaagaggagacagaagaagaggtgcaagatacaaggctttagagagcagcataaatgttgacatgggacatttgctcatggaattggagctcgtgggacagtcacctcatggaattggagctcgtggaacagttacctctgcctcagaaaacaaggatgaattaagtttttttttaaaaaagaaacatttggtaaggggaattgaggacactgatatgggtcttgataaatggcttcctggcaatagtcaaattgtgtgaaaggtacttcaaatccttgaagatttaccacttgtgttttgcaagccagattttcctgaaaacccttgccatgtgctagtaattggaaaggcagctctaaatgtcaatcagcctagttgatcagcttattgtctagtgaaactcgttaatttgtagtgttggagaagaactgaaatcatacttcttagggttatgattaagtaatgataactggaaacttcagcggtttatataagcttgtattcctttttctctcctctccccatgatgtttagaaacacaactatattgtttgctaagcattccaactatctcatttccaagcaagtattagaataccacaggaaccacaagactgcacatcaaaatatgccccattcaacatctagtgagcagtcaggaaagagaacttccagatcctggaaatcagggttagtattgtccaggtctaccaaaaatctcaatatttcagataatcacaatacatcccttacctgggaaagggctgttataatctttcacaggggacaggatggttcccttgatgaagaagttgatatgccttttcccaactccagaaagtgacaagctcacagacctttgaactagagtttagctggaaaagtatgttagtgcaaattgtcacaggacagcccttctttccacagaagctccaggtagagggtgtgtaagtagataggccatgggcactgtgggtagacacacatgaagtccaagcatttagatgtataggttgatggtggtatgttttcaggctagatgtatgtacttcatgctgtctacactaagagagaatgagagacacactgaagaagcaccaatcatgaattagttttatatgcttctgttttataattttgtgaagcaaaattttttctctaggaaatatttattttaataatgtttcaaacatatataacaatgctgtattttaaaagaatgattatgaattacatttgtataaaataatttttatatttgaaatattgactttttatggcactagtatttctatgaaatattatgttaaaactgggacaggggagaacctagggtgatattaaccaggggccatgaatcaccttttggtctggagggaagccttggggctgatgcagttgttgcccacagctgtatgattcccagccagcacagcctcttagatgcagttctgaagaagatggtaccaccagtctgactgtttccatcaagggtacactgccttctcaactccaaactgactcttaagaagactgcattatatttattactgtaagaaaatatcacttgtcaataaaatccatacatttgtgtgaaa

SEQ ID NO: 433 - protein, 1480 aa, Homosapiens
MQRSPLEKASVVSKLFFSWTRPILRKGYRQRLELSDIYQIPSVDSADNLSEKLEREWDRELASKKNPKLINALRRCFFWRFMFYGIFLYLGEVTKAVQPLLLGRIIASYDPDNKEERSIAIYLGIGLCLLFIVRTLLLHPAIFGLHHIGMQMRIAMFSLIYKKTLKLSSRVLDKISIGQLVSLLSNNLNKFDEGLALAHFVWIAPLQVALLMGLIWELLQASAFCGLGFLIVLALFQAGLGRMMMKYRDQRAGKISERLVITSEMIENIQSVKAYCWEEAMEKMIENLRQTELKLTRKAAYVRYFNSSAFFFSGFFVVFLSVLPYALIKGIILRKIFTTISFCIVLRMAVTRQFPWAVQTWYDSLGAINKIQDFLQKQEYKTLEYNLTTTEVVMENVTAFWEEGFGELFEKAKQNNNNRKTSNGDDSLFFSNFSLLGTPVLKDINFKIERGQLLAVAGSTGAGKTSLLMVIMGELEPSEGKIKHSGRISFCSQFSWIMPGTIKENIIFGVSYDEYRYRSVIKACQLEEDISKFAEKDNIVLGEGGITLSGGQRARISLARAVYKDADLYLLDSPFGYLDVLTEKEIFESCVCKLMANKTRILVTSKMEHLKKADKILILHEGSSYFYGTFSELQNLQPDFSSKLMGCDSFDQFSAERRNSILTETLHRFSLEGDAPVSWTETKKQSFKQTGEFGEKRKNSILNPINSIRKFSIVQKTPLQMNGIEEDSDEPLERRLSLVPDSEQGEAILPRISVISTGPTLQARRRQSVLNLMTHSVNQGQNIHRKTTASTRKVSLAPQANLTELDIYSRRLSQETGLEISEEINEEDLKECFFDDMESIPAVTTWNTYLRYITVHKSLIFVLIWCLVIFLAEVAASLVVLWLLGNTPLQDKGNSTHSRNNSYAVIITSTSSYYVFYIYVGVADTLLAMGFFRGLPLVHTLITVSKILHHKMLHSVLQAPMSTLNTLKAGGILNRFSKDIAILDDLLPLTIFDFIQLLLIVIGAIAVVAVLQPYIFVATVPVIVAFIMLRAYFLQTSQQLKQLESEGRSPIFTHLVTSLKGLWTLRAFGRQPYFETLFHKALNLHTANWFLYLSTLRWFQMRIEMIFVIFFIAVTFISILTTGEGEGRVGIILTLAMNIMSTLQWAVNSSIDVDSLMRSVSRVFKFIDMPTEGKPTKSTKPYKNGQLSKVMIIENSHVKKDDIWPSGGQMTVKDLTAKYTEGGNAILENISFSISPGQRVGLLGRTGSGKSTLLSAFLRLLNTEGEIQIDGVSWDSITLQQWRKAFGVIPQKVFIFSGTFRKNLDPYEQWSDQEIWKVADEVGLRSVIEQFPGKLDFVLVDGGCVLSHGHKQLMCLARSVLSKAKILLLDEPSAHLDPVTYQIIRRTLKQAFADCTVILCEHRIEAMLECQQFLVIEENKVRQYDSIQKLLNERSLFRQAISPSDRVKLFPHRNSSKCKSKPQIAALKEETEEEVQDTRL

SEQ ID NO: 434 - DNA, 5975 bp, Homosapiens
ggacagcagcgggttaagtgccgcccgcgcggagacggctgagtccggagccgcggctccgagctcgcattcggatccgctagagcaggaagatggcgacggacggcgcgagctgcgagcccgacttgtcccgggccccggaggacgcggcgggggccgcggcggaggcggcgaaaaaagagtttgatgtggatactctcagtaaatccgagctgcggatgctcctcagcgtgatggaaggggagctggaggccagagaccttgtcatcgaggccctgcgggctcgcaggaaggaggtatttatccaggaacggtatgggagatttaatctaaatgacccgttcctggcactccagagagactatgaagcaggtgctggtgacaaagagaagaagccagtttgtaccaaccccctctccatccttgaagcagtcatggcccactgcaagaaaatgcaagaaaggatgtccgcacagctggctgctgctgagagcagacaaaagaagctggaaatggagaagcttcagctacaagcccttgagcaagagcacaagaagctggctgcccgccttgaggaagagcgtggcaagaacaagcaggtggtcctgatgctggtcaaagagtgcaagcagctctcaggcaaagtcatagaggaggcccagaagctcgaagacgtaatggccaaactggaagaggaaaagaaaaagacgaatgaattagaagaggaactctccgctgagaaacgaagaagcacagaaatggaagctcagatggaaaaacaactctctgagtttgacactgagcgggaacagcttcgtgccaagctgaaccgggaagaagcacacaccactgacctcaaagaggagatagacaagatgaggaaaatgattgagcaactgaaaaggggaagtgacagcaaaccaagcctctctcttccacggaagacaaaagataggcgtttggtttccatatctgtgggaacagaaggaactgtgacaaggtctgttgcatgccagacagacctagtgacagaaaatgctgaccacatgaaaaagttgcctttaaccatgcctgtaaaaccttccacagggagtcccctagtttctgcaaatgcaaaagggagcgtgtgcaccagtgccaccatggccagaccaggtattgacaggcaggcttcctatggtgacttgattggcgcttctgtacccgctttcccacctccaagtgcaaacaaaattgaggaaaatggaccaagcactggctcaacaccagatccaaccagtagcacacccccacttcccagtaacgctgcccctcccaccgctcaaacaccaggcatagctcctcagaactcgcaagctccacctatgcacagtttacattcaccatgtgccaacacctctttgcatccaggtctaaacccacgaatccaagcagctagatttagatttcagggcaatgctaacgacccagaccaaaatggaaatactacccaaagtcctccgtcaagagatgtctcgcctacaagtcgtgacaacctagtggccaaacaactagctcggaatactgtgacccaagcactgtcaagatttacaagccctcaagcaggtgctccctcaaggcctggagtgcccccaacaggggatgttggcacccaccctccagttggtcggaccagtttaaagactcatggtgtagcacgagttgacagaggaaatcctcctcctatccctccaaaaaagccagggctctcccaaactccttctccaccacacccccaactcaaggttattatagacagcagcagggcctcgaacacaggggccaaagttgataacaaaactgtggcttcgactccttccagtttgccacaagggaacagggtgatcaatgaggagaaccttcctaagtcatcctcccctcagctgccaccaaaaccatccatagatttaactgtggcacctgcaggctgtgccgtttcagccctggccacgtctcaggtgggtgcctggcctgctgcaacccccggactgaaccaacctgcatgttcagacagttcccttgtcattcctaccaccattgccttttgctcttccataaaccccgttagtgcctcatcctgtagaccaggtgcctcagacagcctcctggtaacagcatcaggctggtcaccctccctaacccctttgctaatgagtggtggtcctgcccccctggctggcaggcccacccttcttcagcaagctgctgcccagggaaatgtcactttattatcaatgctgcttaatgaagaaggactggacattaattactcctgtgaagatggccattctgccttgtattctgctgctaagaatggacatacagactgtgtgagattgctgctgagtgcagaagcccaagtcaatgctgctgataaaaatggcttcacacccttgtgtgctgcagctgctcagggacatttcgagtgtgtagaattattaatttcatatgatgctaacattaatcatgctgctgatggaggacagacacctctatacctggcctgtaaaaatggaaataaagaatgtattaaactcttgttggaagctggaaccaatcgaagtgtaaaaaccacagatggctggacaccagttcacgcagctgtggacactggtaatgtggacagcctcaagcttcttatgtaccatagaataccagctcatggaaattctttcaatgaggaggagtccgagtcaagtgtctttgacttggatggaggagaagagagtcctgaaggcatatccaagcctgttgttcctgcagacctcattaaccacgccaacagagaaggctggactgctgcccacattgctgcttccaaaggttttaagaactgcctagaaatcttgtgtaggcacggagggcttgagccagaaaggagagacaagtgcaatcggactgtgcatgatgttgccactgatgactgcaagcatttgctggagaatctgaatgctcttaaaatacccttaaggatttcagtgggtgagattgaaccaagcaactatggttctgatgacttggaatgtgaaaacacaatatgtgctttaaatatccgcaaacagacatcatgggatgatttttcaaaagcagtgagtcaagctctgacaaatcatttccaggcaatctcttctgatggatggtggagtctggaagacgtgacttgcaataacaccactgattccaacatcggcctcagtgcaagaagcatacgatccatcacgctaggaaatgtgccgtggtcagtgggtcagagcttcgcgcagtccccgtgggactttatgaggaagaataaggcagagcacatcactgtgcttttgtcaggtcctcaagaaggctgtctcagtagtgtgacttatgcctccatgatccctctccagatgatgcagaactacctcaggctggttgagcaatatcataatgtcattttccacggcccagaaggaagcttgcaagactacatagtacatcagcttgcactctgcctgaagcacagacaaatggctgcaggattctcctgtgaaatagtgagagctgaagtagatgctggtttttccaaggaacagctactagacctgttcattagtagcgcttgtctgatcccagtgaaacaatctcccagtaagaagaaaatcatcatcattttagaaaatttagaaaaatcttcactgtcggagttattgagggactttttggcacctcttgaaaatcgcagcactgaaagcccctgcactttccaaaaaggaaatggactgtccgaatgttattactttcatgagaactgctttctgatgggaaccatcgccaaggcctgtctccagggctccgacttgctggtgcagcagcatttccgctgggtgcagctgcggtgggatggcgagcccatgcaaggactgctgcagaggttcttacgaaggaaagttgtgaataagttcaaaggtcaggcgccctccccctgcgatcctgtgtgcaagattgtcgactgggctctgtccgtctggcgtcagcttaactcctgcctggcccgcttgggcacacctgaagcacttcttggaccaaaatatttcctgtcttgtcctgtagttcctgggcatgcccaagtgacagtgaagtggatgtctaagctgtggaatggcgtcatcgcacccagagttcaagaagcaatattgtcaagagcctctgtgaaaagacaacctggctttgggcagacaactgctaaaagacaccctagccaaggacagcaggctgtggtcaaagctgctctcagcatcttgctaaataaagctgtactgcatggctgtcccctccccagagcagagctagaccagcatacagctgatttcaaaggaggaagtttccctttatccatagtttccagttataacacttgtaacaagaagaaaggagagagtggtgcctggagaaaggtgaacaccagtcctcgcaggaagtctggccgcttctctttacccacctggaataagccagacctaagcactgaaggtatgaaaaataagactatatcacagctgaattgtaacaggaatgcttctctgtcaaaacaaaagtctttagagaatgatctatcactgacgttgaatttggatcagagactctctctgggttcagatgacgaagcagatcttgtcaaggaacttcagagcatgtgctccagcaagtctgagtctgatatcagcaagattgctgattccagggatgatttaaggatgtttgatagttctggaaacaaccctgtactttcagcaactattaataatctgagaatgccagtgtcacaaaaggaggtcagtcctctcagcagccatcaaactactgaatgcagcaacagtaaatcaaagactgagttgggtgtttcaagagttaaatcttttcttcctgttcctagaagtaaagtcacccagtgttcccagaacaccaaaagaagcagcagcagcagtaatacaaggcaaatagaaatcaacaacaactcaaaagaagtgaattggaacttacacaaaaatgaacacctagaaaaacctaacaaataggcctgcctacaatattctcattattaacttcctctatttcacacagaaaccaaggacaacaagatacaaatacctttaaattgataaaatgttttcactgtaatataaattatgagtgcgggaccactattcaatttttttttgtaaagaatgtatttataaccaacattttgttgcttttttttttaattctgtaggattgaacttcaataccaggaagttatgccaacttttcaagtagttttataatagaaaaattgtaatagttttaatcaagatgttcaggggtattaaaacagaactgtgtactgtatatctgtatatatgtatatatgtatgtatatttaaggaagtccagaaatcatactgcatacatgctacaaaaaagtagcaaaaaagtacaaagttggcttagataacttgtaccattttaaatggagatcataattttatgttcacttgatggggaatgactagaatggggcaataacaaatcatttctaaacagttattttccattaaaagccatattaagtattttgcttgttaaattctagttttatgttttaaatctcttagtggttacattgccatttggtagcatcatgtatatatttatgcttataagtttgcattatgactcctgtaaaatatgaaattataatgcaataaaagtgttatctttcttacaaaagttttgtacctaagtggatatagataactgcataaatgaataaattcagaattaactccttcaatatttctagtagcacaactgataatattgatattttctacaaatgttacttctaaaattacagacaaaattacttacacaattcagttaagatgctttgacactgaataaaatattgatttcatgaaaaaaaa

SEQ ID NO: 435 - protein, 1663 aa, Homosapiens
MATDGASCEPDLSRAPEDAAGAAAEAAKKEFDVDTLSKSELRMLLSVMEGELEARDLVIEALRARRKEVFIQERYGRFNLNDPFLALQRDYEAGAGDKEKKPVCTNPLSILEAVMAHCKKMQERMSAQLAAAESRQKKLEMEKLQLQALEQEHKKLAARLEEERGKNKQVVLMLVKECKQLSGKVIEEAQKLEDVMAKLEEEKKKTNELEEELSAEKRRSTEMEAQMEKQLSEFDTEREQLRAKLNREEAHTTDLKEEIDKMRKMIEQLKRGSDSKPSLSLPRKTKDRRLVSISVGTEGTVTRSVACQTDLVTENADHMKKLPLTMPVKPSTGSPLVSANAKGSVCTSATMARPGIDRQASYGDLIGASVPAFPPPSANKIEENGPSTGSTPDPTSSTPPLPSNAAPPTAQTPGIAPQNSQAPPMHSLHSPCANTSLHPGLNPRIQAARFRFQGNANDPDQNGNTTQSPPSRDVSPTSRDNLVAKQLARNTVTQALSRFTSPQAGAPSRPGVPPTGDVGTHPPVGRTSLKTHGVARVDRGNPPPIPPKKPGLSQTPSPPHPQLKVIIDSSRASNTGAKVDNKTVASTPSSLPQGNRVINEENLPKSSSPQLPPKPSIDLTVAPAGCAVSALATSQVGAWPAATPGLNQPACSDSSLVIPTTIAFCSSINPVSASSCRPGASDSLLVTASGWSPSLTPLLMSGGPAPLAGRPTLLQQAAAQGNVTLLSMLLNEEGLDINYSCEDGHSALYSAAKNGHTDCVRLLLSAEAQVNAADKNGFTPLCAAAAQGHFECVELLISYDANINHAADGGQTPLYLACKNGNKECIKLLLEAGTNRSVKTTDGWTPVHAAVDTGNVDSLKLLMYHRIPAHGNSFNEEESESSVFDLDGGEESPEGISKPVVPADLINHANREGWTAAHIAASKGFKNCLEILCRHGGLEPERRDKCNRTVHDVATDDCKHLLENLNALKIPLRISVGEIEPSNYGSDDLECENTICALNIRKQTSWDDFSKAVSQALTNHFQAISSDGWWSLEDVTCNNTTDSNIGLSARSIRSITLGNVPWSVGQSFAQSPWDFMRKNKAEHITVLLSGPQEGCLSSVTYASMIPLQMMQNYLRLVEQYHNVIFHGPEGSLQDYIVHQLALCLKHRQMAAGFSCEIVRAEVDAGFSKEQLLDLFISSACLIPVKQSPSKKKIIIILENLEKSSLSELLRDFLAPLENRSTESPCTFQKGNGLSECYYFHENCFLMGTIAKACLQGSDLLVQQHFRWVQLRWDGEPMQGLLQRFLRRKVVNKFKGQAPSPCDPVCKIVDWALSVWRQLNSCLARLGTPEALLGPKYFLSCPVVPGHAQVTVKWMSKLWNGVIAPRVQEAILSRASVKRQPGFGQTTAKRHPSQGQQAVVKAALSILLNKAVLHGCPLPRAELDQHTADFKGGSFPLSIVSSYNTCNKKKGESGAWRKVNTSPRRKSGRFSLPTWNKPDLSTEGMKNKTISQLNCNRNASLSKQKSLENDLSLTLNLDQRLSLGSDDEADLVKELQSMCSSKSESDISKIADSRDDLRMFDSSGNNPVLSATINNLRMPVSQKEVSPLSSHQTTECSNSKSKTELGVSRVKSFLPVPRSKVTQCSQNTKRSSSSSNTRQIEINNNSKEVNWNLHKNEHLEKPNK

SEQ ID NO: 436 - DNA, 1206 bp, Homosapiens
ctttttcagttctgcttgctgtcggcaccgctgcgttacccggaaccgccgggccgaacagcatgacgtccgctttggagaactacatcaaccgaactgttgccgttattacatcagatgggagaatgattgtgggaacactgaaaggttttgaccagaccattaatttgattttggatgaaagccatgaacgagtattcagctcttcacagggggtagaacaagtggtactaggattatacattgtaagaggtgacaacgttgcagtcattggagaaatcgatgaagaaacagattctgcgcttgatttggggaatattcgagcagaacctttaaattctgtagcacactgaggaaaaactacatacttggacatctgtaaatctttgtacagaaactgattattctgaggatgatatatggagtttttatgagtgtgtcactggattttgactccttattgattcattgtaatatgtaaattaaaatatttctacattttattgaaaaaaaaaaccttttttttttgcctaaatataagtttggtagcttggtttcttttttttattaaatagtgtgaaaatataatgggcattctgaaaacttttagaaaaaagtagtactttttgatactttagtatttatggaaactagtggaaaagagaaattagtgtgctatataaatcaggcattcaagtaacagtaatacaggatatatgtgttttctttccctgatgtttaggaaaatcacaggagggtaaatctttgctggagttatctgaatcattggcatttatccgattccactggtggtagtttgctagtgcttctaaaagttgctccctagcactgagaggtgtgggtaggtaaaaatgtgtttgcttgagaaaagcaaaaatgctaacaaggttttgatagattggcccaaaattctaacttgaatattaagaatgactaggaatggtagaattgacagagatgattagtaaagtctcttgatgcccaattggttaggtatgaaagtaatatgaacacattaatgttgaattttacagacagtatatttgaaaaaaattgattccatgtagtcttcaatttttaatttttaagaattggagaatttctaatgttaaagttagtttataaatgtgagtaaataaactctaagtttgtatcgaaaaaaaaaaaaaaaaaaaaaaaaaaaaa

SEQ ID NO: 437 - protein, 96 aa, Homosapiens
MTSALENYINRTVAVITSDGRMIVGTLKGFDQTINLILDESHERVFSSSQGVEQVVLGLYIVRGDNVAVIGEIDEETDSALDLGNIRAEPLNSVAH

SEQ ID NO: 438 - DNA, 1067 bp, Homosapiens
attttaaagaaacttcacagagctgcttcagtcggggatttgaagaagctgaaggaataccttcagatcaagaaatatgatgtaaatatgcaggacaaaaaatacagaacacctttgcacctagcctgtgctaatggacatacagatgttgtacttttcctaattgagcaacaatgcaaaataaatgtccgggatagtgaaaacaaatccccattgattaaggcagtacagtgtcaaaatgaggattgtgcctactattcttctaaactttggtgcagacccagatctgagggatattcgttataatactgttcttcactatgctgtttgtggtcaaagtttgtcattagttgaaaaactgcttgaatacgaagctgatcttgaagcgaaaaataaggatgggtatactccactattagttgccgttattaacaataatccaaaaatggtaaaatttcttctggagaaaggggctgatgtgaatgcttcagataattatcaaagaacagcccttattcttgctgtcagtggtgaaccaccatgtttagtaaagcttcttcttcagcaaggtgtggaattatgttacgaaggtattgtggattcacagctgaggaatatgtttatttccatggttttactgcatagatacccacaattcactgcgagccatggaaagaagaaacatgctaaatagacaccttattcttggcactacatgtgactaaaggaagatatggaacccatttctacaatttctttgccgcttccttgaattggaaaaatgtactttgaaagaaccggttaagtgaactatgataatatttttgctgactacccagttgaagaaaaagtttcgttaattggatgggatttttttttttcacgttagaagaatgaatgaagaaattttaaaagataaacattatattgtgaaccatcagctgaaaagataaatttgtgttcaatatataggagaaaaaatttgtgtcaaaatgttgaatggaataataatgagaaactgtgttaggcatgtattaaaacatttaaataaaataaaaatacatttc

SEQ ID NO: 439 - protein, 151 aa, Homosapiens
MRIVPTILLNFGADPDLRDIRYNTVLHYAVCGQSLSLVEKLLEYEADLEAKNKDGYTPLLVAVINNNPKMVKFLLEKGADVNASDNYQRTALILAVSGEPPCLVKLLLQQGVELCYEGIVDSQLRNMFISMVLLHRYPQFTASHGKKKHAK

SEQ ID NO: 440 - DNA, 3967 bp, Homosapiens
ccacgcgtccgatttttggaaatcaagtgcaatattggaagccatttctactaattttatttcacttttaaatttatgatttgatttgaatactatcatgggaggagctgtgagtgctggggaagataatgatgacttaattgataatttaaaagaagctcagtatattcgtactgaaagagtggagcaagccttcagagcgattgatcgtggagattactatttggaaggctacagagacaatgcttacaaagacttagcctggaagcatggaaacatccacttgtcagcaccttgcatttattctgaagttatggaagcattgaaacttcaaccaggattgtcttttcttaacctgggaagtggaaccggatatttaagtacaatggtgggcttaattttaggtccttttggaataaatcatgggattgagcttcattcagatgtggtggaatatgccaaggaaaaactggagagcttcatcaaaaatagtgatagctttgataaatttgagttctgtgaacctgcatttgttgttggtaattgcctccagatagcttctgacagtcatcagtatgatcgaatttattgtggagctggagtacagaaagaccatgaaaactacatgaaaatattactaaaagttggaggcatattagtcatgcctatagaggatcagttaacacagattatgcgaactggacagaacacttgggaaagtaaaaatatccttgctgtttcatttgctccacttgtgcaaccaagtaagaatgataatggcaaaccagattctgtgggactccctccctgtgctgtcaggaatctacaggacttggctcgtatttacattcgacgcacacttagaaatttcataaatgatgagatgcaggccaaggggattcctcaaagggctccacccaaaaggaaaagaaagagagttaaacagagaattaacacttacgtatttgtgggtaatcagcttattcctcagcctctagacagtgaagaggatgaaaaaatggaagaggatatcaaagaagaggaggaaaaagatcacaatgaagcaatgaagccagaggagccacctcaaaatttactgagagaaaaaatcatgaagctgcccctccctgaatctttaaaagcttacttgacatattttagagacaaataacttagatcaagaagaaaaatgcctactgataattcctttagtcttgaaaatgtagcatttgttaggagttaaaagagagaattatttctttcatcagagcaaattatagtggaaaaaaaaatcacttgtttctgtcagtaacacaaatgatgtattcagtgaataaaagaatcccttttataaaatctatttttctttaaatcttggaaaaatgttgttttagctcagagtgatttcaaagtggaatgcaacagtagtcaagacttgtgtactataaatccttttctgattccttacagatttgtagtgatgaggtttagatttaattttatatatggtttaaataattgttaagcttatataacctgatctgaattgcagttgtttgcatttcctctatgaaaacttcatttatctaataaggaagtcaaatgctttgtagactatttaccttacttttgttgcaatcactgttgttgggttgctgtatatatattccgggcaatatatgagtgcaataacaatacaagatattgaataatttagctttaaaaaatcccacaaattttatgaaattttacagccctgctacttttgcttttgaatctcttgccaaaagacatgggtaaaatatctgcctctctcatagagattttaagagcacagcaagtgaattattaaaacaaagtctatacttaatacaactctttatatggaccctttacattttcagtatttaaaaaaataactctatagaattttaaaagtatatttagaattgttttttctgtagttcactgtataaagtatttggttttttaaaaaaagcaaaaccattgttatgtgtgactcttgataggacacagaacgagtgaatgagcatgagtgaggccactttcttggatggctgtaagtagcagggccagggtagacctggtcagcggatgcactttagcagatggaacttctagtttatctgaatatttatctttgacaaggtagggctgagcctacatttgcttttgatctatctagtataagaaatattcacagaaattgtatgtagataccctttgttttgaaaatgctgttcagaatcatagtgtaatctttgggacctatgccatgttcatttcactccttcccatattttttgtgtttcttttggtaaaactataatggttttcattttttacttaatatcacacagttaaactgtccatatttgagctttattttagcttatcagtgataaaaaacaggtagtaactgccattgtttgtttgttttcctaataaggcctgaaaacagccattccttgttaagaaagtgtacaatgtaacatatttgctagagttacatggattatatatttcttaaagggaaaaatttgagagtatcatggactaccaccagcattattattacagtagttactcagatttggttaaggaagcccaagcaatgtatagtgaaaggattattatctctctgctaagattcagatattgtttcagaaatctcagctccagtaattccacaacatctaaaaacaaatgtttgtgatcatgtgtaagcatgaaattgttccaagtaagtgaggatattttagttatgtgaaagacagtttcatggaaggtatttgttttgtaccagtggctgggatggtggaattggggttatttctacaattattcttagacgattactaaactgttaagaaatgccccatatcatttttgtatctaggaaagaaaaaaatcagtttcatactgttgtcatctgtcagaaatgctcattttattttgaattaaatgtggcttttgaagtacctagttaccttgaattcctggtgaccacatgtttttatctggaaaacctggagaaagttatctgtcccatctcccctgcttgttttttttttttttttttttggttggagctgctgtttagatgatgcttttactatgcaggagagagtttttgttaaggatatatttgaagattggcttttccatattgtccttcattctttgaccgtggcaaagtgtacagtagattttcatgatcattgcatatttcttgtcattgaaatgtatcttttatgtttttaaatgcattcattttacacttgtgagtttatcattgactttaagaggtagaaatgaaaaatgaaaattaaagctaaagcctttttatctattaatgcagatatattagaataagaatattttgggtttgtgtttattttttaatgaatttatgtttacttgatatggaaaattacgctttataggtggaaaagtagcaaataaagattaagtaaaagtaagtgaaaatgatggggaatatagtattggaattttatagctagttaaaacaataagtatcatctaatttgggtgtttattttgcagatgagaaaacagacctagaaccgtggcatgttttgcctgaaacatacagtgagttagagacagggcctaagatagcttctagcatcagatcaatcccaagaatccatcagcaacctcagaccaacccaagaagataatttaaatctatactgcttattggtcaatatatttggttctagtattaataaagaaaaatgttattaaaatagcatacatagtagtaaaataaaatacaaaaagtgtgttgatttatagctgtttgagatgataaaagtgaagcaaagcctgttaaatcattggaagacttggaaaattattttaaataaacaattacatgtaaaaaaaaaaaaaaaaaaaaaaaaaaaaaaaaaaaaaaaaa

SEQ ID NO: 441 - protein, 357 aa, Homosapiens
MGGAVSAGEDNDDLIDNLKEAQYIRTERVEQAFRAIDRGDYYLEGYRDNAYKDLAWKHGNIHLSAPCIYSEVMEALKLQPGLSFLNLGSGTGYLSTMVGLILGPFGINHGIELHSDVVEYAKEKLESFIKNSDSFDKFEFCEPAFVVGNCLQIASDSHQYDRIYCGAGVQKDHENYMKILLKVGGILVMPIEDQLTQIMRTGQNTWESKNILAVSFAPLVQPSKNDNGKPDSVGLPPCAVRNLQDLARIYIRRTLRNFINDEMQAKGIPQRAPPKRKRKRVKQRINTYVFVGNQLIPQPLDSEEDEKMEEDIKEEEEKDHNEAMKPEEPPQNLLREKIMKLPLPESLKAYLTYFRDK

SEQ ID NO: 442 - DNA, 6183 bp, Homosapiens
ctttttgtagggagaagggcaggatgtttttaactgaatgtgacctcaggggaatactagagaaaataataaaatttctgaatggggcagcgtggagaaatcctaagagaaatagcataagagcattttggaacacatccaggaaaagataactttcgacacacctgtagacgttcgccaggtaaaggagtgatggaaactctccagttcagatccagtagcttttagggaaggaactacagttgctgacttaagttgaagaagcatctatttaatgtctggtcaaatcctacaagaaacacagaaatctatgattaaaaagctgagcactttgatatactgcaaagggtagagaaggcaggacggtagaaattttctgcaagaaagaatgaatttcaggatttatcactaaataagacaaagtcatttatttagtccccctgacacagcagggcaaactgagttgacatacaagttacctggagaaaaagagagcaattccaggacttcctcttcagcctaaaagaaggtaccagatctgtgcactggggcgatgtggaagagacctgcttattgcccctgatgtaagctccagtaagaaaagacgtcaagtacaagtactaggaaatcactttatacatctgtttataggaatgacctcaggactttgtgttcatgttatagatggatgcagaggctgaagataaaacgctgcgtactcgctctaaaggaaccgaggtgccaatggattcactaatccaggagctcagtgttgcctatgattgctccatggcaaagaagagaacagctgaagatcaggctttgggggttccagtcaacaaaaggaaatccctgctaatgaagccccgacactacagcccaaaagcagactgccaagaagaccgcagtgacaggacagaggacgatggccccttggaaacacatggtcactctaccgcagaggaaatcatgataaaacctatggatgaaagtcttctttcaactgcacaagaaaactccagtaggaaggaagacagatactcttgttatcaagagctcatggtcaagtctttaatgcacttggggaaatttgaaaaaaatgtatctgttcagactgtaagtgaaaatttaaatgacagtggcatccagtctttaaaagcagagagcgatgaagcagacgagtgctttctgattcattctgatgatggaagagacaagattgatgattctcagccacccttctgctcctctgatgacaatgaaagtaactctgaaagtgcagaaaatggctgggacagtggctccaacttctcagaagaaaccaaaccacctagagtcccaaagtatgttttaacagatcataaaaaagacctattggaagttcctgaaataaaaactgaaggtgacaaatttatcccttgtgagaacaggtgtgattctgaaacagaaaggaaagacccgcagaatgctctcgcagaacccctggatggcaatgcccagccctcattccctgacgttgaggaggaagatagcgagagcctggcagtaatgacggaagagggtagtgacctggaaaaggccaaggggaatttaagtttgctggagcaggcaattgctctgcaggctgagcgaggttgtgttttccataacacctacaaagagctggataggttcctgctggagcacctagcaggggaaaggaggcaaaccaaagttatcgacatgggtggaagacaaatctttaacaataaacattcaccaaggcctgaaaagagggagaccaagtgcccgatccctggatgtgatggcacgggacacgtgacagggctctacccgcaccaccgcagcctttcggggtgcccccacaaagtgcgggttcccctggaaattcttgccatgcatgaaaatgtgctcaagtgtcccacgccgggatgcacaggaaggggtcatgtgaacagcaaccgcaacacccacaggagtctttctggttgtccaattgctgcagctgaaaaattggcaatgtcccaggataaaaatcagcttgattctccccaaactgggcagtgtcctgaccaggcccacaggacaagtttggtgaagcaaattgaattcaatttcccgtcacaagccatcacctctcccagagccacagtgtcaaaagaacaagagaagtttggaaaagtaccatttgattatgccagttttgatgcccaagttttcggtaaacgccctctcatacaaacagtgcaaggacgaaaaacaccaccatttcctgaatcaaagcattttccaaatccagtgaaatttcctaatcgactgcctagtgcaggcgcccacacccagagccctggccgtgccagctcttatagctacggtcaatgtagtgaagacacccacatagcagcagctgctgccatcctgaacctttccacccgctgcagggaagccacagacatcctctccaacaagccacagagtctgcatgccaagggagccgaaatagaagtggatgaaaatggcacattggacttaagcatgaaaaaaaatcgaatcctggacaagtctgcacccctaacttcctctaacacttctattccaactccttcctcttccccattcaaaacaagcagcattctggtcaatgcagcattctatcaggctctttgtgaccaagagggctgggacactcctatcaactatagcaaaactcacgggaagacagaggaggagaaagagaaagacccagtgagctctctagaaaatttagaggaaaaaaagtttcctggagaggcctctataccaagccctaaacccaagcttcatgcaagagatctcaaaaaggaactaatcacctgtccaacaccaggatgtgatggaagtggccacgtgacaggaaactatgcatctcatcgcagtgtttctggatgtcctttagcagataagactctaaaatccctcatggctgccaactctcaggagcttaagtgtccaaccccaggctgcgatggctcggggcacgtgactggaaactatgcttcccacagaagcttgtccggatgccctcgtgcaaggaaaggtggtgtcaaaatgacccctaccaaggaagaaaaagaagaccctgaactgaaatgtcctgtgatagggtgtgatggccaaggtcacatatcaggtaaatacacatcacaccgcacagcttctggctgtcctctggctgccaagagacagaaggagaatcctctcaatggagcctccctctcctggaaactgaacaaacaagagctaccacattgtcccttgccaggctgcaatgggctgggccatgtaaataatgtttttgtcacccaccgaagcttatctggatgtcctctcaatgcacaagttatcaaaaagggcaaggtttctgaagaactcatgaccatcaagctcaaagcaactgggggaatagagagtgatgaagaaattaggcatttggatgaagaaataaaggaactgaatgaatccaaccttaaaattgaagcagatatgatgaaacttcagacccagatcacatctatggagagcaacttaaagacgatagaggaggagaacaaactcatagaacagaacaatgaaagtctgctgaaagagctggcaggtctaagccaagctctcatttcaagccttgctgacatccagcttccacagatgggacctatcagtgagcagaattttgaagcatatgtaaatacactcacagatatgtacagcaatctggaacgggactattccccggaatgcaaagctctactggaaagtatcaaacaggcagtgaagggtatccatgtgtaggatcacagcgctgccgggcaacagaagttaccaacagcagtaaactccagatggatctgttagaggttcatgtactgctaaggcgtggaggttgccgtactgcatttacaatttgcaacattgcactaattttattttccccagctgatataaaaaggaaagaaaaactatgatagacttcttggattaaaagcaatgcagtcaattattagatcttatttattttcatatgtttttcttttatttcttcattgtactcttcttttgtaaagtatatgtaaaataaatgtgacatttttataatttatttattactaatcaaagagttttttatcttttaactgcattttgaagtctgccgtatttttacaagtgtgtttattaatttattttccaataggatttaaatagaaatgctattctcaagtcatctttcttgctgggttttaatgaggaaacaggaaagggtgaaggaaatccttgtctaaggactgcactatagttgagtttgatttttattgcacacttcttcccccacctttcactgatttttgtatttataaatgaatttgcggtaaggtgagctgcacggaaggaataagaagacaaatggcgcccactagtggggaatccgcactcacaaaagcacaggatgctggaaaacagcctgctcagaatttgttagcaataattaaatatagcaatcagcaaagtattcgacttggctggacggttttcgttaatatgaattatttatttgaaatgttttaaagaaacataagcctttttagtgatgcagatttgtctgtttgtttttcaagtcatatcagatcgttggcaactcgtatcccaagatgaaaaataagacttggtgtgaccagccaggctttcctgccatatgttggtacaatatacaagtgacaatattggtgtagatttgtacttagcaaatacaaacacatccaaatgaaaaattttgtagataccatatcccctgaaatagcatttatcttactgggttgactggaaaggaatggaaaatatagtaacacatgaaaaaatgctactccaatctgaatgattacttcaaacactggcaccttgggtctcacccaccataggaaacaagacaacattcaatttgatagaaatcttgccacaaaacttcaaatgctacaaaatatacacacacactcacacacacaggcatactcacacacagacacacacacacacacacacacagactcatccacacttcaaattgagcccacaatcttgaatttctgaacggatcagagtttcatagtttctatagtaaaggcaatgtctatttcagggattgtaaagtagttaagcattgtttcaaaagtttttttatatttattttttttaaggaaaaggtatagacaaccagctaaactgcctttttggtgtgcacacacatttcatgtgcagacgtgcctctgtgtaaatgtacacatgaacttcatgtgggcttaattttctgtgctataaacaaaagtgtttattttttattaacctcatggatatttagatggaaagtgatggcattcacaggcttgatgtattccactgttattactgttacctgcacaaatgaaaaacaatactcaacagtaattccactcccatgaaactttggtcattgttatgcattaagtggggcttatctttggtttggagttcatttgaactcttgaaccttagtttagtgaagatgaactgtctgttcttaggtagaaacggtgtttatttaaaaatcagttttaaaaaatgagctaccatatgtgctgtctattataaatgggacaccaaacaaaattttctattacagttgtgtacttgcaaacattttgctatacagtacttcatagatgcatacaaatgagctcacttattacaaagacaaacgtttaatttgctaaatattttaacaagtttgttatatattttatttaatttaaaagaaatctcttaccaacctacatatttattactataatttgctatgacttcaggttaatttatttgtgtttgcatagtttgagcaggatgttttgtgaagtatgtttgtatttatttgcctactttgtacttgatgtgttttgtaatgtgcactgaatttgttttcttttcaactatgttaatgatcaatactgtaaattgggtcttttgtaaacaaaaaggcaatgatgtatgcattttttttaatttgaggtagtttgtttgtatactgtttctccaaacacttaatatttcttacatcaaagcaacaaaattgtgttcagtgctgtacatttggtgtatggtaggaaataaaaattgataacg

SEQ ID NO: 443 - protein, 1047 aa, Homosapiens
MDAEAEDKTLRTRSKGTEVPMDSLIQELSVAYDCSMAKKRTAEDQALGVPVNKRKSLLMKPRHYSPKADCQEDRSDRTEDDGPLETHGHSTAEEIMIKPMDESLLSTAQENSSRKEDRYSCYQELMVKSLMHLGKFEKNVSVQTVSENLNDSGIQSLKAESDEADECFLIHSDDGRDKIDDSQPPFCSSDDNESNSESAENGWDSGSNFSEETKPPRVPKYVLTDHKKDLLEVPEIKTEGDKFIPCENRCDSETERKDPQNALAEPLDGNAQPSFPDVEEEDSESLAVMTEEGSDLEKAKGNLSLLEQAIALQAERGCVFHNTYKELDRFLLEHLAGERRQTKVIDMGGRQIFNNKHSPRPEKRETKCPIPGCDGTGHVTGLYPHHRSLSGCPHKVRVPLEILAMHENVLKCPTPGCTGRGHVNSNRNTHRSLSGCPIAAAEKLAMSQDKNQLDSPQTGQCPDQAHRTSLVKQIEFNFPSQAITSPRATVSKEQEKFGKVPFDYASFDAQVFGKRPLIQTVQGRKTPPFPESKHFPNPVKFPNRLPSAGAHTQSPGRASSYSYGQCSEDTHIAAAAAILNLSTRCREATDILSNKPQSLHAKGAEIEVDENGTLDLSMKKNRILDKSAPLTSSNTSIPTPSSSPFKTSSILVNAAFYQALCDQEGWDTPINYSKTHGKTEEEKEKDPVSSLENLEEKKFPGEASIPSPKPKLHARDLKKELITCPTPGCDGSGHVTGNYASHRSVSGCPLADKTLKSLMAANSQELKCPTPGCDGSGHVTGNYASHRSLSGCPRARKGGVKMTPTKEEKEDPELKCPVIGCDGQGHISGKYTSHRTASGCPLAAKRQKENPLNGASLSWKLNKQELPHCPLPGCNGLGHVNNVFVTHRSLSGCPLNAQVIKKGKVSEELMTIKLKATGGIESDEEIRHLDEEIKELNESNLKIEADMMKLQTQITSMESNLKTIEEENKLIEQNNESLLKELAGLSQALISSLADIQLPQMGPISEQNFEAYVNTLTDMYSNLERDYSPECKALLESIKQAVKGIHV

SEQ ID NO: 444 - DNA, 1102 bp, Homosapiens
attcggctcgagggcacactgaggaccgagtcccagtgcagctccagccgacccccgggacgtagacaagggcaggcgcgcggtgaagactgcggccggccgcgtagccgcgctgtggtcccgctggccttctcttgggccgcgcaccctccggacctgcgtcgggatcctcccggagtctcccgctctctcctcccggcttgcgaacatgcggccccttaagcccggcgcccctttgcccgcactcttcctgctggcgctggctttgtccccgcacggagcccacgggaggccccgggggcgcaggggagcgcgcgtcacggataaggagcccaagccgttgcttttcctccccgcggccggggccggccggactcccagcggctcccggagcgcagaaatattcccaagagactctaacttaaaagacaaattcataaagcatttcacagggccggtcacattttcaccagaatgcagcaaacatttccaccgactctattacaataccagggagtgctcaacgccagcttattacaaaagatgtgctagattgttaacaagattagcagtgagtccactgtgctcccagacctagcaaaactaccctacatttcctaagaatgtacatctaatttgaagaaaaagtgcctcaaatcatgcaaaatgtaaaaaaagatgaaatttatatttttatggatattaagatgagtaaaataagagacttcccagaaataactggttagctgtttcctgtcatagaatggagtctttcttgctttatctttttgtgtatacagtaatttataattttgtaaaacagagtttgaatcgcatattgaaaattagatattaaaaattgtgtgattgtattttatttttactagatatattattttctttatatggttaacattctaattaaacatttaattgtgtaaattatatctgtgagtgccagtgagaaataatgatttttttgtatatgactgttagtatatatttgtcaaatcatcgtgtaccaagttaaattttataattcttatttaatatttaaatacatttatttagaaaaaaaaaaaaaaaaaaaaaaaaaaaaaaa

SEQ ID NO: 445 - protein, 129 aa, Homosapiens
MRPLKPGAPLPALFLLALALSPHGAHGRPRGRRGARVTDKEPKPLLFLPAAGAGRTPSGSRSAEIFPRDSNLKDKFIKHFTGPVTFSPECSKHFHRLYYNTRECSTPAYYKRCARLLTRLAVSPLCSQT

SEQ ID NO: 446 - DNA, 6636 bp, Homosapiens
gtcgacaataacaaaccaagccgcggcggtgtccgcggccctgccgagccctcggcgttgcctcagaatcccccagtcgcctgggcccctcggctctgacaggccgcggccttctgtcccccggccccagacccagagccgaggggcctgctcgcgtccttgtccgcccggacccctccctgcctcctagagttcggggccgcggcgggcgggcgcccgggacgccggcggttgtgtcggcttagcggtgccgaatgggcggttggtaaccgctgccgaggactaggcggcggcggaagatggtgccgggggtcgctggctctgctgctgccgccggcgaaggaggaggcgttgccggttttctgagtttaaccagtaatgccattcagttgccaatctcaagcaaagcaaacataagccagttttaatctactttttaagaaaagtggtagtccttttcacagtgcctgacgtaactgtatcagagggtgaggtataagctcacagaattcagataaatcatcatgaagttatatgtatttctggttaacactggaactactctaacatttgacactgaacttacagtgcaaactgtggcagaccttaagcatgccattcaaagcaaatacaagattgctattcaacaccaggtgctggtggtcaatggaggagaatgcatggctgcagatcgaagagtgtgtacctacagtgctgggacggatacaaatccaatttttctttttaacaaagaaatgatcttatgtgatcgtccacctgctattcctaaaactaccttttcgacagaaaatgacatggaaataaaagttgaagaatctcttatgatgcctgcagtttttcatactgttgcttcaaggacacagcttgcattggaaatgtatgaagttgccaagaaactttgttctttttgtgaaggtcttgtacatgatgaacatcttcaacaccaaggctgggctgcaatcatggccaacctggaggactgttcaaattcataccaaaagctacttttcaagtttgaaagtatttattcaaattatctgcagtccatagaagacatcaagttaaaacttactcatttaggaactgcagtttcagtaatggccaagattccactgttggagtgcctaaccagacatagttacagagaatgtttgggaagactggattctttacctgaacatgaagactcagaaaaagctgagacgaaaagatccactgaactggtgctctctcctgatatgcctagaacaactaacgaatctttgttaacctcatttcccaagtcagtggaacatgtgtccccagataccgcagatgctgaaagtggcaaagaaattagggaatcttgtcaaagtactgttcatcagcaagatgaaactacgattgacactaaagatggtgatctgcccttttttaatgtctctttgttagactggataaatgttcaagatagacctaatgatgtggaatctttggtcaggaagtgctttgattctatgagcaggcttgatccaaggattattcgaccatttatagcagaatgccgtcaaactattgccaaacttgataatcagaatatgaaagccattaaaggacttgaagatcggctctacgccctggaccagatgattgctagctgtggccgactggtgaatgaacagaaagagcttgctcagggatttttagctaatcagaagagagctgaaaacttaaaggatgcatctgtattacctgatttatgcctgagtcacgcaaatcagttgatgattatgttgcaaaatcatagaaaactgttagatattaagcagaagtgtaccactgccaaacaagaactagcaaataacctacatgtcagactgaagtggtgttgctttgtaatgcttcatgctgatcaagatggagagaagttacaagctttgctccgcctcgtaatagagctgttagaaagagtcaaaattgttgaagctcttagtacagttcctcagatgtactgcttagctgttgttgaggttgtaagaagaaaaatgttcataaaacactacagggagtgggctggtgctttagtcaaagatggaaagagattatatgaagcagaaaaatcaaaaagggaatcctttgggaaattatttaggaagtcttttttaagaaatcgtctgtttaggggactggactcctggcccccttccttttgtactcaaaagcctcgaaagtttgactgtgaacttccagatatttcattaaaagatttacagtttctgcaatcattttgtccttcggaagttcagccattcctcagggttcccttactttgtgactttgaacctctacaccagcatgtacttgctctacataatttggtaaaagcagcacaaagtttggatgaaatgtcacagaccattacagatctactgagtgaacaaaaggcatctgtgagtcagacatccccacagtctgcttcttcaccaaggatggaaagtacagcaggaattacaactactacctcaccgagaactcctccaccactgactgttcaggatcccttatgtcctgcagtttgtcccttagaagaattatctccagatagtattgatgcacatacgtttgattttgaaactattccccatccaaacatagaacagactattcaccaagtttctttagacttggattcattagcagaaagtcctgaatcagattttatgtctgctgtgaatgagtttgtaatagaagaaaatttgtcgtctcctaatcctataagtgatccacaaagcccagaaatgatggtggaatcactttattcatcagttatcaatgcgatagacagtagacgaatgcaggatacaaatgtatgtggtaaggaggattttggagatcatacttctctgaatgtccagttggaaagatgtagagttgttgcccaagactctcacttcagtatacaaaccattaaggaagacctttgccactttagaacatttgtacaaaaagaacagtgtgacttctcaaattcattaaaatgtacagcagtagaaataagaaacattattgaaaaagtaaaatgttctctggaaataacactaaaagaaaaacatcaaaaagaactactgtctttaaaaaatgaatatgaaggtaaacttgacggactaataaaggaaactgaagagaatgaaaacaaaattaaaaaattgaagggagagttagtatgccttgaggaggttttacaaaataaagataatgaatttgctttggttaaacatgaaaaagaagctgtaatctgcctgcagaatgaaaaggatcagaagttgttagagatggaaaatataatgcactctcaaaattgtgaaattaaagaactgaagcagtcacgagaaatagtgttagaagacttaaaaaagctccatgttgaaaatgatgagaagttacagttattgagggcagaacttcagtccttggagcaaagtcatctaaaggaattagaggacacacttcaggttaggcacatacaagagtttgagaaggttatgacagaccacagagtttctttggaggaattaaaaaaggaaaaccaacaaataattaatcaaatacaagaatctcatgctgaaattatccaggaaaaagaaaaacagttacaggaattaaaactcaaggtttctgatttgtcagacacgagatgcaagttagaggttgaacttgcgttgaaggaagcagaaactgatgaaataaaaattttgctggaagaaagcagagcccagcagaaggagaccttgaaatctcttcttgaacaagagacagaaaatttgagaacagaaattagtaaactcaaccaaaagattcaggataataatgaaaattatcaggtgggcttagcagagctaagaactttaatgacaattgaaaaagatcagtgtatttccgagttaattagtagacatgaagaagaatctaatatacttaaagctgaattaaacaaagtaacatctttgcataaccaagcatttgaaatagaaaaaaacctaaaagaacaaataattgaactgcagagtaaattggattcagaattgagtgctcttgaaagacaaaaagatgaaaaaattacccaacaagaagagaaatacgaagctattatccagaaccttgagaaagacagacaaaaattggtcagcagccaggagcaagacagagaacagttaattcagaagcttaattgtgaaaaagatgaagctattcagactgccctaaaagaatttaaattggagagagaagttgttgagaaagagttattagaaaaagttaaacatcttgagaatcaaatagcaaaaagtcctgccattgactctaccagaggagattcttcaagcttagttgctgaacttcaagaaaagcttcaggaagaaaaagctaagtttctagaacaacttgaagagcaagaaaaaagaaagaatgaagaaatgcaaaatgttcgaacatctttgattgcggaacaacagaccaattttaacactgttttaacaagagagaaaatgagaaaagaaaacataataaatgatcttagtgataagttgaaaagtacaatgcagcaacaagaacgggataaagatttgatagagtcactttctgaagatcgagctcgtttgcttgaggaaaagaaaaagcttgaagaagaagtcagtaagttgcgtagtagcagttttgttccttcaccatatgtagctacagccccagaactttatggagcttgtgcacctgaactcccaggtgaatcagatagatccgctgtggaaacagcagatgaaggaagagtggattcagcaatggagacaagcatgatgtctgtacaagaaaatattcatatgttgtctgaagaaaaacagcggataatgctgttagaacgaacattgcaattgaaagaagaagaaaataaacggttaaatcaaagactgatgtctcagagcatgtcttcagtatcttcaaggcattctgaaaagatagctattagagattttcaggtgggagatttggtactcatcatcctagacgaacgccatgacaattatgtgttatttactgttagtcctactttatattttctacattcagagtctctacctgccctggatctcaaaccaggtgagggtgcttcaggtgcatctagaagaccctgggtacttggaaaagtaatggaaaaagaatactgtcaagccaaaaaggcacaaaacagatttaaagttcctttggggacaaagttttacagagtgaaagccgtatcatggaataagaaagtataacttatggacaaaattaatacattctatgacatttttttctgatttgtcctgcagtgctcattcatcactccaaaaacagcaggccatctttttatgcaaaagtcagcgtgacaatatacttcactggtgtacatcgtttactttttaactggcttcattttaggaataataaattcatcagaatccttggctgaattaaaatggtttttgttttttggtttttttttttacccagacaactctagaaatgcggaccaaactacttcattttctcaaagggcataccttgtgcattgtggcttatgatgagccatattaattgcctgttaaatatacactagcttgaacttagatgttaaatgttattattaccagcatttgtccttttgtgaaatcagtatcagaatacttgcactctttaacacattctttataaaatgtataaattattcagaactatttaaaataaagaggagtgttattgcatgctgataatcattttgagtttgcctcagtagatactaaagcaaattgtttcagtttttttaaatgccctttgatgtttcaaaaaaaaaaaggaactgtaatttgattgactgattttaagatcagccataagtaatcagcaatcttcaaaagcactttcagtggattggtcatctgggttctaaagggaagagtctgtgctactaaccatttcaaatgcagactcaaaccttcccaacatctttatgactctagaataatcatattgatgaaatcgtaattcatggttgagtttcagaacaaaagatattcattgcacattaaccatttagaggtcatttaaataacaaaatattgtattgtaaaagaactgtacaattttaaaacaataaagatttgaacctgtaaatgtgtgtgccttttaaagaaggatacatttttaatatatttgagtgattgctgggaagtgtgaaaatattgttatgtatcatatcaaagagaaacatgtttattacaaaaatgttctttaactatatactatgtaacagggtaaacagtgttatgtagaatagaattgtgtaaactagatctttagagaagttgccattgagcaaagttatttaaatgagttagttgagttggatgagaattgtttgaggtttgttgctagagaacaataataaaataattctttttcagaaaatatttaatttcttcataaaaataagttaaatatttttttaaatatgtatatctaatagtacaaaatggaataaacatcatagtgtatagaaaactgaatttgacaagttaatgaataaatgaacaaatgatttcaaaa

SEQ ID NO: 447 - protein, 1594 aa, Homosapiens
MKLYVFLVNTGTTLTFDTELTVQTVADLKHAIQSKYKIAIQHQVLVVNGGECMAADRRVCTYSAGTDTNPIFLFNKEMILCDRPPAIPKTTFSTENDMEIKVEESLMMPAVFHTVASRTQLALEMYEVAKKLCSFCEGLVHDEHLQHQGWAAIMANLEDCSNSYQKLLFKFESIYSNYLQSIEDIKLKLTHLGTAVSVMAKIPLLECLTRHSYRECLGRLDSLPEHEDSEKAETKRSTELVLSPDMPRTTNESLLTSFPKSVEHVSPDTADAESGKEIRESCQSTVHQQDETTIDTKDGDLPFFNVSLLDWINVQDRPNDVESLVRKCFDSMSRLDPRIIRPFIAECRQTIAKLDNQNMKAIKGLEDRLYALDQMIASCGRLVNEQKELAQGFLANQKRAENLKDASVLPDLCLSHANQLMIMLQNHRKLLDIKQKCTTAKQELANNLHVRLKWCCFVMLHADQDGEKLQALLRLVIELLERVKIVEALSTVPQMYCLAVVEVVRRKMFIKHYREWAGALVKDGKRLYEAEKSKRESFGKLFRKSFLRNRLFRGLDSWPPSFCTQKPRKFDCELPDISLKDLQFLQSFCPSEVQPFLRVPLLCDFEPLHQHVLALHNLVKAAQSLDEMSQTITDLLSEQKASVSQTSPQSASSPRMESTAGITTTTSPRTPPPLTVQDPLCPAVCPLEELSPDSIDAHTFDFETIPHPNIEQTIHQVSLDLDSLAESPESDFMSAVNEFVIEENLSSPNPISDPQSPEMMVESLYSSVINAIDSRRMQDTNVCGKEDFGDHTSLNVQLERCRVVAQDSHFSIQTIKEDLCHFRTFVQKEQCDFSNSLKCTAVEIRNIIEKVKCSLEITLKEKHQKELLSLKNEYEGKLDGLIKETEENENKIKKLKGELVCLEEVLQNKDNEFALVKHEKEAVICLQNEKDQKLLEMENIMHSQNCEIKELKQSREIVLEDLKKLHVENDEKLQLLRAELQSLEQSHLKELEDTLQVRHIQEFEKVMTDHRVSLEELKKENQQIINQIQESHAEIIQEKEKQLQELKLKVSDLSDTRCKLEVELALKEAETDEIKILLEESRAQQKETLKSLLEQETENLRTEISKLNQKIQDNNENYQVGLAELRTLMTIEKDQCISELISRHEEESNILKAELNKVTSLHNQAFEIEKNLKEQIIELQSKLDSELSALERQKDEKITQQEEKYEAIIQNLEKDRQKLVSSQEQDREQLIQKLNCEKDEAIQTALKEFKLEREVVEKELLEKVKHLENQIAKSPAIDSTRGDSSSLVAELQEKLQEEKAKFLEQLEEQEKRKNEEMQNVRTSLIAEQQTNFNTVLTREKMRKENIINDLSDKLKSTMQQQERDKDLIESLSEDRARLLEEKKKLEEEVSKLRSSSFVPSPYVATAPELYGACAPELPGESDRSAVETADEGRVDSAMETSMMSVQENIHMLSEEKQRIMLLERTLQLKEEENKRLNQRLMSQSMSSVSSRHSEKIAIRDFQVGDLVLIILDERHDNYVLFTVSPTLYFLHSESLPALDLKPGEGASGASRRPWVLGKVMEKEYCQAKKAQNRFKVPLGTKFYRVKAVSWNKKV

SEQ ID NO: 448 - DNA, 987 bp, Homosapiens
atggacaacgcctcgttctcggagccctggcccgccaacgcatcgggcccggacccggcgctgagctgctccaacgcgtcgactctggcgccgctgccggcgccgctggcggtggctgtaccagttgtctacgcggtgatctgcgccgtgggtctggcgggcaactccgccgtgctgtacgtgttgctgcgggcgccccgcatgaagaccgtcaccaacctgttcatcctcaacctggccatcgccgacgagctcttcacgctggtgctgcccatcaacatcgccgacttcctgctgcggcagtggcccttcggggagctcatgtgcaagctcatcgtggctatcgaccagtacaacaccttctccagcctctacttcctcaccgtcatgagcgccgaccgctacctggtggtgttggccactgcggagtcgcgccgggtggccggccgcacctacagcgccgcgcgcgcggtgagcctggccgtgtgggggatcgtcacactcgtcgtgctgcccttcgcagtcttcgcccggctagacgacgagcagggccggcgccagtgcgtgctagtctttccgcagcccgaggccttctggtggcgcgcgagccgcctctacacgctcgtgctgggcttcgccatccccgtgtccaccatctgtgtcctctataccaccctgctgtgccggctgcatgccatgcggctggacagccacgccaaggccctggagcgcgccaagaagcgggtgaccttcctggtggtggcaatcctggcggtgtgcctcctctgctggacgccctaccacctgagcaccgtggtggcgctcaccaccgacctcccgcagacgccgctggtcatcgctatctcctacttcatcaccagcctgagctacgccaacagctgcctcaaccccttcctctacgccttcctggacgccagcttccgcaggaacctccgccagctgataacttgccgcgcggcagcctga

SEQ ID NO: 449 - protein, 328 aa, Homosapiens
MDNASFSEPWPANASGPDPALSCSNASTLAPLPAPLAVAVPVVYAVICAVGLAGNSAVLYVLLRAPRMKTVTNLFILNLAIADELFTLVLPINIADFLLRQWPFGELMCKLIVAIDQYNTFSSLYFLTVMSADRYLVVLATAESRRVAGRTYSAARAVSLAVWGIVTLVVLPFAVFARLDDEQGRRQCVLVFPQPEAFWWRASRLYTLVLGFAIPVSTICVLYTTLLCRLHAMRLDSHAKALERAKKRVTFLVVAILAVCLLCWTPYHLSTVVALTTDLPQTPLVIAISYFITSLSYANSCLNPFLYAFLDASFRRNLRQLITCRAAA

SEQ ID NO: 450 - DNA, 4959 bp, Homosapiens
agtgggagacgtgcgctgagaggcgggggctgcgctcggcggaacagcagccctcgggcggagagcggggccggggtccgagagcaggtgatgccaagagctgagcgggactcgtgagcgcgcggttcagcacctaccagggcgtcccgtaaaaaacctcgccttcgcctgtctctgggaaccatagcgccgcaggtgccgcctgtcctcgccttcctgctgcaatcgccccaccatggactccccgatccagatcttccgcggggagccgggccctacctgcgccccgagcgcctgcctgccccccaacagcagcgcctggtttcccggctgggccgagcccgacagcaacggcagcgccggctcggaggacgcgcagctggagcccgcgcacatctccccggccatcccggtcatcatcacggcggtctactccgtagtgttcgtcgtgggcttggtgggcaactcgctggtcatgttcgtgatcatccgatacacaaagatgaagacagcaaccaacatttacatatttaacctggctttggcagatgctttagttactacaaccatgccctttcagagtacggtctacttgatgaattcctggccttttggggatgtgctgtgcaagatagtaatttccattgattactacaacatgttcaccagcatcttcaccttgaccatgatgagcgtggaccgctacattgccgtgtgccaccccgtgaaggctttggacttccgcacacccttgaaggcaaagatcatcaatatctgcatctggctgctgtcgtcatctgttggcatctctgcaatagtccttggaggcaccaaagtcagggaagacgtcgatgtcattgagtgctccttgcagttcccagatgatgactactcctggtgggacctcttcatgaagatctgcgtcttcatctttgccttcgtgatccctgtcctcatcatcatcgtctgctacaccctgatgatcctgcgtctcaagagcgtccggctcctttctggctcccgagagaaagatcgcaacctgcgtaggatcaccagactggtcctggtggtggtggcagtcttcgtcgtctgctggactcccattcacatattcatcctggtggaggctctggggagcacctcccacagcacagctgctctctccagctattacttctgcatcgccttaggctataccaacagtagcctgaatcccattctctacgcctttcttgatgaaaacttcaagcggtgtttccgggacttctgctttccactgaagatgaggatggagcggcagagcactagcagagtccgaaatacagttcaggatcctgcttacctgagggacatcgatgggatgaataaaccagtatgactagtcgtggagatgtcttcgtacagttcttcgggaagagaggagttcaatgatctaggtttaactcagatcactactgcagtctgacatgaaaagatagaatttaaaataaacttttagagatctcatggtctgaagtcatcagatgcagaccacgttcgtgatcagtggaaacatcaaggacaaaaggtccacgcaacacatgcacctcttctctagggcacagaagcgaggcagagcctcagttcctctgatgaacaagggaacaggtcttttccttctggtttgctaggtaaggttcagcacccatctgctgtggccttcctatgaaacgtagtttcaaaagctcggtttaagaaaaaaggaaaagaaaaaacattgctttcagagctcaatgggcatccaatccagatgtttcacaatgacagcaacaacctccaacggaatgggaactatttccagggttcatgcccagctcactgtatgctgtgtggacatgcatttcatgtggctgtgtggtaagaattacagcttacatatggcttggacccacatctgaggaatctgatgttcacttataccagaacattatcttgctatttatgaaattatttaaacgttcaaaagattgtttttaacatggtttaatttcccaaaaactacagttttttttcttagcatgctattcaggtaaacagtcttataataaagcatgtcccattgtcaagaaacataaagtggtgtgaataccactgaaaatatatatatagtatcttctgtaaataatagtacctgtgtgaataaggaataggcttgcctcccagccaggcaatttcctgagggcacactaatgatatcccctgagttgctaagttgatgctgagacattttgctgggaattagtcatggcatgatctctttcagactccctgaataccatttagtcccgtaacagtgctcacaactcatgtgctaatgaatcacaaaggctttaactagctcccaggttgtagccttcgcaggatctagtttatttgccacatctctttatgaacatatagcgattcgcagatctctctattcacggagaggaaggtgttttgcttctgtagatctcaaggtactattttgtggctctcagcaggaagtagaattgttcctaaatgtgtgctgaatgaggacatgatgtccctcctggtgccaggacacatcctgcatggcattctgtgaagggcatacctgctgaggataatgccaggagcagcacatttagggtaattttgctaaaacttccagatgacatataaattccctctttttccccctgaaacttaccatttcagaggtaatggctttttctgtaatttgcctgagaagaaaaaagggataatttagaaataacactccaagcctatatattactagggctgcatcctctggaatttaatagaaaaattgaatatatagccctatgtaactacagacatcattacaactgttaagttctgttcaccatgcaagttctcggtggtgtatgtactctcaccttttggaaacaaaaccttgcattgaaggttttacacatggcttcagaatgttactctgaccatgtttgcctctactccagattatcatggcacctaacacagatgacatatggcagaatggaagtgatttctcctaatgaaaatgaagtgctcttttgagtatttcttgttttattgagattcctatctgcccttgtatttttataactgaatgtaaataggaattgcttaaatactggtttacactaatcccatagttaaaaatcttggctatggtacaggaaggatatctatatagaggatagttccagaaacaagccctggtgaaataggaaatataaaaacttctttatggaacaggaaaacccaagagactttctcgtcagattcctttccagtgcaaagtataacagagataggattatgagatgaaatcacagtagtgtgtttcctttaattttttctgtcttctttttttttttttttttttttgagacggagtctcgctctgttgcccaggctggagtgcggtagcacagtcttggctcactgcaacctccacctcctgggttcaagcgattctcctgcctctgcctcctaagtagctgggattacaggcgtgcaccgccaagcccggctaatttttgtatttttagtagagacggggtttcaccatgttatgcaggctggtctcaaactcctgacctcagaatattcacctgcctcggcctcccaaagtgctgggattacagatgtgaatggccacgcctggcctgtttcctttaagttagcacttcacgtgctcttacagcgttaattgccattattggtttgcctgattttcctgcatctcctcatatgtaagtctgcagcccaaggagagaatagtagctgtatgtgcccacaaggggtgtccaagcttcttgattcttgttaatatcgactccccaacattgaaaaaggagtgaagaagggaatatcattttagggtactgctttaaaggaatgataaagtaaacaacgtagcagggaaaataccacttgcacaaatgtatttctttgtcaaagtgtgtacacgctttctgtttgtcctgatgtcctgctgtgaagcagggaccacattgccatttattcattgttccaggcaatgcatttgtccaaacccctctggctctctgatatctctcatttcttgatgttcctattctctgacctcaacaaggaggacactgtctgttgtgtctctttgagactagaactccatgtgtttaaccttcagatccattctctacatgaaccctattctttccaccctggtaagaaggtctggaagacaggtcctaacgaggggtcagagaaggcacagagaaatgaaccagccatgcaggggcagcactgaggaggaaaccccccactctaactgggaggagagtggaaacactcttagtatctcagagtagttaccaatctaagagcatccttcgagtttaagtcaaaactctaggcttaataccaaaaataatacatcatttggaaaaatagcttggagaaaaaaaatcaataaagagtcacataaaatcttaagaaaatggttctattctgtgatatattactaagaaatacagttcttaaacgtgtataactattgtcagacaatttataggtgtttcatctagtcctgggatgaaatacgatgactcatgcaaattcagggagcacactggctgactttaaattggaacattgtaaagtgaaagctgtgaaaggttgtgtgtcctatcaatgagatttattttctaaccaagagctgttcggatgattcagtataaatacgaaaatcacatccaaaaacggtataacccagcttccttaaggcaattttcttctctgaaacaagaatatactcatatgttctttactataatgtatatgatttttatcttgtactttaaaagatgataattatgcattgtatatacgattgtgtgccttgcaataaaatcaaaactgtacctgctgaaaatcacaacagtc

SEQ ID NO: 451 - protein, 380 aa, Homosapiens
MDSPIQIFRGEPGPTCAPSACLPPNSSAWFPGWAEPDSNGSAGSEDAQLEPAHISPAIPVIITAVYSVVFVVGLVGNSLVMFVIIRYTKMKTATNIYIFNLALADALVTTTMPFQSTVYLMNSWPFGDVLCKIVISIDYYNMFTSIFTLTMMSVDRYIAVCHPVKALDFRTPLKAKIINICIWLLSSSVGISAIVLGGTKVREDVDVIECSLQFPDDDYSWWDLFMKICVFIFAFVIPVLIIIVCYTLMILRLKSVRLLSGSREKDRNLRRITRLVLVVVAVFVVCWTPIHIFILVEALGSTSHSTAALSSYYFCIALGYTNSSLNPILYAFLDENFKRCFRDFCFPLKMRMERQSTSRVRNTVQDPAYLRDIDGMNKPV

SEQ ID NO: 452 - DNA, 2165 bp, Homosapiens
acgtgaccggcgcctctgtcattctactgcggccgccctggcttccttctacctgtgcggccctcaacgtctccttggtgcgggacccgcttcactttcggctcccggagtctccctccactgctcagacctctggacctgacaggagacgcctacttggctctgacgcggcgccccagcccggctgtgtccccggcgccccggaccaccctccctgccggctttgggtgcgttgtggggtcccgaggattcgcgagatttgttgaaagacattcaagattacgaagtttagatgaccaaaatggatatccgaggtgctgtggatgctgctgtccccaccaatattattgctgccaaggctgcagaagttcgtgcaaacaaagtcaactggcaatcctatcttcagggacagatgatttctgctgaagattgtgagtttattcagaggtttgaaatgaaacgaagccctgaagagaagcaagagatgcttcaaactgaaggcagccagtgtgctaaaacatttataaatctgatgactcatatctgcaaagaacagaccgttcagtatatactaactatggtggatgatatgctgcaggaaaatcatcagcgtgttagcattttctttgactatgcaagatgtagcaagaacactgcgtggccctactttctgccaatgttgaatcgccaggatcccttcactgttcatatggcagcaagaattattgccaagttagcagcttggggaaaagaactgatggaaggcagtgacttaaattactatttcaattggataaaaactcagctgagttcacagaaactgcgtggtagcggtgttgctgttgaaacaggaacagtctcttcaagtgatagttcgcagtatgtgcagtgcgtggccgggtgtttgcagctgatgctccgggtcaatgagtaccgctttgcttgggtggaagcagatggggtaaattgcataatgggagtgttgagtaacaagtgtggctttcagctccagtatcaaatgattttttcaatatggctcctggcattcagtcctcaaatgtgtgaacacctgcggcgctataatatcattccagttctgtctgatatccttcaggagtctgtcaaagagaaagtaacaagaatcattcttgcagcatttcgtaactttttagaaaaatcaactgaaagagaaactcgccaagaatatgccctggctatgattcagtgcaaagttctgaaacagttggagaacttggaacagcagaagtacgatgatgaagatatcagcgaagatatcaaatttcttttggaaaaacttggagagagtgtccaggaccttagttcatttgatgaatacagttcagaacttaaatctggaaggttggaatggagtcctgtgcacaaatctgagaaattttggagagagaatgctgtgaggttaaatgagaagaattatgaactcttgaaaatcttgacaaaacttttggaagtgtcagatgatccccaagtcttagctgttgctgctcacgatgttggagaatatgtgcggcattatccacgaggcaaacgggtcatcgagcagctcggtgggaagcagctggtcatgaaccacatgcatcatgaagaccagcaggtccgctataatgctctgctggccgtgcagaagctcatggtgcacaactgggaataccttggcaagcagctccagtccgagcagccccagaccgctgccgcccgaagctaagcctgcctctggccttcccctccgcctcaatgcagaaccagtagtgggagcactgtgtttagagttaagagtgaacactgtttgattttacttggaatttcctctgttatatagcttttcccaatgctaatttccaaacaacaacaacaaaataacatgtttgcctgttaagttgtataaaagtaggtgattctgtatttaaagaaaatattactgttacatatactgcttgcaatttctgtatttattgttctctggaaataaatatagttattaaaggattctcactccaaacatggcctctctctttacttggactttgaacaaaagtcaactgttgtctcttttcaaaccaaattgggagaattgttgcaaagtagtgaatggcaaataaatgttttaaaatctaaaaaaaaaaaaa

SEQ ID NO: 453 - protein, 483 aa, Homosapiens
MTKMDIRGAVDAAVPTNIIAAKAAEVRANKVNWQSYLQGQMISAEDCEFIQRFEMKRSPEEKQEMLQTEGSQCAKTFINLMTHICKEQTVQYILTMVDDMLQENHQRVSIFFDYARCSKNTAWPYFLPMLNRQDPFTVHMAARIIAKLAAWGKELMEGSDLNYYFNWIKTQLSSQKLRGSGVAVETGTVSSSDSSQYVQCVAGCLQLMLRVNEYRFAWVEADGVNCIMGVLSNKCGFQLQYQMIFSIWLLAFSPQMCEHLRRYNIIPVLSDILQESVKEKVTRIILAAFRNFLEKSTERETRQEYALAMIQCKVLKQLENLEQQKYDDEDISEDIKFLLEKLGESVQDLSSFDEYSSELKSGRLEWSPVHKSEKFWRENAVRLNEKNYELLKILTKLLEVSDDPQVLAVAAHDVGEYVRHYPRGKRVIEQLGGKQLVMNHMHHEDQQVRYNALLAVQKLMVHNWEYLGKQLQSEQPQTAAARS

SEQ ID NO: 454 - DNA, 2111 bp, Homosapiens
acgtgaccggcgcctctgtcattctactgcggccgccctggcttccttctacctgtgcggccctcaacgtctccttggtgcgggacccgcttcactttcggctcccggagtctccctccactgctcagacctctggacctgacaggagacgcctacttggctctgacgcggcgccccagcccggctgtgtccccggcgccccggaccaccctccctgccggctttgggtgcgttgtggggtcccgaggattcgcgagatttgttgaaagacattcaagattacgaagtttagatgaccaaaatggatatccgaggtgctgtggatgctgctgtccccaccaatattattgctgccaaggctgcagaagttcgtgcaaacaaagtcaactggcaatcctatcttcagggacagatgatttctgctgaagattgtgagtttattcagaggtttgaaatgaaacgaagccctgaagagaagcaagagatgcttcaaactgaaggcagccagtgtgctaaaacatttataaatctgatgactcatatctgcaaagaacagaccgttcagtatatactaactatggtggatgatatgctgcaggaaaatcatcagcgtgttagcattttctttgactatgcaagatgtagcaagaacactgcgtggccctactttctgccaatgttgaatcgccaggatcccttcactgttcatatggcagcaagaattattgccaagttagcagcttggggaaaagaactgatggaaggcagtgacttaaattactatttcaattggataaaaactcagctgagttcacagagttcgcagtatgtgcagtgcgtggccgggtgtttgcagctgatgctccgggtcaatgagtaccgctttgcttgggtggaagcagatggggtaaattgcataatgggagtgttgagtaacaagtgtggctttcagctccagtatcaaatgattttttcaatatggctcctggcattcagtcctcaaatgtgtgaacacctgcggcgctataatatcattccagttctgtctgatatccttcaggagtctgtcaaagagaaagtaacaagaatcattcttgcagcatttcgtaactttttagaaaaatcaactgaaagagaaactcgccaagaatatgccctggctatgattcagtgcaaagttctgaaacagttggagaacttggaacagcagaagtacgatgatgaagatatcagcgaagatatcaaatttcttttggaaaaacttggagagagtgtccaggaccttagttcatttgatgaatacagttcagaacttaaatctggaaggttggaatggagtcctgtgcacaaatctgagaaattttggagagagaatgctgtgaggttaaatgagaagaattatgaactcttgaaaatcttgacaaaacttttggaagtgtcagatgatccccaagtcttagctgttgctgctcacgatgttggagaatatgtgcggcattatccacgaggcaaacgggtcatcgagcagctcggtgggaagcagctggtcatgaaccacatgcatcatgaagaccagcaggtccgctataatgctctgctggccgtgcagaagctcatggtgcacaactgggaataccttggcaagcagctccagtccgagcagccccagaccgctgccgcccgaagctaagcctgcctctggccttcccctccgcctcaatgcagaaccagtagtgggagcactgtgtttagagttaagagtgaacactgtttgattttacttggaatttcctctgttatatagcttttcccaatgctaatttccaaacaacaacaacaaaataacatgtttgcctgttaagttgtataaaagtaggtgattctgtatttaaagaaaatattactgttacatatactgcttgcaatttctgtatttattgttctctggaaataaatatagttattaaaggattctcactccaaacatggcctctctctttacttggactttgaacaaaagtcaactgttgtctcttttcaaaccaaattgggagaattgttgcaaagtagtgaatggcaaataaatgttttaaaatctaaaaaaaaaaaaa

SEQ ID NO: 455 - protein, 465 aa, Homosapiens
MTKMDIRGAVDAAVPTNIIAAKAAEVRANKVNWQSYLQGQMISAEDCEFIQRFEMKRSPEEKQEMLQTEGSQCAKTFINLMTHICKEQTVQYILTMVDDMLQENHQRVSIFFDYARCSKNTAWPYFLPMLNRQDPFTVHMAARIIAKLAAWGKELMEGSDLNYYFNWIKTQLSSQSSQYVQCVAGCLQLMLRVNEYRFAWVEADGVNCIMGVLSNKCGFQLQYQMIFSIWLLAFSPQMCEHLRRYNIIPVLSDILQESVKEKVTRIILAAFRNFLEKSTERETRQEYALAMIQCKVLKQLENLEQQKYDDEDISEDIKFLLEKLGESVQDLSSFDEYSSELKSGRLEWSPVHKSEKFWRENAVRLNEKNYELLKILTKLLEVSDDPQVLAVAAHDVGEYVRHYPRGKRVIEQLGGKQLVMNHMHHEDQQVRYNALLAVQKLMVHNWEYLGKQLQSEQPQTAAARS

SEQ ID NO: 456 - DNA, 2025 bp, Homosapiens
aggcgactcttgcagtttctccagcttgcctggtgcgtgctggtgtctcgccgcttggtcctctcctgttcttcggcccccggttgccagattgcttttcttccaggcctcaaccagatttgttgaaagacattcaagattacgaagtttagatgaccaaaatggatatccgaggtgctgtggatgctgctgtccccaccaatattattgctgccaaggctgcagaagttcgtgcaaacaaagtcaactggcaatcctatcttcagggacagatgatttctgctgaagattgtgagtttattcagaggtttgaaatgaaacgaagccctgaagagaagcaagagatgcttcaaactgaaggcagccagtgtgctaaaacatttataaatctgatgactcatatctgcaaagaacagaccgttcagtatatactaactatggtggatgatatgctgcaggaaaatcatcagcgtgttagcattttctttgactatgcaagatgtagcaagaacactgcgtggccctactttctgccaatgttgaatcgccaggatcccttcactgttcatatggcagcaagaattattgccaagttagcagcttggggaaaagaactgatggaaggcagtgacttaaattactatttcaattggataaaaactcagctgagttcacagaaactgcgtggtagcggtgttgctgttgaaacaggaacagtctcttcaagtgatagttcgcagtatgtgcagtgcgtggccgggtgtttgcagctgatgctccgggtcaatgagtaccgctttgcttgggtggaagcagatggggtaaattgcataatgggagtgttgagtaacaagtgtggctttcagctccagtatcaaatgattttttcaatatggctcctggcattcagtcctcaaatgtgtgaacacctgcggcgctataatatcattccagttctgtctgatatccttcaggagtctgtcaaagagaaagtaacaagaatcattcttgcagcatttcgtaactttttagaaaaatcaactgaaagagaaactcgccaagaatatgccctggctatgattcagtgcaaagttctgaaacagttggagaacttggaacagcagaagtacgatgatgaagatatcagcgaagatatcaaatttcttttggaaaaacttggagagagtgtccaggaccttagttcatttgatgaatacagttcagaacttaaatctggaaggttggaatggagtcctgtgcacaaatctgagaaattttggagagagaatgctgtgaggttaaatgagaagaattatgaactcttgaaaatcttgacaaaacttttggaagtgtcagatgatccccaagtcttagctgttgctgctcacgatgttggagaatatgtgcggcattatccacgaggcaaacgggtcatcgagcagctcggtgggaagcagctggtcatgaaccacatgcatcatgaagaccagcaggtccgctataatgctctgctggccgtgcagaagctcatggtgcacaactgggaataccttggcaagcagctccagtccgagcagccccagaccgctgccgcccgaagctaagcctgcctctggccttcccctccgcctcaatgcagaaccagtagtgggagcactgtgtttagagttaagagtgaacactgtttgattttacttggaatttcctctgttatatagcttttcccaatgctaatttccaaacaacaacaacaaaataacatgtttgcctgttaagttgtataaaagtaggtgattctgtatttaaagaaaatattactgttacatatactgcttgcaatttctgtatttattgttctctggaaataaatatagttattaaaggattctcactccaaacatggcctctctctttacttggactttgaacaaaagtcaactgttgtctcttttcaaaccaaattgggagaattgttgcaaagtagtgaatggcaaataaatgttttaaaatctaaaaaaaaaaaaa

SEQ ID NO: 457 - protein, 483 aa, Homosapiens; identical to SEQ ID NO: 453

SEQ ID NO: 458 - DNA, 1596 bp, Homosapiens
ccgcgggacgcatgcgcacggcggacggaggcgagccggccggggcttcctccccggccggcagggtggacggtgggctccagatgggatcagagcggatggagatgcggaagcggcagatgcccgccgcccaggacacaccaggcgccgccccaggccagcccggagcggggagtcgcgggtccaacgcatgctgcttctgctggtgctgctgttgtagctgctcgtgtctcactgttagaaaccaggaagatcagaggcccacaatagcttcccacgaactcagagcagatcttccaacctgggaagaaagccctgctcctactctggaagaagtcaacgcctgggctcagtcatttgacaaattaatggtcactccagcaggaaggaatgcattccgtgaattcctccgaacagaattcagtgaggaaaatatgctcttctggatggcctgtgaggaactgaaaaaggaagctaataaaaacattattgaagagaaagcaaggataatctatgaagactacatttctatactttctcctaaggaggtgagcttagactcccgggtgagagaagtgatcaacagaaacatggtggagccatcccaacacatattcgatgatgctcaacttcagatttacaccctgatgcacagagactcatatcctcgattcatgaactctgctgtctataaggacttgcttcagtccttatcggagaaatctattgaagcataggatttttcaaatatatttattattaataaaataataaaagaattcatgggctacaactagcacagggaatttagaggttgtagcatcttctgctggagtaatactcaggctattctaataacagatgattccttcaacagactgctatatattcaccatgtaaactgcagccacctttagtgatacttttaaaaaaaaaaataaagggatatggctgttgtagaaagatagcgtatttgcatttacaataacagtagcatgttgtcagtggccaaggctacacagaaggctccctgctgcccggagcaggtacatccacagagcaaagggaaccacttttattttgcatgagtttggtaactgattactctcccctcaaagaaaagacattcaggtgtttctcaacgacatcttctgtccagcaagctcggtttgaatacgtcacttaccagtgccattgcaggacccaaattcacagttcataaaagatgtgaccactacatgtaaaaatagcattctacttgatcttacagtatgtatgtatgtatgtatggagacatatgtgtgcgtgtggatgtctacatggttaatggaaagcactgtgctctgaagtggatcagtctcaagtgtctggtaacagcagcaatgcttagaaaattcttttgttgaaaagagttactgttattatcagaatttgccaacctaaagaatgaatttttaaattcataacttggtcatgttcacaacaaaactgtcaaataagcatatttccatttttattactgaaagaaatatgggcattttcattctttaaagaaataaagcacaagaattttatctcaaaaaaaaaaaaaaaaaa

SEQ ID NO: 459 - protein, 241 aa, Homosapiens
MRTADGGEPAGASSPAGRVDGGLQMGSERMEMRKRQMPAAQDTPGAAPGQPGAGSRGSNACCFCWCCCCSCSCLTVRNQEDQRPTIASHELRADLPTWEESPAPTLEEVNAWAQSFDKLMVTPAGRNAFREFLRTEFSEENMLFWMACEELKKEANKNIIEEKARIIYEDYISILSPKEVSLDSRVREVINRNMVEPSQHIFDDAQLQIYTLMHRDSYPRFMNSAVYKDLLQSLSEKSIEA

SEQ ID NO: 460 - DNA, 2102 bp, Homosapiens
cattaaccaaacaaagagaagcagagtggatcctgtgctaatattgggaaaaccaggcaacaggactcatttggggcctttattgtgaaaacatgccccagctttcccaagataaccaagagtgcctccagaaacatttctccaggccgtctatatggacacagtttctgcccctgttcagggctcagagatataatacagacattcaccaaatcacagaaaatgaaggagacctcagggctgttcctgatatcaagtccttcccgcctgcacagctcccagactcgcccgccgccccgaagctgttcggcctcctttctagcccgctttccagcctcgcaaggttcttctctcaccttctccggcgaccccctcccgaggctccccggaggcgcctggacttctcccccctgcttcccgccctgccggccgcccggctctcgagggggcacgaggagctgccgggccgcctctcgctcctgctcggggcggcgctggcactgcccggccgaccctcggggggtcgtccgctgaggcccccccatccggtagccaagcccagggaagaagacgccaccgctgggcagagctcgcctatgccgcagatgggatcagagcggatggagatgcggaagcggcagatgcccgccgcccaggacacaccaggcgccgccccaggccagcccggagcggggagtcgcgggtccaacgcatgctgcttctgctggtgctgctgttgtagctgctcgtgtctcactgttagaaaccaggaagatcagaggcccacaatagcttcccacgaactcagagcagatcttccaacctgggaagaaagccctgctcctactctggaagaagtcaacgcctgggctcagtcatttgacaaattaatggtcactccagcaggaaggaatgcattccgtgaattcctccgaacagaattcagtgaggaaaatatgctcttctggatggcctgtgaggaactgaaaaaggaagctaataaaaacattattgaagagaaagcaaggataatctatgaagactacatttctatactttctcctaaggaggtgagcttagactcccgggtgagagaagtgatcaacagaaacatggtggagccatcccaacacatattcgatgatgctcaacttcagatttacaccctgatgcacagagactcatatcctcgattcatgaactctgctgtctataaggacttgcttcagtccttatcggagaaatctattgaagcataggatttttcaaatatatttattattaataaaataataaaagaattcatgggctacaactagcacagggaatttagaggttgtagcatcttctgctggagtaatactcaggctattctaataacagatgattccttcaacagactgctatatattcaccatgtaaactgcagccacctttagtgatacttttaaaaaaaaaaataaagggatatggctgttgtagaaagatagcgtatttgcatttacaataacagtagcatgttgtcagtggccaaggctacacagaaggctccctgctgcccggagcaggtacatccacagagcaaagggaaccacttttattttgcatgagtttggtaactgattactctcccctcaaagaaaagacattcaggtgtttctcaacgacatcttctgtccagcaagctcggtttgaatacgtcacttaccagtgccattgcaggacccaaattcacagttcataaaagatgtgaccactacatgtaaaaatagcattctacttgatcttacagtatgtatgtatgtatgtatggagacatatgtgtgcgtgtggatgtctacatggttaatggaaagcactgtgctctgaagtggatcagtctcaagtgtctggtaacagcagcaatgcttagaaaattcttttgttgaaaagagttactgttattatcagaatttgccaacctaaagaatgaatttttaaattcataacttggtcatgttcacaacaaaactgtcaaataagcatatttccatttttattactgaaagaaatatgggcattttcattctttaaagaaataaagcacaagaattttatctcaa

SEQ ID NO: 461 - protein, 388 aa, Homosapiens
MPQLSQDNQECLQKHFSRPSIWTQFLPLFRAQRYNTDIHQITENEGDLRAVPDIKSFPPAQLPDSPAAPKLFGLLSSPLSSLARFFSHLLRRPPPEAPRRRLDFSPLLPALPAARLSRGHEELPGRLSLLLGAALALPGRPSGGRPLRPPHPVAKPREEDATAGQSSPMPQMGSERMEMRKRQMPAAQDTPGAAPGQPGAGSRGSNACCFCWCCCCSCSCLTVRNQEDQRPTIASHELRADLPTWEESPAPTLEEVNAWAQSFDKLMVTPAGRNAFREFLRTEFSEENMLFWMACEELKKEANKNIIEEKARIIYEDYISILSPKEVSLDSRVREVINRNMVEPSQHIFDDAQLQIYTLMHRDSYPRFMNSAVYKDLLQSLSEKSIEA

SEQ ID NO: 462 - DNA, 2784 bp, Homosapiens
agccggaagccacgcctgcccactagcccgacgcccgcctggcgggaacatgggctcgcccctcaccagcgatctgcagtcagttggtagcgcctgcacgtcgcgcgcggtgttcgattgtcgctgcctggggaggaggagccggagccgccgccgccgccgccgccgccgcgggcttcgttcgtaaggaagggggcctaggcccgggcctgcggtggtgggggttgctgcgcgccgggggtcgctcctgctgtgtcttccgctccagcttcgcccacttccccttgccagcggggtgggcgcggagaagacctgccggagccatggaggacgaagtggtccgctttgccaagaagatggacaagatggtgcagaagaagaacgcggctggagcattggatttgctaaaggagcttaagaatattcctatgaccctggaattactgcagtccacaagaatcggaatgtcagttaatgctattcgcaagcagagtacagatgaggaagttacatctttggcaaagtctctcatcaaatcctggaaaaaattattagatgggccatcaactgagaaagaccttgacgaaaagaagaaagaacctgcaattacatcgcagaacagccctgaggcaagagaagaaagtacttccagcggcaatgtaagcaacagaaaggatgagacaaatgctcgagatacttatgtttcatcctttcctcgggcaccaagcacttctgattctgtgcggttgaagtgtagggagatgcttgctgcagctcttcgaacaggggatgactacattgcaattggagctgatgaggaagaattaggatctcaaattgaagaagctatatatcaagaaataaggaatacagacatgaaatacaaaaatagagtacgaagtaggatatcaaatcttaaagatgcaaaaaatccaaatttaaggaaaaatgtcctctgtgggaatattcctcctgacttatttgctagaatgacagcagaggaaatggctagtgatgagctgaaagagatgcggaaaaacttgaccaaagaagccatcagagagcatcagatggccaagactggtgggacccagactgacttgttcacatgtggcaaatgtaaaaagaagaattgcacttacacacaggtacaaacccgtagtgctgatgaaccaatgacaacatttgttgtctgtaatgaatgtggaaatcgatggaagttctgttgagttggaagaattggcaaaatatctggaccattaagaaaacggattttgtaactagctttaaactaggccaagcaactagttttcctgcaaatcaaatttttaaagcaacttgggttagactttgtttttgacctaacatcccttccttaaatgccttctgtagtttcagatcagtagggagaccatataataattttatggtacctgtttcaaaacatattttttctgtttttataagtaagttgatattaattaaactcttggcaatatttcttctttcttaaaggaaaatataccttaactttttttcttttacactgtgaaacatacacagtagaaattctgttactctctgttattaatacataaatgaaaatacatttttttccatattggcatgtagctacaaatattaaaggaggagaaaaggtaatataattttaggtttaccaaatatggtgtgtattcaaataatacttgaccagcttatctaaaatgtacataattttgaggtagcttatgaatttgattttaattattatgttcacaagcttggaatattagatattattttgcatctgtaactaaccgtgatcatcatttcttgtaatttcttgtacatgtatattacttgttcttaatagatttttggaaacaagactttattgagatcagtttggttttcctgttaatttacctgtttgactttataatgtgttttagttttgcagaagaacactgttgtagtttagaaggcttttcataaatcccctcataggcaaagatgaaaacttcccactatttttttcccctcttaggaagacatactggaaagaaaatgtttagcatcttagtgtagtatagctattgtaaacagttcatgactagattttgattcggaaatctatactgaccaaggattaatcttaaggattgtataattcattaaagctgtggtctttccatgtggagactgatagaaaataattttgtcccaagtcttatttgctgactttttctgtcatgagtgagattgttgaacaaactgaatatatgggctatagcaagtagctttacagtacagatcttacaattaagttttgcttttgttaaagtgtgtaccattttttctgtttggagtaagacaaaaattgttttgacataggttccctagggtacacttgctctagcatactttaaaggccactgttgcaaagtctacattttatgctgaatctgcattctgtcaggcacccgtagaaagacctcagtacatgctttgcactctcctttgctccctttttccaatttcttattgcatatcattttgttgtaatacagaaagcagcatttttaaatgtccgtgttaagaattggcccactggtaccaactcacctctattttgtcagttcatagttgaagattttgttttatttcaaaaacaaagtacatttttgaaataatgtttcagaataaaataatctcacttttaagtgatccattttaaaatttgtaattcaataaagttttttttgttgttaaacataaaaaaaa

SEQ ID NO: 463 - protein, 301 aa, Homosapiens
MEDEVVRFAKKMDKMVQKKNAAGALDLLKELKNIPMTLELLQSTRIGMSVNAIRKQSTDEEVTSLAKSLIKSWKKLLDGPSTEKDLDEKKKEPAITSQNSPEAREESTSSGNVSNRKDETNARDTYVSSFPRAPSTSDSVRLKCREMLAAALRTGDDYIAIGADEEELGSQIEEAIYQEIRNTDMKYKNRVRSRISNLKDAKNPNLRKNVLCGNIPPDLFARMTAEEMASDELKEMRKNLTKEAIREHQMAKTGGTQTDLFTCGKCKKKNCTYTQVQTRSADEPMTTFVVCNECGNRWKFC

SEQ ID NO: 464 - DNA, 2721 bp, Homosapiens
agccggaagccacgcctgcccactagcccgacgcccgcctggcgggaacatgggctcgcccctcaccagcgatctgcagtcagttggtagcgcctgcacgtcgcgcgcggtgttcgattgtcgctgcctggggaggaggagccggagccgccgccgccgccgccgccgccgcgggcttcgttcgtaaggaagggggcctaggcccgggcctgcggtggtgggggttgctgcgcgccgggggtcgctcctgctgtgtcttccgctccagcttcgcccacttccccttgccagcggggtgggcgcggagaagacctgccggagccatggaggacgaagtggtccgctttgccaagaagatggacaagatggtgcagaagaagaacgcgtccacaagaatcggaatgtcagttaatgctattcgcaagcagagtacagatgaggaagttacatctttggcaaagtctctcatcaaatcctggaaaaaattattagatgggccatcaactgagaaagaccttgacgaaaagaagaaagaacctgcaattacatcgcagaacagccctgaggcaagagaagaaagtacttccagcggcaatgtaagcaacagaaaggatgagacaaatgctcgagatacttatgtttcatcctttcctcgggcaccaagcacttctgattctgtgcggttgaagtgtagggagatgcttgctgcagctcttcgaacaggggatgactacattgcaattggagctgatgaggaagaattaggatctcaaattgaagaagctatatatcaagaaataaggaatacagacatgaaatacaaaaatagagtacgaagtaggatatcaaatcttaaagatgcaaaaaatccaaatttaaggaaaaatgtcctctgtgggaatattcctcctgacttatttgctagaatgacagcagaggaaatggctagtgatgagctgaaagagatgcggaaaaacttgaccaaagaagccatcagagagcatcagatggccaagactggtgggacccagactgacttgttcacatgtggcaaatgtaaaaagaagaattgcacttacacacaggtacaaacccgtagtgctgatgaaccaatgacaacatttgttgtctgtaatgaatgtggaaatcgatggaagttctgttgagttggaagaattggcaaaatatctggaccattaagaaaacggattttgtaactagctttaaactaggccaagcaactagttttcctgcaaatcaaatttttaaagcaacttgggttagactttgtttttgacctaacatcccttccttaaatgccttctgtagtttcagatcagtagggagaccatataataattttatggtacctgtttcaaaacatattttttctgtttttataagtaagttgatattaattaaactcttggcaatatttcttctttcttaaaggaaaatataccttaactttttttcttttacactgtgaaacatacacagtagaaattctgttactctctgttattaatacataaatgaaaatacatttttttccatattggcatgtagctacaaatattaaaggaggagaaaaggtaatataattttaggtttaccaaatatggtgtgtattcaaataatacttgaccagcttatctaaaatgtacataattttgaggtagcttatgaatttgattttaattattatgttcacaagcttggaatattagatattattttgcatctgtaactaaccgtgatcatcatttcttgtaatttcttgtacatgtatattacttgttcttaatagatttttggaaacaagactttattgagatcagtttggttttcctgttaatttacctgtttgactttataatgtgttttagttttgcagaagaacactgttgtagtttagaaggcttttcataaatcccctcataggcaaagatgaaaacttcccactatttttttcccctcttaggaagacatactggaaagaaaatgtttagcatcttagtgtagtatagctattgtaaacagttcatgactagattttgattcggaaatctatactgaccaaggattaatcttaaggattgtataattcattaaagctgtggtctttccatgtggagactgatagaaaataattttgtcccaagtcttatttgctgactttttctgtcatgagtgagattgttgaacaaactgaatatatgggctatagcaagtagctttacagtacagatcttacaattaagttttgcttttgttaaagtgtgtaccattttttctgtttggagtaagacaaaaattgttttgacataggttccctagggtacacttgctctagcatactttaaaggccactgttgcaaagtctacattttatgctgaatctgcattctgtcaggcacccgtagaaagacctcagtacatgctttgcactctcctttgctccctttttccaatttcttattgcatatcattttgttgtaatacagaaagcagcatttttaaatgtccgtgttaagaattggcccactggtaccaactcacctctattttgtcagttcatagttgaagattttgttttatttcaaaaacaaagtacatttttgaaataatgtttcagaataaaataatctcacttttaagtgatccattttaaaatttgtaattcaataaagttttttttgttgttaaacataaaaaaaa

SEQ ID NO: 465 - protein, 280 aa, Homosapiens
MEDEVVRFAKKMDKMVQKKNASTRIGMSVNAIRKQSTDEEVTSLAKSLIKSWKKLLDGPSTEKDLDEKKKEPAITSQNSPEAREESTSSGNVSNRKDETNARDTYVSSFPRAPSTSDSVRLKCREMLAAALRTGDDYIAIGADEEELGSQIEEAIYQEIRNTDMKYKNRVRSRISNLKDAKNPNLRKNVLCGNIPPDLFARMTAEEMASDELKEMRKNLTKEAIREHQMAKTGGTQTDLFTCGKCKKKNCTYTQVQTRSADEPMTTFVVCNECGNRWKFC

SEQ ID NO: 466 - DNA, 2578 bp, Homosapiens
cggcgggcgaggggcagggcagggcggaccctggacgcgcgggcgcgcgcggaaggtagcgcggggccgcgttggcgcgcacgcgcctgagcgtgcgcccggtggggccggccgggactcgccgctcgcacgcccttgggccgcggccgggcgcccgctcttccttccgcttgcgctgtgagctgaggcggtgtatgtgcggcaataacatgtcaaccccgctgcccgccatcgtgcccgccgcccggaaggccaccgctgcggtgattttcctgcatggattgggagatactgggcacggatgggcagaagcctttgcaggtatcagaagttcacatatcaaatatatctgcccgcatgcgcctgttaggcctgttacattaaatatgaacgtggctatgccttcatggtttgatattattgggctttcaccagattcacaggaggatgaatctgggattaaacaggcagcagaaaatataaaagctttgattgatcaagaagtgaagaatggcattccttctaacagaattattttgggagggttttctcagggaggagctttatctttatatactgcccttaccacacagcagaaactggcaggtgtcactgcactcagttgctggcttccacttcgggcttcctttccacagggtcctatcggtggtgctaatagagatatttctattctccagtgccacggggattgtgaccctttggttcccctgatgtttggttctcttacggtggaaaaactaaaaacattggtgaatccagccaatgtgacctttaaaacctatgaaggtatgatgcacagttcgtgtcaacaggaaatgatggatgtcaagcaattcattgataaactcctacctccaattgattgacgtcactaagaggccttgtgtagaagtacaccagcatcattgtagtagagtgtaaaccttttcccatgcccagtcttcaaatttctaatgttttgcagtgttaaaatgttttgcaaatacatgccaataacacagatcaaataatatctcctcatgagaaatttatgatcttttaagtttctatacatgtattcttataagacgacccaggatctactatattagaatagatgaagcaggtagcttcttttttctcaaatgtaattcagcaaaataatacagtactgccaccagattttttattacatcatttgaaaattagcagtatgcttaatgaaaatttgttcaggtataaatgagcagttaagatataaacaatttatgcatgctgtgacttagtctatggatttattccaaaattgcttagtcaccatgcagtgtctgtatttttatatatgtgttcatatatacataatgattataatacataataagaatgaggtggtattacattattcctaataatagggataatgctgtttattgtcaagaaaaagtaaaatcgttctcttcaattaatggcccttttattttgggaccaggcttttattttccctgatattatttctatttaatactcttttctctcaagaaaaaaaaaaaagtttgttttttctttattgtccttcatagcaggccaagtattgcctctctgcaatagacagctactgtcaatacatgctgtaatttgacattctgggtcacagatataaggtatttaaaatctatttatgctttatagagaaaccagacattaaaacttcatgcactacttatttcgaattactgtaccttatccaaatttacacctagctattaggatcttcaacccaggtaacaggaataattctgtggtttcatttttctgtaaacaactgaaagaataattagatcatattctagtatgttctgaaatatctttaagactgatcttaaaaactaacttctaagatgatttcatcttctcatagtatagagtttactttgtacacgtttgaaaccaactactgtagaagatgaggaatctattgtaattttttgctttattttcatctgccagtggacttatttgaaattttcactttagtcaaattattttttgtattagtttttgatgcagacataaaaatagcaatcattttaaattgtcaaaatttccagattactggtaaaaattatttgaaaacaaacttatgggtaataaaggctagtcagaaccctataccataaagtgtagttaccatacagattaatatgtagcaaaaatgtatgcttgatatttctcaactgtgttaatttttctgctgtattccagctgaccaaaacaatattaagaatgcatctttataaatgggtgctaattgataatggaaataatttagtaatggactatacaggatgttaataatgaagccatatgtttatgtctggatttaaaaattttaaacaatcatttactatgtcatttttctttaccttgaagaacataaactgttatttcacttctacaaatcagcaagatattatttatggcaagaaatattccattgaaatattgtgctgtaacatgggaaagtgtaaatgtttttcatggtttctatcaatgtgaaataaaatttaattctgaaaaa

SEQ ID NO: 467 - protein, 230 aa, Homosapiens
MCGNNMSTPLPAIVPAARKATAAVIFLHGLGDTGHGWAEAFAGIRSSHIKYICPHAPVRPVTLNMNVAMPSWFDIIGLSPDSQEDESGIKQAAENIKALIDQEVKNGIPSNRIILGGFSQGGALSLYTALTTQQKLAGVTALSCWLPLRASFPQGPIGGANRDISILQCHGDCDPLVPLMFGSLTVEKLKTLVNPANVTFKTYEGMMHSSCQQEMMDVKQFIDKLLPPID

SEQ ID NO: 468 - DNA, 1155 bp, Homosapiens
cccgagaccacgtggcctccgagcagctcagggcgcccttgaaagttcttggatctgcgggttatggccggtcccttgcagggcggtggggcccgggccctggacctactccggggcctgccgcgtgtgagcctggccaacttaaagccgaatcccggctccaagaaaccggagagaagaccaagaggtcggagaagaggtagaaaatgtggcagaggccataaaggagaaaggcaaagaggaacccggccccgcttgggctttgagggaggccagactccattttacatccgaatcccaaaatacgggtttaacgaaggacatagtttcagacgccagtataagcctttgagtctcaatagactgcagtatcttattgatttgggtcgtgttgatcctagtcaacctattgacttaacccagcttgtcaatgggagaggtgtgaccatccagccacttaaaagggattatggtgtccagctggttgaggagggtgctgacacctttacggcaaaagttaatattgaagtacagttggcttcagaactagctattgctgccattgaaaaaaatggtggtgttgttactacagccttctatgatccaagaagtctggacattgtatgcaaacctgttccattctttcttcgtggacaacccattccaaaaagaatgcttccaccagaagaactggtaccatattacactgatgcaaagaaccgtgggtacctggcggatcctgccaaatttcctgaagcacgacttgaactcgccaggaagtatggttatatcttacctgatatcactaaagatgaactcttcaaaatgctctgtactaggaaggatccaaggcagattttctttggtcttgctccaggatgggtggtgaatatggccgataagaaaatcctaaaacctacagatgaaaatctccttaagtattatacctcatgaattcccgtccaaggaagcagagttgttaaagagtactggaataggggctgaaggatctatattcccttattgcattttccttatgtataattttccagatggtgatgttacttttcagtgtactcatatgtctcattttcatctaaaattaaatggcaggaaacaaggactgcatagagaaaaaaaaaaaaaaaaaaaaaa

SEQ ID NO: 469 - protein, 296 aa, Homosapiens [sequence omitted]

SEQ ID NO: 470 - DNA, 501 bp, Homosapiens
atgccacgtggaagccgaagccacacctcctacagggcccctcccaccagccaggcacctcagatgagagctacacccaggctagcaccagcagctcagccgccagcagtggcacccccatctgcagttggctctcctgctcctgcaccccggcagccaagtctgatggcccaaatggcaaccactgcagctggcgtggctgtaggctctgctgtgggtcacacactgggttatgccctcactgggagcttcagtggaggaagtaatggtgagcctgcaaaacttgacatcacttaccagcagcatcagggaacctggccagcacagcagcagcagccttgtttccatgagatcaaacagtttttggagtgtgcccagaaccagggtgacaccaacaagctctgtggggctttcaagaggttctcaaacagtgcagacttgcaaacagataggcctaatcaagaagttcaaattggagaaatggaaaatcagctctcctaa

SEQ ID NO: 471 - protein, 166 aa, Homosapiens
MPRGSRSHTSYRAPPTSQAPQMRATPRLAPAAQPPAVAPPSAVGSPAPAPRQPSLMAQMATTAAGVAVGSAVGHTLGYALTGSFSGGSNGEPAKLDITYQQHQGTWPAQQQQPCFHEIKQFLECAQNQGDTNKLCGAFKRFSNSADLQTDRPNQEVQIGEMENQLS

SEQ ID NO: 472 - DNA, 1591 bp, Homosapiens
ccctgcgtctctgcccgccccgtggcgcccgagtgcactgaagatggcggctgctgtaggacggttgctccgagcgtcggttgcccgacatgtgagtgccattccttggggcatttctgccactgcagccctcaggcctgctgcatgtggaagaacgagcttgacaaatttattgtgttctggttccagtcaagcaaaattattcagcaccagttcctcatgccatgcacctgctgtcacccagcatgcaccctattttaagggtacagccgttgtcaatggagagttcaaagacctaagccttgatgactttaaggggaaatatttggtgcttttcttctatcctttggatttcacctttgtgtgtcctacagaaattgttgcttttagtgacaaagctaacgaatttcacgacgtgaactgtgaagttgtcgcagtctcagtggattcccactttagccatcttgcctggataaatacaccaaggaagaatggtggtttgggccacatgaacatcgcactcttgtcagacttaactaagcagatttcccgagactacggtgtgctgttagaaggttctggtcttgcactaagaggtctcttcataattgaccccaatggagtcatcaagcatttgagcgtcaacgatctcccagtgggccgaagcgtggaagaaaccctccgcttggtgaaggcgttccagtatgtagaaacacatggagaagtctgcccagcgaactggacaccggattctcctacgatcaagccaagtccagctgcttccaaagagtactttcagaaggtaaatcagtagatcacccatgtgtatctgcaccttctcaactgagagaagaaccacagttgaaacctgcttttatcattttcaagatggttatttgtagaaggcaaggaaccaattatgcttgtattcataagtattactctaaatgttttgtttttgtaattctggctaagaccttttaaacatggttagttgctagtacaaggaatcctttattggtaacatcttggtggctggctagctagtttctacagaacataatttgcctctatagaaggctattcttagatcatgtctcaatggaaacactcttctttcttagccttacttgaatcttgcctataataaagtagagcaacacacattgaaagcttctgatcaacggtcctgaaattttcatcttgaatgtctttgtattaaactgaattttcttttaagctaacaaagatcataattttcaatgattagccgtgtaactcctgcaatgaatgtttatgtgattgaagcaaatgtgaatcgtattattttaaaaagtggcagagtgacttaactgatcatgcatgatccctcatccctgaaattgagtttatgtagtcattttacttattttattcattagctaactttgtctatgtatatttctagatattgattagtgtaatcgattataaaggatatttatcaaatccagggattgcattttgaaattataattattttctttgctgaagtattcattgtaaaacatacaaaataaacatattttaaaacatttgcattttaccacca

SEQ ID NO: 473 - protein, 256 aa, Homosapiens
MAAAVGRLLRASVARHVSAIPWGISATAALRPAACGRTSLTNLLCSGSSQAKLFSTSSSCHAPAVTQHAPYFKGTAVVNGEFKDLSLDDFKGKYLVLFFYPLDFTFVCPTEIVAFSDKANEFHDVNCEVVAVSVDSHFSHLAWINTPRKNGGLGHMNIALLSDLTKQISRDYGVLLEGSGLALRGLFIIDPNGVIKHLSVNDLPVGRSVEETLRLVKAFQYVETHGEVCPANWTPDSPTIKPSPAASKEYFQKVNQ

SEQ ID NO: 474 - DNA, 1537 bp, Homosapiens
ccctgcgtctctgcccgccccgtggcgcccgagtgcactgaagatggcggctgctgtaggacggttgctccgagcgtcggttgcccgacatgtgagtgccattccttggggcatttctgccactgcagccctcaggcctgctgcatgtggaagaacgagcttgacaaatttattgtgttctggttccagtcaagcaccctattttaagggtacagccgttgtcaatggagagttcaaagacctaagccttgatgactttaaggggaaatatttggtgcttttcttctatcctttggatttcacctttgtgtgtcctacagaaattgttgcttttagtgacaaagctaacgaatttcacgacgtgaactgtgaagttgtcgcagtctcagtggattcccactttagccatcttgcctggataaatacaccaaggaagaatggtggtttgggccacatgaacatcgcactcttgtcagacttaactaagcagatttcccgagactacggtgtgctgttagaaggttctggtcttgcactaagaggtctcttcataattgaccccaatggagtcatcaagcatttgagcgtcaacgatctcccagtgggccgaagcgtggaagaaaccctccgcttggtgaaggcgttccagtatgtagaaacacatggagaagtctgcccagcgaactggacaccggattctcctacgatcaagccaagtccagctgcttccaaagagtactttcagaaggtaaatcagtagatcacccatgtgtatctgcaccttctcaactgagagaagaaccacagttgaaacctgcttttatcattttcaagatggttatttgtagaaggcaaggaaccaattatgcttgtattcataagtattactctaaatgttttgtttttgtaattctggctaagaccttttaaacatggttagttgctagtacaaggaatcctttattggtaacatcttggtggctggctagctagtttctacagaacataatttgcctctatagaaggctattcttagatcatgtctcaatggaaacactcttctttcttagccttacttgaatcttgcctataataaagtagagcaacacacattgaaagcttctgatcaacggtcctgaaattttcatcttgaatgtctttgtattaaactgaattttcttttaagctaacaaagatcataattttcaatgattagccgtgtaactcctgcaatgaatgtttatgtgattgaagcaaatgtgaatcgtattattttaaaaagtggcagagtgacttaactgatcatgcatgatccctcatccctgaaattgagtttatgtagtcattttacttattttattcattagctaactttgtctatgtatatttctagatattgattagtgtaatcgattataaaggatatttatcaaatccagggattgcattttgaaattataattattttctttgctgaagtattcattgtaaaacatacaaaataaacatattttaaaacatttgcattttaccacca

SEQ ID NO: 475 - protein, 238 aa, Homosapiens
MAAAVGRLLRASVARHVSAIPWGISATAALRPAACGRTSLTNLLCSGSSQAPYFKGTAVVNGEFKDLSLDDFKGKYLVLFFYPLDFTFVCPTEIVAFSDKANEFHDVNCEVVAVSVDSHFSHLAWINTPRKNGGLGHMNIALLSDLTKQISRDYGVLLEGSGLALRGLFIIDPNGVIKHLSVNDLPVGRSVEETLRLVKAFQYVETHGEVCPANWTPDSPTIKPSPAASKEYFQKVNQ

SEQ ID NO: 476 - DNA, 2575 bp, Homosapiens
gggacacagagggaggaagaagcggcggcggcggcggcggcggcggcggctcctctttgcagagggggaaactcttgggctgagagcaggaataatgcggtaggcaaggcgggctgctggctcccccggctccggcagcagcggcggcagcccgagcagcggcagcagcagcggcagcaccccaggcgctgacagccccgccggccggctccgttgctgaccgccgactgtcaatggagctggaaaacatcgtggccaacacggtcttgctgaaagccagggaagggggcggaggaaagcgcaaagggaaaagcaagaagtggaaagaaatcctgaagttccctcacattagccagtgtgaagacctccgaaggaccatagacagagattactgcagtttatgtgacaagcagccaatcgggaggctgcttttccggcagttttgtgaaaccaggcctgggctggagtgttacattcagttcctggactccgtggcagaatatgaagttactccagatgaaaaactgggagagaaagggaaggaaattatgaccaagtacctcaccccaaagtcccctgttttcatagcccaagttggccaagacctggtctcccagacggaggagaagctcctacagaagccgtgcaaagaactcttttctgcctgtgcacagtctgtccacgagtacctgaggggagaaccattccacgaatatctggacagcatgttttttgaccgctttctccagtggaagtggttggaaaggcaaccggtgaccaaaaacactttcaggcagtatcgagtgctaggaaaagggggcttcggggaggtctgtgcctgccaggttcgggccacgggtaaaatgtatgcctgcaagcgcttggagaagaagaggatcaaaaagaggaaaggggagtccatggccctcaatgagaagcagatcctcgagaaggtcaacagtcagtttgtggtcaacctggcctatgcctacgagaccaaggatgcactgtgcttggtcctgaccatcatgaatgggggtgacctgaagttccacatctacaacatgggcaaccctggcttcgaggaggagcgggccttgttttatgcggcagagatcctctgcggcttagaagacctccaccgtgagaacaccgtctaccgagatctgaaacctgaaaacatcctgttagatgattatggccacattaggatctcagacctgggcttggctgtgaagatccccgagggagacctgatccgcggccgggtgggcactgttggctacatggctccagaggtcctgaacaaccagaggtacggcctgagccccgactactggggccttggctgcctcatctatgagatgatcgagggccagtcgccgttccgcggccgcaaggagaaggtgaagcgggaggaggtggaccgccgggtcctggagacggaggaggtgtactcccacaagttctccgaggaggccaagtccatctgcaagatgctgctcacgaaagatgcgaagcagaggctgggctgccaggaggagggggctgcagaggtcaagagacaccccttcttcaggaacatgaacttcaagcgcttagaagccgggatgttggaccctcccttcgttccagacccccgcgctgtgtactgtaaggacgtgctggacatcgagcagttctccactgtgaagggcgtcaatctggaccacacagacgacgacttctactccaagttctccacgggctctgtgtccatcccatggcaaaacgagatgatagaaacagaatgctttaaggagctgaacgtgtttggacctaatggtaccctcccgccagatctgaacagaaaccaccctccggaaccgcccaagaaagggctgctccagagactcttcaagcggcagcatcagaacaattccaagagttcgcccagctccaagaccagttttaaccaccacataaactcaaaccatgtcagctcgaactccaccggaagcagctagtttcggctctggcctccaagtccacagtggaaccagcccagacccttctccttagaagtggaagtagtggagcccctgctctggtggggctgccaggggagaccccgggagccggggaaggaggccgtccatcccgtcgacgtagaacctcgaggtttctcaaagaaatttccactcaggtctgttttccgaggcggccccggccggggtggattggatttgtctttggtgaacattgcaatagaaatccaattggatacgacaacttgcacgtattttaatagcgtcataactagaactgaattttgtctttatgatttttaaagaaaagttttgtaaatttctctactgtctcagtttacattttgtatatttgtatttaaatgaaagtgagactttgagggtgtatattttctgtgcagccactgttaagccatgtgttccaaggcattttagcggggagggggttatcaaaaaaaaaaaaatgtgactcaagacttccagagcctcaaatgagaaaatgtctttattaaatgtagaaagtgatccataaaaaaaaaaaaaaaaaa

SEQ ID NO: 477 - protein, 590 aa, Homosapiens
MELENIVANTVLLKAREGGGGKRKGKSKKWKEILKFPHISQCEDLRRTIDRDYCSLCDKQPIGRLLFRQFCETRPGLECYIQFLDSVAEYEVTPDEKLGEKGKEIMTKYLTPKSPVFIAQVGQDLVSQTEEKLLQKPCKELFSACAQSVHEYLRGEPFHEYLDSMFFDRFLQWKWLERQPVTKNTFRQYRVLGKGGFGEVCACQVRATGKMYACKRLEKKRIKKRKGESMALNEKQILEKVNSQFVVNLAYAYETKDALCLVLTIMNGGDLKFHIYNMGNPGFEEERALFYAAEILCGLEDLHRENTVYRDLKPENILLDDYGHIRISDLGLAVKIPEGDLIRGRVGTVGYMAPEVLNNQRYGLSPDYWGLGCLIYEMIEGQSPFRGRKEKVKREEVDRRVLETEEVYSHKFSEEAKSICKMLLTKDAKQRLGCQEEGAAEVKRHPFFRNMNFKRLEAGMLDPPFVPDPRAVYCKDVLDIEQFSTVKGVNLDHTDDDFYSKFSTGSVSIPWQNEMIETECFKELNVFGPNGTLPPDLNRNHPPEPPKKGLLQRLFKRQHQNNSKSSPSSKTSFNHHINSNHVSSNSTGSS

SEQ ID NO: 478 - DNA, 910 bp, Homosapiens
ctcctcgccttcctccggctcagccgccgcgccgccgggctgctccttcttcctcctcgggcgcccgcggcgatgttcaaccgcgccgtgagccggctgagcaggaagcggccgccgtcagacatccacgacagcgatggcagttccagcagcagccaccagagcctcaagagcacagccaaatgggcggcatccctggagaatctgctggaagacccagaaggcgtgaaaagatttagggaatttttaaaaaaggaattcagtgaagaaaatgttttgttttggctagcatgtgaagattttaagaaaatgcaagataagacgcagatgcaggaaaaggcaaaggagatctacatgacctttctgtccagcaaggcctcatcacaggtcaacgtggaggggcagtctcggctcaacgagaagatcctggaagaaccgcaccctctgatgttccagaaactccaggaccagatctttaatctcatgaagtacgacagctacagccgcttcttaaagtctgacttgtttttaaaacacaagcgaaccgaggaagaggaagaagatttgcctgatgctcaaactgcagctaaaagagcttccagaatttataacacatgagcccccaaaaagccgggactggcagctttaagaagcaaaggaatttcctctcaggaccgtgccgggtttatcattgctttgttatttgtaaggactgaaatgtacaaaacccttcaatgggatgtgtgttttattaactgcttcaccagtaaattttgcatgatggctaagctaacataaaaaaagaataataataacttggaagttttagtttacaaaacagagattccttcaacactggacacgtcgagcattttgtagcttaattaaacctcatgtaaggccaaaaaaa

SEQ ID NO: 479 - protein, 181 aa, Homosapiens
MFNRAVSRLSRKRPPSDIHDSDGSSSSSHQSLKSTAKWAASLENLLEDPEGVKRFREFLKKEFSEENVLFWLACEDFKKMQDKTQMQEKAKEIYMTFLSSKASSQVNVEGQSRLNEKILEEPHPLMFQKLQDQIFNLMKYDSYSRFLKSDLFLKHKRTEEEEEDLPDAQTAAKRASRIYNT

SEQ ID NO: 480 - DNA, 859 bp, Homosapiens
ggcgtctctgggaaggcagtggattgttggtctgcgtggaacttctcaggtggacaccagagcatggaacacatccacgacagcgatggcagttccagcagcagccaccagagcctcaagagcacagccaaatgggcggcatccctggagaatctgctggaagacccagaaggcgtgaaaagatttagggaatttttaaaaaaggaattcagtgaagaaaatgttttgttttggctagcatgtgaagattttaagaaaatgcaagataagacgcagatgcaggaaaaggcaaaggagatctacatgacctttctgtccagcaaggcctcatcacaggtcaacgtggaggggcagtctcggctcaacgagaagatcctggaagaaccgcaccctctgatgttccagaaactccaggaccagatctttaatctcatgaagtacgacagctacagccgcttcttaaagtctgacttgtttttaaaacacaagcgaaccgaggaagaggaagaagatttgcctgatgctcaaactgcagctaaaagagcttccagaatttataacacatgagcccccaaaaagccgggactggcagctttaagaagcaaaggaatttcctctcaggaccgtgccgggtttatcattgctttgttatttgtaaggactgaaatgtacaaaacccttcaatgggatgtgtgttttattaactgcttcaccagtaaattttgcatgatggctaagctaacataaaaaaagaataataataacttggaagttttagtttacaaaacagagattccttcaacactggacacgtcgagcattttgtagcttaattaaacctcatgtaaggccaaaaaaa

SEQ ID NO: 481 - protein, 167 aa, Homosapiens
MEHIHDSDGSSSSSHQSLKSTAKWAASLENLLEDPEGVKRFREFLKKEFSEENVLFWLACEDFKKMQDKTQMQEKAKEIYMTFLSSKASSQVNVEGQSRLNEKILEEPHPLMFQKLQDQIFNLMKYDSYSRFLKSDLFLKHKRTEEEEEDLPDAQTAAKRASRIYNT

SEQ ID NO: 482 - DNA, 3945 bp, Homosapiens
tcttcacgtcccagcgcgggtgggcgccggcggctcctcttaaccacaggttccagaagtcctctgcagaagtgcttccctctctcatttccaggaccacaattcccagagacttcggcttcacgacgtttctctttttgcccgatctctcccggagctggctgggcttcggccggccagaggcccacagcgacgacgtgatccgtcgtgagcgggtcccagggtttcctcggcggcccttttttctctcccctcggtcgtcccccttgcaggctgtcgcggctggcctgagcggtgacctggcgggtcgcgcctgcgctctgccctgtttcctgcctggctggtggcggcggccattttgttcatcctcctcctcctcctgctcctcctggttggagcgcagtgtccggagcgggctggggggagagagcccgagagcagggttcggtgccttttcctctgtccccagccggtgcccagagcccccctccccttcctccccaccccctcccctccccaaccctgccctcccccttgtcccgggatcgctccgtcgcacccaccatgatggaagacgacgggcagccccggactctatacgtaggtaacctttccagagatgtgacagaagtccttatacttcagttgttcagtcagattggaccctgtaaaagctgtaaaatgataacagagcaacccgatagcagaagggtcaactcttctgttggattttctgttttgcagcatacaagcaatgacccatattgctttgtggaattttatgaacacagagatgcagctgctgcattagctgctatgaatgggagaaaaattttgggaaaggaggtcaaagtaaactgggcaaccacaccaagtagccagaaaaaagatacttccaatcacttccatgtgtttgttggggatttgagtccagaaattacaacagaagatatcaaatcagcatttgccccctttggtaaaatatcggatgcccgggtagttaaagacatggcaactggaaaatccaaaggctatggttttgtatctttttataacaaactggatgcagaaaatgcgattgtgcatatgggcggtcagtggttgggtggtcgtcaaatccgaaccaattgggccactcgtaaaccacctgcacctaaaagtacacaagaaaacaacactaagcagttgagatttgaagatgtagtaaaccagtcaagtccaaaaaattgtactgtgtactgtggaggaattgcgtctgggttaacagatcagcttatgagacagacattctcaccatttggacaaattatggaaataagagttttcccagaaaagggctattcatttgtcagattttcaacccatgaaagtgcagcccatgccattgtttcggtgaacggtactacgattgaaggacatgtggttaaatgctattggggtaaagaatctcctgatatgactaaaaacttccaacaggttgactatagtcaatggggccaatggagccaagtgtatggaaacccacaacagtatggacagtatatggcaaatgggtggcaagtaccgccttatggagtatacgggcaaccatggaatcaacaaggatttggagtagatcaatcaccttctgctgcttggatgggtggatttggtgctcagcctccccaaggacaagctcctccccctgtaatacctcctcctaaccaagccggatatggtatggcaagttaccaaacacagtgagccgggactctaaaaaaaaattgtaattcatgataggcttcgatttcctgtgacactctgaagacatgaaagtagacatcggaaaatgaaaatatttattttaaaaattgaaatgtttggaacctttagcacagatttgctttggtgaaggacacgtgtcttctagttctgcctttttaagtttttgttcatgatggatatgaacatgatttttctttatgtacaaaaactaaaataaagtcaataaagacaattctgactacaaattttgatataataggaaaaatggctaatacattttgattcttagatactattccatttttatcttgctgttcagtattttaactcactgtgtttttaaaagagcaaaaaagggaggatcgtgaaaacctgggaatcacatataagttcatcctgaatcctgatactcccctccccttccctgaggtggaccacatttgaagtcagcagagaaaaagtgtgatattcagaagaaatgcgtgattttggagtcgctttggaggaaatattttctttctctatgcctaaagaaactgaagccagactgaagttttgcaccctaaaaaaggaacagcattgtttgagttacttgagcaaatgttggtggtccacgttaagacatatttttaaaacttccaaaagtgtcgattattaaaattgtagtattttacatttcattttggggggaaatccaagtatggtgtttgtattgaagtcagacagtcatacttgtgcttttacatgaagtttaaatgatacatattgtaaatattcaataactacagtgtttaaaaagcatgcttcaacatagaagtagcagcaatgtaattatttgaagtaacacttaacacactccgctgcattgaatgcagtggattgatcagaatgttaagactgacatttccaaggttggctactatgtaaaattaaaattacacaaattgtgcagaaaaagccttaattttaatttcatacaatctttgatgcattagtatgttctaaaatgtcattgggaattagttttttgtttttgtttttttttttttttttttttgctttacattacttggtatgtaaataccttgattaaaaccttgtaaaccaatttcaaggttactataagttgtatagtacaagtgttttttaaaaatcttggggtgtttttaaaaattaagatatattttgcccaagaatttttttaacaagattgctaaaaacatcttatttagacacttcaatgtaccaatttataattggatattcagtttaaatagtacacagagttgtggcttttattttcaattaatttttttccttgtgggcagtgtgcatggtataataagcctgagcagaggcttaagttgtatgtgtgcagagtttgtaaaggaatcaattggaagatgcagaagaccgaggtttgctttcaaggtatttttcaggctgtgtgggtaaaatttgcctcaaatttctatcaaacaggaatgtaaaatagataaaatcctatgtatttgaattgtcagagctagggagtgcaaatgttttggcaatgtattcaaaatgctggcctgggcaccaaagagaaaatagccttttacagttacatagtaagatgcgattagtacccacaaattactgttttctaaacatttgaagttttacgattagctttaaaataatgattttataaattggtggtcacaataattttggtattactttcctccttttcccacttagcaatatagccaaatgtattcaacataaaaattcatagggtctgaaattcatagctgggccaaattttttatggcaccttagttttaccataatggtcatctattacactcttctgttataaaatatacccttatttcttttgtttatagtatctttgaggaatgtttttggaaaagttaatttatattttatagggagaacactcaataaattatgttaactgtgcccccgagttaaaaattttatgagtatatgtgaaacttgaacaactgaagactttttttaattgataaaaatgcttagtatgcctgttttggtctgccagtaaattaagtagcttattgagataactaacagctaaatatagctgtagtgtttcctgactgtatattctatgatttaataaaattatccagactagttatattgccacagtaaaaa

SEQ ID NO: 483 - protein, 392 aa, Homosapiens
MMEDDGQPRTLYVGNLSRDVTEVLILQLFSQIGPCKSCKMITEQPDSRRVNSSVGFSVLQHTSNDPYCFVEFYEHRDAAAALAAMNGRKILGKEVKVNWATTPSSQKKDTSNHFHVFVGDLSPEITTEDIKSAFAPFGKISDARVVKDMATGKSKGYGFVSFYNKLDAENAIVHMGGQWLGGRQIRTNWATRKPPAPKSTQENNTKQLRFEDVVNQSSPKNCTVYCGGIASGLTDQLMRQTFSPFGQIMEIRVFPEKGYSFVRFSTHESAAHAIVSVNGTTIEGHVVKCYWGKESPDMTKNFQQVDYSQWGQWSQVYGNPQQYGQYMANGWQVPPYGVYGQPWNQQGFGVDQSPSAAWMGGFGAQPPQGQAPPPVIPPPNQAGYGMASYQTQ

SEQ ID NO: 484 - DNA, 3894 bp, Homosapiens
tcttcacgtcccagcgcgggtgggcgccggcggctcctcttaaccacaggttccagaagtcctctgcagaagtgcttccctctctcatttccaggaccacaattcccagagacttcggcttcacgacgtttctctttttgcccgatctctcccggagctggctgggcttcggccggccagaggcccacagcgacgacgtgatccgtcgtgagcgggtcccagggtttcctcggcggcccttttttctctcccctcggtcgtcccccttgcaggctgtcgcggctggcctgagcggtgacctggcgggtcgcgcctgcgctctgccctgtttcctgcctggctggtggcggcggccattttgttcatcctcctcctcctcctgctcctcctggttggagcgcagtgtccggagcgggctggggggagagagcccgagagcagggttcggtgccttttcctctgtccccagccggtgcccagagcccccctccccttcctccccaccccctcccctccccaaccctgccctcccccttgtcccgggatcgctccgtcgcacccaccatgatggaagacgacgggcagccccggactctatacgtaggtaacctttccagagatgtgacagaagtccttatacttcagttgttcagtcagattggaccctgtaaaagctgtaaaatgataacagagcatacaagcaatgacccatattgctttgtggaattttatgaacacagagatgcagctgctgcattagctgctatgaatgggagaaaaattttgggaaaggaggtcaaagtaaactgggcaaccacaccaagtagccagaaaaaagatacttccaatcacttccatgtgtttgttggggatttgagtccagaaattacaacagaagatatcaaatcagcatttgccccctttggtaaaatatcggatgcccgggtagttaaagacatggcaactggaaaatccaaaggctatggttttgtatctttttataacaaactggatgcagaaaatgcgattgtgcatatgggcggtcagtggttgggtggtcgtcaaatccgaaccaattgggccactcgtaaaccacctgcacctaaaagtacacaagaaaacaacactaagcagttgagatttgaagatgtagtaaaccagtcaagtccaaaaaattgtactgtgtactgtggaggaattgcgtctgggttaacagatcagcttatgagacagacattctcaccatttggacaaattatggaaataagagttttcccagaaaagggctattcatttgtcagattttcaacccatgaaagtgcagcccatgccattgtttcggtgaacggtactacgattgaaggacatgtggttaaatgctattggggtaaagaatctcctgatatgactaaaaacttccaacaggttgactatagtcaatggggccaatggagccaagtgtatggaaacccacaacagtatggacagtatatggcaaatgggtggcaagtaccgccttatggagtatacgggcaaccatggaatcaacaaggatttggagtagatcaatcaccttctgctgcttggatgggtggatttggtgctcagcctccccaaggacaagctcctccccctgtaatacctcctcctaaccaagccggatatggtatggcaagttaccaaacacagtgagccgggactctaaaaaaaaattgtaattcatgataggcttcgatttcctgtgacactctgaagacatgaaagtagacatcggaaaatgaaaatatttattttaaaaattgaaatgtttggaacctttagcacagatttgctttggtgaaggacacgtgtcttctagttctgcctttttaagtttttgttcatgatggatatgaacatgatttttctttatgtacaaaaactaaaataaagtcaataaagacaattctgactacaaattttgatataataggaaaaatggctaatacattttgattcttagatactattccatttttatcttgctgttcagtattttaactcactgtgtttttaaaagagcaaaaaagggaggatcgtgaaaacctgggaatcacatataagttcatcctgaatcctgatactcccctccccttccctgaggtggaccacatttgaagtcagcagagaaaaagtgtgatattcagaagaaatgcgtgattttggagtcgctttggaggaaatattttctttctctatgcctaaagaaactgaagccagactgaagttttgcaccctaaaaaaggaacagcattgtttgagttacttgagcaaatgttggtggtccacgttaagacatatttttaaaacttccaaaagtgtcgattattaaaattgtagtattttacatttcattttggggggaaatccaagtatggtgtttgtattgaagtcagacagtcatacttgtgcttttacatgaagtttaaatgatacatattgtaaatattcaataactacagtgtttaaaaagcatgcttcaacatagaagtagcagcaatgtaattatttgaagtaacacttaacacactccgctgcattgaatgcagtggattgatcagaatgttaagactgacatttccaaggttggctactatgtaaaattaaaattacacaaattgtgcagaaaaagccttaattttaatttcatacaatctttgatgcattagtatgttctaaaatgtcattgggaattagttttttgtttttgtttttttttttttttttttttgctttacattacttggtatgtaaataccttgattaaaaccttgtaaaccaatttcaaggttactataagttgtatagtacaagtgttttttaaaaatcttggggtgtttttaaaaattaagatatattttgcccaagaatttttttaacaagattgctaaaaacatcttatttagacacttcaatgtaccaatttataattggatattcagtttaaatagtacacagagttgtggcttttattttcaattaatttttttccttgtgggcagtgtgcatggtataataagcctgagcagaggcttaagttgtatgtgtgcagagtttgtaaaggaatcaattggaagatgcagaagaccgaggtttgctttcaaggtatttttcaggctgtgtgggtaaaatttgcctcaaatttctatcaaacaggaatgtaaaatagataaaatcctatgtatttgaattgtcagagctagggagtgcaaatgttttggcaatgtattcaaaatgctggcctgggcaccaaagagaaaatagccttttacagttacatagtaagatgcgattagtacccacaaattactgttttctaaacatttgaagttttacgattagctttaaaataatgattttataaattggtggtcacaataattttggtattactttcctccttttcccacttagcaatatagccaaatgtattcaacataaaaattcatagggtctgaaattcatagctgggccaaattttttatggcaccttagttttaccataatggtcatctattacactcttctgttataaaatatacccttatttcttttgtttatagtatctttgaggaatgtttttggaaaagttaatttatattttatagggagaacactcaataaattatgttaactgtgcccccgagttaaaaattttatgagtatatgtgaaacttgaacaactgaagactttttttaattgataaaaatgcttagtatgcctgttttggtctgccagtaaattaagtagcttattgagataactaacagctaaatatagctgtagtgtttcctgactgtatattctatgatttaataaaattatccagactagttatattgccacagtaaaaa

SEQ ID NO: 485 - protein, 375 aa, Homosapiens
MMEDDGQPRTLYVGNLSRDVTEVLILQLFSQIGPCKSCKMITEHTSNDPYCFVEFYEHRDAAAALAAMNGRKILGKEVKVNWATTPSSQKKDTSNHFHVFVGDLSPEITTEDIKSAFAPFGKISDARVVKDMATGKSKGYGFVSFYNKLDAENAIVHMGGQWLGGRQIRTNWATRKPPAPKSTQENNTKQLRFEDVVNQSSPKNCTVYCGGIASGLTDQLMRQTFSPFGQIMEIRVFPEKGYSFVRFSTHESAAHAIVSVNGTTIEGHVVKCYWGKESPDMTKNFQQVDYSQWGQWSQVYGNPQQYGQYMANGWQVPPYGVYGQPWNQQGFGVDQSPSAAWMGGFGAQPPQGQAPPPVIPPPNQAGYGMASYQTQ

SEQ ID NO: 486 - DNA, 1164 bp, Homosapiens
atgacgaatgatatctttgagttcacttatgctcttgagttttctggcatcatgaaatatgtaagagtggctgatttaagtaaaacaagttcatactttttttattctcttgaggaatgcccatggggcattcttgttgagagtttcgtcaaatatcaaccagcgtttttgaatttcagaacttacatcccagtaagatgcgcccttgaaagaaagccttcctcatttgaacaaaatgtaatacagaataatactgataaatctaagaaaatagtccaaactcagtattatcaagcaggaaattggggtatcgaggaatgttacttaggtgaactaaaacagcctcagacagcttcttccgcaggtattccagaagaagacattgttatcacaggagatgacaactccttgtgtgttattgcccacgaagaccttccagtgggacaatatgtggagagggaagacgcaataactgcaatgtgctctgatgattggttgttagtcagaatgaaaataaggccttttgataagaacacagacattagaattggcgacatacacctgagagataactgtcctgtaacaagactgttgtcatttaactacgcgttttcttatcctgtcacttcttgtgggatcaagaaaattatgttccaaacaaatgatgacgccatattatcagagatcagttacaaaccaaggttgcatactacctatgaatttccagtggtttgctttgtgaagaggcttaaattcccctctgtgatgcattttggaatgagtgggtttgatgcccacaccttgaaagaaatccctcaaaaaacaaaaggacaagagtcaccaactcccacacaaagtaaaacatggacacttaattttaacagtgttaataaggagcaactatccaagaagtcactgtatcaataatgcctgtgttataacaccctctcctccctaaagcaagggaacaagtgatacatcttgtctgaaaaccagtttcatcaatactgttgatgtgtctgtacaaagatgagtagcaacatctgttaccagtttcactacattttggagttttgaataacatatctataccatgatatttatactttttaatgagttaattttaagtgaaattgccattctaactctgaaatcaagctcata

SEQ ID NO: 487 - protein, 308 aa, Homosapiens
MTNDIFEFTYALEFSGIMKYVRVADLSKTSSYFFYSLEECPWGILVESFVKYQPAFLNFRTYIPVRCALERKPSSFEQNVIQNNTDKSKKIVQTQYYQAGNWGIEECYLGELKQPQTASSAGIPEEDIVITGDDNSLCVIAHEDLPVGQYVEREDAITAMCSDDWLLVRMKIRPFDKNTDIRIGDIHLRDNCPVTRLLSFNYAFSYPVTSCGIKKIMFQTNDDAILSEISYKPRLHTTYEFPVVCFVKRLKFPSVMHFGMSGFDAHTLKEIPQKTKGQESPTPTQSKTWTLNFNSVNKEQLSKKSLYQ

SEQ ID NO: 488 - DNA, 1646 bp, Homosapiens
aatcgagagagtctcagcctttaggtagctgacactgtgataagagcatcctgtgaactacccaaataaggaggaaaacgaacgcagctgagcatgggatgccatataaaaatcacttaaaccagtcgccactccttgtttcctgagttgccctgtgctggaggtctgctcagacgaaggtctccatggcgttagaagtcttgatgctcctcgctgtcttgatttggaccggtgctgagaacctccatgtgaaaataagttgctctctggactggttgatggtctcagttatcccagttgcagaaagcagaaatctgtatatatttgcggatgaattacatctgggaatgggctgccctgcaaatcggatacatacatatgtatatgagtttatatatcttgttcgtgattgtggcatcaggacaagggtagtttctgaggaaactctcctttttcaaaccgagctgtactttaccccaaggaatatagatcatgaccctcaggaaatccatttggagtgttccacctctaggaaatcagtgtggcttacaccagtttctactgagaatgaaataaaattggatcctagtccttttattgctgactttcagacaacagcagaagagttaggattattatcttctagtccaaacttgctctgagctaaaggagaaatggaaacttgaagctggtgttatgtattttgcaggaaaacagtttcattttttcatagcaaaaatatagttggtgtatatctctccttaagtctctggtttctaaaaaccctacttcagtaaaggtcctgattagttgattagtgaatgtgtatttctaaatatttgtattcagtaggggtatggctgattaatttaacattaactattaggtaattcatattatacatttaagttctttctgttctgtgtagaagattcagaaatatgtcttcaaagacaatgacttgatctaattgataagaacctccaataaatatgttctaatatttttcaggaagaataaagaatagagagagacatataaatgtgcaagaggcaaaactttgagcatagtgtaaaatttaacatattaactctcacgaaaggcaaaatccttttatgtgcagatactttaattcatgtagattttcctattaatcagtaaagttgaatcctaacaataatgccatgtgacaacctatttagattattccagaattaaattcaatttattttctagagctcaagtaaccactaccttaactgaaatttgatgttaggtttcccttgttcctccgaatggttcttccacactcaaaataattgaatggttgagttggttaagcaaagagttatcctgccacctaagagcattcattaaatgattatttattaccacctactttatactatcttcctttctttaaacatggagtctaaatatgtaatatatcaaaaaatacttctgatttggtagatttcttatatcaagggtgagaattgaactgtgccattggctattcaatagcttattgaatgtatgttttggatgccacatcctcctggaagcaaattttgccaagatactgtttattattatttttaattaaagtgatactattccattttcaattaaaaaaaaaaaaaaaa

SEQ ID NO: 489 - protein, 158 aa, Homosapiens
MALEVLMLLAVLIWTGAENLHVKISCSLDWLMVSVIPVAESRNLYIFADELHLGMGCPANRIHTYVYEFIYLVRDCGIRTRVVSEETLLFQTELYFTPRNIDHDPQEIHLECSTSRKSVWLTPVSTENEIKLDPSPFIADFQTTAEELGLLSSSPNLL

SEQ ID NO: 490 - DNA, 1356 bp, Homosapiens
ggaggcttccgttatcgggaaaagatgctgtagtgatcttttctgagtgtctcctacttgcgacaaggtggacttgggaggaaagccgtctgccaaagcctgaagcctccaagttctgtagttcaggaaccttgtctgttgtagcagggataaaacccacaagaacatggatacagaacagttttggaatgaacattgccagtgctacaattgcactagtggggactgcttttctctcactaaatatagcagttaatatccagtcattaaggagttgtcactcttcatcagagtcaccggacctatgcaattacatgggctccatatcaaatggcatggtgtctctactgctgattctcaccttgctggaattatgcgtaaccatctctaccatagccatgtggtgcaatgcaaactgctgtaattcaagagaggaaatttcctcacctcccaattctgtgtaatcaagaatacctccttaattctgagagcatgaatatttgaccttaaatctccagtgactcagagcttcacccacaaactcaggagaacataagcctgctcgtaaagctcaatccttctatcatggcaccaatcacaagaaccttggacgtttgactgactctatcctttctctcctaactataaatcctatttgtgtgtcgtgggtatggaaggacagatatatttctttaggcattcttggatatctgtaacttctatgatcattactccaaagttgtttccagaaattggttctatttcttcttatccacctactccattgctttatgaggtttaaggaaggaaggcggtataatccctattcaatatattttttctaaaatccaacttctgaccgcccagtaggaagaaaaatgagacattttttccattacagagaaatgcttcttgactttaacatcagcattataaaaagtgtcaaataaaaaattaccatcattatcattaaaataaattttcactgtatttgagatgggagggttaaggctcagggattttatttcagtgaactgctggaactcacacatgccctgatatgtaaatgatgatttatgttggcgagtctgagagcaagcccaaatgtgttcttcaaaggacaatgggaaactgtaaagtagagaactaaagaataaggcctttagaatctgacacatctgggttcaaattctgaaactgtcacttattacctgtatgaacatgggcaaattatctaatctctctgatctatttttcctcatctgtaaaataggtgtaataataacaactactttgtcggttgctctgagggttaaatgaaaataaaaagaaaatgtgaaacagcaaaaaaaaaaa

SEQ ID NO: 491 - protein, 91 aa, Homosapiens
MNIASATIALVGTAFLSLNIAVNIQSLRSCHSSSESPDLCNYMGSISNGMVSLLLILTLLELCVTISTIAMWCNANCCNSREEISSPPNSV

SEQ ID NO: 492 - DNA, 1527 bp, Homosapiens
ggaggcttccgttatcgggaaaagatgctgtagtgatcttttctgagtgtctcctacttgcgacaaggtggacttgggaggaaagccgtctgccaaagcctgaagcctccaagccataaacaaccccaatggcctcccacgaagttgataatgcagagctggggtcagcctctgcccatggtaccccaggcagtgaggcgggaccagaagagctgaatacttctgtctaccagcccatagatggatcaccagattatcagaaagcaaaattacaagttcttgggttctgtagttcaggaaccttgtctgttgtagcagggataaaacccacaagaacatggatacagaacagttttggaatgaacattgccagtgctacaattgcactagtggggactgcttttctctcactaaatatagcagttaatatccagtcattaaggagttgtcactcttcatcagagtcaccggacctatgcaattacatgggctccatatcaaatggcatggtgtctctactgctgattctcaccttgctggaattatgcgtaaccatctctaccatagccatgtggtgcaatgcaaactgctgtaattcaagagaggaaatttcctcacctcccaattctgtgtaatcaagaatacctccttaattctgagagcatgaatatttgaccttaaatctccagtgactcagagcttcacccacaaactcaggagaacataagcctgctcgtaaagctcaatccttctatcatggcaccaatcacaagaaccttggacgtttgactgactctatcctttctctcctaactataaatcctatttgtgtgtcgtgggtatggaaggacagatatatttctttaggcattcttggatatctgtaacttctatgatcattactccaaagttgtttccagaaattggttctatttcttcttatccacctactccattgctttatgaggtttaaggaaggaaggcggtataatccctattcaatatattttttctaaaatccaacttctgaccgcccagtaggaagaaaaatgagacattttttccattacagagaaatgcttcttgactttaacatcagcattataaaaagtgtcaaataaaaaattaccatcattatcattaaaataaattttcactgtatttgagatgggagggttaaggctcagggattttatttcagtgaactgctggaactcacacatgccctgatatgtaaatgatgatttatgttggcgagtctgagagcaagcccaaatgtgttcttcaaaggacaatgggaaactgtaaagtagagaactaaagaataaggcctttagaatctgacacatctgggttcaaattctgaaactgtcacttattacctgtatgaacatgggcaaattatctaatctctctgatctatttttcctcatctgtaaaataggtgtaataataacaactactttgtcggttgctctgagggttaaatgaaaataaaaagaaaatgtgaaacagcaaaaaaaaaaa

SEQ ID NO: 493 - protein, 168 aa, Homosapiens
MASHEVDNAELGSASAHGTPGSEAGPEELNTSVYQPIDGSPDYQKAKLQVLGFCSSGTLSVVAGIKPTRTWIQNSFGMNIASATIALVGTAFLSLNIAVNIQSLRSCHSSSESPDLCNYMGSISNGMVSLLLILTLLELCVTISTIAMWCNANCCNSREEISSPPNSV

SEQ ID NO: 494 - DNA, 1665 bp, Homosapiens
ggaggcttccgttatcgggaaaagatgctgtagtgatcttttctgagtgtctcctacttgcgacaaggtggacttgggaggaaagccgtctgccaaagcctgaagcctccaagccataaacaaccccaatggcctcccacgaagttgataatgcagagctggggtcagcctctgcccatggtaccccaggcagtgaggcgggaccagaagagctgaatacttctgtctaccagcccatagatggatcaccagattatcagaaagcaaaattacaagttcttggggccatccagatcctgaatgcagcaatgattctggctttgggtgtctttctgggttccttgcaatacccataccacttccaaaagcacttctttttcttcaccttctacacaggctacccgatttggggtgctgtgtttttctgtagttcaggaaccttgtctgttgtagcagggataaaacccacaagaacatggatacagaacagttttggaatgaacattgccagtgctacaattgcactagtggggactgcttttctctcactaaatatagcagttaatatccagtcattaaggagttgtcactcttcatcagagtcaccggacctatgcaattacatgggctccatatcaaatggcatggtgtctctactgctgattctcaccttgctggaattatgcgtaaccatctctaccatagccatgtggtgcaatgcaaactgctgtaattcaagagaggaaatttcctcacctcccaattctgtgtaatcaagaatacctccttaattctgagagcatgaatatttgaccttaaatctccagtgactcagagcttcacccacaaactcaggagaacataagcctgctcgtaaagctcaatccttctatcatggcaccaatcacaagaaccttggacgtttgactgactctatcctttctctcctaactataaatcctatttgtgtgtcgtgggtatggaaggacagatatatttctttaggcattcttggatatctgtaacttctatgatcattactccaaagttgtttccagaaattggttctatttcttcttatccacctactccattgctttatgaggtttaaggaaggaaggcggtataatccctattcaatatattttttctaaaatccaacttctgaccgcccagtaggaagaaaaatgagacattttttccattacagagaaatgcttcttgactttaacatcagcattataaaaagtgtcaaataaaaaattaccatcattatcattaaaataaattttcactgtatttgagatgggagggttaaggctcagggattttatttcagtgaactgctggaactcacacatgccctgatatgtaaatgatgatttatgttggcgagtctgagagcaagcccaaatgtgttcttcaaaggacaatgggaaactgtaaagtagagaactaaagaataaggcctttagaatctgacacatctgggttcaaattctgaaactgtcacttattacctgtatgaacatgggcaaattatctaatctctctgatctatttttcctcatctgtaaaataggtgtaataataacaactactttgtcggttgctctgagggttaaatgaaaataaaaagaaaatgtgaaacagcaaaaaaaaaaa

SEQ ID NO: 495 - protein, 214 aa, Homosapiens
MASHEVDNAELGSASAHGTPGSEAGPEELNTSVYQPIDGSPDYQKAKLQVLGAIQILNAAMILALGVFLGSLQYPYHFQKHFFFFTFYTGYPIWGAVFFCSSGTLSVVAGIKPTRTWIQNSFGMNIASATIALVGTAFLSLNIAVNIQSLRSCHSSSESPDLCNYMGSISNGMVSLLLILTLLELCVTISTIAMWCNANCCNSREEISSPPNSV

SEQ ID NO: 496 - DNA, 3723 bp, Homosapiens
aacccatttcaactgcctattcagagcatgcagtaagaggaaatccaccaagtctcaatataataatattctttattcctggacagctcggttaatgaaaaaatggacacagaaagtaataggagagcaaatcttgctctcccacaggagccttccagtgtgcctgcatttgaagtcttggaaatatctccccaggaagtatcttcaggcagactattgaagtcggcctcatccccaccactgcatacatggctgacagttttgaaaaaagagcaggagttcctgggggtaacacaaattctgactgctatgatatgcctttgttttggaacagttgtctgctctgtacttgatatttcacacattgagggagacattttttcatcatttaaagcaggttatccattctggggagccatatttttttctatttctggaatgttgtcaattatatctgaaaggagaaatgcaacatatctggtgagaggaagcctgggagcaaacactgccagcagcatagctgggggaacgggaattaccatcctgatcatcaacctgaagaagagcttggcctatatccacatccacagttgccagaaattttttgagaccaagtgctttatggcttccttttccactgaaattgtagtgatgatgctgtttctcaccattctgggacttggtagtgctgtgtcactcacaatctgtggagctggggaagaactcaaaggaaacaaggttccagaggatcgtgtttatgaagaattaaacatatattcagctacttacagtgagttggaagacccaggggaaatgtctcctcccattgatttataagaatcacgtgtccagaacactctgattcacagccaaggatccagaaggccaaggtcttgttaaggggctactggaaaaatttctattctctccacagcctgctggttttacattagatttattcgcctgataagaatattttgtttctgctgcttctgtccaccttaatattctccttctatttgtagatatgatagactcctatttttcttgttttatattatgaccacacacatctctgctggaaagtcaacatgtagtaagcaagatttaactgtttgattataactgtgcaaatacagaaaaaaagaaggctggctgaaagttgagttaaactttgacagtttgataatatttggttcttagggttttttttttttttagcattcttaatagttacagttgggcatgatttgtaccatccacccatacccacacagtcacagtcacacacacatatgtattacttacactatatataacttcctatgcaaatattttaccaccagtcaataatacatttttgccaagacatgaagttttataaagatctgtataattgcctgaatcaccagcacattcactgacatgatattatttgcagattgacaagtaggaagtggggaattttattaagttactcgttgtctggggaggtaaataggttaaaaacagggaaattataagtgcagagattaacatttcacaaatgtttagtgaaacatttgtgaaaaaagaagactaaattaagacctgagctgaaataaagtgagtggaaatggaaataatggttatatctaaaacatgtagaaaaagagtaactggtagattttgttaacaaattaaagaataaagttagacaagcaactggttgactaatacattaagcgtttgagtctaagatgaaaggagaacactggttatgttgatagaatgataaaaagggtcgggcgcggaggctcacgcctgtaatcccagccctttgggaggccgaggtgggcagatcacgaagtcagtagtttgagaccagcctggccaacatagtgaaaccccgtctctactaaaaatacaaaaaaaaaattagctgggtgtggtggcagtcacctgtagtcccagctacttgggaggatgaggcaggagaatcgcttgaacctgggaggcggaggttgcagtgagccgagatcgcaccagtgcactccagccttggtgacaatgggagactccatctcaaaaaaaaaaaaaaaaaaaaaaagataaaaagtcagaaatctgaaaagtggaggaagagtacaaatagacctaaattaagctcatttttaggctttgattttggggagacaaagggaaatgcagccatagagggcctgatgacatccaatacagagttctggtaaagataaaatttgatacaggtttggtgtcattataagagaaatcattattaaatgaagcaagttaacactctaagagaattattttgagatagaagtgaagctaagctaaacttcacatgcctataattggagggaaaaactaaggataaaatctagcctagaagatacaataattagtcataaacatgcattgtgaaactgtagagagcaggtagcccaaaatagagaaagattagataaagagaaaataagtatccatcagagacagtatctctaggcttgggcaagagaaaagtccacagtgataagcaactccacctaaggcatgaatatgcggcagagaaaacagcaatagtgaatgaatgcaaaaggtgctgagaaattccacacatgagtattgtgatgagtaaatgaataaaacatttgcaaagacctttagagaaagagaatgggagcatatgtgagaaataagatagttgattatgaatagaaggtagtgaagaaaagcaagctaagaaaaaattctgtttataaaagaaggaaaagatagtttatgtttttagcctaagtataagagtcctacagatggactgaaaaaaatcagtctgagagtattagtcacaattaatgaaataattacattttatgtattgaggatgccaagattaaaaggtgacaggtagatgttaatttccctagattgtgaaagtgatcacgacaatcacacaacaaataattaagtgacttggtatgctttatttaattgtagggcctgaggttttccattctcatttttctaaaatacaattttgtttctccaaatttgacagcagaataaaaaccctaccctttcactgtgtatcatgctaagctgcatctctactcttgatcatctgtaggtattaatcacatcacttccatggcatggatgttcacatacagactcttaaccctggtttaccaggacctctaggagtggatccaatctatatctttacagttgtatagtatatgatatctcttttatttcactcaatttatattttcatcattgactacatatttcttatacacaacacacaatttatgaattttttctcaagatcattctgagagttgccccaccctacctgccttttatagtatgcccacctcaggcagacacagagcacaatgctggggttctcttcacactatcactgccccaaattgtctttctaaatttcaacttcaatgtcatcttctccatgaagaccactgaatgaacaccttttcatccagccttaatttcttgctccataactactctatcccacgatgcagtattgtatcattaattattagtgtgcttgtgacctccttatgtattctcaattacctgtatttgtgcaataaattggaataatgtaacttgatttcttatctgtgtttgtgttggcatgcaagatttaggtacttatcaaagataatggggaattaaggcatcaataaa

SEQ ID NO: 497 - protein, 244 aa, Homosapiens
MDTESNRRANLALPQEPSSVPAFEVLEISPQEVSSGRLLKSASSPPLHTWLTVLKKEQEFLGVTQILTAMICLCFGTVVCSVLDISHIEGDIFSSFKAGYPFWGAIFFSISGMLSIISERRNATYLVRGSLGANTASSIAGGTGITILIINLKKSLAYIHIHSCQKFFETKCFMASFSTEIVVMMLFLTILGLGSAVSLTICGAGEELKGNKVPEDRVYEELNIYSATYSELEDPGEMSPPIDL

SEQ ID NO: 498 - DNA, 1432 bp, Homosapiens
ttttactgaagttgctagaagtttacagaaaaggaagtgcaggaacatttcacaaatctacaatctgtgagtatcacatcctgtatagctgtaaacactggaataaggaagggctgatgactttcagaagatgaaggtaagtagaaaccgttgatgggactgagaaaccagagttaaaacctctttggagcttctgaggactcagctggaaccaacgggcacagttggcaacaccatcatgacatcacaacctgttcccaatgagaccatcatagtgctcccatcaaatgtcatcaacttctcccaagcagagaaacccgaacccaccaaccaggggcaggatagcctgaagaaacatctacacgcagaaatcaaagttattgggactatccagatcttgtgtggcatgatggtattgagcttggggatcattttggcatctgcttccttctctccaaattttacccaagtgacttctacactgttgaactctgcttacccattcataggaccctttttttttatcatctctggctctctatcaatcgccacagagaaaaggttaaccaagcttttggtgcatagcagcctggttggaagcattctgagtgctctgtctgccctggtgggtttcattatcctgtctgtcaaacaggccaccttaaatcctgcctcactgcagtgtgagttggacaaaaataatataccaacaagaagttatgtttcttacttttatcatgattcactttataccacggactgctatacagccaaagccagtctggctggaactctctctctgatgctgatttgcactctgctggaattctgcctagctgtgctcactgctgtgctgcggtggaaacaggcttactctgacttccctggggtgagtgtgctggccggcttcacttaaccttgcctagtgtatcttatccctgcactgtgttgagtatgtcaccaagagtggtagaaggaacaaccagccaatcacgagatacacatgggagggcatttgcattgtgatggaagacagagaagaaaagcagatggcaattgagtagctgataagctgaaaattcactggatatgaaaatagttaatcatgagaaatcaactgattcaatcttcctattttgtcagcgaagggaatgagactctgggaagttaaatgactggcctggcattatgctatgagtttgtgcctttgctgaggacactagaacctggcttgcctcccttataagcagaaacaatttctgccacaaccactagtctctttaatagtattgacttggtaaagggcatttacacacgtaactggatccagtgaatgtcttatgctctgcatttgcccctggtgatcttaaaattcgtttgcctttttaaagctatattaaaaatgtattgttgaatcaaaaaaaaaaaaaaa

SEQ ID NO: 499 - protein, 225 aa, Homosapiens
MTSQPVPNETIIVLPSNVINFSQAEKPEPTNQGQDSLKKHLHAEIKVIGTIQILCGMMVLSLGIILASASFSPNFTQVTSTLLNSAYPFIGPFFFIISGSLSIATEKRLTKLLVHSSLVGSILSALSALVGFIILSVKQATLNPASLQCELDKNNIPTRSYVSYFYHDSLYTTDCYTAKASLAGTLSLMLICTLLEFCLAVLTAVLRWKQAYSDFPGVSVLAGFT

SEQ ID NO: 500 - DNA, 1460 bp, Homosapiens
ttttactgaagttgctagaagtttacagaaaaggaagtgcaggaacatttcacaaatctacaatctgtgagtatcacatcctgtatagctgtaaacactggaataaggaagggctgatgactttcagaagatgaaggtaagtagaaaccgttgatgggactgagaaaccagagttaaaacctctttggagcttctgaggactcagctggaaccaacgggcacagttggcaacaccatcatgacatcacaacctgttcccaatgagaccatcatagtgctcccatcaaatgtcatcaacttctcccaagcagagaaacccgaacccaccaaccaggggcaggatagcctgaagaaacatctacacgcagaaatcaaagttattgggactatccagatcttgtgtggcatgatggtattgagcttggggatcattttggcatctgcttccttctctccaaattttacccaagtgacttctacactgttgaactctgcttacccattcataggaccctttttttttatcatctctggctctctatcaatcgccacagagaaaaggttaaccaagcttttggtgcatagcagcctggttggaagcattctgagtgctctgtctgccctggtgggtttcattatcctgtctgtcaaacaggccaccttaaatcctgcctcactgcagtggaactctctctctgatgctgatttgcactctgctggaattctgcctagctgtgctcactgctgtgctgcggtggaaacaggcttactctgacttccctgggagtgtacttttcctgcctcacagttacattggtaattctggcatgtcctcaaaaatgactcatgactgtggatatgaagaactattgacttcttaagaaaaaagggagaaatattaatcagaaagttgattcttatgataatatggaaaagttaaccattatagaaaagcaaagcttgagtttcctaaatgtaagcttttaaagtaatgaacattaaaaaaaaccattatttcactgtcatttaagatatgtgttcattggggatctcttgatttgcctgacattgacttcagcaaaagcacggggctgtaaattaccatttactagattagccaaatagtctgaatttccagaaaacaaggcagaatgatcattcccagaaacatttcccagaaaatgtttcccagaaaactagacagcatgatcattcaatggatcacagtgaagcaaaggacacaactttttattgtaccccttaattgtcaacaggagttaactgatttgttgtggtgctcagacttttttatacaggtgctagtgttttatcctatgtattttaactcattagtgcataaaggcaagccccatataatgaagtctcagggtatatgaaagtagctggcttcaaaataaaatttttgagtgcaaaaaaaaaaaaaaaaaaaaaaaaaaaaa

SEQ ID NO: 501 - protein, 178 aa, Homosapiens
MTSQPVPNETIIVLPSNVINFSQAEKPEPTNQGQDSLKKHLHAEIKVIGTIQILCGMMVLSLGIILASASFSPNFTQVTSTLLNSAYPFIGPFFFIISGSLSIATEKRLTKLLVHSSLVGSILSALSALVGFIILSVKQATLNPASLQWNSLSDADLHSAGILPSCAHCCAAVETGLL

SEQ ID NO: 502 - DNA, 1564 bp, Homosapiens
ttttactgaagttgctagaagtttacagaaaaggaagtgcaggaacatttcacaaatctacaatctgtgagtatcacatcctgtatagctgtaaacactggaataaggaagggctgatgactttcagaagatgaaggtaagtagaaaccgttgatgggactgagaaaccagagttaaaacctctttggagcttctgaggactcagctggaaccaacgggcacagttggcaacaccatcatgacatcacaacctgttcccaatgagaccatcatagtgctcccatcaaatgtcatcaacttctcccaagcagagaaacccgaacccaccaaccaggggcaggatagcctgaagaaacatctacacgcagaaatcaaagttattgggactatccagatcttgtgtggcatgatggtattgagcttggggatcattttggcatctgcttccttctctccaaattttacccaagtgacttctacactgttgaactctgcttacccattcataggaccctttttttttatcatctctggctctctatcaatcgccacagagaaaaggttaaccaagcttttggtgcatagcagcctggttggaagcattctgagtgctctgtctgccctggtgggtttcattatcctgtctgtcaaacaggccaccttaaatcctgcctcactgcagtgtgagttggacaaaaataatataccaacaagaagttatgtttcttacttttatcatgattcactttataccacggactgctatacagccaaagccagtctggctggaactctctctctgatgctgatttgcactctgctggaattctgcctagctgtgctcactgctgtgctgcggtggaaacaggcttactctgacttccctgggagtgtacttttcctgcctcacagttacattggtaattctggcatgtcctcaaaaatgactcatgactgtggatatgaagaactattgacttcttaagaaaaaagggagaaatattaatcagaaagttgattcttatgataatatggaaaagttaaccattatagaaaagcaaagcttgagtttcctaaatgtaagcttttaaagtaatgaacattaaaaaaaaccattatttcactgtcatttaagatatgtgttcattggggatctcttgatttgcctgacattgacttcagcaaaagcacggggctgtaaattaccatttactagattagccaaatagtctgaatttccagaaaacaaggcagaatgatcattcccagaaacatttcccagaaaatgtttcccagaaaactagacagcatgatcattcaatggatcacagtgaagcaaaggacacaactttttattgtaccccttaattgtcaacaggagttaactgatttgttgtggtgctcagacttttttatacaggtgctagtgttttatcctatgtattttaactcattagtgcataaaggcaagccccatataatgaagtctcagggtatatgaaagtagctggcttcaaaataaaatttttgagtgcaaaaaaaaaaaaaaaaaaaaaaaaaaaaa

SEQ ID NO: 503 - protein, 248 aa, Homosapiens
MTSQPVPNETIIVLPSNVINFSQAEKPEPTNQGQDSLKKHLHAEIKVIGTIQILCGMMVLSLGIILASASFSPNFTQVTSTLLNSAYPFIGPFFFIISGSLSIATEKRLTKLLVHSSLVGSILSALSALVGFIILSVKQATLNPASLQCELDKNNIPTRSYVSYFYHDSLYTTDCYTAKASLAGTLSLMLICTLLEFCLAVLTAVLRWKQAYSDFPGSVLFLPHSYIGNSGMSSKMTHDCGYEELLTS

SEQ ID NO: 504 - DNA, 1619 bp, Homosapiens
aacattcctgcaaatggtttcaatatatgcagatgtctcgatataggaatgaaattacgtctttggaacaacttaaataagtcaaatatacttggagctttaaaaattaaaaggagagagattcgagcaccttttctgctgccatgacaaccatgcaaggaatggaacaggccatgccaggggctggccctggtgtgccccagctgggaaacatggctgtcatacattcacatctgtggaaaggattgcaagagaagttcttgaagggagaacccaaagtccttggggttgtgcagattctgactgccctgatgagccttagcatgggaataacaatgatgtgtatggcatctaatacttatggaagtaaccctatttccgtgtatatcgggtacacaatttgggggtcagtaatgtttattatttcaggatccttgtcaattgcagcaggaattagaactacaaaaggcctggtccgaggtagtctaggaatgaatatcaccagctctgtactggctgcatcagggatcttaatcaacacatttagcttggcgttttattcattccatcacccttactgtaactactatggcaactcaaataattgtcatgggactatgtccatcttaatgggtctggatggcatggtgctcctcttaagtgtgctggaattctgcattgctgtgtccctctctgcctttggatgtaaagtgctctgttgtacccctggtggggttgtgttaattctgccatcacattctcacatggcagaaacagcatctcccacaccacttaatgaggtttgaggccaccaaaagatcaacagacaaatgctccagaaatctatgctgactgtgacacaagagcctcacatgagaaattaccagtatccaacttcgatactgatagacttgttgatattattattatatgtaatccaattatgaactgtgtgtgtatagagagataataaattcaaaattatgttctcatttttttccctggaactcaataactcatttcactggctctttatcgagagtactagaagttaaattaataaataatgcatttaatgaggcaacagcacttgaaagtttttcattcatcataagaactttatataaaggcattacattggcaaataaggtttggaagcagaagagcaaaaaaaagatattgttaaaatgaggcctccatgcaaaacacatacttccctcccatttatttaactttttttttctcctacctatggggaccaaagtgctttttccttcaggaagtggagatgcatggccatctccccctccctttttccttctcctgcttttctttccccatagaaagtaccttgaagtagcacagtccgtccttgcatgtgcacgagctatcatttgagtaaaagtatacatggagtaaaaatcatattaagcatcagattcaacttatattttctatttcatcttcttcctttcccttctcccaccttctactgggcataattatatcttaatcatatatggaaatgtgcaacatatggtatttgttaaatacgtttgtttttattgcagagcaaaaataaatcaaattagaagcaataaaaaaaaaaaaaaaaaaaa

SEQ ID NO: 505 - protein, 220 aa, Homosapiens
MTTMQGMEQAMPGAGPGVPQLGNMAVIHSHLWKGLQEKFLKGEPKVLGVVQILTALMSLSMGITMMCMASNTYGSNPISVYIGYTIWGSVMFIISGSLSIAAGIRTTKGLVRGSLGMNITSSVLAASGILINTFSLAFYSFHHPYCNYYGNSNNCHGTMSILMGLDGMVLLLSVLEFCIAVSLSAFGCKVLCCTPGGVVLILPSHSHMAETASPTPLNEV

SEQ ID NO: 506 - DNA, 1543 bp, Homosapiens
agagccctgcatgcatcagacctacagcagacattgcaggcctgaagaaagcaccttttctgctgccatgacaaccatgcaaggaatggaacaggccatgccaggggctggccctggtgtgccccagctgggaaacatggctgtcatacattcacatctgtggaaaggattgcaagagaagttcttgaagggagaacccaaagtccttggggttgtgcagattctgactgccctgatgagccttagcatgggaataacaatgatgtgtatggcatctaatacttatggaagtaaccctatttccgtgtatatcgggtacacaatttgggggtcagtaatgtttattatttcaggatccttgtcaattgcagcaggaattagaactacaaaaggcctggtccgaggtagtctaggaatgaatatcaccagctctgtactggctgcatcagggatcttaatcaacacatttagcttggcgttttattcattccatcacccttactgtaactactatggcaactcaaataattgtcatgggactatgtccatcttaatgggtctggatggcatggtgctcctcttaagtgtgctggaattctgcattgctgtgtccctctctgcctttggatgtaaagtgctctgttgtacccctggtggggttgtgttaattctgccatcacattctcacatggcagaaacagcatctcccacaccacttaatgaggtttgaggccaccaaaagatcaacagacaaatgctccagaaatctatgctgactgtgacacaagagcctcacatgagaaattaccagtatccaacttcgatactgatagacttgttgatattattattatatgtaatccaattatgaactgtgtgtgtatagagagataataaattcaaaattatgttctcatttttttccctggaactcaataactcatttcactggctctttatcgagagtactagaagttaaattaataaataatgcatttaatgaggcaacagcacttgaaagtttttcattcatcataagaactttatataaaggcattacattggcaaataaggtttggaagcagaagagcaaaaaaaagatattgttaaaatgaggcctccatgcaaaacacatacttccctcccatttatttaactttttttttctcctacctatggggaccaaagtgctttttccttcaggaagtggagatgcatggccatctccccctccctttttccttctcctgcttttctttccccatagaaagtaccttgaagtagcacagtccgtccttgcatgtgcacgagctatcatttgagtaaaagtatacatggagtaaaaatcatattaagcatcagattcaacttatattttctatttcatcttcttcctttcccttctcccaccttctactgggcataattatatcttaatcatatatggaaatgtgcaacatatggtatttgttaaatacgtttgtttttattgcagagcaaaaataaatcaaattagaagcaataaaaaaaaaaaaaaaaaaaa

SEQ ID NO: 507 - protein, 239 aa, Homosapiens [sequence omitted]

SEQ ID NO: 508 - DNA, 660 bp, Homosapiens
ttggcaacaccattatgacatcacaacctatttccaatgagaccatcataatgctcccatcaaatgtcatcaacttctcccaagcagagaaacccgaacccaccaaccaggggcaggatagcctgaagaaacgtctacaggcaaaagtcaaagttattggggtgcatagcagcctggctggaagcattctgagtgctctgtctgccctggtgggtttcattctcctgtctgtcaacccggctgcattaaatcctgcctcattgcagtgtaagttggacgaaaaggatataccaaccagacttcttctttcttatgattatcattcaccttacaccatggactgccatagagccaaagccagtctggctggaactctgtctctgatgctggtttctactgtgttggagttctgcctagctgtgctcactgctgtgctgcagtggaaacagactgtctgacttccctggttactcatgtcctcaaagacgactcatgatgctggatatgaagaactattgacttcttgggaaaaaacggagaaatattaattggaaagttgatttttatgataatatggaaaacctaaccattataaaaaagcaaacttgagtttcctaaatgtaagcatttaaagtaatgcatatttgttttaaaaaatta

SEQ ID NO: 509 - protein, 147 aa, Homosapiens
MTSQPISNETIIMLPSNVINFSQAEKPEPTNQGQDSLKKRLQAKVKVIGVHSSLAGSILSALSALVGFILLSVNPAALNPASLQCKLDEKDIPTRLLLSYDYHSPYTMDCHRAKASLAGTLSLMLVSTVLEFCLAVLTAVLQWKQTV

SEQ ID NO: 510 - DNA, 3024 bp, Homosapiens
attcacatcctgtgtaatcataaatactgctctaagaaagggacaggaagtctcagaggctggagagcagagcaccaagatcgttctggcaggaacagccagtgggaggttccagctgagcgctccccagaggtgagctgatccccagccacagcacacaggaccaggctgcgagaacagcatcatcagcatcatgctattacaatcccaaaccatgggggtttctcacagctttacaccaaagggcatcactatccctcaaagagagaaacctggacacatgtaccaaaacgaagattacctgcagaacgggctgccaacagaaaccaccgttcttgggactgtccagatcctgtgttgcctgttgatttcaagtctgggggccatcttggtttttgctccctacccctcccacttcaatccagcaatttccaccactttgatgtctgggtacccatttttaggagctctgtgttttggcattactggatccctctcaattatctctggaaaacaatcaactaagccctttgacctgagcagcttgacctcaaatgcagtgagttctgttactgcaggagcaggcctcttcctccttgctgacagcatggtagccctgaggactgcctctcaacattgtggctcagaaatggattatctatcctcattgccttattcggagtactattatccaatatatgaaatcaaagattgtctcctgaccagtgtcagtttaacaggtgtcctagtggtgatgctcatcttcactgtgctggagctcttattagctgcatacagttctgtcttttggtggaaacagctctactccaacaaccctgggagttcattttcctcgacccagtcacaagatcatatccaacaggtcaaaaagagttcttcacggtcttggatataagtaactcttggcctcagaggaaggaaaagcaactcaacactcatggtcaagtgtgattagactttcctgaaatctctgccattttagatactgtgaaacaaactaaaaaaaaaaaagcttttgttttgtatttgtttactatgagtcgttatttaatttctcttgaaaataatttcctcaaagcccaagtcaataaatgttatcagccagtcttccaaaatggtcataaactttataaactgctttgggtaaactgagcagaaggtgatacacagaagggaaaatgtgcactcatgctagtgtgaatttggtaagttgcgtgactctgcaggctgtttctgtattattttcacactcatattgcttaaatattacatattagggattgtaagaaaactttaattaaaaattaaagactatatataattaaactactctgccctggacactctctgagaaacagatctactgggccctttttcatgagccattaggtggaagacagcaaagagatcttctcaagtgcttaggattacctctcaacacacagcaagcatgtccctgcctcccatgaatcttaccatgtaaatccaaatctctgcaatcctgtggcaccaaccagtggtgctcattctattgtttaaaaatggccttcttggctgggcgcggtggctcactcctgtaatcccagcactttggtaggccgaggtggacggatcacccgaggtcaggagtttgagaccagcctggccaacaaggtgaaaccctgtctctactaaaaatacaaaaaattagccaggcatggtggtgcgcacctgtagttccagctacttgggaggctgaggcagaagaatcacttgaacccgggaaggggaggttgcagtgagcggagactgcaccactgcattccagcccggcctacaagaacaaaactccatctcaaaataaataaaaaaataaataaaaataaaaatagactatatatagtctttgaattcatttattttaaataaatgaataaaataaaataaaaaagaatattcagtcgttggcacataaactatgttctcttctgtcatttcagggtaggagtcaatgaagacatcttagtcttaacaagttacagataatctctgactggcatgttttctgcttctagcttggagctaaatgctgctcatgctgaaaagaataatgtctatttctttgtttgggtattagctctattttgatctatagcacagttttgtaattcagatcatcacccctgcactttgtaccacatgggcgtattctttcttcccagtcattgctgcaattatcttgtctgttctttgtgtaatatgttctgtgtgagcctctgcattaaactcgatttcttgggcaattatggaaattccagtgtggctgcagtttaactttgcactctctatgcatatgaggtttcctaaataaatgaggagtagcatagtttaaaatatatatatcttataactttctacaacaaagaattattgagtccaaatgtcatcagtgctcattttgagataccctgctatcgatggtcgctacaaaccaggaaatactcaagttattatgtgtatacattggttttagttttatgaaacaatttaccttcatgatctcatagttaaaattgtaataaatttaggaatataaaggatcaatatgggaagcaaaatttctaaaggcagtttctgttgttttaattagtatttgtgtagttcaaaccaggaaggatttgactatcattagattttgcttaactttatgaaagctaaaatattctctgttataaaggggcaactccatctggtcctatagcatctttactactgatttttttttgtttaatttgaaaatgcaaagaattgttaaatgttcttaaatgttctcactacaaaaaaagaaaaaagataactacgtgaggtgatggatatgttaattagctggattgtggtaatcattttggaatgtatatgtatatcaaaacatgtagtacaccctaaatatatataatttttatttgtcaaatatacctcaataaagatggaaaaaaatcgaaattcaaaaaaaaaaaaaaaaaa

SEQ ID NO: 511 - protein, 240 aa, Homosapiens
MLLQSQTMGVSHSFTPKGITIPQREKPGHMYQNEDYLQNGLPTETTVLGTVQILCCLLISSLGAILVFAPYPSHFNPAISTTLMSGYPFLGALCFGITGSLSIISGKQSTKPFDLSSLTSNAVSSVTAGAGLFLLADSMVALRTASQHCGSEMDYLSSLPYSEYYYPIYEIKDCLLTSVSLTGVLVVMLIFTVLELLLAAYSSVFWWKQLYSNNPGSSFSSTQSQDHIQQVKKSSSRSWI

SEQ ID NO: 512 - DNA, 2889 bp, Homosapiens
attcacatcctgtgtaatcataaatactgctctaagaaagggacaggaagtctcagaggctggagagcagagcaccaagatcgttctggcaggaacagccagtgggaggttccagctgagcgctccccagaggtgagctgatccccagccacagcacacaggaccaggctgcgagaacagcatcatcagcatcatgctattacaatcccaaaccatgggggtttctcacagctttacaccaaagggcatcactatccctcaaagagagaaacctggacacatgtaccaaaacgaagattacctgcagaacgggctgccaacagaaaccaccgttcttgggtttggcattactggatccctctcaattatctctggaaaacaatcaactaagccctttgacctgagcagcttgacctcaaatgcagtgagttctgttactgcaggagcaggcctcttcctccttgctgacagcatggtagccctgaggactgcctctcaacattgtggctcagaaatggattatctatcctcattgccttattcggagtactattatccaatatatgaaatcaaagattgtctcctgaccagtgtcagtttaacaggtgtcctagtggtgatgctcatcttcactgtgctggagctcttattagctgcatacagttctgtcttttggtggaaacagctctactccaacaaccctgggagttcattttcctcgacccagtcacaagatcatatccaacaggtcaaaaagagttcttcacggtcttggatataagtaactcttggcctcagaggaaggaaaagcaactcaacactcatggtcaagtgtgattagactttcctgaaatctctgccattttagatactgtgaaacaaactaaaaaaaaaaaagcttttgttttgtatttgtttactatgagtcgttatttaatttctcttgaaaataatttcctcaaagcccaagtcaataaatgttatcagccagtcttccaaaatggtcataaactttataaactgctttgggtaaactgagcagaaggtgatacacagaagggaaaatgtgcactcatgctagtgtgaatttggtaagttgcgtgactctgcaggctgtttctgtattattttcacactcatattgcttaaatattacatattagggattgtaagaaaactttaattaaaaattaaagactatatataattaaactactctgccctggacactctctgagaaacagatctactgggccctttttcatgagccattaggtggaagacagcaaagagatcttctcaagtgcttaggattacctctcaacacacagcaagcatgtccctgcctcccatgaatcttaccatgtaaatccaaatctctgcaatcctgtggcaccaaccagtggtgctcattctattgtttaaaaatggccttcttggctgggcgcggtggctcactcctgtaatcccagcactttggtaggccgaggtggacggatcacccgaggtcaggagtttgagaccagcctggccaacaaggtgaaaccctgtctctactaaaaatacaaaaaattagccaggcatggtggtgcgcacctgtagttccagctacttgggaggctgaggcagaagaatcacttgaacccgggaaggggaggttgcagtgagcggagactgcaccactgcattccagcccggcctacaagaacaaaactccatctcaaaataaataaaaaaataaataaaaataaaaatagactatatatagtctttgaattcatttattttaaataaatgaataaaataaaataaaaaagaatattcagtcgttggcacataaactatgttctcttctgtcatttcagggtaggagtcaatgaagacatcttagtcttaacaagttacagataatctctgactggcatgttttctgcttctagcttggagctaaatgctgctcatgctgaaaagaataatgtctatttctttgtttgggtattagctctattttgatctatagcacagttttgtaattcagatcatcacccctgcactttgtaccacatgggcgtattctttcttcccagtcattgctgcaattatcttgtctgttctttgtgtaatatgttctgtgtgagcctctgcattaaactcgatttcttgggcaattatggaaattccagtgtggctgcagtttaactttgcactctctatgcatatgaggtttcctaaataaatgaggagtagcatagtttaaaatatatatatcttataactttctacaacaaagaattattgagtccaaatgtcatcagtgctcattttgagataccctgctatcgatggtcgctacaaaccaggaaatactcaagttattatgtgtatacattggttttagttttatgaaacaatttaccttcatgatctcatagttaaaattgtaataaatttaggaatataaaggatcaatatgggaagcaaaatttctaaaggcagtttctgttgttttaattagtatttgtgtagttcaaaccaggaaggatttgactatcattagattttgcttaactttatgaaagctaaaatattctctgttataaaggggcaactccatctggtcctatagcatctttactactgatttttttttgtttaatttgaaaatgcaaagaattgttaaatgttcttaaatgttctcactacaaaaaaagaaaaaagataactacgtgaggtgatggatatgttaattagctggattgtggtaatcattttggaatgtatatgtatatcaaaacatgtagtacaccctaaatatatataatttttatttgtcaaatatacctcaataaagatggaaaaaaatcgaaattcaaaaaaaaaaaaaaaaaa

SEQ ID NO: 513 - protein, 195 aa, Homosapiens
MLLQSQTMGVSHSFTPKGITIPQREKPGHMYQNEDYLQNGLPTETTVLGFGITGSLSIISGKQSTKPFDLSSLTSNAVSSVTAGAGLFLLADSMVALRTASQHCGSEMDYLSSLPYSEYYYPIYEIKDCLLTSVSLTGVLVVMLIFTVLELLLAAYSSVFWWKQLYSNNPGSSFSSTQSQDHIQQVKKSSSRSWI

SEQ ID NO: 514 - DNA, 2976 bp, Homosapiens
attcacatcctgtgtaatcataaatactgctctaagaaagggacaggaagtctcagaggctggagagcagagcaccaagatcgttctggcaggaacagccagtgggaggttccagctgagcgctccccagagcatcatcagcatcatgctattacaatcccaaaccatgggggtttctcacagctttacaccaaagggcatcactatccctcaaagagagaaacctggacacatgtaccaaaacgaagattacctgcagaacgggctgccaacagaaaccaccgttcttgggactgtccagatcctgtgttgcctgttgatttcaagtctgggggccatcttggtttttgctccctacccctcccacttcaatccagcaatttccaccactttgatgtctgggtacccatttttaggagctctgtgttttggcattactggatccctctcaattatctctggaaaacaatcaactaagccctttgacctgagcagcttgacctcaaatgcagtgagttctgttactgcaggagcaggcctcttcctccttgctgacagcatggtagccctgaggactgcctctcaacattgtggctcagaaatggattatctatcctcattgccttattcggagtactattatccaatatatgaaatcaaagattgtctcctgaccagtgtcagtttaacaggtgtcctagtggtgatgctcatcttcactgtgctggagctcttattagctgcatacagttctgtcttttggtggaaacagctctactccaacaaccctgggagttcattttcctcgacccagtcacaagatcatatccaacaggtcaaaaagagttcttcacggtcttggatataagtaactcttggcctcagaggaaggaaaagcaactcaacactcatggtcaagtgtgattagactttcctgaaatctctgccattttagatactgtgaaacaaactaaaaaaaaaaaagcttttgttttgtatttgtttactatgagtcgttatttaatttctcttgaaaataatttcctcaaagcccaagtcaataaatgttatcagccagtcttccaaaatggtcataaactttataaactgctttgggtaaactgagcagaaggtgatacacagaagggaaaatgtgcactcatgctagtgtgaatttggtaagttgcgtgactctgcaggctgtttctgtattattttcacactcatattgcttaaatattacatattagggattgtaagaaaactttaattaaaaattaaagactatatataattaaactactctgccctggacactctctgagaaacagatctactgggccctttttcatgagccattaggtggaagacagcaaagagatcttctcaagtgcttaggattacctctcaacacacagcaagcatgtccctgcctcccatgaatcttaccatgtaaatccaaatctctgcaatcctgtggcaccaaccagtggtgctcattctattgtttaaaaatggccttcttggctgggcgcggtggctcactcctgtaatcccagcactttggtaggccgaggtggacggatcacccgaggtcaggagtttgagaccagcctggccaacaaggtgaaaccctgtctctactaaaaatacaaaaaattagccaggcatggtggtgcgcacctgtagttccagctacttgggaggctgaggcagaagaatcacttgaacccgggaaggggaggttgcagtgagcggagactgcaccactgcattccagcccggcctacaagaacaaaactccatctcaaaataaataaaaaaataaataaaaataaaaatagactatatatagtctttgaattcatttattttaaataaatgaataaaataaaataaaaaagaatattcagtcgttggcacataaactatgttctcttctgtcatttcagggtaggagtcaatgaagacatcttagtcttaacaagttacagataatctctgactggcatgttttctgcttctagcttggagctaaatgctgctcatgctgaaaagaataatgtctatttctttgtttgggtattagctctattttgatctatagcacagttttgtaattcagatcatcacccctgcactttgtaccacatgggcgtattctttcttcccagtcattgctgcaattatcttgtctgttctttgtgtaatatgttctgtgtgagcctctgcattaaactcgatttcttgggcaattatggaaattccagtgtggctgcagtttaactttgcactctctatgcatatgaggtttcctaaataaatgaggagtagcatagtttaaaatatatatatcttataactttctacaacaaagaattattgagtccaaatgtcatcagtgctcattttgagataccctgctatcgatggtcgctacaaaccaggaaatactcaagttattatgtgtatacattggttttagttttatgaaacaatttaccttcatgatctcatagttaaaattgtaataaatttaggaatataaaggatcaatatgggaagcaaaatttctaaaggcagtttctgttgttttaattagtatttgtgtagttcaaaccaggaaggatttgactatcattagattttgcttaactttatgaaagctaaaatattctctgttataaaggggcaactccatctggtcctatagcatctttactactgatttttttttgtttaatttgaaaatgcaaagaattgttaaatgttcttaaatgttctcactacaaaaaaagaaaaaagataactacgtgaggtgatggatatgttaattagctggattgtggtaatcattttggaatgtatatgtatatcaaaacatgtagtacaccctaaatatatataatttttatttgtcaaatatacctcaataaagatggaaaaaaatcgaaattcaaaaaaaaaaaaaaaaaa

SEQ ID NO: 515 - protein, 240 aa, Homosapiens; identical to SEQ ID NO: 511

SEQ ID NO: 516 - DNA, 2841 bp, Homosapiens
attcacatcctgtgtaatcataaatactgctctaagaaagggacaggaagtctcagaggctggagagcagagcaccaagatcgttctggcaggaacagccagtgggaggttccagctgagcgctccccagagcatcatcagcatcatgctattacaatcccaaaccatgggggtttctcacagctttacaccaaagggcatcactatccctcaaagagagaaacctggacacatgtaccaaaacgaagattacctgcagaacgggctgccaacagaaaccaccgttcttgggtttggcattactggatccctctcaattatctctggaaaacaatcaactaagccctttgacctgagcagcttgacctcaaatgcagtgagttctgttactgcaggagcaggcctcttcctccttgctgacagcatggtagccctgaggactgcctctcaacattgtggctcagaaatggattatctatcctcattgccttattcggagtactattatccaatatatgaaatcaaagattgtctcctgaccagtgtcagtttaacaggtgtcctagtggtgatgctcatcttcactgtgctggagctcttattagctgcatacagttctgtcttttggtggaaacagctctactccaacaaccctgggagttcattttcctcgacccagtcacaagatcatatccaacaggtcaaaaagagttcttcacggtcttggatataagtaactcttggcctcagaggaaggaaaagcaactcaacactcatggtcaagtgtgattagactttcctgaaatctctgccattttagatactgtgaaacaaactaaaaaaaaaaaagcttttgttttgtatttgtttactatgagtcgttatttaatttctcttgaaaataatttcctcaaagcccaagtcaataaatgttatcagccagtcttccaaaatggtcataaactttataaactgctttgggtaaactgagcagaaggtgatacacagaagggaaaatgtgcactcatgctagtgtgaatttggtaagttgcgtgactctgcaggctgtttctgtattattttcacactcatattgcttaaatattacatattagggattgtaagaaaactttaattaaaaattaaagactatatataattaaactactctgccctggacactctctgagaaacagatctactgggccctttttcatgagccattaggtggaagacagcaaagagatcttctcaagtgcttaggattacctctcaacacacagcaagcatgtccctgcctcccatgaatcttaccatgtaaatccaaatctctgcaatcctgtggcaccaaccagtggtgctcattctattgtttaaaaatggccttcttggctgggcgcggtggctcactcctgtaatcccagcactttggtaggccgaggtggacggatcacccgaggtcaggagtttgagaccagcctggccaacaaggtgaaaccctgtctctactaaaaatacaaaaaattagccaggcatggtggtgcgcacctgtagttccagctacttgggaggctgaggcagaagaatcacttgaacccgggaaggggaggttgcagtgagcggagactgcaccactgcattccagcccggcctacaagaacaaaactccatctcaaaataaataaaaaaataaataaaaataaaaatagactatatatagtctttgaattcatttattttaaataaatgaataaaataaaataaaaaagaatattcagtcgttggcacataaactatgttctcttctgtcatttcagggtaggagtcaatgaagacatcttagtcttaacaagttacagataatctctgactggcatgttttctgcttctagcttggagctaaatgctgctcatgctgaaaagaataatgtctatttctttgtttgggtattagctctattttgatctatagcacagttttgtaattcagatcatcacccctgcactttgtaccacatgggcgtattctttcttcccagtcattgctgcaattatcttgtctgttctttgtgtaatatgttctgtgtgagcctctgcattaaactcgatttcttgggcaattatggaaattccagtgtggctgcagtttaactttgcactctctatgcatatgaggtttcctaaataaatgaggagtagcatagtttaaaatatatatatcttataactttctacaacaaagaattattgagtccaaatgtcatcagtgctcattttgagataccctgctatcgatggtcgctacaaaccaggaaatactcaagttattatgtgtatacattggttttagttttatgaaacaatttaccttcatgatctcatagttaaaattgtaataaatttaggaatataaaggatcaatatgggaagcaaaatttctaaaggcagtttctgttgttttaattagtatttgtgtagttcaaaccaggaaggatttgactatcattagattttgcttaactttatgaaagctaaaatattctctgttataaaggggcaactccatctggtcctatagcatctttactactgatttttttttgtttaatttgaaaatgcaaagaattgttaaatgttcttaaatgttctcactacaaaaaaagaaaaaagataactacgtgaggtgatggatatgttaattagctggattgtggtaatcattttggaatgtatatgtatatcaaaacatgtagtacaccctaaatatatataatttttatttgtcaaatatacctcaataaagatggaaaaaaatcgaaattcaaaaaaaaaaaaaaaaaa

SEQ ID NO: 517 - protein, 195 aa, Homosapiens; identical to SEQ ID NO: 513

SEQ ID NO: 518 - DNA, 2805 bp, Homosapiens
ggggggagaggtagatcatgatttgggcggcaatgtttgctcactctttcccttactagagttctgccatagaatcatggagtcaacatcccaggacagaagggcaactcacgtcatcactataaaaccaaacgaaactgtattgactgcatttccctacagacctcatagctctctgctggattttctgaagggagagccaagagtcttgggggctacccagatcctgcttgctctaatcattgtgggctttggaactatatttgcacttaattacatcggtttctcccaaagacttccccttgttgtcctcacaggatatccattctggggagcacttatttttattcttacaggatacctcacagtaaccgataagaaatcaaaacttctgggtcaaggtgtcacgggcatgaatgttatcagctccttggttgcgataactgggattactttcaccattctcagctacagacatcaagacaagtactgccagatgccatcctttgaagaaatatgtgttttcagtagaactcttttcattgttctgtttttcttgccttcggatgttactcaaaatagtgaacaacctgccccagaagaatatgatcaattacaatttgtgcttcaagaagagttttccagtgatgattcaacaacaaatgcacaatctgttatctttggaggctatgctttcttcaagttaacactctctaggagtcctttagtctcccaaccaggtaataaaggtagagaatttgtgccagatgaacaaaagcaaagtatccttccatctcccaaattttcagaggaagaaattgaacctttgcctcccacactagagaagaagccctcagaaaatatgtccattcagctagactctacatttaaacaaatgaaagatgaagatctacaatctgctattgtacaaccttctcaaatgcaaaccaagcttctgcaggaccaagctgcgtcactccaagtttttccatcccattctgcactaaaactcgaagatatatcacctgaagacttgccatcccaagctctaccagtagaaggcctgtcagaacaaaccatgccatctaagtctacatcatcccatgtcaaacagtcttctaatctgacagctaatgacctgccccctcaaggcatactatcccaagacacatcatctcaagatatgctgtttcatgacatgacatcccaagatatgcaatccctagatatgctatctcaagacacaccatcccacgccatgccacctcaagacataccttcccaagatatgctatcccaagctctatcagcgcatgccatattacctgaagcctcaacatcccatattgtgcagttccctgaaatacaacacctacttcagcagcccccagatcttcaaccagaaaacactgaacctcaaaaccagcaaattttacaaatgtcatatcaagatattagatcagaagttatggaagagaccaaagaatggaaatctgaggaggaactccatagaagaaaatcctcaagacggcattccttaaaccagcaaaccaaagccttgcaatacttaaggagacattctttagacgtgcaagccaaaggccagaaatcctcaaagaggcattccttagatcagcaaagcaaaggctggcaatctccaaagcagaaatccttagaccagcaaatcaaagactggctatccccaaagaggcactccgtagataagcaagctcaacttaatcaaactaaagagcaactcccagatcagcaagctgaagatcagcaagccaaaggggaacaatacccagaaggacaatctaaagatagacaagttaaagaccagcagactgataaggagcaaaactcaaagaagcaaacccaggatcagcaaactgaagaccagccggcccaagagaagaaatccccgaaaggacaattccaaaatgttcaagccgaaggacagcaagctcaggtggagaaagtgccaaaactgttatgccaagattcagaatcccaaatacagcaataccaattctggcaattccacaaaggcaatctccaggctggacaacccaggactgtcaatcttttggccaagaatcccctgactggataactcagggctggagaaacaaagattataaagcacgagaatggcaatttgaaatgaagcactggcaaacacaggatctattagagaaagaagccctaaagcagaaagctctataccaagaagtccaaacccagcacgcaacagcccaacataacctagaatgtcaagacactcaagataaagaccaacaagaccttcaatccagagttacacaaaaaggagatatgtacactagagacatcaaaccaggggacatgaaatgtatagggcaaacctcaggggacctgcaatcagaagacgtgaaggcagattttcattcttcttctggccaaagctcagtacaagacacatgtttagcctatttgtccaatctagattcagaacaagatgtgcaaccagacacttcagcttcctcaaattcatataaagaagatgtgaatttaacttctacttcatgtgatccaaaagatcaacagcaatctgaagactctgactaacatgcagaatctacccaataccacactgcccccattaatggaattaaattgggaaaaacaatattgcctcctccaatctgtgttctcaactgtggttgccacctcattaacttacaaaaaaatgaagggcatgctgagcactcaaacaatttgttcttacttaaaataaaatgacaacaaaccaaaaaaaaaaaa

SEQ ID NO: 519 - protein, 679 aa, Homosapiens
MESTSQDRRATHVITIKPNETVLTAFPYRPHSSLLDFLKGEPRVLGATQILLALIIVGFGTIFALNYIGFSQRLPLVVLTGYPFWGALIFILTGYLTVTDKKSKLLGQGVTGMNVISSLVAITGITFTILSYRHQDKYCQMPSFEEICVFSRTLFIVLFFLPSDVTQNSEQPAPEEYDQLQFVLQEEFSSDDSTTNAQSVIFGGYAFFKLTLSRSPLVSQPGNKGREFVPDEQKQSILPSPKFSEEEIEPLPPTLEKKPSENMSIQLDSTFKQMKDEDLQSAIVQPSQMQTKLLQDQAASLQVFPSHSALKLEDISPEDLPSQALPVEGLSEQTMPSKSTSSHVKQSSNLTANDLPPQGILSQDTSSQDMLFHDMTSQDMQSLDMLSQDTPSHAMPPQDIPSQDMLSQALSAHAILPEASTSHIVQFPEIQHLLQQPPDLQPENTEPQNQQILQMSYQDIRSEVMEETKEWKSEEELHRRKSSRRHSLNQQTKALQYLRRHSLDVQAKGQKSSKRHSLDQQSKGWQSPKQKSLDQQIKDWLSPKRHSVDKQAQLNQTKEQLPDQQAEDQQAKGEQYPEGQSKDRQVKDQQTDKEQNSKKQTQDQQTEDQPAQEKKSPKGQFQNVQAEGQQAQVEKVPKLLCQDSESQIQQYQFWQFHKGNLQAGQPRTVNLLAKNPLTG

SEQ ID NO: 520 - DNA, 762 bp, Homosapiens
caggcagcctcagcacaagaaaagaacatggtctagactgaagtaccaactaaatcatctcctttcaaattatcaccgacaccatcatggattcaagcaccgcacacagtccggtgtttctggtatttcctccagaaatcactgcttcagaatatgagtccacagaactttcagccacgaccttttcaactcaaagccccttgcaaaaattatttgctagaaaaatgaaaatcttagggactatccagatcctgtttggaattatgaccttttcttttggagttatcttccttttcaccttgttaaaaccatatccaaggtttccctttatatttctttcaggatatccattctggggctctgttttgttcattaattctggagccttcctaattgcagtgaaaagaaaaaccacagaaactctgataatattgagccgaataatgaattttcttagtgccctgggagcaatagctggaatcattctcctcacatttggtttcatcctagatcaaaactacatttgtggttattctcaccaaaatagtcagtgtaaggctgttactgtcctgttcttgggaattttgattacattgatgactttcagcattattgaattattcatttctctgcctttctcaattttggggtgccactcagaggattgtgattgtgaacaatgttgttgactagcactgtgagaataaagatgtgttaaaataaaaaaaaaaaaaaaaaaaaaaaaaaaaaaaaaaaaaaaaa

SEQ ID NO: 521 - protein, 200 aa, Homosapiens
MDSSTAHSPVFLVFPPEITASEYESTELSATTFSTQSPLQKLFARKMKILGTIQILFGIMTFSFGVIFLFTLLKPYPRFPFIFLSGYPFWGSVLFINSGAFLIAVKRKTTETLIILSRIMNFLSALGAIAGIILLTFGFILDQNYICGYSHQNSQCKAVTVLFLGILITLMTFSIIELFISLPFSILGCHSEDCDCEQCC

SEQ ID NO: 522 - DNA, 3331 bp, Homosapiens
gtctatcagcgatttcatcttcaggcctggactacaccactcaccctcccagtgtgcttgagaaacaaactgcacccactgaactccgcagctagcatccaaatcagcccttgagatttgaggccttggagactcaggagttttgagagcaaaatgacaacacccagaaattcagtaaatgggactttcccggcagagccaatgaaaggccctattgctatgcaatctggtccaaaaccactcttcaggaggatgtcttcactggtgggccccacgcaaagcttcttcatgagggaatctaagactttgggggctgtccagattatgaatgggctcttccacattgccctggggggtcttctgatgatcccagcagggatctatgcacccatctgtgtgactgtgtggtaccctctctggggaggcattatgtatattatttccggatcactcctggcagcaacggagaaaaactccaggaagtgtttggtcaaaggaaaaatgataatgaattcattgagcctctttgctgccatttctggaatgattctttcaatcatggacatacttaatattaaaatttcccattttttaaaaatggagagtctgaattttattagagctcacacaccatatattaacatatacaactgtgaaccagctaatccctctgagaaaaactccccatctacccaatactgttacagcatacaatctctgttcttgggcattttgtcagtgatgctgatctttgccttcttccaggaacttgtaatagctggcatcgttgagaatgaatggaaaagaacgtgctccagacccaaatctaacatagttctcctgtcagcagaagaaaaaaaagaacagactattgaaataaaagaagaagtggttgggctaactgaaacatcttcccaaccaaagaatgaagaagacattgaaattattccaatccaagaagaggaagaagaagaaacagagacgaactttccagaacctccccaagatcaggaatcctcaccaatagaaaatgacagctctccttaagtgatttcttctgttttctgtttccttttttaaacattagtgttcatagcttccaagagacatgctgactttcatttcttgaggtactctgcacatacgcaccacatctctatctggcctttgcatggagtgaccatagctccttctctcttacattgaatgtagagaatgtagccattgtagcagcttgtgttgtcacgcttcttcttttgagcaactttcttacactgaagaaaggcagaatgagtgcttcagaatgtgatttcctactaacctgttccttggataggctttttagtatagtatttttttttgtcattttctccatcaacaaccagggagactgcacctgatggaaaagatatatgactgcttcatgacattcctaaactatcttttttttattccacatctacgtttttggtggagtcccttttgcatcattgttttaaggatgataaaaaaaaataacaactagggacaatacagaacccattccatttatctttctacagggctgacattgtggcacattcttagagttaccacaccccatgagggaagctctaaatagccaacacccatctgttttttgtaaaaacagcatagcttatacatggacatgtctctgccttaacttttcctaactcccactctaggctattgtttgcatgtctacctacttttagccattatgcgagaaaagaaaaaaatgaccatagaaaatgccaccatgaggtgcccaaatttcaaataataattaacatttagttatatttataatttccagatgacaaagtatttcatcaaataacttcatttgatgttccatgatcaagaaagaatccctatctctattttacaagtaattcaaagaggccaaataacttgtaaacaagaaaaggtaacttgtcaacagtcataactagtaattatgagagccttgtttcataaccaggtcttcttactcaaatcctgtgatgtttgaaataaccaaattgtctctccaatgtctgcataaactgtgagagccaagtcaacagcttttatcaagaatttactctctgaccagcaataaacaagcactgagagacacagagagccagattcagattttacccatggggataaaaagactcagactttcaccacatttggaaaactacttgcatcataaatatataataactggtagtttatatgaagcagacactaagtgctatagacactctcagaatatcatacttggaaacaatgtaattaaaatgccgaatctgagtcaacagctgccctacttttcaattcagatatactagtaccttacctagaaataatgttaacctagggtgaagtcactataatctgtagtctattatttgggcatttgctacatgatgagtgctgccagattgtggcaggtaaagagacaatgtaatttgcactccctatgatatttctacatttttagcgaccactagtggaagacattccccaaaattagaaaaaaaggagatagaagatttctgtctatgtaaagttctcaaaatttgttctaaattaataaaactatctttgtgttcttttctgcaacagatgattccaacatgggtgtttgtctattcttctttactcttgaaacattagaccatgggaggctcttacagccttgagttgatatttatacaacccaaatctaggtttgaacggtgaggtgtcaggtcatcaaatattcatgtctatatagtcttacacaggttctcaaaaaaaatgttcatgggataggtcattgataatggattccttattctgagaactccagacgactgaaatatatgagagaaggaaaaggacatagtaggagcaggcctgagaaaaaaatgaaagtcagaaatctttaaaaaaatacaagatcttatttctatcttattttttctcctcttctgaaatatatatgaggattcctctccaaacccatggtttctctaagaattttgagtcatttgtatgacctcaaataattagttttagctgacctcacataactccttataataggagacatctttaatgtctgctattaaagaaggatgaaaattcctatgaccttctccccgattatccctttggcaatatagagtcaaataataacattgaccaatagtaaacatgctttgccaagaagtagaagatatattctctagccttagtttttcctcccaatttgcatttttgtaaaaataatgttgtatccacaaaggaaataaactttaaaaacccaagtgca

SEQ ID NO: 523 - protein, 297 aa, Homosapiens
MTTPRNSVNGTFPAEPMKGPIAMQSGPKPLFRRMSSLVGPTQSFFMRESKTLGAVQIMNGLFHIALGGLLMIPAGIYAPICVTVWYPLWGGIMYIISGSLLAATEKNSRKCLVKGKMIMNSLSLFAAISGMILSIMDILNIKISHFLKMESLNFIRAHTPYINIYNCEPANPSEKNSPSTQYCYSIQSLFLGILSVMLIFAFFQELVIAGIVENEWKRTCSRPKSNIVLLSAEEKKEQTIEIKEEVVGLTETSSQPKNEEDIEIIPIQEEEEEETETNFPEPPQDQESSPIENDSSP

SEQ ID NO: 524 - DNA, 3594 bp, Homosapiens
gtctatcagcgatttcatcttcaggcctggactacaccactcaccctcccagtgtgcttgagaaacaaactgcacccactgaactccgcagctagcatccaaatcagcccttgagatttgaggccttggagactcagatcctgaacaagagagaacaaaatctctactttgatggaacttccattctgtggggaagagactgacaataagcaattaaataaataagaactcagcagtaggccttgcctcagatccaaggtcactcggaagaggccatgtctaccctcaatgacactcatggaggaaatgctgagagaagcattcagatgcatgacacaaggtaagactgccaaaaatcttgttcttgctctcctcattttgttatttgttttatttttaggagttttgagagcaaaatgacaacacccagaaattcagtaaatgggactttcccggcagagccaatgaaaggccctattgctatgcaatctggtccaaaaccactcttcaggaggatgtcttcactggtgggccccacgcaaagcttcttcatgagggaatctaagactttgggggctgtccagattatgaatgggctcttccacattgccctggggggtcttctgatgatcccagcagggatctatgcacccatctgtgtgactgtgtggtaccctctctggggaggcattatgtatattatttccggatcactcctggcagcaacggagaaaaactccaggaagtgtttggtcaaaggaaaaatgataatgaattcattgagcctctttgctgccatttctggaatgattctttcaatcatggacatacttaatattaaaatttcccattttttaaaaatggagagtctgaattttattagagctcacacaccatatattaacatatacaactgtgaaccagctaatccctctgagaaaaactccccatctacccaatactgttacagcatacaatctctgttcttgggcattttgtcagtgatgctgatctttgccttcttccaggaacttgtaatagctggcatcgttgagaatgaatggaaaagaacgtgctccagacccaaatctaacatagttctcctgtcagcagaagaaaaaaaagaacagactattgaaataaaagaagaagtggttgggctaactgaaacatcttcccaaccaaagaatgaagaagacattgaaattattccaatccaagaagaggaagaagaagaaacagagacgaactttccagaacctccccaagatcaggaatcctcaccaatagaaaatgacagctctccttaagtgatttcttctgttttctgtttccttttttaaacattagtgttcatagcttccaagagacatgctgactttcatttcttgaggtactctgcacatacgcaccacatctctatctggcctttgcatggagtgaccatagctccttctctcttacattgaatgtagagaatgtagccattgtagcagcttgtgttgtcacgcttcttcttttgagcaactttcttacactgaagaaaggcagaatgagtgcttcagaatgtgatttcctactaacctgttccttggataggctttttagtatagtatttttttttgtcattttctccatcaacaaccagggagactgcacctgatggaaaagatatatgactgcttcatgacattcctaaactatcttttttttattccacatctacgtttttggtggagtcccttttgcatcattgttttaaggatgataaaaaaaaataacaactagggacaatacagaacccattccatttatctttctacagggctgacattgtggcacattcttagagttaccacaccccatgagggaagctctaaatagccaacacccatctgttttttgtaaaaacagcatagcttatacatggacatgtctctgccttaacttttcctaactcccactctaggctattgtttgcatgtctacctacttttagccattatgcgagaaaagaaaaaaatgaccatagaaaatgccaccatgaggtgcccaaatttcaaataataattaacatttagttatatttataatttccagatgacaaagtatttcatcaaataacttcatttgatgttccatgatcaagaaagaatccctatctctattttacaagtaattcaaagaggccaaataacttgtaaacaagaaaaggtaacttgtcaacagtcataactagtaattatgagagccttgtttcataaccaggtcttcttactcaaatcctgtgatgtttgaaataaccaaattgtctctccaatgtctgcataaactgtgagagccaagtcaacagcttttatcaagaatttactctctgaccagcaataaacaagcactgagagacacagagagccagattcagattttacccatggggataaaaagactcagactttcaccacatttggaaaactacttgcatcataaatatataataactggtagtttatatgaagcagacactaagtgctatagacactctcagaatatcatacttggaaacaatgtaattaaaatgccgaatctgagtcaacagctgccctacttttcaattcagatatactagtaccttacctagaaataatgttaacctagggtgaagtcactataatctgtagtctattatttgggcatttgctacatgatgagtgctgccagattgtggcaggtaaagagacaatgtaatttgcactccctatgatatttctacatttttagcgaccactagtggaagacattccccaaaattagaaaaaaaggagatagaagatttctgtctatgtaaagttctcaaaatttgttctaaattaataaaactatctttgtgttcttttctgcaacagatgattccaacatgggtgtttgtctattcttctttactcttgaaacattagaccatgggaggctcttacagccttgagttgatatttatacaacccaaatctaggtttgaacggtgaggtgtcaggtcatcaaatattcatgtctatatagtcttacacaggttctcaaaaaaaatgttcatgggataggtcattgataatggattccttattctgagaactccagacgactgaaatatatgagagaaggaaaaggacatagtaggagcaggcctgagaaaaaaatgaaagtcagaaatctttaaaaaaatacaagatcttatttctatcttattttttctcctcttctgaaatatatatgaggattcctctccaaacccatggtttctctaagaattttgagtcatttgtatgacctcaaataattagttttagctgacctcacataactccttataataggagacatctttaatgtctgctattaaagaaggatgaaaattcctatgaccttctccccgattatccctttggcaatatagagtcaaataataacattgaccaatagtaaacatgctttgccaagaagtagaagatatattctctagccttagtttttcctcccaatttgcatttttgtaaaaataatgttgtatccacaaaggaaataaactttaaaaacccaagtgca

SEQ ID NO: 525 - protein, 297 aa, Homosapiens; identical to SEQ ID NO: 523

SEQ ID NO: 526 - DNA, 1182 bp, Homosapiens
acacaggttggagcagagaaagaggaaacatagaggtgccaaaggaacaaagacataatgatgtcatccaagccaacaagccatgctgaagtaaatgaaaccatacccaacccttacccaccaggcagctttatggctcctggatttcaacagcctctgggttcaatcaacttagaaaaccaagctcagggtgctcagcgtgctcagccctacggcatcacatctccgggaatctttgctagcagtcaaccgggtcaaggaaatatacaaatgataaatccaagtgtgggaacagcagtaatgaactttaaagaagaagcaaaggcactaggggtgatccagatcatggttggattgatgcacattggttttggaattgttttgtgtttaatatccttctcttttagagaagtattaggttttgcctctactgctgttattggtggatacccattctggggtggcctttcttttattatctctggctctctctctgtgtcagcatccaaggagctttcccgttgtctggtgaaaggcagcctgggaatgaacattgttagttctatcttggccttcattggagtgattctgctgctggtggatatgtgcatcaatggggtagctggccaagactactgggccgtgctttctggaaaaggcatttcagccacgctgatgatcttctccctcttggagttcttcgtagcttgtgccacagcccattttgccaaccaagcaaacaccacaaccaatatgtctgtcctggttattccaaatatgtatgaaagcaaccctgtgacaccagcgtcttcttcagctcctcccagatgcaacaactactcagctaatgcccctaaatagtaaaagaaaaaggggtatcagtctaatctcatggagaaaaactacttgcaaaaacttcttaagaagatgtcttttattgtctacaatgatttctagtctttaaaaactgtgtttgagatttgtttttaggttggtcgctaatgatggctgtatctcccttcactgtctcttcctacattaccactactacatgctggcaaaggtgaaggatcagaggactgaaaaatgattctgcaactctcttaaagttagaaatgtttctgttcatattactttttccttaataaaatgtcattagaaacaaaaaaaaaaaaaaaaaaa

SEQ ID NO: 527 - protein, 267 aa, Homosapiens
MMSSKPTSHAEVNETIPNPYPPGSFMAPGFQQPLGSINLENQAQGAQRAQPYGITSPGIFASSQPGQGNIQMINPSVGTAVMNFKEEAKALGVIQIMVGLMHIGFGIVLCLISFSFREVLGFASTAVIGGYPFWGGLSFIISGSLSVSASKELSRCLVKGSLGMNIVSSILAFIGVILLLVDMCINGVAGQDYWAVLSGKGISATLMIFSLLEFFVACATAHFANQANTTTNMSVLVIPNMYESNPVTPASSSAPPRCNNYSANAPK

SEQ ID NO: 528 - DNA, 767 bp, Homosapiens
aagggcccaccgggctcccggggctgccaggccccaaattgaggaagttgactgccagatcacactctgttggcccacgcagatagattccattcatcctttctaatgtctacaccatattttggataacatgccatcatctcacattgtgttgaaagaagaaaccagaatgttggggttgatgtatgccatatggatgaatttaaacagtttcggccttgcaataattggtatacttctaattgcatgtgaaattatactctttttaacgaaagatgaaactattcagtggccacatgtacccagtaacagagggagcaaagcaaatcttatcctcaaagaactgcagctgcttgttagatctacctggtggttccatagagaaactgctcagagaacctgcctttacctcgcctaaaacagaactatcccggagctcagttcatcaactcaggatccagtagtgtaatacagaagcctgttacgagatataaggcacttcgccctcggaaatctcactgtcggaatccttggaaatcacaccacgcacaacttctatttcttcataatttgcaaagaaccagtgtgactccagtcaagaacaaaagattaattgtgaattagcgaagaactctaattttttcaagcagccacatggaaaacgcattctaatgaaatcctttccattgctcttttttcttagttcttcaataaagcatgcgatttgatcacaaaaaaaaaaaaaaaaaaagaaaaaaaaaaaaaaa

SEQ ID NO: 529 - protein, 95 aa, Homosapiens
MPSSHIVLKEETRMLGLMYAIWMNLNSFGLAIIGILLIACEIILFLTKDETIQWPHVPSNRGSKANLILKELQLLVRSTWWFHRETAQRTCLYLA

SEQ ID NO: 530 - DNA, 1369 bp, Homosapiens
aaacaggaaataaatacgaatgaaactgagctctaagcagcatgtaacctggcctgcatccaggaaatagaggacttcggatccttctaaccctaccacccaactggccccagtacattcattctctcaggaaaaaaaacaaggtccccacagcaaagaaaaggaataggatcaagagatacgtggctgctggcagagcaagcatgaattcgatgacttcagcagttccggtggccaattctgtgttggtggtggcaccccacaatggttatcctgtgaccccaggaattatgtctcacgtgcccctgtatccaaacagccagccgcaagtccacctagttcctgggaacccacctagtttggtgtcgaatgtgaatgggcagcctgtgcagaaagctctgaaagaaggcaaaaccttgggggccatccagatcatcattggcctggctcacatcggcctcggctccatcatggcgacggttctcgtaggggaatacctgtctatttcattctacggaggctttcccttctggggaggcttgtggtttatcatttcaggatctctctccgtggcagcagaaaatcagccatattcttattgcctgctgtctggcagtttgggcttgaacatcgtcagtgcaatctgctctgcagttggagtcatactcttcatcacagatctaagtattccccacccatatgcctaccccgactattatccttacgcctggggtgtgaaccctggaatggcgatttctggcgtgctgctggtcttctgcctcctggagtttggcatcgcatgcgcatcttcccactttggctgccagttggtctgctgtcaatcaagcaatgtgagtgtcatctatccaaacatctatgcagcaaacccagtgatcaccccagaaccggtgacctcaccaccaagttattccagtgagatccaagcaaataagtaaggctacagattctggaagcatctttcactgggaccaaaagaagtcctcctccctttctgggcttccataacccaggtcgttcctgttctgacagctgaggaaacgtctctcccactgtttgtactctcaccttcattcttcaattcagtctaggaaaccatgctgtttctctatcaagaagaagacagagattttaaacagatgttaaccaagagggactccctagggcacatgcatcagcacatatgtgggcatccagcctctggggccttggcacacacacattcgtgtgctctgctgcatgtgagcttgtgggttagaggaacaaatatctagacattcaatcttcactctttcaattgtgcattcatttaataaatagatactgagcattcaaaaaaaaaaaaaaaaaa

SEQ ID NO: 531 - protein, 250 aa, Homosapiens
MNSMTSAVPVANSVLVVAPHNGYPVTPGIMSHVPLYPNSQPQVHLVPGNPPSLVSNVNGQPVQKALKEGKTLGAIQIIIGLAHIGLGSIMATVLVGEYLSISFYGGFPFWGGLWFIISGSLSVAAENQPYSYCLLSGSLGLNIVSAICSAVGVILFITDLSIPHPYAYPDYYPYAWGVNPGMAISGVLLVFCLLEFGIACASSHFGCQLVCCQSSNVSVIYPNIYAANPVITPEPVTSPPSYSSEIQANK

SEQ ID NO: 532 - DNA, 1557 bp, Homosapiens
atcgccttgaagttacgcttgaaggaggaaaactcatcaattttcggggaatcccggctttggcagcgtgctgctcatggttcgccgcggccacgtgggcatcttcttcatcgagggcggcgtccccttctggggaggagcctgcttcatcatctccggatccctctcagtggcagccgagaagaaccacaccagttgcctggtgaggagcagcctgggcaccaacatcctcagcgtcatggcggcctttgctgggacagccattctgctcatggattttggtgttaccaaccgggatgtggacaggggctatctggccgtgcttactatcttcactgtcctggagttcttcacagcggtcattgccatgcacttcgggtgccaagccatccatgcccaggccagtgcacctgtgatcttcctgccaaacgccttcagcgcagacttcaacatccccagcccggcagcctctgcgccccctgcctatgacaatgtggcatatgcccaaggagtcgtctgagtagcagatgtggcacctgcgggtggagtccagccttttccctctgggcccagcctctccccacccccaccttgttcatcaggggccagccccatcccagctgccctccctcaccacatctacacatactccggcatctgagtgaagtgtccccagggacatctctcccacactttccccagtgctttctttctaaaagacaccgggctgacgtcaggggtgtgtgtccttcagctccctgagccctgtcacccttccaggacacccaccttgtgcatctaagcatttctctgctcattggggaaatcctggcctcattggagactcaggttcgaggcctgccctgaccctcgggcctcgggaaggtcagagagcccggaatcctccagaatggaagagtctgactctggcattccacagaggtgccgataccaggccaaggcctcacagcagggtagtggcctggccgcaggtctcctggccccaagatcagctctgtcctttgtcatctgttgccacatccatggaactcaggtttcctatttggaaactagagtgttgaaccagataaggttcatcaggcccttccagctccccaggctccctgaagtcctgggtctaggccaggcattgtccccctgcttcctggaaaccctcattttccttgtctgtaatatgaagtcagcattggccccgccccccaccccctaccatctcccaatggaggggaggttgcaggggagagctgccgccagcccactcctgaggcaccaccacagtcagcatcgacaggggcacagcagtggcagtttgggacctccctgtgcctctcagcactcccttccccacccccatagcccaaggacaaggctaccacagaaggttaccacaggacctgggcttcgtctccaggggacaaggagacactgtcagcctggtgttcaccaggcctggtagatgagatggcttgtctcatccacaccacagaaggaaataaaccatgtggcttaaattttaaaaaaaaaaaaaaaaaaaaa

SEQ ID NO: 533 - protein, 147 aa, Homosapiens
MVRRGHVGIFFIEGGVPFWGGACFIISGSLSVAAEKNHTSCLVRSSLGTNILSVMAAFAGTAILLMDFGVTNRDVDRGYLAVLTIFTVLEFFTAVIAMHFGCQAIHAQASAPVIFLPNAFSADFNIPSPAASAPPAYDNVAYAQGVV

SEQ ID NO: 534 - DNA, 2287 bp, Homosapiens
ctctctggggagctccggcagcgcaagagggcaaagcacagctggaagctcagagctgcagtcccaggtcctgggccagggcccccatccagcatcaatgaaagcagaagccacagttattcccagccgttgtgctagggggctcccatcatggcaagtcctcagcccagtccagccctggcagacaagtgcaccccagaacacgacccagcccaagctcctggctccacaccagcacgataagtcccagaagaagagcagccttcttaaggagctgggggccttccacatcaccatcgctctgctgcacctggtctttgggggctacctggcctctatagtcaagaaccttcacctggtggtgctgaagtcttggtatccattctggggggctgcctcttttctcatttcagggatcttggcgataacaatgaagaccttttctaaaacttacctgaagatgttgtgcctgatgacaaacctcatcagcctcttttgcgtgctgtctggcctcttcgtcatctccaaggatctctttctggagagcccatttgagtccccgatctggagaatgtaccccaactccacggtccacatccagaggctggagctggccttgctctgcttcactgtcctagagctcttcctgccagtgcccacagctgtcacagcctggagaggggactgcccatctgcaaagaatgatgatgcatgccttgttccgaatacaccattgcatctcaaaggcctgccggtggagcccccgccatcctaccagagtgtgattcaaggcgacgcacaacacaagcaacatcagaggctcagagaagttaagcaagttgccccggacacatggatagtcactgacggagctgcgatctgggcccagactgcaaactgaagagccactgcctgacaatgcccaaacttggttggagcatagcccctgctctcccaaagttgcactttcactgggaagatgagatttgcacatacaaaaggctagagcgatggtctatacagcaaagtcagccctcacagctcaaccctgtcctctcagataagccatttcttacatagttgatggctcgatatctgtggtagcccagattgttttgttttgtttcgctttgttttgttttcttttgttttgttgagatggagtctcgctctgttgcccagcccagagtacagtggcactatctcagctcactgcaacctccgcctccctgattcaagtgattctcctgtctcagcctcccaagtagctgggactataggcacacgccaccacgcccagctaatttttatatttttagtagagacaggattgcaccatattggtcagcctggtctcaaactcctgacctcaggtgatccgcctgcctcagcctcccaaagtgctgggattacaggcgtgagccactgtgcccagcccaggttttgaagttgtccgagatagcagtctgctctctactgccttataaaatccctgtgtgaagggatgctctcagtatcatttgcccttgcacagaatatccctggggtttgaggttctttgaattctccctctttgtcatctctttcgctgccacttctggctgtggtcactagcttggccatagcacctctcttctccacttctgatctgctgcttctaaccttctatagattgcagctggctttaaaatagattgtaaagtgtaaggcattcggttctgagacagcggcagagagagccatgcaaatgtttaggacaacccagtctttcttttttttttttttttttttttgagacggagtctcactctgtcacccaggctggagtgcagtggtgcaatctcggctcactgcaacctctgcctcccgagttcaagcaattctcctgcctcagcctcccgagtagctgggattacaggcgaccaccaccacgcctggctactttttgtatttttagtagagacagggtttcaccacgttagccatgatggtctcaaacttctgacctcataatccgcccaccttggcctcccaaagtgctaggattacaggcatgagccaccacccctggctgaaacccaatctttcaaaacatgaaagggggtgatggagaaaaccttagcttggttgtctaaagacatgggtgcaaactctaggctagctctgccaatcacttactgtgcgggtttgactcagtcccttcccctcattaggtcccagtttctccatttgtaaaacaagcaattgtgctacattgatggtttacatcaataaagtttgaaacggc

SEQ ID NO: 535 - protein, 267 aa, Homosapiens
MKAEATVIPSRCARGLPSWQVLSPVQPWQTSAPQNTTQPKLLAPHQHDKSQKKSSLLKELGAFHITIALLHLVFGGYLASIVKNLHLVVLKSWYPFWGAASFLISGILAITMKTFSKTYLKMLCLMTNLISLFCVLSGLFVISKDLFLESPFESPIWRMYPNSTVHIQRLELALLCFTVLELFLPVPTAVTAWRGDCPSAKNDDACLVPNTPLHLKGLPVEPPPSYQSVIQGDAQHKQHQRLREVKQVAPDTWIVTDGAAIWAQTAN

SEQ ID NO: 536 - DNA, 1910 bp, Homosapiens
aggtttcggcgggggctgcacgtgcgcaggggtgtggaaacttaccggctgagccatggatacaccgttaaggcgcagccgacggctgggaggcctaaggcccgaatcccccgagagcctcacctcagtttcgcggacgagacgggcccttgtggagttcgagtcgaacccagaagaaacgagggagcccgggtctcctccgagtgtgcagcgggctggcctggggtcccccgaaaggccgccgaagacaagcccaggatcaccccgtctgcagcagggtgcaggcttggagtcaccccaagggcagccagagccaggcgcagcgtccccccagcgtcagcaagacctacacctggagtcgcctcaaagacagccagagtacagtcctgaatccccacgatgtcagccgaagccaagtgaggaggcaccaaagtgttctcaggaccagggagtactggcctcggagttggcccagaataaggaggagctgaccccgggggccccccagcatcagctaccgccggtcccaggatcaccagagccttaccccggtcagcaagctcccggtccggagccctctcagccactactggagctgacacccagggcacctggctccccccggggtcagcatgagccgagcaagccacctccagctggggagacggtgacaggcggcttcggggcaaagaagcgaaaaggttcttcatcccaggccccagcgtccaagaagttgaataaagaggagcttcctgtaatcccgaaggggaagcccaaatcggggcgagtgtggaaggaccgctccaagaaaagattctcccagatgcttcaggacaagcccctgcgcacatcgtggcagcggaagatgaaggaacgacaggagaggaagctggccaaggactttgcccgtcacctggaggaggagaaggagaggcgccgccaggagaagaaacagcgccgggctgagaacctgaaacgccgcctggagaatgagcggaaggcagaggtcgtccaagtgatccgaaaccccgccaagctcaagcgggcaaagaagaagcagctgcgctccattgagaagcgggacaccctggccctgctgcagaagcagccgccccagcagccggcagccaagatctgagctcaggacggcccgaggccttccatggccaacgaccatgtcagacacagcacctcaggccgctgctcagatgcctctgctggagctggcactccaaacccatggctccagaacggggacccccaccccgaccggggctcctcggcctttgaaggcttccaggcaggtctgtgtgggacagaagcccagagggggcctgggacctggcagagatgggggcgggaagagattcagctcccatccctccttcctctccttctccaagtgccttcaaaccaagaactgtacattcttctggttcctcagtgagctggtgactggcaggtgactccctcagcagtgtatgccctttctcagcatcctaggtccatcccaggcctggaggctgacagttgggaatccagcttcccccacaccttcccaaaggctgctctgagcacctccacaccccactgcctctgtccccagcaaactgaatccggttcctctccacttttcaatactgaaagattaaaatggggaggttgcagggagcagagcttttccctagcacccactttcccaaaccagtctctgcagaagccccagagaatctaactcatgcctgtccagtctacagcaaaaatatttattgagtgcctgttgcatacaggcacaatcctaggcaccggcaaatacagacaatagaccaaagtccctgccctcgaggagctttcattctgatggagagaaaacataataaacaagcaaaatgcaaaaaaaaaaaaaaaaa

SEQ ID NO: 537 - protein, 360 aa, Homosapiens
MDTPLRRSRRLGGLRPESPESLTSVSRTRRALVEFESNPEETREPGSPPSVQRAGLGSPERPPKTSPGSPRLQQGAGLESPQGQPEPGAASPQRQQDLHLESPQRQPEYSPESPRCQPKPSEEAPKCSQDQGVLASELAQNKEELTPGAPQHQLPPVPGSPEPYPGQQAPGPEPSQPLLELTPRAPGSPRGQHEPSKPPPAGETVTGGFGAKKRKGSSSQAPASKKLNKEELPVIPKGKPKSGRVWKDRSKKRFSQMLQDKPLRTSWQRKMKERQERKLAKDFARHLEEEKERRRQEKKQRRAENLKRRLENERKAEVVQVIRNPAKLKRAKKKQLRSIEKRDTLALLQKQPPQQPAAKI

SEQ ID NO: 538 - DNA, 2901 bp, Homosapiens
cagcctccctctcccacctctgtctgcccgctgcctcttgtctagctgctgtcaggagctgactgcctccagggctggaatcctgtgctccctctgtgcccagagccccacgatgtcggccaacgccacactgaagccactctgccccatcctggagcagatgagccgtctccagagccacagcaacaccagcatccgctacatcgaccacgcggccgtgctgctgcacgggctggcctcgctgctgggcctggtggagaatggagtcatcctcttcgtggtgggctgccgcatgcgccagaccgtggtcaccacctgggtgctgcacctggcgctgtccgacctgttggcctctgcttccctgcccttcttcacctacttcttggccgtgggccactcgtgggagctgggcaccaccttctgcaaactgcactcctccatcttctttctcaacatgttcgccagcggcttcctgctcagcgccatcagcctggaccgctgcctgcaggtggtgcggccggtgtgggcgcagaaccaccgcaccgtggccgcggcgcacaaagtctgcctggtgctttgggcactagcggtgctcaacacggtgccctatttcgtgttccgggacaccatctcgcggctggacgggcgcattatgtgctactacaatgtgctgctcctgaacccggggcctgaccgcgatgccacgtgcaactcgcgccaggcggccctggccgtcagcaagttcctgctggccttcctggtgccgctggcgatcatcgcctcgagccacgcggccgtgagcctgcggttgcagcaccgcggccgccggcggccaggccgcttcgtgcgcctggtggcagccgtcgtggccgccttcgcgctctgctgggggccctaccacgtgttcagcctgctggaggcgcgggcgcacgcaaacccggggctgcggccgctcgtgtggcgcgggctgcccttcgtcaccagcctggccttcttcaacagcgtggccaacccggtgctctacgtgctcacctgccccgacatgctgcgcaagctgcggcgctcgctgcgcacggtgctggagagcgtgctggtggacgacagcgagctgggtggcgcgggaagcagccgccgccgccgcacctcctccaccgcccgctcggcctcccctttagctctctgcagccgcccggaggaaccgcggggccccgcgcgtctcctcggctggctgctgggcagctgcgcagcgtccccgcagacgggccccctgaaccgggcgctgagcagcacctcgagttagaacccggcccacgtagggcggcactcacacgcgaaagtatcaccagggtgccgcggttcaattcgatatccggactcctgccgcagtgatcaaagtccgaggggcgggacccaggcacctgcattttaaagcgccccgggagactctgaatctttttcagaaacagtgagttaaagcagtgcttctcaaaccttgatgtgcctgtgaatcacctaggggtcttgttaagtgcagtctgatccaggaggccggggccgggtactgagagtctgcacttaacaagctcccaggccgagaagccagtgcggcaggttcacaggcgaggcctggagtaacacaaagtgaaactcgtaatagacttcccactctagggcagtggagtcggaagggcacacggggtgcgtctccccggagttcagttttaccagatgatgggggaggggggaaggagttttatgttaaaccatccatgtatttttggagaagagagaggaaaggtttgagaagcactgttccagcctgccctcttcatttagccaatgcttactgcgctagacgcttcatcccacaatcttaaggggcagcttctattagccagtctttacagctgagcacattctggctcagggaggttaagtgacttgcccagtttcagggctaacgaccacagggtctgcactctaaccctaggcatcacatgctcaatgactctctggtgagcgaggacattctctgacctactcgagggacttaagatgctaccttgtgacccagcactgcccaaagtgcttccaaggcagaagcagcaggggatggcgtggtcaagcactcgggaaacctggggctaatcaaatccaatgggggaaatgactaaaagtcttcggtcgttagaagttgaatgggcacagcaactctaagactacagcacacgtcatttcttagctaagcggaccagcctccctgtcggcctggtgttctgtgggatccctctgggcactggtaatcccaagatctgtgcagccccgcctccaggccacatggggctgggcagctaccatttcccttttgcggatgggaggggtaacttgcacctctgacctatcacttccactgcaccccgtctcattcctccacctgccgtggacttggggtcagagactgctgtgtttgagctctgcagcccagggaccgaaaagttggtgtcaatgaattttgcttggtggatgaaatgtcagtggaagaagcagatgagaaactcttgagatcttggtcctgtgttttttctgccaccaaaggccagggtcactgaaggcctggcccacagcaggtgctgagcaaagggaacagtgaggtgcccagctagctgcagagccaccctgtgttgacacctcgcccctgctccctcccatcccttccccctttactcatagcacttcccccattggacacgtggtgcattttgcttgtttattatgttttctctccatcagaatgaaagctcctcgagggcagggactttggtctattgtctgtatttgccggtgcctaggattgtgcctgtatgcaacaggcactcaataaatatttttgctgtagactgg

SEQ ID NO: 539 - protein, 395 aa, Homosapiens
MSANATLKPLCPILEQMSRLQSHSNTSIRYIDHAAVLLHGLASLLGLVENGVILFVVGCRMRQTVVTTWVLHLALSDLLASASLPFFTYFLAVGHSWELGTTFCKLHSSIFFLNMFASGFLLSAISLDRCLQVVRPVWAQNHRTVAAAHKVCLVLWALAVLNTVPYFVFRDTISRLDGRIMCYYNVLLLNPGPDRDATCNSRQAALAVSKFLLAFLVPLAIIASSHAAVSLRLQHRGRRRPGRFVRLVAAVVAAFALCWGPYHVFSLLEARAHANPGLRPLVWRGLPFVTSLAFFNSVANPVLYVLTCPDMLRKLRRSLRTVLESVLVDDSELGGAGSSRRRRTSSTARSASPLALCSRPEEPRGPARLLGWLLGSCAASPQTGPLNRALSSTSS

SEQ ID NO: 540 - DNA, 1972 bp, Homosapiens
gggtgtgtctgtggcgtctcatggcaggaggctcagccacgacctggggttaccctgtggccctgctactgctggttgccaccctggggctgggtaggtggctccagcccgaccctggcctcccaggcctccggcacagctacgactgtgggatcaagggaatgcagctgctggtgttccccaggccaggccagactctccgcttcaaggtggtggatgaatttgggaaccgatttgatgtcaacaactgctccatctgctaccactgggtcacctccaggccgcaggagcctgcagtcttctcggccgattacagaggctgccacgtgctggagaaggatgggcgtttccacctgagggtgttcatggaggctgtgctgcccaatggtcgtgtggatgtggcacaagacgctactctgatctgtcccaaacctgacccctcccggactctggactcccagctggcaccacccgccatgttctctgtctcaaccccacaaaccctttccttcctccccacctctggccatacctcccaaggctctggccatgcctttcccagcccactggacccagggcacagctctgtccacccaacccctgctttaccatcccctggacctggacctaccctcgccaccctggctcaaccccactggggcaccttggaacactgggatgtgaacaaacgagattacataggtacccacctgagccaggagcagtgccaggtggcctcagggcacctcccctgcatcgtgagaagaacttcaaaagaagcctgtcagcaggctggctgctgctatgacaacaccagagaggttccctgttactatggcaacacagctactgtccagtgcttcagagatggctacttcgtcctcgtagtgtcccaagaaatggccttgacacacaggatcacactggccaacatccacctggcctatgcccccaccagctgctccccaacacagcacacggaagctttcgtggtcttctacttccctctcacccactgtggaaccacaatgcaggtggctggcgaccagctcatctatgagaactggctggtgtctggcatccacatccaaaaggggccacagggttccatcacgcgggacagcaccttccagcttcatgtgcgctgtgtcttcaacgccagtgacttcctgcccattcaggcatccattttcccacccccatcgcctgctcctatgacccagcccggccccctgcggcttgagctgcggattgccaaagacgagaccttcagctcgtactatggggaggatgactatcccatcgtgaggctgctccgagaaccagtccatgtggaggtccggcttctgcagaggacagaccccaacctggtcctgctgctgcaccagtgctggggcgctcccagtgccaaccccttccagcagccccagtggcccatcctgtcagacggatgccctttcaagggcgacagctacagaacccaaatggtagccttggacggggccacacctttccagtcgcactaccagcgattcactgttgctaccttcgccctcctggactcaggctcccagagagccctcagaggactggtttacttgttctgcagcacctctgcctgccacacctcagggctggagacttgctccactgcatgtagcactggcactacaagacagcgacgatcctcaggtcaccgtaatgacactgccaggccccaggacatcgtgagctctccggggccagtgggctttgaggattcttatgggcaggagcccacacttgggcccacagactccaatgggaactccagcctgagacctctcctttgggcggtccttttgctgccagctgttgccctggtccttgggtttggtgtctttgtgggcctgagccagacctgggcccagaagctctgggaaagcaacagacagtgaatgggcccaataaacaatcatttcaaacctactga

SEQ ID NO: 541 - protein, 638 aa, Homosapiens
MAGGSATTWGYPVALLLLVATLGLGRWLQPDPGLPGLRHSYDCGIKGMQLLVFPRPGQTLRFKVVDEFGNRFDVNNCSICYHWVTSRPQEPAVFSADYRGCHVLEKDGRFHLRVFMEAVLPNGRVDVAQDATLICPKPDPSRTLDSQLAPPAMFSVSTPQTLSFLPTSGHTSQGSGHAFPSPLDPGHSSVHPTPALPSPGPGPTLATLAQPHWGTLEHWDVNKRDYIGTHLSQEQCQVASGHLPCIVRRTSKEACQQAGCCYDNTREVPCYYGNTATVQCFRDGYFVLVVSQEMALTHRITLANIHLAYAPTSCSPTQHTEAFVVFYFPLTHCGTTMQVAGDQLIYENWLVSGIHIQKGPQGSITRDSTFQLHVRCVFNASDFLPIQASIFPPPSPAPMTQPGPLRLELRIAKDETFSSYYGEDDYPIVRLLREPVHVEVRLLQRTDPNLVLLLHQCWGAPSANPFQQPQWPILSDGCPFKGDSYRTQMVALDGATPFQSHYQRFTVATFALLDSGSQRALRGLVYLFCSTSACHTSGLETCSTACSTGTTRQRRSSGHRNDTARPQDIVSSPGPVGFEDSYGQEPTLGPTDSNGNSSLRPLLWAVLLLPAVALVLGFGVFVGLSQTWAQKLWESNRQ

SEQ ID NO: 542 - DNA, 2221 bp, Homosapiens
atttccgttaggtgctgaaggctgtggcgcgcggctgtccccattcccacgtgaagcgctacgctagcatcgctcggctggcggctcccagctcgccgcggagcagtcccggcagcagcgggggaccggaagtggctcgcggaggctcagaagctagtcccggagcccggcgtgtggcgcctcggagcacggtgacggcgccatgtccctaatctgctccatctctaacgaagtgccggagcacccatgtgtatcccctgtctctaatcatgtttatgagcggcggctcatcgagaagtacattgcggagaatggtaccgaccccatcaacaaccagcctctctccgaggagcagctcatcgacatcaaagttgctcacccaatccggcccaagcctccctcagccaccagcatcccggccattctgaaagctttgcaggatgagtgggatgcagtcatgctgcacagcttcactctgcgccagcagctgcagacaacccgccaagagctgtcacacgctctgtaccagcacgatgccgcctgccgtgtcattgcccgtctcaccaaggaagtcactgctgcccgagaagctctggctaccctgaaaccacaggctggcctcattgtgccccaggctgtgccaagttcccaaccaagtgttgtgggtgcgggtgagccaatggatttgggtgagctggtgggaatgaccccagagattattcagaagcttcaagacaaagccactgtgctaaccacggagcgcaagaagagagggaagactgtgcctgaggagctggtgaagccagaagagctcagcaaataccggcaggtggcatcccacgtggggttgcacagtgccagcattcctgggatcctggccctggacctctgcccgtccgacaccaacaagatcctcactggtggggcggataaaaatgtcgttgtgtttgacaaaagttctgaacaaatcctggctaccctcaaaggccataccaagaaggtcaccagcgtggtgtttcacccttcccaggacctggtgttttctgcttcccccgatgccactatcaggatttggtcggtccccaatgcctcttgtgtacaggtggttcgggcccatgagagtgctgtgacaggcctcagccttcatgccactggcgactatctcctgagctcctccgatgatcagtactgggctttctctgacatccagacagggcgtgtgctcaccaaggtgacagatgagacctccggctgctctctcacctgtgcacagttccaccctgacggactcatctttggaacaggaaccatggactctcagatcaagatctgggacttgaaggaacgtactaatgtggccaacttccctggccactcgggccccatcactagcatcgccttctctgagaatggttactacctggctacagcggctgatgactcctctgtcaagctctgggatctgcgcaagcttaagaactttaagactttgcagctggataacaactttgaggtaaagtcactgatctttgaccagagtggtacctacctggctcttgggggcacggatgtccagatctacatctgcaaacaatggacggagattcttcactttacagagcatagcggcctgaccacaggggtggccttcgggcatcacgccaagttcatcgcttcaacaggcatggacagaagcctcaagttctacagcctgtaggccctggcccttctgatggaagctgggcctcatctcagtagaggggtagaattagggtttggggggggggtggggggaatctatggggggagggggctctgtggggtgggacattcacatcatttcactctggtctgagtggtggcctgagaaccatggtggcatggaccaccctcatccatgcaactccaggccccatgggaacggatgtggaaggaagaactgtcaccctcttaaggcccagggtcggagcccagggcctctcccttcctgtcgttcaatggacgtggtggtggctgttccacacccattttgttgcagttcctgtgagacaggagaggctgagccaagggaactgtgaaggggatgggcaggagggcttgtgcagggttttgtaagcagtgatctagtttcattaaaaaaagaaaacaataaaaaaaaaaaaaaaaaaaaaaaaaaaaaaaaaaaaaaaaaaaaaaaaaaaaaaaaaaaaaaaaaaaaaaa

SEQ ID NO: 543 - protein, 504 aa, Homosapiens
MSLICSISNEVPEHPCVSPVSNHVYERRLIEKYIAENGTDPINNQPLSEEQLIDIKVAHPIRPKPPSATSIPAILKALQDEWDAVMLHSFTLRQQLQTTRQELSHALYQHDAACRVIARLTKEVTAAREALATLKPQAGLIVPQAVPSSQPSVVGAGEPMDLGELVGMTPEIIQKLQDKATVLTTERKKRGKTVPEELVKPEELSKYRQVASHVGLHSASIPGILALDLCPSDTNKILTGGADKNVVVFDKSSEQILATLKGHTKKVTSVVFHPSQDLVFSASPDATIRIWSVPNASCVQVVRAHESAVTGLSLHATGDYLLSSSDDQYWAFSDIQTGRVLTKVTDETSGCSLTCAQFHPDGLIFGTGTMDSQIKIWDLKERTNVANFPGHSGPITSIAFSENGYYLATAADDSSVKLWDLRKLKNFKTLQLDNNFEVKSLIFDQSGTYLALGGTDVQIYICKQWTEILHFTEHSGLTTGVAFGHHAKFIASTGMDRSLKFYSL

SEQ ID NO: 544 - DNA, 2097 bp, Homosapiens
ggcgcgggtttggtggcgcgtttcagcgaagtcgcacgtgaaggatagcagtggcctgagaaagacccagtcatggcagcctccagcatcagttcaccatggggaaagcatgtgttcaaagccattctgatggtcctagtggcccttatcctcctccactcagcattggcccagtcccgtcgagactttgcaccaccaggccaacagaagagagaagccccagttgatgtcttgacccagataggtcgatctgtgcgagggacactggatgcctggattgggccagagaccatgcacctggtgtcagagtcttcgtcccaagtgttgtgggccatctcatcagccatttctgtggccttctttgctctgtctgggatcgccgcacagctgctgaatgccttgggactagctggtgattacctcgcccagggcctgaagctcagccctggccaggtccagaccttcctgctgtggggagcaggggccctggtcgtctactggctgctgtctctgctcctcggcttggtcttggccttgctggggcggatcctgtggggcctgaagcttgtcatcttcctggccggcttcgtggccctgatgaggtcggtgcctgacccttccacccgggccctgctactcctggccttgctgatcctctacgccctgctgagccggctcactggctcccgagcctctggggcccaactcgaggccaaggtgcgagggctggaacgccaggtggaggagctgcgctggcgccagaggcgagcggccaagggggcccgcagtgtggaggaggagtgagccggatgccccacacaccgccagtgtcataccaaagagctgagctgcttcggggccatgcagccctcctgccagccccctgcccttttcttgccctgtctctgaaccttcagaacattgatccttgccgcagccccactagccaagagaaacagagaaagaccattccccctgcctgtccttgcggccctgtcttctgaggttctctgtctggggttggctctcttaaccctttctctgctcccagcctgcctcaccagggaaggttggaggggcctccctctggcttctgcatctgcgccagcaaacatcactgccgttggtctctcatgacttaactggcttccctctgctgctgccttggcttcctcctaatgctcgtgctctcctgtccttctgaagttgctccttggccaaatctccagctcccttcttgttttcctcatcctcctaccctgtactcccaccaaaccatggtcctttaaggcacgctcctgtcctcctcattgcccagcagtagggaggggcaggggtaaggggacctgaggataaagggtggggaaacagggtcccctgaggcctgtgggggctgcaggggaggaggatgtaccttgtgtctctttcaagtgccttaatccgagccagcagggccttctgcttgcctgctgccatactgtatgtaggaaagtgttctgtggctgctttgtgtcaaaagagcagtcactctcagaatcttgattccccatcagccaaagcaaaagatggctgctgctttgtaggcatgtgcctgcaagtgggaccttgctgggcattatatgccctgtgggggtttcagagaccctgaaagaggagggaggacccgcctccttgtctgcacaactgcatgcacttctctccccatcgctccacaacctgaaaccgagaaggagttgctgaccagtgcccaccccggcagcccgggaggaacacaggcagctcctttcccttcacgtggtctgcagagagcagggtgagctgccagctgcccctctccaccagggtaccctgtcttggtggttaggggccacttttcctttgaggctctagtggaggtggatgtccttctctgccaggcttggcacatgatgtgaagaataaatgcccaattcttactgttcaggtttgatgtggaatcacagctgcagtgatatatattttttatcagtgcttggttggttttaaataaagtgcacgctattttattatcttgttctgaataaaatgtatttactccaaaaaaaaaaaaaaaaaaaa

SEQ ID NO: 545 - protein, 243 aa, Homosapiens
MAASSISSPWGKHVFKAILMVLVALILLHSALAQSRRDFAPPGQQKREAPVDVLTQIGRSVRGTLDAWIGPETMHLVSESSSQVLWAISSAISVAFFALSGIAAQLLNALGLAGDYLAQGLKLSPGQVQTFLLWGAGALVVYWLLSLLLGLVLALLGRILWGLKLVIFLAGFVALMRSVPDPSTRALLLLALLILYALLSRLTGSRASGAQLEAKVRGLERQVEELRWRQRRAAKGARSVEEE

SEQ ID NO: 546 - DNA, 3520 bp, Homosapiens
attcgctccctcccaccccactgctcccgctccattgtctgggaattgcagccgcggggcgggcggcggcggcggcggcggcggccgggacccagcgggccaggtggggacggcgcggagcgggtgcgggagatgccgtgcgggactggggccacctgagccgcccgcctcgtccccgccttctgtgggaaggatgtgcgcgcggatggccggtcgcacaacagcggcccctcgggggccctacggcccctggctctgcctcctggtggccctcgccctggacgtcgtgagagtggactgtggccaggctcccctggaccctgtctacctgccggcagccctggagctcctagacgcccctgaacacttccgtgtgcagcaggtgggccactacccacctgccaactcctctctgagctcccgatctgagacctttctgctcctacagccctggcccagggcccagccacttctccgggcctcctacccaccttttgccactcagcaggtggtcccccctcgagtcactgagccccaccaacggccagtcccatgggacgtgcgggccgtttcagtggaagcggctgtgactccagcagagccctacgcccgggttctcttccacctcaaagggcaggattggccaccagggtctggcagcctgccctgtgcccggctccatgccacacaccctgccggcactgctcaccaagcctgccgcttccagccatccctgggcgcctgcgtggtggagctggagcttccctcgcactggttctcacaggcctccaccacacgggccgagctggcctacacgcttgagcctgcagctgagggccctgggggctgtggctccggcgaggagaacgaccctggggagcaggccctcccagtggggggtgtggagctgcgcccagcagaccccccgcagtaccaggaggtacctctggacgaggctgtgactctgcgggtgcctgacatgccagtgcggcccggccagctctttagtgctaccctcctgcttcggcacaacttcacagccagcctcctgaccctgcggatcaaggtgaagaaggggctgcatgtgacagccgcccgcccagcccagcccacactctggactgccaagctggaccgcttcaagggctccaggcaccacaccaccctcatcacctgccaccgtgctgggctcacagagccagattccagcagtccccttgaactgtctgagttcctatgggtggactttgtggtggagaatagcactggtgggggcgtagcggtcactcgccccgtcacgtggcagctggagtacccaggccaggcccctgaagcagagaaggacaaaatggtgtgggaaatcctggtgtctgagcgggacatcagagcccttatcccactggccaaggctgaggagctggtgaatacagcaccactgactggagtgccccagcatgtccccgtgcgccttgtcactgtggacggcgggggggccttggtggaggtgacagagcatgtcggctgcgagtctgccaacacacaggtcctgcaggtgtctgaggcctgtgatgccgtgttcgtggctggcaaggagagccggggcgcccggggggtgcgagtggacttctggtggcgccggctccgcgcctcgctgcggctgaccgtgtgggcccccctgctaccgctgcgtatcgagctcaccgacaccaccctcgagcaggtccgcggctggagggtacctggccctgctgaagggcctgcggaacccgctgcagaggcgtcggatgaggccgagcggcgcgcccgtggctgccacctgcagtaccagcgggccggtgtgcgcttcctcgcccccttcgcggcccacccgctggacggcggccgccgcctcacgcacctgcttggccccgactggctgctagacgtgtcccacctcgtggcgccacacgcccgcgtgctggactcgcgtgtagcctctctggagggtggccgtgtcgtggtgggccgggagcccggtgtcacctccattgaggtgcgttccccactgtctgactccatcctgggggagcaggcgctggctgtgacggacgacaaggtctcagtgctggagctgagggtgcagccagtgatgggcatctcgctgaccttgagccggggcactgcccaccccggggaggtcacagctacgtgctgggcacagtcagcccttcccgccccaaagcaggaggtggccctctccctatggctgtccttctctgatcacactgtggccccagctgagctctacgaccgccgtgacctgggactgtccgtctcagccgaggagcctggtgccatcctgccagctgaggagcagggtgcccagctcggggtggtggtgagtggggcaggcgccgaggggctgccgctgcatgtggctctgcacccgcccgagccctgccgccggggccgccaccgtgtgcctctggcctctggcaccgcctggctggggctgccccctgcctccactccagcccctgctctcccatccagccctgcttggagcccaccagccacagaagccaccatgggtggtaaacggcaggtggcaggcagtgtcgggggcaacacaggtgtgaggggcaagtttgagcgggcagaggaggaggccaggaaggaggagaccgaagccagggaggaggaggaggaagaggaggaggagatggtccctgcccctcagcatgtcactgagctagagctgggcatgtacgccctgctgggagtcttctgcgtggccatcttcatcttcttggtcaatggtgtggtcttcgtcctgcgctatcagcgcaaagaacctcccgacagtgccactgaccccacctccccccagccccacaactgggtctggctgggcactgaccaggaggaactgagccgccagctggaccggcagtcccctggcccgcccaagggggaggggagctgcccctgtgagagtgggggaggaggggaggcccctaccctggcccctggccctcctgggggcaccaccagctcctcaagcaccctggcccgaaaggaggctggggggcggcggaagcgagtagagtttgtgacatttgcgccagcccctccagcccagtcacctgaggagcctgtaggggcccctgctgtgcagtccatccttgtggcaggcgaggaggacatccgctgggtgtgtgaggacatggggctgaaggaccctgaggagcttcgcaactacatggagaggatccggggcagctcctgaccctccacagccacctggtcagccaccagctggggcaacgagggtggaggtcccactgagcctctcgcctgcccccgccactcgtctggtgcttgttgatccaagtcccctgcctggtcccccacaaggactcccatccaggccccctctgccctgccccttgtcatggaccatggtcgtgaggaagggctcatgccccttatttatgggaaccatttcattctaacagaataaaccgagaaggaaaccaga

SEQ ID NO: 547 - protein, 1024 aa, Homosapiens
MCARMAGRTTAAPRGPYGPWLCLLVALALDVVRVDCGQAPLDPVYLPAALELLDAPEHFRVQQVGHYPPANSSLSSRSETFLLLQPWPRAQPLLRASYPPFATQQVVPPRVTEPHQRPVPWDVRAVSVEAAVTPAEPYARVLFHLKGQDWPPGSGSLPCARLHATHPAGTAHQACRFQPSLGACVVELELPSHWFSQASTTRAELAYTLEPAAEGPGGCGSGEENDPGEQALPVGGVELRPADPPQYQEVPLDEAVTLRVPDMPVRPGQLFSATLLLRHNFTASLLTLRIKVKKGLHVTAARPAQPTLWTAKLDRFKGSRHHTTLITCHRAGLTEPDSSSPLELSEFLWVDFVVENSTGGGVAVTRPVTWQLEYPGQAPEAEKDKMVWEILVSERDIRALIPLAKAEELVNTAPLTGVPQHVPVRLVTVDGGGALVEVTEHVGCESANTQVLQVSEACDAVFVAGKESRGARGVRVDFWWRRLRASLRLTVWAPLLPLRIELTDTTLEQVRGWRVPGPAEGPAEPAAEASDEAERRARGCHLQYQRAGVRFLAPFAAHPLDGGRRLTHLLGPDWLLDVSHLVAPHARVLDSRVASLEGGRVVVGREPGVTSIEVRSPLSDSILGEQALAVTDDKVSVLELRVQPVMGISLTLSRGTAHPGEVTATCWAQSALPAPKQEVALSLWLSFSDHTVAPAELYDRRDLGLSVSAEEPGAILPAEEQGAQLGVVVSGAGAEGLPLHVALHPPEPCRRGRHRVPLASGTAWLGLPPASTPAPALPSSPAWSPPATEATMGGKRQVAGSVGGNTGVRGKFERAEEEARKEETEAREEEEEEEEEMVPAPQHVTELELGMYALLGVFCVAIFIFLVNGVVFVLRYQRKEPPDSATDPTSPQPHNWVWLGTDQEELSRQLDRQSPGPPKGEGSCPCESGGGGEAPTLAPGPPGGTTSSSSTLARKEAGGRRKRVEFVTFAPAPPAQSPEEPVGAPAVQSILVAGEEDIRWVCEDMGLKDPEELRNYMERIRGSS

SEQ ID NO: 548 - DNA, 3517 bp, Homosapiens
attcgctccctcccaccccactgctcccgctccattgtctgggaattgcagccgcggggcgggcggcggcggcggcggcggcggccgggacccagcgggccaggtggggacggcgcggagcgggtgcgggagatgccgtgcgggactggggccacctgagccgcccgcctcgtccccgccttctgtgggaaggatgtgcgcgcggatggccggtcgcacaacagcggcccctcgggggccctacggcccctggctctgcctcctggtggccctcgccctggacgtcgtgagagtggactgtggccaggctcccctggaccctgtctacctgccggcagccctggagctcctagacgcccctgaacacttccgtgtgcagcaggtgggccactacccacctgccaactcctctctgagctcccgatctgagacctttctgctcctacagccctggcccagggcccagccacttctccgggcctcctacccaccttttgccactcagcaggtggtcccccctcgagtcactgagccccaccaacggccagtcccatgggacgtgcgggccgtttcagtggaagcggctgtgactccagcagagccctacgcccgggttctcttccacctcaaagggcaggattggccaccagggtctggcagcctgccctgtgcccggctccatgccacacaccctgccggcactgctcaccaagcctgccgcttccagccatccctgggcgcctgcgtggtggagctggagcttccctcgcactggttctcacaggcctccaccacacgggccgagctggcctacacgcttgagcctgcagctgagggccctgggggctgtggctccggcgaggagaacgaccctggggagcaggccctcccagtggggggtgtggagctgcgcccagcagaccccccgcagtaccaggaggtacctctggacgaggctgtgactctgcgggtgcctgacatgccagtgcggcccggccagctctttagtgctaccctcctgcttcggcacaacttcacagccagcctcctgaccctgcggatcaaggtgaagaaggggctgcatgtgacagccgcccgcccagcccagcccacactctggactgccaagctggaccgcttcaagggctccaggcaccacaccaccctcatcacctgccaccgtgctgggctcacagagccagattccagtccccttgaactgtctgagttcctatgggtggactttgtggtggagaatagcactggtgggggcgtagcggtcactcgccccgtcacgtggcagctggagtacccaggccaggcccctgaagcagagaaggacaaaatggtgtgggaaatcctggtgtctgagcgggacatcagagcccttatcccactggccaaggctgaggagctggtgaatacagcaccactgactggagtgccccagcatgtccccgtgcgccttgtcactgtggacggcgggggggccttggtggaggtgacagagcatgtcggctgcgagtctgccaacacacaggtcctgcaggtgtctgaggcctgtgatgccgtgttcgtggctggcaaggagagccggggcgcccggggggtgcgagtggacttctggtggcgccggctccgcgcctcgctgcggctgaccgtgtgggcccccctgctaccgctgcgtatcgagctcaccgacaccaccctcgagcaggtccgcggctggagggtacctggccctgctgaagggcctgcggaacccgctgcagaggcgtcggatgaggccgagcggcgcgcccgtggctgccacctgcagtaccagcgggccggtgtgcgcttcctcgcccccttcgcggcccacccgctggacggcggccgccgcctcacgcacctgcttggccccgactggctgctagacgtgtcccacctcgtggcgccacacgcccgcgtgctggactcgcgtgtagcctctctggagggtggccgtgtcgtggtgggccgggagcccggtgtcacctccattgaggtgcgttccccactgtctgactccatcctgggggagcaggcgctggctgtgacggacgacaaggtctcagtgctggagctgagggtgcagccagtgatgggcatctcgctgaccttgagccggggcactgcccaccccggggaggtcacagctacgtgctgggcacagtcagcccttcccgccccaaagcaggaggtggccctctccctatggctgtccttctctgatcacactgtggccccagctgagctctacgaccgccgtgacctgggactgtccgtctcagccgaggagcctggtgccatcctgccagctgaggagcagggtgcccagctcggggtggtggtgagtggggcaggcgccgaggggctgccgctgcatgtggctctgcacccgcccgagccctgccgccggggccgccaccgtgtgcctctggcctctggcaccgcctggctggggctgccccctgcctccactccagcccctgctctcccatccagccctgcttggagcccaccagccacagaagccaccatgggtggtaaacggcaggtggcaggcagtgtcgggggcaacacaggtgtgaggggcaagtttgagcgggcagaggaggaggccaggaaggaggagaccgaagccagggaggaggaggaggaagaggaggaggagatggtccctgcccctcagcatgtcactgagctagagctgggcatgtacgccctgctgggagtcttctgcgtggccatcttcatcttcttggtcaatggtgtggtcttcgtcctgcgctatcagcgcaaagaacctcccgacagtgccactgaccccacctccccccagccccacaactgggtctggctgggcactgaccaggaggaactgagccgccagctggaccggcagtcccctggcccgcccaagggggaggggagctgcccctgtgagagtgggggaggaggggaggcccctaccctggcccctggccctcctgggggcaccaccagctcctcaagcaccctggcccgaaaggaggctggggggcggcggaagcgagtagagtttgtgacatttgcgccagcccctccagcccagtcacctgaggagcctgtaggggcccctgctgtgcagtccatccttgtggcaggcgaggaggacatccgctgggtgtgtgaggacatggggctgaaggaccctgaggagcttcgcaactacatggagaggatccggggcagctcctgaccctccacagccacctggtcagccaccagctggggcaacgagggtggaggtcccactgagcctctcgcctgcccccgccactcgtctggtgcttgttgatccaagtcccctgcctggtcccccacaaggactcccatccaggccccctctgccctgccccttgtcatggaccatggtcgtgaggaagggctcatgccccttatttatgggaaccatttcattctaacagaataaaccgagaaggaaaccaga

SEQ ID NO: 549 - protein, 1023 aa, Homosapiens
MCARMAGRTTAAPRGPYGPWLCLLVALALDVVRVDCGQAPLDPVYLPAALELLDAPEHFRVQQVGHYPPANSSLSSRSETFLLLQPWPRAQPLLRASYPPFATQQVVPPRVTEPHQRPVPWDVRAVSVEAAVTPAEPYARVLFHLKGQDWPPGSGSLPCARLHATHPAGTAHQACRFQPSLGACVVELELPSHWFSQASTTRAELAYTLEPAAEGPGGCGSGEENDPGEQALPVGGVELRPADPPQYQEVPLDEAVTLRVPDMPVRPGQLFSATLLLRHNFTASLLTLRIKVKKGLHVTAARPAQPTLWTAKLDRFKGSRHHTTLITCHRAGLTEPDSSPLELSEFLWVDFVVENSTGGGVAVTRPVTWQLEYPGQAPEAEKDKMVWEILVSERDIRALIPLAKAEELVNTAPLTGVPQHVPVRLVTVDGGGALVEVTEHVGCESANTQVLQVSEACDAVFVAGKESRGARGVRVDFWWRRLRASLRLTVWAPLLPLRIELTDTTLEQVRGWRVPGPAEGPAEPAAEASDEAERRARGCHLQYQRAGVRFLAPFAAHPLDGGRRLTHLLGPDWLLDVSHLVAPHARVLDSRVASLEGGRVVVGREPGVTSIEVRSPLSDSILGEQALAVTDDKVSVLELRVQPVMGISLTLSRGTAHPGEVTATCWAQSALPAPKQEVALSLWLSFSDHTVAPAELYDRRDLGLSVSAEEPGAILPAEEQGAQLGVVVSGAGAEGLPLHVALHPPEPCRRGRHRVPLASGTAWLGLPPASTPAPALPSSPAWSPPATEATMGGKRQVAGSVGGNTGVRGKFERAEEEARKEETEAREEEEEEEEEMVPAPQHVTELELGMYALLGVFCVAIFIFLVNGVVFVLRYQRKEPPDSATDPTSPQPHNWVWLGTDQEELSRQLDRQSPGPPKGEGSCPCESGGGGEAPTLAPGPPGGTTSSSSTLARKEAGGRRKRVEFVTFAPAPPAQSPEEPVGAPAVQSILVAGEEDIRWVCEDMGLKDPEELRNYMERIRGSS

SEQ ID NO: 550 - DNA, 2113 bp, Homosapiens
ggagttgagaattagggaggaggtggtagagtccgggtagtgagcggagggacaggaagggtagggcaagaaagggagaggggacaggagggaagggtgggccaaagcggtgagaaaggagggccagccagttgggtgggggagagggccgaggcccgggggcaggagtgcagggctctgaggcggggagaggagaggagagaagagccgcggggggcccagcccggagccaggatgcccgcgccgcgcgcccgggagcagccccgcgtgcccggggagcgccagccgctgctgcctcgcggtgcgcggggccctcgacggtggcggcgggcggcgggcgcggccgtgctgctggtggagatgctggagcgcgccgccttcttcggcgtcaccgccaacctcgtgctgtacctcaacagcaccaacttcaactggaccggcgagcaggcgacgcgcgccgcgctggtattcctgggcgcctcctacctgctggcgcccgtgggcggctggctggccgacgtgtacctgggccgctaccgcgcggtcgcgctcagcctgctgctctacctggccgcctcgggcctgctgcccgccaccgccttccccgacggccgcagctccttctgcggagagatgcccgcgtcgccgctgggacctgcctgcccctcggccggctgcccgcgctcctcgcccagcccctactgcgcgcccgtcctctacgcgggcctgctgctactcggcctggccgccagctccgtccggagcaacctcacctccttcggtgccgaccaggtgatggatctcggccgcgacgccacccgccgcttcttcaactggttttactggagcatcaacctgggtgctgtgctgtcgctgctggtggtggcgtttattcagcagaacatcagcttcctgctgggctacagcatccctgtgggctgtgtgggcctggcatttttcatcttcctctttgccacccccgtcttcatcaccaagcccccgatgggcagccaagtgtcctctatgcttaagctcgctctccaaaactgctgcccccagctgtggcaacgacactcggccagagaccgtcaatgtgcccgcgtgctggccgacgagaggtctccccagccaggggcttccccgcaagaggacatcgccaacttccaggtgctggtgaagatcttgcccgtcatggtgaccctggtgccctactggatggtctacttccagatgcagtccacctatgtcctgcagggtcttcacctccacatcccaaacattttcccagccaacccggccaacatctctgtggccctgagagcccagggcagcagctacacgatcccggaagcctggctcctcctggccaatgttgtggtggtgctgattctggtccctctgaaggaccgcttgatcgaccctttactgctgcggtgcaagctgcttccctctgctctgcagaagatggcgctggggatgttctttggttttacctccgtcattgtggcaggagtcctggagatggagcgcttacactacatccaccacaacgagaccgtgtcccagcagattggggaggtcctgtacaacgcggcaccactgtccatctggtggcagatccctcagtacctgctcattgggatcagtgagatctttgccagcatcccaggcctggagtttgcctactcagaggccccgcgctccatgcagggcgccatcatgggcatcttcttctgcctgtcgggggtgggctcactgttgggctccagcctagtggcactgctgtccttgcccgggggctggctgcactgccccaaggactttgggaacatcaacaattgccggatggacctctacttcttcctgctggctggcattcaggccgtcacggctctcctatttgtctggatcgctggacgctatgagagggcgtcccagggcccagcctcccacagccgtttcagcagggacaggggctgaacaggccctattccagcccccttgcttcactctaccggacagacggcagcagtcccagctctggtttccttctcggtttattctgttagaatgaaatggttcccataaataaggggcatgagcccttcctccc

SEQ ID NO: 551 - protein, 581 aa, Homosapiens
MPAPRAREQPRVPGERQPLLPRGARGPRRWRRAAGAAVLLVEMLERAAFFGVTANLVLYLNSTNFNWTGEQATRAALVFLGASYLLAPVGGWLADVYLGRYRAVALSLLLYLAASGLLPATAFPDGRSSFCGEMPASPLGPACPSAGCPRSSPSPYCAPVLYAGLLLLGLAASSVRSNLTSFGADQVMDLGRDATRRFFNWFYWSINLGAVLSLLVVAFIQQNISFLLGYSIPVGCVGLAFFIFLFATPVFITKPPMGSQVSSMLKLALQNCCPQLWQRHSARDRQCARVLADERSPQPGASPQEDIANFQVLVKILPVMVTLVPYWMVYFQMQSTYVLQGLHLHIPNIFPANPANISVALRAQGSSYTIPEAWLLLANVVVVLILVPLKDRLIDPLLLRCKLLPSALQKMALGMFFGFTSVIVAGVLEMERLHYIHHNETVSQQIGEVLYNAAPLSIWWQIPQYLLIGISEIFASIPGLEFAYSEAPRSMQGAIMGIFFCLSGVGSLLGSSLVALLSLPGGWLHCPKDFGNINNCRMDLYFFLLAGIQAVTALLFVWIAGRYERASQGPASHSRFSRDRG

SEQ ID NO: 552 - DNA, 3248 bp, Homosapiens
catgcgtgtcggagaggagagagcagagagagacacaggaacaagaacagcaaagggtagagcagacctgcgccaggggcgcacaacggccgtgtccacctcccggccccaagatggtgcttcccacaggcagccacgcgtagcagccagagacagctccagacatgtggctcttcttcgggatcactggattgctgacggcagccctctcaggtcatccatctccagccccacctgaccagctcaacaccagcagtgcagagagtgagctctgggagccaggggagcggcttccggtccgtctgacaaacgggagcagcagctgcagcgggacggtggaggtgcggctcgaggcgtcctgggagcccgcgtgcggggcgctctgggacagccgcgccgccgaggccgtgtgccgagcactgggctgcggcggggcggaggccgcctctcagctcgccccgccgacccctgagctgccgcccccgcctgcagccgggaacaccagcgtagcagctaatgccactctggccggggcgcccgccctcctgtgcagcggcgccgagtggcggctctgcgaggtggtggagcacgcgtgccgcagcgacgggaggcgggcccgtgtcacctgtgcagagaaccgcgcgctgcgcctggtggacggtggcggcgcctgcgccggccgcgtggagatgctggagcatggcgagtggggatcagtgtgcgatgacacttgggacctggaggacgcccacgtggtgtgcaggcaactgggctgcggctgggcagtccaggccctgcccggcttgcacttcatgcccggccgcgggcctatccaccgggaccaggtgaactgctcgggggccgaagcttacctgtgggactgcccggggctgccaggacagcactactgcggccacaaagaggacgcgggcgtggtgtgctcagagcaccagtcctggcgcctgacagggggcgctgaccgctgcgaggggcaggtggaggtacacttccgaggggtctggaacacagtgtgtgacagtgagtggtacccatcggaggccaaggtgctctgccagtccttgggctgtggaactgcggttgagaggcccaaggggctgccccactccttgtccggcaggatgtactactcatgcaatggggaggagctcaccctctccaactgctcctggcggttcaacaactccaacctctgcagccagtcgctggcagccagggtcctctgctcagcttcccggagtttgcacaatctgtccactcccgaagtccctgcaagtgttcagacagtcactatagaatcttctgtgacagtgaaaatagagaacaaggaatctcgggagctaatgctcctcatcccctccatcgttctgggaattctcctccttggctccctcatcttcatagccttcatcctcttgagaattaaaggaaaatatgccctccccgtaatggtgaaccaccagcacctacccaccaccatcccggcagggagcaatagctatcaaccggtccccatcaccatccccaaagaagttttcatgctgcccatccaggtccaggccccgccccctgaggactcagactctggctcggactcagactatgagcactatgacttcagcgcccagcctcctgtggccctgaccaccttctacaattcccagcggcatcgggtcacagatgaggaggtccagcaaagcaggttccagatgccacccttggaggaaggacttgaagagttgcatgcctcccacatcccaactgccaaccctggacactgcattacagacccgccatccctgggccctcagtatcacccgaggagcaacagtgagtcgagcacctcttcgggggaggattactgcaatagtcccaaaagcaagctgcctccatggaacccccaggtgttttcttcagagaggagttccttcctggagcagcccccaaacttggagctggccagcacccagccagccttttcagcagggcccccggctgatgacagctccagcacctcatccggggagtggtaccagaacttccagccaccaccccagcccccttcggaggagcagtttggctgtccagggtcccccagccctcagcctgactccaccgacaacgatgactacgatgacatcagcgcagcctaggccggggccagccgaggctcctggggtggctctgaccctctggcctcctgctctacctactccctttcccctttcccaccctcccagctcacctccccatggagctgagaggcctcccttggagagatggaaggaaacgttataccttgtacccctcggtctccatccatcaagccaaacctgctgccacagccctcccccggccccagatagcagccccagggaggatgctgcctccaagaggtgtgagccctctgtctcggggatgaacaagcagagtctgggctacctcttgacagctggtggaggggagttggggagctggactggatgactctggaggccccttccaaacctcaagtgtccggcgctttgattgcctgagtttctgacacttcagggcccagaggtcctgcgaggggcagaactggacccccatgccagtgctgctgcaggagggcccatatactagggtctgctgagctgttgtcactgatcggtgggcgctgggggggtagggtagcacaccagctgtcccaggctttgctccgggcggtaactgcacttgggcagggaatatagccttcctgggcacaactagctgacaatgacaggttgactgtgtacccccaaccaaggagctggggcccaaggccagtcctgccccagagacactccaagtccgccaggggcacagaccagttctgcagtgactgtccctggacaatgggtctttattctgagtttcctatggtttacaaagagggccccagcccagccccaccacagatcccagagataggggcccagtctccatgggggcaaggagcatagagatgttttccaggaaggggctcagaagctgcactaggccccgagtccccatgtgtctccttgaattgatgaggatgctcctgggagggatgcgtgactatgtggtgttgcacccggggctgcaaacgtctccgtgcagcccccagagagaggcccatgggctcagaccaggctttgttgtcctgctctgagtatcctgagattaaactgaattgctgaatgaaaaaaaaaaaaaaaaaaaaa

SEQ ID NO: 553 - protein, 668 aa, Homosapiens
MWLFFGITGLLTAALSGHPSPAPPDQLNTSSAESELWEPGERLPVRLTNGSSSCSGTVEVRLEASWEPACGALWDSRAAEAVCRALGCGGAEAASQLAPPTPELPPPPAAGNTSVAANATLAGAPALLCSGAEWRLCEVVEHACRSDGRRARVTCAENRALRLVDGGGACAGRVEMLEHGEWGSVCDDTWDLEDAHVVCRQLGCGWAVQALPGLHFMPGRGPIHRDQVNCSGAEAYLWDCPGLPGQHYCGHKEDAGVVCSEHQSWRLTGGADRCEGQVEVHFRGVWNTVCDSEWYPSEAKVLCQSLGCGTAVERPKGLPHSLSGRMYYSCNGEELTLSNCSWRFNNSNLCSQSLAARVLCSASRSLHNLSTPEVPASVQTVTIESSVTVKIENKESRELMLLIPSIVLGILLLGSLIFIAFILLRIKGKYALPVMVNHQHLPTTIPAGSNSYQPVPITIPKEVFMLPIQVQAPPPEDSDSGSDSDYEHYDFSAQPPVALTTFYNSQRHRVTDEEVQQSRFQMPPLEEGLEELHASHIPTANPGHCITDPPSLGPQYHPRSNSESSTSSGEDYCNSPKSKLPPWNPQVFSSERSSFLEQPPNLELASTQPAFSAGPPADDSSSTSSGEWYQNFQPPPQPPSEEQFGCPGSPSPQPDSTDNDDYDDISAA

SEQ ID NO: 554 - DNA, 3151 bp, Homosapiens
cccggccagacaccctcacctgcggtgcccagctgcccaggctgaggcaagagaaggccagaaaccatgcccatggggtctctgcaaccgctggccaccttgtacctgctggggatgctggtcgcttcctgcctcggacggctcagctggtatgacccagatttccaggcaaggctcacccgttccaactcgaagtgccagggccagctggaggtctacctcaaggacggatggcacatggtttgcagccagagctggggccggagctccaagcagtgggaggaccccagtcaagcgtcaaaagtctgccagcggctgaactgtggggtgcccttaagccttggccccttccttgtcacctacacacctcagagctcaatcatctgctacggacaactgggctccttctccaactgcagccacagcagaaatgacatgtgtcactctctgggcctgacctgcttagaaccccagaagacaacacctccaacgacaaggcccccgcccaccacaactccagagcccacagctcctcccaggctgcagctggtggcacagtctggcggccagcactgtgccggcgtggtggagttctacagcggcagcctggggggtaccatcagctatgaggcccaggacaagacccaggacctggagaacttcctctgcaacaacctccagtgtggctccttcttgaagcatctgccagagactgaggcaggcagagcccaagacccaggggagccacgggaacaccagcccttgccaatccaatggaagatccagaactcaagctgtacctccctggagcattgcttcaggaaaatcaagccccagaaaagtggccgagttcttgccctcctttgctcaggtttccagcccaaggtgcagagccgtctggtggggggcagcagcatctgtgaaggcaccgtggaggtgcgccagggggctcagtgggcagccctgtgtgacagctcttcagccaggagctcgctgcggtgggaggaggtgtgccgggagcagcagtgtggcagcgtcaactcctatcgagtgctggacgctggtgacccaacatcccgggggctcttctgtccccatcagaagctgtcccagtgccacgaactttgggagagaaattcctactgcaagaaggtgtttgtcacatgccaggatccaaaccccgcaggcctggccgcaggcacggtggcaagcatcatcctggccctggtgctcctggtggtgctgctggtcgtgtgcggcccccttgcctacaagaagctagtgaagaaattccgccagaagaagcagcgccagtggattggcccaacgggaatgaaccaaaacatgtctttccatcgcaaccacacggcaaccgtccgatcccatgctgagaaccccacagcctcccacgtggataacgaatacagccaacctcccaggaactcccgcctgtcagcttatccagctctggaaggggttctgcatcgctcctccatgcagcctgacaactcctccgacagtgactatgatctgcatggggctcagaggctgtaaagaactgggatccatgagcaaaaagccgagagccagacctgtttgtcctgagaaaactgtccgctcttcacttgaaatcatgtccctatttctaccccggccagaacatggacagaggccagaagccttccggacaggcgctgctgccccgagtggcaggccagctcacactctgctgcacaacagctcggccgcccctccacttgtggaagctgtggtgggcagagccccaaaacaagcagccttccaactagagactcgggggtgtctgaagggggccccctttccctgcccgctggggagcggcgtctcagtgaaatcggctttctcctcagactctgtccctggtaaggagtgacaaggaagctcacagctgggcgagtgcattttgaatagttttttgtaagtagtgcttttcctccttcctgacaaatcgagcgctttggcctcttctgtgcagcatccacccctgcggatccctctggggaggacaggaaggggactcccggagacctctgcagccgtggtggtcagaggctgctcatctgagcacaaagacagctctgcacattcaccgcagctgccagccaggggtctgggtgggcaccaccctgacccacagcgtcaccccactccctctgtcttatgactcccctccccaaccccctcatctaaagacaccttcctttccactggctgtcaagcccacagggcaccagtgccacccagggccctgcacaaaggggcgcctagtaaaccttaaccaacttggttttttgcttcacccagcaattaaaagtcccaagctgaggtagtttcagtccatcacagttcatcttctaacccaagagtcagagatggggctggtcatgttcctttggtttgaataactcccttgacgaaaacagactcctctagtacttggagatcttggacgtacacctaatcccatggggcctcggcttccttaactgcaagtgagaagaggaggtctacccaggagcctcgggtctgatcaagggagaggccaggcgcagctcactgcggcctctaagaaggtgaagcaacatgggaacacatcctaagacacatcctaagacaggtcctttctccacgccatttgatgctgtatctcctgggagcacaggcatcaatggtccaagccgcataataagtctggaagagcaaaagggagttactaggatatggggtgggctgctcccagaatctgctcagctttctgcccccaccaacaccctccaaccaggccttgccttctgagagcccccgtggccaagcccaggtcacagatcttcccccgaccatgctgggaatccagaaacagggaccccatttgtcttcccatatctggtggaggtgagggggctcctcaaaagggaactgagaggctgctcttagggagggcaaaggttcgggggcagccagtgtctcccatcagtgccttttttaataaaagctctttcatctatagtttggccaccatacagtggcctcaaagcaaccatggcctacttaaaaaccaaaccaaaaataaagagtttagttgaggagaaaaaaaaaaaaaaaaaaaaaaaaa

SEQ ID NO: 555 - protein, 495 aa, Homosapiens
MPMGSLQPLATLYLLGMLVASCLGRLSWYDPDFQARLTRSNSKCQGQLEVYLKDGWHMVCSQSWGRSSKQWEDPSQASKVCQRLNCGVPLSLGPFLVTYTPQSSIICYGQLGSFSNCSHSRNDMCHSLGLTCLEPQKTTPPTTRPPPTTTPEPTAPPRLQLVAQSGGQHCAGVVEFYSGSLGGTISYEAQDKTQDLENFLCNNLQCGSFLKHLPETEAGRAQDPGEPREHQPLPIQWKIQNSSCTSLEHCFRKIKPQKSGRVLALLCSGFQPKVQSRLVGGSSICEGTVEVRQGAQWAALCDSSSARSSLRWEEVCREQQCGSVNSYRVLDAGDPTSRGLFCPHQKLSQCHELWERNSYCKKVFVTCQDPNPAGLAAGTVASIILALVLLVVLLVVCGPLAYKKLVKKFRQKKQRQWIGPTGMNQNMSFHRNHTATVRSHAENPTASHVDNEYSQPPRNSRLSAYPALEGVLHRSSMQPDNSSDSDYDLHGAQRL

SEQ ID NO: 556 - DNA, 2711 bp, Homosapiens
tgggcgcggctgcggtttaacccgcggtggcggcggcgacggcggccctggcagggaaggatggagacgctgaaggataagaccctgcaggagctggaggagttgcagaatgactcggaggcgattgaccagctggccctggagtcccctgaggtccaggacctacagctggaacgggagatggcactggccaccaaccggagcctggcagagcggaacttggagttccagggtcccctggagatcagccgctcaaacctctcggatagataccaggagctccggaagctcgtggagcggtgccaggagcagaaggcaaagctggagaaattttcttcagcactgcagccagggaccttgttagaccttctgcaggtggaaggcatgaagatcgaagaagagtccgaggccatggctgagaagttcctggagggcgaggtgcccctggaaacgttcctggagaatttttcctccatgaggatgctgtcccacctgcgccgggttcgcgtggaaaagctccaggaagtggtgaggaagcccagggcttcccaggagctggccggcgatgcccctccaccccgtccaccacccccggtgcgcccagtcccccagggaacaccccctgtggttgaagagcagccgcagccaccattagccatgcctccctaccctttgccctacagcccatcccccagcctgcctgtgggccccactgcccatggagccctgccaccggcccctttcccagtagtgtcccagccctccttctacagcgggcctctgggccccacttacccggcagcccagcttggacccaggggtgctgcgggttactcctggtccccacagaggagcatgccaccccggccgggctatcctgggaccccaatgggtgcctctgggcctgggtaccccttgcggggaggcagggcccccagtcctggttatcctcaacagtccccataccccgcaacaggaggaaaacctccctacccaatacagcctcagctccccagctttccaggccagccccagccctcagtgcccctgcagcccccttatccccccgggcccgcccctccctatgggttcccaccaccgccggggcctgcctggcctgggtattagacacactcctggccctcggcccctccctagtcccacccacgctcaacctttggcccagccatcgccgagattcgagggtcaactggaagtggcgttggtgctccctgtggacttgcgtcggcacccagaggccttggagggacaaggcactgggcggtgtgactggtcatggcacttgctggccttctggccagaggtcctcctggaagcccctcctttcagtgcctggctgcagcggtgctagccaggctggagtccagcacctctcgccggtgtctgtgtgagtgagcgcatgtgcgcatttatgagcatctacttgcggctgcactcagggccatttgaacccagtgcagagttatctctatgaggaggccccgggtctccagccccctccatctcccctggggtttggcatatttgacatggagccccatgccaagggatgcagctgttggtgtctgtccagtccattcaaggctagcctgcccatgcactgtggcaggggttggattggagggagagaacagagttgggaaaaacaacaggtttgagtcctataaagccataatttaactccagtagctgatgtcagacaagcttgtcctatgtcctatttgagtggcagcagcgccagcccagcaagaaggctgggggttgtcaaggttgtccccagaccttgcttgcagtggttggagaacccagggggctgccttgggccctctggccagagggaagcgggcagctctagccctggagattgtggtcacattggggcttgtttaggattggagggccaggtcacctccccagccaccctcccttctctcctctggggtccccactttagggcgactttgcccgaggcccacgcatccatccactcctttagtgccttgaatctcattcacaagcagccccctcccttcccctccccttctcactctgttgatgtaatcctcccacccccagtgtccatcctaagacaggcatcaaaagaggccctaactttacttcccaaatggtgctttttaaaaaacaccatcactacattaggggcaattttttcacacctccctgtcttcagaatgtaaagggtggggattatgtctctgtttaatatgcagccccctgcactgtggggtttggggcatgttcagtaataagaatgaatacaatagacaaagggggtgtgatgagtgttaacttggttgttccagaggtaaaccaggtctcagggaagagcctggagctgctattgcttaggaagttgtacgtgccttgaaatgtccactacctgaggacgcagcatctggtgggcccggggctgctggggccaaggagggaccttgaccttctggtgcctgcccctccccggcctatgtgccatccgcgtgacgctaggtcagcgctgccggttctttaccaaatgtgcttgcttctcctaagttatttataaagagaaatcactaatggactctactggtttgagtgcttctgagctggatgaccgaccgcctgtatgtttgtgtaattaattgccataataaactttgatgagtcacataaaaaaaaaaaaaaaaaaa

SEQ ID NO: 557 - protein, 355 aa, Homosapiens
METLKDKTLQELEELQNDSEAIDQLALESPEVQDLQLEREMALATNRSLAERNLEFQGPLEISRSNLSDRYQELRKLVERCQEQKAKLEKFSSALQPGTLLDLLQVEGMKIEEESEAMAEKFLEGEVPLETFLENFSSMRMLSHLRRVRVEKLQEVVRKPRASQELAGDAPPPRPPPPVRPVPQGTPPVVEEQPQPPLAMPPYPLPYSPSPSLPVGPTAHGALPPAPFPVVSQPSFYSGPLGPTYPAAQLGPRGAAGYSWSPQRSMPPRPGYPGTPMGASGPGYPLRGGRAPSPGYPQQSPYPATGGKPPYPIQPQLPSFPGQPQPSVPLQPPYPPGPAPPYGFPPPPGPAWPGY

SEQ ID NO: 558 - DNA, 1387 bp, Homosapiens
tctccctcgagttgggacccgggaagaaccatgaagtggctgctgctgctgggtctggtggcgctctctgagtgcatcatgtacaaggtccccctcatcagaaagaagtccttgaggcgcaccctgtccgagcgtggcctgctgaaggacttcctgaagaagcacaacctcaacccagccagaaagtacttcccccagtgggaggctcccaccctggtagatgaacagcccctggagaactacctggatatggagtacttcggcactatcggcatcggaactcctgcccaggatttcaccgtcgtctttgacaccggctcctccaacctgtgggtgccctcagtctactgctccagtcttgcctgcaccaaccacaaccgcttcaaccctgaggattcttccacctaccagtccaccagcgagacagtctccatcacctacggcaccggcagcatgacaggcatcctcggatacgacactgtccaggttggaggcatctctgacaccaatcagatcttcggcctgagcgagacggaacctggctccttcctgtattatgctcccttcgatggcatcctggggctggcctaccccagcatttcctcctccggggccacacccgtctttgacaacatctggaaccagggcctggtttctcaggacctcttctctgtctacctcagcgccgatgacaagagtggcagcgtggtgatctttggtggcattgactcttcttactacactggaagtctgaactgggtgcctgttaccgtcgagggttactggcagatcaccgtggacagcatcaccatgaacggagagaccatcgcctgtgctgagggctgccaggccattgttgacaccggcacctctctgctgaccggcccaaccagccccattgccaacatccagagcgacatcggagccagcgagaactcagatggcgacatggtggtcagctgctcagccatcagcagcctgcccgacatcgtcttcaccatcaatggagtccagtaccccgtgccacccagtgcctacatcctgcagagcgaggggagctgcatcagtggcttccagggcatgaacgtccccaccgaatctggagagctttggatcctgggtgatgtcttcatccgccagtactttaccgtcttcgacagggcaaacaaccaggtcggcctggcccctgtggcttaagcctaagtctcttcagccacctcccaggaagatctggcctccgtcctatgcccactttagatgtatctaattctcctgactgttcttcccaggggagtgtgaaggtcttggccctgttccctgtcctaccaataacgtagaataaaaacataacccactgaaaaaaaaaaaaaaaaaaaaaaaaaaaaaa

SEQ ID NO: 559 - protein, 388 aa, Homosapiens
MKWLLLLGLVALSECIMYKVPLIRKKSLRRTLSERGLLKDFLKKHNLNPARKYFPQWEAPTLVDEQPLENYLDMEYFGTIGIGTPAQDFTVVFDTGSSNLWVPSVYCSSLACTNHNRFNPEDSSTYQSTSETVSITYGTGSMTGILGYDTVQVGGISDTNQIFGLSETEPGSFLYYAPFDGILGLAYPSISSSGATPVFDNIWNQGLVSQDLFSVYLSADDKSGSVVIFGGIDSSYYTGSLNWVPVTVEGYWQITVDSITMNGETIACAEGCQAIVDTGTSLLTGPTSPIANIQSDIGASENSDGDMVVSCSAISSLPDIVFTINGVQYPVPPSAYILQSEGSCISGFQGMNVPTESGELWILGDVFIRQYFTVFDRANNQVGLAPVA

SEQ ID NO: 560 - DNA, 3292 bp, Homosapiens
agccgagcccagcccgggggacccgccgccgccggtcatgtgggccggactgctccttcgggccgcctgtgtcgcgctcctgctgccgggggcaccagcccgaggctacaccgggaggaagccgcccgggcacttcgcggccgagagacgccgactgggcccccacgtctgcctctctgggtttgggagtggctgctgccctggctgggcgccctctatgggtggtgggcactgcaccctgcccctctgctccttcggctgtgggagtggcatctgcatcgctcccaatgtctgctcctgccaggatggagagcaaggggccacctgcccagaaacccatggaccatgtggggagtacggctgtgaccttacctgcaaccatggaggctgtcaggaggtggcccgagtgtgccccgtgggcttctcgatgacggaggcagctgttggcatcaggtgtacagacattgacgaatgtgtaacctcctcctgcgagggccactgtgtgaacacagaaggtgggtttgtgtgcgagtgtgggccgggcatgcagctgtctgccgaccgccacagctgccaagacactgacgaatgcctagggactccctgtcagcagagatgtaaaaacagcattggcagctacaagtgttcctgtcgaactggcttccaccttcatggcaaccggcactcctgtgtagatgtaaacgagtgtcggaggccattggagaggcgagtctgtcaccattcctgccacaacaccgtgggcagcttcctatgcacatgccgacctggcttcaggctccgagctgaccgcgtgtcctgtgaagctttcccgaaagccgtgctggccccatctgccatcctgcaaccccggcaacacccgtccaagatgcttctgttgcttcctgaggccggccggcctgccctgtccccaggacatagccctccttctggggctccagggcccccagccggagtcaggaccacccgcctgccatctcccaccccacgactacccacatcctccccttctgcccctgtgtggctgctgtccaccctgctggccaccccagtgcctactgcctccctgctggggaacctcagacccccctcactccttcagggggaggtgatggggaccccttcctcacccaggggccctgagtccccccgactggcagcagggccctctccctgctggcacctgggagccatgcatgaatcaaggagtcgctggacagagcctgggtgttcccagtgctggtgcgaggacgggaaggtgacctgtgaaaaggtgaggtgtgaagctgcttgttcccacccaattccctccagagatggtgggtgctgcccatcgtgcacaggctgttttcacagtggtgtcgtccgagctgaaggggatgtgttttcacctcccaatgagaactgcaccgtctgtgtctgtctggctggaaacgtgtcctgcatctctcctgagtgtccttctggcccctgtcagacccccccacagacggattgctgtacttgtgttccagtgagatgctatttccacggccggtggtacgcagacggggctgtgttcagtgggggtggtgacgagtgtaccacctgtgtttgccagaatggggaggtggagtgctccttcatgccctgccctgagctggcctgcccccgagaagagtggcggctgggccctgggcagtgttgcttcacctgccaggagcccacaccctcgacaggctgctctcttgacgacaacggggttgagtttccgattggacagatctggtcgcctggtgacccctgtgagttatgcatctgccaggcagatggctcggtgagctgcaagaggacagactgtgtggactcctgccctcacccgatccggatccctggacagtgctgcccagactgttcagcaggctgcacctacacaggcagaatcttctataacaacgagaccttcccgtctgtgctggacccatgtctgagctgcatctgcctgctgggctcagtggcctgttcccccgtggactgccccatcacctgtacctaccctttccaccctgacggggagtgctgccccgtgtgccgagactgcaactacgagggaaggaaggtggcgaatggccaggtgttcaccttggatgatgaaccctgcacccggtgcacgtgccagctgggagaggtgagctgtgagaaggttccctgccagcgggcctgtgccgaccctgccctgcttcctggggactgctgctcttcctgtccagattccctgtctcctctggaagaaaagcaggggctctcccctcacggaaatgtggcattcagcaaagctggtcggagcctgcatggagacactgaggcccctgtcaactgtagctcctgtcctgggcccccgacagcatcaccctcgaggccggtgcttcatctcctccagctccttttaagaacgaacttgatgaaaacacagactttacctacaagcccggcaggagctcatggtccacactcactcgctttggggctgacagccactttcccaggggagcctggggcctcccctcgactctcaccagggccttcgacccctccaggagcccccactctacctctagcttccccaggggctcctcagccacctcctgtgactccagagcgctcgttctcagcctctggggcccagatagtgtccaggtggcctcctctgcctggcaccctcctgacggaagcttcagcactttccatgatggaccccagcccctcgaagacccccatcaccctcctcgggcctcgcgtgctttctcccaccacctctagactctccacagcccttgcagccaccacccaccctggcccccagcagcccccagtgggggcttctcggggggaagagtccaccatgtaaggaggtcactgtgtccgggagactctggagagaggacctctgccagtggcccagggtgtgtgcagggcagctccaaggatgaacctggtggggatgcctgggctccctcctgcaggggccctggtgaggatggaagacccccaaggctggatgtaaccttgttcccaagaagtgtttggaatgtgctgtaagaatggaggaagtcgtttccactgtcagcatcctccctggaccgcgtggctggctcatcttttgagaagggttgggactgccaagttctcctggaggaagagttgcgtccggctgggattccactcactgggactgtaccgccaggtgtcatgcgtctctctgaggtttcctgattaaaggttgtctcggtttccc

SEQ ID NO: 561 - protein, 955 aa, Homosapiens
MWAGLLLRAACVALLLPGAPARGYTGRKPPGHFAAERRRLGPHVCLSGFGSGCCPGWAPSMGGGHCTLPLCSFGCGSGICIAPNVCSCQDGEQGATCPETHGPCGEYGCDLTCNHGGCQEVARVCPVGFSMTEAAVGIRCTDIDECVTSSCEGHCVNTEGGFVCECGPGMQLSADRHSCQDTDECLGTPCQQRCKNSIGSYKCSCRTGFHLHGNRHSCVDVNECRRPLERRVCHHSCHNTVGSFLCTCRPGFRLRADRVSCEAFPKAVLAPSAILQPRQHPSKMLLLLPEAGRPALSPGHSPPSGAPGPPAGVRTTRLPSPTPRLPTSSPSAPVWLLSTLLATPVPTASLLGNLRPPSLLQGEVMGTPSSPRGPESPRLAAGPSPCWHLGAMHESRSRWTEPGCSQCWCEDGKVTCEKVRCEAACSHPIPSRDGGCCPSCTGCFHSGVVRAEGDVFSPPNENCTVCVCLAGNVSCISPECPSGPCQTPPQTDCCTCVPVRCYFHGRWYADGAVFSGGGDECTTCVCQNGEVECSFMPCPELACPREEWRLGPGQCCFTCQEPTPSTGCSLDDNGVEFPIGQIWSPGDPCELCICQADGSVSCKRTDCVDSCPHPIRIPGQCCPDCSAGCTYTGRIFYNNETFPSVLDPCLSCICLLGSVACSPVDCPITCTYPFHPDGECCPVCRDCNYEGRKVANGQVFTLDDEPCTRCTCQLGEVSCEKVPCQRACADPALLPGDCCSSCPDSLSPLEEKQGLSPHGNVAFSKAGRSLHGDTEAPVNCSSCPGPPTASPSRPVLHLLQLLLRTNLMKTQTLPTSPAGAHGPHSLALGLTATFPGEPGASPRLSPGPSTPPGAPTLPLASPGAPQPPPVTPERSFSASGAQIVSRWPPLPGTLLTEASALSMMDPSPSKTPITLLGPRVLSPTTSRLSTALAATTHPGPQQPPVGASRGEESTM

SEQ ID NO: 562 - DNA, 4221 bp, Homosapiens
cagcggcagtggagttcgctgcgcgctgttgggggccacctgtcttttcgcttgtgtccctctttctagtgtcgcgctcgagtcccgacgggccgctccaagcctcgacatgtcgtacaactacgtggtaacggcccagaagcccaccgccgtgaacggctgcgtgaccggacactttacttcggccgaagacttaaacctgttgattgccaaaaacacgagattagagatctatgtggtcaccgccgaggggcttcggcccgtcaaagaggtgggcatgtatgggaagattgcggtcatggagcttttcaggcccaagggggagagcaaggacctgctgtttatcttgacagcgaagtacaatgcctgcatcctggagtataaacagagtggcgagagcattgacatcattacgcgagcccatggcaatgtccaggaccgcattggccgcccctcagagaccggcattattggcatcattgaccctgagtgccggatgattggcctgcgtctctatgatggccttttcaaggttattccactagatcgcgataataaagaactcaaggccttcaacatccgcctggaggagctgcatgtcattgatgtcaagttcctatatggttgccaagcacctactatttgctttgtctaccaggaccctcaggggcggcacgtaaaaacctatgaggtgtctctccgagaaaaggaattcaataagggcccttggaaacaggaaaatgtcgaagctgaagcttccatggtgatcgcagtcccagagccctttgggggggccatcatcattggacaggagtcaatcacctatcacaatggtgacaaatacctggctattgcccctcctatcatcaagcaaagcacgattgtgtgccacaatcgagtggaccctaatggctcaagatacctgctgggagacatggaaggccggctcttcatgctgcttttggagaaggaggaacagatggatggcaccgtcactctcaaggatctccgtgtagaactccttggagagacctctattgctgagtgcttgacataccttgataatggtgttgtgtttgtcgggtctcgcctgggtgactcccagcttgtgaagctcaacgttgacagtaatgaacaaggctcctatgtagtggccatggaaacctttaccaacttaggacccattgtcgatatgtgcgtggtggacctggagaggcaggggcaggggcagctggtcacttgctctggggctttcaaggaaggttctttgcggatcatccggaatggaattggaatccacgagcatgccagcattgacttaccaggcatcaaaggattatggccactgcggtctgaccctaatcgtgagacttatgacactttggtgctctcttttgtgggccagacaagagttctcatgttaaatggagaggaggtagaagaaaccgaactgatgggtttcgtggatgatcagcagactttcttctgtggcaacgtggctcatcagcagcttatccagatcacttcagcatcggtgaggttggtctctcaagaacccaaagctctggtcagtgaatggaaggagcctcaggccaagaacatcagtgtggcctcctgcaatagcagccaggtggtggtggctgtaggcagggccctctactatctgcagatccatcctcaggagctccggcagatcagccacacagagatggaacatgaagtggcttgcttggacatcaccccattaggagacagcaatggactgtcccctctttgtgccattggcctctggacggacatctcggctcgtatcttgaagttgccctcttttgaactactgcacaaggagatgctgggtggagagatcattcctcgctccatcctgatgaccacctttgagagtagccattacctcctttgtgccttgggagatggagcgcttttctactttgggctcaacattgagacaggtctgttgagcgaccgtaagaaggtgactttgggcacccagcccaccgtattgaggacttttcgttctctttctaccaccaacgtctttgcttgttctgaccgccccactgtcatctatagcagcaaccacaaattggtcttctcaaatgtcaacctcaaggaagtgaactacatgtgtcccctcaattcagatggctatcctgacagcctggcgctggccaacaatagcaccctcaccattggcaccatcgatgagatccagaagctgcacattcgcacagttcccctctatgagtctccaaggaagatctgctaccaggaagtgtcccagtgtttcggggtcctctccagccgcattgaagtccaagacacgagtgggggcacgacagccttgaggcccagcgctagcacccaggctctgtccagcagtgtaagctccagcaagctgttctccagcagcactgctcctcatgagacctcctttggagaagaggtggaggtgcataacctacttatcattgaccaacacacctttgaagtgcttcatgcccaccagtttctgcagaatgaatatgccctcagtctggtttcctgcaagctgggcaaagaccccaacacttacttcattgtgggcacagcaatggtgtatcctgaagaggcagagcccaagcagggtcgcattgtggtctttcagtattcggatggaaaactacagactgtggctgaaaaggaagtgaaaggggccgtgtactctatggtggaatttaacgggaagctgttagccagcatcaatagcacggtgcggctctatgagtggacaacagagaaggacgtgcgcactgagtgcaaccactacaacaacatcatggccctctacctgaagaccaagggcgacttcatcctggtgggcgaccttatgcgctcagtgctgctgcttgcctacaagcccatggaaggaaactttgaagagattgctcgagactttaatcccaactggatgagtgctgtggaaatcttggatgatgacaattttctgggggctgaaaatgcctttaacttgtttgtgtgtcaaaaggatagcgctgccaccactgacgaggagcggcagcacctccaggaggttggtcttttccacctgggcgagtttgtcaatgtcttttgccacggctctctggtaatgcagaatctgggtgagacttccacccccacacaaggctcggtgctcttcggcacggtcaacggcatgatagggctggtgacctcactgtcagagagctggtacaacctcctgctggacatgcagaatcgactcaataaagtcatcaaaagtgtggggaagatcgagcactccttctggagatcctttcacaccgagcggaagacagaaccagccacaggtttcatcgacggtgacttgattgagagtttcctggatattagccgccccaagatgcaggaggtggtggcaaacctacagtatgacgatggcagcggtatgaagcgagaggccactgcagacgacctcatcaaggttgtggaggagctaactcggatccattagccaagggcagggggcccctttgctgaccctccccaaaggctttgccctgctgccctccccctcctctccaccatcgtcttcttggccatgggaggcctttccctaagccagctgcccccagagccacagttcccctatgtggaagtggggcgggcttcatagagacttgggaatgagctgaaggtgaaacattttctccctggatttttaccagtctcacatgattccagccatcaccttagaccaccaagccttgattggtgttgccagttgtcctccttccggggaaggattttgcagttctttggctgaaaggaagctgtgcgtgtgtgtgtgtgtatgtgtgtgtgtgtatgtgtatctcacactcatgcattgtcctctttttatttagattggcagtgtagggagttgtgggtagtggggaagagggttaggagggtttcattgtctgtgaagtgagaccttccttttacttttcttctattgcctctgagagcatcaggcctagaggcctgactgccaagccatgggtagcctgggtgtaaaacctggagatggtggatgatccccacgccacagcccttttgtctctgcaaactgccttcttcggaaagaagaaggtgggaggatgtgaattgttagtttctgagttttaccaaataaagtagaatataagaagaaaaaaa

SEQ ID NO: 563 - protein, 1140 aa, Homosapiens
MSYNYVVTAQKPTAVNGCVTGHFTSAEDLNLLIAKNTRLEIYVVTAEGLRPVKEVGMYGKIAVMELFRPKGESKDLLFILTAKYNACILEYKQSGESIDIITRAHGNVQDRIGRPSETGIIGIIDPECRMIGLRLYDGLFKVIPLDRDNKELKAFNIRLEELHVIDVKFLYGCQAPTICFVYQDPQGRHVKTYEVSLREKEFNKGPWKQENVEAEASMVIAVPEPFGGAIIIGQESITYHNGDKYLAIAPPIIKQSTIVCHNRVDPNGSRYLLGDMEGRLFMLLLEKEEQMDGTVTLKDLRVELLGETSIAECLTYLDNGVVFVGSRLGDSQLVKLNVDSNEQGSYVVAMETFTNLGPIVDMCVVDLERQGQGQLVTCSGAFKEGSLRIIRNGIGIHEHASIDLPGIKGLWPLRSDPNRETYDTLVLSFVGQTRVLMLNGEEVEETELMGFVDDQQTFFCGNVAHQQLIQITSASVRLVSQEPKALVSEWKEPQAKNISVASCNSSQVVVAVGRALYYLQIHPQELRQISHTEMEHEVACLDITPLGDSNGLSPLCAIGLWTDISARILKLPSFELLHKEMLGGEIIPRSILMTTFESSHYLLCALGDGALFYFGLNIETGLLSDRKKVTLGTQPTVLRTFRSLSTTNVFACSDRPTVIYSSNHKLVFSNVNLKEVNYMCPLNSDGYPDSLALANNSTLTIGTIDEIQKLHIRTVPLYESPRKICYQEVSQCFGVLSSRIEVQDTSGGTTALRPSASTQALSSSVSSSKLFSSSTAPHETSFGEEVEVHNLLIIDQHTFEVLHAHQFLQNEYALSLVSCKLGKDPNTYFIVGTAMVYPEEAEPKQGRIVVFQYSDGKLQTVAEKEVKGAVYSMVEFNGKLLASINSTVRLYEWTTEKDVRTECNHYNNIMALYLKTKGDFILVGDLMRSVLLLAYKPMEGNFEEIARDFNPNWMSAVEILDDDNFLGAENAFNLFVCQKDSAATTDEERQHLQEVGLFHLGEFVNVFCHGSLVMQNLGETSTPTQGSVLFGTVNGMIGLVTSLSESWYNLLLDMQNRLNKVIKSVGKIEHSFWRSFHTERKTEPATGFIDGDLIESFLDISRPKMQEVVANLQYDDGSGMKREATADDLIKVVEELTRIH

SEQ ID NO: 564 - DNA, 2210 bp, Homosapiens
agcagctcagtgcaacggtgtgaactcagcctgtttcagagcctccacaccatgacctccaagaagctggtgaactcggtggctggctgtgctgatgacgctcttgctggcctggtggcctgcaaccccaacctgcagctcctgcagggccaccgcgtggccctccgttctgacctggacagcctcaagggccgggtggcactgctgtcgggtgggggctctggccatgagcctgcccatgctggtttcatagggaaggggatgctgactggggtcatcgcgggagctgtgttcacctccccggcagtgggcagcatcctggcagccatcagggccgtggcccaggccggcacagtggggacgctccttatcgtgaagaactacactggggatcggctcaacttcggcctggcccgggagcaggcccgggctgaaggcatcccggtggagatggtggtgattggggacgacagcgccttcactgtcctgaagaaggcaggccggcgggggctgtgcggcacggtgcttatacacaaggtggcaggtgctctggctgaggctggtgtggggctggaggagatcgcaaagcaggtgaacgtggtcgccaaggccatgggtaccctgggggtgagcttatcctcctgcagcgtccctggttccaaacccaccttcgagctctcagccgacgaggtggagctgggcctggggatccacggggaagctggtgtgcgccggataaagatggcaaccgccgatgagattgtgaaactcatgctcgaccacatgacaaacaccaccaacgcgtcccatgtgcctgtgcagcccggctcctcagttgtgatgatggtcaacaacctgggtggcctgtcattcctggaactgggcatcatagccgacgctaccgtccgctccctggagggccgcggggtgaagattgcccgtgccctggtgggcaccttcatgtcagcactggagatgcctggcatttctctcaccctcctgctggtggatgagcctctcctgaaactgatagatgctgaaaccactgcagcagcctggcctaacgtggctgcagtctccattactgggcggaagcggagccgggtagcccctgccgagccccaggaggcccctgattccactgctgcaggaggctcagcctcgaagcggatggcgctggtgctggaacgggtgtgcagcactctcctgggcctggaggaacacctgaatgccctggaccgggctgctggtgacggcgactgtggcaccacccacagccgtgcggccagagcaatccaggagtggctgaaggagggcccaccccctgccagccctgcccagctgctctccaagttgtctgtcctgctcctggagaagatgggaggctcatctggggcgctctatggcctgttcctgactgcggctgcacagcccctgaaggccaagaccagcctcccagcctggtctgctgccatggatgccggcctggaagccatgcagaagtatggcaaggctgctccaggggacaggactatgctggattctctgtgggcagcggggcaggagctccaagcctggaagagcccaggagctgatctgttacaagtcctgaccaaagcagtcaagagtgccgaagctgcagccgaggccaccaagaatatggaagctggagccggaagagccagttatatcagctcagcacggctggagcagccagaccccggggcggtggcagctgctgccatcctccgggccatcttggaggtcttgcagagctagggtgtgtgactgcctcccttggcctcagctcctctcactgctgtgctgaggtggcctttgtcacttccttctgccttccaaccctcaccttcccccggcctggccccattggcccaccctctaagttgagcaggaaatcctccaccaagcttccagaactacagacagcacccagagtgagctggagtgggtccccatgcctctccagcatgccctttccctttgcaggagggtggagtccctgggtcatgccctcccctgccagctctgggcttcagagataaggcattttccttgtgcagcctttacctggcaatcctaatttggttttaagactccctgtgaaatgctttccgcaccttaaccccagtgagcgtgaaaaagaaagttaataaactataatacatggaagcaagaaaaaaaaaaaaaaa

SEQ ID NO: 565 - protein, 575 aa, Homosapiens
MTSKKLVNSVAGCADDALAGLVACNPNLQLLQGHRVALRSDLDSLKGRVALLSGGGSGHEPAHAGFIGKGMLTGVIAGAVFTSPAVGSILAAIRAVAQAGTVGTLLIVKNYTGDRLNFGLAREQARAEGIPVEMVVIGDDSAFTVLKKAGRRGLCGTVLIHKVAGALAEAGVGLEEIAKQVNVVAKAMGTLGVSLSSCSVPGSKPTFELSADEVELGLGIHGEAGVRRIKMATADEIVKLMLDHMTNTTNASHVPVQPGSSVVMMVNNLGGLSFLELGIIADATVRSLEGRGVKIARALVGTFMSALEMPGISLTLLLVDEPLLKLIDAETTAAAWPNVAAVSITGRKRSRVAPAEPQEAPDSTAAGGSASKRMALVLERVCSTLLGLEEHLNALDRAAGDGDCGTTHSRAARAIQEWLKEGPPPASPAQLLSKLSVLLLEKMGGSSGALYGLFLTAAAQPLKAKTSLPAWSAAMDAGLEAMQKYGKAAPGDRTMLDSLWAAGQELQAWKSPGADLLQVLTKAVKSAEAAAEATKNMEAGAGRASYISSARLEQPDPGAVAAAAILRAILEVLQS

SEQ ID NO: 566 - DNA, 2994 bp, Homosapiens
ggagctttcgctgttcggggcccggcctgctccgggccctcccagcgtcgccgctagctgacttagggctcccgcccacactgcgcacggccttgctgagggccggctcgtagtgggaggcttcgcgttcacctgaacatttccgcctcctctggatgggggatgagaggcggggctgatgcatcgcagcagtcctggaccctgacttcggacttggagaagaaacgccgaggaggaacgggagttagggggttagcagcttggcgcgctgggagccggccacccctggtctccggacttcacttcccaggaggcctcgcgcgcgactggaagtgctgcgagcctataagaaggcgaggcggcacccgccgctctgctctggggcggcattgccagccggctgtaggcattcagggcagtgtcttctgcatctcctaggaacctcgggagcggcagctccggcgcctggtagcgagaggcgggttccggagatcccggcctcacttcgtcccactgtggttaggggtgagtcctgcaaatgttaagtgatttgctcaaggtgcccatttcgcaggaattggagcccaggccagttctctgagcctatcattagggctaaaggagtgcgtgatcagaatggtgtctggacggttctacttgtcctgcctgctgctggggtccctgggctctatgtgcatcctcttcactatctactggatgcagtactggcgtggtggctttgcctggaatggcagcatctacatgttcaactggcacccagtgcttatggttgctggcatggtggtattctatggaggtgcgtcactggtgtaccgcctgccccagtcgtgggtggggcccaaactgccctggaaactcctccatgcagcgctgcacctgatggccttcgtcctcactgttgtggggctggttgctgtctttacgtttcacaaccatggaaggactgccaacctctactcccttcacagctggctgggcaccaccactgtcttcctcttcgcctgccagtggttcctgggctttgctgtcttcctcctgccctgggcgtccatgtggctgcgcagcctcctaaaacctatccacgtcttttttggagccgccatcctctctctgtccatcgcatccgtcatttcgggcattaatgagaagcttttcttcagtttgaaaaacaccaccaggccataccacagcctgcccagtgaggcggtctttgccaacagcaccgggatgctggtggtggcctttgggctgctggtgctctacatccttctggcttcatcttggaagcgcccagagccggggatcctgaccgacagacagcccctgctgcatgatggggagtgaagcagcaggaaggggctcccaagagctcctggtggtgcagcctgtgctcccctcagaagctctgctcttcccagggctcccggctggtttcagcaggcgactttcttccaatgctgggcccagacttcttgcctgggtgctggcctgccctctccggccgcttgctgcctgtctgctttccttggtggctttgcctgggtgctgggcctgccctctccggccgcttgctgcctgtctgctttccttggtggctttgcctgggtgctgggcctgccttctctggctgcttgctgcctgtctgctttccttggtggctttggcttctgcactccttggcgtcagcctctcaggtcctccattcacacgaggtcctcctcgctctggccgctcttgctgctcctgtctgaagaaatcagactgatttcctcttaagactcctagggatgtggtgaagagctgggactcaagtgcagtccacggtgtgaaacatgagggaggtgaggtgtccgtccacttcccccataaaggtgtgcatttcagttaggctgccccgccacagagcaggcttcatctgctctgccatccagccccatctggatgtgaggtggggtggagacatcatggggtgattgcagaaagggggagtggcggcccacgcagcttctgctgaggagctgaccgctctgagctgttctgtttcgtattgctgctctgtgtctgcatgtattgtgaccgtgcggctccacctcttccagctgctgctacagctgaggcctggatcccggcctttccctgtgacttacgtgtctgtcaccggcaggcagccctacaaatcctggtgacctgctctcccaagaacagagcctgtccccagatgtcccagtagcgatgagtaacagaggtggctgtggacttcctctacttctccttgctggatcagggccttcctgcctcccgctgggcaggtctggccttgctctcttggcagggccccagcccctctgaccactctgcagctcaccatgcagctgatgccaaagttgtggtgtccagtgtgcagcagccctgggagccactgccaccttcagaggggttccttgctgagacccacattgcttcacctggccccaccatggctgcttgcctggcccaacctagcgttctgtgccatgctagagcttgagctgttgctcttcttcaggggaggaaatagggtggagagcgggaagggtcttgctcctaagtgttgctgctgtggcttttttgccttctccaaagacgcactgccaggtcccaagcttcagactgctgtgcttagtaagcaagtgagaagcctggggtttggagcccacctactctctggcagcatcagcatcctactcctggcaacatcaggccaacgtccaccccagcctcacattgccagatgttggcagaagggctaatattgaccgtcttgactggctggagccttcaaagccactgggatgtcctccaggcacctgggtcccatgaccagctccccgtctccataggggtaggcatttcactggtttatgaagctcgagtttcattaaatatgttaagaatcaaaaaaaaaaaaaaaaaaaaaaaaaaaaaaaaaaaaaa

SEQ ID NO: 567 - protein, 242 aa, Homosapiens
MVSGRFYLSCLLLGSLGSMCILFTIYWMQYWRGGFAWNGSIYMFNWHPVLMVAGMVVFYGGASLVYRLPQSWVGPKLPWKLLHAALHLMAFVLTVVGLVAVFTFHNHGRTANLYSLHSWLGTTTVFLFACQWFLGFAVFLLPWASMWLRSLLKPIHVFFGAAILSLSIASVISGINEKLFFSLKNTTRPYHSLPSEAVFANSTGMLVVAFGLLVLYILLASSWKRPEPGILTDRQPLLHDGE

SEQ ID NO: 568 - DNA, 2616 bp, Homosapiens
aagctcagctttctgtttagttgtgagattgcatactcaagaagaggaggaacataaaatacgtgatgtcttctcttaagtcaatcgcaggccactctgctgagcatcttctcccaggagtaccagaaacacattaaaagaacacatgccaaacatcatacttcggaagcaattgaaagttattaccagaggtacgtgaatggagtggtgaaaaatggagctgccccagtgctcctggacctggccaatgaggtggactatgcgccctcattaatggctcggcttatactggagaggtttctacaggaacacgaggaaactccaccctccaagtctattataaatagtatgctacgggacccttctcagattccagatggagttctagcaaatcaggtctatcagtgcattgtgaacgactgctgttacggaccactagtggactgcatcaagcatgccattggtcatgagcatgaggtcctgctgagagacttgcttctagagaaaaacctgtccttcctagatgaagatcagcttcgtgcaaagggttatgacaaaacaccagacttcattttacaagtaccagttgctgtagaagggcacataattcactggattgaaagcaaagcctcatttggtgatgaatgtagccaccacgcctacctgcatgaccagttctggagctactggaatagatttgggccaggcttagtcatctattggtatggatttatccaggagctggactgcaaccgggaaaggggcatcctgctcaaagcctgtttccccacgaacattgtcaccttatgccacagcatagcttgaccctgaagatcctggaagagaagctgggaggaaaaggtgaatccggaagcaattttactttcctgcactgtaagatcctggcaacatctgccctgaacttcagctgaactcttgctgcccgtagtcacaccactacctctttagacaaacatatcaagagtttctgttttccttcatcccttgctgatgtgaacagccaagaactacagacacaacccactcattatcagcatttctgtctctgtcaaacaattagtttatagatagtcataatctttctttcttccggatggtttatccttgtatgctgaacaaaagaaaaaatgtgaagactgaaaggtgtgatttttcaattctcctcccagttaccgaatcaccctcttatttttttttccctaagcctccgttcactgtctctccctctccctttctcttcatgtgcactcacagagacccagcattgcattaccatcgtggaataatctagcgcaaacctaggaaagctgaagccacaaagtccaaagccacctttgtactcacctgcagagctccagaagaccttgatggcagcctgcctatgctgtgtgtttgctatattcaatctttacggcttcctgacttctgtgacagtaagccaagtgcaaaaatacacttgatgagaatttcctcttttaataatgttatttgaacaccacatattttagatttatcttatttgaaagtattagttccattgtgcctggaaaccacactcctttagattgggggccgagaggcgacaacccaacattgaggagagtttatttttaaacatggctagttgtcagtatgtacgtgagctagtatttttatgagtcgagttttttaaaggcacattctgtatactgcttagtatatgcattttataccatgtaattataaaacactcgagtaagttcagcattagaaatgtttagctttgtatgaactgagtgtgccagaaataaacctggagcaatttttaaataagcaaaataaaggagatttttctatttgttcactttaatttattcacttttgtgtacttttatgtactgcaaatcagatttcagtctaaagcgaaacatcagtaagttaataataaacctatctttcgggaagttgaatattaatctgtacccaaaacgtatttagtaaaatatttgcccccgccaccctgccatgctgacataacaacttttataatgttgaatagatgatatgggaaatactaataacaacaatgtaatttttgcagacagctttaacttatatacattgcttgatttttttcaaaagactaaatatgtcatttatactttgtttattttctaccaaagaaggtttgtaaaaatatgcctgctgcttttccttttgaaggacacaaacctggtcccaacatgtgtggattttaactctgagtggggtgcattaaatcaaaagagagaggcagaagatgaaatgctaaagaagggtcaggcaaacttctgtttcagtataaaattcatcatgcaggcttctgagtgaaatagaatgatttgaaaccactactgtattgcctggatacacacacacacacacacacactttatacaaaaatgttaaaagcaggtttcctggcatgttctaaactgttttttctttaggaataaattacatttatctgcacagatgttgaaaatcctgttaaacccttgtcaaggatttgtttattttacattaaacaaatttattatgatgaacgtgaacaaataaattaaaaaataaaaaagg

SEQ ID NO: 569 - protein, 183 aa, Homosapiens
MARLILERFLQEHEETPPSKSIINSMLRDPSQIPDGVLANQVYQCIVNDCCYGPLVDCIKHAIGHEHEVLLRDLLLEKNLSFLDEDQLRAKGYDKTPDFILQVPVAVEGHIIHWIESKASFGDECSHHAYLHDQFWSYWNRFGPGLVIYWYGFIQELDCNRERGILLKACFPTNIVTLCHSIA

SEQ ID NO: 570 - DNA, 1470 bp, Homosapiens
cgaagatggcggggcgaagtctgtgtctcacgagaagcagcgttccagggactccgttcccgccacccgttcagcaaccctctacacctggacccgacctcctcgccttggaggaagaatataagcgtttaaatgcagaattgcaggcaaaaacagctgacgtggttcaacaagctaaggaaataataagagatcggcaagaagtacgatctaggcctgtttcaacacaaatgaaatcatgtgatgacgaagatgattacagtttaagaggtctgttaccatctgaagggatagttcatcttcattcagaaactaagccaaagaccaaaaacattgatcctgtaaacaaggttcaaaacaaattacactctgcaaataaaggaaggaaaacaaattcaagtgttaaattgaaatactctgatgtccaaactgccgacgatgttgccattccagaggatttctcagacttttcccttgcaaaaacaattagcaaaattgaagggcaactggaggaagaaggcttacctgaatatatagatgatattttttctggtgttagtaatgacattggaacagaagcacagatcagatttctaaaggccaaactccatgttatgcaggaggaattggataatgttgtatgtgaatgcaataaaaaggaggatgaaattcagaatttaaagtctcaagtaaaaaattttgaagaagattttatgagacagcagcgaacaattaatatgcaacagtctcaagtagaaaaatacaaaactcttttcgaagaagcaaacaaaaagtatgatggattacagcaacagttgtcttcagtagaaagggaattagaaaataaaagaagactgcaaaaacaggctgcaagtagtcaaagtgccacagaggttcgcttgaatagagctctagaagaagcagaaaagtataaactggagttaagtaaattaaggcaaaataacaaggacatagcaaatgaagaacacaaaaaaattgaagtgttaaaatcagaaaacaagaagctagaaaaacaaaaaggagaattaatgatagggttcaagaaacagttaaaattaattgatgttttaaaaaggcaaaagatgcatattgaagctgccaagatgctatctttcactgaggaggaatttatgaaagcacttgaatggggaaattcataagtgatctacttcagttagtctctatgacaataagaaaactaaggctcagagaaaaagccaaaactagtacttgcatgacacctagtcaagtcctagtagtattcgactttcattttgtggatcaatttttatttggaaaatagcagcaattctcgtaggagtcagattaaaacgtctacaactaccttgaataacttcaactatcaggataattaaaactgcaaaccactggaaaaaaaaaaaaaaaaaaaaaaaaaaaaaaaaaaaaaaaaaaaaaaaaaaaaaaaaa

SEQ ID NO: 571 - protein, 391 aa, Homosapiens
MAGRSLCLTRSSVPGTPFPPPVQQPSTPGPDLLALEEEYKRLNAELQAKTADVVQQAKEIIRDRQEVRSRPVSTQMKSCDDEDDYSLRGLLPSEGIVHLHSETKPKTKNIDPVNKVQNKLHSANKGRKTNSSVKLKYSDVQTADDVAIPEDFSDFSLAKTISKIEGQLEEEGLPEYIDDIFSGVSNDIGTEAQIRFLKAKLHVMQEELDNVVCECNKKEDEIQNLKSQVKNFEEDFMRQQRTINMQQSQVEKYKTLFEEANKKYDGLQQQLSSVERELENKRRLQKQAASSQSATEVRLNRALEEAEKYKLELSKLRQNNKDIANEEHKKIEVLKSENKKLEKQKGELMIGFKKQLKLIDVLKRQKMHIEAAKMLSFTEEEFMKALEWGNS

SEQ ID NO: 572 - DNA, 1945 bp, Homosapiens
acttttggtcgagcggagggcgcgcagctccaccgttgccaagacgccgcgtaaacacccgagcgcgcgcagccaggtgcgctccttggggctgctggctgctgcgtttgcggcgggaggtggtggccgcggtcccacgagaaggggtatttttcgtcagccaagatgggttccaaaaggagaaatttgagctgtagtgaaaggcatcagaaattagtagatgaaaactactgcaaaaaattacatgtccaagctctaaaaaacgtcaacagtcaaatcaggaatcaaatggtgcagaatgaaaatgataaccgtgttcagcgcaagcaatttctcagattattacaaaatgaacaatttgagttggatatggaagaggccattcaaaaggcagaagaaaacaagagattgaaagaactccagctcaaacaagaagaaaaactggctatggaattggcaaaactgaaacatgaaagtctaaaggacgaaaagatgaggcaacaagtaagagaaaacagcattgagcttagagaattggagaagaaattaaaagcagcttacatgaataaagaaagggcagctcagattgctgaaaaggatgccattaaatatgaacaaatgaaacgtgatgctgaaatagccaaaaccatgatggaagaacacaagagaataataaaggaagagaatgctgcagaagacaaacgaaacaaagcgaaagcacagtactatcttgacttagagaaacaacttgaagaacaagaaaaaaaaaagcaggaagcttatgagcagctgctaaaagagaaactcatgattgatgaaattgttaggaagatctatgaagaagatcagttggaaaaacaacaaaagttagaaaaaatgaatgcaatgcgaaggtatatagaagagtttcagaaagagcaggctctctggagaaaaaagaaacgtgaggagatggaagaagaaaacagaaaaatcatagagtttgctaacatgcagcagcaaagagaagaagatcggatggcaaaagttcaagaaaatgaggagaaaaggctacagcttcagaatgcgttgacacagaaattagaagaaatgctgcggcaacgtgaagatttggaacaagtgcgacaagaattataccaggaagaacaagctgaaatatataagagcaagctaaaagaagaagcagaaaagaaattgagaaagcaaaaagagatgaagcaagattttgaagaacaaatggccttgaaggaattagtgctacaggctgcaaaagaggaagaggagaactttagaaaaactatgctagctaaatttgctgaggatgatcgaatagaattaatgaatgctcagaaacaaagaatgaagcagctggaacacaggagggctgtggaaaaacttattgaagagcgtcgccaacaattccttgcagacaaacaacgtgaactagaagagtggcagttgcagcaaaggcggcaaggatttattaatgcaattattgaagaagaaaggctaaaacttcttaaagagcatgctacaaacttactaggctatctccctaaaggagtatttaaaaaagaggatgatattgatctgcttggtgaagagttcaggaaagtatatcaacaaaggagtgaaatttgtgaagagaaatgatatcatcaaaattgggtaaagcatagattttttgtatgttaccactagatgtcagcataacttttgttttacagctcagtggcattaggtatccattgtctgtttggattttgtaaatcatcactgaatttcataacttgtaaacaattatcagatacaaattaattttaatcaagctgttatttttgtactgataatttcaaaatccgatttctacaacactacagagcactgtttgcatccccatcctcaagacagtatatttaccttgactaatacagaactctacccc

SEQ ID NO: 573 - protein, 495 aa, Homosapiens
MGSKRRNLSCSERHQKLVDENYCKKLHVQALKNVNSQIRNQMVQNENDNRVQRKQFLRLLQNEQFELDMEEAIQKAEENKRLKELQLKQEEKLAMELAKLKHESLKDEKMRQQVRENSIELRELEKKLKAAYMNKERAAQIAEKDAIKYEQMKRDAEIAKTMMEEHKRIIKEENAAEDKRNKAKAQYYLDLEKQLEEQEKKKQEAYEQLLKEKLMIDEIVRKIYEEDQLEKQQKLEKMNAMRRYIEEFQKEQALWRKKKREEMEEENRKIIEFANMQQQREEDRMAKVQENEEKRLQLQNALTQKLEEMLRQREDLEQVRQELYQEEQAEIYKSKLKEEAEKKLRKQKEMKQDFEEQMALKELVLQAAKEEEENFRKTMLAKFAEDDRIELMNAQKQRMKQLEHRRAVEKLIEERRQQFLADKQRELEEWQLQQRRQGFINAIIEEERLKLLKEHATNLLGYLPKGVFKKEDDIDLLGEEFRKVYQQRSEICEEK

SEQ ID NO: 574 - DNA, 1394 bp, Homosapiens
gacatcgacctagtggtgtttgggaagtgggagaacctacccctctggactctggaagaagctcttcggaaacacaaagtcgcagatgaggattcggtgaaagttttagacaaagcaactgtacctattattaaattaacagattcttttactgaagtgaaagttgatatcagctttaatgtacagaatggcgtgagagcagctgacctcatcaaagattttaccaagaaatatcctgtattgccatacttggttttagtattgaaacaattcctattgcagagggaccttaatgaagtatttacaggtggaattggttcttatagtctctttttaatggcagtcagtttccttcagttacatcccagggaagatgcttgcatccccaatacaaactatggtgttctcttaatagaattttttgaattatatggacgacacttcaattatttaaagactggcatccggataaaggatggtggttcatatgtggccaaagatgaagtacagaaaaatatgctagatggctacaggccatcaatgctttatatcgaagatcctttacaaccaggtaacgatgttggaaggagttcatatggggccatgcaagtgaagcaggcctttgattatgcctacgttgttttgagtcatgctgtatcaccaatagcaaagtactatcccaacaatgaaacagaaagcatactaggtagaataattagagtaacagatgaagttgccacatatagagattggatatcaaagcagtggggcttgaagaatagacctgagccttcatgcaatggaaatgaaactcttcatcaggtccagtgtcgtcctcttctgccacacagtccagctctagtgacgtagattccgatgcaacaccatgcaaaaccctgaaacagctgctttgccgtccgtccactgggaaccgagtagggtcgcaagatgtatccttggagtcctctcaggcagttgggaaaatgcaaagcacccaaaccactaacacatccaacagcaccaacaaatctcagcatggatcagcaaggctctttcgttcttccagcaaaggcttccaaggtacaactcaaacaagccatggttccttgatgacaaacaaacaacatcaaggcaaatccaataatcagtattaccatggcaaaaagaggaaacacaagagggacgcgcccctctcagacctctgtagatagtcagcgctgcgcggtggactgtcttctctgtgcaatgatctcatgctcaggacagttgcgcagggactcctgggagatattcaggagcctcacactgttcagacgttgacttagcaactgcgttttttcccagctcgccacagaatggatcatgaagactgacaactgcaaaaaaaacaaaac

SEQ ID NO: 575 - protein, 177 aa, Homosapiens
MAVSFLQLHPREDACIPNTNYGVLLIEFFELYGRHFNYLKTGIRIKDGGSYVAKDEVQKNMLDGYRPSMLYIEDPLQPGNDVGRSSYGAMQVKQAFDYAYVVLSHAVSPIAKYYPNNETESILGRIIRVTDEVATYRDWISKQWGLKNRPEPSCNGNETLHQVQCRPLLPHSPALVT

SEQ ID NO: 576 - DNA, 6157 bp, Homosapiens
gagctgaggaactgcgtgtggagtcagcccagtctggatgcacaggaggatgctggcggcacagtgagtgaggcctggtgccagagctgtgcggaccccttgttggccatggagcagcaggcccagaggccctctccccagccctgcttgcctgcctcggagaggacagaggcctaggcccacgggggagggtgttggcagacagatgccctccaggccctggggcctccttaacggccccttaacgacacgcgtgccaagggtggaggatgccagccaaggggcgctacttcctcaacgagggcgaggagggccctgaccaagatgcgctctacgagaagtaccagctcaccagccagcatgggccgctgctgctcacgctcctgctggtggccgccactgcctgcgtggccctcatcatcattgccttcagccagggggacccctccagacaccaggccattctgggcatggcgttcctggtgctggcggtgtttgcggccctctctgtgctgatgtacgtcgagtgtctcctgcggcgctggctcagggccttggcgctgctcacctgggcctgcttggtggcgctgggctatgtgctggtgttcgacgcatggacaaaggcggcctgtgcgtgggagcaggtgcccttcttcctgttcattgtcttcgtggtgtacacactactgcccttcagcatgcggggcgctgtcgccgttggggccgtctccactgcctcccacctcctggtgctcggttctttgatgggaggcttcacgacacccagtgtccgggtggggctgcagctgctggccaacgcagtcatcttcctgtgtgggaacctgacaggcgccttccacaagcaccaaatgcaggatgcgtcccgggacctcttcacctacactgtgaagtgcatccagatccgccggaagctgcgcatcgagaagcgccagcaggagaacctgctgctgtcagtgcttccggcccacatctccatgggcatgaagctggccatcatcgaacggctcaaggagcatggtgaccgtcgctgcatgcctgacaacaacttccacagcctctacgtcaagaggcaccagaatgtcagcatcctctatgcggacatcgtgggcttcacgcagctggccagcgactgttctcccaaggagctggtggtggtgctgaatgagctctttggcaagttcgaccagatcgccaaggccaacgagtgcatgcgaatcaagatcctcggcgactgctactactgtgtatcgggcctgcccgtgtcgctgcctacccacgcccggaactgcgtgaagatggggctggacatgtgccaggccatcaagcaggtgcgggaggccacgggcgtggacatcaacatgcgtgtgggcatacactcggggaatgtgctgtgcggggtcatcgggctgcgcaagtggcagtatgacgtgtggtcccacgacgtgtccctggccaaccggatggaggcagccggagtacccggccgggtgcacatcacggaggccacgctaaagcacctggacaaggcgtacgaggtggaggatgggcacgggcagcagcgggacccctacctcaaggagatgaacatccgcacctacctggtcatcgacccccggagccagcagccacccccgcccagccaacacctccccaggcccaagggggacgcggccctgaagatgcgggcgtcagtgcgcatgacccggtacctcgagtcctggggggcggcacggccctttgcacatctcaaccaccgtgagagcgtgagcagtggtgagacccacgtccccaacgggcggaggcctaagagcgttccccagcgccaccgccggaccccagacagaagcatgtcccccaaggggcggtcggaggatgactcgtacgatgacgagatgctgtcagccattgaggggctcagctccacgaggccctgctgctccaagtccgatgacttctacacctttgggtccatcttcctggagaagggctttgagcgcgagtaccgcctggcacccatcccccgggcccgccacgactttgcctgcgccagcctgatcttcgtctgcatcctgctcgtccatgtcctgctcatgcccaggacggcggcactgggtgtgtccttcgggctggtggcctgtgtactggggctggtgctgggcctgtgctttgccaccaagttctcgaggtgctgcccagctcgggggacgctctgcactatctctgagagggtggagacacagcccctgctgaggctgaccctggccgtcctgaccatcggcagcctgctcactgtggccatcatcaacctgcccctgatgcctttccaagttccagagctgcctgttggcaatgagacaggcctactggccgcgagcagcaagacaagagccctgtgtgagcccctcccgtactacacctgcagctgtgtcctgggcttcatcgcctgctcggtcttcctgaggatgagcctggagccaaaggttgtgctgctgacagtggccctggtggcctacctggtgctcttcaacctctccccatgctggcagtgggactgctgcggccaaggcctgggcaacctcaccaagcccaacggcaccaccagtggcacccctagctgttcctggaaggacctgaagaccatgaccaatttctacctggtcctgttctacatcaccctgcttacactctccagacagattgactattactgccgcttggactgcctatggaagaagaagttcaagaaggagcacgaggagtttgagaccatggagaacgtgaaccgccttcttctggagaacgtcctgccagcccacgtggctgcccactttatcggtgacaagttaaacgaggactggtaccatcagtcctatgactgcgtctgtgtcatgtttgcctccgtgccggacttcaaagtgttctacacagagtgcgatgtcaacaaagaagggctggagtgcctacgcctgctcaatgagatcattgccgacttcgacgagctcctactgaagcccaagttcagcggcgtggagaagatcaagaccatcggcagcacgtacatggcagctgcagggctcagcgtcgcctcagggcacgagaaccaggagctggagcggcagcatgcccacattggtgtcatggtggagttcagcatcgccctgatgagtaagctggacggcatcaacaggcactccttcaactccttccgcctccgcgtcggcataaaccatgggcctgtgattgctggagtgattggggcccgaaaacctcagtatgacatctggggaaacactgtcaatgtggccagccgaatggaaagcactggagaacttgggaaaatccaggttaccgaggagacctgcaccatcctccagggcctcgggtactcttgtgaatgccgtggcctgatcaacgtcaaaggcaaaggcgagctgaggacttactttgtctgtacggacactgccaagtttcaggggctggggctgaactgagggctcctgctggattccgaaaaggccgggaagccagtctccttccctgaagcaagcccaggagaagactctccgccccacgccaatcccaaaggcatgcagatggctgtgcatgttggcttctttggacctgcactggaggatttctcagacacatgcaccagattctggctcgaagcagccactgagccataatgcgcaggggaggccagaagctctgtgcctggtctgtaacagtttccaggccagctggagaatgttcactggttcggggctgactttgagatctttgttccctgaggtgccaggcaggcaactttagcacatgatgaaaacagacttccacctcagtggcctgtgggcacgcacaagtgaggtctgtttttctagacaccaagggggagtaagctgagctgtctagcacggattggagactccctctccctggtgggcctggcaatgacagcatttctcacagaggcattctggtaaatgaagctgaaaggggtgttttacatctgtaaacggtttcaaacaggtagagagaaaaacaccacaattaacactgttactttttgccttgtctggcatgtttgttttaaatgaatacattaatggggtttttatccttttgaatgacttttcagacactagacataaatctcttccctccagtgtatgctctgcctttttaaccactgacatgtaaggaggactactgtctagcatcagcttatggggtcagctggctgtggggatagagtcctgaggaatgtggtcacagcaagaaggcggggagcagcagagccttgcctttgaatgaggcagcttgtgaggcaagcattctggagagaggtgctttgaaagtaaggtgcggcctttcacctcttccttgattactcacacatctttgcgttctcccctgccgtccttcaactgtatcttacttttcttaccagaaaggaatggagtctgtttagagacaacttggacaacctgtgagtgcatctcttctttcctttagtcttcacagctaactctggagagcttcaaaactagaaggatctactccgcatgggtgcatgcagaggctcctggatctgggaagcccgccccctcacaaatgctgagccgttcttgctctgaaactgcgtgagtcaaggcaaatgcaaaaagccaggttttggggatgtgtcttactgtgcttcaacttcccaaggaattgaaagtcaacctaactgtaacaacagggtgagaaatgaccaaactgcccgtgactttttctgaatggacttcataaccggaagacttaaccggtggcctcatcaccagagcatcgccaggatttctaatgcactcagtttccctacatagcagggattcttagctaggtgtccccatgaaccccgtaaagttctacacaaagtcttgcatacaggagcctttacaagatgattatacagggttgcagattgggtgactgaccagacttgttggggtcctgggatgagttgccccgggctgcaaattaagagtacagctaagtgcgggggtggcggtggagggaacgaaaattgaacctgtctgcctgtgctgtgtcgtgtggctttatcagcccgaggaagggcaggtgtattctaatttgcacaaaggtgctgggtagactagtggcagctctcatgtgctgcacataagtggaatcagtatgaatagaagaacttgctgtataaaggaatttcatggcaacaatgctggtaagggcaattagcctcgcttaagttgccttttttacacaccaaaactttttacatgaagggctggtttcacatgaatactatactgaaatctgtgctctcaagatctagcagtgaccagggctgcccggcgggggctctcctggcaagtcaggaaggtttctgttgctaatataacatagaaacacattagtgcactgggcctctctgaggtcagcatatttgtactcttggaatatttgtttttttcttcagtaacaacagaaaccccagttgggagtttaacaaataactgactaccactcactcatgcatttttatttccaattaaagcaaagcactgtgctgtgctcagataataatagtttgtaagtaaaagtttttagttttcagtgttcaggttatagaatataactgaccataaaaattacctgcaggtattttctttttatgaacttgtttttaaattaccaagtaattactggtgtcattttgttttatgacagacacacgtatctaacaaacaaacaaacagtgaccttctccatgggtcaaggacttccttacaatttctcctgagttaacttttgtgaaaataatacctaaggttttctggcttattgaggaaatttcctaacaaacaaacaaacaaacaaacagaagagaagatcattaaccactgtatactttgtgtatataataggtcagtgtaaagaaatatgatttgaggtggtgcatgcaagtaactagggtttattctatataatgaatatttatagatctgtaacatttgtttcaaaatgctgtttcatttttataaagtaccagtgtttagctgctttttatacattaaattagcaatttgaaaaactcaaaaaaaaaaaaaaaaaa

SEQ ID NO: 577 - protein, 1080 aa, Homosapiens
MPAKGRYFLNEGEEGPDQDALYEKYQLTSQHGPLLLTLLLVAATACVALIIIAFSQGDPSRHQAILGMAFLVLAVFAALSVLMYVECLLRRWLRALALLTWACLVALGYVLVFDAWTKAACAWEQVPFFLFIVFVVYTLLPFSMRGAVAVGAVSTASHLLVLGSLMGGFTTPSVRVGLQLLANAVIFLCGNLTGAFHKHQMQDASRDLFTYTVKCIQIRRKLRIEKRQQENLLLSVLPAHISMGMKLAIIERLKEHGDRRCMPDNNFHSLYVKRHQNVSILYADIVGFTQLASDCSPKELVVVLNELFGKFDQIAKANECMRIKILGDCYYCVSGLPVSLPTHARNCVKMGLDMCQAIKQVREATGVDINMRVGIHSGNVLCGVIGLRKWQYDVWSHDVSLANRMEAAGVPGRVHITEATLKHLDKAYEVEDGHGQQRDPYLKEMNIRTYLVIDPRSQQPPPPSQHLPRPKGDAALKMRASVRMTRYLESWGAARPFAHLNHRESVSSGETHVPNGRRPKSVPQRHRRTPDRSMSPKGRSEDDSYDDEMLSAIEGLSSTRPCCSKSDDFYTFGSIFLEKGFEREYRLAPIPRARHDFACASLIFVCILLVHVLLMPRTAALGVSFGLVACVLGLVLGLCFATKFSRCCPARGTLCTISERVETQPLLRLTLAVLTIGSLLTVAIINLPLMPFQVPELPVGNETGLLAASSKTRALCEPLPYYTCSCVLGFIACSVFLRMSLEPKVVLLTVALVAYLVLFNLSPCWQWDCCGQGLGNLTKPNGTTSGTPSCSWKDLKTMTNFYLVLFYITLLTLSRQIDYYCRLDCLWKKKFKKEHEEFETMENVNRLLLENVLPAHVAAHFIGDKLNEDWYHQSYDCVCVMFASVPDFKVFYTECDVNKEGLECLRLLNEIIADFDELLLKPKFSGVEKIKTIGSTYMAAAGLSVASGHENQELERQHAHIGVMVEFSIALMSKLDGINRHSFNSFRLRVGINHGPVIAGVIGARKPQYDIWGNTVNVASRMESTGELGKIQVTEETCTILQGLGYSCECRGLINVKGKGELRTYFVCTDTAKFQGLGLN

SEQ ID NO: 578 - DNA, 2204 bp, Homosapiens
cgcccggcgcgcgccgcccccctgcctcgcggcgcggggtctcgcgggcaccggggcccggtcggacatgggcaagaagcacaagaagcacaagtcggacaaacacctctacgaggagtatgtagagaagcccttgaagctggtcctcaaagtaggagggaacgaagtcaccgaactctccacgggcagctcggggcacgactccagcctcttcgaagacaaaaacgatcatgacaaacacaaggacagaaagcggaaaaagagaaagaaaggagagaagcagattccaggggaagaaaaggggagaaaacggagaagagttaaggaggataaaaagaagcgagatcgagaccgggtggagaatgaggcagaaaaagatctccagtgtcacgcccctgtgagattagacttgcctcctgagaagcctctcacaagctctttagccaaacaagaagaagtagaacagacaccccttcaagaagctttgaatcaactgatgagacaattgcagagaaaagatccaagtgctttcttttcatttcctgtgactgattttattgctcctggctactccatgatcattaaacacccaatggattttagtaccatgaaagaaaagatcaagaacaatgactatcagtccatagaagaactaaaggataacttcaaactaatgtgtactaatgccatgatttacaataaaccagagaccatttattataaagctgcaaagaagctgttgcactcaggaatgaaaattcttagccaggaaagaattcagagcctgaagcagagcatagacttcatggctgacttgcagaaaactcgaaagcagaaagatggaacagacacctcacagagtggggaggacggaggctgctggcagagagagagagaggactctggagatgccgaagcacacgccttcaagagtcccagcaaagaaaataaaaagaaagacaaagatatgcttgaagataagtttaaaagcaataatttagagagagagcaggagcagcttgaccgcatcgtgaaggaatctggaggaaagctgaccaggcggcttgtgaacagtcagtgcgaatttgaaagaagaaaaccagatggaacaacgacgttgggacttctccatcctgtggatcccattgtaggagagccaggctactgccctgtgagactgggaatgacaactggaagacttcagtctggagtgaatactttgcaggggttcaaagaggataaaaggaacaaagtcactccagtgttatatttgaattatgggccctacagttcttatgcaccgcattatgactccacatttgcaaatatcagcaaggatgattctgatttaatctattcaacctatggggaagactctgatcttccaagtgatttcagcatccatgagtttttggccacgtgccaagattatccgtatgtcatggcagatagtttactggatgttttaacaaaaggagggcattccaggaccctacaagagatggagatgtcattgcctgaagatgaaggccatactaggacacttgacacagcaaaagaaatggagattacagaagtagagccaccagggcgtttggactccagtactcaagacaggctcatagcgctgaaagcagtaacaaattttggcgttccagttgaagtttttgactctgaagaagctgaaatattccagaagaaacttgatgagaccaccagattgctcagggaactccaggaagcccagaatgaacgtttgagcaccagaccccctccgaacatgatctgtctcttgggtccctcatacagagaaatgcatcttgctgaacaagtgaccaataatcttaaagaacttgcacagcaagtaactccaggtgatatcgtaagcacgtatggagttcgaaaagcaatggggatttccattccttcccccgtcatggaaaacaactttgtggatttgacagaagacactgaagaacctaaaaagacggatgttgctgagtgtggacctggtggaagttgaggctgcctggtatttgattatatattatgtacatactttttcattcttaacttagaaatgcttttcagaagatattaaatatttgtaaattgtgtttttaattaaactttggaacagcgaatttggatgttccagaggttggacttgtattaggtaataaagctggacctgggactcgtga

SEQ ID NO: 579 - protein, 651 aa, Homosapiens
MGKKHKKHKSDKHLYEEYVEKPLKLVLKVGGNEVTELSTGSSGHDSSLFEDKNDHDKHKDRKRKKRKKGEKQIPGEEKGRKRRRVKEDKKKRDRDRVENEAEKDLQCHAPVRLDLPPEKPLTSSLAKQEEVEQTPLQEALNQLMRQLQRKDPSAFFSFPVTDFIAPGYSMIIKHPMDFSTMKEKIKNNDYQSIEELKDNFKLMCTNAMIYNKPETIYYKAAKKLLHSGMKILSQERIQSLKQSIDFMADLQKTRKQKDGTDTSQSGEDGGCWQREREDSGDAEAHAFKSPSKENKKKDKDMLEDKFKSNNLEREQEQLDRIVKESGGKLTRRLVNSQCEFERRKPDGTTTLGLLHPVDPIVGEPGYCPVRLGMTTGRLQSGVNTLQGFKEDKRNKVTPVLYLNYGPYSSYAPHYDSTFANISKDDSDLIYSTYGEDSDLPSDFSIHEFLATCQDYPYVMADSLLDVLTKGGHSRTLQEMEMSLPEDEGHTRTLDTAKEMEITEVEPPGRLDSSTQDRLIALKAVTNFGVPVEVFDSEEAEIFQKKLDETTRLLRELQEAQNERLSTRPPPNMICLLGPSYREMHLAEQVTNNLKELAQQVTPGDIVSTYGVRKAMGISIPSPVMENNFVDLTEDTEEPKKTDVAECGPGGS

SEQ ID NO: 580 - DNA, 2604 bp, Homosapiens
gccaatgggcgcgcggggaggcgcgggccgcggcggcgggctgggggctcggcgctcccgggcgtcagtcgggccgcggcgacggcggcaggagcgcgtcccggcgccgcctcgggctccgctcggctcgggggctgcttcgggaggaggagagccaagggaggcgccaggcccgcgggccgggcgcatggcttagggacgctcccggccgccgcagccccagcatggggaaacttcactccaagccggccgccgtgtgcaagcgcagggagagcccggaaggtgacagcttcgccgtgagcgctgcctgggctcggaagggcatcgaggagtggatcgggagacagcgctgcccgggcggtgtctcgggaccccgacagctgcggttggcgggcaccataggccgaagcacccgggagctcgtgggcgacgtgttgagagacacgctcagcgaggaagaggaggacgactttcggctggaagtggccctgcctcctgagaagactgacgggctgggcagcggagatgagaagaagatggagagagtgagcgaaccctgcccaggctccaagaagcagctgaagtttgaagagctccagtgcgacgtgtccatggaggaggacagccggcaggagtggaccttcaccctgtatgactttgacaacaacggcaaggtcacccgagaggacatcaccagcttgctgcacaccatctatgaggtggtggactcctctgtcaaccactccccaacatccagcaagatgctgcgggtaaagctcaccgtggcccccgatggcagccagagcaagaggagcgtccttgtcaatcaggctgacctgcagagcgcaaggccccgagcagagaccaagcccactgaggacctgcggagctgggagaagaagcagcgagccccgctcaggttccagggtgacagccgcctggagcagtctggctgctaccaccattgcgtagatgagaacatcgagaggagaaaccactacttagatctcgccgggatagaaaactacacgtcccaatttgggcctggctccccttccgtggcccagaagtcagaactgcccccccgcacctccaatcccactcgatctcgctcccatgagccggaagccatccacatcccacaccgaaagccccaaggcgtggacccggcctccttccacttccttgacaccccaatcgccaaggtctcagagctccagcaacggctccggggcacccaggacgggagcaagcactttgtgaggtcccccaaggcccagggcaagagtgtgggtgtgggccacgtggccagaggggcaagaaacaagccccctctgggacccgccatccctgcggtgtccccctccgcccacctggctgccagcccggccctcctcccctccctagcccccctcgggcacaagaagcacaagcaccgagccaaggagagccagcagggctgccggggcctgcaggcaccactggcctcaggtggccctgtcctggggcgggagcacctgcgggagctgcccgccttggtggtgtatgagagccaggccgggcagccggtccagagacatgagcaccaccaccaccatgaacatcaccaccattaccaccacttctaccagacatagagcccctccccagggccccaccctgccatatgaaggaccccacccccgacaccacaaggcattattattctattaattattgttattatgatgattattgttattaataattattgttactccactaatatttagctagcctacatgtagaagatctatggaaacacagaactaaacttttatttatatgttgtggggactgcataactagcccaggaaatgactctggttttgagtggcctgtaatgggcagaggctccctcggggctcgggatctgcagcatctatgtggatcagcccacacccttcccagagccagggagcccttagcctcaactctgccccaccccagcctcttccaggagagcacccttacttggcccggcttccagagaccctcgaaatctccgagaagataaacagctgctacctcttagtattattctgattttattttgcccttaactgattgttatatgctacaagggatttcagtggactgcagagtgcgaacgtcttgctgttgtgtttttatgtcccaacctagaaaccttagctgtcttttctggagttgtctttcatgcttttccagtgggatcaagcccttttccccaagagtcccatctcttctgccatgcacgacatgaaaatccacttctcttccttctccttcttctctctctactttacagtgatacacacacgtatttaaggactatccctgagaccatccctctcattttggaaactgctagggagggaaccaaccacttaaacaagcgtggttttccaagatccaggcaattgtgtgctgttggttgtggtggaggatgtggcacatatatacgtacctacacggttctctaacagagctttctgtatctatagatagatgccatctgtccatttctatgtatctttctataaatatacactctcaggtatctttaaaaaaaaaaaaaaaaaa

SEQ ID NO: 581 - protein, 470 aa, Homosapiens
MGKLHSKPAAVCKRRESPEGDSFAVSAAWARKGIEEWIGRQRCPGGVSGPRQLRLAGTIGRSTRELVGDVLRDTLSEEEEDDFRLEVALPPEKTDGLGSGDEKKMERVSEPCPGSKKQLKFEELQCDVSMEEDSRQEWTFTLYDFDNNGKVTREDITSLLHTIYEVVDSSVNHSPTSSKMLRVKLTVAPDGSQSKRSVLVNQADLQSARPRAETKPTEDLRSWEKKQRAPLRFQGDSRLEQSGCYHHCVDENIERRNHYLDLAGIENYTSQFGPGSPSVAQKSELPPRTSNPTRSRSHEPEAIHIPHRKPQGVDPASFHFLDTPIAKVSELQQRLRGTQDGSKHFVRSPKAQGKSVGVGHVARGARNKPPLGPAIPAVSPSAHLAASPALLPSLAPLGHKKHKHRAKESQQGCRGLQAPLASGGPVLGREHLRELPALVVYESQAGQPVQRHEHHHHHEHHHHYHHFYQT

SEQ ID NO: 582 - DNA, 1457 bp, Homosapiens
gagctcgaaggggccatatgacactcctcccggacccctggacacacacagccctggagactggagccttggagcatggcaagtccagagcaccctgggagccctggctgcatgggacccataacccagtgcacggcaaggacccagcaggaagcaccagccactggccccgacctcccgcacccaggacctgacgggcacttagacacacacagtggcctgagctccaactccagcatgaccacgcgggagcttcagcagtactggcagaaccagaaatgccgctggaagcacgtcaaactgctctttgagatcgcttcagctcgcatcgaggagagaaaagtctctaagtttgtggtgtaccaaatcatcgtcatccagactgggagctttgacaacaacaaggccgtcctggaacggcgctattccgacttcgcgaagctccagaaagcgctgctgaagacgttcagggaggagatcgaagacgtggagtttcccaggaagcacctgactgggaacttcgctgaggagatgatctgtgagcgtcggcgcgccctgcaggagtacctgggcctgctctacgccatccgctgcgtgcgccgctcccgggagttcctggacttcctcacgcggccggagctgcgcgaggctttcggctgcctgcgggccggccagtacccgcgcgccctggagctgctgctgcgcgtgctgccgctgcaggagaagctcaccgcccactgccctgcggccgccgtcccggccctgtgcgccgtgctgctgtgccaccgcgacctcgaccgccccgccgaggccttcgcggccggagagagggccctgcagcgcctgcaggcccgggagggccatcgctactatgcgcctctgctggacgccatggtccgcctggcctacgcgctgggcaaggacttcgtgactctgcaggagaggctggaggagagccagctccggaggcccacgccccgaggcatcaccctgaaggagctcactgtgcgagaatacctgcactgagccggcctgggaccccgcagggacgctggagatttggggtcaccatggctcacagtgggctgtttggggttctttttttttatttttccttttcttttttgttatttgagacagtcttgctctgtcacccagactgaagtgcagtggctcaattatgtctcactgcagcctcaaactcctgggcacaagcaatcctcccacctcagcctcccaagtagctgggattacaggtgcacaccaccacaccaggctaatttttaattttttagtagagacagggtctctctgttgcccaggctggtctctaacttctgaccttaaatgatcttcctgcctcagcttcccaaaacactggggttacaagtgtgagccaccacccctggcctggggttcatttttaatgggaaaagccactgggggctctaactcgc

SEQ ID NO: 583 - protein, 316 aa, Homosapiens
MASPEHPGSPGCMGPITQCTARTQQEAPATGPDLPHPGPDGHLDTHSGLSSNSSMTTRELQQYWQNQKCRWKHVKLLFEIASARIEERKVSKFVVYQIIVIQTGSFDNNKAVLERRYSDFAKLQKALLKTFREEIEDVEFPRKHLTGNFAEEMICERRRALQEYLGLLYAIRCVRRSREFLDFLTRPELREAFGCLRAGQYPRALELLLRVLPLQEKLTAHCPAAAVPALCAVLLCHRDLDRPAEAFAAGERALQRLQAREGHRYYAPLLDAMVRLAYALGKDFVTLQERLEESQLRRPTPRGITLKELTVREYLH

SEQ ID NO: 584 - DNA, 4485 bp, Homosapiens
gtagacagatccaggctcaccagtcctgtgccactgggcttttggcgttctgcacaaggcctacccgcagatgccatgcctgctcccccagcctaatgggctttgatgggggaagagggtggttcagcctctcacgatgaggaggaaagagcaagtgtcctcctcggacattctccgggttgtgaaatgtgctcgcaggaggcttttcaggcacagaggagccagctggtcgagctgctggtctcagggtccctggaaggcttcgagagtgtcctggactggctgctgtcctgggaggtcctctcctgggaggactacgagggcttccacctcctgggccagcctctctcccacttggccaggcgccttctggacaccgtctggaataagggtacttgggcctgtcagaagctcatcgcggctgcccaagaagcccaggccgacagccagtcccccaagctgcatggctgctgggacccccactcgctccacccagcccgagacctgcagagtcaccggccagccattgtcaggaggctccacagccatgtggagaacatgctggacctggcatgggagcggggtttcgtcagccagtatgaatgtgatgaaatcaggttgccgatcttcacaccgtcccagagggcaagaaggctgcttgatcttgccacggtgaaagcgaatggattggctgccttccttctacaacatgttcaggaattaccagtcccattggccctgcctttggaagctgccacatgcaagaagtatatggccaagctgaggaccacggtgtctgctcagtctcgcttcctcagtacctatgatggagcagagacgctctgcctggaggacatatacacagagaatgtcctggaggtctgggcagatgtgggcatggctggacccccgcagaagagcccagccaccctgggcctggaggagctcttcagcacccctggccacctcaatgacgatgcggacactgtgctggtggtgggtgaggcgggcagtggcaagagcacgctcctgcagcggctgcacttgctgtgggctgcagggcaagacttccaggaatttctctttgtcttcccattcagctgccggcagctgcagtgcatggccaaaccactctctgtgcggactctactctttgagcactgctgttggcctgatgttggtcaagaagacatcttccagttactccttgaccaccctgaccgtgtcctgttaacctttgatggctttgacgagttcaagttcaggttcacggatcgtgaacgccactgctccccgaccgaccccacctctgtccagaccctgctcttcaaccttctgcagggcaacctgctgaagaatgcccgcaaggtggtgaccagccgtccggccgctgtgtcggcgttcctcaggaagtacatccgcaccgagttcaacctcaagggcttctctgaacagggcatcgagctgtacctgaggaagcgccatcatgagcccggggtggcggaccgcctcatccgcctgctccaagagacctcagccctgcacggtttgtgccacctgcctgtcttctcatggatggtgtccaaatgccaccaggaactgttgctgcaggagggggggtccccaaagaccactacagatatgtacctgctgattctgcagcattttctgctgcatgccacccccccagactcagcttcccaaggtctgggacccagtcttcttcggggccgcctccccaccctcctgcacctgggcagactggctctgtggggcctgggcatgtgctgctacgtgttctcagcccagcagctccaggcagcacaggtcagccctgatgacatttctcttggcttcctggtgcgtgccaaaggtgtcgtgccagggagtacggcgcccctggaattccttcacatcactttccagtgcttctttgccgcgttctacctggcactcagtgctgatgtgccaccagctttgctcagacacctcttcaattgtggcaggccaggcaactcaccaatggccaggctcctgcccacgatgtgcatccaggcctcggagggaaaggacagcagcgtggcagctttgctgcagaaggccgagccgcacaaccttcagatcacagcagccttcctggcagggctgttgtcccgggagcactggggcctgctggctgagtgccagacatctgagaaggccctgctccggcgccaggcctgtgcccgctggtgtctggcccgcagcctccgcaagcacttccactccatcccgccagctgcaccgggtgaggccaagagcgtgcatgccatgcccgggttcatctggctcatccggagcctgtacgagatgcaggaggagcggctggctcggaaggctgcacgtggcctgaatgttgggcacctcaagttgacattttgcagtgtgggccccactgagtgtgctgccctggcctttgtgctgcagcacctccggcggcccgtggccctgcagctggactacaactctgtgggtgacattggcgtggagcagctgctgccttgccttggtgtctgcaaggctctgtatttgcgcgataacaatatctcagaccgaggcatctgcaagctcattgaatgtgctcttcactgcgagcaattgcagaagttagctctattcaacaacaaattgactgacggctgtgcacactccatggctaagctccttgcatgcaggcagaacttcttggcattgaggctggggaataactacatcactgccgcgggagcccaagtgctggccgaggggctccgaggcaacacctccttgcagttcctgggattctggggcaacagagtgggtgacgagggggcccaggccctggctgaagccttgggtgatcaccagagcttgaggtggctcagcctggtggggaacaacattggcagtgtgggtgcccaagccttggcactgatgctggcaaagaacgtcatgctagaagaactctgcctggaggagaaccatctccaggatgaaggtgtatgttctctcgcagaaggactgaagaaaaattcaagtttgaaaatcctgaagttgtccaataactgcatcacctacctaggggcagaagccctcctgcaggcccttgaaaggaatgacaccatcctggaagtctggctccgagggaacactttctctctagaggaggttgacaagctcggctgcagggacaccagactcttgctttgaagtctccgggaggatgttcgtctcagtttgtttgtgagcaggctgtgagtttgggccccagaggctgggtgacatgtgttggcagcctcttcaaaatgagccctgtcctgcctaaggctgaacttgttttctgggaacaccataggtcacctttattctggcagaggagggagcatcagtgccctccaggatagacttttcccaagcctacttttgccattgacttcttcccaagattcaatcccaggatgtacaaggacagcccctcctccatagtatgggactggcctctgctgatcctcccaggcttccgtgtgggtcagtggggcccatggatgtgcttgttaactgagtgccttttggtggagaggcccggcctctcacaaaagaccccttaccactgctctgatgaagaggagtacacagaacacataattcaggaagcagctttccccatgtctcgactcatccatccaggccattccccgtctctggttcctcccctcctcctggactcctgcacacgctccttcctctgaggctgaaattcagaatattagtgacctcagctttgatatttcacttacagcacccccaaccctggcacccagggtgggaagggctacaccttagcctgccctcctttccggtgtttaagacatttttggaaggggacacgtgacagccgtttgttccccaagacattctaggtttgcaagaaaaatatgaccacactccagctgggatcacatgtggacttttatttccagtgaaatcagttactcttcagttaagcctttggaaacagctcgactttaaaaagctccaaatgcagctttaaaaaattaatctgggccagaatttcaaacggcctcactaggcttctggttgatgcctgtgaactgaactctgacaacagacttctgaaatagacccacaagaggcagttccatttcatttgtgccagaatgctttaggatgtacagttatggattgaaagtttacaggaaaaaaaattaggccgttccttcaaagcaaatgtcttcctggattattcaaaatgatgtatgttgaagcctttgtaaattgtcagatgctgtgcaaatgttattattttaaacattatgatgtgtgaaaactggttaatatttataggtcactttgttttactgtcttaagtttatactcttatagacaacatggccgtgaactttatgctgtaaataatcagaggggaataaactgttgagtcaaaac

SEQ ID NO: 585 - protein, 1040 aa, Homosapiens
MGEEGGSASHDEEERASVLLGHSPGCEMCSQEAFQAQRSQLVELLVSGSLEGFESVLDWLLSWEVLSWEDYEGFHLLGQPLSHLARRLLDTVWNKGTWACQKLIAAAQEAQADSQSPKLHGCWDPHSLHPARDLQSHRPAIVRRLHSHVENMLDLAWERGFVSQYECDEIRLPIFTPSQRARRLLDLATVKANGLAAFLLQHVQELPVPLALPLEAATCKKYMAKLRTTVSAQSRFLSTYDGAETLCLEDIYTENVLEVWADVGMAGPPQKSPATLGLEELFSTPGHLNDDADTVLVVGEAGSGKSTLLQRLHLLWAAGQDFQEFLFVFPFSCRQLQCMAKPLSVRTLLFEHCCWPDVGQEDIFQLLLDHPDRVLLTFDGFDEFKFRFTDRERHCSPTDPTSVQTLLFNLLQGNLLKNARKVVTSRPAAVSAFLRKYIRTEFNLKGFSEQGIELYLRKRHHEPGVADRLIRLLQETSALHGLCHLPVFSWMVSKCHQELLLQEGGSPKTTTDMYLLILQHFLLHATPPDSASQGLGPSLLRGRLPTLLHLGRLALWGLGMCCYVFSAQQLQAAQVSPDDISLGFLVRAKGVVPGSTAPLEFLHITFQCFFAAFYLALSADVPPALLRHLFNCGRPGNSPMARLLPTMCIQASEGKDSSVAALLQKAEPHNLQITAAFLAGLLSREHWGLLAECQTSEKALLRRQACARWCLARSLRKHFHSIPPAAPGEAKSVHAMPGFIWLIRSLYEMQEERLARKAARGLNVGHLKLTFCSVGPTECAALAFVLQHLRRPVALQLDYNSVGDIGVEQLLPCLGVCKALYLRDNNISDRGICKLIECALHCEQLQKLALFNNKLTDGCAHSMAKLLACRQNFLALRLGNNYITAAGAQVLAEGLRGNTSLQFLGFWGNRVGDEGAQALAEALGDHQSLRWLSLVGNNIGSVGAQALALMLAKNVMLEELCLEENHLQDEGVCSLAEGLKKNSSLKILKLSNNCITYLGAEALLQALERNDTILEVWLRGNTFSLEEVDKLGCRDTRLLL

SEQ ID NO: 586 - DNA, 5371 bp, Homosapiens
gggggcgggcccaggtagcaggtttggctgcgcgggggccgcgcgtcggagtttccccctttctagggtgaggatggttctacacagccacccggagttccttagttgaaaggtgcgccctgctgtgacagaatgtggtaattgtaatctttaacattttcatgtaaaacatatttcctgatcatctttccattgtcttcatggaaaattgataaatatttgtgccttccaactctcgtcttggttgaatgacttcatcttaatacaacatggacaccacgttgctgaaaacatgctttgggactgccactgaatttatcttttgcggttttatgacaaagttattagtagtttcccttttttgaattagtattttgaagttaatatcacaatgagttcaggcttatggagccaagaaaaagtcacttcaccctactgggaagagcggattttttacttgcttcttcaagaatgcagcgttacagacaaacaaacacaaaagctccttaaagtaccgaagggaagtataggacagtatattcaagatcgttctgtggggcattcaaggattccttctgcaaaaggcaagaaaaatcagattggattaaaaattctagagcaacctcatgcagttctctttgttgatgaaaaggatgttgtagagataaatgaaaagttcacagagttacttttggcaattaccaattgtgaggagaggttcagcctgtttaaaaacagaaacagactaagtaaaggcctccaaatagacgtgggctgtcctgtgaaagtacagctgagatctggggaagaaaaatttcctggagttgtacgcttcagaggacccctgttagcagagaggacagtctccggaatattctttggagttgaattgctggaagaaggtcgtggtcaaggtttcactgacggggtgtaccaagggaaacagctttttcagtgtgatgaagattgtggcgtgtttgttgcattggacaagctagaactcatagaagatgatgacactgcattggaaagtgattacgcaggtcctggggacacaatgcaggtcgaacttcctcctttggaaataaactccagagtttctttgaaggttggagaaacaatagaatctggaacagttatattctgtgatgttttgccaggaaaagaaagcttaggatattttgttggtgtggacatggataaccctattggcaactgggatggaagatttgatggagtgcagctttgtagttttgcgtgtgttgaaagtacaattctattgcacatcaatgatatcatcccagctttatcagagagtgtgacgcaggaaaggaggcctcccaaacttgcctttatgtcaagaggtgttggggacaaaggttcatccagtcataataaaccaaaggctacaggatctacctcagaccctggaaatagaaacagatctgaattattttataccttaaatgggtcttctgttgactcacaaccacaatccaaatcaaaaaatacatggtacattgatgaagttgcagaagaccctgcaaaatctcttacagagatatctacagactttgaccgttcttcaccaccactccagcctcctcctgtgaactcactgaccaccgagaacagattccactctttaccattcagtctcaccaagatgcccaataccaatggaagtattggccacagtccactttctctgtcagcccagtctgtaatggaagagctaaacactgcacccgtccaagagagtccacccttggccatgcctcctgggaactcacatggtctagaagtgggctcattggctgaagttaaggagaaccctcctttctatggggtaatccgttggatcggtcagccaccaggactgaatgaagtgctcgctggactggaactggaagatgagtgtgcaggctgtacggatggaaccttcagaggcactcggtatttcacctgtgccctgaagaaggcgctgtttgtgaaactgaagagctgcaggcctgactctaggtttgcatcattgcagccggtttccaatcagattgagcgctgtaactctttagcatttggaggctacttaagtgaagtagtagaagaaaatactccaccaaaaatggaaaaagaaggcttggagataatgattgggaagaagaaaggcatccagggtcattacaattcttgttacttagactcaaccttattctgcttatttgcttttagttctgttctggacactgtgttacttagacccaaagaaaagaacgatgtagaatattatagtgaaacccaagagctactgaggacagaaattgttaatcctctgagaatatatggatatgtgtgtgccacaaaaattatgaaactgaggaaaatacttgaaaaggtggaggctgcatcaggatttacctctgaagaaaaagatcctgaggaattcttgaatattctgtttcatcatattttaagggtagaacctttgctaaaaataagatcagcaggtcaaaaggtacaagattgttacttctatcaaatttttatggaaaaaaatgagaaagttggcgttcccacaattcagcagttgttagaatggtcttttatcaacagtaacctgaaatttgcagaggcaccatcatgtctgattattcagatgcctcgatttggaaaagactttaaactatttaaaaaaatttttccttctctggaattaaatataacagatttacttgaagacactcccagacagtgccggatatgtggagggcttgcaatgtatgagtgtagagaatgctacgacgatccggacatctcagctggaaaaatcaagcagttttgtaaaacctgcaacactcaagtccaccttcatccgaagaggctgaatcataaatataacccagtgtcacttcccaaagacttacccgactgggactggagacacggctgcatcccttgccagaatatggagttatttgctgttctctgcatagaaacaagccactatgttgcttttgtgaagtatgggaaggacgattctgcctggctcttctttgacagcatggccgatcgggatggtggtcagaatggcttcaacattcctcaagtcaccccatgcccagaagtaggagagtacttgaagatgtctctggaagacctgcattccttggactccaggagaatccaaggctgtgcacgaagactgctttgtgatgcatatatgtgcatgtaccagagtccaacaatgagtttgtacaaataactggggtcatcgggaaaggcaaagaaactgaaggcagagtcctaacgttgcatcttattcgagctggcagttctgttcacgtccattgccggcaatggatgtctttgtggtgatgatccttcagaaaaggatgcctctgtttaaaaacaaattgcttttgtgtccctgaagtatttaataagaagcattttgcactctagaaagtatgtttgtgttggttttttaagaagtctaaatgaagttattaatacctgaagctttaagttaagtgcattgatcatatgatatttttggaagcatacaattttaattgtggaagtttaaagcctcttttagtccattgagaatgtaaataaatgtgtcttctttatggaccaaggatatgaaatcatttttcttttgtagctaacggttgccttgaggaagaaataatttggttttattaagagtctactctcaatccagttattagagatgtactgagtttgatttgttaatcctttctatatactgctgatcttgcatgtctacaatctgctcagtttttctgtgtttctgcaatagtggtcagaaaaatacttaaattcccttaatggtgttgttttctatttgttctggttttgagataaatgagtgattctgtccccaaatgtccatttttgaagtgattttcctggaggattagggtatttagcagttgaagctcttcattcatagtagttactgtcagctaacaggttttttaaggcttttaactattaatattttatggaatggggcaaagtaaattgatgaaagaattggagtgataatagtcctttacaaacatacagtccataagaaaatgaatttggcatatagaattattacaatttcctgggagagatggatatttaaacctctattattttagacaagactgtctagaacttaagtttgatctgtcagccagtactcccattaaattcagtgtagtttcacttgatagaatcagatatgttatcgaaatgttagcagcagcttcatcctccttctgattaaagtaagtagaaatgggatgttttgtttaataacagccatagtgtgtgtttagaccacagcggatgttgtagaccaggaccatagatgatacatgtcagtgctgtggaatgtgcattctctgagtgttgttttgtggtatcattgtctttcctgaatgactttctaactgtgcagaaaggcagaaaagtcatcatatgtatatgtcatatgactttataaaatatttaatgtgacaaaaagtggaaagaatctttacaaaccctgcaattacttttttaaaggcacttttactctttggttttatcattccattttgctaatatttactagctttataaattacagtaaggtacaaaaactcatcttgtaatattttcatttttgaagtgaaaaagtacatatattttgcacaaggttttatactgctaagtgcttggttggggtggtgagatgatgattagatcaggggtgaggctgagagactctgggtttagggctagccctgcctccatctcccttgggtaaaatgaagggtgtggggtaaaagatgcataaggccttttctagctctgacagcctagaagtccaatcaccctgtaataaatatgtgttgaatgaagaaatgggtgaatgagcttgtcaatgtgattttaaaaaattgactacctggaggaatgattaggaatctaaatgaagccagccctcggtatctgcaggtttctcatccatggattcaaccaactgcaaatggaaaatacgattttttttaaaaaaaggatggttacatccgtattgaacatgtacagacttttttcttgtcattattctctgaacaatacaagaactctttatgtagcatttacatttattaggtattataagtaatctagagattatttaattaaaatatacaggaggatgtgtgtttatatgccagaaattctgtaccattttgtatcagggaattgagcatcttcagatgttggtatctgcagggatcctggaaccaaacccctgcagatactaagggctgacgatctaggtaagactggatttaacagttggaaa

SEQ ID NO: 587 - protein, 956 aa, Homosapiens
MSSGLWSQEKVTSPYWEERIFYLLLQECSVTDKQTQKLLKVPKGSIGQYIQDRSVGHSRIPSAKGKKNQIGLKILEQPHAVLFVDEKDVVEINEKFTELLLAITNCEERFSLFKNRNRLSKGLQIDVGCPVKVQLRSGEEKFPGVVRFRGPLLAERTVSGIFFGVELLEEGRGQGFTDGVYQGKQLFQCDEDCGVFVALDKLELIEDDDTALESDYAGPGDTMQVELPPLEINSRVSLKVGETIESGTVIFCDVLPGKESLGYFVGVDMDNPIGNWDGRFDGVQLCSFACVESTILLHINDIIPALSESVTQERRPPKLAFMSRGVGDKGSSSHNKPKATGSTSDPGNRNRSELFYTLNGSSVDSQPQSKSKNTWYIDEVAEDPAKSLTEISTDFDRSSPPLQPPPVNSLTTENRFHSLPFSLTKMPNTNGSIGHSPLSLSAQSVMEELNTAPVQESPPLAMPPGNSHGLEVGSLAEVKENPPFYGVIRWIGQPPGLNEVLAGLELEDECAGCTDGTFRGTRYFTCALKKALFVKLKSCRPDSRFASLQPVSNQIERCNSLAFGGYLSEVVEENTPPKMEKEGLEIMIGKKKGIQGHYNSCYLDSTLFCLFAFSSVLDTVLLRPKEKNDVEYYSETQELLRTEIVNPLRIYGYVCATKIMKLRKILEKVEAASGFTSEEKDPEEFLNILFHHILRVEPLLKIRSAGQKVQDCYFYQIFMEKNEKVGVPTIQQLLEWSFINSNLKFAEAPSCLIIQMPRFGKDFKLFKKIFPSLELNITDLLEDTPRQCRICGGLAMYECRECYDDPDISAGKIKQFCKTCNTQVHLHPKRLNHKYNPVSLPKDLPDWDWRHGCIPCQNMELFAVLCIETSHYVAFVKYGKDDSAWLFFDSMADRDGGQNGFNIPQVTPCPEVGEYLKMSLEDLHSLDSRRIQGCARRLLCDAYMCMYQSPTMSLYK

SEQ ID NO: 588 - DNA, 4668 bp, Homosapiens
atgtcgcggaggaagcaagcgaagcctcaacatttccaatccgaccccgaagtggcctcgctcccccggcgagatggagacacagaaaagggtcaaccgagtcgccctactaagagcaaggatgcccacgtctgtggccggtgctgtgccgagttctttgaattatcagatcttctgctccacaagaagaactgtactaaaaatcaattagttttaatcgtaaatgaaaatccaggctccccacccgaaaccttctcccccagcccccctcctgataatcctgatgaacaaatgaatgacacagttaacaaaacagatcaagtggactgcagcgacctttcagaacacaacggacttgacagggaagagtccatggaggtggaggccccggttgctaacaaaagcggcagcggcacttccagcggcagccacagcagtaccgccccaagcagcagcagcagcagcagcagcagcagcggcggcggcggcagctcctccacaggtacctcagcgatcacaacctctctacctcaactcggggacctgacaacactgggcaacttctccgtaatcaacagcaacgtcatcatcgagaacctccagagcaccaaggtggcggtggcccagttctcccaggaagcgaggtgcggcggggcctctgggggcaagctggccgtcccagccctcatggaacaactcctagctctgcagcagcagcagatccaccagctgcaattgatcgaacagattcgtcaccaaatattgctgttggcttctcagaatgcagacttgccaacatcttctagtccttctcaaggtactttacgaacatctgccaaccccttgtccacgctaagttcccatttatctcagcagctggcagcagcagctggattggcacagagcctcgccagccaatctgccagcattagtggtgtgaaacagctacccccaatccagctacctcagagcagttctggcaacaccatcattccatccaacagcggctcttctcccaatatgaacatattggcagcggcagttaccaccccgtcctctgaaaaagtggcttcaagtgctggggcctcccatgtcagcaacccagcggtctcatcatcgtcctcaccagcttttgcaataagcagtttattaagtcctgcgtctaatccacttctacctcagcaagcctccgctaactcggttttccccagccctttgcccaacatcggaacaactgcagaggatttaaactccttgtctgccttggcccagcaaagaaaaagcaagccaccaaatgtcactgcctttgaagcgaaaagtacttccgatgaggcattcttcaaacacaagtgcaggttctgcgcgaaggtctttgggagtgacagtgccttgcagatccacttgcgttcccataccggagagaggccattcaagtgcaacatctgcgggaacaggttctccaccaaggggaatctgaaagtccactttcagcgccacaaagagaaataccctcatatccagatgaacccctatcctgtgcctgagcatttggacaatatccccacgagtactggcatcccatatggcatgtccatccctccagagaagccagtcaccagctggctagacaccaaaccagtcctgcctactctgaccacttcagtcggcctgccgttgcccccaagcctcccaagcctcatacccttcatcaagacggaagagccagcccccatccccatcagccattctgccaccagccccccaggctcagtcaaaagtgactccgggggccctgagtcagccacaagaaatctaggtgggctcccagaggaagccgaagggtccactctgccaccctctggtggcaaaagcgaagagagtggcatggtcaccaactcagtcccgacggcgagcagtagcgtcctgagctccccagcggcagactgcggccccgcgggcagtgccaccaccttcaccaaccctttgttgccgctcatgtccgagcagttcaaggccaagtttccttttgggggactcctggactcagctcaggcatcagagacgtccaagcttcagcaactggtagaaaacattgacaagaaggccactgaccccaatgagtgcatcatctgtcaccgggttctcagctgccagagcgccttgaaaatgcactacaggacacacactggggagaggccctttaagtgtaagatctgtggccgggctttcaccacgaaagggaatcttaaaacccactacagtgtccatcgtgctatgcccccgctcagagtccagcattcctgccccatctgccagaagaagttcacgaacgctgtggtcctgcagcagcacatccgaatgcatatgggaggccagatccccaacaccccagtccccgacagctactctgagtccatggagtctgacacaggttcctttgatgagaaaaattttgatgacctagacaacttctctgatgaaaacatggaagactgtcctgagggcagcatccctgatacacctaagtctgcagacgcctcccaagacagcttatcctcttcgcctttgccccttgagatgtcgagcatcgctgctttggaaaatcagatgaagatgatcaatgctggcctggcagagcagctacaggccagcctgaagtcagtggagaatgggtccatcgagggggatgtcctgaccaatgattcatcctcagtgggtggtgacatggaaagccaaagtgctggcagcccagccatctcagagtctacctcttccatgcaggctctgtccccgtccaacagcacgcaggagttccacaagtcacccagcattgaggagaaaccacagagagcggtcccaagcgagtttgccaatggtttgtctcccaccccagtgaatggtggggctttggatttgacatctagtcacgcagagaaaatcatcaaagaagattctttggggatcctcttcccttttagagaccggggtaaatttaaaaacactgcttgtgacatttgtggcaaaacatttgcttgtcagagtgccttggacattcactatagaagtcataccaaagagagaccatttatttgcacagtttgcaatcgtggcttttccacaaagggtaatttgaagcagcacatgttgacacatcagatgcgagatctgccatcccagctctttgagcccagttccaaccttggccccaatcagaactcagcggtgattcccgccaactcgttgtcatctctcatcaagacagaggtcaacggcttcgtgcatgtttctcctcaggacagtaaggacacccccaccagtcacgtcccgtctgggcctctgtcttcctctgccacatccccagttctgctccctgctctgcccaggagaactcccaagcagcactactgcaacacatgtggcaaaaccttctcctcatcgagtgccctgcagattcacgagagaactcacactggagagaaaccctttgcttgcactatttgtggaagagctttcacgactaaaggcaatcttaaggtacacatgggcactcacatgtggaatagcacccctgcacgacggggtcggcggctctctgtggatggccccatgacatttctaggaggcaatcccgtcaagttcccagaaatgttccagaaggatttggcggcaagatcaggaagtggggatccttccagcttctggaatcagtatgcagcagcgctctccaacgggctggcgatgaaggccaacgagatctccgtcattcagaacggtggcatccctccaattcctggaagcctcggcagtgggaacagctcacctattagtgggctgacgggaaacctggagaggctccagaactcagagcccaatgctcccctggccggcctggagaaaatggcaagcagtgagaacggaaccaacttccgcttcacccgcttcgtggaggacagcaaggagatcgtcacgagttaaagcagctcgggctggagacatagcattcattcctgttcagaatgcgacctatggtggcctcctactccttgccccccaccccgccccgccccttccttctgttccccagatctatgaactacaacattatgaagacattcttttgtaccttgttcaactttagagttctaagaaagcttatttattagcgatataaccttgctttgcaaacagaatgcaagcgttaactttggtcttctgtattttggactaaatactaattgactagagtgctgtaaacttgctgtaacatttatggcaattgcaagttgccctgctaggcagttgtaatctggcattaacttattttctatatccagtttaatatgaatctggtgttgatgcaatgcctcagtgatgcattagatctctaataaagtctgtatatacatgtacactttgatcctgctggaaaattttatcagcaaacacattgtctaatctttcaaaacagatttaaggaaaggactgaaagtacagactgaacagtgtggttctttgaaaggtttggttttttaatttttattctaaaattcaaccttttttttgtcgatttaaccatttccattttgaactgctatttgtattgtgctttttacttgagtcgtcttcaatgttaataagtttctgtacagtaataagcacgcagaattc

SEQ ID NO: 589 - protein, 1324 aa, Homosapiens
MSRRKQAKPQHFQSDPEVASLPRRDGDTEKGQPSRPTKSKDAHVCGRCCAEFFELSDLLLHKKNCTKNQLVLIVNENPGSPPETFSPSPPPDNPDEQMNDTVNKTDQVDCSDLSEHNGLDREESMEVEAPVANKSGSGTSSGSHSSTAPSSSSSSSSSSGGGGSSSTGTSAITTSLPQLGDLTTLGNFSVINSNVIIENLQSTKVAVAQFSQEARCGGASGGKLAVPALMEQLLALQQQQIHQLQLIEQIRHQILLLASQNADLPTSSSPSQGTLRTSANPLSTLSSHLSQQLAAAAGLAQSLASQSASISGVKQLPPIQLPQSSSGNTIIPSNSGSSPNMNILAAAVTTPSSEKVASSAGASHVSNPAVSSSSSPAFAISSLLSPASNPLLPQQASANSVFPSPLPNIGTTAEDLNSLSALAQQRKSKPPNVTAFEAKSTSDEAFFKHKCRFCAKVFGSDSALQIHLRSHTGERPFKCNICGNRFSTKGNLKVHFQRHKEKYPHIQMNPYPVPEHLDNIPTSTGIPYGMSIPPEKPVTSWLDTKPVLPTLTTSVGLPLPPSLPSLIPFIKTEEPAPIPISHSATSPPGSVKSDSGGPESATRNLGGLPEEAEGSTLPPSGGKSEESGMVTNSVPTASSSVLSSPAADCGPAGSATTFTNPLLPLMSEQFKAKFPFGGLLDSAQASETSKLQQLVENIDKKATDPNECIICHRVLSCQSALKMHYRTHTGERPFKCKICGRAFTTKGNLKTHYSVHRAMPPLRVQHSCPICQKKFTNAVVLQQHIRMHMGGQIPNTPVPDSYSESMESDTGSFDEKNFDDLDNFSDENMEDCPEGSIPDTPKSADASQDSLSSSPLPLEMSSIAALENQMKMINAGLAEQLQASLKSVENGSIEGDVLTNDSSSVGGDMESQSAGSPAISESTSSMQALSPSNSTQEFHKSPSIEEKPQRAVPSEFANGLSPTPVNGGALDLTSSHAEKIIKEDSLGILFPFRDRGKFKNTACDICGKTFACQSALDIHYRSHTKERPFICTVCNRGFSTKGNLKQHMLTHQMRDLPSQLFEPSSNLGPNQNSAVIPANSLSSLIKTEVNGFVHVSPQDSKDTPTSHVPSGPLSSSATSPVLLPALPRRTPKQHYCNTCGKTFSSSSALQIHERTHTGEKPFACTICGRAFTTKGNLKVHMGTHMWNSTPARRGRRLSVDGPMTFLGGNPVKFPEMFQKDLAARSGSGDPSSFWNQYAAALSNGLAMKANEISVIQNGGIPPIPGSLGSGNSSPISGLTGNLERLQNSEPNAPLAGLEKMASSENGTNFRFTRFVEDSKEIVTS

SEQ ID NO: 590 - DNA, 2264 bp, Homosapiens
gcagtgcgcaggcgtgagcggtcgggccccgacgcgcgcgggtctcgtttggagcgggagtgagttcctgagcgagtggacccggcagcgggcgataggggggccaggtgcctccacagtcagccatggcagcgctgcgctacgcggggctggacgacacggacagtgaggacgagctgcctccgggctgggaggagagaaccaccaaggacggctgggtttactacgccaatcacaccgaggagaagactcagtgggaacatccaaaaactggaaaaagaaaacgagtggcaggagatttgccatacggatgggaacaagaaactgatgagaacggacaagtgttttttgttgaccatataaataaaagaaccacctacttggacccaagactggcgtttactgtggatgataatccgaccaagccaaccacccggcaaagatacgacggcagcaccactgccatggaaattctccagggccgggatttcactggcaaagtggttgtggtcactggagctaattcaggaatagggttcgaaaccgccaagtcttttgccctccatggtgcacatgtgatcttggcctgcaggaacatggcaagggcgagtgaagcagtgtcacgcattttagaagaatggcataaagccaaggtagaagcaatgaccctggacctcgctctgctccgtagcgtgcagcattttgctgaagcattcaaggccaagaatgtgcctcttcatgtgcttgtgtgcaacgcagcaacttttgctctaccctggagtctcaccaaagatggcctggagaccacctttcaagtgaatcatctggggcacttctaccttgtccagctcctccaggatgttttgtgccgctcagctcctgcccgtgtcattgtggtctcctcagagtcccatcgatttacagatattaacgactccttgggaaaactggacttcagtcgcctctctccaacaaaaaacgactattgggcgatgctggcttataacaggtccaagctctgcaacatcctcttctccaacgagctgcaccgtcgcctctccccacgcggggtcacgtcgaacgcagtgcatcctggaaatatgatgtactccaacattcatcgcagctggtgggtgtacacactgctgtttaccttggcgaggcctttcaccaagtccatgcaacagggagctgccaccaccgtgtactgtgctgctgtcccagaactggagggtctgggagggatgtacttcaacaactgctgccgctgcatgccctcaccagaagctcagagcgaagagacggcccggaccctgtgggcgctcagcgagaggctgatccaagaacggcttggcagccagtccggctaagtggagctcagagcggatgggcacacacacccgccctgtgtgtgtcccctcacgcaagtgccagggctgggccccttccaaatgtccctccaacacagatccgcaagagtaaaggaaataagagcagtcacaacagagtgaaaaatcttaagtaccaatgggaagcagggaattcctggggtaaagtatcacttttctggggctgggctaggcataggtctctttgctttctggtggtggcctgtttgaaagtaaaaacctgcttggtgtgtaggttccgtatctccctggagaagcaccagcaattctctttcttttactgttatagaatagcctgaggtcccctcgtcccatccagctaccaccacggccaccactgcagccgggggctggccttctcctacttagggaagaaaaagcaagtgttcactgctccttgctgcattgatccaggagataattgtttcattcatcctgaccaagactgagccagcttagcaactgctggggagacaaatctcagaaccttgtcccagccagtgaggatgacagtgacacccagagggagtagaatacgcagaactaccaggtggcaaagtacttgtcatagactcctttgctaatgctatgcaaaaaattctttagagattataacaaatttttcaaatcattccttagataccttgaaaggcaggaagggaagcgtatatacttaagaatacacaggatattttggggggcagagaataaaacgttagttaatccctttgtctgtcaatcacagtctcagttctcttgctttcacattgtacttaaacctcctgctgtgcctcgcatcctatgcttaataaaagaacatgcttgaatatcaaaaaaaaaaaaaaaaaaaaaaaa

SEQ ID NO: 591 - protein, 414 aa, Homosapiens
MAALRYAGLDDTDSEDELPPGWEERTTKDGWVYYANHTEEKTQWEHPKTGKRKRVAGDLPYGWEQETDENGQVFFVDHINKRTTYLDPRLAFTVDDNPTKPTTRQRYDGSTTAMEILQGRDFTGKVVVVTGANSGIGFETAKSFALHGAHVILACRNMARASEAVSRILEEWHKAKVEAMTLDLALLRSVQHFAEAFKAKNVPLHVLVCNAATFALPWSLTKDGLETTFQVNHLGHFYLVQLLQDVLCRSAPARVIVVSSESHRFTDINDSLGKLDFSRLSPTKNDYWAMLAYNRSKLCNILFSNELHRRLSPRGVTSNAVHPGNMMYSNIHRSWWVYTLLFTLARPFTKSMQQGAATTVYCAAVPELEGLGGMYFNNCCRCMPSPEAQSEETARTLWALSERLIQERLGSQSG

SEQ ID NO: 592 - DNA, 735 bp, Homosapiens
gcagtgcgcaggcgtgagcggtcgggccccgacgcgcgcgggtctcgtttggagcgggagtgagttcctgagcgagtggacccggcagcgggcgataggggggccaggtgcctccacagtcagccatggcagcgctgcgctacgcggggctggacgacacggacagtgaggacgagctgcctccgggctgggaggagagaaccaccaaggacggctgggtttactacgccaatcacaccgaggagaagactcagtgggaacatccaaaaactggaaaaagaaaacgagtggcaggagatttgccatacggatgggaacaagaaactgatgagaacggacaagtgttttttgttgaccatataaataaaagaaccacctacttggacccaagactggcgtttactgtggatgataatccgaccaagccaaccacccggcaaagatacgacggcagcaccactgccatggaaattctccagggccgggatttcactggcaaagtggttgtggtcactggagctaattcaggaatagggttcgaaaccgccaagtcttttgccctccatggtgcacatgtgatcttggcctgcaggaacatggcaagggcgagtgaagcagtgtcacgcattttagaagaatggaaaacaaaataccaccctccgccagaaaagtgcagaataaaaattttccactagcaaaagaaggaaaaaataaaagatcttgaatagtctcatc

SEQ ID NO: 593 - protein, 189 aa, Homosapiens
MAALRYAGLDDTDSEDELPPGWEERTTKDGWVYYANHTEEKTQWEHPKTGKRKRVAGDLPYGWEQETDENGQVFFVDHINKRTTYLDPRLAFTVDDNPTKPTTRQRYDGSTTAMEILQGRDFTGKVVVVTGANSGIGFETAKSFALHGAHVILACRNMARASEAVSRILEEWKTKYHPPPEKCRIKIFH

SEQ ID NO: 594 - DNA, 545 bp, Homosapiens
gcagtgcgcaggcgtgagcggtcgggccccgacgcgcgcgggtctcgtttggagcgggagtgagttcctgagcgagtggacccggcagcgggcgataggggggccaggtgcctccacagtcagccatggcagcgctgcgctacgcggggctggacgacacggacagtgaggacgagctgcctccgggctgggaggagagaaccaccaaggacggctgggtttactacgccaagtaagggggccgcagtggggccgcggacgcacctgggaccctgcacagcccacggacgccacctgcgcggggaggacgcgcactccagcgcagcgcgtgcggtgcaaagtgaaagtaactgttaaggagcttcagggaaaagggtccagggttcccagtaggggccggcccccttggtgggcctcgggtccagcgggggtcacctggtggcttcccggcgcgccctctgctgttcaggatgcagcactgcgcggcgcggcgagggcaaagcggcctcatccccgccaaaaaataaagatgttttaaaaagcgc

SEQ ID NO: 595 - protein, 36 aa, Homosapiens
MAALRYAGLDDTDSEDELPPGWEERTTKDGWVYYAK

SEQ ID NO: 596 - DNA, 4552 bp, Homosapiens
ctggacccctgccagggaaggggtcctcagacttgaggttgccagctcagatgtggggctgctgatactaggtgactggactgatgttctgttctagatgaaactccttgaggggaccatttgaaaaggcttgatgtgctgcccaaagcccccttcagagctgacttctccacccccagctgccgtgagccttggctgctgacagctcatagctgagtccctcccgtgaagtcaccttctgctgaagggtacatcctctcccaaggcgaagctggtccgttacatttgtaagcagaggcagtgcaagctgagcgtggctcccggtgagaggaccccagagctcaacagctacccccgcttcagcgactggctgtacactttcaacgtgaggccggaggtggtgcaggagatcccccgagacctcacgctggatgccctgctggagatgaatgaggccaaggtgaaggagacgctgcggcgctgtggggccagcggggatgagtgtggccgtctgcagtatgccctcacctgcctgcggaaggtgacaggcctgggaggggagcacaaggaggactccagttggagttcattggatgcgcggcgggaaagtggctcagggccttccacggacaccctctcagcagccagcctgccctggcccccagggagctcccagctgggcagagcaggcaacagcgcccagggcccacgctccatctccgtgtcagctctgcccgcctcagactcccccacccccagcttcagtgagggcctctcagacacctgtattcccctgcacgccagcggccggctgaccccccgtgccctgcacagcttcatcaccccgcccaccacaccccagctgcgacggcacaccaagctgaagccaccacggacgccccccccacccagccgcaaggtcttccagctgctgcccagcttccccacactcacccggagcaagtcccatgagtctcagctggggaaccgcattgatgacgtctcctcgatgaggtttgatctctcgcatggatccccacagatggtacggagggatatcgggctgtcggtgacgcacaggttctccaccaagtcctggctgtcgcaggtctgccacgtgtgccagaagagcatgatatttggagtgaagtgcaagcattgcaggttgaagtgtcacaacaaatgtaccaaagaagcccctgcctgtagaatatccttcctgccactaactcggcttcggaggacagaatctgtcccctcggacatcaacaacccggtggacagagcagccgaaccccattttggaaccctccccaaagcactgacaaagaaggagcaccctccggccatgaatcacctggactccagcagcaacccttcctccaccacctcctccacaccctcctcaccggcgcccttcccgacatcatccaacccatccagcgccaccacgccccccaacccctcacctggccagcgggacagcaggttcaacttcccagctgcctacttcattcatcatagacagcagtttatctttccagtgccatctgctggccattgctggaaatgcctccttattgcagaaagtttaaaggaaaacgctttcaacatttcagcctttgcacacgcagccccgctccctgaagctgccgacggtacccggctcgatgaccagccgaaagcagatgtgttggaagctcacgaagcggaggctgaggagccagaggctggcaagtcagaggcagaagacgatgaggacgaggtggacgacttgccgagctctcgccggccctggcggggccccatctctcgcaaggccagccagaccagcgtgtacctgcaggagtgggacatccccttcgagcaggtagagctgggcgagcccatcgggcagggccgctggggccgggtgcaccgcggccgctggcatggcgaggtggccattcgcctgctggagatggacggccacaaccaggaccacctgaagctcttcaagaaagaggtgatgaactaccggcagacgcggcatgagaacgtggtgctcttcatgggggcctgcatgaacccgccccacctggccattatcaccagcttctgcaaggggcggacgttgcactcgtttgtgagggaccccaagacgtctctggacatcaacaagacgaggcaaatcgctcaggagatcatcaagggcatgggatatcttcatgccaagggcatcgtacacaaagatctcaaatctaagaacgtcttctatgacaacggcaaggtggtcatcacagacttcgggctgtttgggatctcaggcgtggtccgagagggacggcgtgagaaccagctaaagctgtcccacgactggctgtgctatctggcccctgagattgtacgcgagatgacccccgggaaggacgaggatcagctgccattctccaaagctgctgatgtctatgcatttgggactgtttggtatgagctgcaagcaagagactggcccttgaagaaccaggctgcagaggcatccatctggcagattggaagcggggaaggaatgaagcgtgtcctgacttctgtcagcttggggaaggaagtcagtgagatcctgtcggcctgctgggctttcgacctgcaggagagacccagcttcagcctgctgatggacatgctggagaaacttcccaagctgaaccggcggctctcccaccctggacacttctggaagtcagctgagttgtaggcctggctgccttgcatgcaccaggggctttcttcctcctaatcaacaactcagcaccgtgacttctgctaaaatgcaaaatgagatgcgggcactaacccaggggatgccacctctgctgctccagtcgtctctctcgaggctacttcttttgctttgttttaaaaactggccctctgccctctccacgtggcctgcatatgcccaagtaactgctctcagaggatcccactaactgagctccctccaaggcagtctgggcagcttctaactaccttcctggacatgactgattgctcccgtgttcttctgagggctggtcttgtttttgtttgggtggctctgtctcactgctaacaccttagtgagatgccttccaccctcctgagcacaccagcctcccactgggtgtgtgcctagtgcggggcgggcggaggttgggagggtgttggcttggcttttaacctgtggggattttgtccaacaaggagtggaatgatttcagagctgccctgaggctggcaccctggtcacaggaaccctctgcgctggctcctgtctcagtcccctctgtagagttagatcagaagacacagaaagttctgtggccatgaaagataccagcttggaagggttgtgtcttcagtggcaccctcagaaaaattgtcttaaagcaaagaggtacctggctccagacaatttttctgatgaaaacaaagtctctgccccgtccccaccctgccaccctggcaaagttacttcctttacagctgcccagtgtaccatagaccagaccccaggtcagcatttgtcaagagcatggctgctgagtcccctgtggcagtcaatgcactgtttaccaaatgcaggtttctgttctccctccccagcaagacctgctgaacccagatctctggaatggggccctaggaatttgcatttcaacctgcttcccaggtggccctgatgcaccccagtattagagtttattgctaaaaggaacatgccctgtcactcctggtatcctgggagtcatgtttctcttctctctcagttctacttggagcaagagctttcctgggctgcaaatgagaaaacaattcctaggaacccacagcagtactgagcatgctgggagcttgggacttggagatgaatgagccaccgttgctgctccaagtaggactacttggagtgtagctgaggccttggacgcagtatgaccaggggcagctctgccagggctgttggccaatcagtcattttcatttcttgttggaggccaggtcctctgctgaactcatttcctagctagtgttaccctaattctgatgaagatcaatggggctataattcttgtttttgttcctctttgcagcattaacagcagcaaagttgtaccccggtttgaaaggtttggcttgggcgtcctggagtccagtaatccaaagatgtagccagccatatggtttttcgctgctgatctctttctttttaaaatgtgtttctgaaacatcccaacaaccaccacgacaaaaaaacactgcctgcccagcgctgcaaaccaggagcacacgtcctagattcagactgttggccataaaccccactcgggagatggagctgcacctgctatttcttaaaatgacaccaccaacaaccaaacctgtcatgacagacagcaaatgtttacacgtatatttctcctgagtgaacctgatgttttacaataggtaataataaaaacagtctgtgcaaaaaaaaaaaaaaaaaaaaaaaaaaaaaaaaaaaaaaaaaaaaaaaaaaaaaaaaaaaaaa

SEQ ID NO: 597 - protein, 762 aa, Homosapiens
MNEAKVKETLRRCGASGDECGRLQYALTCLRKVTGLGGEHKEDSSWSSLDARRESGSGPSTDTLSAASLPWPPGSSQLGRAGNSAQGPRSISVSALPASDSPTPSFSEGLSDTCIPLHASGRLTPRALHSFITPPTTPQLRRHTKLKPPRTPPPPSRKVFQLLPSFPTLTRSKSHESQLGNRIDDVSSMRFDLSHGSPQMVRRDIGLSVTHRFSTKSWLSQVCHVCQKSMIFGVKCKHCRLKCHNKCTKEAPACRISFLPLTRLRRTESVPSDINNPVDRAAEPHFGTLPKALTKKEHPPAMNHLDSSSNPSSTTSSTPSSPAPFPTSSNPSSATTPPNPSPGQRDSRFNFPAAYFIHHRQQFIFPVPSAGHCWKCLLIAESLKENAFNISAFAHAAPLPEAADGTRLDDQPKADVLEAHEAEAEEPEAGKSEAEDDEDEVDDLPSSRRPWRGPISRKASQTSVYLQEWDIPFEQVELGEPIGQGRWGRVHRGRWHGEVAIRLLEMDGHNQDHLKLFKKEVMNYRQTRHENVVLFMGACMNPPHLAIITSFCKGRTLHSFVRDPKTSLDINKTRQIAQEIIKGMGYLHAKGIVHKDLKSKNVFYDNGKVVITDFGLFGISGVVREGRRENQLKLSHDWLCYLAPEIVREMTPGKDEDQLPFSKAADVYAFGTVWYELQARDWPLKNQAAEASIWQIGSGEGMKRVLTSVSLGKEVSEILSACWAFDLQERPSFSLLMDMLEKLPKLNRRLSHPGHFWKSAEL

SEQ ID NO: 598 - DNA, 1620 bp, Homosapiens
caaaggacttcctagtgggtgtgaaaggcagcggtggccacagaggcggcggagagatggccttcagcggttcccaggctccctacctgagtccagctgtccccttttctgggactattcaaggaggtctccaggacggacttcagatcactgtcaatgggaccgttctcagctccagtggaaccaggtttgctgtgaactttcagactggcttcagtggaaatgacattgccttccacttcaaccctcggtttgaagatggagggtacgtggtgtgcaacacgaggcagaacggaagctgggggcccgaggagaggaggacacacatgcctttccagaaggggatgccctttgacctctgcttcctggtgcagagctcagatttcaaggtgatggtgaacgggatcctcttcgtgcagtacttccaccgcgtgcccttccaccgtgtggacaccatcttcgtcaatggctctgtgcagctgtcctacatcagcttccagcctcccggcgtgtggcctgccaacccggctcccattacccagacagtcatccacacagtgcagagcgcccctggacagatgttctctactcccgccatcccacctatgatgtacccccaccccgcctatccgatgcctttcatcaccaccattctgggagggctgtacccatccaagtccatcctcctgtcaggcactgtcctgcccagtgctcagaggttccacatcaacctgtgctctgggaaccacatcgccttccacctgaacctccgttttgatgagaatgctgtggtccgcaacacccagatcgacaactcctgggggtctgaggagcgaagtctgccccgaaaaatgcccttcgtccgtggccagagcttctcagtgtggatcttgtgtggagctcactgcctcaaggtggccgtggatggtcagcacctgtttgaatactaccatcgcctgaggaacctgcccaccatcaacagactggaagtggggggcgacatccagctgacccatgtgcagacataggcggcttcctggccctggggccgggggctggggtgtggggcagtctgggtcctctcatcatccccacttcccaggcccagcctttccaaccctgcctgggatctgggctttaatgcagaggccatgtccttgtctggtcctgcttctggctacagccaccctggaacggagaaggcagctgacggggattgccttcctcagccgcagcagcacctggggctccagctgctggaatcctaccatcccaggaggcaggcacagccagggagaggggaggagtgggcagtgaagatgaagccccatgctcagtcccctcccatcccccacgcagctccaccccagtcccaagccaccagctgtctgctcctggtgggaggtggcctcctcagcccctcctctctgacctttaacctcactctcaccttgcaccgtgcaccaacccttcacccctcctggaaagcaggcctgatggcttcccactggcctccaccacctgaccagagtgttctcttcagaggactggctcctttcccagtgtccttaaaataaagaaatgaaaatgcttgttggcaaaaaaaaaaaaaaaaaaaaa

SEQ ID NO: 599 - protein, 323 aa, Homosapiens
MAFSGSQAPYLSPAVPFSGTIQGGLQDGLQITVNGTVLSSSGTRFAVNFQTGFSGNDIAFHFNPRFEDGGYVVCNTRQNGSWGPEERRTHMPFQKGMPFDLCFLVQSSDFKVMVNGILFVQYFHRVPFHRVDTIFVNGSVQLSYISFQPPGVWPANPAPITQTVIHTVQSAPGQMFSTPAIPPMMYPHPAYPMPFITTILGGLYPSKSILLSGTVLPSAQRFHINLCSGNHIAFHLNLRFDENAVVRNTQIDNSWGSEERSLPRKMPFVRGQSFSVWILCGAHCLKVAVDGQHLFEYYHRLRNLPTINRLEVGGDIQLTHVQT

SEQ ID NO: 600 - DNA, 1696 bp, Homosapiens
caaaggacttcctagtgggtgtgaaaggcagcggtggccacagaggcggcggagagatggccttcagcggttcccaggctccctacctgagtccagctgtccccttttctgggactattcaaggaggtctccaggacggacttcagatcactgtcaatgggaccgttctcagctccagtggaaccaggtttgctgtgaactttcagactggcttcagtggaaatgacattgccttccacttcaaccctcggtttgaagatggagggtacgtggtgtgcaacacgaggcagaacggaagctgggggcccgaggagaggaagacacacatgcctttccagaaggggatgccctttgacctctgcttcctggtgcagagctcagatttcaaggtgatggtgaacgggatcctcttcgtgcagtacttccaccgcgtgcccttccaccgtgtggacaccatctccgtcaatggctctgtgcagctgtcctacatcagcttccagaacccccgcacagtccctgttcagcctgccttctccacggtgccgttctcccagcctgtctgtttcccacccaggcccagggggcgcagacaaaaacctcccggcgtgtggcctgccaacccggctcccattacccagacagtcatccacacagtgcagagcgcccctggacagatgttctctactcccgccatcccacctatgatgtacccccaccccgcctatccgatgcctttcatcaccaccattctgggagggctgtacccatccaagtccatcctcctgtcaggcactgtcctgcccagtgctcagaggttccacatcaacctgtgctctgggaaccacatcgccttccacctgaacccccgttttgatgagaatgctgtggtccgcaacacccagatcgacaactcctgggggtctgaggagcgaagtctgccccgaaaaatgcccttcgtccgtggccagagcttctcagtgtggatcttgtgtgaagctcactgcctcaaggtggccgtggatggtcagcacctgtttgaatactaccatcgcctgaggaacctgcccaccatcaacagactggaagtggggggcgacatccagctgacccatgtgcagacataggcggcttcctggccctggggccgggggctggggtgtggggcagtctgggtcctctcatcatccccacttcccaggcccagcctttccaaccctgcctgggatctgggctttaatgcagaggccatgtccttgtctggtcctgcttctggctacagccaccctggaacggagaaggcagctgacggggattgccttcctcagccgcagcagcacctggggctccagctgctggaatcctaccatcccaggaggcaggcacagccagggagaggggaggagtgggcagtgaagatgaagccccatgctcagtcccctcccatcccccacgcagctccaccccagtcccaagccaccagctgtctgctcctggtgggaggtggcctcctcagcccctcctctctgacctttaacctcactctcaccttgcaccgtgcaccaacccttcacccctcctggaaagcaggcctgatggcttcccactggcctccaccacctgaccagagtgttctcttcagaggactggctcctttcccagtgtccttaaaataaagaaatgaaaatgcttgttggca

SEQ ID NO: 601 - protein, 355 aa, Homosapiens
MAFSGSQAPYLSPAVPFSGTIQGGLQDGLQITVNGTVLSSSGTRFAVNFQTGFSGNDIAFHFNPRFEDGGYVVCNTRQNGSWGPEERKTHMPFQKGMPFDLCFLVQSSDFKVMVNGILFVQYFHRVPFHRVDTISVNGSVQLSYISFQNPRTVPVQPAFSTVPFSQPVCFPPRPRGRRQKPPGVWPANPAPITQTVIHTVQSAPGQMFSTPAIPPMMYPHPAYPMPFITTILGGLYPSKSILLSGTVLPSAQRFHINLCSGNHIAFHLNPRFDENAVVRNTQIDNSWGSEERSLPRKMPFVRGQSFSVWILCEAHCLKVAVDGQHLFEYYHRLRNLPTINRLEVGGDIQLTHVQT

SEQ ID NO: 602 - DNA, 4221 bp, Homosapiens
ataactttgtagcgagtcgaaaactgaggctccggccgcagagaactcagcctcattcctgctttaaaatctctcggccacctttgatgaggggactgggcagttctagacagtcccgaagttctcaaggcacaggtctcttcctggtttgactgtccttaccccggggaggcagtgcagccagctgcaagccccacagtgaagaacatctgagctcaaatccagataagtgacataagtgacctgctttgtaaagccatagagatggcctgtccttggaaatttctgttcaagaccaaattccaccagtatgcaatgaatggggaaaaagacatcaacaacaatgtggagaaagccccctgtgccacctccagtccagtgacacaggatgaccttcagtatcacaacctcagcaagcagcagaatgagtccccgcagcccctcgtggagacgggaaagaagtctccagaatctctggtcaagctggatgcaaccccattgtcctccccacggcatgtgaggatcaaaaactggggcagcgggatgactttccaagacacacttcaccataaggccaaagggattttaacttgcaggtccaaatcttgcctggggtccattatgactcccaaaagtttgaccagaggacccagggacaagcctacccctccagatgagcttctacctcaagctatcgaatttgtcaaccaatattacggctccttcaaagaggcaaaaatagaggaacatctggccagggtggaagcggtaacaaaggagatagaaacaacaggaacctaccaactgacgggagatgagctcatcttcgccaccaagcaggcctggcgcaatgccccacgctgcattgggaggatccagtggtccaacctgcaggtcttcgatgcccgcagctgttccactgcccgggaaatgtttgaacacatctgcagacacgtgcgttactccaccaacaatggcaacatcaggtcggccatcaccgtgttcccccagcggagtgatggcaagcacgacttccgggtgtggaatgctcagctcatccgctatgctggctaccagatgccagatggcagcatcagaggggaccctgccaacgtggaattcactcagctgtgcatcgacctgggctggaagcccaagtacggccgcttcgatgtggtccccctggtcctgcaggccaatggccgtgaccctgagctcttcgaaatcccacctgaccttgtgcttgaggtggccatggaacatcccaaatacgagtggtttcgggaactggagctaaagtggtacgccctgcctgcagtggccaacatgctgcttgaggtgggcggcctggagttcccagggtgccccttcaatggctggtacatgggcacagagatcggagtccgggacttctgtgacgtccagcgctacaacatcctggaggaagtgggcaggagaatgggcctggaaacgcacaagctggcctcgctctggaaagaccaggctgtcgttgagatcaacattgctgtgctccatagtttccagaagcagaatgtgaccatcatggaccaccactcggctgcagaatccttcatgaagtacatgcagaatgaataccggtcccgtgggggctgcccggcagactggatttggctggtccctcccatgtctgggagcatcacccccgtgtttcaccaggagatgctgaactacgtcctgtcccctttctactactatcaggtagaggcctggaaaacccatgtctggcaggacgagaagcggagacccaagagaagagagattccattgaaagtcttggtcaaagctgtgctctttgcctgtatgctgatgcgcaagacaatggcgtcccgagtcagagtcaccatcctctttgcgacagagacaggaaaatcagaggcgctggcctgggacctgggggccttattcagctgtgccttcaaccccaaggttgtctgcatggataagtacaggctgagctgcctggaggaggaacggctgctgttggtggtgaccagtacgtttggcaatggagactgccctggcaatggagagaaactgaagaaatcgctcttcatgctgaaagagctcaacaacaaattcaggtacgctgtgtttggcctcggctccagcatgtaccctcggttctgcgcctttgctcatgacattgatcagaagctgtcccacctgggggcctctcagctcaccccgatgggagaaggggatgagctcagtgggcaggaggacgccttccgcagctgggccgtgcaaaccttcaaggcagcctgtgagacgtttgatgtccgaggcaaacagcacattcagatccccaagctctacacctccaatgtgacctgggacccgcaccactacaggctcgtgcaggactcacagcctttggacctcagcaaagccctcagcagcatgcatgccaagaacgtgttcaccatgaggctcaaatctcggcagaatctacaaagtccgacatccagccgtgccaccatcctggtggaactctcctgtgaggatggccaaggcctgaactacctgccgggggagcaccttggggtttgcccaggcaaccagccggccctggtccaaggtatcctggagcgagtggtggatggccccacaccccaccagacagtgcgcctggaggccctggatgagagtggcagctactgggtcagtgacaagaggctgcccccctgctcactcagccaggccctcacctacttcctggacatcaccacacccccaacccagctgctgctccaaaagctggcccaggtggccacagaagagcctgagagacagaggctggaggccctgtgccagccctcagagtacagcaagtggaagttcaccaacagccccacattcctggaggtgctagaggagttcccgtccctgcgggtgtctgctggcttcctgctttcccagctccccattctgaagcccaggttctactccatcagctcctcccgggatcacacgcccacagagatccacctgactgtggccgtggtcacctaccacacccgagatggccagggtcccctgcaccacggcgtctgcagcacatggctcaacagcctgaagccccaagacccagtgccctgctttgtgcggaatgccagcggcttccacctccccgaggatccctcccatccttgcatcctcatcgggcctggcacaggcatcgcgcccttccgcagtttctggcagcaacggctccatgactcccagcacaagggagtgcggggaggccgcatgaccttggtgtttgggtgccgccgcccagatgaggaccacatctaccaggaggagatgctggagatggcccagaagggggtgctgcatgcggtgcacacagcctattcccgcctgcctggcaagcccaaggtctatgttcaggacatcctgcggcagcagctggccagcgaggtgctccgtgtgctccacaaggagccaggccacctctatgtttgcggggatgtgcgcatggcccgggacgtggcccacaccctgaagcagctggtggctgccaagctgaaattgaatgaggagcaggtcgaggactatttctttcagctcaagagccagaagcgctatcacgaagatatctttggtgctgtatttccttacgaggcgaagaaggacagggtggcggtgcagcccagcagcctggagatgtcagcgctctgagggcctacaggaggggttaaagctgccggcacagaacttaaggatggagccagctctgcattatctgaggtcacagggcctggggagatggaggaaagtgatatcccccagcctcaagtcttatttcctcaacgttgctccccatcaagccctttacttgacctcctaacaagtagcaccctggattgatcggagcctcctctctcaaactggggcctccctggtcccttggagacaaaatcttaaatgccaggcctggcaagtgggtgaaagatggaacttgctgctgagtgcaccacttcaagtgaccaccaggaggtgctatcgcaccactgtgtatttaactgccttgtgtacagttatttatgcctctgtatttaaaaaactaacacccagtctgttccccatggccacttgggtcttccctgtatgattccttgatggagatatttacatgaattgcattttactttaatcacaaaaaaaaaaaaaaaa

SEQ ID NO: 603 - protein, 1153 aa, Homosapiens
MACPWKFLFKTKFHQYAMNGEKDINNNVEKAPCATSSPVTQDDLQYHNLSKQQNESPQPLVETGKKSPESLVKLDATPLSSPRHVRIKNWGSGMTFQDTLHHKAKGILTCRSKSCLGSIMTPKSLTRGPRDKPTPPDELLPQAIEFVNQYYGSFKEAKIEEHLARVEAVTKEIETTGTYQLTGDELIFATKQAWRNAPRCIGRIQWSNLQVFDARSCSTAREMFEHICRHVRYSTNNGNIRSAITVFPQRSDGKHDFRVWNAQLIRYAGYQMPDGSIRGDPANVEFTQLCIDLGWKPKYGRFDVVPLVLQANGRDPELFEIPPDLVLEVAMEHPKYEWFRELELKWYALPAVANMLLEVGGLEFPGCPFNGWYMGTEIGVRDFCDVQRYNILEEVGRRMGLETHKLASLWKDQAVVEINIAVLHSFQKQNVTIMDHHSAAESFMKYMQNEYRSRGGCPADWIWLVPPMSGSITPVFHQEMLNYVLSPFYYYQVEAWKTHVWQDEKRRPKRREIPLKVLVKAVLFACMLMRKTMASRVRVTILFATETGKSEALAWDLGALFSCAFNPKVVCMDKYRLSCLEEERLLLVVTSTFGNGDCPGNGEKLKKSLFMLKELNNKFRYAVFGLGSSMYPRFCAFAHDIDQKLSHLGASQLTPMGEGDELSGQEDAFRSWAVQTFKAACETFDVRGKQHIQIPKLYTSNVTWDPHHYRLVQDSQPLDLSKALSSMHAKNVFTMRLKSRQNLQSPTSSRATILVELSCEDGQGLNYLPGEHLGVCPGNQPALVQGILERVVDGPTPHQTVRLEALDESGSYWVSDKRLPPCSLSQALTYFLDITTPPTQLLLQKLAQVATEEPERQRLEALCQPSEYSKWKFTNSPTFLEVLEEFPSLRVSAGFLLSQLPILKPRFYSISSSRDHTPTEIHLTVAVVTYHTRDGQGPLHHGVCSTWLNSLKPQDPVPCFVRNASGFHLPEDPSHPCILIGPGTGIAPFRSFWQQRLHDSQHKGVRGGRMTLVFGCRRPDEDHIYQEEMLEMAQKGVLHAVHTAYSRLPGKPKVYVQDILRQQLASEVLRVLHKEPGHLYVCGDVRMARDVAHTLKQLVAAKLKLNEEQVEDYFFQLKSQKRYHEDIFGAVFPYEAKKDRVAVQPSSLEMSAL

SEQ ID NO: 604 - DNA, 4104 bp, Homosapiens
ataactttgtagcgagtcgaaaactgaggctccggccgcagagaactcagcctcattcctgctttaaaatctctcggccacctttgatgaggggactgggcagttctagacagtcccgaagttctcaaggcacaggtctcttcctggtttgactgtccttaccccggggaggcagtgcagccagctgcaagccccacagtgaagaacatctgagctcaaatccagataagtgacataagtgacctgctttgtaaagccatagagatggcctgtccttggaaatttctgttcaagaccaaattccaccagtatgcaatgaatggggaaaaagacatcaacaacaatgtggagaaagccccctgtgccacctccagtccagtgacacaggatgaccttcagtatcacaacctcagcaagcagcagaatgagtccccgcagcccctcgtggagacgggaaagaagtctccagaatctctggtcaagctggatgcaaccccattgtcctccccacggcatgtgaggatcaaaaactggggcagcgggatgactttccaagacacacttcaccataaggccaaagggattttaacttgcaggtccaaatcttgcctggggtccattatgactcccaaaagtttgaccagaggacccagggacaagcctacccctccagatgagcttctacctcaagctatcgaatttgtcaaccaatattacggctccttcaaagaggcaaaaatagaggaacatctggccagggtggaagcggtaacaaaggagatagaaacaacaggaacctaccaactgacgggagatgagctcatcttcgccaccaagcaggcctggcgcaatgccccacgctgcattgggaggatccagtggtccaacctgcaggtcttcgatgcccgcagctgttccactgcccgggaaatgtttgaacacatctgcagacacgtgcgttactccaccaacaatggcaacatcaggtcggccatcaccgtgttcccccagcggagtgatggcaagcacgacttccgggtgtggaatgctcagctgtgcatcgacctgggctggaagcccaatggccgtgaccctgagctcttcgaaatcccacctgaccttgtgcttgaggtggccatggaacatcccaaatacgagtggtttcgggaactggagctaaagtggtacgccctgcctgcagtggccaacatgctgcttgaggtgggcggcctggagttcccagggtgccccttcaatggctggtacatgggcacagagatcggagtccgggacttctgtgacgtccagcgctacaacatcctggaggaagtgggcaggagaatgggcctggaaacgcacaagctggcctcgctctggaaagaccaggctgtcgttgagatcaacattgctgtgctccatagtttccagaagcagaatgtgaccatcatggaccaccactcggctgcagaatccttcatgaagtacatgcagaatgaataccggtcccgtgggggctgcccggcagactggatttggctggtccctcccatgtctgggagcatcacccccgtgtttcaccaggagatgctgaactacgtcctgtcccctttctactactatcaggtagaggcctggaaaacccatgtctggcaggacgagaagcggagacccaagagaagagagattccattgaaagtcttggtcaaagctgtgctctttgcctgtatgctgatgcgcaagacaatggcgtcccgagtcagagtcaccatcctctttgcgacagagacaggaaaatcagaggcgctggcctgggacctgggggccttattcagctgtgccttcaaccccaaggttgtctgcatggataagtacaggctgagctgcctggaggaggaacggctgctgttggtggtgaccagtacgtttggcaatggagactgccctggcaatggagagaaactgaagaaatcgctcttcatgctgaaagagctcaacaacaaattcaggtacgctgtgtttggcctcggctccagcatgtaccctcggttctgcgcctttgctcatgacattgatcagaagctgtcccacctgggggcctctcagctcaccccgatgggagaaggggatgagctcagtgggcaggaggacgccttccgcagctgggccgtgcaaaccttcaaggcagcctgtgagacgtttgatgtccgaggcaaacagcacattcagatccccaagctctacacctccaatgtgacctgggacccgcaccactacaggctcgtgcaggactcacagcctttggacctcagcaaagccctcagcagcatgcatgccaagaacgtgttcaccatgaggctcaaatctcggcagaatctacaaagtccgacatccagccgtgccaccatcctggtggaactctcctgtgaggatggccaaggcctgaactacctgccgggggagcaccttggggtttgcccaggcaaccagccggccctggtccaaggtatcctggagcgagtggtggatggccccacaccccaccagacagtgcgcctggaggccctggatgagagtggcagctactgggtcagtgacaagaggctgcccccctgctcactcagccaggccctcacctacttcctggacatcaccacacccccaacccagctgctgctccaaaagctggcccaggtggccacagaagagcctgagagacagaggctggaggccctgtgccagccctcagagtacagcaagtggaagttcaccaacagccccacattcctggaggtgctagaggagttcccgtccctgcgggtgtctgctggcttcctgctttcccagctccccattctgaagcccaggttctactccatcagctcctcccgggatcacacgcccacagagatccacctgactgtggccgtggtcacctaccacacccgagatggccagggtcccctgcaccacggcgtctgcagcacatggctcaacagcctgaagccccaagacccagtgccctgctttgtgcggaatgccagcggcttccacctccccgaggatccctcccatccttgcatcctcatcgggcctggcacaggcatcgcgcccttccgcagtttctggcagcaacggctccatgactcccagcacaagggagtgcggggaggccgcatgaccttggtgtttgggtgccgccgcccagatgaggaccacatctaccaggaggagatgctggagatggcccagaagggggtgctgcatgcggtgcacacagcctattcccgcctgcctggcaagcccaaggtctatgttcaggacatcctgcggcagcagctggccagcgaggtgctccgtgtgctccacaaggagccaggccacctctatgtttgcggggatgtgcgcatggcccgggacgtggcccacaccctgaagcagctggtggctgccaagctgaaattgaatgaggagcaggtcgaggactatttctttcagctcaagagccagaagcgctatcacgaagatatctttggtgctgtatttccttacgaggcgaagaaggacagggtggcggtgcagcccagcagcctggagatgtcagcgctctgagggcctacaggaggggttaaagctgccggcacagaacttaaggatggagccagctctgcattatctgaggtcacagggcctggggagatggaggaaagtgatatcccccagcctcaagtcttatttcctcaacgttgctccccatcaagccctttacttgacctcctaacaagtagcaccctggattgatcggagcctcctctctcaaactggggcctccctggtcccttggagacaaaatcttaaatgccaggcctggcaagtgggtgaaagatggaacttgctgctgagtgcaccacttcaagtgaccaccaggaggtgctatcgcaccactgtgtatttaactgccttgtgtacagttatttatgcctctgtatttaaaaaactaacacccagtctgttccccatggccacttgggtcttccctgtatgattccttgatggagatatttacatgaattgcattttactttaatcacaaaaaaaaaaaaaaaa

SEQ ID NO: 605 - protein, 1114 aa, Homosapiens
MACPWKFLFKTKFHQYAMNGEKDINNNVEKAPCATSSPVTQDDLQYHNLSKQQNESPQPLVETGKKSPESLVKLDATPLSSPRHVRIKNWGSGMTFQDTLHHKAKGILTCRSKSCLGSIMTPKSLTRGPRDKPTPPDELLPQAIEFVNQYYGSFKEAKIEEHLARVEAVTKEIETTGTYQLTGDELIFATKQAWRNAPRCIGRIQWSNLQVFDARSCSTAREMFEHICRHVRYSTNNGNIRSAITVFPQRSDGKHDFRVWNAQLCIDLGWKPNGRDPELFEIPPDLVLEVAMEHPKYEWFRELELKWYALPAVANMLLEVGGLEFPGCPFNGWYMGTEIGVRDFCDVQRYNILEEVGRRMGLETHKLASLWKDQAVVEINIAVLHSFQKQNVTIMDHHSAAESFMKYMQNEYRSRGGCPADWIWLVPPMSGSITPVFHQEMLNYVLSPFYYYQVEAWKTHVWQDEKRRPKRREIPLKVLVKAVLFACMLMRKTMASRVRVTILFATETGKSEALAWDLGALFSCAFNPKVVCMDKYRLSCLEEERLLLVVTSTFGNGDCPGNGEKLKKSLFMLKELNNKFRYAVFGLGSSMYPRFCAFAHDIDQKLSHLGASQLTPMGEGDELSGQEDAFRSWAVQTFKAACETFDVRGKQHIQIPKLYTSNVTWDPHHYRLVQDSQPLDLSKALSSMHAKNVFTMRLKSRQNLQSPTSSRATILVELSCEDGQGLNYLPGEHLGVCPGNQPALVQGILERVVDGPTPHQTVRLEALDESGSYWVSDKRLPPCSLSQALTYFLDITTPPTQLLLQKLAQVATEEPERQRLEALCQPSEYSKWKFTNSPTFLEVLEEFPSLRVSAGFLLSQLPILKPRFYSISSSRDHTPTEIHLTVAVVTYHTRDGQGPLHHGVCSTWLNSLKPQDPVPCFVRNASGFHLPEDPSHPCILIGPGTGIAPFRSFWQQRLHDSQHKGVRGGRMTLVFGCRRPDEDHIYQEEMLEMAQKGVLHAVHTAYSRLPGKPKVYVQDILRQQLASEVLRVLHKEPGHLYVCGDVRMARDVAHTLKQLVAAKLKLNEEQVEDYFFQLKSQKRYHEDIFGAVFPYEAKKDRVAVQPSSLEMSAL

SEQ ID NO: 606 - DNA, 1761 bp, Homosapiens
tgcttctcagactttaaaatgtgcctgcaaatctcctggcatccttgttaaaatgcaggtttgatctggtgggtctttggggtggggcccaagactacatttgtgatgagctcccgatgctgtgggttttgctggttcaggagcacactttgaatttcaaggctcaggcctgtaggcattctcccctctgtggcttggtgccctcgccagaccatggctgatgtcagagctggtttcctagtgattgcccctcagggtcttcctgcttttctaccctaccctgccggtgagggacacctactcatgcaccacttgaagttgagttccagaaagaagacgccagggatgaggctggacagagggtctcacggatggccccgctgccaggagcagaactggttcggaggccactgcagctctaccgatacttgctgcgctgttgccagcagctgccgaccaagggcatccagcagcattacaagcatgctgtcaggcagagttttcgggttcattcagatgaagacaaccctgagagaatccagcagattattaaaagagccattgaagatgctgactggatcatgaacaaatataaaaaacaaaactgagagctccgagggtgagccttcctggcctctggaagttgagaggcccctcttctggagctcagcagcagcagctggtttggaagagccattggccttgttggctgaaagccagaaatcaggggagaagctgaccttgctccagaggctcctcttgccgcggccatgttgctagcatcctttatgtttgcacttccagccacttacgatgtgaaatttggggagaatgtagtatttttttgcttcttttgtgtgttttttatttttgtgtttttgttcttttacttttctctgaaagtgattcatttattctggagatctctttatcattctctgagtcccagagcagatgtcccctcaggtagcaacctgtacagaagaaagcacgtgggttttagaaccagacagatctggatttgaatcccagatgcaataagatgaaggtgaagtgcctcacacaggatgtggcacatgacagtgcctgaagggctcccttcaaggaagccgtcctgccccgccccctcctctgctcctgcagcgccctgcacagctctgctccccgcatgcaccgcatcgggtctcagttttttgtttgcgagcttgccctgtccctgcttgtagcccctgagccctcacagttgtcacacacccagcagtctgccaaggagctgcttttcctgactactgtctctccatgcctagggaagtcaaagccctgggccttgccttcagggagttgacagtgtccttgaagtggtgaagtgcccaccacatgaaccaaggagagacgccaaagcagctgccatggactctggcctgtccaagcctctgtgcacctgcagtctctttccactggcacttccctgctttgctaccatcgtggaagaatggaagggagggggagaaggtgggtgggctcagggagaacggccagagtggccagaagatgcagagagaagccccactgggatctgagtattccccaagggcactcagccacagggatgaactagtgtttgtttgtatccttgcagttatgtgacttaaagtgactcagagatatctatgtatgcgagtgtactccgctggcaatgaagtaaatatatcaatttgtggaagctcgtgtgtcttctcaactgataaaccatacgttccc

SEQ ID NO: 607 - protein, 78 aa, Homosapiens
MAPLPGAELVRRPLQLYRYLLRCCQQLPTKGIQQHYKHAVRQSFRVHSDEDNPERIQQIIKRAIEDADWIMNKYKKQN

SEQ ID NO: 608 - DNA, 2027 bp, Homosapiens
cactcccccctcccatctactcccattctcccagccctaggcaaccaccaatgtacttctgtctctgtacttttgcctattctggatgtttcgtataaatggaatcatacattaagtagccccttgtgactgggtttgttcacttagcgtaatgttttctgggttcacctgccataggttcttgacttcaggacagtttcctgctggctttagtttcctctggtaacttgggaatcaattgacatctatggaacttctgttatggttcaggtactataaactgtggaggagtgactaataaccgtatatatatttttcttactaatttcccttcatttcacaggtgttgaactaatacagtatagtttcttgttcttcagaagcttacagtcagcaaggaacagaaagccaaataaagtaggaaagggctcaggcctgtaggcattctcccctctgtggcttggtgccctcgccagaccatggctgatgtcagagctggtttcctagtgattgcccctcagggtcttcctgcttttctaccctaccctgccggtgagggacacctactcatgcaccacttgaagttgagttccagaaagaagacgccagggatgaggctggacagagggtctcacggatggccccgctgccaggagcagaactggttcggaggccactgcagctctaccgatacttgctgcgctgttgccagcagctgccgaccaagggcatccagcagcattacaagcatgctgtcaggcagagttttcgggttcattcagatgaagacaaccctgagagaatccagcagattattaaaagagccattgaagatgctgactggatcatgaacaaatataaaaaacaaaactgagagctccgagggtgagccttcctggcctctggaagttgagaggcccctcttctggagctcagcagcagcagctggtttggaagagccattggccttgttggctgaaagccagaaatcaggggagaagctgaccttgctccagaggctcctcttgccgcggccatgttgctagcatcctttatgtttgcacttccagccacttacgatgtgaaatttggggagaatgtagtatttttttgcttcttttgtgtgttttttatttttgtgtttttgttcttttacttttctctgaaagtgattcatttattctggagatctctttatcattctctgagtcccagagcagatgtcccctcaggtagcaacctgtacagaagaaagcacgtgggttttagaaccagacagatctggatttgaatcccagatgcaataagatgaaggtgaagtgcctcacacaggatgtggcacatgacagtgcctgaagggctcccttcaaggaagccgtcctgccccgccccctcctctgctcctgcagcgccctgcacagctctgctccccgcatgcaccgcatcgggtctcagttttttgtttgcgagcttgccctgtccctgcttgtagcccctgagccctcacagttgtcacacacccagcagtctgccaaggagctgcttttcctgactactgtctctccatgcctagggaagtcaaagccctgggccttgccttcagggagttgacagtgtccttgaagtggtgaagtgcccaccacatgaaccaaggagagacgccaaagcagctgccatggactctggcctgtccaagcctctgtgcacctgcagtctctttccactggcacttccctgctttgctaccatcgtggaagaatggaagggagggggagaaggtgggtgggctcagggagaacggccagagtggccagaagatgcagagagaagccccactgggatctgagtattccccaagggcactcagccacagggatgaactagtgtttgtttgtatccttgcagttatgtgacttaaagtgactcagagatatctatgtatgcgagtgtactccgctggcaatgaagtaaatatatcaatttgtggaagctcgtgtgtcttctcaactgataaaccatacgttccc

SEQ ID NO: 609 - protein, 78 aa, Homosapiens; identical to SEQ ID NO: 607

SEQ ID NO: 610 - DNA, 4061 bp, Homosapiens
cccacgcgtccgcggctctctttctcctctctgtcctgctgtcgcctcctctcctcactccagcctccttccctggcttattctgcccaggaaagtttggaacccccgccccccctccccaatcaggtcaacctgactaggagtagggggagatgtaggaaggcctgagagttcgggggggggaagctggaagctggtttcccagaaaatttccccccatcttctccatttagggtggtgggaattttttttaatcctgtttttgaggaggtggtaggtgtttagaaaaggatgtgggaatggaaggggtagatgagtcaaccctctttcaagattccaagggtggtgtgttacctgatccttttcgtgtgtggagttcagggggtcgggaggttggcctttattcccacattcaaagttggaacctcccccaaattaagaatggagttttagtacccacttgtggcaggaatcctggggggaaggggtccttttttcctttttcttttcttttttccctttttttccttttggcaacccacacccttccacacacgctcaccccaaaattaaacaccaagatcctctaacttgtttggattgactgatgaagacataaagctctatgttttttgaggtggagtgagtggtttttcttcatttttaaatggccaaatgacagcttgacccagtttgctttccaatcaaagggcatttattttgaatgtctctttgtggcgcaagagccaacgcaaaaatgatggcggcttacaatggcggtacatctgcagcagcaacaggtcaccaccaccaccatcaccaccaccttccacacctccctcctcctcacctgcaccaccaccaccaccctcaacaccatcttcatccggggtcggctgccgctgtacaccctgtacagcagcacacctcttcggcagctgcggcagccgcagcagcggctgcagctgcagccatgttaaaccctgggcaacaacagccatatttcccatcaccggcaccggggcaggctcctggaccagctgcagcagccccagctcaggtacaggctgccgcagctgctacagttaaggcgcaccatcatcagcactcgcatcatccacagcagcagctggatattgagccggatagacctattggatatggagcctttggtgttgtctggtcagtaacagatccaagagatggaaagagagtagcgctcaaaaagatgcccaacgtcttccagaatctggtctcttgcaaaagggtcttccgggaattgaagatgttgtgtttttttaagcatgataatgtactctctgcccttgacatactccaacctccacacattgactattttgaagaaatatatgttgtcacagaattgatgcagagtgacctacataaaattatcgtctctcctcaaccactcagctcagatcatgtcaaagtttttctttatcagattttgcgaggtttgaaatatctccattcagctggcattttacatcgagacattaagccagggaatctccttgtgaacagcaactgtgttctaaagatttgtgattttggattggccagagtggaagaattagatgaatcccgtcatatgactcaggaagttgttactcagtattatcgggctccagaaatcctgatgggcagccgtcattacagcaatgctattgacatctggtctgtgggatgtatctttgcagaactactaggacgaagaatattgtttcaggcacagagtcccattcagcagttggatttgatcacggatctgttgggcacaccatcactggaagcaatgaggacagcttgtgaaggcgctaaggcacatatactcaggggtcctcataaacagccatctcttcctgtactctataccctgtctagccaggctacacatgaagctgttcatctcctttgcaggatgttggtctttgatccatccaaaagaatatccgctaaggatgccttagcccacccctacctagatgaagggcgactacgatatcacacatgtatgtgtaaatgttgcttttccacctccactggaagagtttataccagtgactttgagcctgtcaccaatcccaaatttgatgacactttcgagaagaacctcagttctgtccgacaggttaaagaaattattcatcagttcattttggaacagcagaaaggaaacagagtgcctctctgcatcaaccctcagtctgctgcttttaagagctttattagttccactgttgctcagccatctgagatgcccccatctcctctggtgtgggagtgatggtggaagataatgtactactgaagatgtaatgtagctttccactggagtctgggatttgcaattctggaggttaatcatgcttgtactgtaattttactaatgaagttttaaattaacaaccactacttgtatgatatgaataatatttagaaatgttactagacttttaatcttgtaaagtggttgtgcttttagaagaaaaatattttacccagagttgcacatgttttatgaatttagtgcagctgttatggctcacctcagaacaaaagagaattgaaccaaatttgggagtttggggttttatgttttgtttttcttttctaaaatgaagtgagattgttcacacacacacacacacacacacacacacaaacacaaaggacagtcatacattttgatatttgagccattcctaaagatttggggttttctaaaactaaagaatctaggaaccttgcctgcgaccaatcatggagccacgtgagctgatcgtggctgcacctggggggagggtagggaggaggggcatgccacctaatgatcaagccctataattagcttctcattagagccgtgatggtgatgtgtgctgtctaaaatccaatgttgtgggtagagagaatgagtttgtgactaggagagactaaacttttgttttccttacccagtataaatatatatatatatatttaatctatttttattagaagtttttctgctctttcttacataaaagaaccccaagcatgcatctttcatgtgtgtaaataattcatttctgggctaatttcaaaagaatcccaatattgctgtatagaaagagaactagcttgcacattttaggtctgtgaaattttgtgagacttttcctgcactggacagtaaaaaaataataaaagacaaaaacaaatttaaaaaaaaatttaagccacaaaaaaaggcacatagggaattatgtcaaatgtgtttgtgtccttaggcaaagctgtgggagtcttgaaatgtcacagtagtaaataacttattactttttgacaagttctttttttctgttggaacactgaattcttctgtgcatatgtacatatgaatacaaatcgaaggcctctacctcctggagttatacaacttggcttgtttacctccacatgctgatgatgactatttttttttttgagttcagtgtggagacttgaaacttgaatgtcccttccaacttttatattaaaaataaaaagacaagaaaattgaagatcatttttcacctgtacaaggaatactaatggatcgtcttaaaattggtctaggaaaaaaccttggtgtgtgttatggacaattaactgttaaagttattgtaagttatctgtatttagcagagtattttcaacttgagtgatctgagctgaatttgaagactattaataagttatgtttggaagttttaacttcaatgaagtaattatttgctgtgaaagaaacaaacattgaattactaaacaaagatggtgcaatatctttgttttttttttatgaggctcctgagaatcaacccaactgaagcatttcaattcacttgaatgagaaacgtgtttagtatcaaaagagcccaagaagacactggtgtgaaaggtacaatctcagaggttggtcaattaccgtggcacactttctggtcactttgtacaatgtagatttgaagtacagtggtgaaaacattaaatgtgacatttgaaaaaaaaaaaaaaaa

SEQ ID NO: 611 - protein, 515 aa, Homosapiens
MAAYNGGTSAAATGHHHHHHHHLPHLPPPHLHHHHHPQHHLHPGSAAAVHPVQQHTSSAAAAAAAAAAAAAMLNPGQQQPYFPSPAPGQAPGPAAAAPAQVQAAAAATVKAHHHQHSHHPQQQLDIEPDRPIGYGAFGVVWSVTDPRDGKRVALKKMPNVFQNLVSCKRVFRELKMLCFFKHDNVLSALDILQPPHIDYFEEIYVVTELMQSDLHKIIVSPQPLSSDHVKVFLYQILRGLKYLHSAGILHRDIKPGNLLVNSNCVLKICDFGLARVEELDESRHMTQEVVTQYYRAPEILMGSRHYSNAIDIWSVGCIFAELLGRRILFQAQSPIQQLDLITDLLGTPSLEAMRTACEGAKAHILRGPHKQPSLPVLYTLSSQATHEAVHLLCRMLVFDPSKRISAKDALAHPYLDEGRLRYHTCMCKCCFSTSTGRVYTSDFEPVTNPKFDDTFEKNLSSVRQVKEIIHQFILEQQKGNRVPLCINPQSAAFKSFISSTVAQPSEMPPSPLVWE

SEQ ID NO: 612 - DNA, 840 bp, Homosapiens
ccagtgcgcccttgaaactttcctcgccttccacctcctgctcatctgcttcacaagctgtcgctgtggtgtcggttcgcaggtcgtggcctctcatggccacggtgcttttggccctgctcgtctacctgggggcgctggtcgacgcctaccccatcaaacccgaggctcccggcgaagacgccttcctggggtagctgagccgctgctacgcctatcctcgccactacctcatcctggtcactcagccgtcgtgagcgcaggcgcggggcgggcggacggggacccctggggctctccccctacagccccgctccaccgggggcgtggctagatctgaccgcgcccggccaggccccgccctcaggtatgggaaactaggccgcccagtcgcgcgcctctccaaaacgttcttcccagactgcgaggaccgcctcggcaggtggcggtaaaagcgcccccatcaagtcacataacatcctgcctccgagagcgcggtctggccccaccctggtccatcatcacttacgacgtctcccaggcttgcctccccggatcggattcctttcccttcgatcccgcaggccggagggcgcagacctgtggtgaggacacccgaggcctcctgggagacctgcagaccacgcccacctcatttacatgttcactcccgaccctggaaacccggatttcgcctccggacagcggcgtctgggcagggttcgggtactgcagtcccgcgtctggatgccccgcgccccctgagctgcagggctgtgtgtggtccttccctggtcccaaaataaagagcggattgcacagaaacggaaaaaaaaaaaa

SEQ ID NO: 613 - protein, 33 aa, Homosapiens
MATVLLALLVYLGALVDAYPIKPEAPGEDAFLG

SEQ ID NO: 614 - DNA, 660 bp, Homosapiens
atggctgccgcatgccgctgcctctccctcctgctcctgtccacctgtgtggctctgttgctgtagccactgctgggtgcccggggagccccgttggagccattgtacccaggggacaataccacaccggagcagatggcccagtacacagctgagctccgtagatacatcaacatgctgaccaagcctaggcatgtgccatggacaaggagagagatcccagcccctgggaccctgggcccactccacattcctggccacaccctatccccagcccaagccccatctccagccccagtcccagccccttccaggccactcttggggaaacagagcatctgtgctgaccaggcctgggcccatgtgccctgggcaagagggtgcctacaggcggatatgaaaccggtgggctggcacctgggcacagtgcttccaggtatggagaaagagacaaagaggacacgctggccttctcagagtggggtcttcccatgctgctgcccccagagagctcagcccgctggacttgtaacactacctcccgccccctaccactccacgggcagtgccagcccagctctcccctccacactgttggctctggccgaagctcactccctgttcctgcacaggctcaataaagcaagtcaaagcacaaaa

SEQ ID NO: 615 - DNA, 1951 bp, Homosapiens
aagttaaggcctttgtccgttgaggtcaggactaggtggtctcagccaatggggacagagcggtcacggggaccgggtttgcgcggctccgaggcctaaccaggcagccgagcctgcctgcgtcccgaggccgccttcccgggacctctgcaccctcaggtcctccgttgggtggtgttcgggcggccgccaggcttcccggcccgccactcccgctgccacccaaaggcgctgcgtgccggcggcttggtggagtttcgtcgaggcccggcaggcttgggccaggagatccagcggccgggcggggtcccggctgagagaggccgatgccgccgtcagtcaccgagatggggtggggacgcttcaaggcctgggtctggccagggggcagtcacagcagggccctagggtaatcactttgatcaacatgacgaaggacacttggaaactgaacaagcatcacttgacaagcctacagaatccataagatggatcattgcttaatttcgggtcttagccagttagatttaccttcagctttaacaaaaaattggccgtcaaaacctgagtcctgtcctcttgccctcctccccggacagcatgaacttcaccacttgctccaccctctccaccaactaccagtccctgggcactgtccaggcacccagctatgtgcccagctggtcagcagtgtggccagtgtctatgcaggcatcaggggctctggttcccggatctccatgtcctgcttcaccagcttccagggcagcatggggtccaggggcctgcccgcagtgatggccgggggtctggcaggaatgggagtcatccagaatgagaaggaaaccatgcaaagcctcaacgaccacctggcctcctacctggacagagttaggagcctggataccaagaactggaagctggagagccaggagcacctggagaagaagggaccccaggtcagagactggagccatgacttcaagaccatcgagaacctgagggctcagatctttgcaaatactgtggacagtgcccacattgttctgcagatcgacaatgcctgtcttgctggtgatgactttagggtcaagtatgagacagagctggccatgtgccagtctgtggagagtgacatccatgggctccacaaggtcattgatgacaccaatgtcacttggctgcagctggaagcagagatcaaggctctcaaggagaagctgctcttcatgaagaagaaccatgaagaggaagtaaagggcctataagcccagattgccagctctgggttgactgtggaggtagatgcccccaaatctcatgaccttgccaaaatcttggcagacattgggcccaatatgacgagctggctccgaagaacttagaggagctgggcaagtactggtctccgcagattgaggagagcaccgcagttgtcaccacgcagtctgccgaggttggagctgctgagatgacgctcacggagctgagacatacagtccagtccttggagatcgacctggactccatgagcaatctgaaggccagcttggagaacagcctgagggaggtggaggcctgttacaccctgcggacggagcagctcaacaggatcctgctgcacttggagtcagagctggcacagacccgggcagagggacagcactaggcccaggagtatgaggccctgctgaacatcaaggtcaagctggaggctgagatcgccacctaccaccgcctgctggaagacagtgaggacttcaatctttcaatcttggtgatgccctggacagcagcaactccatgcaaaccatccaaaagactaccacctgccggatattggatggcaaagtggtgtctgagaccagtgatgccaaagttctgataccttaagccagcagaagcaggggaccctttggggagcaggaggccaataaaaagttcagaggtt

SEQ ID NO: 616 - protein, 259 aa, Homosapiens
MDHCLISGLSQLDLPSALTKNWPSKPESCPLALLPGQHELHHLLHPLHQLPVPGHCPGTQLCAQLVSSVASVYAGIRGSGSRISMSCFTSFQGSMGSRGLPAVMAGGLAGMGVIQNEKETMQSLNDHLASYLDRVRSLDTKNWKLESQEHLEKKGPQVRDWSHDFKTIENLRAQIFANTVDSAHIVLQIDNACLAGDDFRVKYETELAMCQSVESDIHGLHKVIDDTNVTWLQLEAEIKALKEKLLFMKKNHEEEVKGL

SEQ ID NO: 617 - DNA, 2133 bp, Homosapiens
tggggttccagttgcctctctcgggtcctgcccatgcctcccccgctcctaacccaactttagttcggtgttttcctcgggctttgtctctatcccagccccttctcccaagcggcgggggcgaacgctttgtttcctttaaagtcacttcttccctgggtttaaggtttcccgcgattccacctctggccggttgtcagtgtctgagggaagtagtctggatgaagtggtgtccaaagtcacatgtcagcatggatccgcatcctttttatttgacaagtttagaaacctgctgaagtggtatgctaaggagttcaaagacccactgctacaggagcccccagcctggtttaagtcctttctgttttgcgagcttgtgtttcagctgcctttctttcccattgcaacgtatgccttcctcaaaggaagctgcaagtggattcgaactcctgcaatcatctactctgttcacaccatgacaaccttaattccgatactctccacatttctgtttgaggatttctccaaagccagtggtttcaagggacaaagacctgagactttgcatgaacggttaacccttgtgtctgtctatgccccctacttactcatcccattcatacttttaattttcatgttgcggagcccctactacaagtatgaagagaaaagaaaaaaaaaatgaaggaaacaaccactggcccagggtagagatgcctacagggtggttgcttgttggatacaatacaaggaacactgctcagaacccacgtcttcagcagcatttgaaacactggcagcaatgcacaagagcaagatggtgtcaggaaccatgtcaaaccctcaccttcttccatttttttttttttttttaagacagtctcactctgttgcccaggctggagtaaagggcagtggcatgatctcggctcactgcaacctccgcctcctgggctcaagccatcttccttagcctcccaagtagctagaactacaggtgtgtaccaacacgtatggctaatttgttttgttttttttgtgtgtgtggagacagggttttgccatgttgcccaggttggtctcgaacgcctaggctcaagtgatctgcccacctcagtctccctaagtgctgggattacagacgtgaaccactgggcccagcccaaaccttcaccttctaagggcactgggatgaacggaccgatcggcttgagggtgggcaaaggggtgtgggctaggttataaggaagtggtaccaaataactgtgtgcctgagttccaccgcaagattactaaaagcaggaccagaccagaaactgctaaagaacatggcctgtttgacatgttcatgagtcacctgacccacagcatatatgcttgtgactaaaccctccactcctgattctcaagagtgtatcacctgtcagcaaaatgaatagtgggatattttgggccattttaaatgtgaaattttgcctctttaatgttaattcaaaactatatcaatgttttcttgttcccacctctaacccaaggaaaaaagagaaaacatactatgcaaaggaagtttaaacttaagttttccttaagggtcagcccaacaatgactttcagtcaaatggattaaactggaaaatgtttttgtttctgttgtaaacagatcatcctaggcgaaagttttttttgtttgtttgcttttaaattagtttatttctaaatcttagtcttccacatttctagaggccacctgacacaagtccctgtatctgaagtctagcatctcaaggctgatctggaagtgtgctagtatgctccctagtggataacttaatcttttaatacagttccgtcattcccatcttgttttcagaagagaaggtggctacagccaggcataacatatccactgtgtgcatagagggtctcttcacgttgatgcttggcattccatcagctttctctaagtctttgctcaagttcaaccttaaaatgatgttagacaacaggtcccagtcagttccctctattttcacccattttgctcacaagccatattggcccgattagtggtactgtctgactcacgtgtgtgatccaaataaaggtagctgctgaccaaaaaaaaaaaaaaaa

SEQ ID NO: 618 - protein, 69 aa, Homosapiens
MTTLIPILSTFLFEDFSKASGFKGQRPETLHERLTLVSVYAPYLLIPFILLIFMLRSPYYKYEEKRKKK

SEQ ID NO: 619 - DNA, 1016 bp, Homosapiens
ggtaaacaggctctgtatccgtggcagcggccgtggcaggctggctgggtaccggctgtcgctgacccaggagaagctgcctgtctacatcagcctgggctgcagcgcgctgccgccgcggggccggcagccatggccaaggacatcctgggtgaagcagggctacactttgatgaactgaacaagctgagggtgttggacccagaggttacccagcagaccatagagctgaaggaagagtgcaaagactttgtggacaaaattggccagtttcagaaaatagttggtggtttaattgagcttgttgatcaacttgcaaaagaagcagaaaatgaaaagatgaagagtcttgctgtgtcacccaggctggagtgcactggtgcaatctcggctcactgcaagctctgcctctcagattcaagcgattctcccacctcaccctcccgagtaggtgggactacaggccatcggtgctcggaacttgctcaaatctatagcaaagcagagagaagctcaacagcagcaacttcaagccctaatagcagaaaagaaaatgcagctagaaaggtatcgggttgaatatgaagctttgtgtaaagtagaagcagaacaaaatgaatttattgaccaatttatttttcagaaatgaactgaaaatttcgcttttatagtaggaaggcaaaacaaaaaaaagcctctcaaaaccaaaaaaacctctgtagcattccagcggcttgaccaatgacctatgtcacaagaggtggcgtgtaaggaatgcagccccctgaagacagcactacaagtctgggggagccagttttaacatcagtgcacagctgctgctggtggccctgcagtgtacgttctcacctcttatgcttagttggaactaagcagtttgtaaactttcatccttttttttgtaaattcacaaagctttggaaggagaagcaataaatttttgttttcaaatgaaaaaaaaaaaaaaaaaaaaaaaaaaaaaaaaaaaaaaaaaa

SEQ ID NO: 620 - protein, 148 aa, Homosapiens
MAKDILGEAGLHFDELNKLRVLDPEVTQQTIELKEECKDFVDKIGQFQKIVGGLIELVDQLAKEAENEKMKSLAVSPRLECTGAISAHCKLCLSDSSDSPTSPSRVGGTTGHRCSELAQIYSKAERSSTAATSSPNSRKENAARKVSG

SEQ ID NO: 621 - DNA, 3571 bp, Homosapiens
cacagcttgggactgctgaggggcaggcggctgcaggctaggggcggctcggagtccgctggccacccagctgagaggagaggcgcccccggggacgcactgagattatgaggctctggcctccactggccactcactcgtgaccctttccaccacggcggagccttccaagcctacctcctgccgtgtggtgatctacctgcagcgggagatgtcgggggacacctgcctgtgcccagcctcaggggccaagcccaagctcagtggcttcaagggaggagggttgggcaacaagtatgtccagctcaacgtgggcggctctctgtactacaccactgtgcgggccctgacccgccacgacaccatgctcaaggccatgttcagtgggcgcatggaggtgctgaccgacaaagaaggctggatcctcatagaccgttgtggaaagcactttggcaccattttgaattacctccgagatgacaccatcaccctccctcagaaccggcaagaaatcaaggaattgatggctgaagcaaagtattacctcatccaggggctggtgaatatgtgccagagtgccctgcaggacaagaaggactcctaccagcctgtgtgcaacatccccatcatcacatccctaaaggaggaggagcggctcatcgaatcctccaccaagcccgtggtgaagctgctgtacaacagaagcaacaacaagtattcctacaccagcaactctgacgaccacctgctgaaaaacatcgagctgtttgacaagctctccctgcgcttcaacggccgcgtgctcttcatcaaggatgtcattggtgacgagatctgctgctggtccttttatggccagggccgtaagctggcagaggtgtgctgtacctccatcgtgtatgccacggagaagaagcagaccaaggtggaattcccagaggcccgaatctatgaggagacactcaacgtcctactctatgagactccccgcgtccccgacaactccttgttggaggccacaagccgtagccgcagccaggcttcccccagtgaagatgaggagacctttgaactgcgggaccgtgtccgccgcatccacgtcaagcgctacagcacttacgatgaccggcagctcggccaccagtctacccatcgcgactgaccagaccctcagggagtcagggcacgggaggccctatctcccatcctgtggaacccgccccattggccaccccatgctgctgctgcctgggtctctgctctagcacccagaggcatgacaggccctgctcagaggtcagagggtctgggcagaggagggaccacattcccctgccttgcccctgagcacttctggagactgcgtcctgtcctatctgctcaccatcacccttcctgcccgacggagctgcttctgctccctggggcatatggactgacccacctcctgctgagaaccttcccctaggccctgtgcagaagggctactgccccttaggcctcagctgggggaaaggcagttctggtgctgtagaggccctggtgcagaaagtgggacgtcttttttcctaaggtgtttaagcacaggcttgataagtttggtttttaaaaaataatctaggaaatgaataattctaaatctagtaatgaggaaactgagcatttcttttgccctccagggtgccaagaccctacatatgacagaacccttggcccttctccatgcctgtgggatctgtttctttaaagcactttgtactgttattcaggaggttgataatctccttgacccatgtctttctaccctaatccccacttccctgcagaatcaatctgagggaggggataaagaggaagcaataaaaaaaaaacatccgacagagcagctctggctttgccagcctggccagcagctcagagtgcaccgaggagggaaggatggctaagctgggaccggcagtcctcacagggtgcctgtgagaaaggacattttacccccacatcatagtcacatcactgactcctaggtctagcacgactgctctttgtgattctcttgagtacccttggcttccagccatgctgtcctcacatacggtaaagccaaagagctgtcacatgggccagaaacatgagccacggcaggaagaccgtggagcccgtgggcactgcatggtgttggctggcatgcccatcagctgaggacagcaaactcccagcagcccctacagaggtggcacatgcttggccacacatctactccctgcccacaccatctatgctcttggttggtgctggctgggatggcggttctgcccagtggtgtctctgagcgcgggatgacaggagcaaccgaagcaccctgaaggccttcactccttgttgggtaactcagccatggagatgccaagcactagccaggaggtgagttcctctttagggctttggttttcattcctttttgtttggcttggccaaaccagaattcagcttatctgaattattttccaaaggaatgctgtcagggagggactgttctgccagcctaacaaagcaacgtagccacgtatagtacccactttctgctctttggagagaacacaggttatcaagttcatctctcttgactactcttatgatagctgatgccacagagcctatgggcaaatgccagacccagggttagacacaaggacctgaagtgacatgacggcgggacaggggaaatgtgactttctaattaggcattttatgttagtcacagtcttgaatgtataaacagcactaagactctcaggtcaggtaccttggtgatcagctactagttcttccagccctcattgaggtaacaagataaagacaaatccacttctttggccaaattcaggctttggctttatgactttcccacagagactggaatgcgtcagcctgagaccactggcctattttctcagctgccctcttgaggtcctttaacactcaaattcccagctccccactgaggtgttgtgatgcttgccttttgacctccccatcccctttagtccctgcttactactttgacattcacatcctcagtgtctcagtcttttttgccgagaaagcacagtagtctgggactgggcatttatcttctctgactgaaaatctctccttggtcttaaggaaaatactaacattgaactcactgacatgatcttagcttctttaatcagactttgtgacttaaaagtttgggggttttctttgaaagtttccagccctattcagaaagcaactcttggctgtgtgcatttttcaactccaagcagcccaggggtaagtaaacaaagtatggatgaaggtcagattttcttgtcagtttctgagaaacctggcagcctgctgttaacaacacaggccagtattgggttttattgaatttggtatgtgaccaaggtcggcctaaaggatggcgcaggtcctgggcaggaaagaatttttcctttatcacataactgtaatatttggttgctcagcataagtgatggaagcaaacactaatttctaataaaattgtgttaaactc

SEQ ID NO: 622 - protein, 316 aa, Homosapiens
MSGDTCLCPASGAKPKLSGFKGGGLGNKYVQLNVGGSLYYTTVRALTRHDTMLKAMFSGRMEVLTDKEGWILIDRCGKHFGTILNYLRDDTITLPQNRQEIKELMAEAKYYLIQGLVNMCQSALQDKKDSYQPVCNIPIITSLKEEERLIESSTKPVVKLLYNRSNNKYSYTSNSDDHLLKNIELFDKLSLRFNGRVLFIKDVIGDEICCWSFYGQGRKLAEVCCTSIVYATEKKQTKVEFPEARIYEETLNVLLYETPRVPDNSLLEATSRSRSQASPSEDEETFELRDRVRRIHVKRYSTYDDRQLGHQSTHRD

SEQ ID NO: 623 - DNA, 2703 bp, Homosapiens
ggacgccgcgcggggcagtgtgggactggggcggaacgccgcccggccgcgggtcgggctctgtgtcagcagccgggcgggcgctcgggcgggacatggcagcctgtacagcccggcgggccctggccgtgggcagccgctggtggtcccggtcgctgactggggcccggtggccaaggccgctctgtgcggcggccggagctggagccttctcgccagcgtcgaccacgacgacgcggaggcacctctcgtcccgaaaccgaccagagggcaaagtgttggagacagttggtgtgtttgaggtgccaaaacagaatggaaaatatgagaccgggcagcttttccttcatagcatttttggctaccgaggtgtcgtcctgtttccctggcaggccagactgtatgaccgggatgtggcttctgcagctccagaaaaagcagagaaccctgctggccatggctccaaggaggtgaaaggcaaaactcacacttactatcaggtgctgattgatgctcgtgactgcccacatatatctcagagatctcagacagaagctgtgaccttcttggctaaccatgatgacagtcgggccctctatgccatcccaggcttggactatgtcagccatgaagacatcctcccctacacctccactgatcaggttcccatccaacatgaactctttgaaagatttcttctgtatgaccagacaaaagcacctccttttgtggctcgggagacgctaagggcctggcaagagaagaatcacccctggctggagctctccgatgttcatcgggaaacaactgagaacatacgtgtcactgtcatccccttctacatgggcatgagggaagcccagaattcccacgtgtactggtggcgctactgtatccgtttggagaaccttgacagtgatgtggtacagctccgggagcggcactggaggatattcagtctctctggcaccttggagacagtgcgaggccgaggggtagtgggcagggaaccagtgttatccaaggagcagcctgcgttccagtatagcagccacgtctcactgcaggcttccagtgggcacatgtggggcacgttccgctttgaaagacctgatggctcccactttgatgttcggattcctcccttctccctggaaagcaataaagatgagaagacaccaccctcaggccttcactggtaggccagctgaggccccaagtgcccaggcttggtcaccgggaagaacaactctcatcccacaattgctgcagaactcttctctccccatcatgggccacagtgggtctcttaatttgattgtggggttctttttgtggggaggggtggtataacttttcttcagaagacccatgtgggacacctccaaggctggcctcctcataagccctgcctacaccatgttccagtaaacctctccaccaaggaactgtgttcagctgccacaggcctggaggagtttcctggcctgtcacgtgaggtttgatcagtaaaccagtgcacgcttggccacccttgccatttctgctcccagagtctcaggctccccttctgacccagtgtgcgcccttgactgctttctttgctgcccttccagggagctgcccccctggtagggcatgtgcctgtttccctctcagcctggaggctggctggacatctcctagggtcactgtgcctctcagctagttggcgggggtgctggactggactcttgttcactttaccttctgccaaatgcagagagggaggccagtgtcagggtcggagtggcctggctcttagcactgaccgaccattgccatttctggcctcgctaggcccaggagaggagggaggcaagccagtcgggtttcctggagcaatgggtgtgccagccctcagcatgactctgccaagcatccagaccacaaatgcaggaatttggctgaggagcagctttaggtatggattgatgactaagtcaagctacttcctgagcttctctcagatttccaagagccagagatgaattgtgctgcatcttgccccaattcttaggatttcttttcctccgccactgcagtgattgttagaggtagttttcttgaattaatattaaatcacagttccagcccttgttattcttgtccttagtcctccagggggagctggggttgcagggcaacagtacagtcgcgcttacgacctggctagaacacaaggtcagatgataaacagaagcacaggaactcagcccatggccgcaagctggtcaaggcctgctcactgtaaacatggctctgtaccattgagtttaacacaattttattagaaattagtgtttgcttccatcacttatgctgagcaaccaaatattacagttatgtgataaaggaaaaattctttcctgcccaggacctgcgccatcctttaggccgaccttggtcacataccaaattcaataaaacccaatactggcctgtgttgttaacagcaggctgccaggtttctcagaaactgacaagaaaatctgaccttcatccatactttgtttacttacccctgggctgcttggagttgaaaaatgcacacagccaagagttgctttctgaatagggctggaaactttcaaagaaaacccccaaacttttaagtcacaaagtctgattaaagaagctaagatcaaaaaaaaaaaaaaaaaa

SEQ ID NO: 624 - protein, 368 aa, Homosapiens
MAACTARRALAVGSRWWSRSLTGARWPRPLCAAAGAGAFSPASTTTTRRHLSSRNRPEGKVLETVGVFEVPKQNGKYETGQLFLHSIFGYRGVVLFPWQARLYDRDVASAAPEKAENPAGHGSKEVKGKTHTYYQVLIDARDCPHISQRSQTEAVTFLANHDDSRALYAIPGLDYVSHEDILPYTSTDQVPIQHELFERFLLYDQTKAPPFVARETLRAWQEKNHPWLELSDVHRETTENIRVTVIPFYMGMREAQNSHVYWWRYCIRLENLDSDVVQLRERHWRIFSLSGTLETVRGRGVVGREPVLSKEQPAFQYSSHVSLQASSGHMWGTFRFERPDGSHFDVRIPPFSLESNKDEKTPPSGLHW

SEQ ID NO: 625 - DNA, 1466 bp, Homosapiens
gctagatatggcgtcctctttgcttgcgggcgagcgattggtgcgtgctttgggccccggcggggagctggagccagagcggctaccccgaaagctgcgggccgagcttgaggccgcgctggggaagaagcacaagggcggtgatagctccagtggcccccaacgcttggtttctttccgtctcatccgggatctgcaccagcatctgagagaaagggattccaaactatacctccatgagctcctagaaggcagtgaaatctatctcccagaggttgtgaagcctccacggaacccagaactagttgcccggctggagaagattaagatacagctggccaatgaggaatataaacggatcacccgcaacgtcacttgtcaggatacaagacatggtgggactctcagcgacctgggaaagcaagtgagatcattgaaggctctggtcatcaccatcttcaatttcattgtcacggtggttgctgccttcgtctgcacttaccttggaagccaatatatcttcacagaaatggcctcgcgggtgctagctgcattgatcgtcgcctctgtggtgggtctggccgagctgtatgtcatggtgcgggcaatggaaggcgagctgggagaactgtaactggtgcttcatcatcaagtctagagaagactttgggggcttcaggctccaattggcagtcaccgactcagtcaacccatcagactttttgtattcagctccagttagtcagaagaccagcccaggccagctgctgtttctgtggggagccctaatcttctgtgaatttccaaagggagcattggaggagattgagataacacatctttaaaacagaaagaactggtcttggtctatcagtacctcttcctgaatctggtacccatctgccttctccagttcattctaaacactgctgggactagggtttttccatcaggagcaaatggaatccaggccttcccagaagtagaccatactgccttgaacttgtccatatgtacaaactaatcaccagctttctccatacatttttaatgcagacctgtaattgagttcagaagcctccaagaaaacagaaaggatcccctttctccagtttgtgctggaagaggagctgatcagagacatcaaataagagaaagatgggttgctagaggatggtagaactggaagcaaggcagctacctttttgcaaaaggaaatggtgttaggccccttttccagaagataagacagactcatagagattaaatgatcactatggtccttcttctgttaaatggagccaaagacgcctatgttgttctgaagtcttgtaatgtttaacttctgagaacttagattagtggtgtgatgatagagtctgtataacgcattgaaaagggtatcaggcttagttatttatccaataaatatttattgtatgcagggtaaaaaaaaaaaaaaaaaa

SEQ ID NO: 626 - protein, 208 aa, Homosapiens
MASSLLAGERLVRALGPGGELEPERLPRKLRAELEAALGKKHKGGDSSSGPQRLVSFRLIRDLHQHLRERDSKLYLHELLEGSEIYLPEVVKPPRNPELVARLEKIKIQLANEEYKRITRNVTCQDTRHGGTLSDLGKQVRSLKALVITIFNFIVTVVAAFVCTYLGSQYIFTEMASRVLAALIVASVVGLAELYVMVRAMEGELGEL

SEQ ID NO: 627 - DNA, 1678 bp, Homosapiens
gagcaaacagagcagcagaaaaggcagttcctcttctccagtgccctccttccctgtctctgcctctccctcccttcctcaggcatcagagcggagacttcagggagaccagagcccagcttgccaggcactgagctagaagccctgccatggcacccctgagaccccttctcatactggccctgctggcatgggttgctctggctgaccaagagtcatgcaagggccgctgcactgagggcttcaacgtggacaagaagtgccagtgtgacgagctctgctcttactaccagagctgctgcacagactatacggctgagtgcaagccccaagtgactcgcggggatgtgttcactatgccggaggatgagtacacggtctatgacgatggcgaggagaaaaacaatgccactgtccatgaacaggtggggggcccctccctgacctctgacctccaggcccagtccaaagggaatcctgagcagacacctgttctgaaacctgaggaagaggcccctgcgcctgaggtgggcgcctctaagcctgaggggatagactcaaggcctgagacccttcatccagggagacctcagcccccagcagaggaggagctgtgcagtgggaagcccttcgacgccttcaccgacctcaagaacggttccctctttgccttccgagggcagtactgctatgaactggacgaaaaggcagtgaggcctgggtaccccaagctcatccgagatgtctggggcatcgagggccccatcgatgccgccttcacccgcatcaactgtcaggggaagacctacctcttcaagggtagtcagtactggcgctttgaggatggtgtcctggaccctgattacccccgaaatatctctgacggcttcgatggcatcccggacaacgtggatgcagccttggccctccctgcccatagctacagtggccgggagcgggtctacttcttcaaggggaaacagtactgggagtaccagttccagcaccagcccagtcaggaggagtgtgaaggcagctccctgtcggctgtgtttgaacactttgccatgatgcagcgggacagctgggaggacatcttcgagcttctcttctggggcagaacctctgctggtaccagacagccccagttcattagccgggactggcacggtgtgccagggcaagtggacgcagccatggctggccgcatctacatctcaggcatggcaccccgcccctccttggccaagaaacaaaggtttaggcatcgcaaccgcaaaggctaccgttcacaacgaggccacagccgtggccgcaaccagaactcccgccggccatcccgcgccacgtggctgtccttgttctccagtgaggagagcaacttgggagccaacaactatgatgactacaggatggactggcttgtgcctgccacctgtgaacccatccagagtgtcttcttcttctctggagacaagtactaccgagtcaatcttcgcacacggcgagtggacactgtggaccctccctacccacgctccatcgctcagtactggctgggctgcccagctcctggccatctgtaggagtcagagcccacatggccgggccctctgtagctccctcctcccatctccttcccccagcccaataaaggtcccttagccccgagtttaaa

SEQ ID NO: 628 - protein, 478 aa, Homosapiens
MAPLRPLLILALLAWVALADQESCKGRCTEGFNVDKKCQCDELCSYYQSCCTDYTAECKPQVTRGDVFTMPEDEYTVYDDGEEKNNATVHEQVGGPSLTSDLQAQSKGNPEQTPVLKPEEEAPAPEVGASKPEGIDSRPETLHPGRPQPPAEEELCSGKPFDAFTDLKNGSLFAFRGQYCYELDEKAVRPGYPKLIRDVWGIEGPIDAAFTRINCQGKTYLFKGSQYWRFEDGVLDPDYPRNISDGFDGIPDNVDAALALPAHSYSGRERVYFFKGKQYWEYQFQHQPSQEECEGSSLSAVFEHFAMMQRDSWEDIFELLFWGRTSAGTRQPQFISRDWHGVPGQVDAAMAGRIYISGMAPRPSLAKKQRFRHRNRKGYRSQRGHSRGRNQNSRRPSRATWLSLFSSEESNLGANNYDDYRMDWLVPATCEPIQSVFFFSGDKYYRVNLRTRRVDTVDPPYPRSIAQYWLGCPAPGHL

SEQ ID NO: 629 - DNA, 6862 bp, Homosapiens
gccgagcggctggcggtgcctgggccagatgggggcggtggcacgggcccatggtgggctgcgggtggcccgggcccgcgaaagtgtcgccgggggcaggcaccgaggtgcaggacgccctggagcgcgcgctgccggagctgcagcaggccttgtccgcgctgaagcaggcgggcggcgcgcgggccgtgggcgccggcctggccgaggtcttccaactggtggaggaggcctggctgctgcggccgtgggccgcgaggtagcccagggtctgtgcgacgccatccgcctcgatggcggcctcgacctgctgttgcggctgctgcaggcgccggagttggagacgcgtgtgcaggccgcgcgcctgctggagcagatcctggtggctgagaaccgagaccgcgtggcgcgcattgggctgggcgtgatcctgaacctggcgaaggaacgcgaacccgtagagctggcgcggagcgtggcaggcatcttggagcacatgttcaagcattcggaggagacatgccagaggctggtggcggccggcggcctggacgcggtgctgtattggtgccgccgcacggaccccgcgctgctgcgccactgcgcgctggcgctgggcaactgcgcgctgcacgggggccaggcggtgcagcgacgcatggtagagaagcgcgcagccgagtggctcttcccgctcgccttctccaaggaggacgagctgcttcggctgcacgcctgcctcgcagtagcggtgttggcgactaacaaggaggtggagcgcgaggtggagcgctcgggcacgctggcgctcgtggagccgcttgtggcctcgctggaccctggccgcttcgcccgctgtctggtggacgccagcgacacaagccagggccgcgggcccgacgacctgcagcgcctcgtgccgttgctcgactctaaccgcttggaggcgcagtgcatcggggctttctacctctgcgccgaggctgccatcaagagcctgcaaggcaagaccaaggtgttcagcgacatcggcgccatccagagcctgaaacgcctggtttcctactctaccaatggcactaagtcggcgctggccaagcgcgcgctgcgcctgctgggcgaggaggtgccacggcccatcctgccctccgtgcccagctggaaggaggccgaggttcagacgtggctgcagcagatcggtttctccaagtactgcgagagcttccgggagcagcaggtggatggcgacctgcttctgcggctcacggaggaggaactccagaccgacctgggcatgaaatcgggcatcacccgcaagaggttctttagggagctcacggagctcaagaccttcgccaactattctacgtgcgaccgcagcaacctggcggactggctgggcagcctggacccgcgcttccgtcagtacacctacggcctggtcagctgcggcctggaccgctccctgctgcaccgcgtgtctgagcagcagctgctggaagactgcggcatccacctgggcgtgcaccgcgcccgcatcctcacggcggccagagaaatgctacactccccgctgccctgtactggtggcaaacccagtggggacactccagatgtcttcatcagctaccgccggaactcaggttcccagctggccagtctcctgaaggtgcacctgcagctgcatggcttcagtgtcttcattgatgtggagaagctggaagcaggcaagttcgaggacaaactcatccagagtgtcatgggtgcccgcaactttgtgttggtgctatcacctggagcactggacaagtgcatgcaagaccatgactgcaaggattgggtgcataaggagattgtgactgctttaagctgcggcaagaacattgtgcccatcattgatggcttcgagtggcctgagccccaggtcctgcctgaggacatgcaggctgtgcttactttcaacggtatcaagtggtcccacgaataccaggaggccaccattgagaagatcatccgcttcctgcagggccgctcctcccgggactcatctgcaggctctgacaccagtttggagggtgctgcacccatgggtccaacctaaccagtccccagttccccagccctgctgtgacttccatttccatcgtcctttctgaaggaacagctcctgaaaccagtctccctgggctgagacaacctgggctcttcttaggaaatggctctccctccccctgtcccccaccctcatggcccacctccaacccactttcctcagtatctggagagggaagggaagtcaggcttgggcacgggaggttagaactcccccaggccctgccattgggttgtctgtctccgtcatggggagggtccctgctcagttctggagacactggagttggggtgggggtggttctgcattcccttctcctgctgatagcagtcagcttgaggaggatgaaggaaggcagcctcagacaggaattaaggcaatgcccaggcgggcctgggcactgtattctgagcaagggcctgggcccaggagccagccagggatgagtgccatcatggctctccactcagactgtgcctggcccctgcacttacaacttcctgccgctctgtggccttgccctgtaatcactcagtgcccttagctagcctgactaagtcccagatcccctacagcttccttcggtgtggtatcttttgccacatccagggcgagggttgaggcaaaccagccctccctctgacttccttgtcactgcagccagctttgctgcacttgctggtgcacaggagcctcctgtttgggcctgggtctgggcatggggaggccgtgcctcaaagcccaccctaccccatgccttggtgctgtgcctcaggctccttcctggtctggcccagctggcttccccagcccctcagccatccagggctacccactgcttactcagggaccaggcagcccccatggcagtaaaagcagcctagacagaacctgcagctctgtggaaagaggcaaagtcctgaaaaggcaaagggttgtcacttagggcagcttctccaactttaacatgcatccaagtcacctgggaatgttgttaaaatcaggagatctggggtggggcctaggactctgcatttcttacagattcccaggtgagctgatgctggtggttaagggtagcaaatctctaaagcacgaagccctcacaaatctttgccatttcccaaacactccgctccatggtctccagtcatcagagcaactctacctggtattatcatccccattttacagataatgacactgaggctcagaaaggttgaggataagcccactttcctgtcattagtggcagccccagatccagacctaggcctcctggcacccagtccactggcagtggaattgctttcctgagaatcattctgaggctgggctattgcttctcccttgcttcaaagaatctagcagcgggggataggattttgcaacaaaaagctgacccagaggccatacagagcaggaatatcccattgccccctcctccactgggttcagagggtaagaaagcaccctccaataaacccaggctccaggccgtgggggctgctgaaggctctttccccgcaagggccaggtgttgacaccttaaagctggctgcgcccccagccccactcttggctgtgctggccaggtgactcctagttcttggccacatcatcagaaagtcaaaggtctcactccaggtttggggctccttccttccactcccctccctgccagagtctgtcttggccagtgccagcctcgatgctttggttttgaccccacctgatcctcctttcctcatgcagcacaagtgctcaccggggccagagccagggcatggatatgacaagcagggcagcctggacactgccctcacaggacagcgccaataacaatacagtgtctgagtatctccaggggatgatttctggctctttgtctccaatcagtcccactccctcctgaggtccccaagggcagtattcagagaggtttcctgcgttttatttctatttggtataccctccactgttgtccactgccctgtgtggccttctggttgacctctgcccgatcttctgtctctctgagggaatcagagtccagcatccagccccagctggaacagctgaagtcacaagcctcctctaagccaaggccagtgtgttcagaggtgactgccacccatactaggacaaacacagctcagatcaccaggtcaagcacctaggcctggcttctcctgagacagaggactcagaagtggcctttcctccaaagcctgctcagacacaggtctgtagggccagggtgttctgcttggctgggctgcagctgctacccctcggttggggctgagtcagccagatcctccccctacttctccccaagggccaagaactgctcagggacattaaaggtcaaaagtccagccacactcattcatcctttccccaggcccatgaagagaggcatctcattgtagaatgtatgaggaagtgggaagtatctcagagaatcagctaagtttcctaacttgtccatccaaatgtgatcaccacgattcaacaatttggggcattgctgatctagccgttcctagtggggcttgctcaaggttgcacagcgagtcagtagaagccctggctggccccacttggtaccaatccaccaggcagctcagggctcctgcccagcccagcagcttctgttgtctaacgtatggcaggcagactgggagcaggaaaacagagggccccaaagcccaaggcaccagaaggtttgtttcagtttgctgaagctgatttgtaatgattggcactcttcagccaggggagtgggtaggccatagccaaggatcgattccccaaccacagcaaaggcaacactcttcctccagagatcaccaagcccctcttacctccctccctccttcccaaggctggcactaaccaggtaccacattcattgttaaggaatggctgatgactgctacacgtgttgggaacctggttggggctgtgcagtttgggctggaaggagagatgccagccctcgtgctgcctctggtccctgaagtgtcacctctctcaggacctctcctctggcctgtggggttataagtgatggatagcagaaagggagaactgactcctgtcccaaatagctcctctgccacctgtcctgcagtgggcctgtgtgggttatgattctagatcctagacagaggctgggtcagctgtggatggggtggtgccttggtctctcttgactacctcgtccaaagagagcactgcccttagacaagagttgcttgtcctgctgtgggctgggcttccagctgcagacctccagttgcttggtgttcactttgctcctcttgccctctgtcttctggtccaggcagatcaggggctctggggaaactgctggaactcgaggtgaggatcagccttttccagcatcctgtgagagaccagagagagagtttggatttcatgtggggaaccctcaaggcctgtctggagaagtgacacaggatttactggggtgggctggtccaggtagctctcctgaacctcctccttccccaagctgagaagctgagagctggaggacaatatccagggacatggctctggaaaataactttttttttttaagagacagggtcttgctctgttgtccaggctggagggcagtgacataatcatagctcactgtacccttgaactcctgggctcaagtgatcctcctgcctcagcctccttagtagctgggactaccagtgcataccaccatgcctgggtgattttttaaattttttatacagacaaggtcttgctatgttgcccaggctgatcttgaattcccgggctcaagtggtcctcctgcctcagcctcccacaggatcgggattacaggcaagagcctccacgcccggccatgaaatataattcttaatatcatacaggaaaaagtcagcgggtcaagctagcctgtggcccagccacaactagctgacaaagcttcctggccttccctttaacacagttctgctgccatagttccatctataaaatgggaatggagggaaataggggaactgggagagagaacacagccttgccaagcagcaatgttagcctgatccttcctccacctagctcgccatctcgcccttggaaaatggctcctggaggattaggcagccatctgcaaggagaggggcaacctgggacaagacacccagagggtaaggattccaggaatgaagctgccatttctggttgggaggagaagaggaaacttttaagagaaagggctccattatgagcatgggttcagggccctgcattacccaatcagaacagccgggatgagcaggaggccagctcccaggaggaaggggaaccccttcataaagttcagagtggctgggtagagtgagttgaagatgccggaggccgtcagcatggccaggctattcacacaggccacagcagaaaagagagcacctgtgaagaaataaataccatactctggagtccgaaagggccatattccaactctggcaccaccacctcacagctgtgtgaccgggagtagtcacttaacctatgtctccccttcctcaccagtaaatcctgctacatcatgtactgtgacaaggattcagtaaggtcatatgtggacagtagctggcacagaggggctactaaacaaatggctgctattaaatccacattaaaagtacatgtgatctgacagaacccagcacataaaagaaaaaaaaaagt

SEQ ID NO: 630 - protein, 690 aa, Homosapiens
MGAVARAHGGLRVARARESVAGGRHRGAGRPGARAAGAAAGLVRAEAGGRRAGRGRRPGRGLPTGGGGLAAAAVGREVAQGLCDAIRLDGGLDLLLRLLQAPELETRVQAARLLEQILVAENRDRVARIGLGVILNLAKEREPVELARSVAGILEHMFKHSEETCQRLVAAGGLDAVLYWCRRTDPALLRHCALALGNCALHGGQAVQRRMVEKRAAEWLFPLAFSKEDELLRLHACLAVAVLATNKEVEREVERSGTLALVEPLVASLDPGRFARCLVDASDTSQGRGPDDLQRLVPLLDSNRLEAQCIGAFYLCAEAAIKSLQGKTKVFSDIGAIQSLKRLVSYSTNGTKSALAKRALRLLGEEVPRPILPSVPSWKEAEVQTWLQQIGFSKYCESFREQQVDGDLLLRLTEEELQTDLGMKSGITRKRFFRELTELKTFANYSTCDRSNLADWLGSLDPRFRQYTYGLVSCGLDRSLLHRVSEQQLLEDCGIHLGVHRARILTAAREMLHSPLPCTGGKPSGDTPDVFISYRRNSGSQLASLLKVHLQLHGFSVFIDVEKLEAGKFEDKLIQSVMGARNFVLVLSPGALDKCMQDHDCKDWVHKEIVTALSCGKNIVPIIDGFEWPEPQVLPEDMQAVLTFNGIKWSHEYQEATIEKIIRFLQGRSSRDSSAGSDTSLEGAAPMGPT

SEQ ID NO: 631 - DNA, 2096 bp, Homosapiens
acagcgcaagccccacgccacgcgtcgctggtcccaggcagcgagtcgctcgcgcgccccgccgcccgcctggcgacagctccgccgcgcacgcacatggaggggagcgcgagccccccggaaaagccccgcgcccgccctgcggctgccgtgctgtgccggggcccggtagagccgctggtcttcctggccaactttgccttggtcctgcagggcccgctcaccacgcagtatctgtggcaccgcttcagcgccgacctcggctacaatggcacccgccaaagggggggctgcagcaaccgcagcgcggaccccaccatgcaggaagtggagacccttacctcccactggaccctctacatgaacgtgggcggcttcctggtggggctcttctcgtccaccctgctgggagcttggagcgacagtgtgggccgccgcccgctgctagtgctggcctcgctgggcctgctgctccaggccctagtgtccgtttttgtggtgcagctgcagctccacgtcggctacttcgtgctgggtcgcatcctttgtgccctcctcggcgacttcggtggccttctggctgctagctttgcgtccgtggcagatgtcagctccagtcgcagccgcaccttccggatggccctgctagaagccagcatcggggtggctgggatgctggcaagcctcctcgggggccactggctccgggcccagggttatgccaaccccttctggctggccttggccttgctgatagccatgactctctatgcagctttctgctttggtgagaccttaaaggagccaaagtccacccggctcttcacgttccgtcaccaccgatccattgtccagctctatgtggctcccgccccagagaagtccaggaaacatttagccctctactcactggccatcttcgtggtgatcactgtgcactttggggcccaggacatcttaaccctttatgaactaagcacacccctctgctgggactccaaactaatcggctatggttctgcagctcagcatctcccctacctcaccagcctgctggccctgaagctcctgcagtactgcctggccgatgcctgggtagctgagatcggcctggccttcaacatcctggggatggtggtctttgcctttgccactatcacgcctctcatgttcacaggatatgggttgcttttcctgtcattagtcatcacacctgtcatccgggctaaactctccaagctggtgagagagacagagcagggtgctctcttttctgctgtggcctgtgtgaatagcctggccatgctgacggcctccggcatcttcaactcactctacccagccactctgaactttatgaaggggttccccttcctcctgggagctggcctcctgctcatcccggctgttctgattgggatgctggaaaaggctgatcctcacctcgagttccagcagtttccccagagcccctgatctgcctggaccagaagacagagggcaagaggagcaaagtgaacaccaagcaactggaggtctgcagctggaagcccagcccacagcaggacaagcaactcttgtctaagggcagtgctctctttggacgaggtagtcaagagagaccaaggcaccaccccatccacagctgacccagcctctgtctaggatctagaatcataacccacacaggcccactgcaggacaggtggcagaggagctatttgggacaggagtcagttctccctttctgctatccatcacttataaccccacaggccagaggagaggtcctgagagaggtgacacttcggggaccagaggcagcacgagggctggcatctctccttccagcccaaactgcacagccccaaccaggttcccaacacgtgtagcagtcatcagccattccttaacaatgaatgtggtacctggttagtgccagccttgggaaggagggagggaggtaagaggggcttggtgatctctggaggaagagtgttgcctttgctgtggttggggaatcgatccttggctatggcctacccactcccctggctgaagagtgccaatcattacaaatcagcttcagcaaactg

SEQ ID NO: 632 - protein, 459 aa, Homosapiens
MEGSASPPEKPRARPAAAVLCRGPVEPLVFLANFALVLQGPLTTQYLWHRFSADLGYNGTRQRGGCSNRSADPTMQEVETLTSHWTLYMNVGGFLVGLFSSTLLGAWSDSVGRRPLLVLASLGLLLQALVSVFVVQLQLHVGYFVLGRILCALLGDFGGLLAASFASVADVSSSRSRTFRMALLEASIGVAGMLASLLGGHWLRAQGYANPFWLALALLIAMTLYAAFCFGETLKEPKSTRLFTFRHHRSIVQLYVAPAPEKSRKHLALYSLAIFVVITVHFGAQDILTLYELSTPLCWDSKLIGYGSAAQHLPYLTSLLALKLLQYCLADAWVAEIGLAFNILGMVVFAFATITPLMFTGYGLLFLSLVITPVIRAKLSKLVRETEQGALFSAVACVNSLAMLTASGIFNSLYPATLNFMKGFPFLLGAGLLLIPAVLIGMLEKADPHLEFQQFPQSP

SEQ ID NO: 633 - DNA, 5515 bp, Homosapiens
cttttttcccttcttcaggtcaggggaaagggaatgcccaattcagagagacatgggggcaagaaggacgggagtggaggagcttctggaactttgcagccgtcatcgggaggcggcagctctaacagcagagagcgtcaccgcttggtatcgaagcacaagcggcataagtccaaacactccaaagacatggggttggtgacccccgaagcagcatccctgggcacagttatcaaacctttggtggagtatgatgatatcagctctgattccgacaccttctccgatgacatggccttcaaactagaccgaagggagaacgacgaacgtcgtggatcagatcggagcgaccgcctgcacaaacatcgtcaccaccagcacaggcgttcccgggacttactaaaagctaaacagaccgaaaaagaaaaaagccaagaagtctccagcaagtcgggatcgatgaaggaccggatatcgggaagttcaaagcgttcgaatgaggagactgatgactatgggaaggcgcaggtagccaaaagcagcagcaaggaatccaggtcatccaagctccacaaggagaagaccaggaaagaacgggagctgaagtctgggcacaaagaccggagtaaaagtcatcgaaaaagggaaacacccaaaagttacaaaacagtggacagcccaaaacggagatccaggagcccccacaggaagtggtctgacagctccaaacaagatgatagcccctcgggagcttcttatggccaagattatgaccttagtccctcacgatctcatacctcgagcaattatgactcctacaagaaaagtcctggaagtacctcgagaaggcagtcggtcagtcccccttacaaggagccttcggcctaccagtccagcacccggtcaccgagcccctacagtaggcgacagagatctgtcagtccctatagcaggagacggtcgtccagctacgaaagaagtggctcttacagcgggcgatcgcccagtccctatggtcgaaggcggtccagcagccctttcctgagcaagcggtctctgagtcggagtccactccccagtaggaaatccatgaagtccagaagtagaagtcctgcatattcaagacattcatcttctcatagtaaaaagaagagatccagttcacgcagtcgtcattccagtatctcacctgtcaggcttccacttaattccagtctgggagctgaactcagtaggaaaaagaaggaaagagcagctgctgctgctgcagcaaagatggatggaaaggagtccaagggttcacctgtatttttgcctagaaaagagaacagttcagtagaggctaaggattcaggtttggagtctaaaaagttacccagaagtgtaaaattggaaaaatctgccccagatactgaactggtgaatgtaacacatctaaacacagaggtaaaaaattcttcagatacagggaaagtaaagttggatgagaactccgagaagcatcttgttaaagatttgaaagcacagggaacaagagactctaaacccatagcactgaaagaggagattgttactccaaaggagacagaaacatcagaaaaggagacccctccacctcttcccacaattgcttctcccccaccccctctaccaactactacccctccacctcagacaccccctttgccacctttgcctccaataccagctcttccacagcaaccacctctgcctccttctcagccagcatttagtcaggttcctgcttccagtacttcaactttgcccccttctactcactcaaagacatctgctgtgtcctctcaggcaaattctcagccccctgtacaggtttctgtgaagactcaagtatctgtaacagctgctattccacacctgaaaacttcaacgttgcctcctttgcccctcccacccttattacctggaggtgatgacatggatagtccaaaagaaactcttccttcaaaacctgtgaagaaagagaaggaacagaggacacgtcacttactcacagaccttcctctccctccagagctccctggtggagatctgtctcccccagactctccagaaccaaaggcaatcacaccacctcagcaaccatataaaaagagaccaaaaatttgttgtcctcgttatggagaaagaagacaaacagaaagcgactgggggaaacgctgtgtggacaagtttgacattattgggattattggagaaggaacctatggccaagtatataaagccagggacaaagacacaggagaactagtggctctgaagaaggtgagactagacaatgagaaagagggcttcccaatcacagccattcgtgaaatcaaaatccttcgtcagttaatccaccgaagtgttgttaacatgaaggaaattgtcacagataaacaagatgcactggatttcaagaaggacaaaggtgccttttaccttgtatttgagtatatggaccatgacttaatgggactgctagaatctggtttggtgcacttttctgaggaccatatcaagtcgttcatgaaacagctaatggaaggattggaatactgtcacaaaaagaatttcctgcatcgggatattaagtgttctaacattttgctgaataacagtgggcaaatcaaactagcagattttggacttgctcggctctataactctgaagagagtcgcccttacacaaacaaagtcattactttgtggtaccgacctccagaactactgctaggagaggaacgttacacaccagccatagatgtttggagctgtggatgtattcttggggaactattcacaaagaagcctatttttcaagccaatctggaactggctcagctagaactgatcagccgactttgtggtagcccttgtccagctgtgtggcctgatgttatcaaactgccctacttcaacaccatgaaaccgaagaagcaatatcgaaggcgtctacgagaagaattctctttcattccttctgcagcacttgatttattggaccacatgctgacactagatcctagtaagcggtgcacagctgaacagaccctacagagcgacttccttaaagatgtcgaactcagcaaaatggctcctccagacctcccccactggcaggattgccatgagttgtggagtaagaaacggcgacgtcagcgacaaagtggtgttgtagtcgaagagccacctccatccaaaacttctcgaaaagaaactacctcagggacaagtactgagcctgtgaagaacagcagcccagcaccacctcagcctgctcctggcaaggtggagtctggggctggggatgcaataggccttgctgacatcacacaacagctgaatcaaagtgaattggcagtgttattaaacctgctgcagagccaaaccgacctgagcatccctcaaatggcacagctgcttaacatccactccaacccagagatgcagcagcagctggaagccctgaaccaatccatcagtgccctgacggaagctacttcccagcagcaggactcagagaccatggccccagaggagtctttgaaggaagcaccctctgccccagtgatcctgccttcagcagaacagatgacccttgaagcttcaagcacaccagctgacatgcagaatatattggcagttctcttgagtcagctgatgaaaacccaagagccagcaggcagtctggaggaaaacaacagtgacaagaacagtgggccacaggggccccgaagaactcccacaatgccacaggaggaggcagcagcatgtcctcctcacattcttccaccagagaagaggccccctgagccccccggacctccaccgccgccacctccaccccctctggttgaaggcgatctttccagcgccccccaggagttgaacccagccgtgacagccgccttgctgcaacttttatcccagcctgaagcagagcctcctggccacctgccacatgagcaccaggccttgagaccaatggagtactccacccgaccccgtccaaacaggacttatggaaacactgatgggcctgaaacagggttcagtgccattgacactgatgaacgaaactctggtccagccttgacagaatccttggtccagaccctggtgaagaacaggaccttctcaggctctctgagccaccttggggagtccagcagttaccagggcacagggtcagtgcagtttccaggggaccaggacctccgttttgccagggtccccttagcgttacacccggtggtcgggcaaccattcctgaaggctgagggaagcagcaattctgtggtacatgcagagaccaaattgcaaaactatggggagctggggccaggaaccactggggccagcagctcaggagcaggccttcactgggggggcccaactcagtcttctgcttatggaaaactctatcgggggcctacaagagtcccaccaagagggggaagagggagaggagttccttactaacccagagacttcagtgtcctgaaagattcctttcctatccatccttccatccagttctctgaatctttaatgaaatcatttgccagagcgaggtaatcatctgcatttggctactgcaaagctgtccgttgtattccttgctcacttgctactagcaggcgacttaggaaataatgatgttggcaccagttccccctggatgggctatagccagaacatttacttcaactctaccttagtagatacaagtagagaatatggagaggatcattacattgaaaagtaaatgttttattagttcattgcctgcacttactggtcggaagagagaaagaacagtttcagtattgagatggctcaggagaggctctttgatttttaaagttttggggtggggggttgtgtgtggtttctttcttttgaattttaatttaggtgttttgggtttttttcctttaaagagaatagtgttcacaaaatttgagctgctctttggcttttgctataagggaaacagagtggcctggctgatttgaataaatgtttctttcctctccaccatctcacattttgcttttaagtgaacactttttccccattgagcatcttgaacatactttttttccaaataaattactcatccttaaagtttactccactttgacaaaagatacgcccttctccctgcacataaagcaggttgtagaacgtggcattcttgggcaagtaggtagactttacccagtctctttccttttttgctgatgtgtgctctctctctctctttctctctctctctctctctctctctctctctgtctgtctcgcttgctcgctctcgctgtttctctctctttgaggcatttgtttggaaaaaatcgttgagatgcccaagaacctgggataattctttactttttttgaaataaaggaaaggaaattcaaaaaaaaaaaaaaaaaaaaaaaaaaaaaaaaaaaaaaaaaaaaaaaaaaaaaaaaaaaaaaaaaa

SEQ ID NO: 634 - protein, 1490 aa, Homosapiens
MPNSERHGGKKDGSGGASGTLQPSSGGGSSNSRERHRLVSKHKRHKSKHSKDMGLVTPEAASLGTVIKPLVEYDDISSDSDTFSDDMAFKLDRRENDERRGSDRSDRLHKHRHHQHRRSRDLLKAKQTEKEKSQEVSSKSGSMKDRISGSSKRSNEETDDYGKAQVAKSSSKESRSSKLHKEKTRKERELKSGHKDRSKSHRKRETPKSYKTVDSPKRRSRSPHRKWSDSSKQDDSPSGASYGQDYDLSPSRSHTSSNYDSYKKSPGSTSRRQSVSPPYKEPSAYQSSTRSPSPYSRRQRSVSPYSRRRSSSYERSGSYSGRSPSPYGRRRSSSPFLSKRSLSRSPLPSRKSMKSRSRSPAYSRHSSSHSKKKRSSSRSRHSSISPVRLPLNSSLGAELSRKKKERAAAAAAAKMDGKESKGSPVFLPRKENSSVEAKDSGLESKKLPRSVKLEKSAPDTELVNVTHLNTEVKNSSDTGKVKLDENSEKHLVKDLKAQGTRDSKPIALKEEIVTPKETETSEKETPPPLPTIASPPPPLPTTTPPPQTPPLPPLPPIPALPQQPPLPPSQPAFSQVPASSTSTLPPSTHSKTSAVSSQANSQPPVQVSVKTQVSVTAAIPHLKTSTLPPLPLPPLLPGGDDMDSPKETLPSKPVKKEKEQRTRHLLTDLPLPPELPGGDLSPPDSPEPKAITPPQQPYKKRPKICCPRYGERRQTESDWGKRCVDKFDIIGIIGEGTYGQVYKARDKDTGELVALKKVRLDNEKEGFPITAIREIKILRQLIHRSVVNMKEIVTDKQDALDFKKDKGAFYLVFEYMDHDLMGLLESGLVHFSEDHIKSFMKQLMEGLEYCHKKNFLHRDIKCSNILLNNSGQIKLADFGLARLYNSEESRPYTNKVITLWYRPPELLLGEERYTPAIDVWSCGCILGELFTKKPIFQANLELAQLELISRLCGSPCPAVWPDVIKLPYFNTMKPKKQYRRRLREEFSFIPSAALDLLDHMLTLDPSKRCTAEQTLQSDFLKDVELSKMAPPDLPHWQDCHELWSKKRRRQRQSGVVVEEPPPSKTSRKETTSGTSTEPVKNSSPAPPQPAPGKVESGAGDAIGLADITQQLNQSELAVLLNLLQSQTDLSIPQMAQLLNIHSNPEMQQQLEALNQSISALTEATSQQQDSETMAPEESLKEAPSAPVILPSAEQMTLEASSTPADMQNILAVLLSQLMKTQEPAGSLEENNSDKNSGPQGPRRTPTMPQEEAAACPPHILPPEKRPPEPPGPPPPPPPPPLVEGDLSSAPQELNPAVTAALLQLLSQPEAEPPGHLPHEHQALRPMEYSTRPRPNRTYGNTDGPETGFSAIDTDERNSGPALTESLVQTLVKNRTFSGSLSHLGESSSYQGTGSVQFPGDQDLRFARVPLALHPVVGQPFLKAEGSSNSVVHAETKLQNYGELGPGTTGASSSGAGLHWGGPTQSSAYGKLYRGPTRVPPRGGRGRGVPY

SEQ ID NO: 635 - DNA, 2019 bp, Homosapiens
agagatgccacactcgctccgcggttcgcatggcgctctgaagacgccggcgcccgccgccttgaggagccgctgcccccgctccctgaagatgggggaacaatgaaataagcgagaagatccctcttctcccccctctctctcttgccccctccccccctcccctcccctctccccttgactcctctccgaggcaccatgctgacccgcctgttcagcgagcccggccttctctcggacgtgcccaagttcgccagctggggcgacggcgaagacgacgagccgaggagcgacaagggcgacgcgccgccaccgccaccgcctgcgcccgggccaggggctccggggccagcccgggcggccaagccagtccctctccgtggagaagaggggacggaggccacgttggccgaggtcaaggaggaaggcgagctggggggagaggaggaggaggaagaggaggaggaagaaggactggacgaggcggagggcgagcggcccaagaagggcgggcccaagaagcgcaagatgaccaaggcgcgcttggagcgctccaagcttcggcggcagaaggcgaacgcgcgggagcgcaaccgcatgcacgacctgaacgcagccctggacaacctgcgcaaggtggtgccctgctactccaagacgcagaagctgtccaagatcgagacgctgcgcctagccaagaactatatctgggcgctctcggagatcctgcgctccggcaagcggccagacctagtgtcctacgtgcagactctgtgcaagggtctgtcgcagcccaccaccaatctggtggccggctgtctgcagctcaactctcgcaacttcctcacggagcaaggcgccgacggtgccggccgcttccacggctcgggcggcccgttcgccatgcacccctacccgtacccgtgctcgcgcctggcgggcgcacagtgccaggcggccggcggcctgggcggcggcgcggcgcacgccctgcggacccacggctactgcgcagcctacgagacgctgtatgcggcggcaggcggtggcggcgcgagcccggactacaacagctccgagtacgagggcccgctcagccccccgctctgtctcaatggcaacttctcactcaagcaggactcctcgcccgaccacgagaaaagctaccactactctatgcactactcggcgctgcccggttcgcggcccacgggccacgggctagtcttcggctcgtcggctgtgcgcgggggcgtccactcggagaatctcttgtcttacgatatgcaccttcaccacgaccggggccccatgtacgaggagctcaatgcgttttttcataactgagacttcgcgccggctcccttctttttcttttgcctttgcccgccccccctgtccccagcccccagagcgcagggacacccccatcctaccccggcgccgggcgcggggagcgggccaccggtcctgccgctctcctggggcagcgcagtcctgttacctgtgggtggcctgtcccaggggcctcgcttcccccaggggactcgccttctctctccgcaaggggttccctcctcctctctcccaaggagtgcttctccagggacctctctccgggggctccctggaggcacccctcccccattcccaatatcttcgctgaggtttcctcctccccctcctccctgcaggcccaaggcgttggtaagggggcagctgagcaatggaacgcgtttccccctctcattattattttaaaaacagacacccagctgccgaggcaaaaaggagccaggcgctccctctttcttgaagagggtagaagttagggcgccggagcccgggcctggaacgccctcacccccaacctccagtctccgcgttttgcgattttaattttggcgggaggggaagtggattgagaggaaagagagaggccaagacaatttgtaactagaatccgtttttcccttttcctttttttaaacaaacaaacatacaaaaaaaaaaaaaaaa

SEQ ID NO: 636 - protein, 382 aa, Homosapiens
MLTRLFSEPGLLSDVPKFASWGDGEDDEPRSDKGDAPPPPPPAPGPGAPGPARAAKPVPLRGEEGTEATLAEVKEEGELGGEEEEEEEEEEGLDEAEGERPKKGGPKKRKMTKARLERSKLRRQKANARERNRMHDLNAALDNLRKVVPCYSKTQKLSKIETLRLAKNYIWALSEILRSGKRPDLVSYVQTLCKGLSQPTTNLVAGCLQLNSRNFLTEQGADGAGRFHGSGGPFAMHPYPYPCSRLAGAQCQAAGGLGGGAAHALRTHGYCAAYETLYAAAGGGGASPDYNSSEYEGPLSPPLCLNGNFSLKQDSSPDHEKSYHYSMHYSALPGSRPTGHGLVFGSSAVRGGVHSENLLSYDMHLHHDRGPMYEELNAFFHN

SEQ ID NO: 637 - DNA, 1841 bp, Homosapiens
agctgggaccggagggtgagcccggcagaggcagagacacacgcggagaggaggagaggctgagggagggaggtggagaaggacgggagaggcagagagaggagacacgcagagacactcaggaggggagagacaccgagacgcagagacactcaggaggggagagacaccgagacgcagagacacccaggccggggagcgcgagggagcgaggcacagacctggctcagcgagcgcggggggcgagccccgagtcccgagagcctgggggcgcgcccagcccgggcgccgaccctcctcccgctcccgcgccctcccctcggcgggcacggtatttttatccgtgcgcgaacagccctcctcctcctctcgccgcacagcccgccgcctgcgcgggggagcccagcacagaccgccgccgggaccccgagtcgcgcaccccagccccaccgcccaccccgcgcgccatggaccccaaggaccgcaagaagatccagttctcggtgcccgcgccccctagccagctcgacccccgccaggtggagatgatccggcgcaggagaccaacgcctgccatgctgttccggctctcagagcactcctcaccagaggaggaagcctccccccaccagagagcctcaggagaggggcaccatctcaagtcgaagagacccaacccctgtgcctacacaccaccttcgctgaaagctgtgcagcgcattgctgagtctcacctgcagtctatcagcaatttgaatgagaaccaggcctcagaggaggaggatgagctgggggagcttcgggagctgggttatccaagagaggaagatgaggaggaagaggaggatgatgaagaagaggaagaagaagaggacagccaggctgaagtcctgaaggtcatcaggcagtctgctgggcaaaagacaacctgtggccagggtctggaagggccctgggagcgcccaccccctctggatgagtccgagagagatggaggctctgaggaccaagtggaagacccagcactaagtgagcctggggaggaacctcagcgcccttccccctctgagcctggcacataggcacccagcctgcatctcccaggaggaagtggaggggacatcgctgttccccagaaacccactctatcctcaccctgttttgtgctcttcccctcgcctgctagggctgcggcttctgacttctagaagactaaggctggtctgtgtttgcttgtttgcccacctttggctgatacccagagaacctgggcacttgctgcctgatgcccacccctgccagtcattcctccattcacccagcgggaggtgggatgtgagacagcccacattggaaaatccagaaaaccgggaacagggatttgcccttcacaattctactccccagatcctctcccctggacacaggagacccacagggcaggaccctaagatctggggaaaggaggtcctgagaaccttgaggtacccttagatccttttctacccactttcctatggaggattccaagtcaccacttctctcaccggcttctaccagggtccaggactaaggcgtttttctccatagcctcaacattttgggaatcttcccttaatcacccttgctcctcctgggtgcctggaagatggactggcagagacctctttgttgcgttttgtgctttgatgccaggaatgccgcctagtttatgtccccggtggggcacacagcggggggcgccaggttttccttgtcccccagctgctctgcccctttccccttcttccctgactccaggcctgaacccctcccgtgctgtaataaatctttgtaaataa

SEQ ID NO: 638 - protein, 204 aa, Homosapiens
MDPKDRKKIQFSVPAPPSQLDPRQVEMIRRRRPTPAMLFRLSEHSSPEEEASPHQRASGEGHHLKSKRPNPCAYTPPSLKAVQRIAESHLQSISNLNENQASEEEDELGELRELGYPREEDEEEEEDDEEEEEEEDSQAEVLKVIRQSAGQKTTCGQGLEGPWERPPPLDESERDGGSEDQVEDPALSEPGEEPQRPSPSEPGT

SEQ ID NO: 639 - DNA, 1529 bp, Homosapiens
attcacttctcacaaggactgggtgaagagttctgcagccttacagagactggaaaagaagcccaaaccaaggcccccagagaggtcccccaggcccctttgggtccctgagcctcagctggaggtggggggtgcctgcagtgcgctggctcagtctccttctgaaaagctggatccagcttgtttgaagcccttgagctgatcttagatccggcgcaggagaccaacgcctgccatgctgttccggctctcagagcactcctcaccagaggaggaagcctccccccaccagagagcctcaggagaggggcaccatctcaagtcgaagagacccaacccctgtgcctacacaccaccttcgctgaaagctgtgcagcgcattgctgagtctcacctgcagtctatcagcaatttgaatgagaaccaggcctcagaggaggaggatgagctgggggagcttcgggagctgggttatccaagagaggaagatgaggaggaagaggaggatgatgaagaagaggaagaagaagaggacagccaggctgaagtcctgaaggtcatcaggcagtctgctgggcaaaagacaacctgtggccagggtctggaagggccctgggagcgcccaccccctctggatgagtccgagagagatggaggctctgaggaccaagtggaagacccagcactaagtgagcctggggaggaacctcagcgcccttccccctctgagcctggcacataggcacccagcctgcatctcccaggaggaagtggaggggacatcgctgttccccagaaacccactctatcctcaccctgttttgtgctcttcccctcgcctgctagggctgcggcttctgacttctagaagactaaggctggtctgtgtttgcttgtttgcccacctttggctgatacccagagaacctgggcacttgctgcctgatgcccacccctgccagtcattcctccattcacccagcgggaggtgggatgtgagacagcccacattggaaaatccagaaaaccgggaacagggatttgcccttcacaattctactccccagatcctctcccctggacacaggagacccacagggcaggaccctaagatctggggaaaggaggtcctgagaaccttgaggtacccttagatccttttctacccactttcctatggaggattccaagtcaccacttctctcaccggcttctaccagggtccaggactaaggcgtttttctccatagcctcaacattttgggaatcttcccttaatcacccttgctcctcctgggtgcctggaagatggactggcagagacctctttgttgcgttttgtgctttgatgccaggaatgccgcctagtttatgtccccggtggggcacacagcggggggcgccaggttttccttgtcccccagctgctctgcccctttccccttcttccctgactccaggcctgaacccctcccgtgctgtaataaatctttgtaaataacaaaaaaaaaaaaaaaaaaaaaaaaaaa

SEQ ID NO: 640 - protein, 168 aa, Homosapiens
MLFRLSEHSSPEEEASPHQRASGEGHHLKSKRPNPCAYTPPSLKAVQRIAESHLQSISNLNENQASEEEDELGELRELGYPREEDEEEEEDDEEEEEEEDSQAEVLKVIRQSAGQKTTCGQGLEGPWERPPPLDESERDGGSEDQVEDPALSEPGEEPQRPSPSEPGT

SEQ ID NO: 641 - DNA, 2073 bp, Homosapiens
ggcgctactgaggccgcggagccggactgcggttggggcgggaagagccggggccgtggctgacatggagcagccctgctgctgaggccgcgccctccccgccctgaggtgggggcccaccaggatgagcaagctgcccagggagctgacccgagacttggagcgcagcctgcctgccgtggcctccctgggctcctcactgtcccacagccagagcctctcctcgcacctccttccgccgcctgagaagcgaagggccatctctgatgtccgccgcaccttctgtctcttcgtcaccttcgacctgctcttcatctccctgctctggatcatcgaactgaataccaacacaggcatccgtaagaacttggagcaggagatcatccagtacaactttaaaacttccttcttcgacatctttgtcctggccttcttccgcttctctggactgctcctaggctatgccgtgctgcggctccggcactggtgggtgattgcggtcacgacgctggtgtccagtgcattcctcattgtcaaggtcatcctctctgagctgctcagcaaaggggcatttggctacctgctccccatcgtctcttttgtcctcgcctggttggagacctggttccttgacttcaaagtcctaccccaggaagctgaagaggagcgatggtatcttgccgcccaggttgctgttgcccgtggacccctgctgttctccggtgctctgtccgagggacagttctattcacccccagaatcctttgcagcgtctgacaatgaatcagatgaagaagttgctgggaagaaaagtttctctgctcaggagcgggagtacatccgccaggggaaggaggccacggcagtggtggaccagatcttggcccaggaagagaactggaagtttgagaagaataatgaatatggggacaccgtgtacaccattgaagttccctttcacggcaagacgtttatcctgaagaccttcctgccctgtcctgcggagctcgtgtaccaggaggtgatcctgcagcccgagaggatggtgctgtggaacaagacagtgactgcctgccagatcctgcagcgagtggaagacaacaccctcatctcctatgacgtgtctgcaggggctgcgggcggcgtggtctccccaagggacttcgtgaatgtccggcgcattgagcggcgcagggaccgatacttgtcatcagggatcgccacctcacacagtgccaagcccccgacgcacaaatatgtccggggagagaatggccctgggggcttcatcgtgctcaagtcggccagtaacccccgtgtttgcacctttgtctggattcttaatacagatctcaagggccgcctgccccggtacctcatccaccagagcctcgcggccaccatgtttgaatttgcctttcacctgcgacagcgcatcagcgagctgggggcccgggcgtgactgtgccccctcccaccctgcgggccagggtcctgtcgccaccacttccagagccagaaagggtgccagttgggctcgcactgcccacatgggacctggccccaggctgtcaccctccaccgagccacgcagtgcctggagttgactgactgagcaggctgtggggtggagcactggactccggggccccactggctggaggaagtggggtctggcctgttgatgtttacatggcgccctgcctcctggaggaccagattgctctgccccaccttgccagggcagggtctgggctgggcacctgacttggctggggaggaccagggccctgggcagggcagggcagcctgtcacccgtgtgaagatgaaggggctcttcatctgcctgcgctctcgtcggtttttttaggattattgaaagagtctgggacccttgttggggagtgggtggcaggtgggggtgggctgctggccatgaatctctgcctctcccaggctgtccccctcctcccagggcctcctgggggacctttgtattaagccaattaaaaacatgaatttaaaaaaaaaaaaaaaaaaaaaaaaaaaaaaaaaaaaaaaaaaaaaaaaaa

SEQ ID NO: 642 - protein, 445 aa, Homosapiens
MSKLPRELTRDLERSLPAVASLGSSLSHSQSLSSHLLPPPEKRRAISDVRRTFCLFVTFDLLFISLLWIIELNTNTGIRKNLEQEIIQYNFKTSFFDIFVLAFFRFSGLLLGYAVLRLRHWWVIAVTTLVSSAFLIVKVILSELLSKGAFGYLLPIVSFVLAWLETWFLDFKVLPQEAEEERWYLAAQVAVARGPLLFSGALSEGQFYSPPESFAASDNESDEEVAGKKSFSAQEREYIRQGKEATAVVDQILAQEENWKFEKNNEYGDTVYTIEVPFHGKTFILKTFLPCPAELVYQEVILQPERMVLWNKTVTACQILQRVEDNTLISYDVSAGAAGGVVSPRDFVNVRRIERRRDRYLSSGIATSHSAKPPTHKYVRGENGPGGFIVLKSASNPRVCTFVWILNTDLKGRLPRYLIHQSLAATMFEFAFHLRQRISELGARA

SEQ ID NO: 643 - DNA, 963 bp, Homosapiens
aatgaggagtgatcatggctacctcagagctgagctgcgaggtgtcggaggagaactgtgagcgccgggaggccttctgggcagaatggaaggatctgacactgtccacacggcccgaggagggctgctccctgcatgaggaggacacccagagacatgagacctaccaccagcaggggcagtgccaggtgctggtgcagcgctcgccctggctgatgatgcggatgggcatcctcggccgtgggctgcaggagtaccagctgccctaccagcgggtactgccgctgcccatcttcacccctgccaagatgggcgccaccaaggaggagcgtgaggacacccccatccagcttcaggagctgctggcgctggagacagccctgggtggccagtgtgtggaccgccaggaggtggctgagatcacaaagcagctgccccctgtggtgcctgtcagcaagcccggtgcccttcgtcgctccctgtcccgctccatgtcccaggaagcacagagaggctgagagggactgtgacttgggctccgctgtgcccgccctgggctgggcccttcctggctaggactgtggaggggagctgctggccatggctgctttgtagtttgcccagagttgggggctaggggaggggggagccagaggccaggatgcctgagccccctgagttcccaaagggagggtggcagagacagtgggcactaagggtggagagttgggggccagcacagctgaggaccctcagccccaggagaagggacaaaaggtactggtgagggcaagaggtgcctgggaggagtggccctgatccaggaaaatgtgaggggaatctggaacgctctaggcagaagaagctgggagggagggggaggtgaaaagggcagaggcaaggatggtggggcccccagcaccctctgttagtgccgcaataaatgctcaatcatgtgccaga

SEQ ID NO: 644 - protein, 167 aa, Homosapiens
MATSELSCEVSEENCERREAFWAEWKDLTLSTRPEEGCSLHEEDTQRHETYHQQGQCQVLVQRSPWLMMRMGILGRGLQEYQLPYQRVLPLPIFTPAKMGATKEEREDTPIQLQELLALETALGGQCVDRQEVAEITKQLPPVVPVSKPGALRRSLSRSMSQEAQRG

SEQ ID NO: 645 - DNA, 1212 bp, Homosapiens
ggacgattgccgctgcagccgccgccccactcacctccggtgtgtctgcagcccggacactaagggagatggatgaatgggtggggaggatgcggcgcacatggccccgggcggctcggcggtcagctgccgcccccacagcggaccggtcggggcgggggtcgggcggtagaaaaaagggccgcgaggcgagcggggcactgggcggaccgcggcggcagcatgagcggcgcagaccgtagccccaatgcgggcgcagcccctgactcggccccgggccaggcggcggtggcttcggcctaccagcgcttcgagccgcgcgcctacctccgcaacaactacgcgccccctcgcggggacctgtgcaacccgaacggcgtcgggccgtggaagctgcgctgcttggcgcagaccttcgccaccggtgaagtgtccggacgcaccctcatcgacattggttcaggccccaccgtgtaccagctgctcagtgcctgcagccactttgaggacatcaccatgacagatttcctggaggtcaaccgccaggagctggggcgctggctgcaggaggagccgggggccttcaactggagcatgtacagccaacatgcctgcctcattgagggcaagggggaatgctggcaggataaggagcgccagctgcgagccagggtgaaacgggtcctgcccatcgacgtgcaccagccccagcccctgggtgctgggagcccagctcccctgcctgctgacgccctggtctctgccttctgcttggaggctgtgagcccagatcttgccagctttcagcgggccctggaccacatcaccacgctgctgaggcctggggggcacctcctcctcatcggggccctggaggagtcgtggtacctggctggggaggccaggctgacggtggtgccagtgtctgaggaggaggtgagggaggccctggtgcgtagtggctacaaggtccgggacctccgcacctatatcatgcctgcccaccttcagacaggcgtagatgatgtcaagggcgtcttcttcgcctgggctcagaaggttgggctgtgagggctgtacctggtgccctgtggcccccacccacctggattccctgttctttgaagtggcacctaataaagaaataataccctgccaaaaaaaaaaaaaaaaaaaaaaaaaaaaaaaaaaaaaaaaaaaaaaaaaaaaaaa

SEQ ID NO: 646 - protein, 282 aa, Homosapiens
MSGADRSPNAGAAPDSAPGQAAVASAYQRFEPRAYLRNNYAPPRGDLCNPNGVGPWKLRCLAQTFATGEVSGRTLIDIGSGPTVYQLLSACSHFEDITMTDFLEVNRQELGRWLQEEPGAFNWSMYSQHACLIEGKGECWQDKERQLRARVKRVLPIDVHQPQPLGAGSPAPLPADALVSAFCLEAVSPDLASFQRALDHITTLLRPGGHLLLIGALEESWYLAGEARLTVVPVSEEEVREALVRSGYKVRDLRTYIMPAHLQTGVDDVKGVFFAWAQKVGL

SEQ ID NO: 647 - DNA, 2708 bp, Homosapiens
atactcctaagctcctcccccggcggcgagccagggagaaaggatggccggcctggcggcgcggttggtcctgctagctggggcagcggcgctggcgagcggctcccagggcgaccgtgagccggtgtaccgcgactgcgtactgcagtgcgaagagcagaactgctctgggggcgctctgaatcacttccgctcccgccagccaatctacatgagtctagcaggctggacctgtcgggacgactgtaagtatgagtgtatgtgggtcaccgttgggctctacctccaggaaggtcacaaagtgcctcagttccatggcaagtggcccttctcccggttcctgttctttcaagagccggcatcggccgtggcctcgtttctcaatggcctggccagcctggtgatgctctgccgctaccgcaccttcgtgccagcctcctcccccatgtaccacacctgtgtggccttcgcctgggtgtccctcaatgcatggttctggtccacagttttccacaccagggacactgacctcacagagaaaatggactacttctgtgcctccactgtcatcctacactcaatctacctgtgctgcgtcaggaccgtggggctgcagcacccagctgtggtcagtgccttccgggctctcctgctgctcatgctgaccgtgcacgtctcctacctgagcctcatccgcttcgactatggctacaacctggtggccaacgtggctattggcctggtcaacgtggtgtggtggctggcctggtgcctgtggaaccagcggcggctgcctcacgtgcgcaagtgcgtggtggtggtcttgctgctgcaggggctgtccctgctcgagctgcttgacttcccaccgctcttctgggtcctggatgcccatgccatctggcacatcagcaccatccctgtccacgtcctctttttcagctttctggaagatgacagcctgtacctgctgaaggaatcagaggacaagttcaagctggactgaagaccttggagcgagtctgccccagtggggatcctgcccccgccctgctggcctcccttctcccctcaacccttgagatgattttctcttttcaacttcttgaacttggacatgaaggatgtgggcccagaatcatgtggccagcccaccccctgttggccctcaccagccttggagtctgttctagggaaggcctcccagcatctgggactcgagagtgggcagcccctctacctcctggagctgaactggggtggaactgagtgtgctcttagctctaccgggaggacagctgcctgtttcctccccatcagcctcctccccacatccccagctgcctggctgggtcctgaagccctctgtctacctgggagaccagggaccacaggccttagggatacagggggtccccttctgttaccaccccccaccctcctccaggacaccactaggtggtgctggatgcttgttctttggccagccaaggttcacggcgattctccccatgggatcttgagggaccaagctgctgggattgggaaggagtttcaccctgaccattgccctagccaggttcccaggaggcctcaccatactccctttcagggccagggctccagcaagcccagggcaaggatcctgtgctgctgtctggttgagagcctgccaccgtgtgtcgggagtgtgggccaggctgagtgcataggtgacagggccgtgagcatgggcctgggtgtgtgtgagctcaggcctaggtgcgcagtgtggagacgggtgttgtcggggaagaggtgtggcttcaaagtgtgtgtgtgcagggggtgggtgtgttagcgtgggttaggggaacgtgtgtgcgcgtgctggtgggcatgtgagatgagtgactgccggtgaatgtgtccacagttgagaggttggagcaggatgagggaatcctgtcaccatcaataatcacttgtggagcgccagctctgcccaaggcgccacctgggcggacagccaggagctctccatggccaggctgcctgtgtgcatgttccctgtctggtgcccctttgcccgcctcctgcaaacctcacagggtccccacacaacagtgccctccagaagcagcccctcggaggcagaggaaggaaaatggggatggctggggctctctccatcctccttttctccttgccttcgcatggctggccttcccctccaaaacctccattcccctgctgccagcccctttgccatagcctgattttggggaggaggaaggggcgatttgagggagaaggggagaaagcttatggctgggtctggtttcttcccttcccagagggtcttactgttccagggtggccccagggcaggcaggggccacactatgcctgcgccctggtaaaggtgacccctgccatttaccagcagccctggcatgttcctgccccacaggaatagaatggagggagctccagaaactttccatcccaaaggcagtctccgtggttgaagcagactggatttttgctctgcccctgaccccttgtccctctttgagggaggggagctatgctaggactccaacctcagggactcgggtggcctgcgctagcttcttttgatactgaaaacttttaaggtgggagggtggcaagggatgtgcttaataaatcaattccaagcctcaaaaaaaaaaaaaaaaaaaaaa

SEQ ID NO: 648 - protein, 320 aa, Homosapiens
MAGLAARLVLLAGAAALASGSQGDREPVYRDCVLQCEEQNCSGGALNHFRSRQPIYMSLAGWTCRDDCKYECMWVTVGLYLQEGHKVPQFHGKWPFSRFLFFQEPASAVASFLNGLASLVMLCRYRTFVPASSPMYHTCVAFAWVSLNAWFWSTVFHTRDTDLTEKMDYFCASTVILHSIYLCCVRTVGLQHPAVVSAFRALLLLMLTVHVSYLSLIRFDYGYNLVANVAIGLVNVVWWLAWCLWNQRRLPHVRKCVVVVLLLQGLSLLELLDFPPLFWVLDAHAIWHISTIPVHVLFFSFLEDDSLYLLKESEDKFKLD

SEQ ID NO: 649 - DNA, 4816 bp, Homosapiens
gttcccggatttttgtgggcgcctgccccgcccctcgtccccctgctgtgtccatatatcgaggcgatagggttaagggaaggcggacgcctgatgggttaatgagcaaactgaagtgttttccatgatcttttttgagtcgcaattgaagtaccacctcccgagggtgattgcttccccatgcggggtagaacctttgctgtcctgttcaccactctacctccagcacagaatttggcttatgcctactcaatgtgaagatgatgaggatgaaaacctttgtgatgatccacttccacttaatgaatggtggcaaagcaaagctatattcaagaccacatgcaaagctactccctgagcaaagagtcacagataaaacgggggcaccagtagaatggccaggacaaacgcagtgcagcacagagactcagaccctggcagccatgcctgcgcaggcagtgatgagagtgacatgtactgttgtggacatgcacaaaagtgagtgtgcaccggcacagacatgaagctgcggctccctgccagtcccgagacccacctggacatgctccgccacctctaccagggctgccaggtggtgcagggaaacctggaactcacctacctgcccaccaatgccagcctgtccttcctgcaggatatccaggaggtgcagggctacgtgctcatcgctcacaaccaagtgaggcaggtcccactgcagaggctgcggattgtgcgaggcacccagctctttgaggacaactatgccctggccgtgctagacaatggagacccgctgaacaataccacccctgtcacaggggcctccccaggaggcctgcgggagctgcagcttcgaagcctcacagagatcttgaaaggaggggtcttgatccagcggaacccccagctctgctaccaggacacgattttgtggaaggacatcttccacaagaacaaccagctggctctcacactgatagacaccaaccgctctcgggcctgccacccctgttctccgatgtgtaagggctcccgctgctggggagagagttctgaggattgtcagagcctgacgcgcactgtctgtgccggtggctgtgcccgctgcaaggggccactgcccactgactgctgccatgagcagtgtgctgccggctgcacgggccccaagcactctgactgcctggcctgcctccacttcaaccacagtggcatctgtgagctgcactgcccagccctggtcacctacaacacagacacgtttgagtccatgcccaatcccgagggccggtatacattcggcgccagctgtgtgactgcctgtccctacaactacctttctacggacgtgggatcctgcaccctcgtctgccccctgcacaaccaagaggtgacagcagaggatggaacacagcggtgtgagaagtgcagcaagccctgtgcccgagtgtgctatggtctgggcatggagcacttgcgagaggtgagggcagttaccagtgccaatatccaggagtttgctggctgcaagaagatctttgggagcctggcatttctgccggagagctttgatggggacccagcctccaacactgccccgctccagccagagcagctccaagtgtttgagactctggaagagatcacaggttacctatacatctcagcatggccggacagcctgcctgacctcagcgtcttccagaacctgcaagtaatccggggacgaattctgcacaatggcgcctactcgctgaccctgcaagggctgggcatcagctggctggggctgcgctcactgagggaactgggcagtggactggccctcatccaccataacacccacctctgcttcgtgcacacggtgccctgggaccagctctttcggaacccgcaccaagctctgctccacactgccaaccggccagaggacgagtgtgtgggcgagggcctggcctgccaccagctgtgcgcccgagggcactgctggggtccagggcccacccagtgtgtcaactgcagccagttccttcggggccaggagtgcgtggaggaatgccgagtactgcaggggctccccagggagtatgtgaatgccaggcactgtttgccgtgccaccctgagtgtcagccccagaatggctcagtgacctgttttggaccggaggctgaccagtgtgtggcctgtgcccactataaggaccctcccttctgcgtggcccgctgccccagcggtgtgaaacctgacctctcctacatgcccatctggaagtttccagatgaggagggcgcatgccagccttgccccatcaactgcacccactcctgtgtggacctggatgacaagggctgccccgccgagcagagagccagccctctgacgtccatcatctctgcggtggttggcattctgctggtcgtggtcttgggggtggtctttgggatcctcatcaagcgacggcagcagaagatccggaagtacacgatgcggagactgctgcaggaaacggagctggtggagccgctgacacctagcggagcgatgcccaaccaggcgcagatgcggatcctgaaagagacggagctgaggaaggtgaaggtgcttggatctggcgcttttggcacagtctacaagggcatctggatccctgatggggagaatgtgaaaattccagtggccatcaaagtgttgagggaaaacacatcccccaaagccaacaaagaaatcttagacgaagcatacgtgatggctggtgtgggctccccatatgtctcccgccttctgggcatctgcctgacatccacggtgcagctggtgacacagcttatgccctatggctgcctcttagaccatgtccgggaaaaccgcggacgcctgggctcccaggacctgctgaactggtgtatgcagattgccaaggggatgagctacctggaggatgtgcggctcgtacacagggacttggccgctcggaacgtgctggtcaagagtcccaaccatgtcaaaattacagacttcgggctggctcggctgctggacattgacgagacagagtaccatgcagatgggggcaaggtgcccatcaagtggatggcgctggagtccattctccgccggcggttcacccaccagagtgatgtgtggagttatggtgtgactgtgtgggagctgatgacttttggggccaaaccttacgatgggatcccagcccgggagatccctgacctgctggaaaagggggagcggctgccccagccccccatctgcaccattgatgtctacatgatcatggtcaaatgttggatgattgactctgaatgtcggccaagattccgggagttggtgtctgaattctcccgcatggccagggacccccagcgctttgtggtcatccagaatgaggacttgggcccagccagtcccttggacagcaccttctaccgctcactgctggaggacgatgacatgggggacctggtggatgctgaggagtatctggtaccccagcagggcttcttctgtccagaccctgccccgggcgctgggggcatggtccaccacaggcaccgcagctcatctaccaggagtggcggtggggacctgacactagggctggagccctctgaagaggaggcccccaggtctccactggcaccctccgaaggggctggctccgatgtatttgatggtgacctgggaatgggggcagccaaggggctgcaaagcctccccacacatgaccccagccctctacagcggtacagtgaggaccccacagtacccctgccctctgagactgatggctacgttgcccccctgacctgcagcccccagcctgaatatgtgaaccagccagatgttcggccccagcccccttcgccccgagagggccctctgcctgctgcccgacctgctggtgccactctggaaaggcccaagactctctccccagggaagaatggggtcgtcaaagacgtttttgcctttgggggtgccgtggagaaccccgagtacttgacaccccagggaggagctgcccctcagccccaccctcctcctgccttcagcccagccttcgacaacctctattactgggaccaggacccaccagagcggggggctccacccagcaccttcaaagggacacctacggcagagaacccagagtacctgggtctggacgtgccagtgtgaaccagaaggccaagtccgcagaagccctgatgtgtcctcagggagcagggaaggcctgacttctgctggcatcaagaggtgggagggccctccgaccacttccaggggaacctgccatgccaggaacctgtcctaaggaaccttccttcctgcttgagttcccagatggctggaaggggtccagcctcgttggaagaggaacagcactggggagtctttgtggattctgaggccctgcccaatgagactctagggtccagtggatgccacagcccagcttggccctttccttccagatcctgggtactgaaagccttagggaagctggcctgagaggggaagcggccctaagggagtgtctaagaacaaaagcgacccattcagagactgtccctgaaacctagtactgccccccatgaggaaggaacagcaatggtgtcagtatccaggctttgtacagagtgcttttctgtttagtttttactttttttgttttgtttttttaaagatgaaataaagacccagggggagaatgggtgttgtatggggaggcaagtgtggggggtccttctccacacccactttgtccatttgcaaatatattttggaaaacagcta

SEQ ID NO: 650 - protein, 1225 aa, Homosapiens
MKLRLPASPETHLDMLRHLYQGCQVVQGNLELTYLPTNASLSFLQDIQEVQGYVLIAHNQVRQVPLQRLRIVRGTQLFEDNYALAVLDNGDPLNNTTPVTGASPGGLRELQLRSLTEILKGGVLIQRNPQLCYQDTILWKDIFHKNNQLALTLIDTNRSRACHPCSPMCKGSRCWGESSEDCQSLTRTVCAGGCARCKGPLPTDCCHEQCAAGCTGPKHSDCLACLHFNHSGICELHCPALVTYNTDTFESMPNPEGRYTFGASCVTACPYNYLSTDVGSCTLVCPLHNQEVTAEDGTQRCEKCSKPCARVCYGLGMEHLREVRAVTSANIQEFAGCKKIFGSLAFLPESFDGDPASNTAPLQPEQLQVFETLEEITGYLYISAWPDSLPDLSVFQNLQVIRGRILHNGAYSLTLQGLGISWLGLRSLRELGSGLALIHHNTHLCFVHTVPWDQLFRNPHQALLHTANRPEDECVGEGLACHQLCARGHCWGPGPTQCVNCSQFLRGQECVEECRVLQGLPREYVNARHCLPCHPECQPQNGSVTCFGPEADQCVACAHYKDPPFCVARCPSGVKPDLSYMPIWKFPDEEGACQPCPINCTHSCVDLDDKGCPAEQRASPLTSIISAVVGILLVVVLGVVFGILIKRRQQKIRKYTMRRLLQETELVEPLTPSGAMPNQAQMRILKETELRKVKVLGSGAFGTVYKGIWIPDGENVKIPVAIKVLRENTSPKANKEILDEAYVMAGVGSPYVSRLLGICLTSTVQLVTQLMPYGCLLDHVRENRGRLGSQDLLNWCMQIAKGMSYLEDVRLVHRDLAARNVLVKSPNHVKITDFGLARLLDIDETEYHADGGKVPIKWMALESILRRRFTHQSDVWSYGVTVWELMTFGAKPYDGIPAREIPDLLEKGERLPQPPICTIDVYMIMVKCWMIDSECRPRFRELVSEFSRMARDPQRFVVIQNEDLGPASPLDSTFYRSLLEDDDMGDLVDAEEYLVPQQGFFCPDPAPGAGGMVHHRHRSSSTRSGGGDLTLGLEPSEEEAPRSPLAPSEGAGSDVFDGDLGMGAAKGLQSLPTHDPSPLQRYSEDPTVPLPSETDGYVAPLTCSPQPEYVNQPDVRPQPPSPREGPLPAARPAGATLERPKTLSPGKNGVVKDVFAFGGAVENPEYLTPQGGAAPQPHPPPAFSPAFDNLYYWDQDPPERGAPPSTFKGTPTAENPEYLGLDVPV

SEQ ID NO: 651 - DNA, 4624 bp, Homosapiens
ggaggaggtggaggaggagggctgcttgaggaagtataagaatgaagttgtgaagctgagattcccctccattgggaccggagaaaccaggggagccccccgggcagccgcgcgccccttcccacggggccctttactgcgccgcgcgcccggcccccacccctcgcagcaccccgcgccccgcgccctcccagccgggtccagccggagccatggggccggagccgcagtgagcaccatggagctggcggccttgtgccgctgggggctcctcctcgccctcttgccccccggagccgcgagcacccaagtgtgcaccggcacagacatgaagctgcggctccctgccagtcccgagacccacctggacatgctccgccacctctaccagggctgccaggtggtgcagggaaacctggaactcacctacctgcccaccaatgccagcctgtccttcctgcaggatatccaggaggtgcagggctacgtgctcatcgctcacaaccaagtgaggcaggtcccactgcagaggctgcggattgtgcgaggcacccagctctttgaggacaactatgccctggccgtgctagacaatggagacccgctgaacaataccacccctgtcacaggggcctccccaggaggcctgcgggagctgcagcttcgaagcctcacagagatcttgaaaggaggggtcttgatccagcggaacccccagctctgctaccaggacacgattttgtggaaggacatcttccacaagaacaaccagctggctctcacactgatagacaccaaccgctctcgggcctgccacccctgttctccgatgtgtaagggctcccgctgctggggagagagttctgaggattgtcagagcctgacgcgcactgtctgtgccggtggctgtgcccgctgcaaggggccactgcccactgactgctgccatgagcagtgtgctgccggctgcacgggccccaagcactctgactgcctggcctgcctccacttcaaccacagtggcatctgtgagctgcactgcccagccctggtcacctacaacacagacacgtttgagtccatgcccaatcccgagggccggtatacattcggcgccagctgtgtgactgcctgtccctacaactacctttctacggacgtgggatcctgcaccctcgtctgccccctgcacaaccaagaggtgacagcagaggatggaacacagcggtgtgagaagtgcagcaagccctgtgcccgagtgtgctatggtctgggcatggagcacttgcgagaggtgagggcagttaccagtgccaatatccaggagtttgctggctgcaagaagatctttgggagcctggcatttctgccggagagctttgatggggacccagcctccaacactgccccgctccagccagagcagctccaagtgtttgagactctggaagagatcacaggttacctatacatctcagcatggccggacagcctgcctgacctcagcgtcttccagaacctgcaagtaatccggggacgaattctgcacaatggcgcctactcgctgaccctgcaagggctgggcatcagctggctggggctgcgctcactgagggaactgggcagtggactggccctcatccaccataacacccacctctgcttcgtgcacacggtgccctgggaccagctctttcggaacccgcaccaagctctgctccacactgccaaccggccagaggacgagtgtgtgggcgagggcctggcctgccaccagctgtgcgcccgagggcactgctggggtccagggcccacccagtgtgtcaactgcagccagttccttcggggccaggagtgcgtggaggaatgccgagtactgcaggggctccccagggagtatgtgaatgccaggcactgtttgccgtgccaccctgagtgtcagccccagaatggctcagtgacctgttttggaccggaggctgaccagtgtgtggcctgtgcccactataaggaccctcccttctgcgtggcccgctgccccagcggtgtgaaacctgacctctcctacatgcccatctggaagtttccagatgaggagggcgcatgccagccttgccccatcaactgcacccactcctgtgtggacctggatgacaagggctgccccgccgagcagagagccagccctctgacgtccatcatctctgcggtggttggcattctgctggtcgtggtcttgggggtggtctttgggatcctcatcaagcgacggcagcagaagatccggaagtacacgatgcggagactgctgcaggaaacggagctggtggagccgctgacacctagcggagcgatgcccaaccaggcgcagatgcggatcctgaaagagacggagctgaggaaggtgaaggtgcttggatctggcgcttttggcacagtctacaagggcatctggatccctgatggggagaatgtgaaaattccagtggccatcaaagtgttgagggaaaacacatcccccaaagccaacaaagaaatcttagacgaagcatacgtgatggctggtgtgggctccccatatgtctcccgccttctgggcatctgcctgacatccacggtgcagctggtgacacagcttatgccctatggctgcctcttagaccatgtccgggaaaaccgcggacgcctgggctcccaggacctgctgaactggtgtatgcagattgccaaggggatgagctacctggaggatgtgcggctcgtacacagggacttggccgctcggaacgtgctggtcaagagtcccaaccatgtcaaaattacagacttcgggctggctcggctgctggacattgacgagacagagtaccatgcagatgggggcaaggtgcccatcaagtggatggcgctggagtccattctccgccggcggttcacccaccagagtgatgtgtggagttatggtgtgactgtgtgggagctgatgacttttggggccaaaccttacgatgggatcccagcccgggagatccctgacctgctggaaaagggggagcggctgccccagccccccatctgcaccattgatgtctacatgatcatggtcaaatgttggatgattgactctgaatgtcggccaagattccgggagttggtgtctgaattctcccgcatggccagggacccccagcgctttgtggtcatccagaatgaggacttgggcccagccagtcccttggacagcaccttctaccgctcactgctggaggacgatgacatgggggacctggtggatgctgaggagtatctggtaccccagcagggcttcttctgtccagaccctgccccgggcgctgggggcatggtccaccacaggcaccgcagctcatctaccaggagtggcggtggggacctgacactagggctggagccctctgaagaggaggcccccaggtctccactggcaccctccgaaggggctggctccgatgtatttgatggtgacctgggaatgggggcagccaaggggctgcaaagcctccccacacatgaccccagccctctacagcggtacagtgaggaccccacagtacccctgccctctgagactgatggctacgttgcccccctgacctgcagcccccagcctgaatatgtgaaccagccagatgttcggccccagcccccttcgccccgagagggccctctgcctgctgcccgacctgctggtgccactctggaaaggcccaagactctctccccagggaagaatggggtcgtcaaagacgtttttgcctttgggggtgccgtggagaaccccgagtacttgacaccccagggaggagctgcccctcagccccaccctcctcctgccttcagcccagccttcgacaacctctattactgggaccaggacccaccagagcggggggctccacccagcaccttcaaagggacacctacggcagagaacccagagtacctgggtctggacgtgccagtgtgaaccagaaggccaagtccgcagaagccctgatgtgtcctcagggagcagggaaggcctgacttctgctggcatcaagaggtgggagggccctccgaccacttccaggggaacctgccatgccaggaacctgtcctaaggaaccttccttcctgcttgagttcccagatggctggaaggggtccagcctcgttggaagaggaacagcactggggagtctttgtggattctgaggccctgcccaatgagactctagggtccagtggatgccacagcccagcttggccctttccttccagatcctgggtactgaaagccttagggaagctggcctgagaggggaagcggccctaagggagtgtctaagaacaaaagcgacccattcagagactgtccctgaaacctagtactgccccccatgaggaaggaacagcaatggtgtcagtatccaggctttgtacagagtgcttttctgtttagtttttactttttttgttttgtttttttaaagatgaaataaagacccagggggagaatgggtgttgtatggggaggcaagtgtggggggtccttctccacacccactttgtccatttgcaaatatattttggaaaacagcta

SEQ ID NO: 652 - protein, 1255 aa, Homosapiens [sequence omitted]

SEQ ID NO: 653 - DNA, 781 bp, Homosapiens
gtcacacccggaagcaggggcccgagcggagccggccgcgatgagcggggagccggggcagacgtccgtagcgccccctcccgaggaggtcgagccgggcagtggggtccgcatcgtggtggagtactgtgaaccctgcggcttcgaggcgacctacctggagctggccagtgctgtgaaggagcagtatccgggcatcgagatcgagtcgcgcctcgggggcacaggtgcctttgagatagagataaatggacagctggtgttctccaagctggagaatgggggctttccctatgagaaagatctcattgaggccatccgaagagccagtaatggagaaaccctagaaaagatcaccaacagccgtcctccctgcgtcatcctgtgactgcacaggactctgggttcctgctctgttctggggtccaaaccttggtctccctttggtcctgctgggagctccccctgcctctttcccctacttagctccttagcaaagagaccctggcctccactttgccctttgggtacaaagaaggaatagaagattccgtggccttgggggcaggagagagacactctccatgaacacttctccagccacctcatacccccttcccagggtaagtgcccacgaaagcccagtccactcttcgcctcggtaatacctgtctgatgccacagattttatttattctcccctaacccagggcaatgtcagctattggcagtaaagtggcgctacaaacactaaaaaaaaaaaaaaaaaaaaaaaaaaaaa

SEQ ID NO: 654 - protein, 115 aa, Homosapiens
MSGEPGQTSVAPPPEEVEPGSGVRIVVEYCEPCGFEATYLELASAVKEQYPGIEIESRLGGTGAFEIEINGQLVFSKLENGGFPYEKDLIEAIRRASNGETLEKITNSRPPCVIL

SEQ ID NO: 655 - DNA, 2116 bp, Homosapiens
cgtctccctccctgaagacgtggtcccagccgggtgtcctgacgctcggggttcaggacaagggcacacaactggttccgttaagcccctctcttgctcagacgccatggagctggatctgtctccacctcatcttagcagctctccggaagacctttgcccagcccctgggacccctcctgggactccccggccccctgatacccctctgcctgaggaggtaaagaggtcccagcctctcctcatcccaaccaccggcaggaaacttcgagaggaggagaggcgtgccacctccctcccctctatccccaaccccttccctgagctctgcagtcctccctcacagagcccaattctcgggggcccctccagtgcaagggggctgctcccccgcgatgccagccgcccccatgtagtaaaggtgtacagtgaggatggggcctgcaggtctgtggaggtggcagcaggtgccacagctcgccacgtgtgtgaaatgctggtgcagcgagctcacgccttgagcgacgagacctgggggctggtggagtgccacccccacctagcactggagcggggtttggaggaccacgagtccgtggtggaagtgcaggctgcctggcccgtgggcggagatagccgcttcgtcttccggaaaaacttcgccaagtacgaactgttcaagagctccccacactccctgttcccagaaaaaatggtctccagctgtctcgatgcacacactggtatatcccatgaagacctcatccagaacttcctgaatgctggcagctttcctgagatccagggctttctgcagctgcggggttcaggacggaagctttggaaacgctttttctgcttcttgcgccgatctggcctctattactccaccaagggcacctctaaggatccgaggcacctgcagtacgtggcagatgtgaacgagtccaacgtgtacgtggtgacgcagggccgcaagctctacgggatgcccactgacttcggtttctgtgtcaagcccaacaagcttcgaaatggccacaaggggcttcggatcttctgcagtgaagatgagcagagccgcacctgctggctggctgccttccgcctcttcaagtacggggtgcagctgtacaagaattaccagcaggcacagtctcgccatctgcatccatcttgtttgggctccccacccttgagaagtgcctcagataataccctggtggccatggacttctctggccatgctgggcgtgtcattgagaacccccgggaggctctgagtgtggccctggaggaggcccaggcctggaggaagaagacaaaccaccgcctcagcctgcccatgccagcctccggcacgagcctcagtgcagccatccaccgcacccaactctggttccacgggcgcatttcccgtgaggagagccagcggcttattggacagcagggcttggtagacggcctgttcctggtccgggagagtcagcggaacccccagggctttgtcctctctttgtgccacctgcagaaagtgaagcattatctcatcctgccgagcgaggaggagggccgcctgtacttcagcatggatgatggccagacccgcttcactgacctgctgcagctcgtggagttccaccagctgaaccgcggcatcctgccgtgcttgctgcgccattgctgcacgcgggtggccctctgaccaggccgtggactggctcatgcctcagcccgccttcaggctgcccgccgcccctccacccatccagtggactctggggcgcggccacaggggacgggatgaggagcgggagggttccgccactccagttttctcctctgcttctttgcctccctcagatagaaaacagcccccactccagtccactcctgacccctctcctcaagggaaggccttgggtggccccctctccttctcctagctctggaggtgctgctctagggcagggaattatgggagaagtgggggcagcccaggcggtttcacgccccacactttgtacagaccgagaggccagttgatctgctctgttttatactagtgacaataaagattattttttgatacaaaaaaaaaaaaaaaaaaaaaaaa

SEQ ID NO: 656 - protein, 532 aa, Homosapiens
MELDLSPPHLSSSPEDLCPAPGTPPGTPRPPDTPLPEEVKRSQPLLIPTTGRKLREEERRATSLPSIPNPFPELCSPPSQSPILGGPSSARGLLPRDASRPHVVKVYSEDGACRSVEVAAGATARHVCEMLVQRAHALSDETWGLVECHPHLALERGLEDHESVVEVQAAWPVGGDSRFVFRKNFAKYELFKSSPHSLFPEKMVSSCLDAHTGISHEDLIQNFLNAGSFPEIQGFLQLRGSGRKLWKRFFCFLRRSGLYYSTKGTSKDPRHLQYVADVNESNVYVVTQGRKLYGMPTDFGFCVKPNKLRNGHKGLRIFCSEDEQSRTCWLAAFRLFKYGVQLYKNYQQAQSRHLHPSCLGSPPLRSASDNTLVAMDFSGHAGRVIENPREALSVALEEAQAWRKKTNHRLSLPMPASGTSLSAAIHRTQLWFHGRISREESQRLIGQQGLVDGLFLVRESQRNPQGFVLSLCHLQKVKHYLILPSEEEGRLYFSMDDGQTRFTDLLQLVEFHQLNRGILPCLLRHCCTRVAL

SEQ ID NO: 657 - DNA, 2260 bp, Homosapiens
ttttagtttccttgggcctggaatctggacacacagggctcccccccgcctctgacttctctgtccgaagtcgggacaccctcctaccacctgtagagaagcgggagtggatctgaaataaaatccaggaatctgggggttcctagacggagccagacttcggaacgggtgtcctgctactcctgctggggctcctccaggacaagggcacacaactggttccgttaagcccctctcttgctcagacgccatggagctggatctgtctccacctcatcttagcagctctccggaagacctttgcccagcccctgggacccctcctgggactccccggccccctgatacccctctgcctgaggaggtaaagaggtcccagcctctcctcatcccaaccaccggcaggaaacttcgagaggaggagaggcgtgccacctccctcccctctatccccaaccccttccctgagctctgcagtcctccctcacagagcccaattctcgggggcccctccagtgcaagggggctgctcccccgcgatgccagccgcccccatgtagtaaaggtgtacagtgaggatggggcctgcaggtctgtggaggtggcagcaggtgccacagctcgccacgtgtgtgaaatgctggtgcagcgagctcacgccttgagcgacgagacctgggggctggtggagtgccacccccacctagcactggagcggggtttggaggaccacgagtccgtggtggaagtgcaggctgcctggcccgtgggcggagatagccgcttcgtcttccggaaaaacttcgccaagtacgaactgttcaagagctccccacactccctgttcccagaaaaaatggtctccagctgtctcgatgcacacactggtatatcccatgaagacctcatccagaacttcctgaatgctggcagctttcctgagatccagggctttctgcagctgcggggttcaggacggaagctttggaaacgctttttctgcttcttgcgccgatctggcctctattactccaccaagggcacctctaaggatccgaggcacctgcagtacgtggcagatgtgaacgagtccaacgtgtacgtggtgacgcagggccgcaagctctacgggatgcccactgacttcggtttctgtgtcaagcccaacaagcttcgaaatggccacaaggggcttcggatcttctgcagtgaagatgagcagagccgcacctgctggctggctgccttccgcctcttcaagtacggggtgcagctgtacaagaattaccagcaggcacagtctcgccatctgcatccatcttgtttgggctccccacccttgagaagtgcctcagataataccctggtggccatggacttctctggccatgctgggcgtgtcattgagaacccccgggaggctctgagtgtggccctggaggaggcccaggcctggaggaagaagacaaaccaccgcctcagcctgcccatgccagcctccggcacgagcctcagtgcagccatccaccgcacccaactctggttccacgggcgcatttcccgtgaggagagccagcggcttattggacagcagggcttggtagacggcctgttcctggtccgggagagtcagcggaacccccagggctttgtcctctctttgtgccacctgcagaaagtgaagcattatctcatcctgccgagcgaggaggagggccgcctgtacttcagcatggatgatggccagacccgcttcactgacctgctgcagctcgtggagttccaccagctgaaccgcggcatcctgccgtgcttgctgcgccattgctgcacgcgggtggccctctgaccaggccgtggactggctcatgcctcagcccgccttcaggctgcccgccgcccctccacccatccagtggactctggggcgcggccacaggggacgggatgaggagcgggagggttccgccactccagttttctcctctgcttctttgcctccctcagatagaaaacagcccccactccagtccactcctgacccctctcctcaagggaaggccttgggtggccccctctccttctcctagctctggaggtgctgctctagggcagggaattatgggagaagtgggggcagcccaggcggtttcacgccccacactttgtacagaccgagaggccagttgatctgctctgttttatactagtgacaataaagattattttttgatacaaaaaaaaaaaaaaaaaaaaaaaa

SEQ ID NO: 658 - protein, 532 aa, Homosapiens; identical to SEQ ID NO: 656

SEQ ID NO: 659 - DNA, 2437 bp, Homosapiens
gcaggagcacgtggagaggccgagtagccacagcggcagctccagcccggcccggcagcgacatggaagatatacaaacaaatgcggaactgaaaagcactcaggagcagtctgtgcccgcagaaagtgcagcggttttgaatgactacagtttaaccaaatctcatgaaatggaaaatgtggacagtggagaaggcccagccaatgaagatgaagacataggagatgattcaatgaaagtgaaagatgaatacagtgaaagagatgagaatgttttaaagtcagaacccatgggaaatgcagaagagcctgaaatcccttacagctattcaagagaatataatgaatatgaaaacattaagttggagagacatgttgtctcattcgatagtagcaggccaaccagtggaaagatgaactgcgatgtgtgtggattatcctgcatcagcttcaatgtcttaatggttcataagcgaagccatactggtgaacgcccattccagtgtaatcagtgtggggcatcttttactcagaaaggtaacctcctccgccacattaaactgcacacaggggaaaaaccttttaagtgtcacctctgcaactatgcatgccaaagaagagatgcgctcacggggcatcttaggacacattctgtggagaaaccctacaaatgtgagttttgtggaaggagttacaagcagagaagttcccttgaggagcacaaggagcgctgccgtacatttcttcagagcactgacccaggggacactgcaagtgcggaggcaagacacatcaaagcagagatgggaagtgaaagagctctcgtactggacagattagcaagcaatgtggcaaaacgaaaaagctcaatgcctcagaaattcattggtgagaagcgccactgctttgatgtcaactataattcaagttacatgtatgagaaagagagtgagctcatacagacccgcatgatggaccaagccatcaataacgccatcagctatcttggcgccgaagccctgcgccccttggtccagacaccgcctgctcccacctcggagatggttccagttatcagcagcatgtatcccatagccctcacccgggctgagatgtcaaacggtgcccctcaagagctggaaaagaaaagcatccaccttccagagaagagcgtgccttctgagagaggcctctctcccaacaatagtggccacgactccacggacactgacagcaaccatgaagaacgccagaatcacatctatcagcaaaatcacatggtcctgtctcgggcccgcaatgggatgccacttctgaaggaggttccccgctcttacgaactcctcaagcccccgcccatctgcccaagagactccgtcaaagtgatcaacaaggaaggggaggtgatggatgtgtatcggtgtgaccactgccgcgtcctcttcctggactatgtgatgttcacgattcacatgggctgccacggcttccgtgaccctttcgagtgtaacatgtgtggatatcgaagccatgatcggtatgagttctcgtctcacatagccagaggagaacacagagccctgctgaagtgaatatctggtctcagggattgctcctatgtattcagcatcgtttctaaaaaccaatgacctcgcctaacagattgctctcaaaacatactcagttccaaacttcttttcataccatttttagctgtgttcacaggggtagccagggaaacactgtcttccttcagaaattattcgcaggtctagcatattattacttttgtgaaacctttgttttcccatcagggacttgaattttatggaatttaaaagccaaaaaggtatttggtcattatcttctacagcagtggaatgagtggtcccggagatgtgctatatgaaacattctttctgagatatatcaaccacacgtggaaaagcctttcagtcatacatgcaaatccacaaagaggaagagctgaccagctgaccttgctgggaagcctcacccttctgcccttcacaggctgaagggttaagatctaatctccctaatctaaatgacagtctaagagtaagtaaaagaacagccataaaataagtatctgttacgagtaactgaagaccccattctccaagcatcagatccatttcctatcacaacatttttaaaaaatgtcatctgatggcacttctgcttctgtcctttaccttcccatctccagtgaaaagctgagctgctttgggctaaaccagttgtctatagaagaaaatctatgccagaagaactcatggttttaaatatagaccatcatcgaaactccagaaatttatccactgtggatgatgacatcgctttcctttggtcaaggttggcagagcaagggtataaagggggaaattgtttggcagcaccaacagaaaacaaa

SEQ ID NO: 660 - protein, 509 aa, Homosapiens
MEDIQTNAELKSTQEQSVPAESAAVLNDYSLTKSHEMENVDSGEGPANEDEDIGDDSMKVKDEYSERDENVLKSEPMGNAEEPEIPYSYSREYNEYENIKLERHVVSFDSSRPTSGKMNCDVCGLSCISFNVLMVHKRSHTGERPFQCNQCGASFTQKGNLLRHIKLHTGEKPFKCHLCNYACQRRDALTGHLRTHSVEKPYKCEFCGRSYKQRSSLEEHKERCRTFLQSTDPGDTASAEARHIKAEMGSERALVLDRLASNVAKRKSSMPQKFIGEKRHCFDVNYNSSYMYEKESELIQTRMMDQAINNAISYLGAEALRPLVQTPPAPTSEMVPVISSMYPIALTRAEMSNGAPQELEKKSIHLPEKSVPSERGLSPNNSGHDSTDTDSNHEERQNHIYQQNHMVLSRARNGMPLLKEVPRSYELLKPPPICPRDSVKVINKEGEVMDVYRCDHCRVLFLDYVMFTIHMGCHGFRDPFECNMCGYRSHDRYEFSSHIARGEHRALLK

SEQ ID NO: 661 - DNA, 2269 bp, Homosapiens
gcaggagcacgtggagaggccgagtagccacagcggcagctccagcccggcccggcagcgacatggaagatatacaaacaaatgcggaactgaaaagcactcaggagcagtctgtgcccgcagaaagtgcagcggttttgaatgactacagtttaaccaaatctcatgaaatggaaaatgtggacagtggagaaggcccagccaatgaagatgaagacataggagatgattcaatgaaagtgaaagatgaatacagtgaaagagatgagaatgttttaaagtcagaacccatgggaaatgcagaagagcctgaaatcccttacagctattcaagagaatataatgaatatgaaaacattaagttggagagacatgttgtctcattcgatagtagcaggccaaccagtggaaagatgaactgcgatgtgtgtggattatcctgcatcagcttcaatgtcttaatggttcataagcgaagccatactgtggagaaaccctacaaatgtgagttttgtggaaggagttacaagcagagaagttcccttgaggagcacaaggagcgctgccgtacatttcttcagagcactgacccaggggacactgcaagtgcggaggcaagacacatcaaagcagagatgggaagtgaaagagctctcgtactggacagattagcaagcaatgtggcaaaacgaaaaagctcaatgcctcagaaattcattggtgagaagcgccactgctttgatgtcaactataattcaagttacatgtatgagaaagagagtgagctcatacagacccgcatgatggaccaagccatcaataacgccatcagctatcttggcgccgaagccctgcgccccttggtccagacaccgcctgctcccacctcggagatggttccagttatcagcagcatgtatcccatagccctcacccgggctgagatgtcaaacggtgcccctcaagagctggaaaagaaaagcatccaccttccagagaagagcgtgccttctgagagaggcctctctcccaacaatagtggccacgactccacggacactgacagcaaccatgaagaacgccagaatcacatctatcagcaaaatcacatggtcctgtctcgggcccgcaatgggatgccacttctgaaggaggttccccgctcttacgaactcctcaagcccccgcccatctgcccaagagactccgtcaaagtgatcaacaaggaaggggaggtgatggatgtgtatcggtgtgaccactgccgcgtcctcttcctggactatgtgatgttcacgattcacatgggctgccacggcttccgtgaccctttcgagtgtaacatgtgtggatatcgaagccatgatcggtatgagttctcgtctcacatagccagaggagaacacagagccctgctgaagtgaatatctggtctcagggattgctcctatgtattcagcatcgtttctaaaaaccaatgacctcgcctaacagattgctctcaaaacatactcagttccaaacttcttttcataccatttttagctgtgttcacaggggtagccagggaaacactgtcttccttcagaaattattcgcaggtctagcatattattacttttgtgaaacctttgttttcccatcagggacttgaattttatggaatttaaaagccaaaaaggtatttggtcattatcttctacagcagtggaatgagtggtcccggagatgtgctatatgaaacattctttctgagatatatcaaccacacgtggaaaagcctttcagtcatacatgcaaatccacaaagaggaagagctgaccagctgaccttgctgggaagcctcacccttctgcccttcacaggctgaagggttaagatctaatctccctaatctaaatgacagtctaagagtaagtaaaagaacagccataaaataagtatctgttacgagtaactgaagaccccattctccaagcatcagatccatttcctatcacaacatttttaaaaaatgtcatctgatggcacttctgcttctgtcctttaccttcccatctccagtgaaaagctgagctgctttgggctaaaccagttgtctatagaagaaaatctatgccagaagaactcatggttttaaatatagaccatcatcgaaactccagaaatttatccactgtggatgatgacatcgctttcctttggtcaaggttggcagagcaagggtataaagggggaaattgtttggcagcaccaacagaaaacaaa

SEQ ID NO: 662 - protein, 453 aa, Homosapiens
MEDIQTNAELKSTQEQSVPAESAAVLNDYSLTKSHEMENVDSGEGPANEDEDIGDDSMKVKDEYSERDENVLKSEPMGNAEEPEIPYSYSREYNEYENIKLERHVVSFDSSRPTSGKMNCDVCGLSCISFNVLMVHKRSHTVEKPYKCEFCGRSYKQRSSLEEHKERCRTFLQSTDPGDTASAEARHIKAEMGSERALVLDRLASNVAKRKSSMPQKFIGEKRHCFDVNYNSSYMYEKESELIQTRMMDQAINNAISYLGAEALRPLVQTPPAPTSEMVPVISSMYPIALTRAEMSNGAPQELEKKSIHLPEKSVPSERGLSPNNSGHDSTDTDSNHEERQNHIYQQNHMVLSRARNGMPLLKEVPRSYELLKPPPICPRDSVKVINKEGEVMDVYRCDHCRVLFLDYVMFTIHMGCHGFRDPFECNMCGYRSHDRYEFSSHIARGEHRALLK

SEQ ID NO: 663 - DNA, 2320 bp, Homosapiens
gcaggagcacgtggagaggccgagtagccacagcggcagctccagcccggcccggcagcgacatggaagatatacaaacaaatgcggaactgaaaagcactcaggagcagtctgtgcccgcagaaagtgcagcggttttgaatgactacagtttaaccaaatctcatgaaatggaaaatgtggacagtggagaaggcccagccaatgaagatgaagacataggagatgattcaatgaaagtgaaagatgaatacagtgaaagagatgagaatgttttaaagtcagaacccatgggaaatgcagaagagcctgaaatcccttacagctattcaagagaatataatgaatatgaaaacattaagttggagagacatgttgtctcattcgatagtagcaggccaaccagtggaaagatgaactgcgatgtgtgtggattatcctgcatcagcttcaatgtcttaatggttcataagcgaagccatactggtgaacgcccattccagtgtaatcagtgtggggcatcttttactcagaaaggtaacctcctccgccacattaaactgcacacaggggaaaaaccttttaagtgtcacctctgcaactatgcatgccaaagaagagatgcgctcacggggcatcttaggacacattctgcaagtgcggaggcaagacacatcaaagcagagatgggaagtgaaagagctctcgtactggacagattagcaagcaatgtggcaaaacgaaaaagctcaatgcctcagaaattcattggtgagaagcgccactgctttgatgtcaactataattcaagttacatgtatgagaaagagagtgagctcatacagacccgcatgatggaccaagccatcaataacgccatcagctatcttggcgccgaagccctgcgccccttggtccagacaccgcctgctcccacctcggagatggttccagttatcagcagcatgtatcccatagccctcacccgggctgagatgtcaaacggtgcccctcaagagctggaaaagaaaagcatccaccttccagagaagagcgtgccttctgagagaggcctctctcccaacaatagtggccacgactccacggacactgacagcaaccatgaagaacgccagaatcacatctatcagcaaaatcacatggtcctgtctcgggcccgcaatgggatgccacttctgaaggaggttccccgctcttacgaactcctcaagcccccgcccatctgcccaagagactccgtcaaagtgatcaacaaggaaggggaggtgatggatgtgtatcggtgtgaccactgccgcgtcctcttcctggactatgtgatgttcacgattcacatgggctgccacggcttccgtgaccctttcgagtgtaacatgtgtggatatcgaagccatgatcggtatgagttctcgtctcacatagccagaggagaacacagagccctgctgaagtgaatatctggtctcagggattgctcctatgtattcagcatcgtttctaaaaaccaatgacctcgcctaacagattgctctcaaaacatactcagttccaaacttcttttcataccatttttagctgtgttcacaggggtagccagggaaacactgtcttccttcagaaattattcgcaggtctagcatattattacttttgtgaaacctttgttttcccatcagggacttgaattttatggaatttaaaagccaaaaaggtatttggtcattatcttctacagcagtggaatgagtggtcccggagatgtgctatatgaaacattctttctgagatatatcaaccacacgtggaaaagcctttcagtcatacatgcaaatccacaaagaggaagagctgaccagctgaccttgctgggaagcctcacccttctgcccttcacaggctgaagggttaagatctaatctccctaatctaaatgacagtctaagagtaagtaaaagaacagccataaaataagtatctgttacgagtaactgaagaccccattctccaagcatcagatccatttcctatcacaacatttttaaaaaatgtcatctgatggcacttctgcttctgtcctttaccttcccatctccagtgaaaagctgagctgctttgggctaaaccagttgtctatagaagaaaatctatgccagaagaactcatggttttaaatatagaccatcatcgaaactccagaaatttatccactgtggatgatgacatcgctttcctttggtcaaggttggcagagcaagggtataaagggggaaattgtttggcagcaccaacagaaaacaaa

SEQ ID NO: 664 - protein, 470 aa, Homosapiens
MEDIQTNAELKSTQEQSVPAESAAVLNDYSLTKSHEMENVDSGEGPANEDEDIGDDSMKVKDEYSERDENVLKSEPMGNAEEPEIPYSYSREYNEYENIKLERHVVSFDSSRPTSGKMNCDVCGLSCISFNVLMVHKRSHTGERPFQCNQCGASFTQKGNLLRHIKLHTGEKPFKCHLCNYACQRRDALTGHLRTHSASAEARHIKAEMGSERALVLDRLASNVAKRKSSMPQKFIGEKRHCFDVNYNSSYMYEKESELIQTRMMDQAINNAISYLGAEALRPLVQTPPAPTSEMVPVISSMYPIALTRAEMSNGAPQELEKKSIHLPEKSVPSERGLSPNNSGHDSTDTDSNHEERQNHIYQQNHMVLSRARNGMPLLKEVPRSYELLKPPPICPRDSVKVINKEGEVMDVYRCDHCRVLFLDYVMFTIHMGCHGFRDPFECNMCGYRSHDRYEFSSHIARGEHRALLK

SEQ ID NO: 665 - DNA, 2320 bp, Homosapiens
gcaggagcacgtggagaggccgagtagccacagcggcagctccagcccggcccggcagcgacatggaagatatacaaacaaatgcggaactgaaaagcactcaggagcagtctgtgcccgcagaaagtgcagcggttttgaatgactacagtttaaccaaatctcatgaaatggaaaatgtggacagtggagaaggcccagccaatgaagatgaagacataggagatgattcaatgaaagtgaaagatgaatacagtgaaagagatgagaatgttttaaagtcagaacccatgggaaatgcagaagagcctgaaatcccttacagctattcaagagaatataatgaatatgaaaacattaagttggagagacatgttgtctcattcgatagtagcaggccaaccagtggaaagatgaactgcgatgtgtgtggattatcctgcatcagcttcaatgtcttaatggttcataagcgaagccatactggtgaacgcccattccagtgtaatcagtgtggggcatcttttactcagaaaggtaacctcctccgccacattaaactgcacacaggggaaaaaccttttaagtgtcacctctgcaactatgcatgccaaagaagagatgcgctcacggggcatcttaggacacattctgtggagaaaccctacaaatgtgagttttgtggaaggagttacaagcagagaagttcccttgaggagcacaaggagcgctgccgtacatttcttcagagcactgacccaggggacactggtgagaagcgccactgctttgatgtcaactataattcaagttacatgtatgagaaagagagtgagctcatacagacccgcatgatggaccaagccatcaataacgccatcagctatcttggcgccgaagccctgcgccccttggtccagacaccgcctgctcccacctcggagatggttccagttatcagcagcatgtatcccatagccctcacccgggctgagatgtcaaacggtgcccctcaagagctggaaaagaaaagcatccaccttccagagaagagcgtgccttctgagagaggcctctctcccaacaatagtggccacgactccacggacactgacagcaaccatgaagaacgccagaatcacatctatcagcaaaatcacatggtcctgtctcgggcccgcaatgggatgccacttctgaaggaggttccccgctcttacgaactcctcaagcccccgcccatctgcccaagagactccgtcaaagtgatcaacaaggaaggggaggtgatggatgtgtatcggtgtgaccactgccgcgtcctcttcctggactatgtgatgttcacgattcacatgggctgccacggcttccgtgaccctttcgagtgtaacatgtgtggatatcgaagccatgatcggtatgagttctcgtctcacatagccagaggagaacacagagccctgctgaagtgaatatctggtctcagggattgctcctatgtattcagcatcgtttctaaaaaccaatgacctcgcctaacagattgctctcaaaacatactcagttccaaacttcttttcataccatttttagctgtgttcacaggggtagccagggaaacactgtcttccttcagaaattattcgcaggtctagcatattattacttttgtgaaacctttgttttcccatcagggacttgaattttatggaatttaaaagccaaaaaggtatttggtcattatcttctacagcagtggaatgagtggtcccggagatgtgctatatgaaacattctttctgagatatatcaaccacacgtggaaaagcctttcagtcatacatgcaaatccacaaagaggaagagctgaccagctgaccttgctgggaagcctcacccttctgcccttcacaggctgaagggttaagatctaatctccctaatctaaatgacagtctaagagtaagtaaaagaacagccataaaataagtatctgttacgagtaactgaagaccccattctccaagcatcagatccatttcctatcacaacatttttaaaaaatgtcatctgatggcacttctgcttctgtcctttaccttcccatctccagtgaaaagctgagctgctttgggctaaaccagttgtctatagaagaaaatctatgccagaagaactcatggttttaaatatagaccatcatcgaaactccagaaatttatccactgtggatgatgacatcgctttcctttggtcaaggttggcagagcaagggtataaagggggaaattgtttggcagcaccaacagaaaacaaa

SEQ ID NO: 666 - protein, 470 aa, Homosapiens
MEDIQTNAELKSTQEQSVPAESAAVLNDYSLTKSHEMENVDSGEGPANEDEDIGDDSMKVKDEYSERDENVLKSEPMGNAEEPEIPYSYSREYNEYENIKLERHVVSFDSSRPTSGKMNCDVCGLSCISFNVLMVHKRSHTGERPFQCNQCGASFTQKGNLLRHIKLHTGEKPFKCHLCNYACQRRDALTGHLRTHSVEKPYKCEFCGRSYKQRSSLEEHKERCRTFLQSTDPGDTGEKRHCFDVNYNSSYMYEKESELIQTRMMDQAINNAISYLGAEALRPLVQTPPAPTSEMVPVISSMYPIALTRAEMSNGAPQELEKKSIHLPEKSVPSERGLSPNNSGHDSTDTDSNHEERQNHIYQQNHMVLSRARNGMPLLKEVPRSYELLKPPPICPRDSVKVINKEGEVMDVYRCDHCRVLFLDYVMFTIHMGCHGFRDPFECNMCGYRSHDRYEFSSHIARGEHRALLK

SEQ ID NO: 667 - DNA, 2152 bp, Homosapiens
gcaggagcacgtggagaggccgagtagccacagcggcagctccagcccggcccggcagcgacatggaagatatacaaacaaatgcggaactgaaaagcactcaggagcagtctgtgcccgcagaaagtgcagcggttttgaatgactacagtttaaccaaatctcatgaaatggaaaatgtggacagtggagaaggcccagccaatgaagatgaagacataggagatgattcaatgaaagtgaaagatgaatacagtgaaagagatgagaatgttttaaagtcagaacccatgggaaatgcagaagagcctgaaatcccttacagctattcaagagaatataatgaatatgaaaacattaagttggagagacatgttgtctcattcgatagtagcaggccaaccagtggaaagatgaactgcgatgtgtgtggattatcctgcatcagcttcaatgtcttaatggttcataagcgaagccatactgcaagtgcggaggcaagacacatcaaagcagagatgggaagtgaaagagctctcgtactggacagattagcaagcaatgtggcaaaacgaaaaagctcaatgcctcagaaattcattggtgagaagcgccactgctttgatgtcaactataattcaagttacatgtatgagaaagagagtgagctcatacagacccgcatgatggaccaagccatcaataacgccatcagctatcttggcgccgaagccctgcgccccttggtccagacaccgcctgctcccacctcggagatggttccagttatcagcagcatgtatcccatagccctcacccgggctgagatgtcaaacggtgcccctcaagagctggaaaagaaaagcatccaccttccagagaagagcgtgccttctgagagaggcctctctcccaacaatagtggccacgactccacggacactgacagcaaccatgaagaacgccagaatcacatctatcagcaaaatcacatggtcctgtctcgggcccgcaatgggatgccacttctgaaggaggttccccgctcttacgaactcctcaagcccccgcccatctgcccaagagactccgtcaaagtgatcaacaaggaaggggaggtgatggatgtgtatcggtgtgaccactgccgcgtcctcttcctggactatgtgatgttcacgattcacatgggctgccacggcttccgtgaccctttcgagtgtaacatgtgtggatatcgaagccatgatcggtatgagttctcgtctcacatagccagaggagaacacagagccctgctgaagtgaatatctggtctcagggattgctcctatgtattcagcatcgtttctaaaaaccaatgacctcgcctaacagattgctctcaaaacatactcagttccaaacttcttttcataccatttttagctgtgttcacaggggtagccagggaaacactgtcttccttcagaaattattcgcaggtctagcatattattacttttgtgaaacctttgttttcccatcagggacttgaattttatggaatttaaaagccaaaaaggtatttggtcattatcttctacagcagtggaatgagtggtcccggagatgtgctatatgaaacattctttctgagatatatcaaccacacgtggaaaagcctttcagtcatacatgcaaatccacaaagaggaagagctgaccagctgaccttgctgggaagcctcacccttctgcccttcacaggctgaagggttaagatctaatctccctaatctaaatgacagtctaagagtaagtaaaagaacagccataaaataagtatctgttacgagtaactgaagaccccattctccaagcatcagatccatttcctatcacaacatttttaaaaaatgtcatctgatggcacttctgcttctgtcctttaccttcccatctccagtgaaaagctgagctgctttgggctaaaccagttgtctatagaagaaaatctatgccagaagaactcatggttttaaatatagaccatcatcgaaactccagaaatttatccactgtggatgatgacatcgctttcctttggtcaaggttggcagagcaagggtataaagggggaaattgtttggcagcaccaacagaaaacaaa

SEQ ID NO: 668 - protein, 414 aa, Homosapiens
MEDIQTNAELKSTQEQSVPAESAAVLNDYSLTKSHEMENVDSGEGPANEDEDIGDDSMKVKDEYSERDENVLKSEPMGNAEEPEIPYSYSREYNEYENIKLERHVVSFDSSRPTSGKMNCDVCGLSCISFNVLMVHKRSHTASAEARHIKAEMGSERALVLDRLASNVAKRKSSMPQKFIGEKRHCFDVNYNSSYMYEKESELIQTRMMDQAINNAISYLGAEALRPLVQTPPAPTSEMVPVISSMYPIALTRAEMSNGAPQELEKKSIHLPEKSVPSERGLSPNNSGHDSTDTDSNHEERQNHIYQQNHMVLSRARNGMPLLKEVPRSYELLKPPPICPRDSVKVINKEGEVMDVYRCDHCRVLFLDYVMFTIHMGCHGFRDPFECNMCGYRSHDRYEFSSHIARGEHRALLK

SEQ ID NO: 669 - DNA, 2203 bp, Homosapiens
gcaggagcacgtggagaggccgagtagccacagcggcagctccagcccggcccggcagcgacatggaagatatacaaacaaatgcggaactgaaaagcactcaggagcagtctgtgcccgcagaaagtgcagcggttttgaatgactacagtttaaccaaatctcatgaaatggaaaatgtggacagtggagaaggcccagccaatgaagatgaagacataggagatgattcaatgaaagtgaaagatgaatacagtgaaagagatgagaatgttttaaagtcagaacccatgggaaatgcagaagagcctgaaatcccttacagctattcaagagaatataatgaatatgaaaacattaagttggagagacatgttgtctcattcgatagtagcaggccaaccagtggaaagatgaactgcgatgtgtgtggattatcctgcatcagcttcaatgtcttaatggttcataagcgaagccatactggtgaacgcccattccagtgtaatcagtgtggggcatcttttactcagaaaggtaacctcctccgccacattaaactgcacacaggggaaaaaccttttaagtgtcacctctgcaactatgcatgccaaagaagagatgcgctcacggggcatcttaggacacattctggtgagaagcgccactgctttgatgtcaactataattcaagttacatgtatgagaaagagagtgagctcatacagacccgcatgatggaccaagccatcaataacgccatcagctatcttggcgccgaagccctgcgccccttggtccagacaccgcctgctcccacctcggagatggttccagttatcagcagcatgtatcccatagccctcacccgggctgagatgtcaaacggtgcccctcaagagctggaaaagaaaagcatccaccttccagagaagagcgtgccttctgagagaggcctctctcccaacaatagtggccacgactccacggacactgacagcaaccatgaagaacgccagaatcacatctatcagcaaaatcacatggtcctgtctcgggcccgcaatgggatgccacttctgaaggaggttccccgctcttacgaactcctcaagcccccgcccatctgcccaagagactccgtcaaagtgatcaacaaggaaggggaggtgatggatgtgtatcggtgtgaccactgccgcgtcctcttcctggactatgtgatgttcacgattcacatgggctgccacggcttccgtgaccctttcgagtgtaacatgtgtggatatcgaagccatgatcggtatgagttctcgtctcacatagccagaggagaacacagagccctgctgaagtgaatatctggtctcagggattgctcctatgtattcagcatcgtttctaaaaaccaatgacctcgcctaacagattgctctcaaaacatactcagttccaaacttcttttcataccatttttagctgtgttcacaggggtagccagggaaacactgtcttccttcagaaattattcgcaggtctagcatattattacttttgtgaaacctttgttttcccatcagggacttgaattttatggaatttaaaagccaaaaaggtatttggtcattatcttctacagcagtggaatgagtggtcccggagatgtgctatatgaaacattctttctgagatatatcaaccacacgtggaaaagcctttcagtcatacatgcaaatccacaaagaggaagagctgaccagctgaccttgctgggaagcctcacccttctgcccttcacaggctgaagggttaagatctaatctccctaatctaaatgacagtctaagagtaagtaaaagaacagccataaaataagtatctgttacgagtaactgaagaccccattctccaagcatcagatccatttcctatcacaacatttttaaaaaatgtcatctgatggcacttctgcttctgtcctttaccttcccatctccagtgaaaagctgagctgctttgggctaaaccagttgtctatagaagaaaatctatgccagaagaactcatggttttaaatatagaccatcatcgaaactccagaaatttatccactgtggatgatgacatcgctttcctttggtcaaggttggcagagcaagggtataaagggggaaattgtttggcagcaccaacagaaaacaaa

SEQ ID NO: 670 - protein, 431 aa, Homosapiens
MEDIQTNAELKSTQEQSVPAESAAVLNDYSLTKSHEMENVDSGEGPANEDEDIGDDSMKVKDEYSERDENVLKSEPMGNAEEPEIPYSYSREYNEYENIKLERHVVSFDSSRPTSGKMNCDVCGLSCISFNVLMVHKRSHTGERPFQCNQCGASFTQKGNLLRHIKLHTGEKPFKCHLCNYACQRRDALTGHLRTHSGEKRHCFDVNYNSSYMYEKESELIQTRMMDQAINNAISYLGAEALRPLVQTPPAPTSEMVPVISSMYPIALTRAEMSNGAPQELEKKSIHLPEKSVPSERGLSPNNSGHDSTDTDSNHEERQNHIYQQNHMVLSRARNGMPLLKEVPRSYELLKPPPICPRDSVKVINKEGEVMDVYRCDHCRVLFLDYVMFTIHMGCHGFRDPFECNMCGYRSHDRYEFSSHIARGEHRALLK

SEQ ID NO: 671 - DNA, 2205 bp, Homosapiens
gcgcgtccgctcccgccgttgcgacggacgggtaggggaggcgaccccggcgttctgctccgcactgtggaggaggtggggaggtgttgggccagggctgaggtaggagggagtctgtccctcgacgcctcctgcgacgccagcccctgagcgatgatgcgaacgtgcgtcctactctccgcggtgctctggtgcctcacaggagacaaaatatatgtagagttacatcaaaatagtccagtccttatctgtatggattttaagctttctaaaaaagaaatagtggaccccacctacttatggattgggcctaatgaaaagacgttaacaggaaataatagaataaatataactgaaactggacagctgatggtgaaagattttttggagcctttgtctggactttacacatgtactctttcttataagactgttaaagcagaaactcaagaagaaaaaacagtcaaaaagagatatgactttatggtctttgcctatcgggaacctgattattcatatcagatggctgtacgttttaccacaaggtcttgtatagggagatacaatgatgtattctttagagtgctgaagaaaatcttggatagtctaatttctgatttgtcatgccatgtcatagagccatcatataaatgccattctgttgaaattccagaacatggcctcatacatgagctatttatagcatttcaagttaatccttttgcgccggggtggaaaggtgcttgcaatggatctgttgactgtgaagataccactaatcataatatcctccaggcaagagatcgaatagaagacttttttcggagccaagcatatattttctaccataactttaataaaactctaccagcaatgcattttgtggaccacagtttgcaagtagtacgtctggatagctgtcgaccaggctttggaaaaaatgaacgtctacacagtaattgcgctagctgttgtgtggtttgtagtcctgcgacttttagtcctgatgttaatgtaacttgtcagacctgcgtttccgtccttacctatggagctaaatcttgcccacaaacttcaaacaaaaatcagcaatatgaagattagaggtgaaagcattgttacttacttgtggaagtcggggacataagatgattttcacatcccagagcatcatagatagttccattaagtaaaatcagtaagaccaaaccactggaaaacatgcattttggaaactttaaaataaatggttaacatggcatttctaagaaggcatttaatccagtatctctagtgtacaaaggaaacttgaagttttaatggattatttttaatgaaatgttttattgtttacaaacggtatgttgctgtgtacctaagagtatagtaaggtcaagaagagtatcaaagtataataaaataaaaattgtatactctccatatatttatttgtttggaatcactcttgtgtgatataaaggcgtgtatattatctttgtattagaaccaaaaaagttatttattttggtccctatgattttattttttaagataaattaatatactgtattttttaaagtataggtttaggtttacagaataatagagcagataatatatagagttccatacacccactgcaccccataccctcattcctccttacacaatttctcctattattaagatggtgcattagtgtggcacatttgttacaaatgatgaaccaatattaatttattattaattatagcccatagttcacattaagattcattgtgttgtaaggttatgtgggttttgacaaattcataatggcatgtgtgcaccattgcagtctcatacagaatagtttcaccaccctcaaaatcctgtgcttcacttatttatccctcccgccgtgccctggcaaccactgatctttttactgtctctacagttttgccttttccaaaatgtcatgtagttggttggagttatgcagtatgtagactttttagactggcttctttcacttagcaatatgcatttaaggttcctccatgtctttttgtgacttgatagctcattttttattgctgaataatgttcattgtatggatatagcatagtatgtttatccattcgcccattaaaggaaatcttgattgcttccagttttcagtgattaaaaataaagccgctataaacaaaaaaaaaaaaaaa

SEQ ID NO: 672 - protein, 316 aa, Homosapiens
MMRTCVLLSAVLWCLTGDKIYVELHQNSPVLICMDFKLSKKEIVDPTYLWIGPNEKTLTGNNRINITETGQLMVKDFLEPLSGLYTCTLSYKTVKAETQEEKTVKKRYDFMVFAYREPDYSYQMAVRFTTRSCIGRYNDVFFRVLKKILDSLISDLSCHVIEPSYKCHSVEIPEHGLIHELFIAFQVNPFAPGWKGACNGSVDCEDTTNHNILQARDRIEDFFRSQAYIFYHNFNKTLPAMHFVDHSLQVVRLDSCRPGFGKNERLHSNCASCCVVCSPATFSPDVNVTCQTCVSVLTYGAKSCPQTSNKNQQYED

SEQ ID NO: 673 - DNA, 2271 bp, Homosapiens
gcgcgtccgctcccgccgttgcgacggacgggtaggggaggcgaccccggcgttctgctccgcactgtggaggaggtggggaggtgttgggccagggctgaggtaggagggagtctgtccctcgacgcctcctgcgacgccagcccctgagcgatgatgcgaacgtgcgtcctactctccgcggtgctctggtgcctcacaggagtccaatgcccgcgttttaccttattcaataagaagggcttcatttatggcaagacaggacagccagacaaaatatatgtagagttacatcaaaatagtccagtccttatctgtatggattttaagctttctaaaaaagaaatagtggaccccacctacttatggattgggcctaatgaaaagacgttaacaggaaataatagaataaatataactgaaactggacagctgatggtgaaagattttttggagcctttgtctggactttacacatgtactctttcttataagactgttaaagcagaaactcaagaagaaaaaacagtcaaaaagagatatgactttatggtctttgcctatcgggaacctgattattcatatcagatggctgtacgttttaccacaaggtcttgtatagggagatacaatgatgtattctttagagtgctgaagaaaatcttggatagtctaatttctgatttgtcatgccatgtcatagagccatcatataaatgccattctgttgaaattccagaacatggcctcatacatgagctatttatagcatttcaagttaatccttttgcgccggggtggaaaggtgcttgcaatggatctgttgactgtgaagataccactaatcataatatcctccaggcaagagatcgaatagaagacttttttcggagccaagcatatattttctaccataactttaataaaactctaccagcaatgcattttgtggaccacagtttgcaagtagtacgtctggatagctgtcgaccaggctttggaaaaaatgaacgtctacacagtaattgcgctagctgttgtgtggtttgtagtcctgcgacttttagtcctgatgttaatgtaacttgtcagacctgcgtttccgtccttacctatggagctaaatcttgcccacaaacttcaaacaaaaatcagcaatatgaagattagaggtgaaagcattgttacttacttgtggaagtcggggacataagatgattttcacatcccagagcatcatagatagttccattaagtaaaatcagtaagaccaaaccactggaaaacatgcattttggaaactttaaaataaatggttaacatggcatttctaagaaggcatttaatccagtatctctagtgtacaaaggaaacttgaagttttaatggattatttttaatgaaatgttttattgtttacaaacggtatgttgctgtgtacctaagagtatagtaaggtcaagaagagtatcaaagtataataaaataaaaattgtatactctccatatatttatttgtttggaatcactcttgtgtgatataaaggcgtgtatattatctttgtattagaaccaaaaaagttatttattttggtccctatgattttattttttaagataaattaatatactgtattttttaaagtataggtttaggtttacagaataatagagcagataatatatagagttccatacacccactgcaccccataccctcattcctccttacacaatttctcctattattaagatggtgcattagtgtggcacatttgttacaaatgatgaaccaatattaatttattattaattatagcccatagttcacattaagattcattgtgttgtaaggttatgtgggttttgacaaattcataatggcatgtgtgcaccattgcagtctcatacagaatagtttcaccaccctcaaaatcctgtgcttcacttatttatccctcccgccgtgccctggcaaccactgatctttttactgtctctacagttttgccttttccaaaatgtcatgtagttggttggagttatgcagtatgtagactttttagactggcttctttcacttagcaatatgcatttaaggttcctccatgtctttttgtgacttgatagctcattttttattgctgaataatgttcattgtatggatatagcatagtatgtttatccattcgcccattaaaggaaatcttgattgcttccagttttcagtgattaaaaataaagccgctataaacaaaaaaaaaaaaaaa

SEQ ID NO: 674 - protein, 338 aa, Homosapiens
MMRTCVLLSAVLWCLTGVQCPRFTLFNKKGFIYGKTGQPDKIYVELHQNSPVLICMDFKLSKKEIVDPTYLWIGPNEKTLTGNNRINITETGQLMVKDFLEPLSGLYTCTLSYKTVKAETQEEKTVKKRYDFMVFAYREPDYSYQMAVRFTTRSCIGRYNDVFFRVLKKILDSLISDLSCHVIEPSYKCHSVEIPEHGLIHELFIAFQVNPFAPGWKGACNGSVDCEDTTNHNILQARDRIEDFFRSQAYIFYHNFNKTLPAMHFVDHSLQVVRLDSCRPGFGKNERLHSNCASCCVVCSPATFSPDVNVTCQTCVSVLTYGAKSCPQTSNKNQQYED

SEQ ID NO: 675 - DNA, 1646 bp, Homosapiens
gtggaatgtcatcagttaaggctattttcatttcttttgtggatcttcagttgcttcaggccatctggatgtatacatgcaggtcacagggaatatgatggcttagcttgggttcagaggcctgacacctcaggctgccaaatgtggaagatttaaatacttgaaccaataccctcctcccaaaaactgaaattggcttctgtttctgagttggtccaggcgcaatgttcagcgtatttgaggaaatcacaagaattgtagttaaggagatggatgctggaggggatatgattgccgttagaagccttgttgatgctgatagattccgctgcttccatctggtgggggagaagagaactttctttggatgccggcactacacaacaggcctcaccctgatggacattctggacacacatggggacaagtggttagatgaactggattctgggctccaaggtcaaaaggctgagtttcaaattctggataatgtagactcaacgggagagttgatagtgagattacccaaagaaataacaatttcaggcagtttccagggcttccaccatcagaaaatcaagatatcggagaaccggatatcccagcagtatctggctacccttgaaaacaggaagctgaagagggaactacccttttcattccgatcaattaatacgagagaaaacctgtatctggtgacagaaactctggagacggtaaaggaggaaaccctgaaaagcgaccggcaatataaattttggagccagatctctcagggccatctcagctataaacacaagggccaaagggaagtgaccatccccccaaatcgggtcctgagctatcgagtaaagcagcttgtcttccccaacaaggagacgatgagaaagtctttgggttcggaggattccagaaacatgaaggagaagttggaggacatggagagtgtcctcaaggacctgacagaggagaagagaaaagatgtgctaaactccctcgctaagtgcctcggcaaggaggatattcggcaggatctagagcaaagagtatctgaggtcctgatttccggggagctacacatggaggacccagacaagcctctcctaagcagcctttttaatgctgctggggtcttggtagaagcgcgtgcaaaagccattctggacttcctggatgccctgctagagctgtctgaagagcagcagtttgtggctgaggccctggagaaggggacccttcctctgttgaaggaccaggtgaaatctgtcatggagcagaactgggatgagctggccagcagtcctcctgacatggactatgaccctgaggcacgaattctctgtgcgctgtatgttgttgtctctatcctgctggagctggctgaggggcctacctctgtctcttcctaactacaaaagccctttctccccacaagcctctgggttttccctttaccagtctgtcctcactgccatcgccactaccatcctgtcaccagtgggacctctttaaaacaagcagccaaccattctttgatgtatcccattcgctccatgttaacatccaaaaccagcctggatttcatacatggacttctgattaaaagtggcaggttgtgcatgttaaaaaaaaaaaaaaaaaaaaaa

SEQ ID NO: 676 - protein, 394 aa, Homosapiens
MFSVFEEITRIVVKEMDAGGDMIAVRSLVDADRFRCFHLVGEKRTFFGCRHYTTGLTLMDILDTHGDKWLDELDSGLQGQKAEFQILDNVDSTGELIVRLPKEITISGSFQGFHHQKIKISENRISQQYLATLENRKLKRELPFSFRSINTRENLYLVTETLETVKEETLKSDRQYKFWSQISQGHLSYKHKGQREVTIPPNRVLSYRVKQLVFPNKETMRKSLGSEDSRNMKEKLEDMESVLKDLTEEKRKDVLNSLAKCLGKEDIRQDLEQRVSEVLISGELHMEDPDKPLLSSLFNAAGVLVEARAKAILDFLDALLELSEEQQFVAEALEKGTLPLLKDQVKSVMEQNWDELASSPPDMDYDPEARILCALYVVVSILLELAEGPTSVSS

SEQ ID NO: 677 - DNA, 2109 bp, Homosapiens
gattcggccggagctgccagcggggaggctgcagccgcgggttgttacagctgctggagcagcagcggcccccgctcccgggaaccgttcccgggccgttgatcttcggccccacacgaacagcagagaggggcagcaggatgaatgtgggcacagcgcacagcgaggtgaaccccaacacgcgggtgatgaacagccgtggcatctggctctcctacgtgctggccatcggtctcctccacatcgtgctgctgagcatcccgtttgtgagtgtccctgtcgtctggaccctcaccaacctcattcacaacatgggcatgtatatcttcctgcacacggtgaaggggacaccctttgagaccccggaccagggcaaggcgaggctgctaacccactgggagcagatggattatggggtccagttcacggcctctcggaagttcttgaccatcacacccatcgtgctgtacttcctcaccagcttctacactaagtacgaccagatccattttgtgctcaacaccgtgtccctgatgagcgtgcttatccccaagctgccccagctccacggagtccggatttttggaatcaataagtactgagagtgcagccccttcccctgcccagggtggcaggggaggggtagggtaaaaggcatgtgctgcaacactgaagacagaaagaagaagcctctggacactgccagagatgggggttgagcctctggcctaatttcccccctcgcttcccccagtagccaacttggagtagcttgtagtggggttggggtaggccccctgggctctgaccttttctgaattttttgatctcttccttttgctttttgaatagagactccatggagttggtcatggaatgggctgggctcctgggctgaacatggaccacgcagttgcgacaggaggccaggggaaaaacccctgctcacttgtttgccctcaggcagccaaagcactttaacccctgcatagggagcagagggcggtacggcttctggattgtttcactgtgattcctaggttttttcgatgccatgcagtgtgtgcttttgtgtatggaagcaagtgtgggatgggtctttgcctttctgggtagggagctgtctaatccaagtcccaggcttttggcagcttctctgcaacccaccgtgggtcctggttgggagtggggagggtcaggttggggaaagatggggtagagtgtagatggcttggttccagaggtgagggggccagggctgctgccatcctggcctggtggaggttggggagctgtaggagagctagtgagtcgagacttagaagaatggggccacatagcagcagaggactggtgtaagggagggaggggtagggacagaagctagacccaatctcctttgggatgtgggcagggagggaagcaggcttggagggttaatttacccacagaatgtgatagtaataggggagggaggctgctgtgggtttaactcctgggttggctgttgggtagacaggtggggaaaaggcccgtgagtcattgtaagcacaggtccaacttggccctgactcctgcgggggtatggggaagctgtgacagaaacgatgggtgctgtggtcctctgcaggccctcaccccttaacttcctcatgcagactggcactgggcagggcctctcatgtggcagccacatgtggcgttgtgaggccaccccatgtggggtctgtggtgagagtcctgtaggatccctgctcaagcagcacagaggaaggggcaagacgtggcctgtaggcactgtctcagcctgcagagaagaaagtgaggccgggagcctgagcctgggctggagccttctcccctccccagttggactaggggcagtgttaattttgaaaaggtgtgggtccctgtgtccttttccaggggtccaagggaacaggagaggtcactgggcctgttttctccctcctgaccctgcatctcccaccctgtgtatcatagggaactttcaccttaaaatctttctaagcaaagtgtgaataggatttttactccctttgtacagtattctgaggaacgcaaataaaagggcaacatgtttctgtt

SEQ ID NO: 678 - protein, 153 aa, Homosapiens
MNVGTAHSEVNPNTRVMNSRGIWLSYVLAIGLLHIVLLSIPFVSVPVVWTLTNLIHNMGMYIFLHTVKGTPFETPDQGKARLLTHWEQMDYGVQFTASRKFLTITPIVLYFLTSFYTKYDQIHFVLNTVSLMSVLIPKLPQLHGVRIFGINKY

SEQ ID NO: 679 - DNA, 2168 bp, Homosapiens
atataaagcagcctgtcctggcaagggatggtcatcctctcaacctacagacccagtgagccctaggccctcaccccagacccagctgctggataggacccagccccgctcccagagacaatgaccatgtttgaaaatgtcacccgggccctggccagacagctaaaccctcgaggggacctgacaccacttgacagcctcatcgacttcaagcgcttccatcccttctgcctggtgctgaggaagaggaagagcacgctcttctggggggcccggtacgtccgcaccgactacacgctgctggatgtgcttgagcccggcagctcaccttcagacccaacagacactgggaattttggctttaagaatatgctggacacccgagtggagggagatgtggatgtaccaaagacggtgaaggtgaagggaacggcagggctctcgcagaacagcactctggaggtccagacactcagtgtggctcccaaggccctggagaccttgcaggagaggaagctggcagcagaccacccattcctgaaggagatgcaagatcaaggggagaacctgtatgtggtgatggaggtggtggagacggtgcaggaggtcacactggagcgagccggcaaggcagaggcctgcttctccctccccttcttcgccccattggggctacagggatccataaatcacaaggaggctgtaaccatccccaagggctgcgtcctggcctttcgagtgagacagctgatggtcaaaggcaaagatgagtgggatattccacatatctgcaatgataacatgcaaaccttccctcctggagaaaagtcaggagaggagaaggtcatccttatccaggcatctgatgttggggacgtacacgaaggcttcaggacactaaaagaagaagttcagagagagacccaacaagtggagaagctgagccgagtagggcaaagctccctgctcagctccctcagcaaacttctagggaagaaaaaggagctacaagaccttgagctcgcacttgaaggggctctagacaagggacatgaagtgaccctggaggcactcccaaaagatgtcctgctatcaaaggaggccgtgggcgccatcctctatttcgttggagccctaacagagctaagtgaagcccaacagaagctgctggtgaaatccatggagaaaaagatcctacccgtgcagctaaagctggtggagagcacgatggaacagaacttcctgctggataaagagggtgttttccccctgcaacctgagctgctctcctcccttggggacgaggagctgaccctcacggaggctctagtcgggctgagtggcctggaagtgcagagatcgggcccccaatatatgtgggacccagacaccctccctcgcctctgtgctctttatgcaggcctctctcaccttcagcagcttaccaaggcctcctaatttgccttttacgtctgcttcatgactccctaatgccttcccaacctcgtggtgctgtgtccttaccacctaagggcatttcagagccatcagctgaagacatctgaaatctcagctggtcacccatgataaccaacttccacctgcccaaccatatatcaccccctacccctccagctccgcaacccactaagcccatctgctgatgcttaaattttctttacttttcttttttttttttttttttttttttgagatggaggctcgctctgtcacccaggctggagtgcagtggcttgatcttggctcactgcaacctccgcctcccaggttcaagcagttctcctgcctcagcctctcgagcagctggaattacaggcacgtgccacgacacccagctaatttttgtatttttagtagagacggggtttcgccatgttgcccaggttggtctcgaactcctggcctcaagtgatctgcccgcctcggcctcccaaagtgctgggattacaggcgtgagccaccgtgcccggcctgtgcttaaatattctaggagtagaagcactcagacttttaaaactatgagccgtttcagcaaaactgagaaaaaaagaagattaattaatttcctatcctaatccctcctacttatacttccccaaaaaacaagctttactggaattaatggaaaatattatgtcaatcttagg

SEQ ID NO: 680 - protein, 445 aa, Homosapiens
MTMFENVTRALARQLNPRGDLTPLDSLIDFKRFHPFCLVLRKRKSTLFWGARYVRTDYTLLDVLEPGSSPSDPTDTGNFGFKNMLDTRVEGDVDVPKTVKVKGTAGLSQNSTLEVQTLSVAPKALETLQERKLAADHPFLKEMQDQGENLYVVMEVVETVQEVTLERAGKAEACFSLPFFAPLGLQGSINHKEAVTIPKGCVLAFRVRQLMVKGKDEWDIPHICNDNMQTFPPGEKSGEEKVILIQASDVGDVHEGFRTLKEEVQRETQQVEKLSRVGQSSLLSSLSKLLGKKKELQDLELALEGALDKGHEVTLEALPKDVLLSKEAVGAILYFVGALTELSEAQQKLLVKSMEKKILPVQLKLVESTMEQNFLLDKEGVFPLQPELLSSLGDEELTLTEALVGLSGLEVQRSGPQYMWDPDTLPRLCALYAGLSHLQQLTKAS

SEQ ID NO: 681 - DNA, 2174 bp, Homosapiens
agaaggcccagcgccgggaaggggtttgcagctgctccgtcatcgtgcggcccgacgctatctcgcgctcgtgtgcaggcccggctcggctcctggtccccggtgcgagggttaacgcgaggccccggcctcggtccccggactaggccgtgaccccgggtgccatgaagcaggagggctcggcgcggcgccgcggcgcggacaaggcgaaaccgccgcccggcggaggagaacaagaacccccaccgccgccggccccccaggatgtggagatgaaagaggaggcagcgacgggtggcgggtcgacgggggaggcagacggcaagacggcggcggcagcggctgagcactcccagcgagagctggacacagtcaccttggaggacatcaaggagcacgtgaaacagctagagaaagcggtttcaggcaaggagccgagattcgtgctgcgggccctgcggatgctgccttccacatcacgccgcctcaaccactatgttctgtataaggctgtgcagggcttcttcacttcaaataatgccactcgagactttttgctccccttcctggaagagcccatggacacagaggctgatttacagttccgtccccgcacgggaaaagctgcgtcgacacccctcctgcctgaagtggaagcctatctccaactcctcgtggtcatcttcatgatgaacagcaagcgctacaaagaggcacagaagatctctgatgatctgatgcagaagatcagtactcagaaccgccgggccctagaccttgtagccgcaaagtgttactattatcacgcccgggtctatgagttcctggacaagctggatgtggtgcgcagcttcttgcatgctcggctccggacagctacgcttcggcatgacgcagacgggcaggccaccctgttgaacctcctgctgcggaattacctacactacagcttgtacgaccaggctgagaagctggtgtccaagtctgtgttcccagagcaggccaacaacaatgagtgggccaggtacctctactacacagggcgaatcaaagccatccagctggagtactcagaggcccggagaacgatgaccaacgcccttcgcaaggcccctcagcacacagctgtcggcttcaaacagacggtgcacaagcttctcatcgtggtggagctgttgctgggggagatccctgaccggctgcagttccgccagccctccctcaagcgctcactcatgccctatttccttctgactcaagctgtcaggacaggaaacctagccaagttcaaccaggtcctggatcagtttggggagaagtttcaagcagatgggacctacaccctaattatccggctgcggcacaacgtgattaagacaggtgtacgcatgatcagcctctcctattcccgaatctccttggctgacatcgcccagaagctgcagttggatagccccgaagatgcagagttcattgttgccaaggccatccgggatggtgtcattgaggccagcatcaaccacgagaagggctatgtccaatccaaggagatgattgacatctattccacccgagagccccagctagccttccaccagcgcatctccttctgcctagatatccacaacatgtctgtcaaggccatgaggtttcctcccaaatcgtacaacaaggacttggagtctgcagaggaacggcgtgagcgagaacagcaggacttggagtttgccaaggagatggcagaagatgatgatgacagcttcccttgagctggggggctggggaggggtagggggaatggggacaggctctttcccccttgggggtcccctgcccagggcactgtccccattttcccacacacagctcatatgctgcattcgtgcagggggtgggggtgctgggagccagccaccctgacctcccccagggctcctccccagccggtgacttactgtacagcaggcaggagggtgggcaggcaacctccccgggcagggtcctggccagcagtgtgggagcaggaggggaaggatagttctgtgtactcctttagggagtgggggactagaactgggatgtcttggcttgtatgttttttgaagcttcgattatgatttttaaacaataaaaagttctccacagtgaaaaaaaaaaaaaaaaaaaaaaaaaaa

SEQ ID NO: 682 - protein, 534 aa, Homosapiens
MKQEGSARRRGADKAKPPPGGGEQEPPPPPAPQDVEMKEEAATGGGSTGEADGKTAAAAAEHSQRELDTVTLEDIKEHVKQLEKAVSGKEPRFVLRALRMLPSTSRRLNHYVLYKAVQGFFTSNNATRDFLLPFLEEPMDTEADLQFRPRTGKAASTPLLPEVEAYLQLLVVIFMMNSKRYKEAQKISDDLMQKISTQNRRALDLVAAKCYYYHARVYEFLDKLDVVRSFLHARLRTATLRHDADGQATLLNLLLRNYLHYSLYDQAEKLVSKSVFPEQANNNEWARYLYYTGRIKAIQLEYSEARRTMTNALRKAPQHTAVGFKQTVHKLLIVVELLLGEIPDRLQFRQPSLKRSLMPYFLLTQAVRTGNLAKFNQVLDQFGEKFQADGTYTLIIRLRHNVIKTGVRMISLSYSRISLADIAQKLQLDSPEDAEFIVAKAIRDGVIEASINHEKGYVQSKEMIDIYSTREPQLAFHQRISFCLDIHNMSVKAMRFPPKSYNKDLESAEERREREQQDLEFAKEMAEDDDDSFP

SEQ ID NO: 683 - DNA, 1518 bp, Homosapiens
aaaacagcccggagcctgcagcccagccccacccagacccatggctggacctgccacccagagccccatgaagctgatggccctgcagctgctgctgtggcacagtgcactctggacagtgcaggaagccacccccctgggccctgccagctccctgccccagagcttcctgctcaagtgcttagagcaagtgaggaagatccagggcgatggcgcagcgctccaggagaagctggtgagtgagtgtgccacctacaagctgtgccaccccgaggagctggtgctgctcggacactctctgggcatcccctgggctcccctgagcagctgccccagccaggccctgcagctggcaggctgcttgagccaactccatagcggccttttcctctaccaggggctcctgcaggccctggaagggatctcccccgagttgggtcccaccttggacacactgcagctggacgtcgccgactttgccaccaccatctggcagcagatggaagaactgggaatggcccctgccctgcagcccacccagggtgccatgccggccttcgcctctgctttccagcgccgggcaggaggggtcctggttgcctcccatctgcagagcttcctggaggtgtcgtaccgcgttctacgccaccttgcccagccctgagccaagccctccccatcccatgtatttatctctatttaatatttatgtctatttaagcctcatatttaaagacagggaagagcagaacggagccccaggcctctgtgtccttccctgcatttctgagtttcattctcctgcctgtagcagtgagaaaaagctcctgtcctcccatcccctggactgggaggtagataggtaaataccaagtatttattactatgactgctccccagccctggctctgcaatgggcactgggatgagccgctgtgagcccctggtcctgagggtccccacctgggacccttgagagtatcaggtctcccacgtgggagacaagaaatccctgtttaatatttaaacagcagtgttccccatctgggtccttgcacccctcactctggcctcagccgactgcacagcggcccctgcatccccttggctgtgaggcccctggacaagcagaggtggccagagctgggaggcatggccctggggtcccacgaatttgctggggaatctcgtttttcttcttaagacttttgggacatggtttgactcccgaacatcaccgacgtgtctcctgtttttctgggtggcctcgggacacctgccctgcccccacgagggtcaggactgtgactctttttagggccaggcaggtgcctggacatttgccttgctggacggggactggggatgtgggagggagcagacaggaggaatcatgtcaggcctgtgtgtgaaaggaagctccactgtcaccctccacctcttcaccccccactcaccagtgtcccctccactgtcacattgtaactgaacttcaggataataaagtgtttgcctcca

SEQ ID NO: 684 - protein, 207 aa, Homosapiens
MAGPATQSPMKLMALQLLLWHSALWTVQEATPLGPASSLPQSFLLKCLEQVRKIQGDGAALQEKLVSECATYKLCHPEELVLLGHSLGIPWAPLSSCPSQALQLAGCLSQLHSGLFLYQGLLQALEGISPELGPTLDTLQLDVADFATTIWQQMEELGMAPALQPTQGAMPAFASAFQRRAGGVLVASHLQSFLEVSYRVLRHLAQP

SEQ ID NO: 685 - DNA, 1509 bp, Homosapiens
aaaacagcccggagcctgcagcccagccccacccagacccatggctggacctgccacccagagccccatgaagctgatggccctgcagctgctgctgtggcacagtgcactctggacagtgcaggaagccacccccctgggccctgccagctccctgccccagagcttcctgctcaagtgcttagagcaagtgaggaagatccagggcgatggcgcagcgctccaggagaagctgtgtgccacctacaagctgtgccaccccgaggagctggtgctgctcggacactctctgggcatcccctgggctcccctgagcagctgccccagccaggccctgcagctggcaggctgcttgagccaactccatagcggccttttcctctaccaggggctcctgcaggccctggaagggatctcccccgagttgggtcccaccttggacacactgcagctggacgtcgccgactttgccaccaccatctggcagcagatggaagaactgggaatggcccctgccctgcagcccacccagggtgccatgccggccttcgcctctgctttccagcgccgggcaggaggggtcctggttgcctcccatctgcagagcttcctggaggtgtcgtaccgcgttctacgccaccttgcccagccctgagccaagccctccccatcccatgtatttatctctatttaatatttatgtctatttaagcctcatatttaaagacagggaagagcagaacggagccccaggcctctgtgtccttccctgcatttctgagtttcattctcctgcctgtagcagtgagaaaaagctcctgtcctcccatcccctggactgggaggtagataggtaaataccaagtatttattactatgactgctccccagccctggctctgcaatgggcactgggatgagccgctgtgagcccctggtcctgagggtccccacctgggacccttgagagtatcaggtctcccacgtgggagacaagaaatccctgtttaatatttaaacagcagtgttccccatctgggtccttgcacccctcactctggcctcagccgactgcacagcggcccctgcatccccttggctgtgaggcccctggacaagcagaggtggccagagctgggaggcatggccctggggtcccacgaatttgctggggaatctcgtttttcttcttaagacttttgggacatggtttgactcccgaacatcaccgacgtgtctcctgtttttctgggtggcctcgggacacctgccctgcccccacgagggtcaggactgtgactctttttagggccaggcaggtgcctggacatttgccttgctggacggggactggggatgtgggagggagcagacaggaggaatcatgtcaggcctgtgtgtgaaaggaagctccactgtcaccctccacctcttcaccccccactcaccagtgtcccctccactgtcacattgtaactgaacttcaggataataaagtgtttgcctcca

SEQ ID NO: 686 - protein, 204 aa, Homosapiens
MAGPATQSPMKLMALQLLLWHSALWTVQEATPLGPASSLPQSFLLKCLEQVRKIQGDGAALQEKLCATYKLCHPEELVLLGHSLGIPWAPLSSCPSQALQLAGCLSQLHSGLFLYQGLLQALEGISPELGPTLDTLQLDVADFATTIWQQMEELGMAPALQPTQGAMPAFASAFQRRAGGVLVASHLQSFLEVSYRVLRHLAQP

SEQ ID NO: 687 - DNA, 1703 bp, Homosapiens
aaaacagcccggagcctgcagcccagccccacccagacccatggctggacctgccacccagagccccatgaagctgatgggtgagtgtcttggcccaggatgggagagccgcctgccctggcatgggagggaggctggtgtgacagaggggctggggatccccgttctgggaatggggattaaaggcacccagtgtccccgagagggcctcaggtggtagggaacagcatgtctcctgagcccgctctgtccccagccctgcagctgctgctgtggcacagtgcactctggacagtgcaggaagccacccccctgggccctgccagctccctgccccagagcttcctgctcaagtgcttagagcaagtgaggaagatccagggcgatggcgcagcgctccaggagaagctgtgtgccacctacaagctgtgccaccccgaggagctggtgctgctcggacactctctgggcatcccctgggctcccctgagcagctgccccagccaggccctgcagctggcaggctgcttgagccaactccatagcggccttttcctctaccaggggctcctgcaggccctggaagggatctcccccgagttgggtcccaccttggacacactgcagctggacgtcgccgactttgccaccaccatctggcagcagatggaagaactgggaatggcccctgccctgcagcccacccagggtgccatgccggccttcgcctctgctttccagcgccgggcaggaggggtcctggttgcctcccatctgcagagcttcctggaggtgtcgtaccgcgttctacgccaccttgcccagccctgagccaagccctccccatcccatgtatttatctctatttaatatttatgtctatttaagcctcatatttaaagacagggaagagcagaacggagccccaggcctctgtgtccttccctgcatttctgagtttcattctcctgcctgtagcagtgagaaaaagctcctgtcctcccatcccctggactgggaggtagataggtaaataccaagtatttattactatgactgctccccagccctggctctgcaatgggcactgggatgagccgctgtgagcccctggtcctgagggtccccacctgggacccttgagagtatcaggtctcccacgtgggagacaagaaatccctgtttaatatttaaacagcagtgttccccatctgggtccttgcacccctcactctggcctcagccgactgcacagcggcccctgcatccccttggctgtgaggcccctggacaagcagaggtggccagagctgggaggcatggccctggggtcccacgaatttgctggggaatctcgtttttcttcttaagacttttgggacatggtttgactcccgaacatcaccgacgtgtctcctgtttttctgggtggcctcgggacacctgccctgcccccacgagggtcaggactgtgactctttttagggccaggcaggtgcctggacatttgccttgctggacggggactggggatgtgggagggagcagacaggaggaatcatgtcaggcctgtgtgtgaaaggaagctccactgtcaccctccacctcttcaccccccactcaccagtgtcccctccactgtcacattgtaactgaacttcaggataataaagtgtttgcctccaaaaaaaaaaaaaaaaaaa

SEQ ID NO: 688 - protein, 200 aa, Homosapiens
MSPEPALSPALQLLLWHSALWTVQEATPLGPASSLPQSFLLKCLEQVRKIQGDGAALQEKLCATYKLCHPEELVLLGHSLGIPWAPLSSCPSQALQLAGCLSQLHSGLFLYQGLLQALEGISPELGPTLDTLQLDVADFATTIWQQMEELGMAPALQPTQGAMPAFASAFQRRAGGVLVASHLQSFLEVSYRVLRHLAQP

SEQ ID NO: 689 - DNA, 3712 bp, Homosapiens
caggtgcgagccactgcgctcggccgatactttcttagtgccccagtttaaggaagggcggttcaggagcagagagtctgacaggatcttactttatccctttagctctttttctttcaaattcctctgtctcgcttaaatcttcccgcatcttctcctttctatttaattctgccttccccggttctccttagaacctcatgtccttttctttagctccatttctttcacctcaaagctggccgccaccgctgccacctgctcagagtgaaataatgaaggtggtcaacctgaagcaagccattttgcaagcctggaaggagcgctggagtgactaccaatgggcaatcaacatgaagaaattctttcctaaaggagccacctgggatattctcaacctggcagatgcgttactagagcaggccatgattggaccatcccccaatcctctcatcttgtcctacctgaagtatgccattagttcccagatggtgtcctactcttctgtcctcacagccatcagtaagtttgatgacttttctcgggacctgtgtgtccaggcattgctggacatcatggacatgttttgtgaccgtctgagctgtcacggcaaagcagaggaatgcatcggactgtgccgagcccttcttagcgccctccactggctgctgcgctgcacggcagcctctgcagagcggctgcgggaggggctggaggccggcactccagccgctggggagaagcagcttgccatgtgccttcagcgcctggagaaaaccctcagcagcaccaagaaccgggccctgctgcacatcgccaaactagaggaggcctcttcttggactgccatcgagcattctctcttgaaacttggagagatcctggccaatctcagcaacccgcagctccggagtcaggccgagcagtgtggcaccctcattaggagcatccccacgatgctgtctgtgcatgcggagcagatgcacaagaccggcttccccactgtccacgccgtgatcctgctcgagggcaccatgaacctgacaggcgagacgcagtccctggtggagcagctgacgatggtgaagcgcatgcagcatatccccaccccactttttgtcctggagatctggaaagcttgcttcgtggggctcattgagtctcccgagggtacggaggagctcaagtggacagctttcactttcctcaagattccacaggttttggtgaagttgaagaagtactctcatggagacaaggacttcactgaggatgtcaactgtgcttttgagttcctgctgaagctcacccccttgttggacaaagctgaccagcgctgcaactgtgactgtacaaacttcctgctccaagaatgtggcaagcaggggcttctgtctgaggccagcgtcaacaaccttatggctaagcgcaaagcagaccgagagcacgcaccccagcagaaatcgggagagaatgccaacatccagcccaacatccagctgatcctccgggcggagcccactgtcacaaacatcctcaagacgatggatgcagaccactctaagtcaccggagggactgctgggagtcctgggccacatgctgtccgggaagagtctggacttgctgctggctgccgccgccgccactggaaagctgaaatccttcgcccggaaattcatcaatttgaatgaattcacaacctatggcagcgaagaaagcaccaaaccggcctccgtccgggccctgctgtttgacatctccttcctcatgctgtgccatgtggcccagacctatggttcagaggtgattctgtccgagtcgcgcacaggagctgaggtgcccttcttcgagacctggatgcagacctgcatgcctgaggagggcaagatcctgaaccctgaccacccctgcttccgccccgactccaccaaagtggagtccctggtggccctgctcaacaactcctcggagatgaagctagtgcagatgaagtggcatgaggcctgtctcagcatctcagccgccatcttggaaatcctcaatgcctgggagaatggggtcctggccttcgagtccatccagaaaatcactgataacatcaaagggaaggtatgcagtctggcggtgtgtgctgtggcttggcttgtggcccacgtccggatgctggggctggatgagcgtgagaagtcgctgcagatgatccgccagctggcagggccactgtttagtgagaacaccctgcagttctacaatgagagggtggtgatcatgaactcgatcctggagcgcatgtgtgccgacgtgctgcagcagacagccacgcagatcaagtttccctccaccggggtggacacaatgccctactggaacctgctgccccccaagcggcccatcaaagaggtgctgacggacatttttgccaaggtgctggagaagggctgggtggacagccgctccatccacatctttgacaccctgctgcacatgggcggcgtctactggttctgcaacaacctgattaaggagctgctgaaggagacgcggaaggagcacacgctgcgggcagtggagctgctctactccatcttctgcctggacatgcagcaagtgaccctggtcctgctgggccacatcctacctggcctgctcactgactcctccaagtggcacagcctcatggaccccccgggcactgctcttgccaagctggccgtgtggtgtgccctcagttcctactcctcccacaagggacaggcgtccacccgccagaagaagagacaccgcgaagacattgaggattatatcagcctcttccccctggacgatgtgcagccttcgaagttgatgcgactgctgagctctaatgaggacgatgccaacatcctttcgagccccacagaccgatccatgagcagctccctctcagcctctcagctccacacggtcaacatgcgggaccctctgaaccgagtcctggccaacctgttcctgctcatctcctccatcctggggtctcgcaccgctggcccccacacccagttcgtgcagtggttcatggaggagtgtgtggactgcctggagcagggtggccgtggcagcgtcctgcagttcatgcccttcaccaccgtgtcggaactggtgaaggtgtcagccatgtctagccccaaggtggttctggccatcacggacctcagcctgcccctgggccgccaggtggctgctaaagccattgctgcactctgaggggcttggcatggccgcagtgggggctggggactggcgcagccccaggcgcctccaagggaagcagtgaggaaagatgaggcatcgtgcctcacatccgctccacatggtgcaagagcctctagcggcttccagttccccgctcctgactcctgacctccaggatgtctcccggttttttttttcaaaatttcctctccatctgctggcccctgaggagagtgagcagcctggaccacaagcccagtggtcacccctgtgtgcgcccgccccagcccaggagtagtcttacctctgaggaactttttagatgcaaagtgtgtatgtgtgtgtgtgtgtgtgtgtgtgtgtgtttgtgtgtattttgtaatatgtgagggaaatctaccttcgttcatgtataaataaagctcctcgtggctccctttgtgaaaaaaaaaaaaaaaaaaaaaaaaaaaaaaaaaaaa

SEQ ID NO: 690 - protein, 989 aa, Homosapiens
MKVVNLKQAILQAWKERWSDYQWAINMKKFFPKGATWDILNLADALLEQAMIGPSPNPLILSYLKYAISSQMVSYSSVLTAISKFDDFSRDLCVQALLDIMDMFCDRLSCHGKAEECIGLCRALLSALHWLLRCTAASAERLREGLEAGTPAAGEKQLAMCLQRLEKTLSSTKNRALLHIAKLEEASSWTAIEHSLLKLGEILANLSNPQLRSQAEQCGTLIRSIPTMLSVHAEQMHKTGFPTVHAVILLEGTMNLTGETQSLVEQLTMVKRMQHIPTPLFVLEIWKACFVGLIESPEGTEELKWTAFTFLKIPQVLVKLKKYSHGDKDFTEDVNCAFEFLLKLTPLLDKADQRCNCDCTNFLLQECGKQGLLSEASVNNLMAKRKADREHAPQQKSGENANIQPNIQLILRAEPTVTNILKTMDADHSKSPEGLLGVLGHMLSGKSLDLLLAAAAATGKLKSFARKFINLNEFTTYGSEESTKPASVRALLFDISFLMLCHVAQTYGSEVILSESRTGAEVPFFETWMQTCMPEEGKILNPDHPCFRPDSTKVESLVALLNNSSEMKLVQMKWHEACLSISAAILEILNAWENGVLAFESIQKITDNIKGKVCSLAVCAVAWLVAHVRMLGLDEREKSLQMIRQLAGPLFSENTLQFYNERVVIMNSILERMCADVLQQTATQIKFPSTGVDTMPYWNLLPPKRPIKEVLTDIFAKVLEKGWVDSRSIHIFDTLLHMGGVYWFCNNLIKELLKETRKEHTLRAVELLYSIFCLDMQQVTLVLLGHILPGLLTDSSKWHSLMDPPGTALAKLAVWCALSSYSSHKGQASTRQKKRHREDIEDYISLFPLDDVQPSKLMRLLSSNEDDANILSSPTDRSMSSSLSASQLHTVNMRDPLNRVLANLFLLISSILGSRTAGPHTQFVQWFMEECVDCLEQGGRGSVLQFMPFTTVSELVKVSAMSSPKVVLAITDLSLPLGRQVAAKAIAAL

SEQ ID NO: 691 - DNA, 2474 bp, Homosapiens
cgcctctgccggaggagccgcggggccgccacactcgccccccgccccccccgcgctcactcgcactcacacccgggcgcaggaggcgggcggcccgggccccaccggccccccatggacgcccccagcacggggcgctgagacccccgcgtcgctgcccagcccggtccggcgcgccacgccgagggatctctggacaggacaagactccgaagctactcccccagcacacagcccgggacccacaaacccagcttgcccccagccctcccacctgccactccctggcccctcccaccgcccgccccccttggggcgcagggcatggtgtgaaaggccaagtgctgaggcgggtatcatgggtgctgtgccctagggcctgggtggcagggggtgggtggcctgtgggtgtgccgggggggccagtgtgcccaccccagtctcttggcgtgctggagggcatcctggatggaattgaagtgaatggaacagaagccaagcaaggtggagtgtgggtcagacccagaggagaacagtgccaggtcaccagatggaaagcgaaaaagaaagaacggccaatgttccctgaaaaccagcatgtcagggtatatccctagttacctggacaaagacgagcagtgtgtcgtgtgtggggacaaggcaactggttatcactaccgctgtatcacttgtgagggctgcaagggcttctttcgccgcacaatccagaagaacctccatcccacctattcctgcaaatatgacagctgctgtgtcattgacaagatcacccgcaatcagtgccagctgtgccgcttcaagaagtgcatcgccgtgggcatggccatggacttggttctagatgactcgaagcgggtggccaagcgtaagctgattgagcagaaccgggagcggcggcggaaggaggagatgatccgatcactgcagcagcgaccagagcccactcctgaagagtgggatctgatccacattgccacagaggcccatcgcagcaccaatgcccagggcagccattggaaacagaggcggaaattcctgcccgatgacattggccagtcacccattgtctccatgccggacggagacaaggtggacctggaagccttcagcgagtttaccaagatcatcaccccggccatcacccgtgtggtggactttgccaaaaaactgcccatgttctccgagctgccttgcgaagaccagatcatcctcctgaaggggtgctgcatggagatcatgtccctgcgggcggctgtccgctacgaccctgagagcgacaccctgacgctgagtggggagatggctgtcaagcgggagcagctcaagaatggcggcctgggcgtagtctccgacgccatctttgaactgggcaagtcactctctgcctttaacctggatgacacggaagtggctctgctgcaggctgtgctgctaatgtcaacagaccgctcgggcctgctgtgtgtggacaagatcgagaagagtcaggaggcgtacctgctggcgttcgagcactacgtcaaccaccgcaaacacaacattccgcacttctggcccaagctgctgatgaaggagagagaagtgcagagttcgattctgtacaagggggcagcggcagaaggccggccgggcgggtcactgggcgtccacccggaaggacagcagcttctcggaatgcatgttgttcagggtccgcaggtccggcagcttgagcagcagcttggtgaagcgggaagtctccaagggccggttcttcagcaccagagcccgaagagcccgcagcagcgtctcctggagctgctccaccgaagcggaattctccatgcccgagcggtctgtggggaagacgacagcagtgaggcggactccccgagctcctctgaggaggaaccggaggtctgcgaggacctggcaggcaatgcagcctctccctgaagccccccagaaggccgatggggaaggagaaggagtgccataccttctcccaggcctctgccccaagagcaggaggtgcctgaaagctgggagcgtgggctcagcagggctggtcacctcccatcccgtaagaccaccttcccttcctcagcaggccaaacatggccagactcccttgctttttgctgtgtagttccctctgcctgggatgcccttccccctttctctgcctggcaacatcttacttgtcctttgaggccccaactcaagtgtcacctccttccccagctcccccaggcagaaatagttgtctgtgcttccttggttcatgcttctactgtgacacttatctcactgttttataattagtcgggcatgagtctgtttcccaagctagactgtgtctgaatcatgtctgtatccccagtgcccggtgcagggcctggcatagagtaggtactccataaaaggtgtgttgaattgaaaaaaaaaaaaaaaaaaaaaaaaaaaaaaaaaaa

SEQ ID NO: 692 - protein, 490 aa, Homosapiens
MEQKPSKVECGSDPEENSARSPDGKRKRKNGQCSLKTSMSGYIPSYLDKDEQCVVCGDKATGYHYRCITCEGCKGFFRRTIQKNLHPTYSCKYDSCCVIDKITRNQCQLCRFKKCIAVGMAMDLVLDDSKRVAKRKLIEQNRERRRKEEMIRSLQQRPEPTPEEWDLIHIATEAHRSTNAQGSHWKQRRKFLPDDIGQSPIVSMPDGDKVDLEAFSEFTKIITPAITRVVDFAKKLPMFSELPCEDQIILLKGCCMEIMSLRAAVRYDPESDTLTLSGEMAVKREQLKNGGLGVVSDAIFELGKSLSAFNLDDTEVALLQAVLLMSTDRSGLLCVDKIEKSQEAYLLAFEHYVNHRKHNIPHFWPKLLMKEREVQSSILYKGAAAEGRPGGSLGVHPEGQQLLGMHVVQGPQVRQLEQQLGEAGSLQGPVLQHQSPKSPQQRLLELLHRSGILHARAVCGEDDSSEADSPSSSEEEPEVCEDLAGNAASP

SEQ ID NO: 693 - DNA, 2405 bp, Homosapiens
gaggtggcctgcagggagcagccgcgagccggccgggcgcgccgagcccgagccccagccggagcggggcgggggagggaggagccagagcggccgccgcctctgccggaggagccgcggggccgccacactcgccccccgccccccccgcgctcactcgcactcacacccgggcgcaggaggcgggcggcccgggccccaccggccccccatggacgcccccagcacggggcgctgagacccccgcgtcgctgcccagcccggtccggcgcgccacgccgagggatctctggacaggacaagactccgaagctactcccccagcacacagcccgggacccacaaacccagcttgcccccagccctcccacctgccactccctggcccctcccaccgcccgccccccttggggcgcagggcatggtgtgaaaggccaagtgctgaggcgggtatcatgggtgctgtgccctagggcctgggtggcagggggtgggtggcctgtgggtgtgccgggggggccagtgtgcccaccccagtctcttggcgtgctggagggcatcctggatggaattgaagtgaatggaacagaagccaagcaaggtggagtgtgggtcagacccagaggagaacagtgccaggtcaccagatggaaagcgaaaaagaaagaacggccaatgttccctgaaaaccagcatgtcagggtatatccctagttacctggacaaagacgagcagtgtgtcgtgtgtggggacaaggcaactggttatcactaccgctgtatcacttgtgagggctgcaagggcttctttcgccgcacaatccagaagaacctccatcccacctattcctgcaaatatgacagctgctgtgtcattgacaagatcacccgcaatcagtgccagctgtgccgcttcaagaagtgcatcgccgtgggcatggccatggacttggttctagatgactcgaagcgggtggccaagcgtaagctgattgagcagaaccgggagcggcggcggaaggaggagatgatccgatcactgcagcagcgaccagagcccactcctgaagagtgggatctgatccacattgccacagaggcccatcgcagcaccaatgcccagggcagccattggaaacagaggcggaaattcctgcccgatgacattggccagtcacccattgtctccatgccggacggagacaaggtggacctggaagccttcagcgagtttaccaagatcatcaccccggccatcacccgtgtggtggactttgccaaaaaactgcccatgttctccgagctgccttgcgaagaccagatcatcctcctgaaggggtgctgcatggagatcatgtccctgcgggcggctgtccgctacgaccctgagagcgacaccctgacgctgagtggggagatggctgtcaagcgggagcagctcaagaatggcggcctgggcgtagtctccgacgccatctttgaactgggcaagtcactctctgcctttaacctggatgacacggaagtggctctgctgcaggctgtgctgctaatgtcaacagaccgctcgggcctgctgtgtgtggacaagatcgagaagagtcaggaggcgtacctgctggcgttcgagcactacgtcaaccaccgcaaacacaacattccgcacttctggcccaagctgctgatgaaggtgactgacctccgcatgatcggggcctgccacgccagccgcttcctccacatgaaagtcgagtgccccaccgaactcttccccccactcttcctcgaggtctttgaggatcaggaagtctaaagcctcaggcggccagagggtgtgcggagctggtggggaggagcctggagagaaggggcagagctgggggctgagggagacccccccacaccccttctctccttcctctcgtccttggatagattcagctcccacacacacacccgcactgcccaggtccctcctcagacctccagccctgggacagggcaaacaactgaacttgctatggaaaggacagtgtgggaggctgggggagctgtgtcctgcagttcccaggaccccatcctctcagaaggtaggggaagggcgggaggattgagaagggacaagccaccttgaccgtaggggaaggaggaatgtgggctgggggaagatgccctcaactcaccccctacacacacatgagagagagcccccacccagttccttggcctaggtctcccctccaggctgagggcctctctacttccccagatgcctgggtgcaaagaacggcttggcttggctcctcctctggaggttaaaatttatagtcattctaactgcactttggaaaccaagcaaggggagaagacaaatgaagaaaaactagacagagaaaaaaaaaaaa

SEQ ID NO: 694 - protein, 410 aa, Homosapiens
MEQKPSKVECGSDPEENSARSPDGKRKRKNGQCSLKTSMSGYIPSYLDKDEQCVVCGDKATGYHYRCITCEGCKGFFRRTIQKNLHPTYSCKYDSCCVIDKITRNQCQLCRFKKCIAVGMAMDLVLDDSKRVAKRKLIEQNRERRRKEEMIRSLQQRPEPTPEEWDLIHIATEAHRSTNAQGSHWKQRRKFLPDDIGQSPIVSMPDGDKVDLEAFSEFTKIITPAITRVVDFAKKLPMFSELPCEDQIILLKGCCMEIMSLRAAVRYDPESDTLTLSGEMAVKREQLKNGGLGVVSDAIFELGKSLSAFNLDDTEVALLQAVLLMSTDRSGLLCVDKIEKSQEAYLLAFEHYVNHRKHNIPHFWPKLLMKVTDLRMIGACHASRFLHMKVECPTELFPPLFLEVFEDQEV

SEQ ID NO: 695 - DNA, 3656 bp, Homosapiens
ccacgtcatcgagcagctccccctccccttgctacaagtcgcacgcgcggaagtaaacacctctacgtcatcagggcgcgtcctcgtctttcccctcccatctcctcagatcggtggacgtgctcgcctccactcggggccaggtctatgtcccggtttcccgcagtcgcgggcagggcgccaaggcggcaggaggagggtgagcggtcaagagacctccaggaagagcggctctcggctgtttgcatcgccgatagagaagagaaaggatgcacgtcccaggagggaggaactactccaacttttcctattcagaaacaaagaaaaaagattattcaagctgtgagggacaattcattccttattgttactggaaatacaggaagtggtaaaacaactcaactcccaaaatatctatatgaagcagggttttcacaacatggtatgattggtgtaactcaaccacgaaaagtagctgctatatcagttgctcagagagtagctgaagaaatgaaatgcactttgggatccaaagtaggataccaagttcgttttgatgattgcagttctaaggagacagcaatcaaatatatgactgatggatgtttactgaaacatattctgggagacccaaatcttaccaaattcagtgtcattattttggatgaagcccatgaaagaactctaactacagatatcttatttggtttattgaagaagctatttcaggagaagtctcctaataggaaggagcatttaaaagtggtggtaatgtcagcaactatggaattagccaagctctctgcattctttggaaattgtccaatatttgatatacctggaaggctttatccagtcagagagaaattctgcaatttgattggtccacgagacagagaaaatactgcgtatattcaagcgattgtggaagtcaccatggatatccatttgaatgaaatggctggagacatcttggtttttctgactggccagtttgaaatagaaaaaagttgtgagttactttttcagatggcagagtctgttgattatgattatgatgttcaagataccaccctcgatggcttgttaatattgccgtgttatggatcaatgacaacagatcaacagaggaggatatttttgccaccaccacctggaattagaaaatgtgtcatatccaccaatatttctgcaacgtctttgacaatagatggaatcagatatgtggtagatggtggcttcgtgaagcagttaaatcacaaccccagattagggttggacatcctggaggtggttccaatttcaaagagcgaggcattacagcgaagtggccgagctggcaggacttcttcaggaaaatgctttcggatctatagtaaagatttttggaaccagtgtatgcctgaccatgtgatccctgaaattaagagaactagtttgacatctgtagttctgaccttaaagtgccttgccatacacgatgtcataaggtttccctatttggatccacctaatgagagacttattttagaagctcttaaacaactttaccagtgtgatgctattgacaggagtggccatgtcaccagattgggtttgtctatggtggagtttcctttgcctccacatctgacatgtgcagtaataaaagctgcttccctggattgtgaagatctactacttccaatagcagcaatgttgtctgtggaaaacgtcttcattagacctgttgatccagagtaccagaaggaagcagaacagagacatcgagaattggcagctaaagctggaggatttaatgactttgcaactttagctgtcatctttgaacaatgcaaatcaagtggagctccagcttcatggtgccaaaaacactggattcattggaggtgcttattttctgcatttcgtgtggaagctcaacttcgagaactaatcaggaagcttaaacagcaaagtgatttcccaaaagagacctttgaaggccctaaacatgaagtactacgaagatgtctttgtgcgggctatttcaaaaatgtagctcgaagatctgttgggagaacgttttgcacagtggatggtcgtggaagcccagttcacattcatccttcctcagcacttcatgaacaggaaaccaaacttgaatggatcatttttcatgaggtattggttaccaccaaagtctacgcaagaattgtatgcccaatccgttatgaatgggtaagagacttgttacccaagttgcatgaatttaatgcacatgatttgagcagtgtggcccgacgtgaagtgagagaagatgcaagaaggagatggacaaataaggaaaatgtaaagcagctaaaggatggaatatcgaaagacgtcttaaagaaaatgcaaagaagaaatgatgacaaatccatatctgatgcacgggctcgtttccttgagagaaagcagcagaggacccaggaccacagtgacacacgaaaggaaacaggctaaggtggtgaaccctccaattcaggaagtgggaaaaggagccaggaaatgtgcttctactttgccagttatttcagacagcactaccaagaggaggtggtcggcacttgttattggcctatgaactaaaagcaaatcaaagctcataaatcaaagctcatcagttcccataaatgcagttgtcaaagaaaagatttggttgccatagtcataagcaatgatacatgaaaccaatgaaagacagtacatgtaataatattttcctcagtacaattttgctggccttaactggtatcaaacgctgtcattgagatgttttcaaagaacattgagttgtatttaatcagcgtgtactccatttgcattgaagcattaaaaattatttttcttaaaatctctttaaggccttcttgttgctgttagaatagtgctatatatcaggtatgtgaccatttatttcagaaggctgaacataagaggtttctactcagcaatacttagatgtctaactgtttaattgctacagagctttatagatatttagagaaaagacttaatcaattagtaaataaaattgcctatggcaggattctttcttgaattaatattaatccttaaattgatttttctgggattatacaaattcctttttatataaaagtatattgtttaaaacagtagctatagccattaaccaaaggacagatgatatatatatatatgatatatatatatatataagttcttttttagctgtacctacgtacttatatcagcaccatgtatgtaggtgtgatagtactttcaaacagcgcctccacctggcctactctgttatttccacctgtttgggtagggccatttaacttccattatgccaaacttgggatgggattttcgaagcagacaacactatttcatcgtgtttcaaattggaaccttgaggctagttagtatcacactcaggccacactcagcacttgcccactcttgtttactgccttgtattctagttatttgtgtatttgtctccctcactagattatacgctccttgtgggcagggactgtgtcttttttcatctttgtatctttcatgcacctagcatagtgctttgcacatagtagtcactcagtgtttgttaaataaagctattagtgtcattaaaattc

SEQ ID NO: 696 - protein, 779 aa, Homosapiens
MSRFPAVAGRAPRRQEEGERSRDLQEERLSAVCIADREEKGCTSQEGGTTPTFPIQKQRKKIIQAVRDNSFLIVTGNTGSGKTTQLPKYLYEAGFSQHGMIGVTQPRKVAAISVAQRVAEEMKCTLGSKVGYQVRFDDCSSKETAIKYMTDGCLLKHILGDPNLTKFSVIILDEAHERTLTTDILFGLLKKLFQEKSPNRKEHLKVVVMSATMELAKLSAFFGNCPIFDIPGRLYPVREKFCNLIGPRDRENTAYIQAIVEVTMDIHLNEMAGDILVFLTGQFEIEKSCELLFQMAESVDYDYDVQDTTLDGLLILPCYGSMTTDQQRRIFLPPPPGIRKCVISTNISATSLTIDGIRYVVDGGFVKQLNHNPRLGLDILEVVPISKSEALQRSGRAGRTSSGKCFRIYSKDFWNQCMPDHVIPEIKRTSLTSVVLTLKCLAIHDVIRFPYLDPPNERLILEALKQLYQCDAIDRSGHVTRLGLSMVEFPLPPHLTCAVIKAASLDCEDLLLPIAAMLSVENVFIRPVDPEYQKEAEQRHRELAAKAGGFNDFATLAVIFEQCKSSGAPASWCQKHWIHWRCLFSAFRVEAQLRELIRKLKQQSDFPKETFEGPKHEVLRRCLCAGYFKNVARRSVGRTFCTVDGRGSPVHIHPSSALHEQETKLEWIIFHEVLVTTKVYARIVCPIRYEWVRDLLPKLHEFNAHDLSSVARREVREDARRRWTNKENVKQLKDGISKDVLKKMQRRNDDKSISDARARFLERKQQRTQDHSDTRKETG

SEQ ID NO: 697 - DNA, 6541 bp, Homosapiens
agccgtttccggagtctgcgctgcgcccggttccgccattgcggctctcctggcccctggagcctccgcccccgacccgagctctttcgtctgcctgccagtttcctgcgtccccggagaggatcctgctgagcccagcctcccccctccccttctcctcctctcccttggagagcccgggcagccactgccccgcagccccagtgacaggaggagaccataacccccgacagcgccatggcccagattctgccaattcgttttcaggagcatctccagctccagaacctgggtatcaacccagcaaacattggcttcagtaccctgactatggagtctgacaaattcatctgcattagagaaaaagtaggagagcaggcccaggtggtaatcattgatatgaatgacccaagtaatccaattcgaagaccaatttcagcagacagcgccatcatgaatccagctagcaaagtaattgcactgaaagctgggaaaactcttcagatttttaacattgaaatgaaaagtaaaatgaaggctcataccatgactgatgatgtcaccttttggaaatggatctctttgaatacggttgctcttgttacggataatgcagtttatcactggagtatggaaggagagtctcagccagtgaaaatgtttgatcgccattctagccttgcagggtgccagattatcaattaccgtacagatgcaaaacaaaagtggttacttctgactggtatatctgcacagcaaaatcgtgtggtgggagctatgcagctatattctgtagataggaaagtgtctcagcccattgaaggacatgcagctagctttgcacagtttaagatggaaggaaatgcagaagaatcaacgttattttgttttgcagttcggggccaagctggagggaagttacatattattgaagttggcacaccacctacagggaaccagccctttccaaagaaggcagtggatgtcttctttcctccagaagcacaaaatgattttcctgttgcaatgcagatcagtgaaaagcatgatgtggtgttcttgataaccaagtatggttatatccacctctatgatcttgagactggtacctgcatctacatgaatagaatcagtggagaaacaatttttgttactgcacctcatgaagccacagctggaataattggagtaaacagaaagggacaagttctgtcagtgtgtgtggaagaagaaaacataattccttacatcaccaatgttctacaaaatcctgatttggctctgagaatggctgtacgtaataacttagccggtgctgaagaactctttgcccggaaatttaatgctctttttgcccagggaaattactcggaggcagcaaaggtggctgctaatgcaccaaagggaattcttcgtactccagacactatccgtcggttccagagtgtcccagcccagccaggtcaaacttctcctctacttcagtactttggtatccttttggaccagggacagctcaacaaatacgaatccttagagctttgtaggcctgtacttcagcaagggcgaaaacagcttttggagaaatggttaaaagaagataagctggaatgttctgaagaactgggtgatcttgtgaaatctgtggaccctacattggcacttagtgtgtacctaagggctaacgtcccaaataaagtcattcagtgctttgcagaaacaggtcaagtccaaaagattgttttatatgctaaaaaagttggatacactccagattggatatttctgctgagaaatgtaatgcgaatcagtccagatcagggacagcagtttgcccaaatgttagttcaagatgaagagcctcttgctgacatcacacagattgtagatgtctttatggaatacaatctaattcagcagtgtactgcattcttgcttgatgctctgaagaataatcgcccatctgaaggtcctttacagacgcggttacttgagatgaaccttatgcatgcgcctcaagttgcagatgctattctaggcaatcagatgttcacacattatgaccgggctcatattgctcaactgtgtgaaaaggctggcctactgcagcgtgcattagaacatttcactgatttatatgatataaaacgtgcagtggttcacacccatcttcttaaccctgagtggttagtcaactactttggttccttatcagtagaagactccctagaatgtctcagagccatgctgtctgccaacatccgtcagaatctgcagatttgtgttcaggtggcttctaaatatcatgaacaactgtcaactcagtctctgattgaactttttgaatctttcaagagttttgaaggtctcttttattttctgggatccattgttaactttagccaggacccagatgtgcactttaaatatattcaggcagcttgcaagactgggcaaatcaaagaagtagaaagaatctgtagagaaagcaactgctacgatcctgagcgagtcaagaattttcttaaggaagcaaaactaacagatcagctaccacttatcattgtgtgtgatcgatttgactttgtccatgatttggtgctctatttatatagaaataatcttcaaaagtatatagagatatatgtacagaaggtgaatccaagtcgacttcctgtagttattggaggattacttgatgttgactgttctgaagatgtcataaaaaacttgattcttgttgtaagaggtcaattctctactgatgagcttgttgctgaggttgaaaaaagaaacagattgaaactgcttctgccttggctagaggccagaattcatgagggctgtgaggagcctgctactcacaatgccttagccaaaatctacatagacagtaataacaacccggagagatttcttcgtgaaaatccctactatgacagtcgcgttgttggaaagtattgtgagaagagagatccacatctggcctgtgttgcttatgaacgtggccaatgtgatctggaacttattaatgtttgcaatgagaattccctcttcaaaagtctttctcgctacctggtacgtcgaaaggatccagaattgtggggcagcgtgctgctggaaagcaatccttacaggagacccctaattgaccaggttgtacaaacagctttgtctgagactcaggaccctgaagaagtgtcagtaactgtaaaggctttcatgactgcagaccttcctaatgaactcattgaactgctggagaaaattgtccttgataactctgtattcagtgaacacaggaatctgcaaaacctccttatcctcactgcaattaaggctgaccgtacacgtgttatggagtatattaaccgcctggataattatgatgccccagatattgccaatatcgccatcagcaatgagctgtttgaagaagcatttgccattttccggaaatttgatgtcaatacttcagcagttcaggtcttaattgagcatattggaaacttggatcgggcatatgagtttgctgaacgttgcaatgaacctgcggtctggagtcaacttgcaaaagcccagttgcagaaaggaatggtgaaagaagccattgattcttatatcaaagcagatgatccttcctcctacatggaagttgttcaggctgccaatactagtggaaactgggaagaactggtgaagtacttgcagatggcccgtaagaaggctcgagagtcctatgtggagacagaactgatattcgcactggctaaaacaaaccgccttgcagagttagaagaatttatcaatggaccaaataatgctcatatccaacaagttggtgaccgttgttatgatgaaaaaatgtatgatgctgctaagttgttgtacaataatgtttccaattttggacgtttggcatctaccctggttcacctgggtgaatatcaggcagctgttgatggggctaggaaagctaacagtactcgaacatggaaagaggtctgcttcgcctgtgtagatgggaaagaattccgtcttgctcagatgtgtggacttcatattgttgtacatgcagatgaattagaagaacttatcaactactatcaggatcgtggctattttgaagagctgatcaccatgttggaagcagcactgggacttgagcgagctcacatgggaatgtttactgaattagctattctatactctaaatttaagcctcagaaaatgagggagcacctggagctgttctggtctagagtgaatattcccaaggtgctaagagctgcagaacaagctcatctttgggcagaactggtgtttttgtatgacaagtatgaagaatatgataatgccataattaccatgatgaatcatccaactgatgcctggaaagaagggcaattcaaagatatcattaccaaggttgccaatgtggaactatactacagagcaatacagttctacttagaattcaagcctctgttgttaaatgatttgctgatggtgctgtctccacggttggatcacactcgtgcagtcaattatttcagcaaggttaaacagctaccactggtgaaaccgtatttgcgttcagttcagaaccataacaacaaatctgtgaatgaatcattgaacaatctttttattacagaagaagattatcaggctctgcgaacatcaatagatgcttatgacaactttgacaatatctcgcttgctcagcgtttggaaaaacatgaactcattgagttcaggagaattgctgcttatctcttcaaaggcaacaatcgctggaaacagagtgtagagctgtgcaagaaagacagcctttacaaggatgcaatgcagtatgcttctgaatctaaagatactgaattggctgaagaactcctgcagtggtttttgcaggaagaaaaaagagagtgctttggagcttgtctgtttacctgttacgatcttttaaggccagatgtcgtcctagaaactgcatggaggcacaatatcatggattttgccatgccctatttcatccaggtcatgaaggagtacttgacaaaggtggataaattagatgcttcagaatcactgagaaaagaagaagaacaagctacagagacacaacccattgtttatggtcagccccagttgatgctgacagcaggacccagtgttgccgtccctccccaggcaccttttggttatggttataccgcaccaccgtatggacagccacagcctggctttgggtacagcatgtgagatgaagcgctgatcctgtagtcacctattttcgtactgaaacatcgtctttacccacttctcagtttataatgggggaaaacaggcaacgtgttcttgtaacctttatttcatgaaggacttctttttgtttctaactataaacttggatcacctatgttaaaaccttatttcacattccacatcattttagaatttattttcgaaggggaatagtttcaatgttttattcacttgggctttttttcttccccctctttctttaaagaactgctcaatattcaatctgttgtgaagaacctgatttgcactctgtagtgtttaaagaaacaaagaaactctaatattgaatctcttaaatttagtgtatgtaaacagcttacaaatacgtattgtctaaatgcatttaaatctgttttattcaaagaaaagctaaagcaaaaacactggcatatgaccatgcaagactgtcagtgccaacaaagacaacactaatcagcacatcgtacactggattgcagtgcttcccagattattgaaaaatgttacagacaacttgcctgatttttaaatgagcgtaaaaggccctctaacctatgcaggtttccccattatgcatatagaaaatgctagtatgttttgctcacttcatatgtaacaggtgcccttatgttgtgctgtatcctgtgctttttctgtgggaccattccattcaggagcaaagagcaccatgattccaatcttgtgtgtgtttactaacccttccctgaggtttgtgtatgttggatattgtggtgttttagatcactgagtgtacagaagagagaaattcaaacaaaatattgctgttcttcagttttgtttgtggaatttgaaattactcaaatttaaaataaattactggactgtggaaataacatagaattgaagttttaattaaataccactcaaacgaaaagaacagtagtttttgtagttttatattggatactgaggcattagggaggcatgaaaggaagaggaatgaggattgagacatgtgaagacattgtgcattatatcaatgtgcattcctgtagttcattaacaaggtacatgcaatagtctaaagaaccagagtcactactatagtggcttaacatttaatctgtctccaatattttaaccaagtgacaccgaggtttttatcgaagcatttcacttaaatgaacaaatcatggctgttatattaacttgaaataaaatatatttaaacatgtaaaaaaaaaaaaaaaaa

SEQ ID NO: 698 - protein, 1675 aa, Homosapiens
MAQILPIRFQEHLQLQNLGINPANIGFSTLTMESDKFICIREKVGEQAQVVIIDMNDPSNPIRRPISADSAIMNPASKVIALKAGKTLQIFNIEMKSKMKAHTMTDDVTFWKWISLNTVALVTDNAVYHWSMEGESQPVKMFDRHSSLAGCQIINYRTDAKQKWLLLTGISAQQNRVVGAMQLYSVDRKVSQPIEGHAASFAQFKMEGNAEESTLFCFAVRGQAGGKLHIIEVGTPPTGNQPFPKKAVDVFFPPEAQNDFPVAMQISEKHDVVFLITKYGYIHLYDLETGTCIYMNRISGETIFVTAPHEATAGIIGVNRKGQVLSVCVEEENIIPYITNVLQNPDLALRMAVRNNLAGAEELFARKFNALFAQGNYSEAAKVAANAPKGILRTPDTIRRFQSVPAQPGQTSPLLQYFGILLDQGQLNKYESLELCRPVLQQGRKQLLEKWLKEDKLECSEELGDLVKSVDPTLALSVYLRANVPNKVIQCFAETGQVQKIVLYAKKVGYTPDWIFLLRNVMRISPDQGQQFAQMLVQDEEPLADITQIVDVFMEYNLIQQCTAFLLDALKNNRPSEGPLQTRLLEMNLMHAPQVADAILGNQMFTHYDRAHIAQLCEKAGLLQRALEHFTDLYDIKRAVVHTHLLNPEWLVNYFGSLSVEDSLECLRAMLSANIRQNLQICVQVASKYHEQLSTQSLIELFESFKSFEGLFYFLGSIVNFSQDPDVHFKYIQAACKTGQIKEVERICRESNCYDPERVKNFLKEAKLTDQLPLIIVCDRFDFVHDLVLYLYRNNLQKYIEIYVQKVNPSRLPVVIGGLLDVDCSEDVIKNLILVVRGQFSTDELVAEVEKRNRLKLLLPWLEARIHEGCEEPATHNALAKIYIDSNNNPERFLRENPYYDSRVVGKYCEKRDPHLACVAYERGQCDLELINVCNENSLFKSLSRYLVRRKDPELWGSVLLESNPYRRPLIDQVVQTALSETQDPEEVSVTVKAFMTADLPNELIELLEKIVLDNSVFSEHRNLQNLLILTAIKADRTRVMEYINRLDNYDAPDIANIAISNELFEEAFAIFRKFDVNTSAVQVLIEHIGNLDRAYEFAERCNEPAVWSQLAKAQLQKGMVKEAIDSYIKADDPSSYMEVVQAANTSGNWEELVKYLQMARKKARESYVETELIFALAKTNRLAELEEFINGPNNAHIQQVGDRCYDEKMYDAAKLLYNNVSNFGRLASTLVHLGEYQAAVDGARKANSTRTWKEVCFACVDGKEFRLAQMCGLHIVVHADELEELINYYQDRGYFEELITMLEAALGLERAHMGMFTELAILYSKFKPQKMREHLELFWSRVNIPKVLRAAEQAHLWAELVFLYDKYEEYDNAIITMMNHPTDAWKEGQFKDIITKVANVELYYRAIQFYLEFKPLLLNDLLMVLSPRLDHTRAVNYFSKVKQLPLVKPYLRSVQNHNNKSVNESLNNLFITEEDYQALRTSIDAYDNFDNISLAQRLEKHELIEFRRIAAYLFKGNNRWKQSVELCKKDSLYKDAMQYASESKDTELAEELLQWFLQEEKRECFGACLFTCYDLLRPDVVLETAWRHNIMDFAMPYFIQVMKEYLTKVDKLDASESLRKEEEQATETQPIVYGQPQLMLTAGPSVAVPPQAPFGYGYTAPPYGQPQPGFGYSM

SEQ ID NO: 699 - DNA, 2123 bp, Homosapiens
tcgctttgtgattcttgatccggaacttgtcacccaggaaccccggaagaggtagctcacgcgatagaaacgtgttcgctgcccagaagaagggaaggcgcgagtgaggaaaggaggtactgtagctacacttctggaaaattcagtatggacagtctccgacttaggatttttcaactttaggatggtgtgaaagagacacccattcagtagaaactgtacttcgagttttgcattttgatcttttcctggcctagtgataatgtggtacagtacactcttgtgatgctgggcagcggcagcgagccacagctcccagtcacccatgtgatcacgggaatcaacaacccatcctctaccgtgtactgtgttgtcagcttttttggatattgtgttttgtgttttcacattccatcatgtctacaaaatgtccatcagtgtctcctgtttctggtgagatgaagaagaggaaggcaattactcttgaaatgaaactcaagataattgcccagcatgaaggtggcaagccagtaatggccattgcacgtgagttaggactttggcaatccacgatttcaaccatcttaagggataagaagcaaatcagtgatgcagcgaaatcgtcagcatcagttaaatccactgtcatcacaaagaaaagggctggaccaattgatgatatggaaaaattacttgttatgtggatggaagaccagatacagaagcgtataccacttagcctactgatgatccaggctaaggcaagaagtctttttaatatgctaaaagaccgtgccagtgatcctacatatacacaaatgtttaaagcaagtcatggatggttccagcgcttcaaaaggcgtcataattttcacaatgtaaagatcactggtgaggcagcacgtgctggtaatgaaggtgccatagcttttaaggaacagctgcataggataattatggctaaagatctttgcaataaggagctgattgcactggaggaagaaagaggtaaaggcgttgaggcagtggaagaagttacacccacggcacctagaaagttcacagcaaagaaactggcagaggcatttgctgctatcagcagtggcctacacgttagaagaaatggacgtcaattacgagagattcgccacagttgacaggcgcagatacaggatgctcttgcttgctacagagaaatatatagtgaaaagaagaaacaagctgtacggtcaaaacttggtatcttcctgaagaacaacactatgcttgctaaaccatcaactagtgttgatgtcccaatgccttctaccacctattctcgatgttcatcagaagagagagaaattgaggaccctgttgcatccccatcatccagcaattaattctatttcagtgcttcaaacatttttcaggaccactgtgctttcagctgtgtaaattaatgatgccctccaaatccttggttatggaatatttggctcatcccagtacactcggcttggctgttggagttgcttgtggcatgtgcctgggctggagccttcgagtatgctttgggatgctccccaaaagcaagacgagcaagacacacacagatactgaaagtgaagcaagcatcttgggagacagcggggagtacaagatgattcttgtggttcgaaatgacttaaagatgggaaaagggaaagtggctgcccagtgctctcatgctgctgtttcagcctacaagcagattcaaagaagaaatcctgaaatgctcaaacaatgggaatactgtggccagcccaaggtggtggtcaaagctcctgatgaagaaaccctgattgcattattggcccatgcaaaaatgctgggactgactgtaagtttaattcaagatgctggacgtactcagattgcaccaggctctcaaactgtcctagggattgggccaggaccagcagacctaattgacaaagtcactggtcacctaaaactttactaggtggactttgatatgacaacaacccctccatcacaagtgtttgaagcctgtcagattctaacaacaaaagctgaatttcttcacccaacttaaatgttcttgagatgaaaataaaacctattcccatgttctaaaaaaa

SEQ ID NO: 700 - protein, 180 aa, Homosapiens
MMPSKSLVMEYLAHPSTLGLAVGVACGMCLGWSLRVCFGMLPKSKTSKTHTDTESEASILGDSGEYKMILVVRNDLKMGKGKVAAQCSHAAVSAYKQIQRRNPEMLKQWEYCGQPKVVVKAPDEETLIALLAHAKMLGLTVSLIQDAGRTQIAPGSQTVLGIGPGPADLIDKVTGHLKLY

SEQ ID NO: 701 - DNA, 804 bp, Homosapiens
tcgctttgtgattcttgatccggaacttgtcacccaggaaccccggaagaggtagctcacgcgatagaaacgtgttcgctgcccagaagaagggaaggcgcgagtgaggaaaggaggtactgtagatgccctccaaatccttggttatggaatatttggctcatcccagtacactcggcttggctgttggagttgcttgtggcatgtgcctgggctggagccttcgagtatgctttgggatgctccccaaaagcaagacgagcaagacacacacagatactgaaagtgaagcaagcatcttgggagacagcggggagtacaagatgattcttgtggttcgaaatgacttaaagatgggaaaagggaaagtggctgcccagtgctctcatgctgctgtttcagcctacaagcagattcaaagaagaaatcctgaaatgctcaaacaatgggaatactgtggccagcccaaggtggtggtcaaagctcctgatgaagaaaccctgattgcattattggcccatgcaaaaatgctgggactgactgtaagtttaattcaagatgctggacgtactcagattgcaccaggctctcaaactgtcctagggattgggccaggaccagcagacctaattgacaaagtcactggtcacctaaaactttactaggtggactttgatatgacaacaacccctccatcacaagtgtttgaagcctgtcagattctaacaacaaaagctgaatttcttcacccaacttaaatgttcttgagatgaaaataaaacctattcccatgttctaaaaaaa

SEQ ID NO: 702 - protein, 179 aa, Homosapiens
MPSKSLVMEYLAHPSTLGLAVGVACGMCLGWSLRVCFGMLPKSKTSKTHTDTESEASILGDSGEYKMILVVRNDLKMGKGKVAAQCSHAAVSAYKQIQRRNPEMLKQWEYCGQPKVVVKAPDEETLIALLAHAKMLGLTVSLIQDAGRTQIAPGSQTVLGIGPGPADLIDKVTGHLKLY

SEQ ID NO: 703 - DNA, 2530 bp, Homosapiens
ctaaagtggagcccagcggcgggtgtgagagtccgtaaggagcagcttccaggatcctgagatccggagcagccggggtcggagcggctcctcaagagttactgatctatgaaatggcagagaatggaaaaaattgtgaccagagacgtgtagcaatgaacaaggaacatcataatggaaatttcacagacccctcttcagtgaatgaaaagaagaggagggagcgggaagaaaggcagaatattgtcctgtggagacagccgctcattaccttgcagtatttttctctggaaatccttgtaatcttgaaggaatggacctcaaaattatggcatcgtcaaagcattgtggtgtcttttttactgctgcttgctgtgcttatagctacgtattatgttgaaggagtgcatcaacagtatgtgcaacgtatagagaaacagtttcttttgtatgcctactggataggcttaggaattttgtcttctgttgggcttggaacagggctgcacacctttctgctttatctgggtccacatatagcctcagttacattagctgcttatgaatgcaattcagttaattttcccgaaccaccctatcctgatcagattatttgtccagatgaagagggcactgaaggaaccatttctttgtggagtatcatctcaaaagttaggattgaagcctgcatgtggggtatcggtacagcaatcggagagctgcctccatatttcatggccagagcagctcgcctctcaggtgctgaaccagatgatgaagagtatcaggaatttgaagagatgctggaacatgcagagtctgcacaagactttgcctcccgggccaaactggcagttcaaaaactagtacagaaagttggattttttggaattttggcctgtgcttcaattccaaatcctttatttgatctggctggaataacgtgtggacactttctggtacctttttggaccttctttggtgcaaccctaattggaaaagcaataataaaaatgcatatccagaaaatttttgttataataacattcagcaagcacatagtggagcaaatggtggctttcattggtgctgtccccggcataggtccatctctgcagaagccatttcaggagtacctggaggctcaacggcagaagcttcaccacaaaagcgaaatgggcacaccacagggagaaaactggttgtcctggatgtttgaaaagttggtcgttgtcatggtgtgttacttcatcctatctatcattaactccatggcacaaagttatgccaaacgaatccagcagcggttgaactcagaggagaaaactaaataagtagagaaagttttaaactgcagaaattggagtggatgggttctgccttaaattgggaggactccaagccgggaaggaaaattcccttttccaacctgtatcaatttttacaacttttttcctgaaagcagtttagtccatactttgcactgacatactttttccttctgtgctaaggtaaggtatccaccctcgatgcaatccaccttgtgttttcttagggtggaatgtgatgttcagcagcaaacttgcaacagactggccttctgtttgttactttcaaaaggcccacatgatacaattagagaattcccaccgcacaaaaaaagttcctaagtatgttaaatatgtcaagctttttaggcttgtcacaaatgattgctttgttttcctaagtcatcaaaatgtatataaattatctagattggataacagtcttgcatgtttatcatgttacaatttaatattccatcctgcccaacccttcctctcccatcctcaaaaaagggccattttatgatgcattgcacaccctctggggaaattgatctttaaattttgagacagtataaggaaaatctggttggtgtcttacaagtgagctgacaccattttttattctgtgtatttagaatgaagtcttgaaaaaaactttataaagacatctttaatcattccaaaattgtgtccgttttcttgagcgttttgattttttacttttagcttataccagctgaatggcagccttgcctaatccacctacaacaagaatttcttaagctttcttttatttgcatgagagagccactaccaaggcatgttttgttatgctgaaactgggctgctgcatactgctaaatggcacctctgggattggcctacctggggatttcttggtttgtgaaaacaggagaggagaaatatctcatacaagtgaaaggatactggagagagaaattacccatttctaaaaaaaaaccacactctgtcgtatctgtgttaatgttttctagcatgtactctggtttcaacagacacaaatttatatgttaacccagttttcttgccgttctgtaagtgttttattcttagtgtgatttttttccattgggatgtttttgattgaacttgttcattttgttttgcttgggaggaaaataaacaattttacttttttccttaaaaaaaaaaaaaaa

SEQ ID NO: 704 - protein, 406 aa, Homosapiens
MAENGKNCDQRRVAMNKEHHNGNFTDPSSVNEKKRREREERQNIVLWRQPLITLQYFSLEILVILKEWTSKLWHRQSIVVSFLLLLAVLIATYYVEGVHQQYVQRIEKQFLLYAYWIGLGILSSVGLGTGLHTFLLYLGPHIASVTLAAYECNSVNFPEPPYPDQIICPDEEGTEGTISLWSIISKVRIEACMWGIGTAIGELPPYFMARAARLSGAEPDDEEYQEFEEMLEHAESAQDFASRAKLAVQKLVQKVGFFGILACASIPNPLFDLAGITCGHFLVPFWTFFGATLIGKAIIKMHIQKIFVIITFSKHIVEQMVAFIGAVPGIGPSLQKPFQEYLEAQRQKLHHKSEMGTPQGENWLSWMFEKLVVVMVCYFILSIINSMAQSYAKRIQQRLNSEEKTK

SEQ ID NO: 705 - DNA, 2472 bp, Homosapiens
agctggagcgttcggtggacagtgagcatgcgtaccatatctgaagttcgtaaattgaaattgaacatgcgtaattaatctttctgaataggaaaaaatatatacacaacaaaactctccgtttatggaacatgcgcatttgttctcagtaagtttttcgttttgaaagtgagcatgcgcatggtgagtaggttggtccgaagtttgaaccggacagaagcgctggtcggcgtctggcggttgtttttagaggtaatacacctagtttgtggctcagcatgtcaattgtaacagtgcaacttggtcagtgtggcaatcagattggttttgaagtttttgatgctttgcttagtgactcacacagttcccagggactctgctctatgagagagaatgaggcatatcaagcatcttgcaaagaaagattcttcagtgaggaggagaatggagttccaattgcccgggctgttcttgttgacatggaacccaaagttatcaatcaaatgctgtcaaaggctgcccagtctggccaatggaaatatggtcaacatgcatgcttctgtcaaaaacaaggttctggaaacaactgggcatatggttactctgttcatggacccaggcatgaagaatctataatgaacataatccggaaggaagtggagaaatgtgactctttcagtggttttttcatcataatgagtatggctgggggcacaggatcaggattaggagctttcgttacacagaatttagaagatcagtactcaaactcattgaaaatgaatcagattatttggccttatggaactggtgaggttattgttcaaaactacaactccattttgacactttctcacttgtaccgatcttcagacgccctccttcttcatgagaatgatgccatccataagatctgtgcaaaactgatgaatatcaagcagatctcctttagtgatatcaatcaagtcctcgcacatcagctgggaagtgtgttccagcctacttattctgcagaaagctcatttcactacagacgaaatccactaggagacttaatggagcatttagttccccatcctgaattcaagatgctgagtgttcgtaacattcctcacatgtctgagaattcattggcatacaccacatttacttgggctggcctcctcaagcatttgagacagatgctcatttctaatgcaaagatggaagaaggtattgataggcatgtatggcctcctttatcaggacttcctcctcttagtaaaatgtctctcaacaaggacctgcattttaacacttccattgctaacttggtcattcttcgtgggaaagatgtgcaaagtgcagatgtggagggatttaaagatccagctctgtatacttcctggttgaagcctgttaatgctttcaacgtgtggaaaacccagcgggcctttagcaaatatgagaagtctgcagtgttggtcagcaacagccagttcttagtaaaaccacttgatatgattgttgggaaggcatggaatatgtttgcttcaaaagcctacattcatcagtacacaaaatttggaatcgaagaagaggactttttagacagtttcacgtcattagagcaggttgttgccagttactgtaatctctgatcttgaacaatgggaaaagtataccttaaggcatttctggactaaaatattttcaatactattttctctgtaaagttttcaaagttctccatcctggctaacacggtgaaacaccgtctctaccagaaaatacaaaaaattagccaggcgcggtggcgggtgcctgtagtcccagctactcgggaggctgaggcaggagaatgacgtgaacccaggaggcggagcttgcagtgagccgagatcgcgccactgcactccagcctgggcgacagagcgagactccgtctcaaaaaaaaaaaaaaaaaaaaatgttttcaaagttccattctgttaaagtaaccacgtagaatgctgagtctattctgcatactatgcccacagaaaaggaagaaaactttttaaaatggagaatcgcatgttttcaatgaaaacattcacttggtatttcatttgtaagaaaaaaaaatggtgcttttataaagaactttggggaaacactttgctgaaatgttgggactctggaactagccaagaaaagagaatattctctttgtctacatgttcctaaatctttactccaaaacaactccaaaaacaactcacaaagcatgaaccaaactttcacagcataatttcaagctaaggaattgtaattctgtacttaatatattcatgtttgaaatgaatgctttgaaccacaggagggagatgttgtcaaatgctacagtgtgaacatgtattttgaatattctgtaacagggcaagtttccactctaagcagctatttaaaaataaatatgaggattttggtaataaatgcttatgcttaagt

SEQ ID NO: 706 - protein, 453 aa, Homosapiens
MSIVTVQLGQCGNQIGFEVFDALLSDSHSSQGLCSMRENEAYQASCKERFFSEEENGVPIARAVLVDMEPKVINQMLSKAAQSGQWKYGQHACFCQKQGSGNNWAYGYSVHGPRHEESIMNIIRKEVEKCDSFSGFFIIMSMAGGTGSGLGAFVTQNLEDQYSNSLKMNQIIWPYGTGEVIVQNYNSILTLSHLYRSSDALLLHENDAIHKICAKLMNIKQISFSDINQVLAHQLGSVFQPTYSAESSFHYRRNPLGDLMEHLVPHPEFKMLSVRNIPHMSENSLAYTTFTWAGLLKHLRQMLISNAKMEEGIDRHVWPPLSGLPPLSKMSLNKDLHFNTSIANLVILRGKDVQSADVEGFKDPALYTSWLKPVNAFNVWKTQRAFSKYEKSAVLVSNSQFLVKPLDMIVGKAWNMFASKAYIHQYTKFGIEEEDFLDSFTSLEQVVASYCNL

SEQ ID NO: 707 - DNA, 5332 bp, Homosapiens
gctgaactttaggagccagtctaaggcctaggcgcagacgcactgagcctaagcagccggtgatggcggcagcggctgtggtggctgcggcgggtccgggcccatgaggcgacgaaggaggcgggacggcttttacccagccccggacttccgagacagggaagctgaggacatggcaggagtgtttgacatagacctggaccagccagaggacgcgggctctgaggatgagctggaggaggggggtcagttaaatgaaagcatggaccatgggggagttggaccatatgaacttggcatggaacattgtgagaaatttgaaatctcagaaactagtgtgaacagagggccagaaaaaatcagaccagaatgttttgagctacttcgggtacttggtaaagggggctatggaaaggtttttcaagtacgaaaagtaacaggagcaaatactgggaaaatatttgccatgaaggtgcttaaaaaggcaatgatagtaagaaatgctaaagatacagctcatacaaaagcagaacggaatattctggaggaagtaaagcatcccttcatcgtggatttaatttatgcctttcagactggtggaaaactctacctcatccttgagtatctcagtggaggagaactatttatgcagttagaaagagagggaatatttatggaagacactgcctgcttttacttggcagaaatctccatggctttggggcatttacatcaaaaggggatcatctacagagacctgaagccggagaatatcatgcttaatcaccaaggtcatgtgaaactaacagactttggactatgcaaagaatctattcatgatggaacagtcacacacacattttgtggaacaatagaatacatggcccctgaaatcttgatgagaagtggccacaatcgtgctgtggattggtggagtttgggagcattaatgtatgacatgctgactggagcacccccattcactggggagaatagaaagaaaacaattgacaaaatcctcaaatgtaaactcaatttgcctccctacctcacacaagaagccagagatctgcttaaaaagctgctgaaaagaaatgctgcttctcgtctgggagctggtcctggggacgctggagaagttcaagctcatccattctttagacacattaactgggaagaacttctggctcgaaaggtggagcccccctttaaacctctgttgcaatctgaagaggatgtaagtcagtttgattccaagtttacacgtcagacacctgtcgacagcccagatgactcaactctcagtgaaagtgccaatcaggtctttctgggttttacatatgtggctccatctgtacttgaaagtgtgaaagaaaagttttcctttgaaccaaaaatccgatcacctcgaagatttattggcagcccacgaacacctgtcagcccagtcaaattttctcctggggatttctggggaagaggtgcttcggccagcacagcaaatcctcagacacctgtggaatacccaatggaaacaagtggcatagagcagatggatgtgacaatgagtggggaagcatcggcaccacttccaatacgacagccgaactctgggccatacaaaaaacaagcttttcccatgatctccaaacggccagagcacctgcgtatgaatctatgacagagcaatgcttttaatgaatttaaggcaaaaaaggtggagagggagatgtgtgagcatcctgcaaggtgaaacgactcaaaatgacagtttcagagagtcaatgtcattacatagaacacttcagacacaggaaaaataaacgtggattttaaaaaatcaatcaatggtgcaaaaaaaaacttaaagcaaaatagtattgctgaactcttaggcacatcaattaattgattcctcgcgacatcttctcaaccttatcaaggattttcatgttgatgactcgaaactgacagtattaagggtaggatgttgcttctgaatcactgttgagttctgattgtgttgaagaagggttatcctttcattaggcaaagtacaaaattgcctataatacttgcaactaaggacaaattagcatgcaagcttggtcaaactttttccagcaaaatggaagcaaagacaaaagaaacttaccaattgatgttttacgtgcaaacaacctgaatcttttttttatataaatatatatttttcaaatagatttttgattcagctcattatgaaaaacatcccaaactttaaaatgcgaaattattggttggtgtgaagaaagccagacaacttctgtttcttctcttggtgaaataataaaatgcaaatgaatcattgttaaccacagctgtggctcgtttgagggattggggtggacctggggtttattttcagtaacccagctgcaatacctgtctgtaatatgagaaaaaaaaaatgaatctatttaatcatttctacttgcagtactgctatgtgctaagcttaactggaagccttggaatgggcataagttgtatgtcctacatttcatcattgtcccgggcctgcattgcactggaaaaaaaaatcgccacctgttcttacaccagtatttggttcaagacaccaaatgtcttcagcccatggctgaagaacaacagaagagagtcaggataaaaaatacatactgtggtcggcaaggtgagggagatagggatatccaggggaagagggtgttgctgtggcccactctctgtctaatctctttacagcaaattggtaagattttcagttttacttctttctactgtttctgctgtctaccttccttatatttttttcctcaacagttttaaaaagaaaaaaaggtctatttttttttctcctatacttgggctacattttttgattgtaaaaatatttgatggccttttgatgaatgtcttccacagtaaagaaaacttagtggcttaatttaggaaacatgttaacaggacactatgtttttgaaattgtaacaaaatctacataaatgatttacaggttaaaagaataaaaataaaggtaactttacctttcttaaatatttcctgccttaaagagagcatttccatgactttagctggtgaaagggtttaatatctgcagagctttataaaaatatatttcagtgcatactggtataatagatgatcatgcagttgcagttgagttgtatcaccttttttgtttgtcttttataatgtcttcagtctgagtgtgcaaagtcaatttgtaatattttgcaaccctaggatttttttaaatagatgctgcttgctatgttttcaaacctttttgagccataggatccaagccataaaattctttatgcatgttgaattcagtcagaaaagagcaaggctttgctttttgaaattgcaactcaaatgagatgggatgaaatcctatgacagtaagcaaaaacagaaccatgaaaaatgattggacatacaccttttcaattgtggcaataattgaaagaatcgataaaagttcatctttggacagaaagcctttaaaaaaaaaatcactccctcttccccctcctcccttattgcagcagcctactgagaactttgactgttgctggtaaattagaagctacaataataattaagggcagaaattatacttaaaaagtgcagatccttgttctttgacaatttgtgatgtctgaaaaaacagaacccgaaaagctatggtgatatgtacaggcattatttcagactgtaaatggcttgtgatactcttgatacttgttttcaaatatgtttactaactgtagtgttgactgcctgaccaaattccagtgaaacttatacaccaaaatattcttcctaggtcctatttgctagtaacatgagcactgtgattggctggctataaccaccccagttaaaccattttcataattagtagtgccagcaatagtggcaaacactgcaacttttctgcataaaaagcattaattgcacagctaccatccacacaaatacatagtttttctgacttcacatttattaagtgaaatttatttcccatgctgtggaaagtttattgagaacttgtttcataaatggatatccctactatgactgtgaaaacatgtcaagtgtcacattagtgtcacagacagaaagcacacacctatgcaatatggcttatctatatttatttgtaaaaatccaagcatagtttaaaatatgatgtcgatattactagtcttgagtttctaagagggttctttatgttataccaggtaagtgtataaaagagattaagtgcttttttttcatcacttgattattttctttaaaatcagctattacaggatatttttttattttatacatgctgttttttaattaaaatataatcactgaagtttactaatttgattttataaggtttgtagcattacagaataactaaactgggatttataaaccagctgtgattaacaatgtaaagtattaattattgaactttgaaccagatttttaggaaaattatgttctttttccccctttatggtcttaactaatttgaatccttcaagaaggatttttccatactattttttaagatagaagataatttgtgggcaggggtggaggatgcatgtatgatactccataaattcaacattctttactataggtaatgaatgattataaacaagatgcatcttagatagtattaatatactgagccttggattatatatttaatataggacctattttgaatattcagttaatcatatggttcctagcttacaagggctagatctaagattattcccatgagaaatgttgaatttatgaagaatagattttaaggctttgaaaatggttaatttctcaaaaacatcaatgtccaaacatctaccttttttcataggagtagacactagcaagctggacaaactatcacaaaagtatttgtcacacataacctgtggtctgttgctgattaatacagtactttttcttgtgtgattcttaacattatagcacaagtattatctcagtggattatccggaataacatctgaaagatgggttcatctatgtttgtgtttgctctttaaactattgtttctcctatcccaagttcgctttgcatctatcagtaaataaaattcttcagctgccttattaggagtgctatgagggtaacacctgttctgcttttcatcttgtatttagttgactgtattatttgatttcggattgaatgaatgtaaatagaaattaaatgcaaatttgaatgaacataaaaaaaaaaaaaaaa

SEQ ID NO: 708 - protein, 525 aa, Homosapiens
MRRRRRRDGFYPAPDFRDREAEDMAGVFDIDLDQPEDAGSEDELEEGGQLNESMDHGGVGPYELGMEHCEKFEISETSVNRGPEKIRPECFELLRVLGKGGYGKVFQVRKVTGANTGKIFAMKVLKKAMIVRNAKDTAHTKAERNILEEVKHPFIVDLIYAFQTGGKLYLILEYLSGGELFMQLEREGIFMEDTACFYLAEISMALGHLHQKGIIYRDLKPENIMLNHQGHVKLTDFGLCKESIHDGTVTHTFCGTIEYMAPEILMRSGHNRAVDWWSLGALMYDMLTGAPPFTGENRKKTIDKILKCKLNLPPYLTQEARDLLKKLLKRNAASRLGAGPGDAGEVQAHPFFRHINWEELLARKVEPPFKPLLQSEEDVSQFDSKFTRQTPVDSPDDSTLSESANQVFLGFTYVAPSVLESVKEKFSFEPKIRSPRRFIGSPRTPVSPVKFSPGDFWGRGASASTANPQTPVEYPMETSGIEQMDVTMSGEASAPLPIRQPNSGPYKKQAFPMISKRPEHLRMNL

SEQ ID NO: 709 - DNA, 1917 bp, Homosapiens
gccgccgggctgagagaagagcttgcggggtttgcggttgatggccccgactgaagggctggaggcggtgtatgccgctgttcttgctgtcgctcccgacacctccgtccgcttctggtcatgagaggagacagaggcctgaagcaaagacatctgggtcagagaaaaagtatttaagggccatgcaagccaatcgtagccaactgcacagtcctccaggaaccggaagcagtgaggatgcctcaacccctcagtgtgtccacacaagattgacaggagagggttcttgccctcattctggagatgttcatatccagataaactccatacctaaagaatgtgcagaaaatgcaagctccagaaatataaggtcaggtgtccatagctgtgcccatggatgtgtacacagtcgcttacggggtcactcccacagtgaagcaaggctgactgatgatactgccgcagaatctggagatcatggtagtagctccttctcagaattccgctatctcttcaagtggctgcaaaaaagtcttccatatattttgattctgagcgtcaaacttgttatgcagcatataacaggaatttctcttggaattgggctgctaacaacttttatgtatgcaaacaaaagcattgtaaatcaggtttttctaagacttaatttttttaaatcctactttggaccatttgagcttctgggaagtattttggattgttggaattacagacttcattctgaaattctttttcatgggcttaaaatgccttattttattggtgccttctttcatcatgccttttaaatctaagggttactggtatatgcttttagaagaattgtgtcaatactaccgaacttttgttcccataccagtttggtttcgctaccttataagctatggggagtttggtaacgtaactagatggagtcttgggatactgctggctttactctacctcatattaaaacttttggaattttttgggcatctgagaactttcagacaggttttacgaatattttttacacaaccaagttatggagtggctgccagcaagagacagtgttcagatgtggatgatatttgttcaatatgtcaagctgaatttcagaagccaattcttctcatctgtcagcatatattttgtgaagagtgcatgaccttatggtttaacagagagaaaacatgtccactctgcagaactgtgatttcagaccatataaacaaatggaaggatggagccacttcatcacaccttcaaatatattaagttgtataaactatcaaggccacaaaatactaatgtcatttggtcataatgactactgataaggcatcagaatggattttcagggctaccagaaaaatgtttccagatggttttagaatgtaggacttatgatccaattcaccaaaagattaaatgaaaccaccctgtgttttaaaatatatataatgttcaacctaatgtatatgcaacatttattctattctaattatttgacaggtaactgcagtgttaaattgtaaatgtgttttctttatgttaccaaaacagcaatttgaaattagaactagtggttttagagaactcaggtattctttcctgacattgttttcagaataaagaatatttttcataatattttaagatacatactatctaaaagtagaattttgttcagcattgacttttataattcccatcctaaaaattcttaatattttcataaaatttgtatttttaaatgaaaattctaaatgttgtattttatcagtaacattttctaagtgaagattaatttactgaggatgatacattatagtattgtattattctctgtagtaagattagtaataagtgaaaataaatgatttaaattcaaaaaaaaaaaaaaaaaaaaaaaaa

SEQ ID NO: 710 - protein, 208 aa, Homosapiens
MQANRSQLHSPPGTGSSEDASTPQCVHTRLTGEGSCPHSGDVHIQINSIPKECAENASSRNIRSGVHSCAHGCVHSRLRGHSHSEARLTDDTAAESGDHGSSSFSEFRYLFKWLQKSLPYILILSVKLVMQHITGISLGIGLLTTFMYANKSIVNQVFLRLNFFKSYFGPFELLGSILDCWNYRLHSEILFHGLKMPYFIGAFFHHAF

SEQ ID NO: 711 - DNA, 931 bp, Homosapiens
ggatcgatacggaaccaagagacagcaatcaaatatatgactgatggatgtttactgaaacatattctgggagacccaagtcttaccaaattcagagtcattattttggatgaagcccatgaaagaactctaactacagatatcttatttggtctattgaagaagctatttcaggagaagtctgctaataggaaggagcatttaaaagtggtgattgtgaaagtcaccatggatatccatttgaatgaaatggctggagacatcttggtttttctgactgatcaacagaggaggatatttttgccaccaccacctggaattagaaaatgtgtcatatccaccaatatttctgcaacgtctttgacaatagatggaatcagatatgtggtagatggtggcttcgtgaagcagttaaatcacaaccccagattagggttggacatcctggaggtggttccaatttcaaagtttccctatttggatccacctaatgagagacttattttagaagctcttaaacagctttaccagtgtgatgctattgacaggagtggccatgtcaccagattgggtttgtctatggtggagtttcctttgcctccacatctgacatgtgcagtaataaaagctgcttccctggattgtgaagatttactacttccaatagcagcaatgttgtctgtggaaaacgtcttcattagacctgttgatccagagtaccagaaggaagcagaacagagacatcgagaattggcagctaaagctggaggatttaatgactttgcaactttagctgtcatctttgaacaatgcaaatcaagtggagctccagcttcatggtgccaaaaacactggattcattggaggtgcttattttctgcatttcgtgtggaagctcaacttcgagaactaatcaggaagcttaaacagg

SEQ ID NO: 712 - DNA, 3945 bp, Homosapiens
gagaaaagatggctgctgtgcaagttgtcggttcgtggccttccgtgcagccgcgggaggcaccgcgggaagcaatccctgagcgaggcaatgggtttcgcctcttgtctgccaggctctgcgccctgcgcccggatgacagcagctccgcccgcaccgagatccacctgctcttcgatcagctcatctccgagaactacagcgagggcagtggcgtggccccggaggacgttagtgctcttcttgtccaggcttgccgactggtacctcttaatcagaatcatcttgtcagcaaagtgagccagcttatccaccatttacttaacagattacaggtaattgttgatgaacagcacttggatttcctgttggcatatactatttcggctattcatcagtgtagttcctggacacacagggaaattcttcaagccctggcagctctggtgtactgcaatggctccaaatgtcaaaagtacctcccagagctgctaggcaacaccggactcttaatgaagttgagtgacttggctcagtctgatcctgaagtcaggagagctgcagtacattgtatggcaaacttatgtctcagtgtgccaggacagccgtatttggaggagccctaccaaaatgtctgtttccaagcttttctgactattttacagtctccaaaatcatctgatatggatgatatcacattttgcatgttattgcaaaatgcattaaaaggtatacagtcacttctaaatggtgggagaatgaaactaacacagactgatgaacttggagcacttttagctgtgctaaagaaattcatgtttcacggactccctggactaaacatagagatgcccacggtgttatacccaactccgcttcctcagtatgatgggcgaacacctatcaaaccacagcaatcagaatccagtgcttctcgaccaactttgaataaaaagaaaaaatccaaagtaaaaccaaagaaaatccagcaaggagaggaggaggaaaaggaatccagtggtgaaatagaggcagccccagtcactggcacaggcagagtgaacctgcatgaagggaacacttggtgtccctcctccctgggtgtccagagtttgcctttagatggaagtggagctgcagaaaaagatggagtctcctcatccttcagttcttccagttggaaaagggtcagcagtagtgagtcagacttttctgatgctgaaggaggcatgcagagtaaaatgaggtcttaccaagctaaagttcgccaaggagccttagtttgttttctttctactataaaatcgatagaaaaaaaagttctttatggctactggtcagcttttattcctgatacgcctgaacttggcagcccacagtcagtgtccttgatgactcttacattgaaagacccttctccaaagacatgtgcctgtgctctgcaagttttatctgccatcttggaaggctcaaagcagtttctttctgttgctgaagataccagtgaccacagaagggcttttacccccttctccgtaatgatcgcttgcagcattagagagttgcacagatgtcttttgttagctttggtggcggagtcatcctcacagaccgttactcagataattaagtgccttgcaaatttagtatcaaatgcaccttatgatcgtctaaaactcagcctgctgaccaaagtctggaaccagataaagccttatattcgccacaaagatgttaatgttcgtgtgtcaagtctcacactcttgggagctatagtgtccacccacgcacctttacctgaagtccaactacttctgcaacagccatgttcttctggactcggtaatagcaattcagcaacccctcacctcagccctcctgattggtggaagaaagcccctgcaggaccctctctggaagaaacgtcagttagctcacctaaggggtcttcagagccctgctggctcattcgactctgcatttccattgtcgtactgcccaaggaggattcctgttcaggtagcgatgctggctctgcagcaggaagcacctacgaaccatcccccatgcgactggaggccttacaggtattgactcttctggcaaggggctacttttcaatgactcaagcctacttgatggagcttggagaggtgatttgcaagtgcatgggggaagcagatccatccattcagcttcatggagcaaagcttctggaagaactgggcacaggcttaatacagcagtataaaccagactccactgcagcacctgatcagagagcaccagtcttcttggtggtgatgttctggactatgatgctgaacggtcctttacccggagccctgcagaattcagaacacccaactctccaggcgagcgcctgtgatgccctgtcttccatcttgccagaggccttcagcaatctgccgaatgacaggcagatgctgtgcatcacagtgctgctcgggctgaatgacagcaagaatcgcttagtgaaagctgcaacttcacgggccctgggagtctatgtgctttttccctgtctcagacaggatgtcatatttgttgcagacgcagcaaatgcaatattgatgtcacttgaagacaagtctctgaatgttcgagccaaagcagcctggtccctgggcaacctgacagacactctgattgtcaacatggaaacaccagacccaagtttccaggaagagttctctggtctcctgctcttgaaaatgttacgatcagctatagaagcatccaaggataaagacaaggtaaaaagcaatgcagtccgggcccttggaaatttgcttcattttctgcaaccctctcatatagaaaaacccacatttgcagaaatcattgaggagtctatccaggccctaatttctactgttctaacagaagctgccatgaaagtccgatggaatgcttgttatgcaatgggaaatgtatttaaaaatcctgcccttcctttagggacagccccatggacctcccaggcctacaatgccctgacatcggtcgtgacatcatgcaagaacttcaaagtgcgcatcagatctgcagccgccctttccgtcccggggaagagagagcagtacgggtctgttgaccagtatgctcggatctggaatgcattggtcaccgctttacagaagagtgaagacaccatagactttttggaattcaagtactgtgtcagcctacggacccaaatctgccaggcactgattcacctcttgagcttggccagtgcctcggacctcccttgtatgaaagaaacccttgaactgagtgggaatatggtccagtcctatattctacagtttttaaaatcaggagcagagggagatgacactggagcaccccacagcccacaggaaagagaccagatggtcagaatggcccttaaacacatgggcagcatccaggcaccaactggagacacagccagaagggccatcatgggctttttagaagagatcctggccgtttgttttgactcatctggatcacaaggggcactcccagggttaacaaatcagtgaagatcccaccatactttctagatgtcgaaggcggcagtaggaagacctgagcttgagcataagatctgtgggatttcatcttaggggcagaaacaatccgttcactatttatttagaatgacttagcagccatttaaattttcacagagggctcaaccacctttggagtgactccatagcactggccatggtcagggttgttggaacatctgacctgtgcatccaggagccgaggagtcaggttgtaatacaggccaagcagacgggctttgagggcatttagtctcagaaaaaaaaaatgtagaaggatttcggaattagaattttgtgtattgtatctgtagttttgtaataaactaacgaaaaatagtgaaaaaaaaaaaaaaaaaca

SEQ ID NO: 713 - protein, 1181 aa, Homosapiens
MAAVQVVGSWPSVQPREAPREAIPERGNGFRLLSARLCALRPDDSSSARTEIHLLFDQLISENYSEGSGVAPEDVSALLVQACRLVPLNQNHLVSKVSQLIHHLLNRLQVIVDEQHLDFLLAYTISAIHQCSSWTHREILQALAALVYCNGSKCQKYLPELLGNTGLLMKLSDLAQSDPEVRRAAVHCMANLCLSVPGQPYLEEPYQNVCFQAFLTILQSPKSSDMDDITFCMLLQNALKGIQSLLNGGRMKLTQTDELGALLAVLKKFMFHGLPGLNIEMPTVLYPTPLPQYDGRTPIKPQQSESSASRPTLNKKKKSKVKPKKIQQGEEEEKESSGEIEAAPVTGTGRVNLHEGNTWCPSSLGVQSLPLDGSGAAEKDGVSSSFSSSSWKRVSSSESDFSDAEGGMQSKMRSYQAKVRQGALVCFLSTIKSIEKKVLYGYWSAFIPDTPELGSPQSVSLMTLTLKDPSPKTCACALQVLSAILEGSKQFLSVAEDTSDHRRAFTPFSVMIACSIRELHRCLLLALVAESSSQTVTQIIKCLANLVSNAPYDRLKLSLLTKVWNQIKPYIRHKDVNVRVSSLTLLGAIVSTHAPLPEVQLLLQQPCSSGLGNSNSATPHLSPPDWWKKAPAGPSLEETSVSSPKGSSEPCWLIRLCISIVVLPKEDSCSGSDAGSAAGSTYEPSPMRLEALQVLTLLARGYFSMTQAYLMELGEVICKCMGEADPSIQLHGAKLLEELGTGLIQQYKPDSTAAPDQRAPVFLVVMFWTMMLNGPLPGALQNSEHPTLQASACDALSSILPEAFSNLPNDRQMLCITVLLGLNDSKNRLVKAATSRALGVYVLFPCLRQDVIFVADAANAILMSLEDKSLNVRAKAAWSLGNLTDTLIVNMETPDPSFQEEFSGLLLLKMLRSAIEASKDKDKVKSNAVRALGNLLHFLQPSHIEKPTFAEIIEESIQALISTVLTEAAMKVRWNACYAMGNVFKNPALPLGTAPWTSQAYNALTSVVTSCKNFKVRIRSAAALSVPGKREQYGSVDQYARIWNALVTALQKSEDTIDFLEFKYCVSLRTQICQALIHLLSLASASDLPCMKETLELSGNMVQSYILQFLKSGAEGDDTGAPHSPQERDQMVRMALKHMGSIQAPTGDTARRAIMGFLEEILAVCFDSSGSQGALPGLTNQ

SEQ ID NO: 714 - DNA, 1104 bp, Homosapiens
ctcggtgcgcgaccccggctcagaggactctttgctgtcccgcaagatgcggatgctgctggcgctcctggccctctccgcggcgcggccatcggccagtgcagagtcacactggtgctacgaggttcaagccgagtcctccaactacccctgcttggtgccagtcaagtggggtggaaactgccagaaggaccgccagtcccccatcaacatcgtcaccaccaaggcaaaggtggacaaaaaactgggacgcttcttcttctctggctacgataagaagcaaacgtggactgtccaaaataacgggcactcagtgatgatgttgctggagaacaaggccagcatttctggaggaggactgcctgccccataccaggccaaacagttgcacctgcactggtccgacttgccatataagggctcggagcacagcctcgatggggagcactttgccatggagatgcacatagtacatgagaaagagaaggggacatcgaggaatgtgaaagaggcccaggaccctgaagacgaaattgcggtgctggcctttctggtggaggctggaacccaggtgaacgagggcttccagccactggtggaggcactgtctaatatccccaaacctgagatgagcactacgatggcagagagcagcctgttggacctgctccccaaggaggagaaactgaggcactacttccgctacctgggctcactcaccacaccgacctgcgatgagaaggtcgtctggactgtgttccgggagcccattcagcttcacagagaacagatcctggcattctctcagaagctgtactacgacaaggaacagacagtgagcatgaaggacaatgtcaggcccctgcagcagctggggcagcgcacggtgataaagtccggggccccgggtcggccgctgccctgggccctgcctgccctgctgggccccatgctggcctgcctgctggccggcttcctgcgatgatggctcacttctgcacgcagcctctctgttgcctcagctctccaagttccaggcttccggtccttagccttcccaggtgggactttaggcatgattaaaatatggacatatttttggag

SEQ ID NO: 715 - protein, 312 aa, Homosapiens
MRMLLALLALSAARPSASAESHWCYEVQAESSNYPCLVPVKWGGNCQKDRQSPINIVTTKAKVDKKLGRFFFSGYDKKQTWTVQNNGHSVMMLLENKASISGGGLPAPYQAKQLHLHWSDLPYKGSEHSLDGEHFAMEMHIVHEKEKGTSRNVKEAQDPEDEIAVLAFLVEAGTQVNEGFQPLVEALSNIPKPEMSTTMAESSLLDLLPKEEKLRHYFRYLGSLTTPTCDEKVVWTVFREPIQLHREQILAFSQKLYYDKEQTVSMKDNVRPLQQLGQRTVIKSGAPGRPLPWALPALLGPMLACLLAGFLR

SEQ ID NO: 716 - DNA, 7026 bp, Homosapiens
aagagggcgtgaggagggaaggagagggaggagagagaggagagagaagggcggagtaggaggcaggggaagggggcggggcggaagagtcacgtgatccggcatggaggcggtggcggcgaccgggaggagccgccggggcagaagccgcacttgttagtgtggggggaggtgggggcgggggacgccgacaccgtcaccgtcacccagggacgccgaggagaaggcgggaggggggtgggggcgagatcaggctccgaccccccgccgaggggatgaggggagcatgggtgccaaggagtcacggatcggattcctcagctacgaggaggcgctgaggagagttacagatgtagagctaaaacgactgaaggatgctttcaagaggacctgtggactctcatattacatgggccagcactgcttcatccgggaagtgcttggggatggagtgcctccaaaggttgctgaggtgatttactgttcttttggtggaacatccaaagggctgcacttcaataatttaatagttggacttgtcctccttacaagaggcaaagatgaagagaaagcaaaatacatttttagtcttttttcaagtgaatctgggaactatgttatacgggaagaaatggaaagaatgctccacgtggtggatggtaaagtcccagatacactcaggaagtgtttctcagagggtgaaaaggtaaactatgaaaagtttagaaattggctttttctaaacaaagatgcttttactttctctcgatggcttctatctggaggtgtgtatgttaccctcactgatgatagtgatactcctactttctaccaaactctggctggagtcacacatttggaggaatcagacatcattgatcttgagaaacgctattggttattgaaggctcaatcccggactggacgatttgatttagagacatttggcccattggtttcaccacctattcgtccatctctaagtgaaggtttgtttaatgcttttgatgaaaatcgtgacaatcacatagattttaaggagatatcctgtgggttatcagcctgttgcaggggacccctggctgaaagacaaaaattttgcttcaaggtatttgatgttgaccgtgatggagttctctccagggttgaactgagagacatggtggttgcacttttagaagtctggaaggacaaccgcactgatgatattcctgaattacatatggatctctctgatattgtagaaggcatactgaatgcacatgacaccacaaagatgggtcatcttactctggaagactatcagatctggagtgtgaaaaatgttcttgccaatgagtttttgaacctccttttccaggtgtgtcacatagttctggggttaagaccagctactccggaagaagaaggacaaattattagaggatggttagaacgagagagcaggtatggtctgcaagcaggacacaactggtttatcatctccatgcagtggtggcaacagtggaaagaatatgtcaaatacgatgccaaccctgtggtaattgagccatcatctgttttgaatggaggaaaatactcatttggaactgcagcccatcctatggagcaggtcgaagatagaattggaagcagcctcagttacgtgaatactacagaagagaaattttcagacaacatttctactgcatctgaagcctcagaaactgctggcagcggctttctgtattctgccacaccaggggcagatgtttgctttgctcgacaacataacacttctgacaataacaaccagtgtttgctgggagccaatgggaatattttgttgcaccttaaccctcagaaaccaggggctattgataatcagccattagtaactcaagaaccagtaaaggctacatcattaacactagaaggaggacgattaaaacgaactccacagctgattcatggaagagactatgaaatggtcccagaacctgtgtggagagcactttatcactggtatggagcaaacctggccttacctagaccagttatcaagaacagcaagacagacatcccagagctggaattatttccccgctatcttctcttcctgagacagcagcctgccactcggacacagcagtctaacatctgggtgaatatgggaaatgtaccttctccgaatgcacctttaaagcgggtattagcctatacaggctgttttagtcgaatgcagaccatcaaggaaattcacgaatatctatctcaaaggctgcgcattaaagaggaagatatgcgcctgtggctatacaacagtgagaactaccttactcttctggatgatgaggatcataaattggaatatttgaaaatccaggatgaacaacacctggtaattgaagttcgcaacaaagatatgagttggcctgaggagatgtcttttatagcaaatagtagtaaaatagatagacacaaggttcccacagaaaagggagccacaggtctaagcaatctgggaaacacatgcttcatgaactcaagcatccagtgtgttagtaacacacagccactgacacagtattttatctcagggagacatctttatgaactcaacaggacaaatcccattggtatgaaggggcatatggctaaatgctatggtgatttagtgcaggaactttggagtggaactcagaagaatgttgccccattaaagcttcggtggaccatagcaaaatatgctcccaggtttaatgggtttcagcaacaggactcccaagaacttctggcttttctcttggatggtcttcatgaagatcttaatcgagtccatgaaaagccatatgtggaactgaaggacagtgatgggcgaccagactgggaagtagctgcagaggcctgggacaaccatctaagaagaaatagatcaattgttgtggatttgttccatgggcagctaagatctcaagtaaaatgcaagacatgtgggcatataagtgtccgatttgaccctttcaattttttgtctttgccactaccaatggacagttatatgcacttagaaataacagtgattaagttagatggtactacccctgtacggtatggactaagactgaatatggatgaaaagtacacaggtttaaaaaaacagctgagtgatctctgtggacttaattcagaacaaatccttctagcagaagtacatggttccaacataaagaactttcctcaggacaaccaaaaagtacgactctcagtgagtggatttttgtgtgcatttgaaattcctgtccctgtgtctccaatttcagcttctagtccaacacagacagatttctcctcttcgccatctacaaatgaaatgttcaccctaactaccaatggggacctaccccgaccaatattcatccccaatggaatgccaaacactgttgtgccatgtggaactgagaagaacttcacaaatggaatggttaatggtcacatgccatctcttcctgacagcccctttacaggttacatcattgcagtccaccgaaaaatgatgaggacagaactgtatttcctgtcatctcagaagaatcgccccagcctctttggaatgccattgattgttccatgtactgtgcatacccggaagaaagacctatatgatgcggtttggattcaagtatcccggttagcgagcccactcccacctcaggaagctagtaatcatgcccaggattgtgacgacagtatgggctatcaatatccattcactctacgagttgtgcagaaagatgggaactcctgtgcttggtgcccatggtatagattttgcagaggctgtaaaattgattgtggggaagacagagctttcattggaaatgcctatatcgctgtggattgggatcccacagcccttcaccttcgctatcaaacatcccaggaaagggttgtagatgagcatgagagtgtggagcagagtcggcgagcgcaagccgagcccatcaacctggacagctgtctccgtgctttcaccagtgaggaagagctaggggaaaatgagatgtactactgttccaagtgtaagacccactgcttagcaacaaagaagctggatctctggaggcttccacccatcctgattattcaccttaagcgatttcaatttgtaaatggtcggtggataaaatcacagaaaattgtcaaatttcctcgggaaagttttgatccaagtgcttttttggtaccaagagacccggctctctgccagcataaaccactcacaccccagggggatgagctctctgagcccaggattctggcaagggaggtgaagaaagtggatgcgcagagttcggctggggaagaggacgtgctcctgagcaaaagcccatcctcactcagcgctaacatcatcagcagcccgaaaggttctccttcttcatcaagaaaaagtggaaccagctgtccctccagcaaaaacagcagccctaatagcagcccacggactttggggaggagcaaagggaggctccggctgccccagattggcagcaaaaataaactgtcaagtagtaaagagaacttggatgccagcaaagaaaatggggctgggcagatatgtgagctggctgacgccttgagtcgagggcatgtgctggggggcagccaaccagagttggtcactcctcaggaccatgaggtagctttggccaatggattcctttatgagcatgaagcatgtggcaatggctacagcaatggtcagcttggaaaccacagtgaagaagacagcactgatgaccaaagagaagatactcgtattaagcctatttataatctatatgcaatttcgtgccattcaggaattctgggtgggggccattacgtcacttatgccaaaaacccaaactgcaagtggtactgttacaatgacagcagctgtaaggaacttcacccggatgaaattgacaccgactctgcctacattcttttctatgagcagcaggggatagactatgcacaatttctgccaaagactgatggcaaaaagatggcagacacaagcagtatggatgaagactttgagtctgattacaaaaagtactgtgtgttacagtaaagctaccactctggctgctagacagcttggcggtgagggagatgactccttgtagctgacatttggcaaaagcgtcactgaaaggcaagctaaatgtagttattttatcctgtggccctgaagcacaaaataaaaattctaattaaaatagttaactttaagagtagtaatcattttattttgaagtctcatacaagctctccgatagagaactttcaggcagatcccaccattagcctgtaaacaaaaggtttggcaccagccacctgggaccaaataagaattcaattgtgcttgtccagatatgaacaaatatgtagtgagtatagagtttaccataatcataacaaatattaaagatttccttggagtcagagtaaaaaacaaacaattataatgttgtctagggacgacatgatatgctacctcctttttcctgaagttttattccattatattgacaagatggagaaagcaagatcacgaaggtgtgcaaatgattcttaaggcatggacgaggatttttcaatttattttttaaactgtttccataccctttctttgtctttcttgctttttgtttttgccgttgtatttatgtttgagacacaaccagtcattggtggcaggggcatatagtggtcagtctgaaagggaggctctcttaagagctgtgtgccttccacccagagccttgtgggagacccagtagaaagaaacagcatcctgggaaatccagctaccatggccctcccagtggaggcatcttacatttaggatacttcaagtatcctcagaaatgtattctgcacccccggccccacccatgctgagggaaggggagcagttgccaatatttgcaccatcttcacatgcacctgttgcaacaagagcttctgggaaggtaagtggcattggagctagatcacgtttcacaattagtggttgttcttttctgtgtttgtcttgcactttaaaaaagagagaacacatgcaaatgaacttgcttgtgtgtatttgatggctctaagggctataaattacaaacaaaacacatcccagacattaggagttcataagtgtatttaatgaaattggtggttttaggaagtcaactttagttttgctttgtttgcatgtccactaatttttttattttgatatttgtcttttttttaaattttacagtagtcatcgaaagttatgtttctttgcttacttcatttttttctctaatcaagactggaacaaaagtataaatattatttatttcaggtagcatttttttcgtgtagttttttaatatatacttgaaggaaatgtttcaccttatttttggtctttgtttattcatttagaccctgcaagttgattctcattaattgtcagattccactaccctttcttcctcatagatagtaattaccaatgtaactaagtatttgtgttctgatatctgaggccagtaactattaatatctagttctcagagcatttggaaaggttatcttaaatggctacctaaattgaaatccttttcagaaaaaatataattgcaagtaggtaggactggcctaaattgtctaatgtaataaagtcagacaaaatgcatactttatagtttcaagattttcagtatataaaatctgtccattcccattaaaaagtggaagattttaaataatttctttacagatgttttatttaagcaggtagctcaatctactaatgttgtttgatctgtgtttgttatactggttgtaattaatttttttaattcatgaactagcagaaaatttattaaattaactattaactacattcaccttgtaaattactgtataaaacttgttgacaatgcactgactttagaaagatgttaatgtacataaatagagtgtaaataaaatagtgttgatgtaccg

SEQ ID NO: 717 - protein, 1604 aa, Homosapiens
MGAKESRIGFLSYEEALRRVTDVELKRLKDAFKRTCGLSYYMGQHCFIREVLGDGVPPKVAEVIYCSFGGTSKGLHFNNLIVGLVLLTRGKDEEKAKYIFSLFSSESGNYVIREEMERMLHVVDGKVPDTLRKCFSEGEKVNYEKFRNWLFLNKDAFTFSRWLLSGGVYVTLTDDSDTPTFYQTLAGVTHLEESDIIDLEKRYWLLKAQSRTGRFDLETFGPLVSPPIRPSLSEGLFNAFDENRDNHIDFKEISCGLSACCRGPLAERQKFCFKVFDVDRDGVLSRVELRDMVVALLEVWKDNRTDDIPELHMDLSDIVEGILNAHDTTKMGHLTLEDYQIWSVKNVLANEFLNLLFQVCHIVLGLRPATPEEEGQIIRGWLERESRYGLQAGHNWFIISMQWWQQWKEYVKYDANPVVIEPSSVLNGGKYSFGTAAHPMEQVEDRIGSSLSYVNTTEEKFSDNISTASEASETAGSGFLYSATPGADVCFARQHNTSDNNNQCLLGANGNILLHLNPQKPGAIDNQPLVTQEPVKATSLTLEGGRLKRTPQLIHGRDYEMVPEPVWRALYHWYGANLALPRPVIKNSKTDIPELELFPRYLLFLRQQPATRTQQSNIWVNMGNVPSPNAPLKRVLAYTGCFSRMQTIKEIHEYLSQRLRIKEEDMRLWLYNSENYLTLLDDEDHKLEYLKIQDEQHLVIEVRNKDMSWPEEMSFIANSSKIDRHKVPTEKGATGLSNLGNTCFMNSSIQCVSNTQPLTQYFISGRHLYELNRTNPIGMKGHMAKCYGDLVQELWSGTQKNVAPLKLRWTIAKYAPRFNGFQQQDSQELLAFLLDGLHEDLNRVHEKPYVELKDSDGRPDWEVAAEAWDNHLRRNRSIVVDLFHGQLRSQVKCKTCGHISVRFDPFNFLSLPLPMDSYMHLEITVIKLDGTTPVRYGLRLNMDEKYTGLKKQLSDLCGLNSEQILLAEVHGSNIKNFPQDNQKVRLSVSGFLCAFEIPVPVSPISASSPTQTDFSSSPSTNEMFTLTTNGDLPRPIFIPNGMPNTVVPCGTEKNFTNGMVNGHMPSLPDSPFTGYIIAVHRKMMRTELYFLSSQKNRPSLFGMPLIVPCTVHTRKKDLYDAVWIQVSRLASPLPPQEASNHAQDCDDSMGYQYPFTLRVVQKDGNSCAWCPWYRFCRGCKIDCGEDRAFIGNAYIAVDWDPTALHLRYQTSQERVVDEHESVEQSRRAQAEPINLDSCLRAFTSEEELGENEMYYCSKCKTHCLATKKLDLWRLPPILIIHLKRFQFVNGRWIKSQKIVKFPRESFDPSAFLVPRDPALCQHKPLTPQGDELSEPRILAREVKKVDAQSSAGEEDVLLSKSPSSLSANIISSPKGSPSSSRKSGTSCPSSKNSSPNSSPRTLGRSKGRLRLPQIGSKNKLSSSKENLDASKENGAGQICELADALSRGHVLGGSQPELVTPQDHEVALANGFLYEHEACGNGYSNGQLGNHSEEDSTDDQREDTRIKPIYNLYAISCHSGILGGGHYVTYAKNPNCKWYCYNDSSCKELHPDEIDTDSAYILFYEQQGIDYAQFLPKTDGKKMADTSSMDEDFESDYKKYCVLQ

SEQ ID NO: 718 - DNA, 971 bp, Homosapiens
ctaggtcacagaagcagtgggtcagaagccagaggggacgtggggagtgccaccctggagcctaccggcacacctgctgagatggaggcctcagatgggcaagggggtgaaggggacaagccactagagcaggtgacaaatgtgtcatgcctggagacaagctccagcgccagccctgctagagactcgctcatgcgccatgccaagggcctggatcaggacaccttcaaaacttgtaaagaatacctaagaccgctgaagaagttcctgcgaaagttgcacctgcccagggaccttccccagaagaagaagctgaagtacatgaagcagagccttgtggtcctaggggaccacatcaacacctttctgcagcattactgccaagcctgggaaatcaaacactggagaaagatgctctggcggttcatctccctcttctcggagctggaagcaaagcagcttcgccgactttacaagtacaccaagagcagccagccggccaagttcctggtgacattctgcgcctcggatgcgccggagaggtccttgctggccgaccgggaagacagtctgcccaagctctgccatgcatgggggctgcacagcaacatcagcggcatgaaggagcggctgtccaacatgcagaccccaggtcaagggagccccctgcctgggcagccaagatcccaggaccatgtcaagaaagattctttaagggagctttctcaaaaaccaaaactcaagaggaagaggataaaggaagccccagaaactccagagactgaaccgtaagaagaccaactgggacaaagggcccgcttgtcctggctctcagagcacggggaatggagaccaaaaagggaaaagaattgtccttatcaaaaagattctcaggtcttaattaggaataaatgaggtgggaaataaaaaaaaaaaaaaaaaaaaaaaaaaaaaaaaaaaaaaaaaaaaaa

SEQ ID NO: 719 - protein, 126 aa, Homosapiens
MLWRFISLFSELEAKQLRRLYKYTKSSQPAKFLVTFCASDAPERSLLADREDSLPKLCHAWGLHSNISGMKERLSNMQTPGQGSPLPGQPRSQDHVKKDSLRELSQKPKLKRKRIKEAPETPETEP

SEQ ID NO: 720 - DNA, 6468 bp, Homosapiens
gagatcagcgctgggacggaacccgggttcctctcgaaccgggattgtgacgcttttggcctggctggccgctgttttctgtcccactttttactcgggcctgcgtccgctgccgccgtccctcagtttgcccccggaggaggcagggcggccgtgccttctgccgtgcgcccgcgtggctgccaccgcccctccgaatcctccggggccgcagaggggttcgctacggagggaggtgggggccttcgggaggaggaggcggaggaggcggaggaggagggaaggaagatggcggccgtggaactagagtggatcccagagactctctataacaccgccatctccgctgtcgtggacaactacatccgctcccgccgagacatccgctccttgcccgagaacatccagtttgatgtttactacaagctttaccaacagggacgcttatgtcaactgggcagtgaattttgtgaattggaagtttttgctaaagtactgagagctttggataaaagacatttgcttcatcattgttttcaggctttgatggatcatggtgttaaagttgcttcagtcttggcctactcattcagtaggcggtgctcttatatagcagaatcagatgctgcagtaaaggaaaaagccattcaggttggctttgttttaggtggctttctttcagatgcaggctggtacagtgatgctgagaaagtttttctgtcctgccttcagttgtgtactctacacgatgagatgcttcattggtttcgtgcagtagaatgttgtgtgaggttgcttcatgtgcgaaatggaaactgcaaatatcatttgggtgaagaaacatttaaattagctcagacatatatggataaactatcaaaacatggccagcaagcaaataaagctgcactctatggagaactgtgtgcactcctatttgcaaaaagtcactatgatgaggcatacaaatggtgcatcgaggcaatgaaagaaattacagcaggcttaccagtgaaagttgtggtggatgtcttaagacaagcttctaaggcttgtgtagtaaaacgtgaatttaagaaggcagaacagttaattaaacatgcagtgtatttggcacgggatcattttggatccaaacacccaaaatattctgatacactgctagattatgggttctacttactcaatgtagataatatctgtcagtctgttgcaatttatcaggcagcccttgacattagacagtcagtgtttggtggcaaaaatatccacgtagcaacagctcatgaagatttggcctactcttcttatgtccaccagtatagctctgggaaatttgacaatgcactatttcatgcagaaagagctattggtatcattacccacatcctacctgaagatcatcttcttttggcttcttcaaagagggtgaaagcacttattttagaggagattgcaattgattgtcataataaggaaactgaacagaggctgcttcaagaagctcatgatttgcacctgtcttcactccaactagctaaaaaagcttttggggaatttaatgtacagactgcaaaacactatggaaaccttggaagactttatcagtcaatgagaaaatttaaggaagctgaagaaatgcacatcaaagcaattcagattaaagaacaacttcttggtcaagaagattatgaagtagccctttcagtgggacatctggcttctttatataattatgacatgaatcagtatgaaaatgctgagaaactttatttgcgatctatagcaattgggaagaaactttttggtgagggctacagtggactagaatatgattatcgaggtctcattaaactttacaactccattggaaattacgagaaagtgtttgaatatcacaatgttctgtctaactggaaccggttgcgagatcggcaatattcagtgacagatgctcttgaagatgtcagcaccagcccccagtccactgaagaagtggtgcagtccttcctgatttctcagaatgtcgagggaccgagctgctgagggaggacctcagttaaccaattaccttttcccggattccagggaattcatactgtgaaatcaaaaccatgttgttttggggggctggaatttgcattgaaacactggtccagtccattgaagaccctattttgggtgatccctatcttgcagaatgtctgtaggaataagcatatattcagttatattcagcatgtaccgcatgtgtaagtagtctggcccacattttcaacctagtagaacaaacaacaggaaatcttttttttgttgtttttaaaaaattcattttgcagaaagcctgaaagaaaaaaaatacccctaaataaaactatttaagagtttaaaagagttgcattcttattatgtaaggatgattttaacaactttttaatatgtaattcttccatgtggaggtattcaatactgtagtgtaaagaaattttatgcggaaaatctttatatgcagtatagaaaagttaacacaagtactaataaaagagggacatcccgacttacgtttttctaccttgcccagataagtggatacaaccactctatattacaaggaaaggactgtcagattcatctgaactggaccagtgttgatctgtaatgtaatagaaaatctgatagaccagcacttctgacttttttttttttggtacaacaatgcaagatgctctgatagcatttgctaacaggaccaggaggatctaaaaaggaccagcctaatgtagaaggtggttatttggaccagaggctttagattattattttagatcctacatatacttttatcagtagaatgatttcatttagatgtataatgaaaaaggataatgcaaaaattatgtaatagataccaaattagggaagtttggcaatttcaatggcatatttttagtcaaggtacacagatggcagtgccataagcaagtctataaatatcggctgcagccatccccctcattttaaatgttgccctaataatcaatgcagttaacaagtatattggctgtgtgtcatgaaatagttcatgttcagatggaaatgttaggttactgtatggtttatggagattaatgaaaatgaatgcccaaaaataagtcttagaaaatcctccatttttatggtaaatagtaatacaactaggtcatttcatttgaaatctaggagtcaaatggaaagatcccctaataatacacctatttcactaacttgtctttctgtttattgggttttgatttgattttttgtaagccagtcaggttatttaatgatgaggtaataatcaaatttaagaatttgtgacatgtagcaattcaagaaacaaaaaggtattttgctgttacctcaattcttactgtagtagcccatctgatgcttctatagttaagaatctgggttccccccctattttcaggggttcatgacttggctgttaaagatgttgctcctagctaatgcttggagtagtctgtgggtgaatggatgtgtgttgaattttagttttcttttaacatgcatgttgggtgagaggggaaaaaaatctaagctgtctgccacattgagtacagaaaagttgtagatttcaaattttattaatattttaagcacttttttgaacttcccaaccttgtttgaagctgttatttgcagtcctattagttttgagccattgcatttaagttccctaggagggggttggttgggggatgtactgaaagagatgaagcaaacccacaccctaagatggtaactgtgtgatttagaaacctgagtttactcctcaaatcgaattattttctttttaaattttggaaagagtaaattgacgtacttgcagtttatgaagctgccccccacccctcagttaattgcagtctaatgtcaagaggcacttctttattaattaccaaatagtctttgtgaccaaggactaacatttttaagttactcagctctatcctcatgggcctatatatttaatacctccaaagatattttcaggataggctttgtatacttttattggttatttagaatccagtggtatgtttgtggtataggaatgtcatggtaaattgtttttcaataaatattttgaaacatgtttccatatgaagtttttttttcaatctgtattttttggttttgtgcacatacagcatttcctaggataaaaataaacaaatgacttacagcctcatcctccctaactccatttgaactcaacttagctcacactcagtgataaaacaacatggtatgtagaagcctaggatcacagggtgataatgtcaattggcagccagttgtgtttttttgaaacatcattattggcagtttctccttatcaccactgctttaatgtagtttttttgtaaatccatatactttaatgcatacactctagcttaagaaaacattgccattttggttagggatatgacttaatgtgctattatttctggttctaatgaagaataataccctatgactttaagtgtaagattcatcctttaagtagggatgtttaggataagttagatgtgtgccactatgatttattgggtttcttaaaaatcttgaagaaaataataaaatttatctcacaataagttaacttgcgcaaactttttacatatggtgaggtgcgtaaggaagccctggccaacttaaagatttttctggaggttcagcaaagttatgttaaattaggggcctttggtctcatccttctctgactcttctacccagtcttttcctaaagttcggtgctactccagttgggtgcatcagggagctccgtcagcactcgcatgtgtcgctcaggtggccactcatgcctgcattccatttaatagagtcaattggaatttttagagcataatctttatggatcctcaaagctgactttgccaaagggattgagacccttactaccatcaaatctctgtctctgcttggttaaaaattggctcactattgctttgtagtaacccctgcccaggtattttttcacttgtgaaaataatttgagaaagacctttgttcctagcctgttgggaaaagtttataattttatgaaaattaagtacagaggctgcgatcttagaaataatgaaggtgccatttggctgctccttaatagtgcagacagaaaactgcagtgaacacatgccaaaacatgattgaagcctttggctgaaactttatacatagaaataatgatttgctcataacaggtatcattaactgccactttttatgttttccctagaatttgtagccttgctgcttgcttttcttctgggtggcaaagttactactggaaaaacactataagtacaaagtttttggggttttatctttgctttagaagtggatgtgtacttcacctcttggctgtggaggaacttagttgccaggaaattttttttttttttttcagacggagtttcgctcttgttgcccaggctgggagggcaatggcaccgtcttggctcactgcaacctccgcctcccgggttccagcgattctcctgcctcagccttccgagtagctgggattacaggctcctgccaccacgcctggctaggaaattttttgttgttaatatgacatttggattaatctccagcttcaacagtacttcttttgtccataaatctcaggaatgttttaggcagaaaactggttttaccctgttgataatcagaaggagtgtgctttaggatttattgcataatactattctttaattgcaatcctaggtatctatagcatgagtggccttagtgagtttgttgaagtgcacatgtttttcaagagtaaaatttaagattaaaaatatatcctatatatagatatctagaaaacttggtttgtggtgcacagttaagtgttggatcactaaataaccattgcaggtaccgtttgtgtaacattactcatttctgtatattccttttatgggaagatattttgccatggtaactaaaacttttcagttctacttttatgatgtgaatgaatgctacgttttattaaatattaccaggtcagtactatttttatactttattaagcaacaggggattttagtttaataggctcaaaataaaaagttcttaatggaacagttaaaaacaaaacactaacaatctttacgtgaaaatccccactaatagtgccacaataatttctatagaaatatctaaggtcattaaatagatttttgaagacggttcttcattgtgtcaggatgacctttcatatcattctcaccaacttgtagtgcccaccgttatttgtaactattaaaccatactaagtatgtttgtaaccagcattgtgatatattctgtacttgtattgctaaaaatgaattattgacctaataaatatagtgttcctgc

SEQ ID NO: 721 - protein, 585 aa, Homosapiens
MAAVELEWIPETLYNTAISAVVDNYIRSRRDIRSLPENIQFDVYYKLYQQGRLCQLGSEFCELEVFAKVLRALDKRHLLHHCFQALMDHGVKVASVLAYSFSRRCSYIAESDAAVKEKAIQVGFVLGGFLSDAGWYSDAEKVFLSCLQLCTLHDEMLHWFRAVECCVRLLHVRNGNCKYHLGEETFKLAQTYMDKLSKHGQQANKAALYGELCALLFAKSHYDEAYKWCIEAMKEITAGLPVKVVVDVLRQASKACVVKREFKKAEQLIKHAVYLARDHFGSKHPKYSDTLLDYGFYLLNVDNICQSVAIYQAALDIRQSVFGGKNIHVATAHEDLAYSSYVHQYSSGKFDNALFHAERAIGIITHILPEDHLLLASSKRVKALILEEIAIDCHNKETEQRLLQEAHDLHLSSLQLAKKAFGEFNVQTAKHYGNLGRLYQSMRKFKEAEEMHIKAIQIKEQLLGQEDYEVALSVGHLASLYNYDMNQYENAEKLYLRSIAIGKKLFGEGYSGLEYDYRGLIKLYNSIGNYEKVFEYHNVLSNWNRLRDRQYSVTDALEDVSTSPQSTEEVVQSFLISQNVEGPSC

SEQ ID NO: 722 - DNA, 3163 bp, Homosapiens
agtgcgcaggcgcaactgcctggctctgctcgctccggcgctccggcccagctctcgcggacaagtccagacatcgcgcgcccccccttctccgggtccgccccctcccccttctcggcgtcgtcgaagataaacaatagttggccggcgagcgcctagtgtgtctcccgccgccggattcggcgggctgcgtgggaccggcgggatcccggccagccggccatggcggggctgtactcgctgggagtgagcgtcttctccgaccagggcgggaggaagtacatggaggacgttactcaaatcgttgtggagcccgaaccgacggctgaagaaaagccctcgccgcggcggtcgctgtctcagccgttgcctccgcggccgtcgccggccgcccttcccggcggcgaagtctcggggaaaggcccagcggtggcagcccgagaggctcgcgaccctctcccggacgccggggcctcgccggcacctagccgctgctgccgccgccgttcctccgtggcctttttcgccgtgtgcgacgggcacggcgggcgggaggcggcacagtttgcccgggagcacttgtggggtttcatcaagaagcagaagggtttcacctcgtccgagccggctaaggtttgcgctgccatccgcaaaggctttctcgcttgtcaccttgccatgtggaagaaactggcggaatggccaaagactatgacgggtcttcctagcacatcagggacaactgccagtgtggtcatcattcggggcatgaagatgtatgtagctcacgtaggtgactcaggggtggttcttggaattcaggatgacccgaaggatgactttgtcagagctgtggaggtgacacaggaccataagccagaacttcccaaggaaagagaacgaatcgaaggacttggtgggagtgtaatgaacaagtctggggtgaatcgtgtagtttggaaacgacctcgactcactcacaatggacctgttagaaggagcacagttattgaccagattccttttctggcagtagcaagagcacttggtgatttgtggagctatgatttcttcagtggtgaatttgtggtgtcacctgaaccagacacaagtgtccacactcttgaccctcagaagcacaagtatattatattggggagtgatggactttggaatatgattccaccacaagatgccatctcaatgtgccaggaccaagaggagaaaaaatacctgatgggtgagcatggacaatcttgtgccaaaatgcttgtgaatcgagcattgggccgctggaggcagcgtatgctccgagcagataacactagtgccatagtaatctgcatctctccagaagtggacaatcagggaaactttaccaatgaagatgagttatacctgaacctgactgacagcccttcctataatagtcaagaaacctgtgtgatgactccttccccatgttctacaccaccagtcaagtcactggaggaggatccatggccaagggtgaattctaaggaccatatacctgccctggttcgtagcaatgccttctcagagaattttttagaggtttcagctgagatagctcgagagaatgtccaaggtgtagtcataccctcaaaagatccagaaccacttgaagaaaattgcgctaaagccctgactttaaggatacatgattctttgaataatagccttccaattggccttgtgcctactaattcaacaaacactgtcatggaccaaaaaaatttgaagatgtcaactcctggccaaatgaaagcccaagaaattgaaagaacccctccaacaaactttaaaaggacattagaagagtccaattctggccccctgatgaagaagcatagacgaaatggcttaagtcgaagtagtggtgctcagcctgcaagtctccccacaacctcacagcgaaagaactctgttaaactcaccatgcgacgcagacttaggggccagaagaaaattggaaatcctttacttcatcaacacaggaaaactgtttgtgtttgctgaaatgcatctgggaaatgaggtttttccaaacttaggatataagagggctttttaaatttggtgccgatgttgaactttttttaaggggagaaaattaaaagaaatatacagtttgactttttggaattcagcagttttatcctggccttgtacttgcttgtattgtaaatgtggattttgtagatgttagggtataagttgctgtaaaatttgtgtaaatttgtatccacacaaattcagtctctgaatacacagtattcagagtctctgatacacagtaattgtgacaatagggctaaatgtttaaagaaatcaaaagaatctattagattttagaaaaacatttaaactttttaaaatacttattaaaaaatttgtataagccacttgtcttgaaaactgtgcaactttttaaagtaaattattaagcagactggaaaagtgatgtattttcatagtgacctgtgtttcacttaatgtttcttagagccaagtgtcttttaaacattattttttatttctgatttcataattcagaactaaatttttcatagaagtgttgagccatgctacagttagtcttgtcccaattaaaatactatgcagtatctcttacatcagtagcatttttctaaaaccttagtcatcagatatgcttactaaatcttcagcatagaaggaagtgtgtttgcctaaaacaatctaaaacaattcccttctttttcatcccagaccaatggcattattaggtcttaaagtagttactcccttctcgtgtttgcttaaaatatgtgaagttttccttgctatttcaataacagatggtgctgctaattcccaacatttcttaaattattttatatcatacagttttcattgattatatgggtatatattcatctaataaatcagtgaactgttcctcatgttgctgaatttgtagttgttggtttattttaatggtatgtacaagttgagtatcccttatccaaaatgcttgggaccagaagtgtttcagattttttaaaattttggaatatttgctttatactgagcttttgagtgttcccaatctgaaattcaaaatgctctaatgagcatttcctttgagcatcatgcctgc

SEQ ID NO: 723 - protein, 605 aa, Homosapiens
MAGLYSLGVSVFSDQGGRKYMEDVTQIVVEPEPTAEEKPSPRRSLSQPLPPRPSPAALPGGEVSGKGPAVAAREARDPLPDAGASPAPSRCCRRRSSVAFFAVCDGHGGREAAQFAREHLWGFIKKQKGFTSSEPAKVCAAIRKGFLACHLAMWKKLAEWPKTMTGLPSTSGTTASVVIIRGMKMYVAHVGDSGVVLGIQDDPKDDFVRAVEVTQDHKPELPKERERIEGLGGSVMNKSGVNRVVWKRPRLTHNGPVRRSTVIDQIPFLAVARALGDLWSYDFFSGEFVVSPEPDTSVHTLDPQKHKYIILGSDGLWNMIPPQDAISMCQDQEEKKYLMGEHGQSCAKMLVNRALGRWRQRMLRADNTSAIVICISPEVDNQGNFTNEDELYLNLTDSPSYNSQETCVMTPSPCSTPPVKSLEEDPWPRVNSKDHIPALVRSNAFSENFLEVSAEIARENVQGVVIPSKDPEPLEENCAKALTLRIHDSLNNSLPIGLVPTNSTNTVMDQKNLKMSTPGQMKAQEIERTPPTNFKRTLEESNSGPLMKKHRRNGLSRSSGAQPASLPTTSQRKNSVKLTMRRRLRGQKKIGNPLLHQHRKTVCVC

SEQ ID NO: 724 - DNA, 3514 bp, Homosapiens
tgagcctagagctggagactagcgttaaccggcggggcggccggttttatgaatgaagctatggctacagattccccaagaagacccagtcgttgtactggtggagttgtggttcgcccccaggctgtcacaaagcagtcctacatggaaagtgttgtgacttttctgcaggatgttgtgccccaggcttacagtggaacacctctaacagaagaaaaggagaaaatagtctgggtcagatttgaaaatgcagatttaaatgatacatcaagaaatctggaatttcatgaaatacatagtactgggagtgaaccgcctttgttgattatgattggctacagtgatggaatgcaggtctggagcatccctatcagtggcgaagcgcaagagctcttctctgttcgacatggcccaattcgagcggctaaaatcttgcctgctccacagtttggtgctcaaaaatgtgataactttgctgaaaaaagacccctccttggtgtttgtaagagcattggatcttctggcacaagcccaccgtactgttgtgtggatctgtattcacttcgtactggggagatggtcaagtccattcaatttaagacacctatttatgatctccattgcaataaacggatccttgtcgtagtcttgcaggagaaaattgctgcctttgatagctgtactttcacgaagaaattctttgttacaagctgctatccatgtccagggccaaacatgaatcctattgctcttgggagccgctggcttgcttatgcagaaaacaagttgattcgatgtcatcagtcccgtggtggagcctgtggagacaacattcagtcttatactgccacagtcattagtgctgctaaaacattgaaaagtggcctgacaatggtagggaaagtggtgactcagctgacaggcacactgccttcaggtgtgacagaagatgatgttgccatccacagtaattcacggcggagtcctttggtcccaggcatcatcacagttattgacaccgaaaccgttggagagggccaggtgcttgtgagtgaggattctgacagtgatggcattgtggcccacttccctgcccatgagaagccagtgtgctgcatggcttttaatacaagtggaatgcttctagtcacaacagacacccttggccatgactttcatgtcttccaaattctgactcatccttggtcctcatcacaatgtgctgtccaccatctgtatactcttcacaggggagaaactgaagccaaagtacaggacatctgcttcagccatgactgtcgctgggttgtggtcagtactctccggggtacttcccacgttttccccatcaacccttatggtggccagccttgtgttcgtacacatatgtcaccacgagtagtgaatcgcatgagccgtttccagaaaagtgctggactggaagagattgaacaagaactgacgtctaagcaaggaggtcgctgtagccctgttccaggtctatcaagcagcccttctgggtcacccttgcatgggaaactgaacagccaagactcctataacaattttaccaacaacaaccctggcaaccctcggctctctcctcttcccagcttgatggtagtgatgcctcttgcacaaatcaagcagccaatgacattggggaccatcaccaaacgaaccggcaaagttaaacctcctccacaaatttcacccagcaaatcgatgggcggagaattttgtgtggctgctatcttcggaacatccaggtcatggtttgcaaataatgcaggtctgaaaagagaaaaagatcagtccaaacaagttgtagttgagtccctgtacattatcagttgctatggcaccttagtggaacacatgatggagccgcgacccctcagcactgcacccaagattagtgacgacacaccactggaaatgatgacatcgcctcgagccagctggactctggttagaacccctcaatggaatgaattgcagccaccgtttaatgcaaaccaccctctgctcctcgctgcagatgcagtacagtattatcagttcctgcttgctggcctggttccccctggaagtcctgggcccattactcgacatgggtcttacgacagtttagcttctgaccatagtggacaggaagatgaagaatggctttcccaggttgaaattgtaacacacactggaccccatagacgtctgtggatgggtccacagttccagttcaaaaccatccatccctcaggccaaaccacagttatctcatccagttcatctgtgttgcagtctcatggtccgagtgacacgccacagcctcttttggattttgatacagatgatcttgatctcaacagtctcaggatccagccagtccgctctgaccccgtcagcatgccagggtcatcccgtccagtctctgatcgaaggggagtttccacagtgattgatgctgcctcaggtacctttgacaggagcgtgaccctgctggaggtgtgcgggagctggcctgagggcttcgggctgcggcacatgtcctccatggagcacacggaggagggcctccgggagcgacttgccgacgccatggccgagtcacctagccgggacgtcgtgggatccggaacagaacttcagcgagagggaagcatcgagactctgagtaacagctcaggctccaccagcggcagcataccaagaaactttgatggctaccgatctccgctgcccaccaatgagagccagcccctcagcctcttcccgactggcttcccgtaggtaccagcaacctgcttctgactggccagccccctcccctgctggaggaggggagaagccccgctctggtcctacccttcagtctctgctcttccttcatcaaccaccttccccaagcttagtgacagcagccgcccatcctacctggatggagaagagacccttctccaagcacctcagcgcacttgccctctgccacacctgtcggtggaggctgtggccaggagagactgtagaagctcggtccctgtgtatgtttgcatatgacatcctgcattggatccgcttttgtattttttaaccatacccacggtggggcgggtggggggagcctggaacagtgaccagatctgggggcctgagtggggacagagttgatcgtccacctggccattttgaccctgagtggacagtcacagcctcagctcatgtctggctgtgacacacactgcccccagcttcccttggtcagccccactccagcacggggtgaacggaggcccagagtactagggaaggaggaagggaggacatgcctcttcttcctcctttctttccccatctgttcctgggaagagtttgtctttcttatctttaagcccctttaccctggtcctgtactgatcagtgaaggaaaccgtggttactgaggccctgttgaaaagtgcacgtcttgtccaataaatcacgctgcagttggtgtccaaaaaaaaaaaaaaaaaaa

SEQ ID NO: 725 - protein, 913 aa, Homosapiens
MNEAMATDSPRRPSRCTGGVVVRPQAVTKQSYMESVVTFLQDVVPQAYSGTPLTEEKEKIVWVRFENADLNDTSRNLEFHEIHSTGSEPPLLIMIGYSDGMQVWSIPISGEAQELFSVRHGPIRAAKILPAPQFGAQKCDNFAEKRPLLGVCKSIGSSGTSPPYCCVDLYSLRTGEMVKSIQFKTPIYDLHCNKRILVVVLQEKIAAFDSCTFTKKFFVTSCYPCPGPNMNPIALGSRWLAYAENKLIRCHQSRGGACGDNIQSYTATVISAAKTLKSGLTMVGKVVTQLTGTLPSGVTEDDVAIHSNSRRSPLVPGIITVIDTETVGEGQVLVSEDSDSDGIVAHFPAHEKPVCCMAFNTSGMLLVTTDTLGHDFHVFQILTHPWSSSQCAVHHLYTLHRGETEAKVQDICFSHDCRWVVVSTLRGTSHVFPINPYGGQPCVRTHMSPRVVNRMSRFQKSAGLEEIEQELTSKQGGRCSPVPGLSSSPSGSPLHGKLNSQDSYNNFTNNNPGNPRLSPLPSLMVVMPLAQIKQPMTLGTITKRTGKVKPPPQISPSKSMGGEFCVAAIFGTSRSWFANNAGLKREKDQSKQVVVESLYIISCYGTLVEHMMEPRPLSTAPKISDDTPLEMMTSPRASWTLVRTPQWNELQPPFNANHPLLLAADAVQYYQFLLAGLVPPGSPGPITRHGSYDSLASDHSGQEDEEWLSQVEIVTHTGPHRRLWMGPQFQFKTIHPSGQTTVISSSSSVLQSHGPSDTPQPLLDFDTDDLDLNSLRIQPVRSDPVSMPGSSRPVSDRRGVSTVIDAASGTFDRSVTLLEVCGSWPEGFGLRHMSSMEHTEEGLRERLADAMAESPSRDVVGSGTELQREGSIETLSNSSGSTSGSIPRNFDGYRSPLPTNESQPLSLFPTGFP

SEQ ID NO: 726 - DNA, 5006 bp, Homosapiens
atggtctttcagttgaagtgtggttcagggccagtgtatattagtggacagcacttagtatctgtggaggaagatgcagagtcagaagatgaagaagaggaggatgtgaaactcttaagtatatctggaaagcaatctgccctggaggtggaagcaagattccacaaaaaagaaaaacaactgacggcatttattgccaatgacaaggttcaagattttaagcaaaatttagaattttgggagacttccgtatactactgtgagactgacagcttcccaatacataaagctgatgagattgatggtgttattgagaaaaataaatttttgccgtccccagtgacgtcacgggcgcggctccgctccttggccaatcacgcggccggatcccggggaaacccggggcggtggcggcggcctgggcgcgtgcgcgaggtctccgcgtggctatataaacatggctggcgtggccgcgcggcggggccgtgccaatcgcgcgtagggggctgtgggcactcgggcccaggctcgcgcggacgagaggaaggtccgggacgcgcgtgtcctgccgtgcagcgggcgcccgtcactgacttcgctgctgcggcccccgcgcctctccccagcgatgctgtggaacccgaaccgcaccggagtcggctgccgcgcgccaagcctcccctcacctctgctcccggaaccgcagcgccaaagctgccgctgagcccctgggggatgcccgccggcctcaccgaacccgccggcgccgctcccccggctgctgtgagcgcctcggggaccgtgaccatggccccggccggggcgctgccggtgcgggtggagagcactccggtggccctgggcgccgtgactaaggctcctgtcagcgtctgcgtggagcccacggcgtcccagcccctgcggtcccccgtggggaccctggtgaccaaagtggctccggtcagcgcccctcctaaagtcagcagcggccctaggctgcctgctcctcagatagtcgccgtgaaagcccccaacaccacgacaatccagtttcctgctaatttgcagcttcctccaggaaccgttttgattaaaagtaacagtggtccgttgatgttggtatctcctcagcaaactgtaacaagagccgagaccacaagtaacataacctcaaggccagcagtaccagcgaatcctcaaacagtcaaaatctgtacagtgccgaactctagctcacaattaatcaagaaagtggcagtgacacctgttaaaaaattggcacaaataggaactactgtggtaaccactgttccgaagccttcctcagtacaatctgtggctgtgccaaccagtgtcgtcacagttactcctggaaagccattgaatactgtaactaccctgaagccttcaagtttgggagcatcatccactccttcaaatgagcccaatcttaaagcagagaactcagcagctgttcagattaatctttctccgacaatgctagaaaatgtgaagaaatgcaagaacttccttgcaatgttaataaaactagcatgtagtggatcacagtccccagaaatggggcaaaatgtgaagaagctggtggaacaacttttggatgcaaaaatcgaagcagaagaatttactaggaaactgtatgttgaactcaagtcttcacctcagcctcacctggttccttttcttaagaaaagcgtggttgccttacgacaacttctgcctaactcccagagcttcatccagcaatgtgttcagcagacttctagtgacatggtcattgctacctgtactacaacagtaacaacttctcctgtggtgacaactacagtgtcctcaagccagtctgaaaagtcaattattgtttctggagcaacagcacccagaactgtgtcagtgcaaactttgaacccacttgctggtccagtgggagcaaaagctggagttgtgacacttcattctgtgggcccaactgctgcaacaggaggaacaacagctggaactggtttgcttcagacttcaaaaccacttgtgacatctgtggcaaacacagtgaccacggtctcactgcaacctgaaaagccagttgtctctggaacagcagtaacactgtcccttccagcagtaacttttggagaaacttcaggtgcagctatttgtcttccatctgtgaaacctgttgtttcttctgctgggaccacatctgacaagcctgttattgggactccagttcaaatcaaacttgcccagccgggccctgtcctttcacaaccagctgggattccacaggcagttcaagtcaagcaactattctcattgtttcaggtagttcagcagccttcaggaggcaatgaaaaacaagtgaccacaatttcacattcctcaacattgaccattcagaaatgtggacagaagacgatgccagtgaacaccataatacctactagtcagtttcctccagcttccattctaaagcaaattactctgcctggaaataaaattctgtcacttcaagcatctcctactcagaaaaatagaataaaagagaatgtaacatcatgcttccgagatgaggatgacatcaatgatgtgacttctatggcaggggtcaaccttaatgaagaaaatgcctgcatcttagcaacaaactctgaattggttggcacactcattcagtcatgtaaagatgaaccatttctttttattggagctctacaaaagagaattttagacattggtaaaaagcatgacattacagaacttaactctgatgctgtgaacttgatctcccaagcaacacaggaacgactacgaggccttctagaaaaactgactgcaattgctcagcatcgaatgactacttacaaggcaagtgaaaattacatcctgtgtagtgataccaggtcacagctcaaatttcttgaaaagctggatcaattggagaagcagagaaaggatttggaagaaagagaaatgttacttaaggcagccaagagtcgttctaataaagaagatccagaacagctgagattaaagcagaaagccaaagagttacagcaattggaacttgcacagatacagcatagagacgctaatctcacagctcttgcagctattggaccaaggaagaagagaccactagaatctggaattgagggcttaaaagacaaccttcttgcttctgggacatccagcctgacagccaccaaacagttgcatcgtccaagaatcacgagaatctgcctcagggacttgatattttgtatggaacaggaacgggagatgaagtattctcgagctctatacctggcccttctgaagtgaccactccactcttccatccagatccttgctatttactgccaaagaagacacaaagcattgttgcactgtcctgaaatttcaatttctggaaaataatcaccaacatgaaagagcattgtttacagttagaaactttattaactcttacctatccatctcatgggactcttacagactcagattcatctttgtcttctgaaaatcagttatgaaatacactttgcacagaattaggcatctgcctatctgtgcattaaattaaagcaagttaaggccctatttgttactacctgcctcatttgccaaattgtagcaggtgaggtgtccttccctaatacagcatgcattgagatgcaggagaaaggaagaggcataagaaaatacaagaatgactatttcattctatattgaacctgtcccaaagtggtaggttttctgggctggaatcagaagttgcttagctaactatgacagtcaccctctgtacgtgacaggccactgtggtgactttggtcggctgagttccagtgttgtcaaaacaagacaaatggggatagattgtgcctggggttgctaattctctgcttcatatcaccatatgccgtttctggtaccaagtgaggggacatgcttgtcagggaaaccttaaaattgaatctactgatatatcttgttgaaaaaatggaaaaggtgcaaagtattagaaggaacgttagggcgttgctttcaaactgatgaggggaatgtgaaaatggtatcataaaacaggaaatgtgcttcatatgcccaagaggggaagaggtggaatcggaactccaaaacaactggtacatgttttgttgatgggcaaaaaaaatcacagcacaaccagaaaggagaatgtaccagatgttttcaaattagagtatttcaaaaggaaaatgttattttttgttttgtattgttttaaatcccaaggatagtttttatagttccttctgtcataatatattttagttatcctaatttttaagcatgttggcacatttaaaaaatcctaattgatgatgagaaatttttaacaataggactttatgttggattctgtacttaaaaggtactgtcaatatctcactcttggggatatgagctctaaatatgagaagcaagttatatgtgttcacctgaggaagaagctgacggacaaagcaaaccctctttaaaaaaaaaaaaaagaaaattccacgtgtgtggaatacagccggtgaaaaataatcactgtagttagaatcacatacagaaaaaaaatgattgaatcctccaagaaggtatttcaaaaatgggaaatgctatacttataagaattgaaggaaaaaaaaaaaaacacctcacgtatgttattcttcatcctgttcttcccattgggactgttatggccatattctacagtatagtaaattttaaattggccacatttttttttgtttcagcaagttatgtaaaatgctataaattatgtgtatgttaaaggagtactttaagaagagatctttatccaaagttgtttttgtatatttaaatgcttacctttattttttgtaaagtgcagcatactcatttgtgtataatcttactgatcagatgtttaaaattattccaaatacttcattaaaataattattttatta

SEQ ID NO: 727 - protein, 1112 aa, Homosapiens
MVFQLKCGSGPVYISGQHLVSVEEDAESEDEEEEDVKLLSISGKQSALEVEARFHKKEKQLTAFIANDKVQDFKQNLEFWETSVYYCETDSFPIHKADEIDGVIEKNKFLPSPVTSRARLRSLANHAAGSRGNPGRWRRPGRVREVSAWLYKHGWRGRAAGPCQSRVGGCGHSGPGSRGREEGPGRACPAVQRAPVTDFAAAAPAPLPSDAVEPEPHRSRLPRAKPPLTSAPGTAAPKLPLSPWGMPAGLTEPAGAAPPAAVSASGTVTMAPAGALPVRVESTPVALGAVTKAPVSVCVEPTASQPLRSPVGTLVTKVAPVSAPPKVSSGPRLPAPQIVAVKAPNTTTIQFPANLQLPPGTVLIKSNSGPLMLVSPQQTVTRAETTSNITSRPAVPANPQTVKICTVPNSSSQLIKKVAVTPVKKLAQIGTTVVTTVPKPSSVQSVAVPTSVVTVTPGKPLNTVTTLKPSSLGASSTPSNEPNLKAENSAAVQINLSPTMLENVKKCKNFLAMLIKLACSGSQSPEMGQNVKKLVEQLLDAKIEAEEFTRKLYVELKSSPQPHLVPFLKKSVVALRQLLPNSQSFIQQCVQQTSSDMVIATCTTTVTTSPVVTTTVSSSQSEKSIIVSGATAPRTVSVQTLNPLAGPVGAKAGVVTLHSVGPTAATGGTTAGTGLLQTSKPLVTSVANTVTTVSLQPEKPVVSGTAVTLSLPAVTFGETSGAAICLPSVKPVVSSAGTTSDKPVIGTPVQIKLAQPGPVLSQPAGIPQAVQVKQLFSLFQVVQQPSGGNEKQVTTISHSSTLTIQKCGQKTMPVNTIIPTSQFPPASILKQITLPGNKILSLQASPTQKNRIKENVTSCFRDEDDINDVTSMAGVNLNEENACILATNSELVGTLIQSCKDEPFLFIGALQKRILDIGKKHDITELNSDAVNLISQATQERLRGLLEKLTAIAQHRMTTYKASENYILCSDTRSQLKFLEKLDQLEKQRKDLEEREMLLKAAKSRSNKEDPEQLRLKQKAKELQQLELAQIQHRDANLTALAAIGPRKKRPLESGIEGLKDNLLASGTSSLTATKQLHRPRITRICLRDLIFCMEQEREMKYSRALYLALLK

SEQ ID NO: 728 - DNA, 1757 bp, Homosapiens
gcacgagccaccacctgcctcaccagtagctgggactacagctcccgtcactagctttttctcctcaagcctgcactgcacaccaactgggacggagggtgcagatgaataaaggcaaatccatcaccaaaagacagtcggcccaatatgtcaagacctctgatcactagatcccctgcatctccactgaacaaccaaggcatccctactccagcacaactcacaaaatccaatgcgcctgtccacattgatgtgggcggccacatgtacaccagcagcctggccaccctcaccaaataccctgaatccagaatcggaagactttttgatggtacagagcccattgttttggacagtctcaaacagcactatttcattgacagagatggacagatgttcagatatatcttgaattttctacgaacatccaaactcctcattcctgatgatttcaaggactacactttgttatatgaagaggcaaaatattttcagcttcagcccatgttgttggagatggaaagatggaagcaggacagagaaactggtcgattttcaaggccctgtgagtgcctcgtcgtgcgtgtggccccagacctcggagaaaggatcacgctaagcggtgacaaatccttgatagaagaagtatttccagagatcggcgacgtgatgtgtaactctgtcaatgcaggctggaatcacgactcgacgcacgtcatcaggtttccactaaatggctactgtcacctcaactcagtccaggtcctcgagaggttgcagcaaagaggatttgaaatcgtgggctcctgtgggggaggagtagactcgtcccagttcagcgaatacgtccttcggcgggaactgaggcggacgccccgtgtaccctccgtcatccggataaagcaagagcctctggactaaatggacatatttcttatgcaaaaaggaaaacacacacaaccaataactcaaacaaaaaagggacatttatgtgcagttgggacagcaaaccaagtcctggacgtaaaatcgaataaaagacacatttatatccaatagagaccacacctgtattcatatgggaacaattggaatagtgatatcctcaaggtgtaaaaaatatataaatatatatatatatgtcaaaaggtaggaaatgcaaaaaaaaaaaaaaacacgggtgacagccgcagttggtgctgtgaaagtggcgagaagtgtcctgggcctcccgaggcctctgacaaataaacaagccatgagtggtgaggacacagtctccttacagtttccattgccaacaacagccatccatatttcttttttcctttgtctttctttttcctttttttttaaaaaaacaaaacaaacaaaacaccttgaatcaagtttgtttgtatatggaggttccacgtctttctttaggcagggaccaggcaggacttcagaaaaaccctcatgagcacattgcaaagatgttagacatgaaattttaaatgtagtttgtacagaagtcacacttttttgtccacctcacagatgtgaactttactttgttttaaaactgatcagttttgccaaggggccagaattattccttgttagaattgctccagttcaagtctgctgctttcctacaatttttcaaattttataatgtattaaatacaataaactctgtttaaaaaataaggtctgtgtgaaacacacatgtgggggtgaggctggattaaagtgaaattttttctttttgaaaa

SEQ ID NO: 729 - protein, 257 aa, Homosapiens
MSRPLITRSPASPLNNQGIPTPAQLTKSNAPVHIDVGGHMYTSSLATLTKYPESRIGRLFDGTEPIVLDSLKQHYFIDRDGQMFRYILNFLRTSKLLIPDDFKDYTLLYEEAKYFQLQPMLLEMERWKQDRETGRFSRPCECLVVRVAPDLGERITLSGDKSLIEEVFPEIGDVMCNSVNAGWNHDSTHVIRFPLNGYCHLNSVQVLERLQQRGFEIVGSCGGGVDSSQFSEYVLRRELRRTPRVPSVIRIKQEPLD

SEQ ID NO: 730 - DNA, 2260 bp, Homosapiens
gaaagctggtgtggagggagaagcgagtgtggtccggagaaagaaggcgtggagaagagggagggagcgagagcgagagaataaatatataaataaatacgagaacgaaatccactccgcagtctccgggctcggaaactttggccccgagcgccagagcgccagagcgcgagagcgcggcgctcgccactctgaggctggcggcctcgattccggccgcgttcccccggcccccctccgccgcggggcctggtctccgggttctgccaggcgcatcagcccgcacaacttctggccgaggccagccggcagaggcggacttggggttggagtgtttgtttgtttgaacttcctcgtcgtcgccaccttccctccccccaacctccaccccacctcacccccctccccagcttctggacgcgtttgactgcagccaggggtggggggtgggggtagggagtgtgtgtggaggggagggagaagaggttaaaaaaaagaagacgaagaagacggaaagaaagagatcgcagcaggggtgaagggagcggacgggaagcgatttttgccgactttggattcgtccccggcgtgcgcaagaatggcggcccttcccggcacggtaccgagaatgatgcggccggctccggggcagaactacccccgcacgggattccctttggaagtgtccaccccgcttggccaaggccgggtcaatcagctgggaggggtcttcatcaatgggcgacccctgcctaaccacatccgccacaagatagtggagatggcccaccatggcatccggccctgtgtcatctcccgacagctgcgtgtctcccacggctgcgtctccaagattctttgccgctaccaggagaccgggtccatccggcctggggccatcggcggcagcaagcccagacaggtggcgactccggatgtagagaaaaagattgaggagtacaagagggaaaacccaggcatgttcagctgggagatccgggacaggctgctgaaggatgggcactgtgaccgaagcactgtgccctcaggtttagtgagttcgattagccgcgtgctcagaatcaagttcgggaagaaagaggaggaggatgaagcggacaagaaggaggacgacggcgaaaagaaggccaaacacagcatcgacggcatcctgggcgacaaagggaaccggctggacgagggctcggatgtggagtcggaacctgacctcccactgaagcgcaagcagcgacgcagtcggaccacattcacggccgagcagctggaggagctggagaaggcctttgagaggacccactacccagacatatacacccgcgaggagctggcgcagaggaccaagctgacagaggcgcgtgtgcaggtctggttcagtaaccgccgcgcccgttggcgtaagcaggcaggagccaaccagctggcggcgttcaaccaccttctgccaggaggcttcccacccaccggcatgcccacgctgcccccctaccagctgccggactccacctaccccaccaccaccatctcccaagatgggggcagcactgtgcaccggcctcagcccctgccaccgtccaccatgcaccagggcgggctggctgcagcggctgcagccgccgacaccagctctgcctacggagcccgccacagcttctccagctactctgacagcttcatgaatccggcggcgccctccaaccacatgaacccggtcagcaacggcctgtctcctcaggtgatgagcatcttgggcaaccccagtgcggtgcccccgcagccacaggctgacttctccatctccccgctgcatggcggcctggactcggccacctccatctcagccagctgcagccagcgggccgactccatcaagccaggagacagcctgcccacctcccaggcctactgcccacccacctacagcaccaccggctacagcgtggaccccgtggccggctatcagtacggccagtacggccagagtgagtgcctggtgccctgggcgtcccccgtccccattccttctcccacccccagggcctcctgcttgtttatggagagctacaaggtggtgtcagggtggggaatgtccatttcacagatggaaaaattgaagtccagccagatggaacagttcacctaaaatgacactgagttgggcaaaacccaggacatctcctggctaagcctctgcttccgtactatggctccaacagaaataaaatacacaacacaaatatca

SEQ ID NO: 731 - protein, 520 aa, Homosapiens; identical to SEQ ID NO: 2

SEQ ID NO: 732 - DNA, 2521 bp, Homosapiens
catggggcccagggcaaagaccatctcctccctgttcttcctcctatgggtcctggctgagccggctgagaactcggacttctacctgcctggggattacctcctgggtggcctcttctccctccatgccaacatgaagggcattgttcaccttaacttcctgcaggtgcccatgtgcaaggagtatgaagtgaaggtgataggctacaacctcatgcaggccatgcgctttgcggtggaggagatcaacaatgacagcagcctgctgcctggtgtgctgctgggctatgagatcgtggatgtgtgctacatctccaacaatgtccagccggtgctctacttcctggcacacgaggacaacctccttcccatccaagaggactacagtaactacatttcccgtgtggtggctgtcattggccctgacaactccgagtctgtcatgactgtggccaacttcctctccctatttctccttccacagatcacctacagcgccatcagcgatgagctgcgagacaaggtgcgcttcccggctttgctgcgtaccacacccagcgccgaccaccacatcgaggccatggtgcagctgatgctgcacttccgctggaactggatcattgtgctggtgagcagcgacacctatggccgcgacaatggccagctgcttggcgagcgcgtggcccggcgcgacatctgcatcgccttccaggagacgctgcccacactgcagcccaaccagaacatgacgtcagaggagcgccagcgcctggtgaccattgtggacaagctgcagcagagcacagcgcgcgtcgtggtcgtgttctcgcccgacctgaccctgtaccacttcttcaatgaggtgctgcgccagaacttcactggcgccgtgtggatcgcctccgagtcctgggccatcgacccggtcctgcacaacctcacggagctgcgccacttgggcaccttcctgggcatcaccatccagagcgtgcccatcccgggcttcagtgagttccgcgagtggggcccacaggctgggccgccacccctcagcaggaccagccagagctatacctgcaaccaggagtgcgacaactgcctgaacgccaccttgtccttcaacaccattctcaggctctctggggagcgtgtcgtctacagcgtgtactctgcggtctatgctgtggcccatgccctgcacagcctcctcggctgtgacaaaagcacctgcaccaagagggtggtctacccctggcagctgcttgaggagatctggaaggtcaacttcactctcctggaccaccaaatcttcttcgacccgcaaggggacgtggctctgcacttggagattgtccagtggcaatgggaccggagccagaatcccttccagagcgtcgcctcctactaccccctgcagcgacagctgaagaacatccaagacatctcctggcacaccatcaacaacacgatccctatgtccatgtgttccaagaggtgccagtcagggcaaaagaagaagcctgtgggcatccacgtctgctgcttcgagtgcatcgactgccttcccggcaccttcctcaaccacactgaagatgaatatgaatgccaggcctgcccgaataacgagtggtcctaccagagtgagacctcctgcttcaagcggcagctggtcttcctggaatggcatgaggcacccaccatcgctgtggccctgctggccgccctgggcttcctcagcaccctggccatcctggtgatattctggaggcacttccagacacccatagttcgctcggctgggggccccatgtgcttcctgatgctgacactgctgctggtggcatacatggtggtcccggtgtacgtggggccgcccaaggtctccacctgcctctgccgccaggccctctttcccctctgcttcacaatctgcatctcctgtatcgccgtgcgttctttccagatcgtctgcgccttcaagatggccagccgcttcccacgcgcctacagctactgggtccgctaccaggggccctacgtctctatggcatttatcacggtactcaaaatggtcattgtggtaattggcatgctggccacgggcctcagtcccaccacccgtactgaccccgatgaccccaagatcacaattgtctcctgtaaccccaactaccgcaacagcctgctgttcaacaccagcctggacctgctgctctcagtggtgggtttcagcttcgcctacatgggcaaagagctgcccaccaactacaacgaggccaagttcatcaccctcagcatgaccttctatttcacctcatccgtctccctctgcaccttcatgtctgcctacagcggggtgctggtcaccatcgtggacctcttggtcactgtgctcaacctcctggccatcagcctgggctacttcggccccaagtgctacatgatcctcttctacccggagcgcaacacgcccgcctacttcaacagcatgatccagggctacaccatgaggagggactag

SEQ ID NO: 733 - protein, 839 aa, Homosapiens
MGPRAKTISSLFFLLWVLAEPAENSDFYLPGDYLLGGLFSLHANMKGIVHLNFLQVPMCKEYEVKVIGYNLMQAMRFAVEEINNDSSLLPGVLLGYEIVDVCYISNNVQPVLYFLAHEDNLLPIQEDYSNYISRVVAVIGPDNSESVMTVANFLSLFLLPQITYSAISDELRDKVRFPALLRTTPSADHHIEAMVQLMLHFRWNWIIVLVSSDTYGRDNGQLLGERVARRDICIAFQETLPTLQPNQNMTSEERQRLVTIVDKLQQSTARVVVVFSPDLTLYHFFNEVLRQNFTGAVWIASESWAIDPVLHNLTELRHLGTFLGITIQSVPIPGFSEFREWGPQAGPPPLSRTSQSYTCNQECDNCLNATLSFNTILRLSGERVVYSVYSAVYAVAHALHSLLGCDKSTCTKRVVYPWQLLEEIWKVNFTLLDHQIFFDPQGDVALHLEIVQWQWDRSQNPFQSVASYYPLQRQLKNIQDISWHTINNTIPMSMCSKRCQSGQKKKPVGIHVCCFECIDCLPGTFLNHTEDEYECQACPNNEWSYQSETSCFKRQLVFLEWHEAPTIAVALLAALGFLSTLAILVIFWRHFQTPIVRSAGGPMCFLMLTLLLVAYMVVPVYVGPPKVSTCLCRQALFPLCFTICISCIAVRSFQIVCAFKMASRFPRAYSYWVRYQGPYVSMAFITVLKMVIVVIGMLATGLSPTTRTDPDDPKITIVSCNPNYRNSLLFNTSLDLLLSVVGFSFAYMGKELPTNYNEAKFITLSMTFYFTSSVSLCTFMSAYSGVLVTIVDLLVTVLNLLAISLGYFGPKCYMILFYPERNTPAYFNSMIQGYTMRRD

SEQ ID NO: 734 - DNA, 2475 bp, Homosapiens
ggggcagtgttctcccaggataagtgagtggccaggccgcagccctggtgctgtgctccgggtgtcctgtccgtgtccccatccccacctcctggacgtggttcccagtaataatgctgcccctaccttctctctgtcccctcccctcagcccagacaggcagccagggctcgccacatgggcccacagcagcaggctctttgttgccggtactggtggtgccggtgccagggtgccactggggaccagtggatctgaacctctaggggcagggctaggaattggtgtcttcgactggctctgcgggatctggtgttgccccactgagtgaggtgattgtcccatgctacaaagcagggcaggccaggggctgcagaggcaggattcgaacctgggtcacatgaggctaaacttgaggcttcgcctcttctttcctccgtggcactggttgcccccatgtctgcctctatgagaaagtggaggtgagcttggagagggaggaagggtgtgggcctgggagctggagtttccgctgctcctgagggacaggaacattggaccaggacaggccactcccttcaacttcgcagtagccctgtaacgaggcgtgccaagcccctccccagaggaggaagctgggctcagagactgggtaacctgaccgaaggcccacagccaacagctggcagcatccctcatccctgactcggcctcctgttgaacctggaaagccagtgtgggctggagcaggggtgttgaggctggagctggggctggaggggagatgagctggttgctctgtcaccactgctctgctttgtagggacgtcgtgcaggaggccacaaaggtgctgaggaatgctgccggcaacttctacatcaacgacaagtccactggctcgatagtgggccagcagccctttgggggggcccgagcctctggaaccaatgacaagccagggggcccacactacatcctgcgctggacgtcgccgcaggtcatcaaggagacacataagcccctgggggactggagctacgcgtacatgcagtgagcccctctcgggctccaccgtccagctgtctgtccgtccaggtggccgacctcactgcacagaccccactccagcccctccaccccttcttcatgcacagctgcctttctataatccgggcttgactcccttcttaccactgtattctggcctctcccatgcctcaggctctggtttgagatcgtgctggggaggaacatggccactaccccttatcccatcggccatgtgggaggtatgaccctggtgcctggcaggttctccctctgccctccactgggcccagtggctcagggacctggggaaaggagatggagcagctcttgggatcctttggggaaaaggaggccattctgggccccttggcaaacctcaccactcacagaggctcctggccttgatccctgcccctccaggtgtccagggtaaagtgtaactcagactgacctgtggggcacagggggcaccagctggccttgccctctctggtctgggctgtctaccttcctcactgtatctttgcccagacccacctgggccagtaggcccctgtccccagccacacaccttagatgctggcatgccttactccaggtgcctgtgtttggccgaggcctgtgtgattcccggtctgcaccacatggcggggttggggggccgctggaggccacctgccaaggcgtgggatgggatggtcctgccggtttaggccgtgattctggaaaaccttggatgggccttcgtcctatgtcagccttccctttgatcctcaggccctacctgtagagacctccactcctagagccagtctcagggtctgggatttccctgcaggagctcagccaccactgtgccatggtgacacaggccaaggcagacattggccctcccttctcccagcccccagaggcctggccttgggttcgtcagcatgggccgaggacgttgcctgtagaatcctcctctgcctgggagtggctctgtgtggaccagtccctcactggcccattctttttttgacgcagccaatctgtgaccacgattcctcccacagatgcctcctgcttggattctgagtggtcagagatctgtaaagcatgactttcaaggatggttcttaggggactgtgaaagtgttgggtcttcctccaggatgcctgcatgggaccccacccggagctggtgtggccattccccaagtgccactggcccatggatgggggtgggtgctggtgccagctgggctgggtgtgggttctgtgtccttccaggatatgtgtcatttcccatgaggggccggggcaggtggctgggtgggggcacaggctggagtattcttagttctactggttctacactgtgaggtggcaatgggatttgctcagatgccacccaataaaatgcctgttacttaatcaca

SEQ ID NO: 735 - protein, 115 aa, Homosapiens
MTSQGAHTTSCAGRRRRSSRRHISPWGTGATRTCSEPLSGSTVQLSVRPGGRPHCTDPTPAPPPLLHAQLPFYNPGLTPFLPLYSGLSHASGSGLRSCWGGTWPLPLIPSAMWEV

SEQ ID NO: 736 - DNA, 3356 bp, Homosapiens
atttcaggacttcgctttcgggttcccttgtcctgtgttgtgtaatgcccccgttatggcactagaaatattttttattagccgaagctaaatatagtgggactttggctgatcccgagctcggaggacagccggggtgatccgtttccccccgaggatcgaggtggtgcgctctggacggggttgtgcattctcgccgcgcccgggcggacgatccagcgaacagccccgcttctaacccgagatgctgctgccggcgcccgcgctccgccgcgccctgctgtcccgcccctggaccggggccggcctgcggtggaagcacacctcctccctgaaggtggccaacgagcccgtcttagccttcacgcagggcagccctgagcgagatgccctgcaaaaggccttgaaggacctgaagggccggatggaagccatcccatgcgtggtgggggatgaggaggtgtggacgtcggacgtgcagtaccaagtgtcgccttttaaccatggacataaggtggccaagttctgttatgcagacaagagcctgctcaacaaagccattgaggctgccctggctgcccggaaagagtgggacctgaagcctattgcagaccgggcccagatcttcctgaaggcggcagacatgctgagtgggccgcgcagggctgagatcctcgccaagaccatggtgggacagggtaagaccgtgatccaagcggagattgacgctgcagcggaactcatcgacttcttccggttcaatgccaagtatgcggtggagctggaggggcagcagcccatcagcgtgcccccgagcaccaacagcacggtgtaccggggtctggagggcttcgtggcggccatctcgccctttaacttcactgcaatcggcggcaacctggcgggggcaccggccctgatgggcaacgtggtcctatggaagcccagtgacactgccatgctggccagctatgctgtctaccgcatccttcgggaggctggcctgccccccaacatcatccagtttgtgccagctgatgggcccctatttggggacactgtcaccagctcagagcacctctgtggcatcaacttcacaggcagtgtgcccaccttcaaacacctgtggaagcaggtggcccagaacctggaccggttccacaccttcccacgcctggctggagagtgcggcggaaagaacttccacttcgtgcaccgctcggccgacgtggagagcgtggtgagcgggaccctccgctcagccttcgagtacggtggccagaagtgttccgcgtgctcgcgtctctacgtgccgcactcgctgtggccgcagatcaaagggcggctgctggaggagcacagtcggatcaaagtgggcgaccctgcagaggattttgggaccttcttctctgcagtgattgatgccaagtcctttgcccgtatcaagaagtggctggagcacgcacgctcctcacccagcctcaccatcctggccgggggcaagtgtgatgactccgtgggctactttgtggagccctgcatcgtggagagcaaggaccctcaggagcccatcatgaaggaggagatcttcgggcctgtactgtctgtgtacgtctacccggatgacaagtacaaggagacgctgcagctggttgacagcaccaccagctatggcctcacgggggcagtgttctcccaggataaggacgtcgtgcaggaggccacaaaggtgctgaggaatgctgccggcaacttctacatcaacgacaagtccactggctcgatagtgggccagcagccctttgggggggcccgagcctctggaaccaatgacaagccagggggcccacactacatcctgcgctggacgtcgccgcaggtcatcaaggagacacataagcccctgggggactggagctacgcgtacatgcagtgagcccctctcgggctccaccgtccagctgtctgtccgtccaggtggccgacctcactgcacagaccccactccagcccctccaccccttcttcatgcacagctgcctttctataatccgggcttgactcccttcttaccactgtattctggcctctcccatgcctcaggctctggtttgagatcgtgctggggaggaacatggccactaccccttatcccatcggccatgtgggaggtatgaccctggtgcctggcaggttctccctctgccctccactgggcccagtggctcagggacctggggaaaggagatggagcagctcttgggatcctttggggaaaaggaggccattctgggccccttggcaaacctcaccactcacagaggctcctggccttgatccctgcccctccaggtgtccagggtaaagtgtaactcagactgacctgtggggcacagggggcaccagctggccttgccctctctggtctgggctgtctaccttcctcactgtatctttgcccagacccacctgggccagtaggcccctgtccccagccacacaccttagatgctggcatgccttactccaggtgcctgtgtttggccgaggcctgtgtgattcccggtctgcaccacatggcggggttggggggccgctggaggccacctgccaaggcgtgggatgggatggtcctgccggtttaggccgtgattctggaaaaccttggatgggccttcgtcctatgtcagccttccctttgatcctcaggccctacctgtagagacctccactcctagagccagtctcagggtctgggatttccctgcaggagctcagccaccactgtgccatggtgacacaggccaaggcagacattggccctcccttctcccagcccccagaggcctggccttgggttcgtcagcatgggccgaggacgttgcctgtagaatcctcctctgcctgggagtggctctgtgtggaccagtccctcactggcccattctttttttgacgcagccaatctgtgaccacgattcctcccacagatgcctcctgcttggattctgagtggtcagagatctgtaaagcatgactttcaaggatggttcttaggggactgtgaaagtgttgggtcttcctccaggatgcctgcatgggaccccacccggagctggtgtggccattccccaagtgccactggcccatggatgggggtgggtgctggtgccagctgggctgggtgtgggttctgtgtccttccaggatatgtgtcatttcccatgaggggccggggcaggtggctgggtgggggcacaggctggagtattcttagttctactggttctacactgtgaggtggcaatgggatttgctcagatgccacccaataaaatgcctgttacttaatcaca

SEQ ID NO: 737 - protein, 563 aa, Homosapiens; identical to SEQ ID NO: 8

SEQ ID NO: 738 - DNA, 237 bp, Homosapiens
aggaacatggccactaccccttatcccatcggccatgtgggaggtatgaccctggtgccagctgggctgggtgtgggttctgtgtccttccaggatatgtgtcatttcccatgaggggccggggcaggtggctgggtgggggcacaggctggagtattcttagttctactggttctacactgtgaggtggcaatgggatttgctcagatgccacccaataaaatgcctgttacttaa

SEQ ID NO: 739 - protein, 35 aa, Homosapiens
MATTPYPIGHVGGMTLVPAGLGVGSVSFQDMCHFP

SEQ ID NO: 740 - DNA, 405 bp, Homosapiens
ggagctacgcgtacatgcagtgagcccctctcgggctccaccgtccagctgtctgtccgtccaggtggccgacctcactgcacagaccccactccagcccctccaccccttcttcatgcacagctgcctttctataatccgggcttgactcccttcttaccactgtattctggtgtggccattccccaagtgccactggcccatggatgggggtgggtgctggtgccagctgggctgggtgtgggttctgtgtccttccaggatatgtgtcatttcccatgaggggccggggcaggtggctgggtgggggcacaggctggagtattcttagttctactggttctacactgtgaggtggcaatgggatttgctcagatgccacccaataaaatgcctgttacttaa

SEQ ID NO: 741 - protein, 48 aa, Homosapiens
MGVGAGASWAGCGFCVLPGYVSFPMRGRGRWLGGGTGWSILSSTGSTL

SEQ ID NO: 742 - DNA, 2338 bp, Homosapiens
atttcaggacttcgctttcgggttcccttgtcctgtgttgtgtaatgcccccgttatggcactagaaatattttttattagccgaagctaaatatagtgggactttggctgatcccgagctcggaggacagccggggtgatccgtttccccccgaggatcgaggtggtgcgctctggacggggttgtgcattctcgccgcgcccgggcggacgatccagcgaacagccccgcttctaacccgagatgctgctgccggcgcccgcgctccgccgcgccctgctgtcccgcccctggaccggggccggcctgcggtggaagcacacctcctccctgaaggtggccaacgagcccgtcttagccttcacgcagggcagccctgagcgagatgccctgcaaaaggccttgaaggacctgaagggccggatggaagccatcccatgcgtggtgggggatgaggaggtgtggacgtcggacgtgcagtaccaagtgtcgccttttaaccatggacataaggtggccaagttctgttatgcagacaagagcctgctcaacaaagccattgaggctgccctggctgcccggaaagagtgggacctgaagcctattgcagaccgggcccagatcttcctgaaggcggcagacatgctgagtgggccgcgcagggctgagatcctcgccaagaccatggtgggacagggtaagaccgtgatccaagcggagattgacgctgcagcggaactcatcgacttcttccggttcaatgccaagtatgcggtggagctggaggggcagcagcccatcagcgtgcccccgagcaccaacagcacggtgtaccggggtctggagggcttcgtggcggccatctcgccctttaacttcactgcaatcggcggcaacctggcgggggcaccggccctgatgggcaacgtggtcctatggaagcccagtgacactgccatgctggccagctatgctgtctaccgcatccttcgggaggctggcctgccccccaacatcatccagtttgtgccagctgatgggcccctatttggggacactgtcaccagctcagagcacctctgtggcatcaacttcacaggcagtgtgcccaccttcaaacacctgtggaagcaggtggcccagaacctggaccggttccacaccttcccacgcctggctggagagtgcggcggaaagaacttccacttcgtgcaccgctcggccgacgtggagagcgtggtgagcgggaccctccgctcagccttcgagtacggtggccagaagtgttccgcgtgctcgcgtctctacgtgccgcactcgctgtggccgcagatcaaagggcggctgctggaggagcacagtcggatcaaagtgggcgaccctgcagaggattttgggaccttcttctctgcagtgattgatgccaagtcctttgcccgtatcaagaagtggctggagcacgcacgctcctcacccagcctcaccatcctggccgggggcaagtgtgatgactccgtgggctactttgtggagccctgcatcgtggagagcaaggaccctcaggagcccatcatgaaggaggagatcttcgggcctgtactgtctgtgtacgtctacccggatgacaagtacaaggagacgctgcagctggttgacagcaccaccagctatggcctcacgggggcagtgttctcccaggataaggacgtcgtgcaggaggccacaaaggtgctgaggaatgctgccggcaacttctacatcaacgacaagtccactggctcgatagtgggccagcagccctttgggggggcccgagcctctggaaccaatgacaagccagggggcccacactacatcctgcgctggacgtcgccgcaggtcatcaaggagacacataagcccctgggggactggagctacgcgtacatgcagtgagcccctctcgggctccaccgtccagctgtctgtccgtccagatgcctcctgcttggattctgagtggtcagagatctgtaaagcatgactttcaaggatggttcttaggggactgtgaaagtgttgggtcttcctccaggatgcctgcatgggaccccacccggagctggtgtggccattccccaagtgccactggcccatggatgggggtgggtgctggtgccagctgggctgggtgtgggttctgtgtccttccaggatatgtgtcatttcccatgaggggccggggcaggtggctgggtgggggcacaggctggagtattcttagttctactggttctacactgtgaggtggcaatgggatttgctcagatgccacccaataaaatgcctgttacttaa

SEQ ID NO: 743 - protein, 563 aa, Homosapiens; identical to SEQ ID NO: 8

SEQ ID NO: 744 - DNA, 1376 bp, Homosapiens
gaagggccaaatccatcgtggactaactctgtgggtagagctcagatgacctagggagaattaaaccacttaagcttggagtgggaggagagggggtggggtgggggagaatataagatgtaacttaagctaaatgtaatctatttataaagcaagagactctcatctatttttatgaaaggaagggttttttaatctagggtaggcagttgtggtagcccagcattttcctgtggacgagacatggtgcatgttgttgctggattgaatggaacccattcctgtcccccggcctcgtcttctgtcctcacttttggtcatccacacccatgagcagcttcagcagagtgtaggtcccacttcaccccattctcctctcctctgacccctcagctccttggaagtcttggggtggggatctgagggggtgggtgggctgcaggaaattcagaaatgtggtgggtgggggaagggacaaggcgcattagggagggaacaagctgggctctggggataggctctgattaattagttactctgactctggtctgccgagatccatttccaacccagttgcgttgggagagggttgggaggcagcagagcatgggtgacagtgggagcacacgacttccttggagcctgggcctttgcgggtcccaggtggtcaggcagctggagcagaagtggaaatggcttaagatgctcatagcccagccccggctgtgtctactccaggccaagcctgggctgcagtccttgctatgttccccccagggccctggggggagggatcagggtgctgggggtttcctaggacaggggtcttcccccttgagacaccaagctctggctctagaagagctctctcctggagtggggagtctggaggggactggggtgggctgtgtgttagttctgagcaaatccctcaccaagacccttccctcccaagccctcaaagaaatgaggcaaagcccttccctgcaagaccccttgtggatgtttttgcatctacctgatttttagccccacccagggagactttataccccatgatcctgccccaccgttgctgttgtctgccagctgggtctagcatcacagggaagggggggatttatactcatggaaagactactgatcctaccggaaaccaacctgtttactgtactgttgtaaatatcatgccctttatatcctgtatattggcttcttttaaataaagtgaaatgtcttagaactgatggtgcttttttttgtttttgtttttaaacagaagatgaatctggtgttgggggaggggtaggaggacggaaggccacagaaaccctcaaactcattagttaattagccataaaataggggatttcata

SEQ ID NO: 745 - protein, 140 aa, Homosapiens
MGDSGSTRLPWSLGLCGSQVVRQLEQKWKWLKMLIAQPRLCLLQAKPGLQSLLCSPQGPGGRDQGAGGFLGQGSSPLRHQALALEELSPGVGSLEGTGVGCVLVLSKSLTKTLPSQALKEMRQSPSLQDPLWMFLHLPDF

SEQ ID NO: 746 - DNA, 1344 bp, Homosapiens
gaagggccaaatccatcgtggactaactctgtgggtagagctcagatgacctagggagaattaaaccacttaagcttggagtgggaggagagggggtggggtgggggagaatataagatgtaacttaagctaaatgtaatctatttataaagcaagagactctcatctatttttatgaaaggaagggttttttaatctagggtaggcagttgtggtagcccagcattttcctgtggacgagacatggtgcatgttgttgctggattgaatggaacccattcctgtcccccggcctcgtcttctgtcctcacttttggtcatccacacccatgagcagcttcagcagagtgtaggtcccacttcaccccattctcctctcctctgacccctcagctccttggaagtcttggggtggggatctgagggggtgggtgggctgcaggaaattcagaaatgtggtgggtgggggaagggacaaggcgcattagggagggaacaagctgggctctggggataggctctgattaattagttactctgactctggtctgccgagatccatttccaacccagttgcgttgggagagggttgggaggcagcagagcatgggtgacagtgggagcacacgacttccttggagcctgggcctttgcgggtcccaggtggtcaggcagctggagcagaagtggaaatggcttaagatgctcatagcccagccccggctgtgtctactccaggccaagcctgggctgcagtccttgctatgttccccccagggccctggggggagggatcagggtgctgggggtttcctaggacaggggtcttcccccttgagacaccaagctctggctctagaagagctctctcctggagtggggagtctggaggggactgggtgggtgcaggtaaagccagattctcctcaaagaaatgaggcaaagcccttccctgcaagaccccttgtggatgtttttgcatctacctgatttttagccccacccagggagactttataccccatgatcctgccccaccgttgctgttgtctgccagctgggtctagcatcacagggaagggggggatttatactcatggaaagactactgatcctaccggaaaccaacctgtttactgtactgttgtaaatatcatgccctttatatcctgtatattggcttcttttaaataaagtgaaatgtcttagaactgatggtgcttttttttgtttttgtttttaaacagaagatgaatctggtgttgggggaggggtaggaggacggaaggccacagaaaccctcaaactcattagttaattagccataaaataggggatttcata

SEQ ID NO: 747 - protein, 127 aa, Homosapiens
MGDSGSTRLPWSLGLCGSQVVRQLEQKWKWLKMLIAQPRLCLLQAKPGLQSLLCSPQGPGGRDQGAGGFLGQGSSPLRHQALALEELSPGVGSLEGTGWVQVKPDSPQRNEAKPFPARPLVDVFAST

SEQ ID NO: 748 - DNA, 1138 bp, Homosapiens
gtcatattgacactggtattttagaattttctcagatgggctctcctgcgctgccctctgtctcctgtttttgggggttttatacaaacagaggattggggagggataggaagactagcatccttttggctccctggttggttgtgaaatacacacacacacacacacacacacacacacactcgcactcctctgagactccgaacagagaaaaaaattattggcaaatcaacacatttttctttctcgtcttgagaaaatgtcttgaggtccctgaagggccaaatccatcgtggactaactctgtgggtagagctcagatgacctagggagaattaaaccacttaagcttggagtgggaggagagggggtggggtgggggagaatataagatgtaacttaagctaaatgtaatctatttataaagcaagagactctcatctatttttatgaaaggaagggttttttaatctagggtaggcagttgtggtagcccagcattttcctgtggacgagacatggtgcatgttgttgctggattgaatggaacccattcctgtcccccggcctcgtcttctgtcctcacttttggtcatccacacccatgagcagcttcagcagagtgtaggtcccacttcaccccattctcctctcctctgacccctcagctccttggaagtcttggggtggggatctgagggggtgggtgggctgcaggaaattcagaaatgtggcaaagcccttccctgcaagaccccttgtggatgtttttgcatctacctgatttttagccccacccagggagactttataccccatgatcctgccccaccgttgctgttgtctgccagctgggtctagcatcacagggaagggggggatttatactcatggaaagactactgatcctaccggaaaccaacctgtttactgtactgttgtaaatatcatgccctttatatcctgtatattggcttcttttaaataaagtgaaatgtcttagaactgatggtgcttttttttgtttttgtttttaaacagaagatgaatctggtgttgggggaggggtaggaggacggaaggccacagaaaccctcaaactcattagttaattagccataaaataggggatttcata

SEQ ID NO: 749 - protein, 97 aa, Homosapiens
MGSPALPSVSCFWGFYTNRGLGRDRKTSILLAPWLVVKYTHTHTHTHTHSHSSETPNREKNYWQINTFFFLVLRKCLEVPEGPNPSWTNSVGRAQMT

SEQ ID NO: 750 - DNA, 5189 bp, Homosapiens
tgaagcgcgagcgcgacgagtataagcggaggtgggaggaggagctcgccaagcgcatgaaccttcagaccatggtggacacgctgcaggaggcagcacaggaggctgatgccatccaggaggagatgaatgagaagatcgagcggctcaaggccgagctggtggtgtttaaggggcttatgagtgacgtggtccccaaaaagaaagagcgtaaggtggcttccgatgatgacatctctgagcaggacggggaggtgaaccggttctcggacgatgaggtcggctccatgaacatcaccgatgagatgaagcgcatgtttaaccagctgcgggagacctttgactttgacgacgactgtgacagcctgacgtgggaagagaatgaagacacgctgctgctctgggaggatttcaccaactgcaatccgaccatcgacctgcagggcgagcaagaggaaaacttgggcaacttgatccatgagaccgaatccttcttcaagacgagagacaaggagtaccaggaaacgataggtcagatcgagctcgagctggccacagccaaaagtgacatgaaccgacacctgcacgagtacatggagatgtgcagcatgaagcgaggcctggacgtgcagatggagacctgccgccggctcatcaaaggctccgcagacaggaattcaccgtcccccagctccgtggccagcagcgactcaggaagtacagatgagatccaggatgagttcgagcgcgaggcggatgtggagcccatggtcagctgatgactgaggccctgcgagcctggtggtcttggtgatggggccctgccacctctcctcatggggccaggaaggcccctcggagtggggttcgaagccacaccacacagactttctctgccctcccttctctggaggccctgagggactgctgcttccttccttccttccacaccaccaacgggtgccccgtctccatcccccacccacccaaggaatggtgctgtcaatttctattgttctccacattacaaatgcagacttctgtgcggactttgcagtgttaactgtgccttctcccttaagctgagccactttgagctccaaagaattattcctagcaggtgtttttatacagaactctaagctgagggccgggccaaccggccgtggtgtaatgtggtttctgccgtccgtcccacctgctcctctgattggccatgggctatgccctcccttcctcctgagccagcccagactcggcctggagcttggggtgctctgccaacccccaggaaggagccgcttgcctctgtgagctttctaggcctgggtagggaccaccccaattttctcactccctgaaggagagaaaggtggaaggaagggaaggaggacacattttaattttttggggggatcgagtggcaaagttgaagggacaaggcactgtgaggggaaggcagagcctcactgtgtttaaactactatgcaaaaaacaaaacaaacaacaaaagcagcttgccttatatcattgtggaaggcaggacctctcctgggctcctggcttccccctggagctgggagagaggccggggttagggtgatctgtgtggcagcactgactgggtagtgtgggtttggccgaggttggtcatgaggctggggttcccgcaaggcactggcctccctgaccgcttgcttccttccggacctctgggttcagggcgggggcggagggatccttgatttccctgataacttgatgttcttccctccctcgccagccaacaatagaggcttagagatctgtaatttctctgtgagaaagtctgaaggggccaggcctggtctctgctcccttctacccgccttgggttaggactgtccggcagttgcctgcttttggctgctggcaggagagaagcagggtgggctgctggcagtgcaggagctggagtgagggccatcctctttctgctcctcgacacacgcaagccgctctcagcagttccctcgactggccagtcggggtattgatctgagccagcatcccccaagacttgaatggcttgagtgggactgcgttgaagggcactgtgtggcccccttccaaatctcagcttggagccagctgagcaggctttgctttattattattttttaagcctactgcagtgggtctgttgccaattttaattttttattgtcccaggagctccctctagtggtcaaggtagcaaaatgtgcccaaggactagaacttgggtccctctgccttgcctggaggcagaaggagggggctctgggtttgactgggattgtggtccccaggggtccgtggcctttaaggctcttctctcttttctgtttcccccacctgtgttacagtcttaaaaatactgtacataaaagatatatgtagagagagagagagagcgtgagaatgtgttagtgactatgtgtgatgtaatttatcacgatttggtggccttcgtcatgagttttttcctttgttttcttttgctgggggcacctcccacgggtcccctgtggcagtctggctgtgacacttccatagtcagcatctcttgttagccaaacagttccctttgacaggtacttggagggacaatggttttggaagagagacggcccttctctctcctcactcacccttgttctaaaggttacagggttcaaacatacctgattcttgttgttattgttgttgaatttttattttaaccaaaggttatcagagccagttgggcttggacctcagctgctaaaaagattttccgtttcctcgagggcaggaaaacatccaccctcgtgggtctcctccgtccagggccgagggaggcattggacaatgtggtatgggagtttcgtgggcagcgtggaagccggccctgggttgttccccaaggtggtgggagggtgacagatatatctttagacttaagactgtaaggcagcagtgttagcatgggagtaactaaggttactgtggttatcggtgtccggcggtattatttttactttcctccttgtatacataggtcatttgtctttgaggactagggtactctagggagtttgaaaactgcaggagccagaaagagatcctggcctgagagtcccttctggctggcttttaatatctgctctcctcttgggagtgaggacttggggcaggtgggtaggagagggaaagccagagtgtgatgggcctgcctcctgggctggttcctgggtccggcctgcctgcctgcctgcctgcctctccaccacatgcttttttcagttaatgtcagtgggccctgcttgtcccctcaccatgagcccacagcttgccaagaaagaccccaacgctcgctggggcagcaccagtcctagctgggacgaattggtccatcctttgtaaagctgtaaatacttaattttgactttctatttctaagcccagtgtcatattgacactggtattttagaattttctcagatgggctctcctgcgctgccctctgtctcctgtttttgggggttttatacaaacagaggattggggagggataggaagactagcatccttttggctccctggttggttgtgaaatacacacacacacacacacacacacacacacactcgcactcctctgagactccgaacagagaaaaaaattattggcaaatcaacacatttttctttctcgtcttgagaaaatgtcttgaggtccctgaagggccaaatccatcgtggactaactctgtgggtagagctcagatgacctagggagaattaaaccacttaagcttggagtgggaggagagggggtggggtgggggagaatataagatgtaacttaagctaaatgtaatctatttataaagcaagagactctcatctatttttatgaaaggaagggttttttaatctagggtaggcagttgtggtagcccagcattttcctgtggacgagacatggtgcatgttgttgctggattgaatggaacccattcctgtcccccggcctcgtcttctgtcctcacttttggtcatccacacccatgagcagcttcagcagagtgtaggtcccacttcaccccattctcctctcctctgacccctcagctccttggaagtcttggggtggggatctgagggggtgggtgggctgcaggaaattcagaaatgtggtgggtgggggaagggacaaggcgcattagggagggaacaagctgggctctggggataggctctgattaattagttactctgactctggtctgccgagatccatttccaacccagttgcgttgggagagggttgggaggcagcagagcatgggtgacagtgggagcacacgacttccttggagcctgggcctttgcgggtcccaggtggtcaggcagctggagcagaagtggaaatggcttaagatgctcatagcccagccccggctgtgtctactccaggccaagcctgggctgcagtccttgctatgttccccccagggccctggggggagggatcagggtgctgggggtttcctaggacaggggtcttcccccttgagacaccaagctctggctctagaagagctctctcctggagtggggagtctggaggggactgggtgggtgcaggtaaagccagattctctctggaagggaattttctatgaatggatgatttccaggctcagggtgggctgtgtgttagttctgagcaaatccctcaccaagacccttccctcccaagccctcaaagaaatgaggcaaagcccttccctgcaagaccccttgtggatgtttttgcatctacctgatttttagccccacccagggagactttataccccatgatcctgccccaccgttgctgttgtctgccagctgggtctagcatcacagggaagggggggatttatactcatggaaagactactgatcctaccggaaaccaacctgtttactgtactgttgtaaatatcatgccctttatatcctgtatattggcttcttttaaataaagtgaaatgtcttagaactgatggtgcttttttttgtttttgtttttaaacagaagatgaatctggtgttgggggaggggtaggaggacggaaggccacagaaaccctcaaactcattagttaattagccataaaataggggatttcata

SEQ ID NO: 751 - protein, 240 aa, Homosapiens
MNLQTMVDTLQEAAQEADAIQEEMNEKIERLKAELVVFKGLMSDVVPKKKERKVASDDDISEQDGEVNRFSDDEVGSMNITDEMKRMFNQLRETFDFDDDCDSLTWEENEDTLLLWEDFTNCNPTIDLQGEQEENLGNLIHETESFFKTRDKEYQETIGQIELELATAKSDMNRHLHEYMEMCSMKRGLDVQMETCRRLIKGSADRNSPSPSSVASSDSGSTDEIQDEFEREADVEPMVS

SEQ ID NO: 752 - DNA, 6165 bp, Homosapiens
atgcaccttcggatactgtggtcccccagcccttccagccgcggtcgcgcacatccgaaggaatttggggccaggggcattgcgggcagagaggacagagaaacggagccctctcggcaggcgacgtgggagaggagcgccctaaaaagtggaaagcgagcgttgccgaggctgctggcccctttaagaggcccggctggctctgcggcggttccagctaacccggtccctggtgcagctctgcggtccgggtcccccagcagagaatcggcacccggcggggaggcaggaccagacgcaggagagggcgtggccccgccggggagctgggcggagtctatgctgcggagaaagcgggagaacccggagaaggggcagtgccggccgagagtcctctgcgtgcggctgccgcggcccctccacagcgtctctgacagcccgggcgggccgggtccgtcgccggtgacggcggcgctgcgggacgacctgggctccaacatccacctcttgaaggggctcaacgtgcgcttccgctgcttcctggctaaggtgcacgagctggagcggcgcaaccggctgctggagaagcagctggagcagcagcagagcgagcgcgagcggcggctgcgctacaagaccttctcccgcgagcaggcccactacggccgcctgcccgggaccatctggagctacacgcaggtgcggcgcacgggcggcggcggcgtggagaccgtgcagggccccggcgtgtcgtgggtgcaccccgacggcgtgggcgtgcagatcgacaccatcacgccggagatccgcgcgctctacaacgtgctggccaaggtgaagcgcgagcgcgacgagtataagcggaggtgggaggaggagctcgccaagcgcatgaaccttcagaccatggtggacacgctgcaggaggcagcacaggaggctgatgccatccaggaggagatgaatgagaagatcgagcggctcaaggccgagctggtggtgtttaaggggcttatgagtgaccccatgacagacctggacacaaagatccaagaaaaggccatgaaggtggacatggacatctgccgccgaatcgatatcacggccaagctgtgcgatgtcgcacagcagcggaactcagaagacgtgtccaagatcttccaggtggtccccaaaaagaaagagcgtaaggtggcttccgatgatgacatctctgagcaggacggggaggtgaaccggttctcggacgatgaggtcggctccatgaacatcaccgatgagatgaagcgcatgtttaaccagctgcgggagacctttgactttgacgacgactgtgacagcctgacgtgggaagagaatgaagacacgctgctgctctgggaggatttcaccaactgcaatccgaccatcgacctgcagggcgagcaagaggaaaacttgggcaacttgatccatgagaccgaatccttcttcaagacgagagacaaggagtaccaggaaacgataggtcagatcgagctcgagctggccacagccaaaagtgacatgaaccgacacctgcacgagtacatggagatgtgcagcatgaagcgaggcctggacgtgcagatggagacctgccgccggctcatcaaaggctccgcagacaggaattcaccgtcccccagctccgtggccagcagcgactcaggaagtacagatgagatccaggatgagttcgagcgcgaggcggatgtggagcccatggtcagctgatgactgaggccctgcgagcctggtggtcttggtgatggggccctgccacctctcctcatggggccaggaaggcccctcggagtggggttcgaagccacaccacacagactttctctgccctcccttctctggaggccctgagggactgctgcttccttccttccttccacaccaccaacgggtgccccgtctccatcccccacccacccaaggaatggtgctgtcaatttctattgttctccacattacaaatgcagacttctgtgcggactttgcagtgttaactgtgccttctcccttaagctgagccactttgagctccaaagaattattcctagcaggtgtttttatacagaactctaagctgagggccgggccaaccggccgtggtgtaatgtggtttctgccgtccgtcccacctgctcctctgattggccatgggctatgccctcccttcctcctgagccagcccagactcggcctggagcttggggtgctctgccaacccccaggaaggagccgcttgcctctgtgagctttctaggcctgggtagggaccaccccaattttctcactccctgaaggagagaaaggtggaaggaagggaaggaggacacattttaattttttggggggatcgagtggcaaagttgaagggacaaggcactgtgaggggaaggcagagcctcactgtgtttaaactactatgcaaaaaacaaaacaaacaacaaaagcagcttgccttatatcattgtggaaggcaggacctctcctgggctcctggcttccccctggagctgggagagaggccggggttagggtgatctgtgtggcagcactgactgggtagtgtgggtttggccgaggttggtcatgaggctggggttcccgcaaggcactggcctccctgaccgcttgcttccttccggacctctgggttcagggcgggggcggagggatccttgatttccctgataacttgatgttcttccctccctcgccagccaacaatagaggcttagagatctgtaatttctctgtgagaaagtctgaaggggccaggcctggtctctgctcccttctacccgccttgggttaggactgtccggcagttgcctgcttttggctgctggcaggagagaagcagggtgggctgctggcagtgcaggagctggagtgagggccatcctctttctgctcctcgacacacgcaagccgctctcagcagttccctcgactggccagtcggggtattgatctgagccagcatcccccaagacttgaatggcttgagtgggactgcgttgaagggcactgtgtggcccccttccaaatctcagcttggagccagctgagcaggctttgctttattattattttttaagcctactgcagtgggtctgttgccaattttaattttttattgtcccaggagctccctctagtggtcaaggtagcaaaatgtgcccaaggactagaacttgggtccctctgccttgcctggaggcagaaggagggggctctgggtttgactgggattgtggtccccaggggtccgtggcctttaaggctcttctctcttttctgtttcccccacctgtgttacagtcttaaaaatactgtacataaaagatatatgtagagagagagagagagcgtgagaatgtgttagtgactatgtgtgatgtaatttatcacgatttggtggccttcgtcatgagttttttcctttgttttcttttgctgggggcacctcccacgggtcccctgtggcagtctggctgtgacacttccatagtcagcatctcttgttagccaaacagttccctttgacaggtacttggagggacaatggttttggaagagagacggcccttctctctcctcactcacccttgttctaaaggttacagggttcaaacatacctgattcttgttgttattgttgttgaatttttattttaaccaaaggttatcagagccagttgggcttggacctcagctgctaaaaagattttccgtttcctcgagggcaggaaaacatccaccctcgtgggtctcctccgtccagggccgagggaggcattggacaatgtggtatgggagtttcgtgggcagcgtggaagccggccctgggttgttccccaaggtggtgggagggtgacagatatatctttagacttaagactgtaaggcagcagtgttagcatgggagtaactaaggttactgtggttatcggtgtccggcggtattatttttactttcctccttgtatacataggtcatttgtctttgaggactagggtactctagggagtttgaaaactgcaggagccagaaagagatcctggcctgagagtcccttctggctggcttttaatatctgctctcctcttgggagtgaggacttggggcaggtgggtaggagagggaaagccagagtgtgatgggcctgcctcctgggctggttcctgggtccggcctgcctgcctgcctgcctgcctctccaccacatgcttttttcagttaatgtcagtgggccctgcttgtcccctcaccatgagcccacagcttgccaagaaagaccccaacgctcgctggggcagcaccagtcctagctgggacgaattggtccatcctttgtaaagctgtaaatacttaattttgactttctatttctaagcccagtgtcatattgacactggtattttagaattttctcagatgggctctcctgcgctgccctctgtctcctgtttttgggggttttatacaaacagaggattggggagggataggaagactagcatccttttggctccctggttggttgtgaaatacacacacacacacacacacacacacacacactcgcactcctctgagactccgaacagagaaaaaaattattggcaaatcaacacatttttctttctcgtcttgagaaaatgtcttgaggtccctgaagggccaaatccatcgtggactaactctgtgggtagagctcagatgacctagggagaattaaaccacttaagcttggagtgggaggagagggggtggggtgggggagaatataagatgtaacttaagctaaatgtaatctatttataaagcaagagactctcatctatttttatgaaaggaagggttttttaatctagggtaggcagttgtggtagcccagcattttcctgtggacgagacatggtgcatgttgttgctggattgaatggaacccattcctgtcccccggcctcgtcttctgtcctcacttttggtcatccacacccatgagcagcttcagcagagtgtaggtcccacttcaccccattctcctctcctctgacccctcagctccttggaagtcttggggtggggatctgagggggtgggtgggctgcaggaaattcagaaatgtggtgggtgggggaagggacaaggcgcattagggagggaacaagctgggctctggggataggctctgattaattagttactctgactctggtctgccgagatccatttccaacccagttgcgttgggagagggttgggaggcagcagagcatgggtgacagtgggagcacacgacttccttggagcctgggcctttgcgggtcccaggtggtcaggcagctggagcagaagtggaaatggcttaagatgctcatagcccagccccggctgtgtctactccaggccaagcctgggctgcagtccttgctatgttccccccagggccctggggggagggatcagggtgctgggggtttcctaggacaggggtcttcccccttgagacaccaagctctggctctagaagagctctctcctggagtggggagtctggaggggactgggtgggtgcaggtaaagccagattctctctggaagggaattttctatgaatggatgatttccaggctcagggtgggctgtgtgttagttctgagcaaatccctcaccaagacccttccctcccaagccctcaaagaaatgaggcaaagcccttccctgcaagaccccttgtggatgtttttgcatctacctgatttttagccccacccagggagactttataccccatgatcctgccccaccgttgctgttgtctgccagctgggtctagcatcacagggaagggggggatttatactcatggaaagactactgatcctaccggaaaccaacctgtttactgtactgttgtaaatatcatgccctttatatcctgtatattggcttcttttaaataaagtgaaatgtcttagaactgatggtgcttttttttgtttttgtttttaaacagaagatgaatctggtgttgggggaggggtaggaggacggaaggccacagaaaccctcaaactcattagttaattagccataaaataggggatttcata

SEQ ID NO: 753 - protein, 584 aa, Homosapiens
MHLRILWSPSPSSRGRAHPKEFGARGIAGREDRETEPSRQATWERSALKSGKRALPRLLAPLRGPAGSAAVPANPVPGAALRSGSPSRESAPGGEAGPDAGEGVAPPGSWAESMLRRKRENPEKGQCRPRVLCVRLPRPLHSVSDSPGGPGPSPVTAALRDDLGSNIHLLKGLNVRFRCFLAKVHELERRNRLLEKQLEQQQSERERRLRYKTFSREQAHYGRLPGTIWSYTQVRRTGGGGVETVQGPGVSWVHPDGVGVQIDTITPEIRALYNVLAKVKRERDEYKRRWEEELAKRMNLQTMVDTLQEAAQEADAIQEEMNEKIERLKAELVVFKGLMSDPMTDLDTKIQEKAMKVDMDICRRIDITAKLCDVAQQRNSEDVSKIFQVVPKKKERKVASDDDISEQDGEVNRFSDDEVGSMNITDEMKRMFNQLRETFDFDDDCDSLTWEENEDTLLLWEDFTNCNPTIDLQGEQEENLGNLIHETESFFKTRDKEYQETIGQIELELATAKSDMNRHLHEYMEMCSMKRGLDVQMETCRRLIKGSADRNSPSPSSVASSDSGSTDEIQDEFEREADVEPMVS

SEQ ID NO: 754 - DNA, 6105 bp, Homosapiens
atggctgccttgtttcctggtcggactgagctctttgaatggagggctggaggacccacctcgtggttctgctgtgacctccggaagtccccgcagaacctggagctctgtgggctcgggaagaggcagcgcctggatccagatcctcctgggagcgtctctgacagcccgggcggtgagacccgcgacccttctggccccgcgcagataccgcggcctccaccgcgtcccgaggagcggccgagtgccctctctcgcctcggcgcccgcatccggggccatccgtcctgccgtctctgcggaggccgcatctggcgcgcatctggaaccgcccggccggccgcgctggagcccgcgcccaccctggcccggccgcgccgggagccctgcccggagctggagccgcacctggagccgcgggcccggggccctgagccgcgcagccggcgcatggggctcaacgtgcgcttccgctgcttcctggctaaggtgcacgagctggagcggcgcaaccggctgctggagaagcagctggagcagcagcagagcgagcgcgagcggcggctgcgctacaagaccttctcccgcgagcaggcccactacggccgcctgcccgggaccatctggagctacacgcaggtgcggcgcacgggcggcggcggcgtggagaccgtgcagggccccggcgtgtcgtgggtgcaccccgacggcgtgggcgtgcagatcgacaccatcacgccggagatccgcgcgctctacaacgtgctggccaaggtgaagcgcgagcgcgacgagtataagcggaggtgggaggaggagctcgccaagcgcatgaaccttcagaccatggtggacacgctgcaggaggcagcacaggaggctgatgccatccaggaggagatgaatgagaagatcgagcggctcaaggccgagctggtggtgtttaaggggcttatgagtgaccccatgacagacctggacacaaagatccaagaaaaggccatgaaggtggacatggacatctgccgccgaatcgatatcacggccaagctgtgcgatgtcgcacagcagcggaactcagaagacgtgtccaagatcttccaggtggtccccaaaaagaaagagcgtaaggtggcttccgatgatgacatctctgagcaggacggggaggtgaaccggttctcggacgatgaggtcggctccatgaacatcaccgatgagatgaagcgcatgtttaaccagctgcgggagacctttgactttgacgacgactgtgacagcctgacgtgggaagagaatgaagacacgctgctgctctgggaggatttcaccaactgcaatccgaccatcgacctgcagggcgagcaagaggaaaacttgggcaacttgatccatgagaccgaatccttcttcaagacgagagacaaggagtaccaggaaacgataggtcagatcgagctcgagctggccacagccaaaagtgacatgaaccgacacctgcacgagtacatggagatgtgcagcatgaagcgaggcctggacgtgcagatggagacctgccgccggctcatcaaaggctccgcagacaggaattcaccgtcccccagctccgtggccagcagcgactcaggaagtacagatgagatccaggatgagttcgagcgcgaggcggatgtggagcccatggtcagctgatgactgaggccctgcgagcctggtggtcttggtgatggggccctgccacctctcctcatggggccaggaaggcccctcggagtggggttcgaagccacaccacacagactttctctgccctcccttctctggaggccctgagggactgctgcttccttccttccttccacaccaccaacgggtgccccgtctccatcccccacccacccaaggaatggtgctgtcaatttctattgttctccacattacaaatgcagacttctgtgcggactttgcagtgttaactgtgccttctcccttaagctgagccactttgagctccaaagaattattcctagcaggtgtttttatacagaactctaagctgagggccgggccaaccggccgtggtgtaatgtggtttctgccgtccgtcccacctgctcctctgattggccatgggctatgccctcccttcctcctgagccagcccagactcggcctggagcttggggtgctctgccaacccccaggaaggagccgcttgcctctgtgagctttctaggcctgggtagggaccaccccaattttctcactccctgaaggagagaaaggtggaaggaagggaaggaggacacattttaattttttggggggatcgagtggcaaagttgaagggacaaggcactgtgaggggaaggcagagcctcactgtgtttaaactactatgcaaaaaacaaaacaaacaacaaaagcagcttgccttatatcattgtggaaggcaggacctctcctgggctcctggcttccccctggagctgggagagaggccggggttagggtgatctgtgtggcagcactgactgggtagtgtgggtttggccgaggttggtcatgaggctggggttcccgcaaggcactggcctccctgaccgcttgcttccttccggacctctgggttcagggcgggggcggagggatccttgatttccctgataacttgatgttcttccctccctcgccagccaacaatagaggcttagagatctgtaatttctctgtgagaaagtctgaaggggccaggcctggtctctgctcccttctacccgccttgggttaggactgtccggcagttgcctgcttttggctgctggcaggagagaagcagggtgggctgctggcagtgcaggagctggagtgagggccatcctctttctgctcctcgacacacgcaagccgctctcagcagttccctcgactggccagtcggggtattgatctgagccagcatcccccaagacttgaatggcttgagtgggactgcgttgaagggcactgtgtggcccccttccaaatctcagcttggagccagctgagcaggctttgctttattattattttttaagcctactgcagtgggtctgttgccaattttaattttttattgtcccaggagctccctctagtggtcaaggtagcaaaatgtgcccaaggactagaacttgggtccctctgccttgcctggaggcagaaggagggggctctgggtttgactgggattgtggtccccaggggtccgtggcctttaaggctcttctctcttttctgtttcccccacctgtgttacagtcttaaaaatactgtacataaaagatatatgtagagagagagagagagcgtgagaatgtgttagtgactatgtgtgatgtaatttatcacgatttggtggccttcgtcatgagttttttcctttgttttcttttgctgggggcacctcccacgggtcccctgtggcagtctggctgtgacacttccatagtcagcatctcttgttagccaaacagttccctttgacaggtacttggagggacaatggttttggaagagagacggcccttctctctcctcactcacccttgttctaaaggttacagggttcaaacatacctgattcttgttgttattgttgttgaatttttattttaaccaaaggttatcagagccagttgggcttggacctcagctgctaaaaagattttccgtttcctcgagggcaggaaaacatccaccctcgtgggtctcctccgtccagggccgagggaggcattggacaatgtggtatgggagtttcgtgggcagcgtggaagccggccctgggttgttccccaaggtggtgggagggtgacagatatatctttagacttaagactgtaaggcagcagtgttagcatgggagtaactaaggttactgtggttatcggtgtccggcggtattatttttactttcctccttgtatacataggtcatttgtctttgaggactagggtactctagggagtttgaaaactgcaggagccagaaagagatcctggcctgagagtcccttctggctggcttttaatatctgctctcctcttgggagtgaggacttggggcaggtgggtaggagagggaaagccagagtgtgatgggcctgcctcctgggctggttcctgggtccggcctgcctgcctgcctgcctgcctctccaccacatgcttttttcagttaatgtcagtgggccctgcttgtcccctcaccatgagcccacagcttgccaagaaagaccccaacgctcgctggggcagcaccagtcctagctgggacgaattggtccatcctttgtaaagctgtaaatacttaattttgactttctatttctaagcccagtgtcatattgacactggtattttagaattttctcagatgggctctcctgcgctgccctctgtctcctgtttttgggggttttatacaaacagaggattggggagggataggaagactagcatccttttggctccctggttggttgtgaaatacacacacacacacacacacacacacacacactcgcactcctctgagactccgaacagagaaaaaaattattggcaaatcaacacatttttctttctcgtcttgagaaaatgtcttgaggtccctgaagggccaaatccatcgtggactaactctgtgggtagagctcagatgacctagggagaattaaaccacttaagcttggagtgggaggagagggggtggggtgggggagaatataagatgtaacttaagctaaatgtaatctatttataaagcaagagactctcatctatttttatgaaaggaagggttttttaatctagggtaggcagttgtggtagcccagcattttcctgtggacgagacatggtgcatgttgttgctggattgaatggaacccattcctgtcccccggcctcgtcttctgtcctcacttttggtcatccacacccatgagcagcttcagcagagtgtaggtcccacttcaccccattctcctctcctctgacccctcagctccttggaagtcttggggtggggatctgagggggtgggtgggctgcaggaaattcagaaatgtggtgggtgggggaagggacaaggcgcattagggagggaacaagctgggctctggggataggctctgattaattagttactctgactctggtctgccgagatccatttccaacccagttgcgttgggagagggttgggaggcagcagagcatgggtgacagtgggagcacacgacttccttggagcctgggcctttgcgggtcccaggtggtcaggcagctggagcagaagtggaaatggcttaagatgctcatagcccagccccggctgtgtctactccaggccaagcctgggctgcagtccttgctatgttccccccagggccctggggggagggatcagggtgctgggggtttcctaggacaggggtcttcccccttgagacaccaagctctggctctagaagagctctctcctggagtggggagtctggaggggactgggtgggtgcaggtaaagccagattctctctggaagggaattttctatgaatggatgatttccaggctcagggtgggctgtgtgttagttctgagcaaatccctcaccaagacccttccctcccaagccctcaaagaaatgaggcaaagcccttccctgcaagaccccttgtggatgtttttgcatctacctgatttttagccccacccagggagactttataccccatgatcctgccccaccgttgctgttgtctgccagctgggtctagcatcacagggaagggggggatttatactcatggaaagactactgatcctaccggaaaccaacctgtttactgtactgttgtaaatatcatgccctttatatcctgtatattggcttcttttaaataaagtgaaatgtcttagaactgatggtgcttttttttgtttttgtttttaaacagaagatgaatctggtgttgggggaggggtaggaggacggaaggccacagaaaccctcaaactcattagttaattagccataaaataggggatttcata

SEQ ID NO: 755 - protein, 564 aa, Homosapiens
MAALFPGRTELFEWRAGGPTSWFCCDLRKSPQNLELCGLGKRQRLDPDPPGSVSDSPGGETRDPSGPAQIPRPPPRPEERPSALSRLGARIRGHPSCRLCGGRIWRASGTARPAALEPAPTLARPRREPCPELEPHLEPRARGPEPRSRRMGLNVRFRCFLAKVHELERRNRLLEKQLEQQQSERERRLRYKTFSREQAHYGRLPGTIWSYTQVRRTGGGGVETVQGPGVSWVHPDGVGVQIDTITPEIRALYNVLAKVKRERDEYKRRWEEELAKRMNLQTMVDTLQEAAQEADAIQEEMNEKIERLKAELVVFKGLMSDPMTDLDTKIQEKAMKVDMDICRRIDITAKLCDVAQQRNSEDVSKIFQVVPKKKERKVASDDDISEQDGEVNRFSDDEVGSMNITDEMKRMFNQLRETFDFDDDCDSLTWEENEDTLLLWEDFTNCNPTIDLQGEQEENLGNLIHETESFFKTRDKEYQETIGQIELELATAKSDMNRHLHEYMEMCSMKRGLDVQMETCRRLIKGSADRNSPSPSSVASSDSGSTDEIQDEFEREADVEPMVS

SEQ ID NO: 756 - DNA, 883 bp, Homosapiens
cttaagctaaatgtaatctatttataaagcaagagactctcatctatttttatgaaaggaagggttttttaatctagggtaggcagttgtggtagcccagcattttcctgtggacgagacatggtgcatgttgttgctggattgaatggaacccattcctgtcccccggcctcgtcttctgtcctcacttttggtcatccacacccatgagcagcttcagcagagtgtaggtcccacttcaccccattctcctctcctctgacccctcagctccttggaagtcttggggtggggatctgagggggtgggtgggctgcaggaaattcagaaatgtggtgggtgggggaagggacaaggcgcattagggagggaacaagctgggctctggggataggctctgattaattagttactctgactctggtctgccgagatccatttccaacccagttgcgttgggagagggttgggaggcagcagagcatgggtgacagtgggagcacacgacttccttggagcctgggcctttgcgggtcccaggtggtcaggcagctggagcagaagtggaaatggcttaagatgctcatagcccagccccggctgtgtctactccaggccaagcctgggctgcagtccttgctatgttccccccagggccctggggggagggatcaggggagactttataccccatgatcctgccccaccgttgctgttgtctgccagctgggtctagcatcacagggaagggggggatttatactcatggaaagactactgatcctaccggaaaccaacctgtttactgtactgttgtaaatatcatgccctttatatcctgtatattggcttcttttaaataaagtgaaatgtcttagaactg

SEQ ID NO: 757 - protein, 73 aa, Homosapiens
MFPPGPWGEGSGETLYPMILPHRCCCLPAGSSITGKGGIYTHGKTTDPTGNQPVYCTVVNIMPFISCILASFK

SEQ ID NO: 758 - DNA, 5059 bp, Homosapiens
tgaagcgcgagcgcgacgagtataagcggaggtgggaggaggagctcgccaagcgcatgaaccttcagaccatggtggacacgctgcaggaggcagcacaggaggctgatgccatccaggaggagatgaatgagaagatcgagcggctcaaggccgagctggtggtgtttaaggggcttatgagtgacgtggtccccaaaaagaaagagcgtaaggtggcttccgatgatgacatctctgagcaggacggggaggtgaaccggttctcggacgatgaggtcggctccatgaacatcaccgatgagatgaagcgcatgtttaaccagctgcgggagacctttgactttgacgacgactgtgacagcctgacgtgggaagagaatgaagacacgctgctgctctgggaggatttcaccaactgcaatccgaccatcgacctgcagggcgagcaagaggaaaacttgggcaacttgatccatgagaccgaatccttcttcaagacgagagacaaggagtaccaggaaacgataggtcagatcgagctcgagctggccacagccaaaagtgacatgaaccgacacctgcacgagtacatggagatgtgcagcatgaagcgaggcctggacgtgcagatggagacctgccgccggctcatcaaaggctccgcagacaggaattcaccgtcccccagctccgtggccagcagcgactcaggaagtacagatgagatccaggatgagttcgagcgcgaggcggatgtggagcccatggtcagctgatgactgaggccctgcgagcctggtggtcttggtgatggggccctgccacctctcctcatggggccaggaaggcccctcggagtggggttcgaagccacaccacacagactttctctgccctcccttctctggaggccctgagggactgctgcttccttccttccttccacaccaccaacgggtgccccgtctccatcccccacccacccaaggaatggtgctgtcaatttctattgttctccacattacaaatgcagacttctgtgcggactttgcagtgttaactgtgccttctcccttaagctgagccactttgagctccaaagaattattcctagcaggtgtttttatacagaactctaagctgagggccgggccaaccggccgtggtgtaatgtggtttctgccgtccgtcccacctgctcctctgattggccatgggctatgccctcccttcctcctgagccagcccagactcggcctggagcttggggtgctctgccaacccccaggaaggagccgcttgcctctgtgagctttctaggcctgggtagggaccaccccaattttctcactccctgaaggagagaaaggtggaaggaagggaaggaggacacattttaattttttggggggatcgagtggcaaagttgaagggacaaggcactgtgaggggaaggcagagcctcactgtgtttaaactactatgcaaaaaacaaaacaaacaacaaaagcagcttgccttatatcattgtggaaggcaggacctctcctgggctcctggcttccccctggagctgggagagaggccggggttagggtgatctgtgtggcagcactgactgggtagtgtgggtttggccgaggttggtcatgaggctggggttcccgcaaggcactggcctccctgaccgcttgcttccttccggacctctgggttcagggcgggggcggagggatccttgatttccctgataacttgatgttcttccctccctcgccagccaacaatagaggcttagagatctgtaatttctctgtgagaaagtctgaaggggccaggcctggtctctgctcccttctacccgccttgggttaggactgtccggcagttgcctgcttttggctgctggcaggagagaagcagggtgggctgctggcagtgcaggagctggagtgagggccatcctctttctgctcctcgacacacgcaagccgctctcagcagttccctcgactggccagtcggggtattgatctgagccagcatcccccaagacttgaatggcttgagtgggactgcgttgaagggcactgtgtggcccccttccaaatctcagcttggagccagctgagcaggctttgctttattattattttttaagcctactgcagtgggtctgttgccaattttaattttttattgtcccaggagctccctctagtggtcaaggtagcaaaatgtgcccaaggactagaacttgggtccctctgccttgcctggaggcagaaggagggggctctgggtttgactgggattgtggtccccaggggtccgtggcctttaaggctcttctctcttttctgtttcccccacctgtgttacagtcttaaaaatactgtacataaaagatatatgtagagagagagagagagcgtgagaatgtgttagtgactatgtgtgatgtaatttatcacgatttggtggccttcgtcatgagttttttcctttgttttcttttgctgggggcacctcccacgggtcccctgtggcagtctggctgtgacacttccatagtcagcatctcttgttagccaaacagttccctttgacaggtacttggagggacaatggttttggaagagagacggcccttctctctcctcactcacccttgttctaaaggttacagggttcaaacatacctgattcttgttgttattgttgttgaatttttattttaaccaaaggttatcagagccagttgggcttggacctcagctgctaaaaagattttccgtttcctcgagggcaggaaaacatccaccctcgtgggtctcctccgtccagggccgagggaggcattggacaatgtggtatgggagtttcgtgggcagcgtggaagccggccctgggttgttccccaaggtggtgggagggtgacagatatatctttagacttaagactgtaaggcagcagtgttagcatgggagtaactaaggttactgtggttatcggtgtccggcggtattatttttactttcctccttgtatacataggtcatttgtctttgaggactagggtactctagggagtttgaaaactgcaggagccagaaagagatcctggcctgagagtcccttctggctggcttttaatatctgctctcctcttgggagtgaggacttggggcaggtgggtaggagagggaaagccagagtgtgatgggcctgcctcctgggctggttcctgggtccggcctgcctgcctgcctgcctgcctctccaccacatgcttttttcagttaatgtcagtgggccctgcttgtcccctcaccatgagcccacagcttgccaagaaagaccccaacgctcgctggggcagcaccagtcctagctgggacgaattggtccatcctttgtaaagctgtaaatacttaattttgactttctatttctaagcccagtgtcatattgacactggtattttagaattttctcagatgggctctcctgcgctgccctctgtctcctgtttttgggggttttatacaaacagaggattggggagggataggaagactagcatccttttggctccctggttggttgtgaaatacacacacacacacacacacacacacacacactcgcactcctctgagactccgaacagagaaaaaaattattggcaaatcaacacatttttctttctcgtcttgagaaaatgtcttgaggtccctgaagggccaaatccatcgtggactaactctgtgggtagagctcagatgacctagggagaattaaaccacttaagcttggagtgggaggagagggggtggggtgggggagaatataagatgtaacttaagctaaatgtaatctatttataaagcaagagactctcatctatttttatgaaaggaagggttttttaatctagggtaggcagttgtggtagcccagcattttcctgtggacgagacatggtgcatgttgttgctggattgaatggaacccattcctgtcccccggcctcgtcttctgtcctcacttttggtcatccacacccatgagcagcttcagcagagtgtaggtcccacttcaccccattctcctctcctctgacccctcagctccttggaagtcttggggtggggatctgagggggtgggtgggctgcaggaaattcagaaatgtggtgggtgggggaagggacaaggcgcattagggagggaacaagctgggctctggggataggctctgattaattagttactctgactctggtctgccgagatccatttccaacccagttgcgttgggagagggttgggaggcagcagagcatgggtgacagtgggagcacacgacttccttggagcctgggcctttgcgggtcccaggtggtcaggcagctggagcagaagtggaaatggcttaagatgctcatagcccagccccggctgtgtctactccaggccaagcctgggctgcagtccttgctatgttccccccagggccctggggggagggatcagggtgctgggggtttcctaggacaggggtcttcccccttgagacaccaagctctggctctagaagagctctctcctggagtggggagtctggaggggactgggtgggtgcaggtaaagccagattctctctggaagggaattttctatgaatggatgatttccaggctcagggtgggctgtgtgttagttctgagcaaatccctcaccaagacccttccctcccaagccctcaaagaaatgaggcaaagcccttccctgcaagaccccttgtggatgtttttgcatctacctgatttttagccccacccagggagactttataccccatgatcctgccccaccgttgctgttgtctgccagctgggtctagcatcacagggaagggggggatttatactcatggaaagactactgatcctaccggaaaccaacctgtttactgtactgttgtaaatatcatgccctttatatcctgtatattggcttcttttaaataaagtgaaatgtcttagaactg

SEQ ID NO: 759 - protein, 240 aa, Homosapiens; identical to SEQ ID NO: 751

SEQ ID NO: 760 - DNA, 6035 bp, Homosapiens
atgcaccttcggatactgtggtcccccagcccttccagccgcggtcgcgcacatccgaaggaatttggggccaggggcattgcgggcagagaggacagagaaacggagccctctcggcaggcgacgtgggagaggagcgccctaaaaagtggaaagcgagcgttgccgaggctgctggcccctttaagaggcccggctggctctgcggcggttccagctaacccggtccctggtgcagctctgcggtccgggtcccccagcagagaatcggcacccggcggggaggcaggaccagacgcaggagagggcgtggccccgccggggagctgggcggagtctatgctgcggagaaagcgggagaacccggagaaggggcagtgccggccgagagtcctctgcgtgcggctgccgcggcccctccacagcgtctctgacagcccgggcgggccgggtccgtcgccggtgacggcggcgctgcgggacgacctgggctccaacatccacctcttgaaggggctcaacgtgcgcttccgctgcttcctggctaaggtgcacgagctggagcggcgcaaccggctgctggagaagcagctggagcagcagcagagcgagcgcgagcggcggctgcgctacaagaccttctcccgcgagcaggcccactacggccgcctgcccgggaccatctggagctacacgcaggtgcggcgcacgggcggcggcggcgtggagaccgtgcagggccccggcgtgtcgtgggtgcaccccgacggcgtgggcgtgcagatcgacaccatcacgccggagatccgcgcgctctacaacgtgctggccaaggtgaagcgcgagcgcgacgagtataagcggaggtgggaggaggagctcgccaagcgcatgaaccttcagaccatggtggacacgctgcaggaggcagcacaggaggctgatgccatccaggaggagatgaatgagaagatcgagcggctcaaggccgagctggtggtgtttaaggggcttatgagtgaccccatgacagacctggacacaaagatccaagaaaaggccatgaaggtggacatggacatctgccgccgaatcgatatcacggccaagctgtgcgatgtcgcacagcagcggaactcagaagacgtgtccaagatcttccaggtggtccccaaaaagaaagagcgtaaggtggcttccgatgatgacatctctgagcaggacggggaggtgaaccggttctcggacgatgaggtcggctccatgaacatcaccgatgagatgaagcgcatgtttaaccagctgcgggagacctttgactttgacgacgactgtgacagcctgacgtgggaagagaatgaagacacgctgctgctctgggaggatttcaccaactgcaatccgaccatcgacctgcagggcgagcaagaggaaaacttgggcaacttgatccatgagaccgaatccttcttcaagacgagagacaaggagtaccaggaaacgataggtcagatcgagctcgagctggccacagccaaaagtgacatgaaccgacacctgcacgagtacatggagatgtgcagcatgaagcgaggcctggacgtgcagatggagacctgccgccggctcatcaaaggctccgcagacaggaattcaccgtcccccagctccgtggccagcagcgactcaggaagtacagatgagatccaggatgagttcgagcgcgaggcggatgtggagcccatggtcagctgatgactgaggccctgcgagcctggtggtcttggtgatggggccctgccacctctcctcatggggccaggaaggcccctcggagtggggttcgaagccacaccacacagactttctctgccctcccttctctggaggccctgagggactgctgcttccttccttccttccacaccaccaacgggtgccccgtctccatcccccacccacccaaggaatggtgctgtcaatttctattgttctccacattacaaatgcagacttctgtgcggactttgcagtgttaactgtgccttctcccttaagctgagccactttgagctccaaagaattattcctagcaggtgtttttatacagaactctaagctgagggccgggccaaccggccgtggtgtaatgtggtttctgccgtccgtcccacctgctcctctgattggccatgggctatgccctcccttcctcctgagccagcccagactcggcctggagcttggggtgctctgccaacccccaggaaggagccgcttgcctctgtgagctttctaggcctgggtagggaccaccccaattttctcactccctgaaggagagaaaggtggaaggaagggaaggaggacacattttaattttttggggggatcgagtggcaaagttgaagggacaaggcactgtgaggggaaggcagagcctcactgtgtttaaactactatgcaaaaaacaaaacaaacaacaaaagcagcttgccttatatcattgtggaaggcaggacctctcctgggctcctggcttccccctggagctgggagagaggccggggttagggtgatctgtgtggcagcactgactgggtagtgtgggtttggccgaggttggtcatgaggctggggttcccgcaaggcactggcctccctgaccgcttgcttccttccggacctctgggttcagggcgggggcggagggatccttgatttccctgataacttgatgttcttccctccctcgccagccaacaatagaggcttagagatctgtaatttctctgtgagaaagtctgaaggggccaggcctggtctctgctcccttctacccgccttgggttaggactgtccggcagttgcctgcttttggctgctggcaggagagaagcagggtgggctgctggcagtgcaggagctggagtgagggccatcctctttctgctcctcgacacacgcaagccgctctcagcagttccctcgactggccagtcggggtattgatctgagccagcatcccccaagacttgaatggcttgagtgggactgcgttgaagggcactgtgtggcccccttccaaatctcagcttggagccagctgagcaggctttgctttattattattttttaagcctactgcagtgggtctgttgccaattttaattttttattgtcccaggagctccctctagtggtcaaggtagcaaaatgtgcccaaggactagaacttgggtccctctgccttgcctggaggcagaaggagggggctctgggtttgactgggattgtggtccccaggggtccgtggcctttaaggctcttctctcttttctgtttcccccacctgtgttacagtcttaaaaatactgtacataaaagatatatgtagagagagagagagagcgtgagaatgtgttagtgactatgtgtgatgtaatttatcacgatttggtggccttcgtcatgagttttttcctttgttttcttttgctgggggcacctcccacgggtcccctgtggcagtctggctgtgacacttccatagtcagcatctcttgttagccaaacagttccctttgacaggtacttggagggacaatggttttggaagagagacggcccttctctctcctcactcacccttgttctaaaggttacagggttcaaacatacctgattcttgttgttattgttgttgaatttttattttaaccaaaggttatcagagccagttgggcttggacctcagctgctaaaaagattttccgtttcctcgagggcaggaaaacatccaccctcgtgggtctcctccgtccagggccgagggaggcattggacaatgtggtatgggagtttcgtgggcagcgtggaagccggccctgggttgttccccaaggtggtgggagggtgacagatatatctttagacttaagactgtaaggcagcagtgttagcatgggagtaactaaggttactgtggttatcggtgtccggcggtattatttttactttcctccttgtatacataggtcatttgtctttgaggactagggtactctagggagtttgaaaactgcaggagccagaaagagatcctggcctgagagtcccttctggctggcttttaatatctgctctcctcttgggagtgaggacttggggcaggtgggtaggagagggaaagccagagtgtgatgggcctgcctcctgggctggttcctgggtccggcctgcctgcctgcctgcctgcctctccaccacatgcttttttcagttaatgtcagtgggccctgcttgtcccctcaccatgagcccacagcttgccaagaaagaccccaacgctcgctggggcagcaccagtcctagctgggacgaattggtccatcctttgtaaagctgtaaatacttaattttgactttctatttctaagcccagtgtcatattgacactggtattttagaattttctcagatgggctctcctgcgctgccctctgtctcctgtttttgggggttttatacaaacagaggattggggagggataggaagactagcatccttttggctccctggttggttgtgaaatacacacacacacacacacacacacacacacactcgcactcctctgagactccgaacagagaaaaaaattattggcaaatcaacacatttttctttctcgtcttgagaaaatgtcttgaggtccctgaagggccaaatccatcgtggactaactctgtgggtagagctcagatgacctagggagaattaaaccacttaagcttggagtgggaggagagggggtggggtgggggagaatataagatgtaacttaagctaaatgtaatctatttataaagcaagagactctcatctatttttatgaaaggaagggttttttaatctagggtaggcagttgtggtagcccagcattttcctgtggacgagacatggtgcatgttgttgctggattgaatggaacccattcctgtcccccggcctcgtcttctgtcctcacttttggtcatccacacccatgagcagcttcagcagagtgtaggtcccacttcaccccattctcctctcctctgacccctcagctccttggaagtcttggggtggggatctgagggggtgggtgggctgcaggaaattcagaaatgtggtgggtgggggaagggacaaggcgcattagggagggaacaagctgggctctggggataggctctgattaattagttactctgactctggtctgccgagatccatttccaacccagttgcgttgggagagggttgggaggcagcagagcatgggtgacagtgggagcacacgacttccttggagcctgggcctttgcgggtcccaggtggtcaggcagctggagcagaagtggaaatggcttaagatgctcatagcccagccccggctgtgtctactccaggccaagcctgggctgcagtccttgctatgttccccccagggccctggggggagggatcagggtgctgggggtttcctaggacaggggtcttcccccttgagacaccaagctctggctctagaagagctctctcctggagtggggagtctggaggggactgggtgggtgcaggtaaagccagattctctctggaagggaattttctatgaatggatgatttccaggctcagggtgggctgtgtgttagttctgagcaaatccctcaccaagacccttccctcccaagccctcaaagaaatgaggcaaagcccttccctgcaagaccccttgtggatgtttttgcatctacctgatttttagccccacccagggagactttataccccatgatcctgccccaccgttgctgttgtctgccagctgggtctagcatcacagggaagggggggatttatactcatggaaagactactgatcctaccggaaaccaacctgtttactgtactgttgtaaatatcatgccctttatatcctgtatattggcttcttttaaataaagtgaaatgtcttagaactg

SEQ ID NO: 761 - protein, 584 aa, Homosapiens; identical to SEQ ID NO: 753

SEQ ID NO: 762 - DNA, 5975 bp, Homosapiens
atggctgccttgtttcctggtcggactgagctctttgaatggagggctggaggacccacctcgtggttctgctgtgacctccggaagtccccgcagaacctggagctctgtgggctcgggaagaggcagcgcctggatccagatcctcctgggagcgtctctgacagcccgggcggtgagacccgcgacccttctggccccgcgcagataccgcggcctccaccgcgtcccgaggagcggccgagtgccctctctcgcctcggcgcccgcatccggggccatccgtcctgccgtctctgcggaggccgcatctggcgcgcatctggaaccgcccggccggccgcgctggagcccgcgcccaccctggcccggccgcgccgggagccctgcccggagctggagccgcacctggagccgcgggcccggggccctgagccgcgcagccggcgcatggggctcaacgtgcgcttccgctgcttcctggctaaggtgcacgagctggagcggcgcaaccggctgctggagaagcagctggagcagcagcagagcgagcgcgagcggcggctgcgctacaagaccttctcccgcgagcaggcccactacggccgcctgcccgggaccatctggagctacacgcaggtgcggcgcacgggcggcggcggcgtggagaccgtgcagggccccggcgtgtcgtgggtgcaccccgacggcgtgggcgtgcagatcgacaccatcacgccggagatccgcgcgctctacaacgtgctggccaaggtgaagcgcgagcgcgacgagtataagcggaggtgggaggaggagctcgccaagcgcatgaaccttcagaccatggtggacacgctgcaggaggcagcacaggaggctgatgccatccaggaggagatgaatgagaagatcgagcggctcaaggccgagctggtggtgtttaaggggcttatgagtgaccccatgacagacctggacacaaagatccaagaaaaggccatgaaggtggacatggacatctgccgccgaatcgatatcacggccaagctgtgcgatgtcgcacagcagcggaactcagaagacgtgtccaagatcttccaggtggtccccaaaaagaaagagcgtaaggtggcttccgatgatgacatctctgagcaggacggggaggtgaaccggttctcggacgatgaggtcggctccatgaacatcaccgatgagatgaagcgcatgtttaaccagctgcgggagacctttgactttgacgacgactgtgacagcctgacgtgggaagagaatgaagacacgctgctgctctgggaggatttcaccaactgcaatccgaccatcgacctgcagggcgagcaagaggaaaacttgggcaacttgatccatgagaccgaatccttcttcaagacgagagacaaggagtaccaggaaacgataggtcagatcgagctcgagctggccacagccaaaagtgacatgaaccgacacctgcacgagtacatggagatgtgcagcatgaagcgaggcctggacgtgcagatggagacctgccgccggctcatcaaaggctccgcagacaggaattcaccgtcccccagctccgtggccagcagcgactcaggaagtacagatgagatccaggatgagttcgagcgcgaggcggatgtggagcccatggtcagctgatgactgaggccctgcgagcctggtggtcttggtgatggggccctgccacctctcctcatggggccaggaaggcccctcggagtggggttcgaagccacaccacacagactttctctgccctcccttctctggaggccctgagggactgctgcttccttccttccttccacaccaccaacgggtgccccgtctccatcccccacccacccaaggaatggtgctgtcaatttctattgttctccacattacaaatgcagacttctgtgcggactttgcagtgttaactgtgccttctcccttaagctgagccactttgagctccaaagaattattcctagcaggtgtttttatacagaactctaagctgagggccgggccaaccggccgtggtgtaatgtggtttctgccgtccgtcccacctgctcctctgattggccatgggctatgccctcccttcctcctgagccagcccagactcggcctggagcttggggtgctctgccaacccccaggaaggagccgcttgcctctgtgagctttctaggcctgggtagggaccaccccaattttctcactccctgaaggagagaaaggtggaaggaagggaaggaggacacattttaattttttggggggatcgagtggcaaagttgaagggacaaggcactgtgaggggaaggcagagcctcactgtgtttaaactactatgcaaaaaacaaaacaaacaacaaaagcagcttgccttatatcattgtggaaggcaggacctctcctgggctcctggcttccccctggagctgggagagaggccggggttagggtgatctgtgtggcagcactgactgggtagtgtgggtttggccgaggttggtcatgaggctggggttcccgcaaggcactggcctccctgaccgcttgcttccttccggacctctgggttcagggcgggggcggagggatccttgatttccctgataacttgatgttcttccctccctcgccagccaacaatagaggcttagagatctgtaatttctctgtgagaaagtctgaaggggccaggcctggtctctgctcccttctacccgccttgggttaggactgtccggcagttgcctgcttttggctgctggcaggagagaagcagggtgggctgctggcagtgcaggagctggagtgagggccatcctctttctgctcctcgacacacgcaagccgctctcagcagttccctcgactggccagtcggggtattgatctgagccagcatcccccaagacttgaatggcttgagtgggactgcgttgaagggcactgtgtggcccccttccaaatctcagcttggagccagctgagcaggctttgctttattattattttttaagcctactgcagtgggtctgttgccaattttaattttttattgtcccaggagctccctctagtggtcaaggtagcaaaatgtgcccaaggactagaacttgggtccctctgccttgcctggaggcagaaggagggggctctgggtttgactgggattgtggtccccaggggtccgtggcctttaaggctcttctctcttttctgtttcccccacctgtgttacagtcttaaaaatactgtacataaaagatatatgtagagagagagagagagcgtgagaatgtgttagtgactatgtgtgatgtaatttatcacgatttggtggccttcgtcatgagttttttcctttgttttcttttgctgggggcacctcccacgggtcccctgtggcagtctggctgtgacacttccatagtcagcatctcttgttagccaaacagttccctttgacaggtacttggagggacaatggttttggaagagagacggcccttctctctcctcactcacccttgttctaaaggttacagggttcaaacatacctgattcttgttgttattgttgttgaatttttattttaaccaaaggttatcagagccagttgggcttggacctcagctgctaaaaagattttccgtttcctcgagggcaggaaaacatccaccctcgtgggtctcctccgtccagggccgagggaggcattggacaatgtggtatgggagtttcgtgggcagcgtggaagccggccctgggttgttccccaaggtggtgggagggtgacagatatatctttagacttaagactgtaaggcagcagtgttagcatgggagtaactaaggttactgtggttatcggtgtccggcggtattatttttactttcctccttgtatacataggtcatttgtctttgaggactagggtactctagggagtttgaaaactgcaggagccagaaagagatcctggcctgagagtcccttctggctggcttttaatatctgctctcctcttgggagtgaggacttggggcaggtgggtaggagagggaaagccagagtgtgatgggcctgcctcctgggctggttcctgggtccggcctgcctgcctgcctgcctgcctctccaccacatgcttttttcagttaatgtcagtgggccctgcttgtcccctcaccatgagcccacagcttgccaagaaagaccccaacgctcgctggggcagcaccagtcctagctgggacgaattggtccatcctttgtaaagctgtaaatacttaattttgactttctatttctaagcccagtgtcatattgacactggtattttagaattttctcagatgggctctcctgcgctgccctctgtctcctgtttttgggggttttatacaaacagaggattggggagggataggaagactagcatccttttggctccctggttggttgtgaaatacacacacacacacacacacacacacacacactcgcactcctctgagactccgaacagagaaaaaaattattggcaaatcaacacatttttctttctcgtcttgagaaaatgtcttgaggtccctgaagggccaaatccatcgtggactaactctgtgggtagagctcagatgacctagggagaattaaaccacttaagcttggagtgggaggagagggggtggggtgggggagaatataagatgtaacttaagctaaatgtaatctatttataaagcaagagactctcatctatttttatgaaaggaagggttttttaatctagggtaggcagttgtggtagcccagcattttcctgtggacgagacatggtgcatgttgttgctggattgaatggaacccattcctgtcccccggcctcgtcttctgtcctcacttttggtcatccacacccatgagcagcttcagcagagtgtaggtcccacttcaccccattctcctctcctctgacccctcagctccttggaagtcttggggtggggatctgagggggtgggtgggctgcaggaaattcagaaatgtggtgggtgggggaagggacaaggcgcattagggagggaacaagctgggctctggggataggctctgattaattagttactctgactctggtctgccgagatccatttccaacccagttgcgttgggagagggttgggaggcagcagagcatgggtgacagtgggagcacacgacttccttggagcctgggcctttgcgggtcccaggtggtcaggcagctggagcagaagtggaaatggcttaagatgctcatagcccagccccggctgtgtctactccaggccaagcctgggctgcagtccttgctatgttccccccagggccctggggggagggatcagggtgctgggggtttcctaggacaggggtcttcccccttgagacaccaagctctggctctagaagagctctctcctggagtggggagtctggaggggactgggtgggtgcaggtaaagccagattctctctggaagggaattttctatgaatggatgatttccaggctcagggtgggctgtgtgttagttctgagcaaatccctcaccaagacccttccctcccaagccctcaaagaaatgaggcaaagcccttccctgcaagaccccttgtggatgtttttgcatctacctgatttttagccccacccagggagactttataccccatgatcctgccccaccgttgctgttgtctgccagctgggtctagcatcacagggaagggggggatttatactcatggaaagactactgatcctaccggaaaccaacctgtttactgtactgttgtaaatatcatgccctttatatcctgtatattggcttcttttaaataaagtgaaatgtcttagaactg

SEQ ID NO: 763 - protein, 564 aa, Homosapiens; identical to SEQ ID NO: 755

SEQ ID NO: 764 - DNA, 1050 bp, Homosapiens
tgaagcgcgagcgcgacgagtataagcggaggtgggaggaggagctcgccaagcgcatgaaccttcagaccatggtggacacgctgcaggaggcagcacaggaggctgatgccatccaggaggagatgaatgagaagatcgagcggctcaaggccgagctggtggtgtttaaggggcttatgagtgacgtggtccccaaaaagaaagagcgtaaggtggcttccgatgatgacatctctgagcaggacggggaggtgaaccggttctcggacgatgaggtcggctccatgaacatcaccgatgagatgaagcgcatgtttaaccagctgcgggagacctttgactttgacgacgactgtgacagcctgacgtgggaagagaatgaagacacgctgctgctctgggaggatttcaccaactgcaatccgaccatcgacctgcagggcgagcaagaggaaaacttgggcaacttgatccatgagaccgaatccttcttcaagacgagagacaaggagtaccaggaaacgataggtcagatcgagctcgagctggccacagccaaaagtgacatgaaccgacacctgcacgagtacatggagatgtgcagcatgaagcgaggcctggacgtgcagatggagacctgccgccggctcatcaaaggctccgcagacaggaattcaccgtcccccagctccgtggccagcagcgactcaggaagtacagatgagatccaggatgagttcgagcgcgaggcggatgtggagcccatggtcagctgatgactgaggccctgcgagcctggtggtcttggtgatggggccctgccacctctcctcatggggccaggaaggcccctcggagtggggttcgaagccacaccacacagactttctctgccctcccttctctggaggccctgagggactgctgcttccttccttccttccacaccaccaacgggtgccccgtctccatcccccacccacccaaggaatggtgctgtcaatttctattgttctccacattacaaatgcagacttctgtgcggac

SEQ ID NO: 765 - protein, 240 aa, Homosapiens; identical to SEQ ID NO: 751

SEQ ID NO: 766 - DNA, 758 bp, Homosapiens
cttcctcatcttggggctaggaccactgcaaatcctgcctgaagatcttactgcctaggaagcacattccagaaccctttctgagacgggccgtccagtgtccttgtggccttttccattgggaagtgcttcctggtgtctaaccatgatccctactgcttcatttccccctttgtttagcctttcacagaggaggaaagtggttggatatcaattgcctggtggttctcaaggcagcaccattaccttgctgcgtaccctcttcccacctacaatctcccttttctccacttcctgagagactgtgccttgactcagatacaagttgagacacaatcttcatgcagaaaagatctggctggtccctgtagtatcccacaaccttcccagcagctggaggtggggcttgctcactaggaggagcaaaataatgttaggcactggtgtttatgatcttatggggtcttcaccatccagggaggtgtaggtactattgttattcccattttacagatgaggaaactgaggctcagagaggtaaagtcgctttagcagatcaccagctgcggagcggctgagttggacgcccatcccagctctgcctgacgtcaaagtgttttgggataagggacagggggtggctgcaagtggcctcccactttgccccaagccggcttcttctcgccatgctggcctggaccatctcctttttggctttttgctgagtccgggctgggaatcctgtggctggaggccca

SEQ ID NO: 767 - protein, 50 aa, Homosapiens
MIPTASFPPLFSLSQRRKVVGYQLPGGSQGSTITLLRTLFPPTISLFSTS

SEQ ID NO: 768 - DNA, 1177 bp, Homosapiens
acataggaatcctttgcctttctttaagtcactagccttgcatttgccacgtctgccctggcgatgtctcccccggttccattttaccctgatctggaagatgagcactgagagaatcagatgaatttcatggagcatttttgtaaccaataaacttctgggtcccagggctccagaggttcttgcccacagctgcttttttccaagcagaaggctagtcgctggaactccgagatgcatacaccactgtgactcttcccttgctcccagcatgccttgctctgtccttgtgagtatcctcctagggacttcatgtgatggaactggattttcttttccaggctgacagataaggcagtgaaggactattccgcttaccgttcttcccttctcttttgggccctcgtcgatctcatttacaacatgtttaaggtaaggaggctgtcagaggcccagtgggttttggcaagagtgtaaaatgtctgcactcctgtccctgactctgcctcagcacccacatggctgctcctccgctgggcctgggggcgcttttttcctagaaacaaacaaccccaactgtgggagggattgacactggcagcctggagccttgtgtctgtgagaaggtgcctaccagtaacacagagggaggctggtcctgctctctcgctgagtacatccgccacaacgacatgcccatctacgaagctgccgacaaagccctgaaaaccttccaggaggagttcatgccagtggagaccttctcagagttcctcgatgtggccggtcttttatcagaaatcaccgatccagagagcttcctgaaggacctgttgaactcagtcccctgaccaccacacagcagctgcggcggcgaagacgaagctggcttgccttccaccctctgttctccctccttgtgcattaagttccctccgcgggatgctgcattgttaccccgccctcccctctctcatttttcttggtgtggcttggggtttttaggcttcctgttttatctcgtgtgtgtggtgcaccagctatgaggttgtctgtaacccaagccatcaaagggcctgtacatacctaggagccatgagttgtcccggccagcttcatacttgagtgtgcacatcttgagaaataaacaagtgacttaacacacattgaaaaggaa

SEQ ID NO: 769 - protein, 52 aa, Homosapiens [sequence omitted]

SEQ ID NO: 770 - DNA, 3885 bp, Homosapiens
catcagttttgaaaagctgcttagtggtacgcacgtgctaggtgaaggcatgctttgtgactgcggtggttgacaccagcccttctcccttctcagtctgtcatgtcaagagtctaagctgatggctggcaggttgcctggtcatttctgggttttctgttccgctactagaaaggtagagccagtcttacctactgtagaaaatgttaggaaggcagccaggcacagggtgataaaaccaatgagatgatcagggctaagaacagtaatcaggttttccacatcttgctggtgttggcataagccaggaaagtttcagtgtggccacatggggtattttctaataattaaaaactcgtcttcattctctcttcttggttacattcctatcccatgcgtcccacattccatgaacctttcttcctctagaccactctcctatacgtgtggacacctccccaagaaagagcatgtcagaaaggaagtggtctttgatttatgaccttgggctgtgatttgggacagatggtctcaagagaaacagctggaaactgccaccacagcatctctttgaggacccccatggattgctgtgcgcagaggagaccccatgggtaccactcaggctgccaatggccccacacagtctctacctttcctggggagctacggagcaggctctgggtttggcattttgcttctgtccctcgagtgaaatgtgcctctgcttcatttctggaagatcgggtttgtgatttttgtgattctgctttagcccaggattcgagggatcatgtccacatttgtaggccatccagggagcagagagaaacttttagggccgtgataaagacaagccaagtggaaaatagcctgtgccctcattggcacacctggtgtctttatttccattagccctgattgatcaagcgttgctggtctgtgggcacttcacgctcccagagagaccagattggagctgtcctgttgaatctggcctgtaccagatcatcactggagagtgggagggggcgtcttgttagattcctaggtaacccctgcccccattcctaacatatcactttccagtatttcccaagagcctgaattaatagttaactagctgctggaaatcaaaagttagatcttgagaatactaagttgataagtcaggcttggccagtatccatatgctgcatccacagcaaatagagtggccatttattgggcacagtctctccatggcgggtgtgcaatctgaacccacaggagctgttttgctctcacttaggagactagcattcattattgtcccaggcagttcaggaaaagctgatttggtcacagcttaattaggaaatccagtgtgagctactacattcatgagttgctgttttctctgtagcagtttcgtcacctttactaattggccttaaataattaagttgggcagggtcactcaggatttctgcttaccaaagcacaacagccacagcaaagggccaaatacggccgtggtccggggccgtgagcccggcactcatcaggcagactaggaaaggcactgtgggttagcccgatactgggaggagacccatgggggagagaccgcggctggaagggcgtgtagagatatcatcctgatgctggggcagcctcactggcggcaggctttgtcctaagtcctgtaagtcatggggtaaggggtagtagcagagacacagaaatgtagctcagcagaagctggcctcttctgcacacttgacattcagaaaaaaagttcctctgccaggaacttgcaagtacaaagcctgggacattctcaggcgtctgtcagaacttgatctgttatcttgtctgccagggtaaagagctgcagagaaatggattcttgtcctcatccacgggtccaccttccaggactttaggctgcagcatcatcacacgtatgcgggagagaaagtgggggcttgggaaggtactggggcagagggaggccacaggaagcatatttcagtagagagggaattgtccccatttaatattatttgttttttgcgagttatttattgaatgcaggtgtggatagcctgtctcatgctaggcagccccttcacttgaggcccatatagttttagcttctataatgaataccatctatgtttcttatttttatgattcttatatatacccatgcattttaatactaaacattttaatatatgtccctttagtcatgggatgtgttccagtgtgttttgaggtgtagaatactctgtgacaagggctcacctaggctttacttattacagatgtgatggctgttggcaaacaaaacctccgtagagcttgggtggtagaaactgaatcctgacactgatatttcactgtctgtgccgaggggagcctgatatttctgtgtttcatactggctctacctggtgtaatcattcctcaaacctcaaaccaagaattctgctgagaaggcagtggacattgttagaggcagtctccccctgcctgtcgctccccatattccaaggaactggctggtctttaatcctgaactgaatcattggattaagtagcaacgatactggttagaaacaatggggtgtggtgagcaacttggattatcccaggatttaggtgatgtcagggtggctgcatgctccatcttagacattaccattgcttgataccaacttcctagcagcttgctgccatttaacacagcacatgtttgacaagttaccgtgtttgactggtttaggtctgctggcttttaagaaatttctcctagtgggaatgtaaagactgaattaaaaccttgtttcctacctcatttattaggttccatcaaattccaagagcttgtcggggcccaaacacaagggatacataggaatcctttgcctttctttaagtcactagccttgcatttgccacgtctgccctggcgatgtctcccccggttccattttaccctgatctggaagatgagcactgagagaatcagatgaatttcatggagcatttttgtaaccaataaacttctgggtcccagggctccagaggttcttgcccacagctgcttttttccaagcagaaggctagtcgctggaactccgagatgcatacaccactgtgactcttcccttgctcccagcatgccttgctctgtccttgtgagtatcctcctagggacttcatgtgatggaactggattttcttttccaggctgacagataaggcagtgaaggactattccgcttaccgttcttcccttctcttttgggccctcgtcgatctcatttacaacatgtttaagaaggtgcctaccagtaacacagagggaggctggtcctgctctctcgctgagtacatccgccacaacgacatgcccatctacgaagctgccgacaaagccctgaaaaccttccaggaggagttcatgccagtggagaccttctcagagttcctcgatgtggccggtcttttatcagaaatcaccgatccagagagcttcctgaaggacctgttgaactcagtcccctgaccaccacacagcagctgcggcggcgaagacgaagctggcttgccttccaccctctgttctccctccttgtgcattaagttccctccgcgggatgctgcattgttaccccgccctcccctctctcatttttcttggtgtggcttggggtttttaggcttcctgttttatctcgtgtgtgtggtgcaccagctatgaggttgtctgtaacccaagccatcaaagggcctgtacatacctaggagccatgagttgtcccggccagcttcatacttgagtgtgcacatcttgagaaataaacaagtgacttaacacacattgaaaaggaa

SEQ ID NO: 771 - protein, 78 aa, Homosapiens
MFKKVPTSNTEGGWSCSLAEYIRHNDMPIYEAADKALKTFQEEFMPVETFSEFLDVAGLLSEITDPESFLKDLLNSVP

SEQ ID NO: 772 - DNA, 1537 bp, Homosapiens
cactgagtctggtgtggtcatcatcatcatcatcattgcaacttaggacgcatgaggacaagaagcagcgctcatctggaagaggctgttctaacgaaggcgggaggatcctagatcagaagaagacaaaccggaagagggagcctaggaaaggaaccacatgcacatttagtgcaaaccatgtaaacataacataacaagactatgtggagcaagggggagtcaggctgtggacccaccagggaatcttgattcatgtttttggccccatcactcactagcttgctgactttgggcaagtcacttcacttttctgggcctctggagttactagcacagttccatgttggggagattgtgaacgtccctgatatatggtgctcaggaaccagtagttgcttggaattgtattagagctggggtaggagctagacatggggccagggaagaagggaagatgccgcgaagaagggcctggaaggggacgaagggcgtggattatcagaggaagtgggagtagtcggcaaggatgggtggggagtgttgagtcatccaagcgttcagcaaatgtcacaagacaacgacaaattgagcaaattcttcctgctcttgctgccgggtcctgcttccaccctgcttttattttatcatgccgcttttcttctagaacccgagcaacttcccgagaagagaagaacctccaaggctttctggaacagcccaaggagaagtgggtggagagtgcctttgaagtggacgggccctactatttcacagtcttggcccttcacatcctgccccctgagcagtggagagccacacgtgtggaaatcttgcggaggctgttggtgacctcgcaggctcgggcagtggctccaggtggagccaccaggctgacagataaggcagtgaaggactattccgcttaccgttcttcccttctcttttgggccctcgtcgatctcatttacaacatgtttaagaaggtgcctaccagtaacacagagggaggctggtcctgctctctcgctgagtacatccgccacaacgacatgcccatctacgaagctgccgacaaagccctgaaaaccttccaggaggagttcatgccagtggagaccttctcagagttcctcgatgtggccggtcttttatcagaaatcaccgatccagagagcttcctgaaggacctgttgaactcagtcccctgaccaccacacagcagctgcggcggcgaagacgaagctggcttgccttccaccctctgttctccctccttgtgcattaagttccctccgcgggatgctgcattgttaccccgccctcccctctctcatttttcttggtgtggcttggggtttttaggcttcctgttttatctcgtgtgtgtggtgcaccagctatgaggttgtctgtaacccaagccatcaaagggcctgtacatacctaggagccatgagttgtcccggccagcttcatacttgagtgtgcacatcttgagaaataaacaagtgacttaacacacattgaaaaggaa

SEQ ID NO: 773 - protein, 258 aa, Homosapiens
MGPGKKGRCREEGPGRGRRAWIIRGSGSSRQGWVGSVESSKRSANVTRQRQIEQILPALAAGSCFHPAFILSCRFSSRTRATSREEKNLQGFLEQPKEKWVESAFEVDGPYYFTVLALHILPPEQWRATRVEILRRLLVTSQARAVAPGGATRLTDKAVKDYSAYRSSLLFWALVDLIYNMFKKVPTSNTEGGWSCSLAEYIRHNDMPIYEAADKALKTFQEEFMPVETFSEFLDVAGLLSEITDPESFLKDLLNSVP

SEQ ID NO: 774 - DNA, 3479 bp, Homosapiens
atgacttcattgtatttattatgtagctgtagcaaactcttgggagcatttggactgtttacagtttttaagcaatcccttaccagcgctgtgactgttggcttcctggaaaggagttctgcaagggttcgattaagaagatgtaactacagagtgtctggtgctgcaagctcctgggacagtggtggaggtaactggtatccttggcagtgatatcacactgactgcacttgtcatcctgtttaggaaatagctcgtctgctggccctggaggaggctaccctgagtaccgatctgcagcagggttatgcccttaaaagtctcacaggccttctctcctcctttgttgaggtggaatccatcaaaagacattttaaaagtcgcttggtgggtactgtgctgaatggatacctgtgcttgcggaagctggtggtgcagaggaccaagctgatcgatgagacgcaggacatgctgctggagatgctggaggacatgaccacaggtacagaatcagaaaccaaggccttcatggctgtgtgcattgagacagccaagcgctacaatctggatgactaccggaccccggtgttcatcttcgagaggctctgcagcatcatttatcctgaggagaatgaagtcactgagttctttgtgaccctggagaaggatccccaacaagaagacttcttacagggcaggatgcctgggaacccgtatagcagcaatgagccaggcatcgggccgctgatgagggatataaagaacaagatttgccaggactgtgacttagtggccctcctggaagatgacagtggcatggagcttctagtgaacaataaaatcattagtttggaccttcctgtggctgaagtttacaagaaagtctggtgtaccacgaatgagggagagcccatgaggattgtttatcgtatgcgggggctgctgggcgatgccacagaggagttcattgagtccctggactctactacagatgaagaagaagatgaagaagaagtgtataaaatggctggtgtgatggcccagtgtgggggcctggaatgcatgcttaacagactcgcagggatcagagatttcaagcagggacgccaccttctaacagtgctactgaaattgttcagttactgcgtgaaggtgaaagtcaaccggcagcaactggtcaaactggaaatgaacaccttgaacgtcatgctggggaccctaaacctggcccttgtagctgaacaagaaagcaaggacagtgggggtgcagctgtggctgagcaggtgcttagcatcatggagatcattctagatgagtccaatgctgagcccctgagtgaggacaagggcaacctcctcctgacaggtgacaaggatcaactggtgatgctcttggaccagatcaacagcacctttgttcgctccaaccccagtgtgctccagggcctgcttcgcatcatcccgtacctttcctttggagaggtggagaaaatgcagatcttggtggagcgattcaaaccatactgcaactttgataaatatgatgaagatcacagtggtgatgataaagtcttcctggactgcttctgtaaaatagctgctggcatcaagaacaacagcaatgggcaccagctgaaggatctgattctccagaaggggatcacccagaatgcacttgactacatgaaaaagcacatccctagcgccaagaatttggatgccgacatctggaaaaagtttttgtctcgcccagccttgccatttatcctaaggctgcttcggggcctggccatccagcaccctggcacccaggttctgattggaactgattccatcccgaacctgcataagctggagcaggtgtccagtgatgagggcattgggaccttggcagagaacctgctggaagccctgcgggaacaccctgacgtaaacaagaagattgacgcagcccgcagggagacccgggcagagaagaagcgcatggccatggcaatgaggcagaaggccctgggcaccctgggcatgacgacaaatgaaaagggccaggtcgtgaccaagacagcactcctgaagcagatggaagagctgatcgaggagcctggcctcacgtgctgcatctgcagggagggatacaagttccagcccacaaaggtcctgggcatttataccttcacgaagcgggtagccttggaggagatggagaataagccccggaaacagcagggctacagcaccgtgtcccacttcaacattgtgcactacgactgccatctggctgccgtcaggttggctcgaggccgggaagagtgggagagtgccgccctgcagaatgccaacaccaagtgcaacgggctccttccggtctggggacctcatgtccctgaatcagcttttgccacttgcttggcaagacacaacacttacctccaggaatgtacaggccagcgggagcccacgtatcagctcaacatccatgacatcaaactgctcttcctgcgcttcgccatggagcagtcgttcagcgcagacactggcgggggcggccgggagagcaacatccacctgatcccgtacatcattcacactgtgctttacgtcctgaacacaacccgagcaacttcccgagaagagaagaacctccaaggctttctggaacagcccaaggagaagtgggtggagagtgcctttgaagtggacgggccctactatttcacagtcttggcccttcacatcctgccccctgagcagtggagagccacacgtgtggaaatcttgcggaggctgttggtgacctcgcaggctcgggcagtggctccaggtggagccaccaggctgacagataaggcagtgaaggactattccgcttaccgttcttcccttctcttttgggccctcgtcgatctcatttacaacatgtttaagaaggtgcctaccagtaacacagagggaggctggtcctgctctctcgctgagtacatccgccacaacgacatgcccatctacgaagctgccgacaaagccctgaaaaccttccaggaggagttcatgccagtggagaccttctcagagttcctcgatgtggccggtcttttatcagaaatcaccgatccagagagcttcctgaaggacctgttgaactcagtcccctgaccaccacacagcagctgcggcggcgaagacgaagctggcttgccttccaccctctgttctccctccttgtgcattaagttccctccgcgggatgctgcattgttaccccgccctcccctctctcatttttcttggtgtggcttggggtttttaggcttcctgttttatctcgtgtgtgtggtgcaccagctatgaggttgtctgtaacccaagccatcaaagggcctgtacatacctaggagccatgagttgtcccggccagcttcatacttgagtgtgcacatcttgagaaataaacaagtgacttaacacacattgaaaaggaa

SEQ ID NO: 775 - protein, 894 aa, Homosapiens
MLLEMLEDMTTGTESETKAFMAVCIETAKRYNLDDYRTPVFIFERLCSIIYPEENEVTEFFVTLEKDPQQEDFLQGRMPGNPYSSNEPGIGPLMRDIKNKICQDCDLVALLEDDSGMELLVNNKIISLDLPVAEVYKKVWCTTNEGEPMRIVYRMRGLLGDATEEFIESLDSTTDEEEDEEEVYKMAGVMAQCGGLECMLNRLAGIRDFKQGRHLLTVLLKLFSYCVKVKVNRQQLVKLEMNTLNVMLGTLNLALVAEQESKDSGGAAVAEQVLSIMEIILDESNAEPLSEDKGNLLLTGDKDQLVMLLDQINSTFVRSNPSVLQGLLRIIPYLSFGEVEKMQILVERFKPYCNFDKYDEDHSGDDKVFLDCFCKIAAGIKNNSNGHQLKDLILQKGITQNALDYMKKHIPSAKNLDADIWKKFLSRPALPFILRLLRGLAIQHPGTQVLIGTDSIPNLHKLEQVSSDEGIGTLAENLLEALREHPDVNKKIDAARRETRAEKKRMAMAMRQKALGTLGMTTNEKGQVVTKTALLKQMEELIEEPGLTCCICREGYKFQPTKVLGIYTFTKRVALEEMENKPRKQQGYSTVSHFNIVHYDCHLAAVRLARGREEWESAALQNANTKCNGLLPVWGPHVPESAFATCLARHNTYLQECTGQREPTYQLNIHDIKLLFLRFAMEQSFSADTGGGGRESNIHLIPYIIHTVLYVLNTTRATSREEKNLQGFLEQPKEKWVESAFEVDGPYYFTVLALHILPPEQWRATRVEILRRLLVTSQARAVAPGGATRLTDKAVKDYSAYRSSLLFWALVDLIYNMFKKVPTSNTEGGWSCSLAEYIRHNDMPIYEAADKALKTFQEEFMPVETFSEFLDVAGLLSEITDPESFLKDLLNSVP

SEQ ID NO: 776 - DNA, 8192 bp, Homosapiens
gaagatggcgacgagcggcggcgaagaggcggcggcagcggctccggcgccggggaccccggcaacgggggcggacacgaccccgggctgggaggtggctgtgcggcccctgctgtccgcgtcctactccgccttcgagatgaaggagttgccgcagctggtggcctcagtcatcgagagtgaatcagaaatcctgcaccatgagaagcagtacgagccattctactcatcttttgttgcactttccacacactatattacaacagtttgcagtctcattccccggaaccaacttcagtcagtggcagcagcctgtaaagttctaattgagttttctctcctgcgtctggagaatccagatgaggcttgtgctgtgtcccagaaacacttgattctcctaatcaagggcctgtgcactggctgtagccgactagatagaactgaaattatcacatttacagcaatgatgaaatccgccaagctgccccaaacagtgaagacactttcagacgtggaagatcagaaagagctggcctcaccagtaagccctgagttgaggcaaaaggaggtacagatgaattttttgaaccagctgacctcagtttttaaccctagaactgtagcatcacaacctatcagtacacagactctggtggaaggagaaaatgatgagcagtcatctacagatcaagcctcagctatcaaaaccaagaatgtgttcatagctcagaacgtggctagtcttcaagagcttggtggctcggagaagctactgcgtgtatgtttgaacctgccatatttcctacgctatatcaatcggttccaagatgcagttttagctaattccttcttcataatgcctgcaacagtagcagatgccactgctgttcgtaatggctttcattcattggtgattgatgtaactatggcattggataccctttctctacctgtgttggaacctctcaatccttctcgtctacaagatgtgacagtcctcagcctaagttgtctgtatgcaggtgtgagtgtggcaacgtgcatggccatcctccatgtgggtagtgcccagcaagtgcggacagggtccacgagctccaaagaagatgactatgaaagtgacgcagctacaattgtccagaaatgtctcgaaatctatgacatgattggacaagcaatcagcagttctcgccgggctggtggtgagcactatcagaatttccaattgctgggtgcttggtgcttgttaaacagccttttcctcatactgaacctcagtcctactgcgttggctgataaggggaaagagaaggacccactggctgccctccgagtcagagacatcctttctcgtactaaagagggagtgggctcccctaaactggggcctggaaaagggcatcagggatttggggtactctcagtaatattggcaaaccatgccatcaaactgctaacgtctctctttcaagacctacaagtggaggcccttcacaagggttgggagacagatggcccccctgcagccttgagcattatggcccagagcacctccatacagaggattcaacggctgattgactctgtcccactgatgaacctgctcttgacgttactttcaacttcctacagaaaggcatgtgtcctgcagcggcagaggaagggctccatgagcagcgatgccagcgcctccaccgactccaatacttactatgaggacgatttcagtagcacggaggaggacagcagccaagacgatgacagtgagcctattttggggcaatggtttgaggagactatttctcccagtaaagagaaagcagcacctccgcctcctcccccacctcctccactggaaagctctcctcgggttaaaagccccagtaagcaggcccctggtgagaagggcaacattctggcgagtcgcaaagatcctgagttgttcttaggtctggcttccaacattttgaacttcatcacctcttccatgctgaactctcggaacaattttatccgaaactatctgagtgtatctctttcagaacaccatatggccaccctagccagtatcatcaaggaggtggacaaagatggactcaagggttcatcagatgaagagtttgctgcagctctctatcacttcaaccactcactggtaacctctgaccttcagtcacctaacctgcagaacacactgttgcagcagctaggagtggctcctttttctgagggcccttggcccttgtacattcaccctcaaagcctctctgtgctttcacgcctcctgctcatctggcaacataaagccagtgctcaaggtgaccctgacgtcccagaatgccttaaagtttgggacaggtttttgtctacaatgaagcagaatgccctgcaaggtgtggtgcccagtgagacagaggatctgaatgtagaacacctgcagatgctcctcctcattttccacaatttcaccgagacaggccggcgggccatattgtcgctttttgtccagatcatccaggagttgagcgtcaacatggatgctcagatgcgcttcgtgccgcttatcttggctcgcctccttctcatctttgattatctgcttcatcagtactccaaagcccctgtgtatctatttgagcaggtacagcataacctgctaagtcctccctttgggtgggcaagtggatcccaggacagcaacagccgccgggcaaccactcctctctatcatggattcaaagaagtagaagaaaactggtctaagcatttctcatcagatgctgtcccacaccccagattctactgtgtcctgtccccagaagcctcagaggatgatttgaaccgacttgattctgtggcatgtgacgtccttttctccaagcttgtcaagtatgatgagctttatgctgcactgacagccctgcttgcagctgggtcccagcttgatacagttaggagaaaggaaaacaagaatgtaacagccttggaggcctgtgcccttcaatattacttcttgatactgtggaggatcctaggaattttaccaccatcaaagacttacattaaccagctatccatgaactcacctgagatgagcgaatgtgacatcttgcacactctgcgatggtcttctcggctccggatcagctcctatgtcaactggataaaggatcaccttatcaaacagggaatgaaggctgagcatgctagctcgcttctagaactggcatccaccactaagtgtagctcagtgaaatatgatgttgaaatagtagaggaatacttcgctcgacagatctcatccttctgtagtatcgactgtaccaccatcttgcagctgcatgaaattcccagtctgcagtccatctacacccttgatgccgcgatctcaaaggtccaggtctctttggatgagcatttttctaagatggctgctgagactgatcctcataagtcgtctgagattaccaagaacctacttccagccacgctgcaactcattgacacctatgcatcgttcaccagagcctatttgctgcaaaactttaatgaagagggaacaactgagaaaccttccaaggagaaactgcaaggctttgctgctgttttggctattggctctagcaggtgcaaggcaaatactctgggtccgacactggttcagaatttgccatcgtcagtgcagactgtgtgtgagtcctggaacaacatcaataccaatgaatttcccaatattggatcctggcgcaatgcctttgccaatgacaccatcccttcagagagttatattagtgcagtgcaggctgcacacctggggactctctgtagccaaagtctgcccctggctgcttccctgaagcataccctcctctcactggtcaggttgactggagatcttattgtttggtcagatgagatgaacccaccacaggtaattcggacactgctacctcttcttttggaatcaagcactgagagtgttgccgagatcagtagcaactccctggaacgcatcttgggccctgctgagtctgatgagttcttggctcgtgtttatgagaagctgatcactggttgttacaacattctggccaatcatgcagatcctaacagtggactggatgaatccatcctggaggaatgtctccagtacttggaaaagcagctggaaagtagccaggctcgtaaagctatggaggagtttttctctgacagtggagaacttgtacagatcatgatggcaacagccaatgagaacctctctgctaaattctgtaaccgagttttgaaattcttcaccaaactcttccagctgactgagaagagccctaacccgagcctgttgcatctctgtggctccctggcacaactggcctgtgtggaacctgtgcgcctgcaggcctggctcacccgcatgactacatcgcccccaaaagattctgatcagctggatgtaattcaggagaaccggcagctgctgcagttactgaccacatacattgttcgggaaaacagccaagttggggaaggtgtgtgtgctgttcttctgggcaccctgactcccatggcaacagagatgctggccaacggtgatgggactggcttccctgaacttatggttgtgatggccactctggccagtgcaggtcaaggtgctggtcaccttcagcttcataatgctgctgtggattggctgagcagatgcaagaaatacctgtcacagaagaatgtagttgaaaaactgaatgccaatgtaatgcatggaaagcatgtgatgatcttggagtgcacatgccatatcatgtcttacttggctgatgtcacgaatgccctgagccagagtaatggtcaaggcccaagtcatctctcagtggatggggaagagcgggccattgaagtagactcagactgggtggaggagttggcggtggaagaggaagattcccaggctgaggattcagatgaagattctctttgcaataaactctgcacttttacgatcacacagaaagaattcatgaaccagcattggtaccactgtcacacctgtaaaatggtggatggcgtgggtgtctgcacagtgtgtgctaaggtgtgccacaaggatcatgagatttcctatgccaagtatggatccttcttctgtgactgtggagccaaggaagatggcagctgtttggctctggtgaagagaactcctagcagtggcatgagctctaccatgaaggagtcggcatttcagagtgaacccaggatttcagagagtctagtgcgtcatgccagcacctcctcgccagctgacaaagccaaggttaccatcagtgatggaaaggttgctgacgaagagaagcccaagaagagcagcctctgccgcacagtagagggctgccgggaggaattacagaaccaggccaatttctccttcgctcctctcgtgttagacatgcttaatttccttatggatgccattcagaccaacttccagcaagcttcagccgtcgggagcagcagccgtgctcagcaagccctcagtgagctacacactgtggagaaggcagtggagatgacagaccagctgatggttcccaccttagggtcccaggaaggtgcctttgagaatgtgcggatgaattacagtggagaccagggccagaccatccggcagctgatcagtgctcatgtgctcaggcgggtggctatgtgtgtgctctcctctccccatgggcgccgccaacatttggctgtcagccatgagaagggcaagatcaccgttctgcagctctctgcactcctgaagcaagcagattccagcaaaaggaagttaactctgacccgcttggcttctgccccagttccttttactgtgttgagcctcacaggaaatccctgcaaggaagactacttggcggtttgtgggctaaaggactgtcatgtgctcacctttagtagctcaggctctgtttcggatcacttggttttgcaccctcagttggcaacggggaacttcatcatcaaagccgtgtggttacctggttcacagaccgagttagcaattgtcaccgcagactttgttaagatttatgacctgtgtgttgatgccttgagtccaaccttctattttctcctgccaagctcaaagataagagatgttaccttccttttcaatgaggagggaaagaacatcattgttataatgtcttcggctgggtacatctatactcagcttatggaagaggccagcagtgcccagcagggacccttctatgtcactaatgtgttggaaatcaatcatgaggacctgaaggacagtaacagccaggtggcgggcggtggtgtgtccgtgtactactcccacgtgttgcagatgttgttcttcagctattgtcaaggcaaatcattcgcagccaccatcagcaggacaaccctggaggtgttgcaactcttccccatcaacatcaaaagttccaatggtggcagtaagacttctcctgctctttgccagtggtctgaggtgatgaaccaccctggcttggtgtgctgtgtccagcaaactacaggggtgccgctggtagttatggtgaaaccagacacttttcttatccaggagattaagactcttcctgctaaagcgaagatccaagacatggttgctattaggcacacggcctgcaatgagcagcagcggacaacaatgattctgctgtgtgaggatggcagcctgcgcatttacatggccaacgtggagaacacctcctactggctgcagccatccctgcagcccagcagtgtcatcagcatcatgaagcctgttcgaaagcgcaaaacagctacaatcacaacccgcacgtctagccaggtgactttccccattgacttttttgaacacaaccagcagctgacagatgtggagtttggtggtaacgacctcctacaggtctataatgcacaacagataaaacaccggctgaattccactggcatgtatgtggccaacaccaagcccggaggcttcaccattgagattagtaacaacaatagcactatggtgatgacaggcatgcggatccagattgggactcaagcaatagaacgggccccgtcatatatcgagatcttcggcagaactatgcagctcaacctgagtcgctcacgctggtttgacttccccttcaccagagaagaagccctgcaggctgataagaagctgaacctcttcattggggcctcggtggatccagcaggtgtcaccatgatagatgctgtaaaaatttatggcaagactaaggagcagtttggctggcctgatgagcccccagaagaattcccttctgcctctgtcagcaacatctgcccttcaaatctgaaccagagcaacggcactggagatagcgactcagctgcccccactacgaccagtggaactgtcctggagaggctggttgtgagttctttagaagccctggaaagctgctttgccgttggcccaatcatcgagaaggcaaagaaacaagaatgctgctcaggagctggccactttgctgttgtccctgccagcacctgccagtgtccagcagcagtccaagagccttctggccagcctgcacaccagccgctcggcctaccacagccacaaggatcaggccttgctgagcaaagctgtgcagtgtctcaacacatctagcaaagagggcaaggatttggaccctgaggtgttccagaggctagtgatcacagctcgctccattgccatcatgcgccccaacaaccttgtccactttacggagtcaaagctgccccagatggaaacagaaggaatggatgaagggaaggaaccgcagaagcagttggaaggagattgctgtagtttcatcacccagcttgtgaaccacttctggaaactccatgcatccaaacccaagaatgccttcttggcacctgcctgccttccaggactaactcatattgaagctactgtcaatgctctggtggacatcatccatggctactgtacctgtgagctggattgtattaacacagcatccaagatctacatgcagatgctcttgtgtcctgatcctgctgtgagcttctcttgtaaacaagctctaattcgagtcctaaggcccaggaacaaacggagacatgtgactttaccctcttcccctcgaagcaacactccaatgggagacaag

SEQ ID NO: 777 - protein, 2601 aa, Homosapiens
MRPNNLVHFTESKLPQMETEGMDEGKEPQKQLEGDCCSFITQLVNHFWKLHASKPKNAFLAPACLPGLTHIEATVNALVDIIHGYCTCELDCINTASKIYMQMLLCPDPAVSFSCKQALIRVLRPRNKRRHVTLPSSPRSNTPMGDKDDDDDDDADEKMQSSGIPNGGHIRQESQEQSEVDHGDFEMVSESMVLETAENVNNGNPSPLEALLAGAEGFPPMLDIPPDADDETMVELAIALSLQQDQQGSSSSALGLQSLGLSGQAPSSSSLDAGTLSDTTASAPASDDEGSTAATDGSTLRTSPADHGGSVGSESGGSAVDSVAGEHSVSGRSSAYGDATAEGHPAGPGSVSSSTGAISTTTGHQEGDGSEGEGEGETEGDVHTSNRLHMVRLMLLERLLQTLPQLRNVGGVRAIPYMQVILMLTTDLDGEDEKDKGALDNLLSQLIAELGMDKKDVSKKNERSALNEVHLVVMRLLSVFMSRTKSGSKSSICESSSLISSATAAALLSSGAVDYCLHVLKSLLEYWKSQQNDEEPVATSQLLKPHTTSSPPDMSPFFLRQYVKGHAADVFEAYTQLLTEMVLRLPYQIKKITDTNSRIPPPVFDHSWFYFLSEYLMIQQTPFVRRQVRKLLLFICGSKEKYRQLRDLHTLDSHVRGIKKLLEEQGIFLRASVVTASSGSALQYDTLISLMEHLKACAEIAAQRTINWQKFCIKDDSVLYFLLQVSFLVDEGVSPVLLQLLSCALCGSKVLAALAASSGSSSASSSSAPVAASSGQATTQSKSSTKKSKKEEKEKEKDGETSGSQEDQLCTALVNQLNKFADKETLIQFLRCFLLESNSSSVRWQAHCLTLHIYRNSSKSQQELLLDLMWSIWPELPAYGRKAAQFVDLLGYFSLKTPQTEKKLKEYSQKAVEILRTQNHILTNHPNSNIYNTLSGLVEFDGYYLESDPCLVCNNPEVPFCYIKLSSIKVDTRYTTTQQVVKLIGSHTISKVTVKIGDLKRTKMVRTINLYYNNRTVQAIVELKNKPARWHKAKKVQLTPGQTEVKIDLPLPIVASNLMIEFADFYENYQASTETLQCPRCSASVPANPGVCGNCGENVYQCHKCRSINYDEKDPFLCNACGFCKYARFDFMLYAKPCCAVDPIENEEDRKKAVSNINTLLDKADRVYHQLMGHRPQLENLLCKVNEAAPEKPQDDSGTAGGISSTSASVNRYILQLAQEYCGDCKNSFDELSKIIQKVFASRKELLEYDLQQREAATKSSRTSVQPTFTASQYRALSVLGCGHTSSTKCYGCASAVTEHCITLLRALATNPALRHILVSQGLIRELFDYNLRRGAAAMREEVRQLMCLLTRDNPEATQQMNDLIIGKVSTALKGHWANPDLASSLQYEMLLLTDSISKEDSCWELRLRCALSLFLMAVNIKTPVVVENITLMCLRILQKLIKPPAPTSKKNKDVPVEALTTVKPYCNEIHAQAQLWLKRDPKASYDAWKKCLPIRGIDGNGKAPSKSELRHLYLTEKYVWRWKQFLSRRGKRTSPLDLKLGHNNWLRQVLFTPATQAARQAACTIVEALATIPSRKQQVLDLLTSYLDELSIAGECAAEYLALYQKLITSAHWKVYLAARGVLPYVGNLITKEIARLLALEEATLSTDLQQGYALKSLTGLLSSFVEVESIKRHFKSRLVGTVLNGYLCLRKLVVQRTKLIDETQDMLLEMLEDMTTGTESETKAFMAVCIETAKRYNLDDYRTPVFIFERLCSIIYPEENEVTEFFVTLEKDPQQEDFLQGRMPGNPYSSNEPGIGPLMRDIKNKICQDCDLVALLEDDSGMELLVNNKIISLDLPVAEVYKKVWCTTNEGEPMRIVYRMRGLLGDATEEFIESLDSTTDEEEDEEEVYKMAGVMAQCGGLECMLNRLAGIRDFKQGRHLLTVLLKLFSYCVKVKVNRQQLVKLEMNTLNVMLGTLNLALVAEQESKDSGGAAVAEQVLSIMEIILDESNAEPLSEDKGNLLLTGDKDQLVMLLDQINSTFVRSNPSVLQGLLRIIPYLSFGEVEKMQILVERFKPYCNFDKYDEDHSGDDKVFLDCFCKIAAGIKNNSNGHQLKDLILQKGITQNALDYMKKHIPSAKNLDADIWKKFLSRPALPFILRLLRGLAIQHPGTQVLIGTDSIPNLHKLEQVSSDEGIGTLAENLLEALREHPDVNKKIDAARRETRAEKKRMAMAMRQKALGTLGMTTNEKGQVVTKTALLKQMEELIEEPGLTCCICREGYKFQPTKVLGIYTFTKRVALEEMENKPRKQQGYSTVSHFNIVHYDCHLAAVRLARGREEWESAALQNANTKCNGLLPVWGPHVPESAFATCLARHNTYLQECTGQREPTYQLNIHDIKLLFLRFAMEQSFSADTGGGGRESNIHLIPYIIHTVLYVLNTTRATSREEKNLQGFLEQPKEKWVESAFEVDGPYYFTVLALHILPPEQWRATRVEILRRLLVTSQARAVAPGGATRLTDKAVKDYSAYRSSLLFWALVDLIYNMFKKVPTSNTEGGWSCSLAEYIRHNDMPIYEAADKALKTFQEEFMPVETFSEFLDVAGLLSEITDPESFLKDLLNSVP

SEQ ID NO: 778 - DNA, 3162 bp, Homosapiens
gatttttttgtgaaactcagtgcttcctaagatgaaaatgtgttcatgctaagactggtttcttccttagcactttgtctggcttagtggagtttgatggctattacctggagagcgatccctgcctggtgtgtaataacccggaagtaccgttctgttatatcaagctgtcttccattaaagtggacacgcggtacaccaccacccagcaggttgtgaagctcattggcagtcacaccatcagcaaagtgacagtgaaaatcggggatctgaaacggaccaagatggtgcggaccatcaacctgtattataacaaccgaaccgtgcaggccatcgtggagttgaaaaacaagccagctcgctggcacaaagccaagaaggttcagctgacccctggacagacagaggtgaagattgacctgccgttgcccattgtggcctccaatctgatgattgagtttgcagacttctatgaaaactaccaggcctccacagagaccctgcagtgccctcgctgtagtgcctcggtccctgccaacccaggagtctgtggcaactgtggagagaatgtgtaccagtgtcacaaatgcagatccatcaactacgatgaaaaggatcccttcctctgcaatgcctgtggcttctgtaaatatgcccgcttcgacttcatgctctatgccaagccttgctgtgcagtggatcccattgagaatgaagaagaccggaagaaggctgtatccaacatcaatacacttttggacaaagctgatcgagtgtatcatcagctgatgggacaccggccacagctggagaacctgctctgcaaagtgaatgaggcagctccagaaaagccacaggtagtcccacgctgcaaagggcatttggataagggcttgggtcttgatcagaagactgcctcctaggtgagatcaccttaggtggggagcctgacagcttacctcttggggttgcaggatgactcaggaacagcagggggcatcagctccacttctgccagtgtgaatcgttacatcctgcagttggctcaggagtattgtggagactgcaagaactcttttgatgaactctccaaaatcatccaggtagagagcggggagcagcttttgggtgtgttttgtccaagtgttactggtgttgttttcacagcagtcctgctgctctctcatctagcagtccaggtcttggtgttgtccctgcccaatctagctgaaaaggcaggcagatggctgcaccaaacggcatctcccccaccgtgatttatggcgctggtcagaatgctgagttcatgctagataactgaacatactggtgatgggaaggtaacacagataagggttttttttagccattaacaacccatctcttagtagaggggttactggtcttaaaaaatttgatgccaagattctgttccctcttctgataacgccgtgtttgcaggctgtagggtaagggcataccaactgcaatcaaccagggtgggccttgtgtcagttgcaatgtcacagacctaatctccatgagatgggaggctggccatagacagaggtacctcatataaggagagcatccagtttaccttccccctcaaccccaaattgctggagtgccatctttgctacacgtgtattagcttctgacctttgtctttgttacatgggagttaagagcataagcctgccatctgagtctgagttctgactctgccacttatcttggtcaagccactttctccaagcttcagtttccttctctgtaaaatggagataaagcatctaaccagttgggttattgagaagattaagttatataatgcatgtaaagttttttctaaagcaaaactaattttctaattaacatcctcttcttattttaattgctaattcccattattgttgcctttttgttcttagaaagtctttgcttcgcgcaaagagttgttggaatatgacctacagcagagggaagcagccactaaatcatcccggacctccgtgcagcccacattcactgccagccagtaccgtgccttatccgtcctgggctgtggccacacatcctccaccaagtgctatggctgcgcctcggctgtcacagaacattgtatcacactacttcgggccctggccaccaacccagccttgaggcacatccttgtctcccagggccttatccgggagctctttgattataatcttcgccgaggggctgcggccatgcgggaggaggtccgccagctcatgtgcctcctaactcggtcagtacctacaccatggttatgggcctagtggttcctactgacactggcagccatgccaggagcgttagagagtgcacagaatagtgcttctgaccacccagcaagttaggtagcttataacaaaggaaagatggaaagagacacagggtgtaggtgagcgagcttggggagcattgaaacccaggtttccttgtaaatggcatgattggcttgtgcttttttggttccagtacagtgtcttgaggaaactctccctgaggccttgtgagggaagggaagggagacacttgaactcgagaaagactcacatgaaagaagcagagcagtggggcctggagattaagagcttggactctggattggaaaggctcagtttcagtatctgataccttgtactatacgccttggacagattccttaatttctctgagtctgtgttttcctcatctgaaaaatactgacagtaggctgggcacagtggctcttgcccgtaatcccagcactttggcacctgaggctggcagatcacttgaggtcaggagttcaagaccagcctggccaacatggtaaaacctcgtctccattaaaaatacaaaaatagggccaggtgctgtggctcatgcctgtaatcccagcactttggcaggccaaggcgggtggatcacctgaggtcgggagttcaagaccagcctgaccaacatggagaaaccccatctccactgaaaatacaaaattagacaggtgtagtggtgcatgcctgtaatctcagctacttgggaggctgagacaggagaatcgcttgaacctgggaggcggagattgtggtgagtcgaaatcgtgccattgcactccagcctgggcaacaagcgagactccgtctc

SEQ ID NO: 779 - protein, 212 aa, Homosapiens
MVRTINLYYNNRTVQAIVELKNKPARWHKAKKVQLTPGQTEVKIDLPLPIVASNLMIEFADFYENYQASTETLQCPRCSASVPANPGVCGNCGENVYQCHKCRSINYDEKDPFLCNACGFCKYARFDFMLYAKPCCAVDPIENEEDRKKAVSNINTLLDKADRVYHQLMGHRPQLENLLCKVNEAAPEKPQVVPRCKGHLDKGLGLDQKTAS

SEQ ID NO: 780 - DNA, 587 bp, Homosapiens
agggaacggatcggagacgctgcgcctgctcagaaggtagcgcagcggggaaaggcgggagagcgttaacttctgagcctgcgcggtgggagttgctcaagcaggtggtagcgacttggcttccgggcagcgggtaaaggaaatgcctcaggccagaagaagcagtggcagcctctcacctgcagtgggatctgtctcaactcccattccgtctccagagccaaagtttggagggaacgtgagctcgggtcaggacacaccaggacagcctcatccaccacaccacaggctccagacaggtgctgcagccacggagttgaaaccctaacctacagaaaagtcatcgttaacaggaagctcgtgaaagatttttacatttccctctcagcccaacagcaatattgctgccagcatcccactgggggtcctaagctcaaaggttcttcatggttggttgtataggagttcttcctgtcccctgaaaccccaccctccaacctcctgagagccttcaaagttggaaaaaatatcaggattttctttctggtcactggaaaaatatatccgataattttaaatacctggca

SEQ ID NO: 781 - protein, 61 aa, Homosapiens
MPQARRSSGSLSPAVGSVSTPIPSPEPKFGGNVSSGQDTPGQPHPPHHRLQTGAAATELKP

SEQ ID NO: 782 - DNA, 586 bp, Homosapiens
agaaggtagcgcagcggggaaaggcgggagagcgttaacttctgagcctgcgcggtgggagttgctcaagcaggtggtagcgacttggcttccgggcagcgggtaaagataagaaaacagaagaccagagcccaaggtcacaaagttagtaagtgacaaacctagacttccaatctagcaaattggttaaactctatgcctctcaaaaggccttacaggacaggatgggagagctgtttgtgagtacacaccacagagtacttctccaaacagtcctgctaacaaggccatgccagcccctcgtgaacttcagagctggacttcacagccagcgtgtattactgtttacaagagttggtctcaagtatgtgaggattaaagcaaactgaccccctttctagaaataaaattcaaagcacacattccatcacgagttggtcaacatcatcttcatataaaagtacaacttattactcaacccacattcctaccttctaccctcccaagaatggaaaaaaagtcccatctctctgctatagaaaaataatggggccaggcgcggtggctcacgcctgtaatcccagca

SEQ ID NO: 783 - protein, 54 aa, Homosapiens
MGELFVSTHHRVLLQTVLLTRPCQPLVNFRAGLHSQRVLLFTRVGLKYVRIKAN

SEQ ID NO: 784 - DNA, 1510 bp, Homosapiens
ttaggttatctaaaaatttgtcatctttctatggtcatatgctgatggtagattatggcagagaaggaagaggaaatgacaaccattttattaattgtcagtttgatattgagtgactgaatgtctaagaatctccagaaaaaaacaggcatctatcatcctgaccctggctcaaaaacaaaaacaaaaactagtttgttttagtattcattaattacgtatatgagcactggtagtctagtgtttgttcttgtatacagtgttttcttaaatgagatgatgctatttaattctgttacttgttttttcaactaatggatcttttaaagttttttatttaaattttttgtgggtacatattaggtacatatacttatggggtacatgagatgtttttataaaggctcagctaatgtatcttgaatatcatgtattcataaagatgactgaaatagtttctggaacaaagtctgatagaaaaaatactcaattcctaatttaagtgttagagactttaatgtaagctatctaatctgaactagtttcattatttgtgtgtgggtacatgttatgtgctccgtaaggcatctttcaatttgaaaatttcataattgtaatttcactgcctttataaattgctttttttttggaggcagggtctctgtcacccaggctggagagcagtggcacagtcatagctcactgcagcctcgaacacctgggctgaagtgatcctccctccttagcctcccaaagtgccgggattacaggcatgagctactgcacctggcccataaattgtcatacttttaaagagcctattacacaaagtatcatcagaatcatcccaagactcatttcctgattcctaattatttaaaattttgcttttaggcgaggcatggtggctcaagcctataatcccagcactttgggaggccaaggcaggcagatcatttgaggtcaggagtttaagaccagcctggccaacatggtgaaacctgaaaccccatctctaccaaaaaaataaaaaaatttagccaggtgtggtggtgcatgcctgtaatcccagctacttgggaggctgaggcaggagaatcgaacccaggaggcaaaggctgcagtaagccgagatcatgcctctgcactccagtctgggcaacacagtgagaccctgtctcaaaaataaataaaatgaaaaaattgcttttaaatcatgaaaccattctgttttctttacttggaatgttttcttccctgcttaaaatctggcttgtctcaaatctgaactcctccataaagtcttccctattggtttcagctactcaggaccttcaaccatcctggctgcttaccacgtaacttcctgagtgatataccacacccctttattatttcagatattgtgtctcttagggactgttttctgaattacctattgtcccagacatgaagttgctccttgacaaatagttccccaaatggctgtaccttcttctccagaaccctt

SEQ ID NO: 785 - protein, 55 aa, Homosapiens
MKKLLLNHETILFSLLGMFSSLLKIWLVSNLNSSIKSSLLVSATQDLQPSWLLTT

SEQ ID NO: 786 - DNA, 5635 bp, Homosapiens
ttctgatataccacctctctatttggcattttcacctagctcaaaaagtcagttcctgatagcattgttaacatagctagcctgtgctgacagcttgcagaaactggcagggtctattgcccaggctggagtgcagtggcacgatcttggctcactgcaacctccgcctcctgggttcaagtgatcctcctcctcagcctcccaagtagttaacaggcgtgcaccaccacgcccggctaatttttgtatttttagtagagatggggtttcgccatgttggccaggctggtcttgaactcctgacctcaagtgatccgcctgccttggcctcccaaagtgttgggattatatgtgtgagccactgcgccagccctaaaatctcatccttatgtaacctaagcccaggacttaggacttagtggttaacaggttcctgtgtttagttgattttaccgaagatgtttgggactctcagatctgatgggcacttggcattgctgttgcttttttttttttttttttgagacagagtcttgctctgtcacccaggctggagtgcagtggtgcgatctcagctcactgcaacttcagcctccctggttcaagtgattctcctgcctcagtctgctgagtagctgggactacaggtgcgtgccactgtgcccagctcatttttaaatttttggtagagacggagtttcaccatgttggccaggatggtctcaatctcctgaccttgtgatccacacctgcctcggcctcccaaagtgctgggattacaggtgtgagccgccgcgactggcctattgaattcttaaatatgaagaagccagccctgttggcagtttatcagctttaatcaccattactgaaactggtgctatgattgatcatgcctggtcctccagtcttccctggccactgtaccgcagctgcatgaacagctgcgtttgctcaatgggaaggagacttcctgctgggggaggtatgggagggaggccccggggagaggcatgaggaaatccaagtggccttctacatttttctctttcatcattatccatatcttgattctagaactttattttctggtgtctcagaaagttaagaaaccagtgtcttcaaaagtgagaaccttcattcagacccatgcgtatcattggattattatttttggctatgtaagggagcctcattgacccatttttttgttttaaattcttatttaaatgtctgcaataatgacatttttgtaactggcccttgctggacactggatcggtgtgaacattcacttcctcctgtgtagttggactaccttctggagcaattctttcccttcctaaggctttgctggatccccgccgccccgagatcccaacagaacaaagcagagaggagaacttaatcccgtattctccagatgtacagatacacgcagagcgattcatcaactataaccagacagtttctcgaatgcgaggtatctacacagctccctcgggtctggagtccacttgtttggttgtggcctatggtttggacatttaccaaactcgagtctacccatccaagcagtttgacgttctgaaggatgactatgactacgtgttaatcagcagcgtcctctttggcctggtttttgccaccatgatcactaagagactggcacaggtgaagctcctgaatcgggcctggcgataaagaacaaagactgtgcctaaaagtggagagccaggggagtgtgggtcagataagcagctacagctgcagtttggtggattggtggagtatgtgtgtgtgtcagtgctcagctaagaactgtagggaagatggatgaccttcacgcagaactccttttgggatatacatgatgcagaaaggatcctacatggagagagacagaactctctcagctgacactctcagagattcctgatgggctttctcttgaagtccaaaggcgtctgcattgtttcctttctttgcccatccatgaatgttctgttttgttttttttaataagaattccggctgatttttgtgaggcctgtttaaattgactttactttgccttttgtgtttctcaattttatctagaaatctttctgactttttccatctcttgcttcaaagtaagaggggaactctccttgccgactccaccttataggtacatttggtgttttgcactgggaagaaataggatccatccttagctgaggcttgaggactgatccagcctctcatggcttccctccaaagtaacttagggttgagggatctatatgtgatgtcaaaacttactttaaacctctagtttcgtgctgtcatttattaggctgggccaccaaatctttgtttcaatttatcagaagccaagtgcatactagcgtcttgtttgttgcccattgcctatacttttcacctgagatgtgtgagttggggccttttaaaaactactgaattgtctgagccttgaagacatttccagggagaagagataatctctcatttcacccacaggctggtctaatcataacctagttaaagatgtccttgtttaagaaccccattatttatttttagtttttaatataaattaacatgtgggtcattatatttctccttaaatgaggaaattttaaattttattgatctaacctttgaagctttaaaaaaggagaaagagggtaggggtgggaaactggcatactgtgtgtatagcactgccgattggctaggccactgtgtctctgctacaaattaaagaaatcctaaaagttttccttggtcatagagttggggaatgacagaatttttctttgttgtgaaatgtatgtacagagtagaccatctctagccctgtggtgaaagaggtacactcgaatgtttgcataaagcaagtgacaaatgacactgtttaagtcctcttttgtgtcttagaagatcattttgaggctattttcacattagaggggataaaagcagtgaagacatggagtaagtgtattttattttagtaaggaaaggtcagtttaatcatatatgggttggttaggttatctaaaaatttgtcatctttctatggtcatatgctgatggtagattatggcagagaaggaagaggaaatgacaaccattttattaattgtcagtttgatattgagtgactgaatgtctaagaatctccagaaaaaaacaggcatctatcatcctgacccaaggcatattttaacataacctgggagaagagagttaagtacaagttaaaaaaaattctgccctagttttgagaaagcctggctggaattctgactgtcttacatacatatgtgcaaggttagcctgcaagattctagtttttatttaccagtgtgccagaatctgaaacaagctactgggagggaaggtatttgtcctttagtaaaattccctgtatttcagctgtaatcaaagttacctcaaagcaggtgctttttttttttttgagacagaatctcactctgttgcccaggctggagtgcagtggcacgatcttggctcacggcaacctccacctcacaagcagctgggactataggcatgtgccaccacgctcagctaattttttgtatttttagtagagacggggtttcattgtgttggccaggctggtctcgaactcctggcctcaagtgatctgctggccttggcctcccaaagtgctgggattacaggtgtgagccaccgagcttggccaagtgcttaaaatagttaatgctaatgccacagtccaatttaaatcttttcttagttctcaactttccttaatcttaaagcagcattcggttctgagcagctacactcagtctccactaatggctgctgagactatgtttcctctctcaattctctgatctatttgctttcttgtcattccttgttttttgtgtgtattccttgacttacctcttctcctgtcttcattaattaggttaattttggggccccatggtgtttcacgtaaaaagatttggctgggcgtgatggctcatgcctataatcccagcactttgggaggccatagtggaggatctcttgagcccaggagttccagaccagcctgggcaacatagcaagactctatctacaaaaaataaaaaaaaattagccgggcctggtggcatgtgcctgtggtcctagctactcaggaggctgaggtaggaggatcacttgagcctgggaggtcgaggctgcagtgagccatgaacatgctactgcattccagcctgggcaacagagtgagaccctggctcaaaaacaaaaacaaaaactagtttgttttagtattcattaattacgtatatgagcactggtagtctagtgtttgttcttgtatacagtgttttcttaaatgagatgatgctatttaattctgttacttgttttttcaactaatggatcttttaaagttttttatttaaattttttgtgggtacatattaggtacatatacttatggggtacatgagatgtttttataaaggctcagctaatgtatcttgaatatcatgtattcataaagatgactgaaatagtttctggaacaaagtctgatagaaaaaatactcaattcctaatttaagtgttagagactttaatgtaagctatctaatctgaactagtttcattatttgtgtgtgggtacatgttatgtgctccgtaaggcatctttcaatttgaaaatttcataattgtaatttcactgcctttataaattgctttttttttggaggcagggtctctgtcacccaggctggagagcagtggcacagtcatagctcactgcagcctcgaacacctgggctgaagtgatcctccctccttagcctcccaaagtgccgggattacaggcatgagctactgcacctggcccataaattgtcatacttttaaagagcctattacacaaagtatcatcagaatcatcccaagactcatttcctgattcctaattatttaaaattttgcttttaggcgaggcatggtggctcaagcctataatcccagcactttgggaggccaaggcaggcagatcatttgaggtcaggagtttaagaccagcctggccaacatggtgaaacctgaaaccccatctctaccaaaaaaataaaaaaatttagccaggtgtggtggtgcatgcctgtaatcccagctacttgggaggctgaggcaggagaatcgaacccaggaggcaaaggctgcagtaagccgagatcatgcctctgcactccagtctgggcaacacagtgagaccctgtctcaaaaataaataaaatgaaaaaattgcttttaaatcatgaaaccattctgttttctttacttggaatgttttcttccctgcttaaaatctggcttgtctcaaatctgaactcctccataaagtcttccctattggtttcagctactcaggaccttcaaccatcctggctgcttaccacgtaacttcctgagtgatataccacacccctttattatttcagatattgtgtctcttagggactgttttctgaattacctattgtcccagacatgaagttgctccttgacaaatagttccccaaatggctgtaccttcttctccagaaccctt

SEQ ID NO: 787 - protein, 75 aa, Homosapiens
MRGIYTAPSGLESTCLVVAYGLDIYQTRVYPSKQFDVLKDDYDYVLISSVLFGLVFATMITKRLAQVKLLNRAWR

SEQ ID NO: 788 - DNA, 6664 bp, Homosapiens
ggtgcatgccgggacggcggtgggtggtgcatgcgctcgcatcatggcggctgagtgggcttctcgtttctggctttgggctacgctgctgattcctgcggccgcggtctacgaagaccaagtgggcaagtttgattggagacagcaatatgttgggaaggtcaagtttgcctccttggaattttcccctggatccaagaagttggttgtagccacagagaagaatgtgattgcagcattaaattcccgaactggggagatcttgtggcgccatgttgacaagggcacggcagaaggggctgtggatgccatgctgctgcacggacaggatgtgatcactgtgtccaatggaggccgaatcatgcgttcctgggagactaacatcgggggcctgaactgggagataaccctggacagtggcagtttccaggcacttgggctggttggcctgcaggagtctgtaaggtacatcgcagtcctgaagaagactacacttgccctccatcacctctccagtgggcacctcaagtgggtggaacatctcccagaaagtgacagcatccactaccagatggtgtattcttacggctctggggtggtgtgggccctcggagttgttcccttcagccatgtgaacattgtcaagtttaatgtggaagatggagagattgttcagcaggttagggtttcaactccgtggctgcagcacctgtctggagcctgtggtgtggtggatgaggctgtcctggtgtgtcctgacccgagctcacgttccctccaaactttggctctggagacggaatgggagttgagacagatcccactgcagtctctcgacttagaatttggaagtggattccaaccccgggtcctgcctacccagcccaacccagtggacgcttcccgggcccagttcttcctgcacttgtccccaagccactatgctctgctgcagtaccattatggaacgctgagtttgcttaaaaacttcccacagactgccctagtgagctttgccaccactggggagaagacggtggctgcagtcatggcctgtcggaatgaagtgcagaaaagtagcagttctgaagatgggtcaatggggagcttttcggagaagtctagttcaaaggactctctggcttgcttcaatcagacctacaccattaacctatacctcgtggagacaggtcggcggctgctggacaccacgataacatttagcctggaacagagcggcactcggcctgagcggctgtatatccaggtgttcttgaagaaggatgactcagtgggctaccgggctttggtgcagacagaggatcatctgctacttttcctgcagcagttggcagggaaggtggtgctgtggagccgtgaggagtccctggcagaagtggtgtgcctagagatggtggacctccccctgactggggcacaggccgagctggaaggagaatttggcaaaaaggcagatggcttgctggggatgttcctgaaacgcctctcgtctcagcttatcctgctgcaagcatggacttcccacctctggaaaatgttttatgatgctcggaagccccggagtcagattaagaatgagatcaacattgacaccctggccagagatgaattcaacctccagaagatgatggtgatggtaacagcctcaggcaagctttttggcattgagagcagctctggcaccatcctgtggaaacagtatctacccaatgtcaagccagactcctcctttaaactgatggtccagagaactactgctcatttcccccatcccccacagtgcaccctgctggtgaaggacaaggagtcgggaatgagttctctgtatgtcttcaatcccatttttgggaagtggagtcaggtagctcccccagtgctgaagcgccccatcttgcagtccttgcttctcccagtcatggatcaagactacgccaaggtgttgctgttgatagatgatgaatacaaggtcacagcttttccagccactcggaatgtcttgcgacagctacatgagcttgccccttccatcttcttctatttggtggatgcagagcagggacggctgtgtggatatcggcttcgaaaggatctcaccactgagctgagttgggagctgaccattcccccagaagtacagcggatcgtcaaggtgaaggggaaacgcagcagtgagcacgttcattcccagggccgtgtgatgggggaccgcagtgtgctctacaagagcctgaaccccaacctgctggccgtggtgacagagagcacagacgcgcaccatgagcgcacctttattggcatcttcctcattgatggcgtcactgggcgtatcattcactcctctgtgcagaagaaagccaaaggccctgtccatatcgtgcattcagagaactgggtggtgtaccagtactggaacaccaaggctcggcgcaacgagtttaccgtactggagctctatgagggcactgagcaatacaacgccaccgccttcagctccctggaccgcccccagctgccccaggtcctccagcagtcctatatcttcccgtcctccatcagtgccatggaggccaccatcaccgaacggggcatcaccagccgacacctgctgattggactaccttctggagcaattctttcccttcctaaggctttgctggatccccgccgccccgagatcccaacagaacaaagcagagaggagaacttaatcccgtattctccagatgtacagatacacgcagagcgattcatcaactataaccagacagtttctcgaatgcgaggtatctacacagctccctcgggtctggagtccacttgtttggttgtggcctatggtttggacatttaccaaactcgagtctacccatccaagcagtttgacgttctgaaggatgactatgactacgtgttaatcagcagcgtcctctttggcctggtttttgccaccatgatcactaagagactggcacaggtgaagctcctgaatcgggcctggcgataaagaacaaagactgtgcctaaaagtggagagccaggggagtgtgggtcagataagcagctacagctgcagtttggtggattggtggagtatgtgtgtgtgtcagtgctcagctaagaactgtagggaagatggatgaccttcacgcagaactccttttgggatatacatgatgcagaaaggatcctacatggagagagacagaactctctcagctgacactctcagagattcctgatgggctttctcttgaagtccaaaggcgtctgcattgtttcctttctttgcccatccatgaatgttctgttttgttttttttaataagaattccggctgatttttgtgaggcctgtttaaattgactttactttgccttttgtgtttctcaattttatctagaaatctttctgactttttccatctcttgcttcaaagtaagaggggaactctccttgccgactccaccttataggtacatttggtgttttgcactgggaagaaataggatccatccttagctgaggcttgaggactgatccagcctctcatggcttccctccaaagtaacttagggttgagggatctatatgtgatgtcaaaacttactttaaacctctagtttcgtgctgtcatttattaggctgggccaccaaatctttgtttcaatttatcagaagccaagtgcatactagcgtcttgtttgttgcccattgcctatacttttcacctgagatgtgtgagttggggccttttaaaaactactgaattgtctgagccttgaagacatttccagggagaagagataatctctcatttcacccacaggctggtctaatcataacctagttaaagatgtccttgtttaagaaccccattatttatttttagtttttaatataaattaacatgtgggtcattatatttctccttaaatgaggaaattttaaattttattgatctaacctttgaagctttaaaaaaggagaaagagggtaggggtgggaaactggcatactgtgtgtatagcactgccgattggctaggccactgtgtctctgctacaaattaaagaaatcctaaaagttttccttggtcatagagttggggaatgacagaatttttctttgttgtgaaatgtatgtacagagtagaccatctctagccctgtggtgaaagaggtacactcgaatgtttgcataaagcaagtgacaaatgacactgtttaagtcctcttttgtgtcttagaagatcattttgaggctattttcacattagaggggataaaagcagtgaagacatggagtaagtgtattttattttagtaaggaaaggtcagtttaatcatatatgggttggttaggttatctaaaaatttgtcatctttctatggtcatatgctgatggtagattatggcagagaaggaagaggaaatgacaaccattttattaattgtcagtttgatattgagtgactgaatgtctaagaatctccagaaaaaaacaggcatctatcatcctgacccaaggcatattttaacataacctgggagaagagagttaagtacaagttaaaaaaaattctgccctagttttgagaaagcctggctggaattctgactgtcttacatacatatgtgcaaggttagcctgcaagattctagtttttatttaccagtgtgccagaatctgaaacaagctactgggagggaaggtatttgtcctttagtaaaattccctgtatttcagctgtaatcaaagttacctcaaagcaggtgctttttttttttttgagacagaatctcactctgttgcccaggctggagtgcagtggcacgatcttggctcacggcaacctccacctcacaagcagctgggactataggcatgtgccaccacgctcagctaattttttgtatttttagtagagacggggtttcattgtgttggccaggctggtctcgaactcctggcctcaagtgatctgctggccttggcctcccaaagtgctgggattacaggtgtgagccaccgagcttggccaagtgcttaaaatagttaatgctaatgccacagtccaatttaaatcttttcttagttctcaactttccttaatcttaaagcagcattcggttctgagcagctacactcagtctccactaatggctgctgagactatgtttcctctctcaattctctgatctatttgctttcttgtcattccttgttttttgtgtgtattccttgacttacctcttctcctgtcttcattaattaggttaattttggggccccatggtgtttcacgtaaaaagatttggctgggcgtgatggctcatgcctataatcccagcactttgggaggccatagtggaggatctcttgagcccaggagttccagaccagcctgggcaacatagcaagactctatctacaaaaaataaaaaaaaattagccgggcctggtggcatgtgcctgtggtcctagctactcaggaggctgaggtaggaggatcacttgagcctgggaggtcgaggctgcagtgagccatgaacatgctactgcattccagcctgggcaacagagtgagaccctggctcaaaaacaaaaacaaaaactagtttgttttagtattcattaattacgtatatgagcactggtagtctagtgtttgttcttgtatacagtgttttcttaaatgagatgatgctatttaattctgttacttgttttttcaactaatggatcttttaaagttttttatttaaattttttgtgggtacatattaggtacatatacttatggggtacatgagatgtttttataaaggctcagctaatgtatcttgaatatcatgtattcataaagatgactgaaatagtttctggaacaaagtctgatagaaaaaatactcaattcctaatttaagtgttagagactttaatgtaagctatctaatctgaactagtttcattatttgtgtgtgggtacatgttatgtgctccgtaaggcatctttcaatttgaaaatttcataattgtaatttcactgcctttataaattgctttttttttggaggcagggtctctgtcacccaggctggagagcagtggcacagtcatagctcactgcagcctcgaacacctgggctgaagtgatcctccctccttagcctcccaaagtgccgggattacaggcatgagctactgcacctggcccataaattgtcatacttttaaagagcctattacacaaagtatcatcagaatcatcccaagactcatttcctgattcctaattatttaaaattttgcttttaggcgaggcatggtggctcaagcctataatcccagcactttgggaggccaaggcaggcagatcatttgaggtcaggagtttaagaccagcctggccaacatggtgaaacctgaaaccccatctctaccaaaaaaataaaaaaatttagccaggtgtggtggtgcatgcctgtaatcccagctacttgggaggctgaggcaggagaatcgaacccaggaggcaaaggctgcagtaagccgagatcatgcctctgcactccagtctgggcaacacagtgagaccctgtctcaaaaataaataaaatgaaaaaattgcttttaaatcat

SEQ ID NO: 789 - protein, 993 aa, Homosapiens; identical to SEQ ID NO: 14

SEQ ID NO: 790 - DNA, 1302 bp, Homosapiens
tctgatctatttgctttcttgtcattccttgttttttgtgtgtattccttgacttacctcttctcctgtcttcattaattaggttaattttggggccccatggtgtttcacgtaaaaagatttggctgggcgtgatggctcatgcctataatcccagcactttgggaggccatagtggaggatctcttgagcccaggagttccagaccagcctgggcaacatagcaagactctatctacaaaaaataaaaaaaaattagccgggcctggtggcatgtgcctgtggtcctagctactcaggaggctgaggtaggaggatcacttgagcctgggaggtcgaggctgcagtgagccatgaacatgctactgcattccagcctgggcaacagagtgagaccctggctcaaaaacaaaaacaaaaactagtttgttttagtattcattaattacgtatatgagcactggtagtctagtgtttgttcttgtatacagtgttttcttaaatgagatgatgctatttaattctgttacttgttttttcaactaatggatcttttaaagttttttatttaaattttttgtgggtacatattaggtacatatacttatggggtacatgagatgtttttataaaggctcagctaatgtatcttgaatatcatgtattcataaagatgactgaaatagtttctggaacaaagtctgatagaaaaaatactcaattcctaatttaagtgttagagactttaatgtaagctatctaatctgaactagtttcattatttgtgtgtgggtacatgttatgtgctccgtaaggcatctttcaatttgaaaatttcataattgtaatttcactgcctttataaattgctttttttttggaggcagggtctctgtcacccaggctggagagcagtggcacagtcatagctcactgcagcctcgaacacctgggctgaagtgatcctccctccttagcctcccaaagtgccgggattacaggcatgagctactgcacctggcccataaattgtcatacttttaaagagcctattacacaaagtatcatcagaatcatcccaagactcatttcctgattcctaattatttaaaattttgcttttaggcgaggcatggtggctcaagcctgtaatcccagctacttgggaggctgaggcaggagaatcgaacccaggaggcaaaggctgcagtaagccgagatcatgcctctgcactccagtctgggcaacacagtgagaccctgtctcaaaaataaataaaatgaaaaaattgcttttaaatc

SEQ ID NO: 791 - protein, 49 aa, Homosapiens
MPIIPALWEAIVEDLLSPGVPDQPGQHSKTLSTKNKKKLAGPGGMCLWS

SEQ ID NO: 792 - DNA, 3659 bp, Homosapiens
gctcaatgggaaggagacttcctgctgggggaggtatgggagggaggccccggggagaggcatgaggaaatccaagtggccttctacatttttctctttcatcattatccatatcttgattctagaactttattttctggtgtctcagaaagttaagaaaccagtgtcttcaaaagtgagaaccttcattcagacccatgcgtatcattggattattatttttggctatgtaagggagcctcattgacccatttttttgttttaaattcttatttaaatgtctgcaataatgacatttttgtaactggcccttgctggacactggatcggtgtgaacattcacttcctcctgtgtagttggactaccttctggagcaattctttcccttcctaaggctttgctggatccccgccgccccgagatcccaacagaacaaagcaggtgagaccctcatgggcagtgctgaaggctctgaccttacataacttaacctcactgattaagcttggttcttggtctctgtgtgccttcatgctgtgctaggggctggggatgtagcagggggcaagtctgaaaaagtcacctgccctcatggagcttacagtctgctgggaaatggacaataaatacataagataaacaagtaaaatatatactatgttaggtactcaaatgctaagcagagtaaaacaggaatgagctaggaagtggggatggggatgtgcgtgggtgtaatttgagaggtggcctgggaaagcccctttgagaaggtgcattttgagtgaaggcctgaaggaggtgaaggagctagctgtgtagatacctgaggaagaactttctaggcagagggaacaggcaatgcaaatcccctgagatcatgtctggtgagtttgcggagggcaacgctaggaaatgagatcactgaggtaattcgggccagaccatgtgggcaagccaatatcttattcactgttggtattgttgtattaacaaccaccatcttgtcgggttttcttacctccatcctgaatttctttgcctaggggcatgaggaatggagaggagtgtgttttggagaagtatatgagagagaggaggttaaagctaggaaaagacacaggatgataatcaggtttcagagaaatggggactgagaggcaccctggagtggagagcaggaattagcttagtggttcagtgtgttggctttaaaatggtcggctttcctcttgtggtgtgaagtgccagtcatctgtatgttctttcttttcagatttagaacaaagtaggaatctagatctcagtcttactctccagagagcttcctttcttgtagtccttcctaacattcagctgctaaatttttaactacctaatgcaagcagacctcctaggagatttgaggctagatatgtagcctggaaacctcccaggactcaggaagggcagccaagagatccctttacagcagtgctcagactgcctgtcccggctggtgttttgcagagaggagaacttaatcccgtattctccagatgtacagatacacgcagagcgattcatcaactataaccagacagtttctcgaatgcgaggtatctacacagctccctcgggtctggagtccacttgtttggttgtggcctatggtttggacatttaccaaactcgagtctacccatccaagcagtttgacgttctgaaggatgactatgactacgtgttaatcagcagcgtcctctttggcctggtttttgccaccatgatcactaagagactggcacaggtgaagctcctgaatcgggcctggcgataaagaacaaagactgtgcctaaaagtggagagccaggggagtgtgggtcagataagcagctacagctgcagtttggtggattggtggagtatgtgtgtgtgtcagtgctcagctaagaactgtagggaagatggatgaccttcacgcagaactccttttgggatatacatgatgcagaaaggatcctacatggagagagacagaactctctcagctgacactctcagagattcctgatgggctttctcttgaagtccaaaggcgtctgcattgtttcctttctttgcccatccatgaatgttctgttttgttttttttaataagaattccggctgatttttgtgaggcctgtttaaattgactttactttgccttttgtgtttctcaattttatctagaaatctttctgactttttccatctcttgcttcaaagtaagaggggaactctccttgccgactccaccttataggtacatttggtgttttgcactgggaagaaataggatccatccttagctgaggcttgaggactgatccagcctctcatggcttccctccaaagtaacttagggttgagggatctatatgtgatgtcaaaacttactttaaacctctagtttcgtgctgtcatttattaggctgggccaccaaatctttgtttcaatttatcagaagccaagtgcatactagcgtcttgtttgttgcccattgcctatacttttcacctgagatgtgtgagttggggccttttaaaaactactgaattgtctgagccttgaagacatttccagggagaagagataatctctcatttcacccacaggctggtctaatcataacctagttaaagatgtccttgtttaagaaccccattatttatttttagtttttaatataaattaacatgtgggtcattatatttctccttaaatgaggaaattttaaattttattgatctaacctttgaagctttaaaaaaggagaaagagggtaggggtgggaaactggcatactgtgtgtatagcactgccgattggctaggccactgtgtctctgctacaaattaaagaaatcctaaaagttttccttggtcatagagttggggaatgacagaatttttctttgttgtgaaatgtatgtacagagtagaccatctctagccctgtggtgaaagaggtacactcgaatgtttgcataaagcaagtgacaaatgacactgtttaagtcctcttttgtgtcttagaagatcattttgaggctattttcacattagaggggataaaagcagtgaagacatggagtaagtgtattttattttagtaaggaaaggtcagtttaatcatatatgggttggttaggttatctaaaaatttgtcatctttctatggtcatatgctgatggtagattatggcagagaaggaagaggaaatgacaaccattttattaattgtcagtttgatattgagtgactgaatgtctaagaatctccagaaaaaaacaggcatctatcatcctgacccaaggcatattttaacataacctgggagaagagagttaagtacaagttaaaaaaaattctgccctagttttgagaaagcctggctggaattctgactgtcttacatacatatgtgcaaggttagcctgcaagattctagtttttatttaccagtgtgccagaatctgaaacaagctactgggagggaaggtatttgtcctttagtaaaattccctgtatttcagctgtaatcaaagttacctcaaagcaggtgctttttttttttttgagacagaatctcactctgttgcccaggctggagtgcagtggcacgatcttggctc

SEQ ID NO: 793 - protein, 75 aa, Homosapiens; identical to SEQ ID NO: 787

SEQ ID NO: 794 - DNA, 4773 bp, Homosapiens
gcatgcgctcgcatcatggcggctgagtgggcttctcgtttctggctttgggctacgctgctgattcctgcggccgcggtctacgaagaccaagtgggcaagtttgattggagacagcaatatgttgggaaggtcaagtttgcctccttggaattttcccctggatccaagaagttggttgtagccacagagaagaatgtgattgcagcattaaattcccgaactggggagatctatgtgatcactgtgtccaatggaggccgaatcatgcgttcctgggagactaacatcgggggcctgaactgggagataaccctggacagtggcagtttccaggcacttgggctggttggcctgcaggagtctgtaaggtacatcgcagtcctgaagaagactacacttgccctccatcacctctccagtgggcacctcaagtgggtggaacatctcccagaaagtgacagcatccactaccagatggtgtattcttacggctctggggtggtgtgggccctcggagttgttcccttcagccatgtgaacattgtcaagtttaatgtggaagatggagagattgttcagcaggttagggtttcaactccgtggctgcagcacctgtctggagcctgtggtgtggtggatgaggctgtcctggtgtgtcctgacccgagctcacgttccctccaaactttggctctggagacggaatgggagttgagacagatcccactgcagtctctcgacttagaatttggaagtggattccaaccccgggtcctgcctacccagcccaacccagtggacgcttcccgggcccagttcttcctgcacttgtccccaagccactatgctctgctgcagtaccattatggaacgctgagtttgcttaaaaacttcccacagactgccctagtgagctttgccaccactggggagaagacggtggctgcagtcatggcctgtcggaatgaagtgcagaaaagtagcagttctgaagatgggtcaatggggagcttttcggagaagtctagttcaaaggactctctggcttgcttcaatcagacctacaccattaacctatacctcgtggagacaggtcggcggctgctggacaccacgataacatttagcctggaacagagcggcactcggcctgagcggctgtatatccaggtgttcttgaagaaggatgactcagtgggctaccgggctttggtgcagacagaggatcatctgctacttttcctgcagcagttggcagggaaggtggtgctgtggagccgtgaggagtccctggcagaagtggtgtgcctagagatggtggacctccccctgactggggcacaggccgagctggaaggagaatttggcaaaaaggcagatggcttgctggggatgttcctgaaacgcctctcgtctcagcttatcctgctgcaagcatggacttcccacctctggaaaatgttttatgatgctcggaagccccggagtcagattaagaatgagatcaacattgacaccctggccagagatgaattcaacctccagaagatgatggtgatggtaacagcctcaggcaagctttttggcattgagagcagctctggcaccatcctgtggaaacagtatctacccaatgtcaagccagactcctcctttaaactgatggtccagagaactactgctcatttcccccatcccccacagtgcaccctgctggtgaaggacaaggagtcgggaatgagttctctgtatgtcttcaatcccatttttgggaagtggagtcaggtagctcccccagtgctgaagcgccccatcttgcagtccttgcttctcccagtcatggatcaagactacgccaaggtgttgctgttgatagatgatgaatacaaggtcacagcttttccagccactcggaatgtcttgcgacagctacatgagcttgccccttccatcttcttctatttggtggatgcagagcagggacggctgtgtggatatcggcttcgaaaggatctcaccactgagctgagttgggagctgaccattcccccagaagtacagcggatcgtcaaggtgaaggggaaacgcagcagtgagcacgttcattcccagggccgtgtgatgggggaccgcagtgtgctctacaagagcctgaaccccaacctgctggccgtggtgacagagagcacagacgcgcaccatgagcgcacctttattggcatcttcctcattgatggcgtcactgggcgtatcattcactcctctgtgcagaagaaagccaaaggccctgtccatatcgtgcattcagagaactgggtggtgtaccagtactggaacaccaaggctcggcgcaacgagtttaccgtactggagctctatgagggcactgagcaatacaacgccaccgccttcagctccctggaccgcccccagctgccccaggtcctccagcagtcctatatcttcccgtcctccatcagtgccatggaggccaccatcaccgaacggggcatcaccagccgacacctgctgattggactaccttctggagcaattctttcccttcctaaggctttgctggatccccgccgccccgagatcccaacagaacaaagcagagaggagaacttaatcccgtattctccagatgtacagatacacgcagagcgattcatcaactataaccagacagtttctcgaatgcgaggtatctacacagctccctcgggtctggagtccacttgtttggttgtggcctatggtttggacatttaccaaactcgagtctacccatccaagcagtttgacgttctgaaggatgactatgactacgtgttaatcagcagcgtcctctttggcctggtttttgccaccatgatcactaagagactggcacaggtgaagctcctgaatcgggcctggcgataaagaacaaagactgtgcctaaaagtggagagccaggggagtgtgggtcagataagcagctacagctgcagtttggtggattggtggagtatgtgtgtgtgtcagtgctcagctaagaactgtagggaagatggatgaccttcacgcagaactccttttgggatatacatgatgcagaaaggatcctacatggagagagacagaactctctcagctgacactctcagagattcctgatgggctttctcttgaagtccaaaggcgtctgcattgtttcctttctttgcccatccatgaatgttctgttttgttttttttaataagaattccggctgatttttgtgaggcctgtttaaattgactttactttgccttttgtgtttctcaattttatctagaaatctttctgactttttccatctcttgcttcaaagtaagaggggaactctccttgccgactccaccttataggtacatttggtgttttgcactgggaagaaataggatccatccttagctgaggcttgaggactgatccagcctctcatggcttccctccaaagtaacttagggttgagggatctatatgtgatgtcaaaacttactttaaacctctagtttcgtgctgtcatttattaggctgggccaccaaatctttgtttcaatttatcagaagccaagtgcatactagcgtcttgtttgttgcccattgcctatacttttcacctgagatgtgtgagttggggccttttaaaaactactgaattgtctgagccttgaagacatttccagggagaagagataatctctcatttcacccacaggctggtctaatcataacctagttaaagatgtccttgtttaagaaccccattatttatttttagtttttaatataaattaacatgtgggtcattatatttctccttaaatgaggaaattttaaattttattgatctaacctttgaagctttaaaaaaggagaaagagggtaggggtgggaaactggcatactgtgtgtatagcactgccgattggctaggccactgtgtctctgctacaaattaaagaaatcctaaaagttttccttggtcatagagttggggaatgacagaatttttctttgttgtgaaatgtatgtacagagtagaccatctctagccctgtggtgaaagaggtacactcgaatgtttgcataaagcaagtgacaaatgacactgtttaagtcctcttttgtgtcttagaagatcattttgaggctattttcacattagaggggataaaagcagtgaagacatggagtaagtgtattttattttagtaaggaaaggtcagtttaatcatatatgggttggttaggttatctaaaaatttgtcatctttctatggtcatatgctgatggtagattatggcagagaaggaagaggaaatgacaaccattttattaattgtcagtttgatattgagtgactgaatgtctaagaatctccagaaaaaaacaggcatctatcatcctgacccaaggcatattttaacataacctgggagaagagagttaagtacaagttaaaaaaaattctgccctagttttgagaaagcctggctggaattctgactgtcttacatacatatgtgcaaggttagcctgcaagattctagtttttatttaccagtgtgccagaatctgaaacaagctactgggagggaaggtatttgtcctttagtaaaattccctgtatttcagctgtaatcaaagttacctcaaagcaggtgctttttttttttttgagacagaatctcactctgttgcccaggctggagtgcagtggcacgatcttggctc

SEQ ID NO: 795 - protein, 971 aa, Homosapiens
MAAEWASRFWLWATLLIPAAAVYEDQVGKFDWRQQYVGKVKFASLEFSPGSKKLVVATEKNVIAALNSRTGEIYVITVSNGGRIMRSWETNIGGLNWEITLDSGSFQALGLVGLQESVRYIAVLKKTTLALHHLSSGHLKWVEHLPESDSIHYQMVYSYGSGVVWALGVVPFSHVNIVKFNVEDGEIVQQVRVSTPWLQHLSGACGVVDEAVLVCPDPSSRSLQTLALETEWELRQIPLQSLDLEFGSGFQPRVLPTQPNPVDASRAQFFLHLSPSHYALLQYHYGTLSLLKNFPQTALVSFATTGEKTVAAVMACRNEVQKSSSSEDGSMGSFSEKSSSKDSLACFNQTYTINLYLVETGRRLLDTTITFSLEQSGTRPERLYIQVFLKKDDSVGYRALVQTEDHLLLFLQQLAGKVVLWSREESLAEVVCLEMVDLPLTGAQAELEGEFGKKADGLLGMFLKRLSSQLILLQAWTSHLWKMFYDARKPRSQIKNEINIDTLARDEFNLQKMMVMVTASGKLFGIESSSGTILWKQYLPNVKPDSSFKLMVQRTTAHFPHPPQCTLLVKDKESGMSSLYVFNPIFGKWSQVAPPVLKRPILQSLLLPVMDQDYAKVLLLIDDEYKVTAFPATRNVLRQLHELAPSIFFYLVDAEQGRLCGYRLRKDLTTELSWELTIPPEVQRIVKVKGKRSSEHVHSQGRVMGDRSVLYKSLNPNLLAVVTESTDAHHERTFIGIFLIDGVTGRIIHSSVQKKAKGPVHIVHSENWVVYQYWNTKARRNEFTVLELYEGTEQYNATAFSSLDRPQLPQVLQQSYIFPSSISAMEATITERGITSRHLLIGLPSGAILSLPKALLDPRRPEIPTEQSREENLIPYSPDVQIHAERFINYNQTVSRMRGIYTAPSGLESTCLVVAYGLDIYQTRVYPSKQFDVLKDDYDYVLISSVLFGLVFATMITKRLAQVKLLNRAWR

SEQ ID NO: 796 - DNA, 1699 bp, Homosapiens
tcttatttaaatgtctgcaataatgacatttttgtaactggcccttgctggacactggatcggtgtgaacattcacttcctcctgtgtagttggactaccttctggagcaattctttcccttcctaaggctttgctggatccccgccgccccgagatcccaacagaacaaagcagagaggagaacttaatcccgtattctccagatgtacagatacacgcagagcgattcatcaactataaccagacagtttctcgaatgcgaggtatctacacagctccctcgggtctggagtccacttgtttggttgtggcctatggtttggacatttaccaaactcgagtctacccatccaagcagtttgacgttctgaaggatgactatgactacgtgttaatcagcagcgtcctctttggcctggtttttgccaccatgatcactaagagactggcacaggtgaagctcctgaatcgggcctggcgataaagaacaaagactgtgcctaaaagtggagagccaggggagtgtgggtcagataagcagctacagctgcagtttggtggattggtggagtatgtgtgtgtgtcagtgctcagctaagaactgtagggaagatggatgaccttcacgcagaactccttttgggatatacatgatgcagaaaggatcctacatggagagagacagaactctctcagctgacactctcagagattcctgatgggctttctcttgaagtccaaaggcgtctgcattgtttcctttctttgcccatccatgaatgttctgttttgttttttttaataagaattccggctgatttttgtgaggcctgtttaaattgactttactttgccttttgtgtttctcaattttatctagaaatctttctgactttttccatctcttgcttcaaagtaagaggggaactctccttgccgactccaccttataggtacatttggtgttttgcactgggaagaaataggatccatccttagctgaggcttgaggactgatccagcctctcatggcttccctccaaagtaacttagggttgagggatctatatgtgatgtcaaaacttactttaaacctctagtttcgtgctgtcatttattaggctgggccaccaaatctttgtttcaatttatcagaagccaagtgcatactagcgtcttgtttgttgcccattgcctatacttttcacctgagatgtgtgagttggggccttttaaaaactactgaattgtctgagccttgaagacatttccagggagaagagataatctctcatttcacccacaggctggtctaatcataacctagttaaagatgtccttgtttaagaaccccattatttatttttagtttttaatataaattaacatgtgggtcattatatttctccttaaatgaggaaattttaaattttattgatctaacctttgaagctttaaaaaaggagaaagagggtaggggtgggaaactggcatactgtgtgtatagcactgccgattggctaggccactgtgtctctgctacaaattaaagaaatcctaaaagttttccttggtcatagagttggggaatgacagaatttttctttgttgtgaaatgtatgtacagagtagaccatctctagccctgtggtgaaagaggtacactcgaatgtttgcataaagcaagtgacaaatgac

SEQ ID NO: 797 - protein, 75 aa, Homosapiens; identical to SEQ ID NO: 787

SEQ ID NO: 798 - DNA, 3031 bp, Homosapiens
gctcaatgggaaggagacttcctgctgggggaggtatgggagggaggccccggggagaggcatgaggaaatccaagtggccttctacatttttctctttcatcattatccatatcttgattctagaactttattttctggtgtctcagaaagttaagaaaccagtgtcttcaaaagtgagaaccttcattcagacccatgcgtatcattggattattatttttggctatgtaagggagcctcattgacccatttttttgttttaaattcttatttaaatgtctgcaataatgacatttttgtaactggcccttgctggacactggatcggtgtgaacattcacttcctcctgtgtagttggactaccttctggagcaattctttcccttcctaaggctttgctggatccccgccgccccgagatcccaacagaacaaagcaggtgagaccctcatgggcagtgctgaaggctctgaccttacataacttaacctcactgattaagcttggttcttggtctctgtgtgccttcatgctgtgctaggggctggggatgtagcagggggcaagtctgaaaaagtcacctgccctcatggagcttacagtctgctgggaaatggacaataaatacataagataaacaagtaaaatatatactatgttaggtactcaaatgctaagcagagtaaaacaggaatgagctaggaagtggggatggggatgtgcgtgggtgtaatttgagaggtggcctgggaaagcccctttgagaaggtgcattttgagtgaaggcctgaaggaggtgaaggagctagctgtgtagatacctgaggaagaactttctaggcagagggaacaggcaatgcaaatcccctgagatcatgtctggtgagtttgcggagggcaacgctaggaaatgagatcactgaggtaattcgggccagaccatgtgggcaagccaatatcttattcactgttggtattgttgtattaacaaccaccatcttgtcgggttttcttacctccatcctgaatttctttgcctaggggcatgaggaatggagaggagtgtgttttggagaagtatatgagagagaggaggttaaagctaggaaaagacacaggatgataatcaggtttcagagaaatggggactgagaggcaccctggagtggagagcaggaattagcttagtggttcagtgtgttggctttaaaatggtcggctttcctcttgtggtgtgaagtgccagtcatctgtatgttctttcttttcagatttagaacaaagtaggaatctagatctcagtcttactctccagagagcttcctttcttgtagtccttcctaacattcagctgctaaatttttaactacctaatgcaagcagacctcctaggagatttgaggctagatatgtagcctggaaacctcccaggactcaggaagggcagccaagagatccctttacagcagtgctcagactgcctgtcccggctggtgttttgcagagaggagaacttaatcccgtattctccagatgtacagatacacgcagagcgattcatcaactataaccagacagtttctcgaatgcgaggtatctacacagctccctcgggtctggagtccacttgtttggttgtggcctatggtttggacatttaccaaactcgagtctacccatccaagcagtttgacgttctgaaggatgactatgactacgtgttaatcagcagcgtcctctttggcctggtttttgccaccatgatcactaagagactggcacaggtgaagctcctgaatcgggcctggcgataaagaacaaagactgtgcctaaaagtggagagccaggggagtgtgggtcagataagcagctacagctgcagtttggtggattggtggagtatgtgtgtgtgtcagtgctcagctaagaactgtagggaagatggatgaccttcacgcagaactccttttgggatatacatgatgcagaaaggatcctacatggagagagacagaactctctcagctgacactctcagagattcctgatgggctttctcttgaagtccaaaggcgtctgcattgtttcctttctttgcccatccatgaatgttctgttttgttttttttaataagaattccggctgatttttgtgaggcctgtttaaattgactttactttgccttttgtgtttctcaattttatctagaaatctttctgactttttccatctcttgcttcaaagtaagaggggaactctccttgccgactccaccttataggtacatttggtgttttgcactgggaagaaataggatccatccttagctgaggcttgaggactgatccagcctctcatggcttccctccaaagtaacttagggttgagggatctatatgtgatgtcaaaacttactttaaacctctagtttcgtgctgtcatttattaggctgggccaccaaatctttgtttcaatttatcagaagccaagtgcatactagcgtcttgtttgttgcccattgcctatacttttcacctgagatgtgtgagttggggccttttaaaaactactgaattgtctgagccttgaagacatttccagggagaagagataatctctcatttcacccacaggctggtctaatcataacctagttaaagatgtccttgtttaagaaccccattatttatttttagtttttaatataaattaacatgtgggtcattatatttctccttaaatgaggaaattttaaattttattgatctaacctttgaagctttaaaaaaggagaaagagggtaggggtgggaaactggcatactgtgtgtatagcactgccgattggctaggccactgtgtctctgctacaaattaaagaaatcctaaaagttttccttggtcatagagttggggaatgacagaatttttctttgttgtgaaatgtatgtacagagtagaccatctctagccctgtggtgaaagaggtacactcgaatgtttgcataaagcaagtgacaaatgac

SEQ ID NO: 799 - protein, 75 aa, Homosapiens; identical to SEQ ID NO: 787

SEQ ID NO: 800 - DNA, 4145 bp, Homosapiens
gcatgcgctcgcatcatggcggctgagtgggcttctcgtttctggctttgggctacgctgctgattcctgcggccgcggtctacgaagaccaagtgggcaagtttgattggagacagcaatatgttgggaaggtcaagtttgcctccttggaattttcccctggatccaagaagttggttgtagccacagagaagaatgtgattgcagcattaaattcccgaactggggagatctatgtgatcactgtgtccaatggaggccgaatcatgcgttcctgggagactaacatcgggggcctgaactgggagataaccctggacagtggcagtttccaggcacttgggctggttggcctgcaggagtctgtaaggtacatcgcagtcctgaagaagactacacttgccctccatcacctctccagtgggcacctcaagtgggtggaacatctcccagaaagtgacagcatccactaccagatggtgtattcttacggctctggggtggtgtgggccctcggagttgttcccttcagccatgtgaacattgtcaagtttaatgtggaagatggagagattgttcagcaggttagggtttcaactccgtggctgcagcacctgtctggagcctgtggtgtggtggatgaggctgtcctggtgtgtcctgacccgagctcacgttccctccaaactttggctctggagacggaatgggagttgagacagatcccactgcagtctctcgacttagaatttggaagtggattccaaccccgggtcctgcctacccagcccaacccagtggacgcttcccgggcccagttcttcctgcacttgtccccaagccactatgctctgctgcagtaccattatggaacgctgagtttgcttaaaaacttcccacagactgccctagtgagctttgccaccactggggagaagacggtggctgcagtcatggcctgtcggaatgaagtgcagaaaagtagcagttctgaagatgggtcaatggggagcttttcggagaagtctagttcaaaggactctctggcttgcttcaatcagacctacaccattaacctatacctcgtggagacaggtcggcggctgctggacaccacgataacatttagcctggaacagagcggcactcggcctgagcggctgtatatccaggtgttcttgaagaaggatgactcagtgggctaccgggctttggtgcagacagaggatcatctgctacttttcctgcagcagttggcagggaaggtggtgctgtggagccgtgaggagtccctggcagaagtggtgtgcctagagatggtggacctccccctgactggggcacaggccgagctggaaggagaatttggcaaaaaggcagatggcttgctggggatgttcctgaaacgcctctcgtctcagcttatcctgctgcaagcatggacttcccacctctggaaaatgttttatgatgctcggaagccccggagtcagattaagaatgagatcaacattgacaccctggccagagatgaattcaacctccagaagatgatggtgatggtaacagcctcaggcaagctttttggcattgagagcagctctggcaccatcctgtggaaacagtatctacccaatgtcaagccagactcctcctttaaactgatggtccagagaactactgctcatttcccccatcccccacagtgcaccctgctggtgaaggacaaggagtcgggaatgagttctctgtatgtcttcaatcccatttttgggaagtggagtcaggtagctcccccagtgctgaagcgccccatcttgcagtccttgcttctcccagtcatggatcaagactacgccaaggtgttgctgttgatagatgatgaatacaaggtcacagcttttccagccactcggaatgtcttgcgacagctacatgagcttgccccttccatcttcttctatttggtggatgcagagcagggacggctgtgtggatatcggcttcgaaaggatctcaccactgagctgagttgggagctgaccattcccccagaagtacagcggatcgtcaaggtgaaggggaaacgcagcagtgagcacgttcattcccagggccgtgtgatgggggaccgcagtgtgctctacaagagcctgaaccccaacctgctggccgtggtgacagagagcacagacgcgcaccatgagcgcacctttattggcatcttcctcattgatggcgtcactgggcgtatcattcactcctctgtgcagaagaaagccaaaggccctgtccatatcgtgcattcagagaactgggtggtgtaccagtactggaacaccaaggctcggcgcaacgagtttaccgtactggagctctatgagggcactgagcaatacaacgccaccgccttcagctccctggaccgcccccagctgccccaggtcctccagcagtcctatatcttcccgtcctccatcagtgccatggaggccaccatcaccgaacggggcatcaccagccgacacctgctgattggactaccttctggagcaattctttcccttcctaaggctttgctggatccccgccgccccgagatcccaacagaacaaagcagagaggagaacttaatcccgtattctccagatgtacagatacacgcagagcgattcatcaactataaccagacagtttctcgaatgcgaggtatctacacagctccctcgggtctggagtccacttgtttggttgtggcctatggtttggacatttaccaaactcgagtctacccatccaagcagtttgacgttctgaaggatgactatgactacgtgttaatcagcagcgtcctctttggcctggtttttgccaccatgatcactaagagactggcacaggtgaagctcctgaatcgggcctggcgataaagaacaaagactgtgcctaaaagtggagagccaggggagtgtgggtcagataagcagctacagctgcagtttggtggattggtggagtatgtgtgtgtgtcagtgctcagctaagaactgtagggaagatggatgaccttcacgcagaactccttttgggatatacatgatgcagaaaggatcctacatggagagagacagaactctctcagctgacactctcagagattcctgatgggctttctcttgaagtccaaaggcgtctgcattgtttcctttctttgcccatccatgaatgttctgttttgttttttttaataagaattccggctgatttttgtgaggcctgtttaaattgactttactttgccttttgtgtttctcaattttatctagaaatctttctgactttttccatctcttgcttcaaagtaagaggggaactctccttgccgactccaccttataggtacatttggtgttttgcactgggaagaaataggatccatccttagctgaggcttgaggactgatccagcctctcatggcttccctccaaagtaacttagggttgagggatctatatgtgatgtcaaaacttactttaaacctctagtttcgtgctgtcatttattaggctgggccaccaaatctttgtttcaatttatcagaagccaagtgcatactagcgtcttgtttgttgcccattgcctatacttttcacctgagatgtgtgagttggggccttttaaaaactactgaattgtctgagccttgaagacatttccagggagaagagataatctctcatttcacccacaggctggtctaatcataacctagttaaagatgtccttgtttaagaaccccattatttatttttagtttttaatataaattaacatgtgggtcattatatttctccttaaatgaggaaattttaaattttattgatctaacctttgaagctttaaaaaaggagaaagagggtaggggtgggaaactggcatactgtgtgtatagcactgccgattggctaggccactgtgtctctgctacaaattaaagaaatcctaaaagttttccttggtcatagagttggggaatgacagaatttttctttgttgtgaaatgtatgtacagagtagaccatctctagccctgtggtgaaagaggtacactcgaatgtttgcataaagcaagtgacaaatgac

SEQ ID NO: 801 - protein, 971 aa, Homosapiens; identical to SEQ ID NO: 795

SEQ ID NO: 802 - DNA, 4239 bp, Homosapiens
ggtgcatgccgggacggcggtgggtggtgcatgcgctcgcatcatggcggctgagtgggcttctcgtttctggctttgggctacgctgctgattcctgcggccgcggtctacgaagaccaagtgggcaagtttgattggagacagcaatatgttgggaaggtcaagtttgcctccttggaattttcccctggatccaagaagttggttgtagccacagagaagaatgtgattgcagcattaaattcccgaactggggagatcttgtggcgccatgttgacaagggcacggcagaaggggctgtggatgccatgctgctgcacggacaggatgtgatcactgtgtccaatggaggccgaatcatgcgttcctgggagactaacatcgggggcctgaactgggagataaccctggacagtggcagtttccaggcacttgggctggttggcctgcaggagtctgtaaggtacatcgcagtcctgaagaagactacacttgccctccatcacctctccagtgggcacctcaagtgggtggaacatctcccagaaagtgacagcatccactaccagatggtgtattcttacggctctggggtggtgtgggccctcggagttgttcccttcagccatgtgaacattgtcaagtttaatgtggaagatggagagattgttcagcaggttagggtttcaactccgtggctgcagcacctgtctggagcctgtggtgtggtggatgaggctgtcctggtgtgtcctgacccgagctcacgttccctccaaactttggctctggagacggaatgggagttgagacagatcccactgcagtctctcgacttagaatttggaagtggattccaaccccgggtcctgcctacccagcccaacccagtggacgcttcccgggcccagttcttcctgcacttgtccccaagccactatgctctgctgcagtaccattatggaacgctgagtttgcttaaaaacttcccacagactgccctagtgagctttgccaccactggggagaagacggtggctgcagtcatggcctgtcggaatgaagtgcagaaaagtagcagttctgaagatgggtcaatggggagcttttcggagaagtctagttcaaaggactctctggcttgcttcaatcagacctacaccattaacctatacctcgtggagacaggtcggcggctgctggacaccacgataacatttagcctggaacagagcggcactcggcctgagcggctgtatatccaggtgttcttgaagaaggatgactcagtgggctaccgggctttggtgcagacagaggatcatctgctacttttcctgcagcagttggcagggaaggtggtgctgtggagccgtgaggagtccctggcagaagtggtgtgcctagagatggtggacctccccctgactggggcacaggccgagctggaaggagaatttggcaaaaaggcagatggcttgctggggatgttcctgaaacgcctctcgtctcagcttatcctgctgcaagcatggacttcccacctctggaaaatgttttatgatgctcggaagccccggagtcagattaagaatgagatcaacattgacaccctggccagagatgaattcaacctccagaagatgatggtgatggtaacagcctcaggcaagctttttggcattgagagcagctctggcaccatcctgtggaaacagtatctacccaatgtcaagccagactcctcctttaaactgatggtccagagaactactgctcatttcccccatcccccacagtgcaccctgctggtgaaggacaaggagtcgggaatgagttctctgtatgtcttcaatcccatttttgggaagtggagtcaggtagctcccccagtgctgaagcgccccatcttgcagtccttgcttctcccagtcatggatcaagactacgccaaggtgttgctgttgatagatgatgaatacaaggtcacagcttttccagccactcggaatgtcttgcgacagctacatgagcttgccccttccatcttcttctatttggtggatgcagagcagggacggctgtgtggatatcggcttcgaaaggatctcaccactgagctgagttgggagctgaccattcccccagaagtacagcggatcgtcaaggtgaaggggaaacgcagcagtgagcacgttcattcccagggccgtgtgatgggggaccgcagtgtgctctacaagagcctgaaccccaacctgctggccgtggtgacagagagcacagacgcgcaccatgagcgcacctttattggcatcttcctcattgatggcgtcactgggcgtatcattcactcctctgtgcagaagaaagccaaaggccctgtccatatcgtgcattcagagaactgggtggtgtaccagtactggaacaccaaggctcggcgcaacgagtttaccgtactggagctctatgagggcactgagcaatacaacgccaccgccttcagctccctggaccgcccccagctgccccaggtcctccagcagtcctatatcttcccgtcctccatcagtgccatggaggccaccatcaccgaacggggcatcaccagccgacacctgctgattggactaccttctggagcaattctttcccttcctaaggctttgctggatccccgccgccccgagatcccaacagaacaaagcagagaggagaacttaatcccgtattctccagatgtacagatacacgcagagcgattcatcaactataaccagacagtttctcgaatgcgaggtatctacacagctccctcgggtctggagtccacttgtttggttgtggcctatggtttggacatttaccaaactcgagtctacccatccaagcagtttgacgttctgaaggatgactatgactacgtgttaatcagcagcgtcctctttggcctggtttttgccaccatgatcactaagagactggcacaggtgaagctcctgaatcgggcctggcgataaagaacaaagactgtgcctaaaagtggagagccaggggagtgtgggtcagataagcagctacagctgcagtttggtggattggtggagtatgtgtgtgtgtcagtgctcagctaagaactgtagggaagatggatgaccttcacgcagaactccttttgggatatacatgatgcagaaaggatcctacatggagagagacagaactctctcagctgacactctcagagattcctgatgggctttctcttgaagtccaaaggcgtctgcattgtttcctttctttgcccatccatgaatgttctgttttgttttttttaataagaattccggctgatttttgtgaggcctgtttaaattgactttactttgccttttgtgtttctcaattttatctagaaatctttctgactttttccatctcttgcttcaaagtaagaggggaactctccttgccgactccaccttataggtacatttggtgttttgcactgggaagaaataggatccatccttagctgaggcttgaggactgatccagcctctcatggcttccctccaaagtaacttagggttgagggatctatatgtgatgtcaaaacttactttaaacctctagtttcgtgctgtcatttattaggctgggccaccaaatctttgtttcaatttatcagaagccaagtgcatactagcgtcttgtttgttgcccattgcctatacttttcacctgagatgtgtgagttggggccttttaaaaactactgaattgtctgagccttgaagacatttccagggagaagagataatctctcatttcacccacaggctggtctaatcataacctagttaaagatgtccttgtttaagaaccccattatttatttttagtttttaatataaattaacatgtgggtcattatatttctccttaaatgaggaaattttaaattttattgatctaacctttgaagctttaaaaaaggagaaagagggtaggggtgggaaactggcatactgtgtgtatagcactgccgattggctaggccactgtgtctctgctacaaattaaagaaatcctaaaagttttccttggtcatagagttggggaatgacagaatttttctttgttgtgaaatgtatgtacagagtagaccatctctagccctgtggtgaaagaggtacactcgaatgtttgcataaagcaagtgacaaatgac

SEQ ID NO: 803 - protein, 993 aa, Homosapiens; identical to SEQ ID NO: 14

SEQ ID NO: 804 - DNA, 855 bp, Homosapiens
tcttatttaaatgtctgcaataatgacatttttgtaactggcccttgctggacactggatcggtgtgaacattcacttcctcctgtgtagttggactaccttctggagcaattctttcccttcctaaggctttgctggatccccgccgccccgagatcccaacagaacaaagcagagaggagaacttaatcccgtattctccagatgtacagatacacgcagagcgattcatcaactataaccagacagtttctcgaatgcgaggtatctacacagctccctcgggtctggagtccacttgtttggttgtggcctatggtttggacatttaccaaactcgagtctacccatccaagcagtttgacgttctgaaggatgactatgactacgtgttaatcagcagcgtcctctttggcctggtttttgccaccatgatcactaagagactggcacaggtgaagctcctgaatcgggcctggcgataaagaacaaagactgtgcctaaaagtggagagccaggggagtgtgggtcagataagcagctacagctgcagtttggtggattggtggagtatgtgtgtgtgtcagtgctcagctaagaactgtagggaagatggatgaccttcacgcagaactccttttgggatatacatgatgcagaaaggatcctacatggagagagacagaactctctcagctgacactctcagagattcctgatgggctttctcttgaagtccaaaggcgtctgcattgtttcctttctttgcccatccatgaatgttctgttttgttttttttaataagaattccggctgatttttgtgaggcctgtttaaattgactttactttgc

SEQ ID NO: 805 - protein, 75 aa, Homosapiens; identical to SEQ ID NO: 787

SEQ ID NO: 806 - DNA, 3395 bp, Homosapiens
ggtgcatgccgggacggcggtgggtggtgcatgcgctcgcatcatggcggctgagtgggcttctcgtttctggctttgggctacgctgctgattcctgcggccgcggtctacgaagaccaagtgggcaagtttgattggagacagcaatatgttgggaaggtcaagtttgcctccttggaattttcccctggatccaagaagttggttgtagccacagagaagaatgtgattgcagcattaaattcccgaactggggagatcttgtggcgccatgttgacaagggcacggcagaaggggctgtggatgccatgctgctgcacggacaggatgtgatcactgtgtccaatggaggccgaatcatgcgttcctgggagactaacatcgggggcctgaactgggagataaccctggacagtggcagtttccaggcacttgggctggttggcctgcaggagtctgtaaggtacatcgcagtcctgaagaagactacacttgccctccatcacctctccagtgggcacctcaagtgggtggaacatctcccagaaagtgacagcatccactaccagatggtgtattcttacggctctggggtggtgtgggccctcggagttgttcccttcagccatgtgaacattgtcaagtttaatgtggaagatggagagattgttcagcaggttagggtttcaactccgtggctgcagcacctgtctggagcctgtggtgtggtggatgaggctgtcctggtgtgtcctgacccgagctcacgttccctccaaactttggctctggagacggaatgggagttgagacagatcccactgcagtctctcgacttagaatttggaagtggattccaaccccgggtcctgcctacccagcccaacccagtggacgcttcccgggcccagttcttcctgcacttgtccccaagccactatgctctgctgcagtaccattatggaacgctgagtttgcttaaaaacttcccacagactgccctagtgagctttgccaccactggggagaagacggtggctgcagtcatggcctgtcggaatgaagtgcagaaaagtagcagttctgaagatgggtcaatggggagcttttcggagaagtctagttcaaaggactctctggcttgcttcaatcagacctacaccattaacctatacctcgtggagacaggtcggcggctgctggacaccacgataacatttagcctggaacagagcggcactcggcctgagcggctgtatatccaggtgttcttgaagaaggatgactcagtgggctaccgggctttggtgcagacagaggatcatctgctacttttcctgcagcagttggcagggaaggtggtgctgtggagccgtgaggagtccctggcagaagtggtgtgcctagagatggtggacctccccctgactggggcacaggccgagctggaaggagaatttggcaaaaaggcagatggcttgctggggatgttcctgaaacgcctctcgtctcagcttatcctgctgcaagcatggacttcccacctctggaaaatgttttatgatgctcggaagccccggagtcagattaagaatgagatcaacattgacaccctggccagagatgaattcaacctccagaagatgatggtgatggtaacagcctcaggcaagctttttggcattgagagcagctctggcaccatcctgtggaaacagtatctacccaatgtcaagccagactcctcctttaaactgatggtccagagaactactgctcatttcccccatcccccacagtgcaccctgctggtgaaggacaaggagtcgggaatgagttctctgtatgtcttcaatcccatttttgggaagtggagtcaggtagctcccccagtgctgaagcgccccatcttgcagtccttgcttctcccagtcatggatcaagactacgccaaggtgttgctgttgatagatgatgaatacaaggtcacagcttttccagccactcggaatgtcttgcgacagctacatgagcttgccccttccatcttcttctatttggtggatgcagagcagggacggctgtgtggatatcggcttcgaaaggatctcaccactgagctgagttgggagctgaccattcccccagaagtacagcggatcgtcaaggtgaaggggaaacgcagcagtgagcacgttcattcccagggccgtgtgatgggggaccgcagtgtgctctacaagagcctgaaccccaacctgctggccgtggtgacagagagcacagacgcgcaccatgagcgcacctttattggcatcttcctcattgatggcgtcactgggcgtatcattcactcctctgtgcagaagaaagccaaaggccctgtccatatcgtgcattcagagaactgggtggtgtaccagtactggaacaccaaggctcggcgcaacgagtttaccgtactggagctctatgagggcactgagcaatacaacgccaccgccttcagctccctggaccgcccccagctgccccaggtcctccagcagtcctatatcttcccgtcctccatcagtgccatggaggccaccatcaccgaacggggcatcaccagccgacacctgctgattggactaccttctggagcaattctttcccttcctaaggctttgctggatccccgccgccccgagatcccaacagaacaaagcagagaggagaacttaatcccgtattctccagatgtacagatacacgcagagcgattcatcaactataaccagacagtttctcgaatgcgaggtatctacacagctccctcgggtctggagtccacttgtttggttgtggcctatggtttggacatttaccaaactcgagtctacccatccaagcagtttgacgttctgaaggatgactatgactacgtgttaatcagcagcgtcctctttggcctggtttttgccaccatgatcactaagagactggcacaggtgaagctcctgaatcgggcctggcgataaagaacaaagactgtgcctaaaagtggagagccaggggagtgtgggtcagataagcagctacagctgcagtttggtggattggtggagtatgtgtgtgtgtcagtgctcagctaagaactgtagggaagatggatgaccttcacgcagaactccttttgggatatacatgatgcagaaaggatcctacatggagagagacagaactctctcagctgacactctcagagattcctgatgggctttctcttgaagtccaaaggcgtctgcattgtttcctttctttgcccatccatgaatgttctgttttgttttttttaataagaattccggctgatttttgtgaggcctgtttaaattgactttactttgc

SEQ ID NO: 807 - protein, 993 aa, Homosapiens; identical to SEQ ID NO: 14

SEQ ID NO: 808 - DNA, 2186 bp, Homosapiens
gctcaatgggaaggagacttcctgctgggggaggtatgggagggaggccccggggagaggcatgaggaaatccaagtggccttctacatttttctctttcatcattatccatatcttgattctagaactttattttctggtgtctcagaaagttaagaaaccagtgtcttcaaaagtgagaaccttcattcagacccatgcgtatcattggattattatttttggctatgtaagggagcctcattgacccatttttttgttttaaattcttatttaaatgtctgcaataatgacatttttgtaactggcccttgctggacactggatcggtgtgaacattcacttcctcctgtgtagttggactaccttctggagcaattctttcccttcctaaggctttgctggatccccgccgccccgagatcccaacagaacaaagcaggtgagaccctcatgggcagtgctgaaggctctgaccttacataacttaacctcactgattaagcttggttcttggtctctgtgtgccttcatgctgtgctaggggctggggatgtagcagggggcaagtctgaaaaagtcacctgccctcatggagcttacagtctgctgggaaatggacaataaatacataagataaacaagtaaaatatatactatgttaggtactcaaatgctaagcagagtaaaacaggaatgagctaggaagtggggatggggatgtgcgtgggtgtaatttgagaggtggcctgggaaagcccctttgagaaggtgcattttgagtgaaggcctgaaggaggtgaaggagctagctgtgtagatacctgaggaagaactttctaggcagagggaacaggcaatgcaaatcccctgagatcatgtctggtgagtttgcggagggcaacgctaggaaatgagatcactgaggtaattcgggccagaccatgtgggcaagccaatatcttattcactgttggtattgttgtattaacaaccaccatcttgtcgggttttcttacctccatcctgaatttctttgcctaggggcatgaggaatggagaggagtgtgttttggagaagtatatgagagagaggaggttaaagctaggaaaagacacaggatgataatcaggtttcagagaaatggggactgagaggcaccctggagtggagagcaggaattagcttagtggttcagtgtgttggctttaaaatggtcggctttcctcttgtggtgtgaagtgccagtcatctgtatgttctttcttttcagatttagaacaaagtaggaatctagatctcagtcttactctccagagagcttcctttcttgtagtccttcctaacattcagctgctaaatttttaactacctaatgcaagcagacctcctaggagatttgaggctagatatgtagcctggaaacctcccaggactcaggaagggcagccaagagatccctttacagcagtgctcagactgcctgtcccggctggtgttttgcagagaggagaacttaatcccgtattctccagatgtacagatacacgcagagcgattcatcaactataaccagacagtttctcgaatgcgaggtatctacacagctccctcgggtctggagtccacttgtttggttgtggcctatggtttggacatttaccaaactcgagtctacccatccaagcagtttgacgttctgaaggatgactatgactacgtgttaatcagcagcgtcctctttggcctggtttttgccaccatgatcactaagagactggcacaggtgaagctcctgaatcgggcctggcgataaagaacaaagactgtgcctaaaagtggagagccaggggagtgtgggtcagataagcagctacagctgcagtttggtggattggtggagtatgtgtgtgtgtcagtgctcagctaagaactgtagggaagatggatgaccttcacgcagaactccttttgggatatacatgatgcagaaaggatcctacatggagagagacagaactctctcagctgacactctcagagattcctgatgggctttctcttgaagtccaaaggcgtctgcattgtttcctttctttgcccatccatgaatgttctgttttgttttttttaataagaattccggctgatttttgtgaggcctgtttaaattgactttactttg

SEQ ID NO: 809 - protein, 75 aa, Homosapiens; identical to SEQ ID NO: 787

SEQ ID NO: 810 - DNA, 917 bp, Homosapiens
cagagatttgttctactgtgcaccactccatccacagcacctagaaccgtatctgccatgtagtagctgcccaacaaatatgaacaaatgattgactttgtatcagacatcaggattatgctaatctaagtttacagtagaatgagtagcataattcacttcttagccaaatggccaggaaacacctgcatatccaccaaatagaagaagatggaaggggcaagctcatgtagctgtcgcaagacattccgagtggctggaaaagctgtgaccttgaaaaacccagagagcccaaggaaagagttaggaaatttccccatcaaagagagccttaagaataaaactgcaaatcagttgatttgaactcagtttagggtttacattcagttctgttaagaacctgagttttcacaaatgcagacacagccatcatttctcttcgggatggccttagagcccaaacacgtgctgggtgcagagagcactccatctccgggccgctgtgtttgaccacctggccccaaaccggactccgctagcatgttctccatcccctctgaagacagtaccttgtattcatcatctatcaacagcaacaccttggcgtagtcttgatccatgactgggagaagcaaggactgcaagatggggcgcttcagcactgggggagctacctgactccacttcccaaaaatgggattgaagacatacagagaactcattcccgactcctaaaatgagcaaactgtcaggctccaccaacaagaaaagactgcaaatcctagggatagacctgaagagctgggactccagctcaacaactgtgggggttctctagtctttgccctctttgtggaaaataagttcttggctgtaggtgaatagtcccctaggctaacgtcacaaagaaaaaagtc

SEQ ID NO: 811 - protein, 50 aa, Homosapiens
MEGASSCSCRKTFRVAGKAVTLKNPESPRKELGNFPIKESLKNKTANQLI

SEQ ID NO: 812 - DNA, 1631 bp, Homosapiens
accatgaagaacctttgagcttaggacccccagtgggatgctggcagcaatattgctgttgggctgagagggaaatgtaaaaatctttcacgagcttcctgttaacgatgacttttctgtaggttagggtttcaactccgtggctgcagcacctgtctggagcctgtggtgtggtggatgaggctgtcctggtgtgtcctgacccgagctcacgttccctccaaactttggctctggagacggaatgggagttgagacagatcccactgcagtctctcgacttagaatttggaagtggattccaaccccgggtcctgcctacccagcccaacccagtggacgcttcccgggcccagttcttcctgcacttgtccccaagccactatgctctgctgcagtaccattatggaacgctgagtttgcttaaaaacttcccacaggtaactgcaggcaacatggtttgctaggattcaggagatctctccaagacatggatgctagaaggcagtgcttttgaatctggaaacgtttgctcttaggcccaagattgatgacaccttcccgtaagtggtttgagagggggtaggtagccttatcatagaaatggtgtatttcctcctgagtattacaaaggatctttagagcaaaactagtgccttccttagtccaaaggaaatatggggacataaatgagagcttccccatagatagtaagaacaagcagcatgggatttaagattgacctgtgcctgcgttggaggtagggagagttctgttttcagctgtagatgcaactgaggcctccctctgctcttaaatgcctgaccattctgctccaaagtggggagcactttcaactctaaggccaagggccttccctggagaggtgaccctctgtaaggcagctggctagtactggtcccatttaggagctgatgccttgcttttcccccagactgccctagtgagctttgccaccactggggagaagacggtggctgcagtcatggcctgtcggaatgaagtggtgagtattgagaacaacagtcagcacttgggattttccttcctggtctccactaggaaccctgaaaatcagaagtctgggcacattgacctggtcagtttgaacccagcgggcaggaggctgttgagaagtgaggtcttgcctcaactatagagctttctgcacaccccatttctccccaggaacgagaccctaatgtgatgaccttactttcatatggggctattaagggttgaataggctttgtgggcaggggtgagaaatgagctttgtcttctctcaagtgctaagaagacaaaaacaaaagcttcatttcagtgactgggaagtgaccctttggctgaattttctcctgtccttctctttctcatagcagaaaagtagcagttctgaagatgggtcaatggggagcttttcggagaagtctagttcaaaggtatggtgtggcactgggcagtatgccagacctagagacgcaggaggccaccaaagagagttgggggaagagctttggttaggagcaggtcctagagttcccagcttcaaatgaggtttcctaagtactgtaaattaaatgatgtttctcttaatctcattttaccgg

SEQ ID NO: 813 - protein, 60 aa, Homosapiens
MGVETDPTAVSRLRIWKWIPTPGPAYPAQPSGRFPGPVLPALVPKPLCSAAVPLWNAEFA

SEQ ID NO: 814 - DNA, 352 bp, Homosapiens
gcatgcgctcgcatcatggcggctgagtgggcttctcgtttctggctttgggctacgctgctgattcctgcggccgcggtctacgaagaccaagtgggcaagtttgattggagacagcaatatgttgggaaggtcaagtttgcctccttggaattttcccctggatccaagaagttggttgtagccacagagaagaatgtgattgcagcattaaattcccgaactggggagatctgtgagtgaactgagaactgtgtctactggctgcctcagggatgaaagacttaccattgccaactctgcctggctgattcctgaataaggaacatgttggccaaaagatgcctctcct

SEQ ID NO: 815 - protein, 75 aa, Homosapiens
MAAEWASRFWLWATLLIPAAAVYEDQVGKFDWRQQYVGKVKFASLEFSPGSKKLVVATEKNVIAALNSRTGEICE

SEQ ID NO: 816 - DNA, 1164 bp, Homosapiens
tcccggcatgcaccgcgccgcgggctccgcctccgcgggaccacagagctgggatagcgcgcgaggccctcggtcggacgggacgctcgggattcagggactgcctcggcacacgggaagttgccctacaggcgcgggagaaagcgcaggcggcggcttggcagggagaggcaggctgcagtgcacattgggtcaggcacacgcgaggggcagcccccgagggccgtcccagagtcccccgcgccgccggggtcctaacggggtgcaccgtcttccgccgcacgtggattcagcgcgatgcccaaatccaagcgcgacaagaaagtctccttaaccaaaactgccaagaaaggcttggaattgaaacaaaacctgatagaagagcttcggaaatgtgtggacacctacaagtaccttttcatcttctctgtggccaacatgaggaacagcaagctgaaggacatccggaacgcctggaagcacagccggatgttctttggcaaaaacaaggtgatgatggtggccttgggtcggagcccatctgatgaatacaaagacaacctgcaccaggtcagcaaaaggttgaggggtgaggtgggtctcctgttcaccaaccgcacaaaggaggaggtgaatgagtggttcacgaaatacacagaaatggactacgcccgagctggtaacaaagcagctttcactgtgagcctggatccagggcccctggagcagttcccccactccatggagccacagctcaggcagctgggcctgcccaccgccctcaagagaggtgtggtgactctgctgtctgactacgaggtgtgcaaggagggcgatgtgctgaccccagagcaggctcgcgtcctgaagctttttgggtatgagatggctgaattcaaggtgaccatcaaatacatgtgggattcacagtcgggaaggttccagcagatgggagacgacttgccagagagcgcatctgagtccacagaagagtcagactcagaagatgatgactgaaagggactcgggactgaaggtctcctggaagcttctgggtctcactggaccatcaggactgctgccgcccctctggagagagcagctttttatttgtctgtagacagggaacatgatgggcactgacctcctgtaaagaataaaact

SEQ ID NO: 817 - protein, 239 aa, Homosapiens; identical to SEQ ID NO: 16

SEQ ID NO: 818 - DNA, 1249 bp, Homosapiens
tcccggcatgcaccgcgccgcgggctccgcctccgcgggaccacagagctgggatagcgcgcgaggccctcggtcggacgggacgctcgggattcagggactgcctcggcacacgggaagttgccctacaggcgcgggagaaagcgcaggcggcggcttggcagggagaggcaggctgcagtgcacattgggtcaggcacacgcgaggggcagcccccgagggccgtcccagagtcccccgcgccgccggggtcctaacggggtgcaccgtcttccgccgcacgtggattcagcgcgatgcccaaatccaagcgcgacaagaaagtctccttaaccaaaactgccaagaaaggcttggaattgaaacaaaacctgatagaagagcttcggaaatgtgtggacacctacaagtaccttttcatcttctctgtggccaacatgaggaacagcaagctgaaggacatccggaacgcctggaagcacagccggatgttctttggcaaaaacaaggtgatgatggtggccttgggtcggagcccatctgatgaatacaaagacaacctgcaccaggtcagcaaaaggttgaggggtgaggtgggtctcctgttcaccaaccgcacaaaggaggaggtgaatgagtggttcacgaaatacacagaaatggactacgcccgagctggtaacaaagcagctttcactgtgagcctggatccagggcccctggagcagttcccccactccatggagccacagctcaggcagctgggcctgcccaccgccctcaagagaggtgtggtgactctgctgtctgactacgaggtgtgcaaggagggcgatgtgctgaccccagagcaggctcgcgtcctgaagctttttgggtatgagatggctgaattcaaggtgaccatcaaatacatgtgggattcacagtcgggaaggttccagcagatgggagacgacttgccagagagcgcatctgagtccacagaagagtcagactcagaagatgatgactgaaagggactcgggactgaaggtctcctggaagcttctgggtctcactggaccatcaggactgctgccgcccctctggagagagcagctttttatttgtctgtagacagggaacatgatgggcactgacctcctgtaaagaataaaactgtgtgagccaccgcatccagcccacattgttctatttgtatttcatgaaagcagttctgaatgagagtaaatcagcttcagggtg

SEQ ID NO: 819 - protein, 239 aa, Homosapiens; identical to SEQ ID NO: 16

SEQ ID NO: 820 - DNA, 1257 bp, Homosapiens
gcctccgcgggaccacagagctgggatagcgcgcgaggccctcggtcggacgggacgctcgggattcagggactgcctcggcacacgggaagttgccctacaggcgcgggagaaagcgcaggcggcggcttggcagggagaggcaggctgcagtgcacattgggtcaggcacacgcgaggggcagcccccgagggccgtcccagagtcccccgcgccgccggggtcctaacggggtgcaccgtcttccgccgcacgtggattcagcgcgatgcccaaatccaagcgcgacaagaaagtctccttaaccaaaactgccaagaaaggcttggaattgaaacaaaacctgatagaagagcttcggaaatgtgtggacacctacaagtaccttttcatcttctctgtggccaacatgaggaacagcaagctgaaggacatccggaacgcctggaagcacagccggatgttctttggcaaaaacaaggtgatgatggtggccttgggtcggagcccatctgatgaatacaaagacaacctgcaccaggtcagcaaaaggttgaggggtgaggtgggtctcctgttcaccaaccgcacaaaggaggaggtgaatgagtggttcacgaaatacacagaaatggactacgcccgagctggtaacaaagcagctttcactgtgagcctggatccagggcccctggagcagttcccccactccatggagccacagctcaggcagctgggcctgcccaccgccctcaagagaggtgtggtgactctgctgtctgactacgaggtgtgcaaggagggcgatgtgctgaccccagagcaggctcgcgtcctgaagctttttgggtatgagatggctgaattcaaggtgaccatcaaatacatgtgggattcacagtcgggaaggttccagcagatgggagacgacttgccagagagcgcatctgagtccacagaagagtcagactcagaagatgatgactgaaagggactcgggactgaaggtctcctggaagcttctgggtctcactggaccatcaggactgctgccgcccctctggagagagcagctttttatttgtctgtagacagggaacatgatgggcactgacctcctgtaaagaataaaactgtgggccgggcgcggtggctcacgcctggaatcccagcactttgggaagccgaggtgggcagatcataaggtcgggagattaagaccatcctggctaacacggtgaaaccccgtctctact

SEQ ID NO: 821 - protein, 239 aa, Homosapiens; identical to SEQ ID NO: 16

SEQ ID NO: 822 - DNA, 1605 bp, Homosapiens
gcctccgcgggaccacagagctgggatagcgcgcgaggccctcggtcggacgggacgctcgggattcagggactgcctcggcacacgggaagttgccctacaggcgcgggagaaagcgcaggcggcggcttggcagggagaggcaggctgcagtgcacattgggtcaggcacacgcgaggggcagcccccgagggccgtcccagagtcccccgcgccgccggggtcctaacggggtgcaccgtcttccgccgcacgtggattcagcgcgatgcccaaatccaagcgcgacaagaaagtctccttaaccaaaactgccaagaaaggcttggaattgaaacaaaacctgatagaagagcttcggaaatgtgtggacacctacaagtaccttttcatcttctctgtggccaacatgaggaacagcaagctgaaggacatccggaacgcctggaagcacagccggatgttctttggcaaaaacaaggtgatgatggtggccttgggtcggagcccatctgatgaatacaaagacaacctgcaccaggtcagcaaaaggttgaggggtgaggtgggtctcctgttcaccaaccgcacaaaggaggaggtgaatgagtggttcacgaaatacacagaaatggactacgcccgagctggtaacaaagcagctttcactgtgagcctggatccagggcccctggagcagttcccccactccatggagccacagctcaggcagctgggcctgcccaccgccctcaagagaggtgtggtgactctgctgtctgactacgaggtgtgcaaggagggcgatgtgctgaccccagagcaggctcgcgtcctgaagctttttgggtatgagatggctgaattcaaggtgaccatcaaatacatgtgggattcacagtcgggaaggttccagcagatgggagacgacttgccagagagcgcatctgagtccacagaagagtcagactcagaagatgatgactgaaagggactcgggactgaaggtctcctggaagcttctgggtctcactggaccatcaggactgctgccgcccctctggagagagcagctttttatttgtctgtagacagggaacatgatgggcactgacctcctgtaaagaataaaactgtgggccgggcgcggtggctcacgcctggaatcccagcactttgggaagccgaggtgggcagatcataaggtcgggagattaagaccatcctggctaacacggtgaaaccccgtctctactaaaaatagaaaaaaaaactagttgggcatagtggcatgtgcctgtagtcccagctactcaggaggctgaggcaggagaatcacttgaacccgggaggtggaggttgccgtgagttgagattggaccactgctctccagcctgggcaacagagtaaaactctgtcccaaaaaaaaaaaaagaatacaaccttgcaggatgtctctcctggagacagcaagagggagaggagggagagggctctttcttagaaaagaggcctttggtgagcccagaagtttgaaaccagcctgggcaattcagcaagatcccgtctctacaaaaaataaaaaaaaattagtcgtggtgcc

SEQ ID NO: 823 - protein, 239 aa, Homosapiens; identical to SEQ ID NO: 16

SEQ ID NO: 824 - DNA, 2285 bp, Homosapiens
gcctccgcgggaccacagagctgggatagcgcgcgaggccctcggtcggacgggacgctcgggattcagggactgcctcggcacacgggaagttgccctacaggcgcgggagaaagcgcaggcggcggcttggcagggagaggcaggctgcagtgcacattgggtcaggcacacgcgaggggcagcccccgagggccgtcccagagtcccccgcgccgccggggtcctaacggggtgcaccgtcttccgccgcacgtggattcagcgcgatgcccaaatccaagcgcgacaagaaagtctccttaaccaaaactgccaagaaaggcttggaattgaaacaaaacctgatagaagagcttcggaaatgtgtggacacctacaagtaccttttcatcttctctgtggccaacatgaggaacagcaagctgaaggacatccggaacgcctggaagcacagccggatgttctttggcaaaaacaaggtgatgatggtggccttgggtcggagcccatctgatgaatacaaagacaacctgcaccaggtcagcaaaaggttgaggggtgaggtgggtctcctgttcaccaaccgcacaaaggaggaggtgaatgagtggttcacgaaatacacagaaatggactacgcccgagctggtaacaaagcagctttcactgtgagcctggatccagggcccctggagcagttcccccactccatggagccacagctcaggcagctgggcctgcccaccgccctcaagagaggtgtggtgactctgctgtctgactacgaggtgtgcaaggagggcgatgtgctgaccccagagcaggctcgcgtcctgaagctttttgggtatgagatggctgaattcaaggtgaccatcaaatacatgtgggattcacagtcgggaaggttccagcagatgggagacgacttgccagagagcgcatctgagtccacagaagagtcagactcagaagatgatgactgaaagggactcgggactgaaggtctcctggaagcttctgggtctcactggaccatcaggactgctgccgcccctctggagagagcagctttttatttgtctgtagacagggaacatgatgggcactgacctcctgtaaagaataaaactgtgggccgggcgcggtggctcacgcctggaatcccagcactttgggaagccgaggtgggcagatcataaggtcgggagattaagaccatcctggctaacacggtgaaaccccgtctctactaaaaatagaaaaaaaaactagttgggcatagtggcatgtgcctgtagtcccagctactcaggaggctgaggcaggagaatcacttgaacccgggaggtggaggttgccgtgagttgagattggaccactgctctccagcctgggcaacagagtaaaactctgtcccaaaaaaaaaaaaagaatacaaccttgcaggatgtctctcctggagacagcaagagggagaggagggagagggctctttcttagaaaagaggcctttggtgagcccagaagtttgaaaccagcctgggcaattcagcaagatcccgtctctacaaaaaataaaaaaaaattagtcgtggtgccacttgcctgtggtccccactgcttgggaggctgaggtgggagaattgcttaagcctgagagttggaggctcagtgagccatgatcatgccactgcactccagcctgggtggccattgaattctgcgtggattgcctcagtttgccttgtcagccaacttccactggctgccttggcactgccatgacagcacagctccacaccagagctggggtttctcttcagtcctgggtaccccttggcagagggatttgctgaggaaaattaggtatccttcctagccctccacacacttccaaaccagggctgcggatctgatggatgccaggaagacagccttgggctgagagtgacatcactgcaagagttgagagccagcgtctaaagtgtccacggcatcctgggaggttttatccttggtgactctaatggtagatttttgtccaccttgttctatttgcttttgtttgtttttgatttttctgttttaaaattttaaggagagatggggtttcaccatgttgcccaggctggtctcaaactcctgagctcaagcgatctacccaccttggcctcccaaagtgctgggattataggtgtgagccaccgcatccagcccacattgttctatttgtatttcatgaaagcagttctgaatgagagtaaatcagcttcagggtg

SEQ ID NO: 825 - protein, 239 aa, Homosapiens; identical to SEQ ID NO: 16

SEQ ID NO: 826 - DNA, 647 bp, Homosapiens
ccagcagccaaggtctgtgatgggggaaggcccagggccacgggacacttgggggagcctgactcatgggctggtggcgtggccaggagcatctcctcctaccacttctcttttcccttaggtggttcacgaaatacacagaaatggactacgcccgagctggtaacaaagcagctttcactgtgagcctggatccagggcccctggagcagttcccccactccatggagccacagctcaggcagctgggcctgcccaccgccctcaagagaggtgtggtgactctgctgtctgactacgaggtgtgcaaggagggcgatgtgctgaccccagagcaggctcgcgtcctgaagctttttgggtatgagatggctgaattcaaggtgaccatcaaatacatgtgggattcacagtcgggaaggttccagcagatgggagacgacttgccagagagcgcatctgagtccacagaagagtcagactcagaagatgatgactgaaagggactcgggactgaaggtctcctggaagcttctgggtctcactggaccatcaggactgctgccgcccctctggagagagcagctttttatttgtctgtagacagggaacatgatgggcactgacctcctgtaaagaataaaact

SEQ ID NO: 827 - protein, 144 aa, Homosapiens [sequence omitted]

SEQ ID NO: 828 - DNA, 428 bp, Homosapiens
ttccctttgtctcttgcagaagctttttgggtatgagatggctgaattcaaggtgaccatcaaatacatgtgggattcacagtcgggaaggttccagcagatgggagacgacttgccagagagcgcatctgagtccacagaagagtcagactcagaagatgatgactgaaagggactcgggactgaaggtctcctggaagcttctgggtctcactggaccatcaggactgctgccgcccctctggagagagcagctttttatttgtctgtagacagggaacatgatgggcactgacctcctgtaaagatgtccacggcatcctgggaggttttatccttggcctcccaaagtgctgggattataggtgtgagccaccgcatccagcccacattgttctatttgtatttcatgaaagcagttctgaatg

SEQ ID NO: 829 - protein, 39 aa, Homosapiens
MSTASWEVLSLASQSAGIIGVSHRIQPTLFYLYFMKAVL

SEQ ID NO: 830 - DNA, 2235 bp, Homosapiens
accaccggtgggcgcggcccgagccagtccctaaagccacgaggccgcccgctccgagcctggtgcttccgaccgctgcgcgcggctcctgggctgtcacagtctcccgttgccgccgtcatgtcccggcagctgtcgcgggcccggccagccacggtgctgggcgccatggagatggggcgccgcatggacgcgcccaccagcgccgcagtcacgcgcgccttcctggagcgcggccacaccgagatagacacggccttcctgtacagcgacggccagtccgagaccatccttggcggcctggggctccgaatgggcagcagcgactgcagagtgaaaattgctaccaaggccaatccatggattgggaactccctgaagcctgacagtgtccgatcccagctggagacgtcactgaagcggctgcagtgtccctgagtggacctcttctatctacatgcacctgaccacagcgccccggtggaagagacactgcgtgcctgccaccagctgcaccaggagggcaagttcgtggagcttggcctctccaactatgccgcctgggaagtggccgagatctgtaccctctgcaagagcaacggctggatcctgcccactgtgtaccagcttctggaaggagcaccacttcgagggcattgccctggtggagaaggccctgcaggccgcgtatggcgccagcgctcccagcatgacctcggccgccctccggtggatgtaccaccactcacagctgcagggtgcccacggggacgcggtcatcctgggcatgtccagcctggagcagctggagcagaacttggcagcggcagaggaagggcccctggagccggctgtcgtggacgcctttaatcaagcctggcatttgtttgcccacgaatgtcccaactacttcatctaagctcattgtggctcaggctgcccaaggcttttctgtcaactcttttgctctctcccgctttgtctaatttagaactgcctcactaaattcttagggatggaagtatttggaaaaaaacctaacagtagagtcaccacctaaggaagaataaaatctcccagggtgctgtgtgttagtctgtttgcgttgctataaaagaatacctgagactgggtcatgtataaagaaaagaggtttctttggctcacagttctgcagtctgtacaagagggtgtggtgccggcatctgctcttggtgagggcctcaggaagcttagaatcatggcagaaggggaaacggagccagcgtgtcacatggtgagagagggagcaagagacagacaggggaggaaattcacacactgatggtggggatgtaaaatggtacaaccagtttggaaaacagtttggcagtttctcaaaggattaaacataaaattaccataggattcagcagttccacttgtgggtatgtagccaagagaaatgaaaacatatctccccacaaaaaaacttgggtatgagatttcacattatcattgctcataatagccaataagtaaaaacaacccaaatgtccaagaatgaataaatggataaacaaaatatggtatatttatacaacagactattattcggccattaaaaaaaaaaaagagtggctgacacctgtaatctcagcactttgagaggccaaggcagtaggactgattgaagacaggagttccagaccagtctgggaaacaaagcgagaccctgtctccactaaacataaaaacaaaattactggggccccatggcacacacctgtagtcccagctgctcgggaagctgagatgggcggattgcttgagcccaggtattcaagtctggagtgagctatgactgtgccactgcactccagcctgggcgacagagcaaaccctgtttccaaacaaacaaacaaacaaacaaatacacagacagaagtagttaaacatctacaaggtaagtgcatcttgaagacgtgttaagttaaagaagccaattacaaaaggtttcacgttgtatgatttcgtttatatgaaatgtccagaataggcaaatctgtttgagagagagaaagtagatgagtacttgcctaggactgggaggaggattgcgaggaaatggagattcactgctaatgagtacagggtttcttttgggggcgcttatgaagatgctctgaaattgattgtgatggttgtacaactctgaatacatgaaacagcattaaacatcactttaagtaagtc

SEQ ID NO: 831 - protein, 153 aa, Homosapiens; identical to SEQ ID NO: 18

SEQ ID NO: 832 - DNA, 2000 bp, Homosapiens
actttaaccatgtcactccatggggacgctgtcttgagcctttggtaagcctcattctccaggaccacacggcaggcgcgacagccctaggtccaccccaccccgtaagcgctccctccgggaggagacagaaacccaggacagctccggggcaaggccgaggaaggagggacgacggggcagggaggcccgaagagtccccgccttttgggatagtcgccacccttggaccccctcacccttggggacgttgaggagtgttaaaatctccaagacgcgagtcaccggtacgaagccacagccatttcgctgcttgctcggtgcaagtgcagaaggtcctagtagccgagcgtggagtcgagctcgtgggcggcgtcgggcaccttcggccgcgccctcagctgcacccgccggtgggcggggcccgagcccgtctctaaagccacgaggccgcccgctccgagcctggtgcttccgaccgctgcgcgcggctcctgggctgtcacagtctcccgttgccgccgtcatgtcccggcagctgtcgcgggcccggccagccacggtgctgggcgccatggagatggggcgccgcatggacgcgcccaccagcgccgcagtcacgcgcgccttcctggagcgcggccacaccgagatagacacggccttcgtgtacagcgagggccagtccgagaccatccttggcggcctggggctccggctgggcggcagcgactgcagagtgaaaattgataccaaggccattccactgtttgggaactccctgaagcctgacagtctccggttccagctggagacgtcactgaagcggctgcagtgtccccgagtggacctcttctacctgcatatgccagaccacagcaccccggtggaagagacactgcgtgcctgccaccagctgcaccaggagggcaagttcgtggagcttggcctctccaactatgcagcctgggaagtggccgagatctgtaccctctgcaagagcaacggctggatcctgcccactgtgtaccagggcatgtacaatgccatcacccggcaggtggaaacggagctcttcccctgcctcaggcactttggactgaggttctatgccttcaaccctctggctgggggcctgctgaccggcaagtacaagtatgaggacaagaatgggaaacagcccgtgggccgcttctttgggaatacctgggcagagatgtacaggaatcgctactggaaggagcaccactttgagggcattgccctggtggagaaggccctgcaggccgcgtatggcgccagcgcccccagcatgacctcggccaccctccggtggatgtaccaccactcacagctgcagggtgcccacggggacgcggtcatcctgggcatgtccagcctggagcagctggagcagaacttggcagcggcagaggaagggcccctggagccggctgtcgtggacgcctttaatcaagcctggcatttggttactcacgaatgtcccaactacttccgctaggcccatcgtttctcaggctgcccaaggctcttctgtaacatcttttgttactcacattttctttaatttagaactgcctcagtaaattcttagggatggaagtatttggacaaaaacctaatagaagagtcaccaccaaatgaagaataaaactcccagggtgctgtgtgttagtctgtttgcgttgctataaaagaatacctgagactgggtcatttataaagaaaagaggtttatttggctcaccactctgcagtctgtacaagggggtgtggtgccggcatctgctcttggtgagggcctcaggaagcttacagtcatggcagagggggaagcggcgccagcgtgtcacatggtgagagagggagcaagagacagacaggggaggaaattccaggctcttttaaacaaccagatcctgtgtgaactcatagagctggaactcactcattactatacagatggcaccaagccattc

SEQ ID NO: 833 - protein, 331 aa, Homosapiens; identical to SEQ ID NO: 20

SEQ ID NO: 834 - DNA, 1694 bp, Homosapiens
actttaaccatgtcactccatggggacgctgtcttgagcctttggtaagcctcattctccaggaccacacggcaggcgcgacagccctaggtccaccccaccccgtaagcgctccctccgggaggagacagaaacccaggacagctccggggcaaggccgaggaaggagggacgacggggcagggaggcccgaagagtccccgccttttgggatagtcgccacccttggaccccctcacccttggggacgttgaggagtgttaaaatctccaagacgcgagtcaccggtacgaagccacagccatttcgctgcttgctcggtgcaagtgcagaaggtcctagtagccgagcgtggagtcgagctcgtgggcggcgtcgggcaccttcggccgcgccctcagctgcacccgccggtgggcggggcccgagcccgtctctaaagccacgaggccgcccgctccgagcctggtgcttccgaccgctgcgcgcggctcctgggctgtcacagtctcccgttgccgccgtcatgtcccggcagctgtcgcgggcccggccagccacggtgctgggcgccatggagatggggcgccgcatggacgcgcccaccagcgccgcagtcacgcgcgccttcctggagcgcggccacaccgagatagacacggccttcgtgtacagcgagggccagtccgagaccatccttggcggcctggggctccggctgggcggcagcgactgcagagtgaaaattgataccaaggccattccactgtttgggaactccctgaagcctgacagtctccggttccagctggagacgtcactgaagcggctgcagtgtccccgagtggacctcttctacctgcatatgccagaccacagcaccccggtggaagagacactgcgtgcctgccaccagctgcaccaggagggcaagttcgtggagcttggcctctccaactatgcagcctgggaagtggccgagatctgtaccctctgcaagagcaacggctggatcctgcccactgtgtaccagggcatgtacaatgccatcacccggcaggtggaaacggagctcttcccctgcctcaggcactttggactgaggttctatgccttcaaccctctggctgggggcctgctgaccggcaagtacaagtatgaggacaagaatgggaaacagcccgtgggccgcttctttgggaatacctgggcagagatgtacaggaatcgctactggaaggagcaccactttgagggcattgccctggtggagaaggccctgcaggccgcgtatggcgccagcgcccccagcatgacctcggccaccctccggtggatgtaccaccactcacagctgcagggtgcccacggggacgcggtcatcctgggcatgtccagcctggagcagctggagcagaacttggcagcggcagaggaagggcccctggagccggctgtcgtggacgcctttaatcaagcctggcatttggttactcacgaatgtcccaactacttccgctaggcccatcgtttctcaggctgcccaaggctcttctgtaacatcttttgttactcacattttctttaatttagaactgcctcagtaaattcttagggatggaagtatttggacaaaaacctaatagaagagtcaccaccaaatgaagaataaaactcccagggtgctgtgtgtt

SEQ ID NO: 835 - protein, 331 aa, Homosapiens; identical to SEQ ID NO: 20

SEQ ID NO: 836 - DNA, 741 bp, Homosapiens
ccaacgcgcaggcgccgctgctatgctgagtgccgcgtctcgcgtagtctcccgcgccgccgtccactgcgcgcttcgctctccgccgcccgaggcccgcgcgctcgccatgtcccggccaccgccaccgcgggtcgcctcggtgctgggcaccatggagatggggcgccgcatggacgcgcccgccagcgccgcggccgtgcgcgcctttctggagcgcggccacaccgaactggacacggccttcatgtacagcgacggccagtccgagaccatcctgggcggcctggggctcgggctgggcggtggcgactgcagagtgaaaattgccaccaaggccaacccttgggatggaaaatcactaaagcctgacagtgtccggtcccagctggagacgtcattgaagaggctgcagtgtccccaagtggacctcttctacctacacgcacctgaccacggcaccccggtggaagagacgctgcatgcctgccagcggctgcaccaggagggcaagttcgtggagcttggcctctccaactatgctagctgggaagtggccgagatctgtaccctctgcaagagcaatggctggatcctgcccactgtgtaccagggcatgtacaacgccaccacccggcaggtggaaacggagctcttcccctgcctcaggcactttggactgaggttctatgcctacaaccctctggctgggggcctgctgaccggcaagtacaagtatga

SEQ ID NO: 837 - protein, 238 aa, Homosapiens
MLSAASRVVSRAAVHCALRSPPPEARALAMSRPPPPRVASVLGTMEMGRRMDAPASAAAVRAFLERGHTELDTAFMYSDGQSETILGGLGLGLGGGDCRVKIATKANPWDGKSLKPDSVRSQLETSLKRLQCPQVDLFYLHAPDHGTPVEETLHACQRLHQEGKFVELGLSNYASWEVAEICTLCKSNGWILPTVYQGMYNATTRQVETELFPCLRHFGLRFYAYNPLAGGLLTGKYK

SEQ ID NO: 838 - DNA, 3378 bp, Homosapiens
ctctgaaattgactgtggtggttgtacaattcagaatacactaaacaccattaaattatacactttaagtgggtcagttgtatatagtgcctcaataatatgtaataaaacaatcaattagctcagaaatctgttagagcagggctcagcagggaagcctcatctgttcctcagtgtctcagaggtgatctagcagctggaggctagggttgcctgaagacattcactcaagcatgtggcagttgctgctgagggccagctggaatatcagctgctgtcatcaaccggcacacacgtgacctctgcatgtggcttccaagggagcacatcccaggcaaactaggcagaagccatgtggccttttatgtcccagcctcagaagtccataacatcactcttgtgtcctgggaggagagtcaaagatacctgtgcaaagagcacgtgagagaatggagtggttatctttggaaaataaactgtaacacttggagcaacagtcctgagtggagaaggtgagccccgggacctgccaggagactgtgtcttgactatccccatcagagatgcattttctgctatgtcacatcccatccgttagaatcttccggatactatatctcatagttgatggtctcttgaattcagcaatttcatatctaaagagattcttgaagacaccatgttgtacaccttaaatatatatacaatttttatttgttaattaaaaaataaataagtgaggccaggcgcatgctgggattacaggcgtgagccaccatgcctggccgattttttattttaacgttttgttttatcttactgtttttccttaggtgagaaaaatgtacccttccatgcctgtgctttctaaattttgggactgatacagatccacagaggccacacctaaaattaaattatcgttagtgctaaaacttaattgactgtgtatataactgtgcaattgctgttactgatataactgtttggggttcattcaacagattaaagaagcaaggtcttgcatttaacacacaaactaatgagatactgctttatacaagaattttaaaaacactgtcatatggtttagtgtagttaatgtcatgcttatgtcatataacatagcatgttagagttctctagagggacagaactaacaggatatatgtacataagaaagggagttgattggccaggtgtggcggcttatgcctgtaatcccagcactttgggaggccgagacaggtggattatctgaggtcagcagttcgagaccagcctgaccaacatggtgaaaccccatcctactaaaaaaatacaaagattagctgggcgtgttggcaggtgcctgtaatcccagctatgcaggagtctgagacagtatcacttgaacccagggggtggaggttgcggtgagccgagattgtgccactgcactccagcctgggcaacagagtgagactctgtttcaacaaacaaacaaacaaacaaaggggggggagtttattaaggataattgactcacacgttcacaaggtcaagtcccatgataggccggccgcaagttgaggagcaaggaagccagtggtggatcagcctgagtcccaaaacctcaaaagtagggaagccaacagttcagccttcagtctgtggccaaaggcctgagagcccccgacaaaccaatggtgtaagtccaagagtccaaaagctgaagaacttggagtttcatgttcaagggcaggaagcatccagcacaggagaaaaatgaaagctggaagactcagcaagtctgctcttccatcttctcttgcctgctctattctagctgggctggcaggtgattagatggtgcccacccagattgagggtggatctgcctgtcccagtccactgactcaaatgttaatctcctttggcaacaccctcacagacacaccaggaacagtaatttgcatccttcaatcctatcatgttgatgctcaatattaaccattatacattggttcaagttctttcttcagtcacaagagtaacacaggtagaagagacaaatgaataagtgccaagtcttgctgcagagtttccttcataagttttgtttgcaacctggccatttcttttctaaggtcactttgttcatcagtaagatgaactctgattctcttctaggtcctccaaactccgtaggaattgctgatttcagtttaatttgtttcagtgtctctgtctctgaaccattctagcttatagacaactcttttgttgctctcgaaacattgtagctagtttttgttcctctggttcctcagccttcactgttcgtgttccaatcttgaaacaaagtcagaaactgcttagaatatttgtaatgaagtttctgcctttcctcttgtgttttcaaaacatgttcaattctcttcttagtggtgtggataaaagcattcatatactcctgtaatcccagcactttgggaggccgagacgggtggatcacgaggtcaggagttcgagaccagcctggccaacatggtgaaaccccgtctctactaaaaataaaaaaattagccgagcatggtggcagcgcctgtaatcccagctagtcaggaggctgaggcaggagaactgcttgaacccgggaggcggaggttgcagtgagccgagatcgcgccattgcaccccagctctgggcaacagaacaagactctgtctcggaaaaaaaaaaaaaaaagcattcatatacattctagcctttttctctgtgtagcaaaatcctgtttaatatcagctccgcttacttgtaacttctgtacatcatcccccacgtcttcctcatctgttcctacaaagtgctttctttctccatgctcatcagttcctgaatgctttcctcccagctcatttcctgggctgccataacctgggcctccactgccttggcaaccttcacgatgcactccctgtccacaggctccatggctggctgtcctggaacttctgaaccttgtgagtgcaatgatgcactggaagtaggtggagatgtgtgtgatctgcaggcttgggtatctggaggccagtgggcacactggacactccctgtgatctaagaacttatttaggcagatagtgagggtaaggaagtccttggtaaggttttccttttaatgaaaagcagcccccgaatcatttctttcctaacgaagtgcagcctgtaaaatcaagctgcagacatagatcagcaagctggaagcttgcaggggtgaatgccagcagctctggcaataggaaaaggccccctggaggctaggcatgttcaacatggtggctccatctcccctttttctttatcaaccacatgtacagtaaggagcaggcaac

SEQ ID NO: 839 - protein, 74 aa, Homosapiens
MLSSQLISWAAITWASTALATFTMHSLSTGSMAGCPGTSEPCECNDALEVGGDVCDLQAWVSGGQWAHWTLPVI

SEQ ID NO: 840 - DNA, 2614 bp, Homosapiens
ccgcgccgccgtccactgcgcgcttcgctctccgccgcccgaggcccgcgcgctcgccatgtcccggccaccgccaccgcgggtcgcctcggtgctgggcaccatggagatggggcgccgcatggacgcgcccgccagcgccgcggccgtgcgcgcctttctggagcgcggccacaccgaactggacacggccttcatgtacagcgacggccagtccgagaccatcctgggcggcctggggctcgggctgggcggtggcgactgcagagtgaaaattgccaccaaggccaacccttgggatggaaaatcactaaagcctgacagtgtccggtcccagctggagacgtcattgaagaggctgcagtgtccccaagtggacctcttctacctacacgcacctgaccacggcaccccggtggaagagacgctgcatgcctgccagcggctgcaccaggagggcatgtacaacgccaccacccggcaggtggaaacggagctcttcccctgcctcaggcactttggactgaggttctatgcctacaaccctctggctgggggcctgctgactggcaagtacaagtatgaggacaaggacgggaaacagcctgtgggccgcttctttgggaatagctgggctgagacctacaggaatcgcttctggaaggagcaccacttcgaggccattgcgttggtggagaaggccctgcaggccgcatatggcgccagcgcccccagtgtgacctcggctgccctccggtggatgtaccaccactcacagctgcagggtgcccacggggacgcggtcatcctgggcatgtccagcctggagcagctggagcagaacttggcagcaacagaggaagggcccctggagccggctgtcgtggatgcctttaatcaagcctggcatttggttgctcacgaatgtcccaactacttccgctaggcccatcatggctcaggctgcccaaggcttttctgtcacctcttttgttctctcacactgaccagtcttggccttaagctgacttagaagggtttttctgaattgtctagatccatgcattatttttctagcttcctgccttgctccctattcactttacactgtgaaaggtggggggtgagtcccacttgagcgcttcctgttgaataaagcaggcacttgacctggctgtagcctaggtcttgagtgaaccccaaaaacttgctttctctgctgttaacactttgtttcccatcctacctggggactgagaaagggcagaaccatgggctggagtcttcagagggcagaggtagtaggagggtcacagaagcacactgccctcccagggtctcctcgggcccctggtctgaatacccacctgacctctcaacattgaggtgtctctcactcttctacacacgatagaaaagagagtcatacacctgcagtacattttctctaattcagagttgcctcaatacattcttaggaatgaaacaactgggacaaagaaactaccattagagtcactaccaagaagaagaacacttcccaggatctgtggaacatcttgaagctctcaatcttagcctcctcttgtcttaactaaagcctcttgtcttttcacccattaggttctcagtcttggctctgggcctcctgttcggcatggggacagacataggcagccaaggtcctcatttcccttggaaacccctactccaaacaggaggcaccaaggctgagaataagaatccttggttcagtggttgctgaacctgctgcattcccagtgcaccaaaatccctccagccatgggcagggcagcaggcagcacttggagcagcttcttgaagcaatgaaagaggcccaacctggaaatttactttttcatttatatttattatttgttcttgagacaggctcttgctctgtcacctagaccggagtacagtggcatgatcactgctcacagcaattttgacctccggggctcaagggatcctcccacctcagcctcccgagaagtttttatttttattttttttgtggagtggagatctccctatgttgtcaccgtcttttctgtttacccgtaacaaaacagatgctcacccatgtggaatggtgtatcagttatctttgcacaacaaaccacactaataagttgcttgaaaagataaaatccaaggctggcacagtggctcatggctataatcccagcacgttgagagcccaaagcaggcagatcacttgagctcaggagtttgagaccagcctgggcaacatggtgaaaccctgtctctaccaaaaatacaaaaaattaatctgtgtgtggtggcacatacctgtggtcccagctactctggaggctgaggtgggaggatcgcctgggccccggaaacagaggttgcagtgggccgagatcatgccattacactctagcctgggtgacacagtcagaccccatctcaaaaaaaaaaaaaaaaatcttattgatcaaaagatttgatataattcctattattcccagctgactttttcttaatactgaaattgacaaactaatcctaaagctcatatggaaattcaagggacccaggagaaccaaaacagtcttgaaaa

SEQ ID NO: 841 - protein, 295 aa, Homosapiens
MSRPPPPRVASVLGTMEMGRRMDAPASAAAVRAFLERGHTELDTAFMYSDGQSETILGGLGLGLGGGDCRVKIATKANPWDGKSLKPDSVRSQLETSLKRLQCPQVDLFYLHAPDHGTPVEETLHACQRLHQEGMYNATTRQVETELFPCLRHFGLRFYAYNPLAGGLLTGKYKYEDKDGKQPVGRFFGNSWAETYRNRFWKEHHFEAIALVEKALQAAYGASAPSVTSAALRWMYHHSQLQGAHGDAVILGMSSLEQLEQNLAATEEGPLEPAVVDAFNQAWHLVAHECPNYFR

SEQ ID NO: 842 - DNA, 2770 bp, Homosapiens
ccaacgcgcaggcgccgctgctatgctgagtgccgcgtctcgcgtagtctcccgcgccgccgtccactgcgcgcttcgctctccgccgcccgaggcccgcgcgctcgccatgtcccggccaccgccaccgcgggtcgcctcggtgctgggcaccatggagatggggcgccgcatggacgcgcccgccagcgccgcggccgtgcgcgcctttctggagcgcggccacaccgaactggacacggccttcatgtacagcgacggccagtccgagaccatcctgggcggcctggggctcgggctgggcggtggcgactgcagagtgaaaattgccaccaaggccaacccttgggatggaaaatcactaaagcctgacagtgtccggtcccagctggagacgtcattgaagaggctgcagtgtccccaagtggacctcttctacctacacgcacctgaccacggcaccccggtggaagagacgctgcatgcctgccagcggctgcaccaggagggcaagttcgtggagcttggcctctccaactatgctagctgggaagtggccgagatctgtaccctctgcaagagcaatggctggatcctgcccactgtgtaccagggcatgtacaacgccaccacccggcaggtggaaacggagctcttcccctgcctcaggcactttggactgaggttctatgcctacaaccctctggctgggggcctgctgactggcaagtacaagtatgaggacaaggacgggaaacagcctgtgggccgcttctttgggaatagctgggctgagacctacaggaatcgcttctggaaggagcaccacttcgaggccattgcgttggtggagaaggccctgcaggccgcatatggcgccagcgcccccagtgtgacctcggctgccctccggtggatgtaccaccactcacagctgcagggtgcccacggggacgcggtcatcctgggcatgtccagcctggagcagctggagcagaacttggcagcaacagaggaagggcccctggagccggctgtcgtggatgcctttaatcaagcctggcatttggttgctcacgaatgtcccaactacttccgctaggcccatcatggctcaggctgcccaaggcttttctgtcacctcttttgttctctcacactgaccagtcttggccttaagctgacttagaagggtttttctgaattgtctagatccatgcattatttttctagcttcctgccttgctccctattcactttacactgtgaaaggtggggggtgagtcccacttgagcgcttcctgttgaataaagcaggcacttgacctggctgtagcctaggtcttgagtgaaccccaaaaacttgctttctctgctgttaacactttgtttcccatcctacctggggactgagaaagggcagaaccatgggctggagtcttcagagggcagaggtagtaggagggtcacagaagcacactgccctcccagggtctcctcgggcccctggtctgaatacccacctgacctctcaacattgaggtgtctctcactcttctacacacgatagaaaagagagtcatacacctgcagtacattttctctaattcagagttgcctcaatacattcttaggaatgaaacaactgggacaaagaaactaccattagagtcactaccaagaagaagaacacttcccaggatctgtggaacatcttgaagctctcaatcttagcctcctcttgtcttaactaaagcctcttgtcttttcacccattaggttctcagtcttggctctgggcctcctgttcggcatggggacagacataggcagccaaggtcctcatttcccttggaaacccctactccaaacaggaggcaccaaggctgagaataagaatccttggttcagtggttgctgaacctgctgcattcccagtgcaccaaaatccctccagccatgggcagggcagcaggcagcacttggagcagcttcttgaagcaatgaaagaggcccaacctggaaatttactttttcatttatatttattatttgttcttgagacaggctcttgctctgtcacctagaccggagtacagtggcatgatcactgctcacagcaattttgacctccggggctcaagggatcctcccacctcagcctcccgagaagtttttatttttattttttttgtggagtggagatctccctatgttgtcaccgtcttttctgtttacccgtaacaaaacagatgctcacccatgtggaatggtgtatcagttatctttgcacaacaaaccacactaataagttgcttgaaaagataaaatccaaggctggcacagtggctcatggctataatcccagcacgttgagagcccaaagcaggcagatcacttgagctcaggagtttgagaccagcctgggcaacatggtgaaaccctgtctctaccaaaaatacaaaaaattaatctgtgtgtggtggcacatacctgtggtcccagctactctggaggctgaggtgggaggatcgcctgggccccggaaacagaggttgcagtgggccgagatcatgccattacactctagcctgggtgacacagtcagaccccatctcaaaaaaaaaaaaaaaaatcttattgatcaaaagatttgatataattcctattattcccagctgactttttcttaatactgaaattgacaaactaatcctaaagctcatatggaaattcaagggacccaggagaaccaaaacagtcttgaaaa

SEQ ID NO: 843 - protein, 359 aa, Homosapiens; identical to SEQ ID NO: 22

SEQ ID NO: 844 - DNA, 1298 bp, Homosapiens
ccttgcagggtgcccacggggacgcggtcatcctgggcatgtccagcctggagcagctggagcagaacttggcagcaacagaggaagggcccctggagccggctgtcgtggatgcctttaatcaagcctggcatttggttgctcacgaatgtcccaactacttccgctaggcccatcatggctcaggctgcccaaggcttttctgtcacctcttttgttctctcacactgaccagtcttggccttaagctgacttagaagggtttttctgaattgtctagatccatgcattatttttctagcttcctgccttgctccctattcactttacactgtgaaaggtggggggtgagtcccacttgagcgcttcctgttgaataaagcaggcacttgacctggctgtagcctaggtcttgagtgaaccccaaaaacttgctttctctgctgttaacactttgtttcccatcctacctggggactgagaaagggcagaaccatgggctggagtcttcagagggcagaggtagtaggagggtcacagaagcacactgccctcccagggtctcctcgggcccctggtctgaatacccacctgacctctcaacattgaggtgtctctcactcttctacacacgatagaaaagagagtcatacacctgcagtacattttctctaattcagagttgcctcaatacattcttaggaatgaaacaactgggacaaagaaactaccattagagtcactaccaagaagaagaacacttcccaggatctgtggaacatcttgaagctctcaatcttagcctcctcttgtcttaactaaagcctcttgtcttttcacccattaggttctcagtcttggctctgggcctcctgttcggcatggggacagacataggcagccaaggtcctcatttcccttggaaacccctactccaaacaggaggcaccaaggctgagaataagaatccttggttcagtggttgctgaacctgctgcattcccagtgcaccaaaatccctccagccatgggcagggcagcaggcagcacttggagcagcttcttgaagcaatgaaagaggcccaacctggaaatttactttttcatttatatttattatttgttcttgagacaggctcttgctctgtcacctagaccggagtacagtggcatgatcactgctcacagcaattttgacctccggggatcgcctgggccccggaaacagaggttgcagtgggccgagatcatgccattacactctagcctgggtgacacagtcagaccccatctcaaaa

SEQ ID NO: 845 - protein, 41 aa, Homosapiens
MITAHSNFDLRGSPGPRKQRLQWAEIMPLHSSLGDTVRPHL

SEQ ID NO: 846 - DNA, 1210 bp, Homosapiens
ccgcgccgccgtccactgcgcgcttcgctctccgccgcccgaggcccgcgcgctcgccatgtcccggccaccgccaccgcgggtcgcctcggtgctgggcaccatggagatggggcgccgcatggacgcgcccgccagcgccgcggccgtgcgcgcctttctggagcgcggccacaccgaactggacacggccttcatgtacagcgacggccagtccgagaccatcctgggcggcctggggctcgggctgggcggtggcgactgcagagtgaaaattgccaccaaggccaacccttgggatggaaaatcactaaagcctgacagtgtccggtcccagctggagacgtcattgaagaggctgcagtgtccccaagtggacctcttctacctacacgcacctgaccacggcaccccggtggaagagacgctgcatgcctgccagcggctgcaccaggagggcatgtacaacgccaccacccggcaggtggaaacggagctcttcccctgcctcaggcactttggactgaggttctatgcctacaaccctctggctgggggcctgctgactggcaagtacaagtatgaggacaaggacgggaaacagcctgtgggccgcttctttgggaatagctgggctgagacctacaggaatcgcttctggaaggagcaccacttcgaggccattgcgttggtggagaaggccctgcaggccgcatatggcgccagcgcccccagtgtgacctcggctgccctccggtggatgtaccaccactcacagctgcagggtgcccacggggacgcggtcatcctgggcatgtccagcctggagcagctggagcagaacttggcagcaacagaggaagggcccctggagccggctgtcgtggatgcctttaatcaagcctggcatttggttgctcacgaatgtcccaactacttccgctaggcccatcatggctcaggctgcccaaggcttttctgtcacctcttttgttctctcacactgaccagtcttggccttaagctgacttagaagggtttttctgaattgtctagatccatgcattatttttctagcttcctgccttgctccctattcactttacactgtgaaaggtggggggtgagtcccacttgagcgcttcctgttgaataaagcaggcacttgacctggctgtagcctaggtcttgagtgaaccccaaaaacttg

SEQ ID NO: 847 - protein, 295 aa, Homosapiens; identical to SEQ ID NO: 841

SEQ ID NO: 848 - DNA, 1366 bp, Homosapiens
ccaacgcgcaggcgccgctgctatgctgagtgccgcgtctcgcgtagtctcccgcgccgccgtccactgcgcgcttcgctctccgccgcccgaggcccgcgcgctcgccatgtcccggccaccgccaccgcgggtcgcctcggtgctgggcaccatggagatggggcgccgcatggacgcgcccgccagcgccgcggccgtgcgcgcctttctggagcgcggccacaccgaactggacacggccttcatgtacagcgacggccagtccgagaccatcctgggcggcctggggctcgggctgggcggtggcgactgcagagtgaaaattgccaccaaggccaacccttgggatggaaaatcactaaagcctgacagtgtccggtcccagctggagacgtcattgaagaggctgcagtgtccccaagtggacctcttctacctacacgcacctgaccacggcaccccggtggaagagacgctgcatgcctgccagcggctgcaccaggagggcaagttcgtggagcttggcctctccaactatgctagctgggaagtggccgagatctgtaccctctgcaagagcaatggctggatcctgcccactgtgtaccagggcatgtacaacgccaccacccggcaggtggaaacggagctcttcccctgcctcaggcactttggactgaggttctatgcctacaaccctctggctgggggcctgctgactggcaagtacaagtatgaggacaaggacgggaaacagcctgtgggccgcttctttgggaatagctgggctgagacctacaggaatcgcttctggaaggagcaccacttcgaggccattgcgttggtggagaaggccctgcaggccgcatatggcgccagcgcccccagtgtgacctcggctgccctccggtggatgtaccaccactcacagctgcagggtgcccacggggacgcggtcatcctgggcatgtccagcctggagcagctggagcagaacttggcagcaacagaggaagggcccctggagccggctgtcgtggatgcctttaatcaagcctggcatttggttgctcacgaatgtcccaactacttccgctaggcccatcatggctcaggctgcccaaggcttttctgtcacctcttttgttctctcacactgaccagtcttggccttaagctgacttagaagggtttttctgaattgtctagatccatgcattatttttctagcttcctgccttgctccctattcactttacactgtgaaaggtggggggtgagtcccacttgagcgcttcctgttgaataaagcaggcacttgacctggctgtagcctaggtcttgagtgaaccccaaaaacttg

SEQ ID NO: 849 - protein, 359 aa, Homosapiens; identical to SEQ ID NO: 22

SEQ ID NO: 850 - DNA, 590 bp, Homosapiens
gccgcgtctcgcgtagtctcccgcgccgccgtccactgcgcgcttcgctctccgccgcccgaggcccgcgcgctcgccatgtcccggccaccgccaccgcgggtcgcctcggtgctgggcaccatggagatggggcgccgcatggacgcgcccgccagcgccgcggccgtgcgcgcctttctggagcgcggccacaccgaactggacacggccttcatgtacagcgacggccagtccgagaccatcctgggcggcctggggctcgggctgggcggtggcgactgcagagtgaaaattgccaccaaggccaacccttgggatggaaaatcactaaagcctgacagtgtccggtcccagctggagacgtcattgaagaggctgcagtgtccccaagtggacctcttctacctacacgcacctgaccacggcaccccggtggaagagacgctgcatgcctgccagcggctgcaccaggagggcaagttcgtggagcttggcctctccaactatgctagctgggaagtggccgagatctgccattgcgttggtggagaaggccctgcaggccgcatatggcgccagcgccccca

SEQ ID NO: 851 - protein, 169 aa, Homosapiens
MSRPPPPRVASVLGTMEMGRRMDAPASAAAVRAFLERGHTELDTAFMYSDGQSETILGGLGLGLGGGDCRVKIATKANPWDGKSLKPDSVRSQLETSLKRLQCPQVDLFYLHAPDHGTPVEETLHACQRLHQEGKFVELGLSNYASWEVAEICHCVGGEGPAGRIWRQR

SEQ ID NO: 852 - DNA, 1676 bp, Homosapiens
ggttcccgcgggggcggtggcgcgcggtcagctgacccggcgggccttgacccagaagctgggccctggcggcggatctggacgtgccagttcatcaaagcctacaagacgggcaacatggaccaggcgctgtccctgtggttcctcctgggctggattggcggagactcctgcaacctcatcggctccttccttgctgaccagctgcccctgcagacctacacggctgtgtattatgtcttggcagacctggtgatgctgacgctgtacttttactacaagttcaggacgcgcccctctctgttgtctgcccccatcaactccgtgctgttgttcctcatggggatggcgtgcgccacaccgctgctgagtgctgctgggcccgtggctgcccctagggaagccttccgggggcgggcgctcctgtccgtggagtcgggcagcaagcccttcacccggcaggaagtcattggcttcgtcatcggctccatctccagcgtgttgtacctgctttcccggctgcctcagatccgcaccaacttcctccggaagtccacccaggggatctcctactctctgttcgcgctggtgatgctggggaacacgctgtatgggctgagcgtgctgctcaaaaaccccgaggagggccagagcgagggcagctacctgctgcaccacctgccctggcttgtgggcagcctgggcgtgctgctgctcgacaccatcgtatccttcagggcgtgtggggcaggtggcggggtgtgggcaaggaagcttctgcctgcacacagcgtcagcactcatccgtctcttcctcccttcatccatccgtccatccatccatccctccctccctccctccctccctccatctgttcacccagtcgtgcacacctcctgtgtgccaggcacccagctggaccctggagccgtgagtgagcaagaacagccatgagtgccccagaagcttacagcccagcggggcgcagagaggacacaacgctatcatcaaagaattacttcattgcagtggcaccaagtgctgcagagaaaaacaacaagagcgtctagccagggaccgtcctggttagaggggcagcaaaggcccctataagtctcattgaacctgtgacttgacagagtaggagaagtcaggcgaaggcaggagaggaatgttctaggctgtgcagacgagagctggagtgtggagagacacatgacttggtcagacaaacctgggttcaaatcctggctcctcccctgcttcctagctgtgtgacgcagggcacacagtcaacctctctgtgctgccgtgtcttcacctcagttaacagccactgtctcgtcaggatgttgtgtaagatgaggtatctggaaacactccccacaggaccccgttttcagtgagggctcagaaagtgtttgctgaatggctgtaaagagcgttacctgggtctcatttcggagcaagtaaacatggcctttgttttaatatttgttaagtccctgccgggcgcagggaggggtgaaagtttaggctcttgtgccccaaaacggcccagccacctggaagcctccaggacgccacagctgagagcaagcgaagatcctgggccagggtcaagggaggctgcccacgggaaggagaagtcagtgctaggcttggagacagatgg

SEQ ID NO: 853 - protein, 273 aa, Homosapiens
MDQALSLWFLLGWIGGDSCNLIGSFLADQLPLQTYTAVYYVLADLVMLTLYFYYKFRTRPSLLSAPINSVLLFLMGMACATPLLSAAGPVAAPREAFRGRALLSVESGSKPFTRQEVIGFVIGSISSVLYLLSRLPQIRTNFLRKSTQGISYSLFALVMLGNTLYGLSVLLKNPEEGQSEGSYLLHHLPWLVGSLGVLLLDTIVSFRACGAGGGVWARKLLPAHSVSTHPSLPPFIHPSIHPSLPPSLPPSICSPSRAHLLCARHPAGPWSRE

SEQ ID NO: 854 - DNA, 1852 bp, Homosapiens
cgcgggggcggtggcgcgcggtcagctgacccggcgggccttgacccagaagctgggccctggcggcggatctggacgtggcggcccgcgccgggctgagtcaccaggagggagctgtggccgaggacgccgaggcctggagtgggtggtagccccgagctgggacgctcctccctccacaatctccccaggtctgcagggaccgagggcctacactgcctcctcccacgccgtgcttaggaacccttgctggcctcagaacaccagcgccctccctccggtgcagccctgcctggccgggggcccctcctccacagccatggtctggaagaaactgggctcccgcaacttctccagctgccccagtggctccatccagtggatatgggatgtgttgggtgaatgtgcccaggacggctgggacgaggccagcgtgggcctgggcttgatctccattctctgctttgctgcatctaccttcccccagttcatcaaagcctacaagacgggcaacatggaccaggcgctgtccctgtggttcctcctgggctggattggcggagactcctgcaacctcatcggctccttccttgctgaccagctgcccctgcagacctacacggctgtgtattatgtcttggcagacctggtgatgctgacgctgtacttttactacaagttcaggacgcgcccctctctgttgtctgcccccatcaactccgtgctgttgttcctcatggggatggcgtgcgccacaccgctgctgagtgctgctgggcccgtggctgcccctagggaagccttccgggggcgggcgctcctgtccgtggagtcgggcagcaagcccttcacccggcaggaagtcattggcttcgtcatcggctccatctccagcgtgttgtacctgctttcccggctgcctcagatccgcaccaacttcctccggaagtccacccaggggatctcctactctctgttcgcgctggtgatgctggggaacacgctgtatgggctgagcgtgctgctcaaaaaccccgaggagggccagagcgagggcagctacctgctgcaccacctgccctggcttgtgggcagcctgggcgtgctgctgctcgacaccatcatctccatccagttcctggtgtacaggcgcagcaccgccgcctcggagcttgagcccctcctccccagctgaccagaaccaggctgagcgcaggaggacaggcaccaccggatgccacaccaggcaggaggaggtgtggacagtgatggtacggcggccctgcatcagcctgcgggtggcctctggatcctccgtggaccgaaccgtccccccaggaacacaccttcaggtagaccccgaagcctcaaggccggggctggagcggagaccccagggcctctcaggagacagtgaggctgcccctcctaccacctacctcattctgcctactcaccccaggggccacagccacagcctgctggactcaggactgtcctgtcaactccagacaactgaataaacaggccgggtacagtggctcgcacctgtaatcctagcactttgggaggccgaagcgggtggaccacttgacgtccgtagttcgagaccagcctggccaacatggtgaaaccccatctctactaaaaatacaaaaattagccaggtgtggtggcacacatctgtagtcccagctacttgggaggctgaggcaggagaactgtttgaacctgggagacagaggttgcggtgaaccgagatcgtgccactgtactccagcctgggtgacagagtgagactccgtctcaaaaaaataaaaaagataaccgaggaaacggtacctccccatga

SEQ ID NO: 855 - protein, 291 aa, Homosapiens
MVWKKLGSRNFSSCPSGSIQWIWDVLGECAQDGWDEASVGLGLISILCFAASTFPQFIKAYKTGNMDQALSLWFLLGWIGGDSCNLIGSFLADQLPLQTYTAVYYVLADLVMLTLYFYYKFRTRPSLLSAPINSVLLFLMGMACATPLLSAAGPVAAPREAFRGRALLSVESGSKPFTRQEVIGFVIGSISSVLYLLSRLPQIRTNFLRKSTQGISYSLFALVMLGNTLYGLSVLLKNPEEGQSEGSYLLHHLPWLVGSLGVLLLDTIISIQFLVYRRSTAASELEPLLPS

SEQ ID NO: 856 - DNA, 2685 bp, Homosapiens
cgcgggggcggtggcgcgcggtcagctgacccggcgggccttgacccagaagctgggccctggcggcggatctggacgtggcggcccgcgccgggctgagtcaccaggagggagctgtggccgaggacgccgaggcctggagtgggtggtagccccgagctgggacgctcctccctccacaatctccccaggtctgcagggaccgagggcctacactgcctcctcccacgccgtgcttaggaacccttgctggcctcagaacaccagcgccctccctccggtgcagccctgcctggccgggggcccctcctccacagccatggtctggaagaaactgggctcccgcaacttctccagctgccccagtggctccatccagtggatatgggatgtgttgggtgaatgtgcccaggacggctgggacgaggccagcgtgggcctgggcttgatctccattctctgctttgctgcatctaccttcccccagttcatcaaagcctacaagacgggcaacatggaccaggcgctgtccctgtggttcctcctgggctggattggcggagactcctgcaacctcatcggctccttccttgctgaccagctgcccctgcagacctacacggctgtgtattatgtcttggcagacctggtgatgctgacgctgtacttttactacaagttcaggacgcgcccctctctgttgtctgcccccatcaactccgtgctgttgttcctcatggggatggcgtgcgccacaccgctgctgagtgctgctgggcccgtggctgcccctagggaagccttccgggggcgggcgctcctgtccgtggagtcgggcagcaagcccttcacccggcaggaagtcattggcttcgtcatcggctccatctccagcgtgttgtacctgctttcccggctgcctcagatccgcaccaacttcctccggaagtccacccaggggatctcctactctctgttcgcgctggtgatgctggggaacacgctgtatgggctgagcgtgctgctcaaaaaccccgaggagggccagagcgagggcagctacctgctgcaccacctgccctggcttgtgggcagcctgggcgtgctgctgctcgacaccatcatctccatccagttcctggtgtacaggcgcagcaccgccgcctcggagcttgagcccctcctccccagctgaccagaaccaggctgagcgcaggaggacaggcaccaccggatgccacaccaggcaggaggaggtgtggacagtgatggtacggcggccctgcatcagcctgcgggtggcctctggatcctccgtggaccgaaccgtccccccaggaacacaccttcaggtagaccccgaagcctcaaggccggggctggagcggagaccccagggcctctcaggagacagtgaggctgcccctcctaccacctacctcattctgcctactcaccccaggggccacagccacagcctgctggtctcgaactccttacctcaggtgatctgcttgcctcagcctctcaaagtgctgggattacaggtgtgccaccgcgcccggccaagatgggagtatttttatggccattttacagatgggagaacagtctcagcacaattgagcagcttgcccagctaggagcagcagcaacacgagaccctccagctttgggagccaccccacacctggccaacgctggcggcccgtgtccccttcctccatccttgctgggggcccatggcttgtggcagttcagcttcaccctcaggagtggcccgaaccctgctggacccaggctcccttctcaccatcctgaatagcgactttgctgagcctctggccctgccgagatttcaggataagttacccccaggcccgaagccccagcttgccctggcctgtgcctgcctcaggtgccagctagatgtctcgctccacctgggtctgggacctggctccacaccagttacctgggaccagtaggtgcccttccagcctgaagatctgggggcacagtatagccacatgagccccaagtgtggtcctgaactggggccgggtggggaagagtgagatgggataacatagcccctgcttggaggcccttctctgatggggtgacataatcccttcctcctgggaaacaccagcttttggggtgatagcactttcaggcaggagctatggttccttcctcaggaggcctccaatctgatggggaagacatggcccctccccctggggagtgccctgtgtgatggaggcgatacagcccctaccttcagagagcacctggcctgcagctcatccaaacctgagtctcctctcccttggaggcctcattccagcgccccaaggaggattcaaactgttggggctggaagaacttggtggcctgggtccctggagccctgttgaaggagctggtgacattctgatgctggaggcaggtgacggggagcacagactttgtgtcctgcacactgagctccaagtgtgccccagccactgagccttgtgacttgagcagatgtccgaagccgtttcttcatcccatgagaccaacaacactgtctgcctcagaacatagccgtgatcaagatgagcacggaggctcgtgtcccagcacctggcacacagtaagtgcctggtaaataaacaatggctatatttgcttgtc

SEQ ID NO: 857 - protein, 291 aa, Homosapiens; identical to SEQ ID NO: 855

SEQ ID NO: 858 - DNA, 2173 bp, Homosapiens
aagctgggccctggcggcggatctggacgtggtgagccggaccgggggcaggtggcaaacttcacggctgggggtcggggctcctgggcttccctgccacatccttccagccctctcctccggccgctggactgtcccggctcctgcgccctccttgtggcgcgatatcgtgggacgaggctccgggccgggactgggtggccctcgggaatccgcagccagtggccccccacctcaaaggcgaccagcgcggcctctcgagctggcctggccaggagttgccctgccccggccgaccggccccttggcatctgatggcttcgtttttcccgggccggccgggcgaggggccctcgcggcgctggccccagcagctgtcctatcattatccctccaaacaggcggcccgcgccgggctgagtcaccaggagggagctgtggccgaggacgccgaggcctggagtgggtggtagccccgagctgggacgctcctccctccacaatctccccaggtctgcagggaccgagggcctacactgcctcctcccacgccgtgcttaggaacccttgctggcctcagaacaccagcgccctccctccggtgcagccctgcctggccgggggcccctcctccacagccatggtctggaagaaactgggctcccgcaacttctccagctgccccagtggctccatccagtggatatgggatgtgttgggtgaatgtgcccaggacggctgggacgaggccagcgtgggcctgggcttgatctccattctctgctttgctgcatctaccttcccccagttcatcaaagcctacaagacgggcaacatggaccaggcgctgtccctgtggttcctcctgggctggattggcggagactcctgcaacctcatcggctccttccttgctgaccagctgcccctgcagacctacacggctgtgtattatgtcttggcagacctggtgatgctgacgctgtacttttactacaagttcaggacgcgcccctctctgttgtctgcccccatcaactccgtgctgttgttcctcatggggatggcgtgcgccacaccgctgctgagtgctgctgggcccgtggctgcccctagggaagccttccgggggcgggcgctcctgtccgtggagtcgggcagcaagcccttcacccggcaggaagtcattggcttcgtcatcggctccatctccagcgtgttgtacctgctttcccggctgcctcagatccgcaccaacttcctccggaagtccacccaggggatctcctactctctgttcgcgctggtgatgctggggaacacgctgtatgggctgagcgtgctgctcaaaaaccccgaggagggccagagcgagggcagctacctgctgcaccacctgccctggcttgtgggcagcctgggcgtgctgctgctcgacaccatcatctccatccagttcctggtgtacaggcgcagcaccgccgcctcggagcttgagcccctcctccccagctgaccagaaccaggctgagcgcaggaggacaggcaccaccggatgccacaccaggcaggaggaggtgtggacagtgatggtacggcggccctgcatcagcctgcgggtggcctctggatcctccgtggaccgaaccgtccccccaggaacacaccttcaggtagaccccgaagcctcaaggccggggctggagcggagaccccagggcctctcaggagacagtgaggctgcccctcctaccacctacctcattctgcctactcaccccaggggccacagccacagcctgctggactcaggactgtcctgtcaactccagacaactgaataaacaggccgggtacagtggctcgcacctgtaatcctagcactttgggaggccgaagcgggtggaccacttgacgtccgtagttcgagaccagcctggccaacatggtgaaaccccatctctactaaaaatacaaaaattagccaggtgtggtggcacacatctgtagtcccagctacttgggaggctgaggcaggagaactgtttgaacctgggagacagaggttgcggtgaaccgagatcgtgccactgtactccagcctgggtgacagagtgagactccgtctcaaaaaaataaaaaagataaccgaggaaacggtacctccccatga

SEQ ID NO: 859 - protein, 291 aa, Homosapiens; identical to SEQ ID NO: 855

SEQ ID NO: 860 - DNA, 1548 bp, Homosapiens
gcggcggatctggacgtggcggcccgcgccgggctgagtcaccaggagggagctgtggccgaggacgccgaggcctggagtgggtggtagccccgagctgggacgctcctccctccacaatctccccaggtctgcagggaccgagggcctacactgcctcctcccacgccgtgcttaggccagttcatcaaagcctacaagacgggcaacatggaccaggcgctgtccctgtggttcctcctgggctggattggcggagactcctgcaacctcatcggctccttccttgctgaccagctgcccctgcagacctacacggctgtgtattatgtcttggcagacctggtgatgctgacgctgtacttttactacaagttcaggacgcgcccctctctgttgtctgcccccatcaactccgtgctgttgttcctcatggggatggcgtgcgccacaccgctgctgagtgctgctgggcccgtggctgcccctagggaagccttccgggggcgggcgctcctgtccgtggagtcgggcagcaagcccttcacccggcaggaagtcattggcttcgtcatcggctccatctccagcgtgttgtacctgctttcccggctgcctcagatccgcaccaacttcctccggaagtccacccaggggatctcctactctctgttcgcgctggtgatgctggggaacacgctgtatgggctgagcgtgctgctcaaaaaccccgaggagggccagagcgagggcagctacctgctgcaccacctgccctggcttgtgggcagcctgggcgtgctgctgctcgacaccatcatctccatccagttcctggtgtacaggcgcagcaccgccgcctcggagcttgagcccctcctccccagctgaccagaaccaggctgagcgcaggaggacaggcaccaccggatgccacaccaggcaggaggaggtgtggacagtgatggtacggcggccctgcatcagcctgcgggtggcctctggatcctccgtggaccgaaccgtccccccaggaacacaccttcaggtagaccccgaagcctcaaggccggggctggagcggagaccccagggcctctcaggagacagtgaggctgcccctcctaccacctacctcattctgcctactcaccccaggggccacagccacagcctgctggactcaggactgtcctgtcaactccagacaactgaataaacaggccgggtacagtggctcgcacctgtaatcctagcactttgggaggccgaagcgggtggaccacttgacgtccgtagttcgagaccagcctggccaacatggtgaaaccccatctctactaaaaatacaaaaattagccaggtgtggtggcacacatctgtagtcccagctacttgggaggctgaggcaggagaactgtttgaacctgggagacagaggttgcggtgaaccgagatcgtgccactgtactccagcctgggtgacagagtgagactccgtctcaaaaaaataaaaaagataaccgaggaaacggtacctccccatga

SEQ ID NO: 861 - protein, 226 aa, Homosapiens; identical to SEQ ID NO: 24

SEQ ID NO: 862 - DNA, 283 bp, Homosapiens
ggtgtggacagtgatggtacggcggccctgcatcagcctgcgggtggcctctggatcctccgtggaccgaaccgtccccccaggaacacaccttcaggtagaccccgaagcctcaaggccggggctggagcggagaccccagggcctctcaggagacagtgaggctgcccctcctaccacctacctcattctgcctactcaccccaggggccacagccacagcctgctggactcaggactgtcctgtcaactccacctgggtgacagagtgagactccgtctc

SEQ ID NO: 863 - protein, 89 aa, Homosapiens
MVRRPCISLRVASGSSVDRTVPPGTHLQVDPEASRPGLERRPQGLSGDSEAAPPTTYLILPTHPRGHSHSLLDSGLSCQLHLGDRVRLR

SEQ ID NO: 864 - DNA, 1027 bp, Homosapiens
tggcctgaagggaaaagtgtggacagtttggtgtgatcaaggaaatggaaccacgcttaccagttgcccttgtccaggaagggctggctcccttaggacgcccacatggagcatgaggttgggccaggcacccccagaggtccccgccttggcaggttctgttttacctgttgaacgagacactgtatggggaagtgacatgcgcagtgcctggcccagtgctgtgcacacacgctgcttcgcttcctcaggttccggggatgggatgggacagaaaagctggttgcttagctggtggcgttctccagcaaagcagaagggatggtcctggcagccctgtgccgagcactggaccccgcgccctccctggctctctcagccccaaggtcccattagttatcaaacctggttttttgtttttcctgggtgacagagaccttgtctcaaacaaaacaaaacaaaacaaaacaaaacaaaacaaaacacaggaaaacctggatctgcttagcattggccctagggcagggagtgggttaccttccaccgtggattaactcagttcaactgataactactcctccaggcccccagcctgggacagccctggggacacagtcacccagtagcagcactgtgcccagcacaggtaagcactcaataatgacgacggttactaagtactccacccccaccaaacagtaggcagagactgtctctcctgttggccatcataaccccagtactcagtaggcgctgaatgtttggtgaatgagtaagtgaagggaaagctgaggcaccaaccctcagggagccctcagtctggtggatgtaaccaacaaccacagaactacagaactgtatactttagatacatgaattgtgtggtatgtgaattatatctcaaagccatttgaaaaaataccaaatgtgccattaagatttggatgggaagttatgggtaatgagaatataatgacatcttgcaacattatattgagaaaaatacaaattgaaatgttttatctta

SEQ ID NO: 865 - protein, 105 aa, Homosapiens
MRLGQAPPEVPALAGSVLPVERDTVWGSDMRSAWPSAVHTRCFASSGSGDGMGQKSWLLSWWRSPAKQKGWSWQPCAEHWTPRPPWLSQPQGPISYQTWFFVFPG

SEQ ID NO: 866 - DNA, 665 bp, Homosapiens
aggtctgtgcagacttttgcagacaaatcaaaacaagaagctctgaagaatgacctggtggaggctttgaagagaaagcagcaatgctaaacctctgtttcatgctaaccagacacgccgtgcactcgttagattcctttcttagaaaactcgttttctgctcccttcccccccgtcttcctccctgtccccccatttataggcataaaatccactgtctgccagcctcccttccctcccacctttttggtacattggtgtaaaaaatgtaaaacaaaaaaattttatgaactaactgtggtgtgtgaaagagagaagaaaaactggaaatcttattccgtgtgtgtttgggagttgcttggggttgggggtcgtggggacaggggacagctctgggagcagaggtggccctcggtgccgtcctgcgcagactctcccgtcccacggaggccgcggggtgggggctggggggggtgccgccgaccgttccgctcttccggccaggtgcttttctgtcaatttctatggaatgcaaaaggaggtttttgttttattttgtttttttgtaaagcttaagaaaaaaatctacatcttatacttgagcctccatacttaaaaaaagaaaagaaaagaaatcaataaaaagaaactggggcgcagttagc

SEQ ID NO: 867 - protein, 59 aa, Homosapiens
MLNLCFMLTRHAVHSLDSFLRKLVFCSLPPRLPPCPPIYRHKIHCLPASLPSHLFGTLV

SEQ ID NO: 868 - DNA, 2183 bp, Homosapiens
ggatgaggcggagcagacctggccttggaatctggccccgcgcttaagcgaggatggtcttcgtggcctttctgagcttggcttcctctgagtggcgggaagcctcattggtcatttttcagagccccttggtccactcctcggcactaagacacttgagaaaggctcctctcttcactcagcatgctatggggttacttaagtttatttcttaattgaattttctcattaaaacctgctttcccagatctgtttggcagcaggacagtttcgaggtggtagaagagaggcccagcttcctctgtatttcctttccctgactttctggaggcattatcgaagtacgctaagccgcacgtagctgaagtgcacaactggatggcttgtgtttgtttcagtgataacacacaacatctgcctccctgctctccccagcctcccgtctctgatcgcgcactccctagttttccagcctcttcttaagcagcgattccagctggcagcgccgtgacaagtgtttccgtaagcattcccacgatcctctaagtgaggagcatgacctcggaaccatgtgcccggtcccctcccctgacgtaggaggtagtgggagagtgatcagcagctggactgtgccttggacctaatgaggcgcctgcctccccagcaaatcgagaaaaacctcagcgacctgatcgacctggtccccagtctatgtgaggatctcctgtcttctgttgaccagccactgaaaattgccagagacaaggtggtgggaaaggattaccttttgtgtgactacaacagagatggggactcctataggtcaccatggagtaacaagtatgaccctcccttggaggatggggccatgccgtcagctcggctgagaaagctggaggtggaagccaacaatgcctttgaccagtatcgagacctgtattttgaaggtggcgtctcatctgtctacctctgggatctggatcatggctttgctggagtgatcctcataaagaaggctggagatggatcaaagaagatcaaaggctgctgggattccatccacgtggtagaagtgcaggagaaatccagcggtcgcaccgcccattacaagttgacctccacggtgatgctgtggctgcagaccaacaaatctggctctggcaccatgaacctcggaggcagccttaccagacagatggagaaggatgaaactgtgagtgactgctccccacacatagccaacatcgggcgcctggtagaggacatggaaaataaaatcagaagtacgctgaacgagatctactttggaaaaacaaaggatatcgtcaatgggctgaggtctgtgcagacttttgcagacaaatcaaaacaagaagctctgaagaatgacctggtggaggctttgaagagaaagcagcaatgctaaacctctgtttcatgctaaccagacacgccgtgcactcgttagattcctttcttagaaaactcgttttctgctcccttccctcgtcccttccctccccgacaggtcacataacagctgcatcattgaccgcacagcgccatctctccctgagaataaagccgatagccaccctcctccggctccgagcctgcttctgccacacctcgctctcagttctctccacatttccatagagaccgtgtggtttttgttcacccgggccccccgtcttcctccctgtccccccatttataggcataaaatccactgtctgccagcctcccttccctcccacctttttggtacattggtgtaaaaaatgtaaaacaaaaaaattttatgaactaactgtggtgtgtgaaagagagaagaaaaactggaaatcttattccgtgtgtgtttgggagttgcttggggttgggggtcgtggggacaggggacagctctgggagcagaggtggccctcggtgccgtcctgcgcagactctcccgtcccacggaggccgcggggtgggggctggggggggtgccgccgaccgttccgctcttccggccaggtgcttttctgtcaatttctatggaatgcaaaaggaggtttttgttttattttgtttttttgtaaagcttaagaaaaaaatctacatcttatacttgagcctccatacttaaaaaaagaaaagaaaagaaatcaataaaaagaaactggggcgcagttagc

SEQ ID NO: 869 - protein, 260 aa, Homosapiens
MRRLPPQQIEKNLSDLIDLVPSLCEDLLSSVDQPLKIARDKVVGKDYLLCDYNRDGDSYRSPWSNKYDPPLEDGAMPSARLRKLEVEANNAFDQYRDLYFEGGVSSVYLWDLDHGFAGVILIKKAGDGSKKIKGCWDSIHVVEVQEKSSGRTAHYKLTSTVMLWLQTNKSGSGTMNLGGSLTRQMEKDETVSDCSPHIANIGRLVEDMENKIRSTLNEIYFGKTKDIVNGLRSVQTFADKSKQEALKNDLVEALKRKQQC

SEQ ID NO: 870 - DNA, 1771 bp, Homosapiens
cccacagatagacctgccctcctgccacttgacccttctgcaggacaggcccagcacttaggttggaagggccagagaacttcttcctgacaggatcaagggatttttggagcatgtttgtatgtggactttgggcctcaaagtgttttgaggaccatggttccttgtttagtcaagggatgttgctgctgaacgaggagtgatcagcagctggactgtgccttggacctaatgaggcgcctgcctccccagcaaatcgagaaaaacctcagcgacctgatcgacctggtccccagtctatgtgaggatctcctgtcttctgttgaccagccactgaaaattgccagagacaaggtggtgggaaaggattaccttttgtgtgactacaacagagatggggactcctataggtcaccatggagtaacaagtatgaccctcccttggaggatggggccatgccgtcagctcggctgagaaagctggaggtggaagccaacaatgcctttgaccagtatcgagacctgtattttgaaggtggcgtctcatctgtctacctctgggatctggatcatggctttgctggagtgatcctcataaagaaggctggagatggatcaaagaagatcaaaggctgctgggattccatccacgtggtagaagtgcaggagaaatccagcggtcgcaccgcccattacaagttgacctccacggtgatgctgtggctgcagaccaacaaatctggctctggcaccatgaacctcggaggcagccttaccagacagatggagaaggatgaaactgtgagtgactgctccccacacatagccaacatcgggcgcctggtagaggacatggaaaataaaatcagaagtacgctgaacgagatctactttggaaaaacaaaggatatcgtcaatgggctgaggtctgtgcagacttttgcagacaaatcaaaacaagaagctctgaagaatgacctggtggaggctttgaagagaaagcagcaatgctaaacctctgtttcatgctaaccagacacgccgtgcactcgttagattcctttcttagaaaactcgttttctgctcccttccctcgtcccttccctccccgacaggtcacataacagctgcatcattgaccgcacagcgccatctctccctgagaataaagccgatagccaccctcctccggctccgagcctgcttctgccacacctcgctctcagttctctccacatttccatagagaccgtgtggtttttgttcacccgggccccccgtcttcctccctgtccccccatttataggcataaaatccactgtctgccagcctcccttccctcccacctttttggtacattggtgtaaaaaatgtaaaacaaaaaaattttatgaactaactgtggtgtgtgaaagagagaagaaaaactggaaatcttattccgtgtgtgtttgggagttgcttggggttgggggtcgtggggacaggggacagctctgggagcagaggtggccctcggtgccgtcctgcgcagactctcccgtcccacggaggccgcggggtgggggctggggggggtgccgccgaccgttccgctcttccggccaggtgcttttctgtcaatttctatggaatgcaaaaggaggtttttgttttattttgtttttttgtaaagcttaagaaaaaaatctacatcttatacttgagcctccatacttaaaaaaagaaaagaaaagaaatcaataaaaagaaactggggcgcagttagc

SEQ ID NO: 871 - protein, 260 aa, Homosapiens; identical to SEQ ID NO: 869

SEQ ID NO: 872 - DNA, 2048 bp, Homosapiens
tccctgtacctggggcgcgccttctttgcagcctttggggagcgaggggagctctccatcagggatggggtggtcccggtgctgtgccttctcagttgccgcttctagggaggccgcctaggagccagcgagggaagggcgggcatcggtgtgcccagaaggcagcgcgctgctctgcgggcccttctcgaggctgccgccgtgggtgctgtgcgtgcgaagcattctgcagggcaggccggggtccacggcgcccgggcctgagtgggagccgaggggcgaggatgggtggcccacaggacaaggatgaacgcacaatcgcccttgtgaggccgtggccttggggggccaccaggccctggatccagcatatggcctggacacgatgcacccaagcaggcgcagcctccccttccctctgaactgtcagcttgcaagggttggaactgctgattatggaagtccctcggatcagagtgatcagcagctggactgtgccttggacctaatgaggcgcctgcctccccagcaaatcgagaaaaacctcagcgacctgatcgacctggtccccagtctatgtgaggatctcctgtcttctgttgaccagccactgaaaattgccagagacaaggtggtgggaaaggattaccttttgtgtgactacaacagagatggggactcctataggtcaccatggagtaacaagtatgaccctcccttggaggatggggccatgccgtcagctcggctgagaaagctggaggtggaagccaacaatgcctttgaccagtatcgagacctgtattttgaaggtggcgtctcatctgtctacctctgggatctggatcatggctttgctggagtgatcctcataaagaaggctggagatggatcaaagaagatcaaaggctgctgggattccatccacgtggtagaagtgcaggagaaatccagcggtcgcaccgcccattacaagttgacctccacggtgatgctgtggctgcagaccaacaaatctggctctggcaccatgaacctcggaggcagccttaccagacagatggagaaggatgaaactgtgagtgactgctccccacacatagccaacatcgggcgcctggtagaggacatggaaaataaaatcagaagtacgctgaacgagatctactttggaaaaacaaaggatatcgtcaatgggctgaggtctgtgcagacttttgcagacaaatcaaaacaagaagctctgaagaatgacctggtggaggctttgaagagaaagcagcaatgctaaacctctgtttcatgctaaccagacacgccgtgcactcgttagattcctttcttagaaaactcgttttctgctcccttccctcgtcccttccctccccgacaggtcacataacagctgcatcattgaccgcacagcgccatctctccctgagaataaagccgatagccaccctcctccggctccgagcctgcttctgccacacctcgctctcagttctctccacatttccatagagaccgtgtggtttttgttcacccgggccccccgtcttcctccctgtccccccatttataggcataaaatccactgtctgccagcctcccttccctcccacctttttggtacattggtgtaaaaaatgtaaaacaaaaaaattttatgaactaactgtggtgtgtgaaagagagaagaaaaactggaaatcttattccgtgtgtgtttgggagttgcttggggttgggggtcgtggggacaggggacagctctgggagcagaggtggccctcggtgccgtcctgcgcagactctcccgtcccacggaggccgcggggtgggggctggggggggtgccgccgaccgttccgctcttccggccaggtgcttttctgtcaatttctatggaatgcaaaaggaggtttttgttttattttgtttttttgtaaagcttaagaaaaaaatctacatcttatacttgagcctccatacttaaaaaaagaaaagaaaagaaatcaataaaaagaaactggggcgcagttagc

SEQ ID NO: 873 - protein, 301 aa, Homosapiens
MHPSRRSLPFPLNCQLARVGTADYGSPSDQSDQQLDCALDLMRRLPPQQIEKNLSDLIDLVPSLCEDLLSSVDQPLKIARDKVVGKDYLLCDYNRDGDSYRSPWSNKYDPPLEDGAMPSARLRKLEVEANNAFDQYRDLYFEGGVSSVYLWDLDHGFAGVILIKKAGDGSKKIKGCWDSIHVVEVQEKSSGRTAHYKLTSTVMLWLQTNKSGSGTMNLGGSLTRQMEKDETVSDCSPHIANIGRLVEDMENKIRSTLNEIYFGKTKDIVNGLRSVQTFADKSKQEALKNDLVEALKRKQQC

SEQ ID NO: 874 - DNA, 1728 bp, Homosapiens
actgacgccgggaccgggaccgccgccgccgccgccaccatggttacaacaaagggcaaaagtaatccgctactggagtgtgttcaccatggaaccaactggggggcacgacatctgcagccaccagggcctgttgagcaggagcaggggagccgagtgatcagcagctggactgtgccttggacctaatgaggcgcctgcctccccagcaaatcgagaaaaacctcagcgacctgatcgacctggtccccagtctatgtgaggatctcctgtcttctgttgaccagccactgaaaattgccagagacaaggtggtgggaaaggattaccttttgtgtgactacaacagagatggggactcctataggtcaccatggagtaacaagtatgaccctcccttggaggatggggccatgccgtcagctcggctgagaaagctggaggtggaagccaacaatgcctttgaccagtatcgagacctgtattttgaaggtggcgtctcatctgtctacctctgggatctggatcatggctttgctggagtgatcctcataaagaaggctggagatggatcaaagaagatcaaaggctgctgggattccatccacgtggtagaagtgcaggagaaatccagcggtcgcaccgcccattacaagttgacctccacggtgatgctgtggctgcagaccaacaaatctggctctggcaccatgaacctcggaggcagccttaccagacagatggagaaggatgaaactgtgagtgactgctccccacacatagccaacatcgggcgcctggtagaggacatggaaaataaaatcagaagtacgctgaacgagatctactttggaaaaacaaaggatatcgtcaatgggctgaggtctgtgcagacttttgcagacaaatcaaaacaagaagctctgaagaatgacctggtggaggctttgaagagaaagcagcaatgctaaacctctgtttcatgctaaccagacacgccgtgcactcgttagattcctttcttagaaaactcgttttctgctcccttccctcgtcccttccctccccgacaggtcacataacagctgcatcattgaccgcacagcgccatctctccctgagaataaagccgatagccaccctcctccggctccgagcctgcttctgccacacctcgctctcagttctctccacatttccatagagaccgtgtggtttttgttcacccgggccccccgtcttcctccctgtccccccatttataggcataaaatccactgtctgccagcctcccttccctcccacctttttggtacattggtgtaaaaaatgtaaaacaaaaaaattttatgaactaactgtggtgtgtgaaagagagaagaaaaactggaaatcttattccgtgtgtgtttgggagttgcttggggttgggggtcgtggggacaggggacagctctgggagcagaggtggccctcggtgccgtcctgcgcagactctcccgtcccacggaggccgcggggtgggggctggggggggtgccgccgaccgttccgctcttccggccaggtgcttttctgtcaatttctatggaatgcaaaaggaggtttttgttttattttgtttttttgtaaagcttaagaaaaaaatctacatcttatacttgagcctccatacttaaaaaaagaaaagaaaagaaatcaataaaaagaaactggggcgcagttagc

SEQ ID NO: 875 - protein, 260 aa, Homosapiens; identical to SEQ ID NO: 869

SEQ ID NO: 876 - DNA, 2071 bp, Homosapiens
gtggaagcgccgggccctgctgcgggggggagagccactgacgccgggaccgggaccgccgccgccgccgccaccatgctccatgcctgaccgtgactcgcatctcgccaggccagtgcatttcctcttctggctgtcatcggaattttcaagtgtcaagaccccactttgttcctgttgtcctggttccggctttgggaagcatgacctttcaggcctgctcagagacaccgcagtgcactttgtgcgttatcagccttacagagactctacggtcaggagtttttgtggcaatggaactgctggggtttcatctgcaaatgaaaaccatctggccagctgcttgggtcagatggaaaccagatgggagaagtcaggagcgggcagcgagcagcctggggcagcgtccctagtcacgtcatgtttccacttcctcttgccccctcgcctcccctgcctgcaaaacgattgttattaacccatcacctcctccaatgcccaggcagttccaggatacagggttctctcgcccaggccttggccagcccagaagatgtgacccagaacctagaaagagtgatcagcagctggactgtgccttggacctaatgaggcgcctgcctccccagcaaatcgagaaaaacctcagcgacctgatcgacctggtccccagtctatgtgaggatctcctgtcttctgttgaccagccactgaaaattgccagagacaaggtggtgggaaaggattaccttttgtgtgactacaacagagatggggactcctataggtcaccatggagtaacaagtatgaccctcccttggaggatggggccatgccgtcagctcggctgagaaagctggaggtggaagccaacaatgcctttgaccagtatcgagacctgtattttgaaggtggcgtctcatctgtctacctctgggatctggatcatggctttgctggagtgatcctcataaagaaggctggagatggatcaaagaagatcaaaggctgctgggattccatccacgtggtagaagtgcaggagaaatccagcggtcgcaccgcccattacaagttgacctccacggtgatgctgtggctgcagaccaacaaatctggctctggcaccatgaacctcggaggcagccttaccagacagatggagaaggatgaaactgtgagtgactgctccccacacatagccaacatcgggcgcctggtagaggtctgtgcagacttttgcagacaaatcaaaacaagaagctctgaagaatgacctggtggaggctttgaagagaaagcagcaatgctaaacctctgtttcatgctaaccagacacgccgtgcactcgttagattcctttcttagaaaactcgttttctgctcccttccctcgtcccttccctccccgacaggtcacataacagctgcatcattgaccgcacagcgccatctctccctgagaataaagccgatagccaccctcctccggctccgagcctgcttctgccacacctcgctctcagttctctccacatttccatagagaccgtgtggtttttgttcacccgggccccccgtcttcctccctgtccccccatttataggcataaaatccactgtctgccagcctcccttccctcccacctttttggtacattggtgtaaaaaatgtaaaacaaaaaaattttatgaactaactgtggtgtgtgaaagagagaagaaaaactggaaatcttattccgtgtgtgtttgggagttgcttggggttgggggtcgtggggacaggggacagctctgggagcagaggtggccctcggtgccgtcctgcgcagactctcccgtcccacggaggccgcggggtgggggctggggggggtgccgccgaccgttccgctcttccggccaggtgcttttctgtcaatttctatggaatgcaaaaggaggtttttgttttattttgtttttttgtaaagcttaagaaaaaaatctacatcttatacttgagcctccatacttaaaaaaagaaaagaaaagaaatcaataaaaagaaactggggcgcagttagc

SEQ ID NO: 877 - protein, 260 aa, Homosapiens
MPRQFQDTGFSRPGLGQPRRCDPEPRKSDQQLDCALDLMRRLPPQQIEKNLSDLIDLVPSLCEDLLSSVDQPLKIARDKVVGKDYLLCDYNRDGDSYRSPWSNKYDPPLEDGAMPSARLRKLEVEANNAFDQYRDLYFEGGVSSVYLWDLDHGFAGVILIKKAGDGSKKIKGCWDSIHVVEVQEKSSGRTAHYKLTSTVMLWLQTNKSGSGTMNLGGSLTRQMEKDETVSDCSPHIANIGRLVEVCADFCRQIKTRSSEE

SEQ ID NO: 878 - DNA, 1770 bp, Homosapiens
agctggcggcgtggggggcgggcccgggccgggccggggcggggaaggaaggtggcggcggcccggcgcggggggaggggggtgctgacccggatgttcactcctgggcacccggggaagtggaagcgccgggccctgctgcgggggggagagccactgacgccgggaccgggaccgccgccgccgccgccaccatgagtgatcagcagctggactgtgccttggacctaatgaggcgcctgcctccccagcaaatcgagaaaaacctcagcgacctgatcgacctggtccccagtctatgtgaggatctcctgtcttctgttgaccagccactgaaaattgccagagacaaggtggtgggaaaggattaccttttgtgtgactacaacagagatggggactcctataggtcaccatggagtaacaagtatgaccctcccttggaggatggggccatgccgtcagctcggctgagaaagctggaggtggaagccaacaatgcctttgaccagtatcgagacctgtattttgaaggtggcgtctcatctgtctacctctgggatctggatcatggctttgctggagtgatcctcataaagaaggctggagatggatcaaagaagatcaaaggctgctgggattccatccacgtggtagaagtgcaggagaaatccagcggtcgcaccgcccattacaagttgacctccacggtgatgctgtggctgcagaccaacaaatctggctctggcaccatgaacctcggaggcagccttaccagacagatggagaaggatgaaactgtgagtgactgctccccacacatagccaacatcgggcgcctggtagaggacatggaaaataaaatcagaagtacgctgaacgagatctactttggaaaaacaaaggatatcgtcaatgggctgaggtctgtgcagacttttgcagacaaatcaaaacaagaagctctgaagaatgacctggtggaggctttgaagagaaagcagcaatgctaaacctctgtttcatgctaaccagacacgccgtgcactcgttagattcctttcttagaaaactcgttttctgctcccttccctcgtcccttccctccccgacaggtcacataacagctgcatcattgaccgcacagcgccatctctccctgagaataaagccgatagccaccctcctccggctccgagcctgcttctgccacacctcgctctcagttctctccacatttccatagagaccgtgtggtttttgttcacccgggccccccgtcttcctccctgtccccccatttataggcataaaatccactgtctgccagcctcccttccctcccacctttttggtacattggtgtaaaaaatgtaaaacaaaaaaattttatgaactaactgtggtgtgtgaaagagagaagaaaaactggaaatcttattccgtgtgtgtttgggagttgcttggggttgggggtcgtggggacaggggacagctctgggagcagaggtggccctcggtgccgtcctgcgcagactctcccgtcccacggaggccgcggggtgggggctggggggggtgccgccgaccgttccgctcttccggccaggtgcttttctgtcaatttctatggaatgcaaaaggaggtttttgttttattttgtttttttgtaaagcttaagaaaaaaatctacatcttatacttgagcctccatacttaaaaaaagaaaagaaaagaaatcaataaaaagaaactggggcgcagttagc

SEQ ID NO: 879 - protein, 272 aa, Homosapiens; identical to SEQ ID NO: 26

SEQ ID NO: 880 - DNA, 533 bp, Homosapiens
ctgctgataacgcctttcctcccttgcaggtctgtgcagacttttgcagacaaatcaaaacaagaagctctgaagaatgacctggtggaggctttgaagagaaagcagcaatgctaaacctctgtttcatgctaaccagacacgccgtgcactcgttagattcctttcttagaaaactcgttttctgctcccttccctcgtcccttccctccccgacaggtcacataacagctgcatcattgaccgcacagcgccatctctccctgagaataaagccgatagccaccctcctccggctccgagcctgcttctgccacacctcgctctcagttctctccacatttccatagagaccgtttccgctcttccggccaggtgcttttctgtcaatttctatggaatgcaaaaggaggtttttgttttattttgtttttttgtaaagcttaagaaaaaaatctacatcttatacttgagcctccatacttaaaaaaagaaaagaaaagaaatcaataaaaagaaactggggcgcagtt

SEQ ID NO: 881 - protein, 79 aa, Homosapiens
MLNLCFMLTRHAVHSLDSFLRKLVFCSLPSSLPSPTGHITAASLTAQRHLSLRIKPIATLLRLRACFCHTSLSVLSTFP

SEQ ID NO: 882 - DNA, 1852 bp, Homosapiens
ggatgaggcggagcagacctggccttggaatctggccccgcgcttaagcgaggatggtcttcgtggcctttctgagcttggcttcctctgagtggcgggaagcctcattggtcatttttcagagccccttggtccactcctcggcactaagacacttgagaaaggctcctctcttcactcagcatgctatggggttacttaagtttatttcttaattgaattttctcattaaaacctgctttcccagatctgtttggcagcaggacagtttcgaggtggtagaagagaggcccagcttcctctgtatttcctttccctgactttctggaggcattatcgaagtacgctaagccgcacgtagctgaagtgcacaactggatggcttgtgtttgtttcagtgataacacacaacatctgcctccctgctctccccagcctcccgtctctgatcgcgcactccctagttttccagcctcttcttaagcagcgattccagctggcagcgccgtgacaagtgtttccgtaagcattcccacgatcctctaagtgaggagcatgacctcggaaccatgtgcccggtcccctcccctgacgtaggaggtagtgggagagtgatcagcagctggactgtgccttggacctaatgaggcgcctgcctccccagcaaatcgagaaaaacctcagcgacctgatcgacctggtccccagtctatgtgaggatctcctgtcttctgttgaccagccactgaaaattgccagagacaaggtggtgggaaaggattaccttttgtgtgactacaacagagatggggactcctataggtcaccatggagtaacaagtatgaccctcccttggaggatggggccatgccgtcagctcggctgagaaagctggaggtggaagccaacaatgcctttgaccagtatcgagacctgtattttgaaggtggcgtctcatctgtctacctctgggatctggatcatggctttgctggagtgatcctcataaagaaggctggagatggatcaaagaagatcaaaggctgctgggattccatccacgtggtagaagtgcaggagaaatccagcggtcgcaccgcccattacaagttgacctccacggtgatgctgtggctgcagaccaacaaatctggctctggcaccatgaacctcggaggcagccttaccagacagatggagaaggatgaaactgtgagtgactgctccccacacatagccaacatcgggcgcctggtagaggacatggaaaataaaatcagaagtacgctgaacgagatctactttggaaaaacaaaggatatcgtcaatgggctgaggtctgtgcagacttttgcagacaaatcaaaacaagaagctctgaagaatgacctggtggaggctttgaagagaaagcagcaatgctaaacctctgtttcatgctaaccagacacgccgtgcactcgttagattcctttcttagaaaactcgttttctgctcccttccctcgtcccttccctccccgacaggtcacataacagctgcatcattgaccgcacagcgccatctctccctgagaataaagccgatagccaccctcctccggctccgagcctgcttctgccacacctcgctctcagttctctccacatttccatagagaccgtgtggtttttgttcacccgggccccccgtcttcctccctgtccccccatttataggcataaaatccactgtctgccagcctcccttccctcccacctttttggtacattggtgtaaaaaatgtaaaacaaaaaaattttatgaactaactgtggtgtgtgaaagagagaagaaaaactggaaatctt

SEQ ID NO: 883 - protein, 260 aa, Homosapiens; identical to SEQ ID NO: 869

SEQ ID NO: 884 - DNA, 1440 bp, Homosapiens
cccacagatagacctgccctcctgccacttgacccttctgcaggacaggcccagcacttaggttggaagggccagagaacttcttcctgacaggatcaagggatttttggagcatgtttgtatgtggactttgggcctcaaagtgttttgaggaccatggttccttgtttagtcaagggatgttgctgctgaacgaggagtgatcagcagctggactgtgccttggacctaatgaggcgcctgcctccccagcaaatcgagaaaaacctcagcgacctgatcgacctggtccccagtctatgtgaggatctcctgtcttctgttgaccagccactgaaaattgccagagacaaggtggtgggaaaggattaccttttgtgtgactacaacagagatggggactcctataggtcaccatggagtaacaagtatgaccctcccttggaggatggggccatgccgtcagctcggctgagaaagctggaggtggaagccaacaatgcctttgaccagtatcgagacctgtattttgaaggtggcgtctcatctgtctacctctgggatctggatcatggctttgctggagtgatcctcataaagaaggctggagatggatcaaagaagatcaaaggctgctgggattccatccacgtggtagaagtgcaggagaaatccagcggtcgcaccgcccattacaagttgacctccacggtgatgctgtggctgcagaccaacaaatctggctctggcaccatgaacctcggaggcagccttaccagacagatggagaaggatgaaactgtgagtgactgctccccacacatagccaacatcgggcgcctggtagaggacatggaaaataaaatcagaagtacgctgaacgagatctactttggaaaaacaaaggatatcgtcaatgggctgaggtctgtgcagacttttgcagacaaatcaaaacaagaagctctgaagaatgacctggtggaggctttgaagagaaagcagcaatgctaaacctctgtttcatgctaaccagacacgccgtgcactcgttagattcctttcttagaaaactcgttttctgctcccttccctcgtcccttccctccccgacaggtcacataacagctgcatcattgaccgcacagcgccatctctccctgagaataaagccgatagccaccctcctccggctccgagcctgcttctgccacacctcgctctcagttctctccacatttccatagagaccgtgtggtttttgttcacccgggccccccgtcttcctccctgtccccccatttataggcataaaatccactgtctgccagcctcccttccctcccacctttttggtacattggtgtaaaaaatgtaaaacaaaaaaattttatgaactaactgtggtgtgtgaaagagagaagaaaaactggaaatctt

SEQ ID NO: 885 - protein, 260 aa, Homosapiens; identical to SEQ ID NO: 869

SEQ ID NO: 886 - DNA, 1717 bp, Homosapiens
tccctgtacctggggcgcgccttctttgcagcctttggggagcgaggggagctctccatcagggatggggtggtcccggtgctgtgccttctcagttgccgcttctagggaggccgcctaggagccagcgagggaagggcgggcatcggtgtgcccagaaggcagcgcgctgctctgcgggcccttctcgaggctgccgccgtgggtgctgtgcgtgcgaagcattctgcagggcaggccggggtccacggcgcccgggcctgagtgggagccgaggggcgaggatgggtggcccacaggacaaggatgaacgcacaatcgcccttgtgaggccgtggccttggggggccaccaggccctggatccagcatatggcctggacacgatgcacccaagcaggcgcagcctccccttccctctgaactgtcagcttgcaagggttggaactgctgattatggaagtccctcggatcagagtgatcagcagctggactgtgccttggacctaatgaggcgcctgcctccccagcaaatcgagaaaaacctcagcgacctgatcgacctggtccccagtctatgtgaggatctcctgtcttctgttgaccagccactgaaaattgccagagacaaggtggtgggaaaggattaccttttgtgtgactacaacagagatggggactcctataggtcaccatggagtaacaagtatgaccctcccttggaggatggggccatgccgtcagctcggctgagaaagctggaggtggaagccaacaatgcctttgaccagtatcgagacctgtattttgaaggtggcgtctcatctgtctacctctgggatctggatcatggctttgctggagtgatcctcataaagaaggctggagatggatcaaagaagatcaaaggctgctgggattccatccacgtggtagaagtgcaggagaaatccagcggtcgcaccgcccattacaagttgacctccacggtgatgctgtggctgcagaccaacaaatctggctctggcaccatgaacctcggaggcagccttaccagacagatggagaaggatgaaactgtgagtgactgctccccacacatagccaacatcgggcgcctggtagaggacatggaaaataaaatcagaagtacgctgaacgagatctactttggaaaaacaaaggatatcgtcaatgggctgaggtctgtgcagacttttgcagacaaatcaaaacaagaagctctgaagaatgacctggtggaggctttgaagagaaagcagcaatgctaaacctctgtttcatgctaaccagacacgccgtgcactcgttagattcctttcttagaaaactcgttttctgctcccttccctcgtcccttccctccccgacaggtcacataacagctgcatcattgaccgcacagcgccatctctccctgagaataaagccgatagccaccctcctccggctccgagcctgcttctgccacacctcgctctcagttctctccacatttccatagagaccgtgtggtttttgttcacccgggccccccgtcttcctccctgtccccccatttataggcataaaatccactgtctgccagcctcccttccctcccacctttttggtacattggtgtaaaaaatgtaaaacaaaaaaattttatgaactaactgtggtgtgtgaaagagagaagaaaaactggaaatctt

SEQ ID NO: 887 - protein, 301 aa, Homosapiens; identical to SEQ ID NO: 873

SEQ ID NO: 888 - DNA, 1397 bp, Homosapiens
actgacgccgggaccgggaccgccgccgccgccgccaccatggttacaacaaagggcaaaagtaatccgctactggagtgtgttcaccatggaaccaactggggggcacgacatctgcagccaccagggcctgttgagcaggagcaggggagccgagtgatcagcagctggactgtgccttggacctaatgaggcgcctgcctccccagcaaatcgagaaaaacctcagcgacctgatcgacctggtccccagtctatgtgaggatctcctgtcttctgttgaccagccactgaaaattgccagagacaaggtggtgggaaaggattaccttttgtgtgactacaacagagatggggactcctataggtcaccatggagtaacaagtatgaccctcccttggaggatggggccatgccgtcagctcggctgagaaagctggaggtggaagccaacaatgcctttgaccagtatcgagacctgtattttgaaggtggcgtctcatctgtctacctctgggatctggatcatggctttgctggagtgatcctcataaagaaggctggagatggatcaaagaagatcaaaggctgctgggattccatccacgtggtagaagtgcaggagaaatccagcggtcgcaccgcccattacaagttgacctccacggtgatgctgtggctgcagaccaacaaatctggctctggcaccatgaacctcggaggcagccttaccagacagatggagaaggatgaaactgtgagtgactgctccccacacatagccaacatcgggcgcctggtagaggacatggaaaataaaatcagaagtacgctgaacgagatctactttggaaaaacaaaggatatcgtcaatgggctgaggtctgtgcagacttttgcagacaaatcaaaacaagaagctctgaagaatgacctggtggaggctttgaagagaaagcagcaatgctaaacctctgtttcatgctaaccagacacgccgtgcactcgttagattcctttcttagaaaactcgttttctgctcccttccctcgtcccttccctccccgacaggtcacataacagctgcatcattgaccgcacagcgccatctctccctgagaataaagccgatagccaccctcctccggctccgagcctgcttctgccacacctcgctctcagttctctccacatttccatagagaccgtgtggtttttgttcacccgggccccccgtcttcctccctgtccccccatttataggcataaaatccactgtctgccagcctcccttccctcccacctttttggtacattggtgtaaaaaatgtaaaacaaaaaaattttatgaactaactgtggtgtgtgaaagagagaagaaaaactggaaatctt

SEQ ID NO: 889 - protein, 260 aa, Homosapiens; identical to SEQ ID NO: 869

SEQ ID NO: 890 - DNA, 1439 bp, Homosapiens
agctggcggcgtggggggcgggcccgggccgggccggggcggggaaggaaggtggcggcggcccggcgcggggggaggggggtgctgacccggatgttcactcctgggcacccggggaagtggaagcgccgggccctgctgcgggggggagagccactgacgccgggaccgggaccgccgccgccgccgccaccatgagtgatcagcagctggactgtgccttggacctaatgaggcgcctgcctccccagcaaatcgagaaaaacctcagcgacctgatcgacctggtccccagtctatgtgaggatctcctgtcttctgttgaccagccactgaaaattgccagagacaaggtggtgggaaaggattaccttttgtgtgactacaacagagatggggactcctataggtcaccatggagtaacaagtatgaccctcccttggaggatggggccatgccgtcagctcggctgagaaagctggaggtggaagccaacaatgcctttgaccagtatcgagacctgtattttgaaggtggcgtctcatctgtctacctctgggatctggatcatggctttgctggagtgatcctcataaagaaggctggagatggatcaaagaagatcaaaggctgctgggattccatccacgtggtagaagtgcaggagaaatccagcggtcgcaccgcccattacaagttgacctccacggtgatgctgtggctgcagaccaacaaatctggctctggcaccatgaacctcggaggcagccttaccagacagatggagaaggatgaaactgtgagtgactgctccccacacatagccaacatcgggcgcctggtagaggacatggaaaataaaatcagaagtacgctgaacgagatctactttggaaaaacaaaggatatcgtcaatgggctgaggtctgtgcagacttttgcagacaaatcaaaacaagaagctctgaagaatgacctggtggaggctttgaagagaaagcagcaatgctaaacctctgtttcatgctaaccagacacgccgtgcactcgttagattcctttcttagaaaactcgttttctgctcccttccctcgtcccttccctccccgacaggtcacataacagctgcatcattgaccgcacagcgccatctctccctgagaataaagccgatagccaccctcctccggctccgagcctgcttctgccacacctcgctctcagttctctccacatttccatagagaccgtgtggtttttgttcacccgggccccccgtcttcctccctgtccccccatttataggcataaaatccactgtctgccagcctcccttccctcccacctttttggtacattggtgtaaaaaatgtaaaacaaaaaaattttatgaactaactgtggtgtgtgaaagagagaagaaaaactggaaatctt

SEQ ID NO: 891 - protein, 272 aa, Homosapiens; identical to SEQ ID NO: 26

SEQ ID NO: 892 - DNA, 1811 bp, Homosapiens
ggatgaggcggagcagacctggccttggaatctggccccgcgcttaagcgaggatggtcttcgtggcctttctgagcttggcttcctctgagtggcgggaagcctcattggtcatttttcagagccccttggtccactcctcggcactaagacacttgagaaaggctcctctcttcactcagcatgctatggggttacttaagtttatttcttaattgaattttctcattaaaacctgctttcccagatctgtttggcagcaggacagtttcgaggtggtagaagagaggcccagcttcctctgtatttcctttccctgactttctggaggcattatcgaagtacgctaagccgcacgtagctgaagtgcacaactggatggcttgtgtttgtttcagtgataacacacaacatctgcctccctgctctccccagcctcccgtctctgatcgcgcactccctagttttccagcctcttcttaagcagcgattccagctggcagcgccgtgacaagtgtttccgtaagcattcccacgatcctctaagtgaggagcatgacctcggaaccatgtgcccggtcccctcccctgacgtaggaggtagtgggagagtgatcagcagctggactgtgccttggacctaatgaggcgcctgcctccccagcaaatcgagaaaaacctcagcgacctgatcgacctggtccccagtctatgtgaggatctcctgtcttctgttgaccagccactgaaaattgccagagacaaggtggtgggaaaggattaccttttgtgtgactacaacagagatggggactcctataggtcaccatggagtaacaagtatgaccctcccttggaggatggggccatgccgtcagctcggctgagaaagctggaggtggaagccaacaatgcctttgaccagtatcgagacctgtattttgaaggtggcgtctcatctgtctacctctgggatctggatcatggctttgctggagtgatcctcataaagaaggctggagatggatcaaagaagatcaaaggctgctgggattccatccacgtggtagaagtgcaggagaaatccagcggtcgcaccgcccattacaagttgacctccacggtgatgctgtggctgcagaccaacaaatctggctctggcaccatgaacctcggaggcagccttaccagacagatggagaaggatgaaactgtgagtgactgctccccacacatagccaacatcgggcgcctggtagaggacatggaaaataaaatcagaagtacgctgaacgagatctactttggaaaaacaaaggatatcgtcaatgggctgaggtctgtgcagacttttgcagacaaatcaaaacaagaagctctgaagaatgacctggtggaggctttgaagagaaagcagcaatgctaaacctctgtttcatgctaaccagacacgccgtgcactcgttagattcctttcttagaaaactcgttttctgctcccttccctcgtcccttccctccccgacaggtcacataacagctgcatcattgaccgcacagcgccatctctccctgagaataaagccgatagccaccctcctccggctccgagcctgcttctgccacacctcgctctcagttctctccacatttccatagagaccgtgtggtttttgttcacccgggccccccgtcttcctccctgtccccccatttataggcataaaatccactgtctgccagcctcccttccctcccacctttttggtacattggtgtaaaaaatgtaaaacaaaaaaattttatgaact

SEQ ID NO: 893 - protein, 260 aa, Homosapiens; identical to SEQ ID NO: 869

SEQ ID NO: 894 - DNA, 1399 bp, Homosapiens
cccacagatagacctgccctcctgccacttgacccttctgcaggacaggcccagcacttaggttggaagggccagagaacttcttcctgacaggatcaagggatttttggagcatgtttgtatgtggactttgggcctcaaagtgttttgaggaccatggttccttgtttagtcaagggatgttgctgctgaacgaggagtgatcagcagctggactgtgccttggacctaatgaggcgcctgcctccccagcaaatcgagaaaaacctcagcgacctgatcgacctggtccccagtctatgtgaggatctcctgtcttctgttgaccagccactgaaaattgccagagacaaggtggtgggaaaggattaccttttgtgtgactacaacagagatggggactcctataggtcaccatggagtaacaagtatgaccctcccttggaggatggggccatgccgtcagctcggctgagaaagctggaggtggaagccaacaatgcctttgaccagtatcgagacctgtattttgaaggtggcgtctcatctgtctacctctgggatctggatcatggctttgctggagtgatcctcataaagaaggctggagatggatcaaagaagatcaaaggctgctgggattccatccacgtggtagaagtgcaggagaaatccagcggtcgcaccgcccattacaagttgacctccacggtgatgctgtggctgcagaccaacaaatctggctctggcaccatgaacctcggaggcagccttaccagacagatggagaaggatgaaactgtgagtgactgctccccacacatagccaacatcgggcgcctggtagaggacatggaaaataaaatcagaagtacgctgaacgagatctactttggaaaaacaaaggatatcgtcaatgggctgaggtctgtgcagacttttgcagacaaatcaaaacaagaagctctgaagaatgacctggtggaggctttgaagagaaagcagcaatgctaaacctctgtttcatgctaaccagacacgccgtgcactcgttagattcctttcttagaaaactcgttttctgctcccttccctcgtcccttccctccccgacaggtcacataacagctgcatcattgaccgcacagcgccatctctccctgagaataaagccgatagccaccctcctccggctccgagcctgcttctgccacacctcgctctcagttctctccacatttccatagagaccgtgtggtttttgttcacccgggccccccgtcttcctccctgtccccccatttataggcataaaatccactgtctgccagcctcccttccctcccacctttttggtacattggtgtaaaaaatgtaaaacaaaaaaattttatgaact

SEQ ID NO: 895 - protein, 260 aa, Homosapiens; identical to SEQ ID NO: 869

SEQ ID NO: 896 - DNA, 1676 bp, Homosapiens
tccctgtacctggggcgcgccttctttgcagcctttggggagcgaggggagctctccatcagggatggggtggtcccggtgctgtgccttctcagttgccgcttctagggaggccgcctaggagccagcgagggaagggcgggcatcggtgtgcccagaaggcagcgcgctgctctgcgggcccttctcgaggctgccgccgtgggtgctgtgcgtgcgaagcattctgcagggcaggccggggtccacggcgcccgggcctgagtgggagccgaggggcgaggatgggtggcccacaggacaaggatgaacgcacaatcgcccttgtgaggccgtggccttggggggccaccaggccctggatccagcatatggcctggacacgatgcacccaagcaggcgcagcctccccttccctctgaactgtcagcttgcaagggttggaactgctgattatggaagtccctcggatcagagtgatcagcagctggactgtgccttggacctaatgaggcgcctgcctccccagcaaatcgagaaaaacctcagcgacctgatcgacctggtccccagtctatgtgaggatctcctgtcttctgttgaccagccactgaaaattgccagagacaaggtggtgggaaaggattaccttttgtgtgactacaacagagatggggactcctataggtcaccatggagtaacaagtatgaccctcccttggaggatggggccatgccgtcagctcggctgagaaagctggaggtggaagccaacaatgcctttgaccagtatcgagacctgtattttgaaggtggcgtctcatctgtctacctctgggatctggatcatggctttgctggagtgatcctcataaagaaggctggagatggatcaaagaagatcaaaggctgctgggattccatccacgtggtagaagtgcaggagaaatccagcggtcgcaccgcccattacaagttgacctccacggtgatgctgtggctgcagaccaacaaatctggctctggcaccatgaacctcggaggcagccttaccagacagatggagaaggatgaaactgtgagtgactgctccccacacatagccaacatcgggcgcctggtagaggacatggaaaataaaatcagaagtacgctgaacgagatctactttggaaaaacaaaggatatcgtcaatgggctgaggtctgtgcagacttttgcagacaaatcaaaacaagaagctctgaagaatgacctggtggaggctttgaagagaaagcagcaatgctaaacctctgtttcatgctaaccagacacgccgtgcactcgttagattcctttcttagaaaactcgttttctgctcccttccctcgtcccttccctccccgacaggtcacataacagctgcatcattgaccgcacagcgccatctctccctgagaataaagccgatagccaccctcctccggctccgagcctgcttctgccacacctcgctctcagttctctccacatttccatagagaccgtgtggtttttgttcacccgggccccccgtcttcctccctgtccccccatttataggcataaaatccactgtctgccagcctcccttccctcccacctttttggtacattggtgtaaaaaatgtaaaacaaaaaaattttatgaact

SEQ ID NO: 897 - protein, 301 aa, Homosapiens; identical to SEQ ID NO: 873

SEQ ID NO: 898 - DNA, 1356 bp, Homosapiens
actgacgccgggaccgggaccgccgccgccgccgccaccatggttacaacaaagggcaaaagtaatccgctactggagtgtgttcaccatggaaccaactggggggcacgacatctgcagccaccagggcctgttgagcaggagcaggggagccgagtgatcagcagctggactgtgccttggacctaatgaggcgcctgcctccccagcaaatcgagaaaaacctcagcgacctgatcgacctggtccccagtctatgtgaggatctcctgtcttctgttgaccagccactgaaaattgccagagacaaggtggtgggaaaggattaccttttgtgtgactacaacagagatggggactcctataggtcaccatggagtaacaagtatgaccctcccttggaggatggggccatgccgtcagctcggctgagaaagctggaggtggaagccaacaatgcctttgaccagtatcgagacctgtattttgaaggtggcgtctcatctgtctacctctgggatctggatcatggctttgctggagtgatcctcataaagaaggctggagatggatcaaagaagatcaaaggctgctgggattccatccacgtggtagaagtgcaggagaaatccagcggtcgcaccgcccattacaagttgacctccacggtgatgctgtggctgcagaccaacaaatctggctctggcaccatgaacctcggaggcagccttaccagacagatggagaaggatgaaactgtgagtgactgctccccacacatagccaacatcgggcgcctggtagaggacatggaaaataaaatcagaagtacgctgaacgagatctactttggaaaaacaaaggatatcgtcaatgggctgaggtctgtgcagacttttgcagacaaatcaaaacaagaagctctgaagaatgacctggtggaggctttgaagagaaagcagcaatgctaaacctctgtttcatgctaaccagacacgccgtgcactcgttagattcctttcttagaaaactcgttttctgctcccttccctcgtcccttccctccccgacaggtcacataacagctgcatcattgaccgcacagcgccatctctccctgagaataaagccgatagccaccctcctccggctccgagcctgcttctgccacacctcgctctcagttctctccacatttccatagagaccgtgtggtttttgttcacccgggccccccgtcttcctccctgtccccccatttataggcataaaatccactgtctgccagcctcccttccctcccacctttttggtacattggtgtaaaaaatgtaaaacaaaaaaattttatgaact

SEQ ID NO: 899 - protein, 260 aa, Homosapiens; identical to SEQ ID NO: 869

SEQ ID NO: 900 - DNA, 1398 bp, Homosapiens
agctggcggcgtggggggcgggcccgggccgggccggggcggggaaggaaggtggcggcggcccggcgcggggggaggggggtgctgacccggatgttcactcctgggcacccggggaagtggaagcgccgggccctgctgcgggggggagagccactgacgccgggaccgggaccgccgccgccgccgccaccatgagtgatcagcagctggactgtgccttggacctaatgaggcgcctgcctccccagcaaatcgagaaaaacctcagcgacctgatcgacctggtccccagtctatgtgaggatctcctgtcttctgttgaccagccactgaaaattgccagagacaaggtggtgggaaaggattaccttttgtgtgactacaacagagatggggactcctataggtcaccatggagtaacaagtatgaccctcccttggaggatggggccatgccgtcagctcggctgagaaagctggaggtggaagccaacaatgcctttgaccagtatcgagacctgtattttgaaggtggcgtctcatctgtctacctctgggatctggatcatggctttgctggagtgatcctcataaagaaggctggagatggatcaaagaagatcaaaggctgctgggattccatccacgtggtagaagtgcaggagaaatccagcggtcgcaccgcccattacaagttgacctccacggtgatgctgtggctgcagaccaacaaatctggctctggcaccatgaacctcggaggcagccttaccagacagatggagaaggatgaaactgtgagtgactgctccccacacatagccaacatcgggcgcctggtagaggacatggaaaataaaatcagaagtacgctgaacgagatctactttggaaaaacaaaggatatcgtcaatgggctgaggtctgtgcagacttttgcagacaaatcaaaacaagaagctctgaagaatgacctggtggaggctttgaagagaaagcagcaatgctaaacctctgtttcatgctaaccagacacgccgtgcactcgttagattcctttcttagaaaactcgttttctgctcccttccctcgtcccttccctccccgacaggtcacataacagctgcatcattgaccgcacagcgccatctctccctgagaataaagccgatagccaccctcctccggctccgagcctgcttctgccacacctcgctctcagttctctccacatttccatagagaccgtgtggtttttgttcacccgggccccccgtcttcctccctgtccccccatttataggcataaaatccactgtctgccagcctcccttccctcccacctttttggtacattggtgtaaaaaatgtaaaacaaaaaaattttatgaact

SEQ ID NO: 901 - protein, 272 aa, Homosapiens; identical to SEQ ID NO: 26

SEQ ID NO: 902 - DNA, 1186 bp, Homosapiens
agctggcggcgtggggggcgggcccgggccgggccggggcggggaaggaaggtggcggcggcccggcgcggggggaggggggtgctgacccggatgttcactcctgggcacccggggaagtggaagcgccgggccctgctgcgggggggagagccactgacgccgggaccgggaccgccgccgccgccgccaccatgagtgatcagcagctggactgtgccttggacctaatgaggcgcctgcctccccagcaaatcgagaaaaacctcagcgacctgatcgacctggtccccagtctatgtgaggatctcctgtcttctgttgaccagccactgaaaattgccagagacaaggtggtgggaaaggattaccttttgtgtgactacaacagagatggggactcctataggtcaccatggagtaacaagtatgaccctcccttggaggatggggccatgccgtcagctcggctgagaaagctggaggtggaagccaacaatgcctttgaccagtatcgagacctgtattttgaaggtggcgtctcatctgtctacctctgggatctggatcatggctttgctggagtgatcctcataaagaaggctggagatggatcaaagaagatcaaaggctgctgggattccatccacgtggtagaagtgcaggagaaatccagcggtcgcaccgcccattacaagttgacctccacggtgatgctgtggctgcagaccaacaaatctggctctggcaccatgaacctcggaggcagccttaccagacagatggagaaggatgaaactgtgagtgactgctccccacacatagccaacatcgggcgcctggtagaggacatggaaaataaaatcagaagtacgctgaacgagatctactttggaaaaacaaaggatatcgtcaatgggctgaggtctgtgcagacttttgcagacaaatcaaaacaagaagctctgaagaatgacctggtggaggctttgaagagaaagcagcaatgctaaacctctgtttcatgctaaccagacacgccgtgcactcgttagattcctttcttagaaaactcgttttctgctcccttccctcgtcccttccctccccgacaggtcacataacagctgcatcattgaccgcacagcgccatctctccctgagaataaagccgatagccaccctc

SEQ ID NO: 903 - protein, 272 aa, Homosapiens; identical to SEQ ID NO: 26

SEQ ID NO: 904 - DNA, 777 bp, Homosapiens
ggaagaagtttatagagtgaaacaaggctggcgtcctcatggcagtcccaaggaccttggctttaaagagctttggactggattctctctttgtcttttcttgctgactgactgggcgagtgagttaacctctctgagcctccgtttccttacccatgctgtgggctgaggcgtcactcagtgacacactgtgcgtcagacccctgctgcactcacgccttgcgtccagccagcaccttccaggctgctgggtgacagggctcttctaattgtgcagcaggtatctgtacgtgcatcttacattctgtacctgcatcttacattctgtgcgtttatgatcacagatacgggaccatttgggtggcggacctgatggggtagcaggcttcgtgatcatgcgagaaggccgtagtttcgggatggggctcttccaccacctcccacagcaaggcctccaggaaatctctgtctcaaaaatggaattaatgattcctgctcaatccacatcatcagggtgtagtgaggctgaacagagatgctggtagtgcccgtctgcagtgactggagagagaatccttgggatcggtcaccaggtccttaatgagaacctgccggggatggtgtcatgtgcccagggtcagtggcaaatgtgtcaggcccagtccctccctcatggggcccatgtttcaacacaggaacaagtcagcagatgaacacagtacttgcacagtttgataaacgctgcaaaggaatgagagctgggtcctgcggtgggga

SEQ ID NO: 905 - protein, 49 aa, Homosapiens
MCPGSVANVSGPVPPSWGPCFNTGTSQQMNTVLAQFDKRCKGMRAGSCG

SEQ ID NO: 906 - DNA, 1174 bp, Homosapiens
cacccggggaagtggaagcgccgggccctgctgcgggggggagagccactgacgccgggaccgggaccgccgccgccgccgccaccatgagtgatcagcagctggactgtgccttggacctaatgaggcgcctgcctccccagcaaatcgagaaaaacctcagcgacctgatcgacctggtccccagtctatgtgaggatctcctgtcttctgttgaccagccactgaaaattgccagagacaaggtggtgggaaaggattaccttttgtgtgactacaacagagatggggactcctataggtcaccatggagtaacaagtatgaccctcccttggaggatggggccatgccgtcagctcggctgagaaagctggaggtggaagccaacaatgcctttgaccagtatcgagacctgtgcttctgaattgttggatcctgatgaatcgcaatcaggactatgtttggcttgagctccagcctcatgaccaccaaccccatcgaatgactgagagctgccaggctcctgccacgttggagctcagaatcctcccgtggggacactgtgctgcagccagcctccagggagccgcttgttttatggcctaaaaagtctctttatgctgagaaggtcacactggactttgctcacacagagatttgacccaagaaaaggaataaagaggccttggataccctgtcttgcccctgttcctgcccccgccgtaccctgctggctcatgccagaagactggacttgctgtctgtgggcatgtttgttgtcggctgacgtagcacccacaggcactggccgtgtgtgtgccacagtcaggaacgaggtgcctgccccccacccattaacccattagctttgtccttactccttgaggccctgcttgaaaagattagtggtgctttgggaggctgaggcaggaggattgcttgaggccgggagctcgagaccagcctgggcgacatagcaagaccctgtacctccaaaaaataaaatataaacattagtcaggcatagaggcacacacacacataggcctagctactcagctgaggtaggaggattgcttgagcccaggagttcaaggttacagtgagctatagtcatgccatcatacactcagcctgggtgacagagtgagtccttgtctctggaaaaaaaaa

SEQ ID NO: 907 - protein, 112 aa, Homosapiens
MSDQQLDCALDLMRRLPPQQIEKNLSDLIDLVPSLCEDLLSSVDQPLKIARDKVVGKDYLLCDYNRDGDSYRSPWSNKYDPPLEDGAMPSARLRKLEVEANNAFDQYRDLCF

SEQ ID NO: 908 - DNA, 696 bp, Homosapiens
cacccggggaagtggaagcgccgggccctgctgcgggggggagagccactgacgccgggaccgggaccgccgccgccgccgccaccatgagtgatcagcagctggactgtgccttggacctaatgaggcgcctgcctccccagcaaatcgagaaaaacctcagcgacctgatcgacctggtccccagtctatgtgaggatctcctgtcttctgttgaccagccactgaaaattgccagagacaaggtggtgggaaaggattaccttttgtgtgactacaacagagatggggactcctataggtcaccatggagtaacaagtatgaccctcccttggaggatggggccatgccgtcagctcggctgagaaagctggaggtggaagccaacaatgcctttgaccagtatcgagacctgtgcttctgaattgttggatcctgatgaatcgcaatcaggactatgtttggcttgagctccagcctcatgaccaccaaccccatcgaatgactgagagctgccaggctcctgccacgttggagctcagaatcctcccgtggggacactgtgctgcagccagcctccagggagccgcttgttttatggcctaaaaagtctctttatgctgagaaggtcacactggactttgctcacacagagatttgacccaagaaaaggaataaagaggccttggataccc

SEQ ID NO: 909 - protein, 112 aa, Homosapiens; identical to SEQ ID NO: 907

SEQ ID NO: 910 - DNA, 745 bp, Homosapiens
gaaatactattgtcctcttccagggtagtccagaggattaaatctaaaaatcactgtgctgaaggatactgtacatctaaaatgcaagcaatagtgatcacactaaggacagatcctgactttcaggctctagggtgcttgctcttgggccactcctttaagctgatcaggcctttgcacttctgcttatggggtttatcatgcaaggggacttggattaggctggcctctgtgcttaaccttgtagttattattttatgcaattactaccatagccttggcatgcccccattttgcagatgtggatatggaggccttgaaaagttaaaaaatacttgtaaaacatcacacagctaggaaggggcagagatggcctttcaagccattcctttcagattctaaaacttgtccctcgcaggcaccctggagtctgatccaaggatgtcattttcatgtacaggggaaagtgctttatgttagtgattgcaacagatgttctttagagttttttaaacttctgcagctgaaagtggagtatttcttaggtgactccctcagttttgctttaatgacttggaacccatcttaaaatgcaggaagaatgggccgggcactgtggctcacacctgtaatcccagcactttgggaggccgaggcgggcggatcatgaggtcaggagatccagaccatcctggctaacatgatgaaatcccgtctctactaaaagtacaaaaaattagccggg

SEQ ID NO: 911 - protein, 91 aa, Homosapiens
MQAIVITLRTDPDFQALGCLLLGHSFKLIRPLHFCLWGLSCKGTWIRLASVLNLVVIILCNYYHSLGMPPFCRCGYGGLEKLKNTCKTSHS

SEQ ID NO: 912 - DNA, 758 bp, Homosapiens
agagtccagggagagtgcgcgggcggccgccggctgaatgaagcctgggacgcgggagccgcgccgcgcgcagtgtctgcagtgccggaggtctgggaggctccgggcgaagcctccctgctgcaggttatgatgatgtcagacaatgctaaaggcagagcagctcattcatggaagaaaagagggagtatttcttctctaagtaatcatgaattttggcgaaaggaaattcatgggcgcatcaaagattctatgagtactgtgtcttatatggaagaacccagtcagcgtgatgatatctctcgccttacagttcagatggaaaacacctatcagttgggtgtgttcttttatctctcactcctattttaaacttctaaattggtgactgattctcttaaaaatgatatttgataacctggcattgtcttcaattctagcacaatataagggactttaatgaattgagtgatttgatgttgctttagtttcttcctcagcaaaaaggtaacaacacttgctgtcttacttttctttactaatgtttcccaaatgccaaacaattcactgggtggcactgatgcatacagtatactactgacttaacaaattcactgagtatttctgggtacatagatatgacttaaatgaaagagataagtattgatattttatccaacaaaaccaatcagtgttgttaggtgaaggaaaaaaaaaaactcaaagcaaaggcaaatgactcatagtcccctgttgac

SEQ ID NO: 913 - protein, 80 aa, Homosapiens [sequence omitted]

SEQ ID NO: 914 - DNA, 2261 bp, Homosapiens
agagtccagggagagtgcgcgggcggccgccggctgaatgaagcctgggacgcgggagccgcgccgcgcgcagtgtctgcagtgccggaggtctgggaggctccgggcgaagcctccctgctgcaggttatgatgatgtcagacaatgctaaaggcagagcagctcattcatggaagaaaagagggagtatttcttctctaagtaatcatgaattttggcgaaaggaaattcatgggcgcatcaaagattctatgagtactgtgtcttatatggaagaacccagtcagcgtgatgatatctctcgccttacagttcagatggaaaacacctatcagttgggtcctcccaaacattttcctgtggtcaccgtcaatcatattttgaaagatgtagtaaccagctatctacaagtagaagaatatgaaccagagctctgtagacagatgactaaaaccatttctgaggttattaaagcccaggtcaaggacttgatgattccacggtataaactaattgtgattgttcacattggacaactgaacaggcagagcatacttattggaagcagatgcctctgggatcctaaaagtgataccttttcatcttatgttttcagaaattcttctctcttcgctcttgcaaatgtctatgcagtttaccttgagtgattgaaaataagaaatctagctcttacttttgaaaattctgaggcaggctgtatgtctgtacacaaaagttttactgccaaaaactttgagaaagaaacaacactgatatttcaagcaactggaagcttttgaattttttcatattctagtaaagatttggggaggggagggtagccacagaaagaatcttgtttatctaaagcaggaacttgatcttggttttgctggattgctttccatagacatagattcttattaaatatttgttttggtactaattattttaattattctttaattagagtgttacaatttcctgcattgttttttaataaaaagaagctttagaaaaactatggctatataccctgaccaataaatgatagtagaatattcaacatggtatacacaaatgataaataatgtgcctcagtgctgcatataaaagaatactggttttcattttgtacttaataaattgagcagcattcattaagtgcaattattgttacatgtacctgacagttgaaactgctgaggtagaattaatggcttcataacaattatcgtggtcccacgggctgcaagctaaaactagaagctcttgtggcttgcctgcactttacacaattgtgggagaaccgaaagttggctcttcagtaatggaaactataaagtgaataaaggctttttgggacactgaagtagacattgtgatattaaatatacatgatgcttaatactaaatgtgtctgtaacacataaaatcatttattggaaagagacattgcttttaaatatcctaggctaacaaactttttcacaaaatatatggctggcaccttaacaaataaagcatgtgtagttaccattttactcctatgaatttaatactaaagtgacccagtgaggtttttgaatagacgggtgctaaaatttacagggctgaaatagcttattattctgctggttaatgtatcttacgccacggatcatttatttttatgaagctttcaagtctttgtgtgcaagtaaaatgatgttgtggcgttgttcttggatggtaagtggactgcctagaggacatttgttaaaggtcaaagacaaattgtacacatatggagaaaattagcaatgctgtagtcttaaggaaaaaatgatttatcattcatatcaaaaagagtttagcaaatggaaaaccagttaatgctttaattttaaaatgttttggtgtcttacttttccctaaaaatgacatgtagtaaaaaatggatacttttaaaatcccttcccttctgctattttctggcttttaaagtgattattcaaaatgaatttgtcaattttcacttttttttttctgttagtgcattagtgggaatatgtctatgtaataatttatcacaaccaatatttgtcaatctccatagaacagttttcaatctggattagattacacgtataacaagtaaatgagcttcatattttcattacacattggtgaacatctcccttcgtggaacaacagcgggggtaatcatatcactaattttgtatgaataaatgaaaatgaagaaacttctttaacatat

SEQ ID NO: 915 - protein, 179 aa, Homosapiens
MMMSDNAKGRAAHSWKKRGSISSLSNHEFWRKEIHGRIKDSMSTVSYMEEPSQRDDISRLTVQMENTYQLGPPKHFPVVTVNHILKDVVTSYLQVEEYEPELCRQMTKTISEVIKAQVKDLMIPRYKLIVIVHIGQLNRQSILIGSRCLWDPKSDTFSSYVFRNSSLFALANVYAVYLE

SEQ ID NO: 916 - DNA, 2102 bp, Homosapiens
tgaatgaagcctgggacgcgggagccgcgccgcgcgcagtgtctgcagtgccggaggtctgggaggctccgggcgaagcctccctgctgcaggttatgatgatgtcagacaatgctaaaggcagagcagctcattcatggaagaaaagagggagtatttcttctctaagtaatcatgaattttggcgaaaggaaattcatgggcgcatcaaagattctatgagtactgtgtcttatatggaagaacccagtcagcgtgatgatatctctcgccttacagttcagatggaaaacacctatcagttgggttattaaagcccaggtcaaggacttgatgattccacggtataaactaattgtgattgttcacattggacaactgaacaggcagagcatacttattggaagcagatgcctctgggatcctaaaagtgataccttttcatcttatgttttcagaaattcttctctcttcgctcttgcaaatgtctatgcagtttaccttgagtgattgaaaataagaaatctagctcttacttttgaaaattctgaggcaggctgtatgtctgtacacaaaagttttactgccaaaaactttgagaaagaaacaacactgatatttcaagcaactggaagcttttgaattttttcatattctagtaaagatttggggaggggagggtagccacagaaagaatcttgtttatctaaagcaggaacttgatcttggttttgctggattgctttccatagacatagattcttattaaatatttgttttggtactaattattttaattattctttaattagagtgttacaatttcctgcattgttttttaataaaaagaagctttagaaaaactatggctatataccctgaccaataaatgatagtagaatattcaacatggtatacacaaatgataaataatgtgcctcagtgctgcatataaaagaatactggttttcattttgtacttaataaattgagcagcattcattaagtgcaattattgttacatgtacctgacagttgaaactgctgaggtagaattaatggcttcataacaattatcgtggtcccacgggctgcaagctaaaactagaagctcttgtggcttgcctgcactttacacaattgtgggagaaccgaaagttggctcttcagtaatggaaactataaagtgaataaaggctttttgggacactgaagtagacattgtgatattaaatatacatgatgcttaatactaaatgtgtctgtaacacataaaatcatttattggaaagagacattgcttttaaatatcctaggctaacaaactttttcacaaaatatatggctggcaccttaacaaataaagcatgtgtagttaccattttactcctatgaatttaatactaaagtgacccagtgaggtttttgaatagacgggtgctaaaatttacagggctgaaatagcttattattctgctggttaatgtatcttacgccacggatcatttatttttatgaagctttcaagtctttgtgtgcaagtaaaatgatgttgtggcgttgttcttggatggtaagtggactgcctagaggacatttgttaaaggtcaaagacaaattgtacacatatggagaaaattagcaatgctgtagtcttaaggaaaaaatgatttatcattcatatcaaaaagagtttagcaaatggaaaaccagttaatgctttaattttaaaatgttttggtgtcttacttttccctaaaaatgacatgtagtaaaaaatggatacttttaaaatcccttcccttctgctattttctggcttttaaagtgattattcaaaatgaatttgtcaattttcacttttttttttctgttagtgcattagtgggaatatgtctatgtaataatttatcacaaccaatatttgtcaatctccatagaacagttttcaatctggattagattacacgtataacaagtaaatgagcttcatattttcattacacattggtgaacatctcccttcgtggaacaacagcgggggtaatcatatcactaattttgtatgaataaatgaaaatgaagaaacttctttaacatat

SEQ ID NO: 917 - protein, 83 aa, Homosapiens
MISLALQFRWKTPISWVIKAQVKDLMIPRYKLIVIVHIGQLNRQSILIGSRCLWDPKSDTFSSYVFRNSSLFALANVYAVYLE

SEQ ID NO: 918 - DNA, 500 bp, Homosapiens
tgtctgcagtgccggaggtctgggaggctccgggcgaagcctccctgctgcaggttatgatgatgtcagacaatgctaaaggcagagcagctcattcatggaagaaaagagggagtatttcttctctaagtaatcatgaattttggcgaaaggaaattcatgggcgcatcaaagaccctggaagtctgtggattacacatacaatgccttttacaggtgggaaactgactataaaggagtagcaatcccagcacatgtcagaagtaaagctaatttgagttttgtaccacctcttcttctccatgaatttttaatatggtgttcagtagaaaagaaattgagtttttatgaataccttctgtattatgcaattctatgagtactgtgtcttatatggaagaacccagtcagcgtgatgatatctctcgccttacagttcagatggaaaacacctatcagttgggtgtgttcttttatctctcactcctattttaaacttc

SEQ ID NO: 919 - protein, 61 aa, Homosapiens
MMMSDNAKGRAAHSWKKRGSISSLSNHEFWRKEIHGRIKDPGSLWITHTMPFTGGKLTIKE

SEQ ID NO: 920 - DNA, 360 bp, Homosapiens
acctgcgtttccagtgaaatggtaagcaagctcggattttatcctcctcagagtctaatacaatgcttatatagtcttccaatagatctctgaggtgaatctcactgttatctccatttggcaggtggggaaacagagatttatatacattgagtaacctgcccagaatcacacagagaggcagagctggggtgcacacccaggtttatctgatgctagagcttatattctcgaccacatttcatccacgttcagaggagaagcttcaaatgaatcttcttcctcctgcatcccaggaatattagccatatcatcactttggtcatatactaatgtcattgcatgacatgaacatgtgcc

SEQ ID NO: 921 - protein, 30 aa, Homosapiens
MLELIFSTTFHPRSEEKLQMNLLPPASQEY

SEQ ID NO: 922 - DNA, 2045 bp, Homosapiens
ttcaatagagtccacccagaagattaaatccctccatgtttccatactcttttgattagcctatggggtgggtgggtgtgatttgaaattactttttagaaataaattttatgtgtattttcaggtcctcccaaacattttcctgtggtcaccgtcaatcatattttgaaagatgtagtaaccagctatctacaagtagaagaatatgaaccagagctctgtagacagatgactaaaaccatttctgaggttattaaagcccaggtcaaggacttgatgattccacggtataaactaattgtgattgttcacattggacaactgaacaggcagagcatacttattggaagcagatgcctctgggatcctaaaagtgataccttttcatcttatgttttcagaaattcttctctcttcgctcttgcaaatgtctatgcagtttaccttgagtgattgaaaataagaaatctagctcttacttttgaaaattctgaggcaggctgtatgtctgtacacaaaagttttactgccaaaaactttgagaaagaaacaacactgatatttcaagcaactggaagcttttgaattttttcatattctagtaaagatttggggaggggagggtagccacagaaagaatcttgtttatctaaagcaggaacttgatcttggttttgctggattgctttccatagacatagattcttattaaatatttgttttggtactaattattttaattattctttaattagagtgttacaatttcctgcattgttttttaataaaaagaagctttagaaaaactatggctatataccctgaccaataaatgatagtagaatattcaacatggtatacacaaatgataaataatgtgcctcagtgctgcatataaaagaatactggttttcattttgtacttaataaattgagcagcattcattaagtgcaattattgttacatgtacctgacagttgaaactgctgaggtagaattaatggcttcataacaattatcgtggtcccacgggctgcaagctaaaactagaagctcttgtggcttgcctgcactttacacaattgtgggagaaccgaaagttggctcttcagtaatggaaactataaagtgaataaaggctttttgggacactgaagtagacattgtgatattaaatatacatgatgcttaatactaaatgtgtctgtaacacataaaatcatttattggaaagagacattgcttttaaatatcctaggctaacaaactttttcacaaaatatatggctggcaccttaacaaataaagcatgtgtagttaccattttactcctatgaatttaatactaaagtgacccagtgaggtttttgaatagacgggtgctaaaatttacagggctgaaatagcttattattctgctggttaatgtatcttacgccacggatcatttatttttatgaagctttcaagtctttgtgtgcaagtaaaatgatgttgtggcgttgttcttggatggtaagtggactgcctagaggacatttgttaaaggtcaaagacaaattgtacacatatggagaaaattagcaatgctgtagtcttaaggaaaaaatgatttatcattcatatcaaaaagagtttagcaaatggaaaaccagttaatgctttaattttaaaatgttttggtgtcttacttttccctaaaaatgacatgtagtaaaaaatggatacttttaaaatcccttcccttctgctattttctggcttttaaagtgattattcaaaatgaatttgtcaattttcacttttttttttctgttagtgcattagtgggaatatgtctatgtaataatttatcacaaccaatatttgtcaatctccatagaacagttttcaatctggattagattacacgtataacaagtaaatgagcttcatattttcattacacattggtgaacatctcccttcgtggaacaacagcgggggtaatcatatcactaattttgtatgaataaatgaaaatgaagaaacttctttaacatat

SEQ ID NO: 923 - protein, 74 aa, Homosapiens [sequence omitted]

SEQ ID NO: 924 - DNA, 718 bp, Homosapiens
tatttaccatatcagattcacattcagtcctcagcaaaatgaagggctccattttcactctgtttttattctctgtcctatttgccatctcagaagtgcggagcaaggagtctgtgagactctgtgggctagaatacatacggacagtcatctatatctgtgctagctccaggtggagaaggcatcaggaggggatccctcaagctcagcaagctgagacaggaaactccttccagctcccacataaacgtgagttttctgaggaaaatccagcgcaaaaccttccgaaggtggatgcctcaggggaagaccgtctttggggtggacagatgcccactgaagagctttggaagtcaaagaagcattcagtgatgtcaagacaagatttacaaactttgtgttgcactgatggctgttccatgactgatttgagtgctctttgctaagacaagagcaaatacccaatgggtggcagagctttatcacatgtttaattacagtgttttactgcctggtagaacactaatattgtgttattaaaatgatggcttttgggtaggcaaaacttcttttctaaaaggtatagctgagcggttgaaaccacagtgatctctattttctccctttgccaaggttaatgaactgttcttttcaaattctactaatgctttgaaatttcaaatgctgcgcaaaattgcaataaaaatgctataaacca

SEQ ID NO: 925 - protein, 135 aa, Homosapiens; identical to SEQ ID NO: 30

SEQ ID NO: 926 - DNA, 3853 bp, Homosapiens
ctcgtgccgccagccaaccgcgcggccgcttgttgagccagggctccaccgtcgccatgacgcccggcaaacattccggagcctcggcccgagccgctaacggaggagcttgggggtacagggacttcagaggcggccaaaaaaaggggtggtgcaccactccccagctggtcgccaccatgccagtctctccggcaggcagtcacaagcagcagaacttcgggttgaacaatgccacacaaccaaagaagtctattagcttttttgctacaatgaaagcaacttcagtgaaaggatatactggtgcaaatcaaagcagaatggctgtgtccaaaaccgtgcttattccacctgaactgaaaactgtagaaaaaccaaatcccaatataaagacaacacaggtatttgacataaatggaactgatgttactccccgacctctttaccatccagatccacttactggtacagcaaaaccaagtaaactcttgacatcacaagaaggatcacttggatcagaatttatatcttcctatagcctttatcagaatacaataaatcctagtacgttagggcagtttacaaggtcagttttaggaagcagtacagtttctaagtcaagtgtatcagcaagtgaatcaatagcagaagacctggaagaaccatcctataaacgggaaagattgactagtttcacagatttgcaagttataagggcagcacctgaaaaaattgtaacaaaagaagacctggagaagaatatagagataatactcacagagacagaaacactgagattttttgacttgcccacagtcatggtctctgtagaatctgaagaagctgagaaagtaactcagagaaacaagaattatgaagtcctttgtagaaacagattaggcaatgacctatatgttgaaaggatgatgcagactttcaatggagcaccaaagaataaagatgttcaatgtgataaaatcataatggaagataaaggcataatgtccactgcctgggatttgtatgattcttacaatgctatggaacttgtatctttatcagtaaaacaatctgtggttgagtcaagtagtaaagcaaatgtacttcctaaagatcaggaccaaagattgccagggagcactacagaaaaaaatagtgaaactagttctctaatggacatagaaaatgtaattctggcaaaaatccatgaagatgaggaagaccactcagatgcaatattaaaatctgacaaatttcatcaggacttattttttatggaacgggttctgatggaaaatatatttcagcccaaacttgcagcttatcgtcagcttcctgttttaaaagaacctgaacctgaagagcctgaagatgttttagaaagtgcaaaacatgaagaggtagaggaagaatctaagaaggaggaggaagaagaaatacatgcagaagaatcaacaatacccgccaacttggaacgactttggtctttttcctgtgacttaaccaaaggcctcaatgtgagcagccttgcctggaataaaacaaatccagatcttttggctgttggctatgggcactttggatttaaagagcaaaaaagaggactggcttgctgctggtcaataaagaatcccatgtggccagaacgtatttatcagagtccatatggagttactgctgtggatttttcaattggagcacctaaccttttagccgttggctatcacaatggcacaattgcaatttacaatgtacggagcaacagtaatgttccagttctggatagtagtgaatcacctcaaaaacatttgggacctgtatggcaactacagtggatagaacaagatcgaggaacaacaggagatggcaaaagagaaatactagtttctatatcagcagatggaagaatctccaaatgggttatacgaaaaggactagactgttatgatttgatgcgattaaagagaactacagctgccagtaacaaaaaaggaggggaaaaggaaaagaaagatgaagctttgatatctcgacaggctcctggaatgtgttttgcttttcatcccaaggacacaaatatctatttggctggcactgaagaaggtcatattcacaaatgttcttgttcatataatgaacaatacttagatacctacagaggacataagggtccagtgtataaagtgacatggaatccattttgtcatgatgtatttttaagctgttctgcagattggggtgttattatatggcaacaggagaatgtcaagccatctttgagtttttatccagctacttctgttgtttacgacgttgcctggtctccaaaatcatcctatatatttgcagctgcaaatgagaacagggtggagatttgggaccttcatatcagcactttggaccctctgattgtgaatactgctaaccctggaatcaagttcacaaccattctctttgccaaacaaacagattgccttctggtaggagacagtgatggacaggtttctgtgtatgaactgagaaatatgcctactgttttggaaactggccggggagatataatggatactttgcttggatccaagtcaaaccaatcagcataattcatcattcctaatatttttcttgtagttgttttaaaaaaggaattaacatccaatattctgtattacatactgtacaccagattttgatttcagaaaacaatatttgatgtataacttccacttaatttaaatttaataaacttttatttcagagatatttgattagtttacaatctaagagttattcttaagagtttcagtggaattttcttaatttttctaaagatattcctactctcttgatcatattctaagtacatatgagtacatgtacattcttatacaatgtctaaatgggttagaaaattattatacctatagaagcgaaacttggaaattaatagaatcacttaaaccaaaatctttataagacacaattctattgattttaaagcttctgctttccaggctctgttttccagagtttataattacgtagtttttagtagatgaaaataatggattcttgtacctaacattttatcctcttagatctaagagccgaagctatagaactttgttagactatttggcaagcaaaatatatgacagtaaatatcagaattttatggtttgaccagcgcttatcacattcccaattcagtgagaaaaattcatctgggacacaacagggtactcttctctgtttgcccagaatcagctctggattttaagcccagacttcagtggacccagatagaaaatataaagtctctgatctataggccacatcaggatgttattttatgaagagttctagagcaaggttgcggaaatcggggtggagatggggagcagtgactcctccaaatattcattgctaacaggccattctatgcagtttgttttaacaaatcctgggttaaactgaggccacaggacatgatgggctgttctataaagcattctaagtggagaggagacgatagggcatatgaaattcactaaactctctggaaaaaaaatatgtatatattaaaaaccaagactggaatcagtgcaacagtgggaactaccttttacaagtatccattgcttcataaactccatttgtttggaccaatcccttaaacaaaagcaaggcaaattttacatggatttagagcctaggtcaggttattaggattataaattttccactggtatgtcattgtgattatctttgtttttgtctttctgaaagattggattttctataacaccttgtgtaagaaaataaaaaacttgatctaactgaaaaaatgtgt

SEQ ID NO: 927 - protein, 848 aa, Homosapiens
MTPGKHSGASARAANGGAWGYRDFRGGQKKGWCTTPQLVATMPVSPAGSHKQQNFGLNNATQPKKSISFFATMKATSVKGYTGANQSRMAVSKTVLIPPELKTVEKPNPNIKTTQVFDINGTDVTPRPLYHPDPLTGTAKPSKLLTSQEGSLGSEFISSYSLYQNTINPSTLGQFTRSVLGSSTVSKSSVSASESIAEDLEEPSYKRERLTSFTDLQVIRAAPEKIVTKEDLEKNIEIILTETETLRFFDLPTVMVSVESEEAEKVTQRNKNYEVLCRNRLGNDLYVERMMQTFNGAPKNKDVQCDKIIMEDKGIMSTAWDLYDSYNAMELVSLSVKQSVVESSSKANVLPKDQDQRLPGSTTEKNSETSSLMDIENVILAKIHEDEEDHSDAILKSDKFHQDLFFMERVLMENIFQPKLAAYRQLPVLKEPEPEEPEDVLESAKHEEVEEESKKEEEEEIHAEESTIPANLERLWSFSCDLTKGLNVSSLAWNKTNPDLLAVGYGHFGFKEQKRGLACCWSIKNPMWPERIYQSPYGVTAVDFSIGAPNLLAVGYHNGTIAIYNVRSNSNVPVLDSSESPQKHLGPVWQLQWIEQDRGTTGDGKREILVSISADGRISKWVIRKGLDCYDLMRLKRTTAASNKKGGEKEKKDEALISRQAPGMCFAFHPKDTNIYLAGTEEGHIHKCSCSYNEQYLDTYRGHKGPVYKVTWNPFCHDVFLSCSADWGVIIWQQENVKPSLSFYPATSVVYDVAWSPKSSYIFAAANENRVEIWDLHISTLDPLIVNTANPGIKFTTILFAKQTDCLLVGDSDGQVSVYELRNMPTVLETGRGDIMDTLLGSKSNQSA

SEQ ID NO: 928 - DNA, 667 bp, Homosapiens
tgaagaaggtcatattcacaaatgttcttgttcatataatgaacaatacttagatacctacagaggacataagggtccagtgtataaagtgacatggaatccattttgtcatgatgtatttttaagctgttctgcagattggggtgttattatatggcaacaggagaatgtcaagccatctttgagtttttatccagctacttctgttgtttacgacgttgcctggtctccaaaatcatcctatatatttgcagctgcaaatgagaacagggtggagatttgggaccttcatatcagcactttggaccctctgattgtgaatactgctaaccctggaatcaagttcacaaccattctctttgccaaacaaacagattgccttctggtaggagacagtgatggacaggtttctgtgtatgaactgagaaatatgcctactgttttggaaactggccggggagatataatggatactttgcttggatccaagtcaaaccaatcagcataattcatcattcctaatatttttcttgtagttgttttaaaaaaggaattaacatccaatattctgtattacatactgtacaccagattttgatttcagaaaacaatatttgatgtataacttccacttaatttaaatttaataaacttttatttcagagat

SEQ ID NO: 929 - protein, 36 aa, Homosapiens
MATGECQAIFEFLSSYFCCLRRCLVSKIILYICSCK

SEQ ID NO: 930 - DNA, 1746 bp, Homosapiens
ctcgtgccgccagccaaccgcgcggccgcttgttgagccagggctccaccgtcgccatgacgcccggcaaacattccggagcctcggcccgagccgctaacggaggagcttgggggtacagggacttcagaggcggccaaaaaaaggggtggtgcaccactccccagctggtcgccaccatgccagtctctccggcaggcagtcacaagcagcagaacttcgggttgaacaatgccacacaaccaaagaagtctattagcttttttgctacaatgaaagcaacttcagtgaaaggatatactggtgcaaatcaaagcagaatggctgtgtccaaaaccgtgcttattccacctgaactgaaaactgtagaaaaaccaaatcccaatataaagacaacacaggtatttgacataaatggaactgatgttactccccgacctctttaccatccagatccacttactggtacagcaaaaccaagtaaactcttgacatcacaagaaggatcacttggatcagaatttatatcttcctatagcctttatcagaatacaataaatcctagtacgttagggcagtttacaaggtcagttttaggaagcagtacagtttctaagtcaagtgtatcagcaagtgaatcaatagcagaagacctggaagaaccatcctataaacgggaaagattgactagtttcacagatttgcaagttataagggcagcacctgaaaaaattgtaacaaaagaagacctggagaagaatatagagataatactcacagagacagaaacactgagattttttgacttgcccacagtcatggtctctgtagaatctgaagaagctgagaaagtaactcagagaaacaagaattatgaagtcctttgtagaaacagattaggcaatgacctatatgttgaaaggatgatgcagactttcaatggagcaccaaagaataaagatgttcaatgtgataaaatcataatggaagataaaggcataatgtccactgcctgggatttgtatgattcttacaatgctatggaacttgtatctttatcagtaaaacaatctgtggttgagtcaagtagtaaagcaaatgtacttcctaaagatcaggaccaaagattgccagggagcactacagaaaaaaatagtgaaactagttctctaatggacatagaaaatgtaattctggcaaaaatccatgaagatgaggaagaccactcagatgcaatattaaaatctgacaaatttcatcaggacttattttttatggaacgggttctgatggaaaatatatttcagcccaaacttgcagcttatcgtcagcttcctgttttaaaagaacctgaacctgaagagcctgaagatgttttagaaagtgcaaaacatgaagaggtagaggaagaatctaagaaggaggaggaagaagaaatacatgcagaagaatcaacaatacccgccaacttggaacgactttggtctttttcctgtgacttaaccaaaggcctcaatgtgagcagccttgcctggaataaaacaaatccagatcttttggctgttggctatgggcactttggatttaaagagcaaaaaagaggactggcttgctgctggtcaataaagaatcccatggtaacccaaacaagaataagaagcatttttatctggctgttgacaaaattctcataaaatatataattacatgtaataattaaataaagtctagaaaattttatcaatc

SEQ ID NO: 931 - protein, 545 aa, Homosapiens
MTPGKHSGASARAANGGAWGYRDFRGGQKKGWCTTPQLVATMPVSPAGSHKQQNFGLNNATQPKKSISFFATMKATSVKGYTGANQSRMAVSKTVLIPPELKTVEKPNPNIKTTQVFDINGTDVTPRPLYHPDPLTGTAKPSKLLTSQEGSLGSEFISSYSLYQNTINPSTLGQFTRSVLGSSTVSKSSVSASESIAEDLEEPSYKRERLTSFTDLQVIRAAPEKIVTKEDLEKNIEIILTETETLRFFDLPTVMVSVESEEAEKVTQRNKNYEVLCRNRLGNDLYVERMMQTFNGAPKNKDVQCDKIIMEDKGIMSTAWDLYDSYNAMELVSLSVKQSVVESSSKANVLPKDQDQRLPGSTTEKNSETSSLMDIENVILAKIHEDEEDHSDAILKSDKFHQDLFFMERVLMENIFQPKLAAYRQLPVLKEPEPEEPEDVLESAKHEEVEEESKKEEEEEIHAEESTIPANLERLWSFSCDLTKGLNVSSLAWNKTNPDLLAVGYGHFGFKEQKRGLACCWSIKNPMVTQTRIRSIFIWLLTKFS

SEQ ID NO: 932 - DNA, 1508 bp, Homosapiens
gccatgacgcccggcaaacattccggagcctcggcccgagccgctaacggaggagcttgggggtacagggacttcagaggcggccaaaaaaaggggtggtgcaccactccccagctggtcgccaccatgccagtctctccggcaggcagtcacaagcagcagaacttcgggttgaacaatgccacacaaccaaagaagtctattagcttttttgctacaatgaaagcaacttcagtgaaaggatatactggtgcaaatcaaagcagaatggctgtgtccaaaaccgtgcttattccacctgaactgaaaactgtagaaaaaccaaatcccaatataaagacaacacaggtatttgacataaatggaactgatgttactccccgacctctttaccatccagatccacttactggtacagcaaaaccaagtaaactcttgacatcacaagaaggatcacttggatcagaatttatatcttcctatagcctttatcagaatacaataaatcctagtacgttagggcagtttacaaggtcagttttaggaagcagtacagtttctaagtcaagtgtatcagcaagtgaatcaatagcagaagacctggaagaaccatcctataaacgggaaagattgactagtttcacagatttgcaagttataagggcagcacctgaaaaaattgtaacaaaagaagacctggagaagaatatagagataatactcacagagacagaaacactgagattttttgacttgcccacagtcatggtctctgtagaatctgaagaagctgagaaagtaactcagagaaacaagaattatgaagtcctttgtagaaacagattaggcaatgacctatatgttgaaaggatgatgcagactttcaatggagcaccaaagaataaagatgttcaatgtgataaaatcataatggaagataaaggtaatttctatcattctgcttgataaactataatgttctaatatacattttttgagtctgtcaatcgacaagtgaatattgaaatgtataaagcaaaaataaaaataatttggccaaaccacaacagtagttggacactgtgttctatagctttcagaatttgacatgttaagtaataaatatatagatttgaataacataattattcatcttggtttttatgcatactatatcatagaactttatactctttaaacgtttatataaactgattatttactatgtcacaaagaatatcagccataactattaacattttaaatgtgtcagacactatgtccttcacatgtattaactggtttaatttttacagcaaccctatgaggtagatactattatgcttccccattttatagatgaggaaacaggcaaagagaagtttgctaactgttctggttctagagcttgtgcacttaactactatacttaccacctctcactgtgtacaaattaacaaccctgagcacattgcatagccaaaatctgtagggtgtagccaaagaag

SEQ ID NO: 933 - protein, 320 aa, Homosapiens
MTPGKHSGASARAANGGAWGYRDFRGGQKKGWCTTPQLVATMPVSPAGSHKQQNFGLNNATQPKKSISFFATMKATSVKGYTGANQSRMAVSKTVLIPPELKTVEKPNPNIKTTQVFDINGTDVTPRPLYHPDPLTGTAKPSKLLTSQEGSLGSEFISSYSLYQNTINPSTLGQFTRSVLGSSTVSKSSVSASESIAEDLEEPSYKRERLTSFTDLQVIRAAPEKIVTKEDLEKNIEIILTETETLRFFDLPTVMVSVESEEAEKVTQRNKNYEVLCRNRLGNDLYVERMMQTFNGAPKNKDVQCDKIIMEDKGNFYHSA

SEQ ID NO: 934 - DNA, 612 bp, Homosapiens
agggaaaagagaaaaaaataagataggagacctggaattatggatggagaagagtccctgagacaccagtgacaagtttcagagttcacataaaaggaacaatgccacacaaccaaagaagtctattagcttttttgctacaatgaaagcaacttcagtgaaaggatatactggtgcaaatcaaagcagaatggctgtgtccaaaaccgtgcttattccacctgaactgaaaactgtagaaaaaccaaatcccaatataaagacaacacaggtaatattcttagaattctgagtttatttgaaaatggcactgtgaaaaactcaattgaaatgttaaagatagaaaatatgctgctttcagataatcactcataattttgaaatactgattttgttaatttttaccacatattattccatacaacataatattgacacttggctcctataactagttattgataagaagaatattagagtggaatgagaaaagtctattcatgaccttaagaactatttgcttatggtattaattatatacattacaactatctttcactgttgtcagcaatatagtcttgaaaatacaataaaattatttgtcataaagtc

SEQ ID NO: 935 - protein, 49 aa, Homosapiens
MKATSVKGYTGANQSRMAVSKTVLIPPELKTVEKPNPNIKTTQVIFLEF

SEQ ID NO: 936 - DNA, 194 bp, Homosapiens
ccggcaggcagtcacaagcagcagaacttcgggttgacttaatcctgaccttggaaaggatctcatgaagcaaatatttgtcagttttccactttctcttttcctgtgttagattcttgcctttagctttacaatactggacaagtctcccattgcaataaaaataactgctgattgttcacctcttcatccta

SEQ ID NO: 937 - protein, 30 aa, Homosapiens
SKYLSVFHFLFSCVRFLPLALQYWTSLPLQ

SEQ ID NO: 938 - DNA, 707 bp, Homosapiens
ctgccgtgggggaggggaaggagagaaaggggactgaggacacctcaggagcccctcatcccaaaattccctaagtaatttgttttctcttcccctctccaatctcctccacctcagctaatctttcttcagcggaacttgttgagagttcttgggagagaaccttgcattctctcttgaatatggtactcacgcttttgtccatcctaccactccatcaaaacagcttctatgaaagccagcaatagccatgcaaccaaatacaatggctgatccacagtttcattctttttgaatgaagcagtgtcggtcgggtttatcgcttctcgatctttgaaaagctttatttgggttctgagaaaccactcttcctagttcttgtcttggttcatggtttcacctttcccagatcctttgctggtatctgttcctcactaccataactaaatacagtcatgcatcgatggtgataccttctgagaaataccttgttagccaatttcagcattttgcaaatatcttctagtgtacttacacaaacgtagatgtatgggctactatacacctaggctacaattgtatagtagactgtacacctaagctatagtaggctatacatctaggtttgtgtaagtacactaaatggtgtttgcataatgatgaaaatgcatttgttgcttctaggctaccaacctgcatagcatgtt

SEQ ID NO: 939 - protein, 47 aa, Homosapiens
SSVGRVYRFSIFEKLYLGSEKPLFLVLVLVHGFTFPRSFAGICSSLP

SEQ ID NO: 940 - DNA, 4609 bp, Homosapiens
gactggaagaaggaggcgggcggcccgggcctcaggcccctcccaggctctgagtctcccggctgcaggcggatggatggggcttcttcaggcggtggcggcagcagcgaaggtggcggcggcagcagcggcagcggctatggtgtggtcgctcgattctcccagtgcctggctgagtttcggacgtggttaagaaccaactggttgaggttcaatgcagacaagacggatgtgatgctgaaaatgtgcatcagatgtttatgtttaattggtttacagactgtctgtggactcttttcctgtcaaattaccagccatctgttgaatcttcaagtccaggaggttcagcaacatcagatgaccatgaatttgatccatcagctgacatgctggttcatgattttgatgatgaacgaacattagaagaggaagaaatgatggaaggagaaacaaacttcagctctgaaatagaagatcttgcaagggaaggcgacatgccaattcatgaacttctcagcctttatggttatggtagtactgttcgactacctgaagaagatgaggaagaggaagaagaggaagaagaaggtgaagatgatgaagatgctgataatgatgacaacagtggctgtagtggggaaaataaagaggagaatataaaggattcatcaggtcaggaggatgaaactcagtcttccaatgatgatccatcacaatctgttgcttctcaagatgcccaggaaataatccgcccacgtcgatgtaaatattttgatacaaatagtgaagtagaagaagaatctgaagaagatgaagattatattccatcagaagactggaaaaaggagattatggtgggctccatgtttcaagcagaaattccagttggcatttgtagatacaaagaaaatgaaaaagtatatgaaaatgatgatcagctcctgtgggaccctgagtacttaccagaagataaagtgattatatttcttaaagatgcatctagaagaacaggtgatgagaagggtgtagaagcaattcctgaaggatctcacataaaagacaatgaacaggctttatatgaattggttaaatgcaattttgatacagaagaagcattgagaagattaagatttaatgtaaaagcagctagagaggaattatctgtttggacagaggaagagtgtagaaattttgaacaagggctgaaggcctatggaaaggattttcatttgattcaggctaataaagtccgaacaaggtcagttggtgaatgtgtagcattctattacatgtggaaaaaatctgaacgttatgatttctttgctcagcaaacacgatttggaaagaagaaatataatcttcatcctggtgtaacggattacatggatcgtcttctagacgaaagtgaaagtgctgcatctagtcgagcaccatcccctcccccaactgcatcaaacagtagtaacagccagtctgagaaagaagatggcactgtaagcactgctaatcaaaatggagtgtcatctaatggaccaggtgaaatattaaacaaagaggaagtaaaagttgaagggttacacattaatggaccaacaggtggaaataagaaaccacttcatgcagatatggatactaatggttatgaaacagataaccttaccactgacccaaaacttgcccatatgactgcaagaaatgaaaatgattttgatgaaaaaagtgagagacctgccaaaaggcgaagggtaaacagcaatggaaaagaaagtccaggttcttctgaatttttccaagaagcagtctcacatgggaaatttgaagaacttgaaaacacagatgactaaattttagacctattttactttctttggagtaaattctggtgtgactaaaattttcagggttgatgggttaccttaaaaagttgatttccttgaagcagtttgaaaatttgaattgagtcttaactttaggaaatgaggtttcataattctgccttttgcagatttttttactttaaagctgtcagactcttttaagggtattttaaaaattagtaaatttgaatgaactaaagatatatctctaccttctcatttgaatatctttagttcattcagatttactaattttggtaaatctgaatgaactaaagatgtatctgtaccttctcatttgatgtattaatcataaaatttcactacaaggtaatttttgcttagtttgatggatgaatgggaaactcaagtccaaatttctgcttaataccaatttctctgagtttcttgaaatgtctttaaaacagacatttttctcaccaaacagtttgagtatctttattaaggaaacccttacgaatcctgaaaattatgctagcatgatttttttatatatagaagtttaaaaataaaccaggtcaggtttgtatatgtaaaattgttgacatcaatgatgtctttccatattcttatctgggcttaagaaatacattctgtatttttccagattctttgtagcctttgaaagatttttacagtacatatgtcttgactgagctgtcctttcttaatacaaaagcgtgtataattttcttaacttgtacagttggtaaacttttatgagaggaattgttattctgagtctgtcagctttcattttattttgctaaggtttttctaatgaatttttaagtgtttgtgtagtaattaagtcatatttcttatccaggtggttaaagcattcataaaggattataaaatttttttttttttttttttttttaaatttctacttaagggcaagtaatttgagaattctgaaattaagcatgatgcttagattgcagtttgttttgcatttgctataattttcaaaattatttttgaagcaagacaaaagtttaatgtcagcttaagtgcttaaatatatcatgctgaccagaatcctgttatttttatatgcatcataaaatttcccatttctgcattaaataaacagaggaggggggtcaagtgatacttagatattggcacacacaaggaacaactgttggcaggcagtatcgattttatgaagagaaagtgaagtttgaaaacttttcaaacttttctagttacaatccaatttttcagatttgataatgcttttccaaagtgaaaataagatacacaataatcattgctctgtgtgattacagataggattatccatctgcatagccttgtaaaagtgccattttatttttagtgctaaattcttgttaaataatgtagttttatatagctgatagaccaacctatatccaaacttttataaaatattaattattcttgtttttctcacacaggcatactccaaatgcttcttccagttcatttttcagccatcagttcaagagccaatgcctttttaaaataaagcttctgtggtcttgtttttaatggctcaactgtctgatgtaattgagtgaaggtttgcactgagaaattagcattcaggccttacccccatgaagtattactgttaacatatgttcggactgcttcccttcaccaatgtgaacaactttttttcccaaacagtgttaaaagccactttgcaacacttgacttcatcttaatgtacattcactgttgttacatacatatctaagtaaatcaaagttttgggtggaagtgttgagaagtatgagttttttgttgtttttgttttacttaaaacttttaatttatccagaatggcagtagctttagcaagcagatggtcacaatctgttttctaaatcattttttattaaatgaatccaaagtatcctagctctttgtcaaagatggtctgtagaaatgtttttaaagattagggatgctgtactttttgaattgttgcagtgttggagatgccattttcacctttttaaaaagatgcattttatttgcaggtttgtgaagttcttgcaaactcttactacagaaatgttttaaatacattctcaggcatgtttgcaaaaatatggcacatgtatacattttaggaaatgttacttttgttaatctttaaaaaatacacctaatgaaagacattccactattatgcgtaatgctcagctttttgtaaagaaatatttaattgtattttgtgtttatacaggtatttcacacaataatttgttcttaatgcagccactataacttgataagtcattgcactatttaaaaagttttagtaatatcatgaatttaatttgcttaagatttagtacatttcagaacttttgaacttttgacaaattgcattggaaaaagaagtctgttaatagtgatttagtctccccgcctcattcccacccccaacaaagcactatcattttcatttggaatgggtattttctgtttcatgatgtattttcaaatagagttcaggatctgcaattcagttcaacacaagtttgttgagctttaaaatgtatttgaagtaatatttaaataggcatttaaaatttcaaattagatgttaaatttatgcatagtaattttgcactgtaaaataattcccttctcccattccttgtctgccattctgaatatgcttattaaaatatttttttaaacat

SEQ ID NO: 941 - protein, 529 aa, Homosapiens
MFMFNWFTDCLWTLFLSNYQPSVESSSPGGSATSDDHEFDPSADMLVHDFDDERTLEEEEMMEGETNFSSEIEDLAREGDMPIHELLSLYGYGSTVRLPEEDEEEEEEEEEGEDDEDADNDDNSGCSGENKEENIKDSSGQEDETQSSNDDPSQSVASQDAQEIIRPRRCKYFDTNSEVEEESEEDEDYIPSEDWKKEIMVGSMFQAEIPVGICRYKENEKVYENDDQLLWDPEYLPEDKVIIFLKDASRRTGDEKGVEAIPEGSHIKDNEQALYELVKCNFDTEEALRRLRFNVKAAREELSVWTEEECRNFEQGLKAYGKDFHLIQANKVRTRSVGECVAFYYMWKKSERYDFFAQQTRFGKKKYNLHPGVTDYMDRLLDESESAASSRAPSPPPTASNSSNSQSEKEDGTVSTANQNGVSSNGPGEILNKEEVKVEGLHINGPTGGNKKPLHADMDTNGYETDNLTTDPKLAHMTARNENDFDEKSERPAKRRRVNSNGKESPGSSEFFQEAVSHGKFEELENTDD

SEQ ID NO: 942 - DNA, 4533 bp, Homosapiens
ctggaagaaggaggcgggcggcccgggcctcaggcccctcccaggctctgagtctcccggctgcaggcggatggatggggcttcttcaggcggtggcggcagcagcgaaggtggcggcggcagcagcggcagcggctatggtgtggtcgctcgattctcccagtgcctggctgagtttcggacgtggttaagaaccaactggttgaggttcaatgcagacaagacggatgtgatgctgccatctgttgaatcttcaagtccaggaggttcagcaacatcagatgaccatgaatttgatccatcagctgacatgctggttcatgattttgatgatgaacgaacattagaagaggaagaaatgatggaaggagaaacaaacttcagctctgaaatagaagatcttgcaagggaaggcgacatgccaattcatgaacttctcagcctttatggttatggtagtactgttcgactacctgaagaagatgaggaagaggaagaagaggaagaagaaggtgaagatgatgaagatgctgataatgatgacaacagtggctgtagtggggaaaataaagaggagaatataaaggattcatcaggtcaggaggatgaaactcagtcttccaatgatgatccatcacaatctgttgcttctcaagatgcccaggaaataatccgcccacgtcgatgtaaatattttgatacaaatagtgaagtagaagaagaatctgaagaagatgaagattatattccatcagaagactggaaaaaggagattatggtgggctccatgtttcaagcagaaattccagttggcatttgtagatacaaagaaaatgaaaaagtatatgaaaatgatgatcagctcctgtgggaccctgagtacttaccagaagataaagtgattatatttcttaaagatgcatctagaagaacaggtgatgagaagggtgtagaagcaattcctgaaggatctcacataaaagacaatgaacaggctttatatgaattggttaaatgcaattttgatacagaagaagcattgagaagattaagatttaatgtaaaagcagctagagaggaattatctgtttggacagaggaagagtgtagaaattttgaacaagggctgaaggcctatggaaaggattttcatttgattcaggctaataaagtccgaacaaggtcagttggtgaatgtgtagcattctattacatgtggaaaaaatctgaacgttatgatttctttgctcagcaaacacgatttggaaagaagaaatataatcttcatcctggtgtaacggattacatggatcgtcttctagacgaaagtgaaagtgctgcatctagtcgagcaccatcccctcccccaactgcatcaaacagtagtaacagccagtctgagaaagaagatggcactgtaagcactgctaatcaaaatggagtgtcatctaatggaccaggtgaaatattaaacaaagaggaagtaaaagttgaagggttacacattaatggaccaacaggtggaaataagaaaccacttcatgcagatatggatactaatggttatgaaacagataaccttaccactgacccaaaacttgcccatatgactgcaagaaatgaaaatgattttgatgaaaaaagtgagagacctgccaaaaggcgaagggtaaacagcaatggaaaagaaagtccaggttcttctgaatttttccaagaagcagtctcacatgggaaatttgaagaacttgaaaacacagatgactaaattttagacctattttactttctttggagtaaattctggtgtgactaaaattttcagggttgatgggttaccttaaaaagttgatttccttgaagcagtttgaaaatttgaattgagtcttaactttaggaaatgaggtttcataattctgccttttgcagatttttttactttaaagctgtcagactcttttaagggtattttaaaaattagtaaatttgaatgaactaaagatatatctctaccttctcatttgaatatctttagttcattcagatttactaattttggtaaatctgaatgaactaaagatgtatctgtaccttctcatttgatgtattaatcataaaatttcactacaaggtaatttttgcttagtttgatggatgaatgggaaactcaagtccaaatttctgcttaataccaatttctctgagtttcttgaaatgtctttaaaacagacatttttctcaccaaacagtttgagtatctttattaaggaaacccttacgaatcctgaaaattatgctagcatgatttttttatatatagaagtttaaaaataaaccaggtcaggtttgtatatgtaaaattgttgacatcaatgatgtctttccatattcttatctgggcttaagaaatacattctgtatttttccagattctttgtagcctttgaaagatttttacagtacatatgtcttgactgagctgtcctttcttaatacaaaagcgtgtataattttcttaacttgtacagttggtaaacttttatgagaggaattgttattctgagtctgtcagctttcattttattttgctaaggtttttctaatgaatttttaagtgtttgtgtagtaattaagtcatatttcttatccaggtggttaaagcattcataaaggattataaaatttttttttttttttttttttttaaatttctacttaagggcaagtaatttgagaattctgaaattaagcatgatgcttagattgcagtttgttttgcatttgctataattttcaaaattatttttgaagcaagacaaaagtttaatgtcagcttaagtgcttaaatatatcatgctgaccagaatcctgttatttttatatgcatcataaaatttcccatttctgcattaaataaacagaggaggggggtcaagtgatacttagatattggcacacacaaggaacaactgttggcaggcagtatcgattttatgaagagaaagtgaagtttgaaaacttttcaaacttttctagttacaatccaatttttcagatttgataatgcttttccaaagtgaaaataagatacacaataatcattgctctgtgtgattacagataggattatccatctgcatagccttgtaaaagtgccattttatttttagtgctaaattcttgttaaataatgtagttttatatagctgatagaccaacctatatccaaacttttataaaatattaattattcttgtttttctcacacaggcatactccaaatgcttcttccagttcatttttcagccatcagttcaagagccaatgcctttttaaaataaagcttctgtggtcttgtttttaatggctcaactgtctgatgtaattgagtgaaggtttgcactgagaaattagcattcaggccttacccccatgaagtattactgttaacatatgttcggactgcttcccttcaccaatgtgaacaactttttttcccaaacagtgttaaaagccactttgcaacacttgacttcatcttaatgtacattcactgttgttacatacatatctaagtaaatcaaagttttgggtggaagtgttgagaagtatgagttttttgttgtttttgttttacttaaaacttttaatttatccagaatggcagtagctttagcaagcagatggtcacaatctgttttctaaatcattttttattaaatgaatccaaagtatcctagctctttgtcaaagatggtctgtagaaatgtttttaaagattagggatgctgtactttttgaattgttgcagtgttggagatgccattttcacctttttaaaaagatgcattttatttgcaggtttgtgaagttcttgcaaactcttactacagaaatgttttaaatacattctcaggcatgtttgcaaaaatatggcacatgtatacattttaggaaatgttacttttgttaatctttaaaaaatacacctaatgaaagacattccactattatgcgtaatgctcagctttttgtaaagaaatatttaattgtattttgtgtttatacaggtatttcacacaataatttgttcttaatgcagccactataacttgataagtcattgcactatttaaaaagttttagtaatatcatgaatttaatttgcttaagatttagtacatttcagaacttttgaacttttgacaaattgcattggaaaaagaagtctgttaatagtgatttagtctccccgcctcattcccacccccaacaaagcactatcattttcatttggaatgggtattttctgtttcatgatgtattttcaaatagagttcaggatctgcaattcagttcaacacaagtttgttgagctttaaaatgtatttgaagtaatatttaaataggcatttaaaatttcaaattagatgttaaatttatgcatagtaattttgcactgtaaaataattcccttctcccattccttgtctgccattctgaatatgcttattaaaatatttttttaaacat

SEQ ID NO: 943 - protein, 565 aa, Homosapiens
MDGASSGGGGSSEGGGGSSGSGYGVVARFSQCLAEFRTWLRTNWLRFNADKTDVMLPSVESSSPGGSATSDDHEFDPSADMLVHDFDDERTLEEEEMMEGETNFSSEIEDLAREGDMPIHELLSLYGYGSTVRLPEEDEEEEEEEEEGEDDEDADNDDNSGCSGENKEENIKDSSGQEDETQSSNDDPSQSVASQDAQEIIRPRRCKYFDTNSEVEEESEEDEDYIPSEDWKKEIMVGSMFQAEIPVGICRYKENEKVYENDDQLLWDPEYLPEDKVIIFLKDASRRTGDEKGVEAIPEGSHIKDNEQALYELVKCNFDTEEALRRLRFNVKAAREELSVWTEEECRNFEQGLKAYGKDFHLIQANKVRTRSVGECVAFYYMWKKSERYDFFAQQTRFGKKKYNLHPGVTDYMDRLLDESESAASSRAPSPPPTASNSSNSQSEKEDGTVSTANQNGVSSNGPGEILNKEEVKVEGLHINGPTGGNKKPLHADMDTNGYETDNLTTDPKLAHMTARNENDFDEKSERPAKRRRVNSNGKESPGSSEFFQEAVSHGKFEELENTDD

SEQ ID NO: 944 - DNA, 2723 bp, Homosapiens
ctggaagaaggaggcgggcggcccgggcctcaggcccctcccaggctctgagtctcccggctgcaggcggatggatggggcttcttcaggcggtggcggcagcagcgaaggtggcggcggcagcagcggcagcggctatggtgtggtcgctcgattctcccagtgcctggctgagtttcggacgtggttaagaaccaactggttgaggttcaatgcagacaagacggatgtgatgctgccatctgttgaatcttcaagtccaggaggttcagcaacatcagatgaccatgaatttgatccatcagctgacatgctggttcatgattttgatgatgaacgaacattagaagaggaagaaatgatggaaggagaaacaaacttcagctctgaaatagaagatcttgcaagggaaggcgacatgccaattcatgaacttctcagcctttatggttatggtagtactgttcgactacctgaagaagatgaggaagaggaagaagaggaagaagaaggtgaagatgatgaagatgctgataatgatgacaacagtggctgtagtggggaaaataaagaggagaatataaaggattcatcaggtcaggaggatgaaactcagtcttccaatgatgatccatcacaatctgttgcttctcaagatgcccaggaaataatccgcccacgtcgatgtaaatattttgatacaaatagtgaagtagaagaagaatctgaagaagatgaagattatattccatcagaagactggaaaaaggagattatggtgggctccatgtttcaagcagaaattccagttggcatttgtagatacaaagaaaatgaaaaagtatatgaaaatgatgatcagctcctgtgggaccctgagtacttaccagaagataaagtgattatatttcttaaagatgcatctagaagaacaggtgatgagaagggtgtagaagcaattcctgaaggatctcacataaaagacaatgaacaggctttatatgaattggttaaatgcaattttgatacagaagaagcattgagaagattaagatttaatgtaaaagcagctagagaggaattatctgtttggacagaggaagagtgtagaaattttgaacaagggctgaaggcctatggaaaggattttcatttgattcaggctaataaagtccgaacaaggtcagttggtgaatgtgtagcattctattacatgtggaaaaaatctgaacgttatgatttctttgctcagcaaacacgatttggaaagaagaaatataatcttcatcctggtgtaacggattacatggatcgtcttctagacgaaagtgaaagtgctgcatctagtcgagcaccatcccctcccccaactgcatcaaacagtagtaacagccagtctgagaaagaagatggcactgtaagcactgctaatcaaaatggagtgtcatctaatggaccaggcatactccaaatgcttcttccagttcatttttcagccatcagttcaagagccaatgcctttttaaaataaagcttctgtggtcttgtttttaatggctcaactgtctgatgtaattgagtgaaggtttgcactgagaaattagcattcaggccttacccccatgaagtattactgttaacatatgttcggactgcttcccttcaccaatgtgaacaactttttttcccaaacagtgttaaaagccactttgcaacacttgacttcatcttaatgtacattcactgttgttacatacatatctaagtaaatcaaagttttgggtggaagtgttgagaagtatgagttttttgttgtttttgttttacttaaaacttttaatttatccagaatggcagtagctttagcaagcagatggtcacaatctgttttctaaatcattttttattaaatgaatccaaagtatcctagctctttgtcaaagatggtctgtagaaatgtttttaaagattagggatgctgtactttttgaattgttgcagtgttggagatgccattttcacctttttaaaaagatgcattttatttgcaggtttgtgaagttcttgcaaactcttactacagaaatgttttaaatacattctcaggcatgtttgcaaaaatatggcacatgtatacattttaggaaatgttacttttgttaatctttaaaaaatacacctaatgaaagacattccactattatgcgtaatgctcagctttttgtaaagaaatatttaattgtattttgtgtttatacaggtatttcacacaataatttgttcttaatgcagccactataacttgataagtcattgcactatttaaaaagttttagtaatatcatgaatttaatttgcttaagatttagtacatttcagaacttttgaacttttgacaaattgcattggaaaaagaagtctgttaatagtgatttagtctccccgcctcattcccacccccaacaaagcactatcattttcatttggaatgggtattttctgtttcatgatgtattttcaaatagagttcaggatctgcaattcagttcaacacaagtttgttgagctttaaaatgtatttgaagtaatatttaaataggcatttaaaatttcaaattagatgttaaatttatgcatagtaattttgcactgtaaaataattcccttctcccattccttgtctgccattctgaatatgcttattaaaatatttttttaaacat

SEQ ID NO: 945 - protein, 486 aa, Homosapiens
MDGASSGGGGSSEGGGGSSGSGYGVVARFSQCLAEFRTWLRTNWLRFNADKTDVMLPSVESSSPGGSATSDDHEFDPSADMLVHDFDDERTLEEEEMMEGETNFSSEIEDLAREGDMPIHELLSLYGYGSTVRLPEEDEEEEEEEEEGEDDEDADNDDNSGCSGENKEENIKDSSGQEDETQSSNDDPSQSVASQDAQEIIRPRRCKYFDTNSEVEEESEEDEDYIPSEDWKKEIMVGSMFQAEIPVGICRYKENEKVYENDDQLLWDPEYLPEDKVIIFLKDASRRTGDEKGVEAIPEGSHIKDNEQALYELVKCNFDTEEALRRLRFNVKAAREELSVWTEEECRNFEQGLKAYGKDFHLIQANKVRTRSVGECVAFYYMWKKSERYDFFAQQTRFGKKKYNLHPGVTDYMDRLLDESESAASSRAPSPPPTASNSSNSQSEKEDGTVSTANQNGVSSNGPGILQMLLPVHFSAISSRANAFLK

SEQ ID NO: 946 - DNA, 2797 bp, Homosapiens
ctggaagaaggaggcgggcggcccgggcctcaggcccctcccaggctctgagtctcccggctgcaggcggatggatggggcttcttcaggcggtggcggcagcagcgaaggtggcggcggcagcagcggcagcggctatggtgtggtcgctcgattctcccagtgcctggctgagtttcggacgtggttaagaaccaactggttgaggttcaatgcagacaagacggatgtgatgctgaaaatgtgcatcagatgtttatgtttaattggtttacagactgtctgtggactcttttcctgtcaaattaccagccatctgttgaatcttcaagtccaggaggttcagcaacatcagatgaccatgaatttgatccatcagctgacatgctggttcatgattttgatgatgaacgaacattagaagaggaagaaatgatggaaggagaaacaaacttcagctctgaaatagaagatcttgcaagggaaggcgacatgccaattcatgaacttctcagcctttatggttatggtagtactgttcgactacctgaagaagatgaggaagaggaagaagaggaagaagaaggtgaagatgatgaagatgctgataatgatgacaacagtggctgtagtggggaaaataaagaggagaatataaaggattcatcaggtcaggaggatgaaactcagtcttccaatgatgatccatcacaatctgttgcttctcaagatgcccaggaaataatccgcccacgtcgatgtaaatattttgatacaaatagtgaagtagaagaagaatctgaagaagatgaagattatattccatcagaagactggaaaaaggagattatggtgggctccatgtttcaagcagaaattccagttggcatttgtagatacaaagaaaatgaaaaagtatatgaaaatgatgatcagctcctgtgggaccctgagtacttaccagaagataaagtgattatatttcttaaagatgcatctagaagaacaggtgatgagaagggtgtagaagcaattcctgaaggatctcacataaaagacaatgaacaggctttatatgaattggttaaatgcaattttgatacagaagaagcattgagaagattaagatttaatgtaaaagcagctagagaggaattatctgtttggacagaggaagagtgtagaaattttgaacaagggctgaaggcctatggaaaggattttcatttgattcaggctaataaagtccgaacaaggtcagttggtgaatgtgtagcattctattacatgtggaaaaaatctgaacgttatgatttctttgctcagcaaacacgatttggaaagaagaaatataatcttcatcctggtgtaacggattacatggatcgtcttctagacgaaagtgaaagtgctgcatctagtcgagcaccatcccctcccccaactgcatcaaacagtagtaacagccagtctgagaaagaagatggcactgtaagcactgctaatcaaaatggagtgtcatctaatggaccaggcatactccaaatgcttcttccagttcatttttcagccatcagttcaagagccaatgcctttttaaaataaagcttctgtggtcttgtttttaatggctcaactgtctgatgtaattgagtgaaggtttgcactgagaaattagcattcaggccttacccccatgaagtattactgttaacatatgttcggactgcttcccttcaccaatgtgaacaactttttttcccaaacagtgttaaaagccactttgcaacacttgacttcatcttaatgtacattcactgttgttacatacatatctaagtaaatcaaagttttgggtggaagtgttgagaagtatgagttttttgttgtttttgttttacttaaaacttttaatttatccagaatggcagtagctttagcaagcagatggtcacaatctgttttctaaatcattttttattaaatgaatccaaagtatcctagctctttgtcaaagatggtctgtagaaatgtttttaaagattagggatgctgtactttttgaattgttgcagtgttggagatgccattttcacctttttaaaaagatgcattttatttgcaggtttgtgaagttcttgcaaactcttactacagaaatgttttaaatacattctcaggcatgtttgcaaaaatatggcacatgtatacattttaggaaatgttacttttgttaatctttaaaaaatacacctaatgaaagacattccactattatgcgtaatgctcagctttttgtaaagaaatatttaattgtattttgtgtttatacaggtatttcacacaataatttgttcttaatgcagccactataacttgataagtcattgcactatttaaaaagttttagtaatatcatgaatttaatttgcttaagatttagtacatttcagaacttttgaacttttgacaaattgcattggaaaaagaagtctgttaatagtgatttagtctccccgcctcattcccacccccaacaaagcactatcattttcatttggaatgggtattttctgtttcatgatgtattttcaaatagagttcaggatctgcaattcagttcaacacaagtttgttgagctttaaaatgtatttgaagtaatatttaaataggcatttaaaatttcaaattagatgttaaatttatgcatagtaattttgcactgtaaaataattcccttctcccattccttgtctgccattctgaatatgcttattaaaatatttttttaaacat

SEQ ID NO: 947 - protein, 450 aa, Homosapiens
MFMFNWFTDCLWTLFLSNYQPSVESSSPGGSATSDDHEFDPSADMLVHDFDDERTLEEEEMMEGETNFSSEIEDLAREGDMPIHELLSLYGYGSTVRLPEEDEEEEEEEEEGEDDEDADNDDNSGCSGENKEENIKDSSGQEDETQSSNDDPSQSVASQDAQEIIRPRRCKYFDTNSEVEEESEEDEDYIPSEDWKKEIMVGSMFQAEIPVGICRYKENEKVYENDDQLLWDPEYLPEDKVIIFLKDASRRTGDEKGVEAIPEGSHIKDNEQALYELVKCNFDTEEALRRLRFNVKAAREELSVWTEEECRNFEQGLKAYGKDFHLIQANKVRTRSVGECVAFYYMWKKSERYDFFAQQTRFGKKKYNLHPGVTDYMDRLLDESESAASSRAPSPPPTASNSSNSQSEKEDGTVSTANQNGVSSNGPGILQMLLPVHFSAISSRANAFLK

SEQ ID NO: 948 - DNA, 5164 bp, Homosapiens
ctggaagaaggaggcgggcggcccgggcctcaggcccctcccaggctctgagtctcccggctgcaggcggatggatggggcttcttcaggcggtggcggcagcagcgaaggtggcggcggcagcagcggcagcggctatggtgtggtcgctcgattctcccagtgcctggctgagtttcggacgtggttaagaaccaactggttgaggttcaatgcagacaagacggatgtgatgctgccatctgttgaatcttcaagtccaggaggttcagcaacatcagatgaccatgaatttgatccatcagctgacatgctggttcatgattttgatgatgaacgaacattagaagaggaagaaatgatggaaggagaaacaaacttcagctctgaaatagaagatcttgcaagggaaggcgacatgccaattcatgaacttctcagcctttatggttatggtagtactgttcgactacctgaagaagatgaggaagaggaagaagaggaagaagaaggtgaagatgatgaagatgctgataatgatgacaacagtggctgtagtggggaaaataaagaggagaatataaaggattcatcaggtcaggaggatgaaactcagtcttccaatgatgatccatcacaatctgttgcttctcaagatgcccaggaaataatccgcccacgtcgatgtaaatattttgatacaaatagtgaagtagaagaagaatctgaagaagatgaagattatattccatcagaagactggaaaaaggagattatggtgggctccatgtttcaagcagaaattccagttggcatttgtagatacaaagaaaatgaaaaagtatatgaaaatgatgatcagctcctgtgggaccctgagtacttaccagaagataaagtgattatatttcttaaagatgcatctagaagaacaggtgatgagaagggtgtagaagcaattcctgaaggatctcacataaaagacaatgaacaggctttatatgaattggttaaatgcaattttgatacagaagaagcattgagaagattaagatttaatgtaaaagcagctagagaggaattatctgtttggacagaggaagagtgtagaaattttgaacaagggctgaaggcctatggaaaggattttcatttgattcaggctaataaagtccgaacaaggtcagttggtgaatgtgtagcattctattacatgtggaaaaaatctgaacgttatgatttctttgctcagcaaacacgatttggaaagaagaaatataatcttcatcctggtgtaacggattacatggatcgtcttctagacgaaagtgaaagtgctgcatctagtcgagcaccatcccctcccccaactgcatcaaacagtagtaacagccagtctgagaaagaagatggcactgtaagcactgctaatcaaaatggagtgtcatctaatggaccaggtgaaatattaaacaaagaggaagtaaaagttgaagggttacacattaatggaccaacaggtggaaataagaaaccacttcatgcagatatggatactaatggttatgaaacagataaccttaccactgacccaaaacttgcccatatgactgcaagaaatgaaaatgattttgatgaaaaaagtgagagacctgccaaaaggcgaagggtaaacagcaatggaaaagaaagtccaggttcttctgaatttttccaagaagcagtctcacatgggaaatttgaagaacttgaaaacacagatgactaaattttagacctattttactttctttggagtaaattctggtgtgactaaaattttcagggttgatgggttaccttaaaaagttgatttccttgaagcagtttgaaaatttgaattgagtcttaactttaggaaatgaggtttcataattctgccttttgcagatttttttactttaaagctgtcagactcttttaagggtattttaaaaattagtaaatttgaatgaactaaagatatatctctaccttctcatttgaatatctttagttcattcagatttactaattttggtaaatctgaatgaactaaagatgtatctgtaccttctcatttgatgtattaatcataaaatttcactacaaggtaatttttgcttagtttgatggatgaatgggaaactcaagtccaaatttctgcttaataccaatttctctgagtttcttgaaatgtctttaaaacagacatttttctcaccaaacagtttgagtatctttattaaggaaacccttacgaatcctgaaaattatgctagcatgatttttttatatatagaagtttaaaaataaaccaggtcaggtttgtatatgtaaaattgttgacatcaatgatgtctttccatattcttatctgggcttaagaaatacattctgtatttttccagattctttgtagcctttgaaagatttttacagtacatatgtcttgactgagctgtcctttcttaatacaaaagcgtgtataattttcttaacttgtacagttggtaaacttttatgagaggaattgttattctgagtctgtcagctttcattttattttgctaaggtttttctaatgaatttttaagtgtttgtgtagtaattaagtcatatttcttatccaggtggttaaagcattcataaaggattataaaatttttttttttttttttttttttaaatttctacttaagggcaagtaatttgagaattctgaaattaagcatgatgcttagattgcagtttgttttgcatttgctataattttcaaaattatttttgaagcaagacaaaagtttaatgtcagcttaagtgcttaaatatatcatgctgaccagaatcctgttatttttatatgcatcataaaatttcccatttctgcattaaataaacagaggaggggggtcaagtgatacttagatattggcacacacaaggaacaactgttggcaggcagtatcgattttatgaagagaaagtgaagtttgaaaacttttcaaacttttctagttacaatccaatttttcagatttgataatgcttttccaaagtgaaaataagatacacaataatcattgctctgtgtgattacagataggattatccatctgcatagccttgtaaaagtgccattttatttttagtgctaaattcttgttaaataatgtagttttatatagctgatagaccaacctatatccaaacttttataaaatattaattattcttgtttttctcacacaggcatactccaaatgcttcttccagttcatttttcagccatcagttcaagagccaatgcctttttaaaataaagcttctgtggtcttgtttttaatggctcaactgtctgatgtaattgagtgaaggtttgcactgagaaattagcattcaggccttacccccatgaagtattactgttaacatatgttcggactgcttcccttcaccaatgtgaacaactttttttcccaaacagtgttaaaagccactttgcaacacttgacttcatcttaatgtacattcactgttgttacatacatatctaagtaaatcaaagttttgggtggaagtgttgagaagtatgagttttttgttgtttttgttttacttaaaacttttaatttatccagaatggcagtagctttagcaagcagatggtcacaatctgttttctaaatcattttttattaaatgaatccaaagtatcctagctctttgtcaaagatggtctgtagaaatgtttttaaagattagggatgctgtactttttgaattgttgcagtgttggagatgccattttcacctttttaaaaagatgcattttatttgcaggtttgtgaagttcttgcaaactcttactacagaaatgttttaaatacattctcaggcatgtttgcaaaaatatggcacatgtatacattttaggaaatgttacttttgttaatctttaaaaaatacacctaatgaaagacattccactattatgcgtaatgctcagctttttgtaaagaaatatttaattgtattttgtgtttatacaggtatttcacacaataatttgttcttaatgcagccactataacttgataagtcattgcactatttaaaaagttttagtaatatcatgaatttaatttgcttaagatttagtacatttcagaacttttgaacttttgacaaattgcattggaaaaagaagtctgttaatagtgatttagtctccccgcctcattcccacccccaacaaagcactatcattttcatttggaatgggtattttctgtttcatgatgtattttcaaatagagttcaggatctgcaattcagttcaacacaagtttgttgagctttaaaatgtatttgaagtaatatttaaataggcatttaaaatttcaaattagatgttaaatttatgcatagtaattttgcactgtaaaataattcccttctcccattccttgtctgccattctgaatatgcttattaaaatatttttttaaacatatttgcctacataatactgtgtgaatattttcattagattaattcactaagattttattagagattgtttgaatgatgcatgttattgacaaggcaaatatatatatatacacagtctgtttcttctattcctagacatattgcactactttttcagtggttcttggtcccctttaccacatcttgggtgatgtatttttgtcttcttcccctttgccacaagagatcctttcagtccctagacctccattcactctgtttctcttctgctggattatataatttaaaaataatgtgttcccgtattttgtagtggagttcatatcacattatgttttgcaaaataaaacttgttttgtcacaatattttctttgctatcgatggataattaggagtgggcacttggaataactgagggctggtgaatataataggcaatatttacatggggtgtgtaactaaataccaaatcagatagtaaggttttcccaactataatccatattcatgaaaaatgccagtgtggaaaaccatgtaacatacagaagaacaggagtttccaaattttaaccttttattctaaaaatgactctcttctctcaaaatgactttttctgtatcacataattc

SEQ ID NO: 949 - protein, 565 aa, Homosapiens; identical to SEQ ID NO: 943

SEQ ID NO: 950 - DNA, 5238 bp, Homosapiens
ctggaagaaggaggcgggcggcccgggcctcaggcccctcccaggctctgagtctcccggctgcaggcggatggatggggcttcttcaggcggtggcggcagcagcgaaggtggcggcggcagcagcggcagcggctatggtgtggtcgctcgattctcccagtgcctggctgagtttcggacgtggttaagaaccaactggttgaggttcaatgcagacaagacggatgtgatgctgaaaatgtgcatcagatgtttatgtttaattggtttacagactgtctgtggactcttttcctgtcaaattaccagccatctgttgaatcttcaagtccaggaggttcagcaacatcagatgaccatgaatttgatccatcagctgacatgctggttcatgattttgatgatgaacgaacattagaagaggaagaaatgatggaaggagaaacaaacttcagctctgaaatagaagatcttgcaagggaaggcgacatgccaattcatgaacttctcagcctttatggttatggtagtactgttcgactacctgaagaagatgaggaagaggaagaagaggaagaagaaggtgaagatgatgaagatgctgataatgatgacaacagtggctgtagtggggaaaataaagaggagaatataaaggattcatcaggtcaggaggatgaaactcagtcttccaatgatgatccatcacaatctgttgcttctcaagatgcccaggaaataatccgcccacgtcgatgtaaatattttgatacaaatagtgaagtagaagaagaatctgaagaagatgaagattatattccatcagaagactggaaaaaggagattatggtgggctccatgtttcaagcagaaattccagttggcatttgtagatacaaagaaaatgaaaaagtatatgaaaatgatgatcagctcctgtgggaccctgagtacttaccagaagataaagtgattatatttcttaaagatgcatctagaagaacaggtgatgagaagggtgtagaagcaattcctgaaggatctcacataaaagacaatgaacaggctttatatgaattggttaaatgcaattttgatacagaagaagcattgagaagattaagatttaatgtaaaagcagctagagaggaattatctgtttggacagaggaagagtgtagaaattttgaacaagggctgaaggcctatggaaaggattttcatttgattcaggctaataaagtccgaacaaggtcagttggtgaatgtgtagcattctattacatgtggaaaaaatctgaacgttatgatttctttgctcagcaaacacgatttggaaagaagaaatataatcttcatcctggtgtaacggattacatggatcgtcttctagacgaaagtgaaagtgctgcatctagtcgagcaccatcccctcccccaactgcatcaaacagtagtaacagccagtctgagaaagaagatggcactgtaagcactgctaatcaaaatggagtgtcatctaatggaccaggtgaaatattaaacaaagaggaagtaaaagttgaagggttacacattaatggaccaacaggtggaaataagaaaccacttcatgcagatatggatactaatggttatgaaacagataaccttaccactgacccaaaacttgcccatatgactgcaagaaatgaaaatgattttgatgaaaaaagtgagagacctgccaaaaggcgaagggtaaacagcaatggaaaagaaagtccaggttcttctgaatttttccaagaagcagtctcacatgggaaatttgaagaacttgaaaacacagatgactaaattttagacctattttactttctttggagtaaattctggtgtgactaaaattttcagggttgatgggttaccttaaaaagttgatttccttgaagcagtttgaaaatttgaattgagtcttaactttaggaaatgaggtttcataattctgccttttgcagatttttttactttaaagctgtcagactcttttaagggtattttaaaaattagtaaatttgaatgaactaaagatatatctctaccttctcatttgaatatctttagttcattcagatttactaattttggtaaatctgaatgaactaaagatgtatctgtaccttctcatttgatgtattaatcataaaatttcactacaaggtaatttttgcttagtttgatggatgaatgggaaactcaagtccaaatttctgcttaataccaatttctctgagtttcttgaaatgtctttaaaacagacatttttctcaccaaacagtttgagtatctttattaaggaaacccttacgaatcctgaaaattatgctagcatgatttttttatatatagaagtttaaaaataaaccaggtcaggtttgtatatgtaaaattgttgacatcaatgatgtctttccatattcttatctgggcttaagaaatacattctgtatttttccagattctttgtagcctttgaaagatttttacagtacatatgtcttgactgagctgtcctttcttaatacaaaagcgtgtataattttcttaacttgtacagttggtaaacttttatgagaggaattgttattctgagtctgtcagctttcattttattttgctaaggtttttctaatgaatttttaagtgtttgtgtagtaattaagtcatatttcttatccaggtggttaaagcattcataaaggattataaaatttttttttttttttttttttttaaatttctacttaagggcaagtaatttgagaattctgaaattaagcatgatgcttagattgcagtttgttttgcatttgctataattttcaaaattatttttgaagcaagacaaaagtttaatgtcagcttaagtgcttaaatatatcatgctgaccagaatcctgttatttttatatgcatcataaaatttcccatttctgcattaaataaacagaggaggggggtcaagtgatacttagatattggcacacacaaggaacaactgttggcaggcagtatcgattttatgaagagaaagtgaagtttgaaaacttttcaaacttttctagttacaatccaatttttcagatttgataatgcttttccaaagtgaaaataagatacacaataatcattgctctgtgtgattacagataggattatccatctgcatagccttgtaaaagtgccattttatttttagtgctaaattcttgttaaataatgtagttttatatagctgatagaccaacctatatccaaacttttataaaatattaattattcttgtttttctcacacaggcatactccaaatgcttcttccagttcatttttcagccatcagttcaagagccaatgcctttttaaaataaagcttctgtggtcttgtttttaatggctcaactgtctgatgtaattgagtgaaggtttgcactgagaaattagcattcaggccttacccccatgaagtattactgttaacatatgttcggactgcttcccttcaccaatgtgaacaactttttttcccaaacagtgttaaaagccactttgcaacacttgacttcatcttaatgtacattcactgttgttacatacatatctaagtaaatcaaagttttgggtggaagtgttgagaagtatgagttttttgttgtttttgttttacttaaaacttttaatttatccagaatggcagtagctttagcaagcagatggtcacaatctgttttctaaatcattttttattaaatgaatccaaagtatcctagctctttgtcaaagatggtctgtagaaatgtttttaaagattagggatgctgtactttttgaattgttgcagtgttggagatgccattttcacctttttaaaaagatgcattttatttgcaggtttgtgaagttcttgcaaactcttactacagaaatgttttaaatacattctcaggcatgtttgcaaaaatatggcacatgtatacattttaggaaatgttacttttgttaatctttaaaaaatacacctaatgaaagacattccactattatgcgtaatgctcagctttttgtaaagaaatatttaattgtattttgtgtttatacaggtatttcacacaataatttgttcttaatgcagccactataacttgataagtcattgcactatttaaaaagttttagtaatatcatgaatttaatttgcttaagatttagtacatttcagaacttttgaacttttgacaaattgcattggaaaaagaagtctgttaatagtgatttagtctccccgcctcattcccacccccaacaaagcactatcattttcatttggaatgggtattttctgtttcatgatgtattttcaaatagagttcaggatctgcaattcagttcaacacaagtttgttgagctttaaaatgtatttgaagtaatatttaaataggcatttaaaatttcaaattagatgttaaatttatgcatagtaattttgcactgtaaaataattcccttctcccattccttgtctgccattctgaatatgcttattaaaatatttttttaaacatatttgcctacataatactgtgtgaatattttcattagattaattcactaagattttattagagattgtttgaatgatgcatgttattgacaaggcaaatatatatatatacacagtctgtttcttctattcctagacatattgcactactttttcagtggttcttggtcccctttaccacatcttgggtgatgtatttttgtcttcttcccctttgccacaagagatcctttcagtccctagacctccattcactctgtttctcttctgctggattatataatttaaaaataatgtgttcccgtattttgtagtggagttcatatcacattatgttttgcaaaataaaacttgttttgtcacaatattttctttgctatcgatggataattaggagtgggcacttggaataactgagggctggtgaatataataggcaatatttacatggggtgtgtaactaaataccaaatcagatagtaaggttttcccaactataatccatattcatgaaaaatgccagtgtggaaaaccatgtaacatacagaagaacaggagtttccaaattttaaccttttattctaaaaatgactctcttctctcaaaatgactttttctgtatcacataattc

SEQ ID NO: 951 - protein, 529 aa, Homosapiens; identical to SEQ ID NO: 941

SEQ ID NO: 952 - DNA, 3354 bp, Homosapiens
ctggaagaaggaggcgggcggcccgggcctcaggcccctcccaggctctgagtctcccggctgcaggcggatggatggggcttcttcaggcggtggcggcagcagcgaaggtggcggcggcagcagcggcagcggctatggtgtggtcgctcgattctcccagtgcctggctgagtttcggacgtggttaagaaccaactggttgaggttcaatgcagacaagacggatgtgatgctgccatctgttgaatcttcaagtccaggaggttcagcaacatcagatgaccatgaatttgatccatcagctgacatgctggttcatgattttgatgatgaacgaacattagaagaggaagaaatgatggaaggagaaacaaacttcagctctgaaatagaagatcttgcaagggaaggcgacatgccaattcatgaacttctcagcctttatggttatggtagtactgttcgactacctgaagaagatgaggaagaggaagaagaggaagaagaaggtgaagatgatgaagatgctgataatgatgacaacagtggctgtagtggggaaaataaagaggagaatataaaggattcatcaggtcaggaggatgaaactcagtcttccaatgatgatccatcacaatctgttgcttctcaagatgcccaggaaataatccgcccacgtcgatgtaaatattttgatacaaatagtgaagtagaagaagaatctgaagaagatgaagattatattccatcagaagactggaaaaaggagattatggtgggctccatgtttcaagcagaaattccagttggcatttgtagatacaaagaaaatgaaaaagtatatgaaaatgatgatcagctcctgtgggaccctgagtacttaccagaagataaagtgattatatttcttaaagatgcatctagaagaacaggtgatgagaagggtgtagaagcaattcctgaaggatctcacataaaagacaatgaacaggctttatatgaattggttaaatgcaattttgatacagaagaagcattgagaagattaagatttaatgtaaaagcagctagagaggaattatctgtttggacagaggaagagtgtagaaattttgaacaagggctgaaggcctatggaaaggattttcatttgattcaggctaataaagtccgaacaaggtcagttggtgaatgtgtagcattctattacatgtggaaaaaatctgaacgttatgatttctttgctcagcaaacacgatttggaaagaagaaatataatcttcatcctggtgtaacggattacatggatcgtcttctagacgaaagtgaaagtgctgcatctagtcgagcaccatcccctcccccaactgcatcaaacagtagtaacagccagtctgagaaagaagatggcactgtaagcactgctaatcaaaatggagtgtcatctaatggaccaggcatactccaaatgcttcttccagttcatttttcagccatcagttcaagagccaatgcctttttaaaataaagcttctgtggtcttgtttttaatggctcaactgtctgatgtaattgagtgaaggtttgcactgagaaattagcattcaggccttacccccatgaagtattactgttaacatatgttcggactgcttcccttcaccaatgtgaacaactttttttcccaaacagtgttaaaagccactttgcaacacttgacttcatcttaatgtacattcactgttgttacatacatatctaagtaaatcaaagttttgggtggaagtgttgagaagtatgagttttttgttgtttttgttttacttaaaacttttaatttatccagaatggcagtagctttagcaagcagatggtcacaatctgttttctaaatcattttttattaaatgaatccaaagtatcctagctctttgtcaaagatggtctgtagaaatgtttttaaagattagggatgctgtactttttgaattgttgcagtgttggagatgccattttcacctttttaaaaagatgcattttatttgcaggtttgtgaagttcttgcaaactcttactacagaaatgttttaaatacattctcaggcatgtttgcaaaaatatggcacatgtatacattttaggaaatgttacttttgttaatctttaaaaaatacacctaatgaaagacattccactattatgcgtaatgctcagctttttgtaaagaaatatttaattgtattttgtgtttatacaggtatttcacacaataatttgttcttaatgcagccactataacttgataagtcattgcactatttaaaaagttttagtaatatcatgaatttaatttgcttaagatttagtacatttcagaacttttgaacttttgacaaattgcattggaaaaagaagtctgttaatagtgatttagtctccccgcctcattcccacccccaacaaagcactatcattttcatttggaatgggtattttctgtttcatgatgtattttcaaatagagttcaggatctgcaattcagttcaacacaagtttgttgagctttaaaatgtatttgaagtaatatttaaataggcatttaaaatttcaaattagatgttaaatttatgcatagtaattttgcactgtaaaataattcccttctcccattccttgtctgccattctgaatatgcttattaaaatatttttttaaacatatttgcctacataatactgtgtgaatattttcattagattaattcactaagattttattagagattgtttgaatgatgcatgttattgacaaggcaaatatatatatatacacagtctgtttcttctattcctagacatattgcactactttttcagtggttcttggtcccctttaccacatcttgggtgatgtatttttgtcttcttcccctttgccacaagagatcctttcagtccctagacctccattcactctgtttctcttctgctggattatataatttaaaaataatgtgttcccgtattttgtagtggagttcatatcacattatgttttgcaaaataaaacttgttttgtcacaatattttctttgctatcgatggataattaggagtgggcacttggaataactgagggctggtgaatataataggcaatatttacatggggtgtgtaactaaataccaaatcagatagtaaggttttcccaactataatccatattcatgaaaaatgccagtgtggaaaaccatgtaacatacagaagaacaggagtttccaaattttaaccttttattctaaaaatgactctcttctctcaaaatgactttttctgtatcacataattc

SEQ ID NO: 953 - protein, 486 aa, Homosapiens; identical to SEQ ID NO: 945

SEQ ID NO: 954 - DNA, 3428 bp, Homosapiens
ctggaagaaggaggcgggcggcccgggcctcaggcccctcccaggctctgagtctcccggctgcaggcggatggatggggcttcttcaggcggtggcggcagcagcgaaggtggcggcggcagcagcggcagcggctatggtgtggtcgctcgattctcccagtgcctggctgagtttcggacgtggttaagaaccaactggttgaggttcaatgcagacaagacggatgtgatgctgaaaatgtgcatcagatgtttatgtttaattggtttacagactgtctgtggactcttttcctgtcaaattaccagccatctgttgaatcttcaagtccaggaggttcagcaacatcagatgaccatgaatttgatccatcagctgacatgctggttcatgattttgatgatgaacgaacattagaagaggaagaaatgatggaaggagaaacaaacttcagctctgaaatagaagatcttgcaagggaaggcgacatgccaattcatgaacttctcagcctttatggttatggtagtactgttcgactacctgaagaagatgaggaagaggaagaagaggaagaagaaggtgaagatgatgaagatgctgataatgatgacaacagtggctgtagtggggaaaataaagaggagaatataaaggattcatcaggtcaggaggatgaaactcagtcttccaatgatgatccatcacaatctgttgcttctcaagatgcccaggaaataatccgcccacgtcgatgtaaatattttgatacaaatagtgaagtagaagaagaatctgaagaagatgaagattatattccatcagaagactggaaaaaggagattatggtgggctccatgtttcaagcagaaattccagttggcatttgtagatacaaagaaaatgaaaaagtatatgaaaatgatgatcagctcctgtgggaccctgagtacttaccagaagataaagtgattatatttcttaaagatgcatctagaagaacaggtgatgagaagggtgtagaagcaattcctgaaggatctcacataaaagacaatgaacaggctttatatgaattggttaaatgcaattttgatacagaagaagcattgagaagattaagatttaatgtaaaagcagctagagaggaattatctgtttggacagaggaagagtgtagaaattttgaacaagggctgaaggcctatggaaaggattttcatttgattcaggctaataaagtccgaacaaggtcagttggtgaatgtgtagcattctattacatgtggaaaaaatctgaacgttatgatttctttgctcagcaaacacgatttggaaagaagaaatataatcttcatcctggtgtaacggattacatggatcgtcttctagacgaaagtgaaagtgctgcatctagtcgagcaccatcccctcccccaactgcatcaaacagtagtaacagccagtctgagaaagaagatggcactgtaagcactgctaatcaaaatggagtgtcatctaatggaccaggcatactccaaatgcttcttccagttcatttttcagccatcagttcaagagccaatgcctttttaaaataaagcttctgtggtcttgtttttaatggctcaactgtctgatgtaattgagtgaaggtttgcactgagaaattagcattcaggccttacccccatgaagtattactgttaacatatgttcggactgcttcccttcaccaatgtgaacaactttttttcccaaacagtgttaaaagccactttgcaacacttgacttcatcttaatgtacattcactgttgttacatacatatctaagtaaatcaaagttttgggtggaagtgttgagaagtatgagttttttgttgtttttgttttacttaaaacttttaatttatccagaatggcagtagctttagcaagcagatggtcacaatctgttttctaaatcattttttattaaatgaatccaaagtatcctagctctttgtcaaagatggtctgtagaaatgtttttaaagattagggatgctgtactttttgaattgttgcagtgttggagatgccattttcacctttttaaaaagatgcattttatttgcaggtttgtgaagttcttgcaaactcttactacagaaatgttttaaatacattctcaggcatgtttgcaaaaatatggcacatgtatacattttaggaaatgttacttttgttaatctttaaaaaatacacctaatgaaagacattccactattatgcgtaatgctcagctttttgtaaagaaatatttaattgtattttgtgtttatacaggtatttcacacaataatttgttcttaatgcagccactataacttgataagtcattgcactatttaaaaagttttagtaatatcatgaatttaatttgcttaagatttagtacatttcagaacttttgaacttttgacaaattgcattggaaaaagaagtctgttaatagtgatttagtctccccgcctcattcccacccccaacaaagcactatcattttcatttggaatgggtattttctgtttcatgatgtattttcaaatagagttcaggatctgcaattcagttcaacacaagtttgttgagctttaaaatgtatttgaagtaatatttaaataggcatttaaaatttcaaattagatgttaaatttatgcatagtaattttgcactgtaaaataattcccttctcccattccttgtctgccattctgaatatgcttattaaaatatttttttaaacatatttgcctacataatactgtgtgaatattttcattagattaattcactaagattttattagagattgtttgaatgatgcatgttattgacaaggcaaatatatatatatacacagtctgtttcttctattcctagacatattgcactactttttcagtggttcttggtcccctttaccacatcttgggtgatgtatttttgtcttcttcccctttgccacaagagatcctttcagtccctagacctccattcactctgtttctcttctgctggattatataatttaaaaataatgtgttcccgtattttgtagtggagttcatatcacattatgttttgcaaaataaaacttgttttgtcacaatattttctttgctatcgatggataattaggagtgggcacttggaataactgagggctggtgaatataataggcaatatttacatggggtgtgtaactaaataccaaatcagatagtaaggttttcccaactataatccatattcatgaaaaatgccagtgtggaaaaccatgtaacatacagaagaacaggagtttccaaattttaaccttttattctaaaaatgactctcttctctcaaaatgactttttctgtatcacataattc

SEQ ID NO: 955 - protein, 450 aa, Homosapiens; identical to SEQ ID NO: 947

SEQ ID NO: 956 - DNA, 2419 bp, Homosapiens
aggaggcgggcggcccgggcctcaggcccctcccaggctctgagtctcccggctgcaggcggatggatggggcttcttcaggcggtggcggcagcagcgaaggtggcggcggcagcagcggcagcggctatggtgtggtcgctcgattctcccagtgcctggctgagtttcggacgtggttaagaaccaactggttgaggttcaatgcagacaagacggatgtgatgctgaaaatgtgcatcagatgtttatgtttaattggtttacagactgtctgtggactcttttcctgtcaaattaccagccatctgttgaatcttcaagtccaggaggttcagcaacatcagatgaccatgaatttgatccatcagctgacatgctggttcatgattttgatgatgaacgaacattagaagaggaagaaatgatggaaggagaaacaaacttcagctctgaaatagaagatcttgcaagggtaaataacatgtagagctagggtatgaattggttatgacttttttgtggaaagggaagatctgaaattttgattctctgattaggagagaaattgtgttatatattaatgactgaaaaattttgtgtgatcataggtgggatatttaaagtttgaaatgaaaggatttaaaaacaataactttattatgtgcaataacagaattcacatagttactttggtaaaacatagactgttaaatgattctgctataaaggtctggtcaaaaatggactataaaaggattctacacggcctcatatatcctttgtccttccccagttaccatatcttttacttattctccttcagagccaaaaattcttgaagtatcattttccattcactacataaagtgctctagattatctccactacataaagtgctctagattatctccacctcttcctatcaaggtgaccagtgaactttccttgttacatccatttttatattcacttttctctcactaccttactttttctcagcagtattcaatatagtttaacattcccttcttttacttgaattctggagtacaccactgtctggttttctttatctttttgtttctattcagtatcttttgcagactcttcttccgttactcaaggtttacatgttggcagtttgtgattctcagtttggaccttctttttttctctcctgtctctgtctggatcagtgctcctcaaaatgtagtatgagggtcagttgcatcagaatcaaccctgtacttattttaaaaagcagattttttggacctctcccccggcatactgaatcagaatctctggaggtggtgttcagatccacatcttcattaagtaagttggcattatatgtacaccaaatttgaaaatcactaagctgtgtgatttaatttattcccttggtgtgtatatccttagtattctttagtttatatttctagcattaacctatttcctgtctccagttttgtttgtccaccttgacatttctgcttgcttaactaaatggacatctctaaattataaatgtccaaaacagaactattgactgttgtttttttctctgcttgttctttccctgtcctatcagtaaaaagtggtactactatttaccctgttgcctaagtcagaaaccagtgagtcattttccttctctttcaatatcttatttctaaataaacctatcatttgtatccacaagaatatcccttagccgactcttgatccattgctgcctagattaccattctttctagcctaggctattgcagtagcttcctgactggtttccccatttcctcttttaccatctttctcctgatacatttccacccagcagctgtgatcttcttttcaaaatgtaaatcaattaatatcaacctcccagcttcctgttatatccaaagaaaacccaaactcctcaaccaggccagcaaggccacctgcatgataatggcctcttacccatgtatcacactacctctgttatagccacactagctgcttttgttgttaaataggctagtttcttctgcttcaagggttttcagctcattctcactctctggtatatgcatcccaaggccggctccttatcctctgggttcggtgttgcctcctcagaatagcagcctttcctgtcccctaattaggttttaattagttttttgttttatttttatttttttttaaccactgtcccctattcaatgctttctttagtgttaggacacaatttgtaattgtttgtttaatttattgtctgtacctccactggttttgagaagatgaaataaaatgactgttattcaccagtgtatttcatggtaccttgcaagagtgctcactcaaaagtattgtatgaatgaatggatatatcagtctggtatgttctaataaaatatatcatgc

SEQ ID NO: 957 - protein, 116 aa, Homosapiens
MDGASSGGGGSSEGGGGSSGSGYGVVARFSQCLAEFRTWLRTNWLRFNADKTDVMLKMCIRCLCLIGLQTVCGLFSCQITSHLLNLQVQEVQQHQMTMNLIHQLTCWFMILMMNEH

SEQ ID NO: 958 - DNA, 667 bp, Homosapiens
ggcccctcccaggctctgagtctcccggctgcaggcggatggatggggcttcttcaggcggtggcggcagcagcgaaggtggcggcggcagcagcggcagcggctatggtgtggtcgctcgattctcccagtgcctggctgagtttcggacgtggttaagaaccaactggttgaggttcaatgcagacaagacggatgtgatgctgaaaatgtgcatcagatgtttatgtttaattggtttacagactgtctgtggactcttttcctgtcaaattaccagccatctgttgaatcttcaagtccaggaggttcagcaacatcagatgaccatgaatttgatccatcagctgacatgctggttcatgattttgatgatgaacgaacattagaagaggaagaaatgatggaaggagaaacaaacttcagctctgaaatagaagatcttgcaaggattttttggacctctcccccggcatactgaatcagaatctctggaggtggtgttcagatccacatcttcattaagtaagttggcattatattcatgaacttctcagcctttatggttatggtagtactgttcgactacctgaagaagatgaggaagaggaagaagaggaagaagaaggtgaagatgatgaagatgctgataatgatgacaacagtg

SEQ ID NO: 959 - protein, 116 aa, Homosapiens; identical to SEQ ID NO: 957

SEQ ID NO: 960 - DNA, 4453 bp, Homosapiens
gcggctcctgcgcgttcccgccgaggcagtggcggcgggagcggcagagacggcagcggccggagtcccgttgctgagtctcacatccgggttctggccgtgacccagctgcggccgccgcggagatgtgacccggcagtacggcaaatatggcggagccatctgttgaatcttcaagtccaggaggttcagcaacatcagatgaccatgaatttgatccatcagctgacatgctggttcatgattttgatgatgaacgaacattagaagaggaagaaatgatggaaggagaaacaaacttcagctctgaaatagaagatcttgcaagggaaggcgacatgccaattcatgaacttctcagcctttatggttatggtagtactgttcgactacctgaagaagatgaggaagaggaagaagaggaagaagaaggtgaagatgatgaagatgctgataatgatgacaacagtggctgtagtggggaaaataaagaggagaatataaaggattcatcaggtcaggaggatgaaactcagtcttccaatgatgatccatcacaatctgttgcttctcaagatgcccaggaaataatccgcccacgtcgatgtaaatattttgatacaaatagtgaagtagaagaagaatctgaagaagatgaagattatattccatcagaagactggaaaaaggagattatggtgggctccatgtttcaagcagaaattccagttggcatttgtagatacaaagaaaatgaaaaagtatatgaaaatgatgatcagctcctgtgggaccctgagtacttaccagaagataaagtgattatatttcttaaagatgcatctagaagaacaggtgatgagaagggtgtagaagcaattcctgaaggatctcacataaaagacaatgaacaggctttatatgaattggttaaatgcaattttgatacagaagaagcattgagaagattaagatttaatgtaaaagcagctagagaggaattatctgtttggacagaggaagagtgtagaaattttgaacaagggctgaaggcctatggaaaggattttcatttgattcaggctaataaagtccgaacaaggtcagttggtgaatgtgtagcattctattacatgtggaaaaaatctgaacgttatgatttctttgctcagcaaacacgatttggaaagaagaaatataatcttcatcctggtgtaacggattacatggatcgtcttctagacgaaagtgaaagtgctgcatctagtcgagcaccatcccctcccccaactgcatcaaacagtagtaacagccagtctgagaaagaagatggcactgtaagcactgctaatcaaaatggagtgtcatctaatggaccaggtgaaatattaaacaaagaggaagtaaaagttgaagggttacacattaatggaccaacaggtggaaataagaaaccacttcatgcagatatggatactaatggttatgaaacagataaccttaccactgacccaaaacttgcccatatgactgcaagaaatgaaaatgattttgatgaaaaaagtgagagacctgccaaaaggcgaagggtaaacagcaatggaaaagaaagtccaggttcttctgaatttttccaagaagcagtctcacatgggaaatttgaagaacttgaaaacacagatgactaaattttagacctattttactttctttggagtaaattctggtgtgactaaaattttcagggttgatgggttaccttaaaaagttgatttccttgaagcagtttgaaaatttgaattgagtcttaactttaggaaatgaggtttcataattctgccttttgcagatttttttactttaaagctgtcagactcttttaagggtattttaaaaattagtaaatttgaatgaactaaagatatatctctaccttctcatttgaatatctttagttcattcagatttactaattttggtaaatctgaatgaactaaagatgtatctgtaccttctcatttgatgtattaatcataaaatttcactacaaggtaatttttgcttagtttgatggatgaatgggaaactcaagtccaaatttctgcttaataccaatttctctgagtttcttgaaatgtctttaaaacagacatttttctcaccaaacagtttgagtatctttattaaggaaacccttacgaatcctgaaaattatgctagcatgatttttttatatatagaagtttaaaaataaaccaggtcaggtttgtatatgtaaaattgttgacatcaatgatgtctttccatattcttatctgggcttaagaaatacattctgtatttttccagattctttgtagcctttgaaagatttttacagtacatatgtcttgactgagctgtcctttcttaatacaaaagcgtgtataattttcttaacttgtacagttggtaaacttttatgagaggaattgttattctgagtctgtcagctttcattttattttgctaaggtttttctaatgaatttttaagtgtttgtgtagtaattaagtcatatttcttatccaggtggttaaagcattcataaaggattataaaatttttttttttttttttttttttaaatttctacttaagggcaagtaatttgagaattctgaaattaagcatgatgcttagattgcagtttgttttgcatttgctataattttcaaaattatttttgaagcaagacaaaagtttaatgtcagcttaagtgcttaaatatatcatgctgaccagaatcctgttatttttatatgcatcataaaatttcccatttctgcattaaataaacagaggaggggggtcaagtgatacttagatattggcacacacaaggaacaactgttggcaggcagtatcgattttatgaagagaaagtgaagtttgaaaacttttcaaacttttctagttacaatccaatttttcagatttgataatgcttttccaaagtgaaaataagatacacaataatcattgctctgtgtgattacagataggattatccatctgcatagccttgtaaaagtgccattttatttttagtgctaaattcttgttaaataatgtagttttatatagctgatagaccaacctatatccaaacttttataaaatattaattattcttgtttttctcacacaggcatactccaaatgcttcttccagttcatttttcagccatcagttcaagagccaatgcctttttaaaataaagcttctgtggtcttgtttttaatggctcaactgtctgatgtaattgagtgaaggtttgcactgagaaattagcattcaggccttacccccatgaagtattactgttaacatatgttcggactgcttcccttcaccaatgtgaacaactttttttcccaaacagtgttaaaagccactttgcaacacttgacttcatcttaatgtacattcactgttgttacatacatatctaagtaaatcaaagttttgggtggaagtgttgagaagtatgagttttttgttgtttttgttttacttaaaacttttaatttatccagaatggcagtagctttagcaagcagatggtcacaatctgttttctaaatcattttttattaaatgaatccaaagtatcctagctctttgtcaaagatggtctgtagaaatgtttttaaagattagggatgctgtactttttgaattgttgcagtgttggagatgccattttcacctttttaaaaagatgcattttatttgcaggtttgtgaagttcttgcaaactcttactacagaaatgttttaaatacattctcaggcatgtttgcaaaaatatggcacatgtatacattttaggaaatgttacttttgttaatctttaaaaaatacacctaatgaaagacattccactattatgcgtaatgctcagctttttgtaaagaaatatttaattgtattttgtgtttatacaggtatttcacacaataatttgttcttaatgcagccactataacttgataagtcattgcactatttaaaaagttttagtaatatcatgaatttaatttgcttaagatttagtacatttcagaacttttgaacttttgacaaattgcattggaaaaagaagtctgttaatagtgatttagtctccccgcctcattcccacccccaacaaagcactatcattttcatttggaatgggtattttctgtttcatgatgtattttcaaatagagttcaggatctgcaattcagttcaacacaagtttgttgagctttaaaatgtatttgaagtaatatttaaataggcatttaaaatttcaaattagatgttaaatttatgcatagtaattttgcactgtaaaataattcccttctcccattccttgtctgccattctgaatatgcttattaaaatatttttttaaacat

SEQ ID NO: 961 - protein, 512 aa, Homosapiens
MAEPSVESSSPGGSATSDDHEFDPSADMLVHDFDDERTLEEEEMMEGETNFSSEIEDLAREGDMPIHELLSLYGYGSTVRLPEEDEEEEEEEEEGEDDEDADNDDNSGCSGENKEENIKDSSGQEDETQSSNDDPSQSVASQDAQEIIRPRRCKYFDTNSEVEEESEEDEDYIPSEDWKKEIMVGSMFQAEIPVGICRYKENEKVYENDDQLLWDPEYLPEDKVIIFLKDASRRTGDEKGVEAIPEGSHIKDNEQALYELVKCNFDTEEALRRLRFNVKAAREELSVWTEEECRNFEQGLKAYGKDFHLIQANKVRTRSVGECVAFYYMWKKSERYDFFAQQTRFGKKKYNLHPGVTDYMDRLLDESESAASSRAPSPPPTASNSSNSQSEKEDGTVSTANQNGVSSNGPGEILNKEEVKVEGLHINGPTGGNKKPLHADMDTNGYETDNLTTDPKLAHMTARNENDFDEKSERPAKRRRVNSNGKESPGSSEFFQEAVSHGKFEELENTDD

SEQ ID NO: 962 - DNA, 2643 bp, Homosapiens
gcggctcctgcgcgttcccgccgaggcagtggcggcgggagcggcagagacggcagcggccggagtcccgttgctgagtctcacatccgggttctggccgtgacccagctgcggccgccgcggagatgtgacccggcagtacggcaaatatggcggagccatctgttgaatcttcaagtccaggaggttcagcaacatcagatgaccatgaatttgatccatcagctgacatgctggttcatgattttgatgatgaacgaacattagaagaggaagaaatgatggaaggagaaacaaacttcagctctgaaatagaagatcttgcaagggaaggcgacatgccaattcatgaacttctcagcctttatggttatggtagtactgttcgactacctgaagaagatgaggaagaggaagaagaggaagaagaaggtgaagatgatgaagatgctgataatgatgacaacagtggctgtagtggggaaaataaagaggagaatataaaggattcatcaggtcaggaggatgaaactcagtcttccaatgatgatccatcacaatctgttgcttctcaagatgcccaggaaataatccgcccacgtcgatgtaaatattttgatacaaatagtgaagtagaagaagaatctgaagaagatgaagattatattccatcagaagactggaaaaaggagattatggtgggctccatgtttcaagcagaaattccagttggcatttgtagatacaaagaaaatgaaaaagtatatgaaaatgatgatcagctcctgtgggaccctgagtacttaccagaagataaagtgattatatttcttaaagatgcatctagaagaacaggtgatgagaagggtgtagaagcaattcctgaaggatctcacataaaagacaatgaacaggctttatatgaattggttaaatgcaattttgatacagaagaagcattgagaagattaagatttaatgtaaaagcagctagagaggaattatctgtttggacagaggaagagtgtagaaattttgaacaagggctgaaggcctatggaaaggattttcatttgattcaggctaataaagtccgaacaaggtcagttggtgaatgtgtagcattctattacatgtggaaaaaatctgaacgttatgatttctttgctcagcaaacacgatttggaaagaagaaatataatcttcatcctggtgtaacggattacatggatcgtcttctagacgaaagtgaaagtgctgcatctagtcgagcaccatcccctcccccaactgcatcaaacagtagtaacagccagtctgagaaagaagatggcactgtaagcactgctaatcaaaatggagtgtcatctaatggaccaggcatactccaaatgcttcttccagttcatttttcagccatcagttcaagagccaatgcctttttaaaataaagcttctgtggtcttgtttttaatggctcaactgtctgatgtaattgagtgaaggtttgcactgagaaattagcattcaggccttacccccatgaagtattactgttaacatatgttcggactgcttcccttcaccaatgtgaacaactttttttcccaaacagtgttaaaagccactttgcaacacttgacttcatcttaatgtacattcactgttgttacatacatatctaagtaaatcaaagttttgggtggaagtgttgagaagtatgagttttttgttgtttttgttttacttaaaacttttaatttatccagaatggcagtagctttagcaagcagatggtcacaatctgttttctaaatcattttttattaaatgaatccaaagtatcctagctctttgtcaaagatggtctgtagaaatgtttttaaagattagggatgctgtactttttgaattgttgcagtgttggagatgccattttcacctttttaaaaagatgcattttatttgcaggtttgtgaagttcttgcaaactcttactacagaaatgttttaaatacattctcaggcatgtttgcaaaaatatggcacatgtatacattttaggaaatgttacttttgttaatctttaaaaaatacacctaatgaaagacattccactattatgcgtaatgctcagctttttgtaaagaaatatttaattgtattttgtgtttatacaggtatttcacacaataatttgttcttaatgcagccactataacttgataagtcattgcactatttaaaaagttttagtaatatcatgaatttaatttgcttaagatttagtacatttcagaacttttgaacttttgacaaattgcattggaaaaagaagtctgttaatagtgatttagtctccccgcctcattcccacccccaacaaagcactatcattttcatttggaatgggtattttctgtttcatgatgtattttcaaatagagttcaggatctgcaattcagttcaacacaagtttgttgagctttaaaatgtatttgaagtaatatttaaataggcatttaaaatttcaaattagatgttaaatttatgcatagtaattttgcactgtaaaataattcccttctcccattccttgtctgccattctgaatatgcttattaaaatatttttttaaacat

SEQ ID NO: 963 - protein, 433 aa, Homosapiens
MAEPSVESSSPGGSATSDDHEFDPSADMLVHDFDDERTLEEEEMMEGETNFSSEIEDLAREGDMPIHELLSLYGYGSTVRLPEEDEEEEEEEEEGEDDEDADNDDNSGCSGENKEENIKDSSGQEDETQSSNDDPSQSVASQDAQEIIRPRRCKYFDTNSEVEEESEEDEDYIPSEDWKKEIMVGSMFQAEIPVGICRYKENEKVYENDDQLLWDPEYLPEDKVIIFLKDASRRTGDEKGVEAIPEGSHIKDNEQALYELVKCNFDTEEALRRLRFNVKAAREELSVWTEEECRNFEQGLKAYGKDFHLIQANKVRTRSVGECVAFYYMWKKSERYDFFAQQTRFGKKKYNLHPGVTDYMDRLLDESESAASSRAPSPPPTASNSSNSQSEKEDGTVSTANQNGVSSNGPGILQMLLPVHFSAISSRANAFLK

SEQ ID NO: 964 - DNA, 5084 bp, Homosapiens
gcggctcctgcgcgttcccgccgaggcagtggcggcgggagcggcagagacggcagcggccggagtcccgttgctgagtctcacatccgggttctggccgtgacccagctgcggccgccgcggagatgtgacccggcagtacggcaaatatggcggagccatctgttgaatcttcaagtccaggaggttcagcaacatcagatgaccatgaatttgatccatcagctgacatgctggttcatgattttgatgatgaacgaacattagaagaggaagaaatgatggaaggagaaacaaacttcagctctgaaatagaagatcttgcaagggaaggcgacatgccaattcatgaacttctcagcctttatggttatggtagtactgttcgactacctgaagaagatgaggaagaggaagaagaggaagaagaaggtgaagatgatgaagatgctgataatgatgacaacagtggctgtagtggggaaaataaagaggagaatataaaggattcatcaggtcaggaggatgaaactcagtcttccaatgatgatccatcacaatctgttgcttctcaagatgcccaggaaataatccgcccacgtcgatgtaaatattttgatacaaatagtgaagtagaagaagaatctgaagaagatgaagattatattccatcagaagactggaaaaaggagattatggtgggctccatgtttcaagcagaaattccagttggcatttgtagatacaaagaaaatgaaaaagtatatgaaaatgatgatcagctcctgtgggaccctgagtacttaccagaagataaagtgattatatttcttaaagatgcatctagaagaacaggtgatgagaagggtgtagaagcaattcctgaaggatctcacataaaagacaatgaacaggctttatatgaattggttaaatgcaattttgatacagaagaagcattgagaagattaagatttaatgtaaaagcagctagagaggaattatctgtttggacagaggaagagtgtagaaattttgaacaagggctgaaggcctatggaaaggattttcatttgattcaggctaataaagtccgaacaaggtcagttggtgaatgtgtagcattctattacatgtggaaaaaatctgaacgttatgatttctttgctcagcaaacacgatttggaaagaagaaatataatcttcatcctggtgtaacggattacatggatcgtcttctagacgaaagtgaaagtgctgcatctagtcgagcaccatcccctcccccaactgcatcaaacagtagtaacagccagtctgagaaagaagatggcactgtaagcactgctaatcaaaatggagtgtcatctaatggaccaggtgaaatattaaacaaagaggaagtaaaagttgaagggttacacattaatggaccaacaggtggaaataagaaaccacttcatgcagatatggatactaatggttatgaaacagataaccttaccactgacccaaaacttgcccatatgactgcaagaaatgaaaatgattttgatgaaaaaagtgagagacctgccaaaaggcgaagggtaaacagcaatggaaaagaaagtccaggttcttctgaatttttccaagaagcagtctcacatgggaaatttgaagaacttgaaaacacagatgactaaattttagacctattttactttctttggagtaaattctggtgtgactaaaattttcagggttgatgggttaccttaaaaagttgatttccttgaagcagtttgaaaatttgaattgagtcttaactttaggaaatgaggtttcataattctgccttttgcagatttttttactttaaagctgtcagactcttttaagggtattttaaaaattagtaaatttgaatgaactaaagatatatctctaccttctcatttgaatatctttagttcattcagatttactaattttggtaaatctgaatgaactaaagatgtatctgtaccttctcatttgatgtattaatcataaaatttcactacaaggtaatttttgcttagtttgatggatgaatgggaaactcaagtccaaatttctgcttaataccaatttctctgagtttcttgaaatgtctttaaaacagacatttttctcaccaaacagtttgagtatctttattaaggaaacccttacgaatcctgaaaattatgctagcatgatttttttatatatagaagtttaaaaataaaccaggtcaggtttgtatatgtaaaattgttgacatcaatgatgtctttccatattcttatctgggcttaagaaatacattctgtatttttccagattctttgtagcctttgaaagatttttacagtacatatgtcttgactgagctgtcctttcttaatacaaaagcgtgtataattttcttaacttgtacagttggtaaacttttatgagaggaattgttattctgagtctgtcagctttcattttattttgctaaggtttttctaatgaatttttaagtgtttgtgtagtaattaagtcatatttcttatccaggtggttaaagcattcataaaggattataaaatttttttttttttttttttttttaaatttctacttaagggcaagtaatttgagaattctgaaattaagcatgatgcttagattgcagtttgttttgcatttgctataattttcaaaattatttttgaagcaagacaaaagtttaatgtcagcttaagtgcttaaatatatcatgctgaccagaatcctgttatttttatatgcatcataaaatttcccatttctgcattaaataaacagaggaggggggtcaagtgatacttagatattggcacacacaaggaacaactgttggcaggcagtatcgattttatgaagagaaagtgaagtttgaaaacttttcaaacttttctagttacaatccaatttttcagatttgataatgcttttccaaagtgaaaataagatacacaataatcattgctctgtgtgattacagataggattatccatctgcatagccttgtaaaagtgccattttatttttagtgctaaattcttgttaaataatgtagttttatatagctgatagaccaacctatatccaaacttttataaaatattaattattcttgtttttctcacacaggcatactccaaatgcttcttccagttcatttttcagccatcagttcaagagccaatgcctttttaaaataaagcttctgtggtcttgtttttaatggctcaactgtctgatgtaattgagtgaaggtttgcactgagaaattagcattcaggccttacccccatgaagtattactgttaacatatgttcggactgcttcccttcaccaatgtgaacaactttttttcccaaacagtgttaaaagccactttgcaacacttgacttcatcttaatgtacattcactgttgttacatacatatctaagtaaatcaaagttttgggtggaagtgttgagaagtatgagttttttgttgtttttgttttacttaaaacttttaatttatccagaatggcagtagctttagcaagcagatggtcacaatctgttttctaaatcattttttattaaatgaatccaaagtatcctagctctttgtcaaagatggtctgtagaaatgtttttaaagattagggatgctgtactttttgaattgttgcagtgttggagatgccattttcacctttttaaaaagatgcattttatttgcaggtttgtgaagttcttgcaaactcttactacagaaatgttttaaatacattctcaggcatgtttgcaaaaatatggcacatgtatacattttaggaaatgttacttttgttaatctttaaaaaatacacctaatgaaagacattccactattatgcgtaatgctcagctttttgtaaagaaatatttaattgtattttgtgtttatacaggtatttcacacaataatttgttcttaatgcagccactataacttgataagtcattgcactatttaaaaagttttagtaatatcatgaatttaatttgcttaagatttagtacatttcagaacttttgaacttttgacaaattgcattggaaaaagaagtctgttaatagtgatttagtctccccgcctcattcccacccccaacaaagcactatcattttcatttggaatgggtattttctgtttcatgatgtattttcaaatagagttcaggatctgcaattcagttcaacacaagtttgttgagctttaaaatgtatttgaagtaatatttaaataggcatttaaaatttcaaattagatgttaaatttatgcatagtaattttgcactgtaaaataattcccttctcccattccttgtctgccattctgaatatgcttattaaaatatttttttaaacatatttgcctacataatactgtgtgaatattttcattagattaattcactaagattttattagagattgtttgaatgatgcatgttattgacaaggcaaatatatatatatacacagtctgtttcttctattcctagacatattgcactactttttcagtggttcttggtcccctttaccacatcttgggtgatgtatttttgtcttcttcccctttgccacaagagatcctttcagtccctagacctccattcactctgtttctcttctgctggattatataatttaaaaataatgtgttcccgtattttgtagtggagttcatatcacattatgttttgcaaaataaaacttgttttgtcacaatattttctttgctatcgatggataattaggagtgggcacttggaataactgagggctggtgaatataataggcaatatttacatggggtgtgtaactaaataccaaatcagatagtaaggttttcccaactataatccatattcatgaaaaatgccagtgtggaaaaccatgtaacatacagaagaacaggagtttccaaattttaaccttttattctaaaaatgactctcttctctcaaaatgactttttctgtatcacataattc

SEQ ID NO: 965 - protein, 512 aa, Homosapiens; identical to SEQ ID NO: 961

SEQ ID NO: 966 - DNA, 3274 bp, Homosapiens
gcggctcctgcgcgttcccgccgaggcagtggcggcgggagcggcagagacggcagcggccggagtcccgttgctgagtctcacatccgggttctggccgtgacccagctgcggccgccgcggagatgtgacccggcagtacggcaaatatggcggagccatctgttgaatcttcaagtccaggaggttcagcaacatcagatgaccatgaatttgatccatcagctgacatgctggttcatgattttgatgatgaacgaacattagaagaggaagaaatgatggaaggagaaacaaacttcagctctgaaatagaagatcttgcaagggaaggcgacatgccaattcatgaacttctcagcctttatggttatggtagtactgttcgactacctgaagaagatgaggaagaggaagaagaggaagaagaaggtgaagatgatgaagatgctgataatgatgacaacagtggctgtagtggggaaaataaagaggagaatataaaggattcatcaggtcaggaggatgaaactcagtcttccaatgatgatccatcacaatctgttgcttctcaagatgcccaggaaataatccgcccacgtcgatgtaaatattttgatacaaatagtgaagtagaagaagaatctgaagaagatgaagattatattccatcagaagactggaaaaaggagattatggtgggctccatgtttcaagcagaaattccagttggcatttgtagatacaaagaaaatgaaaaagtatatgaaaatgatgatcagctcctgtgggaccctgagtacttaccagaagataaagtgattatatttcttaaagatgcatctagaagaacaggtgatgagaagggtgtagaagcaattcctgaaggatctcacataaaagacaatgaacaggctttatatgaattggttaaatgcaattttgatacagaagaagcattgagaagattaagatttaatgtaaaagcagctagagaggaattatctgtttggacagaggaagagtgtagaaattttgaacaagggctgaaggcctatggaaaggattttcatttgattcaggctaataaagtccgaacaaggtcagttggtgaatgtgtagcattctattacatgtggaaaaaatctgaacgttatgatttctttgctcagcaaacacgatttggaaagaagaaatataatcttcatcctggtgtaacggattacatggatcgtcttctagacgaaagtgaaagtgctgcatctagtcgagcaccatcccctcccccaactgcatcaaacagtagtaacagccagtctgagaaagaagatggcactgtaagcactgctaatcaaaatggagtgtcatctaatggaccaggcatactccaaatgcttcttccagttcatttttcagccatcagttcaagagccaatgcctttttaaaataaagcttctgtggtcttgtttttaatggctcaactgtctgatgtaattgagtgaaggtttgcactgagaaattagcattcaggccttacccccatgaagtattactgttaacatatgttcggactgcttcccttcaccaatgtgaacaactttttttcccaaacagtgttaaaagccactttgcaacacttgacttcatcttaatgtacattcactgttgttacatacatatctaagtaaatcaaagttttgggtggaagtgttgagaagtatgagttttttgttgtttttgttttacttaaaacttttaatttatccagaatggcagtagctttagcaagcagatggtcacaatctgttttctaaatcattttttattaaatgaatccaaagtatcctagctctttgtcaaagatggtctgtagaaatgtttttaaagattagggatgctgtactttttgaattgttgcagtgttggagatgccattttcacctttttaaaaagatgcattttatttgcaggtttgtgaagttcttgcaaactcttactacagaaatgttttaaatacattctcaggcatgtttgcaaaaatatggcacatgtatacattttaggaaatgttacttttgttaatctttaaaaaatacacctaatgaaagacattccactattatgcgtaatgctcagctttttgtaaagaaatatttaattgtattttgtgtttatacaggtatttcacacaataatttgttcttaatgcagccactataacttgataagtcattgcactatttaaaaagttttagtaatatcatgaatttaatttgcttaagatttagtacatttcagaacttttgaacttttgacaaattgcattggaaaaagaagtctgttaatagtgatttagtctccccgcctcattcccacccccaacaaagcactatcattttcatttggaatgggtattttctgtttcatgatgtattttcaaatagagttcaggatctgcaattcagttcaacacaagtttgttgagctttaaaatgtatttgaagtaatatttaaataggcatttaaaatttcaaattagatgttaaatttatgcatagtaattttgcactgtaaaataattcccttctcccattccttgtctgccattctgaatatgcttattaaaatatttttttaaacatatttgcctacataatactgtgtgaatattttcattagattaattcactaagattttattagagattgtttgaatgatgcatgttattgacaaggcaaatatatatatatacacagtctgtttcttctattcctagacatattgcactactttttcagtggttcttggtcccctttaccacatcttgggtgatgtatttttgtcttcttcccctttgccacaagagatcctttcagtccctagacctccattcactctgtttctcttctgctggattatataatttaaaaataatgtgttcccgtattttgtagtggagttcatatcacattatgttttgcaaaataaaacttgttttgtcacaatattttctttgctatcgatggataattaggagtgggcacttggaataactgagggctggtgaatataataggcaatatttacatggggtgtgtaactaaataccaaatcagatagtaaggttttcccaactataatccatattcatgaaaaatgccagtgtggaaaaccatgtaacatacagaagaacaggagtttccaaattttaaccttttattctaaaaatgactctcttctctcaaaatgactttttctgtatcacataattc

SEQ ID NO: 967 - protein, 433 aa, Homosapiens; identical to SEQ ID NO: 963

SEQ ID NO: 968 - DNA, 710 bp, Homosapiens
cctttcatgcccaattttgaaaatgtcagtaaatgtgttcttaacatttagccatcacacaaaagagggttcatgtaatcttggtctccttgcattgtgaaatttcaccagtggtagtttgcagttgcttttgagaacatccagtttcacctaatctgtgatttgactgtatagatatgattactggatttcctatttaattatatttgtgggaggaggttactttttcattttgtattgttttaatgaaagtcaagccataacctgcttatctatttcatttagagtttctttcatttggcccctactgagctttatacaaaccctttttgttatttttcctactttgaagctctgtttttcagacttcagtctatgtcagaatcacctagagagcttgttaaaataccaatgactgagtcctgtccccagagtttcagtaggtttggggtgggacctgagcatttgcatttctaacagtttcccattagctctgggattacaggtgcccaccaccacgcccagctaatttttttgtgttttttagtagagatagggtttcgccatgttggccaggctggtcttaaactcctcacctcgtgatccgcctgcctcggccgcccatagtgctgggattacaggtgtgagccaccatgcctggctgaagattttttttaaagagtctgtttcagattattcacctcatttga

SEQ ID NO: 969 - protein, 47 aa, Homosapiens
MLARLVLNSSPRDPPASAAHSAGITGVSHHAWLKIFFKESVSDYSPH

SEQ ID NO: 970 - DNA, 6002 bp, Homosapiens
ggcggcgagcgcgcagctggcctagtctgcggtccccaactcctggagtcccctgggagctgccgctgcaggcccccgagccgctaggccccgccgccaggccaccgctgctgcggcagccatggcggaagttcatagacgtcagcatgctcgggttaaaggagaagcccccgcgaaatcctccacactccgagatgaggaggagctggggatggcgtcggccgaaacgctgaccgtgtttctgaagctgctggccgccggcttttacggcgtgagctccttcctgatcgtggtggtgaataagagcgtgctcaccaattacagatttccctcctcactatgtgttggacttggccagatggtggccacagtggcagttctctgggtgggaaaggcgctcagagtagtcaagtttcctgaccttgacagaaatgtacctcgaaagacgtttccactacctctactatattttgggaaccaaatcacgggactgttcagcacaaagaaactgaacttgccaatgtttacagttctgagaaggttctccatcctgtttacaatgtttgctgaaggagttttactcaagaagactttttcttggggtattaaaatgactgtatttgcaatgattattggagcctttgtagctgccagctctgacttggcatttgatctggaaggatatgcttttattctgataaacgatgtcctaacagcagcaaatggtgcatacgtaaaacaaaaattagattcaaaagagctgggaaaatatggactgctctattacaatgcactgttcatgattctgcccaccctggccattgcgtatttcacaggagatgcacaaaaggctgtggagtttgaaggctgggctgacaccctctttcttctgcagttcaccctctcctgtgtgatggggtttatcttaatgtacgccacagtactctgcacgcagtataattctgctcttacaactacaatagttggctgtattaagaatatattaataacttatattggaatggtctttggtggagattatattttcacgtggacaaacttcattggtttaaatatcagcattgctgggagcctggtatattcctatatcactttcactgaagagcagctgagcaaacagtcagaggctaataacaagctggacattaaggggaaaggagcagtgtgaccagaggattgcttcatctgatacgtaggcctaagtttttaatcaactcagaacactggcagttcctacagagacactgaggtgtcttgattatggaggaaataaccattcctttgcacttgtacaatctgaggattgattgctgccttttaaaattttatgaagagagaaacttataattgactctattttaaatatgttgtttgaattaatttatatcagactggaaaaggtactgggctttttaatttatttttcttatatgccgacagtgaaacatcagtgttttgaaagtattttatttcataatttgatatccaggtgtccctgagagctgcatatgtaatgtttgccaactggagcttcatcattcaaattgttgctgcatctggaggcagtttagcctttcctctgctggaaatgcagacgaatatgtgaaatttctcttctttgaatcttatttcttatgattgcattgtcttcatcatatcatcattccatttgccaaggaaaacaactttggcactataaaaatatgtggggctttgaagtgtattgctatctatgttggcttccctgactttcataggatgagcagagtgcattccttgaaaacatgttctttttttgttgtgtagaatggggataatgaagggggtgagaaagtaggccttttactaatttttcatctatttgacttattgattcaactaaaatgttttaagtatatgtgccaggcattgtgctaaatgctggggatacagagatgtttgcagaggtagttgaaacatctcactcctgccatagtgactcaggtaaggttgagaatttagctctgttaatctattcagaagatgtcactaagagtaagttgtttcagcactcaaaagccgcaaatctgtaaattggattaagaacacctgccctacctacccggcaatagtgtgaatccaaatgctgcaatgtgagatgaggtacaagtaaagagctgtgttttgtaaaccagtgcagctcagcattgactccctctctaagtgaaaattgcagacaggcaagtctgttttcccttgccaccttcctttgggtttggttgctctttggatgaatatgatgaggtcccacatttctgaatttattggtttgaggggaaaggctggttagacgtctttgtattgtcaatggttggtttttctctggcagtgtcagtgttagagctatcatcttccttcttaaatggcatgagcaatgagcaaacttccctcctttcaacattctcacctacatcatgtgccccttggctcacctactgagcttgccaacttctctcaaaaccaatgctgcattttgggagagcagctgtgaatgggcactgcctaaattgcctcttggggtaatctggagggtggaggtgttaactcaaacataaccctatgacttgactcagagatatccattgactttgaggattagtgtgtttgctcaggccagttgtacagccagtgtgcaagagatttggtacctttgcactaatgcacacaccagtgtctatttcattgggtttggaatccactggactctgttgacctaaacagttagggttttgattttttttgatatgcaaatttatattgagatcattttcatattcctgtcttttggtttgtctttactaaagcttggctggtggtgctgtgtccctagaattatccctgcaaccaactcccaagttacaagcttcattaagagccttagactcacttttttctagcatcttctgacctgagaaaattccactgggagtaaaggatagtatcttgtgtcatatgggtcttactctccctattttaccaatgagaaaacaaaactcagagaaagatgacttgctaatacatcaaacccatgtcctttttattgaactatgctgccatttaattaaccgcccttcccctctgagggagtaaggaaacagatcctgagttcacttgagcactttcaaaaaagcaagcagttgattgaatttggtgtcagagaggagcatactttgcaaatcaggaagagtgacagcttaccctgtcctggaacccttatcccacttccaggctgactttagttgataatgcacttctggctgtaaatgttgccaacacttcctggttttgcttaggtacagtgaaagggcatagtgagagctatttttagtgattctgttctttctgtcagcaacatgaaggagggacgtttgaataatttttgttgtagaatatttcttcatgaaaggcttttgggtgtctttaacaggtgttgggctagagccccaccaggagttgaactgcctcttgggggtcaggttccctaggagatctgtcacctcttcaggagtatttgagaacattgtgtagttacagcttcactaaatgcacgtgacaggcttctgtgccttgggagccctggcttatgctgaaacttctggctgaccagagcagtacagcaactttgccctgtctgtgttctgcttcctggatgcatccttcagccactaaccagcattgcaagatggagcagggtgaacaagctggagactgaatagtcttttggagtttgcgttttgattattgcaggcgtgttacaatatactggtgatttacctggtactgtggcacctcccagaaagtctggtttttgccccatgtttgatatttactaggcagaaattctttgtcctgttaactgcctcctgggagaaaaagaggcaatacagagttaaatccttaatttgcccactgagacagatgagctgtggtattccaaaagacaaattctatgactagtgtctcctgttcaatgtaagtgagaccctctttggccaatctgcttctagtcaaggctaaatggattggaataaccctagttggccaggctacacattgccagcatgtcccgttgagttttaattgcctcatgtggctgtggactttatgagtcaatcatttgtaggctccagtttgcacctagtttttttttttaaaaagtgcatttacacgcttttggtagtcctgttttatcaagaatccatggagggttttggtcagtacagctggtgcaggatcctcacggagaaacagtggagtttcacattgagttggtttgaaatggcaccccaggactttgggcctgccttacttgatagcctcgttcagtgagcaaagacttagtgagcagctcttgtatgccaagtattttgctaagctctggaaaaaagataaacaagacatggttcttgctttcaaggagtgtgtaattctttagccagatatggaaacctggaccctgagtgggagaaaggagacagatgaaaggagtccgtgattttgtaaccaagagctgcctgcatggttatgagtatcactgattttagggacgccccacagagctaaagcatttttttaatccgagaggacttttgtaactcatattagttaatcttctagctctgagatagcaacacagctcttagaattctgtaagtagcttgaggcctcctcctctactgtacatgttcttgctttcccaaaattgtaagtttggtttttcctatgaacaagactgtaattgatttttctctccctgaggaaaaaagttcggaataaatgagacatggatatgaaactacttagcacaatgcctggtacatattaggccctcagcaaatgtggctaccgtgtcattatttcatggtgagactcaaggcaaaacaagattcttaatttatgctccgtaaatgctagaggcttgggcaatacggtctgtcctgaaaaacaggactctgtgtctcattgcctctagaatccttaggtagcagtttctgttcactgtcttttcttttttaaaaatatctgctggacacaattacggccattacatgatgcaggtgattctacctattttttaaaaagaacaaaatttcttttatattgtgacagtacattttaataaaggaaaattattttcttccccctactccccctccttttttttttctggtaaagacagggtctcactctgttgccagactggtctcaaactcctggcctcaagtaacccttctgtctcagcctcccaaagtgctgggattacaggtgtgtgccacatgtccggccaggaaaattattttctatcttaaagaaacatagttacattttagaatgtcaattcagttaaatctttctcagtttttacctttagatggctcctggaaaggccagcgttccttttcccctctctgaattgaaagcacttgaccccatgctgcccctgcttccaggcctgtctcagttgtcatatattgtgagtccctggcaccattactgttttctaagccagtcttctaggtcttactttcaggatgctgcttcatggcatgaggatatagtttacagtgttgtagtttttttttttttaaagctttgttctttaaaaatactttttaaaaagaaatctactggttagatttattgtctcacaaaaatgtttttagagattatttttttcacaaatgttttctttctcatgctgatgatcaactgatttttgtctacaggtgttagcttctcacagtattttttcattttagagtctatttaccaaatgaccatttttagtgttaaaaggtactgaggaattgaggtatgtaaatcaggtgacataaacatgaaaattatgtgcctaaatatttttgtaatggtgtaaaataaatactttttcctgaaaacaagtattaaaattcctttgtaactgcatacagagactaatccag

SEQ ID NO: 971 - protein, 355 aa, Homosapiens; identical to SEQ ID NO: 38

SEQ ID NO: 972 - DNA, 5953 bp, Homosapiens
ggcggcgagcgcgcagctggcctagtctgcggtccccaactcctggagtcccctgggagctgccgctgcaggcccccgagccgctaggccccgccgccaggccaccgctgctgcggcagccatggcggaagttcatagacgtcagcatgctcgggttaaaggagaagcccccgcgaaatcctccacactccgagatgaggaggagctggggatggcgtcggccgaaacgctgaccgtgtttctgaagctgctggccgccggcttttacggcgtgagctccttcctgatcgtggtggtgaataagagcgtgctcaccaattacagatttccctcctcactatgtgttggacttggccagatggtggccacagtggcagttctctgggtgggaaaggcgctcagagtagtcaagtttcctgaccttgacagaaatgtacctcgaaagacgtttccactacctctactatattttgggaaccaaatcacgggactgttcagcacaaagaaactgaacttgccaatgtttacagttctgagaaggttctccatcctgtttacaatgtttgctgaaggagttttactcaagaagactttttcttggggtattaaaatgactgtatttgcaatgattattggagcctttgtagctgccagctctgacttggcatttgatctggaaggatatgcttttattctgataaacgatgtcctaacagcagcaaatggtgcatacgtaaaacaaaaattagattcaaaagagctgggaaaatatggactgctctattacaatgcactgttcatgattctgcccaccctggccattgcgtatttcacaggagatgcacaaaaggctgtggagtttgaaggctgggctgacaccctctttcttctgcagttcaccctctcctgtgtgatggggtttatcttaatgtacgccacagtactctgcacgcagtataattctgctcttacaactacaatagttggctgtattaagaatatattaataacttatattggaatggtctttggtggagattatattttcacgtggacaaacttcattggtttaaatatcagcattgctgggagcctggtatattcctatatcactttcactgaagagcagctgagcaaacagtcagaggctaataacaagctggacattaaggggaaaggagcagtgtgaccagaggattgcttcatctgatacgtaggcctaagtttttaatcaactcagaacactggcagttcctacagagacactgaggtgtcttgattatggaggaaataaccattcctttgcacttgtacaatctgaggattgattgctgccttttaaaattttatgaagagagaaacttataattgactctattttaaatatgttgtttgaattaatttatatcagactggaaaaggtactgggctttttaatttatttttcttatatgccgacagtgaaacatcagtgttttgaaagtattttatttcataatttgatatccaggtgtccctgagagctgcatatgtaatgtttgccaactggagcttcatcattcaaattgttgctgcatctggaggcagtttagcctttcctctgctggaaatgcagacgaatatgtgaaatttctcttctttgaatcttatttcttatgattgcattgtcttcatcatatcatcattccatttgccaaggaaaacaactttggcactataaaaatatgtggggctttgaagtgtattgctatctatgttggcttccctgactttcataggatgagcagagtgcattccttgaaaacatgttctttttttgttgtgtagaatggggataatgaagggggtgagaaagtaggccttttactaatttttcatctatttgacttattgattcaactaaaatgttttaagtatatgtgccaggcattgtgctaaatgctggggatacagagatgtttgcagaggtagttgaaacatctcactcctgccatagtgactcaggtaaggttgagaatttagctctgttaatctattcagaagatgtcactaagagtaagttgtttcagcactcaaaagccgcaaatctgtaaattggattaagaacacctgccctacctacccggcaatagtgtgaatccaaatgctgcaatgtgagatgaggtacaagtaaagagctgtgttttgtaaaccagtgcagctcagcattgactccctctctaagtgaaaattgcagacaggcaagtctgttttcccttgccaccttcctttgggtttggttgctctttggatgaatatgatgaggtcccacatttctgaatttattggtttgaggggaaaggctggttagacgtctttgtattgtcaatggttggtttttctctggcagtgtcagtgttagagctatcatcttccttcttaaatggcatgagcaatgagcaaacttccctcctttcaacattctcacctacatcatgtgccccttggctcacctactgagcttgccaacttctctcaaaaccaatgctgcattttgggagagcagctgtgaatgggcactgcctaaattgcctcttggggtaatctggagggtggaggtgttaactcaaacataaccctatgacttgactcagagatatccattgactttgaggattagtgtgtttgctcaggccagttgtacagccagtgtgcaagagatttggtacctttgcactaatgcacacaccagtgtctatttcattgggtttggaatccactggactctgttgacctaaacagttagggttttgattttttttgatatgcaaatttatattgagatcattttcatattcctgtcttttggtttgtctttactaaagcttggctggtggtgctgtgtccctagaattatccctgcaaccaactcccaagttacaagcttcattaagagccttagactcacttttttctagcatcttctgacctgagaaaattccactgggagtaaaggatagtatcttgtgtcatatgggtcttactctccctattttaccaatgagaaaacaaaactcagagaaagatgacttgctaatacatcaaacccatgtcctttttattgaactatgctgccatttaattaaccgcccttcccctctgagggagtaaggaaacagatcctgagttcacttgagcactttcaaaaaagcaagcagttgattgaatttggtgtcagagaggagcatactttgcaaatcaggaagagtgacagcttaccctgtcctggaacccttatcccacttccaggctgactttagttgataatgcacttctggctgtaaatgttgccaacacttcctggttttgcttaggtacagtgaaagggcatagtgagagctatttttagtgattctgttctttctgtcagcaacatgaaggagggacgtttgaataatttttgttgtagaatatttcttcatgaaaggcttttgggtgtctttaacaggtgttgggctagagccccaccaggagttgaactgcctcttgggggtcaggttccctaggagatctgtcacctcttcaggagtatttgagaacattgtgtagttacagcttcactaaatgcacgtgacaggcttctgtgccttgggagccctggcttatgctgaaacttctggctgaccagagcagtacagcaactttgccctgtctgtgttctgcttcctggatgcatccttcagccactaaccagcattgcaagatggagcagggtgaacaagctggagactgaatagtcttttggagtttgcgttttgattattgcaggcgtgttacaatatactggtgatttacctggtactgtggcacctcccagaaagtctggtttttgccccatgtttgatatttactaggcagaaattctttgtcctgttaactgcctcctgggagaaaaagaggcaatacagagttaaatccttaatttgcccactgagacagatgagctgtggtattccaaaagacaaattctatgactagtgtctcctgttcaatgtaagtgagaccctctttggccaatctgcttctagtcaaggctaaatggattggaataaccctagttggccaggctacacattgccagcatgtcccgttgagttttaattgcctcatgtggctgtggactttatgagtcaatcatttgtaggctccagtttgcacctagtttttttttttaaaaagtgcatttacacgcttttggtagtcctgttttatcaagaatccatggagggttttggtcagtacagctggtgcaggatcctcacggagaaacagtggagtttcacattgagttggtttgaaatggcaccccaggactttgggcctgccttacttgatagcctcgttcagtgagcaaagacttagtgagcagctcttgtatgccaagtattttgctaagctctggaaaaaagataaacaagacatggttcttgctttcaaggagtgtgtaattctttagccagatatggaaacctggaccctgagtgggagaaaggagacagatgaaaggagtccgtgattttgtaaccaagagctgcctgcatggttatgagtatcactgattttagggacgccccacagagctaaagcatttttttaatccgagaggacttttgtaactcatattagttaatcttctagctctgagatagcaacacagctcttagaattctgtaagtagcttgaggcctcctcctctactgtacatgttcttgctttcccaaaattgtaagtttggtttttcctatgaacaagactgtaattgatttttctctccctgaggaaaaaagttcggaataaatgagacatggatatgaaactacttagcacaatgcctggtacatattaggccctcagcaaatgtggctaccgtgtcattatttcatggtgagactcaaggcaaaacaagattcttaatttatgctccgtaaatgctagaggcttgggcaatacggtctgtcctgaaaaacaggactctgtgtctcattgcctctagaatccttaggtagcagtttctgttcactgtcttttcttttttaaaaatatctgctggacacaattacggccattacatgatgcaggtgattctacctattttttaaaaagaacaaaatttcttttatattgtgacagtacattttaataaaggaaaattattttcttccccctactccccctccttttttttttctggtaaagacagggtctcactctgttgccagactggtctcaaactcctggcctcaagtaacccttctgtctcagcctcccaaagtgctgggattacaggtgtgtgccacatgtccggccaggaaaattattttctatcttaaagaaacatagttacattttagaatgtcaattcagttaaatctttctcagtttttacctttagatggctcctggaaaggccagcgttccttttcccctctctgaattgaaagcacttgaccccatgctgcccctgcttccaggcctgtctcagttgtcatatattgtgagtccctggcaccattactgttttctaagccagtcttctaggtcttactttcaggatgctgcttcatggcatgaggatatagtttacagtgttgtagtttttttttttttaaagctttgttctttaaaaatactttttaaaaagaaatctactggttagatttattgtctcacaaaaatgtttttagagattatttttttcacaaatgttttctttctcatgctgatgatcaactgatttttgtctacaggtgttagcttctcacagtattttttcattttagagtctatttaccaaatgaccatttttagtgttaaaaggtactgaggaattgaggtatgtaaatcaggtgacataaacatgaaaattatgtgcctaaatatttttgtaatggtgtaaaataaatactttttcctg

SEQ ID NO: 973 - protein, 355 aa, Homosapiens; identical to SEQ ID NO: 38

SEQ ID NO: 974 - DNA, 1364 bp, Homosapiens
ggcggcgagcgcgcagctggcctagtctgcggtccccaactcctggagtcccctgggagctgccgctgcaggcccccgagccgctaggccccgccgccaggccaccgctgctgcggcagccatggcggaagttcatagacgtcagcatgctcgggttaaaggagaagcccccgcgaaatcctccacactccgagatgaggaggagctggggatggcgtcggccgaaacgctgaccgtgtttctgaagctgctggccgccggcttttacggcgtgagctccttcctgatcgtggtggtgaataagagcgtgctcaccaattacagatttccctcctcactatgtgttggacttggccagatggtggccacagtggcagttctctgggtgggaaaggcgctcagagtagtcaagtttcctgaccttgacagaaatgtacctcgaaagacgtttccactacctctactatattttgggaaccaaatcacgggactgttcagcacaaagaaactgaacttgccaatgtttacagttctgagaaggttctccatcctgtttacaatgtttgctgaaggagttttactcaagaagactttttcttggggtattaaaatgactgtatttgcaatgattattggagcctttgtagctgccagctctgacttggcatttgatctggaaggatatgcttttattctgataaacgatgtcctaacagcagcaaatggtgcatacgtaaaacaaaaattagattcaaaagagctgggaaaatatggactgctctattacaatgcactgttcatgattctgcccaccctggccattgcgtatttcacaggagatgcacaaaaggctgtggagtttgaaggctgggctgacaccctctttcttctgcagttcaccctctcctgtgtgatggggtttatcttaatgtacgccacagtactctgcacgcagtataattctgctcttacaactacaatagttggctgtattaagaatatattaataacttatattggaatggtctttggtggagattatattttcacgtggacaaacttcattggtttaaatatcagcattgctgggagcctggtatattcctatatcactttcactgaagagcagctgagcaaacagtcagaggctaataacaagctggacattaaggggaaaggagcagtgtgaccagaggattgcttcatctgatacgtaggcctaagtttttaatcaactcagaacactggcagttcctacagagacactgaggtgtcttgattatggaggaaataaccattcctttgcacttgtacaatctgaggattgattgctgccttttaaaattttatgaagagagaaactt

SEQ ID NO: 975 - protein, 355 aa, Homosapiens; identical to SEQ ID NO: 38

SEQ ID NO: 976 - DNA, 2137 bp, Homosapiens
agatttcatcatgttggccagcctggtctcaaactcctgacctcaagtgacccgcctgcctcagcctcccaaagtgctgggattacaggaatttagtgattgacaatggcagaaaaaatcctagagaagttggatgtccttgataagcaagcagagataatcttggccagaagaacaaagataaacaggcttcagagtgaaggaagaaaaacaactatggctatacccctgacatttgattttcagttggaatttgaagaagctcttgctacatccgcgtctaaggcaatatcaaagatcaaagaagacaagtcatgcagcattacaaaatcaaaaatgcatgtctctttcaaatgtgagcctgaacctagaaagagtaattttgaaaagtcaaatttaagaccattctttattcaaacaaatgtaaaaaataaagaaagtgagtcaacagctcaaattgaaaaaaaacctaggaaaccattggattctgttggtctcttagaaggtgatagaaataaaagaaaaaaatctccacagatgaacgattttaatataaaagaaaacaaatcggtcagaaattatcaattaagtaagtataggtcagtaagaaagaaaagcttgctcccgttgtgctttgaggatgaattgaaaaatccacatgccaagatagtcaacgttagtccaacaaagacagtaacttctcacatggaacaaaaggacacaaatcccataattttccatgacacagaatatgtacgaatgttacttttgacaaaaaatagattttcttctcatcctttggaaaatgaaaacatttacccacataaaagaacaaatttcattttagaaagaaattgtgaaatcctcaaatctataattggcaatcaatctatttctcttttcaaaccccaaaaaactatgcctacagtacagagaaaagatatacagatccctatgtcttttaaagcgggccacacaactgtagatgataaactaaagaagaaaactaataagcagacactagaaaacagatcttggaatacactctataatttctcacagaatttttctagcctaacaaaacaatttgtgggttaccttgataaagctgttattcatgaaatgagtgcccaaactggaaaatttgaaagaatgttttctgcaggaaaaccaacgagcatacccacatccagtgccttacctgtcaaatgttactcaaagccttttaaatatatatatgaactaaataatgtaacgccactggataatttgttaaacttatcaaatgaaattttaaatgcctcataaaatattatgtatgcagcaatatttgagtaacaagaagcaaatatccaagttccaaaattataaaagaaattcttatccaaatagtaatgttctaattgatcatataagaaagcaaagcatagacattagaattataagtcagcagtggtctgttcaagaacaatcaacatttttagaaaatagtaggacaaaattaggaaataattatcaccaagaggatctagttcatgactttctattatctcaattagattgctcaatcatcagccttcctatactaaactctgattcaggaccaagaaaggcatagtctgactctggaaatgcgctgttggaagccaaataacatcaatactcttgttctataattgaatatcaaataagacaaattaccattaatttaatgactgtggagttaattgtataccagcatttcagcaaatcatcatcaatagtattacattagcaatttatgcaattaaaagggctttgtaaaactttgaatagattttattgtcattagtagctgttggaacttcattattatataatgtttttgcaaactttaacttttttctaaattgttaaataaaagaataactatccttaatctaaataattttggtagcaaatcctataaggtattaaacattttaaggtatattattacattgctattttactgtttctcattaacccaaacagtttaaaggcagaattccacttagaaacaagttgcattttgaaagtttatttgtaatccatttgtttggaattcagaaatgtatttcacataaaaataatcttggaagtaataaattccaaaatt

SEQ ID NO: 977 - protein, 400 aa, Homosapiens; identical to SEQ ID NO: 40

SEQ ID NO: 978 - DNA, 2394 bp, Homosapiens
ggggcgagtaacccgcggagccagaagagggaggaaaggagatgagatttcatcatgttggccagcctggtctcaaactcctgacctcaagtgacccgcctgcctcagcctcccaaagtgctgggattacaggaatttagtgattgacaatggcagaaaaaatcctagagaagttggatgtccttgataagcaagcagagataatcttggccagaagaacaaagataaacaggcttcagagtgaaggaagaaaaacaactatggctatacccctgacatttgattttcagttggaatttgaagaagctcttgctacatccgcgtctaaggcaatatcaaagatcaaagaagacaagtcatgcagcattacaaaatcaaaaatgcatgtctctttcaaatgtgagcctgaacctagaaagagtaattttgaaaagtcaaatttaagaccattctttattcaaacaaatgtaaaaaataaagaaagtgagtcaacagagccagtagaagaacatctaaaatcaagatctattagaccctatctttatcttaaggatacaactgagatggaaaatgcagggcctttgaatgttctatattcacagcatagacaagcatgtagaagatcactgggttctacagacttttctcctatgttcaacattcagtctaatgctcataaaaaggaaaaagactctactttatttacagctcaaattgaaaaaaaacctaggaaaccattggattctgttggtctcttagaaggtgatagaaataaaagaaaaaaatctccacagatgaacgattttaatataaaagaaaacaaatcggtcagaaattatcaattaagtaagtataggtcagtaagaaagaaaagcttgctcccgttgtgctttgaggatgaattgaaaaatccacatgccaagatagtcaacgttagtccaacaaagacagtaacttctcacatggaacaaaaggacacaaatcccataattttccatgacacagaatatgtacgaatgttacttttgacaaaaaatagattttcttctcatcctttggaaaatgaaaacatttacccacataaaagaacaaatttcattttagaaagaaattgtgaaatcctcaaatctataattggcaatcaatctatttctcttttcaaaccccaaaaaactatgcctacagtacagagaaaagatatacagatccctatgtcttttaaagcgggccacacaactgtagatgataaactaaagaagaaaactaataagcagacactagaaaacagatcttggaatacactctataatttctcacagaatttttctagcctaacaaaacaatttgtgggttaccttgataaagctgttattcatgaaatgagtgcccaaactggaaaatttgaaagaatgttttctgcaggaaaaccaacgagcatacccacatccagtgccttacctgtcaaatgttactcaaagccttttaaatatatatatgaactaaataatgtaacgccactggataatttgttaaacttatcaaatgaaattttaaatgcctcataaaatattatgtatgcagcaatatttgagtaacaagaagcaaatatccaagttccaaaattataaaagaaattcttatccaaatagtaatgttctaattgatcatataagaaagcaaagcatagacattagaattataagtcagcagtggtctgttcaagaacaatcaacatttttagaaaatagtaggacaaaattaggaaataattatcaccaagaggatctagttcatgactttctattatctcaattagattgctcaatcatcagccttcctatactaaactctgattcaggaccaagaaaggcatagtctgactctggaaatgcgctgttggaagccaaataacatcaatactcttgttctataattgaatatcaaataagacaaattaccattaatttaatgactgtggagttaattgtataccagcatttcagcaaatcatcatcaatagtattacattagcaatttatgcaattaaaagggctttgtaaaactttgaatagattttattgtcattagtagctgttggaacttcattattatataatgtttttgcaaactttaacttttttctaaattgttaaataaaagaataactatccttaatctaaataattttggtagcaaatcctataaggtattaaacattttaaggtatattattacattgctattttactgtttctcattaacccaaacagtttaaaggcagaattccacttagaaacaagttgcattttgaaagtttatttgtaatccatttgtttggaattcagaaatgtatttcacataaaaataatcttggaagtaataaattccaaaatt

SEQ ID NO: 979 - protein, 471 aa, Homosapiens
MAEKILEKLDVLDKQAEIILARRTKINRLQSEGRKTTMAIPLTFDFQLEFEEALATSASKAISKIKEDKSCSITKSKMHVSFKCEPEPRKSNFEKSNLRPFFIQTNVKNKESESTEPVEEHLKSRSIRPYLYLKDTTEMENAGPLNVLYSQHRQACRRSLGSTDFSPMFNIQSNAHKKEKDSTLFTAQIEKKPRKPLDSVGLLEGDRNKRKKSPQMNDFNIKENKSVRNYQLSKYRSVRKKSLLPLCFEDELKNPHAKIVNVSPTKTVTSHMEQKDTNPIIFHDTEYVRMLLLTKNRFSSHPLENENIYPHKRTNFILERNCEILKSIIGNQSISLFKPQKTMPTVQRKDIQIPMSFKAGHTTVDDKLKKKTNKQTLENRSWNTLYNFSQNFSSLTKQFVGYLDKAVIHEMSAQTGKFERMFSAGKPTSIPTSSALPVKCYSKPFKYIYELNNVTPLDNLLNLSNEILNAS

SEQ ID NO: 980 - DNA, 1916 bp, Homosapiens
agatttcatcatgttggccagcctggtctcaaactcctgacctcaagtgacccgcctgcctcagcctcccaaagtgctgggattacaggaatttagtgattgacaatggcagaaaaaatcctagagaagttggatgtccttgataagcaagcagagataatcttggccagaagaacaaagataaacaggcttcagagtgaaggaagaaaaacaactatggctatacccctgacatttgattttcagttggaatttgaagaagctcttgctacatccgcgtctaaggcaatatcaaagatcaaagaagacaagtcatgcagcattacaaaatcaaaaatgcatgtctctttcaaatgtgagcctgaacctagaaagagtaattttgaaaagtcaaatttaagaccattctttattcaaacaaatgtaaaaaataaagaaagtgagtcaacagctcaaattgaaaaaaaacctaggaaaccattggattctgttggtctcttagaaggtgatagaaataaaagaaaaaaatctccacagatgaacgattttaatataaaagaaaacaaatcggtcagaaattatcaattaagtaagtataggtcagtaagaaagaaaagcttgctcccgttgtgctttgaggatgaattgaaaaatccacatgccaagatagtcaacgttagtccaacaaagacagtaacttctcacatggaacaaaaggacacaaatcccataattttccatgacacagaatatgtacgaatgttacttttgacaaaaaatagattttcttctcatcctttggaaaatgaaaacatttacccacataaaagaacaaatttcattttagaaagaaattgtgaaatcctcaaatctataattggcaatcaatctatttctcttttcaaaccccaaaaaactatgcctacagtacagagaaaagatatacagatccctatgtcttttaaagcgggccacacaactgtagatgataaactaaagaagaaaactaataagcagacactagaaaacagatcttggaatacactctataatttctcacagaatttttctagcctaacaaaacaatttgtgggttaccttgataaagctgttattcatgaaatgagtgcccaaactggaaaatttgaaagaatgttttctgcaggaaaaccaacgagcatacccacatccagtgccttacctgtcaaatgttactcaaagccttttaaatatatatatgaactaaataatgtaacgccactggataatttgttaaacttatcaaatgaaattttaaatgcctcataaaatattatgtatgcagcaatatttgagtaacaagaagcaaatatccaagttccaaaattataaaagaaattcttatccaaatagtaatgttctaattgatcatataagaaagcaaagcatagacattagaattataagtcagcagtggtctgttcaagaacaatcaacatttttagaaaatagtaggacaaaattaggaaataattatcaccaagaggatctagttcatgactttctattatctcaattagattgctcaatcatcagccttcctatactaaactctgattcaggaccaagaaaggcatagtctgactctggaaatgcgctgttggaagccaaataacatcaatactcttgttctataattgaatatcaaataagacaaattaccattaatttaatgactgtggagttaattgtataccagcatttcagcaaatcatcatcaatagtattacattagcaatttatgcaattaaaagggctttgtaaaactttgaatagattttattgtcattagtagctgttggaacttcattattatataatgtttttgcaaactttaacttttttctaaattgttaaataaaagaataactatcctt

SEQ ID NO: 981 - protein, 400 aa, Homosapiens; identical to SEQ ID NO: 40

SEQ ID NO: 982 - DNA, 4302 bp, Homosapiens
gagtaacccgcggagccagaagagggaggaaaggagatgagatttcatcatgttggccagcctggtctcaaactcctgacctcaagtgacccgcctgcctcagcctcccaaagtgctgggattacaggaatttagtgattgacaatggcagaaaaaatcctagagaagttggatgtccttgataagcaagcagagataatcttggccagaagaacaaagataaacaggcttcagagtgaaggaagaaaaacaactatggctatacccctgacatttgattttcagttggaatttgaagaagctcttgctacatccgcgtctaaggcaatatcaaagatcaaagaagacaagtcatgcagcattacaaaatcaaaaatctcaaattgaaaaaaaacctaggaaaccattggattctgttggtctcttagaaggtgatagaaataaaaggtaatttattttaaaatgcttaatactttgttctgtttaatgatgtttctagtaggacacattttataattgacaggaataaatttattctgccttattatttagttccacagcacaatccaatgaatggtccaagactgcttagccactagatatcacatccagaccttgagtattgttaaatggagagaaaggcatggaaaaatgaatagagggaatacaatttttttttttagtaaatacacacatttacttacatgacaacatggacatgaaaaagtagcttttctttggataaagttctcatttttctcatgaacccttccatctctgtataatgaaaaaaatcattaatccagtgtgtttcaaactttgtttgaatcaataatgaacaagcactttaggtttaactcagtttaaaaattatatcctgtctctgcctgaccacactattctatcctcttaacaaagctggggccaccctatgttggcatgaagctgccctgtggagcttcttccagaatttcaacataggacgttgcaaatacctctctacctttggtgttctcctcaacctacgtaataatacaactcgtccccactcaaaatccaaagaggcatatatatgactctcttgcttccactcctactcttgctgttttctcccacaaaccaggcaggacgggatgatcttgtcggtttgaaaagtctgtgggagagaggttggtgcagaagttggcagtgacttccagggataaaaggaggcagacaagaactgacaagctgtaatcagccccatgaacactaccctgaactgtgtttattttcagaaaaaaatctccacagatgaacgattttaatataaaagaaaacaaatcggtcagaaattatcaattaagtaagtataggtcagtaagaaagaaaagcttgctcccgttgtgctttgaggatgaattgaaaaatccacatgccaagatagtcaacgttagtccaacaaagacagtaacttctcacatggtaataagcatatcatctattgttaagtaaatatgtgtagtcataagacttatgggaatcacccatatattttagtgaccagaatctttgataaatcctttttacctcttggtttcatattccaaagtgataacagcacttaagttcttaatgcactttgcacaactcccaaaccagggattcctttataccagctgaaaattcagtgtttttctttatgaagaagcctttatcaaatttgcttgattataatagaactgtagaataaaaagaattttttaaaaatggctgtaccaatctagcagaatgcagtggtgtgcacctgtaatccccgctactctggagtctgaggcaggggaactgcttgagcccaggcatttgaatccagcctgagcaatataacaagaccccagttctaaaatgatgggaccatgaccatgtgtcaatttttctaacaatctgttttggctttttcaaccagaaagtgcatttattaaaggctatttagtaactcatgctctctagagaggcaatatggctcgaaagctgtctagtcaggaatcacctaattatatagccccagactgctccactgaggcccatgctattgtcacagataaaagtttacaactctgatgctgagcagggaatactctaagacatttgctactgctgtcattcaaagctagatgtaactcctaccaccctcactagaatagttttcccaatactttttcacagtgcttgctttctctgaactgaagacttcataggtgtatctgaatggcagagcctagggcaaatgcctatgtcctaaccgcaaagaagctgataaacatggttcttgcctctacctaagggtacatagacttgtcaagtggaaaattccctaaggtgttggacagaccaaaagcattacaaacatccattactatggctaaataggtaatattggcatcaccagtggattgcaaaactagatctttgtcatcttttcagtaatcatagcagacttggatattactgcgataaaaatgtctattcttaagtcaatctattactttggctattttattccacaaatatatattgagcactttttaggtgtcaggtattgtgctaagtattagggtacaataataacagttgtagagataatttttaattttttgaattacttactagaatatccagatttgtaattttggcttgtaatcagttatgtctcttctgaactttgactcaatccattttttggtatgctttttaatttctagaacatggaaacctaagaaatgccagaacaaccaccttatttctcaatgacagtaccccagatatttaacaaatatattaattttttcgtattccaatttatttcaaaaaacatttaaggccaaaagttcaagttttatcactaacatctctatagaatattaagataagaaggatgtatgttacatacaagtacagtattttcatgtatttgaataatgctactgttcatattaaatatttgtatgtagtcatttttagaatattttacaattttatttacatgttttaaaatatatggagctttcttgactcaatgaacttatgactaattattcttttctttaatctacaggaacaaaaggacacaaatcccataattttccatgacacagaatatgtacgaatgttacttttgacaaaaaatagattttcttctcatcctttggaaaatgaaaacatttacccacataaaagaacaaatttcattttagaaagaaattgtgaaatcctcaaatctataattggcaatcaatctatttctcttttcaaaccccaaaaaactatgcctacagtacagagaaaagatatacagatccctatgtcttttaaagcgggccacacaactgtagatgataaactaaagaagaaaactaataagcagacactagaaaacagatcttggaatacactctataatttctcacagaatttttctagcctaacaaaacaatttgtgggttaccttgataaagctgttattcatgaaatgagtgcccaaactggaaaatttgaaagaatgttttctgcaggaaaaccaacgagcatacccacatccagtgccttacctgtcaaatgttactcaaagccttttaaatatatatatgaactaaataatgtaacgccactggataatttgttaaacttatcaaatgaaattttaaatgcctcataaaatattatgtatgcagcaatatttgagtaacaagaagcaaatatccaagttccaaaattataaaagaaattcttatccaaatagtaatgttctaattgatcatataagaaagcaaagcatagacattagaattataagtcagcagtggtctgttcaagaacaatcaacatttttagaaaatagtaggacaaaattaggaaataattatcaccaagaggatctagttcatgactttctattatctcaattagattgctcaatcatcagccttcctatactaaactctgattcaggaccaagaaaggcatagtctgactctggaaatgcgctgttggaagccaaataacatcaatactcttgttctataattgaatatcaaataagacaaattaccattaatttaatgactgtggagttaattgtataccagcatttcagcaaatcatcatcaatagtattacattagcaatttatgcaattaaaagggctttgtaaaactttgaatagattttattgtcattagtagctgttggaacttcattattatataatgtttttgcaaactttaacttttttctaaattgttaaataaaagaataactatcctt

SEQ ID NO: 983 - protein, 80 aa, Homosapiens
MAEKILEKLDVLDKQAEIILARRTKINRLQSEGRKTTMAIPLTFDFQLEFEEALATSASKAISKIKEDKSCSITKSKISN

SEQ ID NO: 984 - DNA, 2173 bp, Homosapiens
ggggcgagtaacccgcggagccagaagagggaggaaaggagatgagatttcatcatgttggccagcctggtctcaaactcctgacctcaagtgacccgcctgcctcagcctcccaaagtgctgggattacaggaatttagtgattgacaatggcagaaaaaatcctagagaagttggatgtccttgataagcaagcagagataatcttggccagaagaacaaagataaacaggcttcagagtgaaggaagaaaaacaactatggctatacccctgacatttgattttcagttggaatttgaagaagctcttgctacatccgcgtctaaggcaatatcaaagatcaaagaagacaagtcatgcagcattacaaaatcaaaaatgcatgtctctttcaaatgtgagcctgaacctagaaagagtaattttgaaaagtcaaatttaagaccattctttattcaaacaaatgtaaaaaataaagaaagtgagtcaacagagccagtagaagaacatctaaaatcaagatctattagaccctatctttatcttaaggatacaactgagatggaaaatgcagggcctttgaatgttctatattcacagcatagacaagcatgtagaagatcactgggttctacagacttttctcctatgttcaacattcagtctaatgctcataaaaaggaaaaagactctactttatttacagctcaaattgaaaaaaaacctaggaaaccattggattctgttggtctcttagaaggtgatagaaataaaagaaaaaaatctccacagatgaacgattttaatataaaagaaaacaaatcggtcagaaattatcaattaagtaagtataggtcagtaagaaagaaaagcttgctcccgttgtgctttgaggatgaattgaaaaatccacatgccaagatagtcaacgttagtccaacaaagacagtaacttctcacatggaacaaaaggacacaaatcccataattttccatgacacagaatatgtacgaatgttacttttgacaaaaaatagattttcttctcatcctttggaaaatgaaaacatttacccacataaaagaacaaatttcattttagaaagaaattgtgaaatcctcaaatctataattggcaatcaatctatttctcttttcaaaccccaaaaaactatgcctacagtacagagaaaagatatacagatccctatgtcttttaaagcgggccacacaactgtagatgataaactaaagaagaaaactaataagcagacactagaaaacagatcttggaatacactctataatttctcacagaatttttctagcctaacaaaacaatttgtgggttaccttgataaagctgttattcatgaaatgagtgcccaaactggaaaatttgaaagaatgttttctgcaggaaaaccaacgagcatacccacatccagtgccttacctgtcaaatgttactcaaagccttttaaatatatatatgaactaaataatgtaacgccactggataatttgttaaacttatcaaatgaaattttaaatgcctcataaaatattatgtatgcagcaatatttgagtaacaagaagcaaatatccaagttccaaaattataaaagaaattcttatccaaatagtaatgttctaattgatcatataagaaagcaaagcatagacattagaattataagtcagcagtggtctgttcaagaacaatcaacatttttagaaaatagtaggacaaaattaggaaataattatcaccaagaggatctagttcatgactttctattatctcaattagattgctcaatcatcagccttcctatactaaactctgattcaggaccaagaaaggcatagtctgactctggaaatgcgctgttggaagccaaataacatcaatactcttgttctataattgaatatcaaataagacaaattaccattaatttaatgactgtggagttaattgtataccagcatttcagcaaatcatcatcaatagtattacattagcaatttatgcaattaaaagggctttgtaaaactttgaatagattttattgtcattagtagctgttggaacttcattattatataatgtttttgcaaactttaacttttttctaaattgttaaataaaagaataactatcctt

SEQ ID NO: 985 - protein, 471 aa, Homosapiens; identical to SEQ ID NO: 979

SEQ ID NO: 986 - DNA, 1532 bp, Homosapiens
agatttcatcatgttggccagcctggtctcaaactcctgacctcaagtgacccgcctgcctcagcctcccaaagtgctgggattacaggaatttagtgattgacaatggcagaaaaaatcctagagaagttggatgtccttgataagcaagcagagataatcttggccagaagaacaaagataaacaggcttcagagtgaaggaagaaaaacaactatggctatacccctgacatttgattttcagttggaatttgaagaagctcttgctacatccgcgtctaaggcaatatcaaagatcaaagaagacaagtcatgcagcattacaaaatcaaaaatgcatgtctctttcaaatgtgagcctgaacctagaaagagtaattttgaaaagtcaaatttaagaccattctttattcaaacaaatgtaaaaaataaagaaagtgagtcaacagtgatcttttaaaagtaggctgatcctgattaaagcctcttcagcggattctcattgtacttagtatgaaacttgtacttcttacaaagacctggccgggcacggtggctcatggctgtaatcccagcactttgagatgccaaggcaaccagtagaagaacatctaaaatcaagatctattagaccctatctttatcttaaggatacaactgagatggaaaatgcagggcctttgaatgttctatattcacagcatagacaagcatgtagaagatcactgggttctacagacttttctcctatgttcaacattcagtctaatgctcataaaaaggaaaaagactctactttatttacagctcaaattgaaaaaaaacctaggaaaccattggattctgttggtctcttagaaggtgatagaaataaaaggaacaaaaggacacaaatcccataattttccatgacacagaatatgtacgaatgttacttttgacaaaaaatagattttcttctcatcctttggaaaatgaaaacatttacccacataaaagaacaaatttcattttagaaagaaattgtgaaatcctcaaatctataattggcaatcaatctatttctcttttcaaaccccaaaaaactatgcctacagtacagagaaaagatatacagatccctatgtcttttaaagcgggccacacaactgtagatgataaactaaagaagaaaactaataagcagacactagaaaacagatcttggaatacactctataatttctcacagaatttttctagcctaacaaaacaatttgtgggttaccttgataaagctgttattcatgaaatgagtgcccaaactggaaaatttgaaagaatgttttctgcaggaaaaccaacgagcatacccacatccagtgccttacctgtcaaatgttactcaaagccttttaaatatatatatgaactaaataatgtaacgccactggataatttgttaaacttatcaaatgaaattttaaatgcctcataaaatattatgtatgcagcaatatttgagtaacaagaagcaaatatccaagttcc

SEQ ID NO: 987 - protein, 118 aa, Homosapiens
MAEKILEKLDVLDKQAEIILARRTKINRLQSEGRKTTMAIPLTFDFQLEFEEALATSASKAISKIKEDKSCSITKSKMHVSFKCEPEPRKSNFEKSNLRPFFIQTNVKNKESESTVIF

SEQ ID NO: 988 - DNA, 431 bp, Homosapiens
tatcccactgcacactctgtcacccaggctggtgtgcagtggcgtgatctcagctcactgcagcctcaacctccagggctcaagggatccttctacctcagcctcctgaatagctggactgcagatatgcatcactacacccaggtttcaccatgttggccaggctggtctcgaactcctgacctcgggtgatccacccgaggcctgacaaagtgctggaattacaggagtgagccactgcatccagcctagcacactgaacttttaagagtacttgggaaacttagtatgtttaacacctcccaaaagaatgttaaaatgaccacagtttgcaaaattgaagagaaaacaatggcaacataaggcacaatattggtaatcaagaagaaactatagccatggatatggaagacattaaaataattataatg

SEQ ID NO: 989 - protein, 32 aa, Homosapiens
IAGLQICITTPRFHHVGQAGLELLTSGDPPEA

SEQ ID NO: 990 - DNA, 2898 bp, Homosapiens
gctgacatttccattgacctcagaagtgaaaatctaaagtgagtgctgacaggcaggcagtgaggaaagaagacatgacacagccaacaagggtggcagcctggctctgaagtggaattatgtgcttcaaacaggttgaaagagggaaacagtcttttcctgcttccagacatgaatcaggtcactattcaatgggatgcagtaatagccctttacatactcttcagctggtgtcatggaggaattacaaatataaactgctctggccacatctgggtagaaccagccacaatttttaagatgggtatgaatatctctatatattgccaagcagcaattaagaactgccaaccaaggaaacttcatttttataaaaatggcatcaaagaaagatttcaaatcacaaggattaataaaacaacagctcggctttggtataaaaactttctggaaccacatgcttctatgtactgcactgctgaatgtcccaaacattttcaagagacactgatatgtggaaaagacatttcttctggatatccgccagatattcctgatgaagtaacctgtgtcatttatgaatattcaggcaacatgacttgcacctggaatgctgggaagctcacctacatagacacaaaatacgtggtacatgtgaagagtttagagacagaagaagagcaacagtatctcacctcaagctatattaacatctccactgattcattacaaggtggcaagaagtacttggtttgggtccaagcagcaaacgcactaggcatggaagagtcaaaacaactgcaaattcacctggatgatatagtgataccttctgcagccgtcatttccagggctgagactataaatgctacagtgcccaagaccataatttattgggatagtcaaacaacaattgaaaaggtttcctgtgaaatgagatacaaggctacaacaaaccaaacttggaatgttaaagaatttgacaccaattttacatatgtgcaacagtcagaattctacttggagccaaacattaagtacgtatttcaagtgagatgtcaagaaacaggcaaaaggtactggcagccttggagttcactgttttttcataaaacacctgaaacagttccccaggtcacatcaaaagcattccaacatgacacatggaattctgggctaacagttgcttccatctctacagggcaccttacttctgacaacagaggagacattggacttttattgggaatgatcgtctttgctgttatgttgtcaattctttctttgattgggatatttaacagatcattccgaactgggattaaaagaaggatcttattgttaataccaaagtggctttatgaagatattcctaatatgaaaaacagcaatgttgtgaaaatgctacaggaaaatagtgaacttatgaataataattccagtgagcaggtcctatatgttgatcccatgattacagagataaaagaaatcttcatcccagaacacaagcctacagactacaagaaggagaatacaggacccctggagacaagagactacccgcaaaactcgctattcgacaatactacagttgtatatattcctgatctcaacactggatataaaccccaaatttcaaattttctgcctgagggaagccatctcagcaataataatgaaattacttccttaacacttaaaccaccagttgattccttagactcaggaaataatcccaggttacaaaagcatcctaattttgctttttctgtttcaagtgtgaattcactaagcaacacaatatttcttggagaattaagcctcatattaaatcaaggagaatgcagttctcctgacatacaaaactcagtagaggaggaaaccaccatgcttttggaaaatgattcacccagtgaaactattccagaacagaccctgcttcctgatgaatttgtctcctgtttggggatcgtgaatgaggagttgccatctattaatacttattttccacaaaatattttggaaagccacttcaataggatttcactcttggaaaagtagagctgtgtggtcaaaatcaatatgagaaagctgccttgcaatctgaacttgggttttccctgcaatagaaattgaattctgcctctttttgaaaaaaatgtattcacatacaaatcttcacatggacacatgttttcatttcccttggataaatacctaggtaggggattgctgggccatatgataagcatatgtttcagttctaccaatcttgtttccagagtagtgacatttctgtgctcctaccatcaccatgtaagaattcccgggagctccatgcctttttaattttagccattcttctgcctcatttcttaaaattagagaattaaggtcccgaaggtggaacatgcttcatggtcacacatacaggcacaaaaacagcattatgtggacgcctcatgtattttttatagagtcaactatttcctctttattttccctcattgaaagatgcaaaacagctctctattgtgtacagaaagggtaaataatgcaaaatacctggtagtaaaataaatgctgaaaattttcctttaaaatagaatcattaggccaggcgtggtggctcatgcttgtaatcccagcactttggtaggctgaggtaggtggatcacctgaggtcaggagttcgagtccagcctggccaatatgctgaaaccctgtctctactaaaattacaaaaattagccggccatggtggcaggtgcttgtaatcccagctacttgggaggctgaggcaggagaatcacttgaaccaggaaggcagaggttgcactgagctgagattgtgccactgcactccagcctgggcaacaagagcaaaactctgtctgg

SEQ ID NO: 991 - protein, 629 aa, Homosapiens; identical to SEQ ID NO: 42

SEQ ID NO: 992 - DNA, 402 bp, Homosapiens
ctcattttctcttgccaccactaagtaagaagagccttttgcctcccaccatgattctgaggccttaccagccatgtggaactgttaaagaatttgacaccaattttacatatgtgcaacagtcagaattctacttggagccaaacattaagtacgtatttcaagtgagatgtcaagaaacaggcaaaaggtactggcagccttggagttcactgttttttcataaaacacctgaaacagttccccaggtcacatcaaaagcattccaacatgacacatggaattctgggctaacagttgcttccatctctacagggcaccttacttctggattaaaagaaggatcttattgttaataccaaagtggctttatgaagatattcctaatatgaaaaacagcaa

SEQ ID NO: 993 - protein, 101 aa, Homosapiens
MILRPYQPCGTVKEFDTNFTYVQQSEFYLEPNIKYVFQVRCQETGKRYWQPWSSLFFHKTPETVPQVTSKAFQHDTWNSGLTVASISTGHLTSGLKEGSYC

SEQ ID NO: 994 - DNA, 1294 bp, Homosapiens
ctcattttctcttgccaccactaagtaagaagagccttttgcctcccaccatgattctgaggccttaccagccatgtggaactgttaaagaatttgacaccaattttacatatgtgcaacagtcagaattctacttggagccaaacattaagtacgtatttcaagtgagatgtcaagaaacaggcaaaaggtactggcagccttggagttcactgttttttcataaaacacctgaaacagttccccaggtcacatcaaaagcattccaacatgacacatggaattctgggctaacagttgcttccatctctacagggcaccttacttctgacaacagaggagacattggacttttattgggaatgatcgtctttgctgttatgttgtcaattctttctttgattgggatatttaacagatcattccgaactgggattaaaagaaggatcttattgttaataccaaagtggctttatgaagatattcctaatatgaaaaacagcaatgttgtgaaaatgctacaggaaaatagtgaacttatgaataataattccagtgagcaggtcctatatgttgatcccatgattacagagataaaagaaatcttcatcccagaacacaagcctacagactacaagaaggagaatacaggacccctggagacaagagactacccgcaaaactcgctattcgacaatactacagttgtatatattcctgatctcaacactggatataaaccccaaatttcaaattttctgcctgagggaagccatctcagcaataataatgaaattacttccttaacacttaaaccaccagttgattccttagactcaggaaataatcccaggttacaaaagcatcctaattttgctttttctgtttcaagtgtgaattcactaagcaacacaatatttcttggagaattaagcctcatattaaatcaaggagaatgcagttctcctgacatacaaaactcagtagaggaggaaaccaccatgcttttggaaaatgattcacccagtgaaactattccagaacagaccctgcttcctgatgaatttgtctcctgtttggggatcgtgaatgaggagttgccatctattaatacttattttccacaaaatattttggaaagccacttcaataggatttcactcttggaaaagtagagctgtgtggtcaaaatcaatatgagaaagctgccttgcaatctgaacttgggttttccctgcaatagaaattgaattctgcctctttttgaaaaaaatgtattcacatacaaatcttc

SEQ ID NO: 995 - protein, 374 aa, Homosapiens
MILRPYQPCGTVKEFDTNFTYVQQSEFYLEPNIKYVFQVRCQETGKRYWQPWSSLFFHKTPETVPQVTSKAFQHDTWNSGLTVASISTGHLTSDNRGDIGLLLGMIVFAVMLSILSLIGIFNRSFRTGIKRRILLLIPKWLYEDIPNMKNSNVVKMLQENSELMNNNSSEQVLYVDPMITEIKEIFIPEHKPTDYKKENTGPLETRDYPQNSLFDNTTVVYIPDLNTGYKPQISNFLPEGSHLSNNNEITSLTLKPPVDSLDSGNNPRLQKHPNFAFSVSSVNSLSNTIFLGELSLILNQGECSSPDIQNSVEEETTMLLENDSPSETIPEQTLLPDEFVSCLGIVNEELPSINTYFPQNILESHFNRISLLEK

SEQ ID NO: 996 - DNA, 1537 bp, Homosapiens
ctcattttctcttgccaccactaagtaagaagagccttttgcctcccaccatgattctgaggccttaccagccatgtggaactgttaaagaatttgacaccaattttacatatgtgcaacagtcagaattctacttggagccaaacattaagtacgtatttcaagtgagatgtcaagaaacaggcaaaaggtactggcagccttggagttcactgttttttcataaaacacctgaaacagttccccaggtcacatcaaaagcattccaacatgacacatggaattctgggctaacagttgcttccatctctacagggcaccttacttctgacaacagaggagacattggacttttattgggaatgatcgtctttgctgttatgttgtcaattctttctttgattgggatatttaacagatcattccgaactgggattaaaagaaggatcttattgttaataccaaagtggctttatgaagatattcctaatatgaaaaacagcaatgttgtgaaaatgctacaggaaaatagtgaacttatgaataataattccagtgagcaggtcctatatgttgatcccatgattacagagataaaagaaatcttcatcccagaacacaagcctacagactacaagaaggagaatacaggacccctggagacaagagactacccgcaaaactcgctattcgacaatactacagttgtatatattcctgatctcaacactggatataaaccccaaatttcaaattttctgcctgagggaagccatctcagcaataataatgaaattacttccttaacacttaaaccaccagttgattccttagactcaggaaataatcccaggttacaaaagcatcctaattttgctttttctgtttcaagtgtgaattcactaagcaacacaatatttcttggagaattaagcctcatattaaatcaaggagaatgcagttctcctgacatacaaaactcagtagaggaggaaaccaccatgcttttggaaaatgattcacccagtgaaactattccagaacagaccctgcttcctgatgaatttgtctcctgtttggggatcgtgaatgaggagttgccatctattaatacttattttccacaaaatattttggaaagccacttcaataggatttcactcttggaaaagtagagctgtgtggtcaaaatcaatatgagaaagctgccttgcaatctgaacttgggttttccctgcaatagaaattgaattctgcctctttttgaaaaaaatgtattcacatacaaatcttcacatggacacatgttttcatttcccttggataaatacctaggtaggggattgctgggccatatgataagcatatgtttcagttctaccaatcttgtttccagagtagtgacatttctgtgctcctaccatcaccatgtaagaattcccgggagctccatgcctttttaattttagccattcttctgcctcatttcttaaaattagagaattaaggtcccgaaggtggaacatgcttcatggtc

SEQ ID NO: 997 - protein, 374 aa, Homosapiens; identical to SEQ ID NO: 995

SEQ ID NO: 998 - DNA, 1498 bp, Homosapiens
aagtaagaagagccttttgcctcccaccatgattctgaggccttaccagccatgtggaactgttaaagaatttgacaccaattttacatatgtgcaacagtcagaattctacttggagccaaacattaagtacgtatttcaagtgagatgtcaagaaacaggcaaaaggtactggcagccttggagttcactgttttttcataaaacacctgaaacaggattaaaagaaggatcttattgttaataccaaagtggctttatgaagatattcctaatatgaaaaacagcaatgttgtgaaaatgctacaggaaaatagtgaacttatgaataataattccagtgagcaggtcctatatgttgatcccatgattacagagataaaagaaatcttcatcccagaacacaagcctacagactacaagaaggagaatacaggacccctggagacaagagactacccgcaaaactcgctattcgacaatactacagttgtatatattcctgatctcaacactggatataaaccccaaatttcaaattttctgcctgagggaagccatctcagcaataataatgaaattacttccttaacacttaaaccaccagttgattccttagactcaggaaataatcccaggttacaaaagcatcctaattttgctttttctgtttcaagtgtgaattcactaagcaacacaatatttcttggagaattaagcctcatattaaatcaaggagaatgcagttctcctgacatacaaaactcagtagaggaggaaaccaccatgcttttggaaaatgattcacccagtgaaactattccagaacagaccctgcttcctgatgaatttgtctcctgtttggggatcgtgaatgaggagttgccatctattaatacttattttccacaaaatattttggaaagccacttcaataggatttcactcttggaaaagtagagctgtgtggtcaaaatcaatatgagaaagctgccttgcaatctgaacttgggttttccctgcaatagaaattgaattctgcctctttttgaaaaaaatgtattcacatacaaatcttcacatggacacatgttttcatttcccttggataaatacctaggtaggggattgctgggccatatgataagcatatgtttcagttctaccaatcttgtttccagagtagtgacatttctgtgctcctaccatcaccatgtaagaattcccgggagctccatgcctttttaattttagccattcttctgcctcatttcttaaaattagagaattaaggtcccgaaggtggaacatgcttcatggtcacacatacaggcacaaaaacagcattatgtggacgcctcatgtattttttatagagtcaactatttcctctttattttccctcattgaaagatgcaaaacagctctctattgtgtacagaaagggtaaataatgcaaaatacctggtagtaaaataaatgctgaaaattttccttt

SEQ ID NO: 999 - protein, 227 aa, Homosapiens
MKNSNVVKMLQENSELMNNNSSEQVLYVDPMITEIKEIFIPEHKPTDYKKENTGPLETRDYPQNSLFDNTTVVYIPDLNTGYKPQISNFLPEGSHLSNNNEITSLTLKPPVDSLDSGNNPRLQKHPNFAFSVSSVNSLSNTIFLGELSLILNQGECSSPDIQNSVEEETTMLLENDSPSETIPEQTLLPDEFVSCLGIVNEELPSINTYFPQNILESHFNRISLLEK

SEQ ID NO: 1000 - DNA, 4040 bp, Homosapiens; identical to SEQ ID NO: 43

SEQ ID NO: 1001 - protein, 862 aa, Homosapiens; identical to SEQ ID NO: 44

SEQ ID NO: 1002 - DNA, 687 bp, Homosapiens
acagaagggagaacaggggactgtggcctgcacctgggaaagaggacgagacacccacttatacactgagtatactctacagctaagtggaccaaaaaatttaacctggcagaagcaatgtaaagacatttattgtgactatttggactttggaatcaacctcacccctgaatcacctgaatccaatttcacagccaaggttactgctgtcaatagtcttggaagctcctcttcacttccatccacattcacattcttggacatagtgaggcctcttcctccgtgggacattagaatcaaatttcaaaaggcttctgtgagcagatgtaccctttattggagagatgagggactggtactgcttaatcgactcagatatcggcccagtaacagcaggctctggaatatggttaatgttacaaaggccaaaggaagacatgatttgctggatctgaaaccatttacagaatatgaatttcagatttcctctaagctacatctttataagggaagttggagtgattggagtgaatcattgagagcacaaacaccagaagaagagcctactgggatgttagatgtctggtacatgaaacggcacattgactacagtagacaacagatttctcttttctggaaggtgagttttaagcgtcaacttaaaactcaagggaataaaactgaagg

SEQ ID NO: 1003 - protein, 92 aa, Homosapiens
MVNVTKAKGRHDLLDLKPFTEYEFQISSKLHLYKGSWSDWSESLRAQTPEEEPTGMLDVWYMKRHIDYSRQQISLFWKVSFKRQLKTQGNKT

SEQ ID NO: 1004 - DNA, 604 bp, Homosapiens
cctacattaaaagccatatcctttaatacatgcctttcttcctttatcttcctttcagaaattccctacagagtctcccaaaattcacatccaataaacagcctgcagccccgagtgacatatgtcctgtggatgacagctctgacagctgctggtgaaagttcccacggaaatgagagggaattttgtctgcaaggtaaagccaattggatggcgtttgtggcaccaagcatttgcattgctatcatcatggtgggcattttctcaacgcattacttccagcaaaaggtgtttgttctcctagcagccctcagacctcagtggtgtagcagagaaattccagatccagcaaatagcacttgcgctaagaaatatcccattgcagaggagaagacacagctgcccttggacaggctcctgatagactggcccacgcctgaagatcctgaaccgctggtcatcagtgaagtccttcatcaagtgaccccagttttcagacatcccccctgctccaactggccacaaagggaaaaaggaatccaaggtcatcaggcctctgagaaagacatgatgcacagtgcctcaagcccaccacctccaagag

SEQ ID NO: 1005 - protein, 156 aa, Homosapiens
MTALTAAGESSHGNEREFCLQGKANWMAFVAPSICIAIIMVGIFSTHYFQQKVFVLLAALRPQWCSREIPDPANSTCAKKYPIAEEKTQLPLDRLLIDWPTPEDPEPLVISEVLHQVTPVFRHPPCSNWPQREKGIQGHQASEKDMMHSASSPPPP

SEQ ID NO: 1006 - DNA, 2271 bp, Homosapiens
ttaacacctatagttctctcaggctttttttgaaaagttccttcgtttctatttctattccactctatttagctattattgtgcggcacccccaatggttcctttcctctcagcatcgctgtagcttgcctgtacccaggacatgcccttgactggcacaaaccgtgacagacatgcccttgactggcacaaaccatgacagacaaggccacctcctcagaagcggaacaacctattatcttttggcaatgggagctaacttcactgttttcttacaatacctggtttttcctatctttggtttccttttgattatctctcatccatctcagccactattctcctcccctcccttgtgtctacaacaccccattttaccaagtctcccatttaacctccccatccttttctttcccttaaagtctcatatgatactgcagtcctcatttgtcttcccaaaaaaaaaaaagaatttttttttttttaaggaatccttccttgactcctaaagactcctaaggatgctgaggcctcctcagcatgatttccatatacttactttctctgttggactgcagacaacttgaaagcaggaactttggcagtgtttccccagcaccagcatcatgcctggtccatagtagctaccaataaaaaagtaagcatcatgaacccaaaagtatctgagaaaggtctcaattaatttaaaaagtttttattttgctaaggttaaggacacacatgacccaccctcagaaggtccggaggacatgtgcccaaagtggttaaggcacagcttggttttatacattttagggagatataagacatcaatcaacatatgtaagatgtacattggttgggtctggaaaggcaggataactcaaagtgggggcttccaggtcataggtaaataagagacaaaagattgcattcttttggggttttgatcagccttttactaaatacacaatttacatgtgagaaggaggtagctcaggtgaacagagggatgactttgagttctgtgtatcctttgtcccacacttgtgaagatcagagcaccattgtgatgcatggaggggtgtttctcattttaaagacgtatttgagcatgtctttggcagctcactctgccagataaggtgtcctctttccatgaatgacagaagatgggtaactctgttctgccattgccccaagcggttttcacaatctgcccttctcccctctgccccccaccactagtaaaaaccccaaaccaagttgctaggttcaccagatctaggtgatactcaccaacatacagctaggctttcattcctcaggaaaattgcaattttgtggtcttataatgatatatattggtttccatccatggttgcgggctcctgatgtcagaggtgtttgaaccaaagcaactccatcttgaatagaggctgggtaacataaggctgagacctactgggctgcattctcaggaggttaggcattcttagtcacaggatgagataggttggcacaagatgtcacaaagaccctgctgataaaagaggttgtggtaaagaagccaaacaaaacccaccaaaaccaagatggtgacgaaagtgacctctggtcatcctcacgcttattatatgctaattataatgcatataattagcatataatatgcatatgttaacatgctaacagacactccctccatgacagtttacaaatgccaaggcaacgtcagaaagttaccctatagggtttaaaagggggagaaactcacagctctgggaattgcctactcctttcctggaaaactcatgaataattcacctcttgtttagcatataatcaagaaataactcaggccaggcatggtgactcacgcctgtaatccgagcactttgggaggctgaggtgggtggatcacctgaggtgtcaggagttccagaccagactggccaacatggtgaaaccccatctgtactaaaaatacaaaattagtcaggcatagtggcatgcgcctataatcccagctactcaggtggctgagacgagaatcgctttgaacccgggaggtggaggttgcagtgagccgagattgcaccattgcactccagcctgggcaacacagcgagactgtcacaaacaaacaaacaaacaaacaacaacaacaacaaaactgtaagtatactcaattgagcagcccacgctgttgctctatggagtagccattctttcattcctttactttcttaataaacttactttcgcttt

SEQ ID NO: 1007 - protein, 43 aa, Homosapiens
MTLSSVYPLSHTCEDQSTIVMHGGVFLILKTYLSMSLAAHSAR

SEQ ID NO: 1008 - DNA, 6226 bp, Homosapiens
tgtgtagtgtttcacttgaatttgtagctctccaatttgtgtagaaaaacgtagtggttgtgtattaacagaaaatgcttctgagaagtttatatctagtaaggtctttaccctagttgtagttggaagagtgtagaacagagtttttctttctgagtgttctttttaacttcagtgttagtgctagtagtaaccttatatgtcatctctccagaggtcttcatcaaggattcacatggcagtcctgatctgaagggcatatttaaaatgtacttgtccagatttcactgctaaagattatgattcagtaggtctaggatgggcttcagccgtttgggttgattgtgatagcatacatgtctttagttgaggactgctggtattacctgcaattttgagatagagaaaagtgcaggaaaatcttcctccaggatcactaaagctgagccctagcttgttacctgtggaggcattgagacatttgttcacagaaagtacagtttggatttttggttttttttagaagaaagctcattatttagaaattttgcaatgttacttttctactaataacacaatcatcttcacttatatttttaggctcatgctgaagattcggttatggaccatcatttccggaagccagcaaatgatataacgtctcagctggagatcaattttggagaccttggccgcccaggacgtggcggcaggggaggacgaggtggacgtgggcgtggtgggcgcccaaaccgtggcagcaggaccgacaagtcaagtgcttctgctcctgatgtggatgacccagaggcattcccagctctggcttaactggatgccataagacaaccctggttcctttgtgaacccttctgttcaaagcttttgcatgcttaaggattccaaacgactaagaaattaaaaaaaaaaagactgtcattcataccattcacacctaaagactgaattttatctgttttaaaaatgaacttctcccgctacacagaagtaacaaatatggtagtcagttttgtatttagaaatgtattggtagcagggatgttttcataattttcagagattatgcattcttcatgaatacttttgtattgctgcttgcaaatatgcatttccaaacttgaaatataggtgtgaacagtgtgtaccagtttaaagctttcacttcatttgtgttttttaattaaggatttagaagttcccccaattacaaactggttttaaatattggacatactggttttaatacctgctttgcatattcacacatggtcaactgggacatgttaaactttgatttgtcaaattttatgctgtgtggaatactaactatatgtattttaacttagttttaatattttcatttttggggaaaaatcttttttcacttctcatgatagctgttatatatatatgctaaatctttatatacagaaatatcagtacttgaacaaattcaaagcacatttggtttattaacccttgctccttgcatggctcattaggttcaaattataactgatttacattttcagctatatttactttttaaatgcttgagtttcccattttaaaatctaaactagacatcttaattggtgaaagttgtttaaactacttattgttggtaggcacatcgtgtcaagtgaagtagttttataggtatgggttttttctcccccttcaccagggtgggtggaataagttgatttggccaatgtgtaatatttaaactgttctgtaaaataagtgtctggccatttggtatgatttctgtgtgtgaaaggtcccaaaatcaaaatggtacatccataatcagccaccatttaacccttccttgttctaaaacaaaaaccaaagggcgctggttggtagggtgaggtgggggagtattttaatttttggaatttgggaagcagacagctttactttgtaaggttggaacagcagcactatacatgaaatataaaccaaaaacctttactgtttctaaatttcctagattgctattatttggttgtaagttgagtattccacagaaagtggtaattatctcttctctcttcctccattagaaaattaggtaaataatggattcctataatgggagcatcaccacttattaaaacacacatagaatgatgaattaaaaaagttttctaggattgtcttttattctgccacatttattgataaacagtgaaggaatttttaaaaaatttttaagaattgtttgtcacgtcatttttagaaatgttctacctgtatatggtaatgtccagttttaaaaatattggacatcttcaatcttaaacatttctatttagctgattggttctcacatatacttctaaaagaaacttttatgttataagagttactttttggataagatttattaatctcagttacctactattctgacattttaggaaggaggtaattgtttttaatgatggataaacttgtgctggtgttttggatcttatgatgctgagcatgttctgcactggtgctaatgtctaatataattttatatttacacacatacgtgctacccagagattaatttagtccatatgaactattgacccattgttcattgagacagcaacatacgcactcctaaatcagtgtgtttagacttttcaagtatctaactcatttccaaacatgtaccatgttttataaacctcttgatttccagcaacatactatagaaaacacctgctactcaaaacacaacttctcagtgtcatccattgctgtcgtgagagacaacatagcaatatctggtatgttgcaagctttcaagatagcctgaacttaaaaagttggtgcattagttgtatctgatggatataaatttgcctcctagttcactttgtgtcaagagctaaaactgtgaacctaactttctcttattggtgggtaataactgaaaataaagatttattttcatgctcacttcttaaaagtcataaaaacaatcaaataggatcatgtttattgtcatgtgtttcctggtttctgacctgtgtgcacacccctgtgtgtttataatttttaaattgaattttatatggggtttttatttgctaaaaaccaggctgttgaatcacatttgggaagggtacttatcttaatgactaatgacttaattgggaaagttgaattcttgtaaaatacaaaatccaaggacttcttggatttaatctgattgtcacttcttagcagatcacttttttgataatgaaagttaagcatactgaatgctacttttgattgacaaactggctataatagtctaggggaaaaatccctaaacagataaagattcctaaagtaatggtggcagctgatgtttcagtgaacttttatcttgatgcgtttaaatggaagtaatgccagacctgagatttttaaggcatttttacagcttgtattgaaatgattggagacatggtttctttattagctattttgagacctgtggagttaagcaagacttttaaaaattggcaccatatacatctagttagttcctttactcttatttttttaaataaaagtagtacacatcatttccagggttgtaaatatatttggggcttgtttttggtatggatttaaaaggaggatattaagtattcattctaattttgttatttttctagttgccagagatggttgcactgaaatagaacagggagttgcatacaaagcctaaatgtgtattggatttcgaaaatactaggttggtgcaattggttttgtaccaacctaacatgtctttaggaaagtaccatcatgtggaaggaaacaacaggtgttaaaaggttcaaaggaatgagaaataggaagttactagaacctaactgatgttgaccttagaggtaagattattcaggtatattagtggacctccagtccaatggtatagcaaattccagggatctcaggtgcatgcaattttactttctaaagtaaacacttagaaaatagattataacccagacgttttggattatactgagacaaatatgtaaataagttttagcaagtctgaacatgtaccagcgagatcttcaggttaactaagaaaagcccagaaacttcattatttactgtgctttgtatggcataactggtaacaaggcagtaaaatgatacatatttgaactggaccatagtaattaaatgatttatcaatatcatttgcaagataattgtcaggttgagttaatagtaagtggcagcttcccagaaatttgggttatttggcctaagctgtgccctgggattacctcttcatcttccttgacttttaagttcaaatttggaggttatgtgaagtgattgaaataaatctttcaggctgaggaagtcggtaatttcaagaatatagtgaaaacaaggttgtaatctaaacatgagaagcttaagtttaggaaatggttagaatataaattgctaaagccatcatgattttggccacagatgaaaatatgaacactggaaatgagcgccatttaaatgagatgctgtatgtaagccaggggtcagcaaagttcagcctgtgacctggtgtgtgtgggggtgtgtgtgtgtgtgtgtgtgtgtgtgtgtgtgtccgtgtccctgagttaagaatggtttttaggcttgtataggattaaaaaaaaaaaaaacccacagaaaaatgtaggcagcccagcataagataccgcctttcacagaaatgtttgctgaccccggaactgtcactctcgggttacaagagtttgtttctttgaaacagtctggctctgtcacccaggctggagtgcagtggcatgatctcaggtcactgcagcctccacctcccgggttcaagcaattctgcctcagcctcctgagtagctgggattacaggtgtgcaccaccacagacagctaattttacaggtgtacaccaccacacccaagaatcacttgaacccgggaggtgggggttgcagtgagccaagatcatagcactgtactccagtctgggtgacacactgtctgaaaaataaaagtttagttctaggtacaaattaagtggtctacccaacaggaagctgtgaaattagaagtaattttaaagcatactttacacctctatataatcaaagtaagggcaagataaaacttgttagtaaaacatgttttattattttttagataggtagcctgcaacataaaatatattttgaaagctgttaaggggtgtataatctgttaaaaaataccatgattagtatttcacatttagtgactcagatccctttgtgtaagtcctttgcgttgtgcaaagaggtttttctatgagatgagaattatgaacacttcatataggtaaattccataggttgagctggggcagaaattaatggctcctggagattgcatctttttttttttttttttgagcttagaattcccatttggacagaatttagcttttgtgctgttgattacttctgtactaaactggtagccaattgttcacttctaaatggaagggaaaaagttacccacacaagttagaaaatgatttaccgaattatttttttgagttagtatgtatatactgttttaaatcagtaatgtttgttccttttgctgcccatttgggagtatgtggcaattcctagtgctcttgtatgacattactcttcttgagacttgtatatgcaagaaagtatatataaaagatgcctggtggtaactttgtatctgagttctgattcattatggacttttagaaatctatttagataattggttcatactaggtgctcaattactctgaccttgtgtggcttaatccttaaatagttgctttaggtgttactgggtggaagcatggaaagtgaagggctaatattaaggatttttatgtattactgagtagggaaagtgggaagtagcttatctttggacagttgtattactttgcactaatcaccttgtttgcagttgtagctgattcagttctagattttaggaccaaaaagatctctaatttaaagaaacagtttttatatacctagaatgaagattctgtttaaagcggttttggttaacttggttcttgacatttgcctaaaattttgttggattgggactaaaatgttctattagccaatgaataacgtccaagtaaatttttgttttattttggg

SEQ ID NO: 1009 - protein, 69 aa, Homosapiens
MDHHFRKPANDITSQLEINFGDLGRPGRGGRGGRGGRGRGGRPNRGSRTDKSSASAPDVDDPEAFPALA

SEQ ID NO: 1010 - DNA, 7028 bp, Homosapiens
gttagccctgagcccgagggggcgtgagtgaaaccaaagagcactttcgcgagtcagttacgccgtcacggttttttggtttcaaggtagctgaagacctagagagtttaagggtggccagagcaggtggcaggactccgcccaccaccacgcttcccttccttcagcccgcacgcttcactcccctcatggggtctcgcctctcaggcgcgcgcgaagagttgtcgcgcggtgcgtcctgggaattgtagtcccgacgcggagagtcgcctcaggagaaatgactctggcctacataccccacagtgccttgcggcgcaggccgctcccggatgtgtgcctggcgccggaagagaagacggcccccctctctcggcccggccatcttgtgggaagagctgaagcaggcgctcttggctcggcgcggcccgctgcaatccgtggaggaacgcgccgccgagccaccatcatgcctgggcacttacaggaaggcttcggctgcgtggtcaccaaccgattcgaccagttatttgacgacgaatcggaccccttcgaggtgctgaaggcagcagagaacaagaaaaaagaagccggcgggggcggcgttgggggccctggggccaagagcgcagctcaggccgcggcccagaccaactccaacgcggcaggcaaacagctgcgcaaggagtcccagaaagaccgcaagaacccgctgccccccagcgttggcgtggttgacaagaaagaggagacgcagccgcccgtggcgcttaagaaagaaggaataagacgagttggaagaagacctgatcaacaacttcagggtgaagggaaaataattgatagaagaccagaaaggcgaccacctcgtgaacgaagattcgaaaagccacttgaagaaaagggtgaaggaggcgaattttcagttgatagaccgattattgaccgacctattcgaggtcgtggtggtcttggaagaggtcgagggggccgtggacgtggaatgggccgaggagatggatttgattctcgtggcaaacgtgaatttgataggcatagtggaagtgatagatctggcctgaagcacgaggacaaacgtggaggtagcggatctcacaactggggaactgtcaaagacgaattaactgacttggatcaatcaaatgtgactgaggaaacacctgaaggtgaagaacatcatccagtggcagacactgaaaataaggagaatgaagttgaagaggtaaaagaggagggtccaaaagagatgactttggatgagtggaaggctattcaaaataaggaccgggcaaaagtagaatttaatatccgaaaaccaaatgaaggtgctgatgggcagtggaagaagggatttgttcttcataaatcaaagagtgaagaggctcatgctgaagattcggttatggaccatcatttccggaagccagcaaatgatataacgtctcagctggagatcaattttggagaccttggccgcccaggacgtggcggcaggggaggacgaggtggacgtgggcgtggtgggcgcccaaaccgtggcagcaggaccgacaagtcaagtgcttctgctcctgatgtggatgacccagaggcattcccagctctggcttaactggatgccataagacaaccctggttcctttgtgaacccttctgttcaaagcttttgcatgcttaaggattccaaacgactaagaaattaaaaaaaaaaagactgtcattcataccattcacacctaaagactgaattttatctgttttaaaaatgaacttctcccgctacacagaagtaacaaatatggtagtcagttttgtatttagaaatgtattggtagcagggatgttttcataattttcagagattatgcattcttcatgaatacttttgtattgctgcttgcaaatatgcatttccaaacttgaaatataggtgtgaacagtgtgtaccagtttaaagctttcacttcatttgtgttttttaattaaggatttagaagttcccccaattacaaactggttttaaatattggacatactggttttaatacctgctttgcatattcacacatggtcaactgggacatgttaaactttgatttgtcaaattttatgctgtgtggaatactaactatatgtattttaacttagttttaatattttcatttttggggaaaaatcttttttcacttctcatgatagctgttatatatatatgctaaatctttatatacagaaatatcagtacttgaacaaattcaaagcacatttggtttattaacccttgctccttgcatggctcattaggttcaaattataactgatttacattttcagctatatttactttttaaatgcttgagtttcccattttaaaatctaaactagacatcttaattggtgaaagttgtttaaactacttattgttggtaggcacatcgtgtcaagtgaagtagttttataggtatgggttttttctcccccttcaccagggtgggtggaataagttgatttggccaatgtgtaatatttaaactgttctgtaaaataagtgtctggccatttggtatgatttctgtgtgtgaaaggtcccaaaatcaaaatggtacatccataatcagccaccatttaacccttccttgttctaaaacaaaaaccaaagggcgctggttggtagggtgaggtgggggagtattttaatttttggaatttgggaagcagacagctttactttgtaaggttggaacagcagcactatacatgaaatataaaccaaaaacctttactgtttctaaatttcctagattgctattatttggttgtaagttgagtattccacagaaagtggtaattatctcttctctcttcctccattagaaaattaggtaaataatggattcctataatgggagcatcaccacttattaaaacacacatagaatgatgaattaaaaaagttttctaggattgtcttttattctgccacatttattgataaacagtgaaggaatttttaaaaaatttttaagaattgtttgtcacgtcatttttagaaatgttctacctgtatatggtaatgtccagttttaaaaatattggacatcttcaatcttaaacatttctatttagctgattggttctcacatatacttctaaaagaaacttttatgttataagagttactttttggataagatttattaatctcagttacctactattctgacattttaggaaggaggtaattgtttttaatgatggataaacttgtgctggtgttttggatcttatgatgctgagcatgttctgcactggtgctaatgtctaatataattttatatttacacacatacgtgctacccagagattaatttagtccatatgaactattgacccattgttcattgagacagcaacatacgcactcctaaatcagtgtgtttagacttttcaagtatctaactcatttccaaacatgtaccatgttttataaacctcttgatttccagcaacatactatagaaaacacctgctactcaaaacacaacttctcagtgtcatccattgctgtcgtgagagacaacatagcaatatctggtatgttgcaagctttcaagatagcctgaacttaaaaagttggtgcattagttgtatctgatggatataaatttgcctcctagttcactttgtgtcaagagctaaaactgtgaacctaactttctcttattggtgggtaataactgaaaataaagatttattttcatgctcacttcttaaaagtcataaaaacaatcaaataggatcatgtttattgtcatgtgtttcctggtttctgacctgtgtgcacacccctgtgtgtttataatttttaaattgaattttatatggggtttttatttgctaaaaaccaggctgttgaatcacatttgggaagggtacttatcttaatgactaatgacttaattgggaaagttgaattcttgtaaaatacaaaatccaaggacttcttggatttaatctgattgtcacttcttagcagatcacttttttgataatgaaagttaagcatactgaatgctacttttgattgacaaactggctataatagtctaggggaaaaatccctaaacagataaagattcctaaagtaatggtggcagctgatgtttcagtgaacttttatcttgatgcgtttaaatggaagtaatgccagacctgagatttttaaggcatttttacagcttgtattgaaatgattggagacatggtttctttattagctattttgagacctgtggagttaagcaagacttttaaaaattggcaccatatacatctagttagttcctttactcttatttttttaaataaaagtagtacacatcatttccagggttgtaaatatatttggggcttgtttttggtatggatttaaaaggaggatattaagtattcattctaattttgttatttttctagttgccagagatggttgcactgaaatagaacagggagttgcatacaaagcctaaatgtgtattggatttcgaaaatactaggttggtgcaattggttttgtaccaacctaacatgtctttaggaaagtaccatcatgtggaaggaaacaacaggtgttaaaaggttcaaaggaatgagaaataggaagttactagaacctaactgatgttgaccttagaggtaagattattcaggtatattagtggacctccagtccaatggtatagcaaattccagggatctcaggtgcatgcaattttactttctaaagtaaacacttagaaaatagattataacccagacgttttggattatactgagacaaatatgtaaataagttttagcaagtctgaacatgtaccagcgagatcttcaggttaactaagaaaagcccagaaacttcattatttactgtgctttgtatggcataactggtaacaaggcagtaaaatgatacatatttgaactggaccatagtaattaaatgatttatcaatatcatttgcaagataattgtcaggttgagttaatagtaagtggcagcttcccagaaatttgggttatttggcctaagctgtgccctgggattacctcttcatcttccttgacttttaagttcaaatttggaggttatgtgaagtgattgaaataaatctttcaggctgaggaagtcggtaatttcaagaatatagtgaaaacaaggttgtaatctaaacatgagaagcttaagtttaggaaatggttagaatataaattgctaaagccatcatgattttggccacagatgaaaatatgaacactggaaatgagcgccatttaaatgagatgctgtatgtaagccaggggtcagcaaagttcagcctgtgacctggtgtgtgtgggggtgtgtgtgtgtgtgtgtgtgtgtgtgtgtgtgtccgtgtccctgagttaagaatggtttttaggcttgtataggattaaaaaaaaaaaaaacccacagaaaaatgtaggcagcccagcataagataccgcctttcacagaaatgtttgctgaccccggaactgtcactctcgggttacaagagtttgtttctttgaaacagtctggctctgtcacccaggctggagtgcagtggcatgatctcaggtcactgcagcctccacctcccgggttcaagcaattctgcctcagcctcctgagtagctgggattacaggtgtgcaccaccacagacagctaattttacaggtgtacaccaccacacccaagaatcacttgaacccgggaggtgggggttgcagtgagccaagatcatagcactgtactccagtctgggtgacacactgtctgaaaaataaaagtttagttctaggtacaaattaagtggtctacccaacaggaagctgtgaaattagaagtaattttaaagcatactttacacctctatataatcaaagtaagggcaagataaaacttgttagtaaaacatgttttattattttttagataggtagcctgcaacataaaatatattttgaaagctgttaaggggtgtataatctgttaaaaaataccatgattagtatttcacatttagtgactcagatccctttgtgtaagtcctttgcgttgtgcaaagaggtttttctatgagatgagaattatgaacacttcatataggtaaattccataggttgagctggggcagaaattaatggctcctggagattgcatctttttttttttttttttgagcttagaattcccatttggacagaatttagcttttgtgctgttgattacttctgtactaaactggtagccaattgttcacttctaaatggaagggaaaaagttacccacacaagttagaaaatgatttaccgaattatttttttgagttagtatgtatatactgttttaaatcagtaatgtttgttccttttgctgcccatttgggagtatgtggcaattcctagtgctcttgtatgacattactcttcttgagacttgtatatgcaagaaagtatatataaaagatgcctggtggtaactttgtatctgagttctgattcattatggacttttagaaatctatttagataattggttcatactaggtgctcaattactctgaccttgtgtggcttaatccttaaatagttgctttaggtgttactgggtggaagcatggaaagtgaagggctaatattaaggatttttatgtattactgagtagggaaagtgggaagtagcttatctttggacagttgtattactttgcactaatcaccttgtttgcagttgtagctgattcagttctagattttaggaccaaaaagatctctaatttaaagaaacagtttttatatacctagaatgaagattctgtttaaagcggttttggttaacttggttcttgacatttgcctaaaattttgttggattgggactaaaatgttctattagccaatgaataacgtccaagtaaatttttgttttattttggg

SEQ ID NO: 1011 - protein, 450 aa, Homosapiens [sequence omitted]

SEQ ID NO: 1012 - DNA, 7073 bp, Homosapiens
gttagccctgagcccgagggggcgtgagtgaaaccaaagagcactttcgcgagtcagttacgccgtcacggttttttggtttcaaggtagctgaagacctagagagtttaagggtggccagagcaggtggcaggactccgcccaccaccacgcttcccttccttcagcccgcacgcttcactcccctcatggggtctcgcctctcaggcgcgcgcgaagagttgtcgcgcggtgcgtcctgggaattgtagtcccgacgcggagagtcgcctcaggagaaatgactctggcctacataccccacagtgccttgcggcgcaggccgctcccggatgtgtgcctggcgccggaagagaagacggcccccctctctcggcccggccatcttgtgggaagagctgaagcaggcgctcttggctcggcgcggcccgctgcaatccgtggaggaacgcgccgccgagccaccatcatgcctgggcacttacaggaaggcttcggctgcgtggtcaccaaccgattcgaccagttatttgacgacgaatcggaccccttcgaggtgctgaaggcagcagagaacaagaaaaaagaagccggcgggggcggcgttgggggccctggggccaagagcgcagctcaggccgcggcccagaccaactccaacgcggcaggcaaacagctgcgcaaggagtcccagaaagaccgcaagaacccgctgccccccagcgttggcgtggttgacaagaaagaggagacgcagccgcccgtggcgcttaagaaagaaggaataagacgagttggaagaagacctgatcaacaacttcagggtgaagggaaaataattgatagaagaccagaaaggcgaccacctcgtgaacgaagattcgaaaagccacttgaagaaaagggtgaaggaggcgaattttcagttgatagaccgattattgaccgacctattcgaggtcgtggtggtcttggaagaggtcgagggggccgtggacgtggaatgggccgaggagatggatttgattctcgtggcaaacgtgaatttgataggcatagtggaagtgatagatctggcctgaagcacgaggacaaacgtggaggtagcggatctcacaactggggaactgtcaaagacgaattaacagagtcccccaaatacattcagaaacaaatatcttataattacagtgacttggatcaatcaaatgtgactgaggaaacacctgaaggtgaagaacatcatccagtggcagacactgaaaataaggagaatgaagttgaagaggtaaaagaggagggtccaaaagagatgactttggatgagtggaaggctattcaaaataaggaccgggcaaaagtagaatttaatatccgaaaaccaaatgaaggtgctgatgggcagtggaagaagggatttgttcttcataaatcaaagagtgaagaggctcatgctgaagattcggttatggaccatcatttccggaagccagcaaatgatataacgtctcagctggagatcaattttggagaccttggccgcccaggacgtggcggcaggggaggacgaggtggacgtgggcgtggtgggcgcccaaaccgtggcagcaggaccgacaagtcaagtgcttctgctcctgatgtggatgacccagaggcattcccagctctggcttaactggatgccataagacaaccctggttcctttgtgaacccttctgttcaaagcttttgcatgcttaaggattccaaacgactaagaaattaaaaaaaaaaagactgtcattcataccattcacacctaaagactgaattttatctgttttaaaaatgaacttctcccgctacacagaagtaacaaatatggtagtcagttttgtatttagaaatgtattggtagcagggatgttttcataattttcagagattatgcattcttcatgaatacttttgtattgctgcttgcaaatatgcatttccaaacttgaaatataggtgtgaacagtgtgtaccagtttaaagctttcacttcatttgtgttttttaattaaggatttagaagttcccccaattacaaactggttttaaatattggacatactggttttaatacctgctttgcatattcacacatggtcaactgggacatgttaaactttgatttgtcaaattttatgctgtgtggaatactaactatatgtattttaacttagttttaatattttcatttttggggaaaaatcttttttcacttctcatgatagctgttatatatatatgctaaatctttatatacagaaatatcagtacttgaacaaattcaaagcacatttggtttattaacccttgctccttgcatggctcattaggttcaaattataactgatttacattttcagctatatttactttttaaatgcttgagtttcccattttaaaatctaaactagacatcttaattggtgaaagttgtttaaactacttattgttggtaggcacatcgtgtcaagtgaagtagttttataggtatgggttttttctcccccttcaccagggtgggtggaataagttgatttggccaatgtgtaatatttaaactgttctgtaaaataagtgtctggccatttggtatgatttctgtgtgtgaaaggtcccaaaatcaaaatggtacatccataatcagccaccatttaacccttccttgttctaaaacaaaaaccaaagggcgctggttggtagggtgaggtgggggagtattttaatttttggaatttgggaagcagacagctttactttgtaaggttggaacagcagcactatacatgaaatataaaccaaaaacctttactgtttctaaatttcctagattgctattatttggttgtaagttgagtattccacagaaagtggtaattatctcttctctcttcctccattagaaaattaggtaaataatggattcctataatgggagcatcaccacttattaaaacacacatagaatgatgaattaaaaaagttttctaggattgtcttttattctgccacatttattgataaacagtgaaggaatttttaaaaaatttttaagaattgtttgtcacgtcatttttagaaatgttctacctgtatatggtaatgtccagttttaaaaatattggacatcttcaatcttaaacatttctatttagctgattggttctcacatatacttctaaaagaaacttttatgttataagagttactttttggataagatttattaatctcagttacctactattctgacattttaggaaggaggtaattgtttttaatgatggataaacttgtgctggtgttttggatcttatgatgctgagcatgttctgcactggtgctaatgtctaatataattttatatttacacacatacgtgctacccagagattaatttagtccatatgaactattgacccattgttcattgagacagcaacatacgcactcctaaatcagtgtgtttagacttttcaagtatctaactcatttccaaacatgtaccatgttttataaacctcttgatttccagcaacatactatagaaaacacctgctactcaaaacacaacttctcagtgtcatccattgctgtcgtgagagacaacatagcaatatctggtatgttgcaagctttcaagatagcctgaacttaaaaagttggtgcattagttgtatctgatggatataaatttgcctcctagttcactttgtgtcaagagctaaaactgtgaacctaactttctcttattggtgggtaataactgaaaataaagatttattttcatgctcacttcttaaaagtcataaaaacaatcaaataggatcatgtttattgtcatgtgtttcctggtttctgacctgtgtgcacacccctgtgtgtttataatttttaaattgaattttatatggggtttttatttgctaaaaaccaggctgttgaatcacatttgggaagggtacttatcttaatgactaatgacttaattgggaaagttgaattcttgtaaaatacaaaatccaaggacttcttggatttaatctgattgtcacttcttagcagatcacttttttgataatgaaagttaagcatactgaatgctacttttgattgacaaactggctataatagtctaggggaaaaatccctaaacagataaagattcctaaagtaatggtggcagctgatgtttcagtgaacttttatcttgatgcgtttaaatggaagtaatgccagacctgagatttttaaggcatttttacagcttgtattgaaatgattggagacatggtttctttattagctattttgagacctgtggagttaagcaagacttttaaaaattggcaccatatacatctagttagttcctttactcttatttttttaaataaaagtagtacacatcatttccagggttgtaaatatatttggggcttgtttttggtatggatttaaaaggaggatattaagtattcattctaattttgttatttttctagttgccagagatggttgcactgaaatagaacagggagttgcatacaaagcctaaatgtgtattggatttcgaaaatactaggttggtgcaattggttttgtaccaacctaacatgtctttaggaaagtaccatcatgtggaaggaaacaacaggtgttaaaaggttcaaaggaatgagaaataggaagttactagaacctaactgatgttgaccttagaggtaagattattcaggtatattagtggacctccagtccaatggtatagcaaattccagggatctcaggtgcatgcaattttactttctaaagtaaacacttagaaaatagattataacccagacgttttggattatactgagacaaatatgtaaataagttttagcaagtctgaacatgtaccagcgagatcttcaggttaactaagaaaagcccagaaacttcattatttactgtgctttgtatggcataactggtaacaaggcagtaaaatgatacatatttgaactggaccatagtaattaaatgatttatcaatatcatttgcaagataattgtcaggttgagttaatagtaagtggcagcttcccagaaatttgggttatttggcctaagctgtgccctgggattacctcttcatcttccttgacttttaagttcaaatttggaggttatgtgaagtgattgaaataaatctttcaggctgaggaagtcggtaatttcaagaatatagtgaaaacaaggttgtaatctaaacatgagaagcttaagtttaggaaatggttagaatataaattgctaaagccatcatgattttggccacagatgaaaatatgaacactggaaatgagcgccatttaaatgagatgctgtatgtaagccaggggtcagcaaagttcagcctgtgacctggtgtgtgtgggggtgtgtgtgtgtgtgtgtgtgtgtgtgtgtgtgtccgtgtccctgagttaagaatggtttttaggcttgtataggattaaaaaaaaaaaaaacccacagaaaaatgtaggcagcccagcataagataccgcctttcacagaaatgtttgctgaccccggaactgtcactctcgggttacaagagtttgtttctttgaaacagtctggctctgtcacccaggctggagtgcagtggcatgatctcaggtcactgcagcctccacctcccgggttcaagcaattctgcctcagcctcctgagtagctgggattacaggtgtgcaccaccacagacagctaattttacaggtgtacaccaccacacccaagaatcacttgaacccgggaggtgggggttgcagtgagccaagatcatagcactgtactccagtctgggtgacacactgtctgaaaaataaaagtttagttctaggtacaaattaagtggtctacccaacaggaagctgtgaaattagaagtaattttaaagcatactttacacctctatataatcaaagtaagggcaagataaaacttgttagtaaaacatgttttattattttttagataggtagcctgcaacataaaatatattttgaaagctgttaaggggtgtataatctgttaaaaaataccatgattagtatttcacatttagtgactcagatccctttgtgtaagtcctttgcgttgtgcaaagaggtttttctatgagatgagaattatgaacacttcatataggtaaattccataggttgagctggggcagaaattaatggctcctggagattgcatctttttttttttttttttgagcttagaattcccatttggacagaatttagcttttgtgctgttgattacttctgtactaaactggtagccaattgttcacttctaaatggaagggaaaaagttacccacacaagttagaaaatgatttaccgaattatttttttgagttagtatgtatatactgttttaaatcagtaatgtttgttccttttgctgcccatttgggagtatgtggcaattcctagtgctcttgtatgacattactcttcttgagacttgtatatgcaagaaagtatatataaaagatgcctggtggtaactttgtatctgagttctgattcattatggacttttagaaatctatttagataattggttcatactaggtgctcaattactctgaccttgtgtggcttaatccttaaatagttgctttaggtgttactgggtggaagcatggaaagtgaagggctaatattaaggatttttatgtattactgagtagggaaagtgggaagtagcttatctttggacagttgtattactttgcactaatcaccttgtttgcagttgtagctgattcagttctagattttaggaccaaaaagatctctaatttaaagaaacagtttttatatacctagaatgaagattctgtttaaagcggttttggttaacttggttcttgacatttgcctaaaattttgttggattgggactaaaatgttctattagccaatgaataacgtccaagtaaatttttgttttattttggg

SEQ ID NO: 1013 - protein, 465 aa, Homosapiens
MTLAYIPHSALRRRPLPDVCLAPEEKTAPLSRPGHLVGRAEAGALGSARPAAIRGGTRRRATIMPGHLQEGFGCVVTNRFDQLFDDESDPFEVLKAAENKKKEAGGGGVGGPGAKSAAQAAAQTNSNAAGKQLRKESQKDRKNPLPPSVGVVDKKEETQPPVALKKEGIRRVGRRPDQQLQGEGKIIDRRPERRPPRERRFEKPLEEKGEGGEFSVDRPIIDRPIRGRGGLGRGRGGRGRGMGRGDGFDSRGKREFDRHSGSDRSGLKHEDKRGGSGSHNWGTVKDELTESPKYIQKQISYNYSDLDQSNVTEETPEGEEHHPVADTENKENEVEEVKEEGPKEMTLDEWKAIQNKDRAKVEFNIRKPNEGADGQWKKGFVLHKSKSEEAHAEDSVMDHHFRKPANDITSQLEINFGDLGRPGRGGRGGRGGRGRGGRPNRGSRTDKSSASAPDVDDPEAFPALA

SEQ ID NO: 1014 - DNA, 5775 bp, Homosapiens
tgtgtagtgtttcacttgaatttgtagctctccaatttgtgtagaaaaacgtagtggttgtgtattaacagaaaatgcttctgagaagtttatatctagtaaggtctttaccctagttgtagttggaagagtgtagaacagagtttttctttctgagtgttctttttaacttcagtgttagtgctagtagtaaccttatatgtcatctctccagaggtcttcatcaaggattcacatggcagtcctgatctgaagggcatatttaaaatgtacttgtccagatttcactgctaaagattatgattcagtaggtctaggatgggcttcagccgtttgggttgattgtgatagcatacatgtctttagttgaggactgctggtattacctgcaattttgagatagagaaaagtgcaggaaaatcttcctccaggatcactaaagctgagccctagcttgttacctgtggaggcattgagacatttgttcacagaaagtacagtttggatttttggttttttttagaagaaagctcattatttagaaattttgcaatgttacttttctactaataacacaatcatcttcacttatatttttaggctcatgctgaagattcggttatggaccatcatttccggaagccagcaaatgatataacgtctcagctggagatcaattttggagaccttggccgcccaggacgtggcggcaggggaggacgaggtggacgtgggcgtggtgggcgcccaaaccgtggcagcaggaccgacaagtcaagtgcttctgctcctgatgtggatgacccagaggcattcccagctctggcttaactggatgccataagacaaccctggttcctttgtgaacccttctgttcaaagcttttgcatgcttaaggattccaaacgactaagaaattaaaaaaaaaaagactgtcattcataccattcacacctaaagactgaattttatctgttttaaaaatgaacttctcccgctacacagaagtaacaaatatggtagtcagttttgtatttagaaatgtattggtagcagggatgttttcataattttcagagattatgcattcttcatgaatacttttgtattgctgcttgcaaatatgcatttccaaacttgaaatataggtgtgaacagtgtgtaccagtttaaagctttcacttcatttgtgttttttaattaaggatttagaagttcccccaattacaaactggttttaaatattggacatactggttttaatacctgctttgcatattcacacatggtcaactgggacatgttaaactttgatttgtcaaattttatgctgtgtggaatactaactatatgtattttaacttagttttaatattttcatttttggggaaaaatcttttttcacttctcatgatagctgttatatatatatgctaaatctttatatacagaaatatcagtacttgaacaaattcaaagcacatttggtttattaacccttgctccttgcatggctcattaggttcaaattataactgatttacattttcagctatatttactttttaaatgcttgagtttcccattttaaaatctaaactagacatcttaattggtgaaagttgtttaaactacttattgttggtaggcacatcgtgtcaagtgaagtagttttataggtatgggttttttctcccccttcaccagggtgggtggaataagttgatttggccaatgtgtaatatttaaactgttctgtaaaataagtgtctggccatttggtatgatttctgtgtgtgaaaggtcccaaaatcaaaatggtacatccataatcagccaccatttaacccttccttgttctaaaacaaaaaccaaagggcgctggttggtagggtgaggtgggggagtattttaatttttggaatttgggaagcagacagctttactttgtaaggttggaacagcagcactatacatgaaatataaaccaaaaacctttactgtttctaaatttcctagattgctattatttggttgtaagttgagtattccacagaaagtggtaattatctcttctctcttcctccattagaaaattaggtaaataatggattcctataatgggagcatcaccacttattaaaacacacatagaatgatgaattaaaaaagttttctaggattgtcttttattctgccacatttattgataaacagtgaaggaatttttaaaaaatttttaagaattgtttgtcacgtcatttttagaaatgttctacctgtatatggtaatgtccagttttaaaaatattggacatcttcaatcttaaacatttctatttagctgattggttctcacatatacttctaaaagaaacttttatgttataagagttactttttggataagatttattaatctcagttacctactattctgacattttaggaaggaggtaattgtttttaatgatggataaacttgtgctggtgttttggatcttatgatgctgagcatgttctgcactggtgctaatgtctaatataattttatatttacacacatacgtgctacccagagattaatttagtccatatgaactattgacccattgttcattgagacagcaacatacgcactcctaaatcagtgtgtttagacttttcaagtatctaactcatttccaaacatgtaccatgttttataaacctcttgatttccagcaacatactatagaaaacacctgctactcaaaacacaacttctcagtgtcatccattgctgtcgtgagagacaacatagcaatatctggtatgttgcaagctttcaagatagcctgaacttaaaaagttggtgcattagttgtatctgatggatataaatttgcctcctagttcactttgtgtcaagagctaaaactgtgaacctaactttctcttattggtgggtaataactgaaaataaagatttattttcatgctcacttcttaaaagtcataaaaacaatcaaataggatcatgtttattgtcatgtgtttcctggtttctgacctgtgtgcacacccctgtgtgtttataatttttaaattgaattttatatggggtttttatttgctaaaaaccaggctgttgaatcacatttgggaagggtacttatcttaatgactaatgacttaattgggaaagttgaattcttgtaaaatacaaaatccaaggacttcttggatttaatctgattgtcacttcttagcagatcacttttttgataatgaaagttaagcatactgaatgctacttttgattgacaaactggctataatagtctaggggaaaaatccctaaacagataaagattcctaaagtaatggtggcagctgatgtttcagtgaacttttatcttgatgcgtttaaatggaagtaatgccagacctgagatttttaaggcatttttacagcttgtattgaaatgattggagacatggtttctttattagctattttgagacctgtggagttaagcaagacttttaaaaattggcaccatatacatctagttagttcctttactcttatttttttaaataaaagtagtacacatcatttccagggttgtaaatatatttggggcttgtttttggtatggatttaaaaggaggatattaagtattcattctaattttgttatttttctagttgccagagatggttgcactgaaatagaacagggagttgcatacaaagcctaaatgtgtattggatttcgaaaatactaggttggtgcaattggttttgtaccaacctaacatgtctttaggaaagtaccatcatgtggaaggaaacaacaggtgttaaaaggttcaaaggaatgagaaataggaagttactagaacctaactgatgttgaccttagaggtaagattattcaggtatattagtggacctccagtccaatggtatagcaaattccagggatctcaggtgcatgcaattttactttctaaagtaaacacttagaaaatagattataacccagacgttttggattatactgagacaaatatgtaaataagttttagcaagtctgaacatgtaccagcgagatcttcaggttaactaagaaaagcccagaaacttcattatttactgtgctttgtatggcataactggtaacaaggcagtaaaatgatacatatttgaactggaccatagtaattaaatgatttatcaatatcatttgcaagataattgtcaggttgagttaatagtaagtggcagcttcccagaaatttgggttatttggcctaagctgtgccctgggattacctcttcatcttccttgacttttaagttcaaatttggaggttatgtgaagtgattgaaataaatctttcaggctgaggaagtcggtaatttcaagaatatagtgaaaacaaggttgtaatctaaacatgagaagcttaagtttaggaaatggttagaatataaattgctaaagccatcatgattttggccacagatgaaaatatgaacactggaaatgagcgccatttaaatgagatgctgtatgtaagccaggggtcagcaaagttcagcctgtgacctggtgtgtgtgggggtgtgtgtgtgtgtgtgtgtgtgtgtgtgtgtgtccgtgtccctgagttaagaatggtttttaggcttgtataggattaaaaaaaaaaaaaacccacagaaaaatgtaggcagcccagcataagataccgcctttcacagaaatgtttgctgaccccggaactgtcactctcgggttacaagagtttgtttctttgaaacagtctggctctgtcacccaggctggagtgcagtggcatgatctcaggtcactgcagcctccacctcccgggttcaagcaattctgcctcagcctcctgagtagctgggattacaggtgtgcaccaccacagacagctaattttacaggtgtacaccaccacacccaagaatcacttgaacccgggaggtgggggttgcagtgagccaagatcatagcactgtactccagtctgggtgacacactgtctgaaaaataaaagtttagttctaggtacaaattaagtggtctacccaacaggaagctgtgaaattagaagtaattttaaagcatactttacacctctatataatcaaagtaagggcaagataaaacttgttagtaaaacatgttttattattttttagataggtagcctgcaacataaaatatattttgaaagctgttaaggggtgtataatctgttaaaaaataccatgattagtatttcacatttagtgactcagatccctttgtgtaagtcctttgcgttgtgcaaagaggtttttctatgagatgagaattatgaacacttcatataggtaaattccataggttgagctggggcagaaattaatggctcctggagattgcatctttttttttttttttttgagcttagaattcccatttggacagaatttagcttttgtgctgttgattacttctgtactaaactggtagccaattgttcacttctaaatggaagggaaaaagttacccacacaagttagaaaatgatttaccgaattatttttttgagttagtatgtatatactgttttaaatcagtaatgtttgttccttttgctgcccatttgggagtatgtggcaattcctagtgctcttgtatgacattactcttcttgagacttgtatatgcaagaaagtatatataaaagatgcctggtggtaactttgt

SEQ ID NO: 1015 - protein, 69 aa, Homosapiens; identical to SEQ ID NO: 1009

SEQ ID NO: 1016 - DNA, 6577 bp, Homosapiens
gttagccctgagcccgagggggcgtgagtgaaaccaaagagcactttcgcgagtcagttacgccgtcacggttttttggtttcaaggtagctgaagacctagagagtttaagggtggccagagcaggtggcaggactccgcccaccaccacgcttcccttccttcagcccgcacgcttcactcccctcatggggtctcgcctctcaggcgcgcgcgaagagttgtcgcgcggtgcgtcctgggaattgtagtcccgacgcggagagtcgcctcaggagaaatgactctggcctacataccccacagtgccttgcggcgcaggccgctcccggatgtgtgcctggcgccggaagagaagacggcccccctctctcggcccggccatcttgtgggaagagctgaagcaggcgctcttggctcggcgcggcccgctgcaatccgtggaggaacgcgccgccgagccaccatcatgcctgggcacttacaggaaggcttcggctgcgtggtcaccaaccgattcgaccagttatttgacgacgaatcggaccccttcgaggtgctgaaggcagcagagaacaagaaaaaagaagccggcgggggcggcgttgggggccctggggccaagagcgcagctcaggccgcggcccagaccaactccaacgcggcaggcaaacagctgcgcaaggagtcccagaaagaccgcaagaacccgctgccccccagcgttggcgtggttgacaagaaagaggagacgcagccgcccgtggcgcttaagaaagaaggaataagacgagttggaagaagacctgatcaacaacttcagggtgaagggaaaataattgatagaagaccagaaaggcgaccacctcgtgaacgaagattcgaaaagccacttgaagaaaagggtgaaggaggcgaattttcagttgatagaccgattattgaccgacctattcgaggtcgtggtggtcttggaagaggtcgagggggccgtggacgtggaatgggccgaggagatggatttgattctcgtggcaaacgtgaatttgataggcatagtggaagtgatagatctggcctgaagcacgaggacaaacgtggaggtagcggatctcacaactggggaactgtcaaagacgaattaactgacttggatcaatcaaatgtgactgaggaaacacctgaaggtgaagaacatcatccagtggcagacactgaaaataaggagaatgaagttgaagaggtaaaagaggagggtccaaaagagatgactttggatgagtggaaggctattcaaaataaggaccgggcaaaagtagaatttaatatccgaaaaccaaatgaaggtgctgatgggcagtggaagaagggatttgttcttcataaatcaaagagtgaagaggctcatgctgaagattcggttatggaccatcatttccggaagccagcaaatgatataacgtctcagctggagatcaattttggagaccttggccgcccaggacgtggcggcaggggaggacgaggtggacgtgggcgtggtgggcgcccaaaccgtggcagcaggaccgacaagtcaagtgcttctgctcctgatgtggatgacccagaggcattcccagctctggcttaactggatgccataagacaaccctggttcctttgtgaacccttctgttcaaagcttttgcatgcttaaggattccaaacgactaagaaattaaaaaaaaaaagactgtcattcataccattcacacctaaagactgaattttatctgttttaaaaatgaacttctcccgctacacagaagtaacaaatatggtagtcagttttgtatttagaaatgtattggtagcagggatgttttcataattttcagagattatgcattcttcatgaatacttttgtattgctgcttgcaaatatgcatttccaaacttgaaatataggtgtgaacagtgtgtaccagtttaaagctttcacttcatttgtgttttttaattaaggatttagaagttcccccaattacaaactggttttaaatattggacatactggttttaatacctgctttgcatattcacacatggtcaactgggacatgttaaactttgatttgtcaaattttatgctgtgtggaatactaactatatgtattttaacttagttttaatattttcatttttggggaaaaatcttttttcacttctcatgatagctgttatatatatatgctaaatctttatatacagaaatatcagtacttgaacaaattcaaagcacatttggtttattaacccttgctccttgcatggctcattaggttcaaattataactgatttacattttcagctatatttactttttaaatgcttgagtttcccattttaaaatctaaactagacatcttaattggtgaaagttgtttaaactacttattgttggtaggcacatcgtgtcaagtgaagtagttttataggtatgggttttttctcccccttcaccagggtgggtggaataagttgatttggccaatgtgtaatatttaaactgttctgtaaaataagtgtctggccatttggtatgatttctgtgtgtgaaaggtcccaaaatcaaaatggtacatccataatcagccaccatttaacccttccttgttctaaaacaaaaaccaaagggcgctggttggtagggtgaggtgggggagtattttaatttttggaatttgggaagcagacagctttactttgtaaggttggaacagcagcactatacatgaaatataaaccaaaaacctttactgtttctaaatttcctagattgctattatttggttgtaagttgagtattccacagaaagtggtaattatctcttctctcttcctccattagaaaattaggtaaataatggattcctataatgggagcatcaccacttattaaaacacacatagaatgatgaattaaaaaagttttctaggattgtcttttattctgccacatttattgataaacagtgaaggaatttttaaaaaatttttaagaattgtttgtcacgtcatttttagaaatgttctacctgtatatggtaatgtccagttttaaaaatattggacatcttcaatcttaaacatttctatttagctgattggttctcacatatacttctaaaagaaacttttatgttataagagttactttttggataagatttattaatctcagttacctactattctgacattttaggaaggaggtaattgtttttaatgatggataaacttgtgctggtgttttggatcttatgatgctgagcatgttctgcactggtgctaatgtctaatataattttatatttacacacatacgtgctacccagagattaatttagtccatatgaactattgacccattgttcattgagacagcaacatacgcactcctaaatcagtgtgtttagacttttcaagtatctaactcatttccaaacatgtaccatgttttataaacctcttgatttccagcaacatactatagaaaacacctgctactcaaaacacaacttctcagtgtcatccattgctgtcgtgagagacaacatagcaatatctggtatgttgcaagctttcaagatagcctgaacttaaaaagttggtgcattagttgtatctgatggatataaatttgcctcctagttcactttgtgtcaagagctaaaactgtgaacctaactttctcttattggtgggtaataactgaaaataaagatttattttcatgctcacttcttaaaagtcataaaaacaatcaaataggatcatgtttattgtcatgtgtttcctggtttctgacctgtgtgcacacccctgtgtgtttataatttttaaattgaattttatatggggtttttatttgctaaaaaccaggctgttgaatcacatttgggaagggtacttatcttaatgactaatgacttaattgggaaagttgaattcttgtaaaatacaaaatccaaggacttcttggatttaatctgattgtcacttcttagcagatcacttttttgataatgaaagttaagcatactgaatgctacttttgattgacaaactggctataatagtctaggggaaaaatccctaaacagataaagattcctaaagtaatggtggcagctgatgtttcagtgaacttttatcttgatgcgtttaaatggaagtaatgccagacctgagatttttaaggcatttttacagcttgtattgaaatgattggagacatggtttctttattagctattttgagacctgtggagttaagcaagacttttaaaaattggcaccatatacatctagttagttcctttactcttatttttttaaataaaagtagtacacatcatttccagggttgtaaatatatttggggcttgtttttggtatggatttaaaaggaggatattaagtattcattctaattttgttatttttctagttgccagagatggttgcactgaaatagaacagggagttgcatacaaagcctaaatgtgtattggatttcgaaaatactaggttggtgcaattggttttgtaccaacctaacatgtctttaggaaagtaccatcatgtggaaggaaacaacaggtgttaaaaggttcaaaggaatgagaaataggaagttactagaacctaactgatgttgaccttagaggtaagattattcaggtatattagtggacctccagtccaatggtatagcaaattccagggatctcaggtgcatgcaattttactttctaaagtaaacacttagaaaatagattataacccagacgttttggattatactgagacaaatatgtaaataagttttagcaagtctgaacatgtaccagcgagatcttcaggttaactaagaaaagcccagaaacttcattatttactgtgctttgtatggcataactggtaacaaggcagtaaaatgatacatatttgaactggaccatagtaattaaatgatttatcaatatcatttgcaagataattgtcaggttgagttaatagtaagtggcagcttcccagaaatttgggttatttggcctaagctgtgccctgggattacctcttcatcttccttgacttttaagttcaaatttggaggttatgtgaagtgattgaaataaatctttcaggctgaggaagtcggtaatttcaagaatatagtgaaaacaaggttgtaatctaaacatgagaagcttaagtttaggaaatggttagaatataaattgctaaagccatcatgattttggccacagatgaaaatatgaacactggaaatgagcgccatttaaatgagatgctgtatgtaagccaggggtcagcaaagttcagcctgtgacctggtgtgtgtgggggtgtgtgtgtgtgtgtgtgtgtgtgtgtgtgtgtccgtgtccctgagttaagaatggtttttaggcttgtataggattaaaaaaaaaaaaaacccacagaaaaatgtaggcagcccagcataagataccgcctttcacagaaatgtttgctgaccccggaactgtcactctcgggttacaagagtttgtttctttgaaacagtctggctctgtcacccaggctggagtgcagtggcatgatctcaggtcactgcagcctccacctcccgggttcaagcaattctgcctcagcctcctgagtagctgggattacaggtgtgcaccaccacagacagctaattttacaggtgtacaccaccacacccaagaatcacttgaacccgggaggtgggggttgcagtgagccaagatcatagcactgtactccagtctgggtgacacactgtctgaaaaataaaagtttagttctaggtacaaattaagtggtctacccaacaggaagctgtgaaattagaagtaattttaaagcatactttacacctctatataatcaaagtaagggcaagataaaacttgttagtaaaacatgttttattattttttagataggtagcctgcaacataaaatatattttgaaagctgttaaggggtgtataatctgttaaaaaataccatgattagtatttcacatttagtgactcagatccctttgtgtaagtcctttgcgttgtgcaaagaggtttttctatgagatgagaattatgaacacttcatataggtaaattccataggttgagctggggcagaaattaatggctcctggagattgcatctttttttttttttttttgagcttagaattcccatttggacagaatttagcttttgtgctgttgattacttctgtactaaactggtagccaattgttcacttctaaatggaagggaaaaagttacccacacaagttagaaaatgatttaccgaattatttttttgagttagtatgtatatactgttttaaatcagtaatgtttgttccttttgctgcccatttgggagtatgtggcaattcctagtgctcttgtatgacattactcttcttgagacttgtatatgcaagaaagtatatataaaagatgcctggtggtaactttgt

SEQ ID NO: 1017 - protein, 450 aa, Homosapiens [sequence omitted]

SEQ ID NO: 1018 - DNA, 6622 bp, Homosapiens
gttagccctgagcccgagggggcgtgagtgaaaccaaagagcactttcgcgagtcagttacgccgtcacggttttttggtttcaaggtagctgaagacctagagagtttaagggtggccagagcaggtggcaggactccgcccaccaccacgcttcccttccttcagcccgcacgcttcactcccctcatggggtctcgcctctcaggcgcgcgcgaagagttgtcgcgcggtgcgtcctgggaattgtagtcccgacgcggagagtcgcctcaggagaaatgactctggcctacataccccacagtgccttgcggcgcaggccgctcccggatgtgtgcctggcgccggaagagaagacggcccccctctctcggcccggccatcttgtgggaagagctgaagcaggcgctcttggctcggcgcggcccgctgcaatccgtggaggaacgcgccgccgagccaccatcatgcctgggcacttacaggaaggcttcggctgcgtggtcaccaaccgattcgaccagttatttgacgacgaatcggaccccttcgaggtgctgaaggcagcagagaacaagaaaaaagaagccggcgggggcggcgttgggggccctggggccaagagcgcagctcaggccgcggcccagaccaactccaacgcggcaggcaaacagctgcgcaaggagtcccagaaagaccgcaagaacccgctgccccccagcgttggcgtggttgacaagaaagaggagacgcagccgcccgtggcgcttaagaaagaaggaataagacgagttggaagaagacctgatcaacaacttcagggtgaagggaaaataattgatagaagaccagaaaggcgaccacctcgtgaacgaagattcgaaaagccacttgaagaaaagggtgaaggaggcgaattttcagttgatagaccgattattgaccgacctattcgaggtcgtggtggtcttggaagaggtcgagggggccgtggacgtggaatgggccgaggagatggatttgattctcgtggcaaacgtgaatttgataggcatagtggaagtgatagatctggcctgaagcacgaggacaaacgtggaggtagcggatctcacaactggggaactgtcaaagacgaattaacagagtcccccaaatacattcagaaacaaatatcttataattacagtgacttggatcaatcaaatgtgactgaggaaacacctgaaggtgaagaacatcatccagtggcagacactgaaaataaggagaatgaagttgaagaggtaaaagaggagggtccaaaagagatgactttggatgagtggaaggctattcaaaataaggaccgggcaaaagtagaatttaatatccgaaaaccaaatgaaggtgctgatgggcagtggaagaagggatttgttcttcataaatcaaagagtgaagaggctcatgctgaagattcggttatggaccatcatttccggaagccagcaaatgatataacgtctcagctggagatcaattttggagaccttggccgcccaggacgtggcggcaggggaggacgaggtggacgtgggcgtggtgggcgcccaaaccgtggcagcaggaccgacaagtcaagtgcttctgctcctgatgtggatgacccagaggcattcccagctctggcttaactggatgccataagacaaccctggttcctttgtgaacccttctgttcaaagcttttgcatgcttaaggattccaaacgactaagaaattaaaaaaaaaaagactgtcattcataccattcacacctaaagactgaattttatctgttttaaaaatgaacttctcccgctacacagaagtaacaaatatggtagtcagttttgtatttagaaatgtattggtagcagggatgttttcataattttcagagattatgcattcttcatgaatacttttgtattgctgcttgcaaatatgcatttccaaacttgaaatataggtgtgaacagtgtgtaccagtttaaagctttcacttcatttgtgttttttaattaaggatttagaagttcccccaattacaaactggttttaaatattggacatactggttttaatacctgctttgcatattcacacatggtcaactgggacatgttaaactttgatttgtcaaattttatgctgtgtggaatactaactatatgtattttaacttagttttaatattttcatttttggggaaaaatcttttttcacttctcatgatagctgttatatatatatgctaaatctttatatacagaaatatcagtacttgaacaaattcaaagcacatttggtttattaacccttgctccttgcatggctcattaggttcaaattataactgatttacattttcagctatatttactttttaaatgcttgagtttcccattttaaaatctaaactagacatcttaattggtgaaagttgtttaaactacttattgttggtaggcacatcgtgtcaagtgaagtagttttataggtatgggttttttctcccccttcaccagggtgggtggaataagttgatttggccaatgtgtaatatttaaactgttctgtaaaataagtgtctggccatttggtatgatttctgtgtgtgaaaggtcccaaaatcaaaatggtacatccataatcagccaccatttaacccttccttgttctaaaacaaaaaccaaagggcgctggttggtagggtgaggtgggggagtattttaatttttggaatttgggaagcagacagctttactttgtaaggttggaacagcagcactatacatgaaatataaaccaaaaacctttactgtttctaaatttcctagattgctattatttggttgtaagttgagtattccacagaaagtggtaattatctcttctctcttcctccattagaaaattaggtaaataatggattcctataatgggagcatcaccacttattaaaacacacatagaatgatgaattaaaaaagttttctaggattgtcttttattctgccacatttattgataaacagtgaaggaatttttaaaaaatttttaagaattgtttgtcacgtcatttttagaaatgttctacctgtatatggtaatgtccagttttaaaaatattggacatcttcaatcttaaacatttctatttagctgattggttctcacatatacttctaaaagaaacttttatgttataagagttactttttggataagatttattaatctcagttacctactattctgacattttaggaaggaggtaattgtttttaatgatggataaacttgtgctggtgttttggatcttatgatgctgagcatgttctgcactggtgctaatgtctaatataattttatatttacacacatacgtgctacccagagattaatttagtccatatgaactattgacccattgttcattgagacagcaacatacgcactcctaaatcagtgtgtttagacttttcaagtatctaactcatttccaaacatgtaccatgttttataaacctcttgatttccagcaacatactatagaaaacacctgctactcaaaacacaacttctcagtgtcatccattgctgtcgtgagagacaacatagcaatatctggtatgttgcaagctttcaagatagcctgaacttaaaaagttggtgcattagttgtatctgatggatataaatttgcctcctagttcactttgtgtcaagagctaaaactgtgaacctaactttctcttattggtgggtaataactgaaaataaagatttattttcatgctcacttcttaaaagtcataaaaacaatcaaataggatcatgtttattgtcatgtgtttcctggtttctgacctgtgtgcacacccctgtgtgtttataatttttaaattgaattttatatggggtttttatttgctaaaaaccaggctgttgaatcacatttgggaagggtacttatcttaatgactaatgacttaattgggaaagttgaattcttgtaaaatacaaaatccaaggacttcttggatttaatctgattgtcacttcttagcagatcacttttttgataatgaaagttaagcatactgaatgctacttttgattgacaaactggctataatagtctaggggaaaaatccctaaacagataaagattcctaaagtaatggtggcagctgatgtttcagtgaacttttatcttgatgcgtttaaatggaagtaatgccagacctgagatttttaaggcatttttacagcttgtattgaaatgattggagacatggtttctttattagctattttgagacctgtggagttaagcaagacttttaaaaattggcaccatatacatctagttagttcctttactcttatttttttaaataaaagtagtacacatcatttccagggttgtaaatatatttggggcttgtttttggtatggatttaaaaggaggatattaagtattcattctaattttgttatttttctagttgccagagatggttgcactgaaatagaacagggagttgcatacaaagcctaaatgtgtattggatttcgaaaatactaggttggtgcaattggttttgtaccaacctaacatgtctttaggaaagtaccatcatgtggaaggaaacaacaggtgttaaaaggttcaaaggaatgagaaataggaagttactagaacctaactgatgttgaccttagaggtaagattattcaggtatattagtggacctccagtccaatggtatagcaaattccagggatctcaggtgcatgcaattttactttctaaagtaaacacttagaaaatagattataacccagacgttttggattatactgagacaaatatgtaaataagttttagcaagtctgaacatgtaccagcgagatcttcaggttaactaagaaaagcccagaaacttcattatttactgtgctttgtatggcataactggtaacaaggcagtaaaatgatacatatttgaactggaccatagtaattaaatgatttatcaatatcatttgcaagataattgtcaggttgagttaatagtaagtggcagcttcccagaaatttgggttatttggcctaagctgtgccctgggattacctcttcatcttccttgacttttaagttcaaatttggaggttatgtgaagtgattgaaataaatctttcaggctgaggaagtcggtaatttcaagaatatagtgaaaacaaggttgtaatctaaacatgagaagcttaagtttaggaaatggttagaatataaattgctaaagccatcatgattttggccacagatgaaaatatgaacactggaaatgagcgccatttaaatgagatgctgtatgtaagccaggggtcagcaaagttcagcctgtgacctggtgtgtgtgggggtgtgtgtgtgtgtgtgtgtgtgtgtgtgtgtgtccgtgtccctgagttaagaatggtttttaggcttgtataggattaaaaaaaaaaaaaacccacagaaaaatgtaggcagcccagcataagataccgcctttcacagaaatgtttgctgaccccggaactgtcactctcgggttacaagagtttgtttctttgaaacagtctggctctgtcacccaggctggagtgcagtggcatgatctcaggtcactgcagcctccacctcccgggttcaagcaattctgcctcagcctcctgagtagctgggattacaggtgtgcaccaccacagacagctaattttacaggtgtacaccaccacacccaagaatcacttgaacccgggaggtgggggttgcagtgagccaagatcatagcactgtactccagtctgggtgacacactgtctgaaaaataaaagtttagttctaggtacaaattaagtggtctacccaacaggaagctgtgaaattagaagtaattttaaagcatactttacacctctatataatcaaagtaagggcaagataaaacttgttagtaaaacatgttttattattttttagataggtagcctgcaacataaaatatattttgaaagctgttaaggggtgtataatctgttaaaaaataccatgattagtatttcacatttagtgactcagatccctttgtgtaagtcctttgcgttgtgcaaagaggtttttctatgagatgagaattatgaacacttcatataggtaaattccataggttgagctggggcagaaattaatggctcctggagattgcatctttttttttttttttttgagcttagaattcccatttggacagaatttagcttttgtgctgttgattacttctgtactaaactggtagccaattgttcacttctaaatggaagggaaaaagttacccacacaagttagaaaatgatttaccgaattatttttttgagttagtatgtatatactgttttaaatcagtaatgtttgttccttttgctgcccatttgggagtatgtggcaattcctagtgctcttgtatgacattactcttcttgagacttgtatatgcaagaaagtatatataaaagatgcctggtggtaactttgt

SEQ ID NO: 1019 - protein, 465 aa, Homosapiens; identical to SEQ ID NO: 1013

SEQ ID NO: 1020 - DNA, 3020 bp, Homosapiens
tgtgtagtgtttcacttgaatttgtagctctccaatttgtgtagaaaaacgtagtggttgtgtattaacagaaaatgcttctgagaagtttatatctagtaaggtctttaccctagttgtagttggaagagtgtagaacagagtttttctttctgagtgttctttttaacttcagtgttagtgctagtagtaaccttatatgtcatctctccagaggtcttcatcaaggattcacatggcagtcctgatctgaagggcatatttaaaatgtacttgtccagatttcactgctaaagattatgattcagtaggtctaggatgggcttcagccgtttgggttgattgtgatagcatacatgtctttagttgaggactgctggtattacctgcaattttgagatagagaaaagtgcaggaaaatcttcctccaggatcactaaagctgagccctagcttgttacctgtggaggcattgagacatttgttcacagaaagtacagtttggatttttggttttttttagaagaaagctcattatttagaaattttgcaatgttacttttctactaataacacaatcatcttcacttatatttttaggctcatgctgaagattcggttatggaccatcatttccggaagccagcaaatgatataacgtctcagctggagatcaattttggagaccttggccgcccaggacgtggcggcaggggaggacgaggtggacgtgggcgtggtgggcgcccaaaccgtggcagcaggaccgacaagtcaagtgcttctgctcctgatgtggatgacccagaggcattcccagctctggcttaactggatgccataagacaaccctggttcctttgtgaacccttctgttcaaagcttttgcatgcttaaggattccaaacgactaagaaattaaaaaaaaaaagactgtcattcataccattcacacctaaagactgaattttatctgttttaaaaatgaacttctcccgctacacagaagtaacaaatatggtagtcagttttgtatttagaaatgtattggtagcagggatgttttcataattttcagagattatgcattcttcatgaatacttttgtattgctgcttgcaaatatgcatttccaaacttgaaatataggtgtgaacagtgtgtaccagtttaaagctttcacttcatttgtgttttttaattaaggatttagaagttcccccaattacaaactggttttaaatattggacatactggttttaatacctgctttgcatattcacacatggtcaactgggacatgttaaactttgatttgtcaaattttatgctgtgtggaatactaactatatgtattttaacttagttttaatattttcatttttggggaaaaatcttttttcacttctcatgatagctgttatatatatatgctaaatctttatatacagaaatatcagtacttgaacaaattcaaagcacatttggtttattaacccttgctccttgcatggctcattaggttcaaattataactgatttacattttcagctatatttactttttaaatgcttgagtttcccattttaaaatctaaactagacatcttaattggtgaaagttgtttaaactacttattgttggtaggcacatcgtgtcaagtgaagtagttttataggtatgggttttttctcccccttcaccagggtgggtggaataagttgatttggccaatgtgtaatatttaaactgttctgtaaaataagtgtctggccatttggtatgatttctgtgtgtgaaaggtcccaaaatcaaaatggtacatccataatcagccaccatttaacccttccttgttctaaaacaaaaaccaaagggcgctggttggtagggtgaggtgggggagtattttaatttttggaatttgggaagcagacagctttactttgtaaggttggaacagcagcactatacatgaaatataaaccaaaaacctttactgtttctaaatttcctagattgctattatttggttgtaagttgagtattccacagaaagtggtaattatctcttctctcttcctccattagaaaattaggtaaataatggattcctataatgggagcatcaccacttattaaaacacacatagaatgatgaattaaaaaagttttctaggattgtcttttattctgccacatttattgataaacagtgaaggaatttttaaaaaatttttaagaattgtttgtcacgtcatttttagaaatgttctacctgtatatggtaatgtccagttttaaaaatattggacatcttcaatcttaaacatttctatttagctgattggttctcacatatacttctaaaagaaacttttatgttataagagttactttttggataagatttattaatctcagttacctactattctgacattttaggaaggaggtaattgtttttaatgatggataaacttgtgctggtgttttggatcttatgatgctgagcatgttctgcactggtgctaatgtctaatataattttatatttacacacatacgtgctacccagagattaatttagtccatatgaactattgacccattgttcattgagacagcaacatacgcactcctaaatcagtgtgtttagacttttcaagtatctaactcatttccaaacatgtaccatgttttataaacctcttgatttccagcaacatactatagaaaacacctgctactcaaaacacaacttctcagtgtcatccattgctgtcgtgagagacaacatagcaatatctggtatgttgcaagctttcaagatagcctgaacttaaaaagttggtgcattagttgtatctgatggatataaatttgcctcctagttcactttgtgtcaagagctaaaactgtgaacctaactttctcttattggtgggtaataactgaaaataaagatttattttcatgctcacttcttaaaagtcataaaaacaatcaaataggatc

SEQ ID NO: 1021 - protein, 69 aa, Homosapiens; identical to SEQ ID NO: 1009

SEQ ID NO: 1022 - DNA, 3822 bp, Homosapiens
gttagccctgagcccgagggggcgtgagtgaaaccaaagagcactttcgcgagtcagttacgccgtcacggttttttggtttcaaggtagctgaagacctagagagtttaagggtggccagagcaggtggcaggactccgcccaccaccacgcttcccttccttcagcccgcacgcttcactcccctcatggggtctcgcctctcaggcgcgcgcgaagagttgtcgcgcggtgcgtcctgggaattgtagtcccgacgcggagagtcgcctcaggagaaatgactctggcctacataccccacagtgccttgcggcgcaggccgctcccggatgtgtgcctggcgccggaagagaagacggcccccctctctcggcccggccatcttgtgggaagagctgaagcaggcgctcttggctcggcgcggcccgctgcaatccgtggaggaacgcgccgccgagccaccatcatgcctgggcacttacaggaaggcttcggctgcgtggtcaccaaccgattcgaccagttatttgacgacgaatcggaccccttcgaggtgctgaaggcagcagagaacaagaaaaaagaagccggcgggggcggcgttgggggccctggggccaagagcgcagctcaggccgcggcccagaccaactccaacgcggcaggcaaacagctgcgcaaggagtcccagaaagaccgcaagaacccgctgccccccagcgttggcgtggttgacaagaaagaggagacgcagccgcccgtggcgcttaagaaagaaggaataagacgagttggaagaagacctgatcaacaacttcagggtgaagggaaaataattgatagaagaccagaaaggcgaccacctcgtgaacgaagattcgaaaagccacttgaagaaaagggtgaaggaggcgaattttcagttgatagaccgattattgaccgacctattcgaggtcgtggtggtcttggaagaggtcgagggggccgtggacgtggaatgggccgaggagatggatttgattctcgtggcaaacgtgaatttgataggcatagtggaagtgatagatctggcctgaagcacgaggacaaacgtggaggtagcggatctcacaactggggaactgtcaaagacgaattaactgacttggatcaatcaaatgtgactgaggaaacacctgaaggtgaagaacatcatccagtggcagacactgaaaataaggagaatgaagttgaagaggtaaaagaggagggtccaaaagagatgactttggatgagtggaaggctattcaaaataaggaccgggcaaaagtagaatttaatatccgaaaaccaaatgaaggtgctgatgggcagtggaagaagggatttgttcttcataaatcaaagagtgaagaggctcatgctgaagattcggttatggaccatcatttccggaagccagcaaatgatataacgtctcagctggagatcaattttggagaccttggccgcccaggacgtggcggcaggggaggacgaggtggacgtgggcgtggtgggcgcccaaaccgtggcagcaggaccgacaagtcaagtgcttctgctcctgatgtggatgacccagaggcattcccagctctggcttaactggatgccataagacaaccctggttcctttgtgaacccttctgttcaaagcttttgcatgcttaaggattccaaacgactaagaaattaaaaaaaaaaagactgtcattcataccattcacacctaaagactgaattttatctgttttaaaaatgaacttctcccgctacacagaagtaacaaatatggtagtcagttttgtatttagaaatgtattggtagcagggatgttttcataattttcagagattatgcattcttcatgaatacttttgtattgctgcttgcaaatatgcatttccaaacttgaaatataggtgtgaacagtgtgtaccagtttaaagctttcacttcatttgtgttttttaattaaggatttagaagttcccccaattacaaactggttttaaatattggacatactggttttaatacctgctttgcatattcacacatggtcaactgggacatgttaaactttgatttgtcaaattttatgctgtgtggaatactaactatatgtattttaacttagttttaatattttcatttttggggaaaaatcttttttcacttctcatgatagctgttatatatatatgctaaatctttatatacagaaatatcagtacttgaacaaattcaaagcacatttggtttattaacccttgctccttgcatggctcattaggttcaaattataactgatttacattttcagctatatttactttttaaatgcttgagtttcccattttaaaatctaaactagacatcttaattggtgaaagttgtttaaactacttattgttggtaggcacatcgtgtcaagtgaagtagttttataggtatgggttttttctcccccttcaccagggtgggtggaataagttgatttggccaatgtgtaatatttaaactgttctgtaaaataagtgtctggccatttggtatgatttctgtgtgtgaaaggtcccaaaatcaaaatggtacatccataatcagccaccatttaacccttccttgttctaaaacaaaaaccaaagggcgctggttggtagggtgaggtgggggagtattttaatttttggaatttgggaagcagacagctttactttgtaaggttggaacagcagcactatacatgaaatataaaccaaaaacctttactgtttctaaatttcctagattgctattatttggttgtaagttgagtattccacagaaagtggtaattatctcttctctcttcctccattagaaaattaggtaaataatggattcctataatgggagcatcaccacttattaaaacacacatagaatgatgaattaaaaaagttttctaggattgtcttttattctgccacatttattgataaacagtgaaggaatttttaaaaaatttttaagaattgtttgtcacgtcatttttagaaatgttctacctgtatatggtaatgtccagttttaaaaatattggacatcttcaatcttaaacatttctatttagctgattggttctcacatatacttctaaaagaaacttttatgttataagagttactttttggataagatttattaatctcagttacctactattctgacattttaggaaggaggtaattgtttttaatgatggataaacttgtgctggtgttttggatcttatgatgctgagcatgttctgcactggtgctaatgtctaatataattttatatttacacacatacgtgctacccagagattaatttagtccatatgaactattgacccattgttcattgagacagcaacatacgcactcctaaatcagtgtgtttagacttttcaagtatctaactcatttccaaacatgtaccatgttttataaacctcttgatttccagcaacatactatagaaaacacctgctactcaaaacacaacttctcagtgtcatccattgctgtcgtgagagacaacatagcaatatctggtatgttgcaagctttcaagatagcctgaacttaaaaagttggtgcattagttgtatctgatggatataaatttgcctcctagttcactttgtgtcaagagctaaaactgtgaacctaactttctcttattggtgggtaataactgaaaataaagatttattttcatgctcacttcttaaaagtcataaaaacaatcaaataggatc

SEQ ID NO: 1023 - protein, 450 aa, Homosapiens [sequence omitted]

SEQ ID NO: 1024 - DNA, 3867 bp, Homosapiens
gttagccctgagcccgagggggcgtgagtgaaaccaaagagcactttcgcgagtcagttacgccgtcacggttttttggtttcaaggtagctgaagacctagagagtttaagggtggccagagcaggtggcaggactccgcccaccaccacgcttcccttccttcagcccgcacgcttcactcccctcatggggtctcgcctctcaggcgcgcgcgaagagttgtcgcgcggtgcgtcctgggaattgtagtcccgacgcggagagtcgcctcaggagaaatgactctggcctacataccccacagtgccttgcggcgcaggccgctcccggatgtgtgcctggcgccggaagagaagacggcccccctctctcggcccggccatcttgtgggaagagctgaagcaggcgctcttggctcggcgcggcccgctgcaatccgtggaggaacgcgccgccgagccaccatcatgcctgggcacttacaggaaggcttcggctgcgtggtcaccaaccgattcgaccagttatttgacgacgaatcggaccccttcgaggtgctgaaggcagcagagaacaagaaaaaagaagccggcgggggcggcgttgggggccctggggccaagagcgcagctcaggccgcggcccagaccaactccaacgcggcaggcaaacagctgcgcaaggagtcccagaaagaccgcaagaacccgctgccccccagcgttggcgtggttgacaagaaagaggagacgcagccgcccgtggcgcttaagaaagaaggaataagacgagttggaagaagacctgatcaacaacttcagggtgaagggaaaataattgatagaagaccagaaaggcgaccacctcgtgaacgaagattcgaaaagccacttgaagaaaagggtgaaggaggcgaattttcagttgatagaccgattattgaccgacctattcgaggtcgtggtggtcttggaagaggtcgagggggccgtggacgtggaatgggccgaggagatggatttgattctcgtggcaaacgtgaatttgataggcatagtggaagtgatagatctggcctgaagcacgaggacaaacgtggaggtagcggatctcacaactggggaactgtcaaagacgaattaacagagtcccccaaatacattcagaaacaaatatcttataattacagtgacttggatcaatcaaatgtgactgaggaaacacctgaaggtgaagaacatcatccagtggcagacactgaaaataaggagaatgaagttgaagaggtaaaagaggagggtccaaaagagatgactttggatgagtggaaggctattcaaaataaggaccgggcaaaagtagaatttaatatccgaaaaccaaatgaaggtgctgatgggcagtggaagaagggatttgttcttcataaatcaaagagtgaagaggctcatgctgaagattcggttatggaccatcatttccggaagccagcaaatgatataacgtctcagctggagatcaattttggagaccttggccgcccaggacgtggcggcaggggaggacgaggtggacgtgggcgtggtgggcgcccaaaccgtggcagcaggaccgacaagtcaagtgcttctgctcctgatgtggatgacccagaggcattcccagctctggcttaactggatgccataagacaaccctggttcctttgtgaacccttctgttcaaagcttttgcatgcttaaggattccaaacgactaagaaattaaaaaaaaaaagactgtcattcataccattcacacctaaagactgaattttatctgttttaaaaatgaacttctcccgctacacagaagtaacaaatatggtagtcagttttgtatttagaaatgtattggtagcagggatgttttcataattttcagagattatgcattcttcatgaatacttttgtattgctgcttgcaaatatgcatttccaaacttgaaatataggtgtgaacagtgtgtaccagtttaaagctttcacttcatttgtgttttttaattaaggatttagaagttcccccaattacaaactggttttaaatattggacatactggttttaatacctgctttgcatattcacacatggtcaactgggacatgttaaactttgatttgtcaaattttatgctgtgtggaatactaactatatgtattttaacttagttttaatattttcatttttggggaaaaatcttttttcacttctcatgatagctgttatatatatatgctaaatctttatatacagaaatatcagtacttgaacaaattcaaagcacatttggtttattaacccttgctccttgcatggctcattaggttcaaattataactgatttacattttcagctatatttactttttaaatgcttgagtttcccattttaaaatctaaactagacatcttaattggtgaaagttgtttaaactacttattgttggtaggcacatcgtgtcaagtgaagtagttttataggtatgggttttttctcccccttcaccagggtgggtggaataagttgatttggccaatgtgtaatatttaaactgttctgtaaaataagtgtctggccatttggtatgatttctgtgtgtgaaaggtcccaaaatcaaaatggtacatccataatcagccaccatttaacccttccttgttctaaaacaaaaaccaaagggcgctggttggtagggtgaggtgggggagtattttaatttttggaatttgggaagcagacagctttactttgtaaggttggaacagcagcactatacatgaaatataaaccaaaaacctttactgtttctaaatttcctagattgctattatttggttgtaagttgagtattccacagaaagtggtaattatctcttctctcttcctccattagaaaattaggtaaataatggattcctataatgggagcatcaccacttattaaaacacacatagaatgatgaattaaaaaagttttctaggattgtcttttattctgccacatttattgataaacagtgaaggaatttttaaaaaatttttaagaattgtttgtcacgtcatttttagaaatgttctacctgtatatggtaatgtccagttttaaaaatattggacatcttcaatcttaaacatttctatttagctgattggttctcacatatacttctaaaagaaacttttatgttataagagttactttttggataagatttattaatctcagttacctactattctgacattttaggaaggaggtaattgtttttaatgatggataaacttgtgctggtgttttggatcttatgatgctgagcatgttctgcactggtgctaatgtctaatataattttatatttacacacatacgtgctacccagagattaatttagtccatatgaactattgacccattgttcattgagacagcaacatacgcactcctaaatcagtgtgtttagacttttcaagtatctaactcatttccaaacatgtaccatgttttataaacctcttgatttccagcaacatactatagaaaacacctgctactcaaaacacaacttctcagtgtcatccattgctgtcgtgagagacaacatagcaatatctggtatgttgcaagctttcaagatagcctgaacttaaaaagttggtgcattagttgtatctgatggatataaatttgcctcctagttcactttgtgtcaagagctaaaactgtgaacctaactttctcttattggtgggtaataactgaaaataaagatttattttcatgctcacttcttaaaagtcataaaaacaatcaaataggatc

SEQ ID NO: 1025 - protein, 465 aa, Homosapiens; identical to SEQ ID NO: 1013

SEQ ID NO: 1026 - DNA, 1760 bp, Homosapiens
tgtgtagtgtttcacttgaatttgtagctctccaatttgtgtagaaaaacgtagtggttgtgtattaacagaaaatgcttctgagaagtttatatctagtaaggtctttaccctagttgtagttggaagagtgtagaacagagtttttctttctgagtgttctttttaacttcagtgttagtgctagtagtaaccttatatgtcatctctccagaggtcttcatcaaggattcacatggcagtcctgatctgaagggcatatttaaaatgtacttgtccagatttcactgctaaagattatgattcagtaggtctaggatgggcttcagccgtttgggttgattgtgatagcatacatgtctttagttgaggactgctggtattacctgcaattttgagatagagaaaagtgcaggaaaatcttcctccaggatcactaaagctgagccctagcttgttacctgtggaggcattgagacatttgttcacagaaagtacagtttggatttttggttttttttagaagaaagctcattatttagaaattttgcaatgttacttttctactaataacacaatcatcttcacttatatttttaggctcatgctgaagattcggttatggaccatcatttccggaagccagcaaatgatataacgtctcagctggagatcaattttggagaccttggccgcccaggacgtggcggcaggggaggacgaggtggacgtgggcgtggtgggcgcccaaaccgtggcagcaggaccgacaagtcaagtgcttctgctcctgatgtggatgacccagaggcattcccagctctggcttaactggatgccataagacaaccctggttcctttgtgaacccttctgttcaaagcttttgcatgcttaaggattccaaacgactaagaaattaaaaaaaaaaagactgtcattcataccattcacacctaaagactgaattttatctgttttaaaaatgaacttctcccgctacacagaagtaacaaatatggtagtcagttttgtatttagaaatgtattggtagcagggatgttttcataattttcagagattatgcattcttcatgaatacttttgtattgctgcttgcaaatatgcatttccaaacttgaaatataggtgtgaacagtgtgtaccagtttaaagctttcacttcatttgtgttttttaattaaggatttagaagttcccccaattacaaactggttttaaatattggacatactggttttaatacctgctttgcatattcacacatggtcaactgggacatgttaaactttgatttgtcaaattttatgctgtgtggaatactaactatatgtattttaacttagttttaatattttcatttttggggaaaaatcttttttcacttctcatgatagctgttatatatatatgctaaatctttatatacagaaatatcagtacttgaacaaattcaaagcacatttggtttattaacccttgctccttgcatggctcattaggttcaaattataactgatttacattttcagctatatttactttttaaatgcttgagtttcccattttaaaatctaaactagacatcttaattggtgaaagttgtttaaactacttattgttggtaggcacatcgtgtcaagtgaagtagttttataggtatgggttttttctcccccttcaccagggtgggtggaataagttgatttggccaatgtgtaatatttaaactgttctgt

SEQ ID NO: 1027 - protein, 69 aa, Homosapiens; identical to SEQ ID NO: 1009

SEQ ID NO: 1028 - DNA, 2562 bp, Homosapiens
gttagccctgagcccgagggggcgtgagtgaaaccaaagagcactttcgcgagtcagttacgccgtcacggttttttggtttcaaggtagctgaagacctagagagtttaagggtggccagagcaggtggcaggactccgcccaccaccacgcttcccttccttcagcccgcacgcttcactcccctcatggggtctcgcctctcaggcgcgcgcgaagagttgtcgcgcggtgcgtcctgggaattgtagtcccgacgcggagagtcgcctcaggagaaatgactctggcctacataccccacagtgccttgcggcgcaggccgctcccggatgtgtgcctggcgccggaagagaagacggcccccctctctcggcccggccatcttgtgggaagagctgaagcaggcgctcttggctcggcgcggcccgctgcaatccgtggaggaacgcgccgccgagccaccatcatgcctgggcacttacaggaaggcttcggctgcgtggtcaccaaccgattcgaccagttatttgacgacgaatcggaccccttcgaggtgctgaaggcagcagagaacaagaaaaaagaagccggcgggggcggcgttgggggccctggggccaagagcgcagctcaggccgcggcccagaccaactccaacgcggcaggcaaacagctgcgcaaggagtcccagaaagaccgcaagaacccgctgccccccagcgttggcgtggttgacaagaaagaggagacgcagccgcccgtggcgcttaagaaagaaggaataagacgagttggaagaagacctgatcaacaacttcagggtgaagggaaaataattgatagaagaccagaaaggcgaccacctcgtgaacgaagattcgaaaagccacttgaagaaaagggtgaaggaggcgaattttcagttgatagaccgattattgaccgacctattcgaggtcgtggtggtcttggaagaggtcgagggggccgtggacgtggaatgggccgaggagatggatttgattctcgtggcaaacgtgaatttgataggcatagtggaagtgatagatctggcctgaagcacgaggacaaacgtggaggtagcggatctcacaactggggaactgtcaaagacgaattaactgacttggatcaatcaaatgtgactgaggaaacacctgaaggtgaagaacatcatccagtggcagacactgaaaataaggagaatgaagttgaagaggtaaaagaggagggtccaaaagagatgactttggatgagtggaaggctattcaaaataaggaccgggcaaaagtagaatttaatatccgaaaaccaaatgaaggtgctgatgggcagtggaagaagggatttgttcttcataaatcaaagagtgaagaggctcatgctgaagattcggttatggaccatcatttccggaagccagcaaatgatataacgtctcagctggagatcaattttggagaccttggccgcccaggacgtggcggcaggggaggacgaggtggacgtgggcgtggtgggcgcccaaaccgtggcagcaggaccgacaagtcaagtgcttctgctcctgatgtggatgacccagaggcattcccagctctggcttaactggatgccataagacaaccctggttcctttgtgaacccttctgttcaaagcttttgcatgcttaaggattccaaacgactaagaaattaaaaaaaaaaagactgtcattcataccattcacacctaaagactgaattttatctgttttaaaaatgaacttctcccgctacacagaagtaacaaatatggtagtcagttttgtatttagaaatgtattggtagcagggatgttttcataattttcagagattatgcattcttcatgaatacttttgtattgctgcttgcaaatatgcatttccaaacttgaaatataggtgtgaacagtgtgtaccagtttaaagctttcacttcatttgtgttttttaattaaggatttagaagttcccccaattacaaactggttttaaatattggacatactggttttaatacctgctttgcatattcacacatggtcaactgggacatgttaaactttgatttgtcaaattttatgctgtgtggaatactaactatatgtattttaacttagttttaatattttcatttttggggaaaaatcttttttcacttctcatgatagctgttatatatatatgctaaatctttatatacagaaatatcagtacttgaacaaattcaaagcacatttggtttattaacccttgctccttgcatggctcattaggttcaaattataactgatttacattttcagctatatttactttttaaatgcttgagtttcccattttaaaatctaaactagacatcttaattggtgaaagttgtttaaactacttattgttggtaggcacatcgtgtcaagtgaagtagttttataggtatgggttttttctcccccttcaccagggtgggtggaataagttgatttggccaatgtgtaatatttaaactgttctgt

SEQ ID NO: 1029 - protein, 450 aa, Homosapiens [sequence omitted]

SEQ ID NO: 1030 - DNA, 1476 bp, Homosapiens
tgtgtagtgtttcacttgaatttgtagctctccaatttgtgtagaaaaacgtagtggttgtgtattaacagaaaatgcttctgagaagtttatatctagtaaggtctttaccctagttgtagttggaagagtgtagaacagagtttttctttctgagtgttctttttaacttcagtgttagtgctagtagtaaccttatatgtcatctctccagaggtcttcatcaaggattcacatggcagtcctgatctgaagggcatatttaaaatgtacttgtccagatttcactgctaaagattatgattcagtaggtctaggatgggcttcagccgtttgggttgattgtgatagcatacatgtctttagttgaggactgctggtattacctgcaattttgagatagagaaaagtgcaggaaaatcttcctccaggatcactaaagctgagccctagcttgttacctgtggaggcattgagacatttgttcacagaaagtacagtttggatttttggttttttttagaagaaagctcattatttagaaattttgcaatgttacttttctactaataacacaatcatcttcacttatatttttaggctcatgctgaagattcggttatggaccatcatttccggaagccagcaaatgatataacgtctcagctggagatcaattttggagaccttggccgcccaggacgtggcggcaggggaggacgaggtggacgtgggcgtggtgggcgcccaaaccgtggcagcaggaccgacaagtcaagtgcttctgctcctgatgtggatgacccagaggcattcccagctctggcttaactggatgccataagacaaccctggttcctttgtgaacccttctgttcaaagcttttgcatgcttaaggattccaaacgactaagaaattaaaaaaaaaaagactgtcattcataccattcacacctaaagactgaattttatctgttttaaaaatgaacttctcccgctacacagaagtaacaaatatggtagtcagttttgtatttagaaatgtattggtagcagggatgttttcataattttcagagattatgcattcttcatgaatacttttgtattgctgcttgcaaatatgcatttccaaacttgaaatataggtgtgaacagtgtgtaccagtttaaagctttcacttcatttgtgttttttaattaaggatttagaagttcccccaattacaaactggttttaaatattggacatactggttttaatacctgctttgcatattcacacatggtcaactgggacatgttaaactttgatttgtcaaattttatgctgtgtggaatactaactatatgtattttaacttagttttaatattttcatttttggggaaaaatcttttttcacttctcatgatagctgttatatatatatgctaaatctttatatacagaaatatcagtacttgaacaaattc

SEQ ID NO: 1031 - protein, 69 aa, Homosapiens; identical to SEQ ID NO: 1009

SEQ ID NO: 1032 - DNA, 1172 bp, Homosapiens
tgtgtagtgtttcacttgaatttgtagctctccaatttgtgtagaaaaacgtagtggttgtgtattaacagaaaatgcttctgagaagtttatatctagtaaggtctttaccctagttgtagttggaagagtgtagaacagagtttttctttctgagtgttctttttaacttcagtgttagtgctagtagtaaccttatatgtcatctctccagaggtcttcatcaaggattcacatggcagtcctgatctgaagggcatatttaaaatgtacttgtccagatttcactgctaaagattatgattcagtaggtctaggatgggcttcagccgtttgggttgattgtgatagcatacatgtctttagttgaggactgctggtattacctgcaattttgagatagagaaaagtgcaggaaaatcttcctccaggatcactaaagctgagccctagcttgttacctgtggaggcattgagacatttgttcacagaaagtacagtttggatttttggttttttttagaagaaagctcattatttagaaattttgcaatgttacttttctactaataacacaatcatcttcacttatatttttaggctcatgctgaagattcggttatggaccatcatttccggaagccagcaaatgatataacgtctcagctggagatcaattttggagaccttggccgcccaggacgtggcggcaggggaggacgaggtggacgtgggcgtggtgggcgcccaaaccgtggcagcaggaccgacaagtcaagtgcttctgctcctgatgtggatgacccagaggcattcccagctctggcttaactggatgccataagacaaccctggttcctttgtgaacccttctgttcaaagcttttgcatgcttaaggattccaaacgactaagaaattaaaaaaaaaaagactgtcattcataccattcacacctaaagactgaattttatctgttttaaaaatgaacttctcccgctacacagaagtaacaaatatggtagtcagttttgtatttagaaatgtattggtagcagggatgttttcataattttcagagattatgcattcttcatgaatacttttgtattgctgcttgcaaatatgcatttccaaacttgaaatataggtgtgaacagtgtgtaccagttt

SEQ ID NO: 1033 - protein, 69 aa, Homosapiens; identical to SEQ ID NO: 1009

SEQ ID NO: 1034 - DNA, 2019 bp, Homosapiens
gttagccctgagcccgagggggcgtgagtgaaaccaaagagcactttcgcgagtcagttacgccgtcacggttttttggtttcaaggtagctgaagacctagagagtttaagggtggccagagcaggtggcaggactccgcccaccaccacgcttcccttccttcagcccgcacgcttcactcccctcatggggtctcgcctctcaggcgcgcgcgaagagttgtcgcgcggtgcgtcctgggaattgtagtcccgacgcggagagtcgcctcaggagaaatgactctggcctacataccccacagtgccttgcggcgcaggccgctcccggatgtgtgcctggcgccggaagagaagacggcccccctctctcggcccggccatcttgtgggaagagctgaagcaggcgctcttggctcggcgcggcccgctgcaatccgtggaggaacgcgccgccgagccaccatcatgcctgggcacttacaggaaggcttcggctgcgtggtcaccaaccgattcgaccagttatttgacgacgaatcggaccccttcgaggtgctgaaggcagcagagaacaagaaaaaagaagccggcgggggcggcgttgggggccctggggccaagagcgcagctcaggccgcggcccagaccaactccaacgcggcaggcaaacagctgcgcaaggagtcccagaaagaccgcaagaacccgctgccccccagcgttggcgtggttgacaagaaagaggagacgcagccgcccgtggcgcttaagaaagaaggaataagacgagttggaagaagacctgatcaacaacttcagggtgaagggaaaataattgatagaagaccagaaaggcgaccacctcgtgaacgaagattcgaaaagccacttgaagaaaagggtgaaggaggcgaattttcagttgatagaccgattattgaccgacctattcgaggtcgtggtggtcttggaagaggtcgagggggccgtggacgtggaatgggccgaggagatggatttgattctcgtggcaaacgtgaatttgataggcatagtggaagtgatagatctggcctgaagcacgaggacaaacgtggaggtagcggatctcacaactggggaactgtcaaagacgaattaacagagtcccccaaatacattcagaaacaaatatcttataattacagtgacttggatcaatcaaatgtgactgaggaaacacctgaaggtgaagaacatcatccagtggcagacactgaaaataaggagaatgaagttgaagaggtaaaagaggagggtccaaaagagatgactttggatgagtggaaggctattcaaaataaggaccgggcaaaagtagaatttaatatccgaaaaccaaatgaaggtgctgatgggcagtggaagaagggatttgttcttcataaatcaaagagtgaagaggctcatgctgaagattcggttatggaccatcatttccggaagccagcaaatgatataacgtctcagctggagatcaattttggagaccttggccgcccaggacgtggcggcaggggaggacgaggtggacgtgggcgtggtgggcgcccaaaccgtggcagcaggaccgacaagtcaagtgcttctgctcctgatgtggatgacccagaggcattcccagctctggcttaactggatgccataagacaaccctggttcctttgtgaacccttctgttcaaagcttttgcatgcttaaggattccaaacgactaagaaattaaaaaaaaaaagactgtcattcataccattcacacctaaagactgaattttatctgttttaaaaatgaacttctcccgctacacagaagtaacaaatatggtagtcagttttgtatttagaaatgtattggtagcagggatgttttcataattttcagagattatgcattcttcatgaatacttttgtattgctgcttgcaaatatgcatttccaaacttgaaatataggtgtgaacagtgtgtaccagttt

SEQ ID NO: 1035 - protein, 465 aa, Homosapiens; identical to SEQ ID NO: 1013

SEQ ID NO: 1036 - DNA, 965 bp, Homosapiens
ctagaggattaccttcttgtatgttattaagagttacatattgtgggaattatggaaattaaaaatgtggtttaggagaagataggctgaggattttacataagagggtagtttttaaacaaggtagtgtttttaagaaatgtgtattttagtattcgtaaagccagttctagattgtattactgataaatgatcatttaagagttcataagtatgaattccatattccttacttgtctctaattagcaaacactgaattcctggtctctaccaagttgcttagttacataggaaactagggtaccctcatccttgaataatctttctctaaaagattacaaggttaattttctcaattaaaatcataaatttaaaatacttttatgtaatatcagctctctaccaggtataaaacttgaaaaccttttcacagggagaatgaagttgaagaggtaaaagaggagggtccaaaagagatgactttggatgagtggaaggctattcaaaataaggaccgggcaaaagtagaatttaatatccgaaaaccaaatgaaggtgctgatgggcagtggaagaagggatttgttcttcataaatcaaagagtgaagaggctcatgctgaagattcggttatggaccatcatttccggaagccagcaaatgatataacgtctcagctggagatcaattttggagaccttggccgcccaggacgtggcggcaggggaggacgaggtggacgtgggcgtggtgggcgcccaaaccgtggcagcaggaccgacaagtcaagtgcttctgctcctgatgtggatgacccagaggcattcccagctctggcttaactggatgccataagacaaccctggttcctttgtgaacccttctgttcaaagcttttgcatgcttaaggattccaaacgactaagaaattaaaaaaaaaaagactgtcattcataccattcac

SEQ ID NO: 1037 - protein, 121 aa, Homosapiens [sequence omitted]

SEQ ID NO: 1038 - DNA, 1749 bp, Homosapiens
gttagccctgagcccgagggggcgtgagtgaaaccaaagagcactttcgcgagtcagttacgccgtcacggttttttggtttcaaggtagctgaagacctagagagtttaagggtggccagagcaggtggcaggactccgcccaccaccacgcttcccttccttcagcccgcacgcttcactcccctcatggggtctcgcctctcaggcgcgcgcgaagagttgtcgcgcggtgcgtcctgggaattgtagtcccgacgcggagagtcgcctcaggagaaatgactctggcctacataccccacagtgccttgcggcgcaggccgctcccggatgtgtgcctggcgccggaagagaagacggcccccctctctcggcccggccatcttgtgggaagagctgaagcaggcgctcttggctcggcgcggcccgctgcaatccgtggaggaacgcgccgccgagccaccatcatgcctgggcacttacaggaaggcttcggctgcgtggtcaccaaccgattcgaccagttatttgacgacgaatcggaccccttcgaggtgctgaaggcagcagagaacaagaaaaaagaagccggcgggggcggcgttgggggccctggggccaagagcgcagctcaggccgcggcccagaccaactccaacgcggcaggcaaacagctgcgcaaggagtcccagaaagaccgcaagaacccgctgccccccagcgttggcgtggttgacaagaaagaggagacgcagccgcccgtggcgcttaagaaagaaggaataagacgagttggaagaagacctgatcaacaacttcagggtgaagggaaaataattgatagaagaccagaaaggcgaccacctcgtgaacgaagattcgaaaagccacttgaagaaaagggtgaaggaggcgaattttcagttgatagaccgattattgaccgacctattcgaggtcgtggtggtcttggaagaggtcgagggggccgtggacgtggaatgggccgaggagatggatttgattctcgtggcaaacgtgaatttgataggcatagtggaagtgatagatctggcctgaagcacgaggacaaacgtggaggtagcggatctcacaactggggaactgtcaaagacgaattaactgacttggatcaatcaaatgtgactgaggaaacacctgaaggtgaagaacatcatccagtggcagacactgaaaataaggagaatgaagttgaagaggtaaaagaggagggtccaaaagagatgactttggatgagtggaaggctattcaaaataaggaccgggcaaaagtagaatttaatatccgaaaaccaaatgaaggtgctgatgggcagtggaagaagggatttgttcttcataaatcaaagagtgaagaggctcatgctgaagattcggttatggaccatcatttccggaagccagcaaatgatataacgtctcagctggagatcaattttggagaccttggccgcccaggacgtggcggcaggggaggacgaggtggacgtgggcgtggtgggcgcccaaaccgtggcagcaggaccgacaagtcaagtgcttctgctcctgatgtggatgacccagaggcattcccagctctggcttaactggatgccataagacaaccctggttcctttgtgaacccttctgttcaaagcttttgcatgcttaaggattccaaacgactaagaaattaaaaaaaaaaagactgtcattcatacc

SEQ ID NO: 1039 - protein, 450 aa, Homosapiens [sequence omitted]

SEQ ID NO: 1040 - DNA, 1794 bp, Homosapiens
gttagccctgagcccgagggggcgtgagtgaaaccaaagagcactttcgcgagtcagttacgccgtcacggttttttggtttcaaggtagctgaagacctagagagtttaagggtggccagagcaggtggcaggactccgcccaccaccacgcttcccttccttcagcccgcacgcttcactcccctcatggggtctcgcctctcaggcgcgcgcgaagagttgtcgcgcggtgcgtcctgggaattgtagtcccgacgcggagagtcgcctcaggagaaatgactctggcctacataccccacagtgccttgcggcgcaggccgctcccggatgtgtgcctggcgccggaagagaagacggcccccctctctcggcccggccatcttgtgggaagagctgaagcaggcgctcttggctcggcgcggcccgctgcaatccgtggaggaacgcgccgccgagccaccatcatgcctgggcacttacaggaaggcttcggctgcgtggtcaccaaccgattcgaccagttatttgacgacgaatcggaccccttcgaggtgctgaaggcagcagagaacaagaaaaaagaagccggcgggggcggcgttgggggccctggggccaagagcgcagctcaggccgcggcccagaccaactccaacgcggcaggcaaacagctgcgcaaggagtcccagaaagaccgcaagaacccgctgccccccagcgttggcgtggttgacaagaaagaggagacgcagccgcccgtggcgcttaagaaagaaggaataagacgagttggaagaagacctgatcaacaacttcagggtgaagggaaaataattgatagaagaccagaaaggcgaccacctcgtgaacgaagattcgaaaagccacttgaagaaaagggtgaaggaggcgaattttcagttgatagaccgattattgaccgacctattcgaggtcgtggtggtcttggaagaggtcgagggggccgtggacgtggaatgggccgaggagatggatttgattctcgtggcaaacgtgaatttgataggcatagtggaagtgatagatctggcctgaagcacgaggacaaacgtggaggtagcggatctcacaactggggaactgtcaaagacgaattaacagagtcccccaaatacattcagaaacaaatatcttataattacagtgacttggatcaatcaaatgtgactgaggaaacacctgaaggtgaagaacatcatccagtggcagacactgaaaataaggagaatgaagttgaagaggtaaaagaggagggtccaaaagagatgactttggatgagtggaaggctattcaaaataaggaccgggcaaaagtagaatttaatatccgaaaaccaaatgaaggtgctgatgggcagtggaagaagggatttgttcttcataaatcaaagagtgaagaggctcatgctgaagattcggttatggaccatcatttccggaagccagcaaatgatataacgtctcagctggagatcaattttggagaccttggccgcccaggacgtggcggcaggggaggacgaggtggacgtgggcgtggtgggcgcccaaaccgtggcagcaggaccgacaagtcaagtgcttctgctcctgatgtggatgacccagaggcattcccagctctggcttaactggatgccataagacaaccctggttcctttgtgaacccttctgttcaaagcttttgcatgcttaaggattccaaacgactaagaaattaaaaaaaaaaagactgtcattcatacc

SEQ ID NO: 1041 - protein, 465 aa, Homosapiens; identical to SEQ ID NO: 1013

SEQ ID NO: 1042 - DNA, 1722 bp, Homosapiens
gttagccctgagcccgagggggcgtgagtgaaaccaaagagcactttcgcgagtcagttacgccgtcacggttttttggtttcaaggtagctgaagacctagagagtttaagggtggccagagcaggtggcaggactccgcccaccaccacgcttcccttccttcagcccgcacgcttcactcccctcatggggtctcgcctctcaggcgcgcgcgaagagttgtcgcgcggtgcgtcctgggaattgtagtcccgacgcggagagtcgcctcaggagaaatgactctggcctacataccccacagtgccttgcggcgcaggccgctcccggatgtgtgcctggcgccggaagagaagacggcccccctctctcggcccggccatcttgtgggaagagctgaagcaggcgctcttggctcggcgcggcccgctgcaatccgtggaggaacgcgccgccgagccaccatcatgcctgggcacttacaggaaggcttcggctgcgtggtcaccaaccgattcgaccagttatttgacgacgaatcggaccccttcgaggtgctgaaggcagcagagaacaagaaaaaagaagccggcgggggcggcgttgggggccctggggccaagagcgcagctcaggccgcggcccagaccaactccaacgcggcaggcaaacagctgcgcaaggagtcccagaaagaccgcaagaacccgctgccccccagcgttggcgtggttgacaagaaagaggagacgcagccgcccgtggcgcttaagaaagaaggaataagacgagttggaagaagacctgatcaacaacttcagggtgaagggaaaataattgatagaagaccagaaaggcgaccacctcgtgaacgaagattcgaaaagccacttgaagaaaagggtgaaggaggcgaattttcagttgatagaccgattattgaccgacctattcgaggtcgtggtggtcttggaagaggtcgagggggccgtggacgtggaatgggccgaggagatggatttgattctcgtggcaaacgtgaatttgataggcatagtggaagtgatagatctggcctgaagcacgaggacaaacgtggaggtagcggatctcacaactggggaactgtcaaagacgaattaactgacttggatcaatcaaatgtgactgaggaaacacctgaaggtgaagaacatcatccagtggcagacactgaaaataaggagaatgaagttgaagaggtaaaagaggagggtccaaaagagatgactttggatgagtggaaggctattcaaaataaggaccgggcaaaagtagaatttaatatccgaaaaccaaatgaaggtgctgatgggcagtggaagaagggatttgttcttcataaatcaaagagtgaagaggctcatgctgaagattcggttatggaccatcatttccggaagccagcaaatgatataacgtctcagctggagatcaattttggagaccttggccgcccaggacgtggcggcaggggaggacgaggtggacgtgggcgtggtgggcgcccaaaccgtggcagcaggaccgacaagtcaagtgcttctgctcctgatgtggatgacccagaggcattcccagctctggcttaactggatgccataagacaaccctggttcctttgtgaacccttctgttcaaagcttttgcatgcttaaggattccaaacgactaagaaatt

SEQ ID NO: 1043 - protein, 450 aa, Homosapiens [sequence omitted]

SEQ ID NO: 1044 - DNA, 1767 bp, Homosapiens
gttagccctgagcccgagggggcgtgagtgaaaccaaagagcactttcgcgagtcagttacgccgtcacggttttttggtttcaaggtagctgaagacctagagagtttaagggtggccagagcaggtggcaggactccgcccaccaccacgcttcccttccttcagcccgcacgcttcactcccctcatggggtctcgcctctcaggcgcgcgcgaagagttgtcgcgcggtgcgtcctgggaattgtagtcccgacgcggagagtcgcctcaggagaaatgactctggcctacataccccacagtgccttgcggcgcaggccgctcccggatgtgtgcctggcgccggaagagaagacggcccccctctctcggcccggccatcttgtgggaagagctgaagcaggcgctcttggctcggcgcggcccgctgcaatccgtggaggaacgcgccgccgagccaccatcatgcctgggcacttacaggaaggcttcggctgcgtggtcaccaaccgattcgaccagttatttgacgacgaatcggaccccttcgaggtgctgaaggcagcagagaacaagaaaaaagaagccggcgggggcggcgttgggggccctggggccaagagcgcagctcaggccgcggcccagaccaactccaacgcggcaggcaaacagctgcgcaaggagtcccagaaagaccgcaagaacccgctgccccccagcgttggcgtggttgacaagaaagaggagacgcagccgcccgtggcgcttaagaaagaaggaataagacgagttggaagaagacctgatcaacaacttcagggtgaagggaaaataattgatagaagaccagaaaggcgaccacctcgtgaacgaagattcgaaaagccacttgaagaaaagggtgaaggaggcgaattttcagttgatagaccgattattgaccgacctattcgaggtcgtggtggtcttggaagaggtcgagggggccgtggacgtggaatgggccgaggagatggatttgattctcgtggcaaacgtgaatttgataggcatagtggaagtgatagatctggcctgaagcacgaggacaaacgtggaggtagcggatctcacaactggggaactgtcaaagacgaattaacagagtcccccaaatacattcagaaacaaatatcttataattacagtgacttggatcaatcaaatgtgactgaggaaacacctgaaggtgaagaacatcatccagtggcagacactgaaaataaggagaatgaagttgaagaggtaaaagaggagggtccaaaagagatgactttggatgagtggaaggctattcaaaataaggaccgggcaaaagtagaatttaatatccgaaaaccaaatgaaggtgctgatgggcagtggaagaagggatttgttcttcataaatcaaagagtgaagaggctcatgctgaagattcggttatggaccatcatttccggaagccagcaaatgatataacgtctcagctggagatcaattttggagaccttggccgcccaggacgtggcggcaggggaggacgaggtggacgtgggcgtggtgggcgcccaaaccgtggcagcaggaccgacaagtcaagtgcttctgctcctgatgtggatgacccagaggcattcccagctctggcttaactggatgccataagacaaccctggttcctttgtgaacccttctgttcaaagcttttgcatgcttaaggattccaaacgactaagaaatt

SEQ ID NO: 1045 - protein, 465 aa, Homosapiens; identical to SEQ ID NO: 1013

SEQ ID NO: 1046 - DNA, 684 bp, Homosapiens
ggcggggagcccggccgccagcgctcgggtccgcctctgactgcagcgcggcggggcgatgtgtgattaccatggcgaggagtctctgtccgggggcctggctaaggaaaccctattacctccaggctcgcttctcatatgtgcggatgaaatatcttttcttttcctggttagtggtttttgttggaagctggattatatatgtgcagtattctacctatacagaattatgcagaggaaaggactgtaagaaaataatatgtgacaagtacaagactggagttattgatgggcctgcatgtaacagcctttgtgttacagaaactctttactttggaaaatgtttatccaccaagcccaacaatcagatgtatttagggatttgggataatctaccaggtgttgtgaaatgtcaaatggaacaagcgcttcatcttgattttggaactgaattggaaccaagaaaagaaatagtgctatttgataagccaactagaggaactactgtacaaaaatttaaagaaatggtctatagtctctttaaggaccagcaccggtaattgtgccaaacttttgcgaagcactgctccagacagcaatcagtgatgccaaacgtcggtttgttcggaacacgctatgtcccacttcgaaaacctagcctcaaataacaactacgtacctctc

SEQ ID NO: 1047 - protein, 162 aa, Homosapiens; identical to SEQ ID NO: 54

SEQ ID NO: 1048 - DNA, 2590 bp, Homosapiens
gactgcagcgcggcggggcgatgtgtgattaccatggcgaggagtctctgtccgggggcctggctaaggaaaccctattacctccaggctcgcttctcatatgtgcggatgaaatatcttttcttttcctggttagtggtttttgttggaagctggattatatatgtgcagtattctacctatacagaattatgcagaggaaaggactgtaagaaaataatatgtgacaagtacaagactggagttattgatgggcctgcatgtaacagcctttgtgttacagaaactctttactttggaaaatgtttatccaccaagcccaacaatcaggcaaaattgggtgaccaaggaaacctctctgaactggttaatctcatcttgacggtggctgatggagacaaagatggccaggtttccttgggagaagcaaagtcggcatgggcacttcttcaactgaatgaatttcttctcatggtgatacttcaagataaagaacatacccccaaattaatgggattctgtggtgacctctatgtgatggaaagtgttgaatatacctctctttatggaataagccttccttgggtcattgaactttttattccatctgggttcagaagaagcatggatcagctgttcacaccatcatggccaagaaaggccaaaatagccataggacttctagaatttgtggaagatgttttccatggcccctacggaaatttcctcatgtgcgatactagtgccaaaaacctaggatataatgataagtatgatttgaaaatggtggatatgagaaaaattgtgccagagacaaacctgaaagaacttattaaggatcgtcactgtgagtctgatttggactgtgtctatggcacagattgtagaactagctgtgatcagagtacaatgaagtgtacttcagaagtgatacaaccaaacttggcaaaagcttgtcagttactcaaagactacctactgcgtggtgctccaagtgaaattcgtgaagaattagaaaagcagctttattcttgtattgctctcaaagtcacagcaaatcaaatggaaatggaacattctttgatactaaataacctaaaaacattattgtggaagaaaatttcctacactaatgactcttagttcatttggacataattaccattttaagaaacctgccacttttaaagaacaattttgagcattaaaaaaaaatggcttcaaattccggccagttacacaaaactccttccccccaggcctgagaagccatcagtatgtgatcactgaagtaatggcaggtgtaggatcaacaggtccccaagatgtcattcctgcccttttagaagccctgttacatctccgaagtacattcattgtgtaactattttgactgactttaaaaaccaatgctgtgaaaagcttcattccataaacatcaacagtgagtgatttgtagatttaccttagccaaaataccaatgctggaagcattgtgtttgcattgaagctgctgttcaacaagaaaatttataaatttactaatgtcttagcatggtaaagtttgcacattaacagaaattaagactgcaaagcaggttaaacttgcttctttataaaacagatgttgggttaatagcatggtttactgtattaaagacttatacacccatttttaacctcattcagacatcaagttatgtgtagcttcacaatggttcaagtggcttacttcaagaaatcttatacttgacagtacaccaattttattgactaaaaatggatgaactttcctaaagattcaaagggcccatcttagtatcacgcagctgactgagcccttcaaaactgacatcttaaggcccaatcaagatccacatatcctgattttgaactatgtgaaagtgggactgtaagtgcaagactaaaataaattatagcagactttttagtaataactttccattttcaaacagtatatcctgtgggccaaagggctatttcttaaagaggcatgtaaatgtatttatttatctaatgtttttttccccatgtaaacttgatatacaaggtttagtatttgctcctctttcatattattttcacacgtatactcagatttggcatgtacctttcaacatctccataaaattaaacaccttttggagaaaagaaccactattttctgctcaaaggtttcgcctacctaaagtggaacatgttaaaaatctatgtgaccatcactggacagctttctctcaaaactttccttcaacgccatggattagcaccagttttgtttactttaaggtacttttcccattcatcatctggttataataaatggatggaagaaatatttcccactgatggttggtctgttgcttgccaaatttttagggagagctgttcatcatacaacataagggataatgactcctgtcaggtaaaacagaagcccaagaaataacaactttttttcttaaaaagttagttacacttgttttcttggagaaaaaaacctgtcaactcctttgcttttccaaaatatttcagggtatttcctataaggttcataagaataagagct

SEQ ID NO: 1049 - protein, 369 aa, Homosapiens
MARSLCPGAWLRKPYYLQARFSYVRMKYLFFSWLVVFVGSWIIYVQYSTYTELCRGKDCKKIICDKYKTGVIDGPACNSLCVTETLYFGKCLSTKPNNQAKLGDQGNLSELVNLILTVADGDKDGQVSLGEAKSAWALLQLNEFLLMVILQDKEHTPKLMGFCGDLYVMESVEYTSLYGISLPWVIELFIPSGFRRSMDQLFTPSWPRKAKIAIGLLEFVEDVFHGPYGNFLMCDTSAKNLGYNDKYDLKMVDMRKIVPETNLKELIKDRHCESDLDCVYGTDCRTSCDQSTMKCTSEVIQPNLAKACQLLKDYLLRGAPSEIREELEKQLYSCIALKVTANQMEMEHSLILNNLKTLLWKKISYTNDS

SEQ ID NO: 1050 - DNA, 2793 bp, Homosapiens
ggccgccagcgctcgggtccgcctctgactgcagcgcggcggggcgatgtgtgattaccatggcgaggagtctctgtccgggggcctggctaaggaaaccctattacctccaggctcgcttctcatatgtgcggatgaaatatcttttcttttcctggttagtggtttttgttggaagctggattatatatgtgcagtattctacctatacagaattatgcagaggaaaggactgtaagaaaataatatgtgacaagtacaagactggagttattgatgggcctgcatgtaacagcctttgtgttacagaaactctttactttggaaaatgtttatccaccaagcccaacaatcagatgtatttagggatttgggataatctaccaggtgttgtgaaatgtcaaatggaacaagcgcttcatcttgattttggaactgaattggaaccaagaaaagaaatagtgctatttgataagccaactagaggaactactgtacaaaaatttaaagaaatggtctatagtctctttaaggcaaaattgggtgaccaaggaaacctctctgaactggttaatctcatcttgacggtggctgatggagacaaagatggccaggtttccttgggagaagcaaagtcggcatgggcacttcttcaactgaatgaatttcttctcatggtgatacttcaagataaagaacatacccccaaattaatgggattctgtggtgacctctatgtgatggaaagtgttgaatatacctctctttatggaataagccttccttgggtcattgaactttttattccatctgggttcagaagaagcatggatcagctgttcacaccatcatggccaagaaaggccaaaatagccataggacttctagaatttgtggaagatgttttccatggcccctacggaaatttcctcatgtgcgatactagtgccaaaaacctaggatataatgataagtatgatttgaaaatggtggatatgagaaaaattgtgccagagacaaacctgaaagaacttattaaggatcgtcactgtgagtctgatttggactgtgtctatggcacagattgtagaactagctgtgatcagagtacaatgaagtgtacttcagaagtgatacaaccaaacttggcaaaagcttgtcagttactcaaagactacctactgcgtggtgctccaagtgaaattcgtgaagaattagaaaagcagctttattcttgtattgctctcaaagtcacagcaaatcaaatggaaatggaacattctttgatactaaataacctaaaaacattattgtggaagaaaatttcctacactaatgactcttagttcatttggacataattaccattttaagaaacctgccacttttaaagaacaattttgagcattaaaaaaaaatggcttcaaattccggccagttacacaaaactccttccccccaggcctgagaagccatcagtatgtgatcactgaagtaatggcaggtgtaggatcaacaggtccccaagatgtcattcctgcccttttagaagccctgttacatctccgaagtacattcattgtgtaactattttgactgactttaaaaaccaatgctgtgaaaagcttcattccataaacatcaacagtgagtgatttgtagatttaccttagccaaaataccaatgctggaagcattgtgtttgcattgaagctgctgttcaacaagaaaatttataaatttactaatgtcttagcatggtaaagtttgcacattaacagaaattaagactgcaaagcaggttaaacttgcttctttataaaacagatgttgggttaatagcatggtttactgtattaaagacttatacacccatttttaacctcattcagacatcaagttatgtgtagcttcacaatggttcaagtggcttacttcaagaaatcttatacttgacagtacaccaattttattgactaaaaatggatgaactttcctaaagattcaaagggcccatcttagtatcacgcagctgactgagcccttcaaaactgacatcttaaggcccaatcaagatccacatatcctgattttgaactatgtgaaagtgggactgtaagtgcaagactaaaataaattatagcagactttttagtaataactttccattttcaaacagtatatcctgtgggccaaagggctatttcttaaagaggcatgtaaatgtatttatttatctaatgtttttttccccatgtaaacttgatatacaaggtttagtatttgctcctctttcatattattttcacacgtatactcagatttggcatgtacctttcaacatctccataaaattaaacaccttttggagaaaagaaccactattttctgctcaaaggtttcgcctacctaaagtggaacatgttaaaaatctatgtgaccatcactggacagctttctctcaaaactttccttcaacgccatggattagcaccagttttgtttactttaaggtacttttcccattcatcatctggttataataaatggatggaagaaatatttcccactgatggttggtctgttgcttgccaaatttttagggagagctgttcatcatacaacataagggataatgactcctgtcaggtaaaacagaagcccaagaaataacaactttttttcttaaaaagttagttacacttgttttcttggagaaaaaaacctgtcaactcctttgcttttccaaaatatttcagggtatttcctataaggttcataagaataagagct

SEQ ID NO: 1051 - protein, 428 aa, Homosapiens
MARSLCPGAWLRKPYYLQARFSYVRMKYLFFSWLVVFVGSWIIYVQYSTYTELCRGKDCKKIICDKYKTGVIDGPACNSLCVTETLYFGKCLSTKPNNQMYLGIWDNLPGVVKCQMEQALHLDFGTELEPRKEIVLFDKPTRGTTVQKFKEMVYSLFKAKLGDQGNLSELVNLILTVADGDKDGQVSLGEAKSAWALLQLNEFLLMVILQDKEHTPKLMGFCGDLYVMESVEYTSLYGISLPWVIELFIPSGFRRSMDQLFTPSWPRKAKIAIGLLEFVEDVFHGPYGNFLMCDTSAKNLGYNDKYDLKMVDMRKIVPETNLKELIKDRHCESDLDCVYGTDCRTSCDQSTMKCTSEVIQPNLAKACQLLKDYLLRGAPSEIREELEKQLYSCIALKVTANQMEMEHSLILNNLKTLLWKKISYTNDS

SEQ ID NO: 1052 - DNA, 2365 bp, Homosapiens
gactgcagcgcggcggggcgatgtgtgattaccatggcgaggagtctctgtccgggggcctggctaaggaaaccctattacctccaggctcgcttctcatatgtgcggatgaaatatcttttcttttcctggttagtggtttttgttggaagctggattatatatgtgcagtattctacctatacagaattatgcagaggaaaggactgtaagaaaataatatgtgacaagtacaagactggagttattgatgggcctgcatgtaacagcctttgtgttacagaaactctttactttggaaaatgtttatccaccaagcccaacaatcaggcaaaattgggtgaccaaggaaacctctctgaactggttaatctcatcttgacggtggctgatggagacaaagatggccaggtttccttgggagaagcaaagtcggcatgggcacttcttcaactgaatgaatttcttctcatggtgatacttcaagataaagaacatacccccaaattaatgggattctgtggtgacctctatgtgatggaaagtgttgaatatacctctctttatggaataagccttccttgggtcattgaactttttattccatctgggttcagaagaagcatggatcagctgttcacaccatcatggccaagaaaggccaaaatagccataggacttctagaatttgtggaagatgttttccatggcccctacggaaatttcctcatgtgcgatactagtgccaaaaacctaggatataatgataagtatgatttgaaaatggtggatatgagaaaaattgtgccagagacaaacctgaaagaacttattaaggatcgtcactgtgagtctgatttggactgtgtctatggcacagattgtagaactagctgtgatcagagtacaatgaagtgtacttcagaagtgatacaaccaaacttggcaaaagcttgtcagttactcaaagactacctactgcgtggtgctccaagtgaaattcgtgaagaattagaaaagcagctttattcttgtattgctctcaaagtcacagcaaatcaaatggaaatggaacattctttgatactaaataacctaaaaacattattgtggaagaaaatttcctacactaatgactcttagttcatttggacataattaccattttaagaaacctgccacttttaaagaacaattttgagcattaaaaaaaaatggcttcaaattccggccagttacacaaaactccttccccccaggcctgagaagccatcagtatgtgatcactgaagtaatggcaggtgtaggatcaacaggtccccaagatgtcattcctgcccttttagaagccctgttacatctccgaagtacattcattgtgtaactattttgactgactttaaaaaccaatgctgtgaaaagcttcattccataaacatcaacagtgagtgatttgtagatttaccttagccaaaataccaatgctggaagcattgtgtttgcattgaagctgctgttcaacaagaaaatttataaatttactaatgtcttagcatggtaaagtttgcacattaacagaaattaagactgcaaagcaggttaaacttgcttctttataaaacagatgttgggttaatagcatggtttactgtattaaagacttatacacccatttttaacctcattcagacatcaagttatgtgtagcttcacaatggttcaagtggcttacttcaagaaatcttatacttgacagtacaccaattttattgactaaaaatggatgaactttcctaaagattcaaagggcccatcttagtatcacgcagctgactgagcccttcaaaactgacatcttaaggcccaatcaagatccacatatcctgattttgaactatgtgaaagtgggactgtaagtgcaagactaaaataaattatagcagactttttagtaataactttccattttcaaacagtatatcctgtgggccaaagggctatttcttaaagaggcatgtaaatgtatttatttatctaatgtttttttccccatgtaaacttgatatacaaggtttagtatttgctcctctttcatattattttcacacgtatactcagatttggcatgtacctttcaacatctccataaaattaaacaccttttggagaaaagaaccactattttctgctcaaaggtttcgcctacctaaagtggaacatgttaaaaatctatgtgaccatcactggacagctttctctcaaaactttccttcaacgccatggattagcaccagttttgtttactttaaggtacttttcccattcatcatctggttataataaatggatggaagaaatatttccc

SEQ ID NO: 1053 - protein, 369 aa, Homosapiens; identical to SEQ ID NO: 1049

SEQ ID NO: 1054 - DNA, 2568 bp, Homosapiens
ggccgccagcgctcgggtccgcctctgactgcagcgcggcggggcgatgtgtgattaccatggcgaggagtctctgtccgggggcctggctaaggaaaccctattacctccaggctcgcttctcatatgtgcggatgaaatatcttttcttttcctggttagtggtttttgttggaagctggattatatatgtgcagtattctacctatacagaattatgcagaggaaaggactgtaagaaaataatatgtgacaagtacaagactggagttattgatgggcctgcatgtaacagcctttgtgttacagaaactctttactttggaaaatgtttatccaccaagcccaacaatcagatgtatttagggatttgggataatctaccaggtgttgtgaaatgtcaaatggaacaagcgcttcatcttgattttggaactgaattggaaccaagaaaagaaatagtgctatttgataagccaactagaggaactactgtacaaaaatttaaagaaatggtctatagtctctttaaggcaaaattgggtgaccaaggaaacctctctgaactggttaatctcatcttgacggtggctgatggagacaaagatggccaggtttccttgggagaagcaaagtcggcatgggcacttcttcaactgaatgaatttcttctcatggtgatacttcaagataaagaacatacccccaaattaatgggattctgtggtgacctctatgtgatggaaagtgttgaatatacctctctttatggaataagccttccttgggtcattgaactttttattccatctgggttcagaagaagcatggatcagctgttcacaccatcatggccaagaaaggccaaaatagccataggacttctagaatttgtggaagatgttttccatggcccctacggaaatttcctcatgtgcgatactagtgccaaaaacctaggatataatgataagtatgatttgaaaatggtggatatgagaaaaattgtgccagagacaaacctgaaagaacttattaaggatcgtcactgtgagtctgatttggactgtgtctatggcacagattgtagaactagctgtgatcagagtacaatgaagtgtacttcagaagtgatacaaccaaacttggcaaaagcttgtcagttactcaaagactacctactgcgtggtgctccaagtgaaattcgtgaagaattagaaaagcagctttattcttgtattgctctcaaagtcacagcaaatcaaatggaaatggaacattctttgatactaaataacctaaaaacattattgtggaagaaaatttcctacactaatgactcttagttcatttggacataattaccattttaagaaacctgccacttttaaagaacaattttgagcattaaaaaaaaatggcttcaaattccggccagttacacaaaactccttccccccaggcctgagaagccatcagtatgtgatcactgaagtaatggcaggtgtaggatcaacaggtccccaagatgtcattcctgcccttttagaagccctgttacatctccgaagtacattcattgtgtaactattttgactgactttaaaaaccaatgctgtgaaaagcttcattccataaacatcaacagtgagtgatttgtagatttaccttagccaaaataccaatgctggaagcattgtgtttgcattgaagctgctgttcaacaagaaaatttataaatttactaatgtcttagcatggtaaagtttgcacattaacagaaattaagactgcaaagcaggttaaacttgcttctttataaaacagatgttgggttaatagcatggtttactgtattaaagacttatacacccatttttaacctcattcagacatcaagttatgtgtagcttcacaatggttcaagtggcttacttcaagaaatcttatacttgacagtacaccaattttattgactaaaaatggatgaactttcctaaagattcaaagggcccatcttagtatcacgcagctgactgagcccttcaaaactgacatcttaaggcccaatcaagatccacatatcctgattttgaactatgtgaaagtgggactgtaagtgcaagactaaaataaattatagcagactttttagtaataactttccattttcaaacagtatatcctgtgggccaaagggctatttcttaaagaggcatgtaaatgtatttatttatctaatgtttttttccccatgtaaacttgatatacaaggtttagtatttgctcctctttcatattattttcacacgtatactcagatttggcatgtacctttcaacatctccataaaattaaacaccttttggagaaaagaaccactattttctgctcaaaggtttcgcctacctaaagtggaacatgttaaaaatctatgtgaccatcactggacagctttctctcaaaactttccttcaacgccatggattagcaccagttttgtttactttaaggtacttttcccattcatcatctggttataataaatggatggaagaaatatttccc

SEQ ID NO: 1055 - protein, 428 aa, Homosapiens; identical to SEQ ID NO: 1051

SEQ ID NO: 1056 - DNA, 2168 bp, Homosapiens
gactgcagcgcggcggggcgatgtgtgattaccatggcgaggagtctctgtccgggggcctggctaaggaaaccctattacctccaggctcgcttctcatatgtgcggatgaaatatcttttcttttcctggttagtggtttttgttggaagctggattatatatgtgcagtattctacctatacagaattatgcagaggaaaggactgtaagaaaataatatgtgacaagtacaagactggagttattgatgggcctgcatgtaacagcctttgtgttacagaaactctttactttggaaaatgtttatccaccaagcccaacaatcaggcaaaattgggtgaccaaggaaacctctctgaactggttaatctcatcttgacggtggctgatggagacaaagatggccaggtttccttgggagaagcaaagtcggcatgggcacttcttcaactgaatgaatttcttctcatggtgatacttcaagataaagaacatacccccaaattaatgggattctgtggtgacctctatgtgatggaaagtgttgaatatacctctctttatggaataagccttccttgggtcattgaactttttattccatctgggttcagaagaagcatggatcagctgttcacaccatcatggccaagaaaggccaaaatagccataggacttctagaatttgtggaagatgttttccatggcccctacggaaatttcctcatgtgcgatactagtgccaaaaacctaggatataatgataagtatgatttgaaaatggtggatatgagaaaaattgtgccagagacaaacctgaaagaacttattaaggatcgtcactgtgagtctgatttggactgtgtctatggcacagattgtagaactagctgtgatcagagtacaatgaagtgtacttcagaagtgatacaaccaaacttggcaaaagcttgtcagttactcaaagactacctactgcgtggtgctccaagtgaaattcgtgaagaattagaaaagcagctttattcttgtattgctctcaaagtcacagcaaatcaaatggaaatggaacattctttgatactaaataacctaaaaacattattgtggaagaaaatttcctacactaatgactcttagttcatttggacataattaccattttaagaaacctgccacttttaaagaacaattttgagcattaaaaaaaaatggcttcaaattccggccagttacacaaaactccttccccccaggcctgagaagccatcagtatgtgatcactgaagtaatggcaggtgtaggatcaacaggtccccaagatgtcattcctgcccttttagaagccctgttacatctccgaagtacattcattgtgtaactattttgactgactttaaaaaccaatgctgtgaaaagcttcattccataaacatcaacagtgagtgatttgtagatttaccttagccaaaataccaatgctggaagcattgtgtttgcattgaagctgctgttcaacaagaaaatttataaatttactaatgtcttagcatggtaaagtttgcacattaacagaaattaagactgcaaagcaggttaaacttgcttctttataaaacagatgttgggttaatagcatggtttactgtattaaagacttatacacccatttttaacctcattcagacatcaagttatgtgtagcttcacaatggttcaagtggcttacttcaagaaatcttatacttgacagtacaccaattttattgactaaaaatggatgaactttcctaaagattcaaagggcccatcttagtatcacgcagctgactgagcccttcaaaactgacatcttaaggcccaatcaagatccacatatcctgattttgaactatgtgaaagtgggactgtaagtgcaagactaaaataaattatagcagactttttagtaataactttccattttcaaacagtatatcctgtgggccaaagggctatttcttaaagaggcatgtaaatgtatttatttatctaatgtttttttccccatgtaaacttgatatacaaggtttagtatttgctcctctttcatattattttcacacgtatactcagatttggcatgtacctttcaacatctccataaaattaaacaccttttggag

SEQ ID NO: 1057 - protein, 369 aa, Homosapiens; identical to SEQ ID NO: 1049

SEQ ID NO: 1058 - DNA, 2371 bp, Homosapiens
ggccgccagcgctcgggtccgcctctgactgcagcgcggcggggcgatgtgtgattaccatggcgaggagtctctgtccgggggcctggctaaggaaaccctattacctccaggctcgcttctcatatgtgcggatgaaatatcttttcttttcctggttagtggtttttgttggaagctggattatatatgtgcagtattctacctatacagaattatgcagaggaaaggactgtaagaaaataatatgtgacaagtacaagactggagttattgatgggcctgcatgtaacagcctttgtgttacagaaactctttactttggaaaatgtttatccaccaagcccaacaatcagatgtatttagggatttgggataatctaccaggtgttgtgaaatgtcaaatggaacaagcgcttcatcttgattttggaactgaattggaaccaagaaaagaaatagtgctatttgataagccaactagaggaactactgtacaaaaatttaaagaaatggtctatagtctctttaaggcaaaattgggtgaccaaggaaacctctctgaactggttaatctcatcttgacggtggctgatggagacaaagatggccaggtttccttgggagaagcaaagtcggcatgggcacttcttcaactgaatgaatttcttctcatggtgatacttcaagataaagaacatacccccaaattaatgggattctgtggtgacctctatgtgatggaaagtgttgaatatacctctctttatggaataagccttccttgggtcattgaactttttattccatctgggttcagaagaagcatggatcagctgttcacaccatcatggccaagaaaggccaaaatagccataggacttctagaatttgtggaagatgttttccatggcccctacggaaatttcctcatgtgcgatactagtgccaaaaacctaggatataatgataagtatgatttgaaaatggtggatatgagaaaaattgtgccagagacaaacctgaaagaacttattaaggatcgtcactgtgagtctgatttggactgtgtctatggcacagattgtagaactagctgtgatcagagtacaatgaagtgtacttcagaagtgatacaaccaaacttggcaaaagcttgtcagttactcaaagactacctactgcgtggtgctccaagtgaaattcgtgaagaattagaaaagcagctttattcttgtattgctctcaaagtcacagcaaatcaaatggaaatggaacattctttgatactaaataacctaaaaacattattgtggaagaaaatttcctacactaatgactcttagttcatttggacataattaccattttaagaaacctgccacttttaaagaacaattttgagcattaaaaaaaaatggcttcaaattccggccagttacacaaaactccttccccccaggcctgagaagccatcagtatgtgatcactgaagtaatggcaggtgtaggatcaacaggtccccaagatgtcattcctgcccttttagaagccctgttacatctccgaagtacattcattgtgtaactattttgactgactttaaaaaccaatgctgtgaaaagcttcattccataaacatcaacagtgagtgatttgtagatttaccttagccaaaataccaatgctggaagcattgtgtttgcattgaagctgctgttcaacaagaaaatttataaatttactaatgtcttagcatggtaaagtttgcacattaacagaaattaagactgcaaagcaggttaaacttgcttctttataaaacagatgttgggttaatagcatggtttactgtattaaagacttatacacccatttttaacctcattcagacatcaagttatgtgtagcttcacaatggttcaagtggcttacttcaagaaatcttatacttgacagtacaccaattttattgactaaaaatggatgaactttcctaaagattcaaagggcccatcttagtatcacgcagctgactgagcccttcaaaactgacatcttaaggcccaatcaagatccacatatcctgattttgaactatgtgaaagtgggactgtaagtgcaagactaaaataaattatagcagactttttagtaataactttccattttcaaacagtatatcctgtgggccaaagggctatttcttaaagaggcatgtaaatgtatttatttatctaatgtttttttccccatgtaaacttgatatacaaggtttagtatttgctcctctttcatattattttcacacgtatactcagatttggcatgtacctttcaacatctccataaaattaaacaccttttggag

SEQ ID NO: 1059 - protein, 428 aa, Homosapiens; identical to SEQ ID NO: 1051

SEQ ID NO: 1060 - DNA, 475 bp, Homosapiens
ggcaacaagagcaaaaactccatctcaaaaaaaaaaaaaaaaaagtagatgcattcccattcaggaacgtggcattaagaaataggattcaacaagggaattacactgcaaataaagaggttgctgtgactgcaatgcatctggagctcaagaaaggagacggctggtatcagatggaaaactacacacctaatcaagctttggtaccccaatccagtttgactgactactgctcttcactgtctctctcatgccagggacaagggcttggcacaaataataattataactgaagcagagtatatttaattacgcaatcttagataataaaatttaattccacataatttatacattaaattggagcatttgaaggatttctggcaaaggaaaattggaatggataagtaggattcatttatacatatcattttatcatcaattaataatgaatgtacttaatgtggtaggattt

SEQ ID NO: 1061 - protein, 52 aa, Homosapiens
MHLELKKGDGWYQMENYTPNQALVPQSSLTDYCSSLSLSCQGQGLGTNNNYN

SEQ ID NO: 1062 - DNA, 2022 bp, Homosapiens
gccattcggcaccggagtcgctccgcgctcccagaatgcaccggcagtccgcgggaaaccaaaatggcgaggggctgtattgaagtgggctgtgtttgaggccggtgtaagaacgctcattctacccccaacccttgtctccaaggacctcggtttgtgcgtgcatatgtgccgggtacccggtggggcgggtgcccagtaagtgctcggactcgcaggggaagcgcccacggggacggattggttgttttttcctgtatgaagcggttggcaccactgaagtgaccgaatgagagactctacaggggcaggtaattcactggtccacaagcggtctcctttacgtcgaaaccaaaagaccccaacatccttgaccaagctgtctttacaggatggacataaagccaaaaagccagcatgtaaatttgaagagggtcaggatgtcctagctagatggtcagatggcttgttttatcttggcactatcaaaaagataaacatattgaaacagagctgcttcatcatatttgaagacagttctaaatcctgggttctctggaaggacattcaaacaggcaggagccactggaagtggggaaatggtctgtacaatatgtcaagaagagtattcagaagctcccaatgaaatggttatatgtgacaagtgtggccaaggatatcatcagttgtgtcacacacctcatattgattgcagtgtgattgattcagatgaaaaatggctctgtcggcagtgtgtttttgcaacaacaacaaagaggggtggtgcacttaagaaaggaccaaatgccaaagcattgcaagtcatgaagcagacattaccctatagtgtggcagaccttgaatgggatgcaggtcataaaaccaatgtccagcagtgttactgctattgtggaggccctggagactggtatttgaagatgctacagtgctgcaaatgtaagcagtggtttcatgaggcttgtgtgcaatgccttcaaaagccaatgctatttggagacagattttatacgtttatatgctctgtctgcagttctggaccagaatacctcaaacgtctaccattacagtgggtagatatagcacacctatgcctttacaacctaagtgttattcataagaagaaatactttgattctgaacttgagcttatgacatacattaatgaaaactgggatagattgcaccctggagagctggcagacacaccaaaatctgaaagatatgagcatgttctggaggcattaaatgattacaagaccatggaagtaagcaatggcatagaaaaaaaaggaaagaaaaaatctgtaggtcgtccacctggcccatatacaagaaaaatgattcaaaaaactgctgagccacttttggataaggaatcaatttcagagaatcctactttggatttaccttgttctatagggagaactgagggaactgcacattcatccaatacctcagatgtggatttcacgggtgcttccagtgcaaaagaaactacctcgtctagcatttccaggcattatggattatctgactccagaaaaagaacgcgtacaggaagatcttggcctgctgcaataccacatttgcggagaagaagaggtcgtcttccaagaagagcactccagactcagaactcagaaattgtaaaagatgatgaaggcaaagaagattatcagtttgatgaactcaacacagagattctgaataacttagcagatcaggagttacaactcaatcatctaaagaactccattaccagttattttggtgctgcaggtagaatagcatgtggcgaaaaataccgagttttggcacgtcgggtgacacttgatggaaaggtgcagtatcttgtggaatgggaaggagcaactgcatcctgactgtaggactgaacattatgttcactgcactctgattttctgtaggtacagttcaaagccctaaaggagtctggcttttactatctttcttaaaaaaaaaaaaaagtcaaaaaaattc

SEQ ID NO: 1063 - protein, 434 aa, Homosapiens
MVCTICQEEYSEAPNEMVICDKCGQGYHQLCHTPHIDCSVIDSDEKWLCRQCVFATTTKRGGALKKGPNAKALQVMKQTLPYSVADLEWDAGHKTNVQQCYCYCGGPGDWYLKMLQCCKCKQWFHEACVQCLQKPMLFGDRFYTFICSVCSSGPEYLKRLPLQWVDIAHLCLYNLSVIHKKKYFDSELELMTYINENWDRLHPGELADTPKSERYEHVLEALNDYKTMEVSNGIEKKGKKKSVGRPPGPYTRKMIQKTAEPLLDKESISENPTLDLPCSIGRTEGTAHSSNTSDVDFTGASSAKETTSSSISRHYGLSDSRKRTRTGRSWPAAIPHLRRRRGRLPRRALQTQNSEIVKDDEGKEDYQFDELNTEILNNLADQELQLNHLKNSITSYFGAAGRIACGEKYRVLARRVTLDGKVQYLVEWEGATAS

SEQ ID NO: 1064 - DNA, 2625 bp, Homosapiens
gccattcggcaccggagtcgctccgcgctcccagaatgcaccggcagtccgcgggaaaccaaaatggcgaggggctgtattgaagtgggctgtgtttgaggccggtgtaagaacgctcattctacccccaacccttgtctccaaggacctcggtttgtgcgtgcatatgtgccgggtacccggtggggcgggtgcccagtaagtgctcggactcgcaggggaagcgcccacggggacggattggttgttttttcctgtatgaagcggttggcaccactgaagtgaccgaatgagagactctacaggggcaggtaattcactggtccacaagcggtctcctttacgtcgaaaccaaaagaccccaacatccttgaccaagctgtctttacaggatggacataaagccaaaaagccagcatgtaaatttgaagagggtcaggatgtcctagctagatggtcagatggcttgttttatcttggcactatcaaaaagataaacatattgaaacagagctgcttcatcatatttgaagacagttctaaatcctgggttctctggaaggacattcaaacaggcaggagccactggaagtggggaaatggtctgtacaatatgtcaagaagagtattcagaagctcccaatgaaatggttatatgtgacaagtgtggccaaggatatcatcagttgtgtcacacacctcatattgattgcagtgtgattgattcagatgaaaaatggctctgtcggcagtgtgtttttgcaacaacaacaaagaggggtggtgcacttaagaaaggaccaaatgccaaagcattgcaagtcatgaagcagacattaccctatagtgtggcagaccttgaatgggatgcaggtcataaaaccaatgtccagcagtgttactgctattgtggaggccctggagactggtatttgaagatgctacagtgctgcaaatgtaagcagtggtttcatgaggcttgtgtgcaatgccttcaaaagccaatgctatttggagacagattttatacgtttatatgctctgtctgcagttctggaccagaatacctcaaacgtctaccattacagtgggtagatatagcacacctatgcctttacaacctaagtgttattcataagaagaaatactttgattctgaacttgagcttatgacatacattaatgaaaactgggatagattgcaccctggagagctggcagacacaccaaaatctgaaagatatgagcatgttctggaggcattaaatgattacaagaccatgtttatgtctgggaaagaaataaagaagaagaagcatttgtttgggttgcgaattcgtgttcctcctgtgccaccaaatgtggctttcaaagcagagaaagaacctgaaggaacatctcatgaatttaaaattaaaggcagaaaggcatccaaacctatatctgattcaagggaagtaagcaatggcatagaaaaaaaaggaaagaaaaaatctgtaggtcgtccacctggcccatatacaagaaaaatgattcaaaaaactgctgagccacttttggataaggaatcaatttcagagaatcctactttggatttaccttgttctatagggagaactgagggaactgcacattcatccaatacctcagatgtggatttcacgggtgcttccagtgcaaaagaaactacctcgtctagcatttccaggcattatggattatctgactccagaaaaagaacgcgtacaggaagatcttggcctgctgcaataccacatttgcggagaagaagaggtcgtcttccaagaagagcactccagactcagaactcagaaattgtaaaagatgatgaaggcaaagaagattatcagtttgatgaactcaacacagagattctgaataacttagcagatcaggagttacaactcaatcatctaaagaactccattaccagttattttggtgctgcaggtagaatagcatgtggcgaaaaataccgagttttggcacgtcgggtgacacttgatggaaaggtgcagtatcttgtggaatgggaaggagcaactgcatcctgactgtaggactgaacattatgttcactgcactctgattttctgtaggtacagttcaaagccctaaaggagtctggcttttactatctttcttaaaaaaaaaaaaaagtcaaaaaaattcaaaaaaggggatgatactagccttaacatgtacctgtcaatgttatggatattgtcataaaaaggtatcttttaaaaatcagaacagagacttaattttttaaatcttaagatttgtagaatgtttctaggataggatattaaaaatgattgaaacccatgcatggtgttagacaatttttctaattattccattgagtcagttttttgtgattagtgattatcagagcaaacatcatgtagatagcacaagtatttggagaaacgttgtttgttttgttaccaaaatgttggaaaaatttatttcaataccttttagatttcataaagtgcagtgtatataatgcctactgaaagactgtaaaatattgaaattttctttcaagcaaagtgtaaaaaaatatattgagcctgtaaattgctctgtgactag

SEQ ID NO: 1065 - protein, 491 aa, Homosapiens
MVCTICQEEYSEAPNEMVICDKCGQGYHQLCHTPHIDCSVIDSDEKWLCRQCVFATTTKRGGALKKGPNAKALQVMKQTLPYSVADLEWDAGHKTNVQQCYCYCGGPGDWYLKMLQCCKCKQWFHEACVQCLQKPMLFGDRFYTFICSVCSSGPEYLKRLPLQWVDIAHLCLYNLSVIHKKKYFDSELELMTYINENWDRLHPGELADTPKSERYEHVLEALNDYKTMFMSGKEIKKKKHLFGLRIRVPPVPPNVAFKAEKEPEGTSHEFKIKGRKASKPISDSREVSNGIEKKGKKKSVGRPPGPYTRKMIQKTAEPLLDKESISENPTLDLPCSIGRTEGTAHSSNTSDVDFTGASSAKETTSSSISRHYGLSDSRKRTRTGRSWPAAIPHLRRRRGRLPRRALQTQNSEIVKDDEGKEDYQFDELNTEILNNLADQELQLNHLKNSITSYFGAAGRIACGEKYRVLARRVTLDGKVQYLVEWEGATAS

SEQ ID NO: 1066 - DNA, 2501 bp, Homosapiens
gccattcggcaccggagtcgctccgcgctcccagaatgcaccggcagtccgcgggaaaccaaaatggcgaggggctgtattgaagtgggctgtgtttgaggccggtgtaagaacgctcattctacccccaacccttgtctccaaggacctcggtttgtgcgtgcatatgtgccgggtacccggtggggcgggtgcccagtaagtgctcggactcgcaggggaagcgcccacggggacggattggttgttttttcctgtatgaagcggttggcaccactgaagtgaccgaatgagagactctacaggggcaggtaattcactggtccacaagcggtctcctttacgtcgaaaccaaaagaccccaacatccttgaccaagctgtctttacaggatggacataaagccaaaaagccagcatgtaaatttgaagagggtcaggatgtcctagctagatggtcagatggcttgttttatcttggcactatcaaaaagataaacatattgaaacagagctgcttcatcatatttgaagacagttctaaatcctgggttctctggaaggacattcaaacaggcaggagccactggaagtggggaaatggtctgtacaatatgtcaagaagagtattcagaagctcccaatgaaatggttatatgtgacaagtgtggccaaggatatcatcagttgtgtcacacacctcatattgattgcagtgtgattgattcagatgaaaaatggctctgtcggcagtgtgtttttgcaacaacaacaaagaggggtggtgcacttaagaaaggaccaaatgccaaagcattgcaagtcatgaagcagacattaccctatagtgtggcagaccttgaatgggatgcaggtcataaaaccaatgtccagcagtgttactgctattgtggaggccctggagactggtatttgaagatgctacagtgctgcaaatgtaagcagtggtttcatgaggcttgtgtgcaatgccttcaaaagccaatgctatttggagacagattttatacgtttatatgctctgtctgcagttctggaccagaatacctcaaacgtctaccattacagtgctggcagacacaccaaaatctgaaagatatgagcatgttctggaggcattaaatgattacaagaccatgtttatgtctgggaaagaaataaagaagaagaagcatttgtttgggttgcgaattcgtgttcctcctgtgccaccaaatgtggctttcaaagcagagaaagaacctgaaggaacatctcatgaatttaaaattaaaggcagaaaggcatccaaacctatatctgattcaagggaagtaagcaatggcatagaaaaaaaaggaaagaaaaaatctgtaggtcgtccacctggcccatatacaagaaaaatgattcaaaaaactgctgagccacttttggataaggaatcaatttcagagaatcctactttggatttaccttgttctatagggagaactgagggaactgcacattcatccaatacctcagatgtggatttcacgggtgcttccagtgcaaaagaaactacctcgtctagcatttccaggcattatggattatctgactccagaaaaagaacgcgtacaggaagatcttggcctgctgcaataccacatttgcggagaagaagaggtcgtcttccaagaagagcactccagactcagaactcagaaattgtaaaagatgatgaaggcaaagaagattatcagtttgatgaactcaacacagagattctgaataacttagcagatcaggagttacaactcaatcatctaaagaactccattaccagttattttggtgctgcaggtagaatagcatgtggcgaaaaataccgagttttggcacgtcgggtgacacttgatggaaaggtgcagtatcttgtggaatgggaaggagcaactgcatcctgactgtaggactgaacattatgttcactgcactctgattttctgtaggtacagttcaaagccctaaaggagtctggcttttactatctttcttaaaaaaaaaaaaaagtcaaaaaaattcaaaaaaggggatgatactagccttaacatgtacctgtcaatgttatggatattgtcataaaaaggtatcttttaaaaatcagaacagagacttaattttttaaatcttaagatttgtagaatgtttctaggataggatattaaaaatgattgaaacccatgcatggtgttagacaatttttctaattattccattgagtcagttttttgtgattagtgattatcagagcaaacatcatgtagatagcacaagtatttggagaaacgttgtttgttttgttaccaaaatgttggaaaaatttatttcaataccttttagatttcataaagtgcagtgtatataatgcctactgaaagactgtaaaatattgaaattttctttcaagcaaagtgtaaaaaaatatattgagcctgtaaattgctctgtgactag

SEQ ID NO: 1067 - protein, 320 aa, Homosapiens
MPSKANAIWRQILYVYMLCLQFWTRIPQTSTITVLADTPKSERYEHVLEALNDYKTMFMSGKEIKKKKHLFGLRIRVPPVPPNVAFKAEKEPEGTSHEFKIKGRKASKPISDSREVSNGIEKKGKKKSVGRPPGPYTRKMIQKTAEPLLDKESISENPTLDLPCSIGRTEGTAHSSNTSDVDFTGASSAKETTSSSISRHYGLSDSRKRTRTGRSWPAAIPHLRRRRGRLPRRALQTQNSEIVKDDEGKEDYQFDELNTEILNNLADQELQLNHLKNSITSYFGAAGRIACGEKYRVLARRVTLDGKVQYLVEWEGATAS

SEQ ID NO: 1068 - DNA, 4006 bp, Homosapiens
gccattcggcaccggagtcgctccgcgctcccagaatgcaccggcagtccgcgggaaaccaaaatggcgaggggctgtattgaagtgggctgtgtttgaggccggtgtaagaacgctcattctacccccaacccttgtctccaaggacctcggtttgtgcgtgcatatgtgccgggtacccggtggggcgggtgcccagtaagtgctcggactcgcaggggaagcgcccacggggacggattggttgttttttcctgtatgaagcggttggcaccactgaagtgaccgaatgagagactctacaggggcaggtaattcactggtccacaagcggtctcctttacgtcgaaaccaaaagaccccaacatccttgaccaagctgtctttacaggatggacataaagccaaaaagccagcatgtaaatttgaagagggtcaggatgtcctagctagatggtcagatggcttgttttatcttggcactatcaaaaagataaacatattgaaacagagctgcttcatcatatttgaagacagttctaaatcctgggttctctggaaggacattcaaacaggcaggagccactggaagtggggaaatggtctgtacaatatgtcaagaagagtattcagaagctcccaatgaaatggttatatgtgacaagtgtggccaaggatatcatcagttgtgtcacacacctcatattgattgcagtgtgattgattcagatgaaaaatggctctgtcggcagtgtgtttttgcaacaacaacaaagaggggtggtgcacttaagaaaggaccaaatgccaaagcattgcaagtcatgaagcagacattaccctatagtgtggcagaccttgaatgggatgcaggtcataaaaccaatgtccagcagtgttactgctattgtggaggccctggagactggtatttgaagatgctacagtgctgcaaatgtaagcagtggtttcatgaggcttgtgtgcaatgccttcaaaagccaatgctatttggagacagattttatacgtttatatgctctgtctgcagttctggaccagaatacctcaaacgtctaccattacagtgctggcagacacaccaaaatctgaaagatatgagcatgttctggaggcattaaatgattacaagaccatgtttatgtctgggaaagaaataaagaagaagaagcatttgtttgggttgcgaattcgtgttcctcctgtgccaccaaatgtggctttcaaagcagagaaagaacctgaaggaacatctcatgaatttaaaattaaaggcagaaaggcatccaaacctatatctgattcaagggaagtaagcaatggcatagaaaaaaaaggaaagaaaaaatctgtaggtcgtccacctggcccatatacaagaaaaatgattcaaaaaactgctgagccacttttggataaggaatcaatttcagagaatcctactttggatttaccttgttctatagggagaactgagggaactgcacattcatccaatacctcagatgtggatttcacgggtgcttccagtgcaaaagaaactacctcgtctagcatttccaggcattatggattatctgactccagaaaaagaacgcgtacaggaagatcttggcctgctgcaataccacatttgcggagaagaagaggtcgtcttccaagaagagcactccagactcagaactcagaaattgtaaaagatgatgaaggcaaagaagattatcagtttgatgaactcaacacagagattctgaataacttagcagatcaggagttacaactcaatcatctaaagaactccattaccagttattttggtgctgcaggtagaatagcatgtggcgaaaaataccgagttttggcacgtcgggtgacacttgatggaaaggtgcagtatcttgtggaatgggaaggagcaactgcatcctgactgtaggactgaacattatgttcactgcactctgattttctgtaggtacagttcaaagccctaaaggagtctggcttttactatctttcttaaaaaaaaaaaaaagtcaaaaaaattcaaaaaaggggatgatactagccttaacatgtacctgtcaatgttatggatattgtcataaaaaggtatcttttaaaaatcagaacagagacttaattttttaaatcttaagatttgtagaatgtttctaggataggatattaaaaatgattgaaacccatgcatggtgttagacaatttttctaattattccattgagtcagttttttgtgattagtgattatcagagcaaacatcatgtagatagcacaagtatttggagaaacgttgtttgttttgttaccaaaatgttggaaaaatttatttcaataccttttagatttcataaagtgcagtgtatataatgcctactgaaagactgtaaaatattgaaattttctttcaagcaaagtgtaaaaaaatatattgagcctgtaaattgctctgtgactagacttcattgtcgtcttaatatattcttgcatgtgcatatatatacacacgtgtatatatatgtgtgtgattatgtgacctatgcaatacaaattatgggaatgggcagctttggagtatatatcccataattcttttttcaggaatagttgcagtatttacacagcagcatttcttctcaggcttttattgggtgctgttgcttgctatgtatgaagagaaatgtgtcagacaagtttagtgtgttctgaagaagggtgtgaacaacagtgttcatgggcttttagaatgcttttcacttttagtccttgtaactcagctgttcagtacctaaaacaaattcaaataatatgaacattatctcctactagaagtaacgttttcaagttttcatggcacattatgattgtaaatgtctctcatttttaacagtaagtctataggagtcccgtgaagattcctgaaatgtctgtagtaactgttagtcatgtttgaataagtgtagtatgaacaaagtattttattgcacagggttaacaaacagtatgttgccagctgaggctactgctgttttattacaacattacctcttgtttttataaagtgtaccaagatttaaattgataactttattttacttgtaaaaaaaaagtttcttttatcaccagtgttacagttgtcttctgtttctttttgttttgttttatttgttttcctttttagccaaagagtgaacagaagattttcttattttggtggctattcattttacttttaaaagtgattggtggattttagactaattatgggggaatttgccaccaaaataaaaaatatgtaaagtgtagtgattacagagtggttaaaatgtgggttagtacttatttattccattaattgattatttgactgtttataaagaaagttgctttatttctttaaacatcttcaaaagatgatcctttcttgtcacattatagccaaaagaagcagagaacttcattgtctgcatttggttcctggttggccaggtataaatgagctttacaaaagtgcaaattaaaaactgttacttctgtttacctccaccaaaacttgattttcccctagctattaatttaaggttgcctttcctgcagctgcaatattttgaataacacacagagtttgtgttgatttttgaatgtttgtttatatctaggggtaatgaaaaatgtaaatcccgtgtatccttattcactccacctgtatcatattatttcattttccccaaagtcctttaattctaactgaacaccagcagtatttttagaaatttttctttaacatacttggaagatgatttatccagctgaactgtctttagacgtaattattgtgaatgtctgttttattttctcatggtggttcacatggctctgatgttcagtttgtatttttggaattgctttacttagaaattaaaacagaccaacattaaatgtgtgtattttttaaagagctaat

SEQ ID NO: 1069 - protein, 320 aa, Homosapiens; identical to SEQ ID NO: 1067

SEQ ID NO: 1070 - DNA, 528 bp, Homosapiens
aaataaacagaaaaacaaatgaaaggatttaccaagggctggacaggtgggattgaaatagatatgcaaggtttatacagccttctgttgtaagccactgctccagcaaaagaatatgggatctagaaagcagagtgataaggggaacttccaagatgacaagagcaaggcttagaggatagtcattctagattggcacaggaacatggagagctttagaagcaggagttacatgtggaaaaaagatttgaaattatcattgacagtttgaaacaggaggcaacaaagggatatattaagcaattttgggaaaaattgaaagtgaataagaaaggatatttaataagggcataccacttatctttgcatgaccaatatttacacattgtacaataagtaaaacttactgatttaatgaaaatagttcaataagatttgtagaggatgagaggtaggaaataggagttggcataagatgtgaattatcaacttcaatagcaagaagtcagatttgaagttgatcagttt

SEQ ID NO: 1071 - protein, 58 aa, Homosapiens
KQELHVEKRFEIIIDSLKQEATKGYIKQFWEKLKVNKKGYLIRAYHLSLHDQYLHIVQ

SEQ ID NO: 1072 - DNA, 1691 bp, Homosapiens
ggggacaaataagtttggtatggatatcaggaccagccttctcatcctcctgtgtgtttgttgcctgttgactctggaaatttgtagaaggaggagctggcagacacaccaaaatctgaaagatatgagcatgttctggaggcattaaatgattacaagaccatgtttatgtctgggaaagaaataaagaagaagaagcatttgtttgggttgcgaattcgtgttcctcctgtgccaccaaatgtggctttcaaagcagagaaagaacctgaaggaacatctcatgaatttaaaattaaaggcagaaaggcatccaaacctatatctgattcaagggaagtaagcaatggcatagaaaaaaaaggaaagaaaaaatctgtaggtcgtccacctggcccatatacaagaaaaatgattcaaaaaactgctgagccacttttggataaggaatcaatttcagagaatcctactttggatttaccttgttctatagggagaactgagggaactgcacattcatccaatacctcagatgtggatttcacgggtgcttccagtgcaaaagaaactacctcgtctagcatttccaggcattatgggtagatattttacattcttattttttttactttttttactctagatttcttttctttgtaaagtgttgattgaataattttttagcaattgaaagtgatgtaagttgtgtctatcagctttttgagaggtaatccatatgtagatcccaatagttgttaatattcatttgaaatatttttgctttctagagtacaaatgtatttttcatgtttgtgtggaaatttgctgtgtacacagagaaaaagtataccattgtttagaagctgtgctcgttaggctttttaatgcctctgctacacaagtgttctttgctttaggaagatatgatttttttttttctttttaagagacagattctcactctgttgcccaggctagagtgcggtggcacaatcatggctcattgcagcctcaaactcctggcttcaaacaatcctcccatgtcggcctctctagtggctgggactacagattgtgccaccacacctaagtaatgcttttttattttttgtagagatggttttgctaatttgcccaggctggtcttgaactcccgatctcaagtgatcctcctgtgttggccttctcaagtgctgggattacacgcctgagccactacagctggccaagatttgattaaaaaaaaaaaaaaaaatcagacacctaaatccttttgtccataaaatgattttaaacttaagattttcatcaatagcagactcccctctgatatcttatttaatccagcccttcagaaggacaacgtttttgtttattgtttatttttttttgagatggagtctcgctctgtcacccaggctggagtacagtggcatgatatcgactcactgcaacctccgcctcctggattcaagcaattctggcacctcagcctctcatgtagctgggatttacaggcgtgcgccaccatgcccagctaactttttgtatttttaatagagatggggtttcaccatgttggccaggcaggtcttgaactcctaatctcaagtgatccacctgcctcggcctcccaaagtgccgggattacaggcgtgagccactttgcctggccaggacaacttttctct

SEQ ID NO: 1073 - protein, 146 aa, Homosapiens
MFMSGKEIKKKKHLFGLRIRVPPVPPNVAFKAEKEPEGTSHEFKIKGRKASKPISDSREVSNGIEKKGKKKSVGRPPGPYTRKMIQKTAEPLLDKESISENPTLDLPCSIGRTEGTAHSSNTSDVDFTGASSAKETTSSSISRHYG

SEQ ID NO: 1074 - DNA, 1474 bp, Homosapiens
gcacctgtatattactaattgatgaaattgtagtgcgttaaattgtttcttgatacttcacagctggcagacacaccaaaatctgaaagatatgagcatgttctggaggcattaaatgattacaagaccatgtttatgtctgggaaagaaataaagaagaagaagcatttgtttgggttgcgaattcgtgttcctcctgtgccaccaaatgtggctttcaaagcagagaaagaacctgaaggaacatctcatgaatttaaaattaaaggcagaaaggcatccaaacctatatctgattcaagggaagtaagcaatggcatagaaaaaaaaggaaagaaaaaatctgtaggtcgtccacctggcccatatacaagaaaaatgattcaaaaaactgctgagccacttttggataaggaatcaatttcagagaatcctactttggatttaccttgttctatagggagaactgagggaactgcacattcatccaatacctcagatgtggatttcacgggtgcttccagtgcaaaagaaactacctcgtctagcatttccaggcattatggattatctgactccagaaaaagaacgcgtacaggaagatcttggcctgctgcaataccacatttgcggagaagaagaggtcgtcttccaagaagagcactccagactcagaactcagaaattgtaaaagatgatgaaggcaaagaagattatcagtttgatgaactcaacacagagattctgaataacttagcagatcaggagttacaactcaatcatctaaagaactccattaccagttattttggtgctgcaggtagaatagcatgtggcgaaaaataccgagttttggcacgtcgggtgacacttgatggaaaggtgcagtatcttgtggaatgggaaggagcaactgcatcctgactgtaggactgaacattatgttcactgcactctgattttctgtaggtacagttcaaagccctaaaggagtctggcttttactatctttcttaaaaaaaaaaaaaagtcaaaaaaattcaaaaaaggggatgatactagccttaacatgtacctgtcaatgttatggatattgtcataaaaaggtatcttttaaaaatcagaacagagacttaattttttaaatcttaagatttgtagaatgtttctaggataggatattaaaaatgattgaaacccatgcatggtgttagacaatttttctaattattccattgagtcagttttttgtgattagtgattatcagagcaaacatcatgtagatagcacaagtatttggagaaacgttgtttgttttgttaccaaaatgttggaaaaatttatttcaataccttttagatttcataaagtgcagtgtatataatgcctactgaaagactgtaaaatattgaaattttctttcaagcaaagtgtaaaaaaatatattgagcctgtaaattgctctgtgactag

SEQ ID NO: 1075 - protein, 264 aa, Homosapiens [sequence omitted]

SEQ ID NO: 1076 - DNA, 2979 bp, Homosapiens
gcacctgtatattactaattgatgaaattgtagtgcgttaaattgtttcttgatacttcacagctggcagacacaccaaaatctgaaagatatgagcatgttctggaggcattaaatgattacaagaccatgtttatgtctgggaaagaaataaagaagaagaagcatttgtttgggttgcgaattcgtgttcctcctgtgccaccaaatgtggctttcaaagcagagaaagaacctgaaggaacatctcatgaatttaaaattaaaggcagaaaggcatccaaacctatatctgattcaagggaagtaagcaatggcatagaaaaaaaaggaaagaaaaaatctgtaggtcgtccacctggcccatatacaagaaaaatgattcaaaaaactgctgagccacttttggataaggaatcaatttcagagaatcctactttggatttaccttgttctatagggagaactgagggaactgcacattcatccaatacctcagatgtggatttcacgggtgcttccagtgcaaaagaaactacctcgtctagcatttccaggcattatggattatctgactccagaaaaagaacgcgtacaggaagatcttggcctgctgcaataccacatttgcggagaagaagaggtcgtcttccaagaagagcactccagactcagaactcagaaattgtaaaagatgatgaaggcaaagaagattatcagtttgatgaactcaacacagagattctgaataacttagcagatcaggagttacaactcaatcatctaaagaactccattaccagttattttggtgctgcaggtagaatagcatgtggcgaaaaataccgagttttggcacgtcgggtgacacttgatggaaaggtgcagtatcttgtggaatgggaaggagcaactgcatcctgactgtaggactgaacattatgttcactgcactctgattttctgtaggtacagttcaaagccctaaaggagtctggcttttactatctttcttaaaaaaaaaaaaaagtcaaaaaaattcaaaaaaggggatgatactagccttaacatgtacctgtcaatgttatggatattgtcataaaaaggtatcttttaaaaatcagaacagagacttaattttttaaatcttaagatttgtagaatgtttctaggataggatattaaaaatgattgaaacccatgcatggtgttagacaatttttctaattattccattgagtcagttttttgtgattagtgattatcagagcaaacatcatgtagatagcacaagtatttggagaaacgttgtttgttttgttaccaaaatgttggaaaaatttatttcaataccttttagatttcataaagtgcagtgtatataatgcctactgaaagactgtaaaatattgaaattttctttcaagcaaagtgtaaaaaaatatattgagcctgtaaattgctctgtgactagacttcattgtcgtcttaatatattcttgcatgtgcatatatatacacacgtgtatatatatgtgtgtgattatgtgacctatgcaatacaaattatgggaatgggcagctttggagtatatatcccataattcttttttcaggaatagttgcagtatttacacagcagcatttcttctcaggcttttattgggtgctgttgcttgctatgtatgaagagaaatgtgtcagacaagtttagtgtgttctgaagaagggtgtgaacaacagtgttcatgggcttttagaatgcttttcacttttagtccttgtaactcagctgttcagtacctaaaacaaattcaaataatatgaacattatctcctactagaagtaacgttttcaagttttcatggcacattatgattgtaaatgtctctcatttttaacagtaagtctataggagtcccgtgaagattcctgaaatgtctgtagtaactgttagtcatgtttgaataagtgtagtatgaacaaagtattttattgcacagggttaacaaacagtatgttgccagctgaggctactgctgttttattacaacattacctcttgtttttataaagtgtaccaagatttaaattgataactttattttacttgtaaaaaaaaagtttcttttatcaccagtgttacagttgtcttctgtttctttttgttttgttttatttgttttcctttttagccaaagagtgaacagaagattttcttattttggtggctattcattttacttttaaaagtgattggtggattttagactaattatgggggaatttgccaccaaaataaaaaatatgtaaagtgtagtgattacagagtggttaaaatgtgggttagtacttatttattccattaattgattatttgactgtttataaagaaagttgctttatttctttaaacatcttcaaaagatgatcctttcttgtcacattatagccaaaagaagcagagaacttcattgtctgcatttggttcctggttggccaggtataaatgagctttacaaaagtgcaaattaaaaactgttacttctgtttacctccaccaaaacttgattttcccctagctattaatttaaggttgcctttcctgcagctgcaatattttgaataacacacagagtttgtgttgatttttgaatgtttgtttatatctaggggtaatgaaaaatgtaaatcccgtgtatccttattcactccacctgtatcatattatttcattttccccaaagtcctttaattctaactgaacaccagcagtatttttagaaatttttctttaacatacttggaagatgatttatccagctgaactgtctttagacgtaattattgtgaatgtctgttttattttctcatggtggttcacatggctctgatgttcagtttgtatttttggaattgctttacttagaaattaaaacagaccaacattaaatgtgtgtattttttaaagagctaat

SEQ ID NO: 1077 - protein, 264 aa, Homosapiens [sequence omitted]

SEQ ID NO: 1078 - DNA, 2379 bp, Homosapiens
cctttcttaaacctgcaaaaaagtagaacattttggttgggcgtggtggctcacacctgtaatcccagcactttgggaagccgaggcaggcagatcacctggggtcaggagtttgagaccagcctggccaacatggtgaaaccctgtctctactaaaaatacaaaaatagccaggcatgttggtgcacacctgtattcccagctacttaggaggctgaagcaggagaatcgcttgaacccgggaggtagaagttgcagtgagccgaattgagccactgcactctagcctgggtgacagagcgagactctgtctcaaaaaaaaaaaaaaaaaaattaaaaagagagggagaacattctaaacaactgatggaggttcttgtggccaggcaagtttcagtagagctgaggtagatggagttgcttgggaataaggaccatagagactaaaagaaaggtctaaggagcatattttgcagaggcccaagtccataataaactggaataacccttctttgccccaggttatttccatttccagatccggcactctagatactccttttattttctgggcctctaggatttatctcctgctttctttttcaatgctgtcacctattatttctgactaaggtttttctctttataaatccactctgagatggaattcttttttccctaaatcccttttgaaatatttctaacagatgacactaaatatgggaaagcatattgggaccaaaaatataccattctttgttcttctttcttcctttaaaaagttagttgccatgtttaaaaagaaaagtggacatgtgctcttctcctttctggtcctatcccttcctccccatcatatcctactgtagactggctctggggcagataaaaatcaaggaaagcaaggggaagtgaatttttgtagtattgggtgggctttcaagtataagggccttatatatgaaagttaagttagggtctactatgtatatgtgttcagtttttaaaattttagttaatttttttaaaaatttaggtttatgtctgggaaagaaataaagaagaagaagcatttgtttgggttgcgaattcgtgttcctcctgtgccaccaaatgtggctttcaaagcagagaaagaacctgaaggaacatctcatgaatttaaaattaaaggcagaaaggcatccaaacctatatctgattcaagggaagtaagcaatggcatagaaaaaaaaggaaagaaaaaatctgtaggtcgtccacctggcccatatacaagaaaaatgattcaaaaaactgctgagccacttttggataaggaatcaatttcagagaatcctactttggatttaccttgttctatagggagaactgagggaactgcacattcatccaatacctcagatgtggatttcacgggtgcttccagtgcaaaagaaactacctcgtctagcatttccaggcattatggattatctgactccagaaaaagaacgcgtacaggaagatcttggcctgctgcaataccacatttgcggagaagaagaggtcgtcttccaagaagagcactccagactcagaactcagaaattgtaaaagatgatgaaggcaaagaagattatcagtttgatgaactcaacacagagattctgaataacttagcagatcaggagttacaactcaatcatctaaagaactccattaccagttattttggtgctgcaggtagaatagcatgtggcgaaaaataccgagttttggcacgtcgggtgacacttgatggaaaggtgcagtatcttgtggaatgggaaggagcaactgcatcctgactgtaggactgaacattatgttcactgcactctgattttctgtaggtacagttcaaagccctaaaggagtctggcttttactatctttcttaaaaaaaaaaaaaagtcaaaaaaattcaaaaaaggggatgatactagccttaacatgtacctgtcaatgttatggatattgtcataaaaaggtatcttttaaaaatcagaacagagacttaattttttaaatcttaagatttgtagaatgtttctaggataggatattaaaaatgattgaaacccatgcatggtgttagacaatttttctaattattccattgagtcagttttttgtgattagtgattatcagagcaaacatcatgtagatagcacaagtatttggagaaacgttgtttgttttgttaccaaaatgttggaaaaatttatttcaataccttttagatttcataaagtgcagtgtatataatgcctactgaaagactgtaaaatattgaaattttctttcaagcaaagtgtaaaaaaatatattgagcctgtaaattgctctgtgactag

SEQ ID NO: 1079 - protein, 262 aa, Homosapiens
MSGKEIKKKKHLFGLRIRVPPVPPNVAFKAEKEPEGTSHEFKIKGRKASKPISDSREVSNGIEKKGKKKSVGRPPGPYTRKMIQKTAEPLLDKESISENPTLDLPCSIGRTEGTAHSSNTSDVDFTGASSAKETTSSSISRHYGLSDSRKRTRTGRSWPAAIPHLRRRRGRLPRRALQTQNSEIVKDDEGKEDYQFDELNTEILNNLADQELQLNHLKNSITSYFGAAGRIACGEKYRVLARRVTLDGKVQYLVEWEGATAS

SEQ ID NO: 1080 - DNA, 3884 bp, Homosapiens
cctttcttaaacctgcaaaaaagtagaacattttggttgggcgtggtggctcacacctgtaatcccagcactttgggaagccgaggcaggcagatcacctggggtcaggagtttgagaccagcctggccaacatggtgaaaccctgtctctactaaaaatacaaaaatagccaggcatgttggtgcacacctgtattcccagctacttaggaggctgaagcaggagaatcgcttgaacccgggaggtagaagttgcagtgagccgaattgagccactgcactctagcctgggtgacagagcgagactctgtctcaaaaaaaaaaaaaaaaaaattaaaaagagagggagaacattctaaacaactgatggaggttcttgtggccaggcaagtttcagtagagctgaggtagatggagttgcttgggaataaggaccatagagactaaaagaaaggtctaaggagcatattttgcagaggcccaagtccataataaactggaataacccttctttgccccaggttatttccatttccagatccggcactctagatactccttttattttctgggcctctaggatttatctcctgctttctttttcaatgctgtcacctattatttctgactaaggtttttctctttataaatccactctgagatggaattcttttttccctaaatcccttttgaaatatttctaacagatgacactaaatatgggaaagcatattgggaccaaaaatataccattctttgttcttctttcttcctttaaaaagttagttgccatgtttaaaaagaaaagtggacatgtgctcttctcctttctggtcctatcccttcctccccatcatatcctactgtagactggctctggggcagataaaaatcaaggaaagcaaggggaagtgaatttttgtagtattgggtgggctttcaagtataagggccttatatatgaaagttaagttagggtctactatgtatatgtgttcagtttttaaaattttagttaatttttttaaaaatttaggtttatgtctgggaaagaaataaagaagaagaagcatttgtttgggttgcgaattcgtgttcctcctgtgccaccaaatgtggctttcaaagcagagaaagaacctgaaggaacatctcatgaatttaaaattaaaggcagaaaggcatccaaacctatatctgattcaagggaagtaagcaatggcatagaaaaaaaaggaaagaaaaaatctgtaggtcgtccacctggcccatatacaagaaaaatgattcaaaaaactgctgagccacttttggataaggaatcaatttcagagaatcctactttggatttaccttgttctatagggagaactgagggaactgcacattcatccaatacctcagatgtggatttcacgggtgcttccagtgcaaaagaaactacctcgtctagcatttccaggcattatggattatctgactccagaaaaagaacgcgtacaggaagatcttggcctgctgcaataccacatttgcggagaagaagaggtcgtcttccaagaagagcactccagactcagaactcagaaattgtaaaagatgatgaaggcaaagaagattatcagtttgatgaactcaacacagagattctgaataacttagcagatcaggagttacaactcaatcatctaaagaactccattaccagttattttggtgctgcaggtagaatagcatgtggcgaaaaataccgagttttggcacgtcgggtgacacttgatggaaaggtgcagtatcttgtggaatgggaaggagcaactgcatcctgactgtaggactgaacattatgttcactgcactctgattttctgtaggtacagttcaaagccctaaaggagtctggcttttactatctttcttaaaaaaaaaaaaaagtcaaaaaaattcaaaaaaggggatgatactagccttaacatgtacctgtcaatgttatggatattgtcataaaaaggtatcttttaaaaatcagaacagagacttaattttttaaatcttaagatttgtagaatgtttctaggataggatattaaaaatgattgaaacccatgcatggtgttagacaatttttctaattattccattgagtcagttttttgtgattagtgattatcagagcaaacatcatgtagatagcacaagtatttggagaaacgttgtttgttttgttaccaaaatgttggaaaaatttatttcaataccttttagatttcataaagtgcagtgtatataatgcctactgaaagactgtaaaatattgaaattttctttcaagcaaagtgtaaaaaaatatattgagcctgtaaattgctctgtgactagacttcattgtcgtcttaatatattcttgcatgtgcatatatatacacacgtgtatatatatgtgtgtgattatgtgacctatgcaatacaaattatgggaatgggcagctttggagtatatatcccataattcttttttcaggaatagttgcagtatttacacagcagcatttcttctcaggcttttattgggtgctgttgcttgctatgtatgaagagaaatgtgtcagacaagtttagtgtgttctgaagaagggtgtgaacaacagtgttcatgggcttttagaatgcttttcacttttagtccttgtaactcagctgttcagtacctaaaacaaattcaaataatatgaacattatctcctactagaagtaacgttttcaagttttcatggcacattatgattgtaaatgtctctcatttttaacagtaagtctataggagtcccgtgaagattcctgaaatgtctgtagtaactgttagtcatgtttgaataagtgtagtatgaacaaagtattttattgcacagggttaacaaacagtatgttgccagctgaggctactgctgttttattacaacattacctcttgtttttataaagtgtaccaagatttaaattgataactttattttacttgtaaaaaaaaagtttcttttatcaccagtgttacagttgtcttctgtttctttttgttttgttttatttgttttcctttttagccaaagagtgaacagaagattttcttattttggtggctattcattttacttttaaaagtgattggtggattttagactaattatgggggaatttgccaccaaaataaaaaatatgtaaagtgtagtgattacagagtggttaaaatgtgggttagtacttatttattccattaattgattatttgactgtttataaagaaagttgctttatttctttaaacatcttcaaaagatgatcctttcttgtcacattatagccaaaagaagcagagaacttcattgtctgcatttggttcctggttggccaggtataaatgagctttacaaaagtgcaaattaaaaactgttacttctgtttacctccaccaaaacttgattttcccctagctattaatttaaggttgcctttcctgcagctgcaatattttgaataacacacagagtttgtgttgatttttgaatgtttgtttatatctaggggtaatgaaaaatgtaaatcccgtgtatccttattcactccacctgtatcatattatttcattttccccaaagtcctttaattctaactgaacaccagcagtatttttagaaatttttctttaacatacttggaagatgatttatccagctgaactgtctttagacgtaattattgtgaatgtctgttttattttctcatggtggttcacatggctctgatgttcagtttgtatttttggaattgctttacttagaaattaaaacagaccaacattaaatgtgtgtattttttaaagagctaat

SEQ ID NO: 1081 - protein, 262 aa, Homosapiens; identical to SEQ ID NO: 1079

SEQ ID NO: 1082 - DNA, 6167 bp, Homosapiens
tcccccaggtaagccggtttccccacgccaaggcgcagtcgctcaccacccaaatcgtcgctggggagagacccacccggcgactgcgcgcttcgcactcgagtctgcgttaggaagcctctgaccctttcccgggcccctgcgcgtggaagcctcggacacaactcggagaaccagcgaaccccggcagcacagaattcgaaccgccgcgggagccgttgggacgcgcctacccggtcactgccccgccccggcgcagactgcgtgaggcgccgccgaaggcgcggggcttgccggggatcgtggtcggcgagcgcgcccgagcccactagcggagcccgcccgggactacatttcccacaattaccgccatgatgcccattggtgggggaagccatgggaaccggaggccgtcagggggagaggcgggcggcgctcacgcctggcctgagggggccgagactgaggcggttgcggaataggactgctagccccgcccagagtccctaccctttggagaactgcgcttctctttcggagggagtgttcgccgccgccgcggccgccacctggagtttcttcagactccagatttccctgtcaaccacgaggagtccagagaggaaacgcggagcggagacaacagtacctgacgcctctttcagcccgggatcgccccagcagggatgggcgacaagatctggctgcccttccccgtgctccttctggccgctctgcctccggtgctgctgcctggggcggccggcttcacaccttccctcgatagcgacttcacctttacccttcccgccggccagaaggagtgcttctaccagcccatgcccctgaaggcctcgctggagatcgagtaccaagttttagatggagcaggattagatattgatttccatcttgcctctccagaaggcaaaaccttagtttttgaacaaagaaaatcagatggagttcacacgtgtataagaagtaaaaatgggccaggcactgcggttcacgcctataatcccagcactttccgaggccaagtgtagagactgaagttggtgattacatgttctgctttgacaatacattcagcaccatttctgagaaggtgattttctttgaattaatcctggataatatgggagaacaggcacaagaacaagaagattggaagaaatatattactggcacagatatattggatatgaaactggaagacatcctggaatccatcaacagcatcaagtccagactaagcaaaagtgggcacatacaaactctgcttagagcatttgaagctcgtgatcgaaacatacaagaaagcaactttgatagagtcaatttctggtctatggttaatttagtggtcatggtggtggtgtcagccattcaagtttatatgctgaagagtctgtttgaagataagaggaaaagtagaacttaaaactccaaactagagtacgtaacattgaaaaatgaggcataaaaatgcaataaactgttacagtcaagaccattaatggtcttctccaaaatattttgagatataaaagtaggaaacaggtataattttaatgtgaaaattaagtcttcactttctgtgcaagtaatcctgctgatccagttgtacttaagtgtgtaacaggaatattttgcagaatataggtttaactgaatgaagccatattaataactgcattttcctaactttgaaaaattttgcaaatgtcttaggtgatttaaataaatgagtattgggcctaattgcaacaccagtctgtttttaacaggttctattacccagaacttttttgtaaatgcggcagttacaaattaactgtggaagttttcagttttaagttataaatcacctgagaattacctaatgatggattgaataaatctttagactacaaaagcccaacttttctctatttacatatgcatctctcctataatgtaaatagaataatagctttgaaatacaattaggtttttgagatttttataaccaaatacatttcagtgtaacatattagcagaaagcattagtctttgtactttgcttacattcccaaaagctgacattttcacgattcttaaaaacacaaagttacacttactaaaattaggacatgttttctctttgaaatgaagaatatagtttaaaagcttcctcctccatagggacacattttctctaacccttaactaaagtgtaggattttaaaattaaatgtgaggtaaaataagtttatttttaatagtatctgtcaagttaatatctgtcaacagttaataatcatgttatgttaattttaacatgattgctgacttggataattcattattaccagcagttatgaaggaaatattgctaaaatgatctgggcctaccataaataaatatctccttttctgagctctaagaattatcagaaacaggaaagaatttagaaaaacttgagaaaacctaatccaaaataaaattcacttaagtagaactataaataaatatctagaatctgactggctcatcatgacatcctactcataacataaatcaaaggagatgattaatttccagttagctggaagaaactttggctgtaggtttttattttctacaagaattctggtttgaattatttttgtaagcaggtacattttataaaatgtaagccctactgtaaggtttagcactgggtgtacatatttattaaaaatttttattataacaacttttattaaaatggcctttctgaacactttatttattgatgttgaagtaaggattagaaacatagactcccaagttttaaacacctaaatgtgaataacccatatatacaacaaagtttctgccatctagctttttgaagtctatgggggtcttactcaagtactagtaatttaacttcatcatgaatgaactataatttttaagttatgcccatttataacgttgtttatgactacattgtgagttagaaacaaacttaaaatttggggtatagaacccctcaacaggttagtaatgctggaattcttgatgagcaataatgataaccagagagtgatttcatttacactcatagtagtataaaaagagatacatttccctcttaggcccctgggagaagagcagcttagatttccctactggcaaggtttttaaaaatgaggtaaatgccgtatatgatcaattaccttaattggccaagaaaatgcttcaggtgtctaggggtatcctctgcaacacttgcagaacaaaggtcaataagatccttgcctatgaatacccctcccttttgcgctgttaaatttgcaatgagaagcaaatttacagtaccataactaataaagcagggtacagatataaactactgcatcttttctataaaactgtgattaagaattctacctctcctgtatggctgttactgtactgtactctctgactccttacctaacaatgaatttgttacataatcttctacatgtatgatttgtgccactgatcttaaacctatgattcagtaacttcttaccatataaaaacgataattgctttatttggaaaagaatttaggaatactaaggacaattatttttatagacaaagtaaaaagacagatatttaagaggcataaccaaaaaagcaaaacttgtaaacagagtaaaaatctttaatatttctaaagacatactgtttatctgcttcatatgctttttttaatttcactattccatttctaaattaaagttatgctaaattgagtaagctgtttatcacttaacagctcattttgtctttttcaatatacaaattttaaaaatactacaatatttaactaaggcccaaccgatttccataatgtagcagttaccgtgttcacctcacactaaggcctagagtttgctctgatatgcatttggatgattaatgttatgctgttctttcatgtgaatgtcaagacatggagggtgtttgtaattttatggtaaaattaatccttcttacacataatggtgtcttaaaattgacaaaaaatgagcacttacaattgtatgtctcctcaaatgaaaattctttatctgaaattttaaaagacattgattccacatgtaaggatttttcatctgaagtacaataatgcacaatcagtgttgctcaaactgctttatacttataaacagccatcttaaataagcaacgtattgtgagtactgatatgtatataataaaaattatcaaagaaaattaactgccagtcatttgtaaatgctgtctactcctgaaagccttccttcatctctatttagttaataatgtgctctctcctcctgttttgaaaccccatagctctctacacctcttattgtacatcactctactttgcattggagttctgtttctatatgtacttattcacctgttgcctaaacatgcactgttcctaaaaggtacagtttttgctcaaaatatatgaaaggaaagataatcagttcttaaagtttggtatgctaaataagcacccagggaacttacctgctccacctcaccccagaaattgattattcaggtctggaatatggctcaggattcttaattttcaaccaacacaatatagaatcctgtcagttatccttggatcatttgctaagtgatcttgcaaaatcaaaactcctttgagactatttcattttcagaaatattttaaaacttgttcagaaacatcttaaaacttgttagcatataggaaaagtacaatgcttggtgtaggtaggttattatttggtcatttccctcaaaccatccagacaagccactcttctaccacaagctggtagaaatccttaggcacctttctgcttctgcactgctatcactttcaggtgtctaaggcttctggaaggctgttgtcataacctggagccatacacctaatgtacgtctggggaaaggacaccaattaaagaatctagagctaggatgatgttacataagacagggcacaatggagatggactctggatccctgcatctgaaagaaaaaggcaagaaaatgcagggcagggaaaatcctgaaggtcttcactgaccatgaattaaaatcctaattgacagttttacaaacaaaaaccctcgttttagtacttgtgttgtttttgtttctgttttaacaagcttagatttattattgtgccttttatggaagatgaggaagaaataggaaagcagtaaaatgaacaatgagaatctgttacccaaactgatataaactccctcagaaagaaagatactactccctaatcctggaagtgttaagtggcaataatgatcaaatgttgtaaaggggattgttactacagctaatatgaaatgggaggctggactaaatctaacctttctacccttgatttcaattctaaaaggacacgtaataccattgcagaaagaaaagacagttccaaatgataaattttagagttgttttgctaggatgcaagagaaattggataagtggaccactcatacgttgctggtgagatatgaaatagtagagccactgtggaaaatattcttggcagtttcttataaaactaaacatacatttaacatataactggcatttgtactacttgacagttatccctgagaagttaaaacttaacattcacaaatgttacatagcaccttcatttataatagccaaaacccggaaacaacctggatgtccttcaaaaagagtgaatggtttagtatgtccacaccatggaatactaaatagtaatatgaaggaacaaactactgatacatgtaacaaattgcatggacctcaagggaattatgcttgggtggtttggggggacaatcctaaagttttacacactgtatgattctgtttttgtaacattcttaaataataaagctatagagatgggaaacaagattcgtggttgccaggtcttgggactgaagggaaggagaatgtggctataaagggagccttgtggtggaaaagttctgtagtttgattgtggtgattacataaatatacatgtgaaatgttagaagtatttatagctgaaacatattagtatgttggtatatacatatttctgactaattaatttcgccatgttgcccaggctggtct

SEQ ID NO: 1083 - protein, 125 aa, Homosapiens [sequence omitted]

SEQ ID NO: 1084 - DNA, 6096 bp, Homosapiens
tcccccaggtaagccggtttccccacgccaaggcgcagtcgctcaccacccaaatcgtcgctggggagagacccacccggcgactgcgcgcttcgcactcgagtctgcgttaggaagcctctgaccctttcccgggcccctgcgcgtggaagcctcggacacaactcggagaaccagcgaaccccggcagcacagaattcgaaccgccgcgggagccgttgggacgcgcctacccggtcactgccccgccccggcgcagactgcgtgaggcgccgccgaaggcgcggggcttgccggggatcgtggtcggcgagcgcgcccgagcccactagcggagcccgcccgggactacatttcccacaattaccgccatgatgcccattggtgggggaagccatgggaaccggaggccgtcagggggagaggcgggcggcgctcacgcctggcctgagggggccgagactgaggcggttgcggaataggactgctagccccgcccagagtccctaccctttggagaactgcgcttctctttcggagggagtgttcgccgccgccgcggccgccacctggagtttcttcagactccagatttccctgtcaaccacgaggagtccagagaggaaacgcggagcggagacaacagtacctgacgcctctttcagcccgggatcgccccagcagggatgggcgacaagatctggctgcccttccccgtgctccttctggccgctctgcctccggtgctgctgcctggggcggccggcttcacaccttccctcgatagcgacttcacctttacccttcccgccggccagaaggagtgcttctaccagcccatgcccctgaaggcctcgctggagatcgagtaccaagttttagatggagcaggattagatattgatttccatcttgcctctccagaaggcaaaaccttagtttttgaacaaagaaaatcagatggagttcacactgtagagactgaagttggtgattacatgttctgctttgacaatacattcagcaccatttctgagaaggtgattttctttgaattaatcctggataatatgggagaacaggcacaagaacaagaagattggaagaaatatattactggcacagatatattggatatgaaactggaagacatcctggaatccatcaacagcatcaagtccagactaagcaaaagtgggcacatacaaactctgcttagagcatttgaagctcgtgatcgaaacatacaagaaagcaactttgatagagtcaatttctggtctatggttaatttagtggtcatggtggtggtgtcagccattcaagtttatatgctgaagagtctgtttgaagataagaggaaaagtagaacttaaaactccaaactagagtacgtaacattgaaaaatgaggcataaaaatgcaataaactgttacagtcaagaccattaatggtcttctccaaaatattttgagatataaaagtaggaaacaggtataattttaatgtgaaaattaagtcttcactttctgtgcaagtaatcctgctgatccagttgtacttaagtgtgtaacaggaatattttgcagaatataggtttaactgaatgaagccatattaataactgcattttcctaactttgaaaaattttgcaaatgtcttaggtgatttaaataaatgagtattgggcctaattgcaacaccagtctgtttttaacaggttctattacccagaacttttttgtaaatgcggcagttacaaattaactgtggaagttttcagttttaagttataaatcacctgagaattacctaatgatggattgaataaatctttagactacaaaagcccaacttttctctatttacatatgcatctctcctataatgtaaatagaataatagctttgaaatacaattaggtttttgagatttttataaccaaatacatttcagtgtaacatattagcagaaagcattagtctttgtactttgcttacattcccaaaagctgacattttcacgattcttaaaaacacaaagttacacttactaaaattaggacatgttttctctttgaaatgaagaatatagtttaaaagcttcctcctccatagggacacattttctctaacccttaactaaagtgtaggattttaaaattaaatgtgaggtaaaataagtttatttttaatagtatctgtcaagttaatatctgtcaacagttaataatcatgttatgttaattttaacatgattgctgacttggataattcattattaccagcagttatgaaggaaatattgctaaaatgatctgggcctaccataaataaatatctccttttctgagctctaagaattatcagaaacaggaaagaatttagaaaaacttgagaaaacctaatccaaaataaaattcacttaagtagaactataaataaatatctagaatctgactggctcatcatgacatcctactcataacataaatcaaaggagatgattaatttccagttagctggaagaaactttggctgtaggtttttattttctacaagaattctggtttgaattatttttgtaagcaggtacattttataaaatgtaagccctactgtaaggtttagcactgggtgtacatatttattaaaaatttttattataacaacttttattaaaatggcctttctgaacactttatttattgatgttgaagtaaggattagaaacatagactcccaagttttaaacacctaaatgtgaataacccatatatacaacaaagtttctgccatctagctttttgaagtctatgggggtcttactcaagtactagtaatttaacttcatcatgaatgaactataatttttaagttatgcccatttataacgttgtttatgactacattgtgagttagaaacaaacttaaaatttggggtatagaacccctcaacaggttagtaatgctggaattcttgatgagcaataatgataaccagagagtgatttcatttacactcatagtagtataaaaagagatacatttccctcttaggcccctgggagaagagcagcttagatttccctactggcaaggtttttaaaaatgaggtaaatgccgtatatgatcaattaccttaattggccaagaaaatgcttcaggtgtctaggggtatcctctgcaacacttgcagaacaaaggtcaataagatccttgcctatgaatacccctcccttttgcgctgttaaatttgcaatgagaagcaaatttacagtaccataactaataaagcagggtacagatataaactactgcatcttttctataaaactgtgattaagaattctacctctcctgtatggctgttactgtactgtactctctgactccttacctaacaatgaatttgttacataatcttctacatgtatgatttgtgccactgatcttaaacctatgattcagtaacttcttaccatataaaaacgataattgctttatttggaaaagaatttaggaatactaaggacaattatttttatagacaaagtaaaaagacagatatttaagaggcataaccaaaaaagcaaaacttgtaaacagagtaaaaatctttaatatttctaaagacatactgtttatctgcttcatatgctttttttaatttcactattccatttctaaattaaagttatgctaaattgagtaagctgtttatcacttaacagctcattttgtctttttcaatatacaaattttaaaaatactacaatatttaactaaggcccaaccgatttccataatgtagcagttaccgtgttcacctcacactaaggcctagagtttgctctgatatgcatttggatgattaatgttatgctgttctttcatgtgaatgtcaagacatggagggtgtttgtaattttatggtaaaattaatccttcttacacataatggtgtcttaaaattgacaaaaaatgagcacttacaattgtatgtctcctcaaatgaaaattctttatctgaaattttaaaagacattgattccacatgtaaggatttttcatctgaagtacaataatgcacaatcagtgttgctcaaactgctttatacttataaacagccatcttaaataagcaacgtattgtgagtactgatatgtatataataaaaattatcaaagaaaattaactgccagtcatttgtaaatgctgtctactcctgaaagccttccttcatctctatttagttaataatgtgctctctcctcctgttttgaaaccccatagctctctacacctcttattgtacatcactctactttgcattggagttctgtttctatatgtacttattcacctgttgcctaaacatgcactgttcctaaaaggtacagtttttgctcaaaatatatgaaaggaaagataatcagttcttaaagtttggtatgctaaataagcacccagggaacttacctgctccacctcaccccagaaattgattattcaggtctggaatatggctcaggattcttaattttcaaccaacacaatatagaatcctgtcagttatccttggatcatttgctaagtgatcttgcaaaatcaaaactcctttgagactatttcattttcagaaatattttaaaacttgttcagaaacatcttaaaacttgttagcatataggaaaagtacaatgcttggtgtaggtaggttattatttggtcatttccctcaaaccatccagacaagccactcttctaccacaagctggtagaaatccttaggcacctttctgcttctgcactgctatcactttcaggtgtctaaggcttctggaaggctgttgtcataacctggagccatacacctaatgtacgtctggggaaaggacaccaattaaagaatctagagctaggatgatgttacataagacagggcacaatggagatggactctggatccctgcatctgaaagaaaaaggcaagaaaatgcagggcagggaaaatcctgaaggtcttcactgaccatgaattaaaatcctaattgacagttttacaaacaaaaaccctcgttttagtacttgtgttgtttttgtttctgttttaacaagcttagatttattattgtgccttttatggaagatgaggaagaaataggaaagcagtaaaatgaacaatgagaatctgttacccaaactgatataaactccctcagaaagaaagatactactccctaatcctggaagtgttaagtggcaataatgatcaaatgttgtaaaggggattgttactacagctaatatgaaatgggaggctggactaaatctaacctttctacccttgatttcaattctaaaaggacacgtaataccattgcagaaagaaaagacagttccaaatgataaattttagagttgttttgctaggatgcaagagaaattggataagtggaccactcatacgttgctggtgagatatgaaatagtagagccactgtggaaaatattcttggcagtttcttataaaactaaacatacatttaacatataactggcatttgtactacttgacagttatccctgagaagttaaaacttaacattcacaaatgttacatagcaccttcatttataatagccaaaacccggaaacaacctggatgtccttcaaaaagagtgaatggtttagtatgtccacaccatggaatactaaatagtaatatgaaggaacaaactactgatacatgtaacaaattgcatggacctcaagggaattatgcttgggtggtttggggggacaatcctaaagttttacacactgtatgattctgtttttgtaacattcttaaataataaagctatagagatgggaaacaagattcgtggttgccaggtcttgggactgaagggaaggagaatgtggctataaagggagccttgtggtggaaaagttctgtagtttgattgtggtgattacataaatatacatgtgaaatgttagaagtatttatagctgaaacatattagtatgttggtatatacatatttctgactaattaatttcgccatgttgcccaggctggtct

SEQ ID NO: 1085 - protein, 229 aa, Homosapiens
MGDKIWLPFPVLLLAALPPVLLPGAAGFTPSLDSDFTFTLPAGQKECFYQPMPLKASLEIEYQVLDGAGLDIDFHLASPEGKTLVFEQRKSDGVHTVETEVGDYMFCFDNTFSTISEKVIFFELILDNMGEQAQEQEDWKKYITGTDILDMKLEDILESINSIKSRLSKSGHIQTLLRAFEARDRNIQESNFDRVNFWSMVNLVVMVVVSAIQVYMLKSLFEDKRKSRT

SEQ ID NO: 1086 - DNA, 6145 bp, Homosapiens
tcccccaggtaagccggtttccccacgccaaggcgcagtcgctcaccacccaaatcgtcgctggggagagacccacccggcgactgcgcgcttcgcactcgagtctgcgttaggaagcctctgaccctttcccgggcccctgcgcgtggaagcctcggacacaactcggagaaccagcgaaccccggcagcacagaattcgaaccgccgcgggagccgttgggacgcgcctacccggtcactgccccgccccggcgcagactgcgtgaggcgccgccgaaggcgcggggcttgccggggatcgtggtcggcgagcgcgcccgagcccactagcggagcccgcccgggactacatttcccacaattaccgccatgatgcccattggtgggggaagccatgggaaccggaggccgtcagggggagaggcgggcggcgctcacgcctggcctgagggggccgagactgaggcggttgcggaataggactgctagccccgcccagagtccctaccctttggagaactgcgcttctctttcggagggagtgttcgccgccgccgcggccgccacctggagtttcttcagactccagatttccctgtcaaccacgaggagtccagagaggaaacgcggagcggagacaacagtacctgacgcctctttcagcccgggatcgccccagcagggatgggcgacaagatctggctgcccttccccgtgctccttctggccgctctgcctccggtgctgctgcctggggcggccggcttcacaccttccctcgatagcgacttcacctttacccttcccgccggccagaaggagtgcttctaccagcccatgcccctgaaggcctcgctggagatcgagtaccaagttttagatggagcaggattagatattgatttccatcttgcctctccagaaggcaaaaccttagtttttgaacaaagaaaatcagatggagttcacactgtagagactgaagttggtgattacatgttctgctttgacaatacattcagcaccatttctgagaaggtgattttctttgaattaatcctggataatatgggagaacaggcacaagaacaagaagattggaagaaatatattactggcacagatatattggatatgaaactggaagacatcctggaccctattataaaaatagcttcagatgtgcaaataagactgcatcttggaatccatcaacagcatcaagtccagactaagcaaaagtgggcacatacaaactctgcttagagcatttgaagctcgtgatcgaaacatacaagaaagcaactttgatagagtcaatttctggtctatggttaatttagtggtcatggtggtggtgtcagccattcaagtttatatgctgaagagtctgtttgaagataagaggaaaagtagaacttaaaactccaaactagagtacgtaacattgaaaaatgaggcataaaaatgcaataaactgttacagtcaagaccattaatggtcttctccaaaatattttgagatataaaagtaggaaacaggtataattttaatgtgaaaattaagtcttcactttctgtgcaagtaatcctgctgatccagttgtacttaagtgtgtaacaggaatattttgcagaatataggtttaactgaatgaagccatattaataactgcattttcctaactttgaaaaattttgcaaatgtcttaggtgatttaaataaatgagtattgggcctaattgcaacaccagtctgtttttaacaggttctattacccagaacttttttgtaaatgcggcagttacaaattaactgtggaagttttcagttttaagttataaatcacctgagaattacctaatgatggattgaataaatctttagactacaaaagcccaacttttctctatttacatatgcatctctcctataatgtaaatagaataatagctttgaaatacaattaggtttttgagatttttataaccaaatacatttcagtgtaacatattagcagaaagcattagtctttgtactttgcttacattcccaaaagctgacattttcacgattcttaaaaacacaaagttacacttactaaaattaggacatgttttctctttgaaatgaagaatatagtttaaaagcttcctcctccatagggacacattttctctaacccttaactaaagtgtaggattttaaaattaaatgtgaggtaaaataagtttatttttaatagtatctgtcaagttaatatctgtcaacagttaataatcatgttatgttaattttaacatgattgctgacttggataattcattattaccagcagttatgaaggaaatattgctaaaatgatctgggcctaccataaataaatatctccttttctgagctctaagaattatcagaaacaggaaagaatttagaaaaacttgagaaaacctaatccaaaataaaattcacttaagtagaactataaataaatatctagaatctgactggctcatcatgacatcctactcataacataaatcaaaggagatgattaatttccagttagctggaagaaactttggctgtaggtttttattttctacaagaattctggtttgaattatttttgtaagcaggtacattttataaaatgtaagccctactgtaaggtttagcactgggtgtacatatttattaaaaatttttattataacaacttttattaaaatggcctttctgaacactttatttattgatgttgaagtaaggattagaaacatagactcccaagttttaaacacctaaatgtgaataacccatatatacaacaaagtttctgccatctagctttttgaagtctatgggggtcttactcaagtactagtaatttaacttcatcatgaatgaactataatttttaagttatgcccatttataacgttgtttatgactacattgtgagttagaaacaaacttaaaatttggggtatagaacccctcaacaggttagtaatgctggaattcttgatgagcaataatgataaccagagagtgatttcatttacactcatagtagtataaaaagagatacatttccctcttaggcccctgggagaagagcagcttagatttccctactggcaaggtttttaaaaatgaggtaaatgccgtatatgatcaattaccttaattggccaagaaaatgcttcaggtgtctaggggtatcctctgcaacacttgcagaacaaaggtcaataagatccttgcctatgaatacccctcccttttgcgctgttaaatttgcaatgagaagcaaatttacagtaccataactaataaagcagggtacagatataaactactgcatcttttctataaaactgtgattaagaattctacctctcctgtatggctgttactgtactgtactctctgactccttacctaacaatgaatttgttacataatcttctacatgtatgatttgtgccactgatcttaaacctatgattcagtaacttcttaccatataaaaacgataattgctttatttggaaaagaatttaggaatactaaggacaattatttttatagacaaagtaaaaagacagatatttaagaggcataaccaaaaaagcaaaacttgtaaacagagtaaaaatctttaatatttctaaagacatactgtttatctgcttcatatgctttttttaatttcactattccatttctaaattaaagttatgctaaattgagtaagctgtttatcacttaacagctcattttgtctttttcaatatacaaattttaaaaatactacaatatttaactaaggcccaaccgatttccataatgtagcagttaccgtgttcacctcacactaaggcctagagtttgctctgatatgcatttggatgattaatgttatgctgttctttcatgtgaatgtcaagacatggagggtgtttgtaattttatggtaaaattaatccttcttacacataatggtgtcttaaaattgacaaaaaatgagcacttacaattgtatgtctcctcaaatgaaaattctttatctgaaattttaaaagacattgattccacatgtaaggatttttcatctgaagtacaataatgcacaatcagtgttgctcaaactgctttatacttataaacagccatcttaaataagcaacgtattgtgagtactgatatgtatataataaaaattatcaaagaaaattaactgccagtcatttgtaaatgctgtctactcctgaaagccttccttcatctctatttagttaataatgtgctctctcctcctgttttgaaaccccatagctctctacacctcttattgtacatcactctactttgcattggagttctgtttctatatgtacttattcacctgttgcctaaacatgcactgttcctaaaaggtacagtttttgctcaaaatatatgaaaggaaagataatcagttcttaaagtttggtatgctaaataagcacccagggaacttacctgctccacctcaccccagaaattgattattcaggtctggaatatggctcaggattcttaattttcaaccaacacaatatagaatcctgtcagttatccttggatcatttgctaagtgatcttgcaaaatcaaaactcctttgagactatttcattttcagaaatattttaaaacttgttcagaaacatcttaaaacttgttagcatataggaaaagtacaatgcttggtgtaggtaggttattatttggtcatttccctcaaaccatccagacaagccactcttctaccacaagctggtagaaatccttaggcacctttctgcttctgcactgctatcactttcaggtgtctaaggcttctggaaggctgttgtcataacctggagccatacacctaatgtacgtctggggaaaggacaccaattaaagaatctagagctaggatgatgttacataagacagggcacaatggagatggactctggatccctgcatctgaaagaaaaaggcaagaaaatgcagggcagggaaaatcctgaaggtcttcactgaccatgaattaaaatcctaattgacagttttacaaacaaaaaccctcgttttagtacttgtgttgtttttgtttctgttttaacaagcttagatttattattgtgccttttatggaagatgaggaagaaataggaaagcagtaaaatgaacaatgagaatctgttacccaaactgatataaactccctcagaaagaaagatactactccctaatcctggaagtgttaagtggcaataatgatcaaatgttgtaaaggggattgttactacagctaatatgaaatgggaggctggactaaatctaacctttctacccttgatttcaattctaaaaggacacgtaataccattgcagaaagaaaagacagttccaaatgataaattttagagttgttttgctaggatgcaagagaaattggataagtggaccactcatacgttgctggtgagatatgaaatagtagagccactgtggaaaatattcttggcagtttcttataaaactaaacatacatttaacatataactggcatttgtactacttgacagttatccctgagaagttaaaacttaacattcacaaatgttacatagcaccttcatttataatagccaaaacccggaaacaacctggatgtccttcaaaaagagtgaatggtttagtatgtccacaccatggaatactaaatagtaatatgaaggaacaaactactgatacatgtaacaaattgcatggacctcaagggaattatgcttgggtggtttggggggacaatcctaaagttttacacactgtatgattctgtttttgtaacattcttaaataataaagctatagagatgggaaacaagattcgtggttgccaggtcttgggactgaagggaaggagaatgtggctataaagggagccttgtggtggaaaagttctgtagtttgattgtggtgattacataaatatacatgtgaaatgttagaagtatttatagctgaaacatattagtatgttggtatatacatatttctgactaattaatttcgccatgttgcccaggctggtct

SEQ ID NO: 1087 - protein, 193 aa, Homosapiens
MGDKIWLPFPVLLLAALPPVLLPGAAGFTPSLDSDFTFTLPAGQKECFYQPMPLKASLEIEYQVLDGAGLDIDFHLASPEGKTLVFEQRKSDGVHTVETEVGDYMFCFDNTFSTISEKVIFFELILDNMGEQAQEQEDWKKYITGTDILDMKLEDILDPIIKIASDVQIRLHLGIHQQHQVQTKQKWAHTNSA

SEQ ID NO: 1088 - DNA, 6070 bp, Homosapiens
tcccccaggtaagccggtttccccacgccaaggcgcagtcgctcaccacccaaatcgtcgctggggagagacccacccggcgactgcgcgcttcgcactcgagtctgcgttaggaagcctctgaccctttcccgggcccctgcgcgtggaagcctcggacacaactcggagaaccagcgaaccccggcagcacagaattcgaaccgccgcgggagccgttgggacgcgcctacccggtcactgccccgccccggcgcagactgcgtgaggcgccgccgaaggcgcggggcttgccggggatcgtggtcggcgagcgcgcccgagcccactagcggagcccgcccgggactacatttcccacaattaccgccatgatgcccattggtgggggaagccatgggaaccggaggccgtcagggggagaggcgggcggcgctcacgcctggcctgagggggccgagactgaggcggttgcggaataggactgctagccccgcccagagtccctaccctttggagaactgcgcttctctttcggagggagtgttcgccgccgccgcggccgccacctggagtttcttcagactccagatttccctgtcaaccacgaggagtccagagaggaaacgcggagcggagacaacagtacctgacgcctctttcagccggcttcacaccttccctcgatagcgacttcacctttacccttcccgccggccagaaggagtgcttctaccagcccatgcccctgaaggcctcgctggagatcgagtaccaagttttagatggagcaggattagatattgatttccatcttgcctctccagaaggcaaaaccttagtttttgaacaaagaaaatcagatggagttcacacgtgtataagaagtaaaaatgggccaggcactgcggttcacgcctataatcccagcactttccgaggccaagtgtagagactgaagttggtgattacatgttctgctttgacaatacattcagcaccatttctgagaaggtgattttctttgaattaatcctggataatatgggagaacaggcacaagaacaagaagattggaagaaatatattactggcacagatatattggatatgaaactggaagacatcctggaatccatcaacagcatcaagtccagactaagcaaaagtgggcacatacaaactctgcttagagcatttgaagctcgtgatcgaaacatacaagaaagcaactttgatagagtcaatttctggtctatggttaatttagtggtcatggtggtggtgtcagccattcaagtttatatgctgaagagtctgtttgaagataagaggaaaagtagaacttaaaactccaaactagagtacgtaacattgaaaaatgaggcataaaaatgcaataaactgttacagtcaagaccattaatggtcttctccaaaatattttgagatataaaagtaggaaacaggtataattttaatgtgaaaattaagtcttcactttctgtgcaagtaatcctgctgatccagttgtacttaagtgtgtaacaggaatattttgcagaatataggtttaactgaatgaagccatattaataactgcattttcctaactttgaaaaattttgcaaatgtcttaggtgatttaaataaatgagtattgggcctaattgcaacaccagtctgtttttaacaggttctattacccagaacttttttgtaaatgcggcagttacaaattaactgtggaagttttcagttttaagttataaatcacctgagaattacctaatgatggattgaataaatctttagactacaaaagcccaacttttctctatttacatatgcatctctcctataatgtaaatagaataatagctttgaaatacaattaggtttttgagatttttataaccaaatacatttcagtgtaacatattagcagaaagcattagtctttgtactttgcttacattcccaaaagctgacattttcacgattcttaaaaacacaaagttacacttactaaaattaggacatgttttctctttgaaatgaagaatatagtttaaaagcttcctcctccatagggacacattttctctaacccttaactaaagtgtaggattttaaaattaaatgtgaggtaaaataagtttatttttaatagtatctgtcaagttaatatctgtcaacagttaataatcatgttatgttaattttaacatgattgctgacttggataattcattattaccagcagttatgaaggaaatattgctaaaatgatctgggcctaccataaataaatatctccttttctgagctctaagaattatcagaaacaggaaagaatttagaaaaacttgagaaaacctaatccaaaataaaattcacttaagtagaactataaataaatatctagaatctgactggctcatcatgacatcctactcataacataaatcaaaggagatgattaatttccagttagctggaagaaactttggctgtaggtttttattttctacaagaattctggtttgaattatttttgtaagcaggtacattttataaaatgtaagccctactgtaaggtttagcactgggtgtacatatttattaaaaatttttattataacaacttttattaaaatggcctttctgaacactttatttattgatgttgaagtaaggattagaaacatagactcccaagttttaaacacctaaatgtgaataacccatatatacaacaaagtttctgccatctagctttttgaagtctatgggggtcttactcaagtactagtaatttaacttcatcatgaatgaactataatttttaagttatgcccatttataacgttgtttatgactacattgtgagttagaaacaaacttaaaatttggggtatagaacccctcaacaggttagtaatgctggaattcttgatgagcaataatgataaccagagagtgatttcatttacactcatagtagtataaaaagagatacatttccctcttaggcccctgggagaagagcagcttagatttccctactggcaaggtttttaaaaatgaggtaaatgccgtatatgatcaattaccttaattggccaagaaaatgcttcaggtgtctaggggtatcctctgcaacacttgcagaacaaaggtcaataagatccttgcctatgaatacccctcccttttgcgctgttaaatttgcaatgagaagcaaatttacagtaccataactaataaagcagggtacagatataaactactgcatcttttctataaaactgtgattaagaattctacctctcctgtatggctgttactgtactgtactctctgactccttacctaacaatgaatttgttacataatcttctacatgtatgatttgtgccactgatcttaaacctatgattcagtaacttcttaccatataaaaacgataattgctttatttggaaaagaatttaggaatactaaggacaattatttttatagacaaagtaaaaagacagatatttaagaggcataaccaaaaaagcaaaacttgtaaacagagtaaaaatctttaatatttctaaagacatactgtttatctgcttcatatgctttttttaatttcactattccatttctaaattaaagttatgctaaattgagtaagctgtttatcacttaacagctcattttgtctttttcaatatacaaattttaaaaatactacaatatttaactaaggcccaaccgatttccataatgtagcagttaccgtgttcacctcacactaaggcctagagtttgctctgatatgcatttggatgattaatgttatgctgttctttcatgtgaatgtcaagacatggagggtgtttgtaattttatggtaaaattaatccttcttacacataatggtgtcttaaaattgacaaaaaatgagcacttacaattgtatgtctcctcaaatgaaaattctttatctgaaattttaaaagacattgattccacatgtaaggatttttcatctgaagtacaataatgcacaatcagtgttgctcaaactgctttatacttataaacagccatcttaaataagcaacgtattgtgagtactgatatgtatataataaaaattatcaaagaaaattaactgccagtcatttgtaaatgctgtctactcctgaaagccttccttcatctctatttagttaataatgtgctctctcctcctgttttgaaaccccatagctctctacacctcttattgtacatcactctactttgcattggagttctgtttctatatgtacttattcacctgttgcctaaacatgcactgttcctaaaaggtacagtttttgctcaaaatatatgaaaggaaagataatcagttcttaaagtttggtatgctaaataagcacccagggaacttacctgctccacctcaccccagaaattgattattcaggtctggaatatggctcaggattcttaattttcaaccaacacaatatagaatcctgtcagttatccttggatcatttgctaagtgatcttgcaaaatcaaaactcctttgagactatttcattttcagaaatattttaaaacttgttcagaaacatcttaaaacttgttagcatataggaaaagtacaatgcttggtgtaggtaggttattatttggtcatttccctcaaaccatccagacaagccactcttctaccacaagctggtagaaatccttaggcacctttctgcttctgcactgctatcactttcaggtgtctaaggcttctggaaggctgttgtcataacctggagccatacacctaatgtacgtctggggaaaggacaccaattaaagaatctagagctaggatgatgttacataagacagggcacaatggagatggactctggatccctgcatctgaaagaaaaaggcaagaaaatgcagggcagggaaaatcctgaaggtcttcactgaccatgaattaaaatcctaattgacagttttacaaacaaaaaccctcgttttagtacttgtgttgtttttgtttctgttttaacaagcttagatttattattgtgccttttatggaagatgaggaagaaataggaaagcagtaaaatgaacaatgagaatctgttacccaaactgatataaactccctcagaaagaaagatactactccctaatcctggaagtgttaagtggcaataatgatcaaatgttgtaaaggggattgttactacagctaatatgaaatgggaggctggactaaatctaacctttctacccttgatttcaattctaaaaggacacgtaataccattgcagaaagaaaagacagttccaaatgataaattttagagttgttttgctaggatgcaagagaaattggataagtggaccactcatacgttgctggtgagatatgaaatagtagagccactgtggaaaatattcttggcagtttcttataaaactaaacatacatttaacatataactggcatttgtactacttgacagttatccctgagaagttaaaacttaacattcacaaatgttacatagcaccttcatttataatagccaaaacccggaaacaacctggatgtccttcaaaaagagtgaatggtttagtatgtccacaccatggaatactaaatagtaatatgaaggaacaaactactgatacatgtaacaaattgcatggacctcaagggaattatgcttgggtggtttggggggacaatcctaaagttttacacactgtatgattctgtttttgtaacattcttaaataataaagctatagagatgggaaacaagattcgtggttgccaggtcttgggactgaagggaaggagaatgtggctataaagggagccttgtggtggaaaagttctgtagtttgattgtggtgattacataaatatacatgtgaaatgttagaagtatttatagctgaaacatattagtatgttggtatatacatatttctgactaattaatttcgccatgttgcccaggctggtct

SEQ ID NO: 1089 - protein, 125 aa, Homosapiens [sequence omitted]

SEQ ID NO: 1090 - DNA, 4263 bp, Homosapiens
tcccccaggtaagccggtttccccacgccaaggcgcagtcgctcaccacccaaatcgtcgctggggagagacccacccggcgactgcgcgcttcgcactcgagtctgcgttaggaagcctctgaccctttcccgggcccctgcgcgtggaagcctcggacacaactcggagaaccagcgaaccccggcagcacagaattcgaaccgccgcgggagccgttgggacgcgcctacccggtcactgccccgccccggcgcagactgcgtgaggcgccgccgaaggcgcggggcttgccggggatcgtggtcggcgagcgcgcccgagcccactagcggagcccgcccgggactacatttcccacaattaccgccatgatgcccattggtgggggaagccatgggaaccggaggccgtcagggggagaggcgggcggcgctcacgcctggcctgagggggccgagactgaggcggttgcggaataggactgctagccccgcccagagtccctaccctttggagaactgcgcttctctttcggagggagtgttcgccgccgccgcggccgccacctggagtttcttcagactccagatttccctgtcaaccacgaggagtccagagaggaaacgcggagcggagacaacagtacctgacgcctctttcagcccgggatcgccccagcagggatgggcgacaagatctggctgcccttccccgtgctccttctggccgctctgcctccggtgctgctgcctggggcggccggcttcacaccttccctcgatagcgacttcacctttacccttcccgccggccagaaggagtgcttctaccagcccatgcccctgaaggcctcgctggagatcgagtaccaagttttagatggagcaggattagatattgatttccatcttgcctctccagaaggcaaaaccttagtttttgaacaaagaaaatcagatggagttcacacgtgtataagaagtaaaaatgggccaggcactgcggttcacgcctataatcccagcactttccgaggccaagtgtagagactgaagttggtgattacatgttctgctttgacaatacattcagcaccatttctgagaaggtgattttctttgaattaatcctggataatatgggagaacaggcacaagaacaagaagattggaagaaatatattactggcacagatatattggatatgaaactggaagacatcctggaatccatcaacagcatcaagtccagactaagcaaaagtgggcacatacaaactctgcttagagcatttgaagctcgtgatcgaaacatacaagaaagcaactttgatagagtcaatttctggtctatggttaatttagtggtcatggtggtggtgtcagccattcaagtttatatgctgaagagtctgtttgaagataagaggaaaagtagaacttaaaactccaaactagagtacgtaacattgaaaaatgaggcataaaaatgcaataaactgttacagtcaagaccattaatggtcttctccaaaatattttgagatataaaagtaggaaacaggtataattttaatgtgaaaattaagtcttcactttctgtgcaagtaatcctgctgatccagttgtacttaagtgtgtaacaggaatattttgcagaatataggtttaactgaatgaagccatattaataactgcattttcctaactttgaaaaattttgcaaatgtcttaggtgatttaaataaatgagtattgggcctaattgcaacaccagtctgtttttaacaggttctattacccagaacttttttgtaaatgcggcagttacaaattaactgtggaagttttcagttttaagttataaatcacctgagaattacctaatgatggattgaataaatctttagactacaaaagcccaacttttctctatttacatatgcatctctcctataatgtaaatagaataatagctttgaaatacaattaggtttttgagatttttataaccaaatacatttcagtgtaacatattagcagaaagcattagtctttgtactttgcttacattcccaaaagctgacattttcacgattcttaaaaacacaaagttacacttactaaaattaggacatgttttctctttgaaatgaagaatatagtttaaaagcttcctcctccatagggacacattttctctaacccttaactaaagtgtaggattttaaaattaaatgtgaggtaaaataagtttatttttaatagtatctgtcaagttaatatctgtcaacagttaataatcatgttatgttaattttaacatgattgctgacttggataattcattattaccagcagttatgaaggaaatattgctaaaatgatctgggcctaccataaataaatatctccttttctgagctctaagaattatcagaaacaggaaagaatttagaaaaacttgagaaaacctaatccaaaataaaattcacttaagtagaactataaataaatatctagaatctgactggctcatcatgacatcctactcataacataaatcaaaggagatgattaatttccagttagctggaagaaactttggctgtaggtttttattttctacaagaattctggtttgaattatttttgtaagcaggtacattttataaaatgtaagccctactgtaaggtttagcactgggtgtacatatttattaaaaatttttattataacaacttttattaaaatggcctttctgaacactttatttattgatgttgaagtaaggattagaaacatagactcccaagttttaaacacctaaatgtgaataacccatatatacaacaaagtttctgccatctagctttttgaagtctatgggggtcttactcaagtactagtaatttaacttcatcatgaatgaactataatttttaagttatgcccatttataacgttgtttatgactacattgtgagttagaaacaaacttaaaatttggggtatagaacccctcaacaggttagtaatgctggaattcttgatgagcaataatgataaccagagagtgatttcatttacactcatagtagtataaaaagagatacatttccctcttaggcccctgggagaagagcagcttagatttccctactggcaaggtttttaaaaatgaggtaaatgccgtatatgatcaattaccttaattggccaagaaaatgcttcaggtgtctaggggtatcctctgcaacacttgcagaacaaaggtcaataagatccttgcctatgaatacccctcccttttgcgctgttaaatttgcaatgagaagcaaatttacagtaccataactaataaagcagggtacagatataaactactgcatcttttctataaaactgtgattaagaattctacctctcctgtatggctgttactgtactgtactctctgactccttacctaacaatgaatttgttacataatcttctacatgtatgatttgtgccactgatcttaaacctatgattcagtaacttcttaccatataaaaacgataattgctttatttggaaaagaatttaggaatactaaggacaattatttttatagacaaagtaaaaagacagatatttaagaggcataaccaaaaaagcaaaacttgtaaacagagtaaaaatctttaatatttctaaagacatactgtttatctgcttcatatgctttttttaatttcactattccatttctaaattaaagttatgctaaattgagtaagctgtttatcacttaacagctcattttgtctttttcaatatacaaattttaaaaatactacaatatttaactaaggcccaaccgatttccataatgtagcagttaccgtgttcacctcacactaaggcctagagtttgctctgatatgcatttggatgattaatgttatgctgttctttcatgtgaatgtcaagacatggagggtgtttgtaattttatggtaaaattaatccttcttacacataatggtgtcttaaaattgacaaaaaatgagcacttacaattgtatgtctcctcaaatgaaaattctttatctgaaattttaaaagacattgattccacatgtaaggatttttcatctgaagtacaataatgcacaatcagtgttgctcaaactgctttatacttataaacagccatcttaaataagcaacgtattgtgagtactgatatgtatataataaaaattatcaaag

SEQ ID NO: 1091 - protein, 125 aa, Homosapiens [sequence omitted]

SEQ ID NO: 1092 - DNA, 4192 bp, Homosapiens
tcccccaggtaagccggtttccccacgccaaggcgcagtcgctcaccacccaaatcgtcgctggggagagacccacccggcgactgcgcgcttcgcactcgagtctgcgttaggaagcctctgaccctttcccgggcccctgcgcgtggaagcctcggacacaactcggagaaccagcgaaccccggcagcacagaattcgaaccgccgcgggagccgttgggacgcgcctacccggtcactgccccgccccggcgcagactgcgtgaggcgccgccgaaggcgcggggcttgccggggatcgtggtcggcgagcgcgcccgagcccactagcggagcccgcccgggactacatttcccacaattaccgccatgatgcccattggtgggggaagccatgggaaccggaggccgtcagggggagaggcgggcggcgctcacgcctggcctgagggggccgagactgaggcggttgcggaataggactgctagccccgcccagagtccctaccctttggagaactgcgcttctctttcggagggagtgttcgccgccgccgcggccgccacctggagtttcttcagactccagatttccctgtcaaccacgaggagtccagagaggaaacgcggagcggagacaacagtacctgacgcctctttcagcccgggatcgccccagcagggatgggcgacaagatctggctgcccttccccgtgctccttctggccgctctgcctccggtgctgctgcctggggcggccggcttcacaccttccctcgatagcgacttcacctttacccttcccgccggccagaaggagtgcttctaccagcccatgcccctgaaggcctcgctggagatcgagtaccaagttttagatggagcaggattagatattgatttccatcttgcctctccagaaggcaaaaccttagtttttgaacaaagaaaatcagatggagttcacactgtagagactgaagttggtgattacatgttctgctttgacaatacattcagcaccatttctgagaaggtgattttctttgaattaatcctggataatatgggagaacaggcacaagaacaagaagattggaagaaatatattactggcacagatatattggatatgaaactggaagacatcctggaatccatcaacagcatcaagtccagactaagcaaaagtgggcacatacaaactctgcttagagcatttgaagctcgtgatcgaaacatacaagaaagcaactttgatagagtcaatttctggtctatggttaatttagtggtcatggtggtggtgtcagccattcaagtttatatgctgaagagtctgtttgaagataagaggaaaagtagaacttaaaactccaaactagagtacgtaacattgaaaaatgaggcataaaaatgcaataaactgttacagtcaagaccattaatggtcttctccaaaatattttgagatataaaagtaggaaacaggtataattttaatgtgaaaattaagtcttcactttctgtgcaagtaatcctgctgatccagttgtacttaagtgtgtaacaggaatattttgcagaatataggtttaactgaatgaagccatattaataactgcattttcctaactttgaaaaattttgcaaatgtcttaggtgatttaaataaatgagtattgggcctaattgcaacaccagtctgtttttaacaggttctattacccagaacttttttgtaaatgcggcagttacaaattaactgtggaagttttcagttttaagttataaatcacctgagaattacctaatgatggattgaataaatctttagactacaaaagcccaacttttctctatttacatatgcatctctcctataatgtaaatagaataatagctttgaaatacaattaggtttttgagatttttataaccaaatacatttcagtgtaacatattagcagaaagcattagtctttgtactttgcttacattcccaaaagctgacattttcacgattcttaaaaacacaaagttacacttactaaaattaggacatgttttctctttgaaatgaagaatatagtttaaaagcttcctcctccatagggacacattttctctaacccttaactaaagtgtaggattttaaaattaaatgtgaggtaaaataagtttatttttaatagtatctgtcaagttaatatctgtcaacagttaataatcatgttatgttaattttaacatgattgctgacttggataattcattattaccagcagttatgaaggaaatattgctaaaatgatctgggcctaccataaataaatatctccttttctgagctctaagaattatcagaaacaggaaagaatttagaaaaacttgagaaaacctaatccaaaataaaattcacttaagtagaactataaataaatatctagaatctgactggctcatcatgacatcctactcataacataaatcaaaggagatgattaatttccagttagctggaagaaactttggctgtaggtttttattttctacaagaattctggtttgaattatttttgtaagcaggtacattttataaaatgtaagccctactgtaaggtttagcactgggtgtacatatttattaaaaatttttattataacaacttttattaaaatggcctttctgaacactttatttattgatgttgaagtaaggattagaaacatagactcccaagttttaaacacctaaatgtgaataacccatatatacaacaaagtttctgccatctagctttttgaagtctatgggggtcttactcaagtactagtaatttaacttcatcatgaatgaactataatttttaagttatgcccatttataacgttgtttatgactacattgtgagttagaaacaaacttaaaatttggggtatagaacccctcaacaggttagtaatgctggaattcttgatgagcaataatgataaccagagagtgatttcatttacactcatagtagtataaaaagagatacatttccctcttaggcccctgggagaagagcagcttagatttccctactggcaaggtttttaaaaatgaggtaaatgccgtatatgatcaattaccttaattggccaagaaaatgcttcaggtgtctaggggtatcctctgcaacacttgcagaacaaaggtcaataagatccttgcctatgaatacccctcccttttgcgctgttaaatttgcaatgagaagcaaatttacagtaccataactaataaagcagggtacagatataaactactgcatcttttctataaaactgtgattaagaattctacctctcctgtatggctgttactgtactgtactctctgactccttacctaacaatgaatttgttacataatcttctacatgtatgatttgtgccactgatcttaaacctatgattcagtaacttcttaccatataaaaacgataattgctttatttggaaaagaatttaggaatactaaggacaattatttttatagacaaagtaaaaagacagatatttaagaggcataaccaaaaaagcaaaacttgtaaacagagtaaaaatctttaatatttctaaagacatactgtttatctgcttcatatgctttttttaatttcactattccatttctaaattaaagttatgctaaattgagtaagctgtttatcacttaacagctcattttgtctttttcaatatacaaattttaaaaatactacaatatttaactaaggcccaaccgatttccataatgtagcagttaccgtgttcacctcacactaaggcctagagtttgctctgatatgcatttggatgattaatgttatgctgttctttcatgtgaatgtcaagacatggagggtgtttgtaattttatggtaaaattaatccttcttacacataatggtgtcttaaaattgacaaaaaatgagcacttacaattgtatgtctcctcaaatgaaaattctttatctgaaattttaaaagacattgattccacatgtaaggatttttcatctgaagtacaataatgcacaatcagtgttgctcaaactgctttatacttataaacagccatcttaaataagcaacgtattgtgagtactgatatgtatataataaaaattatcaaag

SEQ ID NO: 1093 - protein, 229 aa, Homosapiens; identical to SEQ ID NO: 1085

SEQ ID NO: 1094 - DNA, 4241 bp, Homosapiens
tcccccaggtaagccggtttccccacgccaaggcgcagtcgctcaccacccaaatcgtcgctggggagagacccacccggcgactgcgcgcttcgcactcgagtctgcgttaggaagcctctgaccctttcccgggcccctgcgcgtggaagcctcggacacaactcggagaaccagcgaaccccggcagcacagaattcgaaccgccgcgggagccgttgggacgcgcctacccggtcactgccccgccccggcgcagactgcgtgaggcgccgccgaaggcgcggggcttgccggggatcgtggtcggcgagcgcgcccgagcccactagcggagcccgcccgggactacatttcccacaattaccgccatgatgcccattggtgggggaagccatgggaaccggaggccgtcagggggagaggcgggcggcgctcacgcctggcctgagggggccgagactgaggcggttgcggaataggactgctagccccgcccagagtccctaccctttggagaactgcgcttctctttcggagggagtgttcgccgccgccgcggccgccacctggagtttcttcagactccagatttccctgtcaaccacgaggagtccagagaggaaacgcggagcggagacaacagtacctgacgcctctttcagcccgggatcgccccagcagggatgggcgacaagatctggctgcccttccccgtgctccttctggccgctctgcctccggtgctgctgcctggggcggccggcttcacaccttccctcgatagcgacttcacctttacccttcccgccggccagaaggagtgcttctaccagcccatgcccctgaaggcctcgctggagatcgagtaccaagttttagatggagcaggattagatattgatttccatcttgcctctccagaaggcaaaaccttagtttttgaacaaagaaaatcagatggagttcacactgtagagactgaagttggtgattacatgttctgctttgacaatacattcagcaccatttctgagaaggtgattttctttgaattaatcctggataatatgggagaacaggcacaagaacaagaagattggaagaaatatattactggcacagatatattggatatgaaactggaagacatcctggaccctattataaaaatagcttcagatgtgcaaataagactgcatcttggaatccatcaacagcatcaagtccagactaagcaaaagtgggcacatacaaactctgcttagagcatttgaagctcgtgatcgaaacatacaagaaagcaactttgatagagtcaatttctggtctatggttaatttagtggtcatggtggtggtgtcagccattcaagtttatatgctgaagagtctgtttgaagataagaggaaaagtagaacttaaaactccaaactagagtacgtaacattgaaaaatgaggcataaaaatgcaataaactgttacagtcaagaccattaatggtcttctccaaaatattttgagatataaaagtaggaaacaggtataattttaatgtgaaaattaagtcttcactttctgtgcaagtaatcctgctgatccagttgtacttaagtgtgtaacaggaatattttgcagaatataggtttaactgaatgaagccatattaataactgcattttcctaactttgaaaaattttgcaaatgtcttaggtgatttaaataaatgagtattgggcctaattgcaacaccagtctgtttttaacaggttctattacccagaacttttttgtaaatgcggcagttacaaattaactgtggaagttttcagttttaagttataaatcacctgagaattacctaatgatggattgaataaatctttagactacaaaagcccaacttttctctatttacatatgcatctctcctataatgtaaatagaataatagctttgaaatacaattaggtttttgagatttttataaccaaatacatttcagtgtaacatattagcagaaagcattagtctttgtactttgcttacattcccaaaagctgacattttcacgattcttaaaaacacaaagttacacttactaaaattaggacatgttttctctttgaaatgaagaatatagtttaaaagcttcctcctccatagggacacattttctctaacccttaactaaagtgtaggattttaaaattaaatgtgaggtaaaataagtttatttttaatagtatctgtcaagttaatatctgtcaacagttaataatcatgttatgttaattttaacatgattgctgacttggataattcattattaccagcagttatgaaggaaatattgctaaaatgatctgggcctaccataaataaatatctccttttctgagctctaagaattatcagaaacaggaaagaatttagaaaaacttgagaaaacctaatccaaaataaaattcacttaagtagaactataaataaatatctagaatctgactggctcatcatgacatcctactcataacataaatcaaaggagatgattaatttccagttagctggaagaaactttggctgtaggtttttattttctacaagaattctggtttgaattatttttgtaagcaggtacattttataaaatgtaagccctactgtaaggtttagcactgggtgtacatatttattaaaaatttttattataacaacttttattaaaatggcctttctgaacactttatttattgatgttgaagtaaggattagaaacatagactcccaagttttaaacacctaaatgtgaataacccatatatacaacaaagtttctgccatctagctttttgaagtctatgggggtcttactcaagtactagtaatttaacttcatcatgaatgaactataatttttaagttatgcccatttataacgttgtttatgactacattgtgagttagaaacaaacttaaaatttggggtatagaacccctcaacaggttagtaatgctggaattcttgatgagcaataatgataaccagagagtgatttcatttacactcatagtagtataaaaagagatacatttccctcttaggcccctgggagaagagcagcttagatttccctactggcaaggtttttaaaaatgaggtaaatgccgtatatgatcaattaccttaattggccaagaaaatgcttcaggtgtctaggggtatcctctgcaacacttgcagaacaaaggtcaataagatccttgcctatgaatacccctcccttttgcgctgttaaatttgcaatgagaagcaaatttacagtaccataactaataaagcagggtacagatataaactactgcatcttttctataaaactgtgattaagaattctacctctcctgtatggctgttactgtactgtactctctgactccttacctaacaatgaatttgttacataatcttctacatgtatgatttgtgccactgatcttaaacctatgattcagtaacttcttaccatataaaaacgataattgctttatttggaaaagaatttaggaatactaaggacaattatttttatagacaaagtaaaaagacagatatttaagaggcataaccaaaaaagcaaaacttgtaaacagagtaaaaatctttaatatttctaaagacatactgtttatctgcttcatatgctttttttaatttcactattccatttctaaattaaagttatgctaaattgagtaagctgtttatcacttaacagctcattttgtctttttcaatatacaaattttaaaaatactacaatatttaactaaggcccaaccgatttccataatgtagcagttaccgtgttcacctcacactaaggcctagagtttgctctgatatgcatttggatgattaatgttatgctgttctttcatgtgaatgtcaagacatggagggtgtttgtaattttatggtaaaattaatccttcttacacataatggtgtcttaaaattgacaaaaaatgagcacttacaattgtatgtctcctcaaatgaaaattctttatctgaaattttaaaagacattgattccacatgtaaggatttttcatctgaagtacaataatgcacaatcagtgttgctcaaactgctttatacttataaacagccatcttaaataagcaacgtattgtgagtactgatatgtatataataaaaattatcaaag

SEQ ID NO: 1095 - protein, 193 aa, Homosapiens; identical to SEQ ID NO: 1087

SEQ ID NO: 1096 - DNA, 4166 bp, Homosapiens
tcccccaggtaagccggtttccccacgccaaggcgcagtcgctcaccacccaaatcgtcgctggggagagacccacccggcgactgcgcgcttcgcactcgagtctgcgttaggaagcctctgaccctttcccgggcccctgcgcgtggaagcctcggacacaactcggagaaccagcgaaccccggcagcacagaattcgaaccgccgcgggagccgttgggacgcgcctacccggtcactgccccgccccggcgcagactgcgtgaggcgccgccgaaggcgcggggcttgccggggatcgtggtcggcgagcgcgcccgagcccactagcggagcccgcccgggactacatttcccacaattaccgccatgatgcccattggtgggggaagccatgggaaccggaggccgtcagggggagaggcgggcggcgctcacgcctggcctgagggggccgagactgaggcggttgcggaataggactgctagccccgcccagagtccctaccctttggagaactgcgcttctctttcggagggagtgttcgccgccgccgcggccgccacctggagtttcttcagactccagatttccctgtcaaccacgaggagtccagagaggaaacgcggagcggagacaacagtacctgacgcctctttcagccggcttcacaccttccctcgatagcgacttcacctttacccttcccgccggccagaaggagtgcttctaccagcccatgcccctgaaggcctcgctggagatcgagtaccaagttttagatggagcaggattagatattgatttccatcttgcctctccagaaggcaaaaccttagtttttgaacaaagaaaatcagatggagttcacacgtgtataagaagtaaaaatgggccaggcactgcggttcacgcctataatcccagcactttccgaggccaagtgtagagactgaagttggtgattacatgttctgctttgacaatacattcagcaccatttctgagaaggtgattttctttgaattaatcctggataatatgggagaacaggcacaagaacaagaagattggaagaaatatattactggcacagatatattggatatgaaactggaagacatcctggaatccatcaacagcatcaagtccagactaagcaaaagtgggcacatacaaactctgcttagagcatttgaagctcgtgatcgaaacatacaagaaagcaactttgatagagtcaatttctggtctatggttaatttagtggtcatggtggtggtgtcagccattcaagtttatatgctgaagagtctgtttgaagataagaggaaaagtagaacttaaaactccaaactagagtacgtaacattgaaaaatgaggcataaaaatgcaataaactgttacagtcaagaccattaatggtcttctccaaaatattttgagatataaaagtaggaaacaggtataattttaatgtgaaaattaagtcttcactttctgtgcaagtaatcctgctgatccagttgtacttaagtgtgtaacaggaatattttgcagaatataggtttaactgaatgaagccatattaataactgcattttcctaactttgaaaaattttgcaaatgtcttaggtgatttaaataaatgagtattgggcctaattgcaacaccagtctgtttttaacaggttctattacccagaacttttttgtaaatgcggcagttacaaattaactgtggaagttttcagttttaagttataaatcacctgagaattacctaatgatggattgaataaatctttagactacaaaagcccaacttttctctatttacatatgcatctctcctataatgtaaatagaataatagctttgaaatacaattaggtttttgagatttttataaccaaatacatttcagtgtaacatattagcagaaagcattagtctttgtactttgcttacattcccaaaagctgacattttcacgattcttaaaaacacaaagttacacttactaaaattaggacatgttttctctttgaaatgaagaatatagtttaaaagcttcctcctccatagggacacattttctctaacccttaactaaagtgtaggattttaaaattaaatgtgaggtaaaataagtttatttttaatagtatctgtcaagttaatatctgtcaacagttaataatcatgttatgttaattttaacatgattgctgacttggataattcattattaccagcagttatgaaggaaatattgctaaaatgatctgggcctaccataaataaatatctccttttctgagctctaagaattatcagaaacaggaaagaatttagaaaaacttgagaaaacctaatccaaaataaaattcacttaagtagaactataaataaatatctagaatctgactggctcatcatgacatcctactcataacataaatcaaaggagatgattaatttccagttagctggaagaaactttggctgtaggtttttattttctacaagaattctggtttgaattatttttgtaagcaggtacattttataaaatgtaagccctactgtaaggtttagcactgggtgtacatatttattaaaaatttttattataacaacttttattaaaatggcctttctgaacactttatttattgatgttgaagtaaggattagaaacatagactcccaagttttaaacacctaaatgtgaataacccatatatacaacaaagtttctgccatctagctttttgaagtctatgggggtcttactcaagtactagtaatttaacttcatcatgaatgaactataatttttaagttatgcccatttataacgttgtttatgactacattgtgagttagaaacaaacttaaaatttggggtatagaacccctcaacaggttagtaatgctggaattcttgatgagcaataatgataaccagagagtgatttcatttacactcatagtagtataaaaagagatacatttccctcttaggcccctgggagaagagcagcttagatttccctactggcaaggtttttaaaaatgaggtaaatgccgtatatgatcaattaccttaattggccaagaaaatgcttcaggtgtctaggggtatcctctgcaacacttgcagaacaaaggtcaataagatccttgcctatgaatacccctcccttttgcgctgttaaatttgcaatgagaagcaaatttacagtaccataactaataaagcagggtacagatataaactactgcatcttttctataaaactgtgattaagaattctacctctcctgtatggctgttactgtactgtactctctgactccttacctaacaatgaatttgttacataatcttctacatgtatgatttgtgccactgatcttaaacctatgattcagtaacttcttaccatataaaaacgataattgctttatttggaaaagaatttaggaatactaaggacaattatttttatagacaaagtaaaaagacagatatttaagaggcataaccaaaaaagcaaaacttgtaaacagagtaaaaatctttaatatttctaaagacatactgtttatctgcttcatatgctttttttaatttcactattccatttctaaattaaagttatgctaaattgagtaagctgtttatcacttaacagctcattttgtctttttcaatatacaaattttaaaaatactacaatatttaactaaggcccaaccgatttccataatgtagcagttaccgtgttcacctcacactaaggcctagagtttgctctgatatgcatttggatgattaatgttatgctgttctttcatgtgaatgtcaagacatggagggtgtttgtaattttatggtaaaattaatccttcttacacataatggtgtcttaaaattgacaaaaaatgagcacttacaattgtatgtctcctcaaatgaaaattctttatctgaaattttaaaagacattgattccacatgtaaggatttttcatctgaagtacaataatgcacaatcagtgttgctcaaactgctttatacttataaacagccatcttaaataagcaacgtattgtgagtactgatatgtatataataaaaattatcaaag

SEQ ID NO: 1097 - protein, 125 aa, Homosapiens [sequence omitted]

SEQ ID NO: 1098 - DNA, 3955 bp, Homosapiens
ttgcttgttttctgatttaatatatatattttttgtttttggagggtatccttgagtaattctttgagaatgttttgagtccttggatatctgaaaataactttatttatttattttaaaattttattttagagatgggttttcactgtattgcccaggctggagtgcagtgactactcacaggcactttcatagaacactacaggctttaacgcctagcctcaagtggtcctcccacctcagtctcccaagtagctgggaataccagtgcatgctaccacacctggcaaatggctttatttttgctttcatgtcagtaaatatctttttacttgggaacattgactacatggctccattatttttttccatctaatgttatatgtaagaattctgatgctaatcccaattcttgtattttgcagttctctactacttctgctacttctctttgatagaagattgtactttttaaatcctttggaaaactccatattttatggtcttttttcatttatcctgcttcacatttattagatcctttctgtctgaagattttcatcttttgaaacaggaatttttcttctttgtgggttttttgtttttgtttgacgtggagtctcactcattcttttgcccaggctgaagtacggtggcatgatctctgctcactgcaacctccgcctcctgggttcaagcagttctcctgcctcggcttcccaagtagctgggattacaggtgtgtgccaccatggctggctcatttttttatttttagtagagatggggttttgccatgttggccaggctggtctcaaactcctgacctcaagtgaaccacccgcctcggcctcccaaagtgctgggattacaggcatgagccaccgcacccagcctatagattttaattgttacatgtcttcttcatttcattgggatttaaagaagaaaattatgtacatttagccagccatttgaaaccagttctgttgaacaataaaagcacaggagtaggtaattttttatatcatcacattaaaactaccatgaaaaataaaatggagtgttaagaaaaagagtagccattgagttaggtttttttttttttcagttaaaaggctgtactatatagtgttccaaatagattctttttaaaattttagcaaacactataaatacagaagagaaaacgcagggaaagaggaagacaggaagagaagtttgcagacagatctacagggaaaacactgagacactttaatttgtataggatgataaaaagatgcatttattaaatatttgcatctgtgacaaaaaatcaaaatatggataataacattgttaggaccagtacccttggagttataaaaatagtgaacaaaattttcatccatcttatcatctatgttggatatgccacataggtgtccataaaggtacctacaagtttatgctaagtgaatcctacaaaaagatgcttagattccagagaacgtctcataagtgccaaagaggataggtgtgcaatctgtagtaatacaagagagagtgtgagagaactggacaggaggattcagaggagatttcaaaggacttgacccatttatgcaggaggttgcaattttttgaattgcaaaatgagaccttggcaatgaccttgagcagtaggatataaataactcctacatgcttagtgttccactaatggaacacaaggcataaatgggttaaactggctcttaaagaatgaatacaattggatgagtacctattcaggagaatggaacagaaatagaggcaacacagcatacttattaaaaattattctagaggcagattgctgagttcaaattttgaccatgtcacttatttgctgtatcactttggtttattttttacttattttttttaatgtggcctagatgaattaatgctgtgtcactttggaaaaatgatttctctgtgcctcagtttttgttgtttttttactaaaatgagaataataggacctaccttttagagttgttataaggaataaattaatccacataaagcatttaagacaatttatggcatcaactataattgttagttgccatgattatcatcatcatcttcatagaaggacattttggaattacaaatggatagattgtattcattggctagtaaatgaaccggcctgcttcgaatacacaattcatactgggaagtagtagaagaatgtgttgaagtcagttggagtccacaccatggtggtcttgaattccaggctaagaaacagttaattattattcttttattgaagaggaaacaaaaaagttatatacaatgtctgaaattgcctaagtctttttttgggggggcaggggaggcagggggggcggggtaccgagtctcactgtcgcccaggctggagtgcagtggcacaatctcggctcactgcaacgtccacctcctgggttcaagcgattctcccgcctcagcctcctgagtagctgggatttttctatttttagtagagacagggttacaccatgttggtcaggctggtctcgaactcctgacctcatgatccacctgcctcggcctcccaaagtgctgggattacaggcgtgagccaccgcgccctgccaattgcctaagttttaactaaaacgcccagcatttgaactgctctttgtgtttccgtccattctacagggattctgaatgaaaccactattttaggaagatttatttcagtaatatccataaggcctaaatttaggtgatggtgagagaaatgggtaaggaagggacaagttccaaaaatgaatggaattgaactagatgatcttttggttcttttctagctcagacatcactgatgactttcttacctctctagcttagataatctttacatcatatgatctactgtatataattttttatttccagaatttgtaatatatgtttttctcatgtatgcttttctacaggttttagatggagcaggattagatattgatttccatcttgcctctccagaaggcaaaaccttagtttttgaacaaagaaaatcagatggagttcacactgtagagactgaagttggtgattacatgttctgctttgacaatacattcagcaccatttctgagaaggtgattttctttgaattaatcctggataatatgggagaacaggcacaagaacaagaagattggaagaaatatattactggcacagatatattggatatgaaactggaagacatcctggaatccatcaacagcatcaagtccagactaagcaaaagtgggcacatacaaactctgcttagagcatttgaagctcgtgatcgaaacatacaagaaagcaactttgatagagtcaatttctggtctatggttaatttagtggtcatggtggtggtgtcagccattcaagtttatatgctgaagagtctgtttgaagataagaggaaaagtagaacttaaaactccaaactagagtacgtaacattgaaaaatgaggcataaaaatgcaataaactgttacagtcaagaccattaatggtcttctccaaaatattttgagatataaaagtaggaaacaggtataattttaatgtgaaaattaagtcttcactttctgtgcaagtaatcctgctgatccagttgtacttaagtgtgtaacaggaatattttgcagaatataggtttaactgaatgaagccatattaataactgcattttcctaactttgaaaaattttgcaaatgtcttaggtgatttaaataaatgagtattgggcctaattgcaacaccagtctgtttttaacaggttctattacccagaacttttttgtaaatgcggcagttacaaattaactgtggaagttttcagttttaagttataaatcacctgagaattacctaatgatggattgaataaatctttagactac

SEQ ID NO: 1099 - protein, 172 aa, Homosapiens
MYAFLQVLDGAGLDIDFHLASPEGKTLVFEQRKSDGVHTVETEVGDYMFCFDNTFSTISEKVIFFELILDNMGEQAQEQEDWKKYITGTDILDMKLEDILESINSIKSRLSKSGHIQTLLRAFEARDRNIQESNFDRVNFWSMVNLVVMVVVSAIQVYMLKSLFEDKRKSRT

SEQ ID NO: 1100 - DNA, 1846 bp, Homosapiens
tcccccaggtaagccggtttccccacgccaaggcgcagtcgctcaccacccaaatcgtcgctggggagagacccacccggcgactgcgcgcttcgcactcgagtctgcgttaggaagcctctgaccctttcccgggcccctgcgcgtggaagcctcggacacaactcggagaaccagcgaaccccggcagcacagaattcgaaccgccgcgggagccgttgggacgcgcctacccggtcactgccccgccccggcgcagactgcgtgaggcgccgccgaaggcgcggggcttgccggggatcgtggtcggcgagcgcgcccgagcccactagcggagcccgcccgggactacatttcccacaattaccgccatgatgcccattggtgggggaagccatgggaaccggaggccgtcagggggagaggcgggcggcgctcacgcctggcctgagggggccgagactgaggcggttgcggaataggactgctagccccgcccagagtccctaccctttggagaactgcgcttctctttcggagggagtgttcgccgccgccgcggccgccacctggagtttcttcagactccagatttccctgtcaaccacgaggagtccagagaggaaacgcggagcggagacaacagtacctgacgcctctttcagcccgggatcgccccagcagggatgggcgacaagatctggctgcccttccccgtgctccttctggccgctctgcctccggtgctgctgcctggggcggccggcttcacaccttccctcgatagcgacttcacctttacccttcccgccggccagaaggagtgcttctaccagcccatgcccctgaaggcctcgctggagatcgagtaccaagttttagatggagcaggattagatattgatttccatcttgcctctccagaaggcaaaaccttagtttttgaacaaagaaaatcagatggagttcacactgtagagactgaagttggtgattacatgttctgctttgacaatacattcagcaccatttctgagaaggtgattttctttgaattaatcctggataatatgggagaacaggcacaagaacaagaagattggaagaaatatattactggcacagatatattggatatgaaactggaagacatcctggaatccatcaacagcatcaagtccagactaagcaaaagtgggcacatacaaactctgcttagagcatttgaagctcgtgatcgaaacatacaagaaagcaactttgatagagtcaatttctggtctatggttaatttagtggtcatggtggtggtgtcagccattcaagtttatatgctgaagagtctgtttgaagataagaggaaaagtagaacttaaaactccaaactagagtacgtaacattgaaaaatgaggcataaaaatgcaataaactgttacagtcaagaccattaatggtcttctccaaaatattttgagatataaaagtaggaaacaggtataattttaatgtgaaaattaagtcttcactttctgtgcaagtaatcctgctgatccagttgtacttaagtgtgtaacaggaatattttgcagaatataggtttaactgaatgaagccatattaataactgcattttcctaactttgaaaaattttgcaaatgtcttaggtgatttaaataaatgagtattgggcctaattgcaacaccagtctgtttttaacaggttctattacccagaacttttttgtaaatgcggcagttacaaattaactgtggaagttttcagttttaagttataaatcacctgagaattacctaatgatggattgaataaatctttagactac

SEQ ID NO: 1101 - protein, 229 aa, Homosapiens; identical to SEQ ID NO: 1085

SEQ ID NO: 1102 - DNA, 1771 bp, Homosapiens
tcccccaggtaagccggtttccccacgccaaggcgcagtcgctcaccacccaaatcgtcgctggggagagacccacccggcgactgcgcgcttcgcactcgagtctgcgttaggaagcctctgaccctttcccgggcccctgcgcgtggaagcctcggacacaactcggagaaccagcgaaccccggcagcacagaattcgaaccgccgcgggagccgttgggacgcgcctacccggtcactgccccgccccggcgcagactgcgtgaggcgccgccgaaggcgcggggcttgccggggatcgtggtcggcgagcgcgcccgagcccactagcggagcccgcccgggactacatttcccacaattaccgccatgatgcccattggtgggggaagccatgggaaccggaggccgtcagggggagaggcgggcggcgctcacgcctggcctgagggggccgagactgaggcggttgcggaataggactgctagccccgcccagagtccctaccctttggagaactgcgcttctctttcggagggagtgttcgccgccgccgcggccgccacctggagtttcttcagactccagatttccctgtcaaccacgaggagtccagagaggaaacgcggagcggagacaacagtacctgacgcctctttcagcccgggatcgccccagcagggatgggcgacaagatctggctgcccttccccgtgctccttctggccgctctgcctccggtgctgctgcctggggcggccggcttcacaccttccctcgatagcgacttcacctttacccttcccgccggccagaaggagtgcttctaccagcccatgcccctgaaggcctcgctggagatcgagtaccaagttttagatggagcaggattagatattgatttccatcttgcctctccagaaggcaaaaccttagtttttgaacaaagaaaatcagatggagttcacacgtgtataagaagtaaaaatgggccaggcactgcggttcacgcctataatcccagcactttccgaggccaagtgtagagactgaagttggtgattacatgttctgctttgacaatacattcagcaccatttctgagaaggtgattttctttgaattaatcctggataatatgggagaacaggcacaagaacaagaagattggaagaaatatattactggcacagatatattggatatgaaactggaagacatcctggaatccatcaacagcatcaagtccagactaagcaaaagtgggcacatacaaactctgcttagagcatttgaagctcgtgatcgaaacatacaagaaagcaactttgatagagtcaatttctggtctatggttaatttagtggtcatggtggtggtgtcagccattcaagtttatatgctgaagagtctgtttgaagataagaggaaaagtagaacttaaaactccaaactagagtacgtaacattgaaaaatgaggcataaaaatgcaataaactgttacagtcaagaccattaatggtcttctccaaaatattttgagatataaaagtaggaaacaggtataattttaatgtgaaaattaagtcttcactttctgtgcaagtaatcctgctgatccagttgtacttaagtgtgtaacaggaatattttgcagaatataggtttaactgaatgaagccatattaataactgcattttcctaactttgaaaaattttgcaaatgtcttaggtgatttaaataaatgagtattgggcctaattgc

SEQ ID NO: 1103 - protein, 125 aa, Homosapiens [sequence omitted]

SEQ ID NO: 1104 - DNA, 1700 bp, Homosapiens
tcccccaggtaagccggtttccccacgccaaggcgcagtcgctcaccacccaaatcgtcgctggggagagacccacccggcgactgcgcgcttcgcactcgagtctgcgttaggaagcctctgaccctttcccgggcccctgcgcgtggaagcctcggacacaactcggagaaccagcgaaccccggcagcacagaattcgaaccgccgcgggagccgttgggacgcgcctacccggtcactgccccgccccggcgcagactgcgtgaggcgccgccgaaggcgcggggcttgccggggatcgtggtcggcgagcgcgcccgagcccactagcggagcccgcccgggactacatttcccacaattaccgccatgatgcccattggtgggggaagccatgggaaccggaggccgtcagggggagaggcgggcggcgctcacgcctggcctgagggggccgagactgaggcggttgcggaataggactgctagccccgcccagagtccctaccctttggagaactgcgcttctctttcggagggagtgttcgccgccgccgcggccgccacctggagtttcttcagactccagatttccctgtcaaccacgaggagtccagagaggaaacgcggagcggagacaacagtacctgacgcctctttcagcccgggatcgccccagcagggatgggcgacaagatctggctgcccttccccgtgctccttctggccgctctgcctccggtgctgctgcctggggcggccggcttcacaccttccctcgatagcgacttcacctttacccttcccgccggccagaaggagtgcttctaccagcccatgcccctgaaggcctcgctggagatcgagtaccaagttttagatggagcaggattagatattgatttccatcttgcctctccagaaggcaaaaccttagtttttgaacaaagaaaatcagatggagttcacactgtagagactgaagttggtgattacatgttctgctttgacaatacattcagcaccatttctgagaaggtgattttctttgaattaatcctggataatatgggagaacaggcacaagaacaagaagattggaagaaatatattactggcacagatatattggatatgaaactggaagacatcctggaatccatcaacagcatcaagtccagactaagcaaaagtgggcacatacaaactctgcttagagcatttgaagctcgtgatcgaaacatacaagaaagcaactttgatagagtcaatttctggtctatggttaatttagtggtcatggtggtggtgtcagccattcaagtttatatgctgaagagtctgtttgaagataagaggaaaagtagaacttaaaactccaaactagagtacgtaacattgaaaaatgaggcataaaaatgcaataaactgttacagtcaagaccattaatggtcttctccaaaatattttgagatataaaagtaggaaacaggtataattttaatgtgaaaattaagtcttcactttctgtgcaagtaatcctgctgatccagttgtacttaagtgtgtaacaggaatattttgcagaatataggtttaactgaatgaagccatattaataactgcattttcctaactttgaaaaattttgcaaatgtcttaggtgatttaaataaatgagtattgggcctaattgc

SEQ ID NO: 1105 - protein, 229 aa, Homosapiens; identical to SEQ ID NO: 1085

SEQ ID NO: 1106 - DNA, 1749 bp, Homosapiens
tcccccaggtaagccggtttccccacgccaaggcgcagtcgctcaccacccaaatcgtcgctggggagagacccacccggcgactgcgcgcttcgcactcgagtctgcgttaggaagcctctgaccctttcccgggcccctgcgcgtggaagcctcggacacaactcggagaaccagcgaaccccggcagcacagaattcgaaccgccgcgggagccgttgggacgcgcctacccggtcactgccccgccccggcgcagactgcgtgaggcgccgccgaaggcgcggggcttgccggggatcgtggtcggcgagcgcgcccgagcccactagcggagcccgcccgggactacatttcccacaattaccgccatgatgcccattggtgggggaagccatgggaaccggaggccgtcagggggagaggcgggcggcgctcacgcctggcctgagggggccgagactgaggcggttgcggaataggactgctagccccgcccagagtccctaccctttggagaactgcgcttctctttcggagggagtgttcgccgccgccgcggccgccacctggagtttcttcagactccagatttccctgtcaaccacgaggagtccagagaggaaacgcggagcggagacaacagtacctgacgcctctttcagcccgggatcgccccagcagggatgggcgacaagatctggctgcccttccccgtgctccttctggccgctctgcctccggtgctgctgcctggggcggccggcttcacaccttccctcgatagcgacttcacctttacccttcccgccggccagaaggagtgcttctaccagcccatgcccctgaaggcctcgctggagatcgagtaccaagttttagatggagcaggattagatattgatttccatcttgcctctccagaaggcaaaaccttagtttttgaacaaagaaaatcagatggagttcacactgtagagactgaagttggtgattacatgttctgctttgacaatacattcagcaccatttctgagaaggtgattttctttgaattaatcctggataatatgggagaacaggcacaagaacaagaagattggaagaaatatattactggcacagatatattggatatgaaactggaagacatcctggaccctattataaaaatagcttcagatgtgcaaataagactgcatcttggaatccatcaacagcatcaagtccagactaagcaaaagtgggcacatacaaactctgcttagagcatttgaagctcgtgatcgaaacatacaagaaagcaactttgatagagtcaatttctggtctatggttaatttagtggtcatggtggtggtgtcagccattcaagtttatatgctgaagagtctgtttgaagataagaggaaaagtagaacttaaaactccaaactagagtacgtaacattgaaaaatgaggcataaaaatgcaataaactgttacagtcaagaccattaatggtcttctccaaaatattttgagatataaaagtaggaaacaggtataattttaatgtgaaaattaagtcttcactttctgtgcaagtaatcctgctgatccagttgtacttaagtgtgtaacaggaatattttgcagaatataggtttaactgaatgaagccatattaataactgcattttcctaactttgaaaaattttgcaaatgtcttaggtgatttaaataaatgagtattgggcctaattgc

SEQ ID NO: 1107 - protein, 193 aa, Homosapiens; identical to SEQ ID NO: 1087

SEQ ID NO: 1108 - DNA, 1987 bp, Homosapiens
tcccccaggtaagccggtttccccacgccaaggcgcagtcgctcaccacccaaatcgtcgctggggagagacccacccggcgactgcgcgcttcgcactcgagtctgcgttaggaagcctctgaccctttcccgggcccctgcgcgtggaagcctcggacacaactcggagaaccagcgaaccccggcagcacagaattcgaaccgccgcgggagccgttgggacgcgcctacccggtcactgccccgccccggcgcagactgcgtgaggcgccgccgaaggcgcggggcttgccggggatcgtggtcggcgagcgcgcccgagcccactagcggagcccgcccgggactacatttcccacaattaccgccatgatgcccattggtgggggaagccatgggaaccggaggccgtcagggggagaggcgggcggcgctcacgcctggcctgagggggccgagactgaggcggttgcggaataggactgctagccccgcccagagtccctaccctttggagaactgcgcttctctttcggagggagtgttcgccgccgccgcggccgccacctggagtttcttcagactccagatttccctgtcaaccacgaggagtccagagaggaaacgcggagcggagacaacagtacctgacgcctctttcagcccgggatcgccccagcagggatgggcgacaagatctggctgcccttccccgtgctccttctggccgctctgcctccggtgctgctgcctggggcggccggcttcacaccttccctcgatagcgacttcacctttacccttcccgccggccagaaggagtgcttctaccagcccatgcccctgaaggcctcgctggagatcgagtaccaagttttagatggagcaggattagatattgatttccatcttgcctctccagaaggcaaaaccttagtttttgaacaaagaaaatcagatggagttcacacgtgtataagaagtaaaaatgggccaggcactgcggttcacgcctataatcccagcactttccgaggccaagtgtagagactgaagttggtgattacatgttctgctttgacaatacattcagcaccatttctgagaaggtgattttctttgaattaatcctggataatatgggagaacaggcacaagaacaagaagattggaagaaatatattactggcacagatatattggatatgaaactggaagacatcctggtcagtatggtcttctaataaaataaaaattattaacagccagaggccttactatggtaataagttactgaactaagcattttatctgcattatccaggaaaatctgtttctaatattttatttttgccataaatactttgacctcaagtatcagcttaattttattttatattaatatagcccttttatagttttcaaataacttatcttccaggaccctattataaaaatagcttcagatgtgcaaataagactgcatcttggtaagtttgttttataaatgtgcagttagaatttttaaattataaatagattatgcttctgattatacagcaggcatatgaaaagtaaaatgttttctaatttcacaactattttgtggtattaaaacattgggtgttttactgaatactaaattgttcagataaacatacaaagaaggaaatattataaacacatgcattatgtaataggtaaatacctaaagttatatcaattgggtttttaaaaatgaaatcatttgccaggcatggtagcaggtacctgtaatcccagctactcagaaggttagggggaggatcatttgagcccagttcaaggctgcagtgaaccatggtcacacatataaatagatactacactccaatatagcaagaccccatctctaaaaacttaatcatttgaccaggcacagtctcaggttgcaatgagccgagattgtgcctaggcaaactccatcccccgacaaaaaaaaaaaa

SEQ ID NO: 1109 - protein, 120 aa, Homosapiens
MGDKIWLPFPVLLLAALPPVLLPGAAGFTPSLDSDFTFTLPAGQKECFYQPMPLKASLEIEYQVLDGAGLDIDFHLASPEGKTLVFEQRKSDGVHTCIRSKNGPGTAVHAYNPSTFRGQV

SEQ ID NO: 1110 - DNA, 1198 bp, Homosapiens
tcccccaggtaagccggtttccccacgccaaggcgcagtcgctcaccacccaaatcgtcgctggggagagacccacccggcgactgcgcgcttcgcactcgagtctgcgttaggaagcctctgaccctttcccgggcccctgcgcgtggaagcctcggacacaactcggagaaccagcgaaccccggcagcacagaattcgaaccgccgcgggagccgttgggacgcgcctacccggtcactgccccgccccggcgcagactgcgtgaggcgccgccgaaggcgcggggcttgccggggatcgtggtcggcgagcgcgcccgagcccactagcggagcccgcccgggactacatttcccacaattaccgccatgatgcccattggtgggggaagccatgggaaccggaggccgtcagggggagaggcgggcggcgctcacgcctggcctgagggggccgagactgaggcggttgcggaataggactgctagccccgcccagagtccctaccctttggagaactgcgcttctctttcggagggagtgttcgccgccgccgcggccgccacctggagtttcttcagactccagatttccctgtcaaccacgaggagtccagagaggaaacgcggagcggagacaacagtacctgacgcctctttcagcccgggatcgccccagcagggatgggcgacaagatctggctgcccttccccgtgctccttctggccgctctgcctccggtgctgctgcctggggcggccggcttcacaccttccctcgatagcgacttcacctttacccttcccgccggccagaaggagtgcttctaccagcccatgcccctgaaggcctcgctggagatcgagtaccaagttttagatggagcaggattagatattgatttccatcttgcctctccagaaggcaaaaccttagtttttgaacaaagaaaatcagatggagttcacactgtagagactgaagttggtgattacatgttctgctttgacaatacattcagcaccatttctgagaaggtgattttctttgaattaatcctggataatatgggagaacaggcacaagaacaagaagattggaagaaatatattactggcacagatatattggatatgaaactggaagacatcctggtcagtatggtcttctaataaaataaaaattattaacagcc

SEQ ID NO: 1111 - protein, 162 aa, Homosapiens
MGDKIWLPFPVLLLAALPPVLLPGAAGFTPSLDSDFTFTLPAGQKECFYQPMPLKASLEIEYQVLDGAGLDIDFHLASPEGKTLVFEQRKSDGVHTVETEVGDYMFCFDNTFSTISEKVIFFELILDNMGEQAQEQEDWKKYITGTDILDMKLEDILVSMVF

SEQ ID NO: 1112 - DNA, 603 bp, Homosapiens
gcggagcgggctggcttcctgaacggccctcgcctcttcaccaccagggccgtccaccagaagtttctaaacgggtgagaggcgacaacgcagtgcagctgggttaaaggaaggaggctggtttatcctccgcacttacttggtactcgatctccagcgaggccttcaggggcatgggctggtagaagcactccttctggccggcgggaagggtaaaggtgaagtcgctatcgagggaaggtgtgaagccggccgccccaggcagcagcaccggaggcagagcggccagaaggagcacggggaagggcagccagatcttgtcgcccatccctgctggggcgatcccgggctgaaagaggcgtcaggtactgttgtctccgctccgcgtttcctctctggactcctcgtggttgacagggaaatctggagtctgaagaaactccaggtggcggccgcggcggcggcgaacactccctccgaaagagaagcgcagttctccaaaggaaatggaatctagttcatcagactactataataaagacaatgaagaggaaagtttgcttgcaaatgttgcttccttaagacatgaactgaagataacag

SEQ ID NO: 1113 - protein, 31 aa, Homosapiens
MESSSSDYYNKDNEEESLLANVASLRHELKI

SEQ ID NO: 1114 - DNA, 4320 bp, Homosapiens
cccgcggcggttcgaattctgtgctgccggggttcgctggttctccgagttgtgtccgaggcttccacgcgcaggggcccgggaaagggtcagaggcttcctaacgcagactcgagtgcgaagcgcgcagtcgccgggtgggtctctccccagcgacgatttgggtgaaatggaatctagttcatcagactactataataaagacaatgaagaggaaagtttgcttgcaaatgttgcttccttaagacatgaactgaagataacagaatggagtttgcagagtttaggggaagagttatccagtgttagtccaagtgaaaattctgattatgcccctaatccttcaaggtctgaaaagctaattttggatgttcagcctagccaccctggacttttgaattattcaccttatgaaaacgtctgtaaaatatctggtagcagcactgattttcaaaaaaagccaagagataagatgttttcatcttctgcccctgtggatcaggagattaaaagccttcgagagaaactaaataaacttaggcaacagaatgcttgtttggtcacacagaatcattccttaatgactaaatttgaatctattcactttgaattaacacagtcaagagcaaaagtttctatgcttgagtctgctcaacagcaggcagccagtgtcccaatcttagaagaacagattataaatttggaagcagaggtttcagctcaagataaagttttgagagaggcagaaaataagctggaacagagccagaaaatggtaattgaaaaggaacagagtttgcaggagtccaaagaggaatgtataaaattaaaggtggacttacttgaacaaaccaaacaaggaaaaagagctgaacgacaaaggaatgaagcactatataatgccgaagagctgagtaaagctttccaacaatataaaaaaaaagtggctgaaaaactggaaaaggttcaagctgaagaagaaatattagagagaaatctaactaactgtgaaaaagaaaataaaaggctacaagaaaggtgtggtctatataaaagtgaacttgaaattctgaaagagaaattaaggcagttaaaagaagaaaataacaacggaaaagaaaaattaaggatcatggcagtgaaaaattcagaagtcatggcacaactaactgaatctagacaaagtattttgaagctagagagtgagttagagaacaaagacgaaatacttagagacaaattttctttaatgaatgaaaaccgagaattaaaggtccgtgttgcagcacagaatgagcgactagatttatgtcaacaagaaattgaaagttcaagggtagaactaagaagtttggaaaagattatatcccagttgccattaaaaagagaattatttggctttaaatcatatctttctaaataccagatgagtagcttctcaaacaaggaagaccgttgcattggctgctgtgaggcaaataaattggtgatttcggaattgagaattaagcttgcaataaaagaggcagaaattcaaaagcttcatgcaaacctgactgcaaatcagttatctcagagtcttattacttgtaatgacagccaagaaagtagcaaattaagtagtttagaaacagaacctgtaaagctaggtggtcatcaagtagcagaaagcgtaaaagatcaaaatcaacatactatgaacaagcaatatgaaaaagagaggcaaagacttgttactggaatagaagaactacgtactaagctgatacaaatagaagctgaaaattctgatttgaaggttaacatggctcacagaactagtcagtttcagctgattcaagaggagctgctagagaaagcttcaaactccagcaaactggaaagtgaaatgacaaagaaatgttctcaacttttaactcttgagaaacagctggaagaaaagatagttgcttattcctctattgctgcaaaaaatgcagaactagaacaggagcttatggaaaagaatgaaaagataaggagtctagaaaccaatattaatacagagcatgagaaaatttgtttagcctttgaaaaagcaaagaaaattcacttggaacagcataaagaaatggaaaagcagattgaaagacttgaagctcaactagagaaaaaggaccaacaatttaaagaacaagaaaagactatgtccatgttgcaacaagatataatatgcaaacaacatcatcttgaatcactagatagactcttgacggaaagcaaaggggaaatgaaaaaggaaaatatgaagaaagatgaagctttaaaagcattacagaaccaagtatctgaagaaacaatcaaggctagcaactagattcagcattggaaatttgtaaggaagaacttgtcttgcatttgaatcaattggaaggaaataaggaaaagtttgaaaaacagttaaagaagaaatctgaagaggtatattgtttacagaaagagctaaagataaaaaatcacagtcttcaagagacttctgagcaaaacgttattctacagcatactcttcagcaacagcagcaaatgttacaacaagagacaattagaaatggagagctagaagatactcaaactaaacttgaaaaacaggtgtcaaaactggaacaagaacttcaaaaacaaagggaaagttcagctgaaaagttgagaaaaatggaggagaaatgtgaatcagctgcacatgaagcagatttgaaaaggcaaaaagtgattgagcttactggcactgccaggcaagtaaagattgagatggatcagtacaaagaagagctgtctaaaatggaaaaggaaataatgcacctaaaacgagatggagaaaataaagcaatgcacctctctcaattagatatgatcttagatcagacaaagacagagctagaaaagaaaacaaatgctgtaaaggagttagaaaagttacagcacagtactgaaactgaactaacagaagccttgcaaaaacgggaagtacttgagactgaactacaaaatgctcatggagaattaaaaagtactttaagacaactccaggaattgagagatgtactacagaaggctcaattatcattagaggaaaaatacactactataaaggatctcacagctgaacttagagaatgcaagatggagattgaagacaaaaagcaggagctccttgaaatggatcaggcacttaaagagagaaattgggaactaaagcaaagagcagctcaggttacacatttggatatgactattcgtgagcacagaggagaaatggaacaaaaaataattaaattagaaggtactctggagaaatcagaattggaacttaaagaatgtaacaaacagatagaaagtctgaatgacaaattacaaaatgctaaagaacagcttcgagaaaaagagtttataatgctacaaaatgaacaggagataagtcaactgaaaaaagaaattgaaagaacacaacaaaggatgaaagaaatggagagtgttatgaaagagcaagaacagtacattgccactcagtacaaggaggccatagatttggggcaagaattgaggctgacccgggagcaggtgcagaactctcatacagaattggcagaggctcgtcatcagcaagtccaagcacagagagaaatagaaaggctctctagtgaactggaggatatgaagcaactctctaaagagaaagatgctcatggaaaccatttagctgaagaactgggggcttctaaagtacgtgaagctcatttagaagcaagaatgcaagcagaaatcaagaaattgtcagcagaagtagaatctctcaaagaagcttatcatatggagatgatttcacatcaagagaaccatgcaaagtggaagatttctgctgactctcaaaagtcttctgttcagcaactaaacgaacagttagagaaggcaaaattggaattagaagaagctcaggatactgtaagcaatttgcatcaacaagtccaagataggaatgaagtaattgaagctgcaaatgaagcattacttactaaaggagaaaatgtgtaattcaaagaagatactgatgtgttgaaaaaatggaatttttggtactgtgctgtttacttattatatgtagctcatacttcatagaagctgttattttgcttttgaataaattttatatttcaatattttaaaagaaagcccttctaaaacttaattatatttttaaagaaaatttattattttatttattgttttttggcttaaacttgctgctttcttttgctttttatataaaaatcattgttaaaatgc

SEQ ID NO: 1115 - protein, 728 aa, Homosapiens
MESSSSDYYNKDNEEESLLANVASLRHELKITEWSLQSLGEELSSVSPSENSDYAPNPSRSEKLILDVQPSHPGLLNYSPYENVCKISGSSTDFQKKPRDKMFSSSAPVDQEIKSLREKLNKLRQQNACLVTQNHSLMTKFESIHFELTQSRAKVSMLESAQQQAASVPILEEQIINLEAEVSAQDKVLREAENKLEQSQKMVIEKEQSLQESKEECIKLKVDLLEQTKQGKRAERQRNEALYNAEELSKAFQQYKKKVAEKLEKVQAEEEILERNLTNCEKENKRLQERCGLYKSELEILKEKLRQLKEENNNGKEKLRIMAVKNSEVMAQLTESRQSILKLESELENKDEILRDKFSLMNENRELKVRVAAQNERLDLCQQEIESSRVELRSLEKIISQLPLKRELFGFKSYLSKYQMSSFSNKEDRCIGCCEANKLVISELRIKLAIKEAEIQKLHANLTANQLSQSLITCNDSQESSKLSSLETEPVKLGGHQVAESVKDQNQHTMNKQYEKERQRLVTGIEELRTKLIQIEAENSDLKVNMAHRTSQFQLIQEELLEKASNSSKLESEMTKKCSQLLTLEKQLEEKIVAYSSIAAKNAELEQELMEKNEKIRSLETNINTEHEKICLAFEKAKKIHLEQHKEMEKQIERLEAQLEKKDQQFKEQEKTMSMLQQDIICKQHHLESLDRLLTESKGEMKKENMKKDEALKALQNQVSEETIKASN

SEQ ID NO: 1116 - DNA, 4108 bp, Homosapiens
tccgagttgtgtccgaggcttccacgcgcaggggcccgggaaagggtcagaggcttcctaacgcagactcgagtgcgaagcgcgcagtcgccgggtgggtctctccccagcgacgatttgggtgaaatggaatctagttcatcagactactataataaagacaatgaagaggaaagtttgcttgcaaatgttgcttccttaagacatgaactgaagataacagaatggagtttgcagagtttaggggaagagttatccagatgttttcatcttctgcccctgtggatcaggagattaaaagccttcgagagaaactaaataaacttaggcaacagaatgcttgtttggtcacacagaatcattccttaatgactaaatttgaatctattcactttgaattaacacagtcaagagcaaaagtttctatgcttgagtctgctcaacagcaggcagccagtgtcccaatcttagaagaacagattataaatttggaagcagaggtttcagctcaagataaagttttgagagaggcagaaaataagctggaacagagccagaaaatggtaattgaaaaggaacagagtttgcaggagtccaaagaggaatgtataaaattaaaggtggacttacttgaacaaaccaaacaaggaaaaagagctgaacgacaaaggaatgaagcactatataatgccgaagagctgagtaaagctttccaacaatataaaaaaaaagtggctgaaaaactggaaaaggttcaagctgaagaagaaatattagagagaaatctaactaactgtgaaaaagaaaataaaaggctacaagaaaggtgtggtctatataaaagtgaacttgaaattctgaaagagaaattaaggcagttaaaagaagaaaataacaacggaaaagaaaaattaaggatcatggcagtgaaaaattcagaagtcatggcacaactaactgaatctagacaaagtattttgaagctagagagtgagttagagaacaaagacgaaatacttagagacaaattttctttaatgaatgaaaaccgagaattaaaggtccgtgttgcagcacagaatgagcgactagatttatgtcaacaagaaattgaaagttcaagggtagaactaagaagtttggaaaagattatatcccagttgccattaaaaagagaattatttggctttaaatcatatctttctaaataccagatgagtagcttctcaaacaaggaagaccgttgcattggctgctgtgaggcaaataaattggtgatttcggaattgagaattaagcttgcaataaaagaggcagaaattcaaaagcttcatgcaaacctgactgcaaatcagttatctcagagtcttattacttgtaatgacagccaagaaagtagcaaattaagtagtttagaaacagaacctgtaaagctaggtggtcatcaagtagcagaaagcgtaaaagatcaaaatcaacatactatgaacaagcaatatgaaaaagagaggcaaagacttgttactggaatagaagaactacgtactaagctgatacaaatagaagctgaaaattctgatttgaaggttaacatggctcacagaactagtcagtttcagctgattcaagaggagctgctagagaaagcttcaaactccagcaaactggaaagtgaaatgacaaagaaatgttctcaacttttaactcttgagaaacagctggaagaaaagatagttgcttattcctctattgctgcaaaaaatgcagaactagaacaggagcttatggaaaagaatgaaaagataaggagtctagaaaccaatattaatacagagcatgagaaaatttgtttagcctttgaaaaagcaaagaaaattcacttggaacagcataaagaaatggaaaagcagattgaaagacttgaagctcaactagagaaaaaggaccaacaatttaaagaacaagaaaagactatgtccatgttgcaacaagatataatatgcaaacaacatcatcttgaatcactagatagactcttgacggaaagcaaaggggaaatgaaaaaggaaaatatgaagaaagatgaagctttaaaagcattacagaaccaagtatctgaagaaacaatcaaggctagcaactagattcagcattggaaatttgtaaggaagaacttgtcttgcatttgaatcaattggaaggaaataaggaaaagtttgaaaaacagttaaagaagaaatctgaagaggtatattgtttacagaaagagctaaagataaaaaatcacagtcttcaagagacttctgagcaaaacgttattctacagcatactcttcagcaacagcagcaaatgttacaacaagagacaattagaaatggagagctagaagatactcaaactaaacttgaaaaacaggtgtcaaaactggaacaagaacttcaaaaacaaagggaaagttcagctgaaaagttgagaaaaatggaggagaaatgtgaatcagctgcacatgaagcagatttgaaaaggcaaaaagtgattgagcttactggcactgccaggcaagtaaagattgagatggatcagtacaaagaagagctgtctaaaatggaaaaggaaataatgcacctaaaacgagatggagaaaataaagcaatgcacctctctcaattagatatgatcttagatcagacaaagacagagctagaaaagaaaacaaatgctgtaaaggagttagaaaagttacagcacagtactgaaactgaactaacagaagccttgcaaaaacgggaagtacttgagactgaactacaaaatgctcatggagaattaaaaagtactttaagacaactccaggaattgagagatgtactacagaaggctcaattatcattagaggaaaaatacactactataaaggatctcacagctgaacttagagaatgcaagatggagattgaagacaaaaagcaggagctccttgaaatggatcaggcacttaaagagagaaattgggaactaaagcaaagagcagctcaggttacacatttggatatgactattcgtgagcacagaggagaaatggaacaaaaaataattaaattagaaggtactctggagaaatcagaattggaacttaaagaatgtaacaaacagatagaaagtctgaatgacaaattacaaaatgctaaagaacagcttcgagaaaaagagtttataatgctacaaaatgaacaggagataagtcaactgaaaaaagaaattgaaagaacacaacaaaggatgaaagaaatggagagtgttatgaaagagcaagaacagtacattgccactcagtacaaggaggccatagatttggggcaagaattgaggctgacccgggagcaggtgcagaactctcatacagaattggcagaggctcgtcatcagcaagtccaagcacagagagaaatagaaaggctctctagtgaactggaggatatgaagcaactctctaaagagaaagatgctcatggaaaccatttagctgaagaactgggggcttctaaagtacgtgaagctcatttagaagcaagaatgcaagcagaaatcaagaaattgtcagcagaagtagaatctctcaaagaagcttatcatatggagatgatttcacatcaagagaaccatgcaaagtggaagatttctgctgactctcaaaagtcttctgttcagcaactaaacgaacagttagagaaggcaaaattggaattagaagaagctcaggatactgtaagcaatttgcatcaacaagtccaagataggaatgaagtaattgaagctgcaaatgaagcattacttactaaaggagaaaatgtgtaattcaaagaagatactgatgtgttgaaaaaatggaatttttggtactgtgctgtttacttattatatgtagctcatacttcatagaagctgttattttgcttttgaataaattttatatttcaatattttaaaagaaagcccttctaaaacttaattatatttttaaagaaaatttattattttatttattgttttttggcttaaacttgctgctttcttttgctttttatataaaaatcattgttaaaatgc

SEQ ID NO: 1117 - protein, 639 aa, Homosapiens
MEFAEFRGRVIQMFSSSAPVDQEIKSLREKLNKLRQQNACLVTQNHSLMTKFESIHFELTQSRAKVSMLESAQQQAASVPILEEQIINLEAEVSAQDKVLREAENKLEQSQKMVIEKEQSLQESKEECIKLKVDLLEQTKQGKRAERQRNEALYNAEELSKAFQQYKKKVAEKLEKVQAEEEILERNLTNCEKENKRLQERCGLYKSELEILKEKLRQLKEENNNGKEKLRIMAVKNSEVMAQLTESRQSILKLESELENKDEILRDKFSLMNENRELKVRVAAQNERLDLCQQEIESSRVELRSLEKIISQLPLKRELFGFKSYLSKYQMSSFSNKEDRCIGCCEANKLVISELRIKLAIKEAEIQKLHANLTANQLSQSLITCNDSQESSKLSSLETEPVKLGGHQVAESVKDQNQHTMNKQYEKERQRLVTGIEELRTKLIQIEAENSDLKVNMAHRTSQFQLIQEELLEKASNSSKLESEMTKKCSQLLTLEKQLEEKIVAYSSIAAKNAELEQELMEKNEKIRSLETNINTEHEKICLAFEKAKKIHLEQHKEMEKQIERLEAQLEKKDQQFKEQEKTMSMLQQDIICKQHHLESLDRLLTESKGEMKKENMKKDEALKALQNQVSEETIKASN

SEQ ID NO: 1118 - DNA, 446 bp, Homosapiens
caactagattcagcattggaaatttgtaaggaagaacttgtcttgcatttgaatcaattggaaggaaataaggaaaagtttgaaaaacagttaaagaagaaatctgaagaggtaaattaacatttactttatatatagcatatatttcaagtgattttttttaagaagcatgagatgtaggacaaaatatatatatatatatatatttcttttgagacagcgtctccccatgttgcccaggctggagtacagtgtcgcaatcttggctcacttgaacctctgcctcctgggttcaagcaattcttgtgcctcagcctcctgtgtagctaggattacaggtatggtggtgcatacccgtggtcccagctactcaggaagctgagatgggaggatcacttgagcctaggaggtcgaggctgcagtgagctgtgatcacgccactgcac

SEQ ID NO: 1119 - protein, 70 aa, Homosapiens
MRCRTKYIYIYIFLLRQRLPMLPRLEYSVAILAHLNLCLLGSSNSCASASCVARITGMVVHTRGPSYSGS

SEQ ID NO: 1120 - DNA, 430 bp, Homosapiens
tctgtcctgctgatgaagtctacgttcattcagggcctgctgtggaagaccagccccaaaggcggagtctcactctgtcgcccaggctggagtgcaagggcacgattgcagctcactgcaacctccacctcttgggttcaagcaattcttgtgtctcagcctcctcagtagctggggttacaggcatgtgccacaatgcctggctaagttttgtatttttagtagagacgaggtttggccatgttggccaggctcgtctcgaactcctgacctcaggtgatccgcctgcctcagcctcccaaagtgctggaattatgggcacgagccacggcatctggccaaacagcaatttaaaaaactaacgaaaaatctattcatgattttaaaaatttctatttcatacaaataaaacaatcttgggctaataata

SEQ ID NO: 1121 - protein, 52 aa, Homosapiens
MKSTFIQGLLWKTSPKGGVSLCRPGWSARARLQLTATSTSWVQAILVSQPPQ

SEQ ID NO: 1122 - DNA, 284 bp, Homosapiens
attttactgatactgcttatctgtttaaaattcagatagaaagtctgaatgacaaattacaaaatgctaaagaacagcttcgagaaaaagagtttataatgctacaaaatgaacaggagataagtcaactgaaaaaagaaattgaaagaacacaacaaaggatgaaagaaatggagagtgttatgaaagagcaagaacagtacattgccactcagtacaaggaggccatagatttggggcaagaattgaggctgacccgggagcaggtgcagaactctcataca

SEQ ID NO: 1123 - protein, 61 aa, Homosapiens
MLQNEQEISQLKKEIERTQQRMKEMESVMKEQEQYIATQYKEAIDLGQELRLTREQVQNSH

SEQ ID NO: 1124 - DNA, 687 bp, Homosapiens
gagaaaaagagtttataatgctacaaaatgaacaggagataagtcaactgaaaaaagaaattgaaagaacacaacaaaggatgaaagaaatggagagtgttatgaaagagcaagaacagtacattgccactcagtacaaggaggccatagatttggggcaagaattgaggctgacccgggagcaggtgcagaactctcatacagaattggcagaggctcgtcatcagcaagtccaagcacagagagaaatagaaaggctctctagtgaactggaggatatgaagcaactctctaaagagaaagatgctcatggaaaccatttagctgaagaactgggggcttctaaagtacgtgaagctcatttagaagcaagaatgcaagcagaaatcaagaaattgtcagcagaagtagaatctctcaaagaagcttatcatatggagatgatttcacatcaagagaaccatgcaaagtggaagatttctgctgactctcaaaagtcttctgttcagcaactaaacgaacagttagagaaggcaaaattggaattagaagaagctcaggatactgtaagcaatttgcatcaacaagtccaagataggaatgaagtaattgaagctgcaaatgaagcattacttactaaagtaagtaaacatataaaagtaataaagcatatctatgaaaacataa

SEQ ID NO: 1125 - protein, 222 aa, Homosapiens
MLQNEQEISQLKKEIERTQQRMKEMESVMKEQEQYIATQYKEAIDLGQELRLTREQVQNSHTELAEARHQQVQAQREIERLSSELEDMKQLSKEKDAHGNHLAEELGASKVREAHLEARMQAEIKKLSAEVESLKEAYHMEMISHQENHAKWKISADSQKSSVQQLNEQLEKAKLELEEAQDTVSNLHQQVQDRNEVIEAANEALLTKVSKHIKVIKHIYEN

SEQ ID NO: 1126 - DNA, 1725 bp, Homosapiens
aatgaattcagtgcagcagttcaccaccagctctcgagcatcgttggccacccggacattaggaagagtctctttgatcattttattgatagcagctctggggatagtgagatcatcatcgttgccagacgaggaagccatagtaccttcctgtttctcgcgccccggcttttaaaaactccccagctctggtccactactccaccgagatttctcaaaaagtcgccctcggagagtgatcccggggggtgctttgcgaagagggtgcagaaaatgaacggaggagcagctggcttgagggctgggaacactcgcgtgtgtgagagatttaggatgagtttgggaagaaagtgggggcccgaggattctagagagagcacagcccaggctgaggaggggaaagcgcggtggtccggaaatttgagcggctggggaaccaccttcgtgtctcctcagaggggcgggcgctgtcgcctaactggtccccaacggcgtcggagcagaggcaagatccaggggcactggcctcgccgcggtaccgggcgggtacccagcgggctcggctctatagagcccgaggccccgctgccgctgccgccgccgccagcagccgttgccgccgcctcggccaaaccatccttcagacacccgcgccgccgcctcacaacatgtccgccgctgccgctgccgctgccgctgctggaacggcgacggccgcctgggaactaatatggacagagccaggcacagtgggagtcgcagtggctgccgccgtggccgcgtagcccgaacgcagatcgtggaagccgaagacgcggcaacggtggtccctccagatgccagggaaggtttgcaggaagccgctcccgacaccctttgcgccaccggaagcctcgttccctcagatttccccctccctcccggaccgacttccgggtgtggctgccgcccttcccccacccacgccggcgggagccgcccgttcgcgctgccagcagcttccgcctgctacggtcctggcaagcacctcgggatcccattccttcacagggaccctagccagttaaagctgatacattcctgtgggtcaactatgcaactaactcagattttgagcaaacaaagctctcaagttggtgatcctcaggagtctctgcattagttggacagctcttctggaattatcttctaagtcaactgtgggttgggtaggtggctctgctgatttttcgctggacttccacatttgggacgagttggctgtcatcagctctagaaagggtgtggccgttttacattggctgttttcctcacattcctcaagcagataactgataccgtgcttccagaagatttttctaacagtgtttgcaagctataaaatagtgctttcacttagaaaaggctagacgtggtggttcatgcctgtaatcccagcactttgagaggccgaggcaccatgctgggagataaggatccaacataagacaaacagtgctgatgcttttggaaagctcatattcaagctggggagacaaacaacatacaagtaaatggaaggcttgtctcagataagactttggacttggacttttgggttaatgctggaatgagttaagactttggggttctgttgggaaggcatgattgtgttttgaaatgtgagaaggacaagagatctgggaggggccagggttggaatgatatggcttggctctgtgtccc

SEQ ID NO: 1127 - protein, 143 aa, Homosapiens
MDRARHSGSRSGCRRGRVARTQIVEAEDAATVVPPDAREGLQEAAPDTLCATGSLVPSDFPLPPGPTSGCGCRPSPTHAGGSRPFALPAASACYGPGKHLGIPFLHRDPSQLKLIHSCGSTMQLTQILSKQSSQVGDPQESLH

SEQ ID NO: 1128 - DNA, 321 bp, Homosapiens
aatgatgccagatgtcctgtatcttgcacggttgttccacatgacagaactatctggctggcaattctactagactttgctagtctgtttatgctttcctactctccaaagaatgagactacatacactaaaaaaccaaaaagcctaaaaaaagagatgatattttaatttcaaaagcttaataatttgctgaacagaagacttttgagagtcagcagaaatcttccactttgcatggttctcttgatgtgaaatcatctatatagccccagaattggaaaagaaaaaaaataaaaaaatggaaggaaactggattcgaca

SEQ ID NO: 1129 - DNA, 764 bp, Homosapiens
ttggggaagtgtagtagttaaggttctggctcaaacaacaactgcagctcataaagttgactttagtggaaggatactggggtatctcatggaatcttgggaactgttgaataaccagggaaactctgggaaactcactggtaggaatccataaactgtcctcctggtgggctgtaaacaactcaccctctatgcatctcacatcaaaattccagtttcttgggaaaacaagtctgtttgcccaatttgggtcatatttccacgtccatgttactcaggcatgattcatctgcaagttatgtgtatagatattttgctactgttccacccttacgctgtgctggggagggaggtgtcactgtgagctgtgtcggtgccttaagagatatctgttgtgtcttattacttggttgcttttccccacatgtacaatgacaaaaatgccttcaacctatttgatccagccgttccagtacaactcctatacttgccatctttccaagcccaaagctatagttcctcatggtcctgcactccatggactaaattgagggctctgagagatttcatttctgtcctgctgatgaagtctacgttcattcagggcctgctgtggaagaccagccccaaagttgctgaacagaagacttttgagagtcagcagaaatcttccactttgcatggttctcttgatgtgaaatcatctatatagccccagaattggaaaagaaaaaaaataaaaaaatggaaggaaactggattcg

SEQ ID NO: 1130 - protein, 95 aa, Homosapiens
MYNDKNAFNLFDPAVPVQLLYLPSFQAQSYSSSWSCTPWTKLRALRDFISVLLMKSTFIQGLLWKTSPKVAEQKTFESQQKSSTLHGSLDVKSSI

SEQ ID NO: 1131 - DNA, 1973 bp, Homosapiens
aatgaattcagtgcagcagttcaccaccagctctcgagcatcgttggccacccggacattaggaagagtctctttgatcattttattgatagcagctctggggatagtgagatcatcatcgttgccagacgaggaagccatagtaccttcctgtttctcgcgccccggcttttaaaaactccccagctctggtccactactccaccgagatttctcaaaaagtcgccctcggagagtgatcccggggggtgctttgcgaagagggtgcagaaaatgaacggaggagcagctggcttgagggctgggaacactcgcgtgtgtgagagatttaggatgagtttgggaagaaagtgggggcccgaggattctagagagagcacagcccaggctgaggaggggaaagcgcggtggtccggaaatttgagcggctggggaaccaccttcgtgtctcctcagaggggcgggcgctgtcgcctaactggtccccaacggcgtcggagcagaggcaagatccaggggcactggcctcgccgcggtaccgggcgggtacccagcgggctcggctctatagagcccgaggccccgctgccgctgccgccgccgccagcagccgttgccgccgcctcggccaaaccatccttcagacacccgcgccgccgcctcacaacatgtccgccgctgccgctgccgctgccgctgctggaacggcgacggccgcctgggaactaatatggacagagccaggcacagtgggagtcgcagtggctgccgccgtggccgcgtagcccgaacgcagatcgtggaagccgaagacgcggcaacggtggtccctccagatgccagggaaggtttgcaggaagccgctcccgacaccctttgcgccaccggaagcctcgttccctcagatttccccctccctcccggaccgacttccgggtgtggctgccgcccttcccccacccacgccggcgggagccgcccgttcgcgctgccagcagcttccgcctgctacggtcctggcaagcacctcgggatcccattccttcacagggaccctagccagttaaagctgatacattcctgtgggtcaactatgcaactaactcagattttgagcaaacaaagctctcaagttggtgatcctcaggagtctctgcattagttggacagctcttctggaattatcttctaagtcaactgtgggttgggtaggtggctctgctgatttttcgctggacttccacatttgggacgagttggctgtcatcagctctagaaagggtgtggccgttttacattggctgttttcctcacattcctcaagcagataactgataccgtgcttccagaagatttttctaacagtgtttgcaagctataaaatagtgctttcacttagaaaaggctagacgtggtggttcatgcctgtaatcccagcactttgagaggccgaggcaccatgctgggagataaggatccaacataagacaaacagtgctgatgcttttggaaagctcatattcaagctggggagacaaacaacatacaaaagttctcatcatgatactttaaggatgaggacagctgatgtggctggcctgaaaaataagaaactcactctgtcactcaggctggagtgcaatggcacgatctcggctcactgcaacctctgcctcccgagttcaggagggctctgagagatttcatttctgtcctgctgatgaagtctacgttcattcagggcctgctgtggaagaccagccccaaaggaatgagactacatacactaaaaaaccaaaaagcctaaaaaaagagatgatattttaatttcaaaagcttaataatttgctgaacagaagacttttgagagtcagcagaaatcttccactttgcatggttctcttgatgtgaaatcatctatatagccccagaattggaaaagaaaaaaaataaaaaaatggaaggaaactgga

SEQ ID NO: 1132 - protein, 143 aa, Homosapiens; identical to SEQ ID NO: 1127

SEQ ID NO: 1133 - DNA, 296 bp, Homosapiens
gacaaagccaggattgaagctcatgcggtctggctccagaacaactcttcttcatagttacgttatactgcccctgcattgttggtattgaaagagggctctgagagatttcatttctgtcctgctgatgaagtctacgttcattcagggcctgctgtggaagaccagccccaaagttgctgaacagaagacttttgagagtcagcagaaatcttccactttgcatggttctcttgatgtgaaatcatctatatagccccagaattggaaaagaaaaaaaataaaaaaatggaagg

SEQ ID NO: 1134 - protein, 42 aa, Homosapiens
MKSTFIQGLLWKTSPKVAEQKTFESQQKSSTLHGSLDVKSSI

SEQ ID NO: 1135 - DNA, 379 bp, Homosapiens
agagatgcggtttcgccatgttggccgggctggtcttgaagtcctgacctcaggctggagtgcaatggcacgatctcggctcactgcaacctctgcctcccgagttcagtagagatggggttctgccatgttgatcttgctggtctcgaactcttggcctcaagtgatctgcccacctcagcctcccaaatgctgggattacaggagggctctgagagatttcatttctgtcctgctgatgaagtctacgttcattcagggcctgctgtggaagaccagccccaaagttgctgaacagaagacttttgagagtcagcagaaatcttccactttgcatggttctcttgatgtgaaatcatctatatagccccagaattgg

SEQ ID NO: 1136 - protein, 79 aa, Homosapiens
MLILLVSNSWPQVICPPQPPKCWDYRRALRDFISVLLMKSTFIQGLLWKTSPKVAEQKTFESQQKSSTLHGSLDVKSSI

SEQ ID NO: 1137 - DNA, 2153 bp, Homosapiens
aatatgtatctttgtgattttcttgtatttgggagaaaggaacaacttaagcacaacttaaacctacgcagatgcttttctagtattgggagctttaaaggataacaaaatcgatttctatttctttggtataattatattgattatattggaaaaacatgaaccaatacatttggctttaagatctaccagctggtcacatacaggtacccatgtatgcaaaatgtgtttgatctttttttttttttttttttttttgagatggagtctcgctctgtcacccaggctgaagtgcagtggtgtaatctcggctcactgcaacctccgcctcccgggttcaggcagttctcctgcctcagtctcctgagtagctgggattacaggcgcgcaccaccacgcccggctaatttttgtattttcagtagagacagggtttcaccatgttggccaggatggtcttgatctcttgacctcgtgatctgccccactttgggaggccgaggcaccatgctgggagataaggatccaacataagacaaacagtgctgatgcttttggaaagctcatattcaagctggggagacaaacaacatacaaaagttctcatcatgatactttaaggatgaggacagctgatgtggctggcctgaaaaataaggtggctgtagctaccttctgcatatggatatccagttttcccagcaccacttattaaagagactgtcttttctgcagtgtatattcttggcaccgttgttgaaaatgaattcattgtaggtgtgtgggtttgtttctgggttctctattctgttcaacttgtctatgtgtctgtttttatgccagtaccgtgtcattttagttaccagagctctgcagtataatttgaaaccaggtcatgtgattcctccagttttgtggtattaggataggtttggctattctgagtcttttgtggttccatataaattttagaattttttttttctatttctgtgaagaatgtcattggtattttgatagggattgcgttgaatctgtagattgctttgggtagtatggacattttaacaatattcattcttctaatccatgaacatggaatacctttccattttttggtgtccatttcaatttctttcatcagtcttatacttttcattatagagatctttcacttcttggattaactcctatgtatttaattttacttgtagctattgtaaatgggattacttttttttttttttttgacggagtttcacccttggcatccaggctagtgtgcaatggcgcaacctcagctcactgcaacctccacctcccaggttcaagcaattctcctgcctcagcctcctgagtagctggaattacaggtgcccgccaccacacccggctaatttttgtatttttagtagagacagggtttcaccacgttggtcaggctggtcttgaactcctgacctcagatgatctgcccacctcgacctcccaaagtgctgggattacaggcatgagccaccacttccagcaagggattacttttttaatctctttttcagatttttcactgttggcatatagaaatcctactaatttttgtatgttgattttgtatcctggaactttactgaatctgtttataatttgtgtatttgtttatagtagttttttggtggactctttcagtttttccaaatataagatcatatcattggcaaacaaggacagtttgatttcttctattccaatttggatgcctttatttctttctgttgtctgattgctctagttaggacttccagtactatgttgaataacagtgatgaaagtgggcatccttgccatgttccagatcttagaaaagaggctttcagtttttcaccattcagtttgatactagctgtggcagcttccatgagaatcacgcagtttgaagaagcatttcactgaaaaatagggattgctgttctggaaagacaaaacaattgtctacaattctaaagaagaagtgaacacaataattaaatcaatgttattctgggtctaaagcttatattcttaattactatattatcccatcttaaaattttaatttggaaattatatatctaaatattataatcaataaagttgaacacacatgatgaagtgtg

SEQ ID NO: 1138 - protein, 81 aa, Homosapiens
MQNVFDLFFFFFFFEMESRSVTQAEVQWCNLGSLQPPPPGFRQFSCLSLLSSWDYRRAPPRPANFCIFSRDRVSPCWPGWS

SEQ ID NO: 1139 - DNA, 3963 bp, Homosapiens
aatgaattcagtgcagcagttcaccaccagctctcgagcatcgttggccacccggacattaggaagagtctctttgatcattttattgatagcagctctggggatagtgagatcatcatcgttgccagacgaggaagccatagtaccttcctgtttctcgcgccccggcttttaaaaactccccagctctggtccactactccaccgagatttctcaaaaagtcgccctcggagagtgatcccggggggtgctttgcgaagagggtgcagaaaatgaacggaggagcagctggcttgagggctgggaacactcgcgtgtgtgagagatttaggatgagtttgggaagaaagtgggggcccgaggattctagagagagcacagcccaggctgaggaggggaaagcgcggtggtccggaaatttgagcggctggggaaccaccttcgtgtctcctcagaggggcgggcgctgtcgcctaactggtccccaacggcgtcggagcagaggcaagatccaggggcactggcctcgccgcggtaccgggcgggtacccagcgggctcggctctatagagcccgaggccccgctgccgctgccgccgccgccagcagccgttgccgccgcctcggccaaaccatccttcagacacccgcgccgccgcctcacaacatgtccgccgctgccgctgccgctgccgctgctggaacggcgacggccgcctgggaactaatatggacagagccaggcacagtgggagtcgcagtggctgccgccgtggccgcgtagcccgaacgcagatcgtggaagccgaagacgcggcaacggtggtccctccagatgccagggaaggtttgcaggaagccgctcccgacaccctttgcgccaccggaagcctcgttccctcagatttccccctccctcccggaccgacttccgggtgtggctgccgcccttcccccacccacgccggcgggagccgcccgttcgcgctgccagcagcttccgcctgctacggtcctggcaagcacctcgggatcccattccttcacagggaccctagccagttaaagctgatacattcctgtgggtcaactatgcaactaactcagattttgagcaaacaaagctctcaagttggtgatcctcaggagtctctgcattagttggacagctcttctggaattatcttctaagtcaactgtgggttgggtaggtggctctgctgatttttcgctggacttccacatttgggacgagttggctgtcatcagctctagaaagggtgtggccgttttacattggctgttttcctcacattcctcaagcaggtactgtaataaagaactggagaaatacagtcagatgggaagtagcccttgctgtcaaggagcttgccatctaatgggggagacaggcaagtaaaccaaagactacacagtgcagtatggtaagtgccatgattttgatgtgacagggcacagtggacgaccttccaaatcaaagcaagtaactaggggttgacaatggtaagtatcatagttgaagtatccttgaacaaggtttcaggaagaagaagaagggaatttcatgcagggaaacagccaaagctcagtgagtcaaaatatcacagcattcttggtaagcccaattgttttttctgttttgctattttggtggagagaaaggaacacataaaggaataacatgagagaaggctatttggggaagtgtagtagttaaggttctggctcaaacaacaactgcagctcataaagttgactttagtggaaggatactggggtatctcatggaatcttgggaactgttgaataaccagggaaactctgggaaactcactggtaggaatccataaactgtcctcctggtgggctgtaaacaactcaccctctatgcatctcacatcaaaattccagtttcttgggaaaacaagtctgtttgcccaatttgggtcatatttccacgtccatgttactcaggcatgattcatctgcaagttatgtgtatagatattttgctactgttccacccttacgctgtgctggggagggaggtgtcactgtgagctgtgtcggtgccttaagagatatctgttgtgtcttattacttggttgcttttccccacatgtacaatgacaaaaatgccttcaacctatttgatccagccgttccagtacaactcctatacttgccatctttccaagcccaaaggtacatccagctgatggaaggagcatcttggtgttaatattcttttagtcatggtctctgaaagtaaaatgtctattcttctaattctggcacaatcttatctagctatagttcctcatggtcctgcactccatggactaaattgtaagtataattactaccaatgtactctataaataacttttggggccagggtggcaatagttgctagagagaaaaaaaaaaaaaaggaaggagaagaaaacagtgatagttcttattttaaaaggaaaaaaagaggcaggaggctctcttgaggccaggagtttaagaccagcctaggcagcatttcaagaccctgtctctactaaaaagtaaaaaaaaaatttagtcaggcatggtggcatgcacctgtagtcgtagctactcaggagactgaggtgggaggattgattgagctcaggagtttgaggctgcagtgagcaatcatcatgccattgcactccagcctgggcatcagagcaagaccttgtcttttaggaaaaaaaggcagggaagaggaataggtaatttttcagtgttcagacattccagcaatatgtgtggagtactcattctcactacagtttatgaggccatagctagtatgtatgactacccatccaagtttccctgcttacagttactattccaactgattggggggcttttcctaatagagtgatttaagccttcatttttagacatctaagcccttggtgatcatcagcataaaatgtgacaaattaaacaaaagcaagacagcacatcagagaacaactctgaggtggaatgattgggaaccaatgaatagttgttcagtaaatggtttatattttacagatgatgaaactgaaacacaaaaaatttagattaactcttaggtgacaaagccaggattgaagctcatgcggtctggctccagaacaactcttcttcatagttacgttatactgcccctgcattgttggtattgaaaaatttcctttcatctctggtaaaagtcagctctctaactactgcatctcacagctgaacagataactgataccgtgcttccagaagatttttctaacagtgtttgcaagctataaaatagtgctttcacttagaaaaggctagacgtggtggttcatgcctgtaatcccagcactttgagaggccgaggcaccatgctgggagataaggatccaacataagacaaacagtgctgatgcttttggaaagctcatattcaagctggggagacaaacaacatacaagtggctgtagctaccttctgcatatggatatccagttttcccagcaccacttattaaagagactgtcttttctgcagtgtatattcttggcaccgttgttgaaaatgaattcattgtaggtgtgtgggtttgtttctgggttctctattctgttcaacttgtctatgtgtctgtttttatgccagtaccgtgtcattttagttaccagagctctgcagtataatttgaaaccaggtcatgtgattcctccagttttgtggtattaggataggtttggctattctgagtcttttgtggttccatataaattttagaattttttttttctatttctgtgaagaatgtcattggtattttgatagggattgcgttgaatctgtagattgctttgggtagtatggacattttaacaatattcattcttctaatccatgaacatggaatacctttccatt

SEQ ID NO: 1140 - protein, 143 aa, Homosapiens; identical to SEQ ID NO: 1127

SEQ ID NO: 1141 - DNA, 535 bp, Homosapiens
gaatgattgggaaccaatgaatagttgttcagtaaatggtttatattttacagatgatgaaactgaaacacaaaaaatttagattaactcttaggtgacaaagccaggattgaagctcatgcggtctggctccagaacaactcttcttcatagttacgttatactgcccctgcattgttggtattgaaaataactgataccgtgcttccagaagatttttctaacagtgtttgcaagctataaaatagtgctttcacttagaaaaggctagacgtggtggttcatgcctgtaatcccagcactttgagaggccgaggcaccatgctgggagataaggatccaacataagacaaacagtgctgatgcttttggaaagctcatattcaagctggggagacaaacaacatacaagtggctgtagctaccttctgcatatggatatccagttttcccagcaccacttattaaagagactgtcttttctgcagtgtatattcttggcaccgttgttgaaaatgaattcattgtaggtgtg

SEQ ID NO: 1142 - protein, 55 aa, Homosapiens
MLLESSYSSWGDKQHTSGCSYLLHMDIQFSQHHLLKRLSFLQCIFLAPLLKMNSL

SEQ ID NO: 1143 - DNA, 614 bp, Homosapiens
ctgcacttttataaggaaggaaaattttctttatgcgggtatgaataatactaacaaatgaaatactggaacatgtaggtggaggatacatcattttggctgttacggatgatgtcaagtcatacctaacctgctcattgtataaaacttaattagtactccaaagtgccttactgtaactaataaaagatgtattgacccccctgtgctattaagataagactgagattctgtagcaaagagacatctcatgtcagaggtaagaggtcagaggtcagtgcttcgggctccagcagggttctgttccatgcagtcattcagggtcctaaagtacttcagtctttgttttgccattccctaaggtgttgtcctcatttacatggtctcaattgggtttgagttccagtctgtgggaagggagaaagagaggccctgaagggctggcaatttccttttaaaaagaaacatcacagctgggcatggtggctcatgtctgtaataccagcactttgggagactgaggctggaggatctcttgaggccgagatgggcggatcatgtgaggtcaggagttcaagaccagcctggccaaaatggtgaaaccacatctctac

SEQ ID NO: 1144 - protein, 36 aa, Homosapiens
MSVIPALWETEAGGSLEAEMGGSCEVRSSRPAWPKW

SEQ ID NO: 1145 - DNA, 1900 bp, Homosapiens
tagtacattgattaagtgaccaattatagtattttcaggagcatatgatggcaagtggcatgtggttaaattacaggcaaagtgattgagaaagtcactgtctaaataccagttcaccatgatggcattcaccatcaaacctatcgtctttattaaaactaaaattagggttactgtttatatttagaacagaaatatgtatctttgtgattttcttgtatttgggagaaaggaacaacttaagcacaacttaaacctacgcagatgcttttctagtattgggagctttaaaggataacaaaatcgatttctatttctttggtataattatattgattatattggaaaaacatgaaccaatacatttggctttaagatctaccagctggtcacatacaggtacccatgtatgcaaaatgtgtttgatctttttttttttttttttttttttgagatggagtctcgctctgtcacccaggctgaagtgcagtggtgtaatctcggctcactgcaacctccgcctcccgggttcaggcagttctcctgcctcagtctcctgatgctgggattacaggtgtgagccactgtgcccggccttgatcattttaaattcataaataatacttagcccctgagtaattataataaatatataattaatgcatatatcacccatagttaattaggaatattttattggcttaatgagcaaaatatgatcataaaatataagccatcatagcccagatgtatagcaataaaagagcttagattataatatctcacaatacaagtctgcattagcaatgacactgttataaaatatttataacactttctgatttaattttaaagagattcattcagtatctttttggcatttgaaatgaaaccttattttccctccacacaatagctgattaaaaacagcttttgaagaggtcccaggcaacacacacagaggggaaatggttagatacgtggggcatctttgtattttcacattaaaattcaatgttattcagacccaagtagatagataataaaagtggcattcaagttgggaatggtagcacaagcctgtagtctcagctactcaggaggctgaaatgggaagatcacttgagcacaggagtttgaggttttagtgcactgtgattgcacctgtgaatagccactgcacttcagcctaacatagcaagaccccatctctttttttaaaatgttacatttataatcagtgaggaaaatataaactatacaataaatgaaagggtcattggccaattgtttggagggaaaaaatacaccatgttctaaaataaatttctagtgatttattgtgactttcatgcatttggatgattttaaagattttatataaaaatgaaaccatagccttacgagaagaaaatataaagaaaaacttgtatagtcttgggaggggggattatattatgtgaaacattaagtaaaatatttattttttaaatattaaaaaactaaaaactgtgctttagaagtcaccaaaaaattaaagggcaggctgggcatggtggatcacacctgtaatcccagctttgggaggctgaaatgggagaatcacttgaggcggggaagttcgagaccagcctgtgcaatataacaagacccccatctctccaaaaaaaaaaaaaaaaaaaaaaaaaaaaaaaaaaaaaagccaggcataatggcgtgtgcctatagtcctagctactcaggaggctgagatgggatgattgcttgagcccaggagtttgaggccacagtaagctatgattgcactattgcactctagcctgggtaacagtgtgagaacgagaccctgtctcagaaaaaagaaaaaaagaaaaagaaaaagggcaagtgccaaatggaa

SEQ ID NO: 1146 - protein, 56 aa, Homosapiens
MQNVFDLFFFFFFFEMESRSVTQAEVQWCNLGSLQPPPPGFRQFSCLSLLMLGLQV

SEQ ID NO: 1147 - DNA, 2719 bp, Homosapiens
gcctgctacggtcctggcaagcacctcgggatcccattccttcacagggaccctagccaggcaagcgcgcgcctcactgtaccggagagctccaagcacgcgcttggtctggggcccggacgctacatctgggaagggttaaagctgatacattcctgtgggtcaactatgcaactaactcagattttgagcaaacaaagctctcaagttggtgatcctcaggagtctctgcattagttggacagctcttctggaattatcttctaagtcaactgtgggttgggtaggtggctctgctgatttttcgctggacttccacatttgggacgagttggctgtcatcagctctagaaagggtgtggccgttttacattggctgttttcctcacattcctcaagcaggtactgtaataaagaactggagaaatacagtcagatgggaagtagcccttgctgtcaaggagcttgccatctaatgggggagacaggcaagtaaaccaaagactacacagtgcagtatggtaagtgccatgattttgatgtgacagggcacagtggacgaccttccaaatcaaagcaagtaactaggggttgacaatggtaagtatcatagttgaagtatccttgaacaaggtttcaggaagaagaagaagggaatttcatgcagggaaacagccaaagctcagtgagtcaaaatatcacagcattcttggtaagcccaattgttttttctgttttgctattttggtggagagaaaggaacacataaaggaataacatgagagaaggctatttggggaagtgtagtagttaaggttctggctcaaacaacaactgcagctcataaagttgactttagtggaaggatactggggtatctcatggaatcttgggaactgttgaataaccagggaaactctgggaaactcactggtaggaatccataaactgtcctcctggtgggctgtaaacaactcaccctctatgcatctcacatcaaaattccagtttcttgggaaaacaagtctgtttgcccaatttgggtcatatttccacgtccatgttactcaggcatgattcatctgcaagttatgtgtatagatattttgctactgttccacccttacgctgtgctggggagggaggtgtcactgtgagctgtgtcggtgccttaagagatatctgttgtgtcttattacttggttgcttttccccacatgtacaatgacaaaaatgccttcaacctatttgatccagccgttccagtacaactcctatacttgccatctttccaagcccaaaggtacatccagctgatggaaggagcatcttggtgttaatattcttttagtcatggtctctgaaagtaaaatgtctattcttctaattctggcacaatcttatctagctatagttcctcatggtcctgcactccatggactaaattgtaagtataattactaccaatgtactctataaataacttttggggccagggtggcaatagttgctagagagaaaaaaaaaaaaaaggaaggagaagaaaacagtgatagttcttattttaaaaggaaaaaaagaggcaggaggctctcttgaggccaggagtttaagaccagcctaggcagcatttcaagaccctgtctctactaaaaagtaaaaaaaaaatttagtcaggcatggtggcatgcacctgtagtcgtagctactcaggagactgaggtgggaggattgattgagctcaggagtttgaggctgcagtgagcaatcatcatgccattgcactccagcctgggcatcagagcaagaccttgtcttttaggaaaaaaaggcagggaagaggaataggtaatttttcagtgttcagacattccagcaatatgtgtggagtactcattctcactacagtttatgaggccatagctagtatgtatgactacccatccaagtttccctgcttacagttactattccaactgattggggggcttttcctaatagagtgatttaagccttcatttttagacatctaagcccttggtgatcatcagcataaaatgtgacaaattaaacaaaagcaagacagcacatcagagaacaactctgaggtggaatgattgggaaccaatgaatagttgttcagtaaatggtttatattttacagatgatgaaactgaaacacaaaaaatttagattaactcttaggtgacaaagccaggattgaagctcatgcggtctggctccagaacaactcttcttcatagttacgttatactgcccctgcattgttggtattgaaagtaagtgtaggccctgggccttctatacctgggattaagtcacatattcctcttcctcttcaaattttactagtcttgtgagcgagaaaaagctactgaatttttctaagctcagtctttttcatttatgaaatagagatatcctttgtgggccggttgccgtggctcacgcctgtaatcccagcactttgggaggccgaggtgggtggatcacgaggtcaggagatcaagatcagttgaaaccccctctctactaaaaatacaaaaaattagccagatgtggtggcggacgcctgtagtcccagctactcgggaggctgaggcaggagaatggcgtgaacccgggaggcggagcttgtagtgagccgagatcacgccactgcactccagcctgggcgacagagcgagactccgtctcc

SEQ ID NO: 1148 - protein, 59 aa, Homosapiens [sequence omitted]

SEQ ID NO: 1149 - DNA, 2709 bp, Homosapiens
cgctgccagcagcttccgcctgctacggtcctggcaagcacctcgggatcccattccttcacagggaccctagccagctgaggcctccgaaaccttccctagctggatttggggacagaggagcgctgttaaagctgatacattcctgtgggtcaactatgcaactaactcagattttgagcaaacaaagctctcaagttggtgatcctcaggagtctctgcattagttggacagctcttctggaattatcttctaagtcaactgtgggttgggtaggtggctctgctgatttttcgctggacttccacatttgggacgagttggctgtcatcagctctagaaagggtgtggccgttttacattggctgttttcctcacattcctcaagcaggtactgtaataaagaactggagaaatacagtcagatgggaagtagcccttgctgtcaaggagcttgccatctaatgggggagacaggcaagtaaaccaaagactacacagtgcagtatggtaagtgccatgattttgatgtgacagggcacagtggacgaccttccaaatcaaagcaagtaactaggggttgacaatggtaagtatcatagttgaagtatccttgaacaaggtttcaggaagaagaagaagggaatttcatgcagggaaacagccaaagctcagtgagtcaaaatatcacagcattcttggtaagcccaattgttttttctgttttgctattttggtggagagaaaggaacacataaaggaataacatgagagaaggctatttggggaagtgtagtagttaaggttctggctcaaacaacaactgcagctcataaagttgactttagtggaaggatactggggtatctcatggaatcttgggaactgttgaataaccagggaaactctgggaaactcactggtaggaatccataaactgtcctcctggtgggctgtaaacaactcaccctctatgcatctcacatcaaaattccagtttcttgggaaaacaagtctgtttgcccaatttgggtcatatttccacgtccatgttactcaggcatgattcatctgcaagttatgtgtatagatattttgctactgttccacccttacgctgtgctggggagggaggtgtcactgtgagctgtgtcggtgccttaagagatatctgttgtgtcttattacttggttgcttttccccacatgtacaatgacaaaaatgccttcaacctatttgatccagccgttccagtacaactcctatacttgccatctttccaagcccaaaggtacatccagctgatggaaggagcatcttggtgttaatattcttttagtcatggtctctgaaagtaaaatgtctattcttctaattctggcacaatcttatctagctatagttcctcatggtcctgcactccatggactaaattgtaagtataattactaccaatgtactctataaataacttttggggccagggtggcaatagttgctagagagaaaaaaaaaaaaaaggaaggagaagaaaacagtgatagttcttattttaaaaggaaaaaaagaggcaggaggctctcttgaggccaggagtttaagaccagcctaggcagcatttcaagaccctgtctctactaaaaagtaaaaaaaaaatttagtcaggcatggtggcatgcacctgtagtcgtagctactcaggagactgaggtgggaggattgattgagctcaggagtttgaggctgcagtgagcaatcatcatgccattgcactccagcctgggcatcagagcaagaccttgtcttttaggaaaaaaaggcagggaagaggaataggtaatttttcagtgttcagacattccagcaatatgtgtggagtactcattctcactacagtttatgaggccatagctagtatgtatgactacccatccaagtttccctgcttacagttactattccaactgattggggggcttttcctaatagagtgatttaagccttcatttttagacatctaagcccttggtgatcatcagcataaaatgtgacaaattaaacaaaagcaagacagcacatcagagaacaactctgaggtggaatgattgggaaccaatgaatagttgttcagtaaatggtttatattttacagatgatgaaactgaaacacaaaaaatttagattaactcttaggtgacaaagccaggattgaagctcatgcggtctggctccagaacaactcttcttcatagttacgttatactgcccctgcattgttggtattgaaagtaagtgtaggccctgggccttctatacctgggattaagtcacatattcctcttcctcttcaaattttactagtcttgtgagcgagaaaaagctactgaatttttctaagctcagtctttttcatttatgaaatagagatatcctttgtgggccggttgccgtggctcacgcctgtaatcccagcactttgggaggccgaggtgggtggatcacgaggtcaggagatcaagatcagttgaaaccccctctctactaaaaatacaaaaaattagccagatgtggtggcggacgcctgtagtcccagctactcgggaggctgaggcaggagaatggcgtgaacccgggaggcggagcttgtagtgagccgagatcacgccactgcactccagcctgggcgacagagcgagactccgtctcc

SEQ ID NO: 1150 - protein, 59 aa, Homosapiens [sequence omitted]

SEQ ID NO: 1151 - DNA, 2786 bp, Homosapiens
ggctgccgcccttcccccacccacgccggcgggagccgcccgttcgcgctgccagcagcttccgcctgctacggtcctggcaagcacctcgggatcccattccttcacagggaccctagccagttaaagctgatacattcctgtgggtcaactatgcaactaactcagattttgagcaaacaaagctctcaagttggtgatcctcaggagtctctgcattagttggacagctcttctggaattatcttctaagtcaactgtgggttgggtaggtggctctgctgatttttcgctggacttccacatttgggacgagttggctgtcatcagctctagaaagggtgtggccgttttacattggctgttttcctcacattcctcaagcaggtaagcttaatcatgttctcatattgaagcagaaactgtttactcatttatctatttacttactgggtctcctgggcactaggtactgtaataaagaactggagaaatacagtcagatgggaagtagcccttgctgtcaaggagcttgccatctaatgggggagacaggcaagtaaaccaaagactacacagtgcagtatggtaagtgccatgattttgatgtgacagggcacagtggacgaccttccaaatcaaagcaagtaactaggggttgacaatggtaagtatcatagttgaagtatccttgaacaaggtttcaggaagaagaagaagggaatttcatgcagggaaacagccaaagctcagtgagtcaaaatatcacagcattcttggtaagcccaattgttttttctgttttgctattttggtggagagaaaggaacacataaaggaataacatgagagaaggctatttggggaagtgtagtagttaaggttctggctcaaacaacaactgcagctcataaagttgactttagtggaaggatactggggtatctcatggaatcttgggaactgttgaataaccagggaaactctgggaaactcactggtaggaatccataaactgtcctcctggtgggctgtaaacaactcaccctctatgcatctcacatcaaaattccagtttcttgggaaaacaagtctgtttgcccaatttgggtcatatttccacgtccatgttactcaggcatgattcatctgcaagttatgtgtatagatattttgctactgttccacccttacgctgtgctggggagggaggtgtcactgtgagctgtgtcggtgccttaagagatatctgttgtgtcttattacttggttgcttttccccacatgtacaatgacaaaaatgccttcaacctatttgatccagccgttccagtacaactcctatacttgccatctttccaagcccaaaggtacatccagctgatggaaggagcatcttggtgttaatattcttttagtcatggtctctgaaagtaaaatgtctattcttctaattctggcacaatcttatctagctatagttcctcatggtcctgcactccatggactaaattgtaagtataattactaccaatgtactctataaataacttttggggccagggtggcaatagttgctagagagaaaaaaaaaaaaaaggaaggagaagaaaacagtgatagttcttattttaaaaggaaaaaaagaggcaggaggctctcttgaggccaggagtttaagaccagcctaggcagcatttcaagaccctgtctctactaaaaagtaaaaaaaaaatttagtcaggcatggtggcatgcacctgtagtcgtagctactcaggagactgaggtgggaggattgattgagctcaggagtttgaggctgcagtgagcaatcatcatgccattgcactccagcctgggcatcagagcaagaccttgtcttttaggaaaaaaaggcagggaagaggaataggtaatttttcagtgttcagacattccagcaatatgtgtggagtactcattctcactacagtttatgaggccatagctagtatgtatgactacccatccaagtttccctgcttacagttactattccaactgattggggggcttttcctaatagagtgatttaagccttcatttttagacatctaagcccttggtgatcatcagcataaaatgtgacaaattaaacaaaagcaagacagcacatcagagaacaactctgaggtggaatgattgggaaccaatgaatagttgttcagtaaatggtttatattttacagatgatgaaactgaaacacaaaaaatttagattaactcttaggtgacaaagccaggattgaagctcatgcggtctggctccagaacaactcttcttcatagttacgttatactgcccctgcattgttggtattgaaagtaagtgtaggccctgggccttctatacctgggattaagtcacatattcctcttcctcttcaaattttactagtcttgtgagcgagaaaaagctactgaatttttctaagctcagtctttttcatttatgaaatagagatatcctttgtgggccggttgccgtggctcacgcctgtaatcccagcactttgggaggccgaggtgggtggatcacgaggtcaggagatcaagatcagttgaaaccccctctctactaaaaatacaaaaaattagccagatgtggtggcggacgcctgtagtcccagctactcgggaggctgaggcaggagaatggcgtgaacccgggaggcggagcttgtagtgagccgagatcacgccactgcactccagcctgggcgacagagcgagactccgtctcc

SEQ ID NO: 1152 - protein, 59 aa, Homosapiens [sequence omitted]

SEQ ID NO: 1153 - DNA, 3382 bp, Homosapiens
gtgagatggtcttcttttccgatttgttacaaatctcattggcttcagaagatataaggtgaatgaattcagtgcagcagttcaccaccagctctcgagcatcgttggccacccggacattaggaagagtctctttgatcattttattgatagcagctctggggatagtgagatcatcatcgttgccagacgaggaagccatagtaccttcctgtttctcgcgccccggcttttaaaaactccccagctctggtccactactccaccgagatttctcaaaaagtcgccctcggagagtgatcccggggggtgctttgcgaagagggtgcagaaaatgaacggaggagcagctggcttgagggctgggaacactcgcgtgtgtgagagatttaggatgagtttgggaagaaagtgggggcccgaggattctagagagagcacagcccaggctgaggaggggaaagcgcggtggtccggaaatttgagcggctggggaaccaccttcgtgtctcctcagaggggcgggcgctgtcgcctaactggtccccaacggcgtcggagcagaggcaagatccaggggcactggcctcgccgcggtaccgggcggcccgaacgcagatcgtggaagccgaagacgcggcaacggtggtccctccagatgccagggaaggtttgcaggaagccgctcccgacaccctttgcgccaccggaagcctcgttccctcagatttccccctccctcccggaccgacttccgggtgtggctgccgcccttcccccacccacgccggcgggagccgcccgttcgcgctgccagcagcttccgcctgctacggtcctggcaagcacctcgggatcccattccttcacagggaccctagccaggagtctctgcattagttggacagctcttctggaattatcttctaagtcaactgtgggttgggtaggtggctctgctgatttttcgctggacttccacatttgggacgagttggctgtcatcagctctagaaagggtgtggccgttttacattggctgttttcctcacattcctcaagcaggtactgtaataaagaactggagaaatacagtcagatgggaagtagcccttgctgtcaaggagcttgccatctaatgggggagacaggcaagtaaaccaaagactacacagtgcagtatggtaagtgccatgattttgatgtgacagggcacagtggacgaccttccaaatcaaagcaagtaactaggggttgacaatggtaagtatcatagttgaagtatccttgaacaaggtttcaggaagaagaagaagggaatttcatgcagggaaacagccaaagctcagtgagtcaaaatatcacagcattcttggtaagcccaattgttttttctgttttgctattttggtggagagaaaggaacacataaaggaataacatgagagaaggctatttggggaagtgtagtagttaaggttctggctcaaacaacaactgcagctcataaagttgactttagtggaaggatactggggtatctcatggaatcttgggaactgttgaataaccagggaaactctgggaaactcactggtaggaatccataaactgtcctcctggtgggctgtaaacaactcaccctctatgcatctcacatcaaaattccagtttcttgggaaaacaagtctgtttgcccaatttgggtcatatttccacgtccatgttactcaggcatgattcatctgcaagttatgtgtatagatattttgctactgttccacccttacgctgtgctggggagggaggtgtcactgtgagctgtgtcggtgccttaagagatatctgttgtgtcttattacttggttgcttttccccacatgtacaatgacaaaaatgccttcaacctatttgatccagccgttccagtacaactcctatacttgccatctttccaagcccaaaggtacatccagctgatggaaggagcatcttggtgttaatattcttttagtcatggtctctgaaagtaaaatgtctattcttctaattctggcacaatcttatctagctatagttcctcatggtcctgcactccatggactaaattgtaagtataattactaccaatgtactctataaataacttttggggccagggtggcaatagttgctagagagaaaaaaaaaaaaaaggaaggagaagaaaacagtgatagttcttattttaaaaggaaaaaaagaggcaggaggctctcttgaggccaggagtttaagaccagcctaggcagcatttcaagaccctgtctctactaaaaagtaaaaaaaaaatttagtcaggcatggtggcatgcacctgtagtcgtagctactcaggagactgaggtgggaggattgattgagctcaggagtttgaggctgcagtgagcaatcatcatgccattgcactccagcctgggcatcagagcaagaccttgtcttttaggaaaaaaaggcagggaagaggaataggtaatttttcagtgttcagacattccagcaatatgtgtggagtactcattctcactacagtttatgaggccatagctagtatgtatgactacccatccaagtttccctgcttacagttactattccaactgattggggggcttttcctaatagagtgatttaagccttcatttttagacatctaagcccttggtgatcatcagcataaaatgtgacaaattaaacaaaagcaagacagcacatcagagaacaactctgaggtggaatgattgggaaccaatgaatagttgttcagtaaatggtttatattttacagatgatgaaactgaaacacaaaaaatttagattaactcttaggtgacaaagccaggattgaagctcatgcggtctggctccagaacaactcttcttcatagttacgttatactgcccctgcattgttggtattgaaagtaagtgtaggccctgggccttctatacctgggattaagtcacatattcctcttcctcttcaaattttactagtcttgtgagcgagaaaaagctactgaatttttctaagctcagtctttttcatttatgaaatagagatatcctttgtgggccggttgccgtggctcacgcctgtaatcccagcactttgggaggccgaggtgggtggatcacgaggtcaggagatcaagatcagttgaaaccccctctctactaaaaatacaaaaaattagccagatgtggtggcggacgcctgtagtcccagctactcgggaggctgaggcaggagaatggcgtgaacccgggaggcggagcttgtagtgagccgagatcacgccactgcactccagcctgggcgacagagcgagactccgtctcc

SEQ ID NO: 1154 - protein, 274 aa, Homosapiens
MNGGAAGLRAGNTRVCERFRMSLGRKWGPEDSRESTAQAEEGKARWSGNLSGWGTTFVSPQRGGRCRLTGPQRRRSRGKIQGHWPRRGTGRPERRSWKPKTRQRWSLQMPGKVCRKPLPTPFAPPEASFPQISPSLPDRLPGVAAALPPPTPAGAARSRCQQLPPATVLASTSGSHSFTGTLARSLCISWTALLELSSKSTVGWVGGSADFSLDFHIWDELAVISSRKGVAVLHWLFSSHSSSRYCNKELEKYSQMGSSPCCQGACHLMGETGK

SEQ ID NO: 1155 - DNA, 1215 bp, Homosapiens
aagctcagtgagtcaaaatatcacagcattcttggtaagcccaattgttttttctgttttgctattttggtggagagaaaggaacacataaaggaataacatgagagaaggctatttggggaagtgtagtagttaaggttctggctcaaacaacaactgcagctcataaagttgactttagtggaaggatactggggtatctcatggaatcttgggaactgttgaataaccagggaaactctgggaaactcactggtaggaatccataaactgtcctcctggtgggctgtaaacaactcaccctctatgcatctcacatcaaaattccagtttcttgggaaaacaagtctgtttgcccaatttgggtcatatttccacgtccatgttactcaggcatgattcatctgcaagttatgtgtatagatattttgctactgttccacccttacgctgtgctggggagggaggtgtcactgtgagctgtgtcggtgccttaagagatatctgttgtgtcttattacttggttgcttttccccacatgtacaatgacaaaaatgccttcaacctatttgatccagccgttccagtacaactcctatacttgccatctttccaagcccaaaggtacatccagctgatggaaggagcatcttggtgttaatattcttttagtcatggtctctgaaagtaaaatgtctattcttctaattctggcacaatcttatctagctatagttcctcatggtcctgcactccatggactaaattgtaagtataattactaccaatgtactctataaataacttttggggccagggtggcaatagttgctagagagaaaaaaaaaaaaaaggaaggagaagaaaacagtgatagttcttatttaaaaagtaaaaaaaaaatttagtcaggcatggtggcatgcacctgtagtcgtagctactcaggagactgaggtgggaggattgattgagctcaggagtttgaggctgcagtgagcaatcatcatgccattgcactccagcctgggcatcagagcaagaccttgtcttttaggaaaaaaaggcagggaagaggaataggtaatttttcagtgttcagacattccagcaatatgtgtggagtactcattctcactacagtttatgaggccatagctagtatgtatgactacccatccaagtttccctgcttacagttactattccaactg

SEQ ID NO: 1156 - protein, 55 aa, Homosapiens
MLLRHDSSASYVYRYFATVPPLRCAGEGGVTVSCVGALRDICCVLLLGCFSPHVQ

SEQ ID NO: 1157 - DNA, 1979 bp, Homosapiens
ataccagcgctcctctgtccccaaatccagctagggaaggtttcggaggcctcagctacttgagagagggtagagacgatccttcctcgcctatctacccagccacccaccccttcccagatgtagcgtccgggccccagaccaagcgcgtgcttggagctctccggtacagtgaggcgcgcgcttgcctggctagggtccctgtgaaggaatgggatcccgaggtgcttgccaggaccgtagcaggcggaagctgctggcagcgcgaacgggcggctcccgccggcgtgggtgggggaagggcggcagccacacccggaagtcggtccgggagggagggggaaatctgagggaacgaggcttccggtggcgcaaagggtgtcgggagcggcttcctgcaaaccttccctggcatctggagggaccaccgttgccgcgtcttcggcttccacgatctgcgttcgggctacgcggccacggcggcagccactgcgactcccactgtgcctggctctgtccatattagttcccaggcggccgtcgccgttccagcagcggcagcggcagcggcagcggcggacatgttgtgaggcggcggcgcgggtgtctgaaggatggtttggccgaggcggcggcaacggctgctggcggcggcggcagcggcagcggggcctcgggctctatagagccgagcccgctgggtacccgcccggtaccgcggcgaggccagtgcccctggatcttgcctctgctccgacgccgttggggaccagttaggcgacagcgcccgcccctctgaggagacacgaaggtggttccccagccgctcaaatttccggaccaccgcgctttcccctcctcagcctgggctgtgctctctctagaatcctcgggcccccactttcttcccaaactcatcctaaatctctcacacacgcgagtgttcccagccctcaagccagctgctcctccgttcattttctgcaccctcttcgcaaagcaccccccgggatcactctccgagggcgactttttgagaaatctcggtggagtagtggaccagagctggggagtttttaaaagccggggcgcgagaaacaggaaggtactatggcttcctcgtctggcaacgatgatgatctcactatccccagagctgctatcaataaaatgatcaaagagactcttcctaatgtccgggtggccaacgatgctcgagagctggtggtgaactgctgcactgaattcattcaccttatatcttctgaagccaatgagatttgtaacaaatcggaaaagaagaccatctcaccagagcatgtcatacaagcactagaaagtttgggatttggctcttacatcagtgaagtaaaagaagtcttgcaagagtgtaaaacagtagcattaaaaagaagaaaggccagttctcgtttggaaaaccttggcattcctgaagaagagttattgagacagcaacaagaattatttgcaaaagctagacagcaacaagcagaattggcccaacaggaatggcttcaaatgcagcaagctgcccaacaagcccagcttgctgctgcctcagccagtgcatctaatcaggcgggatcttctcaggatgaagaagatgatgatgatatctgaaattcaccagctgagtttctatttcttctataaatgtttttccctgcacaacaaaaacagtgaaagaaatgcttatctgtaattttgtatgcatcttggtggacttgtcattggtattctagggatgtctgctattaagtttcatctattgtgtgctatacatgtaaaaactgtctctttgaactattgaaaatttaaggttcagtataatatcaattttgaatttttaatggtgtttatgaaattttagatagcagcgagtccttcgtttgatcaataaacagtgttacagataacttcaagtttataaaaatacagtgaaatttctacaaagctct

SEQ ID NO: 1158 - protein, 176 aa, Homosapiens; identical to SEQ ID NO: 62

SEQ ID NO: 1159 - DNA, 3470 bp, Homosapiens
ataccagcgctcctctgtccccaaatccagctagggaaggtttcggaggcctcagctacttgagagagggtagagacgatccttcctcgcctatctacccagccacccaccccttcccagatgtagcgtccgggccccagaccaagcgcgtgcttggagctctccggtacagtgaggcgcgcgcttgcctggctagggtccctgtgaaggaatgggatcccgaggtgcttgccaggaccgtagcaggcggaagctgctggcagcgcgaacgggcggctcccgccggcgtgggtgggggaagggcggcagccacacccggaagtcggtccgggagggagggggaaatctgagggaacgaggcttccggtggcgcaaagggtgtcgggagcggcttcctgcaaaccttccctggcatctggagggaccaccgttgccgcgtcttcggcttccacgatctgcgttcgggctacgcggccacggcggcagccactgcgactcccactgtgcctggctctgtccatattagttcccaggcggccgtcgccgttccagcagcggcagcggcagcggcagcggcggacatgttgtgaggcggcggcgcgggtgtctgaaggatggtttggccgaggcggcggcaacggctgctggcggcggcgacagcgcccgcccctctgaggagacacgaaggtggttccccagccgctcaaatttccggaccaccgcgctttcccctcctcagcctgggctgtgctctctctagaatcctcgggcccccactttcttcccaaactcatcctaaatctctcacacacgcgagtgttcccagccctcaagccagctgctcctccgttcattttctgcaccctcttcgcaaagcaccccccgggatcactctccgagggcgactttttgagaaatctcggtggagtagtggaccagagctggggagtttttaaaagccggggcgcgagaaacaggaaggtactatggcttcctcgtctggcaacgatgatgatctcactatccccagagctgctatcaataaaatgatcaaagagactcttcctaatgtccgggtggccaacgatgctcgagagctggtggtgaactgctgcactgaattcattcaccttatatcttctgaagccaatgagatttgtaacaaatcggaaaagaagaccatctcaccagagcatgtcatacaagcactagaaagtttgggatttggctcttacatcagtgaagtaaaagaagtcttgcaagagtgtaaaacagtagcattaaaaagaagaaaggccagttctcgtttggaaaaccttggcattcctgaagaagagttattgagacagcaacaagaattatttgcaaaagctagacagcaacaagcagaattggcccaacaggaatggcttcaaatgcagcaagctgcccaacaagcccagcttgctgctgcctcagccagtgcatctaatcaggcgggatcttctcaggatgaagaagatgatgatgatatctgaaattcaccagctgagtttctatttcttctataaatgtttttccctgcacaacaaaaacagtgaaagaaatgcttatctgtaattttgtatgcatcttggtggacttgtcattggtattctagggatgtctgctattaagtttcatctattgtgtgctatacatgtaaaaactgtctctttgaactattgaaaatttaaggttcagtataatatcaattttgaatttttaatggtgtttatgaaattttagatagcagcgagtccttcgtttgatcaataaacagtgttacagataacttcaagtttataaaaatacagtgaaatttctacaaagctctaaatctgcatttgcatttcctctgcccttttaactaaactaaaacttgtgaattttaaattattaaggggggggtgctgtgtgaatcagtagacattggattgggttggtgaaagagttcagttctgtagtatctgaatttgtcttttaaaatgagtacatatataggcaataaatatatatgctcagatcaatatacttgtttagaaaaacttcaagacattcaaaaactaggaaggagtatgtttaatagtatttgtataaatttggtggttatgtttttttattttgtttctgttttgtgtagaggtaaaaactatagttttattacagcataattcattttgagctccactatgacatttcaaagactgcccagtttggaagtctgtcatgatttttactctttcactccaattcagtaattgttgatagtattacttacctagtccatccatactcatattattcaaatatataggtggtacttttgaaacaattacattggttctcttggtttaactgaggtttatgaatattcaaacctttgctgggggaaagaaatgaaagttaatgagcatgcttgctatgagagagggatttttaatttaacttgtagttatagtttacttattgtttttagaattacttttacattttcccaactagatggcctagagtccaacattaccttttgagatgacattattgtctccataattgagtgatagctttaaaaaaaagattagttttgcttaagaagttatgttacaactgatcagccctatatgaattaactgatcagccctatatgaaacataagttgtgttataacttatcagccgtatatggaacataaatagtttctacctgcttgttagagaagctttaatttggttctaataaatacagtatggtagtgtttataggaatccaggatgttgaagaaatggcataatgtctatattttggaaacagaaaggaaaagtcacttaagatagtattaagtaattaaattcctatgtcagttgccaaatcttttaaacttatgtattcaccaagcccaaaaatagattgtggctcccaggattccaattttaattggagagctaagtaagtaaagttttataactgttaggtttcttaatgatcatattttgcagttttagtaaaagggaaatattgttatacatttattaaatatacttcccccatgaagtgaaaaggttaattttgctgaatgttttaagttgaagttacttcatggatgtcatacccatgaagtgcatttggatgagatagaagaaattgttttttaaaaagtttaagtaccaaaggtagtctagtctagaacgataagttaatacgtgttggcttttctaatttgtactgtaacatccttatactttctattttaagtatatctgtttcttaagtaaacaacttagatattttccacacctttttttttttttctgatgcagagttcaggttaatattttactgcatctgataatgtattatacgtttgaagcctagtgacttttcattttgacattcttgtgatttcatatgctgtattcttcaagcaataaaattgtgatgtgttttataaa

SEQ ID NO: 1160 - protein, 176 aa, Homosapiens; identical to SEQ ID NO: 62

SEQ ID NO: 1161 - DNA, 3594 bp, Homosapiens
ataccagcgctcctctgtccccaaatccagctagggaaggtttcggaggcctcagctacttgagagagggtagagacgatccttcctcgcctatctacccagccacccaccccttcccagatgtagcgtccgggccccagaccaagcgcgtgcttggagctctccggtacagtgaggcgcgcgcttgcctggctagggtccctgtgaaggaatgggatcccgaggtgcttgccaggaccgtagcaggcggaagctgctggcagcgcgaacgggcggctcccgccggcgtgggtgggggaagggcggcagccacacccggaagtcggtccgggagggagggggaaatctgagggaacgaggcttccggtggcgcaaagggtgtcgggagcggcttcctgcaaaccttccctggcatctggagggaccaccgttgccgcgtcttcggcttccacgatctgcgttcgggctacgcggccacggcggcagccactgcgactcccactgtgcctggctctgtccatattagttcccaggcggccgtcgccgttccagcagcggcagcggcagcggcagcggcggacatgttgtgaggcggcggcgcgggtgtctgaaggatggtttggccgaggcggcggcaacggctgctggcggcggcggcagcggcagcggggcctcgggctctatagagccgagcccgctgggtacccgcccggtaccgcggcgaggccagtgcccctggatcttgcctctgctccgacgccgttggggaccagttaggcgacagcgcccgcccctctgaggagacacgaaggtggttccccagccgctcaaatttccggaccaccgcgctttcccctcctcagcctgggctgtgctctctctagaatcctcgggcccccactttcttcccaaactcatcctaaatctctcacacacgcgagtgttcccagccctcaagccagctgctcctccgttcattttctgcaccctcttcgcaaagcaccccccgggatcactctccgagggcgactttttgagaaatctcggtggagtagtggaccagagctggggagtttttaaaagccggggcgcgagaaacaggaaggtactatggcttcctcgtctggcaacgatgatgatctcactatccccagagctgctatcaataaaatgatcaaagagactcttcctaatgtccgggtggccaacgatgctcgagagctggtggtgaactgctgcactgaattcattcaccttatatcttctgaagccaatgagatttgtaacaaatcggaaaagaagaccatctcaccagagcatgtcatacaagcactagaaagtttgggatttggctcttacatcagtgaagtaaaagaagtcttgcaagagtgtaaaacagtagcattaaaaagaagaaaggccagttctcgtttggaaaaccttggcattcctgaagaagagttattgagacagcaacaagaattatttgcaaaagctagacagcaacaagcagaattggcccaacaggaatggcttcaaatgcagcaagctgcccaacaagcccagcttgctgctgcctcagccagtgcatctaatcaggcgggatcttctcaggatgaagaagatgatgatgatatctgaaattcaccagctgagtttctatttcttctataaatgtttttccctgcacaacaaaaacagtgaaagaaatgcttatctgtaattttgtatgcatcttggtggacttgtcattggtattctagggatgtctgctattaagtttcatctattgtgtgctatacatgtaaaaactgtctctttgaactattgaaaatttaaggttcagtataatatcaattttgaatttttaatggtgtttatgaaattttagatagcagcgagtccttcgtttgatcaataaacagtgttacagataacttcaagtttataaaaatacagtgaaatttctacaaagctctaaatctgcatttgcatttcctctgcccttttaactaaactaaaacttgtgaattttaaattattaaggggggggtgctgtgtgaatcagtagacattggattgggttggtgaaagagttcagttctgtagtatctgaatttgtcttttaaaatgagtacatatataggcaataaatatatatgctcagatcaatatacttgtttagaaaaacttcaagacattcaaaaactaggaaggagtatgtttaatagtatttgtataaatttggtggttatgtttttttattttgtttctgttttgtgtagaggtaaaaactatagttttattacagcataattcattttgagctccactatgacatttcaaagactgcccagtttggaagtctgtcatgatttttactctttcactccaattcagtaattgttgatagtattacttacctagtccatccatactcatattattcaaatatataggtggtacttttgaaacaattacattggttctcttggtttaactgaggtttatgaatattcaaacctttgctgggggaaagaaatgaaagttaatgagcatgcttgctatgagagagggatttttaatttaacttgtagttatagtttacttattgtttttagaattacttttacattttcccaactagatggcctagagtccaacattaccttttgagatgacattattgtctccataattgagtgatagctttaaaaaaaagattagttttgcttaagaagttatgttacaactgatcagccctatatgaattaactgatcagccctatatgaaacataagttgtgttataacttatcagccgtatatggaacataaatagtttctacctgcttgttagagaagctttaatttggttctaataaatacagtatggtagtgtttataggaatccaggatgttgaagaaatggcataatgtctatattttggaaacagaaaggaaaagtcacttaagatagtattaagtaattaaattcctatgtcagttgccaaatcttttaaacttatgtattcaccaagcccaaaaatagattgtggctcccaggattccaattttaattggagagctaagtaagtaaagttttataactgttaggtttcttaatgatcatattttgcagttttagtaaaagggaaatattgttatacatttattaaatatacttcccccatgaagtgaaaaggttaattttgctgaatgttttaagttgaagttacttcatggatgtcatacccatgaagtgcatttggatgagatagaagaaattgttttttaaaaagtttaagtaccaaaggtagtctagtctagaacgataagttaatacgtgttggcttttctaatttgtactgtaacatccttatactttctattttaagtatatctgtttcttaagtaaacaacttagatattttccacacctttttttttttttctgatgcagagttcaggttaatattttactgcatctgataatgtattatacgtttgaagcctagtgacttttcattttgacattcttgtgatttcatatgctgtattcttcaagcaataaaattgtgatgtgttttataaa

SEQ ID NO: 1162 - protein, 176 aa, Homosapiens; identical to SEQ ID NO: 62

SEQ ID NO: 1163 - DNA, 630 bp, Homosapiens
aaaggttctcaaactgtggtccatggacttatgccaaaactgtggcttgagggctgggaacactcgcgtgtgtgagagatttaggatgagtttgggaagaaagtgggggcccgaggattctagagagagcacagcccaggctgaggaggggaaagcgcggtggtccggaaatttgagcggctggggaaccaccttcgtgtctcctcagaggggcgggcgctgtcgcctaactggtccccaacggcgtcggagcagaggcaagatccaggggcactggcctcgccgcggtaccgggcgggtacccagcgggctcggctctatagagcccgaggccccgctgccgctgccgccgccgccagcagccgttgccgccgcctcggccaaaccatccttcagacacccgcgccgccgcctcacaacatgtccgccgctgccgctgccgctgccgctgctggaacggcgacggccgcctgggaactaatatggacagagccaggcacagtgggagtcgcagtggctgccgccgtggccgcgtagcccgaacgcagatcgtggaagccgaagacgcggcaacggtggtccctccagatgccagggaaggtttgcaggaagccgctcccgacacccttt

SEQ ID NO: 1164 - protein, 152 aa, Homosapiens
MDLCQNCGLRAGNTRVCERFRMSLGRKWGPEDSRESTAQAEEGKARWSGNLSGWGTTFVSPQRGGRCRLTGPQRRRSRGKIQGHWPRRGTGRVPSGLGSIEPEAPLPLPPPPAAVAAASAKPSFRHPRRRLTTCPPLPLPLPLLERRRPPGN

SEQ ID NO: 1165 - DNA, 1393 bp, Homosapiens
tgcctggctctgtccatattagttcccaggcggccgtcgccgttccagcagcggcagcggcagcggcagcgcagcggcagcggggcctcgggctctatagagccgagcccgctgggtacccgcccggtaccgcggcgaggccagtgcccctggatcttgcctctgctccgacgccgttggggaccagttaggcgacagcgcccgcccctctgaggagacacgaaggtggttccccagccgctcaaatttccggaccaccgcgctttcccctcctcagcctgggctgtgctctctctagaatcctcgggcccccactttcttcccaaactcatcctaaatctctcacacacgcgagtgttcccagccctcaagccagctgctcctccgttcattttctgcaccctcttcgcaaagcaccccccgggatcactctccgagggcgactttttgagaaatctcggtggagtagtggaccagagctggggagtttttaaaagccggggcgcgagaaacaggaaggtactatggcttcctcgtctggcaacgatgatgatctcactatccccagagctgctatcaataaaatgatcaaagagactcttcctaatgtccgggtggccaacgatgctcgagagctggtggtgaactgctgcactgaattcattcaccttatatcttctgaagccaatgagatttgtaacaaatcggaaaagaagaccatctcaccagagcatgtcatacaagcactagaaagtttgggatttggctcttacatcagtgaagtaaaagaagtcttgcaagagtgtaaaacagtagcattaaaaagaagaaaggccagttctcgtttggaaaaccttggcattcctgaagaagagttattgagacagcaacaagaattatttgcaaaagctagacagcaacaagcagaattggcccaacaggaatggcttcaaatgcagcaagctgcccaacaagcccagcttgctgctgcctcagccagtgcatctaatcaggcgggatcttctcaggatgaagaagatgatgatgatatctgaaattcaccagctgagtttctatttcttctataaatgtttttccctgcacaacaaaaacagtgaaagaaatgcttatctgtaattttgtatgcatcttggtggacttgtcattggtattctagggatgtctgctattaagtttcatctattgtgtgctatacatgtaaaaactgtctctttgaactattgaaaatttaaggttcagtataatatcaattttgaatttttaatggtgtttatgaaattttagatagcagcgagtccttcgtttgatcaataaacagtgttacagataacttcaagtttataaaaatacagtgaaatttctacaaagctct

SEQ ID NO: 1166 - protein, 176 aa, Homosapiens; identical to SEQ ID NO: 62

SEQ ID NO: 1167 - DNA, 3008 bp, Homosapiens
tgcctggctctgtccatattagttcccaggcggccgtcgccgttccagcagcggcagcggcagcggcagcgcagcggcagcggggcctcgggctctatagagccgagcccgctgggtacccgcccggtaccgcggcgaggccagtgcccctggatcttgcctctgctccgacgccgttggggaccagttaggcgacagcgcccgcccctctgaggagacacgaaggtggttccccagccgctcaaatttccggaccaccgcgctttcccctcctcagcctgggctgtgctctctctagaatcctcgggcccccactttcttcccaaactcatcctaaatctctcacacacgcgagtgttcccagccctcaagccagctgctcctccgttcattttctgcaccctcttcgcaaagcaccccccgggatcactctccgagggcgactttttgagaaatctcggtggagtagtggaccagagctggggagtttttaaaagccggggcgcgagaaacaggaaggtactatggcttcctcgtctggcaacgatgatgatctcactatccccagagctgctatcaataaaatgatcaaagagactcttcctaatgtccgggtggccaacgatgctcgagagctggtggtgaactgctgcactgaattcattcaccttatatcttctgaagccaatgagatttgtaacaaatcggaaaagaagaccatctcaccagagcatgtcatacaagcactagaaagtttgggatttggctcttacatcagtgaagtaaaagaagtcttgcaagagtgtaaaacagtagcattaaaaagaagaaaggccagttctcgtttggaaaaccttggcattcctgaagaagagttattgagacagcaacaagaattatttgcaaaagctagacagcaacaagcagaattggcccaacaggaatggcttcaaatgcagcaagctgcccaacaagcccagcttgctgctgcctcagccagtgcatctaatcaggcgggatcttctcaggatgaagaagatgatgatgatatctgaaattcaccagctgagtttctatttcttctataaatgtttttccctgcacaacaaaaacagtgaaagaaatgcttatctgtaattttgtatgcatcttggtggacttgtcattggtattctagggatgtctgctattaagtttcatctattgtgtgctatacatgtaaaaactgtctctttgaactattgaaaatttaaggttcagtataatatcaattttgaatttttaatggtgtttatgaaattttagatagcagcgagtccttcgtttgatcaataaacagtgttacagataacttcaagtttataaaaatacagtgaaatttctacaaagctctaaatctgcatttgcatttcctctgcccttttaactaaactaaaacttgtgaattttaaattattaaggggggggtgctgtgtgaatcagtagacattggattgggttggtgaaagagttcagttctgtagtatctgaatttgtcttttaaaatgagtacatatataggcaataaatatatatgctcagatcaatatacttgtttagaaaaacttcaagacattcaaaaactaggaaggagtatgtttaatagtatttgtataaatttggtggttatgtttttttattttgtttctgttttgtgtagaggtaaaaactatagttttattacagcataattcattttgagctccactatgacatttcaaagactgcccagtttggaagtctgtcatgatttttactctttcactccaattcagtaattgttgatagtattacttacctagtccatccatactcatattattcaaatatataggtggtacttttgaaacaattacattggttctcttggtttaactgaggtttatgaatattcaaacctttgctgggggaaagaaatgaaagttaatgagcatgcttgctatgagagagggatttttaatttaacttgtagttatagtttacttattgtttttagaattacttttacattttcccaactagatggcctagagtccaacattaccttttgagatgacattattgtctccataattgagtgatagctttaaaaaaaagattagttttgcttaagaagttatgttacaactgatcagccctatatgaattaactgatcagccctatatgaaacataagttgtgttataacttatcagccgtatatggaacataaatagtttctacctgcttgttagagaagctttaatttggttctaataaatacagtatggtagtgtttataggaatccaggatgttgaagaaatggcataatgtctatattttggaaacagaaaggaaaagtcacttaagatagtattaagtaattaaattcctatgtcagttgccaaatcttttaaacttatgtattcaccaagcccaaaaatagattgtggctcccaggattccaattttaattggagagctaagtaagtaaagttttataactgttaggtttcttaatgatcatattttgcagttttagtaaaagggaaatattgttatacatttattaaatatacttcccccatgaagtgaaaaggttaattttgctgaatgttttaagttgaagttacttcatggatgtcatacccatgaagtgcatttggatgagatagaagaaattgttttttaaaaagtttaagtaccaaaggtagtctagtctagaacgataagttaatacgtgttggcttttctaatttgtactgtaacatccttatactttctattttaagtatatctgtttcttaagtaaacaacttagatattttccacacctttttttttttttctgatgcagagttcaggttaatattttactgcatctgataatgtattatacgtttgaagcctagtgacttttcattttgacattcttgtgatttcatatgctgtattcttcaagcaataaaattgtgatgtgttttataaa

SEQ ID NO: 1168 - protein, 176 aa, Homosapiens; identical to SEQ ID NO: 62

SEQ ID NO: 1169 - DNA, 638 bp, Homosapiens
accagttaggcgacagcgcccgcccctctgaggagacacgaaggtggttccccagccgctcaaatttccggaccaccgcgctttcccctcctcagcctgggctgtgctctctctagaatcctcgggcccccactttcttcccaaactcatcctaaatctctcacacacgcgagtgttcccagccctcaagccagctgctcctccgttcattttctgcaccctcttcgcaaagcaccccccgggatcactctccgagggcgactttttgagaaatctcggtggagtagtggaccagagctggggagtttttaaaagccggggcgcgagaaacaggaaggtactatggcttcctcgtctggcaacgatgatgatctcactatccccagagctgctatcaataaaatgatcaaagagactcttcctaatgtccgggtggccaacgatgctcgagagctggtggtgaactgctgcactgaattcattcaccttatatcttctgaagccaatgagatttgtaacaaatcggaaaagaagaccatctcaccagagcatgtcatacaagcactagaaagtttgggatttggctcttacatcagtgaagtaaaagaagtcttgcaagagtgtaaaacagtagcatt

SEQ ID NO: 1170 - protein, 97 aa, Homosapiens
MASSSGNDDDLTIPRAAINKMIKETLPNVRVANDARELVVNCCTEFIHLISSEANEICNKSEKKTISPEHVIQALESLGFGSYISEVKEVLQECKTV

SEQ ID NO: 1171 - DNA, 1172 bp, Homosapiens
gaaggtggttccccagccgctcaaatttccggaccaccgcgctttcccctcctcagcctgggctgtgctctctctagaatcctcgggcccccactttcttcccaaactcatcctaaatctctcacacacgcgagtgttcccagccctcaagccagctgctcctccgttcattttctgcaccctcttcgcaaagcaccccccgggatcactctccgagggcgactttttgagaaatctcggtggagtagtggaccagagctggggagtttttaaaagccggggcgcgagaaacaggaaggtactatggcttcctcgtctggcaacgatgatgatctcactatccccagagctgctatcaataaaatgatcaaagagactcttcctaatgtccgggtggccaacgatgctcgagagctggtggtgaactgctgcactgaattcattcaccttatatcttctgaagccaatgagatttgtaacaaatcggaaaagaagaccatctcaccagagcatgtcatacaagcactagaaagtttgggatttggctcttacatcagtgaagtaaaagaagtcttgcaagagtgtaaaacagtagcattaaaaagaagaaaggccagttctcgtttggaaaaccttggcattcctgaagaagagttattgagacagcaacaagaattatttgcaaaagctagacagcaacaagcagaattggcccaacaggaatggcttcaaatgcagcaagctgcccaacaagcccagcttgctgctgcctcagccagtgcatctaatcaggcgggatcttctcaggatgaagaagatgatgatgatatctgaaattcaccagctgagtttctatttcttctataaatgtttttccctgcacaacaaaaacagtgaaagaaatgcttatctgtaattttgtatgcatcttggtggacttgtcattggtattctagggatgtctgctattaagtttcatctattgtgtgctatacatgtaaaaactgtctctttgaactattgaaaatttaaggttcagtataatatcaattttgaatttttaatggtgtttatgaaattttagatagcagcgagtccttcgtttgatcaataaacagtgttacagataacttcaagtttataaaaatacagtgaaatttctacaaagctct

SEQ ID NO: 1172 - protein, 176 aa, Homosapiens; identical to SEQ ID NO: 62

SEQ ID NO: 1173 - DNA, 559 bp, Homosapiens
gctttcccctcctcagcctgggctgtgctctctctagaatcctcgggcccccactttcttcccaaactcatcctaaatctctcacacacgcgagtgttcccagccctcaagccagctgctcctccgttcattttctgcaccctcttcgcaaagcaccccccgggatcactctccgagggcgactttttgagaaatctcggtggagtagtggaccagagctggggagtttttaaaagccggggcgcgagaaacaggaaggtactatggcttcctcgtctggcaacgatgatgatctcactatccccagagctgctatcaataaaatgatcaaagagactcttcctaatgtccgggtggccaacgatgctcgagagctggtggtgaactgctgcactgaattcattcaccttatatcttctgaagccaatgagatttgtaacaaatcggaaaagaagaccatctcaccagagcatgtcatacaagcactagaaagtttgggatttggctcttacatcagtgaagtaaaagaagtcttgcaagagtgtaaaacagtagcatt

SEQ ID NO: 1174 - protein, 97 aa, Homosapiens; identical to SEQ ID NO: 1170

SEQ ID NO: 1175 - DNA, 1286 bp, Homosapiens
aacctatcataggcactaaagaggaaaagcctttgaagcaggcgttagtacatgcaatgttataattcatatgaatatgaggtacaaaagaagaggtgttgatgttttaaaaacattaatggctatttattgatattgcagaccacctagagaatgctaaattgaacatttagtgacagaagattttctcctggatactttaaatacataaaaacttggcagagtttttatgaaatataaattttattgtattcatttacatattaaaaaatagactcagaggcggaaaaacttccttgaaattgtttgtcatttgttctacagttacttactgaagtcattactatttaccaagcatcatgctaggtgctaggcttacaagagtgaacaaggagacagggttcctgtcattatagagcttaatctactggggaagattgagtgggaaagattgacttaaataaaacagtaagttcagaaagttaggaagtgttggagtctatatttaaacttaggtattttgacccaaaagcctgtactgtttctaacataccatgctgatgctctagcctccattttatatgcttaaacttattatggggcttttaaatagaatatgtattatccttgccagggcaaaatataaagaaataattgactgcctgctatatctgtcttcacctttctatccctattatctgtttttttattcctcttttttgtctcccttgtttcttaccctgacttatgtatgaagatctctagtatttctttactattgtgaggatgaccagcggagaggctagacagcaacaagcagaattggcccaacaggaatggcttcaaatgcagcaagctgcccaacaagcccagcttgctgctgcctcagccagtgcatctaatcaggcgggatcttctcaggatgaagaagatgatgatgatatctgaaattcaccagctgagtttctatttcttctataaatgtttttccctgcacaacaaaaacagtgaaagaaatgcttatctgtaattttgtatgcatcttggtggacttgtcattggtattctagggatgtctgctattaagtttcatctattgtgtgctatacatgtaaaaactgtctctttgaactattgaaaatttaaggttcagtataatatcaattttgaatttttaatggtgtttatgaaattttagatagcagcgagtccttcgtttgatcaataaacagtgttacagataacttcaagtttataaaaatacagtgaaatttctacaaagctct

SEQ ID NO: 1176 - protein, 53 aa, Homosapiens
MTSGEARQQQAELAQQEWLQMQQAAQQAQLAAASASASNQAGSSQDEEDDDDI

SEQ ID NO: 1177 - DNA, 792 bp, Homosapiens
tggattctagaagtttattagtgacataaatatgaagttaatggcatcttttataggcacaacaaaagaaacaaacgtattagaaggtatttgcataatcagaccattttgagcctggtatgttttccccagtaattggagcatccttagatgccttaacaacaaggacagtttctccatcctttgctgcatacatactttctaatactatctctctccttccactcccaattcctaataaaaatctctgattcacattaaaaacttattctggcaagtctccctcttccacctctactgctttctatgttagtgacaagtgctattcatataaaatatacaaaggcaagaaacataaagttaaaaggaaacagtatgtactattcttcatactcaatacatcatacataaaatacggagtttcataagtaaaacaaaatactgcatactgtatgtctattatttttaatggtgtgcctgtgttaccagtctatgactggactatcaatacttaccctcacagaggaaataaacaaatgaaataacatatgtaaaaaaactattacaaaaagagttgatcctcattgttcatatcacatacagcaggtcctcaactaatgtaatttctttttttgtttgtttttttgagacgaagtcttgctctgttgtcaggctggagtgcagtgtcgcgatctcaactcactgcaacctccgccttctgggttcaagaaatcccctgcctcggcctcccaaagtgctgggattacaggcgtaagccaccacacccggcct

SEQ ID NO: 1178 - protein, 43 aa, Homosapiens
MFSPVIGASLDALTTRTVSPSFAAYILSNTISLLPLPIPNKNL

SEQ ID NO: 1179 - DNA, 3887 bp, Homosapiens
atgagctggggcacggagctgtgggatcagttcgacagcttagacaagcatacacaatggggaattgacttcttggaaagatatgccaaatttgttaaagagaggatagaaattgaacagaactatgcgaaacaattgagaaatctggttaagaagtactgccccaaacgttcatccaaagatgaagagccacggtttacctcgtgtgtagccttttttaatatccttaatgagttaaatgactatgcaggacagcgagaagttgtagcagaagaaatggcgcacagagtgtatggtgaattaatgagatatgctcatgatctgaaaactgaaagaaaaatgcatctgcaagaaggacgaaaagctcaacaatatcttgacatgtgctggaaacagatggataatagtaaaaagaagtttgaaagagaatgtagagaggcagaaaaggcacaacagagttatgaaagattggataatgatactaatgcaaccaaggcagatgttgaaaaggccaaacagcagttgaatctgcgtacgcatatggccgatgaaaataaaaatgaatatgctgcacaattacaaaactttaatggagaacaacataaacatttttatgtagtgattcctcagatttacaagcaactacaagaaatggacgaacgaaggactattaaactcagtgagtgttacagaggatttgctgactcagaacgcaaagttattcccatcatttcaaaatgtttggaaggaatgattcttgcagcaaaatcagttgatgaaagaagagactctcaaatggtggtagactccttcaaatctggttttgaacctccaggagactttccatttgaagattacagtcaacatatatatagaaccatttctgatgggactatcagtgcatccaaacaggagagtgggaagatggatgccaaaaccacagtaggaaaggccaagggcaaattgtggctctttggaaagaagccaaagggcccagcactagaagatttcagtcatctgccaccagaacagagacgtaaaaaactacagcagcgcattgatgaacttaacagagaactacagaaagaatcagaccaaaaagatgcactcaacaaaatgaaagatgtatatgagaagaatccacaaatgggggatccagggagtttgcagcctaaattagcagagaccatgaataacattgaccgcctacgaatggaaatccataagaatgaggcttggctctctgaagtcgaaggcaaaacaggtgggagaggagacagaagacatagcagtgacataaatcatcttgtaacacagggacgagaaagtcctgagggaagttacactgatgatgcaaaccaggaagtccgtgggccaccccagcagcatggtcaccacaatgagtttgatgatgaatttgaggatgatgatcccttgcctgctattggacactgcaaagctatctacccttttgatggacataatgaaggtactctagcaatgaaagaaggtgaagttctctacattatagaggaggacaaaggtgacggatggacaagagctcggagacagaacggtgaagaaggctacgttcccacgtcatacatagatgtaactctagagaaaaacagtaaaggttcctgaagagggtttctgaggaaatgggcaagatgttgaaggaggttacatgcagctgcttttgggggagggtattagagttgtcaggctcaaagagagtgagagaagcaagttgcatgagtgcatgcagacatgattttttttttactaacttcattagcatttccatacattgtttttaaaaatcataataccaacccttaagttcctagttcacagttattcccacaaaagaaaaagccaacaatagtgtaccatttttctatttattttattgctgtctaatcaataaagaatgcagagctgtcaaaaaatgtgtcttacattagctgtcccaacaggattgtcttccctcccagctctgttttaattggcttttagacccactatctgtcagatccttgccatctgtcagtgtctgcctgcgccacctccgtgcttgcttaacatcctgttgcatgtctagcgtgattgagctagatttttcaggcatgtctttagattcccttgttcttgtcaaagccttgttttgttttacatttgtagtgcaaatcactttgtcaaacatctccagcactaatgtttccatcttagtatttgtgcacactgctataacttccccactgcaaacattccagttttggcattacgaagaagtagctgtgaacctgaagtatttatgataagaaaaagaaaacatctctgctgtagcctacagcccagttgaaagaactctttgaaacgtgatacatcttcagcacctcagtctgggaagaatctagtcagcactgaaatcctggcataataaacacagaagatattcaccacctcaagacaaaggactattgtcaaaagtcagctgcttccattcaaatgctgccttaaacttgagtgcctaaatctgttgattgccaacactaccactacagtatcccacaaagggctttatgtgtcagctcagtgcgacctgctttaactctgcagcaccgctgcagctgccgatgtagcctcggtaggtggctattagagctctaccatatacagtggtgcatcttcaaatttatgcatcaaactaaagacatgtccaagtccattttaatttcctcagtggttttatgagaagttttatgggcctcccccaattgtctttttattttgggttatgacgatcatgtttgataattacaatgatagtctctttccacgtgatgcttttgtttgaacctgataaaatttagtgaaactttgtaatgatctatgtgcacttttacttgtaaaatggaatttctgtatgtttatacttgtaaatatgattgttgttagtgctcctgttgctcatggtgtcctgcctcgcatttgtgattctgttaatgacatgtatcttaactaatttcttagtggtgttgtaatagggagatggggcaggtggggggttatttgtaccactgaatcttcattaatttggttctttactgttttgaggggagaaagaacgtgaaatggtttgtgtattattgaattttaagcaatattttagaagctgtgtgactgctttaataactttttcccagtgttatttgaatcatactacccgttatactaaagctgaatgacaattgtgtgaaagttactgccttcataagatcaagtcaccactgttacacagctgacatatagtgtattacctttgcagctagtaaactataaagtttagatattgaatctcgttacagggttatttatataatgtgacattattcagtactgacagactacatgaagtagttttaaaatctagtgctatttttattttaaaggttagcaatgaggaggaaatgtgatctggctgtgtttgtcttctgtacaaagcctgaagtgcttatggttttttggctaacagccacagagggcaaagtttaagactttcttgtaaggactaactgttcttttcaagctactgtttgtttttctaaaagcaggatttgcttccgtaggaggcaagttccttgatgtggaatagtgcaacctgtatatgggttattataataggaaagacatttgtacttgcacagtttaaatcattcttaaattttgaacatgtgaattgtcccaaaaaatctttaattttttggtaatttttactctttttgtgcacatgttgatttcttaatggtaaatccttcatttaaagatagtgttctctgttgagaatatttacatggaataaaacaatcttttcatggcctgtt

SEQ ID NO: 1180 - protein, 547 aa, Homosapiens; identical to SEQ ID NO: 66

SEQ ID NO: 1181 - DNA, 3992 bp, Homosapiens
atgagctggggcacggagctgtgggatcagttcgacagcttagacaagcatacacaatggggaattgacttcttggaaagatatgccaaatttgttaaagagaggatagaaattgaacagaactatgcgaaacaattgagaaatctggttaagaagtactgccccaaacgttcatccaaagatgaagagccacggtttacctcgtgtgtagccttttttaatatccttaatgagttaaatgactatgcaggacagcgagaagttgtagcagaagaaatggcgcacagagtgtatggtgaattaatgagatatgctcatgatctgaaaactgaaagaaaaatgcatctgcaagaaggacgaaaagctcaacaatatcttgacatgtgctggaaacagatggataatagtaaaaagaagtttgaaagagaatgtagagaggcagaaaaggcacaacagagttatgaaagattggataatgatactaatgcaaccaaggcagatgttgaaaaggccaaacagcagttgaatctgcgtacgcatatggccgatgaaaataaaaatgaatatgctgcacaattacaaaactttaatggagaacaacataaacatttttatgtagtgattcctcagatttacaagcaactacaagaaatggacgaacgaaggactattaaactcagtgagtgttacagaggatttgctgactcagaacgcaaagttattcccatcatttcaaaatgtttggaaggaatgattcttgcagcaaaatcagttgatgaaagaagagactctcaaatggtggtagactccttcaaatctggttttgaacctccaggagactttccatttgaagattacagtcaacatatatatagaaccatttctgatgggactatcagtgcatccaaacaggagagtgggaagatggatgccaaaaccacagtaggaaaggccaagggcaaattgtggctctttggaaagaagccaaagggcccagcactagaagatttcagtcatctgccaccagaacagagacgtaaaaaactacagcagcgcattgatgaacttaacagagaactacagaaagaatcagaccaaaaagatgcactcaacaaaatgaaagatgtatatgagaagaatccacaaatgggggatccagggagtttgcagcctaaattagcagagaccatgaataacattgaccgcctacgaatggaaatccataagaatgaggcttggctctctgaagtcgaaggcaaaacaggtgggagaggagacagaagacatagcagtgacataaatcatcttgtaacacagggacgagaaagtcctgagggaagttacactgatgatgcaaaccaggaagtccgtgggccaccccagcagcatggtcaccacaatgagtttgatgatgaatttgaggatgatgatcccttgcctgctattggacactgcaaagctatctacccttttgatggacataatgaaggtactctagcaatgaaagaaggtgaagttctctacattatagaggaggacaaaggtgacggatggacaagagctcggagacagaacggtgaagaaggctacgttcccacgtcatacatagatgtaactctagagaaaaacagtaaaggttcctgaagagggtttctgaggaaatgggcaagatgttgaaggaggttacatgcagctgcttttgggggagggtattagagttgtcaggctcaaagagagtgagagaagcaagttgcatgagtgcatgcagacatgattttttttttactaacttcattagcatttccatacattgtttttaaaaatcataataccaacccttaagttcctagttcacagttattcccacaaaagaaaaagccaacaatagtgtaccatttttctatttattttattgctgtctaatcaataaagaatgcagagctgtcaaaaaatgtgtcttacattagctgtcccaacaggattgtcttccctcccagctctgttttaattggcttttagacccactatctgtcagatccttgccatctgtcagtgtctgcctgcgccacctccgtgcttgcttaacatcctgttgcatgtctagcgtgattgagctagatttttcaggcatgtctttagattcccttgttcttgtcaaagccttgttttgttttacatttgtagtgcaaatcactttgtcaaacatctccagcactaatgtttccatcttagtatttgtgcacactgctataacttccccactgcaaacattccagttttggcattacgaagaagtagctgtgaacctgaagtatttatgataagaaaaagaaaacatctctgctgtagcctacagcccagttgaaagaactctttgaaacgtgatacatcttcagcacctcagtctgggaagaatctagtcagcactgaaatcctggcataataaacacagaagatattcaccacctcaagacaaaggactattgtcaaaagtcagctgcttccattcaaatgctgccttaaacttgagtgcctaaatctgttgattgccaacactaccactacagtatcccacaaagggctttatgtgtcagctcagtgcgacctgctttaactctgcagcaccgctgcagctgccgatgtagcctcggtaggtggctattagagctctaccatatacagtggtgcatcttcaaatttatgcatcaaactaaagacatgtccaagtccattttaatttcctcagtggttttatgagaagttttatgggcctcccccaattgtctttttattttgggttatgacgatcatgtttgataattacaatgatagtctctttccacgtgatgcttttgtttgaacctgataaaatttagtgaaactttgtaatgatctatgtgcacttttacttgtaaaatggaatttctgtatgtttatacttgtaaatatgattgttgttagtgctcctgttgctcatggtgtcctgcctcgcatttgtgattctgttaatgacatgtatcttaactaatttcttagtggtgttgtaatagggagatggggcaggtggggggttatttgtaccactgaatcttcattaatttggttctttactgttttgaggggagaaagaacgtgaaatggtttgtgtattattgaattttaagcaatattttagaagctgtgtgactgctttaataactttttcccagtgttatttgaatcatactacccgttatactaaagctgaatgacaattgtgtgaaagttactgccttcataagatcaagtcaccactgttacacagctgacatatagtgtattacctttgcagctagtaaactataaagtttagatattgaatctcgttacagggttatttatataatgtgacattattcagtactgacagactacatgaagtagttttaaaatctagtgctatttttattttaaaggttagcaatgaggaggaaatgtgatctggctgtgtttgtcttctgtacaaagcctgaagtgcttatggttttttggctaacagccacagagggcaaagtttaagactttcttgtaaggactaactgttcttttcaagctactgtttgtttttctaaaagcaggatttgcttccgtaggaggcaagttccttgatgtggaatagtgcaacctgtatatgggttattataataggaaagacatttgtacttgcacagtttaaatcattcttaaattttgaacatgtgaattgtcccaaaaaatctttaattttttggtaatttttactctttttgtgcacatgttgatttcttaatggtaaatccttcatttaaagatagtgttctctgttgagaatatttacatggaataaaacaatcttttcatggcctgttaaggtgtttagtgtgtgatctttcattgctatgtgaatcagagatgtgatgattttgttcttgaatgtgccaagtctcagataatacagagtagatgacaaattc

SEQ ID NO: 1182 - protein, 547 aa, Homosapiens; identical to SEQ ID NO: 66

SEQ ID NO: 1183 - DNA, 991 bp, Homosapiens
tctgaatttccctgctcttcctgatgagacttttctaggttccagcctctctccgggtgtcccctttttccctcctgccctaggggcctgacctcccggctccactagcttcgttctatcagcagaggtgagctgtgccaccacactttgccatttctcccatgagacatttcagcctgaaaggccgcaggttccaggcctcatgaatctgagccctattttcttagtatcattcagtgtgctgggacaggctgagggtgacaggtttggggcttctctcttggctgttttctgactttccacttcatttgtcttttctcctgactgcctcttggctggggtcttgctccttagcttgtttcttgtgacctgtgggatcttctttttagagcctggggagtagttttattaattacaatgtgtttattaaataaaggccaaggttatagaggtcctgatgtgtcacatgatatcaccttcttgcatttgagaatcaaatacaaaaccaccctttatttttaatttaccacctcacccattccaggcatactgctctggaagtgtccttcatgtgacatctgagtgcctcctcttgccaaccacagggatttttagggtagtgaaactattctacatgatcttggaatcttggattcatggcattatgcacttgtcaaaacctacagaacttcacagcacgaagaatgaaagttaatgtatgcaagtttaaaaaatcatttaggtcacagaatctcaggaaagaatgtaaaatgtgataggagaatctgttttacaaatgtatgaaacaaactcactgaagggcatgagaaaaggtgatgtaagtaactctggaaacgaagagcctaaaaccaaatgcaaaggaactgcacataatcactgtactccagttgacagagttgtttcccacagggatatgggttaacaactctggtactgcaatacatatatactggaaataaacgattaagca

SEQ ID NO: 1184 - protein, 48 aa, Homosapiens [sequence omitted]

SEQ ID NO: 1185 - DNA, 4785 bp, Homosapiens
agtaaaaagaagtttgaaagagaatgtagagaggcagaaaaggcacaacagagttatgaaagattggataatgatactaatgcaaccaaggcagatgttgaaaaggccaaacagcagttgaatctgcgtacgcatatggccgatgaaaataaaaatgaatatgctgcacaattacaaaactttaatggagaacaacataaacatttttatgtagtgattcctcagatttacaagcaactacaagaaatggacgaacgaaggactattaaactcagtgagtgttacagaggatttgctgactcagaacgcaaagttattcccatcatttcaaaatgtttggaaggaatgattcttgcagcaaaatcagttgatgaaagaagagactctcaaatggtggtagactccttcaaatctggttttgaacctccaggagactttccatttgaagattacagtcaacatatatatagaaccatttctgatgggactatcagtgcatccaaacaggagagtgggaagatggatgccaaaaccacagtaggaaaggccaagggcaaattgtggctctttggaaagaagccaaagggcccagcactagaagatttcagtcatctgccaccagaacagagacgtaaaaaactacagcagcgcattgatgaacttaacagagaactacagaaagaatcagaccaaaaagatgcactcaacaaaatgaaagatgtatatgagaagaatccacaaatgggggatccagggagtttgcagcctaaattagcagagaccatgaataacattgaccgcctacgaatggaaatccataagaatgaggcttggctctctgaagtcgaaggcaaaacaggtgggagaggagacagaagacatagcagtgacataaatcatcttgtaacacagggacgagaaagtcctgagggaagttacactgatgatgcaaaccaggaagtccgtgggccaccccagcagcatggtcaccacaatgagtttgatgatgaatttgaggatgatgatcccttgcctgctattggacactgcaaagctatctacccttttgatggacataatgaaggtactctagcaatgaaagaaggtgaagttctctacattatagaggaggacaaaggtgacggatggacaagagctcggagacagaacggtgaagaaggctacgttcccacgtcatacatagatgtaactctagagaaaaacagtaaaggtgcagtaacttatatctaaactaaccaggcacctttgtgccatgtgtgacataggaagagtaacataaaatgaaaacacattcaacaggttgaaaaaaataaggaaacttaaagggcatccaagattaattgttcactatgtgagctgagtgtaggcttgatcttgtgaatattaccacaagaaacattttgtggcactttactgtttgagtaacgttggtgtgaagcttaattgatgccttttgctttatgtcccgcttaagtctgtgtgaaggatttgtgtttttctgccttacaaatagaatttgatttattgggcaggaattcatggatagtaatgctctctgccccctttacttcagaaaacacagtgactttagtgaatttgaatagtgaaactgctctgaaatgctatggaaagccgactccccaaagagtggtttcttctagaagtttgaatttgtagctacagtttccaagaagaaaaatagtagttggataatttagtaaaataataacatcattttcattttcttacctattcttaactttggtttcctaaaggaagaaaatgagcaggtagcacataatctatttaagtagatttaaagagagtttcaaaataaatctcctggtctagctcttaggtgaataaaatagattttgtttgagacctcaaaatattttgaggttagctggtaattttcaataatttacaagcttccttccaaactaatctcatacttttgtatgtttcatcttgaaaatatcttttgggaaataccactttagtgattatttagcatttagcagttacacataggaaaatacacagttacatagaaaaatacacatttgaagatagaggaaaccttgaatggaggggaagtgttgacaaattttaatttttaaaggagaaactttttgactatctgggttagaggaagatatgtgtaccgcctttagggcattttgttatttccgctgaatcattagttattaggatagataaatttttccaattagtttcagcaagcgttgttggaaacactgtgcagtcaaggattgtgcagtgctggttgtgtgaccacaccctgagtcagtggtgtggggaagtaaagtgtgaagaagcagtaagattggtttttaattttgcccatgttttaaattttcctggtgttttcggtagctgactataaaatgatagagacatttgggacaggcactttaaactgaacaccccttttggttttaccaaaggtcttcagtaattgttcttttctttttcctcctggactgcaggttcctgaagagggtttctgaggaaatgggcaagatgttgaaggaggttacatgcagctgcttttgggggagggtattagagttgtcaggctcaaagagagtgagagaagcaagttgcatgagtgcatgcagacatgattttttttttactaacttcattagcatttccatacattgtttttaaaaatcataataccaacccttaagttcctagttcacagttattcccacaaaagaaaaagccaacaatagtgtaccatttttctatttattttattgctgtctaatcaataaagaatgcagagctgtcaaaaaatgtgtcttacattagctgtcccaacaggattgtcttccctcccagctctgttttaattggcttttagacccactatctgtcagatccttgccatctgtcagtgtctgcctgcgccacctccgtgcttgcttaacatcctgttgcatgtctagcgtgattgagctagatttttcaggcatgtctttagattcccttgttcttgtcaaagccttgttttgttttacatttgtagtgcaaatcactttgtcaaacatctccagcactaatgtttccatcttagtatttgtgcacactgctataacttccccactgcaaacattccagttttggcattacgaagaagtagctgtgaacctgaagtatttatgataagaaaaagaaaacatctctgctgtagcctacagcccagttgaaagaactctttgaaacgtgatacatcttcagcacctcagtctgggaagaatctagtcagcactgaaatcctggcataataaacacagaagatattcaccacctcaagacaaaggactattgtcaaaagtcagctgcttccattcaaatgctgccttaaacttgagtgcctaaatctgttgattgccaacactaccactacagtatcccacaaagggctttatgtgtcagctcagtgcgacctgctttaactctgcagcaccgctgcagctgccgatgtagcctcggtaggtggctattagagctctaccatatacagtggtgcatcttcaaatttatgcatcaaactaaagacatgtccaagtccattttaatttcctcagtggttttatgagaagttttatgggcctcccccaattgtctttttattttgggttatgacgatcatgtttgataattacaatgatagtctctttccacgtgatgcttttgtttgaacctgataaaatttagtgaaactttgtaatgatctatgtgcacttttacttgtaaaatggaatttctgtatgtttatacttgtaaatatgattgttgttagtgctcctgttgctcatggtgtcctgcctcgcatttgtgattctgttaatgacatgtatcttaactaatttcttagtggtgttgtaatagggagatggggcaggtggggggttatttgtaccactgaatcttcattaatttggttctttactgttttgaggggagaaagaacgtgaaatggtttgtgtattattgaattttaagcaatattttagaagctgtgtgactgctttaataactttttcccagtgttatttgaatcatactacccgttatactaaagctgaatgacaattgtgtgaaagttactgccttcataagatcaagtcaccactgttacacagctgacatatagtgtattacctttgcagctagtaaactataaagtttagatattgaatctcgttacagggttatttatataatgtgacattattcagtactgacagactacatgaagtagttttaaaatctagtgctatttttattttaaaggttagcaatgaggaggaaatgtgatctggctgtgtttgtcttctgtacaaagcctgaagtgcttatggttttttggctaacagccacagagggcaaagtttaagactttcttgtaaggactaactgttcttttcaagctactgtttgtttttctaaaagcaggatttgcttccgtaggaggcaagttccttgatgtggaatagtgcaacctgtatatgggttattataataggaaagacatttgtacttgcacagtttaaatcattcttaaattttgaacatgtgaattgtcccaaaaaatctttaattttttggtaatttttactctttttgtgcacatgttgatttcttaatggtaaatccttcatttaaagatagtgttctctgttgagaatatttacatggaataaaacaatcttttcatggcctgtt

SEQ ID NO: 1186 - protein, 371 aa, Homosapiens
MADENKNEYAAQLQNFNGEQHKHFYVVIPQIYKQLQEMDERRTIKLSECYRGFADSERKVIPIISKCLEGMILAAKSVDERRDSQMVVDSFKSGFEPPGDFPFEDYSQHIYRTISDGTISASKQESGKMDAKTTVGKAKGKLWLFGKKPKGPALEDFSHLPPEQRRKKLQQRIDELNRELQKESDQKDALNKMKDVYEKNPQMGDPGSLQPKLAETMNNIDRLRMEIHKNEAWLSEVEGKTGGRGDRRHSSDINHLVTQGRESPEGSYTDDANQEVRGPPQQHGHHNEFDDEFEDDDPLPAIGHCKAIYPFDGHNEGTLAMKEGEVLYIIEEDKGDGWTRARRQNGEEGYVPTSYIDVTLEKNSKGAVTYI

SEQ ID NO: 1187 - DNA, 4890 bp, Homosapiens
agtaaaaagaagtttgaaagagaatgtagagaggcagaaaaggcacaacagagttatgaaagattggataatgatactaatgcaaccaaggcagatgttgaaaaggccaaacagcagttgaatctgcgtacgcatatggccgatgaaaataaaaatgaatatgctgcacaattacaaaactttaatggagaacaacataaacatttttatgtagtgattcctcagatttacaagcaactacaagaaatggacgaacgaaggactattaaactcagtgagtgttacagaggatttgctgactcagaacgcaaagttattcccatcatttcaaaatgtttggaaggaatgattcttgcagcaaaatcagttgatgaaagaagagactctcaaatggtggtagactccttcaaatctggttttgaacctccaggagactttccatttgaagattacagtcaacatatatatagaaccatttctgatgggactatcagtgcatccaaacaggagagtgggaagatggatgccaaaaccacagtaggaaaggccaagggcaaattgtggctctttggaaagaagccaaagggcccagcactagaagatttcagtcatctgccaccagaacagagacgtaaaaaactacagcagcgcattgatgaacttaacagagaactacagaaagaatcagaccaaaaagatgcactcaacaaaatgaaagatgtatatgagaagaatccacaaatgggggatccagggagtttgcagcctaaattagcagagaccatgaataacattgaccgcctacgaatggaaatccataagaatgaggcttggctctctgaagtcgaaggcaaaacaggtgggagaggagacagaagacatagcagtgacataaatcatcttgtaacacagggacgagaaagtcctgagggaagttacactgatgatgcaaaccaggaagtccgtgggccaccccagcagcatggtcaccacaatgagtttgatgatgaatttgaggatgatgatcccttgcctgctattggacactgcaaagctatctacccttttgatggacataatgaaggtactctagcaatgaaagaaggtgaagttctctacattatagaggaggacaaaggtgacggatggacaagagctcggagacagaacggtgaagaaggctacgttcccacgtcatacatagatgtaactctagagaaaaacagtaaaggtgcagtaacttatatctaaactaaccaggcacctttgtgccatgtgtgacataggaagagtaacataaaatgaaaacacattcaacaggttgaaaaaaataaggaaacttaaagggcatccaagattaattgttcactatgtgagctgagtgtaggcttgatcttgtgaatattaccacaagaaacattttgtggcactttactgtttgagtaacgttggtgtgaagcttaattgatgccttttgctttatgtcccgcttaagtctgtgtgaaggatttgtgtttttctgccttacaaatagaatttgatttattgggcaggaattcatggatagtaatgctctctgccccctttacttcagaaaacacagtgactttagtgaatttgaatagtgaaactgctctgaaatgctatggaaagccgactccccaaagagtggtttcttctagaagtttgaatttgtagctacagtttccaagaagaaaaatagtagttggataatttagtaaaataataacatcattttcattttcttacctattcttaactttggtttcctaaaggaagaaaatgagcaggtagcacataatctatttaagtagatttaaagagagtttcaaaataaatctcctggtctagctcttaggtgaataaaatagattttgtttgagacctcaaaatattttgaggttagctggtaattttcaataatttacaagcttccttccaaactaatctcatacttttgtatgtttcatcttgaaaatatcttttgggaaataccactttagtgattatttagcatttagcagttacacataggaaaatacacagttacatagaaaaatacacatttgaagatagaggaaaccttgaatggaggggaagtgttgacaaattttaatttttaaaggagaaactttttgactatctgggttagaggaagatatgtgtaccgcctttagggcattttgttatttccgctgaatcattagttattaggatagataaatttttccaattagtttcagcaagcgttgttggaaacactgtgcagtcaaggattgtgcagtgctggttgtgtgaccacaccctgagtcagtggtgtggggaagtaaagtgtgaagaagcagtaagattggtttttaattttgcccatgttttaaattttcctggtgttttcggtagctgactataaaatgatagagacatttgggacaggcactttaaactgaacaccccttttggttttaccaaaggtcttcagtaattgttcttttctttttcctcctggactgcaggttcctgaagagggtttctgaggaaatgggcaagatgttgaaggaggttacatgcagctgcttttgggggagggtattagagttgtcaggctcaaagagagtgagagaagcaagttgcatgagtgcatgcagacatgattttttttttactaacttcattagcatttccatacattgtttttaaaaatcataataccaacccttaagttcctagttcacagttattcccacaaaagaaaaagccaacaatagtgtaccatttttctatttattttattgctgtctaatcaataaagaatgcagagctgtcaaaaaatgtgtcttacattagctgtcccaacaggattgtcttccctcccagctctgttttaattggcttttagacccactatctgtcagatccttgccatctgtcagtgtctgcctgcgccacctccgtgcttgcttaacatcctgttgcatgtctagcgtgattgagctagatttttcaggcatgtctttagattcccttgttcttgtcaaagccttgttttgttttacatttgtagtgcaaatcactttgtcaaacatctccagcactaatgtttccatcttagtatttgtgcacactgctataacttccccactgcaaacattccagttttggcattacgaagaagtagctgtgaacctgaagtatttatgataagaaaaagaaaacatctctgctgtagcctacagcccagttgaaagaactctttgaaacgtgatacatcttcagcacctcagtctgggaagaatctagtcagcactgaaatcctggcataataaacacagaagatattcaccacctcaagacaaaggactattgtcaaaagtcagctgcttccattcaaatgctgccttaaacttgagtgcctaaatctgttgattgccaacactaccactacagtatcccacaaagggctttatgtgtcagctcagtgcgacctgctttaactctgcagcaccgctgcagctgccgatgtagcctcggtaggtggctattagagctctaccatatacagtggtgcatcttcaaatttatgcatcaaactaaagacatgtccaagtccattttaatttcctcagtggttttatgagaagttttatgggcctcccccaattgtctttttattttgggttatgacgatcatgtttgataattacaatgatagtctctttccacgtgatgcttttgtttgaacctgataaaatttagtgaaactttgtaatgatctatgtgcacttttacttgtaaaatggaatttctgtatgtttatacttgtaaatatgattgttgttagtgctcctgttgctcatggtgtcctgcctcgcatttgtgattctgttaatgacatgtatcttaactaatttcttagtggtgttgtaatagggagatggggcaggtggggggttatttgtaccactgaatcttcattaatttggttctttactgttttgaggggagaaagaacgtgaaatggtttgtgtattattgaattttaagcaatattttagaagctgtgtgactgctttaataactttttcccagtgttatttgaatcatactacccgttatactaaagctgaatgacaattgtgtgaaagttactgccttcataagatcaagtcaccactgttacacagctgacatatagtgtattacctttgcagctagtaaactataaagtttagatattgaatctcgttacagggttatttatataatgtgacattattcagtactgacagactacatgaagtagttttaaaatctagtgctatttttattttaaaggttagcaatgaggaggaaatgtgatctggctgtgtttgtcttctgtacaaagcctgaagtgcttatggttttttggctaacagccacagagggcaaagtttaagactttcttgtaaggactaactgttcttttcaagctactgtttgtttttctaaaagcaggatttgcttccgtaggaggcaagttccttgatgtggaatagtgcaacctgtatatgggttattataataggaaagacatttgtacttgcacagtttaaatcattcttaaattttgaacatgtgaattgtcccaaaaaatctttaattttttggtaatttttactctttttgtgcacatgttgatttcttaatggtaaatccttcatttaaagatagtgttctctgttgagaatatttacatggaataaaacaatcttttcatggcctgttaaggtgtttagtgtgtgatctttcattgctatgtgaatcagagatgtgatgattttgttcttgaatgtgccaagtctcagataatacagagtagatgacaaattc

SEQ ID NO: 1188 - protein, 371 aa, Homosapiens; identical to SEQ ID NO: 1186

SEQ ID NO: 1189 - DNA, 1410 bp, Homosapiens
ggactattgtcaaaagtcagctgcttccattcaaatgctgccttaaacttgagtgcctaaatctgttgattgccaacactaccactacagtatcccacaaagggctttatgtgtcagctcagtgcgacctgctttaactctgcagcaccgctgcagctgccgatgtagcctcggtaggtggctattagagctctaccatatacagtggtgcatcttcaaatttatgcatcaaactaaagacatgtccaagtccattttaatttcctcagtggttttatgagaagttttatgggcctcccccaattgtctttttattttgggttatgacgatcatgtttgataattacaatgatagtctctttccacgtgatgcttttgtttgaacctgataaaatttagtgaaactttgtaatgatctatgtgcacttttacttgtaaaatggaatttctgtatgtttatacttgtaaatatgattgttgttagtgctcctgttgctcatggtgtcctgcctcgcatttgtgattctgttaatgacatgtatcttaactaatttcttagtggtgttgtaatagggagatggggcaggtggggggttatttgtaccactgaatcttcattaatttggttctttactgttttgaggggagaaagaacgtgaaatggtttgtgtattattgaattttaagcaatattttagaagctgtgtgactgctttaataactttttcccagtgttatttgaatcatactacccgttatactaaagctgaatgacaattgtgtgaaagttactgccttcataagatcaagtcaccactgttacacagctgacatatagtgtattacctttgcagctagtaaactataaagtttagatattgaatctcgttacagggttatttatataatgtgacattattcagtactgacagactacatgaagtagttttaaaatctagtgctatttttattttaaaggttagcaatgaggaggaaatgtgatctggctgtgtttgtcttctgtacaaagcctgaagtgcttatggttttttggctaacagccacagagggcaaagtttaagactttcttgtaaggactaactgttcttttcaagctactgtttgtttttctaaaagcaggatttgcttccgtaggaggcaagttccttgatgtggaatagtgcaacctgtatatgggttattataataggaaagacatttgtacttgcacagtttaaatcattcttaaattttgaacatgtgaattgtcccaaaaaatctttaattttttggtaatttttactctttttgtgcacatgttgatttcttaatggtaaatccttcatttaaagatagtgttctctgttgagaatatttacatggaataaaacaatcttttcatggcaagtt

SEQ ID NO: 1190 - protein, 41 aa, Homosapiens
MWNSATCIWVIIIGKTFVLAQFKSFLNFEHVNCPKKSLIFW

SEQ ID NO: 1191 - DNA, 1278 bp, Homosapiens
tgcaacctccgcctcccaggttcaagcaattctcccgcctcaacctcccgagtagctgggattacaggcacacgccaccacgcctggctaatttttgtatttgagtagagacagggtttcaccatactggccagactggtcttgaactcctgacctcaagtgatccacccgcctcagcctcccaaagtgctggcattacaggcgtgagctaccacgcccagccactaaaaggtaattttaaaaagaaccttttccaaaacaccacctttcttccagatcacaaggttagaaaagacgtggactgctctgcggcaccagtacacccaaactgccattctctatgagaaacagctgaagcccttcagcaaactcctgcatgaaggcagagagtccacatgtgttcccccaaacaatgtatcagtcccactgctgatgccgcttgtgacgttaatggagcgccaggctgtgacttttgaaggaaccgacatgtgggaaaaaaacgaccagagctgtgaaatcatgctgaaccatttggcaacagcgcgattcatggccgaggctgcagacagctaccggatgaatgctgagaggatcctggcaggttttcaaccagatgaagaaatgaatgaaatctgcaagactgaatttcaaatgcgattgctatggggcagcaaaggtgcacaagtcaatcagacagagagatatgagaaattcaaccagattttaactgccctctcgcgtaaattggaacctcctcctgtaaagcaggcagagctttgataactctccagagaacctttagaatatcttttcaagtttccccagcttcatctttgggaaagcttactgtttttgataaagtaataatgtgcaaatctgacaatatacaagcttttagtatccacaggatattaaacgtgtaaattgcacagagcacacttatttatgaattgtctaaagttactactgattttaaaatgaataatttattattaaggtaactactgctaatgttgatcagcaaatttaagagaagacctagctatgttggctggttgctttctattatcatggtatttgaccattttagttttaattccatgtcagataagtgtaaatagaagagtttaaaagcatgaaacatttcagaaggtatcagttatatgatattctttaaacaaatatgaaaaatgtaaatactcatgaatgaaaatacatctttttgtgaaacagttgtatccagtctctttcatattaaacaactcatcttggtacaat

SEQ ID NO: 1192 - protein, 115 aa, Homosapiens [sequence omitted]

SEQ ID NO: 1193 - DNA, 2177 bp, Homosapiens
acttctcgggagatatttccttttgtaatttgccctcggtcttgtcttatcttcgaaaggttgctggaatttctctgttccttggagtttgggggttttttgatttgttttttctttggtgcttgtaaagaaacaaagaaaagagtggtagccagcccgcctgcctggatcacatgcaggacagaagagccttgtccctcaaagcccaccagtcagagagctacctgccgattggctgcaagctgccacctcagtcctcgggtgtggacacaagcccctgcccaaactcacctgtgttcaggacgggaagcgagcctgccctgagcccagcagtggttcggagggtctcctcagacgccagggctggggaggcgctgaggggatcagacagtcaactgtgccctaagcccccgcctaagccctgcaaggtgccgttcctcaaggttccctcgtctccctctgcctggctcaactcagaggccaactactgtgaactgaacccagcgtttgccacaggctgcggcaggggagcaaagctaccctcatgtgcccagggaagccacacagaactgctcacagccaagcagaatgaggcgccaggtccccggaactctggcgtcaactacttgatccttgatgatgatgacagggaaagaccttgggaacctgcggcagctcagatggagaaggggcagtgggacaagggcgagtttgtgacgcccctcctggagactgtctcctccttcaggcccaacgagtttgagtcaaagttccttccccctgagaataagcccctggaaacagcaatgttgaaacgtgcaaaagaactgttcaccaacaacgaccccaaggtcatcgcccagcacgtactgagcatggactgcagggttgctaggatacttggagtctctgaagagatgaggaggaacatgggggtgagctcaggcctggaactcattaccttgcctcacggacaccagctgcgcctggacataattgaaagacacaacacaatggccatcggcattgcagtggacattctgggatgcacgggcactttggaggaccgagcggccactctgagtaagatcatccaggtggcggtggaactgaaggattccatgggggacctctattccttctcagctctcatgaaagccctggaaatgccacagatcacaaggttagaaaagacgtggactgctctgcggcaccagtacacccaaactgccattctctatgagaaacagctgaagcccttcagcaaactcctgcatgaaggcagagagtccacatgtgttcccccaaacaatgtatcagtcccactgctgatgccgcttgtgacgttaatggagcgccaggctgtgacttttgaaggaaccgacatgtgggaaaaaaacgaccagagctgtgaaatcatgctgaaccatttggcaacagcgcgattcatggccgaggctgcagacagctaccggatgaatgctgagaggatcctggcaggttttcaaccagatgaagaaatgaatgaaatctgcaagactgaatttcaaatgcgattgctatggggcagcaaaggtgcacaagtcaatcagacagagagatatgagaaattcaaccagattttaactgccctctcgcgtaaattggaacctcctcctgtaaagcaggcagagctttgataactctccagagaacctttagaatatcttttcaagtttccccagcttcatctttgggaaagcttactgtttttgataaagtaataatgtgcaaatctgacaatatacaagcttttagtatccacaggatattaaacgtgtaaattgcacagagcacacttatttatgaattgtctaaagttactactgattttaaaatgaataatttattattaaggtaactactgctaatgttgatcagcaaatttaagagaagacctagctatgttggctggttgctttctattatcatggtatttgaccattttagttttaattccatgtcagataagtgtaaatagaagagtttaaaagcatgaaacatttcagaaggtatcagttatatgatattctttaaacaaatatgaaaaatgtaaatactcatgaatgaaaatacatctttttgtgaaacagttgtatccagtctctttcatattaaacaactcatcttggtacaat

SEQ ID NO: 1194 - protein, 501 aa, Homosapiens
MQDRRALSLKAHQSESYLPIGCKLPPQSSGVDTSPCPNSPVFRTGSEPALSPAVVRRVSSDARAGEALRGSDSQLCPKPPPKPCKVPFLKVPSSPSAWLNSEANYCELNPAFATGCGRGAKLPSCAQGSHTELLTAKQNEAPGPRNSGVNYLILDDDDRERPWEPAAAQMEKGQWDKGEFVTPLLETVSSFRPNEFESKFLPPENKPLETAMLKRAKELFTNNDPKVIAQHVLSMDCRVARILGVSEEMRRNMGVSSGLELITLPHGHQLRLDIIERHNTMAIGIAVDILGCTGTLEDRAATLSKIIQVAVELKDSMGDLYSFSALMKALEMPQITRLEKTWTALRHQYTQTAILYEKQLKPFSKLLHEGRESTCVPPNNVSVPLLMPLVTLMERQAVTFEGTDMWEKNDQSCEIMLNHLATARFMAEAADSYRMNAERILAGFQPDEEMNEICKTEFQMRLLWGSKGAQVNQTERYEKFNQILTALSRKLEPPPVKQAEL

SEQ ID NO: 1195 - DNA, 2870 bp, Homosapiens
agactagcctgggagaaggagccgactcactcccccggctgccgacttccctgacttctgggcagaaacagcacagctgctgtggtgggctagggctttaacgtccgaagccccctttcttttaaccctaaagaaagtgtgtggtccccgggactgaagaccgaaagatgcctaaggaatgcagtgctttccacgccctctcagcagctctgtgctgcttctatcaccgcaagtctttcattggagtcaagttctccaaggagaggcacatcatggacaggacccccgagaaactgaagaaggagctggaggaggagctgctcctgagcagcgaggacctgcgcagccatgcctggtaccacggccgcatcccccgacaggtgtctgaaaaccttgtgcagcgagatggtgacttcctagttcgtgactctctgtccagccctgggaactttgtcctgacctgtcagtggaagaacctcgctcagcacttcaaaatcaaccggacagttctgcgactcagcgaggcctacagccgcgtgcagtaccagttcgagatggagagcttcgactccatccccggcctggtgcgctgctacgtgggcaaccgccggcccatctcccagcagagtggcgccatcatcttccagcccatcaacaggacggtgcctctgcggtgcctggaggagcattatggcacctccccaggccaggcccgggagggcagcctcaccaagggaaggccggatgtggccaagaggctgagcctcaccatgggtggcgtccaggcccgagagcagaatttgcccaggggaaacctcctcagaaacaaagaaaagagtggtagccagcccgcctgcctggatcacatgcaggacagaagagccttgtccctcaaagcccaccagtcagagagctacctgccgattggctgcaagctgccacctcagtcctcgggtgtggacacaagcccctgcccaaactcacctgtgttcaggacgggaagcgagcctgccctgagcccagcagtggttcggagggtctcctcagacgccagggctggggaggcgctgaggggatcagacagtcaactgtgccctaagcccccgcctaagccctgcaaggtgccgttcctcaaggttccctcgtctccctctgcctggctcaactcagaggccaactactgtgaactgaacccagcgtttgccacaggctgcggcaggggagcaaagctaccctcatgtgcccagggaagccacacagaactgctcacagccaagcagaatgaggcgccaggtccccggaactctggcgtcaactacttgatccttgatgatgatgacagggaaagaccttgggaacctgcggcagctcagatggagaaggggcagtgggacaagggcgagtttgtgacgcccctcctggagactgtctcctccttcaggcccaacgagtttgagtcaaagttccttccccctgagaataagcccctggaaacagcaatgttgaaacgtgcaaaagaactgttcaccaacaacgaccccaaggtcatcgcccagcacgtactgagcatggactgcagggttgctaggatacttggagtctctgaagagatgaggaggaacatgggggtgagctcaggcctggaactcattaccttgcctcacggacaccagctgcgcctggacataattgaaagacacaacacaatggccatcggcattgcagtggacattctgggatgcacgggcactttggaggaccgagcggccactctgagtaagatcatccaggtggcggtggaactgaaggattccatgggggacctctattccttctcagctctcatgaaagccctggaaatgccacagatcacaaggttagaaaagacgtggactgctctgcggcaccagtacacccaaactgccattctctatgagaaacagctgaagcccttcagcaaactcctgcatgaaggcagagagtccacatgtgttcccccaaacaatgtatcagtcccactgctgatgccgcttgtgacgttaatggagcgccaggctgtgacttttgaaggaaccgacatgtgggaaaaaaacgaccagagctgtgaaatcatgctgaaccatttggcaacagcgcgattcatggccgaggctgcagacagctaccggatgaatgctgagaggatcctggcaggttttcaaccagatgaagaaatgaatgaaatctgcaagactgaatttcaaatgcgattgctatggggcagcaaaggtgcacaagtcaatcagacagagagatatgagaaattcaaccagattttaactgccctctcgcgtaaattggaacctcctcctgtaaagcaggcagagctttgataactctccagagaacctttagaatatcttttcaagtttccccagcttcatctttgggaaagcttactgtttttgataaagtaataatgtgcaaatctgacaatatacaagcttttagtatccacaggatattaaacgtgtaaattgcacagagcacacttatttatgaattgtctaaagttactactgattttaaaatgaataatttattattaaggtaactactgctaatgttgatcagcaaatttaagagaagacctagctatgttggctggttgctttctattatcatggtatttgaccattttagttttaattccatgtcagataagtgtaaatagaagagtttaaaagcatgaaacatttcagaaggtatcagttatatgatattctttaaacaaatatgaaaaatgtaaatactcatgaatgaaaatacatctttttgtgaaacagttgtatccagtctctttcatattaaacaactcatcttggtacaat

SEQ ID NO: 1196 - protein, 734 aa, Homosapiens
MPKECSAFHALSAALCCFYHRKSFIGVKFSKERHIMDRTPEKLKKELEEELLLSSEDLRSHAWYHGRIPRQVSENLVQRDGDFLVRDSLSSPGNFVLTCQWKNLAQHFKINRTVLRLSEAYSRVQYQFEMESFDSIPGLVRCYVGNRRPISQQSGAIIFQPINRTVPLRCLEEHYGTSPGQAREGSLTKGRPDVAKRLSLTMGGVQAREQNLPRGNLLRNKEKSGSQPACLDHMQDRRALSLKAHQSESYLPIGCKLPPQSSGVDTSPCPNSPVFRTGSEPALSPAVVRRVSSDARAGEALRGSDSQLCPKPPPKPCKVPFLKVPSSPSAWLNSEANYCELNPAFATGCGRGAKLPSCAQGSHTELLTAKQNEAPGPRNSGVNYLILDDDDRERPWEPAAAQMEKGQWDKGEFVTPLLETVSSFRPNEFESKFLPPENKPLETAMLKRAKELFTNNDPKVIAQHVLSMDCRVARILGVSEEMRRNMGVSSGLELITLPHGHQLRLDIIERHNTMAIGIAVDILGCTGTLEDRAATLSKIIQVAVELKDSMGDLYSFSALMKALEMPQITRLEKTWTALRHQYTQTAILYEKQLKPFSKLLHEGRESTCVPPNNVSVPLLMPLVTLMERQAVTFEGTDMWEKNDQSCEIMLNHLATARFMAEAADSYRMNAERILAGFQPDEEMNEICKTEFQMRLLWGSKGAQVNQTERYEKFNQILTALSRKLEPPPVKQAEL

SEQ ID NO: 1197 - DNA, 3251 bp, Homosapiens
gagcgcgctgggactccccgagacgtggcccacggcggggagcgctcagcgattggcggccaggcatcttgctcggtggcactcgagcggcatcttcccgggcgctggcctcgcccgaccccctgcccgtcggagctgctctgccggccaccccgccctgtcccgcccgtcccctcttcgcagaagccggccggggtcgggcagatgcgagggcccagagcgctctggtggaagcccaaggctccgaggaggcgagtttctccgagttgagaattatggctgcaggaaaatttgcaagccttcccagaaacatgccggtgaatcaccagttccccctggcctcatccatggaccttctgagcagcaggtcccctctcgctgagcatcgcccagatgcctatcaagatgtgtctatacatggcacccttccacggaagaaaaaaggtcctcctcccataaggtcctgtgatgacttcagtcacatgggcaccctcccccactccaaatccccacggcagaactcgcctgtgacccaggatggcatccaggagagcccatggcaggaccggcacggcgaaaccttcaccttcagggatccacatcttctggacccaactgtggaatatgtgaagttctccaaggagaggcacatcatggacaggacccccgagaaactgaagaaggagctggaggaggagctgctcctgagcagcgaggacctgcgcagccatgcctggtaccacggccgcatcccccgacaggtgtctgaaaaccttgtgcagcgagatggtgacttcctagttcgtgactctctgtccagccctgggaactttgtcctgacctgtcagtggaagaacctcgctcagcacttcaaaatcaaccggacagttctgcgactcagcgaggcctacagccgcgtgcagtaccagttcgagatggagagcttcgactccatccccggcctggtgcgctgctacgtgggcaaccgccggcccatctcccagcagagtggcgccatcatcttccagcccatcaacaggacggtgcctctgcggtgcctggaggagcattatggcacctccccaggccaggcccgggagggcagcctcaccaagggaaggccggatgtggccaagaggctgagcctcaccatgggtggcgtccaggcccgagagcagaatttgcccaggggaaacctcctcagaaacaaagaaaagagtggtagccagcccgcctgcctggatcacatgcaggacagaagagccttgtccctcaaagcccaccagtcagagagctacctgccgattggctgcaagctgccacctcagtcctcgggtgtggacacaagcccctgcccaaactcacctgtgttcaggacgggaagcgagcctgccctgagcccagcagtggttcggagggtctcctcagacgccagggctggggaggcgctgaggggatcagacagtcaactgtgccctaagcccccgcctaagccctgcaaggtgccgttcctcaaggttccctcgtctccctctgcctggctcaactcagaggccaactactgtgaactgaacccagcgtttgccacaggctgcggcaggggagcaaagctaccctcatgtgcccagggaagccacacagaactgctcacagccaagcagaatgaggcgccaggtccccggaactctggcgtcaactacttgatccttgatgatgatgacagggaaagaccttgggaacctgcggcagctcagatggagaaggggcagtgggacaagggcgagtttgtgacgcccctcctggagactgtctcctccttcaggcccaacgagtttgagtcaaagttccttccccctgagaataagcccctggaaacagcaatgttgaaacgtgcaaaagaactgttcaccaacaacgaccccaaggtcatcgcccagcacgtactgagcatggactgcagggttgctaggatacttggagtctctgaagagatgaggaggaacatgggggtgagctcaggcctggaactcattaccttgcctcacggacaccagctgcgcctggacataattgaaagacacaacacaatggccatcggcattgcagtggacattctgggatgcacgggcactttggaggaccgagcggccactctgagtaagatcatccaggtggcggtggaactgaaggattccatgggggacctctattccttctcagctctcatgaaagccctggaaatgccacagatcacaaggttagaaaagacgtggactgctctgcggcaccagtacacccaaactgccattctctatgagaaacagctgaagcccttcagcaaactcctgcatgaaggcagagagtccacatgtgttcccccaaacaatgtatcagtcccactgctgatgccgcttgtgacgttaatggagcgccaggctgtgacttttgaaggaaccgacatgtgggaaaaaaacgaccagagctgtgaaatcatgctgaaccatttggcaacagcgcgattcatggccgaggctgcagacagctaccggatgaatgctgagaggatcctggcaggttttcaaccagatgaagaaatgaatgaaatctgcaagactgaatttcaaatgcgattgctatggggcagcaaaggtgcacaagtcaatcagacagagagatatgagaaattcaaccagattttaactgccctctcgcgtaaattggaacctcctcctgtaaagcaggcagagctttgataactctccagagaacctttagaatatcttttcaagtttccccagcttcatctttgggaaagcttactgtttttgataaagtaataatgtgcaaatctgacaatatacaagcttttagtatccacaggatattaaacgtgtaaattgcacagagcacacttatttatgaattgtctaaagttactactgattttaaaatgaataatttattattaaggtaactactgctaatgttgatcagcaaatttaagagaagacctagctatgttggctggttgctttctattatcatggtatttgaccattttagttttaattccatgtcagataagtgtaaatagaagagtttaaaagcatgaaacatttcagaaggtatcagttatatgatattctttaaacaaatatgaaaaatgtaaatactcatgaatgaaaatacatctttttgtgaaacagttgtatccagtctctttcatattaaacaactcatcttggtacaat

SEQ ID NO: 1198 - protein, 825 aa, Homosapiens; identical to SEQ ID NO: 68

SEQ ID NO: 1199 - DNA, 1235 bp, Homosapiens
tgcaacctccgcctcccaggttcaagcaattctcccgcctcaacctcccgagtagctgggattacaggcacacgccaccacgcctggctaatttttgtatttgagtagagacagggtttcaccatactggccagactggtcttgaactcctgacctcaagtgatccacccgcctcagcctcccaaagtgctggcattacaggcgtgagctaccacgcccagccactaaaaggtaattttaaaaagaaccttttccaaaacaccacctttcttccagatcacaaggttagaaaagacgtggactgctctgcggcaccagtacacccaaactgccattctctatgagaaacagctgaagcccttcagcaaactcctgcatgaaggcagagagtccacatgtgttcccccaaacaatgtatcagtcccactgctgatgccgcttgtgacgttaatggagcgccaggctgtgacttttgaaggaaccgacatgtgggaaaaaaacgaccagagctgtgaaatcatgctgaaccatttggcaacagcgcgattcatggccgaggctgcagacagctaccggatgaatgctgagaggatcctggcaggttttcaaccagatgaagaaatgaatgaaatctgcaagactgaatttcaaatgcgattgctatggggcagcaaaggtgcacaagtcaatcagacagagagatatgagaaattcaaccagattttaactgccctctcgcgtaaattggaacctcctcctgtaaagcaggcagagctttgataactctccagagaacctttagaatatcttttcaagtttccccagcttcatctttgggaaagcttactgtttttgataaagtaataatgtgcaaatctgacaatatacaagcttttagtatccacaggatattaaacgtgtaaattgcacagagcacacttatttatgaattgtctaaagttactactgattttaaaatgaataatttattattaaggtaactactgctaatgttgatcagcaaatttaagagaagacctagctatgttggctggttgctttctattatcatggtatttgaccattttagttttaattccatgtcagataagtgtaaatagaagagtttaaaagcatgaaacatttcagaaggtatcagttatatgatattctttaaacaaatatgaaaaatgtaaatactcatgaatgaaaatacatctttttgtgaaacagtt

SEQ ID NO: 1200 - protein, 115 aa, Homosapiens [sequence omitted]

SEQ ID NO: 1201 - DNA, 2134 bp, Homosapiens
acttctcgggagatatttccttttgtaatttgccctcggtcttgtcttatcttcgaaaggttgctggaatttctctgttccttggagtttgggggttttttgatttgttttttctttggtgcttgtaaagaaacaaagaaaagagtggtagccagcccgcctgcctggatcacatgcaggacagaagagccttgtccctcaaagcccaccagtcagagagctacctgccgattggctgcaagctgccacctcagtcctcgggtgtggacacaagcccctgcccaaactcacctgtgttcaggacgggaagcgagcctgccctgagcccagcagtggttcggagggtctcctcagacgccagggctggggaggcgctgaggggatcagacagtcaactgtgccctaagcccccgcctaagccctgcaaggtgccgttcctcaaggttccctcgtctccctctgcctggctcaactcagaggccaactactgtgaactgaacccagcgtttgccacaggctgcggcaggggagcaaagctaccctcatgtgcccagggaagccacacagaactgctcacagccaagcagaatgaggcgccaggtccccggaactctggcgtcaactacttgatccttgatgatgatgacagggaaagaccttgggaacctgcggcagctcagatggagaaggggcagtgggacaagggcgagtttgtgacgcccctcctggagactgtctcctccttcaggcccaacgagtttgagtcaaagttccttccccctgagaataagcccctggaaacagcaatgttgaaacgtgcaaaagaactgttcaccaacaacgaccccaaggtcatcgcccagcacgtactgagcatggactgcagggttgctaggatacttggagtctctgaagagatgaggaggaacatgggggtgagctcaggcctggaactcattaccttgcctcacggacaccagctgcgcctggacataattgaaagacacaacacaatggccatcggcattgcagtggacattctgggatgcacgggcactttggaggaccgagcggccactctgagtaagatcatccaggtggcggtggaactgaaggattccatgggggacctctattccttctcagctctcatgaaagccctggaaatgccacagatcacaaggttagaaaagacgtggactgctctgcggcaccagtacacccaaactgccattctctatgagaaacagctgaagcccttcagcaaactcctgcatgaaggcagagagtccacatgtgttcccccaaacaatgtatcagtcccactgctgatgccgcttgtgacgttaatggagcgccaggctgtgacttttgaaggaaccgacatgtgggaaaaaaacgaccagagctgtgaaatcatgctgaaccatttggcaacagcgcgattcatggccgaggctgcagacagctaccggatgaatgctgagaggatcctggcaggttttcaaccagatgaagaaatgaatgaaatctgcaagactgaatttcaaatgcgattgctatggggcagcaaaggtgcacaagtcaatcagacagagagatatgagaaattcaaccagattttaactgccctctcgcgtaaattggaacctcctcctgtaaagcaggcagagctttgataactctccagagaacctttagaatatcttttcaagtttccccagcttcatctttgggaaagcttactgtttttgataaagtaataatgtgcaaatctgacaatatacaagcttttagtatccacaggatattaaacgtgtaaattgcacagagcacacttatttatgaattgtctaaagttactactgattttaaaatgaataatttattattaaggtaactactgctaatgttgatcagcaaatttaagagaagacctagctatgttggctggttgctttctattatcatggtatttgaccattttagttttaattccatgtcagataagtgtaaatagaagagtttaaaagcatgaaacatttcagaaggtatcagttatatgatattctttaaacaaatatgaaaaatgtaaatactcatgaatgaaaatacatctttttgtgaaacagtt

SEQ ID NO: 1202 - protein, 501 aa, Homosapiens; identical to SEQ ID NO: 1194

SEQ ID NO: 1203 - DNA, 2827 bp, Homosapiens
agactagcctgggagaaggagccgactcactcccccggctgccgacttccctgacttctgggcagaaacagcacagctgctgtggtgggctagggctttaacgtccgaagccccctttcttttaaccctaaagaaagtgtgtggtccccgggactgaagaccgaaagatgcctaaggaatgcagtgctttccacgccctctcagcagctctgtgctgcttctatcaccgcaagtctttcattggagtcaagttctccaaggagaggcacatcatggacaggacccccgagaaactgaagaaggagctggaggaggagctgctcctgagcagcgaggacctgcgcagccatgcctggtaccacggccgcatcccccgacaggtgtctgaaaaccttgtgcagcgagatggtgacttcctagttcgtgactctctgtccagccctgggaactttgtcctgacctgtcagtggaagaacctcgctcagcacttcaaaatcaaccggacagttctgcgactcagcgaggcctacagccgcgtgcagtaccagttcgagatggagagcttcgactccatccccggcctggtgcgctgctacgtgggcaaccgccggcccatctcccagcagagtggcgccatcatcttccagcccatcaacaggacggtgcctctgcggtgcctggaggagcattatggcacctccccaggccaggcccgggagggcagcctcaccaagggaaggccggatgtggccaagaggctgagcctcaccatgggtggcgtccaggcccgagagcagaatttgcccaggggaaacctcctcagaaacaaagaaaagagtggtagccagcccgcctgcctggatcacatgcaggacagaagagccttgtccctcaaagcccaccagtcagagagctacctgccgattggctgcaagctgccacctcagtcctcgggtgtggacacaagcccctgcccaaactcacctgtgttcaggacgggaagcgagcctgccctgagcccagcagtggttcggagggtctcctcagacgccagggctggggaggcgctgaggggatcagacagtcaactgtgccctaagcccccgcctaagccctgcaaggtgccgttcctcaaggttccctcgtctccctctgcctggctcaactcagaggccaactactgtgaactgaacccagcgtttgccacaggctgcggcaggggagcaaagctaccctcatgtgcccagggaagccacacagaactgctcacagccaagcagaatgaggcgccaggtccccggaactctggcgtcaactacttgatccttgatgatgatgacagggaaagaccttgggaacctgcggcagctcagatggagaaggggcagtgggacaagggcgagtttgtgacgcccctcctggagactgtctcctccttcaggcccaacgagtttgagtcaaagttccttccccctgagaataagcccctggaaacagcaatgttgaaacgtgcaaaagaactgttcaccaacaacgaccccaaggtcatcgcccagcacgtactgagcatggactgcagggttgctaggatacttggagtctctgaagagatgaggaggaacatgggggtgagctcaggcctggaactcattaccttgcctcacggacaccagctgcgcctggacataattgaaagacacaacacaatggccatcggcattgcagtggacattctgggatgcacgggcactttggaggaccgagcggccactctgagtaagatcatccaggtggcggtggaactgaaggattccatgggggacctctattccttctcagctctcatgaaagccctggaaatgccacagatcacaaggttagaaaagacgtggactgctctgcggcaccagtacacccaaactgccattctctatgagaaacagctgaagcccttcagcaaactcctgcatgaaggcagagagtccacatgtgttcccccaaacaatgtatcagtcccactgctgatgccgcttgtgacgttaatggagcgccaggctgtgacttttgaaggaaccgacatgtgggaaaaaaacgaccagagctgtgaaatcatgctgaaccatttggcaacagcgcgattcatggccgaggctgcagacagctaccggatgaatgctgagaggatcctggcaggttttcaaccagatgaagaaatgaatgaaatctgcaagactgaatttcaaatgcgattgctatggggcagcaaaggtgcacaagtcaatcagacagagagatatgagaaattcaaccagattttaactgccctctcgcgtaaattggaacctcctcctgtaaagcaggcagagctttgataactctccagagaacctttagaatatcttttcaagtttccccagcttcatctttgggaaagcttactgtttttgataaagtaataatgtgcaaatctgacaatatacaagcttttagtatccacaggatattaaacgtgtaaattgcacagagcacacttatttatgaattgtctaaagttactactgattttaaaatgaataatttattattaaggtaactactgctaatgttgatcagcaaatttaagagaagacctagctatgttggctggttgctttctattatcatggtatttgaccattttagttttaattccatgtcagataagtgtaaatagaagagtttaaaagcatgaaacatttcagaaggtatcagttatatgatattctttaaacaaatatgaaaaatgtaaatactcatgaatgaaaatacatctttttgtgaaacagtt

SEQ ID NO: 1204 - protein, 734 aa, Homosapiens; identical to SEQ ID NO: 1196

SEQ ID NO: 1205 - DNA, 3208 bp, Homosapiens
gagcgcgctgggactccccgagacgtggcccacggcggggagcgctcagcgattggcggccaggcatcttgctcggtggcactcgagcggcatcttcccgggcgctggcctcgcccgaccccctgcccgtcggagctgctctgccggccaccccgccctgtcccgcccgtcccctcttcgcagaagccggccggggtcgggcagatgcgagggcccagagcgctctggtggaagcccaaggctccgaggaggcgagtttctccgagttgagaattatggctgcaggaaaatttgcaagccttcccagaaacatgccggtgaatcaccagttccccctggcctcatccatggaccttctgagcagcaggtcccctctcgctgagcatcgcccagatgcctatcaagatgtgtctatacatggcacccttccacggaagaaaaaaggtcctcctcccataaggtcctgtgatgacttcagtcacatgggcaccctcccccactccaaatccccacggcagaactcgcctgtgacccaggatggcatccaggagagcccatggcaggaccggcacggcgaaaccttcaccttcagggatccacatcttctggacccaactgtggaatatgtgaagttctccaaggagaggcacatcatggacaggacccccgagaaactgaagaaggagctggaggaggagctgctcctgagcagcgaggacctgcgcagccatgcctggtaccacggccgcatcccccgacaggtgtctgaaaaccttgtgcagcgagatggtgacttcctagttcgtgactctctgtccagccctgggaactttgtcctgacctgtcagtggaagaacctcgctcagcacttcaaaatcaaccggacagttctgcgactcagcgaggcctacagccgcgtgcagtaccagttcgagatggagagcttcgactccatccccggcctggtgcgctgctacgtgggcaaccgccggcccatctcccagcagagtggcgccatcatcttccagcccatcaacaggacggtgcctctgcggtgcctggaggagcattatggcacctccccaggccaggcccgggagggcagcctcaccaagggaaggccggatgtggccaagaggctgagcctcaccatgggtggcgtccaggcccgagagcagaatttgcccaggggaaacctcctcagaaacaaagaaaagagtggtagccagcccgcctgcctggatcacatgcaggacagaagagccttgtccctcaaagcccaccagtcagagagctacctgccgattggctgcaagctgccacctcagtcctcgggtgtggacacaagcccctgcccaaactcacctgtgttcaggacgggaagcgagcctgccctgagcccagcagtggttcggagggtctcctcagacgccagggctggggaggcgctgaggggatcagacagtcaactgtgccctaagcccccgcctaagccctgcaaggtgccgttcctcaaggttccctcgtctccctctgcctggctcaactcagaggccaactactgtgaactgaacccagcgtttgccacaggctgcggcaggggagcaaagctaccctcatgtgcccagggaagccacacagaactgctcacagccaagcagaatgaggcgccaggtccccggaactctggcgtcaactacttgatccttgatgatgatgacagggaaagaccttgggaacctgcggcagctcagatggagaaggggcagtgggacaagggcgagtttgtgacgcccctcctggagactgtctcctccttcaggcccaacgagtttgagtcaaagttccttccccctgagaataagcccctggaaacagcaatgttgaaacgtgcaaaagaactgttcaccaacaacgaccccaaggtcatcgcccagcacgtactgagcatggactgcagggttgctaggatacttggagtctctgaagagatgaggaggaacatgggggtgagctcaggcctggaactcattaccttgcctcacggacaccagctgcgcctggacataattgaaagacacaacacaatggccatcggcattgcagtggacattctgggatgcacgggcactttggaggaccgagcggccactctgagtaagatcatccaggtggcggtggaactgaaggattccatgggggacctctattccttctcagctctcatgaaagccctggaaatgccacagatcacaaggttagaaaagacgtggactgctctgcggcaccagtacacccaaactgccattctctatgagaaacagctgaagcccttcagcaaactcctgcatgaaggcagagagtccacatgtgttcccccaaacaatgtatcagtcccactgctgatgccgcttgtgacgttaatggagcgccaggctgtgacttttgaaggaaccgacatgtgggaaaaaaacgaccagagctgtgaaatcatgctgaaccatttggcaacagcgcgattcatggccgaggctgcagacagctaccggatgaatgctgagaggatcctggcaggttttcaaccagatgaagaaatgaatgaaatctgcaagactgaatttcaaatgcgattgctatggggcagcaaaggtgcacaagtcaatcagacagagagatatgagaaattcaaccagattttaactgccctctcgcgtaaattggaacctcctcctgtaaagcaggcagagctttgataactctccagagaacctttagaatatcttttcaagtttccccagcttcatctttgggaaagcttactgtttttgataaagtaataatgtgcaaatctgacaatatacaagcttttagtatccacaggatattaaacgtgtaaattgcacagagcacacttatttatgaattgtctaaagttactactgattttaaaatgaataatttattattaaggtaactactgctaatgttgatcagcaaatttaagagaagacctagctatgttggctggttgctttctattatcatggtatttgaccattttagttttaattccatgtcagataagtgtaaatagaagagtttaaaagcatgaaacatttcagaaggtatcagttatatgatattctttaaacaaatatgaaaaatgtaaatactcatgaatgaaaatacatctttttgtgaaacagtt

SEQ ID NO: 1206 - protein, 825 aa, Homosapiens; identical to SEQ ID NO: 68

SEQ ID NO: 1207 - DNA, 3184 bp, Homosapiens
agagctgcgcctgctgctggccgggcgggggacggggccgggaccggagccggagctgcggggcgcaccggctagacgcgcgcgggattctcggcgggcacgccccgcggaccatgagcgtccccagctccgggagcagccgcggcgcgggcggtgcgaggccggccgcgcggcgcctttgagccccagccggaggtccagagatcctgagagcccgagcgcccagcgccgcgccgggagagttgagaattatggctgcaggaaaatttgcaagccttcccagaaacatgccggtgaatcaccagttccccctggcctcatccatggaccttctgagcagcaggtcccctctcgctgagcatcgcccagatgcctatcaagatgtgtctatacatggcacccttccacggaagaaaaaaggtcctcctcccataaggtcctgtgatgacttcagtcacatgggcaccctcccccactccaaatccccacggcagaactcgcctgtgacccaggatggcatccaggagagcccatggcaggaccggcacggcgaaaccttcaccttcagggatccacatcttctggacccaactgtggaatatgtgaagttctccaaggagaggcacatcatggacaggacccccgagaaactgaagaaggagctggaggaggagctgctcctgagcagcgaggacctgcgcagccatgcctggtaccacggccgcatcccccgacaggtgtctgaaaaccttgtgcagcgagatggtgacttcctagttcgtgactctctgtccagccctgggaactttgtcctgacctgtcagtggaagaacctcgctcagcacttcaaaatcaaccggacagttctgcgactcagcgaggcctacagccgcgtgcagtaccagttcgagatggagagcttcgactccatccccggcctggtgcgctgctacgtgggcaaccgccggcccatctcccagcagagtggcgccatcatcttccagcccatcaacaggacggtgcctctgcggtgcctggaggagcattatggcacctccccaggccaggcccgggagggcagcctcaccaagggaaggccggatgtggccaagaggctgagcctcaccatgggtggcgtccaggcccgagagcagaatttgcccaggggaaacctcctcagaaacaaagaaaagagtggtagccagcccgcctgcctggatcacatgcaggacagaagagccttgtccctcaaagcccaccagtcagagagctacctgccgattggctgcaagctgccacctcagtcctcgggtgtggacacaagcccctgcccaaactcacctgtgttcaggacgggaagcgagcctgccctgagcccagcagtggttcggagggtctcctcagacgccagggctggggaggcgctgaggggatcagacagtcaactgtgccctaagcccccgcctaagccctgcaaggtgccgttcctcaaggttccctcgtctccctctgcctggctcaactcagaggccaactactgtgaactgaacccagcgtttgccacaggctgcggcaggggagcaaagctaccctcatgtgcccagggaagccacacagaactgctcacagccaagcagaatgaggcgccaggtccccggaactctggcgtcaactacttgatccttgatgatgatgacagggaaagaccttgggaacctgcggcagctcagatggagaaggggcagtgggacaagggcgagtttgtgacgcccctcctggagactgtctcctccttcaggcccaacgagtttgagtcaaagttccttccccctgagaataagcccctggaaacagcaatgttgaaacgtgcaaaagaactgttcaccaacaacgaccccaaggtcatcgcccagcacgtactgagcatggactgcagggttgctaggatacttggagtctctgaagagatgaggaggaacatgggggtgagctcaggcctggaactcattaccttgcctcacggacaccagctgcgcctggacataattgaaagacacaacacaatggccatcggcattgcagtggacattctgggatgcacgggcactttggaggaccgagcggccactctgagtaagatcatccaggtggcggtggaactgaaggattccatgggggacctctattccttctcagctctcatgaaagccctggaaatgccacagatcacaaggttagaaaagacgtggactgctctgcggcaccagtacacccaaactgccattctctatgagaaacagctgaagcccttcagcaaactcctgcatgaaggcagagagtccacatgtgttcccccaaacaatgtatcagtcccactgctgatgccgcttgtgacgttaatggagcgccaggctgtgacttttgaaggaaccgacatgtgggaaaaaaacgaccagagctgtgaaatcatgctgaaccatttggcaacagcgcgattcatggccgaggctgcagacagctaccggatgaatgctgagaggatcctggcaggttttcaaccagatgaagaaatgaatgaaatctgcaagactgaatttcaaatgcgattgctatggggcagcaaaggtgcacaagtcaatcagacagagagatatgagaaattcaaccagattttaactgccctctcgcgtaaattggaacctcctcctgtaaagcaggcagagctttgataactctccagagaacctttagaatatcttttcaagtttccccagcttcatctttgggaaagcttactgtttttgataaagtaataatgtgcaaatctgacaatatacaagcttttagtatccacaggatattaaacgtgtaaattgcacagagcacacttatttatgaattgtctaaagttactactgattttaaaatgaataatttattattaaggtaactactgctaatgttgatcagcaaatttaagagaagacctagctatgttggctggttgctttctattatcatggtatttgaccattttagttttaattccatgtcagataagtgtaaatagaagagtttaaaagcatgaaacatttcagaaggtatcagttatatgatattctttaaacaaatatgaaaaatgtaaatactcatgaatgaaaatacatctttttgtgaaacagtt

SEQ ID NO: 1208 - protein, 825 aa, Homosapiens; identical to SEQ ID NO: 68

SEQ ID NO: 1209 - DNA, 3222 bp, Homosapiens
aagccgggccggtgacgccgggcctttacgtcgcgcctgtgagcggccgaggccgagcggcctcccctcgggctgcgagacggagacattacctcatccctcaagattgctcgctgcaaacacaacgctgagaaatggcccaagtaaagcgtgatcagggtcttgcattcttggcacatctaggaagaacgtgcaaggatgcgaattgtgaatcgcttctccaaacagagctgcttcatctgacccaagctggcctggagaaaggaggaagaggcaagagttgagaattatggctgcaggaaaatttgcaagccttcccagaaacatgccggtgaatcaccagttccccctggcctcatccatggaccttctgagcagcaggtcccctctcgctgagcatcgcccagatgcctatcaagatgtgtctatacatggcacccttccacggaagaaaaaaggtcctcctcccataaggtcctgtgatgacttcagtcacatgggcaccctcccccactccaaatccccacggcagaactcgcctgtgacccaggatggcatccaggagagcccatggcaggaccggcacggcgaaaccttcaccttcagggatccacatcttctggacccaactgtggaatatgtgaagttctccaaggagaggcacatcatggacaggacccccgagaaactgaagaaggagctggaggaggagctgctcctgagcagcgaggacctgcgcagccatgcctggtaccacggccgcatcccccgacaggtgtctgaaaaccttgtgcagcgagatggtgacttcctagttcgtgactctctgtccagccctgggaactttgtcctgacctgtcagtggaagaacctcgctcagcacttcaaaatcaaccggacagttctgcgactcagcgaggcctacagccgcgtgcagtaccagttcgagatggagagcttcgactccatccccggcctggtgcgctgctacgtgggcaaccgccggcccatctcccagcagagtggcgccatcatcttccagcccatcaacaggacggtgcctctgcggtgcctggaggagcattatggcacctccccaggccaggcccgggagggcagcctcaccaagggaaggccggatgtggccaagaggctgagcctcaccatgggtggcgtccaggcccgagagcagaatttgcccaggggaaacctcctcagaaacaaagaaaagagtggtagccagcccgcctgcctggatcacatgcaggacagaagagccttgtccctcaaagcccaccagtcagagagctacctgccgattggctgcaagctgccacctcagtcctcgggtgtggacacaagcccctgcccaaactcacctgtgttcaggacgggaagcgagcctgccctgagcccagcagtggttcggagggtctcctcagacgccagggctggggaggcgctgaggggatcagacagtcaactgtgccctaagcccccgcctaagccctgcaaggtgccgttcctcaaggttccctcgtctccctctgcctggctcaactcagaggccaactactgtgaactgaacccagcgtttgccacaggctgcggcaggggagcaaagctaccctcatgtgcccagggaagccacacagaactgctcacagccaagcagaatgaggcgccaggtccccggaactctggcgtcaactacttgatccttgatgatgatgacagggaaagaccttgggaacctgcggcagctcagatggagaaggggcagtgggacaagggcgagtttgtgacgcccctcctggagactgtctcctccttcaggcccaacgagtttgagtcaaagttccttccccctgagaataagcccctggaaacagcaatgttgaaacgtgcaaaagaactgttcaccaacaacgaccccaaggtcatcgcccagcacgtactgagcatggactgcagggttgctaggatacttggagtctctgaagagatgaggaggaacatgggggtgagctcaggcctggaactcattaccttgcctcacggacaccagctgcgcctggacataattgaaagacacaacacaatggccatcggcattgcagtggacattctgggatgcacgggcactttggaggaccgagcggccactctgagtaagatcatccaggtggcggtggaactgaaggattccatgggggacctctattccttctcagctctcatgaaagccctggaaatgccacagatcacaaggttagaaaagacgtggactgctctgcggcaccagtacacccaaactgccattctctatgagaaacagctgaagcccttcagcaaactcctgcatgaaggcagagagtccacatgtgttcccccaaacaatgtatcagtcccactgctgatgccgcttgtgacgttaatggagcgccaggctgtgacttttgaaggaaccgacatgtgggaaaaaaacgaccagagctgtgaaatcatgctgaaccatttggcaacagcgcgattcatggccgaggctgcagacagctaccggatgaatgctgagaggatcctggcaggttttcaaccagatgaagaaatgaatgaaatctgcaagactgaatttcaaatgcgattgctatggggcagcaaaggtgcacaagtcaatcagacagagagatatgagaaattcaaccagattttaactgccctctcgcgtaaattggaacctcctcctgtaaagcaggcagagctttgataactctccagagaacctttagaatatcttttcaagtttccccagcttcatctttgggaaagcttactgtttttgataaagtaataatgtgcaaatctgacaatatacaagcttttagtatccacaggatattaaacgtgtaaattgcacagagcacacttatttatgaattgtctaaagttactactgattttaaaatgaataatttattattaaggtaactactgctaatgttgatcagcaaatttaagagaagacctagctatgttggctggttgctttctattatcatggtatttgaccattttagttttaattccatgtcagataagtgtaaatagaagagtttaaaagcatgaaacatttcagaaggtatcagttatatgatattctttaaacaaatatgaaaaatgtaaatactcatgaatgaaaatacatctttttgtgaaacagtt

SEQ ID NO: 1210 - protein, 825 aa, Homosapiens; identical to SEQ ID NO: 68

SEQ ID NO: 1211 - DNA, 595 bp, Homosapiens
atttacatttttcatatttgtttaaagaatatcatataactgataccttctgaaatgtttcatgcttttaaactcttctatttacacttatctgacatggaattaaaactaaaatggtcaaataccatgataatagaaagcaaccagccaacatagctaggtcttctcttaaatttgctgatcaacattagcagtagttaccttaataataaattattcattttaaaatcagtagtaactttagacaattcataaataagtgtgctctgtgcaatttacacgtttaatatcctgtggatactaaaagcttgtatattgtcagatttgcacattattactttatcaaaaacagtaagctttcccaaagatgaagctggggaaacttgaaaagatattctaaaggttctctggagagttatcaaagctctgcctgaaggaggagacagtctccaggaggggcgtcacaaactcgcccttgtcccactgccccttctccatctgagctgccgcaggttcccaaggtctttccctgtcatcatcatcaaggatcaagtagttgacgccagagttccggggacctggcgcctcattctgc

SEQ ID NO: 1212 - protein, 33 aa, Homosapiens
MFHAFKLFYLHLSDMELKLKWSNTMIIESNQPT

SEQ ID NO: 1213 - DNA, 956 bp, Homosapiens
gttcttccggttactgactctgtggctgctgcctcccacaacgctgtgcttgcagaccccaggagcgctggctgtcccttcacttcctgaacatgtggatgtgtgctttgggttcttgacctcagctcttcccaaggtcttcttagagaagggtctaaatgaagtcatttttagagtatttgtttttggttacacaggtgcttccgcccatgtggcctcggagtgggaccctgcgggtcatcaatctgtacattgcctgagagcagccgtgtatgctctggaagggacaagaccaggtacctgtcgggggatgcggccgtggtaccaggcatggctgcgcaggtcctcgctgctcaggagcagctcctcctccagctccttcttcagtttctcgggggtcctgtccatgatgtgcctctccttggagaactgcaacacagagtcaaccatgagctcaccctgcccaggccacaccaggccatgccagctggaggtgaccgcctgcttcactaatccaaccagttatgctacagcctgcattcagggagatgtggccacaggactcagttctgaccaaggagctgagatgtgatggctggagactcaacaccattctggacggtgagtggggagccacaccaaggaattggctgggtggaaggtctgattgaggctgggtccctgatgactgtggggccaacacaccagccctggaccgccagcctccaggtcttctaggtgatctaccttatggaagcctgtgatttgtgggtgttcccgtcactggcagctgaactaaatcctaacccatattgtgacctgacccccattgagtcaccctgacaggcagtctgcaggcttagcctaaatcccttgtgctgcaccctgggcccacttcttggtctgacctctgaaaatgtggagatctgaaaatatacagcaggtcttgcacagtt

SEQ ID NO: 1214 - protein, 93 aa, Homosapiens
MRPWYQAWLRRSSLLRSSSSSSSFFSFSGVLSMMCLSLENCNTESTMSSPCPGHTRPCQLEVTACFTNPTSYATACIQGDVATGLSSDQGAEM

SEQ ID NO: 1215 - DNA, 1027 bp, Homosapiens
gttcttccggttactgactctgtggctgctgcctcccacaacgctgtgcttgcagaccccaggagcgctggctgtcccttcacttcctgaacatgtggatgtgtgctttgggttcttgacctcagctcttcccaaggtcttcttagagaagggtctaaatgaagtcatttttagagtatttgtttttggttacacaggtgcttccgcccatgtggcctcggagtgggaccctgcgggtcatcaatctgtacattgcctgagagcagccgtgtatgctctggaagggacaagaccaggtacctgtcgggggatgcggccgtggtaccaggcatggctgcgcaggtcctcgctgctcaggagcagctcctcctccagctccttcttcagtttctcgggggtcctgtccatgatgtgcctctccttggagaactgcaacacagagtcaaccatgagctcaccctgcccaggccacaccaggccatgccagctggaggtgaccgcctgcttcactaatccaaccagttatgctacagcctgcattcagggagatgtggccacaggactcagttctgaccaaggagctgagatgtgatggctggagactcaacaccattctggacgggtcttgctctgtctcccaggctggagtgcagtggcgcattcatagctcaagtgatcctcccgcctcagcctcccaggtagccaggactacaggtctgcaccaccacacccggccattggtctaatttctaagcaaggccagtgtcttccaatgagctcagggtgggaaaccccacgggggttgggctgtgaactgtaccaggtggcccaagctgggggtccaaaaagacagatccacatctcaaatccactgaactctgggaatccctgtgatgacctgagacctgcatcatcactgcccccaataatgttgtaaacatgtaaagaaactgaatccccaaaaagcacactttcaaaagcactacacaaagcagtctgaacccttcctctgaagaaggctgctaca

SEQ ID NO: 1216 - protein, 93 aa, Homosapiens; identical to SEQ ID NO: 1214

SEQ ID NO: 1217 - DNA, 789 bp, Homosapiens
gttcttccggttactgactctgtggctgctgcctcccacaacgctgtgcttgcagaccccaggagcgctggctgtcccttcacttcctgaacatgtggatgtgtgctttgggttcttgacctcagctcttcccaaggtcttcttagagaagggtctaaatgaagtcatttttagagtatttgtttttggttacacaggtgcttccgcccatgtggcctcggagtgggaccctgcgggtcatcaatctgtacattgcctgagagcagccgtgtatgctctggaagggacaagaccaggtacctgtcgggggatgcggccgtggtaccaggcatggctgcgcaggtcctcgctgctcaggagcagctcctcctccagctccttcttcagtttctcgggggtcctgtccatgatgtgcctctccttggagaactgcaacacagagtcaaccatgagctcaccctgcccaggccacaccaggccatgccagctggaggtgaccgcctgcttcactaatccaaccagttatgctacagcctgcattcagggagatgtggccacaggactcagttctgaccaaggagctgagatgtgatggctggagactcaacaccattctggacgggctggcacttgggttaaaagaaacaatgcaagtgaaatattaatcgctgagttcagcagcaagattacactcagtaatagtagtgctttcttaacatctttaaagaatgaaaagaacaaagactgccctggctaaggcagaccctaataaaagagtttgaaaaccgg

SEQ ID NO: 1218 - protein, 93 aa, Homosapiens; identical to SEQ ID NO: 1214

SEQ ID NO: 1219 - DNA, 764 bp, Homosapiens
atttcaggaagaaatggtcaacattgtcaagtgctgcagagagttccaatcatatcagaattggacagcatccgctgcacttggcaatgtgcaggtcactggtggcataaaaggggctgagtggccaatggaaagggagggagtaaagactgtgttaacttacaagtgagagtttatgcatgtatgatatacagagggacataatagacactggggactccaaaagaggggcggagggatagggagtgaggggctgacaaattacccattggtacaatgttcattatttgggtggtgagtacattggaagctcaaatcccaccgctatgcaatatatccatgtacaaacctgtgcatgcacccccagatcaataattttaaaaagactgttaaccagcttcggggtggaggaagatggggaccaggaatgagcatggaaacgaggagggtttttaacatgggaaagaccacagcatgtttctaagctaagaggaaacacgatctcgttatgagagttagaaggacaaggcctgaagagaaggtggagggaggaaaattagggtgagctgaactaggacaaatccctccccacctaacagagggcttatgcatggactttacattcaacacccattctacattcaacacgcatggactttagaacttgaatatgtctgttaatgttatgatctggaatatctccattacaagtttctttccactgggcttaaataaaacactttcgtcttttttcccccagaaaa

SEQ ID NO: 1220 - protein, 51 aa, Homosapiens [sequence omitted]

SEQ ID NO: 1221 - DNA, 3464 bp, Homosapiens
atatgggccggtgaagggaaaggaaatagctctacgagcggcatcctgcctgcgttagcggcggtggaggaggaggcagagaggagtggagggcggagtagacggaggaggctgctgcagagaagaaagtgtcagagccggttcggctttagagtgtggtgaagggtacttttcatggtgcatggaaggaaagccaatgcgcaggtgtaccaacattcgaccaggagagactggaatggatgtaacaagccgctgcacccttggagaccccaacaaactgccagaaggggttccccaacctgcccgcatgccctatatctcagacaagcaccctcgacaaaccttggaagtgattaaccttctgagaaagcaccgggagctatgtgatgtggtgctagttgtgggcgccaagaagatatatgcccatcgagtcattttgtcagcctgtagtccctacttccgagctatgtttacaggagaattggcagagagccgtcagacagaagtagtgatccgagacattgacgagagggctatggaattactgattgactttgcgtatacctcccagataacagtagaagagggcaatgttcagactcttctgccagctgcttgcctcctccagctggcagaaatacaggaagcctgctgtgaattcttaaagagacaattagatccttctaactgcctgggcattcgggcttttgctgacacacattcatgtcgtgagttgctaaggatagcagacaagttcacccaacataactttcaagaggtaatggagagtgaagagttcatgttgcttccagccaatcaactcattgatataatatccagtgatgagctaaacgttcgcagtgaagaacaagtgttcaatgcagtgatggcctgggtcaaatacagtattcaggaaagacgtcctcaattaccccaggtgctgcagcatgttcgtttgcctttgcttagtcccaagttcctggtcggcacagtaggctctgatcccctcatcaaaagtgatgaagaatgcagagacttggtagatgaggctaaaaactacctcctattgccgcaagaacgaccactaatgcaaggaccaaggacgagaccacggaaacctatccgatgtggggaagtactctttgcagttggtggttggtgcagtggagatgccatttccagtgttgaacgatatgatccacagaccaatgaatggagaatggtggcttcaatgagcaaaaggagatgcggagttggggtcagtgttcttgatgatctgttatatgcagtaggaggccatgatggatcctcttatctcaatagtgttgaaaggtatgaccccaaaacaaaccagtggagcagtgatgtggcccctacaagcacctgcaggacaagtgttggtgtagcagtacttggaggctttctttatgctgtgggtggccaggatggtgtgtcttgcctcaacattgttgagaggtatgatccgaaggagaacaagtggactcgggtagcttctatgagtaccagaagactaggtgtggctgtggctgtgttaggagggttcttatatgctgtaggtggctctgacgggacatctcctctcaacacagtggaacgttacaatcctcaggaaaacagatggcacactatagcccctatggggacccggaggaaacacctaggctgtgcagtatatcaggacatgatctatgctgtaggaggtagagatgacactacagagctgagcagtgctgagagatacaaccccagaaccaaccagtggtctccagtggtggccatgacatcacgccgtagtggagttggcctggcagtggtcaatggacagctcatggcagtaggaggttttgatggcacaacatacttgaagaccatagaagtttttgatcctgatgccaatacatggaggttatatggcgggatgaattaccgtcggctagggggtggcgtaggagttattaaaatgacacattgtgaatcccatatttggtgaacacagagaagacagtcttgtatatattcctctgtattctggggagctttgaccttggagctttgtacagcttgagaaaacattagaacaaattttattatttgccggtgcctcaacaaatggaaatacaatccaatgaaagtacttcacctgcaagatgcacaataattttcaactctgtgcagaagaatatttatttttggttttaatttatcatggttttttgttgttttcgttttgaacttatccttcctcccacaaaaaaagaaaagaagaaaaaattccaagcagcaaaacttactttgtttgtaaggtattcatttaggtttgaaaatactatttaataagggcagaagggctatatatgatttggctattatttctagacactccatccacatgattccactaacaaggattaccaggaataaaggtaggtatgcaaaatgtattagctacccattattctcgcactaaccaccagaagacttgaaaatcttaaaaaaaaaaaacaaaaaaacaagaaaaggcaacatctcattttaaatagtacaattcagaagggatactaaatcaataaaaaccaggactcagacactacagttttcatcagtgtaattttatgtcttgtttctttctatatgaacttgtttatttagtctttttttcataatattctcatagagtttctgctagatctagagctctgctcagtgcctcttataaaaacaatatataagtctcatatgctgtcttgagaatccaagagaatcacatgcagctctgcaacagtttttgctcaaaaatgttactgactaaagcaactgtccttcctgtttccttattgctaccaaggaccagcagggagaaatgtcttctcccagcagtgaattctgttatgcaatttattcttgatgctcaggcctggttaagctgaggcttacctttaataacagcctccaagggaatgaattattcagttaatgtaatagcacacattaaagagtgtaaaatcaattgaggcattttattaatatcttggttcttttatacaaacaatgtatcattatcttcattctataaggtcattgttactacttctctcaaattgcactttctggtaaaaagttaaaaatttttaaggaaaaaataatttcaatggttaaagttttttttcctcattgtattcatagacaaatttttttcaatatattttgcaagaaaaatctttgaataagactaactgcatttaaaaggaataacctccttctccctttccccaactacaaaaatgtttggcaactttgtgtttacatttaaagatcatttgcacctttttcaaggaaaaaaagtattgagtaaacaattgtttacatatatcatttatgcttttttctagcatgtataacttttttaaataaaggtagtatttaccattaaaaaaattttagct

SEQ ID NO: 1222 - protein, 609 aa, Homosapiens; identical to SEQ ID NO: 70

SEQ ID NO: 1223 - DNA, 3588 bp, Homosapiens
atatgggccggtgaagggaaaggaaatagctctacgagcggcatcctgcctgcgttagcggcggtggaggaggaggcagagaggagtggagggcggagtagacggaggaggctgctgcagagaagaaagtgtcagagccggttcggctttagagtgtggtgaagggtacttttcatggtgcatggaaggaaagccaatgcgcaggtgtaccaacattcgaccaggagagactggaatggatgtaacaagccgctgcacccttggagaccccaacaaactgccagaaggggttccccaacctgcccgcatgccctatatctcagacaagcaccctcgacaaaccttggaagtgattaaccttctgagaaagcaccgggagctatgtgatgtggtgctagttgtgggcgccaagaagatatatgcccatcgagtcattttgtcagcctgtagtccctacttccgagctatgtttacaggagaattggcagagagccgtcagacagaagtagtgatccgagacattgacgagagggctatggaattactgattgactttgcgtatacctcccagataacagtagaagagggcaatgttcagactcttctgccagctgcttgcctcctccagctggcagaaatacaggaagcctgctgtgaattcttaaagagacaattagatccttctaactgcctgggcattcgggcttttgctgacacacattcatgtcgtgagttgctaaggatagcagacaagttcacccaacataactttcaagaggtaatggagagtgaagagttcatgttgcttccagccaatcaactcattgatataatatccagtgatgagctaaacgttcgcagtgaagaacaagtgttcaatgcagtgatggcctgggtcaaatacagtattcaggaaagacgtcctcaattaccccaggtgctgcagcatgttcgtttgcctttgcttagtcccaagttcctggtcggcacagtaggctctgatcccctcatcaaaagtgatgaagaatgcagagacttggtagatgaggctaaaaactacctcctattgccgcaagaacgaccactaatgcaaggaccaaggacgagaccacggaaacctatccgatgtggggaagtactctttgcagttggtggttggtgcagtggagatgccatttccagtgttgaacgatatgatccacagaccaatgaatggagaatggtggcttcaatgagcaaaaggagatgcggagttggggtcagtgttcttgatgatctgttatatgcagtaggaggccatgatggatcctcttatctcaatagtgttgaaaggtatgaccccaaaacaaaccagtggagcagtgatgtggcccctacaagcacctgcaggacaagtgttggtgtagcagtacttggaggctttctttatgctgtgggtggccaggatggtgtgtcttgcctcaacattgttgagaggtatgatccgaaggagaacaagtggactcgggtagcttctatgagtaccagaagactaggtgtggctgtggctgtgttaggagggttcttatatgctgtaggtggctctgacgggacatctcctctcaacacagtggaacgttacaatcctcaggaaaacagatggcacactatagcccctatggggacccggaggaaacacctaggctgtgcagtatatcaggacatgatctatgctgtaggaggtagagatgacactacagagctgagcagtgctgagagatacaaccccagaaccaaccagtggtctccagtggtggccatgacatcacgccgtagtggagttggcctggcagtggtcaatggacagctcatggcagtaggaggttttgatggcacaacatacttgaagaccatagaagtttttgatcctgatgccaatacatggaggttatatggcgggatgaattaccgtcggctagggggtggcgtaggagttattaaaatgacacattgtgaatcccatatttggtgaacacagagaagacagtcttgtatatattcctctgtattctggggagctttgaccttggagctttgtacagcttgagaaaacattagaacaaattttattatttgccggtgcctcaacaaatggaaatacaatccaatgaaagtacttcacctgcaagatgcacaataattttcaactctgtgcagaagaatatttatttttggttttaatttatcatggttttttgttgttttcgttttgaacttatccttcctcccacaaaaaaagaaaagaagaaaaaattccaagcagcaaaacttactttgtttgtaaggtattcatttaggtttgaaaatactatttaataagggcagaagggctatatatgatttggctattatttctagacactccatccacatgattccactaacaaggattaccaggaataaaggtaggtatgcaaaatgtattagctacccattattctcgcactaaccaccagaagacttgaaaatcttaaaaaaaaaaaacaaaaaaacaagaaaaggcaacatctcattttaaatagtacaattcagaagggatactaaatcaataaaaaccaggactcagacactacagttttcatcagtgtaattttatgtcttgtttctttctatatgaacttgtttatttagtctttttttcataatattctcatagagtttctgctagatctagagctctgctcagtgcctcttataaaaacaatatataagtctcatatgctgtcttgagaatccaagagaatcacatgcagctctgcaacagtttttgctcaaaaatgttactgactaaagcaactgtccttcctgtttccttattgctaccaaggaccagcagggagaaatgtcttctcccagcagtgaattctgttatgcaatttattcttgatgctcaggcctggttaagctgaggcttacctttaataacagcctccaagggaatgaattattcagttaatgtaatagcacacattaaagagtgtaaaatcaattgaggcattttattaatatcttggttcttttatacaaacaatgtatcattatcttcattctataaggtcattgttactacttctctcaaattgcactttctggtaaaaagttaaaaatttttaaggaaaaaataatttcaatggttaaagttttttttcctcattgtattcatagacaaatttttttcaatatattttgcaagaaaaatctttgaataagactaactgcatttaaaaggaataacctccttctccctttccccaactacaaaaatgtttggcaactttgtgtttacatttaaagatcatttgcacctttttcaaggaaaaaaagtattgagtaaacaattgtttacatatatcatttatgcttttttctagcatgtataacttttttaaataaaggtagtatttaccattaaaaaaattttagctaatgctttttatccttgtacttttgttatttaatttggaatttctgtttctatataatttattttatctgtatgtaaagttacaagtgctttcaacttgaataaaaggattgccagctagaatt

SEQ ID NO: 1224 - protein, 609 aa, Homosapiens; identical to SEQ ID NO: 70

SEQ ID NO: 1225 - DNA, 949 bp, Homosapiens
agacgcctcctcctcctgtcacttcgggacaagttaacaatcttcagattcgttattaaagcctcgtgtaccctatgtgatctatcaggttcggctttagagtgtggtgaagggtacttttcatggtgcatggaaggaaagccaatgcgcaggtgtaccaacattcgaccaggagagactggaatggatgtaacaagccgctgcacccttggagaccccaacaaactgccagaaggggttccccaacctgcccgcatgccctatatctcagacaagcaccctcgacaaaccttggaagtgattaaccttctgagaaagcaccgggagctatgtgatgtggtgctagttgtgggcgccaagaagatatatgcccatcgagtcattttgtcagcctgtagtccctacttccgagctatgtttacaggagaattggcagagagccgtcagacagaagtagtgatccgagacattgacgagagggctatggaattactgattgactttgcgtatacctcccagataacagtagaagagggcaatgttcagactcttctgccagctgcttgcctcctccagctggcagaaatacaggaagcctgctgtgaattcttaaagagacaattagatccttctaactgcctgggcattcgggcttttgctgacacacattcatgtcgtgagttgctaaggatagcagacaagttcacccaacataactttcaagaggtgagttgcacttggtgttccaatgcacccatttgttggagagcaatatgggttcacattctgctaaataacacttgcctgggtatttcctgctgattctaactcataatagcaaataaataagttattataaatcctaaacctggcttttattttagagggcaattttgtgttctaccagcaagttaagatttagggatttattctccctaactgtattcat

SEQ ID NO: 1226 - protein, 230 aa, Homosapiens
MEGKPMRRCTNIRPGETGMDVTSRCTLGDPNKLPEGVPQPARMPYISDKHPRQTLEVINLLRKHRELCDVVLVVGAKKIYAHRVILSACSPYFRAMFTGELAESRQTEVVIRDIDERAMELLIDFAYTSQITVEEGNVQTLLPAACLLQLAEIQEACCEFLKRQLDPSNCLGIRAFADTHSCRELLRIADKFTQHNFQEVSCTWCSNAPICWRAIWVHILLNNTCLGISC

SEQ ID NO: 1227 - DNA, 250 bp, Homosapiens
gggtctcgctctgtcacccaggctggagtccagtgccacaatcttggctcactgcaacctctacctcccggactcaagcaatcctcccacctcagcctcccgagtagctgggattatacgtgtatgccaccacactggcctggtttgttattcctttctatttagatagtatgggtatttttgcctaaggatattgtcaatgtgacagtcacaccagattcgtcacgtcttgtcttctcttcagaagctt

SEQ ID NO: 1228 - protein, 55 aa, Homosapiens
GLALSPRLESSATILAHCNLYLPDSSNPPTSASRVAGIIRVCHHTGLVCYSFLFR

SEQ ID NO: 1229 - DNA, 1856 bp, Homosapiens
attctgtgtgaatattctaattgaatatataattttatagttcccataatttgatagacttttgttgttacattttccctgtgtttcagtaaaccagaatgtaaggccataaagaattatcttttgtaaatagatttatctagaaaccagtctataatttccttacgattgtctagtttcttcagcagcttactgtattttggttttgtaggttggcctggcagtggtcaatggacagctcatggcagtaggaggttttgatggcacaacatacttgaagaccatagaagtttttgatcctgatgccaatacatggaggttatatggcgggatgaattaccgtcggctagggggtggcgtaggagttattaaaatgacacattgtgaatcccatatttggtgaacacagagaagacagtcttgtatatattcctctgtattctggggagctttgaccttggagctttgtacagcttgagaaaacattagaacaaattttattatttgccggtgcctcaacaaatggaaatacaatccaatgaaagtacttcacctgcaagatgcacaataattttcaactctgtgcagaagaatatttatttttggttttaatttatcatggttttttgttgttttcgttttgaacttatccttcctcccacaaaaaaagaaaagaagaaaaaattccaagcagcaaaacttactttgtttgtaaggtattcatttaggtttgaaaatactatttaataagggcagaagggctatatatgatttggctattatttctagacactccatccacatgattccactaacaaggattaccaggaataaaggtaggtatgcaaaatgtattagctacccattattctcgcactaaccaccagaagacttgaaaatcttaaaaaaaaaaaacaaaaaaacaagaaaaggcaacatctcattttaaatagtacaattcagaagggatactaaatcaataaaaaccaggactcagacactacagttttcatcagtgtaattttatgtcttgtttctttctatatgaacttgtttatttagtctttttttcataatattctcatagagtttctgctagatctagagctctgctcagtgcctcttataaaaacaatatataagtctcatatgctgtcttgagaatccaagagaatcacatgcagctctgcaacagtttttgctcaaaaatgttactgactaaagcaactgtccttcctgtttccttattgctaccaaggaccagcagggagaaatgtcttctcccagcagtgaattctgttatgcaatttattcttgatgctcaggcctggttaagctgaggcttacctttaataacagcctccaagggaatgaattattcagttaatgtaatagcacacattaaagagtgtaaaatcaattgaggcattttattaatatcttggttcttttatacaaacaatgtatcattatcttcattctataaggtcattgttactacttctctcaaattgcactttctggtaaaaagttaaaaatttttaaggaaaaaataatttcaatggttaaagttttttttcctcattgtattcatagacaaatttttttcaatatattttgcaagaaaaatctttgaataagactaactgcatttaaaaggaataacctccttctccctttccccaactacaaaaatgtttggcaactttgtgtttacatttaaagatcatttgcacctttttcaaggaaaaaaagtattgagtaaacaattgtttacatatatcatttatgcttttttctagcatgtataacttttttaaataaaggtagtatttaccattaaaaaaattttagct

SEQ ID NO: 1230 - protein, 53 aa, Homosapiens
MAVGGFDGTTYLKTIEVFDPDANTWRLYGGMNYRRLGGGVGVIKMTHCESHIW

SEQ ID NO: 1231 - DNA, 1980 bp, Homosapiens
attctgtgtgaatattctaattgaatatataattttatagttcccataatttgatagacttttgttgttacattttccctgtgtttcagtaaaccagaatgtaaggccataaagaattatcttttgtaaatagatttatctagaaaccagtctataatttccttacgattgtctagtttcttcagcagcttactgtattttggttttgtaggttggcctggcagtggtcaatggacagctcatggcagtaggaggttttgatggcacaacatacttgaagaccatagaagtttttgatcctgatgccaatacatggaggttatatggcgggatgaattaccgtcggctagggggtggcgtaggagttattaaaatgacacattgtgaatcccatatttggtgaacacagagaagacagtcttgtatatattcctctgtattctggggagctttgaccttggagctttgtacagcttgagaaaacattagaacaaattttattatttgccggtgcctcaacaaatggaaatacaatccaatgaaagtacttcacctgcaagatgcacaataattttcaactctgtgcagaagaatatttatttttggttttaatttatcatggttttttgttgttttcgttttgaacttatccttcctcccacaaaaaaagaaaagaagaaaaaattccaagcagcaaaacttactttgtttgtaaggtattcatttaggtttgaaaatactatttaataagggcagaagggctatatatgatttggctattatttctagacactccatccacatgattccactaacaaggattaccaggaataaaggtaggtatgcaaaatgtattagctacccattattctcgcactaaccaccagaagacttgaaaatcttaaaaaaaaaaaacaaaaaaacaagaaaaggcaacatctcattttaaatagtacaattcagaagggatactaaatcaataaaaaccaggactcagacactacagttttcatcagtgtaattttatgtcttgtttctttctatatgaacttgtttatttagtctttttttcataatattctcatagagtttctgctagatctagagctctgctcagtgcctcttataaaaacaatatataagtctcatatgctgtcttgagaatccaagagaatcacatgcagctctgcaacagtttttgctcaaaaatgttactgactaaagcaactgtccttcctgtttccttattgctaccaaggaccagcagggagaaatgtcttctcccagcagtgaattctgttatgcaatttattcttgatgctcaggcctggttaagctgaggcttacctttaataacagcctccaagggaatgaattattcagttaatgtaatagcacacattaaagagtgtaaaatcaattgaggcattttattaatatcttggttcttttatacaaacaatgtatcattatcttcattctataaggtcattgttactacttctctcaaattgcactttctggtaaaaagttaaaaatttttaaggaaaaaataatttcaatggttaaagttttttttcctcattgtattcatagacaaatttttttcaatatattttgcaagaaaaatctttgaataagactaactgcatttaaaaggaataacctccttctccctttccccaactacaaaaatgtttggcaactttgtgtttacatttaaagatcatttgcacctttttcaaggaaaaaaagtattgagtaaacaattgtttacatatatcatttatgcttttttctagcatgtataacttttttaaataaaggtagtatttaccattaaaaaaattttagctaatgctttttatccttgtacttttgttatttaatttggaatttctgtttctatataatttattttatctgtatgtaaagttacaagtgctttcaacttgaataaaaggattgccagctagaatt

SEQ ID NO: 1232 - protein, 53 aa, Homosapiens; identical to SEQ ID NO: 1230

SEQ ID NO: 1233 - DNA, 303 bp, Homosapiens
ctacattattaagacaactgaatgtgatttaaaatttatttgctgctcttctttttctaggatggagcctgctagaatatacaaccaaaataccacaaatttaaagatactaaaaatttaaagatacacaaataccccaactctaaaaaaaaaaaaattatcaaaaaaaagaaaaaaggccagacatggtgttacacacctgtagtccagctactcaggaagctggggcaagaagaccactttagcccaagagtttgagcccagcctaagcaacacagcaagatcccatctctaaaataaaaa

SEQ ID NO: 1234 - protein, 60 aa, Homosapiens
NIQPKYHKFKDTKNLKIHKYPNSKKKKIIKKKKKGQTWCYTPVVQLLRKLGQEDHFSPRV

SEQ ID NO: 1235 - DNA, 2846 bp, Homosapiens
aggagtaacagtcgcgtttcaaatctcgcagacctgctggccgatttcgagtcttctgaaagaggaaggcgagcaaagccaaaattctcccagagcgcgaacccaaacacagatcgccgctggggtccaagcgcccttcaactccgcccgctagtgcccaagattaccgggaaggaattcaacgaatcagtggtgaggtgccgccgccatgcctactacgggcggaaatttgagagaaagcttcgcaccggtaggaaaactgaggagcaaccgagcacgattggaaaggttgacgatagtggttaagtggctcggccttgccctcagttaaaatggcaattttagttgcttcactgatacggaatcggcgaggcgccaaggaggcttcctgcgtggggccgcagagcgagtcgggaaacgattttaaactgaagaggcggcggagggccgaattcccttttctcaacggcttgatttcagagctgggctggtctctgacaggctcagctggagagggacgggttgggacgcactgtccttttgcccttccccctccgcgagcagaagctgactccgcaggagcgagggtcgcagagctgggtgagcggaaatgtccctcccagagtgaagtcgcagggcccgccccgcgtctgagggagcggaggtcttcctgggggatttcagtctccacatagttttggagccggacttttgaagaatgattcgtgaatccggaatgggtgacagcgtcatcacggcattttattgacagaccatggattcttacagtgcaccagagtcaactcctagtgcatcctcaagacctgaagattactttataggtgccactcctctgcagaaacgattagaatcggtcaggaagcagagttcatttatcctgactccacctcgaaggaaaattccccagtgttcgcagttgcaggaagatgttgaccctcaaaaggttgcattccttctgcataaacagtggactttatatagtttaactcccttatataaattctcctatagtaatctcaaagagtattctagacttctcaatgcttttattgttgctgaaaagcaaaaaggacttgctgtggaagtgggagaagacttcaacatcaaagtgattttttctactctcctaggaatgaaaggaacacaaagggacccggaagcatttcttgtccagggtctcattttgtcacccaggctggagtacagtggcacgatcttggttgactgcaacctctgtctcctgggctcaagtgatccttccaccttagccttccaagtagctgggactgcaggtgcatgccaccacactcggattgtgtcaaaatctcaattgccatctgagaatagagaaggtaaagtgctgtggactggctggttctgctgtgtatttggagacagtcttctggagactgtttcagaagatttcacctgtctgcccttattccttgcaaatggagcagagtctaacacagcaataattggaacttggtttcagaaaacctttgactgttatttcagtcctttagcaatcaatgcatttaatctttcctggatggctgccatgtggactgcatgcaaaatggaccattatgtggctactactgaatttctttggtctgtaccctgtagccctcaaagtctggacatttctttcgcaatacatccagaggatgcaaaagctctatgggacagtgtccacaaaacacctggggaggttacccaggaagaagttgacctattcatggattgcctttattcacatttccatagacatttcaaaattcatttatcagccacaagattagttcgtgtttcaacatctgtagcttcagcacatactgatggaaaaataaagattctgtgtcataaataccttattggagtgttagcatatttgacagaactggcaatttttcaaattgagtgaagccttatgtggactataagttatagattatatactcttattgataacttgcctaattgctatgctgaaagagactgcaggagaaataggcatctatctctgcatctgttttccccaccatgcctttggagttgccaagatggaagccaagaaggatctagaagaacaaagaatatggtagtagatgagccacagccaggtgcccatgtactaatcatgataacctgacatgccattctcaaaatgctgagttgttaatttcttgtcatctttaaatatatatatataggctgggcttggtggctcacacctgtaattccagcactttgggaggctgaggtgggtggatcatttgaggccaggaattcaagaccagcctggccaacatggtgaaaccccttctctactgaaaatacaataattagctgggcgtggtggcacatgcctatgatcccagctactggggaggctgaggcaggagaatcgttttaacccagaagacaggctgcagtgagccaagactgcaccactgcactccagcctgggcaacaaagtgagactctgcctcaaaaaataaaaaagaaataaaataaataaatacagcgtttattatgtttaaactcttaggattcaaatgagatgtatctaatggatatttctgatttgggtctttaaaacctttaatctcttttaagcattttagacttgcattcagaaagaattctgtcttctaaagacattttcctagcatttcactgcggagaactggcaatcaaaatcccctcaaaagggaactaaagattaatatacacatttttttagtcattaatatgcttctgttttaaatacagttcaactcctgttgcaatgttgaattaaatgtttattttaaaatgaa

SEQ ID NO: 1236 - protein, 390 aa, Homosapiens
MDSYSAPESTPSASSRPEDYFIGATPLQKRLESVRKQSSFILTPPRRKIPQCSQLQEDVDPQKVAFLLHKQWTLYSLTPLYKFSYSNLKEYSRLLNAFIVAEKQKGLAVEVGEDFNIKVIFSTLLGMKGTQRDPEAFLVQGLILSPRLEYSGTILVDCNLCLLGSSDPSTLAFQVAGTAGACHHTRIVSKSQLPSENREGKVLWTGWFCCVFGDSLLETVSEDFTCLPLFLANGAESNTAIIGTWFQKTFDCYFSPLAINAFNLSWMAAMWTACKMDHYVATTEFLWSVPCSPQSLDISFAIHPEDAKALWDSVHKTPGEVTQEEVDLFMDCLYSHFHRHFKIHLSATRLVRVSTSVASAHTDGKIKILCHKYLIGVLAYLTELAIFQIE

SEQ ID NO: 1237 - DNA, 2296 bp, Homosapiens
cttcctgggtgcgtttgtgtctcttgtgaacccacttgtggagcgagagggaatttgggagggccaggggttagtctggcctctgtcttagctgtcattttggcggttttttttttttttcttcaggggatttcagtctccacatagttttggagccggacttttgaagaatgattcgtgaatccggaatgggtgacagcgtcatcacggcattttattgacagaccatggattcttacagtgcaccagagtcaactcctagtgcatcctcaagacctgaagattactttataggtgccactcctctgcagaaacgattagaatcggtcaggaagcagagttcatttatcctgactccacctcgaaggaaaattccccagtgttcgcagttgcaggaagatgttgaccctcaaaaggttgcattccttctgcataaacagtggactttatatagtttaactcccttatataaattctcctatagtaatctcaaagagtattctagacttctcaatgcttttattgttgctgaaaagcaaaaaggacttgctgtggaagtgggagaagacttcaacatcaaagtgattttttctactctcctaggaatgaaaggaacacaaagggacccggaagcatttcttgtccagggtctcattttgtcacccaggctggagtacagtggcacgatcttggttgactgcaacctctgtctcctgggctcaagtgatccttccaccttagccttccaagtagctgggactgcaggtgcatgccaccacactcggattgtgtcaaaatctcaattgccatctgagaatagagaaggtaaagtgctgtggactggctggttctgctgtgtatttggagacagtcttctggagactgtttcagaagatttcacctgtctgcccttattccttgcaaatggagcagagtctaacacagcaataattggaacttggtttcagaaaacctttgactgttatttcagtcctttagcaatcaatgcatttaatctttcctggatggctgccatgtggactgcatgcaaaatggaccattatgtggctactactgaatttctttggtctgtaccctgtagccctcaaagtctggacatttctttcgcaatacatccagaggatgcaaaagctctatgggacagtgtccacaaaacacctggggaggttacccaggaagaagttgacctattcatggattgcctttattcacatttccatagacatttcaaaattcatttatcagccacaagattagttcgtgtttcaacatctgtagcttcagcacatactgatggaaaaataaagattctgtgtcataaataccttattggagtgttagcatatttgacagaactggcaatttttcaaattgagtgaagccttatgtggactataagttatagattatatactcttattgataacttgcctaattgctatgctgaaagagactgcaggagaaataggcatctatctctgcatctgttttccccaccatgcctttggagttgccaagatggaagccaagaaggatctagaagaacaaagaatatggtagtagatgagccacagccaggtgcccatgtactaatcatgataacctgacatgccattctcaaaatgctgagttgttaatttcttgtcatctttaaatatatatatataggctgggcttggtggctcacacctgtaattccagcactttgggaggctgaggtgggtggatcatttgaggccaggaattcaagaccagcctggccaacatggtgaaaccccttctctactgaaaatacaataattagctgggcgtggtggcacatgcctatgatcccagctactggggaggctgaggcaggagaatcgttttaacccagaagacaggctgcagtgagccaagactgcaccactgcactccagcctgggcaacaaagtgagactctgcctcaaaaaataaaaaagaaataaaataaataaatacagcgtttattatgtttaaactcttaggattcaaatgagatgtatctaatggatatttctgatttgggtctttaaaacctttaatctcttttaagcattttagacttgcattcagaaagaattctgtcttctaaagacattttcctagcatttcactgcggagaactggcaatcaaaatcccctcaaaagggaactaaagattaatatacacatttttttagtcattaatatgcttctgttttaaatacagttcaactcctgttgcaatgttgaattaaatgtttattttaaaatg

SEQ ID NO: 1238 - protein, 390 aa, Homosapiens; identical to SEQ ID NO: 1236

SEQ ID NO: 1239 - DNA, 2158 bp, Homosapiens
cttcctgggtgcgtttgtgtctcttgtgaacccacttgtggagcgagagggaatttgggagggccaggggttagtctggcctctgtcttagctgtcattttggcggttttttttttttttcttcaggggatttcagtctccacatagttttggagccggacttttgaagaatgattcgtgaatccggaatgggtgacagcgtcatcacggcattttattgacagaccatggattcttacagtgcaccagagtcaactcctagtgcatcctcaagacctgaagattactttataggtgccactcctctgcagaaacgattagaatcggtcaggaagcagagttcatttatcctgactccacctcgaaggaaaattccccagtgttcgcagttgcaggaagatgttgaccctcaaaaggttgcattccttctgcataaacagtggactttatatagtttaactcccttatataaattctcctatagtaatctcaaagagtattctagacttctcaatgcttttattgttgctgaaaagcaaaaaggacttgctgtggaagtgggagaagacttcaacatcaaagtgattttttctactctcctaggaatgaaaggaacacaaagggacccggaagcatttcttgtccagattgtgtcaaaatctcaattgccatctgagaatagagaaggtaaagtgctgtggactggctggttctgctgtgtatttggagacagtcttctggagactgtttcagaagatttcacctgtctgcccttattccttgcaaatggagcagagtctaacacagcaataattggaacttggtttcagaaaacctttgactgttatttcagtcctttagcaatcaatgcatttaatctttcctggatggctgccatgtggactgcatgcaaaatggaccattatgtggctactactgaatttctttggtctgtaccctgtagccctcaaagtctggacatttctttcgcaatacatccagaggatgcaaaagctctatgggacagtgtccacaaaacacctggggaggttacccaggaagaagttgacctattcatggattgcctttattcacatttccatagacatttcaaaattcatttatcagccacaagattagttcgtgtttcaacatctgtagcttcagcacatactgatggaaaaataaagattctgtgtcataaataccttattggagtgttagcatatttgacagaactggcaatttttcaaattgagtgaagccttatgtggactataagttatagattatatactcttattgataacttgcctaattgctatgctgaaagagactgcaggagaaataggcatctatctctgcatctgttttccccaccatgcctttggagttgccaagatggaagccaagaaggatctagaagaacaaagaatatggtagtagatgagccacagccaggtgcccatgtactaatcatgataacctgacatgccattctcaaaatgctgagttgttaatttcttgtcatctttaaatatatatatataggctgggcttggtggctcacacctgtaattccagcactttgggaggctgaggtgggtggatcatttgaggccaggaattcaagaccagcctggccaacatggtgaaaccccttctctactgaaaatacaataattagctgggcgtggtggcacatgcctatgatcccagctactggggaggctgaggcaggagaatcgttttaacccagaagacaggctgcagtgagccaagactgcaccactgcactccagcctgggcaacaaagtgagactctgcctcaaaaaataaaaaagaaataaaataaataaatacagcgtttattatgtttaaactcttaggattcaaatgagatgtatctaatggatatttctgatttgggtctttaaaacctttaatctcttttaagcattttagacttgcattcagaaagaattctgtcttctaaagacattttcctagcatttcactgcggagaactggcaatcaaaatcccctcaaaagggaactaaagattaatatacacatttttttagtcattaatatgcttctgttttaaatacagttcaactcctgttgcaatgttgaattaaatgtttattttaaaatg

SEQ ID NO: 1240 - protein, 344 aa, Homosapiens; identical to SEQ ID NO: 72

SEQ ID NO: 1241 - DNA, 2706 bp, Homosapiens
aggagtaacagtcgcgtttcaaatctcgcagacctgctggccgatttcgagtcttctgaaagaggaaggcgagcaaagccaaaattctcccagagcgcgaacccaaacacagatcgccgctggggtccaagcgcccttcaactccgcccgctagtgcccaagattaccgggaaggaattcaacgaatcagtggtgaggtgccgccgccatgcctactacgggcggaaatttgagagaaagcttcgcaccggtaggaaaactgaggagcaaccgagcacgattggaaaggttgacgatagtggttaagtggctcggccttgccctcagttaaaatggcaattttagttgcttcactgatacggaatcggcgaggcgccaaggaggcttcctgcgtggggccgcagagcgagtcgggaaacgattttaaactgaagaggcggcggagggccgaattcccttttctcaacggcttgatttcagagctgggctggtctctgacaggctcagctggagagggacgggttgggacgcactgtccttttgcccttccccctccgcgagcagaagctgactccgcaggagcgagggtcgcagagctgggtgagcggaaatgtccctcccagagtgaagtcgcagggcccgccccgcgtctgagggagcggaggtcttcctgggggatttcagtctccacatagttttggagccggacttttgaagaatgattcgtgaatccggaatgggtgacagcgtcatcacggcattttattgacagaccatggattcttacagtgcaccagagtcaactcctagtgcatcctcaagacctgaagattactttataggtgccactcctctgcagaaacgattagaatcggtcaggaagcagagttcatttatcctgactccacctcgaaggaaaattccccagtgttcgcagttgcaggaagatgttgaccctcaaaaggttgcattccttctgcataaacagtggactttatatagtttaactcccttatataaattctcctatagtaatctcaaagagtattctagacttctcaatgcttttattgttgctgaaaagcaaaaaggacttgctgtggaagtgggagaagacttcaacatcaaagtgattttttctactctcctaggaatgaaaggaacacaaagggacccggaagcatttcttgtccagattgtgtcaaaatctcaattgccatctgagaatagagaaggtaaagtgctgtggactggctggttctgctgtgtatttggagacagtcttctggagactgtttcagaagatttcacctgtctgcccttattccttgcaaatggagcagagtctaacacagcaataattggaacttggtttcagaaaacctttgactgttatttcagtcctttagcaatcaatgcatttaatctttcctggatggctgccatgtggactgcatgcaaaatggaccattatgtggctactactgaatttctttggtctgtaccctgtagccctcaaagtctggacatttctttcgcaatacatccagaggatgcaaaagctctatgggacagtgtccacaaaacacctggggaggttacccaggaagaagttgacctattcatggattgcctttattcacatttccatagacatttcaaaattcatttatcagccacaagattagttcgtgtttcaacatctgtagcttcagcacatactgatggaaaaataaagattctgtgtcataaataccttattggagtgttagcatatttgacagaactggcaatttttcaaattgagtgaagccttatgtggactataagttatagattatatactcttattgataacttgcctaattgctatgctgaaagagactgcaggagaaataggcatctatctctgcatctgttttccccaccatgcctttggagttgccaagatggaagccaagaaggatctagaagaacaaagaatatggtagtagatgagccacagccaggtgcccatgtactaatcatgataacctgacatgccattctcaaaatgctgagttgttaatttcttgtcatctttaaatatatatatataggctgggcttggtggctcacacctgtaattccagcactttgggaggctgaggtgggtggatcatttgaggccaggaattcaagaccagcctggccaacatggtgaaaccccttctctactgaaaatacaataattagctgggcgtggtggcacatgcctatgatcccagctactggggaggctgaggcaggagaatcgttttaacccagaagacaggctgcagtgagccaagactgcaccactgcactccagcctgggcaacaaagtgagactctgcctcaaaaaataaaaaagaaataaaataaataaatacagcgtttattatgtttaaactcttaggattcaaatgagatgtatctaatggatatttctgatttgggtctttaaaacctttaatctcttttaagcattttagacttgcattcagaaagaattctgtcttctaaagacattttcctagcatttcactgcggagaactggcaatcaaaatcccctcaaaagggaactaaagattaatatacacatttttttagtcattaatatgcttctgttttaaatacagttcaactcctgttgcaatgttgaattaaatgtttattttaaaatg

SEQ ID NO: 1242 - protein, 344 aa, Homosapiens; identical to SEQ ID NO: 72

SEQ ID NO: 1243 - DNA, 2163 bp, Homosapiens
aggagtaacagtcgcgtttcaaatctcgcagacctgctggccgatttcgagtcttctgaaagaggaaggcgagcaaagccaaaattctcccagagcgcgaacccaaacacagatcgccgctggggtccaagcgcccttcaactccgcccgctagtgcccaagattaccgggaaggaattcaacgaatcagtggtgaggtgccgccgccatgcctactacgggcggaaatttgagagaaagcttcgcaccggtaggaaaactgaggagcaaccgagcacgattggaaaggttgacgatagtggttaagtggctcggccttgccctcagttaaaatggcaattttagttgcttcactgatacggaatcggcgaggcgccaaggaggcttcctgcgtggggccgcagagcgagtcgggaaacgattttaaactgaagaggcggcggagggccgaattcccttttctcaacggcttgatttcagagctgggctggtctctgacaggctcagctggagagggacgggttgggacgcactgtccttttgcccttccccctccgcgagcagaagctgactccgcaggagcgagggtcgcagagctgggtgagcggaaatgtccctcccagagtgaagtcgcagggcccgccccgcgtctgagggagcggaggtcttcctgggggatttcagtctccacatagttttggagccggacttttgaagaatgattcgtgaatccggaatgggtgacagcgtcatcacggcattttattgacagaccatggattcttacagtgcaccagagtcaactcctagtgcatcctcaagacctgaagattactttataggtgccactcctctgcagaaacgattagaatcggtcaggaagcagagttcatttatcctgactccacctcgaaggaaaattccccagtgttcgcagttgcaggaagatgttgaccctcaaaaggttgcattccttctgcataaacagtggactttatatagtttaactcccttatataaattctcctatagtaatctcaaagagtattctagacttctcaatgcttttattgttgctgaaaagcaaaaaggacttgctgtggaagtgggagaagacttcaacatcaaagtgattttttctactctcctaggaatgaaaggaacacaaagggacccggaagcatttcttgtccagattctgtgtcataaataccttattggagtgttagcatatttgacagaactggcaatttttcaaattgagtgaagccttatgtggactataagttatagattatatactcttattgataacttgcctaattgctatgctgaaagagactgcaggagaaataggcatctatctctgcatctgttttccccaccatgcctttggagttgccaagatggaagccaagaaggatctagaagaacaaagaatatggtagtagatgagccacagccaggtgcccatgtactaatcatgataacctgacatgccattctcaaaatgctgagttgttaatttcttgtcatctttaaatatatatatataggctgggcttggtggctcacacctgtaattccagcactttgggaggctgaggtgggtggatcatttgaggccaggaattcaagaccagcctggccaacatggtgaaaccccttctctactgaaaatacaataattagctgggcgtggtggcacatgcctatgatcccagctactggggaggctgaggcaggagaatcgttttaacccagaagacaggctgcagtgagccaagactgcaccactgcactccagcctgggcaacaaagtgagactctgcctcaaaaaataaaaaagaaataaaataaataaatacagcgtttattatgtttaaactcttaggattcaaatgagatgtatctaatggatatttctgatttgggtctttaaaacctttaatctcttttaagcattttagacttgcattcagaaagaattctgtcttctaaagacattttcctagcatttcactgcggagaactggcaatcaaaatcccctcaaaagggaactaaagattaatatacacatttttttagtcattaatatgcttctgttttaaatacagttcaactcctgttgcaatgttgaattaaatgtttattttaaaatg

SEQ ID NO: 1244 - protein, 163 aa, Homosapiens
MDSYSAPESTPSASSRPEDYFIGATPLQKRLESVRKQSSFILTPPRRKIPQCSQLQEDVDPQKVAFLLHKQWTLYSLTPLYKFSYSNLKEYSRLLNAFIVAEKQKGLAVEVGEDFNIKVIFSTLLGMKGTQRDPEAFLVQILCHKYLIGVLAYLTELAIFQIE

SEQ ID NO: 1245 - DNA, 2791 bp, Homosapiens
aggagtaacagtcgcgtttcaaatctcgcagacctgctggccgatttcgagtcttctgaaagaggaaggcgagcaaagccaaaattctcccagagcgcgaacccaaacacagatcgccgctggggtccaagcgcccttcaactccgcccgctagtgcccaagattaccgggaaggaattcaacgaatcagtggtgaggtgccgccgccatgcctactacgggcggaaatttgagagaaagcttcgcaccggtaggaaaactgaggagcaaccgagcacgattggaaaggttgacgatagtggttaagtggctcggccttgccctcagttaaaatggcaattttagttgcttcactgatacggaatcggcgaggcgccaaggaggcttcctgcgtggggccgcagagcgagtcgggaaacgattttaaactgaagaggcggcggagggccgaattcccttttctcaacggcttgatttcagagctgggctggtctctgacaggctcagctggagagggacgggttgggacgcactgtccttttgcccttccccctccgcgagcagaagctgactccgcaggagcgagggtcgcagagctgggggatttcagtctccacatagttttggagccggacttttgaagaatgattcgtgaatccggaatgggtgacagcgtcatcacggcattttattggtaaagatgctttgtattggtcccggacctgctttaactttgtatttgccctgttgtgtggtcattatcttacaatacttgcgtgttgaggtgtgtttaaacactacgtgcttaacactggctaagtattggcattggggcggttggatttaggtattggtggcaatgtagaaaagtgatcaagtcagagccccttcacggactaatcacaagagaaacaacaaagctttacttgtgtgctgtgaaccacaactgcaagtggaattgtcaagagaactagccctgccaagctcaggaaaacttctgaggagatggcacatggaaaatggataagatttactgagacaaacgggagtagagaagtgtttttaattggcgataaggtgaataaaaaggcagggagaacagtagagtgatcatctgtctagagtagggggtgcatgtttgggtatagggctgtcatttaacctcttaaagaattgtctactggaactttcttcactcccatccccccaccccccaatgttgtatacaaaaccttagaggaagtgtatgcagaatgttggattttggaaaggctaatgtcgatggatcttggggaagaactgaagtagtagaaaatgaacctggataggatcagataataagatcaaatacagtagtgccttgaaagccagacaggaattctgatttgacttcatatagatgtgtgggaactgttatgggatctcaagcaaggtaatgataaaagtggtgacaatgaaagactgatgatggattagggaaaggggctaagattgggaacaagataagtagctataattgagaatgaaagtgaagcccacatctaagaggacaagtgtatatctttttaagaaatatgtcagaggccaggtgtggtggcttatgcctgtaatccagcactttgggaggccaaggcaggcggatcacctgaggtcaggagttcaagaccagcctggccaacatggagaaaccccatctctaccaaaaaatacaaaaattagccaggcgtgttggtgcatacctgtagtcccagctactggggaggctgaggcaggagaatcacttgaacctgggaggtggaggttgcagtgagccaagattgcaccactgcactccagcctgggagacagagtgagactctgtcttcaaaaaagaaatatgtgagaatttgatgataaagttaacaaagttaactttttagatgtaaaggtgatgttgaaggaagagtaaaagatgatgaaagtttttttagtggggaaagaaaatgaaaaggaagaatggaattattactgagcaaaacagagtacagtagttggcaaagaaagattgaataagatgtgaagcgatgattagttttgaacttaatgagtttgacggaggttggaaatgcaggactgggttgcagctgtaatggtctgaagacagagatttaggagtcatatagaatgattattttcctatgtagaatgaatgattttcagaatctggggccacctactattggaacatgaggaaaaaaaaagaatcagtaaataaattggaactataaaaagtaaggaggagaaaagcccctaaaaaatggaatgtcagaggaaacaaggtcccagaaagtttagaggagtaaggatgaacaaacttgatgaacaaagtatttggccatggttttggcaaaaacaatgatcttcgaaagtacagtttctttgtagtgatagatggaagaaagagattgctgaagatttctagtaaaatatttattagtaactggaggcaataggtgtagacgacgtttccaggagattggtctcagaaggaatgagacgaattggatttaaacacaaatttttaatgttagaaatactagaatatgcttggcagtgaaagaaaaggatcctgtataggagtgattaaagatgatagagatgtgaagtacagcctggttgtggtggtgcacgcttgtagtcctagctactcgagaggctgaggtgggaggatcgcctgagcccagcaggtggaggctgcagtgatatcaggccactgcactccagcctggacaacagagtgagaccctgtctc

SEQ ID NO: 1246 - protein, 102 aa, Homosapiens [sequence omitted]

SEQ ID NO: 1247 - DNA, 2845 bp, Homosapiens
cacttaaccactatcgtcaacctttccaatcgtgctcggttgctcctcagttttcctaccggtgcgaagctttctctcaaatttccgcccgtagtaggcatggcggcggcacctcaccactgattcgttgaattccttcccggtaatcttgggcactagcgggcggagttgaagggcgcttggaccccagcggcgatctgtgtttgggttcgcgctctgggagaattttggctttgctcgccttcctctttcagaagactcgaaatcggccagcaggtctgcgagatttgaaacgcgactgttactccttgttttccggttctggccgcgggagcctctcgagaagcgtggaaagaggagaagggcgtataccttgtgaccgcctctggttgtcttgggctcgcgcctggcgccgctacgtggagtcgctctctcgtcgtcacttttggctgccgacttgttgagtagaagtgcagactgatgctttaagactcagggagaggtctttcccttatctccaccccagcaagcaccccagagaccttggagatttgtcttgtttctagacacgtgtactccaatgttgtgcggaggaggccttaaatattcgagaagagagtgggaactcctggaattttaagggatttctgtgtatttccaaaactgacttttaactaccggcagcgtgggatttcgtgattgtttttcgccatcgtgtggctccaacatgtacttcccttcttggttaagtcagctgtacaggggtttatccagacccatcagaaggaccacccaaccgatctggggttctctctacagaagtctgttgcagagttcacagaggagaattccagaattcagtagctttgttgtccggaccaacacatgtggagagttgcgttcgtctcacttaggccaagaagtcaccttgtgtggatggattcagtaccgaaggcaaaacacattcttggtcctaagagatttcgatgggcttgttcaagttatcattccccaggatgagtcggcagcctctgtgaagaagattttatgtgaagcccctgtggaatctgtggtgcaagtgtctggtacagtcatttcccgtcctgcaggacaagagaatccaaaaatgccaacaggtgagattgaaatcaaagttaaaacagctgagcttctgaatgcctgcaagaagctgccctttgaaattaagaacttcgtgaagaaaacagaggctcttcggttgcagtatcgctacttagacttgcgtagtttccaaatgcagtataacctgcgactgaggtcccagatggtcatgaaaatgcgggaatatctctgtaatctgcatgggtttgtggatatagaaacccccacattgtttaagaggaccccagggggtgccaaagagtttttagtaccatccagggaacctggaaagttttattctctccctcagagtcctcaacagtttaagcaacttctgatggttggcggtttagacagatattttcaggttgcccgatgttatcgagatgaaggttcaagaccagacagacagcctgagtttactcagattgacatagagatgtcatttgtagaccagactgggatccagagtttaattgagggtttgctccagtattcctggcccaatgacaaagatcctgtggttgttccttttcctactatgacttttgctgaggtgctggccacctatggaactgataaacctgacactcgctttggaatgaagattatagatatcagtgatgtgtttagaaacacagagattggatttcttcaagatgcacttagtaagccccatggaactgtgaaagccatatgtatccctgaaggagcaaaatacttaaaaaggaaagacattgaatccattagaaactttgcagctgaccattttaatcaggaaatcttacctgtattccttaacgccaatagaaactggaattctccagttgctaatttcataatggagtcacaaagactggaattaatcagactaatggagacccaagaggaagatgtggtcctactaactgctggagagcacaataaagcatgctctttgttaggaaaattacgactggaatgtgctgaccttctagaaacaagaggagtggtgctccgtgaccccactctgttctctttcctttgggtggtagatttcccactcttcctgcccaaggaggaaaatcccagagagctggaatcggcccaccacccatttactgctccccaccccagtgacatacatctcctgtacactgagcccaaaaaggcccgtagccaacactatgacttggttttaaatggcaatgaaataggaggtggttcaattcgaattcacaatgcagagctgcagcgttatatcctggcaaccttactaaaggaggatgtgaaaatgctctcccatctgctccaggctttagattatggggcaccccctcatggaggaattgccttagggttagacagactgatatgccttgtcactggatctccaagcatcagagatgtcatagccttcccaaagtccttccggggacatgacctcatgagcaataccccagattctgtccctcctgaggaactgaagccctatcatatccgagtctccaagccaacagactccaaagcagaaagagctcattgaatcatgcataccatgcagaaagttgagcttttaggttttgtcctctttgcttccccaaggctaaagtcagatctagagttctgccacaggtctaacaatcaagtctttagatggaaggaatccaggcaacattcttcaccacaacgaagaaacagataaaagatacccaattttgacttg

SEQ ID NO: 1248 - protein, 645 aa, Homosapiens; identical to SEQ ID NO: 74

SEQ ID NO: 1249 - DNA, 3381 bp, Homosapiens
cacttaaccactatcgtcaacctttccaatcgtgctcggttgctcctcagttttcctaccggtgcgaagctttctctcaaatttccgcccgtagtaggcatggcggcggcacctcaccactgattcgttgaattccttcccggtaatcttgggcactagcgggcggagttgaagggcgcttggaccccagcggcgatctgtgtttgggttcgcgctctgggagaattttggctttgctcgccttcctctttcagaagactcgaaatcggccagcaggtctgcgagatttgaaacgcgactgttactccttgttttccggttctggccgcgggagcctctcgagaagcgtggaaagaggagaagggcgtataccttgtgaccgcctctggttgtcttgggctcgcgcctggcgccgctacgtggagtcgctctctcgtcgtcacttttggctgccgacttgttgagtagaagtgcagactgatgctttaagactcagggagaggtctttcccttatctccaccccagcaagcaccccagagaccttggagatttgtcttgtttctagacacgtgtactccaatgttgtgcggaggaggccttaaatattcgagaagagagtgggaactcctggaattttaagggatttctgtgtatttccaaaactgacttttaactaccggcagcgtgggatttcgtgattgtttttcgccatcgtgtggctccaacatgtacttcccttcttggttaagtcagctgtacaggggtttatccagacccatcagaaggaccacccaaccgatctggggttctctctacagaagtctgttgcagagttcacagaggagaattccagaattcagtagctttgttgtccggaccaacacatgtggagagttgcgttcgtctcacttaggccaagaagtcaccttgtgtggatggattcagtaccgaaggcaaaacacattcttggtcctaagagatttcgatgggcttgttcaagttatcattccccaggatgagtcggcagcctctgtgaagaagattttatgtgaagcccctgtggaatctgtggtgcaagtgtctggtacagtcatttcccgtcctgcaggacaagagaatccaaaaatgccaacaggtgagattgaaatcaaagttaaaacagctgagcttctgaatgcctgcaagaagctgccctttgaaattaagaacttcgtgaagaaaacagaggctcttcggttgcagtatcgctacttagacttgcgtagtttccaaatgcagtataacctgcgactgaggtcccagatggtcatgaaaatgcgggaatatctctgtaatctgcatgggtttgtggatatagaaacccccacattgtttaagaggaccccagggggtgccaaagagtttttagtaccatccagggaacctggaaagttttattctctccctcagagtcctcaacagtttaagcaacttctgatggttggcggtttagacagatattttcaggttgcccgatgttatcgagatgaaggttcaagaccagacagacagcctgagtttactcagattgacatagagatgtcatttgtagaccagactgggatccagagtttaattgagggtttgctccagtattcctggcccaatgacaaagatcctgtggttgttccttttcctactatgacttttgctgaggtgctggccacctatggaactgataaacctgacactcgctttggaatgaagattatagatatcagtgatgtgtttagaaacacagagattggatttcttcaagatgcacttagtaagccccatggaactgtgaaagccatatgtatccctgaaggagcaaaatacttaaaaaggaaagacattgaatccattagaaactttgcagctgaccattttaatcaggaaatcttacctgtattccttaacgccaatagaaactggaattctccagttgctaatttcataatggagtcacaaagactggaattaatcagactaatggagacccaagaggaagatgtggtcctactaactgctggagagcacaataaagcatgctctttgttaggaaaattacgactggaatgtgctgaccttctagaaacaagaggagtggtgctccgtgaccccactctgttctctttcctttgggtggtagatttcccactcttcctgcccaaggaggaaaatcccagagagctggaatcggcccaccacccatttactgctccccaccccagtgacatacatctcctgtacactgagcccaaaaaggcccgtagccaacactatgacttggttttaaatggcaatgaaataggaggtggttcaattcgaattcacaatgcagagctgcagcgttatatcctggcaaccttactaaaggaggatgtgaaaatgctctcccatctgctccaggctttagattatggggcaccccctcatggaggaattgccttagggttagacagactgatatgccttgtcactggatctccaagcatcagagatgtcatagccttcccaaagtccttccggggacatgacctcatgagcaataccccagattctgtccctcctgaggaactgaagccctatcatatccgagtctccaagccaacagactccaaagcagaaagagctcattgaatcatgcataccatgcagaaagttgagcttttaggttttgtcctctttgcttccccaaggctaaagtcagatctagagttctgccacaggtctaacaatcaagtctttagatggaaggaatccaggcaacattcttcaccacaacgaagaaacagataaaagatacccaattttgacttgatttcatgcatcatttggattttttttggttaggactttttttgaagttcctttttacttaggtgtgaaagatggttctttgttgaaataatatagtggtttagtgttttcaaatcatgtttctcatacccagatagtagattattcacttaggacagaggtaatcaaattatgtgtgaaatgtaggaaaatgcttgcccctgtaaactagtgagttgatggagcatttgcttcatcatcctcatcaagagaatcatataaattaagctttataatgacatttcaaccatcaacataatatagtgaggagtagcataatattttttaataatgcagaaaacatcactgaaatgagagtcacaaatttttcttcagtgtttcagcctgagtaagttacataaacctcgcttagcctcccttcctgctaatgtgtaaaatacatacttgccctggctacctcaccgggctgttattgctggaatcagaggagataacatatatggaagataaagtgaataaaagtactttgaaaaact

SEQ ID NO: 1250 - protein, 645 aa, Homosapiens; identical to SEQ ID NO: 74

SEQ ID NO: 1251 - DNA, 3501 bp, Homosapiens
cacttaaccactatcgtcaacctttccaatcgtgctcggttgctcctcagttttcctaccggtgcgaagctttctctcaaatttccgcccgtagtaggcatggcggcggcacctcaccactgattcgttgaattccttcccggtaatcttgggcactagcgggcggagttgaagggcgcttggaccccagcggcgatctgtgtttgggttcgcgctctgggagaattttggctttgctcgccttcctctttcagaagactcgaaatcggccagcaggtctgcgagatttgaaacgcgactgttactccttgttttccggttctggccgcgggagcctctcgagaagcgtggaaagaggagaagggcgtataccttgtgaccgcctctggttgtcttgggctcgcgcctggcgccgctacgtggagtcgctctctcgtcgtcacttttggctgccgacttgttgagtagaagtgcagactgatgctttaagactcagggagaggtctttcccttatctccaccccagcaagcaccccagagaccttggagatttgtcttgtttctagacacgtgtactccaatgttgtgcggaggaggccttaaatattcgagaagagagtgggaactcctggaattttaagggatttctgtgtatttccaaaactgacttttaactaccggcagcgtgggatttcgtgattgtttttcgccatcgtgtggctccaacatgtacttcccttcttggttaagtcagctgtacaggggtttatccagacccatcagaaggaccacccaaccgatctggggttctctctacagaagtctgttgcagagttcacagaggagaattccagaattcagtagctttgttgtccggaccaacacatgtggagagttgcgttcgtctcacttaggccaagaagtcaccttgtgtggatggattcagtaccgaaggcaaaacacattcttggtcctaagagatttcgatgggcttgttcaagttatcattccccaggatgagtcggcagcctctgtgaagaagattttatgtgaagcccctgtggaatctgtggtgcaagtgtctggtacagtcatttcccgtcctgcaggacaagagaatccaaaaatgccaacaggtgagattgaaatcaaagttaaaacagctgagcttctgaatgcctgcaagaagctgccctttgaaattaagaacttcgtgaagaaaacagaggctcttcggttgcagtatcgctacttagacttgcgtagtttccaaatgcagtataacctgcgactgaggtcccagatggtcatgaaaatgcgggaatatctctgtaatctgcatgggtttgtggatatagaaacccccacattgtttaagaggaccccagggggtgccaaagagtttttagtaccatccagggaacctggaaagttttattctctccctcagagtcctcaacagtttaagcaacttctgatggttggcggtttagacagatattttcaggttgcccgatgttatcgagatgaaggttcaagaccagacagacagcctgagtttactcagattgacatagagatgtcatttgtagaccagactgggatccagagtttaattgagggtttgctccagtattcctggcccaatgacaaagatcctgtggttgttccttttcctactatgacttttgctgaggtgctggccacctatggaactgataaacctgacactcgctttggaatgaagattatagatatcagtgatgtgtttagaaacacagagattggatttcttcaagatgcacttagtaagccccatggaactgtgaaagccatatgtatccctgaaggagcaaaatacttaaaaaggaaagacattgaatccattagaaactttgcagctgaccattttaatcaggaaatcttacctgtattccttaacgccaatagaaactggaattctccagttgctaatttcataatggagtcacaaagactggaattaatcagactaatggagacccaagaggaagatgtggtcctactaactgctggagagcacaataaagcatgctctttgttaggaaaattacgactggaatgtgctgaccttctagaaacaagaggagtggtgctccgtgaccccactctgttctctttcctttgggtggtagatttcccactcttcctgcccaaggaggaaaatcccagagagctggaatcggcccaccacccatttactgctccccaccccagtgacatacatctcctgtacactgagcccaaaaaggcccgtagccaacactatgacttggttttaaatggcaatgaaataggaggtggttcaattcgaattcacaatgcagagctgcagcgttatatcctggcaaccttactaaaggaggatgtgaaaatgctctcccatctgctccaggctttagattatggggcaccccctcatggaggaattgccttagggttagacagactgatatgccttgtcactggatctccaagcatcagagatgtcatagccttcccaaagtccttccggggacatgacctcatgagcaataccccagattctgtccctcctgaggaactgaagccctatcatatccgagtctccaagccaacagactccaaagcagaaagagctcattgaatcatgcataccatgcagaaagttgagcttttaggttttgtcctctttgcttccccaaggctaaagtcagatctagagttctgccacaggtctaacaatcaagtctttagatggaaggaatccaggcaacattcttcaccacaacgaagaaacagataaaagatacccaattttgacttgatttcatgcatcatttggattttttttggttaggactttttttgaagttcctttttacttaggtgtgaaagatggttctttgttgaaataatatagtggtttagtgttttcaaatcatgtttctcatacccagatagtagattattcacttaggacagaggtaatcaaattatgtgtgaaatgtaggaaaatgcttgcccctgtaaactagtgagttgatggagcatttgcttcatcatcctcatcaagagaatcatataaattaagctttataatgacatttcaaccatcaacataatatagtgaggagtagcataatattttttaataatgcagaaaacatcactgaaatgagagtcacaaatttttcttcagtgtttcagcctgagtaagttacataaacctcgcttagcctcccttcctgctaatgtgtaaaatacatacttgccctggctacctcaccgggctgttattgctggaatcagaggagataacatatatggaagataaagtgaataaaagtactttgaaaaactataaagcattccacaaatatgagatgatggtattatccatccataaataggtagatatatctctattttatagtttcagattaaacaaaactgatatcaatagtaaaagtcattttactt

SEQ ID NO: 1252 - protein, 645 aa, Homosapiens; identical to SEQ ID NO: 74

SEQ ID NO: 1253 - DNA, 3822 bp, Homosapiens
cacttaaccactatcgtcaacctttccaatcgtgctcggttgctcctcagttttcctaccggtgcgaagctttctctcaaatttccgcccgtagtaggcatggcggcggcacctcaccactgattcgttgaattccttcccggtaatcttgggcactagcgggcggagttgaagggcgcttggaccccagcggcgatctgtgtttgggttcgcgctctgggagaattttggctttgctcgccttcctctttcagaagactcgaaatcggccagcaggtctgcgagatttgaaacgcgactgttactccttgttttccggttctggccgcgggagcctctcgagaagcgtggaaagaggagaagggcgtataccttgtgaccgcctctggttgtcttgggctcgcgcctggcgccgctacgtggagtcgctctctcgtcgtcacttttggctgccgacttgttgagtagaagtgcagactgatgctttaagactcagggagaggtctttcccttatctccaccccagcaagcaccccagagaccttggagatttgtcttgtttctagacacgtgtactccaatgttgtgcggaggaggccttaaatattcgagaagagagtgggaactcctggaattttaagggatttctgtgtatttccaaaactgacttttaactaccggcagcgtgggatttcgtgattgtttttcgccatcgtgtggctccaacatgtacttcccttcttggttaagtcagctgtacaggggtttatccagacccatcagaaggaccacccaaccgatctggggttctctctacagaagtctgttgcagagttcacagaggagaattccagaattcagtagctttgttgtccggaccaacacatgtggagagttgcgttcgtctcacttaggccaagaagtcaccttgtgtggatggattcagtaccgaaggcaaaacacattcttggtcctaagagatttcgatgggcttgttcaagttatcattccccaggatgagtcggcagcctctgtgaagaagattttatgtgaagcccctgtggaatctgtggtgcaagtgtctggtacagtcatttcccgtcctgcaggacaagagaatccaaaaatgccaacaggtgagattgaaatcaaagttaaaacagctgagcttctgaatgcctgcaagaagctgccctttgaaattaagaacttcgtgaagaaaacagaggctcttcggttgcagtatcgctacttagacttgcgtagtttccaaatgcagtataacctgcgactgaggtcccagatggtcatgaaaatgcgggaatatctctgtaatctgcatgggtttgtggatatagaaacccccacattgtttaagaggaccccagggggtgccaaagagtttttagtaccatccagggaacctggaaagttttattctctccctcagagtcctcaacagtttaagcaacttctgatggttggcggtttagacagatattttcaggttgcccgatgttatcgagatgaaggttcaagaccagacagacagcctgagtttactcagattgacatagagatgtcatttgtagaccagactgggatccagagtttaattgagggtttgctccagtattcctggcccaatgacaaagatcctgtggttgttccttttcctactatgacttttgctgaggtgctggccacctatggaactgataaacctgacactcgctttggaatgaagattatagatatcagtgatgtgtttagaaacacagagattggatttcttcaagatgcacttagtaagccccatggaactgtgaaagccatatgtatccctgaaggagcaaaatacttaaaaaggaaagacattgaatccattagaaactttgcagctgaccattttaatcaggaaatcttacctgtattccttaacgccaatagaaactggaattctccagttgctaatttcataatggagtcacaaagactggaattaatcagactaatggagacccaagaggaagatgtggtcctactaactgctggagagcacaataaagcatgctctttgttaggaaaattacgactggaatgtgctgaccttctagaaacaagaggagtggtgctccgtgaccccactctgttctctttcctttgggtggtagatttcccactcttcctgcccaaggaggaaaatcccagagagctggaatcggcccaccacccatttactgctccccaccccagtgacatacatctcctgtacactgagcccaaaaaggcccgtagccaacactatgacttggttttaaatggcaatgaaataggaggtggttcaattcgaattcacaatgcagagctgcagcgttatatcctggcaaccttactaaaggaggatgtgaaaatgctctcccatctgctccaggctttagattatggggcaccccctcatggaggaattgccttagggttagacagactgatatgccttgtcactggatctccaagcatcagagatgtcatagccttcccaaagtccttccggggacatgacctcatgagcaataccccagattctgtccctcctgaggaactgaagccctatcatatccgagtctccaagccaacagactccaaagcagaaagagctcattgaatcatgcataccatgcagaaagttgagcttttaggttttgtcctctttgcttccccaaggctaaagtcagatctagagttctgccacaggtctaacaatcaagtctttagatggaaggaatccaggcaacattcttcaccacaacgaagaaacagataaaagatacccaattttgacttgatttcatgcatcatttggattttttttggttaggactttttttgaagttcctttttacttaggtgtgaaagatggttctttgttgaaataatatagtggtttagtgttttcaaatcatgtttctcatacccagatagtagattattcacttaggacagaggtaatcaaattatgtgtgaaatgtaggaaaatgcttgcccctgtaaactagtgagttgatggagcatttgcttcatcatcctcatcaagagaatcatataaattaagctttataatgacatttcaaccatcaacataatatagtgaggagtagcataatattttttaataatgcagaaaacatcactgaaatgagagtcacaaatttttcttcagtgtttcagcctgagtaagttacataaacctcgcttagcctcccttcctgctaatgtgtaaaatacatacttgccctggctacctcaccgggctgttattgctggaatcagaggagataacatatatggaagataaagtgaataaaagtactttgaaaaactataaagcattccacaaatatgagatgatggtattatccatccataaataggtagatatatctctattttatagtttcagattaaacaaaactgatatcaatagtaaaagtcattttacttatcaattttctgtttttttttttagttttaaagatattattggccgggagtggtggctcacacctgtaatcccagcactttgggagattgaggtgggtggatcacttgaggtcaggagttcaacaccagcctggccaacatagtgaaaccgtctctactaaaaacacaaaaattagccaggcatggtggcgcatgcctgtaatcgcagccactcgggaggctgaggcatgaggtttgcttgaacctgggagatggaggttgcagtgagccaagatggtgccattacactccagcctgggtgacagagcaagactccatctc

SEQ ID NO: 1254 - protein, 645 aa, Homosapiens; identical to SEQ ID NO: 74

SEQ ID NO: 1255 - DNA, 409 bp, Homosapiens
cccagagaccttggagatttgtcttgtttctagacacgtgtactccaatgttgtgcggaggaggccttaaatattcgagaagagagtgggaactcctggaattttaagggatttctgtgtatttccaaaactgacttttaactaccggcagcgtgggatttcgtgattgtttttcgccatcgtgtggctccaacatgtacttcccttcttggttaagtcagctgtacaggggtttatccagacccatcagaaggaccacccaaccgatctggggttctctctacagaagtctgttgcagatttcataatggagtcacaaagactggaattaatcagactaatggagacccaagaggaagatgtggtcctactaactgctggagagcacaataaagcagtaagaaaaatt

SEQ ID NO: 1256 - protein, 37 aa, Homosapiens
MYFPSWLSQLYRGLSRPIRRTTQPIWGSLYRSLLQIS

SEQ ID NO: 1257 - DNA, 1049 bp, Homosapiens
ttcctgctaatgtgtaaaatacatacttgccctggctacctcaccgggctgttattgctggaatcagaggagataacatatatggaagataaagtgaataaaagtactttgaaaaactataaagcattccacaaatatgagatgatggtattatccatccataaataggtagatatatctctattttatagtttcagattaaacaaaactgatatcaatagtaaaagtcattttacttatcaattttctgtttttttttttagttttaaagatattattggccgggagtggtggctcacacctgtaatcccagcactttgggagattgaggtgggtggatcacttgaggtcaggagttcaacaccagcctggccaacatagtgaaaccgtctctactaaaaacacaaaaattagccaggcatggtggcgcatgcctgtaatcgcagccactcgggaggctgaggcatgaggtttgcttgaacctgggagatggaggttgcagtgagccaagatggtgccattacactccagcctgggtgacagagcaagactccatctcaaaaaaaaaaagacaacaaagatattattaatcactgaacactattttctctcaattataagtaattgaaaattctaatcaaccttagattaacctcaaatgtgcgaaaaagtgaacaccaaaactcattgtgattttaagttctaatcatacacataaaagttttaataaactaataattataaaatgaggccgggtacagtggctcacgcctataatcccacctcccaaagttctgggattacaaaggcgtgagccaccacactcagccatgtttttattttaaaaataattattttcaaaaaaaaaatagaagagtaacattgttttatatttctgcaaatattttttatttctggcttaatagaagacactagattctgatatctgcttctgtatcctatctgttgttatatgctgttttggttgaagtctgtgaagaaaatctgaccccactcatatataaagttggaaaagggaggagtatttt

SEQ ID NO: 1258 - protein, 52 aa, Homosapiens [sequence omitted]

SEQ ID NO: 1259 - DNA, 437 bp, Homosapiens
agttttaaagatattattggccgggagtggtggctcacacctgtaatcccagcactttgggagattgaggtggtggtgggattacaggcatgaaccaccacgcccagccttcttttttcctttgagaaagtctcaccctggcacccaggctggagtgcagtggcaggatcacgggtcactgcaacctcagcctcccaggttcagttcccctgcctcagcctcccgaatagctgggactacaatagcccaccactacacccggctagatttttgtatttttagtagagatggggtttcaccatattggccaggttggtcttgaaatcctgacctcaggtaatctgcccacctcagcacccagccaggtggtggtagttgttttacagcctgtgtgagacattcgggtgagccccaggaaatgaaagaatgtgcttatt

SEQ ID NO: 1260 - protein, 35 aa, Homosapiens
MGFHHIGQVGLEILTSGNLPTSAPSQVVVVVLQPV

SEQ ID NO: 1261 - DNA, 2361 bp, Homosapiens
taggtttcatttggaagcttgagttttatcattggcaacaaatgccatcagttttttccaagctgacttgttcttttttgagcaaatctctgccaaaattacccctaaaatatgaataatcaatttgtcaggttttttcaaactaaaaatgttctgtgaaaacaagcagctagttcagcttgtatctcaaacaattgtaactactttttctagggaaaaaaaaatctagacatccatactttatggcagatgtgcttcatgcatacttcccattttgtcacacagaatatcaaaataacgtgtactcaaggtcaagatttactaacaactaaaattccaaaactgctaaacaacagaatgctgaataaggtgatccaatttttaatattttatttgagacaacatctcaccctgtcacccaggctggaatccagtggtgtgacacagctcactgcatcctcaacctcctgggctcaagcgatcgtcccacctcagtctcatgagtggttgggactacaggcatgcaccatcatgcccggctcactttttttttctttttttttttaattgtagacacagggtctcactatgttgcccaggccggtcttgaactcctggactcaagcaatccccccaccttggtttcccaaagtgttgggattacaggcatgagctactacatacaactgaaatcttttaatatgcttgtcaaaaagttttctgattcagcaaatggcacttatatataaaagagagaacaagaagctggatgcggtggctcacgcctgtaatcccagcactttgggaggctaggtgggcagatcacgaggtcaggagttcgagaccagcctggccaacgtggtgaaaccccctctctactaaaaatacaaaaatagccaggcatggtggcccacgcctgtaatcccagctacttggaaggctgaggcaggagaatcgcttgaacctgggaggtggaggttgcagtgagccaagattgcgccgctacattccagcctgggcaacacgagcgaaactccgtctcaaaaaaaaaaaaaaaaagaatagaacttggctggatgcagtggctcacacctgtaatcccagcactttgggagggcagggcagttggatcacttgaggccaggagttcaagactagcctggctgacatggtgaaactccatctctactaaaaatacagaaaaaaaaattagctgggagtggtggcacacacctgtcatcccagctactcaggtagttgaggcacaacaatcacttgagcctaggaggcccaggctggagtgaggtggcacgatcttggttcactgcaacctccacctccagggttcagagtagctgggactacaggcccacactaccacacccggctaattttcgctttttttcagtagagaccgggttttgccatgttggccaggctggtctcgaagcctgagccataacctggcgaaaagatactttgaaatgtaacatcgtttttcacttcaaaatcaaggtattttaccaacttgtctttggtacctccccaaaaactgatctactacatttgcagtttcattcatttttccaacattaaggaataaacttgaagcgcttacattcttgtgggggaagtaagaacaaaacacataataggtcatggtggtcacatgaaaagtaaagggtaaccgattggggtaggtggtggtagttttgtgtgtgtgtttttttttgagaccaagtctcgccgttgcccaggctggagtgcggtggcatgatctcagttcactgcaacctccacttcctaggttcaagcaattctcctgcctcagcctctcaagaggctgaggcaggagaattccttgaacctgggaggcagaggttgcagtgaactgatagtgccgctgcactccattctgggcaagagctagactcttgtctaaaaaaaaaaaaaaaatacttggaactgctatacctttgcttctttaaaacttgctccacacagtgtagtcaagccgactctccatacctgtagaaatttaatctcctttaccaataggtagtaataggtggatttctaaaagatttcccaactactgtttcagtttaagattaatctccattttctttctcagagagattcccatctgctttaattttaaaatcatcactaacagtagctcaatcaattaacgttaacatcaataaaacatgtacctttaaaaggtatgacaggaactgtcttcatgtccttacccaagcaagtcatccatggataaaaacgttaccaggagctggaatacaaatgaggacttccattaaaatgctaaacatcattaaactcttttcaaagttgtctgtc

SEQ ID NO: 1262 - protein, 38 aa, Homosapiens
MISVHCNLHFLGSSNSPASASQEAEAGEFLEPGRQRLQ

SEQ ID NO: 1263 - DNA, 853 bp, Homosapiens
agcgcttacattcttgtgggggaagtaagaacaaaacacataataggtcatggtggtcacatgaaaagtaaagggtaaccgattggggtaggtggtggtagttttgtgtgtgtgtttttttttgagaccaagtctcgcccctgggcaacaggattcagtctcaaaaaaaggaaaattcagagagtaactgaagttttatcattaatgggactaaagtgctttagcccagaaacagatttgtaaaaccattactgctaacaaagacatcattataagcacagctgtactgacactgaaattaaaatttgacccatcttggaattttggccccttggtcctgtttccctgggacagattgccttaaaccagttgtgccctttatacccacttttggcatccctaaacacttagtgcttgccaaaaacctatcaccatggctatggattgtagattttcccaattccattaatgcctatcactagttgggcatttctatagtattttctataacttattttcccagcctcagactcaacatgactttctccaagtagctccatcaatactttaagctcaaaaccaattagcacaggggcctatgaaacctgacaatttgctcatatggagaattaggaaatattgcactttaatgcataagacaccttgtaaaatacccataaaattttaactggctgcagtgttaatgaagcaaataccatggagttataatagcttttgaatgtgatttatgcttacagctaatgaacagatgaaaagcactgtccttttttaagtaaacactacacactccagatggattgcaaaaatttattaaaattggagacactgtttt

SEQ ID NO: 1264 - protein, 31 aa, Homosapiens
VVVVLCVCFFLRPSLAPGQQDSVSKKGKFRE

SEQ ID NO: 1265 - DNA, 1777 bp, Homosapiens
agcgcttacattcttgtgggggaagtaagaacaaaacacataataggtcatggtggtcacatgaaaagtaaagggtaaccgattggggtaggtggtggtagttttgtgtgtgtgtttttttttgagaccaagtctcgcccctgggcaacaggattcagtctcaaaaaaaggaaaattcagagagtaactgaagttttatcattaatgggactaaagtgctttagcccagaaacagatttgtaaaaccattactgctaacaaagacatcattataagcacagctgtactgacactgaaattaaaatttgacccatcttggaattttggccccttggtcctgtttccctgggacagattgccttaaaccagttgtgccctttatacccacttttggcatccctaaacacttagtgcttgccaaaaacctatcaccatggctatggattgtagattttcccaattccattaatgcctatcactagttgggcatttctatagtattttctataacttattttcccagcctcagactcaacatgactttctccaagtagctccatcaatactttaagctcaaaaccaattagcacaggggcctatgaaacctgacaatttgctcatatggagaattaggaaatattgcactttaatgcataagacaccttgtaaaatacccataaaattttaactggctgcagtgttaatgaagcaaataccatggagttataatagcttttgaatgtgatttatgcttacagctaatgaacagatgaaaagcactgtccttttttaagtaaacactacacactccagatggattgcaaaaatttattaaaattggagacactgttttaatcttcttgtgccatgagactccatcaggcagtctacaaagaccactgggaggctgaggatcacttgagcccagaagtttgaggctgtagtaagcttcaaaggccactgcactctagcttgggtgaggcaagaccctgtctcaaaaaataagacaagacttttagccacatttacagacttcaattaaaatgctacatgggaatgcagaatatcagatattttattgtcatcaagtaatcagtgagagagttcaagttggattgagatcatcatgtattctgcaattataatagtcccaacatttccaatcctcacctttcaagcagtaagctgcatgcttgcttgttgtggtcattaaaaaccctgaaagcgaagccaacatattaatcagggcaaaatacaaatgtgtgatgcttgttagtagagtaacctcagaatcaaaatggaacggttttacagtgatatcattatatttcatttggcagaatcattacatcattggttacactgaaaatcatcacatgtaccaaaagctgactcacctagtttaggataacaggtctgcctgtttgaagatgaaaaataatacccatttaaaatttgccctactcaatttccttctcagtcacattttaacttttaaacagctaatcactcccatctacagattaaggtgtatatgccaccaaaaccttttgccaccttaaaaatttccttcaaagtttaaactaacctgcatttcttcaatcatgaattctgagtcctgaaattaagggacaatacacagtaagacaacttgcatacaattaggagtaatccaaaatctccaaacattatagaatggctatattccccttttcggggcataaactagaatgttaccgccagatacatcagataggagcgaaagacttaatattgc

SEQ ID NO: 1266 - protein, 46 aa, Homosapiens
MLVSRVTSESKWNGFTVISLYFIWQNHYIIGYTENHHMYQKLTHLV

SEQ ID NO: 1267 - DNA, 628 bp, Homosapiens
cttttcgaggtaggagtcgactcctgtgaggtatggtgctgggtgcagatgcagtgtggctctggatagcaccttatggacagttgtgtccccaaggaaggatgagaatagctactgaagtcctaaagagcaagcctaactcaagccattggcacacaggcattagacagaaagctggaagttgaaatggtggagtccaacttgcctggaccagcttaatggttctgctcctggtaacgtttttatccatggatgacttgcttgggtatggagagtcggcttgactacactgtgtggagcaagttttaaagaagcaaaggactcagaattcatgattgaagaaatgcaggcagacctgttatcctaaactagggtttttaatgaccacaacaagcaagcatgcagcttactgcttgaaagggtcttgcctcacccaagctagagtgcagtggcctttgaagcttactacagcctcaaacttctgggctcaagtgatcctcagcctcccagtggtctttgtagactgcctgatggagtctcatggcacaagaagattaaaacagtgtctccaattttaataaatttttgcaatccatctggagtgtgtagtgtttacttaaaaaaggac

SEQ ID NO: 1268 - protein, 65 aa, Homosapiens
MTTTSKHAAYCLKGSCLTQARVQWPLKLTTASNFWAQVILSLPVVFVDCLMESHGTRRLKQCLQF

SEQ ID NO: 1269 - DNA, 3170 bp, Homosapiens
ggtaggagtcgactcctgtgaggtatggtgctgggtgcagatgcagtgtggctctggatagcaccttatggacaggtaagaattggggaaagtatggtgggaagaatgaaatctaagaggtggtctcagcctgtgatgctttaagagtagtggacagaagggatttctgaaattctattctgaggctttaatgttaacagcatttatatttaacgtgactgctgtgaggttcattctcactgttttgcttgcatctttttgttttctagttgtgtccccaaggaaggatgagaatagctactgaagtaagttgaaaattccctctcaaaaaggtttaaagccattggatgtgccacaatgatgacagtttatttgctactcttgagtgctagaatgatgaggatcttaaccaccattatcttaactgaggcacccaaaatggtgagttggggaacatagagagtacacctaagttcacatgaagttgtttcttcccaggtcctaaagagcaagcctaactcaagccattggcacacaggtgagacacctctattttgtacttctcacttttaagggattagaaaatagccaaagcaatgatgattatctatgttagtgcttctctcccctcttttcaaatgagaattttgctctcatattgatactaagtttaatactgaagaaaatgtgaaaacagatactatgatggttgcatagttcagcagatttaatcatgaagagatgtactatctgtctgatgtatctggggtagttgtggtttgctgttaatggttaagcagtgtaccaccaatctaccattaaaatattttttgctgacaattttgtattaaaattacaggcattagacagaaagctggaagttgaaatggtaagtgaaactgtatccaagtaagcaggtaactgggcaaacttcctacggcacaaatggctttttagttacctcctagtgctgaatgcattaaataaatggcggattcttgtcttgttatgattaataagaaagtttgtaaatgcagcctggatgatgataagcaaatgctgactgaacatgaaggtcttaattagctctaactgactaaaggcatttgttagttttggcagggggtgaacactcatctgtggctattctaagaccactcttatttcttaggtggagtccaacttgcctggaccagcttaatggttctggtaagtattaatgaaaacagtagatagacttaatgaaaatgctgatggtgatatgcttactgctgagctaatggcttaaggcttggctgatgaatactgactgtattttccttgagcatgtctggaacagtgtttatgtgttttccttgagcatgtttggaacggggtttgtgtaatgatgttgatcaaatgtctgacctgaaatgagcatgtagacaaaggtaacactgaagaaccctgtgacagacaactttgaaaagagtttaatgatgtttagcattttaatggaagtcctcatttgtattccagctcctggtaacgtttttatccatggatgacttgcttgggtaaggacatgaagacagttcctgtcataccttttaaaggtacatgttttattgatgttaacgttaattgattgagctactgttagtgatgattttaaaattaaagcagatgggaatctctctgagaaagaaaatggagattaatcttaaactgaaacagtagttgggaaatcttttagaaatccacctattactacctattggtaaaggagattaaatttctacaggtatggagagtcggcttgactacactgtgtggagcaagttttaaagaagcaaaggtatagcagttccaagtattttttttttttttttagacaagagtctagctcttgcccagaatggagtgcagcggcactatcagttcactgcaacctctgcctcccaggttcaaggaattctcctgcctcagcctcttgagtagctgggattacaggcatgtgacaccatgcctggctaattttgtacagctatgttgtccaggctggtctcgaactcttgacctcaagtgatactgcccgcactgacctcccaaagtgctgggattacaggcgtgagccaccatgccccgcctcaagtctggtttttaagtgttgtaaagccgatacaatgatgataacatagttcagcagactaacgctgatgagcaatattaagtctttcgctcctatctgatgtatctggcggtaacattctagtttatgccccgaaaaggggaatatagccattctataatgtttggagattttggattactcctaattgtatgcaagttgtcttactgtgtattgtcccttaatttcaggactcagaattcatgattgaagaaatgcaggttagtttaaactttgaaggaaatttttaaggtggcaaaaggttttggtggcatatacaccttaatctgtagatgggagtgattagctgtttaaaagttaaaatgtgactgagaaggaaattgagtagggcaaattttaaatgggtattatttttcatcttcaaacaggcagacctgttatcctaaactaggtgagtcagcttttggtacatgtgatgattttcagtgtaaccaatgatgtaatgattctgccaaatgaaatataatgatatcactgtaaaaccgttccattttgattctgaggttactctactaacaagcatcacacatttgtattttgccctgattaatatgttggcttcgctttcagggtttttaatgaccacaacaagcaagcatgcagcttactgcttgaaaggtgaggattggaaatgttgggactattataattgcagaatacatgatgatctcaatccaacttgaactctctcactgattacttgatgacaataaaatatctgatattctgcattcccatgtagcattttaattgaagtctgtaaatgtggctaaaagtcttgtcttattttttgagacagggtcttgcctcacccaagctagagtgcagtggcctttgaagcttactacagcctcaaacttctgggctcaagtgatcctcagcctcccagtggtctttgtagactgcctgatggagtctcatggcacaagaagattaaaacagtgtctccaattttaataaatttttgcaatccatctgg

SEQ ID NO: 1270 - protein, 75 aa, Homosapiens [sequence omitted]

SEQ ID NO: 1271 - DNA, 2790 bp, Homosapiens
ttttcgaggtaggagtcgactcctgtgaggtatggtgctgggtgcagatgcagtgtggctctggatagcaccttatggacagttgtgtccccaaggaaggatgagaatagctactgaagtcctaaagagcaagcctaactcaagccattggcacacaggtgagacacctctattttgtacttctcacttttaagggattagaaaatagccaaagcaatgatgattatctatgttagtgcttctctcccctcttttcaaatgagaattttgctctcatattgatactaagtttaatactgaagaaaatgtgaaaacagatactatgatggttgcatagttcagcagatttaatcatgaagagatgtactatctgtctgatgtatctggggtagttgtggtttgctgttaatggttaagcagtgtaccaccaatctaccattaaaatattttttgctgacaattttgtattaaaattacaggcattagacagaaagctggaagttgaaatggtaagtgaaactgtatccaagtaagcaggtaactgggcaaacttcctacggcacaaatggctttttagttacctcctagtgctgaatgcattaaataaatggcggattcttgtcttgttatgattaataagaaagtttgtaaatgcagcctggatgatgataagcaaatgctgactgaacatgaaggtcttaattagctctaactgactaaaggcatttgttagttttggcagggggtgaacactcatctgtggctattctaagaccactcttatttcttaggtggagtccaacttgcctggaccagcttaatggttctggtaagtattaatgaaaacagtagatagacttaatgaaaatgctgatggtgatatgcttactgctgagctaatggcttaaggcttggctgatgaatactgactgtattttccttgagcatgtctggaacagtgtttatgtgttttccttgagcatgtttggaacggggtttgtgtaatgatgttgatcaaatgtctgacctgaaatgagcatgtagacaaaggtaacactgaagaaccctgtgacagacaactttgaaaagagtttaatgatgtttagcattttaatggaagtcctcatttgtattccagctcctggtaacgtttttatccatggatgacttgcttgggtaaggacatgaagacagttcctgtcataccttttaaaggtacatgttttattgatgttaacgttaattgattgagctactgttagtgatgattttaaaattaaagcagatgggaatctctctgagaaagaaaatggagattaatcttaaactgaaacagtagttgggaaatcttttagaaatccacctattactacctattggtaaaggagattaaatttctacaggtatggagagtcggcttgactacactgtgtggagcaagttttaaagaagcaaaggtatagcagttccaagtattttttttttttttttagacaagagtctagctcttgcccagaatggagtgcagcggcactatcagttcactgcaacctctgcctcccaggttcaaggaattctcctgcctcagcctcttgagtagctgggattacaggcatgtgacaccatgcctggctaattttgtacagctatgttgtccaggctggtctcgaactcttgacctcaagtgatactgcccgcactgacctcccaaagtgctgggattacaggcgtgagccaccatgccccgcctcaagtctggtttttaagtgttgtaaagccgatacaatgatgataacatagttcagcagactaacgctgatgagcaatattaagtctttcgctcctatctgatgtatctggcggtaacattctagtttatgccccgaaaaggggaatatagccattctataatgtttggagattttggattactcctaattgtatgcaagttgtcttactgtgtattgtcccttaatttcaggactcagaattcatgattgaagaaatgcaggttagtttaaactttgaaggaaatttttaaggtggcaaaaggttttggtggcatatacaccttaatctgtagatgggagtgattagctgtttaaaagttaaaatgtgactgagaaggaaattgagtagggcaaattttaaatgggtattatttttcatcttcaaacaggcagacctgttatcctaaactaggtgagtcagcttttggtacatgtgatgattttcagtgtaaccaatgatgtaatgattctgccaaatgaaatataatgatatcactgtaaaaccgttccattttgattctgaggttactctactaacaagcatcacacatttgtattttgccctgattaatatgttggcttcgctttcagggtttttaatgaccacaacaagcaagcatgcagcttactgcttgaaaggtgaggattggaaatgttgggactattataattgcagaatacatgatgatctcaatccaacttgaactctctcactgattacttgatgacaataaaatatctgatattctgcattcccatgtagcattttaattgaagtctgtaaatgtggctaaaagtcttgtcttattttttgagacagggtcttgcctcacccaagctagagtgcagtggcctttgaagcttactacagcctcaaacttctgggctcaagtgatcctcagcctcccagtggtctttgtagactgcctgatggagtctcatggcacaagaagattaaaacagtgtctccaattttaataaatttttgcaatccatctgg

SEQ ID NO: 1272 - protein, 53 aa, Homosapiens
MVLGADAVWLWIAPYGQLCPQGRMRIATEVLKSKPNSSHWHTGETPLFCTSHF

SEQ ID NO: 1273 - DNA, 2986 bp, Homosapiens
gtcttttcgaggtaggagtcgactcctgtgaggtatggtgctgggtgcagatgcagtgtggctctggatagcaccttatggacagttgtgtccccaaggaaggatgagaatagctactgaagtaagttgaaaattccctctcaaaaaggtttaaagccattggatgtgccacaatgatgacagtttatttgctactcttgagtgctagaatgatgaggatcttaaccaccattatcttaactgaggcacccaaaatggtgagttggggaacatagagagtacacctaagttcacatgaagttgtttcttcccaggtcctaaagagcaagcctaactcaagccattggcacacaggtgagacacctctattttgtacttctcacttttaagggattagaaaatagccaaagcaatgatgattatctatgttagtgcttctctcccctcttttcaaatgagaattttgctctcatattgatactaagtttaatactgaagaaaatgtgaaaacagatactatgatggttgcatagttcagcagatttaatcatgaagagatgtactatctgtctgatgtatctggggtagttgtggtttgctgttaatggttaagcagtgtaccaccaatctaccattaaaatattttttgctgacaattttgtattaaaattacaggcattagacagaaagctggaagttgaaatggtaagtgaaactgtatccaagtaagcaggtaactgggcaaacttcctacggcacaaatggctttttagttacctcctagtgctgaatgcattaaataaatggcggattcttgtcttgttatgattaataagaaagtttgtaaatgcagcctggatgatgataagcaaatgctgactgaacatgaaggtcttaattagctctaactgactaaaggcatttgttagttttggcagggggtgaacactcatctgtggctattctaagaccactcttatttcttaggtggagtccaacttgcctggaccagcttaatggttctggtaagtattaatgaaaacagtagatagacttaatgaaaatgctgatggtgatatgcttactgctgagctaatggcttaaggcttggctgatgaatactgactgtattttccttgagcatgtctggaacagtgtttatgtgttttccttgagcatgtttggaacggggtttgtgtaatgatgttgatcaaatgtctgacctgaaatgagcatgtagacaaaggtaacactgaagaaccctgtgacagacaactttgaaaagagtttaatgatgtttagcattttaatggaagtcctcatttgtattccagctcctggtaacgtttttatccatggatgacttgcttgggtaaggacatgaagacagttcctgtcataccttttaaaggtacatgttttattgatgttaacgttaattgattgagctactgttagtgatgattttaaaattaaagcagatgggaatctctctgagaaagaaaatggagattaatcttaaactgaaacagtagttgggaaatcttttagaaatccacctattactacctattggtaaaggagattaaatttctacaggtatggagagtcggcttgactacactgtgtggagcaagttttaaagaagcaaaggtatagcagttccaagtattttttttttttttttagacaagagtctagctcttgcccagaatggagtgcagcggcactatcagttcactgcaacctctgcctcccaggttcaaggaattctcctgcctcagcctcttgagtagctgggattacaggcatgtgacaccatgcctggctaattttgtacagctatgttgtccaggctggtctcgaactcttgacctcaagtgatactgcccgcactgacctcccaaagtgctgggattacaggcgtgagccaccatgccccgcctcaagtctggtttttaagtgttgtaaagccgatacaatgatgataacatagttcagcagactaacgctgatgagcaatattaagtctttcgctcctatctgatgtatctggcggtaacattctagtttatgccccgaaaaggggaatatagccattctataatgtttggagattttggattactcctaattgtatgcaagttgtcttactgtgtattgtcccttaatttcaggactcagaattcatgattgaagaaatgcaggttagtttaaactttgaaggaaatttttaaggtggcaaaaggttttggtggcatatacaccttaatctgtagatgggagtgattagctgtttaaaagttaaaatgtgactgagaaggaaattgagtagggcaaattttaaatgggtattatttttcatcttcaaacaggcagacctgttatcctaaactaggtgagtcagcttttggtacatgtgatgattttcagtgtaaccaatgatgtaatgattctgccaaatgaaatataatgatatcactgtaaaaccgttccattttgattctgaggttactctactaacaagcatcacacatttgtattttgccctgattaatatgttggcttcgctttcagggtttttaatgaccacaacaagcaagcatgcagcttactgcttgaaaggtgaggattggaaatgttgggactattataattgcagaatacatgatgatctcaatccaacttgaactctctcactgattacttgatgacaataaaatatctgatattctgcattcccatgtagcattttaattgaagtctgtaaatgtggctaaaagtcttgtcttattttttgagacagggtcttgcctcacccaagctagagtgcagtggcctttgaagcttactacagcctcaaacttctgggctcaagtgatcctcagcctcccagtggtctttgtagactgcctgatggagtctcatggcacaagaagattaaaacagtgtctccaattttaataaatttttgcaatccatctgg

SEQ ID NO: 1274 - protein, 31 aa, Homosapiens
MVLGADAVWLWIAPYGQLCPQGRMRIATEVS

SEQ ID NO: 1275 - DNA, 638 bp, Homosapiens
cttttcgaggtaggagtcgactcctgtgaggtatggtgctgggtgcagatgcagtgtggctctggatagcaccttatggacagttgtgtccccaaggaaggatgagaatagctactgaagtcctaaagagcaagcctaactcaagccattggcacacaggcattagacagaaagctggaagttgaaatggtggagtccaacttgcctggaccagcttaatggttctgctcctggtaacgtttttatccatggatgacttgcttgggtaaggacatgaagacagttcctgtcataccttttaaaggtatggagagtcggcttgactacactgtgtggagcaagttttaaagaagcaaaggactcagaattcatgattgaagaaatgcaggcagacctgttatcctaaactagggtttttaatgaccacaacaagcaagcatgcagcttactgcttgaaagggtcttgcctcacccaagctagagtgcagtggcctttgaagcttactacagcctcaaacttctgggctcaagtgatcctcagcctcccagtggtctttgtagactgcctgatggagtctcatggcacaagaagattaaaacagtgtctccaattttaataaatttttgcaatccatctg

SEQ ID NO: 1276 - protein, 65 aa, Homosapiens; identical to SEQ ID NO: 1268

SEQ ID NO: 1277 - DNA, 777 bp, Homosapiens
agcatttatatttaacgtgactgctgtgaggttcattctcactgttttgcttgcatctttttgttttctagttgtgtccccaaggaaggatgagaatagctactgaagtaagttgaaaattccctctcaaaaaggtttaaagccattggatgtgccacaatgatgacagtttatttgctactcttgagtgctagaatgatgaggatcttaaccaccattatcttaactgaggcacccaaaatggtgagttggggaacatagagagtacacctaagttcacatgaagttgtttcttcccaggtcctaaagagcaagcctaactcaagccattggcacacaggcattagacagaaagctggaagttgaaatggtggagtccaacttgcctggaccagcttaatggttctgctcctggtaacgtttttatccatggatgacttgcttgggtatggagagtcggcttgactacactgtgtggagcaagttttaaagaagcaaaggactcagaattcatgattgaagaaatgcaggcagacctgttatcctaaactagggtttttaatgaccacaacaagcaagcatgcagcttactgcttgaaagggtcttgcctcacccaagctagagtgcagtggcctttgaagcttactacagcctcaaacttctgggctcaagtgatcctcagcctcccagtggtctttgtagactgcctgatggagtctcatggcacaagaagattaaaacagtgtctccaattttaataaatttttgcaatccat

SEQ ID NO: 1278 - protein, 65 aa, Homosapiens; identical to SEQ ID NO: 1268

SEQ ID NO: 1279 - DNA, 699 bp, Homosapiens
atggtgcatgcgtgacctaagctgcgactatgttagagtagaactgcggagaagcctcggctctcgtgccctgcctctgatgaagcctgtgttggtatggtgctgggtgcagatgcagtgtggctctggatagcaccttatggacagttgtgtccccaaggaaggatgagaatagctactgaagtcctaaagagcaagcctaactcaagccattggcacacaggcattagacagaaagctggaagttgaaatggtggagtccaacttgcctggaccagcttaatggttctgctcctggtaacgtttttatccatggatgacttgcttgggtaaggacatgaagacagttcctgtcataccttttaaaggtatggagagtcggcttgactacactgtgtggagcaagttttaaagaagcaaaggactcagaattcatgattgaagaaatgcaggcagacctgttatcctaaactagggtttttaatgaccacaacaagcaagcatgcagcttactgcttgaaagggtcttgcctcacccaagctagagtgcagtggcctttgaagcttactacagcctcaaacttctgggctcaagtgatcctcagcctcccagtggtctttgtagactgcctgatggagtctcatggcacaagaagattaaaacagtgtctccaattttaataaatttttgcaatccat

SEQ ID NO: 1280 - protein, 65 aa, Homosapiens; identical to SEQ ID NO: 1268

SEQ ID NO: 1281 - DNA, 542 bp, Homosapiens
cttttcgaggtaggagtcgactcctgtgaggtatggtgctgggtgcagatgcagtgtggctctggatagcaccttatggacagttgtgtccccaaggaaggatgagaatagctactgaagtcctaaagagcaagcctaactcaagccattggcacacaggcattagacagaaagctggaagttgaaatggtggagtccaacttgcctggaccagcttaatggttctgctcctggtaacgtttttatccatggatgacttgcttgggactcagaattcatgattgaagaaatgcaggcagacctgttatcctaaactagggtttttaatgaccacaacaagcaagcatgcagcttactgcttgaaagggtcttgcctcacccaagctagagtgcagtggcctttgaagcttactacagcctcaaacttctgggctcaagtgatcctcagcctcccagtggtctttgtagactgcctgatggagtctcatggcacaagaagattaaaacagtgtctccaattttaataaatttttgcaatccat

SEQ ID NO: 1282 - protein, 65 aa, Homosapiens; identical to SEQ ID NO: 1268

SEQ ID NO: 1283 - DNA, 573 bp, Homosapiens
cttttcgaggtaggagtcgactcctgtgaggtatggtgctgggtgcagatgcagtgtggctctggatagcaccttatggacagttgtgtccccaaggaaggatgagaatagctactgaagtcctaaagagcaagcctaactcaagccattggcacacaggcattagacagaaagctggaagttgaaatggtggagtccaacttgcctggaccagcttaatggttctgctcctggtaacgtttttatccatggatgacttgcttgggtatggagagtcggcttgactacactgtgtggagcaagttttaaagaagcaaaggactcagaattcatgattgaagaaatgcagggtttttaatgaccacaacaagcaagcatgcagcttactgcttgaaagggtcttgcctcacccaagctagagtgcagtggcctttgaagcttactacagcctcaaacttctgggctcaagtgatcctcagcctcccagtggtctttgtagactgcctgatggagtctcatggcacaagaagattaaaacagtgtctccaattttaataaatttttgcaatccat

SEQ ID NO: 1284 - protein, 65 aa, Homosapiens; identical to SEQ ID NO: 1268

SEQ ID NO: 1285 - DNA, 1704 bp, Homosapiens
actgtcttttcgaggtaggagtcgactcctgtgaggtatggtgctgggtgcagatgcagtgtggctctggatagcaccttatggacagttgtgtccccaaggaaggatgagaatagctactgaagtaagttgaaaattccctctcaaaaaggtttaaagccattggatgtgccacaatgatgacagtttatttgctactcttgagtgctagaatgatgaggatcttaaccaccattatcttaactgaggcacccaaaatggtgagttggggaacatagagagtacacctaagttcacatgaagttgtttcttcccaggtcctaaagagcaagcctaactcaagccattggcacacaggcattagacagaaagctggaagttgaaatggtggagtccaacttgcctggaccagcttaatggttctgctcctggtaacgtttttatccatggatgacttgcttgggtaaggacatgaagacagttcctgtcataccttttaaaggtatggagagtcggcttgactacactgtgtggagcaagttttaaagaagcaaaggtatagcagttccaagtattttttttttttttttagacaagagtctagctcttgcccagaatggagtgcagcggcactatcagttcactgcaacctctgcctcccaggttcaaggaattctcctgcctcagcctcttgagtagctgggattacaggcatgtgacaccatgcctggctaattttgtacagctatgttgtccaggctggtctcgaactcttgacctcaagtgatactgcccgcactgacctcccaaagtgctgggattacaggcgtgagccaccatgccccgcctcaagtctggtttttaagtgttgtaaagccgatacaatgatgataacatagttcagcagactaacgctgatgagcaatattaagtctttcgctcctatctgatgtatctggcggtaacattctagtttatgccccgaaaaggggaatatagccattctataatgtttggagattttggattactcctaattgtatgcaagttgtcttactgtgtattgtcccttaatttcaggactcagaattcatgattgaagaaatgcaggttagtttaaactttgaaggaaatttttaaggtggcaaaaggttttggtggcatatacaccttaatctgtagatgggagtgattagctgtttaaaagttaaaatgtgactgagaaggaaattgagtagggcaaattttaaatgggtattatttttcatcttcaaacaggcagacctgttatcctaaactaggtgagtcagcttttggtacatgtgatgattttcagtgtaaccaatgatgtaatgattctgccaaatgaaatataatgatatcactgtaaaaccgttccattttgattctgaggttactctactaacaagcatcacacatttgtattttgccctgattaatatgttggcttcgctttcagggtttttaatgaccacaacaagcaagcatgcagcttactgcttgaaagggtcttgcctcacccaagctagagtgcagtggcctttgaagcttactacagcctcaaacttctgggctcaagtgatcctcagcctcccagtggtctttgtagactgcctgatggagtctcatggcacaagaagattaaaacagtgtctccaattttaataaatttttgcaatccat

SEQ ID NO: 1286 - protein, 106 aa, Homosapiens
MKYNDITVKPFHFDSEVTLLTSITHLYFALINMLASLSGFLMTTTSKHAAYCLKGSCLTQARVQWPLKLTTASNFWAQVILSLPVVFVDCLMESHGTRRLKQCLQF

SEQ ID NO: 1287 - DNA, 745 bp, Homosapiens
cagcacttgagcagctttcttctgcgttaggaagcctggggagaggggaactggctaaagggcaaaatgtcactgaggaacttcggagaagatggggacaaggcgtcgggcgggggagccagcgctcaggagcccaggcaccatactgtcttttcgaggtaggagtcgactcctgtgaggtatggtgctgggtgcagatgcagtgtggctctggatagcaccttatggacagttgtgtccccaaggaaggatgagaatagctactgaagtcctaaagagcaagcctaactcaagccattggcacacaggcattagacagaaagctggaagttgaaatggtggagtccaacttgcctggaccagcttaatggttctgctcctggtaacgtttttatccatggatgacttgcttgggtatggagagtcggcttgactacactgtgtggagcaagttttaaagaagcaaaggactcagaattcatgattgaagaaatgcaggcagacctgttatcctaaactagggtttttaatgaccacaacaagcaagcatgcagcttactgcttgaaagggtcttgcctcacccaagctagagtgcagtggcctttgaagcttactacagcctcaaacttctgggctcaagtgatcctcagcctcccagtggtctttgtagactgcctgatggagtctcatggcacaagaagattaaaacagtgtctccaattttaataaatttttgcaatccat

SEQ ID NO: 1288 - protein, 65 aa, Homosapiens; identical to SEQ ID NO: 1268

SEQ ID NO: 1289 - DNA, 1075 bp, Homosapiens
ctattactacctattggtaaaggagattaaatttctacaggtatggagagtcggcttgactacactgtgtggagcaagttttaaagaagcaaaggtatagcagttccaagtattttttttttttttttagacaagagtctagctcttgcccagaatggagtgcagcggcactatcagttcactgcaacctctgcctcccaggttcaaggaattctcctgcctcagcctcttgagtagctgggattacaggcatgtgacaccatgcctggctaattttgtacagctatgttgtccaggctggtctcgaactcttgacctcaagtgatactgcccgcactgacctcccaaagtgctgggattacaggcgtgagccaccatgccccgcctcaagtctggtttttaagtgttgtaaagccgatacaatgatgataacatagttcagcagactaacgctgatgagcaatattaagtctttcgctcctatctgatgtatctggcggtaacattctagtttatgccccgaaaaggggaatatagccattctataatgtttggagattttggattactcctaattgtatgcaagttgtcttactgtgtattgtcccttaatttcaggactcagaattcatgattgaagaaatgcaggcagacctgttatcctaaactagggtttttaatgaccacaacaagcaagcatgcagcttactgcttgaaaggtgaggattggaaatgttgggactattataattgcagaatacatgatgatctcaatccaacttgaactctctcactgattacttgatgacaataaaatatctgatattctgcattcccatgtagcattttaattgaagtctgtaaatgtggctaaaagtcttgtcttattttttgagacagggtcttgcctcacccaagctagagtgcagtggcctttgaagcttactacagcctcaaacttctgggctcaagtgatcctcagcctcccagtggtctttgtagactgcctgatggagtctcatggcacaagaagattaaaacagtgtctccaattttaataaatttttgcaatcca

SEQ ID NO: 1290 - protein, 56 aa, Homosapiens
MECSGTISSLQPLPPRFKEFSCLSLLSSWDYRHVTPCLANFVQLCCPGWSRTLDLK

SEQ ID NO: 1291 - DNA, 1096 bp, Homosapiens
gaaacagtagttgggaaatcttttagaaatccacctattactacctattggtaaaggagattaaatttctacaggtatggagagtcggcttgactacactgtgtggagcaagttttaaagaagcaaaggtatagcagttccaagtattttttttttttttttagacaagagtctagctcttgcccagaatggagtgcagcggcactatcagttcactgcaacctctgcctcccaggttcaaggaattctcctgcctcagcctcttgagtagctgggattacaggcatgtgacaccatgcctggctaattttgtacagctatgttgtccaggctggtctcgaactcttgacctcaagtgatactgcccgcactgacctcccaaagtgctgggattacaggcgtgagccaccatgccccgcctcaagtctggtttttaagtgttgtaaagccgatacaatgatgataacatagttcagcagactaacgctgatgagcaatattaagtctttcgctcctatctgatgtatctggcggtaacattctagtttatgccccgaaaaggggaatatagccattctataatgtttggagattttggattactcctaattgtatgcaagttgtcttactgtgtattgtcccttaatttcaggactcagaattcatgattgaagaaatgcaggttagtttaaactttgaaggaaatttttaaggtggcaaaaggttttggtggcatatacaccttaatctgtagatgggagtgattagctgtttaaaagttaaaatgtgactgagaaggaaattgagtagggcaaattttaaatgggtattatttttcatcttcaaacaggcagacctgttatcctaaactagggtttttaatgaccacaacaagcaagcatgcagcttactgcttgaaagggtcttgcctcacccaagctagagtgcagtggcctttgaagcttactacagcctcaaacttctgggctcaagtgatcctcagcctcccagtggtctttgtagactgcctgatggagtctcatggcacaagaagattaaaacagtgtctccaattttaataaatttttgcaatcca

SEQ ID NO: 1292 - protein, 65 aa, Homosapiens; identical to SEQ ID NO: 1268

SEQ ID NO: 1293 - DNA, 504 bp, Homosapiens
agttgtgtccccaaggaaggatgagaatagctactgaagtaagttgaaaattccctctcaaaaaggtttaaagccattggatgtgccacaatgatgacagtttatttgctactcttgagtgctagaatgatgaggatcttaaccaccattatcttaactgaggcacccaaaatggtatggagagtcggcttgactacactgtgtggagcaagttttaaagaagcaaaggactcagaattcatgattgaagaaatgcaggcagacctgttatcctaaactagggtttttaatgaccacaacaagcaagcatgcagcttactgcttgaaagggtcttgcctcacccaagctagagtgcagtggcctttgaagcttactacagcctcaaacttctgggctcaagtgatcctcagcctcccagtggtctttgtagactgcctgatggagtctcatggcacaagaagattaaaacagtgtctccaattttaataaatttttgcaatcca

SEQ ID NO: 1294 - protein, 65 aa, Homosapiens; identical to SEQ ID NO: 1268

SEQ ID NO: 1295 - DNA, 516 bp, Homosapiens
aggagtcgactcctgtgaggtatggtgctgggtgcagatgcagtgtggctctggatagcaccttatggacagttgtgtccccaaggaaggatgagaatagctactgaagtcctaaagagcaagcctaactcaagccattggcacacaggcattagacagaaagctggaagttgaaatggtggagtccaacttgcctggaccagcttaatggttctgctcctggtaacgtttttatccatggatgacttgcttgggtaaggacatgaagacagttcctgtcataccttttaaagggtttttaatgaccacaacaagcaagcatgcagcttactgcttgaaagggtcttgcctcacccaagctagagtgcagtggcctttgaagcttactacagcctcaaacttctgggctcaagtgatcctcagcctcccagtggtctttgtagactgcctgatggagtctcatggcacaagaagattaaaacagtgtctccaattttaataaatttttgcaatcca

SEQ ID NO: 1296 - protein, 85 aa, Homosapiens
MTCLGKDMKTVPVIPFKGFLMTTTSKHAAYCLKGSCLTQARVQWPLKLTTASNFWAQVILSLPVVFVDCLMESHGTRRLKQCLQF

SEQ ID NO: 1297 - DNA, 483 bp, Homosapiens
gaggtaggagtcgactcctgtgaggtatggtgctgggtgcagatgcagtgtggctctggatagcaccttatggacagttgtgtccccaaggaaggatgagaatagctactgaagtcctaaagagcaagcctaactcaagccattggcacacaggtatggagagtcggcttgactacactgtgtggagcaagttttaaagaagcaaaggactcagaattcatgattgaagaaatgcaggcagacctgttatcctaaactagggtttttaatgaccacaacaagcaagcatgcagcttactgcttgaaagggtcttgcctcacccaagctagagtgcagtggcctttgaagcttactacagcctcaaacttctgggctcaagtgatcctcagcctcccagtggtctttgtagactgcctgatggagtctcatggcacaagaagattaaaacagtgtctccaattttaataaatttttgcaatcca

SEQ ID NO: 1298 - protein, 65 aa, Homosapiens; identical to SEQ ID NO: 1268

SEQ ID NO: 1299 - DNA, 822 bp, Homosapiens
cgaggtaggagtcgactcctgtgaggtatggtgctgggtgcagatgcagtgtggctctggatagcaccttatggacagttgtgtccccaaggaaggatgagaatagctactgaagtaagttgaaaattccctctcaaaaaggtttaaagccattggatgtgccacaatgatgacagtttatttgctactcttgagtgctagaatgatgaggatcttaaccaccattatcttaactgaggcacccaaaatggtgagttggggaacatagagagtacacctaagttcacatgaagttgtttcttcccaggtcctaaagagcaagcctaactcaagccattggcacacaggcattagacagaaagctggaagttgaaatggtggagtccaacttgcctggaccagcttaatggttctgctcctggtaacgtttttatccatggatgacttgcttgggtaaggacatgaagacagttcctgtcataccttttaaaggtatggagagtcggcttgactacactgtgtggagcaagttttaaagaagcaaaggactcagaattcatgattgaagaaatgcaggcagacctgttatcctaaactagggtttttaatgaccacaacaagcaagcatgcagcttactgcttgaaagggtcttgcctcacccaagctagagtgcagtggcctttgaagcttactacagcctcaaacttctgggctcaagtgatcctcagcctcccagtggtctttgtagactgcctgatggagtctcatggcacaagaagattaaaacagtgtctccaattttaataaatttttgcaatcca

SEQ ID NO: 1300 - protein, 65 aa, Homosapiens; identical to SEQ ID NO: 1268

SEQ ID NO: 1301 - DNA, 821 bp, Homosapiens
ttttcgaggtaggagtcgactcctgtgaggtatggtgctgggtgcagatgcagtgtggctctggatagcaccttatggacagttgtgtccccaaggaaggatgagaatagctactgaagtcctaaagagcaagcctaactcaagccattggcacacaggcattagacagaaagctggaagttgaaatggtggagtccaacttgcctggaccagcttaatggttctgctcctggtaacgtttttatccatggatgacttgcttgggtaaggacatgaagacagttcctgtcataccttttaaaggtacatgttttattgatgttaacgttaattgattgagctactgttagtgatgattttaaaattaaagcagatgggaatctctctgagaaagaaaatggagattaatcttaaactgaaacagtagttgggaaatcttttagaaatccacctattactacctattggtaaaggagattaaatttctacaggtatggagagtcggcttgactacactgtgtggagcaagttttaaagaagcaaaggactcagaattcatgattgaagaaatgcaggcagacctgttatcctaaactagggtttttaatgaccacaacaagcaagcatgcagcttactgcttgaaagggtcttgcctcacccaagctagagtgcagtggcctttgaagcttactacagcctcaaacttctgggctcaagtgatcctcagcctcccagtggtctttgtagactgcctgatggagtctcatggcacaagaagattaaaacagtgtctccaattttaataaatttttgcaatcca

SEQ ID NO: 1302 - protein, 65 aa, Homosapiens; identical to SEQ ID NO: 1268

SEQ ID NO: 1303 - DNA, 762 bp, Homosapiens
ttttcgaggtaggagtcgactcctgtgaggtatggtgctgggtgcagatgcagtgtggctctggatagcaccttatggacagttgtgtccccaaggaaggatgagaatagctactgaagtcctaaagagcaagcctaactcaagccattggcacacaggcattagacagaaagctggaagttgaaatggtggagtccaacttgcctggaccagcttaatggttctgctcctggtaacgtttttatccatggatgacttgcttgggtatggagagtcggcttgactacactgtgtggagcaagttttaaagaagcaaaggactcagaattcatgattgaagaaatgcaggttagtttaaactttgaaggaaatttttaaggtggcaaaaggttttggtggcatatacaccttaatctgtagatgggagtgattagctgtttaaaagttaaaatgtgactgagaaggaaattgagtagggcaaattttaaatgggtattatttttcatcttcaaacaggcagacctgttatcctaaactagggtttttaatgaccacaacaagcaagcatgcagcttactgcttgaaagggtcttgcctcacccaagctagagtgcagtggcctttgaagcttactacagcctcaaacttctgggctcaagtgatcctcagcctcccagtggtctttgtagactgcctgatggagtctcatggcacaagaagattaaaacagtgtctccaattttaataaatttttgcaatcca

SEQ ID NO: 1304 - protein, 65 aa, Homosapiens; identical to SEQ ID NO: 1268

SEQ ID NO: 1305 - DNA, 611 bp, Homosapiens
cttttcgaggtaggagtcgactcctgtgaggtatggtgctgggtgcagatgcagtgtggctctggatagcaccttatggacagttgtgtccccaaggaaggatgagaatagctactgaagtcctaaagagcaagcctaactcaagccattggcacacaggcattagacagaaagctggaagttgaaatggtggagtccaacttgcctggaccagcttaatggttctgctcctggtaacgtttttatccatggatgacttgcttgggtaaggacatgaagacagttcctgtcataccttttaaaggtatggagagtcggcttgactacactgtgtggagcaagttttaaagaagcaaaggactcagaattcatgattgaagaaatgcagggtttttaatgaccacaacaagcaagcatgcagcttactgcttgaaagggtcttgcctcacccaagctagagtgcagtggcctttgaagcttactacagcctcaaacttctgggctcaagtgatcctcagcctcccagtggtctttgtagactgcctgatggagtctcatggcacaagaagattaaaacagtgtctccaattttaataaatttttgcaatcca

SEQ ID NO: 1306 - protein, 65 aa, Homosapiens; identical to SEQ ID NO: 1268

SEQ ID NO: 1307 - DNA, 488 bp, Homosapiens
cttttcgaggtaggagtcgactcctgtgaggtatggtgctgggtgcagatgcagtgtggctctggatagcaccttatggacagttgtgtccccaaggaaggatgagaatagctactgaagtcctaaagagcaagcctaactcaagccattggcacacaggcattagacagaaagctggaagttgaaatggtggagtccaacttgcctggaccagcttaatggttctgctcctggtaacgtttttatccatggatgacttgcttggggtttttaatgaccacaacaagcaagcatgcagcttactgcttgaaagggtcttgcctcacccaagctagagtgcagtggcctttgaagcttactacagcctcaaacttctgggctcaagtgatcctcagcctcccagtggtctttgtagactgcctgatggagtctcatggcacaagaagattaaaacagtgtctccaattttaataaatttttgcaatcca

SEQ ID NO: 1308 - protein, 72 aa, Homosapiens
MTCLGFLMTTTSKHAAYCLKGSCLTQARVQWPLKLTTASNFWAQVILSLPVVFVDCLMESHGTRRLKQCLQF

SEQ ID NO: 1309 - DNA, 1072 bp, Homosapiens
ctattactacctattggtaaaggagattaaatttctacaggtatggagagtcggcttgactacactgtgtggagcaagttttaaagaagcaaaggtatagcagttccaagtattttttttttttttttagacaagagtctagctcttgcccagaatggagtgcagcggcactatcagttcactgcaacctctgcctcccaggttcaaggaattctcctgcctcagcctcttgagtagctgggattacaggcatgtgacaccatgcctggctaattttgtacagctatgttgtccaggctggtctcgaactcttgacctcaagtgatactgcccgcactgacctcccaaagtgctgggattacaggcgtgagccaccatgccccgcctcaagtctggtttttaagtgttgtaaagccgatacaatgatgataacatagttcagcagactaacgctgatgagcaatattaagtctttcgctcctatctgatgtatctggcggtaacattctagtttatgccccgaaaaggggaatatagccattctataatgtttggagattttggattactcctaattgtatgcaagttgtcttactgtgtattgtcccttaatttcaggactcagaattcatgattgaagaaatgcaggcagacctgttatcctaaactaggtgagtcagcttttggtacatgtgatgattttcagtgtaaccaatgatgtaatgattctgccaaatgaaatataatgatatcactgtaaaaccgttccattttgattctgaggttactctactaacaagcatcacacatttgtattttgccctgattaatatgttggcttcgctttcagggtttttaatgaccacaacaagcaagcatgcagcttactgcttgaaagggtcttgcctcacccaagctagagtgcagtggcctttgaagcttactacagcctcaaacttctgggctcaagtgatcctcagcctcccagtggtctttgtagactgcctgatggagtctcatggcacaagaagattaaaacagtgtctccaattttaataaatttttgcaatcc

SEQ ID NO: 1310 - protein, 106 aa, Homosapiens; identical to SEQ ID NO: 1286

SEQ ID NO: 1311 - DNA, 2320 bp, Homosapiens
aacctccctcaatcttcctctcatccagtatcaccttcttcccaccccttaagtccgccccttttccccgcccttcctcgccattgtgggcagagacatgaccgtccacgtgatgccgtgctcccgccctcctcccgactgaggaggaagagcagagaggggagggggcgcgagctctcacccctccagtgccgacggtagcgaaagactttcctccaggggcttcctcactggggaattgccggaaagagcaaacaaaaaaggcgctggtgtaggctccaaaataaacacatctgaattcatgatggcatcgacagaggctcttattggattaaaagtttcaaaacaaacaataacgctttggaaaaagggttgaatgcaccctcaggcacgaccatggagaaaggtgggaacatacaattggagattcctgacttcagcaactctgtcctgagccatctaaaccagttgcgcatgcagggccgtctctgtgatattgtggtcaatgtgcaaggacaagcttttcgggctcacaaagtggtgctggctgccagctccccctatttccgggatcacatgtccttgaatgagatgagtacagtctccatttcagtcatcaagaaccctactgtttttgaacagctcctttctttctgttacacagggcggatatgcctgcaactggcagatatcatcagctacctaacagctgccagttttctgcaaatgcagcatattatagacaaatgtacacagatcctggagggcattcatttcaaaattaatgtggctgaggttgaagcagaattaagtcaaacaaggacaaagcatcaagagagacctccagagtctcacagggttacaccaaatctcaaccgctcccttagcccacgacataataccccaaagggaaaccggcgaggtcaggttagtgctgtgctggatatcagagagctaagtcctcctgaggagtccaccagccctcagatcattgaaccaagttctgatgtagagagccgggagcccattcttcggatcaaccgagcaggacagtggtatgtggagacaggagtggcggaccgtgggggtcggagtgatgatgaagttagagttcttggagcagtacacatcaaaactgaaaatctggaggagtggcttgggcctgagaatcagccttctggagaagatgggagtagtgcagaggaagtaacagccatggtgattgataccacaggccatggttctgtaggacaggaaaattatactttagggtcttcaggagccaaggtggctcggccaacaagcagtgaagttgacaggtagaagagtcagcaatgatgggagtaagtggctatgtggagtatctccgagagcaggaagtatctgagcggtggttccggtacaaccctcgtctcacctgcatctattgcgccaaatctttcaaccagaagggaagcctggaccgccacatgcgcctacacatggggatcacaccattcgtctgccgcatgtgtggcaagaagtatacccggaaagatcagctggagtatcatatccgcaagcacacaggcaacaagccctttcactgtcatgtctgtggcaaaagtttccccttccaggccatcttgaatcagcactttcgcaaaaaccaccctggctgtatacccctggaggggcctcacagcatctcccctgaaacaactgtcacatctcgaggacaagctgaggaagagtcaccttcacaggaagagacagttgctcctggggaagctgtccagggctctgtgtccaccactgggccagactgaaacatccagggggagggggctgaccctcttcccctatgagccataagcagccagcatcagagccatgggctgatacttagattcacaaaatgccacatcactaggccagaagatgctcccaagatgttgccaaactggaggatcagcaacttacacaaaagcactaaaggctcctcccttcttattgcccgcctcacactttggaaaataatcaagcaaatcaactttctaattcagggatcaacagccttggtttgttaactttataagaaaaaaggttttttaacaaaacgatgatgataaatggtcatttatctatcagtcatgtttgaacactgtactttggtccatatcatcttggtggctataattgcccggatctaaaaaatgcagcaggagcctcaaccatccgaagcagccaaccgcaagagaggaggtagtcatgatggtgatgaggaggagaaatttctcctcttccttccctggcataacatgcatttttgtgtttcaag

SEQ ID NO: 1312 - protein, 308 aa, Homosapiens
MEKGGNIQLEIPDFSNSVLSHLNQLRMQGRLCDIVVNVQGQAFRAHKVVLAASSPYFRDHMSLNEMSTVSISVIKNPTVFEQLLSFCYTGRICLQLADIISYLTAASFLQMQHIIDKCTQILEGIHFKINVAEVEAELSQTRTKHQERPPESHRVTPNLNRSLSPRHNTPKGNRRGQVSAVLDIRELSPPEESTSPQIIEPSSDVESREPILRINRAGQWYVETGVADRGGRSDDEVRVLGAVHIKTENLEEWLGPENQPSGEDGSSAEEVTAMVIDTTGHGSVGQENYTLGSSGAKVARPTSSEVDR

SEQ ID NO: 1313 - DNA, 1465 bp, Homosapiens
agtatcaccttcttcccaccccttaagtccgccccttttccccgcccttcctcgccattgtgggcagagacatgaccgtccacgtgatgccgtgctcccgccctcctcccgactgaggaggaagagcagagaggggagggggcgcgagctctcacccctccagtgccgacggtagcgaaagactttcctccaggggcttcctcactggggaattgccggaaagagcaaacaaaaaaggcgctggtgtaggctccaaaataaacacatctgaattcatgatggcatcgacagaggctcttattggattaaaagtttcaaaacaaacaataacgctttggaaaaagggttgaatgcaccctcaggcacgaccatggagaaaggtgggaacatacaattggagattcctgacttcagcaactctgtcctgagccatctaaaccagttgcgcatgcagggccgtctctgtgatattgtggtcaatgtgcaaggacaagcttttcgggctcacaaagtggtgctggctgccagctccccctatttccgggatcacatgtccttgaatgagatgagtacagtctccatttcagtcatcaagaaccctactgtttttgaacagctcctttctttctgttacacagggcggatatgcctgcaactggcagatatcatcagctacctaacagctgccagttttctgcaaatgcagcatattatagacaaatgtacacagatcctggagggcattcatttcaaaattaatgtggctgaggttgaagcagaattaagtcaaacaaggacaaagcatcaagagagacctccagagtctcacagggttacaccaaatctcaaccgctcccttagcccacgacataataccccaaagggaaaccggcgaggtcaggttagtgctgtgctggatatcagagagctaagtcctcctgaggagtccaccagccctcagatcattgaaccaagttctgatgtagagagccgggagcccattcttcggatcaaccgagcaggacagtggtatgtggagacaggagtggcggaccgtgggggtcggagtgatgatgaagttagagttcttggagcagtacacatcaaaactgaaaatctggaggagtggcttgggcctgagaatcagccttctggagaagatgggagtagtgcagaggaagtaacagccatggtgattgataccacaggccatggttctgtaggacaggaaaattatactttagggtcttcaggagccaaggtggctcggccaacaagcagtgaagttgacagatttagcccctccggcagtgttgttcccttgacagagagacacagagccagaagtgagtctcctgggagaatggatgagcctaagcaacccagctcccaggtatggagttgtggatttagaactgctttggtggttggaggaattgctactgtgtatgaatagaaaataatg

SEQ ID NO: 1314 - protein, 361 aa, Homosapiens; identical to SEQ ID NO: 77

SEQ ID NO: 1315 - DNA, 335 bp, Homosapiens
ctgtctcctgcagttcaggaataaggggaagagaccaggaaaagaacagataggtagaagagtcagcaatgatgggagtaagtggctatgtggagtatctccgagagcaggaagtatctgagcggtggttccggtacaaccctcgtctcacctgcatctattgcgccaaatctttcaaccagaagggaagcctggaccgccacatgcgcctacacatggggatcacaccattcgtctgccgcatgtgtggcaagaagtatacccggaaagatcagctggagtatcatatccgcaagcacacaggcaacaagccctttcactgtcatgtctgtggc

SEQ ID NO: 1316 - protein, 88 aa, Homosapiens
MMGVSGYVEYLREQEVSERWFRYNPRLTCIYCAKSFNQKGSLDRHMRLHMGITPFVCRMCGKKYTRKDQLEYHIRKHTGNKPFHCHVC

SEQ ID NO: 1317 - DNA, 767 bp, Homosapiens
gcaggaagtatctgagcggtggttccggtacaaccctcgtctcacctgcatctattgcgccaaatctttcaaccagaagggaagcctggaccgccacatgcgcctacacatggggatcacaccattcgtctgccgcatgtgtggcaagaagtatacccggaaagatcagctggagtatcatatccgcaagcacacaggcaacaagccctttcactgtcatgtctgtggcaaaagtttccccttccagactgaaacatccagggggagggggctgaccctcttcccctatgagccataagcagccagcatcagagccatgggctgatacttagattcacaaaatgccacatcactaggccagaagatgctcccaagatgttgccaaactggaggatcagcaacttacacaaaagcactaaaggctcctcccttcttattgcccgcctcacactttggaaaataatcaagcaaatcaactttctaattcagggatcaacagccttggtttgttaactttataagaaaaaaggttttttaacaaaacgatgatgataaatggtcatttatctatcagtcatgtttgaacactgtactttggtccatatcatcttggtggctataattgcccggatctaaaaaatgcagcaggagcctcaaccatccgaagcagccaaccgcaagagaggaggtagtcatgatggtgatgaggaggagaaatttctcctcttccttccctggcataacatgcatttttgtgtttcaagaaa

SEQ ID NO: 1318 - protein, 66 aa, Homosapiens
MRLHMGITPFVCRMCGKKYTRKDQLEYHIRKHTGNKPFHCHVCGKSFPFQTETSRGRGLTLFPYEP

SEQ ID NO: 1319 - DNA, 984 bp, Homosapiens
tctgccccaccctgtcctctggaacctctgcgagatttagaggaaagaaccagttttcaggcggattgcctcagatcacactatctccacttgcccagccctgtggaagattagcggccatgtattccaatgtgataggaactgtaacctctggaaaaaggaaggtttatcttttgtccttgctgctcattggcttctgggactgcgtgacctgtcacgggagccctgtggacatctgcacagccaagccgcgggacattcccatgaatcccatgtgcatttaccgctccccggagaagaaggcaactgaggatgagggctcagaacagaagatcccggaggccaccaaccggcgtgtctgggaactgtccaaggccaattcccgctttgctaccactttctatcagcacctggcagattccaagaatgacaatgataacattttcctgtcacccctgagtatctccacggcttttgctatgaccaagctgggtgcctgtaatgacaccctccagcaactgatggaggtatttaagtttgacaccatatctgagaaaacatctgatcagatccacttcttctttgccaaactgaactgccgactctatcgaaaagccaacaaatcctccaagttagtatcagccaatcgcctttttggagacaaatcccttaccttcaatgacctctatgtctcagatgcattccataaggcatttcttgaggtaaatgaagaaggcagtgaagcagctgcaagtaccgctgttgtgattgctggccgttcgctaaaccccaacagggtgactttcaaggccaacaggcctttcctggtttttataagagaagttcctctgaacactattatcttcatgggcagagtagccaacccttgtgttaagtaaaatgttcttattctttgcacctcttcctatttttggtttgtgaacagaagtaaaaataaatacaaactacttccatctcacatta

SEQ ID NO: 1320 - protein, 259 aa, Homosapiens
MYSNVIGTVTSGKRKVYLLSLLLIGFWDCVTCHGSPVDICTAKPRDIPMNPMCIYRSPEKKATEDEGSEQKIPEATNRRVWELSKANSRFATTFYQHLADSKNDNDNIFLSPLSISTAFAMTKLGACNDTLQQLMEVFKFDTISEKTSDQIHFFFAKLNCRLYRKANKSSKLVSANRLFGDKSLTFNDLYVSDAFHKAFLEVNEEGSEAAASTAVVIAGRSLNPNRVTFKANRPFLVFIREVPLNTIIFMGRVANPCVK

SEQ ID NO: 1321 - DNA, 1599 bp, Homosapiens
tctgccccaccctgtcctctggaacctctgcgagatttagaggaaagaaccagttttcaggcggattgcctcagatcacactatctccacttgcccagccctgtggaagattagcggccatgtattccaatgtgataggaactgtaacctctggaaaaaggaaggtttatcttttgtccttgctgctcattggcttctgggactgcgtgacctgtcacgggagccctgtggacatctgcacagccaagccgcgggacattcccatgaatcccatgtgcatttaccgctccccggagaagaaggcaactgaggatgagggctcagaacagaagatcccggaggccaccaaccggcgtgtctgggaactgtccaaggccaattcccgctttgctaccactttctatcagcacctggcagattccaagaatgacaatgataacattttcctgtcacccctgagtatctccacggcttttgctatgaccaagctgggtgcctgtaatgacaccctccagcaactgatggaggtatttaagtttgacaccatatctgagaaaacatctgatcagatccacttcttctttgccaaactgaactgccgactctatcgaaaagccaacaaatcctccaagttagtatcagccaatcgcctttttggagacaaatcccttaccttcaatgagacctaccaggacatcagtgagttggtatatggagccaagctccagcccctggacttcaaggaaaatgcagagcaatccagagcggccatcaacaaatgggtgtccaataagaccgaaggccgaatcaccgatgtcattccctcggaagccatcaatgagctcactgttctggtgctggttaacaccatttacttcaagggcctgtggaagtcaaagttcagccctgagaacacaaggaaggaactgttctacaaggctgatggagagtcgtgttcagcatctatgatgtaccaggaaggcaagttccgttatcggcgcgtggctgaaggcacccaggtgcttgagttgcccttcaaaggtgatgacatcaccatggtcctcatcttgcccaagcctgagaagagcctggccaaggtagagaaggaactcaccccagaggtgctgcaagagtggctggatgaattggaggagatgatgctggtggtccacatgccccgcttccgcattgaggacggcttcagtttgaaggagcagctgcaagacatgggccttgtcgatctgttcagccctgaaaagtccaaactcccaggtattgttgcagaaggccgagatgacctctatgtctcagatgcattccataaggcatttcttgaggtaaatgaagaaggcagtgaagcagctgcaagtaccgctgttgtgattgctggccgttcgctaaaccccaacagggtgactttcaaggccaacaggcctttcctggtttttataagagaagttcctctgaacactattatcttcatgggcagagtagccaacccttgtgttaagtaaaatgttcttattctttgcacctcttcctatttttggtttgtgaacagaagtaaaaataaatacaaactacttccatctcacatta

SEQ ID NO: 1322 - protein, 464 aa, Homosapiens; identical to SEQ ID NO: 79

SEQ ID NO: 1323 - DNA, 624 bp, Homosapiens
ccatgttggtcaggcaggtcttgaactcccgatctcaggtgatccacctccttggcacccccaaatgctgggattacaggcatgagccaccgtgcccggcctactgagatattttaattgcctcaaatgatagcaggagttggagtggacagaaaggctaagtgcaaaaatcatcagtgtggggatataatctataggacaatgaatgtcaatgacctttaagacaatagcaagagtagaggtattgaggtcagaacaagggattttacaagagtgctgtattaatggttttggaagttaagatgacactgctcacaccctctttcacatggatttttggaagaaagaacacttaggaagactgcaagggaaattgagtcctcagggttttaactctcattgaatatcctctggtaaggactccagttagaagtggtcaactcagacctccttgaggggtctgagttactattaggaagaagcagaggtctggattcattttatccacctgagcccagtacacaatatgtaagatttttccatggttcttacaacaaagccgttttctttgaaaaccttgggaatccttaataaacaggaccccaactaattgtagacctgaga

SEQ ID NO: 1324 - protein, 34 aa, Homosapiens
MLVRQVLNSRSQVIHLLGTPKCWDYRHEPPCPAY

SEQ ID NO: 1325 - DNA, 955 bp, Homosapiens
tctgccccaccctgtcctctggaacctctgcgagatttagaggaaagaaccagttttcaggcggattgcctcagatcacactatctccacttgcccagccctgtggaagattagcggccatgtattccaatgtgataggaactgtaacctctggaaaaaggaaggtttatcttttgtccttgctgctcattggcttctgggactgcgtgacctgtcacgggagccctgtggacatctgcacagccaagccgcgggacattcccatgaatcccatgtgcatttaccgctccccggagaagaaggcaactgaggatgagggctcagaacagaagatcccggaggccaccaaccggcgtgtctgggaactgtccaaggccaattcccgctttgctaccactttctatcagcacctggcagattccaagaatgacaatgataacattttcctgtcacccctgagtatctccacggcttttgctatgaccaagctgggtgcctgtaatgacaccctccagcaactgatggaggtatttaagtttgacaaccatttacttcaagggcctgtggaagtcaaagttcagccctgagaacacaaggaaggaactgttctacaaggctgatggagagtcgtgttcagcatctatgatgtaccaggaaggcaagttccgttatcggcgcgtggctgaaggcacccaggtgcttgagttgcccttcaaaggtgatgacatcaccatggtcctcatcttgcccaagcctgagaagagcctggccaaggtagagaaggaactcaccccagaggtgctgcaagagtggctggatgaattggaggagatgatgctggtggtccacatgccccgcttccgcattgaggacggcttcagtttgaaggagcagctgcaagacatgggccttgtcgatctgttcagccctgaaaagtccaaactcccaggtttgt

SEQ ID NO: 1326 - protein, 155 aa, Homosapiens
MYSNVIGTVTSGKRKVYLLSLLLIGFWDCVTCHGSPVDICTAKPRDIPMNPMCIYRSPEKKATEDEGSEQKIPEATNRRVWELSKANSRFATTFYQHLADSKNDNDNIFLSPLSISTAFAMTKLGACNDTLQQLMEVFKFDNHLLQGPVEVKVQP

SEQ ID NO: 1327 - DNA, 745 bp, Homosapiens
agttttcaggcggattgcctcagatcacactatctccacttgcccagccctgtggaagattagcggccatgtattccaatgtgataggaactgtaacctctggaaaaagcgtggggaattgagcacataatactccaaataaccatcagatgattctaattccaacatgaccacgtccaggcaactgaactgtcccctggcaagaagtctaggactgaacctgtcccgggcccctgtacttggttcaaaggatttagcctttctcttggccacaccaggaaggtttatcttttgtccttgctgctcattggcttctgggactgcgtgacctgtcacgggagccctgtggacatctgcacagccaagccgcgggacattcccatgaatcccatgtgcatttaccgctccccggagaagaaggcaactgaggatgagggctcagaacagaagatcccggaggccaccaaccggcgtgtctgggaactgtccaaggccaattcccgctttgctaccactttctatcagcacctggcagattccaagaatgacaatgataacattttcctgtcacccctgagtatctccacggcttttgctatgaccaagctgggtgcctgtaatgacaccctccagcaactgatggaggtatttaagtttgacaccatatctgagaaaacatctgatcagatccacttcttctttgccaaactgaactgccgactctatcgaaaagccaacaaatcct

SEQ ID NO: 1328 - protein, 120 aa, Homosapiens
MNPMCIYRSPEKKATEDEGSEQKIPEATNRRVWELSKANSRFATTFYQHLADSKNDNDNIFLSPLSISTAFAMTKLGACNDTLQQLMEVFKFDTISEKTSDQIHFFFAKLNCRLYRKANK

SEQ ID NO: 1329 - DNA, 418 bp, Homosapiens
agttttcaggcggattgcctcagatcacactatctccacttgcccagccctgtggaagattagcggccatgtattccaatgtgataggaactgtaacctctggaaaaaggaaggtttatcttttgtccttgctgctcattggcttctgggactgcgtgacctgtcacgggagccctgtggacatctgcacagccaagccgcgggacattcccatgaatcccatgtgcatttaccgctccccggagaagaaggcaactgaggatgagggctcagaacagaagattccaagaatgacaatgataacattttcctgtcacccctgagtatctccacggcttttgctatgaccaagctgggtgcctgtaatgacaccctccagcaactgatggaggtatttaagtttgacaccatatctgag

SEQ ID NO: 1330 - protein, 84 aa, Homosapiens
MYSNVIGTVTSGKRKVYLLSLLLIGFWDCVTCHGSPVDICTAKPRDIPMNPMCIYRSPEKKATEDEGSEQKIPRMTMITFSCHP

SEQ ID NO: 1331 - DNA, 365 bp, Homosapiens
agatcacactatctccacttgcccagccctgtggaagattagcggccatgtattccaatgtgataggaactgtaaccttctaattccaacatgaccacgtccaggcaactgaactgtcccctggcaagaagtctaggactgaacctgtcccgggcccctgtacttggttcaaaggatttagcctttctcttggccacaccaggaaggtttatcttttgtccttgctgctcattggcttctgggactgcgtgacctgtcacgggagccctgtggacatctgcacagccaagccgcgggacattcccatgaatcccatgtgcatttaccgctccccggagaagaaggcaactgaggatgagggctca

SEQ ID NO: 1332 - protein, 53 aa, Homosapiens
MTTSRQLNCPLARSLGLNLSRAPVLGSKDLAFLLATPGRFIFCPCCSLASGTA

SEQ ID NO: 1333 - DNA, 5567 bp, Homosapiens
cttgtggttctttttcaacagtttaattgaaaagaaagacactcaatttttttcctttttctttattttcaggttatatttcacactatgtgctgactgtatctacagaagatatttaaaaaaaaaaaagataaactttttttcaaagattttgattccagtggaatctttgctttagatttgtgtgtgtgtttgtgttcgtgaattgtaactccagaagcaatgcctgtacaagctccacaatggacggatttcctctcctgcccaatttgcactcagactttcgacgaaacaattcgaaagcccatcagtttgggttgtggccatactgtctgcaagatgtgcctgaataaactccaccgcaaggcttgcccatttgaccagaccactatcaatacagacattgagctcctccctgtgaactcagcattgctgcagctcgtgggtgctcaggtccctgagcagcagcctattactttgtgtagtggggttgaagacacaaagcattatgaggaagccaagaaatgtgtagaagaattagcattgtacttaaaaccgctcagcagtgctagaggagtgggtctgaacagcactactcagagtgttctgagtcgcccaatgcagaggaagcttgtgactctagtccactgtcaactagtagaagaagaaggcaggattcgtgccatgagggcagctcgatctttaggtgaacgaacagttacagagctcattctccagcaccagaatcctcagcaactctcttccaatctttgggcagcagtaagggctaggggatgccagttccttggaccagcaatgcaggaggaagctttaaagttggttctgctggccttagaagatggttctgctttgtcaagaaaagtattggttctgtttgtggtgcaaagattggagccacggtttcctcaagcctctaaaactagcattgggcatgttgttcagctcctttatagagcctcctgtttcaaggtcaccaaacgtgatgaagactcttctttgatgcagctgaaagaagaatttagaacctatgaagctctgcggcgagaacatgactcccagatagtgcagattgctatggaagcaggcttacgaattgcaccggaccagtggtcctctttgctttatggagaccagtctcacaaatctcatatgcagtccattattgacaagttgcagactccagcctcttttgcacagagtgttcaggaactaacaattgctctccagcgaactggagacccagcaaacttgaaccgactaagaccccatttggagctgttagcaaacattgaccctagtccagatgctcctcctcctacttgggaacagctggaaaatgggctggttgctgtgcgtacagtggtacatgggctggttgattatatccagaaccacagcaaaaaaggagcagatcagcagcagcctccacagcatagcaaatacaaaacatacatgtgtcgagatatgaagcagagaggaggatgccctcgtggggccagctgtacatttgcacactcacaggaggaactggaaaaatttcgtaaaatgaataagcgcctggttccgagaagacccttgagtgcctctttgggtcaacttaatgaggtgggcctgccttcagcagctatccttccagatgaaggtgcagtggatctccctagcagaaaacctcctgctctgccaaatggaattgtatcaacagggaatacagtaacacagcttattccgcgagggacagaccccagctatgattctagtctgaaaccaggaaaaatagatcatctgagcagtagtgctcctggatcccctcctgacctgctagaatctgttcctaagagtatttctgccttacctgtgaatccacattctatacctccaagggggccagcagatctgcctccaatgcctgttaccaaaccacttcagatggtacctcgaggttctcagttatatccagcacaacagacggatgtttattatcaggatcctcgaggagcagctccgccatttgaaccagcaccttatcagcagggtatgtattatactccaccaccacaatgtgtgtcccgctttgtccgacctccaccatctgctcctgaacctgctcctccctacttggatcattatccaccctacctccaagaacgtgttgtaaactctcagtatggcacacagccacagcagtacccacctatatacccatctcactatgatggccgtcgagtgtaccctgctccgtcttacacaagagaagagatattccgagaaagccctatacccattgagattccacctgcagcagtaccatcgtatgtaccagaatccagagaaagataccaacagatcgagagttactatccagtggctcctcatccaactcagatcagaccttcgtacctcagagaacctccttatagccggcttcctcctcctccccagcctcatcctagtctagatgaactacatcgccgacgaaaggaaataatggcccagctagaggaaagaaaggttatctctccacctccttttgcaccttcaccaaccttgcctcctacctttcatccggaagaatttttggatgaagacttgaaggtagctgggaaatacaaaggaaatgattatagccaatactctccctggtcatgtgacaccatcggctcctacattggaaccaaagatgcaaaacccaaagatgttgtggcagcagggagtgtggaaatgatgaatgtggagagtaaaggaatgagggaccagcgattagatcttcagagaagagcagcagaaaccagtgatgatgacctcatcccatttggagaccgaccaacagtgtctcggtttggtgccatctcacgaacttccaaaactatatatcagggtgctggtccaatgcaggctatggcacctcagggagctcctacaaaatctattaacatttcagattatagtccatatggaacccacggtggctggggagcttctccatattcacctcatcaaaacataccttctcagggacacttcagtgagagggagagaatatctatgtcagaagtggccagtcatggaaaaccccttccatctgctgagagagaacagctacgactagaattgcagcaattgaaccatcagattagccagcagacccagctacgtggactagaggctgttagtaacaggctggtgttgcagagggaggcaaacaccctggcaggccagtcacagcccccaccaccgccacctccaaaatggcctgggatgatctcaagtgagcagttgagcttggaactgcaccaggtggaaagggaaatcgggaagagaacacgggaactgagtatggaaaaccagtgttctctggacatgaaaagcaaactgaatacaagtaaacaagcagaaaatggacaaccagaaccacaaaacaaggttccggctgaggaccttacattgacattcagtgatgtaccaaatggatcagccttgacacaagagaatatcagcctcctatcaaacaagaccagctctctgaacctgtcagaggaccctgagggaggaggggataataatgactcccagagatcaggagttactcccagttctgctccttaaaatatgaggagtcctacttttatcttctgctcctaatcagtttgtcgggcataggggtaggagaacgcataacttctaaactttttctcttaagagcggtcagagaaatccaggaaattcaccagaggcaatgtgcacaaacaccactactaaaaacaaaccctgcacatagttcacattaatgcatttttttaatttaaagaaaaagaaaattagcagtatctgcaagcaattcagattaaatttgtttttgttctgtgaatgaactttattttaataactttggacgccttggatccagggctttaaaaaaaaaagatattatatatacactctgtttgattaattgtatgatcttaatgaagtaggttttcttgtattttggtattacatacccagtgtataatttgtataattcctcacccccaatccttatcaattctcaccaccccataaacttaaaacagaccaaaaatgtcagctttcagagaattctgtggtgcttgagaaacagacagtactagactgagttattagaaaatgtgcagcaaaccaacttttcccagagctgttatttggaattctttatccctttctagatcactagcttcattggatacgtatatttttcttgacattgaagctttttgtttgtttgggagggttttatttcttgtttttattttcaacttttcaaatagaattaccaattttgaagtcctcattttcatattaaggatcatttgcattctcttaatataatcagaaagctgattcagtgtttaattagatttaaatgttgatcaagaattaactgtaacttactagcactgaaaatacatgtttggtgtttcgcctgcgttcagctcatggttggaaatttgaagcagtgcttttcaaattaaacttttgctgacatcataggatgctaaaaaacaaggacaatcaactatgttttaaaactgcaacatttgatttgaacttaaaatgaatagagccacattattttaatggatgttttgttttacttgtgaactgattgagtcttaaggatagtttatgaattgatcacttgttgctcagaatcattagtataagtaggtaggaaatagtttgaagtcatttttcatagacttaactgtccaatgttgcaaatgtttcttcatgaaaatattgaaaagagtaaggttttttttttttttaattctgctgcacatattctgatgccatgtgtctgtgcttaattaactaagaccctataaaacgtgtttagtggggactgtttgatatagttgccctctccattcctctatttgcctgatttttttcagtttccctttctgtattttactactaaattagaaagcactggttatgtaataagttactacattgctttggttgagtaaaaacaagagtttatatttttcttgtttcttattttcttaacccttaactcctgctgaggtcataacaacctcagtctaagctctgtgtccatcatactgttaacttaaacaaatgggtggtgggggtgggaagggtaatacagtcctgccattgcctaccagtaggagagtccaaacagaacactcttttgagtagcaattatttaatttgcccagtcaaggcaccgtgtttatatactatttcacattgaatttgattatgccctacagacctggctggtcaaggatttgatatacacatattggcttgggattcgagctttcttttttatttaaataaaaatttatatatatattatatatatacatatatacatagctatatctgtatatatattgggtatgttttaaggattttttcgcatgagcgcagctgttgcgataaattgaccgattgggaggtggtagaagcactgaatgaaggtgaggctttttttttttccagttttcttatacatttgtcttcttttttta

SEQ ID NO: 1334 - protein, 1133 aa, Homosapiens; identical to SEQ ID NO: 81

SEQ ID NO: 1335 - DNA, 776 bp, Homosapiens
gtaatttggtctctcccattaacaccattaaatagatgataactgattttatttccttctctttcaaaggaaaaccagtgttctctggacatgaaaagcaaactgaatacaagtaaacaagcagaaaatggacaaccagaaccacaaaacaaggttccggctgaggaccttacattgacattcagtgatgtaccaaatggatcagccttgacacaagagaatatcagcctcctatcaaacaagaccagctctctgaacctgtcagaggaccctgagggaggaggggataataatgactcccagagatcaggagttactcccagttctgctccttaaaatatgaggagtcctacttttatcttctgctcctaatcagtttgtcgggcataggggtaggagaacgcataacttctaaactttttctcttaagagcggtcagagaaatccaggaaattcaccagaggcaatgtgcacaaacaccactactaaaaacaaaccctgcacatagttcacattaatgcatttttttaatttaaagaaaaagaaaattagcagtatctgcaagcaattcagattaaatttgtttttgttctgtgaatgaactttattttaataactttggacgccttggatccagggctttaaaaaaaaaagatattatatatacactctgtttgattaattgtatgatcttaatgaagtaggttttcttgtattttggtattacatacccagtgtataatttgtataattcctcacccccaatccttatcaat

SEQ ID NO: 1336 - protein, 81 aa, Homosapiens
MKSKLNTSKQAENGQPEPQNKVPAEDLTLTFSDVPNGSALTQENISLLSNKTSSLNLSEDPEGGGDNNDSQRSGVTPSSAP

SEQ ID NO: 1337 - DNA, 3645 bp, Homosapiens
cttgtggttctttttcaacagtttaattgaaaagaaagacactcaatttttttcctttttctttattttcaggttatatttcacactatgtgctgactgtatctacagaagatatttaaaaaaaaaaaagataaactttttttcaaagattttgattccagtggaatctttgctttagatttgtgtgtgtgtttgtgttcgtgaattgtaactccagaagcaatgcctgtacaagctccacaatggacggatttcctctcctgcccaatttgcactcagactttcgacgaaacaattcgaaagcccatcagtttgggttgtggccatactgtctgcaagatgtgcctgaataaactccaccgcaaggcttgcccatttgaccagaccactatcaatacagacattgagctcctccctgtgaactcagcattgctgcagctcgtgggtgctcaggtccctgagcagcagcctattactttgtgtagtggggttgaagacacaaagcattatgaggaagccaagaaatgtgtagaagaattagcattgtacttaaaaccgctcagcagtgctagaggagtgggtctgaacagcactactcagagtgttctgagtcgcccaatgcagaggaagcttgtgactctagtccactgtcaactagtagaagaagaaggcaggattcgtgccatgagggcagctcgatctttaggtgaacgaacagttacagagctcattctccagcaccagaatcctcagcaactctcttccaatctttgggcagcagtaagggctaggggatgccagttccttggaccagcaatgcaggaggaagctttaaagttggttctgctggccttagaagatggttctgctttgtcaagaaaagtattggttctgtttgtggtgcaaagattggagccacggtttcctcaagcctctaaaactagcattgggcatgttgttcagctcctttatagagcctcctgtttcaaggtcaccaaacgtgatgaagactcttctttgatgcagctgaaagaagaatttagaacctatgaagctctgcggcgagaacatgactcccagatagtgcagattgctatggaagcaggcttacgaattgcaccggaccagtggtcctctttgctttatggagaccagtctcacaaatctcatatgcagtccattattgacaagttgcagactccagcctcttttgcacagagtgttcaggaactaacaattgctctccagcgaactggagacccagcaaacttgaaccgactaagaccccatttggagctgttagcaaacattgaccctagtccagatgctcctcctcctacttgggaacagctggaaaatgggctggttgctgtgcgtacagtggtacatgggctggttgattatatccagaaccacagcaaaaaaggagcagatcagcagcagcctccacagcatagcaaatacaaaacatacatgtgtcgagatatgaagcagagaggaggatgccctcgtggggccagctgtacatttgcacactcacaggaggaactggaaaaatttcgtaaaatgaataagcgcctggttccgagaagacccttgagtgcctctttgggtcaacttaatgaggtgggcctgccttcagcagctatccttccagatgaaggtgcagtggatctccctagcagaaaacctcctgctctgccaaatggaattgtatcaacagggaatacagtaacacagcttattccgcgagggacagaccccagctatgattctagtctgaaaccaggaaaaatagatcatctgagcagtagtgctcctggatcccctcctgacctgctagaatctgttcctaagagtatttctgccttacctgtgaatccacattctatacctccaagggggccagcagatctgcctccaatgcctgttaccaaaccacttcagatggtacctcgaggttctcagttatatccagcacaacagacggatgtttattatcaggatcctcgaggagcagctccgccatttgaaccagcaccttatcagcagggtatgtattatactccaccaccacaatgtgtgtcccgctttgtccgacctccaccatctgctcctgaacctgctcctccctacttggatcattatccaccctacctccaagaacgtgttgtaaactctcagtatggcacacagccacagcagtacccacctatatacccatctcactatgatggccgtcgagtgtaccctgctccgtcttacacaagagaagagatattccgagaaagccctatacccattgagattccacctgcagcagtaccatcgtatgtaccagaatccagagaaagataccaacagatcgagagttactatccagtggctcctcatccaactcagatcagaccttcgtacctcagagaacctccttatagccggcttcctcctcctccccagcctcatcctagtctagatgaactacatcgccgacgaaaggaaataatggcccagctagaggaaagaaaggttatctctccacctccttttgcaccttcaccaaccttgcctcctacctttcatccggaagaatttttggatgaagacttgaaggtagctgggaaatacaaaggaaatgattatagccaatactctccctggtcatgtgacaccatcggctcctacattggaaccaaagatgcaaaacccaaagatgttgtggcagcagggagtgtggaaatgatgaatgtggagagtaaaggaatgagggaccagcgattagatcttcagagaagagcagcagaaaccagtgatgatgacctcatcccatttggagaccgaccaacagtgtctcggtttggtgccatctcacgaacttccaaaactatatatcagggtgctggtccaatgcaggctatggcacctcagggagctcctacaaaatctattaacatttcagattatagtccatatggaacccacggtggctggggagcttctccatattcacctcatcaaaacataccttctcagggacacttcagtgagagggagagaatatctatgtcagaagtggccagtcatggaaaaccccttccatctgctgagagagaacagctacgactagaattgcagcaattgaaccatcagattagccagcagacccagctacgtggactagaggctgttagtaacaggctggtgttgcagagggaggcaaacaccctggcaggccagtcacagcccccaccaccgccacctccaaaatggcctgggatgatctcaagtgagcagttgagcttggaactgcaccaggtggaaagggaaatcgggaagagaacacgggaactgagtatggaaaaccagtgttctctggacatgaaaagcaaactgaatacaagtaaacaagcagaaaatggacaaccagaaccacaaaacaaggttccggctgaggaccttacattgacattcagtgatgtaccaaatggatcagccttgacacaagagaatatcagcctcctatcaaacaagaccagctctctgaacctgtcagaggaccctgagggaggaggggataataatgactcccagagatcaggagttactcccagttctgctccttaaaatatgaggagtcctactttt

SEQ ID NO: 1338 - protein, 1133 aa, Homosapiens; identical to SEQ ID NO: 81

SEQ ID NO: 1339 - DNA, 303 bp, Homosapiens
tgtaccagaatccagagaaagataccaacagatcgagagttactatccagtggctcctcatccaactcagatcagaccttcgtacctcagagaacctccttatagccggcttcctcctcctccccagcctcatcctagtctagatgaactacatcgccgacgaaaggaaataatggcccagctagaggaaagaaaggttatctctccacctccttttgcaccttcaccaaccttgcctcctacctttcatccggaagaagtaagcaaatcatttttagtctcatttatccgtgtttttttgtg

SEQ ID NO: 1340 - protein, 42 aa, Homosapiens
MAQLEERKVISPPPFAPSPTLPPTFHPEEVSKSFLVSFIRVF

SEQ ID NO: 1341 - DNA, 903 bp, Homosapiens
ctttatggagaccagtctcacaaatctcatatgcagtccattattgacaaggtaggaccttttttgttccttacttcttagactaatcttggcattttggtaattcatttaacaaatgtatattaaagtgaatactgtatagcttttgtaaattgtatttatagccagtgtcatgtcataaccaatcacgttataataccactttgttcatttaaagatttgattagtttatattttttattttacttattttatattttattgtatttttactagaatcacagagatgaaggccaactctagagaccactctacatttaatttagagaaatagagtcaaatagtaagagtaacctaaaaaaaaaaaaaaaaaaaaaatagccaggtgtggtggtaggcgcctatagtctcagctacctgggaggctatggtgggagaatcccttgagctcaggagtttgagggtgcagtgagctatgttagcacctcggcaacagagtgagaccctgtctctttaggggggataaaaaggcggtacataattttcagttacaatgtaggttgtttgctctgctctataagtcttccctggatacctttaaccagactttacctgcaactcttaggtttggacaggagcttgtatcggaagttttgcaactcatttataatttacggaaacgcttaacgcttagtaatgatctattagaggagtacctttctacctctgaagagaaacttggctttttttgtttgtttgtttgtttgagacagagtctcaccctgtcacccaggctggagtgcaatggcactatctcggctcactgcaatctctgtctcccaggttcaagcgattctcctgcctcagcctcccaagtagctgggattacaggcacgcactacc

SEQ ID NO: 1342 - protein, 139 aa, Homosapiens
HLGNRVRPCLFRGDKKAVHNFQLQCRLFALLYKSSLDTFNQTLPATLRFGQELVSEVLQLIYNLRKRLTLSNDLLEEYLSTSEEKLGFFCLFVCLRQSLTLSPRLECNGTISAHCNLCLPGSSDSPASASQVAGITGTH

SEQ ID NO: 1343 - DNA, 365 bp, Homosapiens
tggttaatcttaactgtattgccagttaattgaatagctgcagaaatgattaaatattccccttctaataaatggatttatcttatctatgtacttgataaattttggttttgcccaactttccctagcaatgcaggaggaagctttaaagttggttctgctggccttagaagatggttctgctttgtcaagaaaagtattggttctgtttgtggtgcaaagattggagccacggtttcctcaagcctctaaaactagcattgggcatgttgttcagctcctttatagagcctcctgtttcaaggtcaccaaacgtgatgaagactcttctttgatgcagctgaaagaagaatttagaacctatg

SEQ ID NO: 1344 - protein, 91 aa, Homosapiens
MYLINFGFAQLSLAMQEEALKLVLLALEDGSALSRKVLVLFVVQRLEPRFPQASKTSIGHVVQLLYRASCFKVTKRDEDSSLMQLKEEFRT

SEQ ID NO: 1345 - DNA, 453 bp, Homosapiens
tggcccctgctgcaggagcagcctcagcagcagcaggtgggaggccggaggcggtgctggcggtggcggcggcagccgtggcccggcggcctgggacagaatcagagtcaacggtggcctcggcggcggcggcggctgccgcggcggtggcgacggccgcggggactcggagctgagaggagctgctgctcggaccagcgcggttatatttcacactatgtgctgactgtatctacagaagatatttaaaaaaaaaaaagataaactttttttcaaagattttgattccagtggaatctttgctttagatttgtgtgtgtgtttgtgttcgtgaattgtaactccagaagcaatgcctgtacaagctccacaatggacggatttcctctcctgcccaatttgcactcagactttcgacgaaacaattcgaaagcccatcagtttgggttgtgg

SEQ ID NO: 1346 - protein, 32 aa, Homosapiens
MPVQAPQWTDFLSCPICTQTFDETIRKPISLG

SEQ ID NO: 1347 - DNA, 6271 bp, Homosapiens
atgaattgtctgaagggacctcccattccccaaaaccaaaacggcaccttttccacaagggacaagaaacttttaaagagtcgcaaggttagatttcaggagcccttctatgggccatatcttttcctgtcgtccccaaatagctcttattgttcacacagcccaggagagacgttttggagtagcgtgtccgggccttttgggctgtttcacagccttaggaggctgaactcccagaggggtgacgaggacaaagctgatgagatccagaacctggataatatggaagaagaaaaatgggtctccggggcgggccggagcctgaggaagaggaaggggacgaggacaacgagcgactgggcggcggaggacgaggaggaggaagaggaggccgagcaacaagatggcccctgctgcaggagcagcctcagcagcagcaggtgggaggccggaggcggtgctggcggtggcggcggcagccgtggcccggcggcctgggacagaatcagagtcaacggtggcctcggcggcggcggcggctgccgcggcggtggcgacggccgcggggactcggagctgagaggagctgctgctcggaccagcgcggtgagcgagcggcgggcggcgacttggggagcggggctgccgcggccggggcctcagtcgggaacaataggcagctgtggtcgggaagggtttgtcctcgcccgccctctgctcctccgcggcagcggcagcccggccggccccaggctcctcagggcccccgccggctgttctggggcttgtcagtggccggcgtcctttaggcctcaggcctctgcatgccgcctgtagggcctgtcggggtaggtaggccgagaggaggacgaagggaggctcggacgagagggagggggcgaaagggctacctggctcctgtggtactcccagggcctgggccaggcggggaatgcgcacgggaactgctttttggacccctagtctgtgggggtgggggagggcgaaggcgtctgtaaacaggcgccgcctcggcctcccagcacctcagggctgcttcctcccccagcccctgaagcgctccccttctttggccaagtggatttcacggtgtctgtttccctgaagtccctggagatctagcctggtagtcttctccctgctggcgatgggaaaattgtgtgtgtgcaggtgtctttaaaaaaaaaaaacaaaaaacttaaatgcaacaaaaacatataaaatgtggttatcggtaaaggatggagtggtaagggatgcgcctctctaaacatctctaagtatcagttctataaacatcagttatgcccgcatcccaggtgagagtggattgaaacaagggctcttttggaacagtaataacacaactcttgacataccagaatagcctatgaaactggaaacaaacactggcaacgcggagacaaactgtaatgtttaaagaggacttttattccagctaggcgttttgaattactaacatgcagtataagaagcaacattaactagcataaagtggacctcaggaagcacttcgaaaggagacaggtggttcatctccggccatagagcttcttgtgccttgtctcgtgtttcagtaatttttcctgaaattgttcaagaccagtcttttctctgagtttgaaatttgatttcgtttttgttttgttttgcgacggagtcttgctctgtcacccaggctggattgcagtggcacaatctcggctcactacagcctccacctcccggattcaagcgattctcctgcctcaccatccggagtagctgggattacaggcgcccgccaccatgcccggctgatttttgtatttttagtagagacggggtttcaccatgttggccaggctggtctggaactcctgacctcaagtcatctgccctcctccgcctcccaaagtgcttggattacaggcgtgagccacctcgctcagccttaaacttaatttttcaaggcttctaccacattttcttacaagtgagggaaaaggtagatttatttctaaagtactttctacctaggtatgcagaaatttatattaaaatcgcttggatacatccaaggagattgcttttcacttgttaacattcaactgcaaggcctaagggttataggttgtgttcttttcagcactgacctgtgctgaaaagatgccagttaatatctttcacctcttctaagggtaaatttctaagtagaattggtccaagtctgttctaattaaaaacattataagcagcactagtctagttcttagttcttccacaacaattgacactgaatagattagcaattgaataaacataaaggttgaattttcttgtttaggatttgaagtatagtgaatgaatatcaatactgaccttcattttatgcttagcataaataatgttggagatgttttgattttttgaatgatggagaaataacaactttctatggctcctgatgttgtgacttttttgcagatatttcagaaaggacaccgtttttcaggtgctcaaatctgtgattttttttttttttctgtgctaattttgttaggtcagcacagattccaagtaaagtctgtgttataatgatacttaaatttatgtatggccctaaacctattagaacaattgtagtaatttataggttgtaagttttaagtggttcatgtgctgtgttatgaaaacaatctcaccgtgttatgtcaagggcagatttacctcatatttaatatcattttcctgaaaataaatatttttaagtggtaaggttttgtatttcagattggttattgacccagcaatttatgggcttagtctgggtccgtatttctgttcaataggaaaaaaatttagggaattgtttttatttattttgtgtcaaaacagttttaagttttgacacaaactcaactgtcccttcttcagtatcaatacttattacttaagttcacattttctcaggtaataaaaatttacttctaagaagttttggaaccagagcttaagaattagatttatattttcttggtaatattaaaagttaatatatgcttgatttatttgaagaaataaaaaagggtaatttgtacacaacgcctttcagaacatatttgttgaatgaataaaaatatttaagcttcctcattatgctgcagtattagttctgttgtcctcattttttcatatgaagaatgtgaagctaagagtagctatgtaaccagcaaaaagatcacataattaataggtaaaagagcttactcagactcagatcttgtgacacaaattagattctttgccactaccacatgtgtcacagttaaactttgaagcatcttctgtgttgacagattcctttttttgcctgtgaacttaccctattatcattatttgtatcctgtcagatatctacttgtaagaccaagaaagtatttgttcatgtgaatcacaaaagaaacacttaaatttttgtttttagcatatctgaatgctataaaatataaaaactcatactgtttacataggacagatttatcatactgctgtaattgttttcatggttaatttgttacataggcaattactaaattgtgcctttgaaatactttataaatttttttaaataattaaagatattcaatgatgttaaagttgggtcagctaatatttgaagttcttaatttataattttttttctttaagccatagataatttagaattctgcagtatttttcatctccagatcttagggcttgaaatggattctgatgggtctaatcagtccactcttgcatatatcttgaaaatggtcagcatccaacaaagtgaagaataaactgataaatgatccctgtttggtgaacacctcagatcaggatgttccttggcagggtattctgacctggtttagctttggccccgtctgtgctcagggttcaggtattctgcaggattgggttcagagggattaaaattctcagattggcctgtatcaaaacagtcacagattttggtcagccttttcccagaaccgtctccaagattttttcttttgtgtaattctggaatctaggctggatttggactagctttagaggttatgataaaagattaattttgtcaggcatttatacaaaggaggttttcttactacagagtttcttaaggtagattccttctatttttgaagtgtgacatttaccaatctgaagtaatgttgccctacatcccccagacacttaactttagcatatttatttctgtccatttttggtcaggattgtgcctgtttacttatataatattcttgtttactttttgtttattagatacttcttattagtttatattgttttcctgattgaggcttggggaaagaattttcctcaaatttaaagtcaccttacttatttgcagatgtatgtcagagcaatattcttttgacagttatcaagcattttagcaatgctgtatgtatatattatgaatgaatgacagagtcactcatggtctgtcacccaggctggagtgcagtggcattatcatagctcacttcagcctcaaactccttggtttaagtgttattcccgccttacctggctactttttttaatttttattatttttatagagatagcattttgctgtgttgcccagggtggtctcaaactcctgggagcaaggtgatcctcccacttctgcctcccaaagtgctgagattacaggcataacaatgttttaaactgacactggtataccttcactgattattactgtgcacatgtggtaataatttaacttataagtgcattttatctaaaaaatttccaagatctaaatagcatttgaacatggtagcagtttttttttttttttttttttttttttgagcaagaaaagagttctaaaggggtcagttttatctacagattaacataattttttttattgaggttaagtcacataacattaaccattttaaagtaaacagtttaggtggcactttatacattcacaatgttgttcaaccaccagctctaattccagaatgtgttcattaccccaaaaggaaacactgtacccattaagcagttactctgtattcccctcttccctaatccctagcaaacgccattctgctttctgtctctaatttgagccaacatcgaggaagagtactctgtacaattgaaattgcagaaaaaactttgggatgtgattgttaggaataaaaaaccacctaattctttgcatgcttctctaagtacagtagacatgctgccagggactctttatggaagaaaagttgagactcatagaagtttgcagttttgttttgatcaccccagagggttttgctcaaactcttagactcatttgtatttcttcattgggttataagaactaaaatttaatgttctatacaaatgtgaacaactaatacttggtctcctatctagaacttgtttgccttttaggttttcttaatgtatagaagaaactaggaatattcacaaaggatttatttgaagttacactgggaaacgatttttagaatttgaagctctttgatccctgtgaatctaactttatgactattttattcagctaatctttgagaatatttagagttttgatttgcgtggcactctgcttttaatcccttgttgaataagtgttagaaaccttgatcttggccctatacctgatcacctctaaaaacatgaacagtgttacaaaggcagttgtttagtaagcttttttggattgttttaattggctgactgagggagacaaaattagtttttttttttctttctagaataaagggtaataaacttggactttagagttactgctaagattgacatttccatttggggctttagaaatatattgttatcttaaattcaaaatggtactttatctaattgaattgaaatcttaaaatttatgagaaacaaaagtcactttatgttcttagtaaatatttctaatggggttataggagatctaagtacaaaaaaaatttaaaattttgttattaatctcccctccttaaggaaaattttattaatatacataattataatttagttataagaacaacttaagttgagtacagtggctcaagcctgtaatcctagcactttaggaggccaaggcaggaggatctcatgaagccaggagttccagaccagcctgggcaatagagtgaaaccccacctcaaaaaaaaaaaa

SEQ ID NO: 1348 - protein, 278 aa, Homosapiens; identical to SEQ ID NO: 83

SEQ ID NO: 1349 - DNA, 331 bp, Homosapiens
ggagaccggcgacgctctccgccgcgaccgaaagtctcacacgccctgagcagatgaaccggtccctcggtccggtctgccctcccgcaccggcgcctttgggctcagcgggccagtggccagatggcgagagttctggatctcatcagctttgtcctcgtcacccctctgggagttcagcctcctaaggctgtgaaacagcccaaaaggcccggacacgctactccaaaacgtctctcctgggctgtgtgaacaataagagctatttggggacgacaggaaaagatatggcccatagaagggctcctgaaatctaaccttgcgactcttt

SEQ ID NO: 1350 - protein, 44 aa, Homosapiens
MNRSLGPVCPPAPAPLGSAGQWPDGESSGSHQLCPRHPSGSSAS

SEQ ID NO: 1351 - DNA, 1559 bp, Homosapiens
ctggcagttgctgagttcggaagattaactctgaatgtggagagattattttcttgctcgtaaacctggtttacatattttcattcttaatgctcagtaatcttaaggaaagtcacctgaaagaatactttttcaccaagtactcttctgcgcctgtttgaaggtgtctgtgtgcttgtgaagcgctcccttgttagttccttctgtgagactcgggggagactgaagagggaaatcacctgcggggaatgaacaggaaagcaataagaagatttggaaaagaggcactggctactggaggaagggagaaatcaccgagagagcgaaagatgtaacagatgcagtgactcatgcctataatcccagtactttggaaggtcaaggcacaaggatccattgaggccaggagtccaagaccagcctgcacaatgtagcaagactccttctctacaaaaaaataaataaaaattagccaggcatggtggtgcactcctgtagtcccagctactcaagaggctgatgtagagaatcgcattatcccagaggtcaaggctgcagtgagccgtgatcatgcctctgcactccagcctggacgatagagcaagactttatctcaaaaaacaaaaatttaaaaagatatcaggtagctcatagaattgttgagagggctgtaaaaccaggcttgaacttaaacagcaacgataaaccacccacagaacggacatgatgaagaagttggcaaatgttaccaactgtcctggtttttttggtgactgtagtttccaaggattcagatccttccatgccaaaatctgaaaaatgctgggcaaagtatgactgacaatgtggtaatcttacagctagcactagagacatcaagcactagacaacacaatttgccctttggccacttatacaatgggaactcacgcttgcagtaacctctattgccactaggagagagaaacacagaaggaggaagggagaagggagagagaggaaaaaaactgttgcttgtctccttagctgtgagtcaaaggtctaacacagatgtctggctgaaaagcctaggtcacatgcctgcaccccagagaaagtatgtgacatcttctgcttccattatgggaaacagcctttgcttgtcacgaagatttacatggtgagacatatcctaaatatagggaagctgttgaagtggcccaaataatgaccaatttctactaatttgtactaatatccaaattacttttaattatctaatattacttagatacagtgaggcaaccattcgttggatatataatggtttctttgatttcaaaaatctttttttatgtaatatatgtctgaagaccatcaaaataaattcttaaagtcagattaataggatgttacttataatattattgtaattatttgaccacataatagtttatgcccattatatactatgtaattgtatgatggaaataatgctgtactttgtttgtaaaagtttaattatcctgacctttgttcatcataaagaattgctccatttctattatttatcgaggaaa

SEQ ID NO: 1352 - protein, 35 aa, Homosapiens
MTDNVVILQLALETSSTRQHNLPFGHLYNGNSRLQ

SEQ ID NO: 1353 - DNA, 1686 bp, Homosapiens
gaacgcatcccatcccaaactgcaaaaccacaagcatcaacagcaggagccgagcaaagtgctcggcggaggaagaggaagggcgagggagagaaatggtcgagtacagaagcctgcgtgtgggtaagaaaataccctaaccactcgcccaccggacgcagggcggctgggactgcgaatccagcagcagccacagcgtagcagcgggcggcagccgccgaggcagcaatgtcaggagggcacagctggaggaggcggccgccaaagccactaccccacccccaggaagatttggaaaagaggcactggctactggaggaagggagaaatcaccgagagagcgaaagatgtaacagaaacaggctcttgttctgtcacccatacttggagtgcagtggtacaatgatagctcactgcagcctcaaactcctggtctcaagcaatcctctcacctcagcctcccagatgcagtgactcatgcctataatcccagtactttggaaggtcaaggcacaaggatccattgaggccaggagtccaagaccagcctgcacaatgtagcaagactccttctctacaaaaaaataaataaaaattagccaggcatggtggtgcactcctgtagtcccagctactcaagaggctgatgtagagaatcgcattatcccagaggtcaaggctgcagtgagccgtgatcatgcctctgcactccagcctggacgatagagcaagactttatctcaaaaaacaaaaatttaaaaagatatcaggtagctcatagaattgttgagagggctgtaaaaccaggcttgaacttaaacagcaacgataaaccacccacagaacggacatgatgaagaagttggcaaatgttaccaactgtcctggtttttttggtgactgtagtttccaaggattcagatccttccatgccaaaatctgaaaaatgctgggcaaagtatgactgacaatgtggtaatcttacagctagcactagagacatcaagcactagacaacacaatttgccctttggccacttatacaatgggaactcacgcttgcagtaacctctattgccactaggagagagaaacacagaaggaggaagggagaagggagagagaggaaaaaaactgttgcttgtctccttagctgtgagtcaaaggtctaacacagatgtctggctgaaaagcctaggtcacatgcctgcaccccagagaaagtatgtgacatcttctgcttccattatgggaaacagcctttgcttgtcacgaagatttacatggtgagacatatcctaaatatagggaagctgttgaagtggcccaaataatgaccaatttctactaatttgtactaatatccaaattacttttaattatctaatattacttagatacagtgaggcaaccattcgttggatatataatggtttctttgatttcaaaaatctttttttatgtaatatatgtctgaagaccatcaaaataaattcttaaagtcagattaataggatgttacttataatattattgtaattatttgaccacataatagtttatgcccattatatactatgtaattgtatgatggaaataatgctgtactttgtttgtaaaagtttaattatcctgacctttgttcatcataaagaattgctccatttctattatttatcgaggaaa

SEQ ID NO: 1354 - protein, 81 aa, Homosapiens
MSGGHSWRRRPPKPLPHPQEDLEKRHWLLEEGRNHRESERCNRNRLLFCHPYLECSGTMIAHCSLKLLVSSNPLTSASQMQ

SEQ ID NO: 1355 - DNA, 446 bp, Homosapiens
ctgacagaaccagagctgttagagcagggacgcgcgaaaggcgggagtacgggcggcgctggagaacctccgcggcggaggggcctgggggtgggaccgcgcccgcgagcccgccctgaccggggtgtctgtgtgcttgtgaagcgctcccttgttagttccttctgtgagactcgggggagactgaagagggaaatcacctgcggggaatgaacaggaaagcaataagaagatttggaaaagaggcactggctactggaggaagggagaaatcaccgagagagcgaaagatgtaacagaaaaaaaaggccttatgaagacattgcaaaaggacaactatctgcaaaccaggaagacagacctcaccagaaatcaaccctgctggtggtaccttgatcttagacttccagcctccagaagtatgagaaaataaatatctgtaattt

SEQ ID NO: 1356 - protein, 39 aa, Homosapiens
MKTLQKDNYLQTRKTDLTRNQPCWWYLDLRLPASRSMRK

SEQ ID NO: 1357 - DNA, 2604 bp, Homosapiens
ggcctggacgagcgcgcttccgacccgccgccaccgcctcctcccctccttctcggcccgccccctccctcgcctcttcctgccaggcggcccttctcccctcccctctcagttccctccgccctcctcgggctccagcggtggcggagcgaacgggaccggcccggcttcagagcgcgaggtggagggtggaacgcgggcgcctgaaggagttgttgtctcggcagcgcccgcggagacgtgaagaggtggttgtgggaagagaagtttgcagaactgaaatggaggtcagagcttcattacagaagatagtttctaatggtgatgaacaattggaaaaagccatggaagagattttgagagattccgagaaaaggccaagcagtcttcttgttgattgtcaaagttccagtgagatttcagaccattcgtttggagatattccagccagccaaacaaataagccatctcttcagttaattttggatccgtctaacacagaaatttctacacccagaccatcttctccaggtggactacctgaagaagatagtgttttatttaataaactgacctacttaggatgtatgaaggtttcttccccacgtaatgaagtagaggctttacgggcaatggcaaccatgaaatcttccagtcaatacccctttcctgttaccctgtatgtaccaaatgttccagaaggttctgtgagaattatagaccaatccagcaatgtggagatagcatcttttccaatctataaggtgttattctgtgcacgtggacatgacggaacaacagagagcaattgctttgcatttacagagagttcccatggttcggaagaatttcagatacatgttttctcctgtgaaattaaagaggcagtaagcagaattttgtacagtttctgtacagcattcaaacgttcttccagacaagtgtctgatgttaaagactcagttattcctacccccgacagtgatgtgtttaccttcagtgtctccttggaggtaaaagaagacgatggaaaaggaaactttagccctgtgcctaaggatagagataaattttatttcaaattaaagcaaggaatagagaagaaggttgtgattacagtgcagcaactttctaacaaagaattagctattgaaagatgttttggaatgttattaagcccaggtcgaaacgtgaagaacagtgacatgcatttactggatatggaatccatgggaaagagctatgatgggagagcttatgtcatcactggcatgtggaaccccaatgcaccagtatttctggcacttaacgaggaaaccccaaaagataagcaagtatacatgactgtggcagtggatatggtagtcacagaggtggtggagcctgttcgctttctcctggagacagtagtccgtgtgtaccctgcaaatgagcgattttggtatttcagcagaaagactttcacagagactttcttcatgagattgaaacagtctgagggaaaaggccataccaatgctggagatgcaatatatgaggtggtgagtctacagcgagagtctgacaaggaggaaccagtcactcctactagtggagggggtccaatgtcaccccaggatgatgaagcagaagaggagagtgataatgaactctcaagtggaacaggtgatgtgtctaaggattgtcctgagaagatcctgtattcttggggagagttgctaggaaaatggcacagtaaccttggtgcacgaccgaaagggctgtctactctggtgaagagtggtgtccctgaagcattgagggcagaggtatggcagttattggcaggctgccatgacaaccaggcaatgctggatagataccgaattcttatcacaaagcaacagatgaaatttagtcttacaccgagacagactattcacctagttaaatatgaagggtctatgaaggtctccatgacaccctgtaaccagctgcaatttgacattagacttgatgttctgattacttatactttttgttttagttcctttcctgagcctgaattgtacaaatatgtcctaaaacaccaacttattaagaggcttaatgcctgttaaatgcgtcagtgctcttggcagcttagcatgagtgctttctttgcatgggaggttgcagtttagaagcaactttatggatcatttcccaggttgatgttacatatgttcattttacaacctgtgtgcataatctctcagggtgaaggtaattaagagaaagcataatctacagaattgaagccaagtaatctaagattctgtttttaaactctttgctatataacattagttaagttgtttaccctcttaatttatccatttgtaaaatgatagtttttgtttttaaagtgctctattacccttactttaaaagtcctgtctaccatatatttaaaactataagtggaaataatgaagaaactctgaacttgcttttgcttatatatggatatatcatattatatgcctaagattggagataaattttataacctgattttctcatggcagtgtacaaatgaaattattctgtaagtttttcaaaacagtaaaatcactatttttc

SEQ ID NO: 1358 - protein, 605 aa, Homosapiens
MEVRASLQKIVSNGDEQLEKAMEEILRDSEKRPSSLLVDCQSSSEISDHSFGDIPASQTNKPSLQLILDPSNTEISTPRPSSPGGLPEEDSVLFNKLTYLGCMKVSSPRNEVEALRAMATMKSSSQYPFPVTLYVPNVPEGSVRIIDQSSNVEIASFPIYKVLFCARGHDGTTESNCFAFTESSHGSEEFQIHVFSCEIKEAVSRILYSFCTAFKRSSRQVSDVKDSVIPTPDSDVFTFSVSLEVKEDDGKGNFSPVPKDRDKFYFKLKQGIEKKVVITVQQLSNKELAIERCFGMLLSPGRNVKNSDMHLLDMESMGKSYDGRAYVITGMWNPNAPVFLALNEETPKDKQVYMTVAVDMVVTEVVEPVRFLLETVVRVYPANERFWYFSRKTFTETFFMRLKQSEGKGHTNAGDAIYEVVSLQRESDKEEPVTPTSGGGPMSPQDDEAEEESDNELSSGTGDVSKDCPEKILYSWGELLGKWHSNLGARPKGLSTLVKSGVPEALRAEVWQLLAGCHDNQAMLDRYRILITKQQMKFSLTPRQTIHLVKYEGSMKVSMTPCNQLQFDIRLDVLITYTFCFSSFPEPELYKYVLKHQLIKRLNAC

SEQ ID NO: 1359 - DNA, 2919 bp, Homosapiens
ctcccctcccctctcagttccctccgccctcctcgggctccagcggtggcggagcgaacgggaccggcccggcttcagagcgcgaggtggagggtggaacgcgggcgcctgaaggagttgttgtctcggcagcgcccgcggagacgtgaagaggtggttgtgggaagagaagtttgcagaactgaaatggaggtcagagcttcattacagaaggttagtggatcatctgattctgtggctacaatgaacagtgaagaatttgttttggttcctcagtatgcagatgataattctacaaaacatgaagaaaaacctcaactgaagatagtttctaatggtgatgaacaattggaaaaagccatggaagagattttgagagattccgagaaaaggccaagcagtcttcttgttgattgtcaaagttccagtgagatttcagaccattcgtttggagatattccagccagccaaacaaataagccatctcttcagttaattttggatccgtctaacacagaaatttctacacccagaccatcttctccaggtggactacctgaagaagatagtgttttatttaataaactgacctacttaggatgtatgaaggtttcttccccacgtaatgaagtagaggctttacgggcaatggcaaccatgaaatcttccagtcaatacccctttcctgttaccctgtatgtaccaaatgttccagaaggttctgtgagaattatagaccaatccagcaatgtggagatagcatcttttccaatctataaggtgttattctgtgcacgtggacatgacggaacaacagagagcaattgctttgcatttacagagagttcccatggttcggaagaatttcagatacatgttttctcctgtgaaattaaagaggcagtaagcagaattttgtacagtttctgtacagcattcaaacgttcttccagacaagtgtctgatgttaaagactcagttattcctacccccgacagtgatgtgtttaccttcagtgtctccttggaggtaaaagaagacgatggaaaaggaaactttagccctgtgcctaaggatagagataaattttatttcaaattaaagcaaggaatagagaagaaggttgtgattacagtgcagcaactttctaacaaagaattagctattgaaagatgttttggaatgttattaagcccaggtcgaaacgtgaagaacagtgacatgcatttactggatatggaatccatgggaaagagctatgatgggagagcttatgtcatcactggcatgtggaaccccaatgcaccagtatttctggcacttaacgaggaaaccccaaaagataagcaagtatacatgactgtggcagtggatatggtagtcacagaggtggtggagcctgttcgctttctcctggagacagtagtccgtgtgtaccctgcaaatgagcgattttggtatttcagcagaaagactttcacagagactttcttcatgagattgaaacagtctgagggaaaaggccataccaatgctggagatgcaatatatgaggtggtgagtctacagcgagagtctgacaaggaggaaccagtcactcctactagtggagggggtccaatgtcaccccaggatgatgaagcagaagaggagagtgataatgaactctcaagtggaacaggtgatgtgtctaaggattgtcctgagaagatcctgtattcttggggagagttgctaggaaaatggcacagtaaccttggtgcacgaccgaaagggctgtctactctggtgaagagtggtgtccctgaagcattgagggcagaggtatggcagttattggcaggctgccatgacaaccaggcaatgctggatagataccgaattcttatcacaaaggactcagcccaggagagtgttattactcgagatattcatcgtacatttcccgcacatgattactttaaagatactggaggagatggtcaagaatcgctctataagatctgcaaggcctactctgtgtatgatgaagacattgggtactgtcaagggcagtcttttcttgctgctgtattactgctgcatatgccagaggaacaagcattctgtgttttggtgaaaatcatgtacgactatggtttgagagacctctacagaaacaacttcgaagatcttcattgcaaattctaccagttggagagactaatgcaggaacagctaccggacctgcatagccatttttctgatctgaacctggaagctcatatgtatgcatcccagtggtttctcactctttttactgccaagttcccactctgcatggtgttccacatcattgacttactgctttgtgagggtttgaacataatctttcatgtagctttggctctcctaaagacctcaaaggaagaccttctgcaggctgattttgaaggtgctttaaagttctttagagttcagcttccaaagagatacagggcagaggaaaatgcaagaagactgatggagcaggcttgcaatattaaagtaccaaccaagaagctgaagaaatatgagaaagaatatcagacaatgcgagagagtcagctgcaacaggaagacccaatggatagatacaagtttgtatatttgtaggtaactccagctgttgcatttatactgggaatcttcataagaagctgagagaaagagaggggaaaaagaaagtggctttctactttcaaaaatgaaacaaaaaggaaaaatggcaaagtactgttttagctgtgcatgtcatatccacaaagacttttagcaggtgaactgttccaagactgacacaaggatgtttcaaacttgcctctgtctgtagaaaatgttaaaaataccaactcacttggaaggaaaaataaaaatcacaaaggtatattgagcacagta

SEQ ID NO: 1360 - protein, 815 aa, Homosapiens; identical to SEQ ID NO: 87

SEQ ID NO: 1361 - DNA, 557 bp, Homosapiens
taggatcttatataaaatgtagttggaaactgtcttaagtgttttataaagaatccttttgtgaaactaataatcttcctctaatttagttttataaccaggattttaatgtattatatatgtgaaacaacttcttagtattttagtaactatatttaaatatttagattgttttaatttcttctagaaatgaaatactttcataaaatttagcttcagaactatggtagaattgaaacagaattgtcttgctgtgtctgtagatagtttctaatggtgatgaacaattggaaaaagccatggaagagattttgagagattccgagaaaaggccaagcagtcttcttgttgattgtcaaagttccagtgagatttcagaccattcgtttggagatattccagccagccaaacaaataagccatctcttcagttaattttggatccgtctaacacagaaatttctacacccagaccatcttctccaggtggactacctgaagaagatagtgttttatttaataaactgacctacttaggatgtatgaaggtttcttcc

SEQ ID NO: 1362 - protein, 85 aa, Homosapiens
MEEILRDSEKRPSSLLVDCQSSSEISDHSFGDIPASQTNKPSLQLILDPSNTEISTPRPSSPGGLPEEDSVLFNKLTYLGCMKVS

SEQ ID NO: 1363 - DNA, 1813 bp, Homosapiens
gctggcttttttagtgagagtcaagagctggcttggtaaagtcttaaagaatggagaagaggaggaaggagagaagggaagaaagagggagaatccatgggaaagagctatgatgggagagcttatgtcatcactggcatgtggaaccccaatgcaccagtatttctggcacttaacgaggaaaccccaaaagataagcaagtatacatgactgtggcagtggatatggtagtcacagaggtggtggagcctgttcgctttctcctggagacagtagtccgtgtgtaccctgcaaatgagcgattttggtatttcagcagaaagactttcacagagactttcttcatgagattgaaacagtctgagggaaaaggccataccaatgctggagatgcaatatatgaggtggtgagtctacagcgagagtctgacaaggaggaaccagtcactcctactagtggagggggtccaatgtcaccccaggatgatgaagcagaagaggagagtgataatgaactctcaagtggaacaggtgatgtgtctaaggattgtcctgagaagatcctgtattcttggggagagttgctaggaaaatggcacagtaaccttggtgcacgaccgaaagggctgtctactctggtgaagagtggtgtccctgaagcattgagggcagaggtatggcagttattggcaggctgccatgacaaccaggcaatgctggatagataccgaattcttatcacaaaggtctgttggagtttgctggaggtccactccagaccctgtttgcctgggtatcaccagtggaagctgcagaacagcaaatattgcagaatggcaaatgttgctgcctgatccttcctctggaagcttcatctcagaagggcacctggctgtatgaggtgtcggttggcccctcctgggaggtgtctcccaattagactactcaggtgtcagggacccacttgaggaggcagtctgtccattctcaggtcccaaactacatgctgggagaaccactactctcttcaaagctgtcagacagggacatttaagtctgcagaagtttctgctgccgtttgttcaactatgccctgcccccagtactggagtccaggaaggcaggcaggcctccttgagctttggtgggctccacccagttcagtcttcccggctgctttgtttacctactcaagcttcagcaatggcggatgcccctccctcagccttgctgacacttgcggcttgatctcagactgctgtgttagcagtgagtgaggctccgtgggtgtgggactctccgagccaggtgcgggatataatctcctggtgttccgtttgctaagaccattggaaaagcgcagtattagggtgggagggtcccgattttccaggtactatctgtcatggcttcccttggctaggaaagggaattccccaaccccttgcacttcccaggtgagcaatgccccacgctgctccttgggctgcacccactgtgtgacaagccccagtgagatgaacccggtacctctgttggaaatgcagaaatcacctgtcttctgcgtcgctcacgctgggagctgtagactggagctgttcctttttggccatcttggaacctcggttcaaacctgagttgtaatactcactcttcctgttgctgcctatgtaattttgtagaagttacctaattgcttccaagcttctgttggattttttgagaactgaatgacatagtacattttgaatgcttaatgtattgctttgtgcatggtattatttaataaatattagctttggttatacttgc

SEQ ID NO: 1364 - protein, 252 aa, Homosapiens
MGKSYDGRAYVITGMWNPNAPVFLALNEETPKDKQVYMTVAVDMVVTEVVEPVRFLLETVVRVYPANERFWYFSRKTFTETFFMRLKQSEGKGHTNAGDAIYEVVSLQRESDKEEPVTPTSGGGPMSPQDDEAEEESDNELSSGTGDVSKDCPEKILYSWGELLGKWHSNLGARPKGLSTLVKSGVPEALRAEVWQLLAGCHDNQAMLDRYRILITKVCWSLLEVHSRPCLPGYHQWKLQNSKYCRMANVAA

SEQ ID NO: 1365 - DNA, 707 bp, Homosapiens
gtagcagatggcttttaataaaacatttagctaaagaagaatttttactctgggttggtggaatgtattataatgataatattggaattcagcatgtattaaaaaataatcaaagactgtaagattacagcttttggcccaaattcagaccacagacatctttcatttggccatgtggtattttttgtttgtttgttttctgagatggtcttgctctgtcacccaggctggagtgcagtggcgtgatctcagctcacttcaacctccacctcccaggctcaagtgcctcccacctcagcctcccaagtagctgggactacaggcatacaccaccatgcctggctgatatttctattttttatagagacaaggttttgccacatggcaaggctggtctcaaactcctgagcccaagcaatccactcgcctcagcctcccaaagtgctgggattgcaggcatgagccaccatgcctggcccccatctggtgttttaaacaatgtgaaattttacataaaaagtaaaacaatcaaaattactcagaagtgctcacttcaacagcacatacactaaaactgtaatctacagagaagactgttgtgtcccctgcacaagaataacacacaaattcattaagcattccatattttgcacagtccccagaaggtcatttatctgctgacaagcccgaagggaacagtatgagtc

SEQ ID NO: 1366 - protein, 45 aa, Homosapiens
MWYFLFVCFLRWSCSVTQAGVQWRDLSSLQPPPPRLKCLPPQPPK

SEQ ID NO: 1367 - DNA, 1089 bp, Homosapiens
catgaatgaatccaggtggactgaatggaggatcctgaacatgagcagtggcattgtgaatgtgtccgagcgtcactcctgcccacttggatttggccactacagtgtggtggatgtctgcatcttcgagacagtggttattgtgttgctgacatttctgatcattgctgggaatctaacagttatctttgtctttcattgtgctccactgttacatcattatactaccagctatttcattcagacgatggcatatgctgatcttttcgttggagttagctgcttggttcctactctgtcacttctccactactccacaggtgtccacgagtcattgacttgccaggtttttggatatatcatctcagttctaaaaagtgtttctatggcatgtcttgcttgcatcagtgtggatcgttatcttgcaataaccaagcctctttcctacaatcaactggtcaccccttgtcgcttgagaatttgcattattttgatctggatctactcctgcctaattttcttgccttccttttttggctgggggaaacctggttaccatggtgacatttttgaatggtgtgccacgtcttggctcaccagtgcctattttactggctttattgtttgtttactttatgctcctgctgcctttgttgtctgcttcacttacttccacattttcaaaatttgccgtcagcacaccaaagagataaatgaccgaagagcccgattccctagtcatgaggtagattcttccagagagactggacacagccctgaccgtcgctacgccatggttttgtttaggataaccagtgtattttatatgctgtggctcccctatataatttactttcttctagaaagctcccgggtcttggacaatccaactctgtccttcttaacaacctggcttgcaataagtaatagtttttgtaactgtgtaatatacagcctctccaacagcgttttccggctaggcctccgaagactgtctgagacaatgtgcacatcctgtatgtgtgtgaaggatcaggaagcacaagaacccaaacctaggaaacgggctaattcttgctccatttgaag

SEQ ID NO: 1368 - protein, 361 aa, Homosapiens
MNESRWTEWRILNMSSGIVNVSERHSCPLGFGHYSVVDVCIFETVVIVLLTFLIIAGNLTVIFVFHCAPLLHHYTTSYFIQTMAYADLFVGVSCLVPTLSLLHYSTGVHESLTCQVFGYIISVLKSVSMACLACISVDRYLAITKPLSYNQLVTPCRLRICIILIWIYSCLIFLPSFFGWGKPGYHGDIFEWCATSWLTSAYFTGFIVCLLYAPAAFVVCFTYFHIFKICRQHTKEINDRRARFPSHEVDSSRETGHSPDRRYAMVLFRITSVFYMLWLPYIIYFLLESSRVLDNPTLSFLTTWLAISNSFCNCVIYSLSNSVFRLGLRRLSETMCTSCMCVKDQEAQEPKPRKRANSCSI

SEQ ID NO: 1369 - DNA, 6780 bp, Homosapiens
gagggaagtgaagccagtaggagactgagagattagaagaacagggcagtagaggatgaatttgcagtgaggttaaaggaacaatttattgggagaagggaatgtaggagggtagaagactttaaaattgaaaagaaataaaaggaggcagggatgtaaaacgagccataagtacaatgacaaatgggcattaaggaggaaaaagactatgtagaagaatctggtaaatatggatattaacagcaataagctcctttttaacgatttaattctaccaagtaaatatttgggattactcgctttttgccttttatttaccaaaaaattcatatattttcaaaggaacagctaccggacctgcatagccatttttctgatctgaacctggaagctcatatgtatgcatcccagtggtttctcactctttttactgccaagttcccactctgcatggtgttccacatcattgacttactgctttgtgagggtttgaacataatctttcatgtagctttggctctcctaaagacctcaaaggaagaccttctgcaggctgattttgaaggtgctttaaagttctttagagttcagcttccaaagagatacagggcagaggaaaatgcaagaagactgatggagcaggcttgcaatattaaagtaccaaccaagaagctgaagaaatatgagaaagaatatcagacaatgcgagagagtcagctgcaacaggaagacccaatggatagatacaagagggagaaccgaagattacaggaggccagcatgaggttggaacaagagaatgatgaccttgcccatgaactagtaacaagcaaaattgctctacggaatgacttggatcaggcagaagacaaggcagatgtgttgaataaagagctccttttgaccaaacagaggctggtggagactgaagaggagaagaggaagcaagaggaagagactgcccagctaaaagaagtcttcaggaaacagctagagaaggcagaatatgaaataaagaagactacagctatcattgctgagtataaacagatctgttcgcagttgagtaccaggctggagaaacagcaagcagccagcaaggaggagctggaagtggtaaagggtaagatgatggcatgcaaacactgcagtgacattttcagcaaggagggtgctttgaaactagcagccacaggcagagaggaccagggaattgaaacagatgatgagaaggactcacttaagaagcagctgagagagatggaactggaactggcacaaaccaaactgcagttggtggaggccaagtgtaaaattcaggaacttgaacatcagagaggagcccttatgaatgaaatccaagctgcgaaaaactcttggtttagcaaaaccctgaactctatcaaaacggccacgggcacccagccattgcagccagcaccggtcacccagccacccaaggagagcacatagttccagccttacccaagcacaagagcacaatgttcaaaccaatggaaatctgggaggattcttcctggtgtccctttgaaggaaagtcaaggaggccagaaaacaagccagaatttttcagtagctctcactctttcttgtatgacacttttcaaagggatgctatttaaactgacctgttctatgttgaatacctattttccagcttctggaaggccatgttcagatccatcatagtattacacattattttgtttgcctgatgtttagttggaaataagtaattcagaactaaatgcttttttatttagaattattcataattatttttatcttacataaaaatggagacatctgttattccaaggttgaagtgataagaagatctttgtcacaggaaaaaaaaaattgaaacctaaacatcttaagttttcaggatttattcagataaagcacactgtggggccaggcatgaccactctcaggtttcctcctgagcctgattcccagggaagtgttaatcctgtccaaaggaaagaaccaatcagcgatcattggtttactttcattttctgttcggtacatctggaaatgaagtgccaggaatagacgggctgttcagattatacgctaggtaaaaggaactgaaattttaataagtgtaggtcaggatcatttgggctgtggtattctaacagatccttttaagaatgccacataggacttgtgagttcctaagtacaccaaagtatggacacagatgtgacttctggcaattataaagttaaaggtggatattgcaccttacagacttagggagcctttaccagagacgcctaaaaagccccaggttcagccattgtgctgaatagagtggaatatagaaccagggacagagtatttcatttaacgttgatatatacttgctaaggaaacactaacaatactgtaactttgttaaaggacatagtattgaaatgggaaatagaggtcaggctcacatcatcttagtttaatgctgggcaactttttctgatttctgtagttccctgaaaatgtgtccttcgtacccataaagagatacaaatgcatttgtaacatttttgattgaatataaaacctttacagaaatacttatctcatggaaaggtaaagctattgtttaaaaattagtggaaatattttttcaattatatttaacatgcctataaaaatagtccttgcaggaaattatttgataagagcaaaactatttttattttataaactattttggaggcctctgatcctttcaaaccaaccaaactactattagatatgtacaataacatttgttgatattaatcattggcctcattgttgaacatattatttgcaaagaatcttaaactctgtagtgccagaatgattctcatctgtgccatattttgcaattaaaagtaacacacccttagaagaatcaaataagagccatctacatcccaggaggatgcaccaagttgctcacagtggatcttttcctctaaaatgatcttttatgttctaaaaagtgaaatcccctttatctgtgtttatattctctacagcccataaaactgatgtgattgttatgttatactcatcagataatacttttcttacataaatctttcattgttgttctgacatctttcattacaaaatttattttcttaacaaaaaggaacataacccagcattccaagtgtctgtgttggctttaacattctctacatggtggtctagataagctaatttttttttttttttttttgtaaaatgtaatagctagaaaatgttatcttggcgcttgtttttgtaaatcatttagtataggctgttagctttactggtactttacgctttgattccaagaagccttgtgcagttgccttatcaaatggccagctaaattaaagatgctcttttgtgttgtgaatttcatagttctgtacagagcttgtttcaatttacaaaaataagtacattccacagaatgcctaaagtgtgtaattttctttaaataatagtaggtgagggagaaacataatggctctaggtcaatcccttatctaaagaccttgttcaacttcatagtccctttccttttaaagaggagaagagaaaaatcccccctggccaggcatggtggctcacatctgtaatcccagcactttgggaggctgaggtgggtggatcacctaaggtcaggagtttgagaccagcctggccaacatggtgaaaccctatctctactgcaaaatacaaaaattagccgggcttggtggcgggtgcctgtaatcccagctactcgggaggttgaggcaggagaatcacttgaacccaggaggcagaggttgcagtgggccaagattacggcattacattccatccagcctgggcgacaagagcaaaattccgtctcgaaaaatcaccaggtacatacctctcaagtttgataagtccatcttttgagttttcttttagctctttcaaaagattacgagggcaatacatattttttttttttttattctccagccccatatcatacttgggtatgcctgttggtaccataagcctaaactctccttcactgcaatgcctttgagtcagtagcaatagtaaagactagaaacaaagaaaattcagaatttggtatgtgatatgattgttcatacaatatgttataatagcaatattccaaacaatatgtccttcactgtctattgttggaaaactcatgcatcccagcatgaagtaactcctagttttaattttagttattttgagatatatttgagaattgcatctcttctcttgaatttcacttagaagagattaaccagccaaatatccaggaaagtttcaaaacattctagtgtttttcatcctttgctaggatgcactctgtacaaaacattcctctgaaaatctaatatttgcagtatctaagaattgatcatttctattttcattaaattctgtggaaaaaattaaatgaatgaaattcaacttcataattcagttcatcagcttttgtatcttgagaatctaaacacgtctttaaatctgaaagaaaccaagctggattttgcagtgcatatgtttgctagcttcccacatcctgaaccatgtcaaaatttggttttatttagttacatataatttaatgcaaagaaattctgttacttaatgttctgtttatttatgagtgcctatcaggaacactaataggaatgccattcaaccagtgtcttctgcccctctcccagctgttaaattagtacttcttcattggctttctgaaatgtcctgagtaaagtagaaaagcaacctttgtatggatgtggggatatttaatagtatgtatcttgtttcatttttttcctatgatgtattaatatttatttttctccaacccctgctccattttcttaaaatattttccagttaataactagttgctttatttcctagctgaagtgagaaaaccaacggaaaacaatacagatttgggcagaggagatagagttacatctttaaaggagtgagccagtcacccaggagaatcacatgtgtaactgatgtaggggtttaagtcttcatactttcactaaaatctgtctactaactctcccaccaacctttgcatcaaacacttaggtacctgcctgattaggggggcccctttaagggaaaaaacttttaaaaaattaaatgccttggttttgttttatcttctgggaaagaacacttttacttgattagcaagatgattatattatataacttgcccttaaaaacactccaaaatactgactccttttctccaattacaaatgagtgtgaagaaattctgttgtatgatttgaacactattaggtttgtatgtgtgtttaattggaagaattttatatagagtatctctgctgcttttgtttacctgggtaccacacaaccaaatacacattgagatttcaagaaatgatgatgaaagccagaaggccagaccacagctctgcagcctgtttcctacaaccagatataaaactctttctcgtcgccatgctgatagtcacactgaactagaactgtcccaacacattcttcctctctcataatggcttccatttaatacaggcaaagccctttaccttagcaaattctttatctttcaaaagtgaccaaaatgaggacttcaaccttggctgcacctcaataggagatgctgatcttgagttgtaatgagaaaagtgggcatataggagattttagtgactgcagtcagctgtctggcattcctttctcagtttgcatctaaaagactacatatgtcaagcttatctccacctgaatttgctgcctgctataaaaacatttcattaatatatcccattcttcctacctccatctctggtttgtcattagtggtattctgaaaagcttaagaaaaaagaatcattgagtagaaagtgaacattttaagttattttcctttttcattggcaattagttaacatgtaaaatcttttccattaaactgtataacttttaataactatatattatatatgggataaaatatatggactgaattgtgagaatataaatgcatcgaaagactctggtgtcatgaaagcacaagaataaggctggagatggtcccagatccaagatgtcccaaaagccttttgtatcagtttctctatttttggtattttgcataatgcatggatccttagttcaaatgagggacaaagtttctcagtcagccccacttcctttctttctaactcctacctttcccttgcagaggaggtagtagagattctggaattgtctatttttatgaattccattattttgtccatggcatctctaatgaaaacaggttctagaataaaggagttgattagtctgaacagtactaattaactacaaaataaacgttagtgatcagcctcttcctctataaacaatgaccaattagacgtttccgtaattccatgtattatgtatagtacactctataaatgtaaatgtaatgcttgtctaaaaagtgcaatttattgtacattgtcccaacaaatgtttacttttataatcgttatgaacttgaattggattagtatcttgtttttatgtgtgaatgaagccttgtgaaataaacaaatgcaactgagaaggtaacaaggtgactgtttttgtgagccagtgatgttttcaatgctttgtgttgcccctttggccccattaagcagtaataaacatttgttctgaagtcca

SEQ ID NO: 1370 - protein, 358 aa, Homosapiens
MYASQWFLTLFTAKFPLCMVFHIIDLLLCEGLNIIFHVALALLKTSKEDLLQADFEGALKFFRVQLPKRYRAEENARRLMEQACNIKVPTKKLKKYEKEYQTMRESQLQQEDPMDRYKRENRRLQEASMRLEQENDDLAHELVTSKIALRNDLDQAEDKADVLNKELLLTKQRLVETEEEKRKQEEETAQLKEVFRKQLEKAEYEIKKTTAIIAEYKQICSQLSTRLEKQQAASKEELEVVKGKMMACKHCSDIFSKEGALKLAATGREDQGIETDDEKDSLKKQLREMELELAQTKLQLVEAKCKIQELEHQRGALMNEIQAAKNSWFSKTLNSIKTATGTQPLQPAPVTQPPKEST

SEQ ID NO: 1371 - DNA, 7070 bp, Homosapiens
tatgtagaagaatctggtaaatatggatattaacagcaataagctcctttttaacgatttaattctaccaagtaaatatttgggattactcgctttttgccttttatttaccaaaaaattcatatattttcaaaggaacagctaccggacctgcatagccatttttctgatctgaacctggaagctcatatgtatgcatcccagtggtttctcactctttttactgccaagttcccactctgcatggtgttccacatcattgacttactgctttgtgagggtttgaacataatctttcatgtagctttggctctcctaaagacctcaaaggaagaccttctgcaggctgattttgaaggtgctttaaagttctttagagttcagcttccaaagagatacagggcagaggaaaatgcaagaagactgatggagcaggcttgcaatattaaagtgggtgtgtacactggcactgagctgcagtaggatttttccttggatagtctggtctggagctgggacagcagctgctgctgtggaaaggccagctggcaagatgatggaagaaatctccattatggtagcctatgacgcccatgttttcagccagctgcacgatgaagacttcctcactagtctggtggccatcagcaagcccaggtctatggtaccaaccaagaagctgaagaaatatgagaaagaatatcagacaatgcgagagagtcagctgcaacaggaagacccaatggatagatacaagtttgtatatttgtaggtaactccagctgttgcatttatactgggaatcttcataagaagctgagagaaagagaggggaaaaagaaagtggctttctactttcaaaaatgaaacaaaaaggaaaaatggcaaagtactgttttagctgtgcatgtcatatccacaaagacttttagcaggtgaactgttccaagactgacacaaggatgtttcaaacttgcctctgtctgtagaaaatgttaaaaataccaactcacttggaaggaaaaataaaaatcacaaagagggagaaccgaagattacaggaggccagcatgaggttggaacaagagaatgatgaccttgcccatgaactagtaacaagcaaaattgctctacggaatgacttggatcaggcagaagacaaggcagatgtgttgaataaagagctccttttgaccaaacagaggctggtggagactgaagaggagaagaggaagcaagaggaagagactgcccagctaaaagaagtcttcaggaaacagctagagaaggcagaatatgaaataaagaagactacagctatcattgctgagtataaacagatctgttcgcagttgagtaccaggctggagaaacagcaagcagccagcaaggaggagctggaagtggtaaagggtaagatgatggcatgcaaacactgcagtgacattttcagcaaggagggtgctttgaaactagcagccacaggcagagaggaccagggaattgaaacagatgatgagaaggactcacttaagaagcagctgagagagatggaactggaactggcacaaaccaaactgcagttggtggaggccaagtgtaaaattcaggaacttgaacatcagagaggagcccttatgaatgaaatccaagctgcgaaaaactcttggtttagcaaaaccctgaactctatcaaaacggccacgggcacccagccattgcagccagcaccggtcacccagccacccaaggagagcacatagttccagccttacccaagcacaagagcacaatgttcaaaccaatggaaatctgggaggattcttcctggtgtccctttgaaggaaagtcaaggaggccagaaaacaagccagaatttttcagtagctctcactctttcttgtatgacacttttcaaagggatgctatttaaactgacctgttctatgttgaatacctattttccagcttctggaaggccatgttcagatccatcatagtattacacattattttgtttgcctgatgtttagttggaaataagtaattcagaactaaatgcttttttatttagaattattcataattatttttatcttacataaaaatggagacatctgttattccaaggttgaagtgataagaagatctttgtcacaggaaaaaaaaaattgaaacctaaacatcttaagttttcaggatttattcagataaagcacactgtggggccaggcatgaccactctcaggtttcctcctgagcctgattcccagggaagtgttaatcctgtccaaaggaaagaaccaatcagcgatcattggtttactttcattttctgttcggtacatctggaaatgaagtgccaggaatagacgggctgttcagattatacgctaggtaaaaggaactgaaattttaataagtgtaggtcaggatcatttgggctgtggtattctaacagatccttttaagaatgccacataggacttgtgagttcctaagtacaccaaagtatggacacagatgtgacttctggcaattataaagttaaaggtggatattgcaccttacagacttagggagcctttaccagagacgcctaaaaagccccaggttcagccattgtgctgaatagagtggaatatagaaccagggacagagtatttcatttaacgttgatatatacttgctaaggaaacactaacaatactgtaactttgttaaaggacatagtattgaaatgggaaatagaggtcaggctcacatcatcttagtttaatgctgggcaactttttctgatttctgtagttccctgaaaatgtgtccttcgtacccataaagagatacaaatgcatttgtaacatttttgattgaatataaaacctttacagaaatacttatctcatggaaaggtaaagctattgtttaaaaattagtggaaatattttttcaattatatttaacatgcctataaaaatagtccttgcaggaaattatttgataagagcaaaactatttttattttataaactattttggaggcctctgatcctttcaaaccaaccaaactactattagatatgtacaataacatttgttgatattaatcattggcctcattgttgaacatattatttgcaaagaatcttaaactctgtagtgccagaatgattctcatctgtgccatattttgcaattaaaagtaacacacccttagaagaatcaaataagagccatctacatcccaggaggatgcaccaagttgctcacagtggatcttttcctctaaaatgatcttttatgttctaaaaagtgaaatcccctttatctgtgtttatattctctacagcccataaaactgatgtgattgttatgttatactcatcagataatacttttcttacataaatctttcattgttgttctgacatctttcattacaaaatttattttcttaacaaaaaggaacataacccagcattccaagtgtctgtgttggctttaacattctctacatggtggtctagataagctaatttttttttttttttttttgtaaaatgtaatagctagaaaatgttatcttggcgcttgtttttgtaaatcatttagtataggctgttagctttactggtactttacgctttgattccaagaagccttgtgcagttgccttatcaaatggccagctaaattaaagatgctcttttgtgttgtgaatttcatagttctgtacagagcttgtttcaatttacaaaaataagtacattccacagaatgcctaaagtgtgtaattttctttaaataatagtaggtgagggagaaacataatggctctaggtcaatcccttatctaaagaccttgttcaacttcatagtccctttccttttaaagaggagaagagaaaaatcccccctggccaggcatggtggctcacatctgtaatcccagcactttgggaggctgaggtgggtggatcacctaaggtcaggagtttgagaccagcctggccaacatggtgaaaccctatctctactgcaaaatacaaaaattagccgggcttggtggcgggtgcctgtaatcccagctactcgggaggttgaggcaggagaatcacttgaacccaggaggcagaggttgcagtgggccaagattacggcattacattccatccagcctgggcgacaagagcaaaattccgtctcgaaaaatcaccaggtacatacctctcaagtttgataagtccatcttttgagttttcttttagctctttcaaaagattacgagggcaatacatattttttttttttttattctccagccccatatcatacttgggtatgcctgttggtaccataagcctaaactctccttcactgcaatgcctttgagtcagtagcaatagtaaagactagaaacaaagaaaattcagaatttggtatgtgatatgattgttcatacaatatgttataatagcaatattccaaacaatatgtccttcactgtctattgttggaaaactcatgcatcccagcatgaagtaactcctagttttaattttagttattttgagatatatttgagaattgcatctcttctcttgaatttcacttagaagagattaaccagccaaatatccaggaaagtttcaaaacattctagtgtttttcatcctttgctaggatgcactctgtacaaaacattcctctgaaaatctaatatttgcagtatctaagaattgatcatttctattttcattaaattctgtggaaaaaattaaatgaatgaaattcaacttcataattcagttcatcagcttttgtatcttgagaatctaaacacgtctttaaatctgaaagaaaccaagctggattttgcagtgcatatgtttgctagcttcccacatcctgaaccatgtcaaaatttggttttatttagttacatataatttaatgcaaagaaattctgttacttaatgttctgtttatttatgagtgcctatcaggaacactaataggaatgccattcaaccagtgtcttctgcccctctcccagctgttaaattagtacttcttcattggctttctgaaatgtcctgagtaaagtagaaaagcaacctttgtatggatgtggggatatttaatagtatgtatcttgtttcatttttttcctatgatgtattaatatttatttttctccaacccctgctccattttcttaaaatattttccagttaataactagttgctttatttcctagctgaagtgagaaaaccaacggaaaacaatacagatttgggcagaggagatagagttacatctttaaaggagtgagccagtcacccaggagaatcacatgtgtaactgatgtaggggtttaagtcttcatactttcactaaaatctgtctactaactctcccaccaacctttgcatcaaacacttaggtacctgcctgattaggggggcccctttaagggaaaaaacttttaaaaaattaaatgccttggttttgttttatcttctgggaaagaacacttttacttgattagcaagatgattatattatataacttgcccttaaaaacactccaaaatactgactccttttctccaattacaaatgagtgtgaagaaattctgttgtatgatttgaacactattaggtttgtatgtgtgtttaattggaagaattttatatagagtatctctgctgcttttgtttacctgggtaccacacaaccaaatacacattgagatttcaagaaatgatgatgaaagccagaaggccagaccacagctctgcagcctgtttcctacaaccagatataaaactctttctcgtcgccatgctgatagtcacactgaactagaactgtcccaacacattcttcctctctcataatggcttccatttaatacaggcaaagccctttaccttagcaaattctttatctttcaaaagtgaccaaaatgaggacttcaaccttggctgcacctcaataggagatgctgatcttgagttgtaatgagaaaagtgggcatataggagattttagtgactgcagtcagctgtctggcattcctttctcagtttgcatctaaaagactacatatgtcaagcttatctccacctgaatttgctgcctgctataaaaacatttcattaatatatcccattcttcctacctccatctctggtttgtcattagtggtattctgaaaagcttaagaaaaaagaatcattgagtagaaagtgaacattttaagttattttcctttttcattggcaattagttaacatgtaaaatcttttccattaaactgtataacttttaataactatatattatatatgggataaaatatatggactgaattgtgagaatataaatgcatcgaaagactctggtgtcatgaaagcacaagaataaggctggagatggtcccagatccaagatgtcccaaaagccttttgtatcagtttctctatttttggtattttgcataatgcatggatccttagttcaaatgagggacaaagtttctcagtcagccccacttcctttctttctaactcctacctttcccttgcagaggaggtagtagagattctggaattgtctatttttatgaattccattattttgtccatggcatctctaatgaaaacaggttctagaataaaggagttgattagtctgaacagtactaattaactacaaaataaacgttagtgatcagcctcttcctctataaacaatgaccaattagacgtttccgtaattccatgtattatgtatagtacactctataaatgtaaatgtaatgcttgtctaaaaagtgcaatttattgtacattgtcccaacaaatgtttacttttataatcgttatgaacttgaattggattagtatcttgtttttatgtgtgaatgaagccttgtgaaataaacaaatgcaactgagaaggtaacaaggtgactgtttttgtgagccagtgatgttttcaatgctttgtgttgcccctttggccccattaagcagtaataaacatttgttctgaagtcca

SEQ ID NO: 1372 - protein, 256 aa, Homosapiens
MLKIPTHLEGKIKITKRENRRLQEASMRLEQENDDLAHELVTSKIALRNDLDQAEDKADVLNKELLLTKQRLVETEEEKRKQEEETAQLKEVFRKQLEKAEYEIKKTTAIIAEYKQICSQLSTRLEKQQAASKEELEVVKGKMMACKHCSDIFSKEGALKLAATGREDQGIETDDEKDSLKKQLREMELELAQTKLQLVEAKCKIQELEHQRGALMNEIQAAKNSWFSKTLNSIKTATGTQPLQPAPVTQPPKEST

SEQ ID NO: 1373 - DNA, 6564 bp, Homosapiens
gggcacatttggctatttttcaaagagagcatgtagttcaagaaatggcttattttgttttttattcttctttttgtggtctatttaggaaaacaaaatgaaggtggcctttgtctttcagttatggaacagctaccggacctgcatagccatttttctgatctgaacctggaagctcatatgtatgcatcccagtggtttctcactctttttactgccaagttcccactctgcatggtgttccacatcattgacttactgctttgtgagggtttgaacataatctttcatgtagctttggctctcctaaagacctcaaaggaagaccttctgcaggctgattttgaaggtgctttaaagttctttagagttcagcttccaaagagatacagggcagaggaaaatgcaagaagactgatggagcaggcttgcaatattaaagtaccaaccaagaagctgaagaaatatgagaaagaatatcagacaatgcgagagagtcagctgcaacaggaagacccaatggatagatacaagagggagaaccgaagattacaggaggccagcatgaggttggaacaagagaatgatgaccttgcccatgaactagtaacaagcaaaattgctctacggaatgacttggatcaggcagaagacaaggcagatgtgttgaataaagagctccttttgaccaaacagaggctggtggagactgaagaggagaagaggaagcaagaggaagagactgcccagctaaaagaagtcttcaggaaacagctagagaaggcagaatatgaaataaagaagactacagctatcattgctgagtataaacagatctgttcgcagttgagtaccaggctggagaaacagcaagcagccagcaaggaggagctggaagtggtaaagggtaagatgatggcatgcaaacactgcagtgacattttcagcaaggagggtgctttgaaactagcagccacaggcagagaggaccagggaattgaaacagatgatgagaaggactcacttaagaagcagctgagagagatggaactggaactggcacaaaccaaactgcagttggtggaggccaagtgtaaaattcaggaacttgaacatcagagaggagcccttatgaatgaaatccaagctgcgaaaaactcttggtttagcaaaaccctgaactctatcaaaacggccacgggcacccagccattgcagccagcaccggtcacccagccacccaaggagagcacatagttccagccttacccaagcacaagagcacaatgttcaaaccaatggaaatctgggaggattcttcctggtgtccctttgaaggaaagtcaaggaggccagaaaacaagccagaatttttcagtagctctcactctttcttgtatgacacttttcaaagggatgctatttaaactgacctgttctatgttgaatacctattttccagcttctggaaggccatgttcagatccatcatagtattacacattattttgtttgcctgatgtttagttggaaataagtaattcagaactaaatgcttttttatttagaattattcataattatttttatcttacataaaaatggagacatctgttattccaaggttgaagtgataagaagatctttgtcacaggaaaaaaaaaattgaaacctaaacatcttaagttttcaggatttattcagataaagcacactgtggggccaggcatgaccactctcaggtttcctcctgagcctgattcccagggaagtgttaatcctgtccaaaggaaagaaccaatcagcgatcattggtttactttcattttctgttcggtacatctggaaatgaagtgccaggaatagacgggctgttcagattatacgctaggtaaaaggaactgaaattttaataagtgtaggtcaggatcatttgggctgtggtattctaacagatccttttaagaatgccacataggacttgtgagttcctaagtacaccaaagtatggacacagatgtgacttctggcaattataaagttaaaggtggatattgcaccttacagacttagggagcctttaccagagacgcctaaaaagccccaggttcagccattgtgctgaatagagtggaatatagaaccagggacagagtatttcatttaacgttgatatatacttgctaaggaaacactaacaatactgtaactttgttaaaggacatagtattgaaatgggaaatagaggtcaggctcacatcatcttagtttaatgctgggcaactttttctgatttctgtagttccctgaaaatgtgtccttcgtacccataaagagatacaaatgcatttgtaacatttttgattgaatataaaacctttacagaaatacttatctcatggaaaggtaaagctattgtttaaaaattagtggaaatattttttcaattatatttaacatgcctataaaaatagtccttgcaggaaattatttgataagagcaaaactatttttattttataaactattttggaggcctctgatcctttcaaaccaaccaaactactattagatatgtacaataacatttgttgatattaatcattggcctcattgttgaacatattatttgcaaagaatcttaaactctgtagtgccagaatgattctcatctgtgccatattttgcaattaaaagtaacacacccttagaagaatcaaataagagccatctacatcccaggaggatgcaccaagttgctcacagtggatcttttcctctaaaatgatcttttatgttctaaaaagtgaaatcccctttatctgtgtttatattctctacagcccataaaactgatgtgattgttatgttatactcatcagataatacttttcttacataaatctttcattgttgttctgacatctttcattacaaaatttattttcttaacaaaaaggaacataacccagcattccaagtgtctgtgttggctttaacattctctacatggtggtctagataagctaatttttttttttttttttttgtaaaatgtaatagctagaaaatgttatcttggcgcttgtttttgtaaatcatttagtataggctgttagctttactggtactttacgctttgattccaagaagccttgtgcagttgccttatcaaatggccagctaaattaaagatgctcttttgtgttgtgaatttcatagttctgtacagagcttgtttcaatttacaaaaataagtacattccacagaatgcctaaagtgtgtaattttctttaaataatagtaggtgagggagaaacataatggctctaggtcaatcccttatctaaagaccttgttcaacttcatagtccctttccttttaaagaggagaagagaaaaatcccccctggccaggcatggtggctcacatctgtaatcccagcactttgggaggctgaggtgggtggatcacctaaggtcaggagtttgagaccagcctggccaacatggtgaaaccctatctctactgcaaaatacaaaaattagccgggcttggtggcgggtgcctgtaatcccagctactcgggaggttgaggcaggagaatcacttgaacccaggaggcagaggttgcagtgggccaagattacggcattacattccatccagcctgggcgacaagagcaaaattccgtctcgaaaaatcaccaggtacatacctctcaagtttgataagtccatcttttgagttttcttttagctctttcaaaagattacgagggcaatacatattttttttttttttattctccagccccatatcatacttgggtatgcctgttggtaccataagcctaaactctccttcactgcaatgcctttgagtcagtagcaatagtaaagactagaaacaaagaaaattcagaatttggtatgtgatatgattgttcatacaatatgttataatagcaatattccaaacaatatgtccttcactgtctattgttggaaaactcatgcatcccagcatgaagtaactcctagttttaattttagttattttgagatatatttgagaattgcatctcttctcttgaatttcacttagaagagattaaccagccaaatatccaggaaagtttcaaaacattctagtgtttttcatcctttgctaggatgcactctgtacaaaacattcctctgaaaatctaatatttgcagtatctaagaattgatcatttctattttcattaaattctgtggaaaaaattaaatgaatgaaattcaacttcataattcagttcatcagcttttgtatcttgagaatctaaacacgtctttaaatctgaaagaaaccaagctggattttgcagtgcatatgtttgctagcttcccacatcctgaaccatgtcaaaatttggttttatttagttacatataatttaatgcaaagaaattctgttacttaatgttctgtttatttatgagtgcctatcaggaacactaataggaatgccattcaaccagtgtcttctgcccctctcccagctgttaaattagtacttcttcattggctttctgaaatgtcctgagtaaagtagaaaagcaacctttgtatggatgtggggatatttaatagtatgtatcttgtttcatttttttcctatgatgtattaatatttatttttctccaacccctgctccattttcttaaaatattttccagttaataactagttgctttatttcctagctgaagtgagaaaaccaacggaaaacaatacagatttgggcagaggagatagagttacatctttaaaggagtgagccagtcacccaggagaatcacatgtgtaactgatgtaggggtttaagtcttcatactttcactaaaatctgtctactaactctcccaccaacctttgcatcaaacacttaggtacctgcctgattaggggggcccctttaagggaaaaaacttttaaaaaattaaatgccttggttttgttttatcttctgggaaagaacacttttacttgattagcaagatgattatattatataacttgcccttaaaaacactccaaaatactgactccttttctccaattacaaatgagtgtgaagaaattctgttgtatgatttgaacactattaggtttgtatgtgtgtttaattggaagaattttatatagagtatctctgctgcttttgtttacctgggtaccacacaaccaaatacacattgagatttcaagaaatgatgatgaaagccagaaggccagaccacagctctgcagcctgtttcctacaaccagatataaaactctttctcgtcgccatgctgatagtcacactgaactagaactgtcccaacacattcttcctctctcataatggcttccatttaatacaggcaaagccctttaccttagcaaattctttatctttcaaaagtgaccaaaatgaggacttcaaccttggctgcacctcaataggagatgctgatcttgagttgtaatgagaaaagtgggcatataggagattttagtgactgcagtcagctgtctggcattcctttctcagtttgcatctaaaagactacatatgtcaagcttatctccacctgaatttgctgcctgctataaaaacatttcattaatatatcccattcttcctacctccatctctggtttgtcattagtggtattctgaaaagcttaagaaaaaagaatcattgagtagaaagtgaacattttaagttattttcctttttcattggcaattagttaacatgtaaaatcttttccattaaactgtataacttttaataactatatattatatatgggataaaatatatggactgaattgtgagaatataaatgcatcgaaagactctggtgtcatgaaagcacaagaataaggctggagatggtcccagatccaagatgtcccaaaagccttttgtatcagtttctctatttttggtattttgcataatgcatggatccttagttcaaatgagggacaaagtttctcagtcagccccacttcctttctttctaactcctacctttcccttgcagaggaggtagtagagattctggaattgtctatttttatgaattccattattttgtccatggcatctctaatgaaaacaggttctagaataaaggagttgattagtctgaacagtactaattaactacaaaataaacgttagtgatcagcctcttcctctataaacaatgaccaattagacgtttccgtaattccatgtattatgtatagtacactctataaatgtaaatgtaatgcttgtctaaaaagtgcaatttattgtacattgtcccaacaaatgtttacttttataatcgttatgaacttgaattggattagtatcttgtttttatgtgtgaatgaagccttgtgaaataaacaaatgcaactgagaaggtaacaaggtgactgtttttgtgagccagtgatgttttcaatgctttgtgttgcccctttggccccattaagcagtaataaacatttgttctgaagtcca

SEQ ID NO: 1374 - protein, 377 aa, Homosapiens
MEQLPDLHSHFSDLNLEAHMYASQWFLTLFTAKFPLCMVFHIIDLLLCEGLNIIFHVALALLKTSKEDLLQADFEGALKFFRVQLPKRYRAEENARRLMEQACNIKVPTKKLKKYEKEYQTMRESQLQQEDPMDRYKRENRRLQEASMRLEQENDDLAHELVTSKIALRNDLDQAEDKADVLNKELLLTKQRLVETEEEKRKQEEETAQLKEVFRKQLEKAEYEIKKTTAIIAEYKQICSQLSTRLEKQQAASKEELEVVKGKMMACKHCSDIFSKEGALKLAATGREDQGIETDDEKDSLKKQLREMELELAQTKLQLVEAKCKIQELEHQRGALMNEIQAAKNSWFSKTLNSIKTATGTQPLQPAPVTQPPKEST

SEQ ID NO: 1375 - DNA, 6999 bp, Homosapiens
gagaggcagcagcagcagcagtagcagcagcagcagcaacaacagcgctgcttgtcacgaatcgaggattgcaatgagctcatcgttttctccttgcagcttcacaactgccctggcttcctggctactgctgctgctgtcttctcacacatagacacgcacacacaccctttctcgcacacacacacacacacacacacacacacacacacacacacacacacactctcacacattctcacatgctagacccttctaagcagcttgtccgtttttacacatgtatctgaactctcctgcatcactcttggccattttctcgcattcgattgcttttgccgttttttatttagatcagtacttgatttcattttcattttccagtctactttggggttctcgcagtggataatttagccaaaatgtttttcttgtggagacattagctgacaattcccaccacagactggcttgtacgtcctcccagggagacctaaacctggctcccctcccaccgcagttcttaatattgtggataagagatccatctttctcattctggatacctacttagtgctcatggaagaaggggtgccctgcccagccccagctgctaagctcacacctcctgtcaaaaagtcccaggacatgcacgacgagaggagcaagctggtgaatgagtatgcgtgtcgagtgctggaacttctggggatggggcatcgtctgtttgtgcctcggcttctggcgacctcaaaggaagaccttctgcaggctgattttgaaggtgctttaaagttctttagagttcagcttccaaagagatacagggcagaggaaaatgcaagaagactgatggagcaggcttgcaatattaaagtaccaaccaagaagctgaagaaatatgagaaagaatatcagacaatgcgagagagtcagctgcaacaggaagacccaatggatagatacaagagggagaaccgaagattacaggaggccagcatgaggttggaacaagagaatgatgaccttgcccatgaactagtaacaagcaaaattgctctacggaatgacttggatcaggcagaagacaaggcagatgtgttgaataaagagctccttttgaccaaacagaggctggtggagactgaagaggagaagaggaagcaagaggaagagactgcccagctaaaagaagtcttcaggaaacagctagagaaggcagaatatgaaataaagaagactacagctatcattgctgagtataaacagatctgttcgcagttgagtaccaggctggagaaacagcaagcagccagcaaggaggagctggaagtggtaaagggtaagatgatggcatgcaaacactgcagtgacattttcagcaaggagggtgctttgaaactagcagccacaggcagagaggaccagggaattgaaacagatgatgagaaggactcacttaagaagcagctgagagagatggaactggaactggcacaaaccaaactgcagttggtggaggccaagtgtaaaattcaggaacttgaacatcagagaggagcccttatgaatgaaatccaagctgcgaaaaactcttggtttagcaaaaccctgaactctatcaaaacggccacgggcacccagccattgcagccagcaccggtcacccagccacccaaggagagcacatagttccagccttacccaagcacaagagcacaatgttcaaaccaatggaaatctgggaggattcttcctggtgtccctttgaaggaaagtcaaggaggccagaaaacaagccagaatttttcagtagctctcactctttcttgtatgacacttttcaaagggatgctatttaaactgacctgttctatgttgaatacctattttccagcttctggaaggccatgttcagatccatcatagtattacacattattttgtttgcctgatgtttagttggaaataagtaattcagaactaaatgcttttttatttagaattattcataattatttttatcttacataaaaatggagacatctgttattccaaggttgaagtgataagaagatctttgtcacaggaaaaaaaaaattgaaacctaaacatcttaagttttcaggatttattcagataaagcacactgtggggccaggcatgaccactctcaggtttcctcctgagcctgattcccagggaagtgttaatcctgtccaaaggaaagaaccaatcagcgatcattggtttactttcattttctgttcggtacatctggaaatgaagtgccaggaatagacgggctgttcagattatacgctaggtaaaaggaactgaaattttaataagtgtaggtcaggatcatttgggctgtggtattctaacagatccttttaagaatgccacataggacttgtgagttcctaagtacaccaaagtatggacacagatgtgacttctggcaattataaagttaaaggtggatattgcaccttacagacttagggagcctttaccagagacgcctaaaaagccccaggttcagccattgtgctgaatagagtggaatatagaaccagggacagagtatttcatttaacgttgatatatacttgctaaggaaacactaacaatactgtaactttgttaaaggacatagtattgaaatgggaaatagaggtcaggctcacatcatcttagtttaatgctgggcaactttttctgatttctgtagttccctgaaaatgtgtccttcgtacccataaagagatacaaatgcatttgtaacatttttgattgaatataaaacctttacagaaatacttatctcatggaaaggtaaagctattgtttaaaaattagtggaaatattttttcaattatatttaacatgcctataaaaatagtccttgcaggaaattatttgataagagcaaaactatttttattttataaactattttggaggcctctgatcctttcaaaccaaccaaactactattagatatgtacaataacatttgttgatattaatcattggcctcattgttgaacatattatttgcaaagaatcttaaactctgtagtgccagaatgattctcatctgtgccatattttgcaattaaaagtaacacacccttagaagaatcaaataagagccatctacatcccaggaggatgcaccaagttgctcacagtggatcttttcctctaaaatgatcttttatgttctaaaaagtgaaatcccctttatctgtgtttatattctctacagcccataaaactgatgtgattgttatgttatactcatcagataatacttttcttacataaatctttcattgttgttctgacatctttcattacaaaatttattttcttaacaaaaaggaacataacccagcattccaagtgtctgtgttggctttaacattctctacatggtggtctagataagctaatttttttttttttttttttgtaaaatgtaatagctagaaaatgttatcttggcgcttgtttttgtaaatcatttagtataggctgttagctttactggtactttacgctttgattccaagaagccttgtgcagttgccttatcaaatggccagctaaattaaagatgctcttttgtgttgtgaatttcatagttctgtacagagcttgtttcaatttacaaaaataagtacattccacagaatgcctaaagtgtgtaattttctttaaataatagtaggtgagggagaaacataatggctctaggtcaatcccttatctaaagaccttgttcaacttcatagtccctttccttttaaagaggagaagagaaaaatcccccctggccaggcatggtggctcacatctgtaatcccagcactttgggaggctgaggtgggtggatcacctaaggtcaggagtttgagaccagcctggccaacatggtgaaaccctatctctactgcaaaatacaaaaattagccgggcttggtggcgggtgcctgtaatcccagctactcgggaggttgaggcaggagaatcacttgaacccaggaggcagaggttgcagtgggccaagattacggcattacattccatccagcctgggcgacaagagcaaaattccgtctcgaaaaatcaccaggtacatacctctcaagtttgataagtccatcttttgagttttcttttagctctttcaaaagattacgagggcaatacatattttttttttttttattctccagccccatatcatacttgggtatgcctgttggtaccataagcctaaactctccttcactgcaatgcctttgagtcagtagcaatagtaaagactagaaacaaagaaaattcagaatttggtatgtgatatgattgttcatacaatatgttataatagcaatattccaaacaatatgtccttcactgtctattgttggaaaactcatgcatcccagcatgaagtaactcctagttttaattttagttattttgagatatatttgagaattgcatctcttctcttgaatttcacttagaagagattaaccagccaaatatccaggaaagtttcaaaacattctagtgtttttcatcctttgctaggatgcactctgtacaaaacattcctctgaaaatctaatatttgcagtatctaagaattgatcatttctattttcattaaattctgtggaaaaaattaaatgaatgaaattcaacttcataattcagttcatcagcttttgtatcttgagaatctaaacacgtctttaaatctgaaagaaaccaagctggattttgcagtgcatatgtttgctagcttcccacatcctgaaccatgtcaaaatttggttttatttagttacatataatttaatgcaaagaaattctgttacttaatgttctgtttatttatgagtgcctatcaggaacactaataggaatgccattcaaccagtgtcttctgcccctctcccagctgttaaattagtacttcttcattggctttctgaaatgtcctgagtaaagtagaaaagcaacctttgtatggatgtggggatatttaatagtatgtatcttgtttcatttttttcctatgatgtattaatatttatttttctccaacccctgctccattttcttaaaatattttccagttaataactagttgctttatttcctagctgaagtgagaaaaccaacggaaaacaatacagatttgggcagaggagatagagttacatctttaaaggagtgagccagtcacccaggagaatcacatgtgtaactgatgtaggggtttaagtcttcatactttcactaaaatctgtctactaactctcccaccaacctttgcatcaaacacttaggtacctgcctgattaggggggcccctttaagggaaaaaacttttaaaaaattaaatgccttggttttgttttatcttctgggaaagaacacttttacttgattagcaagatgattatattatataacttgcccttaaaaacactccaaaatactgactccttttctccaattacaaatgagtgtgaagaaattctgttgtatgatttgaacactattaggtttgtatgtgtgtttaattggaagaattttatatagagtatctctgctgcttttgtttacctgggtaccacacaaccaaatacacattgagatttcaagaaatgatgatgaaagccagaaggccagaccacagctctgcagcctgtttcctacaaccagatataaaactctttctcgtcgccatgctgatagtcacactgaactagaactgtcccaacacattcttcctctctcataatggcttccatttaatacaggcaaagccctttaccttagcaaattctttatctttcaaaagtgaccaaaatgaggacttcaaccttggctgcacctcaataggagatgctgatcttgagttgtaatgagaaaagtgggcatataggagattttagtgactgcagtcagctgtctggcattcctttctcagtttgcatctaaaagactacatatgtcaagcttatctccacctgaatttgctgcctgctataaaaacatttcattaatatatcccattcttcctacctccatctctggtttgtcattagtggtattctgaaaagcttaagaaaaaagaatcattgagtagaaagtgaacattttaagttattttcctttttcattggcaattagttaacatgtaaaatcttttccattaaactgtataacttttaataactatatattatatatgggataaaatatatggactgaattgtgagaatataaatgcatcgaaagactctggtgtcatgaaagcacaagaataaggctggagatggtcccagatccaagatgtcccaaaagccttttgtatcagtttctctatttttggtattttgcataatgcatggatccttagttcaaatgagggacaaagtttctcagtcagccccacttcctttctttctaactcctacctttcccttgcagaggaggtagtagagattctggaattgtctatttttatgaattccattattttgtccatggcatctctaatgaaaacaggttctagaataaaggagttgattagtctgaacagtactaattaactacaaaataaacgttagtgatcagcctcttcctctataaacaatgaccaattagacgtttccgtaattccatgtattatgtatagtacactctataaatgtaaatgtaatgcttgtctaaaaagtgcaatttattgtacattgtcccaacaaatgtttacttttataatcgttatgaacttgaattggattagtatcttgtttttatgtgtgaatgaagccttgtgaaataaacaaatgcaactgagaaggtaacaaggtgactgtttttgtgagccagtgatgttttcaatgctttgtgttgcccctttggccccattaagcagtaataaacatttgttctgaagtcca

SEQ ID NO: 1376 - protein, 370 aa, Homosapiens
MEEGVPCPAPAAKLTPPVKKSQDMHDERSKLVNEYACRVLELLGMGHRLFVPRLLATSKEDLLQADFEGALKFFRVQLPKRYRAEENARRLMEQACNIKVPTKKLKKYEKEYQTMRESQLQQEDPMDRYKRENRRLQEASMRLEQENDDLAHELVTSKIALRNDLDQAEDKADVLNKELLLTKQRLVETEEEKRKQEEETAQLKEVFRKQLEKAEYEIKKTTAIIAEYKQICSQLSTRLEKQQAASKEELEVVKGKMMACKHCSDIFSKEGALKLAATGREDQGIETDDEKDSLKKQLREMELELAQTKLQLVEAKCKIQELEHQRGALMNEIQAAKNSWFSKTLNSIKTATGTQPLQPAPVTQPPKEST

SEQ ID NO: 1377 - DNA, 728 bp, Homosapiens
gaagttaaatgacttgcccggggacggacagctagctagttcctgcttgaactgaggaccatctatttggttaccgggagtgtggctggtttctgttgcctgttttgatactcttctcctggtgggtgtgtacactggcactgagctgcagtaggatttttccttggatagtctggtctggagctgggacagcagctgctgctgtggaaaggccagctggcaagatgatggaagaaatctccattatggtagcctatgacgcccatgttttcagccagctgcacgatgaagacttcctcactagtctggtggccatcagcaagcccaggtctatggtaccaaccaagaagctgaagaaatatgagaaagaatatcagacaatgcgagagagtcagctgcaacaggaagacccaatggatagatacaagtttgtatatttgtaggtaactccagctgttgcatttatactgggaatcttcataagaagctgagagaaagagaggggaaaaagaaagtggctttctactttcaaaaatgaaacaaaaaggaaaaatggcaaagtactgttttagctgtgcatgtcatatccacaaagacttttagcaggtgaactgttccaagactgacacaaggatgtttcaaacttgcctctgtctgtagaaaatgttaaaaataccaactcacttggaaggaaaaataaaaatcacaaaggtatattgagcacagta

SEQ ID NO: 1378 - protein, 72 aa, Homosapiens; identical to SEQ ID NO: 85

SEQ ID NO: 1379 - DNA, 448 bp, Homosapiens
ttggttaccgggagtgtggctggtttctgttgcctgttttgatactcttctcctggtaccaaccaagaagctgaagaaatatgagaaagaatatcagacaatgcgagagagtcagctgcaacaggaagacccaatggatagatacaagtttgtatatttgtaggtaactccagctgttgcatttatactgggaatcttcataagaagctgagagaaagagaggggaaaaagaaagtggctttctactttcaaaaatgaaacaaaaaggaaaaatggcaaagtactgttttagctgtgcatgtcatatccacaaagacttttagcaggtgaactgttccaagactgacacaaggatgtttcaaacttgcctctgtctgtagaaaatgttaaaaataccaactcacttggaaggaaaaataaaaatcacaaaggtatattgagcacagta

SEQ ID NO: 1380 - protein, 38 aa, Homosapiens
IQVCIFVGNSSCCIYTGNLHKKLREREGKKKVAFYFQK

SEQ ID NO: 1381 - DNA, 791 bp, Homosapiens
tcagatatccatgtgtggaagctctgagtcactgaatagcaaagaaaaatatgaaagcaagaggaattgctttcacatctagaaaatgttgcaagataatctgaaatcttctggtgctggtgaatgcatgaagaggttcacagtatcttttaaagtacttctgaaaagataaggagtttaaaaggtgggtgtgtacactggcactgagctgcagtaggatttttccttggatagtctggtctggagctgggacagcagctgctgctgtggaaaggccagctggcaagatgatggaagaaatctccattatggtagcctatgacgcccatgttttcagccagctgcacgatgaagacttcctcactagtctggtggccatcagcaagcccaggtctatggtaccaaccaagaagctgaagaaatatgagaaagaatatcagacaatgcgagagagtcagctgcaacaggaagacccaatggatagatacaagtttgtatatttgtaggtaactccagctgttgcatttatactgggaatcttcataagaagctgagagaaagagaggggaaaaagaaagtggctttctactttcaaaaatgaaacaaaaaggaaaaatggcaaagtactgttttagctgtgcatgtcatatccacaaagacttttagcaggtgaactgttccaagactgacacaaggatgtttcaaacttgcctctgtctgtagaaaatgttaaaaataccaactcacttggaaggaaaaataaaaatcacaaaggtatattgagcacagta

SEQ ID NO: 1382 - protein, 72 aa, Homosapiens; identical to SEQ ID NO: 85

SEQ ID NO: 1383 - DNA, 676 bp, Homosapiens
ggtctcaaactcctgacctcaggtgatccgcctgcctcacctcccaaagtgctgggattacaggcataagccaccacgcccggcccccaaaatcaactttttaactacaattgtagtaacttcttattatatttaatatgactcatcacaaacaacagaatgaaagagtatatcataacatttaaacctaactaatatgaagacctacttctctattttaaggcacaggaaccttaaaaacatggctatttcttgaaacaacaaattacaaaaaataaaaataaaaaaataaaggagaaagctatagattgattttaaaagacttaagggttatatcaaccagatgcaataaatcaacgttgtttaaatgctaatttgaacaaagtataaaaagaactgtaagataattgagaaaaatttgaatttgaccaaggtgtgagccactgcacccggctgatactatgatttttttaaatggtcatttagagatatatattgaatagttttggatgaaatgtctgcagagattcaaaatgaaccagtagattatgtgttgataattattgaaactgggtgataagtattaatacatagtgattcattatattctctccacttttgtagagatgcagtttaaaagaatcagctggaagacaaaaaaaagcaaaaagatttg

SEQ ID NO: 1384 - protein, 39 aa, Homosapiens
PQVIRLPHLPKCWDYRHKPPRPAPKINFLTTIVVTSYYI

SEQ ID NO: 1385 - DNA, 709 bp, Homosapiens
ctcactctgtcatccaggctggagtccagtgatgtgatctcagctcacggcaacctcaacttcccgggttcgagattctcctgcctcagcctcccgagtagctgggattacaggcacctgcaaccaaactggctaatttttactagagacagggtttcactatgttgtccaggctggtctcaaacttcttacctattagcttggcttaaatagatcagaggtaagtgaatatttcagtatgaattaacaatgatttcatacgattttcacacgtttaatatataagcaactactacatagattaaagaattagagtaggctcgtcttagcccaaaatctcctcaagctaataagcaacttcagcaaagtctcaggatacaaaatcaatatgcaaaaatcacaagcattcttatacaccaataacagacaaacagagagccaaatcatgagtgaactcccattcacaattgcttcaaagagaataaaatacctaggaatccaacttacaagggatgtgaaggacctcttcaagaactacaaatcactgctcaacaaaataaaagaggacacaaacaaatggaagaacattccatgctcatggataggaagaatcaatatcatgaaaatggccatactgcccaaggtaatttacagattcaatgccatccccatcaagctaccaatgactttcttcacagaattggaaaaa

SEQ ID NO: 1386 - protein, 106 aa, Homosapiens
MQKSQAFLYTNNRQTESQIMSELPFTIASKRIKYLGIQLTRDVKDLFKNYKSLLNKIKEDTNKWKNIPCSWIGRINIMKMAILPKVIYRFNAIPIKLPMTFFTELE

SEQ ID NO: 1387 - DNA, 531 bp, Homosapiens
ctgcttttcaaatcctctccttatctttgatctttgagagtttactatatcccttgggatatcttatttgggttgaatctgtttagtgatctcaggctttcttgtacctggaaagttttctattactattattattatattaatttttattttttgagatggaatctcattctgtcacccaggctagagtgcagtggcgccatctcagctcactgcaacctctgcctgggtgatagagtgagatcctgtctcaaaggaaatgaataagctttcttccccttccttgttctgcttagctccctcttgaacaccagtaattctaagatttggtcttttgaggcaattttctatatattgtaggctatctttattccttttcattcttttttctttatattatcacattccactcataatctgaagacaaaggctcatgtatttcaccagatgcacatttcataaacccagagttgtaatgggacaactccagctacagaatgatctgtatttctatggcatatctgggcattg

SEQ ID NO: 1388 - protein, 31 aa, Homosapiens
MYFTRCTFHKPRVVMGQLQLQNDLYFYGISG

SEQ ID NO: 1389 - DNA, 571 bp, Homosapiens
aggttatgcttccaattacatcagtattacagatttataaatatgtgttgatattatgtatacatcagaatatataatgtatgtatgtgttgatattatgtatacatcagaagacaaacattgaggacttacattggagacactgttatggcgattgcaaagactgcctttagtgagatttccagaatttaacagctggtggaaggggaggcagttatagtgttataactttataaatgttatttctaaactgaaaatgccattttaattttccaaacacaatcactgcagatctaagctgcactatttacagtttttgtagctaccttgatatagtaattcttcactcccaaagtgctgggattacaggcgtgagccactgcgcctggccaatccgtggttctttactcttgtgtcagccacctgaagtgggatgtttcaaagacagggctcagctgggaccattaactgaaacacctacttcggcttctccgtatgtcttgagcttcttcacagcatagtgccctgaatgtcttacatggcagctcagggttctcagaactggtgttct

SEQ ID NO: 1390 - protein, 30 aa, Homosapiens
MYVLILCIHQKTNIEDLHWRHCYGDCKDCL

SEQ ID NO: 1391 - DNA, 624 bp, Homosapiens
aggatcacaatcaagagtttaaagacaaccggtctctgctccagccacacaggacttcttctagtacctttactacatcatgcctcccctgcctcaggcttctgctgggatggatcgagcacattcaccctaaaattctgattcagaagatctgagccttctgaaaaaaaagcattgagagcataaaccactcagaagatttatagcttaaagcagatcaccttaaggtactggaatcagtcagtgcttagatggaacattttttgaggcctacatcttcactgagtgcccttcttctctatttcctatacttccttgtttctttctgttcccactgcatcccttatggatttgtacaaataatgctgggttcttttcttcacccacatgcagcagttgctgctggatcataaccattccttctattggttttaaaatctgtttttctcagattccttacacttgaaggaaaaaaaaaaaggacatttagcctgtttttcttttaagcaataaaaattcttctctcactgtattgattattctcaatgtggggctaaattatgcaaattctgattcttttcctctttgcaaaaattaagaagcaataatatcaagttagtatac

SEQ ID NO: 1392 - protein, 53 aa, Homosapiens
MEHFLRPTSSLSALLLYFLYFLVSFCSHCIPYGFVQIMLGSFLHPHAAVAAGS

SEQ ID NO: 1393 - DNA, 473 bp, Homosapiens
gagaagagtaatgtcttgctctccgccctgacaacttttatgtattataatttgaccgcgctgggccacgctgcgcagtcgcagctcggaaccgctgcgttaacccagccccggaaataacgtaccgatcttcggagtccaagtcggaagttgactagagagtcacctgctttcgtccgctctaggacaccagacacaccaggccgccatgttgtgtaaggatccccagccagtgagcctaaaatgggtagaaggaaaagatatttcttaccctacgcacccaggtccaagtcatcattattttgtctgaaatttatcttcctaactgatttctctgcttccccattgtgccttaagagttagttttccacagagcagctcgagatatcttttcagatcattatatccctttgcttaaaaacctctaacagcttcctattaggcttagaataaagtacaaactccttaatgtg

SEQ ID NO: 1394 - protein, 33 aa, Homosapiens
MLCKDPQPVSLKWVEGKDISYPTHPGPSHHYFV

SEQ ID NO: 1395 - DNA, 2753 bp, Homosapiens
tgggcttccgctacagggcccggtcacgaggccaacgtagctccacctctacggcggccagtgatgacgccaccacgtcggaactgttagaccgcggtgacgtctccaccgcgccaaactcactgaaaatcaaaccgctaccattaggagccctccacgcttaacatatccgttctttctcgtttgaaagtaaccaggctgctcctccccatttttcgccttcttctcgcggaggctgagagactaaccttacacaacatggcggcctggtgtgtctggtgtcctagagcggacgaaagcaggtgactctctagtcaacttccgacttggactccgaagatcggcgtctgcgctcggtttgagggctcggcgcggggtttcctgttcctccttctgcgcggctgcagctcgggacttcggcctgacccagcccccatggcttcagaagagctacagaaagatctagaagaggtaaaggtgttgctggaaaaggctactaggaaaagagtacgtgatgcccttacagctgaaaaatccaagattgagacagaaatcaagaacaagatgcaacagaaatcacagaagaaagcagaacttcttgataatgaaaaaccagctgctgtggttgctcccattacaacgggctatacggtgaaaatcagtaattatggatgggatcagtcagataagtttgtgaaaatctacattaccttaactggagttcatcaagttcccactgagaatgtgcaggtgcatttcacagagaggtcatttgatcttttggtaaagaatctaaatgggaagagttactccatgattgtgaacaatctcttgaaacccatctctgtggaaggcagttcaaaaaaagtcaagactgatacagttcttatattgtgtagaaagaaagtggaaaacacaaggtgggattacctgacccaggttgaaaaggagtgcaaagaaaaagagaagccctcctatgacactgaaacagatcctagtgagggattgatgaatgttctaaagaaaatttatgaagatggagacgatgatatgaagcgaaccattaataaagcctgggtggaatcaagagagaagcaagccaaaggagacacggaattttgagactttaaagtcgttttgggaactgtgatgtgatgtggaaatactgatgtttccagtaagggaatattggtgagctgcatatataaatttgacagatagctatttacatagccttctaagtaaaggcaatgaattctccatttcctactggaggatttatttaaataaaatatgcttattaaacactcctgcaaagatggttttattagtaccctggtcattttgttcaaggaagggttatattgcattctcacgtgaaatataaaaagcaagtcttgcccaataaaaacgctacattgtgtgtattttttgttcagctaagaattggaaaagtatttgcttgccttttaagttactgacatcagcttccaccagtgtaaaaattgagtaaaacctgaagttttgcataaaatgcaaatcggtgcctgtgcttgaaggttgctgtagagcatctgaccccttattaccaccttaagcaatgtatatgccatgcattaccatgcactaattcaatcacaggtgtttctatctagatttaaatatatttgtcaatgaatgtggaatagaaaatctaaacatgacaataatagacatatctttgtatggtaccagttagttttgccgtggatcagatggtttataaaagtaataaccataaagcaaaaaataatttgaaagcccgtctattcctatgctcaataaagttaagtttttcttcattagaacagttttatgatttatttgtctaggagtatgtcagaaaaatcaggcttttagtaggaattactcctattccccctgaagtcaggaccagtgcctgtgatctccattactttattttcctggaggtattagccaacacagttagatcagagaaagcaattgaagccaggcatgaaggctggcgcccgtaatcccagctactaaggctggaggatcacttcagcccaggagtttaaggctgcagtgagctatgatgatgccactgtactgcagcttgggtaacagattgagaacctgtctcattaaaaaaaaaaaaaaaaaaaaagccgttagacacacaggaaaaatccagaagggtaaactaaactaaagctacaattaatatgggaatttggaagaagtggtaggatttaaaatacagaaacagtttatgtataggatagctataagtaaatactgaaacacattatgcctctgtaattggggttgacacatgaacagaatagcagacacaatgcatatgaaagttacagaatatggtaaaagtggggtaaagatgggtttttaatgatactaagataactgaaaataggcatatagatatattccaagccgcctgacgatctaattgtaaaaagtaaagcatacaaatactagaagaaaatggaggaaaacgacattatatgtgacttaaaacctagaagaaataaataaaactattgatcaattttaactacataaaaatgtttataggacaagaaaaaccccaccataacccaaggcaaacaatgtattgacaggattccaataattaagaatacttcatacaaaaagaaatgtaaatgacctttaacatgtaaagatgctcaccttgttcagaagagaataaaccagtgtttttacctttc

SEQ ID NO: 1396 - protein, 228 aa, Homosapiens; identical to SEQ ID NO: 93

SEQ ID NO: 1397 - DNA, 2651 bp, Homosapiens
tgggcttccgctacagggcccggtcacgaggccaacgtagctccacctctacggcggccagtgatgacgccaccacgtcggaactgttagaccgcggtgacgtctccaccgcgccaaactcactgaaaatcaaaccgctaccattaggagccctccacgcttaacatatccgttctttctcgtttgaaagtaaccaggctgctcctccccatttttcgccttcttctcgcggaggctgagagactaaccttacacaacatggcggcctggtgtgtctggtgtcctagagcggacgaaagcaggtgactctctagtcaacttccgacttggactccgaagatcgctacagaaagatctagaagaggtaaaggtgttgctggaaaaggctactaggaaaagagtacgtgatgcccttacagctgaaaaatccaagattgagacagaaatcaagaacaagatgcaacagaaatcacagaagaaagcagaacttcttgataatgaaaaaccagctgctgtggttgctcccattacaacgggctatacggtgaaaatcagtaattatggatgggatcagtcagataagtttgtgaaaatctacattaccttaactggagttcatcaagttcccactgagaatgtgcaggtgcatttcacagagaggtcatttgatcttttggtaaagaatctaaatgggaagagttactccatgattgtgaacaatctcttgaaacccatctctgtggaaggcagttcaaaaaaagtcaagactgatacagttcttatattgtgtagaaagaaagtggaaaacacaaggtgggattacctgacccaggttgaaaaggagtgcaaagaaaaagagaagccctcctatgacactgaaacagatcctagtgagggattgatgaatgttctaaagaaaatttatgaagatggagacgatgatatgaagcgaaccattaataaagcctgggtggaatcaagagagaagcaagccaaaggagacacggaattttgagactttaaagtcgttttgggaactgtgatgtgatgtggaaatactgatgtttccagtaagggaatattggtgagctgcatatataaatttgacagatagctatttacatagccttctaagtaaaggcaatgaattctccatttcctactggaggatttatttaaataaaatatgcttattaaacactcctgcaaagatggttttattagtaccctggtcattttgttcaaggaagggttatattgcattctcacgtgaaatataaaaagcaagtcttgcccaataaaaacgctacattgtgtgtattttttgttcagctaagaattggaaaagtatttgcttgccttttaagttactgacatcagcttccaccagtgtaaaaattgagtaaaacctgaagttttgcataaaatgcaaatcggtgcctgtgcttgaaggttgctgtagagcatctgaccccttattaccaccttaagcaatgtatatgccatgcattaccatgcactaattcaatcacaggtgtttctatctagatttaaatatatttgtcaatgaatgtggaatagaaaatctaaacatgacaataatagacatatctttgtatggtaccagttagttttgccgtggatcagatggtttataaaagtaataaccataaagcaaaaaataatttgaaagcccgtctattcctatgctcaataaagttaagtttttcttcattagaacagttttatgatttatttgtctaggagtatgtcagaaaaatcaggcttttagtaggaattactcctattccccctgaagtcaggaccagtgcctgtgatctccattactttattttcctggaggtattagccaacacagttagatcagagaaagcaattgaagccaggcatgaaggctggcgcccgtaatcccagctactaaggctggaggatcacttcagcccaggagtttaaggctgcagtgagctatgatgatgccactgtactgcagcttgggtaacagattgagaacctgtctcattaaaaaaaaaaaaaaaaaaaaagccgttagacacacaggaaaaatccagaagggtaaactaaactaaagctacaattaatatgggaatttggaagaagtggtaggatttaaaatacagaaacagtttatgtataggatagctataagtaaatactgaaacacattatgcctctgtaattggggttgacacatgaacagaatagcagacacaatgcatatgaaagttacagaatatggtaaaagtggggtaaagatgggtttttaatgatactaagataactgaaaataggcatatagatatattccaagccgcctgacgatctaattgtaaaaagtaaagcatacaaatactagaagaaaatggaggaaaacgacattatatgtgacttaaaacctagaagaaataaataaaactattgatcaattttaactacataaaaatgtttataggacaagaaaaaccccaccataacccaaggcaaacaatgtattgacaggattccaataattaagaatacttcatacaaaaagaaatgtaaatgacctttaacatgtaaagatgctcaccttgttcagaagagaataaaccagtgtttttacctttcacttg

SEQ ID NO: 1398 - protein, 185 aa, Homosapiens; identical to SEQ ID NO: 91

SEQ ID NO: 1399 - DNA, 1011 bp, Homosapiens
gcgactgcgcagcgtggcccagcgcggtcaaattataatacataaaagttgtcagggcggagagcaagacattactcttctcggattgccggttcgctcgcgagacttgagcgttgctaggagattcggcaggcgggcggagccagactcggcggggcggggaggggtggggctaggctcggcgaggcgaggaagggtgggtggagccaggcttggcgggctgtgcgtgctcgcggtgggcggtggcggcggctgcctcgcgaaggttcgagatccgtcgcgtgcgggaggcgggccgcgatcttgcgcagggtcggtgtgggcgcaggctgcagcgccgcgactcgtgcgggtaggcgtctgcgctcggtttgagggctcggcgcggggtttcctgttcctccttctgcgcggctgcagctcgggacttcggcctgacccagcccccatggcttcagaagagctacagaaagatctagaagaggtaaaggtgttgctggaaaaggctactaggaaaagagtacgtgatgcccttacagctgaaaaatccaagattgagacagaaatcaagaacaagatgcaacagaaatcacagaagaaagcagaacttcttgataatgaaaaaccagctgctgtggttgctcccattacaacgggctatacggtgaaaatcagtaattatggatgggatcagtcagataagtttgtgaaaatctacattaccttaactggagttcatcaagttcccactgagaatgtgcaggtgcatttcacagagaggtcatttgatcttttggtaaagaatctaaatgggaagagttactccatgattgtgaacaatctcttgaaacccatctctgtggaaggcagttcaaaaaaagtcaagactgatacagttcttatattgtgtagaaagaaagtggaaaacacaaggtgggattacctgacccaggttgaaaaggagtgcaaagaaaaagagtgagtctacttccatttttttaaagaatttta

SEQ ID NO: 1400 - protein, 177 aa, Homosapiens
MASEELQKDLEEVKVLLEKATRKRVRDALTAEKSKIETEIKNKMQQKSQKKAELLDNEKPAAVVAPITTGYTVKISNYGWDQSDKFVKIYITLTGVHQVPTENVQVHFTERSFDLLVKNLNGKSYSMIVNNLLKPISVEGSSKKVKTDTVLILCRKKVENTRWDYLTQVEKECKEKE

SEQ ID NO: 1401 - DNA, 1439 bp, Homosapiens
gcgactgcgcagcgtggcccagcgcggtcaaattataatacataaaagttgtcagggcggagagcaagacattactcttctcggattgccggttcgctcgcgagacttgagcgttgctaggagattcggcaggcgggcggagccagactcggcggggcggggaggggtggggctaggctcggcgaggcgaggaagggtgggtggagccaggcttggcgggctgtgcgtgctcgcggtgggcggtggcggcggctgcctcgcgaaggttcgagatccgtcgcgtgcgggaggcgggccgcgatcttgcgcagggtcggtgtgggcgcaggctgcagcgccgcgactcgtgcgggtaggcgtctgcgctcggtttgagggctcggcgcggggtttcctgttcctccttctgcgcggctgcagctcgggacttcggcctgacccagcccccatggcttcagaagagctacagaaagatctagaagaggtaaaggtgttgctggaaaaggctactaggaaaagagtacgtgatgcccttacagctgaaaaatccaagattgagacagaaatcaagaacaagatgcaacagaaatcacagaagaaagcagaacttcttgataatgaaaaaccagctgctgtggttgctcccattacaacgggctatacggtgaaaatcagtaattatggatgggatcagtcagataagtttgtgaaaatctacattaccttaactggagttcatcaagttcccactgagaatgtgcaggtgcatttcacagagaggtcatttgatcttttggtaaagaatctaaatgggaagagttactccatgattgtgaacaatctcttgaaacccatctctgtggaaggcagttcaaaaaaagtcaagactgatacagttcttatattgtgtagaaagaaagtggaaaacacaaggtgggattacctgacccaggttgaaaaggagtgcaaagaaaaagagaagccctcctatgacactgaaacagatcctagtgagggattgatgaatgttctaaagaaaatttatgaagatggagacgatgatatgaagcgaaccattaataaagcctgggtggaatcaagagagaagcaagccaaaggagacacggaattttgagactttaaagtcgttttgggaactgtgatgtgatgtggaaatactgatgtttccagtaagggaatattggtgagctgcatatataaatttgacagatagctatttacatagccttctaagtaaaggcaatgaattctccatttcctactggaggatttatttaaataaaatatgcttattaaacactcctgcaaagatggttttattagtaccctggtcattttgttcaaggaagggttatattgcattctcacgtgaaatataaaaagcaagtcttgcccaataaaaacgctacattgtgtgt

SEQ ID NO: 1402 - protein, 228 aa, Homosapiens; identical to SEQ ID NO: 93

SEQ ID NO: 1403 - DNA, 1858 bp, Homosapiens
gcgactgcgcagcgtggcccagcgcggtcaaattataatacataaaagttgtcagggcggagagcaagacattactcttctcggattgccggttcgctcgcgagacttgagcgttgctaggagattcggcaggcgggcggagccagactcggcggggcggggaggggtggggctaggctcggcgaggcgaggaagggtgggtggagccaggcttggcgggctgtgcgtgctcgcggtgggcggtggcggcggctgcctcgcgaaggttcgagatccgtcgcgtgcgggaggcgggccgcgatcttgcgcagggtcggtgtgggcgcaggctgcagcgccgcgactcgtgcgggtaggcgtctgcgctcggtttgagggctcggcgcggggtttcctgttcctccttctgcgcggctgcagctcgggacttcggcctgacccagcccccatggcttcagaagagctacagaaagatctagaagaggtaaaggtgttgctggaaaaggctactaggaaaagagtacgtgatgcccttacagctgaaaaatccaagattgagacagaaatcaagaacaagatgcaacagaaatcacagaagaaagcagaacttcttgataatgaaaaaccagctgctgtggttgctcccattacaacgggctatacggtgaaaatcagtaattatggatgggatcagtcagataagtttgtgaaaatctacattaccttaactggagttcatcaagttcccactgagaatgtgcaggtgcatttcacagagaggtcatttgatcttttggtaaagaatctaaatgggaagagttactccatgattgtgaacaatctcttgaaacccatctctgtggaaggcagttcaaaaaaagtcaagactgatacagttcttatattgtgtagaaagaaagtggaaaacacaaggtgggattacctgacccaggttgaaaaggagtgcaaagaaaaagagaagccctcctatgacactgaaacagatcctagtgagggattgatgaatgttctaaagaaaatttatgaagatggagacgatgatatgaagcgaaccattaataaagcctgggtggaatcaagagagaagcaagccaaaggagacacggaattttgagactttaaagtcgttttgggaactgtgatgtgatgtggaaatactgatgtttccagtaagggaatattggtgagctgcatatataaatttgacagatagctatttacatagccttctaagtaaaggcaatgaattctccatttcctactggaggatttatttaaataaaatatgcttattaaacactcctgcaaagatggttttattagtaccctggtcattttgttcaaggaagggttatattgcattctcacgtgaaatataaaaagcaagtcttgcccaataaaaacgctacattgtgtgtattttttgttcagctaagaattggaaaagtatttgcttgccttttaagttactgacatcagcttccaccagtgtaaaaattgagtaaaacctgaagttttgcataaaatgcaaatcggtgcctgtgcttgaaggttgctgtagagcatctgaccccttattaccaccttaagcaatgtatatgccatgcattaccatgcactaattcaatcacaggtgtttctatctagatttaaatatatttgtcaatgaatgtggaatagaaaatctaaacatgacaataatagacatatctttgtatggtaccagttagttttgccgtggatcagatggtttataaaagtaataaccataaagcaaaaaataatttgaaagcccgtctattcctatgctcaataaagttaagtttttcttcattag

SEQ ID NO: 1404 - protein, 228 aa, Homosapiens; identical to SEQ ID NO: 93

SEQ ID NO: 1405 - DNA, 2766 bp, Homosapiens
gcgactgcgcagcgtggcccagcgcggtcaaattataatacataaaagttgtcagggcggagagcaagacattactcttctcggattgccggttcgctcgcgagacttgagcgttgctaggagattcggcaggcgggcggagccagactcggcggggcggggaggggtggggctaggctcggcgaggcgaggaagggtgggtggagccaggcttggcgggctgtgcgtgctcgcggtgggcggtggcggcggctgcctcgcgaaggttcgagatccgtcgcgtgcgggaggcgggccgcgatcttgcgcagggtcggtgtgggcgcaggctgcagcgccgcgactcgtgcgggtaggcgtctgcgctcggtttgagggctcggcgcggggtttcctgttcctccttctgcgcggctgcagctcgggacttcggcctgacccagcccccatggcttcagaagagctacagaaagatctagaagaggtaaaggtgttgctggaaaaggctactaggaaaagagtacgtgatgcccttacagctgaaaaatccaagattgagacagaaatcaagaacaagatgcaacagaaatcacagaagaaagcagaacttcttgataatgaaaaaccagctgctgtggttgctcccattacaacgggctatacggtgaaaatcagtaattatggatgggatcagtcagataagtttgtgaaaatctacattaccttaactggagttcatcaagttcccactgagaatgtgcaggtgcatttcacagagaggtcatttgatcttttggtaaagaatctaaatgggaagagttactccatgattgtgaacaatctcttgaaacccatctctgtggaaggcagttcaaaaaaagtcaagactgatacagttcttatattgtgtagaaagaaagtggaaaacacaaggtgggattacctgacccaggttgaaaaggagtgcaaagaaaaagagaagccctcctatgacactgaaacagatcctagtgagggattgatgaatgttctaaagaaaatttatgaagatggagacgatgatatgaagcgaaccattaataaagcctgggtggaatcaagagagaagcaagccaaaggagacacggaattttgagactttaaagtcgttttgggaactgtgatgtgatgtggaaatactgatgtttccagtaagggaatattggtgagctgcatatataaatttgacagatagctatttacatagccttctaagtaaaggcaatgaattctccatttcctactggaggatttatttaaataaaatatgcttattaaacactcctgcaaagatggttttattagtaccctggtcattttgttcaaggaagggttatattgcattctcacgtgaaatataaaaagcaagtcttgcccaataaaaacgctacattgtgtgtattttttgttcagctaagaattggaaaagtatttgcttgccttttaagttactgacatcagcttccaccagtgtaaaaattgagtaaaacctgaagttttgcataaaatgcaaatcggtgcctgtgcttgaaggttgctgtagagcatctgaccccttattaccaccttaagcaatgtatatgccatgcattaccatgcactaattcaatcacaggtgtttctatctagatttaaatatatttgtcaatgaatgtggaatagaaaatctaaacatgacaataatagacatatctttgtatggtaccagttagttttgccgtggatcagatggtttataaaagtaataaccataaagcaaaaaataatttgaaagcccgtctattcctatgctcaataaagttaagtttttcttcattagaacagttttatgatttatttgtctaggagtatgtcagaaaaatcaggcttttagtaggaattactcctattccccctgaagtcaggaccagtgcctgtgatctccattactttattttcctggaggtattagccaacacagttagatcagagaaagcaattgaagccaggcatgaaggctggcgcccgtaatcccagctactaaggctggaggatcacttcagcccaggagtttaaggctgcagtgagctatgatgatgccactgtactgcagcttgggtaacagattgagaacctgtctcattaaaaaaaaaaaaaaaaaaaaagccgttagacacacaggaaaaatccagaagggtaaactaaactaaagctacaattaatatgggaatttggaagaagtggtaggatttaaaatacagaaacagtttatgtataggatagctataagtaaatactgaaacacattatgcctctgtaattggggttgacacatgaacagaatagcagacacaatgcatatgaaagttacagaatatggtaaaagtggggtaaagatgggtttttaatgatactaagataactgaaaataggcatatagatatattccaagccgcctgacgatctaattgtaaaaagtaaagcatacaaatactagaagaaaatggaggaaaacgacattatatgtgacttaaaacctagaagaaataaataaaactattgatcaattttaactacataaaaatgtttataggacaagaaaaaccccaccataacccaaggcaaacaatgtattgacaggattccaataattaagaatacttcatacaaaaagaaatgtaaatgacctttaacatgtaaagatgctcaccttgttcagaagagaataaaccagtgtttttacctttc

SEQ ID NO: 1406 - protein, 228 aa, Homosapiens; identical to SEQ ID NO: 93

SEQ ID NO: 1407 - DNA, 896 bp, Homosapiens
cgcaggctgcagcgccgcgactcgtgcgggtaggcgtctgcgctcggtttgagggctcggcgcggggtttcctgttcctccttctgcgcggctgcagctcgggacttcggcctgacccagcccccatggcttcagaagaggatgggatcagtcagataagtttgtgaaaatctacattaccttaactggagttcatcaagttcccactgagaatgtgcaggtgcatttcacagagaggtcatttgatcttttggtaaagaatctaaatgggaagagttactccatgattgtgaacaatctcttgaaacccatctctgtggaaggcagttcaaaaaaagtcaagactgatacagttcttatattgtgtagaaagaaagtggaaaacacaaggtgggattacctgacccaggttgaaaaggagtgcaaagaaaaagagaagccctcctatgacactgaaacagatcctagtgagggattgatgaatgttctaaagaaaatttatgaagatggagacgatgatatgaagcgaaccattaataaagcctgggtggaatcaagagagaagcaagccaaaggagacacggaattttgagactttaaagtcgttttgggaactgtgatgtgatgtggaaatactgatgtttccagtaagggaatattggtgagctgcatatataaatttgacagatagctatttacatagccttctaagtaaaggcaatgaattctccatttcctactggaggatttatttaaataaaatatgcttattaaacactcctgcaaagatggttttattagtaccctggtcattttgttcaaggaagggttatattgcattctcacgtgaaatataaaaagcaagtcttgcccaataaaaacgctacattgtgtgt

SEQ ID NO: 1408 - protein, 102 aa, Homosapiens [sequence omitted]

SEQ ID NO: 1409 - DNA, 1315 bp, Homosapiens
cgcaggctgcagcgccgcgactcgtgcgggtaggcgtctgcgctcggtttgagggctcggcgcggggtttcctgttcctccttctgcgcggctgcagctcgggacttcggcctgacccagcccccatggcttcagaagaggatgggatcagtcagataagtttgtgaaaatctacattaccttaactggagttcatcaagttcccactgagaatgtgcaggtgcatttcacagagaggtcatttgatcttttggtaaagaatctaaatgggaagagttactccatgattgtgaacaatctcttgaaacccatctctgtggaaggcagttcaaaaaaagtcaagactgatacagttcttatattgtgtagaaagaaagtggaaaacacaaggtgggattacctgacccaggttgaaaaggagtgcaaagaaaaagagaagccctcctatgacactgaaacagatcctagtgagggattgatgaatgttctaaagaaaatttatgaagatggagacgatgatatgaagcgaaccattaataaagcctgggtggaatcaagagagaagcaagccaaaggagacacggaattttgagactttaaagtcgttttgggaactgtgatgtgatgtggaaatactgatgtttccagtaagggaatattggtgagctgcatatataaatttgacagatagctatttacatagccttctaagtaaaggcaatgaattctccatttcctactggaggatttatttaaataaaatatgcttattaaacactcctgcaaagatggttttattagtaccctggtcattttgttcaaggaagggttatattgcattctcacgtgaaatataaaaagcaagtcttgcccaataaaaacgctacattgtgtgtattttttgttcagctaagaattggaaaagtatttgcttgccttttaagttactgacatcagcttccaccagtgtaaaaattgagtaaaacctgaagttttgcataaaatgcaaatcggtgcctgtgcttgaaggttgctgtagagcatctgaccccttattaccaccttaagcaatgtatatgccatgcattaccatgcactaattcaatcacaggtgtttctatctagatttaaatatatttgtcaatgaatgtggaatagaaaatctaaacatgacaataatagacatatctttgtatggtaccagttagttttgccgtggatcagatggtttataaaagtaataaccataaagcaaaaaataatttgaaagcccgtctattcctatgctcaataaagttaagtttttcttcattag

SEQ ID NO: 1410 - protein, 102 aa, Homosapiens [sequence omitted]

SEQ ID NO: 1411 - DNA, 2223 bp, Homosapiens
cgcaggctgcagcgccgcgactcgtgcgggtaggcgtctgcgctcggtttgagggctcggcgcggggtttcctgttcctccttctgcgcggctgcagctcgggacttcggcctgacccagcccccatggcttcagaagaggatgggatcagtcagataagtttgtgaaaatctacattaccttaactggagttcatcaagttcccactgagaatgtgcaggtgcatttcacagagaggtcatttgatcttttggtaaagaatctaaatgggaagagttactccatgattgtgaacaatctcttgaaacccatctctgtggaaggcagttcaaaaaaagtcaagactgatacagttcttatattgtgtagaaagaaagtggaaaacacaaggtgggattacctgacccaggttgaaaaggagtgcaaagaaaaagagaagccctcctatgacactgaaacagatcctagtgagggattgatgaatgttctaaagaaaatttatgaagatggagacgatgatatgaagcgaaccattaataaagcctgggtggaatcaagagagaagcaagccaaaggagacacggaattttgagactttaaagtcgttttgggaactgtgatgtgatgtggaaatactgatgtttccagtaagggaatattggtgagctgcatatataaatttgacagatagctatttacatagccttctaagtaaaggcaatgaattctccatttcctactggaggatttatttaaataaaatatgcttattaaacactcctgcaaagatggttttattagtaccctggtcattttgttcaaggaagggttatattgcattctcacgtgaaatataaaaagcaagtcttgcccaataaaaacgctacattgtgtgtattttttgttcagctaagaattggaaaagtatttgcttgccttttaagttactgacatcagcttccaccagtgtaaaaattgagtaaaacctgaagttttgcataaaatgcaaatcggtgcctgtgcttgaaggttgctgtagagcatctgaccccttattaccaccttaagcaatgtatatgccatgcattaccatgcactaattcaatcacaggtgtttctatctagatttaaatatatttgtcaatgaatgtggaatagaaaatctaaacatgacaataatagacatatctttgtatggtaccagttagttttgccgtggatcagatggtttataaaagtaataaccataaagcaaaaaataatttgaaagcccgtctattcctatgctcaataaagttaagtttttcttcattagaacagttttatgatttatttgtctaggagtatgtcagaaaaatcaggcttttagtaggaattactcctattccccctgaagtcaggaccagtgcctgtgatctccattactttattttcctggaggtattagccaacacagttagatcagagaaagcaattgaagccaggcatgaaggctggcgcccgtaatcccagctactaaggctggaggatcacttcagcccaggagtttaaggctgcagtgagctatgatgatgccactgtactgcagcttgggtaacagattgagaacctgtctcattaaaaaaaaaaaaaaaaaaaaagccgttagacacacaggaaaaatccagaagggtaaactaaactaaagctacaattaatatgggaatttggaagaagtggtaggatttaaaatacagaaacagtttatgtataggatagctataagtaaatactgaaacacattatgcctctgtaattggggttgacacatgaacagaatagcagacacaatgcatatgaaagttacagaatatggtaaaagtggggtaaagatgggtttttaatgatactaagataactgaaaataggcatatagatatattccaagccgcctgacgatctaattgtaaaaagtaaagcatacaaatactagaagaaaatggaggaaaacgacattatatgtgacttaaaacctagaagaaataaataaaactattgatcaattttaactacataaaaatgtttataggacaagaaaaaccccaccataacccaaggcaaacaatgtattgacaggattccaataattaagaatacttcatacaaaaagaaatgtaaatgacctttaacatgtaaagatgctcaccttgttcagaagagaataaaccagtgtttttacctttc

SEQ ID NO: 1412 - protein, 102 aa, Homosapiens [sequence omitted]

SEQ ID NO: 1413 - DNA, 615 bp, Homosapiens
cccgcgccagtcagtgcgccgccttcccgggggacacctcactcgccccttgctgcgccgtcggctccccagcgcttccactcgacctcgcaccccactcgcctgctgggctcgagcgggggtgtgcggcgattatccgtgcaggcggtgcggggagtgggtctgggagagcggccctttgcgcgtgttcctcaggccctttctgccctggtttcccagccagtggacaggaagcttcattcaagcaaagctgggtgcaaacatgagtgtcgttcttggtagagggcggttggaagctacagaaagatctagaagaggtaaaggtgttgctggaaaaggctactaggaaaagagtacgtgatgcccttacagctgaaaaatccaagattgagacagaaatcaagaacaagatgcaacagaaatcacagaagaaagcagaacttcttgataatgaaaaaccagctgctgtggttgctcccattacaacgggctatacggtgaaaatcagtaattatggatgggatcagtcagataagtttgtgaaaatctacattaccttaactggagttcatcaagttcccactgagaatgtgcaggtgcatttcacagagaggt

SEQ ID NO: 1414 - protein, 67 aa, Homosapiens
MQQKSQKKAELLDNEKPAAVVAPITTGYTVKISNYGWDQSDKFVKIYITLTGVHQVPTENVQVHFTE

SEQ ID NO: 1415 - DNA, 1749 bp, Homosapiens
atccctctacttcctgccagtgttaacaacctgaatgatagtatcttccggtgctttcgtttccccattgttgtatatgttttctttttaaaggaagccctcctatgacactgaaacagatcctagtgagggattgatgaatgttctaaagaaaatttatgaagatggagacgatgatatgaagcgaaccattaataaagcctgggtggaatcaagagagaagcaagccaaaggagacacggaattttgagactttaaagtcgttttgggaactgtgatgtgatgtggaaatactgatgtttccagtaagggaatattggtgagctgcatatataaatttgacagatagctatttacatagccttctaagtaaaggcaatgaattctccatttcctactggaggatttatttaaataaaatatgcttattaaacactcctgcaaagatggttttattagtaccctggtcattttgttcaaggaagggttatattgcattctcacgtgaaatataaaaagcaagtcttgcccaataaaaacgctacattgtgtgtattttttgttcagctaagaattggaaaagtatttgcttgccttttaagttactgacatcagcttccaccagtgtaaaaattgagtaaaacctgaagttttgcataaaatgcaaatcggtgcctgtgcttgaaggttgctgtagagcatctgaccccttattaccaccttaagcaatttagttttgccgtggatcagatggtttataaaagtaataaccataaagcaaaaaataatttgaaagcccgtctattcctatgctcaataaagttaagtttttcttcattagaacagttttatgatttatttgtctaggagtatgtcagaaaaatcaggcttttagtaggaattactcctattccccctgaagtcaggaccagtgcctgtgatctccattactttattttcctggaggtattagccaacacagttagatcagagaaagcaattgaagccaggcatgaaggctggcgcccgtaatcccagctactaaggctggaggatcacttcagcccaggagtttaaggctgcagtgagctatgatgatgccactgtactgcagcttgggtaacagattgagaacctgtctcattaaaaaaaaaaaaaaaaaaaaagccgttagacacacaggaaaaatccagaagggtaaactaaactaaagctacaattaatatgggaatttggaagaagtggtaggatttaaaatacagaaacagtttatgtataggatagctataagtaaatactgaaacacattatgcctctgtaattggggttgacacatgaacagaatagcagacacaatgcatatgaaagttacagaatatggtaaaagtggggtaaagatgggtttttaatgatactaagataactgaaaataggcatatagatatattccaagccgcctgacgatctaattgtaaaaagtaaagcatacaaatactagaagaaaatggaggaaaacgacattatatgtgacttaaaacctagaagaaataaataaaactattgatcaattttaactacataaaaatgtttataggacaagaaaaaccccaccataacccaaggcaaacaatgtattgacaggattccaataattaagaatacttcatacaaaaagaaatgtaaatgacctttaacatgtaaagatgctcaccttgttcagaagagaataaaccagtgtttttacctttc

SEQ ID NO: 1416 - protein, 39 aa, Homosapiens
MMMPLYCSLGNRLRTCLIKKKKKKKAVRHTGKIQKGKLN

SEQ ID NO: 1417 - DNA, 560 bp, Homosapiens
aggatgtggctgatgaagaaattgctgccctcccccgggatagctgtcctgttagaatcagaaatcggtgtgttatgacgtcccgtccgcgtggtgtgaagcggcgctggaggcttagtcgtatagtcttccgtcacttagctgaccatgggcaactttctgggatccagcgagcgacatgcctcaactcaatacagttgtttttatacttctttttcaagtgaaaggtaaaaacactggtttattctcttctgaacaaggttctcaatctgttacccaagctgcagtacagtggcatcatcatagctcactgcagccttaaactcctgggctgaagtgatcctccagccttagtagctgggattacgggcgccagccttcatgcctggcttcaattgctttctctgatctaactgtgttggctaatacctccaggaaaataaagtaatggagatcacaggcactggtcctgacttcagggggaataggagtaattcctactaaaagcctgatttttctgacatactcctagacaaataaatcataaaactgttctaatg

SEQ ID NO: 1418 - protein, 49 aa, Homosapiens
MTSRPRGVKRRWRLSRIVFRHLADHGQLSGIQRATCLNSIQLFLYFFFK

SEQ ID NO: 1419 - DNA, 2571 bp, Homosapiens
ggacaacatggcggccttcatgctgggctcgctgctgcggacgttcaagcaggtcaggcctctacttttatccacaccgctacccctcaccgctgaatctcataacccacgggtcccccacggctctgccacctgtagtgctcgatggttccttcatcagcttcaggccaagttcgaagtcactatgtagactggagaatgtggcgcgatgtgaagagacgaaaaatggcctatgaatacgcagatgagaggctacgtattaattcactcaggaagaataccattttgccaaaaattcttcaggatgtggctgatgaagaaattgctgccctcccccgggatagctgtcctgttagaatcagaaatcggtgtgttatgacgtcccgtccgcgtggtgtgaagcggcgctggaggcttagtcgtatagtcttccgtcacttagctgaccatgggcaactttctgggatccagcgagcgacatggtaaatgagctccagaacctattgagcttgcagggaagccaagcttgcagttccagcaagcaaagattttttttaatagaccaaaccctaatctctacaggggcccagtacagttgtttggcctacctgatgctatctctaaactacttttaaaatgaagacatttgggtgtttcatgtcagtgaattatcttttctcttggacttaacaaacatactgttcccatacatagtacaaagagtagcataataaatattttctgtgaatgttttttataccctccttttaagtttaatcttttagtaacatataggggtttttgtattaagagcattatttcataaaatgctatcttatacataatccaactaattgacatgtagctcatgtatggcagtttgtaatcctggactagctttgctgacctgcagagctccccttaactattattgttagataaacagattggatagcaaggctgctgttctggattatctaatgctccacttcttcttgtgatggctgaacaaaagaaccactaagtgttttcttgtccatccttaagggactttaaaacaaattatgcctctttaagtccttgaaagtctccatctaaagaggaaaagtttgttggaacagtatatattccctatttttatgtttatttaatccataacagaaatgagtaagggtagcacaaagttctcattcagtaactcaacagtgtgatcatcagcccagtgataaaaatatacatactgaatggaagtacctacttaacatcaggaaaatattcctggagaacttaataaatcaggaggtgaggggtgagatttttttctgcacacagagggaacaaaagcacaaagaagcaaaggcactctgtagcatcagagaaccacagtcacttcagtagatcagaaatatgaagcacaagacaaggcccgtattgtggaggatctcacaaatcatgtgaaggaattaagactgacataccaggtattacagagttttaagcacaggaatgacatcatcagtttgtaatacaggtaagtgacagctgtgtggcagatggccatgagaggaaaaagctacaggcaagacaaccagttaggaggatgtcttagttgttgaggaagatgaaggcctgaactaacattgtggtattagtagaggagagaggacagatttttaaagttttaggaaagaaaattgggcaagacttacaagactgattatatctaagaggtaaagatggttctctgggttcctgataaaagtgtctagatagatggtagagggcaattccaagagggcaactccaagatagaaaatttggaaaaagaacaaatttaggggaaacagaagataagcgagttcaggttccagtcatgcggtgttggagatgcctgtgtcatctgatgaagactagtacgcagctggatagcagagtccgaaactcaggtggaggtgaagttatgagggaattatcacaatctagtttggattcatatttcttaaatatgtatgacaacttaccaactggaatgttctagctaatatctcaacttagaatccatctcactaccaatgggcaaacacttgtgttctaaagttacttgcaagtagtttatactgccaacttgatatatatacatgctatagtttgaacattttgtgtacttccaaaattcacattaaaatctaatccacaatgcgttggtattattaagaggtggggcccttaggggtgattaggccaggagggctccacactcatggatgggatcagtgcctttctaagagggcttgagggagagagtttgtcccttttacccttctgatactgcgagaaggcaccgtactggaagcagaaagcaagcccttaccaaacaccaatctgctggtgccaaatcttagacttctccagcctccagaagtgcaagaagtaaatattatttataaattcttagtctatggcattttgttacagcagcaggaatagactaagacaatgtgttgataggtttagggtcatgttttactttttcagtcatgttaaattttagatggttctaaagtcaaaact

SEQ ID NO: 1420 - protein, 113 aa, Homosapiens
MVPSSASGQVRSHYVDWRMWRDVKRRKMAYEYADERLRINSLRKNTILPKILQDVADEEIAALPRDSCPVRIRNRCVMTSRPRGVKRRWRLSRIVFRHLADHGQLSGIQRATW

SEQ ID NO: 1421 - DNA, 2519 bp, Homosapiens
ggcagtgtcaataaagtttcagcggtttgtagtttgtagcggacaacatggcggccttcatgctgggctcgctgctgcggacgttcaagcagatggttccttcatcagcttcaggccaagttcgaagtcactatgtagactggagaatgtggcgcgatgtgaagagacgaaaaatggcctatgaatacgcagatgagaggctacgtattaattcactcaggaagaataccattttgccaaaaattcttcaggatgtggctgatgaagaaattgctgccctcccccgggatagctgtcctgttagaatcagaaatcggtgtgttatgacgtcccgtccgcgtggtgtgaagcggcgctggaggcttagtcgtatagtcttccgtcacttagctgaccatgggcaactttctgggatccagcgagcgacatggtaaatgagctccagaacctattgagcttgcagggaagccaagcttgcagttccagcaagcaaagattttttttaatagaccaaaccctaatctctacaggggcccagtacagttgtttggcctacctgatgctatctctaaactacttttaaaatgaagacatttgggtgtttcatgtcagtgaattatcttttctcttggacttaacaaacatactgttcccatacatagtacaaagagtagcataataaatattttctgtgaatgttttttataccctccttttaagtttaatcttttagtaacatataggggtttttgtattaagagcattatttcataaaatgctatcttatacataatccaactaattgacatgtagctcatgtatggcagtttgtaatcctggactagctttgctgacctgcagagctccccttaactattattgttagataaacagattggatagcaaggctgctgttctggattatctaatgctccacttcttcttgtgatggctgaacaaaagaaccactaagtgttttcttgtccatccttaagggactttaaaacaaattatgcctctttaagtccttgaaagtctccatctaaagaggaaaagtttgttggaacagtatatattccctatttttatgtttatttaatccataacagaaatgagtaagggtagcacaaagttctcattcagtaactcaacagtgtgatcatcagcccagtgataaaaatatacatactgaatggaagtacctacttaacatcaggaaaatattcctggagaacttaataaatcaggaggtgaggggtgagatttttttctgcacacagagggaacaaaagcacaaagaagcaaaggcactctgtagcatcagagaaccacagtcacttcagtagatcagaaatatgaagcacaagacaaggcccgtattgtggaggatctcacaaatcatgtgaaggaattaagactgacataccaggtattacagagttttaagcacaggaatgacatcatcagtttgtaatacaggtaagtgacagctgtgtggcagatggccatgagaggaaaaagctacaggcaagacaaccagttaggaggatgtcttagttgttgaggaagatgaaggcctgaactaacattgtggtattagtagaggagagaggacagatttttaaagttttaggaaagaaaattgggcaagacttacaagactgattatatctaagaggtaaagatggttctctgggttcctgataaaagtgtctagatagatggtagagggcaattccaagagggcaactccaagatagaaaatttggaaaaagaacaaatttaggggaaacagaagataagcgagttcaggttccagtcatgcggtgttggagatgcctgtgtcatctgatgaagactagtacgcagctggatagcagagtccgaaactcaggtggaggtgaagttatgagggaattatcacaatctagtttggattcatatttcttaaatatgtatgacaacttaccaactggaatgttctagctaatatctcaacttagaatccatctcactaccaatgggcaaacacttgtgttctaaagttacttgcaagtagtttatactgccaacttgatatatatacatgctatagtttgaacattttgtgtacttccaaaattcacattaaaatctaatccacaatgcgttggtattattaagaggtggggcccttaggggtgattaggccaggagggctccacactcatggatgggatcagtgcctttctaagagggcttgagggagagagtttgtcccttttacccttctgatactgcgagaaggcaccgtactggaagcagaaagcaagcccttaccaaacaccaatctgctggtgccaaatcttagacttctccagcctccagaagtgcaagaagtaaatattatttataaattcttagtctatggcattttgttacagcagcaggaatagactaagacaatgtgttgataggtttagggtcatgttttactttttcagtcatgttaaattttagatggttctaaagtcaaaact

SEQ ID NO: 1422 - protein, 128 aa, Homosapiens; identical to SEQ ID NO: 95

SEQ ID NO: 1423 - DNA, 684 bp, Homosapiens
tttaaaacaaattatgcctctttaagtccttgaaagtctccatctaaagaggaaaagtttgttggaacagtatatattccctatttttatgtttatttaatccataacagaaatgagtaagggtagcacaaagttctcattcagtaactcaacagtgtgatcatcagcccagtgataaaaatatacatactgaatggaagtacctacttaacatcaggaaaatattcctggagaacttaataaatcaggaggtgaggggtgagatttttttctgcacacagagggaacaaaagcacaaagaagcaaaggcactctgtagcatcagagaaccacagtcacttcagtagatcagaaatatgaagcacaagacaaggcccgtattgtggaggatctcacaaatcatgtgaaggaattaagactgacataccaggtattacagagttttaagcacaggaatgacatcatcagtttgtaatacaggtaagtgacagctgtgtggcagatggccatgagatggaatgttctagctaatatctcaacttagaatccatctcactaccaatgggcaaacacttgtgttctaaagttacttgcaagtagtttatactgccaacttgatatatatacatgctatagtttgaacattttgtgtacttccaaaattcacattaaaatctaatccac

SEQ ID NO: 1424 - protein, 76 aa, Homosapiens
VRVAQSSHSVTQQCDHQPSDKNIHTEWKYLLNIRKIFLENLINQEVRGEIFFCTQREQKHKEAKALCSIREPQSLQ

SEQ ID NO: 1425 - DNA, 2195 bp, Homosapiens
ggacaacatggcggccttcatgctgggctcgctgctgcggacgttcaagcaggtcaggcctctacttttatccacaccgctacccctcaccgctgaatctcataacccacgggtcccccacggctctgccacctgtagtgctcgatggttccttcatcagcttcaggccaagttcgaagtcactatgtagactggagaatgtggcgcgatgtgaagagacgaaaaatggcctatgaatacgcagatgagaggctacgtattaattcactcaggaagaataccattttgccaaaaattcttcaggatgtggctgatgaagaaattgctgccctcccccgggatagctgtcctgttagaatcagaaatcggtgtgttatgacgtcccgtccgcgtggtgtgaagcggcgctggaggcttagtcgtatagtcttccgtcacttagctgaccatgggcaactttctgggatccagcgagcgacatggtaaatgagctccagaacctattgagcttgcagggaagccaagcttgcagttccagcaagcaaagattttttttaatagaccaaaccctaatctctacaggggcccagtacagttgtttggcctacctgatgctatctctaaactacttttaaaatgaagacatttgggtgtttcatgtcagtgaattatcttttctcttggacttaacaaacatactgttcccatacatagtacaaagagtagcataataaatattttctgtgaatgttttttataccctccttttaagtttaatcttttagtaacatataggggtttttgtattaagagcattatttcataaaatgctatcttatacataatccaactaattgacatgtagctcatgtatggcagtttgtaatcctggactagctttgctgacctgcagagctccccttaactattattgttagataaacagattggatagcaaggctgctgttctggattatctaatgctccacttcttcttgtgatggctgaacaaaagaaccactaagtgttttcttgtccatccttaagggactttaaaacaaattatgcctctttaagtccttgaaagtctccatctaaagaggaaaagtttgttggaacagtatatattccctatttttatgtttatttaatccataacagaaatgagtaagggtagcacaaagttctcattcagtaactcaacagtgtgatcatcagcccagtgataaaaatatacatactgaatggaagtacctacttaacatcaggaaaatattcctggagaacttaataaatcaggaggtgaggggtgagatttttttctgcacacagagggaacaaaagcacaaagaagcaaaggcactctgtagcatcagagaaccacagtcacttcagtagatcagaaatatgaagcacaagacaaggcccgtattgtggaggatctcacaaatcatgtgaaggaattaagactgacataccaggtattacagagttttaagcacaggaatgacatcatcagtttgtaatacaggtaagtgacagctgtgtggcagatggccatgagaggaaaaagctacaggcaagacaaccagttaggaggatgtcttagttgttgaggaagatgaaggcctgaactaacattgtggtattagtagaggagagaggacagatttttaaagttttaggaaagaaaattgggcaagacttacaagactgattatatctaagaggtaaagatggttctctgggttcctgataaaagtgtctagatagatggtagagggcaattccaagagggcaactccaagatagaaaatttggaaaaagaacaaatttaggggaaacagaagataagcgagttcaggttccagtcatgcggtgttggagatgcctgtgtcatctgatgaagactagtacgcagctggatagcagagtccgaaactcaggtggaggtgaagttatgagggaattatcacaatctagtttggattcatatttcttaaatatgtatgacaacttaccaactggaatgttctagctaatatctcaacttagaatccatctcactaccaatgggcaaacacttgtgttctaaagttacttgcaagtagtttatactgccaacttgatatatatacatgctatagtttgaacattttgtgtacttccaaaattcacattaaaatctaatccac

SEQ ID NO: 1426 - protein, 113 aa, Homosapiens; identical to SEQ ID NO: 1420

SEQ ID NO: 1427 - DNA, 2143 bp, Homosapiens
ggcagtgtcaataaagtttcagcggtttgtagtttgtagcggacaacatggcggccttcatgctgggctcgctgctgcggacgttcaagcagatggttccttcatcagcttcaggccaagttcgaagtcactatgtagactggagaatgtggcgcgatgtgaagagacgaaaaatggcctatgaatacgcagatgagaggctacgtattaattcactcaggaagaataccattttgccaaaaattcttcaggatgtggctgatgaagaaattgctgccctcccccgggatagctgtcctgttagaatcagaaatcggtgtgttatgacgtcccgtccgcgtggtgtgaagcggcgctggaggcttagtcgtatagtcttccgtcacttagctgaccatgggcaactttctgggatccagcgagcgacatggtaaatgagctccagaacctattgagcttgcagggaagccaagcttgcagttccagcaagcaaagattttttttaatagaccaaaccctaatctctacaggggcccagtacagttgtttggcctacctgatgctatctctaaactacttttaaaatgaagacatttgggtgtttcatgtcagtgaattatcttttctcttggacttaacaaacatactgttcccatacatagtacaaagagtagcataataaatattttctgtgaatgttttttataccctccttttaagtttaatcttttagtaacatataggggtttttgtattaagagcattatttcataaaatgctatcttatacataatccaactaattgacatgtagctcatgtatggcagtttgtaatcctggactagctttgctgacctgcagagctccccttaactattattgttagataaacagattggatagcaaggctgctgttctggattatctaatgctccacttcttcttgtgatggctgaacaaaagaaccactaagtgttttcttgtccatccttaagggactttaaaacaaattatgcctctttaagtccttgaaagtctccatctaaagaggaaaagtttgttggaacagtatatattccctatttttatgtttatttaatccataacagaaatgagtaagggtagcacaaagttctcattcagtaactcaacagtgtgatcatcagcccagtgataaaaatatacatactgaatggaagtacctacttaacatcaggaaaatattcctggagaacttaataaatcaggaggtgaggggtgagatttttttctgcacacagagggaacaaaagcacaaagaagcaaaggcactctgtagcatcagagaaccacagtcacttcagtagatcagaaatatgaagcacaagacaaggcccgtattgtggaggatctcacaaatcatgtgaaggaattaagactgacataccaggtattacagagttttaagcacaggaatgacatcatcagtttgtaatacaggtaagtgacagctgtgtggcagatggccatgagaggaaaaagctacaggcaagacaaccagttaggaggatgtcttagttgttgaggaagatgaaggcctgaactaacattgtggtattagtagaggagagaggacagatttttaaagttttaggaaagaaaattgggcaagacttacaagactgattatatctaagaggtaaagatggttctctgggttcctgataaaagtgtctagatagatggtagagggcaattccaagagggcaactccaagatagaaaatttggaaaaagaacaaatttaggggaaacagaagataagcgagttcaggttccagtcatgcggtgttggagatgcctgtgtcatctgatgaagactagtacgcagctggatagcagagtccgaaactcaggtggaggtgaagttatgagggaattatcacaatctagtttggattcatatttcttaaatatgtatgacaacttaccaactggaatgttctagctaatatctcaacttagaatccatctcactaccaatgggcaaacacttgtgttctaaagttacttgcaagtagtttatactgccaacttgatatatatacatgctatagtttgaacattttgtgtacttccaaaattcacattaaaatctaatccac

SEQ ID NO: 1428 - protein, 128 aa, Homosapiens; identical to SEQ ID NO: 95

SEQ ID NO: 1429 - DNA, 618 bp, Homosapiens
gcggacaacatggcggccttcatgctgggctcgctgctgcggacgttcaagcagatggttccttcatcagcttcaggccaagttcgaagtcactatgtagactggagaatgtggcgcgatgtgaagagacgaaaaatggcctatgaatacgcagatgagaggctacgtattaattcactcaggaagaataccattttgccaaaaatttgtcctgttagaatcagaaatcggtgtgttatgacgtcccgtccgcgtggtgtgaagcggcgctggaggcttagtcgtatagtcttccgtcacttagctgaccatgggcaactttctgggatccagcgagcgacatggtaaatgagctccagaacctattgagcttgcagggaagccaagcttgcagttccagcaagcaaagattttttttaatagaccaaaccctaatctctacaggggcccagtacagttgtttggcctacctgatgctatctctaaactacttttaaaatgaagacatttgggtgtttcatgtcagtgaattatcttttctcttggacttaacaaacatactgttcccatacatagtacaaagagtagcataataaatattttctgtgaatgtttttt

SEQ ID NO: 1430 - protein, 112 aa, Homosapiens
MAAFMLGSLLRTFKQMVPSSASGQVRSHYVDWRMWRDVKRRKMAYEYADERLRINSLRKNTILPKICPVRIRNRCVMTSRPRGVKRRWRLSRIVFRHLADHGQLSGIQRATW

SEQ ID NO: 1431 - DNA, 684 bp, Homosapiens
agcggtttgtagtttgtagcggacaacatggcggccttcatgctgggctcgctgctgcggacgttcaagcagatggttccttcatcagcttcaggccaagttcgaagtcactatgtagactggagaatgtggcgcgatgtgaagagacgaaaaatggcctatgaatacgcagatgagaggctacgtattaattcactcaggaagaataccattttgccaaaaattcttcaggatgtggctgatgaagaaattgctgccctcccccgggatagctgtcctgttagaatcagaaatcggtgtgttatgacgtcccgtccgcgtggtgtgaagcggcgctggaggcttagtcgtatagtcttccgtcacttagctgaccatgggcaactttctgggatccagcgagcgacatggtaaatgagctccagaacctattgagcttgcagggaagccaagcttgcagttccagcaagcaaagattttttttaatagaccaaaccctaatctctacaggggcccagtacagttgtttggcctacctgatgctatctctaaactacttttaaaatgaagacatttgggtgtttcatgtcagtgaattatcttttctcttggacttaacaaacatactgttcccatacatagtacaaagagtagcataataaatattttctgtgaatgtttttt

SEQ ID NO: 1432 - protein, 128 aa, Homosapiens; identical to SEQ ID NO: 95

SEQ ID NO: 1433 - DNA, 585 bp, Homosapiens
ggtttgtagtttgtagcggacaacatggcggccttcatgctgggctcgctgctgcggacgttcaagcagatggttccttcatcagcttcaggccaagttcgaagtcactatgtagactggagaatgtggcgcgatgtgaagagacgaaaaatggcctatgaatacgcagatgagaggctacgtattaattcactcaggaagaataccattttgccaaaaattcttcaggatgtggctgatgaagaaattgctgccctcccccgggatagctgtcctgttagaatcagaaatcggtgtgttatgacgtcccgtccgcgtggtgtgaagcggcgctggaggcttagtcgtatagtcttccgtcacttagctgaccatgggcaactttctgggatccagcgagcgacatggtaaatgagctccagaacctattgagcttgcagggaagccaagcttgcagttccagcaagcaaagattttttttaatagaccaaaccctaatctctacaggggcccagtacagttgtttggcctacctgatgctatctctaaactacttttaaaatgaagacatttgggtgtttcatg

SEQ ID NO: 1434 - protein, 128 aa, Homosapiens; identical to SEQ ID NO: 95

SEQ ID NO: 1435 - DNA, 506 bp, Homosapiens
agcggtttgtagtttgtagcggacaacatggcggccttcatgctgggctcgctgctgcggacgttcaagcaggtcaggcctctacttttatccacaccgctacccctcaccgctgaatctcataacccacgggtcccccacggctctgccacctgtagtgctcgatggttccttcatcagcttcaggccaagttcgaagtcactatgtagactggagaatgtggcgcgatgtgaagagacgaaaaatggcctatgaatacgcagatgagaggctacgtattaattcactcaggaagaataccattttgccaaaaattcttcaggttagctaattaagatgagtccctttgtaccacaagatcattaactcaacatcagatcacttttgatactgtttgttgtgacttggtatcaatataatttctggagaataagatccacatcaatataaacaaatagtcttgaaactgattttgttgagtttcaaattaaagactattcactcc

SEQ ID NO: 1436 - protein, 60 aa, Homosapiens
MAAFMLGSLLRTFKQVRPLLLSTPLPLTAESHNPRVPHGSATCSARWFLHQLQAKFEVTM

SEQ ID NO: 1437 - DNA, 825 bp, Homosapiens
atggggacaaaaatatcaaagagccataagttaataggattcaagagtagaaaacttctgcaaagctacagggcacatcctgatgataccagcacaaagctgatgtcccttttctgcagaagatacacagtacagggctgggaggctcagccggcaatagccagcacatccaatacacccatcatcactactcatcatggaggagctggtggccaagaactggctgaggtcacgacactggacccttgcgataaacactttactctgggtaaagactgcatatttaaggacgcaactgcacatttagatcaagcggtggtgatttcagggcatacaaggagcttcatgctgagaacacccaggggtcctcaagagtcttcctcctcgtctttaatttcagaaattctgtttatagatttaaggatttcagcaaccagattcactgtctcagctccggaaaccagttgcttaatggaagcctgtgcgctgttcatgaccacccggaggttctgcaaggccacgtcggcgttctgcttcaccactgtcaggctggcgccctggccgcactgcagggcgtcattctctcgctggaagttggagacctgcgcctggagcaaattgatttcctgtttcagtttcacgacgtggttttctgcctttacagcccgtttggtcatcagctccaggttctgctccacctgctgaaccaccgactccaagtcgtggtagtcgctttcctccttgatcatttttgcttctaatttccgctcaagtgtcctcaccatttctgtttgagcttcagagaagctctgaacctcattcagc

SEQ ID NO: 1438 - protein, 234 aa, Homosapiens
MGTKISKSHKLIGFKSRKLLQSYRAHPDDTSTKLMSLFCRRYTVQGWEAQPAIASTSNTPIITTHHGGAGGQELAEVTTLDPCDKHFTLGKDCIFKDATAHLDQAVVISGHTRSFMLRTPRGPQESSSSSLISEILFIDLRISATRFTVSAPETSCLMEACALFMTTRRFCKATSAFCFTTVRLAPWPHCRASFSRWKLETCAWSKLISCFSFTTWFSAFTARLVISSRFCSTC

SEQ ID NO: 1439 - DNA, 5009 bp, Homosapiens
aagtaccaaggtctgcggcaggaggagaccggctcacaggagcagcagcattggaagaggcacccagcagcctcccaggcatcctggagggtctgctccctgtctttccaaggatgagtctccaggagatgttccgcttccctatggggctcctgcttggctctgtgctcctggtggcttcggccccagccactctggagcctcccggctgcagcaacaaggagcaacaggtcactgtcagccacacctacaagatcgatgtgcccaagtctgccttggttcaggttgacgctgaccctcagcccctcagtgacgatggggcttcgctcttggccctgggggaggccagggaggaacagaacatcatcttcaggcacaacatccgccttcagacgccacagaaggactgcgagttggcaggcagtgtccaggacctcctggcccgggtgaagaagctggaggaagagatggtggagatgaaggaacagtgtagtgcccagcgctgctgccagggagtcactgatctaagccgccactgcagcggccacgggaccttctccctggagacctgcagctgccactgcgaagagggcagggagggccccgcctgcgagcggctggcctgccccggggcgtgcagcggccacgggcgttgcgtggacgggcgctgcctgtgccatgagccctacgtgggtgccgactgcggctacccggcctgccctgagaactgcagcggacacggcgagtgcgtgcgcggcgtgtgccagtgccacgaagacttcatgtcggaggactgcagcgagaagcgctgtcccggcgactgcagcggccacggcttctgtgacacgggcgagtgctactgcgaggagggcttcacaggcctggactgtgcccaggtggtcaccccacagggcctgcagctgctcaagaacacggaggattctctgctggtgagctgggagccctccagccaggtggatcactacctcctcagctactaccccctggggaaggagctctctgggaagcagatccaagtgcccaaggagcagcacagctatgagattcttggtttgctgcctggaaccaagtacatagtcaccctgcgtaacgtcaagaatgaagtttctagcagcccacagcatctacttgccaccacagaccttgctgtgcttggcactgcctgggtgacagatgagactgagaactcccttgacgtggagtgggaaaacccctcaactgaggtggactactacaagctgcgatatggccccatgacaggacaggaggtagctgaggtcactgtgcccaagagcagtgaccccaagagccgatatgacatcactggtctgcacccggggactgagtataagatcacggtggtgcccatgagaggagagctggagggcaagccgatcctcctgaatggcaggacagaaattgacagtccaaccaatgttgtcactgatcgagtgactgaagacacagcaactgtctcctgggacccagtgcaggctgtcatagacaagtatgtagtgcgctacacttctgctgatggggacaccaaggaaatggcagtgcacaaggatgagagcagcactgtcctgacgggcctgaagccaggagaggcatacaaggtctacgtgtgggctgaaaggggcaaccaggggagcaagaaagctgacaccaatgccctcacagaaattgacagcccagcaaacctggtgactgaccgggtgactgagaataccgccaccatctcctgggacccggtacaggccaccattgacaagtacgtggtgcgctacacctctgctgacgaccaagagaccagagaggttctggtggggaaggagcagagcagcactgtcctgacaggcctgaggccaggtgtggagtacacagtgcatgtctgggcccagaagggggaccgagagagcaagaaggctgacaccaacgccccgacagatattgacagccccaaaaacctggtgactgaccgggtgacagagaatatggccacggtctcctgggacccggtgcaggccgccattgacaagtacgtggtgcgctacacctctgctggtggagagaccagggaggttccggtggggaaggagcagagcagcacagtcctgacaggcctgagaccgggtatggagtacatggtgcacgtgtgggcccagaagggggaccaggagagcaagaaggccgacaccaaggcccagacagacattgacagcccccaaaacctggtgaccgaccgggtgacagagaatatggccactgtctcctgggacccggtgcgggccaccattgacaggtatgtggtgcgctacacctctgccaaggacggagagaccagggaggttccggtggggaaggagcagagtagcactgtcctgacgggcctgaggccgggtgtggagtacacggtgcacgtgtgggcccagaagggggcccaggagagcaagaaggctgacaccaaggcccagacagacattgacagcccccaaaacctggtcactgactgggtgacagagaatacagccactgtctcctgggacccggtgcaggccaccattgacaggtatgtggtgcactacacgtctgccaacggagagaccagggaggttccagtggggaaggagcagagcagcactgtcctgacgggcctgaggccgggcatggagtacacggtgcacgtgtgggcccagaaggggaaccaggagagcaagaaggctgacaccaaggcccagacagaaattgacggccccaaaaacctagtgactgactgggtgacggagaatatggccactgtctcctgggacccggttcaggccaccattgacaagtacatggtgcgctacacctctgctgacggagagaccagggaggttccggtggggaaggagcacagcagcactgtcctgacgggcctgagaccaggcatggagtacatggtgcacgtgtgggcccagaagggggcccaggagagcaagaaggctgacaccaaggcccagacagaactcgaccctcccagaaaccttcgtccatctgctgtaacgcagtctggtggcatattgacctggacgcccccctctgctcagatccacggctacattctgacttaccagttcccagatggcacagttaaggagatgcagctgggacgggaagaccagaggtttgcgttgcaaggccttgagcaaggcgccacctaccctgtctcccttgttgcctttaagggtggtcgccggagcagaaatgtatccaccaccctctccacagttggtgcccgtttcccacacccttcggactgcagtcaggttcagcagaacagcaatgccgccagtggtctgtacaccatctacctgcatggcgatgccagccggcccctgcaggtgtactgtgacatggaaacggacggaggtggctggattgtcttccagaggcggaacactgggcagctggatttcttcaagcgatggaggagctatgtggaaggctttggggaccccatgaaggagttctggcttggacttgacaagctacacaacctcaccaccggcactccagcgcggtatgaggtgagagtggatttacagactgccaatgaatctgcctatgctatatatgatttcttccaagtggcctccagcaaggagcggtataagctgacagttgggaaatacagaggcacggcaggggatgctcttacttaccacaatggatggaagtttacaacttttgacagagacaatgatatcgcactcagcaactgtgccctgacacatcatggtggctggtggtataagaactgccacttggccaaccctaatggcagatatggggagaccaagcacagtgagggggtgaactgggagccttggaaaggacatgaattctccattccttacgtggagttgaaaatccgccctcatggctacagcagggagcctgtcctgggcagaaagaagcggacgctgagaggaaggctgcgaacgttctgatggcccgtgtgagcagtcctcgcaggagacaccaccagctgtggcagcttggggcggggtgggtagtggtcactgcggtctgggagtgctcagatagcccgcagaacaaatcatgtcaccaagcttcaagccatggaggttccttccctctcacctgcatttttgcccgtctttatgagggtcttgaaaatcaaaatagtagttgcacagtatgtgtaggaaagacagtactggaacggcaaggtttctcagcttatcttcagcaacatatatactggattagggcaagagaaggaatcacccagcacttcaccagttggaaatctctggaaatttacatctatgtatttaaagttctgctaatgcaaatcttttctctggaaagaagcacagaggaggagttctgatgacccaggggttagggctgagacaaccggacgtttgtcacctcctttcccattgggtttttaggaaaacagtgtgaacctcccccttttaatttctggtgttatgaggaagaataaaggggataaaaggggctaagatggactcatgtttagctaagttctgacttgtatccagcatgctggagaccaaagctgccgccttactgctatttttaagtgccctcttttcagtcatttgcataattgcgtccatagagctgcatatgttgtgaataaattctcactcatttcaactttgaataatttgactgtcttgataattggttcctcccaaagactcttctgcaactcccattcatgcccaccaggcctcagactccctcttttccccgccctgcactattggagccctgggttttgtgggagtgctcagcaccgtgagtcttactgtttgatcggacagttagcaagatcagatcctttttgcttattttctatcactttggagggttttctgtagcaaaatcagtgaccaatgaagtaacttaaattcctattgaagaaaaaaaataataaaccacttgattta

SEQ ID NO: 1440 - protein, 1299 aa, Homosapiens; identical to SEQ ID NO: 97

SEQ ID NO: 1441 - DNA, 728 bp, Homosapiens
atcagtgccttcttcagctctatctgggacaccatcttgaccaaacaccaagaaggcatctacaacaccatctgcctgggagtcctcctgggcctgccactcttggtgatcatcacactcctcttcatctgttgccattgctgctggagcccaccaggcaagaggggccagcagccagagaagaacaagaagaagaagaagaagaagaagaagaaggatgaagaagacctctggatctctgctcaacccaagcttctccagatggagaagagaccatcactgcctgtttagttaggcaggaagcagaggtgtttcctttctggggctaagcctccttctgaccacacacagacatttcaggaacccctgaaataatgcactatgtccatgtccacagagtaactactcaaccaaggaacaaacctcagactaagtgtcccagtggagggcagtcccagggaccacgtggacaattcttggatactgtcttggcagctatgtgtccaatagcaatgctccttactgcagacccaggcatgcctcccacctgtctctggcataccccacatgcaaagcacaaagaacatttatccatacatctcaatatggttcccaagttgtgtgtaagtgtgtgtacactgttcaatatggttcaatatggtaccaatagccacatgtgactatttaaattcattgcaatgaaataaaattaaaggtatactagctca

SEQ ID NO: 1442 - protein, 101 aa, Homosapiens
MHYVHVHRVTTQPRNKPQTKCPSGGQSQGPRGQFLDTVLAAMCPIAMLLTADPGMPPTCLWHTPHAKHKEHLSIHLNMVPKLCVSVCTLFNMVQYGTNSHM

SEQ ID NO: 1443 - DNA, 2016 bp, Homosapiens
atgctggagagcacatgtaggtgacacatgtgccttgaggtatgtgaggacatgtaaattagatccacagtgagctgaggagggctttccccgccagagtgaggttgggaagcagagttaatccacttataggatgaactgcttggtatttttattgtattgtgactgtattacaaagatggacaattcactccttgggagcaagttatgctctagaagtttatttacaaatatgctgggcagctctcttgaaatattttcccaaggaagctattctacacagtggcaaaattgctatctaattaataatgtagctaaactatgatatttatagtagcaaaaaactaaattctataagattgcattaaaggaaagatatattctatttgctcacttgggctgcttggtactcacctgccctccaggtgtactttaggcctgtggagggtgggcatttagtggtgacccttgcaccagggttttctaacagatgaccctgtgaatcataatttaaacctgcatatattttatagccagtcacatttgccctctcaccctatatggccataaactgcctaagcactcaggcctcccactcatcaacccctttgaccagagaaagaagcactctggttctctatccccttgtcacatagagagtttgtcatggggcctctggctgtgcccttcacataacagaatgacttgccatctgcctgcaccaaacccagggatgtggaagacatctccccacaactgccactgctcaccaggacaagctgcccttcctgtctccacctctcagtccccctagaatggatggctggggagaggtggaggctgacagctgagacgtagtgtcagatatgatctaggagggcggatcaccgggatccgggaccatacaagtaacatggtttccatggcaactgcttgctcctttgaattaagacagcagtcagttgtcattgccatgacaaggcctctatctccaggcacaatgtccctgctgtctcctaatccaatggacttgctctcaccccagggatgaaacacccagaaactcacttctcagtcacttccacagccgatgactcagaagagccaaacccagaatggggcctctcttttccccatcacagactcccctgacaacctttcctggcgtaactagaggagtcccagtgcaggataggccctaaacgttttgttaaataaacaggtgcatgaaaggagcctaaggccattgttgatatccactctctttcctttccccattgctcaatggattccatgtttctttttcttggggggagcagggagggagaaaggtagaaaaatggcagccacctttccaagaaaaatataaagggtccaagctgtatagtatttgtcagtatttttttctgtaaaattcaaacacacacaaaagaaaaatttatttaaataaaatactttgaaaatgaaaagtcttgatgtagtcagatggttactctcttaacattaggtattacccccactcagacatcactcagaaatgatcaatgcagggactctttctgtgacacaaatgtcccagccctccctggtcaccgccttcgccatggtagagtcataggtctgaggatgaggaatgtggctgtctcacccttgcttgcaaaacagatggccttggagaccagactccctcaaaggtgccagctacaggaaaaatatactgatgttccttggcaacacttacagaactttccatcaatgaggtccatcaatggcttcttaaaggaaaaggggggaaatagcaaaaacctaaggaagaatggacctttgagttaaatccagtgtttgttgggaaaggagggatcaaaaacctctatagtagccactagggcaaaaactgtgtgtatgtgtgtgtgtaagtgtgtgtacactgttcaatatggttcaatatggtaccaatagccacatgtgactatttaaattcattgcaatgaaataaaattaaaggtatactagctc

SEQ ID NO: 1444 - protein, 115 aa, Homosapiens [sequence omitted]

SEQ ID NO: 1445 - DNA, 1263 bp, Homosapiens
agcccaccaggcaagaggggccagcagccagagaagaacaagaagaagaagaagaagaagaagaagaaggatgaagaagacctctggatctctgctcaacccaagcttctccagatggagaagagaccatcactgcctgtttagttaggcaggaagcagaggtgtttcctttctggggctaagcctccttctgaccacacacagacatttcaggaacccctgaaataatgcactatgtccatgtccacagagtaactactcaaccaaggaacaaacctcagactaagtgtcccagtggagggcagtcccagggaccacgtggacaattcttggatactgtcttggcagctatgtgtccaatagcaatgctccttactgcagacccaggcatgcctcccacctgtctctggcataccccacatgcaaagcacaaagaacatttatccatacatctcaatatggttcccaagtgtgtgcacatgcacgtaacacacacacacacaaattcaggtagcaggtacgtgggcaagtatattctgctcatcaaatggtcattggctatgtactttgtgcagggaagtacattatctacaccacctttccaagaaaaatataaagggtccaagctgtatagtatttgtcagtatttttttctgtaaaattcaaacacacacaaaagaaaaatttatttaaataaaatactttgaaaatgaaaagtcttgatgtagtcagatggttactctcttaacattaggtattacccccactcagacatcactcagaaatgatcaatgcagggactctttctgtgacacaaatgtcccagccctccctggtcaccgccttcgccatggtagagtcataggtctgaggatgaggaatgtggctgtctcacccttgcttgcaaaacagatggccttggagaccagactccctcaaaggtgccagctacaggaaaaatatactgatgttccttggcaacacttacagaactttccatcaatgaggtccatcaatggcttcttaaaggaaaaggggggaaatagcaaaaacctaaggaagaatggacctttgagttaaatccagtgtttgttgggaaaggagggatcaaaaacctctatagtagccactagggcaaaaactgtgtgtatgtgtgtgtgtaagtgtgtgtacactgttcaatatggttcaatatggtaccaatagccacatgtgactatttaaattcattgcaatgaaataaaattaaaggtatactagctc

SEQ ID NO: 1446 - protein, 143 aa, Homosapiens
MHYVHVHRVTTQPRNKPQTKCPSGGQSQGPRGQFLDTVLAAMCPIAMLLTADPGMPPTCLWHTPHAKHKEHLSIHLNMVPKCVHMHVTHTHTNSGSRYVGKYILLIKWSLAMYFVQGSTLSTPPFQEKYKGSKLYSICQYFFL

SEQ ID NO: 1447 - DNA, 4449 bp, Homosapiens
agaggcaaccaaaaaggaacccacacctccctccagggcccggggcgctgtcagacggggcagcaaccaggagattccctgggcctgcaggaagcccttccgcggaccgaaagactgggcggtgatcaggatctgaatgcacagggcgggtgttcagcgattgtttactacgttgaacgtgacctccaggaaagcagttctggccgagatcccctgacaacgcaaagcaagaagtaacgtggaaggaggctccccaagctggctggccattttgctgctgtgtgtggaggtgctgccagtggcatgcccaaacccaaagctggaagaggaataaattacaagtggtcaaggttgcatccttttgagcccaggacctgcttgtaagccgagagggttctctggccctaatctagccaagcaccatggagagaatcagtgccttcttcagctctatctgggacaccatcttgaccaaacaccaagaaggcatctacaacaccatctgcctgggagtcctcctgggcctgccactcttggtgatcatcacactcctcttcatctgttgccattgctgctggagcccaccaggcaagaggggccagcagccagagaagaacaagaagaagaagaagaagaagaagaagaaggatgaagaagacctctggatctctgctcaacccaagcttctccagatggagaagagaccatcactgcctgtttagttaggcaggaagcagaggtgtttcctttctggggctaagcctccttctgaccacacacagacatttcaggaacccctgaaataatgcactatgtccatgtccacagagtaactactcaaccaaggaacaaacctcagactaagtgtcccagtggagggcagtcccagggaccacgtggacaattcttggatactgtcttggcagctatgtgtccaatagcaatgctccttactgcagacccaggcatgcctcccacctgtctctggcataccccacatgcaaagcacaaagaacatttatccatacatctcaatatggttcccaagtgtgtgcacatgcacgtaacacacacacacacaaattcaggtagcaggtacgtgggcaagtatattctgctcatcaaatggtcattggctatgtactttgtgcagggaagtacattatctacagtcacaaaaatgtctcatgggaaagccttgccagattcagacacatatatacaatttcctaaccagcaaggcccccatacaccatctattccataaaccactcaggttacagatgcatgctttcctatttctaactctacacataaacttttactggaagtactcataattggacattccagcaacctgctacagtccccacccttgtgtgtcttgatacagacacaccaagtttctgtgcctctgacccctcacctgtgccaagatgtttaaagtgtgatggttcaaaattcattgaaagctcttttcttgtaactcatgacaaagtccgtcctcattgccactgagaggtgtttaatgtgatccaagacctctctgtgaaacattacccccgcaaaccactcagcaaagtgcctttctccaagcaagaacaaagagctcttggtggtgactgctagaaaattatggaagcccactcatttatgtcagtggactgcaactgtgtacctgtgcaatgtttacagatggaaagggtgaggagatgctacacctgagctaggtatctcctatataaccaaagtttccagcagggaaggaactagacaatcatcagtgcagtctcacagaaggcaacactggaagtgatgtcataaggttgtgatgtgtgcacggtatggcacaggtgggatgcagaggtaacagagtttaaatgaaagtaggatgaagctataaagaggtttatttatatttatattgaagctcaggcaagtgccttgcacacagtaggtacttataactaactgtggttactgttggatatgtgatgttgttaagggtaagcttgtaatacctcaccagttctccccgagtgatcttctcttctaagtgagcccactaattgctgcaatggatgaaattgggtgtttaatgctggagagcacatgtaggtgacacatgtgccttgaggtatgtgaggacatgtaaattagatccacagtgagctgaggagggctttccccgccagagtgaggttgggaagcagagttaatccacttataggatgaactgcttggtatttttattgtattgtgactgtattacaaagatggacaattcactccttgggagcaagttatgctctagaagtttatttacaaatatgctgggcagctctcttgaaatattttcccaaggaagctattctacacagtggcaaaattgctatctaattaataatgtagctaaactatgatatttatagtagcaaaaaactaaattctataagattgcattaaaggaaagatatattctatttgctcacttgggctgcttggtactcacctgccctccaggtgtactttaggcctgtggagggtgggcatttagtggtgacccttgcaccagggttttctaacagatgaccctgtgaatcataatttaaacctgcatatattttatagccagtcacatttgccctctcaccctatatggccataaactgcctaagcactcaggcctcccactcatcaacccctttgaccagagaaagaagcactctggttctctatccccttgtcacatagagagtttgtcatggggcctctggctgtgcccttcacataacagaatgacttgccatctgcctgcaccaaacccagggatgtggaagacatctccccacaactgccactgctcaccaggacaagctgcccttcctgtctccacctctcagtccccctagaatggatggctggggagaggtggaggctgacagctgagacgtagtgtcagatatgatctaggagggcggatcaccgggatccgggaccatacaagtaacatggtttccatggcaactgcttgctcctttgaattaagacagcagtcagttgtcattgccatgacaaggcctctatctccaggcacaatgtccctgctgtctcctaatccaatggacttgctctcaccccagggatgaaacacccagaaactcacttctcagtcacttccacagccgatgactcagaagagccaaacccagaatggggcctctcttttccccatcacagactcccctgacaacctttcctggcgtaactagaggagtcccagtgcaggataggccctaaacgttttgttaaataaacaggtgcatgaaaggagcctaaggccattgttgatatccactctcttctttccacttccttctcatctttttctccatgttttatgcttctctgattccctcttctgcctgcaccagaccagccccagccctttattcctctccattttcactccttccagcctctgtccctgaactgccactggcaacccatgggacctcaggaccagagactgcttgactcatctggggagggtaagttcacgggggacaaaaaaatgattcctaaagaagaggcttcctagaccagcacaggctcgagaaagacatcccctaggcctggacttctgagcagctttagccaggctccggacggcagccagaggaggcctttccccattgctcctttccccattgctcaatggattccatgtttctttttcttggggggagcagggagggagaaaggtagaaaaatggcagccacctttccaagaaaaatataaagggtccaagctgtatagtatttgtcagtatttttttctgtaaaattcaaacacacacaaaagaaaaatttatttaaataaaatactttgaaaatgaaaagtcttgatgtagtcagatggttactctcttaacattaggtattacccccactcagacatcactcagaaatgatcaatgcagggactctttctgtgacacaaatgtcccagccctccctggtcaccgccttcgccatggtagagtcataggtctgaggatgaggaatgtggctgtctcacccttgcttgcaaaacagatggccttggagaccagactccctcaaaggtgccagctacaggaaaaatatactgatgttccttggcaacacttacagaactttccatcaatgaggtccatcaatggcttcttaaaggaaaaggggggaaatagcaaaaacctaaggaagaatggacctttgagttaaatccagtgtttgttgggaaaggagggatcaaaaacctctatagtagccactagggcaaaaactgtgtgtatgtgtgtgtgtaagtgtgtgtacactgttcaatatggttcaatatggtaccaatagccacatgtgactatttaaattcattgcaatgaaataaaattaaaggtatactagctc

SEQ ID NO: 1448 - protein, 153 aa, Homosapiens; identical to SEQ ID NO: 99

SEQ ID NO: 1449 - DNA, 2279 bp, Homosapiens
ccggggccctacacgccagacctggctcggggtgggagtgcagagttaatccacttataggatgaactgcttggtatttttattgtattgtgactgtattacaaagatggacaattcactccttgggagcaagttatgctctagaagtttatttacaaatatgctgggcagctctcttgaaatattttcccaaggaagctattctacacagtggcaaaattgctatctaattaataatgtagctaaactatgatatttatagtagcaaaaaactaaattctataagattgcattaaaggaaagatatattctatttgctcacttgggctgcttggtactcacctgccctccaggtgtactttaggcctgtggagggtgggcatttagtggtgacccttgcaccagggttttctaacagatgaccctgtgaatcataatttaaacctgcatatattttatagccagtcacatttgccctctcaccctatatggccataaactgcctaagcactcaggcctcccactcatcaacccctttgaccagagaaagaagcactctggttctctatccccttgtcacatagagagtttgtcatggggcctctggctgtgcccttcacataacagaatgacttgccatctgcctgcaccaaacccagggatgtggaagacatctccccacaactgccactgctcaccaggacaagctgcccttcctgtctccacctctcagtccccctagaatggatggctggggagaggtggaggctgacagctgagacgtagtgtcagatatgatctaggagggcggatcaccgggatccgggaccatacaagtaacatggtttccatggcaactgcttgctcctttgaattaagacagcagtcagttgtcattgccatgacaaggcctctatctccaggcacaatgtccctgctgtctcctaatccaatggacttgctctcaccccagggatgaaacacccagaaactcacttctcagtcacttccacagccgatgactcagaagagccaaacccagaatggggcctctcttttccccatcacagactcccctgacaacctttcctggcgtaactagaggagtcccagtgcaggataggccctaaacgttttgttaaataaacaggtgcatgaaaggagcctaaggccattgttgatatccactctcttctttccacttccttctcatctttttctccatgttttatgcttctctgattccctcttctgcctgcaccagaccagccccagccctttattcctctccattttcactccttccagcctctgtccctgaactgccactggcaacccatgggacctcaggaccagagactgcttgactcatctggggagggtaagttcacgggggacaaaaaaatgattcctaaagaagaggcttcctagaccagcacaggctcgagaaagacatcccctaggcctggacttctgagcagctttagccaggctccggacggcagccagaggaggcctttccccattgctcctttccccattgctcaatggattccatgtttctttttcttggggggagcagggagggagaaaggtagaaaaatggcagccacctttccaagaaaaatataaagggtccaagctgtatagtatttgtcagtatttttttctgtaaaattcaaacacacacaaaagaaaaatttatttaaataaaatactttgaaaatgaaaagtcttgatgtagtcagatggttactctcttaacattaggtattacccccactcagacatcactcagaaatgatcaatgcagggactctttctgtgacacaaatgtcccagccctccctggtcaccgccttcgccatggtagagtcataggtctgaggatgaggaatgtggctgtctcacccttgcttgcaaaacagatggccttggagaccagactccctcaaaggtgccagctacaggaaaaatatactgatgttccttggcaacacttacagaactttccatcaatgaggtccatcaatggcttcttaaaggaaaaggggggaaatagcaaaaacctaaggaagaatggacctttgagttaaatccagtgtttgttgggaaaggagggatcaaaaacctctatagtagccactagggcaaaaactgtgtgtatgtgtgtgtgtaagtgtgtgtacactgttcaatatggttcaatatggtaccaatagccacatgtgactatttaaattcattgcaatgaaataaaattaaaggtatactagctc

SEQ ID NO: 1450 - protein, 115 aa, Homosapiens [sequence omitted]

SEQ ID NO: 1451 - DNA, 4564 bp, Homosapiens; identical to SEQ ID NO: 98

SEQ ID NO: 1452 - protein, 153 aa, Homosapiens; identical to SEQ ID NO: 99

SEQ ID NO: 1453 - DNA, 4508 bp, Homosapiens
gggcaggacagagttggagcgaaacctcaactatgccaggcgtcggcccgtaggaaggcagggaacacagagggcgctgccctcggcggcagcggcagattgttccccattttggagatgaagaaactgagactcaaagcagctgagtgaccttcccaaggacacacactgaactgggcggtgatcaggatctgaatgcacagggcgggtgttcagcgattgtttactacgttgaacgtgacctccaggaaagcagttctggccgagatcccctgacaacgcaaagcaagaagtaacgtggaaggaggctccccaagctggctggccattttgctgctgtgtgtggaggtgctgccagtggcatgcccaaacccaaagctggaagaggaataaattacaagtggtcaaggttgcatccttttgagcccaggacctgcttgtaagccgagagggttctctggccctaatctagccaagcaccatggagagaatcagtgccttcttcagctctatctgggacaccatcttgaccaaacaccaagaaggcatctacaacaccatctgcctgggagtcctcctgggcctgccactcttggtgatcatcacactcctcttcatctgttgccattgctgctggagcccaccaggcaagaggggccagcagccagagaagaacaagaagaagaagaagaagaagaagaagaaggatgaagaagacctctggatctctgctcaacccaagcttctccagatggagaagagaccatcactgcctgtttagttaggcaggaagcagaggtgtttcctttctggggctaagcctccttctgaccacacacagacatttcaggaacccctgaaataatgcactatgtccatgtccacagagtaactactcaaccaaggaacaaacctcagactaagtgtcccagtggagggcagtcccagggaccacgtggacaattcttggatactgtcttggcagctatgtgtccaatagcaatgctccttactgcagacccaggcatgcctcccacctgtctctggcataccccacatgcaaagcacaaagaacatttatccatacatctcaatatggttcccaagtgtgtgcacatgcacgtaacacacacacacacaaattcaggtagcaggtacgtgggcaagtatattctgctcatcaaatggtcattggctatgtactttgtgcagggaagtacattatctacagtcacaaaaatgtctcatgggaaagccttgccagattcagacacatatatacaatttcctaaccagcaaggcccccatacaccatctattccataaaccactcaggttacagatgcatgctttcctatttctaactctacacataaacttttactggaagtactcataattggacattccagcaacctgctacagtccccacccttgtgtgtcttgatacagacacaccaagtttctgtgcctctgacccctcacctgtgccaagatgtttaaagtgtgatggttcaaaattcattgaaagctcttttcttgtaactcatgacaaagtccgtcctcattgccactgagaggtgtttaatgtgatccaagacctctctgtgaaacattacccccgcaaaccactcagcaaagtgcctttctccaagcaagaacaaagagctcttggtggtgactgctagaaaattatggaagcccactcatttatgtcagtggactgcaactgtgtacctgtgcaatgtttacagatggaaagggtgaggagatgctacacctgagctaggtatctcctatataaccaaagtttccagcagggaaggaactagacaatcatcagtgcagtctcacagaaggcaacactggaagtgatgtcataaggttgtgatgtgtgcacggtatggcacaggtgggatgcagaggtaacagagtttaaatgaaagtaggatgaagctataaagaggtttatttatatttatattgaagctcaggcaagtgccttgcacacagtaggtacttataactaactgtggttactgttggatatgtgatgttgttaagggtaagcttgtaatacctcaccagttctccccgagtgatcttctcttctaagtgagcccactaattgctgcaatggatgaaattgggtgtttaatgctggagagcacatgtaggtgacacatgtgccttgaggtatgtgaggacatgtaaattagatccacagtgagctgaggagggctttccccgccagagtgaggttgggaagcagagttaatccacttataggatgaactgcttggtatttttattgtattgtgactgtattacaaagatggacaattcactccttgggagcaagttatgctctagaagtttatttacaaatatgctgggcagctctcttgaaatattttcccaaggaagctattctacacagtggcaaaattgctatctaattaataatgtagctaaactatgatatttatagtagcaaaaaactaaattctataagattgcattaaaggaaagatatattctatttgctcacttgggctgcttggtactcacctgccctccaggtgtactttaggcctgtggagggtgggcatttagtggtgacccttgcaccagggttttctaacagatgaccctgtgaatcataatttaaacctgcatatattttatagccagtcacatttgccctctcaccctatatggccataaactgcctaagcactcaggcctcccactcatcaacccctttgaccagagaaagaagcactctggttctctatccccttgtcacatagagagtttgtcatggggcctctggctgtgcccttcacataacagaatgacttgccatctgcctgcaccaaacccagggatgtggaagacatctccccacaactgccactgctcaccaggacaagctgcccttcctgtctccacctctcagtccccctagaatggatggctggggagaggtggaggctgacagctgagacgtagtgtcagatatgatctaggagggcggatcaccgggatccgggaccatacaagtaacatggtttccatggcaactgcttgctcctttgaattaagacagcagtcagttgtcattgccatgacaaggcctctatctccaggcacaatgtccctgctgtctcctaatccaatggacttgctctcaccccagggatgaaacacccagaaactcacttctcagtcacttccacagccgatgactcagaagagccaaacccagaatggggcctctcttttccccatcacagactcccctgacaacctttcctggcgtaactagaggagtcccagtgcaggataggccctaaacgttttgttaaataaacaggtgcatgaaaggagcctaaggccattgttgatatccactctcttctttccacttccttctcatctttttctccatgttttatgcttctctgattccctcttctgcctgcaccagaccagccccagccctttattcctctccattttcactccttccagcctctgtccctgaactgccactggcaacccatgggacctcaggaccagagactgcttgactcatctggggagggtaagttcacgggggacaaaaaaatgattcctaaagaagaggcttcctagaccagcacaggctcgagaaagacatcccctaggcctggacttctgagcagctttagccaggctccggacggcagccagaggaggcctttccccattgctcctttccccattgctcaatggattccatgtttctttttcttggggggagcagggagggagaaaggtagaaaaatggcagccacctttccaagaaaaatataaagggtccaagctgtatagtatttgtcagtatttttttctgtaaaattcaaacacacacaaaagaaaaatttatttaaataaaatactttgaaaatgaaaagtcttgatgtagtcagatggttactctcttaacattaggtattacccccactcagacatcactcagaaatgatcaatgcagggactctttctgtgacacaaatgtcccagccctccctggtcaccgccttcgccatggtagagtcataggtctgaggatgaggaatgtggctgtctcacccttgcttgcaaaacagatggccttggagaccagactccctcaaaggtgccagctacaggaaaaatatactgatgttccttggcaacacttacagaactttccatcaatgaggtccatcaatggcttcttaaaggaaaaggggggaaatagcaaaaacctaaggaagaatggacctttgagttaaatccagtgtttgttgggaaaggagggatcaaaaacctctatagtagccactagggcaaaaactgtgtgtatgtgtgtgtgtaagtgtgtgtacactgttcaatatggttcaatatggtaccaatagccacatgtgactatttaaattcattgcaatgaaataaaattaaaggtatactagctc

SEQ ID NO: 1454 - protein, 153 aa, Homosapiens; identical to SEQ ID NO: 99

SEQ ID NO: 1455 - DNA, 1604 bp, Homosapiens
atgctggagagcacatgtaggtgacacatgtgccttgaggtatgtgaggacatgtaaattagatccacagtgagctgaggagggctttccccgccagagtgaggttgggaagcagagttaatccacttataggatgaactgcttggtatttttattgtattgtgactgtattacaaagatggacaattcactccttgggagcaagttatgctctagaagtttatttacaaatatgctgggcagctctcttgaaatattttcccaaggaagctattctacacagtggcaaaattgctatctaattaataatgtagctaaactatgatatttatagtagcaaaaaactaaattctataagattgcattaaaggaaagatatattctatttgctcacttgggctgcttggtactcacctgccctccaggtgtactttaggcctgtggagggtgggcatttagtggtgacccttgcaccagggttttctaacagatgaccctgtgaatcataatttaaacctgcatatattttatagccagtcacatttgccctctcaccctatatggccataaactgcctaagcactcaggcctcccactcatcaacccctttgaccagagaaagaagcactctggttctctatccccttgtcacatagagagtttgtcatggggcctctggctgtgcccttcacataacagaatgacttgccatctgcctgcaccaaacccagggatgtggaagacatctccccacaactgccactgctcaccaggacaagctgcccttcctgtctccacctctcagtccccctagaatggatggctggggagaggtggaggctgacagctgagacgtagtgtcagatatgatctaggagggcggatcaccgggatccgggaccatacaagtaacatggtttccatggcaactgcttgctcctttgaattaagacagcagtcagttgtcattgccatgacaaggcctctatctccaggcacaatgtccctgctgtctcctaatccaatggacttgctctcaccccagggatgaaacacccagaaactcacttctcagtcattccttctcatctttttctccatgttttatgcttctctgattccctcttctgcctgcaccagaccagccccagccctttattcctctccattttcactccttccagcctctgtccctgaactgccactggcaacccatgggacctcaggaccagagactgcttgactcatctggggagggtaagttcacgggggacaaaaaaatgattcctaaagaagaggcttcctagaccagcacaggctcgagaaagacatcccctaggcctggacttctgagcagctttagccaggctccggacggcagccagaggaggcctttccccattgctcctttccccattgctcaatggattccatgtttctttttcttggggggagcagggagggagaaaggtagaaaaatggcagccacctttccaagaaaaatataaagggtccaagctgtatagtatttgtcagtatttttttctgtaaaattcaaacacacacaaaagaaaaatttatttaaataaaatactttgaaaatg

SEQ ID NO: 1456 - protein, 49 aa, Homosapiens
MKHPETHFSVIPSHLFLHVLCFSDSLFCLHQTSPSPLFLSIFTPSSLCP

SEQ ID NO: 1457 - DNA, 3898 bp, Homosapiens
agaggcaaccaaaaaggaacccacacctccctccagggcccggggcgctgtcagacggggcagcaaccaggagattccctgggcctgcaggaagcccttccgcggaccgaaagactgggcggtgatcaggatctgaatgcacagggcgggtgttcagcgattgtttactacgttgaacgtgacctccaggaaagcagttctggccgagatcccctgacaacgcaaagcaagaagtaacgtggaaggaggctccccaagctggctggccattttgctgctgtgtgtggaggtgctgccagtggcatgcccaaacccaaagctggaagaggaataaattacaagtggtcaaggttgcatccttttgagcccaggacctgcttgtaagccgagagggttctctggccctaatctagccaagcaccatggagagaatcagtgccttcttcagctctatctgggacaccatcttgaccaaacaccaagaaggcatctacaacaccatctgcctgggagtcctcctgggcctgccactcttggtgatcatcacactcctcttcatctgttgccattgctgctggagcccaccaggcaagaggggccagcagccagagaagaacaagaagaagaagaagaagaagaagaagaaggatgaagaagacctctggatctctgctcaacccaagcttctccagatggagaagagaccatcactgcctgtttagttaggcaggaagcagaggtgtttcctttctggggctaagcctccttctgaccacacacagacatttcaggaacccctgaaataatgcactatgtccatgtccacagagtaactactcaaccaaggaacaaacctcagactaagtgtcccagtggagggcagtcccagggaccacgtggacaattcttggatactgtcttggcagctatgtgtccaatagcaatgctccttactgcagacccaggcatgcctcccacctgtctctggcataccccacatgcaaagcacaaagaacatttatccatacatctcaatatggttcccaagtgtgtgcacatgcacgtaacacacacacacacaaattcaggtagcaggtacgtgggcaagtatattctgctcatcaaatggtcattggctatgtactttgtgcagggaagtacattatctacagtcacaaaaatgtctcatgggaaagccttgccagattcagacacatatatacaatttcctaaccagcaaggcccccatacaccatctattccataaaccactcaggttacagatgcatgctttcctatttctaactctacacataaacttttactggaagtactcataattggacattccagcaacctgctacagtccccacccttgtgtgtcttgatacagacacaccaagtttctgtgcctctgacccctcacctgtgccaagatgtttaaagtgtgatggttcaaaattcattgaaagctcttttcttgtaactcatgacaaagtccgtcctcattgccactgagaggtgtttaatgtgatccaagacctctctgtgaaacattacccccgcaaaccactcagcaaagtgcctttctccaagcaagaacaaagagctcttggtggtgactgctagaaaattatggaagcccactcatttatgtcagtggactgcaactgtgtacctgtgcaatgtttacagatggaaagggtgaggagatgctacacctgagctaggtatctcctatataaccaaagtttccagcagggaaggaactagacaatcatcagtgcagtctcacagaaggcaacactggaagtgatgtcataaggttgtgatgtgtgcacggtatggcacaggtgggatgcagaggtaacagagtttaaatgaaagtaggatgaagctataaagaggtttatttatatttatattgaagctcaggcaagtgccttgcacacagtaggtacttataactaactgtggttactgttggatatgtgatgttgttaagggtaagcttgtaatacctcaccagttctccccgagtgatcttctcttctaagtgagcccactaattgctgcaatggatgaaattgggtgtttaatgctggagagcacatgtaggtgacacatgtgccttgaggtatgtgaggacatgtaaattagatccacagtgagctgaggagggctttccccgccagagtgaggttgggaagcagagttaatccacttataggatgaactgcttggtatttttattgtattgtgactgtattacaaagatggacaattcactccttgggagcaagttatgctctagaagtttatttacaaatatgctgggcagctctcttgaaatattttcccaaggaagctattctacacagtggcaaaattgctatctaattaataatgtagctaaactatgatatttatagtagcaaaaaactaaattctataagattgcattaaaggaaagatatattctatttgctcacttgggctgcttggtactcacctgccctccaggtgtactttaggcctgtggagggtgggcatttagtggtgacccttgcaccagggttttctaacagatgaccctgtgaatcataatttaaacctgcatatattttatagccagtcacatttgccctctcaccctatatggccataaactgcctaagcactcaggcctcccactcatcaacccctttgaccagagaaagaagcactctggttctctatccccttgtcacatagagagtttgtcatggggcctctggctgtgcccttcacataacagaatgacttgccatctgcctgcaccaaacccagggatgtggaagacatctccccacaactgccactgctcaccaggacaagctgcccttcctgtctccacctctcagtccccctagaatggatggctggggagaggtggaggctgacagctgagacgtagtgtcagatatgatctaggagggcggatcaccgggatccgggaccatacaagtaacatggtttccatggcaactgcttgctcctttgaattaagacagcagtcagttgtcattgccatgacaaggcctctatctccaggcacaatgtccctgctgtctcctaatccaatggacttgctctcaccccagggatgaaacacccagaaactcacttctcagtcacttccacagccgatgactcagaagagccaaacccagaatggggcctctcttttccccatcacagactcccctgacaacctttcctggcgtaactagaggagtcccagtgcaggataggccctaaacgttttgttaaataaacaggtgcatgaaaggagcctaaggccattgttgatatccactctcttctttccacttccttctcatctttttctccatgttttatgcttctctgattccctcttctgcctgcaccagaccagccccagccctttattcctctccattttcactccttccagcctctgtccctgaactgccactggcaacccatgggacctcaggaccagagactgcttgactcatctggggagggtaagttcacgggggacaaaaaaatgattcctaaagaagaggcttcctagaccagcacaggctcgagaaagacatcccctaggcctggacttctgagcagctttagccaggctccggacggcagccagaggaggcctttccccattgctcctttccccattgctcaatggattccatgtttctttttcttggggggagcagggagggagaaaggtagaaaaatggcagccacctttccaagaaaaatataaagggtccaagctgtatagtatttgtcagtatttttttctgtaaaattcaaacacacacaaaagaaaaatttatttaaataaaatactttgaaaatg

SEQ ID NO: 1458 - protein, 153 aa, Homosapiens; identical to SEQ ID NO: 99

SEQ ID NO: 1459 - DNA, 3996 bp, Homosapiens
agacctggctcggggtgggagtgcagaggcaaccaaaaaggaacccacacctccctccagggcccggggcgctgtcagacggggcagcaaccaggagattccctgggcctgcaggaagcccttccgcggaccgaaagattgttccccattttggagatgaagaaactgagactcaaagcagctgagtgaccttcccaaggacacacactgaactgggcggtgatcaggatctgaatgcacagggcgggtgttcagcgattgtttactacgttgaacgtgacctccaggaaagcagttctggccgagatcccctgacaacgcaaagcaagaagtaacgtggaaggaggctccccaagctggctggccattttgctgctgtgtgtggaggtgctgccagtggcatgcccaaacccaaagctggaagaggaataaattacaagtggtcaaggttgcatccttttgagcccaggacctgcttgtaagccgagagggttctctggccctaatctagccaagcaccatggagagaatcagtgccttcttcagctctatctgggacaccatcttgaccaaacaccaagaaggcatctacaacaccatctgcctgggagtcctcctgggcctgccactcttggtgatcatcacactcctcttcatctgttgccattgctgctggagcccaccaggcaagaggggccagcagccagagaagaacaagaagaagaagaagaagaagaagaagaaggatgaagaagacctctggatctctgctcaacccaagcttctccagatggagaagagaccatcactgcctgtttagttaggcaggaagcagaggtgtttcctttctggggctaagcctccttctgaccacacacagacatttcaggaacccctgaaataatgcactatgtccatgtccacagagtaactactcaaccaaggaacaaacctcagactaagtgtcccagtggagggcagtcccagggaccacgtggacaattcttggatactgtcttggcagctatgtgtccaatagcaatgctccttactgcagacccaggcatgcctcccacctgtctctggcataccccacatgcaaagcacaaagaacatttatccatacatctcaatatggttcccaagtgtgtgcacatgcacgtaacacacacacacacaaattcaggtagcaggtacgtgggcaagtatattctgctcatcaaatggtcattggctatgtactttgtgcagggaagtacattatctacagtcacaaaaatgtctcatgggaaagccttgccagattcagacacatatatacaatttcctaaccagcaaggcccccatacaccatctattccataaaccactcaggttacagatgcatgctttcctatttctaactctacacataaacttttactggaagtactcataattggacattccagcaacctgctacagtccccacccttgtgtgtcttgatacagacacaccaagtttctgtgcctctgacccctcacctgtgccaagatgtttaaagtgtgatggttcaaaattcattgaaagctcttttcttgtaactcatgacaaagtccgtcctcattgccactgagaggtgtttaatgtgatccaagacctctctgtgaaacattacccccgcaaaccactcagcaaagtgcctttctccaagcaagaacaaagagctcttggtggtgactgctagaaaattatggaagcccactcatttatgtcagtggactgcaactgtgtacctgtgcaatgtttacagatggaaagggtgaggagatgctacacctgagctaggtatctcctatataaccaaagtttccagcagggaaggaactagacaatcatcagtgcagtctcacagaaggcaacactggaagtgatgtcataaggttgtgatgtgtgcacggtatggcacaggtgggatgcagaggtaacagagtttaaatgaaagtaggatgaagctataaagaggtttatttatatttatattgaagctcaggcaagtgccttgcacacagtaggtacttataactaactgtggttactgttggatatgtgatgttgttaagggtaagcttgtaatacctcaccagttctccccgagtgatcttctcttctaagtgagcccactaattgctgcaatggatgaaattgggtgtttaatgctggagagcacatgtaggtgacacatgtgccttgaggtatgtgaggacatgtaaattagatccacagtgagctgaggagggctttccccgccagagtgaggttgggaagcagagttaatccacttataggatgaactgcttggtatttttattgtattgtgactgtattacaaagatggacaattcactccttgggagcaagttatgctctagaagtttatttacaaatatgctgggcagctctcttgaaatattttcccaaggaagctattctacacagtggcaaaattgctatctaattaataatgtagctaaactatgatatttatagtagcaaaaaactaaattctataagattgcattaaaggaaagatatattctatttgctcacttgggctgcttggtactcacctgccctccaggtgtactttaggcctgtggagggtgggcatttagtggtgacccttgcaccagggttttctaacagatgaccctgtgaatcataatttaaacctgcatatattttatagccagtcacatttgccctctcaccctatatggccataaactgcctaagcactcaggcctcccactcatcaacccctttgaccagagaaagaagcactctggttctctatccccttgtcacatagagagtttgtcatggggcctctggctgtgcccttcacataacagaatgacttgccatctgcctgcaccaaacccagggatgtggaagacatctccccacaactgccactgctcaccaggacaagctgcccttcctgtctccacctctcagtccccctagaatggatggctggggagaggtggaggctgacagctgagacgtagtgtcagatatgatctaggagggcggatcaccgggatccgggaccatacaagtaacatggtttccatggcaactgcttgctcctttgaattaagacagcagtcagttgtcattgccatgacaaggcctctatctccaggcacaatgtccctgctgtctcctaatccaatggacttgctctcaccccagggatgaaacacccagaaactcacttctcagtcacttccacagccgatgactcagaagagccaaacccagaatggggcctctcttttccccatcacagactcccctgacaacctttcctggcgtaactagaggagtcccagtgcaggataggccctaaacgttttgttaaataaacaggtgcatgaaaggagcctaaggccattgttgatatccactctcttctttccacttccttctcatctttttctccatgttttatgcttctctgattccctcttctgcctgcaccagaccagccccagccctttattcctctccattttcactccttccagcctctgtccctgaactgccactggcaacccatgggacctcaggaccagagactgcttgactcatctggggagggtaagttcacgggggacaaaaaaatgattcctaaagaagaggcttcctagaccagcacaggctcgagaaagacatcccctaggcctggacttctgagcagctttagccaggctccggacggcagccagaggaggcctttccccattgctcctttccccattgctcaatggattccatgtttctttttcttggggggagcagggagggagaaaggtagaaaaatggcagccacctttccaagaaaaatataaagggtccaagctgtatagtatttgtcagtatttttttctgtaaaattcaaacacacacaaaagaaaaatttatttaaataaaatactttgaaaatg

SEQ ID NO: 1460 - protein, 153 aa, Homosapiens; identical to SEQ ID NO: 99

SEQ ID NO: 1461 - DNA, 1728 bp, Homosapiens
ccggggccctacacgccagacctggctcggggtgggagtgcagagttaatccacttataggatgaactgcttggtatttttattgtattgtgactgtattacaaagatggacaattcactccttgggagcaagttatgctctagaagtttatttacaaatatgctgggcagctctcttgaaatattttcccaaggaagctattctacacagtggcaaaattgctatctaattaataatgtagctaaactatgatatttatagtagcaaaaaactaaattctataagattgcattaaaggaaagatatattctatttgctcacttgggctgcttggtactcacctgccctccaggtgtactttaggcctgtggagggtgggcatttagtggtgacccttgcaccagggttttctaacagatgaccctgtgaatcataatttaaacctgcatatattttatagccagtcacatttgccctctcaccctatatggccataaactgcctaagcactcaggcctcccactcatcaacccctttgaccagagaaagaagcactctggttctctatccccttgtcacatagagagtttgtcatggggcctctggctgtgcccttcacataacagaatgacttgccatctgcctgcaccaaacccagggatgtggaagacatctccccacaactgccactgctcaccaggacaagctgcccttcctgtctccacctctcagtccccctagaatggatggctggggagaggtggaggctgacagctgagacgtagtgtcagatatgatctaggagggcggatcaccgggatccgggaccatacaagtaacatggtttccatggcaactgcttgctcctttgaattaagacagcagtcagttgtcattgccatgacaaggcctctatctccaggcacaatgtccctgctgtctcctaatccaatggacttgctctcaccccagggatgaaacacccagaaactcacttctcagtcacttccacagccgatgactcagaagagccaaacccagaatggggcctctcttttccccatcacagactcccctgacaacctttcctggcgtaactagaggagtcccagtgcaggataggccctaaacgttttgttaaataaacaggtgcatgaaaggagcctaaggccattgttgatatccactctcttctttccacttccttctcatctttttctccatgttttatgcttctctgattccctcttctgcctgcaccagaccagccccagccctttattcctctccattttcactccttccagcctctgtccctgaactgccactggcaacccatgggacctcaggaccagagactgcttgactcatctggggagggtaagttcacgggggacaaaaaaatgattcctaaagaagaggcttcctagaccagcacaggctcgagaaagacatcccctaggcctggacttctgagcagctttagccaggctccggacggcagccagaggaggcctttccccattgctcctttccccattgctcaatggattccatgtttctttttcttggggggagcagggagggagaaaggtagaaaaatggcagccacctttccaagaaaaatataaagggtccaagctgtatagtatttgtcagtatttttttctgtaaaattcaaacacacacaaaagaaaaatttatttaaataaaatactttgaaaatg

SEQ ID NO: 1462 - protein, 63 aa, Homosapiens
MNCLVFLLYCDCITKMDNSLLGSKLCSRSLFTNMLGSSLEIFSQGSYSTQWQNCYLINNVAKL

SEQ ID NO: 1463 - DNA, 3957 bp, Homosapiens
gggcaggacagagttggagcgaaacctcaactatgccaggcgtcggcccgtaggaaggcagggaacacagagggcgctgccctcggcggcagcggcagattgttccccattttggagatgaagaaactgagactcaaagcagctgagtgaccttcccaaggacacacactgaactgggcggtgatcaggatctgaatgcacagggcgggtgttcagcgattgtttactacgttgaacgtgacctccaggaaagcagttctggccgagatcccctgacaacgcaaagcaagaagtaacgtggaaggaggctccccaagctggctggccattttgctgctgtgtgtggaggtgctgccagtggcatgcccaaacccaaagctggaagaggaataaattacaagtggtcaaggttgcatccttttgagcccaggacctgcttgtaagccgagagggttctctggccctaatctagccaagcaccatggagagaatcagtgccttcttcagctctatctgggacaccatcttgaccaaacaccaagaaggcatctacaacaccatctgcctgggagtcctcctgggcctgccactcttggtgatcatcacactcctcttcatctgttgccattgctgctggagcccaccaggcaagaggggccagcagccagagaagaacaagaagaagaagaagaagaagaagaagaaggatgaagaagacctctggatctctgctcaacccaagcttctccagatggagaagagaccatcactgcctgtttagttaggcaggaagcagaggtgtttcctttctggggctaagcctccttctgaccacacacagacatttcaggaacccctgaaataatgcactatgtccatgtccacagagtaactactcaaccaaggaacaaacctcagactaagtgtcccagtggagggcagtcccagggaccacgtggacaattcttggatactgtcttggcagctatgtgtccaatagcaatgctccttactgcagacccaggcatgcctcccacctgtctctggcataccccacatgcaaagcacaaagaacatttatccatacatctcaatatggttcccaagtgtgtgcacatgcacgtaacacacacacacacaaattcaggtagcaggtacgtgggcaagtatattctgctcatcaaatggtcattggctatgtactttgtgcagggaagtacattatctacagtcacaaaaatgtctcatgggaaagccttgccagattcagacacatatatacaatttcctaaccagcaaggcccccatacaccatctattccataaaccactcaggttacagatgcatgctttcctatttctaactctacacataaacttttactggaagtactcataattggacattccagcaacctgctacagtccccacccttgtgtgtcttgatacagacacaccaagtttctgtgcctctgacccctcacctgtgccaagatgtttaaagtgtgatggttcaaaattcattgaaagctcttttcttgtaactcatgacaaagtccgtcctcattgccactgagaggtgtttaatgtgatccaagacctctctgtgaaacattacccccgcaaaccactcagcaaagtgcctttctccaagcaagaacaaagagctcttggtggtgactgctagaaaattatggaagcccactcatttatgtcagtggactgcaactgtgtacctgtgcaatgtttacagatggaaagggtgaggagatgctacacctgagctaggtatctcctatataaccaaagtttccagcagggaaggaactagacaatcatcagtgcagtctcacagaaggcaacactggaagtgatgtcataaggttgtgatgtgtgcacggtatggcacaggtgggatgcagaggtaacagagtttaaatgaaagtaggatgaagctataaagaggtttatttatatttatattgaagctcaggcaagtgccttgcacacagtaggtacttataactaactgtggttactgttggatatgtgatgttgttaagggtaagcttgtaatacctcaccagttctccccgagtgatcttctcttctaagtgagcccactaattgctgcaatggatgaaattgggtgtttaatgctggagagcacatgtaggtgacacatgtgccttgaggtatgtgaggacatgtaaattagatccacagtgagctgaggagggctttccccgccagagtgaggttgggaagcagagttaatccacttataggatgaactgcttggtatttttattgtattgtgactgtattacaaagatggacaattcactccttgggagcaagttatgctctagaagtttatttacaaatatgctgggcagctctcttgaaatattttcccaaggaagctattctacacagtggcaaaattgctatctaattaataatgtagctaaactatgatatttatagtagcaaaaaactaaattctataagattgcattaaaggaaagatatattctatttgctcacttgggctgcttggtactcacctgccctccaggtgtactttaggcctgtggagggtgggcatttagtggtgacccttgcaccagggttttctaacagatgaccctgtgaatcataatttaaacctgcatatattttatagccagtcacatttgccctctcaccctatatggccataaactgcctaagcactcaggcctcccactcatcaacccctttgaccagagaaagaagcactctggttctctatccccttgtcacatagagagtttgtcatggggcctctggctgtgcccttcacataacagaatgacttgccatctgcctgcaccaaacccagggatgtggaagacatctccccacaactgccactgctcaccaggacaagctgcccttcctgtctccacctctcagtccccctagaatggatggctggggagaggtggaggctgacagctgagacgtagtgtcagatatgatctaggagggcggatcaccgggatccgggaccatacaagtaacatggtttccatggcaactgcttgctcctttgaattaagacagcagtcagttgtcattgccatgacaaggcctctatctccaggcacaatgtccctgctgtctcctaatccaatggacttgctctcaccccagggatgaaacacccagaaactcacttctcagtcacttccacagccgatgactcagaagagccaaacccagaatggggcctctcttttccccatcacagactcccctgacaacctttcctggcgtaactagaggagtcccagtgcaggataggccctaaacgttttgttaaataaacaggtgcatgaaaggagcctaaggccattgttgatatccactctcttctttccacttccttctcatctttttctccatgttttatgcttctctgattccctcttctgcctgcaccagaccagccccagccctttattcctctccattttcactccttccagcctctgtccctgaactgccactggcaacccatgggacctcaggaccagagactgcttgactcatctggggagggtaagttcacgggggacaaaaaaatgattcctaaagaagaggcttcctagaccagcacaggctcgagaaagacatcccctaggcctggacttctgagcagctttagccaggctccggacggcagccagaggaggcctttccccattgctcctttccccattgctcaatggattccatgtttctttttcttggggggagcagggagggagaaaggtagaaaaatggcagccacctttccaagaaaaatataaagggtccaagctgtatagtatttgtcagtatttttttctgtaaaattcaaacacacacaaaagaaaaatttatttaaataaaatactttgaaaatg

SEQ ID NO: 1464 - protein, 153 aa, Homosapiens; identical to SEQ ID NO: 99

SEQ ID NO: 1465 - DNA, 2484 bp, Homosapiens
gcagaggcaaccaaaaaggaacccacacctccctccagggcccggggcgctgtcagacggggcagcaaccaggagattccctgggcctgcaggaagcccttccgcggaccgaaagactgggcggtgatcaggatctgaatgcacagggcgggtgttcagcgattgtttactacgttgaacgtgacctccaggaaagcagttctggccgagatcccctgacaacgcaaagcaagaagtaacgtggaaggaggctccccaagctggctggccattttgctgctgtgtgtggaggtgctgccagtggcatgcccaaacccaaagctggaagaggaataaattacaagtggtcaaggttgcatccttttgagcccaggacctgcttgtaagccgagagggttctctggccctaatctagccaagcaccatggagagaatcagtgccttcttcagctctatctgggacaccatcttgaccaaacaccaagaaggcatctacaacaccatctgcctgggagtcctcctgggcctgccactcttggtgatcatcacactcctcttcatctgttgccattgctgctggagcccaccaggcaagaggggccagcagccagagaagaacaagaagaagaagaagaagaagaagaagaaggatgaagaagacctctggatctctgctcaacccaagcttctccagatggagaagagaccatcactgcctgtttagttaggcaggaagcagaggtgtttcctttctggggctaagcctccttctgaccacacacagacatttcaggaacccctgaaataatgcactatgtccatgtccacagagtaactactcaaccaaggaacaaacctcagactaagtgtcccagtggagggcagtcccagggaccacgtggacaattcttggatactgtcttggcagctatgtgtccaatagcaatgctccttactgcagacccaggcatgcctcccacctgtctctggcataccccacatgcaaagcacaaagaacatttatccatacatctcaatatggttcccaagtgtgtgcacatgcacgtaacacacacacacacaaattcaggtagcaggtacgtgggcaagtatattctgctcatcaaatggtcattggctatgtactttgtgcagggaagtacattatctacagtcacaaaaatgtctcatgggaaagccttgccagattcagacacatatatacaatttcctaaccagcaaggcccccatacaccatctattccataaaccactcaggttacagatgcatgctttcctatttctaactctacacataaacttttactggaagtactcataattggacattccagcaacctgctacagtccccacccttgtgtgtcttgatacagacacaccaagtttctgtgcctctgacccctcacctgtgccaagatgtttaaagtgtgatggttcaaaattcattgaaagctcttttcttgtaactcatgacaaagtccgtcctcattgccactgagaggtgtttaatgtgatccaagacctctctgtgaaacattacccccgcaaaccactcagcaaagtgcctttctccaagcaagaacaaagagctcttggtggtgactgctagaaaattatggaagcccactcatttatgtcagtggactgcaactgtgtacctgtgcaatgtttacagatggaaagggtgaggagatgctacacctgagctaggtatctcctatataaccaaagtttccagcagggaaggaactagacaatcatcagtgcagtctcacagaaggcaacactggaagtgatgtcataaggttgtgatgtgtgcacggtatggcacaggtgggatgcagaggtaacagagtttaaatgaaagtaggatgaagctataaagaggtttatttatatttatattgaagctcaggcaagtgccttgcacacagtaggtacttataactaactgtggttactgttggatatgtgatgttgttaagggtaagcttgtaatacctcaccagttctccccgagtgatcttctcttctaagtgagcccactaattgctgcaatggatgaaattgggtgtttaatgctggagagcacatgtaggtgacacatgtgccttgaggtatgtgaggacatgtaaattagatccacagtgagctgaggagggctttccccgccagagtgaggttgggaagcagagttaatccacttataggatgaactgcttggtatttttattgtattgtgactgtattacaaagatggacaattcactccttgggagcaagttatgctctagaagtttatttacaaatatgctgggcagctctcttgaaatattttcccaaggaagctattctacacagtggcaaaattgctatctaattaataatgtagctaaactatgatatttatagtagcaaaaaactaaattctataagattgcattaaaggaaagatatattct

SEQ ID NO: 1466 - protein, 153 aa, Homosapiens; identical to SEQ ID NO: 99

SEQ ID NO: 1467 - DNA, 764 bp, Homosapiens
tctgggcgcagcaactgctcctctgtctcatcaggcagtgtcccctgtgttcctgacctcctgaggagctgctggatggcttagccccttgacactggagggctgaccatgagctaggcaccaccaatcaaatgcacataatcaagactttaaattggaaactagtgatacatcaaagcagaagtcactcgcaatgggaacaactccatccagcttgctgatgcatcagtggcagcagattcaagggtggtttccagcatctactgtcagtgtggcatgaggacaagcttcagtatctgcacccagcaggagcagcactggattttcaccaggccagttctccagcacaatttgcatattgttcctggcttcgtagcccctgagcctggcccctggacctttctggaaattctgtgagccagggccagcttcatagctatgcaacctgtgccatcacacaggaccccaggttcagcacggccctgtgcttggtttaatgctctgctgttgccatcttgcaattcttacagttcttttaacaagaggcctcacctttccattttgcttggatcttgaaaattatgtaaccaatcctgctacgagctagctaatatgctttaggtcagggagttcttaacctcttatgctcatgagcccttggtagtctggtgaaacctataaagcttaggaggaatgtttttaaatgaaatgcacaaaatgaaatacataggaaaccaattatattaaaatatagtttaaaattt

SEQ ID NO: 1468 - protein, 46 aa, Homosapiens
MRTSFSICTQQEQHWIFTRPVLQHNLHIVPGFVAPEPGPWTFLEIL

SEQ ID NO: 1469 - DNA, 4831 bp, Homosapiens
agtgaagttcgtggactcctacaataatgctataaatgcatagaagaaaagacacaggactgtgaaagaaagtgatgatgcgatgtctaaaacgttcaaggcaccgcatctgtgatcaagaatacatgtgctgctttaccgacacatcaaagagcaaggattgccacccaggacgatgagcggctgagatggagacgtctgcctcagccactgcctccgagaagcaagaagccaaaagtgggatcctggaggccgctggcttccccgacccgggtaaaaaggcctctcctttggtggtggctgcagcggcagcagcagcggtagctgcccaaggagcccagccttcaccttcccccaccccatcaaccccgtggcctaccagcagattctgagccagcagaggggtctggggtcagcctttggacacacaccacccctgatccagccctcacccaccttcctggcccagcagcccatggccctcacctccatcaatgccacgcccacccagctcagcagcagcagcaactgtctgagtgacaccaaccagaacaagcagagcagtgagtcggccgtcagcagcaccgtcaaccctgtcgccattcacaagcgcagcaaggtcaagaccgagcctgagggcctgcggccggcctcccctctggcgctgacgcaggagcagctggctgacctcaaggaagatctggacagggatgactgtaagcaggaggctgaggtggtcatctatgagaccaactgccactgggaagactgcaccaaggagtacgacacccaggagcagctggtgcatcacatcaacaacgagcacatccacggggagaagaaggagtttgtgtgccgctggcaggcctgcacgcgggagcagaagcccttcaaggcgcagtacatgctggtggtgcacatgcggcgacacacgggcgagaagccccacaagtgcacgttcgagggctgctcgaaggcctactcccgcctggagaacctgaagacacacctgcggtcccacaccggggagaagccatatgtgtgtgagcacgagggctgcaacaaagccttctccaacgcctcggaccgcgccaagcaccagaatcgcacccactccaacgagaaaccctacatctgcaagatcccaggctgcaccaagagatacacagaccccagctctctccggaagcatgtgaaaacggtccacggcccagatgcccacgtcaccaagaagcagcgcaatgacgtgcacctccgcacaccgctgctcaaagagaatggggacagtgaggccggcacggagcctggcggcccagagagcaccgaggccagcagcaccagccaggccgtggaggactgcctgcacgtcagagccatcaagaccgagagctccgggctgtgtcagtccagccccggggcccagtcgtcctgcagcagcgagccctctcctctgggcagtgcccccaacaatgacagtggcgtggagatgccggggacggggcccgggagcctgggagacctgacggcactggatgacacacccccaggggccgacacctcagccctggctgccccctccgctggtggcctccagctgcgcaaacacatgaccaccatgcaccggttcgagcagctcaagaaggagaagctcaagtcactcaaggattcctgctcatgggccgggccgactccacacacgcggaacaccaagctgcctcccctcccgggaagtggctccatcctggaaaacttcagtggcagtgggggcggcgggcccgcggggctgctgccgaacccgcggctgtcggagctgtccgcgagcgaggtgaccatgctgagccagctgcaggagcgccgcgacagctccaccagcacggtcagctcggcctacaccgtgagccgccgctcctccggcatctccccctacttctccagccgccgctccagcgaggcctcgcccctgggcgccggccgcccgcacaacgcgagctccgctgactcctacgaccccatctccacggacgcgtcgcggcgctcgagcgaggccagccagtgcagcggcggctccgggctgctcaacctcacgccggcgcagcagtacagcctgcgggccaagtacgcggcagccactggcggccccccgcccactccgctgccgggcctggagcgcatgagcctgcggaccaggctggcgctgctggacgcgcccgagcgcacgctgcccgccggctgcccacgcccactggggccgcggcgtggcagcgacgggccgacctatggccacggccacgcgggggctgcgcccgccttcccccacgaggctccaggcggcggagccaggcgggccagcgaccctgtgcggcggcccgatgccctgtccctgccgcgggtgcagcgcttccacagcacccacaacgtgaaccccggcccgctgccgccctgtgccgacaggcgaggcctccgcctgcagagccacccgagcaccgacggcggcctggcccgcggcgcctactcgccccggccgcctagcatcagcgagaacgtggcgatggaggccgtggcggcaggagtggacggcgcggggcccgaggccgacctggggctgccggaggacgacctggtgcttccagacgacgtggtgcagtacatcaaggcgcacgccagtggcgctctggacgagggcaccgggcaggtgtatcccacggaaagcactggcttctctgacaaccccagactacccagcccggggctgcacggccagcgcaggatggtggctgcggactccaacgtgggcccctccgcccctatgctgggaggatgccagttaggctttggggcgccctccagcctgaacaaaaataacatgcctgtgcagtggaatgaggtgagctccggcaccgtagacgccctggccagccaggtgaagcctccaccctttcctcagggcaacctggcggtggtgcagcagaagcctgcctttggccagtacccgggctacagtccgcaaggcctacaggctagccctgggggcctggacagcacgcagccacacctgcagccccgcagcggagccccctcccagggcatccccagggtaaactacatgcagcagctgcgacagccagtggcaggcagccagtgtcctggcatgactaccactatgagcccccatgcctgctatggccaagtccacccccagctgagccccagcaccatcagtggggccctcaaccagttcccccaatcctgcagcaacatgccagccaagccagggcatctggggcaccctcagcagacagaagtggcacctgaccccaccacgatgggcaatcgccacagggaacttggggtccccgattcagccctggctggagtgccaccacctcacccagtccagagctacccacagcagagccatcacctggcagcctccatgagccaggagggctaccaccaggtccccagccttctgcctgcccgccagcctggcttcatggagccccaaacaggcccgatgggggtggctacagcaggctttggcctagtgcagccccggcctcccctcgagcccagccccactggccgccaccgtggggtacgtgctgtgcagcagcagctggcctacgccagggccacaggccatgccatggctgccatgccgtccagtcaggaaacagcagaggctgtgcccaagggagcgatgggcaacatggggtcggtgcctccccagccgcctccgcaggacgcaggtggggccccggaccacagcatgctctactactacggccagatccacatgtacgaacaggatggaggcctggagaacctcgggagctgccaggtcatgcggtcccagccaccacagccacaggcctgtcaggacagcatccagccccagcccttgccctcaccaggggtcaaccaggtgtccagcactgtggactcccagctcctggaggccccccagattgacttcgatgccatcatggatgatggcgatcactcgagtttgttctcgggtgctctgagccccagcctcctccacagcctctcccagaactcctcccgcctcaccaccccccgaaactccttgaccctgccctccatccccgcaggcatcagcaacatggctgtcggggacatgagctccatgctcaccagcctcgccgaggagagcaagttcctgaacatgatgacctagaggcccgagcgcctggtgctgagtgcacccggaggggtcatcgctgcccagagcctggggattccagctgtcttgtctttttccaaaaaagtgttaaataggcttgaggggttgttgcgcaatggccgcttcagatgacagatgttgtaagagaaggtttatgggcatcctctctggtcttttggattattcctcagaacaatgaaaaaagtctccataggacaggaaggaatgcaaaactcatttacacagtgctttccagcctttggtgcttacaggaccgcgctgttccggcttcttcacggctgacattcggctaacgagggattactttggccaaaacctttcaaaggatatgcagaaagatggtagggagcatttgggtttgaatctgaatgctatactggatactctgctccggaaagatgagctttttattctactacttggaaggaaaaggaattcctggtccacctgaattcctctatgaagcctaactcttgaggtctctaacataccttgtcatagaggaaaagcacagattatacctggatgattcaggagcactgtatatgaatgaataaagcatccaagtatatatgaatgaataaagtatgtaagtatcaccag

SEQ ID NO: 1470 - protein, 1241 aa, Homosapiens
MALTSINATPTQLSSSSNCLSDTNQNKQSSESAVSSTVNPVAIHKRSKVKTEPEGLRPASPLALTQEQLADLKEDLDRDDCKQEAEVVIYETNCHWEDCTKEYDTQEQLVHHINNEHIHGEKKEFVCRWQACTREQKPFKAQYMLVVHMRRHTGEKPHKCTFEGCSKAYSRLENLKTHLRSHTGEKPYVCEHEGCNKAFSNASDRAKHQNRTHSNEKPYICKIPGCTKRYTDPSSLRKHVKTVHGPDAHVTKKQRNDVHLRTPLLKENGDSEAGTEPGGPESTEASSTSQAVEDCLHVRAIKTESSGLCQSSPGAQSSCSSEPSPLGSAPNNDSGVEMPGTGPGSLGDLTALDDTPPGADTSALAAPSAGGLQLRKHMTTMHRFEQLKKEKLKSLKDSCSWAGPTPHTRNTKLPPLPGSGSILENFSGSGGGGPAGLLPNPRLSELSASEVTMLSQLQERRDSSTSTVSSAYTVSRRSSGISPYFSSRRSSEASPLGAGRPHNASSADSYDPISTDASRRSSEASQCSGGSGLLNLTPAQQYSLRAKYAAATGGPPPTPLPGLERMSLRTRLALLDAPERTLPAGCPRPLGPRRGSDGPTYGHGHAGAAPAFPHEAPGGGARRASDPVRRPDALSLPRVQRFHSTHNVNPGPLPPCADRRGLRLQSHPSTDGGLARGAYSPRPPSISENVAMEAVAAGVDGAGPEADLGLPEDDLVLPDDVVQYIKAHASGALDEGTGQVYPTESTGFSDNPRLPSPGLHGQRRMVAADSNVGPSAPMLGGCQLGFGAPSSLNKNNMPVQWNEVSSGTVDALASQVKPPPFPQGNLAVVQQKPAFGQYPGYSPQGLQASPGGLDSTQPHLQPRSGAPSQGIPRVNYMQQLRQPVAGSQCPGMTTTMSPHACYGQVHPQLSPSTISGALNQFPQSCSNMPAKPGHLGHPQQTEVAPDPTTMGNRHRELGVPDSALAGVPPPHPVQSYPQQSHHLAASMSQEGYHQVPSLLPARQPGFMEPQTGPMGVATAGFGLVQPRPPLEPSPTGRHRGVRAVQQQLAYARATGHAMAAMPSSQETAEAVPKGAMGNMGSVPPQPPPQDAGGAPDHSMLYYYGQIHMYEQDGGLENLGSCQVMRSQPPQPQACQDSIQPQPLPSPGVNQVSSTVDSQLLEAPQIDFDAIMDDGDHSSLFSGALSPSLLHSLSQNSSRLTTPRNSLTLPSIPAGISNMAVGDMSSMLTSLAEESKFLNMMT

SEQ ID NO: 1471 - DNA, 4882 bp, Homosapiens
agtgaagttcgtggactcctacaataatgctataaatgcatagaagaaaagacacaggactgtgaaagaaagtgatgatgcgatgtctaaaacgttcaaggcaccgcatctgtgatcaagaatacatgtgctgctttaccgacacatcaaagagcaaggattgccacccaggacgatgagcggctgagatggagacgtctgcctcagccactgcctccgagaagcaagaagccaaaagtgggatcctggaggccgctggcttccccgacccgggtaaaaaggcctctcctttggtggtggctgcagcggcagcagcagcggtagctgcccaaggagcccagccttcaccttcccccaccccatcaaccccgtggcctaccagcagattctgagccagcagaggggtctggggtcagcctttggacacacaccacccctgatccagccctcacccaccttcctggcccagcagcccatggccctcacctccatcaatgccacgcccacccagctcagcagcagcagcaactgtctgagtgacaccaaccagaacaagcagagcagtgagtcggccgtcagcagcaccgtcaaccctgtcgccattcacaagcgcagcaaggtcaagaccgagcctgagggcctgcggccggcctcccctctggcgctgacgcagggccaggtgtctggacacggctcatgtgggtgtgcccttcccctctcccaggagcagctggctgacctcaaggaagatctggacagggatgactgtaagcaggaggctgaggtggtcatctatgagaccaactgccactgggaagactgcaccaaggagtacgacacccaggagcagctggtgcatcacatcaacaacgagcacatccacggggagaagaaggagtttgtgtgccgctggcaggcctgcacgcgggagcagaagcccttcaaggcgcagtacatgctggtggtgcacatgcggcgacacacgggcgagaagccccacaagtgcacgttcgagggctgctcgaaggcctactcccgcctggagaacctgaagacacacctgcggtcccacaccggggagaagccatatgtgtgtgagcacgagggctgcaacaaagccttctccaacgcctcggaccgcgccaagcaccagaatcgcacccactccaacgagaaaccctacatctgcaagatcccaggctgcaccaagagatacacagaccccagctctctccggaagcatgtgaaaacggtccacggcccagatgcccacgtcaccaagaagcagcgcaatgacgtgcacctccgcacaccgctgctcaaagagaatggggacagtgaggccggcacggagcctggcggcccagagagcaccgaggccagcagcaccagccaggccgtggaggactgcctgcacgtcagagccatcaagaccgagagctccgggctgtgtcagtccagccccggggcccagtcgtcctgcagcagcgagccctctcctctgggcagtgcccccaacaatgacagtggcgtggagatgccggggacggggcccgggagcctgggagacctgacggcactggatgacacacccccaggggccgacacctcagccctggctgccccctccgctggtggcctccagctgcgcaaacacatgaccaccatgcaccggttcgagcagctcaagaaggagaagctcaagtcactcaaggattcctgctcatgggccgggccgactccacacacgcggaacaccaagctgcctcccctcccgggaagtggctccatcctggaaaacttcagtggcagtgggggcggcgggcccgcggggctgctgccgaacccgcggctgtcggagctgtccgcgagcgaggtgaccatgctgagccagctgcaggagcgccgcgacagctccaccagcacggtcagctcggcctacaccgtgagccgccgctcctccggcatctccccctacttctccagccgccgctccagcgaggcctcgcccctgggcgccggccgcccgcacaacgcgagctccgctgactcctacgaccccatctccacggacgcgtcgcggcgctcgagcgaggccagccagtgcagcggcggctccgggctgctcaacctcacgccggcgcagcagtacagcctgcgggccaagtacgcggcagccactggcggccccccgcccactccgctgccgggcctggagcgcatgagcctgcggaccaggctggcgctgctggacgcgcccgagcgcacgctgcccgccggctgcccacgcccactggggccgcggcgtggcagcgacgggccgacctatggccacggccacgcgggggctgcgcccgccttcccccacgaggctccaggcggcggagccaggcgggccagcgaccctgtgcggcggcccgatgccctgtccctgccgcgggtgcagcgcttccacagcacccacaacgtgaaccccggcccgctgccgccctgtgccgacaggcgaggcctccgcctgcagagccacccgagcaccgacggcggcctggcccgcggcgcctactcgccccggccgcctagcatcagcgagaacgtggcgatggaggccgtggcggcaggagtggacggcgcggggcccgaggccgacctggggctgccggaggacgacctggtgcttccagacgacgtggtgcagtacatcaaggcgcacgccagtggcgctctggacgagggcaccgggcaggtgtatcccacggaaagcactggcttctctgacaaccccagactacccagcccggggctgcacggccagcgcaggatggtggctgcggactccaacgtgggcccctccgcccctatgctgggaggatgccagttaggctttggggcgccctccagcctgaacaaaaataacatgcctgtgcagtggaatgaggtgagctccggcaccgtagacgccctggccagccaggtgaagcctccaccctttcctcagggcaacctggcggtggtgcagcagaagcctgcctttggccagtacccgggctacagtccgcaaggcctacaggctagccctgggggcctggacagcacgcagccacacctgcagccccgcagcggagccccctcccagggcatccccagggtaaactacatgcagcagctgcgacagccagtggcaggcagccagtgtcctggcatgactaccactatgagcccccatgcctgctatggccaagtccacccccagctgagccccagcaccatcagtggggccctcaaccagttcccccaatcctgcagcaacatgccagccaagccagggcatctggggcaccctcagcagacagaagtggcacctgaccccaccacgatgggcaatcgccacagggaacttggggtccccgattcagccctggctggagtgccaccacctcacccagtccagagctacccacagcagagccatcacctggcagcctccatgagccaggagggctaccaccaggtccccagccttctgcctgcccgccagcctggcttcatggagccccaaacaggcccgatgggggtggctacagcaggctttggcctagtgcagccccggcctcccctcgagcccagccccactggccgccaccgtggggtacgtgctgtgcagcagcagctggcctacgccagggccacaggccatgccatggctgccatgccgtccagtcaggaaacagcagaggctgtgcccaagggagcgatgggcaacatggggtcggtgcctccccagccgcctccgcaggacgcaggtggggccccggaccacagcatgctctactactacggccagatccacatgtacgaacaggatggaggcctggagaacctcgggagctgccaggtcatgcggtcccagccaccacagccacaggcctgtcaggacagcatccagccccagcccttgccctcaccaggggtcaaccaggtgtccagcactgtggactcccagctcctggaggccccccagattgacttcgatgccatcatggatgatggcgatcactcgagtttgttctcgggtgctctgagccccagcctcctccacagcctctcccagaactcctcccgcctcaccaccccccgaaactccttgaccctgccctccatccccgcaggcatcagcaacatggctgtcggggacatgagctccatgctcaccagcctcgccgaggagagcaagttcctgaacatgatgacctagaggcccgagcgcctggtgctgagtgcacccggaggggtcatcgctgcccagagcctggggattccagctgtcttgtctttttccaaaaaagtgttaaataggcttgaggggttgttgcgcaatggccgcttcagatgacagatgttgtaagagaaggtttatgggcatcctctctggtcttttggattattcctcagaacaatgaaaaaagtctccataggacaggaaggaatgcaaaactcatttacacagtgctttccagcctttggtgcttacaggaccgcgctgttccggcttcttcacggctgacattcggctaacgagggattactttggccaaaacctttcaaaggatatgcagaaagatggtagggagcatttgggtttgaatctgaatgctatactggatactctgctccggaaagatgagctttttattctactacttggaaggaaaaggaattcctggtccacctgaattcctctatgaagcctaactcttgaggtctctaacataccttgtcatagaggaaaagcacagattatacctggatgattcaggagcactgtatatgaatgaataaagcatccaagtatatatgaatgaataaagtatgtaagtatcaccag

SEQ ID NO: 1472 - protein, 1258 aa, Homosapiens
MALTSINATPTQLSSSSNCLSDTNQNKQSSESAVSSTVNPVAIHKRSKVKTEPEGLRPASPLALTQGQVSGHGSCGCALPLSQEQLADLKEDLDRDDCKQEAEVVIYETNCHWEDCTKEYDTQEQLVHHINNEHIHGEKKEFVCRWQACTREQKPFKAQYMLVVHMRRHTGEKPHKCTFEGCSKAYSRLENLKTHLRSHTGEKPYVCEHEGCNKAFSNASDRAKHQNRTHSNEKPYICKIPGCTKRYTDPSSLRKHVKTVHGPDAHVTKKQRNDVHLRTPLLKENGDSEAGTEPGGPESTEASSTSQAVEDCLHVRAIKTESSGLCQSSPGAQSSCSSEPSPLGSAPNNDSGVEMPGTGPGSLGDLTALDDTPPGADTSALAAPSAGGLQLRKHMTTMHRFEQLKKEKLKSLKDSCSWAGPTPHTRNTKLPPLPGSGSILENFSGSGGGGPAGLLPNPRLSELSASEVTMLSQLQERRDSSTSTVSSAYTVSRRSSGISPYFSSRRSSEASPLGAGRPHNASSADSYDPISTDASRRSSEASQCSGGSGLLNLTPAQQYSLRAKYAAATGGPPPTPLPGLERMSLRTRLALLDAPERTLPAGCPRPLGPRRGSDGPTYGHGHAGAAPAFPHEAPGGGARRASDPVRRPDALSLPRVQRFHSTHNVNPGPLPPCADRRGLRLQSHPSTDGGLARGAYSPRPPSISENVAMEAVAAGVDGAGPEADLGLPEDDLVLPDDVVQYIKAHASGALDEGTGQVYPTESTGFSDNPRLPSPGLHGQRRMVAADSNVGPSAPMLGGCQLGFGAPSSLNKNNMPVQWNEVSSGTVDALASQVKPPPFPQGNLAVVQQKPAFGQYPGYSPQGLQASPGGLDSTQPHLQPRSGAPSQGIPRVNYMQQLRQPVAGSQCPGMTTTMSPHACYGQVHPQLSPSTISGALNQFPQSCSNMPAKPGHLGHPQQTEVAPDPTTMGNRHRELGVPDSALAGVPPPHPVQSYPQQSHHLAASMSQEGYHQVPSLLPARQPGFMEPQTGPMGVATAGFGLVQPRPPLEPSPTGRHRGVRAVQQQLAYARATGHAMAAMPSSQETAEAVPKGAMGNMGSVPPQPPPQDAGGAPDHSMLYYYGQIHMYEQDGGLENLGSCQVMRSQPPQPQACQDSIQPQPLPSPGVNQVSSTVDSQLLEAPQIDFDAIMDDGDHSSLFSGALSPSLLHSLSQNSSRLTTPRNSLTLPSIPAGISNMAVGDMSSMLTSLAEESKFLNMMT

SEQ ID NO: 1473 - DNA, 3651 bp, Homosapiens
agtgaagttcgtggactcctacaataatgctataaatgcatagaagaaaagacacaggactgtgaaagaaagtgatgatgcgatgtctaaaacgttcaaggcaccgcatctgtgatcaagaatacatgtgctgctttaccgacacatcaaagagcaaggattgccacccaggacgatgagcggctgagatggagacgtctgcctcagccactgcctccgagaagcaagaagccaaaagtgggatcctggaggccgctggcttccccgacccgggtaaaaaggcctctcctttggtggtggctgcagcggcagcagcagcggtagctgcccaaggagcccagccttcaccttcccccaccccatcaaccccgtggcctaccagcagattctgagccagcagaggggtctggggtcagcctttggacacacaccacccctgatccagccctcacccaccttcctggcccagcagcccatggccctcacctccatcaatgccacgcccacccagctcagcagcagcagcaactgtctgagtgacaccaaccagaacaagcagagcagtgagtcggccgtcagcagcaccgtcaaccctgtcgccattcacaagcgcagcaaggtcaagaccgagcctgagggcctgcggccggcctcccctctggcgctgacgcagggccaggtgtctggacacggctcatgtgggtgtgcccttcccctctcccaggagcagctggctgacctcaaggaagatctggacagggatgactgtaagcaggaggctgaggtggtcatctatgagaccaactgccactgggaagactgcaccaaggagtacgacacccaggagcagctggtgcatcacatcaacaacgagcacatccacggggagaagaaggagtttgtgtgccgctggcaggcctgcacgcgggagcagaagcccttcaaggcgcagtacatgctggtggtgcacatgcggcgacacacgggcgagaagccccacaagtgcacgttcgagggctgctcgaaggcctactcccgcctggagaacctgaagacacacctgcggtcccacaccggggagaagccatatgtgtgtgagcacgagggctgcaacaaagccttctccaacgcctcggaccgcgccaagcaccagaatcgcacccactccaacgagaaaccctacatctgcaagatcccaggctgcaccaagagatacacagaccccagctctctccggaagcatgtgaaaacggtccacggcccagatgcccacgtcaccaagaagcagcgcaatgacgtgcacctccgcacaccgctgctcaaagagaatggggacagtgaggccggcacggagcctggcggcccagagagcaccgaggccagcagcaccagccaggccgtggaggactgcctgcacgtcagagccatcaagaccgagagctccgggctgtgtcagtccagccccggggcccagtcgtcctgcagcagcgagccctctcctctgggcagtgcccccaacaatgacagtggcgtggagatgccggggacggggcccgggagcctgggagacctgacggcactggatgacacacccccaggggccgacacctcagccctggctgccccctccgctggtggcctccagctgcgcaaacacatgaccaccatgcaccggttcgagcagctcaagaaggagaagctcaagtcactcaaggattcctgctcatgggccgggccgactccacacacgcggaacaccaagctgcctcccctcccgggaagtggctccatcctggaaaacttcagtggcagtgggggcggcgggcccgcggggctgctgccgaacccgcggctgtcggagctgtccgcgagcgaggtgaccatgctgagccagctgcaggagcgccgcgacagctccaccagcacggtcagctcggcctacaccgtgagccgccgctcctccggcatctccccctacttctccagccgccgctccagcgaggcctcgcccctgggcgccggccgcccgcacaacgcgagctccgctgactcctacgaccccatctccacggacgcgtcgcggcgctcgagcgaggccagccagtgcagcggcggctccgggctgctcaacctcacgccggcgcagcagtacagcctgcgggccaagtacgcggcagccactggcggccccccgcccactccgctgccgggcctggagcgcatgagcctgcggaccaggctggcgctgctggacgcgcccgagcgcacgctgcccgccggctgcccacgcccactggggccgcggcgtggcagcgacgggccgacctatggccacggccacgcgggggctgcgcccgccttcccccacgaggctccaggcggcggagccaggcgggccagcgaccctgtgcggcggcccgatgccctgtccctgccgcgggtgcagcgcttccacagcacccacaacgtgaaccccggcccgctgccgccctgtgccgacaggcgaggcctccgcctgcagagccacccgagcaccgacggcggcctggcccgcggcgcctactcgccccggccgcctagcatcagcgagaacgtggcgatggaggccgtggcggcaggagtggacggcgcggggcccgaggccgacctggggctgccggaggacgacctggtgcttccagacgacgtggtgcagtacatcaaggcgcacgccagtggcgctctggacgagggcaccgggcaggtgtatcccacggaaagcactggcttctctgacaaccccagactacccagcccggggctgcacggccagcgcaggatggtggctgcggactccaacgtgggcccctccgcccctatgctgggaggatgccagttaggctttggggcgccctccagcctgaacaaaaataacatgcctgtgcagtggaatgaggcatcagcaacatggctgtcggggacatgagctccatgctcaccagcctcgccgaggagagcaagttcctgaacatgatgacctagaggcccgagcgcctggtgctgagtgcacccggaggggtcatcgctgcccagagcctggggattccagctgtcttgtctttttccaaaaaagtgttaaataggcttgaggggttgttgcgcaatggccgcttcagatgacagatgttgtaagagaaggtttatgggcatcctctctggtcttttggattattcctcagaacaatgaaaaaagtctccataggacaggaaggaatgcaaaactcatttacacagtgctttccagcctttggtgcttacaggaccgcgctgttccggcttcttcacggctgacattcggctaacgagggattactttggccaaaacctttcaaaggatatgcagaaagatggtagggagcatttgggtttgaatctgaatgctatactggatactctgctccggaaagatgagctttttattctactacttggaaggaaaaggaattcctggtccacctgaattcctctatgaagcctaactcttgaggtctctaacataccttgtcatagaggaaaagcacagattatacctggatgattcaggagcactgtatatgaatgaataaagcatccaagtatatatgaatgaataaagtatgtaagtatcaccag

SEQ ID NO: 1474 - protein, 829 aa, Homosapiens
MALTSINATPTQLSSSSNCLSDTNQNKQSSESAVSSTVNPVAIHKRSKVKTEPEGLRPASPLALTQGQVSGHGSCGCALPLSQEQLADLKEDLDRDDCKQEAEVVIYETNCHWEDCTKEYDTQEQLVHHINNEHIHGEKKEFVCRWQACTREQKPFKAQYMLVVHMRRHTGEKPHKCTFEGCSKAYSRLENLKTHLRSHTGEKPYVCEHEGCNKAFSNASDRAKHQNRTHSNEKPYICKIPGCTKRYTDPSSLRKHVKTVHGPDAHVTKKQRNDVHLRTPLLKENGDSEAGTEPGGPESTEASSTSQAVEDCLHVRAIKTESSGLCQSSPGAQSSCSSEPSPLGSAPNNDSGVEMPGTGPGSLGDLTALDDTPPGADTSALAAPSAGGLQLRKHMTTMHRFEQLKKEKLKSLKDSCSWAGPTPHTRNTKLPPLPGSGSILENFSGSGGGGPAGLLPNPRLSELSASEVTMLSQLQERRDSSTSTVSSAYTVSRRSSGISPYFSSRRSSEASPLGAGRPHNASSADSYDPISTDASRRSSEASQCSGGSGLLNLTPAQQYSLRAKYAAATGGPPPTPLPGLERMSLRTRLALLDAPERTLPAGCPRPLGPRRGSDGPTYGHGHAGAAPAFPHEAPGGGARRASDPVRRPDALSLPRVQRFHSTHNVNPGPLPPCADRRGLRLQSHPSTDGGLARGAYSPRPPSISENVAMEAVAAGVDGAGPEADLGLPEDDLVLPDDVVQYIKAHASGALDEGTGQVYPTESTGFSDNPRLPSPGLHGQRRMVAADSNVGPSAPMLGGCQLGFGAPSSLNKNNMPVQWNEASATWLSGT

SEQ ID NO: 1475 - DNA, 3600 bp, Homosapiens
agtgaagttcgtggactcctacaataatgctataaatgcatagaagaaaagacacaggactgtgaaagaaagtgatgatgcgatgtctaaaacgttcaaggcaccgcatctgtgatcaagaatacatgtgctgctttaccgacacatcaaagagcaaggattgccacccaggacgatgagcggctgagatggagacgtctgcctcagccactgcctccgagaagcaagaagccaaaagtgggatcctggaggccgctggcttccccgacccgggtaaaaaggcctctcctttggtggtggctgcagcggcagcagcagcggtagctgcccaaggagcccagccttcaccttcccccaccccatcaaccccgtggcctaccagcagattctgagccagcagaggggtctggggtcagcctttggacacacaccacccctgatccagccctcacccaccttcctggcccagcagcccatggccctcacctccatcaatgccacgcccacccagctcagcagcagcagcaactgtctgagtgacaccaaccagaacaagcagagcagtgagtcggccgtcagcagcaccgtcaaccctgtcgccattcacaagcgcagcaaggtcaagaccgagcctgagggcctgcggccggcctcccctctggcgctgacgcaggagcagctggctgacctcaaggaagatctggacagggatgactgtaagcaggaggctgaggtggtcatctatgagaccaactgccactgggaagactgcaccaaggagtacgacacccaggagcagctggtgcatcacatcaacaacgagcacatccacggggagaagaaggagtttgtgtgccgctggcaggcctgcacgcgggagcagaagcccttcaaggcgcagtacatgctggtggtgcacatgcggcgacacacgggcgagaagccccacaagtgcacgttcgagggctgctcgaaggcctactcccgcctggagaacctgaagacacacctgcggtcccacaccggggagaagccatatgtgtgtgagcacgagggctgcaacaaagccttctccaacgcctcggaccgcgccaagcaccagaatcgcacccactccaacgagaaaccctacatctgcaagatcccaggctgcaccaagagatacacagaccccagctctctccggaagcatgtgaaaacggtccacggcccagatgcccacgtcaccaagaagcagcgcaatgacgtgcacctccgcacaccgctgctcaaagagaatggggacagtgaggccggcacggagcctggcggcccagagagcaccgaggccagcagcaccagccaggccgtggaggactgcctgcacgtcagagccatcaagaccgagagctccgggctgtgtcagtccagccccggggcccagtcgtcctgcagcagcgagccctctcctctgggcagtgcccccaacaatgacagtggcgtggagatgccggggacggggcccgggagcctgggagacctgacggcactggatgacacacccccaggggccgacacctcagccctggctgccccctccgctggtggcctccagctgcgcaaacacatgaccaccatgcaccggttcgagcagctcaagaaggagaagctcaagtcactcaaggattcctgctcatgggccgggccgactccacacacgcggaacaccaagctgcctcccctcccgggaagtggctccatcctggaaaacttcagtggcagtgggggcggcgggcccgcggggctgctgccgaacccgcggctgtcggagctgtccgcgagcgaggtgaccatgctgagccagctgcaggagcgccgcgacagctccaccagcacggtcagctcggcctacaccgtgagccgccgctcctccggcatctccccctacttctccagccgccgctccagcgaggcctcgcccctgggcgccggccgcccgcacaacgcgagctccgctgactcctacgaccccatctccacggacgcgtcgcggcgctcgagcgaggccagccagtgcagcggcggctccgggctgctcaacctcacgccggcgcagcagtacagcctgcgggccaagtacgcggcagccactggcggccccccgcccactccgctgccgggcctggagcgcatgagcctgcggaccaggctggcgctgctggacgcgcccgagcgcacgctgcccgccggctgcccacgcccactggggccgcggcgtggcagcgacgggccgacctatggccacggccacgcgggggctgcgcccgccttcccccacgaggctccaggcggcggagccaggcgggccagcgaccctgtgcggcggcccgatgccctgtccctgccgcgggtgcagcgcttccacagcacccacaacgtgaaccccggcccgctgccgccctgtgccgacaggcgaggcctccgcctgcagagccacccgagcaccgacggcggcctggcccgcggcgcctactcgccccggccgcctagcatcagcgagaacgtggcgatggaggccgtggcggcaggagtggacggcgcggggcccgaggccgacctggggctgccggaggacgacctggtgcttccagacgacgtggtgcagtacatcaaggcgcacgccagtggcgctctggacgagggcaccgggcaggtgtatcccacggaaagcactggcttctctgacaaccccagactacccagcccggggctgcacggccagcgcaggatggtggctgcggactccaacgtgggcccctccgcccctatgctgggaggatgccagttaggctttggggcgccctccagcctgaacaaaaataacatgcctgtgcagtggaatgaggcatcagcaacatggctgtcggggacatgagctccatgctcaccagcctcgccgaggagagcaagttcctgaacatgatgacctagaggcccgagcgcctggtgctgagtgcacccggaggggtcatcgctgcccagagcctggggattccagctgtcttgtctttttccaaaaaagtgttaaataggcttgaggggttgttgcgcaatggccgcttcagatgacagatgttgtaagagaaggtttatgggcatcctctctggtcttttggattattcctcagaacaatgaaaaaagtctccataggacaggaaggaatgcaaaactcatttacacagtgctttccagcctttggtgcttacaggaccgcgctgttccggcttcttcacggctgacattcggctaacgagggattactttggccaaaacctttcaaaggatatgcagaaagatggtagggagcatttgggtttgaatctgaatgctatactggatactctgctccggaaagatgagctttttattctactacttggaaggaaaaggaattcctggtccacctgaattcctctatgaagcctaactcttgaggtctctaacataccttgtcatagaggaaaagcacagattatacctggatgattcaggagcactgtatatgaatgaataaagcatccaagtatatatgaatgaataaagtatgtaagtatcaccag

SEQ ID NO: 1476 - protein, 812 aa, Homosapiens
MALTSINATPTQLSSSSNCLSDTNQNKQSSESAVSSTVNPVAIHKRSKVKTEPEGLRPASPLALTQEQLADLKEDLDRDDCKQEAEVVIYETNCHWEDCTKEYDTQEQLVHHINNEHIHGEKKEFVCRWQACTREQKPFKAQYMLVVHMRRHTGEKPHKCTFEGCSKAYSRLENLKTHLRSHTGEKPYVCEHEGCNKAFSNASDRAKHQNRTHSNEKPYICKIPGCTKRYTDPSSLRKHVKTVHGPDAHVTKKQRNDVHLRTPLLKENGDSEAGTEPGGPESTEASSTSQAVEDCLHVRAIKTESSGLCQSSPGAQSSCSSEPSPLGSAPNNDSGVEMPGTGPGSLGDLTALDDTPPGADTSALAAPSAGGLQLRKHMTTMHRFEQLKKEKLKSLKDSCSWAGPTPHTRNTKLPPLPGSGSILENFSGSGGGGPAGLLPNPRLSELSASEVTMLSQLQERRDSSTSTVSSAYTVSRRSSGISPYFSSRRSSEASPLGAGRPHNASSADSYDPISTDASRRSSEASQCSGGSGLLNLTPAQQYSLRAKYAAATGGPPPTPLPGLERMSLRTRLALLDAPERTLPAGCPRPLGPRRGSDGPTYGHGHAGAAPAFPHEAPGGGARRASDPVRRPDALSLPRVQRFHSTHNVNPGPLPPCADRRGLRLQSHPSTDGGLARGAYSPRPPSISENVAMEAVAAGVDGAGPEADLGLPEDDLVLPDDVVQYIKAHASGALDEGTGQVYPTESTGFSDNPRLPSPGLHGQRRMVAADSNVGPSAPMLGGCQLGFGAPSSLNKNNMPVQWNEASATWLSGT

SEQ ID NO: 1477 - DNA, 374 bp, Homosapiens
tggaggccgctggcttccccgacccgggtaaaaaggcctctcctttggtggtggctgcagcggcagcagcagcggtagctgcccaaggagtgccgcagcatctcttgccaccattccatgcgcccctaccgattgacatgcgacaccaggaaggaaggtaccattacgagcctcattctgtccacggtgtgcacgggccccctgccctcagcggcagccctgtcatctctgacatctccttgatccggctttccccgcacccggctggccctggggagtcccccttcaacgccccccacccgtacgtgaacccccacatggagcactacctccgttctgtgcacagcagccccacgctctccatgatctctgca

SEQ ID NO: 1478 - protein, 78 aa, Homosapiens
MRHQEGRYHYEPHSVHGVHGPPALSGSPVISDISLIRLSPHPAGPGESPFNAPHPYVNPHMEHYLRSVHSSPTLSMIS

SEQ ID NO: 1479 - DNA, 694 bp, Homosapiens
gagctcaccggcctcacccaagctcgcagcattgtgccgggaaaggatgttctcggctccggcctttttcctcctctcctggggacagaacatggatcctggaaggcattgaggaccctgtgctcagcccctgcccatcccttccaccacttatctgtcctgtaggcacactgacgcggctttcacaaaatgggaggctctgagaggtgagctcccaggagacaggaccaaggtctgccttcatcctgaagtttgcagggcagaggcccagatcctgcaaaggtgatgtgctcaggaagccacagcggagccccacacgcaccatgtgagtcacgctggtgccacaggcttgaactctgctggacacaaacagcctggggggtgtggaagtgggcattaccgctgtgctgttcttacttggggcagtgtctccaatatccctttcccattcagcaactgtgcaacacctgacttcagaaacagacgtctagagccctgcctgatggagccaggaccagcttgcctggtggatctgtgccctggggacccgcttgggctctagcacagcatgtgctgtagagtcaagcacacatgaggtggccccactgccctgcagaccacagatgcagccccagctcaccattgacatctgtccccagtcagacctctttacgcagcattctagcctctcgtt

SEQ ID NO: 1480 - protein, 61 aa, Homosapiens
MCSGSHSGAPHAPCESRWCHRLELCWTQTAWGVWKWALPLCCSYLGQCLQYPFPIQQLCNT

SEQ ID NO: 1481 - DNA, 8192 bp, Homosapiens
ttcggagcgcgaagccgccgctgggtcctcggcgcgccccgcgtctgcgcttgctgccgcgccccggtcggcgcgctgggagttccagccatgctcttctggcacacgcagcccgagcactacaaccagcacaactccggcagctacctgcgtgatgtgctcgctctgcccatcttcaagcaggaggaaccccagctgtcccccgagaacgaggcccgcctgccacccctgcaatatgtgttgtgtgctgccacgtccccagccgtgaagctgcatgaagagacgctgacctacctcaaccaaggtcagtcttatgaaatccgactactggagaatcggaagctgggagactttcaagatctgaacacaaaatatgtcaagagcatcatccgtgtggtcttccatgaccgccggctgcagtatacggagcaccagcagctggagggctggcggtggagtcggccaggggaccggatcctggacatcgatattccactgtctgttggtatcttggaccccagggccagcccgacccagctgaatgcagtcgagtttttgtgggaccctgcgaagagagcttctgcattcattcaggtacactgcatcagcacagaattcacccccaggaagcacgggggcgagaagggagtgccctttcgagtccagattgacacgtttaagcagaacgagaatggggagtacacggagcacctgcactcagccagctgccagatcaaggtgttcaagccgaagggagccgatcggaaacagaagactgaccgggagaagatggagaaaagaactgcccaagagaaggagaaataccagccgtcctatgaaaccaccatcctcacagagtgctctccatggcccgacgtggcctaccaggtgaacagcgccccgtccccaagctacaatggttctccaaacagctttggcctcggcgaaggcaacgcctctccgacccacccggtggaggccctgcccgtgggcagtgaccacctgctcccatcagcttcgatccaggatgcccagcagtggcttcaccgcaacaggttctcgcagttctgccggctctttgccagcttctcaggtgctgacttgctgaagatgtcccgagatgatttggtccagatctgtggtcccgcagatgggatccggctcttcaacgccatcaaaggccggaatgtgaggccaaagatgaccatttatgtctgtcaggagctggagcagaatcgagtgcccctgcagcagaagcgggacggcagtggagacagcaacctgtctgtgtaccacgccatcttcctggaagagctgaccaccttggagctgattgagaagatcgccaacctgtacagcatctccccccagcacatccaccgagtctaccggcagggccccacgggcatccatgtggtggtgagcaacgagatggtgcagaacttccaagatgaatcctgttttgtcctcagcacaattaaagctgagagcaatgatggctaccacatcatcctgaaatgtggactctgagcagcagtggacctcatacctgtctccagctcccagccctgtggatccccgtggatgtagacattgccccactgtaagctgtggcctcaccaggcaagctgaggccaggagggaccctgcccagtctgtgaaagctacagagcaccaaccagcagaagcctgtggacaccaagtacggtgtacagaaagccagtggctcctttctcccttcctcttggcctccagattttgaatggttccttgttcttttctattggtccaaccctgacgttctaaaagggcaaacagtggagacgtctgctctgaaatccctcatcccttagttggaagctgattgggtatcttggtgctgcctgtattggtcccttctgaccactctcctgcctccagagaaagctctgcttcaccctggaagctggtacctttacctcctcctctgggagttggctgcatggccagcactgccgacttgatgggagcagtttgccctcattctcctgtttcaggtttgcttcccttctcagtgaccctggtgagcatccgcctttcctgttcttggatgaattgatgggagtggggctattctgtgccttctacctctttcttctctacgttgtttctaaggatctgctgctgcggaacccaaagatgtgctcctgtctctgcactggcgcattggcatggtagatgccacaatgtatgtgcacggcctttctcagagacattagttctgaggccctttgtggggaggttagggggatggtaatagaaaaagactattttatttcctggcaatcacgggtaaggaggattaggaatgagtattccattcctaggtgtcatcagatgaccttgaccaccacaataccaggccctcttggatggacttatagaaagttagagaagaccttgttgaaccgctgctaaacttgccacaggagcgatgtgttttctctgagtgcccctcacttacatgtttatctttgtttgtagaggctatgtttaggatattttgcctgcatcagaatgggtgcatcatctttcttaatggcctaactatcgggaaatttgagtgtcagtaactgtggtagactcagaaattcgtctttgtcttgcctctggttcctgggatccagtgatctctactggcccagggcttcagctcttggttaatttaggttcatggggaaccctctgaccacctgaatgggatgtcatagcttctaaatggagcttctgtggaatgaagtgctagactgaaggactaccagaataaaacagggtctacaatggggagaacttgttttatagatgaggaaaccaaggctcagaggggcaaagtcacctgcatggtagcacatagtgatagggtagcgatataaatttatcatataaaccaggacatctcggaataaaaggggctctgttagtcattatgttgggtaatagccgtggcattcctacagaacagagtgaggacaggctcctgattcctcttccttctttagaggagaagcggggagtgggttaactaacagctttattgagatgtcattcacatgccattcagtttacccattgctagtgtccaattgtattcacagaaccaccatcaattcacagaattacagtcaacgttggtacattttcatcacccccagtaaaaccccgtacccttggtctgtcactcctgctttcctaactcctgcagtccaaggcagccatgaatctactttctatgtaagattaacctactctggacatttcatatatctggaatcatgtgatatctcttttgtgactggcttcttccactgaatgttttctagggccgtccaagttgaggatgtatcagtacttcattcttttgtattgctgaataatacttcattgtatagatagaccacatttgtttattgattcatcagttgatggacatttgtgtgtttttactttttggctactctgaatgatgctgctatgaacatatttctacaagattttgtgtggacatatgttttcatttcttttagcaatatacataggagtggaattgctaggtcttacagtaactccgtgttttaactttttgagaaactgccagactgttttctatagcagctgtaccattttacattcccaccagcaatgtatccaggtttcaatttgtctacatcctcatcaacacttgctattatctgtctttttgcttttagcatcctaatgagtatgaaatgctatcttgtggttttgatttgcattcccctgatggcaactgatgctgagtgtcttttcctgtgcttacgggccatgcgtatttctttggagaaaggtctatccaggtcctttgcctatttttaattgagttgtctttttttttttaagttttctgttttcctaaccactagactaccagggatgagccttctttttattattgagttgggtgagctatttgtatattctagacgccagtcttttatcaggtatatgactggtaaaaatgttctccccttctgtggattgttttcagtttcttgttggtgtcctttgagacacaaaactttttaactttgatgatttccaagatacgtattttttttctattgtcacttgtgcttttggtgccatatctagaaaaccattgcctaatccaaggtcaagaagattaatgcctgtgttttcttctaagaactatacttttagttctcacaatggtctttgatccatttcgagtatatttttatatatgatgtgatgtaggggtccagcttcattcttttgcttgtggatctccacttgtcccactgctgattattgagaaaaatatcctttctccacggaattgtcttggcatccttgctaaaggcctctgcttcttactggatcttctttcctgggacatggtgtcgttgggaagcttaccttttttttttttttacttagtctgtgtttggttccaccagttttatgctgcctttctactctgttcttgctgtctccctctttacctgagtcaacggtactgagtcctatctctctctgatgttccccagtcttccttggtgcatgttctagctccacacactagtccttggaggaaggttgagaccaatgatttcctgttatgagtcatgaggaaactgaatcacctagaagtggaataatgtgctcagggtcaccatagcccattagtggaaggaccaggactagacctttagtcttctgaggtccagccccttaggctgtctgtcatcactgtacccaagtgatgtcactaccaaggccaaatgatggtgggctaaattttaattctcaaaagtgtaggaggctaatattgtcttctaagttccaaaagaagatgtaataaaagtctgttaccttaagtgtgctattagtagagtcttccatttttctggcatgcccctggcatctgctcttcttaccttctcgtggttgtagttaaagcttatagcttatgaaagaatagaaaataataaataccaaaaaaaagtacacatggtaatttggtaccaaaatatctcagctgcctaatttagcagctcatcccttccacaggggtcagatgagctaaagctccaggttttatttttcatttgattgacatacagaaaagccatagcccttcccacagctgtccagggtctttcctgtgagtccggaggtgctggcctattgagcaggacagctcttcccagggcattcccaccaacctgtggcttctgaactgtagcttctttttacagtgaaccccagagggaaataagacagacacatgtgctcaggccaccatcttgaactggaagcccaaagctgagttccttactcttaggtcgtcacggtttttgcggggtatctgcaaggttgagataaaccctttcctgtttaccaggttgtcctttctggatgaagggacagaggctgttgaatggaggaataataggtttgctggaggaggggcatggtatgcctgtggaaaggacaggatggggtggggaggtcgaggctttgacttggggtcctaaacaaaggtcaggtgttgccctagtgacctcttgcccagacagcccagagccccttacacagagctattaacctagggaaggctttaccagcagtggactggagccagccagggtcacaagtttccaagtccagcattgcttcaggggctggcctgagtaactgaagatctgaaaatcattaacaagtcgatgaaataaacggaaaagcctcttaggctgttgtcagtggagcagagggagaaagtccctaggcgctcagagggggtgagaaagcagtggatgattgggcgggggtgggggattagatgttgacactgcctggggtgtaggaagaggaacagagaacccagagtcagggtcctagatcccagaccctcgctcagtatgagtctctttgcctctctgggtctctatctcctcctcttacaaatacaggcttggtgatctctgaagatggcaccaacctgccatgaaatgaatctgaggggttttcccatttttccctccatcaaaatcgtacaaaaagctggacgtggtggcccatgcctctaatcctagcattttgggaggccgaggtgggagaatcacttgacgccaagagttcgagaccagcctgggcatcgtagtgagactccatctctgtctttttgaaaataaaaaatctttgaaaattgcacaacaggcaggagacctttacgtgtgcccatcctggttgtacacagtgccaccagtgctcctgcagtgcaaggcggcatgcttcttgacatgggtcagattgtgtccatcgtgtctttgggaatcagccctagctcctaactgggctgactacttcctccgcaaacttatgggggctcccagatattccttgccagccaggggccagacacagtgcaggcacagtctgtgtcattggtgcacatgtgcgtgtttacatgtgtacctgggttccttcccttgcccatgaatttgccatgagcacagccagaagcagcctcagcttggcaaggtgtggagatgactgctgttcccttcgcatttggggaaaacaggctccctcggtagctcgatgatcctcttttgatcttgtgtgacctcctggagagtggatgaagctggtggccttagcttttctagacagtgtaagtggcactgggcaaggcccccagagcagggcaaggtctctagagcgggtctcccacatgactggcttcacacaggcacttccgctcgggttgcatgctctgtgtcatcttaccggtccagggttgcaggtaggaaatgtttgtaccctcttctgattgccacctccttcccatcgccccttagggacagggcttgagggccagtgaggcgctggtcaggcaccccaggcctccttgggacctgcccaggggcaccctgagagctcctgaaacccccacttagcttccagacctttctgcaaaagctcctcctggctttcctccctcccccaatctatgggtcacagctaacagatctgagggcaactgctgtgctagtggccagggctgcacctgccatccccggctctgccactttagggccttctagaggcagtgtccttaggaagtagctctgaggcatgggttttctgctcctgtgcagggcagctgatgggataaggtggggaaggacggtcagtgcttgggccccagctggccagcctggcgatggggaaaccaaaccatgtcccccagcgaagggccagagtgggaacctgtcctcatgcccttcgtcctgaggagccctgaggtgggcagcaggggccaggggaagttttcaggccttcatcaaagagaacaacatcctcagctccgcacccctcatcctgtatcagcacttaccggtgtgtgactgcccttgtcagctagcatacggtgggcccacctggcccactggctgtttatgccactgatttatgatagggaatattatctttgaacccaatgaagtgttttctcccccatcacaaaaaaaaaaattcttatttttagtagacatgtatttaccaaaaatatgtactcaattattgtattttggattttatcaatttaaaaattgtggaaatttgtttgctcttacgccaacataatattgattttgcctcttggctctgaaagcccaaaatatttaccgtctagcccgttacagaaaaagtctgctgactactgagccagacctccattacctccatccctgttggattatttaaagaaagcctcagacagtaagggcttttttaaaagaataaaatgacttggtttgcgcttggaagcaggggaagcattcagatgagcggtttctgcattaaccctgcctatcacgcatctcgtgtcctgtgtggctggcgagccccccttggaaggttctggtgcttcagctggctcctgcagagtccaccccgcctcgtggtgggaatgcagagccctttgctttccttcttgccgcctgcttcctgttcctggggacccgctgggcctttggtctgcatcccctggccaggtccctcagggttgatgcgtggagaaggactttgagcagtggtgggcagcagtggcctcctggccagctcacactcttgtcctgggaggggca

SEQ ID NO: 1482 - protein, 479 aa, Homosapiens; identical to SEQ ID NO: 103

SEQ ID NO: 1483 - DNA, 7567 bp, Homosapiens
ttcggagcgcgaagccgccgctgggtcctcggcgcgccccgcgtctgcgcttgctgccgcgccccggtcggcgcgctgggagttccagccatgctcttctggcacacgcagcccgagcactacaaccagcacaactccggcagctacctgcgtgatgtgctcgctctgcccatcttcaagcaggaggaaccccagctgtcccccgagaacgaggcccgcctgccacccctgcaatatgtgttgtgtgctgccacgtccccagccgtgaagctgcatgaagagacgctgacctacctcaaccaaggtcagtcttatgaaatccgactactggagaatcggaagctgggagactttcaagatctgaacacaaaatatgtcaagagcatcatccgtgtggtcttccatgaccgccggctgcagtatacggagcaccagcagctggagggctggcggtggagtcggccaggggaccggatcctggacatcgatattccactgtctgttggtatcttggaccccagggccagcccgacccagctgaatgcagtcgagtttttgtgggaccctgcgaagagagcttctgcattcattcaggtacactgcatcagcacagaattcacccccaggaagcacgggggcgagaagggagtgccctttcgagtccagattgacacgtttaagcagaacgagaatggggagtacacggagcacctgcactcagccagctgccagatcaaggtgttcaagccgaagggagccgatcggaaacagaagactgaccgggagaagatggagaaaagaactgcccaagagaaggagaaataccagccgtcctatgaaaccaccatcctcacagagtgctctccatggcccgacgtggcctaccaggtgaacagcgccccgtccccaagctacaatggttctccaaacagctttggcctcggcgaaggcaacgcctctccgacccacccggtggaggccctgcccgtgggcagtgaccacctgctcccatcagcttcgatccaggatgcccagcagtggcttcaccgcaacaggttctcgcagttctgccggctctttgccagcttctcaggtgctgacttgctgaagatgtcccgagatgatttggtccagatctgtggtcccgcagatgggatccggctcttcaacgccatcaaaggccggaatgtgaggccaaagatgaccatttatgtctgtcaggagctggagcagaatcgagtgcccctgcagcagaagcgggacggcagtggagacagcaacctgtctgtgtaccacgccatcttcctggaagagctgaccaccttggagctgattgagaagatcgccaacctgtacagcatctccccccagcacatccaccgagtctaccggcagggccccacgggcatccatgtggtggtgagcaacgagatggtgcagaacttccaagatgaatcctgttttgtcctcagcacaattaaagctgagagcaatgatggctaccacatcatcctgaaatgtggactctgagcagcagtggacctcatacctgtctccagctcccagccctgtggatccccgtggatgtagacattgccccactgtaagctgtggcctcaccaggcaagctgaggccaggagggaccctgcccagtctgtgaaagctacagagcaccaaccagcagaagcctgtggacaccaagtacggtgtacagaaagccagtggctcctttctcccttcctcttggcctccagattttgaatggttccttgttcttttctattggtccaaccctgacgttctaaaagggcaaacagtggagacgtctgctctgaaatccctcatcccttagttggaagctgattgggtatcttggtgctgcctgtattggtcccttctgaccactctcctgcctccagagaaagctctgcttcaccctggaagctggtacctttacctcctcctctgggagttggctgcatggccagcactgccgacttgatgggagcagtttgccctcattctcctgtttcaggtttgcttcccttctcagtgaccctggtgagcatccgcctttcctgttcttggatgaattgatgggagtggggctattctgtgccttctacctctttcttctctacgttgtttctaaggatctgctgctgcggaacccaaagatgtgctcctgtctctgcactggcgcattggcatggtagatgccacaatgtatgtgcacggcctttctcagagacattagttctgaggccctttgtggggaggttagggggatggtaatagaaaaagactattttatttcctggcaatcacgggtaaggaggattaggaatgagtattccattcctaggtgtcatcagatgaccttgaccaccacaataccaggccctcttggatggacttatagaaagttagagaagaccttgttgaaccgctgctaaacttgccacaggagcgatgtgttttctctgagtgcccctcacttacatgtttatctttgtttgtagaggctatgtttaggatattttgcctgcatcagaatgggtgcatcatctttcttaatggcctaactatcgggaaatttgagtgtcagtaactgtggtagactcagaaattcgtctttgtcttgcctctggttcctgggatccagtgatctctactggcccagggcttcagctcttggttaatttaggttcatggggaaccctctgaccacctgaatgggatgtcatagcttctaaatggagcttctgtggaatgaagtgctagactgaaggactaccagaataaaacagggtctacaatggggagaacttgttttatagatgaggaaaccaaggctcagaggggcaaagtcacctgcatggtagcacatagtgatagggtagcgatataaatttatcatataaaccaggacatctcggaataaaaggggctctgttagtcattatgttgggtaatagccgtggcattcctacagaacagagtgaggacaggctcctgattcctcttccttctttagaggagaagcggggagtgggttaactaacagctttattgagatgtcattcacatgccattcagtttacccattgctagtgtccaattgtattcacagaaccaccatcaattcacagaattacagtcaacgttggtacattttcatcacccccagtaaaaccccgtacccttggtctgtcactcctgctttcctaactcctgcagtccaaggcagccatgaatctactttctatgtaagattaacctactctggacatttcatatatctggaatcatgtgatatctcttttgtgactggcttcttccactgaatgttttctagggccgtccaagttgaggatgtatcagtacttcattcttttgtattgctgaataatacttcattgtatagatagaccacatttgtttattgattcatcagttgatggacatttgtgtgtttttactttttggctactctgaatgatgctgctatgaacatatttctacaagattttgtgtggacatatgttttcatttcttttagcaatatacataggagtggaattgctaggtcttacagtaactccgtgttttaactttttgagaaactgccagactgttttctatagcagctgtaccattttacattcccaccagcaatgtatccaggtttcaatttgtctacatcctcatcaacacttgctattatctgtctttttgcttttagcatcctaatgagtatgaaatgctatcttgtggttttgatttgcattcccctgatggcaactgatgctgagtgtcttttcctgtgcttacgggccatgcgtatttctttggagaaaggtctatccaggtcctttgcctatttttaattgagttgtctttttttttttaagttttctgttttcctaaccactagactaccagggatgagccttctttttattattgagttgggtgagctatttgtatattctagacgccagtcttttatcaggtatatgactggtaaaaatgttctccccttctgtggattgttttcagtttcttgttggtgtcctttgagacacaaaactttttaactttgatgatttccaagatacgtattttttttctattgtcacttgtgcttttggtgccatatctagaaaaccattgcctaatccaaggtcaagaagattaatgcctgtgttttcttctaagaactatacttttagttctcacaatggtctttgatccatttcgagtatatttttatatatgatgtgatgtaggggtccagcttcattcttttgcttgtggatctccacttgtcccactgctgattattgagaaaaatatcctttctccacggaattgtcttggcatccttgctaaaggcctctgcttcttactggatcttctttcctgggacatggtgtcgttgggaagcttaccttttttttttttttacttagtctgtgtttggttccaccagttttatgctgcctttctactctgttcttgctgtctccctctttacctgagtcaacggtactgagtcctatctctctctgatgttccccagtcttccttggtgcatgttctagctccacacactagtccttggaggaaggttgagaccaatgatttcctgttatgagtcatgaggaaactgaatcacctagaagtggaataatgtgctcagggtcaccatagcccattagtggaaggaccaggactagacctttagtcttctgaggtccagccccttaggctgtctgtcatcactgtacccaagtgatgtcactaccaaggccaaatgatggtgggctaaattttaattctcaaaagtgtaggaggctaatattgtcttctaagttccaaaagaagatgtaataaaagtctgttaccttaagtgtgctattagtagagtcttccatttttctggcatgcccctggcatctgctcttcttaccttctcgtggttgtagttaaagcttatagcttatgaaagaatagaaaataataaataccaaaaaaaagtacacatggtaatttggtaccaaaatatctcagctgcctaatttagcagctcatcccttccacaggggtcagatgagctaaagctccaggttttatttttcatttgattgacatacagaaaagccatagcccttcccacagctgtccagggtctttcctgtgagtccggaggtgctggcctattgagcaggacagctcttcccagggcattcccaccaacctgtggcttctgaactgtagcttctttttacagtgaaccccagagggaaataagacagacacatgtgctcaggccaccatcttgaactggaagcccaaagctgagttccttactcttaggtcgtcacggtttttgcggggtatctgcaaggttgagataaaccctttcctgtttaccaggttgtcctttctggatgaagggacagaggctgttgaatggaggaataataggtttgctggaggaggggcatggtatgcctgtggaaaggacaggatggggtggggaggtcgaggctttgacttggggtcctaaacaaaggtcaggtgttgccctagtgacctcttgcccagacagcccagagccccttacacagagctattaacctagggaaggctttaccagcagtggactggagccagccagggtcacaagtttccaagtccagcattgcttcaggggctggcctgagtaactgaagatctgaaaatcattaacaagtcgatgaaataaacggaaaagcctcttaggctgttgtcagtggagcagagggagaaagtccctaggcgctcagagggggtgagaaagcagtggatgattgggcgggggtgggggattagatgttgacactgcctggggtgtaggaagaggaacagagaacccagagtcagggtcctagatcccagaccctcgctcagtatgagtctctttgcctctctgggtctctatctcctcctcttacaaatacaggcttggtgatctctgaagatggcaccaacctgccatgaaatgaatctgaggggttttcccatttttccctccatcaaaatcgtacaaaaagctggacgtggtggcccatgcctctaatcctagcattttgggaggccgaggtgggagaatcacttgacgccaagagttcgagaccagcctgggcatcgtagtgagactccatctctgtctttttgaaaataaaaaatctttgaaaattgcacaacaggcaggagacctttacgtgtgcccatcctggttgtacacagtgccaccagtgctcctgcagtgcaaggcggcatgcttcttgacatgggtcagattgtgtccatcgtgtctttgggaatcagccctagctcctaactgggctgactacttcctccgcaaacttatgggggctcccagatattccttgccagccaggggccagacacagtgcaggcacagtctgtgtcattggtgcacatgtgcgtgtttacatgtgtacctgggttccttcccttgcccatgaatttgccatgagcacagccagaagcagcctcagcttggcaaggtgtggagatgactgctgttcccttcgcatttggggaaaacaggctccctcggtagctcgatgatcctcttttgatcttgtgtgacctcctggagagtggatgaagctggtggccttagcttttctagacagtgtaagtggcactgggcaaggcccccagagcagggcaaggtctctagagcgggtctcccacatgactggcttcacacaggcacttccgctcgggttgcatgctctgtgtcatcttaccggtccagggttgcaggtaggaaatgtttgtaccctcttctgattgccacctccttcccatcgccccttagggacagggcttgagggccagtgaggcgctggtcaggcaccccaggcctccttgggacctgcccaggggcaccctgagagctcctgaaacccccacttagcttccagacctttctgcaaaagctcctcctggctttcctccctcccccaatctatgggtcacagctaacagatctgagggcaactgctgtgctagtggccagggctgcacctgccatccccggctctgccactttagggccttctagaggcagtgtccttaggaagtagctctgaggcatgggttttctgctcctgtgcagggcagctgatgggataaggtggggaaggacggtcagtgcttgggccccagctggccagcctggcgatggggaaaccaaaccatgtcccccagcgaagggccagagtgggaacctgtcctcatgcccttcgtcctgaggagccctgaggtgggcagcaggggccaggggaagttttcaggccttcatcaaagagaacaacatcctcagctccgcacccctcatcctgtatcagcacttaccggtgtgtgactgcccttgtcagctagcatacggtgggcccacctggcccactggctgtttatgccactgatttatgatagggaatattatctttgaacccaatgaagtgttttctcccccatcac

SEQ ID NO: 1484 - protein, 479 aa, Homosapiens; identical to SEQ ID NO: 103

SEQ ID NO: 1485 - DNA, 4917 bp, Homosapiens
gggttcggagcgcgaagccgccgctgggtcctcggcgcgccccgcgtctgcgcttgctgccgcgccccggtcggcgcgctgggagttccagccatgctcttctggcacacgcagcccgagcactacaaccagcacaactccggcagctacctgcgtgatgtgctcgctctgcccatcttcaagcaggaggaaccccagctgtcccccgagaacgaggcccgcctgccacccctgcaatatgtgttgtgtgctgccacgtccccagccgtgaagctgcatgaagagacgctgacctacctcaaccaaggtcagtcttatgaaatccgactactggagaatcggaagctgggagactttcaagatctgaacacaaaatatgtcaagagcatcatccgtgtggtcttccatgaccgccggctgcagtatacggagcaccagcagctggagggctggcggtggagtcggccaggggaccggatcctggacatcgatattccactgtctgttggtatcttggaccccagggccagcccgacccagctgaatgcagtcgagtttttgtgggaccctgcgaagagagcttctgcattcattcaggtacactgcatcagcacagaattcacccccaggaagcacgggggcgagaagggagtgccctttcgagtccagattgacacgtttaagcagaacgagaatggggagtacacggagcacctgcactcagccagctgccagatcaaggtgttcaagccgaagggagccgatcggaaacagaagactgaccgggagaagatggagaaaagaactgcccaagagaaggagaaataccagccgtcctatgaaaccaccatcctcacagagtgctctccatggcccgacgtggcctaccaggtgaacagcgccccgtccccaagctacaatggttctccaaacagctttggcctcggcgaaggcaacgcctctccgacccacccggtggaggccctgcccgtgggcagtgaccacctgctcccatcagcttcgatccaggatgcccagcagtggcttcaccgcaacaggttctcgcagttctgccggctctttgccagcttctcaggtgctgacttgctgaagatgtcccgagatgatttggtccagatctgtggtcccgcagatgggatccggctcttcaacgccatcaaaggccggaatgtgaggccaaagatgaccatttatgtctgtcaggagctggagcagaatcgagtgcccctgcagcagaagcgggacggcagtggagacagcaacctgtctgtgtaccacgccatcttcctggaagagctgaccaccttggagctgattgagaagatcgccaacctgtacagcatctccccccagcacatccaccgagtctaccggcagggccccacgggcatccatgtggtggtgagcaacgagatggtgcagaacttccaagatgaatcctgttttgtcctcagcacaattaaagctgagagcaatgatggctaccacatcatcctgaaatgtggactctgagcagcagtggacctcatacctgtctccagctcccagccctgtggatccccgtggatgtagacattgccccactgtaagctgtggcctcaccaggcaagctgaggccaggagggaccctgcccagtctgtgaaagctacagagcaccaaccagcagaagcctgtggacaccaagtacggtgtacagaaagccagtggctcctttctcccttcctcttggcctccagattttgaatggttccttgttcttttctattggtccaaccctgacgttctaaaagggcaaacagtggagacgtctgctctgaaatccctcatcccttagttggaagctgattgggtatcttggtgctgcctgtattggtcccttctgaccactctcctgcctccagagaaagctctgcttcaccctggaagctggtacctttacctcctcctctgggagttggctgcatggccagcactgccgacttgatgggagcagtttgccctcattctcctgtttcaggtttgcttcccttctcagtgaccctggtgagcatccgcctttcctgttcttggatgaattgatgggagtggggctattctgtgccttctacctctttcttctctacgttgtttctaaggatctgctgctgcggaacccaaagatgtgctcctgtctctgcactggcgcattggcatggtagatgccacaatgtatgtgcacggcctttctcagagacattagttctgaggccctttgtggggaggttagggggatggtaatagaaaaagactattttatttcctggcaatcacgggtaaggaggattaggaatgagtattccattcctaggtgtcatcagatgaccttgaccaccacaataccaggccctcttggatggacttatagaaagttagagaagaccttgttgaaccgctgctaaacttgccacaggagcgatgtgttttctctgagtgcccctcacttacatgtttatctttgtttgtagaggctatgtttaggatattttgcctgcatcagaatgggtgcatcatctttcttaatggcctaactatcgggaaatttgagtgtcagtaactgtggtagactcagaaattcgtctttgtcttgcctctggttcctgggatccagtgatctctactggcccagggcttcagctcttggttaatttaggttcatggggaaccctctgaccacctgaatgggatgtcatagcttctaaatggagcttctgtggaatgaagtgctagactgaaggactaccagaataaaacagggtctacaatggggagaacttgttttatagatgaggaaaccaaggctcagaggggcaaagtcacctgcatggtagcacatagtgatagggtagcgatataaatttatcatataaaccaggacatctcggaataaaaggggctctgttagtcattatgttgggtaatagccgtggcattcctacagaacagagtgaggacaggctcctgattcctcttccttctttagaggagaagcggggagtgggttaactaacagctttattgagatgtcattcacatgccattcagtttacccattgctagtgtccaattgtattcacagaaccaccatcaattcacagaattacagtcaacgttggtacattttcatcacccccagtaaaaccccgtacccttggtctgtcactcctgctttcctaactcctgcagtccaaggcagccatgaatctactttctatgtaagattaacctactctggacatttcatatatctggaatcatgtgatatctcttttgtgactggcttcttccactgaatgttttctagggccgtccaagttgaggatgtatcagtacttcattcttttgtattgctgaataatacttcattgtatagatagaccacatttgtttattgattcatcagttgatggacatttgtgtgtttttactttttggctactctgaatgatgctgctatgaacatatttctacaagattttgtgtggacatatgttttcatttcttttagcaatatacataggagtggaattgctaggtcttacagtaactccgtgttttaactttttgagaaactgccagactgttttctatagcagctgtaccattttacattcccaccagcaatgtatccaggtttcaatttgtctacatcctcatcaacacttgctattatctgtctttttgcttttagcatcctaatgagtatgaaatgctatcttgtggttttgatttgcattcccctgatggcaactgatgctgagtgtcttttcctgtgcttacgggccatgcgtatttctttggagaaaggtctatccaggtcctttgcctatttttaattgagttgtctttttttttttaagttttctgttttcctaaccactagactaccagggatgagccttctttttattattgagttgggtgagctatttgtatattctagacgccagtcttttatcaggtatatgactggtaaaaatgttctccccttctgtggattgttttcagtttcttgttggtgtcctttgagacacaaaactttttaactttgatgatttccaagatacgtattttttttctattgtcacttgtgcttttggtgccatatctagaaaaccattgcctaatccaaggtcaagaagattaatgcctgtgttttcttctaagaactatacttttagttctcacaatggtctttgatccatttcgagtatatttttatatatgatgtgatgtaggggtccagcttcattcttttgcttgtggatctccacttgtcccactgctgattattgagaaaaatatcctttctccacggaattgtcttggcatccttgctaaaggcctctgcttcttactggatcttctttcctgggacatggtgtcgttgggaagcttaccttttttttttttttacttagtctgtgtttggttccaccagttttatgctgcctttctactctgttcttgctgtctccctctttacctgagtcaacggtactgagtcctatctctctctgatgttccccagtcttccttggtgcatgttctagctccacacactagtccttggaggaaggttgagaccaatgatttcctgttatgagtcatgaggaaactgaatcacctagaagtggaataatgtgctcagggtcaccatagcccattagtggaaggaccaggactagacctttagtcttctgaggtccagccccttaggctgtctgtcatcactgtacccaagtgatgtcactaccaaggccaaatgatggtgggctaaattttaattctcaaaagtgtaggaggctaatattgtcttctaagttccaaaagaagatgtaataaaagtctgttacctt

SEQ ID NO: 1486 - protein, 479 aa, Homosapiens; identical to SEQ ID NO: 103

SEQ ID NO: 1487 - DNA, 4722 bp, Homosapiens
gggttcggagcgcgaagccgccgctgggtcctcggcgcgccccgcgtctgcgcttgctgccgcgccccggtcggcgcgctgggagttccagccatgctcttctggcacacgcagcccgagcactacaaccagcacaactccggcagctacctgcgtgatgtgctcgctctgcccatcttcaagcaggaggaaccccagctgtcccccgagaacgaggcccgcctgccacccctgcaatatgtgttgtgtgctgccacgtccccagccgtgaagctgcatgaagagacgctgacctacctcaaccaaggtcagtcttatgaaatccgactactggagaatcggaagctgggagactttcaagatctgaacacaaaatatgtcaagagcatcatccgtgtggtcttccatgaccgccggctgcagtatacggagcaccagcagctggagggctggcggtggagtcggccaggggaccggatcctggacatcgatattccactgtctgttggtatcttggaccccagggccagcccgacccagctgaatgcagtcgagtttttgtgggaccctgcgaagagagcttctgcattcattcaggtacactgcatcagcacagaattcacccccaggaagcacgggggcgagaagggagtgccctttcgagtccagattgacacgtttaagcagaacgagaatggggagtacacggagcacctgcactcagccagctgccagatcaaggtgttcaagccgaagggagccgatcggaaacagaagactgaccgggagaagatggagaaaagaactgcccaagagaaggagaaataccagccgtcctatgaaaccaccatcctcacagagtgctctccatggcccgacgtggcctaccaggtgaacagcgccccgtccccaagctacaatggttctccaaacagctttggcctcggcgaaggcaacgcctctccgacccacccggtggaggccctgcccgtgggcagtgaccacctgctcccatcagcttcgatccaggatgcccagcagtggcttcaccgcaacaggttctcgcagttctgccggctctttgccagcttctcaggtgctgacttgctgaagatgtcccgagatgatttggtccagatctgtggtcccgcagatgggatccggctcttcaacgccatcaaaggccggaatgtgaggccaaagatgaccatttatgtctgtcaggagctggagcagaatcgagtgcccctgcagcagaagcgggacggcagtggagacagcaacctgtctgctgagagcaatgatggctaccacatcatcctgaaatgtggactctgagcagcagtggacctcatacctgtctccagctcccagccctgtggatccccgtggatgtagacattgccccactgtaagctgtggcctcaccaggcaagctgaggccaggagggaccctgcccagtctgtgaaagctacagagcaccaaccagcagaagcctgtggacaccaagtacggtgtacagaaagccagtggctcctttctcccttcctcttggcctccagattttgaatggttccttgttcttttctattggtccaaccctgacgttctaaaagggcaaacagtggagacgtctgctctgaaatccctcatcccttagttggaagctgattgggtatcttggtgctgcctgtattggtcccttctgaccactctcctgcctccagagaaagctctgcttcaccctggaagctggtacctttacctcctcctctgggagttggctgcatggccagcactgccgacttgatgggagcagtttgccctcattctcctgtttcaggtttgcttcccttctcagtgaccctggtgagcatccgcctttcctgttcttggatgaattgatgggagtggggctattctgtgccttctacctctttcttctctacgttgtttctaaggatctgctgctgcggaacccaaagatgtgctcctgtctctgcactggcgcattggcatggtagatgccacaatgtatgtgcacggcctttctcagagacattagttctgaggccctttgtggggaggttagggggatggtaatagaaaaagactattttatttcctggcaatcacgggtaaggaggattaggaatgagtattccattcctaggtgtcatcagatgaccttgaccaccacaataccaggccctcttggatggacttatagaaagttagagaagaccttgttgaaccgctgctaaacttgccacaggagcgatgtgttttctctgagtgcccctcacttacatgtttatctttgtttgtagaggctatgtttaggatattttgcctgcatcagaatgggtgcatcatctttcttaatggcctaactatcgggaaatttgagtgtcagtaactgtggtagactcagaaattcgtctttgtcttgcctctggttcctgggatccagtgatctctactggcccagggcttcagctcttggttaatttaggttcatggggaaccctctgaccacctgaatgggatgtcatagcttctaaatggagcttctgtggaatgaagtgctagactgaaggactaccagaataaaacagggtctacaatggggagaacttgttttatagatgaggaaaccaaggctcagaggggcaaagtcacctgcatggtagcacatagtgatagggtagcgatataaatttatcatataaaccaggacatctcggaataaaaggggctctgttagtcattatgttgggtaatagccgtggcattcctacagaacagagtgaggacaggctcctgattcctcttccttctttagaggagaagcggggagtgggttaactaacagctttattgagatgtcattcacatgccattcagtttacccattgctagtgtccaattgtattcacagaaccaccatcaattcacagaattacagtcaacgttggtacattttcatcacccccagtaaaaccccgtacccttggtctgtcactcctgctttcctaactcctgcagtccaaggcagccatgaatctactttctatgtaagattaacctactctggacatttcatatatctggaatcatgtgatatctcttttgtgactggcttcttccactgaatgttttctagggccgtccaagttgaggatgtatcagtacttcattcttttgtattgctgaataatacttcattgtatagatagaccacatttgtttattgattcatcagttgatggacatttgtgtgtttttactttttggctactctgaatgatgctgctatgaacatatttctacaagattttgtgtggacatatgttttcatttcttttagcaatatacataggagtggaattgctaggtcttacagtaactccgtgttttaactttttgagaaactgccagactgttttctatagcagctgtaccattttacattcccaccagcaatgtatccaggtttcaatttgtctacatcctcatcaacacttgctattatctgtctttttgcttttagcatcctaatgagtatgaaatgctatcttgtggttttgatttgcattcccctgatggcaactgatgctgagtgtcttttcctgtgcttacgggccatgcgtatttctttggagaaaggtctatccaggtcctttgcctatttttaattgagttgtctttttttttttaagttttctgttttcctaaccactagactaccagggatgagccttctttttattattgagttgggtgagctatttgtatattctagacgccagtcttttatcaggtatatgactggtaaaaatgttctccccttctgtggattgttttcagtttcttgttggtgtcctttgagacacaaaactttttaactttgatgatttccaagatacgtattttttttctattgtcacttgtgcttttggtgccatatctagaaaaccattgcctaatccaaggtcaagaagattaatgcctgtgttttcttctaagaactatacttttagttctcacaatggtctttgatccatttcgagtatatttttatatatgatgtgatgtaggggtccagcttcattcttttgcttgtggatctccacttgtcccactgctgattattgagaaaaatatcctttctccacggaattgtcttggcatccttgctaaaggcctctgcttcttactggatcttctttcctgggacatggtgtcgttgggaagcttaccttttttttttttttacttagtctgtgtttggttccaccagttttatgctgcctttctactctgttcttgctgtctccctctttacctgagtcaacggtactgagtcctatctctctctgatgttccccagtcttccttggtgcatgttctagctccacacactagtccttggaggaaggttgagaccaatgatttcctgttatgagtcatgaggaaactgaatcacctagaagtggaataatgtgctcagggtcaccatagcccattagtggaaggaccaggactagacctttagtcttctgaggtccagccccttaggctgtctgtcatcactgtacccaagtgatgtcactaccaaggccaaatgatggtgggctaaattttaattctcaaaagtgtaggaggctaatattgtcttctaagttccaaaagaagatgtaataaaagtctgttacctt

SEQ ID NO: 1488 - protein, 414 aa, Homosapiens
MLFWHTQPEHYNQHNSGSYLRDVLALPIFKQEEPQLSPENEARLPPLQYVLCAATSPAVKLHEETLTYLNQGQSYEIRLLENRKLGDFQDLNTKYVKSIIRVVFHDRRLQYTEHQQLEGWRWSRPGDRILDIDIPLSVGILDPRASPTQLNAVEFLWDPAKRASAFIQVHCISTEFTPRKHGGEKGVPFRVQIDTFKQNENGEYTEHLHSASCQIKVFKPKGADRKQKTDREKMEKRTAQEKEKYQPSYETTILTECSPWPDVAYQVNSAPSPSYNGSPNSFGLGEGNASPTHPVEALPVGSDHLLPSASIQDAQQWLHRNRFSQFCRLFASFSGADLLKMSRDDLVQICGPADGIRLFNAIKGRNVRPKMTIYVCQELEQNRVPLQQKRDGSGDSNLSAESNDGYHIILKCGL

SEQ ID NO: 1489 - DNA, 2067 bp, Homosapiens
ctcccctcaaagttctgcctaagccgttcagttctaacatggtctcagttaatctggtaaatggcatctttaccatcttagttctgacttctcagtttaatgtgggattaagagccaagaaaagcctagagagactggatatcacaattttttttaattttataaactgaagtagttccttgaatgtctgttgatgaaatagtcactgtttaaggaaaaaagtaattatgaggtgtagcagattgcagaaaaacaggattagaaacacacttaaaaagaacacacatttagagtctctcttcctcctcagcgaaccactaggccccctttttaaaaacacctttagagcctaattactccaataaaagtaactagaggtttggagtctggttaaataaattctgagtaaaattcttaagccaaatggaaattcttaatgcaatcatgaggacttctattgtctcttactgttgtattagatcctataaattgaactgatttttccataaggaaaatgcttcttttgagattaattctaataacgtatttgctattgcagtgcagagcccactgcaactgctaggactgaaagcagaggctgggtgccagagcacgtgattcttaacatcatttccacagacccctctgccctgaccctctgcattggatgcaggaagctgggaaagactgatgttgatttggaaacatgggctgaaaatgaaggccccatagtgcataggaacaatgtgtggtacctcactgctgctgtttagggaacttgagggacgcgtttcaaggggttgggtattactgacgagctttggctcaaaatatagcaggaccaggtcttttgttgataagtactgtttgtttattaatatgtcattaatggtatttcttttttacactctacaagtgaattagggagtctcttgttgacccctttgttgcaggaatgtgcgtcgggctaggttatccatgagtttctttattcctaatgcagttagaaagacctttctccttgagctctttgactcccagaaggtaccccagtccccagtgtacttagaaaggatctcgaacattgctggacgtcctcatagtactcacaaagggctagccttgaatgtcactcgcccagtcttcagtctcctgacttagagatacaatcacgtcacaggtctcttggcctcaatctgaaaactgctgccgccgcgccgaggagactcgcatgccgccaccacctcactgggagggcgccgagcccaccgtcgccccctagaccctgacagctgcagctgccttgccttgccgccgcctccctgcagggcccctgttccaatgaaaaacagaacacaaaagagcagagcacctaagcctgtctctgcctccctgtctaccggactggccagggcccaagacccccgctgctccactgcggggctgggcgggctgactccctgcttcctccaagctgctgcctcccctgcagccagggtctgggcagggtgcagccggtcctcggggcacgcagcttccttcaagtacactgtgtgtgcttcccggacctgcggcgatgccacgggcctgccttttctatgcgcctcactagcttaccaccctgtgcaggtaatgcaactgactttgtctcatcagtctttttctttccctgccaccctttatttatcaagcgtaatgttacactttaaaggacagcaaataagaactttgtagaatcccaccaggactttgctaacaataatgtttggaaataaagaagtgctctgaaaaaatatcagccaccaaaatagttatgttggcactgtgttcacacgcatggtccccacacccccaggttgggtgggtttttttgttttttgggtttttttgggggggggggctttttcatgttacatccatatctgtatttatatcttatttgtttcactttcaagtgtatcatggcaaatgtacagatttttttgttaataatgtgctaggatttgctaaaaaagaaaaaaaaaaaacccttttgagtttgccctagaataaatgagacttaattca

SEQ ID NO: 1490 - protein, 59 aa, Homosapiens
MCGTSLLLFRELEGRVSRGWVLLTSFGSKYSRTRSFVDKYCLFINMSLMVFLFYTLQVN

SEQ ID NO: 1491 - DNA, 5201 bp, Homosapiens
taacttgcccttggttgactgttgcttcgtgttttgcttgctttatgctgatatatccatcccatgcttttcttttatattctcaggatggtttttgttctcaggattctccctgtttcagtgcactttccagacatctaaaaggcacttgttgacaaactgcagtgcaccaaaaaggattgtttggcttttttgcttcatttcatgttttgctgtgcccaatgtctataaagacagcagtcaataacacttttctgtgaacaacaaatatttcttgcttttatgaggatttttagatgtccatccaggaatgtgactttttataaaatctgctttgattataaaactccaaacagaagcatgtagaagagtctgatattaatagcaagctcatgggtgagatgatgtgagagttactttctgggcctgttcatagggtggatctgactttgagtctagggttttttgttttgttttgttttaatagggttttatttgttttctggattggatacctgggagtataacctagccttgtgaggtcatttactttgctcctttgaaatttgcttatagtactagctttatttccaactgcccattcctcttaagtttgtacatttgagaccagtaacaaccaaactccttttttccatcttcaaaataagaaagttatttttccactttcattatctcgtgccttcagtcaccagtgtcactctttgagttcctgcattctcgtggttactgttgtttcccactggtttttattgagtgctgatgtaatgtgtttggcagatttaacaaagaagatgtgtaattgtccggtggtggtactctaacaaaagacgtctccttttcattccaaatcacccaataaacaaaactataaatatgtcttattctttaaattgtgggaagtaacttatgcccatatctcagttctatgtatatgcctcgatttaagaaataaaatattttttatctttagcatgctggactatgatacagagaacctgaactctgaagaaatctatagttctctacgtggagttacagaagccattgaaaagtttagttttcgaagccaagaagatctgaatgagccaattaaacgagatggcaaaaaggagtgtgatattgtgtcccgcgatgggggcgctgcctcccctgccactgagggccgggggggtagtgaagtagaaggaggccggacagctctggataacaagacctcactactcaacacccagcctccgcgcgccttcccggggccgcgggcgcgagactacaacccgtacccctactcagatgccatcaacacctacgacaagaccgccctgaaagaggctgtgttcgatgacgacatggagcagcttcgagacgtgcccatcgaccattctgacctggtggctgaccttctgaaagagctgtccaaccacaatgagcgagtggaggaacggaagggagccctgctggagctgctcaagatcacgcgggaagacagccttggtgtctgggaggagcacttcaagaccattctgctcctgctgctggagacccttggagacaaagaccattcaattcgagcactggcgttaagagttttgagggaaattctgagaaatcaaccagcaagatttaaaaactacgccgagctgacgattatgaagactctggaagcccacaaagactcccataaggaggtggtgagagcggctgaggaggctgcgtccacactggccagttccatccacccggagcagtgcatcaaggtgctctgccccatcatccagacggccgactaccccatcaaccttgctgccatcaagatgcagaccaaagtcgtcgagaggatcgcaaaggagtcattgctgcagctccttgtcgacatcatcccaggcttgctgcagggttatgacaacaccgaaagtagtgtgcgtaaggccagcgtgttttgcttagtggcaatttattccgtaatcggagaagacctgaaacctcaccttgcacagctcacagggagcaagatgaagctactaaacttatacataaagagggcccagaccaccaacagcaacagcagctcctcctccgatgtctccacgcacagctaatggcagtacctgtctcttgtgtagacctagaagcaatcggtggtgcctctcagagacctttccccacccccttcatcggctgcccagtcagtacaaggaggcccacaaatatttattacaatcagtattttggtcccttccagcttttctgtagaatcttactggtattgaatgtaaaggaagcaaggcctgtattgcagtcttcatacaaaacaaaaggaataagaacagaaaagagccatactgaaacatgtcttgtacagcctgctgagatggcgaaaccctgtgtgtggggtgcagtttttaaaaatcagagcgctctagccactacttggtagaaagtagcattttttttttcagttaataacatatttgggggtggggtggggtgttactttgtgttcttcctccttagcctattttcttgtgcgtatggtctgtgtggggcccctttcacagctgacaccacgaaaggtgatatatctttaagttgtgttctgagacctactaaaaatgggaatcaagtcttggcaagaacagtctgaagatggccttttaacaaacgctgggaattttgcttgtcatatccagactggaggccgactgccctggctttcagcgtagaattgggagtgcaccctgacagtctccttccagctctccctaatcgactccaccgacaaggtccctaccccagagcttccatgcaaaggaattcttcaagtttaaatctggacacaaaaataagataaatgtatggcatcatttagggatgcctgagatggcagttcatgaagcacagaagataaagaagaagtctttcatctttactgctgagatccttgggaacactgttgtcatgggggctctgccaagaccctcatctctgggctacacggtgattcagattgagcaccaacttgtttcctcccctcaaagttctgcctaagccgttcagttctaacatggtctcagttaatctggtaaatggcatctttaccatcttagttctgacttctcagtttaatgtgggattaagagccaagaaaagcctagagagactggatatcacaattttttttaattttataaactgaagtagttccttgaatgtctgttgatgaaatagtcactgtttaaggaaaaaagtaattatgaggtgtagcagattgcagaaaaacaggattagaaacacacttaaaaagaacacacatttagagtctctcttcctcctcagcgaaccactaggccccctttttaaaaacacctttagagcctaattactccaataaaagtaactagaggtttggagtctggttaaataaattctgagtaaaattcttaagccaaatggaaattcttaatgcaatcatgaggacttctattgtctcttactgttgtattagatcctataaattgaactgatttttccataaggaaaatgcttcttttgagattaattctaataacgtatttgctattgcagtgcagagcccactgcaactgctaggactgaaagcagaggctgggtgccagagcacgtgattcttaacatcatttccacagacccctctgccctgaccctctgcattggatgcaggaagctgggaaagactgatgttgatttggaaacatgggctgaaaatgaaggccccatagtgcataggaacagtaaagccagggtgctgacgtgtgtgtgtgtgtgtgtgtgtgtgtgtgtgtgtgtgtggtgttgtgtgtgtttgtgcgtgcaccctacacatgtgtggtacctcactgctgctgtttagggaacttgagggacgcgtttcaaggggttgggtattactgacgagctttggctcaaaatatagcaggaccaggtcttttgttgataagtactgtttgtttattaatatgtcattaatggtatttcttttttacactctacaagtgaattagggagtctcttgttgacccctttgttgcaggaatgtgcgtcgggctaggttatccatgagtttctttattcctaatgcagttagaaagacctttctccttgagctctttgactcccagaaggtaccccagtccccagtgtacttagaaaggatctcgaacattgctggacgtcctcatagtactcacaaagggctagccttgaatgtcactcgcccagtcttcagtctcctgacttagagatacaatcacgtcacaggtctcttggcctcaatctgaaaactgctgccgccgcgccgaggagactcgcatgccgccaccacctcactgggagggcgccgagcccaccgtcgccccctagaccctgacagctgcagctgccttgccttgccgccgcctccctgcagggcccctgttccaatgaaaaacagaacacaaaagagcagagcacctaagcctgtctctgcctccctgtctaccggactggccagggcccaagacccccgctgctccactgcggggctgggcgggctgactccctgcttcctccaagctgctgcctcccctgcagccagggtctgggcagggtgcagccggtcctcggggcacgcagcttccttcaagtacactgtgtgtgcttcccggacctgcggcgatgccacgggcctgccttttctatgcgcctcactagcttaccaccctgtgcaggtaatgcaactgactttgtctcatcagtctttttctttccctgccaccctttatttatcaagcgtaatgttacactttaaaggacagcaaataagaactttgtagaatcccaccaggactttgctaacaataatgtttggaaataaagaagtgctctgaaaaaatatcagccaccaaaatagttatgttggcactgtgttcacacgcatggtccccacacccccaggttgggtgggtttttttgttttttgggtttttttgggggggggggctttttcatgttacatccatatctgtatttatatcttatttgtttcactttcaagtgtatcatggcaaatgtacagatttttttgttaataatgtgctaggatttgctaaaaaagaaaaaaaaaaaacccttttgagtttgccctagaataaatgagacttaattca

SEQ ID NO: 1492 - protein, 374 aa, Homosapiens [sequence omitted]

SEQ ID NO: 1493 - DNA, 5741 bp, Homosapiens
cagtcgcgctaaagtggtttcacagtcccagcgatccagatctgctaatcctgctggtgctggcagccggtcaagttccccaggaaaattgttgggaagtggttatggtggacttactgggggctcctcacgaggcccacctgtgacaccgtcttcagaaaagcgaagcaagattcccaggagccagggatgtagccgggaaacaagtccaaaccgaataggattagcacggagcagccgtatccctcgacccagcatgagtcaggggtgcagccgcgataccagccgtgagagcagccgagatacaagccctgctcggggctttcctccacttgatcggtttgggcttggccagccaggaagaatacctggttctgtgaatgccatgagagttctgagcacaagtacagatcttgaagctgctgttgctgatgctttgctgttaggagactccaggagcaagaagaagcctgtgaggaggagatatgagccgtatgggatgtattctgacgatgatgccaacagtgatgcctcaagtgtttgctctgagcgctcatatggctccaggaatggtggcattccccattatctgcggcagactgaggatgtagcagaagttctcaaccactgtgctagttcaaactggtcagaaaggaaagaagggcttctgggcctgcagaacttactgaagagccaaagaacactgagtcgagttgaactgaaaaggttgtgtgagatcttcactcggatgtttgctgaccctcatagcaaggtaagttttcagtatgtttttggagactcttgtggattttataataattcataaggatgatttacaagactggctttttgttcttctcacacaattacttaagaaaatgggagcagatttacttggatctgtgcaagcaaaagttcaaaaggctctagatgtcacaagggactcctttccatttgatcaacaatttaacattttgatgagatttattgtggatcaaactcaaactccaaacctcaaggtcaaagttgcaatcctgaaatacattgagtctctggccagacagatggatccaacagattttgtaaactctagtgagacaaggcttgctgtttctagaatcataacctggacaacagaaccaaagagttcagacgtgagaaaggcagcacagattgtgctaatctctctgtttgaattgaatactcctgaatttaccatgttacttggtgccttgccaaaaacattccaggatggtgccaccaaactcctgcacaaccacctcaagaattccagtaacaccagtgtgggctctccaagcaatacgattggccggacgccctcccgacacaccagcagcaggaccagccccctgacctcacccaccaactgttcccatgggggtctgtctccaagtcggttatggggttggagtgccgacgggttagcgaagcacccacctcccttttctcagcctaactccatccccaccgctccctcccacaaggctctcaggcgctcttactctcccagcatgctggactatgatacagagaacctgaactctgaagaaatctatagttctctacgtggagttacagaagccattgaaaagtttagttttcgaagccaagaagatctgaatgagccaattaaacgagatggcaaaaaggagtgtgatattgtgtcccgcgatgggggcgctgcctcccctgccactgagggccgggggggtagtgaagtagaaggaggccggacagctctggataacaagacctcactactcaacacccagcctccgcgcgccttcccggggccgcgggcgcgagactacaacccgtacccctactcagatgccatcaacacctacgacaagaccgccctgaaagaggctgtgttcgatgacgacatggagcagcttcgagacgtgcccatcgaccattctgacctggtggctgaccttctgaaagagctgtccaaccacaatgagcgagtggaggaacggaagggagccctgctggagctgctcaagatcacgcgggaagacagccttggtgtctgggaggagcacttcaagaccattctgctcctgctgctggagacccttggagacaaagaccattcaattcgagcactggcgttaagagttttgagggaaattctgagaaatcaaccagcaagatttaaaaactacgccgagctgacgattatgaagactctggaagcccacaaagactcccataaggaggtggtgagagcggctgaggaggctgcgtccacactggccagttccatccacccggagcagtgcatcaaggtgctctgccccatcatccagacggccgactaccccatcaaccttgctgccatcaagatgcagaccaaagtcgtcgagaggatcgcaaaggagtcattgctgcagctccttgtcgacatcatcccaggcttgctgcagggttatgacaacaccgaaagtagtgtgcgtaaggccagcgtgttttgcttagtggcaatttattccgtaatcggagaagacctgaaacctcaccttgcacagctcacagggagcaagatgaagctactaaacttatacataaagagggcccagaccaccaacagcaacagcagctcctcctccgatgtctccacgcacagctaatggcagtacctgtctcttgtgtagacctagaagcaatcggtggtgcctctcagagacctttccccacccccttcatcggctgcccagtcagtacaaggaggcccacaaatatttattacaatcagtattttggtcccttccagcttttctgtagaatcttactggtattgaatgtaaaggaagcaaggcctgtattgcagtcttcatacaaaacaaaaggaataagaacagaaaagagccatactgaaacatgtcttgtacagcctgctgagatggcgaaaccctgtgtgtggggtgcagtttttaaaaatcagagcgctctagccactacttggtagaaagtagcattttttttttcagttaataacatatttgggggtggggtggggtgttactttgtgttcttcctccttagcctattttcttgtgcgtatggtctgtgtggggcccctttcacagctgacaccacgaaaggtgatatatctttaagttgtgttctgagacctactaaaaatgggaatcaagtcttggcaagaacagtctgaagatggccttttaacaaacgctgggaattttgcttgtcatatccagactggaggccgactgccctggctttcagcgtagaattgggagtgcaccctgacagtctccttccagctctccctaatcgactccaccgacaaggtccctaccccagagcttccatgcaaaggaattcttcaagtttaaatctggacacaaaaataagataaatgtatggcatcatttagggatgcctgagatggcagttcatgaagcacagaagataaagaagaagtctttcatctttactgctgagatccttgggaacactgttgtcatgggggctctgccaagaccctcatctctgggctacacggtgattcagattgagcaccaacttgtttcctcccctcaaagttctgcctaagccgttcagttctaacatggtctcagttaatctggtaaatggcatctttaccatcttagttctgacttctcagtttaatgtgggattaagagccaagaaaagcctagagagactggatatcacaattttttttaattttataaactgaagtagttccttgaatgtctgttgatgaaatagtcactgtttaaggaaaaaagtaattatgaggtgtagcagattgcagaaaaacaggattagaaacacacttaaaaagaacacacatttagagtctctcttcctcctcagcgaaccactaggccccctttttaaaaacacctttagagcctaattactccaataaaagtaactagaggtttggagtctggttaaataaattctgagtaaaattcttaagccaaatggaaattcttaatgcaatcatgaggacttctattgtctcttactgttgtattagatcctataaattgaactgatttttccataaggaaaatgcttcttttgagattaattctaataacgtatttgctattgcagtgcagagcccactgcaactgctaggactgaaagcagaggctgggtgccagagcacgtgattcttaacatcatttccacagacccctctgccctgaccctctgcattggatgcaggaagctgggaaagactgatgttgatttggaaacatgggctgaaaatgaaggccccatagtgcataggaacagtaaagccagggtgctgacgtgtgtgtgtgtgtgtgtgtgtgtgtgtgtgtgtgtgtggtgttgtgtgtgtttgtgcgtgcaccctacacatgtgtggtacctcactgctgctgtttagggaacttgagggacgcgtttcaaggggttgggtattactgacgagctttggctcaaaatatagcaggaccaggtcttttgttgataagtactgtttgtttattaatatgtcattaatggtatttcttttttacactctacaagtgaattagggagtctcttgttgacccctttgttgcaggaatgtgcgtcgggctaggttatccatgagtttctttattcctaatgcagttagaaagacctttctccttgagctctttgactcccagaaggtaccccagtccccagtgtacttagaaaggatctcgaacattgctggacgtcctcatagtactcacaaagggctagccttgaatgtcactcgcccagtcttcagtctcctgacttagagatacaatcacgtcacaggtctcttggcctcaatctgaaaactgctgccgccgcgccgaggagactcgcatgccgccaccacctcactgggagggcgccgagcccaccgtcgccccctagaccctgacagctgcagctgccttgccttgccgccgcctccctgcagggcccctgttccaatgaaaaacagaacacaaaagagcagagcacctaagcctgtctctgcctccctgtctaccggactggccagggcccaagacccccgctgctccactgcggggctgggcgggctgactccctgcttcctccaagctgctgcctcccctgcagccagggtctgggcagggtgcagccggtcctcggggcacgcagcttccttcaagtacactgtgtgtgcttcccggacctgcggcgatgccacgggcctgccttttctatgcgcctcactagcttaccaccctgtgcaggtaatgcaactgactttgtctcatcagtctttttctttccctgccaccctttatttatcaagcgtaatgttacactttaaaggacagcaaataagaactttgtagaatcccaccaggactttgctaacaataatgtttggaaataaagaagtgctctgaaaaaatatcagccaccaaaatagttatgttggcactgtgttcacacgcatggtccccacacccccaggttgggtgggtttttttgttttttgggtttttttgggggggggggctttttcatgttacatccatatctgtatttatatcttatttgtttcactttcaagtgtatcatggcaaatgtacagatttttttgttaataatgtgctaggatttgctaaaaaagaaaaaaaaaaaacccttttgagtttgccctagaataaatgagacttaattca

SEQ ID NO: 1494 - protein, 623 aa, Homosapiens
MFLETLVDFIIIHKDDLQDWLFVLLTQLLKKMGADLLGSVQAKVQKALDVTRDSFPFDQQFNILMRFIVDQTQTPNLKVKVAILKYIESLARQMDPTDFVNSSETRLAVSRIITWTTEPKSSDVRKAAQIVLISLFELNTPEFTMLLGALPKTFQDGATKLLHNHLKNSSNTSVGSPSNTIGRTPSRHTSSRTSPLTSPTNCSHGGLSPSRLWGWSADGLAKHPPPFSQPNSIPTAPSHKALRRSYSPSMLDYDTENLNSEEIYSSLRGVTEAIEKFSFRSQEDLNEPIKRDGKKECDIVSRDGGAASPATEGRGGSEVEGGRTALDNKTSLLNTQPPRAFPGPRARDYNPYPYSDAINTYDKTALKEAVFDDDMEQLRDVPIDHSDLVADLLKELSNHNERVEERKGALLELLKITREDSLGVWEEHFKTILLLLLETLGDKDHSIRALALRVLREILRNQPARFKNYAELTIMKTLEAHKDSHKEVVRAAEEAASTLASSIHPEQCIKVLCPIIQTADYPINLAAIKMQTKVVERIAKESLLQLLVDIIPGLLQGYDNTESSVRKASVFCLVAIYSVIGEDLKPHLAQLTGSKMKLLNLYIKRAQTTNSNSSSSSDVSTHS

SEQ ID NO: 1495 - DNA, 8192 bp, Homosapiens
gctctctatggtgtacccgggttggtggcggtaagaagaaaaagggtgaccgcactgcgcaggcgccctcggcgtctctctcgctctctcggtcttttttttttttttctttttttttttttttaatccccgcaccaagcgcttaacctcattggggtggaggagaaggcggcggctctctggtccgcagcggcaacagtaacgaaaaacagggctaatggactgctgaattatgaagtatttcagacccagtagtagaacatcactctgccactcactcctttatctcctactagttatttaaattggacttttaatatcctaccagctgctcttcagacacacatggtgcattgttgccattccccagattgcatctttgaaacacaggctcttagtaaccttcagcgaacaaagaggcaacctcccagatacgtctgctgggagggagtcatcgtgactgccctctagcttttgctggatctggatttgaattccactatggagcctcgcatggagtcctgcctggcgcaggtgttgcagaaggatgtggggaaacgattgcaggttggccaagaactgatagactatttctcagacaaacagaagtctgctgaccttgagcatgaccagaccatgttagataaacttgtggatggacttgctacctcttgggtgaactctagcaattacaaggtggttctgctgggcatggacatcctgtccgccctggtgacccggctgcaggatcggttcaaggcgcagatcggcacagtgctgccaagtctaatagacagactaggagatgctaaagactctgtgagggagcaggaccaaactctgctgctaaagatcatggatcaagctgctaatccccagtacgtatgggacagaatgcttggaggcttcaaacacaagaatttccgtactcgagaaggcatctgtctctgccttatagcaacactcaatgcctctggagcacagactttaacactaagcaagattgtgccacatatatgcaacttacttggagatccaaacagccaggttcgagatgcagcaataaacagcttagtggaaatttacagacatgtaggagaacgtgtgagggcagatctcagtaaaaaaggattgccacagtcccggttgaatgtaatttttacaaaatttgatgaagtccagaaatctggaaacatgatacaatctgcaaatgataaaaatttcgacgatgaagattctgtggatggtaacagaccttcctctgctagttctacatcatccaaggctccaccaagttctcggagaaacgttggaatgggaaccacccgccggcttggttcatccacccttggatccaagtcttcagctgcaaaagaaggagctggtgctgttgatgaagaggattttattaaagcatttgatgatgtacctgtagtacagatttattccagccgagaccttgaggaatccataaacaaaattagggaaatattatctgatgacaagcatgattgggagcagagagtaaatgctctaaaaaagattagatctttacttttggctggtgctgctgagtatgataacttctttcaacatttgcgtcttttggatggagcctttaaactctctgctaaggacctgcggtctcaggtagtgcgggaggcttgtatcacgttggggcatctgtcatcagttctggggaataagtttgaccatggagctgaagccattatgccaactatctttaatttaattccaaacagtgccaaaattatggccacatctggtgttgtagctgttaggttaattattcggcacacacacatccctaggttaatacctgtcataacaagcaactgtacctctaagtctgtcgcagttagaaggcgctgttttgaatttttagatttgcttttacaagaatggcagacacattcactagaacgacacatatcagtattagctgaaacaataaagaagggaatacatgatgctgattccgaagcaagaatagaagccagaaaatgttactggggtttccacagtcacttcagcagagaagcagagcacttgtaccacaccttggagtcctcctaccagaaagccctgcagtcccacctgaagaactcagacagcatagtgtctctgcctcagtcagaccgctcatcttccagctctcaagagagtctaaatcgtccgctgtctgccaaaagaagtcctactggaagtaccacatctagagcttctacagttagtaccaaatctgtgtcaacgactgggtccctccagcgatctcgaagtgatattgatgtgaacgcagcagccagtgccaaatccaaagtctcctcatcttcgggcacgacgcctttcagctctgcagcagctttgcctccagggtcatacgcatccttaggtcggatccgcacaagacggcaaagctctgggagtgccaccaacgtcgcctctacacctgataaccggggccgcagtcgcgctaaagtggtttcacagtcccagcgatccagatctgctaatcctgctggtgctggcagccggtcaagttccccaggaaaattgttgggaagtggttatggtggacttactgggggctcctcacgaggcccacctgtgacaccgtcttcagaaaagcgaagcaagattcccaggagccagggatgtagccgggaaacaagtccaaaccgaataggattagcacggagcagccgtatccctcgacccagcatgagtcaggggtgcagccgcgataccagccgtgagagcagccgagatacaagccctgctcggggctttcctccacttgatcggtttgggcttggccagccaggaagaatacctggttctgtgaatgccatgagagttctgagcacaagtacagatcttgaagctgctgttgctgatgctttgaagaagcctgtgaggaggagatatgagccgtatgggatgtattctgacgatgatgccaacagtgatgcctcaagtgtttgctctgagcgctcatatggctccaggaatggtggcattccccattatctgcggcagactgaggatgtagcagaagttctcaaccactgtgctagttcaaactggtcagaaaggaaagaagggcttctgggcctgcagaacttactgaagagccaaagaacactgagtcgagttgaactgaaaaggttgtgtgagatcttcactcggatgtttgctgaccctcatagcaaggtaagttttcagtatgtttttggagactcttgtggattttataataattcataaggatgatttacaagactggctttttgttcttctcacacaattacttaagaaaatgggagcagatttacttggatctgtgcaagcaaaagttcaaaaggctctagatgtcacaagggactcctttccatttgatcaacaatttaacattttgatgagatttattgtggatcaaactcaaactccaaacctcaaggtcaaagttgcaatcctgaaatacattgagtctctggccagacagatggatccaacagattttgtaaactctagtgagacaaggcttgctgtttctagaatcataacctggacaacagaaccaaagagttcagacgtgagaaaggcagcacagattgtgctaatctctctgtttgaattgaatactcctgaatttaccatgttacttggtgccttgccaaaaacattccaggatggtgccaccaaactcctgcacaaccacctcaagaattccagtaacaccagtgtgggctctccaagcaatacgattggccggacgccctcccgacacaccagcagcaggaccagccccctgacctcacccaccaactgttcccatgggggtctgtctccaagtcggttatggggttggagtgccgacgggttagcgaagcacccacctcccttttctcagcctaactccatccccaccgctccctcccacaaggctctcaggcgctcttactctcccagcatgctggactatgatacagagaacctgaactctgaagaaatctatagttctctacgtggagttacagaagccattgaaaagtttagttttcgaagccaagaagatctgaatgagccaattaaacgagatggcaaaaaggagtgtgatattgtgtcccgcgatgggggcgctgcctcccctgccactgagggccgggggggtagtgaagtagaaggaggccggacagctctggataacaagacctcactactcaacacccagcctccgcgcgccttcccggggccgcgggcgcgagactacaacccgtacccctactcagatgccatcaacacctacgacaagaccgccctgaaagaggctgtgttcgatgacgacatggagcagcttcgagacgtgcccatcgaccattctgacctggtggctgaccttctgaaagagctgtccaaccacaatgagcgagtggaggaacggaagggagccctgctggagctgctcaagatcacgcgggaagacagccttggtgtctgggaggagcacttcaagaccattctgctcctgctgctggagacccttggagacaaagaccattcaattcgagcactggcgttaagagttttgagggaaattctgagaaatcaaccagcaagatttaaaaactacgccgagctgacgattatgaagactctggaagcccacaaagactcccataaggaggtggtgagagcggctgaggaggctgcgtccacactggccagttccatccacccggagcagtgcatcaaggtgctctgccccatcatccagacggccgactaccccatcaaccttgctgccatcaagatgcagaccaaagtcgtcgagaggatcgcaaaggagtcattgctgcagctccttgtcgacatcatcccaggcttgctgcagggttatgacaacaccgaaagtagtgtgcgtaaggccagcgtgttttgcttagtggcaatttattccgtaatcggagaagacctgaaacctcaccttgcacagctcacagggagcaagatgaagctactaaacttatacataaagagggcccagaccaccaacagcaacagcagctcctcctccgatgtctccacgcacagctaatggcagtacctgtctcttgtgtagacctagaagcaatcggtggtgcctctcagagacctttccccacccccttcatcggctgcccagtcagtacaaggaggcccacaaatatttattacaatcagtattttggtcccttccagcttttctgtagaatcttactggtattgaatgtaaaggaagcaaggcctgtattgcagtcttcatacaaaacaaaaggaataagaacagaaaagagccatactgaaacatgtcttgtacagcctgctgagatggcgaaaccctgtgtgtggggtgcagtttttaaaaatcagagcgctctagccactacttggtagaaagtagcattttttttttcagttaataacatatttgggggtggggtggggtgttactttgtgttcttcctccttagcctattttcttgtgcgtatggtctgtgtggggcccctttcacagctgacaccacgaaaggtgatatatctttaagttgtgttctgagacctactaaaaatgggaatcaagtcttggcaagaacagtctgaagatggccttttaacaaacgctgggaattttgcttgtcatatccagactggaggccgactgccctggctttcagcgtagaattgggagtgcaccctgacagtctccttccagctctccctaatcgactccaccgacaaggtccctaccccagagcttccatgcaaaggaattcttcaagtttaaatctggacacaaaaataagataaatgtatggcatcatttagggatgcctgagatggcagttcatgaagcacagaagataaagaagaagtctttcatctttactgctgagatccttgggaacactgttgtcatgggggctctgccaagaccctcatctctgggctacacggtgattcagattgagcaccaacttgtttcctcccctcaaagttctgcctaagccgttcagttctaacatggtctcagttaatctggtaaatggcatctttaccatcttagttctgacttctcagtttaatgtgggattaagagccaagaaaagcctagagagactggatatcacaattttttttaattttataaactgaagtagttccttgaatgtctgttgatgaaatagtcactgtttaaggaaaaaagtaattatgaggtgtagcagattgcagaaaaacaggattagaaacacacttaaaaagaacacacatttagagtctctcttcctcctcagcgaaccactaggccccctttttaaaaacacctttagagcctaattactccaataaaagtaactagaggtttggagtctggttaaataaattctgagtaaaattcttaagccaaatggaaattcttaatgcaatcatgaggacttctattgtctcttactgttgtattagatcctataaattgaactgatttttccataaggaaaatgcttcttttgagattaattctaataacgtatttgctattgcagtgcagagcccactgcaactgctaggactgaaagcagaggctgggtgccagagcacgtgattcttaacatcatttccacagacccctctgccctgaccctctgcattggatgcaggaagctgggaaagactgatgttgatttggaaacatgggctgaaaatgaaggccccatagtgcataggaacagtaaagccagggtgctgacgtgtgtgtgtgtgtgtgtgtgtgtgtgtgtgtgtgtgtggtgttgtgtgtgtttgtgcgtgcaccctacacatgtgtggtacctcactgctgctgtttagggaacttgagggacgcgtttcaaggggttgggtattactgacgagctttggctcaaaatatagcaggaccaggtcttttgttgataagtactgtttgtttattaatatgtcattaatggtatttcttttttacactctacaagtgaattagggagtctcttgttgacccctttgttgcaggaatgtgcgtcgggctaggttatccatgagtttctttattcctaatgcagttagaaagacctttctccttgagctctttgactcccagaaggtaccccagtccccagtgtacttagaaaggatctcgaacattgctggacgtcctcatagtactcacaaagggctagccttgaatgtcactcgcccagtcttcagtctcctgacttagagatacaatcacgtcacaggtctcttggcctcaatctgaaaactgctgccgccgcgccgaggagactcgcatgccgccaccacctcactgggagggcgccgagcccaccgtcgccccctagaccctgacagctgcagctgccttgccttgccgccgcctccctgcagggcccctgttccaatgaaaaacagaacacaaaagagcagagcacctaagcctgtctctgcctccctgtctaccggactggccagggcccaagacccccgctgctccactgcggggctgggcgggctgactccctgcttcctccaagctgctgcctcccctgcagccagggtctgggcagggtgcagccggtcctcggggcacgcagcttccttcaagtacactgtgtgtgcttcccggacctgcggcgatgccacgggcctgccttttctatgcgcctcactagcttaccaccctgtgcaggtaatgcaactgactttgtctcatcagtctttttctttccctgccaccctttatttatcaagcgtaatgttacactttaaaggacagcaaataagaactttgtagaatcccaccaggactttgctaacaataatgtttggaaataaagaagtgctctgaaaaaatatcagccaccaaaatagttatgttggcactgtgttcacacgcatggtccccacacccccaggttgggtgggtttttttgttttttgggtttttttgggggggggggctttttcatgttacatccatatctgtatttatatcttatttgtttcactttcaagtgtatcatggcaaatgtacagatttttttgttaataatgtgctaggatttgctaaaaaagaaaaaaaaaaaacccttttgagtttgccctagaataaatga

SEQ ID NO: 1496 - protein, 928 aa, Homosapiens [sequence omitted]

SEQ ID NO: 1497 - DNA, 5045 bp, Homosapiens
gctctctatggtgtacccgggttggtggcggtaagaagaaaaagggtgaccgcactgcgcaggcgccctcggcgtctctctcgctctctcggtcttttttttttttttctttttttttttttttaatccccgcaccaagcgcttaacctcattggggtggaggagaaggcggcggctctctggtccgcagcggcaacagtaacgaaaaacagggctaatggactgctgaattatgaagtatttcagacccagtagtagaacatcactctgccactcactcctttatctcctactagttatttaaattggacttttaatatcctaccagctgctcttcagacacacatggtgcattgttgccattccccagattgcatctttgaaacacaggctcttagtaaccttcagcgaacaaagaggcaacctcccagatacgtctgctgggagggagtcatcgtgactgccctctagcttttgctggatctggatttgaattccactatggagcctcgcatggagtcctgcctggcgcaggtgttgcagaaggatgtggggaaacgattgcaggttggccaagaactgatagactatttctcagacaaacagaagtctgctgaccttgagcatgaccagaccatgttagataaacttgtggatggacttgctacctcttgggtgaactctagcaattacaaggtggttctgctgggcatggacatcctgtccgccctggtgacccggctgcaggatcggttcaaggcgcagatcggcacagtgctgccaagtctaatagacagactaggagatgctaaagactctgtgagggagcaggaccaaactctgctgctaaagatcatggatcaagctgctaatccccagtacgtatgggacagaatgcttggaggcttcaaacacaagaatttccgtactcgagaaggcatctgtctctgccttatagcaacactcaatgcctctggagcacagactttaacactaagcaagattgtgccacatatatgcaacttacttggagatccaaacagccaggttcgagatgcagcaataaacagcttagtggaaatttacagacatgtaggagaacgtgtgagggcagatctcagtaaaaaaggattgccacagtcccggttgaatgtaatttttacaaaatttgatgaagtccagaaatctggaaacatgatacaatctgcaaatgataaaaatttcgacgatgaagattctgtggatggtaacagaccttcctctgctagttctacatcatccaaggctccaccaagttctcggagaaacgttggaatgggaaccacccgccggcttggttcatccacccttggatccaagtcttcagctgcaaaagaaggagctggtgctgttgatgaagaggattttattaaagcatttgatgatgtacctgtagtacagatttattccagccgagaccttgaggaatccataaacaaaattagggaaatattatctgatgacaagcatgattgggagcagagagtaaatgctctaaaaaagattagatctttacttttggctggtgctgctgagtatgataacttctttcaacatttgcgtcttttggatggagcctttaaactctctgctaaggacctgcggtctcaggtagtgcgggaggcttgtatcacgttggggcatctgtcatcagttctggggaataagtttgaccatggagctgaagccattatgccaactatctttaatttaattccaaacagtgccaaaattatggccacatctggtgttgtagctgttaggttaattattcggcacacacacatccctaggttaatacctgtcataacaagcaactgtacctctaagtctgtcgcagttagaaggcgctgttttgaatttttagatttgcttttacaagaatggcagacacattcactagaacgacacatatcagtattagctgaaacaataaagaagggaatacatgatgctgattccgaagcaagaatagaagccagaaaatgttactggggtttccacagtcacttcagcagagaagcagagcacttgtaccacaccttggagtcctcctaccagaaagccctgcagtcccacctgaagaactcagacagcatagtgtctctgcctcagtcagaccgctcatcttccagctctcaagagagtctaaatcgtccgctgtctgccaaaagaagtcctactggaagtaccacatctagagcttctacagttagtaccaaatctgtgtcaacgactgggtccctccagcgatctcgaagtgatattgatgtgaacgcagcagccagtgccaaatccaaagtctcctcatcttcgggcacgacgcctttcagctctgcagcagctttgcctccagggtcatacgcatccttagagtccagacacatgagggaagacatggagtacataggcctggactcaggtcggatccgcacaagacggcaaagctctgggagtgccaccaacgtcgcctctacacctgataaccggggccgcagtcgcgctaaagtggtttcacagtcccagcctggcagccggtcaagttccccaggaaaattgttgggaagtggttatggtggacttactgggggctcctcacgaggcccacctgtgacaccgtcttcagaaaagcgaagcaagattcccaggagccagggatgtagccgggaaacaagtccaaaccgaataggattagatcggtttgggcttggccagccaggaagaatacctggttctgtgaatgccatgagagttctgagcacaagtacagatcttgaagctgctgttgctgatgctttgaagaagcctgtgaggaggagatatgagccgtatgggatgtattctgacgatgatgccaacagtgatgcctcaagtgtttgctctgagcgctcatatggctccaggaatggtggcattccccattatctgcggcagactgaggatgtagcagaagttctcaaccactgtgctagttcaaactggtcagaaaggaaagaagggcttctgggcctgcagaacttactgaagagccaaagaacactgagtcgagttgaactgaaaaggttgtgtgagatcttcactcggatgtttgctgaccctcatagcaaggtaagttttcagtatgtttttggagactcttgtggattttataataattcataaggatgatttacaagactggctttttgttcttctcacacaattactccaataaaagtaactagaggtttggagtctggttaaataaattctgagtaaaattcttaagccaaatggaaattcttaatgcaatcatgaggacttctattgtctcttactgttgtattagatcctataaattgaactgatttttccataaggaaaatgcttcttttgagattaattctaataacgtatttgctattgcagtgcagagcccactgcaactgctaggactgaaagcagaggctgggtgccagagcacgtgattcttaacatcatttccacagacccctctgccctgaccctctgcattggatgcaggaagctgggaaagactgatgttgatttggaaacatgggctgaaaatgaaggccccatagtgcataggaacagtaaagccagggtgctgacgtgtgtgtgtgtgtgtgtgtgtgtgtgtgtgtgtgtgtggtgttgtgtgtgtttgtgcgtgcaccctacacatgtgtggtacctcactgctgctgtttagggaacttgagggacgcgtttcaaggggttgggtattactgacgagctttggctcaaaatatagcaggaccaggtcttttgttgataagtactgtttgtttattaatatgtcattaatggtatttcttttttacactctacaagtgaattagggagtctcttgttgacccctttgttgcaggaatgtgcgtcgggctaggttatccatgagtttctttattcctaatgcagttagaaagacctttctccttgagctctttgactcccagaaggtaccccagtccccagtgtacttagaaaggatctcgaacattgctggacgtcctcatagtactcacaaagggctagccttgaatgtcactcgcccagtcttcagtctcctgacttagagatacaatcacgtcacaggtctcttggcctcaatctgaaaactgctgccgccgcgccgaggagactcgcatgccgccaccacctcactgggagggcgccgagcccaccgtcgccccctagaccctgacagctgcagctgccttgccttgccgccgcctccctgcagggcccctgttccaatgaaaaacagaacacaaaagagcagagcacctaagcctgtctctgcctccctgtctaccggactggccagggcccaagacccccgctgctccactgcggggctgggcgggctgactccctgcttcctccaagctgctgcctcccctgcagccagggtctgggcagggtgcagccggtcctcggggcacgcagcttccttcaagtacactgtgtgtgcttcccggacctgcggcgatgccacgggcctgccttttctatgcgcctcactagcttaccaccctgtgcaggtaatgcaactgactttgtctcatcagtctttttctttccctgccaccctttatttatcaagcgtaatgttacactttaaaggacagcaaataagaactttgtagaatcccaccaggactttgctaacaataatgtttggaaataaagaagtgctctgaaaaaatatcagccaccaaaatagttatgttggcactgtgttcacacgcatggtccccacacccccaggttgggtgggtttttttgttttttgggtttttttgggggggggggctttttcatgttacatccatatctgtatttatatcttatttgtttcactttcaagtgtatcatggcaaatgtacagatttttttgttaataatgtgctaggatttgctaaaaaagaaaaaaaaaaaacccttttgagtttgccctagaataaatgagacttaattca

SEQ ID NO: 1498 - protein, 899 aa, Homosapiens
MEPRMESCLAQVLQKDVGKRLQVGQELIDYFSDKQKSADLEHDQTMLDKLVDGLATSWVNSSNYKVVLLGMDILSALVTRLQDRFKAQIGTVLPSLIDRLGDAKDSVREQDQTLLLKIMDQAANPQYVWDRMLGGFKHKNFRTREGICLCLIATLNASGAQTLTLSKIVPHICNLLGDPNSQVRDAAINSLVEIYRHVGERVRADLSKKGLPQSRLNVIFTKFDEVQKSGNMIQSANDKNFDDEDSVDGNRPSSASSTSSKAPPSSRRNVGMGTTRRLGSSTLGSKSSAAKEGAGAVDEEDFIKAFDDVPVVQIYSSRDLEESINKIREILSDDKHDWEQRVNALKKIRSLLLAGAAEYDNFFQHLRLLDGAFKLSAKDLRSQVVREACITLGHLSSVLGNKFDHGAEAIMPTIFNLIPNSAKIMATSGVVAVRLIIRHTHIPRLIPVITSNCTSKSVAVRRRCFEFLDLLLQEWQTHSLERHISVLAETIKKGIHDADSEARIEARKCYWGFHSHFSREAEHLYHTLESSYQKALQSHLKNSDSIVSLPQSDRSSSSSQESLNRPLSAKRSPTGSTTSRASTVSTKSVSTTGSLQRSRSDIDVNAAASAKSKVSSSSGTTPFSSAAALPPGSYASLESRHMREDMEYIGLDSGRIRTRRQSSGSATNVASTPDNRGRSRAKVVSQSQPGSRSSSPGKLLGSGYGGLTGGSSRGPPVTPSSEKRSKIPRSQGCSRETSPNRIGLDRFGLGQPGRIPGSVNAMRVLSTSTDLEAAVADALKKPVRRRYEPYGMYSDDDANSDASSVCSERSYGSRNGGIPHYLRQTEDVAEVLNHCASSNWSERKEGLLGLQNLLKSQRTLSRVELKRLCEIFTRMFADPHSKVSFQYVFGDSCGFYNNS

SEQ ID NO: 1499 - DNA, 377 bp, Homosapiens
gtgcccatcgaccattctgacctggtggctgaccttctgaaagagctgtccaaccacaatgagcgagtggaggaacggaagggagccctgctggagctgctcaagatcacgcgggaagacagccttggtgtctgggaggagcacttcaagaccattctgctcctgctgctggagacccttggagacaaagaccattcaattcgagcactggcgttaagagttttgagggaaattctgagaaatcaaccagcaagatttaaaaactacgccgagctgacgattatgaagactctggaagcccacaaagaaaatatttattacaatcagtattttggtcccttccagcttttctgtagaatcttactggtattgaatgt

SEQ ID NO: 1500 - protein, 52 aa, Homosapiens
MSEWRNGREPCWSCSRSRGKTALVSGRSTSRPFCSCCWRPLETKTIQFEHWR

SEQ ID NO: 1501 - DNA, 1969 bp, Homosapiens
cagactgcttgtgattggtattattttcttcagatgcttttttgtttttgatgcctagaatgccctcttattagtgattttacttataaaatatttttttaaacaactttaatcaacattttgatgacctattgtacattacataaattaatcatggttcctttttctaggcagcacagattgtgctaatctctctgtttgaattgaatactcctgaatttaccatgttacttggtgccttgccaaaaacattccaggatggtgccaccaaactcctgcacaaccacctcaagaattccagtaacaccagtgtgggctctccaagcaatacgattggccggacgccctcccgacacaccagcagcaggaccagccccctgacctcacccaccaactgttcccatgggggtctgtctccaagcatgctggactatgatacagagaacctgaactctgaagaaatctatagttctctacgtggagttacagaagccattgaaaagtttagttttcgaagccaagaagatctgaatgagccaattaaacgagatggcaaaaaggagtgtgatattgtgtcccgcgatgggggcgctgcctcccctgccactgagggccgggggggtagtgaagtagaaggaggccggacagctctggataacaagacctcactactcaacacccagcctccgcgcgccttcccggggccgcgggcgcgagactacaacccgtacccctactcagatgccatcaacacctacgacaagaccgccctgaaagaggctgtgttcgatgacgacatggagcagcttcgagacgtgcccatcgaccattctgacctggtggctgaccttctgaaagagctgtccaaccacaatgagcgagtggaggaacggaagggagccctgctggagctgctcaagatcacgcgggaagacagccttggtgtctgggaggagcacttcaagaccattctgctcctgctgctggagacccttggagacaaagacgtgagatgctggtttggccttatcttgcccctttccatgtaatggggtcacgatgtccttttcttattgggcttagcttcagctttactttctgggttgtgcttactgtttacatcaaaacatttatttgttcatttttcacatattttctgagcacgtttagtaaggtcatgtttttatcagcaacaagctgctgcttggcttacgtgcatggtctgcaactgggtttatagtagttgaggaaacttcattcctgcatctagttgctttaacacagaatttcttaaaactttattagcatagaatgtggtcttttaggatgtacttttttacttgtgagtttcatttttgtttcatatgtaattgagaaaaagtttcattttaaaagacctgattaaatgctacattccatgaaattccatcttggtccccccctacatatgttaagagttccaataattttaatcagtcaagtggcaggttccagaagcatgattctgatttttgtattattaatttaaaaataaaaaaagcttcatcatgctgggacacttgaatgtgacaaactaggcatttctgacatgcctggtctgtgatctgcacatcgcacatagagaactcttaaaggggggagtaatctggtcaaagtcctgccttctcccacctgtggagctggtcccttatatggaaacaggaatagatgctgagaattaccagaattaaacctctacaagaaaaagtttctccatccacatggagaagagaaatgagaagagagtgctgtggggaggggctggaggaaggggatgggaggattgccaggaggtggcaggccatgcccagggccagctagaggggacttgcatggcaactgagtgacagggaggctgctgcatgccatgccgtggtgactcagatagctttctgatgctttggattaatggtttggtttagggataagt

SEQ ID NO: 1502 - protein, 274 aa, Homosapiens
MLLGALPKTFQDGATKLLHNHLKNSSNTSVGSPSNTIGRTPSRHTSSRTSPLTSPTNCSHGGLSPSMLDYDTENLNSEEIYSSLRGVTEAIEKFSFRSQEDLNEPIKRDGKKECDIVSRDGGAASPATEGRGGSEVEGGRTALDNKTSLLNTQPPRAFPGPRARDYNPYPYSDAINTYDKTALKEAVFDDDMEQLRDVPIDHSDLVADLLKELSNHNERVEERKGALLELLKITREDSLGVWEEHFKTILLLLLETLGDKDVRCWFGLILPLSM

SEQ ID NO: 1503 - DNA, 803 bp, Homosapiens
agatttattccagccgagaccttgaggaatccataaacaaaattagggaaatattatctgatgacaagcatgattgggagcagagagtaaatgctctaaaaaagattagatctttacttttggctggtgctgctgagtatgataacttctttcaacatttgcgtcttttggatggagcctttaaactctctgctaaggacctgcggtctcaggtagtgcgggaggcttgtatcacgttggggtaaggactgcgatgctccatattctcaccataaaatagtgtcaccacagagcttcagagatgtctccttgaacatgtgagctgggtctctttaatgtaacttctgactagtctccaagacccattccagttaacacttctttcagtagttttacaatactttttgctcaattatgtgaagtgtgacagattttaaattttattcagtgacatagctctgaagtctttatttcaaactttgaagcagttattaatatggaaaagtgaaattctataaaatcctgtttctctgatttttcattgatttttgctggcaggcaatagcgtgtttatcagaatgtttgttcctagaagagtactgtagttataaagttaaaggcatttactgcagtaagattttattctagctgtacgtgtactagtgatcaaagctattaaaactttgtgttagaatgtatgtcggaatatcaaagcagcagcagcagcaggaggaggcattgcagctgttttaagttttggctgaagtcagattttgaagcctgaatattttatgttaagataa

SEQ ID NO: 1504 - protein, 80 aa, Homosapiens
IYSSRDLEESINKIREILSDDKHDWEQRVNALKKIRSLLLAGAAEYDNFFQHLRLLDGAFKLSAKDLRSQVVREACITLG

SEQ ID NO: 1505 - DNA, 728 bp, Homosapiens
cacggaggctcacgtctgtaatcccaacactttgggaggccgaggcgggcggatcacaaggtcaggagatagagaccatcctggctaacacagtgaaactccatctctactaaaaatacaaacaaattagctgggcgtggtggcaggtgcctgtactctcagctactcaggaggctgaggcagctgaatggcatgaacccaggaggcagagattgcagtgagccgagatggcaccactgccctccagcctgggcgacagagctggactccgtctctaaaacataaataaataaaaatatttaaagagtattgtcactttaaagaatacaatggctgggcgcggtggctcacgcctgtaataccagcgttgggaggctgaggcaggagaagcgctcgaaccagggaggcggaggttgcggtgagccgagatcatgccattgcactccagcctgggcaacaagagcaaaactccatctcaaaaaaacgaataaaaaatttaaaaagtaaataaataatacattaaattttaaatgcatactccaaaataatctgaaaatctacaagtatgacagttattctcaaatattctttttattgaaaaaatgaatatacccctaaaattgagcaactggaggagaatctattattctgagcaccaaccatgtcccaggcactaagaaattcgctaagaattttacacacaatctcatttattctccacaaaatcc

SEQ ID NO: 1506 - protein, 30 aa, Homosapiens
MNPGGRDCSEPRWHHCPPAWATELDSVSKT

SEQ ID NO: 1507 - DNA, 6341 bp, Homosapiens
ggggggggacttatgctacgcagctttctcaggtcatcttgacagctttgattctgcgcagcagtgcagtaacatgcagcctcacatccacaccacaccagtgcaagtacctgtacctttactgggatcattggaaacaacgtttcttagcaggggcttggtgctttttgtgaatacagtcccacaggcctttctccgcagtttcaaaattcaaagcactctgaaagcctagtgtttttaattactaatttgccatttgacctgaagtgaactaacatgagactatttatagtctgtatgtacctggctaggctatgtttcactacaaaaatattaatgtgcttgattgtgagttgctgccccggattctattcaaggggctatattacacatacacacacacatacacactatctctctctccgtgcactattttatcttcctaaaaatctgaaaaattctttattccagaatatacctggcctctagagttttggataagcaattgtggacctgtatttaatactgtacaataataatgatagtctatggctgtggtgcatttactgtgagccagaaattgtgctaaatatgtgttcattttttaaattgtaattaccatatgaggtagacattatttttcccattttacaaatgagaagactgatgctcaaaaaattagctaacttgttcaaggtgataaaactagtaattaagatttctgagacttgaactcaagtccttatgcaacaaccagagttaattaaacacgtatgatgtgccagttgctgtacttacacagtagggaaaaactgggtacggtcccggcccagtgtctaagctgtctaggtctgtccagtctgtgtgggcttcatctccgtgtacatttgtctcaaggcccattccgtgctgccttatatttgaaatttgtgggttccctattaacccagagcttccttttcttctgccctgtggtctgattggaggaacggggagggcacatgagagggcggtgcacagtgtaggataggaaataagtcagtgctaaattgcatcataggaatttgtataaattctgtcatgcggagaaagaagaaacattagggtatgcttagttggagaggccttgacagagaagtgggattaaagagggttatgaagaaccaaaaggtgtaagctgcagagggttctgagaaagtctctcttcctttcctgtttctccctttctggttagcacttccttggtagactgtaaaagatgtagtctctcctaagctgctttacagagcacatgttaccgctagatcaagtgtgtttatgggcaggaggagactgtgttgacagataagggaggttcctctcatttcctttgcctatctccaaaaccttggctttcatcgaggtttttattttcccgcttgtgtccttgagaggagagccagaaaagattattggattcagattaagtgacttctgtttccttttctggcagtctcctcgctactgccaccaagtgacacatcttttcagagactgtccatttttttccaggttttccttgcagtgtttgtcctattggctgtaggaggtgaatttccatggtttaatctaaaaagacaggtgcctctgtcataagtagaaaagctacagttagcagcactaagcaaaagcaaaaaaccttaggaaaggttatgtcaagaaaatttatatggattgttggtaaaaatggtgtccttgatgtatgtaattagtggcatttcttcctaaatgtgtttacctatatgcaagggcaacaaagtgtactgaaagtattttagatttgagtgtgaattgtctggattcctcttctggctctgccactcatatatttgagcaggtagctttctctctagaatgtatttcctcatctgtaaaaggggtctgatgatatttactacatagaggattcagtaagcccatgtatataagcccatgtagtgcttttaatatgtagcatgtggtcagtaaaaggaagttgacgaaaatgtatattatgggaccaaatactcataaaatctgaggaaagttaacttttatgtgggactgaggttacatgttttcttgtggcctagtcagttagcctgtgctctggaacagaggccttgggtctcttgtaataagatatgaatccatcagttgttcagtgttgataataaagtccctgagtagagcagcagctggctgggaagtctgtgaagggtgagttaaaaactgactggtataaaacaatccattgactgaggccccctgttttaggaagatttcacttgattgtaaaatttttaacacttatactttcccttgtttcagaaaactaaaatttaaataaggatacatgcaacagaagaagtaataaattgaatgtcaaggcagaaagtaaaacagctggagtgagaacgtggacctaacaatgaggctaatgattaacagctaatgtttactagtagctaacacttattaagcgccattatgtgctagacactgttaagtgttttgcatgcattgcctggtgtaattataacatagatgctgtatgataagccctgtgattattcctattctttaagtggggacactgaagaaacttgcccgaggttacatgactagaaagtgtcagaggcaggatgttagtcggaatagtctgactgtagcacccactgctgaagcaatatgcagtattttctttataattttgtagcagaggtaatagtagcatttattggagcataaaagaaaagggtgtaaggacgtaccccacagttgatttcttaaagggagggaattttgagttagactttaatgaaaaatatttaagatgaatatatttaaaatagttctttggtcctgttagaatcatgaccatatatactttttaaactttttattttggaaaatattcagacatgtgaaaacctcagaaaacagttaaaaaaattttcatgtatgtttcacctggaccccagtgttaactctttatcacatatgtcttgttttctctattattatgcttattgtaatcatttgagagtagtagacacagtgcttcactgcaatacctgtgtatacagtggttcttagaaacaaggtcattcatttatataatgttaggacagctatctaaatcaggattaagatgttgggattacaggcgtgagccaccgcgccaggccttttttttgagacggagttttgctcttgttactgaggctggagtgcagtggcgcgatctcggctcaccgcaacctccgcctcccgggttcagtgattctcctggctcagcctcccaagtagctgggatcacaggcatgcaccaccaccctggctaattttgtatttttagtaaagatggggtttctccatgttggtcatgctggtcttgaactcccaacctcaggtgatccacccacctcggcctcccaaagtggtgggattacaggcgtgagccactgcgcctggccgaaaaaaaaatttttttaatcctgtttcatgatccagttctggaacacacactacatttaggtctcatatctgtgtagtttcctttttttttttttttttttgagacggagtttttctcttttctcttgttgcccaggctggagtgcagtggcacgatctcagctccctgcaacttccgcctccccggatcaagcgattcttctgcctcagcctcccaagtagctgggattataggcaggcaccagcatgcccggctacttttgtatttttagtagaggcggagttttaccatgttggtcaggctggtctcgaactcctgacctcaggtgatccacccgcctgggcctccctaagtgctgggattacaggtgtgagccaccgtgcccggccatagtttcctttacactggaacagttcattgtcagtctttccttatttttcttggcttaataattttgaagaattaggtcaccttactgtgtgtagttcgtcaatttgacgttgtttgatgcttcttcctggttagattttggcaggaatactgtagatgtgacatatccttctcagtgcctcacatcgggaggcacacgatatctcttcctcctacgtggttaaagaggtgtttgccaggtttcttcaaaaagttacttttttcccctctttctaattaatagatatcttgtggggagatagtttgagactgtataaatatcctattactcattaaactttcacctatagcttcagaatccattgatgatttttacttaaaacagttattaggccgggcgtggtggctcacgcctgtaatcccagcactttgggaggccgaggtgggcggatcacgaggtcaggagaccatcctggctagcacggtgaaaccccgtctctactaaaaatacaaaaaattagccaggtgaggtggcgggcacctatagtcccagctacacgggaggctgaggcaggagaatggcgtgaaccctggggggcagagcctgcagtgagccgagatcatgccactgcactacagcctgggtgacggcgagactctgtctcaaacaaaaaaacaaacaaaaaaaaacagttattaattattatgctggttgccaaagggtgattttctagttcaccattccttcttcatttattagttggcttcatatgtttttgaaatgtatatcctatgttggcttcatatatttttgaaatgtatagaaagaatgaagttctatcaaaatagaatattttgatagttatcacaaaaaggaactgctttgaaggagaaaaaagtgtttaaaattaatgttacttaggtacatttatattcatacattgtttaaggcaacctaataattttgtgaacatataaaaatgcgatgaagtttggtttgagcctgaagtaaaaatggagcgatggctacctgaaagttttcataaatattatgaagggaatacaaaaagacatgtaatagcaaaatatcttcctggagttagcaggatattaaaggacgctttgtgggaggggaagaaaagcaaaacatgcaaatggatgacacaatctgagtataagtgagatccaggttattcagctatagacagaactcaccagcttgaactgtgggttaagggggaattgtcagacagcattggagtaaaaagaaaaccaagctggtggccctgccaagttatctattgaacaggttaggtagagggagagtctgtgacaaggaccatggtaagaaatccagagaaatcagatgaaaatggctcgaagtagagaatgggaggtcaacctggaagaattatttgatctacagctgcattttacatgggattttggggaggggcaaagaaggagctgttagagatggctgtccattatggaacaaataggtgtggttataaatggggaagaagttctttgatgactggtaggaatctcttggtgtttaaacatccttaaaagctttgtggatgagatggcctttaggattcttttggatgagggacaagagatagcccagccggctccatgaaggaagatgttcaggcgtccttaatagagataaaattctgagatacaagtggcctggttgtgcaccagcgaggctgagcacgtttcctaggtggaggagccctgagggcaatcaagagagacttccctgcagcactgtagtataggaatttagtactgattcgcagggcaatcgaagccattgaaagacctcagggagaggtgtctgggtctcacccacacaccgcagcagtgggtgctgaagattgtctgatgaaggcattgtggactaggactaagaggaagtgagggagaagcaaatttgagtaatgtcattagggaggaggacaacctagtggtttttggtattagtgtgcatatataaaggactgggatgaatttgataattgtttgagatttcaggcttcatgatacaatttattggctatggatagccttgtaaaaaaagatgtccaagttctttttctgcatggtgcatttgacttctttttgatttagagaagtaatttttaaaaatcaaataatttggccggacgcagtggctcacacctgtaatcccagcagtttgggaggccgaagcgggcggatcacgaggtcaggagatggagaccaccctggccaacatggtgaaaccccgtctccactaaaaatacaaaaattagctgggcgtggtggtgcacgcctgtagtcccagctgcttggcaggctgaggcaggagaatcgcttgaacccgggaggcggaggttgcagtgagccgagattgcaccattgctctccagcctgggcaacagagcgagactccatctca

SEQ ID NO: 1508 - protein, 74 aa, Homosapiens
MLGQLSKSGLRCWDYRREPPRQAFFLRRSFALVTEAGVQWRDLGSPQPPPPGFSDSPGSASQVAGITGMHHHPG

SEQ ID NO: 1509 - DNA, 1038 bp, Homosapiens
ggccgtgttaggcttcgctggcgtaaagtccccgggagctttgcccctcacggagaacgttagttgaccctgatggggacccgtagggtaaaggttttgtttttgtttttttttacggaaaaggttgtggttaggccccttggaaagttgcgacaaaactcgagttagacaaggaaggtcggaactaagtggccacagcaacaatgcaccagcaagcagggagcgtgataggaagagctaaagaggaatcgggaaaccctggggtctcaccgccgtcgcccaggccggatggagtgcagtggcgcgatcacggctcactgcagcctcgacttcccaggctcagagatgggtttcaccatgtttcccagccttgtctcaaactcctgacctcaagtgatccgccgtcttgggtcttcgaaagtgctgggacagcaggagtgagccaccgcatctggcccggaaagtgttttggagcgtagaaaaatgcaaattatagggctgccttcaaggatcccgaaggacccacagatttgccgcatcaggctcctatgcacgccggtaatttgatgtgttgagatgcactgcccagtgcgttgtttttactggaggagcttgtgtgcggagctccttgctagtgtatgtgttgggatgggagagaagtgcgggagaactatgagataatgccccctgatcctcagggtcttaggaggtatggtcggagaggctaagctaaagtatgaaagccgtgtgtaggcccttctgtgtagtgcagaaaaggtagaggtatgtgatttgaaagagtagggatgacatggaggatgcgactcctggttggatctataaactaatgtctttggaacgaaagcacatgcaaccttttgaaaatggatgggtgataatgaaagaccattccagagaagaaacaccatggtgcaaaggctcaagaggcatactggaagtacaatgaagagagcaatctaactgaaatgggaaaaaaagaaacaaagagtaaaaagtaagatttgatgagaaagatgg

SEQ ID NO: 1510 - protein, 91 aa, Homosapiens
MHQQAGSVIGRAKEESGNPGVSPPSPRPDGVQWRDHGSLQPRLPRLRDGFHHVSQPCLKLLTSSDPPSWVFESAGTAGVSHRIWPGKCFGA

SEQ ID NO: 1511 - DNA, 1414 bp, Homosapiens
ggccgtgttaggcttcgctggcgtaaagtccccgggagctttgcccctcacggagaacgttagttgaccctgatggggacccgtagggtaaaggttttgtttttgtttttttttacggaaaaggttgtggttaggccccttggaaagttgcgacaaaactcgagttagacaaggaaggtcggaactaagtggccacagcaacaatgcaccagcaagcagggagcgtgataggaagagctaaagaggaatcgggaaaccctggggtctcaccgccgtcgcccaggccggatggagtgcagtggcgcgatcacggctcactgcagcctcgacttcccaggctcagagatgggtttcaccatgtttcccagccttgtctcaaactcctgacctcaagtgatccgccgtcttgggtcttcgaaagtgctgggacagcaggagtgagccaccgcatctggcccggaaagtgttttggagcgtagaaaaatgcaaattatagggctgccttcaaggatcccgaaggacccacagatttgccgcatcaggctcctatgcacgccggtaatttgatgtgttgagatgcactgcccagtgcgttgtttttactggaggagcttgtgtgcggagctccttgctagtgtatgtgttgggatgggagagaagtgcgggagaactatgagataatgccccctgatcctcagggtcttaggaggtatggtcggagaggctaagctaaagtatgaaagccgtgtgtaggcccttctgtgtagtgcagaaaaggtagaggtatgtgatttgaaagagtagggatgacatggaggatgcgactcctggttggatctataaactaatgtctttggaacgaaagcacatgcaaccttttgaaaatggatgggtgataatgaaagaccattccagagaagaaacaccatggtgcaaaggctcaagaggcatactggaagtacaatgaagagagcaatctaactgaaatgggaaaaaaagaaacaaagagtaaaaagtaagatttgatgagaaagatggaatcgatttttaaatttttttatctacacaacaaaatttattatcttaaccatttttgagtgaataattcgttagtattaagtatatttacctcgtgcggccagtctccagaattcttttcatcttgcaaaacaaaccccgaacccattaaacaatttctcattcgccattttccagctagccttggtaacctccattctagttctgtctctgtgaatttgactgtgtaccccgtgtaagtggtatcatacagtatttgtatttttgtgactggcatatttcacatagcataatctccttgtggtttatccatcttgtagcatgtgtcagaatttccttcccttttaagactaaataatattccattgtgtgtata

SEQ ID NO: 1512 - protein, 91 aa, Homosapiens; identical to SEQ ID NO: 1510

SEQ ID NO: 1513 - DNA, 1407 bp, Homosapiens
gcgtaaagtccccgggagctttgcccctcacggagaacgttagttgaccctgatggggacccgtagggtaaaggttttgtttttgtttttttttacggaaaaggttgtggttaggccccttggaaagttgcgacaaaactcgagttagacaaggaaggtcggaactaagtggccacagcaacaatgcaccagcaagcagggagcgtgataggaagagctaaagaggaatcgggaaaccctgggtaaaagtcgtccaagtggaacttcctttggtcgggggtctgatactcgaaggaaacggtctttcacttctgggttagggcgtccgcccagagggcgactgcaatgaaggaaattgtgccctgcgacttcccgtaacagagctgtgtgtccacgctcccttttccgagcaggcgcggacgcttgtgccggaagtaaacttgttaacggttctttgccttttggggaggggagacagcccagagaaggctttggagacccttgagtcggccagcgagcagggtttcttacttgagcgcctccacaaataaacgctccttcgctcctccgtcgcgtgcgtttccctgggataataagtgggaaagtggtggcttttatttttttgagacagggtctcaccgccgtcgcccaggccggatggagtgcagtggcgcgatcacggctcactgcagcctcgacttcccaggctcagagatgggtttcaccatgtttcccagccttgtctcaaactcctgacctcaagtgatccgccgtcttgggtcttcgaaagtgctgggacagcaggagtgagccaccgcatctggcccggaaagtgttttggagcgtagaaaaatgcaaattatagggctgccttcaaggatcccgaaggacccacagatttgccgcatcaggctcctatgcacgccggtaatttgatgtgttgagatgcactgcccagtgcgttgtttttactggaggagcttgtgtgcggagctccttgctagtgtatgtgttgggatgggagagaagtgcgggagaactatgagataatgccccctgatcctcagggtcttaggaggtatggtcggagaggctaagctaaagtatgaaagccgtgtgtaggcccttctgtgtagtgcagaaaaggtagaggtatgtgatttgaaagagtagggatgacatggaggatgcgactcctggttggatctataaactaatgtctttggaacgaaagcacatgcaaccttttgaaaatggatgggtgataatgaaagaccattccagagaagaaacaccatggtgcaaaggctcaagaggcatactggaagtacaatgaagagagcaatctaactgaaatgggaaaaaaagaaacaaagagtaaaaagtaagatttgatgagaaagatgg

SEQ ID NO: 1514 - protein, 32 aa, Homosapiens
MECSGAITAHCSLDFPGSEMGFTMFPSLVSNS

SEQ ID NO: 1515 - DNA, 1783 bp, Homosapiens
gcgtaaagtccccgggagctttgcccctcacggagaacgttagttgaccctgatggggacccgtagggtaaaggttttgtttttgtttttttttacggaaaaggttgtggttaggccccttggaaagttgcgacaaaactcgagttagacaaggaaggtcggaactaagtggccacagcaacaatgcaccagcaagcagggagcgtgataggaagagctaaagaggaatcgggaaaccctgggtaaaagtcgtccaagtggaacttcctttggtcgggggtctgatactcgaaggaaacggtctttcacttctgggttagggcgtccgcccagagggcgactgcaatgaaggaaattgtgccctgcgacttcccgtaacagagctgtgtgtccacgctcccttttccgagcaggcgcggacgcttgtgccggaagtaaacttgttaacggttctttgccttttggggaggggagacagcccagagaaggctttggagacccttgagtcggccagcgagcagggtttcttacttgagcgcctccacaaataaacgctccttcgctcctccgtcgcgtgcgtttccctgggataataagtgggaaagtggtggcttttatttttttgagacagggtctcaccgccgtcgcccaggccggatggagtgcagtggcgcgatcacggctcactgcagcctcgacttcccaggctcagagatgggtttcaccatgtttcccagccttgtctcaaactcctgacctcaagtgatccgccgtcttgggtcttcgaaagtgctgggacagcaggagtgagccaccgcatctggcccggaaagtgttttggagcgtagaaaaatgcaaattatagggctgccttcaaggatcccgaaggacccacagatttgccgcatcaggctcctatgcacgccggtaatttgatgtgttgagatgcactgcccagtgcgttgtttttactggaggagcttgtgtgcggagctccttgctagtgtatgtgttgggatgggagagaagtgcgggagaactatgagataatgccccctgatcctcagggtcttaggaggtatggtcggagaggctaagctaaagtatgaaagccgtgtgtaggcccttctgtgtagtgcagaaaaggtagaggtatgtgatttgaaagagtagggatgacatggaggatgcgactcctggttggatctataaactaatgtctttggaacgaaagcacatgcaaccttttgaaaatggatgggtgataatgaaagaccattccagagaagaaacaccatggtgcaaaggctcaagaggcatactggaagtacaatgaagagagcaatctaactgaaatgggaaaaaaagaaacaaagagtaaaaagtaagatttgatgagaaagatggaatcgatttttaaatttttttatctacacaacaaaatttattatcttaaccatttttgagtgaataattcgttagtattaagtatatttacctcgtgcggccagtctccagaattcttttcatcttgcaaaacaaaccccgaacccattaaacaatttctcattcgccattttccagctagccttggtaacctccattctagttctgtctctgtgaatttgactgtgtaccccgtgtaagtggtatcatacagtatttgtatttttgtgactggcatatttcacatagcataatctccttgtggtttatccatcttgtagcatgtgtcagaatttccttcccttttaagactaaataatattccattgtgtgtata

SEQ ID NO: 1516 - protein, 32 aa, Homosapiens; identical to SEQ ID NO: 1514

SEQ ID NO: 1517 - DNA, 2139 bp, Homosapiens
gcgtaaagtccccgggagctttgcccctcacggagaacgttagttgaccctgatggggacccgtagggtaaaggttttgtttttgtttttttttacggaaaaggttgtggttaggccccttggaaagttgcgacaaaactcgagttagacaaggaaggtcggaactaagtggccacagcaacaatgcaccagcaagcagggagcgtgataggaagagctaaagaggaatcgggaaaccctgggtaaaagtcgtccaagtggaacttcctttggtcgggggtctgatactcgaaggaaacggtctttcacttctgggttagggcgtccgcccagagggcgactgcaatgaaggaaattgtgccctgcgacttcccgtaacagagctgtgtgtccacgctcccttttccgagcaggcgcggacgcttgtgccggaagtaaacttgttaacggttctttgccttttggggaggggagacagcccagagaaggctttggagacccttgagtcggccagcgagcagggtttcttacttgagcgcctccacaaataaacgctccttcgctcctccgtcgcgtgcgtttccctgggataataagtgggaaagtggtggcttttatttttttgagacagggtctcaccgccgtcgcccaggccggatggagtgcagtggcgcgatcacggctcactgcagcctcgacttcccaggctcagagatgggtttcaccatgtttcccagccttgtctcaaactcctgacctcaagtgatccgccgtcttgggtcttcgaaagtgctgggacagcaggagtgagccaccgcatctggcccggaaagtgttttggagcgtagaaaaatgcaaattatagggctgccttcaaggatcccgaaggacccacagatttgccgcatcaggctcctatgcacgccgaaatgcccaggaggattgacgagattgaggtcaagatcgtggcccagtgtgtggcgctccaagccagctcttcccctttcaaaaccagaaaagccgcatgtttagatcgctctaggagattcatctccattacgatacaggatatgggctgtttgaaaactatttcatcatctttatcatcatcattcagttcagccacttgagattttcgcctctccaaaaatgttggtgtacaaactggtgtggggccctggattcaacaagtaaagattataatacataaatgtaaaacatgattatgactttacccaaaaatatcatctctcctctatttttacaagttgtgccccattattttagctctgttaccatcttttggtgatactattgcaaagaataaagaacttagatgcttatcaaacttggtacagaaattcacaattaacaaatatagcatgttccattataaggttttaggcagaaaattgctaaatcaacaataaagatctaccaaatgtcacaatatttaatttgaaatcttaaaatgagagtagcagaaactgcttctcctccttcaaattatttctataatatctggtgtctggagtattgaaaaccattttacctggctatccacagtcttctcaggagtgtcaagagtacctgaaacttttttcttcttcttacgtaaaaccttaaaataaattttaaaacacatcaatttgaatattgatcagctacagtagtcttgaatatgttttcctacttatccttctctaatatcttgcatgtaaaatgataaaaaaaattttacctggccttttgtagacgtctgacgattagtttttgaaatactttccgttttctgtaaaatctttaataaagaagttagaaattgacactcatatcttttctttctaaacttagcattagatcctcatatatattatcagtaaatcctccctaaatgacaagagcatttcattttaaaaaatcaaaactcataaatacagtgaattatctcaagtaaagggcaaaactaggaaaaacccagtagaggaattgacagagctgcagaggttgaagggaaggccaaaacctggagctcactgattcacagaatcctgaattcaggagggtggaagcaggaagaatgtgcaaaggcaggccacccccatctcctaagtcacaaacagggtacaggaaaagcag

SEQ ID NO: 1518 - protein, 70 aa, Homosapiens
MHAEMPRRIDEIEVKIVAQCVALQASSSPFKTRKAACLDRSRRFISITIQDMGCLKTISSSLSSSFSSAT

SEQ ID NO: 1519 - DNA, 809 bp, Homosapiens
tgcgacaaaactcgagttagacaaggaaggtcggaactaagtggccacagcaacaatgcaccagcaagcagggagcgtgataggaagagctaaagaggaatcgggaaaccctggagatgggtttcaccatgtttcccagccttgtctcaaactcctgacctcaagtgatccgccgtcttgggtcttcgaaagtgctgggacagcaggagtgagccaccgcatctggcccggaaagtgttttggagcgtagaaaaatgcaaattatagggctgccttcaaggatcccgaaggacccacagatttgccgcatcaggctcctatgcacgccggtaatttgatgtgttgagatgcactgcccagtgcgttgtttttactggaggagcttgtgtgcggagctccttgctagtgtatgtgttgggatgggagagaagtgcgggagaactatgagataatgccccctgatcctcagggtcttaggaggtatggtcggagaggctaagctaaagtatgaaagccgtgtgtaggcccttctgtgtagtgcagaaaaggtagaggtatgtgatttgaaagagtagggatgacatggaggatgcgactcctggttggatctataaactaatgtctttggaacgaaagcacatgcaaccttttgaaaatggatgggtgataatgaaagaccattccagagaagaaacaccatggtgcaaaggctcaagaggcatactggaagtacaatgaagagagcaatctaactgaaatgggaaaaaaagaaacaaagagtaaaaagtaagatttgatgagaaagatgg

SEQ ID NO: 1520 - protein, 64 aa, Homosapiens
MHQQAGSVIGRAKEESGNPGDGFHHVSQPCLKLLTSSDPPSWVFESAGTAGVSHRIWPGKCFGA

SEQ ID NO: 1521 - DNA, 1185 bp, Homosapiens
tgcgacaaaactcgagttagacaaggaaggtcggaactaagtggccacagcaacaatgcaccagcaagcagggagcgtgataggaagagctaaagaggaatcgggaaaccctggagatgggtttcaccatgtttcccagccttgtctcaaactcctgacctcaagtgatccgccgtcttgggtcttcgaaagtgctgggacagcaggagtgagccaccgcatctggcccggaaagtgttttggagcgtagaaaaatgcaaattatagggctgccttcaaggatcccgaaggacccacagatttgccgcatcaggctcctatgcacgccggtaatttgatgtgttgagatgcactgcccagtgcgttgtttttactggaggagcttgtgtgcggagctccttgctagtgtatgtgttgggatgggagagaagtgcgggagaactatgagataatgccccctgatcctcagggtcttaggaggtatggtcggagaggctaagctaaagtatgaaagccgtgtgtaggcccttctgtgtagtgcagaaaaggtagaggtatgtgatttgaaagagtagggatgacatggaggatgcgactcctggttggatctataaactaatgtctttggaacgaaagcacatgcaaccttttgaaaatggatgggtgataatgaaagaccattccagagaagaaacaccatggtgcaaaggctcaagaggcatactggaagtacaatgaagagagcaatctaactgaaatgggaaaaaaagaaacaaagagtaaaaagtaagatttgatgagaaagatggaatcgatttttaaatttttttatctacacaacaaaatttattatcttaaccatttttgagtgaataattcgttagtattaagtatatttacctcgtgcggccagtctccagaattcttttcatcttgcaaaacaaaccccgaacccattaaacaatttctcattcgccattttccagctagccttggtaacctccattctagttctgtctctgtgaatttgactgtgtaccccgtgtaagtggtatcatacagtatttgtatttttgtgactggcatatttcacatagcataatctccttgtggtttatccatcttgtagcatgtgtcagaatttccttcccttttaagactaaataatattccattgtgtgtata

SEQ ID NO: 1522 - protein, 64 aa, Homosapiens; identical to SEQ ID NO: 1520

SEQ ID NO: 1523 - DNA, 891 bp, Homosapiens
gggcgtccgcccagagggcgactgcaatgaaggaaattgtgccctgcgacttcccgtaacagagctgtgtgtccacgctcccttttccgagcaggcgcggacgcttgtgccggaaggtctcaccgccgtcgcccaggccggatggagtgcagtggcgcgatcacggctcactgcagcctcgacttcccaggctcagagatgggtttcaccatgtttcccagccttgtctcaaactcctgacctcaagtgatccgccgtcttgggtcttcgaaagtgctgggacagcaggagtgagccaccgcatctggcccggaaagtgttttggagcgtagaaaaatgcaaattatagggctgccttcaaggatcccgaaggacccacagatttgccgcatcaggctcctatgcacgccggtaatttgatgtgttgagatgcactgcccagtgcgttgtttttactggaggagcttgtgtgcggagctccttgctagtgtatgtgttgggatgggagagaagtgcgggagaactatgagataatgccccctgatcctcagggtcttaggaggtatggtcggagaggctaagctaaagtatgaaagccgtgtgtaggcccttctgtgtagtgcagaaaaggtagaggtatgtgatttgaaagagtagggatgacatggaggatgcgactcctggttggatctataaactaatgtctttggaacgaaagcacatgcaaccttttgaaaatggatgggtgataatgaaagaccattccagagaagaaacaccatggtgcaaaggctcaagaggcatactggaagtacaatgaagagagcaatctaactgaaatgggaaaaaaagaaacaaagagtaaaaagtaagatttgatgagaaagatgg

SEQ ID NO: 1524 - protein, 32 aa, Homosapiens; identical to SEQ ID NO: 1514

SEQ ID NO: 1525 - DNA, 1267 bp, Homosapiens
gggcgtccgcccagagggcgactgcaatgaaggaaattgtgccctgcgacttcccgtaacagagctgtgtgtccacgctcccttttccgagcaggcgcggacgcttgtgccggaaggtctcaccgccgtcgcccaggccggatggagtgcagtggcgcgatcacggctcactgcagcctcgacttcccaggctcagagatgggtttcaccatgtttcccagccttgtctcaaactcctgacctcaagtgatccgccgtcttgggtcttcgaaagtgctgggacagcaggagtgagccaccgcatctggcccggaaagtgttttggagcgtagaaaaatgcaaattatagggctgccttcaaggatcccgaaggacccacagatttgccgcatcaggctcctatgcacgccggtaatttgatgtgttgagatgcactgcccagtgcgttgtttttactggaggagcttgtgtgcggagctccttgctagtgtatgtgttgggatgggagagaagtgcgggagaactatgagataatgccccctgatcctcagggtcttaggaggtatggtcggagaggctaagctaaagtatgaaagccgtgtgtaggcccttctgtgtagtgcagaaaaggtagaggtatgtgatttgaaagagtagggatgacatggaggatgcgactcctggttggatctataaactaatgtctttggaacgaaagcacatgcaaccttttgaaaatggatgggtgataatgaaagaccattccagagaagaaacaccatggtgcaaaggctcaagaggcatactggaagtacaatgaagagagcaatctaactgaaatgggaaaaaaagaaacaaagagtaaaaagtaagatttgatgagaaagatggaatcgatttttaaatttttttatctacacaacaaaatttattatcttaaccatttttgagtgaataattcgttagtattaagtatatttacctcgtgcggccagtctccagaattcttttcatcttgcaaaacaaaccccgaacccattaaacaatttctcattcgccattttccagctagccttggtaacctccattctagttctgtctctgtgaatttgactgtgtaccccgtgtaagtggtatcatacagtatttgtatttttgtgactggcatatttcacatagcataatctccttgtggtttatccatcttgtagcatgtgtcagaatttccttcccttttaagactaaataatattccattgtgtgtata

SEQ ID NO: 1526 - protein, 32 aa, Homosapiens; identical to SEQ ID NO: 1514

SEQ ID NO: 1527 - DNA, 1446 bp, Homosapiens
ctgcttttcctgtaccctgtttgtgacttaggagatgggggtggcctgcctttgcacattcttcctgcttccaccctcctgaattcaggattctgtgaatcagtgagctccaggttttggccttcccttcaacctctgcagctctgtcaattcctctactgggtttttcctagttttgccctttacttgagataattcactgtatttatgagttttgattttttaaaatgaaatgctcttgtcatttagggaggatttactgataatatatatgaggatctaatgctaagtttagaaagaaaagatatgagtgtcaatttctaacttctttattaaagattttacagaaaacggaaagtatttcaaaaactaatcgtcagacgtctacaaaaggccaggttttacgtaagaagaagaaaaaagtttcaggtactcttgacactcctgagaagactgtggatagccagggccccacaccagtttgtacaccaacatttttggagaggcgaaaatctcaagtggctgaactgaatgatgatgataaagatgatgaaatagttttcaaacagcccatatcctgtgtaaaagaagaaatacaagagactcaaacacctacacattcacggaaaaaaagacgaagaagcagcaatcagtgattttcaatgtattatatttcttttgaaaaatataatatttttatgagagtggactttgtatttcactaggtacaatggaatacaacctttgacaagattttcagaggaaaaatacactgtttggtcaagttaaggaaagcagtgtgtaattttggattgcctgcccttggctgaaatacaggggtgcataccatcttgcagtggcttggctgacattgcctctttgtcctggcctctagttttcttttgatatttcatagctctccttagtttactctgcctggatagaaagttgaccactaactgcaggtttaagtactaaactgcagccttttctgtcgccagcaattaaagaccaccaatcttgtttgtccatctacatggtttgtcggggacatttaactcatggaggtgctttagatttcaacatcagatggttgaagctggaagtttaattatatgtagagtgagaaggcagttccagttttagcacagatttgtttatgtgttcagattttaatagagattcaaaaatgactcatttttaccaataatgttaaattagttttggttgtgctagcatgaattaataaccaccattttataccagtatcatcagtgaagaattgtatttcaagattcaaacaataaccagcaattaaacttttttctacaatgtatttgtttgcgagtaggacttgggagtcattgggaaaaaaaaataataaattttccccttcattaacgaattcagactcattaaaaacattgccatcagatgtagtagctt

SEQ ID NO: 1528 - protein, 37 aa, Homosapiens
MYLFASRTWESLGKKNNKFSPSLTNSDSLKTLPSDVV

SEQ ID NO: 1529 - DNA, 1566 bp, Homosapiens
ctgcttttcctgtaccctgtttgtgacttaggagatgggggtggcctgcctttgcacattcttcctgcttccaccctcctgaattcaggattctgtgaatcagtgagctccaggttttggccttcccttcaacctctgcagctctgtcaattcctctactgggtttttcctagttttgccctttacttgagataattcactgtatttatgagttttgattttttaaaatgaaatgctcttgtcatttagggaggatttactgataatatatatgaggatctaatgctaagtttagaaagaaaagatatgagtgtcaatttctaacttctttattaaagattttacagaaaacggaaagtatttcaaaaactaatcgtcagacgtctacaaaaggccaggtaaaattttttttatcattttacatgcaagatattagagaaggataagtaggaaaacatattcaagactactgtagctgatcaatattcaaattgatgtgttttaaaatttattttaaggttttacgtaagaagaagaaaaaagtttcaggtactcttgacactcctgagaagactgtggatagccagggccccacaccagtttgtacaccaacatttttggagaggcgaaaatctcaagtggctgaactgaatgatgatgataaagatgatgaaatagttttcaaacagcccatatcctgtgtaaaagaagaaatacaagagactcaaacacctacacattcacggaaaaaaagacgaagaagcagcaatcagtgattttcaatgtattatatttcttttgaaaaatataatatttttatgagagtggactttgtatttcactaggtacaatggaatacaacctttgacaagattttcagaggaaaaatacactgtttggtcaagttaaggaaagcagtgtgtaattttggattgcctgcccttggctgaaatacaggggtgcataccatcttgcagtggcttggctgacattgcctctttgtcctggcctctagttttcttttgatatttcatagctctccttagtttactctgcctggatagaaagttgaccactaactgcaggtttaagtactaaactgcagccttttctgtcgccagcaattaaagaccaccaatcttgtttgtccatctacatggtttgtcggggacatttaactcatggaggtgctttagatttcaacatcagatggttgaagctggaagtttaattatatgtagagtgagaaggcagttccagttttagcacagatttgtttatgtgttcagattttaatagagattcaaaaatgactcatttttaccaataatgttaaattagttttggttgtgctagcatgaattaataaccaccattttataccagtatcatcagtgaagaattgtatttcaagattcaaacaataaccagcaattaaacttttttctacaatgtatttgtttgcgagtaggacttgggagtcattgggaaaaaaaaataataaattttccccttcattaacgaattcagactcattaaaaacattgccatcagatgtagtagctt

SEQ ID NO: 1530 - protein, 93 aa, Homosapiens
MCFKIYFKVLRKKKKKVSGTLDTPEKTVDSQGPTPVCTPTFLERRKSQVAELNDDDKDDEIVFKQPISCVKEEIQETQTPTHSRKKRRRSSNQ

SEQ ID NO: 1531 - DNA, 1729 bp, Homosapiens
ccatggcctttgtggggagagaaacactaaacagccagttctttaattactactgtggtaagtggaaatgcagaataggttcttgggccgagggctaggggttttgttacaatgtgattttcttatttatatatttaatttacctggtctttacgtctttagcgaaaaaaacaagaacaacttactcctggagtagtctatgtgcgccacctacctaacctacttgacgaaacccagatcttttcatatttctcccagtttggcactgtgacacggttcaggctgtccagaagtaaaaggactggaaatagcaaaggctatgcatttgtggagtttgagtctgaggatgttgccaaaatagttgctgaaacaatgaacaactacctgtttggtgaaagactcttggagtgtcattttatgccacctgaaaaagtacataaagaactctttaaagactggaatattccatttaagcagccatcatatccatcagtgaaacggtataatcggaatcggacactaacacaaaagctacggatggaggagcgatttaaaaagaaagaaagattactcaggaagaaattagctaaaaaaggaattgactatgattttccttctttgattttacagaaaacggaaagtatttcaaaaactaatcgtcagacgtctacaaaaggccaggttttacgtaagaagaagaaaaaagtttcaggtactcttgacactcctgagaagactgtggatagccagggccccacaccagtttgtacaccaacatttttggagaggcgaaaatctcaagtggctgaactgaatgatgatgataaagatgatgaaatagttttcaaacagcccatatcctgtgtaaaagaagaaatacaagagactcaaacacctacacattcacggaaaaaaagacgaagaagcagcaatcagtgattttcaatgtattatatttcttttgaaaaatataatatttttatgagagtggactttgtatttcactaggtacaatggaatacaacctttgacaagattttcagaggaaaaatacactgtttggtcaagttaaggaaagcagtgtgtaattttggattgcctgcccttggctgaaatacaggggtgcataccatcttgcagtggcttggctgacattgcctctttgtcctggcctctagttttcttttgatatttcatagctctccttagtttactctgcctggatagaaagttgaccactaactgcaggtttaagtactaaactgcagccttttctgtcgccagcaattaaagaccaccaatcttgtttgtccatctacatggtttgtcggggacatttaactcatggaggtgctttagatttcaacatcagatggttgaagctggaagtttaattatatgtagagtgagaaggcagttccagttttagcacagatttgtttatgtgttcagattttaatagagattcaaaaatgactcatttttaccaataatgttaaattagttttggttgtgctagcatgaattaataaccaccattttataccagtatcatcagtgaagaattgtatttcaagattcaaacaataaccagcaattaaacttttttctacaatgtatttgtttgcgagtaggacttgggagtcattgggaaaaaaaaataataaattttccccttcattaacgaattcagactcattaaaaacattgccatcagatgtagtagctt

SEQ ID NO: 1532 - protein, 188 aa, Homosapiens
MNNYLFGERLLECHFMPPEKVHKELFKDWNIPFKQPSYPSVKRYNRNRTLTQKLRMEERFKKKERLLRKKLAKKGIDYDFPSLILQKTESISKTNRQTSTKGQVLRKKKKKVSGTLDTPEKTVDSQGPTPVCTPTFLERRKSQVAELNDDDKDDEIVFKQPISCVKEEIQETQTPTHSRKKRRRSSNQ

SEQ ID NO: 1533 - DNA, 1736 bp, Homosapiens
tcgggggagctgggagcccgacgtttccgggagcgccgcgtggttagcgtcggcggcttttggcatggcgactttttctggcccggctgggccaatcctgtcgcttaatccgcaggaagatgtcgagtttcaaaaggaggtggcgcaggttcgcaagcgcataacccagcgaaaaaaacaagaacaacttactcctggagtagtctatgtgcgccacctacctaacctacttgacgaaacccagatcttttcatatttctcccagtttggcactgtgacacggttcaggctgtccagaagtaaaaggactggaaatagcaaaggctatgcatttgtggagtttgagtctgaggatgttgccaaaatagttgctgaaacaatgaacaactacctgtttggtgaaagactcttggagtgtcattttatgccacctgaaaaagtacataaagaactctttaaagactggaatattccatttaagcagccatcatatccatcagtgaaacggtataatcggaatcggacactaacacaaaagctacggatggaggagcgatttaaaaagaaagaaagattactcaggaagaaattagctaaaaaaggaattgactatgattttccttctttgattttacagaaaacggaaagtatttcaaaaactaatcgtcagacgtctacaaaaggccaggttttacgtaagaagaagaaaaaagtttcaggtactcttgacactcctgagaagactgtggatagccagggccccacaccagtttgtacaccaacatttttggagaggcgaaaatctcaagtggctgaactgaatgatgatgataaagatgatgaaatagttttcaaacagcccatatcctgtgtaaaagaagaaatacaagagactcaaacacctacacattcacggaaaaaaagacgaagaagcagcaatcagtgattttcaatgtattatatttcttttgaaaaatataatatttttatgagagtggactttgtatttcactaggtacaatggaatacaacctttgacaagattttcagaggaaaaatacactgtttggtcaagttaaggaaagcagtgtgtaattttggattgcctgcccttggctgaaatacaggggtgcataccatcttgcagtggcttggctgacattgcctctttgtcctggcctctagttttcttttgatatttcatagctctccttagtttactctgcctggatagaaagttgaccactaactgcaggtttaagtactaaactgcagccttttctgtcgccagcaattaaagaccaccaatcttgtttgtccatctacatggtttgtcggggacatttaactcatggaggtgctttagatttcaacatcagatggttgaagctggaagtttaattatatgtagagtgagaaggcagttccagttttagcacagatttgtttatgtgttcagattttaatagagattcaaaaatgactcatttttaccaataatgttaaattagttttggttgtgctagcatgaattaataaccaccattttataccagtatcatcagtgaagaattgtatttcaagattcaaacaataaccagcaattaaacttttttctacaatgtatttgtttgcgagtaggacttgggagtcattgggaaaaaaaaataataaattttccccttcattaacgaattcagactcattaaaaacattgccatcagatgtagtagctt

SEQ ID NO: 1534 - protein, 293 aa, Homosapiens
MATFSGPAGPILSLNPQEDVEFQKEVAQVRKRITQRKKQEQLTPGVVYVRHLPNLLDETQIFSYFSQFGTVTRFRLSRSKRTGNSKGYAFVEFESEDVAKIVAETMNNYLFGERLLECHFMPPEKVHKELFKDWNIPFKQPSYPSVKRYNRNRTLTQKLRMEERFKKKERLLRKKLAKKGIDYDFPSLILQKTESISKTNRQTSTKGQVLRKKKKKVSGTLDTPEKTVDSQGPTPVCTPTFLERRKSQVAELNDDDKDDEIVFKQPISCVKEEIQETQTPTHSRKKRRRSSNQ

SEQ ID NO: 1535 - DNA, 1403 bp, Homosapiens
ctgcttttcctgtaccctgtttgtgacttaggagatgggggtggcctgcctttgcacattcttcctgcttccaccctcctgaattcaggattctgtgaatcagtgagctccaggttttggccttcccttcaacctctgcagctctgtcaattcctctactgggtttttcctagttttgccctttacttgagataattcactgtatttatgagttttgattttttaaaatgaaatgctcttgtcatttagggaggatttactgataatatatatgaggatctaatgctaagtttagaaagaaaagatatgagtgtcaatttctaacttctttattaaagattttacagaaaacggaaagtatttcaaaaactaatcgtcagacgtctacaaaaggccaggttttacgtaagaagaagaaaaaagtttcaggtactcttgacactcctgagaagactgtggatagccagggccccacaccagtttgtacaccaacatttttggagaggcgaaaatctcaagtggctgaactgaatgatgatgataaagatgatgaaatagttttcaaacagcccatatcctgtgtaaaagaagaaatacaagagactcaaacacctacacattcacggaaaaaaagacgaagaagcagcaatcagtgattttcaatgtattatatttcttttgaaaaatataatatttttatgagagtggactttgtatttcactaggtacaatggaatacaacctttgacaagattttcagaggaaaaatacactgtttggtcaagttaaggaaagcagtgtgtaattttggattgcctgcccttggctgaaatacaggggtgcataccatcttgcagtggcttggctgacattgcctctttgtcctggcctctagttttcttttgatatttcatagctctccttagtttactctgcctggatagaaagttgaccactaactgcaggtttaagtactaaactgcagccttttctgtcgccagcaattaaagaccaccaatcttgtttgtccatctacatggtttgtcggggacatttaactcatggaggtgctttagatttcaacatcagatggttgaagctggaagtttaattatatgtagagtgagaaggcagttccagttttagcacagatttgtttatgtgttcagattttaatagagattcaaaaatgactcatttttaccaataatgttaaattagttttggttgtgctagcatgaattaataaccaccattttataccagtatcatcagtgaagaattgtatttcaagattcaaacaataaccagcaattaaacttttttctacaatgtatttgtttgcgagtaggacttgggagtcattgggaaaaaaaaataataaattttccccttcattaacg

SEQ ID NO: 1536 - protein, 126 aa, Homosapiens
GSNAKFRKKRYECQFLTSLLKILQKTESISKTNRQTSTKGQVLRKKKKKVSGTLDTPEKTVDSQGPTPVCTPTFLERRKSQVAELNDDDKDDEIVFKQPISCVKEEIQETQTPTHSRKKRRRSSNQ

SEQ ID NO: 1537 - DNA, 1523 bp, Homosapiens
ctgcttttcctgtaccctgtttgtgacttaggagatgggggtggcctgcctttgcacattcttcctgcttccaccctcctgaattcaggattctgtgaatcagtgagctccaggttttggccttcccttcaacctctgcagctctgtcaattcctctactgggtttttcctagttttgccctttacttgagataattcactgtatttatgagttttgattttttaaaatgaaatgctcttgtcatttagggaggatttactgataatatatatgaggatctaatgctaagtttagaaagaaaagatatgagtgtcaatttctaacttctttattaaagattttacagaaaacggaaagtatttcaaaaactaatcgtcagacgtctacaaaaggccaggtaaaattttttttatcattttacatgcaagatattagagaaggataagtaggaaaacatattcaagactactgtagctgatcaatattcaaattgatgtgttttaaaatttattttaaggttttacgtaagaagaagaaaaaagtttcaggtactcttgacactcctgagaagactgtggatagccagggccccacaccagtttgtacaccaacatttttggagaggcgaaaatctcaagtggctgaactgaatgatgatgataaagatgatgaaatagttttcaaacagcccatatcctgtgtaaaagaagaaatacaagagactcaaacacctacacattcacggaaaaaaagacgaagaagcagcaatcagtgattttcaatgtattatatttcttttgaaaaatataatatttttatgagagtggactttgtatttcactaggtacaatggaatacaacctttgacaagattttcagaggaaaaatacactgtttggtcaagttaaggaaagcagtgtgtaattttggattgcctgcccttggctgaaatacaggggtgcataccatcttgcagtggcttggctgacattgcctctttgtcctggcctctagttttcttttgatatttcatagctctccttagtttactctgcctggatagaaagttgaccactaactgcaggtttaagtactaaactgcagccttttctgtcgccagcaattaaagaccaccaatcttgtttgtccatctacatggtttgtcggggacatttaactcatggaggtgctttagatttcaacatcagatggttgaagctggaagtttaattatatgtagagtgagaaggcagttccagttttagcacagatttgtttatgtgttcagattttaatagagattcaaaaatgactcatttttaccaataatgttaaattagttttggttgtgctagcatgaattaataaccaccattttataccagtatcatcagtgaagaattgtatttcaagattcaaacaataaccagcaattaaacttttttctacaatgtatttgtttgcgagtaggacttgggagtcattgggaaaaaaaaataataaattttccccttcattaacg

SEQ ID NO: 1538 - protein, 93 aa, Homosapiens; identical to SEQ ID NO: 1530

SEQ ID NO: 1539 - DNA, 1686 bp, Homosapiens
ccatggcctttgtggggagagaaacactaaacagccagttctttaattactactgtggtaagtggaaatgcagaataggttcttgggccgagggctaggggttttgttacaatgtgattttcttatttatatatttaatttacctggtctttacgtctttagcgaaaaaaacaagaacaacttactcctggagtagtctatgtgcgccacctacctaacctacttgacgaaacccagatcttttcatatttctcccagtttggcactgtgacacggttcaggctgtccagaagtaaaaggactggaaatagcaaaggctatgcatttgtggagtttgagtctgaggatgttgccaaaatagttgctgaaacaatgaacaactacctgtttggtgaaagactcttggagtgtcattttatgccacctgaaaaagtacataaagaactctttaaagactggaatattccatttaagcagccatcatatccatcagtgaaacggtataatcggaatcggacactaacacaaaagctacggatggaggagcgatttaaaaagaaagaaagattactcaggaagaaattagctaaaaaaggaattgactatgattttccttctttgattttacagaaaacggaaagtatttcaaaaactaatcgtcagacgtctacaaaaggccaggttttacgtaagaagaagaaaaaagtttcaggtactcttgacactcctgagaagactgtggatagccagggccccacaccagtttgtacaccaacatttttggagaggcgaaaatctcaagtggctgaactgaatgatgatgataaagatgatgaaatagttttcaaacagcccatatcctgtgtaaaagaagaaatacaagagactcaaacacctacacattcacggaaaaaaagacgaagaagcagcaatcagtgattttcaatgtattatatttcttttgaaaaatataatatttttatgagagtggactttgtatttcactaggtacaatggaatacaacctttgacaagattttcagaggaaaaatacactgtttggtcaagttaaggaaagcagtgtgtaattttggattgcctgcccttggctgaaatacaggggtgcataccatcttgcagtggcttggctgacattgcctctttgtcctggcctctagttttcttttgatatttcatagctctccttagtttactctgcctggatagaaagttgaccactaactgcaggtttaagtactaaactgcagccttttctgtcgccagcaattaaagaccaccaatcttgtttgtccatctacatggtttgtcggggacatttaactcatggaggtgctttagatttcaacatcagatggttgaagctggaagtttaattatatgtagagtgagaaggcagttccagttttagcacagatttgtttatgtgttcagattttaatagagattcaaaaatgactcatttttaccaataatgttaaattagttttggttgtgctagcatgaattaataaccaccattttataccagtatcatcagtgaagaattgtatttcaagattcaaacaataaccagcaattaaacttttttctacaatgtatttgtttgcgagtaggacttgggagtcattgggaaaaaaaaataataaattttccccttcattaacg

SEQ ID NO: 1540 - protein, 188 aa, Homosapiens; identical to SEQ ID NO: 1532

SEQ ID NO: 1541 - DNA, 1693 bp, Homosapiens
tcgggggagctgggagcccgacgtttccgggagcgccgcgtggttagcgtcggcggcttttggcatggcgactttttctggcccggctgggccaatcctgtcgcttaatccgcaggaagatgtcgagtttcaaaaggaggtggcgcaggttcgcaagcgcataacccagcgaaaaaaacaagaacaacttactcctggagtagtctatgtgcgccacctacctaacctacttgacgaaacccagatcttttcatatttctcccagtttggcactgtgacacggttcaggctgtccagaagtaaaaggactggaaatagcaaaggctatgcatttgtggagtttgagtctgaggatgttgccaaaatagttgctgaaacaatgaacaactacctgtttggtgaaagactcttggagtgtcattttatgccacctgaaaaagtacataaagaactctttaaagactggaatattccatttaagcagccatcatatccatcagtgaaacggtataatcggaatcggacactaacacaaaagctacggatggaggagcgatttaaaaagaaagaaagattactcaggaagaaattagctaaaaaaggaattgactatgattttccttctttgattttacagaaaacggaaagtatttcaaaaactaatcgtcagacgtctacaaaaggccaggttttacgtaagaagaagaaaaaagtttcaggtactcttgacactcctgagaagactgtggatagccagggccccacaccagtttgtacaccaacatttttggagaggcgaaaatctcaagtggctgaactgaatgatgatgataaagatgatgaaatagttttcaaacagcccatatcctgtgtaaaagaagaaatacaagagactcaaacacctacacattcacggaaaaaaagacgaagaagcagcaatcagtgattttcaatgtattatatttcttttgaaaaatataatatttttatgagagtggactttgtatttcactaggtacaatggaatacaacctttgacaagattttcagaggaaaaatacactgtttggtcaagttaaggaaagcagtgtgtaattttggattgcctgcccttggctgaaatacaggggtgcataccatcttgcagtggcttggctgacattgcctctttgtcctggcctctagttttcttttgatatttcatagctctccttagtttactctgcctggatagaaagttgaccactaactgcaggtttaagtactaaactgcagccttttctgtcgccagcaattaaagaccaccaatcttgtttgtccatctacatggtttgtcggggacatttaactcatggaggtgctttagatttcaacatcagatggttgaagctggaagtttaattatatgtagagtgagaaggcagttccagttttagcacagatttgtttatgtgttcagattttaatagagattcaaaaatgactcatttttaccaataatgttaaattagttttggttgtgctagcatgaattaataaccaccattttataccagtatcatcagtgaagaattgtatttcaagattcaaacaataaccagcaattaaacttttttctacaatgtatttgtttgcgagtaggacttgggagtcattgggaaaaaaaaataataaattttccccttcattaacg

SEQ ID NO: 1542 - protein, 293 aa, Homosapiens; identical to SEQ ID NO: 1534

SEQ ID NO: 1543 - DNA, 1455 bp, Homosapiens
ctgcttttcctgtaccctgtttgtgacttaggagatgggggtggcctgcctttgcacattcttcctgcttccaccctcctgaattcaggattctgtgaatcagtgagctccaggttttggccttcccttcaacctctgcagctctgtcaattcctctactgggtttttcctagttttgccctttacttgagataattcactgtatttatgagttttgattttttaaaatgaaatgctcttgtcatttagggaggatttactgataatatatatgaggatctaatgctaagtttagaaagaaaagatatgagtgtcaatttctaacttctttattaaagattttacagaaaacggaaagtatttcaaaaactaatcgtcagacgtctacaaaaggccaggtaaaattttttttatcattttacatgcaagatattagagaaggataagtaggaaaacatattcaagactactgtagctgatcaatattcaaattgatgtgttttaaaatttattttaaggttttacgtaagaagaagaaaaaagtttcaggtactcttgacactcctgagaagactgtggatagccagggccccacaccagtttgtacaccaacatttttggagaggcgaaaatctcaagtggctgaactgaatgatgatgataaagatgatgaaatagttttcaaacagcccatatcctgtgtaaaagaagaaatacaagagactcaaacacctacacattcacggaaaaaaagacgaagaagcagcaatcagtgattttcaatgtattatatttcttttgaaaaatataatatttttatgagagtggactttgtatttcactaggtacaatggaatacaacctttgacaagattttcagaggaaaaatacactgtttggtcaagttaaggaaagcagtgtgtaattttggattgcctgcccttggctgaaatacaggggtgcataccatcttgcagtggcttggctgacattgcctctttgtcctggcctctagttttcttttgatatttcatagctctccttagtttactctgcctggatagaaagttgaccactaactgcaggtttaagtactaaactgcagccttttctgtcgccagcaattaaagaccaccaatcttgtttgtccatctacatggtttgtcggggacatttaactcatggaggtgctttagatttcaacatcagatggttgaagctggaagtttaattatatgtagagtgagaaggcagttccagttttagcacagatttgtttatgtgttcagattttaatagagattcaaaaatgactcatttttaccaataatgttaaattagttttggttgtgctagcatgaattaataaccaccattttataccagtatcatcagtgaagaattgtatttcaagattcaaacaataaccagcaattaaacttttttctacaatgt

SEQ ID NO: 1544 - protein, 93 aa, Homosapiens; identical to SEQ ID NO: 1530

SEQ ID NO: 1545 - DNA, 1335 bp, Homosapiens
ctgcttttcctgtaccctgtttgtgacttaggagatgggggtggcctgcctttgcacattcttcctgcttccaccctcctgaattcaggattctgtgaatcagtgagctccaggttttggccttcccttcaacctctgcagctctgtcaattcctctactgggtttttcctagttttgccctttacttgagataattcactgtatttatgagttttgattttttaaaatgaaatgctcttgtcatttagggaggatttactgataatatatatgaggatctaatgctaagtttagaaagaaaagatatgagtgtcaatttctaacttctttattaaagattttacagaaaacggaaagtatttcaaaaactaatcgtcagacgtctacaaaaggccaggttttacgtaagaagaagaaaaaagtttcaggtactcttgacactcctgagaagactgtggatagccagggccccacaccagtttgtacaccaacatttttggagaggcgaaaatctcaagtggctgaactgaatgatgatgataaagatgatgaaatagttttcaaacagcccatatcctgtgtaaaagaagaaatacaagagactcaaacacctacacattcacggaaaaaaagacgaagaagcagcaatcagtgattttcaatgtattatatttcttttgaaaaatataatatttttatgagagtggactttgtatttcactaggtacaatggaatacaacctttgacaagattttcagaggaaaaatacactgtttggtcaagttaaggaaagcagtgtgtaattttggattgcctgcccttggctgaaatacaggggtgcataccatcttgcagtggcttggctgacattgcctctttgtcctggcctctagttttcttttgatatttcatagctctccttagtttactctgcctggatagaaagttgaccactaactgcaggtttaagtactaaactgcagccttttctgtcgccagcaattaaagaccaccaatcttgtttgtccatctacatggtttgtcggggacatttaactcatggaggtgctttagatttcaacatcagatggttgaagctggaagtttaattatatgtagagtgagaaggcagttccagttttagcacagatttgtttatgtgttcagattttaatagagattcaaaaatgactcatttttaccaataatgttaaattagttttggttgtgctagcatgaattaataaccaccattttataccagtatcatcagtgaagaattgtatttcaagattcaaacaataaccagcaattaaacttttttctacaatgt

SEQ ID NO: 1546 - protein, 126 aa, Homosapiens; identical to SEQ ID NO: 1536

SEQ ID NO: 1547 - DNA, 1618 bp, Homosapiens
ccatggcctttgtggggagagaaacactaaacagccagttctttaattactactgtggtaagtggaaatgcagaataggttcttgggccgagggctaggggttttgttacaatgtgattttcttatttatatatttaatttacctggtctttacgtctttagcgaaaaaaacaagaacaacttactcctggagtagtctatgtgcgccacctacctaacctacttgacgaaacccagatcttttcatatttctcccagtttggcactgtgacacggttcaggctgtccagaagtaaaaggactggaaatagcaaaggctatgcatttgtggagtttgagtctgaggatgttgccaaaatagttgctgaaacaatgaacaactacctgtttggtgaaagactcttggagtgtcattttatgccacctgaaaaagtacataaagaactctttaaagactggaatattccatttaagcagccatcatatccatcagtgaaacggtataatcggaatcggacactaacacaaaagctacggatggaggagcgatttaaaaagaaagaaagattactcaggaagaaattagctaaaaaaggaattgactatgattttccttctttgattttacagaaaacggaaagtatttcaaaaactaatcgtcagacgtctacaaaaggccaggttttacgtaagaagaagaaaaaagtttcaggtactcttgacactcctgagaagactgtggatagccagggccccacaccagtttgtacaccaacatttttggagaggcgaaaatctcaagtggctgaactgaatgatgatgataaagatgatgaaatagttttcaaacagcccatatcctgtgtaaaagaagaaatacaagagactcaaacacctacacattcacggaaaaaaagacgaagaagcagcaatcagtgattttcaatgtattatatttcttttgaaaaatataatatttttatgagagtggactttgtatttcactaggtacaatggaatacaacctttgacaagattttcagaggaaaaatacactgtttggtcaagttaaggaaagcagtgtgtaattttggattgcctgcccttggctgaaatacaggggtgcataccatcttgcagtggcttggctgacattgcctctttgtcctggcctctagttttcttttgatatttcatagctctccttagtttactctgcctggatagaaagttgaccactaactgcaggtttaagtactaaactgcagccttttctgtcgccagcaattaaagaccaccaatcttgtttgtccatctacatggtttgtcggggacatttaactcatggaggtgctttagatttcaacatcagatggttgaagctggaagtttaattatatgtagagtgagaaggcagttccagttttagcacagatttgtttatgtgttcagattttaatagagattcaaaaatgactcatttttaccaataatgttaaattagttttggttgtgctagcatgaattaataaccaccattttataccagtatcatcagtgaagaattgtatttcaagattcaaacaataaccagcaattaaacttttttctacaatgt

SEQ ID NO: 1548 - protein, 188 aa, Homosapiens; identical to SEQ ID NO: 1532

SEQ ID NO: 1549 - DNA, 1625 bp, Homosapiens
tcgggggagctgggagcccgacgtttccgggagcgccgcgtggttagcgtcggcggcttttggcatggcgactttttctggcccggctgggccaatcctgtcgcttaatccgcaggaagatgtcgagtttcaaaaggaggtggcgcaggttcgcaagcgcataacccagcgaaaaaaacaagaacaacttactcctggagtagtctatgtgcgccacctacctaacctacttgacgaaacccagatcttttcatatttctcccagtttggcactgtgacacggttcaggctgtccagaagtaaaaggactggaaatagcaaaggctatgcatttgtggagtttgagtctgaggatgttgccaaaatagttgctgaaacaatgaacaactacctgtttggtgaaagactcttggagtgtcattttatgccacctgaaaaagtacataaagaactctttaaagactggaatattccatttaagcagccatcatatccatcagtgaaacggtataatcggaatcggacactaacacaaaagctacggatggaggagcgatttaaaaagaaagaaagattactcaggaagaaattagctaaaaaaggaattgactatgattttccttctttgattttacagaaaacggaaagtatttcaaaaactaatcgtcagacgtctacaaaaggccaggttttacgtaagaagaagaaaaaagtttcaggtactcttgacactcctgagaagactgtggatagccagggccccacaccagtttgtacaccaacatttttggagaggcgaaaatctcaagtggctgaactgaatgatgatgataaagatgatgaaatagttttcaaacagcccatatcctgtgtaaaagaagaaatacaagagactcaaacacctacacattcacggaaaaaaagacgaagaagcagcaatcagtgattttcaatgtattatatttcttttgaaaaatataatatttttatgagagtggactttgtatttcactaggtacaatggaatacaacctttgacaagattttcagaggaaaaatacactgtttggtcaagttaaggaaagcagtgtgtaattttggattgcctgcccttggctgaaatacaggggtgcataccatcttgcagtggcttggctgacattgcctctttgtcctggcctctagttttcttttgatatttcatagctctccttagtttactctgcctggatagaaagttgaccactaactgcaggtttaagtactaaactgcagccttttctgtcgccagcaattaaagaccaccaatcttgtttgtccatctacatggtttgtcggggacatttaactcatggaggtgctttagatttcaacatcagatggttgaagctggaagtttaattatatgtagagtgagaaggcagttccagttttagcacagatttgtttatgtgttcagattttaatagagattcaaaaatgactcatttttaccaataatgttaaattagttttggttgtgctagcatgaattaataaccaccattttataccagtatcatcagtgaagaattgtatttcaagattcaaacaataaccagcaattaaacttttttctacaatgt

SEQ ID NO: 1550 - protein, 293 aa, Homosapiens; identical to SEQ ID NO: 1534

SEQ ID NO: 1551 - DNA, 708 bp, Homosapiens
ctgcttttcctgtaccctgtttgtgacttaggagatgggggtggcctgcctttgcacattcttcctgcttccaccctcctgaattcaggattctgtgaatcagtgagctccaggttttggccttcccttcaacctctgcagctctgtcaattcctctactgggtttttcctagttttgccctttacttgagataattcactgtatttatgagttttgattttttaaaatgaaatgctcttgtcatttagggaggatttactgataatatatatgaggatctaatgctaagtttagaaagaaaagatatgagtgtcaatttctaacttctttattaaagattttacagaaaacggaaagtatttcaaaaactaatcgtcagacgtctacaaaaggccaggttttacgtaagaagaagaaaaaagtttcaggtactcttgacactcctgagaagactgtggatagccagggccccacaccagtttgtacaccaacatttttggagaggcgaaaatctcaagtggctgaactgaatgatgatgataaagatgatgaaatagttttcaaacagcccatatcctgtgtaaaagaagaaatacaagagactcaaacacctacacattcacggaaaaaaagacgaagaagcagcaatcagtgattttcaatgtattatatttcttttgaaaaatataatatttttatgagagtgg

SEQ ID NO: 1552 - protein, 126 aa, Homosapiens; identical to SEQ ID NO: 1536

SEQ ID NO: 1553 - DNA, 828 bp, Homosapiens
ctgcttttcctgtaccctgtttgtgacttaggagatgggggtggcctgcctttgcacattcttcctgcttccaccctcctgaattcaggattctgtgaatcagtgagctccaggttttggccttcccttcaacctctgcagctctgtcaattcctctactgggtttttcctagttttgccctttacttgagataattcactgtatttatgagttttgattttttaaaatgaaatgctcttgtcatttagggaggatttactgataatatatatgaggatctaatgctaagtttagaaagaaaagatatgagtgtcaatttctaacttctttattaaagattttacagaaaacggaaagtatttcaaaaactaatcgtcagacgtctacaaaaggccaggtaaaattttttttatcattttacatgcaagatattagagaaggataagtaggaaaacatattcaagactactgtagctgatcaatattcaaattgatgtgttttaaaatttattttaaggttttacgtaagaagaagaaaaaagtttcaggtactcttgacactcctgagaagactgtggatagccagggccccacaccagtttgtacaccaacatttttggagaggcgaaaatctcaagtggctgaactgaatgatgatgataaagatgatgaaatagttttcaaacagcccatatcctgtgtaaaagaagaaatacaagagactcaaacacctacacattcacggaaaaaaagacgaagaagcagcaatcagtgattttcaatgtattatatttcttttgaaaaatataatatttttatgagagtgg

SEQ ID NO: 1554 - protein, 93 aa, Homosapiens; identical to SEQ ID NO: 1530

SEQ ID NO: 1555 - DNA, 667 bp, Homosapiens
tcattttgttgtgtgaggaatggcactgcggagattctaaagttaacattaaaatacctttatgtttttttctttttgaaaataggtcattttatgccacctgaaaaagtacataaagaactctttaaagactggaatattccatttaagcagccatcatatccatcagtgaaacggtataatcggaatcggacactaacacaaaagctacggatggaggagcgatttaaaaagaaagaaagattactcaggaagaaattagctaaaaaaggaattgactatgattttccttctttgattttacagaaaacggaaagtatttcaaaaactaatcgtcagacgtctacaaaaggccaggttttacgtaagaagaagaaaaaagtttcaggtactcttgacactcctgagaagactgtggatagccagggccccacaccagtttgtacaccaacatttttggagaggcgaaaatctcaagtggctgaactgaatgatgatgataaagatgatgaaatagttttcaaacagcccatatcctgtgtaaaagaagaaatacaagagactcaaacacctacacattcacggaaaaaaagacgaagaagcagcaatcagtgattttcaatgtattatatttcttttgaaaaatataatatttttatgagagtgg

SEQ ID NO: 1556 - protein, 173 aa, Homosapiens
MPPEKVHKELFKDWNIPFKQPSYPSVKRYNRNRTLTQKLRMEERFKKKERLLRKKLAKKGIDYDFPSLILQKTESISKTNRQTSTKGQVLRKKKKKVSGTLDTPEKTVDSQGPTPVCTPTFLERRKSQVAELNDDDKDDEIVFKQPISCVKEEIQETQTPTHSRKKRRRSSNQ

SEQ ID NO: 1557 - DNA, 991 bp, Homosapiens
ccatggcctttgtggggagagaaacactaaacagccagttctttaattactactgtggtaagtggaaatgcagaataggttcttgggccgagggctaggggttttgttacaatgtgattttcttatttatatatttaatttacctggtctttacgtctttagcgaaaaaaacaagaacaacttactcctggagtagtctatgtgcgccacctacctaacctacttgacgaaacccagatcttttcatatttctcccagtttggcactgtgacacggttcaggctgtccagaagtaaaaggactggaaatagcaaaggctatgcatttgtggagtttgagtctgaggatgttgccaaaatagttgctgaaacaatgaacaactacctgtttggtgaaagactcttggagtgtcattttatgccacctgaaaaagtacataaagaactctttaaagactggaatattccatttaagcagccatcatatccatcagtgaaacggtataatcggaatcggacactaacacaaaagctacggatggaggagcgatttaaaaagaaagaaagattactcaggaagaaattagctaaaaaaggaattgactatgattttccttctttgattttacagaaaacggaaagtatttcaaaaactaatcgtcagacgtctacaaaaggccaggttttacgtaagaagaagaaaaaagtttcaggtactcttgacactcctgagaagactgtggatagccagggccccacaccagtttgtacaccaacatttttggagaggcgaaaatctcaagtggctgaactgaatgatgatgataaagatgatgaaatagttttcaaacagcccatatcctgtgtaaaagaagaaatacaagagactcaaacacctacacattcacggaaaaaaagacgaagaagcagcaatcagtgattttcaatgtattatatttcttttgaaaaatataatatttttatgagagtgg

SEQ ID NO: 1558 - protein, 188 aa, Homosapiens; identical to SEQ ID NO: 1532

SEQ ID NO: 1559 - DNA, 998 bp, Homosapiens
tcgggggagctgggagcccgacgtttccgggagcgccgcgtggttagcgtcggcggcttttggcatggcgactttttctggcccggctgggccaatcctgtcgcttaatccgcaggaagatgtcgagtttcaaaaggaggtggcgcaggttcgcaagcgcataacccagcgaaaaaaacaagaacaacttactcctggagtagtctatgtgcgccacctacctaacctacttgacgaaacccagatcttttcatatttctcccagtttggcactgtgacacggttcaggctgtccagaagtaaaaggactggaaatagcaaaggctatgcatttgtggagtttgagtctgaggatgttgccaaaatagttgctgaaacaatgaacaactacctgtttggtgaaagactcttggagtgtcattttatgccacctgaaaaagtacataaagaactctttaaagactggaatattccatttaagcagccatcatatccatcagtgaaacggtataatcggaatcggacactaacacaaaagctacggatggaggagcgatttaaaaagaaagaaagattactcaggaagaaattagctaaaaaaggaattgactatgattttccttctttgattttacagaaaacggaaagtatttcaaaaactaatcgtcagacgtctacaaaaggccaggttttacgtaagaagaagaaaaaagtttcaggtactcttgacactcctgagaagactgtggatagccagggccccacaccagtttgtacaccaacatttttggagaggcgaaaatctcaagtggctgaactgaatgatgatgataaagatgatgaaatagttttcaaacagcccatatcctgtgtaaaagaagaaatacaagagactcaaacacctacacattcacggaaaaaaagacgaagaagcagcaatcagtgattttcaatgtattatatttcttttgaaaaatataatatttttatgagagtgg

SEQ ID NO: 1560 - protein, 293 aa, Homosapiens; identical to SEQ ID NO: 1534

SEQ ID NO: 1561 - DNA, 1233 bp, Homosapiens
cctctcctctgccctttggacgcgcgcctcggttccgaacgcagcggacggcgcctcaggcagcgcggcggacagcccgtcctccggcgcgccgcgagcctcggaggaccctagcgacggtcgtggcgtaagaccggggggacgcggcggtagcggcggccgttgcgattgattgcgctggttgcctgcggcgtccacttccttggccgcccttgctacactggctgattgttgtgcagccggcgccatgtctgtgagcgagatcttcgtggagctgcagggctttttggctgccgagcaggacatccgagaggaaatcagaaaagttgtacagagtttagaacaaacagctcgagagattttaactctactgcaaggggtccatcagggtgctgggtttcaggacattccaaagaggtgtttgaaagctcgagaacattttggtacagtaaaaacacatctaacatctttgaagaccaaatttcctgctgaacagtattacagatttcatgagcactggaggtttgtgttgcagcgcttggtcttcttggcagcatttgttgtgtatttggaaacagaaacactagtgactcgagaagcagttacagaaattcttggcattgagccagatcgggagaaaggatttcatctggatgtagaagattatctctcaggagttctaattcttgccagtgaactgtcgaggctgtctgtcaacagcgtgactgctggagactactcccgacccctccacatctccaccttcatcaatgagctggattccggttttcgccttctcaacctgaaaaatgactccctgaggaagcgctacgacggattgaaatatgacgtgaagaaagtagaggaagtggtctatgatctctccatccggggctttaataaggagacggcagcagcttgtgttgaaaaataggaggctctccttgctcctggccttgctgacctcagcggttgccaggaaggggtgagcacagagtgcctcttacggtagttaggatgctcagttgctaaacactgcgctttattttcttaaccagttgtggtgtgagtatcagaattgaaacacttttttgggggtaaaaaatatagcctttacatggacagaattttttttgttgtttcagtgaatatgcctgtaattcagtgtatttcagttccgtcagaaagtgtaaatgttagtttcttggtaaagtccttttcttgcttaccttg

SEQ ID NO: 1562 - protein, 228 aa, Homosapiens; identical to SEQ ID NO: 111

SEQ ID NO: 1563 - DNA, 1390 bp, Homosapiens
cctctcctctgccctttggacgcgcgcctcggttccgaacgcagcggacggcgcctcaggcagcgcggcggacagcccgtcctccggcgcgccgcgagcctcggaggaccctagcgacggtcgtggcgtaagaccggggggacgcggcggtagcggcggccgttgcgattgattgcgctggttgcctgcggcgtccacttccttggccgcccttgctacactggctgattgttgtgcagccggcgccatgtctgtgagcgagatcttcgtggagctgcagggctttttggctgccgagcaggacatccgagaggaaatcagaaaagttgtacagagtttagaacaaacagctcgagagattttaactctactgcaaggggtccatcagggtgctgggtttcaggacattccaaagaggtgtttgaaagctcgagaacattttggtacagtaaaaacacatctaacatctttgaagaccaaatttcctgctgaacagtattacagatttcatgagcactggaggtttgtgttgcagcgcttggtcttcttggcagcatttgttgtgtatttggaaacagaaacactagtgactcgagaagcagttacagaaattcttggcattgagccagatcgggagaaaggatttcatctggatgtagaagattatctctcaggagttctaattcttgccagtgaactgtcgaggctgtctgtcaacagcgtgactgctggagactactcccgacccctccacatctccaccttcatcaatgagctggattccggttttcgccttctcaacctgaaaaatgactccctgaggaagcgctacgacggattgaaatatgacgtgaagaaagtagaggaagtggtctatgatctctccatccggggctttaataaggagacggcagcagcttgtgttgaaaaataggaggctctccttgctcctggccttgctgacctcagcggttgccaggaaggggtgagcacagagtgcctcttacggtagttaggatgctcagttgctaaacactgcgctttattttcttaaccagttgtggtgtgagtatcagaattgaaacacttttttgggggtaaaaaatatagcctttacatggacagaattttttttgttgtttcagtgaatatgcctgtaattcagtgtatttcagttccgtcagaaagtgtaaatgttagtttcttggtaaagtccttttcttgcttaccttgactgttgatgtactgattgagaagttcattgtctcgtttgtgattcttccagatgtgatgcttgatattttctatatgcgagttagccatccacacccaggcatagcctggatacagtataaaaatagataattaaaaagatggttgccaagcaagg

SEQ ID NO: 1564 - protein, 228 aa, Homosapiens; identical to SEQ ID NO: 111

SEQ ID NO: 1565 - DNA, 2858 bp, Homosapiens
cctctcctctgccctttggacgcgcgcctcggttccgaacgcagcggacggcgcctcaggcagcgcggcggacagcccgtcctccggcgcgccgcgagcctcggaggaccctagcgacggtcgtggcgtaagaccggggggacgcggcggtagcggcggccgttgcgattgattgcgctggttgcctgcggcgtccacttccttggccgcccttgctacactggctgattgttgtgcagccggcgccatgtctgtgagcgagatcttcgtggagctgcagggctttttggctgccgagcaggacatccgagaggaaatcagaaaagttgtacagagtttagaacaaacagctcgagagattttaactctactgcaaggggtccatcagggtgctgggtttcaggacattccaaagaggtgtttgaaagctcgagaacattttggtacagtaaaaacacatctaacatctttgaagaccaaatttcctgctgaacagtattacagatttcatgagcactggaggtttgtgttgcagcgcttggtcttcttggcagcatttgttgtgtatttggaaacagaaacactagtgactcgagaagcagttacagaaattcttggcattgagccagatcgggagaaaggatttcatctggatgtagaagattatctctcaggagttctaattcttgccagtgaactgtcgaggctgtctgtcaacagcgtgactgctggagactactcccgacccctccacatctccaccttcatcaatgagctggattccggttttcgccttctcaacctgaaaaatgactccctgaggaagcgctacgacggattgaaatatgacgtgaagaaagtagaggaagtggtctatgatctctccatccggggctttaataaggagacggcagcagcttgtgttgaaaaataggaggctctccttgctcctggccttgctgacctcagcggttgccaggaaggggtgagcacagagtgcctcttacggtagttaggatgctcagttgctaaacactgcgctttattttcttaaccagttgtggtgtgagtatcagaattgaaacacttttttgggggtaaaaaatatagcctttacatggacagaattttttttgttgtttcagtgaatatgcctgtaattcagtgtatttcagttccgtcagaaagtgtaaatgttagtttcttggtaaagtccttttcttgcttaccttgactgttgatgtactgattgagaagttcattgtctcgtttgtgattcttccagatgtgatgcttgatattttctatatgcgagttagccatccacacccaggcatagcctggatacagtataaaaatagataattaaaaagatggttgccaagcaaggaaaacttattttatattttcccttccttattttaagcattgtgagtaaatcagatgttgaattcttttgccaagggaattatagctgcaggttctctctcactgccatcaaactgtaaaagattaaactgcgaagtcaagctcaacagattattttggaaagtttttgtattaagggatttagtaacatcattttgttttccaccaggcagggagtagggcttagtgttttaaaacacctctgctttctgatgttgccttaatattctgctattgcagcaattaaaaattgtcttcatgtacatttggaactaacacgtgatgtgatatattcctaaactatgaaacctttttcctagtagtcagctagatcatttgttctgggagtataaagccacccacgtaagttaataagcaaaatcctgactattatgttgttagagaaaaatgctttgctttgtctggaagaaagataaaatagtgaattataaataagtcaggccgggcgtggtggctcacacctgtaatcccagcacactgggaggccgaggcagggggactgcttgagctcaggagttcgagaccagcctgggcaacaaagtgagactccatctctatataaaaacaaaaaccacgaaagcacacacaaaataaatcagtgggatttggtaatgtgttttagagtaagaaatttcaggttgttggtgactatcccaacagtcatgttttaaatgtacagtttggggcaagtcatgtaaatactgttggtggtcttccccacacgccccaattttcaggtagtactaagagtatgtgccaggaaactcttgctattgaattgagatgattaaaatggtgacttaatccgtagttattttgcacccactgaaaggaaagtgctttccagaataatatgaagtatctaaaagtgtcaccttttcttgcctgatcaacaatttgggcttcctgtttgtacaaggggccatttggcatacctttcacagcttttatcaggccaagttaaaggctgactacattttttcatcatgaggaaagcagttgaaatgaggcatgagttactgtgcattgggattttagaacaattttcttgtgacagctctttttgtgaagttaggttcttaaaagtgcccatgatggtcacttaaaatgtgcagtaatagcactgccaggatcaagcatgaaaggcttttaaattagatcatcccacagacaatacgtttgataatagttttttcttttaacctctttaagtattgattctgcttgagaatattgaagtacttgccagaagttgtggatttcagttttaacaaatgctattaaagtggagaagcacactctggtcttggaattccatttgaggatttagaagtgtcatgtttataactattcagttgtgtttgttgctggcttgttgtaaagcaataaaatttttttggtctttttgt

SEQ ID NO: 1566 - protein, 228 aa, Homosapiens; identical to SEQ ID NO: 111

SEQ ID NO: 1567 - DNA, 3420 bp, Homosapiens
cctctcctctgccctttggacgcgcgcctcggttccgaacgcagcggacggcgcctcaggcagcgcggcggacagcccgtcctccggcgcgccgcgagcctcggaggaccctagcgacggtcgtggcgtaagaccggggggacgcggcggtagcggcggccgttgcgattgattgcgctggttgcctgcggcgtccacttccttggccgcccttgctacactggctgattgttgtgcagccggcgccatgtctgtgagcgagatcttcgtggagctgcagggctttttggctgccgagcaggacatccgagaggaaatcagaaaagttgtacagagtttagaacaaacagctcgagagattttaactctactgcaaggggtccatcagggtgctgggtttcaggacattccaaagaggtgtttgaaagctcgagaacattttggtacagtaaaaacacatctaacatctttgaagaccaaatttcctgctgaacagtattacagatttcatgagcactggaggtttgtgttgcagcgcttggtcttcttggcagcatttgttgtgtatttggaaacagaaacactagtgactcgagaagcagttacagaaattcttggcattgagccagatcgggagaaaggatttcatctggatgtagaagattatctctcaggagttctaattcttgccagtgaactgtcgaggctgtctgtcaacagcgtgactgctggagactactcccgacccctccacatctccaccttcatcaatgagctggattccggttttcgccttctcaacctgaaaaatgactccctgaggaagcgctacgacggattgaaatatgacgtgaagaaagtagaggaagtggtctatgatctctccatccggggctttaataaggagacggcagcagcttgtgttgaaaaataggaggctctccttgctcctggccttgctgacctcagcggttgccaggaaggggtgagcacagagtgcctcttacggtagttaggatgctcagttgctaaacactgcgctttattttcttaaccagttgtggtgtgagtatcagaattgaaacacttttttgggggtaaaaaatatagcctttacatggacagaattttttttgttgtttcagtgaatatgcctgtaattcagtgtatttcagttccgtcagaaagtgtaaatgttagtttcttggtaaagtccttttcttgcttaccttgactgttgatgtactgattgagaagttcattgtctcgtttgtgattcttccagatgtgatgcttgatattttctatatgcgagttagccatccacacccaggcatagcctggatacagtataaaaatagataattaaaaagatggttgccaagcaaggaaaacttattttatattttcccttccttattttaagcattgtgagtaaatcagatgttgaattcttttgccaagggaattatagctgcaggttctctctcactgccatcaaactgtaaaagattaaactgcgaagtcaagctcaacagattattttggaaagtttttgtattaagggatttagtaacatcattttgttttccaccaggcagggagtagggcttagtgttttaaaacacctctgctttctgatgttgccttaatattctgctattgcagcaattaaaaattgtcttcatgtacatttggaactaacacgtgatgtgatatattcctaaactatgaaacctttttcctagtagtcagctagatcatttgttctgggagtataaagccacccacgtaagttaataagcaaaatcctgactattatgttgttagagaaaaatgctttgctttgtctggaagaaagataaaatagtgaattataaataagtcaggccgggcgtggtggctcacacctgtaatcccagcacactgggaggccgaggcagggggactgcttgagctcaggagttcgagaccagcctgggcaacaaagtgagactccatctctatataaaaacaaaaaccacgaaagcacacacaaaataaatcagtgggatttggtaatgtgttttagagtaagaaatttcaggttgttggtgactatcccaacagtcatgttttaaatgtacagtttggggcaagtcatgtaaatactgttggtggtcttccccacacgccccaattttcaggtagtactaagagtatgtgccaggaaactcttgctattgaattgagatgattaaaatggtgacttaatccgtagttattttgcacccactgaaaggaaagtgctttccagaataatatgaagtatctaaaagtgtcaccttttcttgcctgatcaacaatttgggcttcctgtttgtacaaggggccatttggcatacctttcacagcttttatcaggccaagttaaaggctgactacattttttcatcatgaggaaagcagttgaaatgaggcatgagttactgtgcattgggattttagaacaattttcttgtgacagctctttttgtgaagttaggttcttaaaagtgcccatgatggtcacttaaaatgtgcagtaatagcactgccaggatcaagcatgaaaggcttttaaattagatcatcccacagacaatacgtttgataatagttttttcttttaacctctttaagtattgattctgcttgagaatattgaagtacttgccagaagttgtggatttcagttttaacaaatgctattaaagtggagaagcacactctggtcttggaattccatttgaggatttagaagtgtcatgtttataactattcagttgtgtttgttgctggcttgttgtaaagcaataaaatttttttggtctttttgtaagtgagtgtgctgctgtaagaaatctcccatgtgcataacaaattctgaatattttttgaggctaaagaagaccggggtgacaagcagatactgctgtgtaatggttacactaaccaaaagacaccagccactcagagttctatactgtaaagcgcagataacatttgtgtgttataccttgattggggaattaaaagtcatttaactgaagatgttgagaaacctgggctctggttttagtataccggaattacttttttccaattttagaaaatcaagcaggttagagaaaatagagatgaattaggggacactgtcttatggattcatttataagaagagaaccagccatatacacttggggagatttgccacatcttaaacttgaataatagtatgagtaatgcttaagggagtttaatagagaaggaaagctttggcagtgttttgagaacttaagtggctaaagagatgagacaaacatgcaggtcgctactggcatagtttcataattgtgtactcggaaattaaagtttgcttgtttcttggtctggattaaa

SEQ ID NO: 1568 - protein, 228 aa, Homosapiens; identical to SEQ ID NO: 111

SEQ ID NO: 1569 - DNA, 1141 bp, Homosapiens
cctttggacgcgcgcctcggttccgaacgcagcggacggcgcctcaggcagcgcggcggacagcccgtcctccggcgcgccgcgagcctcggaggaccctagcgacggtcgtggcgtaagaccggggggacgcggcggtagcggcggccgttgcgattgattgcgctggttgcctgcggcgtccacttccttggccgcccttgctacactggctgattgttgtgcagccggcgccatgtctgtgagcgagatcttcgtggagctgcagggctttttggctgccgagcaggacatccgagaggaaatcagaaaagttgtacagagtttagaacaaacagctcgagagattttaactctactgcaaggggtccatcagggtgctgggtttcaggacattccaaagaggtgtttgaaagctcgagaacattttggtacagtaaaaacacatctaacatctttgaagaccaaatttcctgctgaacagtattacagatttcatgagcactggaggtttgtgttgcagcgcttggtcttcttggcagcatttgttgtgtatttggaaacagaaacactagtgactcgagaagcagttacagaaattcttggcatcgaggctgtctgtcaacagcgtgactgctggagactactcccgacccctccacatctccaccttcatcaatgagctggattccggttttcgccttctcaacctgaaaaatgactccctgaggaagcgctacgacggattgaaatatgacgtgaagaaagtagaggaagtggtctatgatctctccatccggggctttaataaggagacggcagcagcttgtgttgaaaaataggaggctctccttgctcctggccttgctgacctcagcggttgccaggaaggggtgagcacagagtgcctcttacggtagttaggatgctcagttgctaaacactgcgctttattttcttaaccagttgtggtgtgagtatcagaattgaaacacttttttgggggtaaaaaatatagcctttacatggacagaattttttttgttgtttcagtgaatatgcctgtaattcagtgtatttcagttccgtcagaaagtgtaaatgttagtttcttggtaaagtccttttcttgcttaccttg

SEQ ID NO: 1570 - protein, 148 aa, Homosapiens
MSVSEIFVELQGFLAAEQDIREEIRKVVQSLEQTAREILTLLQGVHQGAGFQDIPKRCLKAREHFGTVKTHLTSLKTKFPAEQYYRFHEHWRFVLQRLVFLAAFVVYLETETLVTREAVTEILGIEAVCQQRDCWRLLPTPPHLHLHQ

SEQ ID NO: 1571 - DNA, 1298 bp, Homosapiens
cctttggacgcgcgcctcggttccgaacgcagcggacggcgcctcaggcagcgcggcggacagcccgtcctccggcgcgccgcgagcctcggaggaccctagcgacggtcgtggcgtaagaccggggggacgcggcggtagcggcggccgttgcgattgattgcgctggttgcctgcggcgtccacttccttggccgcccttgctacactggctgattgttgtgcagccggcgccatgtctgtgagcgagatcttcgtggagctgcagggctttttggctgccgagcaggacatccgagaggaaatcagaaaagttgtacagagtttagaacaaacagctcgagagattttaactctactgcaaggggtccatcagggtgctgggtttcaggacattccaaagaggtgtttgaaagctcgagaacattttggtacagtaaaaacacatctaacatctttgaagaccaaatttcctgctgaacagtattacagatttcatgagcactggaggtttgtgttgcagcgcttggtcttcttggcagcatttgttgtgtatttggaaacagaaacactagtgactcgagaagcagttacagaaattcttggcatcgaggctgtctgtcaacagcgtgactgctggagactactcccgacccctccacatctccaccttcatcaatgagctggattccggttttcgccttctcaacctgaaaaatgactccctgaggaagcgctacgacggattgaaatatgacgtgaagaaagtagaggaagtggtctatgatctctccatccggggctttaataaggagacggcagcagcttgtgttgaaaaataggaggctctccttgctcctggccttgctgacctcagcggttgccaggaaggggtgagcacagagtgcctcttacggtagttaggatgctcagttgctaaacactgcgctttattttcttaaccagttgtggtgtgagtatcagaattgaaacacttttttgggggtaaaaaatatagcctttacatggacagaattttttttgttgtttcagtgaatatgcctgtaattcagtgtatttcagttccgtcagaaagtgtaaatgttagtttcttggtaaagtccttttcttgcttaccttgactgttgatgtactgattgagaagttcattgtctcgtttgtgattcttccagatgtgatgcttgatattttctatatgcgagttagccatccacacccaggcatagcctggatacagtataaaaatagataattaaaaagatggttgccaagcaagg

SEQ ID NO: 1572 - protein, 148 aa, Homosapiens; identical to SEQ ID NO: 1570

SEQ ID NO: 1573 - DNA, 2766 bp, Homosapiens
cctttggacgcgcgcctcggttccgaacgcagcggacggcgcctcaggcagcgcggcggacagcccgtcctccggcgcgccgcgagcctcggaggaccctagcgacggtcgtggcgtaagaccggggggacgcggcggtagcggcggccgttgcgattgattgcgctggttgcctgcggcgtccacttccttggccgcccttgctacactggctgattgttgtgcagccggcgccatgtctgtgagcgagatcttcgtggagctgcagggctttttggctgccgagcaggacatccgagaggaaatcagaaaagttgtacagagtttagaacaaacagctcgagagattttaactctactgcaaggggtccatcagggtgctgggtttcaggacattccaaagaggtgtttgaaagctcgagaacattttggtacagtaaaaacacatctaacatctttgaagaccaaatttcctgctgaacagtattacagatttcatgagcactggaggtttgtgttgcagcgcttggtcttcttggcagcatttgttgtgtatttggaaacagaaacactagtgactcgagaagcagttacagaaattcttggcatcgaggctgtctgtcaacagcgtgactgctggagactactcccgacccctccacatctccaccttcatcaatgagctggattccggttttcgccttctcaacctgaaaaatgactccctgaggaagcgctacgacggattgaaatatgacgtgaagaaagtagaggaagtggtctatgatctctccatccggggctttaataaggagacggcagcagcttgtgttgaaaaataggaggctctccttgctcctggccttgctgacctcagcggttgccaggaaggggtgagcacagagtgcctcttacggtagttaggatgctcagttgctaaacactgcgctttattttcttaaccagttgtggtgtgagtatcagaattgaaacacttttttgggggtaaaaaatatagcctttacatggacagaattttttttgttgtttcagtgaatatgcctgtaattcagtgtatttcagttccgtcagaaagtgtaaatgttagtttcttggtaaagtccttttcttgcttaccttgactgttgatgtactgattgagaagttcattgtctcgtttgtgattcttccagatgtgatgcttgatattttctatatgcgagttagccatccacacccaggcatagcctggatacagtataaaaatagataattaaaaagatggttgccaagcaaggaaaacttattttatattttcccttccttattttaagcattgtgagtaaatcagatgttgaattcttttgccaagggaattatagctgcaggttctctctcactgccatcaaactgtaaaagattaaactgcgaagtcaagctcaacagattattttggaaagtttttgtattaagggatttagtaacatcattttgttttccaccaggcagggagtagggcttagtgttttaaaacacctctgctttctgatgttgccttaatattctgctattgcagcaattaaaaattgtcttcatgtacatttggaactaacacgtgatgtgatatattcctaaactatgaaacctttttcctagtagtcagctagatcatttgttctgggagtataaagccacccacgtaagttaataagcaaaatcctgactattatgttgttagagaaaaatgctttgctttgtctggaagaaagataaaatagtgaattataaataagtcaggccgggcgtggtggctcacacctgtaatcccagcacactgggaggccgaggcagggggactgcttgagctcaggagttcgagaccagcctgggcaacaaagtgagactccatctctatataaaaacaaaaaccacgaaagcacacacaaaataaatcagtgggatttggtaatgtgttttagagtaagaaatttcaggttgttggtgactatcccaacagtcatgttttaaatgtacagtttggggcaagtcatgtaaatactgttggtggtcttccccacacgccccaattttcaggtagtactaagagtatgtgccaggaaactcttgctattgaattgagatgattaaaatggtgacttaatccgtagttattttgcacccactgaaaggaaagtgctttccagaataatatgaagtatctaaaagtgtcaccttttcttgcctgatcaacaatttgggcttcctgtttgtacaaggggccatttggcatacctttcacagcttttatcaggccaagttaaaggctgactacattttttcatcatgaggaaagcagttgaaatgaggcatgagttactgtgcattgggattttagaacaattttcttgtgacagctctttttgtgaagttaggttcttaaaagtgcccatgatggtcacttaaaatgtgcagtaatagcactgccaggatcaagcatgaaaggcttttaaattagatcatcccacagacaatacgtttgataatagttttttcttttaacctctttaagtattgattctgcttgagaatattgaagtacttgccagaagttgtggatttcagttttaacaaatgctattaaagtggagaagcacactctggtcttggaattccatttgaggatttagaagtgtcatgtttataactattcagttgtgtttgttgctggcttgttgtaaagcaataaaatttttttggtctttttgt

SEQ ID NO: 1574 - protein, 148 aa, Homosapiens; identical to SEQ ID NO: 1570

SEQ ID NO: 1575 - DNA, 3325 bp, Homosapiens
cctttggacgcgcgcctcggttccgaacgcagcggacggcgcctcaggcagcgcggcggacagcccgtcctccggcgcgccgcgagcctcggaggaccctagcgacggtcgtggcgtaagaccggggggacgcggcggtagcggcggccgttgcgattgattgcgctggttgcctgcggcgtccacttccttggccgcccttgctacactggctgattgttgtgcagccggcgccatgtctgtgagcgagatcttcgtggagctgcagggctttttggctgccgagcaggacatccgagaggaaatcagaaaagttgtacagagtttagaacaaacagctcgagagattttaactctactgcaaggggtccatcagggtgctgggtttcaggacattccaaagaggtgtttgaaagctcgagaacattttggtacagtaaaaacacatctaacatctttgaagaccaaatttcctgctgaacagtattacagatttcatgagcactggaggtttgtgttgcagcgcttggtcttcttggcagcatttgttgtgtatttggaaacagaaacactagtgactcgagaagcagttacagaaattcttggcatcgaggctgtctgtcaacagcgtgactgctggagactactcccgacccctccacatctccaccttcatcaatgagctggattccggttttcgccttctcaacctgaaaaatgactccctgaggaagcgctacgacggattgaaatatgacgtgaagaaagtagaggaagtggtctatgatctctccatccggggctttaataaggagacggcagcagcttgtgttgaaaaataggaggctctccttgctcctggccttgctgacctcagcggttgccaggaaggggtgagcacagagtgcctcttacggtagttaggatgctcagttgctaaacactgcgctttattttcttaaccagttgtggtgtgagtatcagaattgaaacacttttttgggggtaaaaaatatagcctttacatggacagaattttttttgttgtttcagtgaatatgcctgtaattcagtgtatttcagttccgtcagaaagtgtaaatgttagtttcttggtaaagtccttttcttgcttaccttgactgttgatgtactgattgagaagttcattgtctcgtttgtgattcttccagatgtgatgcttgatattttctatatgcgagttagccatccacacccaggcatagcctggatacagtataaaaatagataattaaaaagatggttgccaagcaaggaaaacttattttatattttcccttccttattttaagcattgtgagtaaatcagatgttgaattcttttgccaagggaattatagctgcaggttctctctcactgccatcaaactgtaaaagattaaactgcgaagtcaagctcaacagattattttggaaagtttttgtattaagggatttagtaacatcattttgttttccaccaggcagggagtagggcttagtgttttaaaacacctctgctttctgatgttgccttaatattctgctattgcagcaattaaaaattgtcttcatgtacatttggaactaacacgtgatgtgatatattcctaaactatgaaacctttttcctagtagtcagctagatcatttgttctgggagtataaagccacccacgtaagttaataagcaaaatcctgactattatgttgttagagaaaaatgctttgctttgtctggaagaaagataaaatagtgaattataaataagtcaggccgggcgtggtggctcacacctgtaatcccagcacactgggaggccgaggcagggggactgcttgagctcaggagttcgagaccagcctgggcaacaaagtgagactccatctctatataaaaacaaaaaccacgaaagcacacacaaaataaatcagtgggatttggtaatgtgttttagagtaagaaatttcaggttgttggtgactatcccaacagtcatgttttaaatgtacagtttggggcaagtcatgtaaatactgttggtggtcttccccacacgccccaattttcaggtagtactaagagtatgtgccaggaaactcttgctattgaattgagatgattaaaatggtgacttaatccgtagttattttgcacccactgaaaggaaagtgctttccagaataatatgaagtatctaaaagtgtcaccttttcttgcctgatcaacaatttgggcttcctgtttgtacaaggggccatttggcatacctttcacagcttttatcaggccaagttaaaggctgactacattttttcatcatgaggaaagcagttgaaatgaggcatgagttactgtgcattgggattttagaacaattttcttgtgacagctctttttgtgaagttaggttcttaaaagtgcccatgatggtcacttaaaatgtgcagtaatagcactgccaggatcaagcatgaaaggcttttaaattagatcatcccacagacaatacgtttgataatagttttttcttttaacctctttaagtattgattctgcttgagaatattgaagtacttgccagaagttgtggatttcagttttaacaaatgctattaaagtggagaagcacactctggtcttggaattccatttgaggatttagaagtgtcatgtttataactattcagttgtgtttgttgctggcttgttgtaaagcaataaaatttttttggtctttttgtaagtgagtgtgctgctgtaagaaatctcccatgtgcataacaaattctgaatattttttgaggctaaagaagaccggggtgacaagcagatactgctgtgtaatggttacactaaccaaaagacaccagccactcagagttctatactgtaaagcgcagataacatttgtgtgttataccttgattggggaattaaaagtcatttaactgaagatgttgagaaacctgggctctggttttagtataccggaattacttttttccaattttagaaaatcaagcaggttagagaaaatagagatgaattaggggacactgtcttatggattcatttataagaagagaaccagccatatacacttggggagatttgccacatcttaaacttgaataatagtatgagtaatgcttaagggagtttaatagagaaggaaagctttggcagtgttttgagaacttaagtggctaaagagatgagacaaacatgcaggtcgctactggcatagtttcataattgtgtactcggaaattaaagtttgcttgtttcttggtctggatt

SEQ ID NO: 1576 - protein, 148 aa, Homosapiens; identical to SEQ ID NO: 1570

SEQ ID NO: 1577 - DNA, 811 bp, Homosapiens
gacggtcgtggcgtaagaccggggggacgcggcggtagcggcggccgttgcgattgattgcgctggttgcctgcggcgtccacttccttggccgcccttgctacactggctgattgttgtgcagccggcgccatgtctgtgagcgagatcttcgtggagctgcagggctttttggctgccgagcaggacatccgagagttgagccagatcgggagaaaggatttcatctggatgtagaagattatctctcaggagttctaattcttgccagtgaactgtcgaggctgtctgtcaacagcgtgactgctggagactactcccgacccctccacatctccaccttcatcaatgagctggattccggttttcgccttctcaacctgaaaaatgactccctgaggaagcgctacgacggattgaaatatgacgtgaagaaagtagaggaagtggtctatgatctctccatccggggctttaataaggagacggcagcagcttgtgttgaaaaataggaggctctccttgctcctggccttgctgacctcagcggttgccaggaaggggtgagcacagagtgcctcttacggtagttaggatgctcagttgctaaacactgcgctttattttcttaaccagttgtggtgtgagtatcagaattgaaacacttttttgggggtaaaaaatatagcctttacatggacagaattttttttgttgtttcagtgaatatgcctgtaattcagtgtatttcagttccgtcagaaagtgtaaatgttagtttcttggtaaagtccttttcttgcttaccttg

SEQ ID NO: 1578 - protein, 34 aa, Homosapiens
MSVSEIFVELQGFLAAEQDIRELSQIGRKDFIWM

SEQ ID NO: 1579 - DNA, 968 bp, Homosapiens
gacggtcgtggcgtaagaccggggggacgcggcggtagcggcggccgttgcgattgattgcgctggttgcctgcggcgtccacttccttggccgcccttgctacactggctgattgttgtgcagccggcgccatgtctgtgagcgagatcttcgtggagctgcagggctttttggctgccgagcaggacatccgagagttgagccagatcgggagaaaggatttcatctggatgtagaagattatctctcaggagttctaattcttgccagtgaactgtcgaggctgtctgtcaacagcgtgactgctggagactactcccgacccctccacatctccaccttcatcaatgagctggattccggttttcgccttctcaacctgaaaaatgactccctgaggaagcgctacgacggattgaaatatgacgtgaagaaagtagaggaagtggtctatgatctctccatccggggctttaataaggagacggcagcagcttgtgttgaaaaataggaggctctccttgctcctggccttgctgacctcagcggttgccaggaaggggtgagcacagagtgcctcttacggtagttaggatgctcagttgctaaacactgcgctttattttcttaaccagttgtggtgtgagtatcagaattgaaacacttttttgggggtaaaaaatatagcctttacatggacagaattttttttgttgtttcagtgaatatgcctgtaattcagtgtatttcagttccgtcagaaagtgtaaatgttagtttcttggtaaagtccttttcttgcttaccttgactgttgatgtactgattgagaagttcattgtctcgtttgtgattcttccagatgtgatgcttgatattttctatatgcgagttagccatccacacccaggcatagcctggatacagtataaaaatagataattaaaaagatggttgccaagcaagg

SEQ ID NO: 1580 - protein, 34 aa, Homosapiens; identical to SEQ ID NO: 1578

SEQ ID NO: 1581 - DNA, 2436 bp, Homosapiens
gacggtcgtggcgtaagaccggggggacgcggcggtagcggcggccgttgcgattgattgcgctggttgcctgcggcgtccacttccttggccgcccttgctacactggctgattgttgtgcagccggcgccatgtctgtgagcgagatcttcgtggagctgcagggctttttggctgccgagcaggacatccgagagttgagccagatcgggagaaaggatttcatctggatgtagaagattatctctcaggagttctaattcttgccagtgaactgtcgaggctgtctgtcaacagcgtgactgctggagactactcccgacccctccacatctccaccttcatcaatgagctggattccggttttcgccttctcaacctgaaaaatgactccctgaggaagcgctacgacggattgaaatatgacgtgaagaaagtagaggaagtggtctatgatctctccatccggggctttaataaggagacggcagcagcttgtgttgaaaaataggaggctctccttgctcctggccttgctgacctcagcggttgccaggaaggggtgagcacagagtgcctcttacggtagttaggatgctcagttgctaaacactgcgctttattttcttaaccagttgtggtgtgagtatcagaattgaaacacttttttgggggtaaaaaatatagcctttacatggacagaattttttttgttgtttcagtgaatatgcctgtaattcagtgtatttcagttccgtcagaaagtgtaaatgttagtttcttggtaaagtccttttcttgcttaccttgactgttgatgtactgattgagaagttcattgtctcgtttgtgattcttccagatgtgatgcttgatattttctatatgcgagttagccatccacacccaggcatagcctggatacagtataaaaatagataattaaaaagatggttgccaagcaaggaaaacttattttatattttcccttccttattttaagcattgtgagtaaatcagatgttgaattcttttgccaagggaattatagctgcaggttctctctcactgccatcaaactgtaaaagattaaactgcgaagtcaagctcaacagattattttggaaagtttttgtattaagggatttagtaacatcattttgttttccaccaggcagggagtagggcttagtgttttaaaacacctctgctttctgatgttgccttaatattctgctattgcagcaattaaaaattgtcttcatgtacatttggaactaacacgtgatgtgatatattcctaaactatgaaacctttttcctagtagtcagctagatcatttgttctgggagtataaagccacccacgtaagttaataagcaaaatcctgactattatgttgttagagaaaaatgctttgctttgtctggaagaaagataaaatagtgaattataaataagtcaggccgggcgtggtggctcacacctgtaatcccagcacactgggaggccgaggcagggggactgcttgagctcaggagttcgagaccagcctgggcaacaaagtgagactccatctctatataaaaacaaaaaccacgaaagcacacacaaaataaatcagtgggatttggtaatgtgttttagagtaagaaatttcaggttgttggtgactatcccaacagtcatgttttaaatgtacagtttggggcaagtcatgtaaatactgttggtggtcttccccacacgccccaattttcaggtagtactaagagtatgtgccaggaaactcttgctattgaattgagatgattaaaatggtgacttaatccgtagttattttgcacccactgaaaggaaagtgctttccagaataatatgaagtatctaaaagtgtcaccttttcttgcctgatcaacaatttgggcttcctgtttgtacaaggggccatttggcatacctttcacagcttttatcaggccaagttaaaggctgactacattttttcatcatgaggaaagcagttgaaatgaggcatgagttactgtgcattgggattttagaacaattttcttgtgacagctctttttgtgaagttaggttcttaaaagtgcccatgatggtcacttaaaatgtgcagtaatagcactgccaggatcaagcatgaaaggcttttaaattagatcatcccacagacaatacgtttgataatagttttttcttttaacctctttaagtattgattctgcttgagaatattgaagtacttgccagaagttgtggatttcagttttaacaaatgctattaaagtggagaagcacactctggtcttggaattccatttgaggatttagaagtgtcatgtttataactattcagttgtgtttgttgctggcttgttgtaaagcaataaaatttttttggtctttttgt

SEQ ID NO: 1582 - protein, 34 aa, Homosapiens; identical to SEQ ID NO: 1578

SEQ ID NO: 1583 - DNA, 2995 bp, Homosapiens
gacggtcgtggcgtaagaccggggggacgcggcggtagcggcggccgttgcgattgattgcgctggttgcctgcggcgtccacttccttggccgcccttgctacactggctgattgttgtgcagccggcgccatgtctgtgagcgagatcttcgtggagctgcagggctttttggctgccgagcaggacatccgagagttgagccagatcgggagaaaggatttcatctggatgtagaagattatctctcaggagttctaattcttgccagtgaactgtcgaggctgtctgtcaacagcgtgactgctggagactactcccgacccctccacatctccaccttcatcaatgagctggattccggttttcgccttctcaacctgaaaaatgactccctgaggaagcgctacgacggattgaaatatgacgtgaagaaagtagaggaagtggtctatgatctctccatccggggctttaataaggagacggcagcagcttgtgttgaaaaataggaggctctccttgctcctggccttgctgacctcagcggttgccaggaaggggtgagcacagagtgcctcttacggtagttaggatgctcagttgctaaacactgcgctttattttcttaaccagttgtggtgtgagtatcagaattgaaacacttttttgggggtaaaaaatatagcctttacatggacagaattttttttgttgtttcagtgaatatgcctgtaattcagtgtatttcagttccgtcagaaagtgtaaatgttagtttcttggtaaagtccttttcttgcttaccttgactgttgatgtactgattgagaagttcattgtctcgtttgtgattcttccagatgtgatgcttgatattttctatatgcgagttagccatccacacccaggcatagcctggatacagtataaaaatagataattaaaaagatggttgccaagcaaggaaaacttattttatattttcccttccttattttaagcattgtgagtaaatcagatgttgaattcttttgccaagggaattatagctgcaggttctctctcactgccatcaaactgtaaaagattaaactgcgaagtcaagctcaacagattattttggaaagtttttgtattaagggatttagtaacatcattttgttttccaccaggcagggagtagggcttagtgttttaaaacacctctgctttctgatgttgccttaatattctgctattgcagcaattaaaaattgtcttcatgtacatttggaactaacacgtgatgtgatatattcctaaactatgaaacctttttcctagtagtcagctagatcatttgttctgggagtataaagccacccacgtaagttaataagcaaaatcctgactattatgttgttagagaaaaatgctttgctttgtctggaagaaagataaaatagtgaattataaataagtcaggccgggcgtggtggctcacacctgtaatcccagcacactgggaggccgaggcagggggactgcttgagctcaggagttcgagaccagcctgggcaacaaagtgagactccatctctatataaaaacaaaaaccacgaaagcacacacaaaataaatcagtgggatttggtaatgtgttttagagtaagaaatttcaggttgttggtgactatcccaacagtcatgttttaaatgtacagtttggggcaagtcatgtaaatactgttggtggtcttccccacacgccccaattttcaggtagtactaagagtatgtgccaggaaactcttgctattgaattgagatgattaaaatggtgacttaatccgtagttattttgcacccactgaaaggaaagtgctttccagaataatatgaagtatctaaaagtgtcaccttttcttgcctgatcaacaatttgggcttcctgtttgtacaaggggccatttggcatacctttcacagcttttatcaggccaagttaaaggctgactacattttttcatcatgaggaaagcagttgaaatgaggcatgagttactgtgcattgggattttagaacaattttcttgtgacagctctttttgtgaagttaggttcttaaaagtgcccatgatggtcacttaaaatgtgcagtaatagcactgccaggatcaagcatgaaaggcttttaaattagatcatcccacagacaatacgtttgataatagttttttcttttaacctctttaagtattgattctgcttgagaatattgaagtacttgccagaagttgtggatttcagttttaacaaatgctattaaagtggagaagcacactctggtcttggaattccatttgaggatttagaagtgtcatgtttataactattcagttgtgtttgttgctggcttgttgtaaagcaataaaatttttttggtctttttgtaagtgagtgtgctgctgtaagaaatctcccatgtgcataacaaattctgaatattttttgaggctaaagaagaccggggtgacaagcagatactgctgtgtaatggttacactaaccaaaagacaccagccactcagagttctatactgtaaagcgcagataacatttgtgtgttataccttgattggggaattaaaagtcatttaactgaagatgttgagaaacctgggctctggttttagtataccggaattacttttttccaattttagaaaatcaagcaggttagagaaaatagagatgaattaggggacactgtcttatggattcatttataagaagagaaccagccatatacacttggggagatttgccacatcttaaacttgaataatagtatgagtaatgcttaagggagtttaatagagaaggaaagctttggcagtgttttgagaacttaagtggctaaagagatgagacaaacatgcaggtcgctactggcatagtttcataattgtgtactcggaaattaaagtttgcttgtttcttggtctggatt

SEQ ID NO: 1584 - protein, 34 aa, Homosapiens; identical to SEQ ID NO: 1578

SEQ ID NO: 1585 - DNA, 990 bp, Homosapiens
gtaagaccggggggacgcggcggtagcggcggccgttgcgattgattgcgctggttgcctgcggcgtccacttccttggccgcccttgctacactggctgattgttgtgcagccggcgccatgtctgtgagcgagatcttcgtggagctgcagggctttttggctgccgagcaggacatccgagaggaaatcagaaaagttgtacagagtttagaacaaacagctcgagagattttaactctactgcaaggggtccatcagggtgctgggtttcaggacattccaaagaggtgtttgaaagctcgagaacattttggtacagtaaaaacacatctaacatctttgaagaccaaatttcctgctgaacagtattacagttgagccagatcgggagaaaggatttcatctggatgtagaagattatctctcaggagttctaattcttgccagtgaactgtcgaggctgtctgtcaacagcgtgactgctggagactactcccgacccctccacatctccaccttcatcaatgagctggattccggttttcgccttctcaacctgaaaaatgactccctgaggaagcgctacgacggattgaaatatgacgtgaagaaagtagaggaagtggtctatgatctctccatccggggctttaataaggagacggcagcagcttgtgttgaaaaataggaggctctccttgctcctggccttgctgacctcagcggttgccaggaaggggtgagcacagagtgcctcttacggtagttaggatgctcagttgctaaacactgcgctttattttcttaaccagttgtggtgtgagtatcagaattgaaacacttttttgggggtaaaaaatatagcctttacatggacagaattttttttgttgtttcagtgaatatgcctgtaattcagtgtatttcagttccgtcagaaagtgtaaatgttagtttcttggtaaagtccttttcttgcttaccttg

SEQ ID NO: 1586 - protein, 86 aa, Homosapiens
MSVSEIFVELQGFLAAEQDIREEIRKVVQSLEQTAREILTLLQGVHQGAGFQDIPKRCLKAREHFGTVKTHLTSLKTKFPAEQYYS

SEQ ID NO: 1587 - DNA, 915 bp, Homosapiens
gtaagaccggggggacgcggcggtagcggcggccgttgcgattgattgcgctggttgcctgcggcgtccacttccttggccgcccttgctacactggctgattgttgtgcagccggcgccatgtctgtgagcgagatcttcgtggagctgcagggctttttggctgccgagcaggacatccgagagatttcatgagcactggaggtttgtgttgcagcgcttggtcttcttggcagcatttgttgtgtatttggaaacagaaacactagtgactcgagaagcagttacagaaattcttggcattgagccagatcgggagaaaggatttcatctggatgtagaagattatctctcaggagttctaattcttgccagtgaactgtcgaggctgtctgtcaacagcgtgactgctggagactactcccgacccctccacatctccaccttcatcaatgagctggattccggttttcgccttctcaacctgaaaaatgactccctgaggaagcgctacgacggattgaaatatgacgtgaagaaagtagaggaagtggtctatgatctctccatccggggctttaataaggagacggcagcagcttgtgttgaaaaataggaggctctccttgctcctggccttgctgacctcagcggttgccaggaaggggtgagcacagagtgcctcttacggtagttaggatgctcagttgctaaacactgcgctttattttcttaaccagttgtggtgtgagtatcagaattgaaacacttttttgggggtaaaaaatatagcctttacatggacagaattttttttgttgtttcagtgaatatgcctgtaattcagtgtatttcagttccgtcagaaagtgtaaatgttagtttcttggtaaagtccttttcttgcttaccttg

SEQ ID NO: 1588 - protein, 37 aa, Homosapiens
MDRIFFVVSVNMPVIQCISVPSESVNVSFLVKSFSCL

SEQ ID NO: 1589 - DNA, 1147 bp, Homosapiens
gtaagaccggggggacgcggcggtagcggcggccgttgcgattgattgcgctggttgcctgcggcgtccacttccttggccgcccttgctacactggctgattgttgtgcagccggcgccatgtctgtgagcgagatcttcgtggagctgcagggctttttggctgccgagcaggacatccgagaggaaatcagaaaagttgtacagagtttagaacaaacagctcgagagattttaactctactgcaaggggtccatcagggtgctgggtttcaggacattccaaagaggtgtttgaaagctcgagaacattttggtacagtaaaaacacatctaacatctttgaagaccaaatttcctgctgaacagtattacagttgagccagatcgggagaaaggatttcatctggatgtagaagattatctctcaggagttctaattcttgccagtgaactgtcgaggctgtctgtcaacagcgtgactgctggagactactcccgacccctccacatctccaccttcatcaatgagctggattccggttttcgccttctcaacctgaaaaatgactccctgaggaagcgctacgacggattgaaatatgacgtgaagaaagtagaggaagtggtctatgatctctccatccggggctttaataaggagacggcagcagcttgtgttgaaaaataggaggctctccttgctcctggccttgctgacctcagcggttgccaggaaggggtgagcacagagtgcctcttacggtagttaggatgctcagttgctaaacactgcgctttattttcttaaccagttgtggtgtgagtatcagaattgaaacacttttttgggggtaaaaaatatagcctttacatggacagaattttttttgttgtttcagtgaatatgcctgtaattcagtgtatttcagttccgtcagaaagtgtaaatgttagtttcttggtaaagtccttttcttgcttaccttgactgttgatgtactgattgagaagttcattgtctcgtttgtgattcttccagatgtgatgcttgatattttctatatgcgagttagccatccacacccaggcatagcctggatacagtataaaaatagataattaaaaagatggttgccaagcaagg

SEQ ID NO: 1590 - protein, 86 aa, Homosapiens; identical to SEQ ID NO: 1586

SEQ ID NO: 1591 - DNA, 1072 bp, Homosapiens
gtaagaccggggggacgcggcggtagcggcggccgttgcgattgattgcgctggttgcctgcggcgtccacttccttggccgcccttgctacactggctgattgttgtgcagccggcgccatgtctgtgagcgagatcttcgtggagctgcagggctttttggctgccgagcaggacatccgagagatttcatgagcactggaggtttgtgttgcagcgcttggtcttcttggcagcatttgttgtgtatttggaaacagaaacactagtgactcgagaagcagttacagaaattcttggcattgagccagatcgggagaaaggatttcatctggatgtagaagattatctctcaggagttctaattcttgccagtgaactgtcgaggctgtctgtcaacagcgtgactgctggagactactcccgacccctccacatctccaccttcatcaatgagctggattccggttttcgccttctcaacctgaaaaatgactccctgaggaagcgctacgacggattgaaatatgacgtgaagaaagtagaggaagtggtctatgatctctccatccggggctttaataaggagacggcagcagcttgtgttgaaaaataggaggctctccttgctcctggccttgctgacctcagcggttgccaggaaggggtgagcacagagtgcctcttacggtagttaggatgctcagttgctaaacactgcgctttattttcttaaccagttgtggtgtgagtatcagaattgaaacacttttttgggggtaaaaaatatagcctttacatggacagaattttttttgttgtttcagtgaatatgcctgtaattcagtgtatttcagttccgtcagaaagtgtaaatgttagtttcttggtaaagtccttttcttgcttaccttgactgttgatgtactgattgagaagttcattgtctcgtttgtgattcttccagatgtgatgcttgatattttctatatgcgagttagccatccacacccaggcatagcctggatacagtataaaaatagataattaaaaagatggttgccaagcaagg

SEQ ID NO: 1592 - protein, 38 aa, Homosapiens
MDRIFFVVSVNMPVIQCISVPSESVNVSFLVKSFSCLP

SEQ ID NO: 1593 - DNA, 2615 bp, Homosapiens
gtaagaccggggggacgcggcggtagcggcggccgttgcgattgattgcgctggttgcctgcggcgtccacttccttggccgcccttgctacactggctgattgttgtgcagccggcgccatgtctgtgagcgagatcttcgtggagctgcagggctttttggctgccgagcaggacatccgagaggaaatcagaaaagttgtacagagtttagaacaaacagctcgagagattttaactctactgcaaggggtccatcagggtgctgggtttcaggacattccaaagaggtgtttgaaagctcgagaacattttggtacagtaaaaacacatctaacatctttgaagaccaaatttcctgctgaacagtattacagttgagccagatcgggagaaaggatttcatctggatgtagaagattatctctcaggagttctaattcttgccagtgaactgtcgaggctgtctgtcaacagcgtgactgctggagactactcccgacccctccacatctccaccttcatcaatgagctggattccggttttcgccttctcaacctgaaaaatgactccctgaggaagcgctacgacggattgaaatatgacgtgaagaaagtagaggaagtggtctatgatctctccatccggggctttaataaggagacggcagcagcttgtgttgaaaaataggaggctctccttgctcctggccttgctgacctcagcggttgccaggaaggggtgagcacagagtgcctcttacggtagttaggatgctcagttgctaaacactgcgctttattttcttaaccagttgtggtgtgagtatcagaattgaaacacttttttgggggtaaaaaatatagcctttacatggacagaattttttttgttgtttcagtgaatatgcctgtaattcagtgtatttcagttccgtcagaaagtgtaaatgttagtttcttggtaaagtccttttcttgcttaccttgactgttgatgtactgattgagaagttcattgtctcgtttgtgattcttccagatgtgatgcttgatattttctatatgcgagttagccatccacacccaggcatagcctggatacagtataaaaatagataattaaaaagatggttgccaagcaaggaaaacttattttatattttcccttccttattttaagcattgtgagtaaatcagatgttgaattcttttgccaagggaattatagctgcaggttctctctcactgccatcaaactgtaaaagattaaactgcgaagtcaagctcaacagattattttggaaagtttttgtattaagggatttagtaacatcattttgttttccaccaggcagggagtagggcttagtgttttaaaacacctctgctttctgatgttgccttaatattctgctattgcagcaattaaaaattgtcttcatgtacatttggaactaacacgtgatgtgatatattcctaaactatgaaacctttttcctagtagtcagctagatcatttgttctgggagtataaagccacccacgtaagttaataagcaaaatcctgactattatgttgttagagaaaaatgctttgctttgtctggaagaaagataaaatagtgaattataaataagtcaggccgggcgtggtggctcacacctgtaatcccagcacactgggaggccgaggcagggggactgcttgagctcaggagttcgagaccagcctgggcaacaaagtgagactccatctctatataaaaacaaaaaccacgaaagcacacacaaaataaatcagtgggatttggtaatgtgttttagagtaagaaatttcaggttgttggtgactatcccaacagtcatgttttaaatgtacagtttggggcaagtcatgtaaatactgttggtggtcttccccacacgccccaattttcaggtagtactaagagtatgtgccaggaaactcttgctattgaattgagatgattaaaatggtgacttaatccgtagttattttgcacccactgaaaggaaagtgctttccagaataatatgaagtatctaaaagtgtcaccttttcttgcctgatcaacaatttgggcttcctgtttgtacaaggggccatttggcatacctttcacagcttttatcaggccaagttaaaggctgactacattttttcatcatgaggaaagcagttgaaatgaggcatgagttactgtgcattgggattttagaacaattttcttgtgacagctctttttgtgaagttaggttcttaaaagtgcccatgatggtcacttaaaatgtgcagtaatagcactgccaggatcaagcatgaaaggcttttaaattagatcatcccacagacaatacgtttgataatagttttttcttttaacctctttaagtattgattctgcttgagaatattgaagtacttgccagaagttgtggatttcagttttaacaaatgctattaaagtggagaagcacactctggtcttggaattccatttgaggatttagaagtgtcatgtttataactattcagttgtgtttgttgctggcttgttgtaaagcaataaaatttttttggtctttttgt

SEQ ID NO: 1594 - protein, 86 aa, Homosapiens; identical to SEQ ID NO: 1586

SEQ ID NO: 1595 - DNA, 2540 bp, Homosapiens
gtaagaccggggggacgcggcggtagcggcggccgttgcgattgattgcgctggttgcctgcggcgtccacttccttggccgcccttgctacactggctgattgttgtgcagccggcgccatgtctgtgagcgagatcttcgtggagctgcagggctttttggctgccgagcaggacatccgagagatttcatgagcactggaggtttgtgttgcagcgcttggtcttcttggcagcatttgttgtgtatttggaaacagaaacactagtgactcgagaagcagttacagaaattcttggcattgagccagatcgggagaaaggatttcatctggatgtagaagattatctctcaggagttctaattcttgccagtgaactgtcgaggctgtctgtcaacagcgtgactgctggagactactcccgacccctccacatctccaccttcatcaatgagctggattccggttttcgccttctcaacctgaaaaatgactccctgaggaagcgctacgacggattgaaatatgacgtgaagaaagtagaggaagtggtctatgatctctccatccggggctttaataaggagacggcagcagcttgtgttgaaaaataggaggctctccttgctcctggccttgctgacctcagcggttgccaggaaggggtgagcacagagtgcctcttacggtagttaggatgctcagttgctaaacactgcgctttattttcttaaccagttgtggtgtgagtatcagaattgaaacacttttttgggggtaaaaaatatagcctttacatggacagaattttttttgttgtttcagtgaatatgcctgtaattcagtgtatttcagttccgtcagaaagtgtaaatgttagtttcttggtaaagtccttttcttgcttaccttgactgttgatgtactgattgagaagttcattgtctcgtttgtgattcttccagatgtgatgcttgatattttctatatgcgagttagccatccacacccaggcatagcctggatacagtataaaaatagataattaaaaagatggttgccaagcaaggaaaacttattttatattttcccttccttattttaagcattgtgagtaaatcagatgttgaattcttttgccaagggaattatagctgcaggttctctctcactgccatcaaactgtaaaagattaaactgcgaagtcaagctcaacagattattttggaaagtttttgtattaagggatttagtaacatcattttgttttccaccaggcagggagtagggcttagtgttttaaaacacctctgctttctgatgttgccttaatattctgctattgcagcaattaaaaattgtcttcatgtacatttggaactaacacgtgatgtgatatattcctaaactatgaaacctttttcctagtagtcagctagatcatttgttctgggagtataaagccacccacgtaagttaataagcaaaatcctgactattatgttgttagagaaaaatgctttgctttgtctggaagaaagataaaatagtgaattataaataagtcaggccgggcgtggtggctcacacctgtaatcccagcacactgggaggccgaggcagggggactgcttgagctcaggagttcgagaccagcctgggcaacaaagtgagactccatctctatataaaaacaaaaaccacgaaagcacacacaaaataaatcagtgggatttggtaatgtgttttagagtaagaaatttcaggttgttggtgactatcccaacagtcatgttttaaatgtacagtttggggcaagtcatgtaaatactgttggtggtcttccccacacgccccaattttcaggtagtactaagagtatgtgccaggaaactcttgctattgaattgagatgattaaaatggtgacttaatccgtagttattttgcacccactgaaaggaaagtgctttccagaataatatgaagtatctaaaagtgtcaccttttcttgcctgatcaacaatttgggcttcctgtttgtacaaggggccatttggcatacctttcacagcttttatcaggccaagttaaaggctgactacattttttcatcatgaggaaagcagttgaaatgaggcatgagttactgtgcattgggattttagaacaattttcttgtgacagctctttttgtgaagttaggttcttaaaagtgcccatgatggtcacttaaaatgtgcagtaatagcactgccaggatcaagcatgaaaggcttttaaattagatcatcccacagacaatacgtttgataatagttttttcttttaacctctttaagtattgattctgcttgagaatattgaagtacttgccagaagttgtggatttcagttttaacaaatgctattaaagtggagaagcacactctggtcttggaattccatttgaggatttagaagtgtcatgtttataactattcagttgtgtttgttgctggcttgttgtaaagcaataaaatttttttggtctttttgt

SEQ ID NO: 1596 - protein, 54 aa, Homosapiens [sequence omitted]

SEQ ID NO: 1597 - DNA, 2832 bp, Homosapiens
gtaagaccggggggacgcggcggtagcggcggccgttgcgattgattgcgctggttgcctgcggcgtccacttccttggccgcccttgctacactggctgattgttgtgcagccggcgccatgtctgtgagcgagatcttcgtggagctgcagggctttttggctgccgagcaggacatccgagaggaaatcagaaaagttgtacagagtttagaacaaacagctcgagagattttaactctactgcaaggggtccatcagggtgctgggtttcaggacagtaagttctttgttttgtatccaattatcagtctcttatttagagggagagtttctatccagaagacattttataatgaaaaatggctatcatgctttatgttccaaagaggtgtttgaaagctcgagaacattttggtacagtaaaaacacatctaacatctttgaagaccaaatttcctgctgaacagtattacagatttcatgagcactggaggtttgtgttgcagcgcttggtcttcttggcagcatttgttgtgtatttggaaacagaaacactagtgactcgagaagcagttacagaaattcttggcattgagccagatcgggagaaaggatttcatctggatgtagaagattatctctcaggagttctaattcttgccagtgaactgtcgaggctgtctgtcaacagcgtgactgctggagactactcccgacccctccacatctccaccttcatcaatgagctggattccggttttcgccttctcaacctgaaaaatgactccctgaggaagcgctacgacggattgaaatatgacgtgaagaaagtagaggaagtggtctatgatctctccatccggggctttaataaggagacggcagcagcttgtgttgaaaaataggaggctctccttgctcctggccttgctgacctcagcggttgccaggaaggggtgagcacagagtgcctcttacggtagttaggatgctcagttgctaaacactgcgctttattttcttaaccagttgtggtgtgagtatcagaattgaaacacttttttgggggtaaaaaatatagcctttacatggacagaattttttttgttgtttcagtgaatatgcctgtaattcagtgtatttcagttccgtcagaaagtgtaaatgttagtttcttggtaaagtccttttcttgcttaccttgactgttgatgtactgattgagaagttcattgtctcgtttgtgattcttccagatgtgatgcttgatattttctatatgcgagttagccatccacacccaggcatagcctggatacagtataaaaatagataattaaaaagatggttgccaagcaaggaaaacttattttatattttcccttccttattttaagcattgtgagtaaatcagatgttgaattcttttgccaagggaattatagctgcaggttctctctcactgccatcaaactgtaaaagattaaactgcgaagtcaagctcaacagattattttggaaagtttttgtattaagggatttagtaacatcattttgttttccaccaggcagggagtagggcttagtgttttaaaacacctctgctttctgatgttgccttaatattctgctattgcagcaattaaaaattgtcttcatgtacatttggaactaacacgtgatgtgatatattcctaaactatgaaacctttttcctagtagtcagctagatcatttgttctgggagtataaagccacccacgtaagttaataagcaaaatcctgactattatgttgttagagaaaaatgctttgctttgtctggaagaaagataaaatagtgaattataaataagtcaggccgggcgtggtggctcacacctgtaatcccagcacactgggaggccgaggcagggggactgcttgagctcaggagttcgagaccagcctgggcaacaaagtgagactccatctctatataaaaacaaaaaccacgaaagcacacacaaaataaatcagtgggatttggtaatgtgttttagagtaagaaatttcaggttgttggtgactatcccaacagtcatgttttaaatgtacagtttggggcaagtcatgtaaatactgttggtggtcttccccacacgccccaattttcaggtagtactaagagtatgtgccaggaaactcttgctattgaattgagatgattaaaatggtgacttaatccgtagttattttgcacccactgaaaggaaagtgctttccagaataatatgaagtatctaaaagtgtcaccttttcttgcctgatcaacaatttgggcttcctgtttgtacaaggggccatttggcatacctttcacagcttttatcaggccaagttaaaggctgactacattttttcatcatgaggaaagcagttgaaatgaggcatgagttactgtgcattgggattttagaacaattttcttgtgacagctctttttgtgaagttaggttcttaaaagtgcccatgatggtcacttaaaatgtgcagtaatagcactgccaggatcaagcatgaaaggcttttaaattagatcatcccacagacaatacgtttgataatagttttttcttttaacctctttaagtattgattctgcttgagaatattgaagtacttgccagaagttgtggatttcagttttaacaaatgctattaaagtggagaagcacactctggtcttggaattccatttgaggatttagaagtgtcatgtttataactattcagttgtgtttgttgctggcttgttgtaaagcaataaaatttttttggtctttttgt

SEQ ID NO: 1598 - protein, 181 aa, Homosapiens
MAIMLYVPKRCLKAREHFGTVKTHLTSLKTKFPAEQYYRFHEHWRFVLQRLVFLAAFVVYLETETLVTREAVTEILGIEPDREKGFHLDVEDYLSGVLILASELSRLSVNSVTAGDYSRPLHISTFINELDSGFRLLNLKNDSLRKRYDGLKYDVKKVEEVVYDLSIRGFNKETAAACVEK

SEQ ID NO: 1599 - DNA, 3174 bp, Homosapiens
gtaagaccggggggacgcggcggtagcggcggccgttgcgattgattgcgctggttgcctgcggcgtccacttccttggccgcccttgctacactggctgattgttgtgcagccggcgccatgtctgtgagcgagatcttcgtggagctgcagggctttttggctgccgagcaggacatccgagaggaaatcagaaaagttgtacagagtttagaacaaacagctcgagagattttaactctactgcaaggggtccatcagggtgctgggtttcaggacattccaaagaggtgtttgaaagctcgagaacattttggtacagtaaaaacacatctaacatctttgaagaccaaatttcctgctgaacagtattacagttgagccagatcgggagaaaggatttcatctggatgtagaagattatctctcaggagttctaattcttgccagtgaactgtcgaggctgtctgtcaacagcgtgactgctggagactactcccgacccctccacatctccaccttcatcaatgagctggattccggttttcgccttctcaacctgaaaaatgactccctgaggaagcgctacgacggattgaaatatgacgtgaagaaagtagaggaagtggtctatgatctctccatccggggctttaataaggagacggcagcagcttgtgttgaaaaataggaggctctccttgctcctggccttgctgacctcagcggttgccaggaaggggtgagcacagagtgcctcttacggtagttaggatgctcagttgctaaacactgcgctttattttcttaaccagttgtggtgtgagtatcagaattgaaacacttttttgggggtaaaaaatatagcctttacatggacagaattttttttgttgtttcagtgaatatgcctgtaattcagtgtatttcagttccgtcagaaagtgtaaatgttagtttcttggtaaagtccttttcttgcttaccttgactgttgatgtactgattgagaagttcattgtctcgtttgtgattcttccagatgtgatgcttgatattttctatatgcgagttagccatccacacccaggcatagcctggatacagtataaaaatagataattaaaaagatggttgccaagcaaggaaaacttattttatattttcccttccttattttaagcattgtgagtaaatcagatgttgaattcttttgccaagggaattatagctgcaggttctctctcactgccatcaaactgtaaaagattaaactgcgaagtcaagctcaacagattattttggaaagtttttgtattaagggatttagtaacatcattttgttttccaccaggcagggagtagggcttagtgttttaaaacacctctgctttctgatgttgccttaatattctgctattgcagcaattaaaaattgtcttcatgtacatttggaactaacacgtgatgtgatatattcctaaactatgaaacctttttcctagtagtcagctagatcatttgttctgggagtataaagccacccacgtaagttaataagcaaaatcctgactattatgttgttagagaaaaatgctttgctttgtctggaagaaagataaaatagtgaattataaataagtcaggccgggcgtggtggctcacacctgtaatcccagcacactgggaggccgaggcagggggactgcttgagctcaggagttcgagaccagcctgggcaacaaagtgagactccatctctatataaaaacaaaaaccacgaaagcacacacaaaataaatcagtgggatttggtaatgtgttttagagtaagaaatttcaggttgttggtgactatcccaacagtcatgttttaaatgtacagtttggggcaagtcatgtaaatactgttggtggtcttccccacacgccccaattttcaggtagtactaagagtatgtgccaggaaactcttgctattgaattgagatgattaaaatggtgacttaatccgtagttattttgcacccactgaaaggaaagtgctttccagaataatatgaagtatctaaaagtgtcaccttttcttgcctgatcaacaatttgggcttcctgtttgtacaaggggccatttggcatacctttcacagcttttatcaggccaagttaaaggctgactacattttttcatcatgaggaaagcagttgaaatgaggcatgagttactgtgcattgggattttagaacaattttcttgtgacagctctttttgtgaagttaggttcttaaaagtgcccatgatggtcacttaaaatgtgcagtaatagcactgccaggatcaagcatgaaaggcttttaaattagatcatcccacagacaatacgtttgataatagttttttcttttaacctctttaagtattgattctgcttgagaatattgaagtacttgccagaagttgtggatttcagttttaacaaatgctattaaagtggagaagcacactctggtcttggaattccatttgaggatttagaagtgtcatgtttataactattcagttgtgtttgttgctggcttgttgtaaagcaataaaatttttttggtctttttgtaagtgagtgtgctgctgtaagaaatctcccatgtgcataacaaattctgaatattttttgaggctaaagaagaccggggtgacaagcagatactgctgtgtaatggttacactaaccaaaagacaccagccactcagagttctatactgtaaagcgcagataacatttgtgtgttataccttgattggggaattaaaagtcatttaactgaagatgttgagaaacctgggctctggttttagtataccggaattacttttttccaattttagaaaatcaagcaggttagagaaaatagagatgaattaggggacactgtcttatggattcatttataagaagagaaccagccatatacacttggggagatttgccacatcttaaacttgaataatagtatgagtaatgcttaagggagtttaatagagaaggaaagctttggcagtgttttgagaacttaagtggctaaagagatgagacaaacatgcaggtcgctactggcatagtttcataattgtgtactcggaaattaaagtttgcttgtttcttggtctggatt

SEQ ID NO: 1600 - protein, 86 aa, Homosapiens; identical to SEQ ID NO: 1586

SEQ ID NO: 1601 - DNA, 3099 bp, Homosapiens
gtaagaccggggggacgcggcggtagcggcggccgttgcgattgattgcgctggttgcctgcggcgtccacttccttggccgcccttgctacactggctgattgttgtgcagccggcgccatgtctgtgagcgagatcttcgtggagctgcagggctttttggctgccgagcaggacatccgagagatttcatgagcactggaggtttgtgttgcagcgcttggtcttcttggcagcatttgttgtgtatttggaaacagaaacactagtgactcgagaagcagttacagaaattcttggcattgagccagatcgggagaaaggatttcatctggatgtagaagattatctctcaggagttctaattcttgccagtgaactgtcgaggctgtctgtcaacagcgtgactgctggagactactcccgacccctccacatctccaccttcatcaatgagctggattccggttttcgccttctcaacctgaaaaatgactccctgaggaagcgctacgacggattgaaatatgacgtgaagaaagtagaggaagtggtctatgatctctccatccggggctttaataaggagacggcagcagcttgtgttgaaaaataggaggctctccttgctcctggccttgctgacctcagcggttgccaggaaggggtgagcacagagtgcctcttacggtagttaggatgctcagttgctaaacactgcgctttattttcttaaccagttgtggtgtgagtatcagaattgaaacacttttttgggggtaaaaaatatagcctttacatggacagaattttttttgttgtttcagtgaatatgcctgtaattcagtgtatttcagttccgtcagaaagtgtaaatgttagtttcttggtaaagtccttttcttgcttaccttgactgttgatgtactgattgagaagttcattgtctcgtttgtgattcttccagatgtgatgcttgatattttctatatgcgagttagccatccacacccaggcatagcctggatacagtataaaaatagataattaaaaagatggttgccaagcaaggaaaacttattttatattttcccttccttattttaagcattgtgagtaaatcagatgttgaattcttttgccaagggaattatagctgcaggttctctctcactgccatcaaactgtaaaagattaaactgcgaagtcaagctcaacagattattttggaaagtttttgtattaagggatttagtaacatcattttgttttccaccaggcagggagtagggcttagtgttttaaaacacctctgctttctgatgttgccttaatattctgctattgcagcaattaaaaattgtcttcatgtacatttggaactaacacgtgatgtgatatattcctaaactatgaaacctttttcctagtagtcagctagatcatttgttctgggagtataaagccacccacgtaagttaataagcaaaatcctgactattatgttgttagagaaaaatgctttgctttgtctggaagaaagataaaatagtgaattataaataagtcaggccgggcgtggtggctcacacctgtaatcccagcacactgggaggccgaggcagggggactgcttgagctcaggagttcgagaccagcctgggcaacaaagtgagactccatctctatataaaaacaaaaaccacgaaagcacacacaaaataaatcagtgggatttggtaatgtgttttagagtaagaaatttcaggttgttggtgactatcccaacagtcatgttttaaatgtacagtttggggcaagtcatgtaaatactgttggtggtcttccccacacgccccaattttcaggtagtactaagagtatgtgccaggaaactcttgctattgaattgagatgattaaaatggtgacttaatccgtagttattttgcacccactgaaaggaaagtgctttccagaataatatgaagtatctaaaagtgtcaccttttcttgcctgatcaacaatttgggcttcctgtttgtacaaggggccatttggcatacctttcacagcttttatcaggccaagttaaaggctgactacattttttcatcatgaggaaagcagttgaaatgaggcatgagttactgtgcattgggattttagaacaattttcttgtgacagctctttttgtgaagttaggttcttaaaagtgcccatgatggtcacttaaaatgtgcagtaatagcactgccaggatcaagcatgaaaggcttttaaattagatcatcccacagacaatacgtttgataatagttttttcttttaacctctttaagtattgattctgcttgagaatattgaagtacttgccagaagttgtggatttcagttttaacaaatgctattaaagtggagaagcacactctggtcttggaattccatttgaggatttagaagtgtcatgtttataactattcagttgtgtttgttgctggcttgttgtaaagcaataaaatttttttggtctttttgtaagtgagtgtgctgctgtaagaaatctcccatgtgcataacaaattctgaatattttttgaggctaaagaagaccggggtgacaagcagatactgctgtgtaatggttacactaaccaaaagacaccagccactcagagttctatactgtaaagcgcagataacatttgtgtgttataccttgattggggaattaaaagtcatttaactgaagatgttgagaaacctgggctctggttttagtataccggaattacttttttccaattttagaaaatcaagcaggttagagaaaatagagatgaattaggggacactgtcttatggattcatttataagaagagaaccagccatatacacttggggagatttgccacatcttaaacttgaataatagtatgagtaatgcttaagggagtttaatagagaaggaaagctttggcagtgttttgagaacttaagtggctaaagagatgagacaaacatgcaggtcgctactggcatagtttcataattgtgtactcggaaattaaagtttgcttgtttcttggtctggatt

SEQ ID NO: 1602 - protein, 58 aa, Homosapiens
MCITNSEYFLRLKKTGVTSRYCCVMVTLTKRHQPLRVLYCKAQITFVCYTLIGELKVI

SEQ ID NO: 1603 - DNA, 3391 bp, Homosapiens
gtaagaccggggggacgcggcggtagcggcggccgttgcgattgattgcgctggttgcctgcggcgtccacttccttggccgcccttgctacactggctgattgttgtgcagccggcgccatgtctgtgagcgagatcttcgtggagctgcagggctttttggctgccgagcaggacatccgagaggaaatcagaaaagttgtacagagtttagaacaaacagctcgagagattttaactctactgcaaggggtccatcagggtgctgggtttcaggacagtaagttctttgttttgtatccaattatcagtctcttatttagagggagagtttctatccagaagacattttataatgaaaaatggctatcatgctttatgttccaaagaggtgtttgaaagctcgagaacattttggtacagtaaaaacacatctaacatctttgaagaccaaatttcctgctgaacagtattacagatttcatgagcactggaggtttgtgttgcagcgcttggtcttcttggcagcatttgttgtgtatttggaaacagaaacactagtgactcgagaagcagttacagaaattcttggcattgagccagatcgggagaaaggatttcatctggatgtagaagattatctctcaggagttctaattcttgccagtgaactgtcgaggctgtctgtcaacagcgtgactgctggagactactcccgacccctccacatctccaccttcatcaatgagctggattccggttttcgccttctcaacctgaaaaatgactccctgaggaagcgctacgacggattgaaatatgacgtgaagaaagtagaggaagtggtctatgatctctccatccggggctttaataaggagacggcagcagcttgtgttgaaaaataggaggctctccttgctcctggccttgctgacctcagcggttgccaggaaggggtgagcacagagtgcctcttacggtagttaggatgctcagttgctaaacactgcgctttattttcttaaccagttgtggtgtgagtatcagaattgaaacacttttttgggggtaaaaaatatagcctttacatggacagaattttttttgttgtttcagtgaatatgcctgtaattcagtgtatttcagttccgtcagaaagtgtaaatgttagtttcttggtaaagtccttttcttgcttaccttgactgttgatgtactgattgagaagttcattgtctcgtttgtgattcttccagatgtgatgcttgatattttctatatgcgagttagccatccacacccaggcatagcctggatacagtataaaaatagataattaaaaagatggttgccaagcaaggaaaacttattttatattttcccttccttattttaagcattgtgagtaaatcagatgttgaattcttttgccaagggaattatagctgcaggttctctctcactgccatcaaactgtaaaagattaaactgcgaagtcaagctcaacagattattttggaaagtttttgtattaagggatttagtaacatcattttgttttccaccaggcagggagtagggcttagtgttttaaaacacctctgctttctgatgttgccttaatattctgctattgcagcaattaaaaattgtcttcatgtacatttggaactaacacgtgatgtgatatattcctaaactatgaaacctttttcctagtagtcagctagatcatttgttctgggagtataaagccacccacgtaagttaataagcaaaatcctgactattatgttgttagagaaaaatgctttgctttgtctggaagaaagataaaatagtgaattataaataagtcaggccgggcgtggtggctcacacctgtaatcccagcacactgggaggccgaggcagggggactgcttgagctcaggagttcgagaccagcctgggcaacaaagtgagactccatctctatataaaaacaaaaaccacgaaagcacacacaaaataaatcagtgggatttggtaatgtgttttagagtaagaaatttcaggttgttggtgactatcccaacagtcatgttttaaatgtacagtttggggcaagtcatgtaaatactgttggtggtcttccccacacgccccaattttcaggtagtactaagagtatgtgccaggaaactcttgctattgaattgagatgattaaaatggtgacttaatccgtagttattttgcacccactgaaaggaaagtgctttccagaataatatgaagtatctaaaagtgtcaccttttcttgcctgatcaacaatttgggcttcctgtttgtacaaggggccatttggcatacctttcacagcttttatcaggccaagttaaaggctgactacattttttcatcatgaggaaagcagttgaaatgaggcatgagttactgtgcattgggattttagaacaattttcttgtgacagctctttttgtgaagttaggttcttaaaagtgcccatgatggtcacttaaaatgtgcagtaatagcactgccaggatcaagcatgaaaggcttttaaattagatcatcccacagacaatacgtttgataatagttttttcttttaacctctttaagtattgattctgcttgagaatattgaagtacttgccagaagttgtggatttcagttttaacaaatgctattaaagtggagaagcacactctggtcttggaattccatttgaggatttagaagtgtcatgtttataactattcagttgtgtttgttgctggcttgttgtaaagcaataaaatttttttggtctttttgtaagtgagtgtgctgctgtaagaaatctcccatgtgcataacaaattctgaatattttttgaggctaaagaagaccggggtgacaagcagatactgctgtgtaatggttacactaaccaaaagacaccagccactcagagttctatactgtaaagcgcagataacatttgtgtgttataccttgattggggaattaaaagtcatttaactgaagatgttgagaaacctgggctctggttttagtataccggaattacttttttccaattttagaaaatcaagcaggttagagaaaatagagatgaattaggggacactgtcttatggattcatttataagaagagaaccagccatatacacttggggagatttgccacatcttaaacttgaataatagtatgagtaatgcttaagggagtttaatagagaaggaaagctttggcagtgttttgagaacttaagtggctaaagagatgagacaaacatgcaggtcgctactggcatagtttcataattgtgtactcggaaattaaagtttgcttgtttcttggtctggatt

SEQ ID NO: 1604 - protein, 181 aa, Homosapiens; identical to SEQ ID NO: 1598

SEQ ID NO: 1605 - DNA, 1390 bp, Homosapiens
aaggaaaacttattttatattttcccttccttattttaagcattgtgagtaaatcagatgttgaattcttttgccaagggaattatagctgcaggttctctctcactgccatcaaactgtaaaagattaaactgcgaagtcaagctcaacagattattttggaaagtttttgtattaagggatttagtaacatcattttgttttccaccaggcagggagtagggcttagtgttttaaaacacctctgctttctgatgttgccttaatattctgctattgcagcaattaaaaattgtcttcatgtacatttggaactaacacgtgatgtgatatattcctaaactatgaaacctttttcctagtagtcagctagatcatttgttctgggagtataaagccacccacgtaagttaataagcaaaatcctgactattatgttgttagagaaaaatgctttgctttgtctggaagaaagataaaatagtgaattataaataagtcaggccgggcgtggtggctcacacctgtaatcccagcacactgggaggccgaggcagggggactgcttgagctcaggagttcgagaccagcctgggcaacaaagtgagactccatctctatataaaaacaaaaaccacgaaagcacacacaaaataaatcagtgggatttggtaatgtgttttagagtaagaaatttcaggttgttggtgactatcccaacagtcatgttttaaatgtacagtttggggcaagtcatgtaaatactgttggtggtcttccccacacgccccaattttcaggtagtactaagagtatgtgccaggaaactcttgctattgaattgagatgattaaaatggtgacttaatccgtagttattttgcacccactgaaaggaaagtgctttccagaataatatgaagtatctaaaagtgtcaccttttcttgcctgatcaacaatttgggcttcgaggaaagcagttgaaatgaggcatgagttactgtgcattgggattttagaacaattttcttgtgacagctctttttgtgaagttaggttcttaaaagtgcccatgatggtcacttaaaatgtgcagtaatagcactgccaggatcaagcatgaaaggcttttaaattagatcatcccacagacaatacgtttgataatagttttttcttttaacctctttaagtattgattctgcttgagaatattgaagtacttgccagaagttgtggatttcagttttaacaaatgctattaaagtggagaagcacactctggtcttggaattccatttgaggatttagaagtgtcatgtttataactattcagttgtgtttgttgctggcttgttgtaaagcaataaaatttttttggtctttttgt

SEQ ID NO: 1606 - protein, 54 aa, Homosapiens [sequence omitted]

SEQ ID NO: 1607 - DNA, 1949 bp, Homosapiens
aaggaaaacttattttatattttcccttccttattttaagcattgtgagtaaatcagatgttgaattcttttgccaagggaattatagctgcaggttctctctcactgccatcaaactgtaaaagattaaactgcgaagtcaagctcaacagattattttggaaagtttttgtattaagggatttagtaacatcattttgttttccaccaggcagggagtagggcttagtgttttaaaacacctctgctttctgatgttgccttaatattctgctattgcagcaattaaaaattgtcttcatgtacatttggaactaacacgtgatgtgatatattcctaaactatgaaacctttttcctagtagtcagctagatcatttgttctgggagtataaagccacccacgtaagttaataagcaaaatcctgactattatgttgttagagaaaaatgctttgctttgtctggaagaaagataaaatagtgaattataaataagtcaggccgggcgtggtggctcacacctgtaatcccagcacactgggaggccgaggcagggggactgcttgagctcaggagttcgagaccagcctgggcaacaaagtgagactccatctctatataaaaacaaaaaccacgaaagcacacacaaaataaatcagtgggatttggtaatgtgttttagagtaagaaatttcaggttgttggtgactatcccaacagtcatgttttaaatgtacagtttggggcaagtcatgtaaatactgttggtggtcttccccacacgccccaattttcaggtagtactaagagtatgtgccaggaaactcttgctattgaattgagatgattaaaatggtgacttaatccgtagttattttgcacccactgaaaggaaagtgctttccagaataatatgaagtatctaaaagtgtcaccttttcttgcctgatcaacaatttgggcttcgaggaaagcagttgaaatgaggcatgagttactgtgcattgggattttagaacaattttcttgtgacagctctttttgtgaagttaggttcttaaaagtgcccatgatggtcacttaaaatgtgcagtaatagcactgccaggatcaagcatgaaaggcttttaaattagatcatcccacagacaatacgtttgataatagttttttcttttaacctctttaagtattgattctgcttgagaatattgaagtacttgccagaagttgtggatttcagttttaacaaatgctattaaagtggagaagcacactctggtcttggaattccatttgaggatttagaagtgtcatgtttataactattcagttgtgtttgttgctggcttgttgtaaagcaataaaatttttttggtctttttgtaagtgagtgtgctgctgtaagaaatctcccatgtgcataacaaattctgaatattttttgaggctaaagaagaccggggtgacaagcagatactgctgtgtaatggttacactaaccaaaagacaccagccactcagagttctatactgtaaagcgcagataacatttgtgtgttataccttgattggggaattaaaagtcatttaactgaagatgttgagaaacctgggctctggttttagtataccggaattacttttttccaattttagaaaatcaagcaggttagagaaaatagagatgaattaggggacactgtcttatggattcatttataagaagagaaccagccatatacacttggggagatttgccacatcttaaacttgaataatagtatgagtaatgcttaagggagtttaatagagaaggaaagctttggcagtgttttgagaacttaagtggctaaagagatgagacaaacatgcaggtcgctactggcatagtttcataattgtgtactcggaaattaaagtttgcttgtttcttggtctggatt

SEQ ID NO: 1608 - protein, 58 aa, Homosapiens; identical to SEQ ID NO: 1602

SEQ ID NO: 1609 - DNA, 810 bp, Homosapiens
cccacactcagggtgagagggagattctgaagctttgtgtttcttgctagctagtcaaaggtgactaattcatgtggatagaaaaataatacatgccaaaagaaatttgaggaacaaattcagccctgagacaggtcacggaaacagccctccagtcttcctcaagaaatgtagactgaatcagcatttacccacccctggaaaaacgcaggagctgcgcattcctgggatctcagcagggcttttgggaagagcagaactgggctggagtcacggtttctgggctgactctagattttccccggcttttgccacctgtgatggctggagagtatctgaagatgacagccagtgtccttagcttgtgaagattggatgatggccggggccctcagaccccttggcccctccttaactgcaggtcttcaaaagcccaacacctgttcgtcatttctgtggcttcccagggagtcttactcttctgcttcaagctgctgggtttgactctgagcagtttctgtgcagccacaaagattcttatgtgagacacactgctgcttcagagtgctccaacccatctcccctgattaaacactaaccagggctgccacagcaaagtggctcaaatgggtgacgtcaacaacagatttactttctcatagttctggaggcaggtgtctaggatcaaggtggtggcaaggctattccttctgttgcctccctccttgccttgtggatgaccgtcttctccgcgtctttccaagatctctcctctgtgcatgtcagtgtccttgcttcctcttcttatga

SEQ ID NO: 1610 - protein, 42 aa, Homosapiens
MMAGALRPLGPSLTAGLQKPNTCSSFLWLPRESYSSASSCWV

SEQ ID NO: 1611 - DNA, 647 bp, Homosapiens
ggagattctgaagctttgtgtttcttgctagctagtcaaaggtgactaattcatgtggatagaaaaataatacatgccaaaagaaatttgaggaacaaattcagccctgagacaggtcacggaaacagccctccagtcttcctcaagaaatgtagactgaatcagcatttacccacccctggaaaaacgcaggagctgcgcattcctgggatctcagcagggcttttgggaagagcagaactgggctggagtcacggtttctgggctgactctagattttccccggcttttgccacctgtgatggctggagagtatctgaagatgacaggtgactccaggacctagggctccctccttaggagcagggtggggtaccaggttgcacacaggtgatgatgggggggggggtgggctgtccagcacacagcttggtgagcaggatttgagatactcaccccactttctggtgatacagaccccctactcccagtgacacaagatggttggacccacggctgatttactgctttactcccattctttatggggccagctttaatgagcacccaagcagaaatgcctttgactcctgcactgtgaataactgttattaataaaagggcaagctgcttgccatggaaccttg

SEQ ID NO: 1612 - protein, 95 aa, Homosapiens
LIHVDRKIIHAKRNLRNKFSPETGHGNSPPVFLKKCRLNQHLPTPGKTQELRIPGISAGLLGRAELGWSHGFWADSRFSPAFATCDGWRVSEDDR

SEQ ID NO: 1613 - DNA, 762 bp, Homosapiens
tctgaagctttgtgtttcttgctagctagtcaaaggtgactaattcatgtgcccgtgtgacaggagctacaaatatgttccatgaggtcctgagttgaccagcttctttcaagacgtaggtcagggcagtcacatagaagtatcatggtgaccttggggatggtgacagtggctaaaagacgttgagagagacagtgcaagagaggaaagcatcttcaccctggaccctaatatggagacacctttgactagctagcaagaaagataaaacttaaaatctccctctcttctgtcgaatgtgggcggaacacagtgattctgaagctgcggagagtgggaagccatccccagggaaatgtaaacaccaagagcaggatagaaaaataatacatgccaaaagaaatttgaggaacaaattcagccctgagacaggtcacggaaacagccctccagtcttcctcaagaaatgtagactgaatcagcatttacccacccctggaaaaacgcaggagctgcgcattcctgggatctcagcagggcttttgggaagagcagaactgggctggagtcacggtttctgggctgactctagattttccccggcttttgccacctgtgatggctggagagtatctgaagatgacagccagtgtccttagcttgtgaagattggatgatggccggggccctcagaccccttggcccctccttaactgcaggtcttcaaaagcccaacacctgttcgtcatttctgtggcttcc

SEQ ID NO: 1614 - protein, 120 aa, Homosapiens
MWAEHSDSEAAESGKPSPGKCKHQEQDRKIIHAKRNLRNKFSPETGHGNSPPVFLKKCRLNQHLPTPGKTQELRIPGISAGLLGRAELGWSHGFWADSRFSPAFATCDGWRVSEDDSQCP

SEQ ID NO: 1615 - DNA, 444 bp, Homosapiens
ggatagaaaaataatacatgccaaaagaaatttgaggaacaaattcagccctgagacaggtcacggaaacagccctccagtcttcctcaagaaatgtagactgaatcagcatttacccacccctggaaaaacgcaggagctgcgcattcctgggatctcagcagggcttttgggaagagcagaactgggctggagtcacggtttctgggctgactctagattttccccggcttttgccacctgtgatggctggagagtatctgaagatgacagaccccctactcccagtgacacaagatggttggacccacggctgatttactgctttactcccattctttatggggccagctttaatgagcacccaagcagaaatgcctttgactcctgcactgtgaataactgttattaataaaagggcaagctgcttgccatggaaccttg

SEQ ID NO: 1616 - protein, 136 aa, Homosapiens
DRKIIHAKRNLRNKFSPETGHGNSPPVFLKKCRLNQHLPTPGKTQELRIPGISAGLLGRAELGWSHGFWADSRFSPAFATCDGWRVSEDDRPPTPSDTRWLDPRLIYCFTPILYGASFNEHPSRNAFDSCTVNNCY

SEQ ID NO: 1617 - DNA, 485 bp, Homosapiens
atagaaaaataatacatgccaaaagaaatttgaggaacaaattcagccctgagacaggtcacggaaacagccctccagtcttcctcaagaaatgtagactgaatcagcatttacccacccctggaaaaacgcaggagctgcgcattcctgggatctcagcagggcttttgggaagagcagaactgggctggagtcacggtttctgggctgactctagattttccccggcttttgccacctgtgatggctggagagtatctgaagatgacagccagtgtccttagcttgtgaagattggatgatgggccatggagaggaactgggggtgatggctatggggcgctgggtttcttttgggttaataaacatgttctattattgattgcggtgaactttgcgaatgtgctaaaagccattgaattgtacactttcaatgggagaattgtatgtgatgtgaattatatcaataaaactgttaaataaag

SEQ ID NO: 1618 - protein, 93 aa, Homosapiens
RKIIHAKRNLRNKFSPETGHGNSPPVFLKKCRLNQHLPTPGKTQELRIPGISAGLLGRAELGWSHGFWADSRFSPAFATCDGWRVSEDDSQCP

SEQ ID NO: 1619 - DNA, 5085 bp, Homosapiens
gaagtcgaaacaaaacaagccgctaaggcggtggcggcggcgccgggacgggggaggggcgcgccggaaccggaaccgacctgcgccggaaccggaacggagagcgggttgccagggcccgaagagggctggctgcggcggtctcgctcggctgtccgttccttgctggagaatttggccacaaagagttgccaagatagctgggccaggaagaaagcgccgcagccctgacccagacgctgttgccgaccccggggcactctggctgtcgaccaagcggctcaagatgtctggcggggccagtgccacaggcccaaggagagggcccccaggactggaggacaccactagtaagaagaagcagaaggatcgagcaaaccaggagagcaaggatggagatcctaggaaagagacagggtctcgatatgttgcccaggctggtcttgaacctctggcctcaggtgatccttctgcctcagcctcccatgcagctgggatcacaggctcacgccaccgtacccggctgttctttccttcatcgtcagggtcagcatccactcctcaagaggagcagaccaaagagggagcttgtgaagaccctcatgatctcttggctactcccactccagagttgttgctcgattggaggcagagtgcagaagaggtgattgtcaagcttcgtgtgggagtaggtcccctgcagctggaggatgtagatgctgctttcacagatacagactgtgtggtgcggtttgcaggtggtcagcagtggggtggtgtcttctatgctgagataaaaagctcttgtgctaaagtgcaaacccgcaagggcagtctcctgcacctgacactgcccaaaaaggtgcctatgctcacgtggccctccctcctggttgaggctgatgaacagctttgcataccaccgctgaactcccaaacctgcctcctgggctcagaggagaatttagcccctttggcaggagagaaagcagtgcctcccgggaatgacccagtctctccagccatggtccggagcagaaaccctgggaaagatgactgtgccaaggaggagatggcagtggcagcagatgctgcaaccttggtggatgagcccgagtcgatggtgaacctggcgtttgtcaagaatgactcgtatgagaagggcccggattcagtggtggtgcacgtgtacgtgaaggagatctgcagggacacctcaagagtacttttccgtgagcaggacttcacgctcatcttccagaccagggatggaaacttcctgaggctgcacccgggctgtgggccccacaccaccttccgttggcaggtgaagctcaggaatctgattgagccagagcagtgcaccttctgtttcacggcttctcgcatcgacatctgccttcgtaagaggcagagtcagcgctgggggggcctggaggccccggctgcacgaggtgcagtgggtggtgcaaaggttgccgtgccgacaggtccaacccctctggattcaaccccaccaggaggtgctccccaccccctgacaggccaggaggaggcccgggctgtggagaaggataaatccaaggcacgatctgaggacacagggctagacagtgtggcaacccgcacacccatggagcatgtaaccccaaagccagagacacacctggcctcgcccaagcctacatgcatggtgcctcccatgccccacagcccagttagtggagacagcgtggaggaggaggaagaggaagagaagaaggtgtgtctgccaggcttcactggccttgtcaatttaggcaacacctgcttcatgaacagcgtcattcagtctctgtccaacactcgggaactccgggacttcttccatgaccgctcctttgaggctgagatcaactacaacaacccactagggactggtgggcgtctggccattggctttgccgtgctgcttcgggcgctgtggaagggcacccaccatgccttccagccttccaagttgaaggccattgtggcgagtaaggccagccagttcacaggctatgcacagcatgatgcccaggagttcatggctttcctgctggatgggctgcacgaggacctgaatcgcattcagaacaagccctacacagagaccgtggattcagatgggcggcccgatgaggtggtagctgaggaagcatggcagcggcacaagatgaggaatgactctttcatcgtggacctatttcaggggcagtacaagtcgaagctggtgtgccctgtgtgtgccaaggtctccatcacttttgacccgtttctttatctgccggtgcccttgccacaaaagcaaaaggttctccctgtcttttattttgcccgagagccccacagcaagcccatcaagttcctggtgagcgtcagcaaggagaactccactgcgagcgaagtattggactccctctctcagagtgttcatgtgaagcctgagaacctgcgtttggcggaggtaattaagaatcgttttcatcgtgtgttcctaccctcccactcactggacactgtgtccccatctgatacgctcctctgctttgagctgctatcctcagagttggctaaggagcgggtagtggtgctagaggtgcaacagcgcccccaggtgcccagcgtccccatctccaagtgtgcagcctgccagcggaagcaacagtcggaggatgaaaagctgaagcgctgtacccggtgctaccgtgtgggctactgcaaccagctctgccagaaaacccactggcctgaccacaagggcctctgccgacctgagaacattggctaccccttcctggtcagtgtacctgcctcacgcctcacttatgcccgcctcgctcagttgctagagggctatgcccggtactctgtgagtgtattccagccaccctttcagccaggccgcatggccttggagtctcagagccctggctgcaccacactgctctccacaggttccctggaggctggggacagcgagagagaccccattcagccacctgagctccagctggtgacccctatggctgagggggacacagggcttccccgggtgtgggcagcccctgaccggggtcctgtgcccagcaccagtggaatttcttctgagatgctggccagtgggcccattgaggttggctccttgccagctggcgagagggtgtcccgacccgaagctgctgtgcctgggtaccagcatccaagtgaagctatgaatgcccacacaccccagttcttcatctataaaattgattcatccaaccgagagcagcggctagaggacaaaggagacaccccactggagctgggtgacgactgtagcctggctctcgtctggcggaacaatgagcgcttgcaggagtttgtgttggtagcctccaaggagctggaatgtgctgaggatccaggctctgccggtgaggctgcccgggccggccacttcaccctggaccagtgcctcaacctcttcacacggcctgaggtgctggcacccgaggaggcctggtactgcccacagtgcaaacagcaccgtgaggcctccaagcagctgttgctatggcgcctgccaaatgttctcatcgtgcagctcaagcgcttctcctttcgtagttttatctggcgtgacaagatcaatgacttggtggagttccctgttaggaacctggacctgagcaagttctgcattggtcagaaagaggagcagctgcccagctacgatctatatgctgtcatcaaccactatggaggcatgattggtggccactacactgcctgtgcacgcctgcccaatgatcgtagcagtcagcgcagtgacgtgggctggcgcttgtttgatgacagcacagtgacaacggtagacgagagccaggttgtgacgcgttatgcctatgtactcttctaccgccggcggaactctcctgtggagaggccccccagggcaggtcactctgagcaccacccagacctaggccctgcagctgaggctgctgccagccaggcttcccggatttggcaggagctggaggctgaggaggagccggtgcctgaggggtctgggcccctgggtccctgggggccccaagactgggtgggccccctaccacgtggccctaccacaccagatgagggctgcctccggtactttgtcctgggcaccgtggcggctttggtggccctcgtgctcaacgtgttctatcctctggtatcccagagtcgctggagatgagctcgcctgcaggcagctgctgtgagctggcctacctgcctgccccaggccatgcctgcctttgttgtggggaacacctctgggctttgggcctcagcttatgcatctggtgggagagggtggggaggttgtggcccctgcaggggcagagtatcctagggtgtgtatccatctggctgtctgtccattcatcctgctgctctgacccttggcctcaggcttggccctgcccaagctacttcctgtacttaaaagtgttaataaaaccagactattcaggcccaatctcgtctctctgtctcaacgccgctgctgtctgcgcctgccttgggaccctcccttgggtgccagggctccaagccagcacccccgggatgccaggcggcatgctgggcagcccccaacccctgtcctcgtattctgttgcagggactaggccctggccaggcccccgaggtggcccccacgcggacagcccctgaacgcttcgccccccctgtggatcggccagcccccacctacagcaacatggaggaggtggattagcaggtccctggctgatgggggggactgggtttgggacacccacacagagggccagctccttgccgcttctccttctctaacccagaggacactggctctgtcaatgggaagctgaggggtatgatttgggtgtggagacctctcaggttgggacttcttgtcagcttggacccctgaccagtgggctttggcttctccagccgcctccagtgctgcgtgatttgattctgttgtaccttcaattcttctgacccgcattataaacattataattttattctaaaaattgt

SEQ ID NO: 1620 - protein, 1320 aa, Homosapiens
MSGGASATGPRRGPPGLEDTTSKKKQKDRANQESKDGDPRKETGSRYVAQAGLEPLASGDPSASASHAAGITGSRHRTRLFFPSSSGSASTPQEEQTKEGACEDPHDLLATPTPELLLDWRQSAEEVIVKLRVGVGPLQLEDVDAAFTDTDCVVRFAGGQQWGGVFYAEIKSSCAKVQTRKGSLLHLTLPKKVPMLTWPSLLVEADEQLCIPPLNSQTCLLGSEENLAPLAGEKAVPPGNDPVSPAMVRSRNPGKDDCAKEEMAVAADAATLVDEPESMVNLAFVKNDSYEKGPDSVVVHVYVKEICRDTSRVLFREQDFTLIFQTRDGNFLRLHPGCGPHTTFRWQVKLRNLIEPEQCTFCFTASRIDICLRKRQSQRWGGLEAPAARGAVGGAKVAVPTGPTPLDSTPPGGAPHPLTGQEEARAVEKDKSKARSEDTGLDSVATRTPMEHVTPKPETHLASPKPTCMVPPMPHSPVSGDSVEEEEEEEKKVCLPGFTGLVNLGNTCFMNSVIQSLSNTRELRDFFHDRSFEAEINYNNPLGTGGRLAIGFAVLLRALWKGTHHAFQPSKLKAIVASKASQFTGYAQHDAQEFMAFLLDGLHEDLNRIQNKPYTETVDSDGRPDEVVAEEAWQRHKMRNDSFIVDLFQGQYKSKLVCPVCAKVSITFDPFLYLPVPLPQKQKVLPVFYFAREPHSKPIKFLVSVSKENSTASEVLDSLSQSVHVKPENLRLAEVIKNRFHRVFLPSHSLDTVSPSDTLLCFELLSSELAKERVVVLEVQQRPQVPSVPISKCAACQRKQQSEDEKLKRCTRCYRVGYCNQLCQKTHWPDHKGLCRPENIGYPFLVSVPASRLTYARLAQLLEGYARYSVSVFQPPFQPGRMALESQSPGCTTLLSTGSLEAGDSERDPIQPPELQLVTPMAEGDTGLPRVWAAPDRGPVPSTSGISSEMLASGPIEVGSLPAGERVSRPEAAVPGYQHPSEAMNAHTPQFFIYKIDSSNREQRLEDKGDTPLELGDDCSLALVWRNNERLQEFVLVASKELECAEDPGSAGEAARAGHFTLDQCLNLFTRPEVLAPEEAWYCPQCKQHREASKQLLLWRLPNVLIVQLKRFSFRSFIWRDKINDLVEFPVRNLDLSKFCIGQKEEQLPSYDLYAVINHYGGMIGGHYTACARLPNDRSSQRSDVGWRLFDDSTVTTVDESQVVTRYAYVLFYRRRNSPVERPPRAGHSEHHPDLGPAAEAAASQASRIWQELEAEEEPVPEGSGPLGPWGPQDWVGPLPRGPTTPDEGCLRYFVLGTVAALVALVLNVFYPLVSQSRWR

SEQ ID NO: 1621 - DNA, 3730 bp, Homosapiens
gggctaagcaggaggcccggaaccagaagcgggcccagggccgtggtgaggtaggcgcaggggctggccccggggcccaggcagggcccagcgccaagagggctgtgcatctctgcagagggccagagggggacgggtccagggatgaccctggaccccggggtgatgccccacccttcgtggctgacccagccacccaggttgaggctgatgaacagctttgcataccaccgctgaactcccaaacctgcctcctgggctcagaggagaatttagcccctttggcaggagagaaagcagtgcctcccgggaatgacccagtctctccagccatggtccggagcagaaaccctgggaaagatgactgtgccaaggaggagatggcagtggcagcagatgctgcaaccttggtggatgagcccgagtcgatggtgaacctggcgtttgtcaagaatgactcgtatgagaagggcccggattcagtggtggtgcacgtgtacgtgaaggagatctgcagggacacctcaagagtacttttccgtgagcaggacttcacgctcatcttccagaccagggatggaaacttcctgaggctgcacccgggctgtgggccccacaccaccttccgttggcaggtgaagctcaggaatctgattgagccagagcagtgcaccttctgtttcacggcttctcgcatcgacatctgccttcgtaagaggcagagtcagcgctgggggggcctggaggccccggctgcacgaggtgcagtgggtggtgcaaaggttgccgtgccgacaggtccaacccctctggattcaaccccaccaggaggtgctccccaccccctgacaggccaggaggaggcccgggctgtggagaaggataaatccaaggcacgatctgaggacacagggctagacagtgtggcaacccgcacacccatggagcatgtaaccccaaagccagagacacacctggcctcgcccaagcctacatgcatggtgcctcccatgccccacagcccagttagtggagacagcgtggaggaggaggaagaggaagagaagaaggtgtgtctgccaggcttcactggccttgtcaatttaggcaacacctgcttcatgaacagcgtcattcagtctctgtccaacactcgggaactccgggacttcttccatgaccgctcctttgaggctgagatcaactacaacaacccactagggactggtgggcgtctggccattggctttgccgtgctgcttcgggcgctgtggaagggcacccaccatgccttccagccttccaagttgaaggccattgtggcgagtaaggccagccagttcacaggctatgcacagcatgatgcccaggagttcatggctttcctgctggatgggctgcacgaggacctgaatcgcattcagaacaagccctacacagagaccgtggattcagatgggcggcccgatgaggtggtagctgaggaagcatggcagcggcacaagatgaggaatgactctttcatcgtggacctatttcaggggcagtacaagtcgaagctggtgtgccctgtgtgtgccaaggtctccatcacttttgacccgtttctttatctgccggtgcccttgccacaaaagcaaaaggttctccctgtcttttattttgcccgagagccccacagcaagcccatcaagttcctggtgagcgtcagcaaggagaactccactgcgagcgaagtattggactccctctctcagagtgttcatgtgaagcctgagaacctgcgtttggcggaggtaattaagaatcgttttcatcgtgtgttcctaccctcccactcactggacactgtgtccccatctgatacgctcctctgctttgagctgctatcctcagagttggctaaggagcgggtagtggtgctagaggtgcaacagcgcccccaggtgcccagcgtccccatctccaagtgtgcagcctgccagcggaagcaacagtcggaggatgaaaagctgaagcgctgtacccggtgctaccgtgtgggctactgcaaccagctctgccagaaaacccactggcctgaccacaagggcctctgccgacctgagaacattggctaccccttcctggtcagtgtacctgcctcacgcctcacttatgcccgcctcgctcagttgctagagggctatgcccggtactctgtgagtgtattccagccaccctttcagccaggccgcatggccttggagtctcagagccctggctgcaccacactgctctccacaggttccctggaggctggggacagcgagagagaccccattcagccacctgagctccagctggtgacccctatggctgagggggacacagggcttccccgggtgtgggcagcccctgaccggggtcctgtgcccagcaccagtggaatttcttctgagatgctggccagtgggcccattgaggttggctccttgccagctggcgagagggtgtcccgacccgaagctgctgtgcctgggtaccagcatccaagtgaagctatgaatgcccacacaccccagttcttcatctataaaattgattcatccaaccgagagcagcggctagaggacaaaggagacaccccactggagctgggtgacgactgtagcctggctctcgtctggcggaacaatgagcgcttgcaggagtttgtgttggtagcctccaaggagctggaatgtgctgaggatccaggctctgccggtgaggctgcccgggccggccacttcaccctggaccagtgcctcaacctcttcacacggcctgaggtgctggcacccgaggaggcctggtactgcccacagtgcaaacagcaccgtgaggcctccaagcagctgttgctatggcgcctgccaaatgttctcatcgtgcagctcaagcgcttctcctttcgtagttttatctggcgtgacaagatcaatgacttggtggagttccctgttaggaacctggacctgagcaagttctgcattggtcagaaagaggagcagctgcccagctacgatctatatgctgtcatcaaccactatggaggcatgattggtggccactacactgcctgtgcacgcctgcccaatgatcgtagcagtcagcgcagtgacgtgggctggcgcttgtttgatgacagcacagtgacaacggtagacgagagccaggttgtgacgcgttatgcctatgtactcttctaccgccggcggaactctcctgtggagaggccccccagggcaggtcactctgagcaccacccagacctaggccctgcagctgaggctgctgccagccagggactaggccctggccaggcccccgaggtggcccccacgcggacagcccctgaacgcttcgccccccctgtggatcggccagcccccacctacagcaacatggaggaggtggattagcaggtccctggctgatgggggggactgggtttgggacacccacacagagggccagctccttgccgcttctccttctctaacccagaggacactggctctgtcaatgggaagctgaggggtatgatttgggtgtggagacctctcaggttgggacttcttgtcagcttggacccctgaccagtgggctttggcttctccagccgcctccagtgctgcgtgatttgattctgttgtaccttcaattcttctgacccgcattataaacattataattttattctaaa

SEQ ID NO: 1622 - protein, 1037 aa, Homosapiens [sequence omitted]

SEQ ID NO: 1623 - DNA, 4532 bp, Homosapiens
gaagtcgaaacaaaacaagccgctaaggcggtggcggcggcgccgggacgggggaggggcgcgccggaaccggaaccgacctgcgccggaaccggaacggagagcgggttgccagggcccgaagagggctggctgcggcggtctcgctcggctgtccgttccttgctggagaatttggccacaaagagttgccaagatagctgggccaggaagaaagcgccgcagccctgacccagacgctgttgccgaccccggggcactctggctgtcgaccaagcggctcaagatgtctggcggggccagtgccacaggcccaaggagagggcccccaggactggaggacaccactagtaagaagaagcagaaggatcgagcaaaccaggagagcaaggatggagatcctaggaaagagacagggtctcgatatgttgcccaggctggtcttgaacctctggcctcaggtgatccttctgcctcagcctcccatgcagctgggatcacaggctcacgccaccgtacccggctgttctttccttcatcgtcagggtcagcatccactcctcaagaggagcagaccaaagagggagcttgtgaagaccctcatgatctcttggctactcccactccagagttgttgctcgattggaggcagagtgcagaagaggtgattgtcaagcttcgtgtgggagtaggtcccctgcagctggaggatgtagatgctgctttcacagatacagactgtgtggtgcggtttgcaggtggtcagcagtggggtggtgtcttctatgctgagataaaaagctcttgtgctaaagtgcaaacccgcaagggcagtctcctgcacctgacactgcccaaaaaggtgcctatgctcacgtggccctccctcctggttgaggctgatgaacagctttgcataccaccgctgaactcccaaacctgcctcctgggctcagaggagaatttagcccctttggcaggagagaaagcagtgcctcccgggaatgacccagtctctccagccatggtccggagcagaaaccctgggaaagatgactgtgccaaggaggagatggcagtggcagcagatgctgcaaccttggtggatgagcccgagtcgatggtgaacctggcgtttgtcaagaatgactcgtatgagaagggcccggattcagtggtggtgcacgtgtacgtgaaggagatctgcagggacacctcaagagtacttttccgtgagcaggacttcacgctcatcttccagaccagggatggaaacttcctgaggctgcacccgggctgtgggccccacaccaccttccgttggcaggtgaagctcaggaatctgattgagccagagcagtgcaccttctgtttcacggcttctcgcatcgacatctgccttcgtaagaggcagagtcagcgctgggggggcctggaggccccggctgcacgaggtgcagtgggtggtgcaaaggttgccgtgccgacaggtccaacccctctggattcaaccccaccaggaggtgctccccaccccctgacaggccaggaggaggcccgggctgtggagaaggataaatccaaggcacgatctgaggacacagggctagacagtgtggcaacccgcacacccatggagcatgtaaccccaaagccagagacacacctggcctcgcccaagcctacatgcatggtgcctcccatgccccacagcccagttagtggagacagcgtggaggaggaggaagaggaagagaagaaggtgtgtctgccaggcttcactggccttgtcaatttaggcaacacctgcttcatgaacagcgtcattcagtctctgtccaacactcgggaactccgggacttcttccatgaccgctcctttgaggctgagatcaactacaacaacccactagggactggtgggcgtctggccattggctttgccgtgctgcttcgggcgctgtggaagggcacccaccatgccttccagccttccaagttgaaggccattgtggcgagtaaggccagccagttcacaggctatgcacagcatgatgcccaggagttcatggctttcctgctggatgggctgcacgaggacctgaatcgcattcagaacaagccctacacagagaccgtggattcagatgggcggcccgatgaggtggtagctgaggaagcatggcagcggcacaagatgaggaatgactctttcatcgtggacctatttcaggggcagtacaagtcgaagctggtgtgccctgtgtgtgccaaggtctccatcacttttgacccgtttctttatctgccggtgcccttgccacaaaagcaaaaggttctccctgtcttttattttgcccgagagccccacagcaagcccatcaagttcctggtgagcgtcagcaaggagaactccactgcgagcgaagtattggactccctctctcagagtgttcatgtgaagcctgagaacctgcgtttggcggaggtaattaagaatcgttttcatcgtgtgttcctaccctcccactcactggacactgtgtccccatctgatacgctcctctgctttgagctgctatcctcagagttggctaaggagcgggtagtggtgctagaggtgcaacagcgcccccaggtgcccagcgtccccatctccaagtgtgcagcctgccagcggaagcaacagtcggaggatgaaaagctgaagcgctgtacccggtgctaccgtgtgggctactgcaaccagctctgccagaaaacccactggcctgaccacaagggcctctgccgacctgagaacattggctaccccttcctggtcagtgtacctgcctcacgcctcacttatgcccgcctcgctcagttgctagagggctatgcccggtactctgtgagtgtattccagccaccctttcagccaggccgcatggccttggagtctcagagccctggctgcaccacactgctctccacaggttccctggaggctggggacagcgagagagaccccattcagccacctgagctccagctggtgacccctatggctgagggggacacagggcttccccgggtgtgggcagcccctgaccggggtcctgtgcccagcaccagtggaatttcttctgagatgctggccagtgggcccattgaggttggctccttgccagctggcgagagggtgtcccgacccgaagctgctgtgcctgggtaccagcatccaagtgaagctatgaatgcccacacaccccagttcttcatctataaaattgattcatccaaccgagagcagcggctagaggacaaaggagacaccccactggagctgggtgacgactgtagcctggctctcgtctggcggaacaatgagcgcttgcaggagtttgtgttggtagcctccaaggagctggaatgtgctgaggatccaggctctgccggtgaggctgcccgggccggccacttcaccctggaccagtgcctcaacctcttcacacggcctgaggtgctggcacccgaggaggcctggtactgcccacagtgcaaacagcaccgtgaggcctccaagcagctgttgctatggcgcctgccaaatgttctcatcgtgcagctcaagcgcttctcctttcgtagttttatctggcgtgacaagatcaatgacttggtggagttccctgttaggaacctggacctgagcaagttctgcattggtcagaaagaggagcagctgcccagctacgatctatatgctgtcatcaaccactatggaggcatgattggtggccactacactgcctgtgcacgcctgcccaatgatcgtagcagtcagcgcagtgacgtgggctggcgcttgtttgatgacagcacagtgacaacggtagacgagagccaggttgtgacgcgttatgcctatgtactcttctaccgccggcggaactctcctgtggagaggccccccagggcaggtcactctgagcaccacccagacctaggccctgcagctgaggctgctgccagccaggcttcccggatttggcaggagctggaggctgaggaggagccggtgcctgaggggtctgggcccctgggtccctgggggccccaagactgggtgggccccctaccacgtggccctaccacaccagatgagggctgcctccggtactttgtcctgggcaccgtggcggctttggtggccctcgtgctcaacgtgttctatcctctggtatcccagagtcgctggagatgagctcgcctgcaggcagctgctgtgagctggcctacctgcctgccccaggccatgcctgcctttgttgtggggaacacctctgggctttgggcctcagcttatgcatctggtgggagagggtggggaggttgtggcccctgcaggggcagagtatcctagggtgtgtatccatctggctgtctgtccattcatcctgctgctctgacccttggcctcaggcttggccctgcccaagctacttcctgtacttaaaagtgttaataaaaccagactattcaggccc

SEQ ID NO: 1624 - protein, 1320 aa, Homosapiens; identical to SEQ ID NO: 1620

SEQ ID NO: 1625 - DNA, 1053 bp, Homosapiens
gaagtcgaaacaaaacaagccgctaaggcggtggcggcggcgccgggacgggggaggggcgcgccggaaccggaaccgacctgcgccggaaccggaacggagagcgggttgccagggcccgaagagggctggctgcggcggtctcgctcggctgtccgttccttgctggagaatttggccacaaagagttgccaagatagctgggccaggaagaaagcgccgcagccctgacccagacgctgttgccgaccccggggcactctggctgtcgaccaagcggctcaagatgtctggcggggccagtgccacaggcccaaggagagggcccccaggactggaggacaccactagtaagaagaagcagaaggatcgagcaaaccaggagagcaaggatggagatcctaggaaagagacagggtctcgatatgttgcccaggctggtcttgaacctctggcctcaggtgatccttctgcctcagcctcccatgcagctgggatcacaggctcacgccaccgtacccggctgttctttccttcatcgtcagggtcagcatccactcctcaagaggagcagaccaaagagggagcttgtgaagaccctcatgatctcttggctactcccactccagagttgttgctcgattggaggcagagtgcagaagaggtgattgtcaagcttcgtgtgggagtaggtcccctgcagctggaggatgtagatgctgctttcacagatacagactgtgtggtgcggtttgcaggtggtcagcagtggggtggtgtcttctatgctgagataaaaagctcttgtgctaaagtgcaaacccgcaagggcagtctcctgcacctgacactgcccaaaaaggtgcctatgctcacgtggccctccctcctgaagaaacctctagggacccaggagctggtgccggggctgcggtgccaggagaatgggcaggaactgtctcccattgccctggagccaggccctgagccccaccgggctaagcaggaggcccggaaccagaagcgggcccagggccgtggtgaggtaggcgc

SEQ ID NO: 1626 - protein, 254 aa, Homosapiens
MSGGASATGPRRGPPGLEDTTSKKKQKDRANQESKDGDPRKETGSRYVAQAGLEPLASGDPSASASHAAGITGSRHRTRLFFPSSSGSASTPQEEQTKEGACEDPHDLLATPTPELLLDWRQSAEEVIVKLRVGVGPLQLEDVDAAFTDTDCVVRFAGGQQWGGVFYAEIKSSCAKVQTRKGSLLHLTLPKKVPMLTWPSLLKKPLGTQELVPGLRCQENGQELSPIALEPGPEPHRAKQEARNQKRAQGRGEV

SEQ ID NO: 1627 - DNA, 705 bp, Homosapiens
ccggggggcagtggctgacacacgggacacagagcagaccctgtaccaggtacaggagaggatggcaggtgcagagcgggcactgagctctgcaggtgaaagggctcggcagttggatgctctcctggaggctctgaaattgaaacgggcaggaaatagtctggcagcctctacagcagaagaaacggcaggcagtgcccagggtcgtgcccaggaggctgagcagctgctacgcggtcctctgggtgatcagtaccagacggtgaaggccctagctgagcgcaaggcccaaggtgtgctggctgcacaggcaagggcagaacaactgcgggatgaggctcgggacctgttgcaagccgctcaggacaagctgcagcggctacagggtaagaaatggggcaccagagacacaagactgcgggaaaccccccctaaactgacacctgcccttcctagaattggaaggcacctatgaggaaaatgagcgggcactggagagtaaggcagcccagttggacgggttggaggccaggatgcgcagcgtgcttcaagccatcaacttgcaggtgcagatctacaacacctgccagtgacccctgcccaaggcctaccccagttcctagcactgccccacatgcatgtctgcctatgcactgaagagctcttggcccggcagggcccccaataaaccagtgtgaaccccca

SEQ ID NO: 1628 - protein, 137 aa, Homosapiens
MAGAERALSSAGERARQLDALLEALKLKRAGNSLAASTAEETAGSAQGRAQEAEQLLRGPLGDQYQTVKALAERKAQGVLAAQARAEQLRDEARDLLQAAQDKLQRLQGKKWGTRDTRLRETPPKLTPALPRIGRHL

SEQ ID NO: 1629 - DNA, 1459 bp, Homosapiens
gagctgcagcgggcactggcagaaggtggtagcatcctcagcagagtggctgagactcgtcggcaggcaagcgaggcacagcagcgggcccaggcagccctggacaaggctaatgcttccaggggacaggtggaacaggccaaccaggaacttcaagaacttatccagagtgtgaaggacttcctcaaccgtgagcctcccacgtgtcccaggccatgtggttgtcccctttggcaactcccggtgtctgtatctcccttggttcatacttgagcctcagggactacactggattagtgtttatgatcccttgactggctcctgagttattgcccatatgtggtcccaggtccatgttcttgagtctgagccccttgtatagtccctgtccttgtgattatatccttatgcctggtaacaaacccctatcccatgtacatgtcctgagtccataccccaaaactgtatcctcatgcccatgctggagaatctatgttcttaagttcttgctgtgtccctatagaggagggggctgatcctgatagcattgaaatggtggccacacgggtgctagagctctccatcccagcttcagctgagcagatccagcacctggcgggtgcgattgcagagcgagtccggagcctggcagatgtggatgcgatcctggcacgtactgtaggagatgtgcgtcgtgccgagcagctactgcaggatgcacggcgggcaaggagctgggctgaggatgagaaacagaaggcagagacagtacaggcagcactggaggaggcccagcgggcacagggtattgcccagggtgccatccggggggcagtggctgacacacgggacacagagcagaccctgtaccaggtacaggagaggatggcaggtgcagagcgggcactgagctctgcaggtgaaagggctcggcagttggatgctctcctggaggctctgaaattgaaacgggcaggaaatagtctggcagcctctacagcagaagaaacggcaggcagtgcccagggtcgtgcccaggaggctgagcagctgctacgcggtcctctgggtgatcagtaccagacggtgaaggccctagctgagcgcaaggcccaaggtgtgctggctgcacaggcaagggcagaacaactgcgggatgaggctcgggacctgttgcaagccgctcaggacaagctgcagcggctacaggaattggaaggcacctatgaggaaaatgagcgggcactggagagtaaggcagcccagttggacgggttggaggccaggatgcgcagcgtgcttcaagccatcaacttgcaggtgcagatctacaacacctgccagtgacccctgcccaaggcctaccccagttcctagcactgccccacatgcatgtctgcctatgcactgaagagctcttggcccggcagggcccccaataaaccagtgtgaaccccca

SEQ ID NO: 1630 - protein, 284 aa, Homosapiens [sequence omitted]

SEQ ID NO: 1631 - DNA, 5674 bp, Homosapiens
ccgcccggtgttgcgctccttcccagaatccgctccggcctttccttcctgccgcgattcccaactttgctcaaagtcgctggactctaagctgtcggagggaccgctggacagacctgggaactgacagagggcctggagggaaacaggccaaagacccacaggatggagctgacctcaagggaaagagggaggggacagcctctgccctgggaacttcgactgggcctactgctaagcgtgctggctgccacactggcacaggcccctgccccggatgtgcctggctgttccaggggaagctgctaccccgccacgggcgacctgctggtgggccgagctgacagactgactgcctcatccacttgtggcctgaatggcccccagccctactgcatcgtcagtcacctgcaggacgaaaagaagtgcttcctttgtgactcccggcgccccttctctgctagagacaacccacacagccatcgcatccagaatgtagtcaccagctttgcaccacagcggcgggcagcctggtggcagtcagagaatggtatccctgcggtcaccatccagctggacctggaggctgagtttcatttcacacacctcattatgaccttcaagacatttcgccctgctgccatgctggtggaacgctcagcagactttggccgcacctggcatgtgtaccgatatttctcctatgactgtggggctgacttcccaggagtcccactagcacccccacggcactgggatgatgtagtctgtgagtcccgctactcagagattgagccatccactgaaggcgaggtcatctatcgtgtgctggaccctgccatccctatcccagacccctacagctcacggattcagaacctgttgaagatcaccaacctacgggtgaacctgactcgtctacacacgttgggagacaacctactcgacccacggagggagatccgagagaagtactactatgccctctatgagctggttgtacgtggcaactgcttctgctacggacacgcctcagagtgtgcacccgccccaggggcaccagcccatgctgagggcatggtgcacggagcttgcatctgcaaacacaacacacgtggcctcaactgcgagcagtgtcaggatttctatcgtgacctgccctggcgtccggctgaggacggccatagtcatgcctgtaggaagtgtgagtgccatgggcacacccacagctgccacttcgacatggccgtatacctggcatctggcaatgtgagtggaggtgtgtgtgatggatgtcagcataacacagctgggcgccactgtgagctctgtcggcccttcttctaccgtgacccaaccaaggacctgcgggatccggctgtgtgccgctcctgtgattgtgaccccatgggttctcaagacggtggtcgctgtgattcccatgatgaccctgcactgggactggtctccggccagtgtcgctgcaaagaacatgtggtgggcactcgctgccagcaatgccgtgatggcttctttgggctcagcatcagtgaccgtctgggctgccggcgatgtcaatgtaatgcacggggcacagtgcctgggagcactccttgtgaccccaacagtggatcctgttactgcaaacgtctagtgactggacgtggatgtgaccgctgcctgcctggccactggggcctgagccacgacctgctcggctgccgcccctgtgactgcgacgtgggtggtgctttggatccccagtgtgatgagggcacaggtcaatgccactgccgccagcacatggttgggcgacgctgtgagcaggtgcaacctggctacttccggcccttcctggaccacctaatttgggaggctgaggacacccgagggcaggtgctcgatgtggtggagcgcctggtgacccccggggaaactccatcctggactggctcaggcttcgtgcggctacaggaaggtcagaccctggagttcctggtggcctctgtgccgaaggctatggactatgacctgctgctgcgcttagagccccaggtccctgagcaatgggcagagttggaactgattgtgcagcgtccagggcctgtgcctgcccacagcctgtgtgggcatttggtgcccaaggatgatcgcatccaagggactctgcaaccacatgccaggtacttgatatttcctaatcctgtctgccttgagcctggtatctcctacaagctgcatctgaagctggtacggacagggggaagtgcccagcctgagactccctactctggacctggcctgctcattgactcgctggtgctgctgccccgtgtcctggtgctagagatgtttagtgggggtgatgctgctgccctggagcgccaggccacctttgaacgctaccaatgccatgaggagggtctggtgcccagcaagacttctccctctgaggcctgcgcacccctcctcatcagcctgtccaccctcatctacaatggtgccctgccatgtcagtgcaaccctcaaggttcactgagttctgagtgcaaccctcatggtggtcagtgcctgtgcaagcctggagtggttgggcgccgctgtgacctctgtgcccctggctactatggctttggccccacaggctgtcaagcctgccagtgcagccacgagggggcactcagcagtctctgtgaaaagaccagtgggcaatgtctctgtcgaactggtgcctttgggcttcgctgtgaccgctgccagcgtggccagtggggattccctagctgccggccatgtgtctgcaatgggcatgcagatgagtgcaacacccacacaggcgcttgcctgggctgccgtgatcacacagggggtgagcactgtgaaaggtgcattgctggtttccacggggacccacggctgccatatgggggccagtgccggccctgtccctgtcctgaaggccctgggagccaacggcactttgctacttcttgccaccaggatgaatattcccagcagattgtgtgccactgccgggcaggctatacggggctgcgatgtgaagcttgtgcccctgggcactttggggacccatcaaggccaggtggccggtgccaactgtgtgagtgcagtgggaacattgacccaatggatcctgatgcctgtgacccccacacggggcaatgcctgcgctgtttacaccacacagagggtccacactgtgcccactgcaagcctggcttccatgggcaggctgcccgacagagctgtcaccgctgcacatgcaacctgctgggcacaaatccgcagcagtgcccatctcctgaccagtgccactgtgatccaagcagtgggcagtgcccatgcctccccaatgtccagggccctagctgtgaccgctgtgcccccaacttctggaacctcaccagtggccatggttgccagccttgtgcctgccacccaagccgggccagaggccccacctgcaacgagttcacagggcagtgccactgccgtgccggctttggagggcggacttgttctgagtgccaagagctccactggggagaccctgggttgcagtgccatgcctgtgattgtgactctcgtggaatagatacacctcagtgtcaccgcttcacaggtcactgcagctgccgcccaggggtgtctggtgtgcgctgtgaccagtgtgcccgtggcttctcaggaatctttcctgcctgccatccctgccatgcatgcttcggggattgggaccgagtggtgcaggacttggcagcccgtacacagcgcctagagcagcgggcgcaggagttgcaacagacgggtgtgctgggtgcctttgagagcagcttctggcacatgcaggagaagctgggcattgtgcagggcatcgtaggtgcccgcaacacctcagccgcctccactgcacagcttgtggaggccacagaggagctgcggcgtgaaattggggaggccactgagcacctgactcagctcgaggcagacctgacagatgtgcaagatgagaacttcaatgccaaccatgcactaagtggtctggagcgagataggcttgcacttaatctcacactgcggcagctcgaccagcatcttgacttgctcaaacattcaaacttcctgggtgcctatgacagcatccggcatgcccatagccagtctgcagaggcagaacgtcgtgccaatacctcagccctggcagtacctagccctgtgagcaactcggcaagtgctcggcatcggacagaggcactgatggatgctcagaaggaggacttcaacagcaaacacatggccaaccagcgggcacttggcaagctctctgcccatacccacaccctgagcctgacagacataaatgagctggtgtgtggggcaccaggggatgcaccctgtgctacaagcccttgtgggggtgccggctgtcgagatgaggatgggcagccgcgctgtgggggcctcagctgcaatggggcagcggctacagcagacctagcactgggccgggcccggcacacacaggcagagctgcagcgggcactggcagaaggtggtagcatcctcagcagagtggctgagactcgtcggcaggcaagcgaggcacagcagcgggcccaggcagccctggacaaggctaatgcttccaggggacaggtggaacaggccaaccaggaacttcaagaacttatccagagtgtgaaggacttcctcaaccaggagggggctgatcctgatagcattgaaatggtggccacacgggtgctagagctctccatcccagcttcagctgagcagatccagcacctggcgggtgcgattgcagagcgagtccggagcctggcagatgtggatgcgatcctggcacgtactgtaggagatgtgcgtcgtgccgagcagctactgcaggatgcacggcgggcaaggagctgggctgaggatgagaaacagaaggcagagacagtacaggcagcactggaggaggcccagcgggcacagggtattgcccagggtgccatccggggggcagtggctgacacacgggacacagagcagaccctgtaccaggtacaggagaggatggcaggtgcagagcgggcactgagctctgcaggtgaaagggctcggcagttggatgctctcctggaggctctgaaattgaaacgggcaggaaatagtctggcagcctctacagcagaagaaacggcaggcagtgcccagggtcgtgcccaggaggctgagcagctgctacgcggtcctctgggtgatcagtaccagacggtgaaggccctagctgagcgcaaggcccaaggtgtgctggctgcacaggcaagggcagaacaactgcgggatgaggctcgggacctgttgcaagccgctcaggacaagctgcagcggctacaggaattggaaggcacctatgaggaaaatgagcgggcactggagagtaaggcagcccagttggacgggttggaggccaggatgcgcagcgtgcttcaagccatcaacttgcaggtgcagatctacaacacctgccagtgacccctgcccaaggcctaccccagttcctagcactgccccacatgcatgtctgcctatgcactgaagagctcttggcccggcagggcccccaataaaccagtgtgaaccccca

SEQ ID NO: 1632 - protein, 1798 aa, Homosapiens
MELTSRERGRGQPLPWELRLGLLLSVLAATLAQAPAPDVPGCSRGSCYPATGDLLVGRADRLTASSTCGLNGPQPYCIVSHLQDEKKCFLCDSRRPFSARDNPHSHRIQNVVTSFAPQRRAAWWQSENGIPAVTIQLDLEAEFHFTHLIMTFKTFRPAAMLVERSADFGRTWHVYRYFSYDCGADFPGVPLAPPRHWDDVVCESRYSEIEPSTEGEVIYRVLDPAIPIPDPYSSRIQNLLKITNLRVNLTRLHTLGDNLLDPRREIREKYYYALYELVVRGNCFCYGHASECAPAPGAPAHAEGMVHGACICKHNTRGLNCEQCQDFYRDLPWRPAEDGHSHACRKCECHGHTHSCHFDMAVYLASGNVSGGVCDGCQHNTAGRHCELCRPFFYRDPTKDLRDPAVCRSCDCDPMGSQDGGRCDSHDDPALGLVSGQCRCKEHVVGTRCQQCRDGFFGLSISDRLGCRRCQCNARGTVPGSTPCDPNSGSCYCKRLVTGRGCDRCLPGHWGLSHDLLGCRPCDCDVGGALDPQCDEGTGQCHCRQHMVGRRCEQVQPGYFRPFLDHLIWEAEDTRGQVLDVVERLVTPGETPSWTGSGFVRLQEGQTLEFLVASVPKAMDYDLLLRLEPQVPEQWAELELIVQRPGPVPAHSLCGHLVPKDDRIQGTLQPHARYLIFPNPVCLEPGISYKLHLKLVRTGGSAQPETPYSGPGLLIDSLVLLPRVLVLEMFSGGDAAALERQATFERYQCHEEGLVPSKTSPSEACAPLLISLSTLIYNGALPCQCNPQGSLSSECNPHGGQCLCKPGVVGRRCDLCAPGYYGFGPTGCQACQCSHEGALSSLCEKTSGQCLCRTGAFGLRCDRCQRGQWGFPSCRPCVCNGHADECNTHTGACLGCRDHTGGEHCERCIAGFHGDPRLPYGGQCRPCPCPEGPGSQRHFATSCHQDEYSQQIVCHCRAGYTGLRCEACAPGHFGDPSRPGGRCQLCECSGNIDPMDPDACDPHTGQCLRCLHHTEGPHCAHCKPGFHGQAARQSCHRCTCNLLGTNPQQCPSPDQCHCDPSSGQCPCLPNVQGPSCDRCAPNFWNLTSGHGCQPCACHPSRARGPTCNEFTGQCHCRAGFGGRTCSECQELHWGDPGLQCHACDCDSRGIDTPQCHRFTGHCSCRPGVSGVRCDQCARGFSGIFPACHPCHACFGDWDRVVQDLAARTQRLEQRAQELQQTGVLGAFESSFWHMQEKLGIVQGIVGARNTSAASTAQLVEATEELRREIGEATEHLTQLEADLTDVQDENFNANHALSGLERDRLALNLTLRQLDQHLDLLKHSNFLGAYDSIRHAHSQSAEAERRANTSALAVPSPVSNSASARHRTEALMDAQKEDFNSKHMANQRALGKLSAHTHTLSLTDINELVCGAPGDAPCATSPCGGAGCRDEDGQPRCGGLSCNGAAATADLALGRARHTQAELQRALAEGGSILSRVAETRRQASEAQQRAQAALDKANASRGQVEQANQELQELIQSVKDFLNQEGADPDSIEMVATRVLELSIPASAEQIQHLAGAIAERVRSLADVDAILARTVGDVRRAEQLLQDARRARSWAEDEKQKAETVQAALEEAQRAQGIAQGAIRGAVADTRDTEQTLYQVQERMAGAERALSSAGERARQLDALLEALKLKRAGNSLAASTAEETAGSAQGRAQEAEQLLRGPLGDQYQTVKALAERKAQGVLAAQARAEQLRDEARDLLQAAQDKLQRLQELEGTYEENERALESKAAQLDGLEARMRSVLQAINLQVQIYNTCQ

SEQ ID NO: 1633 - DNA, 5808 bp, Homosapiens
gaaggcagtttccggagggaaggggtagggttggggtgggggcgctctccgcccggtgttgcgctccttcccagaatccgctccggcctttccttcctgccgcgattcccaactttgctcaaagtcgctggactctaagctgtcggagggaccgctggacagacctgggaactgacagagggcctggagggaaacaggccaaagacccacaggcagagttgacacggaaccccaaagcaaggaggagggctcgggcccgagaccgttcacctccccttatccctgttcccctcttcaggatggagctgacctcaagggaaagagggaggggacagcctctgccctgggaacttcgactgggcctactgctaagcgtgctggctgccacactggcacaggcccctgccccggatgtgcctggctgttccaggggaagctgctaccccgccacgggcgacctgctggtgggccgagctgacagactgactgcctcatccacttgtggcctgaatggcccccagccctactgcatcgtcagtcacctgcaggacgaaaagaagtgcttcctttgtgactcccggcgccccttctctgctagagacaacccacacagccatcgcatccagaatgtagtcaccagctttgcaccacagcggcgggcagcctggtggcagtcagagaatggtatccctgcggtcaccatccagctggacctggaggctgagtttcatttcacacacctcattatgaccttcaagacatttcgccctgctgccatgctggtggaacgctcagcagactttggccgcacctggcatgtgtaccgatatttctcctatgactgtggggctgacttcccaggagtcccactagcacccccacggcactgggatgatgtagtctgtgagtcccgctactcagagattgagccatccactgaaggcgaggtcatctatcgtgtgctggaccctgccatccctatcccagacccctacagctcacggattcagaacctgttgaagatcaccaacctacgggtgaacctgactcgtctacacacgttgggagacaacctactcgacccacggagggagatccgagagaagtactactatgccctctatgagctggttgtacgtggcaactgcttctgctacggacacgcctcagagtgtgcacccgccccaggggcaccagcccatgctgagggcatggtgcacggagcttgcatctgcaaacacaacacacgtggcctcaactgcgagcagtgtcaggatttctatcgtgacctgccctggcgtccggctgaggacggccatagtcatgcctgtaggaagtgtgagtgccatgggcacacccacagctgccacttcgacatggccgtatacctggcatctggcaatgtgagtggaggtgtgtgtgatggatgtcagcataacacagctgggcgccactgtgagctctgtcggcccttcttctaccgtgacccaaccaaggacctgcgggatccggctgtgtgccgctcctgtgattgtgaccccatgggttctcaagacggtggtcgctgtgattcccatgatgaccctgcactgggactggtctccggccagtgtcgctgcaaagaacatgtggtgggcactcgctgccagcaatgccgtgatggcttctttgggctcagcatcagtgaccgtctgggctgccggcgatgtcaatgtaatgcacggggcacagtgcctgggagcactccttgtgaccccaacagtggatcctgttactgcaaacgtctagtgactggacgtggatgtgaccgctgcctgcctggccactggggcctgagccacgacctgctcggctgccgcccctgtgactgcgacgtgggtggtgctttggatccccagtgtgatgagggcacaggtcaatgccactgccgccagcacatggttgggcgacgctgtgagcaggtgcaacctggctacttccggcccttcctggaccacctaatttgggaggctgaggacacccgagggcaggtgctcgatgtggtggagcgcctggtgacccccggggaaactccatcctggactggctcaggcttcgtgcggctacaggaaggtcagaccctggagttcctggtggcctctgtgccgaaggctatggactatgacctgctgctgcgcttagagccccaggtccctgagcaatgggcagagttggaactgattgtgcagcgtccagggcctgtgcctgcccacagcctgtgtgggcatttggtgcccaaggatgatcgcatccaagggactctgcaaccacatgccaggtacttgatatttcctaatcctgtctgccttgagcctggtatctcctacaagctgcatctgaagctggtacggacagggggaagtgcccagcctgagactccctactctggacctggcctgctcattgactcgctggtgctgctgccccgtgtcctggtgctagagatgtttagtgggggtgatgctgctgccctggagcgccaggccacctttgaacgctaccaatgccatgaggagggtctggtgcccagcaagacttctccctctgaggcctgcgcacccctcctcatcagcctgtccaccctcatctacaatggtgccctgccatgtcagtgcaaccctcaaggttcactgagttctgagtgcaaccctcatggtggtcagtgcctgtgcaagcctggagtggttgggcgccgctgtgacctctgtgcccctggctactatggctttggccccacaggctgtcaagcctgccagtgcagccacgagggggcactcagcagtctctgtgaaaagaccagtgggcaatgtctctgtcgaactggtgcctttgggcttcgctgtgaccgctgccagcgtggccagtggggattccctagctgccggccatgtgtctgcaatgggcatgcagatgagtgcaacacccacacaggcgcttgcctgggctgccgtgatcacacagggggtgagcactgtgaaaggtgcattgctggtttccacggggacccacggctgccatatgggggccagtgccggccctgtccctgtcctgaaggccctgggagccaacggcactttgctacttcttgccaccaggatgaatattcccagcagattgtgtgccactgccgggcaggctatacggggctgcgatgtgaagcttgtgcccctgggcactttggggacccatcaaggccaggtggccggtgccaactgtgtgagtgcagtgggaacattgacccaatggatcctgatgcctgtgacccccacacggggcaatgcctgcgctgtttacaccacacagagggtccacactgtgcccactgcaagcctggcttccatgggcaggctgcccgacagagctgtcaccgctgcacatgcaacctgctgggcacaaatccgcagcagtgcccatctcctgaccagtgccactgtgatccaagcagtgggcagtgcccatgcctccccaatgtccagggccctagctgtgaccgctgtgcccccaacttctggaacctcaccagtggccatggttgccagccttgtgcctgccacccaagccgggccagaggccccacctgcaacgagttcacagggcagtgccactgccgtgccggctttggagggcggacttgttctgagtgccaagagctccactggggagaccctgggttgcagtgccatgcctgtgattgtgactctcgtggaatagatacacctcagtgtcaccgcttcacaggtcactgcagctgccgcccaggggtgtctggtgtgcgctgtgaccagtgtgcccgtggcttctcaggaatctttcctgcctgccatccctgccatgcatgcttcggggattgggaccgagtggtgcaggacttggcagcccgtacacagcgcctagagcagcgggcgcaggagttgcaacagacgggtgtgctgggtgcctttgagagcagcttctggcacatgcaggagaagctgggcattgtgcagggcatcgtaggtgcccgcaacacctcagccgcctccactgcacagcttgtggaggccacagaggagctgcggcgtgaaattggggaggccactgagcacctgactcagctcgaggcagacctgacagatgtgcaagatgagaacttcaatgccaaccatgcactaagtggtctggagcgagataggcttgcacttaatctcacactgcggcagctcgaccagcatcttgacttgctcaaacattcaaacttcctgggtgcctatgacagcatccggcatgcccatagccagtctgcagaggcagaacgtcgtgccaatacctcagccctggcagtacctagccctgtgagcaactcggcaagtgctcggcatcggacagaggcactgatggatgctcagaaggaggacttcaacagcaaacacatggccaaccagcgggcacttggcaagctctctgcccatacccacaccctgagcctgacagacataaatgagctggtgtgtggggcaccaggggatgcaccctgtgctacaagcccttgtgggggtgccggctgtcgagatgaggatgggcagccgcgctgtgggggcctcagctgcaatggggcagcggctacagcagacctagcactgggccgggcccggcacacacaggcagagctgcagcgggcactggcagaaggtggtagcatcctcagcagagtggctgagactcgtcggcaggcaagcgaggcacagcagcgggcccaggcagccctggacaaggctaatgcttccaggggacaggtggaacaggccaaccaggaacttcaagaacttatccagagtgtgaaggacttcctcaaccaggagggggctgatcctgatagcattgaaatggtggccacacgggtgctagagctctccatcccagcttcagctgagcagatccagcacctggcgggtgcgattgcagagcgagtccggagcctggcagatgtggatgcgatcctggcacgtactgtaggagatgtgcgtcgtgccgagcagctactgcaggatgcacggcgggcaaggagctgggctgaggatgagaaacagaaggcagagacagtacaggcagcactggaggaggcccagcgggcacagggtattgcccagggtgccatccggggggcagtggctgacacacgggacacagagcagaccctgtaccaggtacaggagaggatggcaggtgcagagcgggcactgagctctgcaggtgaaagggctcggcagttggatgctctcctggaggctctgaaattgaaacgggcaggaaatagtctggcagcctctacagcagaagaaacggcaggcagtgcccagggtcgtgcccaggaggctgagcagctgctacgcggtcctctgggtgatcagtaccagacggtgaaggccctagctgagcgcaaggcccaaggtgtgctggctgcacaggcaagggcagaacaactgcgggatgaggctcgggacctgttgcaagccgctcaggacaagctgcagcggctacaggaattggaaggcacctatgaggaaaatgagcgggcactggagagtaaggcagcccagttggacgggttggaggccaggatgcgcagcgtgcttcaagccatcaacttgcaggtgcagatctacaacacctgccagtgacccctgcccaaggcctaccccagttcctagcactgccccacatgcatgtctgcctatgcactgaagagctcttggcccggcagggcccccaataaaccagtgtgaaccccca

SEQ ID NO: 1634 - protein, 1798 aa, Homosapiens; identical to SEQ ID NO: 1632

SEQ ID NO: 1635 - DNA, 778 bp, Homosapiens
cagcagcgggcccaggcagccctggacaaggctaatgcttccaggggacaggtggaacaggccaaccaggaacttcaagaacttatccagagtgtgaaggacttcctcaaccgtgagcctcccacgtgtcccaggccatgtggttgtcccctttggcaactcccggtgtctgtatctcccttggttcatacttgagcctcagggactacactggattagtgtttatgatcccttgactggctcctgagttattgcccatatgtggtcccaggtccatgttcttgagtctgagccccttgtatagtccctgtccttgtgattatatccttatgcctggtaacaaacccctatcccatgtacatgtcctgagtccataccccaaaactgtatcctcatgcccatgctggagaatctatgttcttaagttcttgctgtgtccctatagaggagggggctgatcctgatagcattgaaatggtggccacacgggtgctagagctctccatcccagcttcagctgagcagatccagcacctggcgggtgcgattgcagagcgagtccggagcctggcagatgtggatgcgatcctggcacgtactgtaggagatgtgcgtcgtgccgagcagctactgcaggatgcacggcgggcaaggagctgggctgaggatgagaaacagaaggcagagacattcctagcactgccccacatgcatgtctgcctatgcactgaagagctcttggcccggcagggcccccaataaaccagtgtgaaccccc

SEQ ID NO: 1636 - protein, 115 aa, Homosapiens
MFLSSCCVPIEEGADPDSIEMVATRVLELSIPASAEQIQHLAGAIAERVRSLADVDAILARTVGDVRRAEQLLQDARRARSWAEDEKQKAETFLALPHMHVCLCTEELLARQGPQ

SEQ ID NO: 1637 - DNA, 408 bp, Homosapiens
gcgacgtgggtggtgctttggatccccagtgtgatgagggcacaggtcaatgccactgccgccagcacatggttgggcgacgctgtgagcaggtgcaacctggctacttccggcccttcctggaccacctaatttgggaggctgaggacacccgagggcaggtgctcgatgtggtggagcgcctggtgacccccggggaaactccatcctggactggctcaggcttcgtgcggctacaggaaggtcagaccctggagttcctggtggcctctgtgccgaaggctatggactatgacctgctgctgcgcttagagccccaggttagaccctgttatctaatctggggctgaacctctgggtgtgggagcatctcctccatcatcccgttttcccaggtccctgagcaat

SEQ ID NO: 1638 - protein, 93 aa, Homosapiens
MVGRRCEQVQPGYFRPFLDHLIWEAEDTRGQVLDVVERLVTPGETPSWTGSGFVRLQEGQTLEFLVASVPKAMDYDLLLRLEPQVRPCYLIWG

SEQ ID NO: 1639 - DNA, 1657 bp, Homosapiens
acttccggcgcgcagcgggcggccatgttggagcagcggaggcggcgcagaggcgcgtcttgggtccccgcggcggcgccggtgccaagcgctggtttgcggatacccaggcagatctgcagtgcctaatgccatgagtgtggtggttcagcatgtggaggaaaaagctgtgcactcctggtcgcgcatctccacggcagggaagaaggccctggaagaggcactgcttgtctttaacccaatgagccaggatctcagtgccacagaggcccagcttgtggccttcctgcagggcctgcgagatgatggcttccaacctaccatcctgcgcagtggtgatgtctatggctatagttcatgcacagctaatcccccaagcatgctaccaccaacctgctgctgagctctctgaagcaatcaagtgccagccatgcccggggtgcagcagtgggcttccccacccacctttatccaggtgtctaccctgccatgcggctctctgttgtccttgaggccctggttccacttaagactcccatgccctgcttgggtgccaagcacaaggcacagtcactgcagctctcacttgcagactctcctctgaaactgcggaaaagttcagggaagggtccggggaaccctcggcccaaagctcccagaaaaaccacaagcaagggccccaagtgtctgactcgcaaaggccctggggctggaccccgacgaggctctgggcaccagagcaaaaccaacagagccactgggtcccccagtgtccggcgaatgaaagggggctctgccctgggcaccaaaacagcccaggccaaggtagctcgaacactggccaaagctgctcgtgcccaagccaaggtggctcgaacacaggccaaggctgctaaggcccgggccaaggccaaggcagcacaggtcaaggctaaggccaaagctaaggcagcacaggtcaaggccaaggccaaagtcatggcagcatgggccaaggccaaggctaaagccaaggcagtacgggccaaggccaaggtggctcggacccagcccaggggcagaggcaggccaaagggatctgctaaggccagaactacaaggaagggccagaaaaaccgccctgagactgttgggcagaagaggaaaagggctgaggaggcaaaagatcttcctcccaagaagagaacacggcttgggccccgatctcctaaggcatggctagggcctggaacagcaaagctgctgaagttccgtgccataaaggtagataggcggtcctcggatgatgaggtgcggcagcgggctcagcggatcctccgcgtgaacctgtcacctgtaatacggctccagccattgctgccatattcagcagtctgattccttcacacggcaatgtttggggaaactaagcccagctgtctgtgtggctagtggcacagtgtgctatgtccgtggactccacaatcttgaggactcccggtgcctctctagggccctggtgaccaccagcctcctttcagaaaccagagtgggtggggtacggtggggtgggtgggcgggaggggtgttttcatggcgcgatgcactgtgacttgttattcaagttgtatgtctactgttccatctatcacgttttatacctttccaccttccagtc

SEQ ID NO: 1640 - protein, 89 aa, Homosapiens
MSVVVQHVEEKAVHSWSRISTAGKKALEEALLVFNPMSQDLSATEAQLVAFLQGLRDDGFQPTILRSGDVYGYSSCTANPPSMLPPTCC

SEQ ID NO: 1641 - DNA, 1790 bp, Homosapiens
ggcggccatgttggagcagcggaggcggcgcagaggcgcgtcttgggtccccgcggcggcgccggtgccaagcgctggtttgcggatacccaggcagatctgcagtgcctaatgccatgagtgtggtggttcagcatgtggaggaaaaagctgtgcactcctggtcgcgcatctccacggcagggaagaaggccctggaagaggcactgcttgtctttaacccaatgagccaggatctcagtgccacagaggcccagcttgtggccttcctgcagggcctgcgagatgatggcttccaacctaccatcctgcgcagtggtgatgtctatggctatagttcatgcacagctaatcccccaagccagacgaaactgcaagctcgtgcccctaacccaactgccacatcacctccagccagtgctccccgaactgccatgcggttgcctgcaggtcgggccacactgcttcccatgccgctatctggcagactggccaaagcatccacaccagcccttgccaagcatgctaccaccaacctgctgctgagctctctgaagcaatcaagtgccagccatgcccggggtgcagcagtgggcttccccacccacctttatccaggtgtctaccctgccatgcggctctctgttgtccttgaggccctggttccacttaagactcccatgccctgcttgggtgccaagcacaaggcacagtcactgcagctctcacttgcagactctcctctgaaactgcggaaaagttcagggaagggtccggggaaccctcggcccaaagctcccagaaaaaccacaagcaagggccccaagtgtctgactcgcaaaggccctggggctggaccccgacgaggctctgggcaccagagcaaaaccaacagagccactgggtcccccagtgtccggcgaatgaaagggggctctgccctgggcaccaaaacagcccaggccaaggtagctcgaacactggccaaagctgctcgtgcccaagccaaggtggctcgaacacaggccaaggctgctaaggcccgggccaaggccaaggcagcacaggtcaaggctaaggccaaagctaaggcagcacaggtcaaggccaaggccaaagtcatggcagcatgggccaaggccaaggctaaagccaaggcagtacgggccaaggccaaggtggctcggacccagcccaggggcagaggcaggccaaagggatctgctaaggccagaactacaaggaagggccagaaaaaccgccctgagactgttgggcagaagaggaaaagggctgaggaggcaaaagatcttcctcccaagaagagaacacggcttgggccccgatctcctaaggcatggctagggcctggaacagcaaagctgctgaagttccgtgccataaaggtagataggcggtcctcggatgatgaggtgcggcagcgggctcagcggatcctccgcgtgaacctgtcacctgtaatacggctccagccattgctgccatattcagcagtctgattccttcacacggcaatgtttggggaaactaagcccagctgtctgtgtggctagtggcacagtgtgctatgtccgtggactccacaatcttgaggactcccggtgcctctctagggccctggtgaccaccagcctcctttcagaaaccagagtgggtggggtacggtggggtgggtgggcgggaggggtgttttcatggcgcgatgcactgtgacttgttattcaagttgtatgtctactgttccatctatcacgttttatacctttcca

SEQ ID NO: 1642 - protein, 34 aa, Homosapiens
MLEQRRRRRGASWVPAAAPVPSAGLRIPRQICSA

SEQ ID NO: 1643 - DNA, 1987 bp, Homosapiens
gccggagccccgccagagcccgacttcagccccagccagatcccgcgtcaacggaggcggaacggcggaccccgtaccctggcagcatcggagcaccggcgggtgaaggcaaggtccctggactggtcatatacctcttgtggccctggcagaatcaagatgaggccctgtcatgcctccccagtgaggcctacagtctgagcagacagcatggcctgccactggcagtgaacaccatgtctgcaggaggtggccgggcctttgcttggcaagtgttcccccccatgcccacttgccgggtctatggcacagtggcacaccaagatgggcacctgctggtgttggggggttgtggccgggctggactgcccctggacactgctgagacactggacatggcctcgcacacatggctggcactggcacccctgcccactgcccgggctggtgcagctgcggtagttctgggcaagcaggtgctagtggtgggtggtgtggatgaggtccagagcccggtagctgctgtagaggccttcctgatggatgagggccgctgggagcgtcgggccaccctccctcaagcagccatgggggttgcaactgtggagagagatggtatggtgtatgctctggggggaatgggccctgacacggccccccaggcccaggtacgtgtgtatgagccccgtcgggactgctggctttcgctaccctccatgcccacaccctgctatggggcctccaccttcctgcacgggaacaagatctatgtcctggggggccgccagggcaagctcccggtgactgcttttgaagcctttgatctggaggcccgtacatggacccggcatccaagcctacccagccgtcgggcctttgctggctgcgccatggctgaaggcagcgtctttagcctgggtggcctgcagcagcctgggccccacaacttctactctcgcccacactttgtcaacactgtggagatgtttgacctggagcatgggtcctggaccaaattgccccgcagcctgcgcatgagggataagagggcagactttgtggttgggtcccttgggggccacattgtggccattgggggccttggaaaccagccatgtcctttgggctctgtggagagctttagccttgcacggcggcgctgggaggcattgcctgccatgcccactgcccgctgctcctgctctagtctgcaggctgggccccggctgtttgttattgggggtgtggcccagggccccagtcaagccgtggaggcactgtgtctgcgtgatggggtctgaaggcttggtgggagctgtccactggagcagctcattgccagaggcagctatttctatggctccttttgctgctgaggacactcactgtggctctgtgggatgagagaggcatgggggtgagcacttgaaacactgccttggggccttgggttaggggagcctttgtctttagtgcaggacacacatatgcttacacctacctttatcaccattcgttcatgaatcatgcctagctccatccttgccctgggacctactaggccttccatccaactgggaaatggggagaagcaaagctggcctcatgctcttcagggtcagttcctatctggagttgaccaggcctaccccagttgccattcctgaaaaatctcagctgccaggctgcctttagggtccctgcagacccaggagagttgagagggtgggggacacagagagaatagagaggatgtgggaactgccagagggccggagcgcaggagttcaagtggaggaatgctggctttgagccctctacactgctggttgtatgaccttggacaagtcacttcacctctctgtgcctcagcatcctcatctataaatggggatctctgaaaccttcctaccctacctacctcacagggctgttgtgaggacccagggagtttggatgtggaagtaaaagtgctgctaaaacctag

SEQ ID NO: 1644 - protein, 354 aa, Homosapiens; identical to SEQ ID NO: 119

SEQ ID NO: 1645 - DNA, 1605 bp, Homosapiens
gatcccgcgtcaacggaggcggaacggcggaccccgtaccctggcagcatcggagcaccggcgggtgaaggcaaggtccctggactggtcatatacctcttgtggccctggcagaatcaagatgaggccctgtcatgcctccccagtgaggcctacagtctgagcagacagcatggcctgccactggcagtgaacaccatgtctgcaggaggtggccgggcctttgcttgatggtatggtgtatgctctggggggaatgggccctgacacggccccccaggcccaggtacgtgtgtatgagccccgtcgggactgctggctttcgctaccctccatgcccacaccctgctatggggcctccaccttcctgcacgggaacaagatctatgtcctggggggccgccagggcaagctcccggtgactgcttttgaagcctttgatctggaggcccgtacatggacccggcatccaagcctacccagccgtcgggcctttgctggctgcgccatggctgaaggcagcgtctttagcctgggtggcctgcagcagcctgggccccacaacttctactctcgcccacactttgtcaacactgtggagatgtttgacctggagcatgggtcctggaccaaattgccccgcagcctgcgcatgagggataagagggcagactttgtggttgggtcccttgggggccacattgtggccattgggggccttggaaaccagccatgtcctttgggctctgtggagagctttagccttgcacggcggcgctgggaggcattgcctgccatgcccactgcccgctgctcctgctctagtctgcaggctgggccccggctgtttgttattgggggtgtggcccagggccccagtcaagccgtggaggcactgtgtctgcgtgatggggtctgaaggcttggtgggagctgtccactggagcagctcattgccagaggcagctatttctatggctccttttgctgctgaggacactcactgtggctctgtgggatgagagaggcatgggggtgagcacttgaaacactgccttggggccttgggttaggggagcctttgtctttagtgcaggacacacatatgcttacacctacctttatcaccattcgttcatgaatcatgcctagctccatccttgccctgggacctactaggccttccatccaactgggaaatggggagaagcaaagctggcctcatgctcttcagggtcagttcctatctggagttgaccaggcctaccccagttgccattcctgaaaaatctcagctgccaggctgcctttagggtccctgcagacccaggagagttgagagggtgggggacacagagagaatagagaggatgtgggaactgccagagggccggagcgcaggagttcaagtggaggaatgctggctttgagccctctacactgctggttgtatgaccttggacaagtcacttcacctctctgtgcctcagcatcctcatctataaatggggatctctgaaaccttcctaccctacctacctcacagggctgttgtgaggacccagggagtttggatgtggaagtaaaagtgctgctaaaacctag

SEQ ID NO: 1646 - protein, 227 aa, Homosapiens
MVYALGGMGPDTAPQAQVRVYEPRRDCWLSLPSMPTPCYGASTFLHGNKIYVLGGRQGKLPVTAFEAFDLEARTWTRHPSLPSRRAFAGCAMAEGSVFSLGGLQQPGPHNFYSRPHFVNTVEMFDLEHGSWTKLPRSLRMRDKRADFVVGSLGGHIVAIGGLGNQPCPLGSVESFSLARRRWEALPAMPTARCSCSSLQAGPRLFVIGGVAQGPSQAVEALCLRDGV

SEQ ID NO: 1647 - DNA, 650 bp, Homosapiens
gtacaaggcagacctgaaggcagcgggggtgactagaccagttcttgcctctcccagaacccaaaagcatcatcccagcccttccatggctgtactgacacctatccctgggacaggctttacctttcttctctgagatgtcagatctttcccctacagacagggtggaaaagagagccggcgcagcgacacttcttctccaagcacgacaaccgtacttcctttgacaaagagggtccctattgcctgctgcagggaatcggaaggcggaaggacctggagcgcctgtggcagcggcacaccttcctgcgctgggcaccctgtgagatagagttgcgccagcaggggcccctggaatcttcttaccaggctgatttcaggccaggcccaggactcagtggcctcccccagcacctcatccactttgtgcaggtccagccttcccataccaggaccacctaccagcagaacttctgctgcccatcccagggtggccactatggcagctacaaggtagggccccaggcgccggtcactgacgtactgcctgacctcccagggatcccaagacccaagctgctgcagcactaccttcatgctggggtctctgagtgtctaaactggtccagagcattaaacaaggacagctg

SEQ ID NO: 1648 - protein, 203 aa, Homosapiens
TSSCLSQNPKASSQPFHGCTDTYPWDRLYLSSLRCQIFPLQTGWKREPAQRHFFSKHDNRTSFDKEGPYCLLQGIGRRKDLERLWQRHTFLRWAPCEIELRQQGPLESSYQADFRPGPGLSGLPQHLIHFVQVQPSHTRTTYQQNFCCPSQGGHYGSYKVGPQAPVTDVLPDLPGIPRPKLLQHYLHAGVSECLNWSRALNKD

SEQ ID NO: 1649 - DNA, 2620 bp, Homosapiens
gcttttccttcatctccaaagtcctctaaactgacagggtctcattctgtcgcccaggctggagtgtagtgacgcgatctcggctcactgcaacctctacctcccaggttcaaacgatcctcccgcctcagcctccgagtagctgggaccacaggggcccggttcgatgtccccatctgcccacggcgcctctcgtgccagctgctccgcctgtcctgcccttgctcagaccacccaagtatcatctgtgctctggcccctggccaccagttccaccccacatgctgtcctcacaggtggcgccttgccattcctggggaccagggcctccttgttctggtcatacacagtggagtgtaggtcgagcgacaagtataactataagaaatgaattttaatgtctggaatatcaaagagatgctcagtattccttcaggctctgggaacaagaagtcatccaactggaataataatcaaaatgattattccagtctcagtgattcccagttcctctttggatctcagttctgtccagaaaattcagaaaccctatcagcacccttggactttggtgcccacttgagacattcaaaacagtcacaacagaactatctggagggtgaacctagcattttcacaaagtaccagacaaagccccagctgttcggaggagatataaaagatggaggtttatttcctcctcctttgtcagttggaaaatcaaaaggcctcttggaacagtttgaggagaaaaagaaaagggcaaaagacaaatgtgacagtgagactctatacaactttgtttctaatgttagagaaagcattctcaggttgcagacgtctgtggaaaagtctgaggaccatctcagttcaagaagccaatctattttggattctttggagactgtggccaagacattacaagagactatacaggcccagaatgacctggtgtttgaggcagtccaggacaaaggcaacatggagcaggccatccttgagatgaagaaaagatttgaagctagacaaggagagtttatagaaatgaagtccaacctgaagcaccttgaagttttagttgctcagcagagtcaggaattccagcagctgtgtgagcagctaggccagctgaatgtgcccagtgtcctagcagagctgaagagattgatctcagtgcctccagtgaaagacagtgcttctcagacgtcgccacctttggcccagagcctcaatctcaccaggcaggaaaaatacacctctgagaaaccagttttatggcaggcccaggccctccctgctgcatggaatcctggtatgggctccctacagcctggagaatttgatgtctggggtgaaggagcaaagaatgatgatctccaagaagaggctgcactgccagcatttgggtcccatgaaagaaataggcatgtaaaggacaaggtggtgcagactaactgcaagaactgggctgttactaaaacaggtgccaagaaccatggttccagcgtcccaggccataagattcccagtgacagggacctggtttcccaaggagcctcacagctcacatcattggagataaacttttcaaccagcattaagaatgcctgccaaaaatatcaagcccaaagtatgtttttgtgtgacccacgtgaacatttggtgattaaacagaaagatgggactgtagaaatgcgggggaaagacaagaagcagcagcccaggaaggcccacagggcccacagaggcaggctcatagccagcaagcaaaaacaaatcccaatccagacctgtaaattcaattccaaatatcagagtcctcagcctgcaatttctgtccctcaaagccccttcctggggcagcaggaaccccgtgctcagcctctgcatctgcagtgtcccaggagccccagaaaaccagtctgccctattctgggaggaacagtcatgcccaataagacagtaagggcagtgcagggaagactcttgcagctcagcaggtgctcttcccaagacaactggctactttccagcagttcccagggggaccaccagatgagctggttcagtgacctcaatctcggatgttcagagacccctctatgcaaggaggcaggaaagaatttgctctatgacctgggttttgatagcagtgatgatgatggcttctgaccagtccacagttgatttattggtctcagctagaaagagaaattgcaggacatttgggctggccaacagcagaaagtccctgaagcctgccaagtacccagggtcagaggccctgctgaggtggggcaatgagcacgagggcagggaaggtccagcattctgggtaccaggtgctgcccctgacaaggattaagtgcatccttatttattggaatgaaatgtgaaaatggtgctgatgaaaactgaggcagcagcctggttgtggggcatctggagcagggtgcctgtactttggcgaaaggcaggcaggcctccttatggaatactgtgtagcagaagggctctcataaaactgttgcggtggcagcatgactccaaacaacatttttgggtctttaaaatattccctacacatgaccaatacattttcaggcctcaggattttttt

SEQ ID NO: 1650 - protein, 594 aa, Homosapiens
MNFNVWNIKEMLSIPSGSGNKKSSNWNNNQNDYSSLSDSQFLFGSQFCPENSETLSAPLDFGAHLRHSKQSQQNYLEGEPSIFTKYQTKPQLFGGDIKDGGLFPPPLSVGKSKGLLEQFEEKKKRAKDKCDSETLYNFVSNVRESILRLQTSVEKSEDHLSSRSQSILDSLETVAKTLQETIQAQNDLVFEAVQDKGNMEQAILEMKKRFEARQGEFIEMKSNLKHLEVLVAQQSQEFQQLCEQLGQLNVPSVLAELKRLISVPPVKDSASQTSPPLAQSLNLTRQEKYTSEKPVLWQAQALPAAWNPGMGSLQPGEFDVWGEGAKNDDLQEEAALPAFGSHERNRHVKDKVVQTNCKNWAVTKTGAKNHGSSVPGHKIPSDRDLVSQGASQLTSLEINFSTSIKNACQKYQAQSMFLCDPREHLVIKQKDGTVEMRGKDKKQQPRKAHRAHRGRLIASKQKQIPIQTCKFNSKYQSPQPAISVPQSPFLGQQEPRAQPLHLQCPRSPRKPVCPILGGTVMPNKTVRAVQGRLLQLSRCSSQDNWLLSSSSQGDHQMSWFSDLNLGCSETPLCKEAGKNLLYDLGFDSSDDDGF

SEQ ID NO: 1651 - DNA, 1565 bp, Homosapiens
ggacgcggccacctcgaagccacgtcagggcagccccaggtcgggcgcgtgccagcagccagaggtataactataagaaatgaattttaatgtctggaatatcaaagagatgctcagtattccttcaggctctgggaacaagaagtcatccaactggaataataatcaaaatgattattccagtctcagtgattcccagttcctctttggatctcagttctgtccagaaaattcagaaaccctatcagcacccttggactttggtgcccacttgagacattcaaaacagtcacaacagaactatctggagggtgaacctagcattttcacaaagtaccagacaaagccccagctgttcggaggagatataaaagatggaggtttatttcctcctcctttgtcagttggaaaatcaaaaggcctcttggaacagtttgaggagaaaaagaaaagggcaaaagacaaatgtgacagttgcagacgtctgtggaaaagtctgaggaccatctcagttcaagaagccaatctattttggattctttggagactgtggccaagacatgtgagtgcctcatgtttgaggtatcagcagagggcactggtgaatgatgaacatgaactttctgaccccagcctggtttccagtggtgaggttcctcacagggtttcagatgagaggatgggtatatagggttagtcctgaagagatgtggagcacactgagctgggtagtgaggcccacctctatgtgacaatgctctggtcccatgatgccttttgtgaggcactaatcccccacctggtaaccatgttgcctcagggcaggtagctctgctaggtttctcatctcactgcctgaagtgagtcagcaacatccttgagtctcaaattgctgcctgtgctgtctatagacactgactgcccccttaggagttagaaatactgtagtacctgctgctcttcttgctgccttggtttcagtgagagctgtgttgtgaatcacagcatcattctcaattttttttttttttttgagacagagtctcgctctgtcacccaggctggagtgcagtggcgcaatctcggctcactgcaagctccgcctcccgggttcacgccattctcctgcctcagcctcctaagtagctgggactacaggcgtctgccaccacggctggctaatttttaaaatttttagtagagacggggtttcactgtgttagccaggatggtctccatctcctgacctcgtgatctgcccgcctcagcctcccaaagtgctgggattacaggcatgagccaccacgcccagccccattctcaattttacttatagtttgtggtttataaaatcctgtgctccaccaattagtggtttacatttagatgaaaccatggcccttgccctataaacagaagagagtaaatatacagttctccttgggtgaatacttctctagaaccacctgtttcctagcaaaacgatgagctgatgactatgcatctgtacttgtttgcatttgtctgtgtgtttattttataaacaagttgaaatcaacttacac

SEQ ID NO: 1652 - protein, 203 aa, Homosapiens
MNFNVWNIKEMLSIPSGSGNKKSSNWNNNQNDYSSLSDSQFLFGSQFCPENSETLSAPLDFGAHLRHSKQSQQNYLEGEPSIFTKYQTKPQLFGGDIKDGGLFPPPLSVGKSKGLLEQFEEKKKRAKDKCDSCRRLWKSLRTISVQEANLFWILWRLWPRHVSASCLRYQQRALVNDEHELSDPSLVSSGEVPHRVSDERMGI

SEQ ID NO: 1653 - DNA, 2497 bp, Homosapiens
aggtataactataagaaatgaattttaatgtctggaatatcaaagagatgctcagtattccttcaggctctggctgctggcccaggtgctaggcccctcactgcctggggccagcggcgcaggctggctgctctgagtgcagggcctgccaagcccatgcccacctggaactcgagctggcccgcaagtgcatgcgcagccctggtttctgcccgtgcctctccatcacacctccctgcaagcagagggagctggctctgacctcggctagcccagagaggggctcccatagtgcagcgacaggctgaagggctcctcaagcatggccagagtggacgccaaggccaaggaagctccgagagcaagcgagggctgccagcatgctgtcacctctcagaggaacaagaagtcatccaactggaataataatcaaaatgattattccagtctcagtgattcccagttcctctttggatctcagttctgtccagaaaattcagaaaccctatcagcacccttggactttggtgcccacttgagacattcaaaacagtcacaacagaactatctggagggtgaacctagcattttcacaaagtaccagacaaagccccagcttttgaggagaaaaagaaaagggcaaaagacaaatgtgacagtgagactctatacaactttgtttctaatgttagagaaagcattctcaggttgcagacgtctgtggaaaagtctgaggaccatctcagttcaagaagccaatctattttggattctttggagactgtggccaagacattacaagagactatacaggcccagaatgacctggtgtttgaggcagtccaggacaaaggcaacatggagcaggccatccttgagatgaagaaaagatttgaagctagacaaggagagtttatagaaatgaagtccaacctgaagcaccttgaagttttagttgctcagcagagtcaggaattccagcagctgtgtgagcagctaggccagctgaatgtgcccagtgtcctagcagagctgaagagattgatctcagtgcctccagtgaaagacagtgcttctcagacgtcgccacctttggcccagagcctcaatctcaccaggcaggaaaaatacacctctgagaaaccagttttatggcaggcccaggccctccctgctgcatggaatcctggtatgggctccctacagcctggagaatttgatgtctggggtgaaggagcaaagaatgatgatctccaagaagaggctgcactgccagcatttgggtcccatgaaagaaataggcatgtaaaggacaaggtggtgcagactaactgcaagaactgggctgttactaaaacaggtgccaagaaccatggttccagcgtcccaggccataagattcccagtgacagggacctggtttcccaaggagcctcacagctcacatcattggagataaacttttcaaccagcattaagaatgcctgccaaaaatatcaagcccaaagtatgtttttgtgtgacccacgtgaacatttggtgattaaacagaaagatgggactgtagaaatgcgggggaaagacaagaagcagcagcccaggaaggcccacagggcccacagaggcaggctcatagccagcaagcaaaaacaaatcccaatccagacctgtaaattcaattccaaatatcagagtcctcagcctgcaatttctgtccctcaaagccccttcctggggcagcaggaaccccgtgctcagcctctgcatctgcagtgtcccaggagccccagaaaaccagtctgccctattctgggaggaacagtcatgcccaataagacagtaagggcagtgcagggaagactcttgcagctcagcaggtgctcttcccaagacaactggctactttccagcagttcccagggggaccaccagatgagctggttcagtgacctcaatctcggatgttcagagacccctctatgcaaggaggcaggaaagaatttgctctatgacctgggttttgatagcagtgatgatgatggcttctgaccagtccacagttgatttattggtctcagctagaaagagaaattgcaggacatttgggctggccaacagcagaaagtccctgaagcctgccaagtacccagggtcagaggccctgctgaggtggggcaatgagcacgagggcagggaaggtccagcattctgggtaccaggtgctgcccctgacaaggattaagtgcatccttatttattggaatgaaatgtgaaaatggtgctgatgaaaactgaggcagcagcctggttgtggggcatctggagcagggtgcctgtactttggcgaaaggcaggcaggcctccttatggaatactgtgtagcagaagggctctcataaaactgttgcggtggcagcatgactccaaacaacatttttgggtctttaaaatattccctacacatgaccaatacattttcaggcctcaggattttttt

SEQ ID NO: 1654 - protein, 396 aa, Homosapiens
MEQAILEMKKRFEARQGEFIEMKSNLKHLEVLVAQQSQEFQQLCEQLGQLNVPSVLAELKRLISVPPVKDSASQTSPPLAQSLNLTRQEKYTSEKPVLWQAQALPAAWNPGMGSLQPGEFDVWGEGAKNDDLQEEAALPAFGSHERNRHVKDKVVQTNCKNWAVTKTGAKNHGSSVPGHKIPSDRDLVSQGASQLTSLEINFSTSIKNACQKYQAQSMFLCDPREHLVIKQKDGTVEMRGKDKKQQPRKAHRAHRGRLIASKQKQIPIQTCKFNSKYQSPQPAISVPQSPFLGQQEPRAQPLHLQCPRSPRKPVCPILGGTVMPNKTVRAVQGRLLQLSRCSSQDNWLLSSSSQGDHQMSWFSDLNLGCSETPLCKEAGKNLLYDLGFDSSDDDGF

SEQ ID NO: 1655 - DNA, 3330 bp, Homosapiens
aaataaaaaataaaaataaataaataagtaaacaaatgcaggctgggtgaggtggctcatgcccgtattcccagcactttgggaggctgaggcgagtggatcgcctgagcccaggagttcgagaccagcctgggcaacatggctaaaccctgtctctaaaaaagaaaaaaatttaatacagtctgcgatgctcgtgagtcattatggtaaagctgttagtcaatttctccactgatgtagcagtttccaattgtcctttaatcaaagcataaatgacaaggtcaccagtaagtttttgtctttgagattatctaaaactgagtttcccttcaatattttcttgaaagagaatctaattccccaccttttcttcccccccacctgggggctgcaggaaagatatggagagagatttgaaggctgactcaaacatgccactcaacaattctagccaagaggtcacaaaggatctgcttgatatgattgaccatacaagcatccgaactattgaagaattggctggaaaaatagaatttgaaaacgaattgaaccacatgtgtggtcattgccaagattcacccttcaaagaggaagcctgggccctgctcatggacaagagccctcagaaggccacagatgctgaccctggcagcctcaaacaggcttttgatgatcataatattgttgagactgttctggacttggaagaggactacaatgtgatgacgtcttttaaataccaaattgagtaaggacagttatctaagctttgattccttacagcaggaggctgcccttgagcctgagcagaagcagctacaatggccgtcaggggccacatttctcaaaaggttggcagaacctgaattaccagaccctttttaaatcccagttgtgtccctttttaagctgtgagaccagttttttgaattccattgctttgaaatgtttcctattactgatttttttttttaactttccttgacatcttgaatgtgtttttttgattgatgttcaatatacccagtacccatggtaggtgtgggtcatgggcctctgctgtgtctcttagtgttcttttccacgggcccctaaaaaagtacaggagtggccaggcacagtggctcacgtctgtaatcccagcactttgggaggccaaggcgagtggatcacttgaggttaggagtttgagaccagcctggccaacatggcgaaaccccatctccactaaaaatacaaaaattagccaggagtggtggtgtgcacctgtagtcccagctactttggaggctgaggtaggagaattgcttgaacctggaggcggaggttgcaatgagccgagatggcaccgctcccctccatcctgagtgacagagcaagactctgtctcaaaaaaataataatttagctggtcatggtggttcgtgcctgtagttccagctacttgggtagggactgaggcgaaaggatcacttgaggccaggaggcagagattgcagtgagctgagatcacgccactgcactccagcatgagtgacagagtgagaccctgtctcaaaaaaaaaaagaaaaaaaaagggaagaaaggaaactgaatctcagggaagtgcccacctcctgagctaataagaggaaggaatatgggggtgaggcagagctggcaaaaggctgttttttgttttgattgtttttaaagaccaagtgaagtatagtataagaagtggggaaggagtggaacaaggagttagatctgtaactgtgagtagtcaattgagataactcaatacctttggacctgattgtttttaaagactgagggtagtataagaagaggggaaggagtagaacaaggagttagatctgaaactgtgagtagtcgattgagataactcactacctttggaccagccagggctgtttataagtgctaaagcccgaacaaaccaaagagttggggagaaaggcctaactaacagctgagtgattgtctaacagactgtcttttaggccagtgactctggcatagggcaggctgcatagccagcaacatcccttaccacaggtctagtgattcctctgggctcaaatgtggaggctacacacccactccttagcagaggttggcctggcacctgctggtgccccaagaactatggcatggttagaccctggccacttgattgcatgtgcctccccagtgggcgtgccctggttcccaaccagttgtggccactgccactgccctgcctggggcaggagttgaggttaaggctaactacaggctccttccaggccacctaccactcagaccctgcaggaggtagcacaaagcattcacagcctgtggagtcagaggccaatttcttctccctgagcaagaagaatggaagcaaatgaaaagtgctcacagtatgctcaactgcccctgctcaggtgaagaatagcctgtctggatggagagatgtcaggctacttgatactcagaaaaacaggtctcaaaacagtgccttccaaataatacatgtggatgtggacactcttctatagacgaggtggagcttaattcctgtccttacccccatattcccacctcattaccaccctttgaaggtgaactagacttaatgatacttcccacgactaaagtagggaaagggaaaagtcacaaacttatagtggggaagcctggcagacacctaaccaagtgatgtcatgtatatgtcatgagaggggtgcatcacttccctggtattcctaccaaaaacccaaattcccagtgtatgatcttgagacaaatgttagacaaatccagacgtggggtacattctacaagatacctggccagaactcaagactgttgagatggccgggtgcagtggctcatgcctataatccccgacactttgggaggctgaggcgggcagatcacttgaggtcagaagttcgagaccagcctggcaaacatggtgaaaccccatctctgctaaaaatacaaaaattagccaggcatcatggcatgtgcctttagtcatagctacacaggaggctgaggcaggagaattgcttgaacccaggaggtggaggttgcagtgagccaagatcgcatcactgcactccagcctgggcaacaagcaagactccacctcaaaaagaaaaaaaaagactgttgaggtcatgaaaaataaggaaagactcaaaaactatcaacagaccactaaagaccaagaagacacaatggctaaatgcaacatggaatcctggagtgcatcctggaagagaaagagaacattattggaaaaactgataaaacttgaataaaaactagtgttt

SEQ ID NO: 1656 - protein, 116 aa, Homosapiens [sequence omitted]

SEQ ID NO: 1657 - DNA, 4738 bp, Homosapiens
gatgaattttataagacaccttcacttagcagttctggttcctctgatggagggacacgaccaagcagctctcagcagggctttggggatgatgaggcttgcagcatggacaccaactaatgctgactccacgatcctgccaccctgtagcgccagtgtaatcccccaggagaacatctttgacactctgcagactgctagtgttctgtctaaaaaccagacaaggaaatacccttcttttatgagcagaaggaaacaaaaaaaaaaaaagaagaccgtttacctagaagaagctatgtcaagaggctgaattatttttatttttaaacaggtggtgagaaatttctgtgaaacctgtgaagctgaaaagggggtgggatgggggtactcaatggagtatgtctgatggatcccgaagaatggagaggaacacaggcgctgagtatggagcagcctggagacccaccccacctgcagggctgccctgagcgcctggatttctggttctgatgccaatactagtcaccccaagtagtctgctcacagtaacccaaacctcaagtaaactcccctttccctcgctatgtgcactgatatgggtttataattttctgaaagttacccactgaagcccatttctccgttgagtcatcttgtaatttccagctttctccccgctaaggaagatatctagtgttggggatcctggcccctcaacctcctgtggaacccagcagttctgttatatcccctgctaccctagatgaattaagacggttaaatactgtgtggaacttttattagataacacactttttattagataacgcttaaaggaagtcagtacataaaactgcccggtgctgtgtcccgtctagttgtttccatgttggcttgagaacagaaatctttgtgggagttagccgggaaagggctccagttcatggcgatttagggtagtaatacattttggtgttacccagatgctttctagaacgggttctttcctcatccctgccaagactcttcccggggcccccattcgaaagccccgtccccactcccaccgcggggccagccgctgcgtgtgggcaaggccttaaggaaccggacgtatgggtccgggattttttgtctgaccttcaacctaatccgtgggggtttggggcctgcgcggggcacgcgcatgcgatgaccgttggatgggtcggcgtcactgcgctgcgggtgaggacaaggacgtggctgccgactcgccaaagggggggtgccggtagggccagcggcctgggagccgcggtggggcgggaggcagcggcggggcgggccaggaagctgtgggaagtggggcggggcgtctttggggcttctggcagatggcgggttcctccgcgagagccgagaaccgcctactccaggaggaaagcccgagggttgtgggtcctgctatagccagggccaagctccaggaaatcgtggccattcaggggtagtttgcagcctcatttgtaacattattgtgttgtcctgtgcatttccaatgcattacataaagacatggtcgcttttaggagaaatgtctgaaaaactaagaagatgcagaaaggaactgactgcagccattgaccgggcctttgaaggagttagttattcccaggagtgcacaggccagcagaggctggaactgagcgccgcgccgctctccttctcgctgcccgtgcacaggctcctctgcagaagacatcctctggcagcctgctcttctgctgctccttttgctgctgtcccatgtgctcctgagaatgagaaccctgcctttgcaacaaaccatgccccggtaaatgcaaaaccacatgctctgtgccccgagagaaaacctctaaccagcaaggaaaatgtattgatgcattcctccattttggcacctgaaagagagtcttggagaactgcaggagagggggaaaactggagaaaagaaaatttaaggaaagatatggagagagatttgaaggctgactcaaacatgccactcaacaattctagccaagaggtcacaaaggatctgcttgatatgattgaccatacaagcatccgaactattgaagaattggctggaaaaatagaatttgaaaacgaattgaaccacatgtgtggtcattgccaagattcacccttcaaagaggaagcctgggccctgctcatggacaagagccctcagaaggccacagatgctgaccctggcagcctcaaacaggcttttgatgatcataatattgttgagactgttctggacttggaagaggactacaatgtgatgacgtcttttaaataccaaattgagtaaggacagttatctaagctttgattccttacagcaggaggctgcccttgagcctgagcagaagcagctacaatggccgtcaggggccacatttctcaaaaggttggcagaacctgaattaccagaccctttttaaatcccagttgtgtccctttttaagctgtgagaccagttttttgaattccattgctttgaaatgtttcctattactgatttttttttttaactttccttgacatcttgaatgtgtttttttgattgatgttcaatatacccagtacccatggtaggtgtgggtcatgggcctctgctgtgtctcttagtgttcttttccacgggcccctaaaaaagtacaggagtggccaggcacagtggctcacgtctgtaatcccagcactttgggaggccaaggcgagtggatcacttgaggttaggagtttgagaccagcctggccaacatggcgaaaccccatctccactaaaaatacaaaaattagccaggagtggtggtgtgcacctgtagtcccagctactttggaggctgaggtaggagaattgcttgaacctggaggcggaggttgcaatgagccgagatggcaccgctcccctccatcctgagtgacagagcaagactctgtctcaaaaaaataataatttagctggtcatggtggttcgtgcctgtagttccagctacttgggtagggactgaggcgaaaggatcacttgaggccaggaggcagagattgcagtgagctgagatcacgccactgcactccagcatgagtgacagagtgagaccctgtctcaaaaaaaaaaagaaaaaaaaagggaagaaaggaaactgaatctcagggaagtgcccacctcctgagctaataagaggaaggaatatgggggtgaggcagagctggcaaaaggctgttttttgttttgattgtttttaaagaccaagtgaagtatagtataagaagtggggaaggagtggaacaaggagttagatctgtaactgtgagtagtcaattgagataactcaatacctttggacctgattgtttttaaagactgagggtagtataagaagaggggaaggagtagaacaaggagttagatctgaaactgtgagtagtcgattgagataactcactacctttggaccagccagggctgtttataagtgctaaagcccgaacaaaccaaagagttggggagaaaggcctaactaacagctgagtgattgtctaacagactgtcttttaggccagtgactctggcatagggcaggctgcatagccagcaacatcccttaccacaggtctagtgattcctctgggctcaaatgtggaggctacacacccactccttagcagaggttggcctggcacctgctggtgccccaagaactatggcatggttagaccctggccacttgattgcatgtgcctccccagtgggcgtgccctggttcccaaccagttgtggccactgccactgccctgcctggggcaggagttgaggttaaggctaactacaggctccttccaggccacctaccactcagaccctgcaggaggtagcacaaagcattcacagcctgtggagtcagaggccaatttcttctccctgagcaagaagaatggaagcaaatgaaaagtgctcacagtatgctcaactgcccctgctcaggtgaagaatagcctgtctggatggagagatgtcaggctacttgatactcagaaaaacaggtctcaaaacagtgccttccaaataatacatgtggatgtggacactcttctatagacgaggtggagcttaattcctgtccttacccccatattcccacctcattaccaccctttgaaggtgaactagacttaatgatacttcccacgactaaagtagggaaagggaaaagtcacaaacttatagtggggaagcctggcagacacctaaccaagtgatgtcatgtatatgtcatgagaggggtgcatcacttccctggtattcctaccaaaaacccaaattcccagtgtatgatcttgagacaaatgttagacaaatccagacgtggggtacattctacaagatacctggccagaactcaagactgttgagatggccgggtgcagtggctcatgcctataatccccgacactttgggaggctgaggcgggcagatcacttgaggtcagaagttcgagaccagcctggcaaacatggtgaaaccccatctctgctaaaaatacaaaaattagccaggcatcatggcatgtgcctttagtcatagctacacaggaggctgaggcaggagaattgcttgaacccaggaggtggaggttgcagtgagccaagatcgcatcactgcactccagcctgggcaacaagcaagactccacctc

SEQ ID NO: 1658 - protein, 267 aa, Homosapiens; identical to SEQ ID NO: 123

SEQ ID NO: 1659 - DNA, 1310 bp, Homosapiens
gtgggaagtggggcggggcgtctttggggcttctggcagatggcgggttcctccgcgagagccgagaaccgcctactccaggaggaaagcccgagggttgtgggtcctgctatagccagggccaagctccaggaaatcgtggccattcaggggtagtttgcagcctcatttgtaacattattgtgttgtcctgtgcatttccaatgcattacataaagacatggtcgcttttaggagaaatgtctgaaaaactaagaagatgcagaaaggaactgactgcagccattgaccgggcctttgaaggagttagttattcccaggagtgcacaggccagcagaggctggaactgagcgccgcgccgctctccttctcgctgcccgtgcacaggctcctctgcagaagacatcctctggcagcctgctcttctgctgctccttttgctgctgtcccatgtgctcctgagaatgagaaccctgcctttgcaacaaaccatgccccggtaaatgcaaaaccacatgctctgtgccccgagagaaaacctctaaccagcaaggaaaatgtattgatgcattcctccattttggcacctgaaagagagtcttggagaactgcaggagagggggaaaactggagaaaagaaaatttaaggaaagatatggagagagatttgaaggctgactcaaacatgccactcaacaattctagccaagaggtcacaaaggatctgcttgatatgattgaccatacaagcatccgaactattgaagaattggctggaaaaatagaatttgaaaacgaattgaaccacatgtgtggtcattgccaagattcacccttcaaagaggaagcctgggccctgctcatggacaagagccctcagaaggccacagatgctgaccctggcagcctcaaacaggcttttgatgatcataatattgttgagactgttctggacttggaagaggactacaatgtgatgacgtcttttaaataccaaattgagtaaggacagttatctaagctttgattccttacagcaggaggctgcccttgagcctgagcagaagcagctacaatggccgtcaggggccacatttctcaaaaggttggcagaacctgaattaccagaccctttttaaatcccagttgtgtccctttttaagctgtgagaccagttttttgaattccattgctttgaaatgtttcctattactgatttttttttttaactttccttgacatcttgaatgtgtttttttgattgatgttcaatatacccagtacccatggtaggtgtgggtcatgggcc

SEQ ID NO: 1660 - protein, 267 aa, Homosapiens; identical to SEQ ID NO: 123

SEQ ID NO: 1661 - DNA, 1726 bp, Homosapiens
ttatgggttccctggttttggattattgcacatagccatcctgaagattggcactgaatagctctgttttttctattagtttcccaaaattatagtttaaaatcttggtccctgacagctccatttttagccttttgatcctttttgagaaggaacagattagaaaagaaggtgagttgttttttggttgttaagacacacactgtaaacttttttaatttcaggggttttgttttggggatttttgtgtttatttagtgcaagcctaataagctagccagattaattctctggagaccgctagagtattttctttgttgacttggcagacactgcatatgcgaagaacaaactgaatggtaaatggtattactttgatgatagcaacgtgtccctggcctctgaggatcagatagtgactaaagcagcttatgtgctattttaccaacgtcgagatgatgaattttataagacaccttcacttagcagttctggttcctctgatggagggacacgaccaagcagctctcagcagggctttggggatgatgaggcttgcagcatggacaccaactaatgctgactccacgatcctgccaccctgtagcgccagtgtaatcccccaggagaacatctttgacactctgcagactgctagtgttctgtctaaaaaccagacaaggaaatacccttcttttatgagcagaaggaaacaaaaaaaaaaaaagaagaccgtttacctagaagaagctatgtcaagaggctgaattatttttatttttaaacaggtggtgagaaatttctgtgaaacctgtgaagctgaaaagggggtgggatgggggtactcaatggagtatgtctgatggatcccgaagaatggagaggaacacaggcgctgagtatggagcagcctggagacccaccccacctgcagggctgccctgagcgcctggatttctggttctgatgccaatactagtcaccccaagtagtctgctcacagtaacccaaacctcaagtaaactcccctttccctcgctatgtgcactgatatgggtttataattttctgaaagttacccactgaagcccatttctccgttgagtcatcttgtaatttccagctttctccccgctaaggaagatatctagtgttggggatcctggcccctcaacctcctgtggaacccagcagttctgttatatcccctgctaccctagatgaattaagacggttaaatactgtgtggaacttttattagataacacactttttattagataacgcttaaaggaagtcagtacataaaactgcccggtgctgtgtcccgtctagttgtttccatgttggcttgagaacagaaatctttgtgggagttagccgggaaagggctccagttcatggcgatttagggtagtaatacattttggtgttacccagatgctttctagaacgggttctttcctcatccctgccaagactcttcccggggcccccattcgaaagccccgtccccactcccaccgcggggccagccgctgcgtgtgggcaaggccttaaggaaccggacgtatgggtccgggattttttgtctgaccttcaacctaatccgtgggggtttggggcctgcgcggggcacgcgcatgcgatgaccgttggatgggtcggcgtcactgcgctgcgggtgaggacaaggacgtggctgccgactcgccaaagggggggt

SEQ ID NO: 1662 - protein, 111 aa, Homosapiens
MCYFTNVEMMNFIRHLHLAVLVPLMEGHDQAALSRALGMMRLAAWTPTNADSTILPPCSASVIPQENIFDTLQTASVLSKNQTRKYPSFMSRRKQKKKKKTVYLEEAMSRG

SEQ ID NO: 1663 - DNA, 1947 bp, Homosapiens
ggccaatgtatttctatttatttatttatccctcaacagtcctccctccaatttaatatatttcttggcagaggatagtaaatgtttccatggatggattccttggtggtggtgatggtggtttgttttttttttttttttgaggcagagtcttgctctgtcacccaggctggagtgcagtggcacgatctcggctcactgcaacctctgcctctcaggttcaagcgattctcctgcctcagcctcctgagcagctgggattacgggttcgtgccaccacgcccggctaattttttgtatttttagtagagatgggatttcaccacgttggccaggctggtctcgaactcctggcctcaggtgatccacccgccttggcgtcccagagtgctgggattacaggcgtgagccaccacacctggccggttgtttatatttaattgtctttttttcactaatgaggaccaccttgtaaattctgggcattttcagagttttctcttccatgtgaattgctccagctaacttaatattagtttctcaagggtttgtgtagacctggctttgtctctttccatctgtttctctctttccctttaacgtcacttgcctgaggtctataaggccctttaaggttgccagcccagagccagaagagattggtgtccctgaagttaagaaagccacctttgcctacagatggtgttcacagtgttggtgtggagtcacagcttgacttttgatcaagcactgcgcctagcagaaattttactacctctccaaaatcatcagcaagtccctattcctcagtgtctgcctctcctgtagcgccagtgtaatcccccaggagaacatctttgacactctgcagactgctagtgttctgtctaaaaaccagacaaggaaatacccttcttttatgagcagaaggaaacaaaaaaaaaaaaagaagaccgtttacctagaagaagctatgtcaagaggctgaattatttttatttttaaacaggtggtgagaaatttctgtgaaacctgtgaagctgaaaagggggtgggatgggggtactcaatggagtatgtctgatggatcccgaagaatggagaggaacacaggcgctgagtatggagcagcctggagacccaccccacctgcagggctgccctgagcgcctggatttctggttctgatgccaatactagtcaccccaagtagtctgctcacagtaacccaaacctcaagtaaactcccctttccctcgctatgtgcactgatatgggtttataattttctgaaagttacccactgaagcccatttctccgttgagtcatcttgtaatttccagctttctccccgctaaggaagatatctagtgttggggatcctggcccctcaacctcctgtggaacccagcagttctgttatatcccctgctaccctagatgaattaagacggttaaatactgtgtggaacttttattagataacacactttttattagataacgcttaaaggaagtcagtacataaaactgcccggtgctgtgtcccgtctagttgtttccatgttggcttgagaacagaaatctttgtgggagttagccgggaaagggctccagttcatggcgatttagggtagtaatacattttggtgttacccagatgctttctagaacgggttctttcctcatccctgccaagactcttcccggggcccccattcgaaagccccgtccccactcccaccgcggggccagccgctgcgtgtgggcaaggccttaaggaaccggacgtatgggtccgggattttttgtctgaccttcaacctaatccgtgggggtttggggcctgcgcggggcacgcgcatgcgatgaccgttggatgggtcggcgtcactgcgctgcgggtgaggacaaggacgtggctgccgactcgccaaagggggggt

SEQ ID NO: 1664 - protein, 42 aa, Homosapiens
MVFTVLVWSHSLTFDQALRLAEILLPLQNHQQVPIPQCLPLL

SEQ ID NO: 1665 - DNA, 1328 bp, Homosapiens
ttatgggttccctggttttggattattgcacatagccatcctgaagattggcactgaatagctctgttttttctattagtttcccaaaattatagtttaaaatcttggtccctgacagctccatttttagccttttgatcctttttgagaaggaacagattagaaaagaaggtgagttgttttttggttgttaagacacacactgtaaacttttttaatttcaggggttttgttttggggatttttgtgtttatttagtgcaagcctaataagctagccagattaattctctggagaccgctagagtattttctttgttgacttggcagacactgcatatgcgaagaacaaactgaatggtaaatggtattactttgatgatagcaacgtgtccctggcctctgaggatcagatagtgactaaagcagcttatgtgctattttaccaacgtcgagatgatgaattttataagacaccttcacttagcagttctggttcctctgatggagggacacgaccaagcagctctcagcagggctttggggatgatgaggcttgcagcatggacaccaactaatgctgactccacgatcctgccaccctgtagcgccagtgtaatcccccaggagaacatctttgacactctgcagactgctagtgttctgtctaaaaaccagacaaggaaatacccttcttttatgagcagaaggaaacaaaaaaaaaaaaagaagaccgtttacctagaagaagctatgtcaagaggctgaattatttttatttttaaacaggtggtgagaaatttctgtgaaacctgtgaagctgaaaagggggtgggatgggggtactcaatggagtatgtctgatggatcccgaagaatggagaggaacacaggcgctgagtatggagcagcctggagacccaccccacctgcagggctgccctgagcgcctggatttctggttctgatgccaatactagtcaccccaagtagtctgctcacagtaacccaaacctcaagtaaactcccctttccctcgctatgtgcactgatatgggtttataattttctgaaagttacccactgaagcccatttctccgttgagtcatcttgtaatttccagctttctccccgctaaggaagatatctagtgttggggatcctggcccctcaacctcctgtggaacccagcagttctgttatatcccctgctaccctagatgaattaagacggttaaatactgtgtggaacttttattagataacacactttttattagataacgcttaaaggaagtcagtacataaaactgcccggtgctgtgtcc

SEQ ID NO: 1666 - protein, 111 aa, Homosapiens; identical to SEQ ID NO: 1662

SEQ ID NO: 1667 - DNA, 1549 bp, Homosapiens
ggccaatgtatttctatttatttatttatccctcaacagtcctccctccaatttaatatatttcttggcagaggatagtaaatgtttccatggatggattccttggtggtggtgatggtggtttgttttttttttttttttgaggcagagtcttgctctgtcacccaggctggagtgcagtggcacgatctcggctcactgcaacctctgcctctcaggttcaagcgattctcctgcctcagcctcctgagcagctgggattacgggttcgtgccaccacgcccggctaattttttgtatttttagtagagatgggatttcaccacgttggccaggctggtctcgaactcctggcctcaggtgatccacccgccttggcgtcccagagtgctgggattacaggcgtgagccaccacacctggccggttgtttatatttaattgtctttttttcactaatgaggaccaccttgtaaattctgggcattttcagagttttctcttccatgtgaattgctccagctaacttaatattagtttctcaagggtttgtgtagacctggctttgtctctttccatctgtttctctctttccctttaacgtcacttgcctgaggtctataaggccctttaaggttgccagcccagagccagaagagattggtgtccctgaagttaagaaagccacctttgcctacagatggtgttcacagtgttggtgtggagtcacagcttgacttttgatcaagcactgcgcctagcagaaattttactacctctccaaaatcatcagcaagtccctattcctcagtgtctgcctctcctgtagcgccagtgtaatcccccaggagaacatctttgacactctgcagactgctagtgttctgtctaaaaaccagacaaggaaatacccttcttttatgagcagaaggaaacaaaaaaaaaaaaagaagaccgtttacctagaagaagctatgtcaagaggctgaattatttttatttttaaacaggtggtgagaaatttctgtgaaacctgtgaagctgaaaagggggtgggatgggggtactcaatggagtatgtctgatggatcccgaagaatggagaggaacacaggcgctgagtatggagcagcctggagacccaccccacctgcagggctgccctgagcgcctggatttctggttctgatgccaatactagtcaccccaagtagtctgctcacagtaacccaaacctcaagtaaactcccctttccctcgctatgtgcactgatatgggtttataattttctgaaagttacccactgaagcccatttctccgttgagtcatcttgtaatttccagctttctccccgctaaggaagatatctagtgttggggatcctggcccctcaacctcctgtggaacccagcagttctgttatatcccctgctaccctagatgaattaagacggttaaatactgtgtggaacttttattagataacacactttttattagataacgcttaaaggaagtcagtacataaaactgcccggtgctgtgtcc

SEQ ID NO: 1668 - protein, 42 aa, Homosapiens; identical to SEQ ID NO: 1664

SEQ ID NO: 1669 - DNA, 3581 bp, Homosapiens
gtgcgtgcgtgggcgcggtctatagcacgccgcgcgcggggcggatgtccgggccggctgggccggggccgcggaggagatggcggaaggtggaggctgccgtgagcgaccggatgcggagactcagaagtccgagcttggacccttaatgaggaccacactccaacgcggggcgcagtggtatcttattgacagccggtggttcaagcagtggaagaagtatgtgggctttgacagctgggacatgtacaatgtgggtgaacataacctatttcctggcccaatagacaactctgggctattttcagatcctgagagtcagaccttgaaagaacacttaattgatgaattggactatgtattggtccctaccgaggcgtggaataaactactaaactggtacggctgtgtagaaggccagcaacccatcgtcagaaaagttgtggagcatggcctgtttgtcaagcactgcaaagtcgaggtgtatttgctggaactgaagctctgtgagaacagtgaccccaccaatgtgctgagttgccatttcagcaaggcagacaccattgcaaccatcgagaaagagatgcggaagctattcaacatccctgcggagcgtgaaacacggctctggaacaaatacatgagcaacacctacgagcagttgagcaagctagacaacactgtccaggatgctgggctataccagggtcaggtgctagtaattgagcctcaaaatgaagatggcacatggcccaggcagaccttgcagtcaaatggatctggcttttctgcttcgtataattgtcaggagccaccatcctctcatatacaacctgggctctgtggacttggaaacctgggaaacacctgcttcatgaactccgctttgcagtgtttgagcaacactgcaccactgactgactactttctcaaagatgagtatgaagccgaaatcaacagagacaaccctctggggatgaaaggggaaattgcagaagcctatgctgaactcattaagcagatgtggtctggaagggacgcccatgtggcacctcgcatgttcaaaactcaagtaggacgttttgctcctcaattttctggctaccagcaacaagattctcaggagctgctggcctttcttctagatggattgcatgaagatctgaaccgggtaaagaaaaagccctacttggagctgaaggatgccaatgggcggccagatgcggtggtggcaaaggaagcctgggagaatcacaggttgaggaatgattctgtgattgtggatactttccatggcctcttcaaatctactttggtttgcccagaatgtgctaaggtttctgtgacctttgacccattttgctatctaacgctgccactgcccttgaagaaagatcgagttatggaggttttcctggttcctgctgaccctcactgcagacctactcagtaccgtgtgactgtgccgctgatgggggctgtgtccgacctgtgcgaggctctctccaggctgtctggcattgctgcagaaaatatggtggtcgcagatgtgtataatcaccgattccacaaaattttccaaatggatgaaggtttaaaccacatcatgcctcgggatgacattttcgtgtacgaggtctgcagcacttccgtggatggctcggaatgtgtcacgcttccagtctacttcagggagaggaagtccaggccatcaagcacttcctccgcatcagcgctatatgggcagccactattgctttctgtccccaagcacaagttaacccttgagtctttgtaccaggctgtttgtgatcgtatcagccgctatgtgaaacagcctttacctgatgagtttggcagctcacccttggagccaggggcctgcaatggctccaggaacagctgtgaaggagaagatgaggaagaaatggagcatcaggaagaaggcaaagagcagctttcagaaacagaaggcagtggggaagatgagccaggaaatgaccccagtgagaccacccaaaagaagatcaaaggccagccctgcccaaaaaggctttttaccttcagtcttgtgaactcctatggaacagctgacataaattcacttgcagctgatggaaaactacttaaactcaactctcgatctacactggccatggattgggacagtgaaactcggagactttactatgatgagcaagaatctgaggcctacgagaagcatgtgagcatgttgcagcctcagaagaagaagaagaccacagtggccctgagagactgcatcgagctcttcaccaccatggagacccttggggagcatgacccctggtactgtcccaactgtaagaagcatcaacaggccacaaaaaagtttgacctatggtccttgcccaagatcctggtggtccacctcaaacgtttctcctacaacagatactggagggataagctcgacacagtcgtagaattcccaatcagagggctgaacatgtccgagtttgtctgtaacctgtcagcaaggccttatgtgtacgacctcattgccgtgtccaatcattatggagccatgggggttggccactacactgcatatgcgaagaacaaactgaatggtaaatggtattactttgatgatagcaacgtgtccctggcctctgaggatcagatagtgactaaagcagcttatgtgctattttaccaacgtcgagatgatgaattttataagacaccttcacttagcagttctggttcctctgatggagggacacgaccaagcagctctcagcagggctttggggatgatgaggcttgcagcatggacaccaactaatgctgactccacgatcctgccaccctgtagcgccagtgtaatcccccaggagaacatctttgacactctgcagactgctagtgttctgtctaaaaaccagacaaggaaatacccttcttttatgagcagaaggaaacaaaaaaaaaaaaagaagaccgtttacctagaagaagctatgtcaagaggctgaattatttttatttttaaacaggtggtgagaaatttctgtgaaacctgtgaagctgaaaagggggtgggatgggggtactcaatggagtatgtctgatggatcccgaagaatggagaggaacacaggcgctgagtatggagcagcctggagacccaccccacctgcagggctgccctgagcgcctggatttctggttctgatgccaatactagtcaccccaagtagtctgctcacagtaacccaaacctcaagtaaactcccctttccctcgctatgtgcactgatatgggtttataattttctgaaagttacccactgaagcccatttctccgttgagtcatcttgtaatttccagctttctccccgctaaggaagatatctagtgttggggatcctggcccctcaacctcctgtggaacccagcagttctgttatatcccctgctaccctagatgaattaagacggttaaatactgtgtggaacttttattagataacacactttttattagataacgcttaaaggaagtcagtacataaaactgcccggtgctgtgtcc

SEQ ID NO: 1670 - protein, 916 aa, Homosapiens; identical to SEQ ID NO: 127

SEQ ID NO: 1671 - DNA, 3722 bp, Homosapiens
gtgcgtgcgtgggcgcggtctatagcacgccgcgcgcggggcggatgtccgggccggctgggccggggccgcggaggagatggcggaaggtggaggctgccgtgagcgaccggatgcggagactcagaagtccgagcttggacccttaatgaggaccacactccaacgcggggcgcagtggtatcttattgacagccggtggttcaagcagtggaagaagtatgtgggctttgacagctgggacatgtacaatgtgggtgaacataacctatttcctggcccaatagacaactctgggctattttcagatcctgagagtcagaccttgaaagaacacttaattgatgaattggactatgtattggtccctaccgaggcgtggaataaactactaaactggtacggctgtgtagaaggccagcaacccatcgtcagaaaagttgtggagcatggcctgtttgtcaagcactgcaaagtcgaggtgtatttgctggaactgaagctctgtgagaacagtgaccccaccaatgtgctgagttgccatttcagcaaggcagacaccattgcaaccatcgagaaagagatgcggaagctattcaacatccctgcggagcgtgaaacacggctctggaacaaatacatgagcaacacctacgagcagttgagcaagctagacaacactgtccaggatgctgggctataccagggtcaggtgctagtaattgagcctcaaaatgaagatggcacatggcccaggcagaccttgcagtcaaaatcaagcactgcgcctagcagaaattttactacctctccaaaatcatcagcaagtccctattcctcagtgtctgcctctctcattgcaaatggtgatagcactagcacctgtgggatgcacagttccggtgtcagcaggggtggatctggcttttctgcttcgtataattgtcaggagccaccatcctctcatatacaacctgggctctgtggacttggaaacctgggaaacacctgcttcatgaactccgctttgcagtgtttgagcaacactgcaccactgactgactactttctcaaagatgagtatgaagccgaaatcaacagagacaaccctctggggatgaaaggggaaattgcagaagcctatgctgaactcattaagcagatgtggtctggaagggacgcccatgtggcacctcgcatgttcaaaactcaagtaggacgttttgctcctcaattttctggctaccagcaacaagattctcaggagctgctggcctttcttctagatggattgcatgaagatctgaaccgggtaaagaaaaagccctacttggagctgaaggatgccaatgggcggccagatgcggtggtggcaaaggaagcctgggagaatcacaggttgaggaatgattctgtgattgtggatactttccatggcctcttcaaatctactttggtttgcccagaatgtgctaaggtttctgtgacctttgacccattttgctatctaacgctgccactgcccttgaagaaagatcgagttatggaggttttcctggttcctgctgaccctcactgcagacctactcagtaccgtgtgactgtgccgctgatgggggctgtgtccgacctgtgcgaggctctctccaggctgtctggcattgctgcagaaaatatggtggtcgcagatgtgtataatcaccgattccacaaaattttccaaatggatgaaggtttaaaccacatcatgcctcgggatgacattttcgtgtacgaggtctgcagcacttccgtggatggctcggaatgtgtcacgcttccagtctacttcagggagaggaagtccaggccatcaagcacttcctccgcatcagcgctatatgggcagccactattgctttctgtccccaagcacaagttaacccttgagtctttgtaccaggctgtttgtgatcgtatcagccgctatgtgaaacagcctttacctgatgagtttggcagctcacccttggagccaggggcctgcaatggctccaggaacagctgtgaaggagaagatgaggaagaaatggagcatcaggaagaaggcaaagagcagctttcagaaacagaaggcagtggggaagatgagccaggaaatgaccccagtgagaccacccaaaagaagatcaaaggccagccctgcccaaaaaggctttttaccttcagtcttgtgaactcctatggaacagctgacataaattcacttgcagctgatggaaaactacttaaactcaactctcgatctacactggccatggattgggacagtgaaactcggagactttactatgatgagcaagaatctgaggcctacgagaagcatgtgagcatgttgcagcctcagaagaagaagaagaccacagtggccctgagagactgcatcgagctcttcaccaccatggagacccttggggagcatgacccctggtactgtcccaactgtaagaagcatcaacaggccacaaaaaagtttgacctatggtccttgcccaagatcctggtggtccacctcaaacgtttctcctacaacagatactggagggataagctcgacacagtcgtagaattcccaatcagagggctgaacatgtccgagtttgtctgtaacctgtcagcaaggccttatgtgtacgacctcattgccgtgtccaatcattatggagccatgggggttggccactacactgcatatgcgaagaacaaactgaatggtaaatggtattactttgatgatagcaacgtgtccctggcctctgaggatcagatagtgactaaagcagcttatgtgctattttaccaacgtcgagatgatgaattttataagacaccttcacttagcagttctggttcctctgatggagggacacgaccaagcagctctcagcagggctttggggatgatgaggcttgcagcatggacaccaactaatgctgactccacgatcctgccaccctgtagcgccagtgtaatcccccaggagaacatctttgacactctgcagactgctagtgttctgtctaaaaaccagacaaggaaatacccttcttttatgagcagaaggaaacaaaaaaaaaaaaagaagaccgtttacctagaagaagctatgtcaagaggctgaattatttttatttttaaacaggtggtgagaaatttctgtgaaacctgtgaagctgaaaagggggtgggatgggggtactcaatggagtatgtctgatggatcccgaagaatggagaggaacacaggcgctgagtatggagcagcctggagacccaccccacctgcagggctgccctgagcgcctggatttctggttctgatgccaatactagtcaccccaagtagtctgctcacagtaacccaaacctcaagtaaactcccctttccctcgctatgtgcactgatatgggtttataattttctgaaagttacccactgaagcccatttctccgttgagtcatcttgtaatttccagctttctccccgctaaggaagatatctagtgttggggatcctggcccctcaacctcctgtggaacccagcagttctgttatatcccctgctaccctagatgaattaagacggttaaatactgtgtggaacttttattagataacacactttttattagataacgcttaaaggaagtcagtacataaaactgcccggtgctgtgtcc

SEQ ID NO: 1672 - protein, 963 aa, Homosapiens; identical to SEQ ID NO: 125

SEQ ID NO: 1673 - DNA, 1242 bp, Homosapiens
ttatgggttccctggttttggattattgcacatagccatcctgaagattggcactgaatagctctgttttttctattagtttcccaaaattatagtttaaaatcttggtccctgacagctccatttttagccttttgatcctttttgagaaggaacagattagaaaagaaggtgagttgttttttggttgttaagacacacactgtaaacttttttaatttcaggggttttgttttggggatttttgtgtttatttagtgcaagcctaataagctagccagattaattctctggagaccgctagagtattttctttgttgacttggcagacactgcatatgcgaagaacaaactgaatggtaaatggtattactttgatgatagcaacgtgtccctggcctctgaggatcagatagtgactaaagcagcttatgtgctattttaccaacgtcgagatgatgaattttataagacaccttcacttagcagttctggttcctctgatggagggacacgaccaagcagctctcagcagggctttggggatgatgaggcttgcagcatggacaccaactaatgctgactccacgatcctgccaccctgtagcgccagtgtaatcccccaggagaacatctttgacactctgcagactgctagtgttctgtctaaaaaccagacaaggaaatacccttcttttatgagcagaaggaaacaaaaaaaaaaaaagaagaccgtttacctagaagaagctatgtcaagaggctgaattatttttatttttaaacaggtggtgagaaatttctgtgaaacctgtgaagctgaaaagggggtgggatgggggtactcaatggagtatgtctgatggatcccgaagaatggagaggaacacaggcgctgagtatggagcagcctggagacccaccccacctgcagggctgccctgagcgcctggatttctggttctgatgccaatactagtcaccccaagtagtctgctcacagtaacccaaacctcaagtaaactcccctttccctcgctatgtgcactgatatgggtttataattttctgaaagttacccactgaagcccatttctccgttgagtcatcttgtaatttccagctttctccccgctaaggaagatatctagtgttggggatcctggcccctcaacctcctgtggaacccagcagttctgttatatcccctgctaccctagatgaattaagacggttaaatac

SEQ ID NO: 1674 - protein, 111 aa, Homosapiens; identical to SEQ ID NO: 1662

SEQ ID NO: 1675 - DNA, 1463 bp, Homosapiens
ggccaatgtatttctatttatttatttatccctcaacagtcctccctccaatttaatatatttcttggcagaggatagtaaatgtttccatggatggattccttggtggtggtgatggtggtttgttttttttttttttttgaggcagagtcttgctctgtcacccaggctggagtgcagtggcacgatctcggctcactgcaacctctgcctctcaggttcaagcgattctcctgcctcagcctcctgagcagctgggattacgggttcgtgccaccacgcccggctaattttttgtatttttagtagagatgggatttcaccacgttggccaggctggtctcgaactcctggcctcaggtgatccacccgccttggcgtcccagagtgctgggattacaggcgtgagccaccacacctggccggttgtttatatttaattgtctttttttcactaatgaggaccaccttgtaaattctgggcattttcagagttttctcttccatgtgaattgctccagctaacttaatattagtttctcaagggtttgtgtagacctggctttgtctctttccatctgtttctctctttccctttaacgtcacttgcctgaggtctataaggccctttaaggttgccagcccagagccagaagagattggtgtccctgaagttaagaaagccacctttgcctacagatggtgttcacagtgttggtgtggagtcacagcttgacttttgatcaagcactgcgcctagcagaaattttactacctctccaaaatcatcagcaagtccctattcctcagtgtctgcctctcctgtagcgccagtgtaatcccccaggagaacatctttgacactctgcagactgctagtgttctgtctaaaaaccagacaaggaaatacccttcttttatgagcagaaggaaacaaaaaaaaaaaaagaagaccgtttacctagaagaagctatgtcaagaggctgaattatttttatttttaaacaggtggtgagaaatttctgtgaaacctgtgaagctgaaaagggggtgggatgggggtactcaatggagtatgtctgatggatcccgaagaatggagaggaacacaggcgctgagtatggagcagcctggagacccaccccacctgcagggctgccctgagcgcctggatttctggttctgatgccaatactagtcaccccaagtagtctgctcacagtaacccaaacctcaagtaaactcccctttccctcgctatgtgcactgatatgggtttataattttctgaaagttacccactgaagcccatttctccgttgagtcatcttgtaatttccagctttctccccgctaaggaagatatctagtgttggggatcctggcccctcaacctcctgtggaacccagcagttctgttatatcccctgctaccctagatgaattaagacggttaaatac

SEQ ID NO: 1676 - protein, 42 aa, Homosapiens; identical to SEQ ID NO: 1664

SEQ ID NO: 1677 - DNA, 3581 bp, Homosapiens
atgatttgtaaatcaaaccaggatgcttgaagatgaaccttgtggggttttttttgttgtttttttttaagagacagagtctcactctgtcacctaggctggagtgcagtggcacgatctcggctcactgcaacctccgcctcccggtttcacgcaattctcctgcccctcagcctccccagtagctgggactacaggcacatgctgccatgcctggctaatttctttattttctttttttttgagacagagtttcgttctttttgcccaggctggagtgcaatggcgcgatcttggctcactgcaacttctgcctcccgggttcaagcaattctcctgcctcagcttcccgagtagcgccatcacatctggctaatttttttttttttgagatggagtctcactctgtcaccaagctggagtgcggtggtgcagtctcggcttactcccgggttcaagtgatgcttctgccccagcctcccgagtggctgggatgacaggcgcccgccaccatgtccagataatttttgtatttttagtagagatgtggtttcactgtgtcttgaactcctgacctcatggccaggctggtcttgaattcctgaccttgtgatcgtgacctcatgatccgccagcctcggcctcccaaagtgctgggattacaagggtgagccacctcacccagcctaattttgtatttttagtagtgacggggtttctccatgttggtcaggctggtctcaaactcctgacctcaggtgatccgtctgcctcggcctcccaaagtgctgagattacaggcatgagccaccacgcgcgacctggctaatttcttttgcattttagtagagacagggtttcactgtgttgcccaggctggtctcgaactcctgagctcaggcaatctgcctgcctcagcctcccaaagtactaggattacaggcacgagccactgcgcctggtcagccttgtggtttttcacactgaaagggtatgtggtggtgtggactgatgtgacaggaagaccagttaatttgtggactctcacttaaataaagtttaccttgaagtagtatgaatacaggctttttgtaatttattttaacttaatatgaagaatatttattccttgagaagcaacctaaggcattaaatagggcttgctctttgcaaaaagtcagtagcattgtttctgcttctctctcccagatcaagcactgcgcctagcagaaattttactacctctccaaaatcatcagcaagtccctattcctcagtgtctgcctctctcattgcaaatggtgatagcactagcacctgtgggatgcacagttccggtgtcagcaggggtggatctggcttttctgcttcgtataattgtcaggagccaccatcctctcatatacaacctgggctctgtggacttggaaacctgggaaacacctgcttcatgaactccgctttgcagtgtttgagcaacactgcaccactgactgactactttctcaaagatgagtatgaagccgaaatcaacagagacaaccctctggggatgaaaggggaaattgcagaagcctatgctgaactcattaagcagatgtggtctggaagggacgcccatgtggcacctcgcatgttcaaaactcaagtaggacgttttgctcctcaattttctggctaccagcaacaagattctcaggagctgctggcctttcttctagatggattgcatgaagatctgaaccgggtaaagaaaaagccctacttggagctgaaggatgccaatgggcggccagatgcggtggtggcaaaggaagcctgggagaatcacaggttgaggaatgattctgtgattgtggatactttccatggcctcttcaaatctactttggtttgcccagaatgtgctaaggtttctgtgacctttgacccattttgctatctaacgctgccactgcccttgaagaaagatcgagttatggaggttttcctggttcctgctgaccctcactgcagacctactcagtaccgtgtgactgtgccgctgatgggggctgtgtccgacctgtgcgaggctctctccaggctgtctggcattgctgcagaaaatatggtggtcgcagatgtgtataatcaccgattccacaaaattttccaaatggatgaaggtttaaaccacatcatgcctcgggatgacattttcgtgtacgaggtctgcagcacttccgtggatggctcggaatgtgtcacgcttccagtctacttcagggagaggaagtccaggccatcaagcacttcctccgcatcagcgctatatgggcagccactattgctttctgtccccaagcacaagttaacccttgagtctttgtaccaggctgtttgtgatcgtatcagccgctatgtgaaacagcctttacctgatgagtttggcagctcacccttggagccaggggcctgcaatggctccaggaacagctgtgaaggagaagatgaggaagaaatggagcatcaggaagaaggcaaagagcagctttcagaaacagaaggcagtggggaagatgagccaggaaatgaccccagtgagaccacccaaaagaagatcaaaggccagccctgcccaaaaaggctttttaccttcagtcttgtgaactcctatggaacagctgacataaattcacttgcagctgatggaaaactacttaaactcaactctcgatctacactggccatggattgggacagtgaaactcggagactttactatgatgagcaagaatctgaggcctacgagaagcatgtgagcatgttgcagcctcagaagaagaagaagaccacagtggccctgagagactgcatcgagctcttcaccaccatggagacccttggggagcatgacccctggtactgtcccaactgtaagaagcatcaacaggccacaaaaaagtttgacctatggtccttgcccaagatcctggtggtccacctcaaacgtttctcctacaacagatactggagggataagctcgacacagtcgtagaattcccaatcagagggctgaacatgtccgagtttgtctgtaacctgtcagcaaggccttatgtgtacgacctcattgccgtgtccaatcattatggagccatgggggttggccactacactgcatatgcgaagaacaaactgaatggtaaatggtattactttgatgatagcaacgtgtccctggcctctgaggatcagatagtgactaaagcagcttatgtgctattttaccaacgtcgagatgatgaattttataagacaccttcacttagcagttctggttcctctgatggagggacacgaccaagcagctctcagcagggctttggggatgatgaggcttgcagcatggacaccaactaatgctgactccacgatcctgccaccctgtagcgccagtgtaatcccccaggagaacatctttgacactctgcagactgctagtgttctgtctaaaaaccagacaaggaaatacccttcttttatgagcagaaggaaacaaaaaaaaaaaaagaagaccgtttacctagaagaagct

SEQ ID NO: 1678 - protein, 693 aa, Homosapiens
MHSSGVSRGGSGFSASYNCQEPPSSHIQPGLCGLGNLGNTCFMNSALQCLSNTAPLTDYFLKDEYEAEINRDNPLGMKGEIAEAYAELIKQMWSGRDAHVAPRMFKTQVGRFAPQFSGYQQQDSQELLAFLLDGLHEDLNRVKKKPYLELKDANGRPDAVVAKEAWENHRLRNDSVIVDTFHGLFKSTLVCPECAKVSVTFDPFCYLTLPLPLKKDRVMEVFLVPADPHCRPTQYRVTVPLMGAVSDLCEALSRLSGIAAENMVVADVYNHRFHKIFQMDEGLNHIMPRDDIFVYEVCSTSVDGSECVTLPVYFRERKSRPSSTSSASALYGQPLLLSVPKHKLTLESLYQAVCDRISRYVKQPLPDEFGSSPLEPGACNGSRNSCEGEDEEEMEHQEEGKEQLSETEGSGEDEPGNDPSETTQKKIKGQPCPKRLFTFSLVNSYGTADINSLAADGKLLKLNSRSTLAMDWDSETRRLYYDEQESEAYEKHVSMLQPQKKKKTTVALRDCIELFTTMETLGEHDPWYCPNCKKHQQATKKFDLWSLPKILVVHLKRFSYNRYWRDKLDTVVEFPIRGLNMSEFVCNLSARPYVYDLIAVSNHYGAMGVGHYTAYAKNKLNGKWYYFDDSNVSLASEDQIVTKAAYVLFYQRRDDEFYKTPSLSSSGSSDGGTRPSSSQQGFGDDEACSMDTN

SEQ ID NO: 1679 - DNA, 3005 bp, Homosapiens
gtgcgtgcgtgggcgcggtctatagcacgccgcgcgcggggcggatgtccgggccggctgggccggggccgcggaggagatggcggaaggtggaggctgccgtgagcgaccggatgcggagactcagaagtccgagcttggacccttaatgaggaccacactccaacgcggggcgcagtggtatcttattgacagccggtggttcaagcagtggaagaagtatgtgggctttgacagctgggacatgtacaatgtgggtgaacataacctatttcctggcccaatagacaactctgggctattttcagatcctgagagtcagaccttgaaagaacacttaattgatgaattggactatgtattggtccctaccgaggcgtggaataaactactaaactggtacggctgtgtagaaggccagcaacccatcgtcagaaaagttgtggagcatggcctgtttgtcaagcactgcaaagtcgaggtgtatttgctggaactgaagctctgtgagaacagtgaccccaccaatgtgctgagttgccatttcagcaaggcagacaccattgcaaccatcgagaaagagatgcggaagctattcaacatccctgcggagcgtgaaacacggctctggaacaaatacatgagcaacacctacgagcagttgagcaagctagacaacactgtccaggatgctgggctataccagggtcaggtgctagtaattgagcctcaaaatgaagatggcacatggcccaggcagaccttgcagtcaaatggatctggcttttctgcttcgtataattgtcaggagccaccatcctctcatatacaacctgggctctgtggacttggaaacctgggaaacacctgcttcatgaactccgctttgcagtgtttgagcaacactgcaccactgactgactactttctcaaagatgagtatgaagccgaaatcaacagagacaaccctctggggatgaaaggggaaattgcagaagcctatgctgaactcattaagcagatgtggtctggaagggacgcccatgtggcacctcgcatgttcaaaactcaagtaggacgttttgctcctcaattttctggctaccagcaacaagattctcaggagctgctggcctttcttctagatggattgcatgaagatctgaaccgggtaaagaaaaagccctacttggagctgaaggatgccaatgggcggccagatgcggtggtggcaaaggaagcctgggagaatcacaggttgaggaatgattctgtgattgtggatactttccatggcctcttcaaatctactttggtttgcccagaatgtgctaaggtttctgtgacctttgacccattttgctatctaacgctgccactgcccttgaagaaagatcgagttatggaggttttcctggttcctgctgaccctcactgcagacctactcagtaccgtgtgactgtgccgctgatgggggctgtgtccgacctgtgcgaggctctctccaggctgtctggcattgctgcagaaaatatggtggtcgcagatgtgtataatcaccgattccacaaaattttccaaatggatgaaggtttaaaccacatcatgcctcgggatgacattttcgtgtacgaggtctgcagcacttccgtggatggctcggaatgtgtcacgcttccagtctacttcagggagaggaagtccaggccatcaagcacttcctccgcatcagcgctatatgggcagccactattgctttctgtccccaagcacaagttaacccttgagtctttgtaccaggctgtttgtgatcgtatcagccgctatgtgaaacagcctttacctgatgagtttggcagctcacccttggagccaggggcctgcaatggctccaggaacagctgtgaaggagaagatgaggaagaaatggagcatcaggaagaaggcaaagagcagctttcagaaacagaaggcagtggggaagatgagccaggaaatgaccccagtgagaccacccaaaagaagatcaaaggccagccctgcccaaaaaggctttttaccttcagtcttgtgaactcctatggaacagctgacataaattcacttgcagctgatggaaaactacttaaactcaactctcgatctacactggccatggattgggacagtgaaactcggagactttactatgatgagcaagaatctgaggcctacgagaagcatgtgagcatgttgcagcctcagaagaagaagaagaccacagtggccctgagagactgcatcgagctcttcaccaccatggagacccttggggagcatgacccctggtactgtcccaactgtaagaagcatcaacaggccacaaaaaagtttgacctatggtccttgcccaagatcctggtggtccacctcaaacgtttctcctacaacagatactggagggataagctcgacacagtcgtagaattcccaatcagagggctgaacatgtccgagtttgtctgtaacctgtcagcaaggccttatgtgtacgacctcattgccgtgtccaatcattatggagccatgggggttggccactacactgcatatgcgaagaacaaactgaatggtaaatggtattactttgatgatagcaacgtgtccctggcctctgaggatcagatagtgactaaagcagcttatgtgctattttaccaacgtcgagatgatgaattttataagacaccttcacttagcagttctggttcctctgatggagggacacgaccaagcagctctcagcagggctttggggatgatgaggcttgcagcatggacaccaactaatgctgactccacgatcctgccaccctgtagcgccagtgtaatcccccaggagaacatctttgacactctgcagactgctagtgttctgtctaaaaaccagacaaggaaatacccttcttttatgagcagaaggaaacaaaaaaaaaaaaagaagaccgtttacctagaagaagct

SEQ ID NO: 1680 - protein, 916 aa, Homosapiens; identical to SEQ ID NO: 127

SEQ ID NO: 1681 - DNA, 3146 bp, Homosapiens
gtgcgtgcgtgggcgcggtctatagcacgccgcgcgcggggcggatgtccgggccggctgggccggggccgcggaggagatggcggaaggtggaggctgccgtgagcgaccggatgcggagactcagaagtccgagcttggacccttaatgaggaccacactccaacgcggggcgcagtggtatcttattgacagccggtggttcaagcagtggaagaagtatgtgggctttgacagctgggacatgtacaatgtgggtgaacataacctatttcctggcccaatagacaactctgggctattttcagatcctgagagtcagaccttgaaagaacacttaattgatgaattggactatgtattggtccctaccgaggcgtggaataaactactaaactggtacggctgtgtagaaggccagcaacccatcgtcagaaaagttgtggagcatggcctgtttgtcaagcactgcaaagtcgaggtgtatttgctggaactgaagctctgtgagaacagtgaccccaccaatgtgctgagttgccatttcagcaaggcagacaccattgcaaccatcgagaaagagatgcggaagctattcaacatccctgcggagcgtgaaacacggctctggaacaaatacatgagcaacacctacgagcagttgagcaagctagacaacactgtccaggatgctgggctataccagggtcaggtgctagtaattgagcctcaaaatgaagatggcacatggcccaggcagaccttgcagtcaaaatcaagcactgcgcctagcagaaattttactacctctccaaaatcatcagcaagtccctattcctcagtgtctgcctctctcattgcaaatggtgatagcactagcacctgtgggatgcacagttccggtgtcagcaggggtggatctggcttttctgcttcgtataattgtcaggagccaccatcctctcatatacaacctgggctctgtggacttggaaacctgggaaacacctgcttcatgaactccgctttgcagtgtttgagcaacactgcaccactgactgactactttctcaaagatgagtatgaagccgaaatcaacagagacaaccctctggggatgaaaggggaaattgcagaagcctatgctgaactcattaagcagatgtggtctggaagggacgcccatgtggcacctcgcatgttcaaaactcaagtaggacgttttgctcctcaattttctggctaccagcaacaagattctcaggagctgctggcctttcttctagatggattgcatgaagatctgaaccgggtaaagaaaaagccctacttggagctgaaggatgccaatgggcggccagatgcggtggtggcaaaggaagcctgggagaatcacaggttgaggaatgattctgtgattgtggatactttccatggcctcttcaaatctactttggtttgcccagaatgtgctaaggtttctgtgacctttgacccattttgctatctaacgctgccactgcccttgaagaaagatcgagttatggaggttttcctggttcctgctgaccctcactgcagacctactcagtaccgtgtgactgtgccgctgatgggggctgtgtccgacctgtgcgaggctctctccaggctgtctggcattgctgcagaaaatatggtggtcgcagatgtgtataatcaccgattccacaaaattttccaaatggatgaaggtttaaaccacatcatgcctcgggatgacattttcgtgtacgaggtctgcagcacttccgtggatggctcggaatgtgtcacgcttccagtctacttcagggagaggaagtccaggccatcaagcacttcctccgcatcagcgctatatgggcagccactattgctttctgtccccaagcacaagttaacccttgagtctttgtaccaggctgtttgtgatcgtatcagccgctatgtgaaacagcctttacctgatgagtttggcagctcacccttggagccaggggcctgcaatggctccaggaacagctgtgaaggagaagatgaggaagaaatggagcatcaggaagaaggcaaagagcagctttcagaaacagaaggcagtggggaagatgagccaggaaatgaccccagtgagaccacccaaaagaagatcaaaggccagccctgcccaaaaaggctttttaccttcagtcttgtgaactcctatggaacagctgacataaattcacttgcagctgatggaaaactacttaaactcaactctcgatctacactggccatggattgggacagtgaaactcggagactttactatgatgagcaagaatctgaggcctacgagaagcatgtgagcatgttgcagcctcagaagaagaagaagaccacagtggccctgagagactgcatcgagctcttcaccaccatggagacccttggggagcatgacccctggtactgtcccaactgtaagaagcatcaacaggccacaaaaaagtttgacctatggtccttgcccaagatcctggtggtccacctcaaacgtttctcctacaacagatactggagggataagctcgacacagtcgtagaattcccaatcagagggctgaacatgtccgagtttgtctgtaacctgtcagcaaggccttatgtgtacgacctcattgccgtgtccaatcattatggagccatgggggttggccactacactgcatatgcgaagaacaaactgaatggtaaatggtattactttgatgatagcaacgtgtccctggcctctgaggatcagatagtgactaaagcagcttatgtgctattttaccaacgtcgagatgatgaattttataagacaccttcacttagcagttctggttcctctgatggagggacacgaccaagcagctctcagcagggctttggggatgatgaggcttgcagcatggacaccaactaatgctgactccacgatcctgccaccctgtagcgccagtgtaatcccccaggagaacatctttgacactctgcagactgctagtgttctgtctaaaaaccagacaaggaaatacccttcttttatgagcagaaggaaacaaaaaaaaaaaaagaagaccgtttacctagaagaagct

SEQ ID NO: 1682 - protein, 963 aa, Homosapiens; identical to SEQ ID NO: 125

SEQ ID NO: 1683 - DNA, 744 bp, Homosapiens
ttatgggttccctggttttggattattgcacatagccatcctgaagattggcactgaatagctctgttttttctattagtttcccaaaattatagtttaaaatcttggtccctgacagctccatttttagccttttgatcctttttgagaaggaacagattagaaaagaaggtgagttgttttttggttgttaagacacacactgtaaacttttttaatttcaggggttttgttttggggatttttgtgtttatttagtgcaagcctaataagctagccagattaattctctggagaccgctagagtattttctttgttgacttggcagacactgcatatgcgaagaacaaactgaatggtaaatggtattactttgatgatagcaacgtgtccctggcctctgaggatcagatagtgactaaagcagcttatgtgctattttaccaacgtcgagatgatgaattttataagacaccttcacttagcagttctggttcctctgatggagggacacgaccaagcagctctcagcagggctttggggatgatgaggcttgcagcatggacaccaactaatgctgactccacgatcctgccaccctgtagcgccagtgtaatcccccaggagaacatctttgacactctgcagactgctagtgttctgtctaaaaaccagacaaggaaatacccttcttttatgagcagaaggaaacaaaaaaaaaaaaagaagaccgtttacctag

SEQ ID NO: 1684 - protein, 103 aa, Homosapiens
MCYFTNVEMMNFIRHLHLAVLVPLMEGHDQAALSRALGMMRLAAWTPTNADSTILPPCSASVIPQENIFDTLQTASVLSKNQTRKYPSFMSRRKQKKKKKTVY

SEQ ID NO: 1685 - DNA, 838 bp, Homosapiens
gtgcgtgcgtgggcgcggtctatagcacgccgcgcgcggggcggatgtccgggccggctgggccggggccgcggaggagatggcggaaggtggaggctgccgtgagcgaccggatgcggagactcagaagtccgagcttggacccttaatgaggaccacactccaacgcggggcgcagtggtatcttattgacagccggtggttcaagcagtggaagaagtatgtgggctttgacagctgggacatgtacaatgtgggtgaacataacctatttcctggcccaatagacaactctgggctattttcagatcctgagagtcagaccttgaaagaacacttaattgatgaattggactatgtattggtccctaccgaggcgtggaataaactactaaactggtacggctgtgtagaaggccagcaacccatcgtcagaaaagttgtggagcatggcctgtttgtcaagcactgcaaagtcgaggtgtatttgctggaactgaagctctgtgagaacagtgaccccaccaatgtgctgagttgccatttcagcaaggcagacaccattgcaaccatcgagaaagagatgcggaagctattcaacatccctgcggagcgtgaaacacggctctggaacaaatacatgagcaacacctacgagcagttgagcaagctagacaacactgtccaggatgctgggctataccagggtcaggtgctagtaattgagcctcaaaatgaagatggcacatggcccaggcagaccttgcagtcaaaatcaagcactgcgcctagcagaaattttactacctctccaaaatcatcagcaagtccctattcc

SEQ ID NO: 1686 - protein, 252 aa, Homosapiens
MAEGGGCRERPDAETQKSELGPLMRTTLQRGAQWYLIDSRWFKQWKKYVGFDSWDMYNVGEHNLFPGPIDNSGLFSDPESQTLKEHLIDELDYVLVPTEAWNKLLNWYGCVEGQQPIVRKVVEHGLFVKHCKVEVYLLELKLCENSDPTNVLSCHFSKADTIATIEKEMRKLFNIPAERETRLWNKYMSNTYEQLSKLDNTVQDAGLYQGQVLVIEPQNEDGTWPRQTLQSKSSTAPSRNFTTSPKSSASPY

SEQ ID NO: 1687 - DNA, 1601 bp, Homosapiens
gtgcgtgcgtgggcgcggtctatagcacgccgcgcgcggggcggatgtccgggccggctgggccggggccgcggaggagatggcggaaggtggaggctgccgtgagcgaccggatgcggagactcagaagtccgagcttggacccttaatgaggaccacactccaacgcggggcgcagtggtatcttattgacagccggtggttcaagcagtggaagaagtatgtgggctttgacagctgggacatgtacaatgtgggtgaacataacctatttcctggcccaatagacaactctgggctattttcagatcctgagagtcagaccttgaaagaacacttaattgatgaattggactatgtattggtccctaccgaggcgtggaataaactactaaactggtacggctgtgtagaaggccagcaacccatcgtcagaaaagttgtggagcatggcctgtttgtcaagcactgcaaagtcgaggtgtatttgctggaactgaagctctgtgagaacagtgaccccaccaatgtgctgagttgccatttcagcaaggcagacaccattgcaaccatcgagaaagagatgcggaagctattcaacatccctgcggagcgtgaaacacggctctggaacaaatacatgagcaacacctacgagcagttgagcaagctagacaacactgtccaggatgctgggctataccagggtcaggtgctagtaattgagcctcaaaatgaagatggcacatggcccaggcagaccttgcagtcaaaagtttcgttctttttgcccaggctggagtgcaatggcgcgatcttggctcactgcaacttctgcctcccgggttcaagcaattctcctgcctcagcttcccgagtagcgccatcacatctggctaatttttttttttttgagatggagtctcactctgtcaccaagctggagtgcggtggtgcagtctcggcttactcccgggttcaagtgatgcttctgccccagcctcccgagtggctgggatgacaggcgcccgccaccatgtccagataatttttgtatttttagtagagatgtggtttcactgtgtcttgaactcctgacctcatggccaggctggtcttgaattcctgaccttgtgatcgtgacctcatgatccgccagcctcggcctcccaaagtgctgggattacaagggtgagccacctcacccagcctaattttgtatttttagtagtgacggggtttctccatgttggtcaggctggtctcaaactcctgacctcaggtgatccgtctgcctcggcctcccaaagtgctgagattacaggcatgagccaccacgcgcgacctggctaatttcttttgcattttagtagagacagggtttcactgtgttgcccaggctggtctcgaactcctgagctcaggcaatctgcctgcctcagcctcccaaagtactaggattacaggcacgagccactgcgcctggtcagccttgtggtttttcacactgaaagggtatgtggtggtgtggactgatgtgacaggaagaccagttaatttgtggactctcacttaaataaagtttaccttgaagtagtatg

SEQ ID NO: 1688 - protein, 313 aa, Homosapiens
MAEGGGCRERPDAETQKSELGPLMRTTLQRGAQWYLIDSRWFKQWKKYVGFDSWDMYNVGEHNLFPGPIDNSGLFSDPESQTLKEHLIDELDYVLVPTEAWNKLLNWYGCVEGQQPIVRKVVEHGLFVKHCKVEVYLLELKLCENSDPTNVLSCHFSKADTIATIEKEMRKLFNIPAERETRLWNKYMSNTYEQLSKLDNTVQDAGLYQGQVLVIEPQNEDGTWPRQTLQSKVSFFLPRLECNGAILAHCNFCLPGSSNSPASASRVAPSHLANFFFFEMESHSVTKLECGGAVSAYSRVQVMLLPQPPEWLG

SEQ ID NO: 1689 - DNA, 1601 bp, Homosapiens
gtgcgtgcgtgggcgcggtctatagcacgccgcgcgcggggcggatgtccgggccggctgggccggggccgcggaggagatggcggaaggtggaggctgccgtgagcgaccggatgcggagactcagaagtccgagcttggacccttaatgaggaccacactccaacgcggggcgcagtggtatcttattgacagccggtggttcaagcagtggaagaagtatgtgggctttgacagctgggacatgtacaatgtgggtgaacataacctatttcctggcccaatagacaactctgggctattttcagatcctgagagtcagaccttgaaagaacacttaattgatgaattggactatgtattggtccctaccgaggcgtggaataaactactaaactggtacggctgtgtagaaggccagcaacccatcgtcagaaaagttgtggagcatggcctgtttgtcaagcactgcaaagtcgaggtgtatttgctggaactgaagctctgtgagaacagtgaccccaccaatgtgctgagttgccatttcagcaaggcagacaccattgcaaccatcgagaaagagatgcggaagctattcaacatccctgcggagcgtgaaacacggctctggaacaaatacatgagcaacacctacgagcagttgagcaagctagacaacactgtccaggatgctgggctataccagggtcaggtgctagtaattgagcctcaaaatgaagatggcacatggcccaggcagaccttgcagtcaaaggggccccaggagatgttgacccagcagggcatggcgctgcagaactacgacaacaagctggtcaaatgcatagaggagctatgccagaagcaggaggagctgtgctggcagatccagcaggaggaggacaagaaacagcggctgcagaatgaggtgaggcagctgacagagaagctggcctgcgtcaacgagaagctggcccgcgtcaacgagaacctggcacgcaagattgcctcttgcagtaagttctaccagaccatcgcggagacggaggccacctacctcaagatgctggagagctcccagactttgctcagtgtcctgaagagggaagctgggaacctgaccaaggctacagcctcagaccagaaaagtagtggtggcagggacagctgaccagaccatgggcagggcctgcctctgtgcgcccctcaactcagccccagcaagtctgtccacagagcgtcttcttcatggcagcagctgccttctttcactgtctcaggtgctaagaggggcagctgccaacctccactggcatcagtgacaagcccggggcacagcctgtgggtcctggctttgtgctcacacaggctatggggagggtgggctctaggtcagctctgcaaggggcctgtctctgcggcacccacactcctgggctgccagggaggtcctggttgtagtctgagcaccatggaggtcccctcagccagcagaggcccagggcagggggcaggggttctccttcatcccagaacccaaacctcagggctcacccctgtggcctgtgactgtcaataaagattatctttgtaaaaataaa

SEQ ID NO: 1690 - protein, 363 aa, Homosapiens
MAEGGGCRERPDAETQKSELGPLMRTTLQRGAQWYLIDSRWFKQWKKYVGFDSWDMYNVGEHNLFPGPIDNSGLFSDPESQTLKEHLIDELDYVLVPTEAWNKLLNWYGCVEGQQPIVRKVVEHGLFVKHCKVEVYLLELKLCENSDPTNVLSCHFSKADTIATIEKEMRKLFNIPAERETRLWNKYMSNTYEQLSKLDNTVQDAGLYQGQVLVIEPQNEDGTWPRQTLQSKGPQEMLTQQGMALQNYDNKLVKCIEELCQKQEELCWQIQQEEDKKQRLQNEVRQLTEKLACVNEKLARVNENLARKIASCSKFYQTIAETEATYLKMLESSQTLLSVLKREAGNLTKATASDQKSSGGRDS

SEQ ID NO: 1691 - DNA, 738 bp, Homosapiens
acagtgcttgttcggggcgctccgctggcttcttggacaattgcgccatgtgtgctgctcggctagcggcggcggcggcggcggcccagtcggtgtatgccttctcggcgcgcccgctggccggcggggagcctgtgagcctgggctccctgcggggcaaggagaacgccaagaacgaagagattctgaattccctcaagtacgtccggcctggtggtgggttcgagcccaacttcatgctcttcgagaagtgcgaggtgaacggtgcgggggcgcaccctctcttcgccttcctgcgggaggccctgccagctcccagcgacgacgccaccgcgcttatgaccgaccccaagctcatcacctggtctccggtgtgtcgcaacgatgttgcctggaactttgagaagttcctggtgggccctgacggtgtgcccctacgcaggtacagccgccgcttccagaccattgacatcgagcctgacatcgaagccctgctgtctcaagggcccagctgtgcctagggcgcccctcctaccccggctgcttggcagttgcagtgctgctgtctcgggggggttttcatctatgagggtgtttcctctaaacctacgagggaggaacacctgatcttacagaaaataccacctcgagatgggtgctggtcctgttgatcccagtctctgccagaccaaggcgagtttccccactaataaagtgccgggtgtcagcagaactgtg

SEQ ID NO: 1692 - protein, 157 aa, Homosapiens
MCAARLAAAAAAAQSVYAFSARPLAGGEPVSLGSLRGKENAKNEEILNSLKYVRPGGGFEPNFMLFEKCEVNGAGAHPLFAFLREALPAPSDDATALMTDPKLITWSPVCRNDVAWNFEKFLVGPDGVPLRRYSRRFQTIDIEPDIEALLSQGPSCA

SEQ ID NO: 1693 - DNA, 1188 bp, Homosapiens
cagttaaaaggaggcgcctgctggcctccccttacagtgcttgttcggggcgctccgctggcttcttggacaattgcgccatgtgtgctgctcggctagcggcggcggcggcggcggcccagtcggtgtatgccttctcggcgcgcccgctggccggcggggagcctgtgagcctgggctccctgcggggcaaggtactacttatcgagaatgtggcgtccctctgaggcaccacggtccgggactacacccagatgaacgagctgcagcggcgcctcggaccccggggcctggtggtgctcggcttcccgtgcaaccagtttgggcatcaggtgcgccgggcggagcggggcggggcgggggcggacgtgcagtagtggctgggggcgccggcggtgtgctggtgggtgccgtcggctccatgcgcggagagtctggctactctctcgtttcctttctgttgctcgtagctgctgaaattcctctccgcccttgggattgcgcatggagggcaaaatcccggtgactcatagaaaatctcccttgtttgtggttagaacgtttctctcctcctcttgaccccgggttctagctgcccttctctcctgtaggagaacgccaagaacgaagagattctgaattccctcaagtacgtccggcctggtggtgggttcgagcccaacttcatgctcttcgagaagtgcgaggtgaacggtgcgggggcgcaccctctcttcgccttcctgcgggaggccctgccagctcccagcgacgacgccaccgcgcttatgaccgaccccaagctcatcacctggtctccggtgtgtcgcaacgatgttgcctggaactttgagaagttcctggtgggccctgacggtgtgcccctacgcaggtacagccgccgcttccagaccattgacatcgagcctgacatcgaagccctgctgtctcaagggcccagctgtgcctagggcgcccctcctaccccggctgcttggcagttgcagtgctgctgtctcgggggggttttcatctatgagggtgtttcctctaaacctacgagggaggaacacctgatcttacagaaaataccacctcgagatgggtgctggtcctgttgatcccagtctctgccagaccaaggcgagtttccccactaataaagtgccgggtgtcagcagaactgtg

SEQ ID NO: 1694 - protein, 94 aa, Homosapiens [sequence omitted]

SEQ ID NO: 1695 - DNA, 1148 bp, Homosapiens
ccctcgagggccccagcccttggaagggtaacctggaccgctgccgcctggttgcctgggccagaccagacatgcctgctgctccttccggcttaggaggagcacgcgtcccgctcgggcgcactctccagccttttcctggctgaggaggggccgagccctccgggtagggcgggggccggatgaggcgggaccctcaggcccggaaaactgcctgtgccacgtgacccgccgccggccagttaaaaggaggcgcctgctggcctccccttacagtgcttgttcggggcgctccgctggcttcttggacaattgcgccatgtgtgctgctcggctagcggcggcggcggcggcggcccagtcggtgtatgccttctcggcgcgcccgctggccggcggggagcctgtgagcctgggctccctgcggggcaaggtactacttatcgagaatgtggcgtccctctgaggcaccacggtccgggactacacccagatgaacgagctgcagcggcgcctcggaccccggggcctggtggtgctcggcttcccgtgcaaccagtttgggcatcaggagaacgccaagaacgaagagattctgaattccctcaagtacgtccggcctggtggtgggttcgagcccaacttcatgctcttcgagaagtgcgaggtgaacggtgcgggggcgcaccctctcttcgccttcctgcgggaggccctgccagctcccagcgacgacgccaccgcgcttatgaccgaccccaagctcatcacctggtctccggtgtgtcgcaacgatgttgcctggaactttgagaagttcctggtgggccctgacggtgtgcccctacgcaggtacagccgccgcttccagaccattgacatcgagcctgacatcgaagccctgctgtctcaagggcccagctgtgcctagggcgcccctcctaccccggctgcttggcagttgcagtgctgctgtctcgggggggttttcatctatgagggtgtttcctctaaacctacgagggaggaacacctgatcttacagaaaataccacctcgagatgggtgctggtcctgttgatcccagtctctgccagaccaaggcgagtttccccactaataaagtgccgggtgtcagcagaactgtg

SEQ ID NO: 1696 - protein, 145 aa, Homosapiens
MNELQRRLGPRGLVVLGFPCNQFGHQENAKNEEILNSLKYVRPGGGFEPNFMLFEKCEVNGAGAHPLFAFLREALPAPSDDATALMTDPKLITWSPVCRNDVAWNFEKFLVGPDGVPLRRYSRRFQTIDIEPDIEALLSQGPSCA

SEQ ID NO: 1697 - DNA, 722 bp, Homosapiens
gctggcctccccttacagtgcttgttcggggcgctccgctggcttcttggacaattgcgccatgtgtgctgctcggctagcggcggcggcggcggcggcccagtcggtgtatgccttctcggcgcgcccgctggccggcggggagcctgtgagcctgggctccctgcggggcaaggtactacttatcgagaatgtggcgtccctctgaggcaccacggtccgggactacacccagatgaacgagctgcagcggcgcctcggaccccggggcctggtggtgctcggcttcccgtgcaaccagtttgggcatcaggagaacgccaagaacgaagagattctgaattccctcaagtacgtccggcctggtggtgggttcgagcccaacttcatgctcttcgagaagtgcgaggtgaaggtgtgcccctacgcaggtacagccgccgcttccagaccattgacatcgagcctgacatcgaagccctgctgtctcaagggcccagctgtgcctagggcgcccctcctaccccggctgcttggcagttgcagtgctgctgtctcgggggggttttcatctatgagggtgtttcctctaaacctacgagggaggaacacctgatcttacagaaaataccacctcgagatgggtgctggtcctgttgatcccagtctctgccagaccaaggcgagtttccccactaataaagtgccgggtgtcagcagaa

SEQ ID NO: 1698 - protein, 126 aa, Homosapiens
MNELQRRLGPRGLVVLGFPCNQFGHQENAKNEEILNSLKYVRPGGGFEPNFMLFEKCEVKVCPYAGTAAASRPLTSSLTSKPCCLKGPAVPRAPLLPRLLGSCSAAVSGGFSSMRVFPLNLRGRNT

SEQ ID NO: 1699 - DNA, 1077 bp, Homosapiens
tacaggaagtttagaaaactgcctttattctattagtagttggaaaaattaactggtacagaaaaaaagtttagtcagctggagagaagagagactgagtgccacccatgagaactggtggctcctctgggagggaacctggatacagtgaggagaaaagagcactgtgaattagagccagatgcttaagtccaggtgagacaggttatgccatcttccaaagtgtctaattgcctcaggcgtgaaaccaattcctatttacttagcccagctccatggggtactgagatacatggggccgaaaaggggtaatatggccatcttttatcagaaaaagtgacaaaacgggaatttaaaaaatgaattttccatctgactttatttccaaatacactttcttttttaaaaaaccaatacactttctttgaggatgacagtattaggaaatccaattatacaaaaaatactacatctagtctggggtagatatatttatttttggtaacatacattaagtggcactaattacacagtaactataaggtaactaacatgaaaccacagaactgtaactaggtgggagtgcagaggagggctgttagagcagtgtcaaaaggaccctggtgggccagacgggttggacatcgttaataatcatagttggcttctaaatactggtagcaagatgacttctgatttgtaatcttaggtaaattatagataaatgaaaaaggccagtaatcatacactaagattaataaacagcacttcaaaattaaccgcataagggctgtgcttgcagcaaggtttcacaagacaaggcacccagattttttcttcccacgtctagcttgcagagcagctctcgtagccatttcaaaaacctctctcactccatctttggtctttgctgaacactccatgtacccaaaagcgccaatcctgtttgccatatctctgccttcttcaggtttcaccggctcctagcaaagaaaaaaaaatagtccttttagctaatagtgtggcatacatatagtaagtaaaaagtattcaaattcatctaaaagattttttttt

SEQ ID NO: 1700 - protein, 34 aa, Homosapiens
MPSSKVSNCLRRETNSYLLSPAPWGTEIHGAEKG

SEQ ID NO: 1701 - DNA, 1743 bp, Homosapiens
acgtcgttccccgccctcccgccgccgcccgccctcgctctctcgcgctaccctcccgccgcccgcggtcctccgtcggttctctcgttagtccacggtctggtcttcagctacccgccttcgtctccgagtttgcgactcgcggaccggcgtccccggcgcgaagaggctggactcggattcgttgcctgagcaatggctgccatccggaagaaactggtgattgttggtgatggagcctgtggaaagacatgcttgctcatagtcttcagcaaggaccagttcccagaggtgtatgtgcccacagtgtttgagaactatgtggcagatatcgaggtggatggaaagcagccctgatagtttagaaaacatcccagaaaagtggaccccagaagtcaagcatttctgtcccaacgtgcccatcatcctggttgggaataagaaggatcttcggaatgatgagcacacaaggcgggagctagccaagatgaagcaggagccggtgaaacctgaagaaggcagagatatggcaaacaggattggcgcttttgggtacatggagtgttcagcaaagaccaaagatggagtgagagaggtttttgaaatggctacgagagctgctctgcaagctagacgtgggaagaaaaaatctgggtgccttgtcttgtgaaaccttgctgcaagcacagcccttatgcggttaattttgaagtgctgtttattaatcttagtgtatgattactggcctttttcatttatctataatttacctaagattacaaatcagaagtcatcttgctaccagtatttagaagccaactatgattattaacgatgtccaacccgtctggcccaccagggtccttttgacactgctctaacagccctcctctgcactcccacctgacacaccaggcgctaattcaaggaatttcttaacttcttgcttctttctagaaagagaaacagttggtaacttttgtgaattaggctgtaactactttataactaacatgtcctgcctattatctgtcagctgcaaggtactctggtgagtcaccacttcagggctttactccgtaacagattttgttggcatagctctggggtgggcagttttttgaaaatgggctcaaccagaaaagcccaagttcatgcagctgtggcagagttacagttctgtggtttcatgttagttaccttatagttactgtgtaattagtgccacttaatgtatgttaccaaaaataaatatatctaccccagactagatgtagtattttttgtataattggatttcctaatactgtcatcctcaaagaaagtgtattggttttttaaaaaagaaagtgtatttggaaataaagtcagatggaaaattcattttttaaattcccgttttgtcactttttctgataaaagatggccatattaccccttttcggccccatgtatctcagtaccccatggagctgggctaagtaaataggaattggtttcacgcctgaggcaattagacactttggaagatggcataacctgtctcacctggacttaagcatctggctctaattcacagtgctcttttctcctcactgtatccaggttccctcccagaggagccaccagttctcatgggtggcactcagtctctcttctctccagctgactaaactttttttctgtaccagttaatttttccaactactaatagaataaaggcagttttctaaacttcctgta

SEQ ID NO: 1702 - protein, 124 aa, Homosapiens
MCPQCLRTMWQISRWMESSPDSLENIPEKWTPEVKHFCPNVPIILVGNKKDLRNDEHTRRELAKMKQEPVKPEEGRDMANRIGAFGYMECSAKTKDGVREVFEMATRAALQARRGKKKSGCLVL

SEQ ID NO: 1703 - DNA, 1598 bp, Homosapiens
acgtcgttccccgccctcccgccgccgcccgccctcgctctctcgcgctaccctcccgccgcccgcggtcctccgtcggttctctcgttagtccacggtctggtcttcagctacccgccttcgtctccgagtttgcgactcgcggaccggcgtccccggcgcgaagaggctggactcggattcgttgcctgagcaatggctgccatccggaagaaactggtgattgttggtgatggagcctgtggaaagacatgcttgctcatagtcttcagcaaggaccagttcccagaggtgtatgtgcccacagtgtttgagaactatgtggcagatatcgaggtggatggaaagcaggagccggtgaaacctgaagaaggcagagatatggcaaacaggattggcgcttttgggtacatggagtgttcagcaaagaccaaagatggagtgagagaggtttttgaaatggctacgagagctgctctgcaagctagacgtgggaagaaaaaatctgggtgccttgtcttgtgaaaccttgctgcaagcacagcccttatgcggttaattttgaagtgctgtttattaatcttagtgtatgattactggcctttttcatttatctataatttacctaagattacaaatcagaagtcatcttgctaccagtatttagaagccaactatgattattaacgatgtccaacccgtctggcccaccagggtccttttgacactgctctaacagccctcctctgcactcccacctgacacaccaggcgctaattcaaggaatttcttaacttcttgcttctttctagaaagagaaacagttggtaacttttgtgaattaggctgtaactactttataactaacatgtcctgcctattatctgtcagctgcaaggtactctggtgagtcaccacttcagggctttactccgtaacagattttgttggcatagctctggggtgggcagttttttgaaaatgggctcaaccagaaaagcccaagttcatgcagctgtggcagagttacagttctgtggtttcatgttagttaccttatagttactgtgtaattagtgccacttaatgtatgttaccaaaaataaatatatctaccccagactagatgtagtattttttgtataattggatttcctaatactgtcatcctcaaagaaagtgtattggttttttaaaaaagaaagtgtatttggaaataaagtcagatggaaaattcattttttaaattcccgttttgtcactttttctgataaaagatggccatattaccccttttcggccccatgtatctcagtaccccatggagctgggctaagtaaataggaattggtttcacgcctgaggcaattagacactttggaagatggcataacctgtctcacctggacttaagcatctggctctaattcacagtgctcttttctcctcactgtatccaggttccctcccagaggagccaccagttctcatgggtggcactcagtctctcttctctccagctgactaaactttttttctgtaccagttaatttttccaactactaatagaataaaggcagttttctaaacttcctgta

SEQ ID NO: 1704 - protein, 109 aa, Homosapiens
MAAIRKKLVIVGDGACGKTCLLIVFSKDQFPEVYVPTVFENYVADIEVDGKQEPVKPEEGRDMANRIGAFGYMECSAKTKDGVREVFEMATRAALQARRGKKKSGCLVL

SEQ ID NO: 1705 - DNA, 1649 bp, Homosapiens
acgtcgttccccgccctcccgccgccgcccgccctcgctctctcgcgctaccctcccgccgcccgcggtcctccgtcggttctctcgttagtccacggtctggtcttcagctacccgccttcgtctccgagtttgcgactcgcggaccggcgtccccggcgcgaagaggctggactcggattcgttgcctgagcaatggctgccatccggaagaaactggtgattgttggtgatggagcctgtggaaagacatgcttgctcatagtcttcagcaaggaccagttcccagaggtgtatgtgcccacagtgtttgagaactatgtggcagatatcgaggtggatggaaagcaggtagagttggctttgtgggacacagctgggcaggaagattatgatcgctaggagccggtgaaacctgaagaaggcagagatatggcaaacaggattggcgcttttgggtacatggagtgttcagcaaagaccaaagatggagtgagagaggtttttgaaatggctacgagagctgctctgcaagctagacgtgggaagaaaaaatctgggtgccttgtcttgtgaaaccttgctgcaagcacagcccttatgcggttaattttgaagtgctgtttattaatcttagtgtatgattactggcctttttcatttatctataatttacctaagattacaaatcagaagtcatcttgctaccagtatttagaagccaactatgattattaacgatgtccaacccgtctggcccaccagggtccttttgacactgctctaacagccctcctctgcactcccacctgacacaccaggcgctaattcaaggaatttcttaacttcttgcttctttctagaaagagaaacagttggtaacttttgtgaattaggctgtaactactttataactaacatgtcctgcctattatctgtcagctgcaaggtactctggtgagtcaccacttcagggctttactccgtaacagattttgttggcatagctctggggtgggcagttttttgaaaatgggctcaaccagaaaagcccaagttcatgcagctgtggcagagttacagttctgtggtttcatgttagttaccttatagttactgtgtaattagtgccacttaatgtatgttaccaaaaataaatatatctaccccagactagatgtagtattttttgtataattggatttcctaatactgtcatcctcaaagaaagtgtattggttttttaaaaaagaaagtgtatttggaaataaagtcagatggaaaattcattttttaaattcccgttttgtcactttttctgataaaagatggccatattaccccttttcggccccatgtatctcagtaccccatggagctgggctaagtaaataggaattggtttcacgcctgaggcaattagacactttggaagatggcataacctgtctcacctggacttaagcatctggctctaattcacagtgctcttttctcctcactgtatccaggttccctcccagaggagccaccagttctcatgggtggcactcagtctctcttctctccagctgactaaactttttttctgtaccagttaatttttccaactactaatagaataaaggcagttttctaaacttcctgta

SEQ ID NO: 1706 - protein, 68 aa, Homosapiens
MAAIRKKLVIVGDGACGKTCLLIVFSKDQFPEVYVPTVFENYVADIEVDGKQVELALWDTAGQEDYDR

SEQ ID NO: 1707 - DNA, 1729 bp, Homosapiens
acgtcgttccccgccctcccgccgccgcccgccctcgctctctcgcgctaccctcccgccgcccgcggtcctccgtcggttctctcgttagtccacggtctggtcttcagctacccgccttcgtctccgagtttgcgactcgcggaccggcgtccccggcgcgaagaggctggactcggattcgttgcctgagcaatggctgccatccggaagaaactggtgattgttggtgatggagcctgtggaaagacatgcttgctcatagtcttcagcaaggaccagttcccagaggtgtatgtgcccacagtgtttgagaactatgtggcagatatcgaggtggatggaaagcagaaaacatcccagaaaagtggaccccagaagtcaagcatttctgtcccaacgtgcccatcatcctggttgggaataagaaggatcttcggaatgatgagcacacaaggcgggagctagccaagatgaagcaggagccggtgaaacctgaagaaggcagagatatggcaaacaggattggcgcttttgggtacatggagtgttcagcaaagaccaaagatggagtgagagaggtttttgaaatggctacgagagctgctctgcaagctagacgtgggaagaaaaaatctgggtgccttgtcttgtgaaaccttgctgcaagcacagcccttatgcggttaattttgaagtgctgtttattaatcttagtgtatgattactggcctttttcatttatctataatttacctaagattacaaatcagaagtcatcttgctaccagtatttagaagccaactatgattattaacgatgtccaacccgtctggcccaccagggtccttttgacactgctctaacagccctcctctgcactcccacctgacacaccaggcgctaattcaaggaatttcttaacttcttgcttctttctagaaagagaaacagttggtaacttttgtgaattaggctgtaactactttataactaacatgtcctgcctattatctgtcagctgcaaggtactctggtgagtcaccacttcagggctttactccgtaacagattttgttggcatagctctggggtgggcagttttttgaaaatgggctcaaccagaaaagcccaagttcatgcagctgtggcagagttacagttctgtggtttcatgttagttaccttatagttactgtgtaattagtgccacttaatgtatgttaccaaaaataaatatatctaccccagactagatgtagtattttttgtataattggatttcctaatactgtcatcctcaaagaaagtgtattggttttttaaaaaagaaagtgtatttggaaataaagtcagatggaaaattcattttttaaattcccgttttgtcactttttctgataaaagatggccatattaccccttttcggccccatgtatctcagtaccccatggagctgggctaagtaaataggaattggtttcacgcctgaggcaattagacactttggaagatggcataacctgtctcacctggacttaagcatctggctctaattcacagtgctcttttctcctcactgtatccaggttccctcccagaggagccaccagttctcatgggtggcactcagtctctcttctctccagctgactaaactttttttctgtaccagttaatttttccaactactaatagaataaaggcagttttctaaacttcctgta

SEQ ID NO: 1708 - protein, 90 aa, Homosapiens
MAAIRKKLVIVGDGACGKTCLLIVFSKDQFPEVYVPTVFENYVADIEVDGKQKTSQKSGPQKSSISVPTCPSSWLGIRRIFGMMSTQGGS

SEQ ID NO: 1709 - DNA, 1679 bp, Homosapiens
actcggaggcgcgcacgtcgttccccgccctcccgccgccgcccgccctcgctctctcgcgctaccctcccgccgcccgcggtcctccgtcggttctctcgttagtccacggtctggtcttcagctacccgccttcgtctccgagtttgcgactcgcggaccggcgtccccggcgcgaagaggctggactcggattcgttgcctgagcaatggctgccatccggaagaaactggtgattgttggtgatggagcctgtggaaagacatgcttgctcatagtcttcagcaaggaccagttcccagaggtgtatgtgcccacagtgtttgagaatcaagcatttctgtcccaacgtgcccatcatcctggttgggaataagaaggatcttcggaatgatgagcacacaaggcgggagctagccaagatgaagcaggagccggtgaaacctgaagaaggcagagatatggcaaacaggattggcgcttttgggtacatggagtgttcagcaaagaccaaagatggagtgagagaggtttttgaaatggctacgagagctgctctgcaagctagacgtgggaagaaaaaatctgggtgccttgtcttgtgaaaccttgctgcaagcacagcccttatgcggttaattttgaagtgctgtttattaatcttagtgtatgattactggcctttttcatttatctataatttacctaagattacaaatcagaagtcatcttgctaccagtatttagaagccaactatgattattaacgatgtccaacccgtctggcccaccagggtccttttgacactgctctaacagccctcctctgcactcccacctgacacaccaggcgctaattcaaggaatttcttaacttcttgcttctttctagaaagagaaacagttggtaacttttgtgaattaggctgtaactactttataactaacatgtcctgcctattatctgtcagctgcaaggtactctggtgagtcaccacttcagggctttactccgtaacagattttgttggcatagctctggggtgggcagttttttgaaaatgggctcaaccagaaaagcccaagttcatgcagctgtggcagagttacagttctgtggtttcatgttagttaccttatagttactgtgtaattagtgccacttaatgtatgttaccaaaaataaatatatctaccccagactagatgtagtattttttgtataattggatttcctaatactgtcatcctcaaagaaagtgtattggttttttaaaaaagaaagtgtatttggaaataaagtcagatggaaaattcattttttaaattcccgttttgtcactttttctgataaaagatggccatattaccccttttcggccccatgtatctcagtaccccatggagctgggctaagtaaataggaattggtttcacgcctgaggcaattagacactttggaagatggcataacctgtctcacctggacttaagcatctggctctaattcacagtgctcttttctcctcactgtatccaggttccctcccagaggagccaccagttctcatgggtggcactcagtctctcttctctccagctgactaaactttttttctgtaccagttaatttttccaactactaatagaataaaggcagttttctaaacttcctgta

SEQ ID NO: 1710 - protein, 98 aa, Homosapiens
MCPQCLRIKHFCPNVPIILVGNKKDLRNDEHTRRELAKMKQEPVKPEEGRDMANRIGAFGYMECSAKTKDGVREVFEMATRAALQARRGKKKSGCLVL

SEQ ID NO: 1711 - DNA, 1817 bp, Homosapiens
gtgcgcggggccgcgacctgtgccggctcgagcccgctgggcactcggaggcgcgcacgtcgttccccgccctcccgccgccgcccgccctcgctctctcgcgctaccctcccgccgcccgcggtcctccgtcggttctctcgttagtccacggtctggtcttcagctacccgccttcgtctccgagtttgcgactcgcggaccggcgtccccggcgcgaagaggctggactcggattcgttgcctgagcaatggctgccatccggaagaaactggtgattgttggtgatggagcctgtggaaagacatgcttgctcatagtcttcagcaaggaccagttcccagaggtgtatgtgcccacagtgtttgagaactatgtggcagatatcgaggtggatggaaagcaggtagagttggctttgtgggacacagctgggcaggaagattatgatcgcctgaggcccctctcctacccagataccgatgttatactgatgtgtttttccatcgacagccctgatagtttagaaaacatcccagaaaagtggaccccagaagtcaagcatttctgagccggtgaaacctgaagaaggcagagatatggcaaacaggattggcgcttttgggtacatggagtgttcagcaaagaccaaagatggagtgagagaggtttttgaaatggctacgagagctgctctgcaagctagacgtgggaagaaaaaatctgggtgccttgtcttgtgaaaccttgctgcaagcacagcccttatgcggttaattttgaagtgctgtttattaatcttagtgtatgattactggcctttttcatttatctataatttacctaagattacaaatcagaagtcatcttgctaccagtatttagaagccaactatgattattaacgatgtccaacccgtctggcccaccagggtccttttgacactgctctaacagccctcctctgcactcccacctgacacaccaggcgctaattcaaggaatttcttaacttcttgcttctttctagaaagagaaacagttggtaacttttgtgaattaggctgtaactactttataactaacatgtcctgcctattatctgtcagctgcaaggtactctggtgagtcaccacttcagggctttactccgtaacagattttgttggcatagctctggggtgggcagttttttgaaaatgggctcaaccagaaaagcccaagttcatgcagctgtggcagagttacagttctgtggtttcatgttagttaccttatagttactgtgtaattagtgccacttaatgtatgttaccaaaaataaatatatctaccccagactagatgtagtattttttgtataattggatttcctaatactgtcatcctcaaagaaagtgtattggttttttaaaaaagaaagtgtatttggaaataaagtcagatggaaaattcattttttaaattcccgttttgtcactttttctgataaaagatggccatattaccccttttcggccccatgtatctcagtaccccatggagctgggctaagtaaataggaattggtttcacgcctgaggcaattagacactttggaagatggcataacctgtctcacctggacttaagcatctggctctaattcacagtgctcttttctcctcactgtatccaggttccctcccagaggagccaccagttctcatgggtggcactcagtctctcttctctccagctgactaaactttttttctgtaccagttaatttttccaactactaatagaataaaggcagttttctaaacttcctgta

SEQ ID NO: 1712 - protein, 106 aa, Homosapiens
MAAIRKKLVIVGDGACGKTCLLIVFSKDQFPEVYVPTVFENYVADIEVDGKQVELALWDTAGQEDYDRLRPLSYPDTDVILMCFSIDSPDSLENIPEKWTPEVKHF

SEQ ID NO: 1713 - DNA, 1702 bp, Homosapiens
gtgcgcggggccgcgacctgtgccggctcgagcccgctgggcactcggaggcgcgcacgtcgttccccgccctcccgccgccgcccgccctcgctctctcgcgctaccctcccgccgcccgcggtcctccgtcggttctctcgttagtccacggtctggtcttcagctacccgccttcgtctccgagtttgcgactcgcggaccggcgtccccggcgcgaagaggctggactcggattcgttgcctgagcaatggctgccatccggaagaaactggtgattgttggtgatggagcctgtggaaagacatgcttgctcatagtcttcagcaaggaccagttcccagaggtgtatgtgcccacagtgtttgagaactatgtggcagatatcgaggtggatggaaagcaggtagagttggctttgtgggacacagctgggcaggaagattatgatcgcctgaggcccctctcctacccagataccgatgttatactgatgtgtttttccatcgacagccctgatagtttagcaaagaccaaagatggagtgagagaggtttttgaaatggctacgagagctgctctgcaagctagacgtgggaagaaaaaatctgggtgccttgtcttgtgaaaccttgctgcaagcacagcccttatgcggttaattttgaagtgctgtttattaatcttagtgtatgattactggcctttttcatttatctataatttacctaagattacaaatcagaagtcatcttgctaccagtatttagaagccaactatgattattaacgatgtccaacccgtctggcccaccagggtccttttgacactgctctaacagccctcctctgcactcccacctgacacaccaggcgctaattcaaggaatttcttaacttcttgcttctttctagaaagagaaacagttggtaacttttgtgaattaggctgtaactactttataactaacatgtcctgcctattatctgtcagctgcaaggtactctggtgagtcaccacttcagggctttactccgtaacagattttgttggcatagctctggggtgggcagttttttgaaaatgggctcaaccagaaaagcccaagttcatgcagctgtggcagagttacagttctgtggtttcatgttagttaccttatagttactgtgtaattagtgccacttaatgtatgttaccaaaaataaatatatctaccccagactagatgtagtattttttgtataattggatttcctaatactgtcatcctcaaagaaagtgtattggttttttaaaaaagaaagtgtatttggaaataaagtcagatggaaaattcattttttaaattcccgttttgtcactttttctgataaaagatggccatattaccccttttcggccccatgtatctcagtaccccatggagctgggctaagtaaataggaattggtttcacgcctgaggcaattagacactttggaagatggcataacctgtctcacctggacttaagcatctggctctaattcacagtgctcttttctcctcactgtatccaggttccctcccagaggagccaccagttctcatgggtggcactcagtctctcttctctccagctgactaaactttttttctgtaccagttaatttttccaactactaatagaataaaggcagttttctaaacttcctgta

SEQ ID NO: 1714 - protein, 125 aa, Homosapiens
MAAIRKKLVIVGDGACGKTCLLIVFSKDQFPEVYVPTVFENYVADIEVDGKQVELALWDTAGQEDYDRLRPLSYPDTDVILMCFSIDSPDSLAKTKDGVREVFEMATRAALQARRGKKKSGCLVL

SEQ ID NO: 1715 - DNA, 2067 bp, Homosapiens
gatgagctgtgagtgcgcgcgcgtgcgcggggccgcgacctgtgccggctcgagcccgctgggcactcggaggcgcgcacgtcgttccccgccctcccgccgccgcccgccctcgctctctcgcgctaccctcccgccgcccgcggtcctccgtcggttctctcgttagtccacggtctggtcttcagctacccgccttcgtctccgagtttgcgactcgcggaccggcgtccccggcgcgaagaggctggactcggattcgttgcctgagcaatggctgccatccggaagaaactggtgattgttggtgatggagcctgtggaaagacatgcttgctcatagtcttcagcaaggaccagttcccagaggtgtatgtgcccacagtgtttgagaactatgtggcagatatcgaggtggatggaaagcaggtagagttggctttgtgggacacagctgggcaggaagattatgatcgcctgaggcccctctcctacccagataccgatgttatactgatgtgtttttccatcgacagccctgatagtttagaaaacatcccagaaaagtggaccccagaagtcaagcatttctgtcccaacgtgcccatcatcctggttgggaataagaaggatcttcggaatgatgagcacacaaggcgggagctagccaagatgaagcaggagcctcactgtgtcgccaggctggagtgctgtggcacgatcttggctcaactgcaacctccgcctcccagatttaagcgattcccctgcctcagcctcctgagtagctggggttacaggcgcccactaccacacccaggagccggtgaaacctgaagaaggcagagatatggcaaacaggattggcgcttttgggtacatggagtgttcagcaaagaccaaagatggagtgagagaggtttttgaaatggctacgagagctgctctgcaagctagacgtgggaagaaaaaatctgggtgccttgtcttgtgaaaccttgctgcaagcacagcccttatgcggttaattttgaagtgctgtttattaatcttagtgtatgattactggcctttttcatttatctataatttacctaagattacaaatcagaagtcatcttgctaccagtatttagaagccaactatgattattaacgatgtccaacccgtctggcccaccagggtccttttgacactgctctaacagccctcctctgcactcccacctgacacaccaggcgctaattcaaggaatttcttaacttcttgcttctttctagaaagagaaacagttggtaacttttgtgaattaggctgtaactactttataactaacatgtcctgcctattatctgtcagctgcaaggtactctggtgagtcaccacttcagggctttactccgtaacagattttgttggcatagctctggggtgggcagttttttgaaaatgggctcaaccagaaaagcccaagttcatgcagctgtggcagagttacagttctgtggtttcatgttagttaccttatagttactgtgtaattagtgccacttaatgtatgttaccaaaaataaatatatctaccccagactagatgtagtattttttgtataattggatttcctaatactgtcatcctcaaagaaagtgtattggttttttaaaaaagaaagtgtatttggaaataaagtcagatggaaaattcattttttaaattcccgttttgtcactttttctgataaaagatggccatattaccccttttcggccccatgtatctcagtaccccatggagctgggctaagtaaataggaattggtttcacgcctgaggcaattagacactttggaagatggcataacctgtctcacctggacttaagcatctggctctaattcacagtgctcttttctcctcactgtatccaggttccctcccagaggagccaccagttctcatgggtggcactcagtctctcttctctccagctgactaaactttttttctgtaccagttaatttttccaactactaatagaataaaggcagttttctaaacttcctgta

SEQ ID NO: 1716 - protein, 187 aa, Homosapiens
MAAIRKKLVIVGDGACGKTCLLIVFSKDQFPEVYVPTVFENYVADIEVDGKQVELALWDTAGQEDYDRLRPLSYPDTDVILMCFSIDSPDSLENIPEKWTPEVKHFCPNVPIILVGNKKDLRNDEHTRRELAKMKQEPHCVARLECCGTILAQLQPPPPRFKRFPCLSLLSSWGYRRPLPHPGAGET

SEQ ID NO: 1717 - DNA, 1853 bp, Homosapiens
gatgagctgtgagtgcgcgcgcgtgcgcggggccgcgacctgtgccggctcgagcccgctgggcactcggaggcgcgcacgtcgttccccgccctcccgccgccgcccgccctcgctctctcgcgctaccctcccgccgcccgcggtcctccgtcggttctctcgttagtccacggtctggtcttcagctacccgccttcgtctccgagtttgcgactcgcggaccggcgtccccggcgcgaagaggctggactcggattcgttgcctgagcaatggctgccatccggaagaaactggtgattgttggtgatggagcctgtggaaagacatgcttgctcatagtcttcagcaaggaccagttcccagaggtgtatgtgcccacagtgtttgagaactatgtggcagatatcgaggtggatggaaagcaggtagagttggctttgtgggacacagctgggcaggaagattatgatcgcctgaggcccctctcctacccagataccgatgttatactgatgtgtttttccatcgacagccctgatagtttagaaaacatcccagaaaagtggaccccagaagtcaagcatttctgtcccaacgtgcccatcatcctggttgggaataagaaggatcttcggaatgatgagcacacaaggcgggagctagccaagatgaagcaggagccggtgaaacgagtgagagaggtttttgaaatggctacgagagctgctctgcaagctagacgtgggaagaaaaaatctgggtgccttgtcttgtgaaaccttgctgcaagcacagcccttatgcggttaattttgaagtgctgtttattaatcttagtgtatgattactggcctttttcatttatctataatttacctaagattacaaatcagaagtcatcttgctaccagtatttagaagccaactatgattattaacgatgtccaacccgtctggcccaccagggtccttttgacactgctctaacagccctcctctgcactcccacctgacacaccaggcgctaattcaaggaatttcttaacttcttgcttctttctagaaagagaaacagttggtaacttttgtgaattaggctgtaactactttataactaacatgtcctgcctattatctgtcagctgcaaggtactctggtgagtcaccacttcagggctttactccgtaacagattttgttggcatagctctggggtgggcagttttttgaaaatgggctcaaccagaaaagcccaagttcatgcagctgtggcagagttacagttctgtggtttcatgttagttaccttatagttactgtgtaattagtgccacttaatgtatgttaccaaaaataaatatatctaccccagactagatgtagtattttttgtataattggatttcctaatactgtcatcctcaaagaaagtgtattggttttttaaaaaagaaagtgtatttggaaataaagtcagatggaaaattcattttttaaattcccgttttgtcactttttctgataaaagatggccatattaccccttttcggccccatgtatctcagtaccccatggagctgggctaagtaaataggaattggtttcacgcctgaggcaattagacactttggaagatggcataacctgtctcacctggacttaagcatctggctctaattcacagtgctcttttctcctcactgtatccaggttccctcccagaggagccaccagttctcatgggtggcactcagtctctcttctctccagctgactaaactttttttctgtaccagttaatttttccaactactaatagaataaaggcagttttctaaacttcctgta

SEQ ID NO: 1718 - protein, 168 aa, Homosapiens
MAAIRKKLVIVGDGACGKTCLLIVFSKDQFPEVYVPTVFENYVADIEVDGKQVELALWDTAGQEDYDRLRPLSYPDTDVILMCFSIDSPDSLENIPEKWTPEVKHFCPNVPIILVGNKKDLRNDEHTRRELAKMKQEPVKRVREVFEMATRAALQARRGKKKSGCLVL

SEQ ID NO: 1719 - DNA, 1931 bp, Homosapiens
gtggatgagctgtgagtgcgcgcgcgtgcgcggggccgcgacctgtgccggctcgagcccgctgggcactcggaggcgcgcacgtcgttccccgccctcccgccgccgcccgccctcgctctctcgcgctaccctcccgccgcccgcggtcctccgtcggttctctcgttagtccacggtctggtcttcagctacccgccttcgtctccgagtttgcgactcgcggaccggcgtccccggcgcgaagaggctggactcggattcgttgcctgagcaatggctgccatccggaagaaactggtgattgttggtgatggagcctgtggaaagacatgcttgctcatagtcttcagcaaggaccagttcccagaggtgtatgtgcccacagtgtttgagaactatgtggcagatatcgaggtggatggaaagcaggtagagttggctttgtgggacacagctgggcaggaagattatgatcgcctgaggcccctctcctacccagataccgatgttatactgatgtgtttttccatcgacagccctgatagtttagaaaacatcccagaaaagtggaccccagaagtcaagcatttctgtcccaacgtgcccatcatcctggttgggaataagaaggatcttcggaatgatgagcacacaaggcgggagctagccaagatgaagcaggagccggtgaaacctgaagaaggcagagatatggcaaacaggattggcgcttttgggtacatggagtgttcagcaaagaccaaagatggagtgagagaggtttttgaaatggctacgagagctgctctgcaagctagacgtgggaagaaaaaatctgggtgccttgtcttgtgaaaccttgctgcaagcacagcccttatgcggttaattttgaagtgctgtttattaatcttagtgtatgattactggcctttttcatttatctataatttacctaagattacaaatcagaagtcatcttgctaccagtatttagaagccaactatgattattaacgatgtccaacccgtctggcccaccagggtccttttgacactgctctaacagccctcctctgcactcccacctgacacaccaggcgctaattcaaggaatttcttaacttcttgcttctttctagaaagagaaacagttggtaacttttgtgaattaggctgtaactactttataactaacatgtcctgcctattatctgtcagctgcaaggtactctggtgagtcaccacttcagggctttactccgtaacagattttgttggcatagctctggggtgggcagttttttgaaaatgggctcaaccagaaaagcccaagttcatgcagctgtggcagagttacagttctgtggtttcatgttagttaccttatagttactgtgtaattagtgccacttaatgtatgttaccaaaaataaatatatctaccccagactagatgtagtattttttgtataattggatttcctaatactgtcatcctcaaagaaagtgtattggttttttaaaaaagaaagtgtatttggaaataaagtcagatggaaaattcattttttaaattcccgttttgtcactttttctgataaaagatggccatattaccccttttcggccccatgtatctcagtaccccatggagctgggctaagtaaataggaattggtttcacgcctgaggcaattagacactttggaagatggcataacctgtctcacctggacttaagcatctggctctaattcacagtgctcttttctcctcactgtatccaggttccctcccagaggagccaccagttctcatgggtggcactcagtctctcttctctccagctgactaaactttttttctgtaccagttaatttttccaactactaatagaataaaggcagttttctaaacttcctgta

SEQ ID NO: 1720 - protein, 193 aa, Homosapiens; identical to SEQ ID NO: 133

SEQ ID NO: 1721 - DNA, 801 bp, Homosapiens
gatgagctgtgagtgcgcgcgcgtgcgcggggccgcgacctgtgccggctcgagcccgctgggcactcggaggcgcgcacgtcgttccccgccctcccgccgccgcccgccctcgctctctcgcgctaccctcccgccgcccgcggtcctccgtcggttctctcgttagtccacggtctggtcttcagctacccgccttcgtctccgagtttgcgactcgcggaccggcgtccccggcgcgaagaggctggactcggattcgttgcctgagcaatggctgccatccggaagaaactggtgattgttggtgatggagcctgtggaaagacatgcttgctcatagtcttcagcaaggaccagttcccagaggtgtatgtgcccacagtgtttgagaactatgtggcagatatcgaggtggatggaaagcaggtagagttggctttgtgggacacagctgggcaggaagattatgatcgcctgaggcccctctcctacccagataccgatgttatactgatgtgtttttccatcgacagccctgatagtttagaaaacatcccagaaaagtggaccccagaagtcaagcatttctgtcccaacgtgcccatcatcctggttgggaataagaaggatcttcggaatgatgagcacacaaggcgggagctagccaagatgaagcaggagccaccagttctcatgggtggcactcagtctctcttctctccagctgactaaactttttttctgtaccagttaatttttccaactactaatagaataaaggcagttttctaaacttcc

SEQ ID NO: 1722 - protein, 153 aa, Homosapiens
MAAIRKKLVIVGDGACGKTCLLIVFSKDQFPEVYVPTVFENYVADIEVDGKQVELALWDTAGQEDYDRLRPLSYPDTDVILMCFSIDSPDSLENIPEKWTPEVKHFCPNVPIILVGNKKDLRNDEHTRRELAKMKQEPPVLMGGTQSLFSPAD

SEQ ID NO: 1723 - DNA, 1389 bp, Homosapiens
acgtcgttccccgccctcccgccgccgcccgccctcgctctctcgcgctaccctcccgccgcccgcggtcctccgtcggttctctcgttagtccacggtctggtcttcagctacccgccttcgtctccgagtttgcgactcgcggaccggcgtccccggcgcgaagaggctggactcggattcgttgcctgagcaatggctgccatccggaagaaactggtgattgttggtgatggagcctgtggaaagacatgcttgctcatagtcttcagcaaggaccagttcccagaggtgtatgtgcccacagtgtttgagaactatgtggcagatatcgaggtggatggaaagcagccctgatagtttagaaaacatcccagaaaagtggaccccagaagtcaagcatttctgtcccaacgtgcccatcatcctggttgggaataagaaggatcttcggaatgatgagcacacaaggcgggagctagccaagatgaagcaggagccggtgaaacctgaagaaggcagagatatggcaaacaggattggcgcttttgggtacatggagtgttcagcaaagaccaaagatggagtgagagaggtttttgaaatggctacgagagctgctctgcaagctagacgtgggaagaaaaaatctgggtgccttgtcttgtgaaaccttgctgcaagcacagcccttatgcggttaattttgaagtgctgtttattaatcttagtgtatgattactggcctttttcatttatctataatttacctaagattacaaatcagaagtcatcttgctaccagtatttagaagccaactatgattattaacgatgtccaacccgtctggcccaccagggtccttttgacactgctctaacagccctcctctgcactcccacctgacacaccaggcgctaattcaaggaatttcttaacttcttgcttctttctagaaagagaaacagttggtaacttttgtgaattaggctgtaactactttataactaacatgtcctgcctattatctgtcagctgcaaggtactctggtgagtcaccacttcagggctttactccgtaacagattttgttggcatagctctggggtgggcagttttttgaaaatgggctcaaccagaaaagcccaagttcatgcagctgtggcagagttacagttctgtggtttcatgttagttaccttatagttactgtgtaattagtgccacttaatgtatgttaccaaaaataaatatatctaccccagactagatgtagtattttttgtataattggatttcctaatactgtcatcctcaaagaaagtgtattggttttttaaaaaagaaagtgtatttggaaataaagtcagatggaaaattcatttttt

SEQ ID NO: 1724 - protein, 124 aa, Homosapiens; identical to SEQ ID NO: 1702

SEQ ID NO: 1725 - DNA, 1244 bp, Homosapiens
acgtcgttccccgccctcccgccgccgcccgccctcgctctctcgcgctaccctcccgccgcccgcggtcctccgtcggttctctcgttagtccacggtctggtcttcagctacccgccttcgtctccgagtttgcgactcgcggaccggcgtccccggcgcgaagaggctggactcggattcgttgcctgagcaatggctgccatccggaagaaactggtgattgttggtgatggagcctgtggaaagacatgcttgctcatagtcttcagcaaggaccagttcccagaggtgtatgtgcccacagtgtttgagaactatgtggcagatatcgaggtggatggaaagcaggagccggtgaaacctgaagaaggcagagatatggcaaacaggattggcgcttttgggtacatggagtgttcagcaaagaccaaagatggagtgagagaggtttttgaaatggctacgagagctgctctgcaagctagacgtgggaagaaaaaatctgggtgccttgtcttgtgaaaccttgctgcaagcacagcccttatgcggttaattttgaagtgctgtttattaatcttagtgtatgattactggcctttttcatttatctataatttacctaagattacaaatcagaagtcatcttgctaccagtatttagaagccaactatgattattaacgatgtccaacccgtctggcccaccagggtccttttgacactgctctaacagccctcctctgcactcccacctgacacaccaggcgctaattcaaggaatttcttaacttcttgcttctttctagaaagagaaacagttggtaacttttgtgaattaggctgtaactactttataactaacatgtcctgcctattatctgtcagctgcaaggtactctggtgagtcaccacttcagggctttactccgtaacagattttgttggcatagctctggggtgggcagttttttgaaaatgggctcaaccagaaaagcccaagttcatgcagctgtggcagagttacagttctgtggtttcatgttagttaccttatagttactgtgtaattagtgccacttaatgtatgttaccaaaaataaatatatctaccccagactagatgtagtattttttgtataattggatttcctaatactgtcatcctcaaagaaagtgtattggttttttaaaaaagaaagtgtatttggaaataaagtcagatggaaaattcatttttt

SEQ ID NO: 1726 - protein, 109 aa, Homosapiens; identical to SEQ ID NO: 1704

SEQ ID NO: 1727 - DNA, 1295 bp, Homosapiens
acgtcgttccccgccctcccgccgccgcccgccctcgctctctcgcgctaccctcccgccgcccgcggtcctccgtcggttctctcgttagtccacggtctggtcttcagctacccgccttcgtctccgagtttgcgactcgcggaccggcgtccccggcgcgaagaggctggactcggattcgttgcctgagcaatggctgccatccggaagaaactggtgattgttggtgatggagcctgtggaaagacatgcttgctcatagtcttcagcaaggaccagttcccagaggtgtatgtgcccacagtgtttgagaactatgtggcagatatcgaggtggatggaaagcaggtagagttggctttgtgggacacagctgggcaggaagattatgatcgctaggagccggtgaaacctgaagaaggcagagatatggcaaacaggattggcgcttttgggtacatggagtgttcagcaaagaccaaagatggagtgagagaggtttttgaaatggctacgagagctgctctgcaagctagacgtgggaagaaaaaatctgggtgccttgtcttgtgaaaccttgctgcaagcacagcccttatgcggttaattttgaagtgctgtttattaatcttagtgtatgattactggcctttttcatttatctataatttacctaagattacaaatcagaagtcatcttgctaccagtatttagaagccaactatgattattaacgatgtccaacccgtctggcccaccagggtccttttgacactgctctaacagccctcctctgcactcccacctgacacaccaggcgctaattcaaggaatttcttaacttcttgcttctttctagaaagagaaacagttggtaacttttgtgaattaggctgtaactactttataactaacatgtcctgcctattatctgtcagctgcaaggtactctggtgagtcaccacttcagggctttactccgtaacagattttgttggcatagctctggggtgggcagttttttgaaaatgggctcaaccagaaaagcccaagttcatgcagctgtggcagagttacagttctgtggtttcatgttagttaccttatagttactgtgtaattagtgccacttaatgtatgttaccaaaaataaatatatctaccccagactagatgtagtattttttgtataattggatttcctaatactgtcatcctcaaagaaagtgtattggttttttaaaaaagaaagtgtatttggaaataaagtcagatggaaaattcatttttt

SEQ ID NO: 1728 - protein, 68 aa, Homosapiens; identical to SEQ ID NO: 1706

SEQ ID NO: 1729 - DNA, 1375 bp, Homosapiens
acgtcgttccccgccctcccgccgccgcccgccctcgctctctcgcgctaccctcccgccgcccgcggtcctccgtcggttctctcgttagtccacggtctggtcttcagctacccgccttcgtctccgagtttgcgactcgcggaccggcgtccccggcgcgaagaggctggactcggattcgttgcctgagcaatggctgccatccggaagaaactggtgattgttggtgatggagcctgtggaaagacatgcttgctcatagtcttcagcaaggaccagttcccagaggtgtatgtgcccacagtgtttgagaactatgtggcagatatcgaggtggatggaaagcagaaaacatcccagaaaagtggaccccagaagtcaagcatttctgtcccaacgtgcccatcatcctggttgggaataagaaggatcttcggaatgatgagcacacaaggcgggagctagccaagatgaagcaggagccggtgaaacctgaagaaggcagagatatggcaaacaggattggcgcttttgggtacatggagtgttcagcaaagaccaaagatggagtgagagaggtttttgaaatggctacgagagctgctctgcaagctagacgtgggaagaaaaaatctgggtgccttgtcttgtgaaaccttgctgcaagcacagcccttatgcggttaattttgaagtgctgtttattaatcttagtgtatgattactggcctttttcatttatctataatttacctaagattacaaatcagaagtcatcttgctaccagtatttagaagccaactatgattattaacgatgtccaacccgtctggcccaccagggtccttttgacactgctctaacagccctcctctgcactcccacctgacacaccaggcgctaattcaaggaatttcttaacttcttgcttctttctagaaagagaaacagttggtaacttttgtgaattaggctgtaactactttataactaacatgtcctgcctattatctgtcagctgcaaggtactctggtgagtcaccacttcagggctttactccgtaacagattttgttggcatagctctggggtgggcagttttttgaaaatgggctcaaccagaaaagcccaagttcatgcagctgtggcagagttacagttctgtggtttcatgttagttaccttatagttactgtgtaattagtgccacttaatgtatgttaccaaaaataaatatatctaccccagactagatgtagtattttttgtataattggatttcctaatactgtcatcctcaaagaaagtgtattggttttttaaaaaagaaagtgtatttggaaataaagtcagatggaaaattcatttttt

SEQ ID NO: 1730 - protein, 90 aa, Homosapiens; identical to SEQ ID NO: 1708

SEQ ID NO: 1731 - DNA, 1325 bp, Homosapiens
actcggaggcgcgcacgtcgttccccgccctcccgccgccgcccgccctcgctctctcgcgctaccctcccgccgcccgcggtcctccgtcggttctctcgttagtccacggtctggtcttcagctacccgccttcgtctccgagtttgcgactcgcggaccggcgtccccggcgcgaagaggctggactcggattcgttgcctgagcaatggctgccatccggaagaaactggtgattgttggtgatggagcctgtggaaagacatgcttgctcatagtcttcagcaaggaccagttcccagaggtgtatgtgcccacagtgtttgagaatcaagcatttctgtcccaacgtgcccatcatcctggttgggaataagaaggatcttcggaatgatgagcacacaaggcgggagctagccaagatgaagcaggagccggtgaaacctgaagaaggcagagatatggcaaacaggattggcgcttttgggtacatggagtgttcagcaaagaccaaagatggagtgagagaggtttttgaaatggctacgagagctgctctgcaagctagacgtgggaagaaaaaatctgggtgccttgtcttgtgaaaccttgctgcaagcacagcccttatgcggttaattttgaagtgctgtttattaatcttagtgtatgattactggcctttttcatttatctataatttacctaagattacaaatcagaagtcatcttgctaccagtatttagaagccaactatgattattaacgatgtccaacccgtctggcccaccagggtccttttgacactgctctaacagccctcctctgcactcccacctgacacaccaggcgctaattcaaggaatttcttaacttcttgcttctttctagaaagagaaacagttggtaacttttgtgaattaggctgtaactactttataactaacatgtcctgcctattatctgtcagctgcaaggtactctggtgagtcaccacttcagggctttactccgtaacagattttgttggcatagctctggggtgggcagttttttgaaaatgggctcaaccagaaaagcccaagttcatgcagctgtggcagagttacagttctgtggtttcatgttagttaccttatagttactgtgtaattagtgccacttaatgtatgttaccaaaaataaatatatctaccccagactagatgtagtattttttgtataattggatttcctaatactgtcatcctcaaagaaagtgtattggttttttaaaaaagaaagtgtatttggaaataaagtcagatggaaaattcatttttt

SEQ ID NO: 1732 - protein, 98 aa, Homosapiens; identical to SEQ ID NO: 1710

SEQ ID NO: 1733 - DNA, 1463 bp, Homosapiens
gtgcgcggggccgcgacctgtgccggctcgagcccgctgggcactcggaggcgcgcacgtcgttccccgccctcccgccgccgcccgccctcgctctctcgcgctaccctcccgccgcccgcggtcctccgtcggttctctcgttagtccacggtctggtcttcagctacccgccttcgtctccgagtttgcgactcgcggaccggcgtccccggcgcgaagaggctggactcggattcgttgcctgagcaatggctgccatccggaagaaactggtgattgttggtgatggagcctgtggaaagacatgcttgctcatagtcttcagcaaggaccagttcccagaggtgtatgtgcccacagtgtttgagaactatgtggcagatatcgaggtggatggaaagcaggtagagttggctttgtgggacacagctgggcaggaagattatgatcgcctgaggcccctctcctacccagataccgatgttatactgatgtgtttttccatcgacagccctgatagtttagaaaacatcccagaaaagtggaccccagaagtcaagcatttctgagccggtgaaacctgaagaaggcagagatatggcaaacaggattggcgcttttgggtacatggagtgttcagcaaagaccaaagatggagtgagagaggtttttgaaatggctacgagagctgctctgcaagctagacgtgggaagaaaaaatctgggtgccttgtcttgtgaaaccttgctgcaagcacagcccttatgcggttaattttgaagtgctgtttattaatcttagtgtatgattactggcctttttcatttatctataatttacctaagattacaaatcagaagtcatcttgctaccagtatttagaagccaactatgattattaacgatgtccaacccgtctggcccaccagggtccttttgacactgctctaacagccctcctctgcactcccacctgacacaccaggcgctaattcaaggaatttcttaacttcttgcttctttctagaaagagaaacagttggtaacttttgtgaattaggctgtaactactttataactaacatgtcctgcctattatctgtcagctgcaaggtactctggtgagtcaccacttcagggctttactccgtaacagattttgttggcatagctctggggtgggcagttttttgaaaatgggctcaaccagaaaagcccaagttcatgcagctgtggcagagttacagttctgtggtttcatgttagttaccttatagttactgtgtaattagtgccacttaatgtatgttaccaaaaataaatatatctaccccagactagatgtagtattttttgtataattggatttcctaatactgtcatcctcaaagaaagtgtattggttttttaaaaaagaaagtgtatttggaaataaagtcagatggaaaattcatttttt

SEQ ID NO: 1734 - protein, 106 aa, Homosapiens; identical to SEQ ID NO: 1712

SEQ ID NO: 1735 - DNA, 1348 bp, Homosapiens
gtgcgcggggccgcgacctgtgccggctcgagcccgctgggcactcggaggcgcgcacgtcgttccccgccctcccgccgccgcccgccctcgctctctcgcgctaccctcccgccgcccgcggtcctccgtcggttctctcgttagtccacggtctggtcttcagctacccgccttcgtctccgagtttgcgactcgcggaccggcgtccccggcgcgaagaggctggactcggattcgttgcctgagcaatggctgccatccggaagaaactggtgattgttggtgatggagcctgtggaaagacatgcttgctcatagtcttcagcaaggaccagttcccagaggtgtatgtgcccacagtgtttgagaactatgtggcagatatcgaggtggatggaaagcaggtagagttggctttgtgggacacagctgggcaggaagattatgatcgcctgaggcccctctcctacccagataccgatgttatactgatgtgtttttccatcgacagccctgatagtttagcaaagaccaaagatggagtgagagaggtttttgaaatggctacgagagctgctctgcaagctagacgtgggaagaaaaaatctgggtgccttgtcttgtgaaaccttgctgcaagcacagcccttatgcggttaattttgaagtgctgtttattaatcttagtgtatgattactggcctttttcatttatctataatttacctaagattacaaatcagaagtcatcttgctaccagtatttagaagccaactatgattattaacgatgtccaacccgtctggcccaccagggtccttttgacactgctctaacagccctcctctgcactcccacctgacacaccaggcgctaattcaaggaatttcttaacttcttgcttctttctagaaagagaaacagttggtaacttttgtgaattaggctgtaactactttataactaacatgtcctgcctattatctgtcagctgcaaggtactctggtgagtcaccacttcagggctttactccgtaacagattttgttggcatagctctggggtgggcagttttttgaaaatgggctcaaccagaaaagcccaagttcatgcagctgtggcagagttacagttctgtggtttcatgttagttaccttatagttactgtgtaattagtgccacttaatgtatgttaccaaaaataaatatatctaccccagactagatgtagtattttttgtataattggatttcctaatactgtcatcctcaaagaaagtgtattggttttttaaaaaagaaagtgtatttggaaataaagtcagatggaaaattcatttttt

SEQ ID NO: 1736 - protein, 125 aa, Homosapiens; identical to SEQ ID NO: 1714

SEQ ID NO: 1737 - DNA, 1574 bp, Homosapiens
gatgagctgtgagtgcgcgcgcgtgcgcggggccgcgacctgtgccggctcgagcccgctgggcactcggaggcgcgcacgtcgttccccgccctcccgccgccgcccgccctcgctctctcgcgctaccctcccgccgcccgcggtcctccgtcggttctctcgttagtccacggtctggtcttcagctacccgccttcgtctccgagtttgcgactcgcggaccggcgtccccggcgcgaagaggctggactcggattcgttgcctgagcaatggctgccatccggaagaaactggtgattgttggtgatggagcctgtggaaagacatgcttgctcatagtcttcagcaaggaccagttcccagaggtgtatgtgcccacagtgtttgagaactatgtggcagatatcgaggtggatggaaagcaggtagagttggctttgtgggacacagctgggcaggaagattatgatcgcctgaggcccctctcctacccagataccgatgttatactgatgtgtttttccatcgacagccctgatagtttagaaaacatcccagaaaagtggaccccagaagtcaagcatttctgtcccaacgtgcccatcatcctggttgggaataagaaggatcttcggaatgatgagcacacaaggcgggagctagccaagatgaagcaggagccggtgaaacctgaagaaggcagagatatggcaaacaggattggcgcttttgggtacatggagtgttcagcaaagaccaaagatggagtgagagaggtttttgaaatggctacgagagctgctctgcaagctagacgtgggaagaaaaaatctgggtgccttgtcttgtgaaaccttgctgcaagcacagcccttatgcggttaattttgaagtgctgtttattaatcttagtgtatgattactggcctttttcatttatctataatttacctaagattacaaatcagaagtcatcttgctaccagtatttagaagccaactatgattattaacgatgtccaacccgtctggcccaccagggtccttttgacactgctctaacagccctcctctgcactcccacctgacacaccaggcgctaattcaaggaatttcttaacttcttgcttctttctagaaagagaaacagttggtaacttttgtgaattaggctgtaactactttataactaacatgtcctgcctattatctgtcagctgcaaggtactctggtgagtcaccacttcagggctttactccgtaacagattttgttggcatagctctggggtgggcagttttttgaaaatgggctcaaccagaaaagcccaagttcatgcagctgtggcagagttacagttctgtggtttcatgttagttaccttatagttactgtgtaattagtgccacttaatgtatgttaccaaaaataaatatatctaccccagactagatgtagtattttttgtataattggatttcctaatactgtcatcctcaaagaaagtgtattggttttttaaaaaagaaagtgtatttggaaataaagtcagatggaaaattcatttttt

SEQ ID NO: 1738 - protein, 193 aa, Homosapiens; identical to SEQ ID NO: 133

SEQ ID NO: 1739 - DNA, 1713 bp, Homosapiens
gatgagctgtgagtgcgcgcgcgtgcgcggggccgcgacctgtgccggctcgagcccgctgggcactcggaggcgcgcacgtcgttccccgccctcccgccgccgcccgccctcgctctctcgcgctaccctcccgccgcccgcggtcctccgtcggttctctcgttagtccacggtctggtcttcagctacccgccttcgtctccgagtttgcgactcgcggaccggcgtccccggcgcgaagaggctggactcggattcgttgcctgagcaatggctgccatccggaagaaactggtgattgttggtgatggagcctgtggaaagacatgcttgctcatagtcttcagcaaggaccagttcccagaggtgtatgtgcccacagtgtttgagaactatgtggcagatatcgaggtggatggaaagcaggtagagttggctttgtgggacacagctgggcaggaagattatgatcgcctgaggcccctctcctacccagataccgatgttatactgatgtgtttttccatcgacagccctgatagtttagaaaacatcccagaaaagtggaccccagaagtcaagcatttctgtcccaacgtgcccatcatcctggttgggaataagaaggatcttcggaatgatgagcacacaaggcgggagctagccaagatgaagcaggagcctcactgtgtcgccaggctggagtgctgtggcacgatcttggctcaactgcaacctccgcctcccagatttaagcgattcccctgcctcagcctcctgagtagctggggttacaggcgcccactaccacacccaggagccggtgaaacctgaagaaggcagagatatggcaaacaggattggcgcttttgggtacatggagtgttcagcaaagaccaaagatggagtgagagaggtttttgaaatggctacgagagctgctctgcaagctagacgtgggaagaaaaaatctgggtgccttgtcttgtgaaaccttgctgcaagcacagcccttatgcggttaattttgaagtgctgtttattaatcttagtgtatgattactggcctttttcatttatctataatttacctaagattacaaatcagaagtcatcttgctaccagtatttagaagccaactatgattattaacgatgtccaacccgtctggcccaccagggtccttttgacactgctctaacagccctcctctgcactcccacctgacacaccaggcgctaattcaaggaatttcttaacttcttgcttctttctagaaagagaaacagttggtaacttttgtgaattaggctgtaactactttataactaacatgtcctgcctattatctgtcagctgcaaggtactctggtgagtcaccacttcagggctttactccgtaacagattttgttggcatagctctggggtgggcagttttttgaaaatgggctcaaccagaaaagcccaagttcatgcagctgtggcagagttacagttctgtggtttcatgttagttaccttatagttactgtgtaattagtgccacttaatgtatgttaccaaaaataaatatatctaccccagactagatgtagtattttttgtataattggatttcctaatactgtcatcctcaaagaaagtgtattggttttttaaaaaagaaagtgtatttggaaataaagtcagatggaaaattcatttttt

SEQ ID NO: 1740 - protein, 187 aa, Homosapiens; identical to SEQ ID NO: 1716

SEQ ID NO: 1741 - DNA, 1499 bp, Homosapiens
gatgagctgtgagtgcgcgcgcgtgcgcggggccgcgacctgtgccggctcgagcccgctgggcactcggaggcgcgcacgtcgttccccgccctcccgccgccgcccgccctcgctctctcgcgctaccctcccgccgcccgcggtcctccgtcggttctctcgttagtccacggtctggtcttcagctacccgccttcgtctccgagtttgcgactcgcggaccggcgtccccggcgcgaagaggctggactcggattcgttgcctgagcaatggctgccatccggaagaaactggtgattgttggtgatggagcctgtggaaagacatgcttgctcatagtcttcagcaaggaccagttcccagaggtgtatgtgcccacagtgtttgagaactatgtggcagatatcgaggtggatggaaagcaggtagagttggctttgtgggacacagctgggcaggaagattatgatcgcctgaggcccctctcctacccagataccgatgttatactgatgtgtttttccatcgacagccctgatagtttagaaaacatcccagaaaagtggaccccagaagtcaagcatttctgtcccaacgtgcccatcatcctggttgggaataagaaggatcttcggaatgatgagcacacaaggcgggagctagccaagatgaagcaggagccggtgaaacgagtgagagaggtttttgaaatggctacgagagctgctctgcaagctagacgtgggaagaaaaaatctgggtgccttgtcttgtgaaaccttgctgcaagcacagcccttatgcggttaattttgaagtgctgtttattaatcttagtgtatgattactggcctttttcatttatctataatttacctaagattacaaatcagaagtcatcttgctaccagtatttagaagccaactatgattattaacgatgtccaacccgtctggcccaccagggtccttttgacactgctctaacagccctcctctgcactcccacctgacacaccaggcgctaattcaaggaatttcttaacttcttgcttctttctagaaagagaaacagttggtaacttttgtgaattaggctgtaactactttataactaacatgtcctgcctattatctgtcagctgcaaggtactctggtgagtcaccacttcagggctttactccgtaacagattttgttggcatagctctggggtgggcagttttttgaaaatgggctcaaccagaaaagcccaagttcatgcagctgtggcagagttacagttctgtggtttcatgttagttaccttatagttactgtgtaattagtgccacttaatgtatgttaccaaaaataaatatatctaccccagactagatgtagtattttttgtataattggatttcctaatactgtcatcctcaaagaaagtgtattggttttttaaaaaagaaagtgtatttggaaataaagtcagatggaaaattcatttttt

SEQ ID NO: 1742 - protein, 168 aa, Homosapiens; identical to SEQ ID NO: 1718

SEQ ID NO: 1743 - DNA, 1268 bp, Homosapiens
acgtcgttccccgccctcccgccgccgcccgccctcgctctctcgcgctaccctcccgccgcccgcggtcctccgtcggttctctcgttagtccacggtctggtcttcagctacccgccttcgtctccgagtttgcgactcgcggaccggcgtccccggcgcgaagaggctggactcggattcgttgcctgagcaatggctgccatccggaagaaactggtgattgttggtgatggagcctgtggaaagacatgcttgctcatagtcttcagcaaggaccagttcccagaggtgtatgtgcccacagtgtttgagaactatgtggcagatatcgaggtggatggaaagcagccctgatagtttagaaaacatcccagaaaagtggaccccagaagtcaagcatttctgtcccaacgtgcccatcatcctggttgggaataagaaggatcttcggaatgatgagcacacaaggcgggagctagccaagatgaagcaggagccggtgaaacctgaagaaggcagagatatggcaaacaggattggcgcttttgggtacatggagtgttcagcaaagaccaaagatggagtgagagaggtttttgaaatggctacgagagctgctctgcaagctagacgtgggaagaaaaaatctgggtgccttgtcttgtgaaaccttgctgcaagcacagcccttatgcggttaattttgaagtgctgtttattaatcttagtgtatgattactggcctttttcatttatctataatttacctaagattacaaatcagaagtcatcttgctaccagtatttagaagccaactatgattattaacgatgtccaacccgtctggcccaccagggtccttttgacactgctctaacagccctcctctgcactcccacctgacacaccaggcgctaattcaaggaatttcttaacttcttgcttctttctagaaagagaaacagttggtaacttttgtgaattaggctgtaactactttataactaacatgtcctgcctattatctgtcagctgcaaggtactctggtgagtcaccacttcagggctttactccgtaacagattttgttggcatagctctggggtgggcagttttttgaaaatgggctcaaccagaaaagcccaagttcatgcagctgtggcagagttacagttctgtggtttcatgttagttaccttatagttactgtgtaattagtgccacttaatgtatgttaccaaaaataaatatatctaccccagac

SEQ ID NO: 1744 - protein, 124 aa, Homosapiens; identical to SEQ ID NO: 1702

SEQ ID NO: 1745 - DNA, 1123 bp, Homosapiens
acgtcgttccccgccctcccgccgccgcccgccctcgctctctcgcgctaccctcccgccgcccgcggtcctccgtcggttctctcgttagtccacggtctggtcttcagctacccgccttcgtctccgagtttgcgactcgcggaccggcgtccccggcgcgaagaggctggactcggattcgttgcctgagcaatggctgccatccggaagaaactggtgattgttggtgatggagcctgtggaaagacatgcttgctcatagtcttcagcaaggaccagttcccagaggtgtatgtgcccacagtgtttgagaactatgtggcagatatcgaggtggatggaaagcaggagccggtgaaacctgaagaaggcagagatatggcaaacaggattggcgcttttgggtacatggagtgttcagcaaagaccaaagatggagtgagagaggtttttgaaatggctacgagagctgctctgcaagctagacgtgggaagaaaaaatctgggtgccttgtcttgtgaaaccttgctgcaagcacagcccttatgcggttaattttgaagtgctgtttattaatcttagtgtatgattactggcctttttcatttatctataatttacctaagattacaaatcagaagtcatcttgctaccagtatttagaagccaactatgattattaacgatgtccaacccgtctggcccaccagggtccttttgacactgctctaacagccctcctctgcactcccacctgacacaccaggcgctaattcaaggaatttcttaacttcttgcttctttctagaaagagaaacagttggtaacttttgtgaattaggctgtaactactttataactaacatgtcctgcctattatctgtcagctgcaaggtactctggtgagtcaccacttcagggctttactccgtaacagattttgttggcatagctctggggtgggcagttttttgaaaatgggctcaaccagaaaagcccaagttcatgcagctgtggcagagttacagttctgtggtttcatgttagttaccttatagttactgtgtaattagtgccacttaatgtatgttaccaaaaataaatatatctaccccagac

SEQ ID NO: 1746 - protein, 109 aa, Homosapiens; identical to SEQ ID NO: 1704

SEQ ID NO: 1747 - DNA, 1174 bp, Homosapiens
acgtcgttccccgccctcccgccgccgcccgccctcgctctctcgcgctaccctcccgccgcccgcggtcctccgtcggttctctcgttagtccacggtctggtcttcagctacccgccttcgtctccgagtttgcgactcgcggaccggcgtccccggcgcgaagaggctggactcggattcgttgcctgagcaatggctgccatccggaagaaactggtgattgttggtgatggagcctgtggaaagacatgcttgctcatagtcttcagcaaggaccagttcccagaggtgtatgtgcccacagtgtttgagaactatgtggcagatatcgaggtggatggaaagcaggtagagttggctttgtgggacacagctgggcaggaagattatgatcgctaggagccggtgaaacctgaagaaggcagagatatggcaaacaggattggcgcttttgggtacatggagtgttcagcaaagaccaaagatggagtgagagaggtttttgaaatggctacgagagctgctctgcaagctagacgtgggaagaaaaaatctgggtgccttgtcttgtgaaaccttgctgcaagcacagcccttatgcggttaattttgaagtgctgtttattaatcttagtgtatgattactggcctttttcatttatctataatttacctaagattacaaatcagaagtcatcttgctaccagtatttagaagccaactatgattattaacgatgtccaacccgtctggcccaccagggtccttttgacactgctctaacagccctcctctgcactcccacctgacacaccaggcgctaattcaaggaatttcttaacttcttgcttctttctagaaagagaaacagttggtaacttttgtgaattaggctgtaactactttataactaacatgtcctgcctattatctgtcagctgcaaggtactctggtgagtcaccacttcagggctttactccgtaacagattttgttggcatagctctggggtgggcagttttttgaaaatgggctcaaccagaaaagcccaagttcatgcagctgtggcagagttacagttctgtggtttcatgttagttaccttatagttactgtgtaattagtgccacttaatgtatgttaccaaaaataaatatatctaccccagac

SEQ ID NO: 1748 - protein, 68 aa, Homosapiens; identical to SEQ ID NO: 1706

SEQ ID NO: 1749 - DNA, 1254 bp, Homosapiens
acgtcgttccccgccctcccgccgccgcccgccctcgctctctcgcgctaccctcccgccgcccgcggtcctccgtcggttctctcgttagtccacggtctggtcttcagctacccgccttcgtctccgagtttgcgactcgcggaccggcgtccccggcgcgaagaggctggactcggattcgttgcctgagcaatggctgccatccggaagaaactggtgattgttggtgatggagcctgtggaaagacatgcttgctcatagtcttcagcaaggaccagttcccagaggtgtatgtgcccacagtgtttgagaactatgtggcagatatcgaggtggatggaaagcagaaaacatcccagaaaagtggaccccagaagtcaagcatttctgtcccaacgtgcccatcatcctggttgggaataagaaggatcttcggaatgatgagcacacaaggcgggagctagccaagatgaagcaggagccggtgaaacctgaagaaggcagagatatggcaaacaggattggcgcttttgggtacatggagtgttcagcaaagaccaaagatggagtgagagaggtttttgaaatggctacgagagctgctctgcaagctagacgtgggaagaaaaaatctgggtgccttgtcttgtgaaaccttgctgcaagcacagcccttatgcggttaattttgaagtgctgtttattaatcttagtgtatgattactggcctttttcatttatctataatttacctaagattacaaatcagaagtcatcttgctaccagtatttagaagccaactatgattattaacgatgtccaacccgtctggcccaccagggtccttttgacactgctctaacagccctcctctgcactcccacctgacacaccaggcgctaattcaaggaatttcttaacttcttgcttctttctagaaagagaaacagttggtaacttttgtgaattaggctgtaactactttataactaacatgtcctgcctattatctgtcagctgcaaggtactctggtgagtcaccacttcagggctttactccgtaacagattttgttggcatagctctggggtgggcagttttttgaaaatgggctcaaccagaaaagcccaagttcatgcagctgtggcagagttacagttctgtggtttcatgttagttaccttatagttactgtgtaattagtgccacttaatgtatgttaccaaaaataaatatatctaccccagac

SEQ ID NO: 1750 - protein, 90 aa, Homosapiens; identical to SEQ ID NO: 1708

SEQ ID NO: 1751 - DNA, 1204 bp, Homosapiens
actcggaggcgcgcacgtcgttccccgccctcccgccgccgcccgccctcgctctctcgcgctaccctcccgccgcccgcggtcctccgtcggttctctcgttagtccacggtctggtcttcagctacccgccttcgtctccgagtttgcgactcgcggaccggcgtccccggcgcgaagaggctggactcggattcgttgcctgagcaatggctgccatccggaagaaactggtgattgttggtgatggagcctgtggaaagacatgcttgctcatagtcttcagcaaggaccagttcccagaggtgtatgtgcccacagtgtttgagaatcaagcatttctgtcccaacgtgcccatcatcctggttgggaataagaaggatcttcggaatgatgagcacacaaggcgggagctagccaagatgaagcaggagccggtgaaacctgaagaaggcagagatatggcaaacaggattggcgcttttgggtacatggagtgttcagcaaagaccaaagatggagtgagagaggtttttgaaatggctacgagagctgctctgcaagctagacgtgggaagaaaaaatctgggtgccttgtcttgtgaaaccttgctgcaagcacagcccttatgcggttaattttgaagtgctgtttattaatcttagtgtatgattactggcctttttcatttatctataatttacctaagattacaaatcagaagtcatcttgctaccagtatttagaagccaactatgattattaacgatgtccaacccgtctggcccaccagggtccttttgacactgctctaacagccctcctctgcactcccacctgacacaccaggcgctaattcaaggaatttcttaacttcttgcttctttctagaaagagaaacagttggtaacttttgtgaattaggctgtaactactttataactaacatgtcctgcctattatctgtcagctgcaaggtactctggtgagtcaccacttcagggctttactccgtaacagattttgttggcatagctctggggtgggcagttttttgaaaatgggctcaaccagaaaagcccaagttcatgcagctgtggcagagttacagttctgtggtttcatgttagttaccttatagttactgtgtaattagtgccacttaatgtatgttaccaaaaataaatatatctaccccagac

SEQ ID NO: 1752 - protein, 98 aa, Homosapiens; identical to SEQ ID NO: 1710

SEQ ID NO: 1753 - DNA, 1342 bp, Homosapiens
gtgcgcggggccgcgacctgtgccggctcgagcccgctgggcactcggaggcgcgcacgtcgttccccgccctcccgccgccgcccgccctcgctctctcgcgctaccctcccgccgcccgcggtcctccgtcggttctctcgttagtccacggtctggtcttcagctacccgccttcgtctccgagtttgcgactcgcggaccggcgtccccggcgcgaagaggctggactcggattcgttgcctgagcaatggctgccatccggaagaaactggtgattgttggtgatggagcctgtggaaagacatgcttgctcatagtcttcagcaaggaccagttcccagaggtgtatgtgcccacagtgtttgagaactatgtggcagatatcgaggtggatggaaagcaggtagagttggctttgtgggacacagctgggcaggaagattatgatcgcctgaggcccctctcctacccagataccgatgttatactgatgtgtttttccatcgacagccctgatagtttagaaaacatcccagaaaagtggaccccagaagtcaagcatttctgagccggtgaaacctgaagaaggcagagatatggcaaacaggattggcgcttttgggtacatggagtgttcagcaaagaccaaagatggagtgagagaggtttttgaaatggctacgagagctgctctgcaagctagacgtgggaagaaaaaatctgggtgccttgtcttgtgaaaccttgctgcaagcacagcccttatgcggttaattttgaagtgctgtttattaatcttagtgtatgattactggcctttttcatttatctataatttacctaagattacaaatcagaagtcatcttgctaccagtatttagaagccaactatgattattaacgatgtccaacccgtctggcccaccagggtccttttgacactgctctaacagccctcctctgcactcccacctgacacaccaggcgctaattcaaggaatttcttaacttcttgcttctttctagaaagagaaacagttggtaacttttgtgaattaggctgtaactactttataactaacatgtcctgcctattatctgtcagctgcaaggtactctggtgagtcaccacttcagggctttactccgtaacagattttgttggcatagctctggggtgggcagttttttgaaaatgggctcaaccagaaaagcccaagttcatgcagctgtggcagagttacagttctgtggtttcatgttagttaccttatagttactgtgtaattagtgccacttaatgtatgttaccaaaaataaatatatctaccccagac

SEQ ID NO: 1754 - protein, 106 aa, Homosapiens; identical to SEQ ID NO: 1712

SEQ ID NO: 1755 - DNA, 1227 bp, Homosapiens
gtgcgcggggccgcgacctgtgccggctcgagcccgctgggcactcggaggcgcgcacgtcgttccccgccctcccgccgccgcccgccctcgctctctcgcgctaccctcccgccgcccgcggtcctccgtcggttctctcgttagtccacggtctggtcttcagctacccgccttcgtctccgagtttgcgactcgcggaccggcgtccccggcgcgaagaggctggactcggattcgttgcctgagcaatggctgccatccggaagaaactggtgattgttggtgatggagcctgtggaaagacatgcttgctcatagtcttcagcaaggaccagttcccagaggtgtatgtgcccacagtgtttgagaactatgtggcagatatcgaggtggatggaaagcaggtagagttggctttgtgggacacagctgggcaggaagattatgatcgcctgaggcccctctcctacccagataccgatgttatactgatgtgtttttccatcgacagccctgatagtttagcaaagaccaaagatggagtgagagaggtttttgaaatggctacgagagctgctctgcaagctagacgtgggaagaaaaaatctgggtgccttgtcttgtgaaaccttgctgcaagcacagcccttatgcggttaattttgaagtgctgtttattaatcttagtgtatgattactggcctttttcatttatctataatttacctaagattacaaatcagaagtcatcttgctaccagtatttagaagccaactatgattattaacgatgtccaacccgtctggcccaccagggtccttttgacactgctctaacagccctcctctgcactcccacctgacacaccaggcgctaattcaaggaatttcttaacttcttgcttctttctagaaagagaaacagttggtaacttttgtgaattaggctgtaactactttataactaacatgtcctgcctattatctgtcagctgcaaggtactctggtgagtcaccacttcagggctttactccgtaacagattttgttggcatagctctggggtgggcagttttttgaaaatgggctcaaccagaaaagcccaagttcatgcagctgtggcagagttacagttctgtggtttcatgttagttaccttatagttactgtgtaattagtgccacttaatgtatgttaccaaaaataaatatatctaccccagac

SEQ ID NO: 1756 - protein, 125 aa, Homosapiens; identical to SEQ ID NO: 1714

SEQ ID NO: 1757 - DNA, 1453 bp, Homosapiens
gatgagctgtgagtgcgcgcgcgtgcgcggggccgcgacctgtgccggctcgagcccgctgggcactcggaggcgcgcacgtcgttccccgccctcccgccgccgcccgccctcgctctctcgcgctaccctcccgccgcccgcggtcctccgtcggttctctcgttagtccacggtctggtcttcagctacccgccttcgtctccgagtttgcgactcgcggaccggcgtccccggcgcgaagaggctggactcggattcgttgcctgagcaatggctgccatccggaagaaactggtgattgttggtgatggagcctgtggaaagacatgcttgctcatagtcttcagcaaggaccagttcccagaggtgtatgtgcccacagtgtttgagaactatgtggcagatatcgaggtggatggaaagcaggtagagttggctttgtgggacacagctgggcaggaagattatgatcgcctgaggcccctctcctacccagataccgatgttatactgatgtgtttttccatcgacagccctgatagtttagaaaacatcccagaaaagtggaccccagaagtcaagcatttctgtcccaacgtgcccatcatcctggttgggaataagaaggatcttcggaatgatgagcacacaaggcgggagctagccaagatgaagcaggagccggtgaaacctgaagaaggcagagatatggcaaacaggattggcgcttttgggtacatggagtgttcagcaaagaccaaagatggagtgagagaggtttttgaaatggctacgagagctgctctgcaagctagacgtgggaagaaaaaatctgggtgccttgtcttgtgaaaccttgctgcaagcacagcccttatgcggttaattttgaagtgctgtttattaatcttagtgtatgattactggcctttttcatttatctataatttacctaagattacaaatcagaagtcatcttgctaccagtatttagaagccaactatgattattaacgatgtccaacccgtctggcccaccagggtccttttgacactgctctaacagccctcctctgcactcccacctgacacaccaggcgctaattcaaggaatttcttaacttcttgcttctttctagaaagagaaacagttggtaacttttgtgaattaggctgtaactactttataactaacatgtcctgcctattatctgtcagctgcaaggtactctggtgagtcaccacttcagggctttactccgtaacagattttgttggcatagctctggggtgggcagttttttgaaaatgggctcaaccagaaaagcccaagttcatgcagctgtggcagagttacagttctgtggtttcatgttagttaccttatagttactgtgtaattagtgccacttaatgtatgttaccaaaaataaatatatctaccccagac

SEQ ID NO: 1758 - protein, 193 aa, Homosapiens; identical to SEQ ID NO: 133

SEQ ID NO: 1759 - DNA, 1592 bp, Homosapiens
gatgagctgtgagtgcgcgcgcgtgcgcggggccgcgacctgtgccggctcgagcccgctgggcactcggaggcgcgcacgtcgttccccgccctcccgccgccgcccgccctcgctctctcgcgctaccctcccgccgcccgcggtcctccgtcggttctctcgttagtccacggtctggtcttcagctacccgccttcgtctccgagtttgcgactcgcggaccggcgtccccggcgcgaagaggctggactcggattcgttgcctgagcaatggctgccatccggaagaaactggtgattgttggtgatggagcctgtggaaagacatgcttgctcatagtcttcagcaaggaccagttcccagaggtgtatgtgcccacagtgtttgagaactatgtggcagatatcgaggtggatggaaagcaggtagagttggctttgtgggacacagctgggcaggaagattatgatcgcctgaggcccctctcctacccagataccgatgttatactgatgtgtttttccatcgacagccctgatagtttagaaaacatcccagaaaagtggaccccagaagtcaagcatttctgtcccaacgtgcccatcatcctggttgggaataagaaggatcttcggaatgatgagcacacaaggcgggagctagccaagatgaagcaggagcctcactgtgtcgccaggctggagtgctgtggcacgatcttggctcaactgcaacctccgcctcccagatttaagcgattcccctgcctcagcctcctgagtagctggggttacaggcgcccactaccacacccaggagccggtgaaacctgaagaaggcagagatatggcaaacaggattggcgcttttgggtacatggagtgttcagcaaagaccaaagatggagtgagagaggtttttgaaatggctacgagagctgctctgcaagctagacgtgggaagaaaaaatctgggtgccttgtcttgtgaaaccttgctgcaagcacagcccttatgcggttaattttgaagtgctgtttattaatcttagtgtatgattactggcctttttcatttatctataatttacctaagattacaaatcagaagtcatcttgctaccagtatttagaagccaactatgattattaacgatgtccaacccgtctggcccaccagggtccttttgacactgctctaacagccctcctctgcactcccacctgacacaccaggcgctaattcaaggaatttcttaacttcttgcttctttctagaaagagaaacagttggtaacttttgtgaattaggctgtaactactttataactaacatgtcctgcctattatctgtcagctgcaaggtactctggtgagtcaccacttcagggctttactccgtaacagattttgttggcatagctctggggtgggcagttttttgaaaatgggctcaaccagaaaagcccaagttcatgcagctgtggcagagttacagttctgtggtttcatgttagttaccttatagttactgtgtaattagtgccacttaatgtatgttaccaaaaataaatatatctaccccagac

SEQ ID NO: 1760 - protein, 187 aa, Homosapiens; identical to SEQ ID NO: 1716

SEQ ID NO: 1761 - DNA, 1378 bp, Homosapiens
gatgagctgtgagtgcgcgcgcgtgcgcggggccgcgacctgtgccggctcgagcccgctgggcactcggaggcgcgcacgtcgttccccgccctcccgccgccgcccgccctcgctctctcgcgctaccctcccgccgcccgcggtcctccgtcggttctctcgttagtccacggtctggtcttcagctacccgccttcgtctccgagtttgcgactcgcggaccggcgtccccggcgcgaagaggctggactcggattcgttgcctgagcaatggctgccatccggaagaaactggtgattgttggtgatggagcctgtggaaagacatgcttgctcatagtcttcagcaaggaccagttcccagaggtgtatgtgcccacagtgtttgagaactatgtggcagatatcgaggtggatggaaagcaggtagagttggctttgtgggacacagctgggcaggaagattatgatcgcctgaggcccctctcctacccagataccgatgttatactgatgtgtttttccatcgacagccctgatagtttagaaaacatcccagaaaagtggaccccagaagtcaagcatttctgtcccaacgtgcccatcatcctggttgggaataagaaggatcttcggaatgatgagcacacaaggcgggagctagccaagatgaagcaggagccggtgaaacgagtgagagaggtttttgaaatggctacgagagctgctctgcaagctagacgtgggaagaaaaaatctgggtgccttgtcttgtgaaaccttgctgcaagcacagcccttatgcggttaattttgaagtgctgtttattaatcttagtgtatgattactggcctttttcatttatctataatttacctaagattacaaatcagaagtcatcttgctaccagtatttagaagccaactatgattattaacgatgtccaacccgtctggcccaccagggtccttttgacactgctctaacagccctcctctgcactcccacctgacacaccaggcgctaattcaaggaatttcttaacttcttgcttctttctagaaagagaaacagttggtaacttttgtgaattaggctgtaactactttataactaacatgtcctgcctattatctgtcagctgcaaggtactctggtgagtcaccacttcagggctttactccgtaacagattttgttggcatagctctggggtgggcagttttttgaaaatgggctcaaccagaaaagcccaagttcatgcagctgtggcagagttacagttctgtggtttcatgttagttaccttatagttactgtgtaattagtgccacttaatgtatgttaccaaaaataaatatatctaccccagac

SEQ ID NO: 1762 - protein, 168 aa, Homosapiens; identical to SEQ ID NO: 1718

SEQ ID NO: 1763 - DNA, 500 bp, Homosapiens
gaaaccaggcttgaaaaaacttgctttaggtttgtgctgaagatgatgaggtatctattaataaacttgtgctgcagccctccctgtcatgacagggcagcaggtgggtcaaggatgttgtcgtcattaccacaaacagcctttgagggtctgcttgtggcctcgggttgcctggatagttagtgttagagtgattgtgttgttatggttgtccctaccttaatgatgataactggggttgctccaagatattgagccacttgtttaaggtcatgctggcccaaggagctgagctaagattgagtcctctgtgcagtatgtcccaggacagagaaagagcacgtattccatgccgttggttcacttagatcattttcagcagttatgattgattgattgatttagaggcggggtctcgctctgttgcccaggctggagttgtagtgagctgagattgcgccactgcgctccagcctgggcgacagagcaagagtccatct

SEQ ID NO: 1764 - protein, 46 aa, Homosapiens
MMRYLLINLCCSPPCHDRAAGGSRMLSSLPQTAFEGLLVASGCLDS

SEQ ID NO: 1765 - DNA, 440 bp, Homosapiens
ggctgaggctgaattaacaccctctgtattggtttgccaccttcagggtacatcccaaaattctgttaggctggtatttgttgtattttttccatctatacttgggccagaaagtatcttagagttcctattagcataagagcaatcatcgtggctcactctgtatttgaataaaaaagagcacaaactataggacgggcgcagtggtgcccatctatctacgcatctatccaatctatgtacctatctaacctatctatgtgtttctctattatgtagttattttcagaaagggtctcattctgtcaccaaggctggaatgcagtggtgcaatattggctcactgcagcctctgcctcccaggctcaactcaagcgatcctcccacctcaacctctccagtagctgggactaccaggctcctgccaccacagctgacta

SEQ ID NO: 1766 - protein, 39 aa, Homosapiens
MQWCNIGSLQPLPPRLNSSDPPTSTSPVAGTTRLLPPQL

SEQ ID NO: 1767 - DNA, 2147 bp, Homosapiens
tactcccggagtcactcatcccttaagcaagcagggtggggttaggtgcgcgtgcgcggttttaatactcctccccgaactgccaactcttcacgcacgcgaagtaggccccaccctggctgggtttacgcgtgcgcactaacgggcctggtcccggaagaccacacgcgtgcgtggtggggactacggtgacagtaccccgggtggggcgagggccagtcatggcggagtcctggtctgggcaggccttgcaggctctgccggccacggtgctgggcgcgctgggcagcgagttcttgcgggagtgggaggcgcaggacatgcgcgtgaccctcttcaagctgctgctgctgtggttggtgttaagtctcctgggcatccagctggcgtgggggttctacgggaatacagtgaccgggttgtatcaccgtccaggtctgggtggtcagaatggatccacgcctgatggctccacgcatttcccttcgtgggaaatggcagcaaacgaacctctcaaaacccacagagaataagggaaggcagcagagggtctccaagggcatcactgggtctgctggcttctacactgggttctgctactccccagacctcagggacaactgccgggggttcagggttggtagcagggagtacccagtgcctacagggctgggcctcttctgcctcttaagcctgctccctcacccaggcactgggcaagtgaagagtttgcctgtactcttatctgggtgccttaaggagagagattgtgttcttcctctctcaggggtgataactcaggaagcctctgggttgggaagaccatcagttcttttgtcttaggtttcttttcctgtccctcttccatccccaagatgtgaccccataaaaatttttcctgagttggccaggcatggtggctcacgcctgtaatcccaacactttgggaggctgaggcaggcagatcacgaggtcaggagttcgagaccagcctgaccaacatggtgaaaaccccatctctactaaaaatacaaaaattagccgggtgtggtggcacacaccagtaatcccagctactcaggaggctgaagcaggagatttgcttgaacctgggaggcagaggttgcagtgagccaagattgcgccgttgtactccagcctgggcaacagagcaagacccatctcaaaaaaaaaatttttttcctgagaggaagcctgaggttgaccagctctggggtttgtaaggcaggtctgttttctcctaggccctgagttttctgaatctctggttttgctttgttggcaaggagccagggaatcctgacctgagccagaccttaagctctatggttatttagctggccattcaggtataaggcagggtggtgtacctgctggcactatccagatggaggcaccaaacacccacatacctggcccaaccagacttctcccgtgagccaggcaaaggaaattgtcatctgccaactgtcctactcatattcctctcagtccttcttgggggtaagctgattacctgaaggacagctgaacccctggggtagcctcctatccaccactgcttaagtgcctatgggaatgtgggtctgcaccttgtcccctcataggatggtaccaagcatttagtgcacagtggccccatcatagcctgcagcctcatcatttcccatctggacctggtacaaatgcacgtcacaggctcagctcctccccactagcattttctctaccttcaagaaccaggcagccctgccatgtcacaataggccaggggagtttccaaagatgtgggtggcaaatgcccctatagaaacaccagtacctgaaagcactgtagccctggacctgcctccttccctcggggccatacttctgtttccatctgctgggccaccagccactttagtgacccctgcctacttccttcctgttggatatcatacttccatctggctgcctttgcttaagccatctttgtggtagaggggccctggaattgcagctgtactgaggatgatgttattcacagcccctggcccacccactaatactactgcacagagtcaggatctcacatttcaccccaggctcaactgaggatgtggcttattaaacacggaagtgca

SEQ ID NO: 1768 - protein, 130 aa, Homosapiens
MDPRLMAPRISLRGKWQQTNLSKPTENKGRQQRVSKGITGSAGFYTGFCYSPDLRDNCRGFRVGSREYPVPTGLGLFCLLSLLPHPGTGQVKSLPVLLSGCLKERDCVLPLSGVITQEASGLGRPSVLLS

SEQ ID NO: 1769 - DNA, 1007 bp, Homosapiens
atcccttaagcaagcagggtggggttaggtgcgcgtgcgcggttttaatactcctccccgaactgccaactcttcacgcacgcgaagtaggccccaccctggctgggtttacgcgtgcgcactaacgggcctggtcccggaagaccacacgcgtgcgtggtggggactacggtgacagtaccccgggtggggcgagggccagtcatggcggagtcctggtctgggcaggccttgcaggctctgccggccacggtgctgggcgcgctgggcagcgagttcttgcgggagtgggaggcgcaggacatgcgcgtgaccctcttcaagctgctgctgctgtggttggtgttaagtctcctgggcatccagctggcgtgggggttctacgggaatacagtgaccgggttgtatcaccgtccaggtctgggtggtcagaatggatccacgcctgatggctccacgcatttcccttcgtgggaaatggcagcaaacgaacctctcaaaacccacagagaataagggaaggcagcagagggtctccaagggcatcactgggtctgctggcttctacactgggttctgctactccccagacctcagggacaactgccgggggttcagggttggtagcagggagtacccagtgcctacagggctgggcctcttctgcctcttaagcctgctccctcacccaggcactgggcaagtgaagagtttgcctgtactcttatctgggtgccttaaggagagagattgtgttcttcctctctcaggggtgataactcaggaagcctctgggttgggaagaccatcagttcttttgtcttaggtttcttttcctgtccctcttccatccccaagatgtgaccccataaaaatttttcctgagttggccaggcatggtggctcacgcctgtaatcccaacactttgggaggctgaggcaggcagatcacgaggtcaggagttcgagaccagcctgaccaacatggtgaaaaccccatctctact

SEQ ID NO: 1770 - protein, 130 aa, Homosapiens; identical to SEQ ID NO: 1768

SEQ ID NO: 1771 - DNA, 2103 bp, Homosapiens
gaccacacgcgtgcgtggtggggactacggtgacagtaccccgggtggggcgagggccagtcatggcggagtcctggtctgggcaggccttgcaggctctgccggccacggtgctgggcgcgctgggcagcgagttcttgcgggagtgggaggcgcaggacatgcgcgtgaccctcttcaagctgctgctgctgtggttggtgttaagtctcctgggcatccagctggcgtgggggttctacgggaatacagtgaccgggttgtatcaccgtccaggaccctcaccagacttcaccaaacaataccagtggtctctaacctgacctgggctgatgcctgctcagattcccaccccagccttctgcagctctggatgtgtttctgcctccaggtctgggtggtcagaatggatccacgcctgatggctccacgcatttcccttcgtgggaaatggcagcaaacgaacctctcaaaacccacagagaataagggaaggcagcagagggtctccaagggcatcactgggtctgctggcttctacactgggttctgctactccccagacctcagggacaactgccgggggttcagggttggtagcagggagtacccagtgcctacagggctgggcctcttctgcctcttaagcctgctccctcacccaggcactgggcaagtgaagagtttgcctgtactcttatctgggtgccttaaggagagagattgtgttcttcctctctcaggggtgataactcaggaagcctctgggttgggaagaccatcagttcttttgtcttaggtttcttttcctgtccctcttccatccccaagatgtgaccccataaaaatttttcctgagttggccaggcatggtggctcacgcctgtaatcccaacactttgggaggctgaggcaggcagatcacgaggtcaggagttcgagaccagcctgaccaacatggtgaaaaccccatctctactaaaaatacaaaaattagccgggtgtggtggcacacaccagtaatcccagctactcaggaggctgaagcaggagatttgcttgaacctgggaggcagaggttgcagtgagccaagattgcgccgttgtactccagcctgggcaacagagcaagacccatctcaaaaaaaaaatttttttcctgagaggaagcctgaggttgaccagctctggggtttgtaaggcaggtctgttttctcctaggccctgagttttctgaatctctggttttgctttgttggcaaggagccagggaatcctgacctgagccagaccttaagctctatggttatttagctggccattcaggtataaggcagggtggtgtacctgctggcactatccagatggaggcaccaaacacccacatacctggcccaaccagacttctcccgtgagccaggcaaaggaaattgtcatctgccaactgtcctactcatattcctctcagtccttcttgggggtaagctgattacctgaaggacagctgaacccctggggtagcctcctatccaccactgcttaagtgcctatgggaatgtgggtctgcaccttgtcccctcataggatggtaccaagcatttagtgcacagtggccccatcatagcctgcagcctcatcatttcccatctggacctggtacaaatgcacgtcacaggctcagctcctccccactagcattttctctaccttcaagaaccaggcagccctgccatgtcacaataggccaggggagtttccaaagatgtgggtggcaaatgcccctatagaaacaccagtacctgaaagcactgtagccctggacctgcctccttccctcggggccatacttctgtttccatctgctgggccaccagccactttagtgacccctgcctacttccttcctgttggatatcatacttccatctggctgcctttgcttaagccatctttgtggtagaggggccctggaattgcagctgtactgaggatgatgttattcacagcccctggcccacccactaatactactgcacagagtcaggatctcacatttcaccccaggctcaactgaggatgtggcttattaaacacggaagtgca

SEQ ID NO: 1772 - protein, 141 aa, Homosapiens
MCFCLQVWVVRMDPRLMAPRISLRGKWQQTNLSKPTENKGRQQRVSKGITGSAGFYTGFCYSPDLRDNCRGFRVGSREYPVPTGLGLFCLLSLLPHPGTGQVKSLPVLLSGCLKERDCVLPLSGVITQEASGLGRPSVLLS

SEQ ID NO: 1773 - DNA, 1082 bp, Homosapiens
gagggccagtcatggcggagtcctggtctgggcaggccttgcaggctctgccggccacggtgctgggcgcgctgggcagcgagttcttgcgggagtgggaggcgcaggacatgcgcgtgaccctcttcaagctgctgctgctgtggttggtgttaagtctcctgggcatccagctggcgtgggggttctacgggaatacagtgaccgggttgtatcaccgtccaggtctgggtggtcagaatggatccacgcctgatggctccacgcatttcccttcgtggtgagtaaatctgtccataccgcaaccccatgcttggcattccaaggacactcctgtgctggtgacagagaggggagttctcaggctttaagcccaccagcttaatggcctttgcagcaagcttcaagtctgcacgtagagctcaggcttcaagttagggtgacaccaaggtctggacagtccatcatcatgctgttcagcagcctgtaggataggtggtggtattgtcataatttcagagagatgaaatgacaggtttgttggattccactctgcacaatcccctcagttgggaaggcagtaatctctgtcctgagcacattgacctcatcagggtcagcctcctcttctgcaaaacatgcgctcactaatcagggcattcattcagataatctctgggcccctatcacgtgataggggccacacgaggcccagagaacaaagacaacccgggccctgctcatggggagccagggatttattaggggagggcggcagtgcatggggcaagggtggtcagggaaggcttctcccaagaaagacacctaagccgagatcaaatgccacagggtgacaaagtgtaccaagcaaagggaatggattgagcaaggctaagagggaagaatacgggtgacatattagaataggtaagactgtgatgctggagcttgaacgtgagagcttgttggaccctgggagccattgaaagactaactcagcaaggctgtggtctgatctaatttgcctttataaatgcctacttcatggcaagtagataaaggggtccaagagttagggctag

SEQ ID NO: 1774 - protein, 90 aa, Homosapiens [sequence omitted]

SEQ ID NO: 1775 - DNA, 2076 bp, Homosapiens
tggtctgggcaggccttgcaggctctgccggccacggtgctgggcgcgctgggcagcgagttcttgcgggagtgggaggcgcaggacatgcgcgtgaccctcttcaagctgctgctgctgtggttggtgttaagtctcctgggcatccagctggcgtgggggttctacgggaatacagtgaccgggttgtatcaccgtccaggtgaggcttcctacgaacctccgtgggctggccgcccccgcccccaccctctcccgactgtaccattgggttccccactatcctgcaagaggctcatcagaacttaacattggttcacggccttactaccctgaacgcatctgacctcggaagctaagccaggtctgggtggtcagaatggatccacgcctgatggctccacgcatttcccttcgtgggaaatggcagcaaacgaacctctcaaaacccacagagaataagggaaggcagcagagggtctccaagggcatcactgggtctgctggcttctacactgggttctgctactccccagacctcagggacaactgccgggggttcagggttggtagcagggagtacccagtgcctacagggctgggcctcttctgcctcttaagcctgctccctcacccaggcactgggcaagtgaagagtttgcctgtactcttatctgggtgccttaaggagagagattgtgttcttcctctctcaggggtgataactcaggaagcctctgggttgggaagaccatcagttcttttgtcttaggtttcttttcctgtccctcttccatccccaagatgtgaccccataaaaatttttcctgagttggccaggcatggtggctcacgcctgtaatcccaacactttgggaggctgaggcaggcagatcacgaggtcaggagttcgagaccagcctgaccaacatggtgaaaaccccatctctactaaaaatacaaaaattagccgggtgtggtggcacacaccagtaatcccagctactcaggaggctgaagcaggagatttgcttgaacctgggaggcagaggttgcagtgagccaagattgcgccgttgtactccagcctgggcaacagagcaagacccatctcaaaaaaaaaatttttttcctgagaggaagcctgaggttgaccagctctggggtttgtaaggcaggtctgttttctcctaggccctgagttttctgaatctctggttttgctttgttggcaaggagccagggaatcctgacctgagccagaccttaagctctatggttatttagctggccattcaggtataaggcagggtggtgtacctgctggcactatccagatggaggcaccaaacacccacatacctggcccaaccagacttctcccgtgagccaggcaaaggaaattgtcatctgccaactgtcctactcatattcctctcagtccttcttgggggtaagctgattacctgaaggacagctgaacccctggggtagcctcctatccaccactgcttaagtgcctatgggaatgtgggtctgcaccttgtcccctcataggatggtaccaagcatttagtgcacagtggccccatcatagcctgcagcctcatcatttcccatctggacctggtacaaatgcacgtcacaggctcagctcctccccactagcattttctctaccttcaagaaccaggcagccctgccatgtcacaataggccaggggagtttccaaagatgtgggtggcaaatgcccctatagaaacaccagtacctgaaagcactgtagccctggacctgcctccttccctcggggccatacttctgtttccatctgctgggccaccagccactttagtgacccctgcctacttccttcctgttggatatcatacttccatctggctgcctttgcttaagccatctttgtggtagaggggccctggaattgcagctgtactgaggatgatgttattcacagcccctggcccacccactaatactactgcacagagtcaggatctcacatttcaccccaggctcaactgaggatgtggcttattaaacacggaagtgca

SEQ ID NO: 1776 - protein, 130 aa, Homosapiens; identical to SEQ ID NO: 1768

SEQ ID NO: 1777 - DNA, 988 bp, Homosapiens
catcagttcttttgtcttaggtttcttttcctgtccctcttccatccccaagatgtgaccccataaaaatttttcctgagttggccaggcatggtggctcacgcctgtaatcccaacactttgggaggctgaggcaggcagatcacgaggtcaggagttcgagaccagcctgaccaacatggtgaaaaccccatctctactaaaaatacaaaaattagccgggtgtggtggcacacaccagtaatcccagctactcaggaggctgaagcaggagatttgcttgaacctgggaggcagaggttgcagtgagccaagattgcgccgttgtactccagcctgggcaacagagcaagacccatctcaaaaaaaaaatttttttcctgagaggaagcctgaggttgaccagctctggggtttgtaaggcaggtctgttttctcctaggccctgagttttctgaatctctggttttgctttgttggcaaggagccagggaatcctgacctgagccagaccttaagctctatggttatttagctggccattcaggtataaggcagggtggtgtacctgctggcactatccagatggaggcaccaaacacccacatacctggcccaaccagacttctcccgtgagccaggcaaaggaaattgtcatctgccaactgtcctactcatattcctctcagtccttcttgggggtaagctgattacctgaaggacagctgaacccctggggtagcctcctatccaccacagccactttagtgacccctgcctacttccttcctgttggatatcatacttccatctggctgcctttgcttaagccatctttgtggtagaggggccctggaattgcagctgtactgaggatgatgttattcacagcccctggcccacccactaatactactgcacagagtcaggatctcacatttcaccccaggctcaactgaggatgtggcttattaaacacggaagtgca

SEQ ID NO: 1778 - protein, 44 aa, Homosapiens
LPEGQLNPWGSLLSTTATLVTPAYFLPVGYHTSIWLPLLKPSLW

SEQ ID NO: 1779 - DNA, 829 bp, Homosapiens
gtactccagcctgggcaacagagcaagacccatctcaaaaaaaaaatttttttcctgagaggaagcctgaggttgaccagctctggggtttgtaaggcaggtctgttttctcctaggccctgagttttctgaatctctggttttgctttgttggcaaggagccagggaatcctgacctgagccagaccttaagctctatggttatttagctggccattcaggtataaggcagggtggtgtacctgctggcactatccagatggaggcaccaaacacccacatacctggcccaaccagacttctcccgtgagccaggcaaaggaaattgtcatctgccaactgtcctactcatattcctctcagtccttcttgggggtaagctgattacctgaaggacagctgaacccctggggtagcctcctatccaccactgcttaagtgcctatgggaatgtgggtctgcaccttgtcccctcataggatggtaccaagcatttagtgcacagtggccccatcatagcctgcagcctcatcatttcccatctggacctgcctccttccctcggggccatacttctgtttccatctgctgggccaccagccactttagtgacccctgcctacttccttcctgttggatatcatacttccatctggctgcctttgcttaagccatctttgtggtagaggggccctggaattgcagctgtactgaggatgatgttattcacagcccctggcccacccactaatactactgcacagagtcaggatctcacatttcaccccaggctcaactgaggatgtggcttattaaacacggaagtgca

SEQ ID NO: 1780 - protein, 88 aa, Homosapiens
TPGVASYPPLLKCLWECGSAPCPLIGWYQAFSAQWPHHSLQPHHFPSGPASFPRGHTSVSICWATSHFSDPCLLPSCWISYFHLAAFA

SEQ ID NO: 1781 - DNA, 1647 bp, Homosapiens
ctccactgtcctactactgtccagctctgcagcgtccagcccatggtagctgctcagtaagtggccccagatgctcttgtgtttctgtcttttaggacaaggtcagggagcttcagaaccagggcagagatgtgggcctggaggtgttggataatgccctgctagctctgcaaggccccactgcagcccaggtactacaggccggcgtggcagatgacctgaggaaactgcccttcatgaccagtgctgtgatggaggtgtttggcgtgtctggctgccgcgtgacccgctgtggctacacaggagaggatggtgtggagatctcggtgccggtagcgggggcagttcacctggcaacagctattctgaaaaacccagaggtgaagctggcagggctggcagccagggacagcctgcgcctggaggcaggcctctgcctgtatgggaatgacattgatgaacacactacacctgtggagggcagcctcagttggacactggggaagcgccgccgagctgctatggacttccctggagccaaggtcattgttccccagctgaagggcagggtgcagcggaggcgtgtggggttgatgtgtgagggggcccccatgcgggcacacagtcccatcctgaacatggagggtaccaagattggtactgtgactagtggctgcccctccccctctctgaagaagaatgtggcgatgggttatgtgccctgcgagtacagtcgtccagggacaatgctgctggtagaggtgcggcggaagcagcagatggctgtagtcagcaagatgccctttgtgcccacaaactactataccctcaagtgaagctggctcagggtggggctgtcccttccaggagttttgcccctacaaggggttagtcaagaagctgaggcagaactcactgggggtgggcagttaaggtggaggctgattctaattgtctggttgaggggccacaccacctattccccccacctaactcatgccattccagcttccttcaggaccctgcttctgagtgacggaccagctcacacaatgtcttgtttcagtccatgatcccactgacctactcttgcctgctggagggtaatgagaagctttggttctgccatctctcccactctgccaggtgctggctgtggagcaaaggctcacctttgtggagaggataaaacctgcccaacctacctcaccatggtttttcacattgcaaagggtaataacatgggcagtgcggacttaggctaccccctccagtttgctttccgtaaatgcaaattgtccttactgcaagtcaggaatgattgctgactcacagtagggctgctatgcctgtgtgtaaacttggggatggctgagggaacatagactcactcttccacattcccaagttggtctagtgtgctgcccagtagcaaaccatggcagactcaccacctattctgagttccagggctgctgtagggcagggtgggcttcctcccagacttgccttaccctgggctgatctttgcccctggtatgcattaatggactccactgaatcctgaaaaaaaaattaaacttccttcttacttgccagtctctagcttcattgttctctgttcacagggttcctgaaatgccaacc

SEQ ID NO: 1782 - protein, 199 aa, Homosapiens
MTSAVMEVFGVSGCRVTRCGYTGEDGVEISVPVAGAVHLATAILKNPEVKLAGLAARDSLRLEAGLCLYGNDIDEHTTPVEGSLSWTLGKRRRAAMDFPGAKVIVPQLKGRVQRRRVGLMCEGAPMRAHSPILNMEGTKIGTVTSGCPSPSLKKNVAMGYVPCEYSRPGTMLLVEVRRKQQMAVVSKMPFVPTNYYTLK

SEQ ID NO: 1783 - DNA, 1884 bp, Homosapiens
tacatctcccggcgtgcctggcagtgtggtggcctctgtgcgccgtctgcactcgttgcaggcgacgatgcagagggctgtaagtgtggtggcccgtctgggctttcgcctgcaggcattccccccggccttgtgtcgtccacttagttgcgcacaggaggtgctccgcaggacaccgctctatgacttccacctggcccacggcgggaaaatggtggcgtttgcgggttggagtctgccagtgcagtaccgggacagtcacactgactcgcacctgcacacacgccagcactgctcgctctttgacgtgtctcatatgctgcagaccaagatacttggtagtgaccgggtgaagctgatggagagtctagtggttggagacattgcagagctaagaccaaaccaggggacactgtcgctgtttaccaacgaggctggaggcatcttagatgacttgattgaaactgcccttcatgaccagtgctgtgatggaggtgtttggcgtgtctggctgccgcgtgacccgctgtggctacacaggagaggatggtgtggagatctcggtgccggtagcgggggcagttcacctggcaacagctattctgaaaaacccagaggtgaagctggcagggctggcagccagggacagcctgcgcctggaggcaggcctctgcctgtatgggaatgacattgatgaacacactacacctgtggagggcagcctcagttggacactggggaagcgccgccgagctgctatggacttccctggagccaaggtcattgttccccagctgaagggcagggtgcagcggaggcgtgtggggttgatgtgtgagggggcccccatgcgggcacacagtcccatcctgaacatggagggtaccaagattggtactgtgactagtggctgcccctccccctctctgaagaagaatgtggcgatgggttatgtgccctgcgagtacagtcgtccagggacaatgctgctggtagaggtgcggcggaagcagcagatggctgtagtcagcaagatgccctttgtgcccacaaactactataccctcaagtgaagctggctcagggtggggctgtcccttccaggagttttgcccctacaaggggttagtcaagaagctgaggcagaactcactgggggtgggcagttaaggtggaggctgattctaattgtctggttgaggggccacaccacctattccccccacctaactcatgccattccagcttccttcaggaccctgcttctgagtgacggaccagctcacacaatgtcttgtttcagtccatgatcccactgacctactcttgcctgctggagggtaatgagaagctttggttctgccatctctcccactctgccaggtgctggctgtggagcaaaggctcacctttgtggagaggataaaacctgcccaacctacctcaccatggtttttcacattgcaaagggtaataacatgggcagtgcggacttaggctaccccctccagtttgctttccgtaaatgcaaattgtccttactgcaagtcaggaatgattgctgactcacagtagggctgctatgcctgtgtgtaaacttggggatggctgagggaacatagactcactcttccacattcccaagttggtctagtgtgctgcccagtagcaaaccatggcagactcaccacctattctgagttccagggctgctgtagggcagggtgggcttcctcccagacttgccttaccctgggctgatctttgcccctggtatgcattaatggactccactgaatcctgaaaaaaaaattaaacttccttcttacttgccagtctctagcttcattgttctctgttcacagggttcctgaaatgccaacc

SEQ ID NO: 1784 - protein, 206 aa, Homosapiens
MQRAVSVVARLGFRLQAFPPALCRPLSCAQEVLRRTPLYDFHLAHGGKMVAFAGWSLPVQYRDSHTDSHLHTRQHCSLFDVSHMLQTKILGSDRVKLMESLVVGDIAELRPNQGTLSLFTNEAGGILDDLIETALHDQCCDGGVWRVWLPRDPLWLHRRGWCGDLGAGSGGSSPGNSYSEKPRGEAGRAGSQGQPAPGGRPLPVWE

SEQ ID NO: 1785 - DNA, 2152 bp, Homosapiens
tgcccacgcccccttcagatcctttgctccggagagagacctgtccgagcagaggcctggactacatctcccggcgtgcctggcagtgtggtggcctctgtgcgccgtctgcactcgttgcaggcgacgatgcagagggctgtaagtgtggtggcccgtctgggctttcgcctgcaggcattccccccggccttgtgtcgtccacttagttgcgcacaggaggtgctccgcaggacaccgctctatgacttccacctggcccacggcgggaaaatggtggcgtttgcgggttggagtctgccagtgcagtaccgggacagtcacactgactcgcacctgcacacacgccagcactgctcgctctttgacgtgtctcatatgctgcagaccaagatacttggtagtgaccgggtgaagctgatggagagtctagtggttggagacattgcagagctaagaccaaaccaggggacactgtcgctgtttaccaacgaggctggaggcatcttagatgacttgattgtaaccaatacttctgagggccacctgtatgtggtgtccaacgctggctgctgggagaaagatttggccctcatgcaggacaaggtcagggagcttcagaaccagggcagagatgtgggcctggaggtgttggataatgccctgctagctctgcaaggccccactgcagcccaggtactacaggccggcgtggcagatgacctgaggaaactgcccttcatgaccagtgctgtgatggaggtgtttggcgtgtctggctgccgcgtgacccgctgtggctacacaggagaggatggtgtggagatctcggtgccggtagcgggggcagttcacctggcaacagctattctgaaaaacccagaggtgaagctggcagggctggcagccagggacagcctgcgcctggaggcaggcctctgcctgtatgggaatgacattgatgaacacactacacctgtggagggcagcctcagttggacactggggaagcgccgccgagctgctatggacttccctggagccaaggtcattgttccccagctgaagggcagggtgcagcggaggcgtgtggggttgatgtgtgagggggcccccatgcgggcacacagtcccatcctgaacatggagggtaccaagattggtactgtgactagtggctgcccctccccctctctgaagaagaatgtggcgatgggttatgtgccctgcgagtacagtcgtccagggacaatgctgctggtagaggtgcggcggaagcagcagatggctgtagtcagcaagatgccctttgtgcccacaaactactataccctcaagtgaagctggctcagggtggggctgtcccttccaggagttttgcccctacaaggggttagtcaagaagctgaggcagaactcactgggggtgggcagttaaggtggaggctgattctaattgtctggttgaggggccacaccacctattccccccacctaactcatgccattccagcttccttcaggaccctgcttctgagtgacggaccagctcacacaatgtcttgtttcagtccatgatcccactgacctactcttgcctgctggagggtaatgagaagctttggttctgccatctctcccactctgccaggtgctggctgtggagcaaaggctcacctttgtggagaggataaaacctgcccaacctacctcaccatggtttttcacattgcaaagggtaataacatgggcagtgcggacttaggctaccccctccagtttgctttccgtaaatgcaaattgtccttactgcaagtcaggaatgattgctgactcacagtagggctgctatgcctgtgtgtaaacttggggatggctgagggaacatagactcactcttccacattcccaagttggtctagtgtgctgcccagtagcaaaccatggcagactcaccacctattctgagttccagggctgctgtagggcagggtgggcttcctcccagacttgccttaccctgggctgatctttgcccctggtatgcattaatggactccactgaatcctgaaaaaaaaattaaacttccttcttacttgccagtctctagcttcattgttctctgttcacagggttcctgaaatgccaacc

SEQ ID NO: 1786 - protein, 403 aa, Homosapiens; identical to SEQ ID NO: 137

SEQ ID NO: 1787 - DNA, 1597 bp, Homosapiens
ctccactgtcctactactgtccagctctgcagcgtccagcccatggtagctgctcagtaagtggccccagatgctcttgtgtttctgtcttttaggacaaggtcagggagcttcagaaccagggcagagatgtgggcctggaggtgttggataatgccctgctagctctgcaaggccccactgcagcccaggtactacaggccggcgtggcagatgacctgaggaaactgcccttcatgaccagtgctgtgatggaggtgtttggcgtgtctggctgccgcgtgacccgctgtggctacacaggagaggatggtgtggagatctcggtgccggtagcgggggcagttcacctggcaacagctattctgaaaaacccagaggtgaagctggcagggctggcagccagggacagcctgcgcctggaggcaggcctctgcctgtatgggaatgacattgatgaacacactacacctgtggagggcagcctcagttggacactggggaagcgccgccgagctgctatggacttccctggagccaaggtcattgttccccagctgaagggcagggtgcagcggaggcgtgtggggttgatgtgtgagggggcccccatgcgggcacacagtcccatcctgaacatggagggtaccaagattggtactgtgactagtggctgcccctccccctctctgaagaagaatgtggcgatgggttatgtgccctgcgagtacagtcgtccagggacaatgctgctggtagaggtgcggcggaagcagcagatggctgtagtcagcaagatgccctttgtgcccacaaactactataccctcaagtgaagctggctcagggtggggctgtcccttccaggagttttgcccctacaaggggttagtcaagaagctgaggcagaactcactgggggtgggcagttaaggtggaggctgattctaattgtctggttgaggggccacaccacctattccccccacctaactcatgccattccagcttccttcaggaccctgcttctgagtgacggaccagctcacacaatgtcttgtttcagtccatgatcccactgacctactcttgcctgctggagggtaatgagaagctttggttctgccatctctcccactctgccaggtgctggctgtggagcaaaggctcacctttgtggagaggataaaacctgcccaacctacctcaccatggtttttcacattgcaaagggtaataacatgggcagtgcggacttaggctaccccctccagtttgctttccgtaaatgcaaattgtccttactgcaagtcaggaatgattgctgactcacagtagggctgctatgcctgtgtgtaaacttggggatggctgagggaacatagactcactcttccacattcccaagttggtctagtgtgctgcccagtagcaaaccatggcagactcaccacctattctgagttccagggctgctgtagggcagggtgggcttcctcccagacttgccttaccctgggctgatctttgcccctggtatgcattaatggactccactgaatcctgaaaaaaaaattaaacttccttcttacttgcc

SEQ ID NO: 1788 - protein, 199 aa, Homosapiens; identical to SEQ ID NO: 1782

SEQ ID NO: 1789 - DNA, 3273 bp, Homosapiens
ggatcacctgaggtcaggagttcgagaccagcctggccaacatggcaaaacctcgtttctactaaaaacacaaaaattagccgggcgtggtggcgcgtgcttgtagtcccagctactcgggaggctgaggttgcagcaagctgaggttgcaccactgcactctggcctgggcaacagagtgagactcagtctaaaaagaaaaataacaacaacaaagtgtggtctctaaaccagcatctttggagcttgttaggaatatagtctcaggcactgctgcagacctgctgaatcagaaccttcattttaacaagatccccaggtgattcatgtgaccccctcaacctcaggctttttgtccatccagtggggaggctaaggaagttttttgggggcattgctatggagtacttaggagagcctgcgatcatcaagatgacctttgaagcttttgtcctgtgggttgccacatgggctaagtcgtcccaggtttgggtaggtgaagcagcaggtcctaggtgtcatagattaagtgtcagatgggactctcagtacagagtggggaggggtgcagaggttgcaccagatcagggaagcaccccaaggtagggaggggatgaaaacttacttgatgcatgaggatcaaagaccttggacttgggcccagacttgtaccttgcacaccctgagtccttcacattagggttcataaccttttggtaactaagtgggtccagggttgtgtctggctcacccttggccttgccctcctggacctggaagccaaaacgctccactttggtcctaggggacactgtcgctgtttaccaacgaggctggaggcatcttagatgacttgattgtaaccaatacttctgagggccacctgtatgtggtgtccaacgctggctgctgggagaaagatttggccctcatgcaggtataccccctctgtgttctagacaccttgtcttccttgttcatagagcagtatccttgttgtccaagacagggttggcacagacaagggacctggaaaatggctctttcagtgaatgaacagctatgagactcaagagcaggccctctctggagcacgccagggtttggtggtgggggattaccaggcatggggagggggtcttggcccctctggtgtgaggtggcagaactgggcttgggtcatctctatcacttagtagctatgtgaccttgtaagatgggaaccagcctactacctttttttttcctccctcctcctcctcctctccactgtcctactactgtccagctctgcagcgtccagcccatggtagctgctcagtaagtggccccagatgctcttgtgtttctgtcttttaggacaaggtcagggagcttcagaaccagggcagagatgtgggcctggaggtgttggataatgccctgctagctctgcaaggtgagagggctgggctggggttggagccaacctttgccttcctggcttcattgactgcttagcacagaggccataccaagaagaatgtgtggaaggtgtgatatttgtgtgccataattttaagttttgtatcttgccctcctcctacctaccacaaggctccatgggctagggacaagggcatcttctcccacttgcagagtaagacatgctcagggcttgttctggtccctgaataaggctttagtccagctttgagggatgctgggacctggatacttggtcactggctccctgggcccaggccccactgcagcccaggtactacaggccggcgtggcagatgacctgaggaaactgcccttcatgaccagtgctgtgatggaggtgtttggcgtgtctggctgccgcgtgacccgctgtggctacacaggagaggatggtgtggaggtgtgtcaagaagtggtgtgggggcagtacagggcacaggatgcatgtgaggggttgggggtatgtggtacagggagcttcccatctgccctctggtgtttcatacagatctcggtgccggtagcgggggcagttcacctggcaacagctattctgaaaaacccagaggtgaagctggcagggctggcagccagggacagcctgcgcctggaggcaggcctctgcctgtatgggaatgacattgatgaacacactacacctgtggagggcagcctcagttggacactggggaagcgccgccgagctgctatggacttccctggagccaaggtcattgttccccagctgaagggcagggtgcagcggaggcgtgtggggttgatgtgtgagggggcccccatgcgggcacacagtcccatcctgaacatggagggtaccaagattggtactgtgactagtggctgcccctccccctctctgaagaagaatgtggcgatgggttatgtgccctgcgagtacagtcgtccagggacaatgctgctggtagaggtgcggcggaagcagcagatggctgtagtcagcaagatgccctttgtgcccacaaactactataccctcaagtgaagctggctcagggtggggctgtcccttccaggagttttgcccctacaaggggttagtcaagaagctgaggcagaactcactgggggtgggcagttaaggtggaggctgattctaattgtctggttgaggggccacaccacctattccccccacctaactcatgccattccagcttccttcaggaccctgcttctgagtgacggaccagctcacacaatgtcttgtttcagtccatgatcccactgacctactcttgcctgctggagggtaatgagaagctttggttctgccatctctcccactctgccaggtgctggctgtggagcaaaggctcacctttgtggagaggataaaacctgcccaacctacctcaccatggtttttcacattgcaaagggtaataacatgggcagtgcggacttaggctaccccctccagtttgctttccgtaaatgcaaattgtccttactgcaagtcaggaatgattgctgactcacagtagggctgctatgcctgtgtgtaaacttggggatggctgagggaacatagactcactcttccacattcccaagttggtctagtgtgctgcccagtagcaaaccatggcagactcaccacctattctgagttccagggctgctgtagggcagggtgggcttcctcccagacttgccttaccctgggctgatctttgcccctggtatgcattaatggactccactgaatcctgaaaaaaaaattaaacttccttcttacttgcc

SEQ ID NO: 1790 - protein, 270 aa, Homosapiens [sequence omitted]

SEQ ID NO: 1791 - DNA, 1834 bp, Homosapiens
tacatctcccggcgtgcctggcagtgtggtggcctctgtgcgccgtctgcactcgttgcaggcgacgatgcagagggctgtaagtgtggtggcccgtctgggctttcgcctgcaggcattccccccggccttgtgtcgtccacttagttgcgcacaggaggtgctccgcaggacaccgctctatgacttccacctggcccacggcgggaaaatggtggcgtttgcgggttggagtctgccagtgcagtaccgggacagtcacactgactcgcacctgcacacacgccagcactgctcgctctttgacgtgtctcatatgctgcagaccaagatacttggtagtgaccgggtgaagctgatggagagtctagtggttggagacattgcagagctaagaccaaaccaggggacactgtcgctgtttaccaacgaggctggaggcatcttagatgacttgattgaaactgcccttcatgaccagtgctgtgatggaggtgtttggcgtgtctggctgccgcgtgacccgctgtggctacacaggagaggatggtgtggagatctcggtgccggtagcgggggcagttcacctggcaacagctattctgaaaaacccagaggtgaagctggcagggctggcagccagggacagcctgcgcctggaggcaggcctctgcctgtatgggaatgacattgatgaacacactacacctgtggagggcagcctcagttggacactggggaagcgccgccgagctgctatggacttccctggagccaaggtcattgttccccagctgaagggcagggtgcagcggaggcgtgtggggttgatgtgtgagggggcccccatgcgggcacacagtcccatcctgaacatggagggtaccaagattggtactgtgactagtggctgcccctccccctctctgaagaagaatgtggcgatgggttatgtgccctgcgagtacagtcgtccagggacaatgctgctggtagaggtgcggcggaagcagcagatggctgtagtcagcaagatgccctttgtgcccacaaactactataccctcaagtgaagctggctcagggtggggctgtcccttccaggagttttgcccctacaaggggttagtcaagaagctgaggcagaactcactgggggtgggcagttaaggtggaggctgattctaattgtctggttgaggggccacaccacctattccccccacctaactcatgccattccagcttccttcaggaccctgcttctgagtgacggaccagctcacacaatgtcttgtttcagtccatgatcccactgacctactcttgcctgctggagggtaatgagaagctttggttctgccatctctcccactctgccaggtgctggctgtggagcaaaggctcacctttgtggagaggataaaacctgcccaacctacctcaccatggtttttcacattgcaaagggtaataacatgggcagtgcggacttaggctaccccctccagtttgctttccgtaaatgcaaattgtccttactgcaagtcaggaatgattgctgactcacagtagggctgctatgcctgtgtgtaaacttggggatggctgagggaacatagactcactcttccacattcccaagttggtctagtgtgctgcccagtagcaaaccatggcagactcaccacctattctgagttccagggctgctgtagggcagggtgggcttcctcccagacttgccttaccctgggctgatctttgcccctggtatgcattaatggactccactgaatcctgaaaaaaaaattaaacttccttcttacttgcc

SEQ ID NO: 1792 - protein, 206 aa, Homosapiens; identical to SEQ ID NO: 1784

SEQ ID NO: 1793 - DNA, 1793 bp, Homosapiens
tacatctcccggcgtgcctggcagtgtggtggcctctgtgcgccgtctgcactcgttgcaggcgacgatgcagagggctgtaagtgtggtggcccgtctgggctttcgcctgcaggcattccccccggccttgtgtcgtccacttagttgcgcacaggaggtgctccgcaggacaccgctctatgacttccacctggcccacggcgggaaaatggtggcgtttgcgggttggagtctgccagtgcagtaccgggacagtcacactgactcgcacctgcacacacgccagcactgctcgctctttgacgtgtctcatatgctgcagaccaagatacttggtagtgaccgggtgaagctgatggagagtctagtggttggagacattgcagagctaagaccaaaccaggggacactgtcgctgtttaccaacgaggctggaggcatcttagatgacttgattgtaaccaatacttctgagggccacctgtatgtggtgtccaacgctggctgctgggagaaagatttggccctcatgcaggacaaggtcagggagcttcagaaccagggcagagatgtgggcctggaggtgttggataatgccctgctagctctgcaaggccccactgcagcccaggtactacaggccggcgtggcagatgacctgaggaaactgcccttcatgaccagtgctgtgatggaggtgtttggcgtgtctggctgccgcgtgacccgctgtggctacacaggagaggatggtgtggagatctcggtgccggtagcgggggcagttcacctggcaacagctattctgaaaaacccagaggtgaagctggcagggctggcagccagggacagcctgcgcctggaggcaggcctctgcctgtatgggaatgacattgatgaacacactacacctgtggagggcagcctcagttggacactggggaagcgccgccgagctgctatggacttccctggagccaaggtcattgttccccagctgaagggcagggtgcagcggaggcgtgtggggttgatgtgtgagggggcccccatgcgggcacacagtcccatcctgaacatggagggtaccaagattggtactgtgactagtggctgcccctccccctctctgaagaagaatgtggcgatgggttatgtgccctgcgagtacagtcgtccagggacaatgctgctggtagagcttccttcaggaccctgcttctgagtgacggaccagctcacacaatgtcttgtttcagtccatgatcccactgacctactcttgcctgctggagggtaatgagaagctttggttctgccatctctcccactctgccaggtgctggctgtggagcaaaggctcacctttgtggagaggataaaacctgcccaacctacctcaccatggtttttcacattgcaaagggtaataacatgggcagtgcggacttaggctaccccctccagtttgctttccgtaaatgcaaattgtccttactgcaagtcaggaatgattgctgactcacagtagggctgctatgcctgtgtgtaaacttggggatggctgagggaacatagactcactcttccacattcccaagttggtctagtgtgctgcccagtagcaaaccatggcagactcaccacctattctgagttccagggctgctgtagggcagggtgggcttcctcccagacttgccttaccctgggctgatctttgcccctggtatgcattaatggactccactgaatcctgaaaaaaaaattaaacttccttcttacttgcc

SEQ ID NO: 1794 - protein, 386 aa, Homosapiens
MQRAVSVVARLGFRLQAFPPALCRPLSCAQEVLRRTPLYDFHLAHGGKMVAFAGWSLPVQYRDSHTDSHLHTRQHCSLFDVSHMLQTKILGSDRVKLMESLVVGDIAELRPNQGTLSLFTNEAGGILDDLIVTNTSEGHLYVVSNAGCWEKDLALMQDKVRELQNQGRDVGLEVLDNALLALQGPTAAQVLQAGVADDLRKLPFMTSAVMEVFGVSGCRVTRCGYTGEDGVEISVPVAGAVHLATAILKNPEVKLAGLAARDSLRLEAGLCLYGNDIDEHTTPVEGSLSWTLGKRRRAAMDFPGAKVIVPQLKGRVQRRRVGLMCEGAPMRAHSPILNMEGTKIGTVTSGCPSPSLKKNVAMGYVPCEYSRPGTMLLVELPSGPCF

SEQ ID NO: 1795 - DNA, 2102 bp, Homosapiens
tgcccacgcccccttcagatcctttgctccggagagagacctgtccgagcagaggcctggactacatctcccggcgtgcctggcagtgtggtggcctctgtgcgccgtctgcactcgttgcaggcgacgatgcagagggctgtaagtgtggtggcccgtctgggctttcgcctgcaggcattccccccggccttgtgtcgtccacttagttgcgcacaggaggtgctccgcaggacaccgctctatgacttccacctggcccacggcgggaaaatggtggcgtttgcgggttggagtctgccagtgcagtaccgggacagtcacactgactcgcacctgcacacacgccagcactgctcgctctttgacgtgtctcatatgctgcagaccaagatacttggtagtgaccgggtgaagctgatggagagtctagtggttggagacattgcagagctaagaccaaaccaggggacactgtcgctgtttaccaacgaggctggaggcatcttagatgacttgattgtaaccaatacttctgagggccacctgtatgtggtgtccaacgctggctgctgggagaaagatttggccctcatgcaggacaaggtcagggagcttcagaaccagggcagagatgtgggcctggaggtgttggataatgccctgctagctctgcaaggccccactgcagcccaggtactacaggccggcgtggcagatgacctgaggaaactgcccttcatgaccagtgctgtgatggaggtgtttggcgtgtctggctgccgcgtgacccgctgtggctacacaggagaggatggtgtggagatctcggtgccggtagcgggggcagttcacctggcaacagctattctgaaaaacccagaggtgaagctggcagggctggcagccagggacagcctgcgcctggaggcaggcctctgcctgtatgggaatgacattgatgaacacactacacctgtggagggcagcctcagttggacactggggaagcgccgccgagctgctatggacttccctggagccaaggtcattgttccccagctgaagggcagggtgcagcggaggcgtgtggggttgatgtgtgagggggcccccatgcgggcacacagtcccatcctgaacatggagggtaccaagattggtactgtgactagtggctgcccctccccctctctgaagaagaatgtggcgatgggttatgtgccctgcgagtacagtcgtccagggacaatgctgctggtagaggtgcggcggaagcagcagatggctgtagtcagcaagatgccctttgtgcccacaaactactataccctcaagtgaagctggctcagggtggggctgtcccttccaggagttttgcccctacaaggggttagtcaagaagctgaggcagaactcactgggggtgggcagttaaggtggaggctgattctaattgtctggttgaggggccacaccacctattccccccacctaactcatgccattccagcttccttcaggaccctgcttctgagtgacggaccagctcacacaatgtcttgtttcagtccatgatcccactgacctactcttgcctgctggagggtaatgagaagctttggttctgccatctctcccactctgccaggtgctggctgtggagcaaaggctcacctttgtggagaggataaaacctgcccaacctacctcaccatggtttttcacattgcaaagggtaataacatgggcagtgcggacttaggctaccccctccagtttgctttccgtaaatgcaaattgtccttactgcaagtcaggaatgattgctgactcacagtagggctgctatgcctgtgtgtaaacttggggatggctgagggaacatagactcactcttccacattcccaagttggtctagtgtgctgcccagtagcaaaccatggcagactcaccacctattctgagttccagggctgctgtagggcagggtgggcttcctcccagacttgccttaccctgggctgatctttgcccctggtatgcattaatggactccactgaatcctgaaaaaaaaattaaacttccttcttacttgcc

SEQ ID NO: 1796 - protein, 403 aa, Homosapiens; identical to SEQ ID NO: 137

SEQ ID NO: 1797 - DNA, 1715 bp, Homosapiens
agatgttggcctttctgtgcccacccagacttggtttgggccaccagaggctgaagtgtatttcctgtgcattccaagtgttgcctgcatgcctgttctgtctgggccacattcacagattcaggattctcaggggcttaccgtgttacttcagcatgagctcctggcatgggggtgctctgtcttcgcctggctgcaactcaattcttccttctacccaaaaacactccagtcagttgtacttactgagaatccctgagtgccctctgccccttctggcaacatgcacattcctgtcttctgcctgctccctcatgtcagtgcagttgggctgggctgacctactaaaacctgctccatgtatggacctggaaggccattgctgccatggcacttgggacacttgaggaagaaacagaaaccttatttcttcctgtgtgtcccctagtggttttctttccatttgtgttatgccacagagagaaatttcctgtctgaactcttctgctgcctgccttggccttccaaagtgctgggattacaggcatgagccaccgcgcccgccctgcccctttccaagagatatgctcagcataatgagagatcaaccgtggtggggagtgggtccaagtaagggttctcattgttgccttttaagaggcctaagtcctgcattaactcagtccaaccattaagtgatgcaggctgctcttccctcatgtgagaaaaacctgtttccctctggttcttcctggctttgcacctggtggctattacaaagcagtactgcagtatgtcttggacctggaaagttggacatgtgtgtggctcaacagttttctcgggggagttcagtgaccttttggtggccaccctctgttctcacctgtgagttcttgcaggtggcgacttcatctgcaaggtcacttacatagccccactcagctgcttcggaaagcgtgacgaagcagtagtcctcagtgtgtgtgtaagtgaagaggaccttgtggtagcagggaccatgcttcattcgtggctgtgtccccatctgagggcctggtatgcagtaagatcaataaatacttgtggaatgcatgactgctggctgcctgtgtctgcctggtgggagagctgtggaactaggggtccacatgaggacagactactgtggtgctgcctacctgccaggctggcccaccttccccacccccacttgaccttactctcttgaggtcctaaaggtatgattcagacctttcagccctttccagaactttgaccctctggagacagggcggttctgcagggggcggtctagcccctagctttgttctgggcagcccaatcagctctggattgcccgagctgccctgaagagtcagccgaaagagctggaggcttcttccctgtggttgcgggttcctgcattctctgctctaaatcccagcctgcccttggggctgcccacgcccccttcagatcctttgctccggagagagacctgtccgagcagaggcctggactacatctcccggcgtgcctggcagtgtggtggcctctgtgcgccgtctgcactcgttgcaggcgacgatgcagagggctgtaagtgtggtggcccgtctgggctttcgcctgcaggcattccccccggccttgtgtcgtccacttagttgcgcacaggtgggatagagggtgctgatcttggagggtggggg

SEQ ID NO: 1798 - protein, 74 aa, Homosapiens
MPQREISCLNSSAACLGLPKCWDYRHEPPRPPCPFPRDMLSIMRDQPWWGVGPSKGSHCCLLRGLSPALTQSNH

SEQ ID NO: 1799 - DNA, 1979 bp, Homosapiens
agatgttggcctttctgtgcccacccagacttggtttgggccaccagaggctgaagtgtatttcctgtgcattccaagtgttgcctgcatgcctgttctgtctgggccacattcacagattcaggattctcaggggcttaccgtgttacttcagcatgagctcctggcatgggggtgctctgtcttcgcctggctgcaactcaattcttccttctacccaaaaacactccagtcagttgtacttactgagaatccctgagtgccctctgccccttctggcaacatgcacattcctgtcttctgcctgctccctcatgtcagtgcagttgggctgggctgacctactaaaacctgctccatgtatggacctggaaggccattgctgccatggcacttgggacacttgaggaagaaacagaaaccttatttcttcctgtgtgtcccctagtggttttctttccatttgtgttatgccacagagagaaatttcctgtctgaactcttctgctgcctgcctaggaaggaaacctgaagatttgggcagcctgagtctcttggtttctgagctggctcctgaatatatgttcaagtgggtgtgcccatagggcctgggcacgtgtctctagcaaaaccagggcctgagcataagaactgggacccttctaggcagggtgcagtggctcacgcctgtaatcccagcactttgggaggcccaggcaggcggatcacctgaggtcaggagctggtctcaaacacctgacctcaggtgatctgcctgccttggccttccaaagtgctgggattacaggcatgagccaccgcgcccgccctgcccctttccaagagatatgctcagcataatgagagatcaaccgtggtggggagtgggtccaagtaagggttctcattgttgccttttaagaggcctaagtcctgcattaactcagtccaaccattaagtgatgcaggctgctcttccctcatgtgagaaaaacctgtttccctctggttcttcctggctttgcacctggtggctattacaaagcagtactgcagtatgtcttggacctggaaagttggacatgtgtgtggctcaacagttttctcgggggagttcagtgaccttttggtggccaccctctgttctcacctgtgagttcttgcaggtggcgacttcatctgcaaggtcacttacatagccccactcagctgcttcggaaagcgtgacgaagcagtagtcctcagtgtgtgtgtaagtgaagaggaccttgtggtagcagggaccatgcttcattcgtggctgtgtccccatctgagggcctggtatgcagtaagatcaataaatacttgtggaatgcatgactgctggctgcctgtgtctgcctggtgggagagctgtggaactaggggtccacatgaggacagactactgtggtgctgcctacctgccaggctggcccaccttccccacccccacttgaccttactctcttgaggtcctaaaggtatgattcagacctttcagccctttccagaactttgaccctctggagacagggcggttctgcagggggcggtctagcccctagctttgttctgggcagcccaatcagctctggattgcccgagctgccctgaagagtcagccgaaagagctggaggcttcttccctgtggttgcgggttcctgcattctctgctctaaatcccagcctgcccttggggctgcccacgcccccttcagatcctttgctccggagagagacctgtccgagcagaggcctggactacatctcccggcgtgcctggcagtgtggtggcctctgtgcgccgtctgcactcgttgcaggcgacgatgcagagggctgtaagtgtggtggcccgtctgggctttcgcctgcaggcattccccccggccttgtgtcgtccacttagttgcgcacaggtgggatagagggtgctgatcttggagggtggggg

SEQ ID NO: 1800 - protein, 134 aa, Homosapiens
MLAFLCPPRLGLGHQRLKCISCAFQVLPACLFCLGHIHRFRILRGLPCYFSMSSWHGGALSSPGCNSILPSTQKHSSQLYLLRIPECPLPLLATCTFLSSACSLMSVQLGWADLLKPAPCMDLEGHCCHGTWDT

SEQ ID NO: 1801 - DNA, 1316 bp, Homosapiens
agttgcaggaaatcacgtttaagaattactacacagcttttttgagcatccgtgtccgtcagtacacctcagcacacacacctgccaagtgggtgacctgcctgcgggactactgccttggccttccaaagtgctgggattacaggcatgagccaccgcgcccgccctgcccctttccaagagatatgctcagcataatgagagatcaaccgtggtggggagtgggtccaagtaagggttctcattgttgccttttaagaggcctaagtcctgcattaactcagtccaaccattaagtgatgcaggctgctcttccctcatgtgagaaaaacctgtttccctctggttcttcctggctttgcacctggtggctattacaaagcagtactgcagtatgtcttggacctggaaagttggacatgtgtgtggctcaacagttttctcgggggagttcagtgaccttttggtggccaccctctgttctcacctgtgagttcttgcaggtggcgacttcatctgcaaggtcacttacatagccccactcagctgcttcggaaagcgtgacgaagcagtagtcctcagtgtgtgtgtaagtgaagaggaccttgtggtagcagggaccatgcttcattcgtggctgtgtccccatctgagggcctggtatgcagtaagatcaataaatacttgtggaatgcatgactgctggctgcctgtgtctgcctggtgggagagctgtggaactaggggtccacatgaggacagactactgtggtgctgcctacctgccaggctggcccaccttccccacccccacttgaccttactctcttgaggtcctaaaggtatgattcagacctttcagccctttccagaactttgaccctctggagacagggcggttctgcagggggcggtctagcccctagctttgttctgggcagcccaatcagctctggattgcccgagctgccctgaagagtcagccgaaagagctggaggcttcttccctgtggttgcgggttcctgcattctctgctctaaatcccagcctgcccttggggctgcccacgcccccttcagatcctttgctccggagagagacctgtccgagcagaggcctggactacatctcccggcgtgcctggcagtgtggtggcctctgtgcgccgtctgcactcgttgcaggcgacgatgcagagggctgtaagtgtggtggcccgtctgggctttcgcctgcaggcattccccccggccttgtgtcgtccacttagttgcgcacaggtgggatagagggtgctgatcttggagggtggggg

SEQ ID NO: 1802 - protein, 78 aa, Homosapiens
MQAALPSCEKNLFPSGSSWLCTWWLLQSSTAVCLGPGKLDMCVAQQFSRGSSVTFWWPPSVLTCEFLQVATSSARSLT

SEQ ID NO: 1803 - DNA, 2999 bp, Homosapiens
cttgaggctcggctgaggatgccgggaagggctggtggtcgggggcctagagcggcggttgcacttagttgcggctgctgtcaccatgtcccgcgttttggtgccttgccatgtgaaaggctccgtagccctccaggtgggcgacgtgcggacctcccaaggccggcctggcgtgctggtcatcgatgtcaccttccccagcgtcgctcccttcgagttgcaggaaatcacgtttaagaattactacacagcttttttgagcatccgtgtccgtcagtacacctcagcacacacacctgccaagtgggtgacctgcctgcgggactactgcctaatgcctgacccacacagtgaggagggagcccaggagtatgtatcgctgttcaagcatcagatgctgtgtgacatggctagaatatcggagctacgcctgattctgcggcagccatcaccactgtggctgtctttcacagtggaggagctgcagatctatcagcagggaccaaagagcccctccgtgacctttcccaagtggctctcccacccagtgccctgtgagcaacctgcactcctccgtgagggtctcccagaccccagcagggtatcctccgaggtgcagcagatgtgggcactgacagagatgatccgggccagtcacacctccgcaaggatcggccgctttgatgtggatggctgttatgacctgaacttgctctcctacacttgaatggttgctcctagccaagatgttggcctttctgtgcccacccagacttggtttgggccaccagaggctgaagtgtatttcctgtgcattccaagtgttgcctgcatgcctgttctgtctgggccacattcacagattcaggattctcaggggcttaccgtgttacttcagcatgagctcctggcatgggggtgctctgtcttcgcctggctgcaactcaattcttccttctacccaaaaacactccagtcagttgtacttactgagaatccctgagtgccctctgccccttctggcaacatgcacattcctgtcttctgcctgctccctcatgtcagtgcagttgggctgggctgacctactaaaacctgctccatgtatggacctggaaggccattgctgccatggcacttgggacacttgaggaagaaacagaaaccttatttcttcctgtgtgtcccctagtggttttctttccatttgtgttatgccacagagagaaatttcctgtctgaactcttctgctgcctgcctaggaaggaaacctgaagatttgggcagcctgagtctcttggtttctgagctggctcctgaatatatgttcaagtgggtgtgcccatagggcctgggcacgtgtctctagcaaaaccagggcctgagcataagaactgggacccttctaggcagggtgcagtggctcacgcctgtaatcccagcactttgggaggcccaggcaggcggatcacctgaggtcaggagttcaagaccagcctgaccaacctggagaaaccccgtctctactaaaaatacaaaaaattagctgggcgtggtggtaggcacctgtaatcccagctacttgggaggctgaggctggagtgcaatagtgcaatcttggctaactgcaacctccgcctcccaggttcaagcaattctcctgcctcagtctcccgagtagctgggattacagtcatgcatcaccatgcctggctaattttgtatttgtagtagagatggggtttctccatgttggtcaggctggtctcaaacacctgacctcaggtgatctgcctgccttggccttccaaagtgctgggattacaggcatgagccaccgcgcccgccctgcccctttccaagagatatgctcagcataatgagagatcaaccgtggtggggagtgggtccaagtaagggttctcattgttgccttttaagaggcctaagtcctgcattaactcagtccaaccattaagtgatgcaggctgctcttccctcatgtgagaaaaacctgtttccctctggttcttcctggctttgcacctggtggctattacaaagcagtactgcagtatgtcttggacctggaaagttggacatgtgtgtggctcaacagttttctcgggggagttcagtgaccttttggtggccaccctctgttctcacctgtgagttcttgcaggtggcgacttcatctgcaaggtcacttacatagccccactcagctgcttcggaaagcgtgacgaagcagtagtcctcagtgtgtgtgtaagtgaagaggaccttgtggtagcagggaccatgcttcattcgtggctgtgtccccatctgagggcctggtatgcagtaagatcaataaatacttgtggaatgcatgactgctggctgcctgtgtctgcctggtgggagagctgtggaactaggggtccacatgaggacagactactgtggtgctgcctacctgccaggctggcccaccttccccacccccacttgaccttactctcttgaggtcctaaaggtatgattcagacctttcagccctttccagaactttgaccctctggagacagggcggttctgcagggggcggtctagcccctagctttgttctgggcagcccaatcagctctggattgcccgagctgccctgaagagtcagccgaaagagctggaggcttcttccctgtggttgcgggttcctgcattctctgctctaaatcccagcctgcccttggggctgcccacgcccccttcagatcctttgctccggagagagacctgtccgagcagaggcctggactacatctcccggcgtgcctggcagtgtggtggcctctgtgcgccgtctgcactcgttgcaggcgacgatgcagagggctgtaagtgtggtggcccgtctgggctttcgcctgcaggcattccccccggccttgtgtcgtccacttagttgcgcacaggtgggatagagggtgctgatcttggagggtggggg

SEQ ID NO: 1804 - protein, 213 aa, Homosapiens; identical to SEQ ID NO: 139

SEQ ID NO: 1805 - DNA, 1099 bp, Homosapiens
agatgttggcctttctgtgcccacccagacttggtttgggccaccagaggctgaagtgtatttcctgtgcattccaagtgttgcctgcatgcctgttctgtctgggccacattcacagattcaggattctcaggggcttaccgtgttacttcagcatgagctcctggcatgggggtgctctgtcttcgcctggctgcaactcaattcttccttctacccaaaaacactccagtcagttgtacttactgagaatccctgagtgccctctgccccttctggcaacatgcacattcctgtcttctgcctgctccctcatgtcagtgcagttgggctgggctgacctactaaaacctgctccatgtatggacctggaaggccattgctgccatggcacttgggacacttgaggaagaaacagaaaccttatttcttcctgtgtgtcccctagtggttttctttccatttgtgttatgccacagagagaaatttcctgtctgaactcttctgctgcctgccttggccttccaaagtgctgggattacaggcatgagccaccgcgcccgccctgcccctttccaagagatatgctcagcataatgagagatcaaccgtggtggggagtgggtccaagtaagggttctcattgttgccttttaagaggcctaagtcctgcattaactcagtccaaccattaagtgatgcaggctgctcttccctcatgtgagaaaaacctgtttccctctggttcttcctggctttgcacctggtggctattacaaagcagtactgcagtatgtcttggacctggaaagttggacatgtgtgtggctcaacagttttctcgggggagttcagtgaccttttggtggccaccctctgttctcacctgtgagttcttgcaggtggcgacttcatctgcaaggtcacttacatagccccactcagctgcttcggaaagcgtgacgaagcagtagtcctcagtgtgtgtgtaagtgaagaggaccttgtggtagcagggaccatgcttcattcgtggctgtgtccccatctgagggcctggtatgcagtaagatcaataaatacttgtggaatgcatgac

SEQ ID NO: 1806 - protein, 74 aa, Homosapiens; identical to SEQ ID NO: 1798

SEQ ID NO: 1807 - DNA, 700 bp, Homosapiens
agttgcaggaaatcacgtttaagaattactacacagcttttttgagcatccgtgtccgtcagtacacctcagcacacacacctgccaagtgggtgacctgcctgcgggactactgccttggccttccaaagtgctgggattacaggcatgagccaccgcgcccgccctgcccctttccaagagatatgctcagcataatgagagatcaaccgtggtggggagtgggtccaagtaagggttctcattgttgccttttaagaggcctaagtcctgcattaactcagtccaaccattaagtgatgcaggctgctcttccctcatgtgagaaaaacctgtttccctctggttcttcctggctttgcacctggtggctattacaaagcagtactgcagtatgtcttggacctggaaagttggacatgtgtgtggctcaacagttttctcgggggagttcagtgaccttttggtggccaccctctgttctcacctgtgagttcttgcaggtggcgacttcatctgcaaggtcacttacatagccccactcagctgcttcggaaagcgtgacgaagcagtagtcctcagtgtgtgtgtaagtgaagaggaccttgtggtagcagggaccatgcttcattcgtggctgtgtccccatctgagggcctggtatgcagtaagatcaataaatacttgtggaatgcatgac

SEQ ID NO: 1808 - protein, 78 aa, Homosapiens; identical to SEQ ID NO: 1802

SEQ ID NO: 1809 - DNA, 2417 bp, Homosapiens
gaggctcggctgaggatgccgggaagggctggtggtcgggggcctagagcggcggttgcacttagttgcggctgctgtcaccatgtcccgcgttttggtgccttgccatgtgaaaggctccgtagccctccaggtgggcgacgtgcggacctcccaaggccggcctggcgtgctggtcatcgatgtcaccttccccagcgtcgctcccttcgagttgcaggaaatcacgtttaagaattactacacagcttttttgagcatccgtgtccgtcagtacacctcagcacacacacctgccaagtgggtgacctgcctgcgggactactgcctaatgcctgacccacacagtgaggagggagcccaggagtatgtatcgctgttcaagcatcagatgctgtgtgacatggctagaatatcggagctacgcctgattctgcggcagccatcaccactgtggctgtctttcacagtggaggagctgcagatctatcagcagggaccaaagagcccctccgtgacctttcccaagtggctctcccacccagtgccctgtgagcaacctgcactcctccgtgaggtaagccctcaccctaggtaagaaccatgtgtgaatggctctagtgtccaacacaggccaggtagaccccttcctgtaaaattctggggctgggcccagggcccttgggtgttatcttcctcctgggtattctgtgggatttgaggcatctctgttgtggggctacatcaggccctaacctcatgtttcataagccatctgagaatgttgttggtctcagctggagggcccctagcccaggttggcctctctggagcctgaagggcactgctggggagagacccatggccactgacccctccttctggagcagggtctcccagaccccagcagggtatcctccgaggtgcagcagatgtgggcactgacagagatgatccgggccagtcacacctccgcaaggatcggccgctttgatgtggatggctgttatgacctgaacttgctctcctacacttgaatggttgctcctagccaagatgttggcctttctgtgcccacccagacttggtttgggccaccagaggctgaagtgtatttcctgtgcattccaagtgttgcctgcatgcctgttctgtctgggccacattcacagattcaggattctcaggggcttaccgtgttacttcagcatgagctcctggcatgggggtgctctgtcttcgcctggctgcaactcaattcttccttctacccaaaaacactccagtcagttgtacttactgagaatccctgagtgccctctgccccttctggcaacatgcacattcctgtcttctgcctgctccctcatgtcagtgcagttgggctgggctgacctactaaaacctgctccatgtatggacctggaaggccattgctgccatggcacttgggacacttgaggaagaaacagaaaccttatttcttcctgtgtgtcccctagtggttttctttccatttgtgttatgccacagagagaaatttcctgtctgaactcttctgctgcctgcctaggaaggaaacctgaagatttgggcagcctgagtctcttggtttctgagctggctcctgaatatatgttcaagtgggtgtgcccatagggcctgggcacgtgtctctagcaaaaccagggcctgagcataagaactgggacccttctaggcagggtgcagtggctcacgcctgtaatcccagcactttgggaggcccaggcaggcggatcacctgaggtcaggagctggtctcaaacacctgacctcaggtgatctgcctgccttggccttccaaagtgctgggattacaggcatgagccaccgcgcccgccctgcccctttccaagagatatgctcagcataatgagagatcaaccgtggtggggagtgggtccaagtaagggttctcattgttgccttttaagaggcctaagtcctgcattaactcagtccaaccattaagtgatgcaggctgctcttccctcatgtgagaaaaacctgtttccctctggttcttcctggctttgcacctggtggctattacaaagcagtactgcagtatgtcttggacctggaaagttggacatgtgtgtggctcaacagttttctcgggggagttcagtgaccttttggtggccaccctctgttctcacctgtgagttcttgcaggtggcgacttcatctgcaaggtcacttacatagccccactcagctgcttcggaaagcgtgacgaagcagtagtcctcagtgtgtgtgtaagtgaagaggaccttgtggtagcagggaccatgcttcattcgtggctgtgtccccatctgagggcctggtatgcagtaagatcaataaatacttgtggaatgcatgac

SEQ ID NO: 1810 - protein, 171 aa, Homosapiens
MSRVLVPCHVKGSVALQVGDVRTSQGRPGVLVIDVTFPSVAPFELQEITFKNYYTAFLSIRVRQYTSAHTPAKWVTCLRDYCLMPDPHSEEGAQEYVSLFKHQMLCDMARISELRLILRQPSPLWLSFTVEELQIYQQGPKSPSVTFPKWLSHPVPCEQPALLREVSPHPR

SEQ ID NO: 1811 - DNA, 1964 bp, Homosapiens
cttgaggctcggctgaggatgccgggaagggctggtggtcgggggcctagagcggcggttgcacttagttgcggctgctgtcaccatgtcccgcgttttggtgccttgccatgtgaaaggctccgtagccctccaggtgggcgacgtgcggacctcccaaggccggcctggcgtgctggtcatcgatgtcaccttccccagcgtcgctcccttcgagttgcaggaaatcacgtttaagaattactacacagcttttttgagcatccgtgtccgtcagtacacctcagcacacacacctgccaagtgggtgacctgcctgcgggactactgcctaatgcctgacccacacagtgaggagggagcccaggagtatgtatcgctgttcaagcatcagatgctgtgtgacatggctagaatatcggagctacgcctgattctgcggcagccatcaccactgtggctgtctttcacagtggaggagctgcagatctatcagcagggaccaaagagcccctccgtgacctttcccaagtggctctcccacccagtgccctgtgagcaacctgcactcctccgtgagggtctcccagaccccagcagggtatcctccgaggtgcagcagatgtgggcactgacagagatgatccgggccagtcacacctccgcaaggatcggccgctttgatgtggatggctgttatgacctgaacttgctctcctacacttgaatggttgctcctagccaagatgttggcctttctgtgcccacccagacttggtttgggccaccagaggctgaagtgtatttcctgtgcattccaagtgttgcctgcatgcctgttctgtctgggccacattcacagattcaggattctcaggggcttaccgtgttacttcagcatgagctcctggcatgggggtgctctgtcttcgcctggctgcaactcaattcttccttctacccaaaaacactccagtcagttgtacttactgagaatccctgagtgccctctgccccttctggcaacatgcacattcctgtcttctgcctgctccctcatgtcagtgcagttgggctgggctgacctactaaaacctgctccatgtatggacctggaaggccattgctgccatggcacttgggacacttgaggaagaaacagaaaccttatttcttcctgtgtgtcccctagtggttttctttccatttgtgttatgccacagagagaaatttcctgtctgaactcttctgctgcctgcctaggaaggaaacctgaagatttgggcagcctgagtctcttggtttctgagctggctcctgaatatatgttcaagtgggtgtgcccatagggcctgggcacgtgtctctagcaaaaccagggcctgagcataagaatgctgggattacaggcatgagccaccgcgcccgccctgcccctttccaagagatatgctcagcataatgagagatcaaccgtggtggggagtgggtccaagtaagggttctcattgttgccttttaagaggcctaagtcctgcattaactcagtccaaccattaagtgatgcaggctgctcttccctcatgtgagaaaaacctgtttccctctggttcttcctggctttgcacctggtggctattacaaagcagtactgcagtatgtcttggacctggaaagttggacatgtgtgtggctcaacagttttctcgggggagttcagtgaccttttggtggccaccctctgttctcacctgtgagttcttgcaggtggcgacttcatctgcaaggtcacttacatagccccactcagctgcttcggaaagcgtgacgaagcagtagtcctcagtgtgtgtgtaagtgaagaggaccttgtggtagcagggaccatgcttcattcgtggctgtgtccccatctgagggcctggtatgcagtaagatcaataaatacttgtggaatgcatgac

SEQ ID NO: 1812 - protein, 213 aa, Homosapiens; identical to SEQ ID NO: 139

SEQ ID NO: 1813 - DNA, 2383 bp, Homosapiens
cttgaggctcggctgaggatgccgggaagggctggtggtcgggggcctagagcggcggttgcacttagttgcggctgctgtcaccatgtcccgcgttttggtgccttgccatgtgaaaggctccgtagccctccaggtgggcgacgtgcggacctcccaaggccggcctggcgtgctggtcatcgatgtcaccttccccagcgtcgctcccttcgagttgcaggaaatcacgtttaagaattactacacagcttttttgagcatccgtgtccgtcagtacacctcagcacacacacctgccaagtgggtgacctgcctgcgggactactgcctaatgcctgacccacacagtgaggagggagcccaggagtatgtatcgctgttcaagcatcagatgctgtgtgacatggctagaatatcggagctacgcctgattctgcggcagccatcaccactgtggctgtctttcacagtggaggagctgcagatctatcagcagggaccaaagagcccctccgtgacctttcccaagtggctctcccacccagtgccctgtgagcaacctgcactcctccgtgagggtctcccagaccccagcagggtatcctccgaggtgcagcagatgtgggcactgacagagatgatccgggccagtcacacctccgcaaggatcggccgctttgatgtggatggctgttatgacctgaacttgctctcctacacttgaatggttgctcctagccaagatgttggcctttctgtgcccacccagacttggtttgggccaccagaggctgaagtgtatttcctgtgcattccaagtgttgcctgcatgcctgttctgtctgggccacattcacagattcaggattctcaggggcttaccgtgttacttcagcatgagctcctggcatgggggtgctctgtcttcgcctggctgcaactcaattcttccttctacccaaaaacactccagtcagttgtacttactgagaatccctgagtgccctctgccccttctggcaacatgcacattcctgtcttctgcctgctccctcatgtcagtgcagttgggctgggctgacctactaaaacctgctccatgtatggacctggaaggccattgctgccatggcacttgggacacttgaggaagaaacagaaaccttatttcttcctgtgtgtcccctagtggttttctttccatttgtgttatgccacagagagaaatttcctgtctgaactcttctgctgcctgcctaggaaggaaacctgaagatttgggcagcctgagtctcttggtttctgagctggctcctgaatatatgttcaagtgggtgtgcccatagggcctgggcacgtgtctctagcaaaaccagggcctgagcataagaactgggacccttctaggcagggtgcagtggctcacgcctgtaatcccagcactttgggaggcccaggcaggcggatcacctgaggtcaggagttcaagaccagcctgaccaacctggagaaaccccgtctctactaaaaatacaaaaaattagctgggcgtggtggtaggcacctgtaatcccagctacttgggaggctgaggctggagtgcaatagtgcaatcttggctaactgcaacctccgcctcccaggttcaagcaattctcctgcctcagtctcccgagtagctgggattacagtcatgcatcaccatgcctggctaattttgtatttgtagtagagatggggtttctccatgttggtcaggctggtctcaaacacctgacctcaggtgatctgcctgccttggccttccaaagtgctgggattacaggcatgagccaccgcgcccgccctgcccctttccaagagatatgctcagcataatgagagatcaaccgtggtggggagtgggtccaagtaagggttctcattgttgccttttaagaggcctaagtcctgcattaactcagtccaaccattaagtgatgcaggctgctcttccctcatgtgagaaaaacctgtttccctctggttcttcctggctttgcacctggtggctattacaaagcagtactgcagtatgtcttggacctggaaagttggacatgtgtgtggctcaacagttttctcgggggagttcagtgaccttttggtggccaccctctgttctcacctgtgagttcttgcaggtggcgacttcatctgcaaggtcacttacatagccccactcagctgcttcggaaagcgtgacgaagcagtagtcctcagtgtgtgtgtaagtgaagaggaccttgtggtagcagggaccatgcttcattcgtggctgtgtccccatctgagggcctggtatgcagtaagatcaataaatacttgtggaatgcatgac

SEQ ID NO: 1814 - protein, 213 aa, Homosapiens; identical to SEQ ID NO: 139

SEQ ID NO: 1815 - DNA, 1653 bp, Homosapiens
tcccgggatttgtagttcttgaggctcggctgaggatgccgggaagggctggtggtcgggggcctagagcggcggttgcacttagttgcggctgctgtcaccatgtcccgcgttttggtgccttgccatgtgaaaggctccgtagccctccaggtgggcgacgtgcggacctcccaaggccggcctggcgtgctggtcatcgatgtcaccttccccagcgtcgctcccttcgagttgcaggaaatcacgtttaagaattactacacagcttttttgagcatccgtgtccgtcagtacacctcagcacacacacctgccaagtgggtgacctgcctgcgggactactgcctaatgcctgacccacacagtgaggagggagcccaggagtatgtatcgctgttcaagcatcagatgctgtgtgacatggctagaatatcggagctacgcctgattctgcggcagccatcaccactgtggctgtctttcacagtggaggagctgcagatctatcagcagggaccaaagagcccctccgtgacctttcccaagtggctctcccacccagtgccctgtgagcaacctgcactcctccgtgagggtctcccagaccccagcagggtatcctccgaggtgcagcagatgtgggcactgacagagatgatccgggccagtcacacctccgcaaggatcggccgctttgatgtggatggctgttatgacctgaacttgctctcctacacttgaatggttgctcctagccaagatgttggcctttctgtgcccacccagacttggtttgggccaccagaggctgaagtgtatttcctgtgcattccaagtgttgcctgcatgcctgttctgtctgggccacattcacagattcaggattctcaggggcttaccgtgttacttcagcatgagctcctggcatgggggtgctctgtcttcgcctggctgcaactcaattcttccttctacccaaaaacactccagtcagttgtacttactgagaatccctgagtgccctctgccccttctggcaacatgcacattcctgtgatctgcctgccttggccttccaaagtgctgggattacaggcatgagccaccgcgcccgccctgcccctttccaagagatatgctcagcataatgagagatcaaccgtggtggggagtgggtccaagtaagggttctcattgttgccttttaagaggcctaagtcctgcattaactcagtccaaccattaagtgatgcaggctgctcttccctcatgtgagaaaaacctgtttccctctggttcttcctggctttgcacctggtggctattacaaagcagtactgcagtatgtcttggacctggaaagttggacatgtgtgtggctcaacagttttctcgggggagttcagtgaccttttggtggccaccctctgttctcacctgtgagttcttgcaggtggcgacttcatctgcaaggtcacttacatagccccactcagctgcttcggaaagcgtgacgaagcagtagtcctcagtgtgtgtgtaagtgaagaggaccttgtggtagcagggaccatgcttcattcgtggctgtgtccccatctgagggcctggtatgcagtaagatcaataaatacttgtggaatgcatgac

SEQ ID NO: 1816 - protein, 213 aa, Homosapiens; identical to SEQ ID NO: 139

SEQ ID NO: 1817 - DNA, 1868 bp, Homosapiens
gaggctcggctgaggatgccgggaagggctggtggtcgggggcctagagcggcggttgcacttagttgcggctgctgtcaccatgtcccgcgttttggtgccttgccatgtgaaaggctccgtagccctccaggtgggcgacgtgcggacctcccaaggccggcctggcgtgctggtcatcgatgtcaccttccccagcgtcgctcccttcgagttgcaggaaatcacgtttaagaattactacacagcttttttgagcatccgtgtccgtcagtacacctcagcacacacacctgccaagtgggtgacctgcctgcgggactactgcctaatgcctgacccacacagtgaggagggagcccaggagtatgtatcgctgttcaagcatcagatgctgtgtgacatggctagaatatcggagctacgcctgattctgcggcagccatcaccactgtggctgtctttcacagtggaggagctgcagatctatcagcagggaccaaagagcccctccgtgacctttcccaagtggctctcccacccagtgccctgtgagcaacctgcactcctccgtgagctggagggcccctagcccaggttggcctctctggagcctgaagggcactgctggggagagacccatggccactgacccctccttctggagcagggtctcccagaccccagcagggtatcctccgaggtgcagcagatgtgggcactgacagagatgatccgggccagtcacacctccgcaaggatcggccgctttgatgtaagtaatcgcttccttctgcttggcttgctttgccctgagcagatcagacctgatggtcttttgtatttcaggtggatggctgttatgacctgaacttgctctcctacacttgaatggttgctcctagccaagatgttggcctttctgtgcccacccagacttggtttgggccaccagaggctgaagtgtatttcctgtgcattccaagtgttgcctgcatgcctgttctgtctgggccacattcacagattcaggattctcaggggcttaccgtgttacttcagcatgagctcctggcatgggggtgctctgtcttcgcctggctgcaactcaattcttccttctacccaaaaacactccagtcagttgtacttactgagaatccctgagtgccctctgccccttctggcaacatgcacattcctgtcttctgcctgctccctcatgtcagtgcagttgggctgggctgacctactaaaacctgctccatgtatggacctggaaggccattgctgccatggcacttgggacacttgaggaagaaacagaaaccttatttcttcctgtgtgtcccctagtggttttctttccatttgtgttatgccacagagagaaatttcctgtctgaactcttctgctgcctgcctaggaaggaaacctgaagatttgggcagcctgagtctcttggtttctgagctggctcctgaatatatgttcaagtgggtgtgcccatagggcctgggcacgtgtctctagcaaaaccagggcctgagcataagaactgggacccttctaggcagggtgcagtggctcacgcctgtaatcccagcactttgggaggcccaggcaggcggatcacctgaggtcaggagttcaagaccagcctgaccaacctggagaaaccccgtctctactaaaaatacaaaaaattagctgggcgtggtggtaggcacctgtaatcccagctacttgggaggctgaggcaggagaatctcttgaacccgggaagtggaggttgcggacctgagatcatgccattgcactccagcctgggcaagaagagcgaaactccatcttaaacaaacaaaca

SEQ ID NO: 1818 - protein, 169 aa, Homosapiens
MSRVLVPCHVKGSVALQVGDVRTSQGRPGVLVIDVTFPSVAPFELQEITFKNYYTAFLSIRVRQYTSAHTPAKWVTCLRDYCLMPDPHSEEGAQEYVSLFKHQMLCDMARISELRLILRQPSPLWLSFTVEELQIYQQGPKSPSVTFPKWLSHPVPCEQPALLRELEGP

SEQ ID NO: 1819 - DNA, 1048 bp, Homosapiens
gaggatgccgggaagggctggtggtcgggggcctagagcggcggttgcacttagttgcggctgctgtcaccatgtcccgcgttttggtgccttgccatgtgaaaggctccgtagccctccaggtgggcgacgtgcggacctcccaaggccggcctggcgtgctggtcatcgatgtcaccttccccagcgtcgctcccttcgagttgcaggaaatcacgtttaagaattactacacagcttttttgagcatccgtgtccgtcagtacacctcagcacacacacctgccaagtgggtgacctgcctgcgggactactgcctaatgcctgacccacacagtgaggagggagcccaggagtatgtatcgctgttcaagcatcagagcccctccgtgacctttcccaagtggctctcccacccagtgccctgtgagcaacctgcactcctccgtgagggtctcccagaccccagcagggtatcctccgaggtgcagcagatgtgggcactgacagagatgatccgggccagtcacacctccgcaaggatcggccgctttgatgtggatggctgttatgacctgaacttgctctcctacacttgaatggttgctcctagccaagatgttggcctttctgtgcccacccagacttggtttgggccaccagaggctgaagtgtatttcctgtgcattccaagtgttgcctgcatgcctgttctgtctgggccacattcacagattcaggattctcaggggcttaccgtgttacttcagcatgagctcctggcatgggggtgctctgtcttcgcctggctgcaactcaattcttccttctacccaaaaacactccagtcagttgtacttactgagaatccctgagtgccctctgccccttctggcaacatgcacattcctgtcttctgcctgctccctcatgtcagtgcagttgggctgggctgacctactaaaacctgctccatgtatggacctggaaggccattgctgccatggcacttgggacacttgaggaagaaacagaaaccttatttctt

SEQ ID NO: 1820 - protein, 175 aa, Homosapiens
MSRVLVPCHVKGSVALQVGDVRTSQGRPGVLVIDVTFPSVAPFELQEITFKNYYTAFLSIRVRQYTSAHTPAKWVTCLRDYCLMPDPHSEEGAQEYVSLFKHQSPSVTFPKWLSHPVPCEQPALLREGLPDPSRVSSEVQQMWALTEMIRASHTSARIGRFDVDGCYDLNLLSYT

SEQ ID NO: 1821 - DNA, 1340 bp, Homosapiens
gaggctcggctgaggatgccgggaagggctggtggtcgggggcctagagcggcggttgcacttagttgcggctgctgtcaccatgtcccgcgttttggtgccttgccatgtgaaaggctccgtagccctccaggtgggcgacgtgcggacctcccaaggccggcctggcgtgctggtcatcgatgtcaccttccccagcgtcgctcccttcgagttgcaggaaatcacgtttaagaattactacacagcttttttgagcatccgtgtccgtcagtacacctcagcacacacacctgccaagtgggtgacctgcctgcgggactactgcctaatgcctgacccacacagtgaggagggagcccaggagtatgtatcgctgttcaagcatcagatgctgtgtgacatggctagaatatcggagctacgcctgattctgcggcagccatcaccactgtggctgtctttcacagtggaggagctgcagatctatcagcagggaccaaagagcccctccgtgacctttcccaagtggctctcccacccagtgccctgtgagcaacctgcactcctccgtgagctggagggcccctagcccaggttggcctctctggagcctgaagggcactgctggggagagacccatggccactgacccctccttctggagcagggtctcccagaccccagcagggtatcctccgaggtgcagcagatgtgggcactgacagagatgatccgggccagtcacacctccgcaaggatcggccgctttgatgtaagtaatcgcttccttctgcttggcttgctttgccctgagcagatcagacctgatggtcttttgtatttcaggtggatggctgttatgacctgaacttgctctcctacacttgaatggttgctcctagccaagatgttggcctttctgtgcccacccagacttggtttgggccaccagaggctgaagtgtatttcctgtgcattccaagtgttgcctgcatgcctgttctgtctgggccacattcacagattcaggattctcaggggcttaccgtgttacttcagcatgagctcctggcatgggggtgctctgtcttcgcctggctgcaactcaattcttccttctacccaaaaacactccagtcagttgtacttactgagaatccctgagtgccctctgccccttctggcaacatgcacattcctgtcttctgcctgctccctcatgtcagtgcagttgggctgggctgacctactaaaacctgctccatgtatggacctggaaggccattgctgccatggcacttgggacacttgaggaagaaacagaaaccttatttctt

SEQ ID NO: 1822 - protein, 169 aa, Homosapiens; identical to SEQ ID NO: 1818

SEQ ID NO: 1823 - DNA, 1176 bp, Homosapiens
cttgaggctcggctgaggatgccgggaagggctggtggtcgggggcctagagcggcggttgcacttagttgcggctgctgtcaccatgtcccgcgttttggtgccttgccatgtgaaaggctccgtagccctccaggtgggcgacgtgcggacctcccaaggccggcctggcgtgctggtcatcgatgtcaccttccccagcgtcgctcccttcgagttgcaggaaatcacgtttaagaattactacacagcttttttgagcatccgtgtccgtcagtacacctcagcacacacacctgccaagtgggtgacctgcctgcgggactactgcctaatgcctgacccacacagtgaggagggagcccaggagtatgtatcgctgttcaagcatcagatgctgtgtgacatggctagaatatcggagctacgcctgattctgcggcagccatcaccactgtggctgtctttcacagtggaggagctgcagatctatcagcagggaccaaagagcccctccgtgacctttcccaagtggctctcccacccagtgccctgtgagcaacctgcactcctccgtgagggtctcccagaccccagcagggtatcctccgaggtgcagcagatgtgggcactgacagagatgatccgggccagtcacacctccgcaaggatcggccgctttgatgtggatggctgttatgacctgaacttgctctcctacacttgaatggttgctcctagccaagatgttggcctttctgtgcccacccagacttggtttgggccaccagaggctgaagtgtatttcctgtgcattccaagtgttgcctgcatgcctgttctgtctgggccacattcacagattcaggattctcaggggcttaccgtgttacttcagcatgagctcctggcatgggggtgctctgtcttcgcctggctgcaactcaattcttccttctacccaaaaacactccagtcagttgtacttactgagaatccctgagtgccctctgccccttctggcaacatgcacattcctgtcttctgcctgctccctcatgtcagtgcagttgggctgggctgacctactaaaacctgctccatgtatggacctggaaggccattgctgccatggcacttgggacacttgaggaagaaacagaaaccttatttctt

SEQ ID NO: 1824 - protein, 213 aa, Homosapiens; identical to SEQ ID NO: 139

SEQ ID NO: 1825 - DNA, 518 bp, Homosapiens
agaagccggcggcgcgcggacagccagtcggcgccgcgcggagctggccgctggattggctgcaacactcgcgtgtcaggcggttgctaggctccggccgcgcgccccgcccttgcgctcagcgccctctcaccgcccggtacgtgctcgcgcgaaggctgcggcgcggcgctcgcgcctcttaggcttggcggtggcggcggcggcagcttcgcgccgaatccccggggagcggcggtggcggcgtcctggggccaggaggagcgaacacctgccgcggtcctcccgccggcgctggggccactgctctccaggaagataaggcttttaaagcagcctagcactagaaggtgaggcacacgactgtctatcccagatggctgcactggcctaggacagacggttcttcccccagtacgtcaagaccctggagggtgcaagctacagaacagctgggctcctgcattcctcccagaccctgtcttcagtaggacaacaggcaacaaacttaaatttgg

SEQ ID NO: 1826 - protein, 106 aa, Homosapiens
EAGGARTASRRRAELAAGLAATLACQAVARLRPRAPPLRSAPSHRPVRARAKAAARRSRLLGLAVAAAAASRRIPGERRWRRPGARRSEHLPRSSRRRWGHCSPGR

SEQ ID NO: 1827 - DNA, 4413 bp, Homosapiens
agaagccggcggcgcgcggacagccagtcggcgccgcgcggagctggccgctggattggctgcaacactcgcgtgtcaggcggttgctaggctccggccgcgcgccccgcccttgcgctcagcgccctctcaccgcccggtacgtgctcgcgcgaaggctgcggcgcggcgctcgcgcctcttaggcttggcggtggcggcggcggcagcttcgcgccgaatccccggggagcggcggtggcggcgtcctggggccaggaggagcgaacacctgccgcggtcctcccgccggcgctgggctctgtgtgctccgggatggagcaggtgtgcagagggtgagaacccagctctgggaccaagtcacttgcttccttacttagcaagactatcgacttgagcaaacttggacctgggatgaggatgtctgtgggcctctcgctgctgctgcccctctcggggaggacctttctcctcctgctctctgtggttatggctcagtcccactggcccagtgaaccctcagaggctgtcagggactgggaaaaccagcttgaggcatccatgcactcagtgctctcagacctccacgaggctgttcccacagtggttggcattcctgatggcacggctgtcgtcgggcgctcatttcgagtgaccattccaacagatttgattgcctccagtggagatatcatcaaggtatcagcggcagggaaggaggctttgccatcttggctgcactgggactcacagagccacaccctggagggcctcccccttgacactgataagggtgtgcattacatttcagtgagcgctacacggctgggggccaacgggagccacatcccccagacctccagtgtgttctccatcgaggtctaccctgaagaccacagtgagctgcagtcggtgaggacagcctccccagaccctggtgaggtggtatcatctgcctgtgctgcggatgaacctgtgactgttttgacggtgattttggatgccgacctcaccaagatgaccccaaagcaaaggattgacctcctgcacaggatgcggagcttctcagaagtagagcttcacaacatgaaattagtgccggtggtgaataacagactatttgacatgtcggccttcatggctggcccgggaaatgcaaaaaaggtggtggagaatggggcccttctctcctggaagctgggctgctccctgaaccagaacagtgtgcctgacattcatggtgtagaggcccctgccagggagggcgcaatgtctgctcagcttggctaccctgtggtgggttggcacatcgccaataagaagccccctcttcccaaacgcgtccggaggcagatccatgctacacccacacctgtcactgccattgggcccccaaccacggctatccaggagcccccatccaggatcgtgccaacccccacatctccagccattgctcctccaacagagaccatggctcctccagtcagggatcctgttcctgggaaacccacggtcaccatccggactcgaggcgccattattcaaaccccaaccctaggccccatccagcctactcgggtgtcagaagctggcaccacagttcctggccagattcgcccaacgatgaccattcctggctatgtggagcctactgcagttgctacccctcccacaaccaccaccaagaagccacgagtatccacaccaaaaccagcaacgccttcaactgactccaccaccaccacgactcgcaggccaaccaagaaaccacggacaccccggccagtgccccgggtcaccaccaaagtttccatcaccagattggaaactgcctcaccgcctactcgtattcgcaccaccaccagtggagtgccccgtggcggagaacccaaccagcgcccagagctcaagaaccatattgacagggtagatgcctgggttggcacctactttgaggtgaagatcccgtcagacactttctatgaccatgaggacaccaccactgacaagctgaagctgaccctgaaactgcgggagcagcagctggtgggcgagaagtcctgggtacagttcaacagcaacagccagctcatgtatggccttcccgacagcagccacgtgggcaaacacgagtatttcatgcatgccacagacaaggggggcctgtcggctgtggatgccttcgagatccacgtccacaggcgcccccaaggggatagggctcctgcaaggttcaaggccaagtttgtgggtgacccggcactggtgttgaatgacatccacaagaagattgccttggtaaagaaactggccttcgcctttggagaccgaaactgtagcaccatcaccctgcagaatatcacccggggctccatcgtggtggaatggaccaacaacacactgcccttggagccctgccccaaggagcagatcgctgggctgagccgccggatcgctgaggatgatggaaaacctcggcctgccttctccaacgccctagagcctgactttaaggccacaagcatcactgtgacgggctctggcagttgtcggcacctacagtttatccctgtggtaccacccaggagagtgccctcagaggcgccgcccacagaagtgcctgacagggaccctgagaagagcagtgaggatgatgtctacctgcacacagtcattccggccgtggtggtcgcagccatcctgctcattgctggcatcattgccatgatctgctaccgcaagaagcggaagggcaagcttacccttgaggaccaggccaccttcatcaagaagggggtgcctatcatctttgcagacgaactggacgactccaagcccccaccctcctccagcatgccactcattctgcaggaggagaaggctcccctaccccctcctgagtaccccaaccagagtgtgcccgagaccactcctctgaaccaggacaccatgggagagtacacgcccctgcgggatgaggatcccaatgcgcctccctaccagcccccaccgcccttcacagcacccatggagggcaagggctcccgtcccaagaacatgaccccataccggtcacctcctccctatgtcccaccttaacccgcaagcgcctgggtggaggcagggtagggcaggggcctggagacgacatggtgttgtctgtggagaccggtggcctgcagaccattgcccaccgggagccgacacctgacctagcacacactgacacaggggcctggacaagcccgccctctctggtcctcccaaaccccaaagcagctggagagactttggggacttttttatttttattttttgcctaacagcttttggtttgttcatagagaattcttcgcttcatttttgatggctggctctgaaagcaccatgtggagtggaggtggagggagcgaggaaccatgaatgaactcgcaggcagtgccgggcggccccctggctctctgcgttttgcctttaacactaactgtactgttttttctattcacgtgtgtctagctgcaggatgtaacatggaaaacagtaactaaagattaaattcaaaggactttcagaagttaaggttaagtttttacgtttaatctgctgtttacctaaacttgtatgtataatttttgggtgggtatggggaattgctttgctaaaaataagctcccagggtgtttcaaacttagagaagaccaagggacagtattttttatcaaaggaatactattttttcacactacgtcaacttggttgctctgataccccagagcctgattgggggcctcccggccctggctcacgccaagtccctggtgctgggtttgctctcccgctgttgccaggggctggaagctggaggggtctcttgggccatggacatccccacttccagcccatgtacactagtggcccacgaccaaggggtcttcatttccatgaaaaagggactccaagaggcagtggtggctgtggcccccaactttggtgctccagggtgggccagctgcttgtgggggcacctgggaggtcaaaggtctccaccacatcaacctattttgttttaccctttttctgtgcattgtttttttttttcctcctaaaaggaatatcacggttttttgaaacactcagtgggggacattttggtgaagatgcaatatttttatgtcatgtgatgctctttcctcacttgaccttggccgctttgtcctaacagtccacagtcctgccccgacccaccccatcccttttctctggcactccagtcccaggccttgggcctgaactactggaaaaggtctggcggctggggaggagtgccagcaatagttcataataaaaatctgttagctctcaaagctaattttttactaaagtttttatacagcctcaaattgttttatt

SEQ ID NO: 1828 - protein, 895 aa, Homosapiens
MRMSVGLSLLLPLSGRTFLLLLSVVMAQSHWPSEPSEAVRDWENQLEASMHSVLSDLHEAVPTVVGIPDGTAVVGRSFRVTIPTDLIASSGDIIKVSAAGKEALPSWLHWDSQSHTLEGLPLDTDKGVHYISVSATRLGANGSHIPQTSSVFSIEVYPEDHSELQSVRTASPDPGEVVSSACAADEPVTVLTVILDADLTKMTPKQRIDLLHRMRSFSEVELHNMKLVPVVNNRLFDMSAFMAGPGNAKKVVENGALLSWKLGCSLNQNSVPDIHGVEAPAREGAMSAQLGYPVVGWHIANKKPPLPKRVRRQIHATPTPVTAIGPPTTAIQEPPSRIVPTPTSPAIAPPTETMAPPVRDPVPGKPTVTIRTRGAIIQTPTLGPIQPTRVSEAGTTVPGQIRPTMTIPGYVEPTAVATPPTTTTKKPRVSTPKPATPSTDSTTTTTRRPTKKPRTPRPVPRVTTKVSITRLETASPPTRIRTTTSGVPRGGEPNQRPELKNHIDRVDAWVGTYFEVKIPSDTFYDHEDTTTDKLKLTLKLREQQLVGEKSWVQFNSNSQLMYGLPDSSHVGKHEYFMHATDKGGLSAVDAFEIHVHRRPQGDRAPARFKAKFVGDPALVLNDIHKKIALVKKLAFAFGDRNCSTITLQNITRGSIVVEWTNNTLPLEPCPKEQIAGLSRRIAEDDGKPRPAFSNALEPDFKATSITVTGSGSCRHLQFIPVVPPRRVPSEAPPTEVPDRDPEKSSEDDVYLHTVIPAVVVAAILLIAGIIAMICYRKKRKGKLTLEDQATFIKKGVPIIFADELDDSKPPPSSSMPLILQEEKAPLPPPEYPNQSVPETTPLNQDTMGEYTPLRDEDPNAPPYQPPPPFTAPMEGKGSRPKNMTPYRSPPPYVPP

SEQ ID NO: 1829 - DNA, 5521 bp, Homosapiens
agaagccggcggcgcgcggacagccagtcggcgccgcgcggagctggccgctggattggctgcaacactcgcgtgtcaggcggttgctaggctccggccgcgcgccccgcccttgcgctcagcgccctctcaccgcccggtacgtgctcgcgcgaaggctgcggcgcggcgctcgcgcctcttaggcttggcggtggcggcggcggcagcttcgcgccgaatccccggggagcggcggtggcggcgtcctggggccaggaggagcgaacacctgccgcggtcctcccgccggcgctgggctctgtgtgctccgggatggagcaggtgtgcagagggtgagaacccagctctgggaccaagtcacttgcttccttacttagcaagactatcgacttgagcaaacttggacctgggatgaggatgtctgtgggcctctcgctgctgctgcccctctcggggaggacctttctcctcctgctctctgtggttatggctcagtcccactggcccagtgaaccctcagaggctgtcagggactgggaaaaccagcttgaggcatccatgcactcagtgctctcagacctccacgaggctgttcccacagtggttggcattcctgatggcacggctgtcgtcgggcgctcatttcgagtgaccattccaacagatttgattgcctccagtggagatatcatcaaggtatcagcggcagggaaggaggctttgccatcttggctgcactgggactcacagagccacaccctggagggcctcccccttgacactgataagggtgtgcattacatttcagtgagcgctacacggctgggggccaacgggagccacatcccccagacctccagtgtgttctccatcgaggtctaccctgaagaccacagtgagctgcagtcggtgaggacagcctccccagaccctggtgaggtggtatcatctgcctgtgctgcggatgaacctgtgactgttttgacggtgattttggatgccgacctcaccaagatgaccccaaagcaaaggattgacctcctgcacaggatgcggagcttctcagaagtagagcttcacaacatgaaattagtgccggtggtgaataacagactatttgacatgtcggccttcatggctggcccgggaaatgcaaaaaaggtggtggagaatggggcccttctctcctggaagctgggctgctccctgaaccagaacagtgtgcctgacattcatggtgtagaggcccctgccagggagggcgcaatgtctgctcagcttggctaccctgtggtgggttggcacatcgccaataagaagccccctcttcccaaacgcgtccggaggcagatccatgctacacccacacctgtcactgccattgggcccccaaccacggctatccaggagcccccatccaggatcgtgccaacccccacatctccagccattgctcctccaacagagaccatggctcctccagtcagggatcctgttcctgggaaacccacggtcaccatccggactcgaggcgccattattcaaaccccaaccctaggccccatccagcctactcgggtgtcagaagctggcaccacagttcctggccagattcgcccaacgatgaccattcctggctatgtggagcctactgcagttgctacccctcccacaaccaccaccaagaagccacgagtatccacaccaaaaccagcaacgccttcaactgactccaccaccaccacgactcgcaggccaaccaagaaaccacggacaccccggccagtgccccgggtcaccaccaaagtttccatcaccagattggaaactgcctcaccgcctactcgtattcgcaccaccaccagtggagtgccccgtggcggagaacccaaccagcgcccagagctcaagaaccatattgacagggtagatgcctgggttggcacctactttgaggtgaagatcccgtcagacactttctatgaccatgaggacaccaccactgacaagctgaagctgaccctgaaactgcgggagcagcagctggtgggcgagaagtcctgggtacagttcaacagcaacagccagctcatgtatggccttcccgacagcagccacgtgggcaaacacgagtatttcatgcatgccacagacaaggggggcctgtcggctgtggatgccttcgagatccacgtccacaggcgcccccaaggggatagggctcctgcaaggttcaaggccaagtttgtgggtgacccggcactggtgttgaatgacatccacaagaagattgccttggtaaagaaactggccttcgcctttggagaccgaaactgtagcaccatcaccctgcagaatatcacccggggctccatcgtggtggaatggaccaacaacacactgcccttggagccctgccccaaggagcagatcgctgggctgagccgccggatcgctgaggatgatggaaaacctcggcctgccttctccaacgccctagagcctgactttaaggccacaagcatcactgtgacgggctctggcagttgtcggcacctacagtttatccctgtggtaccacccaggagagtgccctcagaggcgccgcccacagaagtgcctgacagggaccctgagaagagcagtgaggatgatgtctacctgcacacagtcattccggccgtggtggtcgcagccatcctgctcattgctggcatcattgccatgatctgctaccgcaagaagcggaagggcaagcttacccttgaggaccaggccaccttcatcaagaagggggtgcctatcatctttgcagacgaactggacgactccaagcccccaccctcctccagcatgccactcattctgcaggaggagaaggctcccctaccccctcctgagtaccccaaccagagtgtgcccgagaccactcctctgaaccaggacaccatgggagagtacacgcccctgcgggatgaggatcccaatgcgcctccctaccagcccccaccgcccttcacagcacccatggagggcaagggctcccgtcccaagaacatgaccccataccggtcacctcctccctatgtcccaccttaacccgcaagcgcctgggtggaggcagggtagggcaggggcctggagacgacatggtgttgtctgtggagaccggtggcctgcagaccattgcccaccgggagccgacacctgacctagcacacactgacacaggggcctggacaagcccgccctctctggtcctcccaaaccccaaagcagctggagagactttggggacttttttatttttattttttgcctaacagcttttggtttgttcatagagaattcttcgcttcatttttgatggctggctctgaaagcaccatgtggagtggaggtggagggagcgaggaaccatgaatgaactcgcaggcagtgccgggcggccccctggctctctgcgttttgcctttaacactaactgtactgttttttctattcacgtgtgtctagctgcaggatgtaacatggaaaacagtaactaaagattaaattcaaaggactttcagaagttaaggttaagtttttacgtttaatctgctgtttacctaaacttgtatgtataatttttgggtgggtatggggaattgctttgctaaaaataagctcccagggtgtttcaaacttagagaagaccaagggacagtattttttatcaaaggaatactattttttcacactacgtcaacttggttgctctgataccccagagcctgattgggggcctcccggccctggctcacgccaagtccctggtgctgggtttgctctcccgctgttgccaggggctggaagctggaggggtctcttgggccatggacatccccacttccagcccatgtacactagtggcccacgaccaaggggtcttcatttccatgaaaaagggactccaagaggcagtggtggctgtggcccccaactttggtgctccagggtgggccagctgcttgtgggggcacctgggaggtcaaaggtctccaccacatcaacctattttgttttaccctttttctgtgcattgtttttttttttcctcctaaaaggaatatcacggttttttgaaacactcagtgggggacattttggtgaagatgcaatatttttatgtcatgtgatgctctttcctcacttgaccttggccgctttgtcctaacagtccacagtcctgccccgacccaccccatcccttttctctggcactccagtcccaggccttgggcctgaactactggaaaaggtctggcggctggggaggagtgccagcaatagttcataataaaaatctgttagctctcaaagctaattttttactaaagtttttatacagcctcaaattgttttattaaaaaaaagatttaaaatggtgatgcttacagcagtttgtacgagctcttaagtgttgattccatggaactgacggctttgcttgttttgattcttttccccctacttttcctaatggtttaaattctggaattacactggggttcttttgccttttttagcagaacatccgtccgtccatctgcatctctgtcccatgactcaggggcgcccactctgcttcgattctcctcctgtggaagaaaccattttgagcatgacttttcttgatgtctgaagcgttattttgggtactttttagggaggaatgcctttcgcaataatgtatccattccctgattgagggtgggtgggtggacccaggctccctttgcacacagagcagctacttctaagccatatcgactgttttgcagaggatttgtgtgtgctgcctcaggaggggagggctggtaggagggggggagaggtctctgtcctactgctctccagagggcatttccccttgcgccttctcccacagggcccagcccctctcccctgccccagtccccagggggtactctggagtgagcagtgcccctgtgggggagcctgtaaatgcgggctcagtggaccactggtgactgggctcatgcctccaagtcagagtttccctggtgccccagagacaggagcacaagtgggatctgacctggtgagattatttctgatgacctcatcaaaaaataaacaattcccaatgttccaggtgagggctttgaaaggccttccaaacagctccgtcgcccctagcaactccaccattgggcactgccatgcagagacgtggctggcccagaatggcctgttgccatagcaactggaggcgatggggcagtgaacagaataacaacagcaacaatgcctttgcaggcagcctgctcccctgagcgctgggctggtgatggtcgttggactctgtgagatggagagccaatctcacattcaagtgttcaccaaccactgatgtgtttttatttccttctatatgattttaagatgtgttttctgcattctgtaaagaaacatatcaaactaaataaaagcagtgtctttattacaacgc

SEQ ID NO: 1830 - protein, 895 aa, Homosapiens; identical to SEQ ID NO: 1828

SEQ ID NO: 1831 - DNA, 4310 bp, Homosapiens
tatatttaatggatcagctacatttccagtgctaaggagttgcacgaaactgttggtttctgtataagagaccatgggggtaagaggcttgatccaactcggggtagatgtttttgacagtaactcctggaggatagtatgtgactgaaccactggaattgctcaagtctaaacctgcttttctttttttttcaggctctgtgtgctccgggatggagcaggtgtgcagagggtgagaacccagctctgggaccaagtcacttgcttccttacttagcaagactatcgacttgagcaaacttggacctgggatgaggatgtctgtgggcctctcgctgctgctgcccctctcggggaggacctttctcctcctgctctctgtggttatggctcagtcccactggcccagtgaaccctcagaggctgtcagggactgggaaaaccagcttgaggcatccatgcactcagtgctctcagacctccacgaggctgttcccacagtggttggcattcctgatggcacggctgtcgtcgggcgctcatttcgagtgaccattccaacagatttgattgcctccagtggagatatcatcaaggtatcagcggcagggaaggaggctttgccatcttggctgcactgggactcacagagccacaccctggagggcctcccccttgacactgataagggtgtgcattacatttcagtgagcgctacacggctgggggccaacgggagccacatcccccagacctccagtgtgttctccatcgaggtctaccctgaagaccacagtgagctgcagtcggtgaggacagcctccccagaccctggtgaggtggtatcatctgcctgtgctgcggatgaacctgtgactgttttgacggtgattttggatgccgacctcaccaagatgaccccaaagcaaaggattgacctcctgcacaggatgcggagcttctcagaagtagagcttcacaacatgaaattagtgccggtggtgaataacagactatttgacatgtcggccttcatggctggcccgggaaatgcaaaaaaggtggtggagaatggggcccttctctcctggaagctgggctgctccctgaaccagaacagtgtgcctgacattcatggtgtagaggcccctgccagggagggcgcaatgtctgctcagcttggctaccctgtggtgggttggcacatcgccaataagaagccccctcttcccaaacgcgtccggaggcagatccatgctacacccacacctgtcactgccattgggcccccaaccacggctatccaggagcccccatccaggatcgtgccaacccccacatctccagccattgctcctccaacagagaccatggctcctccagtcagggatcctgttcctgggaaacccacggtcaccatccggactcgaggcgccattattcaaaccccaaccctaggccccatccagcctactcgggtgtcagaagctggcaccacagttcctggccagattcgcccaacgatgaccattcctggctatgtggagcctactgcagttgctacccctcccacaaccaccaccaagaagccacgagtatccacaccaaaaccagcaacgccttcaactgactccaccaccaccacgactcgcaggccaaccaagaaaccacggacaccccggccagtgccccgggtcaccaccaaagtttccatcaccagattggaaactgcctcaccgcctactcgtattcgcaccaccaccagtggagtgccccgtggcggagaacccaaccagcgcccagagctcaagaaccatattgacagggtagatgcctgggttggcacctactttgaggtgaagatcccgtcagacactttctatgaccatgaggacaccaccactgacaagctgaagctgaccctgaaactgcgggagcagcagctggtgggcgagaagtcctgggtacagttcaacagcaacagccagctcatgtatggccttcccgacagcagccacgtgggcaaacacgagtatttcatgcatgccacagacaaggggggcctgtcggctgtggatgccttcgagatccacgtccacaggcgcccccaaggggatagggctcctgcaaggttcaaggccaagtttgtgggtgacccggcactggtgttgaatgacatccacaagaagattgccttggtaaagaaactggccttcgcctttggagaccgaaactgtagcaccatcaccctgcagaatatcacccggggctccatcgtggtggaatggaccaacaacacactgcccttggagccctgccccaaggagcagatcgctgggctgagccgccggatcgctgaggatgatggaaaacctcggcctgccttctccaacgccctagagcctgactttaaggccacaagcatcactgtgacgggctctggcagttgtcggcacctacagtttatccctgtggtaccacccaggagagtgccctcagaggcgccgcccacagaagtgcctgacagggaccctgagaagagcagtgaggatgatgtctacctgcacacagtcattccggccgtggtggtcgcagccatcctgctcattgctggcatcattgccatgatctgctaccgcaagaagcggaagggcaagcttacccttgaggaccaggccaccttcatcaagaagggggtgcctatcatctttgcagacgaactggacgactccaagcccccaccctcctccagcatgccactcattctgcaggaggagaaggctcccctaccccctcctgagtaccccaaccagagtgtgcccgagaccactcctctgaaccaggacaccatgggagagtacacgcccctgcgggatgaggatcccaatgcgcctccctaccagcccccaccgcccttcacagcacccatggagggcaagggctcccgtcccaagaacatgaccccataccggtcacctcctccctatgtcccaccttaacccgcaagcgcctgggtggaggcagggtagggcaggggcctggagacgacatggtgttgtctgtggagaccggtggcctgcagaccattgcccaccgggagccgacacctgacctagcacacactgacacaggggcctggacaagcccgccctctctggtcctcccaaaccccaaagcagctggagagactttggggacttttttatttttattttttgcctaacagcttttggtttgttcatagagaattcttcgcttcatttttgatggctggctctgaaagcaccatgtggagtggaggtggagggagcgaggaaccatgaatgaactcgcaggcagtgccgggcggccccctggctctctgcgttttgcctttaacactaactgtactgttttttctattcacgtgtgtctagctgcaggatgtaacatggaaaacagtaactaaagattaaattcaaaggactttcagaagttaaggttaagtttttacgtttaatctgctgtttacctaaacttgtatgtataatttttgggtgggtatggggaattgctttgctaaaaataagctcccagggtgtttcaaacttagagaagaccaagggacagtattttttatcaaaggaatactattttttcacactacgtcaacttggttgctctgataccccagagcctgattgggggcctcccggccctggctcacgccaagtccctggtgctgggtttgctctcccgctgttgccaggggctggaagctggaggggtctcttgggccatggacatccccacttccagcccatgtacactagtggcccacgaccaaggggtcttcatttccatgaaaaagggactccaagaggcagtggtggctgtggcccccaactttggtgctccagggtgggccagctgcttgtgggggcacctgggaggtcaaaggtctccaccacatcaacctattttgttttaccctttttctgtgcattgtttttttttttcctcctaaaaggaatatcacggttttttgaaacactcagtgggggacattttggtgaagatgcaatatttttatgtcatgtgatgctctttcctcacttgaccttggccgctttgtcctaacagtccacagtcctgccccgacccaccccatcccttttctctggcactccagtcccaggccttgggcctgaactactggaaaaggtctggcggctggggaggagtgccagcaatagttcataataaaaatctgttagctctcaaagctaattttttactaaagtttttatacagcctcaaattgttttatt

SEQ ID NO: 1832 - protein, 895 aa, Homosapiens; identical to SEQ ID NO: 1828

SEQ ID NO: 1833 - DNA, 5418 bp, Homosapiens
tatatttaatggatcagctacatttccagtgctaaggagttgcacgaaactgttggtttctgtataagagaccatgggggtaagaggcttgatccaactcggggtagatgtttttgacagtaactcctggaggatagtatgtgactgaaccactggaattgctcaagtctaaacctgcttttctttttttttcaggctctgtgtgctccgggatggagcaggtgtgcagagggtgagaacccagctctgggaccaagtcacttgcttccttacttagcaagactatcgacttgagcaaacttggacctgggatgaggatgtctgtgggcctctcgctgctgctgcccctctcggggaggacctttctcctcctgctctctgtggttatggctcagtcccactggcccagtgaaccctcagaggctgtcagggactgggaaaaccagcttgaggcatccatgcactcagtgctctcagacctccacgaggctgttcccacagtggttggcattcctgatggcacggctgtcgtcgggcgctcatttcgagtgaccattccaacagatttgattgcctccagtggagatatcatcaaggtatcagcggcagggaaggaggctttgccatcttggctgcactgggactcacagagccacaccctggagggcctcccccttgacactgataagggtgtgcattacatttcagtgagcgctacacggctgggggccaacgggagccacatcccccagacctccagtgtgttctccatcgaggtctaccctgaagaccacagtgagctgcagtcggtgaggacagcctccccagaccctggtgaggtggtatcatctgcctgtgctgcggatgaacctgtgactgttttgacggtgattttggatgccgacctcaccaagatgaccccaaagcaaaggattgacctcctgcacaggatgcggagcttctcagaagtagagcttcacaacatgaaattagtgccggtggtgaataacagactatttgacatgtcggccttcatggctggcccgggaaatgcaaaaaaggtggtggagaatggggcccttctctcctggaagctgggctgctccctgaaccagaacagtgtgcctgacattcatggtgtagaggcccctgccagggagggcgcaatgtctgctcagcttggctaccctgtggtgggttggcacatcgccaataagaagccccctcttcccaaacgcgtccggaggcagatccatgctacacccacacctgtcactgccattgggcccccaaccacggctatccaggagcccccatccaggatcgtgccaacccccacatctccagccattgctcctccaacagagaccatggctcctccagtcagggatcctgttcctgggaaacccacggtcaccatccggactcgaggcgccattattcaaaccccaaccctaggccccatccagcctactcgggtgtcagaagctggcaccacagttcctggccagattcgcccaacgatgaccattcctggctatgtggagcctactgcagttgctacccctcccacaaccaccaccaagaagccacgagtatccacaccaaaaccagcaacgccttcaactgactccaccaccaccacgactcgcaggccaaccaagaaaccacggacaccccggccagtgccccgggtcaccaccaaagtttccatcaccagattggaaactgcctcaccgcctactcgtattcgcaccaccaccagtggagtgccccgtggcggagaacccaaccagcgcccagagctcaagaaccatattgacagggtagatgcctgggttggcacctactttgaggtgaagatcccgtcagacactttctatgaccatgaggacaccaccactgacaagctgaagctgaccctgaaactgcgggagcagcagctggtgggcgagaagtcctgggtacagttcaacagcaacagccagctcatgtatggccttcccgacagcagccacgtgggcaaacacgagtatttcatgcatgccacagacaaggggggcctgtcggctgtggatgccttcgagatccacgtccacaggcgcccccaaggggatagggctcctgcaaggttcaaggccaagtttgtgggtgacccggcactggtgttgaatgacatccacaagaagattgccttggtaaagaaactggccttcgcctttggagaccgaaactgtagcaccatcaccctgcagaatatcacccggggctccatcgtggtggaatggaccaacaacacactgcccttggagccctgccccaaggagcagatcgctgggctgagccgccggatcgctgaggatgatggaaaacctcggcctgccttctccaacgccctagagcctgactttaaggccacaagcatcactgtgacgggctctggcagttgtcggcacctacagtttatccctgtggtaccacccaggagagtgccctcagaggcgccgcccacagaagtgcctgacagggaccctgagaagagcagtgaggatgatgtctacctgcacacagtcattccggccgtggtggtcgcagccatcctgctcattgctggcatcattgccatgatctgctaccgcaagaagcggaagggcaagcttacccttgaggaccaggccaccttcatcaagaagggggtgcctatcatctttgcagacgaactggacgactccaagcccccaccctcctccagcatgccactcattctgcaggaggagaaggctcccctaccccctcctgagtaccccaaccagagtgtgcccgagaccactcctctgaaccaggacaccatgggagagtacacgcccctgcgggatgaggatcccaatgcgcctccctaccagcccccaccgcccttcacagcacccatggagggcaagggctcccgtcccaagaacatgaccccataccggtcacctcctccctatgtcccaccttaacccgcaagcgcctgggtggaggcagggtagggcaggggcctggagacgacatggtgttgtctgtggagaccggtggcctgcagaccattgcccaccgggagccgacacctgacctagcacacactgacacaggggcctggacaagcccgccctctctggtcctcccaaaccccaaagcagctggagagactttggggacttttttatttttattttttgcctaacagcttttggtttgttcatagagaattcttcgcttcatttttgatggctggctctgaaagcaccatgtggagtggaggtggagggagcgaggaaccatgaatgaactcgcaggcagtgccgggcggccccctggctctctgcgttttgcctttaacactaactgtactgttttttctattcacgtgtgtctagctgcaggatgtaacatggaaaacagtaactaaagattaaattcaaaggactttcagaagttaaggttaagtttttacgtttaatctgctgtttacctaaacttgtatgtataatttttgggtgggtatggggaattgctttgctaaaaataagctcccagggtgtttcaaacttagagaagaccaagggacagtattttttatcaaaggaatactattttttcacactacgtcaacttggttgctctgataccccagagcctgattgggggcctcccggccctggctcacgccaagtccctggtgctgggtttgctctcccgctgttgccaggggctggaagctggaggggtctcttgggccatggacatccccacttccagcccatgtacactagtggcccacgaccaaggggtcttcatttccatgaaaaagggactccaagaggcagtggtggctgtggcccccaactttggtgctccagggtgggccagctgcttgtgggggcacctgggaggtcaaaggtctccaccacatcaacctattttgttttaccctttttctgtgcattgtttttttttttcctcctaaaaggaatatcacggttttttgaaacactcagtgggggacattttggtgaagatgcaatatttttatgtcatgtgatgctctttcctcacttgaccttggccgctttgtcctaacagtccacagtcctgccccgacccaccccatcccttttctctggcactccagtcccaggccttgggcctgaactactggaaaaggtctggcggctggggaggagtgccagcaatagttcataataaaaatctgttagctctcaaagctaattttttactaaagtttttatacagcctcaaattgttttattaaaaaaaagatttaaaatggtgatgcttacagcagtttgtacgagctcttaagtgttgattccatggaactgacggctttgcttgttttgattcttttccccctacttttcctaatggtttaaattctggaattacactggggttcttttgccttttttagcagaacatccgtccgtccatctgcatctctgtcccatgactcaggggcgcccactctgcttcgattctcctcctgtggaagaaaccattttgagcatgacttttcttgatgtctgaagcgttattttgggtactttttagggaggaatgcctttcgcaataatgtatccattccctgattgagggtgggtgggtggacccaggctccctttgcacacagagcagctacttctaagccatatcgactgttttgcagaggatttgtgtgtgctgcctcaggaggggagggctggtaggagggggggagaggtctctgtcctactgctctccagagggcatttccccttgcgccttctcccacagggcccagcccctctcccctgccccagtccccagggggtactctggagtgagcagtgcccctgtgggggagcctgtaaatgcgggctcagtggaccactggtgactgggctcatgcctccaagtcagagtttccctggtgccccagagacaggagcacaagtgggatctgacctggtgagattatttctgatgacctcatcaaaaaataaacaattcccaatgttccaggtgagggctttgaaaggccttccaaacagctccgtcgcccctagcaactccaccattgggcactgccatgcagagacgtggctggcccagaatggcctgttgccatagcaactggaggcgatggggcagtgaacagaataacaacagcaacaatgcctttgcaggcagcctgctcccctgagcgctgggctggtgatggtcgttggactctgtgagatggagagccaatctcacattcaagtgttcaccaaccactgatgtgtttttatttccttctatatgattttaagatgtgttttctgcattctgtaaagaaacatatcaaactaaataaaagcagtgtctttattacaacgc

SEQ ID NO: 1834 - protein, 895 aa, Homosapiens; identical to SEQ ID NO: 1828

SEQ ID NO: 1835 - DNA, 3380 bp, Homosapiens
gaaaggcattcctccctaaaaagtacccaaaataacgcttcagacatcaagaaaagtcatgctcaaaatggtttcttccacaggaggagaatcgaagcagagtgggcgcccctgagtcatgggacagagatgcagatggacggacggatgttctgctaaaaaaggcaaaagaaccccagtgtaattccagaatttaaaccattaggaaaagtagggggaaaagaatcaaaacaagcaaagccgtcagttccatggaatcaacacttaagagctcgtacaaactgctgtaagcatcaccattttaaatcttttttttaataaaacaatttgaggctgtataaaaactttagtaaaaaattagctttgagagctaacagatttttattatgaactattgctggcactcctccccagccgccagaccttttccagtagttcaggcccaaggcctgggactggagtgccagagaaaagggatggggtgggtcggggcaggactgtggactgttaggacaaagcggccaaggtcaagtgaggaaagagcatcacatgacataaaaatattgcatcttcaccaaaatgtcccccactgagtgtttcaaaaaaccgtgatattccttttaggaggaaaaaaaaaaacaatgcacagaaaaagggtaaaacaaaataggttgatgtggtggagacctttgacctcccaggtgcccccacaagcagctggcccaccctggagcaccaaattgacgtagtgtgaaaaaatagtattcctttgataaaaaatactgtcccttggtcttctctaagtttgaaacaccctgggagcttatttttagcaaagcaattccccatacccacccaaaaattatacatacaagtttaggtaaacagcagattaaacgtaaaaacttaaccttaacttctgaaagtcctttgaatttaatctttagttactgttttccatgttacatcctgcagctagacacacgtgaatagaaaaaacagtacagttagtgttaaaggcaaaacgcagagagccagggggccgcccggcactgcctgcgagttcattcatggttcctcgctccctccacctccactccacatggtgctttcagagccagccatcaaaaatgaagcgaagaattctctatgaacaaaccaaaagctgttaggcaaaaaataaaaataaaaaagtccccaaagtctctccagctgctttggggtttgggaggaccagagagggcgggcttgtccaggcccctgtgtcagtgtgtgctaggtcaggtgtcggctcccggtgggcaatggtctgcaggccaccggtctccacagacaacaccatgtcgtctccaggcccctgccctaccctgcctccacccaggcgcttgcgggttaaggtgggacatagggaggaggtgaccggtatggggtcatgttcttgggacgggagcccttgccctccatgggtgctgtgaagggcggtgggggctggtagggaggcgcattgggatcctcatcccgcaggggcgtgtactctcccatggtgtcctggttcagaggagtggtctcgggcacactctggttggggtactcaggagggggtaggggagccttctcctcctgcagaatgagtggcatgctggaggagggtgggggcttggagtcgtccagttcgtctgcaaagatgataggcacccccttcttgatgaaggtggcctggtcctcaagggtaagcttgcccttccgcttcttgcggtagcagatcatggcaatgatgccagcaatgagcaggatggctgcgaccaccacggccggaatgactgtgtgcaggtagacatcatcctcactgctcttctcagggtccctgtcaggcacttctgtgggcggcgcctctgagggcactctcctgggtggtaccacagggataaactgtaggtgccgacaactgccagagcccgtcacagtgatgcttgtggccttaaagtcaggctctagggcgttggagaaggcaggccgaggttttccatcatcctcagcgatccggcggctcagcccagcgatctgctccttggggcagggctccaagggcagtgtgttgttggtccattccaccacgatggagccccgggtgatattctgcagggtgatggtgctacagtttcggtctccaaaggcgaaggccagtttctttaccaaggcaatcttcttgtggatgtcattcaacaccagtgccgggtcacccacaaacttggccttgaaccttgcaggagccctatccccttgggggcgcctgtggacgtggatctcgaaggcatccacagccgacaggccccccttgtctgtggcatgcatgaaatactcgtgtttgcccacgtggctgctgtcgggaaggccatacatgagctggctgttgctgttgaactgtacccaggacttctcgcccaccagctgctgctcccgcagtttcagggtcagcttcagcttgtcagtggtggtgtcctcatggtcatagaaagtgtctgacgggatcttcacctcaaagtaggtgccaacccaggcatctaccctgtcaatatggttcttgagctctgggcgctggttgggttctccgccacggggcactccactggtggtggtgcgaatacgagtaggcggtgaggcagtttccaatctggtgatggaaactttggtggtgacccggggcactggccggggtgtccgtggtttcttggttggcctgcgagtcgtggtggtggtggagtcagttgaaggcgttgctggttttggtgtggatactcgtggcttcttggtggtggttgtgggaggggtagcaactgcagtaggctccacatagccaggaatggtcatcgttgggcgaatctggccaggaactgtggtgccagcttctgacacccgagtaggctggatggggcctagggttggggtttgaataatggcgcctcgagtccggatggtgaccgtgggtttcccaggaacaggatccctgactggaggagccatggtctctgttggaggagcaatggctggagatgtgggggttggcacgatcctggatgggggctcctggatagccgtggttgggggcccaatggcagtgacaggtgtgggtgtagcatggatctgcctccggacgcgtttgggaagagggggcttcttattggcgatgtgccaacccaccacagggtagccaagctgagcagacattgcgccctccctggcaggggcctctacaccatgaatgtcaggcacactgttctggttcagggagcagcccagcttccaggagagaagggccccattctccaccaccttttttgcatttcccgggccagccatgaaggccgacatgtcaaatagtc

SEQ ID NO: 1836 - protein, 35 aa, Homosapiens
MHRKRVKQNRLMWWRPLTSQVPPQAAGPPWSTKLT

SEQ ID NO: 1837 - DNA, 2075 bp, Homosapiens
tcagacactttctatgaccatgaggacaccaccactgacaagctgaagctgaccctgaaactgcgggagcagcagctggtgggcgagaagtcctgggtacagttcaacagcaacagccagctcatgtatggccttcccgacagcagccacgtgggcaaacacgagtatttcatgcatgccacagacaaggggggcctgtcggctgtggatgccttcgagatccacgtccacaggcgcccccaaggggatagggctcctgcaaggttcaaggccaagtttgtgggtgacccggcactggtgttgaatgacatccacaagaagattgccttggtaaagaaactggccttcgcctttggagaccgaaactgtagcaccatcaccctgcagaatatcacccggggctccatcgtggtggaatggaccaacaacacactgcccttggagccctgccccaaggagcagatcgctgggctgagccgccggatcgctgaggatgatggaaaacctcggcctgccttctccaacgccctagagcctgactttaaggccacaagcatcactgtgacgggctctggcagttgtcggcacctacagtttatccctgtggtaccacccaggagagtgccctcagaggcgccgcccacagaagtgcctgacagggaccctgagaagagcagtgaggatgatgtctacctgcacacagtcattccggccgtggtggtcgcagccatcctgctcattgctggcatcattgccatgatctgctaccgcaagaagcggaagggcaagcttacccttgaggaccaggccaccttcatcaagaagggggtgcctatcatctttgcagacgaactggacgactccaagcccccaccctcctccagcatgccactcattctgcaggaggagaaggctcccctaccccctcccaaaccccaaagcagctggagagactttggggacttttttatttttattttttgcctaacagcttttggtttgttcatagagaattcttcgcttcatttttgatggctggctctgaaagcaccatgtggagtggaggtggagggagcgaggaaccatgaatgaactcgcaggcagtgccgggcggccccctggctctctgcgttttgcctttaacactaactgtactgttttttctattcacgtgtgtctagctgcaggatgtaacatggaaaacagtaactaaagattaaattcaaaggactttcagaagttaaggttaagtttttacgtttaatctgctgtttacctaaacttgtatgtataatttttgggtgggtatggggaattgctttgctaaaaataagctcccagggtgtttcaaacttagagaagaccaagggacagtattttttatcaaaggaatactattttttcacactacgtcaacttggttgctctgataccccagagcctgattgggggcctcccggccctggctcacgccaagtccctggtgctgggtttgctctcccgctgttgccaggggctggaagctggaggggtctcttgggccatggacatccccacttccagcccatgtacactagtggcccacgaccaaggggtcttcatttccatgaaaaagggactccaagaggcagtggtggctgtggcccccaactttggtgctccagggtgggccagctgcttgtgggggcacctgggaggtcaaaggtctccaccacatcaacctattttgttttaccctttttctgtgcattgtttttttttttcctcctaaaaggaatatcacggttttttgaaacactcagtgggggacattttggtgaagatgcaatatttttatgtcatgtgatgctctttcctcacttgaccttggccgctttgtcctaacagtccacagtcctgccccgacccaccccatcccttttctctggcactccagtcccaggccttgggcctgaactactggaaaaggtctggcggctggggaggagtgccagcaatagttcataataaaaatctgttagctctcaaagctaattttttactaaagtttttatacagcctcaaattgttttatt

SEQ ID NO: 1838 - protein, 302 aa, Homosapiens
MYGLPDSSHVGKHEYFMHATDKGGLSAVDAFEIHVHRRPQGDRAPARFKAKFVGDPALVLNDIHKKIALVKKLAFAFGDRNCSTITLQNITRGSIVVEWTNNTLPLEPCPKEQIAGLSRRIAEDDGKPRPAFSNALEPDFKATSITVTGSGSCRHLQFIPVVPPRRVPSEAPPTEVPDRDPEKSSEDDVYLHTVIPAVVVAAILLIAGIIAMICYRKKRKGKLTLEDQATFIKKGVPIIFADELDDSKPPPSSSMPLILQEEKAPLPPPKPQSSWRDFGDFFIFIFCLTAFGLFIENSSLHF

SEQ ID NO: 1839 - DNA, 3183 bp, Homosapiens
tcagacactttctatgaccatgaggacaccaccactgacaagctgaagctgaccctgaaactgcgggagcagcagctggtgggcgagaagtcctgggtacagttcaacagcaacagccagctcatgtatggccttcccgacagcagccacgtgggcaaacacgagtatttcatgcatgccacagacaaggggggcctgtcggctgtggatgccttcgagatccacgtccacaggcgcccccaaggggatagggctcctgcaaggttcaaggccaagtttgtgggtgacccggcactggtgttgaatgacatccacaagaagattgccttggtaaagaaactggccttcgcctttggagaccgaaactgtagcaccatcaccctgcagaatatcacccggggctccatcgtggtggaatggaccaacaacacactgcccttggagccctgccccaaggagcagatcgctgggctgagccgccggatcgctgaggatgatggaaaacctcggcctgccttctccaacgccctagagcctgactttaaggccacaagcatcactgtgacgggctctggcagttgtcggcacctacagtttatccctgtggtaccacccaggagagtgccctcagaggcgccgcccacagaagtgcctgacagggaccctgagaagagcagtgaggatgatgtctacctgcacacagtcattccggccgtggtggtcgcagccatcctgctcattgctggcatcattgccatgatctgctaccgcaagaagcggaagggcaagcttacccttgaggaccaggccaccttcatcaagaagggggtgcctatcatctttgcagacgaactggacgactccaagcccccaccctcctccagcatgccactcattctgcaggaggagaaggctcccctaccccctcccaaaccccaaagcagctggagagactttggggacttttttatttttattttttgcctaacagcttttggtttgttcatagagaattcttcgcttcatttttgatggctggctctgaaagcaccatgtggagtggaggtggagggagcgaggaaccatgaatgaactcgcaggcagtgccgggcggccccctggctctctgcgttttgcctttaacactaactgtactgttttttctattcacgtgtgtctagctgcaggatgtaacatggaaaacagtaactaaagattaaattcaaaggactttcagaagttaaggttaagtttttacgtttaatctgctgtttacctaaacttgtatgtataatttttgggtgggtatggggaattgctttgctaaaaataagctcccagggtgtttcaaacttagagaagaccaagggacagtattttttatcaaaggaatactattttttcacactacgtcaacttggttgctctgataccccagagcctgattgggggcctcccggccctggctcacgccaagtccctggtgctgggtttgctctcccgctgttgccaggggctggaagctggaggggtctcttgggccatggacatccccacttccagcccatgtacactagtggcccacgaccaaggggtcttcatttccatgaaaaagggactccaagaggcagtggtggctgtggcccccaactttggtgctccagggtgggccagctgcttgtgggggcacctgggaggtcaaaggtctccaccacatcaacctattttgttttaccctttttctgtgcattgtttttttttttcctcctaaaaggaatatcacggttttttgaaacactcagtgggggacattttggtgaagatgcaatatttttatgtcatgtgatgctctttcctcacttgaccttggccgctttgtcctaacagtccacagtcctgccccgacccaccccatcccttttctctggcactccagtcccaggccttgggcctgaactactggaaaaggtctggcggctggggaggagtgccagcaatagttcataataaaaatctgttagctctcaaagctaattttttactaaagtttttatacagcctcaaattgttttattaaaaaaaagatttaaaatggtgatgcttacagcagtttgtacgagctcttaagtgttgattccatggaactgacggctttgcttgttttgattcttttccccctacttttcctaatggtttaaattctggaattacactggggttcttttgccttttttagcagaacatccgtccgtccatctgcatctctgtcccatgactcaggggcgcccactctgcttcgattctcctcctgtggaagaaaccattttgagcatgacttttcttgatgtctgaagcgttattttgggtactttttagggaggaatgcctttcgcaataatgtatccattccctgattgagggtgggtgggtggacccaggctccctttgcacacagagcagctacttctaagccatatcgactgttttgcagaggatttgtgtgtgctgcctcaggaggggagggctggtaggagggggggagaggtctctgtcctactgctctccagagggcatttccccttgcgccttctcccacagggcccagcccctctcccctgccccagtccccagggggtactctggagtgagcagtgcccctgtgggggagcctgtaaatgcgggctcagtggaccactggtgactgggctcatgcctccaagtcagagtttccctggtgccccagagacaggagcacaagtgggatctgacctggtgagattatttctgatgacctcatcaaaaaataaacaattcccaatgttccaggtgagggctttgaaaggccttccaaacagctccgtcgcccctagcaactccaccattgggcactgccatgcagagacgtggctggcccagaatggcctgttgccatagcaactggaggcgatggggcagtgaacagaataacaacagcaacaatgcctttgcaggcagcctgctcccctgagcgctgggctggtgatggtcgttggactctgtgagatggagagccaatctcacattcaagtgttcaccaaccactgatgtgtttttatttccttctatatgattttaagatgtgttttctgcattctgtaaagaaacatatcaaactaaataaaagcagtgtctttattacaacgc

SEQ ID NO: 1840 - protein, 302 aa, Homosapiens; identical to SEQ ID NO: 1838

SEQ ID NO: 1841 - DNA, 1018 bp, Homosapiens
agggaaactctgacttggaggcatgagcccagtcaccagtggtccactgagcccgcatttacaggctcccccacaggggcactgctcactccagagtaccccctggggactggggcaggggagaggggctgggccctgtgggagaaggcgcaaggggaaatgccctctggagagcagtaggacagagacctctccccccctcctaccagccctcccctcctgaggcagcacacacaaatcctctgcaaaacagtcgatatggcttagaagtagctgctctgtgtgcaaagggagcctgggtccacccacccaccctcaatcagggaatggatacattattgcgaaaggcattcctccctaaaaagtacccaaaataacgcttcagacatcaagaaaagtcatgctcaaaatggtttcttccacaggaggagaatcgaagcagagtgggcgcccctgagtcatgggacagagatgcagatggacggacggatgttctgctaaaaaaggcaaaagaaccccagtgtaattccagaatttaaaccattaggaaaagtagggggaaaagaatcaaaacaagcaaagccgtcagttccatggaatcaacacttaagagctcgtacaaactgctctagacacacgtgaatagaaaaaacagtacagttagtgttaaaggcaaaacgcagagagccagggggccgcccggcactgcctgcgagttcattcatggttcctcgctccctccacctccactccacatggtgctttcagagccagccatcaaaaatgaagcgaagaattctctatgaacaaaccaaaagctgttaggcaaaaaataaaaataaaaaagtccccaaagtctctccagctgctttggggtttgggaggaccagagagggcgggcttgtccaggcccctgtgtcagtgtgtgctaggtcaggtgtcggctcccggtgggcaatggtctgcaggccaccggtctccacagacaacaccatgtcgtctccaggcccctgcccta

SEQ ID NO: 1842 - protein, 71 aa, Homosapiens
MNKPKAVRQKIKIKKSPKSLQLLWGLGGPERAGLSRPLCQCVLGQVSAPGGQWSAGHRSPQTTPCRLQAPA

SEQ ID NO: 1843 - DNA, 912 bp, Homosapiens
atgttgcgaaatatatcacatagggtgttagcagttctaactgaacctagaataatccagggatcccagtgaatgctgatagccagcctgctggacagaccggtggctgtgtcagttcttgtgaggaggggccaggaccctccctgggccttcccctgtgcactccgagctgctcctcccgacctctgggatggagcaagtaagagaaagaggaaatgcagagcccccacttcctgatattttctcctgacttcatacctcccgttttcacgctaaactgcctggcccctctgggatgacctaggatgaagagagcctctcttcctgcagatgatggtccttgctgtgtttcctcctgtgctgcaggatgtttgatacagcttcgtgagtggtgactacatgtgcacatttaggctccaaaagagtctgcacctcagccccgataggacccttggcaactgacttaggctcactgagcctccatttcctattctgcaaagttagaatcttagtagctcctcgaatatgggggattgtaagggtagagtggctgatgtagatattttattttttattcattttattttttttatttttattttttggagacagactctcgctctatcacaccactgcactgtaccctgggcgtcagagcaagactccatctcaaaaaaaaaagaaaaaaacatcctgcatcccttgttcctttgtgttcccctagacaagcctctgggctggctttgcctatctcatgcatgcaggcagtcatcctcctttggccagtgcatacctgactcctactcagtgccaggcctggagaagactgtgagacctgcccttgaggagttctgtttgcaggaagagagtgataggcacacaaattatttccaataaactacagaaaatgtc

SEQ ID NO: 1844 - protein, 123 aa, Homosapiens
MGDCKGRVADVDILFFIHFIFFIFIFWRQTLALSHHCTVPWASEQDSISKKKEKNILHPLFLCVPLDKPLGWLCLSHACRQSSSFGQCIPDSYSVPGLEKTVRPALEEFCLQEESDRHTNYFQ

SEQ ID NO: 1845 - DNA, 2603 bp, Homosapiens
atgcgctgtccagggccgacgcggttgtatcatgctgagaaggagccgggcgggggccggcggggctgcgagggccctgtgaggaggggcacctgccactagaagcggcctctgggacgtcgcgctgagccctgctttggagtcagaggggctttccgcctcggtgaactcgagagtagcaactctcctccgggtaaccggagtgccacagcgggcaggcgtcataaggacaggcctcggagaggagaggggctacccgagaatggcctcaaaagtatgcataggagttgggaaggcagaggaacaagtgtattcagagacgcaagccggtttctgcccgctactcaggattgtctgccgtggtggcttctcacacaagcctgtactttcctgtgggagaatatttcctaggagcctatattccagttcatctctgacgtcataaatcatgactgtgtagaaaggccataacatgtgacacatggcagccattttggagatggccagatgagaggacaatcaatccacatgcctaaatggaaccaacagacatgtgccagcttgcttctccagcctatgttctcagacacttgtagaagaccagagggaaaatggaatcagaaaaaacagcaacaacaacaaaaagccatccagggccatgcacagtggctcactcctgtaatcccaacagtttgggaggccaaggcaggtggattgcttgagctcagcagtttaagaccagcctgggcaacatggcgaaaccctttctctactaaatacaaaaactagctgggtgtggtggcatgcacctgtagtcccagctactcgggaggctgaggtgggaggatcacctgagcctgggaggttgaagctgcagtgagctgtgatggtgccactgcactcccacctgggtgacagagcaagaccctgtctcaaaaaaacaaaactaaacaaaaaaatccatgtgggaaaaggcccaatcagagccaactcactgctgggattagtagaaatgattagtcaccagaaggcaaatcgtggaagaatgaagagatgacaggacctcaggaactacacccagaggtgtagttgtgccgtaggcaaagcatcatgccggtcatccccaagaaagggagaaggggtagagctcagactcttccctgcttccccataagtccagtttaccctgggctgatcctttcagcatggcagcctccgtggggaggcacgagatccaaagatgaagatgtctatgggggtgaagaagaatggcaaactttgcaggcaagagtaggcattagagagatcagaggaggaagacaatagagaaggatgacacaggacaggctgtatctagaggatataatgccatggactttggactattccagagaggctgagagacctgtctcctgcctacaaggctccttgaactctgcacccttctttttgctaaagtgctgctgaggcctgtctcacttcccaatgaaaagcaactcaggaaattggcttcctgccccactccttctttgggagagagaaacagaactgaagaggaaggaaggaagcccaaagaaacagaggctttctttcctggctgagatttgttggcactgcccactaacatagagaataaggtggttccctaagcgagccttaagctggcatgaggctacaaacaagtgattgtatcttcgttctgctcagcagcctacctgggctggcctggacaacctcaattgtatactgaggtcttaagctggccatggcccttggtaaagcaggagaaaggaataaggctggaaggtacagaatttgcttgatgccttgcctacataattcctttgctgttgcaactggcaactctttgcttgcattatatgaaaaaaaggcggtaaaaaattgtcagaaatgtttgccaccagcctaaccccactgcccatgcattgctcccaagaaagctaattaaggcccattgctattagagttacatgattctgaaggcttgttatgacaagaaaaaataatgaagacatggttcctccaagtcataagcatccaagtcaaaacatactgcatcccaggcgagtgtggtggctcacgcctgtaatcccagcacttcgggaggccaaggcagccggatcacgaggtcaggagttcgagaccagccttgccaagatgatgaaaccccgtctctactaaaaatacaaaaattagccaggcatggtggcgggcgcctgtactcccagctactcaggaagctgaggcaggagaatcgcttgaaaccgggaggcggaggttgcaatgagccgagatcacaccactgcactgtaccctgggcgtcagagcaagactccatctcaaaaaaaaaagaaaaaaacatcctgcatcccttgttcctttgtgttcccctagacaagcctctgggctggctttgcctatctcatgcatgcaggcagtcatcctcctttggccagtgcatacctgactcctactcagtgccaggcctggagaagactgtgagacctgcccttgaggagttctgtttgcaggaagagagtgataggcacacaaattatttccaataaactacagaaaatgtc

SEQ ID NO: 1846 - protein, 60 aa, Homosapiens
MASKVCIGVGKAEEQVYSETQAGFCPLLRIVCRGGFSHKPVLSCGRIFPRSLYSSSSLTS

SEQ ID NO: 1847 - DNA, 2204 bp, Homosapiens
atcatgctgagaaggagccgggcgggggccggcggggctgcgagggccctgtgaggaggggcacctgccactagaagcggcctctgggtaaccggagtgccacagcgggcaggcgtcataaggacaggcctcggagaggagaggggctacccgagaatggcctcaaaaccggtttctgcccgctactcaggattgtctgccgtggtggcttctcacacaagcctgtactttcctgtgggagaatatttcctaggagcctatattccagttcatctctgacgtcataaatcatgactgtgtagaaaggccataacatgtgacacatggcagccattttggagatggccagatgagaggacaatcaatccacatgcctaaatggaaccaacagacatgtgccagcttgcttctccagcctatgttctcagacacttgtagaagaccagagggaaaatggaatcagaaaaaacagcaacaacaacaaaaagccatccagggccatgcacagtggctcactcctgtaatcccaacagtttgggaggccaaggcaggtggattgcttgagctcagcagtttaagaccagcctgggcaacatggcgaaaccctttctctactaaatacaaaaactagctgggtgtggtggcatgcacctgtagtcccagctactcgggaggctgaggtgggaggatcacctgagcctgggaggttgaagctgcagtgagctgtgatggtgccactgcactcccacctgggtgacagagcaagaccctgtctcaaaaaaacaaaactaaacaaaaaaatccatgtgggaaaaggcccaatcagagccaactcactgctgggattagtagaaatgattagtcaccagaaggcaaatcgtggaagaatgaagagatgacaggacctcaggaactacacccagaggtgtagttgtgccgtaggcaaagcatcatgccggtcatccccaagaaagggagaaggggtagagctcagactcttccctgcttccccataagtccagtttaccctgggctgatcctttcagcatggcagcctccgtggggaggcacgagatccaaagatgaagatgtctatgggggtgaagaagaatggcaaactttgcaggcaagagtaggcattagagagatcagaggaggaagacaatagagaaggatgacacaggacaggctgtatctagaggatataatgccatggactttggactattccagagaggctgagagacctgtctcctgcctacaaggctccttgaactctgcacccttctttttgctaaagtgctgctgaggcctgtctcacttcccaatgaaaagcaactcaggaaattggcttcctgccccactccttctttgggagagagaaacagaactgaagaggaaggaaggaagcccaaagaaacagaggctttctttcctggctgagatttgttggcactgcccactaacatagagaataaggtggttccctaagcgagccttaagctggcatgaggctacaaacaagtgattgtatcttcgttctgctcagcagcctacctgggctggcctggacaacctcaattgtatactgaggtcttaagctggccatggcccttggtaaagcaggagaaaggaataaggctggaaggtacagaatttgcttgatgccttgcctacataattcctttgctgttgcaactggcaactctttgcttgcattatatgaaaaaaaggcggtaaaaaattgtcagaaatgtttgccaccagcctaaccccactgcccatgcattgctcccaagaaagctaattaaggcccattgctattagagttacatgattctgaaggcttgttatgacaagaaaaaataatgaagacatggttcctccaagtcataagcatccaagtcaaaacatactgcatcccaggcgagtgtggtggctcacgcctgtaatcccagcacttcgggaggccaaggcagccggatcacgaggtcaggagttcgagaccagccttgccaagatgatgaaaccccgtctctactaaaaatacaaaaattagccaggcatggtggcgggcgcctgtactcccagctactcaggaagctgaggcaggagaatcgcttgaaaccgggaggcggaggttgcaatgagccgagatcacaccactgcactgtaccctgggcgtcagagcaagactccatctc

SEQ ID NO: 1848 - protein, 40 aa, Homosapiens
MASKPVSARYSGLSAVVASHTSLYFPVGEYFLGAYIPVHL

SEQ ID NO: 1849 - DNA, 8192 bp, Homosapiens
gagccgagctgggagatggcggcggcagcggcggcgccgagagtgtgagcaccgcccgggagccgccggcccgggcgcagcgcgaccccgaccccgcccgcccgcctgcccgccatgggcaacgaggtcagcctggagggcggcgctggcgacgggccgctgccgcccggcggcgccggccccggcccgggccccggccccggccccggcgcaggaaagccgccttcagcaccggccggtggcggacagctccccgcggcgggagcagcgcggtcgaccgcggtaccaccggtccctggccccggccccggccccggtcccggccctggcccgggcagcacttcccggagactggaccccaaggaacccctgggtaaccagagagcagcttccccaactccgaagcaggcttctgctaccactcctggccatgagagcccccgagagacaagggcacagggaccagcaggccaggaggctgatggtccccgcaggacgctgcaggtagacagcaggacacagagatcagggcggtccccctcagtgtcaccggacagaggcagcacccccacatcaccctactccgtccctcagatcgccccccttcccagcagcacgctgtgtcccatatgcaagacttcggacctcacgtcgacccccagccagccaaacttcaacacctgcacccagtgtcacaacaaggtctgcaaccagtgtgggttcaaccccaaccctcatctcacccaggtgaaggagtggctctgtctgaactgtcagatgcagagggctctgggaatggacatgaccactgcacctcgctccaagagccagcagcagctgcactccccagccctgtctcctgcccactccccggccaaacagcccctggggaagccagaccaagagagatctcggggcccaggaggaccacagcctgggtcccgccaggctgagacagccagggccacctcagtgccggggcctgcccaagcagctgcccctccagaggtggggagggtgtctcctcagccccctcaacccaccaagccttccacagctgagcccaggccacctgcaggagaggccccggccaaaagtgccaccgcagtgcccgctgggcttggtgccactgagcagacccaggagggcctcactggtaagctcttcggccttggcgcgtcactgctaacccaggcgagcaccctcatgtctgtgcagcccgaggctgacacccagggccagcctgcccccagcaaggggacacctaagatcgtcttcaatgatgccagcaaggaggctggcccaaaacccttgggctcagggcccgggcctgggccagcacctggagccaaaactgagcctggggctagaatgggtcctggatctggacctggagccctgccgaaaactgggggaacaaccagtccaaagcatggcagagcagaacatcaggcagcatcgaaggctgctgccaagccaaagaccatgccgaaggaaagggccatctgcccactgtgccaagccgagctcaacgtgggcagcaagagcccagccaactataacacatgcaccacctgcaggctccaggtgtgcaacctgtgtggcttcaacccaacaccccacctggtggagaaaacagagtggctctgtctgaactgccaaaccaagcggctactggagggcagcctaggagagccgacccccctgccgccgcccacctcacagcagccccctgtaggggcccctcaccgtgcatctggaacatcccctctgaagcagaaagggccacaggggctgggccagccttcaggccccctgcctgccaaggccagccctctatccaccaaggccagccctctgcccagcaaggccagcccccaggccaagcccctcagggcttctgaacccagcaagaccccaagcagtgtccaggaaaagaagacccgagtccccactaaagctgagcccatgccgaagccacctccagagactaccccaacccctgcgactcctaaagtaaagagtggggtgaggagggctgaacctgccacccctgtcgtcaaggctgttccagaagcccccaagggtggggaggcggaggacctggtgggcaagccttactctcaggatgcgtctcggagcccacagagcctcagtgacacaggctattcctctgacggcatctctagctcccagagtgagatcacaggagtcgtgcagcaggaggtggaacagctggacagtgcaggggtgacagggccacatccacccagcccctccgagatccacaaggtggggagcagcatgcggcctttgctgcaggcccagggcctggccccaagtgagcggagcaagccactctccagcggtactggcgaggagcagaagcagcggccccactccttgtccatcacgcctgaggcctttgactctgatgaggagctggaggatatcctggaggaagacgaagactctgctgagtggaggcgccggagagagcagcaggacactgccgagtcctcagacgactttggcagccaattgaggcacgactatgtggaggacagcagtgagggtggcctgtcccctcttccaccccagcccccagcccgggcagcagaactgactgatgaggatttcatgcgacggcagattctcgagatgagcgccgaggaagacaacctggaggaggatgacactgccacctccgggcgtggcctggccaaacatggcacccagaaaggtggccccagacccaggcctgagcctagccaagaaccagcagcactgcccaagaggcgcctgccccacaatgccaccacgggctatgaggagctgctccctgagggaggctcagcagaggctaccgatggcagtgggaccctgcagggtgggctccgtcgcttcaagaccattgagctcaacagcacgggaagttatggtcatgagttggacctgggccaaggcccagaccccagtctggaccgggagcctgagctggagatggagagcctaacgggctcccctgaggaccgctcccgtggtgagcactcctctacattgcctgcctccacacccagctacacctcgggcacctctcccacctctctgtcctccctagaggaggacagtgacagcagccccagccgcaggcagcgtctagaagaagcaaagcagcagcgcaaggcccggcaccgctcccacgggcccctgctacccaccatcgaggactcctcagaggaggaggagctgcgggaggaagaggagctgcttcgtgagcaagagaagatgcgggaggtggagcagcagcgcatccgcagcacggcccgcaagacccggcgggacaaggaagaactgcgggcccagcggaggcgagagcgctccaagacaccacccagtaacttgtcacccatcgaggatgcctccccgacggaggagctgaggcaggcggccgagatggaggagctacaccgctcctcctgctctgagtactcaccctcaccctcccttgactctgaggctgaggccttggatggtggccctagccggctttacaagtcaggcagtgagtacaacctgcccaccttcatgtccctctactcaccaaccgagacaccctccggcagctccaccactcccagttccggacggccgctcaagagcgctgaggaggcttatgaggagatgatgcgcaaagctgagctgctccagaggcagcaaggccaggcagcaggggcccggggaccccatggcggcccctctcagcccacaggcccccggggcctgggctccttcgaatatcaagacactacagaccgtgagtatggccaggctgctcagcctgccgcagagggcacgccagccagcctgggagcagccgtgtacgaagaaatccttcagacatcacagagcatagtccgcatgcggcaggcctcctcacgagacctggcttttgctgaggacaaaaagaaggagaagcagtttctaaatgctgagagtgcatacatggacccaatgaagcaaaatggtggcccccttacccctggtaccagtcccacccagctcgctgcccctgtgtccttctctacccccacctcctcagacagcagcgggggccgagttattcccgatgtccgtgtcactcagcattttgcaaaggagactcaggaccccctcaagctgcacagctctcctgcctcccccagctcagcctccaaggagataggcatgcccttttcccagggccctgggaccccagccaccacagctgtggctccttgtccagctgggctgccacgaggatatatgactccagcctccccagcaggctccgagcgtagtccttcaccatcttccacagcccacagctatggacacagcccaaccactgcaaactatgggtcccaaactgaggatctaccccaggcccccagtggccttgctgcagctggacgagctgctagagagaagcccttgagtgcgagtgacggtgagggtggcactcctcagccttcccgggcatattcctactttgcaagctccagcccacctctctccccgtcttccccctcagagagtcccacattctcccctggcaagatgggcccaagggccacagcagagttctctacacagacgccaagtccagcccctgcctcagacatgccacggagccctggtgcccccactccatcacctatggtagcccagggtacacaaacaccacatcgacccagcacgcctcgcctggtgtggcaggagtcctctcaagaggctccctttatggtcatcacgctggcatctgacgcctccagccagaccaggatggtacatgccagtgcctccacctccccgctctgctcacctactgaaacccagcccaccacccatggctacagccagacaacacctccgagtgtgtctcagctgcccccagagccacctgggccacctggctttccacgggtgcccagtgctggtgcagatgggcccctggcactatatggctggggtgccctccctgctgagaacatctccctgtgccggatctcctctgtccctgggacgtctagggttgagccaggccccaggacccctggcactgcagtggtagacctccgtacagctgtcaagcccactcccatcatcctcactgaccagggcatggacctcacctctcttgctgtggaagcgaggaagtatggtcttgccctggatccaatcccaggacggcagtcgaccgccgtgcagcccttggttatcaacctcaatgcccaggagcataccttccttgctactgccaccaccgtgagcatcaccatggcctcgtctgtgttcatggctcaacaaaagcagcctgtggtctatggagacccctaccagagccgccttgactttggccagggtgggggtagccctgtgtgcctggcccaggtcaaacaagtagagcaggctgtccagacagccccataccgaagtgggccccggggaagacccagggaggccaagtttgccagatataacctacccaaccaagtagctcctctggccagaagagacgttttgatcactcagatgggcaccgcccagagcattggcctcaagccaggcccagtgccagagccaggtgccgagccccaccgggccacccctgcagagctgcggtcacatgctctgccaggtgccaggaagccacacacagtggtggtgcagatgggagagggcacagcaggcactgtgaccacactgctcccagaggagcctgcgggtgccctggaccttaccgggatgaggcctgagagccagctggcatgctgtgacatggtctacaagctcccctttggcagcagctgcactggcaccttccacccggcccccagtgtgcctgagaagagcatggcagatgctgccccacctggccaaagcagcagccccttctatggtccccgggaccctgagcctcctgagcccccaacctaccgggcacagggggtggtggggcctgggccccatgaggagcagaggccctacccacaaggcctgcctggtaggctgtactcctccatgtctgacaccaatttggctgaggctggcctcaactaccatgcccagaggatcgggcagctcttccagggtcctggacgagactcggctatggacctcagctcactgaagcactcctacagcctgggctttgcggatggacgctacctagggcagggcttgcagtatggctcagtcacggacctgcgtcatcctacagaccttttggctcacccgcttcccatgcggcgctatagctcagtgtcgaacatctactcagaccacaggtacggcccacggggagatgcagttggcttccaggaggccagcctggcccagtacagtgccaccacagcccgtgaaatcagtcgcatgtgcgctgccctcaactccatggaccagtatggtgggcggcatggcagtggtggtggtggccctgaccttgtgcagtaccagccccagcacgggcccgggctcagtgctccacagagtctggttcccctcagacctggactccttggtaaccccacctttccagagggccacccaagtcctgggaacttggcccagtatgggcctgcagcaggccaaggaacagcagtcagacagctgctgccgtccacagccactgtacgtgcagctgatggcatgatctactcgactatcaataccccaattgctgcaacactgcccatcaccacccagcctgcctcagtcctgcggcccatggtgcgtggtggcatgtacaggccttacgcatctggtggaatcacagccgtgccactcaccagtctgacacgtgtgcccatgattgccccccgggtacctcttggacccacagggctgtaccgctatcctgcaccaagtagatttcccattgcttccagtgttccacctgcagaagggcctgtctatctggggaaacctgctgctgccaaggcccctggggctgggggcccttcaaggccagagatgccagtaggggctgcacgggaagagcctcttcccacaaccacccctgctgccatcaaggaggctgcaggagccccagctcctgccccactagctggccagaagccaccagcagatgctgctcctgggggtggcagtggggccctcagccggccagggttcgagaaagaggaagcatcacaggaggagaggcagcggaagcaacaggagcagctgctccagctagagcgggagcgggtggagttggagaagctgcgacaacttcggctgcaagaggagctagagcgggaacgtgtggagctgcagaggcaccgtgaggaggagcagctgctggtgcagcgggagttgcaggagctgcagaccatcaagcaccatgtgctgcagcagcagcaagaggaacgccaggctcaatttgcactgcagcgggaacagctagcgcagcagcgtctgcagctggagcagatccagcagctgcagcagcagctgcagcagcagctagaggagcagaagcagcggcagaaggctccctttcctgcagcctgtgaggcacctggccgagggcctcccctagcggctgctgagttggcccagaatggccagtattggcccccccttacacatgcagccttcattgccatggcagggcctgaaggacttgggcagcctcgtgagcctgtgctgcaccggggtctccccagctctgcctcagacatgtcactgcaaacggaggagcagtgggaggccagccgtagtggcatcaagaagcggcactccatgccacgcctgcgggatgcctgtgagctagagtctgggactgagccctgtgtggtcaggaggattgccgacagcagcgtgcagacagacgatgaggatggggagagccgctacctcttgagtcggcgacgccgggcacggcggagtgctgactgcagtgtgcagacggacgacgaagacagtgctgagtgggagcagccagtgcgccgccgcaggtctcgtcttccccgccactcagactcaggctctgacagcaagcacgatgccactgcctcatcatccagtgctgctgccactgtgagggccatgagcagcgtgggcatccagaccatcagtgactgctccgtgcagacggagcctgaccagctgcccagggtctctccagccatccacatcacagctgc

SEQ ID NO: 1850 - protein, 3926 aa, Homosapiens
MGNEVSLEGGAGDGPLPPGGAGPGPGPGPGPGAGKPPSAPAGGGQLPAAGAARSTAVPPVPGPGPGPGPGPGPGSTSRRLDPKEPLGNQRAASPTPKQASATTPGHESPRETRAQGPAGQEADGPRRTLQVDSRTQRSGRSPSVSPDRGSTPTSPYSVPQIAPLPSSTLCPICKTSDLTSTPSQPNFNTCTQCHNKVCNQCGFNPNPHLTQVKEWLCLNCQMQRALGMDMTTAPRSKSQQQLHSPALSPAHSPAKQPLGKPDQERSRGPGGPQPGSRQAETARATSVPGPAQAAAPPEVGRVSPQPPQPTKPSTAEPRPPAGEAPAKSATAVPAGLGATEQTQEGLTGKLFGLGASLLTQASTLMSVQPEADTQGQPAPSKGTPKIVFNDASKEAGPKPLGSGPGPGPAPGAKTEPGARMGPGSGPGALPKTGGTTSPKHGRAEHQAASKAAAKPKTMPKERAICPLCQAELNVGSKSPANYNTCTTCRLQVCNLCGFNPTPHLVEKTEWLCLNCQTKRLLEGSLGEPTPLPPPTSQQPPVGAPHRASGTSPLKQKGPQGLGQPSGPLPAKASPLSTKASPLPSKASPQAKPLRASEPSKTPSSVQEKKTRVPTKAEPMPKPPPETTPTPATPKVKSGVRRAEPATPVVKAVPEAPKGGEAEDLVGKPYSQDASRSPQSLSDTGYSSDGISSSQSEITGVVQQEVEQLDSAGVTGPHPPSPSEIHKVGSSMRPLLQAQGLAPSERSKPLSSGTGEEQKQRPHSLSITPEAFDSDEELEDILEEDEDSAEWRRRREQQDTAESSDDFGSQLRHDYVEDSSEGGLSPLPPQPPARAAELTDEDFMRRQILEMSAEEDNLEEDDTATSGRGLAKHGTQKGGPRPRPEPSQEPAALPKRRLPHNATTGYEELLPEGGSAEATDGSGTLQGGLRRFKTIELNSTGSYGHELDLGQGPDPSLDREPELEMESLTGSPEDRSRGEHSSTLPASTPSYTSGTSPTSLSSLEEDSDSSPSRRQRLEEAKQQRKARHRSHGPLLPTIEDSSEEEELREEEELLREQEKMREVEQQRIRSTARKTRRDKEELRAQRRRERSKTPPSNLSPIEDASPTEELRQAAEMEELHRSSCSEYSPSPSLDSEAEALDGGPSRLYKSGSEYNLPTFMSLYSPTETPSGSSTTPSSGRPLKSAEEAYEEMMRKAELLQRQQGQAAGARGPHGGPSQPTGPRGLGSFEYQDTTDREYGQAAQPAAEGTPASLGAAVYEEILQTSQSIVRMRQASSRDLAFAEDKKKEKQFLNAESAYMDPMKQNGGPLTPGTSPTQLAAPVSFSTPTSSDSSGGRVIPDVRVTQHFAKETQDPLKLHSSPASPSSASKEIGMPFSQGPGTPATTAVAPCPAGLPRGYMTPASPAGSERSPSPSSTAHSYGHSPTTANYGSQTEDLPQAPSGLAAAGRAAREKPLSASDGEGGTPQPSRAYSYFASSSPPLSPSSPSESPTFSPGKMGPRATAEFSTQTPSPAPASDMPRSPGAPTPSPMVAQGTQTPHRPSTPRLVWQESSQEAPFMVITLASDASSQTRMVHASASTSPLCSPTETQPTTHGYSQTTPPSVSQLPPEPPGPPGFPRVPSAGADGPLALYGWGALPAENISLCRISSVPGTSRVEPGPRTPGTAVVDLRTAVKPTPIILTDQGMDLTSLAVEARKYGLALDPIPGRQSTAVQPLVINLNAQEHTFLATATTVSITMASSVFMAQQKQPVVYGDPYQSRLDFGQGGGSPVCLAQVKQVEQAVQTAPYRSGPRGRPREAKFARYNLPNQVAPLARRDVLITQMGTAQSIGLKPGPVPEPGAEPHRATPAELRSHALPGARKPHTVVVQMGEGTAGTVTTLLPEEPAGALDLTGMRPESQLACCDMVYKLPFGSSCTGTFHPAPSVPEKSMADAAPPGQSSSPFYGPRDPEPPEPPTYRAQGVVGPGPHEEQRPYPQGLPGRLYSSMSDTNLAEAGLNYHAQRIGQLFQGPGRDSAMDLSSLKHSYSLGFADGRYLGQGLQYGSVTDLRHPTDLLAHPLPMRRYSSVSNIYSDHRYGPRGDAVGFQEASLAQYSATTAREISRMCAALNSMDQYGGRHGSGGGGPDLVQYQPQHGPGLSAPQSLVPLRPGLLGNPTFPEGHPSPGNLAQYGPAAGQGTAVRQLLPSTATVRAADGMIYSTINTPIAATLPITTQPASVLRPMVRGGMYRPYASGGITAVPLTSLTRVPMIAPRVPLGPTGLYRYPAPSRFPIASSVPPAEGPVYLGKPAAAKAPGAGGPSRPEMPVGAAREEPLPTTTPAAIKEAAGAPAPAPLAGQKPPADAAPGGGSGALSRPGFEKEEASQEERQRKQQEQLLQLERERVELEKLRQLRLQEELERERVELQRHREEEQLLVQRELQELQTIKHHVLQQQQEERQAQFALQREQLAQQRLQLEQIQQLQQQLQQQLEEQKQRQKAPFPAACEAPGRGPPLAAAELAQNGQYWPPLTHAAFIAMAGPEGLGQPREPVLHRGLPSSASDMSLQTEEQWEASRSGIKKRHSMPRLRDACELESGTEPCVVRRIADSSVQTDDEDGESRYLLSRRRRARRSADCSVQTDDEDSAEWEQPVRRRRSRLPRHSDSGSDSKHDATASSSSAAATVRAMSSVGIQTISDCSVQTEPDQLPRVSPAIHITAATDPKVEIVRYISAPEKTGRGESLACQTEPDGQAQGVAGPQLVGPTAISPYLPGIQIVTPGPLGRFEKKKPDPLEIGYQAHLPPESLSQLVSRQPPKSPQVLYSPVSPLSPHRLLDTSFASSERLNKAHVSPQKHFTADSALRQQTLPRPMKTLQRSLSDPKPLSPTAEESAKERFSLYQHQGGLGSQVSALPPNSLVRKVKRTLPSPPPEEAHLPLAGQASPQLYAASLLQRGLTGPTTVPATKASLLRELDRDLRLVEHESTKLRKKQAELDEEEKEIDAKLKYLELGITQRKESLAKDRGGRDYPPLRGLGEHRDYLSDSELNQLRLQGCTTPAGQFVDFPATAAAPATPSGPTAFQQPRFQPPAPQYSAGSGGPTQNGFPAHQAPTYPGPSTYPAPAFPPGASYPAEPGLPNQQAFRPTGHYAGQTPMPTTQSTLFPVPADSRAPLQKPRQTSLADLEQKVPTNYEVIASPVVPMSSAPSETSYSGPAVSSGYEQGKVPEVPRAGDRGSVSQSPAPTYPSDSHYTSLEQNVPRNYVMIDDISELTKDSTSTAPDSQRLEPLGPGSSGRPGKEPGEPGVLDGPTLPCCYARGEEESEEDSYDPRGKGGHLRSMESNGRPASTHYYGDSDYRHGARVEKYGPGPMGPKHPSKSLAPAAISSKRSKHRKQGMEQKISKFSPIEEAKDVESDLASYPPPAVSSSLVSRGRKFQDEITYGLKKNVYEQQKYYGMSSRDAVEDDRIYGGSSRSRAPSAYSGEKLSSHDFSGWGKGYEREREAVERLQKAGPKPSSLSMAHSRVRPPMRSQASEEESPVSPLGRPRPAGGPLPPGGDTCPQFCSSHSMPDVQEHVKDGPRAHAYKREEGYILDDSHCVVSDSEAYHLGQEETDWFDKPRDARSDRFRHHGGHAVSSSSQKRGPARHSYHDYDEPPEEGLWPHDEGGPGRHASAKEHRHGDHGRHSGRHTGEEPGRRAAKPHARDLGRHEARPHSQPSSAPAMPKKGQPGYPSSAEYSQPSRASSAYHHASDSKKGSRQAHSGPAALQSKAEPQAQPQLQGRQAAPGPQQSQSPSSRQIPSGAASRQPQTQQQQQGLGLQPPQQALTQARLQQQSQPTTRGSAPAASQPAGKPQPGPSTATGPQPAGPPRAEQTNGSKGTAKAPQQGRAPQAQPAPGPGPAGVKAGARPGGTPGAPAGQPGADGESVFSKILPGGAAEQAGKLTEAVSAFGKKFSSFW

SEQ ID NO: 1851 - DNA, 840 bp, Homosapiens
cccactgtgccaagccgagctcaacgtgggcagcaagagcccagccaactataacacatgcaccacctgcaggctccaggtgtgcaacctgtgtggcttcaacccaacaccccacctggtggagaaaacagagtggctctgtctgaactgccaaaccaagcggctactggagggcagcctaggagagccgacccccctgccgccgcccacctcacagcagccccctgtaggggcccctcaccgtgcatctggaacatcccctctgaagcagaaagggccacaggggctgggccagccttcaggccccctgcctgccaaggccagccctctatccaccaaggccagccctctgcccagcaaggccagcccccaggccaagcccctcagggcttctgaacccagcaagaccccaagcagtgtccaggaaaagaagacccgagtccccactaaagctgagcccatgccgaagccacctccagagactaccccaacccctgcgactcctaaagtaaagagtggggtgaggagggctgaacctgccacccctgtcgtcaaggctgttccagaagcccccaagggtggggaggcggaggtcagtcccattcacttcccagagaccctagctttcagacaggacagtctatggaaaggcttgcctccctgggtggctgaggctgtaggctcaggacaggtgccttggggccacacaggagggaagggacacagtagaaggaaagtctagatgaggttctggcacgcttggagactgtgggttttacactggtgctgtgtctggcaccttgtcagatgctttgctgggttttgataccctttgatcta

SEQ ID NO: 1852 - protein, 112 aa, Homosapiens
MHHLQAPGVQPVWLQPNTPPGGENRVALSELPNQAATGGQPRRADPPAAAHLTAAPCRGPSPCIWNIPSEAERATGAGPAFRPPACQGQPSIHQGQPSAQQGQPPGQAPQGF

SEQ ID NO: 1853 - DNA, 1888 bp, Homosapiens
taaggagttaattgcaaacatgcaattgagaaactggatagatacactcataaaacccccacccctccccaccccacccctgctcccattgtgtgtgtgaaattctcagtctgtggcatgtttgacctgtggcaggactcgctgctgccaggtgagtcaccgcctgtcctgcagtggagcatgcacagctcgcagcctctttgcacgatttcatccattttaaatgcttgaccctcttgcttggagttctttttgcctcagaacctctccttcaggagcacttctagctgacttctgcacaagctagtgaggacctgccagaattgttgcctgagcgtgccaggctgcagggcaggcagtaaaaggcccccacataccctgcagttttctctgtccaggacagcaggtaaaaaggaatccccagagcagacgcaatggtaggagcctgcacaggatgtgtgtgtatggacattctgaaggtttgctgtaggatatctgtctgtctgtcattttcccttcctaccccaaccctgagccagaggcatctgacagccctttcccagagggcaccacgcaagggcagagctgggcggcatccacagccagagaggcagaggcaagagcagagccaggctgtgcccgagggaccccagctcttgactgcacctgtttcatgcctctcctctgtggctaggaggctagtctcaggctctaaagtactgacttttcagcaaatttcctttctggccaagccctctgagtttgaaattctgacatctgccactcctcatcccccactgtacccacaggatacatcatcgcccctctgtgaaggtggctggagcaggcctctggtccatggactgtccttcctggcccttgcatggatgcagttgtgactctggggacaatgcagccagaagctgagggaccagcacttggtgccttggaaagtagagagcaacagacacatctccaaatgggcaaggagtctctagcatgcagcccaggccttctccatacccctctccccagcatcatgagcaagggcattgcctcctctctctgctcacttcagggcccagtgcactcacttcacagtgacagccctcccctacaatccttgggcagagcatgtggtctgagggcccacagtgaaagaacagcagtggtggcaactatgccttgccttctggagcctgtagggagttttccaggcaggtcctttgccaggacagcatggtcctgccctgttgtcccgtctgctctcctcttacccacccccatgctgtaaatacttgtcatcatggactccaacagggttagagggacaggcctaatcaactgaaactcctcggagatgccatctctgtctccctgggtgccagcagccctgctgccatgtgcactggggtggcactggagagccatggcagtcgtgagatattgtatgtgtatgcacatgatcatgtgtgtatgtgcgtgcgtgcgtgcgtgtgtgtgtgtgtgtgtgtttctgcctcattcagtttctggggtcaaatcagctccttctctccaagtgcactaccctggagagtggtggccactcaataccttttcctctagctttcatgtcttgtttttgctttccccttcctcctccctctctccctttctttccttctctccttctttatttgaggggggaagagtgctgtacaaagtcaaacaaacaagtttacagttgtaagtgcaatgacccgagtcctccacatgaccttgtgaattgtgtgctgtccttctgtgctctgtgagaactcgtggtacttcagtgtccctccccctgtattgtgacaaggtaattctgtggtatcagaataaaaggacttgatataaacaacctaca

SEQ ID NO: 1854 - protein, 154 aa, Homosapiens
MVGACTGCVCMDILKVCCRISVCLSFSLPTPTLSQRHLTALSQRAPRKGRAGRHPQPERQRQEQSQAVPEGPQLLTAPVSCLSSVARRLVSGSKVLTFQQISFLAKPSEFEILTSATPHPPLYPQDTSSPLCEGGWSRPLVHGLSFLALAWMQL

SEQ ID NO: 1855 - DNA, 1623 bp, Homosapiens
ttccgccttgcagcaccccctcaaccccttctctcgtaggcccttctaccctccccgaagccgggctcccgggttccgcttccacagggccgccccctctcctccgagatccaacgcctcgcccctcggtaagaggcccaggactcagcccacggccccgccccccacttggctagtccgcccctggcgagacccctgctctcacccacccaggacttctcgctcccaggccgggtcctctcaccgtcaaggcccgccccctgccaacggtcctcacccattagccgaaggccccgcccctcacagattgccgcagggcaggggcggagacagcccgggccgtcccaggctccgcccccggaagcctcacttccgggcgcgagcacgccccgcctcgccccggcggcagagaggagactatggaacgtcaggtgctgctgagcgagcccgaggaggcggcggctctgtatcggggccttagccgccagcccgcgctgagcgccgcctgcctgggcccggaggtcaccacgcagtacggcggccaataccggacggtgcacactgagtggacccagagggacctggaacgcatggagaacattcgattctgccgccaatacctggtgttccatgacggggactcagtggtgtttgcaggacctgcaggcaacagtgtggagacccggggggaactgctgagcagagagtctccttcaggcaccatgaaagctgtgctgcgcaaggctggaggcacgggccctggggaagagaagcagttcctggaggtctgggagaagaaccggaagctcaagagcttcaacctgtcagcgctggagaaacatgggcctgtttatgaggatgactgctttggctgcctgtcctggtcgcactcggagacacacttgttgtatgtggcagagaagaagcgccccaaggccgagtccttctttcagaccaaagccttggacgtcagtgccagcgatgatgagatagccaggctgaagaagccagaccaagccatcaaggtgctcgtggtcaatccacgaaggcccggcagggcagccctggggctcagtgtgctcccttcccatactgtgcctgtcagacctggggaggcactagcttttaggaagcagagcaggtcctatagacaggctgggcattgagtatcttgtgttctcagggggatcagtttgtgttttatgaagactggggagaaaacatggtttccaaaagcatccctgtgctctgcgtgctggatgtcgagagtggcaacatctctgtgcttgagggggtccctgagaatgtgtcccctggacaggtcagcagcaacagcctgtgtcccccctggagtctgggacccttcttgagctaccaccccttgctcactcctgccctttgatcctgtttacaggcattttgggcccctggagatgctggtgtggtgtttgtgggctggtggcatgagcccttccggttgggcatccgcttttgcaccaatcgcaggtgagggagtggggcaaggcaaggggccttgcagcccagctggccttgagactgagtgtctgtctcgtggttccaggtcagccctgtattatgtggacctcatcggggggaagtgtg

SEQ ID NO: 1856 - protein, 248 aa, Homosapiens
MERQVLLSEPEEAAALYRGLSRQPALSAACLGPEVTTQYGGQYRTVHTEWTQRDLERMENIRFCRQYLVFHDGDSVVFAGPAGNSVETRGELLSRESPSGTMKAVLRKAGGTGPGEEKQFLEVWEKNRKLKSFNLSALEKHGPVYEDDCFGCLSWSHSETHLLYVAEKKRPKAESFFQTKALDVSASDDEIARLKKPDQAIKVLVVNPRRPGRAALGLSVLPSHTVPVRPGEALAFRKQSRSYRQAGH

SEQ ID NO: 1857 - DNA, 2785 bp, Homosapiens
ttccgccttgcagcaccccctcaaccccttctctcgtaggcccttctaccctccccgaagccgggctcccgggttccgcttccacagggccgccccctctcctccgagatccaacgcctcgcccctcggtaagaggcccaggactcagcccacggccccgccccccacttggctagtccgcccctggcgagacccctgctctcacccacccaggacttctcgctcccaggccgggtcctctcaccgtcaaggcccgccccctgccaacggtcctcacccattagccgaaggccccgcccctcacagattgccgcagggcaggggcggagacagcccgggccgtcccaggctccgcccccggaagcctcacttccgggcgcgagcacgccccgcctcgccccggcggcagagaggagactatggaacgtcaggtgctgctgagcgagcccgaggaggcggcggctctgtatcggggccttagccgccagcccgcgctgagcgccgcctgcctgggcccggaggtcaccacgcagtacggcggccaataccggacggtgcacactgagtggacccagagggacctggaacgcatggagaacattcgattctgccgccaatacctggtgttccatgacggggactcagtggtgtttgcaggacctgcaggcaacagtgtggagacccggggggaactgctgagcagagagtctccttcaggcaccatgaaagctgtgctgcgcaaggctggaggcacgggccctggggaagagaagcagttcctggaggtctgggagaagaaccggaagctcaagagcttcaacctgtcagcgctggagaaacatgggcctgtttatgaggatgactgctttggctgcctgtcctggtcgcactcggagacacacttgttgtatgtggcagagaagaagcgccccaaggccgagtccttctttcagaccaaagccttggacgtcagtgccagcgatgatgagatagccaggctgaagaagccagaccaagccatcaagggggatcagtttgtgttttatgaagactggggagaaaacatggtttccaaaagcatccctgtgctctgcgtgctggatgtcgagagtggcaacatctctgtgcttgagggggtccctgagaatgtgtcccctggacaggcattttgggcccctggagatgctggtgtggtgtttgtgggctggtggcatgagcccttccggttgggcatccgcttttgcaccaatcgcaggtcagccctgtattatgtggacctcatcggggggaagtgtgagctcctctcggatgactccctggctgtctcttctccccggctgagcccagaccaatgtcgcattgtctacctgcagtacccatctctgatcccccatcaccaatgcagccagctgtgcctgtatgactggtataccaaggttacctcagtggtggtagatgttgtgcctcggcagctgggagagaacttctctgggatctactgcagccttctgcctttgggatgctggtcagctgacagccagagagtggtctttgactcggctcagcgcagccggcaggacctgtttgctgtggacacccaagtgggcactgtgacctccctcacagctggagggtcaggtgggagctggaagttgctcacaattgaccaggacctcatggtggcacagttttccacacccagcctacctccaaccctgaaagttgggttcctgccttctgcagggaaggagcagtcagtgttgtgggtgtccctggaggaggccgagcccattcccgacatccactggggcatccgggtgctacagccacccccagagcaagagaatgtgcagtatgctggccttgactttgaagcaatcctgctgcagcctggcagccctccagataagacccaagtgcccatggtggtcatgccccacggggggccccattcatcctttgtcactgcctggatgctgttcccagccatgctttgcaagatgggctttgcggtactactagtgaactatcgtggctccacgggctttggccaggacagcatcctctccctcccaggcaatgtgggccaccaggatgtgaaggatgtccagtttgcagtggaacaggtgctccaggaggaacactttgatgcaagccatgtggcccttatgggtggttcccatggtggcttcatttcctgccacttgattggtcagtacccagagacctacagggcctgcgtggcccggaaccccgtgatcaacatcgcctccatgttgggctccactgacatccctgactggtgcgtggtggaggctggctttcctttcagcagtgactgcctgccagacctcagcgtgtgggctgagatgctggacaaatcgcccatcagatacatccctcaggtgaagacaccactgttactgatgttgggccaggaggaccggcgtgtgcccttcaagcagggcatggagtattaccgtgccctcaagacccggaatgtgcctgttcggctcctgctctatcccaaaagcacccacgcattatcagaggtggaggtggagtcagacagcttcatgaatgctgtgctctggctacgcacacacttgggcagctgaagccctgccattctgcatgagctgatcagcctgtgccacacttcgctcttgaggagctcaacggtctggcagggcagcaggaggctttctgggctctggactccacggatgcgtgggcagaggaatgtgggctatgtagtcataataaattaggacacagagcctgg

SEQ ID NO: 1858 - protein, 732 aa, Homosapiens; identical to SEQ ID NO: 145

SEQ ID NO: 1859 - DNA, 3247 bp, Homosapiens
ttccgccttgcagcaccccctcaaccccttctctcgtaggcccttctaccctccccgaagccgggctcccgggttccgcttccacagggccgccccctctcctccgagatccaacgcctcgcccctcggtaagaggcccaggactcagcccacggccccgccccccacttggctagtccgcccctggcgagacccctgctctcacccacccaggacttctcgctcccaggccgggtcctctcaccgtcaaggcccgccccctgccaacggtcctcacccattagccgaaggccccgcccctcacagattgccgcagggcaggggcggagacagcccgggccgtcccaggctccgcccccggaagcctcacttccgggcgcgagcacgccccgcctcgccccggcggcagagaggagactatggaacgtcaggtgctgctgagcgagcccgaggaggcggcggctctgtatcggggccttagccgccagcccgcgctgagcgccgcctgcctgggcccggaggtcaccacgcagtacggcggccaataccggacggtgcacactgagtggacccagagggacctggaacgcatggagaacattcgattctgccgccaatacctggtgttccatgacggggactcagtggtgtttgcaggacctgcaggcaacagtgtggagacccggggggaactgctgagcagagagtctccttcaggcaccatgaaagctgtgctgcgcaaggctggaggcacgggccctggggaagagaagcagttcctggaggtctgggagaagaaccggaagctcaagagcttcaacctgtcagcgctggagaaacatgggcctgtttatgaggatgactgctttggctgcctgtcctggtcgcactcggagacacacttgttgtatgtggcagagaagaagcgccccaaggccgagtccttctttcagaccaaagccttggacgtcagtgccagcgatgatgagatagccaggctgaagaagccagaccaagccatcaagggggatcagtttgtgttttatgaagactggggagaaaacatggtttccaaaagcatccctgtgctctgcgtgctggatgtcgagagtggcaacatctctgtgcttgagggggtccctgagaatgtgtcccctggacaggcattttgggcccctggagatgctggtgtggtgtttgtgggctggtggcatgagcccttccggttgggcatccgcttttgcaccaatcgcaggtcagccctgtattatgtggacctcatcggggggaagtgtgagctcctctcggatgactccctggctgtctcttctccccggctgagcccagaccaatgtcgcattgtctacctgcagtacccatctctgatcccccatcaccaatgcagccagctgtgcctgtatgactggtataccaaggttacctcagtggtggtagatgttgtgcctcggcagctgggagagaacttctctgggatctactgcagccttctgcctttgggatgctggtcagctgacagccagagagtggtctttgactcggctcagcgcagccggcaggacctgtttgctgtggacacccaagtgggcactgtgacctccctcacagctggagggtcaggtgggagctggaagttgctcacaattgaccaggacctcatggtggcacagttttccacacccagcctacctccaaccctgaaagttgggttcctgccttctgcagggaaggagcagtcagtgttgtgggtgtccctggaggaggccgagcccattcccgacatccactggggcatccgggtgctacagccacccccagagcaagagaatgtgcagtatgctggccttgactttgaagcaatcctgctgcagcctggcagccctccagataagacccaagtgcccatggtggtcatgccccacggggggccccattcatcctttgtcactgcctggatgctgttcccagccatgctttgcaagatgggctttgcggtactactagtgaactatcgtggctccacgggctttggccaggacagcatcctctccctcccaggcaatgtgggccaccaggatgtgaaggatgtccagtttgcagtggaacaggtgctccaggaggaacactttgatgcaagccatgtggcccttatgggtggttcccatggtggcttcatttcctgccacttgattggtcagtacccagagacctacagggcctgcgtggcccggaaccccgtgatcaacatcgcctccatgttgggctccactgacatccctgactggtgcgtggtggaggctggctttcctttcagcagtgactgcctgccagacctcagcgtgtgggctgagatgctggacaaatcgcccatcagatacatccctcaggtgaagacaccactgttactgatgttgggccaggaggaccggcgtgtgcccttcaagcagggcatggagtattaccgtgccctcaagacccggaatgtgcctgttcggctcctgctctatcccaaaagcacccacgcattatcagaggtggaggtggagtcagacagcttcatgaatgctgtgctctggctacgcacacacttgggcagctgaagccctgccattctgcatgagctgatcagcctgtgccacacttcgctcttgaggagctcaacggtctggcagggcagcaggaggctttctgggctctggactccacggatgcgtgggcagaggaatgtgggctatgtagtcataataaattaggacacagagcctggttcctgctggtactttgtaccaaaccatccccaaccccacctcccactctggggtgcagagaccctaggttctgggtgtggcagccacaagggcttcatctgcctccagtgtgagaagggagggaacagtgagaggcttagcctctgcctgtcctggcaaccaggactctgtaccagcctagcttccctgctgcagccccttccattagcaactactctgtaccacccttcccaagagtatgtctggaggactagtgtgaggccctgtctttccacggcacccatgggcaaaagtagtcccagggacattgccttggttggggaagcccctaggctggacagatcacctagcccagggtgtgctgggctcaagccacccgagccctagcaaggagtcactgacacatttcctggaagcaaaggctaagaagcatctgtacaggcataaagaggaaacatggc

SEQ ID NO: 1860 - protein, 732 aa, Homosapiens; identical to SEQ ID NO: 145

SEQ ID NO: 1861 - DNA, 1520 bp, Homosapiens
tccccgaagccgggctcccgggttccgcttccacagggccgccccctctcctccgagatccaacgcctcgcccctcgagtggacccagagggacctggaacgcatggagaacattcgattctgccgccaatacctggtgttccatgacggggactcagtggtgtttgcaggacctgcaggcaacagtgtggagacccggggggagtaagtttgagggaggaagcttgtgggcaaggccacagccgtccgcaatgcaagccttttatgaatgctcaccatgtgcctagaagggaggccagcagccaggttcttgcccccttgggagctcattcagtttctggtgacatggcctgataagcactggaagcttgctccaaactcagcctggactagagcccatggtggcctggggagttgcagagagtagagtctctgcctcagggaggaaaggcaaggtggggctagaggtgctccagaagctggtgtggggccagagcctcaagaatctctcctaagaggtgtgcccagtagggagcaggaaggggttattgcaagataatcctgacctgtgctaccccatgtccacagactgctgagcagagagtctccttcaggcaccatgaaagctgtgctgcgcaaggctggaggcacgggccctggggaagagaagcagttcctggaggtctgggagaagaaccggaagctcaagagcttcaacctgtcagcgctggagaaacatgggcctgtttatgaggatgactgctttggctgcctgtcctggtcgcactcggagacacacttgttgtatgtggcagagaagaagcgccccaaggccgagtccttctttcagaccaaagccttggacgtcagtgccagcgatgatgagatagccaggctgaagaagccagaccaagccatcaaggtgctcgtggtcaatccacgaaggcccggcagggcagccctggggctcagtgtgctcccttcccatactgtgcctgtcagacctggggaggcactagcttttaggaagcagagcaggtcctatagacaggctgggcattgagtatcttgtgttctcagggggatcagtttgtgttttatgaagactggggagaaaacatggtttccaaaagcatccctgtgctctgcgtgctggatgtcgagagtggcaacatctctgtgcttgagggggtccctgagaatgtgtcccctggacaggtcagcagcaacagcctgtgtcccccctggagtctgggacccttcttgagctaccaccccttgctcactcctgccctttgatcctgtttacaggcattttgggcccctggagatgctggtgtggtgtttgtgggctggtggcatgagcccttccggttgggcatccgcttttgcaccaatcgcaggtgagggagtggggcaaggcaaggggccttgcagcccagctggccttgagactgagtgtctgtctcgtggttccaggtcagccctgtattatgtggacctcatcggggggaagtgtg

SEQ ID NO: 1862 - protein, 147 aa, Homosapiens
MKAVLRKAGGTGPGEEKQFLEVWEKNRKLKSFNLSALEKHGPVYEDDCFGCLSWSHSETHLLYVAEKKRPKAESFFQTKALDVSASDDEIARLKKPDQAIKVLVVNPRRPGRAALGLSVLPSHTVPVRPGEALAFRKQSRSYRQAGH

SEQ ID NO: 1863 - DNA, 1281 bp, Homosapiens
ctatggaacgtcaggtgagggctcggcccgcggtccccgtggtccctgcagcccgggccgggcctgaccctggtgtgtcccctgcgcaggtgctgctgagcgagcccgaggaggcggcggctctgtatcggggccttagccgccagcccgcgctgagcgccgcctgcctgggcccggaggtcaccacgcagtacggcggccaataccggacggtgcacactgagtggacccagagggacctggaacgcatggagaacattcgattctgccgccaatacctggtgttccatgacggggactcagtggtgtttgcaggacctgcaggcaacagtgtggagacccggggggaactgctgagcagagagtctccttcaggcaccatgaaagctgtgctgcgcaaggctggaggcacgggccctggggaagagaagcagttcctggaggtctgggagaagaaccggaagctcaagagcttcaacctgtcagcgctggagaaacatgggcctgtttatgaggatgactgctttggctgcctgtcctggtcgcactcggagacacacttgttgtatgtggcagagaagaagcgccccaaggccgagtccttctttcagaccaaagccttggacgtcagtgccagcgatgatgagatagccaggctgaagaagccagaccaagccatcaaggtgctcgtggtcaatccacgaaggcccggcagggcagccctggggctcagtgtgctcccttcccatactgtgcctgtcagacctggggaggcactagcttttaggaagcagagcaggtcctatagacaggctgggcattgagtatcttgtgttctcagggggatcagtttgtgttttatgaagactggggagaaaacatggtttccaaaagcatccctgtgctctgcgtgctggatgtcgagagtggcaacatctctgtgcttgagggggtccctgagaatgtgtcccctggacaggtcagcagcaacagcctgtgtcccccctggagtctgggacccttcttgagctaccaccccttgctcactcctgccctttgatcctgtttacaggcattttgggcccctggagatgctggtgtggtgtttgtgggctggtggcatgagcccttccggttgggcatccgcttttgcaccaatcgcaggtgagggagtggggcaaggcaaggggccttgcagcccagctggccttgagactgagtgtctgtctcgtggttccaggtcagccctgtattatgtggacctcatcggggggaagtgtg

SEQ ID NO: 1864 - protein, 273 aa, Homosapiens
MERQVRARPAVPVVPAARAGPDPGVSPAQVLLSEPEEAAALYRGLSRQPALSAACLGPEVTTQYGGQYRTVHTEWTQRDLERMENIRFCRQYLVFHDGDSVVFAGPAGNSVETRGELLSRESPSGTMKAVLRKAGGTGPGEEKQFLEVWEKNRKLKSFNLSALEKHGPVYEDDCFGCLSWSHSETHLLYVAEKKRPKAESFFQTKALDVSASDDEIARLKKPDQAIKVLVVNPRRPGRAALGLSVLPSHTVPVRPGEALAFRKQSRSYRQAGH

SEQ ID NO: 1865 - DNA, 337 bp, Homosapiens
ctgccttctgcagggaaggagcagtcagtgttgtgggtgtccctggaggaggccgagcccattcccgacatccactggggcatccgggtgctacagccacccccagagcaagagaattcagacagcttcatgaatgctgtgctctggctacgcacacacttgggcagctgaagccctgccattctgcatgagctgatcagcctgtgccacacttcgctcttgaggagctcaacggtctggcagggcagcaggaggctttctgggctctggactccacggatgcgtgggcagaggaatgtgggctatgtagtcataataaattaggacacagagcctg

SEQ ID NO: 1866 - protein, 62 aa, Homosapiens
AFCREGAVSVVGVPGGGRAHSRHPLGHPGATATPRAREFRQLHECCALATHTLGQLKPCHSA

SEQ ID NO: 1867 - DNA, 474 bp, Homosapiens
tggctttcctttcagcagtgactgcctgccagacctcagcgtgtgggctgagatgctggacaaatcgcccatcagatacatccctcaggtgaagacaccactgttactgatgttgggccaggaggaccggcgtgtgcccttcaagcagggcatggagtattaccgtgccctcaagacccggaatgtgcctgttcggctcctgctctatcccaaaagcacccacgcattatcagaggtggaggtggagtcagacagcttcatgaatgctgtgctctggctacgcacacacttgggcagctgaagccctgccattctgcatgagctgatcagcctgtgccacacttcgctcttgaggagctcaacggtctggcagggcagcaggaggctttctgggctctggactccacggatgcgtgggcagaggaatgtgggctatgtagtcataataaattaggacacagagcctggttcctg

SEQ ID NO: 1868 - protein, 82 aa, Homosapiens
MLDKSPIRYIPQVKTPLLLMLGQEDRRVPFKQGMEYYRALKTRNVPVRLLLYPKSTHALSEVEVESDSFMNAVLWLRTHLGS

SEQ ID NO: 1869 - DNA, 1062 bp, Homosapiens
tgggggccatccgggcaactcaccctggacagtcagcttgcggaatcggtgaggcacaactgcctgtctcccacagagaggagctgaggttgtgtcctctgtggttatcccactgggggctgggaatctatccctgcccccagaggtcctagccagaagatggcaggtctagcatctgtcccaggagtctgttacctgtcctaattccccactcctctaggcagggccagcatttctgcggggggtctctagtgaaggagcagtggatactgactgcccggcagtgcttctcctcctggtgagcctcccttgtgtttggggacccagtctcatcccaccttcccccttccccaggcaagctaacaagtgagccttggggcaatggactgagagtcacaaatgacctagcagagcttctctcccagccatatgcctctcacgggctatgaggtatggttgggcaccctgttccagaacccacagcatggagagccaagcctacagcgggtcccagtagccaagatggtgtgtgggccctcaggctcccagcttgtcctgctcaagctggagagatctgtgaccctgaaccagcgtgtggccctgatctgcctgccccctgaatggtatgtggtgcctccagggaccaagtgtgagattgcaggctggggtgagaccaaaggtacgggtaatgacacagtcctaaatgtggccttgctgaatgtcatctccaaccaggagtgtaacatcaagcaccgaggacgtgtgcgggagagtgagatgtgcactgagggactgttggcccctgtgggggcctgtgagggtgactacgggggcccacttgcctgctttacccacaactgctgggtcctggaaggaattataatccccaaccgagtatgcgcaaggtcccgctggccagctgtcttcacgcgtgtctctgtgtttgtggactggattcacaaggtcatgagactgggttaggcccagccttgatgccatatgccttggggaggacaaaacttcttgtcagacataaagccatgtttcctctttatgcctgta

SEQ ID NO: 1870 - protein, 183 aa, Homosapiens
MPLTGYEVWLGTLFQNPQHGEPSLQRVPVAKMVCGPSGSQLVLLKLERSVTLNQRVALICLPPEWYVVPPGTKCEIAGWGETKGTGNDTVLNVALLNVISNQECNIKHRGRVRESEMCTEGLLAPVGACEGDYGGPLACFTHNCWVLEGIIIPNRVCARSRWPAVFTRVSVFVDWIHKVMRLG

SEQ ID NO: 1871 - DNA, 3042 bp, Homosapiens
cagcctccgctaggggaccccctccatggcttcccaccgggttgttccaggcctcagcttcgccgaaaggcctcaccacctccgacctccgcctgctctggggatgctcccagccctgctgcggcagaacgcgacatgctaaccggaatccctaggccgcctgtctcctacccatacttagaggccccgctcagacggtccttaaaacgtctgaaaggccgttcctgccagagtccctgctacctgttacctccacccctatttagtcctagtggacagcctcgctcaccttccctgggatgacacttctggcggctgagatgagcgagcctctctgggctctgccgccgggtgtgggctgacctgcctacagctggggcctgataaggcagcagcaaaagggtggaggggaggcagtgttgaagctggggcaagtaattttccccaatttacagggaaaaaccgaaattcagaaaagtttaatgtcacccaggggctggagcccagacctctggcagctctcactttcacaatgcccttgggctgactaggctgcagaggggtttcaccccaaccccagggcacctcaagtgtccccaccaaaccttcctaacacctgtccactaagctgtactaggcccttgcaactgacctatgggacctgaggcctggcccctcatggctcctgtcaccaggtctcaggtcagggtccagcaggccctgagctgacgtgtggagccagagccacccaatcccgtagggacaggtttcacaacttcccggatggggctgtggtgggtcacagtgcagcctccagccagaaggatggggtggctcccactcctgctgcttctgactcaatgcttaggggtccctgggcagcgctcgccattgaatgacttccaagtgctccggggcacagagctacagcacctgctacatgcggtggtgcccgggccttggcaggaggatgtggcagatgctgaagagtgtgctggtcgctgtgggcccttaatggactgccgggccttccactacaacgtgagcagccatggttgccaactgctgccatggactcaacactcgccccacacgaggctgcggcgttctgggcgctgtgacctcttccagaagaaagactacgtacggacctgcatcatgaacaatggggttgggtaccggggcaccatggccacgaccgtgggtggcctgccctgccaggcttggagccacaagttcccaaatgatcacaagtacacgcccactctccggaatggcctggaagagaacttctgccgtaaccctgatggcgaccccggaggtccttggtgctacacaacagaccctgctgtgcgcttccagagctgcggcatcaaatcctgccgggaggccgcgtgtgtctggtgcaatggcgaggaataccgcggcgcggtagaccgcacggagtcagggcgcgagtgccagcgctgggatcttcagcacccgcaccagcaccccttcgagccgggcaagttcctcgaccaaggtctggacgacaactattgccggaatcctgacggctccgagcggccatggtgctacactacggatccgcagatcgagcgagagttctgtgacctcccccgctgcgggtccgaggcacagccccgccaagaggccacaactgtcagctgcttccgcgggaagggtgagggctaccggggcacagccaataccaccactgcgggcgtaccttgccagcgttgggacgcgcaaatcccgcatcagcaccgatttacgccagaaaaatacgcgtgcaaagaccttcgggagaacttctgccggaaccccgacggctcagaggcgccctggtgcttcacactgcggcccggcatgcgcgcggccttttgctaccagatccggcgttgtacagacgacgtgcggccccaggactgctaccacggcgcaggggagcagtaccgcggcacggtcagcaagacccgcaagggtgtccagtgccagcgctggtccgctgagacgccgcacaagccgcagttcacgtttacctccgaaccgcatgcacaactggaggagaacttctgccggaacccagatggggatagccatgggccctggtgctacacgatggacccaaggaccccattcgactactgtgccctgcgacgctgcgctgatgaccagccgccatcaatcctggaccccccagaccaggtgcagtttgagaagtgtggcaagagggtggatcggctggatcagcggcgttccaagctgcgcgtggttgggggccatccgggcaactcaccctggacagtcagcttgcggaatcggcagggccagcatttctgcggggggtctctagtgaaggagcagtggatactgactgcccggcagtgcttctcctcctgccatatgcctctcacgggctatgaggtatggttgggcaccctgttccagaacccacagcatggagagccaagcctacagcgggtcccagtagccaagatggtgtgtgggccctcaggctcccagcttgtcctgctcaagctggagagatctgtgaccctgaaccagcgtgtggccctgatctgcctgccccctgaatggtatgtggtgcctccagggaccaagtgtgagattgcaggctggggtgagaccaaaggtacgggtaatgacacagtcctaaatgtggccttgctgaatgtcatctccaaccaggagtgtaacatcaagcaccgaggacgtgtgcgggagagtgagatgtgcactgagggactgttggcccctgtgggggcctgtgagggtgactacgggggcccacttgcctgctttacccacaactgctgggtcctggaaggaattataatccccaaccgagtatgcgcaaggtcccgctggccagctgtcttcacgcgtgtctctgtgtttgtggactggattcacaaggtcatgagactgggttaggcccagccttgatgccatatgccttggggaggacaaaacttcttgtcagacataaagccatgtttcctctttatgcctgta

SEQ ID NO: 1872 - protein, 725 aa, Homosapiens
MGLWWVTVQPPARRMGWLPLLLLLTQCLGVPGQRSPLNDFQVLRGTELQHLLHAVVPGPWQEDVADAEECAGRCGPLMDCRAFHYNVSSHGCQLLPWTQHSPHTRLRRSGRCDLFQKKDYVRTCIMNNGVGYRGTMATTVGGLPCQAWSHKFPNDHKYTPTLRNGLEENFCRNPDGDPGGPWCYTTDPAVRFQSCGIKSCREAACVWCNGEEYRGAVDRTESGRECQRWDLQHPHQHPFEPGKFLDQGLDDNYCRNPDGSERPWCYTTDPQIEREFCDLPRCGSEAQPRQEATTVSCFRGKGEGYRGTANTTTAGVPCQRWDAQIPHQHRFTPEKYACKDLRENFCRNPDGSEAPWCFTLRPGMRAAFCYQIRRCTDDVRPQDCYHGAGEQYRGTVSKTRKGVQCQRWSAETPHKPQFTFTSEPHAQLEENFCRNPDGDSHGPWCYTMDPRTPFDYCALRRCADDQPPSILDPPDQVQFEKCGKRVDRLDQRRSKLRVVGGHPGNSPWTVSLRNRQGQHFCGGSLVKEQWILTARQCFSSCHMPLTGYEVWLGTLFQNPQHGEPSLQRVPVAKMVCGPSGSQLVLLKLERSVTLNQRVALICLPPEWYVVPPGTKCEIAGWGETKGTGNDTVLNVALLNVISNQECNIKHRGRVRESEMCTEGLLAPVGACEGDYGGPLACFTHNCWVLEGIIIPNRVCARSRWPAVFTRVSVFVDWIHKVMRLG

SEQ ID NO: 1873 - DNA, 648 bp, Homosapiens
gggtgagacgggaggaaggtagtcacgggctcaaggctggaggctggcgggctagggctgagtggagcgcctgcttagagaccttcgggagaacttctgccggaaccccgacggctcagaggcgccctggtgcttcacactgcggcccggcatgcgcgcggccttttgctaccagatccggcgttgtacagacgacgtgcggccccagggtgaggcccaagcttgggggctacagagccgggctggaagcctggaaccggagggccggggcgaggtctcggcctgatggctgcccgcacccgccacagactgctaccacggcgcaggggagcagtaccgcggcacggtcagcaagacccgcaagggtgtccagtgccagcgctggtccgctgagacgccgcacaagccgcagttcacgtttacctccgaaccgcatgcacaactggaggagaacttctgccggaacccagatggggatagccatgggccctggtgctacacgatggacccaaggaccccattcgactactgtgccctgcgacgctgcgctgatgaccagccgccatcaatcctggaccccccaggttaggagttgggccagttatgggtcaggccctttagcccacgacatccacacagtctgggttt

SEQ ID NO: 1874 - protein, 70 aa, Homosapiens
MHNWRRTSAGTQMGIAMGPGATRWTQGPHSTTVPCDAALMTSRHQSWTPQVRSWASYGSGPLAHDIHTVW

SEQ ID NO: 1875 - DNA, 341 bp, Homosapiens
ttcgggagaacttctgccggaaccccgacggctcagaggcgccctggtgcttcacactgcggcccggcatgcgcgcggccttttgctaccagatccggcgttgtacagacgacgtgcggccccaggactgctaccacggcgcaggggagcagtaccgcggcacggtcagcaagacccgcaagggtgtccagtgccagcgctggtccgctgagacgccgcacaagccgcagtgagtccctggtgctcccggccccgccagggccctaaccctggggcggcatgctttggtgtctgggaccagagcctggaaatggttgagactaccctgccacgattttgct

SEQ ID NO: 1876 - protein, 54 aa, Homosapiens
MRAAFCYQIRRCTDDVRPQDCYHGAGEQYRGTVSKTRKGVQCQRWSAETPHKPQ

SEQ ID NO: 1877 - DNA, 769 bp, Homosapiens
ccagagtcccagggtcttgttcacgccccattaccgcccccaggttcctcgaccaaggtctggacgacaactattgccggaatcctgacggctccgagcggccatggtgctacactacggatccgcagatcgagcgagagttctgtgacctcccccgctgcgggtccgaggcacagccccgccaagaggccacaactgtcagctgcttccgcgggaagggtgagggctaccggggcacagccaataccaccactgcgggcgtaccttgccagcgttgggacgcgcaaatcccgcatcagcaccgatttacgccagaaaaatacgcgtgcaagtgaggtggggggggggggcgggcgttgggacgtgctgctgcgggtgagacgggaggaaggtagtcacgggctcaaggctggaggctggcgggctagggctgagtggagcgcctgcttagagaccttcgggagaacttctgccggaaccccgacggctcagaggcgccctggtgcttcacactgcggcccggcatgcgcgcggccttttgctaccagatccggcgttgtacagacgacgtgcggccccagggtgaggcccaagcttgggggctacagagccgggctggaagcctggaaccggagggccggggcgaggtctcggcctgatggctgcccgcacccgccacagactgctaccacggcgcaggggagcagtaccgcggcacggtcagcaagacccgcaagggtgtccagtgccagcgctggtccgctgagac

SEQ ID NO: 1878 - protein, 44 aa, Homosapiens
MRAAFCYQIRRCTDDVRPQGEAQAWGLQSRAGSLEPEGRGEVSA

SEQ ID NO: 1879 - DNA, 4619 bp, Homosapiens
ggaggctcagcgcgcaagcgtgcgcgtgatttggccctgaacggacgccgtagccaagaggttgggcggatgttgtgagccgggtcgctgcggccgaggctccggcccccaggaccactggctgcccatgagagatgaaggatggcatccaagggggccggcatgtctttctcccgcaagagctataggctgacctcagatgctgagaaatccagggtcacaggcattgtgcaggagaagctgctgaatgactacctgaaccgcatcttttcctcttctgaacatgcacccccagcagccaccagcaggaaacccctgaacttccagaacctgccagaacatttggaccagttgctacaggtggacaatgaggaggaggaaagccagggacaggttgaagggcggcttggcccatccactgtggtcctggaccacacaggcggctttgaggggcttctcctggtggatgatgacctgctgggggtgattggacacagcaactttggcaccatccgctctaccacatgcgtgtacaaagggaaatggctctacgaggtcctcatctcctcccaggggctcatgcagatcggctggtgcaccatcagctgccgcttcaaccaggaggagggggttggagatacacacaactcctatgcctatgatggcaaccgcgtgcgcaagtggaatgtgaccacaacgaattatggcaaggcgtgggcagcgggggacatcgtgagctgcctgattgacctggatgatggcactctgtccttctgcctgaacggtgtatcactgggcactgcctttgagaacctgtccaggggcctgggtatggcctacttcccagccatcagcctctctttcaaggagtccgtggccttcaactttggcagccgtcctctgcgctacccagtggcaggctaccggcccctgcaggacccaccgagtgctgacctggtgcgggcacagaggttgctgggctgcttccgggcagtgctgagtgtggagctggaccctgtggaggggcggctgttggacaaggagagctccaagtggcggttgcggggccagcccaccgtcctcctcacactggcccacatcttccatcactttgcaccgcttctgcgcaaggtgtatctggtggaggctgtgctcatgagcttcttgctgggcatcgtggagaagggcacacccacacaggcacagtccgtggtgcaccaggtcctggacctcttgtggctcttcatggaggactacgaggtacaagattgcctcaagcagttgatgatgtctctgcttcggctgtaccgattctcacccattgtcccagacctgggcctacagatccattacctgcggctcactatcgccatcctgaggcatgagaagtcccgcaagtttctgcttagcaatgtcctcttcgacgtgctccgctccgtcgtcttcttttacatcaagagccccctgcgtgtggaggaggccggcctgcaggagctcattcccaccacctggtggccccactgctccagtagggagggcaaagagagcacggagatgaaggaggagaccgcagaggagcggctgcggcggcgagcctacgaacggggctgtcagcggctcaggaagcgcatcgaagtggtggaagaactacaggtccagatcctgaagctgctgctggacaataaagatgacaatgggggtgaagcttctaggtatatcttcctgaccaagtttcgcaagtttctgcaggagaacgccagtggccgggggaacatgcccatgctctgcccccctgagtacatggtctgcttcttacaccggctgatctctgccctgcgctactattgggatgaatacaaggcttccaatcctcatgcttccttcagtgaggaggcctacatcccgccccaggtcttctataatggcaaggtggactactttgacctgcagcgcctggggggcctcctctcgcacctgcggaagaccctcaaagatgaccttgcttccaaagccaacattgtgatcgacccactggagctccagtcaaccgccatggatgacctagatgaggatgaggagccagccccagctatggcccaggtgccgcagtgggggcaggcggtgggatttgtgttgggcttatcctgtatcttatgggcaggggtctcatccagggccacttcccgctccatgcaggcaaagggtttctcactgggctggtgccttgctgtgggtggaggcatggaccctccctcacaattctgcagccccgtgggccaagggaaccctgagccagccctggtcctggccgcctttcttcactgcagcgccccatgcaggccctggctgttggggggccactgcccctgccccggcccggctggctcagttctccaactttgggccgagccaaccgcttcctcagcacagcggctgtgagcctcatgaccccacggcggcctctgagcacctcggagaaagtgaaggtccgcacgctgagcgtggagcagaggacccgtgaggacattgaaggcagccactggaatgagggcttgctgctggggcggccccccgaggagcctgagcagcccctcaccgagaactcgctgctggaagtcctggatggggcggtcatgatgtacaacctcagcgtacaccagcagctgggcaagatggtgggtgtctccgatgatgtcaatgaatacgctatggctctgagggacacagaggacaagctccgccggtgccccaagaggaggaaggacatccttgcagagttgaccaagagccagaaggttttctcagaaaagctggaccacctgagccgccgtcttgcctgggtccatgccactgtctactcccaggagaagatgctggacatctactggctgctgcgcgtctgcctgcggaccattgagcacggtgatcgcacagggtctctctttgccttcatgcccgagttctacctgagcgtggccatcaacagctacagtgctctcaagaattactttggtcccgtgcacagcatggaggagctcccaggctatgaagagaccctgacccgcctggctgccattctcgccaaacactttgccgacgcacgcattgtgggcactgacatccgagactcactgatgcaggccctggccagctacgtgtgctacccacactccctgcgggctgtggagcgaatccccgaggagcagcgtatcgccatggtgaggaacctcctggcgccctatgagcagcggccctgggcccagaccaactggatcctggtgcggctctggaggggctgtggcttcgggtaccgctatacacggctgccacatctgctgaaaaccaaacttgaggacgccaatttgcccagcctccagacctcaatgggcgaggacagaggcaaacaggcagaggccactgcagtggagtccctgatgatgccgcctcctgtccccctgcagagccctgcccttccaccctgctgcagcagcacatggcggacctcctacagcagggtcctgatgtggcacccagcttcctcaacagcgtcctcaatcagctcaactgggccttctctgaattcattggcatgatccaagagatccagcaggctgctgagcgcctggagcggaactttgtggacagccggcagctcaaggtatgtgccacctgctttgacctctcggtcagcctgctgcgtgtcttggagatgactatcacactggtgcctgagatattccttgactggacccggcctacctctgagatgctgctgcggcgtcttgcacagctgctaaaccaggtgctgaaccgggtgacagctgagaggaacctgtttgatcgtgtggtcaccctacggctgcctggcctagagagcgtggaccactatcccattctggtggcagtgacgggcatcctggtgcagctcctggtgcgtggcccagcctcagagagagagcaagccacatcagtgctcctggcagatccctgcttccagctacgctcaatatgctatctcctgggacagccagagcccccagcacctggcactgctctgccagcccctgaccggaagcgcttctccctgcagagctatgcggattatatcagtgccgatgagctggcccaagtggaacagatgctggcgcacctgacctctgcatctgcccaggcagcagctgcctccctgcccaccagtgaggaggacctctgccccatctgctatgcccaccccatctctgctgtgttccagccctgtggccacaagtcctgcaaagcctgtatcaaccagcacctgatgaacaacaaggactgcttcttctgcaaaaccaccatcgtgtctgtagaggactgggagaagggagccaatacgagtactacctcctcagctgcctagccctcacagcctgtgccatcctggaacctccacctttgaacccagagccaggctgggccctatttatgagctccctttgcccttctcctgtatcccacaccaccacatccaacctccttgcctgcctgtatcctcattggtgggagcccagccatggccctaattgtgcctgagcttgactttcagtcagggccacagtgagcattaaattattattccatac

SEQ ID NO: 1880 - protein, 765 aa, Homosapiens
MASKGAGMSFSRKSYRLTSDAEKSRVTGIVQEKLLNDYLNRIFSSSEHAPPAATSRKPLNFQNLPEHLDQLLQVDNEEEESQGQVEGRLGPSTVVLDHTGGFEGLLLVDDDLLGVIGHSNFGTIRSTTCVYKGKWLYEVLISSQGLMQIGWCTISCRFNQEEGVGDTHNSYAYDGNRVRKWNVTTTNYGKAWAAGDIVSCLIDLDDGTLSFCLNGVSLGTAFENLSRGLGMAYFPAISLSFKESVAFNFGSRPLRYPVAGYRPLQDPPSADLVRAQRLLGCFRAVLSVELDPVEGRLLDKESSKWRLRGQPTVLLTLAHIFHHFAPLLRKVYLVEAVLMSFLLGIVEKGTPTQAQSVVHQVLDLLWLFMEDYEVQDCLKQLMMSLLRLYRFSPIVPDLGLQIHYLRLTIAILRHEKSRKFLLSNVLFDVLRSVVFFYIKSPLRVEEAGLQELIPTTWWPHCSSREGKESTEMKEETAEERLRRRAYERGCQRLRKRIEVVEELQVQILKLLLDNKDDNGGEASRYIFLTKFRKFLQENASGRGNMPMLCPPEYMVCFLHRLISALRYYWDEYKASNPHASFSEEAYIPPQVFYNGKVDYFDLQRLGGLLSHLRKTLKDDLASKANIVIDPLELQSTAMDDLDEDEEPAPAMAQVPQWGQAVGFVLGLSCILWAGVSSRATSRSMQAKGFSLGWCLAVGGGMDPPSQFCSPVGQGNPEPALVLAAFLHCSAPCRPWLLGGHCPCPGPAGSVLQLWAEPTASSAQRL

SEQ ID NO: 1881 - DNA, 4309 bp, Homosapiens
ggaggctcagcgcgcaagcgtgcgcgtgatttggccctgaacggacgccgtagccaagaggttgggcggatgttgtgagccgggtcgctgcggccgaggctccggcccccaggaccactggctgcccatgagagatgaaggatggcatccaagggggccggcatgtctttctcccgcaagagctataggctgacctcagatgctgagaaatccagggtcacaggcattgtgcaggagaagctgctgaatgactacctgaaccgcatcttttcctcttctgaacatgcacccccagcagccaccagcaggaaacccctgaacttccagaacctgccagaacatttggaccagttgctacaggtggacaatgaggaggaggaaagccagggacaggttgaagggcggcttggcccatccactgtggtcctggaccacacaggcggctttgaggggcttctcctggtggatgatgacctgctgggggtgattggacacagcaactttggcaccatccgctctaccacatgcgtgtacaaagggaaatggctctacgaggtcctcatctcctcccaggggctcatgcagatcggctggtgcaccatcagctgccgcttcaaccaggaggagggggttggagatacacacaactcctatgcctatgatggcaaccgcgtgcgcaagtggaatgtgaccacaacgaattatggcaaggcgtgggcagcgggggacatcgtgagctgcctgattgacctggatgatggcactctgtccttctgcctgaacggtgtatcactgggcactgcctttgagaacctgtccaggggcctgggtatggcctacttcccagccatcagcctctctttcaaggagtccgtggccttcaactttggcagccgtcctctgcgctacccagtggcaggctaccggcccctgcaggacccaccgagtgctgacctggtgcgggcacagaggttgctgggctgcttccgggcagtgctgagtgtggagctggaccctgtggaggggcggctgttggacaaggagagctccaagtggcggttgcggggccagcccaccgtcctcctcacactggcccacatcttccatcactttgcaccgcttctgcgcaaggtgtatctggtggaggctgtgctcatgagcttcttgctgggcatcgtggagaagggcacacccacacaggcacagtccgtggtgcaccaggtcctggacctcttgtggctcttcatggaggactacgaggtacaagattgcctcaagcagttgatgatgtctctgcttcggctgtaccgattctcacccattgtcccagacctgggcctacagatccattacctgcggctcactatcgccatcctgaggcatgagaagtcccgcaagtttctgcttagcaatgtcctcttcgacgtgctccgctccgtcgtcttcttttacatcaagagccccctgcgtgtggaggaggccggcctgcaggagctcattcccaccacctggtggccccactgctccagtagggagggcaaagagagcacggagatgaaggaggagaccgcagaggagcggctgcggcggcgagcctacgaacggggctgtcagcggctcaggaagcgcatcgaagtggtggaagaactacaggtccagatcctgaagctgctgctggacaataaagatgacaatgggggtgaagcttctaggtatatcttcctgaccaagtttcgcaagtttctgcaggagaacgccagtggccgggggaacatgcccatgctctgcccccctgagtacatggtctgcttcttacaccggctgatctctgccctgcgctactattgggatgaatacaaggcttccaatcctcatgcttccttcagtgaggaggcctacatcccgccccaggtcttctataatggcaaggtggactactttgacctgcagcgcctggggggcctcctctcgcacctgcggaagaccctcaaagatgaccttgcttccaaagccaacattgtgatcgacccactggagctccagtcaaccgccatggatgacctagatgaggatgaggagccagccccagctatggcccagcgccccatgcaggccctggctgttggggggccactgcccctgccccggcccggctggctcagttctccaactttgggccgagccaaccgcttcctcagcacagcggctgtgagcctcatgaccccacggcggcctctgagcacctcggagaaagtgaaggtccgcacgctgagcgtggagcagaggacccgtgaggacattgaaggcagccactggaatgagggcttgctgctggggcggccccccgaggagcctgagcagcccctcaccgagaactcgctgctggaagtcctggatggggcggtcatgatgtacaacctcagcgtacaccagcagctgggcaagatggtgggtgtctccgatgatgtcaatgaatacgctatggctctgagggacacagaggacaagctccgccggtgccccaagaggaggaaggacatccttgcagagttgaccaagagccagaaggttttctcagaaaagctggaccacctgagccgccgtcttgcctgggtccatgccactgtctactcccaggagaagatgctggacatctactggctgctgcgcgtctgcctgcggaccattgagcacggtgatcgcacagggtctctctttgccttcatgcccgagttctacctgagcgtggccatcaacagctacagtgctctcaagaattactttggtcccgtgcacagcatggaggagctcccaggctatgaagagaccctgacccgcctggctgccattctcgccaaacactttgccgacgcacgcattgtgggcactgacatccgagactcactgatgcaggccctggccagctacgtgtgctacccacactccctgcgggctgtggagcgaatccccgaggagcagcgtatcgccatggtgaggaacctcctggcgccctatgagcagcggccctgggcccagaccaactggatcctggtgcggctctggaggggctgtggcttcgggtaccgctatacacggctgccacatctgctgaaaaccaaacttgaggacgccaatttgcccagcctccagaagccctgcccttccaccctgctgcagcagcacatggcggacctcctacagcagggtcctgatgtggcacccagcttcctcaacagcgtcctcaatcagctcaactgggccttctctgaattcattggcatgatccaagagatccagcaggctgctgagcgcctggagcggaactttgtggacagccggcagctcaaggtatgtgccacctgctttgacctctcggtcagcctgctgcgtgtcttggagatgactatcacactggtgcctgagatattccttgactggacccggcctacctctgagatgctgctgcggcgtcttgcacagctgctaaaccaggtgctgaaccgggtgacagctgagaggaacctgtttgatcgtgtggtcaccctacggctgcctggcctagagagcgtggaccactatcccattctggtggcagtgacgggcatcctggtgcagctcctggtgcgtggcccagcctcagagagagagcaagccacatcagtgctcctggcagatccctgcttccagctacgctcaatatgctatctcctgggacagccagagcccccagcacctggcactgctctgccagcccctgaccggaagcgcttctccctgcagagctatgcggattatatcagtgccgatgagctggcccaagtggaacagatgctggcgcacctgacctctgcatctgcccaggcagcagctgcctccctgcccaccagtgaggaggacctctgccccatctgctatgcccaccccatctctgctgtgttccagccctgtggccacaagtcctgcaaagcctgtatcaaccagcacctgatgaacaacaaggactgcttcttctgcaaaaccaccatcgtgtctgtagaggactgggagaagggagccaatacgagtactacctcctcagctgcctagccctcacagcctgtgccatcctggaacctccacctttgaacccagagccaggctgggccctatttatgagctccctttgcccttctcctgtatcccacaccaccacatccaacctccttgcctgcctgtatcctcattggtgggagcccagccatggccctaattgtgcctgagcttgactttcagtcagggccacagtgagcattaaattattattccatac

SEQ ID NO: 1882 - protein, 1314 aa, Homosapiens; identical to SEQ ID NO: 149

SEQ ID NO: 1883 - DNA, 4643 bp, Homosapiens
ggaggctcagcgcgcaagcgtgcgcgtgatttggccctgaacggacgccgtagccaagaggttgggcggatgttgtgagccgggtcgctgcggccgaggctccggcccccaggaccactggctgcccatgagagatgaaggatggcatccaagggggccggcatgtctttctcccgcaagagctataggctgacctcagatgctgagaaatccagggtcacaggcattgtgcaggagaagctgctgaatgactacctgaaccgcatcttttcctcttctgaacatgcacccccagcagccaccagcaggaaacccctgaacttccagaacctgccagaacatttggaccagttgctacaggtggacaatgaggaggaggaaagccagggacaggttgaagggcggcttggcccatccactgtggtcctggaccacacaggcggctttgaggggcttctcctggtggatgatgacctgctgggggtgattggacacagcaactttggcaccatccgctctaccacatgcgtgtacaaagggaaatggctctacgaggtcctcatctcctcccaggggctcatgcagatcggctggtgcaccatcagctgccgcttcaaccaggaggagggggttggagatacacacaactcctatgcctatgatggcaaccgcgtgcgcaagtggaatgtgaccacaacgaattatggcaaggcgtgggcagcgggggacatcgtgagctgcctgattgacctggatgatggcactctgtccttctgcctgaacggtgtatcactgggcactgcctttgagaacctgtccaggggcctgggtatggcctacttcccagccatcagcctctctttcaaggagtccgtggccttcaactttggcagccgtcctctgcgctacccagtggcaggctaccggcccctgcaggacccaccgagtgctgacctggtgcgggcacagaggttgctgggctgcttccgggcagtgctgagtgtggagctggaccctgtggaggggcggctgttggacaaggagagctccaagtggcggttgcggggccagcccaccgtcctcctcacactggcccacatcttccatcactttgcaccgcttctgcgcaaggtgtatctggtggaggctgtgctcatgagcttcttgctgggcatcgtggagaagggcacacccacacaggcacagtccgtggtgcaccaggtcctggacctcttgtggctcttcatggaggactacgaggtacaagattgcctcaagcagttgatgatgtctctgcttcggctgtaccgattctcacccattgtcccagacctgggcctacagatccattacctgcggctcactatcgccatcctgaggcatgagaagtcccgcaagtttctgcttagcaatgtcctcttcgacgtgctccgctccgtcgtcttcttttacatcaagagccccctgcgtgtggaggaggccggcctgcaggagctcattcccaccacctggtggccccactgctccagtagggagggcaaagagagcacggagatgaaggaggagaccgcagaggagcggctgcggcggcgagcctacgaacggggctgtcagcggctcaggaagcgcatcgaagtggtggaagaactacaggtccagatcctgaagctgctgctggacaataaagatgacaatgggggtgaagcttctaggtatatcttcctgaccaagtttcgcaagtttctgcaggagaacgccagtggccgggggaacatgcccatgctctgcccccctgagtacatggtctgcttcttacaccggctgatctctgccctgcgctactattgggatgaatacaaggcttccaatcctcatgcttccttcagtgaggaggcctacatcccgccccaggtcttctataatggcaaggtggactactttgacctgcagcgcctggggggcctcctctcgcacctgcggaagaccctcaaagatgaccttgcttccaaagccaacattgtgatcgacccactggagctccagtcaaccgccatggatgacctagatgaggatgaggagccagccccagctatggcccagcgccccatgcaggccctggctgttggggggccactgcccctgccccggcccggctggctcagttctccaactttgggccgagccaaccgcttcctcagcacagcggctgtgagcctcatgaccccacggcggcctctgagcacctcggagaaagtgaaggtccgcacgctgagcgtggagcagaggacccgtgaggacattgaaggcagccactggaatgagggcttgctgctggggcggccccccgaggagcctgagcagcccctcaccgagaactcgctgctggaagtcctggatggggcggtcatgatgtacaacctcagcgtacaccagcagctgggcaagatggtgggtgtctccgatgatgtcaatgaatacgctatggctctgagggacacagaggacaagctccgccggtgccccaagaggaggaaggacatccttgcagagttgaccaagagccagaaggttttctcagaaaagctggaccacctgagccgccgtcttgcctgggtccatgccactgtctactcccaggagaagatgctggacatctactggctgctgcgcgtctgcctgcggaccattgagcacggtgatcgcacagggtctctctttgccttcatgcccgagttctacctgagcgtggccatcaacagctacagtgctctcaagaattactttggtcccgtgcacagcatggaggagctcccaggctatgaagagaccctgacccgcctggctgccattctcgccaaacactttgccgacgcacgcattgtgggcactgacatccgagactcactgatgcaggccctggccagctacgtgtgctacccacactccctgcgggctgtggagcgaatccccgaggagcagcgtatcgccatggtgaggaacctcctggcgccctatgagcagcggccctgggcccagaccaactggatcctggtgcggctctggaggggctgtggcttcgggtaccgctatacacggctgccacatctgctgaaaaccaaacttgaggacgccaatttgcccagcctccagaagccctgcccttccaccctgctgcagcagcacatggcggacctcctacagcagggtcctgatgtggcacccagcttcctcaacagcgtcctcaatcagctcaactgggccttctctgaattcattggcatgatccaagagatccagcaggctgctgagcgcctggagcggaactttgtggacagccggcagctcaaggtatgtgccacctgctttgacctctcggtcagcctgctgcgtgtcttggagatgactatcacactggtgcctgagatattccttgactggacccggcctacctctgagatgctgctgcggcgtcttgcacagctgctaaaccaggtgctgaaccgggtgacagctgagaggaacctgtttgatcgtgtggtcaccctacggctgcctggcctagagagcgtggaccactatcccattctggtggcagtgacgggcatcctggtgcagctcctggtgcgtggcccagcctcagagagagagcaagccacatcagtgctcctggcagatccctgcttccagctacgctcaatatgctatctcctgggacagccagagcccccagcacctggcactgctctgccagcccctgaccggaagcgcttctccctgcagagctatgcggattatatcagtgccgatgagctggcccaagtggaacagatgctggcgcacctgacctctgcatctgcccaggcagcagctgcctccctgcccaccagtgaggaggacctctgccccatctgctatgcccaccccatctctgctgtgttccagccctgtggccacaagtcctgcaaagcctgtatcaaccagcacctgatgaacaacaaggactgcttcttctgcaaaaccaccatcgtgtctgtagaggactgggagaagggagccaatacgagtactacctcctcagctgcctagccctcacagcctgtgccatcctggaacctccacctttgaacccagagccaggctgggccctatttatgagctccctttgcccttctcctgtatcccacaccaccacatccaacctccttgcctgcctgtatcctcattggtgggagcccagccatggccctaattgtgcctgagcttgactttcagtcagggccacagtgagcattaaattattattccatacagccctggccctggcccttcttgagggagtggggtttgtggggtgtgcccagcagggatcctgccagatgatgtccacatgagaaggcaggtgtccaacagcttcagcttcacccagtgccccccagacaaataatgacaagtccagggtcttctgatgtgtcaggccagcactccccttgctgatgggaaaaccggggctcggccagccccactgcatcccctcacatgatgatacgaggctctggcactgactcgccaatagacttgtggggcagcacgctggctccgttgaggtagagctcatcattaactatgacgtcctcacccagcac

SEQ ID NO: 1884 - protein, 1314 aa, Homosapiens; identical to SEQ ID NO: 149

SEQ ID NO: 1885 - DNA, 4019 bp, Homosapiens
aagaggttgggcggatgttgtgagccgggtcgctgcggccgaggctccggcccccaggaccactggctgcccatgagagatgaaggatggcatccaagggggccggcatgtctttctcccgcaagagctataggctgacctcagatgctgagaaatccagggtcacaggcattgtgcaggagaagctgctgaatgactacctgaaccgcatcttttcctcttctgaacatgcacccccagcagccaccagcaggaaacccctgaacttccagaacctgccagaacatttggaccagttgctacaggtggacaatgaggaggaggaaagccagggacaggttgaagggcggcttggcccatccactgtggtcctggaccacacaggcggctttgaggggcttctcctggtggatgatgacctcctcatgcttccttcagtgaggaggcctacatcccgccccaggtcttctataatggcaaggtggactactttgacctgcagcgcctggggggcctcctctcgcacctgcggaagaccctcaaagatgaccttgcttccaaagccaacattgtgatcgacccactggagctccagtcaaccgccatggatgacctagatgaggatgaggagccagccccagctatggcccagcgccccatgcaggccctggctgttggggggccactgcccctgccccggcccggctggctcagttctccaactttgggccgagccaaccgcttcctcagcacagcggctgtgagcctcatgaccccacggcggcctctgagcacctcggagaaagtgaaggtccgcacgctgagcgtggagcagaggacccgtgaggacattgaaggcagccactggaatgagggcttgctgctggggcggccccccgaggagcctgagcagcccctcaccgagaactcgctgctggaagtcctggatggggcggtcatgatgtacaacctcagcgtacaccagcagctgggcaaggtcgtgcactcttggaccccgcattgggtggcgggtgttgtgcgtgtttggttgtgtgtgtattcctgtgtgcacatgggcccgcagggctgcctgttcaagaccgtgcatgggagcacatgcctcagcgaggctggtttctgctcctgctgcctcagtctgacctgctgactgttgtgggaatgggaccgccctgggcctaaggttgggaccttggcagggctggggtccagactgggtctgaagaagcctggatgaagtgcccaaggggcactctggacatgtggtcccatgctgtgtagatggtgggtgtctccgatgatgtcaatgaatacgctatggctctgagggacacagaggacaagctccgccggtgccccaagaggaggaaggacatccttgcagagttgaccaagagccagaaggttttctcagaaaagctggaccacctgagccgccgtcttgcctgggtccatgccactgtctactcccaggagaagatgctggacatctactggctgctgcgcgtctgcctgcggaccattgagcacggtgatcgcacagggtctctctttgccttcatgcccgagttctacctgagcgtggccatcaacagctacagtgctctcaagaattactttggtcccgtgcacagcatggaggagctcccaggtgatggaaccattcaggctgaggcagaagcagaaaaggggtctctagtgtgagccctaggagccctggtctgagacctctgtggcccagcaacacacttctgtggggggcggggaggggaggagcttcctctgtggttcaccctgcagcaaacaaacgtctgcaccctgccctgggacctgcagccacagagccaacagctccctagcaaaggaaaacagacaagatggaacacggtgggtgtagacctcttggctttcacttccttcctagtgctatgagcaactgccatggtccaggagccagctggccttgcaccttgactccctggcactggtcacaaagcgtagcagttggtcaggggcagaatggtttgtcttggtaaatcacagcagggggtggaccctgctagggtccacatccgaacctgggcctctcagcctgctgattccaggctgggcgtggcagtgtatgtctggatcaggcagtgagctgtcaggcccctagcctgccccctgcccagccacaggcctcagtgcaggctttgtcttcaaagacagagctgtgagtgcccaaggagctttgactgctcatcaggtgtgtgtgctgagatgggtttgagcccaggtcagggctcctgccagggcctgtcatcccttcacagtgagcctgtgccttagcccttgcacagccaccaatgaatgctttgcccgatgtccccagatgccaccctgggtccaggctggccttgggagccagctctagagcctgctacccaagtccacccaccctgctgacatgcctgcctctggagcccccactcccagccgacacgtctcacttcccacccttgcaggctatgaagagaccctgacccgcctggctgccattctcgccaaacactttgccgacgcacgcattgtgggcactgacatccgagactcactgatgcaggccctggccagctacgtgtgctacccacactccctgcgggctgtggagcgaatccccgaggagcagcgtatcgccatggtgaggaacctcctggcgccctatgagcagcggccctgggcccagaccaactggatcctggtgcggctctggaggggctgtggcttcgggtaccgctatacacggctgccacatctgctgaaaaccaaacttgaggacgccaatttgcccagcctccagaagccctgcccttccaccctgctgcagcagcacatggcggacctcctacagcagggtcctgatgtggcacccagcttcctcaacagcgtcctcaatcagctcaactgggccttctctgaattcattggcatgatccaagagatccagcaggctgctgagcgcctggagcggaactttgtggacagccggcagctcaaggtatgtgccacctgctttgacctctcggtcagcctgctgcgtgtcttggagatgactatcacactggtgcctgagatattccttgactggacccggcctacctctgagatgctgctgcggcgtcttgcacagctgctaaaccaggtgctgaaccgggtgacagctgagaggaacctgtttgatcgtgtggtcaccctacggctgcctggcctagagagcgtggaccactatcccattctggtggcagtgacgggcatcctggtgcagctcctggtgcgtggcccagcctcagagagagagcaagccacatcagtgctcctggcagatccctgcttccagctacgctcaatatgctatctcctgggacagccagagcccccagcacctggcactgctctgccagcccctgaccggaagcgcttctccctgcagagctatgcggattatatcagtgccgatgagctggcccaagtggaacagatgctggcgcacctgacctctgcatctgcccaggcagcagctgcctccctgcccaccagtgaggaggacctctgccccatctgctatgcccaccccatctctgctgtgttccagccctgtggccacaagtcctgcaaagcctgtatcaaccagcacctgatgaacaacaaggactgcttcttctgcaaaaccaccatcgtgtctgtagaggactgggagaagggagccaatacgagtactacctcctcagctgcctagccctcacagcctgtgccatcctggaacctccacctttgaacccagagccaggctgggccctatttatgagctccctttgcccttctcctgtatcccacaccaccacatccaacctccttgcctgcctgtatcctcattggtgggagcccagccatggccctaattgtgcctgagcttgactttcagtcagggccacagtgagcattaaattattattccatac

SEQ ID NO: 1886 - protein, 442 aa, Homosapiens
MPASGAPTPSRHVSLPTLAGYEETLTRLAAILAKHFADARIVGTDIRDSLMQALASYVCYPHSLRAVERIPEEQRIAMVRNLLAPYEQRPWAQTNWILVRLWRGCGFGYRYTRLPHLLKTKLEDANLPSLQKPCPSTLLQQHMADLLQQGPDVAPSFLNSVLNQLNWAFSEFIGMIQEIQQAAERLERNFVDSRQLKVCATCFDLSVSLLRVLEMTITLVPEIFLDWTRPTSEMLLRRLAQLLNQVLNRVTAERNLFDRVVTLRLPGLESVDHYPILVAVTGILVQLLVRGPASEREQATSVLLADPCFQLRSICYLLGQPEPPAPGTALPAPDRKRFSLQSYADYISADELAQVEQMLAHLTSASAQAAAASLPTSEEDLCPICYAHPISAVFQPCGHKSCKACINQHLMNNKDCFFCKTTIVSVEDWEKGANTSTTSSAA

SEQ ID NO: 1887 - DNA, 4353 bp, Homosapiens
aagaggttgggcggatgttgtgagccgggtcgctgcggccgaggctccggcccccaggaccactggctgcccatgagagatgaaggatggcatccaagggggccggcatgtctttctcccgcaagagctataggctgacctcagatgctgagaaatccagggtcacaggcattgtgcaggagaagctgctgaatgactacctgaaccgcatcttttcctcttctgaacatgcacccccagcagccaccagcaggaaacccctgaacttccagaacctgccagaacatttggaccagttgctacaggtggacaatgaggaggaggaaagccagggacaggttgaagggcggcttggcccatccactgtggtcctggaccacacaggcggctttgaggggcttctcctggtggatgatgacctcctcatgcttccttcagtgaggaggcctacatcccgccccaggtcttctataatggcaaggtggactactttgacctgcagcgcctggggggcctcctctcgcacctgcggaagaccctcaaagatgaccttgcttccaaagccaacattgtgatcgacccactggagctccagtcaaccgccatggatgacctagatgaggatgaggagccagccccagctatggcccagcgccccatgcaggccctggctgttggggggccactgcccctgccccggcccggctggctcagttctccaactttgggccgagccaaccgcttcctcagcacagcggctgtgagcctcatgaccccacggcggcctctgagcacctcggagaaagtgaaggtccgcacgctgagcgtggagcagaggacccgtgaggacattgaaggcagccactggaatgagggcttgctgctggggcggccccccgaggagcctgagcagcccctcaccgagaactcgctgctggaagtcctggatggggcggtcatgatgtacaacctcagcgtacaccagcagctgggcaaggtcgtgcactcttggaccccgcattgggtggcgggtgttgtgcgtgtttggttgtgtgtgtattcctgtgtgcacatgggcccgcagggctgcctgttcaagaccgtgcatgggagcacatgcctcagcgaggctggtttctgctcctgctgcctcagtctgacctgctgactgttgtgggaatgggaccgccctgggcctaaggttgggaccttggcagggctggggtccagactgggtctgaagaagcctggatgaagtgcccaaggggcactctggacatgtggtcccatgctgtgtagatggtgggtgtctccgatgatgtcaatgaatacgctatggctctgagggacacagaggacaagctccgccggtgccccaagaggaggaaggacatccttgcagagttgaccaagagccagaaggttttctcagaaaagctggaccacctgagccgccgtcttgcctgggtccatgccactgtctactcccaggagaagatgctggacatctactggctgctgcgcgtctgcctgcggaccattgagcacggtgatcgcacagggtctctctttgccttcatgcccgagttctacctgagcgtggccatcaacagctacagtgctctcaagaattactttggtcccgtgcacagcatggaggagctcccaggtgatggaaccattcaggctgaggcagaagcagaaaaggggtctctagtgtgagccctaggagccctggtctgagacctctgtggcccagcaacacacttctgtggggggcggggaggggaggagcttcctctgtggttcaccctgcagcaaacaaacgtctgcaccctgccctgggacctgcagccacagagccaacagctccctagcaaaggaaaacagacaagatggaacacggtgggtgtagacctcttggctttcacttccttcctagtgctatgagcaactgccatggtccaggagccagctggccttgcaccttgactccctggcactggtcacaaagcgtagcagttggtcaggggcagaatggtttgtcttggtaaatcacagcagggggtggaccctgctagggtccacatccgaacctgggcctctcagcctgctgattccaggctgggcgtggcagtgtatgtctggatcaggcagtgagctgtcaggcccctagcctgccccctgcccagccacaggcctcagtgcaggctttgtcttcaaagacagagctgtgagtgcccaaggagctttgactgctcatcaggtgtgtgtgctgagatgggtttgagcccaggtcagggctcctgccagggcctgtcatcccttcacagtgagcctgtgccttagcccttgcacagccaccaatgaatgctttgcccgatgtccccagatgccaccctgggtccaggctggccttgggagccagctctagagcctgctacccaagtccacccaccctgctgacatgcctgcctctggagcccccactcccagccgacacgtctcacttcccacccttgcaggctatgaagagaccctgacccgcctggctgccattctcgccaaacactttgccgacgcacgcattgtgggcactgacatccgagactcactgatgcaggccctggccagctacgtgtgctacccacactccctgcgggctgtggagcgaatccccgaggagcagcgtatcgccatggtgaggaacctcctggcgccctatgagcagcggccctgggcccagaccaactggatcctggtgcggctctggaggggctgtggcttcgggtaccgctatacacggctgccacatctgctgaaaaccaaacttgaggacgccaatttgcccagcctccagaagccctgcccttccaccctgctgcagcagcacatggcggacctcctacagcagggtcctgatgtggcacccagcttcctcaacagcgtcctcaatcagctcaactgggccttctctgaattcattggcatgatccaagagatccagcaggctgctgagcgcctggagcggaactttgtggacagccggcagctcaaggtatgtgccacctgctttgacctctcggtcagcctgctgcgtgtcttggagatgactatcacactggtgcctgagatattccttgactggacccggcctacctctgagatgctgctgcggcgtcttgcacagctgctaaaccaggtgctgaaccgggtgacagctgagaggaacctgtttgatcgtgtggtcaccctacggctgcctggcctagagagcgtggaccactatcccattctggtggcagtgacgggcatcctggtgcagctcctggtgcgtggcccagcctcagagagagagcaagccacatcagtgctcctggcagatccctgcttccagctacgctcaatatgctatctcctgggacagccagagcccccagcacctggcactgctctgccagcccctgaccggaagcgcttctccctgcagagctatgcggattatatcagtgccgatgagctggcccaagtggaacagatgctggcgcacctgacctctgcatctgcccaggcagcagctgcctccctgcccaccagtgaggaggacctctgccccatctgctatgcccaccccatctctgctgtgttccagccctgtggccacaagtcctgcaaagcctgtatcaaccagcacctgatgaacaacaaggactgcttcttctgcaaaaccaccatcgtgtctgtagaggactgggagaagggagccaatacgagtactacctcctcagctgcctagccctcacagcctgtgccatcctggaacctccacctttgaacccagagccaggctgggccctatttatgagctccctttgcccttctcctgtatcccacaccaccacatccaacctccttgcctgcctgtatcctcattggtgggagcccagccatggccctaattgtgcctgagcttgactttcagtcagggccacagtgagcattaaattattattccatacagccctggccctggcccttcttgagggagtggggtttgtggggtgtgcccagcagggatcctgccagatgatgtccacatgagaaggcaggtgtccaacagcttcagcttcacccagtgccccccagacaaataatgacaagtccagggtcttctgatgtgtcaggccagcactccccttgctgatgggaaaaccggggctcggccagccccactgcatcccctcacatgatgatacgaggctctggcactgactcgccaatagacttgtggggcagcacgctggctccgttgaggtagagctcatcattaactatgacgtcctcacccagcac

SEQ ID NO: 1888 - protein, 442 aa, Homosapiens; identical to SEQ ID NO: 1886

SEQ ID NO: 1889 - DNA, 321 bp, Homosapiens
ggctcagcccccaggaccactggctgcccatgagagatgaaggatggcatccaagggggccggcatgtctttctcccgcaagagctataggctgacctcagatgctgagaaatccagggtcacaggcattgtgcaggagaagctgctgaatgactacctgaaccgcatcttttcctcttctgaacatgcacccccagcagccaccagcaggaaacccctgaacttccagaacctgccagaacatttggaccagttgctacaggtggacaatgagcttgactttcagtcagggccacagtgagcattaaattattattccat

SEQ ID NO: 1890 - protein, 85 aa, Homosapiens
MASKGAGMSFSRKSYRLTSDAEKSRVTGIVQEKLLNDYLNRIFSSSEHAPPAATSRKPLNFQNLPEHLDQLLQVDNELDFQSGPQ

SEQ ID NO: 1891 - DNA, 160 bp, Homosapiens
tgctgagactacaggtgtgagccaccatgcttggcctgtaactgcttttgaggaaggctcctttatccttgggcccactggggtattcagaagctttctgtctgtgtggatgagtggggtaagaactggcattaaaggtggaagagcaggtggtggcacc

SEQ ID NO: 1892 - DNA, 554 bp, Homosapiens
agttgatgatgtctctgcttcggctgtaccgattctcacccattgtcccagacctgggcctacagatccattacctgcggctcactatcgccatcctgaggcatgagaagtcccgcaagtttctgcttagcaatgtcctcttcgacgtgctccgctccgtcgtcttcttttacatcaagagccccctgcgtgtggaggaggccggcctgcaggagctcattcccaccacctggtggccccactgctccagtagggagggcaaagagagcacggagatgaaggaggagaccgcagaggagcggctgcggcggcgagcctacgaacggggctgtcagcggctcaggaagcgcatcgaaggtcagcccgccttgggcacggggtagggtgggaggtgtgtgtgtgcacatgagggtgcttggaggtgcccatgtctaggtgggacttggggaaccctggtggtggagccctggcccaaacctgccccccatctcctggagcctgagggccatgttcctcacctgacctccagtggtggaagaactacaggtccagat

SEQ ID NO: 1893 - protein, 125 aa, Homosapiens
MMSLLRLYRFSPIVPDLGLQIHYLRLTIAILRHEKSRKFLLSNVLFDVLRSVVFFYIKSPLRVEEAGLQELIPTTWWPHCSSREGKESTEMKEETAEERLRRRAYERGCQRLRKRIEGQPALGTG

SEQ ID NO: 1894 - DNA, 219 bp, Homosapiens
catcaccccatgccatgtcccctgtacccctcatgctctgtggactgaggaagcgcagtttctggacctccagttcgcctcatagacctgtccttcgaggaacaaactctgtctgtctgctgccctctcccacactgtcttctcaagacccttgccctctcatctctctgcctttttttagttatgctaaaatatgtgtgacataaaatgtaccatcct

SEQ ID NO: 1895 - protein, 63 aa, Homosapiens
MSPVPLMLCGLRKRSFWTSSSPHRPVLRGTNSVCLLPSPTLSSQDPCPLISLPFFSYAKICVT

SEQ ID NO: 1896 - DNA, 6087 bp, Homosapiens
gttctgtgttgtggcggccctggatccggcgtcagggcgaccgggcggacgaggtggagccagagtctgtcaggcgggcgcgatgaaggcactgatcttagtggggggctatgggacgcggctacggccgctgacgctgagcaccccgaagccactggtggacttctgcaataagcccatcttgctgcaccaagtggaggcgctagccgcggcaggcgtggaccacgtgatcctggccgtgagctacatgtcgcaggtgctggagaaggaaatgaaggcacaggagcagaggctgggaatccgaatctccatgtcccatgaagaggagcctttggggacagctgggcccctggcgctggcccgtgacctactctctgagactgcagaccctttcttcgtcctcaacagtgacgtgatctgcgatttccccttccaagccatggtgcagttccaccggcaccatggccaggagggctccatcctggtgaccaaggtggaggaaccctccaagtacggtgtggtggtgtgtgaggctgacacaggccgcattcaccggttcgtggagaagccacaggtgtttgtgtccaataagatcaacgcaggcatgtacatcctgagccctgcagtgctgcagcgcatccagctgcagcctacgtccattgagaaggaggtcttccccattatggccaaggaggggcagctatatgccatggagttacagggcttctggatggacattgggcagcccaaggacttcctcactggcatgtgcctcttcctgcagtcactgaggcagaagcagcctgagcggctgtgctcaggccctggcattgtgggcaacgtgctggtggacccaagtgcccgcatcggccagaactgcagcattggccccaatgtgagcctgggacctggcgtggtggtcgaagatggtgtgtgtatccggcggtgcacggtgctgcgggatgcccggatccgttcccattcctggcttgagtcctgcattgtgggctggcgctgccgcgtgggtcagtgggtacgcatggagaacgtgacagtgctgggtgaggacgtcatagttaatgatgagctctacctcaacggagccagcgtgctgccccacaagtctattggcgagtcagtgccagagcctcgtatcatcatgtgaggggatgcagtggggctggccgagccccggttttcccatcagcaaggggagtgctggcctgacacatcagaagaccctggacttgtcattatttgtctggggggcactgggtgaagctgaagctgttggacacctgccttctcatgtggacatcatctggcaggatccctgctgggcacaccccacaaaccccactccctcaagaagggccagggccagggctgtatggaataataatttaatgctcactgtggccctgactgaaagtcaagctcaggcacaattagggccatggctgggctcccaccaatgaggatacaggcaggcaaggaggttggatgtggtggtgtgggatacaggagaagggcaaagggagctcataaatagggcccagcctggctctgggttcaaaggtggaggttccaggatggcacaggctgtgagggctaggcagctgaggaggtagtactcgtattggctcccttctcccagtcctctacagacacgatggtggttttgcagaagaagcagtccttgttgttcatcaggtgctggttgatacaggctctacaacaggggaggggatgaggactgccctgcatgtacctactgctctccccaccaccaagctgtggggcccacttacttgcaggacttgtggccacagggctggaacacagcagagatggggtgggcatagcagatggggcagaggtcctcctcactggtgggctgcagggaggagagtgaagggtgggctggagttggatgcctggctatgtggatgtccgttgtgcctgtgtaggagtgcacacatattcaagtggcatggacctgtgcaccgtgttcccactcaccagggaggcagctgctgcctgggcagatgcagaggtcaggtgcgccagcatctgttccacttgggccagctcatcggcactgatataatccgcatctggggagtggtaggtagtgtcaagtcagaggtagctgaggatgtgatgcctcttgaatattcccagcctaggactttgctgttcttaaggctcctgacccgacccagccccagatttccctgacctgccccaccagcccactcacagctctgcagggagaagcgcttccggtcaggggctggcagagcagtgccaggtgctgggggctctggctgtcccaggagatagcatattgagcgtagctggaagcagggatctgccaggagcactgatgtggcttgctctctcctaggtaggggagggtgcaagggcagtcagaaggcttggggcctggctaaaagtctctcttgggattgccaatgaggagtgccatggctcgtacatgatcaccccccctgcatcctttccgtctccctgcttcccaaaccccaagtcctgtattctagtaaggtgccacacagcctgttttttttttttttttcttgagacgagtctcgctctgttgcccaggctggagtgcgatggcacgatctcggctcactgcaacctccacctcccgggttcaagtgattctcctgctttagcctcccgagtagctggaattgcagacgcccaccaccacgcccggctaattgttgtatttttagtagagacagggtttcaccaggttggccaggctggtctcgaattcctgacctcaggtgatccacctgccttggcttcccaaagtgctgggattacaggcgtgagccaccgcgcccggcctggggtaccactttaagaaggctcaggcgaaccaccttaagatagtgagagtctgcctgccccataatattatcagtccttcaaagtcacttcaaataaacactaacagcagcttggagacattcttccagactcccccttttactccccgaggaaaaacgagcggcggagagctgccagccaaaggctgacggggactttggggttggccttgctccccatctggcggtcatgcggggccattgggcacaaagggatgtagccgccccgcctcctcaaacgggaaccaataggagcccgggccccgcccctggggggagtatttaggagccgatcaggaactcgcttggagagggctagcgaagccgaagggagcgcggctaagagtgccgcaccgcctcacaacctgggaaccggagagtaggggccgtcggctggcaagaacccgccgtgcctcctcggcaagggccatccggtgccacccatgtcgcactagagcagaagagggtgagtcctggaactgcaacctgcacagagctgctctgtactgtccctggtggtcgccgccatgacctggttggtgctgctggggacactgctctgcatgctgcgcgttgggttaggcaccccggactccgagggtttcccgccccgtgcgctccacaactgcccctacaaatgtatctgcgctgccgacctgctaagctgcactggcctagggctgcaggacgtgccagccgagttacctgccgctactgcggacctcgacctgagccacaacgcgctccagcgcctgcgccccggctggttggcgcccctcttccagctgcgcgccctgcacctagaccacaacgaactagatgcgctgggtcgcggcgtcttcgtcaacgccagcggcctgaggctgctcgatctatcatctaacacgttgcgggcgcttggccgccacgacctcgacgggctgggggcgctggagaagctgcttctgttcaataaccgcttggtgcacttggacgagcatgccttccacggcctgcgcgcgctcagccatctctacctgggctgcaacgaactcgcctcgttctccttcgaccacctgcacggtctgagcgccacccacctgcttactctggacctctcctccaaccggctgggacacatctccgtacctgagctggccgcgctgccggccttcctcaagaacggcctctacttgcacaacaaccctttgccttgcgactgccgcctctaccacctgctacagcgctggcaccagcggggcctgagcgccgtgcgcgactttgcgcgcgagtacgtatgcttggccttcaaggtacccgcgtcccgcgtgcgcttcttccagcacagccgcgtctttgagaactgctcgtcggccccagctcttggcctagagcggccggaagagcacctgtacgcgctggtgggtcggtccctgaggctttactgcaacaccagcgtcccggccatgcgcattgcctgggtttcgccgcagcaggagcttctcagggcgccaggatcccgcgatggcagcatcgcggtgctggccgacggcagcttggccataggcaacgtacaggagcagcatgcgggactcttcgtgtgcctggccactgggccccgcctgcaccacaaccagacgcacgagtacaacgtgagcgtgcactttccgcgcccagagcccgaggctttcaacacaggcttcaccacactgctgggctgtgccgtgggccttgtgctcgtgctgctctacctgttcgccccaccctgccgctgctgccgccgtgcctgccgctgccgccgctggccccaaacacccagcccgctccaagagctgagcgcacagtcctcagtactcagcaccacaccgccagacgcacccagccgcaaggccagcgtccacaagcacgtagtctttctggagccaggccggaggggcctcaatggccgcgtgcagctggcagtagctgaggaattcgatctctacaaccctggaggcctgcagctgaaggctggctctgagtccgccagctccataggctccgagggtcccatgacaacctagactgcccagggctcccccacccaggcccccaccctcttgctgctcgccctgctccctgcttcggtccagagaactggcagatactggtgggaagcactgtgcctggccccccagcttcctgtatgggcctcgaaacacaatgggccttctcgctcactggtagagacaggggttgtggtccccaacctgccttctgctctgcccctgcacaggacccaaaggccccaggccctgcaaggtgtgctagttcctgctttcccgcggacttcctagtgcccaaatgccctgtgaggctgagagacccaggcccctgtggctttcaacacagcacagctgtggaagtggctgtgttcttctacagcctgtggaagaacccctgtagcagagcctcccgtccaccctcaggggctgagacagctctcgaggagtggtgctcaagagctgacgcagggccacctccccttcccaagggggtgggagggagtgggcccacagggaaaagaaggcggctctgaaggaagatctcgcccacaccccaggacagaaagaggaaacaagcccgccctctggtgaaatgggactccctccatccaccaacacccaacctcctgaaagcttcacaacttcacgcagagtccggtgggcaggcaccaggcaggaaaggctcctcaagaggttcctggtggtctggcctaagccccagccagaggccctgctctctctggcctggggcatccacccgttgttctgaaggcagagcccattctgtgggctcacaagacacagtgaaggggatcatggcctgcacccctgcttttcagcagtaaaaagcccgaaaagcctggcgagcatggccgagctgggagggccgagccggaactccacgtccctcgagagcaggagcctcttaagggctggcactggtctcagcctaatggctgaggcggtaccctggcttcatatgcatctcactgctcccactgcaggggggcagggaaggggggtctgggagcccttcatgtgtgggggccgagctgggggcccccatggccatcctggacctcgctgctccagagtttaataaaggtagcacatgcttattgctagagcctttgcagaca

SEQ ID NO: 1897 - protein, 360 aa, Homosapiens
MKALILVGGYGTRLRPLTLSTPKPLVDFCNKPILLHQVEALAAAGVDHVILAVSYMSQVLEKEMKAQEQRLGIRISMSHEEEPLGTAGPLALARDLLSETADPFFVLNSDVICDFPFQAMVQFHRHHGQEGSILVTKVEEPSKYGVVVCEADTGRIHRFVEKPQVFVSNKINAGMYILSPAVLQRIQLQPTSIEKEVFPIMAKEGQLYAMELQGFWMDIGQPKDFLTGMCLFLQSLRQKQPERLCSGPGIVGNVLVDPSARIGQNCSIGPNVSLGPGVVVEDGVCIRRCTVLRDARIRSHSWLESCIVGWRCRVGQWVRMENVTVLGEDVIVNDELYLNGASVLPHKSIGESVPEPRIIM

SEQ ID NO: 1898 - DNA, 2789 bp, Homosapiens
tttcttgagacgagtctcgctctgttgcccaggctggagtgcgatggcacgatctcggctcactgcaacctccacctcccgggttcaagtgattctcctgctttagcctcccgagtagctggaattgcagacgcccaccaccacgcccggctaattgttgtatttttagtagagacagggtttcaccaggttggccaggctggtctcgaattcctgacctcaggtgatccacctgccttggcttcccaaagtgctgggattacaggcgtgagccaccgcgcccggcctggggtaccactttaagaaggctcaggcgaaccaccttaagatagtgagagtctgcctgccccataatattatcagtccttcaaagtcacttcaaataaacactaacagcagcttggagacattcttccagactcccccttttactccccgaggaaaaacgagcggcggagagctgccagccaaaggctgacggggactttggggttggccttgctccccatctggcggtcatgcggggccattgggcacaaagggatgtagccgccccgcctcctcaaacgggaaccaataggagcccgggccccgcccctggggggagtatttaggagccgatcaggaactcgcttggagagggctagcgaagccgaagggagcgcggctaagagtgccgcaccgcctcacaacctgggaaccggagagtaggggccgtcggctggcaagaacccgccgtgcctcctcggcaagggccatccggtgccacccatgtcgcactagagcagaagagggtgagtcctggaactgcaacctgcacagagctgctctgtactgtccctggtggtcgccgccatgacctggttggtgctgctggggacactgctctgcatgctgcgcgttgggttaggcaccccggactccgagggtttcccgccccgtgcgctccacaactgcccctacaaatgtatctgcgctgccgacctgctaagctgcactggcctagggctgcaggacgtgccagccgagttacctgccgctactgcggacctcgacctgagccacaacgcgctccagcgcctgcgccccggctggttggcgcccctcttccagctgcgcgccctgcacctagaccacaacgaactagatgcgctgggtcgcggcgtcttcgtcaacgccagcggcctgaggctgctcgatctatcatctaacacgttgcgggcgcttggccgccacgacctcgacgggctgggggcgctggagaagctgcttctgttcaataaccgcttggtgcacttggacgagcatgccttccacggcctgcgcgcgctcagccatctctacctgggctgcaacgaactcgcctcgttctccttcgaccacctgcacggtctgagcgccacccacctgcttactctggacctctcctccaaccggctgggacacatctccgtacctgagctggccgcgctgccggccttcctcaagaacggcctctacttgcacaacaaccctttgccttgcgactgccgcctctaccacctgctacagcgctggcaccagcggggcctgagcgccgtgcgcgactttgcgcgcgagtacgtatgcttggccttcaaggtacccgcgtcccgcgtgcgcttcttccagcacagccgcgtctttgagaactgctcgtcggccccagctcttggcctagagcggccggaagagcacctgtacgcgctggtgggtcggtccctgaggctttactgcaacaccagcgtcccggccatgcgcattgcctgggtttcgccgcagcaggagcttctcagggcgccaggatcccgcgatggcagcatcgcggtgctggccgacggcagcttggccataggcaacgtacaggagcagcatgcgggactcttcgtgtgcctggccactgggccccgcctgcaccacaaccagacgcacgagtacaacgtgagcgtgcactttccgcgcccagagcccgaggctttcaacacaggcttcaccacactgctgggctgtgccgtgggccttgtgctcgtgctgctctacctgttcgccccaccctgccgctgctgccgccgtgcctgccgctgccgccgctggccccaaacacccagcccgctccaagagctgagcgcacagtcctcagtactcagcaccacaccgccagacgcacccagccgcaaggccagcgtccacaagcacgtagtctttctggagccaggccggaggggcctcaatggccgcgtgcagctggcagtagctgaggaattcgatctctacaaccctggaggcctgcagctgaaggctggctctgagtccgccagctccataggctccgagggtcccatgacaacctagactgcccagggctcccccacccaggcccccaccctcttgctgctcgccctgctccctgcttcggtccagagaactggcagatactggtgggaagcactgtgcctggccccccagcttcctgtatgggcctcgaaacacaatgggccttctcgctcactggtagagacaggggttgtggtccccaacctgccttctgctctgcccctgcacaggacccaaaggccccaggccctgcaaggtgtgctagttcctgctttcccgcggacttcctagtgcccaaatgccctgtgaggctgagagacccaggcccctgtggctttcaacacagcacagctgtggaagtggctgtgttcttctacagcctgtggaagaacccctgtagcagagcctcccgtccaccctcaggggctgagacagct

SEQ ID NO: 1899 - protein, 504 aa, Homosapiens; identical to SEQ ID NO: 151

SEQ ID NO: 1900 - DNA, 3239 bp, Homosapiens
ccgggtccggcctgagttcggggccagcagccgtctacccggtgtcgcgttctgtgttgtggcggccctggatccggcgtcagggcgaccgggcggacgaggtggagccagagtctgtcaggcgggttggtgaagggcgcggggccgggcacggcgttgggagtgcgcggcagggaccggccaggcgggctgcaggcacctcagagcccgggacaccccctcaacgtccgcaggcgcgatgaaggcactgatcttagtggggggctatgggacgcggctacggccgctgacgctgagcaccccgaagccactggtggacttctgcaataagcccatcttgctgcaccaagtggaggcgctagccgcggcaggcgtggaccacgtgatcctggccgtgagctacatgtcgcaggtgctggagaaggaaatgaaggcacaggagcagaggctgggaatccgaatctccatgtcccatgaagaggagcctttggggacagctgggcccctggcgctggcccgtgacctactctctgagactgcagaccctttcttcgtcctcaacagtgacgtgatctgcgatttccccttccaagccatggtgcagttccaccggcaccatggccaggagggctccatcctggtgaccaaggtggaggaaccctccaagtacggtgtggtggtgtgtgaggctgacacaggccgcattcaccggttcgtggagaagccacaggtgtttgtgtccaataagatcaacgcaggcatgtacatcctgagccctgcagtgctgcagcgcatccagctgcagcctacgtccattgagaaggaggtcttccccattatggccaaggaggggcagctatatgccatggagttacagggcttctggatggacattgggcagcccaaggacttcctcactggcatgtgcctcttcctgcagtcactgaggcagaagcagcctgagcggctgtgctcaggccctggcattgtgggcaacgtgctggtggacccaagtgcccgcatcggccagaactgcagcattggccccaatgtgagcctgggacctggcgtggtggtcgaagatggtgtgtgtatccggcggtgcacggtgctgcgggatgcccggatccgttcccattcctggcttgagtcctgcattgtgggctggcgctgccgcgtgggtcagtgggtaagcctgtgggctgggctgggtggggagaggggcggggagtgtgcctgcctccctgacaaggcctatcctctcctggaggtacgcatggagaacgtgacagtgctgggtgaggacgtcatagttaatgatgagctctacctcaacggagccagcgtgctgccccacaagtctattggcgagtcagtgccagagcctcgtatcatcatgtgaggggatgcagtggggctggccgagccccggttttcccatcagcaaggggagtgctggcctgacacatcagaagaccctggacttgtcattatttgtctggggggcactgggtgaagctgaagctgttggacacctgccttctcatgtggacatcatctggcaggatccctgctgggcacaccccacaaaccccactccctcaagaagggccagggccagggctgtatggaataataatttaatgctcactgtggccctgactgaaagtcaagctcaggcacaattagggccatggctgggctcccaccaatgaggatacaggcaggcaaggaggttggatgtggtggtgtgggatacaggagaagggcaaagggagctcataaatagggcccagcctggctctgggttcaaaggtggaggttccaggatggcacaggctgtgagggctaggcagctgaggaggtagtactcgtattggctcccttctcccagtcctctacagacacgatggtggttttgcagaagaagcagtccttgttgttcatcaggtgctggttgatacaggctctacaacaggggaggggatgaggactgccctgcatgtacctactgctctccccaccaccaagctgtggggcccacttacttgcaggacttgtggccacagggctggaacacagcagagatggggtgggcatagcagatggggcagaggtcctcctcactggtgggctgcagggaggagagtgaagggtgggctggagttggatgcctggctatgtggatgtccgttgtgcctgtgtaggagtgcacacatattcaagtggcatggacctgtgcaccgtgttcccactcaccagggaggcagctgctgcctgggcagatgcagaggtcaggtgcgccagcatctgttccacttgggccagctcatcggcactgatataatccgcatctggggagtggtaggtagtgtcaagtcagaggtagctgaggatgtgatgcctcttgaatattcccagcctaggactttgctgttcttaaggctcctgacccgacccagccccagatttccctgacctgccccaccagcccactcacagctctgcagggagaagcgcttccggtcaggggctggcagagcagtgccaggtgctgggggctctggctgtcccaggagatagcatattgagcgtagctggaagcagggatctgccaggagcactgatgtggcttgctctctcctaggtaggggagggtgcaagggcagtcagaaggcttggggcctggctaaaagtctctcttgggattgccaatgaggagtgccatggctcgtacatgatcaccccccctgcatcctttccgtctccctgcttcccaaaccccaagtcctgtattctagtaaggtgccacacagcctgttttttttttttttttcttgagacgagtctcgctctgttgcccaggctggagtgcgatggcacgatctcggctcactgcaacctccacctcccgggttcaagtgattctcctgctttagcctcccgagtagctggaattgcagacgcccaccaccacgcccggctaattgttgtatttttagtagagacagggtttcaccaggttggccaggctggtctcgaattcctgacctcaggtgatccacctgccttggcttcccaaagtgctgggattacaggcgtgagccaccgcgcccggcctggggtaccactttaagaaggctcaggcgaaccaccttaagatagtgagagtctgcctgccccataatattatcagtccttcaaagtcacttcaaataaacactaacagcagcttggag

SEQ ID NO: 1901 - protein, 387 aa, Homosapiens
MKALILVGGYGTRLRPLTLSTPKPLVDFCNKPILLHQVEALAAAGVDHVILAVSYMSQVLEKEMKAQEQRLGIRISMSHEEEPLGTAGPLALARDLLSETADPFFVLNSDVICDFPFQAMVQFHRHHGQEGSILVTKVEEPSKYGVVVCEADTGRIHRFVEKPQVFVSNKINAGMYILSPAVLQRIQLQPTSIEKEVFPIMAKEGQLYAMELQGFWMDIGQPKDFLTGMCLFLQSLRQKQPERLCSGPGIVGNVLVDPSARIGQNCSIGPNVSLGPGVVVEDGVCIRRCTVLRDARIRSHSWLESCIVGWRCRVGQWVSLWAGLGGERGGECACLPDKAYPLLEVRMENVTVLGEDVIVNDELYLNGASVLPHKSIGESVPEPRIIM

SEQ ID NO: 1902 - DNA, 823 bp, Homosapiens
cggacatccacatagccaggcatccaactccagcccacccttcactctcctccctgcagcccaccagtgaggaggacctctgccccatctgctatgcccaccccatctctgctgtgttccagccctgtggccacaagtcctgcaaagcctgtatcaaccagcacctgatgaacaacaaggactgcttcttctgcaaaaccaccatcgtgtctgtagaggactgggagaagggagccaatacgagtactacctcctcagctgcctagccctcacagcctgtgccatcctggaacctccacctttgaacccagagccaggctgggccctatttatgagctccctttgcccttctcctgtatcccacaccaccacatccaacctccttgcctgcctgtatcctcattggtgggagcccagccatggccctaattgtgcctgagcttgactttcagtcagggccacagtgagcattaaattattattccatacagccctggccctggcccttcttgagggagtggggtttgtggggtgtgcccagcagggatcctgccagatgatgtccacatgagaaggcaggtgtccaacagcttcagcttcacccagtgccccccagacaaataatgacaagtccagggtcttctgatgtgtcaggccagcactccccttgctgatgggaaaaccggggctcggccagccccactgcatcccctcacatgatgatacgaggctctggcactgactcgccaatagacttgtggggcagcacgctggctccgttgaggtagagctcatcattaactatgacgtcctcacccagcac

SEQ ID NO: 1903 - protein, 35 aa, Homosapiens
MSSLCPSPVSHTTTSNLLACLYPHWWEPSHGPNCA

SEQ ID NO: 1904 - DNA, 1655 bp, Homosapiens
ccgggtccggcctgagttcggggccagcagccgtctacccggtgtcgcgttctgtgttgtggcggccctggatccggcgtcagggcgaccgggcggacgaggtggagccagagtctgtcaggcgggttggtgaagggcgcggggccgggcacggcgttgggagtgcgcggcagggaccggccaggcgggctgcaggcacctcagagcccgggacaccccctcaacgtccgcaggcgcgatgaaggcactgatcttagtggggggctatgggacgcggctacggccgctgacgctgagcaccccgaagccactggtggacttctgcaataagcccatcttgctgcaccaagtggaggcgctagccgcggcaggcgtggaccacgtgatcctggccgtgagctacatgtcgcaggtgctggagaaggaaatgaaggcacaggagcagaggctgggaatccgaatctccatgtcccatgaagaggagcctttggggacagctgggcccctggcgctggcccgtgacctactctctgagactgcagaccctttcttcgtcctcaacagtgacgtgatctgcgatttccccttccaagccatggtgcagttccaccggcaccatggccaggagggctccatcctggtgaccaaggtggaggaaccctccaagtacggtgtggtggtgtgtgaggctgacacaggccgcattcaccggttcgtggagaagccacaggtgtttgtgtccaataagatcaacgcaggcatgtacatcctgagccctgcagtgctgcagcgcatccagctgcagcctacgtccattgagaaggaggtcttccccattatggccaaggaggggcagctatatgccatggagttacagggcttctggatggacattgggcagcccaaggacttcctcactggcatgtgcctcttcctgcagtcactgaggcagaagcagcctgagcggctgtgctcaggccctggcattgtgggcaacgtgctggtggacccaagtgcccgcatcggccagaactgcagcattggccccaatgtgagcctgggacctggcgtggtggtcgaagatggtgtgtgtatccggcggtgcacggtgctgcgggatgcccggatccgttcccattcctggcttgagtcctgcattgtgggctggcgctgccgcgtgggtcagtgggtaagcctgtgggctgggctgggtggggagaggggcggggagtgtgcctgcctccctgacaaggcctatcctctcctggaggtacgcatggagaacgtgacagtgctgggtgaggacgtcatagttaatgatgagctctacctcaacggagccagcgtgctgccccacaagtctattggcgagtcagtgccagagcctcgtatcatcatgtgaggggatgcagtggggctggccgagccccggttttcccatcagcaaggggagtgctggcctgacacatcagaagaccctggacttgtcattatttgtctggggggcactgggtgaagctgaagctgttggacacctgccttctcatgtggacatcatctggcaggatccctgctgggcacaccccacaaaccccactccctcaagaagggccagggccagggctgtatggaataataatttaatgctcactgtg

SEQ ID NO: 1905 - protein, 387 aa, Homosapiens; identical to SEQ ID NO: 1901

SEQ ID NO: 1906 - DNA, 1574 bp, Homosapiens
ccgggtccggcctgagttcggggccagcagccgtctacccggtgtcgcgttctgtgttgtggcggccctggatccggcgtcagggcgaccgggcggacgaggtggagccagagtctgtcaggcgggttggtgaagggcgcggggccgggcacggcgttgggagtgcgcggcagggaccggccaggcgggctgcaggcacctcagagcccgggacaccccctcaacgtccgcaggcgcgatgaaggcactgatcttagtggggggctatgggacgcggctacggccgctgacgctgagcaccccgaagccactggtggacttctgcaataagcccatcttgctgcaccaagtggaggcgctagccgcggcaggcgtggaccacgtgatcctggccgtgagctacatgtcgcaggtgctggagaaggaaatgaaggcacaggagcagaggctgggaatccgaatctccatgtcccatgaagaggagcctttggggacagctgggcccctggcgctggcccgtgacctactctctgagactgcagaccctttcttcgtcctcaacagtgacgtgatctgcgatttccccttccaagccatggtgcagttccaccggcaccatggccaggagggctccatcctggtgaccaaggtggaggaaccctccaagtacggtgtggtggtgtgtgaggctgacacaggccgcattcaccggttcgtggagaagccacaggtgtttgtgtccaataagatcaacgcaggcatgtacatcctgagccctgcagtgctgcagcgcatccagctgcagcctacgtccattgagaaggaggtcttccccattatggccaaggaggggcagctatatgccatggagttacagggcttctggatggacattgggcagcccaaggacttcctcactggcatgtgcctcttcctgcagtcactgaggcagaagcagcctgagcggctgtgctcaggccctggcattgtgggcaacgtgctggtggacccaagtgcccgcatcggccagaactgcagcattggccccaatgtgagcctgggacctggcgtggtggtcgaagatggtgtgtgtatccggcggtgcacggtgctgcgggatgcccggatccgttcccattcctggcttgagtcctgcattgtgggctggcgctgccgcgtgggtcagtgggtacgcatggagaacgtgacagtgctgggtgaggacgtcatagttaatgatgagctctacctcaacggagccagcgtgctgccccacaagtctattggcgagtcagtgccagagcctcgtatcatcatgtgaggggatgcagtggggctggccgagccccggttttcccatcagcaaggggagtgctggcctgacacatcagaagaccctggacttgtcattatttgtctggggggcactgggtgaagctgaagctgttggacacctgccttctcatgtggacatcatctggcaggatccctgctgggcacaccccacaaaccccactccctcaagaagggccagggccagggctgtatggaataataatttaatgctcactgtg

SEQ ID NO: 1907 - protein, 360 aa, Homosapiens; identical to SEQ ID NO: 1897

SEQ ID NO: 1908 - DNA, 957 bp, Homosapiens
gggtccggcctgagttcggggccagcagccgtctacccggtgtcgcgttctgtgttgtggcggccctggatccggcgtcagggcgaccgggcggacgaggtggagccagagtctgtcaggcgggttggtgaagggcgcggggccgggcacggcgttgggagtgcgcggcagggaccggccaggcgggctgcaggcacctcagagcccgggacaccccctcaacgtccgcaggcgcgatgaaggcactgatcttagtggggggctatgggacgcggctacggccgctgacgctgagcaccccgaagccactggtggacttctgcaataagcccatcttgctgcaccaagtggaggcgctagccgcggcaggcgtggaccacgtgatcctggccgtgagctacatgtcgcaggtgctggagaaggaaatgaaggcacaggagcagaggctgggaatccgaatctccatgtcccatgaagaggagcctttggggacagctgggcccctggcgctggcccgtgacctactctctgagactgcagaccctttcttcgtcctcaacagtgacgtgatctgcgatttccccttccaagccatggtgcagttccaccggcaccatggccaggagggctccatcctggtgaccaaggtggaggaaccctccaagtacggtgtggtggtgtgtgaggctgacacaggccgcattcaccggttcgtggagaagccacaggtgtttgtgtccaataagatcaacgcaggcatgtacatcctgagccctgcagtgctgcagcgcatccagctgcagcctacgtccattgagaaggaggtcttccccattatggccaaggaggggcagctatatgccatggagttacagggtgaggcagggaggccacagggtgggggtggtctgtggctgggctgaggcccctgatgcatccctccctacaggcttctgg

SEQ ID NO: 1909 - protein, 228 aa, Homosapiens
MKALILVGGYGTRLRPLTLSTPKPLVDFCNKPILLHQVEALAAAGVDHVILAVSYMSQVLEKEMKAQEQRLGIRISMSHEEEPLGTAGPLALARDLLSETADPFFVLNSDVICDFPFQAMVQFHRHHGQEGSILVTKVEEPSKYGVVVCEADTGRIHRFVEKPQVFVSNKINAGMYILSPAVLQRIQLQPTSIEKEVFPIMAKEGQLYAMELQGEAGRPQGGGGLWLG

SEQ ID NO: 1910 - DNA, 933 bp, Homosapiens
gagttcggggccagcagccgtctacccggtgtcgcgttctgtgttgtggcggccctggatccggcgtcagggcgaccgggcggacgaggtggagccagagtctgtcaggcgggttggtgaagggcgcggggccgggcacggcgttgggagtgcgcggcagggaccggccaggcgggctgcaggcacctcagagcccgggacaccccctcaacgtccgcaggcgcgatgaaggcactgatcttagtggggggctatgggacgcggctacggccgctgacgctgagcaccccgaagccactggtggacttctgcaataagcccatcttgctgcaccaagtggaggcgctagccgcggcaggcgtggaccacgtgatcctggccgtgagctacatgtcgcaggtgctggagaaggaaatgaaggcacaggagcagagggtgaggcacagactcttggcccttattctcggtccccgcccaacttcccatcctggtagaacctgactgggggggcctcttccttccagctgggaatccgaatctccatgtcccatgaagaggagcctttggggacagctgggcccctggcgctggcccgtgacctactctctgagactgcagaccctttcttcgtcctcaacagtgacgtgatctgcgatttccccttccaagccatggtgcagttccaccggcaccatggccaggagggctccatcctggtaaggcgccaggtcttctctctcttgacactttcaccctccatgcccagcctcccatgccccctagccttcatctgccttcggatgttatggatacagagctgtgcagtatgtatctttaagcacttggggcagagtctcttgagatctggaacggcatgtgtatcaaggcttaggaacactggactaggtccgaggtccccttccttgcattcag

SEQ ID NO: 1911 - protein, 129 aa, Homosapiens
MSHEEEPLGTAGPLALARDLLSETADPFFVLNSDVICDFPFQAMVQFHRHHGQEGSILVRRQVFSLLTLSPSMPSLPCPLAFICLRMLWIQSCAVCIFKHLGQSLLRSGTACVSRLRNTGLGPRSPSLH

SEQ ID NO: 1912 - DNA, 795 bp, Homosapiens
gagttcggggccagcagccgtctacccggtgtcgcgttctgtgttgtggcggccctggatccggcgtcagggcgaccgggcggacgaggtggagccagagtctgtcaggcgggttggtgaagggcgcggggccgggcacggcgttgggagtgcgcggcagggaccggccaggcgggctgcaggcacctcagagcccgggacaccccctcaacgtccgcaggcgcgatgaaggcactgatcttagtggggggctatgggacgcggctacggccgctgacgctgagcaccccgaagccactggtggacttctgcaataagcccatcttgctgcaccaagtggaggcgctagccgcggcaggcgtggaccacgtgatcctggccgtgagctacatgtcgcaggtgctggagaaggaaatgaaggcacaggagcagaggctgggaatccgaatctccatgtcccatgaagaggagcctttggggacagctgggcccctggcgctggcccgtgacctactctctgagactgcagaccctttcttcgtcctcaacagtgacgtgatctgcgatttccccttccaagccatggtgcagttccaccggcaccatggccaggagggctccatcctggtaaggcgccaggtcttctctctcttgacactttcaccctccatgcccagcctcccatgccccctagccttcatctgccttcggatgttatggatacagagctgtgcagtatgtatctttaagcacttggggcagagtctcttgagatctggaacggcatgtgtatca

SEQ ID NO: 1913 - protein, 189 aa, Homosapiens
MKALILVGGYGTRLRPLTLSTPKPLVDFCNKPILLHQVEALAAAGVDHVILAVSYMSQVLEKEMKAQEQRLGIRISMSHEEEPLGTAGPLALARDLLSETADPFFVLNSDVICDFPFQAMVQFHRHHGQEGSILVRRQVFSLLTLSPSMPSLPCPLAFICLRMLWIQSCAVCIFKHLGQSLLRSGTACV

SEQ ID NO: 1914 - DNA, 1322 bp, Homosapiens
caggaggtgacaccgatttcagccattgccaaggttagcaccctctcctttgagcctagggccacactgttcattgtcactttaggcaagtgcctgtttggctttaaaggtaagcctgccagctgtgagaagccttggtaactgatggactcatttcctggtccttaaagatgcagcctcttaagggctccttgatggatgccatctctcctagcccccagccctggtgccactggtgggcaggttcccattctttggggctgggagggacagcttgcctgtttctggtcacaaattacagtcttctctcctgtaccattctgtggcttcagccatgggggcagtagcccttcattagtgtagatagtcattccctggtagggtggagggtaagacatagggtctggaactgtttgggaccttttggggatgtcctgtgcctcccagattcctcgattctgggaggagaggctgccgcattctgctgctcctcacagcgagcaaagctgcacccacttacattcagtattttcctggcactacaaagagtgggaaggcctgggatttgctgctgctcccttagagcagggcccctcttttcagcactttggacacctggagacccagccctgttatttaatggtagtgggcaagtgtgtgtgcatactgtctgccactgctttctccctgccccatgccagagagccctgtccctgccaggcccagccttcttagccccaacttgggaacaaagtgcaacatgggatcatgggttggggtgctcaggtgagccctctctatagtgcttccctgggccaagctgacaccagcccctgagggtggggtgggacgggtgtgcagtgagcatggggattcccatcaaggggcctggcacctgtgctagttacgtagccgctgctcacgcgctcactcctgaccacatgcacgttccctagatgcagactgctttgaactttaaagctgtacaatttggttatgtttgtgctgacttaaaatatattttaatgaggaaaaaataatggagaaccctgggaaggacctggttcttttgcttctcggggaactgtaagccctcgcgttctgggaatcgctctctgctgctctttcctggaagctaagcctgtctccaccgcccgaggcctgcgccggtggctcccgccgcagttgcgtttgctttggaccttgcgtgcgggggagggggtgctcggtccgagcccgctcctttctgtacacctagcgctgcccgccccgcttgtgtctgaggtcgtgtatgtcaaaaataaagccgctagaaacggagg

SEQ ID NO: 1915 - protein, 101 aa, Homosapiens [sequence omitted]

SEQ ID NO: 1916 - DNA, 1852 bp, Homosapiens
gaacaagtactatggccgtgggctctccattgaaggcttccgcaatgccctctatcaatatctgcacaatggcctggacctgcgacgtgacctgtttgagcctatcctgagcaaactgcggggcctgaaagctgtgctggagcggcaggcctcttaccgcttctactccagttccctgcttgtcatctatgatggcaaggagtgccgggctgagtcctgcctggaccgccggtctgagatgcgtctcaagcacctggacatggtgctccctgaggtggcgtcatcctgtggccccagcaccagccccagcaacaccagccccgaggcgggtccctcctctcagcccaaggtggatgtccgcatgattgactttgcacacagcacattcaagggcttccgggatgaccccaccgtgcatgatgggccagacagaggctacgtgtttggcctggagaacctcatcagcatcatggaacagatgcgggacgagaaccagtaggccctgttctgggcccccagaaccccttcctctccactgcaggcagggaccattgttctgaacttgccgtgaggacacacagacttgcttttaaagggttatatttctctttggtgtaaactaaaagaaatgtttttagctgtagcctggaatccatatatataaagtgaaggagggcagaccacacgccctctcagccaggctcctcagctttgtggctctgactggtgtgtccaggctgccttaggaaggaagaggtgcccctggtgggcttggcagcagggacagggtgcccttggacattggtttctcttgtctagatctttgagatctgtggctgcagggccctgctgattgtaaggtaaagccctgggctggtgcagggcccctccacgcccactcttcccttattcctcgattctgggaggagaggctgccgcattctgctgctcctcacagcgagcaaagctgcacccacttacattcagtattttcctggcactacaaagagtgggaaggcctgggatttgctgctgctcccttagagcagggcccctcttttcagcactttggacacctggagacccagccctgttatttaatggtagtgggcaagtgtgtgtgcatactgtctgccactgctttctccctgccccatgccagagagccctgtccctgccaggcccagccttcttagccccaacttgggaacaaagtgcaacatgggatcatgggttggggtgctcaggtgagccctctctatagtgcttccctgggccaagctgacaccagcccctgagggtggggtgggacgggtggtgcttaaaagaggaaggggaccagtgtagcaacttgccagggaccccacccctccctctctgggcctgtgcagtgagcatggggattcccatcaaggggcctggcacctgtgctagttacgtagccgctgctcacgcgctcactcctgaccacatgcacgttccctagatgcagactgctttgaactttaaagctgtacaatttggttatgtttgtgctgacttaaaatatattttaatgaggaaaaaataatggagaaccctgggaaggacctggttcttttgcttctcggggaactgtaagccctcgcgttctgggaatcgctctctgctgctctttcctggaagctaagcctgtctccaccgcccgaggcctgcgccggtggctcccgccgcagttgcgtttgctttggaccttgcgtgcgggggagggggtgctcggtccgagcccgctcctttctgtacacctagcgctgcccgccccgcttgtgtctgaggtcgtgtatgtcaaaaataaagccgctagaaacggagg

SEQ ID NO: 1917 - protein, 86 aa, Homosapiens [sequence omitted]

SEQ ID NO: 1918 - DNA, 4118 bp, Homosapiens
gccatcttgttgttgatccgtacccagtgggcagcgccgggagctggaccaagcggccggtgagaggccgctgtagcggtgctcagccacctgtgctgcctgccagggggcgggccgaaacctggaggcccggggggcccagctcccgtagggagccgtgggcgctcggtgcccgggccgggcaggcgtggtatctgtctgttttgagggggacagtgatggttacatcaacttagtggcctatccttatgtggaaagtgagactgtggaacaggatgacacaacagaacgggagcaacctcggcgcaaacactcccgccggagcctgcaccggtcaggcagtggcagtgaccacaaggaggagaaagccagcctgtcccttgagacctctgagagctcacaggaggcaaagagtccgaaggtggagctgcacagccactcagaggtccctttccagatgctagatggcaacagtggcttgagttctgagaagatcagccacaacccctggagcctgcgttgtcacaagcagcagctgagccgcatgcgctccgagtccaaggaccgaaagctctacaagttcctcctgcttgagaacgtggtgcaccacttcaagtacccctgcgtgttggacctgaagatgggcacgcggcagcatggcgatgacgcgtcagctgagaaggcagcccggcagatgcggaaatgcgagcagagcacatcagccacgctgggcgtcagggtctgcggcatgcaggtgtaccagctggacacagggcattacctctgcaggaacaagtactatggccgtgggctctccattgaaggcttccgcaatgccctctatcaatatctgcacaatggcctggacctgcgacgtgacctgtttgagcctatcctgagcaaactgcggggcctgaaagctgtgctggagcggcaggcctcttaccgcttctactccagttccctgcttgtcatctatgatggcaaggagtgccgggctgagtcctgcctggaccgccggtctgagatgcgtctcaagcacctggacatggtgctccctgaggtggcgtcatcctgtggccccagcaccagccccagcaacaccagccccgaggcgggtccctcctctcagcccaaggtggatgtccgcatgattgactttgcacacagcacattcaagggcttccgggatgaccccaccgtgcatgatgggccagacagaggctacgtgtttggcctggagaacctcatcagcatcatggaacagatgcgggacgagaaccagtaggccctgttctgggcccccagaaccccttcctctccactgcaggcagggaccattgttctgaacttgccgtgaggacacacagacttgcttttaaagggttatatttctctttggtgtaaactaaaagaaatgtttttagctgtagcctggaatccatatatataaagtgaaggagggcagaccacacgccctctcagccaggctcctcagctttgtggctctgactggtgtgtccaggctgccttaggaaggaagaggtgcccctggtgggcttggcagcagggacagggtgcccttggacattggtttctcttgtctagatctttgagatctgtggctgcagggccctgctgattgtaaggtaaagccctgggctggtgcagggcccctccacgcccactcttcccttgttccccagaagtagagggctctgggtgcccatttcttgggggctttccagtcttatgctgtgggtgtcagctagctctttaataggtgccctcagggcaccacagggctgactgcacaaagctggacccatccttcggtctgaccttagcatggggctagattaatgaagctgggctgaggccaacttatggcagagggcggcgcctgggttccccaggcacctgttggcacgtgacaggttggcacctgtcctattcctgaaacagcctctctcaccaagttcccttgcctaagaaggccactccctcccaccccactgaagtgggggatagtcggtgtcctagcaggcctcagggcctctggtggctctggcccagacagtatttgcagttcttgtgctatgggtgggagtcttcttcctcaagtttcggcagctgtgctgctgctggatgggctgctcctcccagggctcaagggctgtggtccgctcagggtctcatttccccaggccaagttcaaggcagcagccctttgtgaggcgctcttggccctgggcctggagggagaactttaagcttttttgctcacagggacgtggtatgggccctgggtgcaggtgcccacattctgctaatgagagctttgtctgatcagtcctgggtccatcagtttgtccatgtgtccggctgccagcccgtcccttgggatccttcccctggggtgtagccttgttcattagtatatactcattccttcatgctttcctcagcagaacacttccacttctgaggtgagcttttgccccatgcccttcctccacaggtgttgcctttttataaagacctgatagcagaataaattggtgtttccctgttgacccagcaccatttctgtgggcctagaatatggccctcaacccttagagtggggcagtgagggcttgaggagtgacccttcctttctcatggttttagtcattttggctgccagcccttaatggcacagatctgctgcttctaacagatggccaggaggtgacaccgatttcagccattgccaaggttagcaccctctcctttgagcctagggccacactgttcattgtcactttaggcaagtgcctgtttggctttaaaggtaagcctgccagctgtgagaagccttggtaactgatggactcatttcctggtccttaaagatgcagcctcttaagggctccttgatggatgccatctctcctagcccccagccctggtgccactggtgggcaggttcccattctttggggctgggagggacagcttgcctgtttctggtcacaaattacagtcttctctcctgtaccattctgtggcttcagccatgggggcagtagcccttcattagtgtagatagtcattccctggtagggtggagggtaagacatagggtctggaactgtttgggaccttttggggatgtcctgtgcctcccagattcctcgattctgggaggagaggctgccgcattctgctgctcctcacagcgagcaaagctgcacccacttacattcagtattttcctggcactacaaagagtgggaaggcctgggatttgctgctgctcccttagagcagggcccctcttttcagcactttggacacctggagacccagccctgttatttaatggtagtgggcaagtgtgtgtgcatactgtctgccactgctttctccctgccccatgccagagagccctgtccctgccaggcccagccttcttagccccaacttgggaacaaagtgcaacatgggatcatgggttggggtgctcaggtgagccctctctatagtgcttccctgggccaagctgacaccagcccctgagggtggggtgggacgggtggtgcttaaaagaggaaggggaccagtgtagcaacttgccagggaccccacccctccctctctgggcctgtgcagtgagcatggggattcccatcaaggggcctggcacctgtgctagttacgtagccgctgctcacgcgctcactcctgaccacatgcacgttccctagatgcagactgctttgaactttaaagctgtacaatttggttatgtttgtgctgacttaaaatatattttaatgaggaaaaaataatggagaaccctgggaaggacctggttcttttgcttctcggggaactgtaagccctcgcgttctgggaatcgctctctgctgctctttcctggaagctaagcctgtctccaccgcccgaggcctgcgccggtggctcccgccgcagttgcgtttgctttggaccttgcgtgcgggggagggggtgctcggtccgagcccgctcctttctgtacacctagcgctgcccgccccgcttgtgtctgaggtcgtgtatgtcaaaaataaagccgctagaaacggagg

SEQ ID NO: 1919 - protein, 276 aa, Homosapiens; identical to SEQ ID NO: 157

SEQ ID NO: 1920 - DNA, 4473 bp, Homosapiens
agccgccatcttgttgttgatccgtacccagtgggcagcgccgggagctggaccaagcggccggtgagaggccgctgtagcggtgctcagccacctgtgctgcctgccagggggcgggccgaaacctggaggcccggggggcccagctcccgtagggagccgtgggcgctcggtgcccgggccgggcaggacagaataataagctgaatagaatctgaccattggctttcacctggccaggaccttctatgtagctctccttttgtggcccatgtgctgcatcctctgccctcagtgtgcaactggcccccaacgcaatgtgtgtttgtcaaaccatggaagtggggcagtatggcaagaatgcaagtcgggctggagaccggggagtcctcctggagcccttcatccaccaagtaggcggacacagcagcatgatgcgttacgacgatcacactgtgtgcaagcccctcatctcccgggaacagcgcttttacgagtccctccctcccgaaatgaaggagttcacccctgaatacaaaggcgtggtatctgtctgttttgagggggacagtgatggttacatcaacttagtggcctatccttatgtggaaagtgagactgtggaacaggatgacacaacagaacgggagcaacctcggcgcaaacactcccgccggagcctgcaccggtcaggcagtggcagtgaccacaaggaggagaaagccagcctgtcccttgagacctctgagagctcacaggaggcaaagagtccgaaggtggagctgcacagccactcagaggtccctttccagatgctagatggcaacagtggcttgagttctgagaagatcagccacaacccctggagcctgcgttgtcacaagcagcagctgagccgcatgcgctccgagtccaaggaccgaaagctctacaagttcctcctgcttgagaacgtggtgcaccacttcaagtacccctgcgtgttggacctgaagatgggcacgcggcagcatggcgatgacgcgtcagctgagaaggcagcccggcagatgcggaaatgcgagcagagcacatcagccacgctgggcgtcagggtctgcggcatgcaggtgtaccagctggacacagggcattacctctgcaggaacaagtactatggccgtgggctctccattgaaggcttccgcaatgccctctatcaatatctgcacaatggcctggacctgcgacgtgacctgtttgagcctatcctgagcaaactgcggggcctgaaagctgtgctggagcggcaggcctcttaccgcttctactccagttccctgcttgtcatctatgatggcaaggagtgccgggctgagtcctgcctggaccgccggtctgagatgcgtctcaagcacctggacatggtgctccctgaggtggcgtcatcctgtggccccagcaccagccccagcaacaccagccccgaggcgggtccctcctctcagcccaaggtggatgtccgcatgattgactttgcacacagcacattcaagggcttccgggatgaccccaccgtgcatgatgggccagacagaggctacgtgtttggcctggagaacctcatcagcatcatggaacagatgcgggacgagaaccagtaggccctgttctgggcccccagaaccccttcctctccactgcaggcagggaccattgttctgaacttgccgtgaggacacacagacttgcttttaaagggttatatttctctttggtgtaaactaaaagaaatgtttttagctgtagcctggaatccatatatataaagtgaaggagggcagaccacacgccctctcagccaggctcctcagctttgtggctctgactggtgtgtccaggctgccttaggaaggaagaggtgcccctggtgggcttggcagcagggacagggtgcccttggacattggtttctcttgtctagatctttgagatctgtggctgcagggccctgctgattgtaaggtaaagccctgggctggtgcagggcccctccacgcccactcttcccttgttccccagaagtagagggctctgggtgcccatttcttgggggctttccagtcttatgctgtgggtgtcagctagctctttaataggtgccctcagggcaccacagggctgactgcacaaagctggacccatccttcggtctgaccttagcatggggctagattaatgaagctgggctgaggccaacttatggcagagggcggcgcctgggttccccaggcacctgttggcacgtgacaggttggcacctgtcctattcctgaaacagcctctctcaccaagttcccttgcctaagaaggccactccctcccaccccactgaagtgggggatagtcggtgtcctagcaggcctcagggcctctggtggctctggcccagacagtatttgcagttcttgtgctatgggtgggagtcttcttcctcaagtttcggcagctgtgctgctgctggatgggctgctcctcccagggctcaagggctgtggtccgctcagggtctcatttccccaggccaagttcaaggcagcagccctttgtgaggcgctcttggccctgggcctggagggagaactttaagcttttttgctcacagggacgtggtatgggccctgggtgcaggtgcccacattctgctaatgagagctttgtctgatcagtcctgggtccatcagtttgtccatgtgtccggctgccagcccgtcccttgggatccttcccctggggtgtagccttgttcattagtatatactcattccttcatgctttcctcagcagaacacttccacttctgaggtgagcttttgccccatgcccttcctccacaggtgttgcctttttataaagacctgatagcagaataaattggtgtttccctgttgacccagcaccatttctgtgggcctagaatatggccctcaacccttagagtggggcagtgagggcttgaggagtgacccttcctttctcatggttttagtcattttggctgccagcccttaatggcacagatctgctgcttctaacagatggccaggaggtgacaccgatttcagccattgccaaggttagcaccctctcctttgagcctagggccacactgttcattgtcactttaggcaagtgcctgtttggctttaaaggtaagcctgccagctgtgagaagccttggtaactgatggactcatttcctggtccttaaagatgcagcctcttaagggctccttgatggatgccatctctcctagcccccagccctggtgccactggtgggcaggttcccattctttggggctgggagggacagcttgcctgtttctggtcacaaattacagtcttctctcctgtaccattctgtggcttcagccatgggggcagtagcccttcattagtgtagatagtcattccctggtagggtggagggtaagacatagggtctggaactgtttgggaccttttggggatgtcctgtgcctcccagattcctcgattctgggaggagaggctgccgcattctgctgctcctcacagcgagcaaagctgcacccacttacattcagtattttcctggcactacaaagagtgggaaggcctgggatttgctgctgctcccttagagcagggcccctcttttcagcactttggacacctggagacccagccctgttatttaatggtagtgggcaagtgtgtgtgcatactgtctgccactgctttctccctgccccatgccagagagccctgtccctgccaggcccagccttcttagccccaacttgggaacaaagtgcaacatgggatcatgggttggggtgctcaggtgagccctctctatagtgcttccctgggccaagctgacaccagcccctgagggtggggtgggacgggtggtgcttaaaagaggaaggggaccagtgtagcaacttgccagggaccccacccctccctctctgggcctgtgcagtgagcatggggattcccatcaaggggcctggcacctgtgctagttacgtagccgctgctcacgcgctcactcctgaccacatgcacgttccctagatgcagactgctttgaactttaaagctgtacaatttggttatgtttgtgctgacttaaaatatattttaatgaggaaaaaataatggagaaccctgggaaggacctggttcttttgcttctcggggaactgtaagccctcgcgttctgggaatcgctctctgctgctctttcctggaagctaagcctgtctccaccgcccgaggcctgcgccggtggctcccgccgcagttgcgtttgctttggaccttgcgtgcgggggagggggtgctcggtccgagcccgctcctttctgtacacctagcgctgcccgccccgcttgtgtctgaggtcgtgtatgtcaaaaataaagccgctagaaacggagg

SEQ ID NO: 1921 - protein, 441 aa, Homosapiens; identical to SEQ ID NO: 159

SEQ ID NO: 1922 - DNA, 1573 bp, Homosapiens
gaacaagtactatggccgtgggctctccattgaaggcttccgcaatgccctctatcaatatctgcacaatggcctggacctgcgacgtgacctgtttgagcctatcctgagcaaactgcggggcctgaaagctgtgctggagcggcaggcctcttaccgcttctactccagttccctgcttgtcatctatgatggcaaggagtgccgggctgagtcctgcctggaccgccggtctgagatgcgtctcaagcacctggacatggtgctccctgaggtggcgtcatcctgtggccccagcaccagccccagcaacaccagccccgaggcgggtccctcctctcagcccaaggtggatgtccgcatgattgactttgcacacagcacattcaagggcttccgggatgaccccaccgtgcatgatgggccagacagaggctacgtgtttggcctggagaacctcatcagcatcatggaacagatgcgggacgagaaccagtaggccctgttctgggcccccagaaccccttcctctccactgcaggcagggaccattgttctgaacttgccgtgaggacacacagacttgcttttaaagggttatatttctctttggtgtaaactaaaagaaatgtttttagctgtagcctggaatccatatatataaagtgaaggagggcagaccacacgccctctcagccaggctcctcagctttgtggctctgactggtgtgtccaggctgccttaggaaggaagaggtgcccctggtgggcttggcagcagggacagggtgcccttggacattggtttctcttgtctagatctttgagatctgtggctgcagggccctgctgattgtaaggtaaagccctgggctggtgcagggcccctccacgcccactcttcccttattcctcgattctgggaggagaggctgccgcattctgctgctcctcacagcgagcaaagctgcacccacttacattcagtattttcctggcactacaaagagtgggaaggcctgggatttgctgctgctcccttagagcagggcccctcttttcagcactttggacacctggagacccagccctgttatttaatggtagtgggcaagtgtgtgtgcatactgtctgccactgctttctccctgccccatgccagagagccctgtccctgccaggcccagccttcttagccccaacttgggaacaaagtgcaacatgggatcatgggttggggtgctcaggtgagccctctctatagtgcttccctgggccaagctgacaccagcccctgagggtggggtgggacgggtggtgcttaaaagaggaaggggaccagtgtagcaacttgccagggaccccacccctccctctctgggcctgtgcagtgagcatggggattcccatcaaggggcctggcacctgtgctagttacgtagccgctgctcacgcgctcactcctgaccacatgcacgttccctagatgcagactgctttgaactttaaagctgtacaatttggttatgtttgtgctgacttaaaatatattttaatgaggaaaaaataatgg

SEQ ID NO: 1923 - protein, 86 aa, Homosapiens [sequence omitted]

SEQ ID NO: 1924 - DNA, 3839 bp, Homosapiens
gccatcttgttgttgatccgtacccagtgggcagcgccgggagctggaccaagcggccggtgagaggccgctgtagcggtgctcagccacctgtgctgcctgccagggggcgggccgaaacctggaggcccggggggcccagctcccgtagggagccgtgggcgctcggtgcccgggccgggcaggcgtggtatctgtctgttttgagggggacagtgatggttacatcaacttagtggcctatccttatgtggaaagtgagactgtggaacaggatgacacaacagaacgggagcaacctcggcgcaaacactcccgccggagcctgcaccggtcaggcagtggcagtgaccacaaggaggagaaagccagcctgtcccttgagacctctgagagctcacaggaggcaaagagtccgaaggtggagctgcacagccactcagaggtccctttccagatgctagatggcaacagtggcttgagttctgagaagatcagccacaacccctggagcctgcgttgtcacaagcagcagctgagccgcatgcgctccgagtccaaggaccgaaagctctacaagttcctcctgcttgagaacgtggtgcaccacttcaagtacccctgcgtgttggacctgaagatgggcacgcggcagcatggcgatgacgcgtcagctgagaaggcagcccggcagatgcggaaatgcgagcagagcacatcagccacgctgggcgtcagggtctgcggcatgcaggtgtaccagctggacacagggcattacctctgcaggaacaagtactatggccgtgggctctccattgaaggcttccgcaatgccctctatcaatatctgcacaatggcctggacctgcgacgtgacctgtttgagcctatcctgagcaaactgcggggcctgaaagctgtgctggagcggcaggcctcttaccgcttctactccagttccctgcttgtcatctatgatggcaaggagtgccgggctgagtcctgcctggaccgccggtctgagatgcgtctcaagcacctggacatggtgctccctgaggtggcgtcatcctgtggccccagcaccagccccagcaacaccagccccgaggcgggtccctcctctcagcccaaggtggatgtccgcatgattgactttgcacacagcacattcaagggcttccgggatgaccccaccgtgcatgatgggccagacagaggctacgtgtttggcctggagaacctcatcagcatcatggaacagatgcgggacgagaaccagtaggccctgttctgggcccccagaaccccttcctctccactgcaggcagggaccattgttctgaacttgccgtgaggacacacagacttgcttttaaagggttatatttctctttggtgtaaactaaaagaaatgtttttagctgtagcctggaatccatatatataaagtgaaggagggcagaccacacgccctctcagccaggctcctcagctttgtggctctgactggtgtgtccaggctgccttaggaaggaagaggtgcccctggtgggcttggcagcagggacagggtgcccttggacattggtttctcttgtctagatctttgagatctgtggctgcagggccctgctgattgtaaggtaaagccctgggctggtgcagggcccctccacgcccactcttcccttgttccccagaagtagagggctctgggtgcccatttcttgggggctttccagtcttatgctgtgggtgtcagctagctctttaataggtgccctcagggcaccacagggctgactgcacaaagctggacccatccttcggtctgaccttagcatggggctagattaatgaagctgggctgaggccaacttatggcagagggcggcgcctgggttccccaggcacctgttggcacgtgacaggttggcacctgtcctattcctgaaacagcctctctcaccaagttcccttgcctaagaaggccactccctcccaccccactgaagtgggggatagtcggtgtcctagcaggcctcagggcctctggtggctctggcccagacagtatttgcagttcttgtgctatgggtgggagtcttcttcctcaagtttcggcagctgtgctgctgctggatgggctgctcctcccagggctcaagggctgtggtccgctcagggtctcatttccccaggccaagttcaaggcagcagccctttgtgaggcgctcttggccctgggcctggagggagaactttaagcttttttgctcacagggacgtggtatgggccctgggtgcaggtgcccacattctgctaatgagagctttgtctgatcagtcctgggtccatcagtttgtccatgtgtccggctgccagcccgtcccttgggatccttcccctggggtgtagccttgttcattagtatatactcattccttcatgctttcctcagcagaacacttccacttctgaggtgagcttttgccccatgcccttcctccacaggtgttgcctttttataaagacctgatagcagaataaattggtgtttccctgttgacccagcaccatttctgtgggcctagaatatggccctcaacccttagagtggggcagtgagggcttgaggagtgacccttcctttctcatggttttagtcattttggctgccagcccttaatggcacagatctgctgcttctaacagatggccaggaggtgacaccgatttcagccattgccaaggttagcaccctctcctttgagcctagggccacactgttcattgtcactttaggcaagtgcctgtttggctttaaaggtaagcctgccagctgtgagaagccttggtaactgatggactcatttcctggtccttaaagatgcagcctcttaagggctccttgatggatgccatctctcctagcccccagccctggtgccactggtgggcaggttcccattctttggggctgggagggacagcttgcctgtttctggtcacaaattacagtcttctctcctgtaccattctgtggcttcagccatgggggcagtagcccttcattagtgtagatagtcattccctggtagggtggagggtaagacatagggtctggaactgtttgggaccttttggggatgtcctgtgcctcccagattcctcgattctgggaggagaggctgccgcattctgctgctcctcacagcgagcaaagctgcacccacttacattcagtattttcctggcactacaaagagtgggaaggcctgggatttgctgctgctcccttagagcagggcccctcttttcagcactttggacacctggagacccagccctgttatttaatggtagtgggcaagtgtgtgtgcatactgtctgccactgctttctccctgccccatgccagagagccctgtccctgccaggcccagccttcttagccccaacttgggaacaaagtgcaacatgggatcatgggttggggtgctcaggtgagccctctctatagtgcttccctgggccaagctgacaccagcccctgagggtggggtgggacgggtggtgcttaaaagaggaaggggaccagtgtagcaacttgccagggaccccacccctccctctctgggcctgtgcagtgagcatggggattcccatcaaggggcctggcacctgtgctagttacgtagccgctgctcacgcgctcactcctgaccacatgcacgttccctagatgcagactgctttgaactttaaagctgtacaatttggttatgtttgtgctgacttaaaatatattttaatgaggaaaaaataatgg

SEQ ID NO: 1925 - protein, 276 aa, Homosapiens; identical to SEQ ID NO: 157

SEQ ID NO: 1926 - DNA, 1722 bp, Homosapiens
agatgggaccgtctagttgcaggaaaacaatcttagagctcccaaggattctacattatggacagaataataagctgaatagaatctgaccattggctttcacctggccaggaccttctatgtagctctccttttgtggcccatgtgctgcatcctctgccctcagtgtgcaactggcccccaacgcaatgtgtgtttgtcaaaccatggaagtggggcagtatggcaagaatgcaagtcgggctggagaccggggagtcctcctggagcccttcatccaccaagtaggcggacacagcagcatgatgcgttacgacgatcacactgtgtgcaagcccctcatctcccgggaacagcgcttttacgagtccctccctcccgaaatgaaggagttcacccctgaatacaaaggcgtggtatctgtctgttttgagggggacagtgatggttacatcaacttagtggcctatccttatgtggaaagtgagactgtggaacaggatgacacaacagaacgggagcaacctcggcgcaaacactcccgccggagcctgcaccggtcaggcagtggcagtgaccacaaggaggagaaagccagcctgtcccttgagacctctgagagctcacaggaggcaaagagtccgaaggtggagctgcacagccactcagaggtccctttccagatgctagatggcaacagtggcttgagttctgagaagatcagccacaacccctggagcctgcgttgtcacaagcagcagctgagccgcatgcgctccgagtccaaggaccgaaagctctacaagttcctcctgcttgagaacgtggtgcaccacttcaagtacccctgcgtgttggacctgaagatgggcacgcggcagcatggcgatgacgcgtcagctgagaaggcagcccggcagatgcggaaatgcgagcagagcacatcagccacgctgggcgtcagggtctgcggcatgcaggtgtaccagctggacacagggcattacctctgcaggaacaagtactatggccgtgggctctccattgaaggcttccgcaatgccctctatcaatatctgcacaatggcctggacctgcgacgtgacctgtttgagcctatcctgagcaaactgcggggcctgaaagctgtgctggagcggcaggcctcttaccgcttctactccagttccctgcttgtcatctatgatggcaaggagtgccgggctgagtcctgcctggaccgccggtctgagatgcgtctcaagcacctggacatggtgctccctgaggtggcgtcatcctgtggccccagcaccagccccagcaacaccagccccgaggcgggtccctcctctcagcccaaggtggatgtccgcatgattgactttgcacacagcacattcaagggcttccgggatgaccccaccgtgcatgatgggccagacagaggctacgtgtttggcctggagaacctcatcagcatcatggaacagatgcgggacgagaaccagtaggccctgttctgggcccccagaaccccttcctctccactgcaggcagggaccattgttctgaacttgccgtgaggacacacagacttgcttttaaagggttatatttctctttggtgtaaactaaaagaaatgtttttagctgtagcctggaatccatatatataaagtgaaggagggcagaccacacgccctctcagccaggctcctc

SEQ ID NO: 1927 - protein, 441 aa, Homosapiens; identical to SEQ ID NO: 159

SEQ ID NO: 1928 - DNA, 1827 bp, Homosapiens
gctcaagccattctcccacttcagcctcccgcgtagctaagactacagcctggacgacagacccccaactctaaaaaggaaaacaacaacaaaaaattacatttcattaacatgagaaacttctttttacttgaatggagacataattccttttggaattcaatggacagaataataagctgaatagaatctgaccattggctttcacctggccaggaccttctatgtagctctccttttgtggcccatgtgctgcatcctctgccctcagtgtgcaactggcccccaacgcaatgtgtgtttgtcaaaccatggaagtggggcagtatggcaagaatgcaagtcgggctggagaccggggagtcctcctggagcccttcatccaccaagtaggcggacacagcagcatgatgcgttacgacgatcacactgtgtgcaagcccctcatctcccgggaacagcgcttttacgagtccctccctcccgaaatgaaggagttcacccctgaatacaaaggcgtggtatctgtctgttttgagggggacagtgatggttacatcaacttagtggcctatccttatgtggaaagtgagactgtggaacaggatgacacaacagaacgggagcaacctcggcgcaaacactcccgccggagcctgcaccggtcaggcagtggcagtgaccacaaggaggagaaagccagcctgtcccttgagacctctgagagctcacaggaggcaaagagtccgaaggtggagctgcacagccactcagaggtccctttccagatgctagatggcaacagtggcttgagttctgagaagatcagccacaacccctggagcctgcgttgtcacaagcagcagctgagccgcatgcgctccgagtccaaggaccgaaagctctacaagttcctcctgcttgagaacgtggtgcaccacttcaagtacccctgcgtgttggacctgaagatgggcacgcggcagcatggcgatgacgcgtcagctgagaaggcagcccggcagatgcggaaatgcgagcagagcacatcagccacgctgggcgtcagggtctgcggcatgcaggtgtaccagctggacacagggcattacctctgcaggaacaagtactatggccgtgggctctccattgaaggcttccgcaatgccctctatcaatatctgcacaatggcctggacctgcgacgtgacctgtttgagcctatcctgagcaaactgcggggcctgaaagctgtgctggagcggcaggcctcttaccgcttctactccagttccctgcttgtcatctatgatggcaaggagtgccgggctgagtcctgcctggaccgccggtctgagatgcgtctcaagcacctggacatggtgctccctgaggtggcgtcatcctgtggccccagcaccagccccagcaacaccagccccgaggcgggtccctcctctcagcccaaggtggatgtccgcatgattgactttgcacacagcacattcaagggcttccgggatgaccccaccgtgcatgatgggccagacagaggctacgtgtttggcctggagaacctcatcagcatcatggaacagatgcgggacgagaaccagtaggccctgttctgggcccccagaaccccttcctctccactgcaggcagggaccattgttctgaacttgccgtgaggacacacagacttgcttttaaagggttatatttctctttggtgtaaactaaaagaaatgtttttagctgtagcctggaatccatatatataaagtgaaggagggcagaccacacgccctctcagccaggctcctc

SEQ ID NO: 1929 - protein, 441 aa, Homosapiens; identical to SEQ ID NO: 159

SEQ ID NO: 1930 - DNA, 2192 bp, Homosapiens
ctcccagatgctggcaccgaagccggggggacagccggtgtggaggacggagagcgccagtgcctgagggttggccggctagtagcgggaaaccagcttctctgaccgaagctctggactccgctgatccggagcgctaaagtgtgtccggtgccaccctgatgctctcctgggagttatgttgctcctggctgagaaatagacttacctctttcttagatagcgttcctgcgagtgattttcaggacgctggatgctaagactagacgaagcaagccaaagcccccgcgagccaggcaggccggtgtcacggccctatgattatggcaagggggaccctctgcctggctgctgcttcctgagacccgttcggaacctcacgtgtacctcgaagctcaccgttttcctcgcaaagaacctggttaaatgtccataatggctgagttttattttggaacataatttctttggttcttcaccaccactttttggagagtggtaatgtcttcctctttttgctttaggagaaagacagaataataagctgaatagaatctgaccattggctttcacctggccaggaccttctatgtagctctccttttgtggcccatgtgctgcatcctctgccctcagtgtgcaactggcccccaacgcaatgtgtgtttgtcaaaccatggaagtggggcagtatggcaagaatgcaagtcgggctggagaccggggagtcctcctggagcccttcatccaccaagtaggcggacacagcagcatgatgcgttacgacgatcacactgtgtgcaagcccctcatctcccgggaacagcgcttttacgagtccctccctcccgaaatgaaggagttcacccctgaatacaaaggcgtggtatctgtctgttttgagggggacagtgatggttacatcaacttagtggcctatccttatgtggaaagtgagactgtggaacaggatgacacaacagaacgggagcaacctcggcgcaaacactcccgccggagcctgcaccggtcaggcagtggcagtgaccacaaggaggagaaagccagcctgtcccttgagacctctgagagctcacaggaggcaaagagtccgaaggtggagctgcacagccactcagaggtccctttccagatgctagatggcaacagtggcttgagttctgagaagatcagccacaacccctggagcctgcgttgtcacaagcagcagctgagccgcatgcgctccgagtccaaggaccgaaagctctacaagttcctcctgcttgagaacgtggtgcaccacttcaagtacccctgcgtgttggacctgaagatgggcacgcggcagcatggcgatgacgcgtcagctgagaaggcagcccggcagatgcggaaatgcgagcagagcacatcagccacgctgggcgtcagggtctgcggcatgcaggtgtaccagctggacacagggcattacctctgcaggaacaagtactatggccgtgggctctccattgaaggcttccgcaatgccctctatcaatatctgcacaatggcctggacctgcgacgtgacctgtttgagcctatcctgagcaaactgcggggcctgaaagctgtgctggagcggcaggcctcttaccgcttctactccagttccctgcttgtcatctatgatggcaaggagtgccgggctgagtcctgcctggaccgccggtctgagatgcgtctcaagcacctggacatggtgctccctgaggtggcgtcatcctgtggccccagcaccagccccagcaacaccagccccgaggcgggtccctcctctcagcccaaggtggatgtccgcatgattgactttgcacacagcacattcaagggcttccgggatgaccccaccgtgcatgatgggccagacagaggctacgtgtttggcctggagaacctcatcagcatcatggaacagatgcgggacgagaaccagtaggccctgttctgggcccccagaaccccttcctctccactgcaggcagggaccattgttctgaacttgccgtgaggacacacagacttgcttttaaagggttatatttctctttggtgtaaactaaaagaaatgtttttagctgtagcctggaatccatatatataaagtgaaggagggcagaccacacgccctctcagccaggctcctc

SEQ ID NO: 1931 - protein, 441 aa, Homosapiens; identical to SEQ ID NO: 159

SEQ ID NO: 1932 - DNA, 1496 bp, Homosapiens
gccatcttgttgttgatccgtacccagtgggcagcgccgggagctggaccaagcggccggtgagaggccgctgtagcggtgctcagccacctgtgctgcctgccagggggcgggccgaaacctggaggcccggggggcccagctcccgtagggagccgtgggcgctcggtgcccgggccgggcaggcgtggtatctgtctgttttgagggggacagtgatggttacatcaacttagtggcctatccttatgtggaaagtgagactgtggaacaggatgacacaacagaacgggagcaacctcggcgcaaacactcccgccggagcctgcaccggtcaggcagtggcagtgaccacaaggaggagaaagccagcctgtcccttgagacctctgagagctcacaggaggcaaagagtccgaaggtggagctgcacagccactcagaggtccctttccagatgctagatggcaacagtggcttgagttctgagaagatcagccacaacccctggagcctgcgttgtcacaagcagcagctgagccgcatgcgctccgagtccaaggaccgaaagctctacaagttcctcctgcttgagaacgtggtgcaccacttcaagtacccctgcgtgttggacctgaagatgggcacgcggcagcatggcgatgacgcgtcagctgagaaggcagcccggcagatgcggaaatgcgagcagagcacatcagccacgctgggcgtcagggtctgcggcatgcaggtgtaccagctggacacagggcattacctctgcaggaacaagtactatggccgtgggctctccattgaaggcttccgcaatgccctctatcaatatctgcacaatggcctggacctgcgacgtgacctgtttgagcctatcctgagcaaactgcggggcctgaaagctgtgctggagcggcaggcctcttaccgcttctactccagttccctgcttgtcatctatgatggcaaggagtgccgggctgagtcctgcctggaccgccggtctgagatgcgtctcaagcacctggacatggtgctccctgaggtggcgtcatcctgtggccccagcaccagccccagcaacaccagccccgaggcgggtccctcctctcagcccaaggtggatgtccgcatgattgactttgcacacagcacattcaagggcttccgggatgaccccaccgtgcatgatgggccagacagaggctacgtgtttggcctggagaacctcatcagcatcatggaacagatgcgggacgagaaccagtaggccctgttctgggcccccagaaccccttcctctccactgcaggcagggaccattgttctgaacttgccgtgaggacacacagacttgcttttaaagggttatatttctctttggtgtaaactaaaagaaatgtttttagctgtagcctggaatccatatatataaagtgaaggagggcagaccacacgccctctcagccaggctcctc

SEQ ID NO: 1933 - protein, 276 aa, Homosapiens; identical to SEQ ID NO: 157

SEQ ID NO: 1934 - DNA, 1851 bp, Homosapiens
agccgccatcttgttgttgatccgtacccagtgggcagcgccgggagctggaccaagcggccggtgagaggccgctgtagcggtgctcagccacctgtgctgcctgccagggggcgggccgaaacctggaggcccggggggcccagctcccgtagggagccgtgggcgctcggtgcccgggccgggcaggacagaataataagctgaatagaatctgaccattggctttcacctggccaggaccttctatgtagctctccttttgtggcccatgtgctgcatcctctgccctcagtgtgcaactggcccccaacgcaatgtgtgtttgtcaaaccatggaagtggggcagtatggcaagaatgcaagtcgggctggagaccggggagtcctcctggagcccttcatccaccaagtaggcggacacagcagcatgatgcgttacgacgatcacactgtgtgcaagcccctcatctcccgggaacagcgcttttacgagtccctccctcccgaaatgaaggagttcacccctgaatacaaaggcgtggtatctgtctgttttgagggggacagtgatggttacatcaacttagtggcctatccttatgtggaaagtgagactgtggaacaggatgacacaacagaacgggagcaacctcggcgcaaacactcccgccggagcctgcaccggtcaggcagtggcagtgaccacaaggaggagaaagccagcctgtcccttgagacctctgagagctcacaggaggcaaagagtccgaaggtggagctgcacagccactcagaggtccctttccagatgctagatggcaacagtggcttgagttctgagaagatcagccacaacccctggagcctgcgttgtcacaagcagcagctgagccgcatgcgctccgagtccaaggaccgaaagctctacaagttcctcctgcttgagaacgtggtgcaccacttcaagtacccctgcgtgttggacctgaagatgggcacgcggcagcatggcgatgacgcgtcagctgagaaggcagcccggcagatgcggaaatgcgagcagagcacatcagccacgctgggcgtcagggtctgcggcatgcaggtgtaccagctggacacagggcattacctctgcaggaacaagtactatggccgtgggctctccattgaaggcttccgcaatgccctctatcaatatctgcacaatggcctggacctgcgacgtgacctgtttgagcctatcctgagcaaactgcggggcctgaaagctgtgctggagcggcaggcctcttaccgcttctactccagttccctgcttgtcatctatgatggcaaggagtgccgggctgagtcctgcctggaccgccggtctgagatgcgtctcaagcacctggacatggtgctccctgaggtggcgtcatcctgtggccccagcaccagccccagcaacaccagccccgaggcgggtccctcctctcagcccaaggtggatgtccgcatgattgactttgcacacagcacattcaagggcttccgggatgaccccaccgtgcatgatgggccagacagaggctacgtgtttggcctggagaacctcatcagcatcatggaacagatgcgggacgagaaccagtaggccctgttctgggcccccagaaccccttcctctccactgcaggcagggaccattgttctgaacttgccgtgaggacacacagacttgcttttaaagggttatatttctctttggtgtaaactaaaagaaatgtttttagctgtagcctggaatccatatatataaagtgaaggagggcagaccacacgccctctcagccaggctcctc

SEQ ID NO: 1935 - protein, 441 aa, Homosapiens; identical to SEQ ID NO: 159

SEQ ID NO: 1936 - DNA, 655 bp, Homosapiens
caggaactcaccatctatgctcctctgggccgtagcgtggaggtgaccaagatgtcatgccagatccctcaggagccacagcgcctgatctactcctatagcatcgtgggagggaatagccagaaccgattcatcctgcaaggggccatcctggtgcacagtgaccttgtgttggggccgttctggccagagcagccccgtacctatgagctactgatctgtgtggccgatgcaggcccctccaccccccacctcagcaccacagccaccattattgtgcatctagttccccggagggccagcacagtggccaccagcacccacagaaccacagttggcccagctgctgcaagcacccagcaaaccagcccaggctttgctgctaaacagcatccagggaactgagggatccatcgagggtttcctggaggcaccgaagatggagatgtcccaggcacccagcagtgtcatgagtctgcagcattttgatggcagagcacaggactcccgtaccggaagagactacctgtttaacacacacacaggagcccggcgctggctctgaggccaagtagctgtcttactatgtgtggaatttctttttcacaccatcatgggctgtattttcaagttgattcataataaacaaaattac

SEQ ID NO: 1937 - protein, 117 aa, Homosapiens
MSCQIPQEPQRLIYSYSIVGGNSQNRFILQGAILVHSDLVLGPFWPEQPRTYELLICVADAGPSTPHLSTTATIIVHLVPRRASTVATSTHRTTVGPAAASTQQTSPGFAAKQHPGN

SEQ ID NO: 1938 - DNA, 1965 bp, Homosapiens
atgagcattatcagtgcccaggacctgccacacttccctggacctttctccatcaatgagcaaggttggctgcaggcaccatcccagggcctcctaggccaggctcaaaaggtcttccagctgcaaatctcagtgtcctttggacaaaggcaaagctgccaagggatggtgatagtgaaggttttgcctgttccctccagccaggtctccttcctcgagcaggctcagaatatcaccatccctgagaatctggcccccggtagtgaggtggttcaggtccaggcccggggtgtcgacctgcgctatgaaatcctgtctccggtgcccagcccactcttctccattggtcgtgcagacggtgtggtccggaccaccacgcccctagagttagctcgcacctcaggcaccgcggtctccaggctgcaggtgaaggcctttgagcagggccagctgtgggccagtgccaagctcaatctcaccatgaatgtgcagctggtcaacctctggcctccacgctgcctcccagcgcttctggtgtcccaaatcccggagactgcacccgtgggcaccgtgctgaatactctcacttgcgaagatccggactctgttggtgccaccctggactacaagctgtggttccgcagctcttccaaccctgccagcctctgcctttatgacagagtccttgaggtgaatgccacactggactgtgacactcctggagcctgcttccagcatgcagcctccatcctggtgctcgatggtggccagccccagatgaccactgaggtgccggtactggtgatggtgacacccatcaacgagttctccccagcctgtgcccctcgcacgttccgggttcaggaggatgcggcgccccacactctactgggctccgtggtgggcacggatatggattaccctcatgacaacattgagtactacacctctggtggtcctaccacctttgctgtggaccgtctcagcggggaagttcacctcctgggacctttggactatgagcagcagaggctgtacaggctcactgtccttgtgattgaccatggccaagaccagaaccccaaccatcacctctcaggctcctgtaccattaccatcgaggttgaggatgtgaatgaccatgcccccgagtgtgagcccccatttcaggaactcaccatctatgctcctctgggccgtagcgtggaggtgaccaagatgtcatgccagatccctcaggagccacagcgcctgatctactcctatagcatcgtgggagggaatagccagaaccgattcatcctgcaaggggccatcctggtgcacagtgaccttgtgttggggccgttctggccagagcagccccgtacctatgagctactgatctgtgtggccgatgcaggcccctccaccccccacctcagcaccacagccaccattattgtgcatctagttccccggagggccagcacagtggccaccagcacccacagaaccacagtgccctcaacgatgacacccatgctcgtgacagacacagaggctttctggcagccacagccctggtttgtggtggtgttgacagcaactggtgctcttctcctcttggccctaggctggcttcttggcaggctcctccaggggttggcccagctgctgcaagcacccagcaaaccagcccaggctttgctgctaaacagcatccagggaactgagggatccatcgagggtttcctggaggcaccgaagatggagatgtcccaggcacccagcagtgtcatgagtctgcagcattttgatggcagagcacaggactcccgtaccggaagagactacctgtttaacacacacacaggagcccggcgctggctctgaggccaagtagctgtcttactatgtgtggaatttctttttcacaccatcatgggctgtattttcaagttgattcataataaacaaaattac

SEQ ID NO: 1939 - protein, 624 aa, Homosapiens
MSIISAQDLPHFPGPFSINEQGWLQAPSQGLLGQAQKVFQLQISVSFGQRQSCQGMVIVKVLPVPSSQVSFLEQAQNITIPENLAPGSEVVQVQARGVDLRYEILSPVPSPLFSIGRADGVVRTTTPLELARTSGTAVSRLQVKAFEQGQLWASAKLNLTMNVQLVNLWPPRCLPALLVSQIPETAPVGTVLNTLTCEDPDSVGATLDYKLWFRSSSNPASLCLYDRVLEVNATLDCDTPGACFQHAASILVLDGGQPQMTTEVPVLVMVTPINEFSPACAPRTFRVQEDAAPHTLLGSVVGTDMDYPHDNIEYYTSGGPTTFAVDRLSGEVHLLGPLDYEQQRLYRLTVLVIDHGQDQNPNHHLSGSCTITIEVEDVNDHAPECEPPFQELTIYAPLGRSVEVTKMSCQIPQEPQRLIYSYSIVGGNSQNRFILQGAILVHSDLVLGPFWPEQPRTYELLICVADAGPSTPHLSTTATIIVHLVPRRASTVATSTHRTTVPSTMTPMLVTDTEAFWQPQPWFVVVLTATGALLLLALGWLLGRLLQGLAQLLQAPSKPAQALLLNSIQGTEGSIEGFLEAPKMEMSQAPSSVMSLQHFDGRAQDSRTGRDYLFNTHTGARRWL

SEQ ID NO: 1940 - DNA, 1492 bp, Homosapiens
gctgtctgtgtcttcaggtcatcatggtgctgctcaggctcctcgtgttcctctttgctccggtggtctctgacctctgcagcctgccctgctttataaatgtctctgagagccagggccctggcacagtccttcagtttttatccttcaactgctcctcctacacgcccacacccaccctggagttgctcaatgtccagccacccaccaccttcttcaacccacccagcttggccaggtggcaagggacctatgtgggcaagttgaccttgagcagctctgctcagttggatgccctgatggtgaaccactacaaggtgcagctgaagttcacatgtggcaaccatgtgatggagggctcactctctgtggatgtgcagcgggaccttagccatatccagtgtgctggtcaatttgccagcccaggtgaggccaggggcagccggcagggtgggggcaggcatggcctgagcagatcctccctgacctccactctggccagctggggaaatgattcaggtgccagagacagtcacacctggggctcggctgtacactctgctcctcccaggcctagaactccacggagcgcaggtaagcccagaacatgggacggtgggtgacaggatgggggtggggggatggagagaataaattaacccccacctggccaggcacagcctgaagaggaaccttgcagcagaggcatagatgagcctctacatgatgtatgttcttggagagagctgctgagggctgctcactccccagtgaccatggctgttcccacagggacatctcaggggctgagttcttttttttttttttttttgagacggagtcttgctctgtcgtccaggctggagtgcagtggcgcgatctcggctcactgcaagctccacctcccaggttcatgccattctcctgcctcagcctcccgagtagctgggactacaggcacccgccaccacgcccggctaatttttttgtattttgtagtggagacagggtttcaccgtgttagccaggatggtctcgatctcctgacctcgtgatctccccacctcggcctcccaaagtgctgggattacaggcatgagccaccgctcccagccaggggctgagttctttcaagatctgctatgtgttctcagttctttatgacaattctgtatcatttctgtaatcaaaaaaaaaaaaaaaacaaacatgtaggtaatggccaggcacggtggctcacacctgtaatcccagcactttgagggggctgaggcaggtggcctcaggagttcgagactagcctggccatcatggtgagactctgtctttactaaaaatacaaaaattagccaggtgtggtggcgtgtgcctgtaatcccagctacttgggaagctgaggcaggagcatcgcttgaacccaggaggtggaggttgcagtgagccaagattgtgccactgctccaggctgggtgacagaacaagactctgtctc

SEQ ID NO: 1941 - protein, 199 aa, Homosapiens; identical to SEQ ID NO: 161

SEQ ID NO: 1942 - DNA, 1063 bp, Homosapiens
agatgtcggggcggcggcggcgggagctacggagagcgaggagtcgcgcaggcaggcggaggctgagggcgccgctggccggccctcccagccctctccgcgcggctccgccggggttccaagaggagctagtaggttcggtgggggccctggcatggacatgcacagcgctcggcttgacagcttccttagccagctccgctgggaactgttgtgtggtcgggacacaggctcaccctcaatgcctggtcccctgcagccaacctcccaaactggcccagatgtgcagcccagccaccagcttagggcctcgggtgccttggaagaggactcagtctgctgtgtggaggaggaggaagaggaggaggaggaagcagtggtgacagaagacagggatgcagccttgggaggccccagggagcatgccctggactgggactctggcttctcggaggtgtcaggcagcacatggcgagaggaagaactgcctgtatcccagcgcccagcaccctcagcacagccccttcgtaggcagtgcctctcagtcagtggcctccccatgcccagcagggcccctgtagccagtgtaccacctgtccaccatccacggcccaagtccaccccagacgcctgcctggagcactggcagggactggaagcagaggactggacagcagccctactgaacaggggtcgcagtcgccagcccctggtactaggggacaattgctttgctgacttggtgcacaactggatggagctgcctgagacagggagtgaagggggtgacggaggtgggcaccgtgcccgtgctcggccccctcagttcctgcttggcctctctgagcagcttcggcgccggctggccagggctcggcggacagctatggcaggaaagcggctgtcatgcccacctcgcccagaacctgaactgcctgcggatgtctcacgctttgcagctctcatgagctgtcgtagccgccagcccatcatctgcaatgatgtcagctacctctgaccctgccctccagcctgggacaataaaagccttttttctagactg

SEQ ID NO: 1943 - protein, 287 aa, Homosapiens; identical to SEQ ID NO: 163

SEQ ID NO: 1944 - DNA, 3317 bp, Homosapiens
cttttcttttctccaggaagagagctgtgaccagcagcgtcccttattcgcttggccttggttcctgtttgcactggctacagcagggcactggcccctactgtcaccgccacctacacaaagaccctatctctgagcgctgcagcctactgttcagccccaggtttgaggatggatgccctggacgcttcgaagctactggatgaggagctgtattcaagacagctgtatgtgctgggctcacctgccatgcagaggattcagggagccagggtcctggtgtcaggcctgcagggcctgggggccgaggtggccaagaacttggttctgatgggtgtgggcagcctcactctgcatgatccccaccccacctgctggtccgacctggctgcccagtttctcctctcagagcaggacttggaaaggagcagagccgaggcctctcaagagctcttggctcagctcaacagagctgtccaggtcgtcgtgcacacgggtgacatcactgaggacctgctgttggacttccaggtggtggtgctgactgctgcaaagctggaggagcagctgaaggtgggcaccttgtgtcataagcatggagtttgctttctggcggctgacacccggggcctcgtggggcagttgttctgtgactttggtgaggacttcactgtgcaggaccccacagaggcagaacccctgacagctgccatccagcacatctcccagggctcccctggcattctcactctgaggaaaggggccaatacccactacttccgtgatggagacttggtgactttctcgggaattgagggaatggttgagctcaacgactgtgatccccggtctatccacgtgcgggaggatgggtccctggagattggagacacaacaactttctctcggtacttgcgtggtggggctatcactgaagtcaagagacccaagactgtgagacataagtccctggacacagccctgctccagccccatgtggtggcccagagctcccaggaagttcaccatgcccactgcctgcatcaggccttctgtgcactgcacaagttccagcacctccatggccggccaccccagccctgggatcctgttgatgcagagactgtggtgggcctggcccgggacctggaaccactgaagcggacagaggaagagccactggaagagccactggatgaggccctagtgcggacagtcgccctaagcagtgcaggtgtcttgagccctatggtggccatgctgggtgcagtagctgcccaggaagtgctgaaggcaatctccaggaagttcatgcctctggaccagtggctttactttgatgccctcgattgtcttccggaagatggggagctccttcccagtcctgaggactgtgccctgagaggcagccgctatgatgggcaaattgcagtgtttggggctggttttcaggagaaactgagacgccagcactacctcctggtgggcgctggtgccattggttgtgagctgctcaaagtctttgccctagtgggactgggggccgggaacagcgggggcttgactgttgttgacatggaccacatagagcgctccaatctcagccgtcagttcctcttcaggtcccaggacgttggtagacccaaggcagaggtggctgcagcagctgcccggggcctgaacccagacttacaggtgatcccgctcacctacccactggatcccaccacagagcacatctatggggataactttttctcccgtgtggatggtgtggctgctgccctggacagtttccaggcccggcgctatgtggctgctcgttgcacccactatctgaagccactgctggaggcaggcacatcgggcacctggggcagtgctacagtattcatgccacatgtgactgaggcctacagagcccctgcctcagctgcagcttctgaggatgccccctaccctgtctgtaccgtgcggtacttccctagcacagccgagcacaccctgcagtgggcccggcatgagtttgaagaactcttccgactgtctgcagagaccatcaaccaccaccaacaggcacacacttccctggcagacatggatgagccacagacactcaccttactgaagccagtgcttggggtcctgagagtgcgtccacagaactggcaagactgtgtggcgtgggctcttggccactggaaactctgctttcattatggcatcaaacagctgctgaggcacttcccacctaataaagtgcttgaggatggaactcccttctggtcaggtcccaaacagtgtccccagcccttggagtttgacaccaaccaagacacacacctcctctacgtactggcagctgccaacctgtatgcccagatgcatgggctgcctggctcacaggactggactgcactcagggagctgctgaagctgctgccacagcctgacccccaacagatggcccccatctttgctagtaatctagagctggcttcggcttctgctgagtttggccctgagcagcagaaggaactgaacaaagccctggaagtctggagtgtgggccctcccctgaagcctctgatgtttgagaaggatgatgacagcaacttccatgtggactttgtggtagcggcagctagcctgagatgtcagaactacgggattccaccggtcaaccgtgcccagagcaagcgaattgtgggccagattatcccagccattgccaccactacagcagctgtggcaggcctgttgggcctggagctgtataaggtggtgagtgggccacggcctcgtagtgcctttcgccacagctacctacatctggctgaaaactacctcatccgctatatgccttttgccccagccatccagacgttccatcacctgaagtggacctcttgggaccgtctgaaggtaccagctgggcagcctgagaggaccctggagtcgctgctggctcatcttcaggagcagcacgggttgagggtgaggatcctgctgcacggctcagccctgctctatgcggccggatggtcacctgaaaagcaggcccagcacctgcccctcagggtgacagaactggttcagcagctgacaggccaggcacctgctcctgggcagcgggtgttggtgctagagctgagctgtgagggtgacgacgaggacactgccttcccacctctgcactatgagctgtgacaaggcagccaccctgtcacctagctcaatggagccccggatcccaagccctgcattgtaagcccacagtaggcactcaataaatgcttgttaaaggaaggcattgc

SEQ ID NO: 1945 - protein, 1012 aa, Homosapiens; identical to SEQ ID NO: 165

SEQ ID NO: 1946 - DNA, 536 bp, Homosapiens
ggacgctgggggctcagggggaccagactgagcccagcagcttctacttacctacctaggtgcttgaggatggaactcccttctggtcaggtcccaaacagtgtccccagcccttggagtttgacaccaaccaagtgagtgggattctgtagggagctccaagatagagatgtggcccctcagagcagaggtaggcatttctgcattctgcagagatgcacagatgcccagagagagccatgcttgtgcatatatgggtgtctacatgtgaggcaaaggcaggcactcaaacagatccacaaatggacaggtgacagaactggttcagcagctgacaggccaggcacctgctcctgggcagcgggtgttggtgctagagctgagctgtgagggtgacgacgaggacactgccttcccacctctgcactatgagctgtgacaaggcagccaccctgtcacctagctcaatggagccccggatcccaagccctgcattgtaagcccacagtaggcactcaataaatgcttgttaaagg

SEQ ID NO: 1947 - protein, 32 aa, Homosapiens
MHRCPERAMLVHIWVSTCEAKAGTQTDPQMDR

SEQ ID NO: 1948 - DNA, 806 bp, Homosapiens
agctttatcagaggctgcaggggccctgctctgggtttcctcaggaagcaccaccccctcatcccccactctcacaactggcccatgtgatggatcgtctgtttccctgtgcgggccccatagccccatttcctgtgctggccccggcctggacggggagggggctgagactctgggcccagatcccacctcccccccaccccccaccccctggctcctgtttcctgctagtccagctcttcccctaggaaaggctgctggtaactgggatgggggttggggggaggtaagaagtctctgactcctcctctacctcatcccagttccatcacctgaagtggacctcttgggaccgtctgaaggtaccagctgggcagcctgagaggaccctggagtcgctgctggctcatcttcaggtgtgccctgttgctaccccaacccccaggctcagcccagcccggcccagctggtgtctgacctttctcctctaggagcagcacgggttgagggtgaggatcctgctgcacggctcagccctgctctatgcggccggatggtcacctgaaaagcaggcccagcacctgcccctcagggtgacagaactggttcagcagctgacaggccaggcacctgctcctgggcagcgggtgttggtgctagagctgagctgtgagggtgacgacgaggacactgccttcccacctctgcactatgagctgtgacaaggcagccaccctgtcacctagctcaatggagccccggatcccaagccctgcattgtaagcccacagtaggcactcaataaa

SEQ ID NO: 1949 - protein, 52 aa, Homosapiens
MDRLFPCAGPIAPFPVLAPAWTGRGLRLWAQIPPPPHPPPPGSCFLLVQLFP

SEQ ID NO: 1950 - DNA, 911 bp, Homosapiens
tctgatctcccaacactgcagcctttagagtagagactggttccatggaagtgccaggcacacatcctggggactcctgctacaccccgacccctcagatctgtgctggaagctgcactcagattagtgaagcctcctggactgctgtctggtactgggcatcctctggtggtgctgtgcaggctggcagcagggccaggccttcccacccaggcttctgcttcctcttctgtggaacagggtggatggagggtggctggaaggatttgagtcaggagtagagctcaggctggggctactatgcccacagagtcctaccaacaggttgatgcagagactgtggtgggcctggcccgggacctggaaccactgaagcggacagaggaagagccactggaagagccactggatgaggccctagtgcggacagtcgccctaagcagtgcaggtgtcttgagccctatggtggccatgctgggtgcagtagctgcccaggaagtgctgaaggtgggcagaggcataggtgtggggggtactgggaagatgtggagatcagtgtgtgtgtcagagggcacccagcgctagagagcagccctggagccttcaccaacctgggtgaagcctccagccaggatctgaggggggtcaggaggtggcaggagtgcccagcctgaagtgctgcccctaggcaatctccaggaagttcatgcctctggaccagtggctttactttgatgccctcgattgtcttccggaagatggggagctccttcccagtcctgaggactgtgccctgagaggcagccgctatgatgggcaaattgcagtgtttggggctggttttcaggagaaactgagacgccagcactacctcctggtgggcgctggtgccattggttgtgagctgctca

SEQ ID NO: 1951 - protein, 67 aa, Homosapiens
MPLDQWLYFDALDCLPEDGELLPSPEDCALRGSRYDGQIAVFGAGFQEKLRRQHYLLVGAGAIGCEL

SEQ ID NO: 1952 - DNA, 451 bp, Homosapiens
ctccaggaagagagctgtgaccagcagcgtcccttattcgcttggccttggttcctgtttgcactggctacagcagggcactggcccctactgtcaccgccacctacacaaagaccctatctctgagcgctgcagcctactgttcagccccaggtttgaggatggatgccctggacgcttcgaagctactggatgaggagctgtattcaagacagctgtatgtgctgggctcacctgccattttctcctctcagagcaggacttggaaaggagcagagccgaggcctctcaagagctcttggctcagctcaacagagctgtccaggtcgtcgtgcacacgggtgacatcactgaggacctgctgttggacttccaggtggtggtgctgactgctgcaaagctggaggagcagctgaaggtgggcaccttgtgtcataagcatggagtttgc

SEQ ID NO: 1953 - protein, 75 aa, Homosapiens
MDALDASKLLDEELYSRQLYVLGSPAIFSSQSRTWKGAEPRPLKSSWLSSTELSRSSCTRVTSLRTCCWTSRWWC

SEQ ID NO: 1954 - DNA, 1487 bp, Homosapiens
gccaaatttgaagcaagcggaggcgcgggggcgcgtctacgaagccggacctgtagcagtttctttggctgcctgggccccttgagtccagccatcatgcctatccgtgctctgtgcactatctgctccgacttcttcgatcactcccgcgacgtggccgccatccactgcggccacaccttccacttgcagtgcctaattcagtggtttgagacagcaccaagtcggacctgcccacagtgccgaatccaggttggcaaaagaaccattatcaataagctcttctttgatcttgcccaggaggaggagaatgtcttggatgcagaattcttaaagaatgaactggacaatgtcagagcccagctttcccagaaagttgcagacagtctactctgaattggatcaggccaagttagaactgaagtcagcccagaaggacttacagagtgctgacaaggaaatcatgagcctgaaaaagaagctaacgatgctgcaggaaaccttgaacctgccaccagtggccagtgagactgtcgaccgcctggttttagagaggtttgttgagccttgggcggtacaggggtcacaaggtgggagagctttctgctccccaattcaggatgtccccaagaagatatgcaaaggccccaggaaggagtcccagctctcactgggtggccagagctgtgcaggagagccagatgaggaactggttggtgccttccctatttttgtccggaatgccatcctaggccagaaacagcccaagaggcccaggtcagagtcctcttgcagcaaagatgtggtaaggacaggcttcgatgggctcggtggccggacaaaattcatccagcctactgacacagtcatgatccgcccattgcctgttaagcccaagaccaaggttaagcagagggtgagggtgaagacagtgccttctctcttccaggccaagctggacaccttcctgtggtcgtgagaacagtgagtctgaccaatggccagacacatgcctgcaacttgtaggtcaaggactgtccaggcaggggttttgtggacagagccccactttcgggaccagcctgaggtgtaagggcagacaaacaggtgagggtgagtgtggcacccagagactgctcttcctgccctcaccctgccccactcctacgactgggagctgacatgaccagcccactgatcctgtcagcaggtcctgctcctgttgccaggctcctgtttatagccatgatcagatgtggtcagactctttctgggcctggagaccacggtcacttgttgactgtctctgtggaccagagtgcttgaggcatctcaggcagcctcagcccaagcttctacctgcctttgacttgcttctaggcatagcctgggccaagcagggtggggaatggaggatagcatgggatgtatggagaggatggaagattttcatgtaaaataaaattaaaaaaaaaaaacaatctctt

SEQ ID NO: 1955 - protein, 213 aa, Homosapiens
MNWTMSEPSFPRKLQTVYSELDQAKLELKSAQKDLQSADKEIMSLKKKLTMLQETLNLPPVASETVDRLVLERFVEPWAVQGSQGGRAFCSPIQDVPKKICKGPRKESQLSLGGQSCAGEPDEELVGAFPIFVRNAILGQKQPKRPRSESSCSKDVVRTGFDGLGGRTKFIQPTDTVMIRPLPVKPKTKVKQRVRVKTVPSLFQAKLDTFLWS

SEQ ID NO: 1956 - DNA, 2032 bp, Homosapiens
aggaagtcgtgctgcggagccaaatttgaagcaagcggaggcgcgggggcgcgtctacgaagccggacctgtagcagtttctttggctgcctgggccccttgagtccagccatcatgcctatccgtgctctgtgcactatctgctccgacttcttcgatcactcccgcgacgtggccgccatccactgcggccacaccttccacttgcagtgcctaattcagtggtttgagacagcaccaagtcggacctgcccacagtgccgaatccaggttggcaaaagaaccattatcaataagctcttctttgatcttgcccaggaggaggagaatgtcttggatgcagaattcttaaagaatgaactggacaatgtcagagcccagctttcccagaaagacaaggagaaacgagacagccaggtcatcatcgacactctgcgggatacgctggaagaacgcaatgctactgtggtatctctgcagcaggccttgggcaaggccgagatgctgtgctccacactgaaaaagcagatgaagtacttagagcagcagcaggatgagaccaaacaagcacaagaggaggcccgccggctcaggagcaagatgaagaccatggagcagattgagcttctactccagagccagcgccctgaggtggaggagatgatccgagacatgggtgtgggacagtcagcggtggaacagctggctgtgtactgtgtgtctctcaagaaagagtacgagaatctaaaagaggcacggaaggcctcaggggaggtggctgacaagctgaggaaggatttgttttcctccagaagcaagttgcagacagtctactctgaattggatcaggccaagttagaactgaagtcagcccagaaggacttacagagtgctgacaaggaaatcatgagcctgaaaaagaagctaacgatgctgcaggaaaccttgaacctgccaccagtggccagtgagactgtcgaccgcctggttttagagagcccagcccctgtggaggtgaatctgaagctccgccggccatccttccgtgatgatattgatctcaatgctacctttgatgtggatactcccccagcccggccctccagctcccagcatggttactacgaaaaactttgcctagagaagtcacactccccaattcaggatgtccccaagaagatatgcaaaggccccaggaaggagtcccagctctcactgggtggccagagctgtgcaggagagccagatgaggaactggttggtgccttccctatttttgtccggaatgccatcctaggccagaaacagcccaagaggcccaggtcagagtcctcttgcagcaaagatgtggtaaggacaggcttcgatgggctcggtggccggacaaaattcatccagcctactgacacagtcatgatccgcccattgcctgttaagcccaagaccaaggttaagcagagggtgagggtgaagacagtgccttctctcttccaggccaagctggacaccttcctgtggtcgtgagaacagtgagtctgaccaatggccagacacatgcctgcaacttgtaggtcaaggactgtccaggcaggggttttgtggacagagccccactttcgggaccagcctgaggtgtaagggcagacaaacaggtgagggtgagtgtggcacccagagactgctcttcctgccctcaccctgccccactcctacgactgggagctgacatgaccagcccactgatcctgtcagcaggtcctgctcctgttgccaggctcctgtttatagccatgatcagatgtggtcagactctttctgggcctggagaccacggtcacttgttgactgtctctgtggaccagagtgcttgaggcatctcaggcagcctcagcccaagcttctacctgcctttgacttgcttctaggcatagcctgggccaagcagggtggggaatggaggatagcatgggatgtatggagaggatggaagattttcatgtaaaataaaattaaaaaaaaaaaacaatctctt

SEQ ID NO: 1957 - protein, 469 aa, Homosapiens; identical to SEQ ID NO: 167

SEQ ID NO: 1958 - DNA, 404 bp, Homosapiens
ggtcgtgagaacagtgagtctgaccaatggccagacacatgcctgcaacttgtaggtcaaggactgtccaggcaggggttttgtggacagagccccatcctacgactgggagctgacatgaccagcccactgatcctgtcagcaggtcctgctcctgttgccaggctcctgtttatagccatgatcagatgtggtcagactctttctgggcctggagaccacggtcacttgttgactgtctctgtggaccagagtgcttgaggcatctcaggcagcctcagcccaagcttctacctgcctttgacttgcttctaggcatagcctgggccaagcagggtggggaatggaggatagcatgggatgtatggagaggatggaagattttcatgtaaaataaaattaaa

SEQ ID NO: 1959 - protein, 67 aa, Homosapiens
MWSDSFWAWRPRSLVDCLCGPECLRHLRQPQPKLLPAFDLLLGIAWAKQGGEWRIAWDVWRGWKIFM

SEQ ID NO: 1960 - DNA, 1761 bp, Homosapiens
caaatttgaagcaagcggaggcgcgggggcgcgtctacgaagccggacctgtagcagtttctttggctgcctgggccccttgagtccagccatcatgcctatccgtgctctgtgcactatctgctccgacttcttcgatcactcccgcgacgtggccgccatccactgcggccacaccttccacttgcagtgcctaattcagtggtttgagacagcaccaagtcggacctgcccacagtgccgaatccaggttggcaaaagaaccattatcaataagctcttctttgatcttgcccaggaggaggagaatgtcttggatgcagaattcttaaagttgcagacagtctactctgaattggatcaggccaagttagaactgaagtcagcccagaaggacttacagagtgctgacaaggaaatcatgagcctgaaaaagaagctaacgatgctgcaggaaaccttgaacctgccaccagtggccagtgagactgtcgaccgcctggttttagagagcccagcccctgtggaggtgaatctgaagctccgccggccatccttccgtgatgatattgatctcaatgctacctttgatgtggatactcccccagcccggccctccagctcccagcatggttactacgaaaaactttgcctagagaagtcacactccccaattcaggatgtccccaagaagatatgcaaaggccccaggaaggagtcccagctctcactgggtggccagagctgtgcaggagagccagatgaggaactggttggtgccttccctatttttgtccggaatgccatcctaggccagaaacagcccaagaggcccaggtcagagtcctcttgcagcaaagatgtggtaaggacaggcttcgatgggctcggtggccggacaaaattcatccagcctgtatccttttcctgtgatgttgagctgagctgaactgtggagcccatactatgcctcacctatacccccagcctgccagtgccaacagcctcaggtgtgcagtgctgggcctcattctgtgtatcagcgccgcccacccccggctctgagcctttcttgccctgcattgcagtcctttctcgccctgcattgcagtcctttctccatgcctcttccttgacagctcctccagactgacacagtcatgatccgcccattgcctgttaagcccaagaccaaggttaagcagagggtgagggtgaagacagtgccttctctcttccaggccaagctggacaccttcctgtggtcgtgagaacagtgagtctgaccaatggccagacacatgcctgcaacttgtaggtcaaggactgtccaggcaggggttttgtggacagagccccactttcgggaccagcctgaggtgtaagggcagacaaacaggtgagggtgagtgtggcacccagagactgctcttcctgccctcaccctgccccactcctacgactgggagctgacatgaccagcccactgatcctgtcagcaggtcctgctcctgttgccaggctcctgtttatagccatgatcagatgtggtcagactctttctgggcctggagaccacggtcacttgttgactgtctctgtggaccagagtgcttgaggcatctcaggcagcctcagcccaagcttctacctgcctttgacttgcttctaggcatagcctgggccaagcagggtggggaatggaggatagcatgggatgtatggagaggatggaagattttcatgtaaaataaaattaaa

SEQ ID NO: 1961 - protein, 284 aa, Homosapiens
MPIRALCTICSDFFDHSRDVAAIHCGHTFHLQCLIQWFETAPSRTCPQCRIQVGKRTIINKLFFDLAQEEENVLDAEFLKLQTVYSELDQAKLELKSAQKDLQSADKEIMSLKKKLTMLQETLNLPPVASETVDRLVLESPAPVEVNLKLRRPSFRDDIDLNATFDVDTPPARPSSSQHGYYEKLCLEKSHSPIQDVPKKICKGPRKESQLSLGGQSCAGEPDEELVGAFPIFVRNAILGQKQPKRPRSESSCSKDVVRTGFDGLGGRTKFIQPVSFSCDVELS

SEQ ID NO: 1962 - DNA, 678 bp, Homosapiens
ggaggagaatgtcttggatgcagaattcttaaagaatgaactggacaatgtcagagcccagctttcccagaaagacaaggagaaacgagacagccaggtcatcatcgacactctgcgggatacgctggaagaacgcaatgctactgtggtatctctgcagcaggccttgggcaaggccgagatgctgtgctccacactgaaaaagcagatgaagtacttagagcagcagcaggatgagaccaaacaagcacaagaggaggcccgccggctcaggagcaagatgaagaccatggagcagattgagcttctactccagagccagcgccctgaggtggaggagatgatccgagacatgggtgtgggacagtcagcggtggaacagctggctgtgtactgtgtgtctctcaagaaagagtacgagaatctaaaagaggcacggaaggcctcaggggaggtggctgacaagctgaggaaggatttgttttcctccagaagcaagttgcagacagtctactctgaattggatcaggccaagttagaactgaagtcagcccagaaggacttacagagtgctgacaaggaaatcatgagcctgaaaaagaagctaacgatgctgcaggaaaccttgaacctgccaccagtggccagtgagactgtcgaccgcctggttttagagag

SEQ ID NO: 1963 - protein, 164 aa, Homosapiens
MLCSTLKKQMKYLEQQQDETKQAQEEARRLRSKMKTMEQIELLLQSQRPEVEEMIRDMGVGQSAVEQLAVYCVSLKKEYENLKEARKASGEVADKLRKDLFSSRSKLQTVYSELDQAKLELKSAQKDLQSADKEIMSLKKKLTMLQETLNLPPVASETVDRLVL

SEQ ID NO: 1964 - DNA, 2775 bp, Homosapiens
actctccatattgggatgatatttcgcaggcagccaaagacctggtcacaaggctgatggaggtggagcaagaccagcggatcactgcagaagaggccatctcccatgagtggatttctggcaatgctgcttctgataagaacatcaaggatggtgtctgtgcccagattgaaaagaactttgccagggccaagtggaagaaggctgtccgagtgaccaccctcatgaaacggctccgggcaccagagcagtccagcacggctgcagcccagtcggcctcagccacagacactgccacccccggggctgcagaccgtagtgccaccccagccacagatggaagtgccaccccagccactgatggcagtgtcaccccagccaccgatggaagcatcactccagccactgatgggagtgtcaccccagccactgacaggagcgctactccagccactgatgggagagccacaccagccacagaagagagcactgtgcccaccacccaaagcagtgccatgctggccaccaaggcagctgccacccctgagccggctatggcccagccggacagcacagccccagagggcgccacaggccaggctccaccctctagtaaaggggaagaggctgctggttatgcccaggagtctcaaagggaggaggccagctgagtaggcagcctggtgagggggggcaggggatgggcaggagggtgggagagtggatgaggggcttctcactgtacatagagtcactggcatgatgccctcgctcccccatgcccccacatcccagtggggcataactaggggtcacgggagagcagtctcgtctcctgtgtgtatgtgtgtgagtggtgggcaggccagtggcagggccggccccagcccctgcatggattccttgtggcttttctgtcttttgctagcttcaccagtttctgttccttgtgggatgctgctctagggatactcagggggctcctgctctccttccccttcccttcttgcctcaccattcccctaggcaggccctgcaggtcccacactctcccaggccctaaacttgggcggccttgccctgagagctggtcctccagcgaggccctgtcagcggtcttaggctcctgcacatgaaggtgtgtgcctgtggtgtgtgggctgctctaggagcagatacaggctggtatagaggatgcagaaaggtagggcagtatgtttaagtccagacttggcacatggctagggatactgctcactagctgtggaggtcctcaggagtggagagaatgagtaggagggcagaagcttccatttttgtccttcctaagaccctgttatttgtgttatttcctgcctttccgagtcctgcagtgggctgccctgtaccctgaacctcatgagcctctaagggaaaggaggaacaattaggacgtggcaatgagacctggcagggcagagtacaagcccagcacccagtgtcccagccttactgggtccttaccctgggccaaacagggagggctgatacctccttgctcttcctagatgcccacctcctacaatctcagcccacaagtcctctccaccctagggggcttgctgcatggcaataactcataatctgatttggaggtttgccctttacaggggcagattttctgctcagttcaacaatgaaatgaagaggaactccctctttctacagctcacttctatcagaggcccaggtgcctcagagccacattgagttgctttttctgggatgaggaagtagggttaaactccccagtttcctgagggaggctcctgacaggtgccctttgtcagaccctaccacagcctggataggcagccacattggtcctcgcccttgctcggcactccgtggtggtcctgcccttctccctgcatgcctgtgggtctgctctggtgtgtgaaggtcggtgggttaactgtgtgcctactgaacctggcaaataaacatcaccctgcaaagcctctggccaccctctcgcctttgcttcctctgtcctactggggaggagcccctggaaggcagtggggaagggagaggctgggagcaggttcacaagtagtggctgggagtagtagtgaacagtgccctgtggatttcttgggctgagggtgaagatcatcctcaccacagtgtattcctcaatggtggtggtggtgggggtcctctgaactctagaaatccatgtgagtagtgggtcttgggctgcatttggaccaaggaatactccctgggctgagagctcaagtaagggctgctgtttttgactcctgttgaccgaggagccttactcttgatttaggcatagagctggaatctacctgggccagccaccgcaaggacagaccctgctcatagccaaagatagcttccctgagctagggagagggtgtagggtgagcaatgcacaaagattctatgctgctctgtgttgattccttctttctgtgaacacctgtgctttccacctatgccccaaatgaaatctcactctgggtctatttcagctggagcagatcagctttatattatgggactatgcacagggtttcttctgggtagagggagtaacactgccacagatactaagcctaaaaacccaaaagttgacttactccagcccaggtgggcctgggtgaactcaccagggatgctgctctctgggaggacctcaaagataacctcctcaaagataacttctctgatgtgggaataataaaaaggatttgttagtctcta

SEQ ID NO: 1965 - protein, 204 aa, Homosapiens
MEVEQDQRITAEEAISHEWISGNAASDKNIKDGVCAQIEKNFARAKWKKAVRVTTLMKRLRAPEQSSTAAAQSASATDTATPGAADRSATPATDGSATPATDGSVTPATDGSITPATDGSVTPATDRSATPATDGRATPATEESTVPTTQSSAMLATKAAATPEPAMAQPDSTAPEGATGQAPPSSKGEEAAGYAQESQREEAS

SEQ ID NO: 1966 - DNA, 2872 bp, Homosapiens
tttgactctccatattgggatgatatttcgcaggcagccaaagacctggtcacaaggctgatggaggtggagcaagaccagcggatcactgcagaagaggccatctcccatgagtggatttctggcaatgctgcttctgataagaacatcaaggatggtgtctgtgcccagattgaaaagaactttgccagggccaagtggaagaaggctgtccgagtgaccaccctcatgaaacggctccgggcaccagagcagtccagcacggctgcagcccagtcggcctcagccacagacactgccacccccggggctgcaggtggggccacagctgcagctgcgagtggagctacctcagcccctgagggtgatgctgctcgtgctgcaaagagtgataatgtggcccccgcagaccgtagtgccaccccagccacagatggaagtgccaccccagccactgatggcagtgtcaccccagccaccgatggaagcatcactccagccactgatgggagtgtcaccccagccactgacaggagcgctactccagccactgatgggagagccacaccagccacagaagagagcactgtgcccaccacccaaagcagtgccatgctggccaccaaggcagctgccacccctgagccggctatggcccagccggacagcacagccccagagggcgccacaggccaggctccaccctctagtaaaggggaagaggctgctggttatgcccaggagtctcaaagggaggaggccagctgagtaggcagcctggtgagggggggcaggggatgggcaggagggtgggagagtggatgaggggcttctcactgtacatagagtcactggcatgatgccctcgctcccccatgcccccacatcccagtggggcataactaggggtcacgggagagcagtctcgtctcctgtgtgtatgtgtgtgagtggtgggcaggccagtggcagggccggccccagcccctgcatggattccttgtggcttttctgtcttttgctagcttcaccagtttctgttccttgtgggatgctgctctagggatactcagggggctcctgctctccttccccttcccttcttgcctcaccattcccctaggcaggccctgcaggtcccacactctcccaggccctaaacttgggcggccttgccctgagagctggtcctccagcgaggccctgtcagcggtcttaggctcctgcacatgaaggtgtgtgcctgtggtgtgtgggctgctctaggagcagatacaggctggtatagaggatgcagaaaggtagggcagtatgtttaagtccagacttggcacatggctagggatactgctcactagctgtggaggtcctcaggagtggagagaatgagtaggagggcagaagcttccatttttgtccttcctaagaccctgttatttgtgttatttcctgcctttccgagtcctgcagtgggctgccctgtaccctgaacctcatgagcctctaagggaaaggaggaacaattaggacgtggcaatgagacctggcagggcagagtacaagcccagcacccagtgtcccagccttactgggtccttaccctgggccaaacagggagggctgatacctccttgctcttcctagatgcccacctcctacaatctcagcccacaagtcctctccaccctagggggcttgctgcatggcaataactcataatctgatttggaggtttgccctttacaggggcagattttctgctcagttcaacaatgaaatgaagaggaactccctctttctacagctcacttctatcagaggcccaggtgcctcagagccacattgagttgctttttctgggatgaggaagtagggttaaactccccagtttcctgagggaggctcctgacaggtgccctttgtcagaccctaccacagcctggataggcagccacattggtcctcgcccttgctcggcactccgtggtggtcctgcccttctccctgcatgcctgtgggtctgctctggtgtgtgaaggtcggtgggttaactgtgtgcctactgaacctggcaaataaacatcaccctgcaaagcctctggccaccctctcgcctttgcttcctctgtcctactggggaggagcccctggaaggcagtggggaagggagaggctgggagcaggttcacaagtagtggctgggagtagtagtgaacagtgccctgtggatttcttgggctgagggtgaagatcatcctcaccacagtgtattcctcaatggtggtggtggtgggggtcctctgaactctagaaatccatgtgagtagtgggtcttgggctgcatttggaccaaggaatactccctgggctgagagctcaagtaagggctgctgtttttgactcctgttgaccgaggagccttactcttgatttaggcatagagctggaatctacctgggccagccaccgcaaggacagaccctgctcatagccaaagatagcttccctgagctagggagagggtgtagggtgagcaatgcacaaagattctatgctgctctgtgttgattccttctttctgtgaacacctgtgctttccacctatgccccaaatgaaatctcactctgggtctatttcagctggagcagatcagctttatattatgggactatgcacagggtttcttctgggtagagggagtaacactgccacagatactaagcctaaaaacccaaaagttgacttactccagcccaggtgggcctgggtgaactcaccagggatgctgctctctgggaggacctcaaagataacctcctcaaagataacttctctgatgtgggaataataaaaaggatttgttagtctcta

SEQ ID NO: 1967 - protein, 235 aa, Homosapiens
MEVEQDQRITAEEAISHEWISGNAASDKNIKDGVCAQIEKNFARAKWKKAVRVTTLMKRLRAPEQSSTAAAQSASATDTATPGAAGGATAAAASGATSAPEGDAARAAKSDNVAPADRSATPATDGSATPATDGSVTPATDGSITPATDGSVTPATDRSATPATDGRATPATEESTVPTTQSSAMLATKAAATPEPAMAQPDSTAPEGATGQAPPSSKGEEAAGYAQESQREEAS

SEQ ID NO: 1968 - DNA, 2956 bp, Homosapiens
gccccagaggtggtaggccggcagcggtatggacgccctgtggactgctgggccattggagtcatcatgtacatcctgctttcaggcaatccacctttctatgaggaggtggaagaagatgattatgagaaccatgataagaatctcttccgcaagatcctggctggtgactatgagtttgactctccatattgggatgatatttcgcaggcagccaaagacctggtcacaaggctgatggaggtggagcaagaccagcggatcactgcagaagaggccatctcccatgagtggatttctggcaatgctgcttctgataagaacatcaaggatggtgtctgtgcccagattgaaaagaactttgccagggccaagtggaagaaggctgtccgagtgaccaccctcatgaaacggctccgggcaccagagcagtccagcacggctgcagcccagtcggcctcagccacagacactgccacccccggggctgcagaccgtagtgccaccccagccacagatggaagtgccaccccagccactgatggcagtgtcaccccagccaccgatggaagcatcactccagccactgatgggagtgtcaccccagccactgacaggagcgctactccagccactgatgggagagccacaccagccacagaagagagcactgtgcccaccacccaaagcagtgccatgctggccaccaaggcagctgccacccctgagccggctatggcccagccggacagcacagccccagagggcgccacaggccaggctccaccctctagtaaaggggaagaggctgctggttatgcccaggagtctcaaagggaggaggccagctgagtaggcagcctggtgagggggggcaggggatgggcaggagggtgggagagtggatgaggggcttctcactgtacatagagtcactggcatgatgccctcgctcccccatgcccccacatcccagtggggcataactaggggtcacgggagagcagtctcgtctcctgtgtgtatgtgtgtgagtggtgggcaggccagtggcagggccggccccagcccctgcatggattccttgtggcttttctgtcttttgctagcttcaccagtttctgttccttgtgggatgctgctctagggatactcagggggctcctgctctccttccccttcccttcttgcctcaccattcccctaggcaggccctgcaggtcccacactctcccaggccctaaacttgggcggccttgccctgagagctggtcctccagcgaggccctgtcagcggtcttaggctcctgcacatgaaggtgtgtgcctgtggtgtgtgggctgctctaggagcagatacaggctggtatagaggatgcagaaaggtagggcagtatgtttaagtccagacttggcacatggctagggatactgctcactagctgtggaggtcctcaggagtggagagaatgagtaggagggcagaagcttccatttttgtccttcctaagaccctgttatttgtgttatttcctgcctttccgagtcctgcagtgggctgccctgtaccctgaacctcatgagcctctaagggaaaggaggaacaattaggacgtggcaatgagacctggcagggcagagtacaagcccagcacccagtgtcccagccttactgggtccttaccctgggccaaacagggagggctgatacctccttgctcttcctagatgcccacctcctacaatctcagcccacaagtcctctccaccctagggggcttgctgcatggcaataactcataatctgatttggaggtttgccctttacaggggcagattttctgctcagttcaacaatgaaatgaagaggaactccctctttctacagctcacttctatcagaggcccaggtgcctcagagccacattgagttgctttttctgggatgaggaagtagggttaaactccccagtttcctgagggaggctcctgacaggtgccctttgtcagaccctaccacagcctggataggcagccacattggtcctcgcccttgctcggcactccgtggtggtcctgcccttctccctgcatgcctgtgggtctgctctggtgtgtgaaggtcggtgggttaactgtgtgcctactgaacctggcaaataaacatcaccctgcaaagcctctggccaccctctcgcctttgcttcctctgtcctactggggaggagcccctggaaggcagtggggaagggagaggctgggagcaggttcacaagtagtggctgggagtagtagtgaacagtgccctgtggatttcttgggctgagggtgaagatcatcctcaccacagtgtattcctcaatggtggtggtggtgggggtcctctgaactctagaaatccatgtgagtagtgggtcttgggctgcatttggaccaaggaatactccctgggctgagagctcaagtaagggctgctgtttttgactcctgttgaccgaggagccttactcttgatttaggcatagagctggaatctacctgggccagccaccgcaaggacagaccctgctcatagccaaagatagcttccctgagctagggagagggtgtagggtgagcaatgcacaaagattctatgctgctctgtgttgattccttctttctgtgaacacctgtgctttccacctatgccccaaatgaaatctcactctgggtctatttcagctggagcagatcagctttatattatgggactatgcacagggtttcttctgggtagagggagtaacactgccacagatactaagcctaaaaacccaaaagttgacttactccagcccaggtgggcctgggtgaactcaccagggatgctgctctctgggaggacctcaaagataacctcctcaaagataacttctctgatgtgggaataataaaaaggatttgttagtctcta

SEQ ID NO: 1969 - protein, 261 aa, Homosapiens
MYILLSGNPPFYEEVEEDDYENHDKNLFRKILAGDYEFDSPYWDDISQAAKDLVTRLMEVEQDQRITAEEAISHEWISGNAASDKNIKDGVCAQIEKNFARAKWKKAVRVTTLMKRLRAPEQSSTAAAQSASATDTATPGAADRSATPATDGSATPATDGSVTPATDGSITPATDGSVTPATDRSATPATDGRATPATEESTVPTTQSSAMLATKAAATPEPAMAQPDSTAPEGATGQAPPSSKGEEAAGYAQESQREEAS

SEQ ID NO: 1970 - DNA, 3712 bp, Homosapiens
gggtgcgaatccggtgccggcaagcggctggcgatgctggaggttcgctagccgaagcggctgcatctggcgccgcgtctgccccgcgtgctcggagcggattctgcccgccgtccccggagccctcggcgccccgctgagcccgcgatcacttcctccctgtgaccaaccggcgctgcaggttagagcctggcaatgccgtttgggtgtgtgactctgggcgacaagaagaactataaccagccatcggaggtgactgacagatatgatttgggacaggtcatcaagactgaggagttttgtgaaatcttccgggccaaggacaagacgacaggcaagctgcacacctgcaagaagttccagaagcgggacggccgcaaggtgcggaaagctgccaagaacgagataggcatcctcaagatggtgaagcatcccaacatcctacagctggtggatgtgtttgtgacccgcaaggagtactttatcttcctggagctggccacggggagggaggtgtttgactggatcctggaccagggctactactcggagcgagacacaagcaacgtggtacggcaagtcctggaggccgtggcctatttgcactcactcaagatcgtgcacaggaatctcaagctggagaacctggtttactacaaccggctgaagaactcgaagattgtcatcagtgacttccatctggctaagctagaaaatggcctcatcaaggagccctgtgggacccccgagtatctggccccagaggtggtaggccggcagcggtatggacgccctgtggactgctgggccattggagtcatcatgtacatcctgctttcaggcaatccacctttctatgaggaggtggaagaagatgattatgagaaccatgataagaatctcttccgcaagatcctggctggtgactatgagtttgactctccatattgggatgatatttcgcaggcagccaaagacctggtcacaaggctgatggaggtggagcaagaccagcggatcactgcagaagaggccatctcccatgagtggatttctggcaatgctgcttctgataagaacatcaaggatggtgtctgtgcccagattgaaaagaactttgccagggccaagtggaagaaggctgtccgagtgaccaccctcatgaaacggctccgggcaccagagcagtccagcacggctgcagcccagtcggcctcagccacagacactgccacccccggggctgcagaccgtagtgccaccccagccacagatggaagtgccaccccagccactgatggcagtgtcaccccagccaccgatggaagcatcactccagccactgatgggagtgtcaccccagccactgacaggagcgctactccagccactgatgggagagccacaccagccacagaagagagcactgtgcccaccacccaaagcagtgccatgctggccaccaaggcagctgccacccctgagccggctatggcccagccggacagcacagccccagagggcgccacaggccaggctccaccctctagtaaaggggaagaggctgctggttatgcccaggagtctcaaagggaggaggccagctgagtaggcagcctggtgagggggggcaggggatgggcaggagggtgggagagtggatgaggggcttctcactgtacatagagtcactggcatgatgccctcgctcccccatgcccccacatcccagtggggcataactaggggtcacgggagagcagtctcgtctcctgtgtgtatgtgtgtgagtggtgggcaggccagtggcagggccggccccagcccctgcatggattccttgtggcttttctgtcttttgctagcttcaccagtttctgttccttgtgggatgctgctctagggatactcagggggctcctgctctccttccccttcccttcttgcctcaccattcccctaggcaggccctgcaggtcccacactctcccaggccctaaacttgggcggccttgccctgagagctggtcctccagcgaggccctgtcagcggtcttaggctcctgcacatgaaggtgtgtgcctgtggtgtgtgggctgctctaggagcagatacaggctggtatagaggatgcagaaaggtagggcagtatgtttaagtccagacttggcacatggctagggatactgctcactagctgtggaggtcctcaggagtggagagaatgagtaggagggcagaagcttccatttttgtccttcctaagaccctgttatttgtgttatttcctgcctttccgagtcctgcagtgggctgccctgtaccctgaacctcatgagcctctaagggaaaggaggaacaattaggacgtggcaatgagacctggcagggcagagtacaagcccagcacccagtgtcccagccttactgggtccttaccctgggccaaacagggagggctgatacctccttgctcttcctagatgcccacctcctacaatctcagcccacaagtcctctccaccctagggggcttgctgcatggcaataactcataatctgatttggaggtttgccctttacaggggcagattttctgctcagttcaacaatgaaatgaagaggaactccctctttctacagctcacttctatcagaggcccaggtgcctcagagccacattgagttgctttttctgggatgaggaagtagggttaaactccccagtttcctgagggaggctcctgacaggtgccctttgtcagaccctaccacagcctggataggcagccacattggtcctcgcccttgctcggcactccgtggtggtcctgcccttctccctgcatgcctgtgggtctgctctggtgtgtgaaggtcggtgggttaactgtgtgcctactgaacctggcaaataaacatcaccctgcaaagcctctggccaccctctcgcctttgcttcctctgtcctactggggaggagcccctggaaggcagtggggaagggagaggctgggagcaggttcacaagtagtggctgggagtagtagtgaacagtgccctgtggatttcttgggctgagggtgaagatcatcctcaccacagtgtattcctcaatggtggtggtggtgggggtcctctgaactctagaaatccatgtgagtagtgggtcttgggctgcatttggaccaaggaatactccctgggctgagagctcaagtaagggctgctgtttttgactcctgttgaccgaggagccttactcttgatttaggcatagagctggaatctacctgggccagccaccgcaaggacagaccctgctcatagccaaagatagcttccctgagctagggagagggtgtagggtgagcaatgcacaaagattctatgctgctctgtgttgattccttctttctgtgaacacctgtgctttccacctatgccccaaatgaaatctcactctgggtctatttcagctggagcagatcagctttatattatgggactatgcacagggtttcttctgggtagagggagtaacactgccacagatactaagcctaaaaacccaaaagttgacttactccagcccaggtgggcctgggtgaactcaccagggatgctgctctctgggaggacctcaaagataacctcctcaaagataacttctctgatgtgggaataataaaaaggatttgttagtctcta

SEQ ID NO: 1971 - protein, 470 aa, Homosapiens
MPFGCVTLGDKKNYNQPSEVTDRYDLGQVIKTEEFCEIFRAKDKTTGKLHTCKKFQKRDGRKVRKAAKNEIGILKMVKHPNILQLVDVFVTRKEYFIFLELATGREVFDWILDQGYYSERDTSNVVRQVLEAVAYLHSLKIVHRNLKLENLVYYNRLKNSKIVISDFHLAKLENGLIKEPCGTPEYLAPEVVGRQRYGRPVDCWAIGVIMYILLSGNPPFYEEVEEDDYENHDKNLFRKILAGDYEFDSPYWDDISQAAKDLVTRLMEVEQDQRITAEEAISHEWISGNAASDKNIKDGVCAQIEKNFARAKWKKAVRVTTLMKRLRAPEQSSTAAAQSASATDTATPGAADRSATPATDGSATPATDGSVTPATDGSITPATDGSVTPATDRSATPATDGRATPATEESTVPTTQSSAMLATKAAATPEPAMAQPDSTAPEGATGQAPPSSKGEEAAGYAQESQREEAS

SEQ ID NO: 1972 - DNA, 3805 bp, Homosapiens
gggtgcgaatccggtgccggcaagcggctggcgatgctggaggttcgctagccgaagcggctgcatctggcgccgcgtctgccccgcgtgctcggagcggattctgcccgccgtccccggagccctcggcgccccgctgagcccgcgatcacttcctccctgtgaccaaccggcgctgcaggttagagcctggcaatgccgtttgggtgtgtgactctgggcgacaagaagaactataaccagccatcggaggtgactgacagatatgatttgggacaggtcatcaagactgaggagttttgtgaaatcttccgggccaaggacaagacgacaggcaagctgcacacctgcaagaagttccagaagcgggacggccgcaaggtgcggaaagctgccaagaacgagataggcatcctcaagatggtgaagcatcccaacatcctacagctggtggatgtgtttgtgacccgcaaggagtactttatcttcctggagctggccacggggagggaggtgtttgactggatcctggaccagggctactactcggagcgagacacaagcaacgtggtacggcaagtcctggaggccgtggcctatttgcactcactcaagatcgtgcacaggaatctcaagctggagaacctggtttactacaaccggctgaagaactcgaagattgtcatcagtgacttccatctggctaagctagaaaatggcctcatcaaggagccctgtgggacccccgagtatctggccccagaggtggtaggccggcagcggtatggacgccctgtggactgctgggccattggagtcatcatgtacatcctgctttcaggcaatccacctttctatgaggaggtggaagaagatgattatgagaaccatgataagaatctcttccgcaagatcctggctggtgactatgagtttgactctccatattgggatgatatttcgcaggcagccaaagacctggtcacaaggctgatggaggtggagcaagaccagcggatcactgcagaagaggccatctcccatgagtggatttctggcaatgctgcttctgataagaacatcaaggatggtgtctgtgcccagattgaaaagaactttgccagggccaagtggaagaaggctgtccgagtgaccaccctcatgaaacggctccgggcaccagagcagtccagcacggctgcagcccagtcggcctcagccacagacactgccacccccggggctgcaggtggggccacagctgcagctgcgagtggagctacctcagcccctgagggtgatgctgctcgtgctgcaaagagtgataatgtggcccccgcagaccgtagtgccaccccagccacagatggaagtgccaccccagccactgatggcagtgtcaccccagccaccgatggaagcatcactccagccactgatgggagtgtcaccccagccactgacaggagcgctactccagccactgatgggagagccacaccagccacagaagagagcactgtgcccaccacccaaagcagtgccatgctggccaccaaggcagctgccacccctgagccggctatggcccagccggacagcacagccccagagggcgccacaggccaggctccaccctctagtaaaggggaagaggctgctggttatgcccaggagtctcaaagggaggaggccagctgagtaggcagcctggtgagggggggcaggggatgggcaggagggtgggagagtggatgaggggcttctcactgtacatagagtcactggcatgatgccctcgctcccccatgcccccacatcccagtggggcataactaggggtcacgggagagcagtctcgtctcctgtgtgtatgtgtgtgagtggtgggcaggccagtggcagggccggccccagcccctgcatggattccttgtggcttttctgtcttttgctagcttcaccagtttctgttccttgtgggatgctgctctagggatactcagggggctcctgctctccttccccttcccttcttgcctcaccattcccctaggcaggccctgcaggtcccacactctcccaggccctaaacttgggcggccttgccctgagagctggtcctccagcgaggccctgtcagcggtcttaggctcctgcacatgaaggtgtgtgcctgtggtgtgtgggctgctctaggagcagatacaggctggtatagaggatgcagaaaggtagggcagtatgtttaagtccagacttggcacatggctagggatactgctcactagctgtggaggtcctcaggagtggagagaatgagtaggagggcagaagcttccatttttgtccttcctaagaccctgttatttgtgttatttcctgcctttccgagtcctgcagtgggctgccctgtaccctgaacctcatgagcctctaagggaaaggaggaacaattaggacgtggcaatgagacctggcagggcagagtacaagcccagcacccagtgtcccagccttactgggtccttaccctgggccaaacagggagggctgatacctccttgctcttcctagatgcccacctcctacaatctcagcccacaagtcctctccaccctagggggcttgctgcatggcaataactcataatctgatttggaggtttgccctttacaggggcagattttctgctcagttcaacaatgaaatgaagaggaactccctctttctacagctcacttctatcagaggcccaggtgcctcagagccacattgagttgctttttctgggatgaggaagtagggttaaactccccagtttcctgagggaggctcctgacaggtgccctttgtcagaccctaccacagcctggataggcagccacattggtcctcgcccttgctcggcactccgtggtggtcctgcccttctccctgcatgcctgtgggtctgctctggtgtgtgaaggtcggtgggttaactgtgtgcctactgaacctggcaaataaacatcaccctgcaaagcctctggccaccctctcgcctttgcttcctctgtcctactggggaggagcccctggaaggcagtggggaagggagaggctgggagcaggttcacaagtagtggctgggagtagtagtgaacagtgccctgtggatttcttgggctgagggtgaagatcatcctcaccacagtgtattcctcaatggtggtggtggtgggggtcctctgaactctagaaatccatgtgagtagtgggtcttgggctgcatttggaccaaggaatactccctgggctgagagctcaagtaagggctgctgtttttgactcctgttgaccgaggagccttactcttgatttaggcatagagctggaatctacctgggccagccaccgcaaggacagaccctgctcatagccaaagatagcttccctgagctagggagagggtgtagggtgagcaatgcacaaagattctatgctgctctgtgttgattccttctttctgtgaacacctgtgctttccacctatgccccaaatgaaatctcactctgggtctatttcagctggagcagatcagctttatattatgggactatgcacagggtttcttctgggtagagggagtaacactgccacagatactaagcctaaaaacccaaaagttgacttactccagcccaggtgggcctgggtgaactcaccagggatgctgctctctgggaggacctcaaagataacctcctcaaagataacttctctgatgtgggaataataaaaaggatttgttagtctcta

SEQ ID NO: 1973 - protein, 501 aa, Homosapiens; identical to SEQ ID NO: 169

SEQ ID NO: 1974 - DNA, 3292 bp, Homosapiens
gggtgcgaatccggtgccggcaagcggctggcgatgctggaggttcgctagccgaagcggctgcatctggcgccgcgtctgccccgcgtgctcggagcggattctgcccgccgtccccggagccctcggcgccccgctgagcccgcgatcacttcctccctgtgaccaaccggcgctgcaggttagagcctggcaatgccgtttgggtgtgtgactctgggcgacaagaagaactataaccagccatcggaggtgactgacagatatgatttgggacaggtcatcaagactgaggagttttgtgaaatcttccgggccaaggacaagacgacaggcaagctgcacacctgcaagaagttccagaagcgggacggccgcaaggtgcggaaagctgccaagaacgagataggcatcctcaagatggtgaagcatcccaacatcctacagctggtggatgtgtttgtgacccgcaaggagtactttatcttcctggagctggccacggggagggaggtgtttgactggatcctggaccagggctactactcggagcgagacacaagcaacgtggtacggcaagtcctggaggccgtggcctatttgcactcactcaagatcgtgcacaggaatctcaagctggagaacctggtttactacaaccggctgaagaactcgaagattgtcatcagtgacttccatctggctaagctagaaaatggcctcatcaaggagccctgtgggacccccgagtatctggccccagaggtggtaggccggcagcggtatggacgccctgtggactgctgggccattggagtcatcatgtacatcctgctttcaggcaatccacctttctatgaggaggtggaagaagatgattatgagaaccatgataagaatctcttccgcaagatcctggctggtgactatgagtttgactctccatattgggatgatatttcgcaggcagccaaagacctggtcacaaggctgatggaggtggagcaagaccagcggatcactgcagaagaggccatctcccatgagtggatttctggcaatgctgcttctgataagaacatcaaggatggtgtctgtgcccagattgaaaagaactttgccagggccaagtggaagaaggctgtccgagtgaccaccctcatgaaacggctccgggcaccagagcagtccagcacggctgcagcccagtcggcctcagccacagacactgccacccccggggctgcagaccgtagtgccaccccagccacagatggaagtgccaccccagccactgatggcagtgtcaccccagccaccgatggaagcatcactccagccactgatgggagtgtcaccccagccactgacaggagcgctactccagccactgatgggagagccacaccagccacagaagagagcactgtgcccaccacccaaagcagtgccatgctggccaccaaggcagctgccacccctgagccggctatggcccagccggacagcacagccccagagggcgccacaggccaggctccaccctctagtaaaggggaagaggctgctggttatgcccaggagtctcaaagggaggaggccagctgagtaggcagcctggtgagggggggcaggggatgggcaggagggtgggagagtggatgaggggcttctcactgtacatagagtcactggcatgatgccctcgctcccccatgcccccacatcccagtggggcataactaggggtcacgggagagcagtctcgtctcctgtgtgtatgtgtgtgagtggtgggcaggccagtggcagggccggccccagcccctgcatggattccttgtggcttttctgtcttttgctagcttcaccagtttctgttccttgtgggatgctgccctgtaccctgaacctcatgagcctctaagggaaaggaggaacaattaggacgtggcaatgagacctggcagggcagagtacaagcccagcacccagtgtcccagccttactgggtccttaccctgggccaaacagggagggctgatacctccttgctcttcctagatgcccacctcctacaatctcagcccacaagtcctctccaccctagggggcttgctgcatggcaataactcataatctgatttggaggtttgccctttacaggggcagattttctgctcagttcaacaatgaaatgaagaggaactccctctttctacagctcacttctatcagaggcccaggtgcctcagagccacattgagttgctttttctgggatgaggaagtagggttaaactccccagtttcctgagggaggctcctgacaggtgccctttgtcagaccctaccacagcctggataggcagccacattggtcctcgcccttgctcggcactccgtggtggtcctgcccttctccctgcatgcctgtgggtctgctctggtgtgtgaaggtcggtgggttaactgtgtgcctactgaacctggcaaataaacatcaccctgcaaagcctctggccaccctctcgcctttgcttcctctgtcctactggggaggagcccctggaaggcagtggggaagggagaggctgggagcaggttcacaagtagtggctgggagtagtagtgaacagtgccctgtggatttcttgggctgagggtgaagatcatcctcaccacagtgtattcctcaatggtggtggtggtgggggtcctctgaactctagaaatccatgtgagtagtgggtcttgggctgcatttggaccaaggaatactccctgggctgagagctcaagtaagggctgctgtttttgactcctgttgaccgaggagccttactcttgatttaggcatagagctggaatctacctgggccagccaccgcaaggacagaccctgctcatagccaaagatagcttccctgagctagggagagggtgtagggtgagcaatgcacaaagattctatgctgctctgtgttgattccttctttctgtgaacacctgtgctttccacctatgccccaaatgaaatctcactctgggtctatttcagctggagcagatcagctttatattatgggactatgcacagggtttcttctgggtagagggagtaacactgccacagatactaagcctaaaaacccaaaagttgacttactccagcccaggtgggcctgggtgaactcaccagggatgctgctctctgggaggacctcaaagataacctcctcaaagataacttctctgatgtgggaataataaaaaggatttgttagtctcta

SEQ ID NO: 1975 - protein, 470 aa, Homosapiens; identical to SEQ ID NO: 1971

SEQ ID NO: 1976 - DNA, 2007 bp, Homosapiens
actctccatattgggatgatatttcgcaggcagccaaagacctggtcacaaggctgatggaggtggagcaagaccagcggatcactgcagaagaggccatctcccatgagtggatttctggcaatgctgcttctgataagaacatcaaggatggtgtctgtgcccagattgaaaagaactttgccagggccaagtggaagaaggctgtccgagtgaccaccctcatgaaacggctccgggcaccagagcagtccagcacggctgcagcccagtcggcctcagccacagacactgccacccccggggctgcagaccgtagtgccaccccagccacagatggaagtgccaccccagccactgatggcagtgtcaccccagccaccgatggaagcatcactccagccactgatgggagtgtcaccccagccactgacaggagcgctactccagccactgatgggagagccacaccagccacagaagagagcactgtgcccaccacccaaagcagtgccatgctggccaccaaggcagctgccacccctgagccggctatggcccagccggacagcacagccccagagggcgccacaggccaggctccaccctctagtaaaggggaagaggctgctggttatgcccaggagtctcaaagggaggaggccagctgagtaggcagcctggtgagggggggcaggggatgggcaggagggtgggagagtggatgaggggcttctcactgtacatagagtcactggcatgatgccctcgctcccccatgcccccacatcccagtggggcataactaggggtcacgggagagcagtctcgtctcctgtgtgtatgtgtgtgagtggtgggcaggccagtggcagggccggccccagcccctgcatggattccttgtggcttttctgtcttttgctagcttcaccagtttctgttccttgtgggatgctgctctagggatactcagggggctcctgctctccttccccttcccttcttgcctcaccattcccctaggcaggccctgcaggtcccacactctcccaggccctaaacttgggcggccttgccctgagagctggtcctccagcgaggccctgtcagcggtcttaggctcctgcacatgaaggtgtgtgcctgtggtgtgtgggctgctctaggagcagatacaggctggtatagaggatgcagaaaggtagggcagtatgtttaagtccagacttggcacatggctagggatactgctcactagctgtggaggtcctcaggagtggagagaatgagtaggagggcagaagcttccatttttgtccttcctaagaccctgttatttgtgttatttcctgcctttccgagtcctgcagtgggctgccctgtaccctgaacctcatgagcctctaagggaaaggaggaacaattaggacgtggcaatgagacctggcagggcagagtacaagcccagcacccagtgtcccagccttactgggtccttaccctgggccaaacagggagggctgatacctccttgctcttcctagatgcccacctcctacaatctcagcccacaagtcctctccaccctagggggcttgctgcatggcaataactcataatctgatttggaggtttgccctttacaggggcagattttctgctcagttcaacaatgaaatgaagaggaactccctctttctacagctcacttctatcagaggcccaggtgcctcagagccacattgagttgctttttctgggatgaggaagtagggttaaactccccagtttcctgagggaggctcctgacaggtgccctttgtcagaccctaccacagcctggataggcagccacattggtcctcgcccttgctcggcactccgtggtggtcctgcccttctccctgcatgcctgtgggtctgctctggtgtgtgaaggtcggtgggttaactgtgtgcctactgaacctggcaaataaacatcaccctgcaaagcctctggcc

SEQ ID NO: 1977 - protein, 204 aa, Homosapiens; identical to SEQ ID NO: 1965

SEQ ID NO: 1978 - DNA, 2188 bp, Homosapiens
gccccagaggtggtaggccggcagcggtatggacgccctgtggactgctgggccattggagtcatcatgtacatcctgctttcaggcaatccacctttctatgaggaggtggaagaagatgattatgagaaccatgataagaatctcttccgcaagatcctggctggtgactatgagtttgactctccatattgggatgatatttcgcaggcagccaaagacctggtcacaaggctgatggaggtggagcaagaccagcggatcactgcagaagaggccatctcccatgagtggatttctggcaatgctgcttctgataagaacatcaaggatggtgtctgtgcccagattgaaaagaactttgccagggccaagtggaagaaggctgtccgagtgaccaccctcatgaaacggctccgggcaccagagcagtccagcacggctgcagcccagtcggcctcagccacagacactgccacccccggggctgcagaccgtagtgccaccccagccacagatggaagtgccaccccagccactgatggcagtgtcaccccagccaccgatggaagcatcactccagccactgatgggagtgtcaccccagccactgacaggagcgctactccagccactgatgggagagccacaccagccacagaagagagcactgtgcccaccacccaaagcagtgccatgctggccaccaaggcagctgccacccctgagccggctatggcccagccggacagcacagccccagagggcgccacaggccaggctccaccctctagtaaaggggaagaggctgctggttatgcccaggagtctcaaagggaggaggccagctgagtaggcagcctggtgagggggggcaggggatgggcaggagggtgggagagtggatgaggggcttctcactgtacatagagtcactggcatgatgccctcgctcccccatgcccccacatcccagtggggcataactaggggtcacgggagagcagtctcgtctcctgtgtgtatgtgtgtgagtggtgggcaggccagtggcagggccggccccagcccctgcatggattccttgtggcttttctgtcttttgctagcttcaccagtttctgttccttgtgggatgctgctctagggatactcagggggctcctgctctccttccccttcccttcttgcctcaccattcccctaggcaggccctgcaggtcccacactctcccaggccctaaacttgggcggccttgccctgagagctggtcctccagcgaggccctgtcagcggtcttaggctcctgcacatgaaggtgtgtgcctgtggtgtgtgggctgctctaggagcagatacaggctggtatagaggatgcagaaaggtagggcagtatgtttaagtccagacttggcacatggctagggatactgctcactagctgtggaggtcctcaggagtggagagaatgagtaggagggcagaagcttccatttttgtccttcctaagaccctgttatttgtgttatttcctgcctttccgagtcctgcagtgggctgccctgtaccctgaacctcatgagcctctaagggaaaggaggaacaattaggacgtggcaatgagacctggcagggcagagtacaagcccagcacccagtgtcccagccttactgggtccttaccctgggccaaacagggagggctgatacctccttgctcttcctagatgcccacctcctacaatctcagcccacaagtcctctccaccctagggggcttgctgcatggcaataactcataatctgatttggaggtttgccctttacaggggcagattttctgctcagttcaacaatgaaatgaagaggaactccctctttctacagctcacttctatcagaggcccaggtgcctcagagccacattgagttgctttttctgggatgaggaagtagggttaaactccccagtttcctgagggaggctcctgacaggtgccctttgtcagaccctaccacagcctggataggcagccacattggtcctcgcccttgctcggcactccgtggtggtcctgcccttctccctgcatgcctgtgggtctgctctggtgtgtgaaggtcggtgggttaactgtgtgcctactgaacctggcaaataaacatcaccctgcaaagcctctggcc

SEQ ID NO: 1979 - protein, 261 aa, Homosapiens; identical to SEQ ID NO: 1969

SEQ ID NO: 1980 - DNA, 3379 bp, Homosapiens
gatgctggaggttcgctagccgaagcggctgcatctggcgccgcgtctgccccgcgtgctcggagcggattctgcccgccgtccccggagccctcggcgccccgctgagcccgcgatcacttcctccctgtgaccaaccggcgctgcaggttagagcctggcaatgccgtttgggtgtgtgactctgggcgacaagaagaactataaccagccatcggaggtgactgacagatatgatttgggacaggtcatcaagactgaggagttttgtgaaatcttccgggccaaggacaagacgacaggcaagctgcacacctgcaagaagttccagaagcgggacggccgcaaggtgcggaaagctgccaagaacgagataggcatcctcaagatggtgaagcatcccaacatcctacagctggtggatgtgtttgtgacccgcaaggagtactttatcttcctggagctgtgagtgtgggtctggggacccaagattccccagcgcccagggctttcacctgtcccaccctctgcagctaaggaaaccccctttctggacccttggcgtcccaggtccctgtgccttgctcagccagctgcctggcgtaggcagctcacccaagtgctcctgccctacccctgattctgcccacgccaggctcaggggctggtgtccctcagggccacggggagggaggtgtttgactggatcctggaccagggctactactcggagcgagacacaagcaacgtggtacggcaagtcctggaggccgtggcctatttgcactcactcaagatcgtgcacaggaatctcaagctggagaacctggtttactacaaccggctgaagaactcgaagattgtcatcagtgacttccatctggctaagctagaaaatggcctcatcaaggagccctgtgggacccccgagtatctgggcaagcagggggtggggcaggggcagggggataatggggggcagccttcagggagctgctctgggcagggggaaaatgtgctcatctcaggaagctggtgtggatggtactggacctggctaggcctgatactgaccagcagatgggcgctgtgtttgtagccccagaggtggtaggccggcagcggtatggacgccctgtggactgctgggccattggagtcatcatgtacatcctgctttcaggcaatccacctttctatgaggaggtggaagaagatgattatgagaaccatgataagaatctcttccgcaagatcctggctggtgactatgagtttgactctccatattgggatgatatttcgcaggcagccaaagacctggtcacaaggctgatggaggtggagcaagaccagcggatcactgcagaagaggccatctcccatgagtggatttctggcaatgctgcttctgataagaacatcaaggatggtgtctgtgcccagattgaaaagaactttgccagggccaagtggaagaaggctgtccgagtgaccaccctcatgaaacggctccgggcaccagagcagtccagcacggctgcagcccagtcggcctcagccacagacactgccacccccggggctgcaggtggggccacagctgcagctgcgagtggagctacctcagcccctgagggtgatgctgctcgtgctgcaaagagtgataatgtggcccccgcagaccgtagtgccaccccagccacagatggaagtgccaccccagccactgatggcagtgtcaccccagccaccgatggaagcatcactccagccactgatgggagtgtcaccccagccactgacaggagcgctactccagccactgatgggagagccacaccagccacagaagagagcactgtgcccaccacccaaagcagtgccatgctggccaccaaggcagctgccacccctgagccggctatggcccagccggacagcacagccccagagggcgccacaggccaggctccaccctctagtaaaggggaagaggctgctggttatgcccaggagtctcaaagggaggaggccagctgagtaggcagcctggtgagggggggcaggggatgggcaggagggtgggagagtggatgaggggcttctcactgtacatagagtcactggcatgatgccctcgctcccccatgcccccacatcccagtggggcataactaggggtcacgggagagcagtctcgtctcctgtgtgtatgtgtgtgagtggtgggcaggccagtggcagggccggccccagcccctgcatggattccttgtggcttttctgtcttttgctagcttcaccagtttctgttccttgtgggatgctgctctagggatactcagggggctcctgctctccttccccttcccttcttgcctcaccattcccctaggcaggccctgcaggtcccacactctcccaggccctaaacttgggcggccttgccctgagagctggtcctccagcgaggccctgtcagcggtcttaggctcctgcacatgaaggtgtgtgcctgtggtgtgtgggctgctctaggagcagatacaggctggtatagaggatgcagaaaggtagggcagtatgtttaagtccagacttggcacatggctagggatactgctcactagctgtggaggtcctcaggagtggagagaatgagtaggagggcagaagcttccatttttgtccttcctaagaccctgttatttgtgttatttcctgcctttccgagtcctgcagtgggctgccctgtaccctgaacctcatgagcctctaagggaaaggaggaacaattaggacgtggcaatgagacctggcagggcagagtacaagcccagcacccagtgtcccagccttactgggtccttaccctgggccaaacagggagggctgatacctccttgctcttcctagatgcccacctcctacaatctcagcccacaagtcctctccaccctagggggcttgctgcatggcaataactcataatctgatttggaggtttgccctttacaggggcagattttctgctcagttcaacaatgaaatgaagaggaactccctctttctacagctcacttctatcagaggcccaggtgcctcagagccacattgagttgctttttctgggatgaggaagtagggttaaactccccagtttcctgagggaggctcctgacaggtgccctttgtcagaccctaccacagcctggataggcagccacattggtcctcgcccttgctcggcactccgtggtggtcctgcccttctccctgcatgcctgtgggtctgctctggtgtgtgaaggtcggtgggttaactgtgtgcctactgaacctggcaaataaacatcaccctgcaaagcctctggcc

SEQ ID NO: 1981 - protein, 333 aa, Homosapiens
MVLDLARPDTDQQMGAVFVAPEVVGRQRYGRPVDCWAIGVIMYILLSGNPPFYEEVEEDDYENHDKNLFRKILAGDYEFDSPYWDDISQAAKDLVTRLMEVEQDQRITAEEAISHEWISGNAASDKNIKDGVCAQIEKNFARAKWKKAVRVTTLMKRLRAPEQSSTAAAQSASATDTATPGAAGGATAAAASGATSAPEGDAARAAKSDNVAPADRSATPATDGSATPATDGSVTPATDGSITPATDGSVTPATDRSATPATDGRATPATEESTVPTTQSSAMLATKAAATPEPAMAQPDSTAPEGATGQAPPSSKGEEAAGYAQESQREEAS

SEQ ID NO: 1982 - DNA, 3176 bp, Homosapiens
agcggctggcgatgctggaggttcgctagccgaagcggctgcatctggcgccgcgtctgccccgcgtgctcggagcggattctgcccgccgtccccggagccctcggcgccccgctgagcccgcgatcacttcctccctgtgaccaaccggcgctgcaggttagagcctggcaatgccgtttgggtgtgtgactctgggcgacaagaagaactataaccagccatcggaggtgactgacagatatgatttgggacaggtcatcaagactgaggagttttgtgaaatcttccgggccaaggacaagacgacaggcaagctgcacacctgcaagaagttccagaagcgggacggccgcaaggtgcggaaagctgccaagaacgagataggcatcctcaagatggtgaagcatcccaacatcctacagctggtggatgtgtttgtgacccgcaaggagtactttatcttcctggagctggccacggggagggaggtgtttgactggatcctggaccagggctactactcggagcgagacacaagcaacgtggtacggcaagtcctggaggccgtggcctatttgcactcactcaagatcgtgcacaggaatctcaagctggagaacctggtttactacaaccggctgaagaactcgaagattgtcatcagtgacttccatctggctaagctagaaaatggcctcatcaaggagccctgtgggacccccgagtatctgggcaagcagggggtggggcaggggcagggggataatggggggcagccttcagggagctgctctgggcagggggaaaatgtgctcatctcaggaagctggtgtggatggtactggacctggctaggcctgatactgaccagcagatgggcgctgtgtttgtagccccagaggtggtaggccggcagcggtatggacgccctgtggactgctgggccattggagtcatcatgtacatcctgctttcaggcaatccacctttctatgaggaggtggaagaagatgattatgagaaccatgataagaatctcttccgcaagatcctggctggtgactatgagtttgactctccatattgggatgatatttcgcaggcagccaaagacctggtcacaaggctgatggaggtggagcaagaccagcggatcactgcagaagaggccatctcccatgagtggatttctggcaatgctgcttctgataagaacatcaaggatggtgtctgtgcccagattgaaaagaactttgccagggccaagtggaagaaggctgtccgagtgaccaccctcatgaaacggctccgggcaccagagcagtccagcacggctgcagcccagtcggcctcagccacagacactgccacccccggggctgcaggtggggccacagctgcagctgcgagtggagctacctcagcccctgagggtgatgctgctcgtgctgcaaagagtgataatgtggcccccgcagaccgtagtgccaccccagccacagatggaagtgccaccccagccactgatggcagtgtcaccccagccaccgatggaagcatcactccagccactgatgggagtgtcaccccagccactgacaggagcgctactccagccactgatgggagagccacaccagccacagaagagagcactgtgcccaccacccaaagcagtgccatgctggccaccaaggcagctgccacccctgagccggctatggcccagccggacagcacagccccagagggcgccacaggccaggctccaccctctagtaaaggggaagaggctgctggttatgcccaggagtctcaaagggaggaggccagctgagtaggcagcctggtgagggggggcaggggatgggcaggagggtgggagagtggatgaggggcttctcactgtacatagagtcactggcatgatgccctcgctcccccatgcccccacatcccagtggggcataactaggggtcacgggagagcagtctcgtctcctgtgtgtatgtgtgtgagtggtgggcaggccagtggcagggccggccccagcccctgcatggattccttgtggcttttctgtcttttgctagcttcaccagtttctgttccttgtgggatgctgctctagggatactcagggggctcctgctctccttccccttcccttcttgcctcaccattcccctaggcaggccctgcaggtcccacactctcccaggccctaaacttgggcggccttgccctgagagctggtcctccagcgaggccctgtcagcggtcttaggctcctgcacatgaaggtgtgtgcctgtggtgtgtgggctgctctaggagcagatacaggctggtatagaggatgcagaaaggtagggcagtatgtttaagtccagacttggcacatggctagggatactgctcactagctgtggaggtcctcaggagtggagagaatgagtaggagggcagaagcttccatttttgtccttcctaagaccctgttatttgtgttatttcctgcctttccgagtcctgcagtgggctgccctgtaccctgaacctcatgagcctctaagggaaaggaggaacaattaggacgtggcaatgagacctggcagggcagagtacaagcccagcacccagtgtcccagccttactgggtccttaccctgggccaaacagggagggctgatacctccttgctcttcctagatgcccacctcctacaatctcagcccacaagtcctctccaccctagggggcttgctgcatggcaataactcataatctgatttggaggtttgccctttacaggggcagattttctgctcagttcaacaatgaaatgaagaggaactccctctttctacagctcacttctatcagaggcccaggtgcctcagagccacattgagttgctttttctgggatgaggaagtagggttaaactccccagtttcctgagggaggctcctgacaggtgccctttgtcagaccctaccacagcctggataggcagccacattggtcctcgcccttgctcggcactccgtggtggtcctgcccttctccctgcatgcctgtgggtctgctctggtgtgtgaaggtcggtgggttaactgtgtgcctactgaacctggcaaataaacatcaccctgcaaagcctctggcc

SEQ ID NO: 1983 - protein, 333 aa, Homosapiens; identical to SEQ ID NO: 1981

SEQ ID NO: 1984 - DNA, 2941 bp, Homosapiens
ggtgccggcaagcggctggcgatgctggaggttcgctagccgaagcggctgcatctggcgccgcgtctgccccgcgtgctcggagcggattctgcccgccgtccccggagccctcggcgccccgctgagcccgcgatcacttcctccctgtgaccaaccggcgctgcaggttagagcctggcaatgccgtttgggtgtgtgactctgggcgacaagaagaactataaccagccatcggaggtgactgacagatatgatttgggacaggtcatcaagactgaggagttttgtgaaatcttccgggccaaggacaagacgacaggcaagctgcacacctgcaagaagttccagaagcgggacggccgcaaggtgcggaaagctgccaagaacgagataggcatcctcaagatggtgaagcatcccaacatcctacagctggtggatgtgtttgtgacccgcaaggagtactttatcttcctggagctggccacggggagggaggtgtttgactggatcctggaccagggctactactcggagcgagacacaagcaacgtggtacggcaagtcctggaggccgtggcctatttgcactcactcaagatcgtgcacaggaatctcaagctggagaacctggtttactacaaccggctgaagaactcgaagattgtcatcagtgacttccatctggctaagctagaaaatggcctcatcaaggagccctgtgggacccccgagtatctgggcaatccacctttctatgaggaggtggaagaagatgattatgagaaccatgataagaatctcttccgcaagatcctggctggtgactatgagtttgactctccatattgggatgatatttcgcaggcagccaaagacctggtcacaaggctgatggaggtggagcaagaccagcggatcactgcagaagaggccatctcccatgagtggatttctggcaatgctgcttctgataagaacatcaaggatggtgtctgtgcccagattgaaaagaactttgccagggccaagtggaagaaggctgtccgagtgaccaccctcatgaaacggctccgggcaccagagcagtccagcacggctgcagcccagtcggcctcagccacagacactgccacccccggggctgcaggtggggccacagctgcagctgcgagtggagctacctcagcccctgagggtgatgctgctcgtgctgcaaagagtgataatgtggcccccgcagaccgtagtgccaccccagccacagatggaagtgccaccccagccactgatggcagtgtcaccccagccaccgatggaagcatcactccagccactgatgggagtgtcaccccagccactgacaggagcgctactccagccactgatgggagagccacaccagccacagaagagagcactgtgcccaccacccaaagcagtgccatgctggccaccaaggcagctgccacccctgagccggctatggcccagccggacagcacagccccagagggcgccacaggccaggctccaccctctagtaaaggggaagaggctgctggttatgcccaggagtctcaaagggaggaggccagctgagtaggcagcctggtgagggggggcaggggatgggcaggagggtgggagagtggatgaggggcttctcactgtacatagagtcactggcatgatgccctcgctcccccatgcccccacatcccagtggggcataactaggggtcacgggagagcagtctcgtctcctgtgtgtatgtgtgtgagtggtgggcaggccagtggcagggccggccccagcccctgcatggattccttgtggcttttctgtcttttgctagcttcaccagtttctgttccttgtgggatgctgctctagggatactcagggggctcctgctctccttccccttcccttcttgcctcaccattcccctaggcaggccctgcaggtcccacactctcccaggccctaaacttgggcggccttgccctgagagctggtcctccagcgaggccctgtcagcggtcttaggctcctgcacatgaaggtgtgtgcctgtggtgtgtgggctgctctaggagcagatacaggctggtatagaggatgcagaaaggtagggcagtatgtttaagtccagacttggcacatggctagggatactgctcactagctgtggaggtcctcaggagtggagagaatgagtaggagggcagaagcttccatttttgtccttcctaagaccctgttatttgtgttatttcctgcctttccgagtcctgcagtgggctgccctgtaccctgaacctcatgagcctctaagggaaaggaggaacaattaggacgtggcaatgagacctggcagggcagagtacaagcccagcacccagtgtcccagccttactgggtccttaccctgggccaaacagggagggctgatacctccttgctcttcctagatgcccacctcctacaatctcagcccacaagtcctctccaccctagggggcttgctgcatggcaataactcataatctgatttggaggtttgccctttacaggggcagattttctgctcagttcaacaatgaaatgaagaggaactccctctttctacagctcacttctatcagaggcccaggtgcctcagagccacattgagttgctttttctgggatgaggaagtagggttaaactccccagtttcctgagggaggctcctgacaggtgccctttgtcagaccctaccacagcctggataggcagccacattggtcctcgcccttgctcggcactccgtggtggtcctgcccttctccctgcatgcctgtgggtctgctctggtgtgtgaaggtcggtgggttaactgtgtgcctactgaacctggcaaataaacatcaccctgcaaagcctctggcc

SEQ ID NO: 1985 - protein, 473 aa, Homosapiens
MPFGCVTLGDKKNYNQPSEVTDRYDLGQVIKTEEFCEIFRAKDKTTGKLHTCKKFQKRDGRKVRKAAKNEIGILKMVKHPNILQLVDVFVTRKEYFIFLELATGREVFDWILDQGYYSERDTSNVVRQVLEAVAYLHSLKIVHRNLKLENLVYYNRLKNSKIVISDFHLAKLENGLIKEPCGTPEYLGNPPFYEEVEEDDYENHDKNLFRKILAGDYEFDSPYWDDISQAAKDLVTRLMEVEQDQRITAEEAISHEWISGNAASDKNIKDGVCAQIEKNFARAKWKKAVRVTTLMKRLRAPEQSSTAAAQSASATDTATPGAAGGATAAAASGATSAPEGDAARAAKSDNVAPADRSATPATDGSATPATDGSVTPATDGSITPATDGSVTPATDRSATPATDGRATPATEESTVPTTQSSAMLATKAAATPEPAMAQPDSTAPEGATGQAPPSSKGEEAAGYAQESQREEAS

SEQ ID NO: 1986 - DNA, 2944 bp, Homosapiens
gggtgcgaatccggtgccggcaagcggctggcgatgctggaggttcgctagccgaagcggctgcatctggcgccgcgtctgccccgcgtgctcggagcggattctgcccgccgtccccggagccctcggcgccccgctgagcccgcgatcacttcctccctgtgaccaaccggcgctgcaggttagagcctggcaatgccgtttgggtgtgtgactctgggcgacaagaagaactataaccagccatcggaggtgactgacagatatgatttgggacaggtcatcaagactgaggagttttgtgaaatcttccgggccaaggacaagacgacaggcaagctgcacacctgcaagaagttccagaagcgggacggccgcaaggtgcggaaagctgccaagaacgagataggcatcctcaagatggtgaagcatcccaacatcctacagctggtggatgtgtttgtgacccgcaaggagtactttatcttcctggagctggccacggggagggaggtgtttgactggatcctggaccagggctactactcggagcgagacacaagcaacgtggtacggcaagtcctggaggccgtggcctatttgcactcactcaagatcgtgcacaggaatctcaagctggagaacctggtttactacaaccggctgaagaactcgaagattgtcatcagtgacttccatctggctaagctagaaaatggcctcatcaaggagccctgtgggacccccgagtatctggccccagaggtggtaggccggcagcggtatggacgccctgtggactgctgggccattggagtcatcatgtacatcctgctttcaggcaatccacctttctatgaggaggtggaagaagatgattatgagaaccatgataagaatctcttccgcaagatcctggctggtgactatgagtttgactctccatattgggatgatatttcgcaggcagccaaagacctggtcacaaggctgatggaggtggagcaagaccagcggatcactgcagaagaggccatctcccatgagtggatttctggcaatgctgcttctgataagaacatcaaggatggtgtctgtgcccagattgaaaagaactttgccagggccaagtggaagaaggctgtccgagtgaccaccctcatgaaacggctccgggcaccagagcagtccagcacggctgcagcccagtcggcctcagccacagacactgccacccccggggctgcagaccgtagtgccaccccagccacagatggaagtgccaccccagccactgatggcagtgtcaccccagccaccgatggaagcatcactccagccactgatgggagtgtcaccccagccactgacaggagcgctactccagccactgatgggagagccacaccagccacagaagagagcactgtgcccaccacccaaagcagtgccatgctggccaccaaggcagctgccacccctgagccggctatggcccagccggacagcacagccccagagggcgccacaggccaggctccaccctctagtaaaggggaagaggctgctggttatgcccaggagtctcaaagggaggaggccagctgagtaggcagcctggtgagggggggcaggggatgggcaggagggtgggagagtggatgaggggcttctcactgtacatagagtcactggcatgatgccctcgctcccccatgcccccacatcccagtggggcataactaggggtcacgggagagcagtctcgtctcctgtgtgtatgtgtgtgagtggtgggcaggccagtggcagggccggccccagcccctgcatggattccttgtggcttttctgtcttttgctagcttcaccagtttctgttccttgtgggatgctgctctagggatactcagggggctcctgctctccttccccttcccttcttgcctcaccattcccctaggcaggccctgcaggtcccacactctcccaggccctaaacttgggcggccttgccctgagagctggtcctccagcgaggccctgtcagcggtcttaggctcctgcacatgaaggtgtgtgcctgtggtgtgtgggctgctctaggagcagatacaggctggtatagaggatgcagaaaggtagggcagtatgtttaagtccagacttggcacatggctagggatactgctcactagctgtggaggtcctcaggagtggagagaatgagtaggagggcagaagcttccatttttgtccttcctaagaccctgttatttgtgttatttcctgcctttccgagtcctgcagtgggctgccctgtaccctgaacctcatgagcctctaagggaaaggaggaacaattaggacgtggcaatgagacctggcagggcagagtacaagcccagcacccagtgtcccagccttactgggtccttaccctgggccaaacagggagggctgatacctccttgctcttcctagatgcccacctcctacaatctcagcccacaagtcctctccaccctagggggcttgctgcatggcaataactcataatctgatttggaggtttgccctttacaggggcagattttctgctcagttcaacaatgaaatgaagaggaactccctctttctacagctcacttctatcagaggcccaggtgcctcagagccacattgagttgctttttctgggatgaggaagtagggttaaactccccagtttcctgagggaggctcctgacaggtgccctttgtcagaccctaccacagcctggataggcagccacattggtcctcgcccttgctcggcactccgtggtggtcctgcccttctccctgcatgcctgtgggtctgctctggtgtgtgaaggtcggtgggttaactgtgtgcctactgaacctggcaaataaacatcaccctgcaaagcctctggcc

SEQ ID NO: 1987 - protein, 470 aa, Homosapiens; identical to SEQ ID NO: 1971

SEQ ID NO: 1988 - DNA, 3037 bp, Homosapiens
gggtgcgaatccggtgccggcaagcggctggcgatgctggaggttcgctagccgaagcggctgcatctggcgccgcgtctgccccgcgtgctcggagcggattctgcccgccgtccccggagccctcggcgccccgctgagcccgcgatcacttcctccctgtgaccaaccggcgctgcaggttagagcctggcaatgccgtttgggtgtgtgactctgggcgacaagaagaactataaccagccatcggaggtgactgacagatatgatttgggacaggtcatcaagactgaggagttttgtgaaatcttccgggccaaggacaagacgacaggcaagctgcacacctgcaagaagttccagaagcgggacggccgcaaggtgcggaaagctgccaagaacgagataggcatcctcaagatggtgaagcatcccaacatcctacagctggtggatgtgtttgtgacccgcaaggagtactttatcttcctggagctggccacggggagggaggtgtttgactggatcctggaccagggctactactcggagcgagacacaagcaacgtggtacggcaagtcctggaggccgtggcctatttgcactcactcaagatcgtgcacaggaatctcaagctggagaacctggtttactacaaccggctgaagaactcgaagattgtcatcagtgacttccatctggctaagctagaaaatggcctcatcaaggagccctgtgggacccccgagtatctggccccagaggtggtaggccggcagcggtatggacgccctgtggactgctgggccattggagtcatcatgtacatcctgctttcaggcaatccacctttctatgaggaggtggaagaagatgattatgagaaccatgataagaatctcttccgcaagatcctggctggtgactatgagtttgactctccatattgggatgatatttcgcaggcagccaaagacctggtcacaaggctgatggaggtggagcaagaccagcggatcactgcagaagaggccatctcccatgagtggatttctggcaatgctgcttctgataagaacatcaaggatggtgtctgtgcccagattgaaaagaactttgccagggccaagtggaagaaggctgtccgagtgaccaccctcatgaaacggctccgggcaccagagcagtccagcacggctgcagcccagtcggcctcagccacagacactgccacccccggggctgcaggtggggccacagctgcagctgcgagtggagctacctcagcccctgagggtgatgctgctcgtgctgcaaagagtgataatgtggcccccgcagaccgtagtgccaccccagccacagatggaagtgccaccccagccactgatggcagtgtcaccccagccaccgatggaagcatcactccagccactgatgggagtgtcaccccagccactgacaggagcgctactccagccactgatgggagagccacaccagccacagaagagagcactgtgcccaccacccaaagcagtgccatgctggccaccaaggcagctgccacccctgagccggctatggcccagccggacagcacagccccagagggcgccacaggccaggctccaccctctagtaaaggggaagaggctgctggttatgcccaggagtctcaaagggaggaggccagctgagtaggcagcctggtgagggggggcaggggatgggcaggagggtgggagagtggatgaggggcttctcactgtacatagagtcactggcatgatgccctcgctcccccatgcccccacatcccagtggggcataactaggggtcacgggagagcagtctcgtctcctgtgtgtatgtgtgtgagtggtgggcaggccagtggcagggccggccccagcccctgcatggattccttgtggcttttctgtcttttgctagcttcaccagtttctgttccttgtgggatgctgctctagggatactcagggggctcctgctctccttccccttcccttcttgcctcaccattcccctaggcaggccctgcaggtcccacactctcccaggccctaaacttgggcggccttgccctgagagctggtcctccagcgaggccctgtcagcggtcttaggctcctgcacatgaaggtgtgtgcctgtggtgtgtgggctgctctaggagcagatacaggctggtatagaggatgcagaaaggtagggcagtatgtttaagtccagacttggcacatggctagggatactgctcactagctgtggaggtcctcaggagtggagagaatgagtaggagggcagaagcttccatttttgtccttcctaagaccctgttatttgtgttatttcctgcctttccgagtcctgcagtgggctgccctgtaccctgaacctcatgagcctctaagggaaaggaggaacaattaggacgtggcaatgagacctggcagggcagagtacaagcccagcacccagtgtcccagccttactgggtccttaccctgggccaaacagggagggctgatacctccttgctcttcctagatgcccacctcctacaatctcagcccacaagtcctctccaccctagggggcttgctgcatggcaataactcataatctgatttggaggtttgccctttacaggggcagattttctgctcagttcaacaatgaaatgaagaggaactccctctttctacagctcacttctatcagaggcccaggtgcctcagagccacattgagttgctttttctgggatgaggaagtagggttaaactccccagtttcctgagggaggctcctgacaggtgccctttgtcagaccctaccacagcctggataggcagccacattggtcctcgcccttgctcggcactccgtggtggtcctgcccttctccctgcatgcctgtgggtctgctctggtgtgtgaaggtcggtgggttaactgtgtgcctactgaacctggcaaataaacatcaccctgcaaagcctctggcc

SEQ ID NO: 1989 - protein, 501 aa, Homosapiens; identical to SEQ ID NO: 169

SEQ ID NO: 1990 - DNA, 2524 bp, Homosapiens
gggtgcgaatccggtgccggcaagcggctggcgatgctggaggttcgctagccgaagcggctgcatctggcgccgcgtctgccccgcgtgctcggagcggattctgcccgccgtccccggagccctcggcgccccgctgagcccgcgatcacttcctccctgtgaccaaccggcgctgcaggttagagcctggcaatgccgtttgggtgtgtgactctgggcgacaagaagaactataaccagccatcggaggtgactgacagatatgatttgggacaggtcatcaagactgaggagttttgtgaaatcttccgggccaaggacaagacgacaggcaagctgcacacctgcaagaagttccagaagcgggacggccgcaaggtgcggaaagctgccaagaacgagataggcatcctcaagatggtgaagcatcccaacatcctacagctggtggatgtgtttgtgacccgcaaggagtactttatcttcctggagctggccacggggagggaggtgtttgactggatcctggaccagggctactactcggagcgagacacaagcaacgtggtacggcaagtcctggaggccgtggcctatttgcactcactcaagatcgtgcacaggaatctcaagctggagaacctggtttactacaaccggctgaagaactcgaagattgtcatcagtgacttccatctggctaagctagaaaatggcctcatcaaggagccctgtgggacccccgagtatctggccccagaggtggtaggccggcagcggtatggacgccctgtggactgctgggccattggagtcatcatgtacatcctgctttcaggcaatccacctttctatgaggaggtggaagaagatgattatgagaaccatgataagaatctcttccgcaagatcctggctggtgactatgagtttgactctccatattgggatgatatttcgcaggcagccaaagacctggtcacaaggctgatggaggtggagcaagaccagcggatcactgcagaagaggccatctcccatgagtggatttctggcaatgctgcttctgataagaacatcaaggatggtgtctgtgcccagattgaaaagaactttgccagggccaagtggaagaaggctgtccgagtgaccaccctcatgaaacggctccgggcaccagagcagtccagcacggctgcagcccagtcggcctcagccacagacactgccacccccggggctgcagaccgtagtgccaccccagccacagatggaagtgccaccccagccactgatggcagtgtcaccccagccaccgatggaagcatcactccagccactgatgggagtgtcaccccagccactgacaggagcgctactccagccactgatgggagagccacaccagccacagaagagagcactgtgcccaccacccaaagcagtgccatgctggccaccaaggcagctgccacccctgagccggctatggcccagccggacagcacagccccagagggcgccacaggccaggctccaccctctagtaaaggggaagaggctgctggttatgcccaggagtctcaaagggaggaggccagctgagtaggcagcctggtgagggggggcaggggatgggcaggagggtgggagagtggatgaggggcttctcactgtacatagagtcactggcatgatgccctcgctcccccatgcccccacatcccagtggggcataactaggggtcacgggagagcagtctcgtctcctgtgtgtatgtgtgtgagtggtgggcaggccagtggcagggccggccccagcccctgcatggattccttgtggcttttctgtcttttgctagcttcaccagtttctgttccttgtgggatgctgccctgtaccctgaacctcatgagcctctaagggaaaggaggaacaattaggacgtggcaatgagacctggcagggcagagtacaagcccagcacccagtgtcccagccttactgggtccttaccctgggccaaacagggagggctgatacctccttgctcttcctagatgcccacctcctacaatctcagcccacaagtcctctccaccctagggggcttgctgcatggcaataactcataatctgatttggaggtttgccctttacaggggcagattttctgctcagttcaacaatgaaatgaagaggaactccctctttctacagctcacttctatcagaggcccaggtgcctcagagccacattgagttgctttttctgggatgaggaagtagggttaaactccccagtttcctgagggaggctcctgacaggtgccctttgtcagaccctaccacagcctggataggcagccacattggtcctcgcccttgctcggcactccgtggtggtcctgcccttctccctgcatgcctgtgggtctgctctggtgtgtgaaggtcggtgggttaactgtgtgcctactgaacctggcaaataaacatcaccctgcaaagcctctggcc

SEQ ID NO: 1991 - protein, 470 aa, Homosapiens; identical to SEQ ID NO: 1971

SEQ ID NO: 1992 - DNA, 1062 bp, Homosapiens
gatgctggaggttcgctagccgaagcggctgcatctggcgccgcgtctgccccgcgtgctcggagcggattctgcccgccgtccccggagccctcggcgccccgctgagcccgcgatcacttcctccctgtgaccaaccggcgctgcaggttagagcctggcaatgccgtttgggtgtgtgactctgggcgacaagaagaactataaccagccatcggaggtgactgacagatatgatttgggacaggtcatcaagactgaggagttttgtgaaatcttccgggccaaggacaagacgacaggcaagctgcacacctgcaagaagttccagaagcgggacggccgcaaggtgcggaaagctgccaagaacgagataggcatcctcaagatggtgaagcatcccaacatcctacagctggtggatgtgtttgtgacccgcaaggagtactttatcttcctggagctgtgagtgtgggtctggggacccaagattccccagcgcccagggctttcacctgtcccaccctctgcagctaaggaaaccccctttctggacccttggcgtcccaggtccctgtgccttgctcagccagctgcctggcgtaggcagctcacccaagtgctcctgccctacccctgattctgcccacgccaggctcaggggctggtgtccctcagggccacggggagggaggtgtttgactggatcctggaccagggctactactcggagcgagacacaagcaacgtggtacggcaagtcctggaggccgtggcctatttgcactcactcaagatcgtgcacaggaatctcaagctggagaacctggtttactacaaccggctgaagaactcgaagattgtcatcagtgacttccatctggctaagctagaaaatggcctcatcaaggagccctgtgggacccccgagtatctggccccagaggtggtaggccggcagcggtatggacgccctgtggactgctgggccattggagtcatcatgtacatcctgctttcaggcaatccacctttctatgaggaggtggaagaagatgatta

SEQ ID NO: 1993 - protein, 101 aa, Homosapiens
MPFGCVTLGDKKNYNQPSEVTDRYDLGQVIKTEEFCEIFRAKDKTTGKLHTCKKFQKRDGRKVRKAAKNEIGILKMVKHPNILQLVDVFVTRKEYFIFLEL

SEQ ID NO: 1994 - DNA, 1000 bp, Homosapiens
gggagaggaccatgtcctcagtgtcataccctcacgagttcagctgctgcagcacccagcccagggccagccacgatatgcagtgcctgaaaaccaagtgggatcctattcagtgctgaaccgtggtgtggtctatgactgggatgcactagaggtgctatggcagcacctgttctattgaaggctgggtgtgcagcccgagaagctgtctgtgctcgtagccgactcgcccatctcaccactcaccaaccgagaaaaggtggctgaaatactctttgagcatttccatgtcccagccatgcagacagtgcatcaggccctgctggcgctctatgcttatggacgtaccactgggctggtgctgggcagtggccatggcacttcctatgtggcacccatcctcactggggatctggccccacttgacacctaccggctggatgtggctggtgctgaccttactgactacttggcccagctgctgcagagaagtggccactcactgccccaggcaggactgatcaaccagatgaaagaggcctgctgctacgtggccatggatgtggcagctgagagggcccacacccaggcgcaggccgaggtggactttgtgcttccagacaagcaggttatcacgctggggcctgagcgcttctgctgccctgaggccctcttccaacccaatctgataggtctcaaccagctgggccttccacagctggccctcctaagcatcagccggttggaggccaagcagcaggagcagctactggccaatgtggtactggacggtggcagcaccctcatgagtggcttccctgagcgcctgagacaggagctgggccctggtgccactgtgctggggtctccccaccgtgcagttgctgcctggcttgggggctccatcatggcatcccggagctctttccagagcctgtggctcagctgccaggaatatgaggaagagggcccatgggctatctataagtaccagctgtga

SEQ ID NO: 1995 - protein, 233 aa, Homosapiens
MQTVHQALLALYAYGRTTGLVLGSGHGTSYVAPILTGDLAPLDTYRLDVAGADLTDYLAQLLQRSGHSLPQAGLINQMKEACCYVAMDVAAERAHTQAQAEVDFVLPDKQVITLGPERFCCPEALFQPNLIGLNQLGLPQLALLSISRLEAKQQEQLLANVVLDGGSTLMSGFPERLRQELGPGATVLGSPHRAVAAWLGGSIMASRSSFQSLWLSCQEYEEEGPWAIYKYQL

SEQ ID NO: 1996 - DNA, 1809 bp, Homosapiens
ttccagcttgggctacgactccagctctggatgttaccccaacccccactgcagttgaaactgacatccataccattgatcacctgactgacaccactgcagtcaccaagggcccatctcaagacctccttctcaggaagtgtggcaatcagtggtcaactgtcttggagtcttccaaaatagttgcatcttgccaggacaaagtgaatctccactctaaagaggaggctcccatcccaaagcctactctagaagagcgcccagaccatgcccaggaggaggaggttaccagaaggaaggtgcccagaaggaaggtgccaactgaggaggctgagaaccccatgaagaaacttccagtctctacctccaggccaggcagcccaatgccaggcccagagcccccagttatctccaagtcccagaggagtagccaggagatctgtagctctcagccacagaagcagctccccaatgtctgtgacaataccagctctaatgtgccactgtctgcctaccaagtaacctgccacaagcagtccccattccagtctccgaaggaagccatgcagatccccctctccagtgccccaacctgccagcttcaggaagttgtggaggaccgtgtgctggtatttgatggggctgctgtgccatgaccctgtgggctcacgggcagtgcttgtgggcctcatgcccagccacccatccatctatgtccctgaaaatatgctgtccacccagctgtcggccaaacccatcctgtctcctgacagcaatcactccagcttttggtctatcacacccatgctgtccagcccagtgccctgcagcctctcatctggcagctaccgagaggtagccctgattcccaaggaggccaggctcaacctggagtcatgggactcccctggtactgagacacccatcagggttgggatgctgactgggcctgttccactggggatgcccctccaatttgatgagaggatactgacccatgtccctaatactagctggtccaagcctgatggtgaaaaaaatgaacctagtcataccatctggatgctagacccttccatggcaccctctaggatgccagatgcctccatagtccagaccaagaaactgcagtggatgaactcagagcctgctgcaccagccgatacccaggaagtgcccagatccctcctccaggaagacataggcagccacgaagaggtcattcctgctcaccctgataaccctcaggccaaagatgctggacagactctcctcactgggcagatcctccttgctggacagccacccctacctgagcacccccttactgatcaaccccctctcactgggcagacaccccttgctaggaatccctctttatctaaagaaccccccatcaccaaagagcccactctttcaagatggtcccccaaccctggagaacctggccaggtctccacccaggaagatgagcccttaggcctgcctactcatgtaggggtatttcaggtgcccctgacccctgaggagacctgtatctatatgagtagagacaaggttggcatcagtaatactcagcactccatcacgcatcagcagcaacctggcaactcccctaggacccaggaggagcagcttcccttgatcacatttaccacacctggcactggacgcaaggtcttgcccatggccatggtggccactgagccccagagtgccccattcaagctgacagctgaggatcttacacacttatcatgctctgctgccactcactgggacccttccaggacatggcggccgtggtga

SEQ ID NO: 1997 - protein, 390 aa, Homosapiens
MGLLCHDPVGSRAVLVGLMPSHPSIYVPENMLSTQLSAKPILSPDSNHSSFWSITPMLSSPVPCSLSSGSYREVALIPKEARLNLESWDSPGTETPIRVGMLTGPVPLGMPLQFDERILTHVPNTSWSKPDGEKNEPSHTIWMLDPSMAPSRMPDASIVQTKKLQWMNSEPAAPADTQEVPRSLLQEDIGSHEEVIPAHPDNPQAKDAGQTLLTGQILLAGQPPLPEHPLTDQPPLTGQTPLARNPSLSKEPPITKEPTLSRWSPNPGEPGQVSTQEDEPLGLPTHVGVFQVPLTPEETCIYMSRDKVGISNTQHSITHQQQPGNSPRTQEEQLPLITFTTPGTGRKVLPMAMVATEPQSAPFKLTAEDLTHLSCSAATHWDPSRTWRPW

(The sequence listing continues in the following parts.)

1. A method of constructing a GeneMap for Crohn's disease comprising identifying at least two chromosomal loci associated with Crohn's disease, wherein said at least two chromosomal loci are selected from the genomic regions listed in Table 1.

2. The method of claim 1, wherein said population is a general population.

3. The method of claim 1, wherein said population is a founder population.

4. The method of claim 3, wherein said founder population is the population of Quebec.

5. The method of claim 1, wherein said at least two chromosomal regions are selected from the genes in Table 8, 9, 19, 20, 21, 22, 23, or 24.

6.-38. (canceled)

39. A method of detecting susceptibility to Crohn's disease comprising detecting at least one mutation or polymorphism in a nucleic acid molecule selected from any one of Tables 8, 9, 19, 20, 21, 22, 23, or 24 in a patient.

40.-48. (canceled)

49. The method of claim 39, wherein the mutation is selected from the group consisting of at least one of the SNPs from Tables 2, 3, 4, 5, 6, 7, 11, 12, 13, 14, 15, 16, 17 and 18, alone or in combination.

50.-51. (canceled)

52. A method of diagnosing susceptibility to Crohn's disease in an individual, comprising screening for an at-risk haplotype of at least one gene or gene region from Table 8, 9, 19, 20, 21, 22, 23 or 24, that is more frequently present in an individual susceptible to Crohn's disease compared to a control individual, wherein the presence of the at-risk haplotype is indicative of a susceptibility to Crohn's disease.

53. The method of claim 52, wherein the at-risk haplotype is indicative of increased risk for Crohn's disease.

54. (canceled)

55. The method of claim 52, wherein the at-risk haplotype is characterized by the presence of at least one single nucleotide polymorphism from Tables 2, 3, 4, 5, 6, 7, 11, 12, 13, 14, 15, 16, 17 and 18.

56. The method of claim 52, wherein screening for the presence of an at-risk haplotype in at least one gene from Table 8, 9, 19, 20, 21, 22, 23, or 24, comprises enzymatic amplification of nucleic acid from said individual or amplification using universal oligos on elongation/ligation products.

57.-59. (canceled)

60. The method of claim 52, wherein determining the presence of an at-risk haplotype is performed by electrophoretic analysis, restriction length polymorphism analysis, sequence analysis, or hybridization analysis.

61.-80. (canceled)

81. A method for predicting the efficacy of a drug for treating Crohn's disease in a human patient, comprising: a) obtaining a sample of cells from the patient; b) obtaining a set of genotypes from the sample, wherein the set of genotypes comprises genotypes of one or more polymorphic loci from Tables 2, 3, 4, 5, 6, 7, 10, 11, 12, 13, 14, 15, 16, 17 and 18; and c) comparing the set of genotypes of the sample with a set of genotypes associated with efficacy of the drug, wherein similarity between the set of genotypes of the sample and the set of genotypes associated with efficacy of the drug predicts the efficacy of the drug for treating Crohn's disease in the patient.

82.-84. (canceled)

85. The method of claim 81, wherein the set of genotypes from the sample comprises genotypes of at least two of the polymorphic loci listed in Tables 2, 3, 4, 5, 6, 7, 10, 11, 12, 13, 14, 15, 16, 17 and 18.

86. The method of claim 81, wherein the set of genotypes from the sample is obtained by hybridization to allele-specific oligonucleotides complementary to the polymorphic loci from Tables 2, 3, 4, 5, 6, 7, 10, 11, 12, 13, 14, 15, 16, 17 and 18, wherein said allele-specific oligonucleotides are contained on a microarray.

87. The method of claim 86, wherein the oligonucleotides comprise nucleic acid molecules at least 95% identical to SEQ ID from Tables 2, 3, 4, 5, 6, 7, 8, 9, 10, 11, 12, 13, 14, 15, 16, 17 and 18.

88.-137. (canceled)

138. A method of assessing a patient's risk of having or developing Crohn's disease, comprising (a) determining a genotype for at least one polymorphic locus from Tables 2, 3, 4, 5, 6, 7, 10, 11, 12, 13, 14, 15, 16, 17 or 18 in a patient; (b) comparing said genotype of (a) to a genotype for at least one polymorphic locus from Tables 2, 3, 4, 5, 6, 7, 10, 11, 12, 13, 14, 15, 16, 17 or 18 that is associated with Crohn's disease; and (c) assessing the patient's risk of having or developing Crohn's disease, wherein said patient has a higher risk of having or developing Crohn's disease if the genotype for at least one polymorphic locus from Tables 2, 3, 4, 5, 6, 7, 10, 11, 12, 13, 14, 15, 16, 17 or 18 in said patient is the same as said genotype for at least one polymorphic locus from Tables 2, 3, 4, 5, 6, 7, 10, 11, 12, 13, 14, 15, 16, 17 or 18 that is associated with Crohn's disease.

139.-140. (canceled)
